United States Patent Application Publication US 2005/0244851 A1 - sequence listing, part 10

SEQ ID NO: 359051 - DNA, 25 bp, Homo sapien
gacctgagtgtattctgggtggtaa

SEQ ID NO: 359052 - DNA, 25 bp, Homo sapien
ccaggacctgagtgtattctgggtg

SEQ ID NO: 359053 - DNA, 25 bp, Homo sapien
tgaggggctgcgggcaaggcggctg

SEQ ID NO: 359054 - DNA, 25 bp, Homo sapien
ctgaggggctgcgggcaaggcggct

SEQ ID NO: 359055 - DNA, 25 bp, Homo sapien
ctgtgagcgaggacaggggcggcac

SEQ ID NO: 359056 - DNA, 25 bp, Homo sapien
agcgctggcgtccttgtctgcccac

SEQ ID NO: 359057 - DNA, 25 bp, Homo sapien
gcagcgctggcgtccttgtctgccc

SEQ ID NO: 359058 - DNA, 25 bp, Homo sapien
cagcgctggcgtccttgtctgccca

SEQ ID NO: 359059 - DNA, 25 bp, Homo sapien
gaggtaaaagacgcctccttccgca

SEQ ID NO: 359060 - DNA, 25 bp, Homo sapien
tccttccgcaccctgccgggctgtc

SEQ ID NO: 359061 - DNA, 25 bp, Homo sapien
ctgtgaccacactgctgccgaccca

SEQ ID NO: 359062 - DNA, 25 bp, Homo sapien
gacccaagtcctcgcaaggccctgc

SEQ ID NO: 359063 - DNA, 25 bp, Homo sapien
ttgaggccgtatttgcaggcaactt

SEQ ID NO: 359064 - DNA, 25 bp, Homo sapien
ggccgtatttgcaggcaacttcaga

SEQ ID NO: 359065 - DNA, 25 bp, Homo sapien
gctgcggctctttgaggccgtattt

SEQ ID NO: 359066 - DNA, 25 bp, Homo sapien
tgtggctgcggctctttgaggccgt

SEQ ID NO: 359067 - DNA, 25 bp, Homo sapien
gggcttggccctcgcagacgctgac

SEQ ID NO: 359068 - DNA, 25 bp, Homo sapien
agagggcttggccctcgcagacgct

SEQ ID NO: 359069 - DNA, 25 bp, Homo sapien
aatgcagggcgtggggacacaacca

SEQ ID NO: 359070 - DNA, 25 bp, Homo sapien
ccaactccaccaatgcagggcgtgg

SEQ ID NO: 359071 - DNA, 25 bp, Homo sapien
caaaggcagtcctctcagactgggc

SEQ ID NO: 359072 - DNA, 25 bp, Homo sapien
acacaaaggcagtcctctcagactg

SEQ ID NO: 359073 - DNA, 25 bp, Homo sapien
tcctctcagactgggcagaaggaag

SEQ ID NO: 359074 - DNA, 25 bp, Homo sapien
ggcagtcctctcagactgggcagaa

SEQ ID NO: 359075 - DNA, 25 bp, Homo sapien
caggtcacaccaactcgaagggtcc

SEQ ID NO: 359076 - DNA, 25 bp, Homo sapien
gcttgcctgactcaatggcccggga

SEQ ID NO: 359077 - DNA, 25 bp, Homo sapien
acaggtccgagtgggtgcccagctc

SEQ ID NO: 359078 - DNA, 25 bp, Homo sapien
gcagtggtgctttccaaagtaggcc

SEQ ID NO: 359079 - DNA, 25 bp, Homo sapien
tctccaacagctgcaatcgagggtg

SEQ ID NO: 359080 - DNA, 25 bp, Homo sapien
gggacacagttcagcgcatggcaca

SEQ ID NO: 359081 - DNA, 25 bp, Homo sapien
caccggtcctattggatgagggcct

SEQ ID NO: 359082 - DNA, 25 bp, Homo sapien
tatgtcctcacacggttgtcccaca

SEQ ID NO: 359083 - DNA, 25 bp, Homo sapien
gctgaagatagcaggatcctcaagg

SEQ ID NO: 359084 - DNA, 25 bp, Homo sapien
aatcttgggacccatgatcaagcgg

SEQ ID NO: 359085 - DNA, 25 bp, Homo sapien
tcaagcggtgggtgttgctaatgct

SEQ ID NO: 359086 - DNA, 25 bp, Homo sapien
cctcgagccgaccaaaccagaatct

SEQ ID NO: 359087 - DNA, 25 bp, Homo sapien
ggctttcattagaacacttggaacg

SEQ ID NO: 359088 - DNA, 25 bp, Homo sapien
caaagggagcgcagaggctttcatt

SEQ ID NO: 359089 - DNA, 25 bp, Homo sapien
gaaatgtcaaaatgagcagcgtccc

SEQ ID NO: 359090 - DNA, 25 bp, Homo sapien
ggaacgttattcagatgaaatgtca

SEQ ID NO: 359091 - DNA, 25 bp, Homo sapien
ggactccatgaacatgagcagcaga

SEQ ID NO: 359092 - DNA, 25 bp, Homo sapien
ggtggacgtgggactccatgaacat

SEQ ID NO: 359093 - DNA, 25 bp, Homo sapien
cctggtggacgtgggactccatgaa

SEQ ID NO: 359094 - DNA, 25 bp, Homo sapien
gacgtgggactccatgaacatgagc

SEQ ID NO: 359095 - DNA, 25 bp, Homo sapien
aagcccaccaccaggtgtgcccgcc

SEQ ID NO: 359096 - DNA, 25 bp, Homo sapien
ccaccaccaggtgtgcccgccaggg

SEQ ID NO: 359097 - DNA, 25 bp, Homo sapien
gcccaccaccaggtgtgcccgccag

SEQ ID NO: 359098 - DNA, 25 bp, Homo sapien
caagcccaccaccaggtgtgcccgc

SEQ ID NO: 359099 - DNA, 25 bp, Homo sapien
cctttgaggtccatagaacactttc

SEQ ID NO: 359100 - DNA, 25 bp, Homo sapien
caaacattttaaggtgtctcttgcc

SEQ ID NO: 359101 - DNA, 25 bp, Homo sapien
tttaaggtgtctcttgccctttgag

SEQ ID NO: 359102 - DNA, 25 bp, Homo sapien
cctcctacagccatccagcaaacat

SEQ ID NO: 359103 - DNA, 25 bp, Homo sapien
ccagcaacaacagctagagtgaggt

SEQ ID NO: 359104 - DNA, 25 bp, Homo sapien
acgaagcttcagtgacttccttggg

SEQ ID NO: 359105 - DNA, 25 bp, Homo sapien
tctgaaggctctggatgtctgagac

SEQ ID NO: 359106 - DNA, 25 bp, Homo sapien
gctagaggaccccttggtgatgccc

SEQ ID NO: 359107 - DNA, 25 bp, Homo sapien
ccttcttaagggctcggcagagagc

SEQ ID NO: 359108 - DNA, 25 bp, Homo sapien
agatcaccctcatgcacgggccagt

SEQ ID NO: 359109 - DNA, 25 bp, Homo sapien
gcacgggccagtccaaggtttccag

SEQ ID NO: 359110 - DNA, 25 bp, Homo sapien
ttaagggctcggcagagagcagcca

SEQ ID NO: 359111 - DNA, 25 bp, Homo sapien
gcaactaagccgcatcgtcctgggc

SEQ ID NO: 359112 - DNA, 25 bp, Homo sapien
ggacagacctgtgtccaaaagcccc

SEQ ID NO: 359113 - DNA, 25 bp, Homo sapien
acctgtggggacaagccaggtagac

SEQ ID NO: 359114 - DNA, 25 bp, Homo sapien
taagccgcatcgtcctgggcacctg

SEQ ID NO: 359115 - DNA, 25 bp, Homo sapien
catctctctgtgtggtgtatcgagg

SEQ ID NO: 359116 - DNA, 25 bp, Homo sapien
ttaacaagggggtcatgctctccac

SEQ ID NO: 359117 - DNA, 25 bp, Homo sapien
ggcatctcatcttggtggtatctcc

SEQ ID NO: 359118 - DNA, 25 bp, Homo sapien
cataaaggcagacgtggtttaacaa

SEQ ID NO: 359119 - DNA, 25 bp, Homo sapien
gagccagccccagtgtcgcttggaa

SEQ ID NO: 359120 - DNA, 25 bp, Homo sapien
ccacagggtctccagacggctcaga

SEQ ID NO: 359121 - DNA, 25 bp, Homo sapien
agggtctccagacggctcagatggg

SEQ ID NO: 359122 - DNA, 25 bp, Homo sapien
gggggacggcgtcgcctgccagcca

SEQ ID NO: 359123 - DNA, 25 bp, Homo sapien
gcaaacgcagcttccaatccccttt

SEQ ID NO: 359124 - DNA, 25 bp, Homo sapien
cttcagaagtgaaaatggacctcca

SEQ ID NO: 359125 - DNA, 25 bp, Homo sapien
gaagtgaaaatggacctccagcccc

SEQ ID NO: 359126 - DNA, 25 bp, Homo sapien
ccttgtgggtggtcctattcttctg

SEQ ID NO: 359127 - DNA, 25 bp, Homo sapien
ctctcggttggatgagctatgggct

SEQ ID NO: 359128 - DNA, 25 bp, Homo sapien
gctatgggctggcggtttgttctta

SEQ ID NO: 359129 - DNA, 25 bp, Homo sapien
atgggctggcggtttgttcttaggc

SEQ ID NO: 359130 - DNA, 25 bp, Homo sapien
cgtgcagttgtagctctcggttgga

SEQ ID NO: 359131 - DNA, 25 bp, Homo sapien
ggactgaagtcctaacaagtgacac

SEQ ID NO: 359132 - DNA, 25 bp, Homo sapien
cgtgctatgcacatccaaccataaa

SEQ ID NO: 359133 - DNA, 25 bp, Homo sapien
gacacatcgtgggtcaaccttcaaa

SEQ ID NO: 359134 - DNA, 25 bp, Homo sapien
gaaaatggataaacataacgtgcta

SEQ ID NO: 359135 - DNA, 25 bp, Homo sapien
gcctatgatgtggtggacttgaggg

SEQ ID NO: 359136 - DNA, 25 bp, Homo sapien
tggacttgaggggcctctccgtgcc

SEQ ID NO: 359137 - DNA, 25 bp, Homo sapien
tcgcctatgatgtggtggacttgag

SEQ ID NO: 359138 - DNA, 25 bp, Homo sapien
gacttgaggggcctctccgtgccca

SEQ ID NO: 359139 - DNA, 25 bp, Homo sapien
gcttggattgagaagccggcagccc

SEQ ID NO: 359140 - DNA, 25 bp, Homo sapien
tggacgctgcttggattgagaagcc

SEQ ID NO: 359141 - DNA, 25 bp, Homo sapien
ccccggccttggctcgtgccttcct

SEQ ID NO: 359142 - DNA, 25 bp, Homo sapien
ccctgggaactgtctcgtgggcttg

SEQ ID NO: 359143 - DNA, 25 bp, Homo sapien
atcaggcaaaaatcctttggccaag

SEQ ID NO: 359144 - DNA, 25 bp, Homo sapien
ggtcctctgtgcttcgatagagctg

SEQ ID NO: 359145 - DNA, 25 bp, Homo sapien
tctgtgcttcgatagagctgggacg

SEQ ID NO: 359146 - DNA, 25 bp, Homo sapien
ggctgacactctgccaggtcctctg

SEQ ID NO: 359147 - DNA, 25 bp, Homo sapien
aacgcctgggcagttgacagtgacc

SEQ ID NO: 359148 - DNA, 25 bp, Homo sapien
gaccagcaaacgagtgaatggagga

SEQ ID NO: 359149 - DNA, 25 bp, Homo sapien
tggccggttcacagcctcactggag

SEQ ID NO: 359150 - DNA, 25 bp, Homo sapien
gaaaaagggaatgctcgagtgaatg

SEQ ID NO: 359151 - DNA, 25 bp, Homo sapien
ctgtgttcctgtggccgctcccaga

SEQ ID NO: 359152 - DNA, 25 bp, Homo sapien
gatgagacggagatttctagacaga

SEQ ID NO: 359153 - DNA, 25 bp, Homo sapien
tgacgggatttctttcctaactgac

SEQ ID NO: 359154 - DNA, 25 bp, Homo sapien
agtaccgaggccagcttctaaagaa

SEQ ID NO: 359155 - DNA, 25 bp, Homo sapien
gaatgatagaatgcccatgtcggtg

SEQ ID NO: 359156 - DNA, 25 bp, Homo sapien
cacaggagaggtatgctcttaataa

SEQ ID NO: 359157 - DNA, 25 bp, Homo sapien
tatgtcaaatgatagaaaactttca

SEQ ID NO: 359158 - DNA, 25 bp, Homo sapien
actttcataaagagcagagccatgt

SEQ ID NO: 359159 - DNA, 25 bp, Homo sapien
agtgtgagaatcgtggaggcgaaac

SEQ ID NO: 359160 - DNA, 25 bp, Homo sapien
gtgtgagaatcgtggaggcgaaact

SEQ ID NO: 359161 - DNA, 25 bp, Homo sapien
tgatgttgaggttttggcggttaac

SEQ ID NO: 359162 - DNA, 25 bp, Homo sapien
ttgatgttgaggttttggcggttaa

SEQ ID NO: 359163 - DNA, 25 bp, Homo sapien
cttgatgttgaggttttggcggtta

SEQ ID NO: 359164 - DNA, 25 bp, Homo sapien
ctgctctgagcccgcctccccattt

SEQ ID NO: 359165 - DNA, 25 bp, Homo sapien
tgagcccgcctccccatttccttac

SEQ ID NO: 359166 - DNA, 25 bp, Homo sapien
gggcagaaagggtggctgctctgag

SEQ ID NO: 359167 - DNA, 25 bp, Homo sapien
ggggcagaaagggtggctgctctga

SEQ ID NO: 359168 - DNA, 25 bp, Homo sapien
gctaatgggtgcaaaatgcttggac

SEQ ID NO: 359169 - DNA, 25 bp, Homo sapien
caaaatgcttggacgaatggtcaac

SEQ ID NO: 359170 - DNA, 25 bp, Homo sapien
tgggtgcaaaatgcttggacgaatg

SEQ ID NO: 359171 - DNA, 25 bp, Homo sapien
tgcaaaatgcttggacgaatggtca

SEQ ID NO: 359172 - DNA, 25 bp, Homo sapien
tgtttgtgatagtgggctccattcc

SEQ ID NO: 359173 - DNA, 25 bp, Homo sapien
cttgtttgtgatagtgggctccatt

SEQ ID NO: 359174 - DNA, 25 bp, Homo sapien
ttgtttgtgatagtgggctccattc

SEQ ID NO: 359175 - DNA, 25 bp, Homo sapien
gtttgtgatagtgggctccattccc

SEQ ID NO: 359176 - DNA, 25 bp, Homo sapien
tgtccggcctgtcatcagaaactgg

SEQ ID NO: 359177 - DNA, 25 bp, Homo sapien
caatcacagtcagatctgcaagtca

SEQ ID NO: 359178 - DNA, 25 bp, Homo sapien
cagtcagatctgcaagtcaagagga

SEQ ID NO: 359179 - DNA, 25 bp, Homo sapien
gagagtcgaggtagcaggtgttcca

SEQ ID NO: 359180 - DNA, 25 bp, Homo sapien
ttgattcctgatgttcggtttcccc

SEQ ID NO: 359181 - DNA, 25 bp, Homo sapien
tgtgccccactcctagccacgatca

SEQ ID NO: 359182 - DNA, 25 bp, Homo sapien
tgagcggggatccttagctccattg

SEQ ID NO: 359183 - DNA, 25 bp, Homo sapien
tagccacgatcagtcatgtttatga

SEQ ID NO: 359184 - DNA, 25 bp, Homo sapien
gcccactgagttacaaggggcgtgg

SEQ ID NO: 359185 - DNA, 25 bp, Homo sapien
ctggcccactgagttacaaggggcg

SEQ ID NO: 359186 - DNA, 25 bp, Homo sapien
ccactgagttacaaggggcgtggcc

SEQ ID NO: 359187 - DNA, 25 bp, Homo sapien
cactgagttacaaggggcgtggcca

SEQ ID NO: 359188 - DNA, 25 bp, Homo sapien
gggtgtcgaaaccaggacttccaga

SEQ ID NO: 359189 - DNA, 25 bp, Homo sapien
aagatgagaagcctactcgcgagcc

SEQ ID NO: 359190 - DNA, 25 bp, Homo sapien
ggaagcagcttccacggatgaacaa

SEQ ID NO: 359191 - DNA, 25 bp, Homo sapien
cattggctttgactgcagcgacagg

SEQ ID NO: 359192 - DNA, 25 bp, Homo sapien
aattctgacaactttgacacaaagg

SEQ ID NO: 359193 - DNA, 25 bp, Homo sapien
gccaattctgacaactttgacacaa

SEQ ID NO: 359194 - DNA, 25 bp, Homo sapien
ccagccaattctgacaactttgaca

SEQ ID NO: 359195 - DNA, 25 bp, Homo sapien
ttctgacaactttgacacaaaggag

SEQ ID NO: 359196 - DNA, 25 bp, Homo sapien
ggtgtattaagaccagggacctgct

SEQ ID NO: 359197 - DNA, 25 bp, Homo sapien
gaaaccgattggtgttcaagacctg

SEQ ID NO: 359198 - DNA, 25 bp, Homo sapien
ctgtgggaccaaggaagacatgaac

SEQ ID NO: 359199 - DNA, 25 bp, Homo sapien
cacagaggcacctattgagagacta

SEQ ID NO: 359200 - DNA, 25 bp, Homo sapien
gacggcccggatggcagagactgtg

SEQ ID NO: 359201 - DNA, 25 bp, Homo sapien
caggcactccccatggctttccgtg

SEQ ID NO: 359202 - DNA, 25 bp, Homo sapien
gggcagtggtgtcacccttctcgcc

SEQ ID NO: 359203 - DNA, 25 bp, Homo sapien
cttctcgcccatctcagggaaggga

SEQ ID NO: 359204 - DNA, 25 bp, Homo sapien
gcagaaggcacttttgggtcggctt

SEQ ID NO: 359205 - DNA, 25 bp, Homo sapien
gaaggcacttttgggtcggctttga

SEQ ID NO: 359206 - DNA, 25 bp, Homo sapien
tttgagggaacaccaggcttcgcca

SEQ ID NO: 359207 - DNA, 25 bp, Homo sapien
ttgggtcggctttgagggaacacca

SEQ ID NO: 359208 - DNA, 25 bp, Homo sapien
tccgggtttctgtgtcaatctctcc

SEQ ID NO: 359209 - DNA, 25 bp, Homo sapien
tcagggcggccagaatccgggtttc

SEQ ID NO: 359210 - DNA, 25 bp, Homo sapien
aaatgttgtaagatgttggccgcac

SEQ ID NO: 359211 - DNA, 25 bp, Homo sapien
aatctctccgttgtaaaatgttgta

SEQ ID NO: 359212 - DNA, 25 bp, Homo sapien
gcggttctgctttgctgcgtttaca

SEQ ID NO: 359213 - DNA, 25 bp, Homo sapien
tttgctgcgtttacaccagtggcca

SEQ ID NO: 359214 - DNA, 25 bp, Homo sapien
catttcatcccatccggatccctgg

SEQ ID NO: 359215 - DNA, 25 bp, Homo sapien
catccggatccctggcggttctgct

SEQ ID NO: 359216 - DNA, 25 bp, Homo sapien
gagtttttactgacacgtccctgtg

SEQ ID NO: 359217 - DNA, 25 bp, Homo sapien
caggcatctgagtcggcgtttaccc

SEQ ID NO: 359218 - DNA, 25 bp, Homo sapien
gaatgtaaacccagtgggctctgcc

SEQ ID NO: 359219 - DNA, 25 bp, Homo sapien
gcagagtgtcgtgtgaggcctcaca

SEQ ID NO: 359220 - DNA, 25 bp, Homo sapien
taccaaccctgtggagctctctgaa

SEQ ID NO: 359221 - DNA, 25 bp, Homo sapien
cgggtgcataccaaccctgtggagc

SEQ ID NO: 359222 - DNA, 25 bp, Homo sapien
cggaatgggtaatgtgccccaggca

SEQ ID NO: 359223 - DNA, 25 bp, Homo sapien
tctctgaagctactcggaatgggta

SEQ ID NO: 359224 - DNA, 25 bp, Homo sapien
gcaaggcagtccctaagctctcagt

SEQ ID NO: 359225 - DNA, 25 bp, Homo sapien
aaagatgtcagaggtgatctgcatt

SEQ ID NO: 359226 - DNA, 25 bp, Homo sapien
tgcattcagacatcttataaattgg

SEQ ID NO: 359227 - DNA, 25 bp, Homo sapien
tgtgtcctagccttgttcccaaaga

SEQ ID NO: 359228 - DNA, 25 bp, Homo sapien
gcgccaatacccattgtgttccagg

SEQ ID NO: 359229 - DNA, 25 bp, Homo sapien
tcatgtggggatactcttgctgcac

SEQ ID NO: 359230 - DNA, 25 bp, Homo sapien
acagagatgccccagttacgctgga

SEQ ID NO: 359231 - DNA, 25 bp, Homo sapien
ctggaccaaacccaactgccaccag

SEQ ID NO: 359232 - DNA, 25 bp, Homo sapien
ctgggcatcgctgggtgatgaattc

SEQ ID NO: 359233 - DNA, 25 bp, Homo sapien
atcgctgggtgatgaattctagggc

SEQ ID NO: 359234 - DNA, 25 bp, Homo sapien
gggtggacatcacaatggtgcagtc

SEQ ID NO: 359235 - DNA, 25 bp, Homo sapien
ctctcagggtggacatcacaatggt

SEQ ID NO: 359236 - DNA, 25 bp, Homo sapien
gtgcacaagatcagcgtccaccctg

SEQ ID NO: 359237 - DNA, 25 bp, Homo sapien
gcaggtcggtgcacaagatcagcgt

SEQ ID NO: 359238 - DNA, 25 bp, Homo sapien
tcggtagtgccagtatggtaaaggc

SEQ ID NO: 359239 - DNA, 25 bp, Homo sapien
agatgtctgtaaggtcggtagtgcc

SEQ ID NO: 359240 - DNA, 25 bp, Homo sapien
tgtgggcaggcctctgacaaggtcc

SEQ ID NO: 359241 - DNA, 25 bp, Homo sapien
gacaaggtcctgatgcaggtcacag

SEQ ID NO: 359242 - DNA, 25 bp, Homo sapien
gcttgtttggacttcgctgccgcca

SEQ ID NO: 359243 - DNA, 25 bp, Homo sapien
acaaatggccttgcgcatgccgtct

SEQ ID NO: 359244 - DNA, 25 bp, Homo sapien
gagggtgctctggaatcagttgtct

SEQ ID NO: 359245 - DNA, 25 bp, Homo sapien
gaggttgtgcgtccctggagggtgc

SEQ ID NO: 359246 - DNA, 25 bp, Homo sapien
aggaacttgctggagtctgacggcc

SEQ ID NO: 359247 - DNA, 25 bp, Homo sapien
tcagttgtctatactggaggaggaa

SEQ ID NO: 359248 - DNA, 25 bp, Homo sapien
atgcagagccgggagttacaggagc

SEQ ID NO: 359249 - DNA, 25 bp, Homo sapien
cagagccgggagttacaggagccat

SEQ ID NO: 359250 - DNA, 25 bp, Homo sapien
aaggtaaaagaaaatgcagagccgg

SEQ ID NO: 359251 - DNA, 25 bp, Homo sapien
agaaaatgcagagccgggagttaca

SEQ ID NO: 359252 - DNA, 25 bp, Homo sapien
tggcttaataagtgggaaggttgaa

SEQ ID NO: 359253 - DNA, 25 bp, Homo sapien
ttactcatattgactgatggcatca

SEQ ID NO: 359254 - DNA, 25 bp, Homo sapien
tggcatcaacacagatgcggcattg

SEQ ID NO: 359255 - DNA, 25 bp, Homo sapien
cagatgcggcattgatggcttaata

SEQ ID NO: 359256 - DNA, 25 bp, Homo sapien
ctcattgcagatggcagggtggagg

SEQ ID NO: 359257 - DNA, 25 bp, Homo sapien
tgcagatggcagggtggagggggcc

SEQ ID NO: 359258 - DNA, 25 bp, Homo sapien
agatggcagggtggagggggcccat

SEQ ID NO: 359259 - DNA, 25 bp, Homo sapien
cctcattgcagatggcagggtggag

SEQ ID NO: 359260 - DNA, 25 bp, Homo sapien
actgagtccaagtttctcaggtggg

SEQ ID NO: 359261 - DNA, 25 bp, Homo sapien
ccctgtggctggctgaactgagtcc

SEQ ID NO: 359262 - DNA, 25 bp, Homo sapien
ttgggtacctcgggccctgtggctg

SEQ ID NO: 359263 - DNA, 25 bp, Homo sapien
gagtccaagtttctcaggtgggaat

SEQ ID NO: 359264 - DNA, 25 bp, Homo sapien
cagcaataggcactggtgcgctggc

SEQ ID NO: 359265 - DNA, 25 bp, Homo sapien
caataggcactggtgcgctggcagg

SEQ ID NO: 359266 - DNA, 25 bp, Homo sapien
agcaataggcactggtgcgctggca

SEQ ID NO: 359267 - DNA, 25 bp, Homo sapien
ataggcactggtgcgctggcaggcc

SEQ ID NO: 359268 - DNA, 25 bp, Homo sapien
cctggatacagtacatacacctgca

SEQ ID NO: 359269 - DNA, 25 bp, Homo sapien
gatacagtacatacacctgcataca

SEQ ID NO: 359270 - DNA, 25 bp, Homo sapien
tacacacctggatacagtacataca

SEQ ID NO: 359271 - DNA, 25 bp, Homo sapien
cacatacacacctggatacagtaca

SEQ ID NO: 359272 - DNA, 25 bp, Homo sapien
atacacctacatacaactacacaca

SEQ ID NO: 359273 - DNA, 25 bp, Homo sapien
gcttacttatatctacacacaccta

SEQ ID NO: 359274 - DNA, 25 bp, Homo sapien
cccctaggtatacctacacatatgt

SEQ ID NO: 359275 - DNA, 25 bp, Homo sapien
catatgtaggtacacctacacacac

SEQ ID NO: 359276 - DNA, 25 bp, Homo sapien
gccgtggctcgctgctcagtgcctg

SEQ ID NO: 359277 - DNA, 25 bp, Homo sapien
gcaggaaagataaagcctgagctca

SEQ ID NO: 359278 - DNA, 25 bp, Homo sapien
ttccccagacgtttgtctccagcag

SEQ ID NO: 359279 - DNA, 25 bp, Homo sapien
agctcatcactgaggccgtggctcg

SEQ ID NO: 359280 - DNA, 25 bp, Homo sapien
ggctttaactgtcactttgccatag

SEQ ID NO: 359281 - DNA, 25 bp, Homo sapien
taactgtcactttgccatagtccat

SEQ ID NO: 359282 - DNA, 25 bp, Homo sapien
gttggctttaactgtcactttgcca

SEQ ID NO: 359283 - DNA, 25 bp, Homo sapien
tgatgcagggctgttggctttaact

SEQ ID NO: 359284 - DNA, 25 bp, Homo sapien
gacatgggaacctttatgaaaatga

SEQ ID NO: 359285 - DNA, 25 bp, Homo sapien
tgacatgggaacctttatgaaaatg

SEQ ID NO: 359286 - DNA, 25 bp, Homo sapien
cctgacatgggaacctttatgaaaa

SEQ ID NO: 359287 - DNA, 25 bp, Homo sapien
cacctgacatgggaacctttatgaa

SEQ ID NO: 359288 - DNA, 25 bp, Homo sapien
ggatgatctcatggcctgctccaga

SEQ ID NO: 359289 - DNA, 25 bp, Homo sapien
ggaaggcgcctctcataggatgatc

SEQ ID NO: 359290 - DNA, 25 bp, Homo sapien
tactagaagttgcacatgacatggg

SEQ ID NO: 359291 - DNA, 25 bp, Homo sapien
ttcagagatgagtttgccccttccc

SEQ ID NO: 359292 - DNA, 25 bp, Homo sapien
ctgagcaggcagttcgtctagagca

SEQ ID NO: 359293 - DNA, 25 bp, Homo sapien
tacaaaatgtccgtggctgtgttcc

SEQ ID NO: 359294 - DNA, 25 bp, Homo sapien
aagtgattcggctttagcagcttcc

SEQ ID NO: 359295 - DNA, 25 bp, Homo sapien
ccagatctaagccatgggccgtagt

SEQ ID NO: 359296 - DNA, 25 bp, Homo sapien
tgtgggatagtccatcctcagagct

SEQ ID NO: 359297 - DNA, 25 bp, Homo sapien
gggtcccaagcccaaatgtgggata

SEQ ID NO: 359298 - DNA, 25 bp, Homo sapien
taaccccatctcagcaagaatagcc

SEQ ID NO: 359299 - DNA, 25 bp, Homo sapien
tgagcagagccatacggccagaaga

SEQ ID NO: 359300 - DNA, 25 bp, Homo sapien
aggccagggtcacagagggagggcc

SEQ ID NO: 359301 - DNA, 25 bp, Homo sapien
caaggccagggtcacagagggaggg

SEQ ID NO: 359302 - DNA, 25 bp, Homo sapien
aaggccagggtcacagagggagggc

SEQ ID NO: 359303 - DNA, 25 bp, Homo sapien
ggcctgagtcttgtgccccacccag

SEQ ID NO: 359304 - DNA, 25 bp, Homo sapien
gggattacccacgagtcccacgctg

SEQ ID NO: 359305 - DNA, 25 bp, Homo sapien
gctgcaggggattacccacgagtcc

SEQ ID NO: 359306 - DNA, 25 bp, Homo sapien
cgtctccccagctcttgatgcaggg

SEQ ID NO: 359307 - DNA, 25 bp, Homo sapien
ctgcttggggtgttgaccgagttgt

SEQ ID NO: 359308 - DNA, 25 bp, Homo sapien
gctggtgctcgctgtccttaaggga

SEQ ID NO: 359309 - DNA, 25 bp, Homo sapien
tgcccctcatctgccgctgtgtgtg

SEQ ID NO: 359310 - DNA, 25 bp, Homo sapien
taccctgctggtgctcgctgtcctt

SEQ ID NO: 359311 - DNA, 25 bp, Homo sapien
gccgctgtgtgtgttctaccctgct

SEQ ID NO: 359312 - DNA, 25 bp, Homo sapien
tactgacggccaatgcctatgttct

SEQ ID NO: 359313 - DNA, 25 bp, Homo sapien
gaaagagttcgactggccgggcgcg

SEQ ID NO: 359314 - DNA, 25 bp, Homo sapien
tgagtcacacggtatattactgacg

SEQ ID NO: 359315 - DNA, 25 bp, Homo sapien
tgttctgcagcaatctcaatccttg

SEQ ID NO: 359316 - DNA, 25 bp, Homo sapien
atgtcctggctgagctggctgtcag

SEQ ID NO: 359317 - DNA, 25 bp, Homo sapien
gaggacgacacagttgtgctccagt

SEQ ID NO: 359318 - DNA, 25 bp, Homo sapien
acagttgtgctccagtgccccgtag

SEQ ID NO: 359319 - DNA, 25 bp, Homo sapien
ttgtgctccagtgccccgtaggatg

SEQ ID NO: 359320 - DNA, 25 bp, Homo sapien
gacgacacagttgtgctccagtgcc

SEQ ID NO: 359321 - DNA, 25 bp, Homo sapien
agaggggccaggggcagcgctgcat

SEQ ID NO: 359322 - DNA, 25 bp, Homo sapien
gctccctgctgagctccagaggggc

SEQ ID NO: 359323 - DNA, 25 bp, Homo sapien
ggggctccctgctgagctccagagg

SEQ ID NO: 359324 - DNA, 25 bp, Homo sapien
tccctgctgagctccagaggggcca

SEQ ID NO: 359325 - DNA, 25 bp, Homo sapien
tcagcaagtttaatccacactgggt

SEQ ID NO: 359326 - DNA, 25 bp, Homo sapien
cacactgggttgtcagctgtcacca

SEQ ID NO: 359327 - DNA, 25 bp, Homo sapien
tcaccatcagcccacgtttaggcag

SEQ ID NO: 359328 - DNA, 25 bp, Homo sapien
cacgtttaggcaggaaacagagatg

SEQ ID NO: 359329 - DNA, 25 bp, Homo sapien
cacgcggtaatgcatacttggcaca

SEQ ID NO: 359330 - DNA, 25 bp, Homo sapien
cccaggtggttctgcaaaggcgacg

SEQ ID NO: 359331 - DNA, 25 bp, Homo sapien
gccaatatagaagacgtgtgcctca

SEQ ID NO: 359332 - DNA, 25 bp, Homo sapien
gcatcaacggcaaactgagtccaag

SEQ ID NO: 359333 - DNA, 25 bp, Homo sapien
ggtgctggacggtggggtgtgtggc

SEQ ID NO: 359334 - DNA, 25 bp, Homo sapien
gtgctggacggtggggtgtgtggct

SEQ ID NO: 359335 - DNA, 25 bp, Homo sapien
gggtgctggacggtggggtgtgtgg

SEQ ID NO: 359336 - DNA, 25 bp, Homo sapien
gcagggctagtggtcgtcatggtga

SEQ ID NO: 359337 - DNA, 25 bp, Homo sapien
cagctgctcgccctgtatcagtctc

SEQ ID NO: 359338 - DNA, 25 bp, Homo sapien
agctgctcgccctgtatcagtctca

SEQ ID NO: 359339 - DNA, 25 bp, Homo sapien
agtggggcagggctagtggtcgtca

SEQ ID NO: 359340 - DNA, 25 bp, Homo sapien
tgggtgcccctctggcgggccagca

SEQ ID NO: 359341 - DNA, 25 bp, Homo sapien
gggtgcccctctggcgggccagcag

SEQ ID NO: 359342 - DNA, 25 bp, Homo sapien
tgctcgttctgcagctcactgcctc

SEQ ID NO: 359343 - DNA, 25 bp, Homo sapien
ctgctgacgccagccgccggtcccg

SEQ ID NO: 359344 - DNA, 25 bp, Homo sapien
ctcactgcctcgttgcagcagcttc

SEQ ID NO: 359345 - DNA, 25 bp, Homo sapien
actgctgacgccagccgccggtccc

SEQ ID NO: 359346 - DNA, 25 bp, Homo sapien
ccacaggaccaggtgagcccagagg

SEQ ID NO: 359347 - DNA, 25 bp, Homo sapien
tgtcctcccacaggaccaggtgagc

SEQ ID NO: 359348 - DNA, 25 bp, Homo sapien
ctcccacaggaccaggtgagcccag

SEQ ID NO: 359349 - DNA, 25 bp, Homo sapien
ctgtcctcccacaggaccaggtgag

SEQ ID NO: 359350 - DNA, 25 bp, Homo sapien
tccagggcacaccctcgtctttctt

SEQ ID NO: 359351 - DNA, 25 bp, Homo sapien
cagggcacaccctcgtctttcttta

SEQ ID NO: 359352 - DNA, 25 bp, Homo sapien
agtgcacgatggccagcatcccagt

SEQ ID NO: 359353 - DNA, 25 bp, Homo sapien
tgcacgatggccagcatcccagtcc

SEQ ID NO: 359354 - DNA, 25 bp, Homo sapien
gctacacagctccacgaggctggaa

SEQ ID NO: 359355 - DNA, 25 bp, Homo sapien
ccacaccctggctgtgtaaccctga

SEQ ID NO: 359356 - DNA, 25 bp, Homo sapien
gagctggggccgcacatgcctcatg

SEQ ID NO: 359357 - DNA, 25 bp, Homo sapien
tgtgtaaccctgagggggcacgccc

SEQ ID NO: 359358 - DNA, 25 bp, Homo sapien
tacggtggggacctccatgccagtc

SEQ ID NO: 359359 - DNA, 25 bp, Homo sapien
gccctgtctctgcctacggtgggga

SEQ ID NO: 359360 - DNA, 25 bp, Homo sapien
ctctgcctacggtggggacctccat

SEQ ID NO: 359361 - DNA, 25 bp, Homo sapien
gacctccatgccagtctggggtgag

SEQ ID NO: 359362 - DNA, 25 bp, Homo sapien
cagtgctcatcgtgggtgatctcgt

SEQ ID NO: 359363 - DNA, 25 bp, Homo sapien
cgcagggctgcaggttggcccctcg

SEQ ID NO: 359364 - DNA, 25 bp, Homo sapien
gttggcccctcgcttgcaggcggca

SEQ ID NO: 359365 - DNA, 25 bp, Homo sapien
gcttgcaggcggcacagtgctcatc

SEQ ID NO: 359366 - DNA, 25 bp, Homo sapien
agggcatgatgggaatatcacaagg

SEQ ID NO: 359367 - DNA, 25 bp, Homo sapien
tgatgggaatatcacaaggccctgt

SEQ ID NO: 359368 - DNA, 25 bp, Homo sapien
cctgtgatacctggggtctcactcc

SEQ ID NO: 359369 - DNA, 25 bp, Homo sapien
caggatgggagtaaggatctcagcc

SEQ ID NO: 359370 - DNA, 25 bp, Homo sapien
gctgtgaggaacagggggttgttga

SEQ ID NO: 359371 - DNA, 25 bp, Homo sapien
gggttgttgagatagttggaggcca

SEQ ID NO: 359372 - DNA, 25 bp, Homo sapien
ttgttgagatagttggaggccagcc

SEQ ID NO: 359373 - DNA, 25 bp, Homo sapien
gagatagttggaggccagccgtttc

SEQ ID NO: 359374 - DNA, 25 bp, Homo sapien
caccacttctctcggtgtggtcagg

SEQ ID NO: 359375 - DNA, 25 bp, Homo sapien
gtggctttgactgcggctgttgtaa

SEQ ID NO: 359376 - DNA, 25 bp, Homo sapien
tactgcgtggccagatttgacacca

SEQ ID NO: 359377 - DNA, 25 bp, Homo sapien
gctgttgtaatactgcgtggccaga

SEQ ID NO: 359378 - DNA, 25 bp, Homo sapien
actggctgccgctctgcgcgaaacg

SEQ ID NO: 359379 - DNA, 25 bp, Homo sapien
cacgtggagcacgttctcagaacag

SEQ ID NO: 359380 - DNA, 25 bp, Homo sapien
tgttcttacgaagggtccgagtcag

SEQ ID NO: 359381 - DNA, 25 bp, Homo sapien
aatggtatgaaacggcccacgtgga

SEQ ID NO: 359382 - DNA, 25 bp, Homo sapien
ccgctcctgtcgcttgctctggatt

SEQ ID NO: 359383 - DNA, 25 bp, Homo sapien
cgctcctgtcgcttgctctggattt

SEQ ID NO: 359384 - DNA, 25 bp, Homo sapien
ttccgctcctgtcgcttgctctgga

SEQ ID NO: 359385 - DNA, 25 bp, Homo sapien
cttccgctcctgtcgcttgctctgg

SEQ ID NO: 359386 - DNA, 25 bp, Homo sapien
tagcacggggtcctccttttgtgtc

SEQ ID NO: 359387 - DNA, 25 bp, Homo sapien
ctcttagcacggggtcctccttttg

SEQ ID NO: 359388 - DNA, 25 bp, Homo sapien
ccttttgtgtccctatctggcccat

SEQ ID NO: 359389 - DNA, 25 bp, Homo sapien
atccaggtgcccactcttagcacgg

SEQ ID NO: 359390 - DNA, 25 bp, Homo sapien
gaattaaggatatcacagcagaggt

SEQ ID NO: 359391 - DNA, 25 bp, Homo sapien
taggaacgcacttttcgatcagtcc

SEQ ID NO: 359392 - DNA, 25 bp, Homo sapien
caactccacgaagtttacaggcgca

SEQ ID NO: 359393 - DNA, 25 bp, Homo sapien
tacaggcgcagttttccccatgttg

SEQ ID NO: 359394 - DNA, 25 bp, Homo sapien
tacgatgatgttcacggcccatgtg

SEQ ID NO: 359395 - DNA, 25 bp, Homo sapien
taaaacgcctttgcaggtgaggtgg

SEQ ID NO: 359396 - DNA, 25 bp, Homo sapien
ttcaagactgctagtgcctcgggca

SEQ ID NO: 359397 - DNA, 25 bp, Homo sapien
tggcacacatgaagtccgcaggcta

SEQ ID NO: 359398 - DNA, 25 bp, Homo sapien
cctagcgctaccatgaaggcgattt

SEQ ID NO: 359399 - DNA, 25 bp, Homo sapien
caaatgttccgtggtaaccaggcct

SEQ ID NO: 359400 - DNA, 25 bp, Homo sapien
ggtaaccaggcctagcgctaccatg

SEQ ID NO: 359401 - DNA, 25 bp, Homo sapien
ttccgtggtaaccaggcctagcgct

SEQ ID NO: 359402 - DNA, 25 bp, Homo sapien
tgggattctctggttaaccacgcct

SEQ ID NO: 359403 - DNA, 25 bp, Homo sapien
ttgcaggtgcaatccctccaggaga

SEQ ID NO: 359404 - DNA, 25 bp, Homo sapien
gagctgaattttcccatactggaga

SEQ ID NO: 359405 - DNA, 25 bp, Homo sapien
tctaagacctgacaacaccaagcac

SEQ ID NO: 359406 - DNA, 25 bp, Homo sapien
aaccaagggtgtgggtccctggctg

SEQ ID NO: 359407 - DNA, 25 bp, Homo sapien
tccctggctgccgtgttttagggac

SEQ ID NO: 359408 - DNA, 25 bp, Homo sapien
tagggacacagcaacgttcagctcc

SEQ ID NO: 359409 - DNA, 25 bp, Homo sapien
gttttagggacacagcaacgttcag

SEQ ID NO: 359410 - DNA, 25 bp, Homo sapien
tttgaaacggagaggtccattcacg

SEQ ID NO: 359411 - DNA, 25 bp, Homo sapien
tgtgggtttgaaacggagaggtcca

SEQ ID NO: 359412 - DNA, 25 bp, Homo sapien
aacggagaggtccattcacgtgaac

SEQ ID NO: 359413 - DNA, 25 bp, Homo sapien
ggtttgaaacggagaggtccattca

SEQ ID NO: 359414 - DNA, 25 bp, Homo sapien
atctatcctgattctgggaaaaggt

SEQ ID NO: 359415 - DNA, 25 bp, Homo sapien
tgggaaggctggtaatgcggcccct

SEQ ID NO: 359416 - DNA, 25 bp, Homo sapien
tctgggaagtacaggggcgctgggg

SEQ ID NO: 359417 - DNA, 25 bp, Homo sapien
cctgggaaggctggtaatgcggccc

SEQ ID NO: 359418 - DNA, 25 bp, Homo sapien
aaggctggtaatgcggcccctttca

SEQ ID NO: 359419 - DNA, 25 bp, Homo sapien
tcagatggcacctgcagactgagca

SEQ ID NO: 359420 - DNA, 25 bp, Homo sapien
ggcctgggccctccggagaggcctg

SEQ ID NO: 359421 - DNA, 25 bp, Homo sapien
ctgggccctccggagaggcctgtcc

SEQ ID NO: 359422 - DNA, 25 bp, Homo sapien
tgggccctccggagaggcctgtcct

SEQ ID NO: 359423 - DNA, 25 bp, Homo sapien
tcgggctgcgtctgcacttgaggct

SEQ ID NO: 359424 - DNA, 25 bp, Homo sapien
cggccgcgactctgccgtgctctcg

SEQ ID NO: 359425 - DNA, 25 bp, Homo sapien
ctctcgggctgcgtctgcacttgag

SEQ ID NO: 359426 - DNA, 25 bp, Homo sapien
ggccgcgactctgccgtgctctcgg

SEQ ID NO: 359427 - DNA, 25 bp, Homo sapien
gggacagtgatgggttgcggggtga

SEQ ID NO: 359428 - DNA, 25 bp, Homo sapien
gggaagagaggaggcgtggaggagg

SEQ ID NO: 359429 - DNA, 25 bp, Homo sapien
ctggaagatgccatggaggggtgaa

SEQ ID NO: 359430 - DNA, 25 bp, Homo sapien
gaggggaagagaggaggcgtggagg

SEQ ID NO: 359431 - DNA, 25 bp, Homo sapien
gctggggttcttgacgctgaccacg

SEQ ID NO: 359432 - DNA, 25 bp, Homo sapien
gctgaccacggtggccttctggaat

SEQ ID NO: 359433 - DNA, 25 bp, Homo sapien
tggctgacagtgttgttggcggtgg

SEQ ID NO: 359434 - DNA, 25 bp, Homo sapien
ggttcttgacgctgaccacggtggc

SEQ ID NO: 359435 - DNA, 25 bp, Homo sapien
gatgctaccgtcgttatcattaggg

SEQ ID NO: 359436 - DNA, 25 bp, Homo sapien
tgaagggcacagagcgctgtactgc

SEQ ID NO: 359437 - DNA, 25 bp, Homo sapien
ggtaataatgatgctaccgtcgtta

SEQ ID NO: 359438 - DNA, 25 bp, Homo sapien
tcattagggcctgtctggcatcggt

SEQ ID NO: 359439 - DNA, 25 bp, Homo sapien
gaaaactgctgttctccgcctctga

SEQ ID NO: 359440 - DNA, 25 bp, Homo sapien
atgttcttgttgaccctggccgccc

SEQ ID NO: 359441 - DNA, 25 bp, Homo sapien
tccgcctctgaagaggactggcgtg

SEQ ID NO: 359442 - DNA, 25 bp, Homo sapien
tccgtgttctggtcgatcatctggg

SEQ ID NO: 359443 - DNA, 25 bp, Homo sapien
ctgaggtagcactgccgctccttgc

SEQ ID NO: 359444 - DNA, 25 bp, Homo sapien
ggcactgcagtgatcgttcccaaag

SEQ ID NO: 359445 - DNA, 25 bp, Homo sapien
gcactgcagtgatcgttcccaaagc

SEQ ID NO: 359446 - DNA, 25 bp, Homo sapien
gctgacctgaggacccgtgacaggc

SEQ ID NO: 359447 - DNA, 25 bp, Homo sapien
ccatgttgcctcgtggaccaagggt

SEQ ID NO: 359448 - DNA, 25 bp, Homo sapien
cacacgagttcttctcgggagcgtc

SEQ ID NO: 359449 - DNA, 25 bp, Homo sapien
gaagttgctcctgcagatagctctg

SEQ ID NO: 359450 - DNA, 25 bp, Homo sapien
agatgccccagataaaacctccagg

SEQ ID NO: 359451 - DNA, 25 bp, Homo sapien
gctccaagctggaatttattgacac

SEQ ID NO: 359452 - DNA, 25 bp, Homo sapien
ctgctccaagctggaatttattgac

SEQ ID NO: 359453 - DNA, 25 bp, Homo sapien
tgctccaagctggaatttattgaca

SEQ ID NO: 359454 - DNA, 25 bp, Homo sapien
ctccaagctggaatttattgacacc

SEQ ID NO: 359455 - DNA, 25 bp, Homo sapien
tcttaatcaaaaagtgccagacaac

SEQ ID NO: 359456 - DNA, 25 bp, Homo sapien
tgacatttaaaacacccgttcagcg

SEQ ID NO: 359457 - DNA, 25 bp, Homo sapien
gaatggcatcatgaactaaggattg

SEQ ID NO: 359458 - DNA, 25 bp, Homo sapien
cagggccacttaaccaatcgcagag

SEQ ID NO: 359459 - DNA, 25 bp, Homo sapien
tgtgcacagatgagaggttctgccc

SEQ ID NO: 359460 - DNA, 25 bp, Homo sapien
acagatgagaggttctgcccgcgat

SEQ ID NO: 359461 - DNA, 25 bp, Homo sapien
cccgtgctgggtcccttgtgcacag

SEQ ID NO: 359462 - DNA, 25 bp, Homo sapien
gggtcccttgtgcacagatgagagg

SEQ ID NO: 359463 - DNA, 25 bp, Homo sapien
gagtgatagggaaccccaggaacgc

SEQ ID NO: 359464 - DNA, 25 bp, Homo sapien
agggcaatgagtgcctccagaaggg

SEQ ID NO: 359465 - DNA, 25 bp, Homo sapien
gacagggagtgatagggaaccccag

SEQ ID NO: 359466 - DNA, 25 bp, Homo sapien
ggacagggagtgatagggaacccca

SEQ ID NO: 359467 - DNA, 25 bp, Homo sapien
acaggcaccaaattctgcctctctg

SEQ ID NO: 359468 - DNA, 25 bp, Homo sapien
ctcggcagcacaggcaccaaattct

SEQ ID NO: 359469 - DNA, 25 bp, Homo sapien
cgcagccccgctcggcagcacaggc

SEQ ID NO: 359470 - DNA, 25 bp, Homo sapien
agcacaggcaccaaattctgcctct

SEQ ID NO: 359471 - DNA, 25 bp, Homo sapien
gtggagtctgggtctccaagcacag

SEQ ID NO: 359472 - DNA, 25 bp, Homo sapien
agtttgtcacttcggctctgcttgg

SEQ ID NO: 359473 - DNA, 25 bp, Homo sapien
tacaaacagcgatgtgcgcaggtct

SEQ ID NO: 359474 - DNA, 25 bp, Homo sapien
ctcccggaagctcagatatgtttca

SEQ ID NO: 359475 - DNA, 25 bp, Homo sapien
aaggttttacggcttcactggatag

SEQ ID NO: 359476 - DNA, 25 bp, Homo sapien
tcacatattatgcaaagagggcttg

SEQ ID NO: 359477 - DNA, 25 bp, Homo sapien
actgtgactgagacacgtgctgagt

SEQ ID NO: 359478 - DNA, 25 bp, Homo sapien
gaatccataattgaagcagggctct

SEQ ID NO: 359479 - DNA, 25 bp, Homo sapien
agagcaaccacactagggatcactg

SEQ ID NO: 359480 - DNA, 25 bp, Homo sapien
ccagagcaaccacactagggatcac

SEQ ID NO: 359481 - DNA, 25 bp, Homo sapien
ctagggatcactgtccagcggtgca

SEQ ID NO: 359482 - DNA, 25 bp, Homo sapien
ggatcactgtccagcggtgcagctg

SEQ ID NO: 359483 - DNA, 25 bp, Homo sapien
ggcaggtcattcaagatgcacccag

SEQ ID NO: 359484 - DNA, 25 bp, Homo sapien
cagtgctacccacgggaaaagtctt

SEQ ID NO: 359485 - DNA, 25 bp, Homo sapien
tcaatgagagggagccagtgctacc

SEQ ID NO: 359486 - DNA, 25 bp, Homo sapien
gatgcacccaggtggtcccggtgct

SEQ ID NO: 359487 - DNA, 25 bp, Homo sapien
gcacccatattaaggggccatgggt

SEQ ID NO: 359488 - DNA, 25 bp, Homo sapien
atattaaggggccatgggtgacctg

SEQ ID NO: 359489 - DNA, 25 bp, Homo sapien
gtctgcacccatattaaggggccat

SEQ ID NO: 359490 - DNA, 25 bp, Homo sapien
ctgctccccaggtcgtcgcccaacc

SEQ ID NO: 359491 - DNA, 25 bp, Homo sapien
aagccatcaagaccaagaaaaattg

SEQ ID NO: 359492 - DNA, 25 bp, Homo sapien
accaagaaaaattgtgatgggcgat

SEQ ID NO: 359493 - DNA, 25 bp, Homo sapien
atgaggtagcggtagcccccgcagt

SEQ ID NO: 359494 - DNA, 25 bp, Homo sapien
ttgtgatgggcgatggctttgaaat

SEQ ID NO: 359495 - DNA, 25 bp, Homo sapien
gaaaaggtagcatcgctgcagaggc

SEQ ID NO: 359496 - DNA, 25 bp, Homo sapien
gagcagtgcccacactcgagttagt

SEQ ID NO: 359497 - DNA, 25 bp, Homo sapien
tccatggagagccacgtggagctga

SEQ ID NO: 359498 - DNA, 25 bp, Homo sapien
ggtaaagacgaccacacctcaatgc

SEQ ID NO: 359499 - DNA, 25 bp, Homo sapien
ctgtgcccggccagtcttttacttt

SEQ ID NO: 359500 - DNA, 25 bp, Homo sapien
actgtgcccggccagtcttttactt

SEQ ID NO: 359501 - DNA, 25 bp, Homo sapien
cactacaagacgctcagctcctggg

SEQ ID NO: 359502 - DNA, 25 bp, Homo sapien
tcaggcactacaagacgctcagctc

SEQ ID NO: 359503 - DNA, 25 bp, Homo sapien
aggcactacaagacgctcagctcct

SEQ ID NO: 359504 - DNA, 25 bp, Homo sapien
ggcactacaagacgctcagctcctg

SEQ ID NO: 359505 - DNA, 25 bp, Homo sapien
gcaggcgtcactgcttcgtggagct

SEQ ID NO: 359506 - DNA, 25 bp, Homo sapien
ggttggacggacgaagcaggacaaa

SEQ ID NO: 359507 - DNA, 25 bp, Homo sapien
agggcctccgtgtccacgtgatcca

SEQ ID NO: 359508 - DNA, 25 bp, Homo sapien
tcgtggagctcactggcatagggtt

SEQ ID NO: 359509 - DNA, 25 bp, Homo sapien
ccctgctggcatcagtttgcaggag

SEQ ID NO: 359510 - DNA, 25 bp, Homo sapien
cctgctggcatcagtttgcaggagc

SEQ ID NO: 359511 - DNA, 25 bp, Homo sapien
gccctgctggcatcagtttgcagga

SEQ ID NO: 359512 - DNA, 25 bp, Homo sapien
cagcagaaggagtgcatccgagacc

SEQ ID NO: 359513 - DNA, 25 bp, Homo sapien
gcctgtttggcgtgagtgactctga

SEQ ID NO: 359514 - DNA, 25 bp, Homo sapien
tccaacccagcggtgctcaaggtgt

SEQ ID NO: 359515 - DNA, 25 bp, Homo sapien
tcaaggtgtggtggccattccagca

SEQ ID NO: 359516 - DNA, 25 bp, Homo sapien
ttagggtgggcaacactgtgtctgc

SEQ ID NO: 359517 - DNA, 25 bp, Homo sapien
gaggttaagcaactcctatccctgg

SEQ ID NO: 359518 - DNA, 25 bp, Homo sapien
taccggctgcactgaatgctttagg

SEQ ID NO: 359519 - DNA, 25 bp, Homo sapien
aagtaaggcatgaagcaggcgcccc

SEQ ID NO: 359520 - DNA, 25 bp, Homo sapien
cagtgcaatgaggaagccggaaacc

SEQ ID NO: 359521 - DNA, 25 bp, Homo sapien
tcagtggaacgaggaagccgaaaac

SEQ ID NO: 359522 - DNA, 25 bp, Homo sapien
tgaaaccaagtgttggcggacgctg

SEQ ID NO: 359523 - DNA, 25 bp, Homo sapien
gaaactcctcatgtacgtcggctca

SEQ ID NO: 359524 - DNA, 25 bp, Homo sapien
aaaactaaagagacaggcggagaca

SEQ ID NO: 359525 - DNA, 25 bp, Homo sapien
aactaaagagacaggcggagacaga

SEQ ID NO: 359526 - DNA, 25 bp, Homo sapien
tacaggacaaacagccaaccctaaa

SEQ ID NO: 359527 - DNA, 25 bp, Homo sapien
gaaaattgaggttacaggacaaaca

SEQ ID NO: 359528 - DNA, 25 bp, Homo sapien
gctgtgtagactctgcgtgcagctg

SEQ ID NO: 359529 - DNA, 25 bp, Homo sapien
cctggctcccataggcgaaggctgt

SEQ ID NO: 359530 - DNA, 25 bp, Homo sapien
tgttgacaagatggtttcattctga

SEQ ID NO: 359531 - DNA, 25 bp, Homo sapien
tctgaggaacaaaggatgtgtccac

SEQ ID NO: 359532 - DNA, 25 bp, Homo sapien
ggggagaaaacgcaggacagggcat

SEQ ID NO: 359533 - DNA, 25 bp, Homo sapien
cggggagaaaacgcaggacagggca

SEQ ID NO: 359534 - DNA, 25 bp, Homo sapien
tggacacacggttcccagagtctcc

SEQ ID NO: 359535 - DNA, 25 bp, Homo sapien
atgtagcgatgtggacacacggttc

SEQ ID NO: 359536 - DNA, 25 bp, Homo sapien
ctgaagtaggtaacatgtagcgatg

SEQ ID NO: 359537 - DNA, 25 bp, Homo sapien
ccacgctgaagtaggtaacatgtag

SEQ ID NO: 359538 - DNA, 25 bp, Homo sapien
tttttatctggaaatcattgattat

SEQ ID NO: 359539 - DNA, 25 bp, Homo sapien
gagtgtgtattacgggagcagcagg

SEQ ID NO: 359540 - DNA, 25 bp, Homo sapien
tcattaggggtgagtgtgtattacg

SEQ ID NO: 359541 - DNA, 25 bp, Homo sapien
taacaaggtttacagagggcattta

SEQ ID NO: 359542 - DNA, 25 bp, Homo sapien
gctggtggccaacacaactacaagc

SEQ ID NO: 359543 - DNA, 25 bp, Homo sapien
tccttccagaacctcggcatttccc

SEQ ID NO: 359544 - DNA, 25 bp, Homo sapien
cggcatttcccgctggtggccaaca

SEQ ID NO: 359545 - DNA, 25 bp, Homo sapien
agaacctcggcatttcccgctggtg

SEQ ID NO: 359546 - DNA, 25 bp, Homo sapien
cggcttctacactgtgctcgctgga

SEQ ID NO: 359547 - DNA, 25 bp, Homo sapien
acactgtgctcgctggagccccaga

SEQ ID NO: 359548 - DNA, 25 bp, Homo sapien
ttctacactgtgctcgctggagccc

SEQ ID NO: 359549 - DNA, 25 bp, Homo sapien
gcttctacactgtgctcgctggagc

SEQ ID NO: 359550 - DNA, 25 bp, Homo sapien
caagggtgcttaataacaggctcaa

SEQ ID NO: 359551 - DNA, 25 bp, Homo sapien
taagctgtaacagccacggttctgc

SEQ ID NO: 359552 - DNA, 25 bp, Homo sapien
gctgtgcacagggttagagctcaga

SEQ ID NO: 359553 - DNA, 25 bp, Homo sapien
acttccaggtctacaaggcgtgcac

SEQ ID NO: 359554 - DNA, 25 bp, Homo sapien
aatcttatttatgagggtgtagccc

SEQ ID NO: 359555 - DNA, 25 bp, Homo sapien
ttcaagaagggcacagcgttcaggc

SEQ ID NO: 359556 - DNA, 25 bp, Homo sapien
tgcttcaaagatggtgcctggctgc

SEQ ID NO: 359557 - DNA, 25 bp, Homo sapien
tgtgtcctcacgaaggcagacagac

SEQ ID NO: 359558 - DNA, 25 bp, Homo sapien
ggctggcggatcacaggaccatagt

SEQ ID NO: 359559 - DNA, 25 bp, Homo sapien
tgaggaacgaggaaatcagtcccct

SEQ ID NO: 359560 - DNA, 25 bp, Homo sapien
cccggactcaaggaacaagttggcg

SEQ ID NO: 359561 - DNA, 25 bp, Homo sapien
catggatgttcctcaaaccccggac

SEQ ID NO: 359562 - DNA, 25 bp, Homo sapien
tggcaatgcccaatacctcaagatg

SEQ ID NO: 359563 - DNA, 25 bp, Homo sapien
gaatggataaacagcacggagtacg

SEQ ID NO: 359564 - DNA, 25 bp, Homo sapien
gtttgatggaacacggtcacccctg

SEQ ID NO: 359565 - DNA, 25 bp, Homo sapien
gattctaagtaagatgccggctacc

SEQ ID NO: 359566 - DNA, 25 bp, Homo sapien
tgtgatatcaaaaccatggctccca

SEQ ID NO: 359567 - DNA, 25 bp, Homo sapien
agggctgtcacgagggtgccgtcca

SEQ ID NO: 359568 - DNA, 25 bp, Homo sapien
gggctgtcacgagggtgccgtccat

SEQ ID NO: 359569 - DNA, 25 bp, Homo sapien
accgctggctgatgccaagcacagc

SEQ ID NO: 359570 - DNA, 25 bp, Homo sapien
cacccacatcaaaccttggaaaaca

SEQ ID NO: 359571 - DNA, 25 bp, Homo sapien
aagtcctgctccaccgctggctgat

SEQ ID NO: 359572 - DNA, 25 bp, Homo sapien
tgactgtcaagcacgtcacccacat

SEQ ID NO: 359573 - DNA, 25 bp, Homo sapien
ccaaattagtgtcattacagaaaag

SEQ ID NO: 359574 - DNA, 25 bp, Homo sapien
cgagaatcagcagacctgcatggca

SEQ ID NO: 359575 - DNA, 25 bp, Homo sapien
ccacttccgcagtatccaaattagt

SEQ ID NO: 359576 - DNA, 25 bp, Homo sapien
gctgattacgatgaaagatgtgcca

SEQ ID NO: 359577 - DNA, 25 bp, Homo sapien
cacaataggtttctcgcatgggcca

SEQ ID NO: 359578 - DNA, 25 bp, Homo sapien
taaggtcatccatgcaggacgcagc

SEQ ID NO: 359579 - DNA, 25 bp, Homo sapien
tgaagaaacttacccatacctggag

SEQ ID NO: 359580 - DNA, 25 bp, Homo sapien
gccaagcgcagtgatcagaagacct

SEQ ID NO: 359581 - DNA, 25 bp, Homo sapien
ggtgctaagccaacagccaggctcc

SEQ ID NO: 359582 - DNA, 25 bp, Homo sapien
catgacttctatttcggagcaaaag

SEQ ID NO: 359583 - DNA, 25 bp, Homo sapien
ccaggacggttactaacttgctggg

SEQ ID NO: 359584 - DNA, 25 bp, Homo sapien
gcaaaagtactgctcgcggtcacca

SEQ ID NO: 359585 - DNA, 25 bp, Homo sapien
gaccgtgtgccccggagtaacagtc

SEQ ID NO: 359586 - DNA, 25 bp, Homo sapien
tgaccgtgtgccccggagtaacagt

SEQ ID NO: 359587 - DNA, 25 bp, Homo sapien
ctgaccgtgtgccccggagtaacag

SEQ ID NO: 359588 - DNA, 25 bp, Homo sapien
taagactctaaggtatcaaagcgga

SEQ ID NO: 359589 - DNA, 25 bp, Homo sapien
tcaaagcggactctttggagtggct

SEQ ID NO: 359590 - DNA, 25 bp, Homo sapien
gaaatcaattgtacggttccgacag

SEQ ID NO: 359591 - DNA, 25 bp, Homo sapien
cgtagtcagcatagtggtcgtcaac

SEQ ID NO: 359592 - DNA, 25 bp, Homo sapien
caaacggagctcgttcagagaggca

SEQ ID NO: 359593 - DNA, 25 bp, Homo sapien
caaggttgctcagccaagacacagg

SEQ ID NO: 359594 - DNA, 25 bp, Homo sapien
ctaacatggaggcattccgggccag

SEQ ID NO: 359595 - DNA, 25 bp, Homo sapien
gatttcatcgcaatcaccaggtgag

SEQ ID NO: 359596 - DNA, 25 bp, Homo sapien
tgccattttcccgatgagcacgtgt

SEQ ID NO: 359597 - DNA, 25 bp, Homo sapien
gtgagacccgcgctttacgatattc

SEQ ID NO: 359598 - DNA, 25 bp, Homo sapien
tgagcacgtgttgcttttctaagaa

SEQ ID NO: 359599 - DNA, 25 bp, Homo sapien
cgctctcgcccaaggatacagtggg

SEQ ID NO: 359600 - DNA, 25 bp, Homo sapien
cctcctcgttcatggttttactgcc

SEQ ID NO: 359601 - DNA, 25 bp, Homo sapien
tcatggttttactgccagaaaactc

SEQ ID NO: 359602 - DNA, 25 bp, Homo sapien
tcgttcatggttttactgccagaaa

SEQ ID NO: 359603 - DNA, 25 bp, Homo sapien
cctcgttcatggttttactgccaga

SEQ ID NO: 359604 - DNA, 25 bp, Homo sapien
attttcccttgacaagcttggccac

SEQ ID NO: 359605 - DNA, 25 bp, Homo sapien
atccgcgcccatccgctccccagga

SEQ ID NO: 359606 - DNA, 25 bp, Homo sapien
ttcccttgacaagcttggccaccat

SEQ ID NO: 359607 - DNA, 25 bp, Homo sapien
ccactgcgcgtttctctggggccat

SEQ ID NO: 359608 - DNA, 25 bp, Homo sapien
gggtccactcatttcaacacacacg

SEQ ID NO: 359609 - DNA, 25 bp, Homo sapien
gctccaggcctactgcaggctaggg

SEQ ID NO: 359610 - DNA, 25 bp, Homo sapien
caagggcagggagcttgtctcattc

SEQ ID NO: 359611 - DNA, 25 bp, Homo sapien
tgatgcaggtgttcccgcagcatga

SEQ ID NO: 359612 - DNA, 25 bp, Homo sapien
cttctggggcagaggccgagcaggt

SEQ ID NO: 359613 - DNA, 25 bp, Homo sapien
gtctgtagctgccccgcaggagcga

SEQ ID NO: 359614 - DNA, 25 bp, Homo sapien
aaaagcactccaggtgtctgtagct

SEQ ID NO: 359615 - DNA, 25 bp, Homo sapien
ccgcaggagcgaggaggagcttctg

SEQ ID NO: 359616 - DNA, 25 bp, Homo sapien
ttcccaacctgactgtaaagctgca

SEQ ID NO: 359617 - DNA, 25 bp, Homo sapien
gcatgaagttcaggtctggagatgc

SEQ ID NO: 359618 - DNA, 25 bp, Homo sapien
agcagcatggactgcggttcaaaca

SEQ ID NO: 359619 - DNA, 25 bp, Homo sapien
tccggggtccttctcatgagaccac

SEQ ID NO: 359620 - DNA, 25 bp, Homo sapien
gagaaattcatggttgggccctgaa

SEQ ID NO: 359621 - DNA, 25 bp, Homo sapien
tactgctaacagacctggataacgg

SEQ ID NO: 359622 - DNA, 25 bp, Homo sapien
tgagaaaaacatcgcgctaagggca

SEQ ID NO: 359623 - DNA, 25 bp, Homo sapien
gaaagacaggattccgctgctggcg

SEQ ID NO: 359624 - DNA, 25 bp, Homo sapien
tccgaattctctctcgccagggtca

SEQ ID NO: 359625 - DNA, 25 bp, Homo sapien
ccggcctccgaattctctctcgcca

SEQ ID NO: 359626 - DNA, 25 bp, Homo sapien
taaagactcgacacgaacgcccggc

SEQ ID NO: 359627 - DNA, 25 bp, Homo sapien
aacgcccggcctccgaattctctct

SEQ ID NO: 359628 - DNA, 25 bp, Homo sapien
gccgcgcgctgccttttaagtgagc

SEQ ID NO: 359629 - DNA, 25 bp, Homo sapien
tggcactttttagggcgccgccaaa

SEQ ID NO: 359630 - DNA, 25 bp, Homo sapien
ttaagtgagctcctctcttcggccc

SEQ ID NO: 359631 - DNA, 25 bp, Homo sapien
gaaatcgccacgttccaaaaacatg

SEQ ID NO: 359632 - DNA, 25 bp, Homo sapien
tgcctttcgtggagctgcttcttga

SEQ ID NO: 359633 - DNA, 25 bp, Homo sapien
gcgatccgcggctgcctttcgtgga

SEQ ID NO: 359634 - DNA, 25 bp, Homo sapien
tgtttgtcgctgagcgcggcgatcc

SEQ ID NO: 359635 - DNA, 25 bp, Homo sapien
tggagctgcttcttgaggtcgccgt

SEQ ID NO: 359636 - DNA, 25 bp, Homo sapien
gagccaagtaaacacggcgagtccg

SEQ ID NO: 359637 - DNA, 25 bp, Homo sapien
gcgccccgagccgtgcaagtttgca

SEQ ID NO: 359638 - DNA, 25 bp, Homo sapien
ccgagccgtgcaagtttgcaggccg

SEQ ID NO: 359639 - DNA, 25 bp, Homo sapien
aacacggcgagtccgtgtcgagcaa

SEQ ID NO: 359640 - DNA, 25 bp, Homo sapien
ctggtggcgcgcgagttccacggcg

SEQ ID NO: 359641 - DNA, 25 bp, Homo sapien
gcgcgagttccacggcgagcgcctc

SEQ ID NO: 359642 - DNA, 25 bp, Homo sapien
tggcgcgcgagttccacggcgagcg

SEQ ID NO: 359643 - DNA, 25 bp, Homo sapien
tggtggcgcgcgagttccacggcga

SEQ ID NO: 359644 - DNA, 25 bp, Homo sapien
cttgggcagcactttgcgctcactt

SEQ ID NO: 359645 - DNA, 25 bp, Homo sapien
gggctcccgggaagttgcgcggctc

SEQ ID NO: 359646 - DNA, 25 bp, Homo sapien
caacttgggcagcactttgcgctca

SEQ ID NO: 359647 - DNA, 25 bp, Homo sapien
cgggctcccgggaagttgcgcggct

SEQ ID NO: 359648 - DNA, 25 bp, Homo sapien
tggcgaaggggaagacaggcttccg

SEQ ID NO: 359649 - DNA, 25 bp, Homo sapien
ggctgcccggcaagttgcgccgggt

SEQ ID NO: 359650 - DNA, 25 bp, Homo sapien
gctgcccggcaagttgcgccgggtc

SEQ ID NO: 359651 - DNA, 25 bp, Homo sapien
tgcccggcaagttgcgccgggtccc

SEQ ID NO: 359652 - DNA, 25 bp, Homo sapien
ctgcccggcaagttgcgccgggtcc

SEQ ID NO: 359653 - DNA, 25 bp, Homo sapien
cctcggcaaagttgtgcctcggcac

SEQ ID NO: 359654 - DNA, 25 bp, Homo sapien
aaagttgtgcctcggcacgatgcta

SEQ ID NO: 359655 - DNA, 25 bp, Homo sapien
gggactatatttcctccggcgcgcg

SEQ ID NO: 359656 - DNA, 25 bp, Homo sapien
ctggatctcgttgggcctcggcaaa

SEQ ID NO: 359657 - DNA, 25 bp, Homo sapien
gcagcaaactggcacgtttgaaaca

SEQ ID NO: 359658 - DNA, 25 bp, Homo sapien
tcttcattcaggtcggagtgccggg

SEQ ID NO: 359659 - DNA, 25 bp, Homo sapien
gccatcttcattcaggtcggagtgc

SEQ ID NO: 359660 - DNA, 25 bp, Homo sapien
agcaaactggcacgtttgaaacacg

SEQ ID NO: 359661 - DNA, 25 bp, Homo sapien
gttgtgatgcggcccccttgatgtc

SEQ ID NO: 359662 - DNA, 25 bp, Homo sapien
gcccctgcgtgctgctctgaatctg

SEQ ID NO: 359663 - DNA, 25 bp, Homo sapien
taaagagcggggtcacgcattcgcc

SEQ ID NO: 359664 - DNA, 25 bp, Homo sapien
ctggtctcgacctctccggggttgt

SEQ ID NO: 359665 - DNA, 25 bp, Homo sapien
gtttggggcaaagacctgctggtca

SEQ ID NO: 359666 - DNA, 25 bp, Homo sapien
ctggcagaatcctggtgtcaaaggc

SEQ ID NO: 359667 - DNA, 25 bp, Homo sapien
gcaaagacctgctggtcactggtgg

SEQ ID NO: 359668 - DNA, 25 bp, Homo sapien
caaaggctaaaaacacaggccttgg

SEQ ID NO: 359669 - DNA, 25 bp, Homo sapien
gggctcgttgttctcagatcctgtt

SEQ ID NO: 359670 - DNA, 25 bp, Homo sapien
cgttgttctcagatcctgttagttt

SEQ ID NO: 359671 - DNA, 25 bp, Homo sapien
caatcttggggctcgttgttctcag

SEQ ID NO: 359672 - DNA, 25 bp, Homo sapien
cttggggctcgttgttctcagatcc

SEQ ID NO: 359673 - DNA, 25 bp, Homo sapien
ctgagtccctggtcctgacaaagct

SEQ ID NO: 359674 - DNA, 25 bp, Homo sapien
ttgtcacctccacccggttctctga

SEQ ID NO: 359675 - DNA, 25 bp, Homo sapien
agtccctggtcctgacaaagcttcc

SEQ ID NO: 359676 - DNA, 25 bp, Homo sapien
cctccacccggttctctgagtccct

SEQ ID NO: 359677 - DNA, 25 bp, Homo sapien
cagaccctgagtccatgccctgatg

SEQ ID NO: 359678 - DNA, 25 bp, Homo sapien
agaccctgagtccatgccctgatgc

SEQ ID NO: 359679 - DNA, 25 bp, Homo sapien
gaccctgagtccatgccctgatgct

SEQ ID NO: 359680 - DNA, 25 bp, Homo sapien
acaggcagtccccctccagccacac

SEQ ID NO: 359681 - DNA, 25 bp, Homo sapien
tcagaacatcgcaatcacaggcagt

SEQ ID NO: 359682 - DNA, 25 bp, Homo sapien
agaacatcgcaatcacaggcagtcc

SEQ ID NO: 359683 - DNA, 25 bp, Homo sapien
tcacaggcagtccccctccagccac

SEQ ID NO: 359684 - DNA, 25 bp, Homo sapien
ttagaagaacggttctcagctggtg

SEQ ID NO: 359685 - DNA, 25 bp, Homo sapien
cctttttggccgcagatgcttgtga

SEQ ID NO: 359686 - DNA, 25 bp, Homo sapien
tgtgacaccggcaagttgcctggca

SEQ ID NO: 359687 - DNA, 25 bp, Homo sapien
ggcccacccatgaatagccttgatc

SEQ ID NO: 359688 - DNA, 25 bp, Homo sapien
gaagcgtgtttccaccagatcgagg

SEQ ID NO: 359689 - DNA, 25 bp, Homo sapien
gagcttctgccgattcaaggcccat

SEQ ID NO: 359690 - DNA, 25 bp, Homo sapien
tgggaggagacacgactcacagtca

SEQ ID NO: 359691 - DNA, 25 bp, Homo sapien
tcctcttgaggagtcaccagtggtc

SEQ ID NO: 359692 - DNA, 25 bp, Homo sapien
tcggtgggtgactgctccatgaaag

SEQ ID NO: 359693 - DNA, 25 bp, Homo sapien
cggtgggtgactgctccatgaaagg

SEQ ID NO: 359694 - DNA, 25 bp, Homo sapien
atcggtgggtgactgctccatgaaa

SEQ ID NO: 359695 - DNA, 25 bp, Homo sapien
actggtgggtgacagtgttccatga

SEQ ID NO: 359696 - DNA, 25 bp, Homo sapien
gagagggtgagagcgttccattgct

SEQ ID NO: 359697 - DNA, 25 bp, Homo sapien
gttccattggcaggtgacggtgttc

SEQ ID NO: 359698 - DNA, 25 bp, Homo sapien
tgttccatgaaagggtagcagcatt

SEQ ID NO: 359699 - DNA, 25 bp, Homo sapien
agtgttccattggtgggagacactg

SEQ ID NO: 359700 - DNA, 25 bp, Homo sapien
actgtggctacacacaagggcttgg

SEQ ID NO: 359701 - DNA, 25 bp, Homo sapien
cgtttctgcacaattaacttggagc

SEQ ID NO: 359702 - DNA, 25 bp, Homo sapien
cactgtggctacacacaagggcttg

SEQ ID NO: 359703 - DNA, 25 bp, Homo sapien
agctgtgtgcgtttctgcacaatta

SEQ ID NO: 359704 - DNA, 25 bp, Homo sapien
ctgccatgctcaggcccaacactgc

SEQ ID NO: 359705 - DNA, 25 bp, Homo sapien
ctccacctagcacccctgccatgct

SEQ ID NO: 359706 - DNA, 25 bp, Homo sapien
tgctctctggggacatggcagcccc

SEQ ID NO: 359707 - DNA, 25 bp, Homo sapien
tctggggacatggcagccccctcat

SEQ ID NO: 359708 - DNA, 25 bp, Homo sapien
aaacttctccaagtactcaggtcca

SEQ ID NO: 359709 - DNA, 25 bp, Homo sapien
catgcgctggaaggcgctagaggca

SEQ ID NO: 359710 - DNA, 25 bp, Homo sapien
tgacctgtatagcagcacatgggct

SEQ ID NO: 359711 - DNA, 25 bp, Homo sapien
ggctttgcggccgtgtgacctgtat

SEQ ID NO: 359712 - DNA, 25 bp, Homo sapien
gcttatcgcagagccaaggacattg

SEQ ID NO: 359713 - DNA, 25 bp, Homo sapien
gcaatgaaggaaccatgggcaggca

SEQ ID NO: 359714 - DNA, 25 bp, Homo sapien
ccttgagtcagagtagcatgggcaa

SEQ ID NO: 359715 - DNA, 25 bp, Homo sapien
tgctgcgctgagctagacaacagtc

SEQ ID NO: 359716 - DNA, 25 bp, Homo sapien
gaagcgttacatccaggctagtggc

SEQ ID NO: 359717 - DNA, 25 bp, Homo sapien
cagctgctgtattcttgctccacca

SEQ ID NO: 359718 - DNA, 25 bp, Homo sapien
gccagtgcccatggtcttctgagcc

SEQ ID NO: 359719 - DNA, 25 bp, Homo sapien
tgggactctgccagtgcccatggtc

SEQ ID NO: 359720 - DNA, 25 bp, Homo sapien
ttcttgctccaccaacagctgctgt

SEQ ID NO: 359721 - DNA, 25 bp, Homo sapien
acctgcacgtccagctccaccacca

SEQ ID NO: 359722 - DNA, 25 bp, Homo sapien
tcttcacctgcacgtccagctccac

SEQ ID NO: 359723 - DNA, 25 bp, Homo sapien
ctcttcacctgcacgtccagctcca

SEQ ID NO: 359724 - DNA, 25 bp, Homo sapien
ttcacctgcacgtccagctccacca

SEQ ID NO: 359725 - DNA, 25 bp, Homo sapien
gaccagtgggtagcataagaatttt

SEQ ID NO: 359726 - DNA, 25 bp, Homo sapien
agagaccaactgaaaccactcccag

SEQ ID NO: 359727 - DNA, 25 bp, Homo sapien
cattcctttgggaattggcttaggg

SEQ ID NO: 359728 - DNA, 25 bp, Homo sapien
ttgtcatagtttggctgacggaggc

SEQ ID NO: 359729 - DNA, 25 bp, Homo sapien
cttagatggtactcctgtgtgcctc

SEQ ID NO: 359730 - DNA, 25 bp, Homo sapien
atcgtcagcggtccagccacctgca

SEQ ID NO: 359731 - DNA, 25 bp, Homo sapien
ctctcggacctcatcgtcagcggtc

SEQ ID NO: 359732 - DNA, 25 bp, Homo sapien
ttagatggtactcctgtgtgcctct

SEQ ID NO: 359733 - DNA, 25 bp, Homo sapien
cagccgcttgtgcagcctgacggtg

SEQ ID NO: 359734 - DNA, 25 bp, Homo sapien
aggtccactgtctgtgccgctgtcc

SEQ ID NO: 359735 - DNA, 25 bp, Homo sapien
tctggaaatgccctacgctgctgtg

SEQ ID NO: 359736 - DNA, 25 bp, Homo sapien
cggatgagatgctcagaaggcccct

SEQ ID NO: 359737 - DNA, 25 bp, Homo sapien
tagaagcacgaaagtcaacagcaat

SEQ ID NO: 359738 - DNA, 25 bp, Homo sapien
ctttgacagtgatgcctcgctcttt

SEQ ID NO: 359739 - DNA, 25 bp, Homo sapien
acggtagaagcacgaaagtcaacag

SEQ ID NO: 359740 - DNA, 25 bp, Homo sapien
caatacccaaagcaatgctcttcaa

SEQ ID NO: 359741 - DNA, 25 bp, Homo sapien
ggctgacgaagcagttcaccaagac

SEQ ID NO: 359742 - DNA, 25 bp, Homo sapien
ctagctggctgacgaagcagttcac

SEQ ID NO: 359743 - DNA, 25 bp, Homo sapien
gctggctgacgaagcagttcaccaa

SEQ ID NO: 359744 - DNA, 25 bp, Homo sapien
ctgacgaagcagttcaccaagacaa

SEQ ID NO: 359745 - DNA, 25 bp, Homo sapien
tgtggaccctgaaccacctggttcc

SEQ ID NO: 359746 - DNA, 25 bp, Homo sapien
ttctgtggaccctgaaccacctggt

SEQ ID NO: 359747 - DNA, 25 bp, Homo sapien
tctgtggaccctgaaccacctggtt

SEQ ID NO: 359748 - DNA, 25 bp, Homo sapien
tctctgtccagaacccggtgcaggg

SEQ ID NO: 359749 - DNA, 25 bp, Homo sapien
tccagaacccggtgcagggtcagcg

SEQ ID NO: 359750 - DNA, 25 bp, Homo sapien
ctgtccagaacccggtgcagggtca

SEQ ID NO: 359751 - DNA, 25 bp, Homo sapien
ctctgtccagaacccggtgcagggt

SEQ ID NO: 359752 - DNA, 25 bp, Homo sapien
gaggcagcttagcagtgtagacagt

SEQ ID NO: 359753 - DNA, 25 bp, Homo sapien
gagggtttctttagctttgagactg

SEQ ID NO: 359754 - DNA, 25 bp, Homo sapien
aagcgcttactacctacactttggg

SEQ ID NO: 359755 - DNA, 25 bp, Homo sapien
tgctccacattagttaagcgcttac

SEQ ID NO: 359756 - DNA, 25 bp, Homo sapien
gatggtatcccattagtgtcaagac

SEQ ID NO: 359757 - DNA, 25 bp, Homo sapien
gtgtcaagaccacatggacattccc

SEQ ID NO: 359758 - DNA, 25 bp, Homo sapien
gaaagtcctacagctgatccaagag

SEQ ID NO: 359759 - DNA, 25 bp, Homo sapien
gaaatattggtgaaagtcctacagc

SEQ ID NO: 359760 - DNA, 25 bp, Homo sapien
gtctatttcatgtttcatagatgca

SEQ ID NO: 359761 - DNA, 25 bp, Homo sapien
ctcatgtgcttgtctatttcatgtt

SEQ ID NO: 359762 - DNA, 25 bp, Homo sapien
tttcatgtttcatagatgcatgcat

SEQ ID NO: 359763 - DNA, 25 bp, Homo sapien
catgtgcttgtctatttcatgtttc

SEQ ID NO: 359764 - DNA, 25 bp, Homo sapien
gaagtctgagacatctattagacat

SEQ ID NO: 359765 - DNA, 25 bp, Homo sapien
gaaggagagattttgtccccacgca

SEQ ID NO: 359766 - DNA, 25 bp, Homo sapien
gggatgccattaaccaagatggaaa

SEQ ID NO: 359767 - DNA, 25 bp, Homo sapien
tctgcatgagccttttgtaagattt

SEQ ID NO: 359768 - DNA, 25 bp, Homo sapien
tatttgtaaaccatatacattttaa

SEQ ID NO: 359769 - DNA, 25 bp, Homo sapien
ttttttttgagacaaagtcttgctc

SEQ ID NO: 359770 - DNA, 25 bp, Homo sapien
ttttgagacaaagtcttgctctgtc

SEQ ID NO: 359771 - DNA, 25 bp, Homo sapien
ttttttgagacaaagtcttgctctg

SEQ ID NO: 359772 - DNA, 25 bp, Homo sapien
gagtactgttttcgccccatggtca

SEQ ID NO: 359773 - DNA, 25 bp, Homo sapien
gagagggctcatgacgtcactcaag

SEQ ID NO: 359774 - DNA, 25 bp, Homo sapien
tacaaaatgcccagaactgcgctag

SEQ ID NO: 359775 - DNA, 25 bp, Homo sapien
tatcatataacagtcccaaagtcgg

SEQ ID NO: 359776 - DNA, 25 bp, Homo sapien
gattttagtgtccaactattaattg

SEQ ID NO: 359777 - DNA, 25 bp, Homo sapien
ttttagtgtccaactattaattgca

SEQ ID NO: 359778 - DNA, 25 bp, Homo sapien
aggggagaccagattttagtgtcca

SEQ ID NO: 359779 - DNA, 25 bp, Homo sapien
tttagtgtccaactattaattgcaa

SEQ ID NO: 359780 - DNA, 25 bp, Homo sapien
cagactggagaacggcttgcggcca

SEQ ID NO: 359781 - DNA, 25 bp, Homo sapien
gagaacggcttgcggccaggaattc

SEQ ID NO: 359782 - DNA, 25 bp, Homo sapien
aacggcttgcggccaggaattcgag

SEQ ID NO: 359783 - DNA, 25 bp, Homo sapien
cccagactggagaacggcttgcggc

SEQ ID NO: 359784 - DNA, 25 bp, Homo sapien
tatatacccaaacacttccgcaagg

SEQ ID NO: 359785 - DNA, 25 bp, Homo sapien
cataaccaaggaactctaccgtagg

SEQ ID NO: 359786 - DNA, 25 bp, Homo sapien
ttggtggaccacgattcatagctgt

SEQ ID NO: 359787 - DNA, 25 bp, Homo sapien
tgacagggtcatacaaacacttggg

SEQ ID NO: 359788 - DNA, 25 bp, Homo sapien
agagtctctgacctatgaggctgca

SEQ ID NO: 359789 - DNA, 25 bp, Homo sapien
tgagagtctctgacctatgaggctg

SEQ ID NO: 359790 - DNA, 25 bp, Homo sapien
gttttgagagtctctgacctatgag

SEQ ID NO: 359791 - DNA, 25 bp, Homo sapien
ggaagaagttttgagagtctctgac

SEQ ID NO: 359792 - DNA, 25 bp, Homo sapien
tgggtatcacatggaagacgctgcc

SEQ ID NO: 359793 - DNA, 25 bp, Homo sapien
ggtatcacatggaagacgctgccca

SEQ ID NO: 359794 - DNA, 25 bp, Homo sapien
ggtgggtatcacatggaagacgctg

SEQ ID NO: 359795 - DNA, 25 bp, Homo sapien
gggtatcacatggaagacgctgccc

SEQ ID NO: 359796 - DNA, 25 bp, Homo sapien
cagtaaggaggtctaatgtatttgc

SEQ ID NO: 359797 - DNA, 25 bp, Homo sapien
gagataacgctgtgagtttcaccag

SEQ ID NO: 359798 - DNA, 25 bp, Homo sapien
gagagtctgtatcagtagatcctca

SEQ ID NO: 359799 - DNA, 25 bp, Homo sapien
tccacagatttgagagcccagtaca

SEQ ID NO: 359800 - DNA, 25 bp, Homo sapien
gagatcataacctaattcaaggcaa

SEQ ID NO: 359801 - DNA, 25 bp, Homo sapien
tacagtgttgcagagaagtaacaag

SEQ ID NO: 359802 - DNA, 25 bp, Homo sapien
gaagtaacaagagtgcccttccttg

SEQ ID NO: 359803 - DNA, 25 bp, Homo sapien
tctaagacgtctatgattctagctc

SEQ ID NO: 359804 - DNA, 25 bp, Homo sapien
tttcttgcactgcctttgtctagct

SEQ ID NO: 359805 - DNA, 25 bp, Homo sapien
ctttggtgtcatggtaatgctagtc

SEQ ID NO: 359806 - DNA, 25 bp, Homo sapien
ttcttgcactgcctttgtctagctt

SEQ ID NO: 359807 - DNA, 25 bp, Homo sapien
cattgtgactgagatctcttattaa

SEQ ID NO: 359808 - DNA, 25 bp, Homo sapien
catttattgcttcccgtaagttttg

SEQ ID NO: 359809 - DNA, 25 bp, Homo sapien
ggcctaatacatggcctatctttga

SEQ ID NO: 359810 - DNA, 25 bp, Homo sapien
gattataggcacaagacattgtgac

SEQ ID NO: 359811 - DNA, 25 bp, Homo sapien
ggcagctctctacatgccaggaaca

SEQ ID NO: 359812 - DNA, 25 bp, Homo sapien
gctgggctttgatctggaacttcca

SEQ ID NO: 359813 - DNA, 25 bp, Homo sapien
cgtgagaacatagctagaaggcagc

SEQ ID NO: 359814 - DNA, 25 bp, Homo sapien
gatcataagggtagggccttgacca

SEQ ID NO: 359815 - DNA, 25 bp, Homo sapien
caaaatgttagtactagggctgtca

SEQ ID NO: 359816 - DNA, 25 bp, Homo sapien
caagatgtctatgaagggccctgag

SEQ ID NO: 359817 - DNA, 25 bp, Homo sapien
gacagaaggctgagtaaacggacca

SEQ ID NO: 359818 - DNA, 25 bp, Homo sapien
gggctgtcacagcaaactaccatag

SEQ ID NO: 359819 - DNA, 25 bp, Homo sapien
tatagatagggaccatgtctcactc

SEQ ID NO: 359820 - DNA, 25 bp, Homo sapien
gcatcctgtgcgtgtctgtattaca

SEQ ID NO: 359821 - DNA, 25 bp, Homo sapien
gaaaaacactgctcgaggatcttaa

SEQ ID NO: 359822 - DNA, 25 bp, Homo sapien
tgtttctatgactggagcccgtccc

SEQ ID NO: 359823 - DNA, 25 bp, Homo sapien
gcatggcctagggataggcccaatt

SEQ ID NO: 359824 - DNA, 25 bp, Homo sapien
tgagaaaattcagggacggaaagga

SEQ ID NO: 359825 - DNA, 25 bp, Homo sapien
ggctggcatggcctagggataggcc

SEQ ID NO: 359826 - DNA, 25 bp, Homo sapien
atgagaaaattcagggacggaaagg

SEQ ID NO: 359827 - DNA, 25 bp, Homo sapien
atgagaacacactgaattagctggg

SEQ ID NO: 359828 - DNA, 25 bp, Homo sapien
tgcaaatgtgacttgatcaaggatc

SEQ ID NO: 359829 - DNA, 25 bp, Homo sapien
tgccatcacagtgtcttttcaagac

SEQ ID NO: 359830 - DNA, 25 bp, Homo sapien
tatttgaaaaagaggtctctgcaaa

SEQ ID NO: 359831 - DNA, 25 bp, Homo sapien
cattagttaagccagatagatttcc

SEQ ID NO: 359832 - DNA, 25 bp, Homo sapien
cctgcatttagtgtccacctggaaa

SEQ ID NO: 359833 - DNA, 25 bp, Homo sapien
aagttgaaaatccagcagggccacg

SEQ ID NO: 359834 - DNA, 25 bp, Homo sapien
tacattcaccagttgagtgggttag

SEQ ID NO: 359835 - DNA, 25 bp, Homo sapien
cttctaggactattcgtcttatcta

SEQ ID NO: 359836 - DNA, 25 bp, Homo sapien
ttctaggactattcgtcttatctac

SEQ ID NO: 359837 - DNA, 25 bp, Homo sapien
gctcaggcaaggcagattcaattcc

SEQ ID NO: 359838 - DNA, 25 bp, Homo sapien
aatggtaaaaccagggcagtatgcc

SEQ ID NO: 359839 - DNA, 25 bp, Homo sapien
taagacctctttcccagtagaagtc

SEQ ID NO: 359840 - DNA, 25 bp, Homo sapien
catttggagaaagggcctcggaagt

SEQ ID NO: 359841 - DNA, 25 bp, Homo sapien
tgttatctcgcccactaatatctca

SEQ ID NO: 359842 - DNA, 25 bp, Homo sapien
ccttcacaaagtctatgagtatagg

SEQ ID NO: 359843 - DNA, 25 bp, Homo sapien
cacaaagtctatgagtataggcttt

SEQ ID NO: 359844 - DNA, 25 bp, Homo sapien
ctgcttcaatgttatctcgcccact

SEQ ID NO: 359845 - DNA, 25 bp, Homo sapien
ccgaaaaggtctgctaaagtcacaa

SEQ ID NO: 359846 - DNA, 25 bp, Homo sapien
gggccagccgaaaaggtctgctaaa

SEQ ID NO: 359847 - DNA, 25 bp, Homo sapien
gaaaaggtctgctaaagtcacaaaa

SEQ ID NO: 359848 - DNA, 25 bp, Homo sapien
cagccgaaaaggtctgctaaagtca

SEQ ID NO: 359849 - DNA, 25 bp, Homo sapien
tgttgagtacaagaaagtctacctc

SEQ ID NO: 359850 - DNA, 25 bp, Homo sapien
tggtcacaacctagagatcaagcag

SEQ ID NO: 359851 - DNA, 25 bp, Homo sapien
cacaagatgtttagggttacaggaa

SEQ ID NO: 359852 - DNA, 25 bp, Homo sapien
taaaatcaggcagagacctgttggc

SEQ ID NO: 359853 - DNA, 25 bp, Homo sapien
tcagtaaacaaagatgaacaatcct

SEQ ID NO: 359854 - DNA, 25 bp, Homo sapien
caatatcttaagatcaaaagcattc

SEQ ID NO: 359855 - DNA, 25 bp, Homo sapien
tcatttaggtttcgctttaaagata

SEQ ID NO: 359856 - DNA, 25 bp, Homo sapien
cacagcgcccgacctgtgtgtcatt

SEQ ID NO: 359857 - DNA, 25 bp, Homo sapien
tcagcgcaaaaagcgcaggactcgt

SEQ ID NO: 359858 - DNA, 25 bp, Homo sapien
aaaaagggcggcactggaaacagct

SEQ ID NO: 359859 - DNA, 25 bp, Homo sapien
tgagtgcccaggacggatctcactg

SEQ ID NO: 359860 - DNA, 25 bp, Homo sapien
cagcctgggcgaacaagttaaactc

SEQ ID NO: 359861 - DNA, 25 bp, Homo sapien
acggggcctcctgatgtgaagcgac

SEQ ID NO: 359862 - DNA, 25 bp, Homo sapien
ctcctgatgtgaagcgaccccagtg

SEQ ID NO: 359863 - DNA, 25 bp, Homo sapien
ctgatgtgaagcgaccccagtggca

SEQ ID NO: 359864 - DNA, 25 bp, Homo sapien
gggcctcctgatgtgaagcgacccc

SEQ ID NO: 359865 - DNA, 25 bp, Homo sapien
agggttgcgggcggcctctcctcag

SEQ ID NO: 359866 - DNA, 25 bp, Homo sapien
gcgggcctcggccatgtccactgac

SEQ ID NO: 359867 - DNA, 25 bp, Homo sapien
tcccgagggttgcgggcggcctctc

SEQ ID NO: 359868 - DNA, 25 bp, Homo sapien
gcagctcccacacgcggacaccgcg

SEQ ID NO: 359869 - DNA, 25 bp, Homo sapien
tcagcggcgactagcgcgcgaacat

SEQ ID NO: 359870 - DNA, 25 bp, Homo sapien
aacatcctggaagacgcgttgccgg

SEQ ID NO: 359871 - DNA, 25 bp, Homo sapien
ctacgagatcaaggtcggcgcgtgc

SEQ ID NO: 359872 - DNA, 25 bp, Homo sapien
gcgtgcgcgcttgcgcgagaccggc

SEQ ID NO: 359873 - DNA, 25 bp, Homo sapien
tacagggctagaggtcgggactcta

SEQ ID NO: 359874 - DNA, 25 bp, Homo sapien
gggagggagcctgggtcgggcgcac

SEQ ID NO: 359875 - DNA, 25 bp, Homo sapien
ggagggaggtgcgggttcagcgccg

SEQ ID NO: 359876 - DNA, 25 bp, Homo sapien
ctggaggacgggaccctgggaagtg

SEQ ID NO: 359877 - DNA, 25 bp, Homo sapien
gcccagatgtgaaagtggtacacca

SEQ ID NO: 359878 - DNA, 25 bp, Homo sapien
cgtatacttgaagcattctgaaccc

SEQ ID NO: 359879 - DNA, 25 bp, Homo sapien
tgaacttagcacactgcccagatgt

SEQ ID NO: 359880 - DNA, 25 bp, Homo sapien
gggttcctcatgaagacttgtgaca

SEQ ID NO: 359881 - DNA, 25 bp, Homo sapien
caaggaataaccggcagatacaggg

SEQ ID NO: 359882 - DNA, 25 bp, Homo sapien
ccaccttcttgtgggagattggata

SEQ ID NO: 359883 - DNA, 25 bp, Homo sapien
tattgtccaggcttgccagtagtca

SEQ ID NO: 359884 - DNA, 25 bp, Homo sapien
caggcttgccagtagtcatccagag

SEQ ID NO: 359885 - DNA, 25 bp, Homo sapien
actcatttgatttctgggttgcaca

SEQ ID NO: 359886 - DNA, 25 bp, Homo sapien
tccctccgctgggagcaatgatatc

SEQ ID NO: 359887 - DNA, 25 bp, Homo sapien
ggatttgaagtgagtgcccccttac

SEQ ID NO: 359888 - DNA, 25 bp, Homo sapien
gatgtaggtcatgggagatagaaaa

SEQ ID NO: 359889 - DNA, 25 bp, Homo sapien
cttcagatgcatgagaggagcttca

SEQ ID NO: 359890 - DNA, 25 bp, Homo sapien
tgccgtgccagtaagcataatgcag

SEQ ID NO: 359891 - DNA, 25 bp, Homo sapien
tcaaatggtcaggttagaggtgccg

SEQ ID NO: 359892 - DNA, 25 bp, Homo sapien
tcctgagcgttctccttaagggaca

SEQ ID NO: 359893 - DNA, 25 bp, Homo sapien
tacactcaagtggagtgccctggaa

SEQ ID NO: 359894 - DNA, 25 bp, Homo sapien
gctccggcagctttcgtcatgtggg

SEQ ID NO: 359895 - DNA, 25 bp, Homo sapien
gaccactaggtatacaacaggaatt

SEQ ID NO: 359896 - DNA, 25 bp, Homo sapien
tatttgaaaggccttggtacactca

SEQ ID NO: 359897 - DNA, 25 bp, Homo sapien
tgaaagcagttgcaagccacagatg

SEQ ID NO: 359898 - DNA, 25 bp, Homo sapien
gcaaagcactataaaccgaggaacc

SEQ ID NO: 359899 - DNA, 25 bp, Homo sapien
tgttcggtctaagaagcagatcact

SEQ ID NO: 359900 - DNA, 25 bp, Homo sapien
ttgtcccgggttgttcagctaacag

SEQ ID NO: 359901 - DNA, 25 bp, Homo sapien
cagcaagagtcaacgtttttgtttc

SEQ ID NO: 359902 - DNA, 25 bp, Homo sapien
gcaaacattgaacagcaacacggga

SEQ ID NO: 359903 - DNA, 25 bp, Homo sapien
cccatcatcactaggagcgacaagt

SEQ ID NO: 359904 - DNA, 25 bp, Homo sapien
tctgttttgggctcattaagctctg

SEQ ID NO: 359905 - DNA, 25 bp, Homo sapien
caggctctgtttggatcaattaaag

SEQ ID NO: 359906 - DNA, 25 bp, Homo sapien
ccgcacctggtcgaggagaattttt

SEQ ID NO: 359907 - DNA, 25 bp, Homo sapien
cggcgatcttgagctcagggccaaa

SEQ ID NO: 359908 - DNA, 25 bp, Homo sapien
tttagaggaccagatcggcgatctt

SEQ ID NO: 359909 - DNA, 25 bp, Homo sapien
tagggagtaataacatggtcgtgtc

SEQ ID NO: 359910 - DNA, 25 bp, Homo sapien
tgcaaggatcctagtgcccggagga

SEQ ID NO: 359911 - DNA, 25 bp, Homo sapien
tcctttgtccgtgtggcgcagtgaa

SEQ ID NO: 359912 - DNA, 25 bp, Homo sapien
tcccgtgggcttgactagggagtaa

SEQ ID NO: 359913 - DNA, 25 bp, Homo sapien
tcacctcagcgttcgaatcattggc

SEQ ID NO: 359914 - DNA, 25 bp, Homo sapien
tgttaccaaatgaaccgggctgcca

SEQ ID NO: 359915 - DNA, 25 bp, Homo sapien
caccacgagagaggcttttgaacag

SEQ ID NO: 359916 - DNA, 25 bp, Homo sapien
gatgcctgaacacgcaaagtcggct

SEQ ID NO: 359917 - DNA, 25 bp, Homo sapien
tcagacatagcgatagtaggcacct

SEQ ID NO: 359918 - DNA, 25 bp, Homo sapien
gaagaagaatcaacgcagaagctgc

SEQ ID NO: 359919 - DNA, 25 bp, Homo sapien
tcatactgaggacgaaggactctcc

SEQ ID NO: 359920 - DNA, 25 bp, Homo sapien
gttgatgctgttaataccggcccca

SEQ ID NO: 359921 - DNA, 25 bp, Homo sapien
ggtgcagccgtcatcactgatccaa

SEQ ID NO: 359922 - DNA, 25 bp, Homo sapien
cattaggtgatcctgaggcatgctc

SEQ ID NO: 359923 - DNA, 25 bp, Homo sapien
atttgggaaccgctggcacatgcac

SEQ ID NO: 359924 - DNA, 25 bp, Homo sapien
caaagatggcccgtgaaatacccct

SEQ ID NO: 359925 - DNA, 25 bp, Homo sapien
tttattcagagtagcataaaatttg

SEQ ID NO: 359926 - DNA, 25 bp, Homo sapien
ttggctaaaagccatggttatttca

SEQ ID NO: 359927 - DNA, 25 bp, Homo sapien
gaaagaccccagtccacacagagga

SEQ ID NO: 359928 - DNA, 25 bp, Homo sapien
gaactctctaacctgttggctgatg

SEQ ID NO: 359929 - DNA, 25 bp, Homo sapien
tcctcactggctcacggcaggcaaa

SEQ ID NO: 359930 - DNA, 25 bp, Homo sapien
aatatggcatctctggccaaaccca

SEQ ID NO: 359931 - DNA, 25 bp, Homo sapien
gcctccaacacactctagttcaaaa

SEQ ID NO: 359932 - DNA, 25 bp, Homo sapien
gatttaatactgcaaatatggcatc

SEQ ID NO: 359933 - DNA, 25 bp, Homo sapien
ctatgcagaatgacgggtgaccacg

SEQ ID NO: 359934 - DNA, 25 bp, Homo sapien
cataagaatccaaaagtgagcggcg

SEQ ID NO: 359935 - DNA, 25 bp, Homo sapien
caagttttaaatccggcatcgcaag

SEQ ID NO: 359936 - DNA, 25 bp, Homo sapien
tctggttctcaagtggctaagtggc

SEQ ID NO: 359937 - DNA, 25 bp, Homo sapien
acatcaccggaacccctcaaatatt

SEQ ID NO: 359938 - DNA, 25 bp, Homo sapien
gagcccaaagaataaacagatggga

SEQ ID NO: 359939 - DNA, 25 bp, Homo sapien
cccacagagaagatccctaaacaca

SEQ ID NO: 359940 - DNA, 25 bp, Homo sapien
caatagctcgcttttaataacaaca

SEQ ID NO: 359941 - DNA, 25 bp, Homo sapien
ggaaacgccttcatgctggaccagg

SEQ ID NO: 359942 - DNA, 25 bp, Homo sapien
tctgagagatgggaccaacacacgc

SEQ ID NO: 359943 - DNA, 25 bp, Homo sapien
ggagggtaccgtgcatccttgcaga

SEQ ID NO: 359944 - DNA, 25 bp, Homo sapien
cacacgccgtcaaaggaagtgagtt

SEQ ID NO: 359945 - DNA, 25 bp, Homo sapien
cagcccagggcaaagccatcaaact

SEQ ID NO: 359946 - DNA, 25 bp, Homo sapien
gccatcaaacttctcgtgttcccat

SEQ ID NO: 359947 - DNA, 25 bp, Homo sapien
ctttctggaactgggcgtgggtgag

SEQ ID NO: 359948 - DNA, 25 bp, Homo sapien
gcgtgggtgaggtattcccagccca

SEQ ID NO: 359949 - DNA, 25 bp, Homo sapien
catctctagtcctctttgggtgcag

SEQ ID NO: 359950 - DNA, 25 bp, Homo sapien
ggacaggtaggcacttggcagcact

SEQ ID NO: 359951 - DNA, 25 bp, Homo sapien
tgtggacagtccaatgcactgagtg

SEQ ID NO: 359952 - DNA, 25 bp, Homo sapien
gaagttcatccgcacggcattccag

SEQ ID NO: 359953 - DNA, 25 bp, Homo sapien
gatgggcttctgccgaacttccagg

SEQ ID NO: 359954 - DNA, 25 bp, Homo sapien
tgggcttctgccgaacttccaggat

SEQ ID NO: 359955 - DNA, 25 bp, Homo sapien
ggatgggcttctgccgaacttccag

SEQ ID NO: 359956 - DNA, 25 bp, Homo sapien
ggcttctgccgaacttccaggatgt

SEQ ID NO: 359957 - DNA, 25 bp, Homo sapien
caggtgcgccagaaaggtgaacaaa

SEQ ID NO: 359958 - DNA, 25 bp, Homo sapien
gcaggtgcgccagaaaggtgaacaa

SEQ ID NO: 359959 - DNA, 25 bp, Homo sapien
ggtgcgccagaaaggtgaacaaagg

SEQ ID NO: 359960 - DNA, 25 bp, Homo sapien
cagcaggtgcgccagaaaggtgaac

SEQ ID NO: 359961 - DNA, 25 bp, Homo sapien
ggaccgtcctgtgcccgacagggac

SEQ ID NO: 359962 - DNA, 25 bp, Homo sapien
gaccgcaggttggttgcattgtgca

SEQ ID NO: 359963 - DNA, 25 bp, Homo sapien
ctgttaaaatccgatgcagcggcaa

SEQ ID NO: 359964 - DNA, 25 bp, Homo sapien
gcagcggcaacgtgacgtaggttaa

SEQ ID NO: 359965 - DNA, 25 bp, Homo sapien
cttgcttaaaacccctcagaggcct

SEQ ID NO: 359966 - DNA, 25 bp, Homo sapien
agagcatggcagaacttcccaacct

SEQ ID NO: 359967 - DNA, 25 bp, Homo sapien
cagacacgcacacagtgcggagcca

SEQ ID NO: 359968 - DNA, 25 bp, Homo sapien
ttcacttccatacactcaacagaca

SEQ ID NO: 359969 - DNA, 25 bp, Homo sapien
tgtgtgcggagccatcagatcaccc

SEQ ID NO: 359970 - DNA, 25 bp, Homo sapien
cagatacagacaaccggagtccagg

SEQ ID NO: 359971 - DNA, 25 bp, Homo sapien
tgtcaccaaagagcacgtggttctg

SEQ ID NO: 359972 - DNA, 25 bp, Homo sapien
tgggaaatcccctgaaactgaccaa

SEQ ID NO: 359973 - DNA, 25 bp, Homo sapien
gacttcttcatctcagcgatccggt

SEQ ID NO: 359974 - DNA, 25 bp, Homo sapien
gtcctcccggaagaactcctcgctg

SEQ ID NO: 359975 - DNA, 25 bp, Homo sapien
tgtcgttggccgagtgcgacttctt

SEQ ID NO: 359976 - DNA, 25 bp, Homo sapien
ttcatctcagcgatccggttccggg

SEQ ID NO: 359977 - DNA, 25 bp, Homo sapien
gaacaagcagccaaagtcaccagag

SEQ ID NO: 359978 - DNA, 25 bp, Homo sapien
gtcaccagagtagcagaacagcccc

SEQ ID NO: 359979 - DNA, 25 bp, Homo sapien
aaacaacctgacacagctcccaggg

SEQ ID NO: 359980 - DNA, 25 bp, Homo sapien
tcctatcccaccctcaaacaacctg

SEQ ID NO: 359981 - DNA, 25 bp, Homo sapien
cagcaggtccacccaggcaggcgcc

SEQ ID NO: 359982 - DNA, 25 bp, Homo sapien
cagccagtctcttctgcccactggc

SEQ ID NO: 359983 - DNA, 25 bp, Homo sapien
tgggtccccagccagtctcttctgc

SEQ ID NO: 359984 - DNA, 25 bp, Homo sapien
caggtccacccaggcaggcgccagg

SEQ ID NO: 359985 - DNA, 25 bp, Homo sapien
aagccaaacgacatcttctgtgcca

SEQ ID NO: 359986 - DNA, 25 bp, Homo sapien
ccatgttgctgtacttgtagaagcc

SEQ ID NO: 359987 - DNA, 25 bp, Homo sapien
tgtgtcacctgtagacactcggctg

SEQ ID NO: 359988 - DNA, 25 bp, Homo sapien
ccttcatgcgcacaaactccatgtt

SEQ ID NO: 359989 - DNA, 25 bp, Homo sapien
gctggcagcaaggctggctgcggat

SEQ ID NO: 359990 - DNA, 25 bp, Homo sapien
gcaaggctggctgcggatggtgccc

SEQ ID NO: 359991 - DNA, 25 bp, Homo sapien
cagcaaggctggctgcggatggtgc

SEQ ID NO: 359992 - DNA, 25 bp, Homo sapien
ctggctgcggatggtgcccgctggg

SEQ ID NO: 359993 - DNA, 25 bp, Homo sapien
acagtgaggaggtgacagcgacacc

SEQ ID NO: 359994 - DNA, 25 bp, Homo sapien
tgaggccgaccatgaagaatgacgt

SEQ ID NO: 359995 - DNA, 25 bp, Homo sapien
aatgacgttaagaggaccagggagc

SEQ ID NO: 359996 - DNA, 25 bp, Homo sapien
acttcccagggaactagagactgag

SEQ ID NO: 359997 - DNA, 25 bp, Homo sapien
tcccctacggtcatgtcgctgaaca

SEQ ID NO: 359998 - DNA, 25 bp, Homo sapien
aagatgaccccctggaacgtgttgg

SEQ ID NO: 359999 - DNA, 25 bp, Homo sapien
cttcttgagcgcctcgtagcggatg

SEQ ID NO: 360000 - DNA, 25 bp, Homo sapien
ggagccctgaaagatgaccccctgg

SEQ ID NO: 360001 - DNA, 25 bp, Homo sapien
atcttggactcctcccccttgctgt

SEQ ID NO: 360002 - DNA, 25 bp, Homo sapien
cttgctgtccatggggtgtttactg

SEQ ID NO: 360003 - DNA, 25 bp, Homo sapien
aagctgtcaatcatgaagaagatgt

SEQ ID NO: 360004 - DNA, 25 bp, Homo sapien
atgttggggtagctgatcttggact

SEQ ID NO: 360005 - DNA, 25 bp, Homo sapien
acaccgcacaggtcaccatgtagtc

SEQ ID NO: 360006 - DNA, 25 bp, Homo sapien
accgcacaggtcaccatgtagtcca

SEQ ID NO: 360007 - DNA, 25 bp, Homo sapien
cacaccgcacaggtcaccatgtagt

SEQ ID NO: 360008 - DNA, 25 bp, Homo sapien
caccgcacaggtcaccatgtagtcc

SEQ ID NO: 360009 - DNA, 25 bp, Homo sapien
gagattcaggcagacgctctcctcc

SEQ ID NO: 360010 - DNA, 25 bp, Homo sapien
tctcctcccagtcgatgtcagggtc

SEQ ID NO: 360011 - DNA, 25 bp, Homo sapien
caggatgagattcaggcagacgctc

SEQ ID NO: 360012 - DNA, 25 bp, Homo sapien
cccagtcgatgtcagggtctcccag

SEQ ID NO: 360013 - DNA, 25 bp, Homo sapien
tagccccatgttaacagatcagagt

SEQ ID NO: 360014 - DNA, 25 bp, Homo sapien
ctctagcgacgggagatgggaccca

SEQ ID NO: 360015 - DNA, 25 bp, Homo sapien
tctgtacaatggactaagggcatct

SEQ ID NO: 360016 - DNA, 25 bp, Homo sapien
cctactgagctcttagtggacggcg

SEQ ID NO: 360017 - DNA, 25 bp, Homo sapien
tggtcccggtcctgggtgctctcac

SEQ ID NO: 360018 - DNA, 25 bp, Homo sapien
cagagctgggatctatggaaagagg

SEQ ID NO: 360019 - DNA, 25 bp, Homo sapien
gaaagaggtgcaagaggccaacctt

SEQ ID NO: 360020 - DNA, 25 bp, Homo sapien
gtcctgggtgctctcactgactcgg

SEQ ID NO: 360021 - DNA, 25 bp, Homo sapien
gagaacaggcagaacccgcccggga

SEQ ID NO: 360022 - DNA, 25 bp, Homo sapien
ccaggtgttcagtctaagaagaatc

SEQ ID NO: 360023 - DNA, 25 bp, Homo sapien
gaatcaaactgtgtacacgtctgtg

SEQ ID NO: 360024 - DNA, 25 bp, Homo sapien
ggcctcggtgttctcatcacactct

SEQ ID NO: 360025 - DNA, 25 bp, Homo sapien
agatccagggctgcgctttctcagt

SEQ ID NO: 360026 - DNA, 25 bp, Homo sapien
catagcactggccataccgtctgtc

SEQ ID NO: 360027 - DNA, 25 bp, Homo sapien
tcttgaccagagtcgtgacctctct

SEQ ID NO: 360028 - DNA, 25 bp, Homo sapien
gcatgtaaacagctggactgccacc

SEQ ID NO: 360029 - DNA, 25 bp, Homo sapien
taggcgaatcacttcatctccgagc

SEQ ID NO: 360030 - DNA, 25 bp, Homo sapien
agctcctcccacactgcgatttagt

SEQ ID NO: 360031 - DNA, 25 bp, Homo sapien
tagtggatgaaatacgttaggcgaa

SEQ ID NO: 360032 - DNA, 25 bp, Homo sapien
cccacactgcgatttagtggatgaa

SEQ ID NO: 360033 - DNA, 25 bp, Homo sapien
gcttccggcgcacatagaaaagcat

SEQ ID NO: 360034 - DNA, 25 bp, Homo sapien
tttcgctgccggagtacgccagctt

SEQ ID NO: 360035 - DNA, 25 bp, Homo sapien
gtctgcaccgctttcgctgccggag

SEQ ID NO: 360036 - DNA, 25 bp, Homo sapien
agtacgccagcttccggcgcacata

SEQ ID NO: 360037 - DNA, 25 bp, Homo sapien
ccagaagacgatgcggtcatccttg

SEQ ID NO: 360038 - DNA, 25 bp, Homo sapien
ccaagtccagaagacgatgcggtca

SEQ ID NO: 360039 - DNA, 25 bp, Homo sapien
gtccagaagacgatgcggtcatcct

SEQ ID NO: 360040 - DNA, 25 bp, Homo sapien
aagtccagaagacgatgcggtcatc

SEQ ID NO: 360041 - DNA, 25 bp, Homo sapien
ttgcgagggctctgagatgcgccac

SEQ ID NO: 360042 - DNA, 25 bp, Homo sapien
tttctggccagaaatttgcgagggc

SEQ ID NO: 360043 - DNA, 25 bp, Homo sapien
aatttgcgagggctctgagatgcgc

SEQ ID NO: 360044 - DNA, 25 bp, Homo sapien
ccagaaatttgcgagggctctgaga

SEQ ID NO: 360045 - DNA, 25 bp, Homo sapien
ggagccaggaacgccactggctggc

SEQ ID NO: 360046 - DNA, 25 bp, Homo sapien
caggaacgccactggctggctggtg

SEQ ID NO: 360047 - DNA, 25 bp, Homo sapien
gaaaatcccgaggagccaggaacgc

SEQ ID NO: 360048 - DNA, 25 bp, Homo sapien
agccaggaacgccactggctggctg

SEQ ID NO: 360049 - DNA, 25 bp, Homo sapien
ctgcggcagtcccagcgggaacccg

SEQ ID NO: 360050 - DNA, 25 bp, Homo sapien
cacccactccccctggctgcggcag

SEQ ID NO: 360051 - DNA, 25 bp, Homo sapien
cactccccctggctgcggcagtccc

SEQ ID NO: 360052 - DNA, 25 bp, Homo sapien
ctccccctggctgcggcagtcccag

SEQ ID NO: 360053 - DNA, 25 bp, Homo sapien
gaattgccactaactctcctcctgg

SEQ ID NO: 360054 - DNA, 25 bp, Homo sapien
tgaattgccactaactctcctcctg

SEQ ID NO: 360055 - DNA, 25 bp, Homo sapien
tcctggttctgcacgacgctggact

SEQ ID NO: 360056 - DNA, 25 bp, Homo sapien
tctgcacgacgctggactggtggca

SEQ ID NO: 360057 - DNA, 25 bp, Homo sapien
ggaggattctcccagctatgttaca

SEQ ID NO: 360058 - DNA, 25 bp, Homo sapien
ggtcacctggtgaacagctaggaaa

SEQ ID NO: 360059 - DNA, 25 bp, Homo sapien
cttcctgggatagtctaagaacccg

SEQ ID NO: 360060 - DNA, 25 bp, Homo sapien
gggaccacctcagcttagtttcaaa

SEQ ID NO: 360061 - DNA, 25 bp, Homo sapien
agcaactctatctgttccaaggaag

SEQ ID NO: 360062 - DNA, 25 bp, Homo sapien
caatcgtttaagatgactccaatgc

SEQ ID NO: 360063 - DNA, 25 bp, Homo sapien
cagatggtcagggtccatcctggct

SEQ ID NO: 360064 - DNA, 25 bp, Homo sapien
caatgcttgctggagcctgcggaag

SEQ ID NO: 360065 - DNA, 25 bp, Homo sapien
tgagccagcaactaggatcagcacc

SEQ ID NO: 360066 - DNA, 25 bp, Homo sapien
cagataagcacccaaggtcagcact

SEQ ID NO: 360067 - DNA, 25 bp, Homo sapien
ctaggatcagcaccagataagcacc

SEQ ID NO: 360068 - DNA, 25 bp, Homo sapien
aggtcagcactaagccagcacccag

SEQ ID NO: 360069 - DNA, 25 bp, Homo sapien
ggaaaactaggaatcaagcaggcaa

SEQ ID NO: 360070 - DNA, 25 bp, Homo sapien
tagtttggtctcatgcggtccctgc

SEQ ID NO: 360071 - DNA, 25 bp, Homo sapien
aaaggtggacggcattcaacgctcc

SEQ ID NO: 360072 - DNA, 25 bp, Homo sapien
cagggaatgccagtcagctggagac

SEQ ID NO: 360073 - DNA, 25 bp, Homo sapien
aggcaagccaggctctccaggcagc

SEQ ID NO: 360074 - DNA, 25 bp, Homo sapien
ccaggctctccaggcagcccccgca

SEQ ID NO: 360075 - DNA, 25 bp, Homo sapien
aggctctccaggcagcccccgcatc

SEQ ID NO: 360076 - DNA, 25 bp, Homo sapien
tccaggcagcccccgcatctgccat

SEQ ID NO: 360077 - DNA, 25 bp, Homo sapien
actgccagcttccccgccctttcct

SEQ ID NO: 360078 - DNA, 25 bp, Homo sapien
ctgccagcttccccgccctttcctc

SEQ ID NO: 360079 - DNA, 25 bp, Homo sapien
ctgagagatccctctccacccccgc

SEQ ID NO: 360080 - DNA, 25 bp, Homo sapien
agagatccctctccacccccgccat

SEQ ID NO: 360081 - DNA, 25 bp, Homo sapien
tgagagatccctctccacccccgcc

SEQ ID NO: 360082 - DNA, 25 bp, Homo sapien
gagagatccctctccacccccgcca

SEQ ID NO: 360083 - DNA, 25 bp, Homo sapien
gaagcaaggtttcagaaagaaccag

SEQ ID NO: 360084 - DNA, 25 bp, Homo sapien
tgcagggcagcacttctctattata

SEQ ID NO: 360085 - DNA, 25 bp, Homo sapien
tgtaaatgggacaacacccctcctg

SEQ ID NO: 360086 - DNA, 25 bp, Homo sapien
agaaccagaagggagaagcctagtc

SEQ ID NO: 360087 - DNA, 25 bp, Homo sapien
ggctcaggtggatccaaggacaggt

SEQ ID NO: 360088 - DNA, 25 bp, Homo sapien
ccccgccaggtgtcaatgtcgatga

SEQ ID NO: 360089 - DNA, 25 bp, Homo sapien
ctcaggtggatccaaggacaggtgg

SEQ ID NO: 360090 - DNA, 25 bp, Homo sapien
tgtcaatgtcgatgacattaaggtt

SEQ ID NO: 360091 - DNA, 25 bp, Homo sapien
tgtctctgggtaattggaactaggc

SEQ ID NO: 360092 - DNA, 25 bp, Homo sapien
gctggaggcggaaatgactccccaa

SEQ ID NO: 360093 - DNA, 25 bp, Homo sapien
ggcagcacagcattcttacccaggc

SEQ ID NO: 360094 - DNA, 25 bp, Homo sapien
tagtggtgtggctgacacaagcctc

SEQ ID NO: 360095 - DNA, 25 bp, Homo sapien
tccagtcccaggaacgggtagaggc

SEQ ID NO: 360096 - DNA, 25 bp, Homo sapien
cccaggaaccgaaagaggctctgct

SEQ ID NO: 360097 - DNA, 25 bp, Homo sapien
gctggcccacaactagctctgactg

SEQ ID NO: 360098 - DNA, 25 bp, Homo sapien
ggagagcttccgcattgactcaaag

SEQ ID NO: 360099 - DNA, 25 bp, Homo sapien
cacagaggtgaagtggagatgatca

SEQ ID NO: 360100 - DNA, 25 bp, Homo sapien
gggcatcaagttcctagtaagctca

SEQ ID NO: 360101 - DNA, 25 bp, Homo sapien
aggtgcgctccactctgggcatcaa

SEQ ID NO: 360102 - DNA, 25 bp, Homo sapien
ttcagtggacgcagaagtgctccgg

SEQ ID NO: 360103 - DNA, 25 bp, Homo sapien
tgcagcctccttgcgggaggggctg

SEQ ID NO: 360104 - DNA, 25 bp, Homo sapien
ctgttcttctgggaatggccctgca

SEQ ID NO: 360105 - DNA, 25 bp, Homo sapien
gccctgcagcctccttgcgggaggg

SEQ ID NO: 360106 - DNA, 25 bp, Homo sapien
tcactgttcttctgggaatggccct

SEQ ID NO: 360107 - DNA, 25 bp, Homo sapien
gctcctccgctatggcacgcagcat

SEQ ID NO: 360108 - DNA, 25 bp, Homo sapien
cgcaggctaagacggccgcgctcct

SEQ ID NO: 360109 - DNA, 25 bp, Homo sapien
cgcgctcctccgctatggcacgcag

SEQ ID NO: 360110 - DNA, 25 bp, Homo sapien
cgcagacctcgcggcgcaggctaag

SEQ ID NO: 360111 - DNA, 25 bp, Homo sapien
ctcctcggcctcggcgccgcccgca

SEQ ID NO: 360112 - DNA, 25 bp, Homo sapien
gtgctgcagcgagcgctcctcggcc

SEQ ID NO: 360113 - DNA, 25 bp, Homo sapien
tgcagcgagcgctcctcggcctcgg

SEQ ID NO: 360114 - DNA, 25 bp, Homo sapien
cgctcctcggcctcggcgccgcccg

SEQ ID NO: 360115 - DNA, 25 bp, Homo sapien
gagggcgggcggcccggcccgcagc

SEQ ID NO: 360116 - DNA, 25 bp, Homo sapien
acccgccaaacacagcaccggcgag

SEQ ID NO: 360117 - DNA, 25 bp, Homo sapien
cacagcaccggcgagcgcacctccg

SEQ ID NO: 360118 - DNA, 25 bp, Homo sapien
agtccgcctctgtgcgcgtcgccgt

SEQ ID NO: 360119 - DNA, 25 bp, Homo sapien
ccacagtccgcctctgtgcgcgtcg

SEQ ID NO: 360120 - DNA, 25 bp, Homo sapien
gtgtatttctcttctccagtgggcc

SEQ ID NO: 360121 - DNA, 25 bp, Homo sapien
ttctccagtgggcctgcatccctgt

SEQ ID NO: 360122 - DNA, 25 bp, Homo sapien
ttctcttctccagtgggcctgcatc

SEQ ID NO: 360123 - DNA, 25 bp, Homo sapien
tgtatttctcttctccagtgggcct

SEQ ID NO: 360124 - DNA, 25 bp, Homo sapien
gggtttgggctggtggacgtgagaa

SEQ ID NO: 360125 - DNA, 25 bp, Homo sapien
gtgaggacactggcatgagggctga

SEQ ID NO: 360126 - DNA, 25 bp, Homo sapien
tgaggacactggcatgagggctgag

SEQ ID NO: 360127 - DNA, 25 bp, Homo sapien
aggacactggcatgagggctgaggc

SEQ ID NO: 360128 - DNA, 25 bp, Homo sapien
aggtccatgagctcatgttccgaag

SEQ ID NO: 360129 - DNA, 25 bp, Homo sapien
ctaattcccagtcacgttaggtata

SEQ ID NO: 360130 - DNA, 25 bp, Homo sapien
taattcccagtcacgttaggtataa

SEQ ID NO: 360131 - DNA, 25 bp, Homo sapien
catgttccgaaggccaggttccagg

SEQ ID NO: 360132 - DNA, 25 bp, Homo sapien
ttctcctttgctgggaatccctgct

SEQ ID NO: 360133 - DNA, 25 bp, Homo sapien
tccctgtgactcatggttctccttt

SEQ ID NO: 360134 - DNA, 25 bp, Homo sapien
ttttccctgtgactcatggttctcc

SEQ ID NO: 360135 - DNA, 25 bp, Homo sapien
cctgtgactcatggttctcctttgc

SEQ ID NO: 360136 - DNA, 25 bp, Homo sapien
tctctggacagaaccttttgacttc

SEQ ID NO: 360137 - DNA, 25 bp, Homo sapien
ctgtctctggacagaaccttttgac

SEQ ID NO: 360138 - DNA, 25 bp, Homo sapien
aaagctttggtgagcagagccaggt

SEQ ID NO: 360139 - DNA, 25 bp, Homo sapien
gggactgggcaataggtctggtcat

SEQ ID NO: 360140 - DNA, 25 bp, Homo sapien
atgctgttctgttcacgaagtgcac

SEQ ID NO: 360141 - DNA, 25 bp, Homo sapien
cctgctgaagcccaatatgtcctgt

SEQ ID NO: 360142 - DNA, 25 bp, Homo sapien
acgaagtgcaccaatccatgcctca

SEQ ID NO: 360143 - DNA, 25 bp, Homo sapien
gaagcccaatatgtcctgtctgcac

SEQ ID NO: 360144 - DNA, 25 bp, Homo sapien
actcagaatgggagaggctcctgcc

SEQ ID NO: 360145 - DNA, 25 bp, Homo sapien
gggctgtgacaaaacccaggctcgg

SEQ ID NO: 360146 - DNA, 25 bp, Homo sapien
ggtccattttattcaggctggcgaa

SEQ ID NO: 360147 - DNA, 25 bp, Homo sapien
tcatcagtgcccaaaatctggagag

SEQ ID NO: 360148 - DNA, 25 bp, Homo sapien
caagattttctctggactccgagac

SEQ ID NO: 360149 - DNA, 25 bp, Homo sapien
taacttaagacggtaacagcgcgcc

SEQ ID NO: 360150 - DNA, 25 bp, Homo sapien
actctcgaggttcccttgggacttg

SEQ ID NO: 360151 - DNA, 25 bp, Homo sapien
ctgttggttccggaaactctcgagg

SEQ ID NO: 360152 - DNA, 25 bp, Homo sapien
cattgtcctgagaaatgatccagct

SEQ ID NO: 360153 - DNA, 25 bp, Homo sapien
ctgccattgtcctgagaaatgatcc

SEQ ID NO: 360154 - DNA, 25 bp, Homo sapien
gccattgtcctgagaaatgatccag

SEQ ID NO: 360155 - DNA, 25 bp, Homo sapien
attgtcctgagaaatgatccagctg

SEQ ID NO: 360156 - DNA, 25 bp, Homo sapien
gggtctggccgttgagcttccatag

SEQ ID NO: 360157 - DNA, 25 bp, Homo sapien
gaatcacatctagaatgaagggaga

SEQ ID NO: 360158 - DNA, 25 bp, Homo sapien
ggagaggaggatattaatgagcagg

SEQ ID NO: 360159 - DNA, 25 bp, Homo sapien
catgcagtcatctgtcttgctgagg

SEQ ID NO: 360160 - DNA, 25 bp, Homo sapien
ctgggagctgctctcactttgtagc

SEQ ID NO: 360161 - DNA, 25 bp, Homo sapien
gaattactaataaagtagccaggca

SEQ ID NO: 360162 - DNA, 25 bp, Homo sapien
gtgaattactaataaagtagccagg

SEQ ID NO: 360163 - DNA, 25 bp, Homo sapien
tcactttgtagcagtgaattactaa

SEQ ID NO: 360164 - DNA, 25 bp, Homo sapien
tcagatactggtattgtgtctgttc

SEQ ID NO: 360165 - DNA, 25 bp, Homo sapien
gtctgttctttttgtggggagctgc

SEQ ID NO: 360166 - DNA, 25 bp, Homo sapien
ttcagggaccgtgctgcgctttaat

SEQ ID NO: 360167 - DNA, 25 bp, Homo sapien
tggggagctgcctcgggtctctctt

SEQ ID NO: 360168 - DNA, 25 bp, Homo sapien
catctgctgttgtaagtctgcgaga

SEQ ID NO: 360169 - DNA, 25 bp, Homo sapien
agcatctgctgttgtaagtctgcga

SEQ ID NO: 360170 - DNA, 25 bp, Homo sapien
tcagagcatctgctgttgtaagtct

SEQ ID NO: 360171 - DNA, 25 bp, Homo sapien
ctgctgttgtaagtctgcgagaact

SEQ ID NO: 360172 - DNA, 25 bp, Homo sapien
tggagacagaagtcaacctggttat

SEQ ID NO: 360173 - DNA, 25 bp, Homo sapien
caacctggttatctgactctactac

SEQ ID NO: 360174 - DNA, 25 bp, Homo sapien
ctggttatctgactctactacattc

SEQ ID NO: 360175 - DNA, 25 bp, Homo sapien
gaagtcaacctggttatctgactct

SEQ ID NO: 360176 - DNA, 25 bp, Homo sapien
tgttttctgcatatctgggctcctc

SEQ ID NO: 360177 - DNA, 25 bp, Homo sapien
cagtgcctgctgacaagaacgaagg

SEQ ID NO: 360178 - DNA, 25 bp, Homo sapien
caaatatttggattgtgagttcagc

SEQ ID NO: 360179 - DNA, 25 bp, Homo sapien
gctagtagaaccatcatataagtaa

SEQ ID NO: 360180 - DNA, 25 bp, Homo sapien
tagaccttgctgtggagcattgggc

SEQ ID NO: 360181 - DNA, 25 bp, Homo sapien
tctgactggtgtgcacatcgcgggt

SEQ ID NO: 360182 - DNA, 25 bp, Homo sapien
ggcctactgcctggtagaccttgct

SEQ ID NO: 360183 - DNA, 25 bp, Homo sapien
agatctgtgctcctagacgccatca

SEQ ID NO: 360184 - DNA, 25 bp, Homo sapien
gatcccagaggaatcgacaggctta

SEQ ID NO: 360185 - DNA, 25 bp, Homo sapien
ttagggcgaagctcctggcctctgt

SEQ ID NO: 360186 - DNA, 25 bp, Homo sapien
ttagctggactttaacccttgggca

SEQ ID NO: 360187 - DNA, 25 bp, Homo sapien
gcctctgttgtacagaaagccctgg

SEQ ID NO: 360188 - DNA, 25 bp, Homo sapien
taaagaatgaatccgctagcgaaaa

SEQ ID NO: 360189 - DNA, 25 bp, Homo sapien
tctgttccaaagaaacacaggtctg

SEQ ID NO: 360190 - DNA, 25 bp, Homo sapien
agaggcccttttcagtccaggccaa

SEQ ID NO: 360191 - DNA, 25 bp, Homo sapien
ctaagaactgaaatcggaggagcca

SEQ ID NO: 360192 - DNA, 25 bp, Homo sapien
ccattgatgactcccataggtacag

SEQ ID NO: 360193 - DNA, 25 bp, Homo sapien
ggttcacccacatgaaacggctgtg

SEQ ID NO: 360194 - DNA, 25 bp, Homo sapien
gcaaaacttgaaaagggcctgcaac

SEQ ID NO: 360195 - DNA, 25 bp, Homo sapien
catggcccacattaagggagtttgc

SEQ ID NO: 360196 - DNA, 25 bp, Homo sapien
gaggtctgaacactcaactaaagtg

SEQ ID NO: 360197 - DNA, 25 bp, Homo sapien
tctcttaaagggtgcaccaggctgg

SEQ ID NO: 360198 - DNA, 25 bp, Homo sapien
gcctctttggctagaacgactaagg

SEQ ID NO: 360199 - DNA, 25 bp, Homo sapien
tcaagattacttgggtgcaaggcaa

SEQ ID NO: 360200 - DNA, 25 bp, Homo sapien
tagggtcaaaactcggctgaacatg

SEQ ID NO: 360201 - DNA, 25 bp, Homo sapien
ctcggctgaacatgcagtcatcgta

SEQ ID NO: 360202 - DNA, 25 bp, Homo sapien
gaaagatctagggtcaaaactcggc

SEQ ID NO: 360203 - DNA, 25 bp, Homo sapien
tactgagaaagatctagggtcaaaa

SEQ ID NO: 360204 - DNA, 25 bp, Homo sapien
tgactatcatctgaaactggtcttg

SEQ ID NO: 360205 - DNA, 25 bp, Homo sapien
cgtcggctctggaatagaactcttc

SEQ ID NO: 360206 - DNA, 25 bp, Homo sapien
ctcaggatagatgccgatcagcgcg

SEQ ID NO: 360207 - DNA, 25 bp, Homo sapien
agaactcttcttttagggagatgac

SEQ ID NO: 360208 - DNA, 25 bp, Homo sapien
cattcaggagacaactcaagatgct

SEQ ID NO: 360209 - DNA, 25 bp, Homo sapien
tgaaaacatctctcagccacgggct

SEQ ID NO: 360210 - DNA, 25 bp, Homo sapien
tactcttgtgtatccctgggccatg

SEQ ID NO: 360211 - DNA, 25 bp, Homo sapien
gactcaacagagtaagcaatcaagg

SEQ ID NO: 360212 - DNA, 25 bp, Homo sapien
tagtattgtctagggctgcatccac

SEQ ID NO: 360213 - DNA, 25 bp, Homo sapien
attgtctagggctgcatccacttca

SEQ ID NO: 360214 - DNA, 25 bp, Homo sapien
tatgttagtattgtctagggctgca

SEQ ID NO: 360215 - DNA, 25 bp, Homo sapien
tgcctatgttagtattgtctagggc

SEQ ID NO: 360216 - DNA, 25 bp, Homo sapien
ctaaaacaaagaatggggcaggacg

SEQ ID NO: 360217 - DNA, 25 bp, Homo sapien
taaaacaaagaatggggcaggacga

SEQ ID NO: 360218 - DNA, 25 bp, Homo sapien
gcataaaccgtttgcctggggccac

SEQ ID NO: 360219 - DNA, 25 bp, Homo sapien
gttatagctaattccctccaagtaa

SEQ ID NO: 360220 - DNA, 25 bp, Homo sapien
tcagggttctctgggctaagaaatg

SEQ ID NO: 360221 - DNA, 25 bp, Homo sapien
atagctaattccctccaagtaaggt

SEQ ID NO: 360222 - DNA, 25 bp, Homo sapien
ttttttcacttgctcgaactcttgc

SEQ ID NO: 360223 - DNA, 25 bp, Homo sapien
cactgggtgaaaagatcgtatctcc

SEQ ID NO: 360224 - DNA, 25 bp, Homo sapien
gcttcttgtagatttgatcaattga

SEQ ID NO: 360225 - DNA, 25 bp, Homo sapien
gaactcttgcctacacagtctggct

SEQ ID NO: 360226 - DNA, 25 bp, Homo sapien
tgctgcaataagagcctaaggtggg

SEQ ID NO: 360227 - DNA, 25 bp, Homo sapien
gactcttgaaacttgtctctgacag

SEQ ID NO: 360228 - DNA, 25 bp, Homo sapien
aagttctccagtgctcgtaggtttg

SEQ ID NO: 360229 - DNA, 25 bp, Homo sapien
aaggtgggcctcgatttcttgatca

SEQ ID NO: 360230 - DNA, 25 bp, Homo sapien
agctgtagtctatttcaaaggcttc

SEQ ID NO: 360231 - DNA, 25 bp, Homo sapien
gagctgtagtctatttcaaaggctt

SEQ ID NO: 360232 - DNA, 25 bp, Homo sapien
ttttcatagatatcaattgttgcct

SEQ ID NO: 360233 - DNA, 25 bp, Homo sapien
tagatatcaattgttgcctgggtac

SEQ ID NO: 360234 - DNA, 25 bp, Homo sapien
gcagcaagttatgcttctctaatcg

SEQ ID NO: 360235 - DNA, 25 bp, Homo sapien
aaggattatctcaatgtcttgcact

SEQ ID NO: 360236 - DNA, 25 bp, Homo sapien
tgcactttgcaatcaagcagcaagt

SEQ ID NO: 360237 - DNA, 25 bp, Homo sapien
cagtgaccccgacaaaaggattatc

SEQ ID NO: 360238 - DNA, 25 bp, Homo sapien
aactttctcggcactggagttctga

SEQ ID NO: 360239 - DNA, 25 bp, Homo sapien
gcactggagttctgagtgacacgta

SEQ ID NO: 360240 - DNA, 25 bp, Homo sapien
acgtatgtccttaagttgctgctgc

SEQ ID NO: 360241 - DNA, 25 bp, Homo sapien
atttgagtttgaactttctcggcac

SEQ ID NO: 360242 - DNA, 25 bp, Homo sapien
tactatcttttatattaataaggta

SEQ ID NO: 360243 - DNA, 25 bp, Homo sapien
ctatcttttatattaataaggtact

SEQ ID NO: 360244 - DNA, 25 bp, Homo sapien
caagttgaacattaagccgagtttt

SEQ ID NO: 360245 - DNA, 25 bp, Homo sapien
cttcactacctttctggatagtttc

SEQ ID NO: 360246 - DNA, 25 bp, Homo sapien
tttcttcttaaggtgactgcgacta

SEQ ID NO: 360247 - DNA, 25 bp, Homo sapien
gactgcgactatactcaagttgaac

SEQ ID NO: 360248 - DNA, 25 bp, Homo sapien
atgtaagctccttaccaacatcttt

SEQ ID NO: 360249 - DNA, 25 bp, Homo sapien
taagctccttaccaacatcttttta

SEQ ID NO: 360250 - DNA, 25 bp, Homo sapien
atatgtaagctccttaccaacatct

SEQ ID NO: 360251 - DNA, 25 bp, Homo sapien
ataaatatgtaagctccttaccaac

SEQ ID NO: 360252 - DNA, 25 bp, Homo sapien
tgttgccgtttaacatgtttgttct

SEQ ID NO: 360253 - DNA, 25 bp, Homo sapien
cacagaagtgttggaagatatcgtc

SEQ ID NO: 360254 - DNA, 25 bp, Homo sapien
taacatgtttgttctcaaattcacg

SEQ ID NO: 360255 - DNA, 25 bp, Homo sapien
caaattcacgaatattttccacgcc

SEQ ID NO: 360256 - DNA, 25 bp, Homo sapien
tcgttgtcgttccttgattccttca

SEQ ID NO: 360257 - DNA, 25 bp, Homo sapien
cattgagactcaatatttagtagtt

SEQ ID NO: 360258 - DNA, 25 bp, Homo sapien
tacattgagactcaatatttagtag

SEQ ID NO: 360259 - DNA, 25 bp, Homo sapien
ttaattcttcgttgtcgttccttga

SEQ ID NO: 360260 - DNA, 25 bp, Homo sapien
tatttgagtcgtgtttgagttccct

SEQ ID NO: 360261 - DNA, 25 bp, Homo sapien
gagttccctgtatcagggtctgtat

SEQ ID NO: 360262 - DNA, 25 bp, Homo sapien
ctttgcggagtgtcttcattaaacc

SEQ ID NO: 360263 - DNA, 25 bp, Homo sapien
gcaacaaggtgcttcttcttaatca

SEQ ID NO: 360264 - DNA, 25 bp, Homo sapien
gtctgtctcttagattctttaactc

SEQ ID NO: 360265 - DNA, 25 bp, Homo sapien
tcttggattttctggcttcgtctgt

SEQ ID NO: 360266 - DNA, 25 bp, Homo sapien
tccagagatcactccagattttaaa

SEQ ID NO: 360267 - DNA, 25 bp, Homo sapien
aataatgttccatcaagagctactg

SEQ ID NO: 360268 - DNA, 25 bp, Homo sapien
cctttaagctcccttagtctttcat

SEQ ID NO: 360269 - DNA, 25 bp, Homo sapien
cttagtctttcattgattggcttga

SEQ ID NO: 360270 - DNA, 25 bp, Homo sapien
cactgagtgcaatatgccttgcttc

SEQ ID NO: 360271 - DNA, 25 bp, Homo sapien
agtctttatgacatcaatcaccatt

SEQ ID NO: 360272 - DNA, 25 bp, Homo sapien
acaacaatggcagtgatgaaccggc

SEQ ID NO: 360273 - DNA, 25 bp, Homo sapien
tcaaggtaatctagagcgaggaatg

SEQ ID NO: 360274 - DNA, 25 bp, Homo sapien
aaaaaccttagtaacagccagctgg

SEQ ID NO: 360275 - DNA, 25 bp, Homo sapien
gaaatcgaatacaatcttttgctac

SEQ ID NO: 360276 - DNA, 25 bp, Homo sapien
gacacaggtcaaatagtcttccaaa

SEQ ID NO: 360277 - DNA, 25 bp, Homo sapien
ggatgacacaggtcaaatagtcttc

SEQ ID NO: 360278 - DNA, 25 bp, Homo sapien
taggatgacacaggtcaaatagtct

SEQ ID NO: 360279 - DNA, 25 bp, Homo sapien
tatgaataggatgacacaggtcaaa

SEQ ID NO: 360280 - DNA, 25 bp, Homo sapien
taatatttctaatcccaaatgagaa

SEQ ID NO: 360281 - DNA, 25 bp, Homo sapien
gtaatatttctaatcccaaatgaga

SEQ ID NO: 360282 - DNA, 25 bp, Homo sapien
ccagcattctgcaattcacttctaa

SEQ ID NO: 360283 - DNA, 25 bp, Homo sapien
gacgttttccctcatgggtatcaat

SEQ ID NO: 360284 - DNA, 25 bp, Homo sapien
agaatctgggtacagtcttttaagg

SEQ ID NO: 360285 - DNA, 25 bp, Homo sapien
tctcttttgctgacgttttccctca

SEQ ID NO: 360286 - DNA, 25 bp, Homo sapien
tctctattcgttttttatgatcttc

SEQ ID NO: 360287 - DNA, 25 bp, Homo sapien
tctttgtatactcctctaacttctc

SEQ ID NO: 360288 - DNA, 25 bp, Homo sapien
tatactcctctaacttctctattcg

SEQ ID NO: 360289 - DNA, 25 bp, Homo sapien
atgcatgtctttgtatactcctcta

SEQ ID NO: 360290 - DNA, 25 bp, Homo sapien
ccttaagttctttataacgatccag

SEQ ID NO: 360291 - DNA, 25 bp, Homo sapien
tccttaagttctttataacgatcca

SEQ ID NO: 360292 - DNA, 25 bp, Homo sapien
agcatctaaatcagccagctctgtc

SEQ ID NO: 360293 - DNA, 25 bp, Homo sapien
gaacattgtttttcgctgtccttta

SEQ ID NO: 360294 - DNA, 25 bp, Homo sapien
tggcttccagttcaatgtctcgctt

SEQ ID NO: 360295 - DNA, 25 bp, Homo sapien
tttaatgtactgaggcctcttctga

SEQ ID NO: 360296 - DNA, 25 bp, Homo sapien
tatggtatagttgaaaaagctgcag

SEQ ID NO: 360297 - DNA, 25 bp, Homo sapien
tctaacttggtgttcaggagatgaa

SEQ ID NO: 360298 - DNA, 25 bp, Homo sapien
tccctattcacatgctctaacttgg

SEQ ID NO: 360299 - DNA, 25 bp, Homo sapien
caaggagactctggtaacgttctgc

SEQ ID NO: 360300 - DNA, 25 bp, Homo sapien
tcctgaagtgctgatttcctcaaaa

SEQ ID NO: 360301 - DNA, 25 bp, Homo sapien
tctaattttgcttgtctgcgctctg

SEQ ID NO: 360302 - DNA, 25 bp, Homo sapien
tgtctgcgctctgccgctatatttt

SEQ ID NO: 360303 - DNA, 25 bp, Homo sapien
cttcatattctcctataagctctcc

SEQ ID NO: 360304 - DNA, 25 bp, Homo sapien
tgctttgactattatgcctatcttt

SEQ ID NO: 360305 - DNA, 25 bp, Homo sapien
gctttgactattatgcctatctttt

SEQ ID NO: 360306 - DNA, 25 bp, Homo sapien
gtgctttgactattatgcctatctt

SEQ ID NO: 360307 - DNA, 25 bp, Homo sapien
actcacaagattatcattaaagcga

SEQ ID NO: 360308 - DNA, 25 bp, Homo sapien
acagaacgactcacaagattatcat

SEQ ID NO: 360309 - DNA, 25 bp, Homo sapien
aatgtaaacagaacgactcacaaga

SEQ ID NO: 360310 - DNA, 25 bp, Homo sapien
ctgcaatgtaaacagaacgactcac

SEQ ID NO: 360311 - DNA, 25 bp, Homo sapien
gccactttcctccacatatataatt

SEQ ID NO: 360312 - DNA, 25 bp, Homo sapien
tcttcgccactttcctccacatata

SEQ ID NO: 360313 - DNA, 25 bp, Homo sapien
atgttttctcttcgccactttcctc

SEQ ID NO: 360314 - DNA, 25 bp, Homo sapien
tgcaaatgttttctcttcgccactt

SEQ ID NO: 360315 - DNA, 25 bp, Homo sapien
ctcccattacaaaactaagtgcatc

SEQ ID NO: 360316 - DNA, 25 bp, Homo sapien
gctccatgaatgagttcttgaatat

SEQ ID NO: 360317 - DNA, 25 bp, Homo sapien
tttccaatatgtgctccatgaatga

SEQ ID NO: 360318 - DNA, 25 bp, Homo sapien
caaaactaagtgcatccattacatt

SEQ ID NO: 360319 - DNA, 25 bp, Homo sapien
ccgccacgacttgaaattttccaca

SEQ ID NO: 360320 - DNA, 25 bp, Homo sapien
gtgaacctccggaaggggccaatga

SEQ ID NO: 360321 - DNA, 25 bp, Homo sapien
cagagccgttggggccgatgatgca

SEQ ID NO: 360322 - DNA, 25 bp, Homo sapien
atgatgcaggtgaacctccggaagg

SEQ ID NO: 360323 - DNA, 25 bp, Homo sapien
ccgcgttatcaagcgcccgcggaaa

SEQ ID NO: 360324 - DNA, 25 bp, Homo sapien
gccctccacgcctcacccgcgttat

SEQ ID NO: 360325 - DNA, 25 bp, Homo sapien
ttatcaagcgcccgcggaaaaagcg

SEQ ID NO: 360326 - DNA, 25 bp, Homo sapien
cgcctcacccgcgttatcaagcgcc

SEQ ID NO: 360327 - DNA, 25 bp, Homo sapien
tgaccctcgccgctgaggagcggtt

SEQ ID NO: 360328 - DNA, 25 bp, Homo sapien
atggatcattttggggggctcatta

SEQ ID NO: 360329 - DNA, 25 bp, Homo sapien
aggagcggttgagatggatcatttt

SEQ ID NO: 360330 - DNA, 25 bp, Homo sapien
taagtccctaatctaactgcagtgt

SEQ ID NO: 360331 - DNA, 25 bp, Homo sapien
caagatgaaggtgacaagtgaggcc

SEQ ID NO: 360332 - DNA, 25 bp, Homo sapien
tcagcactacccgagaagtcagctt

SEQ ID NO: 360333 - DNA, 25 bp, Homo sapien
gcctgaagcgtgttccatcaaaggg

SEQ ID NO: 360334 - DNA, 25 bp, Homo sapien
cgtgtgactaattgatcctgcctga

SEQ ID NO: 360335 - DNA, 25 bp, Homo sapien
atctatgaaacagtctcgcagaggc

SEQ ID NO: 360336 - DNA, 25 bp, Homo sapien
agcatctatgaaacagtctcgcaga

SEQ ID NO: 360337 - DNA, 25 bp, Homo sapien
ttctcatacttgttcggtggcactg

SEQ ID NO: 360338 - DNA, 25 bp, Homo sapien
tacttgttcggtggcactggtttgc

SEQ ID NO: 360339 - DNA, 25 bp, Homo sapien
aatggtttgcatggctataaaaggg

SEQ ID NO: 360340 - DNA, 25 bp, Homo sapien
atggtttgcatggctataaaagggc

SEQ ID NO: 360341 - DNA, 25 bp, Homo sapien
gcagcataatggtttgcatggctat

SEQ ID NO: 360342 - DNA, 25 bp, Homo sapien
agcataatggtttgcatggctataa

SEQ ID NO: 360343 - DNA, 25 bp, Homo sapien
gctgtgtgcactgggatgacaggtc

SEQ ID NO: 360344 - DNA, 25 bp, Homo sapien
ctggctgtgtgcactgggatgacag

SEQ ID NO: 360345 - DNA, 25 bp, Homo sapien
tggctgtgtgcactgggatgacagg

SEQ ID NO: 360346 - DNA, 25 bp, Homo sapien
ggctgtgtgcactgggatgacaggt

SEQ ID NO: 360347 - DNA, 25 bp, Homo sapien
acaggtcctggtcctactgccttga

SEQ ID NO: 360348 - DNA, 25 bp, Homo sapien
tgacatgcgtcccatgcttgctctg

SEQ ID NO: 360349 - DNA, 25 bp, Homo sapien
ggtcctactgccttgataaacccac

SEQ ID NO: 360350 - DNA, 25 bp, Homo sapien
ccactgctggtgacatgcgtcccat

SEQ ID NO: 360351 - DNA, 25 bp, Homo sapien
gccacgcaacgtattttctatatct

SEQ ID NO: 360352 - DNA, 25 bp, Homo sapien
gcctagctaattgctacccacgaca

SEQ ID NO: 360353 - DNA, 25 bp, Homo sapien
gagacactgggcctagctaattgct

SEQ ID NO: 360354 - DNA, 25 bp, Homo sapien
cccggccacgcaacgtattttctat

SEQ ID NO: 360355 - DNA, 25 bp, Homo sapien
tgggaccctccagcctttgaagctc

SEQ ID NO: 360356 - DNA, 25 bp, Homo sapien
catatttgtcccatgtgcatgcgtg

SEQ ID NO: 360357 - DNA, 25 bp, Homo sapien
tcagagtacaaagagaccatgcaag

SEQ ID NO: 360358 - DNA, 25 bp, Homo sapien
tctggctcagactcatggcactaag

SEQ ID NO: 360359 - DNA, 25 bp, Homo sapien
tctgcgatgtttacagctagcaggc

SEQ ID NO: 360360 - DNA, 25 bp, Homo sapien
gcacgtggccatatccttcctgggt

SEQ ID NO: 360361 - DNA, 25 bp, Homo sapien
tccacccaaggagtggtacagaatc

SEQ ID NO: 360362 - DNA, 25 bp, Homo sapien
tgcccaaagcttctgcgatgtttac

SEQ ID NO: 360363 - DNA, 25 bp, Homo sapien
aggcaaatgagcagctggaagtccc

SEQ ID NO: 360364 - DNA, 25 bp, Homo sapien
ctggtgtttggatatccacaggtga

SEQ ID NO: 360365 - DNA, 25 bp, Homo sapien
aggtgaccggatccccaggcaaatg

SEQ ID NO: 360366 - DNA, 25 bp, Homo sapien
tccctgcagggatgcgggaggcaca

SEQ ID NO: 360367 - DNA, 25 bp, Homo sapien
gtgtatggtccaatggtattaaata

SEQ ID NO: 360368 - DNA, 25 bp, Homo sapien
caaacccggctaattgtagctggga

SEQ ID NO: 360369 - DNA, 25 bp, Homo sapien
tgggattgcaagctcaccccaccaa

SEQ ID NO: 360370 - DNA, 25 bp, Homo sapien
aacccggctaattgtagctgggatt

SEQ ID NO: 360371 - DNA, 25 bp, Homo sapien
caccgtcagctcctttgtggccaag

SEQ ID NO: 360372 - DNA, 25 bp, Homo sapien
gctgcctctgagaataacctactac

SEQ ID NO: 360373 - DNA, 25 bp, Homo sapien
agatggatctctctcgccacggcac

SEQ ID NO: 360374 - DNA, 25 bp, Homo sapien
gacttgctcctgaccgtcaagatgg

SEQ ID NO: 360375 - DNA, 25 bp, Homo sapien
tgcggctcctaggatgcagctcttg

SEQ ID NO: 360376 - DNA, 25 bp, Homo sapien
tgtggtgcagaaacacgggatgcgg

SEQ ID NO: 360377 - DNA, 25 bp, Homo sapien
agtgaagtcgttttgcccccactga

SEQ ID NO: 360378 - DNA, 25 bp, Homo sapien
atgcggttgcggctcctaggatgca

SEQ ID NO: 360379 - DNA, 25 bp, Homo sapien
gccacgggagcatgagcccttttcc

SEQ ID NO: 360380 - DNA, 25 bp, Homo sapien
acggcccttgccactgtctcctggc

SEQ ID NO: 360381 - DNA, 25 bp, Homo sapien
attgtgccacgggagcatgagccct

SEQ ID NO: 360382 - DNA, 25 bp, Homo sapien
tggccctctctctgatcatgccagg

SEQ ID NO: 360383 - DNA, 25 bp, Homo sapien
gcccgcgccgtcgtctttgtaaagc

SEQ ID NO: 360384 - DNA, 25 bp, Homo sapien
agacccgttcttagcggggatcgag

SEQ ID NO: 360385 - DNA, 25 bp, Homo sapien
tgcaagggccgggtcgtcctctaat

SEQ ID NO: 360386 - DNA, 25 bp, Homo sapien
taatgtagccttgaaagacccgttc

SEQ ID NO: 360387 - DNA, 25 bp, Homo sapien
gctggcccatgaacagcgcgatgag

SEQ ID NO: 360388 - DNA, 25 bp, Homo sapien
agccacgtctgtggctggcccatga

SEQ ID NO: 360389 - DNA, 25 bp, Homo sapien
gcacagcctgcggtttggggctgct

SEQ ID NO: 360390 - DNA, 25 bp, Homo sapien
ctgtggctggcccatgaacagcgcg

SEQ ID NO: 360391 - DNA, 25 bp, Homo sapien
ttcagtccatggcagcgcagacagt

SEQ ID NO: 360392 - DNA, 25 bp, Homo sapien
gtccatagcgtaggtgtatcgtaaa

SEQ ID NO: 360393 - DNA, 25 bp, Homo sapien
gacagtcatctgcagattcgcgagc

SEQ ID NO: 360394 - DNA, 25 bp, Homo sapien
gacaacatggagcacggtccatagc

SEQ ID NO: 360395 - DNA, 25 bp, Homo sapien
cattgaggacgtggccttgctccag

SEQ ID NO: 360396 - DNA, 25 bp, Homo sapien
tggctcattcatggcgcctctcagg

SEQ ID NO: 360397 - DNA, 25 bp, Homo sapien
ctgaattggctcattcatggcgcct

SEQ ID NO: 360398 - DNA, 25 bp, Homo sapien
aagaaagtgatggttctccaccaac

SEQ ID NO: 360399 - DNA, 25 bp, Homo sapien
cattcctccctacagtgattcacag

SEQ ID NO: 360400 - DNA, 25 bp, Homo sapien
cctgccattcctccctacagtgatt

SEQ ID NO: 360401 - DNA, 25 bp, Homo sapien
ctccctacagtgattcacaggctca

SEQ ID NO: 360402 - DNA, 25 bp, Homo sapien
tgccattcctccctacagtgattca

SEQ ID NO: 360403 - DNA, 25 bp, Homo sapien
gaatgccaggaagggtggtaagaag

SEQ ID NO: 360404 - DNA, 25 bp, Homo sapien
caggaagggtggtaagaagtgtctc

SEQ ID NO: 360405 - DNA, 25 bp, Homo sapien
ccaggaagggtggtaagaagtgtct

SEQ ID NO: 360406 - DNA, 25 bp, Homo sapien
gaagggtggtaagaagtgtctctgc

SEQ ID NO: 360407 - DNA, 25 bp, Homo sapien
tagcgggggcaccattgttggcctc

SEQ ID NO: 360408 - DNA, 25 bp, Homo sapien
ctagcgggggcaccattgttggcct

SEQ ID NO: 360409 - DNA, 25 bp, Homo sapien
tggctagcgggggcaccattgttgg

SEQ ID NO: 360410 - DNA, 25 bp, Homo sapien
tcactgtggctagcgggggcaccat

SEQ ID NO: 360411 - DNA, 25 bp, Homo sapien
tacgttaggttcagccctgtaagcc

SEQ ID NO: 360412 - DNA, 25 bp, Homo sapien
aatatgacatacagggggcccacgg

SEQ ID NO: 360413 - DNA, 25 bp, Homo sapien
agaaaaatatgacatacagggggcc

SEQ ID NO: 360414 - DNA, 25 bp, Homo sapien
gtacgttaggttcagccctgtaagc

SEQ ID NO: 360415 - DNA, 25 bp, Homo sapien
ccagggaggggcaggcaggagtgac

SEQ ID NO: 360416 - DNA, 25 bp, Homo sapien
cctggtgggcagacccagcccaggg

SEQ ID NO: 360417 - DNA, 25 bp, Homo sapien
ggtgggcagacccagcccagggagg

SEQ ID NO: 360418 - DNA, 25 bp, Homo sapien
gtgggcagacccagcccagggaggg

SEQ ID NO: 360419 - DNA, 25 bp, Homo sapien
gaagcctgtgcttatctctccatcg

SEQ ID NO: 360420 - DNA, 25 bp, Homo sapien
tcaatgtcatcaccaggtagcaggc

SEQ ID NO: 360421 - DNA, 25 bp, Homo sapien
catgggctttcaagcaggacaaagc

SEQ ID NO: 360422 - DNA, 25 bp, Homo sapien
gacaggcgcacgtcttttgccggga

SEQ ID NO: 360423 - DNA, 25 bp, Homo sapien
catggctgctgtagaatagcacaga

SEQ ID NO: 360424 - DNA, 25 bp, Homo sapien
tctatgttctaaggacatggctgct

SEQ ID NO: 360425 - DNA, 25 bp, Homo sapien
tgttaggctcgtgtgggcctccagt

SEQ ID NO: 360426 - DNA, 25 bp, Homo sapien
tagcacagacgtggatgataaatta

SEQ ID NO: 360427 - DNA, 25 bp, Homo sapien
ttattaaagtcttgtgtggacaaga

SEQ ID NO: 360428 - DNA, 25 bp, Homo sapien
tttattaaagtcttgtgtggacaag

SEQ ID NO: 360429 - DNA, 25 bp, Homo sapien
ttttattaaagtcttgtgtggacaa

SEQ ID NO: 360430 - DNA, 25 bp, Homo sapien
gtgacttggcttcatccggaccgga

SEQ ID NO: 360431 - DNA, 25 bp, Homo sapien
tccggaccggatgacttctgggtgc

SEQ ID NO: 360432 - DNA, 25 bp, Homo sapien
tcatgccaaagagatgggtgccaag

SEQ ID NO: 360433 - DNA, 25 bp, Homo sapien
ttcacgtttccccacatcgttcatg

SEQ ID NO: 360434 - DNA, 25 bp, Homo sapien
gaatgagacgggaactcactcttga

SEQ ID NO: 360435 - DNA, 25 bp, Homo sapien
gacgggaactcactcttgaaggact

SEQ ID NO: 360436 - DNA, 25 bp, Homo sapien
ctggacatagaatgagacgggaact

SEQ ID NO: 360437 - DNA, 25 bp, Homo sapien
tctcagagaagaaacggagccaccg

SEQ ID NO: 360438 - DNA, 25 bp, Homo sapien
cattaggaggcttgggcacgcactg

SEQ ID NO: 360439 - DNA, 25 bp, Homo sapien
gcttcaatggtatcgaatgtcctca

SEQ ID NO: 360440 - DNA, 25 bp, Homo sapien
gattcatggtgtcagctgcgggttc

SEQ ID NO: 360441 - DNA, 25 bp, Homo sapien
gcagcacgcagcacagaagctgagg

SEQ ID NO: 360442 - DNA, 25 bp, Homo sapien
tctctctgcagatagctgtaactct

SEQ ID NO: 360443 - DNA, 25 bp, Homo sapien
ctgcagacatgtagaatccactgct

SEQ ID NO: 360444 - DNA, 25 bp, Homo sapien
gaatccactgctagggtccactgag

SEQ ID NO: 360445 - DNA, 25 bp, Homo sapien
ctcctggatgtagtctctctgcaga

SEQ ID NO: 360446 - DNA, 25 bp, Homo sapien
cctccggcctcctgtgctctttcca

SEQ ID NO: 360447 - DNA, 25 bp, Homo sapien
ctccggcctcctgtgctctttccat

SEQ ID NO: 360448 - DNA, 25 bp, Homo sapien
attttaggatacatgctgcccaaac

SEQ ID NO: 360449 - DNA, 25 bp, Homo sapien
gccgccttccatgtgtcattccaat

SEQ ID NO: 360450 - DNA, 25 bp, Homo sapien
tttaggatacatgctgcccaaacaa

SEQ ID NO: 360451 - DNA, 25 bp, Homo sapien
ttaggatacatgctgcccaaacaag

SEQ ID NO: 360452 - DNA, 25 bp, Homo sapien
tcccgattccagtggagacaagccg

SEQ ID NO: 360453 - DNA, 25 bp, Homo sapien
tcctctttctgctccgagaggggct

SEQ ID NO: 360454 - DNA, 25 bp, Homo sapien
ccgattccagtggagacaagccggg

SEQ ID NO: 360455 - DNA, 25 bp, Homo sapien
gagccagccgtggctcccttccatc

SEQ ID NO: 360456 - DNA, 25 bp, Homo sapien
ctttggcaaaggttaccaggctcca

SEQ ID NO: 360457 - DNA, 25 bp, Homo sapien
gcaaaggttaccaggctccaggatg

SEQ ID NO: 360458 - DNA, 25 bp, Homo sapien
tggcaaaggttaccaggctccagga

SEQ ID NO: 360459 - DNA, 25 bp, Homo sapien
caaaggttaccaggctccaggatgg

SEQ ID NO: 360460 - DNA, 25 bp, Homo sapien
aagactggctggtttcaggttccca

SEQ ID NO: 360461 - DNA, 25 bp, Homo sapien
tagctgcatataggctgtcctgctg

SEQ ID NO: 360462 - DNA, 25 bp, Homo sapien
gacagctgtatttcagtcccgccca

SEQ ID NO: 360463 - DNA, 25 bp, Homo sapien
cagggcaggttttagaccaacaaca

SEQ ID NO: 360464 - DNA, 25 bp, Homo sapien
tgcggggttcgtgcagcagccacat

SEQ ID NO: 360465 - DNA, 25 bp, Homo sapien
ggttcgtgcagcagccacatgggct

SEQ ID NO: 360466 - DNA, 25 bp, Homo sapien
tcagtgcggggttcgtgcagcagcc

SEQ ID NO: 360467 - DNA, 25 bp, Homo sapien
ccacatgggctgactgccgctggcc

SEQ ID NO: 360468 - DNA, 25 bp, Homo sapien
cagctcactgcagccttgatctcct

SEQ ID NO: 360469 - DNA, 25 bp, Homo sapien
cctcaacctcccaactagctgagac

SEQ ID NO: 360470 - DNA, 25 bp, Homo sapien
ctgcctcaacctcccaactagctga

SEQ ID NO: 360471 - DNA, 25 bp, Homo sapien
tggagtagtggcacgatcacagctc

SEQ ID NO: 360472 - DNA, 25 bp, Homo sapien
ccttgccaaaatcatatgcactttg

SEQ ID NO: 360473 - DNA, 25 bp, Homo sapien
tcttttccttgccaaaatcatatgc

SEQ ID NO: 360474 - DNA, 25 bp, Homo sapien
catatgcactttggtccaaatctgt

SEQ ID NO: 360475 - DNA, 25 bp, Homo sapien
tatgcactttggtccaaatctgttt

SEQ ID NO: 360476 - DNA, 25 bp, Homo sapien
cctagcgcagggcttagcaacaatt

SEQ ID NO: 360477 - DNA, 25 bp, Homo sapien
taccctccaagcagaatgtaaaggg

SEQ ID NO: 360478 - DNA, 25 bp, Homo sapien
tgtgagttatcaacaccagctagag

SEQ ID NO: 360479 - DNA, 25 bp, Homo sapien
tatactcactagaggcaaagtgcct

SEQ ID NO: 360480 - DNA, 25 bp, Homo sapien
gaatgtttactacatatcaagtgca

SEQ ID NO: 360481 - DNA, 25 bp, Homo sapien
ttttgtatctagttgcaaggagcca

SEQ ID NO: 360482 - DNA, 25 bp, Homo sapien
cctaggtttaggcttcgtagatctg

SEQ ID NO: 360483 - DNA, 25 bp, Homo sapien
cgtagatctgaatgcggttttttca

SEQ ID NO: 360484 - DNA, 25 bp, Homo sapien
tgacttgtcagttactcggataatt

SEQ ID NO: 360485 - DNA, 25 bp, Homo sapien
tcggataattgatcgagtgattgct

SEQ ID NO: 360486 - DNA, 25 bp, Homo sapien
tacatcagtactggctgacttgtca

SEQ ID NO: 360487 - DNA, 25 bp, Homo sapien
tgtacatcagtactggctgacttgt

SEQ ID NO: 360488 - DNA, 25 bp, Homo sapien
gtcctagagggtccactcacctctt

SEQ ID NO: 360489 - DNA, 25 bp, Homo sapien
tagagggtccactcacctcttacca

SEQ ID NO: 360490 - DNA, 25 bp, Homo sapien
agagggtccactcacctcttaccag

SEQ ID NO: 360491 - DNA, 25 bp, Homo sapien
cctagagggtccactcacctcttac

SEQ ID NO: 360492 - DNA, 25 bp, Homo sapien
taatttcttgacttgggattctagt

SEQ ID NO: 360493 - DNA, 25 bp, Homo sapien
ggattctagtaccacactgacaatg

SEQ ID NO: 360494 - DNA, 25 bp, Homo sapien
attaatataatttcttgacttggga

SEQ ID NO: 360495 - DNA, 25 bp, Homo sapien
gacttgggattctagtaccacactg

SEQ ID NO: 360496 - DNA, 25 bp, Homo sapien
ggctaatgatgttggacgttttttc

SEQ ID NO: 360497 - DNA, 25 bp, Homo sapien
gaatacaactctgcacatcctcgtc

SEQ ID NO: 360498 - DNA, 25 bp, Homo sapien
catcctcgtcagctcttggtattgt

SEQ ID NO: 360499 - DNA, 25 bp, Homo sapien
tttatttatggtagccaaaagctga

SEQ ID NO: 360500 - DNA, 25 bp, Homo sapien
acagcccattggttccgtccttgac

SEQ ID NO: 360501 - DNA, 25 bp, Homo sapien
accatgggcaccgacatctgtggcc

SEQ ID NO: 360502 - DNA, 25 bp, Homo sapien
acagccagccgggaggtaacattaa

SEQ ID NO: 360503 - DNA, 25 bp, Homo sapien
cccggagattaagtggagccaccat

SEQ ID NO: 360504 - DNA, 25 bp, Homo sapien
cagggcattgctccctggtcggaag

SEQ ID NO: 360505 - DNA, 25 bp, Homo sapien
tccttgtgtgcgaagctgggcgcca

SEQ ID NO: 360506 - DNA, 25 bp, Homo sapien
tgtgttcccgtgtggccactgaggc

SEQ ID NO: 360507 - DNA, 25 bp, Homo sapien
aggtctcgtacccactccaagtgca

SEQ ID NO: 360508 - DNA, 25 bp, Homo sapien
gctgtccagtcgtcttgagttgaac

SEQ ID NO: 360509 - DNA, 25 bp, Homo sapien
gcttcttttgaccttcggtactcag

SEQ ID NO: 360510 - DNA, 25 bp, Homo sapien
aacgttctcatcaatactttggtgg

SEQ ID NO: 360511 - DNA, 25 bp, Homo sapien
ggtactcagtagacttactgtatgg

SEQ ID NO: 360512 - DNA, 25 bp, Homo sapien
gaaagtctgtgatatctgagggaaa

SEQ ID NO: 360513 - DNA, 25 bp, Homo sapien
tgttgccaactagcagaccatagca

SEQ ID NO: 360514 - DNA, 25 bp, Homo sapien
agaccatagcagaaagtctgtgata

SEQ ID NO: 360515 - DNA, 25 bp, Homo sapien
tgccaactagcagaccatagcagaa

SEQ ID NO: 360516 - DNA, 25 bp, Homo sapien
tgtgagaagtcacggcaagttccct

SEQ ID NO: 360517 - DNA, 25 bp, Homo sapien
tgtcatgcccactgaacaggaactg

SEQ ID NO: 360518 - DNA, 25 bp, Homo sapien
tcatctcactaagagggaggacagt

SEQ ID NO: 360519 - DNA, 25 bp, Homo sapien
caggaactgtaggaagggaccacag

SEQ ID NO: 360520 - DNA, 25 bp, Homo sapien
gctagagagctttgtgttcagcatc

SEQ ID NO: 360521 - DNA, 25 bp, Homo sapien
cagcatctcctagtcagttgtgaat

SEQ ID NO: 360522 - DNA, 25 bp, Homo sapien
tcagtgacaacatcagtccagagtg

SEQ ID NO: 360523 - DNA, 25 bp, Homo sapien
caaataccagctgacggaaacatct

SEQ ID NO: 360524 - DNA, 25 bp, Homo sapien
tgaattcacgattctctttaacaaa

SEQ ID NO: 360525 - DNA, 25 bp, Homo sapien
gcagagtccacatcttgaggtctta

SEQ ID NO: 360526 - DNA, 25 bp, Homo sapien
tttcaataagggtaacaatggtagc

SEQ ID NO: 360527 - DNA, 25 bp, Homo sapien
gctccttctgctattctgaattcac

SEQ ID NO: 360528 - DNA, 25 bp, Homo sapien
ccttcattttaggcagctattgctt

SEQ ID NO: 360529 - DNA, 25 bp, Homo sapien
gcaccttcattttaggcagctattg

SEQ ID NO: 360530 - DNA, 25 bp, Homo sapien
caccttcattttaggcagctattgc

SEQ ID NO: 360531 - DNA, 25 bp, Homo sapien
tgcaccttcattttaggcagctatt

SEQ ID NO: 360532 - DNA, 25 bp, Homo sapien
cagtggcaagggcatcagtcctgtg

SEQ ID NO: 360533 - DNA, 25 bp, Homo sapien
gttatcatgcctataaagtgcccag

SEQ ID NO: 360534 - DNA, 25 bp, Homo sapien
tgtagaatgggacctaccccaacag

SEQ ID NO: 360535 - DNA, 25 bp, Homo sapien
caaaggcctcactgaagttcactga

SEQ ID NO: 360536 - DNA, 25 bp, Homo sapien
tcagtcagaagacgccagcctgttg

SEQ ID NO: 360537 - DNA, 25 bp, Homo sapien
cagagcgaggttctcagtgtgagcc

SEQ ID NO: 360538 - DNA, 25 bp, Homo sapien
ttggtttgaaggtgaccaccctcgc

SEQ ID NO: 360539 - DNA, 25 bp, Homo sapien
tgttgtttttcagagcgaggttctc

SEQ ID NO: 360540 - DNA, 25 bp, Homo sapien
gcaaaaacgtattgggcctgttgga

SEQ ID NO: 360541 - DNA, 25 bp, Homo sapien
taatgggacttataagcaggcactc

SEQ ID NO: 360542 - DNA, 25 bp, Homo sapien
tcacatttagcagtgaccaagggcc

SEQ ID NO: 360543 - DNA, 25 bp, Homo sapien
caagggcctggtcaaaacgtgagtg

SEQ ID NO: 360544 - DNA, 25 bp, Homo sapien
aaagatgttggaccccgtggccgca

SEQ ID NO: 360545 - DNA, 25 bp, Homo sapien
aatcttcattgaggtcaagagaaaa

SEQ ID NO: 360546 - DNA, 25 bp, Homo sapien
ctttagtcttaaaatcttcattgag

SEQ ID NO: 360547 - DNA, 25 bp, Homo sapien
tagtcttaaaatcttcattgaggtc

SEQ ID NO: 360548 - DNA, 25 bp, Homo sapien
cgagtacaattaccaggcatagtgg

SEQ ID NO: 360549 - DNA, 25 bp, Homo sapien
taactgagcacagccgaaaacaggc

SEQ ID NO: 360550 - DNA, 25 bp, Homo sapien
gagagtcttgccttcgtctttggaa

SEQ ID NO: 360551 - DNA, 25 bp, Homo sapien
cagaagccagggaaaagcacgaata

SEQ ID NO: 360552 - DNA, 25 bp, Homo sapien
ttactgattaggagcatggagcacc

SEQ ID NO: 360553 - DNA, 25 bp, Homo sapien
aggctgtccgcccgcaggatgtcag

SEQ ID NO: 360554 - DNA, 25 bp, Homo sapien
gagacggtgccctcggtcagcacat

SEQ ID NO: 360555 - DNA, 25 bp, Homo sapien
catggagcaccactggatcgtgggt

SEQ ID NO: 360556 - DNA, 25 bp, Homo sapien
ttctccagttcaaagggaaactgct

SEQ ID NO: 360557 - DNA, 25 bp, Homo sapien
tggcgcgtggcacctttgtcagtct

SEQ ID NO: 360558 - DNA, 25 bp, Homo sapien
cttcttcctggcgcgtggcaccttt

SEQ ID NO: 360559 - DNA, 25 bp, Homo sapien
ctccagttcaaagggaaactgctct

SEQ ID NO: 360560 - DNA, 25 bp, Homo sapien
ccggaagaccctgttgacaagctgt

SEQ ID NO: 360561 - DNA, 25 bp, Homo sapien
tcagttgagcacattgtagtttagc

SEQ ID NO: 360562 - DNA, 25 bp, Homo sapien
tctctttgcacatccacttacggcc

SEQ ID NO: 360563 - DNA, 25 bp, Homo sapien
tgtagtttagcagctcttggtgagg

SEQ ID NO: 360564 - DNA, 25 bp, Homo sapien
cggcagctgccgtgtattgaaaagc

SEQ ID NO: 360565 - DNA, 25 bp, Homo sapien
gacacagcctagatttggacccaga

SEQ ID NO: 360566 - DNA, 25 bp, Homo sapien
gacatcagaaccctaggctccgttg

SEQ ID NO: 360567 - DNA, 25 bp, Homo sapien
taaagccccgagatgtcaacggcag

SEQ ID NO: 360568 - DNA, 25 bp, Homo sapien
gctcacaacgtattcaacaaaaaga

SEQ ID NO: 360569 - DNA, 25 bp, Homo sapien
tgtatgcatttataacttacgatat

SEQ ID NO: 360570 - DNA, 25 bp, Homo sapien
aataacctatagtatgatctaatga

SEQ ID NO: 360571 - DNA, 25 bp, Homo sapien
tacgatatggtccattcatatagat

SEQ ID NO: 360572 - DNA, 25 bp, Homo sapien
ggtgtggctcgctccccaagttctt

SEQ ID NO: 360573 - DNA, 25 bp, Homo sapien
caggaggagacctgattgccgactc

SEQ ID NO: 360574 - DNA, 25 bp, Homo sapien
aaagcaaccgcctggcaagtctgga

SEQ ID NO: 360575 - DNA, 25 bp, Homo sapien
ggccccaagtggtcgaatgcagagt

SEQ ID NO: 360576 - DNA, 25 bp, Homo sapien
gctcagaactattccaccacatggg

SEQ ID NO: 360577 - DNA, 25 bp, Homo sapien
gaaatacactgtcatgtgacggctg

SEQ ID NO: 360578 - DNA, 25 bp, Homo sapien
tgtgatgtagcgttctctcccagtg

SEQ ID NO: 360579 - DNA, 25 bp, Homo sapien
tccaaaccgtctatcacagtgtgta

SEQ ID NO: 360580 - DNA, 25 bp, Homo sapien
tgacactgttgaccaacagccaaag

SEQ ID NO: 360581 - DNA, 25 bp, Homo sapien
ttttaccttatgacactgttgacca

SEQ ID NO: 360582 - DNA, 25 bp, Homo sapien
taccttatgacactgttgaccaaca

SEQ ID NO: 360583 - DNA, 25 bp, Homo sapien
tgttgaccaacagccaaagtcagaa

SEQ ID NO: 360584 - DNA, 25 bp, Homo sapien
cttgaaatgacaacacgctcgtgcc

SEQ ID NO: 360585 - DNA, 25 bp, Homo sapien
gccaggccctgcataggagctttca

SEQ ID NO: 360586 - DNA, 25 bp, Homo sapien
ggaagatgagccgttcccaaggcat

SEQ ID NO: 360587 - DNA, 25 bp, Homo sapien
caatccaaaaaatagcggtcgcagc

SEQ ID NO: 360588 - DNA, 25 bp, Homo sapien
cttggggctgagacctcttccatga

SEQ ID NO: 360589 - DNA, 25 bp, Homo sapien
cagccccacgtcaggttctggaagt

SEQ ID NO: 360590 - DNA, 25 bp, Homo sapien
tcttccatgaatcacgtatggaagc

SEQ ID NO: 360591 - DNA, 25 bp, Homo sapien
aatcacgtatggaagcccaggacca

SEQ ID NO: 360592 - DNA, 25 bp, Homo sapien
gccctttggagcatcacacacgttt

SEQ ID NO: 360593 - DNA, 25 bp, Homo sapien
cacacacgtttgtgggacaaaagac

SEQ ID NO: 360594 - DNA, 25 bp, Homo sapien
tggcctggcccggagtgtcttctcc

SEQ ID NO: 360595 - DNA, 25 bp, Homo sapien
tctccccagcctgaaatagtgctct

SEQ ID NO: 360596 - DNA, 25 bp, Homo sapien
cagtctcgagagatgtggcttggcc

SEQ ID NO: 360597 - DNA, 25 bp, Homo sapien
tggccacttttgcagattcccaggc

SEQ ID NO: 360598 - DNA, 25 bp, Homo sapien
cagcaaatcattccgcaaggtggag

SEQ ID NO: 360599 - DNA, 25 bp, Homo sapien
ggcttaaaacgctcaggtgccccga

SEQ ID NO: 360600 - DNA, 25 bp, Homo sapien
cgcggcctccgcgcggttctcttcc

SEQ ID NO: 360601 - DNA, 25 bp, Homo sapien
cacgacgaaaaaagcttctgggtag

SEQ ID NO: 360602 - DNA, 25 bp, Homo sapien
ggcctccgcgcggttctcttcctcc

SEQ ID NO: 360603 - DNA, 25 bp, Homo sapien
aaaagcttctgggtagaattggaag

SEQ ID NO: 360604 - DNA, 25 bp, Homo sapien
tgacagcagcgcttcgggggcggcc

SEQ ID NO: 360605 - DNA, 25 bp, Homo sapien
ccagctccgcgactgtgcagaaagt

SEQ ID NO: 360606 - DNA, 25 bp, Homo sapien
ctcggagccgcgactgaaacccagc

SEQ ID NO: 360607 - DNA, 25 bp, Homo sapien
agcgtgtccgcgaagcccggaaact

SEQ ID NO: 360608 - DNA, 25 bp, Homo sapien
gggccggacgtgaacttgaccctgc

SEQ ID NO: 360609 - DNA, 25 bp, Homo sapien
cggcgcgctcgggacgatctggtaa

SEQ ID NO: 360610 - DNA, 25 bp, Homo sapien
cgggccggacgtgaacttgaccctg

SEQ ID NO: 360611 - DNA, 25 bp, Homo sapien
cgggacgatctggtaagcgctcccc

SEQ ID NO: 360612 - DNA, 25 bp, Homo sapien
caggcactcagtatcagcggctgct

SEQ ID NO: 360613 - DNA, 25 bp, Homo sapien
tgctggcttctctcgcacatcacct

SEQ ID NO: 360614 - DNA, 25 bp, Homo sapien
tgtgaacatcgatcactccgctagc

SEQ ID NO: 360615 - DNA, 25 bp, Homo sapien
tctctcctacatctcatgtcaactt

SEQ ID NO: 360616 - DNA, 25 bp, Homo sapien
accaccttctggcacttgtttccgt

SEQ ID NO: 360617 - DNA, 25 bp, Homo sapien
ctcaccaccttctggcacttgtttc

SEQ ID NO: 360618 - DNA, 25 bp, Homo sapien
caccttctggcacttgtttccgtac

SEQ ID NO: 360619 - DNA, 25 bp, Homo sapien
tcaccaccttctggcacttgtttcc

SEQ ID NO: 360620 - DNA, 25 bp, Homo sapien
aaagtcaaggtgtccggaggcccag

SEQ ID NO: 360621 - DNA, 25 bp, Homo sapien
caggatcggctatagagtttgcagg

SEQ ID NO: 360622 - DNA, 25 bp, Homo sapien
tggctgcggcattcaggaaactgga

SEQ ID NO: 360623 - DNA, 25 bp, Homo sapien
tggtgtgaattaaaacgagcttggg

SEQ ID NO: 360624 - DNA, 25 bp, Homo sapien
aaggaccccaggctcaataggctga

SEQ ID NO: 360625 - DNA, 25 bp, Homo sapien
acaatgtgactgctcgggtggcctg

SEQ ID NO: 360626 - DNA, 25 bp, Homo sapien
tcagctggcgaaggctcctgagagc

SEQ ID NO: 360627 - DNA, 25 bp, Homo sapien
tgaacacatcgatgagggccgtgcc

SEQ ID NO: 360628 - DNA, 25 bp, Homo sapien
tttgggcacacgtggctaatccagg

SEQ ID NO: 360629 - DNA, 25 bp, Homo sapien
ccccaagtcctgtggcaagtgaaga

SEQ ID NO: 360630 - DNA, 25 bp, Homo sapien
gacaccagcttgaggactctgtaga

SEQ ID NO: 360631 - DNA, 25 bp, Homo sapien
tgaggtcacagaggtcttgcccagg

SEQ ID NO: 360632 - DNA, 25 bp, Homo sapien
gctgagaaggcttgcagtcacatcg

SEQ ID NO: 360633 - DNA, 25 bp, Homo sapien
aggcagctgagaaggcttgcagtca

SEQ ID NO: 360634 - DNA, 25 bp, Homo sapien
catcgctgatggtaaagctgtagca

SEQ ID NO: 360635 - DNA, 25 bp, Homo sapien
gcttgcagtcacatcgctgatggta

SEQ ID NO: 360636 - DNA, 25 bp, Homo sapien
ccaagggcacacgtagaagcagagt

SEQ ID NO: 360637 - DNA, 25 bp, Homo sapien
gggccagcacagtacatagtagggt

SEQ ID NO: 360638 - DNA, 25 bp, Homo sapien
gagctccatcgcctggtgctttgca

SEQ ID NO: 360639 - DNA, 25 bp, Homo sapien
tcagagaggtgtgttagctttccca

SEQ ID NO: 360640 - DNA, 25 bp, Homo sapien
atgagcccaggagtttgagaccaac

SEQ ID NO: 360641 - DNA, 25 bp, Homo sapien
cgaggcaggaagattgcatgagccc

SEQ ID NO: 360642 - DNA, 25 bp, Homo sapien
gcatgagcccaggagtttgagacca

SEQ ID NO: 360643 - DNA, 25 bp, Homo sapien
gccgaggcaggaagattgcatgagc

SEQ ID NO: 360644 - DNA, 25 bp, Homo sapien
tcgctggaaagttcgccctgcccgg

SEQ ID NO: 360645 - DNA, 25 bp, Homo sapien
gtgagggcaccccgggtgggcgcag

SEQ ID NO: 360646 - DNA, 25 bp, Homo sapien
gcagggtgggcgctctgtgggcaac

SEQ ID NO: 360647 - DNA, 25 bp, Homo sapien
tgggcaccagcaggacccgaggcca

SEQ ID NO: 360648 - DNA, 25 bp, Homo sapien
tgcccctagccggcctccccgccga

SEQ ID NO: 360649 - DNA, 25 bp, Homo sapien
gaaagggttcttcggctgtgctccc

SEQ ID NO: 360650 - DNA, 25 bp, Homo sapien
gctgacttcagactcacaatagtgg

SEQ ID NO: 360651 - DNA, 25 bp, Homo sapien
gatttcatgggcctgtctcgggaag

SEQ ID NO: 360652 - DNA, 25 bp, Homo sapien
cacggcggtcacgtaggtttagtag

SEQ ID NO: 360653 - DNA, 25 bp, Homo sapien
accgtggccgggcagcgtccacgca

SEQ ID NO: 360654 - DNA, 25 bp, Homo sapien
ccgtggccgggcagcgtccacgcag

SEQ ID NO: 360655 - DNA, 25 bp, Homo sapien
cgtggccgggcagcgtccacgcagc

SEQ ID NO: 360656 - DNA, 25 bp, Homo sapien
tcaccgtggccgggcagcgtccacg

SEQ ID NO: 360657 - DNA, 25 bp, Homo sapien
ggctcgtaccacagagattcttcca

SEQ ID NO: 360658 - DNA, 25 bp, Homo sapien
gctgggctcgtaccacagagattct

SEQ ID NO: 360659 - DNA, 25 bp, Homo sapien
ttccaggctgggctcgtaccacaga

SEQ ID NO: 360660 - DNA, 25 bp, Homo sapien
tcgtaccacagagattcttccacac

SEQ ID NO: 360661 - DNA, 25 bp, Homo sapien
gatggtgcccctcgaatggttaagg

SEQ ID NO: 360662 - DNA, 25 bp, Homo sapien
taagggacccgtacagataccattc

SEQ ID NO: 360663 - DNA, 25 bp, Homo sapien
ttcacgaattgcagttccaccctgg

SEQ ID NO: 360664 - DNA, 25 bp, Homo sapien
tgtcatcgtgtggaaaagagtccct

SEQ ID NO: 360665 - DNA, 25 bp, Homo sapien
gagtaacccagggagaacgcaggta

SEQ ID NO: 360666 - DNA, 25 bp, Homo sapien
caggatgctatcctcgtggagctaa

SEQ ID NO: 360667 - DNA, 25 bp, Homo sapien
tccgaatctgtaggtccaggtgtgc

SEQ ID NO: 360668 - DNA, 25 bp, Homo sapien
taaagtttgaggcaccaacaggctg

SEQ ID NO: 360669 - DNA, 25 bp, Homo sapien
ttccagttttggagaagtcgggaga

SEQ ID NO: 360670 - DNA, 25 bp, Homo sapien
agtcgggagagtgagggaaggagcg

SEQ ID NO: 360671 - DNA, 25 bp, Homo sapien
tgcggttctgagtccgctgcctcct

SEQ ID NO: 360672 - DNA, 25 bp, Homo sapien
gagtgagggaaggagcgtgcggttc

SEQ ID NO: 360673 - DNA, 25 bp, Homo sapien
cgaagtggcatcttatccaggagcc

SEQ ID NO: 360674 - DNA, 25 bp, Homo sapien
gaaacaggcctatgaaaatggactc

SEQ ID NO: 360675 - DNA, 25 bp, Homo sapien
cagcaggaaattgccggctccattc

SEQ ID NO: 360676 - DNA, 25 bp, Homo sapien
cattgtctaggatgatcgaagtggc

SEQ ID NO: 360677 - DNA, 25 bp, Homo sapien
atcaggaaaaaaataactgtataag

SEQ ID NO: 360678 - DNA, 25 bp, Homo sapien
ctgtggcccacaggcgaaaaccaag

SEQ ID NO: 360679 - DNA, 25 bp, Homo sapien
gttttcttgttgataatttgagcat

SEQ ID NO: 360680 - DNA, 25 bp, Homo sapien
tttcttcctggaaacttatccatca

SEQ ID NO: 360681 - DNA, 25 bp, Homo sapien
catcaacaatgtaaattttccgggt

SEQ ID NO: 360682 - DNA, 25 bp, Homo sapien
tgtattgctagaaggtagacacggc

SEQ ID NO: 360683 - DNA, 25 bp, Homo sapien
tatgttcagaatccccatttggtcg

SEQ ID NO: 360684 - DNA, 25 bp, Homo sapien
gagggcaccccactcgatagtgaag

SEQ ID NO: 360685 - DNA, 25 bp, Homo sapien
cgcttgaacgtgtatctccgaggta

SEQ ID NO: 360686 - DNA, 25 bp, Homo sapien
cctgggcagtctaatccaatgtgaa

SEQ ID NO: 360687 - DNA, 25 bp, Homo sapien
gaagcagggcacacgaggaactttt

SEQ ID NO: 360688 - DNA, 25 bp, Homo sapien
tgacgtcaagggacactggttagaa

SEQ ID NO: 360689 - DNA, 25 bp, Homo sapien
cagaaatggcgagatgtgacgtcaa

SEQ ID NO: 360690 - DNA, 25 bp, Homo sapien
ggccttgtttctctcgggccctggc

SEQ ID NO: 360691 - DNA, 25 bp, Homo sapien
tgcggtttgggaaccactcaggcgc

SEQ ID NO: 360692 - DNA, 25 bp, Homo sapien
tctgcgaatagtgactctgtgtccg

SEQ ID NO: 360693 - DNA, 25 bp, Homo sapien
cgccaaagggccgtcgcaggcgtct

SEQ ID NO: 360694 - DNA, 25 bp, Homo sapien
aagcaggaagttgttgccaccggga

SEQ ID NO: 360695 - DNA, 25 bp, Homo sapien
ttggcattctaacccgtgtccggac

SEQ ID NO: 360696 - DNA, 25 bp, Homo sapien
tacatctcccggcactgtgcgctga

SEQ ID NO: 360697 - DNA, 25 bp, Homo sapien
ccatcgggctccgagagagcaaagc

SEQ ID NO: 360698 - DNA, 25 bp, Homo sapien
actgcagggaccgtcggtcagccag

SEQ ID NO: 360699 - DNA, 25 bp, Homo sapien
gagagctccgcagcgcacactgttc

SEQ ID NO: 360700 - DNA, 25 bp, Homo sapien
ctggagagcctgaccgctgtccgcg

SEQ ID NO: 360701 - DNA, 25 bp, Homo sapien
accgtcggccccgagcgctgtcccg

SEQ ID NO: 360702 - DNA, 25 bp, Homo sapien
cctcggttcggcgttggcggcattt

SEQ ID NO: 360703 - DNA, 25 bp, Homo sapien
catttgggccggttcagtgaaaggc

SEQ ID NO: 360704 - DNA, 25 bp, Homo sapien
tttacttcctaaacccacgctgctg

SEQ ID NO: 360705 - DNA, 25 bp, Homo sapien
ggaagctacaactctttcttggaag

SEQ ID NO: 360706 - DNA, 25 bp, Homo sapien
cgagtgctagaaagacggccacgtt

SEQ ID NO: 360707 - DNA, 25 bp, Homo sapien
tagccggctgggtcacaaaatggaa

SEQ ID NO: 360708 - DNA, 25 bp, Homo sapien
catcgagagggcgatttgggccaat

SEQ ID NO: 360709 - DNA, 25 bp, Homo sapien
gctttctttgtcgagtggaggctaa

SEQ ID NO: 360710 - DNA, 25 bp, Homo sapien
acacagtgcgatggttgcccagcct

SEQ ID NO: 360711 - DNA, 25 bp, Homo sapien
ccgtgaattgaatgggggctaccca

SEQ ID NO: 360712 - DNA, 25 bp, Homo sapien
tctgagaagggcctgatacgggctg

SEQ ID NO: 360713 - DNA, 25 bp, Homo sapien
cgtgtgggttctggcctgcccgggc

SEQ ID NO: 360714 - DNA, 25 bp, Homo sapien
tgcaggcctggtttggaggccatta

SEQ ID NO: 360715 - DNA, 25 bp, Homo sapien
gaggccattatctcctcggcggcca

SEQ ID NO: 360716 - DNA, 25 bp, Homo sapien
gtggccacttctggtcgaggcagtt

SEQ ID NO: 360717 - DNA, 25 bp, Homo sapien
cagccgggcacagcagtggccactt

SEQ ID NO: 360718 - DNA, 25 bp, Homo sapien
gaacaatgtggcctctatccctgga

SEQ ID NO: 360719 - DNA, 25 bp, Homo sapien
ctggcgtgggaacaatgtggcctct

SEQ ID NO: 360720 - DNA, 25 bp, Homo sapien
gcctctatccctggagcgagccagg

SEQ ID NO: 360721 - DNA, 25 bp, Homo sapien
ccagcccttcagagcagcccggcca

SEQ ID NO: 360722 - DNA, 25 bp, Homo sapien
agtagcattttcctcgtactccggg

SEQ ID NO: 360723 - DNA, 25 bp, Homo sapien
tgttacgtgtcctccctctaattgg

SEQ ID NO: 360724 - DNA, 25 bp, Homo sapien
ccttctgtcgtgaagacgagccgag

SEQ ID NO: 360725 - DNA, 25 bp, Homo sapien
ttgtgccccggtgcctgttacgtgt

SEQ ID NO: 360726 - DNA, 25 bp, Homo sapien
caaatctgtaaacggagctaagctc

SEQ ID NO: 360727 - DNA, 25 bp, Homo sapien
gaaagttctaaacggcactgagagg

SEQ ID NO: 360728 - DNA, 25 bp, Homo sapien
gctaagctcacacgaggactctcgg

SEQ ID NO: 360729 - DNA, 25 bp, Homo sapien
ttgttcgtagatgagccagcagtcg

SEQ ID NO: 360730 - DNA, 25 bp, Homo sapien
gctctgctgtctggtggttttaacg

SEQ ID NO: 360731 - DNA, 25 bp, Homo sapien
gactcccgcctccttagcaagagga

SEQ ID NO: 360732 - DNA, 25 bp, Homo sapien
cccatacgtgtaagtgtttgcctct

SEQ ID NO: 360733 - DNA, 25 bp, Homo sapien
agttgatgaaatttgccagagccgc

SEQ ID NO: 360734 - DNA, 25 bp, Homo sapien
gcatccaggcgtgggcttctcgtag

SEQ ID NO: 360735 - DNA, 25 bp, Homo sapien
ctccttatgtggacaggcggttctg

SEQ ID NO: 360736 - DNA, 25 bp, Homo sapien
ctgggcgccggccatttgcagactg

SEQ ID NO: 360737 - DNA, 25 bp, Homo sapien
ccaccccagggatgcccgtgggaag

SEQ ID NO: 360738 - DNA, 25 bp, Homo sapien
agccattccggcaaaaccccagaag

SEQ ID NO: 360739 - DNA, 25 bp, Homo sapien
ggtcctggagaagggtcctggcatc

SEQ ID NO: 360740 - DNA, 25 bp, Homo sapien
tcctggcatcggctggtatgagtct

SEQ ID NO: 360741 - DNA, 25 bp, Homo sapien
tctgggtttccgagcttcaatgagg

SEQ ID NO: 360742 - DNA, 25 bp, Homo sapien
gctatggaagcagcttgcaaatggg

SEQ ID NO: 360743 - DNA, 25 bp, Homo sapien
tgcccgaggcatctgcgctatggaa

SEQ ID NO: 360744 - DNA, 25 bp, Homo sapien
tcccagcacctggtgggtgagccgc

SEQ ID NO: 360745 - DNA, 25 bp, Homo sapien
gtctctcctgtgatggactcaaatg

SEQ ID NO: 360746 - DNA, 25 bp, Homo sapien
ctgcgtccagccctcggacctgcca

SEQ ID NO: 360747 - DNA, 25 bp, Homo sapien
cgccccgtgccggccctgtacaggc

SEQ ID NO: 360748 - DNA, 25 bp, Homo sapien
gtccagccctcggacctgccacgtc

SEQ ID NO: 360749 - DNA, 25 bp, Homo sapien
cccctgcgtccagccctcggacctg

SEQ ID NO: 360750 - DNA, 25 bp, Homo sapien
gaaggaaccgtcgaagctaccatgg

SEQ ID NO: 360751 - DNA, 25 bp, Homo sapien
atctttgtccagagggcccgaggca

SEQ ID NO: 360752 - DNA, 25 bp, Homo sapien
tctgcatcgtagctcatgaacatcc

SEQ ID NO: 360753 - DNA, 25 bp, Homo sapien
tctcgggtgcaatgaacaagtgtgt

SEQ ID NO: 360754 - DNA, 25 bp, Homo sapien
gacagaggagagatttattgcagag

SEQ ID NO: 360755 - DNA, 25 bp, Homo sapien
gccgttcacaatgggagaagcctct

SEQ ID NO: 360756 - DNA, 25 bp, Homo sapien
taaatgtggaaagctcgacgcacca

SEQ ID NO: 360757 - DNA, 25 bp, Homo sapien
tgataacatgacctgccggactctc

SEQ ID NO: 360758 - DNA, 25 bp, Homo sapien
tcccagccccgtgttcactctaatg

SEQ ID NO: 360759 - DNA, 25 bp, Homo sapien
gcctcgatgggccacgatctgtgaa

SEQ ID NO: 360760 - DNA, 25 bp, Homo sapien
tgtgaaaatggcctaagctggccct

SEQ ID NO: 360761 - DNA, 25 bp, Homo sapien
gggtttagcaccagcctcgatgggc

SEQ ID NO: 360762 - DNA, 25 bp, Homo sapien
ggtgggccacatgggatttcctaac

SEQ ID NO: 360763 - DNA, 25 bp, Homo sapien
agaactcctgtcttgtctgctccag

SEQ ID NO: 360764 - DNA, 25 bp, Homo sapien
ggcatgccatgccagtccccatgct

SEQ ID NO: 360765 - DNA, 25 bp, Homo sapien
catgccagtccccatgctgtctggg

SEQ ID NO: 360766 - DNA, 25 bp, Homo sapien
tcagtgggcgtggagattgtcacca

SEQ ID NO: 360767 - DNA, 25 bp, Homo sapien
gtggagattgtcaccatggacctgt

SEQ ID NO: 360768 - DNA, 25 bp, Homo sapien
ggcgtggagattgtcaccatggacc

SEQ ID NO: 360769 - DNA, 25 bp, Homo sapien
ccagccctcagtgggcgtggagatt

SEQ ID NO: 360770 - DNA, 25 bp, Homo sapien
agagcaccacccgagacatcaggag

SEQ ID NO: 360771 - DNA, 25 bp, Homo sapien
ccatcgtgggctagggaagatcctc

SEQ ID NO: 360772 - DNA, 25 bp, Homo sapien
aggtagctgcgtctttactccccgc

SEQ ID NO: 360773 - DNA, 25 bp, Homo sapien
cttgcagaatgtggccccgtcccag

SEQ ID NO: 360774 - DNA, 25 bp, Homo sapien
agccccaaccagagccggcggccgc

SEQ ID NO: 360775 - DNA, 25 bp, Homo sapien
tgaagggactcgttcctgttctggg

SEQ ID NO: 360776 - DNA, 25 bp, Homo sapien
gtggcccccttgatacccggcactg

SEQ ID NO: 360777 - DNA, 25 bp, Homo sapien
gctggttttctgaagggactcgttc

SEQ ID NO: 360778 - DNA, 25 bp, Homo sapien
cacttcatggcacagtggtccccgg

SEQ ID NO: 360779 - DNA, 25 bp, Homo sapien
cagggccccgaaagttccacgctgt

SEQ ID NO: 360780 - DNA, 25 bp, Homo sapien
cgttcccgtggcagccacttcatgg

SEQ ID NO: 360781 - DNA, 25 bp, Homo sapien
agcctccgatccctggagcaggttc

SEQ ID NO: 360782 - DNA, 25 bp, Homo sapien
gtgcgcggggcgggcactgtgctgc

SEQ ID NO: 360783 - DNA, 25 bp, Homo sapien
cggggcgggcactgtgctgcttttc

SEQ ID NO: 360784 - DNA, 25 bp, Homo sapien
cgcggggcgggcactgtgctgcttt

SEQ ID NO: 360785 - DNA, 25 bp, Homo sapien
tgcgcggggcgggcactgtgctgct

SEQ ID NO: 360786 - DNA, 25 bp, Homo sapien
taagcggtcagtccctcagctacat

SEQ ID NO: 360787 - DNA, 25 bp, Homo sapien
cggtggaatccaagcaagagcagcc

SEQ ID NO: 360788 - DNA, 25 bp, Homo sapien
tctcccagcaacgtgagagggcacg

SEQ ID NO: 360789 - DNA, 25 bp, Homo sapien
tgaaagtcggacagatttgctcact

SEQ ID NO: 360790 - DNA, 25 bp, Homo sapien
tctgtaagtttgccccctcgggtca

SEQ ID NO: 360791 - DNA, 25 bp, Homo sapien
gcttgggaagccagccttcaggtcc

SEQ ID NO: 360792 - DNA, 25 bp, Homo sapien
cagccttcaggtcccgctgttttgt

SEQ ID NO: 360793 - DNA, 25 bp, Homo sapien
cttcaggtcccgctgttttgttatt

SEQ ID NO: 360794 - DNA, 25 bp, Homo sapien
gaaaatccctgattagtgaccacct

SEQ ID NO: 360795 - DNA, 25 bp, Homo sapien
taagcaacgggctcgaaaatccctg

SEQ ID NO: 360796 - DNA, 25 bp, Homo sapien
ccctgattagtgaccaccttctgtt

SEQ ID NO: 360797 - DNA, 25 bp, Homo sapien
tttgggtcaacgacggccttaagca

SEQ ID NO: 360798 - DNA, 25 bp, Homo sapien
acaagagccgcatggaacacaggag

SEQ ID NO: 360799 - DNA, 25 bp, Homo sapien
tgtaggaggcaactcttgacagagc

SEQ ID NO: 360800 - DNA, 25 bp, Homo sapien
cagtgggccgccataaagatggtgc

SEQ ID NO: 360801 - DNA, 25 bp, Homo sapien
tagtgaaacccaagcagagcaatgc

SEQ ID NO: 360802 - DNA, 25 bp, Homo sapien
ttttgctgtcagtaccaggatggca

SEQ ID NO: 360803 - DNA, 25 bp, Homo sapien
gttttgctgtcagtaccaggatggc

SEQ ID NO: 360804 - DNA, 25 bp, Homo sapien
gtaccaggatggcaactaaggacat

SEQ ID NO: 360805 - DNA, 25 bp, Homo sapien
ggatggcaactaaggacatgcccat

SEQ ID NO: 360806 - DNA, 25 bp, Homo sapien
tgtgcccaattatggtatcaggtct

SEQ ID NO: 360807 - DNA, 25 bp, Homo sapien
ggcagcttccatggactcataaaaa

SEQ ID NO: 360808 - DNA, 25 bp, Homo sapien
aggaatttcggaaggatgtgtgccc

SEQ ID NO: 360809 - DNA, 25 bp, Homo sapien
aaatatggccatggactcagagaaa

SEQ ID NO: 360810 - DNA, 25 bp, Homo sapien
tcccagctgcacagtagtctgaggt

SEQ ID NO: 360811 - DNA, 25 bp, Homo sapien
tagtcccagctgcacagtagtctga

SEQ ID NO: 360812 - DNA, 25 bp, Homo sapien
tgtagtcccagctgcacagtagtct

SEQ ID NO: 360813 - DNA, 25 bp, Homo sapien
agtcccagctgcacagtagtctgag

SEQ ID NO: 360814 - DNA, 25 bp, Homo sapien
tgccccgatgacatatcatgctgag

SEQ ID NO: 360815 - DNA, 25 bp, Homo sapien
tgttctcattctcagtgccccgatg

SEQ ID NO: 360816 - DNA, 25 bp, Homo sapien
tcctcaccagatttgatgatgtcag

SEQ ID NO: 360817 - DNA, 25 bp, Homo sapien
tatatcgtccttgctgaagtgactg

SEQ ID NO: 360818 - DNA, 25 bp, Homo sapien
ccaaaggtgaagtatgtaaaaagca

SEQ ID NO: 360819 - DNA, 25 bp, Homo sapien
gctgctttttaatcataggatggag

SEQ ID NO: 360820 - DNA, 25 bp, Homo sapien
cctataagtctagatgtatccaaag

SEQ ID NO: 360821 - DNA, 25 bp, Homo sapien
ttcaccccgcttttgactattgtgc

SEQ ID NO: 360822 - DNA, 25 bp, Homo sapien
taaacgttatttcagtggcatgggc

SEQ ID NO: 360823 - DNA, 25 bp, Homo sapien
tgtgtgtggccttatcagaacagaa

SEQ ID NO: 360824 - DNA, 25 bp, Homo sapien
tggacatctgaggacgtcccggcag

SEQ ID NO: 360825 - DNA, 25 bp, Homo sapien
tcttgatggacgcagctgatgacct

SEQ ID NO: 360826 - DNA, 25 bp, Homo sapien
tgacagaaacacacgcgagaatgag

SEQ ID NO: 360827 - DNA, 25 bp, Homo sapien
gataaagtgccgtgcaaactggtgc

SEQ ID NO: 360828 - DNA, 25 bp, Homo sapien
tagactccgtattagaggccaccga

SEQ ID NO: 360829 - DNA, 25 bp, Homo sapien
gacaatctggctccggaatacgaca

SEQ ID NO: 360830 - DNA, 25 bp, Homo sapien
ccaggagaccccaactattgccggg

SEQ ID NO: 360831 - DNA, 25 bp, Homo sapien
tccagggagaacgtcgggtatccaa

SEQ ID NO: 360832 - DNA, 25 bp, Homo sapien
gaagcccacggtattcctgacttgg

SEQ ID NO: 360833 - DNA, 25 bp, Homo sapien
tattgccgggccaagtgtccaggga

SEQ ID NO: 360834 - DNA, 25 bp, Homo sapien
catggccccgacacagtgtggcatc

SEQ ID NO: 360835 - DNA, 25 bp, Homo sapien
ccagactgggtccagaaggagctgc

SEQ ID NO: 360836 - DNA, 25 bp, Homo sapien
ttacagagagaccattgcagccacc

SEQ ID NO: 360837 - DNA, 25 bp, Homo sapien
gcagccacctacagtgcaccatggc

SEQ ID NO: 360838 - DNA, 25 bp, Homo sapien
ctctgtgcagggtgccgcccgatga

SEQ ID NO: 360839 - DNA, 25 bp, Homo sapien
ggcatctgcctttggactaccctct

SEQ ID NO: 360840 - DNA, 25 bp, Homo sapien
gacctggccgggttcctggctgtgt

SEQ ID NO: 360841 - DNA, 25 bp, Homo sapien
catggcggctcccagctcagcagca

SEQ ID NO: 360842 - DNA, 25 bp, Homo sapien
tccttttctccaagtcttgccgaat

SEQ ID NO: 360843 - DNA, 25 bp, Homo sapien
ccttttctccaagtcttgccgaatt

SEQ ID NO: 360844 - DNA, 25 bp, Homo sapien
gggtcctctttgatggagctttcct

SEQ ID NO: 360845 - DNA, 25 bp, Homo sapien
gggggtcctctttgatggagctttc

SEQ ID NO: 360846 - DNA, 25 bp, Homo sapien
cattgatgttctcccggacacaagg

SEQ ID NO: 360847 - DNA, 25 bp, Homo sapien
aagcattgatgttctcccggacaca

SEQ ID NO: 360848 - DNA, 25 bp, Homo sapien
gaggaaaagcattgatgttctcccg

SEQ ID NO: 360849 - DNA, 25 bp, Homo sapien
gaaaagcattgatgttctcccggac

SEQ ID NO: 360850 - DNA, 25 bp, Homo sapien
cagagctagaccagcaagagggaga

SEQ ID NO: 360851 - DNA, 25 bp, Homo sapien
gctatcgcagcacgaacagtggcca

SEQ ID NO: 360852 - DNA, 25 bp, Homo sapien
cacagaccaaagacgccatggacga

SEQ ID NO: 360853 - DNA, 25 bp, Homo sapien
gagtatcctgggaacatggtgcagc

SEQ ID NO: 360854 - DNA, 25 bp, Homo sapien
gatactcccatgccacactgcggag

SEQ ID NO: 360855 - DNA, 25 bp, Homo sapien
tccatgagcctcagatactcccatg

SEQ ID NO: 360856 - DNA, 25 bp, Homo sapien
cactgggcacgctgtgaaagccatg

SEQ ID NO: 360857 - DNA, 25 bp, Homo sapien
gatacagctcccctttgtgtgtgtc

SEQ ID NO: 360858 - DNA, 25 bp, Homo sapien
cttgggtttacagctacccaggtga

SEQ ID NO: 360859 - DNA, 25 bp, Homo sapien
tgggtttacagctacccaggtgaac

SEQ ID NO: 360860 - DNA, 25 bp, Homo sapien
tcagcagtaaaacaggtcccaagca

SEQ ID NO: 360861 - DNA, 25 bp, Homo sapien
cagtaaaacaggtcccaagcacagg

SEQ ID NO: 360862 - DNA, 25 bp, Homo sapien
gcctcagcagtaaaacaggtcccaa

SEQ ID NO: 360863 - DNA, 25 bp, Homo sapien
tgaagcctcagcagtaaaacaggtc

SEQ ID NO: 360864 - DNA, 25 bp, Homo sapien
gcacgagccgaggaccaggaatctg

SEQ ID NO: 360865 - DNA, 25 bp, Homo sapien
acgagccgaggaccaggaatctgtc

SEQ ID NO: 360866 - DNA, 25 bp, Homo sapien
cacgagccgaggaccaggaatctgt

SEQ ID NO: 360867 - DNA, 25 bp, Homo sapien
gagctgtcaaggtacagagttcaca

SEQ ID NO: 360868 - DNA, 25 bp, Homo sapien
ctgtcccacatagctgtacggagct

SEQ ID NO: 360869 - DNA, 25 bp, Homo sapien
ggtacagagttcacactcaaacact

SEQ ID NO: 360870 - DNA, 25 bp, Homo sapien
tagctgtacggagctgtcaaggtac

SEQ ID NO: 360871 - DNA, 25 bp, Homo sapien
tggaacccccttctcatgttcatgg

SEQ ID NO: 360872 - DNA, 25 bp, Homo sapien
ttcatggttgggtcttggaggcctc

SEQ ID NO: 360873 - DNA, 25 bp, Homo sapien
ttcttatctgcttgtatggaacccc

SEQ ID NO: 360874 - DNA, 25 bp, Homo sapien
gttttcttatctgcttgtatggaac

SEQ ID NO: 360875 - DNA, 25 bp, Homo sapien
gatgctggtggtccccgcgagcctc

SEQ ID NO: 360876 - DNA, 25 bp, Homo sapien
tgcctgtgaacagggacggctgaga

SEQ ID NO: 360877 - DNA, 25 bp, Homo sapien
ccaaagctgagagcggctgcgccga

SEQ ID NO: 360878 - DNA, 25 bp, Homo sapien
actcctggcgcttggaacccagcag

SEQ ID NO: 360879 - DNA, 25 bp, Homo sapien
tgccttgcttttccggtcgccgcgg

SEQ ID NO: 360880 - DNA, 25 bp, Homo sapien
ctccgcgtccaaggcgcctgagcgg

SEQ ID NO: 360881 - DNA, 25 bp, Homo sapien
gccgcggtcctctgcgcgggatgtg

SEQ ID NO: 360882 - DNA, 25 bp, Homo sapien
tagtccgcgaggctgggttccgtgc

SEQ ID NO: 360883 - DNA, 25 bp, Homo sapien
gagcaacaggccattagcttccagc

SEQ ID NO: 360884 - DNA, 25 bp, Homo sapien
cttccagcatgggtcaagcgcagaa

SEQ ID NO: 360885 - DNA, 25 bp, Homo sapien
ggaacgcttgcttgtgactcatgaa

SEQ ID NO: 360886 - DNA, 25 bp, Homo sapien
cattctcaagcatgaagcaagtcct

SEQ ID NO: 360887 - DNA, 25 bp, Homo sapien
ccttagattgcgaggtcagaaagct

SEQ ID NO: 360888 - DNA, 25 bp, Homo sapien
tccgatggctcctcatacacgggct

SEQ ID NO: 360889 - DNA, 25 bp, Homo sapien
gaacatggttctcagcttacggcac

SEQ ID NO: 360890 - DNA, 25 bp, Homo sapien
gagccaggcgcacatcgtagaagaa

SEQ ID NO: 360891 - DNA, 25 bp, Homo sapien
aaaaccgaattatgccagtggccag

SEQ ID NO: 360892 - DNA, 25 bp, Homo sapien
tatacacacttctcacataggaggc

SEQ ID NO: 360893 - DNA, 25 bp, Homo sapien
caaacttttcggcaggtagacacat

SEQ ID NO: 360894 - DNA, 25 bp, Homo sapien
taaaccgctgctgttctggaaaaaa

SEQ ID NO: 360895 - DNA, 25 bp, Homo sapien
agcacgctgtttagccatctataga

SEQ ID NO: 360896 - DNA, 25 bp, Homo sapien
caaggattttagacgagctttcagg

SEQ ID NO: 360897 - DNA, 25 bp, Homo sapien
caagatccatagagaaccgatcacg

SEQ ID NO: 360898 - DNA, 25 bp, Homo sapien
tgtaacaaaggcaacagcacgctgt

SEQ ID NO: 360899 - DNA, 25 bp, Homo sapien
ggttggtacatcctcgtgcctcgga

SEQ ID NO: 360900 - DNA, 25 bp, Homo sapien
tattcgttctgaagcctgacaggag

SEQ ID NO: 360901 - DNA, 25 bp, Homo sapien
gacgataaggatcaacagaagggct

SEQ ID NO: 360902 - DNA, 25 bp, Homo sapien
tgtcatagccgtaagtcagtccata

SEQ ID NO: 360903 - DNA, 25 bp, Homo sapien
tgctgttcggaatggacatcctgat

SEQ ID NO: 360904 - DNA, 25 bp, Homo sapien
gatacctcctttagatccgcttgag

SEQ ID NO: 360905 - DNA, 25 bp, Homo sapien
ccttagcagtttcgtaagcatgcca

SEQ ID NO: 360906 - DNA, 25 bp, Homo sapien
gatgcaggttttgcaacctccctgg

SEQ ID NO: 360907 - DNA, 25 bp, Homo sapien
ttgctaaacaacaggacaatctctg

SEQ ID NO: 360908 - DNA, 25 bp, Homo sapien
agagagctaagcaacattgctaaac

SEQ ID NO: 360909 - DNA, 25 bp, Homo sapien
ccacatgtggtttttccggagatta

SEQ ID NO: 360910 - DNA, 25 bp, Homo sapien
tggagcctattgaatgttttagcaa

SEQ ID NO: 360911 - DNA, 25 bp, Homo sapien
gcttcatgacaaaacgaggtgcctg

SEQ ID NO: 360912 - DNA, 25 bp, Homo sapien
tggcttaaacaatgcacgtcgctgg

SEQ ID NO: 360913 - DNA, 25 bp, Homo sapien
caaatggagggatgtcatgaggcac

SEQ ID NO: 360914 - DNA, 25 bp, Homo sapien
taaataccagctaggcgatcgaccc

SEQ ID NO: 360915 - DNA, 25 bp, Homo sapien
gtggaccagaacctccctaagcact

SEQ ID NO: 360916 - DNA, 25 bp, Homo sapien
gaacctccctaagcactgtgctgtc

SEQ ID NO: 360917 - DNA, 25 bp, Homo sapien
ccagaacctccctaagcactgtgct

SEQ ID NO: 360918 - DNA, 25 bp, Homo sapien
tgtggaccagaacctccctaagcac

SEQ ID NO: 360919 - DNA, 25 bp, Homo sapien
ggtcccactgtgagattaaaagctg

SEQ ID NO: 360920 - DNA, 25 bp, Homo sapien
tacatcaggtgtgatctctagcaca

SEQ ID NO: 360921 - DNA, 25 bp, Homo sapien
aaggacccatcaacctcgctgttgg

SEQ ID NO: 360922 - DNA, 25 bp, Homo sapien
caaggtacacttccgctacatcagg

SEQ ID NO: 360923 - DNA, 25 bp, Homo sapien
tgggaccatttgcagacagaccagg

SEQ ID NO: 360924 - DNA, 25 bp, Homo sapien
gaacttggtcccacggtgaaactga

SEQ ID NO: 360925 - DNA, 25 bp, Homo sapien
catggtggcacgtttctgagcatcc

SEQ ID NO: 360926 - DNA, 25 bp, Homo sapien
tgactagccaacataccaacaggga

SEQ ID NO: 360927 - DNA, 25 bp, Homo sapien
cctagagtccttccgaatcaccatt

SEQ ID NO: 360928 - DNA, 25 bp, Homo sapien
cagaaaacgctgtcctagagtcctt

SEQ ID NO: 360929 - DNA, 25 bp, Homo sapien
tggcttttggtccttggagcacgtg

SEQ ID NO: 360930 - DNA, 25 bp, Homo sapien
ggagcacgtggaccctcttatcaga

SEQ ID NO: 360931 - DNA, 25 bp, Homo sapien
tgtaacgggctgtccgcatctgggt

SEQ ID NO: 360932 - DNA, 25 bp, Homo sapien
ttatctgacaggacacggacgactc

SEQ ID NO: 360933 - DNA, 25 bp, Homo sapien
cgatccagacatagacggcgtccga

SEQ ID NO: 360934 - DNA, 25 bp, Homo sapien
gaagaaatacacgtggtcgccttta

SEQ ID NO: 360935 - DNA, 25 bp, Homo sapien
agccgcacggaccacgtcagggaga

SEQ ID NO: 360936 - DNA, 25 bp, Homo sapien
caggacgcgcaagtcgaggcagtac

SEQ ID NO: 360937 - DNA, 25 bp, Homo sapien
gcggagagctgcaggtcgacgagcg

SEQ ID NO: 360938 - DNA, 25 bp, Homo sapien
ctgggccgcagactgaggagggcgc

SEQ ID NO: 360939 - DNA, 25 bp, Homo sapien
agaaggaggagagcgggcccaggcc

SEQ ID NO: 360940 - DNA, 25 bp, Homo sapien
cagaaggaggagagcgggcccaggc

SEQ ID NO: 360941 - DNA, 25 bp, Homo sapien
cgggaggcggccgacgctcaggctc

SEQ ID NO: 360942 - DNA, 25 bp, Homo sapien
gcgggaggcggccgacgctcaggct

SEQ ID NO: 360943 - DNA, 25 bp, Homo sapien
tatcgtgcacaaaagctagaagctc

SEQ ID NO: 360944 - DNA, 25 bp, Homo sapien
tatgtattcacatccgttggagccc

SEQ ID NO: 360945 - DNA, 25 bp, Homo sapien
cagagaccattcagagcgagtgcct

SEQ ID NO: 360946 - DNA, 25 bp, Homo sapien
tgagatcttccaacgggagccaggc

SEQ ID NO: 360947 - DNA, 25 bp, Homo sapien
caatggtgcgattggctggaatttt

SEQ ID NO: 360948 - DNA, 25 bp, Homo sapien
tcacctctgcaattgtggactctcc

SEQ ID NO: 360949 - DNA, 25 bp, Homo sapien
taagacaactggtctacccatagga

SEQ ID NO: 360950 - DNA, 25 bp, Homo sapien
cataaaattacgtgtacaaggccgg

SEQ ID NO: 360951 - DNA, 25 bp, Homo sapien
aggcccaggcattcttttgagaggg

SEQ ID NO: 360952 - DNA, 25 bp, Homo sapien
cggtcaggaagctgtagtaagaaat

SEQ ID NO: 360953 - DNA, 25 bp, Homo sapien
tgatctggggatctaaacatcagag

SEQ ID NO: 360954 - DNA, 25 bp, Homo sapien
ccttgaagtaatcctttctacacgg

SEQ ID NO: 360955 - DNA, 25 bp, Homo sapien
tttcagtcctcgagaagggccaatg

SEQ ID NO: 360956 - DNA, 25 bp, Homo sapien
gctaccgtccacctcatgcagtgag

SEQ ID NO: 360957 - DNA, 25 bp, Homo sapien
gatggagcgtgatgccttgaagccc

SEQ ID NO: 360958 - DNA, 25 bp, Homo sapien
tgcagaacctcagtggtggcgtcac

SEQ ID NO: 360959 - DNA, 25 bp, Homo sapien
ctggtggttcaaaggttggaaggca

SEQ ID NO: 360960 - DNA, 25 bp, Homo sapien
tgggggctgattctgctgggacagg

SEQ ID NO: 360961 - DNA, 25 bp, Homo sapien
aatgtgtctactgcctggtggttca

SEQ ID NO: 360962 - DNA, 25 bp, Homo sapien
cccaggggaatgtgtctactgcctg

SEQ ID NO: 360963 - DNA, 25 bp, Homo sapien
aacgcctgctgaatgtgccgctgac

SEQ ID NO: 360964 - DNA, 25 bp, Homo sapien
cataacagggcttcatgtcgagcat

SEQ ID NO: 360965 - DNA, 25 bp, Homo sapien
cagagctgctctgttgtggcaaaac

SEQ ID NO: 360966 - DNA, 25 bp, Homo sapien
ttcttacagatcagcgcgcacatgg

SEQ ID NO: 360967 - DNA, 25 bp, Homo sapien
gcaggccaaactctttccaagctgt

SEQ ID NO: 360968 - DNA, 25 bp, Homo sapien
gggatctgccctcacgacccaatta

SEQ ID NO: 360969 - DNA, 25 bp, Homo sapien
ggagccagtatatcacatagtgaga

SEQ ID NO: 360970 - DNA, 25 bp, Homo sapien
tatgtgctgacatgatacagggaga

SEQ ID NO: 360971 - DNA, 25 bp, Homo sapien
tcttctggtgaaggaacatagcaac

SEQ ID NO: 360972 - DNA, 25 bp, Homo sapien
cctgaaaatggtgctctcgagttcc

SEQ ID NO: 360973 - DNA, 25 bp, Homo sapien
cagggacatgggacccagaagtgcc

SEQ ID NO: 360974 - DNA, 25 bp, Homo sapien
tggatgatgcaaaaccagggacatg

SEQ ID NO: 360975 - DNA, 25 bp, Homo sapien
tactgttagtaacagctcgcgcgcg

SEQ ID NO: 360976 - DNA, 25 bp, Homo sapien
tccatggctcaggtcagggttatcc

SEQ ID NO: 360977 - DNA, 25 bp, Homo sapien
gggtattatacctcgttcgcaggca

SEQ ID NO: 360978 - DNA, 25 bp, Homo sapien
gcaaaggctcaagcgaggtcagtct

SEQ ID NO: 360979 - DNA, 25 bp, Homo sapien
agaagttcgtggaggtgtacaaaga

SEQ ID NO: 360980 - DNA, 25 bp, Homo sapien
gaaagatgtattgctgccagcttgg

SEQ ID NO: 360981 - DNA, 25 bp, Homo sapien
tgtacaaagaagctcacttactggc

SEQ ID NO: 360982 - DNA, 25 bp, Homo sapien
ctggctttacacattgagagcagca

SEQ ID NO: 360983 - DNA, 25 bp, Homo sapien
gcttggataagttgggttgacctaa

SEQ ID NO: 360984 - DNA, 25 bp, Homo sapien
ggaaaagcagttgccaatagggagc

SEQ ID NO: 360985 - DNA, 25 bp, Homo sapien
gctggatataccacacagtagggat

SEQ ID NO: 360986 - DNA, 25 bp, Homo sapien
gttttgttacaatgctggatatacc

SEQ ID NO: 360987 - DNA, 25 bp, Homo sapien
caggccaagcgggtcgatgtttctg

SEQ ID NO: 360988 - DNA, 25 bp, Homo sapien
caagcgggtcgatgtttctgagctg

SEQ ID NO: 360989 - DNA, 25 bp, Homo sapien
gccaagcgggtcgatgtttctgagc

SEQ ID NO: 360990 - DNA, 25 bp, Homo sapien
gacccgccatgctgcggccagctct

SEQ ID NO: 360991 - DNA, 25 bp, Homo sapien
tgtgttcagtagtgtttgcttccct

SEQ ID NO: 360992 - DNA, 25 bp, Homo sapien
cccaggtcatgtggaggtgtgttca

SEQ ID NO: 360993 - DNA, 25 bp, Homo sapien
ggctgtcgggctgcttgatgccaca

SEQ ID NO: 360994 - DNA, 25 bp, Homo sapien
gacttctgctaatcccaaatccctg

SEQ ID NO: 360995 - DNA, 25 bp, Homo sapien
caaagcctgctgagcgcatggcgtg

SEQ ID NO: 360996 - DNA, 25 bp, Homo sapien
tgtgtgccagctcggagacgttcct

SEQ ID NO: 360997 - DNA, 25 bp, Homo sapien
ggttagacgctcatctgggccagca

SEQ ID NO: 360998 - DNA, 25 bp, Homo sapien
cgaaggtggtaataaattggtctca

SEQ ID NO: 360999 - DNA, 25 bp, Homo sapien
gaggaaagcgattctactttctcca

SEQ ID NO: 361000 - DNA, 25 bp, Homo sapien
tgcctcaggcacttaacttttctcc

SEQ ID NO: 361001 - DNA, 25 bp, Homo sapien
cacagaactgaaccaacaagggaga

SEQ ID NO: 361002 - DNA, 25 bp, Homo sapien
gattccaggctggtggatgtgtccc

SEQ ID NO: 361003 - DNA, 25 bp, Homo sapien
ccacctggaacatgagcaaagctca

SEQ ID NO: 361004 - DNA, 25 bp, Homo sapien
gatatcaaactggaaccactcgcgg

SEQ ID NO: 361005 - DNA, 25 bp, Homo sapien
aatgtggccaaaccttcaccggtgg

SEQ ID NO: 361006 - DNA, 25 bp, Homo sapien
tgtaggatctgaaagcaggcctctg

SEQ ID NO: 361007 - DNA, 25 bp, Homo sapien
ctctgggctggaatgtgaagcctca

SEQ ID NO: 361008 - DNA, 25 bp, Homo sapien
ggccagcacggaccacccaaggcct

SEQ ID NO: 361009 - DNA, 25 bp, Homo sapien
ggctggaatgtgaagcctcagtcac

SEQ ID NO: 361010 - DNA, 25 bp, Homo sapien
tgggctggaatgtgaagcctcagtc

SEQ ID NO: 361011 - DNA, 25 bp, Homo sapien
caggcgatgccgtggaaagacgtct

SEQ ID NO: 361012 - DNA, 25 bp, Homo sapien
acagcgagtcctctgccgtcgagag

SEQ ID NO: 361013 - DNA, 25 bp, Homo sapien
ggttactgcgtgattctaaagctgc

SEQ ID NO: 361014 - DNA, 25 bp, Homo sapien
aaagacgtctcggtggaaactgcca

SEQ ID NO: 361015 - DNA, 25 bp, Homo sapien
ttttggtttacagcgcagaagaaga

SEQ ID NO: 361016 - DNA, 25 bp, Homo sapien
gaacgcgggtaagctgccgcagctt

SEQ ID NO: 361017 - DNA, 25 bp, Homo sapien
gatgcaggccttgcggcacgtcgtg

SEQ ID NO: 361018 - DNA, 25 bp, Homo sapien
cgaagttgggcgactggcggatgca

SEQ ID NO: 361019 - DNA, 25 bp, Homo sapien
tgaggcggagaggtgaggcgtccga

SEQ ID NO: 361020 - DNA, 25 bp, Homo sapien
ctgaggcggagaggtgaggcgtccg

SEQ ID NO: 361021 - DNA, 25 bp, Homo sapien
tgtgttctccgctcgctggaggaca

SEQ ID NO: 361022 - DNA, 25 bp, Homo sapien
gactggacaactgccgcgcggcggg

SEQ ID NO: 361023 - DNA, 25 bp, Homo sapien
cgcggcgggtctgcttgttcagcgt

SEQ ID NO: 361024 - DNA, 25 bp, Homo sapien
ctctgcacacgctgtggccgcccgg

SEQ ID NO: 361025 - DNA, 25 bp, Homo sapien
tggtgtcacaactgtattgtccagg

SEQ ID NO: 361026 - DNA, 25 bp, Homo sapien
ttcattatgctgtggataatcttgg

SEQ ID NO: 361027 - DNA, 25 bp, Homo sapien
tgagtatgaaaaaggaaggactccc

SEQ ID NO: 361028 - DNA, 25 bp, Homo sapien
ggactcccaatcctgacatagtttg

SEQ ID NO: 361029 - DNA, 25 bp, Homo sapien
gatgtcttttgtcagagccagcaca

SEQ ID NO: 361030 - DNA, 25 bp, Homo sapien
cagacggagctcaccttgatgatca

SEQ ID NO: 361031 - DNA, 25 bp, Homo sapien
ggttcagtaattctcctaggacaag

SEQ ID NO: 361032 - DNA, 25 bp, Homo sapien
gattggaaagacctagcttggttgc

SEQ ID NO: 361033 - DNA, 25 bp, Homo sapien
ccttaacttcatgctcctcgtcctg

SEQ ID NO: 361034 - DNA, 25 bp, Homo sapien
tctcaatggcccgaggccatgggtg

SEQ ID NO: 361035 - DNA, 25 bp, Homo sapien
cctgtccctggacgggtcttggtgc

SEQ ID NO: 361036 - DNA, 25 bp, Homo sapien
ccaggaggtgccaggtctcaatggc

SEQ ID NO: 361037 - DNA, 25 bp, Homo sapien
tggcccctgtccctgcgaatagaaa

SEQ ID NO: 361038 - DNA, 25 bp, Homo sapien
cgaatagaaaaaccagtcctcgagg

SEQ ID NO: 361039 - DNA, 25 bp, Homo sapien
cccggcgggtgatgagatgaatttc

SEQ ID NO: 361040 - DNA, 25 bp, Homo sapien
ggtagaacacttcgagcggtgccag

SEQ ID NO: 361041 - DNA, 25 bp, Homo sapien
gaaagatcagtgcaagaaaagaaaa

SEQ ID NO: 361042 - DNA, 25 bp, Homo sapien
aaaaactgcccatctaggctgtggc

SEQ ID NO: 361043 - DNA, 25 bp, Homo sapien
ccagtgggaaaacatcaagaggtct

SEQ ID NO: 361044 - DNA, 25 bp, Homo sapien
gtctaacgtctgagtcactggagtc

SEQ ID NO: 361045 - DNA, 25 bp, Homo sapien
tccaaggtctgagggtgatgccgca

SEQ ID NO: 361046 - DNA, 25 bp, Homo sapien
tctctcgggataacaaagtcagcac

SEQ ID NO: 361047 - DNA, 25 bp, Homo sapien
aacatgtctgacagttccgggaccc

SEQ ID NO: 361048 - DNA, 25 bp, Homo sapien
tatcttcgaaagaccactcacctgg

SEQ ID NO: 361049 - DNA, 25 bp, Homo sapien
tcattactgcctctgcgcgtgggaa

SEQ ID NO: 361050 - DNA, 25 bp, Homo sapien
gaaaccggccatctctacagtgact

SEQ ID NO: 361051 - DNA, 25 bp, Homo sapien
aatgctgatcaaacgcagagcccag

SEQ ID NO: 361052 - DNA, 25 bp, Homo sapien
tcagaagagcgcaaggaatccacgt

SEQ ID NO: 361053 - DNA, 25 bp, Homo sapien
catggccaccccgttgaggtggtca

SEQ ID NO: 361054 - DNA, 25 bp, Homo sapien
ttcagcgtctgctccgtcagcgtca

SEQ ID NO: 361055 - DNA, 25 bp, Homo sapien
cagggctcttgactgtgatggcgca

SEQ ID NO: 361056 - DNA, 25 bp, Homo sapien
agagtcggagccatcggcctgggcg

SEQ ID NO: 361057 - DNA, 25 bp, Homo sapien
tggctgctagcaagcctggctgcgc

SEQ ID NO: 361058 - DNA, 25 bp, Homo sapien
tgcagctccacgctgaccttggtct

SEQ ID NO: 361059 - DNA, 25 bp, Homo sapien
gccggccggaacgtggttggccaca

SEQ ID NO: 361060 - DNA, 25 bp, Homo sapien
gggtactctccacggtgactgccct

SEQ ID NO: 361061 - DNA, 25 bp, Homo sapien
tcgctatctgagtcggaatcgtggc

SEQ ID NO: 361062 - DNA, 25 bp, Homo sapien
gggtgctgtggacggcgcccctggc

SEQ ID NO: 361063 - DNA, 25 bp, Homo sapien
tgctcatccagggacagctcgctat

SEQ ID NO: 361064 - DNA, 25 bp, Homo sapien
cctcgctgtctgacgagtgtgagga

SEQ ID NO: 361065 - DNA, 25 bp, Homo sapien
cagaggacacgccgagcttctggat

SEQ ID NO: 361066 - DNA, 25 bp, Homo sapien
agcccagaggacacgccgagcttct

SEQ ID NO: 361067 - DNA, 25 bp, Homo sapien
cgcgtctggctctccgtggctgccc

SEQ ID NO: 361068 - DNA, 25 bp, Homo sapien
tcctgggcatgagggacgcgtctgg

SEQ ID NO: 361069 - DNA, 25 bp, Homo sapien
actcgcccaagtctgtgcgcagcat

SEQ ID NO: 361070 - DNA, 25 bp, Homo sapien
cgatgctgtccagcgaggcggtgga

SEQ ID NO: 361071 - DNA, 25 bp, Homo sapien
aggcggtggactcgcccaagtctgt

SEQ ID NO: 361072 - DNA, 25 bp, Homo sapien
tccagcgaggcggtggactcgccca

SEQ ID NO: 361073 - DNA, 25 bp, Homo sapien
tcaggcccgtcaccgaaggtggtgt

SEQ ID NO: 361074 - DNA, 25 bp, Homo sapien
cgtcaccgaaggtggtgttgcagtt

SEQ ID NO: 361075 - DNA, 25 bp, Homo sapien
gcccgtcaccgaaggtggtgttgca

SEQ ID NO: 361076 - DNA, 25 bp, Homo sapien
tcaccgaaggtggtgttgcagttga

SEQ ID NO: 361077 - DNA, 25 bp, Homo sapien
ccaggtgcagcttcctcccgccgag

SEQ ID NO: 361078 - DNA, 25 bp, Homo sapien
ggtggccctggtggtggcggagtcc

SEQ ID NO: 361079 - DNA, 25 bp, Homo sapien
ggtgcttccggacctcctggttgag

SEQ ID NO: 361080 - DNA, 25 bp, Homo sapien
gccgagcacgcccttcaggtgcttc

SEQ ID NO: 361081 - DNA, 25 bp, Homo sapien
cagcaggaggaatgcggtcctcagc

SEQ ID NO: 361082 - DNA, 25 bp, Homo sapien
gtgcatcgcggttcacagccagcag

SEQ ID NO: 361083 - DNA, 25 bp, Homo sapien
aagaggtagtgaaagctcagtgcat

SEQ ID NO: 361084 - DNA, 25 bp, Homo sapien
tgtaagccgctgaagatggcgaaga

SEQ ID NO: 361085 - DNA, 25 bp, Homo sapien
gagggcaggatcaggcctgtgccca

SEQ ID NO: 361086 - DNA, 25 bp, Homo sapien
ctgcgggagggcaggatcaggcctg

SEQ ID NO: 361087 - DNA, 25 bp, Homo sapien
cgggagggcaggatcaggcctgtgc

SEQ ID NO: 361088 - DNA, 25 bp, Homo sapien
tgcgggagggcaggatcaggcctgt

SEQ ID NO: 361089 - DNA, 25 bp, Homo sapien
ggcaggaaacctttgcagataggac

SEQ ID NO: 361090 - DNA, 25 bp, Homo sapien
gcaggaaacctttgcagataggaca

SEQ ID NO: 361091 - DNA, 25 bp, Homo sapien
ttggcaggaaacctttgcagatagg

SEQ ID NO: 361092 - DNA, 25 bp, Homo sapien
ctttggcaggaaacctttgcagata

SEQ ID NO: 361093 - DNA, 25 bp, Homo sapien
ctccaactgccaaaagcgcctgagg

SEQ ID NO: 361094 - DNA, 25 bp, Homo sapien
tgcagacctccaactgccaaaagcg

SEQ ID NO: 361095 - DNA, 25 bp, Homo sapien
tgccaaaagcgcctgaggcccttcg

SEQ ID NO: 361096 - DNA, 25 bp, Homo sapien
tcactgcagacctccaactgccaaa

SEQ ID NO: 361097 - DNA, 25 bp, Homo sapien
gattataacagctccgatgggcccc

SEQ ID NO: 361098 - DNA, 25 bp, Homo sapien
ccaaatcagggtgtcttgaagcgac

SEQ ID NO: 361099 - DNA, 25 bp, Homo sapien
atgggccccgcaaagctccaaatca

SEQ ID NO: 361100 - DNA, 25 bp, Homo sapien
tgtcttgaagcgacagccagcagaa

SEQ ID NO: 361101 - DNA, 25 bp, Homo sapien
cgtgtcgatgttgcgcacctcggtc

SEQ ID NO: 361102 - DNA, 25 bp, Homo sapien
cacctcggtcagcatgcggtagaca

SEQ ID NO: 361103 - DNA, 25 bp, Homo sapien
gaggatggcaaccactgtgcacaga

SEQ ID NO: 361104 - DNA, 25 bp, Homo sapien
tagtagaaccgcatgggccccgtgt

SEQ ID NO: 361105 - DNA, 25 bp, Homo sapien
aggggccgctcagcaagggcccctg

SEQ ID NO: 361106 - DNA, 25 bp, Homo sapien
ggaggggccgctcagcaagggcccc

SEQ ID NO: 361107 - DNA, 25 bp, Homo sapien
ggggccgctcagcaagggcccctgc

SEQ ID NO: 361108 - DNA, 25 bp, Homo sapien
accaatgcgcggatgagaacgtgcc

SEQ ID NO: 361109 - DNA, 25 bp, Homo sapien
cgcccggctgcggatgtgaagaaac

SEQ ID NO: 361110 - DNA, 25 bp, Homo sapien
tgaagaaacccctccgcaggagcag

SEQ ID NO: 361111 - DNA, 25 bp, Homo sapien
aacgtgcccattgcggggatgcgcc

SEQ ID NO: 361112 - DNA, 25 bp, Homo sapien
aatcacgaacaccagctgagagagg

SEQ ID NO: 361113 - DNA, 25 bp, Homo sapien
gttttccgtctggttgatcccaatc

SEQ ID NO: 361114 - DNA, 25 bp, Homo sapien
gaagagcgccacggcgaggtgcttg

SEQ ID NO: 361115 - DNA, 25 bp, Homo sapien
tggttgatcccaatcacgaacacca

SEQ ID NO: 361116 - DNA, 25 bp, Homo sapien
tcaggaggacgaaggccaccagcag

SEQ ID NO: 361117 - DNA, 25 bp, Homo sapien
cacagcggcataggtgacaatcttc

SEQ ID NO: 361118 - DNA, 25 bp, Homo sapien
aggacacagcggcataggtgacaat

SEQ ID NO: 361119 - DNA, 25 bp, Homo sapien
cgcagcatgcggaccaggctcagga

SEQ ID NO: 361120 - DNA, 25 bp, Homo sapien
ggagatatccatgagcaccgcaaag

SEQ ID NO: 361121 - DNA, 25 bp, Homo sapien
ggcgacatgtgtccggttcctggac

SEQ ID NO: 361122 - DNA, 25 bp, Homo sapien
gctgcactggcaggcgacatgtgtc

SEQ ID NO: 361123 - DNA, 25 bp, Homo sapien
ccatgagcaccgcaaagctggctgt

SEQ ID NO: 361124 - DNA, 25 bp, Homo sapien
cagcgtgctcaccatcggggtatta

SEQ ID NO: 361125 - DNA, 25 bp, Homo sapien
gtacaccagcgtgctcaccatcggg

SEQ ID NO: 361126 - DNA, 25 bp, Homo sapien
tgtacaccagcgtgctcaccatcgg

SEQ ID NO: 361127 - DNA, 25 bp, Homo sapien
cgtgctcaccatcggggtattaatg

SEQ ID NO: 361128 - DNA, 25 bp, Homo sapien
gcgaactggccagcgtcatcagggt

SEQ ID NO: 361129 - DNA, 25 bp, Homo sapien
gtaaatgatgaccagagcgacggcg

SEQ ID NO: 361130 - DNA, 25 bp, Homo sapien
tgccccagggtgcggtaaatgatga

SEQ ID NO: 361131 - DNA, 25 bp, Homo sapien
atcagggtgtcgcctccgcctgctg

SEQ ID NO: 361132 - DNA, 25 bp, Homo sapien
gtgtcgaatcgcgggaccctggctc

SEQ ID NO: 361133 - DNA, 25 bp, Homo sapien
atggtgtcgaatcgcgggaccctgg

SEQ ID NO: 361134 - DNA, 25 bp, Homo sapien
ttcatggatggtgtcgaatcgcggg

SEQ ID NO: 361135 - DNA, 25 bp, Homo sapien
tggatggtgtcgaatcgcgggaccc

SEQ ID NO: 361136 - DNA, 25 bp, Homo sapien
atgtggtctgcctgtcccgatctcc

SEQ ID NO: 361137 - DNA, 25 bp, Homo sapien
cacccctgatggtagcagggttcca

SEQ ID NO: 361138 - DNA, 25 bp, Homo sapien
tgcttcaccccatgggggcctagct

SEQ ID NO: 361139 - DNA, 25 bp, Homo sapien
tggggcacacccctgatggtagcag

SEQ ID NO: 361140 - DNA, 25 bp, Homo sapien
ccctcgctccgctggatctgctccc

SEQ ID NO: 361141 - DNA, 25 bp, Homo sapien
gaagtagccctcgaggcgccggagc

SEQ ID NO: 361142 - DNA, 25 bp, Homo sapien
aagtagccctcgaggcgccggagca

SEQ ID NO: 361143 - DNA, 25 bp, Homo sapien
tgaagtagccctcgaggcgccggag

SEQ ID NO: 361144 - DNA, 25 bp, Homo sapien
tgccagctctcgtgctgaaggacgt

SEQ ID NO: 361145 - DNA, 25 bp, Homo sapien
agcgtgcccgtgtgctgtgtagcac

SEQ ID NO: 361146 - DNA, 25 bp, Homo sapien
tgcgcacgtcattgccaaagagcgt

SEQ ID NO: 361147 - DNA, 25 bp, Homo sapien
cctgcgtctcattgcggctcagctt

SEQ ID NO: 361148 - DNA, 25 bp, Homo sapien
cccttctccccgctgcagtgtcgga

SEQ ID NO: 361149 - DNA, 25 bp, Homo sapien
gagatggtggtacagttaaagagct

SEQ ID NO: 361150 - DNA, 25 bp, Homo sapien
cccgctgcagtgtcggaccgcattt

SEQ ID NO: 361151 - DNA, 25 bp, Homo sapien
atggccctgaggtccacgaaggaga

SEQ ID NO: 361152 - DNA, 25 bp, Homo sapien
tgacaaccaggcgtttcgggagccc

SEQ ID NO: 361153 - DNA, 25 bp, Homo sapien
gaagctgctctgacactgacaacca

SEQ ID NO: 361154 - DNA, 25 bp, Homo sapien
aaaaggcgatcggatttctccccag

SEQ ID NO: 361155 - DNA, 25 bp, Homo sapien
ttaaacccagaacactgcgtggtgg

SEQ ID NO: 361156 - DNA, 25 bp, Homo sapien
cttagggcatggcaccgcagccggc

SEQ ID NO: 361157 - DNA, 25 bp, Homo sapien
caacggatcccttagggcatggcac

SEQ ID NO: 361158 - DNA, 25 bp, Homo sapien
tgctttgggacagccattgtagatc

SEQ ID NO: 361159 - DNA, 25 bp, Homo sapien
cagatgccggcctcaaatgctttgg

SEQ ID NO: 361160 - DNA, 25 bp, Homo sapien
cctgggctaggagcttgtagtaatt

SEQ ID NO: 361161 - DNA, 25 bp, Homo sapien
caaacgggttgtcgcagcggttgca

SEQ ID NO: 361162 - DNA, 25 bp, Homo sapien
ccgagcgtggtgacctcggcaaacg

SEQ ID NO: 361163 - DNA, 25 bp, Homo sapien
tgcccggtggccatgtcgcaagtgc

SEQ ID NO: 361164 - DNA, 25 bp, Homo sapien
gcgtgtttcccgagcgacgtccaga

SEQ ID NO: 361165 - DNA, 25 bp, Homo sapien
ccagactcccacccgggtgtgtgtg

SEQ ID NO: 361166 - DNA, 25 bp, Homo sapien
cttgcagcgtgtttcccgagcgacg

SEQ ID NO: 361167 - DNA, 25 bp, Homo sapien
tgtgtgtgttggccgccagccatcc

SEQ ID NO: 361168 - DNA, 25 bp, Homo sapien
tcaagtcactgtgagcgccatggcc

SEQ ID NO: 361169 - DNA, 25 bp, Homo sapien
agtctgcactgagaacgcgtgtgca

SEQ ID NO: 361170 - DNA, 25 bp, Homo sapien
ccgtggtgtacacgaagatcctgaa

SEQ ID NO: 361171 - DNA, 25 bp, Homo sapien
agcgccatggccgtggtgtacacga

SEQ ID NO: 361172 - DNA, 25 bp, Homo sapien
agcctttgctgacggcacagtggca

SEQ ID NO: 361173 - DNA, 25 bp, Homo sapien
cgttggtcttattacagtcgggatc

SEQ ID NO: 361174 - DNA, 25 bp, Homo sapien
ggcactggccgttggtcttattaca

SEQ ID NO: 361175 - DNA, 25 bp, Homo sapien
ttacagtcgggatcaaagcctttgc

SEQ ID NO: 361176 - DNA, 25 bp, Homo sapien
catgttctcgcaggggttcaggtga

SEQ ID NO: 361177 - DNA, 25 bp, Homo sapien
ggcatccacacagtttattccaagg

SEQ ID NO: 361178 - DNA, 25 bp, Homo sapien
ggcccgtagtgactgggcccacact

SEQ ID NO: 361179 - DNA, 25 bp, Homo sapien
ttgttctcacagtacggcccgtagt

SEQ ID NO: 361180 - DNA, 25 bp, Homo sapien
acagacgcagctgtagtcctcccag

SEQ ID NO: 361181 - DNA, 25 bp, Homo sapien
gaggtacaggggtcgtccacatcac

SEQ ID NO: 361182 - DNA, 25 bp, Homo sapien
ttcagggtggcgacgttggtgggcg

SEQ ID NO: 361183 - DNA, 25 bp, Homo sapien
cttcaccctgaccttgagtgcgttg

SEQ ID NO: 361184 - DNA, 25 bp, Homo sapien
tccttaccgtcagcccgggaagcat

SEQ ID NO: 361185 - DNA, 25 bp, Homo sapien
ttgtcttcagaggcgcctccgacca

SEQ ID NO: 361186 - DNA, 25 bp, Homo sapien
tgcatgcagcctcggaatccacggc

SEQ ID NO: 361187 - DNA, 25 bp, Homo sapien
aagcatgcccccgatatctgccttg

SEQ ID NO: 361188 - DNA, 25 bp, Homo sapien
aggtggtgccactccccgtcggtca

SEQ ID NO: 361189 - DNA, 25 bp, Homo sapien
ggccgtgggacacctcaaactggag

SEQ ID NO: 361190 - DNA, 25 bp, Homo sapien
tcacggactccacatcggaggggcc

SEQ ID NO: 361191 - DNA, 25 bp, Homo sapien
cgcaacccggacagcatcacggact

SEQ ID NO: 361192 - DNA, 25 bp, Homo sapien
gtggcctccatcagaacgctgtcct

SEQ ID NO: 361193 - DNA, 25 bp, Homo sapien
tgggcccaccactggtggcctccat

SEQ ID NO: 361194 - DNA, 25 bp, Homo sapien
acgacgctctcaccgctgaagagct

SEQ ID NO: 361195 - DNA, 25 bp, Homo sapien
actccaggacacgacgctctcaccg

SEQ ID NO: 361196 - DNA, 25 bp, Homo sapien
ggtgtctcccgaaatcacacggccg

SEQ ID NO: 361197 - DNA, 25 bp, Homo sapien
cgaaatcacacggccgcggacttgg

SEQ ID NO: 361198 - DNA, 25 bp, Homo sapien
acctcaggtgtctcccgaaatcaca

SEQ ID NO: 361199 - DNA, 25 bp, Homo sapien
tcaggtgtctcccgaaatcacacgg

SEQ ID NO: 361200 - DNA, 25 bp, Homo sapien
cagtaaatgcagcatataccaccag

SEQ ID NO: 361201 - DNA, 25 bp, Homo sapien
gtcccgggcacatcaaggagcaatg

SEQ ID NO: 361202 - DNA, 25 bp, Homo sapien
gctgccggacctggatgtgaagccc

SEQ ID NO: 361203 - DNA, 25 bp, Homo sapien
gctctgcggaggacagtctcttgga

SEQ ID NO: 361204 - DNA, 25 bp, Homo sapien
gatacatattccacctgttgacaca

SEQ ID NO: 361205 - DNA, 25 bp, Homo sapien
cgaatcggagtggacactcacacag

SEQ ID NO: 361206 - DNA, 25 bp, Homo sapien
ccatcgcagaagttcctccgagcag

SEQ ID NO: 361207 - DNA, 25 bp, Homo sapien
gttcttcccgccgaatcggagtgga

SEQ ID NO: 361208 - DNA, 25 bp, Homo sapien
tgtccacatttttgccgtcgactga

SEQ ID NO: 361209 - DNA, 25 bp, Homo sapien
tgcactgggaagtcttctggcaggt

SEQ ID NO: 361210 - DNA, 25 bp, Homo sapien
gccattgttggcgatgaatccggcc

SEQ ID NO: 361211 - DNA, 25 bp, Homo sapien
cgaactgccggttgtgcactgggaa

SEQ ID NO: 361212 - DNA, 25 bp, Homo sapien
ccctgggcagcgcagctgtagttcc

SEQ ID NO: 361213 - DNA, 25 bp, Homo sapien
ttcttggagccggtctgagtgccct

SEQ ID NO: 361214 - DNA, 25 bp, Homo sapien
agttcccgatgtcctttccaaagcg

SEQ ID NO: 361215 - DNA, 25 bp, Homo sapien
cacagccatggttgtgtcacaatca

SEQ ID NO: 361216 - DNA, 25 bp, Homo sapien
ggagaacctcccctcactttgtgag

SEQ ID NO: 361217 - DNA, 25 bp, Homo sapien
tggaaaacgcgtggaagtgcccatt

SEQ ID NO: 361218 - DNA, 25 bp, Homo sapien
taaatgtgagatgcgatcccaggga

SEQ ID NO: 361219 - DNA, 25 bp, Homo sapien
taagtagcatttacactgggaaggc

SEQ ID NO: 361220 - DNA, 25 bp, Homo sapien
gggctgccggctgcttttgatgacc

SEQ ID NO: 361221 - DNA, 25 bp, Homo sapien
gctgtcagcagcaaaccgtctggaa

SEQ ID NO: 361222 - DNA, 25 bp, Homo sapien
tggctcgaagggtgcggtattcccc

SEQ ID NO: 361223 - DNA, 25 bp, Homo sapien
taacaggaccctgttccgccaggta

SEQ ID NO: 361224 - DNA, 25 bp, Homo sapien
gaagacccctctatcggcttctatg

SEQ ID NO: 361225 - DNA, 25 bp, Homo sapien
gaggcaggaacatcctgagtccgag

SEQ ID NO: 361226 - DNA, 25 bp, Homo sapien
agtccgagatgcagggtaagtaaag

SEQ ID NO: 361227 - DNA, 25 bp, Homo sapien
cagagctcgctagccacctgaagac

SEQ ID NO: 361228 - DNA, 25 bp, Homo sapien
actcacaccactgggaaccttcggt

SEQ ID NO: 361229 - DNA, 25 bp, Homo sapien
ggtgccacggtcgttgttgtctcgc

SEQ ID NO: 361230 - DNA, 25 bp, Homo sapien
cttgttgtagtactgcacctgcaca

SEQ ID NO: 361231 - DNA, 25 bp, Homo sapien
cactgggaaccttcggtgccacggt

SEQ ID NO: 361232 - DNA, 25 bp, Homo sapien
gcttctcattgaagcggccgttgta

SEQ ID NO: 361233 - DNA, 25 bp, Homo sapien
atctccagggcgatgaagtcgtgct

SEQ ID NO: 361234 - DNA, 25 bp, Homo sapien
cgttgtagagaagcaagccgttcct

SEQ ID NO: 361235 - DNA, 25 bp, Homo sapien
gaagcaagccgttcctttcctgagt

SEQ ID NO: 361236 - DNA, 25 bp, Homo sapien
acacgcagtggaagccgccgatgag

SEQ ID NO: 361237 - DNA, 25 bp, Homo sapien
tgagcgggcatccacctcacagtgc

SEQ ID NO: 361238 - DNA, 25 bp, Homo sapien
tctcatactcgccaggaggacacac

SEQ ID NO: 361239 - DNA, 25 bp, Homo sapien
cgatgagcaggttcacgcaggtgcc

SEQ ID NO: 361240 - DNA, 25 bp, Homo sapien
gacccagttgttcctggactggccg

SEQ ID NO: 361241 - DNA, 25 bp, Homo sapien
gggtctcagtgttcgccatgcttcg

SEQ ID NO: 361242 - DNA, 25 bp, Homo sapien
gtgctaagaacctcatctgctcgga

SEQ ID NO: 361243 - DNA, 25 bp, Homo sapien
caggagtgctaagaacctcatctgc

SEQ ID NO: 361244 - DNA, 25 bp, Homo sapien
ttctgttgggcggaggacgctgctg

SEQ ID NO: 361245 - DNA, 25 bp, Homo sapien
tgcacacggtgcctgctgcagaccc

SEQ ID NO: 361246 - DNA, 25 bp, Homo sapien
gacgctgctgtctgcatctagtgca

SEQ ID NO: 361247 - DNA, 25 bp, Homo sapien
cagacccgcgggcatgttctgttgg

SEQ ID NO: 361248 - DNA, 25 bp, Homo sapien
tttctgtaccgctctcggggtggct

SEQ ID NO: 361249 - DNA, 25 bp, Homo sapien
tgagtcaggaggtatcaaggaaaga

SEQ ID NO: 361250 - DNA, 25 bp, Homo sapien
agaggcgggaggatgagtcacgaaa

SEQ ID NO: 361251 - DNA, 25 bp, Homo sapien
catttggagtaattcatcttggtga

SEQ ID NO: 361252 - DNA, 25 bp, Homo sapien
agaggtcgatctccgtctcgcagta

SEQ ID NO: 361253 - DNA, 25 bp, Homo sapien
tgcaggtcctccgacgggaagaact

SEQ ID NO: 361254 - DNA, 25 bp, Homo sapien
tgtcgaatcgcagaacggacacgca

SEQ ID NO: 361255 - DNA, 25 bp, Homo sapien
gaagtcctcgaagcactcgcaggtg

SEQ ID NO: 361256 - DNA, 25 bp, Homo sapien
cagacacaaggaaagtcagggtcat

SEQ ID NO: 361257 - DNA, 25 bp, Homo sapien
gcagacacaaggaaagtcagggtca

SEQ ID NO: 361258 - DNA, 25 bp, Homo sapien
ctgcagacacaaggaaagtcagggt

SEQ ID NO: 361259 - DNA, 25 bp, Homo sapien
tgcagacacaaggaaagtcagggtc

SEQ ID NO: 361260 - DNA, 25 bp, Homo sapien
caggcccgggctcagatgtggggtg

SEQ ID NO: 361261 - DNA, 25 bp, Homo sapien
ctggctcggattctgtgttccagga

SEQ ID NO: 361262 - DNA, 25 bp, Homo sapien
atggcccccacaagagctcccaccc

SEQ ID NO: 361263 - DNA, 25 bp, Homo sapien
ggcctggctcggattctgtgttcca

SEQ ID NO: 361264 - DNA, 25 bp, Homo sapien
atgctggacggccccgggagacagg

SEQ ID NO: 361265 - DNA, 25 bp, Homo sapien
gggacagtgccgcagttccgagact

SEQ ID NO: 361266 - DNA, 25 bp, Homo sapien
actcggtggcaggtgattggcggct

SEQ ID NO: 361267 - DNA, 25 bp, Homo sapien
gccgcagttccgagactcggtggca

SEQ ID NO: 361268 - DNA, 25 bp, Homo sapien
cttggagatgacccagtgagatgga

SEQ ID NO: 361269 - DNA, 25 bp, Homo sapien
tggagatgacccagtgagatggagc

SEQ ID NO: 361270 - DNA, 25 bp, Homo sapien
gccttggagatgacccagtgagatg

SEQ ID NO: 361271 - DNA, 25 bp, Homo sapien
ccttggagatgacccagtgagatgg

SEQ ID NO: 361272 - DNA, 25 bp, Homo sapien
gaagaggtccatgtctcaagatgca

SEQ ID NO: 361273 - DNA, 25 bp, Homo sapien
cacaattagtgtgtcgtcgcctgtc

SEQ ID NO: 361274 - DNA, 25 bp, Homo sapien
gcctgcgcgaaagaacaagaccatg

SEQ ID NO: 361275 - DNA, 25 bp, Homo sapien
aaatacattattgccctcagccccg

SEQ ID NO: 361276 - DNA, 25 bp, Homo sapien
ttatttcccaatggatgagagagcc

SEQ ID NO: 361277 - DNA, 25 bp, Homo sapien
caatggatgagagagcctccttcac

SEQ ID NO: 361278 - DNA, 25 bp, Homo sapien
ttcccaatggatgagagagcctcct

SEQ ID NO: 361279 - DNA, 25 bp, Homo sapien
tttcccaatggatgagagagcctcc

SEQ ID NO: 361280 - DNA, 25 bp, Homo sapien
tcggtcatagttgggagcaggtgca

SEQ ID NO: 361281 - DNA, 25 bp, Homo sapien
ctcggtcatagttgggagcaggtgc

SEQ ID NO: 361282 - DNA, 25 bp, Homo sapien
caatgcgtggtgcaccggaccaggt

SEQ ID NO: 361283 - DNA, 25 bp, Homo sapien
cgtggtgcaccggaccaggtggtcc

SEQ ID NO: 361284 - DNA, 25 bp, Homo sapien
ccagaggcacatggtggcactcgat

SEQ ID NO: 361285 - DNA, 25 bp, Homo sapien
gaggcacatggtggcactcgatgca

SEQ ID NO: 361286 - DNA, 25 bp, Homo sapien
catggtggcactcgatgcactggtg

SEQ ID NO: 361287 - DNA, 25 bp, Homo sapien
ggcacatggtggcactcgatgcact

SEQ ID NO: 361288 - DNA, 25 bp, Homo sapien
ctccgtggaggcctgactgtcctca

SEQ ID NO: 361289 - DNA, 25 bp, Homo sapien
ggtgctgcaccagaacatgagacaa

SEQ ID NO: 361290 - DNA, 25 bp, Homo sapien
tccgtggaggcctgactgtcctcac

SEQ ID NO: 361291 - DNA, 25 bp, Homo sapien
cagaacatgagacaatgcatcttcc

SEQ ID NO: 361292 - DNA, 25 bp, Homo sapien
ccaccacctcctgcacccgcagctg

SEQ ID NO: 361293 - DNA, 25 bp, Homo sapien
ctgctgcagctccccagtggcaacc

SEQ ID NO: 361294 - DNA, 25 bp, Homo sapien
agctgctgcagctccccagtggcaa

SEQ ID NO: 361295 - DNA, 25 bp, Homo sapien
catggagtccaccacctcctgcacc

SEQ ID NO: 361296 - DNA, 25 bp, Homo sapien
aacgtgaacccgttttgttcagcat

SEQ ID NO: 361297 - DNA, 25 bp, Homo sapien
ggaaatgggcgcactggagccatca

SEQ ID NO: 361298 - DNA, 25 bp, Homo sapien
gaaccctgttctgcaaacgtgaacc

SEQ ID NO: 361299 - DNA, 25 bp, Homo sapien
gaccgttgacgctcaggttctgcac

SEQ ID NO: 361300 - DNA, 25 bp, Homo sapien
tacacgactggtagcacaggtttgc

SEQ ID NO: 361301 - DNA, 25 bp, Homo sapien
aatgatcaagtgttatgaactatac

SEQ ID NO: 361302 - DNA, 25 bp, Homo sapien
atgacaccaccatcctatatgcagc

SEQ ID NO: 361303 - DNA, 25 bp, Homo sapien
tgaactatacataaccgtgtgtgct

SEQ ID NO: 361304 - DNA, 25 bp, Homo sapien
cagcaagacctctgataaaaactaa

SEQ ID NO: 361305 - DNA, 25 bp, Homo sapien
ccaggtgtggcgatgtgcatccgta

SEQ ID NO: 361306 - DNA, 25 bp, Homo sapien
ttgtccaatggcacacagaagccac

SEQ ID NO: 361307 - DNA, 25 bp, Homo sapien
gaagccactaatgaacaagacggag

SEQ ID NO: 361308 - DNA, 25 bp, Homo sapien
ctctggctgccagtcagtcagaacc

SEQ ID NO: 361309 - DNA, 25 bp, Homo sapien
tacctctgtccacagtaaggtgccc

SEQ ID NO: 361310 - DNA, 25 bp, Homo sapien
ccaggccggctcttgtcttggtacc

SEQ ID NO: 361311 - DNA, 25 bp, Homo sapien
gcggtatctggagggtagaaccaca

SEQ ID NO: 361312 - DNA, 25 bp, Homo sapien
caatggctgatgtgcactgtcccgg

SEQ ID NO: 361313 - DNA, 25 bp, Homo sapien
gtgccgccagaaacacgaagccttc

SEQ ID NO: 361314 - DNA, 25 bp, Homo sapien
ccagaaacacgaagccttccttgca

SEQ ID NO: 361315 - DNA, 25 bp, Homo sapien
aggtgccgccagaaacacgaagcct

SEQ ID NO: 361316 - DNA, 25 bp, Homo sapien
acactggaccctgctcaggtgccgc

SEQ ID NO: 361317 - DNA, 25 bp, Homo sapien
gggcatgaagtacctttacactgtt

SEQ ID NO: 361318 - DNA, 25 bp, Homo sapien
tttaggggcatgaagtacctttaca

SEQ ID NO: 361319 - DNA, 25 bp, Homo sapien
gaagtacctttacactgttatacaa

SEQ ID NO: 361320 - DNA, 25 bp, Homo sapien
ttaaatgcacccacagtttaggggc

SEQ ID NO: 361321 - DNA, 25 bp, Homo sapien
ttttgaccacagtcatcctaatggg

SEQ ID NO: 361322 - DNA, 25 bp, Homo sapien
gtgtgtcagtcaactcactggcaaa

SEQ ID NO: 361323 - DNA, 25 bp, Homo sapien
actggcaaacagttattgccctgca

SEQ ID NO: 361324 - DNA, 25 bp, Homo sapien
cgtgtatgtgttaaacagggtctta

SEQ ID NO: 361325 - DNA, 25 bp, Homo sapien
tctggctcagggaacgaacctctct

SEQ ID NO: 361326 - DNA, 25 bp, Homo sapien
ctcaccaaagccgattcccggtaag

SEQ ID NO: 361327 - DNA, 25 bp, Homo sapien
agccgattcccggtaaggactctgg

SEQ ID NO: 361328 - DNA, 25 bp, Homo sapien
tctggacctgcacacacaatcaact

SEQ ID NO: 361329 - DNA, 25 bp, Homo sapien
cattcaaggcttgagttgtccactg

SEQ ID NO: 361330 - DNA, 25 bp, Homo sapien
ggcttgagttgtccactgggtcatc

SEQ ID NO: 361331 - DNA, 25 bp, Homo sapien
agaaggcagagcacattcaaggctt

SEQ ID NO: 361332 - DNA, 25 bp, Homo sapien
caaagaatgtcaatgtttctgaaag

SEQ ID NO: 361333 - DNA, 25 bp, Homo sapien
ccctcgatggtgtagtgcgcgtgca

SEQ ID NO: 361334 - DNA, 25 bp, Homo sapien
gccttcatcagggtcgttagcacga

SEQ ID NO: 361335 - DNA, 25 bp, Homo sapien
tcagcgagtgcaggtagaactggcc

SEQ ID NO: 361336 - DNA, 25 bp, Homo sapien
taatcacactgttggcgtcacggtc

SEQ ID NO: 361337 - DNA, 25 bp, Homo sapien
gggcttcgggcaagttcggcggcag

SEQ ID NO: 361338 - DNA, 25 bp, Homo sapien
gttgggcatcggaaacttcaggctc

SEQ ID NO: 361339 - DNA, 25 bp, Homo sapien
ctggtagttgggcatcggaaacttc

SEQ ID NO: 361340 - DNA, 25 bp, Homo sapien
gatggcgacgcggagggcgtccccg

SEQ ID NO: 361341 - DNA, 25 bp, Homo sapien
cggttccgcagagccgggcacgggc

SEQ ID NO: 361342 - DNA, 25 bp, Homo sapien
gcgggcagcggcaggcgggtaaggt

SEQ ID NO: 361343 - DNA, 25 bp, Homo sapien
gctgcgagcgccgaatgctgcgcgg

SEQ ID NO: 361344 - DNA, 25 bp, Homo sapien
ccgcagccgggaaggtgcgtgcgcg

SEQ ID NO: 361345 - DNA, 25 bp, Homo sapien
tcccgccgggtacgcgcggctccca

SEQ ID NO: 361346 - DNA, 25 bp, Homo sapien
cgcgtaggtacagccgggccggagg

SEQ ID NO: 361347 - DNA, 25 bp, Homo sapien
gcaagcggcgcccaccgcgtaggta

SEQ ID NO: 361348 - DNA, 25 bp, Homo sapien
gacgtcctgccagccgcccatcgcg

SEQ ID NO: 361349 - DNA, 25 bp, Homo sapien
gaacacaatccatgcacccggcgcg

SEQ ID NO: 361350 - DNA, 25 bp, Homo sapien
agccgggcgcccgaacacaatccat

SEQ ID NO: 361351 - DNA, 25 bp, Homo sapien
gggcgcccgaacacaatccatgcac

SEQ ID NO: 361352 - DNA, 25 bp, Homo sapien
gcgcctccgcatccacccggcgagg

SEQ ID NO: 361353 - DNA, 25 bp, Homo sapien
ttatgtgaattgaatgtggtcacac

SEQ ID NO: 361354 - DNA, 25 bp, Homo sapien
acttggacactgatccagtccaccc

SEQ ID NO: 361355 - DNA, 25 bp, Homo sapien
atccagtccacccaatgtgtttcca

SEQ ID NO: 361356 - DNA, 25 bp, Homo sapien
ttgaatgtggtcacacatctgtgtt

SEQ ID NO: 361357 - DNA, 25 bp, Homo sapien
tgcctctaacccaggtccatcaggg

SEQ ID NO: 361358 - DNA, 25 bp, Homo sapien
tgagtgcctgcctctaacccaggtc

SEQ ID NO: 361359 - DNA, 25 bp, Homo sapien
ctgagtgcctgcctctaacccaggt

SEQ ID NO: 361360 - DNA, 25 bp, Homo sapien
taacccaggtccatcagggctagac

SEQ ID NO: 361361 - DNA, 25 bp, Homo sapien
gttgtgggcgcttgtcccctccgtg

SEQ ID NO: 361362 - DNA, 25 bp, Homo sapien
tgccgatccactcccgggtgggacg

SEQ ID NO: 361363 - DNA, 25 bp, Homo sapien
tacagacgacctctccaaaaagttg

SEQ ID NO: 361364 - DNA, 25 bp, Homo sapien
ccctttgttcgggatgttgagctca

SEQ ID NO: 361365 - DNA, 25 bp, Homo sapien
tctgcagctggacggtgaaagggac

SEQ ID NO: 361366 - DNA, 25 bp, Homo sapien
aagggacgttgttgttcttggccat

SEQ ID NO: 361367 - DNA, 25 bp, Homo sapien
ttgcgggcggcccttgttgcaggcg

SEQ ID NO: 361368 - DNA, 25 bp, Homo sapien
tcttggccatttggcaggtgttctc

SEQ ID NO: 361369 - DNA, 25 bp, Homo sapien
gcctggcgtcgaggcaaagcagcag

SEQ ID NO: 361370 - DNA, 25 bp, Homo sapien
cagcaggaaagttgggtccgcatcc

SEQ ID NO: 361371 - DNA, 25 bp, Homo sapien
ggactgcgtggcctggcgtcgaggc

SEQ ID NO: 361372 - DNA, 25 bp, Homo sapien
tgtcgttcccgcctcctgtggactg

SEQ ID NO: 361373 - DNA, 25 bp, Homo sapien
taggactgtctgtcgagtggctgac

SEQ ID NO: 361374 - DNA, 25 bp, Homo sapien
agtgaccatcggaaggctttcccca

SEQ ID NO: 361375 - DNA, 25 bp, Homo sapien
catctgaccttaaggccaccaggaa

SEQ ID NO: 361376 - DNA, 25 bp, Homo sapien
tgcctacgagttccatggtcgccgt

SEQ ID NO: 361377 - DNA, 25 bp, Homo sapien
cagttcatatctccagaggtctcca

SEQ ID NO: 361378 - DNA, 25 bp, Homo sapien
tcgtttccatagacacatggccagg

SEQ ID NO: 361379 - DNA, 25 bp, Homo sapien
gcactgtggattgtcccacatgggt

SEQ ID NO: 361380 - DNA, 25 bp, Homo sapien
ccacatgggtgggtccagccttttt

SEQ ID NO: 361381 - DNA, 25 bp, Homo sapien
cccaccgccatcgtgcgtgtgagag

SEQ ID NO: 361382 - DNA, 25 bp, Homo sapien
ccatcgtgcgtgtgagagactagga

SEQ ID NO: 361383 - DNA, 25 bp, Homo sapien
ggagacggccttgccccaccgccat

SEQ ID NO: 361384 - DNA, 25 bp, Homo sapien
cgccatcgtgcgtgtgagagactag

SEQ ID NO: 361385 - DNA, 25 bp, Homo sapien
cagagcgtttgcctgagaatccagt

SEQ ID NO: 361386 - DNA, 25 bp, Homo sapien
gtttgcctgagaatccagtgagtcc

SEQ ID NO: 361387 - DNA, 25 bp, Homo sapien
tccgacagcccagtgcccctggtct

SEQ ID NO: 361388 - DNA, 25 bp, Homo sapien
gagcgtttgcctgagaatccagtga

SEQ ID NO: 361389 - DNA, 25 bp, Homo sapien
ggccccagggacacggcacgctgat

SEQ ID NO: 361390 - DNA, 25 bp, Homo sapien
tccgcattgtggagtgcgagtgctt

SEQ ID NO: 361391 - DNA, 25 bp, Homo sapien
cacgcacacactggattccgcattg

SEQ ID NO: 361392 - DNA, 25 bp, Homo sapien
gcacgctgatggtcagagaggccca

SEQ ID NO: 361393 - DNA, 25 bp, Homo sapien
tcagtttacccatttgtcaggtggt

SEQ ID NO: 361394 - DNA, 25 bp, Homo sapien
tcagttcgtgttcctgttgtgccac

SEQ ID NO: 361395 - DNA, 25 bp, Homo sapien
catcctgctttgtacactccgagaa

SEQ ID NO: 361396 - DNA, 25 bp, Homo sapien
tgcccttctgaggtgtggatggaac

SEQ ID NO: 361397 - DNA, 25 bp, Homo sapien
ctgctgttcacggagccctgtgccc

SEQ ID NO: 361398 - DNA, 25 bp, Homo sapien
tgctgttcacggagccctgtgccct

SEQ ID NO: 361399 - DNA, 25 bp, Homo sapien
gctgctgttcacggagccctgtgcc

SEQ ID NO: 361400 - DNA, 25 bp, Homo sapien
aggcgcaggctggaggcgtagcccg

SEQ ID NO: 361401 - DNA, 25 bp, Homo sapien
gtgtgtcgcggagggcacccctacc

SEQ ID NO: 361402 - DNA, 25 bp, Homo sapien
ccatccctggcggtgtgtcgcggag

SEQ ID NO: 361403 - DNA, 25 bp, Homo sapien
catccctggcggtgtgtcgcggagg

SEQ ID NO: 361404 - DNA, 25 bp, Homo sapien
cattaggatgcgctgtggcaggtca

SEQ ID NO: 361405 - DNA, 25 bp, Homo sapien
tgtgatatcacacgcatcctggtgc

SEQ ID NO: 361406 - DNA, 25 bp, Homo sapien
ggtgccccgtgctgccattaggatg

SEQ ID NO: 361407 - DNA, 25 bp, Homo sapien
catgggatctgcacaagctgtggcc

SEQ ID NO: 361408 - DNA, 25 bp, Homo sapien
ggacgttggcgtcaggatgaccaca

SEQ ID NO: 361409 - DNA, 25 bp, Homo sapien
atccggcggcatgggctggtttcac

SEQ ID NO: 361410 - DNA, 25 bp, Homo sapien
gcacatgtcctatcccaggcggtgg

SEQ ID NO: 361411 - DNA, 25 bp, Homo sapien
gagctgcgccgatcaccagattaag

SEQ ID NO: 361412 - DNA, 25 bp, Homo sapien
gctgggattcagtccccaaacacag

SEQ ID NO: 361413 - DNA, 25 bp, Homo sapien
gagcgcctcttcctaggtgctggga

SEQ ID NO: 361414 - DNA, 25 bp, Homo sapien
gactaatcactgaactagacgaatg

SEQ ID NO: 361415 - DNA, 25 bp, Homo sapien
taccaaattgtgtacatctgggcag

SEQ ID NO: 361416 - DNA, 25 bp, Homo sapien
cacacgcattgtaggcggcctgagc

SEQ ID NO: 361417 - DNA, 25 bp, Homo sapien
ttggcagggccacacgcattgtagg

SEQ ID NO: 361418 - DNA, 25 bp, Homo sapien
gcgtttgggtactgatgcggcctga

SEQ ID NO: 361419 - DNA, 25 bp, Homo sapien
ttgggtactgatgcggcctgagtga

SEQ ID NO: 361420 - DNA, 25 bp, Homo sapien
acagggttggccagagactacagga

SEQ ID NO: 361421 - DNA, 25 bp, Homo sapien
agtaaataaatcagagagggcctca

SEQ ID NO: 361422 - DNA, 25 bp, Homo sapien
ccaaagtgagtgacgctgggaaccc

SEQ ID NO: 361423 - DNA, 25 bp, Homo sapien
tatgggcttatgagctccagcagtg

SEQ ID NO: 361424 - DNA, 25 bp, Homo sapien
ataacaggtatgtgtaaaggaaaga

SEQ ID NO: 361425 - DNA, 25 bp, Homo sapien
aataacaggtatgtgtaaaggaaag

SEQ ID NO: 361426 - DNA, 25 bp, Homo sapien
gctaattgttttgcaccagggagcc

SEQ ID NO: 361427 - DNA, 25 bp, Homo sapien
cagacatcatctacgtgggcacgga

SEQ ID NO: 361428 - DNA, 25 bp, Homo sapien
gaaatcagagcctatctagcgggaa

SEQ ID NO: 361429 - DNA, 25 bp, Homo sapien
tcctgcgcgcagatagcaaagggct

SEQ ID NO: 361430 - DNA, 25 bp, Homo sapien
tggaccacgtgtacagacttcaggc

SEQ ID NO: 361431 - DNA, 25 bp, Homo sapien
tgccttccgggaagaatcctctggt

SEQ ID NO: 361432 - DNA, 25 bp, Homo sapien
cagacatccgagacgcagtttacac

SEQ ID NO: 361433 - DNA, 25 bp, Homo sapien
gatccatcgtggcttcgaggcaaaa

SEQ ID NO: 361434 - DNA, 25 bp, Homo sapien
cagtttgtgagcaggacgccggctt

SEQ ID NO: 361435 - DNA, 25 bp, Homo sapien
tattgcaatagagccactaacgggc

SEQ ID NO: 361436 - DNA, 25 bp, Homo sapien
caagcagcgatgtcctaaccgtaaa

SEQ ID NO: 361437 - DNA, 25 bp, Homo sapien
cctgcaaagtggatcaaagtgaccc

SEQ ID NO: 361438 - DNA, 25 bp, Homo sapien
tctcttcaattcctcgtgcaaagag

SEQ ID NO: 361439 - DNA, 25 bp, Homo sapien
tcctcgtgcaaagagtcgaaccagc

SEQ ID NO: 361440 - DNA, 25 bp, Homo sapien
tgtgagtctggcttcggattctctt

SEQ ID NO: 361441 - DNA, 25 bp, Homo sapien
caaagagtcgaaccagctggcagtg

SEQ ID NO: 361442 - DNA, 25 bp, Homo sapien
taaactggaatttcttgacgcgata

SEQ ID NO: 361443 - DNA, 25 bp, Homo sapien
tgtgcaggacctccccgtcgcagtt

SEQ ID NO: 361444 - DNA, 25 bp, Homo sapien
catcctccatgtgcttcgacgtaaa

SEQ ID NO: 361445 - DNA, 25 bp, Homo sapien
tgcaaatgtgcccaaagcgcttctt

SEQ ID NO: 361446 - DNA, 25 bp, Homo sapien
catttccggatgaggatgaggtcag

SEQ ID NO: 361447 - DNA, 25 bp, Homo sapien
tcagaagacccgtctcccaagtggg

SEQ ID NO: 361448 - DNA, 25 bp, Homo sapien
ttggtgtgcctgatgagaaatctca

SEQ ID NO: 361449 - DNA, 25 bp, Homo sapien
catgtttgtggcattgatggccaga

SEQ ID NO: 361450 - DNA, 25 bp, Homo sapien
agcttccaaaccatacagtgctttc

SEQ ID NO: 361451 - DNA, 25 bp, Homo sapien
tcccttcatagcagtggtgggagag

SEQ ID NO: 361452 - DNA, 25 bp, Homo sapien
gatcccaccgtgtgttgtgcaggga

SEQ ID NO: 361453 - DNA, 25 bp, Homo sapien
cagggcttcctatcccttggagatc

SEQ ID NO: 361454 - DNA, 25 bp, Homo sapien
agggaggaaggacactgtcccttca

SEQ ID NO: 361455 - DNA, 25 bp, Homo sapien
tggtggactgaggacacatccatgg

SEQ ID NO: 361456 - DNA, 25 bp, Homo sapien
tgaaaagtcgtatctggcaagaccc

SEQ ID NO: 361457 - DNA, 25 bp, Homo sapien
gatgatgtccccgtagaagccgtag

SEQ ID NO: 361458 - DNA, 25 bp, Homo sapien
aggacacatccatggccagcgagtc

SEQ ID NO: 361459 - DNA, 25 bp, Homo sapien
tcacagaggcatgcgttccacagct

SEQ ID NO: 361460 - DNA, 25 bp, Homo sapien
actgccacaggcagtatggcgggac

SEQ ID NO: 361461 - DNA, 25 bp, Homo sapien
cagtatggcgggacgcgggtggttt

SEQ ID NO: 361462 - DNA, 25 bp, Homo sapien
aggcctcacagaggcatgcgttcca

SEQ ID NO: 361463 - DNA, 25 bp, Homo sapien
tggagtaacacacgcagtccgttga

SEQ ID NO: 361464 - DNA, 25 bp, Homo sapien
gaggtttctgcgtcgctggtgccca

SEQ ID NO: 361465 - DNA, 25 bp, Homo sapien
aacaacgatatgcagcgccgaggtt

SEQ ID NO: 361466 - DNA, 25 bp, Homo sapien
ctggtgcccacggtggagtaacaca

SEQ ID NO: 361467 - DNA, 25 bp, Homo sapien
tccaagccaccagcgttctcaccgg

SEQ ID NO: 361468 - DNA, 25 bp, Homo sapien
ccagcgttctcaccggggcccacat

SEQ ID NO: 361469 - DNA, 25 bp, Homo sapien
caagccaccagcgttctcaccgggg

SEQ ID NO: 361470 - DNA, 25 bp, Homo sapien
gccaccagcgttctcaccggggccc

SEQ ID NO: 361471 - DNA, 25 bp, Homo sapien
gtggttctggtcgaccccggcgctc

SEQ ID NO: 361472 - DNA, 25 bp, Homo sapien
ccggaggctactggggaccagcaca

SEQ ID NO: 361473 - DNA, 25 bp, Homo sapien
aatgattccaatccggaggctactg

SEQ ID NO: 361474 - DNA, 25 bp, Homo sapien
ctgcgggaatgattccaatccggag

SEQ ID NO: 361475 - DNA, 25 bp, Homo sapien
tcctcccaatcagaccgtgcagcac

SEQ ID NO: 361476 - DNA, 25 bp, Homo sapien
gtcctcccaatcagaccgtgcagca

SEQ ID NO: 361477 - DNA, 25 bp, Homo sapien
gcgtcctcccaatcagaccgtgcag

SEQ ID NO: 361478 - DNA, 25 bp, Homo sapien
ctgcgtcctcccaatcagaccgtgc

SEQ ID NO: 361479 - DNA, 25 bp, Homo sapien
accatctccgccgacacagacgatg

SEQ ID NO: 361480 - DNA, 25 bp, Homo sapien
cagagtctccttggcctgattagca

SEQ ID NO: 361481 - DNA, 25 bp, Homo sapien
tctccttggcctgattagcatgttc

SEQ ID NO: 361482 - DNA, 25 bp, Homo sapien
ctatgttaatctcatacagagtctc

SEQ ID NO: 361483 - DNA, 25 bp, Homo sapien
atttgtctatgttaatctcatacag

SEQ ID NO: 361484 - DNA, 25 bp, Homo sapien
accagtaaatgctttggtctggacg

SEQ ID NO: 361485 - DNA, 25 bp, Homo sapien
catatatccgcttgccttgtccttt

SEQ ID NO: 361486 - DNA, 25 bp, Homo sapien
ctccaaacgggttgataaataccag

SEQ ID NO: 361487 - DNA, 25 bp, Homo sapien
ggctaaggtgaacagtggtgccact

SEQ ID NO: 361488 - DNA, 25 bp, Homo sapien
gggcaaaggctatacacacatgtcg

SEQ ID NO: 361489 - DNA, 25 bp, Homo sapien
tctgaagggtgctgtcgggtacaca

SEQ ID NO: 361490 - DNA, 25 bp, Homo sapien
gagtcttaggaaaagcggaccagca

SEQ ID NO: 361491 - DNA, 25 bp, Homo sapien
tcagaattccgactgagaagggctc

SEQ ID NO: 361492 - DNA, 25 bp, Homo sapien
ggaaaacagcgtggaaaacttcaca

SEQ ID NO: 361493 - DNA, 25 bp, Homo sapien
tttagaagtcgcagcagtggttccc

SEQ ID NO: 361494 - DNA, 25 bp, Homo sapien
ggttacacaagtgtgctcagcgtga

SEQ ID NO: 361495 - DNA, 25 bp, Homo sapien
caagtgtcatgttgagccgagagcc

SEQ ID NO: 361496 - DNA, 25 bp, Homo sapien
tgccctttgcattcactgggatggt

SEQ ID NO: 361497 - DNA, 25 bp, Homo sapien
ggaagatcacccaatcaggcatgcg

SEQ ID NO: 361498 - DNA, 25 bp, Homo sapien
catgagaaattaagtcagcctgact

SEQ ID NO: 361499 - DNA, 25 bp, Homo sapien
ttaccatctccgcttccagaaagag

SEQ ID NO: 361500 - DNA, 25 bp, Homo sapien
ggacaccagaaagtcacctgcgccc

SEQ ID NO: 361501 - DNA, 25 bp, Homo sapien
tcacctgcgcccacttccagcggtg

SEQ ID NO: 361502 - DNA, 25 bp, Homo sapien
ggtgccgtcgtgctctctttacaca

SEQ ID NO: 361503 - DNA, 25 bp, Homo sapien
acttccagcggtgccgtcgtgctct

SEQ ID NO: 361504 - DNA, 25 bp, Homo sapien
tgatgtttcccgtgaacgtctgttt

SEQ ID NO: 361505 - DNA, 25 bp, Homo sapien
atgatctcagatacaggcacagagc

SEQ ID NO: 361506 - DNA, 25 bp, Homo sapien
tcctcaacggcgatgatctcagata

SEQ ID NO: 361507 - DNA, 25 bp, Homo sapien
gtctgtttcctcaacggcgatgatc

SEQ ID NO: 361508 - DNA, 25 bp, Homo sapien
tagggacacatctcaagtaaacagt

SEQ ID NO: 361509 - DNA, 25 bp, Homo sapien
taaacagtgtccattccctgtggaa

SEQ ID NO: 361510 - DNA, 25 bp, Homo sapien
acgtcccgataccagcctaagggtg

SEQ ID NO: 361511 - DNA, 25 bp, Homo sapien
cagaaatccttcctcgtcctaacgt

SEQ ID NO: 361512 - DNA, 25 bp, Homo sapien
actccatgctgtcaggtcgcgggaa

SEQ ID NO: 361513 - DNA, 25 bp, Homo sapien
ccactccatgctgtcaggtcgcggg

SEQ ID NO: 361514 - DNA, 25 bp, Homo sapien
tccatgctgtcaggtcgcgggaaac

SEQ ID NO: 361515 - DNA, 25 bp, Homo sapien
catgctgtcaggtcgcgggaaacct

SEQ ID NO: 361516 - DNA, 25 bp, Homo sapien
ctgggagctgggtttatctccagct

SEQ ID NO: 361517 - DNA, 25 bp, Homo sapien
gggacaccagagatccacagcagca

SEQ ID NO: 361518 - DNA, 25 bp, Homo sapien
gatagctctggacaagatacaagaa

SEQ ID NO: 361519 - DNA, 25 bp, Homo sapien
gaggccagcgtgcagagtcagcagc

SEQ ID NO: 361520 - DNA, 25 bp, Homo sapien
ggtcagtatctactcagacgctcag

SEQ ID NO: 361521 - DNA, 25 bp, Homo sapien
cagcccagaagcgtcctgaaacttc

SEQ ID NO: 361522 - DNA, 25 bp, Homo sapien
gacgctcagcatccacttccgaatg

SEQ ID NO: 361523 - DNA, 25 bp, Homo sapien
tgttttcttccgtgaatcgcctact

SEQ ID NO: 361524 - DNA, 25 bp, Homo sapien
ttaaagtatctgtggcatgcctatg

SEQ ID NO: 361525 - DNA, 25 bp, Homo sapien
gctgaggacacgctttataaacaca

SEQ ID NO: 361526 - DNA, 25 bp, Homo sapien
tataaacacagtactgacctgccca

SEQ ID NO: 361527 - DNA, 25 bp, Homo sapien
attagtagcgtggaaaacactctgc

SEQ ID NO: 361528 - DNA, 25 bp, Homo sapien
tgtccacatctgaaataggggtgat

SEQ ID NO: 361529 - DNA, 25 bp, Homo sapien
gtccacatctgaaataggggtgatg

SEQ ID NO: 361530 - DNA, 25 bp, Homo sapien
agcacggattgcagcggctccgccg

SEQ ID NO: 361531 - DNA, 25 bp, Homo sapien
tgcttcacccacagcacggattgca

SEQ ID NO: 361532 - DNA, 25 bp, Homo sapien
ttcacccacagcacggattgcagcg

SEQ ID NO: 361533 - DNA, 25 bp, Homo sapien
gctccaggctcacggcgcagcgctg

SEQ ID NO: 361534 - DNA, 25 bp, Homo sapien
tccgccgccgggctcgtccgccagg

SEQ ID NO: 361535 - DNA, 25 bp, Homo sapien
ctccgccgccgggctcgtccgccag

SEQ ID NO: 361536 - DNA, 25 bp, Homo sapien
ctgcgtcaccccgtacgcgggcggc

SEQ ID NO: 361537 - DNA, 25 bp, Homo sapien
ggaggcggcgctgcgtcaccccgta

SEQ ID NO: 361538 - DNA, 25 bp, Homo sapien
aggaggaggcgtgggtagaggaggg

SEQ ID NO: 361539 - DNA, 25 bp, Homo sapien
cggaccgttagcggcccctgcagtg

SEQ ID NO: 361540 - DNA, 25 bp, Homo sapien
cgggaaccagccatgaatcattcct

SEQ ID NO: 361541 - DNA, 25 bp, Homo sapien
ccagcccctgttcaggccatgcagt

SEQ ID NO: 361542 - DNA, 25 bp, Homo sapien
gccatgcagtgaaggccccaggaca

SEQ ID NO: 361543 - DNA, 25 bp, Homo sapien
cagctccttgtgactgtcttgtcta

SEQ ID NO: 361544 - DNA, 25 bp, Homo sapien
gcacttggagggctgtactccccac

SEQ ID NO: 361545 - DNA, 25 bp, Homo sapien
ggcacttggagggctgtactcccca

SEQ ID NO: 361546 - DNA, 25 bp, Homo sapien
gaggcacttggagggctgtactccc

SEQ ID NO: 361547 - DNA, 25 bp, Homo sapien
aggcacttggagggctgtactcccc

SEQ ID NO: 361548 - DNA, 25 bp, Homo sapien
atgcccggatggagcctagcacaga

SEQ ID NO: 361549 - DNA, 25 bp, Homo sapien
tccactcgacggagtggcctcttgt

SEQ ID NO: 361550 - DNA, 25 bp, Homo sapien
agtacgacgtcgctgctgctgagag

SEQ ID NO: 361551 - DNA, 25 bp, Homo sapien
acagccgagagacagatgcccggat

SEQ ID NO: 361552 - DNA, 25 bp, Homo sapien
gccatcatccactcgggggtaaaca

SEQ ID NO: 361553 - DNA, 25 bp, Homo sapien
acagtctccgaatcagggctggctg

SEQ ID NO: 361554 - DNA, 25 bp, Homo sapien
gggtaaacagtctccgaatcagggc

SEQ ID NO: 361555 - DNA, 25 bp, Homo sapien
ccatcatccactcgggggtaaacag

SEQ ID NO: 361556 - DNA, 25 bp, Homo sapien
tggggaggtgtccggtcttgggctc

SEQ ID NO: 361557 - DNA, 25 bp, Homo sapien
gggaggtgtccggtcttgggctcca

SEQ ID NO: 361558 - DNA, 25 bp, Homo sapien
ggaggtgtccggtcttgggctccat

SEQ ID NO: 361559 - DNA, 25 bp, Homo sapien
gaggtgtccggtcttgggctccatg

SEQ ID NO: 361560 - DNA, 25 bp, Homo sapien
caggatgccaaaccgtgcacaatcc

SEQ ID NO: 361561 - DNA, 25 bp, Homo sapien
tgccaaaccgtgcacaatcccagca

SEQ ID NO: 361562 - DNA, 25 bp, Homo sapien
ggatgccaaaccgtgcacaatccca

SEQ ID NO: 361563 - DNA, 25 bp, Homo sapien
ccaggatgccaaaccgtgcacaatc

SEQ ID NO: 361564 - DNA, 25 bp, Homo sapien
gactagccaggtttcaagcacgtga

SEQ ID NO: 361565 - DNA, 25 bp, Homo sapien
tccgaaacgcgctcaagagaaatcg

SEQ ID NO: 361566 - DNA, 25 bp, Homo sapien
tcatctcttcgaatacgctccgcgg

SEQ ID NO: 361567 - DNA, 25 bp, Homo sapien
gtaaagcgcatctcactccggacta

SEQ ID NO: 361568 - DNA, 25 bp, Homo sapien
gcgtaggcacaacttccggaaggag

SEQ ID NO: 361569 - DNA, 25 bp, Homo sapien
gagcttctcggctctaggctctgga

SEQ ID NO: 361570 - DNA, 25 bp, Homo sapien
cctccgcgatgcgtgtaacgtgcgt

SEQ ID NO: 361571 - DNA, 25 bp, Homo sapien
ctttaataacgacgggcgctcggag

SEQ ID NO: 361572 - DNA, 25 bp, Homo sapien
cacgtaggatcgaggcttgcaagga

SEQ ID NO: 361573 - DNA, 25 bp, Homo sapien
catagaagaggactagagtttccct

SEQ ID NO: 361574 - DNA, 25 bp, Homo sapien
gagctattggcgtttttcctgacac

SEQ ID NO: 361575 - DNA, 25 bp, Homo sapien
gacactggcaggcttctttccgaga

SEQ ID NO: 361576 - DNA, 25 bp, Homo sapien
gccagggccctagggaatgagacat

SEQ ID NO: 361577 - DNA, 25 bp, Homo sapien
cctaggataaaatcagccactggtg

SEQ ID NO: 361578 - DNA, 25 bp, Homo sapien
aatgagacattacgtggagggtacc

SEQ ID NO: 361579 - DNA, 25 bp, Homo sapien
tagatgctatacagctccagagctc

SEQ ID NO: 361580 - DNA, 25 bp, Homo sapien
gttgctttccgcagttgcagttgga

SEQ ID NO: 361581 - DNA, 25 bp, Homo sapien
cagttggaattctcgccacacttca

SEQ ID NO: 361582 - DNA, 25 bp, Homo sapien
tcccgaagggctgttgctttccgca

SEQ ID NO: 361583 - DNA, 25 bp, Homo sapien
tgactctcttggctcccgaagggct

SEQ ID NO: 361584 - DNA, 25 bp, Homo sapien
ggaatgctcatgtcctccttacaca

SEQ ID NO: 361585 - DNA, 25 bp, Homo sapien
agcaggaaccgatctggctgctgag

SEQ ID NO: 361586 - DNA, 25 bp, Homo sapien
ctggctgtacagcaggaaccgatct

SEQ ID NO: 361587 - DNA, 25 bp, Homo sapien
tccttacacaggtcccgcttccgcc

SEQ ID NO: 361588 - DNA, 25 bp, Homo sapien
ttccctgcagcgctcagaactgagg

SEQ ID NO: 361589 - DNA, 25 bp, Homo sapien
gcaggtgttccctgcagcgctcaga

SEQ ID NO: 361590 - DNA, 25 bp, Homo sapien
tgcagcgctcagaactgaggtggct

SEQ ID NO: 361591 - DNA, 25 bp, Homo sapien
gagcgtgtctgtgtgcggagcaggc

SEQ ID NO: 361592 - DNA, 25 bp, Homo sapien
gctggaatacaatggtgccatctca

SEQ ID NO: 361593 - DNA, 25 bp, Homo sapien
ctggaatacaatggtgccatctcag

SEQ ID NO: 361594 - DNA, 25 bp, Homo sapien
cacacgtgtagtcctcatagcagct

SEQ ID NO: 361595 - DNA, 25 bp, Homo sapien
gtttgaaccttagaagtctgtgccc

SEQ ID NO: 361596 - DNA, 25 bp, Homo sapien
gacactgtacatgcaaccacacgtg

SEQ ID NO: 361597 - DNA, 25 bp, Homo sapien
tattacagagaaagctgactcactc

SEQ ID NO: 361598 - DNA, 25 bp, Homo sapien
cacgtaggccctttgagtccagttg

SEQ ID NO: 361599 - DNA, 25 bp, Homo sapien
catggaaattccaccccgagtgctg

SEQ ID NO: 361600 - DNA, 25 bp, Homo sapien
cctgatatttctgggcccccgactg

SEQ ID NO: 361601 - DNA, 25 bp, Homo sapien
aggcagagccctttccggcttcggg

SEQ ID NO: 361602 - DNA, 25 bp, Homo sapien
gagtcaagaggagatctggccttgc

SEQ ID NO: 361603 - DNA, 25 bp, Homo sapien
tctggccttgcttctttccgaatac

SEQ ID NO: 361604 - DNA, 25 bp, Homo sapien
gggtcgggagtcaagaggagatctg

SEQ ID NO: 361605 - DNA, 25 bp, Homo sapien
tgcttctttccgaatacggaaggga

SEQ ID NO: 361606 - DNA, 25 bp, Homo sapien
tagaatctatgactattttcctgct

SEQ ID NO: 361607 - DNA, 25 bp, Homo sapien
aatctatgactattttcctgctcac

SEQ ID NO: 361608 - DNA, 25 bp, Homo sapien
tatagaatctatgactattttcctg

SEQ ID NO: 361609 - DNA, 25 bp, Homo sapien
cagttttatagaatctatgactatt

SEQ ID NO: 361610 - DNA, 25 bp, Homo sapien
agtaggtgattcctgtgcggccaca

SEQ ID NO: 361611 - DNA, 25 bp, Homo sapien
ccaagttctcaggtttattgatggt

SEQ ID NO: 361612 - DNA, 25 bp, Homo sapien
tagagggttgttggctgtgggccgc

SEQ ID NO: 361613 - DNA, 25 bp, Homo sapien
gaagagcacagagcgccacctcttc

SEQ ID NO: 361614 - DNA, 25 bp, Homo sapien
acacagggtcgggaccgtcagtgcc

SEQ ID NO: 361615 - DNA, 25 bp, Homo sapien
catcttccatgataacattgccttc

SEQ ID NO: 361616 - DNA, 25 bp, Homo sapien
cctgaaggactagggacttgcctga

SEQ ID NO: 361617 - DNA, 25 bp, Homo sapien
ctggaatgcctcctgaaggactagg

SEQ ID NO: 361618 - DNA, 25 bp, Homo sapien
tcagagaatgggtagctgggttcca

SEQ ID NO: 361619 - DNA, 25 bp, Homo sapien
actgggccttcagctagtgctgtgg

SEQ ID NO: 361620 - DNA, 25 bp, Homo sapien
tattgcctctagaaaacctcgtgtg

SEQ ID NO: 361621 - DNA, 25 bp, Homo sapien
ggagatccttgtggctaattttggc

SEQ ID NO: 361622 - DNA, 25 bp, Homo sapien
gcgagagcctcagtgaacacgctgg

SEQ ID NO: 361623 - DNA, 25 bp, Homo sapien
cagaaatggctctctctcagcggct

SEQ ID NO: 361624 - DNA, 25 bp, Homo sapien
cattgccggcatccttttttctggg

SEQ ID NO: 361625 - DNA, 25 bp, Homo sapien
tccctgctcgatgtggtatttgaac

SEQ ID NO: 361626 - DNA, 25 bp, Homo sapien
tggggccttccgtgaagatgtgttt

SEQ ID NO: 361627 - DNA, 25 bp, Homo sapien
tccagttgacacagggtgccttgta

SEQ ID NO: 361628 - DNA, 25 bp, Homo sapien
tgtatctggggccttccgtgaagat

SEQ ID NO: 361629 - DNA, 25 bp, Homo sapien
cctgtgttcttcagcggtgagtggg

SEQ ID NO: 361630 - DNA, 25 bp, Homo sapien
gggagctgccaaggatgtgtctcct

SEQ ID NO: 361631 - DNA, 25 bp, Homo sapien
gagagtagggctgccttcagagcca

SEQ ID NO: 361632 - DNA, 25 bp, Homo sapien
gacatgggcactttcaaaccgggat

SEQ ID NO: 361633 - DNA, 25 bp, Homo sapien
ctgtgggctggacatgggcactttc

SEQ ID NO: 361634 - DNA, 25 bp, Homo sapien
atgtcaggtcctgtccgggcttcga

SEQ ID NO: 361635 - DNA, 25 bp, Homo sapien
tcagggcagtatgggaaacaggacc

SEQ ID NO: 361636 - DNA, 25 bp, Homo sapien
cgggcttcgacatttactaacacag

SEQ ID NO: 361637 - DNA, 25 bp, Homo sapien
catttactaacacagtgacctgggc

SEQ ID NO: 361638 - DNA, 25 bp, Homo sapien
tggtgggcagttctaacaagacggt

SEQ ID NO: 361639 - DNA, 25 bp, Homo sapien
tggatgttttctcgctcagagtacg

SEQ ID NO: 361640 - DNA, 25 bp, Homo sapien
cagaggattggtgggcagttctaac

SEQ ID NO: 361641 - DNA, 25 bp, Homo sapien
agtacgcaatcctacttcccctgtg

SEQ ID NO: 361642 - DNA, 25 bp, Homo sapien
tactagcacggagagaatacatctg

SEQ ID NO: 361643 - DNA, 25 bp, Homo sapien
cttttgctgctgattagagacagaa

SEQ ID NO: 361644 - DNA, 25 bp, Homo sapien
tgctgattagagacagaactcttct

SEQ ID NO: 361645 - DNA, 25 bp, Homo sapien
gaactcttctaaccgacttactagc

SEQ ID NO: 361646 - DNA, 25 bp, Homo sapien
gctgtttggcaatccgtttgaaaga

SEQ ID NO: 361647 - DNA, 25 bp, Homo sapien
gtttggcaatccgtttgaaagagaa

SEQ ID NO: 361648 - DNA, 25 bp, Homo sapien
aatgctgtttggcaatccgtttgaa

SEQ ID NO: 361649 - DNA, 25 bp, Homo sapien
caatccgtttgaaagagaaggagcg

SEQ ID NO: 361650 - DNA, 25 bp, Homo sapien
cctgtgagcgtaaacacagcctggg

SEQ ID NO: 361651 - DNA, 25 bp, Homo sapien
tgtgttctcacatcatcgggaagga

SEQ ID NO: 361652 - DNA, 25 bp, Homo sapien
tccattcatcatgctggcagatgcc

SEQ ID NO: 361653 - DNA, 25 bp, Homo sapien
gtagcacccggcagcaccctgtgtt

SEQ ID NO: 361654 - DNA, 25 bp, Homo sapien
ccagttgtaatgaagccctcctgct

SEQ ID NO: 361655 - DNA, 25 bp, Homo sapien
tttcttggtcataccctggcgtcca

SEQ ID NO: 361656 - DNA, 25 bp, Homo sapien
ttctctggagaagggagtcctgtct

SEQ ID NO: 361657 - DNA, 25 bp, Homo sapien
tcatgccagcaagtattgcctgggt

SEQ ID NO: 361658 - DNA, 25 bp, Homo sapien
agtcctgtgccatagtcagatttgg

SEQ ID NO: 361659 - DNA, 25 bp, Homo sapien
tttgccgtgggatgtccctaaggtg

SEQ ID NO: 361660 - DNA, 25 bp, Homo sapien
gttggctttgccgtgggatgtccct

SEQ ID NO: 361661 - DNA, 25 bp, Homo sapien
cgtgggatgtccctaaggtgatctg

SEQ ID NO: 361662 - DNA, 25 bp, Homo sapien
tggctttgccgtgggatgtccctaa

SEQ ID NO: 361663 - DNA, 25 bp, Homo sapien
caggaggccctcgatggtttgagaa

SEQ ID NO: 361664 - DNA, 25 bp, Homo sapien
tttgaaacggtttgccttggcgctc

SEQ ID NO: 361665 - DNA, 25 bp, Homo sapien
tctgcccggttaaggacagagtgcg

SEQ ID NO: 361666 - DNA, 25 bp, Homo sapien
tctagagaccccttccagcgggaga

SEQ ID NO: 361667 - DNA, 25 bp, Homo sapien
gcagctgtacagctctggtggtttc

SEQ ID NO: 361668 - DNA, 25 bp, Homo sapien
ggagtcagccgtctttcccaggcgt

SEQ ID NO: 361669 - DNA, 25 bp, Homo sapien
agcccctggctttgttgtgcatttg

SEQ ID NO: 361670 - DNA, 25 bp, Homo sapien
tggacaaactgggcctagaagatgc

SEQ ID NO: 361671 - DNA, 25 bp, Homo sapien
cgctcttgtgggactggacgacagt

SEQ ID NO: 361672 - DNA, 25 bp, Homo sapien
gaggtccgttccgtttcttgcatga

SEQ ID NO: 361673 - DNA, 25 bp, Homo sapien
tcctggagttccatgtcactggcgt

SEQ ID NO: 361674 - DNA, 25 bp, Homo sapien
gcatctctgccgactgaggtccgtt

SEQ ID NO: 361675 - DNA, 25 bp, Homo sapien
ggcatttctgatgcttccccaccga

SEQ ID NO: 361676 - DNA, 25 bp, Homo sapien
ccaagctgggccttagagctacgtt

SEQ ID NO: 361677 - DNA, 25 bp, Homo sapien
gcgggaacgcatgccatccgtgttc

SEQ ID NO: 361678 - DNA, 25 bp, Homo sapien
tatgatgaagtagtcgcgggaacgc

SEQ ID NO: 361679 - DNA, 25 bp, Homo sapien
tccttttcgatagaggtctgtgtag

SEQ ID NO: 361680 - DNA, 25 bp, Homo sapien
ccttttcgatagaggtctgtgtagt

SEQ ID NO: 361681 - DNA, 25 bp, Homo sapien
aatccttttcgatagaggtctgtgt

SEQ ID NO: 361682 - DNA, 25 bp, Homo sapien
cttttcgatagaggtctgtgtagtg

SEQ ID NO: 361683 - DNA, 25 bp, Homo sapien
gtgaggagcacacaattcagtagat

SEQ ID NO: 361684 - DNA, 25 bp, Homo sapien
taaacgataacaatcatcttttgga

SEQ ID NO: 361685 - DNA, 25 bp, Homo sapien
ccacaaacagattggtgaggagcac

SEQ ID NO: 361686 - DNA, 25 bp, Homo sapien
tgacattccgctttccacaaacaga

SEQ ID NO: 361687 - DNA, 25 bp, Homo sapien
gtgcgtccaatgacgtggaagctcc

SEQ ID NO: 361688 - DNA, 25 bp, Homo sapien
ggaagctcctctcagtaagtcccac

SEQ ID NO: 361689 - DNA, 25 bp, Homo sapien
aacagaggaattacggaggttgagc

SEQ ID NO: 361690 - DNA, 25 bp, Homo sapien
ctggtccggaatccctaagccagtg

SEQ ID NO: 361691 - DNA, 25 bp, Homo sapien
tggggcgttggagggcctgcgttgg

SEQ ID NO: 361692 - DNA, 25 bp, Homo sapien
gagtgagactcgctgagagccatga

SEQ ID NO: 361693 - DNA, 25 bp, Homo sapien
gggcgttggagggcctgcgttggag

SEQ ID NO: 361694 - DNA, 25 bp, Homo sapien
ctgagtgagactcgctgagagccat

SEQ ID NO: 361695 - DNA, 25 bp, Homo sapien
tcagggaatagtgcccaccagacac

SEQ ID NO: 361696 - DNA, 25 bp, Homo sapien
gtgctcttgtggaaaggcggctgct

SEQ ID NO: 361697 - DNA, 25 bp, Homo sapien
gaccgagagagggtgctcttgtgga

SEQ ID NO: 361698 - DNA, 25 bp, Homo sapien
taacaggaagcagtgccgtgggctc

SEQ ID NO: 361699 - DNA, 25 bp, Homo sapien
acataaacagatgggccgtgccctg

SEQ ID NO: 361700 - DNA, 25 bp, Homo sapien
cactgtgctgcgatagggcaaaagc

SEQ ID NO: 361701 - DNA, 25 bp, Homo sapien
taaccaggcggttgtgacccgatgc

SEQ ID NO: 361702 - DNA, 25 bp, Homo sapien
cagggctacttggaaatcacgcatc

SEQ ID NO: 361703 - DNA, 25 bp, Homo sapien
gttaaacgttcatctggtctgtctt

SEQ ID NO: 361704 - DNA, 25 bp, Homo sapien
ggagtcagagttaaacgttcatctg

SEQ ID NO: 361705 - DNA, 25 bp, Homo sapien
gagttaaacgttcatctggtctgtc

SEQ ID NO: 361706 - DNA, 25 bp, Homo sapien
gtcagagttaaacgttcatctggtc

SEQ ID NO: 361707 - DNA, 25 bp, Homo sapien
caccatctgcgcctccaccatccac

SEQ ID NO: 361708 - DNA, 25 bp, Homo sapien
accatctgcgcctccaccatccaca

SEQ ID NO: 361709 - DNA, 25 bp, Homo sapien
aagttgagtcattcacgcggccctt

SEQ ID NO: 361710 - DNA, 25 bp, Homo sapien
taacttgcgtggtgtgctgtccaga

SEQ ID NO: 361711 - DNA, 25 bp, Homo sapien
gatgacttcggttcaacgcagccag

SEQ ID NO: 361712 - DNA, 25 bp, Homo sapien
tttagccatgtctcgcgggatgagg

SEQ ID NO: 361713 - DNA, 25 bp, Homo sapien
tgtgaccgctcatacacctttggtg

SEQ ID NO: 361714 - DNA, 25 bp, Homo sapien
tgtggctacctcctgagagctgcag

SEQ ID NO: 361715 - DNA, 25 bp, Homo sapien
ggatagcatcccagttaatcaaagg

SEQ ID NO: 361716 - DNA, 25 bp, Homo sapien
tgtggtttcgacacctgagcacctg

SEQ ID NO: 361717 - DNA, 25 bp, Homo sapien
ctgtaaagatccacagatcctggcc

SEQ ID NO: 361718 - DNA, 25 bp, Homo sapien
gagcagctcttcgggagtggctcat

SEQ ID NO: 361719 - DNA, 25 bp, Homo sapien
tggcctgccatatgctcccactggt

SEQ ID NO: 361720 - DNA, 25 bp, Homo sapien
gaatcctggagtgtggcattggtcc

SEQ ID NO: 361721 - DNA, 25 bp, Homo sapien
gagagatgagctttacccgaggaca

SEQ ID NO: 361722 - DNA, 25 bp, Homo sapien
cagtgttacgttctttgacttggaa

SEQ ID NO: 361723 - DNA, 25 bp, Homo sapien
gcttcagattcccatccttgctgta

SEQ ID NO: 361724 - DNA, 25 bp, Homo sapien
cttgctgtaatctggagagatgagc

SEQ ID NO: 361725 - DNA, 25 bp, Homo sapien
gaggttagtctggaaattgtcggcc

SEQ ID NO: 361726 - DNA, 25 bp, Homo sapien
ctgagtgtgctctgtcggcagtgat

SEQ ID NO: 361727 - DNA, 25 bp, Homo sapien
tagaaagagcgggttgaggaggcgg

SEQ ID NO: 361728 - DNA, 25 bp, Homo sapien
aatggctgctgacagtcgcggctgt

SEQ ID NO: 361729 - DNA, 25 bp, Homo sapien
tgtttttgttattgtgccatgttac

SEQ ID NO: 361730 - DNA, 25 bp, Homo sapien
ttgttattgtgccatgttaccagtg

SEQ ID NO: 361731 - DNA, 25 bp, Homo sapien
tttttgttattgtgccatgttacca

SEQ ID NO: 361732 - DNA, 25 bp, Homo sapien
ttttgttattgtgccatgttaccag

SEQ ID NO: 361733 - DNA, 25 bp, Homo sapien
tccctttaaagccatactgaggagc

SEQ ID NO: 361734 - DNA, 25 bp, Homo sapien
caagactgatctgacggaccttcat

SEQ ID NO: 361735 - DNA, 25 bp, Homo sapien
tgacggaccttcatttttcgtgtag

SEQ ID NO: 361736 - DNA, 25 bp, Homo sapien
tactgaggagcatggtcaagactga

SEQ ID NO: 361737 - DNA, 25 bp, Homo sapien
tccggacgggccagcataagcttgt

SEQ ID NO: 361738 - DNA, 25 bp, Homo sapien
taagcttgtgcaccgtaggagctgc

SEQ ID NO: 361739 - DNA, 25 bp, Homo sapien
tcatccagccggtgtgacagtaccc

SEQ ID NO: 361740 - DNA, 25 bp, Homo sapien
gacagtacccgcttgggcctgtgtg

SEQ ID NO: 361741 - DNA, 25 bp, Homo sapien
ctgataaactcgccttttaatgcca

SEQ ID NO: 361742 - DNA, 25 bp, Homo sapien
tgataaactcgccttttaatgccag

SEQ ID NO: 361743 - DNA, 25 bp, Homo sapien
tctgcctttcgctgaggagcagaag

SEQ ID NO: 361744 - DNA, 25 bp, Homo sapien
agccacacaggtagatcagcctgct

SEQ ID NO: 361745 - DNA, 25 bp, Homo sapien
tgcagactgaacactatgtgccggg

SEQ ID NO: 361746 - DNA, 25 bp, Homo sapien
tgcttccaggcacgggagttctgtc

SEQ ID NO: 361747 - DNA, 25 bp, Homo sapien
ctggatggaggctttagggcccact

SEQ ID NO: 361748 - DNA, 25 bp, Homo sapien
tgtcctcccaggcagtcgttgattt

SEQ ID NO: 361749 - DNA, 25 bp, Homo sapien
tccactgtggaatgctggactgtcc

SEQ ID NO: 361750 - DNA, 25 bp, Homo sapien
ccgttttgaggtccttgtgtccact

SEQ ID NO: 361751 - DNA, 25 bp, Homo sapien
gctccgggacagcaagccttcctgg

SEQ ID NO: 361752 - DNA, 25 bp, Homo sapien
tgtccacatctttgaaagcattttc

SEQ ID NO: 361753 - DNA, 25 bp, Homo sapien
ggctccgggacagcaagccttcctg

SEQ ID NO: 361754 - DNA, 25 bp, Homo sapien
gagcctcctgacatgataccaaatg

SEQ ID NO: 361755 - DNA, 25 bp, Homo sapien
gaactgtgtacttaaaggtccacaa

SEQ ID NO: 361756 - DNA, 25 bp, Homo sapien
gcatgctagtgtcttcattgaactg

SEQ ID NO: 361757 - DNA, 25 bp, Homo sapien
aggtccacaagtggcttttagcagg

SEQ ID NO: 361758 - DNA, 25 bp, Homo sapien
tggtagtatttgtctttatgagcca

SEQ ID NO: 361759 - DNA, 25 bp, Homo sapien
tgtggtagtatttgtctttatgagc

SEQ ID NO: 361760 - DNA, 25 bp, Homo sapien
gtggtagtatttgtctttatgagcc

SEQ ID NO: 361761 - DNA, 25 bp, Homo sapien
caagaactttggaaaatatggcaaa

SEQ ID NO: 361762 - DNA, 25 bp, Homo sapien
gaactttggaaaatatggcaaatga

SEQ ID NO: 361763 - DNA, 25 bp, Homo sapien
taaaaaatcagtcaagaactttgga

SEQ ID NO: 361764 - DNA, 25 bp, Homo sapien
tgtaaaaaatcagtcaagaactttg

SEQ ID NO: 361765 - DNA, 25 bp, Homo sapien
tgtggatcacataccttatagagag

SEQ ID NO: 361766 - DNA, 25 bp, Homo sapien
gggagatccctgttacaaacgtcag

SEQ ID NO: 361767 - DNA, 25 bp, Homo sapien
gatgtttgaaacgatgccagcgtcc

SEQ ID NO: 361768 - DNA, 25 bp, Homo sapien
caaacgtcagattctacagggcaga

SEQ ID NO: 361769 - DNA, 25 bp, Homo sapien
tcacaatcgggtggaggttgaccgc

SEQ ID NO: 361770 - DNA, 25 bp, Homo sapien
catttccgtcgcttgatgtgtcaga

SEQ ID NO: 361771 - DNA, 25 bp, Homo sapien
gcagtgaggctgcttacccagtgat

SEQ ID NO: 361772 - DNA, 25 bp, Homo sapien
gacttttcacagtgcaggcatcgca

SEQ ID NO: 361773 - DNA, 25 bp, Homo sapien
tctgaccctgtaggagctgctgact

SEQ ID NO: 361774 - DNA, 25 bp, Homo sapien
gctccttaatcagctttgcgttttc

SEQ ID NO: 361775 - DNA, 25 bp, Homo sapien
caggatggtggccccgttgatctga

SEQ ID NO: 361776 - DNA, 25 bp, Homo sapien
gctctagtggcggttgcaccccaga

SEQ ID NO: 361777 - DNA, 25 bp, Homo sapien
ggcctgggaaccacgcagatgaaaa

SEQ ID NO: 361778 - DNA, 25 bp, Homo sapien
tggcctgggaaccacgcagatgaaa

SEQ ID NO: 361779 - DNA, 25 bp, Homo sapien
gacagtgactgataagtgtcacaga

SEQ ID NO: 361780 - DNA, 25 bp, Homo sapien
agctgcttccgacagtgactgataa

SEQ ID NO: 361781 - DNA, 25 bp, Homo sapien
aaggataggacaacgatgggctgca

SEQ ID NO: 361782 - DNA, 25 bp, Homo sapien
tctgcaggaaggataggacaacgat

SEQ ID NO: 361783 - DNA, 25 bp, Homo sapien
ctggtccgtatctgcaggaaggata

SEQ ID NO: 361784 - DNA, 25 bp, Homo sapien
ataggacaacgatgggctgcagcaa

SEQ ID NO: 361785 - DNA, 25 bp, Homo sapien
tccagggtttccttgggagccgcag

SEQ ID NO: 361786 - DNA, 25 bp, Homo sapien
cacctcatgaccctgagaactggga

SEQ ID NO: 361787 - DNA, 25 bp, Homo sapien
gaaggtcgaatgtgcccttttgaag

SEQ ID NO: 361788 - DNA, 25 bp, Homo sapien
gcatcttgtgccttatggtgccccg

SEQ ID NO: 361789 - DNA, 25 bp, Homo sapien
ggttccgctgtgaaaagctggcaaa

SEQ ID NO: 361790 - DNA, 25 bp, Homo sapien
tgctttgaaatgtttggttccgctg

SEQ ID NO: 361791 - DNA, 25 bp, Homo sapien
tggaagagccttgatctggagcgac

SEQ ID NO: 361792 - DNA, 25 bp, Homo sapien
caatcgaccatcgtgctgggaggag

SEQ ID NO: 361793 - DNA, 25 bp, Homo sapien
gattttgagagccaggatgcggttc

SEQ ID NO: 361794 - DNA, 25 bp, Homo sapien
ccagcaagtgatagtgtgtgaccgg

SEQ ID NO: 361795 - DNA, 25 bp, Homo sapien
caagtgatagtgtgtgaccggacat

SEQ ID NO: 361796 - DNA, 25 bp, Homo sapien
tgaaggtggcctatgtcagccatgg

SEQ ID NO: 361797 - DNA, 25 bp, Homo sapien
tgttctggttgaacacgttttactg

SEQ ID NO: 361798 - DNA, 25 bp, Homo sapien
tgtccatgcgggctgctcccggaca

SEQ ID NO: 361799 - DNA, 25 bp, Homo sapien
catgcgggctgctcccggacagcag

SEQ ID NO: 361800 - DNA, 25 bp, Homo sapien
aacacgttttactgtgcggtgtcca

SEQ ID NO: 361801 - DNA, 25 bp, Homo sapien
ggtctccttggcgtccactggccct

SEQ ID NO: 361802 - DNA, 25 bp, Homo sapien
taggggttcctgaagagtcagcagc

SEQ ID NO: 361803 - DNA, 25 bp, Homo sapien
gcagcatgcacttccctggttctgt

SEQ ID NO: 361804 - DNA, 25 bp, Homo sapien
tgtcccggcacgcttcctgtgagtc

SEQ ID NO: 361805 - DNA, 25 bp, Homo sapien
ggtcgtcatcgccatgaggagtggg

SEQ ID NO: 361806 - DNA, 25 bp, Homo sapien
tcgtcatcgccatgaggagtgggtc

SEQ ID NO: 361807 - DNA, 25 bp, Homo sapien
gtcgtcatcgccatgaggagtgggt

SEQ ID NO: 361808 - DNA, 25 bp, Homo sapien
cggtcgtcatcgccatgaggagtgg

SEQ ID NO: 361809 - DNA, 25 bp, Homo sapien
gcagggatttgccagcgagtgtcct

SEQ ID NO: 361810 - DNA, 25 bp, Homo sapien
caacctgaggccttaatgtgctctc

SEQ ID NO: 361811 - DNA, 25 bp, Homo sapien
ctgctgcccgaaggagaagacctgc

SEQ ID NO: 361812 - DNA, 25 bp, Homo sapien
ggcagcctcgatcttggccaaggct

SEQ ID NO: 361813 - DNA, 25 bp, Homo sapien
tgggggcatctgtaggtcctgtcgc

SEQ ID NO: 361814 - DNA, 25 bp, Homo sapien
ttccctctgagatgtgctgctttgc

SEQ ID NO: 361815 - DNA, 25 bp, Homo sapien
cacggctcggtagtggagtggtccc

SEQ ID NO: 361816 - DNA, 25 bp, Homo sapien
gggacggtggactgtttctgacagg

SEQ ID NO: 361817 - DNA, 25 bp, Homo sapien
ggcattggacttggtctttgtggga

SEQ ID NO: 361818 - DNA, 25 bp, Homo sapien
tgggcattggacttggtctttgtgg

SEQ ID NO: 361819 - DNA, 25 bp, Homo sapien
gcatgggcattggacttggtctttg

SEQ ID NO: 361820 - DNA, 25 bp, Homo sapien
catgggcattggacttggtctttgt

SEQ ID NO: 361821 - DNA, 25 bp, Homo sapien
gagccgttgacatctgagttgatca

SEQ ID NO: 361822 - DNA, 25 bp, Homo sapien
cgcacttgtccaggttttaactgaa

SEQ ID NO: 361823 - DNA, 25 bp, Homo sapien
agccagagagccgttgacatctgag

SEQ ID NO: 361824 - DNA, 25 bp, Homo sapien
gctgctgtgatggcgcctgggcccc

SEQ ID NO: 361825 - DNA, 25 bp, Homo sapien
ccatggttgctgtcaggtagggaaa

SEQ ID NO: 361826 - DNA, 25 bp, Homo sapien
cccatggttgctgtcaggtagggaa

SEQ ID NO: 361827 - DNA, 25 bp, Homo sapien
ctgccgcaccgtaatcaggagcaat

SEQ ID NO: 361828 - DNA, 25 bp, Homo sapien
tggtgtagcgtggtaatgaccttca

SEQ ID NO: 361829 - DNA, 25 bp, Homo sapien
tgcaccctggatttataggttcctc

SEQ ID NO: 361830 - DNA, 25 bp, Homo sapien
tcctcttttaaggtctggtgtagcg

SEQ ID NO: 361831 - DNA, 25 bp, Homo sapien
aagcagagtgcattgccactagcac

SEQ ID NO: 361832 - DNA, 25 bp, Homo sapien
cctgaaaggcggtcactgtgcggag

SEQ ID NO: 361833 - DNA, 25 bp, Homo sapien
gcattgccactagcacatctcacag

SEQ ID NO: 361834 - DNA, 25 bp, Homo sapien
cggaggtgaacagaagcagagtgca

SEQ ID NO: 361835 - DNA, 25 bp, Homo sapien
ttgagtccatcaggaaatattgaat

SEQ ID NO: 361836 - DNA, 25 bp, Homo sapien
gagtccatcaggaaatattgaatca

SEQ ID NO: 361837 - DNA, 25 bp, Homo sapien
gtccatcaggaaatattgaatcatt

SEQ ID NO: 361838 - DNA, 25 bp, Homo sapien
attccatagtccagaggccgggcca

SEQ ID NO: 361839 - DNA, 25 bp, Homo sapien
gtatccccgtgttgatggtcttggg

SEQ ID NO: 361840 - DNA, 25 bp, Homo sapien
cgtctgtgttggcacatcactgcca

SEQ ID NO: 361841 - DNA, 25 bp, Homo sapien
ctctgtggtacccggtatccccgtg

SEQ ID NO: 361842 - DNA, 25 bp, Homo sapien
gtggtgcccgtctgtgttggcacat

SEQ ID NO: 361843 - DNA, 25 bp, Homo sapien
ccagggccgcctcgtcaggcgcact

SEQ ID NO: 361844 - DNA, 25 bp, Homo sapien
tgaaggagatggagggcgcttctct

SEQ ID NO: 361845 - DNA, 25 bp, Homo sapien
cagcaagcagggtggcctgtcccag

SEQ ID NO: 361846 - DNA, 25 bp, Homo sapien
tcgtcaggcgcactcagaggcctca

SEQ ID NO: 361847 - DNA, 25 bp, Homo sapien
gctcattgctattccagccacgcgg

SEQ ID NO: 361848 - DNA, 25 bp, Homo sapien
tctcaggcccttcgaatcctgggca

SEQ ID NO: 361849 - DNA, 25 bp, Homo sapien
gggcgcctttctgtggcctcgccat

SEQ ID NO: 361850 - DNA, 25 bp, Homo sapien
catgtccatctgctggtgcggccaa

SEQ ID NO: 361851 - DNA, 25 bp, Homo sapien
gcatgcgacctcctggaaaggttga

SEQ ID NO: 361852 - DNA, 25 bp, Homo sapien
cgctcgcatgcgacctcctggaaag

SEQ ID NO: 361853 - DNA, 25 bp, Homo sapien
cctcggtgccctcaccaccgtcctg

SEQ ID NO: 361854 - DNA, 25 bp, Homo sapien
aggtaaccaccggaaccgctcgcat

SEQ ID NO: 361855 - DNA, 25 bp, Homo sapien
aatacggtgcatggtggttcctcta

SEQ ID NO: 361856 - DNA, 25 bp, Homo sapien
tagtgatttctacagtgcatggtgc

SEQ ID NO: 361857 - DNA, 25 bp, Homo sapien
gctcggaagcagcacgtggctgtct

SEQ ID NO: 361858 - DNA, 25 bp, Homo sapien
cctctagcgtgagtgccgtagtgac

SEQ ID NO: 361859 - DNA, 25 bp, Homo sapien
cacgacataaaatgcagccataggt

SEQ ID NO: 361860 - DNA, 25 bp, Homo sapien
ctgtcacgacataaaatgcagccat

SEQ ID NO: 361861 - DNA, 25 bp, Homo sapien
tgtcacgacataaaatgcagccata

SEQ ID NO: 361862 - DNA, 25 bp, Homo sapien
tcacgacataaaatgcagccatagg

SEQ ID NO: 361863 - DNA, 25 bp, Homo sapien
gcctggccattgtggtacaaggcct

SEQ ID NO: 361864 - DNA, 25 bp, Homo sapien
agcctggccattgtggtacaaggcc

SEQ ID NO: 361865 - DNA, 25 bp, Homo sapien
cactctggccggacccttgactggg

SEQ ID NO: 361866 - DNA, 25 bp, Homo sapien
ccactctggccggacccttgactgg

SEQ ID NO: 361867 - DNA, 25 bp, Homo sapien
cttgactggggtagccacccatcca

SEQ ID NO: 361868 - DNA, 25 bp, Homo sapien
gggtagccacccatccatggcacca

SEQ ID NO: 361869 - DNA, 25 bp, Homo sapien
tcccggcgctgttcgtgtaagttgt

SEQ ID NO: 361870 - DNA, 25 bp, Homo sapien
cctgttgtttggttggacgctgttc

SEQ ID NO: 361871 - DNA, 25 bp, Homo sapien
gacctgacggtcctggctgttcccg

SEQ ID NO: 361872 - DNA, 25 bp, Homo sapien
gacgctgttccctgtttggatggag

SEQ ID NO: 361873 - DNA, 25 bp, Homo sapien
cagtcccatccgtggagtggccttc

SEQ ID NO: 361874 - DNA, 25 bp, Homo sapien
ttcccctgagagcttgcctggtatg

SEQ ID NO: 361875 - DNA, 25 bp, Homo sapien
ggaaggtgcctgacctggctctaca

SEQ ID NO: 361876 - DNA, 25 bp, Homo sapien
aatgtgcctgtcgtgcttctggtcg

SEQ ID NO: 361877 - DNA, 25 bp, Homo sapien
tggacagacacatgccgataagaat

SEQ ID NO: 361878 - DNA, 25 bp, Homo sapien
gacctggacagacacatgccgataa

SEQ ID NO: 361879 - DNA, 25 bp, Homo sapien
cctggacagacacatgccgataaga

SEQ ID NO: 361880 - DNA, 25 bp, Homo sapien
accagttggaatgttctcaagacct

SEQ ID NO: 361881 - DNA, 25 bp, Homo sapien
gcagtctgtggtttcgcctaaactt

SEQ ID NO: 361882 - DNA, 25 bp, Homo sapien
gaacttattacccagctttagcaag

SEQ ID NO: 361883 - DNA, 25 bp, Homo sapien
gaaacacatttcacatgtactacgg

SEQ ID NO: 361884 - DNA, 25 bp, Homo sapien
tagaatacattctggatacgaatcc

SEQ ID NO: 361885 - DNA, 25 bp, Homo sapien
tgaaggtttttgtttgttcaggtca

SEQ ID NO: 361886 - DNA, 25 bp, Homo sapien
aaacctctcagtttggcttcccagg

SEQ ID NO: 361887 - DNA, 25 bp, Homo sapien
cctgattaataagcacggcattgta

SEQ ID NO: 361888 - DNA, 25 bp, Homo sapien
tcctgtgcccattctgaccggctgg

SEQ ID NO: 361889 - DNA, 25 bp, Homo sapien
tgtcggcattactgggatcttttcc

SEQ ID NO: 361890 - DNA, 25 bp, Homo sapien
ccgcccacgcgggatcgattgtgct

SEQ ID NO: 361891 - DNA, 25 bp, Homo sapien
ccaggagtgcccaccagaagtggga

SEQ ID NO: 361892 - DNA, 25 bp, Homo sapien
ctctgccagcttccaggagtgccca

SEQ ID NO: 361893 - DNA, 25 bp, Homo sapien
acgcgggatcgattgtgctctgcca

SEQ ID NO: 361894 - DNA, 25 bp, Homo sapien
taattttaaagtaagcaagctgctt

SEQ ID NO: 361895 - DNA, 25 bp, Homo sapien
acggcagttggcagagttgtttttc

SEQ ID NO: 361896 - DNA, 25 bp, Homo sapien
ttttatggtgaacagagtgtggcac

SEQ ID NO: 361897 - DNA, 25 bp, Homo sapien
aagcaagctgcttagacacagtggg

SEQ ID NO: 361898 - DNA, 25 bp, Homo sapien
ctgagaggtctgtaaatgtctgatc

SEQ ID NO: 361899 - DNA, 25 bp, Homo sapien
tgatgttgatgcgtggacagcctcg

SEQ ID NO: 361900 - DNA, 25 bp, Homo sapien
caccagagcggcatcgtggaaggct

SEQ ID NO: 361901 - DNA, 25 bp, Homo sapien
tgagtgcgccactgcctgatgttga

SEQ ID NO: 361902 - DNA, 25 bp, Homo sapien
cacaggtgtgtgcagtgcctaggtt

SEQ ID NO: 361903 - DNA, 25 bp, Homo sapien
gcctgctctgcaatgtgaagtgatt

SEQ ID NO: 361904 - DNA, 25 bp, Homo sapien
tgagttgtgtgaatctgccagctgc

SEQ ID NO: 361905 - DNA, 25 bp, Homo sapien
agtgatttggtgaacttggcgccgc

SEQ ID NO: 361906 - DNA, 25 bp, Homo sapien
cttcgtcggaaacctccttgtagag

SEQ ID NO: 361907 - DNA, 25 bp, Homo sapien
tgatctgtgcactttcctgtctttg

SEQ ID NO: 361908 - DNA, 25 bp, Homo sapien
ccagcttcgtcggaaacctccttgt

SEQ ID NO: 361909 - DNA, 25 bp, Homo sapien
agtttaagcatatttagttggatta

SEQ ID NO: 361910 - DNA, 25 bp, Homo sapien
ctcaaggcaagaggcgtgccctgct

SEQ ID NO: 361911 - DNA, 25 bp, Homo sapien
tggagacttagttagcagatgcttc

SEQ ID NO: 361912 - DNA, 25 bp, Homo sapien
ctcgtctggtggagacttagttagc

SEQ ID NO: 361913 - DNA, 25 bp, Homo sapien
gatgcttccctggtaacacatgagg

SEQ ID NO: 361914 - DNA, 25 bp, Homo sapien
catttagtgagtccgtcaggcctca

SEQ ID NO: 361915 - DNA, 25 bp, Homo sapien
ggcaggatgtttgtgcacccagtcc

SEQ ID NO: 361916 - DNA, 25 bp, Homo sapien
ttggctcacagaatggcccgtggca

SEQ ID NO: 361917 - DNA, 25 bp, Homo sapien
gtccattgctgtcttgagtcactag

SEQ ID NO: 361918 - DNA, 25 bp, Homo sapien
tagtgaacgttgcaccacctggttg

SEQ ID NO: 361919 - DNA, 25 bp, Homo sapien
ttaatcggccagtagtgaacgttgc

SEQ ID NO: 361920 - DNA, 25 bp, Homo sapien
cggccagtagtgaacgttgcaccac

SEQ ID NO: 361921 - DNA, 25 bp, Homo sapien
gcaccacctggttgagctgacgctt

SEQ ID NO: 361922 - DNA, 25 bp, Homo sapien
ctgctcccacatcacgttggcttga

SEQ ID NO: 361923 - DNA, 25 bp, Homo sapien
catcacgttggcttgaaggcgggct

SEQ ID NO: 361924 - DNA, 25 bp, Homo sapien
tcccacatcacgttggcttgaaggc

SEQ ID NO: 361925 - DNA, 25 bp, Homo sapien
ccacatcacgttggcttgaaggcgg

SEQ ID NO: 361926 - DNA, 25 bp, Homo sapien
tcctggaacccttgcctggagctct

SEQ ID NO: 361927 - DNA, 25 bp, Homo sapien
tgcgcgaggcagctttgccatacgt

SEQ ID NO: 361928 - DNA, 25 bp, Homo sapien
ggagctttggcggtgacacttgtgg

SEQ ID NO: 361929 - DNA, 25 bp, Homo sapien
gccatacgtcatgccaatacttcat

SEQ ID NO: 361930 - DNA, 25 bp, Homo sapien
taatcccacggtccttcgatgaggg

SEQ ID NO: 361931 - DNA, 25 bp, Homo sapien
gaccaggtgacactctgggcatgga

SEQ ID NO: 361932 - DNA, 25 bp, Homo sapien
tttagcagccatgtatcaagcacgg

SEQ ID NO: 361933 - DNA, 25 bp, Homo sapien
agggtctgcggtgggtccatttcct

SEQ ID NO: 361934 - DNA, 25 bp, Homo sapien
tgggtggtctctcctacagcaccca

SEQ ID NO: 361935 - DNA, 25 bp, Homo sapien
ctgggtggtctctcctacagcaccc

SEQ ID NO: 361936 - DNA, 25 bp, Homo sapien
gcacccagctccacgcttcgaccaa

SEQ ID NO: 361937 - DNA, 25 bp, Homo sapien
cggtgtcccatctcacggtaggtct

SEQ ID NO: 361938 - DNA, 25 bp, Homo sapien
tgtcccatctcacggtaggtctcct

SEQ ID NO: 361939 - DNA, 25 bp, Homo sapien
gtcccggtgtcccatctcacggtag

SEQ ID NO: 361940 - DNA, 25 bp, Homo sapien
atctcacggtaggtctcctcccagt

SEQ ID NO: 361941 - DNA, 25 bp, Homo sapien
gagtctaggacactcaccttccaag

SEQ ID NO: 361942 - DNA, 25 bp, Homo sapien
gagagggaccgccattcctgggtga

SEQ ID NO: 361943 - DNA, 25 bp, Homo sapien
cacttaggaggaggcgcggtgtcct

SEQ ID NO: 361944 - DNA, 25 bp, Homo sapien
ctgggtgagtctaggacactcacct

SEQ ID NO: 361945 - DNA, 25 bp, Homo sapien
gccaaaccatattagcctgcaacct

SEQ ID NO: 361946 - DNA, 25 bp, Homo sapien
tagcctgcaaccttgatcaggtcac

SEQ ID NO: 361947 - DNA, 25 bp, Homo sapien
ccatattagcctgcaaccttgatca

SEQ ID NO: 361948 - DNA, 25 bp, Homo sapien
tgcaaccttgatcaggtcactctgt

SEQ ID NO: 361949 - DNA, 25 bp, Homo sapien
tatcagtaacagtgctagttggaca

SEQ ID NO: 361950 - DNA, 25 bp, Homo sapien
caaatggttgtctggcatgaaacgt

SEQ ID NO: 361951 - DNA, 25 bp, Homo sapien
tagttggacataagcaacatcagcc

SEQ ID NO: 361952 - DNA, 25 bp, Homo sapien
gctggaatttctgttctaccaaatg

SEQ ID NO: 361953 - DNA, 25 bp, Homo sapien
gatgctccaaggtcctgtcagaggc

SEQ ID NO: 361954 - DNA, 25 bp, Homo sapien
ggctgggcccggaggtgaaggttga

SEQ ID NO: 361955 - DNA, 25 bp, Homo sapien
tagtagctctgcatgcatcgcgtgt

SEQ ID NO: 361956 - DNA, 25 bp, Homo sapien
gaaggttgacaactacagccctccg

SEQ ID NO: 361957 - DNA, 25 bp, Homo sapien
tccagtcagcactggcgggacttca

SEQ ID NO: 361958 - DNA, 25 bp, Homo sapien
ggcgggacttcacgggtgcagcccg

SEQ ID NO: 361959 - DNA, 25 bp, Homo sapien
tgagccgtttggtgccgctggacca

SEQ ID NO: 361960 - DNA, 25 bp, Homo sapien
gaggcgcgtcggtgttactgtctcc

SEQ ID NO: 361961 - DNA, 25 bp, Homo sapien
tgccagggccattttctcaggtagt

SEQ ID NO: 361962 - DNA, 25 bp, Homo sapien
tttacgtgcccaggtgactgccagg

SEQ ID NO: 361963 - DNA, 25 bp, Homo sapien
tgcgtcttctgccaaaggttggccc

SEQ ID NO: 361964 - DNA, 25 bp, Homo sapien
tgtggagaggctcggcgtcatcctt

SEQ ID NO: 361965 - DNA, 25 bp, Homo sapien
tgctgtttccatccgggctgcattt

SEQ ID NO: 361966 - DNA, 25 bp, Homo sapien
ggccttcttccatccatacgttggt

SEQ ID NO: 361967 - DNA, 25 bp, Homo sapien
ggtcacacatagtgccctcagagag

SEQ ID NO: 361968 - DNA, 25 bp, Homo sapien
cacagagcatttgcgtttctggcag

SEQ ID NO: 361969 - DNA, 25 bp, Homo sapien
gatgaaaaatgaagcatctcaacag

SEQ ID NO: 361970 - DNA, 25 bp, Homo sapien
tgccagggaagagactctcacaggc

SEQ ID NO: 361971 - DNA, 25 bp, Homo sapien
caccaccccatcggacaggtgggat

SEQ ID NO: 361972 - DNA, 25 bp, Homo sapien
tgggattcccgtggataaagtgccc

SEQ ID NO: 361973 - DNA, 25 bp, Homo sapien
cagtgaccttactctcctggaagcc

SEQ ID NO: 361974 - DNA, 25 bp, Homo sapien
agttgttagatcgatgcctagcttg

SEQ ID NO: 361975 - DNA, 25 bp, Homo sapien
ggctggccggagtgaacaccaggat

SEQ ID NO: 361976 - DNA, 25 bp, Homo sapien
tcgatgcctagcttgaggctggccg

SEQ ID NO: 361977 - DNA, 25 bp, Homo sapien
cagcctcacagaggcgaccagaaga

SEQ ID NO: 361978 - DNA, 25 bp, Homo sapien
accgggctgcttgtgcatcagtgtg

SEQ ID NO: 361979 - DNA, 25 bp, Homo sapien
gtaagtgcacttgcctgcgtagcca

SEQ ID NO: 361980 - DNA, 25 bp, Homo sapien
gaccacccgatgctcagcagggtct

SEQ ID NO: 361981 - DNA, 25 bp, Homo sapien
ggttgcacctggtaccattcccatc

SEQ ID NO: 361982 - DNA, 25 bp, Homo sapien
acagctctggtttcttcggccaggt

SEQ ID NO: 361983 - DNA, 25 bp, Homo sapien
gctctggtttcttcggccaggtggc

SEQ ID NO: 361984 - DNA, 25 bp, Homo sapien
ctctggtttcttcggccaggtggcc

SEQ ID NO: 361985 - DNA, 25 bp, Homo sapien
ctggtttcttcggccaggtggcccg

SEQ ID NO: 361986 - DNA, 25 bp, Homo sapien
tgccggcgctcttgcatttttcggg

SEQ ID NO: 361987 - DNA, 25 bp, Homo sapien
tcgagcatcctcagctgttgcccag

SEQ ID NO: 361988 - DNA, 25 bp, Homo sapien
cattgtgtaaggactgcagggcctc

SEQ ID NO: 361989 - DNA, 25 bp, Homo sapien
gggtggtagcaagccccgtcttctg

SEQ ID NO: 361990 - DNA, 25 bp, Homo sapien
cggcagcttcgaggttttctttctt

SEQ ID NO: 361991 - DNA, 25 bp, Homo sapien
ttgaccgagcctcctgcatagccca

SEQ ID NO: 361992 - DNA, 25 bp, Homo sapien
ctgcatagcccagggacatgtagcc

SEQ ID NO: 361993 - DNA, 25 bp, Homo sapien
agccattggcctcggcagcttcgag

SEQ ID NO: 361994 - DNA, 25 bp, Homo sapien
caactcttgcagatagagggcagtg

SEQ ID NO: 361995 - DNA, 25 bp, Homo sapien
tgagcacgaaacaacagggcgagtt

SEQ ID NO: 361996 - DNA, 25 bp, Homo sapien
tctttgcaccagcacgggtatcgct

SEQ ID NO: 361997 - DNA, 25 bp, Homo sapien
tcgccatcgccatctcatagacagg

SEQ ID NO: 361998 - DNA, 25 bp, Homo sapien
ctccggcattgggagcctcacctgt

SEQ ID NO: 361999 - DNA, 25 bp, Homo sapien
ctgccctccggcattgggagcctca

SEQ ID NO: 362000 - DNA, 25 bp, Homo sapien
tgggagcctcacctgttggaacccg

SEQ ID NO: 362001 - DNA, 25 bp, Homo sapien
gcattgggagcctcacctgttggaa

SEQ ID NO: 362002 - DNA, 25 bp, Homo sapien
tggtttaaacgtggctgggaagctg

SEQ ID NO: 362003 - DNA, 25 bp, Homo sapien
gctggagtccaagccgtgagcccgc

SEQ ID NO: 362004 - DNA, 25 bp, Homo sapien
tgcttggtttaaacgtggctgggaa

SEQ ID NO: 362005 - DNA, 25 bp, Homo sapien
gcttgcttggtttaaacgtggctgg

SEQ ID NO: 362006 - DNA, 25 bp, Homo sapien
gttccatcatggaccggttcctcca

SEQ ID NO: 362007 - DNA, 25 bp, Homo sapien
cctggactggttcccgctgtggact

SEQ ID NO: 362008 - DNA, 25 bp, Homo sapien
cgctgtatactggttctgccctgga

SEQ ID NO: 362009 - DNA, 25 bp, Homo sapien
gccgtggaccagttcccgctgtata

SEQ ID NO: 362010 - DNA, 25 bp, Homo sapien
agtttgcagctcagcagttggctcc

SEQ ID NO: 362011 - DNA, 25 bp, Homo sapien
gccaccaggtgttcagctcctgact

SEQ ID NO: 362012 - DNA, 25 bp, Homo sapien
tcgggcccaacttgaggtcttcaca

SEQ ID NO: 362013 - DNA, 25 bp, Homo sapien
tgcaggacggagatcggctgtcccc

SEQ ID NO: 362014 - DNA, 25 bp, Homo sapien
atgacacgcgccatcgcaggctgca

SEQ ID NO: 362015 - DNA, 25 bp, Homo sapien
cagtgatctgctctcggccgcagtc

SEQ ID NO: 362016 - DNA, 25 bp, Homo sapien
tgcagaatgacacgcgccatcgcag

SEQ ID NO: 362017 - DNA, 25 bp, Homo sapien
acaggctgcagaatgacacgcgcca

SEQ ID NO: 362018 - DNA, 25 bp, Homo sapien
caggagcgcacacggccgcttacat

SEQ ID NO: 362019 - DNA, 25 bp, Homo sapien
cggccgcttacatggtcctgtgtga

SEQ ID NO: 362020 - DNA, 25 bp, Homo sapien
tgtgagcgacccagccgtagtccat

SEQ ID NO: 362021 - DNA, 25 bp, Homo sapien
tacatggtcctgtgtgagcgaccca

SEQ ID NO: 362022 - DNA, 25 bp, Homo sapien
tccagtgacttcctgggacagcggg

SEQ ID NO: 362023 - DNA, 25 bp, Homo sapien
ggctgctccaggagtccttgctctc

SEQ ID NO: 362024 - DNA, 25 bp, Homo sapien
ccttgctctccagtgacttcctggg

SEQ ID NO: 362025 - DNA, 25 bp, Homo sapien
gggcctggcaccgatggctgctcca

SEQ ID NO: 362026 - DNA, 25 bp, Homo sapien
ctcattcaactcgccactcacctcc

SEQ ID NO: 362027 - DNA, 25 bp, Homo sapien
cactcattcaactcgccactcacct

SEQ ID NO: 362028 - DNA, 25 bp, Homo sapien
gacagaggttatctgcggcttggcc

SEQ ID NO: 362029 - DNA, 25 bp, Homo sapien
cttctcttccgtaagactgaagatg

SEQ ID NO: 362030 - DNA, 25 bp, Homo sapien
tggcatcatccgtcttcctctggac

SEQ ID NO: 362031 - DNA, 25 bp, Homo sapien
cagcaccatgtgctctcacgaatgg

SEQ ID NO: 362032 - DNA, 25 bp, Homo sapien
gcgcccttcctggtgtgtgatgcag

SEQ ID NO: 362033 - DNA, 25 bp, Homo sapien
gtgggtagggccatcgccagtcccc

SEQ ID NO: 362034 - DNA, 25 bp, Homo sapien
agcctgaagaactttactctggaag

SEQ ID NO: 362035 - DNA, 25 bp, Homo sapien
tctggaagtgtagatccaggagctg

SEQ ID NO: 362036 - DNA, 25 bp, Homo sapien
ctgttgccttgcagtggcgcagccc

SEQ ID NO: 362037 - DNA, 25 bp, Homo sapien
aaattggcccttatgtgtggaaagc

SEQ ID NO: 362038 - DNA, 25 bp, Homo sapien
agttccagcgggaggtgcacaagca

SEQ ID NO: 362039 - DNA, 25 bp, Homo sapien
aacccaatgtcgtcagccagctgca

SEQ ID NO: 362040 - DNA, 25 bp, Homo sapien
gcttgcctctgtggtgggtcaaagt

SEQ ID NO: 362041 - DNA, 25 bp, Homo sapien
tccaggagccatcctcagtcattat

SEQ ID NO: 362042 - DNA, 25 bp, Homo sapien
tacacctcagaagatgattatggcc

SEQ ID NO: 362043 - DNA, 25 bp, Homo sapien
cactgttgtcgcaggtcctaggcaa

SEQ ID NO: 362044 - DNA, 25 bp, Homo sapien
taagtgtccaagtgccgtgtgaccc

SEQ ID NO: 362045 - DNA, 25 bp, Homo sapien
tggttgtgtcaacacgacgctcgcc

SEQ ID NO: 362046 - DNA, 25 bp, Homo sapien
cattgcaagctccagtgtcggccat

SEQ ID NO: 362047 - DNA, 25 bp, Homo sapien
ctagtttgggcacaaagtttccaga

SEQ ID NO: 362048 - DNA, 25 bp, Homo sapien
gggtcacattgcaagctccagtgtc

SEQ ID NO: 362049 - DNA, 25 bp, Homo sapien
acaaagtttccagatgctcctcaca

SEQ ID NO: 362050 - DNA, 25 bp, Homo sapien
tcctgcaaatggaggtctgcacgct

SEQ ID NO: 362051 - DNA, 25 bp, Homo sapien
tcctggtgacatgagcatcttcctt

SEQ ID NO: 362052 - DNA, 25 bp, Homo sapien
ggcacagagcaagcgtggtgcattt

SEQ ID NO: 362053 - DNA, 25 bp, Homo sapien
cgctgggaggccgatgagttaatca

SEQ ID NO: 362054 - DNA, 25 bp, Homo sapien
agaacattttagctgtagctccagc

SEQ ID NO: 362055 - DNA, 25 bp, Homo sapien
ctgccatagaacattttagctgtag

SEQ ID NO: 362056 - DNA, 25 bp, Homo sapien
catagaacattttagctgtagctcc

SEQ ID NO: 362057 - DNA, 25 bp, Homo sapien
ccatagaacattttagctgtagctc

SEQ ID NO: 362058 - DNA, 25 bp, Homo sapien
cttggacttggctggttgtcgtggg

SEQ ID NO: 362059 - DNA, 25 bp, Homo sapien
ggaggacagagattttaccttgttc

SEQ ID NO: 362060 - DNA, 25 bp, Homo sapien
cagccatttctatgctggggaggac

SEQ ID NO: 362061 - DNA, 25 bp, Homo sapien
cttggctgtcttgctcagagtgtgg

SEQ ID NO: 362062 - DNA, 25 bp, Homo sapien
aggagggttgacggcactccagtcc

SEQ ID NO: 362063 - DNA, 25 bp, Homo sapien
ggagtcagctgcctatgggggacag

SEQ ID NO: 362064 - DNA, 25 bp, Homo sapien
tcagctgcctatgggggacaggagg

SEQ ID NO: 362065 - DNA, 25 bp, Homo sapien
gtctgcagggctacgggagtcagct

SEQ ID NO: 362066 - DNA, 25 bp, Homo sapien
caatgcaaagtgtacaagatggtca

SEQ ID NO: 362067 - DNA, 25 bp, Homo sapien
aaaaatgccagatctgaggtgacct

SEQ ID NO: 362068 - DNA, 25 bp, Homo sapien
tcacagcggagatgacacagcatgg

SEQ ID NO: 362069 - DNA, 25 bp, Homo sapien
tacaggaaccattgcagtggaggtg

SEQ ID NO: 362070 - DNA, 25 bp, Homo sapien
gggcaagcttcttaggacaccaagt

SEQ ID NO: 362071 - DNA, 25 bp, Homo sapien
caagtgctgagaaaatgactcgctg

SEQ ID NO: 362072 - DNA, 25 bp, Homo sapien
gactcgctgaagactattaggaaag

SEQ ID NO: 362073 - DNA, 25 bp, Homo sapien
caccacagagcaagatgactgtgcc

SEQ ID NO: 362074 - DNA, 25 bp, Homo sapien
tcctcaagcctgcacggaacgtgat

SEQ ID NO: 362075 - DNA, 25 bp, Homo sapien
tgggaaggcctgtcctcaagcctgc

SEQ ID NO: 362076 - DNA, 25 bp, Homo sapien
ctgcacggaacgtgatgcaggcctg

SEQ ID NO: 362077 - DNA, 25 bp, Homo sapien
cgtggaatgggaaggcctgtcctca

SEQ ID NO: 362078 - DNA, 25 bp, Homo sapien
cctgaacggactttgctcagcacct

SEQ ID NO: 362079 - DNA, 25 bp, Homo sapien
ccactgtccgggtcgtggctaccta

SEQ ID NO: 362080 - DNA, 25 bp, Homo sapien
gggagcacgcgtactaaacgccagc

SEQ ID NO: 362081 - DNA, 25 bp, Homo sapien
catgccagtcccctgaacggacttt

SEQ ID NO: 362082 - DNA, 25 bp, Homo sapien
gggtgtagagcgtgctctcaccctc

SEQ ID NO: 362083 - DNA, 25 bp, Homo sapien
ctgggtgtagagcgtgctctcaccc

SEQ ID NO: 362084 - DNA, 25 bp, Homo sapien
ggtgtagagcgtgctctcaccctcc

SEQ ID NO: 362085 - DNA, 25 bp, Homo sapien
tgggtgtagagcgtgctctcaccct

SEQ ID NO: 362086 - DNA, 25 bp, Homo sapien
ctggtcttaaactcgccgcgtcctc

SEQ ID NO: 362087 - DNA, 25 bp, Homo sapien
agattcttcaatgccggcttgctcc

SEQ ID NO: 362088 - DNA, 25 bp, Homo sapien
gcagtggccatgagatggaaccaaa

SEQ ID NO: 362089 - DNA, 25 bp, Homo sapien
ctcagcaggtcaacgcagtggccat

SEQ ID NO: 362090 - DNA, 25 bp, Homo sapien
gcagcctgctggtgtagacggcaca

SEQ ID NO: 362091 - DNA, 25 bp, Homo sapien
caccggagcaacaaacaggtcggct

SEQ ID NO: 362092 - DNA, 25 bp, Homo sapien
gtttctgcgccatgacccaggcaaa

SEQ ID NO: 362093 - DNA, 25 bp, Homo sapien
tggccaaaatgtggcgcccggatac

SEQ ID NO: 362094 - DNA, 25 bp, Homo sapien
ccaggacagtagctcacatgagcac

SEQ ID NO: 362095 - DNA, 25 bp, Homo sapien
ctgctgccgttgcagctgtgggctg

SEQ ID NO: 362096 - DNA, 25 bp, Homo sapien
aggacagtagctcacatgagcacaa

SEQ ID NO: 362097 - DNA, 25 bp, Homo sapien
gccaggacagtagctcacatgagca

SEQ ID NO: 362098 - DNA, 25 bp, Homo sapien
cactatctgctgagcgtggctggaa

SEQ ID NO: 362099 - DNA, 25 bp, Homo sapien
cagcttctcggtcggtgtgccaggt

SEQ ID NO: 362100 - DNA, 25 bp, Homo sapien
gctttagagggactttcctcccaga

SEQ ID NO: 362101 - DNA, 25 bp, Homo sapien
aatcacaggtgccttcacggtggct

SEQ ID NO: 362102 - DNA, 25 bp, Homo sapien
gcatcgccaactaaggacaccttgt

SEQ ID NO: 362103 - DNA, 25 bp, Homo sapien
ttagctgggctcgtcctgctttcgc

SEQ ID NO: 362104 - DNA, 25 bp, Homo sapien
ttccatgcttcacttgcagactgag

SEQ ID NO: 362105 - DNA, 25 bp, Homo sapien
tgtgttcagatctcgctctgctgcc

SEQ ID NO: 362106 - DNA, 25 bp, Homo sapien
agtgatgacatcatccggctttgaa

SEQ ID NO: 362107 - DNA, 25 bp, Homo sapien
taccagagacgagcaggtgcattag

SEQ ID NO: 362108 - DNA, 25 bp, Homo sapien
cattgcatgagtctctgtcgtgtaa

SEQ ID NO: 362109 - DNA, 25 bp, Homo sapien
ttgccagggccaagcgcaagggcta

SEQ ID NO: 362110 - DNA, 25 bp, Homo sapien
attggctggcattgcccacaaggtg

SEQ ID NO: 362111 - DNA, 25 bp, Homo sapien
ttggctggcattgcccacaaggtgg

SEQ ID NO: 362112 - DNA, 25 bp, Homo sapien
ggctggcattgcccacaaggtgggg

SEQ ID NO: 362113 - DNA, 25 bp, Homo sapien
gattggctggcattgcccacaaggt

SEQ ID NO: 362114 - DNA, 25 bp, Homo sapien
ccttggaccgctgtggacccagcat

SEQ ID NO: 362115 - DNA, 25 bp, Homo sapien
tggaccgctgtggacccagcatctc

SEQ ID NO: 362116 - DNA, 25 bp, Homo sapien
acctggggctcggactgaaggttct

SEQ ID NO: 362117 - DNA, 25 bp, Homo sapien
tggggctcggactgaaggttcttct

SEQ ID NO: 362118 - DNA, 25 bp, Homo sapien
gaatgtcattcacgccttcttcaag

SEQ ID NO: 362119 - DNA, 25 bp, Homo sapien
taaacagtgcaattcactggctgca

SEQ ID NO: 362120 - DNA, 25 bp, Homo sapien
caagcctatcggatgccatgcagtg

SEQ ID NO: 362121 - DNA, 25 bp, Homo sapien
gagtgcgacttagatgatgtggccc

SEQ ID NO: 362122 - DNA, 25 bp, Homo sapien
gattctgagggtccttgagctttct

SEQ ID NO: 362123 - DNA, 25 bp, Homo sapien
tgagggtccttgagctttctgcttt

SEQ ID NO: 362124 - DNA, 25 bp, Homo sapien
ccttttttgggccatgctgagtggg

SEQ ID NO: 362125 - DNA, 25 bp, Homo sapien
ggtccttgagctttctgctttttgc

SEQ ID NO: 362126 - DNA, 25 bp, Homo sapien
gctctttgcttgtgacattttctcc

SEQ ID NO: 362127 - DNA, 25 bp, Homo sapien
tctttgcttgtgacattttctccaa

SEQ ID NO: 362128 - DNA, 25 bp, Homo sapien
ctctagctctttgcttgtgacattt

SEQ ID NO: 362129 - DNA, 25 bp, Homo sapien
tagctctttgcttgtgacattttct

SEQ ID NO: 362130 - DNA, 25 bp, Homo sapien
ttggcatgatccgtactgcaggctc

SEQ ID NO: 362131 - DNA, 25 bp, Homo sapien
cactgcacccttggcatgatccgta

SEQ ID NO: 362132 - DNA, 25 bp, Homo sapien
cggagtcatgtctatcccgcagtcc

SEQ ID NO: 362133 - DNA, 25 bp, Homo sapien
tgttgctgcccggagtcatgtctat

SEQ ID NO: 362134 - DNA, 25 bp, Homo sapien
ggtcactggggacaacggcaaagct

SEQ ID NO: 362135 - DNA, 25 bp, Homo sapien
tcactggggacaacggcaaagctgt

SEQ ID NO: 362136 - DNA, 25 bp, Homo sapien
gtcactggggacaacggcaaagctg

SEQ ID NO: 362137 - DNA, 25 bp, Homo sapien
cactggggacaacggcaaagctgtt

SEQ ID NO: 362138 - DNA, 25 bp, Homo sapien
gctgaaccccagttgtccttcatgg

SEQ ID NO: 362139 - DNA, 25 bp, Homo sapien
caagcaagcgtaaactctgaaaggg

SEQ ID NO: 362140 - DNA, 25 bp, Homo sapien
tgaggtagctcagatgccagtgtcc

SEQ ID NO: 362141 - DNA, 25 bp, Homo sapien
gacctgtgcaggataaggtggctac

SEQ ID NO: 362142 - DNA, 25 bp, Homo sapien
ttaaatatccttggcgctggttcaa

SEQ ID NO: 362143 - DNA, 25 bp, Homo sapien
ctctgctgcttagcagagaggtctc

SEQ ID NO: 362144 - DNA, 25 bp, Homo sapien
attaaatatccttggcgctggttca

SEQ ID NO: 362145 - DNA, 25 bp, Homo sapien
aaatatccttggcgctggttcaagg

SEQ ID NO: 362146 - DNA, 25 bp, Homo sapien
accagacaggtaggattggacgtgg

SEQ ID NO: 362147 - DNA, 25 bp, Homo sapien
ccagacaggtaggattggacgtgga

SEQ ID NO: 362148 - DNA, 25 bp, Homo sapien
caccagacaggtaggattggacgtg

SEQ ID NO: 362149 - DNA, 25 bp, Homo sapien
atagaggggcccgactgctcatctc

SEQ ID NO: 362150 - DNA, 25 bp, Homo sapien
tggccacgttgacagcggcctcctg

SEQ ID NO: 362151 - DNA, 25 bp, Homo sapien
cagctccatttctggggaatagagg

SEQ ID NO: 362152 - DNA, 25 bp, Homo sapien
atctcccatggccacgttgacagcg

SEQ ID NO: 362153 - DNA, 25 bp, Homo sapien
acctgcagaattgggacatggcgag

SEQ ID NO: 362154 - DNA, 25 bp, Homo sapien
catgccaggttgcagcatcctgcag

SEQ ID NO: 362155 - DNA, 25 bp, Homo sapien
aggtgcttggcaccgaggacttgac

SEQ ID NO: 362156 - DNA, 25 bp, Homo sapien
gaggaccgagggacaagacatttgc

SEQ ID NO: 362157 - DNA, 25 bp, Homo sapien
tcacagctgggccatatgcatagat

SEQ ID NO: 362158 - DNA, 25 bp, Homo sapien
caagggccagactttcctgggttgg

SEQ ID NO: 362159 - DNA, 25 bp, Homo sapien
attgatctttaaatgcccaagggcc

SEQ ID NO: 362160 - DNA, 25 bp, Homo sapien
gacgtcatatacctgcctaacatca

SEQ ID NO: 362161 - DNA, 25 bp, Homo sapien
tcctctctccacatgggagagatgt

SEQ ID NO: 362162 - DNA, 25 bp, Homo sapien
cccgttgaagttgcatgtaagtatc

SEQ ID NO: 362163 - DNA, 25 bp, Homo sapien
agtagagaagtgtccaggcaaggac

SEQ ID NO: 362164 - DNA, 25 bp, Homo sapien
tggctttgaaggtcccctggttgag

SEQ ID NO: 362165 - DNA, 25 bp, Homo sapien
tgtccaggcaaggacgtgccccaga

SEQ ID NO: 362166 - DNA, 25 bp, Homo sapien
ctgcacagtgcgactgagaagcatt

SEQ ID NO: 362167 - DNA, 25 bp, Homo sapien
tgcgactgagaagcattgaggagac

SEQ ID NO: 362168 - DNA, 25 bp, Homo sapien
ttgaggagacgggtgctccgagagc

SEQ ID NO: 362169 - DNA, 25 bp, Homo sapien
gagacgggtgctccgagagcactgg

SEQ ID NO: 362170 - DNA, 25 bp, Homo sapien
ggctcctggaattttgttgttggct

SEQ ID NO: 362171 - DNA, 25 bp, Homo sapien
gagtcagaccgtagatgtgtttccc

SEQ ID NO: 362172 - DNA, 25 bp, Homo sapien
tcagttgtctgaacgcgtgggctcc

SEQ ID NO: 362173 - DNA, 25 bp, Homo sapien
tgttggctgtcaaaagagtcagacc

SEQ ID NO: 362174 - DNA, 25 bp, Homo sapien
ggttctctacatgaagaagacatcg

SEQ ID NO: 362175 - DNA, 25 bp, Homo sapien
gacatcgatttggacacttccccat

SEQ ID NO: 362176 - DNA, 25 bp, Homo sapien
tgaagaagacatcgatttggacact

SEQ ID NO: 362177 - DNA, 25 bp, Homo sapien
ggattgagtggttctctacatgaag

SEQ ID NO: 362178 - DNA, 25 bp, Homo sapien
gggtggacataacttttcaatgaat

SEQ ID NO: 362179 - DNA, 25 bp, Homo sapien
aacatcagtatgcaggtttttgggt

SEQ ID NO: 362180 - DNA, 25 bp, Homo sapien
tagttgaactcatacagcatgtagc

SEQ ID NO: 362181 - DNA, 25 bp, Homo sapien
aatgtatttacgcatccattggctg

SEQ ID NO: 362182 - DNA, 25 bp, Homo sapien
gccacagagcatgatacggactcag

SEQ ID NO: 362183 - DNA, 25 bp, Homo sapien
ttcaggtacaccaaagagaagccgt

SEQ ID NO: 362184 - DNA, 25 bp, Homo sapien
catcttgcctggacgagaatcctcc

SEQ ID NO: 362185 - DNA, 25 bp, Homo sapien
ctaagaactagggtcagagggaatc

SEQ ID NO: 362186 - DNA, 25 bp, Homo sapien
taaacattaggtacagatggacaca

SEQ ID NO: 362187 - DNA, 25 bp, Homo sapien
gcaatataacttcataacaaacctg

SEQ ID NO: 362188 - DNA, 25 bp, Homo sapien
gcatcacgcaatataacttcataac

SEQ ID NO: 362189 - DNA, 25 bp, Homo sapien
ggtaacagattcactcatgctccaa

SEQ ID NO: 362190 - DNA, 25 bp, Homo sapien
catgtttaagtggactctcttttat

SEQ ID NO: 362191 - DNA, 25 bp, Homo sapien
atgtttaagtggactctcttttatg

SEQ ID NO: 362192 - DNA, 25 bp, Homo sapien
ggatcccagcctacacaactgtaag

SEQ ID NO: 362193 - DNA, 25 bp, Homo sapien
caactgtaaggtgatgagcgcgtgc

SEQ ID NO: 362194 - DNA, 25 bp, Homo sapien
aatccctggatcttgtgaacatgtg

SEQ ID NO: 362195 - DNA, 25 bp, Homo sapien
tcagaagacgcgaggctgctggctt

SEQ ID NO: 362196 - DNA, 25 bp, Homo sapien
gatctaagtcatgaacgtggtcgca

SEQ ID NO: 362197 - DNA, 25 bp, Homo sapien
gagacatgcctgtcctctaggagga

SEQ ID NO: 362198 - DNA, 25 bp, Homo sapien
gactccgggcacagaagtaatgact

SEQ ID NO: 362199 - DNA, 25 bp, Homo sapien
tatttgtgaacacttcccggtggga

SEQ ID NO: 362200 - DNA, 25 bp, Homo sapien
aagcctggtctgcacttggacttgt

SEQ ID NO: 362201 - DNA, 25 bp, Homo sapien
ctgtgggttgacaaaggcccttttg

SEQ ID NO: 362202 - DNA, 25 bp, Homo sapien
cctggtctgcacttggacttgtcac

SEQ ID NO: 362203 - DNA, 25 bp, Homo sapien
ggcccttttgcctcagtgagttctc

SEQ ID NO: 362204 - DNA, 25 bp, Homo sapien
ctcccagcaaccatgctgcagaagt

SEQ ID NO: 362205 - DNA, 25 bp, Homo sapien
gtgggtctggcccatcttgaagact

SEQ ID NO: 362206 - DNA, 25 bp, Homo sapien
cccagcaaccatgctgcagaagtgg

SEQ ID NO: 362207 - DNA, 25 bp, Homo sapien
tgggtctggcccatcttgaagactc

SEQ ID NO: 362208 - DNA, 25 bp, Homo sapien
tacagtccctgtgaaaacgcttttg

SEQ ID NO: 362209 - DNA, 25 bp, Homo sapien
tgctgcccggagcaagaatgcgact

SEQ ID NO: 362210 - DNA, 25 bp, Homo sapien
tgcatgtcacaggagagcagacggc

SEQ ID NO: 362211 - DNA, 25 bp, Homo sapien
ccagaaggcggaatgagagtcctgc

SEQ ID NO: 362212 - DNA, 25 bp, Homo sapien
tacattatcgactgctcctggagcc

SEQ ID NO: 362213 - DNA, 25 bp, Homo sapien
ctggagccttatggcaccaaggcag

SEQ ID NO: 362214 - DNA, 25 bp, Homo sapien
catggcagcagagttacgccggcag

SEQ ID NO: 362215 - DNA, 25 bp, Homo sapien
ttacgtgtacattatcgactgctcc

SEQ ID NO: 362216 - DNA, 25 bp, Homo sapien
gcaaaaacctgcagctgcttgtagg

SEQ ID NO: 362217 - DNA, 25 bp, Homo sapien
ggcaaaaacctgcagctgcttgtag

SEQ ID NO: 362218 - DNA, 25 bp, Homo sapien
gattggggcagccagtacagcaaag

SEQ ID NO: 362219 - DNA, 25 bp, Homo sapien
tggggcagccagtacagcaaagagc

SEQ ID NO: 362220 - DNA, 25 bp, Homo sapien
agccagtacagcaaagagccggccc

SEQ ID NO: 362221 - DNA, 25 bp, Homo sapien
gcagccagtacagcaaagagccggc

SEQ ID NO: 362222 - DNA, 25 bp, Homo sapien
aaggtggatgataagcatagcagag

SEQ ID NO: 362223 - DNA, 25 bp, Homo sapien
tgccccagaaggtggatgataagca

SEQ ID NO: 362224 - DNA, 25 bp, Homo sapien
ctttatgatggtggaaatgctgcat

SEQ ID NO: 362225 - DNA, 25 bp, Homo sapien
gctttatgatggtggaaatgctgca

SEQ ID NO: 362226 - DNA, 25 bp, Homo sapien
tgctgaagtccagcactggacagga

SEQ ID NO: 362227 - DNA, 25 bp, Homo sapien
taggcatcttaaaggggtactgctg

SEQ ID NO: 362228 - DNA, 25 bp, Homo sapien
ctgctgaagtccagcactggacagg

SEQ ID NO: 362229 - DNA, 25 bp, Homo sapien
tcttaaaggggtactgctgaagtcc

SEQ ID NO: 362230 - DNA, 25 bp, Homo sapien
gtgccccgagtttgcccactggaag

SEQ ID NO: 362231 - DNA, 25 bp, Homo sapien
gagaaggcgtgccaagttattgtag

SEQ ID NO: 362232 - DNA, 25 bp, Homo sapien
ccaagttattgtaggacagggcgaa

SEQ ID NO: 362233 - DNA, 25 bp, Homo sapien
actggaaggttccacctcagaaggt

SEQ ID NO: 362234 - DNA, 25 bp, Homo sapien
ccaagaggtccagcaatcaaaaagc

SEQ ID NO: 362235 - DNA, 25 bp, Homo sapien
tagagaaaacttgaagagccctgga

SEQ ID NO: 362236 - DNA, 25 bp, Homo sapien
tgcgtttaggtctccccatgcaaga

SEQ ID NO: 362237 - DNA, 25 bp, Homo sapien
gatgatactgtatttcccaagaggt

SEQ ID NO: 362238 - DNA, 25 bp, Homo sapien
gacacctctgatcccgatgacgaag

SEQ ID NO: 362239 - DNA, 25 bp, Homo sapien
aaacttctttctccggcagttgatg

SEQ ID NO: 362240 - DNA, 25 bp, Homo sapien
tctttgtggtagtcacagtgttctc

SEQ ID NO: 362241 - DNA, 25 bp, Homo sapien
cccgatgacgaaggtcagcctggct

SEQ ID NO: 362242 - DNA, 25 bp, Homo sapien
ttggggggtctcatgatgccgacac

SEQ ID NO: 362243 - DNA, 25 bp, Homo sapien
gggggtctcatgatgccgacacagc

SEQ ID NO: 362244 - DNA, 25 bp, Homo sapien
gggtctcatgatgccgacacagcag

SEQ ID NO: 362245 - DNA, 25 bp, Homo sapien
tctcatgatgccgacacagcagctt

SEQ ID NO: 362246 - DNA, 25 bp, Homo sapien
gaccttctcccttgcggcctccagg

SEQ ID NO: 362247 - DNA, 25 bp, Homo sapien
catgagaagggggtggaccttctcc

SEQ ID NO: 362248 - DNA, 25 bp, Homo sapien
ttatttagaggccagagctctaaag

SEQ ID NO: 362249 - DNA, 25 bp, Homo sapien
gccagagctctaaagagacctgcaa

SEQ ID NO: 362250 - DNA, 25 bp, Homo sapien
aaatggagcctccagggtctgcgtc

SEQ ID NO: 362251 - DNA, 25 bp, Homo sapien
tggccccgactggagtagacgtgct

SEQ ID NO: 362252 - DNA, 25 bp, Homo sapien
gtcactcggaaaggcgcgggctttc

SEQ ID NO: 362253 - DNA, 25 bp, Homo sapien
gaagccgtccggcatctcggaaatg

SEQ ID NO: 362254 - DNA, 25 bp, Homo sapien
ccagaaatattggaaatcaacatgc

SEQ ID NO: 362255 - DNA, 25 bp, Homo sapien
ctatgagatttcgatgctatcttca

SEQ ID NO: 362256 - DNA, 25 bp, Homo sapien
tgtctccccctgatattgttctatg

SEQ ID NO: 362257 - DNA, 25 bp, Homo sapien
gatattgttctatgagatttcgatg

SEQ ID NO: 362258 - DNA, 25 bp, Homo sapien
gatttcgatgctatcttcattgcca

SEQ ID NO: 362259 - DNA, 25 bp, Homo sapien
caattatctacggaatgctcactca

SEQ ID NO: 362260 - DNA, 25 bp, Homo sapien
gctcatggaacaattatctacggaa

SEQ ID NO: 362261 - DNA, 25 bp, Homo sapien
tcctccaagtcgctcatggaacaat

SEQ ID NO: 362262 - DNA, 25 bp, Homo sapien
caagtcgctcatggaacaattatct

SEQ ID NO: 362263 - DNA, 25 bp, Homo sapien
aagccacgtggagcttgcctgaact

SEQ ID NO: 362264 - DNA, 25 bp, Homo sapien
tgtttcaagctactgagattcagga

SEQ ID NO: 362265 - DNA, 25 bp, Homo sapien
aatatcacagcacagaccgtgtctg

SEQ ID NO: 362266 - DNA, 25 bp, Homo sapien
ccccagaagggtgtactttcctgca

SEQ ID NO: 362267 - DNA, 25 bp, Homo sapien
agttgggcacataggcagcgtgtcc

SEQ ID NO: 362268 - DNA, 25 bp, Homo sapien
gagttgggcacataggcagcgtgtc

SEQ ID NO: 362269 - DNA, 25 bp, Homo sapien
gttgggcacataggcagcgtgtccc

SEQ ID NO: 362270 - DNA, 25 bp, Homo sapien
tccacacattgcttccaccgcaggg

SEQ ID NO: 362271 - DNA, 25 bp, Homo sapien
gggtcactggaaaggcccctccaca

SEQ ID NO: 362272 - DNA, 25 bp, Homo sapien
gcagaggctgcacgggatgcatctt

SEQ ID NO: 362273 - DNA, 25 bp, Homo sapien
gataaggacgttggtgtctgcccta

SEQ ID NO: 362274 - DNA, 25 bp, Homo sapien
gcatacagagtgttgtatgtgtcgg

SEQ ID NO: 362275 - DNA, 25 bp, Homo sapien
catacagagtgttgtatgtgtcggg

SEQ ID NO: 362276 - DNA, 25 bp, Homo sapien
ggcagcatacagagtgttgtatgtg

SEQ ID NO: 362277 - DNA, 25 bp, Homo sapien
cagcatacagagtgttgtatgtgtc

SEQ ID NO: 362278 - DNA, 25 bp, Homo sapien
cagctgtcaggagctttgtggacga

SEQ ID NO: 362279 - DNA, 25 bp, Homo sapien
ttgtggacgaggtagaatgctttct

SEQ ID NO: 362280 - DNA, 25 bp, Homo sapien
agggacacaggtggcccaatggatc

SEQ ID NO: 362281 - DNA, 25 bp, Homo sapien
aatggatccccgagaagccacatca

SEQ ID NO: 362282 - DNA, 25 bp, Homo sapien
taaagattcctaagtgacgtttctg

SEQ ID NO: 362283 - DNA, 25 bp, Homo sapien
cgtttctgtgcaggttattttcagg

SEQ ID NO: 362284 - DNA, 25 bp, Homo sapien
caagagctgacctgttgggaagata

SEQ ID NO: 362285 - DNA, 25 bp, Homo sapien
ggaagatagatgaacagctcgagtc

SEQ ID NO: 362286 - DNA, 25 bp, Homo sapien
ttcacggtgcaaggatgaaagggct

SEQ ID NO: 362287 - DNA, 25 bp, Homo sapien
ctcgagtgtctatgagtgaccttgc

SEQ ID NO: 362288 - DNA, 25 bp, Homo sapien
cactggatcctgatttgggaagacg

SEQ ID NO: 362289 - DNA, 25 bp, Homo sapien
caggcaataaaggaactcgagtgtc

SEQ ID NO: 362290 - DNA, 25 bp, Homo sapien
ctattgaaaatagccacgccggagc

SEQ ID NO: 362291 - DNA, 25 bp, Homo sapien
tcagcattagttcctcttgatggct

SEQ ID NO: 362292 - DNA, 25 bp, Homo sapien
ctttgccgaagggtaattcttgtca

SEQ ID NO: 362293 - DNA, 25 bp, Homo sapien
ggttgctgtcttcatatctaaattc

SEQ ID NO: 362294 - DNA, 25 bp, Homo sapien
gaatgtatccatcttggcttaacag

SEQ ID NO: 362295 - DNA, 25 bp, Homo sapien
tatgcccatgggtcaggtttccttt

SEQ ID NO: 362296 - DNA, 25 bp, Homo sapien
gaaaaaatcgtgtgctgtatcccat

SEQ ID NO: 362297 - DNA, 25 bp, Homo sapien
cgttactgctactttgatgaccaca

SEQ ID NO: 362298 - DNA, 25 bp, Homo sapien
taacgacgatgaagttgccctggaa

SEQ ID NO: 362299 - DNA, 25 bp, Homo sapien
agttgccctggaacgcgcgtgcgtc

SEQ ID NO: 362300 - DNA, 25 bp, Homo sapien
cgcgcgtgcgtccacattcattgca

SEQ ID NO: 362301 - DNA, 25 bp, Homo sapien
cagccactgctgtaacgacgatgaa

SEQ ID NO: 362302 - DNA, 25 bp, Homo sapien
agccacagcagcaccatagagcaga

SEQ ID NO: 362303 - DNA, 25 bp, Homo sapien
gcaccatagagcagaaagcagagtg

SEQ ID NO: 362304 - DNA, 25 bp, Homo sapien
cagcagcaccatagagcagaaagca

SEQ ID NO: 362305 - DNA, 25 bp, Homo sapien
ctgcagcccaatgccagcagccaca

SEQ ID NO: 362306 - DNA, 25 bp, Homo sapien
tgagccacagtcagggttattctgg

SEQ ID NO: 362307 - DNA, 25 bp, Homo sapien
tatactgtgaaaccgctggagtgcg

SEQ ID NO: 362308 - DNA, 25 bp, Homo sapien
gacggttttgagcaacagggagacc

SEQ ID NO: 362309 - DNA, 25 bp, Homo sapien
tcatatggacgcaacaggccaaagg

SEQ ID NO: 362310 - DNA, 25 bp, Homo sapien
gaatgtctgtctccacgttgagctt

SEQ ID NO: 362311 - DNA, 25 bp, Homo sapien
tctgcattgaactacccttgatgtc

SEQ ID NO: 362312 - DNA, 25 bp, Homo sapien
gatgtgcactttaagagccccactg

SEQ ID NO: 362313 - DNA, 25 bp, Homo sapien
atgtcatttgtgacagtgagagcaa

SEQ ID NO: 362314 - DNA, 25 bp, Homo sapien
ggtcaaagaggcgaatcttggcatt

SEQ ID NO: 362315 - DNA, 25 bp, Homo sapien
gaatgggtatggcttcttcttacaa

SEQ ID NO: 362316 - DNA, 25 bp, Homo sapien
gaatcttggcattagggaaaccttg

SEQ ID NO: 362317 - DNA, 25 bp, Homo sapien
cttcttcttacaatactggtaacac

SEQ ID NO: 362318 - DNA, 25 bp, Homo sapien
cccgtcaacctgcagcctgatgtgg

SEQ ID NO: 362319 - DNA, 25 bp, Homo sapien
tggttccctaagaagcctcccgtca

SEQ ID NO: 362320 - DNA, 25 bp, Homo sapien
gcctcccgtcaacctgcagcctgat

SEQ ID NO: 362321 - DNA, 25 bp, Homo sapien
tcctcttggttccctaagaagcctc

SEQ ID NO: 362322 - DNA, 25 bp, Homo sapien
cccattaggagaagcttggtgtcaa

SEQ ID NO: 362323 - DNA, 25 bp, Homo sapien
gagtctgagaagggccttaattttc

SEQ ID NO: 362324 - DNA, 25 bp, Homo sapien
ccaggttggccacgtttttacagct

SEQ ID NO: 362325 - DNA, 25 bp, Homo sapien
ttttcccattaggagaagcttggtg

SEQ ID NO: 362326 - DNA, 25 bp, Homo sapien
actttgcttgcaatggctgtgccag

SEQ ID NO: 362327 - DNA, 25 bp, Homo sapien
gtattctggacaaactttgcttgca

SEQ ID NO: 362328 - DNA, 25 bp, Homo sapien
agtattctggacaaactttgcttgc

SEQ ID NO: 362329 - DNA, 25 bp, Homo sapien
ggacaaactttgcttgcaatggctg

SEQ ID NO: 362330 - DNA, 25 bp, Homo sapien
gtctgttcgtattcaggaggaccat

SEQ ID NO: 362331 - DNA, 25 bp, Homo sapien
gacttccaggtctgttcgtattcag

SEQ ID NO: 362332 - DNA, 25 bp, Homo sapien
cgggtgtattgttctgacttccagg

SEQ ID NO: 362333 - DNA, 25 bp, Homo sapien
aggtctgcgggtgtattgttctgac

SEQ ID NO: 362334 - DNA, 25 bp, Homo sapien
gcaggatggtctgtaccacaagcca

SEQ ID NO: 362335 - DNA, 25 bp, Homo sapien
acacaggtacagaggcgggaagtca

SEQ ID NO: 362336 - DNA, 25 bp, Homo sapien
cgggaagtcaccagcacagcaggat

SEQ ID NO: 362337 - DNA, 25 bp, Homo sapien
ggcagtatagcccaggacacaggta

SEQ ID NO: 362338 - DNA, 25 bp, Homo sapien
ctgtgatcatgggactgtggcctgg

SEQ ID NO: 362339 - DNA, 25 bp, Homo sapien
gctgtgatcatgggactgtggcctg

SEQ ID NO: 362340 - DNA, 25 bp, Homo sapien
agctgtgatcatgggactgtggcct

SEQ ID NO: 362341 - DNA, 25 bp, Homo sapien
ttaacgttgatagcggtgacaaccc

SEQ ID NO: 362342 - DNA, 25 bp, Homo sapien
gcgtgcatgtgtcagaactcccaga

SEQ ID NO: 362343 - DNA, 25 bp, Homo sapien
tggatcggattcaggagaccagctc

SEQ ID NO: 362344 - DNA, 25 bp, Homo sapien
tgagacacaggtcgtcccagaacct

SEQ ID NO: 362345 - DNA, 25 bp, Homo sapien
ctgcaggccagcatgggctgcccag

SEQ ID NO: 362346 - DNA, 25 bp, Homo sapien
tgcaggccagcatgggctgcccaga

SEQ ID NO: 362347 - DNA, 25 bp, Homo sapien
gcaggccagcatgggctgcccagat

SEQ ID NO: 362348 - DNA, 25 bp, Homo sapien
caggccagcatgggctgcccagatc

SEQ ID NO: 362349 - DNA, 25 bp, Homo sapien
actcatcattgccacttggccagaa

SEQ ID NO: 362350 - DNA, 25 bp, Homo sapien
tccttatgatgctcagtatggagac

SEQ ID NO: 362351 - DNA, 25 bp, Homo sapien
tatgatgctcagtatggagacttgg

SEQ ID NO: 362352 - DNA, 25 bp, Homo sapien
gatgctcagtatggagacttgggac

SEQ ID NO: 362353 - DNA, 25 bp, Homo sapien
actgaaaattcagaacagagctgct

SEQ ID NO: 362354 - DNA, 25 bp, Homo sapien
gtggctggccctggaagtgctgttt

SEQ ID NO: 362355 - DNA, 25 bp, Homo sapien
cttcactgaaaattcagaacagagc

SEQ ID NO: 362356 - DNA, 25 bp, Homo sapien
ggctggccctggaagtgctgtttcc

SEQ ID NO: 362357 - DNA, 25 bp, Homo sapien
agggccctgactgcaagaagtgtgt

SEQ ID NO: 362358 - DNA, 25 bp, Homo sapien
aacgacgcttcttggcatgagatgc

SEQ ID NO: 362359 - DNA, 25 bp, Homo sapien
tccttggtgaatgtacaacgacgct

SEQ ID NO: 362360 - DNA, 25 bp, Homo sapien
ggctgccccgtccttggtgaatgta

SEQ ID NO: 362361 - DNA, 25 bp, Homo sapien
gaatgtacaacgacgcttcttggca

SEQ ID NO: 362362 - DNA, 25 bp, Homo sapien
acttggaatctttgcaaggacaggg

SEQ ID NO: 362363 - DNA, 25 bp, Homo sapien
tatgacttggaatctttgcaaggac

SEQ ID NO: 362364 - DNA, 25 bp, Homo sapien
tgcagctggttgtgccagtccgttg

SEQ ID NO: 362365 - DNA, 25 bp, Homo sapien
tgtgccagtccgttgaagccgtttt

SEQ ID NO: 362366 - DNA, 25 bp, Homo sapien
catcactacccaacagcaaaagcta

SEQ ID NO: 362367 - DNA, 25 bp, Homo sapien
tttgacaacgatgtcacagtaagct

SEQ ID NO: 362368 - DNA, 25 bp, Homo sapien
cagcaaaagctatgtgttcctttga

SEQ ID NO: 362369 - DNA, 25 bp, Homo sapien
aagctatgtgttcctttgacaacga

SEQ ID NO: 362370 - DNA, 25 bp, Homo sapien
tttaccagattattctcaatcgatg

SEQ ID NO: 362371 - DNA, 25 bp, Homo sapien
ccagattattctcaatcgatgtcat

SEQ ID NO: 362372 - DNA, 25 bp, Homo sapien
taccagattattctcaatcgatgtc

SEQ ID NO: 362373 - DNA, 25 bp, Homo sapien
tctatttaccagattattctcaatc

SEQ ID NO: 362374 - DNA, 25 bp, Homo sapien
gatccaggtgaacccacgggctcat

SEQ ID NO: 362375 - DNA, 25 bp, Homo sapien
gactttcacaacctgcggatccagg

SEQ ID NO: 362376 - DNA, 25 bp, Homo sapien
aacccacgggctcatttcacagtca

SEQ ID NO: 362377 - DNA, 25 bp, Homo sapien
gctctggcagctcagttctgaatgt

SEQ ID NO: 362378 - DNA, 25 bp, Homo sapien
ctggagaacgtttcctgtgggcctc

SEQ ID NO: 362379 - DNA, 25 bp, Homo sapien
ttgcttctgaatgccgccgtgccct

SEQ ID NO: 362380 - DNA, 25 bp, Homo sapien
cccacactgttgcttctgaatgccg

SEQ ID NO: 362381 - DNA, 25 bp, Homo sapien
tagcactcggggtcctggagaacgt

SEQ ID NO: 362382 - DNA, 25 bp, Homo sapien
cactcctaggattgctggaaattgc

SEQ ID NO: 362383 - DNA, 25 bp, Homo sapien
aggattgctggaaattgcttaactc

SEQ ID NO: 362384 - DNA, 25 bp, Homo sapien
gcctgggagacaatccctttccctc

SEQ ID NO: 362385 - DNA, 25 bp, Homo sapien
cctcccactcctaggattgctggaa

SEQ ID NO: 362386 - DNA, 25 bp, Homo sapien
gctctaagatcctgtagccatgcag

SEQ ID NO: 362387 - DNA, 25 bp, Homo sapien
cagacaccgagacatcgctctaaga

SEQ ID NO: 362388 - DNA, 25 bp, Homo sapien
catctgaagcttagggagactcaaa

SEQ ID NO: 362389 - DNA, 25 bp, Homo sapien
taatgatcataatgagaatgaagac

SEQ ID NO: 362390 - DNA, 25 bp, Homo sapien
ttctatggttaattagaaagatatc

SEQ ID NO: 362391 - DNA, 25 bp, Homo sapien
tggttaattagaaagatatctccac

SEQ ID NO: 362392 - DNA, 25 bp, Homo sapien
tatggttaattagaaagatatctcc

SEQ ID NO: 362393 - DNA, 25 bp, Homo sapien
ggttaattagaaagatatctccacg

SEQ ID NO: 362394 - DNA, 25 bp, Homo sapien
tgcatatctgtgcaatatccaagct

SEQ ID NO: 362395 - DNA, 25 bp, Homo sapien
ttttctggtttctgctgaagagcct

SEQ ID NO: 362396 - DNA, 25 bp, Homo sapien
gaagagcctgttctgctctgcatat

SEQ ID NO: 362397 - DNA, 25 bp, Homo sapien
atatctgtgcaatatccaagctggg

SEQ ID NO: 362398 - DNA, 25 bp, Homo sapien
caggagattcacaatggacgggacg

SEQ ID NO: 362399 - DNA, 25 bp, Homo sapien
aagctggcttggttggtgtttctca

SEQ ID NO: 362400 - DNA, 25 bp, Homo sapien
agtacctgcccctgacgttcaaagc

SEQ ID NO: 362401 - DNA, 25 bp, Homo sapien
cgggacgcattctgctttcaaagca

SEQ ID NO: 362402 - DNA, 25 bp, Homo sapien
gacctccacatgaccatcatgaggc

SEQ ID NO: 362403 - DNA, 25 bp, Homo sapien
ggacctccacatgaccatcatgagg

SEQ ID NO: 362404 - DNA, 25 bp, Homo sapien
cctccacatgaccatcatgaggcat

SEQ ID NO: 362405 - DNA, 25 bp, Homo sapien
aggacctccacatgaccatcatgag

SEQ ID NO: 362406 - DNA, 25 bp, Homo sapien
ggctcatccatttctcccttcttgt

SEQ ID NO: 362407 - DNA, 25 bp, Homo sapien
ctggctcatccatttctcccttctt

SEQ ID NO: 362408 - DNA, 25 bp, Homo sapien
ctcatccatttctcccttcttgtcc

SEQ ID NO: 362409 - DNA, 25 bp, Homo sapien
catccatttctcccttcttgtccat

SEQ ID NO: 362410 - DNA, 25 bp, Homo sapien
ctgatccatcgagggcagcatcctg

SEQ ID NO: 362411 - DNA, 25 bp, Homo sapien
ctcagctctaccttcctgctgatcc

SEQ ID NO: 362412 - DNA, 25 bp, Homo sapien
ctgctgatccatcgagggcagcatc

SEQ ID NO: 362413 - DNA, 25 bp, Homo sapien
tgctgatccatcgagggcagcatcc

SEQ ID NO: 362414 - DNA, 25 bp, Homo sapien
tcattgggtttaatgacagtgacag

SEQ ID NO: 362415 - DNA, 25 bp, Homo sapien
agaggtctcctctctgccatgaggc

SEQ ID NO: 362416 - DNA, 25 bp, Homo sapien
tgggtttaatgacagtgacagtcct

SEQ ID NO: 362417 - DNA, 25 bp, Homo sapien
gaggcttcttatggggaccacattt

SEQ ID NO: 362418 - DNA, 25 bp, Homo sapien
catttactgagctgactgtcatggc

SEQ ID NO: 362419 - DNA, 25 bp, Homo sapien
tactgagctgactgtcatggctgtc

SEQ ID NO: 362420 - DNA, 25 bp, Homo sapien
ctgagctgactgtcatggctgtcac

SEQ ID NO: 362421 - DNA, 25 bp, Homo sapien
tttactgagctgactgtcatggctg

SEQ ID NO: 362422 - DNA, 25 bp, Homo sapien
taactggcccccaaagagatataaa

SEQ ID NO: 362423 - DNA, 25 bp, Homo sapien
ttcctaactggcccccaaagagata

SEQ ID NO: 362424 - DNA, 25 bp, Homo sapien
tatagttgtaaagtgacaggttttc

SEQ ID NO: 362425 - DNA, 25 bp, Homo sapien
caaagagatataaaacccgacggca

SEQ ID NO: 362426 - DNA, 25 bp, Homo sapien
ctgatgatcccacaataggtggcaa

SEQ ID NO: 362427 - DNA, 25 bp, Homo sapien
gcatgaggggccacctcacgcatga

SEQ ID NO: 362428 - DNA, 25 bp, Homo sapien
gtcacacatgacacagagagcacgc

SEQ ID NO: 362429 - DNA, 25 bp, Homo sapien
tgtcacgcatgacacagagagcgcg

SEQ ID NO: 362430 - DNA, 25 bp, Homo sapien
cacttcacgcatgacagagagagca

SEQ ID NO: 362431 - DNA, 25 bp, Homo sapien
ttcctggaggtcagtctgcgaggcc

SEQ ID NO: 362432 - DNA, 25 bp, Homo sapien
acatcaccaatctcattgcacagat

SEQ ID NO: 362433 - DNA, 25 bp, Homo sapien
caggctctttaatgtgttttactac

SEQ ID NO: 362434 - DNA, 25 bp, Homo sapien
gatggtccttcaaaccgcaggacag

SEQ ID NO: 362435 - DNA, 25 bp, Homo sapien
cctctgggcatctttgcggtgagtt

SEQ ID NO: 362436 - DNA, 25 bp, Homo sapien
ggcatctttgcggtgagttaaggcc

SEQ ID NO: 362437 - DNA, 25 bp, Homo sapien
gggcagtagttgaggcccctgaaac

SEQ ID NO: 362438 - DNA, 25 bp, Homo sapien
ctttgcggtgagttaaggcccagga

SEQ ID NO: 362439 - DNA, 25 bp, Homo sapien
aaggtcaggtcccaccctgggtgtg

SEQ ID NO: 362440 - DNA, 25 bp, Homo sapien
tgaagattcaatccggcctgtgtgc

SEQ ID NO: 362441 - DNA, 25 bp, Homo sapien
tgggcaagaagcggcctgcatctca

SEQ ID NO: 362442 - DNA, 25 bp, Homo sapien
tttgacaaacatcttagcaatcgac

SEQ ID NO: 362443 - DNA, 25 bp, Homo sapien
tttgccaagtcgtcttcagcagcag

SEQ ID NO: 362444 - DNA, 25 bp, Homo sapien
atgttggcaaagcccggcctgggat

SEQ ID NO: 362445 - DNA, 25 bp, Homo sapien
agatgttggcaaagcccggcctggg

SEQ ID NO: 362446 - DNA, 25 bp, Homo sapien
ctttgccaagtcgtcttcagcagca

SEQ ID NO: 362447 - DNA, 25 bp, Homo sapien
tctcataacttgcttgaaatccttc

SEQ ID NO: 362448 - DNA, 25 bp, Homo sapien
ctttctcataacttgcttgaaatcc

SEQ ID NO: 362449 - DNA, 25 bp, Homo sapien
cctgtttgttctggtacttgcgcag

SEQ ID NO: 362450 - DNA, 25 bp, Homo sapien
gttctggtacttgcgcaggacacgg

SEQ ID NO: 362451 - DNA, 25 bp, Homo sapien
tgagggaccgctggctcacacgcat

SEQ ID NO: 362452 - DNA, 25 bp, Homo sapien
tggacactgagggaccgctggctca

SEQ ID NO: 362453 - DNA, 25 bp, Homo sapien
aggctctttcggcacagaggtggac

SEQ ID NO: 362454 - DNA, 25 bp, Homo sapien
tttcggcacagaggtggacactgag

SEQ ID NO: 362455 - DNA, 25 bp, Homo sapien
ctcccctgcccaagtgcagggctgc

SEQ ID NO: 362456 - DNA, 25 bp, Homo sapien
cctctcccctgcccaagtgcagggc

SEQ ID NO: 362457 - DNA, 25 bp, Homo sapien
tctcccctgcccaagtgcagggctg

SEQ ID NO: 362458 - DNA, 25 bp, Homo sapien
ctctcccctgcccaagtgcagggct

SEQ ID NO: 362459 - DNA, 25 bp, Homo sapien
gtcctctccaaagcgcaatccatcg

SEQ ID NO: 362460 - DNA, 25 bp, Homo sapien
ctgggaaggccccacttagattgat

SEQ ID NO: 362461 - DNA, 25 bp, Homo sapien
tcagatgaagtagttaaaagcagaa

SEQ ID NO: 362462 - DNA, 25 bp, Homo sapien
gaaaacgggtaactgcagaagtgct

SEQ ID NO: 362463 - DNA, 25 bp, Homo sapien
aaagcaagccggggccatcagagcc

SEQ ID NO: 362464 - DNA, 25 bp, Homo sapien
gccagaaagcaagccggggccatca

SEQ ID NO: 362465 - DNA, 25 bp, Homo sapien
ctgacagtgtgagtaagtcctgcag

SEQ ID NO: 362466 - DNA, 25 bp, Homo sapien
gacagtgtgagtaagtcctgcagcc

SEQ ID NO: 362467 - DNA, 25 bp, Homo sapien
ttaagcagagagatacctctcctga

SEQ ID NO: 362468 - DNA, 25 bp, Homo sapien
taagcagagagatacctctcctgag

SEQ ID NO: 362469 - DNA, 25 bp, Homo sapien
agcagagagatacctctcctgagcc

SEQ ID NO: 362470 - DNA, 25 bp, Homo sapien
tttaagcagagagatacctctcctg

SEQ ID NO: 362471 - DNA, 25 bp, Homo sapien
gggttgacagagacgcctcttgcaa

SEQ ID NO: 362472 - DNA, 25 bp, Homo sapien
cgcctcttgcaaaggtaactttcgg

SEQ ID NO: 362473 - DNA, 25 bp, Homo sapien
aagtgacgctcttctgtgagggacc

SEQ ID NO: 362474 - DNA, 25 bp, Homo sapien
tctgagggtttgcactctgaggccg

SEQ ID NO: 362475 - DNA, 25 bp, Homo sapien
acttgtataaggaggattttctgta

SEQ ID NO: 362476 - DNA, 25 bp, Homo sapien
tggacttgtataaggaggattttct

SEQ ID NO: 362477 - DNA, 25 bp, Homo sapien
ataaggaggattttctgtactttag

SEQ ID NO: 362478 - DNA, 25 bp, Homo sapien
ttctgtactttagtttaagctccat

SEQ ID NO: 362479 - DNA, 25 bp, Homo sapien
tttgcaatcaatctgtcggtggaga

SEQ ID NO: 362480 - DNA, 25 bp, Homo sapien
cttttgcaatcaatctgtcggtgga

SEQ ID NO: 362481 - DNA, 25 bp, Homo sapien
ttttgcaatcaatctgtcggtggag

SEQ ID NO: 362482 - DNA, 25 bp, Homo sapien
ttgcaatcaatctgtcggtggagat

SEQ ID NO: 362483 - DNA, 25 bp, Homo sapien
cagcacgcgcgtgtggagatgcatt

SEQ ID NO: 362484 - DNA, 25 bp, Homo sapien
ttcgcgtccaaagcagctctcggag

SEQ ID NO: 362485 - DNA, 25 bp, Homo sapien
tctgtctgaattgccagcgagctac

SEQ ID NO: 362486 - DNA, 25 bp, Homo sapien
gcgagctactgattgtgacatccac

SEQ ID NO: 362487 - DNA, 25 bp, Homo sapien
atatggatccccttggtccagggac

SEQ ID NO: 362488 - DNA, 25 bp, Homo sapien
ctaccctgggcacagtcagtatgtc

SEQ ID NO: 362489 - DNA, 25 bp, Homo sapien
accctgggcacagtcagtatgtctc

SEQ ID NO: 362490 - DNA, 25 bp, Homo sapien
ctgggcacagtcagtatgtctccca

SEQ ID NO: 362491 - DNA, 25 bp, Homo sapien
cctgggcacagtcagtatgtctccc

SEQ ID NO: 362492 - DNA, 25 bp, Homo sapien
tataccacgttctgtcatcgctgtg

SEQ ID NO: 362493 - DNA, 25 bp, Homo sapien
gcattgtcccgtgcttatcagcgaa

SEQ ID NO: 362494 - DNA, 25 bp, Homo sapien
tatcagcgaacgctaagccgatgcc

SEQ ID NO: 362495 - DNA, 25 bp, Homo sapien
gatactgcacttcagtataccacgt

SEQ ID NO: 362496 - DNA, 25 bp, Homo sapien
gcggcactgtccgaaggcacctgca

SEQ ID NO: 362497 - DNA, 25 bp, Homo sapien
aagcggcactgtccgaaggcacctg

SEQ ID NO: 362498 - DNA, 25 bp, Homo sapien
ggcactgtccgaaggcacctgcaca

SEQ ID NO: 362499 - DNA, 25 bp, Homo sapien
ctaaagcggcactgtccgaaggcac

SEQ ID NO: 362500 - DNA, 25 bp, Homo sapien
gccagaggcactcggcacttcctgg

SEQ ID NO: 362501 - DNA, 25 bp, Homo sapien
tgtcatggaagcacaccggcaccag

SEQ ID NO: 362502 - DNA, 25 bp, Homo sapien
cagaggcactcggcacttcctggaa

SEQ ID NO: 362503 - DNA, 25 bp, Homo sapien
gaggcactcggcacttcctggaaac

SEQ ID NO: 362504 - DNA, 25 bp, Homo sapien
agcatacatagagtgcctgcacaca

SEQ ID NO: 362505 - DNA, 25 bp, Homo sapien
catgctcagtggtcggcccttcact

SEQ ID NO: 362506 - DNA, 25 bp, Homo sapien
caacatgctcagtggtcggcccttc

SEQ ID NO: 362507 - DNA, 25 bp, Homo sapien
aagcatacatagagtgcctgcacac

SEQ ID NO: 362508 - DNA, 25 bp, Homo sapien
cctgaatccgacatttaaaggtggc

SEQ ID NO: 362509 - DNA, 25 bp, Homo sapien
catgaaaggaaaacggactggacgg

SEQ ID NO: 362510 - DNA, 25 bp, Homo sapien
gctgcagataatacgcctcgcggca

SEQ ID NO: 362511 - DNA, 25 bp, Homo sapien
cattccccgagtggaggcatgaaag

SEQ ID NO: 362512 - DNA, 25 bp, Homo sapien
tggcacgtggcatctggctaccaca

SEQ ID NO: 362513 - DNA, 25 bp, Homo sapien
tggcatctggctaccacaggacact

SEQ ID NO: 362514 - DNA, 25 bp, Homo sapien
catctggctaccacaggacactcag

SEQ ID NO: 362515 - DNA, 25 bp, Homo sapien
cacgtggcatctggctaccacagga

SEQ ID NO: 362516 - DNA, 25 bp, Homo sapien
tgttggcttgaagaacctcctttcc

SEQ ID NO: 362517 - DNA, 25 bp, Homo sapien
tatccgtggctcagaggtttaggga

SEQ ID NO: 362518 - DNA, 25 bp, Homo sapien
tctgggctctgataagttgggctca

SEQ ID NO: 362519 - DNA, 25 bp, Homo sapien
ggtctgaggaggtgacccagccatc

SEQ ID NO: 362520 - DNA, 25 bp, Homo sapien
tcttttccagcaaggagattcctgg

SEQ ID NO: 362521 - DNA, 25 bp, Homo sapien
agctctgtgattaaggtgggcagct

SEQ ID NO: 362522 - DNA, 25 bp, Homo sapien
tctgtgattaaggtgggcagcttcc

SEQ ID NO: 362523 - DNA, 25 bp, Homo sapien
gtcttttccagcaaggagattcctg

SEQ ID NO: 362524 - DNA, 25 bp, Homo sapien
cccaggaaagaccacatctgtggct

SEQ ID NO: 362525 - DNA, 25 bp, Homo sapien
ccaggaaagaccacatctgtggctg

SEQ ID NO: 362526 - DNA, 25 bp, Homo sapien
caggaaagaccacatctgtggctga

SEQ ID NO: 362527 - DNA, 25 bp, Homo sapien
ctctgaccagctcggctgccccaag

SEQ ID NO: 362528 - DNA, 25 bp, Homo sapien
acggatgcctgctccgctctctggg

SEQ ID NO: 362529 - DNA, 25 bp, Homo sapien
gccctccttccacccacggatgcct

SEQ ID NO: 362530 - DNA, 25 bp, Homo sapien
ccagcgcccactgggtccctttctc

SEQ ID NO: 362531 - DNA, 25 bp, Homo sapien
atcagcagctgcgtcctccttgcct

SEQ ID NO: 362532 - DNA, 25 bp, Homo sapien
agcagctgcgtcctccttgcctggg

SEQ ID NO: 362533 - DNA, 25 bp, Homo sapien
ccatcagcagctgcgtcctccttgc

SEQ ID NO: 362534 - DNA, 25 bp, Homo sapien
gcagctgcgtcctccttgcctggga

SEQ ID NO: 362535 - DNA, 25 bp, Homo sapien
ggcagagacccgttccatcagcagc

SEQ ID NO: 362536 - DNA, 25 bp, Homo sapien
gggcagagacccgttccatcagcag

SEQ ID NO: 362537 - DNA, 25 bp, Homo sapien
ctgggcagagacccgttccatcagc

SEQ ID NO: 362538 - DNA, 25 bp, Homo sapien
tgggcagagacccgttccatcagca

SEQ ID NO: 362539 - DNA, 25 bp, Homo sapien
agcagctgcgtcctccttgcctggg

SEQ ID NO: 362540 - DNA, 25 bp, Homo sapien
atcagcagctgcgtcctccttgcct

SEQ ID NO: 362541 - DNA, 25 bp, Homo sapien
ccatcagcagctgcgtcctccttgc

SEQ ID NO: 362542 - DNA, 25 bp, Homo sapien
gcagctgcgtcctccttgcctggga

SEQ ID NO: 362543 - DNA, 25 bp, Homo sapien
ggcagagacccgttccatcagcagc

SEQ ID NO: 362544 - DNA, 25 bp, Homo sapien
gggcagagacccgttccatcagcag

SEQ ID NO: 362545 - DNA, 25 bp, Homo sapien
ctgggcagagacccgttccatcagc

SEQ ID NO: 362546 - DNA, 25 bp, Homo sapien
tgggcagagacccgttccatcagca

SEQ ID NO: 362547 - DNA, 25 bp, Homo sapien
agcagctgcgtcctccttgcctggg

SEQ ID NO: 362548 - DNA, 25 bp, Homo sapien
atcagcagctgcgtcctccttgcct

SEQ ID NO: 362549 - DNA, 25 bp, Homo sapien
ccatcagcagctgcgtcctccttgc

SEQ ID NO: 362550 - DNA, 25 bp, Homo sapien
gcagctgcgtcctccttgcctggga

SEQ ID NO: 362551 - DNA, 25 bp, Homo sapien
acagtgcctgggcagagacccgctc

SEQ ID NO: 362552 - DNA, 25 bp, Homo sapien
agagacccgctccatcagcagccat

SEQ ID NO: 362553 - DNA, 25 bp, Homo sapien
tcttttcctgggacagtgcctgggc

SEQ ID NO: 362554 - DNA, 25 bp, Homo sapien
cctgggcagagacccgctccatcag

SEQ ID NO: 362555 - DNA, 25 bp, Homo sapien
tgagcagagacccgctccatcagca

SEQ ID NO: 362556 - DNA, 25 bp, Homo sapien
catgtcctccttgcctgggacagtg

SEQ ID NO: 362557 - DNA, 25 bp, Homo sapien
cctgagcagagacccgctccatcag

SEQ ID NO: 362558 - DNA, 25 bp, Homo sapien
gagacccgctccatcagcagccatg

SEQ ID NO: 362559 - DNA, 25 bp, Homo sapien
agagacccgctccatcagcagccat

SEQ ID NO: 362560 - DNA, 25 bp, Homo sapien
catgtcccccttgcctgggacagtt

SEQ ID NO: 362561 - DNA, 25 bp, Homo sapien
gggacagttcctgggcatcagcagt

SEQ ID NO: 362562 - DNA, 25 bp, Homo sapien
ccttgcctgggacagttcctgggca

SEQ ID NO: 362563 - DNA, 25 bp, Homo sapien
tcatggcagggcatccgtggccttc

SEQ ID NO: 362564 - DNA, 25 bp, Homo sapien
cccttgccacacgtcctgagtgatg

SEQ ID NO: 362565 - DNA, 25 bp, Homo sapien
gggaccacctactgccccttgccac

SEQ ID NO: 362566 - DNA, 25 bp, Homo sapien
tgagtgatggtgtccagaagcagga

SEQ ID NO: 362567 - DNA, 25 bp, Homo sapien
ggtggtgaacccagtgcagggctgt

SEQ ID NO: 362568 - DNA, 25 bp, Homo sapien
ggtctttgcaggtgcgggtggtgaa

SEQ ID NO: 362569 - DNA, 25 bp, Homo sapien
tctggggctgcaaaacttcactatg

SEQ ID NO: 362570 - DNA, 25 bp, Homo sapien
gctgcaaaacttcactatgtttcca

SEQ ID NO: 362571 - DNA, 25 bp, Homo sapien
ttgtcaccacgtcgttcatctcagc

SEQ ID NO: 362572 - DNA, 25 bp, Homo sapien
gggctccgagtgacactgtgctttg

SEQ ID NO: 362573 - DNA, 25 bp, Homo sapien
cctttctccgctgtgtctgtggcct

SEQ ID NO: 362574 - DNA, 25 bp, Homo sapien
tgcacattgcctgcgtaaacaaagg

SEQ ID NO: 362575 - DNA, 25 bp, Homo sapien
tagacaagatctggggaagccggac

SEQ ID NO: 362576 - DNA, 25 bp, Homo sapien
agcagtaacccctcatggaccagac

SEQ ID NO: 362577 - DNA, 25 bp, Homo sapien
ccctcattagacaagatctggggaa

SEQ ID NO: 362578 - DNA, 25 bp, Homo sapien
ggaagcagtaacccctcatggacca

SEQ ID NO: 362579 - DNA, 25 bp, Homo sapien
ggaaagcacattcccgacgctgacc

SEQ ID NO: 362580 - DNA, 25 bp, Homo sapien
tccagagttcccctcacaggcggca

SEQ ID NO: 362581 - DNA, 25 bp, Homo sapien
caaagcatcggtagaggaaagcaca

SEQ ID NO: 362582 - DNA, 25 bp, Homo sapien
ccaggacaaagcatcggtagaggaa

SEQ ID NO: 362583 - DNA, 25 bp, Homo sapien
caagacaggcgctgttgaatgcccc

SEQ ID NO: 362584 - DNA, 25 bp, Homo sapien
aggcgctgttgaatgcccctgtctg

SEQ ID NO: 362585 - DNA, 25 bp, Homo sapien
ttgaatgcccctgtctggcacaggg

SEQ ID NO: 362586 - DNA, 25 bp, Homo sapien
tgttgaatgcccctgtctggcacag

SEQ ID NO: 362587 - DNA, 25 bp, Homo sapien
tgtaccagctggctcccgtctctct

SEQ ID NO: 362588 - DNA, 25 bp, Homo sapien
ttgtggaaccccgtgaatttcagat

SEQ ID NO: 362589 - DNA, 25 bp, Homo sapien
tagggcattgatgatttcttgagaa

SEQ ID NO: 362590 - DNA, 25 bp, Homo sapien
gatcctgcaatcttccatgtaccag

SEQ ID NO: 362591 - DNA, 25 bp, Homo sapien
tggggccaaattacaaggggctcca

SEQ ID NO: 362592 - DNA, 25 bp, Homo sapien
ggaaatgagccacagatccggtttg

SEQ ID NO: 362593 - DNA, 25 bp, Homo sapien
tgagccacagatccggtttgggaac

SEQ ID NO: 362594 - DNA, 25 bp, Homo sapien
gccacagatccggtttgggaactca

SEQ ID NO: 362595 - DNA, 25 bp, Homo sapien
cagatccggtttgggaactcagtct

SEQ ID NO: 362596 - DNA, 25 bp, Homo sapien
cggcactaattactgctcggttgag

SEQ ID NO: 362597 - DNA, 25 bp, Homo sapien
gagttgctggccttcgtcattaagg

SEQ ID NO: 362598 - DNA, 25 bp, Homo sapien
caagtgacagaacagtcggcactaa

SEQ ID NO: 362599 - DNA, 25 bp, Homo sapien
gcaacatcttgctaattctatgttt

SEQ ID NO: 362600 - DNA, 25 bp, Homo sapien
tgctctctttcaggaagcccagctc

SEQ ID NO: 362601 - DNA, 25 bp, Homo sapien
agcccagctccagggaagtggtggc

SEQ ID NO: 362602 - DNA, 25 bp, Homo sapien
ctgctctctttcaggaagcccagct

SEQ ID NO: 362603 - DNA, 25 bp, Homo sapien
ccagctccagggaagtggtggccat

SEQ ID NO: 362604 - DNA, 25 bp, Homo sapien
aaagcatggcgtagccttcgcacgg

SEQ ID NO: 362605 - DNA, 25 bp, Homo sapien
ttcgcacggtgttgacctggcacag

SEQ ID NO: 362606 - DNA, 25 bp, Homo sapien
tccgcggaaggaagagcctgcttca

SEQ ID NO: 362607 - DNA, 25 bp, Homo sapien
gtgttgcctgaaggccccggtgcaa

SEQ ID NO: 362608 - DNA, 25 bp, Homo sapien
catcgtgcagcacggggagcaagca

SEQ ID NO: 362609 - DNA, 25 bp, Homo sapien
cactctctgctttccggttccgtgc

SEQ ID NO: 362610 - DNA, 25 bp, Homo sapien
cagcacggggagcaagcacactctc

SEQ ID NO: 362611 - DNA, 25 bp, Homo sapien
tgctttccggttccgtgcctgttga

SEQ ID NO: 362612 - DNA, 25 bp, Homo sapien
caggacagcaaacacccggccatga

SEQ ID NO: 362613 - DNA, 25 bp, Homo sapien
aggacagcaaacacccggccatgag

SEQ ID NO: 362614 - DNA, 25 bp, Homo sapien
gcaggacagcaaacacccggccatg

SEQ ID NO: 362615 - DNA, 25 bp, Homo sapien
cagagtggtcgggagggaagggctc

SEQ ID NO: 362616 - DNA, 25 bp, Homo sapien
gcagagagctacacagatcagggat

SEQ ID NO: 362617 - DNA, 25 bp, Homo sapien
attgaggagcacaggcgttgttcag

SEQ ID NO: 362618 - DNA, 25 bp, Homo sapien
ggattgaggagcacaggcgttgttc

SEQ ID NO: 362619 - DNA, 25 bp, Homo sapien
tcagttaagcaaagcagagtccact

SEQ ID NO: 362620 - DNA, 25 bp, Homo sapien
ggacttgccagagaccgccctgcaa

SEQ ID NO: 362621 - DNA, 25 bp, Homo sapien
gagagccgatcccaaagcatctgtg

SEQ ID NO: 362622 - DNA, 25 bp, Homo sapien
tggctgagagccgatcccaaagcat

SEQ ID NO: 362623 - DNA, 25 bp, Homo sapien
tcctctttgcagagtgccacatcct

SEQ ID NO: 362624 - DNA, 25 bp, Homo sapien
tcagtccacagatcatctggggttt

SEQ ID NO: 362625 - DNA, 25 bp, Homo sapien
tgctcccctttgtgtagacttccct

SEQ ID NO: 362626 - DNA, 25 bp, Homo sapien
cctgtgctcccctttgtgtagactt

SEQ ID NO: 362627 - DNA, 25 bp, Homo sapien
ctctctgcaaatggtctgttggcct

SEQ ID NO: 362628 - DNA, 25 bp, Homo sapien
ggcctggagtaggcaggatgcccac

SEQ ID NO: 362629 - DNA, 25 bp, Homo sapien
ctgcaaatggtctgttggcctggag

SEQ ID NO: 362630 - DNA, 25 bp, Homo sapien
caaatggtctgttggcctggagtag

SEQ ID NO: 362631 - DNA, 25 bp, Homo sapien
aggcggccagctttccgcaggttgt

SEQ ID NO: 362632 - DNA, 25 bp, Homo sapien
ctttccgcaggttgtagttcattga

SEQ ID NO: 362633 - DNA, 25 bp, Homo sapien
ttcctttttccggtacatccagctc

SEQ ID NO: 362634 - DNA, 25 bp, Homo sapien
cccatggccggaggcggccagcttt

SEQ ID NO: 362635 - DNA, 25 bp, Homo sapien
tctgtgctcctggtccacatggcag

SEQ ID NO: 362636 - DNA, 25 bp, Homo sapien
tggcagattccctattgtctgtgct

SEQ ID NO: 362637 - DNA, 25 bp, Homo sapien
ccctattgtctgtgctcctggtcca

SEQ ID NO: 362638 - DNA, 25 bp, Homo sapien
ccttgtttctggcagattccctatt

SEQ ID NO: 362639 - DNA, 25 bp, Homo sapien
tggcatccagcccatcagtagcaac

SEQ ID NO: 362640 - DNA, 25 bp, Homo sapien
aagcggaacaggtggcccgatcatc

SEQ ID NO: 362641 - DNA, 25 bp, Homo sapien
ggggtcttggcaggcccatgccctc

SEQ ID NO: 362642 - DNA, 25 bp, Homo sapien
catcagtagcaaccttggcagacag

SEQ ID NO: 362643 - DNA, 25 bp, Homo sapien
cccagagcttcaggctggacctgct

SEQ ID NO: 362644 - DNA, 25 bp, Homo sapien
gggacaggcccagagcttcaggctg

SEQ ID NO: 362645 - DNA, 25 bp, Homo sapien
tccaggagggacaggcccagagctt

SEQ ID NO: 362646 - DNA, 25 bp, Homo sapien
cagagcttcaggctggacctgctct

SEQ ID NO: 362647 - DNA, 25 bp, Homo sapien
gtgggtcatggtagtaaccccattc

SEQ ID NO: 362648 - DNA, 25 bp, Homo sapien
ctctgggacaggacaaaattggagc

SEQ ID NO: 362649 - DNA, 25 bp, Homo sapien
taagtcaatccgagtgggtcatggt

SEQ ID NO: 362650 - DNA, 25 bp, Homo sapien
caccagcataagtcaatccgagtgg

SEQ ID NO: 362651 - DNA, 25 bp, Homo sapien
tcagacactcgaagtcccacgttgg

SEQ ID NO: 362652 - DNA, 25 bp, Homo sapien
agcctccccgggctgtgtccacacc

SEQ ID NO: 362653 - DNA, 25 bp, Homo sapien
tcccttggagcctccccgggctgtg

SEQ ID NO: 362654 - DNA, 25 bp, Homo sapien
gctgccatccattcgttcttaatgt

SEQ ID NO: 362655 - DNA, 25 bp, Homo sapien
cttatgtaaggagtagaaatagccg

SEQ ID NO: 362656 - DNA, 25 bp, Homo sapien
gtagaaatagccgatattcaacagc

SEQ ID NO: 362657 - DNA, 25 bp, Homo sapien
cagcagattttaccccatccgttag

SEQ ID NO: 362658 - DNA, 25 bp, Homo sapien
ttcactctctttgggattcttgcgc

SEQ ID NO: 362659 - DNA, 25 bp, Homo sapien
ggaactaagttccagggcactggat

SEQ ID NO: 362660 - DNA, 25 bp, Homo sapien
atggagaagacacgccctctgctgc

SEQ ID NO: 362661 - DNA, 25 bp, Homo sapien
atggcctggtagatggagaagacac

SEQ ID NO: 362662 - DNA, 25 bp, Homo sapien
tgtcccttccaaatgtagcacatgg

SEQ ID NO: 362663 - DNA, 25 bp, Homo sapien
tccggatggagtggaccagcctggt

SEQ ID NO: 362664 - DNA, 25 bp, Homo sapien
acacacgggcagggacgtccccagg

SEQ ID NO: 362665 - DNA, 25 bp, Homo sapien
gacacacgggcagggacgtccccag

SEQ ID NO: 362666 - DNA, 25 bp, Homo sapien
ttgaggttaaagagtccagcatttc

SEQ ID NO: 362667 - DNA, 25 bp, Homo sapien
ctcctccacagtcacgcgttctgca

SEQ ID NO: 362668 - DNA, 25 bp, Homo sapien
cacagtcacgcgttctgcacgcgta

SEQ ID NO: 362669 - DNA, 25 bp, Homo sapien
cttttattgaggttaaagagtccag

SEQ ID NO: 362670 - DNA, 25 bp, Homo sapien
gggctgctctgcaagggcgcaggag

SEQ ID NO: 362671 - DNA, 25 bp, Homo sapien
ggggctgctctgcaagggcgcagga

SEQ ID NO: 362672 - DNA, 25 bp, Homo sapien
caagggcgcaggagctcgggcgcag

SEQ ID NO: 362673 - DNA, 25 bp, Homo sapien
ggcagggcgctgattctctcatgca

SEQ ID NO: 362674 - DNA, 25 bp, Homo sapien
caaggtttggcagggcgctgattct

SEQ ID NO: 362675 - DNA, 25 bp, Homo sapien
tttggcagggcgctgattctctcat

SEQ ID NO: 362676 - DNA, 25 bp, Homo sapien
cagggcgctgattctctcatgcact

SEQ ID NO: 362677 - DNA, 25 bp, Homo sapien
agggaccaggacttgatattcccag

SEQ ID NO: 362678 - DNA, 25 bp, Homo sapien
aatgtccaagggaccaggacttgat

SEQ ID NO: 362679 - DNA, 25 bp, Homo sapien
ttccttgcgtcagaatgtccaaggg

SEQ ID NO: 362680 - DNA, 25 bp, Homo sapien
gaaagcgttccttgcgtcagaatgt

SEQ ID NO: 362681 - DNA, 25 bp, Homo sapien
ggcgcccagggatcctgctgtccgt

SEQ ID NO: 362682 - DNA, 25 bp, Homo sapien
gtcccatctttgctgggcgcccagg

SEQ ID NO: 362683 - DNA, 25 bp, Homo sapien
cagggaccctggcccgtcatatggt

SEQ ID NO: 362684 - DNA, 25 bp, Homo sapien
tttcacgttcaattggggccaccgc

SEQ ID NO: 362685 - DNA, 25 bp, Homo sapien
cggtacccatgcaccattggcttct

SEQ ID NO: 362686 - DNA, 25 bp, Homo sapien
gcagcagacagtcggtgctcgttct

SEQ ID NO: 362687 - DNA, 25 bp, Homo sapien
tacccatgcaccattggcttctctt

SEQ ID NO: 362688 - DNA, 25 bp, Homo sapien
tccctctgatacatgacccccaggg

SEQ ID NO: 362689 - DNA, 25 bp, Homo sapien
agctgggccctgtggcaggtgaacc

SEQ ID NO: 362690 - DNA, 25 bp, Homo sapien
ctcagctgggccctgtggcaggtga

SEQ ID NO: 362691 - DNA, 25 bp, Homo sapien
gctgggccctgtggcaggtgaaccc

SEQ ID NO: 362692 - DNA, 25 bp, Homo sapien
tcagctgggccctgtggcaggtgaa

SEQ ID NO: 362693 - DNA, 25 bp, Homo sapien
tacaatcgtgtttccattgaggaca

SEQ ID NO: 362694 - DNA, 25 bp, Homo sapien
caagcgtctgtacaatcgtgtttcc

SEQ ID NO: 362695 - DNA, 25 bp, Homo sapien
ccaaacccaagcgtctgtacaatcg

SEQ ID NO: 362696 - DNA, 25 bp, Homo sapien
tgtcaataacctcgccacgacagga

SEQ ID NO: 362697 - DNA, 25 bp, Homo sapien
tccttcgttcccaggtgggcggctc

SEQ ID NO: 362698 - DNA, 25 bp, Homo sapien
cttcgttcccaggtgggcggctcca

SEQ ID NO: 362699 - DNA, 25 bp, Homo sapien
gagacgccaatgagggaatcatttt

SEQ ID NO: 362700 - DNA, 25 bp, Homo sapien
tctcagcaaccatctgcgtggcagg

SEQ ID NO: 362701 - DNA, 25 bp, Homo sapien
gcgtggcaggagctatcacactgga

SEQ ID NO: 362702 - DNA, 25 bp, Homo sapien
ctcgcagtagccaaggagagacgcc

SEQ ID NO: 362703 - DNA, 25 bp, Homo sapien
tcacagccagccgtaggatctgcat

SEQ ID NO: 362704 - DNA, 25 bp, Homo sapien
ggctgcggctcagttgctgactgct

SEQ ID NO: 362705 - DNA, 25 bp, Homo sapien
cattgagttcagcaagcggaggcga

SEQ ID NO: 362706 - DNA, 25 bp, Homo sapien
tgttccaaacacgacccattggctg

SEQ ID NO: 362707 - DNA, 25 bp, Homo sapien
cttcccaaatgacgccccagccact

SEQ ID NO: 362708 - DNA, 25 bp, Homo sapien
ctgctgctttgagaacggacaggag

SEQ ID NO: 362709 - DNA, 25 bp, Homo sapien
ggctgctgctttgagaacggacagg

SEQ ID NO: 362710 - DNA, 25 bp, Homo sapien
aatgacgccccagccactgtggctg

SEQ ID NO: 362711 - DNA, 25 bp, Homo sapien
atcctgcaattcaggagtttcacat

SEQ ID NO: 362712 - DNA, 25 bp, Homo sapien
cgagtctgtcagtcaaatcgcccca

SEQ ID NO: 362713 - DNA, 25 bp, Homo sapien
gggctccacgactaaggaactgaag

SEQ ID NO: 362714 - DNA, 25 bp, Homo sapien
ccagggatccgagggccactcttgt

SEQ ID NO: 362715 - DNA, 25 bp, Homo sapien
aggttcccatggtgctggccacaaa

SEQ ID NO: 362716 - DNA, 25 bp, Homo sapien
gttctcaaagatccgccaaagggag

SEQ ID NO: 362717 - DNA, 25 bp, Homo sapien
caaggttgtgccacagttgcagaag

SEQ ID NO: 362718 - DNA, 25 bp, Homo sapien
aagggtgtctcagccgtgtgctcac

SEQ ID NO: 362719 - DNA, 25 bp, Homo sapien
agggagacactccttggttgggtct

SEQ ID NO: 362720 - DNA, 25 bp, Homo sapien
tcaggaacaacaggactccggttct

SEQ ID NO: 362721 - DNA, 25 bp, Homo sapien
ccggttcttgttagcagcgggagct

SEQ ID NO: 362722 - DNA, 25 bp, Homo sapien
aggactccggttcttgttagcagcg

SEQ ID NO: 362723 - DNA, 25 bp, Homo sapien
ctctgtcagcacaggtccgggtcct

SEQ ID NO: 362724 - DNA, 25 bp, Homo sapien
ggtcctaggtagcttcgaagcatct

SEQ ID NO: 362725 - DNA, 25 bp, Homo sapien
tagcactctgtcagcacaggtccgg

SEQ ID NO: 362726 - DNA, 25 bp, Homo sapien
cacaggtccgggtcctaggtagctt

SEQ ID NO: 362727 - DNA, 25 bp, Homo sapien
caacagggacgaaaggctcctcctt

SEQ ID NO: 362728 - DNA, 25 bp, Homo sapien
ccagggaacatctctgtaactggct

SEQ ID NO: 362729 - DNA, 25 bp, Homo sapien
cacgattgaagagcttttcctgatc

SEQ ID NO: 362730 - DNA, 25 bp, Homo sapien
tccttcatcatggagacggggctct

SEQ ID NO: 362731 - DNA, 25 bp, Homo sapien
agttccagccaactccagccaagca

SEQ ID NO: 362732 - DNA, 25 bp, Homo sapien
gttccagccaactccagccaagcag

SEQ ID NO: 362733 - DNA, 25 bp, Homo sapien
ttccagccaactccagccaagcagg

SEQ ID NO: 362734 - DNA, 25 bp, Homo sapien
cagggtgcccacagtaatgctggca

SEQ ID NO: 362735 - DNA, 25 bp, Homo sapien
gaagcgtgcagataaatggctccca

SEQ ID NO: 362736 - DNA, 25 bp, Homo sapien
tgaagccctttgatggccatcagac

SEQ ID NO: 362737 - DNA, 25 bp, Homo sapien
gcagtgaccctcagtgccggaggaa

SEQ ID NO: 362738 - DNA, 25 bp, Homo sapien
cttggattttccagtcgtcatactg

SEQ ID NO: 362739 - DNA, 25 bp, Homo sapien
tccattctggacaacccctaacttc

SEQ ID NO: 362740 - DNA, 25 bp, Homo sapien
tttccagtcgtcatactggagccag

SEQ ID NO: 362741 - DNA, 25 bp, Homo sapien
agtcgtcatactggagccaggcggc

SEQ ID NO: 362742 - DNA, 25 bp, Homo sapien
ttaagaatccagtgtgaggagtaaa

SEQ ID NO: 362743 - DNA, 25 bp, Homo sapien
taagaatccagtgtgaggagtaaaa

SEQ ID NO: 362744 - DNA, 25 bp, Homo sapien
ctgggggcagcgaagggtggcattc

SEQ ID NO: 362745 - DNA, 25 bp, Homo sapien
gggcagcgaagggtggcattcagtg

SEQ ID NO: 362746 - DNA, 25 bp, Homo sapien
gatccgtggaggatgatatagatcc

SEQ ID NO: 362747 - DNA, 25 bp, Homo sapien
taacatcccattgaaatgatgggga

SEQ ID NO: 362748 - DNA, 25 bp, Homo sapien
acagaaactggctttggagagatcc

SEQ ID NO: 362749 - DNA, 25 bp, Homo sapien
gaggatgatatagatccccaagtct

SEQ ID NO: 362750 - DNA, 25 bp, Homo sapien
gcgggttaccctaatgacgattgcc

SEQ ID NO: 362751 - DNA, 25 bp, Homo sapien
aagctccagaaatctgctcgcttcg

SEQ ID NO: 362752 - DNA, 25 bp, Homo sapien
gacgattgccatttcaagctccaga

SEQ ID NO: 362753 - DNA, 25 bp, Homo sapien
tgctcagccacgtctccattcttgt

SEQ ID NO: 362754 - DNA, 25 bp, Homo sapien
agatggcagccttctgccatgagcc

SEQ ID NO: 362755 - DNA, 25 bp, Homo sapien
ggaaggcagccttctgccgtgagcc

SEQ ID NO: 362756 - DNA, 25 bp, Homo sapien
cactgatgtccggaaggcagccttc

SEQ ID NO: 362757 - DNA, 25 bp, Homo sapien
aggtctgggcactgatgtccggaac

SEQ ID NO: 362758 - DNA, 25 bp, Homo sapien
agaacagagagcttcttttccttac

SEQ ID NO: 362759 - DNA, 25 bp, Homo sapien
ctgagaacagagagcttcttttcct

SEQ ID NO: 362760 - DNA, 25 bp, Homo sapien
ggcacgtgcaccaactggacaggtg

SEQ ID NO: 362761 - DNA, 25 bp, Homo sapien
gggcacgtgcaccaactggacaggt

SEQ ID NO: 362762 - DNA, 25 bp, Homo sapien
ctggggcacgtgcaccaactggaca

SEQ ID NO: 362763 - DNA, 25 bp, Homo sapien
tggggcacgtgcaccaactggacag

SEQ ID NO: 362764 - DNA, 25 bp, Homo sapien
ggctcaagcagcagaactttaattt

SEQ ID NO: 362765 - DNA, 25 bp, Homo sapien
gctccggctgccgtaactgtcacag

SEQ ID NO: 362766 - DNA, 25 bp, Homo sapien
tccggctgccgtaactgtcacagac

SEQ ID NO: 362767 - DNA, 25 bp, Homo sapien
catctgctccggctgccgtaactgt

SEQ ID NO: 362768 - DNA, 25 bp, Homo sapien
tggccctcaacatgttctctgccca

SEQ ID NO: 362769 - DNA, 25 bp, Homo sapien
ggtggccctcaacatgttctctgcc

SEQ ID NO: 362770 - DNA, 25 bp, Homo sapien
gtggccctcaacatgttctctgccc

SEQ ID NO: 362771 - DNA, 25 bp, Homo sapien
gactttgtgtcaccactacttgtag

SEQ ID NO: 362772 - DNA, 25 bp, Homo sapien
tttgtgtcaccactacttgtagaac

SEQ ID NO: 362773 - DNA, 25 bp, Homo sapien
ttgtcttcacatacgctcacacagt

SEQ ID NO: 362774 - DNA, 25 bp, Homo sapien
ggaaacacaagccttgtcttcacat

SEQ ID NO: 362775 - DNA, 25 bp, Homo sapien
gccggttgggctgactgcattaatc

SEQ ID NO: 362776 - DNA, 25 bp, Homo sapien
gcagtgtctccgaataaatgttgaa

SEQ ID NO: 362777 - DNA, 25 bp, Homo sapien
ggctgactgcattaatctattagca

SEQ ID NO: 362778 - DNA, 25 bp, Homo sapien
aacttcctaacaagcagtaagccgg

SEQ ID NO: 362779 - DNA, 25 bp, Homo sapien
ttagatgattgccatctgcagtctg

SEQ ID NO: 362780 - DNA, 25 bp, Homo sapien
tagatgattgccatctgcagtctgt

SEQ ID NO: 362781 - DNA, 25 bp, Homo sapien
cacgtgtcgacatggtcagggaact

SEQ ID NO: 362782 - DNA, 25 bp, Homo sapien
agggaactccctgctattttcaaca

SEQ ID NO: 362783 - DNA, 25 bp, Homo sapien
tgagaactgctgtcctttcctgtag

SEQ ID NO: 362784 - DNA, 25 bp, Homo sapien
ctggagttgaataaagtcaaggcac

SEQ ID NO: 362785 - DNA, 25 bp, Homo sapien
gcaagctccctgaggactgggtaac

SEQ ID NO: 362786 - DNA, 25 bp, Homo sapien
ctccctgaggactgggtaacccctg

SEQ ID NO: 362787 - DNA, 25 bp, Homo sapien
caagctccctgaggactgggtaacc

SEQ ID NO: 362788 - DNA, 25 bp, Homo sapien
cagcaagctccctgaggactgggta

SEQ ID NO: 362789 - DNA, 25 bp, Homo sapien
gaacggcctcgccagcaggtatcaa

SEQ ID NO: 362790 - DNA, 25 bp, Homo sapien
aacacggaggagcagagatatttcc

SEQ ID NO: 362791 - DNA, 25 bp, Homo sapien
ccagcaggtatcaacacggaggagc

SEQ ID NO: 362792 - DNA, 25 bp, Homo sapien
tgggggaacggcctcgccagcaggt

SEQ ID NO: 362793 - DNA, 25 bp, Homo sapien
gctttgagaagtcgatggacacatt

SEQ ID NO: 362794 - DNA, 25 bp, Homo sapien
cggggctcttggaccagaccagaga

SEQ ID NO: 362795 - DNA, 25 bp, Homo sapien
cagagatcctgaaagccatcgggtg

SEQ ID NO: 362796 - DNA, 25 bp, Homo sapien
gagatcctgaaagccatcgggtgcc

SEQ ID NO: 362797 - DNA, 25 bp, Homo sapien
agaacaggagaagccagtatgagcc

SEQ ID NO: 362798 - DNA, 25 bp, Homo sapien
gcagagaacaggagaagccagtatg

SEQ ID NO: 362799 - DNA, 25 bp, Homo sapien
gagaacaggagaagccagtatgagc

SEQ ID NO: 362800 - DNA, 25 bp, Homo sapien
gggaacaggcagagaacaggagaag

SEQ ID NO: 362801 - DNA, 25 bp, Homo sapien
caagtccccttctggagggcttcca

SEQ ID NO: 362802 - DNA, 25 bp, Homo sapien
ggccagggagctgtccaagtcccct

SEQ ID NO: 362803 - DNA, 25 bp, Homo sapien
gagatgccttcctgaggcgcagaat

SEQ ID NO: 362804 - DNA, 25 bp, Homo sapien
gctgggcctagcactctgcagttgt

SEQ ID NO: 362805 - DNA, 25 bp, Homo sapien
ccccaagagacgctcaaggtaaact

SEQ ID NO: 362806 - DNA, 25 bp, Homo sapien
ccaagagacgctcaaggtaaactga

SEQ ID NO: 362807 - DNA, 25 bp, Homo sapien
agagacgctcaaggtaaactgaggc

SEQ ID NO: 362808 - DNA, 25 bp, Homo sapien
ctgcccccaagagacgctcaaggta

SEQ ID NO: 362809 - DNA, 25 bp, Homo sapien
cgttgggacgctcaaagtgtggctt

SEQ ID NO: 362810 - DNA, 25 bp, Homo sapien
cacaatctcagggacgttgggacgc

SEQ ID NO: 362811 - DNA, 25 bp, Homo sapien
aggctgccggttccaaggcctcaca

SEQ ID NO: 362812 - DNA, 25 bp, Homo sapien
caaagtgtggcttgtccaggtagca

SEQ ID NO: 362813 - DNA, 25 bp, Homo sapien
acgtctcaatgcacccctggccgcc

SEQ ID NO: 362814 - DNA, 25 bp, Homo sapien
ccacgtctcaatgcacccctggccg

SEQ ID NO: 362815 - DNA, 25 bp, Homo sapien
aaagcacgagctggcattttccacg

SEQ ID NO: 362816 - DNA, 25 bp, Homo sapien
ttccacgtctcaatgcacccctggc

SEQ ID NO: 362817 - DNA, 25 bp, Homo sapien
ccgtctgcctggtaatgtcggggct

SEQ ID NO: 362818 - DNA, 25 bp, Homo sapien
ctgcccgtctgcctggtaatgtcgg

SEQ ID NO: 362819 - DNA, 25 bp, Homo sapien
tctgcctggtaatgtcggggctcat

SEQ ID NO: 362820 - DNA, 25 bp, Homo sapien
tgcccgtctgcctggtaatgtcggg

SEQ ID NO: 362821 - DNA, 25 bp, Homo sapien
tcacagaaacgatgttgcgaagggg

SEQ ID NO: 362822 - DNA, 25 bp, Homo sapien
catccttgcttgtcgggatgccgac

SEQ ID NO: 362823 - DNA, 25 bp, Homo sapien
cagccatccttgcttgtcgggatgc

SEQ ID NO: 362824 - DNA, 25 bp, Homo sapien
gcttgtcgggatgccgacaacggcc

SEQ ID NO: 362825 - DNA, 25 bp, Homo sapien
cactcccatatcctcgggggaaatg

SEQ ID NO: 362826 - DNA, 25 bp, Homo sapien
ctcccatatcctcgggggaaatgga

SEQ ID NO: 362827 - DNA, 25 bp, Homo sapien
agcactcccatatcctcgggggaaa

SEQ ID NO: 362828 - DNA, 25 bp, Homo sapien
gcactcccatatcctcgggggaaat

SEQ ID NO: 362829 - DNA, 25 bp, Homo sapien
gcattactctcattgacttcatcaa

SEQ ID NO: 362830 - DNA, 25 bp, Homo sapien
tgcagcattactctcattgacttca

SEQ ID NO: 362831 - DNA, 25 bp, Homo sapien
tggaattcaggcaatcctgcagcat

SEQ ID NO: 362832 - DNA, 25 bp, Homo sapien
tactctcattgacttcatcaaagtt

SEQ ID NO: 362833 - DNA, 25 bp, Homo sapien
aggagtttgtcctatgccgtgggtc

SEQ ID NO: 362834 - DNA, 25 bp, Homo sapien
gcctggaggagtttgtcctatgccg

SEQ ID NO: 362835 - DNA, 25 bp, Homo sapien
tgccgtgggtcagtcccagctctgg

SEQ ID NO: 362836 - DNA, 25 bp, Homo sapien
tgtcctatgccgtgggtcagtccca

SEQ ID NO: 362837 - DNA, 25 bp, Homo sapien
accagggtggggctgcgtaggagtc

SEQ ID NO: 362838 - DNA, 25 bp, Homo sapien
gggctgcgtaggagtcagtgggatg

SEQ ID NO: 362839 - DNA, 25 bp, Homo sapien
gcgtaggagtcagtgggatgccacc

SEQ ID NO: 362840 - DNA, 25 bp, Homo sapien
gctgcgtaggagtcagtgggatgcc

SEQ ID NO: 362841 - DNA, 25 bp, Homo sapien
tcctgctcctccctctgtgtgccat

SEQ ID NO: 362842 - DNA, 25 bp, Homo sapien
gaggctgccagagctcctgctcctc

SEQ ID NO: 362843 - DNA, 25 bp, Homo sapien
ctctgaggctgccagagctcctgct

SEQ ID NO: 362844 - DNA, 25 bp, Homo sapien
tgctcctccctctgtgtgccatggc

SEQ ID NO: 362845 - DNA, 25 bp, Homo sapien
ggtgatttgcatgagtgtccacagc

SEQ ID NO: 362846 - DNA, 25 bp, Homo sapien
cagctcgtggtaaaaattgctttgg

SEQ ID NO: 362847 - DNA, 25 bp, Homo sapien
tgctttggctgacaacaaaccccag

SEQ ID NO: 362848 - DNA, 25 bp, Homo sapien
ctggaaaagtgaggtgatttgcatg

SEQ ID NO: 362849 - DNA, 25 bp, Homo sapien
tcaccgcggctggtcagaggccagt

SEQ ID NO: 362850 - DNA, 25 bp, Homo sapien
tgagaggccgctgaactgtgtgcag

SEQ ID NO: 362851 - DNA, 25 bp, Homo sapien
ggcagggatgtcaccgcggctggtc

SEQ ID NO: 362852 - DNA, 25 bp, Homo sapien
agaggccagttcaccgccctgaggt

SEQ ID NO: 362853 - DNA, 25 bp, Homo sapien
cccccatcctcaatttccatcttgg

SEQ ID NO: 362854 - DNA, 25 bp, Homo sapien
ccccatcctcaatttccatcttggt

SEQ ID NO: 362855 - DNA, 25 bp, Homo sapien
catcttggtctctctctccaggcct

SEQ ID NO: 362856 - DNA, 25 bp, Homo sapien
ttccatcttggtctctctctccagg

SEQ ID NO: 362857 - DNA, 25 bp, Homo sapien
acatccagaggcaagaggtacgtcc

SEQ ID NO: 362858 - DNA, 25 bp, Homo sapien
caagaggtacgtccctcatggccac

SEQ ID NO: 362859 - DNA, 25 bp, Homo sapien
gaggcaagaggtacgtccctcatgg

SEQ ID NO: 362860 - DNA, 25 bp, Homo sapien
tccagaggcaagaggtacgtccctc

SEQ ID NO: 362861 - DNA, 25 bp, Homo sapien
ctgtggcagctaccggcaggggcca

SEQ ID NO: 362862 - DNA, 25 bp, Homo sapien
tggtgctgtggcagctaccggcagg

SEQ ID NO: 362863 - DNA, 25 bp, Homo sapien
ggcagctaccggcaggggccagagc

SEQ ID NO: 362864 - DNA, 25 bp, Homo sapien
tgctgtggcagctaccggcaggggc

SEQ ID NO: 362865 - DNA, 25 bp, Homo sapien
gcaggtaaaatagattgcgatcatt

SEQ ID NO: 362866 - DNA, 25 bp, Homo sapien
cccatcctttgcttgttataggagt

SEQ ID NO: 362867 - DNA, 25 bp, Homo sapien
tgttataggagtgaacctgtcttgc

SEQ ID NO: 362868 - DNA, 25 bp, Homo sapien
cagatgatcgttgactatgcaggta

SEQ ID NO: 362869 - DNA, 25 bp, Homo sapien
ccgagctggtgaccggcgggactgg

SEQ ID NO: 362870 - DNA, 25 bp, Homo sapien
gtgcgggccagtgggcgcccgggcg

SEQ ID NO: 362871 - DNA, 25 bp, Homo sapien
ggtggtgcgggccagtgggcgcccg

SEQ ID NO: 362872 - DNA, 25 bp, Homo sapien
gggcccgagctggtgaccggcggga

SEQ ID NO: 362873 - DNA, 25 bp, Homo sapien
tttgagcgacatttgtgcctgcccc

SEQ ID NO: 362874 - DNA, 25 bp, Homo sapien
gggtttgagcgacatttgtgcctgc

SEQ ID NO: 362875 - DNA, 25 bp, Homo sapien
cgaggccaccgtgggtgcgccggcg

SEQ ID NO: 362876 - DNA, 25 bp, Homo sapien
gagctgcccaggcagacgaggccac

SEQ ID NO: 362877 - DNA, 25 bp, Homo sapien
ctcgtgtgctgggatccatatagaa

SEQ ID NO: 362878 - DNA, 25 bp, Homo sapien
tttctttctcgtgtgctgggatcca

SEQ ID NO: 362879 - DNA, 25 bp, Homo sapien
ggcccagtgagagtccggccttctt

SEQ ID NO: 362880 - DNA, 25 bp, Homo sapien
gctgggatccatatagaaggagatg

SEQ ID NO: 362881 - DNA, 25 bp, Homo sapien
taaaatgcatgctcggtggtctgcg

SEQ ID NO: 362882 - DNA, 25 bp, Homo sapien
tggtctgcgaccatcacggtgacag

SEQ ID NO: 362883 - DNA, 25 bp, Homo sapien
gcttggtttcctccgcggccggtgc

SEQ ID NO: 362884 - DNA, 25 bp, Homo sapien
gatggttggtaataagttgacttgc

SEQ ID NO: 362885 - DNA, 25 bp, Homo sapien
cacaggattttcccacgcagggacc

SEQ ID NO: 362886 - DNA, 25 bp, Homo sapien
tcacaggattttcccacgcagggac

SEQ ID NO: 362887 - DNA, 25 bp, Homo sapien
ggatctgccactcgacatgctcgga

SEQ ID NO: 362888 - DNA, 25 bp, Homo sapien
ctcggaatgaaatatgtagatcaac

SEQ ID NO: 362889 - DNA, 25 bp, Homo sapien
tagatcaacttttgtggcatgaagc

SEQ ID NO: 362890 - DNA, 25 bp, Homo sapien
ggtgacttttatgggcgtaattatg

SEQ ID NO: 362891 - DNA, 25 bp, Homo sapien
gtggtgctcctatcgcccgtgaagg

SEQ ID NO: 362892 - DNA, 25 bp, Homo sapien
atcgcccgtgaaggcccggcttact

SEQ ID NO: 362893 - DNA, 25 bp, Homo sapien
tctcccacatactccggattggaca

SEQ ID NO: 362894 - DNA, 25 bp, Homo sapien
tggacataggtgctgtggtgctcct

SEQ ID NO: 362895 - DNA, 25 bp, Homo sapien
accgcagggagagttgtgaagggca

SEQ ID NO: 362896 - DNA, 25 bp, Homo sapien
ctggtttgcaggtgcaccgcaggga

SEQ ID NO: 362897 - DNA, 25 bp, Homo sapien
ctgggactgcctgctcgtttagggc

SEQ ID NO: 362898 - DNA, 25 bp, Homo sapien
cccacttgtggtaggcgatgtcttc

SEQ ID NO: 362899 - DNA, 25 bp, Homo sapien
gggaggacgcagggaggagaagccg

SEQ ID NO: 362900 - DNA, 25 bp, Homo sapien
catcttcagggatgctccgcagcct

SEQ ID NO: 362901 - DNA, 25 bp, Homo sapien
gcccctgtttctgcactcgtagaac

SEQ ID NO: 362902 - DNA, 25 bp, Homo sapien
gcactcgtagaacagctctagaaaa

SEQ ID NO: 362903 - DNA, 25 bp, Homo sapien
gcccggcagggttcttccatcttca

SEQ ID NO: 362904 - DNA, 25 bp, Homo sapien
tgccggaaacccgtgaatcaggagc

SEQ ID NO: 362905 - DNA, 25 bp, Homo sapien
tgtggtcctggtacctgacaagctt

SEQ ID NO: 362906 - DNA, 25 bp, Homo sapien
tgggtgcatcgtgtctccaggaaag

SEQ ID NO: 362907 - DNA, 25 bp, Homo sapien
cagttaaggacgctgaagttcggag

SEQ ID NO: 362908 - DNA, 25 bp, Homo sapien
tggaatgtgcctgtgcccggagcca

SEQ ID NO: 362909 - DNA, 25 bp, Homo sapien
atatctcctctaggtgcttgctggg

SEQ ID NO: 362910 - DNA, 25 bp, Homo sapien
gctgcagttgagcccacagggccct

SEQ ID NO: 362911 - DNA, 25 bp, Homo sapien
gccctggaatgtgcctgtgcccgga

SEQ ID NO: 362912 - DNA, 25 bp, Homo sapien
ggaggcttggccgtggagggatgga

SEQ ID NO: 362913 - DNA, 25 bp, Homo sapien
cgcgggcgcacctgcactgagaaag

SEQ ID NO: 362914 - DNA, 25 bp, Homo sapien
ctgcgctcagcgactgtggaggctt

SEQ ID NO: 362915 - DNA, 25 bp, Homo sapien
tgcactgagaaagcgggctctgctg

SEQ ID NO: 362916 - DNA, 25 bp, Homo sapien
cgccacagagctgcaccgccgcttg

SEQ ID NO: 362917 - DNA, 25 bp, Homo sapien
cacagagctgcaccgccgcttggtg

SEQ ID NO: 362918 - DNA, 25 bp, Homo sapien
aggagtgcccgtgttgtcgagcccc

SEQ ID NO: 362919 - DNA, 25 bp, Homo sapien
ccccaggagtgcccgtgttgtcgag

SEQ ID NO: 362920 - DNA, 25 bp, Homo sapien
agaccctggcggactcctaaattgg

SEQ ID NO: 362921 - DNA, 25 bp, Homo sapien
gccagataatcggaggcaaagccga

SEQ ID NO: 362922 - DNA, 25 bp, Homo sapien
gcaaagccgataccctaataggaca

SEQ ID NO: 362923 - DNA, 25 bp, Homo sapien
gctgacctgccgagtaattgccatt

SEQ ID NO: 362924 - DNA, 25 bp, Homo sapien
aggtcggtgccacccgacagggcct

SEQ ID NO: 362925 - DNA, 25 bp, Homo sapien
acgaggaaggtatgctgtgctgagc

SEQ ID NO: 362926 - DNA, 25 bp, Homo sapien
tcaggtggaaatcgggaaggacgag

SEQ ID NO: 362927 - DNA, 25 bp, Homo sapien
cagggcctgcccacgggaacagagc

SEQ ID NO: 362928 - DNA, 25 bp, Homo sapien
agcaatgtcgctggagttccagggc

SEQ ID NO: 362929 - DNA, 25 bp, Homo sapien
ccagcaatgtcgctggagttccagg

SEQ ID NO: 362930 - DNA, 25 bp, Homo sapien
cagcaatgtcgctggagttccaggg

SEQ ID NO: 362931 - DNA, 25 bp, Homo sapien
tccagcaatgtcgctggagttccag

SEQ ID NO: 362932 - DNA, 25 bp, Homo sapien
ttaatagccgcaggaaggccacagg

SEQ ID NO: 362933 - DNA, 25 bp, Homo sapien
tcaggagagggcttaatagccgcag

SEQ ID NO: 362934 - DNA, 25 bp, Homo sapien
gcttaatagccgcaggaaggccaca

SEQ ID NO: 362935 - DNA, 25 bp, Homo sapien
aatttcaggagagggcttaatagcc

SEQ ID NO: 362936 - DNA, 25 bp, Homo sapien
gatacgtcggctgagaactgggtaa

SEQ ID NO: 362937 - DNA, 25 bp, Homo sapien
gaaacttcgaagtcccagaacctgc

SEQ ID NO: 362938 - DNA, 25 bp, Homo sapien
ccccaggacgtgatacgtcggctga

SEQ ID NO: 362939 - DNA, 25 bp, Homo sapien
aactgggtaacaaggagccagatgg

SEQ ID NO: 362940 - DNA, 25 bp, Homo sapien
gtgaggctccagacctgggccaaac

SEQ ID NO: 362941 - DNA, 25 bp, Homo sapien
acaggtcctggtagcagctctctgt

SEQ ID NO: 362942 - DNA, 25 bp, Homo sapien
gctctctgtgtggacgtgaggctcc

SEQ ID NO: 362943 - DNA, 25 bp, Homo sapien
aagccggccaggtaacacaggtcct

SEQ ID NO: 362944 - DNA, 25 bp, Homo sapien
gaaaatggggatcctgggctgagga

SEQ ID NO: 362945 - DNA, 25 bp, Homo sapien
aaatggggatcctgggctgaggaac

SEQ ID NO: 362946 - DNA, 25 bp, Homo sapien
caaaggaaaatggggatcctgggct

SEQ ID NO: 362947 - DNA, 25 bp, Homo sapien
aggaaaatggggatcctgggctgag

SEQ ID NO: 362948 - DNA, 25 bp, Homo sapien
ctggagggcccgtaggacccagact

SEQ ID NO: 362949 - DNA, 25 bp, Homo sapien
cagggacttggagaccctccccatt

SEQ ID NO: 362950 - DNA, 25 bp, Homo sapien
attcccatgctttctggagggcccg

SEQ ID NO: 362951 - DNA, 25 bp, Homo sapien
cctttggagcatcgtgcagggactt

SEQ ID NO: 362952 - DNA, 25 bp, Homo sapien
aactcacagttcagcctcggccggc

SEQ ID NO: 362953 - DNA, 25 bp, Homo sapien
acagttcagcctcggccggctgctg

SEQ ID NO: 362954 - DNA, 25 bp, Homo sapien
ttttccttgtcccaggtgtgaggag

SEQ ID NO: 362955 - DNA, 25 bp, Homo sapien
agcctcggccggctgctgttttcct

SEQ ID NO: 362956 - DNA, 25 bp, Homo sapien
gggcatccgggcttccaagataact

SEQ ID NO: 362957 - DNA, 25 bp, Homo sapien
cctggagaggcatgggtgatcccct

SEQ ID NO: 362958 - DNA, 25 bp, Homo sapien
tgacatctgacaaggcagccgtttg

SEQ ID NO: 362959 - DNA, 25 bp, Homo sapien
tcacggcaatgaagcaggcccgagt

SEQ ID NO: 362960 - DNA, 25 bp, Homo sapien
cttggagaaattgttgagttctggc

SEQ ID NO: 362961 - DNA, 25 bp, Homo sapien
tctggacttgctgtgtccctgcgtg

SEQ ID NO: 362962 - DNA, 25 bp, Homo sapien
gctgttaccacgatctaggcgaggc

SEQ ID NO: 362963 - DNA, 25 bp, Homo sapien
gagggtgcatgttggtctcagtccc

SEQ ID NO: 362964 - DNA, 25 bp, Homo sapien
agagccctgagggatcctgaagtaa

SEQ ID NO: 362965 - DNA, 25 bp, Homo sapien
tgagggatcctgaagtaagccagac

SEQ ID NO: 362966 - DNA, 25 bp, Homo sapien
gcctctgaggtgagagagccctgag

SEQ ID NO: 362967 - DNA, 25 bp, Homo sapien
gatcctgaagtaagccagactcggg

SEQ ID NO: 362968 - DNA, 25 bp, Homo sapien
taatgcctagtggatagcgcagcac

SEQ ID NO: 362969 - DNA, 25 bp, Homo sapien
gtcaacaggcggaaggactctcagg

SEQ ID NO: 362970 - DNA, 25 bp, Homo sapien
tatttggctgctccctgacctgagt

SEQ ID NO: 362971 - DNA, 25 bp, Homo sapien
tcccggatcatgaggttctaagcga

SEQ ID NO: 362972 - DNA, 25 bp, Homo sapien
aactaggttgggtgttatggagcat

SEQ ID NO: 362973 - DNA, 25 bp, Homo sapien
tatggagcatcctgtgttggtgctg

SEQ ID NO: 362974 - DNA, 25 bp, Homo sapien
aatctctttggaactaggttgggtg

SEQ ID NO: 362975 - DNA, 25 bp, Homo sapien
tgggtgttatggagcatcctgtgtt

SEQ ID NO: 362976 - DNA, 25 bp, Homo sapien
agggccgacacccagaaatcatcca

SEQ ID NO: 362977 - DNA, 25 bp, Homo sapien
tcatccaggagcagtaccaggtggg

SEQ ID NO: 362978 - DNA, 25 bp, Homo sapien
taccaggtgggctctagggtgtgga

SEQ ID NO: 362979 - DNA, 25 bp, Homo sapien
gccgacacccagaaatcatccagga

SEQ ID NO: 362980 - DNA, 25 bp, Homo sapien
gcccgcggctgtgggatgagagata

SEQ ID NO: 362981 - DNA, 25 bp, Homo sapien
agggatgtgcatccagcgagctttg

SEQ ID NO: 362982 - DNA, 25 bp, Homo sapien
tacggatgatgtggactgctgagca

SEQ ID NO: 362983 - DNA, 25 bp, Homo sapien
atgagagatacggatgatgtggact

SEQ ID NO: 362984 - DNA, 25 bp, Homo sapien
tcaagagtgcgtgagggcatggcct

SEQ ID NO: 362985 - DNA, 25 bp, Homo sapien
ctaaaaggatcaagagtgcgtgagg

SEQ ID NO: 362986 - DNA, 25 bp, Homo sapien
ttcccatctgtgagggtccgcagga

SEQ ID NO: 362987 - DNA, 25 bp, Homo sapien
tcccatctgtgagggtccgcaggat

SEQ ID NO: 362988 - DNA, 25 bp, Homo sapien
tcactaggccatccgctgtttcagg

SEQ ID NO: 362989 - DNA, 25 bp, Homo sapien
gatggccacaagctgttactaccga

SEQ ID NO: 362990 - DNA, 25 bp, Homo sapien
tgattcccgaagtcaccggctctgg

SEQ ID NO: 362991 - DNA, 25 bp, Homo sapien
ctgttttaatccacccaaagaggag

SEQ ID NO: 362992 - DNA, 25 bp, Homo sapien
aagatgcggcgggcctgggagctca

SEQ ID NO: 362993 - DNA, 25 bp, Homo sapien
agatgcggcgggcctgggagctcac

SEQ ID NO: 362994 - DNA, 25 bp, Homo sapien
gaagatgcggcgggcctgggagctc

SEQ ID NO: 362995 - DNA, 25 bp, Homo sapien
ggaagatgcggcgggcctgggagct

SEQ ID NO: 362996 - DNA, 25 bp, Homo sapien
atcgagggggtccctgagttgttca

SEQ ID NO: 362997 - DNA, 25 bp, Homo sapien
gcctcacgccgtggatcgagggggt

SEQ ID NO: 362998 - DNA, 25 bp, Homo sapien
aggggaatgttgctttggaacaatc

SEQ ID NO: 362999 - DNA, 25 bp, Homo sapien
ggaatgttgctttggaacaatcagg

SEQ ID NO: 363000 - DNA, 25 bp, Homo sapien
agaaggctccaggagttgagtgctt

SEQ ID NO: 363001 - DNA, 25 bp, Homo sapien
ccaggagttgagtgcttggctccag

SEQ ID NO: 363002 - DNA, 25 bp, Homo sapien
catctggccgggataaggtgtaggc

SEQ ID NO: 363003 - DNA, 25 bp, Homo sapien
gcctgggcagatggcgcatctggcc

SEQ ID NO: 363004 - DNA, 25 bp, Homo sapien
cgctccagaactccttgatatttgg

SEQ ID NO: 363005 - DNA, 25 bp, Homo sapien
gcttgcaagaactggaggagctgca

SEQ ID NO: 363006 - DNA, 25 bp, Homo sapien
gtgatggcggctcgctggttttcca

SEQ ID NO: 363007 - DNA, 25 bp, Homo sapien
gcccatcaagaattccgctccagaa

SEQ ID NO: 363008 - DNA, 25 bp, Homo sapien
ctgtgggccagctgcctttgcttgc

SEQ ID NO: 363009 - DNA, 25 bp, Homo sapien
tgctgtcacccaggagttgggctct

SEQ ID NO: 363010 - DNA, 25 bp, Homo sapien
tcttctgctgtggagaagggtccac

SEQ ID NO: 363011 - DNA, 25 bp, Homo sapien
ctttgcttgctggtgtcctggtgcc

SEQ ID NO: 363012 - DNA, 25 bp, Homo sapien
aggtgaccccgtcatcagcaaggcc

SEQ ID NO: 363013 - DNA, 25 bp, Homo sapien
cagggaagaggggaccttgtccgat

SEQ ID NO: 363014 - DNA, 25 bp, Homo sapien
tgcagccaggtgaccccgtcatcag

SEQ ID NO: 363015 - DNA, 25 bp, Homo sapien
cacgggcaccccgtggtctgtggcc

SEQ ID NO: 363016 - DNA, 25 bp, Homo sapien
tgggcacagacccgcctgcttggtc

SEQ ID NO: 363017 - DNA, 25 bp, Homo sapien
ctcgaatgcggagacatggtccagg

SEQ ID NO: 363018 - DNA, 25 bp, Homo sapien
tccacagtatcttccgggcgtggcc

SEQ ID NO: 363019 - DNA, 25 bp, Homo sapien
ccacagtatcttccgggcgtggcca

SEQ ID NO: 363020 - DNA, 25 bp, Homo sapien
cgtggccactgggagactcgaatgc

SEQ ID NO: 363021 - DNA, 25 bp, Homo sapien
tctgctctgagaggcgacatggctg

SEQ ID NO: 363022 - DNA, 25 bp, Homo sapien
caagccttgaaagtgggagaatcag

SEQ ID NO: 363023 - DNA, 25 bp, Homo sapien
gcgacatggctgatggaggaaggtg

SEQ ID NO: 363024 - DNA, 25 bp, Homo sapien
ccgtcaccgagagggcttttctggg

SEQ ID NO: 363025 - DNA, 25 bp, Homo sapien
ctgagtgtctgaaggcgggtggcgt

SEQ ID NO: 363026 - DNA, 25 bp, Homo sapien
gctggtgttggccgcatatctgagt

SEQ ID NO: 363027 - DNA, 25 bp, Homo sapien
gtgttggccgcatatctgagtgtct

SEQ ID NO: 363028 - DNA, 25 bp, Homo sapien
ggcgggtggcgtgtggggctcctct

SEQ ID NO: 363029 - DNA, 25 bp, Homo sapien
aaaccgacgatgctgtagaaggagc

SEQ ID NO: 363030 - DNA, 25 bp, Homo sapien
cttgtccttcctgaaaccgacgatg

SEQ ID NO: 363031 - DNA, 25 bp, Homo sapien
tcctgaaaccgacgatgctgtagaa

SEQ ID NO: 363032 - DNA, 25 bp, Homo sapien
tccttcctgaaaccgacgatgctgt

SEQ ID NO: 363033 - DNA, 25 bp, Homo sapien
tcacgctgtgggcagctggacacat

SEQ ID NO: 363034 - DNA, 25 bp, Homo sapien
cacgctgtgggcagctggacacatg

SEQ ID NO: 363035 - DNA, 25 bp, Homo sapien
ggcgctggctgcaggggatgggaag

SEQ ID NO: 363036 - DNA, 25 bp, Homo sapien
gcgctggctgcaggggatgggaagt

SEQ ID NO: 363037 - DNA, 25 bp, Homo sapien
ctggctgcaggggatgggaagtggc

SEQ ID NO: 363038 - DNA, 25 bp, Homo sapien
gctgcaggggatgggaagtggccct

SEQ ID NO: 363039 - DNA, 25 bp, Homo sapien
tgtggtttcatgatttacgcctggg

SEQ ID NO: 363040 - DNA, 25 bp, Homo sapien
ggaagggcacttgcgttgtctccag

SEQ ID NO: 363041 - DNA, 25 bp, Homo sapien
tcgggtgggaacatcttgaattcgc

SEQ ID NO: 363042 - DNA, 25 bp, Homo sapien
caggtttcgctgttccacttgtgga

SEQ ID NO: 363043 - DNA, 25 bp, Homo sapien
ttctctagatctccttccactgtcc

SEQ ID NO: 363044 - DNA, 25 bp, Homo sapien
cacgaagcccattgctttttgcccc

SEQ ID NO: 363045 - DNA, 25 bp, Homo sapien
ccttctctagatctccttccactgt

SEQ ID NO: 363046 - DNA, 25 bp, Homo sapien
ctccccccacgaagcccattgcttt

SEQ ID NO: 363047 - DNA, 25 bp, Homo sapien
atcctcttgtgctcacggccagggc

SEQ ID NO: 363048 - DNA, 25 bp, Homo sapien
gcagagcatcctcttgtgctcacgg

SEQ ID NO: 363049 - DNA, 25 bp, Homo sapien
agcatcctcttgtgctcacggccag

SEQ ID NO: 363050 - DNA, 25 bp, Homo sapien
ggatgagggcagacgagggcagagc

SEQ ID NO: 363051 - DNA, 25 bp, Homo sapien
tggaagccactgtgcgttgccatgg

SEQ ID NO: 363052 - DNA, 25 bp, Homo sapien
tgtgtgcatggtgcccgtggaagcc

SEQ ID NO: 363053 - DNA, 25 bp, Homo sapien
ggcccagtctgctgtcgttgcattg

SEQ ID NO: 363054 - DNA, 25 bp, Homo sapien
gctgtcgttgcattgctgatcctgg

SEQ ID NO: 363055 - DNA, 25 bp, Homo sapien
tcgtcaagtggtcatggaagtgcat

SEQ ID NO: 363056 - DNA, 25 bp, Homo sapien
ccgggctcgtcaagtggtcatggaa

SEQ ID NO: 363057 - DNA, 25 bp, Homo sapien
gggccgggctcgtcaagtggtcatg

SEQ ID NO: 363058 - DNA, 25 bp, Homo sapien
gctcgtcaagtggtcatggaagtgc

SEQ ID NO: 363059 - DNA, 25 bp, Homo sapien
cttgcttgggttccgggtactggtg

SEQ ID NO: 363060 - DNA, 25 bp, Homo sapien
ttgcttgggttccgggtactggtga

SEQ ID NO: 363061 - DNA, 25 bp, Homo sapien
tgcttgggttccgggtactggtgag

SEQ ID NO: 363062 - DNA, 25 bp, Homo sapien
tccccagcatgcggctggcgtgccc

SEQ ID NO: 363063 - DNA, 25 bp, Homo sapien
cctgtccccagcatgcggctggcgt

SEQ ID NO: 363064 - DNA, 25 bp, Homo sapien
tgtccccagcatgcggctggcgtgc

SEQ ID NO: 363065 - DNA, 25 bp, Homo sapien
cccagcatgcggctggcgtgccctc

SEQ ID NO: 363066 - DNA, 25 bp, Homo sapien
tctggtggagtgtaacctagatcag

SEQ ID NO: 363067 - DNA, 25 bp, Homo sapien
catatctccaagtacattcccttga

SEQ ID NO: 363068 - DNA, 25 bp, Homo sapien
ggagtgtaacctagatcagcttttt

SEQ ID NO: 363069 - DNA, 25 bp, Homo sapien
tagagagtcaaatgtgctaaatttt

SEQ ID NO: 363070 - DNA, 25 bp, Homo sapien
tttcagaatttcaaatgatatgcac

SEQ ID NO: 363071 - DNA, 25 bp, Homo sapien
aatattcccttggtgaacgtagcac

SEQ ID NO: 363072 - DNA, 25 bp, Homo sapien
cagaaggatcttccaattgtagttc

SEQ ID NO: 363073 - DNA, 25 bp, Homo sapien
tcccttggtgaacgtagcacacttt

SEQ ID NO: 363074 - DNA, 25 bp, Homo sapien
gggtccctcgcggcccagtgcgcat

SEQ ID NO: 363075 - DNA, 25 bp, Homo sapien
ggggtccctcgcggcccagtgcgca

SEQ ID NO: 363076 - DNA, 25 bp, Homo sapien
cggggtccctcgcggcccagtgcgc

SEQ ID NO: 363077 - DNA, 25 bp, Homo sapien
ccggggtccctcgcggcccagtgcg

SEQ ID NO: 363078 - DNA, 25 bp, Homo sapien
ctgtaggcgcggcagccaccggcac

SEQ ID NO: 363079 - DNA, 25 bp, Homo sapien
accggcaccgacaccggcagcggcg

SEQ ID NO: 363080 - DNA, 25 bp, Homo sapien
ccggcaccgacaccggcagcggcgg

SEQ ID NO: 363081 - DNA, 25 bp, Homo sapien
ctgtgacctccacgggcctggtgtc

SEQ ID NO: 363082 - DNA, 25 bp, Homo sapien
aattaatgagccgccggaggcctgg

SEQ ID NO: 363083 - DNA, 25 bp, Homo sapien
ctaattaatgagccgccggaggcct

SEQ ID NO: 363084 - DNA, 25 bp, Homo sapien
gtgacctccacgggcctggtgtcca

SEQ ID NO: 363085 - DNA, 25 bp, Homo sapien
tctgctggtgtcgcgtgtcaggact

SEQ ID NO: 363086 - DNA, 25 bp, Homo sapien
ggcttggcctgccagcccgggcttg

SEQ ID NO: 363087 - DNA, 25 bp, Homo sapien
caggagtgggtggttctgccatagg

SEQ ID NO: 363088 - DNA, 25 bp, Homo sapien
ggcaagcccgcgagggctgtcctct

SEQ ID NO: 363089 - DNA, 25 bp, Homo sapien
ctgggcctgtttgtgttcgcgctgc

SEQ ID NO: 363090 - DNA, 25 bp, Homo sapien
cggaaagggcgtgtatgtgaaaatt

SEQ ID NO: 363091 - DNA, 25 bp, Homo sapien
gctgatctcgaagtctctgggggat

SEQ ID NO: 363092 - DNA, 25 bp, Homo sapien
tgtgttcgcgctgcaagttctctgc

SEQ ID NO: 363093 - DNA, 25 bp, Homo sapien
tgaagtgaagttccactgactttga

SEQ ID NO: 363094 - DNA, 25 bp, Homo sapien
gaagtgaagttccactgactttgaa

SEQ ID NO: 363095 - DNA, 25 bp, Homo sapien
gattgcgggtcccagtgtttgcgca

SEQ ID NO: 363096 - DNA, 25 bp, Homo sapien
tacgctgagggcacaggtacctttg

SEQ ID NO: 363097 - DNA, 25 bp, Homo sapien
tgttgtggaagacggcgcagtcata

SEQ ID NO: 363098 - DNA, 25 bp, Homo sapien
tccttgctgagacggccttttggcc

SEQ ID NO: 363099 - DNA, 25 bp, Homo sapien
gggccgcagcgtggggtccggcact

SEQ ID NO: 363100 - DNA, 25 bp, Homo sapien
gtcatccttaggacacgctgaccct

SEQ ID NO: 363101 - DNA, 25 bp, Homo sapien
ttgtcatccttaggacacgctgacc

SEQ ID NO: 363102 - DNA, 25 bp, Homo sapien
gccttgtcatccttaggacacgctg

SEQ ID NO: 363103 - DNA, 25 bp, Homo sapien
gagtcaacggattcaacttccattg

SEQ ID NO: 363104 - DNA, 25 bp, Homo sapien
gctctttcggaaatgaggcgtcctc

SEQ ID NO: 363105 - DNA, 25 bp, Homo sapien
ctttcagaaccgctgtggcgtgcct

SEQ ID NO: 363106 - DNA, 25 bp, Homo sapien
cgggcctcgattccagaagcgcttt

SEQ ID NO: 363107 - DNA, 25 bp, Homo sapien
acccagtcttggcatggggctgccc

SEQ ID NO: 363108 - DNA, 25 bp, Homo sapien
acccctgcacccagtcttggcatgg

SEQ ID NO: 363109 - DNA, 25 bp, Homo sapien
tgccccggccgccaggctccgagct

SEQ ID NO: 363110 - DNA, 25 bp, Homo sapien
caggctccgagcttggagctggctg

SEQ ID NO: 363111 - DNA, 25 bp, Homo sapien
aagacaggaaagtctgcagtaagag

SEQ ID NO: 363112 - DNA, 25 bp, Homo sapien
tctgcagtaagagtcttggtacagt

SEQ ID NO: 363113 - DNA, 25 bp, Homo sapien
cagtgaaggatgtgttgtctccgtc

SEQ ID NO: 363114 - DNA, 25 bp, Homo sapien
tggacctcccaagttggctcctccc

SEQ ID NO: 363115 - DNA, 25 bp, Homo sapien
ccaggtctgctaaggagggcataga

SEQ ID NO: 363116 - DNA, 25 bp, Homo sapien
tctgcaggtacccaggtgccctgtg

SEQ ID NO: 363117 - DNA, 25 bp, Homo sapien
catagacgggtttgctccctgtgca

SEQ ID NO: 363118 - DNA, 25 bp, Homo sapien
atgtgctgttgagctggacgagctt

SEQ ID NO: 363119 - DNA, 25 bp, Homo sapien
cagcggctcccctcgaggtggactc

SEQ ID NO: 363120 - DNA, 25 bp, Homo sapien
tcgaggtggactccacttcagcaat

SEQ ID NO: 363121 - DNA, 25 bp, Homo sapien
ccacttcagcaatgcttgcttgagg

SEQ ID NO: 363122 - DNA, 25 bp, Homo sapien
acttcagcaatgcttgcttgagggc

SEQ ID NO: 363123 - DNA, 25 bp, Homo sapien
cgctgttgtgtccacaactttccag

SEQ ID NO: 363124 - DNA, 25 bp, Homo sapien
atgaccaggtgtgcgctgttgtgtc

SEQ ID NO: 363125 - DNA, 25 bp, Homo sapien
cgtcagcggcgtgtgatgaccaggt

SEQ ID NO: 363126 - DNA, 25 bp, Homo sapien
tcattgcctttgttgagtcgtcagc

SEQ ID NO: 363127 - DNA, 25 bp, Homo sapien
gagtgccgcttccagaacaatgaca

SEQ ID NO: 363128 - DNA, 25 bp, Homo sapien
cagtgaggcgctaatgatggaagtc

SEQ ID NO: 363129 - DNA, 25 bp, Homo sapien
tacacaggttcacgggataattggt

SEQ ID NO: 363130 - DNA, 25 bp, Homo sapien
aatgacagcgtccacgtcttcaccg

SEQ ID NO: 363131 - DNA, 25 bp, Homo sapien
agcccctgctgcctcattacccaga

SEQ ID NO: 363132 - DNA, 25 bp, Homo sapien
gagctcttggaccagagcccctgct

SEQ ID NO: 363133 - DNA, 25 bp, Homo sapien
gctgcctcattacccagatgcacag

SEQ ID NO: 363134 - DNA, 25 bp, Homo sapien
acagccccggcgtcacaccggcctc

SEQ ID NO: 363135 - DNA, 25 bp, Homo sapien
tcctcagttccactagacggctgca

SEQ ID NO: 363136 - DNA, 25 bp, Homo sapien
cactagacggctgcaggcgtgcact

SEQ ID NO: 363137 - DNA, 25 bp, Homo sapien
agcatcctcagttccactagacggc

SEQ ID NO: 363138 - DNA, 25 bp, Homo sapien
agttccactagacggctgcaggcgt

SEQ ID NO: 363139 - DNA, 25 bp, Homo sapien
agaggttgacgtgtgctcgggcagc

SEQ ID NO: 363140 - DNA, 25 bp, Homo sapien
aggttgacgtgtgctcgggcagcac

SEQ ID NO: 363141 - DNA, 25 bp, Homo sapien
gaggttgacgtgtgctcgggcagca

SEQ ID NO: 363142 - DNA, 25 bp, Homo sapien
gcaggcgtagctggtggagggcaca

SEQ ID NO: 363143 - DNA, 25 bp, Homo sapien
ccaggcgtcactgcgcagcgcattt

SEQ ID NO: 363144 - DNA, 25 bp, Homo sapien
cgtcactgcgcagcgcatttcaggg

SEQ ID NO: 363145 - DNA, 25 bp, Homo sapien
tgtcttcccaggcgtcactgcgcag

SEQ ID NO: 363146 - DNA, 25 bp, Homo sapien
tctgtcttcccaggcgtcactgcgc

SEQ ID NO: 363147 - DNA, 25 bp, Homo sapien
tgtgtctgcaggacatattcccagg

SEQ ID NO: 363148 - DNA, 25 bp, Homo sapien
tgtctgcaggacatattcccaggcc

SEQ ID NO: 363149 - DNA, 25 bp, Homo sapien
tcctgtgtctgcaggacatattccc

SEQ ID NO: 363150 - DNA, 25 bp, Homo sapien
ctgcaggacatattcccaggcctct

SEQ ID NO: 363151 - DNA, 25 bp, Homo sapien
gctccgagtggaggtgaggccttct

SEQ ID NO: 363152 - DNA, 25 bp, Homo sapien
ccctggaaattgctgttctgtcctt

SEQ ID NO: 363153 - DNA, 25 bp, Homo sapien
tgtgggcctgtgtggatcgctccga

SEQ ID NO: 363154 - DNA, 25 bp, Homo sapien
gccttctgttgtggggagacgctcc

SEQ ID NO: 363155 - DNA, 25 bp, Homo sapien
gttgctggcgttgctcacaacttcg

SEQ ID NO: 363156 - DNA, 25 bp, Homo sapien
acaacttcgtccttgagagccactc

SEQ ID NO: 363157 - DNA, 25 bp, Homo sapien
gcgttgctcacaacttcgtccttga

SEQ ID NO: 363158 - DNA, 25 bp, Homo sapien
gtgccagtccagttgctggcgttgc

SEQ ID NO: 363159 - DNA, 25 bp, Homo sapien
tctgggaattttgccggatgctttc

SEQ ID NO: 363160 - DNA, 25 bp, Homo sapien
ggaattttgccggatgctttctcca

SEQ ID NO: 363161 - DNA, 25 bp, Homo sapien
ggctctgggaattttgccggatgct

SEQ ID NO: 363162 - DNA, 25 bp, Homo sapien
gaattttgccggatgctttctccat

SEQ ID NO: 363163 - DNA, 25 bp, Homo sapien
tcgctaactgggagccctcggaggc

SEQ ID NO: 363164 - DNA, 25 bp, Homo sapien
caggccaacccagcggaaagtcggt

SEQ ID NO: 363165 - DNA, 25 bp, Homo sapien
atgccgtcccctcgcacacgcgtgt

SEQ ID NO: 363166 - DNA, 25 bp, Homo sapien
gcacacggcctcgctaactgggagc

SEQ ID NO: 363167 - DNA, 25 bp, Homo sapien
cagcatggctttgacgcagtaaccg

SEQ ID NO: 363168 - DNA, 25 bp, Homo sapien
caacgtaagaacgtgtgctcgggac

SEQ ID NO: 363169 - DNA, 25 bp, Homo sapien
tggtagtggaagtccaagttcccgc

SEQ ID NO: 363170 - DNA, 25 bp, Homo sapien
taaccgctgttatccagagagaagc

SEQ ID NO: 363171 - DNA, 25 bp, Homo sapien
ctcagcaggcccttatgcactgggc

SEQ ID NO: 363172 - DNA, 25 bp, Homo sapien
gacacgggcactccccagggttgag

SEQ ID NO: 363173 - DNA, 25 bp, Homo sapien
tggtgcccactagagtcatccagtg

SEQ ID NO: 363174 - DNA, 25 bp, Homo sapien
cagtctgagccgtgttgggtgttgg

SEQ ID NO: 363175 - DNA, 25 bp, Homo sapien
ttcagggcagatttgggcagcactg

SEQ ID NO: 363176 - DNA, 25 bp, Homo sapien
agcactggctgagggacaagctcca

SEQ ID NO: 363177 - DNA, 25 bp, Homo sapien
cgttcagggcagatttgggcagcac

SEQ ID NO: 363178 - DNA, 25 bp, Homo sapien
gggcagcactggctgagggacaagc

SEQ ID NO: 363179 - DNA, 25 bp, Homo sapien
gggttttcatcttcacctggagcac

SEQ ID NO: 363180 - DNA, 25 bp, Homo sapien
gagcacgggcactgtctttatttgt

SEQ ID NO: 363181 - DNA, 25 bp, Homo sapien
ctggagcacgggcactgtctttatt

SEQ ID NO: 363182 - DNA, 25 bp, Homo sapien
ttttcatcttcacctggagcacggg

SEQ ID NO: 363183 - DNA, 25 bp, Homo sapien
acgctgaggccgtgggtttggcatc

SEQ ID NO: 363184 - DNA, 25 bp, Homo sapien
ccctggccacgtacaggagtctgga

SEQ ID NO: 363185 - DNA, 25 bp, Homo sapien
ggttggcagtagacgcgcagcctta

SEQ ID NO: 363186 - DNA, 25 bp, Homo sapien
gcttcacgtgtggtttagagtccag

SEQ ID NO: 363187 - DNA, 25 bp, Homo sapien
gggaccacactgatggcagggccat

SEQ ID NO: 363188 - DNA, 25 bp, Homo sapien
gatggcagggccattggaccctggg

SEQ ID NO: 363189 - DNA, 25 bp, Homo sapien
acactgatggcagggccattggacc

SEQ ID NO: 363190 - DNA, 25 bp, Homo sapien
ccacactgatggcagggccattgga

SEQ ID NO: 363191 - DNA, 25 bp, Homo sapien
ctcaccaaatcatcgaggccctgat

SEQ ID NO: 363192 - DNA, 25 bp, Homo sapien
agagctcacaggagaccgcctgctg

SEQ ID NO: 363193 - DNA, 25 bp, Homo sapien
cactggccacccagcgccatccagg

SEQ ID NO: 363194 - DNA, 25 bp, Homo sapien
gctgttcatgggcagcccttcctgc

SEQ ID NO: 363195 - DNA, 25 bp, Homo sapien
gccactgcatcacgcgaccgtggtg

SEQ ID NO: 363196 - DNA, 25 bp, Homo sapien
ggctgtcaggacacatacatctccg

SEQ ID NO: 363197 - DNA, 25 bp, Homo sapien
gctgccacccgcggcctttttgtta

SEQ ID NO: 363198 - DNA, 25 bp, Homo sapien
ggtccgtgctttgtggcacagaagc

SEQ ID NO: 363199 - DNA, 25 bp, Homo sapien
ggatccagatggggttggagatgcc

SEQ ID NO: 363200 - DNA, 25 bp, Homo sapien
tccagatggggttggagatgccctg

SEQ ID NO: 363201 - DNA, 25 bp, Homo sapien
tcaggcagcgtgtggtggatctggt

SEQ ID NO: 363202 - DNA, 25 bp, Homo sapien
ggtctgcgggcccagagctgagtca

SEQ ID NO: 363203 - DNA, 25 bp, Homo sapien
gatctggtagtagctggatgcatca

SEQ ID NO: 363204 - DNA, 25 bp, Homo sapien
agtagctggatgcatcagtgtggca

SEQ ID NO: 363205 - DNA, 25 bp, Homo sapien
tcattgtgtactgggcatggttgtc

SEQ ID NO: 363206 - DNA, 25 bp, Homo sapien
cattgtgtactgggcatggttgtca

SEQ ID NO: 363207 - DNA, 25 bp, Homo sapien
gtcattgtgtactgggcatggttgt

SEQ ID NO: 363208 - DNA, 25 bp, Homo sapien
tgtcattgtgtactgggcatggttg

SEQ ID NO: 363209 - DNA, 25 bp, Homo sapien
tgttcttaacgcagctgtggcctca

SEQ ID NO: 363210 - DNA, 25 bp, Homo sapien
aagcaggtcccctgagcgctctgag

SEQ ID NO: 363211 - DNA, 25 bp, Homo sapien
acgtgaatgttcttaacgcagctgt

SEQ ID NO: 363212 - DNA, 25 bp, Homo sapien
caagcaggtcccctgagcgctctga

SEQ ID NO: 363213 - DNA, 25 bp, Homo sapien
tgaacaaagccagtgaaccagcagg

SEQ ID NO: 363214 - DNA, 25 bp, Homo sapien
ttttcagggagacccgatgatgaac

SEQ ID NO: 363215 - DNA, 25 bp, Homo sapien
gggagacccgatgatgaacaaagcc

SEQ ID NO: 363216 - DNA, 25 bp, Homo sapien
aatgcctggttgaagcaggttttca

SEQ ID NO: 363217 - DNA, 25 bp, Homo sapien
ccacttccacctccgaaactcagcc

SEQ ID NO: 363218 - DNA, 25 bp, Homo sapien
ttccacctccgaaactcagccccac

SEQ ID NO: 363219 - DNA, 25 bp, Homo sapien
gggtctgcctgatgccagaggacct

SEQ ID NO: 363220 - DNA, 25 bp, Homo sapien
gaggaccttgagctgctcccgtcca

SEQ ID NO: 363221 - DNA, 25 bp, Homo sapien
tctccgagggccctgctgagggcgc

SEQ ID NO: 363222 - DNA, 25 bp, Homo sapien
tgagggcgcagcgccttctggaccc

SEQ ID NO: 363223 - DNA, 25 bp, Homo sapien
gacacccggggaccttgatggtctc

SEQ ID NO: 363224 - DNA, 25 bp, Homo sapien
gcggcggaggatccagcattcttcc

SEQ ID NO: 363225 - DNA, 25 bp, Homo sapien
ccagccaggaggctgagtccaagac

SEQ ID NO: 363226 - DNA, 25 bp, Homo sapien
aggaggcagagaggctggacctcat

SEQ ID NO: 363227 - DNA, 25 bp, Homo sapien
gaggctgagtccaagacaggaggca

SEQ ID NO: 363228 - DNA, 25 bp, Homo sapien
ggctgagtccaagacaggaggcaga

SEQ ID NO: 363229 - DNA, 25 bp, Homo sapien
gtagtccacactgcagttggggtca

SEQ ID NO: 363230 - DNA, 25 bp, Homo sapien
tgtgtgtccaaatcgtctggacccc

SEQ ID NO: 363231 - DNA, 25 bp, Homo sapien
gttggggtcactggcgtactgctgg

SEQ ID NO: 363232 - DNA, 25 bp, Homo sapien
cacgtacggggtgtgtgtccaaatc

SEQ ID NO: 363233 - DNA, 25 bp, Homo sapien
gggctcattggggtgcccactttgg

SEQ ID NO: 363234 - DNA, 25 bp, Homo sapien
gactgggggctcattggggtgccca

SEQ ID NO: 363235 - DNA, 25 bp, Homo sapien
ctactttggggagatggtgactggg

SEQ ID NO: 363236 - DNA, 25 bp, Homo sapien
ggagatggtgactgggggctcattg

SEQ ID NO: 363237 - DNA, 25 bp, Homo sapien
cttgtgaatacctggaagccagctc

SEQ ID NO: 363238 - DNA, 25 bp, Homo sapien
agggatgaggtctgcccatccgagc

SEQ ID NO: 363239 - DNA, 25 bp, Homo sapien
gatgaggtctgcccatccgagcggc

SEQ ID NO: 363240 - DNA, 25 bp, Homo sapien
gcagcaggcccgtttctgcctggag

SEQ ID NO: 363241 - DNA, 25 bp, Homo sapien
gaggtctgcccatccgagcggcctg

SEQ ID NO: 363242 - DNA, 25 bp, Homo sapien
cagccatccaagcctgcgaatccct

SEQ ID NO: 363243 - DNA, 25 bp, Homo sapien
tcagccatccaagcctgcgaatccc

SEQ ID NO: 363244 - DNA, 25 bp, Homo sapien
agccatccaagcctgcgaatccctc

SEQ ID NO: 363245 - DNA, 25 bp, Homo sapien
acaggatttaggagcggctggttaa

SEQ ID NO: 363246 - DNA, 25 bp, Homo sapien
tgggcagggtcgaacccaaggtcaa

SEQ ID NO: 363247 - DNA, 25 bp, Homo sapien
ctgaggctctagagagtgaaaatgg

SEQ ID NO: 363248 - DNA, 25 bp, Homo sapien
gctggttaatgacccggcaattttg

SEQ ID NO: 363249 - DNA, 25 bp, Homo sapien
agcttccccaggagctcgagccatt

SEQ ID NO: 363250 - DNA, 25 bp, Homo sapien
ggaggaccagaatgagcaggtctga

SEQ ID NO: 363251 - DNA, 25 bp, Homo sapien
gagcaccgaacggagccaagttgcc

SEQ ID NO: 363252 - DNA, 25 bp, Homo sapien
ggtctgagccgtgagtcctcctcaa

SEQ ID NO: 363253 - DNA, 25 bp, Homo sapien
cagggcagggcttttgttccgccag

SEQ ID NO: 363254 - DNA, 25 bp, Homo sapien
gcagggcttttgttccgccagcggt

SEQ ID NO: 363255 - DNA, 25 bp, Homo sapien
ccagccagaactcggggctccccag

SEQ ID NO: 363256 - DNA, 25 bp, Homo sapien
tttctggcacccgtccatgcctgtc

SEQ ID NO: 363257 - DNA, 25 bp, Homo sapien
aggagcagagagttggcgcccacca

SEQ ID NO: 363258 - DNA, 25 bp, Homo sapien
gcccaccactggcaagcaggtgctg

SEQ ID NO: 363259 - DNA, 25 bp, Homo sapien
gagcagagagttggcgcccaccact

SEQ ID NO: 363260 - DNA, 25 bp, Homo sapien
ccaccactggcaagcaggtgctgcc

SEQ ID NO: 363261 - DNA, 25 bp, Homo sapien
tcacgccttggctcggacgtcggtt

SEQ ID NO: 363262 - DNA, 25 bp, Homo sapien
ggacgtcggtttcagatgtgcagtt

SEQ ID NO: 363263 - DNA, 25 bp, Homo sapien
ctcggacgtcggtttcagatgtgca

SEQ ID NO: 363264 - DNA, 25 bp, Homo sapien
ccttggctcggacgtcggtttcaga

SEQ ID NO: 363265 - DNA, 25 bp, Homo sapien
cctatgcggggcaaagacacaggcc

SEQ ID NO: 363266 - DNA, 25 bp, Homo sapien
caggaagaggtcgggcaccaggcga

SEQ ID NO: 363267 - DNA, 25 bp, Homo sapien
agaggtcgggcaccaggcgagaatg

SEQ ID NO: 363268 - DNA, 25 bp, Homo sapien
gggcaccaggcgagaatgctgaggc

SEQ ID NO: 363269 - DNA, 25 bp, Homo sapien
gatgctggagatagacgtcacagga

SEQ ID NO: 363270 - DNA, 25 bp, Homo sapien
tggagatagacgtcacaggaaaacg

SEQ ID NO: 363271 - DNA, 25 bp, Homo sapien
cacaggaaaacgcatgatggaaact

SEQ ID NO: 363272 - DNA, 25 bp, Homo sapien
gacgtcacaggaaaacgcatgatgg

SEQ ID NO: 363273 - DNA, 25 bp, Homo sapien
tctcgaggagactttagtgcacagc

SEQ ID NO: 363274 - DNA, 25 bp, Homo sapien
tgctggaagcagagttataaataac

SEQ ID NO: 363275 - DNA, 25 bp, Homo sapien
tgctgtacccgccatgcagttgcct

SEQ ID NO: 363276 - DNA, 25 bp, Homo sapien
tgtgcgtcccacgacccaggttgct

SEQ ID NO: 363277 - DNA, 25 bp, Homo sapien
aaagaggatccagatgtcctggctc

SEQ ID NO: 363278 - DNA, 25 bp, Homo sapien
cactcccactgtgccaccgtccagt

SEQ ID NO: 363279 - DNA, 25 bp, Homo sapien
actgcagccgccttgggagcacagt

SEQ ID NO: 363280 - DNA, 25 bp, Homo sapien
ggaggtcctggtccagtgaaagagg

SEQ ID NO: 363281 - DNA, 25 bp, Homo sapien
aagctgtgtcggctctcatcttagg

SEQ ID NO: 363282 - DNA, 25 bp, Homo sapien
tgtgtcggctctcatcttagggcgc

SEQ ID NO: 363283 - DNA, 25 bp, Homo sapien
cacaccaagctgtgtcggctctcat

SEQ ID NO: 363284 - DNA, 25 bp, Homo sapien
tcggctctcatcttagggcgcccgg

SEQ ID NO: 363285 - DNA, 25 bp, Homo sapien
gtgtagttatttagttgagttagaa

SEQ ID NO: 363286 - DNA, 25 bp, Homo sapien
ttatttagttgagttagaagatggg

SEQ ID NO: 363287 - DNA, 25 bp, Homo sapien
agttatttagttgagttagaagatg

SEQ ID NO: 363288 - DNA, 25 bp, Homo sapien
gtagttatttagttgagttagaaga

SEQ ID NO: 363289 - DNA, 25 bp, Homo sapien
gggtgttgtccacatgtagactctc

SEQ ID NO: 363290 - DNA, 25 bp, Homo sapien
gttgtccacatgtagactctcccac

SEQ ID NO: 363291 - DNA, 25 bp, Homo sapien
ccggatcctggggtgttgtccacat

SEQ ID NO: 363292 - DNA, 25 bp, Homo sapien
cctggggtgttgtccacatgtagac

SEQ ID NO: 363293 - DNA, 25 bp, Homo sapien
gatccgtccactgtcctaggagctg

SEQ ID NO: 363294 - DNA, 25 bp, Homo sapien
ggagctccccgtcaagcagacgttg

SEQ ID NO: 363295 - DNA, 25 bp, Homo sapien
gaaatggccttaggttctcgcacag

SEQ ID NO: 363296 - DNA, 25 bp, Homo sapien
cgatcccattcgtggagcacagtgg

SEQ ID NO: 363297 - DNA, 25 bp, Homo sapien
aactgtcccacaagttggtgaaagc

SEQ ID NO: 363298 - DNA, 25 bp, Homo sapien
cagcggttggtcaactgtcccacaa

SEQ ID NO: 363299 - DNA, 25 bp, Homo sapien
agcagaagaccctgacgtcatttgc

SEQ ID NO: 363300 - DNA, 25 bp, Homo sapien
gaccctgacgtcatttgcatataac

SEQ ID NO: 363301 - DNA, 25 bp, Homo sapien
gacaaaaccctgacagcatttgcat

SEQ ID NO: 363302 - DNA, 25 bp, Homo sapien
caaaaccctgacagcatttgcatat

SEQ ID NO: 363303 - DNA, 25 bp, Homo sapien
attgacaaaaccctgacagcatttg

SEQ ID NO: 363304 - DNA, 25 bp, Homo sapien
ccctgacagcatttgcatattaccc

SEQ ID NO: 363305 - DNA, 25 bp, Homo sapien
tggaagtaggcagaattgagcccag

SEQ ID NO: 363306 - DNA, 25 bp, Homo sapien
ggagtgactcagaactcccagcagc

SEQ ID NO: 363307 - DNA, 25 bp, Homo sapien
ccgtgaagcgtgattggccttccca

SEQ ID NO: 363308 - DNA, 25 bp, Homo sapien
ggcactgtgttgagaggcacttgga

SEQ ID NO: 363309 - DNA, 25 bp, Homo sapien
agtcactagcaaggtccttgctgcc

SEQ ID NO: 363310 - DNA, 25 bp, Homo sapien
caggatgagggatacggcaagggag

SEQ ID NO: 363311 - DNA, 25 bp, Homo sapien
tgtacaccgctctgccttgcaacct

SEQ ID NO: 363312 - DNA, 25 bp, Homo sapien
gcaagggagcgctccctgtacaccg

SEQ ID NO: 363313 - DNA, 25 bp, Homo sapien
agcgccgtcaatctccagtggtcaa

SEQ ID NO: 363314 - DNA, 25 bp, Homo sapien
ctaagctcaagctggctcgggtgcg

SEQ ID NO: 363315 - DNA, 25 bp, Homo sapien
cgtaaagcaggaagcacgaagccag

SEQ ID NO: 363316 - DNA, 25 bp, Homo sapien
tcctctcgtggctgtaagggtctga

SEQ ID NO: 363317 - DNA, 25 bp, Homo sapien
cagggtcgccttgtgtcgggcacca

SEQ ID NO: 363318 - DNA, 25 bp, Homo sapien
cctgccataatctgggaggtgacct

SEQ ID NO: 363319 - DNA, 25 bp, Homo sapien
aactgggttcgcctgtgtgctgagc

SEQ ID NO: 363320 - DNA, 25 bp, Homo sapien
gagaggctcacagtcgcagtggcat

SEQ ID NO: 363321 - DNA, 25 bp, Homo sapien
tttttgaaagaggattcagtcatag

SEQ ID NO: 363322 - DNA, 25 bp, Homo sapien
ttgaaagaggattcagtcatagcct

SEQ ID NO: 363323 - DNA, 25 bp, Homo sapien
tggtttttgaaagaggattcagtca

SEQ ID NO: 363324 - DNA, 25 bp, Homo sapien
gaaagaggattcagtcatagcctga

SEQ ID NO: 363325 - DNA, 25 bp, Homo sapien
caccaccgggaatggccaggtgagt

SEQ ID NO: 363326 - DNA, 25 bp, Homo sapien
cagtaaaggagggactgcgactctt

SEQ ID NO: 363327 - DNA, 25 bp, Homo sapien
gctgtgactcaaccatgggtagatg

SEQ ID NO: 363328 - DNA, 25 bp, Homo sapien
gatccgtgcgcgtcatagtgcagcc

SEQ ID NO: 363329 - DNA, 25 bp, Homo sapien
gctttgcatcttccaggccacaatc

SEQ ID NO: 363330 - DNA, 25 bp, Homo sapien
gggctttgcatcttccaggccacaa

SEQ ID NO: 363331 - DNA, 25 bp, Homo sapien
aggccacaatcctgacccagctgtg

SEQ ID NO: 363332 - DNA, 25 bp, Homo sapien
cctgggctttgcatcttccaggcca

SEQ ID NO: 363333 - DNA, 25 bp, Homo sapien
tccgtagaattcagaggcatgtgaa

SEQ ID NO: 363334 - DNA, 25 bp, Homo sapien
cagagctgtacatcccagtctcggg

SEQ ID NO: 363335 - DNA, 25 bp, Homo sapien
atcagagctgtacatcccagtctcg

SEQ ID NO: 363336 - DNA, 25 bp, Homo sapien
cggacccctggtccgtagaattcag

SEQ ID NO: 363337 - DNA, 25 bp, Homo sapien
cagcgactgcgaacagaagaaatgt

SEQ ID NO: 363338 - DNA, 25 bp, Homo sapien
aataatccaattattgcagcgactg

SEQ ID NO: 363339 - DNA, 25 bp, Homo sapien
atgttcattgcatatttactgctgc

SEQ ID NO: 363340 - DNA, 25 bp, Homo sapien
gctgcacttactcctgatgaactgc

SEQ ID NO: 363341 - DNA, 25 bp, Homo sapien
agtaactcgtgtcccagacagctgc

SEQ ID NO: 363342 - DNA, 25 bp, Homo sapien
tccagaacaagtaactcgtgtccca

SEQ ID NO: 363343 - DNA, 25 bp, Homo sapien
aacccttctttcatcgaatcagtca

SEQ ID NO: 363344 - DNA, 25 bp, Homo sapien
gggctgctggatcccgaaacccttc

SEQ ID NO: 363345 - DNA, 25 bp, Homo sapien
ctgcttcttggtacacgtgagtgtg

SEQ ID NO: 363346 - DNA, 25 bp, Homo sapien
tgcttcttggtacacgtgagtgtgc

SEQ ID NO: 363347 - DNA, 25 bp, Homo sapien
gcttcttggtacacgtgagtgtgca

SEQ ID NO: 363348 - DNA, 25 bp, Homo sapien
tctgcaggccggatgagagcttgtc

SEQ ID NO: 363349 - DNA, 25 bp, Homo sapien
cgtcctgtctgcaggccggatgaga

SEQ ID NO: 363350 - DNA, 25 bp, Homo sapien
gctcgtcctgtctgcaggccggatg

SEQ ID NO: 363351 - DNA, 25 bp, Homo sapien
ccggatgagagcttgtctggcagct

SEQ ID NO: 363352 - DNA, 25 bp, Homo sapien
tccaggcatgccacggatgctgagg

SEQ ID NO: 363353 - DNA, 25 bp, Homo sapien
gccttttctgaaggcggcgcctcca

SEQ ID NO: 363354 - DNA, 25 bp, Homo sapien
cgccgggtggacatgggccttttct

SEQ ID NO: 363355 - DNA, 25 bp, Homo sapien
tgccacggatgctgaggcggtttcc

SEQ ID NO: 363356 - DNA, 25 bp, Homo sapien
ctctctgctggctctaccttgtgga

SEQ ID NO: 363357 - DNA, 25 bp, Homo sapien
gctggctctaccttgtggacgtcca

SEQ ID NO: 363358 - DNA, 25 bp, Homo sapien
tgctggctctaccttgtggacgtcc

SEQ ID NO: 363359 - DNA, 25 bp, Homo sapien
tctgctggctctaccttgtggacgt

SEQ ID NO: 363360 - DNA, 25 bp, Homo sapien
catggcaactcattacactaaaagc

SEQ ID NO: 363361 - DNA, 25 bp, Homo sapien
ttctgaggacgtgcagacggcagct

SEQ ID NO: 363362 - DNA, 25 bp, Homo sapien
tcgggaactcgtatttcatggcaac

SEQ ID NO: 363363 - DNA, 25 bp, Homo sapien
gcccatttgcccaacgtgagagatt

SEQ ID NO: 363364 - DNA, 25 bp, Homo sapien
ttgccataaactgctgctgacttgg

SEQ ID NO: 363365 - DNA, 25 bp, Homo sapien
ccattccagggcctccgttggatat

SEQ ID NO: 363366 - DNA, 25 bp, Homo sapien
cttgggctgggcagcttgtgctgtc

SEQ ID NO: 363367 - DNA, 25 bp, Homo sapien
cagggcctccgttggatatggacaa

SEQ ID NO: 363368 - DNA, 25 bp, Homo sapien
gatttaggagccagcttgctacggg

SEQ ID NO: 363369 - DNA, 25 bp, Homo sapien
caggaaaggcatctgtgcggtagca

SEQ ID NO: 363370 - DNA, 25 bp, Homo sapien
ggtagcaagctcaaaccgtgaggtc

SEQ ID NO: 363371 - DNA, 25 bp, Homo sapien
gcttagcatgtgtcaacgtggcccc

SEQ ID NO: 363372 - DNA, 25 bp, Homo sapien
acaagagtgcgttcccgtgccaggc

SEQ ID NO: 363373 - DNA, 25 bp, Homo sapien
gtctgtgccaatccgccaggcagct

SEQ ID NO: 363374 - DNA, 25 bp, Homo sapien
gggcacaagagtgcgttcccgtgcc

SEQ ID NO: 363375 - DNA, 25 bp, Homo sapien
gaggtgtcaacaccggggtcccagc

SEQ ID NO: 363376 - DNA, 25 bp, Homo sapien
agaggacgagacactcacacttcct

SEQ ID NO: 363377 - DNA, 25 bp, Homo sapien
tccatgggagacagcagacgctttt

SEQ ID NO: 363378 - DNA, 25 bp, Homo sapien
cagggtcccagttaaagaggacgag

SEQ ID NO: 363379 - DNA, 25 bp, Homo sapien
gattcttggaggagccatccatggg

SEQ ID NO: 363380 - DNA, 25 bp, Homo sapien
ccggcccagatcagaacccatgggt

SEQ ID NO: 363381 - DNA, 25 bp, Homo sapien
ggccacagggcccttctgtgaagcc

SEQ ID NO: 363382 - DNA, 25 bp, Homo sapien
cccagatcagaacccatgggtgcca

SEQ ID NO: 363383 - DNA, 25 bp, Homo sapien
gatcagaacccatgggtgccatgag

SEQ ID NO: 363384 - DNA, 25 bp, Homo sapien
ccaccagccggctgttcagtgctgt

SEQ ID NO: 363385 - DNA, 25 bp, Homo sapien
accagccggctgttcagtgctgtgc

SEQ ID NO: 363386 - DNA, 25 bp, Homo sapien
caccagccggctgttcagtgctgtg

SEQ ID NO: 363387 - DNA, 25 bp, Homo sapien
cagtgctgtgctccgaaacatggtg

SEQ ID NO: 363388 - DNA, 25 bp, Homo sapien
gcaatgaagaagcacccaatgtttc

SEQ ID NO: 363389 - DNA, 25 bp, Homo sapien
gtttctagcaggaattcgcaaatga

SEQ ID NO: 363390 - DNA, 25 bp, Homo sapien
aatatgcaggcattcagggagggaa

SEQ ID NO: 363391 - DNA, 25 bp, Homo sapien
gacaagaggtgtctcccagggagag

SEQ ID NO: 363392 - DNA, 25 bp, Homo sapien
tgtggccgtcattagtcagcaaagg

SEQ ID NO: 363393 - DNA, 25 bp, Homo sapien
ccgtcattagtcagcaaaggccggg

SEQ ID NO: 363394 - DNA, 25 bp, Homo sapien
actgggccccgctgtggccgtcatt

SEQ ID NO: 363395 - DNA, 25 bp, Homo sapien
ccgctgtggccgtcattagtcagca

SEQ ID NO: 363396 - DNA, 25 bp, Homo sapien
gggatgctgtagctgaacactgagc

SEQ ID NO: 363397 - DNA, 25 bp, Homo sapien
aagggggatgctgtagctgaacact

SEQ ID NO: 363398 - DNA, 25 bp, Homo sapien
aagaagggggatgctgtagctgaac

SEQ ID NO: 363399 - DNA, 25 bp, Homo sapien
gatgctgtagctgaacactgagcct

SEQ ID NO: 363400 - DNA, 25 bp, Homo sapien
ccgtccttctggaactaatgccagg

SEQ ID NO: 363401 - DNA, 25 bp, Homo sapien
tgaagagaaccgcccctcgggtgag

SEQ ID NO: 363402 - DNA, 25 bp, Homo sapien
gaactaatgccaggtggacgcagag

SEQ ID NO: 363403 - DNA, 25 bp, Homo sapien
tgaggtggcacgtcccgttcccctc

SEQ ID NO: 363404 - DNA, 25 bp, Homo sapien
tcagatggcgttcatggagactgac

SEQ ID NO: 363405 - DNA, 25 bp, Homo sapien
gatggcgttcatggagactgactca

SEQ ID NO: 363406 - DNA, 25 bp, Homo sapien
cagatggcgttcatggagactgact

SEQ ID NO: 363407 - DNA, 25 bp, Homo sapien
atggcgttcatggagactgactcag

SEQ ID NO: 363408 - DNA, 25 bp, Homo sapien
ggtgctcacatcccaccgtgcatag

SEQ ID NO: 363409 - DNA, 25 bp, Homo sapien
caccgtgcatagccaggacagaggg

SEQ ID NO: 363410 - DNA, 25 bp, Homo sapien
ggactgcggcaaggtgctcacatcc

SEQ ID NO: 363411 - DNA, 25 bp, Homo sapien
atcccaccgtgcatagccaggacag

SEQ ID NO: 363412 - DNA, 25 bp, Homo sapien
cgtcgtgttcatcagtgccggcgtc

SEQ ID NO: 363413 - DNA, 25 bp, Homo sapien
aacccaagatatggcgggtggcaca

SEQ ID NO: 363414 - DNA, 25 bp, Homo sapien
gatgacacctctaccccgtcgtgtt

SEQ ID NO: 363415 - DNA, 25 bp, Homo sapien
tgggtcccttcgcatatcacctctt

SEQ ID NO: 363416 - DNA, 25 bp, Homo sapien
actctcagcctcttctttgggaaac

SEQ ID NO: 363417 - DNA, 25 bp, Homo sapien
tcagactctcagcctcttctttggg

SEQ ID NO: 363418 - DNA, 25 bp, Homo sapien
agactctcagcctcttctttgggaa

SEQ ID NO: 363419 - DNA, 25 bp, Homo sapien
gactctcagcctcttctttgggaaa

SEQ ID NO: 363420 - DNA, 25 bp, Homo sapien
atctggtcattggtgctgtgcaaca

SEQ ID NO: 363421 - DNA, 25 bp, Homo sapien
catctggtcattggtgctgtgcaac

SEQ ID NO: 363422 - DNA, 25 bp, Homo sapien
catcctgtgaagatgaaggcctgct

SEQ ID NO: 363423 - DNA, 25 bp, Homo sapien
agctggcgggaagcctgtcgggcat

SEQ ID NO: 363424 - DNA, 25 bp, Homo sapien
tgaaggcctgctgcacatcgcccgg

SEQ ID NO: 363425 - DNA, 25 bp, Homo sapien
aagcctgtcgggcatcctgtgaaga

SEQ ID NO: 363426 - DNA, 25 bp, Homo sapien
cgcctctggggatccgtgtccctgg

SEQ ID NO: 363427 - DNA, 25 bp, Homo sapien
gcagccgcctctggggatccgtgtc

SEQ ID NO: 363428 - DNA, 25 bp, Homo sapien
ccgcctctggggatccgtgtccctg

SEQ ID NO: 363429 - DNA, 25 bp, Homo sapien
gcagcagccgcctctggggatccgt

SEQ ID NO: 363430 - DNA, 25 bp, Homo sapien
tgtgccaggtaaacagccttagaaa

SEQ ID NO: 363431 - DNA, 25 bp, Homo sapien
gcagggccccgagtcagcgctcagg

SEQ ID NO: 363432 - DNA, 25 bp, Homo sapien
gtaaacagccttagaaatggcagca

SEQ ID NO: 363433 - DNA, 25 bp, Homo sapien
gggactgtgccaggtaaacagcctt

SEQ ID NO: 363434 - DNA, 25 bp, Homo sapien
ccttcaccaggcacaggtgcacggg

SEQ ID NO: 363435 - DNA, 25 bp, Homo sapien
cccacgaggatggtcctggtgttga

SEQ ID NO: 363436 - DNA, 25 bp, Homo sapien
agaactgacccccacgaggatggtc

SEQ ID NO: 363437 - DNA, 25 bp, Homo sapien
tgccaggttcgggaaaagaactgac

SEQ ID NO: 363438 - DNA, 25 bp, Homo sapien
gtggctgactcaggctccaaggtgg

SEQ ID NO: 363439 - DNA, 25 bp, Homo sapien
ctctgggccctgtgcgttgagcatc

SEQ ID NO: 363440 - DNA, 25 bp, Homo sapien
catcgctctgtagagggtggctgac

SEQ ID NO: 363441 - DNA, 25 bp, Homo sapien
ttcttggtgggatcaaggagaccga

SEQ ID NO: 363442 - DNA, 25 bp, Homo sapien
ccagagcacctttacgaacatcttt

SEQ ID NO: 363443 - DNA, 25 bp, Homo sapien
atttccagagcacctttacgaacat

SEQ ID NO: 363444 - DNA, 25 bp, Homo sapien
ttccagagcacctttacgaacatct

SEQ ID NO: 363445 - DNA, 25 bp, Homo sapien
tccagagcacctttacgaacatctt

SEQ ID NO: 363446 - DNA, 25 bp, Homo sapien
gcatgggcacacacggctttgtcgt

SEQ ID NO: 363447 - DNA, 25 bp, Homo sapien
agcatgggcacacacggctttgtcg

SEQ ID NO: 363448 - DNA, 25 bp, Homo sapien
catgggcacacacggctttgtcgtt

SEQ ID NO: 363449 - DNA, 25 bp, Homo sapien
acacacggctttgtcgttggcggct

SEQ ID NO: 363450 - DNA, 25 bp, Homo sapien
gggcacacacggctttgtcgttggc

SEQ ID NO: 363451 - DNA, 25 bp, Homo sapien
gcacacacggctttgtcgttggcgg

SEQ ID NO: 363452 - DNA, 25 bp, Homo sapien
tagaattcactccgtcttcagtctc

SEQ ID NO: 363453 - DNA, 25 bp, Homo sapien
tcagtctcagctgatgactgttcat

SEQ ID NO: 363454 - DNA, 25 bp, Homo sapien
aattcactccgtcttcagtctcagc

SEQ ID NO: 363455 - DNA, 25 bp, Homo sapien
ctcagctgatgactgttcatctggg

SEQ ID NO: 363456 - DNA, 25 bp, Homo sapien
gaggtgtcagcaccggcccaaagat

SEQ ID NO: 363457 - DNA, 25 bp, Homo sapien
aaagatttcatataaaccgtggctc

SEQ ID NO: 363458 - DNA, 25 bp, Homo sapien
tcccacaggctggagcttggtgtca

SEQ ID NO: 363459 - DNA, 25 bp, Homo sapien
accacacacgcgtcagaggagggcg

SEQ ID NO: 363460 - DNA, 25 bp, Homo sapien
tgtcatcagggtggattgggatggc

SEQ ID NO: 363461 - DNA, 25 bp, Homo sapien
ctggtgcctgctgagctccccgtcc

SEQ ID NO: 363462 - DNA, 25 bp, Homo sapien
agcagagggtcagcctgctccgcac

SEQ ID NO: 363463 - DNA, 25 bp, Homo sapien
gatggcagcctgcttcctcagcaga

SEQ ID NO: 363464 - DNA, 25 bp, Homo sapien
tgatgttctgcatggtgatttgaac

SEQ ID NO: 363465 - DNA, 25 bp, Homo sapien
aagccaaaggcttcctgaacatggc

SEQ ID NO: 363466 - DNA, 25 bp, Homo sapien
tgctgggattgctagaatgaatgcc

SEQ ID NO: 363467 - DNA, 25 bp, Homo sapien
tgtagcctgagtccctgatgttctg

SEQ ID NO: 363468 - DNA, 25 bp, Homo sapien
tgagcacagggtaaacctcttatgt

SEQ ID NO: 363469 - DNA, 25 bp, Homo sapien
atcaggtgcccgcaggtgaagcagg

SEQ ID NO: 363470 - DNA, 25 bp, Homo sapien
tatgtaagctgaacacgcgctccac

SEQ ID NO: 363471 - DNA, 25 bp, Homo sapien
aaacctcttatgtaagctgaacacg

SEQ ID NO: 363472 - DNA, 25 bp, Homo sapien
gacctgttccggtatccatgaggac

SEQ ID NO: 363473 - DNA, 25 bp, Homo sapien
cgagccccgtgtgtttctgaagact

SEQ ID NO: 363474 - DNA, 25 bp, Homo sapien
tgtgtccccgcgttctgagaagtcc

SEQ ID NO: 363475 - DNA, 25 bp, Homo sapien
taacaattaacgtggcagtcccggc

SEQ ID NO: 363476 - DNA, 25 bp, Homo sapien
ggaccaccaggtaccccccagctgc

SEQ ID NO: 363477 - DNA, 25 bp, Homo sapien
gggcatctcggactgggcagctggg

SEQ ID NO: 363478 - DNA, 25 bp, Homo sapien
tccatagggcatctcggactgggca

SEQ ID NO: 363479 - DNA, 25 bp, Homo sapien
ccacgggctgcctggccgtctgtgc

SEQ ID NO: 363480 - DNA, 25 bp, Homo sapien
actggtctttggagccatcaaggtg

SEQ ID NO: 363481 - DNA, 25 bp, Homo sapien
gagccatcaaggtggacagacaagg

SEQ ID NO: 363482 - DNA, 25 bp, Homo sapien
ctggtctttggagccatcaaggtgg

SEQ ID NO: 363483 - DNA, 25 bp, Homo sapien
ctttggagccatcaaggtggacaga

SEQ ID NO: 363484 - DNA, 25 bp, Homo sapien
tgaaccctggcctgtcctcctgcta

SEQ ID NO: 363485 - DNA, 25 bp, Homo sapien
cctgtcctcctgctatgagccccat

SEQ ID NO: 363486 - DNA, 25 bp, Homo sapien
ggctgagcagaagggcctgaaccct

SEQ ID NO: 363487 - DNA, 25 bp, Homo sapien
cctggcctgtcctcctgctatgagc

SEQ ID NO: 363488 - DNA, 25 bp, Homo sapien
tgcctcgttccttcactccctgtgt

SEQ ID NO: 363489 - DNA, 25 bp, Homo sapien
acatcatgaccgtgcctcgttcctt

SEQ ID NO: 363490 - DNA, 25 bp, Homo sapien
tcacatcatgaccgtgcctcgttcc

SEQ ID NO: 363491 - DNA, 25 bp, Homo sapien
catcatgaccgtgcctcgttccttc

SEQ ID NO: 363492 - DNA, 25 bp, Homo sapien
gctggagtggcagctcgccatgcac

SEQ ID NO: 363493 - DNA, 25 bp, Homo sapien
gtggcagctcgccatgcacacagca

SEQ ID NO: 363494 - DNA, 25 bp, Homo sapien
tccccactgggtatctcccctttca

SEQ ID NO: 363495 - DNA, 25 bp, Homo sapien
agctccggccatggctgcctgtcat

SEQ ID NO: 363496 - DNA, 25 bp, Homo sapien
tcctgtaaagatggcaggtcatgca

SEQ ID NO: 363497 - DNA, 25 bp, Homo sapien
agcttcgtggcgcttcgtggtgtca

SEQ ID NO: 363498 - DNA, 25 bp, Homo sapien
tcacacgtacagctgttggttccgg

SEQ ID NO: 363499 - DNA, 25 bp, Homo sapien
catatgggacccactgtctcctgta

SEQ ID NO: 363500 - DNA, 25 bp, Homo sapien
cgagtccgggctggccccattcagc

SEQ ID NO: 363501 - DNA, 25 bp, Homo sapien
gcgagtccgggctggccccattcag

SEQ ID NO: 363502 - DNA, 25 bp, Homo sapien
ccgcgagtccgggctggccccattc

SEQ ID NO: 363503 - DNA, 25 bp, Homo sapien
tggctccatagttcccactgatccc

SEQ ID NO: 363504 - DNA, 25 bp, Homo sapien
gagccctgtaatggaagcggttcat

SEQ ID NO: 363505 - DNA, 25 bp, Homo sapien
taatggaagcggttcattgaatccc

SEQ ID NO: 363506 - DNA, 25 bp, Homo sapien
aagcggttcattgaatccccggtga

SEQ ID NO: 363507 - DNA, 25 bp, Homo sapien
cccggctgagccctgtaatggaagc

SEQ ID NO: 363508 - DNA, 25 bp, Homo sapien
tcatggtgcggatgggacccccccg

SEQ ID NO: 363509 - DNA, 25 bp, Homo sapien
gtgctcatggtgcggatgggacccc

SEQ ID NO: 363510 - DNA, 25 bp, Homo sapien
gctcatggtgcggatgggacccccc

SEQ ID NO: 363511 - DNA, 25 bp, Homo sapien
catggtgcggatgggacccccccga

SEQ ID NO: 363512 - DNA, 25 bp, Homo sapien
tcatgggtttgctctggaggctaaa

SEQ ID NO: 363513 - DNA, 25 bp, Homo sapien
gtcctggaacctcccgtctgtgaag

SEQ ID NO: 363514 - DNA, 25 bp, Homo sapien
tgggccccagcgttgggtgagtcct

SEQ ID NO: 363515 - DNA, 25 bp, Homo sapien
ctaaagggattttccgcatgcaggg

SEQ ID NO: 363516 - DNA, 25 bp, Homo sapien
gggtgcgtagcaggacggcttttac

SEQ ID NO: 363517 - DNA, 25 bp, Homo sapien
ggtgcgtagcaggacggcttttacc

SEQ ID NO: 363518 - DNA, 25 bp, Homo sapien
gtgcgtagcaggacggcttttaccc

SEQ ID NO: 363519 - DNA, 25 bp, Homo sapien
agcaaggccctgcccgtcgccggac

SEQ ID NO: 363520 - DNA, 25 bp, Homo sapien
ggccctgcccgtcgccggacacagg

SEQ ID NO: 363521 - DNA, 25 bp, Homo sapien
gcaaggccctgcccgtcgccggaca

SEQ ID NO: 363522 - DNA, 25 bp, Homo sapien
aaggccctgcccgtcgccggacaca

SEQ ID NO: 363523 - DNA, 25 bp, Homo sapien
ttatgtctgctggaagcttcagcac

SEQ ID NO: 363524 - DNA, 25 bp, Homo sapien
tggccgctggagattaatacattgt

SEQ ID NO: 363525 - DNA, 25 bp, Homo sapien
gtgggcaaaaagcttagttggctta

SEQ ID NO: 363526 - DNA, 25 bp, Homo sapien
tcaggtcttccggtctgtggtaacg

SEQ ID NO: 363527 - DNA, 25 bp, Homo sapien
tagctccattaagatacttccaggg

SEQ ID NO: 363528 - DNA, 25 bp, Homo sapien
tccaggtacaagtcaggccctgcta

SEQ ID NO: 363529 - DNA, 25 bp, Homo sapien
cgtggccggcttgtggaccttgctc

SEQ ID NO: 363530 - DNA, 25 bp, Homo sapien
agcggccgtcttgctgagcccttgg

SEQ ID NO: 363531 - DNA, 25 bp, Homo sapien
taattgcgtggaatccagagcccct

SEQ ID NO: 363532 - DNA, 25 bp, Homo sapien
tatgccagaaatatgccacatcccc

SEQ ID NO: 363533 - DNA, 25 bp, Homo sapien
gagtgtgaacgtccatctgccttct

SEQ ID NO: 363534 - DNA, 25 bp, Homo sapien
cgtcccggtgcacctggacaatgga

SEQ ID NO: 363535 - DNA, 25 bp, Homo sapien
tgtgctgaggccttgcagtaggagt

SEQ ID NO: 363536 - DNA, 25 bp, Homo sapien
gcagtaggagttcagagagcttcat

SEQ ID NO: 363537 - DNA, 25 bp, Homo sapien
ggtgtgctgaggccttgcagtagga

SEQ ID NO: 363538 - DNA, 25 bp, Homo sapien
tgctgaggccttgcagtaggagttc

SEQ ID NO: 363539 - DNA, 25 bp, Homo sapien
atagtcccccctttggcctaggctg

SEQ ID NO: 363540 - DNA, 25 bp, Homo sapien
ctgtctggccaccagggcgatagtc

SEQ ID NO: 363541 - DNA, 25 bp, Homo sapien
tgtctggccaccagggcgatagtcc

SEQ ID NO: 363542 - DNA, 25 bp, Homo sapien
ccctttggcctaggctgacgattgt

SEQ ID NO: 363543 - DNA, 25 bp, Homo sapien
gaccacggtgctggcctctcaggga

SEQ ID NO: 363544 - DNA, 25 bp, Homo sapien
aggccaagtacatgcagctctccag

SEQ ID NO: 363545 - DNA, 25 bp, Homo sapien
cttctcctgggcgaaggccaagtac

SEQ ID NO: 363546 - DNA, 25 bp, Homo sapien
ctggaccacggtgctggcctctcag

SEQ ID NO: 363547 - DNA, 25 bp, Homo sapien
aatttttcactagctccgtgttgat

SEQ ID NO: 363548 - DNA, 25 bp, Homo sapien
taatttttcactagctccgtgttga

SEQ ID NO: 363549 - DNA, 25 bp, Homo sapien
ttttcactagctccgtgttgataag

SEQ ID NO: 363550 - DNA, 25 bp, Homo sapien
tcactagctccgtgttgataagcgt

SEQ ID NO: 363551 - DNA, 25 bp, Homo sapien
cctggaagacgcagcttctgcgaga

SEQ ID NO: 363552 - DNA, 25 bp, Homo sapien
gaccatggtgggtattgagccgtaa

SEQ ID NO: 363553 - DNA, 25 bp, Homo sapien
gatgcagggcttggctatcttcagc

SEQ ID NO: 363554 - DNA, 25 bp, Homo sapien
gcccttggtccctagggtctctgtg

SEQ ID NO: 363555 - DNA, 25 bp, Homo sapien
cttgttagagacatgtagggctgag

SEQ ID NO: 363556 - DNA, 25 bp, Homo sapien
ttgttagagacatgtagggctgaga

SEQ ID NO: 363557 - DNA, 25 bp, Homo sapien
gttagagacatgtagggctgagagc

SEQ ID NO: 363558 - DNA, 25 bp, Homo sapien
tagagacatgtagggctgagagctc

SEQ ID NO: 363559 - DNA, 25 bp, Homo sapien
gtcgaagtggctggtgagatgtttc

SEQ ID NO: 363560 - DNA, 25 bp, Homo sapien
ggaacagcttcaggtccagctgtgg

SEQ ID NO: 363561 - DNA, 25 bp, Homo sapien
aggaacagcttcaggtccagctgtg

SEQ ID NO: 363562 - DNA, 25 bp, Homo sapien
ctgtcgaagtggctggtgagatgtt

SEQ ID NO: 363563 - DNA, 25 bp, Homo sapien
tcaccctaagtgatgggcaacaaac

SEQ ID NO: 363564 - DNA, 25 bp, Homo sapien
catctaatgcgcttttgagggagaa

SEQ ID NO: 363565 - DNA, 25 bp, Homo sapien
caaacgaacgtcacattaaataaag

SEQ ID NO: 363566 - DNA, 25 bp, Homo sapien
taggtcctgacctgtgtgcatcacc

SEQ ID NO: 363567 - DNA, 25 bp, Homo sapien
tgggaccgttggcacgtccgctctt

SEQ ID NO: 363568 - DNA, 25 bp, Homo sapien
cacgcgcaatgggaccgttggcacg

SEQ ID NO: 363569 - DNA, 25 bp, Homo sapien
ctggaggctgcgtcttcatcaattc

SEQ ID NO: 363570 - DNA, 25 bp, Homo sapien
cttcatcaattccgtacaggtccat

SEQ ID NO: 363571 - DNA, 25 bp, Homo sapien
cccactctgggctcttgtggtgtct

SEQ ID NO: 363572 - DNA, 25 bp, Homo sapien
ggtgtctgtgatggtgcccatgtgg

SEQ ID NO: 363573 - DNA, 25 bp, Homo sapien
tggagtgatggggcctcatgccaca

SEQ ID NO: 363574 - DNA, 25 bp, Homo sapien
catgccacactgtatcaggacccca

SEQ ID NO: 363575 - DNA, 25 bp, Homo sapien
ggagaagacaaactcggcacccacc

SEQ ID NO: 363576 - DNA, 25 bp, Homo sapien
tctgtgctatcgagagaaccacccg

SEQ ID NO: 363577 - DNA, 25 bp, Homo sapien
ggcacgaagcaagcgtccagttaat

SEQ ID NO: 363578 - DNA, 25 bp, Homo sapien
tgctaccatacaagctgaaggtgtc

SEQ ID NO: 363579 - DNA, 25 bp, Homo sapien
tccagttaataaagtgcgtcgtagg

SEQ ID NO: 363580 - DNA, 25 bp, Homo sapien
cattatcccaggtggggattccgtc

SEQ ID NO: 363581 - DNA, 25 bp, Homo sapien
ccgtctggtagccttggtgggcact

SEQ ID NO: 363582 - DNA, 25 bp, Homo sapien
gttgggggtgatacggctcagggct

SEQ ID NO: 363583 - DNA, 25 bp, Homo sapien
gcactgccccggtgccttgggttgg

SEQ ID NO: 363584 - DNA, 25 bp, Homo sapien
gacttctgaaaagtgaaggcggccg

SEQ ID NO: 363585 - DNA, 25 bp, Homo sapien
aaggcggccggacaatacgggcagt

SEQ ID NO: 363586 - DNA, 25 bp, Homo sapien
tcaagacgctgtgaaggccagtgcg

SEQ ID NO: 363587 - DNA, 25 bp, Homo sapien
acactgtgctgcgtgctttcaagac

SEQ ID NO: 363588 - DNA, 25 bp, Homo sapien
atgagacccgcatccctctcaccct

SEQ ID NO: 363589 - DNA, 25 bp, Homo sapien
ccctctcaccctctcggttcccctg

SEQ ID NO: 363590 - DNA, 25 bp, Homo sapien
atggcatggcacatgagacccgcat

SEQ ID NO: 363591 - DNA, 25 bp, Homo sapien
ggcatggcacatgagacccgcatcc

SEQ ID NO: 363592 - DNA, 25 bp, Homo sapien
tccctctgaaagtgcgtttgtgtca

SEQ ID NO: 363593 - DNA, 25 bp, Homo sapien
tcagtgccctgattacagggcctct

SEQ ID NO: 363594 - DNA, 25 bp, Homo sapien
aagtgcgtttgtgtcagtgccctga

SEQ ID NO: 363595 - DNA, 25 bp, Homo sapien
ttacagggcctctgatgtgtgagga

SEQ ID NO: 363596 - DNA, 25 bp, Homo sapien
ccccaccacaccgaggttctgaaat

SEQ ID NO: 363597 - DNA, 25 bp, Homo sapien
tccccccaccacaccgaggttctga

SEQ ID NO: 363598 - DNA, 25 bp, Homo sapien
caccacaccgaggttctgaaatctt

SEQ ID NO: 363599 - DNA, 25 bp, Homo sapien
ttgtggttgaagtctccccccacca

SEQ ID NO: 363600 - DNA, 25 bp, Homo sapien
tcattgtggttgaagtctccccctg

SEQ ID NO: 363601 - DNA, 25 bp, Homo sapien
ttgaagtctccccctgagattctga

SEQ ID NO: 363602 - DNA, 25 bp, Homo sapien
ccccgctacccaggttctgaaatct

SEQ ID NO: 363603 - DNA, 25 bp, Homo sapien
ccgctacccaggttctgaaatcttt

SEQ ID NO: 363604 - DNA, 25 bp, Homo sapien
ccccaccacaccgaggttctgaaat

SEQ ID NO: 363605 - DNA, 25 bp, Homo sapien
gtggttgaagtctccccccaccaca

SEQ ID NO: 363606 - DNA, 25 bp, Homo sapien
ggtggttgaagtctccccgcccaca

SEQ ID NO: 363607 - DNA, 25 bp, Homo sapien
caccacaccgaggttctgaaatctt

SEQ ID NO: 363608 - DNA, 25 bp, Homo sapien
ttcattgtggttgaagtctcccccc

SEQ ID NO: 363609 - DNA, 25 bp, Homo sapien
tcattgtggttgaagtctccccctg

SEQ ID NO: 363610 - DNA, 25 bp, Homo sapien
tcattgtggttgaagtctcccccca

SEQ ID NO: 363611 - DNA, 25 bp, Homo sapien
cccgctacccaggttctgaaatctt

SEQ ID NO: 363612 - DNA, 25 bp, Homo sapien
caacactcacgttgccatcccagct

SEQ ID NO: 363613 - DNA, 25 bp, Homo sapien
ccacatgttcctggattagttgatt

SEQ ID NO: 363614 - DNA, 25 bp, Homo sapien
cttgcttgcctttgtctggatggct

SEQ ID NO: 363615 - DNA, 25 bp, Homo sapien
cctggattagttgattatacatttc

SEQ ID NO: 363616 - DNA, 25 bp, Homo sapien
gagctttaacaaagcacaggcttct

SEQ ID NO: 363617 - DNA, 25 bp, Homo sapien
aatcagagtaagcacccggatccat

SEQ ID NO: 363618 - DNA, 25 bp, Homo sapien
acttcaaggtcataatctctataat

SEQ ID NO: 363619 - DNA, 25 bp, Homo sapien
tcaatgccgtatgtatttgttttgt

SEQ ID NO: 363620 - DNA, 25 bp, Homo sapien
ggggatgagccgattcgtagcccat

SEQ ID NO: 363621 - DNA, 25 bp, Homo sapien
agtgacagctgacacacttattgcc

SEQ ID NO: 363622 - DNA, 25 bp, Homo sapien
ctgacacacttattgcctggaggga

SEQ ID NO: 363623 - DNA, 25 bp, Homo sapien
tgcccatggatgtcccctggcaggg

SEQ ID NO: 363624 - DNA, 25 bp, Homo sapien
ccagacaattgatcattgcactgac

SEQ ID NO: 363625 - DNA, 25 bp, Homo sapien
tatgactttagtgggtggaactgcc

SEQ ID NO: 363626 - DNA, 25 bp, Homo sapien
ttatgactttagtgggtggaactgc

SEQ ID NO: 363627 - DNA, 25 bp, Homo sapien
gggtggaactgccagacaattgatc

SEQ ID NO: 363628 - DNA, 25 bp, Homo sapien
agcccgggatgaggccacactggcc

SEQ ID NO: 363629 - DNA, 25 bp, Homo sapien
actggccgagaggtgcacaggatga

SEQ ID NO: 363630 - DNA, 25 bp, Homo sapien
catggtctggtacagcccgggatga

SEQ ID NO: 363631 - DNA, 25 bp, Homo sapien
gctgtgcccaatggcatggtctggt

SEQ ID NO: 363632 - DNA, 25 bp, Homo sapien
tgccccgctgtgccccacgacggca

SEQ ID NO: 363633 - DNA, 25 bp, Homo sapien
ctgccccgctgtgccccacgacggc

SEQ ID NO: 363634 - DNA, 25 bp, Homo sapien
gccccgctgtgccccacgacggcac

SEQ ID NO: 363635 - DNA, 25 bp, Homo sapien
gccggcgggcctatggtcacattcc

SEQ ID NO: 363636 - DNA, 25 bp, Homo sapien
ttagcgccaggagtgtgcaggccaa

SEQ ID NO: 363637 - DNA, 25 bp, Homo sapien
ggtacttctcaccttggtgagactg

SEQ ID NO: 363638 - DNA, 25 bp, Homo sapien
cctttagcgccaggagtgtgcaggc

SEQ ID NO: 363639 - DNA, 25 bp, Homo sapien
ctgtggacacagcccagccccaggc

SEQ ID NO: 363640 - DNA, 25 bp, Homo sapien
tgtggacacagcccagccccaggcc

SEQ ID NO: 363641 - DNA, 25 bp, Homo sapien
tgccgggtgtccttgttagaccgag

SEQ ID NO: 363642 - DNA, 25 bp, Homo sapien
gtgtccttgttagaccgagagggac

SEQ ID NO: 363643 - DNA, 25 bp, Homo sapien
tgtgtgccgggtgtccttgttagac

SEQ ID NO: 363644 - DNA, 25 bp, Homo sapien
cttgctgtttgtgtgccgggtgtcc

SEQ ID NO: 363645 - DNA, 25 bp, Homo sapien
catttcttatttggacctgaagtac

SEQ ID NO: 363646 - DNA, 25 bp, Homo sapien
tcccatttcttatttggacctgaag

SEQ ID NO: 363647 - DNA, 25 bp, Homo sapien
catcccatttcttatttggacctga

SEQ ID NO: 363648 - DNA, 25 bp, Homo sapien
ttctaatcattgcatcccatttctt

SEQ ID NO: 363649 - DNA, 25 bp, Homo sapien
ctgatttgggatgttcatgtccccg

SEQ ID NO: 363650 - DNA, 25 bp, Homo sapien
cctgcaggcctgatttgggatgttc

SEQ ID NO: 363651 - DNA, 25 bp, Homo sapien
tctctcttctcggacctggtgtccc

SEQ ID NO: 363652 - DNA, 25 bp, Homo sapien
gcctggagtcgggagcctctccctg

SEQ ID NO: 363653 - DNA, 25 bp, Homo sapien
gcagacctgatttgggatgttcacg

SEQ ID NO: 363654 - DNA, 25 bp, Homo sapien
atttgggatgttcacgtccccgagc

SEQ ID NO: 363655 - DNA, 25 bp, Homo sapien
cagacctgatttgggatgttcacgt

SEQ ID NO: 363656 - DNA, 25 bp, Homo sapien
tttgggatgttcacgtccccgagcc

SEQ ID NO: 363657 - DNA, 25 bp, Homo sapien
tgggttgttcacgtccccgagccca

SEQ ID NO: 363658 - DNA, 25 bp, Homo sapien
tgttcacgtccccgagcccactcac

SEQ ID NO: 363659 - DNA, 25 bp, Homo sapien
ctgatttgggttgttcacgtccccg

SEQ ID NO: 363660 - DNA, 25 bp, Homo sapien
tgatttgggttgttcacgtccccga

SEQ ID NO: 363661 - DNA, 25 bp, Homo sapien
gacctgatttgggatgttcacgtcc

SEQ ID NO: 363662 - DNA, 25 bp, Homo sapien
gggatgttcacgtccttgagcccac

SEQ ID NO: 363663 - DNA, 25 bp, Homo sapien
gcagacctgatttgggatgttcacg

SEQ ID NO: 363664 - DNA, 25 bp, Homo sapien
gatttgggatgttcacgtccttgag

SEQ ID NO: 363665 - DNA, 25 bp, Homo sapien
tcattgtcgtccttgttgtttcctc

SEQ ID NO: 363666 - DNA, 25 bp, Homo sapien
cagtcattgtcactgggccataaat

SEQ ID NO: 363667 - DNA, 25 bp, Homo sapien
catggcactcaatgactattgtctg

SEQ ID NO: 363668 - DNA, 25 bp, Homo sapien
ccataaatgtggatgacatggcact

SEQ ID NO: 363669 - DNA, 25 bp, Homo sapien
caaagggagtgggataccttccctg

SEQ ID NO: 363670 - DNA, 25 bp, Homo sapien
ctatccacagttggcagctggtgta

SEQ ID NO: 363671 - DNA, 25 bp, Homo sapien
aatcttgtggatcccgctgtgcctc

SEQ ID NO: 363672 - DNA, 25 bp, Homo sapien
tccagcagttggcacgtgggtcctg

SEQ ID NO: 363673 - DNA, 25 bp, Homo sapien
actccttcttgaaaccaatagaagc

SEQ ID NO: 363674 - DNA, 25 bp, Homo sapien
tccttcttgaaaccaatagaagcgt

SEQ ID NO: 363675 - DNA, 25 bp, Homo sapien
cttcttgaaaccaatagaagcgtct

SEQ ID NO: 363676 - DNA, 25 bp, Homo sapien
ccttcttgaaaccaatagaagcgtc

SEQ ID NO: 363677 - DNA, 25 bp, Homo sapien
gctgactggccgttcattgtgcatt

SEQ ID NO: 363678 - DNA, 25 bp, Homo sapien
aatgtgttactgagaaccaactgcc

SEQ ID NO: 363679 - DNA, 25 bp, Homo sapien
tatttgtctctttatcgaccatatt

SEQ ID NO: 363680 - DNA, 25 bp, Homo sapien
atcgaccatatttcctccagatctg

SEQ ID NO: 363681 - DNA, 25 bp, Homo sapien
ggcttaattatcaatcccggctgat

SEQ ID NO: 363682 - DNA, 25 bp, Homo sapien
atattttgggttgcctcgggttgca

SEQ ID NO: 363683 - DNA, 25 bp, Homo sapien
ctgagaggattggacgtgatgcatt

SEQ ID NO: 363684 - DNA, 25 bp, Homo sapien
gctggaatttatctttcaggaggca

SEQ ID NO: 363685 - DNA, 25 bp, Homo sapien
gaagcagacactcggatgtggacgc

SEQ ID NO: 363686 - DNA, 25 bp, Homo sapien
ggaaccaagtgacatcagcctgcct

SEQ ID NO: 363687 - DNA, 25 bp, Homo sapien
cacaggtggacggatataggaacca

SEQ ID NO: 363688 - DNA, 25 bp, Homo sapien
gaagtgtttcccgtcactttcggca

SEQ ID NO: 363689 - DNA, 25 bp, Homo sapien
cagagtcggctgtttttaagacggt

SEQ ID NO: 363690 - DNA, 25 bp, Homo sapien
gagtcggctgtttttaagacggtca

SEQ ID NO: 363691 - DNA, 25 bp, Homo sapien
tcagagtcggctgtttttaagacgg

SEQ ID NO: 363692 - DNA, 25 bp, Homo sapien
cttcgcaggcgttcacagcagatct

SEQ ID NO: 363693 - DNA, 25 bp, Homo sapien
gcagagatgataacgccatgctgag

SEQ ID NO: 363694 - DNA, 25 bp, Homo sapien
gataacgccatgctgagggctccgt

SEQ ID NO: 363695 - DNA, 25 bp, Homo sapien
gcagatctgtgagcagagatgataa

SEQ ID NO: 363696 - DNA, 25 bp, Homo sapien
tctgctctcatatccatcacggagg

SEQ ID NO: 363697 - DNA, 25 bp, Homo sapien
tatccatcacggagggcgttgtggc

SEQ ID NO: 363698 - DNA, 25 bp, Homo sapien
tcatatccatcacggagggcgttgt

SEQ ID NO: 363699 - DNA, 25 bp, Homo sapien
aatgaccagacctcacagcccatgt

SEQ ID NO: 363700 - DNA, 25 bp, Homo sapien
tgtcaaccctgctccagggcttggg

SEQ ID NO: 363701 - DNA, 25 bp, Homo sapien
agagaagggcccatgacccctgtgc

SEQ ID NO: 363702 - DNA, 25 bp, Homo sapien
gtgcccatgtcaaccctgctccagg

SEQ ID NO: 363703 - DNA, 25 bp, Homo sapien
gagaagggcccatgacccctgtgcc

SEQ ID NO: 363704 - DNA, 25 bp, Homo sapien
cctggcataacggtcttggcgcgac

SEQ ID NO: 363705 - DNA, 25 bp, Homo sapien
accccatccggagtcgggagtctgg

SEQ ID NO: 363706 - DNA, 25 bp, Homo sapien
ttggcgcgaccccatccggagtcgg

SEQ ID NO: 363707 - DNA, 25 bp, Homo sapien
tgagggcacaccctggcataacggt

SEQ ID NO: 363708 - DNA, 25 bp, Homo sapien
ttttctacgatggtgagggtgctcc

SEQ ID NO: 363709 - DNA, 25 bp, Homo sapien
actgtcggcaccagctcagctgtgt

SEQ ID NO: 363710 - DNA, 25 bp, Homo sapien
gggtgctccatagggactcggcaca

SEQ ID NO: 363711 - DNA, 25 bp, Homo sapien
gggacgtgttgtgccaatcccggcc

SEQ ID NO: 363712 - DNA, 25 bp, Homo sapien
ctctccccatccctcccgtcctcct

SEQ ID NO: 363713 - DNA, 25 bp, Homo sapien
ccatccctcccgtcctcctgcagcc

SEQ ID NO: 363714 - DNA, 25 bp, Homo sapien
ctccccatccctcccgtcctcctgc

SEQ ID NO: 363715 - DNA, 25 bp, Homo sapien
cgttcccacccaggcagcctcctct

SEQ ID NO: 363716 - DNA, 25 bp, Homo sapien
aagagctggcactgaacgcccatcc

SEQ ID NO: 363717 - DNA, 25 bp, Homo sapien
catcacggcatgcactttcccactc

SEQ ID NO: 363718 - DNA, 25 bp, Homo sapien
ccactcctgaagtaaagagctggca

SEQ ID NO: 363719 - DNA, 25 bp, Homo sapien
tgttggcccagtttccaccatctgc

SEQ ID NO: 363720 - DNA, 25 bp, Homo sapien
gctgggactcaggttcaaagcggaa

SEQ ID NO: 363721 - DNA, 25 bp, Homo sapien
aaatgaccggcactcccaggttgcc

SEQ ID NO: 363722 - DNA, 25 bp, Homo sapien
cgggcctcgcatgtactcagcaagt

SEQ ID NO: 363723 - DNA, 25 bp, Homo sapien
gtctctcagtgacagggccgacact

SEQ ID NO: 363724 - DNA, 25 bp, Homo sapien
gcaggtgaggagagccggctgtgag

SEQ ID NO: 363725 - DNA, 25 bp, Homo sapien
cacccgtcagtgtggaacggcaggt

SEQ ID NO: 363726 - DNA, 25 bp, Homo sapien
cctccccacccgtcagtgtggaacg

SEQ ID NO: 363727 - DNA, 25 bp, Homo sapien
gctgtgagggctgaagcagcctctg

SEQ ID NO: 363728 - DNA, 25 bp, Homo sapien
aagggtcccacgtttggcacaggtg

SEQ ID NO: 363729 - DNA, 25 bp, Homo sapien
ggagtcacacgaaacaagggtccca

SEQ ID NO: 363730 - DNA, 25 bp, Homo sapien
gagacactctggagtcacacgaaac

SEQ ID NO: 363731 - DNA, 25 bp, Homo sapien
aacaagggtcccacgtttggcacag

SEQ ID NO: 363732 - DNA, 25 bp, Homo sapien
gtggggccactggaggcagggccat

SEQ ID NO: 363733 - DNA, 25 bp, Homo sapien
gagtggggccactggaggcagggcc

SEQ ID NO: 363734 - DNA, 25 bp, Homo sapien
tgagtggggccactggaggcagggc

SEQ ID NO: 363735 - DNA, 25 bp, Homo sapien
ctgagtggggccactggaggcaggg

SEQ ID NO: 363736 - DNA, 25 bp, Homo sapien
ggagctgaggatgccgctaatgcct

SEQ ID NO: 363737 - DNA, 25 bp, Homo sapien
ctgaggatgccgctaatgcctcggg

SEQ ID NO: 363738 - DNA, 25 bp, Homo sapien
gaaggccgctgtcccgtttcctctg

SEQ ID NO: 363739 - DNA, 25 bp, Homo sapien
gatgccgctaatgcctcgggtcctc

SEQ ID NO: 363740 - DNA, 25 bp, Homo sapien
gcgatcggcaggatgaaaacgcgcc

SEQ ID NO: 363741 - DNA, 25 bp, Homo sapien
tgaaaacgcgccgtgatcgccgcat

SEQ ID NO: 363742 - DNA, 25 bp, Homo sapien
tcggcaggatgaaaacgcgccgtga

SEQ ID NO: 363743 - DNA, 25 bp, Homo sapien
gcaggatgaaaacgcgccgtgatcg

SEQ ID NO: 363744 - DNA, 25 bp, Homo sapien
ccatggcagacgtgaaacacggtca

SEQ ID NO: 363745 - DNA, 25 bp, Homo sapien
gacaggtggaaacttccagtaccca

SEQ ID NO: 363746 - DNA, 25 bp, Homo sapien
caaggaggcacttggtgtcctgagc

SEQ ID NO: 363747 - DNA, 25 bp, Homo sapien
tcaagtccgactaggagatcctcca

SEQ ID NO: 363748 - DNA, 25 bp, Homo sapien
cattgggattttaccgtgggaagtg

SEQ ID NO: 363749 - DNA, 25 bp, Homo sapien
cctaagatgcatatggaaggcgagt

SEQ ID NO: 363750 - DNA, 25 bp, Homo sapien
gaggcagctccgcatcataattaca

SEQ ID NO: 363751 - DNA, 25 bp, Homo sapien
gtaaactaacaaggctcaccggctg

SEQ ID NO: 363752 - DNA, 25 bp, Homo sapien
ggtgaccaggcggtgcagcttcaca

SEQ ID NO: 363753 - DNA, 25 bp, Homo sapien
ccctgtgtatctcgagtggtgacca

SEQ ID NO: 363754 - DNA, 25 bp, Homo sapien
cagagcaaaccctgtgtatctcgag

SEQ ID NO: 363755 - DNA, 25 bp, Homo sapien
tggttgccccgtgtctgcagccagc

SEQ ID NO: 363756 - DNA, 25 bp, Homo sapien
gaaatgtccaatgtgacctgaggcc

SEQ ID NO: 363757 - DNA, 25 bp, Homo sapien
gacacttgctgaggaaatgtccaat

SEQ ID NO: 363758 - DNA, 25 bp, Homo sapien
tgtccaatgtgacctgaggcccatg

SEQ ID NO: 363759 - DNA, 25 bp, Homo sapien
aggaaatgtccaatgtgacctgagg

SEQ ID NO: 363760 - DNA, 25 bp, Homo sapien
agctcatatggtgccttccacagca

SEQ ID NO: 363761 - DNA, 25 bp, Homo sapien
tggtcacgggcctgtgtagtgtccc

SEQ ID NO: 363762 - DNA, 25 bp, Homo sapien
acgaatacatgaaaaaacgcttggg

SEQ ID NO: 363763 - DNA, 25 bp, Homo sapien
gagggtggaagtgaaccatctgcca

SEQ ID NO: 363764 - DNA, 25 bp, Homo sapien
gcactttccaaatccgacacagtca

SEQ ID NO: 363765 - DNA, 25 bp, Homo sapien
gcttgtcaagactgtttgacagcca

SEQ ID NO: 363766 - DNA, 25 bp, Homo sapien
ttcagccgcttgtcaagactgtttg

SEQ ID NO: 363767 - DNA, 25 bp, Homo sapien
gccgcttgtcaagactgtttgacag

SEQ ID NO: 363768 - DNA, 25 bp, Homo sapien
tcaggagaagaggtccaaaggcacc

SEQ ID NO: 363769 - DNA, 25 bp, Homo sapien
tgaaagtggcgttgacttccctgcc

SEQ ID NO: 363770 - DNA, 25 bp, Homo sapien
tatgctggcccattaggatccacag

SEQ ID NO: 363771 - DNA, 25 bp, Homo sapien
gaatgaacaggaatcccttcgggaa

SEQ ID NO: 363772 - DNA, 25 bp, Homo sapien
ggctcccaaccttcacaggtgcgta

SEQ ID NO: 363773 - DNA, 25 bp, Homo sapien
cttcacaggtgcgtaaggtgcactg

SEQ ID NO: 363774 - DNA, 25 bp, Homo sapien
tccaccgagggtcaggagcactgag

SEQ ID NO: 363775 - DNA, 25 bp, Homo sapien
actgtcggcacacacgctggccggt

SEQ ID NO: 363776 - DNA, 25 bp, Homo sapien
ggcctggaggcacccagatttctct

SEQ ID NO: 363777 - DNA, 25 bp, Homo sapien
cagaacagcctggaggaaaagcagc

SEQ ID NO: 363778 - DNA, 25 bp, Homo sapien
ttctgctggttacccagagcccggt

SEQ ID NO: 363779 - DNA, 25 bp, Homo sapien
acgcggcgctccaagtcaggagtca

SEQ ID NO: 363780 - DNA, 25 bp, Homo sapien
ccggcagactctggagaagcccagg

SEQ ID NO: 363781 - DNA, 25 bp, Homo sapien
caagaaactcaaccccggcttgtgt

SEQ ID NO: 363782 - DNA, 25 bp, Homo sapien
gtgggactgcacagcgcgtcccagc

SEQ ID NO: 363783 - DNA, 25 bp, Homo sapien
ccgagggtgtttccaggcgtgcgag

SEQ ID NO: 363784 - DNA, 25 bp, Homo sapien
tcttctcgcggtttcagattcttct

SEQ ID NO: 363785 - DNA, 25 bp, Homo sapien
gccgtgtcctcctcttctcgcggtt

SEQ ID NO: 363786 - DNA, 25 bp, Homo sapien
ttcggtgcagtctggccgtgtcctc

SEQ ID NO: 363787 - DNA, 25 bp, Homo sapien
gttcggtgcagtctggccgtgtcct

SEQ ID NO: 363788 - DNA, 25 bp, Homo sapien
actgtcctccctacatctatttcag

SEQ ID NO: 363789 - DNA, 25 bp, Homo sapien
cctctgcagatgcacgggatgaagg

SEQ ID NO: 363790 - DNA, 25 bp, Homo sapien
ctcggcctctgcagatgcacgggat

SEQ ID NO: 363791 - DNA, 25 bp, Homo sapien
tacatctatttcagaggacaatgtg

SEQ ID NO: 363792 - DNA, 25 bp, Homo sapien
tcagggctctgtaggacgaggcttc

SEQ ID NO: 363793 - DNA, 25 bp, Homo sapien
tcctgtcctccgcagatgtgcgggc

SEQ ID NO: 363794 - DNA, 25 bp, Homo sapien
tcaggcccagatgtgcggtgatgct

SEQ ID NO: 363795 - DNA, 25 bp, Homo sapien
aggttggcaccagggttctttccat

SEQ ID NO: 363796 - DNA, 25 bp, Homo sapien
agcaaagcctggacaaccgacgcag

SEQ ID NO: 363797 - DNA, 25 bp, Homo sapien
tcaggtccacacgtggctccctgtg

SEQ ID NO: 363798 - DNA, 25 bp, Homo sapien
gactgcctgatcatgccacgggcct

SEQ ID NO: 363799 - DNA, 25 bp, Homo sapien
gacgcagaacagttcgactgcctga

SEQ ID NO: 363800 - DNA, 25 bp, Homo sapien
gctccaatctggagctgagtgctgg

SEQ ID NO: 363801 - DNA, 25 bp, Homo sapien
ggctccaatctggagctgagtgctg

SEQ ID NO: 363802 - DNA, 25 bp, Homo sapien
ctgcaggctccaatctggagctgag

SEQ ID NO: 363803 - DNA, 25 bp, Homo sapien
ggccaggctggcccttggtgaccat

SEQ ID NO: 363804 - DNA, 25 bp, Homo sapien
tctctgcagccatcgtgaaagtgtc

SEQ ID NO: 363805 - DNA, 25 bp, Homo sapien
acactggcacaaccgctccagctcc

SEQ ID NO: 363806 - DNA, 25 bp, Homo sapien
ctggtcttctctgcagccatcgtga

SEQ ID NO: 363807 - DNA, 25 bp, Homo sapien
gccatcgtgaaagtgtccacactgg

SEQ ID NO: 363808 - DNA, 25 bp, Homo sapien
gtccactcggacgatgcctcgcagg

SEQ ID NO: 363809 - DNA, 25 bp, Homo sapien
ccactcggacgatgcctcgcagggc

SEQ ID NO: 363810 - DNA, 25 bp, Homo sapien
tgtccactcggacgatgcctcgcag

SEQ ID NO: 363811 - DNA, 25 bp, Homo sapien
tccactcggacgatgcctcgcaggg

SEQ ID NO: 363812 - DNA, 25 bp, Homo sapien
tccgtgtcaccacgggaccagaggg

SEQ ID NO: 363813 - DNA, 25 bp, Homo sapien
gttgacaccttcacatagacggaga

SEQ ID NO: 363814 - DNA, 25 bp, Homo sapien
gctcagccaggtgggtgacgcttcc

SEQ ID NO: 363815 - DNA, 25 bp, Homo sapien
tgtctgctgacttttccccgaagct

SEQ ID NO: 363816 - DNA, 25 bp, Homo sapien
agcccccgctgaggtcggcctggct

SEQ ID NO: 363817 - DNA, 25 bp, Homo sapien
ccccgctgaggtcggcctggctggg

SEQ ID NO: 363818 - DNA, 25 bp, Homo sapien
ctggagcccccgctgaggtcggcct

SEQ ID NO: 363819 - DNA, 25 bp, Homo sapien
gctggggcgagggtctgcctcaggt

SEQ ID NO: 363820 - DNA, 25 bp, Homo sapien
gccgtggaaccaggcctggagagcg

SEQ ID NO: 363821 - DNA, 25 bp, Homo sapien
tcctccacctgtgaaggactggccg

SEQ ID NO: 363822 - DNA, 25 bp, Homo sapien
ttcctccacctgtgaaggactggcc

SEQ ID NO: 363823 - DNA, 25 bp, Homo sapien
atggaagccgtggaaccaggcctgg

SEQ ID NO: 363824 - DNA, 25 bp, Homo sapien
tgtatcccctccttttctggacacc

SEQ ID NO: 363825 - DNA, 25 bp, Homo sapien
ctgtatcccctccttttctggacac

SEQ ID NO: 363826 - DNA, 25 bp, Homo sapien
cacggctgatccaatcacttgggca

SEQ ID NO: 363827 - DNA, 25 bp, Homo sapien
cttgggcagtcaggaaccacgatca

SEQ ID NO: 363828 - DNA, 25 bp, Homo sapien
caggtgctaactgtgtttgcctctg

SEQ ID NO: 363829 - DNA, 25 bp, Homo sapien
caaaaatcgagtttcccagatggca

SEQ ID NO: 363830 - DNA, 25 bp, Homo sapien
gatagaaagggcactcagaggagca

SEQ ID NO: 363831 - DNA, 25 bp, Homo sapien
tcagaggagcatgaggccctcgatg

SEQ ID NO: 363832 - DNA, 25 bp, Homo sapien
ctgggatagaaagggcactcagagg

SEQ ID NO: 363833 - DNA, 25 bp, Homo sapien
ggagcatgaggccctcgatgaaggg

SEQ ID NO: 363834 - DNA, 25 bp, Homo sapien
ctgggattatggtcttggtcaccgt

SEQ ID NO: 363835 - DNA, 25 bp, Homo sapien
tgggattatggtcttggtcaccgtc

SEQ ID NO: 363836 - DNA, 25 bp, Homo sapien
gggattatggtcttggtcaccgtca

SEQ ID NO: 363837 - DNA, 25 bp, Homo sapien
ggattatggtcttggtcaccgtcat

SEQ ID NO: 363838 - DNA, 25 bp, Homo sapien
aacctttgcacgaagccaccggtct

SEQ ID NO: 363839 - DNA, 25 bp, Homo sapien
cacagtttaacctttgcacgaagcc

SEQ ID NO: 363840 - DNA, 25 bp, Homo sapien
gccaccggtcttcggctttctgggc

SEQ ID NO: 363841 - DNA, 25 bp, Homo sapien
tttgcacgaagccaccggtcttcgg

SEQ ID NO: 363842 - DNA, 25 bp, Homo sapien
caagttcaggagaccactgagctca

SEQ ID NO: 363843 - DNA, 25 bp, Homo sapien
ggcacaagttcaggagaccactgag

SEQ ID NO: 363844 - DNA, 25 bp, Homo sapien
cttgaaggcacaagttcaggagacc

SEQ ID NO: 363845 - DNA, 25 bp, Homo sapien
aggagaccactgagctcacgtcctc

SEQ ID NO: 363846 - DNA, 25 bp, Homo sapien
aagtgaggagccttcagcacaggca

SEQ ID NO: 363847 - DNA, 25 bp, Homo sapien
agaagtgaggagccttcagcacagg

SEQ ID NO: 363848 - DNA, 25 bp, Homo sapien
agccgtggcggatgctcattaactc

SEQ ID NO: 363849 - DNA, 25 bp, Homo sapien
cgtggcggatgctcattaactctgc

SEQ ID NO: 363850 - DNA, 25 bp, Homo sapien
acacgaggggcgtggaacgaggcca

SEQ ID NO: 363851 - DNA, 25 bp, Homo sapien
tcgcctccatgggcaatggctcctc

SEQ ID NO: 363852 - DNA, 25 bp, Homo sapien
ctgattcctggagctcacacgaggg

SEQ ID NO: 363853 - DNA, 25 bp, Homo sapien
gcgtggaacgaggccagtcgcctcc

SEQ ID NO: 363854 - DNA, 25 bp, Homo sapien
tctctcacaggcctaaggaggatga

SEQ ID NO: 363855 - DNA, 25 bp, Homo sapien
actccccagatccagtctctcacag

SEQ ID NO: 363856 - DNA, 25 bp, Homo sapien
aaccgaattgtctcattcagcttca

SEQ ID NO: 363857 - DNA, 25 bp, Homo sapien
gaggatgaagaaccgaattgtctca

SEQ ID NO: 363858 - DNA, 25 bp, Homo sapien
ctgagtccgtttgctggacagtgaa

SEQ ID NO: 363859 - DNA, 25 bp, Homo sapien
aggatgaggtggttcagccaaggtc

SEQ ID NO: 363860 - DNA, 25 bp, Homo sapien
cagtgaaggatgaggtggttcagcc

SEQ ID NO: 363861 - DNA, 25 bp, Homo sapien
gtcactgtggacaaatccgccaggc

SEQ ID NO: 363862 - DNA, 25 bp, Homo sapien
gccatgggcaaatgcgtacatcttc

SEQ ID NO: 363863 - DNA, 25 bp, Homo sapien
catcttccaaccagtgacatcggga

SEQ ID NO: 363864 - DNA, 25 bp, Homo sapien
taataatgctttaatgggcaagaag

SEQ ID NO: 363865 - DNA, 25 bp, Homo sapien
taatgctttaatgggcaagaagcca

SEQ ID NO: 363866 - DNA, 25 bp, Homo sapien
tctggggcagcgtatgagccagaac

SEQ ID NO: 363867 - DNA, 25 bp, Homo sapien
tagctctggggcagcgtatgagcca

SEQ ID NO: 363868 - DNA, 25 bp, Homo sapien
gttgtcaacactgatgatcatccta

SEQ ID NO: 363869 - DNA, 25 bp, Homo sapien
cactgatgatcatcctagctctggg

SEQ ID NO: 363870 - DNA, 25 bp, Homo sapien
ccaggatttaaatccgaatctgtcc

SEQ ID NO: 363871 - DNA, 25 bp, Homo sapien
gaatgtctggtgaatccttgctatg

SEQ ID NO: 363872 - DNA, 25 bp, Homo sapien
ccgtctgtactggtgttgtcttgaa

SEQ ID NO: 363873 - DNA, 25 bp, Homo sapien
tctgtccaaggtgttaatacctgtc

SEQ ID NO: 363874 - DNA, 25 bp, Homo sapien
tcctgttgtacagctgtccccgagg

SEQ ID NO: 363875 - DNA, 25 bp, Homo sapien
tccccgagggagtgagcaacgtctt

SEQ ID NO: 363876 - DNA, 25 bp, Homo sapien
cacgtgcttcgtgggtggtggaatc

SEQ ID NO: 363877 - DNA, 25 bp, Homo sapien
tctgtccgctaagaaagagcttcac

SEQ ID NO: 363878 - DNA, 25 bp, Homo sapien
ctcgatgcacgttttaaattcaggt

SEQ ID NO: 363879 - DNA, 25 bp, Homo sapien
tggccctggcatgatgtttggcgtc

SEQ ID NO: 363880 - DNA, 25 bp, Homo sapien
aattcaggtgtcttaagcacccatg

SEQ ID NO: 363881 - DNA, 25 bp, Homo sapien
atggccctggcatgatgtttggcgt

SEQ ID NO: 363882 - DNA, 25 bp, Homo sapien
ctgggccctggcactgcagccacat

SEQ ID NO: 363883 - DNA, 25 bp, Homo sapien
caatcactggagagaaggcgtgggt

SEQ ID NO: 363884 - DNA, 25 bp, Homo sapien
tgagcagattcctggagcaatcact

SEQ ID NO: 363885 - DNA, 25 bp, Homo sapien
tctaggtctgacagggagcgtgtcc

SEQ ID NO: 363886 - DNA, 25 bp, Homo sapien
cagggagcgtgtcctaatctgtccc

SEQ ID NO: 363887 - DNA, 25 bp, Homo sapien
ctcagcacgccctttcttccatacc

SEQ ID NO: 363888 - DNA, 25 bp, Homo sapien
cagcacgccctttcttccataccac

SEQ ID NO: 363889 - DNA, 25 bp, Homo sapien
tcagcacgccctttcttccatacca

SEQ ID NO: 363890 - DNA, 25 bp, Homo sapien
ccaggggtcctccagcaagtctcct

SEQ ID NO: 363891 - DNA, 25 bp, Homo sapien
gtccaacacttcatgcaggttctca

SEQ ID NO: 363892 - DNA, 25 bp, Homo sapien
cttcctgggtcttgcatgtgtttcc

SEQ ID NO: 363893 - DNA, 25 bp, Homo sapien
catgcattccgtcttctcttgccgg

SEQ ID NO: 363894 - DNA, 25 bp, Homo sapien
acatggacgtggacttcctgggtct

SEQ ID NO: 363895 - DNA, 25 bp, Homo sapien
ctggtagaccgtcccagaatccagg

SEQ ID NO: 363896 - DNA, 25 bp, Homo sapien
gctgtacgtgggcaatggacagtca

SEQ ID NO: 363897 - DNA, 25 bp, Homo sapien
tgagttgacggcctggtagaccgtc

SEQ ID NO: 363898 - DNA, 25 bp, Homo sapien
gggcaatggacagtcagcccgtgcc

SEQ ID NO: 363899 - DNA, 25 bp, Homo sapien
cagaggagggtccctgccaagaggg

SEQ ID NO: 363900 - DNA, 25 bp, Homo sapien
agaggagggtccctgccaagagggt

SEQ ID NO: 363901 - DNA, 25 bp, Homo sapien
gcagaggagggtccctgccaagagg

SEQ ID NO: 363902 - DNA, 25 bp, Homo sapien
gaggagggtccctgccaagagggtc

SEQ ID NO: 363903 - DNA, 25 bp, Homo sapien
ctccaccctccacacggggctcagc

SEQ ID NO: 363904 - DNA, 25 bp, Homo sapien
ggagtcctgacacagggacctccac

SEQ ID NO: 363905 - DNA, 25 bp, Homo sapien
aagggagacatcgaggttggggtgg

SEQ ID NO: 363906 - DNA, 25 bp, Homo sapien
ccattccgacaccaatcaatagcca

SEQ ID NO: 363907 - DNA, 25 bp, Homo sapien
gggaatgagctcaggaggcgtcaga

SEQ ID NO: 363908 - DNA, 25 bp, Homo sapien
gaatgagctcaggaggcgtcagagg

SEQ ID NO: 363909 - DNA, 25 bp, Homo sapien
agctcaggaggcgtcagaggcctgg

SEQ ID NO: 363910 - DNA, 25 bp, Homo sapien
atgagctcaggaggcgtcagaggcc

SEQ ID NO: 363911 - DNA, 25 bp, Homo sapien
agacagccggtacacggcaggctcc

SEQ ID NO: 363912 - DNA, 25 bp, Homo sapien
tctgcactgcggctctagctgctgc

SEQ ID NO: 363913 - DNA, 25 bp, Homo sapien
gaccctctagacttggcggcaacgt

SEQ ID NO: 363914 - DNA, 25 bp, Homo sapien
aagcctttctcccttgcgctcgacc

SEQ ID NO: 363915 - DNA, 25 bp, Homo sapien
cagattacgcacagcacgaaggcgc

SEQ ID NO: 363916 - DNA, 25 bp, Homo sapien
acgaaggcgcaaaggcagcgcgtgg

SEQ ID NO: 363917 - DNA, 25 bp, Homo sapien
aatggtggctatggccagattacgc

SEQ ID NO: 363918 - DNA, 25 bp, Homo sapien
gcaaaggcagcgcgtggaaccacat

SEQ ID NO: 363919 - DNA, 25 bp, Homo sapien
cacaggagggtttgcggtggtctcc

SEQ ID NO: 363920 - DNA, 25 bp, Homo sapien
tggaaaccaaagacggcgaagcaca

SEQ ID NO: 363921 - DNA, 25 bp, Homo sapien
gacagccaggcggatggaaaccaaa

SEQ ID NO: 363922 - DNA, 25 bp, Homo sapien
caggcggatggaaaccaaagacggc

SEQ ID NO: 363923 - DNA, 25 bp, Homo sapien
tgtgagtgcaggaatgtcatacgct

SEQ ID NO: 363924 - DNA, 25 bp, Homo sapien
tacctccaattctagacagctcctt

SEQ ID NO: 363925 - DNA, 25 bp, Homo sapien
tgtcatacgcttggatacctccaat

SEQ ID NO: 363926 - DNA, 25 bp, Homo sapien
caggaatgtcatacgcttggatacc

SEQ ID NO: 363927 - DNA, 25 bp, Homo sapien
ccctcggccagaagcaaatccgtgt

SEQ ID NO: 363928 - DNA, 25 bp, Homo sapien
ggccagaagcaaatccgtgtggaca

SEQ ID NO: 363929 - DNA, 25 bp, Homo sapien
ccagaagcaaatccgtgtggacagg

SEQ ID NO: 363930 - DNA, 25 bp, Homo sapien
tcggccagaagcaaatccgtgtgga

SEQ ID NO: 363931 - DNA, 25 bp, Homo sapien
agcgcagtgccaggggaatctaagc

SEQ ID NO: 363932 - DNA, 25 bp, Homo sapien
tcagagcgcagtgccaggggaatct

SEQ ID NO: 363933 - DNA, 25 bp, Homo sapien
agagcgcagtgccaggggaatctaa

SEQ ID NO: 363934 - DNA, 25 bp, Homo sapien
gagcgcagtgccaggggaatctaag

SEQ ID NO: 363935 - DNA, 25 bp, Homo sapien
tgctgcactgggacatcttctgctc

SEQ ID NO: 363936 - DNA, 25 bp, Homo sapien
ggcctgctgcactgggacatcttct

SEQ ID NO: 363937 - DNA, 25 bp, Homo sapien
tcttctgctccctgaagagaggtct

SEQ ID NO: 363938 - DNA, 25 bp, Homo sapien
agcaggcctgctgcactgggacatc

SEQ ID NO: 363939 - DNA, 25 bp, Homo sapien
gttgggtctgggagtggagcagatg

SEQ ID NO: 363940 - DNA, 25 bp, Homo sapien
ctgggctaagggctgagtacaggag

SEQ ID NO: 363941 - DNA, 25 bp, Homo sapien
gagtggagcagatgtgacgcttgca

SEQ ID NO: 363942 - DNA, 25 bp, Homo sapien
cagtgggcccggggaagcctctcct

SEQ ID NO: 363943 - DNA, 25 bp, Homo sapien
actgatgcgatgcttagcggggtcc

SEQ ID NO: 363944 - DNA, 25 bp, Homo sapien
ctgcactgatgcgatgcttagcggg

SEQ ID NO: 363945 - DNA, 25 bp, Homo sapien
tgatgcgatgcttagcggggtccct

SEQ ID NO: 363946 - DNA, 25 bp, Homo sapien
atgcgatgcttagcggggtccctac

SEQ ID NO: 363947 - DNA, 25 bp, Homo sapien
gctcctttgaggacacgttgaccat

SEQ ID NO: 363948 - DNA, 25 bp, Homo sapien
ctccctgctcctttgaggacacgtt

SEQ ID NO: 363949 - DNA, 25 bp, Homo sapien
cctgctcctttgaggacacgttgac

SEQ ID NO: 363950 - DNA, 25 bp, Homo sapien
tgggttggggcgtgcaggcctggcg

SEQ ID NO: 363951 - DNA, 25 bp, Homo sapien
agacctcacgactctggaagctgag

SEQ ID NO: 363952 - DNA, 25 bp, Homo sapien
ggccgggtgtgttgtgggtctccag

SEQ ID NO: 363953 - DNA, 25 bp, Homo sapien
ttctcccagacctcacgactctgga

SEQ ID NO: 363954 - DNA, 25 bp, Homo sapien
agggctgtggccgggtgtgttgtgg

SEQ ID NO: 363955 - DNA, 25 bp, Homo sapien
gaggcaacagcagaagcccacagca

SEQ ID NO: 363956 - DNA, 25 bp, Homo sapien
aggagacggcagcttgggccaggac

SEQ ID NO: 363957 - DNA, 25 bp, Homo sapien
agacggcagcttgggccaggacggt

SEQ ID NO: 363958 - DNA, 25 bp, Homo sapien
cccacagcagaggagacggcagctt

SEQ ID NO: 363959 - DNA, 25 bp, Homo sapien
tcactttcagatctttccggttttg

SEQ ID NO: 363960 - DNA, 25 bp, Homo sapien
tctgtccttcttcactttcagatct

SEQ ID NO: 363961 - DNA, 25 bp, Homo sapien
tttcagatctttccggttttgaaca

SEQ ID NO: 363962 - DNA, 25 bp, Homo sapien
cagatctttccggttttgaacacgg

SEQ ID NO: 363963 - DNA, 25 bp, Homo sapien
ctgtggctggacaaaggcctcctca

SEQ ID NO: 363964 - DNA, 25 bp, Homo sapien
gcctgtggctggacaaaggcctcct

SEQ ID NO: 363965 - DNA, 25 bp, Homo sapien
aggcctgtggctggacaaaggcctc

SEQ ID NO: 363966 - DNA, 25 bp, Homo sapien
ccaggcctgtggctggacaaaggcc

SEQ ID NO: 363967 - DNA, 25 bp, Homo sapien
cacaaggtcgctgtaccaggagatg

SEQ ID NO: 363968 - DNA, 25 bp, Homo sapien
ggatcccggtgatgcataaagcccc

SEQ ID NO: 363969 - DNA, 25 bp, Homo sapien
gcgcacttcaggtccacagcatggt

SEQ ID NO: 363970 - DNA, 25 bp, Homo sapien
gatttcgaatgcagatattacaagg

SEQ ID NO: 363971 - DNA, 25 bp, Homo sapien
cccaggacagcccaggggaagggca

SEQ ID NO: 363972 - DNA, 25 bp, Homo sapien
ggggaagggcaggaagggcaggtgc

SEQ ID NO: 363973 - DNA, 25 bp, Homo sapien
ggaagggcaggaagggcaggtgcat

SEQ ID NO: 363974 - DNA, 25 bp, Homo sapien
ctgatgggttcagagcccaggacag

SEQ ID NO: 363975 - DNA, 25 bp, Homo sapien
gcggctcttccccaccgcagcaaaa

SEQ ID NO: 363976 - DNA, 25 bp, Homo sapien
aggcaggagctcctgtgagcggctc

SEQ ID NO: 363977 - DNA, 25 bp, Homo sapien
agtcggcatcgcactggtcattctt

SEQ ID NO: 363978 - DNA, 25 bp, Homo sapien
gcagcaaaacctttgcagtcggcat

SEQ ID NO: 363979 - DNA, 25 bp, Homo sapien
gaggcacgtcgacttcggcagatga

SEQ ID NO: 363980 - DNA, 25 bp, Homo sapien
caaattgtccaaggacgaggcacgt

SEQ ID NO: 363981 - DNA, 25 bp, Homo sapien
catcttacagtggagcacagccggt

SEQ ID NO: 363982 - DNA, 25 bp, Homo sapien
tgtttttcaacacagcgagcagttc

SEQ ID NO: 363983 - DNA, 25 bp, Homo sapien
tgtactctgaaccacgggcgtggag

SEQ ID NO: 363984 - DNA, 25 bp, Homo sapien
tggaggcaagaacagccggtgtcca

SEQ ID NO: 363985 - DNA, 25 bp, Homo sapien
ggtgtccaagggctccgagtccact

SEQ ID NO: 363986 - DNA, 25 bp, Homo sapien
ccgtgtactctgaaccacgggcgtg

SEQ ID NO: 363987 - DNA, 25 bp, Homo sapien
acaaagagtcacctttaagtgttga

SEQ ID NO: 363988 - DNA, 25 bp, Homo sapien
caaagagtcacctttaagtgttgat

SEQ ID NO: 363989 - DNA, 25 bp, Homo sapien
aaagagtcacctttaagtgttgatc

SEQ ID NO: 363990 - DNA, 25 bp, Homo sapien
tcctgccttgccacaaagagtcacc

SEQ ID NO: 363991 - DNA, 25 bp, Homo sapien
ctgggcggtggagctcgcttcttct

SEQ ID NO: 363992 - DNA, 25 bp, Homo sapien
caccttggggaaagcagaaccagag

SEQ ID NO: 363993 - DNA, 25 bp, Homo sapien
ggcggtggagctcgcttcttcttga

SEQ ID NO: 363994 - DNA, 25 bp, Homo sapien
ggccgctgggcggtggagctcgctt

SEQ ID NO: 363995 - DNA, 25 bp, Homo sapien
cctccaagctcctttggcagactgg

SEQ ID NO: 363996 - DNA, 25 bp, Homo sapien
tggctccctagtcatcgagcagctc

SEQ ID NO: 363997 - DNA, 25 bp, Homo sapien
cagggacagcgtcggaacggctcat

SEQ ID NO: 363998 - DNA, 25 bp, Homo sapien
ctgaatcctctgtgggcccgagaca

SEQ ID NO: 363999 - DNA, 25 bp, Homo sapien
cgatcaatgacttggcagtggcttt

SEQ ID NO: 364000 - DNA, 25 bp, Homo sapien
tggggaatcttctccgtagctccag

SEQ ID NO: 364001 - DNA, 25 bp, Homo sapien
aactggtcaacagcgatcaatgact

SEQ ID NO: 364002 - DNA, 25 bp, Homo sapien
tcagcaggacacagacgaggtgaat

SEQ ID NO: 364003 - DNA, 25 bp, Homo sapien
atgaggcccaggaagacgcctcggc

SEQ ID NO: 364004 - DNA, 25 bp, Homo sapien
cccacgcaggccatgcatctgccag

SEQ ID NO: 364005 - DNA, 25 bp, Homo sapien
ggcccaggaagacgcctcggccaaa

SEQ ID NO: 364006 - DNA, 25 bp, Homo sapien
catgcatctgccagggatgaggccc

SEQ ID NO: 364007 - DNA, 25 bp, Homo sapien
gatggattcgaatccagagcagtct

SEQ ID NO: 364008 - DNA, 25 bp, Homo sapien
caaagcaagcctaattctgttttcc

SEQ ID NO: 364009 - DNA, 25 bp, Homo sapien
ctggggcaaagcaagcctaattctg

SEQ ID NO: 364010 - DNA, 25 bp, Homo sapien
tgttttcccccgtcatctgcgccaa

SEQ ID NO: 364011 - DNA, 25 bp, Homo sapien
cgtcttccttcacgttcccgtctga

SEQ ID NO: 364012 - DNA, 25 bp, Homo sapien
tggctttgatcccctggatgtggaa

SEQ ID NO: 364013 - DNA, 25 bp, Homo sapien
tggatgtggaaggagcccctgaacc

SEQ ID NO: 364014 - DNA, 25 bp, Homo sapien
tcacgttcccgtctgactgcctctg

SEQ ID NO: 364015 - DNA, 25 bp, Homo sapien
caccctgagcttgagctcgcaattg

SEQ ID NO: 364016 - DNA, 25 bp, Homo sapien
agcacccaccctgagcttgagctcg

SEQ ID NO: 364017 - DNA, 25 bp, Homo sapien
agctcgcaattgagagcccctcggc

SEQ ID NO: 364018 - DNA, 25 bp, Homo sapien
gcttgagctcgcaattgagagcccc

SEQ ID NO: 364019 - DNA, 25 bp, Homo sapien
accaagtcatttatctcgtgcaccc

SEQ ID NO: 364020 - DNA, 25 bp, Homo sapien
tttgtttgcaccaagtcatttatct

SEQ ID NO: 364021 - DNA, 25 bp, Homo sapien
tgtttgcaccaagtcatttatctcg

SEQ ID NO: 364022 - DNA, 25 bp, Homo sapien
agtcatttatctcgtgcaccccagg

SEQ ID NO: 364023 - DNA, 25 bp, Homo sapien
tccagcgttagcaaagcagctctcc

SEQ ID NO: 364024 - DNA, 25 bp, Homo sapien
cactgccaactccagcgttagcaaa

SEQ ID NO: 364025 - DNA, 25 bp, Homo sapien
catggacgtgccagaggcatccgag

SEQ ID NO: 364026 - DNA, 25 bp, Homo sapien
agctcttgcccagctgttccactgc

SEQ ID NO: 364027 - DNA, 25 bp, Homo sapien
tctaggttgactcggcacagcgtaa

SEQ ID NO: 364028 - DNA, 25 bp, Homo sapien
gacatctaggttgactcggcacagc

SEQ ID NO: 364029 - DNA, 25 bp, Homo sapien
aagacatctaggttgactcggcaca

SEQ ID NO: 364030 - DNA, 25 bp, Homo sapien
ggttgactcggcacagcgtaatgtg

SEQ ID NO: 364031 - DNA, 25 bp, Homo sapien
tcagtccatggatttctgattgtcc

SEQ ID NO: 364032 - DNA, 25 bp, Homo sapien
caatgaatgacgaaagaggccctgc

SEQ ID NO: 364033 - DNA, 25 bp, Homo sapien
gaacacctgggtctgatgacgatca

SEQ ID NO: 364034 - DNA, 25 bp, Homo sapien
acaccggctcagtcagcgtgggaac

SEQ ID NO: 364035 - DNA, 25 bp, Homo sapien
cgatcatgatttgataggagaccac

SEQ ID NO: 364036 - DNA, 25 bp, Homo sapien
tctgagtgtctggatgctcgtcctg

SEQ ID NO: 364037 - DNA, 25 bp, Homo sapien
cctgggtgtctggatgctcgtcctt

SEQ ID NO: 364038 - DNA, 25 bp, Homo sapien
tggatgctcgtcctgtgtgcctggc

SEQ ID NO: 364039 - DNA, 25 bp, Homo sapien
tcgtccttgtgtgcctggtccgtct

SEQ ID NO: 364040 - DNA, 25 bp, Homo sapien
gaggtggcacccgtgagcccagtcc

SEQ ID NO: 364041 - DNA, 25 bp, Homo sapien
cagaggtggcacccgtgagcccagt

SEQ ID NO: 364042 - DNA, 25 bp, Homo sapien
gtgatacagaggtggcacccgtgag

SEQ ID NO: 364043 - DNA, 25 bp, Homo sapien
atacagaggtggcacccgtgagccc

SEQ ID NO: 364044 - DNA, 25 bp, Homo sapien
tgtggcttccacaggacacagggag

SEQ ID NO: 364045 - DNA, 25 bp, Homo sapien
cagtgaagaggctctggatgctcat

SEQ ID NO: 364046 - DNA, 25 bp, Homo sapien
acagtgaagaggctctggatgctca

SEQ ID NO: 364047 - DNA, 25 bp, Homo sapien
acaggacacagggagacagtgaaga

SEQ ID NO: 364048 - DNA, 25 bp, Homo sapien
aggactggcgatggggcctccccac

SEQ ID NO: 364049 - DNA, 25 bp, Homo sapien
gaggactggcgatggggcctcccca

SEQ ID NO: 364050 - DNA, 25 bp, Homo sapien
ggactggcgatggggcctccccacc

SEQ ID NO: 364051 - DNA, 25 bp, Homo sapien
caaatgacatcattgtactttctac

SEQ ID NO: 364052 - DNA, 25 bp, Homo sapien
tgggactgtcctaagtccttcgccg

SEQ ID NO: 364053 - DNA, 25 bp, Homo sapien
taaatggccacggagcattcggagg

SEQ ID NO: 364054 - DNA, 25 bp, Homo sapien
tcgccgatggaggtgctttcaaatg

SEQ ID NO: 364055 - DNA, 25 bp, Homo sapien
cgcttcacgtcgtggggattctgtg

SEQ ID NO: 364056 - DNA, 25 bp, Homo sapien
tccatgcaacgcttcacgtcgtggg

SEQ ID NO: 364057 - DNA, 25 bp, Homo sapien
ttccatgcaacgcttcacgtcgtgg

SEQ ID NO: 364058 - DNA, 25 bp, Homo sapien
caacgcttcacgtcgtggggattct

SEQ ID NO: 364059 - DNA, 25 bp, Homo sapien
atttcacgacatccggctccccggg

SEQ ID NO: 364060 - DNA, 25 bp, Homo sapien
cccatggatttcacgacatccggct

SEQ ID NO: 364061 - DNA, 25 bp, Homo sapien
gatttcacgacatccggctccccgg

SEQ ID NO: 364062 - DNA, 25 bp, Homo sapien
atggatttcacgacatccggctccc

SEQ ID NO: 364063 - DNA, 25 bp, Homo sapien
ggtgcaatgctgtaagcgctcatct

SEQ ID NO: 364064 - DNA, 25 bp, Homo sapien
tgctgtaagcgctcatctgctccaa

SEQ ID NO: 364065 - DNA, 25 bp, Homo sapien
tgtaagcgctcatctgctccaagcc

SEQ ID NO: 364066 - DNA, 25 bp, Homo sapien
tccaagccgttcccagggagcgcag

SEQ ID NO: 364067 - DNA, 25 bp, Homo sapien
ttccatcccacattgcaggtttggg

SEQ ID NO: 364068 - DNA, 25 bp, Homo sapien
tttccatcccacattgcaggtttgg

SEQ ID NO: 364069 - DNA, 25 bp, Homo sapien
tttgcggttttccatcccacattgc

SEQ ID NO: 364070 - DNA, 25 bp, Homo sapien
tcacgtttgcggttttccatcccac

SEQ ID NO: 364071 - DNA, 25 bp, Homo sapien
ctcgtgcttgttgagacagtggctc

SEQ ID NO: 364072 - DNA, 25 bp, Homo sapien
acagtggctcatggcgcatgtcttc

SEQ ID NO: 364073 - DNA, 25 bp, Homo sapien
agggacaggcgctccttcctccttc

SEQ ID NO: 364074 - DNA, 25 bp, Homo sapien
tgcttgttgagacagtggctcatgg

SEQ ID NO: 364075 - DNA, 25 bp, Homo sapien
tgcaggtccacgggctggtacttct

SEQ ID NO: 364076 - DNA, 25 bp, Homo sapien
ttccctcgagggtctcaggccttga

SEQ ID NO: 364077 - DNA, 25 bp, Homo sapien
cattgctgcacaggcggccaccgcc

SEQ ID NO: 364078 - DNA, 25 bp, Homo sapien
tcggatcttagacagcctggaggct

SEQ ID NO: 364079 - DNA, 25 bp, Homo sapien
tttagtgacacgcagctgggacagc

SEQ ID NO: 364080 - DNA, 25 bp, Homo sapien
gcgggctgtggacgggtgctcttgt

SEQ ID NO: 364081 - DNA, 25 bp, Homo sapien
gggctgtggacgggtgctcttgtgt

SEQ ID NO: 364082 - DNA, 25 bp, Homo sapien
ctgcgggctgtggacgggtgctctt

SEQ ID NO: 364083 - DNA, 25 bp, Homo sapien
gctgtggacgggtgctcttgtgttt

SEQ ID NO: 364084 - DNA, 25 bp, Homo sapien
gccctggagttcgctctcctctggg

SEQ ID NO: 364085 - DNA, 25 bp, Homo sapien
ggtctataatgaagccagccaggca

SEQ ID NO: 364086 - DNA, 25 bp, Homo sapien
aggcagagccggagctcccagcatc

SEQ ID NO: 364087 - DNA, 25 bp, Homo sapien
ccagcatccctgagacctgacacct

SEQ ID NO: 364088 - DNA, 25 bp, Homo sapien
gcatccctgagacctgacacctttt

SEQ ID NO: 364089 - DNA, 25 bp, Homo sapien
tcctggccaagagtccagcgtggga

SEQ ID NO: 364090 - DNA, 25 bp, Homo sapien
tctggcagcggtgccgagcacaggg

SEQ ID NO: 364091 - DNA, 25 bp, Homo sapien
cccattcctgggtgtagatgctgtg

SEQ ID NO: 364092 - DNA, 25 bp, Homo sapien
gagccgatgaggagaaggttgtcct

SEQ ID NO: 364093 - DNA, 25 bp, Homo sapien
ggaggagttgctcccatttacaagg

SEQ ID NO: 364094 - DNA, 25 bp, Homo sapien
tacaaggttcttcgtgtaaaacata

SEQ ID NO: 364095 - DNA, 25 bp, Homo sapien
gctcccatttacaaggttcttcgtg

SEQ ID NO: 364096 - DNA, 25 bp, Homo sapien
gttcttcgtgtaaaacataagctca

SEQ ID NO: 364097 - DNA, 25 bp, Homo sapien
gacagtatgaccgagacaaaaccac

SEQ ID NO: 364098 - DNA, 25 bp, Homo sapien
ccacctgtatgcttctctgattaaa

SEQ ID NO: 364099 - DNA, 25 bp, Homo sapien
gtatgaccgagacaaaaccacctgt

SEQ ID NO: 364100 - DNA, 25 bp, Homo sapien
tctctgcgttcttctgacagtatga

SEQ ID NO: 364101 - DNA, 25 bp, Homo sapien
aggatcccatcctccccgcagatgg

SEQ ID NO: 364102 - DNA, 25 bp, Homo sapien
tgggttcggccttgtcattggctct

SEQ ID NO: 364103 - DNA, 25 bp, Homo sapien
tgtggactcgacttcctgggtgaca

SEQ ID NO: 364104 - DNA, 25 bp, Homo sapien
ccccgcagatgggtcatggagctgc

SEQ ID NO: 364105 - DNA, 25 bp, Homo sapien
gatgcccaaggatccaactgaactt

SEQ ID NO: 364106 - DNA, 25 bp, Homo sapien
tgagatgagcccgaattaactgcct

SEQ ID NO: 364107 - DNA, 25 bp, Homo sapien
gaatatcttcccgtggatgcccaag

SEQ ID NO: 364108 - DNA, 25 bp, Homo sapien
cagagttgaccaaaagggctccagg

SEQ ID NO: 364109 - DNA, 25 bp, Homo sapien
attttcctggaactcgacatgttca

SEQ ID NO: 364110 - DNA, 25 bp, Homo sapien
ggaactcgacatgttcatttgaaac

SEQ ID NO: 364111 - DNA, 25 bp, Homo sapien
aaggaattttcctggaactcgacat

SEQ ID NO: 364112 - DNA, 25 bp, Homo sapien
aggagctgccccttgacccagttct

SEQ ID NO: 364113 - DNA, 25 bp, Homo sapien
caaggatttctgacaggtttcgaga

SEQ ID NO: 364114 - DNA, 25 bp, Homo sapien
tttcgagaaaagagccgtcgtctcc

SEQ ID NO: 364115 - DNA, 25 bp, Homo sapien
cataactgactgctttgcgcgtgaa

SEQ ID NO: 364116 - DNA, 25 bp, Homo sapien
tcctcctcgaaggtgtcagacacat

SEQ ID NO: 364117 - DNA, 25 bp, Homo sapien
aactcttcatccctttcaaagatgt

SEQ ID NO: 364118 - DNA, 25 bp, Homo sapien
cgtgacaactcttcatccctttcaa

SEQ ID NO: 364119 - DNA, 25 bp, Homo sapien
tgtccgtgacaactcttcatccctt

SEQ ID NO: 364120 - DNA, 25 bp, Homo sapien
tcatgtccgtgacaactcttcatcc

SEQ ID NO: 364121 - DNA, 25 bp, Homo sapien
tggaagacttgcagagacccaacga

SEQ ID NO: 364122 - DNA, 25 bp, Homo sapien
ctggaagacttgcagagacccaacg

SEQ ID NO: 364123 - DNA, 25 bp, Homo sapien
agacttgcagagacccaacgatggg

SEQ ID NO: 364124 - DNA, 25 bp, Homo sapien
gaagacttgcagagacccaacgatg

SEQ ID NO: 364125 - DNA, 25 bp, Homo sapien
agttggcttgggcaaagccactggc

SEQ ID NO: 364126 - DNA, 25 bp, Homo sapien
gaagaagttggcttgggcaaagcca

SEQ ID NO: 364127 - DNA, 25 bp, Homo sapien
cagcatcaggaccatgagcttgagg

SEQ ID NO: 364128 - DNA, 25 bp, Homo sapien
gctttttgaactgccccaagtttca

SEQ ID NO: 364129 - DNA, 25 bp, Homo sapien
gctgaaagctgaactggagtctgga

SEQ ID NO: 364130 - DNA, 25 bp, Homo sapien
agctgaaagctgaactggagtctgg

SEQ ID NO: 364131 - DNA, 25 bp, Homo sapien
tgagctgccgcagggttcgagttaa

SEQ ID NO: 364132 - DNA, 25 bp, Homo sapien
ttcgagttaaacagccacaatccat

SEQ ID NO: 364133 - DNA, 25 bp, Homo sapien
cggaaacctgggagcgtgtaccgct

SEQ ID NO: 364134 - DNA, 25 bp, Homo sapien
gagtcaaggaggtgtaagacttcat

SEQ ID NO: 364135 - DNA, 25 bp, Homo sapien
ggcacagggcatcatcattatgggt

SEQ ID NO: 364136 - DNA, 25 bp, Homo sapien
tcatcattatgggtggattcgggct

SEQ ID NO: 364137 - DNA, 25 bp, Homo sapien
cattatgggtggattcgggctgcct

SEQ ID NO: 364138 - DNA, 25 bp, Homo sapien
ctcttctgtggccgagggtggacca

SEQ ID NO: 364139 - DNA, 25 bp, Homo sapien
acgatgctcggaggttctgggctct

SEQ ID NO: 364140 - DNA, 25 bp, Homo sapien
cttggacgatgctcggaggttctgg

SEQ ID NO: 364141 - DNA, 25 bp, Homo sapien
tgggctctgggaatctggttctcca

SEQ ID NO: 364142 - DNA, 25 bp, Homo sapien
gggctctgggaatctggttctccat

SEQ ID NO: 364143 - DNA, 25 bp, Homo sapien
cagatggtccctgagctcccggata

SEQ ID NO: 364144 - DNA, 25 bp, Homo sapien
cccatacatttcaacatcgcctggt

SEQ ID NO: 364145 - DNA, 25 bp, Homo sapien
ggcttgcacacataagaggcagatg

SEQ ID NO: 364146 - DNA, 25 bp, Homo sapien
aacatcgcctggtctcggttctgac

SEQ ID NO: 364147 - DNA, 25 bp, Homo sapien
acttccctggtagaggtattgccaa

SEQ ID NO: 364148 - DNA, 25 bp, Homo sapien
ttccctggtagaggtattgccaaag

SEQ ID NO: 364149 - DNA, 25 bp, Homo sapien
gccacttccctggtagaggtattgc

SEQ ID NO: 364150 - DNA, 25 bp, Homo sapien
cacttccctggtagaggtattgcca

SEQ ID NO: 364151 - DNA, 25 bp, Homo sapien
tcagcgccagcagggtctttcgcgt

SEQ ID NO: 364152 - DNA, 25 bp, Homo sapien
catcctggctggaccgtcctgggat

SEQ ID NO: 364153 - DNA, 25 bp, Homo sapien
gtctttcgcgttgctgcccatcctg

SEQ ID NO: 364154 - DNA, 25 bp, Homo sapien
gtggagcggccgaccaaggcatcct

SEQ ID NO: 364155 - DNA, 25 bp, Homo sapien
tcagcctatcaaaccctcataagcc

SEQ ID NO: 364156 - DNA, 25 bp, Homo sapien
tatcaaaccctcataagccagcgcg

SEQ ID NO: 364157 - DNA, 25 bp, Homo sapien
agccagcgcgcccacggttagaggt

SEQ ID NO: 364158 - DNA, 25 bp, Homo sapien
gcgcgcccacggttagaggtctctg

SEQ ID NO: 364159 - DNA, 25 bp, Homo sapien
gcagctgaccgaggcgtccctggtc

SEQ ID NO: 364160 - DNA, 25 bp, Homo sapien
tcctttctgcccaggaatcctcaag

SEQ ID NO: 364161 - DNA, 25 bp, Homo sapien
agggtggagcagctgaccgaggcgt

SEQ ID NO: 364162 - DNA, 25 bp, Homo sapien
aaccaagtgcagaagccgtgagggt

SEQ ID NO: 364163 - DNA, 25 bp, Homo sapien
cgtggtggcaacgcctgtatgcggc

SEQ ID NO: 364164 - DNA, 25 bp, Homo sapien
agcaggcattccagttcagagcctg

SEQ ID NO: 364165 - DNA, 25 bp, Homo sapien
tgtagatgaacggggctcagcaggc

SEQ ID NO: 364166 - DNA, 25 bp, Homo sapien
ttcagagcctggaagaacaagctgg

SEQ ID NO: 364167 - DNA, 25 bp, Homo sapien
ggctcagcaggcattccagttcaga

SEQ ID NO: 364168 - DNA, 25 bp, Homo sapien
gcattctgggctaaggacacgacta

SEQ ID NO: 364169 - DNA, 25 bp, Homo sapien
ggccggcattctgggctaaggacac

SEQ ID NO: 364170 - DNA, 25 bp, Homo sapien
gactacacagacactgggagctcca

SEQ ID NO: 364171 - DNA, 25 bp, Homo sapien
taaggacacgactacacagacactg

SEQ ID NO: 364172 - DNA, 25 bp, Homo sapien
ctgccgtgggaggggccaggtcaga

SEQ ID NO: 364173 - DNA, 25 bp, Homo sapien
ccgtgggaggggccaggtcagaggg

SEQ ID NO: 364174 - DNA, 25 bp, Homo sapien
tgggaggggccaggtcagagggtgt

SEQ ID NO: 364175 - DNA, 25 bp, Homo sapien
gtgggaggggccaggtcagagggtg

SEQ ID NO: 364176 - DNA, 25 bp, Homo sapien
caccctgtccactccacaggcaagc

SEQ ID NO: 364177 - DNA, 25 bp, Homo sapien
tcaccctgtccactccacaggcaag

SEQ ID NO: 364178 - DNA, 25 bp, Homo sapien
ctggaagtaatattttgctggtcac

SEQ ID NO: 364179 - DNA, 25 bp, Homo sapien
ggcgaagtcacagaattcaccatct

SEQ ID NO: 364180 - DNA, 25 bp, Homo sapien
ctgggcaccgtgtggctctgtcaca

SEQ ID NO: 364181 - DNA, 25 bp, Homo sapien
tgggcaccgtgtggctctgtcacag

SEQ ID NO: 364182 - DNA, 25 bp, Homo sapien
ctgtcacagtgatggcgaagtcaca

SEQ ID NO: 364183 - DNA, 25 bp, Homo sapien
gccttgcagaacccgctgcagcagc

SEQ ID NO: 364184 - DNA, 25 bp, Homo sapien
ccttgcagaacccgctgcagcagct

SEQ ID NO: 364185 - DNA, 25 bp, Homo sapien
tgccttgcagaacccgctgcagcag

SEQ ID NO: 364186 - DNA, 25 bp, Homo sapien
ctgccttgcagaacccgctgcagca

SEQ ID NO: 364187 - DNA, 25 bp, Homo sapien
gaggtagagagaggcctctctgggc

SEQ ID NO: 364188 - DNA, 25 bp, Homo sapien
caggaggtagagagaggcctctctg

SEQ ID NO: 364189 - DNA, 25 bp, Homo sapien
tgcaggaggtagagagaggcctctc

SEQ ID NO: 364190 - DNA, 25 bp, Homo sapien
ctgcaggaggtagagagaggcctct

SEQ ID NO: 364191 - DNA, 25 bp, Homo sapien
aggtcccatcctagaacttcccagg

SEQ ID NO: 364192 - DNA, 25 bp, Homo sapien
ccttgagttggcgtccttgggagaa

SEQ ID NO: 364193 - DNA, 25 bp, Homo sapien
ggagaagcaggtcccatcctagaac

SEQ ID NO: 364194 - DNA, 25 bp, Homo sapien
gggagcctgctccgagctccaagct

SEQ ID NO: 364195 - DNA, 25 bp, Homo sapien
cctctcttgggtttgtatcgggacg

SEQ ID NO: 364196 - DNA, 25 bp, Homo sapien
tcttgggtttgtatcgggacgccat

SEQ ID NO: 364197 - DNA, 25 bp, Homo sapien
ctcttgggtttgtatcgggacgcca

SEQ ID NO: 364198 - DNA, 25 bp, Homo sapien
tctcttgggtttgtatcgggacgcc

SEQ ID NO: 364199 - DNA, 25 bp, Homo sapien
ggcttctctaagccaaaggccacgc

SEQ ID NO: 364200 - DNA, 25 bp, Homo sapien
gcttctctaagccaaaggccacgcc

SEQ ID NO: 364201 - DNA, 25 bp, Homo sapien
agggcaccacgctttgtggcttctc

SEQ ID NO: 364202 - DNA, 25 bp, Homo sapien
ctgtgggcgccatgcacacccccaa

SEQ ID NO: 364203 - DNA, 25 bp, Homo sapien
gtgggcgccatgcacacccccaagc

SEQ ID NO: 364204 - DNA, 25 bp, Homo sapien
tgtgggcgccatgcacacccccaag

SEQ ID NO: 364205 - DNA, 25 bp, Homo sapien
acagcccgaggggtgactcccagat

SEQ ID NO: 364206 - DNA, 25 bp, Homo sapien
cctacagcccgaggggtgactccca

SEQ ID NO: 364207 - DNA, 25 bp, Homo sapien
ccgaggggtgactcccagatgactg

SEQ ID NO: 364208 - DNA, 25 bp, Homo sapien
agcccgaggggtgactcccagatga

SEQ ID NO: 364209 - DNA, 25 bp, Homo sapien
ctgcacacggcccggcctgaccagg

SEQ ID NO: 364210 - DNA, 25 bp, Homo sapien
gcctaatgtccatggaaagggacag

SEQ ID NO: 364211 - DNA, 25 bp, Homo sapien
cctaatgtccatggaaagggacagg

SEQ ID NO: 364212 - DNA, 25 bp, Homo sapien
cacggcccggcctgaccaggtcggc

SEQ ID NO: 364213 - DNA, 25 bp, Homo sapien
gtgctgaggcccagaaagcgccccg

SEQ ID NO: 364214 - DNA, 25 bp, Homo sapien
ctgaggcccagaaagcgccccgtca

SEQ ID NO: 364215 - DNA, 25 bp, Homo sapien
tgaggcccagaaagcgccccgtcat

SEQ ID NO: 364216 - DNA, 25 bp, Homo sapien
tgctgaggcccagaaagcgccccgt

SEQ ID NO: 364217 - DNA, 25 bp, Homo sapien
ggctctccagtacatggggcaccgt

SEQ ID NO: 364218 - DNA, 25 bp, Homo sapien
gctctccagtacatggggcaccgtg

SEQ ID NO: 364219 - DNA, 25 bp, Homo sapien
ctccagtacatggggcaccgtgggg

SEQ ID NO: 364220 - DNA, 25 bp, Homo sapien
tctccagtacatggggcaccgtggg

SEQ ID NO: 364221 - DNA, 25 bp, Homo sapien
agctggtccggccactccgaagctg

SEQ ID NO: 364222 - DNA, 25 bp, Homo sapien
catggagctggtccggccactccga

SEQ ID NO: 364223 - DNA, 25 bp, Homo sapien
tggagctggtccggccactccgaag

SEQ ID NO: 364224 - DNA, 25 bp, Homo sapien
gagctggtccggccactccgaagct

SEQ ID NO: 364225 - DNA, 25 bp, Homo sapien
tgaggaggccgggtctgcatccgca

SEQ ID NO: 364226 - DNA, 25 bp, Homo sapien
gaggaggccgggtctgcatccgcat

SEQ ID NO: 364227 - DNA, 25 bp, Homo sapien
gcaggagctgaggaggccgggtctg

SEQ ID NO: 364228 - DNA, 25 bp, Homo sapien
agctgaggaggccgggtctgcatcc

SEQ ID NO: 364229 - DNA, 25 bp, Homo sapien
gaggacggacgtggaagaggatgga

SEQ ID NO: 364230 - DNA, 25 bp, Homo sapien
cagccacagaatcggtagcagaagc

SEQ ID NO: 364231 - DNA, 25 bp, Homo sapien
acagggagctcaagcatcgcggcca

SEQ ID NO: 364232 - DNA, 25 bp, Homo sapien
agaggccgacgaagcaggagtcaca

SEQ ID NO: 364233 - DNA, 25 bp, Homo sapien
tggggatcactaataagccacagtc

SEQ ID NO: 364234 - DNA, 25 bp, Homo sapien
cactggggatcactaataagccaca

SEQ ID NO: 364235 - DNA, 25 bp, Homo sapien
ggatcactaataagccacagtcttc

SEQ ID NO: 364236 - DNA, 25 bp, Homo sapien
gggatcactaataagccacagtctt

SEQ ID NO: 364237 - DNA, 25 bp, Homo sapien
tgtcctcgggatgactgacaccgat

SEQ ID NO: 364238 - DNA, 25 bp, Homo sapien
aagcccggtttctgcacttcggtgt

SEQ ID NO: 364239 - DNA, 25 bp, Homo sapien
tgatcattccacgacaagcccggtt

SEQ ID NO: 364240 - DNA, 25 bp, Homo sapien
tgtccctcccgtggcaaatactgag

SEQ ID NO: 364241 - DNA, 25 bp, Homo sapien
ggcttagcagacacccttagggcag

SEQ ID NO: 364242 - DNA, 25 bp, Homo sapien
cagattgggtgagcaaggttcatgc

SEQ ID NO: 364243 - DNA, 25 bp, Homo sapien
gttcatgcgcagacagcaagaccgg

SEQ ID NO: 364244 - DNA, 25 bp, Homo sapien
aaaaggctgaacactcagaatctgc

SEQ ID NO: 364245 - DNA, 25 bp, Homo sapien
catggtacgaggagctttgatttcc

SEQ ID NO: 364246 - DNA, 25 bp, Homo sapien
gccagcgctggagaggagcctacat

SEQ ID NO: 364247 - DNA, 25 bp, Homo sapien
cagcgctggagaggagcctacatga

SEQ ID NO: 364248 - DNA, 25 bp, Homo sapien
ggtccatcagagagacgctcatggt

SEQ ID NO: 364249 - DNA, 25 bp, Homo sapien
caggcatgttgaagtcagaccattc

SEQ ID NO: 364250 - DNA, 25 bp, Homo sapien
tatcagccacgacttggtgcctcct

SEQ ID NO: 364251 - DNA, 25 bp, Homo sapien
gcaggtctcggctctggtgctcaga

SEQ ID NO: 364252 - DNA, 25 bp, Homo sapien
tcatcgcttgggtccagcgttagaa

SEQ ID NO: 364253 - DNA, 25 bp, Homo sapien
cctggaggtgagtgccggccccaga

SEQ ID NO: 364254 - DNA, 25 bp, Homo sapien
gcctggaggtgagtgccggccccag

SEQ ID NO: 364255 - DNA, 25 bp, Homo sapien
cacgtcggtgccagacacacgagag

SEQ ID NO: 364256 - DNA, 25 bp, Homo sapien
gatggaatcgcagtcactgagtcca

SEQ ID NO: 364257 - DNA, 25 bp, Homo sapien
gtggctctgaacgatggaatcgcag

SEQ ID NO: 364258 - DNA, 25 bp, Homo sapien
agtccaggtgctgtgaccgtgcacg

SEQ ID NO: 364259 - DNA, 25 bp, Homo sapien
tacaggcatccctaatagaagcgga

SEQ ID NO: 364260 - DNA, 25 bp, Homo sapien
gagctggtttatcaaaagggacttc

SEQ ID NO: 364261 - DNA, 25 bp, Homo sapien
tcagagaactgctaggctgtgctca

SEQ ID NO: 364262 - DNA, 25 bp, Homo sapien
tagaagcggaaacctctccagacca

SEQ ID NO: 364263 - DNA, 25 bp, Homo sapien
gcctttctaggacaaaggttgccat

SEQ ID NO: 364264 - DNA, 25 bp, Homo sapien
ctgcagaatggcaggtccctggcct

SEQ ID NO: 364265 - DNA, 25 bp, Homo sapien
tggcctgcctttctaggacaaaggt

SEQ ID NO: 364266 - DNA, 25 bp, Homo sapien
tcaggacccctgagatctggagcga

SEQ ID NO: 364267 - DNA, 25 bp, Homo sapien
cacaggacactactcagggtgcatg

SEQ ID NO: 364268 - DNA, 25 bp, Homo sapien
gaagatacggaagcattgcctgggc

SEQ ID NO: 364269 - DNA, 25 bp, Homo sapien
tgttcgtagaattgctgtccacgca

SEQ ID NO: 364270 - DNA, 25 bp, Homo sapien
ttggcagatggacaaggcagccctg

SEQ ID NO: 364271 - DNA, 25 bp, Homo sapien
gcattggtatcatagaggagctcac

SEQ ID NO: 364272 - DNA, 25 bp, Homo sapien
aggcattggtatcatagaggagctc

SEQ ID NO: 364273 - DNA, 25 bp, Homo sapien
ggcattggtatcatagaggagctca

SEQ ID NO: 364274 - DNA, 25 bp, Homo sapien
ataatggaggatctcacagggcgct

SEQ ID NO: 364275 - DNA, 25 bp, Homo sapien
tggtgtaatggaggatctcacagag

SEQ ID NO: 364276 - DNA, 25 bp, Homo sapien
cattggtatcatagaggatctcaca

SEQ ID NO: 364277 - DNA, 25 bp, Homo sapien
agggaacctgtctgcatccggtata

SEQ ID NO: 364278 - DNA, 25 bp, Homo sapien
ctgggaacaagctgcccctcctgag

SEQ ID NO: 364279 - DNA, 25 bp, Homo sapien
tgggaacaagctgcccctcctgagc

SEQ ID NO: 364280 - DNA, 25 bp, Homo sapien
gaacaagctgcccctcctgagcccc

SEQ ID NO: 364281 - DNA, 25 bp, Homo sapien
gggaacaagctgcccctcctgagcc

SEQ ID NO: 364282 - DNA, 25 bp, Homo sapien
gccttcctcggtgcccgcacctccg

SEQ ID NO: 364283 - DNA, 25 bp, Homo sapien
tccgccacttcctggcgttttctct

SEQ ID NO: 364284 - DNA, 25 bp, Homo sapien
tcggtgcccgcacctccgccacttc

SEQ ID NO: 364285 - DNA, 25 bp, Homo sapien
cacctccgccacttcctggcgtttt

SEQ ID NO: 364286 - DNA, 25 bp, Homo sapien
accttggcacccacgaagcagtccg

SEQ ID NO: 364287 - DNA, 25 bp, Homo sapien
cttggcacccacgaagcagtccggc

SEQ ID NO: 364288 - DNA, 25 bp, Homo sapien
ttgaccttggcacccacgaagcagt

SEQ ID NO: 364289 - DNA, 25 bp, Homo sapien
tggcacccacgaagcagtccggcga

SEQ ID NO: 364290 - DNA, 25 bp, Homo sapien
ctgacctgcgtgtgaagctaaggaa

SEQ ID NO: 364291 - DNA, 25 bp, Homo sapien
gcctggaggtttggttgctgacctg

SEQ ID NO: 364292 - DNA, 25 bp, Homo sapien
ttgctgacctgcgtgtgaagctaag

SEQ ID NO: 364293 - DNA, 25 bp, Homo sapien
cctggaggtttggttgctgacctgc

SEQ ID NO: 364294 - DNA, 25 bp, Homo sapien
agaagaaggcacgagaggtggctgt

SEQ ID NO: 364295 - DNA, 25 bp, Homo sapien
aggcctggtcagcaaaacagccctc

SEQ ID NO: 364296 - DNA, 25 bp, Homo sapien
tgaggcgaggcctggtcagcaaaac

SEQ ID NO: 364297 - DNA, 25 bp, Homo sapien
ctgggagaagaaggcacgagaggtg

SEQ ID NO: 364298 - DNA, 25 bp, Homo sapien
cagaacggctccactggctcggctg

SEQ ID NO: 364299 - DNA, 25 bp, Homo sapien
gggatgtcccctgagacaccacggc

SEQ ID NO: 364300 - DNA, 25 bp, Homo sapien
ctccgggctgtgacacgggatgtcc

SEQ ID NO: 364301 - DNA, 25 bp, Homo sapien
gaacggctccactggctcggctgtg

SEQ ID NO: 364302 - DNA, 25 bp, Homo sapien
ctgtttaacaacccatttcctgcct

SEQ ID NO: 364303 - DNA, 25 bp, Homo sapien
tgtttaacaacccatttcctgcctc

SEQ ID NO: 364304 - DNA, 25 bp, Homo sapien
ggttgccgctgggccccagatggcg

SEQ ID NO: 364305 - DNA, 25 bp, Homo sapien
cccagatggcgggacgctgaaggtc

SEQ ID NO: 364306 - DNA, 25 bp, Homo sapien
gatggcgggacgctgaaggtctgca

SEQ ID NO: 364307 - DNA, 25 bp, Homo sapien
cctttgggaccaggttgccgctggg

SEQ ID NO: 364308 - DNA, 25 bp, Homo sapien
ctccggatctccagttcatcagtca

SEQ ID NO: 364309 - DNA, 25 bp, Homo sapien
tccggatctccagttcatcagtcac

SEQ ID NO: 364310 - DNA, 25 bp, Homo sapien
cggatctccagttcatcagtcaccg

SEQ ID NO: 364311 - DNA, 25 bp, Homo sapien
ggatctccagttcatcagtcaccgg

SEQ ID NO: 364312 - DNA, 25 bp, Homo sapien
agcacaggccccacggcagtggcag

SEQ ID NO: 364313 - DNA, 25 bp, Homo sapien
tcatgagctgcgtccaaggatcaca

SEQ ID NO: 364314 - DNA, 25 bp, Homo sapien
gaaggagtggtgctttcacgggaga

SEQ ID NO: 364315 - DNA, 25 bp, Homo sapien
agctgcgtccaaggatcacatggga

SEQ ID NO: 364316 - DNA, 25 bp, Homo sapien
agaggcagctgtgtcagtgctctca

SEQ ID NO: 364317 - DNA, 25 bp, Homo sapien
ttctcatccaggtctgaggatagcc

SEQ ID NO: 364318 - DNA, 25 bp, Homo sapien
gcagctgtgtcagtgctctcagctt

SEQ ID NO: 364319 - DNA, 25 bp, Homo sapien
cttctcatccaggtctgaggatagc

SEQ ID NO: 364320 - DNA, 25 bp, Homo sapien
aaaatgtcttaccctctgatccttc

SEQ ID NO: 364321 - DNA, 25 bp, Homo sapien
gaaaatgtcttaccctctgatcctt

SEQ ID NO: 364322 - DNA, 25 bp, Homo sapien
tctggctgcgagtaccagcttgctc

SEQ ID NO: 364323 - DNA, 25 bp, Homo sapien
tgtcacccggtaaatcagatgtctg

SEQ ID NO: 364324 - DNA, 25 bp, Homo sapien
aactgtccacgaaggccgcggaggt

SEQ ID NO: 364325 - DNA, 25 bp, Homo sapien
tggcaatgcgtggagcaaatgatta

SEQ ID NO: 364326 - DNA, 25 bp, Homo sapien
gcaccttggtgctttccacaacctg

SEQ ID NO: 364327 - DNA, 25 bp, Homo sapien
tcagcccgtgaacggggacctgtga

SEQ ID NO: 364328 - DNA, 25 bp, Homo sapien
gagtcgtgggcaggactcaagtgcc

SEQ ID NO: 364329 - DNA, 25 bp, Homo sapien
acctgttcctcaaagggatggtttg

SEQ ID NO: 364330 - DNA, 25 bp, Homo sapien
gcgatgtatctggtgcagcatctgc

SEQ ID NO: 364331 - DNA, 25 bp, Homo sapien
gatgtatctggtgcagcatctgcca

SEQ ID NO: 364332 - DNA, 25 bp, Homo sapien
cagcgatgtatctggtgcagcatct

SEQ ID NO: 364333 - DNA, 25 bp, Homo sapien
tgtatctggtgcagcatctgccaca

SEQ ID NO: 364334 - DNA, 25 bp, Homo sapien
caagacatccccaacgtgagcgttt

SEQ ID NO: 364335 - DNA, 25 bp, Homo sapien
tgataacctcactgtggcacaggcc

SEQ ID NO: 364336 - DNA, 25 bp, Homo sapien
gggatgctcctaaatgaacctgctc

SEQ ID NO: 364337 - DNA, 25 bp, Homo sapien
gctgtgtctacatgggactaccaga

SEQ ID NO: 364338 - DNA, 25 bp, Homo sapien
cttaaagtcaacacgaacaccgcga

SEQ ID NO: 364339 - DNA, 25 bp, Homo sapien
ataaattgcaagctgtaaaaaactt

SEQ ID NO: 364340 - DNA, 25 bp, Homo sapien
ttagaagttttaatccagaccataa

SEQ ID NO: 364341 - DNA, 25 bp, Homo sapien
gaacaccgcgactgagaaaacaaat

SEQ ID NO: 364342 - DNA, 25 bp, Homo sapien
gagagggctcctttagattgtcact

SEQ ID NO: 364343 - DNA, 25 bp, Homo sapien
taacagactttgcaaggagctctct

SEQ ID NO: 364344 - DNA, 25 bp, Homo sapien
cagtaattgccgtctgagcctcaaa

SEQ ID NO: 364345 - DNA, 25 bp, Homo sapien
tacccacggagctgcactaatttgc

SEQ ID NO: 364346 - DNA, 25 bp, Homo sapien
agtcctctgcgggattggcatggca

SEQ ID NO: 364347 - DNA, 25 bp, Homo sapien
gccgtgatctccttttacagctgag

SEQ ID NO: 364348 - DNA, 25 bp, Homo sapien
tgtctcgctgcagcaaagtcctctg

SEQ ID NO: 364349 - DNA, 25 bp, Homo sapien
taaatacccacggtggcagcaagag

SEQ ID NO: 364350 - DNA, 25 bp, Homo sapien
gcatgggccatggttcccactcggt

SEQ ID NO: 364351 - DNA, 25 bp, Homo sapien
cccaggtgcgcccagagcttgggat

SEQ ID NO: 364352 - DNA, 25 bp, Homo sapien
tgcagcctcgtaggactcagcagat

SEQ ID NO: 364353 - DNA, 25 bp, Homo sapien
gcttgggatgctgtacaggcagctc

SEQ ID NO: 364354 - DNA, 25 bp, Homo sapien
gtggggaatgagcagtggtgtcatg

SEQ ID NO: 364355 - DNA, 25 bp, Homo sapien
gaatgagcagtggtgtcatgtcagg

SEQ ID NO: 364356 - DNA, 25 bp, Homo sapien
atgagcagtggtgtcatgtcaggat

SEQ ID NO: 364357 - DNA, 25 bp, Homo sapien
gggaatgagcagtggtgtcatgtca

SEQ ID NO: 364358 - DNA, 25 bp, Homo sapien
tggggcttttcgtgccgatgccgat

SEQ ID NO: 364359 - DNA, 25 bp, Homo sapien
ttttcgtgccgatgccgatgctgct

SEQ ID NO: 364360 - DNA, 25 bp, Homo sapien
ggagaaaagcgtggctgcctcccaa

SEQ ID NO: 364361 - DNA, 25 bp, Homo sapien
ctcccaaggagttctgtgggccgtg

SEQ ID NO: 364362 - DNA, 25 bp, Homo sapien
gatactccaaggaatatgccacagg

SEQ ID NO: 364363 - DNA, 25 bp, Homo sapien
gagatctaaacccattccaagcgga

SEQ ID NO: 364364 - DNA, 25 bp, Homo sapien
tccaagcggatcatgaattctcaac

SEQ ID NO: 364365 - DNA, 25 bp, Homo sapien
ggatgacagctcattccgagatcta

SEQ ID NO: 364366 - DNA, 25 bp, Homo sapien
ctaaaggatcgatccaggccaaagc

SEQ ID NO: 364367 - DNA, 25 bp, Homo sapien
atccaggccaaagccagctcaatgc

SEQ ID NO: 364368 - DNA, 25 bp, Homo sapien
caggccaaagccagctcaatgccag

SEQ ID NO: 364369 - DNA, 25 bp, Homo sapien
acattttctcctaaaggatcgatcc

SEQ ID NO: 364370 - DNA, 25 bp, Homo sapien
ctacccaaaatacagcagcaaaggt

SEQ ID NO: 364371 - DNA, 25 bp, Homo sapien
aatacagcagcaaaggtgatgggca

SEQ ID NO: 364372 - DNA, 25 bp, Homo sapien
caaaatacagcagcaaaggtgatgg

SEQ ID NO: 364373 - DNA, 25 bp, Homo sapien
tacccaaaatacagcagcaaaggtg

SEQ ID NO: 364374 - DNA, 25 bp, Homo sapien
ttgcctctgcgctagaacgtccggc

SEQ ID NO: 364375 - DNA, 25 bp, Homo sapien
caggttcgagctcgtgtgtctcagc

SEQ ID NO: 364376 - DNA, 25 bp, Homo sapien
tacgtgcggaaaaaactcttgcctc

SEQ ID NO: 364377 - DNA, 25 bp, Homo sapien
aactaggcgcgcagaaagggtacgt

SEQ ID NO: 364378 - DNA, 25 bp, Homo sapien
cggggagcacggcggtgcggggcag

SEQ ID NO: 364379 - DNA, 25 bp, Homo sapien
gcggggcagcgcatcagagcccgga

SEQ ID NO: 364380 - DNA, 25 bp, Homo sapien
cctcctggaaccagcgctcggcttc

SEQ ID NO: 364381 - DNA, 25 bp, Homo sapien
ggaaccagcgctcggcttcgctcgg

SEQ ID NO: 364382 - DNA, 25 bp, Homo sapien
cgtcagcacagctttcgaaacagaa

SEQ ID NO: 364383 - DNA, 25 bp, Homo sapien
cattctgaattgctgtggaggctag

SEQ ID NO: 364384 - DNA, 25 bp, Homo sapien
tgcttccagggcgtcaggcacagag

SEQ ID NO: 364385 - DNA, 25 bp, Homo sapien
gaggctagagcaccgttgatccacc

SEQ ID NO: 364386 - DNA, 25 bp, Homo sapien
accaaaagtcaggagagtgtctctg

SEQ ID NO: 364387 - DNA, 25 bp, Homo sapien
gtcaccagcgcctagaggctgccat

SEQ ID NO: 364388 - DNA, 25 bp, Homo sapien
aaggcagagggcgtcactcttgagt

SEQ ID NO: 364389 - DNA, 25 bp, Homo sapien
ccaccccgtgatgcagcactggttc

SEQ ID NO: 364390 - DNA, 25 bp, Homo sapien
cttcaaccagaggatcccatctgag

SEQ ID NO: 364391 - DNA, 25 bp, Homo sapien
caaccagaggatcccatctgagggt

SEQ ID NO: 364392 - DNA, 25 bp, Homo sapien
ttgttttccttcaaccagaggatcc

SEQ ID NO: 364393 - DNA, 25 bp, Homo sapien
ttccttcaaccagaggatcccatct

SEQ ID NO: 364394 - DNA, 25 bp, Homo sapien
ctcccttcaccactggctcagggaa

SEQ ID NO: 364395 - DNA, 25 bp, Homo sapien
cccttcaccactggctcagggaagc

SEQ ID NO: 364396 - DNA, 25 bp, Homo sapien
tcccttcaccactggctcagggaag

SEQ ID NO: 364397 - DNA, 25 bp, Homo sapien
ggatgagaaagaatccagttcttgg

SEQ ID NO: 364398 - DNA, 25 bp, Homo sapien
ttgtggctggcgcactggtgtcctc

SEQ ID NO: 364399 - DNA, 25 bp, Homo sapien
cgtctgtgaccatcctcacggggca

SEQ ID NO: 364400 - DNA, 25 bp, Homo sapien
gatgagccgttctccacgtctgtga

SEQ ID NO: 364401 - DNA, 25 bp, Homo sapien
ggcgggcagagctcgcccgaggcag

SEQ ID NO: 364402 - DNA, 25 bp, Homo sapien
gcgggcagagctcgcccgaggcagc

SEQ ID NO: 364403 - DNA, 25 bp, Homo sapien
tgtcccggcaaccctggtcctcaga

SEQ ID NO: 364404 - DNA, 25 bp, Homo sapien
aggcgggcagagctcgcccgaggca

SEQ ID NO: 364405 - DNA, 25 bp, Homo sapien
acaaaaatggcagagtcagtagaca

SEQ ID NO: 364406 - DNA, 25 bp, Homo sapien
aattaaagatttgccgcacagctca

SEQ ID NO: 364407 - DNA, 25 bp, Homo sapien
aaattcccggagaagcaaagaccag

SEQ ID NO: 364408 - DNA, 25 bp, Homo sapien
caaagaccagaacgggagaattcat

SEQ ID NO: 364409 - DNA, 25 bp, Homo sapien
cgtatgtcaacgtcgctgggtaact

SEQ ID NO: 364410 - DNA, 25 bp, Homo sapien
aagagcagagccgtgacatccctgt

SEQ ID NO: 364411 - DNA, 25 bp, Homo sapien
taccatagacgggtattgcggccgt

SEQ ID NO: 364412 - DNA, 25 bp, Homo sapien
catgattgggcggaatcgtagagca

SEQ ID NO: 364413 - DNA, 25 bp, Homo sapien
cagtggacgctctgaagaagctttg

SEQ ID NO: 364414 - DNA, 25 bp, Homo sapien
gagtgtgaaggacattcagccccat

SEQ ID NO: 364415 - DNA, 25 bp, Homo sapien
acctggtagctcctgcggcctttgt

SEQ ID NO: 364416 - DNA, 25 bp, Homo sapien
acagatcttcttgtctcgcttctca

SEQ ID NO: 364417 - DNA, 25 bp, Homo sapien
cgtgtttctggacggcatgaagttc

SEQ ID NO: 364418 - DNA, 25 bp, Homo sapien
tgttcaggacaggtaacgccgtgtt

SEQ ID NO: 364419 - DNA, 25 bp, Homo sapien
ggacggcatgaagttcttgcctttc

SEQ ID NO: 364420 - DNA, 25 bp, Homo sapien
acaggtaacgccgtgtttctggacg

SEQ ID NO: 364421 - DNA, 25 bp, Homo sapien
catgttggcatcttcgtcttggaga

SEQ ID NO: 364422 - DNA, 25 bp, Homo sapien
ctgatgcattggaccgagggctgca

SEQ ID NO: 364423 - DNA, 25 bp, Homo sapien
gcagatggatggcttcgttgccatg

SEQ ID NO: 364424 - DNA, 25 bp, Homo sapien
cgtgtgcagggggttacattgtctt

SEQ ID NO: 364425 - DNA, 25 bp, Homo sapien
tgttctatttccttgcgctcccaga

SEQ ID NO: 364426 - DNA, 25 bp, Homo sapien
aatgaaggaagctttccaaatgttt

SEQ ID NO: 364427 - DNA, 25 bp, Homo sapien
aatgttttccacagcgtaacgctgt

SEQ ID NO: 364428 - DNA, 25 bp, Homo sapien
tccttgcgctcccagatagggacgc

SEQ ID NO: 364429 - DNA, 25 bp, Homo sapien
tcagtggttgaagcgctcatgtcca

SEQ ID NO: 364430 - DNA, 25 bp, Homo sapien
gtggttgaagcgctcatgtccaatc

SEQ ID NO: 364431 - DNA, 25 bp, Homo sapien
ggttgaagcgctcatgtccaatcac

SEQ ID NO: 364432 - DNA, 25 bp, Homo sapien
gaagcgctcatgtccaatcacaggg

SEQ ID NO: 364433 - DNA, 25 bp, Homo sapien
agggaggtgcctggcgggatggtgg

SEQ ID NO: 364434 - DNA, 25 bp, Homo sapien
ctgacttcacccacgggaaccaaag

SEQ ID NO: 364435 - DNA, 25 bp, Homo sapien
cctggcgggatggtggaggccgagc

SEQ ID NO: 364436 - DNA, 25 bp, Homo sapien
tttcctctgacttcacccacgggaa

SEQ ID NO: 364437 - DNA, 25 bp, Homo sapien
tgcacctgatgctcataaagtctcc

SEQ ID NO: 364438 - DNA, 25 bp, Homo sapien
aagtctccccttgttggtcaaaatg

SEQ ID NO: 364439 - DNA, 25 bp, Homo sapien
gaggatgatagaaccaactcttggc

SEQ ID NO: 364440 - DNA, 25 bp, Homo sapien
caataatcacaaacggctgctttcc

SEQ ID NO: 364441 - DNA, 25 bp, Homo sapien
tggcagaatcaactccagcaaagaa

SEQ ID NO: 364442 - DNA, 25 bp, Homo sapien
ggcaccggagcaatggcagaatcaa

SEQ ID NO: 364443 - DNA, 25 bp, Homo sapien
ggcagaatcaactccagcaaagaat

SEQ ID NO: 364444 - DNA, 25 bp, Homo sapien
tggaggcaccggagcaatggcagaa

SEQ ID NO: 364445 - DNA, 25 bp, Homo sapien
tcccctagcgatgagccaagatggc

SEQ ID NO: 364446 - DNA, 25 bp, Homo sapien
ggggcattaccagagctgccctgtt

SEQ ID NO: 364447 - DNA, 25 bp, Homo sapien
gatggcattcgcacctctggatgca

SEQ ID NO: 364448 - DNA, 25 bp, Homo sapien
agctgccctgttcccctagcgatga

SEQ ID NO: 364449 - DNA, 25 bp, Homo sapien
agccggaagcctgcatcccgtgacc

SEQ ID NO: 364450 - DNA, 25 bp, Homo sapien
cgtgacccaccggttctttgatcat

SEQ ID NO: 364451 - DNA, 25 bp, Homo sapien
agggccccgcatgcagcagccggaa

SEQ ID NO: 364452 - DNA, 25 bp, Homo sapien
ttttgcccgctggtagtccaaaagc

SEQ ID NO: 364453 - DNA, 25 bp, Homo sapien
gcgacagaaccactcaacctgctca

SEQ ID NO: 364454 - DNA, 25 bp, Homo sapien
ctgtgcgacagaaccactcaacctg

SEQ ID NO: 364455 - DNA, 25 bp, Homo sapien
gtgcgacagaaccactcaacctgct

SEQ ID NO: 364456 - DNA, 25 bp, Homo sapien
gacagaaccactcaacctgctcatt

SEQ ID NO: 364457 - DNA, 25 bp, Homo sapien
gagaaaccttccatcaccgagaaac

SEQ ID NO: 364458 - DNA, 25 bp, Homo sapien
gagaaaccttccatcaccgagaaac

SEQ ID NO: 364459 - DNA, 25 bp, Homo sapien
cgagaaacctgccaccaccgagaaa

SEQ ID NO: 364460 - DNA, 25 bp, Homo sapien
cgagaaaccttccatcaccgagaaa

SEQ ID NO: 364461 - DNA, 25 bp, Homo sapien
ccgagaaaccttccatcaccgagaa

SEQ ID NO: 364462 - DNA, 25 bp, Homo sapien
cctgaccgagaaacctgccctcacg

SEQ ID NO: 364463 - DNA, 25 bp, Homo sapien
ctgccctcacggagaaacccaccat

SEQ ID NO: 364464 - DNA, 25 bp, Homo sapien
tgccctgaccgagaaacctgccctc

SEQ ID NO: 364465 - DNA, 25 bp, Homo sapien
cctgccctcacggagaaacccacca

SEQ ID NO: 364466 - DNA, 25 bp, Homo sapien
tgaataacggtgtttagtggcccca

SEQ ID NO: 364467 - DNA, 25 bp, Homo sapien
gctggagcctccaaagtggtgctga

SEQ ID NO: 364468 - DNA, 25 bp, Homo sapien
tacctggtgcagtgggctgaactgt

SEQ ID NO: 364469 - DNA, 25 bp, Homo sapien
aattcatcgattgaggttctgaccc

SEQ ID NO: 364470 - DNA, 25 bp, Homo sapien
tgtgggagtcctactgagttcttac

SEQ ID NO: 364471 - DNA, 25 bp, Homo sapien
ttttctgatgctttgccaagttcct

SEQ ID NO: 364472 - DNA, 25 bp, Homo sapien
tatactttcctgacccgcaggcacg

SEQ ID NO: 364473 - DNA, 25 bp, Homo sapien
gctcactggaagttcctatactttc

SEQ ID NO: 364474 - DNA, 25 bp, Homo sapien
ttccctaaagagagcagcccggtct

SEQ ID NO: 364475 - DNA, 25 bp, Homo sapien
agagcagcccggtcttctcccaatt

SEQ ID NO: 364476 - DNA, 25 bp, Homo sapien
tcccatccccagatcgcggaagaat

SEQ ID NO: 364477 - DNA, 25 bp, Homo sapien
ctatatcttgcgcttcttctggtac

SEQ ID NO: 364478 - DNA, 25 bp, Homo sapien
gttttgctcctcaatatagggatca

SEQ ID NO: 364479 - DNA, 25 bp, Homo sapien
ggttttgctcctcaatatagggatc

SEQ ID NO: 364480 - DNA, 25 bp, Homo sapien
gagacctagaagccagagacacctt

SEQ ID NO: 364481 - DNA, 25 bp, Homo sapien
gacctagaagccagagacaccttga

SEQ ID NO: 364482 - DNA, 25 bp, Homo sapien
agacctagaagccagagacaccttg

SEQ ID NO: 364483 - DNA, 25 bp, Homo sapien
tgtgcttggtttccataggcatgga

SEQ ID NO: 364484 - DNA, 25 bp, Homo sapien
ttcacccgcaggagcacctaggata

SEQ ID NO: 364485 - DNA, 25 bp, Homo sapien
gggccgtgtgcagccttgcttcacc

SEQ ID NO: 364486 - DNA, 25 bp, Homo sapien
aggcagagccgaaggacccagccct

SEQ ID NO: 364487 - DNA, 25 bp, Homo sapien
tgatggttggaagttgggaattaat

SEQ ID NO: 364488 - DNA, 25 bp, Homo sapien
ggaagttgggaattaatcagcttca

SEQ ID NO: 364489 - DNA, 25 bp, Homo sapien
gttgggaattaatcagcttcacctc

SEQ ID NO: 364490 - DNA, 25 bp, Homo sapien
gttggaagttgggaattaatcagct

SEQ ID NO: 364491 - DNA, 25 bp, Homo sapien
actcgctggtgtgattcccccagtg

SEQ ID NO: 364492 - DNA, 25 bp, Homo sapien
ctcgctggtgtgattcccccagtgc

SEQ ID NO: 364493 - DNA, 25 bp, Homo sapien
cactcgctggtgtgattcccccagt

SEQ ID NO: 364494 - DNA, 25 bp, Homo sapien
tcactcgctggtgtgattcccccag

SEQ ID NO: 364495 - DNA, 25 bp, Homo sapien
agctccctgtgaaaccgtccctgat

SEQ ID NO: 364496 - DNA, 25 bp, Homo sapien
cgtccctgatccctcggcactgagc

SEQ ID NO: 364497 - DNA, 25 bp, Homo sapien
cagtactcagcacctctaacccaaa

SEQ ID NO: 364498 - DNA, 25 bp, Homo sapien
tactcagcacctctaacccaaaggg

SEQ ID NO: 364499 - DNA, 25 bp, Homo sapien
gctggagggagggccataccattca

SEQ ID NO: 364500 - DNA, 25 bp, Homo sapien
ggggctggagggagggccataccat

SEQ ID NO: 364501 - DNA, 25 bp, Homo sapien
gctgcttcttccactgggggctgga

SEQ ID NO: 364502 - DNA, 25 bp, Homo sapien
ctggagggagggccataccattcat

SEQ ID NO: 364503 - DNA, 25 bp, Homo sapien
tcatttctggtccaactactagaag

SEQ ID NO: 364504 - DNA, 25 bp, Homo sapien
aatcaattcatggatacacatcttg

SEQ ID NO: 364505 - DNA, 25 bp, Homo sapien
acagtgcagggtgccaagaacatct

SEQ ID NO: 364506 - DNA, 25 bp, Homo sapien
cagaaatgatatagcctgacagtgc

SEQ ID NO: 364507 - DNA, 25 bp, Homo sapien
aaaagagccaggtgaacgcacggaa

SEQ ID NO: 364508 - DNA, 25 bp, Homo sapien
ctctgtataaccttcgcggccactg

SEQ ID NO: 364509 - DNA, 25 bp, Homo sapien
gaaactgccatgcatcccggtgtca

SEQ ID NO: 364510 - DNA, 25 bp, Homo sapien
cagccacagtgtgaagcgcagttca

SEQ ID NO: 364511 - DNA, 25 bp, Homo sapien
agccatgccacagcgtgcaagcaca

SEQ ID NO: 364512 - DNA, 25 bp, Homo sapien
atgccacagcgtgcaagcacagcgg

SEQ ID NO: 364513 - DNA, 25 bp, Homo sapien
cgagccatgccacagcgtgcaagca

SEQ ID NO: 364514 - DNA, 25 bp, Homo sapien
ccatgccacagcgtgcaagcacagc

SEQ ID NO: 364515 - DNA, 25 bp, Homo sapien
caaacaatacggttcacaaaggcga

SEQ ID NO: 364516 - DNA, 25 bp, Homo sapien
ccagctactcgtggaagaggaatca

SEQ ID NO: 364517 - DNA, 25 bp, Homo sapien
aactgaatcgacgtggaacctctga

SEQ ID NO: 364518 - DNA, 25 bp, Homo sapien
gaacctctgacggagccggaattgc

SEQ ID NO: 364519 - DNA, 25 bp, Homo sapien
tagaaactgcacgttttccccaggc

SEQ ID NO: 364520 - DNA, 25 bp, Homo sapien
cggctccagtggaggatcaacggca

SEQ ID NO: 364521 - DNA, 25 bp, Homo sapien
tgagggaaattcacgaaaagccacg

SEQ ID NO: 364522 - DNA, 25 bp, Homo sapien
tatgtaagtcaccagctcatgtcct

SEQ ID NO: 364523 - DNA, 25 bp, Homo sapien
agaactaaagccagatcctgcaggg

SEQ ID NO: 364524 - DNA, 25 bp, Homo sapien
ggctgctgcggagaagtagaactaa

SEQ ID NO: 364525 - DNA, 25 bp, Homo sapien
tcctgcagggtaaataggagtggcc

SEQ ID NO: 364526 - DNA, 25 bp, Homo sapien
ataggagtggcccagatcaagggca

SEQ ID NO: 364527 - DNA, 25 bp, Homo sapien
ttctcatagatgtacttgacagtag

SEQ ID NO: 364528 - DNA, 25 bp, Homo sapien
ttaaaaatcgtgtttctcatagatg

SEQ ID NO: 364529 - DNA, 25 bp, Homo sapien
tcagcatcagttgtggtcttggtag

SEQ ID NO: 364530 - DNA, 25 bp, Homo sapien
tgtggtcttggtagtgcttctgtgc

SEQ ID NO: 364531 - DNA, 25 bp, Homo sapien
gtcttggtagtgcttctgtgcccag

SEQ ID NO: 364532 - DNA, 25 bp, Homo sapien
ttgctgtcagcatcagttgtggtct

SEQ ID NO: 364533 - DNA, 25 bp, Homo sapien
gccacaatggacaaggtgcccggcg

SEQ ID NO: 364534 - DNA, 25 bp, Homo sapien
gtccctgggctgagaagcgtctctg

SEQ ID NO: 364535 - DNA, 25 bp, Homo sapien
agaggcccggtcgacgcagcaactg

SEQ ID NO: 364536 - DNA, 25 bp, Homo sapien
gacgcagcaactgagagtggctctg

SEQ ID NO: 364537 - DNA, 25 bp, Homo sapien
accaggttctgatgcatctccctct

SEQ ID NO: 364538 - DNA, 25 bp, Homo sapien
tggcagccttctgacccatcaggat

SEQ ID NO: 364539 - DNA, 25 bp, Homo sapien
atcaggatggtgatgggctgcttcc

SEQ ID NO: 364540 - DNA, 25 bp, Homo sapien
cgtcctgggttgtgctggcagcctt

SEQ ID NO: 364541 - DNA, 25 bp, Homo sapien
aagcggcatcacagccgcagcgagg

SEQ ID NO: 364542 - DNA, 25 bp, Homo sapien
cagaaacgcgtttggtgtaggaagc

SEQ ID NO: 364543 - DNA, 25 bp, Homo sapien
cgtttggtgtaggaagcggcatcac

SEQ ID NO: 364544 - DNA, 25 bp, Homo sapien
atccgcagggagcagcagaaacgcg

SEQ ID NO: 364545 - DNA, 25 bp, Homo sapien
tccctggcaccagcattgtgatggg

SEQ ID NO: 364546 - DNA, 25 bp, Homo sapien
gaagagctctgtgccgctagcttgg

SEQ ID NO: 364547 - DNA, 25 bp, Homo sapien
tacttcctgttgagctatcccagcc

SEQ ID NO: 364548 - DNA, 25 bp, Homo sapien
gacctgctagtgtgtgattctgaaa

SEQ ID NO: 364549 - DNA, 25 bp, Homo sapien
ggtgtccacatggtgcacactcttg

SEQ ID NO: 364550 - DNA, 25 bp, Homo sapien
ctggagagtgatggctcccggagca

SEQ ID NO: 364551 - DNA, 25 bp, Homo sapien
gcacccacggccagcgggtggacac

SEQ ID NO: 364552 - DNA, 25 bp, Homo sapien
ccagcgggtggacacggtgtccaca

SEQ ID NO: 364553 - DNA, 25 bp, Homo sapien
cagccactcagtcgtcacctgtgag

SEQ ID NO: 364554 - DNA, 25 bp, Homo sapien
aagccaggaagatatggacggagca

SEQ ID NO: 364555 - DNA, 25 bp, Homo sapien
cacagttgcacggtacagtttgcag

SEQ ID NO: 364556 - DNA, 25 bp, Homo sapien
gcaggtcgctgaaggatcctcttcc

SEQ ID NO: 364557 - DNA, 25 bp, Homo sapien
tcgatggatgtgaccaagaggacac

SEQ ID NO: 364558 - DNA, 25 bp, Homo sapien
aagaggacacttcgcgcacaggtct

SEQ ID NO: 364559 - DNA, 25 bp, Homo sapien
ttagaaggctctttcaccggaacag

SEQ ID NO: 364560 - DNA, 25 bp, Homo sapien
gaatcaggcaaggtgatcgatggat

SEQ ID NO: 364561 - DNA, 25 bp, Homo sapien
tctggggacacgctcatcccagagg

SEQ ID NO: 364562 - DNA, 25 bp, Homo sapien
attctggggacacgctcatcccaga

SEQ ID NO: 364563 - DNA, 25 bp, Homo sapien
ctggggacacgctcatcccagaggc

SEQ ID NO: 364564 - DNA, 25 bp, Homo sapien
gattctggggacacgctcatcccag

SEQ ID NO: 364565 - DNA, 25 bp, Homo sapien
aagcatgtctttcccctgcatgagg

SEQ ID NO: 364566 - DNA, 25 bp, Homo sapien
gcatgtctttcccctgcatgaggag

SEQ ID NO: 364567 - DNA, 25 bp, Homo sapien
atgtctttcccctgcatgaggaggg

SEQ ID NO: 364568 - DNA, 25 bp, Homo sapien
aaagcatgtctttcccctgcatgag

SEQ ID NO: 364569 - DNA, 25 bp, Homo sapien
gcacagccccaggttgaggggccac

SEQ ID NO: 364570 - DNA, 25 bp, Homo sapien
ggcacagccccaggttgaggggcca

SEQ ID NO: 364571 - DNA, 25 bp, Homo sapien
ccttcaaagaatgatcttgatacaa

SEQ ID NO: 364572 - DNA, 25 bp, Homo sapien
aggacagaggcccttcaaagaatga

SEQ ID NO: 364573 - DNA, 25 bp, Homo sapien
ggcccttcaaagaatgatcttgata

SEQ ID NO: 364574 - DNA, 25 bp, Homo sapien
cagaggcccttcaaagaatgatctt

SEQ ID NO: 364575 - DNA, 25 bp, Homo sapien
cttcccgctcagacctccaagtcgc

SEQ ID NO: 364576 - DNA, 25 bp, Homo sapien
gctcagacctccaagtcgccaaacg

SEQ ID NO: 364577 - DNA, 25 bp, Homo sapien
ctccaagtcgccaaacgcacatctc

SEQ ID NO: 364578 - DNA, 25 bp, Homo sapien
caaacgcacatctccaggactcggg

SEQ ID NO: 364579 - DNA, 25 bp, Homo sapien
cttttccgaaaattccatgggcttg

SEQ ID NO: 364580 - DNA, 25 bp, Homo sapien
ttttccgaaaattccatgggcttgc

SEQ ID NO: 364581 - DNA, 25 bp, Homo sapien
gtctgatgactctcccttttccgaa

SEQ ID NO: 364582 - DNA, 25 bp, Homo sapien
cagtcctctcccgtctgatgactct

SEQ ID NO: 364583 - DNA, 25 bp, Homo sapien
gctgctgccctaggaaaaccgtgtc

SEQ ID NO: 364584 - DNA, 25 bp, Homo sapien
gatgctgctgccctaggaaaaccgt

SEQ ID NO: 364585 - DNA, 25 bp, Homo sapien
catagccctggggtagttggagctt

SEQ ID NO: 364586 - DNA, 25 bp, Homo sapien
gcttttcctggcagtatccatggca

SEQ ID NO: 364587 - DNA, 25 bp, Homo sapien
cttggccctcgcttggcgctgggca

SEQ ID NO: 364588 - DNA, 25 bp, Homo sapien
gcatctgtctgctgtagcccacaga

SEQ ID NO: 364589 - DNA, 25 bp, Homo sapien
tctgtctgctgtagcccacagaggg

SEQ ID NO: 364590 - DNA, 25 bp, Homo sapien
tcgcttggcgctgggcatctgtctg

SEQ ID NO: 364591 - DNA, 25 bp, Homo sapien
tggatgtttgcagcgcacatgtatt

SEQ ID NO: 364592 - DNA, 25 bp, Homo sapien
ttcttcacgtcatcttgcatcctaa

SEQ ID NO: 364593 - DNA, 25 bp, Homo sapien
gtcatggatgtttgcagcgcacatg

SEQ ID NO: 364594 - DNA, 25 bp, Homo sapien
catggatgtttgcagcgcacatgta

SEQ ID NO: 364595 - DNA, 25 bp, Homo sapien
tcaatcacgccgatatcctgagctg

SEQ ID NO: 364596 - DNA, 25 bp, Homo sapien
tgtgctgtcggtggggttcggcccc

SEQ ID NO: 364597 - DNA, 25 bp, Homo sapien
tgtgggtgtcaatcacgccgatatc

SEQ ID NO: 364598 - DNA, 25 bp, Homo sapien
cacgccgatatcctgagctgctgca

SEQ ID NO: 364599 - DNA, 25 bp, Homo sapien
ggagacgcactagaaccttccagtg

SEQ ID NO: 364600 - DNA, 25 bp, Homo sapien
cgatttgcagtatccttaggacaca

SEQ ID NO: 364601 - DNA, 25 bp, Homo sapien
caaaagcccggtgtctgcatcgatt

SEQ ID NO: 364602 - DNA, 25 bp, Homo sapien
gcacggaggagacgcactagaacct

SEQ ID NO: 364603 - DNA, 25 bp, Homo sapien
cgcgggcagggccagaaatgcaggt

SEQ ID NO: 364604 - DNA, 25 bp, Homo sapien
caggtgcacccactgctctcgtggg

SEQ ID NO: 364605 - DNA, 25 bp, Homo sapien
tgtctggtgggaaggccggagtttg

SEQ ID NO: 364606 - DNA, 25 bp, Homo sapien
tctcgtgggccccaggttgaactgt

SEQ ID NO: 364607 - DNA, 25 bp, Homo sapien
ccaggcaagcccaagctcagccatg

SEQ ID NO: 364608 - DNA, 25 bp, Homo sapien
gacctggcagtccagcgggacacag

SEQ ID NO: 364609 - DNA, 25 bp, Homo sapien
gattcctacagggaacttgcagctg

SEQ ID NO: 364610 - DNA, 25 bp, Homo sapien
ttcctcttgccactggccggtctgc

SEQ ID NO: 364611 - DNA, 25 bp, Homo sapien
agagccttgattcctacagggaact

SEQ ID NO: 364612 - DNA, 25 bp, Homo sapien
ccactggccggtctgctcctctgga

SEQ ID NO: 364613 - DNA, 25 bp, Homo sapien
cagcatgagtaatgacgacggcccc

SEQ ID NO: 364614 - DNA, 25 bp, Homo sapien
gagtcccgaccttggaacagcatga

SEQ ID NO: 364615 - DNA, 25 bp, Homo sapien
ccttgttagtggcaactgtggacag

SEQ ID NO: 364616 - DNA, 25 bp, Homo sapien
ccgatctggcgcagtgctgagctgt

SEQ ID NO: 364617 - DNA, 25 bp, Homo sapien
agggtcaccgggagctcccaggacg

SEQ ID NO: 364618 - DNA, 25 bp, Homo sapien
tcggaccccaggcaaggcctccagg

SEQ ID NO: 364619 - DNA, 25 bp, Homo sapien
ggtccacttgctgagacacactccc

SEQ ID NO: 364620 - DNA, 25 bp, Homo sapien
gtccacttgctgagacacactcccc

SEQ ID NO: 364621 - DNA, 25 bp, Homo sapien
cagtggcactcggaccccaggcaag

SEQ ID NO: 364622 - DNA, 25 bp, Homo sapien
ccacgacgtgtcaccggggcctgtg

SEQ ID NO: 364623 - DNA, 25 bp, Homo sapien
gcctgtgcatcgcagggcccagctc

SEQ ID NO: 364624 - DNA, 25 bp, Homo sapien
gagctgcctgggtaacgatacagga

SEQ ID NO: 364625 - DNA, 25 bp, Homo sapien
gagtgagtctgggtagccccgggct

SEQ ID NO: 364626 - DNA, 25 bp, Homo sapien
cggcatgagaaatgcacccgtggcc

SEQ ID NO: 364627 - DNA, 25 bp, Homo sapien
taccctgaacagctgttggtggatc

SEQ ID NO: 364628 - DNA, 25 bp, Homo sapien
agaaatgcacccgtggcccacagag

SEQ ID NO: 364629 - DNA, 25 bp, Homo sapien
gcccatgactgccttgtagatcttc

SEQ ID NO: 364630 - DNA, 25 bp, Homo sapien
tttgtttctgatgcgtgaaattcca

SEQ ID NO: 364631 - DNA, 25 bp, Homo sapien
gccctcgtctgccctttgtttctga

SEQ ID NO: 364632 - DNA, 25 bp, Homo sapien
ccctttgtttctgatgcgtgaaatt

SEQ ID NO: 364633 - DNA, 25 bp, Homo sapien
gcactgccctcgtctgccctttgtt

SEQ ID NO: 364634 - DNA, 25 bp, Homo sapien
tgatgtccctttccctcgactgagt

SEQ ID NO: 364635 - DNA, 25 bp, Homo sapien
gcaccgctgtagcgaggccctggat

SEQ ID NO: 364636 - DNA, 25 bp, Homo sapien
cgactgagtcaaggggccagcttcc

SEQ ID NO: 364637 - DNA, 25 bp, Homo sapien
gcagacaccagcaccgctgtagcga

SEQ ID NO: 364638 - DNA, 25 bp, Homo sapien
ccaggatgccaccaagatactggga

SEQ ID NO: 364639 - DNA, 25 bp, Homo sapien
gcggacaccagcactgctgcagtga

SEQ ID NO: 364640 - DNA, 25 bp, Homo sapien
gtgacgccccggatacaaccaagat

SEQ ID NO: 364641 - DNA, 25 bp, Homo sapien
caaccaagatactgggaggcagata

SEQ ID NO: 364642 - DNA, 25 bp, Homo sapien
agcaccgctgcagtgaggttcagga

SEQ ID NO: 364643 - DNA, 25 bp, Homo sapien
gatacaaccaagataccggcaggcg

SEQ ID NO: 364644 - DNA, 25 bp, Homo sapien
acaaccaagataccggcaggcggac

SEQ ID NO: 364645 - DNA, 25 bp, Homo sapien
cagcaccgctgcagtgaggttcagg

SEQ ID NO: 364646 - DNA, 25 bp, Homo sapien
caggtcttcagcagctgtttcagtg

SEQ ID NO: 364647 - DNA, 25 bp, Homo sapien
ccaggtcttcagcagctgtttcagt

SEQ ID NO: 364648 - DNA, 25 bp, Homo sapien
ggtcttcagcagctgtttcagtggc

SEQ ID NO: 364649 - DNA, 25 bp, Homo sapien
tcttcagcagctgtttcagtggcat

SEQ ID NO: 364650 - DNA, 25 bp, Homo sapien
cagaggcgcagctattacttttctc

SEQ ID NO: 364651 - DNA, 25 bp, Homo sapien
tggctcagccaccagaggcgcagct

SEQ ID NO: 364652 - DNA, 25 bp, Homo sapien
ccaccagaggcgcagctattacttt

SEQ ID NO: 364653 - DNA, 25 bp, Homo sapien
tcagccaccagaggcgcagctatta

SEQ ID NO: 364654 - DNA, 25 bp, Homo sapien
ccagaatccgtggtgttgggggcca

SEQ ID NO: 364655 - DNA, 25 bp, Homo sapien
atgttccagaatccgtggtgttggg

SEQ ID NO: 364656 - DNA, 25 bp, Homo sapien
aatgttccagaatccgtggtgttgg

SEQ ID NO: 364657 - DNA, 25 bp, Homo sapien
cagcccccacgtcccagaggctgcc

SEQ ID NO: 364658 - DNA, 25 bp, Homo sapien
ccagagggctgagacatgtggtctg

SEQ ID NO: 364659 - DNA, 25 bp, Homo sapien
gcccccgcccagatccatggacaca

SEQ ID NO: 364660 - DNA, 25 bp, Homo sapien
ggaaagatgctccatcctcagggcc

SEQ ID NO: 364661 - DNA, 25 bp, Homo sapien
cagagtggacacctgaggcgggggt

SEQ ID NO: 364662 - DNA, 25 bp, Homo sapien
ccaggaacacgcggccaagtgcacg

SEQ ID NO: 364663 - DNA, 25 bp, Homo sapien
tgcacgcagccggtgtcctcgggag

SEQ ID NO: 364664 - DNA, 25 bp, Homo sapien
gaacacgcggccaagtgcacgcagc

SEQ ID NO: 364665 - DNA, 25 bp, Homo sapien
cggtgtcctcgggagccggtggtgg

SEQ ID NO: 364666 - DNA, 25 bp, Homo sapien
aatccggcggcacagggacgtgcag

SEQ ID NO: 364667 - DNA, 25 bp, Homo sapien
ctagaaatccggcggcacagggacg

SEQ ID NO: 364668 - DNA, 25 bp, Homo sapien
tagaaatccggcggcacagggacgt

SEQ ID NO: 364669 - DNA, 25 bp, Homo sapien
gaaatccggcggcacagggacgtgc

SEQ ID NO: 364670 - DNA, 25 bp, Homo sapien
cacattttgacacagggaacggcac

SEQ ID NO: 364671 - DNA, 25 bp, Homo sapien
cagtcgtaagtcctggtgccagcgg

SEQ ID NO: 364672 - DNA, 25 bp, Homo sapien
cattgaatctacagaccagttgggt

SEQ ID NO: 364673 - DNA, 25 bp, Homo sapien
cattgctagctacatgatgaccctg

SEQ ID NO: 364674 - DNA, 25 bp, Homo sapien
gtccactcggtgaccaccgcatcag

SEQ ID NO: 364675 - DNA, 25 bp, Homo sapien
tctgtccactcggtgaccaccgcat

SEQ ID NO: 364676 - DNA, 25 bp, Homo sapien
actcggtgaccaccgcatcagccat

SEQ ID NO: 364677 - DNA, 25 bp, Homo sapien
acctctgtccactcggtgaccaccg

SEQ ID NO: 364678 - DNA, 25 bp, Homo sapien
tggatccccacgaaactgcagaaac

SEQ ID NO: 364679 - DNA, 25 bp, Homo sapien
ccaagaacatgtggcgggctggctc

SEQ ID NO: 364680 - DNA, 25 bp, Homo sapien
tacgctgggaaaacctagctgagtc

SEQ ID NO: 364681 - DNA, 25 bp, Homo sapien
gcatgggtcgcctggaaatcagcca

SEQ ID NO: 364682 - DNA, 25 bp, Homo sapien
ggcgctgcgctccacaatttgaaca

SEQ ID NO: 364683 - DNA, 25 bp, Homo sapien
acttccgtctgaaaggtgccggccg

SEQ ID NO: 364684 - DNA, 25 bp, Homo sapien
tcatggacacggacatgacacgcgc

SEQ ID NO: 364685 - DNA, 25 bp, Homo sapien
caactgcgcgaagggtcatgaatcc

SEQ ID NO: 364686 - DNA, 25 bp, Homo sapien
tccgcggaaaacactgcggctcggc

SEQ ID NO: 364687 - DNA, 25 bp, Homo sapien
caccacgacgtgcaaagaagaaagt

SEQ ID NO: 364688 - DNA, 25 bp, Homo sapien
gctcggcaggtcaatccaaacctgg

SEQ ID NO: 364689 - DNA, 25 bp, Homo sapien
tgtcagtctgaacccggaaacacct

SEQ ID NO: 364690 - DNA, 25 bp, Homo sapien
cacgtgctttgtggaagggtcacca

SEQ ID NO: 364691 - DNA, 25 bp, Homo sapien
tgacccagtgaatatgccgacatac

SEQ ID NO: 364692 - DNA, 25 bp, Homo sapien
cacagaggcagtcgtgatgcaggtt

SEQ ID NO: 364693 - DNA, 25 bp, Homo sapien
tatgtattcgaggtgcatgacccag

SEQ ID NO: 364694 - DNA, 25 bp, Homo sapien
gccttggtgccattcgaccaacctc

SEQ ID NO: 364695 - DNA, 25 bp, Homo sapien
aacacgttctccttcaccacggcca

SEQ ID NO: 364696 - DNA, 25 bp, Homo sapien
tgctgtcccaagcttgtcacctccc

SEQ ID NO: 364697 - DNA, 25 bp, Homo sapien
ggtcaggtcacagcaaatccatgta

SEQ ID NO: 364698 - DNA, 25 bp, Homo sapien
ggcaggatgcaggtcgcctgtccat

SEQ ID NO: 364699 - DNA, 25 bp, Homo sapien
tggcttttgtcacgagcgcaatcgc

SEQ ID NO: 364700 - DNA, 25 bp, Homo sapien
tagctcccatgcacaaattagaacg

SEQ ID NO: 364701 - DNA, 25 bp, Homo sapien
tcctcttccgagctgggcaggatgc

SEQ ID NO: 364702 - DNA, 25 bp, Homo sapien
cccgaaatgctggatgaatgtgcac

SEQ ID NO: 364703 - DNA, 25 bp, Homo sapien
caggtcgaccccgaaatgctggatg

SEQ ID NO: 364704 - DNA, 25 bp, Homo sapien
ccaaggtcaggtcgaccccgaaatg

SEQ ID NO: 364705 - DNA, 25 bp, Homo sapien
tggatgaatgtgcacactcgctggg

SEQ ID NO: 364706 - DNA, 25 bp, Homo sapien
cagcaccgcagagccacagggcaga

SEQ ID NO: 364707 - DNA, 25 bp, Homo sapien
agggcagacgccgtgcacaccagac

SEQ ID NO: 364708 - DNA, 25 bp, Homo sapien
ccacggccagcaccgcagagccaca

SEQ ID NO: 364709 - DNA, 25 bp, Homo sapien
agagccacagggcagacgccgtgca

SEQ ID NO: 364710 - DNA, 25 bp, Homo sapien
tgggccacagccaggcccgggtggt

SEQ ID NO: 364711 - DNA, 25 bp, Homo sapien
cacagccaggcccgggtggtgaagg

SEQ ID NO: 364712 - DNA, 25 bp, Homo sapien
agccaggcccgggtggtgaaggacg

SEQ ID NO: 364713 - DNA, 25 bp, Homo sapien
gggccacagccaggcccgggtggtg

SEQ ID NO: 364714 - DNA, 25 bp, Homo sapien
ggcacagcacataagcaatgccagt

SEQ ID NO: 364715 - DNA, 25 bp, Homo sapien
ccctgagaagtgaccgtgctggtag

SEQ ID NO: 364716 - DNA, 25 bp, Homo sapien
gaagggacgtccatggtcctgcagg

SEQ ID NO: 364717 - DNA, 25 bp, Homo sapien
tgccagtgacgcaggagagcgagag

SEQ ID NO: 364718 - DNA, 25 bp, Homo sapien
cagacaccatcacagagccgggccc

SEQ ID NO: 364719 - DNA, 25 bp, Homo sapien
agggtctgtccaaacggtcagggca

SEQ ID NO: 364720 - DNA, 25 bp, Homo sapien
cctaaatgcacagaagccttgggca

SEQ ID NO: 364721 - DNA, 25 bp, Homo sapien
cactaaggcagtcaagacggaggct

SEQ ID NO: 364722 - DNA, 25 bp, Homo sapien
gaatagcccagttgtcctgacctgt

SEQ ID NO: 364723 - DNA, 25 bp, Homo sapien
ggatgcaagctctggacttgggcaa

SEQ ID NO: 364724 - DNA, 25 bp, Homo sapien
cctgtgccccgtgacggctgcatag

SEQ ID NO: 364725 - DNA, 25 bp, Homo sapien
cagtggctatggctgacggacctgc

SEQ ID NO: 364726 - DNA, 25 bp, Homo sapien
aaatgcattgtcacgccccaggtgg

SEQ ID NO: 364727 - DNA, 25 bp, Homo sapien
tgtattggacccacgtgctgcagag

SEQ ID NO: 364728 - DNA, 25 bp, Homo sapien
catctgtattggacccacgtgctgc

SEQ ID NO: 364729 - DNA, 25 bp, Homo sapien
tgccacatctgtattggacccacgt

SEQ ID NO: 364730 - DNA, 25 bp, Homo sapien
tggacccacgtgctgcagagctcag

SEQ ID NO: 364731 - DNA, 25 bp, Homo sapien
tggtcaagtgtgtcaagccaggtgg

SEQ ID NO: 364732 - DNA, 25 bp, Homo sapien
ctgtaggcaaactgcccactgttgc

SEQ ID NO: 364733 - DNA, 25 bp, Homo sapien
aggcaaactgcccactgttgctcta

SEQ ID NO: 364734 - DNA, 25 bp, Homo sapien
caagtgtgtcaagccaggtggctgt

SEQ ID NO: 364735 - DNA, 25 bp, Homo sapien
gccttgtgggcgctttgccccctct

SEQ ID NO: 364736 - DNA, 25 bp, Homo sapien
aagctgcccccggtcactggtgcca

SEQ ID NO: 364737 - DNA, 25 bp, Homo sapien
tctgggaggtcccacgttgggtgag

SEQ ID NO: 364738 - DNA, 25 bp, Homo sapien
cacctcaaagctgcccccggtcact

SEQ ID NO: 364739 - DNA, 25 bp, Homo sapien
tgatgctcggggtgctgacctttgt

SEQ ID NO: 364740 - DNA, 25 bp, Homo sapien
acagtgatgctcggggtgctgacct

SEQ ID NO: 364741 - DNA, 25 bp, Homo sapien
cacagtgatgctcggggtgctgacc

SEQ ID NO: 364742 - DNA, 25 bp, Homo sapien
agtgatgctcggggtgctgaccttt

SEQ ID NO: 364743 - DNA, 25 bp, Homo sapien
tgatgctcggggtgctgacctttgt

SEQ ID NO: 364744 - DNA, 25 bp, Homo sapien
cacagtgatgctcggggtgctgacc

SEQ ID NO: 364745 - DNA, 25 bp, Homo sapien
tgctcggggtgctgacctttgtggg

SEQ ID NO: 364746 - DNA, 25 bp, Homo sapien
agtgatgctcggggtgctgaccttt

SEQ ID NO: 364747 - DNA, 25 bp, Homo sapien
ctttgtggggagagcacagtgatgc

SEQ ID NO: 364748 - DNA, 25 bp, Homo sapien
tgtggggagagcacagtgatgctcg

SEQ ID NO: 364749 - DNA, 25 bp, Homo sapien
agcacagtgatgctcggggtgctga

SEQ ID NO: 364750 - DNA, 25 bp, Homo sapien
agagcacagtgatgctcggggtgct

SEQ ID NO: 364751 - DNA, 25 bp, Homo sapien
aggaggcacagtgcctggaggatgg

SEQ ID NO: 364752 - DNA, 25 bp, Homo sapien
ctttgggaggaggcacagtgcctgg

SEQ ID NO: 364753 - DNA, 25 bp, Homo sapien
ggcacagtgcctggaggatgggcat

SEQ ID NO: 364754 - DNA, 25 bp, Homo sapien
gaggcacagtgcctggaggatgggc

SEQ ID NO: 364755 - DNA, 25 bp, Homo sapien
ccttgccaagcacaggggatgtgca

SEQ ID NO: 364756 - DNA, 25 bp, Homo sapien
gatgtgcacagcgtgcgtttatgaa

SEQ ID NO: 364757 - DNA, 25 bp, Homo sapien
ccttgtgccctgaaagcacctcggt

SEQ ID NO: 364758 - DNA, 25 bp, Homo sapien
cgtttatgaactgagagcagaagca

SEQ ID NO: 364759 - DNA, 25 bp, Homo sapien
gggccagttgtcgtagctgccctcc

SEQ ID NO: 364760 - DNA, 25 bp, Homo sapien
attgtccccaatccatctctgacag

SEQ ID NO: 364761 - DNA, 25 bp, Homo sapien
gtgtggggccagttgtcgtagctgc

SEQ ID NO: 364762 - DNA, 25 bp, Homo sapien
cagttgtcgtagctgccctcctcag

SEQ ID NO: 364763 - DNA, 25 bp, Homo sapien
caccagcccccaaacggccaccctg

SEQ ID NO: 364764 - DNA, 25 bp, Homo sapien
cggccaccctgacgccgggctgacg

SEQ ID NO: 364765 - DNA, 25 bp, Homo sapien
caaacggccaccctgacgccgggct

SEQ ID NO: 364766 - DNA, 25 bp, Homo sapien
cctgacgccgggctgacggcgccat

SEQ ID NO: 364767 - DNA, 25 bp, Homo sapien
atcatcaaagccttccacgtccact

SEQ ID NO: 364768 - DNA, 25 bp, Homo sapien
aacatcatcaaagccttccacgtcc

SEQ ID NO: 364769 - DNA, 25 bp, Homo sapien
tcatcaaagccttccacgtccactg

SEQ ID NO: 364770 - DNA, 25 bp, Homo sapien
catcatcaaagccttccacgtccac

SEQ ID NO: 364771 - DNA, 25 bp, Homo sapien
gaacgatcgggagctcagtcggtca

SEQ ID NO: 364772 - DNA, 25 bp, Homo sapien
accgttctcagccaaggacttcgtg

SEQ ID NO: 364773 - DNA, 25 bp, Homo sapien
tctgatgcctacactttgacacagg

SEQ ID NO: 364774 - DNA, 25 bp, Homo sapien
ggagcccggcccatttacataggta

SEQ ID NO: 364775 - DNA, 25 bp, Homo sapien
gcccatgctccgtgcacaggggatc

SEQ ID NO: 364776 - DNA, 25 bp, Homo sapien
aggggatccatccacagacccatgc

SEQ ID NO: 364777 - DNA, 25 bp, Homo sapien
gcccacgctccgtgcagggggggat

SEQ ID NO: 364778 - DNA, 25 bp, Homo sapien
gctccgtgcacaggggatccatcca

SEQ ID NO: 364779 - DNA, 25 bp, Homo sapien
tattaagaaactcaattcccaacca

SEQ ID NO: 364780 - DNA, 25 bp, Homo sapien
agaaactcaattcccaaccagagca

SEQ ID NO: 364781 - DNA, 25 bp, Homo sapien
aaccagagcagctcaaagctaacag

SEQ ID NO: 364782 - DNA, 25 bp, Homo sapien
caaccagagcagctcaaagctaaca

SEQ ID NO: 364783 - DNA, 25 bp, Homo sapien
ctataattcaccaccaggcccgcag

SEQ ID NO: 364784 - DNA, 25 bp, Homo sapien
ggagggccgacggcccttcactctc

SEQ ID NO: 364785 - DNA, 25 bp, Homo sapien
tgcccgctcagggagggccgacggc

SEQ ID NO: 364786 - DNA, 25 bp, Homo sapien
aggtgcccgctcagggagggccgac

SEQ ID NO: 364787 - DNA, 25 bp, Homo sapien
ggtggggtctgtgcaagctcctggc

SEQ ID NO: 364788 - DNA, 25 bp, Homo sapien
ctgtccaagcacctgggccactcca

SEQ ID NO: 364789 - DNA, 25 bp, Homo sapien
acttccacctccaagtgagctgcca

SEQ ID NO: 364790 - DNA, 25 bp, Homo sapien
gctgtccaagcacctgggccactcc

SEQ ID NO: 364791 - DNA, 25 bp, Homo sapien
aacgggcctctgccgaccactggaa

SEQ ID NO: 364792 - DNA, 25 bp, Homo sapien
ctctgccgaccactggaagtcgtga

SEQ ID NO: 364793 - DNA, 25 bp, Homo sapien
tgccgaccactggaagtcgtgacgg

SEQ ID NO: 364794 - DNA, 25 bp, Homo sapien
gacccaggaggagccaacgggcctc

SEQ ID NO: 364795 - DNA, 25 bp, Homo sapien
gacacagaattgcacctgaggacac

SEQ ID NO: 364796 - DNA, 25 bp, Homo sapien
ggacacagaattgcacctgaggaca

SEQ ID NO: 364797 - DNA, 25 bp, Homo sapien
gggacacagaattgcacctgaggac

SEQ ID NO: 364798 - DNA, 25 bp, Homo sapien
catggcttctgtccaccgcggggct

SEQ ID NO: 364799 - DNA, 25 bp, Homo sapien
taagggcacatatccttggtagaag

SEQ ID NO: 364800 - DNA, 25 bp, Homo sapien
tgggaccattttctttaagggcaca

SEQ ID NO: 364801 - DNA, 25 bp, Homo sapien
ttaagggcacatatccttggtagaa

SEQ ID NO: 364802 - DNA, 25 bp, Homo sapien
ctttaagggcacatatccttggtag

SEQ ID NO: 364803 - DNA, 25 bp, Homo sapien
ggaatgcctcgccaacaacacagga

SEQ ID NO: 364804 - DNA, 25 bp, Homo sapien
caaggtcacaaagaagcgcagcaat

SEQ ID NO: 364805 - DNA, 25 bp, Homo sapien
caatgtggggaatgcctcgccaaca

SEQ ID NO: 364806 - DNA, 25 bp, Homo sapien
tcccatgaagccgaggtcacaaaag

SEQ ID NO: 364807 - DNA, 25 bp, Homo sapien
ggattttccccgctgacagctctcg

SEQ ID NO: 364808 - DNA, 25 bp, Homo sapien
ctcgagtttatcctctgtgagggcc

SEQ ID NO: 364809 - DNA, 25 bp, Homo sapien
ctggattttccagccacggattttc

SEQ ID NO: 364810 - DNA, 25 bp, Homo sapien
gctctcgccgtttcctgggtctcga

SEQ ID NO: 364811 - DNA, 25 bp, Homo sapien
taaaaacgtccaaaggtgagcctgc

SEQ ID NO: 364812 - DNA, 25 bp, Homo sapien
ggcgtatccacaacacatcctagga

SEQ ID NO: 364813 - DNA, 25 bp, Homo sapien
tatcagccggtaatcccatccattg

SEQ ID NO: 364814 - DNA, 25 bp, Homo sapien
tgtcaggcttgaaaaggcggatcaa

SEQ ID NO: 364815 - DNA, 25 bp, Homo sapien
gcattggccaggtccatacaatggc

SEQ ID NO: 364816 - DNA, 25 bp, Homo sapien
gacaatggccgtcacaggagtggag

SEQ ID NO: 364817 - DNA, 25 bp, Homo sapien
agtgaccctgcgtgtggacaatggc

SEQ ID NO: 364818 - DNA, 25 bp, Homo sapien
aagggcgtgcattggccaggtccat

SEQ ID NO: 364819 - DNA, 25 bp, Homo sapien
agcgtgagtcgctgcaaagggcaaa

SEQ ID NO: 364820 - DNA, 25 bp, Homo sapien
aaaggtgtgcgccacaaagcaccag

SEQ ID NO: 364821 - DNA, 25 bp, Homo sapien
aaagcaagtcaaatgtcccagtaac

SEQ ID NO: 364822 - DNA, 25 bp, Homo sapien
cactgaggttaccacagggtccaca

SEQ ID NO: 364823 - DNA, 25 bp, Homo sapien
gaatcgtccctaaggagtctcaaga

SEQ ID NO: 364824 - DNA, 25 bp, Homo sapien
taaaccgccattgtacagctccagg

SEQ ID NO: 364825 - DNA, 25 bp, Homo sapien
gaaagcacccctcagcaagatggag

SEQ ID NO: 364826 - DNA, 25 bp, Homo sapien
gctccagggaaaatcagaatcgtcc

SEQ ID NO: 364827 - DNA, 25 bp, Homo sapien
tgggggaggaggtcggggccactca

SEQ ID NO: 364828 - DNA, 25 bp, Homo sapien
agctcgtccctctccttaaagtctt

SEQ ID NO: 364829 - DNA, 25 bp, Homo sapien
tcaaccgagcccgagagggcatggc

SEQ ID NO: 364830 - DNA, 25 bp, Homo sapien
tcctaacgttccgtccgagcgcatt

SEQ ID NO: 364831 - DNA, 25 bp, Homo sapien
gtcgcgggtagacagccgcacctct

SEQ ID NO: 364832 - DNA, 25 bp, Homo sapien
ctagaaagacctaactgagactggg

SEQ ID NO: 364833 - DNA, 25 bp, Homo sapien
tctcacactgctagaaagacctaac

SEQ ID NO: 364834 - DNA, 25 bp, Homo sapien
tcacactgctagaaagacctaactg

SEQ ID NO: 364835 - DNA, 25 bp, Homo sapien
cactgctagaaagacctaactgaga

SEQ ID NO: 364836 - DNA, 25 bp, Homo sapien
aagcaggcgcttctcatcatggcgg

SEQ ID NO: 364837 - DNA, 25 bp, Homo sapien
gcttctcatcatggcggagcagagg

SEQ ID NO: 364838 - DNA, 25 bp, Homo sapien
ctcatcatggcggagcagaggaaga

SEQ ID NO: 364839 - DNA, 25 bp, Homo sapien
caggcgcttctcatcatggcggagc

SEQ ID NO: 364840 - DNA, 25 bp, Homo sapien
agtaagaaagcctgtgtaattagac

SEQ ID NO: 364841 - DNA, 25 bp, Homo sapien
agctccaaccagacacctcgcagtt

SEQ ID NO: 364842 - DNA, 25 bp, Homo sapien
taattagacctaatgacaaagaggc

SEQ ID NO: 364843 - DNA, 25 bp, Homo sapien
agacacctcgcagttcccaaggcca

SEQ ID NO: 364844 - DNA, 25 bp, Homo sapien
agggccgtggacaagcagctggaag

SEQ ID NO: 364845 - DNA, 25 bp, Homo sapien
ccggccagccttgatccagaagatg

SEQ ID NO: 364846 - DNA, 25 bp, Homo sapien
acccctggtgaaggccggcatcagt

SEQ ID NO: 364847 - DNA, 25 bp, Homo sapien
agaagatgacccctgggtgacccct

SEQ ID NO: 364848 - DNA, 25 bp, Homo sapien
gagtgtgcggggctcggcatccggc

SEQ ID NO: 364849 - DNA, 25 bp, Homo sapien
tcggccatccgtgctgaacaggatg

SEQ ID NO: 364850 - DNA, 25 bp, Homo sapien
ccaatcccatcctgctggcccagaa

SEQ ID NO: 364851 - DNA, 25 bp, Homo sapien
gccccactcggccatccgtgctgaa

SEQ ID NO: 364852 - DNA, 25 bp, Homo sapien
aaggcaccgcagctccccgtgacgt

SEQ ID NO: 364853 - DNA, 25 bp, Homo sapien
tgagcaccgcacacggcacgggtta

SEQ ID NO: 364854 - DNA, 25 bp, Homo sapien
ctgcagctccccgtgatgaccgctc

SEQ ID NO: 364855 - DNA, 25 bp, Homo sapien
atgacgatcgctcctcctctgagca

SEQ ID NO: 364856 - DNA, 25 bp, Homo sapien
ttcccaatcggagatcccagcaggg

SEQ ID NO: 364857 - DNA, 25 bp, Homo sapien
cgtggcgggatggttttcccaatcg

SEQ ID NO: 364858 - DNA, 25 bp, Homo sapien
cttggccacctcccgtggcgggatg

SEQ ID NO: 364859 - DNA, 25 bp, Homo sapien
ggttttcccaatcggagatcccagc

SEQ ID NO: 364860 - DNA, 25 bp, Homo sapien
agccatccctgggtgaaggtgcatg

SEQ ID NO: 364861 - DNA, 25 bp, Homo sapien
ctaagaagccatccctgggtgaagg

SEQ ID NO: 364862 - DNA, 25 bp, Homo sapien
agaagccatccctgggtgaaggtgc

SEQ ID NO: 364863 - DNA, 25 bp, Homo sapien
catccctgggtgaaggtgcatgcag

SEQ ID NO: 364864 - DNA, 25 bp, Homo sapien
cactttcaagatcagccggtagaca

SEQ ID NO: 364865 - DNA, 25 bp, Homo sapien
cccatgttggacgagcaggacgtga

SEQ ID NO: 364866 - DNA, 25 bp, Homo sapien
cttcaccgtgaaagtgccagccggg

SEQ ID NO: 364867 - DNA, 25 bp, Homo sapien
gtagacaacgcagaaaggccacctg

SEQ ID NO: 364868 - DNA, 25 bp, Homo sapien
gaagcgtgatcccacactggggtcc

SEQ ID NO: 364869 - DNA, 25 bp, Homo sapien
acctgcagaagcgtgatcccacact

SEQ ID NO: 364870 - DNA, 25 bp, Homo sapien
tgaagtcggccatgcagccccccag

SEQ ID NO: 364871 - DNA, 25 bp, Homo sapien
ctgcagaagcgtgatcccacactgg

SEQ ID NO: 364872 - DNA, 25 bp, Homo sapien
tctctgagctggcgcccttgctgtc

SEQ ID NO: 364873 - DNA, 25 bp, Homo sapien
tggcccgaccgcgtgggtgacatcc

SEQ ID NO: 364874 - DNA, 25 bp, Homo sapien
agacatcagacaccacagaccgagg

SEQ ID NO: 364875 - DNA, 25 bp, Homo sapien
ttgaagtgtgctgacccggctcttg

SEQ ID NO: 364876 - DNA, 25 bp, Homo sapien
attcttccatatgggaatttaggtt

SEQ ID NO: 364877 - DNA, 25 bp, Homo sapien
aattcttccatatgggaatttaggt

SEQ ID NO: 364878 - DNA, 25 bp, Homo sapien
ggcacagaggaagctcgggctttgc

SEQ ID NO: 364879 - DNA, 25 bp, Homo sapien
cagaggttgccggtttctagaaagt

SEQ ID NO: 364880 - DNA, 25 bp, Homo sapien
aggaacaaacacagacgatgacggg

SEQ ID NO: 364881 - DNA, 25 bp, Homo sapien
gttgccggtttctagaaagtggctg

SEQ ID NO: 364882 - DNA, 25 bp, Homo sapien
ttttaatgcctgtacgagagccact

SEQ ID NO: 364883 - DNA, 25 bp, Homo sapien
tgttaaaatagtcactccagagggt

SEQ ID NO: 364884 - DNA, 25 bp, Homo sapien
gaccatatgggcctaaagagttctt

SEQ ID NO: 364885 - DNA, 25 bp, Homo sapien
gcgaagtttgccagtgagaccatat

SEQ ID NO: 364886 - DNA, 25 bp, Homo sapien
gagcgacctccctctgcataaggag

SEQ ID NO: 364887 - DNA, 25 bp, Homo sapien
cagggcaggacagcgtcccgttctg

SEQ ID NO: 364888 - DNA, 25 bp, Homo sapien
gtcccgttctgataccggctgccgg

SEQ ID NO: 364889 - DNA, 25 bp, Homo sapien
cggcactgccaagcagaccggagag

SEQ ID NO: 364890 - DNA, 25 bp, Homo sapien
acacagctggggctgggcgggatgc

SEQ ID NO: 364891 - DNA, 25 bp, Homo sapien
ggctgggcgggatgctgctgctggc

SEQ ID NO: 364892 - DNA, 25 bp, Homo sapien
acagctggggctgggcgggatgctg

SEQ ID NO: 364893 - DNA, 25 bp, Homo sapien
agctggggctgggcgggatgctgct

SEQ ID NO: 364894 - DNA, 25 bp, Homo sapien
ggggcagccactgggagaaagccag

SEQ ID NO: 364895 - DNA, 25 bp, Homo sapien
gctgggggcagccactgggagaaag

SEQ ID NO: 364896 - DNA, 25 bp, Homo sapien
cagccactgggagaaagccagatct

SEQ ID NO: 364897 - DNA, 25 bp, Homo sapien
ggcagccactgggagaaagccagat

SEQ ID NO: 364898 - DNA, 25 bp, Homo sapien
ccagcgttcccatggggcccaggga

SEQ ID NO: 364899 - DNA, 25 bp, Homo sapien
gactatcagtgcagatgcaagggct

SEQ ID NO: 364900 - DNA, 25 bp, Homo sapien
gagcccgaagccagggactatcagt

SEQ ID NO: 364901 - DNA, 25 bp, Homo sapien
ccagattcggacacccaagagccat

SEQ ID NO: 364902 - DNA, 25 bp, Homo sapien
gagttgcattaggagtagcaggcat

SEQ ID NO: 364903 - DNA, 25 bp, Homo sapien
gctctaccagggagccgctaggagc

SEQ ID NO: 364904 - DNA, 25 bp, Homo sapien
tgcattaggagtagcaggcatcagg

SEQ ID NO: 364905 - DNA, 25 bp, Homo sapien
tgcctgaggctctaccagggagccg

SEQ ID NO: 364906 - DNA, 25 bp, Homo sapien
acagcccagagtccgttgttggggc

SEQ ID NO: 364907 - DNA, 25 bp, Homo sapien
ttccccgaagctgtcacagcccaga

SEQ ID NO: 364908 - DNA, 25 bp, Homo sapien
cagagctccccgctgttccagaggg

SEQ ID NO: 364909 - DNA, 25 bp, Homo sapien
gtccacttccccgaagctgtcacag

SEQ ID NO: 364910 - DNA, 25 bp, Homo sapien
catatgtgggtgcatgtcattgccc

SEQ ID NO: 364911 - DNA, 25 bp, Homo sapien
tgtgggtgcatgtcattgcccgtgt

SEQ ID NO: 364912 - DNA, 25 bp, Homo sapien
ggtgcatgtcattgcccgtgtgcaa

SEQ ID NO: 364913 - DNA, 25 bp, Homo sapien
atgtcattgcccgtgtgcaacaagg

SEQ ID NO: 364914 - DNA, 25 bp, Homo sapien
tgcaggggtttgaaaaagtgaatac

SEQ ID NO: 364915 - DNA, 25 bp, Homo sapien
gcaggggtttgaaaaagtgaataca

SEQ ID NO: 364916 - DNA, 25 bp, Homo sapien
ctgcaggggtttgaaaaagtgaata

SEQ ID NO: 364917 - DNA, 25 bp, Homo sapien
cccacagagcacaccccttgtgccc

SEQ ID NO: 364918 - DNA, 25 bp, Homo sapien
gggtgccagcatctaggcagctgtg

SEQ ID NO: 364919 - DNA, 25 bp, Homo sapien
cctggcatatctggggtgccttttg

SEQ ID NO: 364920 - DNA, 25 bp, Homo sapien
tgccagcatctaggcagctgtgggc

SEQ ID NO: 364921 - DNA, 25 bp, Homo sapien
ggtgccttttgtgtctgtcgtgtct

SEQ ID NO: 364922 - DNA, 25 bp, Homo sapien
agggacacatgtaggagactggaag

SEQ ID NO: 364923 - DNA, 25 bp, Homo sapien
catggcatgacaattgcagggacac

SEQ ID NO: 364924 - DNA, 25 bp, Homo sapien
gcagggacacatgtaggagactgga

SEQ ID NO: 364925 - DNA, 25 bp, Homo sapien
tggcatgacaattgcagggacacat

SEQ ID NO: 364926 - DNA, 25 bp, Homo sapien
agggcgtcccgggaatcacagtcgc

SEQ ID NO: 364927 - DNA, 25 bp, Homo sapien
aaagtggccgcagtacccgggtgca

SEQ ID NO: 364928 - DNA, 25 bp, Homo sapien
gaatcacagtcgctgggtgagaaag

SEQ ID NO: 364929 - DNA, 25 bp, Homo sapien
gtacccgggtgcaaggcagggaatg

SEQ ID NO: 364930 - DNA, 25 bp, Homo sapien
tggaataagaggtgtccggttgtcc

SEQ ID NO: 364931 - DNA, 25 bp, Homo sapien
cccagaagagcccaagtgcccagta

SEQ ID NO: 364932 - DNA, 25 bp, Homo sapien
agcccaagtgcccagtaagaatggc

SEQ ID NO: 364933 - DNA, 25 bp, Homo sapien
agaagagcccaagtgcccagtaaga

SEQ ID NO: 364934 - DNA, 25 bp, Homo sapien
ccaagtgcccagtaagaatggccat

SEQ ID NO: 364935 - DNA, 25 bp, Homo sapien
ctggcaccacgcctcggttgttcat

SEQ ID NO: 364936 - DNA, 25 bp, Homo sapien
ggcaggcatcgctgagctcctgctg

SEQ ID NO: 364937 - DNA, 25 bp, Homo sapien
tgctggatgggagaagacgggcagg

SEQ ID NO: 364938 - DNA, 25 bp, Homo sapien
caatcgctgaacttctgctggatgg

SEQ ID NO: 364939 - DNA, 25 bp, Homo sapien
ctggatgggaggagacgggcaggca

SEQ ID NO: 364940 - DNA, 25 bp, Homo sapien
aggcagcctgagattttcggggcat

SEQ ID NO: 364941 - DNA, 25 bp, Homo sapien
gatggagaggcagcctgagattttc

SEQ ID NO: 364942 - DNA, 25 bp, Homo sapien
cagcctgagattttcggggcatggt

SEQ ID NO: 364943 - DNA, 25 bp, Homo sapien
ggagaagatggagaggcagcctgag

SEQ ID NO: 364944 - DNA, 25 bp, Homo sapien
ggctctctgtgaatggtagacactc

SEQ ID NO: 364945 - DNA, 25 bp, Homo sapien
tgctggtgctgcaaacctggtgcat

SEQ ID NO: 364946 - DNA, 25 bp, Homo sapien
gatgggcctgaatccattgacattc

SEQ ID NO: 364947 - DNA, 25 bp, Homo sapien
agacactctgggctccctcgctggg

SEQ ID NO: 364948 - DNA, 25 bp, Homo sapien
tgccccggggaacgcacaccgtctc

SEQ ID NO: 364949 - DNA, 25 bp, Homo sapien
ctgccccggggaacgcacaccgtct

SEQ ID NO: 364950 - DNA, 25 bp, Homo sapien
ccttgactggaacaaatgggcactc

SEQ ID NO: 364951 - DNA, 25 bp, Homo sapien
gaaataccttgctatgagctaggcc

SEQ ID NO: 364952 - DNA, 25 bp, Homo sapien
cagtggtcagttgcatccgtcagcc

SEQ ID NO: 364953 - DNA, 25 bp, Homo sapien
cacacgtttgtggacagctgggcag

SEQ ID NO: 364954 - DNA, 25 bp, Homo sapien
tgatgatgacacaatgacgggcctg

SEQ ID NO: 364955 - DNA, 25 bp, Homo sapien
gtcaataaatattgggccgggcgcg

SEQ ID NO: 364956 - DNA, 25 bp, Homo sapien
gaaagagtctccacttcgcagtcag

SEQ ID NO: 364957 - DNA, 25 bp, Homo sapien
gaagttctctctcatcaagcgtggc

SEQ ID NO: 364958 - DNA, 25 bp, Homo sapien
caggagttggaagctgtagcacacg

SEQ ID NO: 364959 - DNA, 25 bp, Homo sapien
tctttgggtgttcggtgatcctggc

SEQ ID NO: 364960 - DNA, 25 bp, Homo sapien
tgtagctggacatagattcttggca

SEQ ID NO: 364961 - DNA, 25 bp, Homo sapien
gactcgtgtccatataggaagcgga

SEQ ID NO: 364962 - DNA, 25 bp, Homo sapien
gtctggttttatccccagagcacca

SEQ ID NO: 364963 - DNA, 25 bp, Homo sapien
gggatgggctgggtgcacgaaggac

SEQ ID NO: 364964 - DNA, 25 bp, Homo sapien
tcacacgcagccgaagggatgggct

SEQ ID NO: 364965 - DNA, 25 bp, Homo sapien
gtgcacgaaggacgggcacggcaga

SEQ ID NO: 364966 - DNA, 25 bp, Homo sapien
tgcaaaggccgggtagggctgagac

SEQ ID NO: 364967 - DNA, 25 bp, Homo sapien
acatttcggaagaaggcccactgcc

SEQ ID NO: 364968 - DNA, 25 bp, Homo sapien
gtagggctgagacatttcggaagaa

SEQ ID NO: 364969 - DNA, 25 bp, Homo sapien
aagaaggcccactgcccgcagagag

SEQ ID NO: 364970 - DNA, 25 bp, Homo sapien
cacaagcccgtggttgaaggtctct

SEQ ID NO: 364971 - DNA, 25 bp, Homo sapien
cagcatgtggctggaatcctgccag

SEQ ID NO: 364972 - DNA, 25 bp, Homo sapien
cagagcatctgttgaccactgtagt

SEQ ID NO: 364973 - DNA, 25 bp, Homo sapien
gtgcttctgtccgagtccccatgaa

SEQ ID NO: 364974 - DNA, 25 bp, Homo sapien
ggaacagagacccacgtctgtggct

SEQ ID NO: 364975 - DNA, 25 bp, Homo sapien
gccaggacaatacactgcagtgtca

SEQ ID NO: 364976 - DNA, 25 bp, Homo sapien
catagtgatcagttttaccctcgcc

SEQ ID NO: 364977 - DNA, 25 bp, Homo sapien
tctgagcaagggacgttttcacctc

SEQ ID NO: 364978 - DNA, 25 bp, Homo sapien
tgtaataggccgcagccaacaggtc

SEQ ID NO: 364979 - DNA, 25 bp, Homo sapien
caacaggtcccatggtgtgatttct

SEQ ID NO: 364980 - DNA, 25 bp, Homo sapien
cagaacccgacggaaagctcgagga

SEQ ID NO: 364981 - DNA, 25 bp, Homo sapien
tgatttctgcgcaggaagccactgc

SEQ ID NO: 364982 - DNA, 25 bp, Homo sapien
ctgggttgacaccaaacccaactgt

SEQ ID NO: 364983 - DNA, 25 bp, Homo sapien
aaattcagtccctgggttgacacca

SEQ ID NO: 364984 - DNA, 25 bp, Homo sapien
gaaattcagtccctgggttgacacc

SEQ ID NO: 364985 - DNA, 25 bp, Homo sapien
cagaaattcagtccctgggttgaca

SEQ ID NO: 364986 - DNA, 25 bp, Homo sapien
tggccgccccactgcaggtgggcct

SEQ ID NO: 364987 - DNA, 25 bp, Homo sapien
cgtgggggcgccatgggaggccggt

SEQ ID NO: 364988 - DNA, 25 bp, Homo sapien
ggcgccatgggaggccggttgctga

SEQ ID NO: 364989 - DNA, 25 bp, Homo sapien
ctggctcgcccgtgggggcgccatg

SEQ ID NO: 364990 - DNA, 25 bp, Homo sapien
cccgtgggggcgccatgggaggccg

SEQ ID NO: 364991 - DNA, 25 bp, Homo sapien
ccctctcagagccatccctcagaag

SEQ ID NO: 364992 - DNA, 25 bp, Homo sapien
ggaagacactctgagtccctctcag

SEQ ID NO: 364993 - DNA, 25 bp, Homo sapien
ctctcagagccatccctcagaaggg

SEQ ID NO: 364994 - DNA, 25 bp, Homo sapien
tgagtccctctcagagccatccctc

SEQ ID NO: 364995 - DNA, 25 bp, Homo sapien
tcctccagatgctcacaggactcag

SEQ ID NO: 364996 - DNA, 25 bp, Homo sapien
ctccagatgctcacaggactcagtg

SEQ ID NO: 364997 - DNA, 25 bp, Homo sapien
agcctgggggtgagcgctcggccat

SEQ ID NO: 364998 - DNA, 25 bp, Homo sapien
cacggcccagcctgggggtgagcgc

SEQ ID NO: 364999 - DNA, 25 bp, Homo sapien
gacccccaccctgagagagcctcag

SEQ ID NO: 365000 - DNA, 25 bp, Homo sapien
gggacccccaccctgagagagcctc

SEQ ID NO: 365001 - DNA, 25 bp, Homo sapien
agagagcctcaggggaggggcgcat

SEQ ID NO: 365002 - DNA, 25 bp, Homo sapien
cgaggggacccccaccctgagagag

SEQ ID NO: 365003 - DNA, 25 bp, Homo sapien
tgccatcccatgacagttttcaaga

SEQ ID NO: 365004 - DNA, 25 bp, Homo sapien
tttcaagataaaggcgtgtccccgc

SEQ ID NO: 365005 - DNA, 25 bp, Homo sapien
tggagatgttacaaacggtgtaggc

SEQ ID NO: 365006 - DNA, 25 bp, Homo sapien
gccgtctagggctgtaggaataaaa

SEQ ID NO: 365007 - DNA, 25 bp, Homo sapien
taaataatccgctgggaggcacacc

SEQ ID NO: 365008 - DNA, 25 bp, Homo sapien
tatcaaagaaagtgacgccagcagc

SEQ ID NO: 365009 - DNA, 25 bp, Homo sapien
tatcaacactatggacaagacccgc

SEQ ID NO: 365010 - DNA, 25 bp, Homo sapien
taaaatcaaagtacacacaggccag

SEQ ID NO: 365011 - DNA, 25 bp, Homo sapien
tctatagtttcgtcaataccaaggg

SEQ ID NO: 365012 - DNA, 25 bp, Homo sapien
accattttggacttaggaagccact

SEQ ID NO: 365013 - DNA, 25 bp, Homo sapien
aatgtcactgaggtcgctggtcggc

SEQ ID NO: 365014 - DNA, 25 bp, Homo sapien
tcatggcgcggtcaaaagcgatccg

SEQ ID NO: 365015 - DNA, 25 bp, Homo sapien
gagcccctgcgccaggtcccaagtg

SEQ ID NO: 365016 - DNA, 25 bp, Homo sapien
agcccctgcgccaggtcccaagtgc

SEQ ID NO: 365017 - DNA, 25 bp, Homo sapien
gcagccagctccacggggaaccagg

SEQ ID NO: 365018 - DNA, 25 bp, Homo sapien
tgcagccagctccacggggaaccag

SEQ ID NO: 365019 - DNA, 25 bp, Homo sapien
catcagacttggtctgcatgtgctc

SEQ ID NO: 365020 - DNA, 25 bp, Homo sapien
gatggtgacgccgttgtggtggcca

SEQ ID NO: 365021 - DNA, 25 bp, Homo sapien
caaaaaagagaacgaggaacagctt

SEQ ID NO: 365022 - DNA, 25 bp, Homo sapien
gagaacgaggaacagcttctcatca

SEQ ID NO: 365023 - DNA, 25 bp, Homo sapien
gcggcggcatcagtggagatccaca

SEQ ID NO: 365024 - DNA, 25 bp, Homo sapien
cggcatcagtggagatccacatgct

SEQ ID NO: 365025 - DNA, 25 bp, Homo sapien
ccgaggcggcggcatcagtggagat

SEQ ID NO: 365026 - DNA, 25 bp, Homo sapien
tcagtggagatccacatgctgctct

SEQ ID NO: 365027 - DNA, 25 bp, Homo sapien
tgtgccgtcgcacaagagccggttt

SEQ ID NO: 365028 - DNA, 25 bp, Homo sapien
atgcaggagatcagctcactgcggt

SEQ ID NO: 365029 - DNA, 25 bp, Homo sapien
gtagttcccattctcgatgcaggag

SEQ ID NO: 365030 - DNA, 25 bp, Homo sapien
ccgcccacatttgggcgcattaaag

SEQ ID NO: 365031 - DNA, 25 bp, Homo sapien
cagagcgggctgttgctggaggaga

SEQ ID NO: 365032 - DNA, 25 bp, Homo sapien
gcagagcgggctgttgctggaggag

SEQ ID NO: 365033 - DNA, 25 bp, Homo sapien
ctggactcggaggcacagcgtcgtc

SEQ ID NO: 365034 - DNA, 25 bp, Homo sapien
gcgtcgtcggggtgtggccttcctc

SEQ ID NO: 365035 - DNA, 25 bp, Homo sapien
ggaatgtaccgtgacctccaaggga

SEQ ID NO: 365036 - DNA, 25 bp, Homo sapien
tcatcacagagtgggctcagaccct

SEQ ID NO: 365037 - DNA, 25 bp, Homo sapien
gagcacgaccgacttttcaatacag

SEQ ID NO: 365038 - DNA, 25 bp, Homo sapien
tcaggccccgaagatgtctcaagag

SEQ ID NO: 365039 - DNA, 25 bp, Homo sapien
agctcgcatcagcagtggacggacg

SEQ ID NO: 365040 - DNA, 25 bp, Homo sapien
cgtgtgacccgtctccagagagcag

SEQ ID NO: 365041 - DNA, 25 bp, Homo sapien
gaccagtgcggccttcacaagactg

SEQ ID NO: 365042 - DNA, 25 bp, Homo sapien
tagtagttactggttggccgagcaa

SEQ ID NO: 365043 - DNA, 25 bp, Homo sapien
gaagcctgcccgtcaccaggtacgt

SEQ ID NO: 365044 - DNA, 25 bp, Homo sapien
aacaccaggccctgatcagtggctg

SEQ ID NO: 365045 - DNA, 25 bp, Homo sapien
caggtctgactgatgggccgtagtc

SEQ ID NO: 365046 - DNA, 25 bp, Homo sapien
ggagatggcgcaaaggtgtcccaca

SEQ ID NO: 365047 - DNA, 25 bp, Homo sapien
cgtccaggcgctttcctggggactc

SEQ ID NO: 365048 - DNA, 25 bp, Homo sapien
tcctccacctcggagtctccgcatg

SEQ ID NO: 365049 - DNA, 25 bp, Homo sapien
tgtgctccgcgaccttttccttggc

SEQ ID NO: 365050 - DNA, 25 bp, Homo sapien
ggagtctccgcatgtgctccgcgac

SEQ ID NO: 365051 - DNA, 25 bp, Homo sapien
gcagaagagaacagaagtgcgtctg

SEQ ID NO: 365052 - DNA, 25 bp, Homo sapien
gctgggtttcagtgttcttggcaga

SEQ ID NO: 365053 - DNA, 25 bp, Homo sapien
gggcttacacttttcgatttgcaga

SEQ ID NO: 365054 - DNA, 25 bp, Homo sapien
tgtttacatcgcttgctggctccgc

SEQ ID NO: 365055 - DNA, 25 bp, Homo sapien
gaggtaatgcatctgatggttcaag

SEQ ID NO: 365056 - DNA, 25 bp, Homo sapien
cgctctgagtgcaagcgctatgtga

SEQ ID NO: 365057 - DNA, 25 bp, Homo sapien
gaattagtctccgagtttgaaggaa

SEQ ID NO: 365058 - DNA, 25 bp, Homo sapien
tttgaaaagtttactctgctctggg

SEQ ID NO: 365059 - DNA, 25 bp, Homo sapien
tccgtgccacgttcccaaatattgt

SEQ ID NO: 365060 - DNA, 25 bp, Homo sapien
tgtgtgcttccctaacgccaaaggc

SEQ ID NO: 365061 - DNA, 25 bp, Homo sapien
gaaacaaggcatcgcatgtactgtc

SEQ ID NO: 365062 - DNA, 25 bp, Homo sapien
tctactgggccacgaagttagcaaa

SEQ ID NO: 365063 - DNA, 25 bp, Homo sapien
tcactccgagcacagacgtccataa

SEQ ID NO: 365064 - DNA, 25 bp, Homo sapien
cgtccataagagatgaacgtctttg

SEQ ID NO: 365065 - DNA, 25 bp, Homo sapien
gagggtctgaccctactgtctgctt

SEQ ID NO: 365066 - DNA, 25 bp, Homo sapien
ccaatgttgtggcaagagggtctga

SEQ ID NO: 365067 - DNA, 25 bp, Homo sapien
cctccgtgcacaccaacgctgctgc

SEQ ID NO: 365068 - DNA, 25 bp, Homo sapien
tgagcctccgtgcacaccaacgctg

SEQ ID NO: 365069 - DNA, 25 bp, Homo sapien
agcctccgtgcacaccaacgctgct

SEQ ID NO: 365070 - DNA, 25 bp, Homo sapien
ctgagcctccgtgcacaccaacgct

SEQ ID NO: 365071 - DNA, 25 bp, Homo sapien
caggtgaggtcgagcatgtccagca

SEQ ID NO: 365072 - DNA, 25 bp, Homo sapien
ctcagcttgtttcggagaagggcaa

SEQ ID NO: 365073 - DNA, 25 bp, Homo sapien
tccgggagccgctggacttcatagc

SEQ ID NO: 365074 - DNA, 25 bp, Homo sapien
cagctttgcccgcttgctccgggag

SEQ ID NO: 365075 - DNA, 25 bp, Homo sapien
caccttcggccaaggccctgagagt

SEQ ID NO: 365076 - DNA, 25 bp, Homo sapien
accttcggccaaggccctgagagtg

SEQ ID NO: 365077 - DNA, 25 bp, Homo sapien
ttctgggaacacatcaccggtcccg

SEQ ID NO: 365078 - DNA, 25 bp, Homo sapien
atcaccggtcccgtctttcaaatca

SEQ ID NO: 365079 - DNA, 25 bp, Homo sapien
aacagagggcgaagcaacgatggcc

SEQ ID NO: 365080 - DNA, 25 bp, Homo sapien
ctttaaaagagtacagcccatcctc

SEQ ID NO: 365081 - DNA, 25 bp, Homo sapien
aatcctcacaggtgccgagtgctgc

SEQ ID NO: 365082 - DNA, 25 bp, Homo sapien
gcttggttgaatcccatgatggcgg

SEQ ID NO: 365083 - DNA, 25 bp, Homo sapien
acacaccgtgatttctgctcagttt

SEQ ID NO: 365084 - DNA, 25 bp, Homo sapien
cacaccgtgatttctgctcagtttg

SEQ ID NO: 365085 - DNA, 25 bp, Homo sapien
gctttgacaacccatgtgggcagga

SEQ ID NO: 365086 - DNA, 25 bp, Homo sapien
tcccagaggtgcgactaacaagcag

SEQ ID NO: 365087 - DNA, 25 bp, Homo sapien
acaatcccagaggtgcgactaacaa

SEQ ID NO: 365088 - DNA, 25 bp, Homo sapien
cagaggtgcgactaacaagcagggt

SEQ ID NO: 365089 - DNA, 25 bp, Homo sapien
aggtgcgactaacaagcagggtgca

SEQ ID NO: 365090 - DNA, 25 bp, Homo sapien
tggctcccggaccatgctgataggg

SEQ ID NO: 365091 - DNA, 25 bp, Homo sapien
tacacatggctgcaacacgtgcctg

SEQ ID NO: 365092 - DNA, 25 bp, Homo sapien
tagccgaggcccactctggatgaaa

SEQ ID NO: 365093 - DNA, 25 bp, Homo sapien
tatgcggttgcatgctagtggctcc

SEQ ID NO: 365094 - DNA, 25 bp, Homo sapien
gcagcctcaccgcggctctatagaa

SEQ ID NO: 365095 - DNA, 25 bp, Homo sapien
ccttgagcttctaaccgtttcctca

SEQ ID NO: 365096 - DNA, 25 bp, Homo sapien
gtccctggcattgtacttcatgcag

SEQ ID NO: 365097 - DNA, 25 bp, Homo sapien
catggaggtttttatacccttgagc

SEQ ID NO: 365098 - DNA, 25 bp, Homo sapien
gggatgtttaatgtgatccaaataa

SEQ ID NO: 365099 - DNA, 25 bp, Homo sapien
gtttaatgtgatccaaataatctgg

SEQ ID NO: 365100 - DNA, 25 bp, Homo sapien
ggatgtttaatgtgatccaaataat

SEQ ID NO: 365101 - DNA, 25 bp, Homo sapien
taatgtgatccaaataatctggtac

SEQ ID NO: 365102 - DNA, 25 bp, Homo sapien
gctggtccagcactgagcgcagcag

SEQ ID NO: 365103 - DNA, 25 bp, Homo sapien
tgcgcaaatatcctggcggggtcct

SEQ ID NO: 365104 - DNA, 25 bp, Homo sapien
ggtccagcactgagcgcagcagcac

SEQ ID NO: 365105 - DNA, 25 bp, Homo sapien
agctggtccagcactgagcgcagca

SEQ ID NO: 365106 - DNA, 25 bp, Homo sapien
cacccacgccccgtggccagtggtg

SEQ ID NO: 365107 - DNA, 25 bp, Homo sapien
acgccccgtggccagtggtgcactc

SEQ ID NO: 365108 - DNA, 25 bp, Homo sapien
tggtgcactccacgcgggacaggcc

SEQ ID NO: 365109 - DNA, 25 bp, Homo sapien
cgtggccagtggtgcactccacgcg

SEQ ID NO: 365110 - DNA, 25 bp, Homo sapien
cgagcgcgctccaggtcgtgccgca

SEQ ID NO: 365111 - DNA, 25 bp, Homo sapien
tcacgcttgagcttctcccgcttgc

SEQ ID NO: 365112 - DNA, 25 bp, Homo sapien
agctcgatcagcaggcgagcgcgct

SEQ ID NO: 365113 - DNA, 25 bp, Homo sapien
cgcagccgctgccagtacttcagct

SEQ ID NO: 365114 - DNA, 25 bp, Homo sapien
gcggctggaaagaaaccaggtgcac

SEQ ID NO: 365115 - DNA, 25 bp, Homo sapien
aaaccaggtgcacagaaaaccacat

SEQ ID NO: 365116 - DNA, 25 bp, Homo sapien
gaaaccaggtgcacagaaaaccaca

SEQ ID NO: 365117 - DNA, 25 bp, Homo sapien
gagggagcggctggaaagaaaccag

SEQ ID NO: 365118 - DNA, 25 bp, Homo sapien
gatagcacctgctcccttctcagtg

SEQ ID NO: 365119 - DNA, 25 bp, Homo sapien
cccatttccattgatagcacctgct

SEQ ID NO: 365120 - DNA, 25 bp, Homo sapien
agagtgcgccagacagcacaggccg

SEQ ID NO: 365121 - DNA, 25 bp, Homo sapien
agaagagtgcgccagacagcacagg

SEQ ID NO: 365122 - DNA, 25 bp, Homo sapien
tgtcccctgaagtgaggatctctgg

SEQ ID NO: 365123 - DNA, 25 bp, Homo sapien
tcatagcttttcaaaggaccgaggg

SEQ ID NO: 365124 - DNA, 25 bp, Homo sapien
gcaggaaaatgtgggctccaaaaac

SEQ ID NO: 365125 - DNA, 25 bp, Homo sapien
caaagactgctggactacaagatgc

SEQ ID NO: 365126 - DNA, 25 bp, Homo sapien
aacaggacgtgaggcctaacaggca

SEQ ID NO: 365127 - DNA, 25 bp, Homo sapien
aaaaaccagggcctatatgcgcagc

SEQ ID NO: 365128 - DNA, 25 bp, Homo sapien
ttcacacagaggcaggtttccaggc

SEQ ID NO: 365129 - DNA, 25 bp, Homo sapien
ctaacaggcagcgatgaagcagagg

SEQ ID NO: 365130 - DNA, 25 bp, Homo sapien
tgctgtgagcttcgctgagactgca

SEQ ID NO: 365131 - DNA, 25 bp, Homo sapien
ccagtagctgtgggctcgctccaca

SEQ ID NO: 365132 - DNA, 25 bp, Homo sapien
acagccgcttgagcagccagtagct

SEQ ID NO: 365133 - DNA, 25 bp, Homo sapien
aaactgcttcttccgctgaatggcc

SEQ ID NO: 365134 - DNA, 25 bp, Homo sapien
aaattctgacctcatcacaacaagc

SEQ ID NO: 365135 - DNA, 25 bp, Homo sapien
ccatgagatgtgagaaaaaattctg

SEQ ID NO: 365136 - DNA, 25 bp, Homo sapien
cccatgagatgtgagaaaaaattct

SEQ ID NO: 365137 - DNA, 25 bp, Homo sapien
ctcatcacaacaagccaccatcttc

SEQ ID NO: 365138 - DNA, 25 bp, Homo sapien
cactgacgggtgcacgaacggaatt

SEQ ID NO: 365139 - DNA, 25 bp, Homo sapien
taatgtcgggaggactctaaccaga

SEQ ID NO: 365140 - DNA, 25 bp, Homo sapien
tcttacatgggcagcaaactgggcc

SEQ ID NO: 365141 - DNA, 25 bp, Homo sapien
tgaaaagatacactcacccacgggc

SEQ ID NO: 365142 - DNA, 25 bp, Homo sapien
tgttgaccggcaggccccatctgtg

SEQ ID NO: 365143 - DNA, 25 bp, Homo sapien
cgcaggctgcggtacagtagcacaa

SEQ ID NO: 365144 - DNA, 25 bp, Homo sapien
caggtctgacacctcagagggtcct

SEQ ID NO: 365145 - DNA, 25 bp, Homo sapien
tctacccgccctgttgaccggcagg

SEQ ID NO: 365146 - DNA, 25 bp, Homo sapien
tgtttggccaccctttcctcagggc

SEQ ID NO: 365147 - DNA, 25 bp, Homo sapien
tcacagctcctccccttgtttggcc

SEQ ID NO: 365148 - DNA, 25 bp, Homo sapien
gtttggccaccctttcctcagggca

SEQ ID NO: 365149 - DNA, 25 bp, Homo sapien
cagctcctccccttgtttggccacc

SEQ ID NO: 365150 - DNA, 25 bp, Homo sapien
cttcttaaagtttagtcactgaaat

SEQ ID NO: 365151 - DNA, 25 bp, Homo sapien
tgtcccgatgccggcagtcactggg

SEQ ID NO: 365152 - DNA, 25 bp, Homo sapien
ccgatgccggcagtcactgggaagc

SEQ ID NO: 365153 - DNA, 25 bp, Homo sapien
aaaatcttcacgcacggctgggcat

SEQ ID NO: 365154 - DNA, 25 bp, Homo sapien
acatctattccccaaaaagacgtgg

SEQ ID NO: 365155 - DNA, 25 bp, Homo sapien
ttgtggactcaatgcttggacacgc

SEQ ID NO: 365156 - DNA, 25 bp, Homo sapien
tattaggaagctgcgccaactagaa

SEQ ID NO: 365157 - DNA, 25 bp, Homo sapien
taaacaagcagaaccacacttcagg

SEQ ID NO: 365158 - DNA, 25 bp, Homo sapien
aaaatactgatcctgtgcaagcgcc

SEQ ID NO: 365159 - DNA, 25 bp, Homo sapien
tagttcttaagcagacaggaggccg

SEQ ID NO: 365160 - DNA, 25 bp, Homo sapien
tgaacaccgtgttggcaaagccgac

SEQ ID NO: 365161 - DNA, 25 bp, Homo sapien
gcacatgtcgcagaagaggatcacg

SEQ ID NO: 365162 - DNA, 25 bp, Homo sapien
tgcagagcctcgatgacatcgtcct

SEQ ID NO: 365163 - DNA, 25 bp, Homo sapien
ctcgcgtaggggagtgtttaacact

SEQ ID NO: 365164 - DNA, 25 bp, Homo sapien
gtttaacactgcatggggaagaagg

SEQ ID NO: 365165 - DNA, 25 bp, Homo sapien
cctttgagcttgagcgtaggtcagc

SEQ ID NO: 365166 - DNA, 25 bp, Homo sapien
gcagggtgaccaaagactcgagaaa

SEQ ID NO: 365167 - DNA, 25 bp, Homo sapien
gcccacagttgcaggactttcccag

SEQ ID NO: 365168 - DNA, 25 bp, Homo sapien
taaaggtaattctacgcagggtgac

SEQ ID NO: 365169 - DNA, 25 bp, Homo sapien
cttggacagatctagctcagcagct

SEQ ID NO: 365170 - DNA, 25 bp, Homo sapien
cacttcttaagacagaccctccaga

SEQ ID NO: 365171 - DNA, 25 bp, Homo sapien
cctgatctattgggcctgagaaaaa

SEQ ID NO: 365172 - DNA, 25 bp, Homo sapien
tgtgagtcccgaaaggaaatcccag

SEQ ID NO: 365173 - DNA, 25 bp, Homo sapien
tgtatcagacagaaatcctcattgt

SEQ ID NO: 365174 - DNA, 25 bp, Homo sapien
cagaaggacattggcccgggagtgg

SEQ ID NO: 365175 - DNA, 25 bp, Homo sapien
agaaggacattggcccgggagtggg

SEQ ID NO: 365176 - DNA, 25 bp, Homo sapien
gggcacctgtactctggcacacaaa

SEQ ID NO: 365177 - DNA, 25 bp, Homo sapien
tatacaggacagaaacttggcccca

SEQ ID NO: 365178 - DNA, 25 bp, Homo sapien
ggcttgtgtgctgaaccaatgccca

SEQ ID NO: 365179 - DNA, 25 bp, Homo sapien
cagacaaattaatagtggagcccag

SEQ ID NO: 365180 - DNA, 25 bp, Homo sapien
tgggaccgtcaaatggtgcacctgc

SEQ ID NO: 365181 - DNA, 25 bp, Homo sapien
gagagctagacccaaaaagtcaggt

SEQ ID NO: 365182 - DNA, 25 bp, Homo sapien
tgtatgtgaagactcatcgcagtgg

SEQ ID NO: 365183 - DNA, 25 bp, Homo sapien
tgctttagaaaacggtcgggcaatg

SEQ ID NO: 365184 - DNA, 25 bp, Homo sapien
tctcatcatggtgtggtctcgctag

SEQ ID NO: 365185 - DNA, 25 bp, Homo sapien
aagagtcaccccattggaacagaag

SEQ ID NO: 365186 - DNA, 25 bp, Homo sapien
cactgctgagggacttttacggaga

SEQ ID NO: 365187 - DNA, 25 bp, Homo sapien
ggcatatggcgcattaggaaccgcg

SEQ ID NO: 365188 - DNA, 25 bp, Homo sapien
taggaatgctttctagaggaacttc

SEQ ID NO: 365189 - DNA, 25 bp, Homo sapien
tgcagctttgccacagataggaatg

SEQ ID NO: 365190 - DNA, 25 bp, Homo sapien
gaagctcctgaaattccagacgagg

SEQ ID NO: 365191 - DNA, 25 bp, Homo sapien
gaggaacttcatcctcggttcggga

SEQ ID NO: 365192 - DNA, 25 bp, Homo sapien
catactccgagggtttccaatggga

SEQ ID NO: 365193 - DNA, 25 bp, Homo sapien
gaggacacagttaatctatatggaa

SEQ ID NO: 365194 - DNA, 25 bp, Homo sapien
tacaaggctgcacacttcccgtagt

SEQ ID NO: 365195 - DNA, 25 bp, Homo sapien
tccaatgggacgtccgtacaaggct

SEQ ID NO: 365196 - DNA, 25 bp, Homo sapien
cacatcctgtaagtgagagactccc

SEQ ID NO: 365197 - DNA, 25 bp, Homo sapien
gctccgtcatagaagccatgctcca

SEQ ID NO: 365198 - DNA, 25 bp, Homo sapien
atttcggagagctctggttgctccg

SEQ ID NO: 365199 - DNA, 25 bp, Homo sapien
tctctgctccacctgtttgctgcag

SEQ ID NO: 365200 - DNA, 25 bp, Homo sapien
ttgttacgtcttagaaaatgctgag

SEQ ID NO: 365201 - DNA, 25 bp, Homo sapien
ctttattaccaattcttagcggaag

SEQ ID NO: 365202 - DNA, 25 bp, Homo sapien
atggtctagtagacacctctgtggg

SEQ ID NO: 365203 - DNA, 25 bp, Homo sapien
tcaaggtggactagtggattttatt

SEQ ID NO: 365204 - DNA, 25 bp, Homo sapien
gctccagacctgaaataagccattt

SEQ ID NO: 365205 - DNA, 25 bp, Homo sapien
gctcctggatccttttgacatcatt

SEQ ID NO: 365206 - DNA, 25 bp, Homo sapien
tcttgtatttttccggctccagacc

SEQ ID NO: 365207 - DNA, 25 bp, Homo sapien
tatcagcctccagaggcgaccagtt

SEQ ID NO: 365208 - DNA, 25 bp, Homo sapien
ctgatgactgttgatgtcgagcatt

SEQ ID NO: 365209 - DNA, 25 bp, Homo sapien
tgttacaatccactcaattattttg

SEQ ID NO: 365210 - DNA, 25 bp, Homo sapien
cataattcacgtagctacatttcag

SEQ ID NO: 365211 - DNA, 25 bp, Homo sapien
tttgaagcaaatacccaaaatcata

SEQ ID NO: 365212 - DNA, 25 bp, Homo sapien
tattccgttgttgttggactgctca

SEQ ID NO: 365213 - DNA, 25 bp, Homo sapien
tggaaatctccatccgtgatggtga

SEQ ID NO: 365214 - DNA, 25 bp, Homo sapien
taaatgcccattaggtcaacttgga

SEQ ID NO: 365215 - DNA, 25 bp, Homo sapien
aatgcgctctggatgaattgacccc

SEQ ID NO: 365216 - DNA, 25 bp, Homo sapien
gtaggcagcatataggaagtcttgc

SEQ ID NO: 365217 - DNA, 25 bp, Homo sapien
gaaaaagattaagctatttgtgtct

SEQ ID NO: 365218 - DNA, 25 bp, Homo sapien
tgtttaaagcgtgtttcttgtaggc

SEQ ID NO: 365219 - DNA, 25 bp, Homo sapien
ttcattctgacaatccctgtctgtc

SEQ ID NO: 365220 - DNA, 25 bp, Homo sapien
ctgaccaggctagggatggcgcacc

SEQ ID NO: 365221 - DNA, 25 bp, Homo sapien
tgtgtcccttgaagagttctcccac

SEQ ID NO: 365222 - DNA, 25 bp, Homo sapien
aggaatgtcgggttcagctcctccc

SEQ ID NO: 365223 - DNA, 25 bp, Homo sapien
tacagataggtttggcttaagcctg

SEQ ID NO: 365224 - DNA, 25 bp, Homo sapien
agctttgctgattatagcagctgtg

SEQ ID NO: 365225 - DNA, 25 bp, Homo sapien
gaaggatgaatagatctcaaggaat

SEQ ID NO: 365226 - DNA, 25 bp, Homo sapien
cctctcatgaactgtttgaaggatg

SEQ ID NO: 365227 - DNA, 25 bp, Homo sapien
taaattctagatgaggcaacctctt

SEQ ID NO: 365228 - DNA, 25 bp, Homo sapien
tatacatatttaggcggatggagcc

SEQ ID NO: 365229 - DNA, 25 bp, Homo sapien
caccatgagtgtttagtagcaggac

SEQ ID NO: 365230 - DNA, 25 bp, Homo sapien
tgtcctcaggaccagaagcacgtct

SEQ ID NO: 365231 - DNA, 25 bp, Homo sapien
caagggtcacgtgtatgctctcaag

SEQ ID NO: 365232 - DNA, 25 bp, Homo sapien
cactgagaacggtagccttggccaa

SEQ ID NO: 365233 - DNA, 25 bp, Homo sapien
gctcacctactggaacctgaagaag

SEQ ID NO: 365234 - DNA, 25 bp, Homo sapien
tgtacgacatcagaccaggcactct

SEQ ID NO: 365235 - DNA, 25 bp, Homo sapien
cagtattgaaactcacgacggcacc

SEQ ID NO: 365236 - DNA, 25 bp, Homo sapien
ggctttttactcaattatgtacaaa

SEQ ID NO: 365237 - DNA, 25 bp, Homo sapien
cattcaggctttacatggtcagtta

SEQ ID NO: 365238 - DNA, 25 bp, Homo sapien
caggttctaaagtgtcccgcggagt

SEQ ID NO: 365239 - DNA, 25 bp, Homo sapien
tgactgagcagtttttaaccgcagg

SEQ ID NO: 365240 - DNA, 25 bp, Homo sapien
tgtttactacgacagagacgtggca

SEQ ID NO: 365241 - DNA, 25 bp, Homo sapien
ttttatgatagggaagatgcggcca

SEQ ID NO: 365242 - DNA, 25 bp, Homo sapien
tgttgaaatactgtacgtacgctta

SEQ ID NO: 365243 - DNA, 25 bp, Homo sapien
gactaatcactcatttgcctacgac

SEQ ID NO: 365244 - DNA, 25 bp, Homo sapien
ccaaggacatcagagtgaagtgtca

SEQ ID NO: 365245 - DNA, 25 bp, Homo sapien
tcaactgagatgaagtgccctccct

SEQ ID NO: 365246 - DNA, 25 bp, Homo sapien
tcctggtgtagaaagggttgcgcac

SEQ ID NO: 365247 - DNA, 25 bp, Homo sapien
catatagtctagtccacgattggca

SEQ ID NO: 365248 - DNA, 25 bp, Homo sapien
caggtctcgtgttcaagtggtgcca

SEQ ID NO: 365249 - DNA, 25 bp, Homo sapien
aaatgagggcttgctttactcaaca

SEQ ID NO: 365250 - DNA, 25 bp, Homo sapien
aagctttcagcttcatgctgctgta

SEQ ID NO: 365251 - DNA, 25 bp, Homo sapien
aacagaaaatatggcccttcctgaa

SEQ ID NO: 365252 - DNA, 25 bp, Homo sapien
cagtcagtgtataaaaggggattgc

SEQ ID NO: 365253 - DNA, 25 bp, Homo sapien
cattcccttcatttcgttggtggac

SEQ ID NO: 365254 - DNA, 25 bp, Homo sapien
ggcactcaatggtcaaaccgtctct

SEQ ID NO: 365255 - DNA, 25 bp, Homo sapien
tctctgccctccagttgctgacagt

SEQ ID NO: 365256 - DNA, 25 bp, Homo sapien
ggacatttgttgaaaccggcactca

SEQ ID NO: 365257 - DNA, 25 bp, Homo sapien
aaaaagctctttgtatgagcctcag

SEQ ID NO: 365258 - DNA, 25 bp, Homo sapien
taccagtcattatacgaagggactt

SEQ ID NO: 365259 - DNA, 25 bp, Homo sapien
gagcctcagaactgtctcttcagtg

SEQ ID NO: 365260 - DNA, 25 bp, Homo sapien
tccctgcctggaaatgatgttttag

SEQ ID NO: 365261 - DNA, 25 bp, Homo sapien
tgccttgactaggccacttctacct

SEQ ID NO: 365262 - DNA, 25 bp, Homo sapien
ctcctgttataattcaaggaaatgc

SEQ ID NO: 365263 - DNA, 25 bp, Homo sapien
ttgtccacatttgccttgactaggc

SEQ ID NO: 365264 - DNA, 25 bp, Homo sapien
tgttccatctcctgttataattcaa

SEQ ID NO: 365265 - DNA, 25 bp, Homo sapien
gtcacatgtgggagtgaagcccagg

SEQ ID NO: 365266 - DNA, 25 bp, Homo sapien
gggagagttggagggagtcacatgt

SEQ ID NO: 365267 - DNA, 25 bp, Homo sapien
tatcctcctattgaggtgggtgagg

SEQ ID NO: 365268 - DNA, 25 bp, Homo sapien
gaagcatcccagcagaccttgttcg

SEQ ID NO: 365269 - DNA, 25 bp, Homo sapien
tctctagtatcctcctattgaggtg

SEQ ID NO: 365270 - DNA, 25 bp, Homo sapien
tgtggctaaatctctccccgtgaga

SEQ ID NO: 365271 - DNA, 25 bp, Homo sapien
aaagctgcactggagctctcgagca

SEQ ID NO: 365272 - DNA, 25 bp, Homo sapien
tggactccctagcagatgcgtgagg

SEQ ID NO: 365273 - DNA, 25 bp, Homo sapien
tgcttgacggcacccgcagttgtgg

SEQ ID NO: 365274 - DNA, 25 bp, Homo sapien
tgctcattaccaaaaagcgaggagg

SEQ ID NO: 365275 - DNA, 25 bp, Homo sapien
gaggttccaatcaacatttattgcc

SEQ ID NO: 365276 - DNA, 25 bp, Homo sapien
aatcaacatttattgccttattctt

SEQ ID NO: 365277 - DNA, 25 bp, Homo sapien
ccaatcaacatttattgccttattc

SEQ ID NO: 365278 - DNA, 25 bp, Homo sapien
gttccaatcaacatttattgcctta

SEQ ID NO: 365279 - DNA, 25 bp, Homo sapien
gtgcctgggtgagcccgctgctcct

SEQ ID NO: 365280 - DNA, 25 bp, Homo sapien
cctgattagtcatgaatggcacctg

SEQ ID NO: 365281 - DNA, 25 bp, Homo sapien
tgcctgtgaatacaaaagttgcagt

SEQ ID NO: 365282 - DNA, 25 bp, Homo sapien
ggtgctgtcttaggtgccccaagag

SEQ ID NO: 365283 - DNA, 25 bp, Homo sapien
ctgggcccctcgttctttggtgctg

SEQ ID NO: 365284 - DNA, 25 bp, Homo sapien
ggcccctcgttctttggtgctgaga

SEQ ID NO: 365285 - DNA, 25 bp, Homo sapien
cctcgttctttggtgctgagagccc

SEQ ID NO: 365286 - DNA, 25 bp, Homo sapien
ctcgttctttggtgctgagagcccc

SEQ ID NO: 365287 - DNA, 25 bp, Homo sapien
tgccagaaactggtagtgataacag

SEQ ID NO: 365288 - DNA, 25 bp, Homo sapien
ggtgtctgtcagaggcaggtgccca

SEQ ID NO: 365289 - DNA, 25 bp, Homo sapien
tcataattgtgctggaattgtgcca

SEQ ID NO: 365290 - DNA, 25 bp, Homo sapien
ctggtagtgataacagctcctggaa

SEQ ID NO: 365291 - DNA, 25 bp, Homo sapien
gccgggggagcctctccagaagcac

SEQ ID NO: 365292 - DNA, 25 bp, Homo sapien
cggccgggggagcctctccagaagc

SEQ ID NO: 365293 - DNA, 25 bp, Homo sapien
tcaggacggccgggggagcctctcc

SEQ ID NO: 365294 - DNA, 25 bp, Homo sapien
aggacggccgggggagcctctccag

SEQ ID NO: 365295 - DNA, 25 bp, Homo sapien
ggcagttgggtcaggttcagactca

SEQ ID NO: 365296 - DNA, 25 bp, Homo sapien
cccaggggccgcctccatgaggatg

SEQ ID NO: 365297 - DNA, 25 bp, Homo sapien
tgtgtgtccctgtagagggccagga

SEQ ID NO: 365298 - DNA, 25 bp, Homo sapien
tgtggtccccacgacgctggccagg

SEQ ID NO: 365299 - DNA, 25 bp, Homo sapien
gtcctgcccagggcccccacatcgc

SEQ ID NO: 365300 - DNA, 25 bp, Homo sapien
gtggtcctgcccagggcccccacat

SEQ ID NO: 365301 - DNA, 25 bp, Homo sapien
ctgtgggatgagagctggtggtcct

SEQ ID NO: 365302 - DNA, 25 bp, Homo sapien
gtgggatgagagctggtggtcctgc

SEQ ID NO: 365303 - DNA, 25 bp, Homo sapien
caaggggccctcacatggcctctgg

SEQ ID NO: 365304 - DNA, 25 bp, Homo sapien
ccaaggggccctcacatggcctctg

SEQ ID NO: 365305 - DNA, 25 bp, Homo sapien
aaggggccctcacatggcctctggg

SEQ ID NO: 365306 - DNA, 25 bp, Homo sapien
ccccaaggggccctcacatggcctc

SEQ ID NO: 365307 - DNA, 25 bp, Homo sapien
gttgacttggagaaaccgagacaca

SEQ ID NO: 365308 - DNA, 25 bp, Homo sapien
ggcggctgccacgtcaatgtgcaga

SEQ ID NO: 365309 - DNA, 25 bp, Homo sapien
ctctgcattgcgacgccacctgggt

SEQ ID NO: 365310 - DNA, 25 bp, Homo sapien
gacacatacagggccgtggctgagt

SEQ ID NO: 365311 - DNA, 25 bp, Homo sapien
gacgccacctgggtagttgaaatgg

SEQ ID NO: 365312 - DNA, 25 bp, Homo sapien
acagggccgtggctgagtaggcggc

SEQ ID NO: 365313 - DNA, 25 bp, Homo sapien
tcaccacgaggtgtccgatcacaag

SEQ ID NO: 365314 - DNA, 25 bp, Homo sapien
ggtgtccgatcacaagcagagaccc

SEQ ID NO: 365315 - DNA, 25 bp, Homo sapien
gatcacaagcagagaccccgctttg

SEQ ID NO: 365316 - DNA, 25 bp, Homo sapien
gagaccccgctttgtacagccaaga

SEQ ID NO: 365317 - DNA, 25 bp, Homo sapien
accgtcggcgcgtgcgtccttctgt

SEQ ID NO: 365318 - DNA, 25 bp, Homo sapien
gatgaagcgtagctccttgtgtggc

SEQ ID NO: 365319 - DNA, 25 bp, Homo sapien
aaggcatagatgatgaagcgtagct

SEQ ID NO: 365320 - DNA, 25 bp, Homo sapien
atgaagcccagtgccagcaccgtcg

SEQ ID NO: 365321 - DNA, 25 bp, Homo sapien
ctaccaagcccagggggatgaagag

SEQ ID NO: 365322 - DNA, 25 bp, Homo sapien
accaagcccagggggatgaagagca

SEQ ID NO: 365323 - DNA, 25 bp, Homo sapien
caagcccagggggatgaagagcagg

SEQ ID NO: 365324 - DNA, 25 bp, Homo sapien
taccaagcccagggggatgaagagc

SEQ ID NO: 365325 - DNA, 25 bp, Homo sapien
ctgcagcccaggccgcggggcaggg

SEQ ID NO: 365326 - DNA, 25 bp, Homo sapien
agtagaagtaccacagcagcgggga

SEQ ID NO: 365327 - DNA, 25 bp, Homo sapien
gtagaagtaccacagcagcggggag

SEQ ID NO: 365328 - DNA, 25 bp, Homo sapien
tgagtagaagtaccacagcagcggg

SEQ ID NO: 365329 - DNA, 25 bp, Homo sapien
ctgagtagaagtaccacagcagcgg

SEQ ID NO: 365330 - DNA, 25 bp, Homo sapien
agcaagggccacaggacgttcggtc

SEQ ID NO: 365331 - DNA, 25 bp, Homo sapien
aggaccaaggcagcaagggccacag

SEQ ID NO: 365332 - DNA, 25 bp, Homo sapien
ttcggtctctgtacccttttcttca

SEQ ID NO: 365333 - DNA, 25 bp, Homo sapien
caggacgttcggtctctgtaccctt

SEQ ID NO: 365334 - DNA, 25 bp, Homo sapien
gcttccactgcccatggaggcccag

SEQ ID NO: 365335 - DNA, 25 bp, Homo sapien
ctgcagccacgctgcagagaaggga

SEQ ID NO: 365336 - DNA, 25 bp, Homo sapien
cgccctcctgcacggacactgaagg

SEQ ID NO: 365337 - DNA, 25 bp, Homo sapien
ctcctgcacggacactgaaggatac

SEQ ID NO: 365338 - DNA, 25 bp, Homo sapien
cctcctgcacggacactgaaggata

SEQ ID NO: 365339 - DNA, 25 bp, Homo sapien
ccctcctgcacggacactgaaggat

SEQ ID NO: 365340 - DNA, 25 bp, Homo sapien
ccagttggagcttttgttcaggaca

SEQ ID NO: 365341 - DNA, 25 bp, Homo sapien
aagcacctttccttccggccaagtg

SEQ ID NO: 365342 - DNA, 25 bp, Homo sapien
ttcaggacagtgttgtaccaaagca

SEQ ID NO: 365343 - DNA, 25 bp, Homo sapien
gccaagtgagctgccgccaaaaata

SEQ ID NO: 365344 - DNA, 25 bp, Homo sapien
gaacacgatgatggcgaaggctgac

SEQ ID NO: 365345 - DNA, 25 bp, Homo sapien
ctgacagccagatgaagcgggccca

SEQ ID NO: 365346 - DNA, 25 bp, Homo sapien
tgactacagaaacctttcggttgcc

SEQ ID NO: 365347 - DNA, 25 bp, Homo sapien
cgtggcgaagggctctgactacaga

SEQ ID NO: 365348 - DNA, 25 bp, Homo sapien
cattgggcagtgtccgcgtgcagta

SEQ ID NO: 365349 - DNA, 25 bp, Homo sapien
tccagagtccaaaaatcacgccgag

SEQ ID NO: 365350 - DNA, 25 bp, Homo sapien
atggccgtcacccagcagaacatgg

SEQ ID NO: 365351 - DNA, 25 bp, Homo sapien
cgtgcagtagaacatcaggtggaac

SEQ ID NO: 365352 - DNA, 25 bp, Homo sapien
tgactcagacgtcttaggcctgacc

SEQ ID NO: 365353 - DNA, 25 bp, Homo sapien
tcacagtcaagagtgtggaggcaca

SEQ ID NO: 365354 - DNA, 25 bp, Homo sapien
gtgatcgagggcaggcaagactaac

SEQ ID NO: 365355 - DNA, 25 bp, Homo sapien
tgccgtcacccctaatttcacagtc

SEQ ID NO: 365356 - DNA, 25 bp, Homo sapien
ccactggcccgaggaacgtcctggg

SEQ ID NO: 365357 - DNA, 25 bp, Homo sapien
gctggagaacactgcgatcaccact

SEQ ID NO: 365358 - DNA, 25 bp, Homo sapien
acagcgaaagcacgtaaaccgcggg

SEQ ID NO: 365359 - DNA, 25 bp, Homo sapien
actccggggaactcaagatggtcgt

SEQ ID NO: 365360 - DNA, 25 bp, Homo sapien
caggtcagtgcaccggggccctgcc

SEQ ID NO: 365361 - DNA, 25 bp, Homo sapien
ggtcagtgcaccggggccctgccag

SEQ ID NO: 365362 - DNA, 25 bp, Homo sapien
aggtcagtgcaccggggccctgcca

SEQ ID NO: 365363 - DNA, 25 bp, Homo sapien
ggcaggtcagtgcaccggggccctg

SEQ ID NO: 365364 - DNA, 25 bp, Homo sapien
ctccaggtcttgccagtggtagagc

SEQ ID NO: 365365 - DNA, 25 bp, Homo sapien
gcaggggccgcctgcctgatgaccc

SEQ ID NO: 365366 - DNA, 25 bp, Homo sapien
agcaggggccgcctgcctgatgacc

SEQ ID NO: 365367 - DNA, 25 bp, Homo sapien
ccgcctgcctgatgacccctttcca

SEQ ID NO: 365368 - DNA, 25 bp, Homo sapien
cgttagcactgccactccacgcatg

SEQ ID NO: 365369 - DNA, 25 bp, Homo sapien
gagacaccagccgttagcactgcca

SEQ ID NO: 365370 - DNA, 25 bp, Homo sapien
ttcagcttcacgtaccttcacaggc

SEQ ID NO: 365371 - DNA, 25 bp, Homo sapien
acaggccaacagtgcgagacaccag

SEQ ID NO: 365372 - DNA, 25 bp, Homo sapien
gctacggccgcagagaccctctgtg

SEQ ID NO: 365373 - DNA, 25 bp, Homo sapien
agaacagagcccgaatctaaagtcc

SEQ ID NO: 365374 - DNA, 25 bp, Homo sapien
aatctaaagtggctaccgcagcccc

SEQ ID NO: 365375 - DNA, 25 bp, Homo sapien
agcaggacggcggaaacagaacaga

SEQ ID NO: 365376 - DNA, 25 bp, Homo sapien
tcgtggtcaagcgagatcaggtagc

SEQ ID NO: 365377 - DNA, 25 bp, Homo sapien
tggaggccgcagctaatgttcccac

SEQ ID NO: 365378 - DNA, 25 bp, Homo sapien
gacgcgtcagtgtccctatcaccat

SEQ ID NO: 365379 - DNA, 25 bp, Homo sapien
tgcagtcatgtgtaacgaccaggcg

SEQ ID NO: 365380 - DNA, 25 bp, Homo sapien
agcgcctgtcgggtgttttccactc

SEQ ID NO: 365381 - DNA, 25 bp, Homo sapien
tagtgtggcaaagtaagtcataggt

SEQ ID NO: 365382 - DNA, 25 bp, Homo sapien
tcagcagcttgttgcgaacgtctct

SEQ ID NO: 365383 - DNA, 25 bp, Homo sapien
aacgtgccctgcgtgactttccgca

SEQ ID NO: 365384 - DNA, 25 bp, Homo sapien
gacctgtaatgtgccggacttaccc

SEQ ID NO: 365385 - DNA, 25 bp, Homo sapien
gtctcctgcagtggacagcggcggg

SEQ ID NO: 365386 - DNA, 25 bp, Homo sapien
ttaaattattcagaaggatgtcccg

SEQ ID NO: 365387 - DNA, 25 bp, Homo sapien
tgtcccgtggaaaatgtggccctga

SEQ ID NO: 365388 - DNA, 25 bp, Homo sapien
tgatgggaccacctagagatgaggt

SEQ ID NO: 365389 - DNA, 25 bp, Homo sapien
tctcaggcagtttccgcttcatgtg

SEQ ID NO: 365390 - DNA, 25 bp, Homo sapien
cagtttccgcttcatgtgctgatgg

SEQ ID NO: 365391 - DNA, 25 bp, Homo sapien
gatgggaccacctagagatgaggtc

SEQ ID NO: 365392 - DNA, 25 bp, Homo sapien
tgggtgggaactaggcgaccccagc

SEQ ID NO: 365393 - DNA, 25 bp, Homo sapien
tgggaactaggcgaccccagcggga

SEQ ID NO: 365394 - DNA, 25 bp, Homo sapien
ccccgtcacacctcggcgctgccgg

SEQ ID NO: 365395 - DNA, 25 bp, Homo sapien
gggatatgtcagagtcataggacaa

SEQ ID NO: 365396 - DNA, 25 bp, Homo sapien
atatgtcagagtcataggacaatag

SEQ ID NO: 365397 - DNA, 25 bp, Homo sapien
agggggatatgtcagagtcatagga

SEQ ID NO: 365398 - DNA, 25 bp, Homo sapien
gatatgtcagagtcataggacaata

SEQ ID NO: 365399 - DNA, 25 bp, Homo sapien
cgagctgagatcacggcagtacagt

SEQ ID NO: 365400 - DNA, 25 bp, Homo sapien
aggagaatcacgggagcccgaggca

SEQ ID NO: 365401 - DNA, 25 bp, Homo sapien
ggcaggagaatcacgggagcccgag

SEQ ID NO: 365402 - DNA, 25 bp, Homo sapien
ggcggcacatgcctgcaaacccagg

SEQ ID NO: 365403 - DNA, 25 bp, Homo sapien
tttttccacaaatttgtggacacaa

SEQ ID NO: 365404 - DNA, 25 bp, Homo sapien
tggctctggttgtctctctcatgca

SEQ ID NO: 365405 - DNA, 25 bp, Homo sapien
tcagctccatgatcccagtttgcct

SEQ ID NO: 365406 - DNA, 25 bp, Homo sapien
gtctctctcatgcaaaggtcagctc

SEQ ID NO: 365407 - DNA, 25 bp, Homo sapien
aggtcagctccatgatcccagtttg

SEQ ID NO: 365408 - DNA, 25 bp, Homo sapien
tgtgggcgctccgtgttgggtgctg

SEQ ID NO: 365409 - DNA, 25 bp, Homo sapien
gtgctggggcggctgatccggctca

SEQ ID NO: 365410 - DNA, 25 bp, Homo sapien
gggtgcactgggctgtgggcgctcc

SEQ ID NO: 365411 - DNA, 25 bp, Homo sapien
cgtccctggccaaggaggcggtggg

SEQ ID NO: 365412 - DNA, 25 bp, Homo sapien
ccactgccgcctggtggcagcacgc

SEQ ID NO: 365413 - DNA, 25 bp, Homo sapien
cgcctggtggcagcacgcgtgtgtc

SEQ ID NO: 365414 - DNA, 25 bp, Homo sapien
gcagcacgcgtgtgtcctccagcag

SEQ ID NO: 365415 - DNA, 25 bp, Homo sapien
ctggtggcagcacgcgtgtgtcctc

SEQ ID NO: 365416 - DNA, 25 bp, Homo sapien
gccacttggaatgtctgagaaccgc

SEQ ID NO: 365417 - DNA, 25 bp, Homo sapien
cacgagaagtcttcaagggccgacc

SEQ ID NO: 365418 - DNA, 25 bp, Homo sapien
caagctcttttgctcacagggaggg

SEQ ID NO: 365419 - DNA, 25 bp, Homo sapien
cactcaggtgagacgatgtccaggc

SEQ ID NO: 365420 - DNA, 25 bp, Homo sapien
ccgtgggaggcctaggtctagtcct

SEQ ID NO: 365421 - DNA, 25 bp, Homo sapien
gtctcctgttcagtgcacgccacgc

SEQ ID NO: 365422 - DNA, 25 bp, Homo sapien
agacctgggtttggcgcagaagcct

SEQ ID NO: 365423 - DNA, 25 bp, Homo sapien
tgacctgactcagggccggatggtc

SEQ ID NO: 365424 - DNA, 25 bp, Homo sapien
agaagtgtacatcggtcctccagcc

SEQ ID NO: 365425 - DNA, 25 bp, Homo sapien
ggacggagaagtgtacatcggtcct

SEQ ID NO: 365426 - DNA, 25 bp, Homo sapien
gagaagtgtacatcggtcctccagc

SEQ ID NO: 365427 - DNA, 25 bp, Homo sapien
cggagaagtgtacatcggtcctcca

SEQ ID NO: 365428 - DNA, 25 bp, Homo sapien
aggggctgggcacagcagcgacacc

SEQ ID NO: 365429 - DNA, 25 bp, Homo sapien
ctaggggctgggcacagcagcgaca

SEQ ID NO: 365430 - DNA, 25 bp, Homo sapien
ggctgggcacagcagcgacacccac

SEQ ID NO: 365431 - DNA, 25 bp, Homo sapien
gggctgggcacagcagcgacaccca

SEQ ID NO: 365432 - DNA, 25 bp, Homo sapien
taggaaggcaaaagcaggggcggct

SEQ ID NO: 365433 - DNA, 25 bp, Homo sapien
tccctgggaaggtctaggaaggcaa

SEQ ID NO: 365434 - DNA, 25 bp, Homo sapien
ggaaggtctaggaaggcaaaagcag

SEQ ID NO: 365435 - DNA, 25 bp, Homo sapien
ctcctccctgggaaggtctaggaag

SEQ ID NO: 365436 - DNA, 25 bp, Homo sapien
tggcctggagtgtgcgttggcaggc

SEQ ID NO: 365437 - DNA, 25 bp, Homo sapien
ggcctggagtgtgcgttggcaggca

SEQ ID NO: 365438 - DNA, 25 bp, Homo sapien
tgtgacttcctcctgtgacacaggt

SEQ ID NO: 365439 - DNA, 25 bp, Homo sapien
gaggtggccctttgtgggcgaaggc

SEQ ID NO: 365440 - DNA, 25 bp, Homo sapien
gtggccctttgtgggcgaaggctgg

SEQ ID NO: 365441 - DNA, 25 bp, Homo sapien
gccctttgtgggcgaaggctggatg

SEQ ID NO: 365442 - DNA, 25 bp, Homo sapien
gcgaaggctggatggtcattttcca

SEQ ID NO: 365443 - DNA, 25 bp, Homo sapien
ggcttggcaccgttattccacctcc

SEQ ID NO: 365444 - DNA, 25 bp, Homo sapien
cactggcttggcaccgttattccac

SEQ ID NO: 365445 - DNA, 25 bp, Homo sapien
tggcttggcaccgttattccacctc

SEQ ID NO: 365446 - DNA, 25 bp, Homo sapien
actggcttggcaccgttattccacc

SEQ ID NO: 365447 - DNA, 25 bp, Homo sapien
gaagcgacgctgttcgaaagggcac

SEQ ID NO: 365448 - DNA, 25 bp, Homo sapien
gacgctgttcgaaagggcaccgcac

SEQ ID NO: 365449 - DNA, 25 bp, Homo sapien
tgttcgaaagggcaccgcacccagg

SEQ ID NO: 365450 - DNA, 25 bp, Homo sapien
tgggaagcgacgctgttcgaaaggg

SEQ ID NO: 365451 - DNA, 25 bp, Homo sapien
tgggtgtccaccagcgggtactgca

SEQ ID NO: 365452 - DNA, 25 bp, Homo sapien
gggtgtccaccagcgggtactgcac

SEQ ID NO: 365453 - DNA, 25 bp, Homo sapien
tcccagctcagtgtctggctctccg

SEQ ID NO: 365454 - DNA, 25 bp, Homo sapien
acaggctcacatggccactcacagg

SEQ ID NO: 365455 - DNA, 25 bp, Homo sapien
gctggattgctgcagcttacggcag

SEQ ID NO: 365456 - DNA, 25 bp, Homo sapien
tggtagtagaccgtgtcccacagca

SEQ ID NO: 365457 - DNA, 25 bp, Homo sapien
cttccgcccgttggcatcgcaggac

SEQ ID NO: 365458 - DNA, 25 bp, Homo sapien
ccttccgcccgttggcatcgcagga

SEQ ID NO: 365459 - DNA, 25 bp, Homo sapien
accgcgtcaggggtcgcagaccagc

SEQ ID NO: 365460 - DNA, 25 bp, Homo sapien
gatctggatccgcaccgcgtcaggg

SEQ ID NO: 365461 - DNA, 25 bp, Homo sapien
gatccgcaccgcgtcaggggtcgca

SEQ ID NO: 365462 - DNA, 25 bp, Homo sapien
ggcagatctggatccgcaccgcgtc

SEQ ID NO: 365463 - DNA, 25 bp, Homo sapien
aagacggcctgggagacgctgttgg

SEQ ID NO: 365464 - DNA, 25 bp, Homo sapien
aggaagacggcctgggagacgctgt

SEQ ID NO: 365465 - DNA, 25 bp, Homo sapien
gacggcctgggagacgctgttggcg

SEQ ID NO: 365466 - DNA, 25 bp, Homo sapien
cctgggagacgctgttggcggtcac

SEQ ID NO: 365467 - DNA, 25 bp, Homo sapien
accagaatcgccttgcgcctccggt

SEQ ID NO: 365468 - DNA, 25 bp, Homo sapien
caggtgaaccgcttgaggcagagcc

SEQ ID NO: 365469 - DNA, 25 bp, Homo sapien
cggcgtcctcgcaggtgaaccgctt

SEQ ID NO: 365470 - DNA, 25 bp, Homo sapien
aggcagagccgcaggtagtagtcgg

SEQ ID NO: 365471 - DNA, 25 bp, Homo sapien
ggcagtcgggcacgctcctccccac

SEQ ID NO: 365472 - DNA, 25 bp, Homo sapien
gaggcagtcgggcacgctcctcccc

SEQ ID NO: 365473 - DNA, 25 bp, Homo sapien
aggcagtcgggcacgctcctcccca

SEQ ID NO: 365474 - DNA, 25 bp, Homo sapien
gctggaccccgcagaaatgagggat

SEQ ID NO: 365475 - DNA, 25 bp, Homo sapien
tccacgaggtgcctctggtccagct

SEQ ID NO: 365476 - DNA, 25 bp, Homo sapien
aggtgctgggccacgctcaccgcaa

SEQ ID NO: 365477 - DNA, 25 bp, Homo sapien
atggtcctcagggtgacatagaggt

SEQ ID NO: 365478 - DNA, 25 bp, Homo sapien
cacccacacgctctgacactgcgtc

SEQ ID NO: 365479 - DNA, 25 bp, Homo sapien
cacgctctgacactgcgtctcctgg

SEQ ID NO: 365480 - DNA, 25 bp, Homo sapien
ccacacgctctgacactgcgtctcc

SEQ ID NO: 365481 - DNA, 25 bp, Homo sapien
acacgctctgacactgcgtctcctg

SEQ ID NO: 365482 - DNA, 25 bp, Homo sapien
gcagccgtcagaggggacacactgc

SEQ ID NO: 365483 - DNA, 25 bp, Homo sapien
cagggtgatggaggcgcgtacacgc

SEQ ID NO: 365484 - DNA, 25 bp, Homo sapien
acgcaggagcatcgcgcagccgtca

SEQ ID NO: 365485 - DNA, 25 bp, Homo sapien
gacacactgcatggcagtggaggac

SEQ ID NO: 365486 - DNA, 25 bp, Homo sapien
cggggcgtggccggcagaagctgtt

SEQ ID NO: 365487 - DNA, 25 bp, Homo sapien
ggggcgtggccggcagaagctgtta

SEQ ID NO: 365488 - DNA, 25 bp, Homo sapien
gggcgtggccggcagaagctgttaa

SEQ ID NO: 365489 - DNA, 25 bp, Homo sapien
caccacgacttgctggcaagctctg

SEQ ID NO: 365490 - DNA, 25 bp, Homo sapien
cctgggaggcgaccccaaggttgct

SEQ ID NO: 365491 - DNA, 25 bp, Homo sapien
gaaaaggccaacacgggcttgctgg

SEQ ID NO: 365492 - DNA, 25 bp, Homo sapien
tcaaagacgaacagcagaaaaggcc

SEQ ID NO: 365493 - DNA, 25 bp, Homo sapien
cagacgtgggcagtgtggagctggg

SEQ ID NO: 365494 - DNA, 25 bp, Homo sapien
tgggcagtgtggagctgggtatcat

SEQ ID NO: 365495 - DNA, 25 bp, Homo sapien
cgtgggcagtgtggagctgggtatc

SEQ ID NO: 365496 - DNA, 25 bp, Homo sapien
gacgtgggcagtgtggagctgggta

SEQ ID NO: 365497 - DNA, 25 bp, Homo sapien
tcccacggtggacaaagcggccctg

SEQ ID NO: 365498 - DNA, 25 bp, Homo sapien
cacggtggacaaagcggccctggta

SEQ ID NO: 365499 - DNA, 25 bp, Homo sapien
ctgcctcccacggtggacaaagcgg

SEQ ID NO: 365500 - DNA, 25 bp, Homo sapien
gacaaagcggccctggtagcctggg

SEQ ID NO: 365501 - DNA, 25 bp, Homo sapien
ttcctgtggctcctgcaggcaaagc

SEQ ID NO: 365502 - DNA, 25 bp, Homo sapien
tcctgtggctcctgcaggcaaagcc

SEQ ID NO: 365503 - DNA, 25 bp, Homo sapien
ggttcctgtggctcctgcaggcaaa

SEQ ID NO: 365504 - DNA, 25 bp, Homo sapien
gttcctgtggctcctgcaggcaaag

SEQ ID NO: 365505 - DNA, 25 bp, Homo sapien
gggagacagaacgatccgaaacctg

SEQ ID NO: 365506 - DNA, 25 bp, Homo sapien
cgaaacctgggaaatcagcaactta

SEQ ID NO: 365507 - DNA, 25 bp, Homo sapien
ggaaatcagcaacttatattctgtg

SEQ ID NO: 365508 - DNA, 25 bp, Homo sapien
gaacgatccgaaacctgggaaatca

SEQ ID NO: 365509 - DNA, 25 bp, Homo sapien
tctggtgtggaatcggcggcagtca

SEQ ID NO: 365510 - DNA, 25 bp, Homo sapien
cagtctggtgtggaatcggcggcag

SEQ ID NO: 365511 - DNA, 25 bp, Homo sapien
atctcaacagtttcccgtgcatctg

SEQ ID NO: 365512 - DNA, 25 bp, Homo sapien
gtttcccgtgcatctgcaaaacctg

SEQ ID NO: 365513 - DNA, 25 bp, Homo sapien
gggcgcggaacgtcgcgcggttctg

SEQ ID NO: 365514 - DNA, 25 bp, Homo sapien
agaagccgctgtcgggggcgcggaa

SEQ ID NO: 365515 - DNA, 25 bp, Homo sapien
gtcgcgcggttctgccccgcccctg

SEQ ID NO: 365516 - DNA, 25 bp, Homo sapien
caggagaagccgctgtcgggggcgc

SEQ ID NO: 365517 - DNA, 25 bp, Homo sapien
ggcaggtgtctacacaagcccaggt

SEQ ID NO: 365518 - DNA, 25 bp, Homo sapien
acgttctccgagtgtttccttggca

SEQ ID NO: 365519 - DNA, 25 bp, Homo sapien
aagcccaggtgttgcgggctcccga

SEQ ID NO: 365520 - DNA, 25 bp, Homo sapien
tcccgatggctcagagcagccgagc

SEQ ID NO: 365521 - DNA, 25 bp, Homo sapien
cctgctgatgtgctgagagcgtcag

SEQ ID NO: 365522 - DNA, 25 bp, Homo sapien
tcacaggtgggtccgaggtgggctc

SEQ ID NO: 365523 - DNA, 25 bp, Homo sapien
tcccatccttctttcaccagcgctg

SEQ ID NO: 365524 - DNA, 25 bp, Homo sapien
ttccagcaaacacttcccggagcag

SEQ ID NO: 365525 - DNA, 25 bp, Homo sapien
gggccttatctgccacagtgtaggg

SEQ ID NO: 365526 - DNA, 25 bp, Homo sapien
ggccttatctgccacagtgtagggg

SEQ ID NO: 365527 - DNA, 25 bp, Homo sapien
agggccttatctgccacagtgtagg

SEQ ID NO: 365528 - DNA, 25 bp, Homo sapien
ccacattctgtaatccgggggatgg

SEQ ID NO: 365529 - DNA, 25 bp, Homo sapien
ccaggtcaggcccaagaacgcgagt

SEQ ID NO: 365530 - DNA, 25 bp, Homo sapien
gcccaagaacgcgagtgcttgccca

SEQ ID NO: 365531 - DNA, 25 bp, Homo sapien
gtcaggcccaagaacgcgagtgctt

SEQ ID NO: 365532 - DNA, 25 bp, Homo sapien
tgtgagtggggcaagtttgcaggat

SEQ ID NO: 365533 - DNA, 25 bp, Homo sapien
tggtaagcgtggatgtgagtggggc

SEQ ID NO: 365534 - DNA, 25 bp, Homo sapien
gtggatgtgagtggggcaagtttgc

SEQ ID NO: 365535 - DNA, 25 bp, Homo sapien
taagcgtggatgtgagtggggcaag

SEQ ID NO: 365536 - DNA, 25 bp, Homo sapien
ctgtggcagcggctccaggctgacc

SEQ ID NO: 365537 - DNA, 25 bp, Homo sapien
accagggtgcagttcttgggtcctc

SEQ ID NO: 365538 - DNA, 25 bp, Homo sapien
tgcagttcttgggtcctcctggctc

SEQ ID NO: 365539 - DNA, 25 bp, Homo sapien
agaaccagggtgcagttcttgggtc

SEQ ID NO: 365540 - DNA, 25 bp, Homo sapien
ggtgcagttcttgggtcctcctggc

SEQ ID NO: 365541 - DNA, 25 bp, Homo sapien
gtgatctcgtgtagggacggcccac

SEQ ID NO: 365542 - DNA, 25 bp, Homo sapien
caggtggccagtagtcggtgatctc

SEQ ID NO: 365543 - DNA, 25 bp, Homo sapien
tcccagcgtgccgtgacgcaggcag

SEQ ID NO: 365544 - DNA, 25 bp, Homo sapien
ccgttgcctgaaggcgccatcccag

SEQ ID NO: 365545 - DNA, 25 bp, Homo sapien
agtgaccatcggtcgcccagaagcc

SEQ ID NO: 365546 - DNA, 25 bp, Homo sapien
cgcccagaagcccaacggtgaaggg

SEQ ID NO: 365547 - DNA, 25 bp, Homo sapien
ccagaagcccaacggtgaagggatc

SEQ ID NO: 365548 - DNA, 25 bp, Homo sapien
aagcccaacggtgaagggatctgag

SEQ ID NO: 365549 - DNA, 25 bp, Homo sapien
cccgccgagccgcacgaaggacgcg

SEQ ID NO: 365550 - DNA, 25 bp, Homo sapien
gcagcgcttgcagggcccggcgggt

SEQ ID NO: 365551 - DNA, 25 bp, Homo sapien
cctgcaggaccgcggcgcagaacga

SEQ ID NO: 365552 - DNA, 25 bp, Homo sapien
cgcacgaaggacgcgccctgcagga

SEQ ID NO: 365553 - DNA, 25 bp, Homo sapien
gtgcccgtggtctggcaggcggcca

SEQ ID NO: 365554 - DNA, 25 bp, Homo sapien
ggcggccacgtggtgcccgtggtgt

SEQ ID NO: 365555 - DNA, 25 bp, Homo sapien
ggcccatgggcagttctgatgccag

SEQ ID NO: 365556 - DNA, 25 bp, Homo sapien
catcccacgtggtgcccgtggtctg

SEQ ID NO: 365557 - DNA, 25 bp, Homo sapien
tcctgctgcagagaatctgacgctg

SEQ ID NO: 365558 - DNA, 25 bp, Homo sapien
gtggctgcaacctgtactcctgctg

SEQ ID NO: 365559 - DNA, 25 bp, Homo sapien
caaaagctggcagatagaactgaca

SEQ ID NO: 365560 - DNA, 25 bp, Homo sapien
gacgtattcaatgttcggcgggaga

SEQ ID NO: 365561 - DNA, 25 bp, Homo sapien
gtgcactactccatctgacgaaatg

SEQ ID NO: 365562 - DNA, 25 bp, Homo sapien
acgtgcactactccatctgacgaaa

SEQ ID NO: 365563 - DNA, 25 bp, Homo sapien
tgcactactccatctgacgaaatgc

SEQ ID NO: 365564 - DNA, 25 bp, Homo sapien
cactactccatctgacgaaatgcac

SEQ ID NO: 365565 - DNA, 25 bp, Homo sapien
ccatctgatgatgtgtactcctcca

SEQ ID NO: 365566 - DNA, 25 bp, Homo sapien
tccatctgatgatgtgtactcctcc

SEQ ID NO: 365567 - DNA, 25 bp, Homo sapien
acaacgtgcactcctccatttgacg

SEQ ID NO: 365568 - DNA, 25 bp, Homo sapien
gtgcactcctccatttgacgtgaac

SEQ ID NO: 365569 - DNA, 25 bp, Homo sapien
caacgtgcactcctccatttgacgt

SEQ ID NO: 365570 - DNA, 25 bp, Homo sapien
ccatctgatgatgtgtactcctcca

SEQ ID NO: 365571 - DNA, 25 bp, Homo sapien
catctgatgacgtgcactcctccat

SEQ ID NO: 365572 - DNA, 25 bp, Homo sapien
tgacaatgtgcactcctccatctga

SEQ ID NO: 365573 - DNA, 25 bp, Homo sapien
gacaatgtgcactcctccatctgat

SEQ ID NO: 365574 - DNA, 25 bp, Homo sapien
cctccatctgacgacgtgcactcct

SEQ ID NO: 365575 - DNA, 25 bp, Homo sapien
tcctccatctgacgacgtgcactcc

SEQ ID NO: 365576 - DNA, 25 bp, Homo sapien
aatacttaacatgaaaattcaggcc

SEQ ID NO: 365577 - DNA, 25 bp, Homo sapien
taaatacttaacatgaaaattcagg

SEQ ID NO: 365578 - DNA, 25 bp, Homo sapien
ccgggcaactgtgcgagactctgtc

SEQ ID NO: 365579 - DNA, 25 bp, Homo sapien
tacttaacatgaaaattcaggccag

SEQ ID NO: 365580 - DNA, 25 bp, Homo sapien
atggaagcgcagaccgtgccgctcc

SEQ ID NO: 365581 - DNA, 25 bp, Homo sapien
tggaagcgcagaccgtgccgctcca

SEQ ID NO: 365582 - DNA, 25 bp, Homo sapien
caacattgcttacggcaacactgcc

SEQ ID NO: 365583 - DNA, 25 bp, Homo sapien
cctcttcagcatggtaatttggcac

SEQ ID NO: 365584 - DNA, 25 bp, Homo sapien
acataaactcctttggtcggcaaca

SEQ ID NO: 365585 - DNA, 25 bp, Homo sapien
tcaaaggcagaggagatctttcctc

SEQ ID NO: 365586 - DNA, 25 bp, Homo sapien
gaggcatctccgtgagtgggtccca

SEQ ID NO: 365587 - DNA, 25 bp, Homo sapien
cctcccgtggggcaagaggcatctc

SEQ ID NO: 365588 - DNA, 25 bp, Homo sapien
tgcaggaggaacttcgcctcccgtg

SEQ ID NO: 365589 - DNA, 25 bp, Homo sapien
ggaatgtgccctgcgggccatagcc

SEQ ID NO: 365590 - DNA, 25 bp, Homo sapien
accatccacctggccggcactccca

SEQ ID NO: 365591 - DNA, 25 bp, Homo sapien
cacctggccggcactcccacgcccc

SEQ ID NO: 365592 - DNA, 25 bp, Homo sapien
ccgtgccgggctgggacaggtgccc

SEQ ID NO: 365593 - DNA, 25 bp, Homo sapien
gccgggctgggacaggtgccccaac

SEQ ID NO: 365594 - DNA, 25 bp, Homo sapien
ccggctcccgccggcgcctccgtca

SEQ ID NO: 365595 - DNA, 25 bp, Homo sapien
gctcccgccggcgcctccgtcaggg

SEQ ID NO: 365596 - DNA, 25 bp, Homo sapien
ccgccggcgcctccgtcaggggaca

SEQ ID NO: 365597 - DNA, 25 bp, Homo sapien
tcccgccggcgcctccgtcagggga

SEQ ID NO: 365598 - DNA, 25 bp, Homo sapien
cagcaccgaagcctgccctgcgccc

SEQ ID NO: 365599 - DNA, 25 bp, Homo sapien
atgcagcggctgctggcgagggttg

SEQ ID NO: 365600 - DNA, 25 bp, Homo sapien
cttcagtcccaagtcccgctggaga

SEQ ID NO: 365601 - DNA, 25 bp, Homo sapien
gctgcgcgtccaacagcgaggccga

SEQ ID NO: 365602 - DNA, 25 bp, Homo sapien
gcgcatttagctggtttggatccca

SEQ ID NO: 365603 - DNA, 25 bp, Homo sapien
agcacaggctccagcgggtgcgcat

SEQ ID NO: 365604 - DNA, 25 bp, Homo sapien
acgcagaggtcggacccgctgaatg

SEQ ID NO: 365605 - DNA, 25 bp, Homo sapien
ctgaatgggggcggctcaaccaccg

SEQ ID NO: 365606 - DNA, 25 bp, Homo sapien
ccgctgaatgggggcggctcaacca

SEQ ID NO: 365607 - DNA, 25 bp, Homo sapien
tgacgcccgccacgcagaggtcgga

SEQ ID NO: 365608 - DNA, 25 bp, Homo sapien
tcatggacgggtagatgacgctgcc

SEQ ID NO: 365609 - DNA, 25 bp, Homo sapien
tccacaggagctcgaagttgccgat

SEQ ID NO: 365610 - DNA, 25 bp, Homo sapien
aggacgaagtcagccccgtagagct

SEQ ID NO: 365611 - DNA, 25 bp, Homo sapien
caggtacttctggacggcgttgttg

SEQ ID NO: 365612 - DNA, 25 bp, Homo sapien
agcggcgtctcgatgtacttctgga

SEQ ID NO: 365613 - DNA, 25 bp, Homo sapien
agtccgtgacgaggaaccactgtct

SEQ ID NO: 365614 - DNA, 25 bp, Homo sapien
cgctgagttgagaaccgcaagtaac

SEQ ID NO: 365615 - DNA, 25 bp, Homo sapien
cccacttgttgtccctggaaagagg

SEQ ID NO: 365616 - DNA, 25 bp, Homo sapien
aagaggccaccgctcaacccagcat

SEQ ID NO: 365617 - DNA, 25 bp, Homo sapien
cagggtcgcagcttggccctgagac

SEQ ID NO: 365618 - DNA, 25 bp, Homo sapien
gagacctgcactggctttgtccaag

SEQ ID NO: 365619 - DNA, 25 bp, Homo sapien
actgtgcagcgggacctgagctcct

SEQ ID NO: 365620 - DNA, 25 bp, Homo sapien
tcaagtgtggccgttggtggctatg

SEQ ID NO: 365621 - DNA, 25 bp, Homo sapien
tgtggccgttggtggctatgaacgc

SEQ ID NO: 365622 - DNA, 25 bp, Homo sapien
cgttggtggctatgaacgcggtgca

SEQ ID NO: 365623 - DNA, 25 bp, Homo sapien
tggtggctatgaacgcggtgcaggg

SEQ ID NO: 365624 - DNA, 25 bp, Homo sapien
gacgtgattctattcagcagagcct

SEQ ID NO: 365625 - DNA, 25 bp, Homo sapien
ttggccgcgggctttataatccaga

SEQ ID NO: 365626 - DNA, 25 bp, Homo sapien
taatccagatgttccggagcccgtc

SEQ ID NO: 365627 - DNA, 25 bp, Homo sapien
tcaatgtccgtctgagggttcacag

SEQ ID NO: 365628 - DNA, 25 bp, Homo sapien
aaaagtaatttcttgaattggagat

SEQ ID NO: 365629 - DNA, 25 bp, Homo sapien
gtaatttcttgaattggagatgaaa

SEQ ID NO: 365630 - DNA, 25 bp, Homo sapien
aagtaatttcttgaattggagatga

SEQ ID NO: 365631 - DNA, 25 bp, Homo sapien
tgaattggagatgaaagcatcgcca

SEQ ID NO: 365632 - DNA, 25 bp, Homo sapien
caagcaggcgctcggctctaggatg

SEQ ID NO: 365633 - DNA, 25 bp, Homo sapien
caggcgctcggctctaggatggtct

SEQ ID NO: 365634 - DNA, 25 bp, Homo sapien
gaagttctcccaacagtatggacac

SEQ ID NO: 365635 - DNA, 25 bp, Homo sapien
tgcgggtcggcccaggaagttctcc

SEQ ID NO: 365636 - DNA, 25 bp, Homo sapien
catgacgtcctgacaaggtggctgc

SEQ ID NO: 365637 - DNA, 25 bp, Homo sapien
aggacgccagccgtgactctcacag

SEQ ID NO: 365638 - DNA, 25 bp, Homo sapien
gggctccaaggacgccagccgtgac

SEQ ID NO: 365639 - DNA, 25 bp, Homo sapien
cctgcgtgggcagactcagagctgt

SEQ ID NO: 365640 - DNA, 25 bp, Homo sapien
tgagaacttggagcaaaccgggcac

SEQ ID NO: 365641 - DNA, 25 bp, Homo sapien
taaatagggtgggtcacccatgacg

SEQ ID NO: 365642 - DNA, 25 bp, Homo sapien
ctgtgcagcacaggtcagtccccaa

SEQ ID NO: 365643 - DNA, 25 bp, Homo sapien
ctcaggatggcaacaggactgctca

SEQ ID NO: 365644 - DNA, 25 bp, Homo sapien
gaggactgacgggcccgaagcacca

SEQ ID NO: 365645 - DNA, 25 bp, Homo sapien
agcagccgggaatctcccctggacg

SEQ ID NO: 365646 - DNA, 25 bp, Homo sapien
tgacgggcccgaagcaccagggact

SEQ ID NO: 365647 - DNA, 25 bp, Homo sapien
cctccggcagcagccgggaatctcc

SEQ ID NO: 365648 - DNA, 25 bp, Homo sapien
gctgtggggggctcaaatgacatca

SEQ ID NO: 365649 - DNA, 25 bp, Homo sapien
gatgcacaagacaatgctactcccc

SEQ ID NO: 365650 - DNA, 25 bp, Homo sapien
tgaagatgcacaagacaatgctact

SEQ ID NO: 365651 - DNA, 25 bp, Homo sapien
aagacaatgctactccccaaaggca

SEQ ID NO: 365652 - DNA, 25 bp, Homo sapien
gaggcccctgagctttgcctcagca

SEQ ID NO: 365653 - DNA, 25 bp, Homo sapien
tggcacaccttgcacgcgatgtcca

SEQ ID NO: 365654 - DNA, 25 bp, Homo sapien
tgacgtgtcgatgtcctcatgctcc

SEQ ID NO: 365655 - DNA, 25 bp, Homo sapien
cagtgaggtcctccacggcatctgc

SEQ ID NO: 365656 - DNA, 25 bp, Homo sapien
tcccagggctgcgttaactgccagg

SEQ ID NO: 365657 - DNA, 25 bp, Homo sapien
cagtgagtgtgggactcggacgtcc

SEQ ID NO: 365658 - DNA, 25 bp, Homo sapien
agggctgcgttaactgccaggtgct

SEQ ID NO: 365659 - DNA, 25 bp, Homo sapien
tgagtgtgggactcggacgtcccag

SEQ ID NO: 365660 - DNA, 25 bp, Homo sapien
gatgccatggtgcgccggaagtctt

SEQ ID NO: 365661 - DNA, 25 bp, Homo sapien
tggatgccatggtgcgccggaagtc

SEQ ID NO: 365662 - DNA, 25 bp, Homo sapien
gctcaggtcgctgctcccggcctcc

SEQ ID NO: 365663 - DNA, 25 bp, Homo sapien
ctggatgccatggtgcgccggaagt

SEQ ID NO: 365664 - DNA, 25 bp, Homo sapien
ttggccgggacgtaccagggcaggc

SEQ ID NO: 365665 - DNA, 25 bp, Homo sapien
ggcaggctccgcatgttcacgcaca

SEQ ID NO: 365666 - DNA, 25 bp, Homo sapien
gggcaggctccgcatgttcacgcac

SEQ ID NO: 365667 - DNA, 25 bp, Homo sapien
agggcaggctccgcatgttcacgca

SEQ ID NO: 365668 - DNA, 25 bp, Homo sapien
tggtccagaggaggtacggcatctc

SEQ ID NO: 365669 - DNA, 25 bp, Homo sapien
aggctgtgatagtcaatgatgtccc

SEQ ID NO: 365670 - DNA, 25 bp, Homo sapien
tcagcatctggtcgtaggtcaggct

SEQ ID NO: 365671 - DNA, 25 bp, Homo sapien
gaggctgtctttgcgtagtggttca

SEQ ID NO: 365672 - DNA, 25 bp, Homo sapien
gctgggggcctgttgttggtgcttt

SEQ ID NO: 365673 - DNA, 25 bp, Homo sapien
gctcctcccctgctgatagaggggt

SEQ ID NO: 365674 - DNA, 25 bp, Homo sapien
gatagaggggttggtcgtggagctg

SEQ ID NO: 365675 - DNA, 25 bp, Homo sapien
tcccctgctgatagaggggttggtc

SEQ ID NO: 365676 - DNA, 25 bp, Homo sapien
tcacgtcgtggatgttgtctgtttt

SEQ ID NO: 365677 - DNA, 25 bp, Homo sapien
atcacgtcgtggatgttgtctgttt

SEQ ID NO: 365678 - DNA, 25 bp, Homo sapien
catcacgtcgtggatgttgtctgtt

SEQ ID NO: 365679 - DNA, 25 bp, Homo sapien
cacgtcgtggatgttgtctgttttc

SEQ ID NO: 365680 - DNA, 25 bp, Homo sapien
atccaatgagcgtccaccgcacagc

SEQ ID NO: 365681 - DNA, 25 bp, Homo sapien
aatggtggagacagcccgggatggg

SEQ ID NO: 365682 - DNA, 25 bp, Homo sapien
ggcagcccccatacatccaatgagc

SEQ ID NO: 365683 - DNA, 25 bp, Homo sapien
aatgagcgtccaccgcacagcacct

SEQ ID NO: 365684 - DNA, 25 bp, Homo sapien
tgagacgtgcgcctccgatacgcta

SEQ ID NO: 365685 - DNA, 25 bp, Homo sapien
gctgagacgtgcgcctccgatacgc

SEQ ID NO: 365686 - DNA, 25 bp, Homo sapien
gagacgtgcgcctccgatacgctac

SEQ ID NO: 365687 - DNA, 25 bp, Homo sapien
tgagctgagacgtgcgcctccgata

SEQ ID NO: 365688 - DNA, 25 bp, Homo sapien
gggcgccttcatcctcgacatccgg

SEQ ID NO: 365689 - DNA, 25 bp, Homo sapien
gccttcatcctcgacatccggaatg

SEQ ID NO: 365690 - DNA, 25 bp, Homo sapien
tcgacatccggaatgaccttgggca

SEQ ID NO: 365691 - DNA, 25 bp, Homo sapien
catcctcgacatccggaatgacctt

SEQ ID NO: 365692 - DNA, 25 bp, Homo sapien
tagtgtccgtagatagagaaaatct

SEQ ID NO: 365693 - DNA, 25 bp, Homo sapien
gaccaccgggtagtgtccgtagata

SEQ ID NO: 365694 - DNA, 25 bp, Homo sapien
ttccttcgcagagcggcccggacca

SEQ ID NO: 365695 - DNA, 25 bp, Homo sapien
caccgggtagtgtccgtagatagag

SEQ ID NO: 365696 - DNA, 25 bp, Homo sapien
gcaggcattctctgagtacctggaa

SEQ ID NO: 365697 - DNA, 25 bp, Homo sapien
ggcattctctgagtacctggaagtc

SEQ ID NO: 365698 - DNA, 25 bp, Homo sapien
cattctctgagtacctggaagtctg

SEQ ID NO: 365699 - DNA, 25 bp, Homo sapien
tctctgagtacctggaagtctgttt

SEQ ID NO: 365700 - DNA, 25 bp, Homo sapien
gttaactgccttgctattttgtatc

SEQ ID NO: 365701 - DNA, 25 bp, Homo sapien
cttgattgctttttctgttaactgc

SEQ ID NO: 365702 - DNA, 25 bp, Homo sapien
attttgtatctgtctaatctggagg

SEQ ID NO: 365703 - DNA, 25 bp, Homo sapien
ttgtatctgtctaatctggaggaag

SEQ ID NO: 365704 - DNA, 25 bp, Homo sapien
gagctctcgatctggcccttaaacg

SEQ ID NO: 365705 - DNA, 25 bp, Homo sapien
ccagtcatttgactcctagggagca

SEQ ID NO: 365706 - DNA, 25 bp, Homo sapien
taaagctaagtatgcgcctgccatg

SEQ ID NO: 365707 - DNA, 25 bp, Homo sapien
ggagcatttacccacgcaacgaaga

SEQ ID NO: 365708 - DNA, 25 bp, Homo sapien
tctctggttccatactggcctccga

SEQ ID NO: 365709 - DNA, 25 bp, Homo sapien
caggtctgggttgagggatcagttc

SEQ ID NO: 365710 - DNA, 25 bp, Homo sapien
gaagaagccaacgatagccccttcc

SEQ ID NO: 365711 - DNA, 25 bp, Homo sapien
gatgaggtctggagttgggaggtca

SEQ ID NO: 365712 - DNA, 25 bp, Homo sapien
gatcaggtctgggttggggtcaggt

SEQ ID NO: 365713 - DNA, 25 bp, Homo sapien
ctgggttggggtcaggtctgggttg

SEQ ID NO: 365714 - DNA, 25 bp, Homo sapien
aggtctgggttggggtcaggtctgg

SEQ ID NO: 365715 - DNA, 25 bp, Homo sapien
ggggatcaggtctgggttggggtca

SEQ ID NO: 365716 - DNA, 25 bp, Homo sapien
gggatcaggtctggattgtgggtca

SEQ ID NO: 365717 - DNA, 25 bp, Homo sapien
atcaggtctggattgtgggtcaggt

SEQ ID NO: 365718 - DNA, 25 bp, Homo sapien
ggttgggggatcaggtctggattgt

SEQ ID NO: 365719 - DNA, 25 bp, Homo sapien
caggtctggattgtgggtcaggtct

SEQ ID NO: 365720 - DNA, 25 bp, Homo sapien
ttgagggtcaggtttgggttgagcg

SEQ ID NO: 365721 - DNA, 25 bp, Homo sapien
gttgagggtcaggtttgggttgagc

SEQ ID NO: 365722 - DNA, 25 bp, Homo sapien
caagtcagcgtttattgctcaagcg

SEQ ID NO: 365723 - DNA, 25 bp, Homo sapien
tgctcaagcgtattaaacaaaaatg

SEQ ID NO: 365724 - DNA, 25 bp, Homo sapien
aagtgcaagccagcaaaaacgctcc

SEQ ID NO: 365725 - DNA, 25 bp, Homo sapien
ctccaagtgcctaattctgactctg

SEQ ID NO: 365726 - DNA, 25 bp, Homo sapien
tgcatccggtaccagtgacagcagc

SEQ ID NO: 365727 - DNA, 25 bp, Homo sapien
ctggcttgtcccctctaggagcagc

SEQ ID NO: 365728 - DNA, 25 bp, Homo sapien
tcctctcccacggtggcgcttgttt

SEQ ID NO: 365729 - DNA, 25 bp, Homo sapien
gccaaagtgtttgcccggcccctga

SEQ ID NO: 365730 - DNA, 25 bp, Homo sapien
ataatgattccacttgtcatgaaca

SEQ ID NO: 365731 - DNA, 25 bp, Homo sapien
gagtcactcctgttccgcagtggga

SEQ ID NO: 365732 - DNA, 25 bp, Homo sapien
aataatgattccacttgtcatgaac

SEQ ID NO: 365733 - DNA, 25 bp, Homo sapien
ctcctgttccgcagtgggaaacctg

SEQ ID NO: 365734 - DNA, 25 bp, Homo sapien
tttactgccgtcagctgggaggacc

SEQ ID NO: 365735 - DNA, 25 bp, Homo sapien
tgggtgaacctgtgagaattcctgg

SEQ ID NO: 365736 - DNA, 25 bp, Homo sapien
gtttacaaagccttggatgcagccc

SEQ ID NO: 365737 - DNA, 25 bp, Homo sapien
gagacgtggtccagccggtttacaa

SEQ ID NO: 365738 - DNA, 25 bp, Homo sapien
tgcccgggacgtgggcagcggccac

SEQ ID NO: 365739 - DNA, 25 bp, Homo sapien
tccaagctgggcatgacagtgcccg

SEQ ID NO: 365740 - DNA, 25 bp, Homo sapien
catgacagtgcccgggacgtgggca

SEQ ID NO: 365741 - DNA, 25 bp, Homo sapien
gtggcactccaagctgggcatgaca

SEQ ID NO: 365742 - DNA, 25 bp, Homo sapien
gctgggcatgacagcacccaggacg

SEQ ID NO: 365743 - DNA, 25 bp, Homo sapien
tccaagctgggcatgacagcaccca

SEQ ID NO: 365744 - DNA, 25 bp, Homo sapien
ggatccctctagaatgactgggtct

SEQ ID NO: 365745 - DNA, 25 bp, Homo sapien
gccagtgtggcggtggatccctcta

SEQ ID NO: 365746 - DNA, 25 bp, Homo sapien
gcgacccggcgtggactggtgtgga

SEQ ID NO: 365747 - DNA, 25 bp, Homo sapien
cgtggactggtgtggatttcacctg

SEQ ID NO: 365748 - DNA, 25 bp, Homo sapien
atttcacctgggagagcagcggcag

SEQ ID NO: 365749 - DNA, 25 bp, Homo sapien
ggcagcctgtgtcgcttgcgcccag

SEQ ID NO: 365750 - DNA, 25 bp, Homo sapien
tcccgggccaggacagaggcgccca

SEQ ID NO: 365751 - DNA, 25 bp, Homo sapien
gccaggacagaggcgcccagccctg

SEQ ID NO: 365752 - DNA, 25 bp, Homo sapien
ggctcccgggccaggacagaggcgc

SEQ ID NO: 365753 - DNA, 25 bp, Homo sapien
ctgcggctcccgggccaggacagag

SEQ ID NO: 365754 - DNA, 25 bp, Homo sapien
gggctgactgagtacccgggacaga

SEQ ID NO: 365755 - DNA, 25 bp, Homo sapien
gcagggaagtgggtaagatcccact

SEQ ID NO: 365756 - DNA, 25 bp, Homo sapien
actgggctgactgagtacccgggac

SEQ ID NO: 365757 - DNA, 25 bp, Homo sapien
gctgactgagtacccgggacagacc

SEQ ID NO: 365758 - DNA, 25 bp, Homo sapien
tggggctctcaagaggccgagccgg

SEQ ID NO: 365759 - DNA, 25 bp, Homo sapien
gaggaagcccggtcagagtgggcag

SEQ ID NO: 365760 - DNA, 25 bp, Homo sapien
tggagggaggaagcccggtcagagt

SEQ ID NO: 365761 - DNA, 25 bp, Homo sapien
acgcagggacccacagtctggtcag

SEQ ID NO: 365762 - DNA, 25 bp, Homo sapien
tcggagctgactgatctcactgagg

SEQ ID NO: 365763 - DNA, 25 bp, Homo sapien
tgttagaagcagtagctcagggcga

SEQ ID NO: 365764 - DNA, 25 bp, Homo sapien
taggaagtgaaaaccccacctgcag

SEQ ID NO: 365765 - DNA, 25 bp, Homo sapien
tcctgctgttacgacacgggagcca

SEQ ID NO: 365766 - DNA, 25 bp, Homo sapien
taggggttgtgcgtttccatgcttg

SEQ ID NO: 365767 - DNA, 25 bp, Homo sapien
tgggcgctgccacccggtttccgcg

SEQ ID NO: 365768 - DNA, 25 bp, Homo sapien
ctgccacccggtttccgcgtctggg

SEQ ID NO: 365769 - DNA, 25 bp, Homo sapien
tgcgtttccatgcttggggccaggc

SEQ ID NO: 365770 - DNA, 25 bp, Homo sapien
gtcgaactccttcagggggctcctg

SEQ ID NO: 365771 - DNA, 25 bp, Homo sapien
tgggccatttgcaccacgacggctc

SEQ ID NO: 365772 - DNA, 25 bp, Homo sapien
atttgcaccacgacggctctccagg

SEQ ID NO: 365773 - DNA, 25 bp, Homo sapien
ctttctccttgtcgaactccttcag

SEQ ID NO: 365774 - DNA, 25 bp, Homo sapien
ccaccaggacccgtagctcggtggg

SEQ ID NO: 365775 - DNA, 25 bp, Homo sapien
gcaggtttgcccaggggagcaccac

SEQ ID NO: 365776 - DNA, 25 bp, Homo sapien
accaccaggacccgtagctcggtgg

SEQ ID NO: 365777 - DNA, 25 bp, Homo sapien
caccaggacccgtagctcggtgggg

SEQ ID NO: 365778 - DNA, 25 bp, Homo sapien
cagctttacggagccccatgtgcca

SEQ ID NO: 365779 - DNA, 25 bp, Homo sapien
agcaagacagtaggcagggcccggg

SEQ ID NO: 365780 - DNA, 25 bp, Homo sapien
cagccagaagttgttgacaccccag

SEQ ID NO: 365781 - DNA, 25 bp, Homo sapien
ggggaacattgttcaggcagtgaca

SEQ ID NO: 365782 - DNA, 25 bp, Homo sapien
agtgccccctccccctgcaggccac

SEQ ID NO: 365783 - DNA, 25 bp, Homo sapien
ctccccagtgccccctccccctgca

SEQ ID NO: 365784 - DNA, 25 bp, Homo sapien
tgccccctccccctgcaggccactc

SEQ ID NO: 365785 - DNA, 25 bp, Homo sapien
ccccctccccctgcaggccactcac

SEQ ID NO: 365786 - DNA, 25 bp, Homo sapien
gggtgtcccaggatgcaccctgcag

SEQ ID NO: 365787 - DNA, 25 bp, Homo sapien
ttgcactgaccttgaagcgcacgca

SEQ ID NO: 365788 - DNA, 25 bp, Homo sapien
tcctgcgggccgttctgggtgtccc

SEQ ID NO: 365789 - DNA, 25 bp, Homo sapien
cactggatggcggtgcccgtgttga

SEQ ID NO: 365790 - DNA, 25 bp, Homo sapien
ctgcagcaggagcactagcagcagc

SEQ ID NO: 365791 - DNA, 25 bp, Homo sapien
caggagcactagcagcagcagcagc

SEQ ID NO: 365792 - DNA, 25 bp, Homo sapien
gcagcagcagcagcacatcgtagga

SEQ ID NO: 365793 - DNA, 25 bp, Homo sapien
gcagcagcagcacatcgtaggatgg

SEQ ID NO: 365794 - DNA, 25 bp, Homo sapien
cgtgtcagcaggatcctgagcggag

SEQ ID NO: 365795 - DNA, 25 bp, Homo sapien
tccgtgtcagcaggatcctgagcgg

SEQ ID NO: 365796 - DNA, 25 bp, Homo sapien
ttccgtgtcagcaggatcctgagcg

SEQ ID NO: 365797 - DNA, 25 bp, Homo sapien
tgtcagcaggatcctgagcggagga

SEQ ID NO: 365798 - DNA, 25 bp, Homo sapien
tgcttatggcaatcaggacctccac

SEQ ID NO: 365799 - DNA, 25 bp, Homo sapien
gaatgacagatatccagaggctgtg

SEQ ID NO: 365800 - DNA, 25 bp, Homo sapien
cgattctcatgatgctgaatgacag

SEQ ID NO: 365801 - DNA, 25 bp, Homo sapien
gacgtgaggctgcttatggcaatca

SEQ ID NO: 365802 - DNA, 25 bp, Homo sapien
tggaaaaaaagcgcgggttgcagga

SEQ ID NO: 365803 - DNA, 25 bp, Homo sapien
cccaggacagcgggcgtggccaggg

SEQ ID NO: 365804 - DNA, 25 bp, Homo sapien
caggacagcgggcgtggccagggct

SEQ ID NO: 365805 - DNA, 25 bp, Homo sapien
ctggaaaaaaagcgcgggttgcagg

SEQ ID NO: 365806 - DNA, 25 bp, Homo sapien
cagacacttgctgggacactctgct

SEQ ID NO: 365807 - DNA, 25 bp, Homo sapien
tctgctgccacatgactggcaatgg

SEQ ID NO: 365808 - DNA, 25 bp, Homo sapien
ctgctgccacatgactggcaatggc

SEQ ID NO: 365809 - DNA, 25 bp, Homo sapien
cacttgctgggacactctgctgcca

SEQ ID NO: 365810 - DNA, 25 bp, Homo sapien
ccgcacaatgtaggcagagggagga

SEQ ID NO: 365811 - DNA, 25 bp, Homo sapien
ttccgcacaatgtaggcagagggag

SEQ ID NO: 365812 - DNA, 25 bp, Homo sapien
agttccgcacaatgtaggcagaggg

SEQ ID NO: 365813 - DNA, 25 bp, Homo sapien
ttagttccgcacaatgtaggcagag

SEQ ID NO: 365814 - DNA, 25 bp, Homo sapien
gcatgcctcagcgctctcctctcct

SEQ ID NO: 365815 - DNA, 25 bp, Homo sapien
cacgcatgcctcagcgctctcctct

SEQ ID NO: 365816 - DNA, 25 bp, Homo sapien
cgcatgcctcagcgctctcctctcc

SEQ ID NO: 365817 - DNA, 25 bp, Homo sapien
acgcatgcctcagcgctctcctctc

SEQ ID NO: 365818 - DNA, 25 bp, Homo sapien
gaggggtctgcgggatgggaggggc

SEQ ID NO: 365819 - DNA, 25 bp, Homo sapien
gtcacagacccgcttgggtgggcac

SEQ ID NO: 365820 - DNA, 25 bp, Homo sapien
acagacccgcttgggtgggcaccca

SEQ ID NO: 365821 - DNA, 25 bp, Homo sapien
tcacagacccgcttgggtgggcacc

SEQ ID NO: 365822 - DNA, 25 bp, Homo sapien
agacccgcttgggtgggcacccatg

SEQ ID NO: 365823 - DNA, 25 bp, Homo sapien
tgctcatgtacataagagagcaggg

SEQ ID NO: 365824 - DNA, 25 bp, Homo sapien
cattcctgctcatgtacataagaga

SEQ ID NO: 365825 - DNA, 25 bp, Homo sapien
cctgctcatgtacataagagagcag

SEQ ID NO: 365826 - DNA, 25 bp, Homo sapien
ttcctgctcatgtacataagagagc

SEQ ID NO: 365827 - DNA, 25 bp, Homo sapien
gactctctgtctgaatgcaccaaga

SEQ ID NO: 365828 - DNA, 25 bp, Homo sapien
ctgtctgaatgcaccaagactgagc

SEQ ID NO: 365829 - DNA, 25 bp, Homo sapien
tgaatgcaccaagactgagctcggg

SEQ ID NO: 365830 - DNA, 25 bp, Homo sapien
ggcccagccacgcaggatctgagca

SEQ ID NO: 365831 - DNA, 25 bp, Homo sapien
gagatgcctgcgattacctcgacga

SEQ ID NO: 365832 - DNA, 25 bp, Homo sapien
gcagagatgcctgcgattacctcga

SEQ ID NO: 365833 - DNA, 25 bp, Homo sapien
ggccactaggatccaaaagaacgtc

SEQ ID NO: 365834 - DNA, 25 bp, Homo sapien
gatccaaaagaacgtcactgagagg

SEQ ID NO: 365835 - DNA, 25 bp, Homo sapien
ctgacagtggtgagggcagaaaacc

SEQ ID NO: 365836 - DNA, 25 bp, Homo sapien
ggcagaaaaccaagaccctcagact

SEQ ID NO: 365837 - DNA, 25 bp, Homo sapien
ccctcagactcccttccctgtctca

SEQ ID NO: 365838 - DNA, 25 bp, Homo sapien
gaccctcagactcccttccctgtct

SEQ ID NO: 365839 - DNA, 25 bp, Homo sapien
ggaaatggcacttcgtccagaatgt

SEQ ID NO: 365840 - DNA, 25 bp, Homo sapien
tgagtaagatttcaggacccgagca

SEQ ID NO: 365841 - DNA, 25 bp, Homo sapien
tcaggacccgagcaggaaatggcac

SEQ ID NO: 365842 - DNA, 25 bp, Homo sapien
tgttggcgctgtcagacatggagcc

SEQ ID NO: 365843 - DNA, 25 bp, Homo sapien
ctcctcgctggaccgtgcagcgatg

SEQ ID NO: 365844 - DNA, 25 bp, Homo sapien
gtgcagcgatgatcaccgtggccgc

SEQ ID NO: 365845 - DNA, 25 bp, Homo sapien
gaccgtgcagcgatgatcaccgtgg

SEQ ID NO: 365846 - DNA, 25 bp, Homo sapien
tttttcttgcagtcctcctcgctgg

SEQ ID NO: 365847 - DNA, 25 bp, Homo sapien
tgtcaggcgtctgcgcgaagctcgt

SEQ ID NO: 365848 - DNA, 25 bp, Homo sapien
ctttagtcaaactcacgagctgtga

SEQ ID NO: 365849 - DNA, 25 bp, Homo sapien
tctgcgcgaagctcgtgtgaactca

SEQ ID NO: 365850 - DNA, 25 bp, Homo sapien
aaacatttgctgacaccattcgtgg

SEQ ID NO: 365851 - DNA, 25 bp, Homo sapien
gggttcaggactagtttgcatccaa

SEQ ID NO: 365852 - DNA, 25 bp, Homo sapien
gtttattgctgatgggttcaggact

SEQ ID NO: 365853 - DNA, 25 bp, Homo sapien
taaacacgtagtggtcacagcaaac

SEQ ID NO: 365854 - DNA, 25 bp, Homo sapien
caaattaaacacgtagtggtcacag

SEQ ID NO: 365855 - DNA, 25 bp, Homo sapien
cacattggcgttcctcctggagacg

SEQ ID NO: 365856 - DNA, 25 bp, Homo sapien
cggtgaagctcacaattgccgaggg

SEQ ID NO: 365857 - DNA, 25 bp, Homo sapien
ttcctcctggagacggtgaagctca

SEQ ID NO: 365858 - DNA, 25 bp, Homo sapien
gagacggtgaagctcacaattgccg

SEQ ID NO: 365859 - DNA, 25 bp, Homo sapien
tgaaaccggaatcccatgagcctgc

SEQ ID NO: 365860 - DNA, 25 bp, Homo sapien
ctggaatgaaaccggaatcccatga

SEQ ID NO: 365861 - DNA, 25 bp, Homo sapien
aaaccggaatcccatgagcctgccg

SEQ ID NO: 365862 - DNA, 25 bp, Homo sapien
gaatgaaaccggaatcccatgagcc

SEQ ID NO: 365863 - DNA, 25 bp, Homo sapien
tgagactctgaaatactctaacatt

SEQ ID NO: 365864 - DNA, 25 bp, Homo sapien
tactctaacatttgcgcttccagaa

SEQ ID NO: 365865 - DNA, 25 bp, Homo sapien
catttgcgcttccagaaggatctga

SEQ ID NO: 365866 - DNA, 25 bp, Homo sapien
tgcgcttccagaaggatctgaatca

SEQ ID NO: 365867 - DNA, 25 bp, Homo sapien
catgcaacacagtgggttggcttga

SEQ ID NO: 365868 - DNA, 25 bp, Homo sapien
aaacagtgttgccagtccatgcaac

SEQ ID NO: 365869 - DNA, 25 bp, Homo sapien
aagctgatcttaactttgggctcaa

SEQ ID NO: 365870 - DNA, 25 bp, Homo sapien
tggcttgactagaaggcccccaggt

SEQ ID NO: 365871 - DNA, 25 bp, Homo sapien
cggctcccatggtgaggataaaggc

SEQ ID NO: 365872 - DNA, 25 bp, Homo sapien
cactgggacaagggcggctcccatg

SEQ ID NO: 365873 - DNA, 25 bp, Homo sapien
agagtgggacgggtcacctgcccca

SEQ ID NO: 365874 - DNA, 25 bp, Homo sapien
taaaggccacggagaagcttccaga

SEQ ID NO: 365875 - DNA, 25 bp, Homo sapien
cactggcagaggcgtggaggaagct

SEQ ID NO: 365876 - DNA, 25 bp, Homo sapien
gcactggcagaggcgtggaggaagc

SEQ ID NO: 365877 - DNA, 25 bp, Homo sapien
ggcactggcagaggcgtggaggaag

SEQ ID NO: 365878 - DNA, 25 bp, Homo sapien
gcagcacagcgcaagtaatccatct

SEQ ID NO: 365879 - DNA, 25 bp, Homo sapien
taatccatctcagccgggaacacgt

SEQ ID NO: 365880 - DNA, 25 bp, Homo sapien
gcctgcagcacagcgcaagtaatcc

SEQ ID NO: 365881 - DNA, 25 bp, Homo sapien
tacagcgaaaaccccgaggtcacca

SEQ ID NO: 365882 - DNA, 25 bp, Homo sapien
cccctccgtctgcagaacctaattt

SEQ ID NO: 365883 - DNA, 25 bp, Homo sapien
ctggaagaagatccctccaggcagg

SEQ ID NO: 365884 - DNA, 25 bp, Homo sapien
tgcccatccccctccgtctgcagaa

SEQ ID NO: 365885 - DNA, 25 bp, Homo sapien
agatctggaagaagatccctccagg

SEQ ID NO: 365886 - DNA, 25 bp, Homo sapien
ggaccagatgctcgtggccctccaa

SEQ ID NO: 365887 - DNA, 25 bp, Homo sapien
ccagatgctcgtggccctccaaggg

SEQ ID NO: 365888 - DNA, 25 bp, Homo sapien
agggcgctgcagtccgtcaccagag

SEQ ID NO: 365889 - DNA, 25 bp, Homo sapien
gagggaccagatgctcgtggccctc

SEQ ID NO: 365890 - DNA, 25 bp, Homo sapien
cagcgtgggcatccggtcataggcc

SEQ ID NO: 365891 - DNA, 25 bp, Homo sapien
caggggggcagtctcttcgacagct

SEQ ID NO: 365892 - DNA, 25 bp, Homo sapien
tcggcttcgcgtctggggcatagct

SEQ ID NO: 365893 - DNA, 25 bp, Homo sapien
agctgcaggtcgctcggcttcgcgt

SEQ ID NO: 365894 - DNA, 25 bp, Homo sapien
ctgtgctgaatgtacagccacgtgt

SEQ ID NO: 365895 - DNA, 25 bp, Homo sapien
gctgtgctgaatgtacagccacgtg

SEQ ID NO: 365896 - DNA, 25 bp, Homo sapien
agctgtgctgaatgtacagccacgt

SEQ ID NO: 365897 - DNA, 25 bp, Homo sapien
taaacgagagattgcaaaacatgcc

SEQ ID NO: 365898 - DNA, 25 bp, Homo sapien
tgcaacacctgacaacatccatcgg

SEQ ID NO: 365899 - DNA, 25 bp, Homo sapien
taaatgcctcattgatccatctggg

SEQ ID NO: 365900 - DNA, 25 bp, Homo sapien
ttcgtccatgaacacatcacgccgg

SEQ ID NO: 365901 - DNA, 25 bp, Homo sapien
tctgccgttgggagcactggtctct

SEQ ID NO: 365902 - DNA, 25 bp, Homo sapien
ggtgggaacctccttcacacggtca

SEQ ID NO: 365903 - DNA, 25 bp, Homo sapien
tgtgtaaaccactgcctcggagctg

SEQ ID NO: 365904 - DNA, 25 bp, Homo sapien
ggagctgtcagaacccaactaggaa

SEQ ID NO: 365905 - DNA, 25 bp, Homo sapien
tgctgagttgagttttatcgacctc

SEQ ID NO: 365906 - DNA, 25 bp, Homo sapien
tatcgacctcactctgacttttcgt

SEQ ID NO: 365907 - DNA, 25 bp, Homo sapien
tgaacaaactgaatttccccagaga

SEQ ID NO: 365908 - DNA, 25 bp, Homo sapien
cattgtttctgttgccgcattgggc

SEQ ID NO: 365909 - DNA, 25 bp, Homo sapien
agaggtaggaagtgtctcatggcct

SEQ ID NO: 365910 - DNA, 25 bp, Homo sapien
ctgtggggtgttggcatcttctaat

SEQ ID NO: 365911 - DNA, 25 bp, Homo sapien
gttcagaccttcatctggcttgttt

SEQ ID NO: 365912 - DNA, 25 bp, Homo sapien
gcagaggtaggaagtgtctcatggc

SEQ ID NO: 365913 - DNA, 25 bp, Homo sapien
gctgccagacctgctgtacaccagg

SEQ ID NO: 365914 - DNA, 25 bp, Homo sapien
gacctgctgtacaccaggggctggc

SEQ ID NO: 365915 - DNA, 25 bp, Homo sapien
tgccagacctgctgtacaccagggg

SEQ ID NO: 365916 - DNA, 25 bp, Homo sapien
ccagacctgctgtacaccaggggct

SEQ ID NO: 365917 - DNA, 25 bp, Homo sapien
caagtaagttgccagacatcacaca

SEQ ID NO: 365918 - DNA, 25 bp, Homo sapien
gagtgcttagttctcccagaggtac

SEQ ID NO: 365919 - DNA, 25 bp, Homo sapien
gacatgcatctcgtttctcctgaag

SEQ ID NO: 365920 - DNA, 25 bp, Homo sapien
ccagaggtacagagattacgaaggc

SEQ ID NO: 365921 - DNA, 25 bp, Homo sapien
ggctgtggcgagacagcccaactcc

SEQ ID NO: 365922 - DNA, 25 bp, Homo sapien
tcgggtcaaaggtcaacgtgcactt

SEQ ID NO: 365923 - DNA, 25 bp, Homo sapien
ttattttactaagactgctgtaccg

SEQ ID NO: 365924 - DNA, 25 bp, Homo sapien
tctccttgtcgcctgacagacattt

SEQ ID NO: 365925 - DNA, 25 bp, Homo sapien
ctaacggatgggcttttgcgcacaa

SEQ ID NO: 365926 - DNA, 25 bp, Homo sapien
aattctcagaggcttcgtctgcaca

SEQ ID NO: 365927 - DNA, 25 bp, Homo sapien
ggcttttgcgcacaacagatgtcct

SEQ ID NO: 365928 - DNA, 25 bp, Homo sapien
ttccaaagccagatatcccttttta

SEQ ID NO: 365929 - DNA, 25 bp, Homo sapien
gctctgggcccagccataaatgtct

SEQ ID NO: 365930 - DNA, 25 bp, Homo sapien
agccataaatgtctgagagcacagc

SEQ ID NO: 365931 - DNA, 25 bp, Homo sapien
ccagccataaatgtctgagagcaca

SEQ ID NO: 365932 - DNA, 25 bp, Homo sapien
tgggcccagccataaatgtctgaga

SEQ ID NO: 365933 - DNA, 25 bp, Homo sapien
tcacaacagcttccggtgggttccg

SEQ ID NO: 365934 - DNA, 25 bp, Homo sapien
tcgggttgcatcgtggagctttcac

SEQ ID NO: 365935 - DNA, 25 bp, Homo sapien
ccggtcgggttgcatcgtggagctt

SEQ ID NO: 365936 - DNA, 25 bp, Homo sapien
ggttccggtcgggttgcatcgtgga

SEQ ID NO: 365937 - DNA, 25 bp, Homo sapien
aggtctcgccgatgctctgtgggtc

SEQ ID NO: 365938 - DNA, 25 bp, Homo sapien
tcaccaggatggtctatgttggcca

SEQ ID NO: 365939 - DNA, 25 bp, Homo sapien
caggaagagccacatggtgcagcag

SEQ ID NO: 365940 - DNA, 25 bp, Homo sapien
cctggcattccgtggctgagaacat

SEQ ID NO: 365941 - DNA, 25 bp, Homo sapien
ccggccaggctttgtgttttcaaag

SEQ ID NO: 365942 - DNA, 25 bp, Homo sapien
gcgcccggccaggctttgtgttttc

SEQ ID NO: 365943 - DNA, 25 bp, Homo sapien
gcccggccaggctttgtgttttcaa

SEQ ID NO: 365944 - DNA, 25 bp, Homo sapien
ccgcgcccggccaggctttgtgttt

SEQ ID NO: 365945 - DNA, 25 bp, Homo sapien
taatgagatcttatagaaatgtccc

SEQ ID NO: 365946 - DNA, 25 bp, Homo sapien
ttctccagatgaggcaagtcaccaa

SEQ ID NO: 365947 - DNA, 25 bp, Homo sapien
tctgtgggccgtcttctaaagggca

SEQ ID NO: 365948 - DNA, 25 bp, Homo sapien
aatgtccctaaacgtttggcgcctg

SEQ ID NO: 365949 - DNA, 25 bp, Homo sapien
tggtctgaccctctgcacgctaggg

SEQ ID NO: 365950 - DNA, 25 bp, Homo sapien
gaacgagactgcctcataaaggcct

SEQ ID NO: 365951 - DNA, 25 bp, Homo sapien
ggagctacctttgagaagtgcctgt

SEQ ID NO: 365952 - DNA, 25 bp, Homo sapien
tctctctgcagaacgggctcatgtc

SEQ ID NO: 365953 - DNA, 25 bp, Homo sapien
caccagccttaaatccaaagggaga

SEQ ID NO: 365954 - DNA, 25 bp, Homo sapien
gggctcgcgtgcagccaaacatcag

SEQ ID NO: 365955 - DNA, 25 bp, Homo sapien
cctctctgggcagacaatgtgtgca

SEQ ID NO: 365956 - DNA, 25 bp, Homo sapien
gagagaattcgtgttcttgggtctg

SEQ ID NO: 365957 - DNA, 25 bp, Homo sapien
gaatcaaatcaggtgtgcgtcagga

SEQ ID NO: 365958 - DNA, 25 bp, Homo sapien
cagaagagacagagtcgggtccctc

SEQ ID NO: 365959 - DNA, 25 bp, Homo sapien
catctctggttgtgtctgtgccgac

SEQ ID NO: 365960 - DNA, 25 bp, Homo sapien
tgccgactcggtgttgaatcaaatc

SEQ ID NO: 365961 - DNA, 25 bp, Homo sapien
tatcagtttgtagcaatcacactag

SEQ ID NO: 365962 - DNA, 25 bp, Homo sapien
ctagtgtgattgctacaaactgata

SEQ ID NO: 365963 - DNA, 25 bp, Homo sapien
gggtcacgcagagtctcggaagccc

SEQ ID NO: 365964 - DNA, 25 bp, Homo sapien
gtctcggaggcgttcccatctgtca

SEQ ID NO: 365965 - DNA, 25 bp, Homo sapien
gcgccgctgccggaataaagggaaa

SEQ ID NO: 365966 - DNA, 25 bp, Homo sapien
gaagcttctggatgtagctcctgta

SEQ ID NO: 365967 - DNA, 25 bp, Homo sapien
tttgacctttactcaggccctgcct

SEQ ID NO: 365968 - DNA, 25 bp, Homo sapien
cactgctttcagacctgagagctgc

SEQ ID NO: 365969 - DNA, 25 bp, Homo sapien
caagattgaggctaacgtctgaagt

SEQ ID NO: 365970 - DNA, 25 bp, Homo sapien
tgagagtaatctgtcgctggaagac

SEQ ID NO: 365971 - DNA, 25 bp, Homo sapien
tatccccaagagcaggatctcaaga

SEQ ID NO: 365972 - DNA, 25 bp, Homo sapien
ccccaagagcaggatctcaagattt

SEQ ID NO: 365973 - DNA, 25 bp, Homo sapien
gatttgtataccgatattcatggcc

SEQ ID NO: 365974 - DNA, 25 bp, Homo sapien
aaggcagaacaagtgtctatcagca

SEQ ID NO: 365975 - DNA, 25 bp, Homo sapien
gcacagaggagctcattcctcagct

SEQ ID NO: 365976 - DNA, 25 bp, Homo sapien
tgcaaaggctgttgtgtcccatggg

SEQ ID NO: 365977 - DNA, 25 bp, Homo sapien
ttataaatggctaagatgggccggg

SEQ ID NO: 365978 - DNA, 25 bp, Homo sapien
caagaattagcagagcttggcggca

SEQ ID NO: 365979 - DNA, 25 bp, Homo sapien
gggcctttcggcctgtctacacgca

SEQ ID NO: 365980 - DNA, 25 bp, Homo sapien
aaggtcctacggtcaagcatccggg

SEQ ID NO: 365981 - DNA, 25 bp, Homo sapien
gcgaagccatgttccacctgggagt

SEQ ID NO: 365982 - DNA, 25 bp, Homo sapien
catccgggagtttctatgcagcgaa

SEQ ID NO: 365983 - DNA, 25 bp, Homo sapien
ccccagccatcagtttttgatgtca

SEQ ID NO: 365984 - DNA, 25 bp, Homo sapien
cctgaacacctgaatgtagttgtct

SEQ ID NO: 365985 - DNA, 25 bp, Homo sapien
ggcgtctagcacttcctcctgaaca

SEQ ID NO: 365986 - DNA, 25 bp, Homo sapien
ttgccacctggcgtctagcacttcc

SEQ ID NO: 365987 - DNA, 25 bp, Homo sapien
ggctgctcatgccagcgacagcgtg

SEQ ID NO: 365988 - DNA, 25 bp, Homo sapien
gagtgcagctgctcgactatgtcat

SEQ ID NO: 365989 - DNA, 25 bp, Homo sapien
ggaggaacgacattcgagtgcagct

SEQ ID NO: 365990 - DNA, 25 bp, Homo sapien
gacagcgtgcagagaaatgctgcct

SEQ ID NO: 365991 - DNA, 25 bp, Homo sapien
actgcctcccaggagcgtcggtggc

SEQ ID NO: 365992 - DNA, 25 bp, Homo sapien
tgctccggcatagacatgcgtgggt

SEQ ID NO: 365993 - DNA, 25 bp, Homo sapien
gcagggagacggcactgactgcctc

SEQ ID NO: 365994 - DNA, 25 bp, Homo sapien
ttgagaagtctcaggccacccctgg

SEQ ID NO: 365995 - DNA, 25 bp, Homo sapien
ctggagaccatgcatctgaccggtg

SEQ ID NO: 365996 - DNA, 25 bp, Homo sapien
acggggcgctggtgtccaagctcct

SEQ ID NO: 365997 - DNA, 25 bp, Homo sapien
ccatgcatctgaccggtgagtgacc

SEQ ID NO: 365998 - DNA, 25 bp, Homo sapien
tgaccggtgagtgacccagccgtgc

SEQ ID NO: 365999 - DNA, 25 bp, Homo sapien
gacaggccgcagtttgcttatccac

SEQ ID NO: 366000 - DNA, 25 bp, Homo sapien
tgactcactgggttgcactagctag

SEQ ID NO: 366001 - DNA, 25 bp, Homo sapien
taaggtcctcaatgttcacccaggt

SEQ ID NO: 366002 - DNA, 25 bp, Homo sapien
gaagcatcccgttgtgtggacaggc

SEQ ID NO: 366003 - DNA, 25 bp, Homo sapien
cttaaattgtggagggcaccgcaca

SEQ ID NO: 366004 - DNA, 25 bp, Homo sapien
gctctaaacccttcatgtaagtgga

SEQ ID NO: 366005 - DNA, 25 bp, Homo sapien
acatcacagctgacgcaggagcagt

SEQ ID NO: 366006 - DNA, 25 bp, Homo sapien
tgagttaggaggtatgcgcacatct

SEQ ID NO: 366007 - DNA, 25 bp, Homo sapien
ggaagtgctaacagcagtgcccatc

SEQ ID NO: 366008 - DNA, 25 bp, Homo sapien
cccacaagcattaaactcgggaggt

SEQ ID NO: 366009 - DNA, 25 bp, Homo sapien
cagtgcccatcccacaagcattaaa

SEQ ID NO: 366010 - DNA, 25 bp, Homo sapien
gaagtgctaacagcagtgcccatcc

SEQ ID NO: 366011 - DNA, 25 bp, Homo sapien
gcccactggggtccatccctgccag

SEQ ID NO: 366012 - DNA, 25 bp, Homo sapien
actggggtccatccctgccagtggg

SEQ ID NO: 366013 - DNA, 25 bp, Homo sapien
cagggacctcggggaccgggctgct

SEQ ID NO: 366014 - DNA, 25 bp, Homo sapien
gtccatccctgccagtggggttcca

SEQ ID NO: 366015 - DNA, 25 bp, Homo sapien
tgaggaactacatcgcgcagaatgc

SEQ ID NO: 366016 - DNA, 25 bp, Homo sapien
tggcgcagtcaaacccgcagctgtt

SEQ ID NO: 366017 - DNA, 25 bp, Homo sapien
caacaacccgaagtacgtgctgagg

SEQ ID NO: 366018 - DNA, 25 bp, Homo sapien
cgggtcgcgtgctggaaaaagtcca

SEQ ID NO: 366019 - DNA, 25 bp, Homo sapien
caactccctcgagtctgtctctgtg

SEQ ID NO: 366020 - DNA, 25 bp, Homo sapien
cacacccgtctttccatgatggcag

SEQ ID NO: 366021 - DNA, 25 bp, Homo sapien
catgatcttcgtaacggcctcggca

SEQ ID NO: 366022 - DNA, 25 bp, Homo sapien
agagacatccagtcaggacctgacc

SEQ ID NO: 366023 - DNA, 25 bp, Homo sapien
tattgtgcacgtcccccgcagagca

SEQ ID NO: 366024 - DNA, 25 bp, Homo sapien
acctttattgtgcacgtcccccgca

SEQ ID NO: 366025 - DNA, 25 bp, Homo sapien
ctttattgtgcacgtcccccgcaga

SEQ ID NO: 366026 - DNA, 25 bp, Homo sapien
tttattgtgcacgtcccccgcagag

SEQ ID NO: 366027 - DNA, 25 bp, Homo sapien
tggggctggtagccgcggttcacca

SEQ ID NO: 366028 - DNA, 25 bp, Homo sapien
agttgatgcgcagcagaaagtcctc

SEQ ID NO: 366029 - DNA, 25 bp, Homo sapien
aagttgatgcgcagcagaaagtcct

SEQ ID NO: 366030 - DNA, 25 bp, Homo sapien
aaagtgggagtagtacttgaaggtg

SEQ ID NO: 366031 - DNA, 25 bp, Homo sapien
catgagtgcaaagttggggtgctct

SEQ ID NO: 366032 - DNA, 25 bp, Homo sapien
tagtacttgaaggtgttgtaggact

SEQ ID NO: 366033 - DNA, 25 bp, Homo sapien
gggagtagtacttgaaggtgttgta

SEQ ID NO: 366034 - DNA, 25 bp, Homo sapien
gatgagctggctgcggaacttgagc

SEQ ID NO: 366035 - DNA, 25 bp, Homo sapien
gctgtggatgacgttcatgacgggc

SEQ ID NO: 366036 - DNA, 25 bp, Homo sapien
tggatgacgttcatgacgggcgccg

SEQ ID NO: 366037 - DNA, 25 bp, Homo sapien
gagatgagctggctgcggaacttga

SEQ ID NO: 366038 - DNA, 25 bp, Homo sapien
tgaccacagggacgcagccgctgcc

SEQ ID NO: 366039 - DNA, 25 bp, Homo sapien
gggtgggctgagccgtgaccacagg

SEQ ID NO: 366040 - DNA, 25 bp, Homo sapien
gtgaccacagggacgcagccgctgc

SEQ ID NO: 366041 - DNA, 25 bp, Homo sapien
tgggctgagccgtgaccacagggac

SEQ ID NO: 366042 - DNA, 25 bp, Homo sapien
tggccctgaactcgcaccaggtgac

SEQ ID NO: 366043 - DNA, 25 bp, Homo sapien
gaccttcacgaaatgctgcatctcg

SEQ ID NO: 366044 - DNA, 25 bp, Homo sapien
caggatctggttggcgatgtagccc

SEQ ID NO: 366045 - DNA, 25 bp, Homo sapien
tgaagacggccttgtgcaggtactc

SEQ ID NO: 366046 - DNA, 25 bp, Homo sapien
ctgcacagagccggccatgtggctc

SEQ ID NO: 366047 - DNA, 25 bp, Homo sapien
tgcacagagccggccatgtggctca

SEQ ID NO: 366048 - DNA, 25 bp, Homo sapien
gagcgcccacatcatgagcttcagc

SEQ ID NO: 366049 - DNA, 25 bp, Homo sapien
gagaagacgccgctgtacttgctca

SEQ ID NO: 366050 - DNA, 25 bp, Homo sapien
ggaagcagacgtccttgagcgccca

SEQ ID NO: 366051 - DNA, 25 bp, Homo sapien
tgtacttgctcacgcagccctcggt

SEQ ID NO: 366052 - DNA, 25 bp, Homo sapien
gttgagcagctctccgggcgtttgc

SEQ ID NO: 366053 - DNA, 25 bp, Homo sapien
cagctcagcacatccggggcgttgg

SEQ ID NO: 366054 - DNA, 25 bp, Homo sapien
gagttcagcaccagcgggttgagca

SEQ ID NO: 366055 - DNA, 25 bp, Homo sapien
acctcgggcaggtacttgagagcga

SEQ ID NO: 366056 - DNA, 25 bp, Homo sapien
gaagtgccgcagtgcctcatagtgc

SEQ ID NO: 366057 - DNA, 25 bp, Homo sapien
gggactgggcgaactcgccgtcctc

SEQ ID NO: 366058 - DNA, 25 bp, Homo sapien
cagctccacgaagaagtagtcgaca

SEQ ID NO: 366059 - DNA, 25 bp, Homo sapien
tcatagtgcgcctccaggtgcagct

SEQ ID NO: 366060 - DNA, 25 bp, Homo sapien
gcacagcagtctcatcagcggcaga

SEQ ID NO: 366061 - DNA, 25 bp, Homo sapien
gtcagcaactcgctcagctgcacag

SEQ ID NO: 366062 - DNA, 25 bp, Homo sapien
gggcggccagcggtgccgtgatgga

SEQ ID NO: 366063 - DNA, 25 bp, Homo sapien
atggagcgcttcatgagcacgggca

SEQ ID NO: 366064 - DNA, 25 bp, Homo sapien
agcacggggcgcaaaagatgagcaa

SEQ ID NO: 366065 - DNA, 25 bp, Homo sapien
gcacggggcgcaaaagatgagcaat

SEQ ID NO: 366066 - DNA, 25 bp, Homo sapien
aagcacggggcgcaaaagatgagca

SEQ ID NO: 366067 - DNA, 25 bp, Homo sapien
cacggggcgcaaaagatgagcaatg

SEQ ID NO: 366068 - DNA, 25 bp, Homo sapien
cgggagatggagcacgcacgtgctg

SEQ ID NO: 366069 - DNA, 25 bp, Homo sapien
tgcgggagatggagcacgcacgtgc

SEQ ID NO: 366070 - DNA, 25 bp, Homo sapien
cccatccacaggagatggagcacgt

SEQ ID NO: 366071 - DNA, 25 bp, Homo sapien
ctgcgggagatggagcacgcacgtg

SEQ ID NO: 366072 - DNA, 25 bp, Homo sapien
taccgctccaagtggtactgccctg

SEQ ID NO: 366073 - DNA, 25 bp, Homo sapien
acatggactcgtaactgtccgggta

SEQ ID NO: 366074 - DNA, 25 bp, Homo sapien
catggactcgtaactgtccgggtac

SEQ ID NO: 366075 - DNA, 25 bp, Homo sapien
actgtccgggtaccgctccaagtgg

SEQ ID NO: 366076 - DNA, 25 bp, Homo sapien
agaggccaatttggagagaggtcct

SEQ ID NO: 366077 - DNA, 25 bp, Homo sapien
gtcctcagtgtccccgctcctccca

SEQ ID NO: 366078 - DNA, 25 bp, Homo sapien
ctgtgagttgagaggccaatttgga

SEQ ID NO: 366079 - DNA, 25 bp, Homo sapien
ggtcctcagtgtccccgctcctccc

SEQ ID NO: 366080 - DNA, 25 bp, Homo sapien
acacaagtggacacgagggcatcag

SEQ ID NO: 366081 - DNA, 25 bp, Homo sapien
gacacaagtggacacgagggcatca

SEQ ID NO: 366082 - DNA, 25 bp, Homo sapien
cacaagtggacacgagggcatcagg

SEQ ID NO: 366083 - DNA, 25 bp, Homo sapien
acaaggaggcctgaggggaacttca

SEQ ID NO: 366084 - DNA, 25 bp, Homo sapien
ggcgggtacagagccgagccggccc

SEQ ID NO: 366085 - DNA, 25 bp, Homo sapien
gggaacttcacatgccaccaacccc

SEQ ID NO: 366086 - DNA, 25 bp, Homo sapien
gggtacagagccgagccggccctgg

SEQ ID NO: 366087 - DNA, 25 bp, Homo sapien
ctgtgcgtcccacagtcccactcct

SEQ ID NO: 366088 - DNA, 25 bp, Homo sapien
tgaccaccagccaccctactctgac

SEQ ID NO: 366089 - DNA, 25 bp, Homo sapien
ctcccaggctctgtgcgtcccacag

SEQ ID NO: 366090 - DNA, 25 bp, Homo sapien
aggctctgtgcgtcccacagtccca

SEQ ID NO: 366091 - DNA, 25 bp, Homo sapien
tgtctcccggggtgttgggccacca

SEQ ID NO: 366092 - DNA, 25 bp, Homo sapien
cactgtctcccggggtgttgggcca

SEQ ID NO: 366093 - DNA, 25 bp, Homo sapien
tctcccggggtgttgggccaccatg

SEQ ID NO: 366094 - DNA, 25 bp, Homo sapien
gagacactgtctcccggggtgttgg

SEQ ID NO: 366095 - DNA, 25 bp, Homo sapien
ggtgtgttgggctcagcttctggtg

SEQ ID NO: 366096 - DNA, 25 bp, Homo sapien
ccatgggtgttgcaccgtgaccgga

SEQ ID NO: 366097 - DNA, 25 bp, Homo sapien
ctgagcgctgactgggacgtgtggc

SEQ ID NO: 366098 - DNA, 25 bp, Homo sapien
gtggaaaccacatccgacacaggct

SEQ ID NO: 366099 - DNA, 25 bp, Homo sapien
gtgtcagacacatgtccgtgggtgt

SEQ ID NO: 366100 - DNA, 25 bp, Homo sapien
gaccctgatgctggcgtcagacacg

SEQ ID NO: 366101 - DNA, 25 bp, Homo sapien
ccgtggccgggtgggagctatttca

SEQ ID NO: 366102 - DNA, 25 bp, Homo sapien
gatgctggcattggatacgtgtccg

SEQ ID NO: 366103 - DNA, 25 bp, Homo sapien
ctgtgggaagaccaccccctgacac

SEQ ID NO: 366104 - DNA, 25 bp, Homo sapien
tgcccaaagagccgctctgtgggct

SEQ ID NO: 366105 - DNA, 25 bp, Homo sapien
ccaaagagccgctctgtgggctggc

SEQ ID NO: 366106 - DNA, 25 bp, Homo sapien
ctgcccaaagagccgctctgtgggc

SEQ ID NO: 366107 - DNA, 25 bp, Homo sapien
cccaaagagccgctctgtgggctgg

SEQ ID NO: 366108 - DNA, 25 bp, Homo sapien
ccaagttaatggtctgcagcgccac

SEQ ID NO: 366109 - DNA, 25 bp, Homo sapien
tactaaagtcgtactcctgtggcct

SEQ ID NO: 366110 - DNA, 25 bp, Homo sapien
gctgctgcgggtgcctccccaggag

SEQ ID NO: 366111 - DNA, 25 bp, Homo sapien
gcgaggcggagccacaggcatccat

SEQ ID NO: 366112 - DNA, 25 bp, Homo sapien
gaagtctccaatgctgaggctgtca

SEQ ID NO: 366113 - DNA, 25 bp, Homo sapien
atgccagtctgcacggacggctcag

SEQ ID NO: 366114 - DNA, 25 bp, Homo sapien
cactgctagaggcttaaggggctgt

SEQ ID NO: 366115 - DNA, 25 bp, Homo sapien
ggaccatgccagtctgcacggacgg

SEQ ID NO: 366116 - DNA, 25 bp, Homo sapien
tctgggtgctcagggcccggagacg

SEQ ID NO: 366117 - DNA, 25 bp, Homo sapien
tggcctccctctgggtgctcagggc

SEQ ID NO: 366118 - DNA, 25 bp, Homo sapien
ggtgctcagggcccggagacgtgac

SEQ ID NO: 366119 - DNA, 25 bp, Homo sapien
cctccctctgggtgctcagggcccg

SEQ ID NO: 366120 - DNA, 25 bp, Homo sapien
tgcacgctcaagaggacgtctggcg

SEQ ID NO: 366121 - DNA, 25 bp, Homo sapien
tcaagaggacgtctggcggctcctg

SEQ ID NO: 366122 - DNA, 25 bp, Homo sapien
gggtgcacgctcaagaggacgtctg

SEQ ID NO: 366123 - DNA, 25 bp, Homo sapien
cgctcaagaggacgtctggcggctc

SEQ ID NO: 366124 - DNA, 25 bp, Homo sapien
cgtgcactctccagtcggtgcctct

SEQ ID NO: 366125 - DNA, 25 bp, Homo sapien
agtgccttctgctcccgacgagctg

SEQ ID NO: 366126 - DNA, 25 bp, Homo sapien
cttctaagagaaaacgaagccgtgc

SEQ ID NO: 366127 - DNA, 25 bp, Homo sapien
gagagcttgctgtagtggtcgacca

SEQ ID NO: 366128 - DNA, 25 bp, Homo sapien
gaaggatccagcactactcagcctg

SEQ ID NO: 366129 - DNA, 25 bp, Homo sapien
taaggttgggacctacagcatcgcg

SEQ ID NO: 366130 - DNA, 25 bp, Homo sapien
caggttgataacagcacagggagac

SEQ ID NO: 366131 - DNA, 25 bp, Homo sapien
gatgctgtgctggacaaatgccctg

SEQ ID NO: 366132 - DNA, 25 bp, Homo sapien
cgggcgtagctgaagtcatcatcca

SEQ ID NO: 366133 - DNA, 25 bp, Homo sapien
ccagggacttcagccttctctccct

SEQ ID NO: 366134 - DNA, 25 bp, Homo sapien
tccctgtctcggagttcacgggcgt

SEQ ID NO: 366135 - DNA, 25 bp, Homo sapien
gagttcacgggcgtagctgaagtca

SEQ ID NO: 366136 - DNA, 25 bp, Homo sapien
ccaaggccatccgttctgacatctg

SEQ ID NO: 366137 - DNA, 25 bp, Homo sapien
ggcatccaaggccatccgttctgac

SEQ ID NO: 366138 - DNA, 25 bp, Homo sapien
cagcctctgaaactgctcacgcttc

SEQ ID NO: 366139 - DNA, 25 bp, Homo sapien
gccatccgttctgacatctgccggt

SEQ ID NO: 366140 - DNA, 25 bp, Homo sapien
ctacattgggacagtaaggggcgca

SEQ ID NO: 366141 - DNA, 25 bp, Homo sapien
tgcttcccgggcatgagcgattaat

SEQ ID NO: 366142 - DNA, 25 bp, Homo sapien
ccgggcatgagcgattaattcttgt

SEQ ID NO: 366143 - DNA, 25 bp, Homo sapien
cttgttttgcaatttccatacgtaa

SEQ ID NO: 366144 - DNA, 25 bp, Homo sapien
gagcgattaattcttgttttgcaat

SEQ ID NO: 366145 - DNA, 25 bp, Homo sapien
atgcgcccaacgtagacggcacagt

SEQ ID NO: 366146 - DNA, 25 bp, Homo sapien
tctccatgcgcccaacgtagacggc

SEQ ID NO: 366147 - DNA, 25 bp, Homo sapien
tagacggcacagtccttctcaatct

SEQ ID NO: 366148 - DNA, 25 bp, Homo sapien
tgacagagctgtggcgggccaccct

SEQ ID NO: 366149 - DNA, 25 bp, Homo sapien
gggacagggacgtcggaccaacaga

SEQ ID NO: 366150 - DNA, 25 bp, Homo sapien
agggagaaaatcaccgagatccggg

SEQ ID NO: 366151 - DNA, 25 bp, Homo sapien
ggacagggacgtcggaccaacagag

SEQ ID NO: 366152 - DNA, 25 bp, Homo sapien
aaatcaccgagatccgggggacagg

SEQ ID NO: 366153 - DNA, 25 bp, Homo sapien
caatgtgcttcagaaacacgggaac

SEQ ID NO: 366154 - DNA, 25 bp, Homo sapien
gatgagcacgtagccatgtgtccag

SEQ ID NO: 366155 - DNA, 25 bp, Homo sapien
tcagcaggttaatggtctttccgca

SEQ ID NO: 366156 - DNA, 25 bp, Homo sapien
tctttccgcagacgtatatgtcgtg

SEQ ID NO: 366157 - DNA, 25 bp, Homo sapien
taagcgtctctgaacaccccgctgt

SEQ ID NO: 366158 - DNA, 25 bp, Homo sapien
tactcgtggttcacctgaatcatga

SEQ ID NO: 366159 - DNA, 25 bp, Homo sapien
ccgctgtacacccagtcgtggatga

SEQ ID NO: 366160 - DNA, 25 bp, Homo sapien
tgaatcatgaactcgccataagcgt

SEQ ID NO: 366161 - DNA, 25 bp, Homo sapien
cagagcctcctggtagaggtaggac

SEQ ID NO: 366162 - DNA, 25 bp, Homo sapien
gacagcagtacagggtagtgctcgt

SEQ ID NO: 366163 - DNA, 25 bp, Homo sapien
ctcgttgctgcagttgtgcagagcc

SEQ ID NO: 366164 - DNA, 25 bp, Homo sapien
tacagggtagtgctcgttgctgcag

SEQ ID NO: 366165 - DNA, 25 bp, Homo sapien
cagcgccaacgccacagagctcggc

SEQ ID NO: 366166 - DNA, 25 bp, Homo sapien
ggagcacagcgccaacgccacagag

SEQ ID NO: 366167 - DNA, 25 bp, Homo sapien
cccgggagcacagcgccaacgccac

SEQ ID NO: 366168 - DNA, 25 bp, Homo sapien
gcgccaacgccacagagctcggcca

SEQ ID NO: 366169 - DNA, 25 bp, Homo sapien
gtgtgtaccggacgccacatctcca

SEQ ID NO: 366170 - DNA, 25 bp, Homo sapien
ttgtgtgtaccggacgccacatctc

SEQ ID NO: 366171 - DNA, 25 bp, Homo sapien
gtaccggacgccacatctccaggga

SEQ ID NO: 366172 - DNA, 25 bp, Homo sapien
cagcttgtgtgtaccggacgccaca

SEQ ID NO: 366173 - DNA, 25 bp, Homo sapien
ggtacctcctcaggccactggtgaa

SEQ ID NO: 366174 - DNA, 25 bp, Homo sapien
tggaaaggacgcaggcccggtaata

SEQ ID NO: 366175 - DNA, 25 bp, Homo sapien
tgagctgccggccaagtttcttgaa

SEQ ID NO: 366176 - DNA, 25 bp, Homo sapien
tcttgaagagaaaaccaatggtgag

SEQ ID NO: 366177 - DNA, 25 bp, Homo sapien
cagagagaaatgactcaggcgcgtg

SEQ ID NO: 366178 - DNA, 25 bp, Homo sapien
aggcgcgtgtagcaggtcccatact

SEQ ID NO: 366179 - DNA, 25 bp, Homo sapien
gccacttccgagagcaggctgctga

SEQ ID NO: 366180 - DNA, 25 bp, Homo sapien
cccttgctgtacaaagagtccagga

SEQ ID NO: 366181 - DNA, 25 bp, Homo sapien
gcagaacttgtcgaaagcgtccctt

SEQ ID NO: 366182 - DNA, 25 bp, Homo sapien
gtggcagacacgaccccaatcaaga

SEQ ID NO: 366183 - DNA, 25 bp, Homo sapien
tggcagagcgaaaacgtggcagaca

SEQ ID NO: 366184 - DNA, 25 bp, Homo sapien
acgttcagcacgtctttcaccagct

SEQ ID NO: 366185 - DNA, 25 bp, Homo sapien
tgctgtgaataccagcacgatcgat

SEQ ID NO: 366186 - DNA, 25 bp, Homo sapien
gctgtgaataccagcacgatcgatt

SEQ ID NO: 366187 - DNA, 25 bp, Homo sapien
tgctgctgtgaataccagcacgatc

SEQ ID NO: 366188 - DNA, 25 bp, Homo sapien
cacccagccttttgtggatgctgct

SEQ ID NO: 366189 - DNA, 25 bp, Homo sapien
ggcatggccgggggtatccgactgg

SEQ ID NO: 366190 - DNA, 25 bp, Homo sapien
tgggcatggccgggggtatccgact

SEQ ID NO: 366191 - DNA, 25 bp, Homo sapien
tggccgggggtatccgactggccca

SEQ ID NO: 366192 - DNA, 25 bp, Homo sapien
catggccgggggtatccgactggcc

SEQ ID NO: 366193 - DNA, 25 bp, Homo sapien
gcatccacatccctgttcatggcag

SEQ ID NO: 366194 - DNA, 25 bp, Homo sapien
tgtccatggcagcatcatccatacc

SEQ ID NO: 366195 - DNA, 25 bp, Homo sapien
atccaggtccactgcagcatcatcc

SEQ ID NO: 366196 - DNA, 25 bp, Homo sapien
catccataccccatccatggcagca

SEQ ID NO: 366197 - DNA, 25 bp, Homo sapien
gtccacagcatcatcatccacaccc

SEQ ID NO: 366198 - DNA, 25 bp, Homo sapien
ctgtccacagcatcatcatccacac

SEQ ID NO: 366199 - DNA, 25 bp, Homo sapien
tgtccacagcatcatcatccacacc

SEQ ID NO: 366200 - DNA, 25 bp, Homo sapien
ccgtccacagcagcatctacaccca

SEQ ID NO: 366201 - DNA, 25 bp, Homo sapien
acggcagcatcatccacacgcccgt

SEQ ID NO: 366202 - DNA, 25 bp, Homo sapien
gcatcatccacacgcccgtccacag

SEQ ID NO: 366203 - DNA, 25 bp, Homo sapien
tccacagcagcatctacacccaggt

SEQ ID NO: 366204 - DNA, 25 bp, Homo sapien
tgtccacggaagcatcacccacacc

SEQ ID NO: 366205 - DNA, 25 bp, Homo sapien
gtccacggaagcatcacccacaccc

SEQ ID NO: 366206 - DNA, 25 bp, Homo sapien
ctgtccacggaagcatcacccacac

SEQ ID NO: 366207 - DNA, 25 bp, Homo sapien
gcatcatccacatccaggtccacag

SEQ ID NO: 366208 - DNA, 25 bp, Homo sapien
cacagcagcatcatccacacccagg

SEQ ID NO: 366209 - DNA, 25 bp, Homo sapien
aggtccacagcagcatcgcccacac

SEQ ID NO: 366210 - DNA, 25 bp, Homo sapien
cacacccaagtccacggcagcatca

SEQ ID NO: 366211 - DNA, 25 bp, Homo sapien
tccacagcagcatcatccacacccc

SEQ ID NO: 366212 - DNA, 25 bp, Homo sapien
atccacagcagcatcatccacaccc

SEQ ID NO: 366213 - DNA, 25 bp, Homo sapien
ctatccacagcagcatcatccacac

SEQ ID NO: 366214 - DNA, 25 bp, Homo sapien
tatccacagcagcatcatccacacc

SEQ ID NO: 366215 - DNA, 25 bp, Homo sapien
cacagcagcatctacacccaggtcc

SEQ ID NO: 366216 - DNA, 25 bp, Homo sapien
ccccgtccacagcagcatctacacc

SEQ ID NO: 366217 - DNA, 25 bp, Homo sapien
tccacagcagcatctacacccaggt

SEQ ID NO: 366218 - DNA, 25 bp, Homo sapien
caggtccacagcagcatcatccaca

SEQ ID NO: 366219 - DNA, 25 bp, Homo sapien
agcatccacatccaggtccacagca

SEQ ID NO: 366220 - DNA, 25 bp, Homo sapien
agcagcatccacatccaggtccaca

SEQ ID NO: 366221 - DNA, 25 bp, Homo sapien
gcatccacatccaggtccacagcag

SEQ ID NO: 366222 - DNA, 25 bp, Homo sapien
caggtccacagcagcatcatccaca

SEQ ID NO: 366223 - DNA, 25 bp, Homo sapien
cacccaggtccaccgcagcatcatc

SEQ ID NO: 366224 - DNA, 25 bp, Homo sapien
caggtccaccgcagcatcatccaca

SEQ ID NO: 366225 - DNA, 25 bp, Homo sapien
ggtccacggcagcatcgcccacact

SEQ ID NO: 366226 - DNA, 25 bp, Homo sapien
ccgtccatggcagcatccacaccca

SEQ ID NO: 366227 - DNA, 25 bp, Homo sapien
acatcatccacaaccctatccactg

SEQ ID NO: 366228 - DNA, 25 bp, Homo sapien
tacacccctattcacggcagcatca

SEQ ID NO: 366229 - DNA, 25 bp, Homo sapien
cagtccatggcagcatctacacccc

SEQ ID NO: 366230 - DNA, 25 bp, Homo sapien
gaacatcatccacaaccctatccac

SEQ ID NO: 366231 - DNA, 25 bp, Homo sapien
ggccgtgagcagtcggacaatggtg

SEQ ID NO: 366232 - DNA, 25 bp, Homo sapien
tgagcagtcggacaatggtggttct

SEQ ID NO: 366233 - DNA, 25 bp, Homo sapien
gcagtcggacaatggtggttctcag

SEQ ID NO: 366234 - DNA, 25 bp, Homo sapien
gggagggccgtgagcagtcggacaa

SEQ ID NO: 366235 - DNA, 25 bp, Homo sapien
cgcatccagagagcaagctgctggt

SEQ ID NO: 366236 - DNA, 25 bp, Homo sapien
cgtgttcatcagcaccccaattcct

SEQ ID NO: 366237 - DNA, 25 bp, Homo sapien
ctcctccagacacggacggaaaagg

SEQ ID NO: 366238 - DNA, 25 bp, Homo sapien
atcacccagactgcccctcccaact

SEQ ID NO: 366239 - DNA, 25 bp, Homo sapien
cttctcatcacccagactgcccctc

SEQ ID NO: 366240 - DNA, 25 bp, Homo sapien
cctcataggtaagtgcggcttccca

SEQ ID NO: 366241 - DNA, 25 bp, Homo sapien
ggcttcccacaggtccacgtctggg

SEQ ID NO: 366242 - DNA, 25 bp, Homo sapien
cacgctgggctcagactgggaatca

SEQ ID NO: 366243 - DNA, 25 bp, Homo sapien
ttggacgctgactggaatccttcgt

SEQ ID NO: 366244 - DNA, 25 bp, Homo sapien
gaagtagtctcgttttctcggcaga

SEQ ID NO: 366245 - DNA, 25 bp, Homo sapien
tccatgtcataagtgcggctgtgca

SEQ ID NO: 366246 - DNA, 25 bp, Homo sapien
agagaggtccgcattgtctggcacg

SEQ ID NO: 366247 - DNA, 25 bp, Homo sapien
tcaggtcgtcgcaatcatagccgct

SEQ ID NO: 366248 - DNA, 25 bp, Homo sapien
tagggagtcacagaaccgtggcaaa

SEQ ID NO: 366249 - DNA, 25 bp, Homo sapien
tacagcggacgaactcggctttgca

SEQ ID NO: 366250 - DNA, 25 bp, Homo sapien
aaaggaggtcttgcggttgctctac

SEQ ID NO: 366251 - DNA, 25 bp, Homo sapien
tctccaatgccgaagctcagaactg

SEQ ID NO: 366252 - DNA, 25 bp, Homo sapien
tcatttctgcggtgtaaatgctccc

SEQ ID NO: 366253 - DNA, 25 bp, Homo sapien
ttccgtgccccagagtcgagggagc

SEQ ID NO: 366254 - DNA, 25 bp, Homo sapien
gatgtttactaacggcgcaagggcg

SEQ ID NO: 366255 - DNA, 25 bp, Homo sapien
cgctggcgtgcggtgtcatttctgc

SEQ ID NO: 366256 - DNA, 25 bp, Homo sapien
tgcaacatcttccactgaggctcca

SEQ ID NO: 366257 - DNA, 25 bp, Homo sapien
aacatcttccactgaggctccagct

SEQ ID NO: 366258 - DNA, 25 bp, Homo sapien
ctctcaggtacatcagggcctggac

SEQ ID NO: 366259 - DNA, 25 bp, Homo sapien
tcaggtacatcagggcctggacgtc

SEQ ID NO: 366260 - DNA, 25 bp, Homo sapien
ctggggaggccacagaggaagggcc

SEQ ID NO: 366261 - DNA, 25 bp, Homo sapien
gggaggccacagaggaagggcctag

SEQ ID NO: 366262 - DNA, 25 bp, Homo sapien
tggggaggccacagaggaagggcct

SEQ ID NO: 366263 - DNA, 25 bp, Homo sapien
ggaggccacagaggaagggcctagg

SEQ ID NO: 366264 - DNA, 25 bp, Homo sapien
gcacccgggccaggatccctgctag

SEQ ID NO: 366265 - DNA, 25 bp, Homo sapien
ccgggccaggatccctgctagctgg

SEQ ID NO: 366266 - DNA, 25 bp, Homo sapien
ctccattcagcacccgggccaggat

SEQ ID NO: 366267 - DNA, 25 bp, Homo sapien
ctaggaggtgcctctccattcagca

SEQ ID NO: 366268 - DNA, 25 bp, Homo sapien
gcgaagacggaagcagtcactggtc

SEQ ID NO: 366269 - DNA, 25 bp, Homo sapien
agacggaagcagtcactggtccttt

SEQ ID NO: 366270 - DNA, 25 bp, Homo sapien
gggcgaagacggaagcagtcactgg

SEQ ID NO: 366271 - DNA, 25 bp, Homo sapien
gtcactggtcctttccctcgtccca

SEQ ID NO: 366272 - DNA, 25 bp, Homo sapien
gcccaagatgcagctcaggaaacca

SEQ ID NO: 366273 - DNA, 25 bp, Homo sapien
cccgaagcattgcagccaggagtgc

SEQ ID NO: 366274 - DNA, 25 bp, Homo sapien
caccaagcccaagatgcagctcagg

SEQ ID NO: 366275 - DNA, 25 bp, Homo sapien
ccccgaagcattgcagccaggagtg

SEQ ID NO: 366276 - DNA, 25 bp, Homo sapien
ggaacatggatagggcagccgcctc

SEQ ID NO: 366277 - DNA, 25 bp, Homo sapien
gaacatggatagggcagccgcctcc

SEQ ID NO: 366278 - DNA, 25 bp, Homo sapien
aggacacaggtgcataagtgtaagg

SEQ ID NO: 366279 - DNA, 25 bp, Homo sapien
aggtgcataagtgtaaggccctgct

SEQ ID NO: 366280 - DNA, 25 bp, Homo sapien
cacaggtgcataagtgtaaggccct

SEQ ID NO: 366281 - DNA, 25 bp, Homo sapien
tgcataagtgtaaggccctgctcac

SEQ ID NO: 366282 - DNA, 25 bp, Homo sapien
gaagagcattcacggggccatgggc

SEQ ID NO: 366283 - DNA, 25 bp, Homo sapien
ggaagagcattcacggggccatggg

SEQ ID NO: 366284 - DNA, 25 bp, Homo sapien
tggaagagcattcacggggccatgg

SEQ ID NO: 366285 - DNA, 25 bp, Homo sapien
ggaaggctccattcagtaccacaca

SEQ ID NO: 366286 - DNA, 25 bp, Homo sapien
atgcccgtccacatgcatggctgga

SEQ ID NO: 366287 - DNA, 25 bp, Homo sapien
catggctggacatatgcaagacctg

SEQ ID NO: 366288 - DNA, 25 bp, Homo sapien
catatgcaagacctgagagtcctac

SEQ ID NO: 366289 - DNA, 25 bp, Homo sapien
ccgtcatgggcgaggtctggaggcc

SEQ ID NO: 366290 - DNA, 25 bp, Homo sapien
tcatgggcgaggtctggaggccggt

SEQ ID NO: 366291 - DNA, 25 bp, Homo sapien
gcgaggtctggaggccggtccagct

SEQ ID NO: 366292 - DNA, 25 bp, Homo sapien
ctggaggccggtccagctgtcccag

SEQ ID NO: 366293 - DNA, 25 bp, Homo sapien
acaggtcctgccgtcagaggctcag

SEQ ID NO: 366294 - DNA, 25 bp, Homo sapien
tgttcatgttgtccagagtccattc

SEQ ID NO: 366295 - DNA, 25 bp, Homo sapien
cctcaggacaggtgttcatgttgtc

SEQ ID NO: 366296 - DNA, 25 bp, Homo sapien
ctcaggatggccaagtgaggcttac

SEQ ID NO: 366297 - DNA, 25 bp, Homo sapien
cctctccgaacagccacatccaggg

SEQ ID NO: 366298 - DNA, 25 bp, Homo sapien
tctgggctccgtgggacaggcctct

SEQ ID NO: 366299 - DNA, 25 bp, Homo sapien
gctggagtggctgctataccactgt

SEQ ID NO: 366300 - DNA, 25 bp, Homo sapien
cagaggctggagtggctgctatacc

SEQ ID NO: 366301 - DNA, 25 bp, Homo sapien
ggcacaaggcaatgttcacatccat

SEQ ID NO: 366302 - DNA, 25 bp, Homo sapien
ccaaagagcatttaactgaagaagc

SEQ ID NO: 366303 - DNA, 25 bp, Homo sapien
ctgcaccctgcctaaatgtatactt

SEQ ID NO: 366304 - DNA, 25 bp, Homo sapien
tggacaggccacatctcgttggcag

SEQ ID NO: 366305 - DNA, 25 bp, Homo sapien
catctaagaggtacaggagcttccc

SEQ ID NO: 366306 - DNA, 25 bp, Homo sapien
ctaagaggtacaggagcttcccaag

SEQ ID NO: 366307 - DNA, 25 bp, Homo sapien
tcccatctaagaggtacaggagctt

SEQ ID NO: 366308 - DNA, 25 bp, Homo sapien
gcatcccatctaagaggtacaggag

SEQ ID NO: 366309 - DNA, 25 bp, Homo sapien
cagacacggagtgaccgcaggtcag

SEQ ID NO: 366310 - DNA, 25 bp, Homo sapien
cggagtgaccgcaggtcaggcacac

SEQ ID NO: 366311 - DNA, 25 bp, Homo sapien
gtgtagatgcggccccatccttctc

SEQ ID NO: 366312 - DNA, 25 bp, Homo sapien
gggacacacagacacggagtgaccg

SEQ ID NO: 366313 - DNA, 25 bp, Homo sapien
ctggcccaggcttctgtctcctccc

SEQ ID NO: 366314 - DNA, 25 bp, Homo sapien
ggcccaggcttctgtctcctccctc

SEQ ID NO: 366315 - DNA, 25 bp, Homo sapien
ccaggcttctgtctcctccctcagg

SEQ ID NO: 366316 - DNA, 25 bp, Homo sapien
caggcttctgtctcctccctcaggg

SEQ ID NO: 366317 - DNA, 25 bp, Homo sapien
acagcggtgcggacagagggtgcgg

SEQ ID NO: 366318 - DNA, 25 bp, Homo sapien
tatccggcgttgtcagggcaacagc

SEQ ID NO: 366319 - DNA, 25 bp, Homo sapien
tccaggagggagctcggtgcagatg

SEQ ID NO: 366320 - DNA, 25 bp, Homo sapien
tcagggggcagaaccaatgtgatat

SEQ ID NO: 366321 - DNA, 25 bp, Homo sapien
agcagaggtggaggcctcccctctg

SEQ ID NO: 366322 - DNA, 25 bp, Homo sapien
gctgctggggctcatcggcacagcg

SEQ ID NO: 366323 - DNA, 25 bp, Homo sapien
gggctcatcggcacagcggtcacat

SEQ ID NO: 366324 - DNA, 25 bp, Homo sapien
gcagcagaggtggaggcctcccctc

SEQ ID NO: 366325 - DNA, 25 bp, Homo sapien
agtcatagccactgcacaggagccc

SEQ ID NO: 366326 - DNA, 25 bp, Homo sapien
ttcggagtcatagccactgcacagg

SEQ ID NO: 366327 - DNA, 25 bp, Homo sapien
ctagggacagttcggagtcatagcc

SEQ ID NO: 366328 - DNA, 25 bp, Homo sapien
gggacagttcggagtcatagccact

SEQ ID NO: 366329 - DNA, 25 bp, Homo sapien
ggcactctggatggactctagggca

SEQ ID NO: 366330 - DNA, 25 bp, Homo sapien
tggaggctcttccagtgcggggcct

SEQ ID NO: 366331 - DNA, 25 bp, Homo sapien
gacacaacagtcgtgacacctggtc

SEQ ID NO: 366332 - DNA, 25 bp, Homo sapien
gagacacaacagtcgtgacacctgg

SEQ ID NO: 366333 - DNA, 25 bp, Homo sapien
aacagtcgtgacacctggtctcaca

SEQ ID NO: 366334 - DNA, 25 bp, Homo sapien
gtgagggagacacaacagtcgtgac

SEQ ID NO: 366335 - DNA, 25 bp, Homo sapien
gcgtctgtactgtcatgcacactga

SEQ ID NO: 366336 - DNA, 25 bp, Homo sapien
tgtactgtcatgcacactgactccg

SEQ ID NO: 366337 - DNA, 25 bp, Homo sapien
atgcacactgactccgccagtgact

SEQ ID NO: 366338 - DNA, 25 bp, Homo sapien
cccagcagcgtctgtactgtcatgc

SEQ ID NO: 366339 - DNA, 25 bp, Homo sapien
atgattggggcagagatatcactgg

SEQ ID NO: 366340 - DNA, 25 bp, Homo sapien
agatatcactgggatgggatgtcac

SEQ ID NO: 366341 - DNA, 25 bp, Homo sapien
tatcactgggatgggatgtcaccgg

SEQ ID NO: 366342 - DNA, 25 bp, Homo sapien
acatgattggggcagagatatcact

SEQ ID NO: 366343 - DNA, 25 bp, Homo sapien
cccagagaccctccctgtgtgccct

SEQ ID NO: 366344 - DNA, 25 bp, Homo sapien
tctggcccagagaccctccctgtgt

SEQ ID NO: 366345 - DNA, 25 bp, Homo sapien
aggcctctggcccagagaccctccc

SEQ ID NO: 366346 - DNA, 25 bp, Homo sapien
tggctcccatgctcctgacccccag

SEQ ID NO: 366347 - DNA, 25 bp, Homo sapien
gcactctggcgtggcctgcatttgc

SEQ ID NO: 366348 - DNA, 25 bp, Homo sapien
tccagcacggcacagacccggccgc

SEQ ID NO: 366349 - DNA, 25 bp, Homo sapien
gcgaagcactctggcgtggcctgca

SEQ ID NO: 366350 - DNA, 25 bp, Homo sapien
gtgggcgaagcactctggcgtggcc

SEQ ID NO: 366351 - DNA, 25 bp, Homo sapien
ccatgtgtgatgggggacctgggcc

SEQ ID NO: 366352 - DNA, 25 bp, Homo sapien
ctggaaccagagccatgtgtgatgg

SEQ ID NO: 366353 - DNA, 25 bp, Homo sapien
cagaagccctccctggcaaggcaag

SEQ ID NO: 366354 - DNA, 25 bp, Homo sapien
accccagaagccctccctggcaagg

SEQ ID NO: 366355 - DNA, 25 bp, Homo sapien
tcagggtccccgatggctgagtcaa

SEQ ID NO: 366356 - DNA, 25 bp, Homo sapien
ctcagggtccccgatggctgagtca

SEQ ID NO: 366357 - DNA, 25 bp, Homo sapien
agggtccccgatggctgagtcaaat

SEQ ID NO: 366358 - DNA, 25 bp, Homo sapien
gggtccccgatggctgagtcaaatc

SEQ ID NO: 366359 - DNA, 25 bp, Homo sapien
gccgagaccagcaccagctcagggt

SEQ ID NO: 366360 - DNA, 25 bp, Homo sapien
agaccagcaccagctcagggtcaaa

SEQ ID NO: 366361 - DNA, 25 bp, Homo sapien
cgagaccagcaccagctcagggtca

SEQ ID NO: 366362 - DNA, 25 bp, Homo sapien
ctgccgagaccagcaccagctcagg

SEQ ID NO: 366363 - DNA, 25 bp, Homo sapien
cctcctgccttcactggcgcactcc

SEQ ID NO: 366364 - DNA, 25 bp, Homo sapien
aggtgagggcgagccaggcccatcc

SEQ ID NO: 366365 - DNA, 25 bp, Homo sapien
tcctgccttcactggcgcactccag

SEQ ID NO: 366366 - DNA, 25 bp, Homo sapien
gcccaggtgagggcgagccaggccc

SEQ ID NO: 366367 - DNA, 25 bp, Homo sapien
cctgggggagccctccgtgcagtca

SEQ ID NO: 366368 - DNA, 25 bp, Homo sapien
ctgggggagccctccgtgcagtcac

SEQ ID NO: 366369 - DNA, 25 bp, Homo sapien
ggaaggcagccacgtagtcagcgtt

SEQ ID NO: 366370 - DNA, 25 bp, Homo sapien
aaggcagccacgtagtcagcgtttc

SEQ ID NO: 366371 - DNA, 25 bp, Homo sapien
gaaggcagccacgtagtcagcgttt

SEQ ID NO: 366372 - DNA, 25 bp, Homo sapien
ggcaggacatcccaggctacatcct

SEQ ID NO: 366373 - DNA, 25 bp, Homo sapien
aggacatcccaggctacatcctgaa

SEQ ID NO: 366374 - DNA, 25 bp, Homo sapien
ctggcaggacatcccaggctacatc

SEQ ID NO: 366375 - DNA, 25 bp, Homo sapien
gcaggacatcccaggctacatcctg

SEQ ID NO: 366376 - DNA, 25 bp, Homo sapien
ttccagggcaggttgacagtgaagc

SEQ ID NO: 366377 - DNA, 25 bp, Homo sapien
gctcatagcggtgccaggagaagta

SEQ ID NO: 366378 - DNA, 25 bp, Homo sapien
ggaaaggccagaagcgcccatgctc

SEQ ID NO: 366379 - DNA, 25 bp, Homo sapien
tgcatctgactctcgcaggaaaggc

SEQ ID NO: 366380 - DNA, 25 bp, Homo sapien
aggtcaggaccctcaacagctctac

SEQ ID NO: 366381 - DNA, 25 bp, Homo sapien
gtcaggaccctcaacagctctacag

SEQ ID NO: 366382 - DNA, 25 bp, Homo sapien
ggtcaggaccctcaacagctctaca

SEQ ID NO: 366383 - DNA, 25 bp, Homo sapien
caggaccctcaacagctctacagct

SEQ ID NO: 366384 - DNA, 25 bp, Homo sapien
caaagagatactggatcccctggcc

SEQ ID NO: 366385 - DNA, 25 bp, Homo sapien
ctcaaagagatactggatcccctgg

SEQ ID NO: 366386 - DNA, 25 bp, Homo sapien
tcaaagagatactggatcccctggc

SEQ ID NO: 366387 - DNA, 25 bp, Homo sapien
ggcatgtgcagctgctatggccacg

SEQ ID NO: 366388 - DNA, 25 bp, Homo sapien
gaacacacagaacccgttggcagcc

SEQ ID NO: 366389 - DNA, 25 bp, Homo sapien
gctgctatggccacgttgttgaaca

SEQ ID NO: 366390 - DNA, 25 bp, Homo sapien
gtgtttctgcttggcatgtgcagct

SEQ ID NO: 366391 - DNA, 25 bp, Homo sapien
gtgagcacagcgtccaccagctgca

SEQ ID NO: 366392 - DNA, 25 bp, Homo sapien
ccagccgcgcgcagtgaaaggtact

SEQ ID NO: 366393 - DNA, 25 bp, Homo sapien
cattttgcacagctccagtgagcac

SEQ ID NO: 366394 - DNA, 25 bp, Homo sapien
ctcaccagggcaagcccattttgca

SEQ ID NO: 366395 - DNA, 25 bp, Homo sapien
gggcgcagatgagccccctgccttc

SEQ ID NO: 366396 - DNA, 25 bp, Homo sapien
acgctcaaaggcacgtgcatgtgtg

SEQ ID NO: 366397 - DNA, 25 bp, Homo sapien
gcaatgtcatgtgtatggaccaggg

SEQ ID NO: 366398 - DNA, 25 bp, Homo sapien
gccgtggctgtgaacgctcaaaggc

SEQ ID NO: 366399 - DNA, 25 bp, Homo sapien
agggcaatgtcatgtgtatggacca

SEQ ID NO: 366400 - DNA, 25 bp, Homo sapien
gcgtcgaactgtccggacagcgcct

SEQ ID NO: 366401 - DNA, 25 bp, Homo sapien
ggtggaagtagatggcgtcgaactg

SEQ ID NO: 366402 - DNA, 25 bp, Homo sapien
tagatggcgtcgaactgtccggaca

SEQ ID NO: 366403 - DNA, 25 bp, Homo sapien
gaactgtccggacagcgcctgcagc

SEQ ID NO: 366404 - DNA, 25 bp, Homo sapien
caggacgctcgatctcgcactcggg

SEQ ID NO: 366405 - DNA, 25 bp, Homo sapien
ccgcaggcgatccagggctgcggtc

SEQ ID NO: 366406 - DNA, 25 bp, Homo sapien
ctgcggtcaggcgctcaggacgctc

SEQ ID NO: 366407 - DNA, 25 bp, Homo sapien
ctgccgcaggcgatccagggctgcg

SEQ ID NO: 366408 - DNA, 25 bp, Homo sapien
agatgaggagctcagttcagaggtc

SEQ ID NO: 366409 - DNA, 25 bp, Homo sapien
tgaggagctcagttcagaggtccct

SEQ ID NO: 366410 - DNA, 25 bp, Homo sapien
gatgaggagctcagttcagaggtcc

SEQ ID NO: 366411 - DNA, 25 bp, Homo sapien
ggagctcagttcagaggtccctccc

SEQ ID NO: 366412 - DNA, 25 bp, Homo sapien
cccagagcagccgggtggccgtcat

SEQ ID NO: 366413 - DNA, 25 bp, Homo sapien
tcatggtacacaagcgcggtcccca

SEQ ID NO: 366414 - DNA, 25 bp, Homo sapien
gtcctcatggtacacaagcgcggtc

SEQ ID NO: 366415 - DNA, 25 bp, Homo sapien
cctcatggtacacaagcgcggtccc

SEQ ID NO: 366416 - DNA, 25 bp, Homo sapien
catggtacacaagcgcggtccccat

SEQ ID NO: 366417 - DNA, 25 bp, Homo sapien
ttcccaaacgccctcgctagtggtg

SEQ ID NO: 366418 - DNA, 25 bp, Homo sapien
ctgggttcccaaacgccctcgctag

SEQ ID NO: 366419 - DNA, 25 bp, Homo sapien
tcccaaacgccctcgctagtggtgc

SEQ ID NO: 366420 - DNA, 25 bp, Homo sapien
gagcagccggaggcctgggacctgc

SEQ ID NO: 366421 - DNA, 25 bp, Homo sapien
cttcggccgggagcagccggaggcc

SEQ ID NO: 366422 - DNA, 25 bp, Homo sapien
ccgggagcagccggaggcctgggac

SEQ ID NO: 366423 - DNA, 25 bp, Homo sapien
gggagcagccggaggcctgggacct

SEQ ID NO: 366424 - DNA, 25 bp, Homo sapien
atcccaggcgcgcagaaggcacgga

SEQ ID NO: 366425 - DNA, 25 bp, Homo sapien
gccccggagcgaggaaccagcgggc

SEQ ID NO: 366426 - DNA, 25 bp, Homo sapien
ggcttcctcgcctcggacctgggtc

SEQ ID NO: 366427 - DNA, 25 bp, Homo sapien
tgctcccggtcgctatcgcgagctc

SEQ ID NO: 366428 - DNA, 25 bp, Homo sapien
ccgtggccgagcctgcccatgagag

SEQ ID NO: 366429 - DNA, 25 bp, Homo sapien
gtcagggtccagcgcagccccaagg

SEQ ID NO: 366430 - DNA, 25 bp, Homo sapien
gggtcagggtccagcgcagccccaa

SEQ ID NO: 366431 - DNA, 25 bp, Homo sapien
gagagccccgttctgcaccagctgg

SEQ ID NO: 366432 - DNA, 25 bp, Homo sapien
gagtgagtccggttctagctccaag

SEQ ID NO: 366433 - DNA, 25 bp, Homo sapien
gatgcccgagaggaaacctgaggcc

SEQ ID NO: 366434 - DNA, 25 bp, Homo sapien
caagagcagagtcaaggtcggtgga

SEQ ID NO: 366435 - DNA, 25 bp, Homo sapien
actgaggaagataggaggcacgggc

SEQ ID NO: 366436 - DNA, 25 bp, Homo sapien
tcaggccacctatgggcccacactt

SEQ ID NO: 366437 - DNA, 25 bp, Homo sapien
tccggaactgatggcgatcacgtcc

SEQ ID NO: 366438 - DNA, 25 bp, Homo sapien
ctatgggcccacactttgggcccag

SEQ ID NO: 366439 - DNA, 25 bp, Homo sapien
catgccacaagtcagcgtggctccg

SEQ ID NO: 366440 - DNA, 25 bp, Homo sapien
aacccgggcgtctgctctgatggat

SEQ ID NO: 366441 - DNA, 25 bp, Homo sapien
tctgaggtttctgagagcaccgggc

SEQ ID NO: 366442 - DNA, 25 bp, Homo sapien
caggtcggccagaggtcttgtccag

SEQ ID NO: 366443 - DNA, 25 bp, Homo sapien
caaggtcaaggtggcaacgagagtc

SEQ ID NO: 366444 - DNA, 25 bp, Homo sapien
gctgagcacctctttgtaagtaaca

SEQ ID NO: 366445 - DNA, 25 bp, Homo sapien
ttgaagctgagcacctctttgtaag

SEQ ID NO: 366446 - DNA, 25 bp, Homo sapien
ctgccggggaggcttgaagctgagc

SEQ ID NO: 366447 - DNA, 25 bp, Homo sapien
gaagctgagcacctctttgtaagta

SEQ ID NO: 366448 - DNA, 25 bp, Homo sapien
tcgctcacagacacgcctggcggtg

SEQ ID NO: 366449 - DNA, 25 bp, Homo sapien
acagacacgcctggcggtgcctcgt

SEQ ID NO: 366450 - DNA, 25 bp, Homo sapien
ctgggagtcgctcacagacacgcct

SEQ ID NO: 366451 - DNA, 25 bp, Homo sapien
cacaacagagaggggggtcagcctt

SEQ ID NO: 366452 - DNA, 25 bp, Homo sapien
ggagcacatgtgaatctcaacccat

SEQ ID NO: 366453 - DNA, 25 bp, Homo sapien
cacgaatatgcacacagcgaagggt

SEQ ID NO: 366454 - DNA, 25 bp, Homo sapien
caggacagggcctgaaacatggcac

SEQ ID NO: 366455 - DNA, 25 bp, Homo sapien
gacccgtggtcgtaaggagcacatg

SEQ ID NO: 366456 - DNA, 25 bp, Homo sapien
tagggacaagcggacgtggtgaggg

SEQ ID NO: 366457 - DNA, 25 bp, Homo sapien
gtctctggcctggacatggcggaag

SEQ ID NO: 366458 - DNA, 25 bp, Homo sapien
tggcctggacatggcggaagggcag

SEQ ID NO: 366459 - DNA, 25 bp, Homo sapien
tctggcctggacatggcggaagggc

SEQ ID NO: 366460 - DNA, 25 bp, Homo sapien
acagctgcctttcaccactcccggc

SEQ ID NO: 366461 - DNA, 25 bp, Homo sapien
cagggatggggatctaggactctga

SEQ ID NO: 366462 - DNA, 25 bp, Homo sapien
acttgggtccacacaggccgtgcca

SEQ ID NO: 366463 - DNA, 25 bp, Homo sapien
gctaagtgggccctggttccctgac

SEQ ID NO: 366464 - DNA, 25 bp, Homo sapien
cagggactcgaagtagggatgggcc

SEQ ID NO: 366465 - DNA, 25 bp, Homo sapien
attcatccagtgtgcggtcaacgtc

SEQ ID NO: 366466 - DNA, 25 bp, Homo sapien
aaaggagtcatcatacttctggacc

SEQ ID NO: 366467 - DNA, 25 bp, Homo sapien
tcatcttccgtgtcgtgcagggact

SEQ ID NO: 366468 - DNA, 25 bp, Homo sapien
gtggcccccacactagccagccgta

SEQ ID NO: 366469 - DNA, 25 bp, Homo sapien
tggcccccacactagccagccgtac

SEQ ID NO: 366470 - DNA, 25 bp, Homo sapien
ggtggcccccacactagccagccgt

SEQ ID NO: 366471 - DNA, 25 bp, Homo sapien
ccggtggcccccacactagccagcc

SEQ ID NO: 366472 - DNA, 25 bp, Homo sapien
tcaggatagaggcaaaatccttctt

SEQ ID NO: 366473 - DNA, 25 bp, Homo sapien
ggaggcccttcatgtagttcttggc

SEQ ID NO: 366474 - DNA, 25 bp, Homo sapien
ttctccaattcggggaggcccttca

SEQ ID NO: 366475 - DNA, 25 bp, Homo sapien
ccagagggcttgcattggtcaggat

SEQ ID NO: 366476 - DNA, 25 bp, Homo sapien
cgctgcacaaactcagccggaggcg

SEQ ID NO: 366477 - DNA, 25 bp, Homo sapien
tgcacaaactcagccggaggcgtcc

SEQ ID NO: 366478 - DNA, 25 bp, Homo sapien
gctgcacaaactcagccggaggcgt

SEQ ID NO: 366479 - DNA, 25 bp, Homo sapien
agccgctgcacaaactcagccggag

SEQ ID NO: 366480 - DNA, 25 bp, Homo sapien
tcatgatctccttcagctggtccag

SEQ ID NO: 366481 - DNA, 25 bp, Homo sapien
atgatctccttcagctggtccaggt

SEQ ID NO: 366482 - DNA, 25 bp, Homo sapien
cttcatgatctccttcagctggtcc

SEQ ID NO: 366483 - DNA, 25 bp, Homo sapien
catgatctccttcagctggtccagg

SEQ ID NO: 366484 - DNA, 25 bp, Homo sapien
ctcgggggccagagatcagggcccc

SEQ ID NO: 366485 - DNA, 25 bp, Homo sapien
cgggggccagagatcagggccccca

SEQ ID NO: 366486 - DNA, 25 bp, Homo sapien
tcgggggccagagatcagggccccc

SEQ ID NO: 366487 - DNA, 25 bp, Homo sapien
gtgccgccctgcggctggaggatac

SEQ ID NO: 366488 - DNA, 25 bp, Homo sapien
ctgcccttgaacagcgtcttgcctg

SEQ ID NO: 366489 - DNA, 25 bp, Homo sapien
gatcatctccgccatgatgcagccc

SEQ ID NO: 366490 - DNA, 25 bp, Homo sapien
ctgtgatcatctccgccatgatgca

SEQ ID NO: 366491 - DNA, 25 bp, Homo sapien
ggtcgctgcccttgaacagcgtctt

SEQ ID NO: 366492 - DNA, 25 bp, Homo sapien
ctgagatagaagccctggtcagctc

SEQ ID NO: 366493 - DNA, 25 bp, Homo sapien
ggcagggggacaggatgagacgggg

SEQ ID NO: 366494 - DNA, 25 bp, Homo sapien
cagggggacaggatgagacggggag

SEQ ID NO: 366495 - DNA, 25 bp, Homo sapien
gagatagaagccctggtcagctccg

SEQ ID NO: 366496 - DNA, 25 bp, Homo sapien
gcctgagaggcccagatctctgggc

SEQ ID NO: 366497 - DNA, 25 bp, Homo sapien
cccaccccagctcaacagcctccct

SEQ ID NO: 366498 - DNA, 25 bp, Homo sapien
caccccagctcaacagcctccctgg

SEQ ID NO: 366499 - DNA, 25 bp, Homo sapien
gccaccacagggctgtccgtgaaga

SEQ ID NO: 366500 - DNA, 25 bp, Homo sapien
gcatccaattcaagatgacctcggg

SEQ ID NO: 366501 - DNA, 25 bp, Homo sapien
agatgacctcgggagcccggtacca

SEQ ID NO: 366502 - DNA, 25 bp, Homo sapien
ccgtctgcgtgtagcgcatccaatt

SEQ ID NO: 366503 - DNA, 25 bp, Homo sapien
tcaccacgtacccagtcatctcact

SEQ ID NO: 366504 - DNA, 25 bp, Homo sapien
cttcagctcacagtcttcgttcaca

SEQ ID NO: 366505 - DNA, 25 bp, Homo sapien
cacagccaggttgccgggcttcagg

SEQ ID NO: 366506 - DNA, 25 bp, Homo sapien
ttcagctcacagtcttcgttcacag

SEQ ID NO: 366507 - DNA, 25 bp, Homo sapien
cgttcacagccaggttgccgggctt

SEQ ID NO: 366508 - DNA, 25 bp, Homo sapien
ggcacctaaagatggggccaccgga

SEQ ID NO: 366509 - DNA, 25 bp, Homo sapien
cacatcctcacaggtgggacgtgga

SEQ ID NO: 366510 - DNA, 25 bp, Homo sapien
tgtgcatagggcgtggctcagcacc

SEQ ID NO: 366511 - DNA, 25 bp, Homo sapien
ttcaagggcagaccaaggtacctgg

SEQ ID NO: 366512 - DNA, 25 bp, Homo sapien
tggatgatgccggcagcgtggatat

SEQ ID NO: 366513 - DNA, 25 bp, Homo sapien
tgtggatgatgccggcagcgtggat

SEQ ID NO: 366514 - DNA, 25 bp, Homo sapien
tctgtggatgatgccggcagcgtgg

SEQ ID NO: 366515 - DNA, 25 bp, Homo sapien
ggatgatgccggcagcgtggatata

SEQ ID NO: 366516 - DNA, 25 bp, Homo sapien
gaggatttggcaggcttcagcgcac

SEQ ID NO: 366517 - DNA, 25 bp, Homo sapien
tttggcaggcttcagcgcaccctct

SEQ ID NO: 366518 - DNA, 25 bp, Homo sapien
cagaggatttggcaggcttcagcgc

SEQ ID NO: 366519 - DNA, 25 bp, Homo sapien
gatttggcaggcttcagcgcaccct

SEQ ID NO: 366520 - DNA, 25 bp, Homo sapien
caggtcggtgcccatgaacggcatc

SEQ ID NO: 366521 - DNA, 25 bp, Homo sapien
cggtgcccatgaacggcatcaccag

SEQ ID NO: 366522 - DNA, 25 bp, Homo sapien
tggatccggtcctcgcctagcttct

SEQ ID NO: 366523 - DNA, 25 bp, Homo sapien
tcagcatctggtacacgaggaactg

SEQ ID NO: 366524 - DNA, 25 bp, Homo sapien
caggagtgaatacgtccagcagccc

SEQ ID NO: 366525 - DNA, 25 bp, Homo sapien
gtctcatcaggagtgaatacgtcca

SEQ ID NO: 366526 - DNA, 25 bp, Homo sapien
gtgaatacgtccagcagcccgatca

SEQ ID NO: 366527 - DNA, 25 bp, Homo sapien
atccagggtctcatcaggagtgaat

SEQ ID NO: 366528 - DNA, 25 bp, Homo sapien
tggaggatcccctgggcctggccaa

SEQ ID NO: 366529 - DNA, 25 bp, Homo sapien
ggccaagtcgtgttccctgaccagg

SEQ ID NO: 366530 - DNA, 25 bp, Homo sapien
tcgtctcccaaggagagacaggcct

SEQ ID NO: 366531 - DNA, 25 bp, Homo sapien
caaggcttggcgtgagacctggagg

SEQ ID NO: 366532 - DNA, 25 bp, Homo sapien
tcggactggaaaggccgatacagct

SEQ ID NO: 366533 - DNA, 25 bp, Homo sapien
ttgatggccaccttagcgccggtgc

SEQ ID NO: 366534 - DNA, 25 bp, Homo sapien
atggccaccttagcgccggtgcggc

SEQ ID NO: 366535 - DNA, 25 bp, Homo sapien
cgcttggcgaacagctcggactgga

SEQ ID NO: 366536 - DNA, 25 bp, Homo sapien
gcgggaaggccgggcaccccgcgca

SEQ ID NO: 366537 - DNA, 25 bp, Homo sapien
tgcggggcggaccgcttagcgggaa

SEQ ID NO: 366538 - DNA, 25 bp, Homo sapien
ctgcggggcggaccgcttagcggga

SEQ ID NO: 366539 - DNA, 25 bp, Homo sapien
cgggaaggccgggcaccccgcgcag

SEQ ID NO: 366540 - DNA, 25 bp, Homo sapien
acaccgcgccgtaggcgcccgagcc

SEQ ID NO: 366541 - DNA, 25 bp, Homo sapien
tgcaggtcccggtacacggcgcgca

SEQ ID NO: 366542 - DNA, 25 bp, Homo sapien
acctcccaggccgtcttggtcacct

SEQ ID NO: 366543 - DNA, 25 bp, Homo sapien
gcacctcccaggccgtcttggtcac

SEQ ID NO: 366544 - DNA, 25 bp, Homo sapien
gtaaaagccactgcgggcgggcggc

SEQ ID NO: 366545 - DNA, 25 bp, Homo sapien
ctggcggtaaaagccactgcgggcg

SEQ ID NO: 366546 - DNA, 25 bp, Homo sapien
ctgcgggcgggcggcggagagctca

SEQ ID NO: 366547 - DNA, 25 bp, Homo sapien
tgcgggcgggcggcggagagctcat

SEQ ID NO: 366548 - DNA, 25 bp, Homo sapien
ccgacccaggctgcgcacggcccct

SEQ ID NO: 366549 - DNA, 25 bp, Homo sapien
ccccgacccaggctgcgcacggccc

SEQ ID NO: 366550 - DNA, 25 bp, Homo sapien
agggatgtcccaggtgccgaccccg

SEQ ID NO: 366551 - DNA, 25 bp, Homo sapien
tcagggatgtcccaggtgccgaccc

SEQ ID NO: 366552 - DNA, 25 bp, Homo sapien
gtgacgccctcgcccgccctccggc

SEQ ID NO: 366553 - DNA, 25 bp, Homo sapien
gccggagcctggggagggccggagc

SEQ ID NO: 366554 - DNA, 25 bp, Homo sapien
tgacgccctcgcccgccctccggcc

SEQ ID NO: 366555 - DNA, 25 bp, Homo sapien
ggcattcaccagctcgtgaccagtg

SEQ ID NO: 366556 - DNA, 25 bp, Homo sapien
tcaccagctcgtgaccagtgagcgg

SEQ ID NO: 366557 - DNA, 25 bp, Homo sapien
tggcccataccctttgtgccctggg

SEQ ID NO: 366558 - DNA, 25 bp, Homo sapien
ggcttgggccgtgctccacggcatt

SEQ ID NO: 366559 - DNA, 25 bp, Homo sapien
gtgcaggcacttgacacccaggctt

SEQ ID NO: 366560 - DNA, 25 bp, Homo sapien
tccgaggttactggatcagctccat

SEQ ID NO: 366561 - DNA, 25 bp, Homo sapien
ctcgaggcaagaggtcacccccttt

SEQ ID NO: 366562 - DNA, 25 bp, Homo sapien
tattgtgcacccctggtgcaggcac

SEQ ID NO: 366563 - DNA, 25 bp, Homo sapien
agcacctcagatctccggctgcagg

SEQ ID NO: 366564 - DNA, 25 bp, Homo sapien
gacaaggaaagaggactgacccaca

SEQ ID NO: 366565 - DNA, 25 bp, Homo sapien
gaggactgacccacagaccagagca

SEQ ID NO: 366566 - DNA, 25 bp, Homo sapien
accagagcacctcagatctccggct

SEQ ID NO: 366567 - DNA, 25 bp, Homo sapien
ctgccctagcgtcctcaaggccaaa

SEQ ID NO: 366568 - DNA, 25 bp, Homo sapien
tgctcatgtggttgccctttggccc

SEQ ID NO: 366569 - DNA, 25 bp, Homo sapien
tgggtcccacatccaaggagaaagc

SEQ ID NO: 366570 - DNA, 25 bp, Homo sapien
gaagtgtccgagtccaagtccacat

SEQ ID NO: 366571 - DNA, 25 bp, Homo sapien
gcttttctcatttgacacctggtgg

SEQ ID NO: 366572 - DNA, 25 bp, Homo sapien
gtaggcccagggacacttgtgccca

SEQ ID NO: 366573 - DNA, 25 bp, Homo sapien
ttggcatctaggaccccacagtcag

SEQ ID NO: 366574 - DNA, 25 bp, Homo sapien
cacgggtgaacacaagactccaggc

SEQ ID NO: 366575 - DNA, 25 bp, Homo sapien
gattctcctgaaggcgaggggtcct

SEQ ID NO: 366576 - DNA, 25 bp, Homo sapien
gtgcctctcgaggaaaccaggccag

SEQ ID NO: 366577 - DNA, 25 bp, Homo sapien
gggtcctaggccagaagtctgtgac

SEQ ID NO: 366578 - DNA, 25 bp, Homo sapien
accataggagtgtgggaggtgcctc

SEQ ID NO: 366579 - DNA, 25 bp, Homo sapien
ctgaggacttcctggtaagtgagct

SEQ ID NO: 366580 - DNA, 25 bp, Homo sapien
catcctcggggtcgtggtactggct

SEQ ID NO: 366581 - DNA, 25 bp, Homo sapien
gctgcactgaccctctggtcactgt

SEQ ID NO: 366582 - DNA, 25 bp, Homo sapien
tactggctgaagtaggcgtgggcca

SEQ ID NO: 366583 - DNA, 25 bp, Homo sapien
tcatcatatggctcggcctctggct

SEQ ID NO: 366584 - DNA, 25 bp, Homo sapien
tccagggccagatatggagcccagt

SEQ ID NO: 366585 - DNA, 25 bp, Homo sapien
gggccagatatggagcccagtctag

SEQ ID NO: 366586 - DNA, 25 bp, Homo sapien
gccagatatggagcccagtctagcc

SEQ ID NO: 366587 - DNA, 25 bp, Homo sapien
cagggccagatatggagcccagtct

SEQ ID NO: 366588 - DNA, 25 bp, Homo sapien
gcagggactggatatatgtccgggc

SEQ ID NO: 366589 - DNA, 25 bp, Homo sapien
gggcagggactggatatatgtccgg

SEQ ID NO: 366590 - DNA, 25 bp, Homo sapien
ggttggctccacggaagatgctgct

SEQ ID NO: 366591 - DNA, 25 bp, Homo sapien
tggctccacggaagatgctgctcag

SEQ ID NO: 366592 - DNA, 25 bp, Homo sapien
tgctggctggcgggcaccaactcac

SEQ ID NO: 366593 - DNA, 25 bp, Homo sapien
ggattgggcacctgccctaggctct

SEQ ID NO: 366594 - DNA, 25 bp, Homo sapien
tgccctaggctctatcccaccacat

SEQ ID NO: 366595 - DNA, 25 bp, Homo sapien
tgttccccatatggtccccgcattt

SEQ ID NO: 366596 - DNA, 25 bp, Homo sapien
ctgaggagatttttgccagaacctc

SEQ ID NO: 366597 - DNA, 25 bp, Homo sapien
ccacttccatgatgcgcttcagctg

SEQ ID NO: 366598 - DNA, 25 bp, Homo sapien
tccatgatgcgcttcagctggtcaa

SEQ ID NO: 366599 - DNA, 25 bp, Homo sapien
gagatttttgccagaacctcagggc

SEQ ID NO: 366600 - DNA, 25 bp, Homo sapien
tcaggaaacacccacgggccagcca

SEQ ID NO: 366601 - DNA, 25 bp, Homo sapien
tcgcttcccgggaagagggccttgc

SEQ ID NO: 366602 - DNA, 25 bp, Homo sapien
atgcagcccacggaccagatatcca

SEQ ID NO: 366603 - DNA, 25 bp, Homo sapien
gagcagctcagccatgatgcagccc

SEQ ID NO: 366604 - DNA, 25 bp, Homo sapien
tggagcagctcagccatgatgcagc

SEQ ID NO: 366605 - DNA, 25 bp, Homo sapien
ccggtcatctcctcgtccgcctggc

SEQ ID NO: 366606 - DNA, 25 bp, Homo sapien
tgagcatgatctcaggtgcccggta

SEQ ID NO: 366607 - DNA, 25 bp, Homo sapien
gcgcgtggccacatagccggtcatc

SEQ ID NO: 366608 - DNA, 25 bp, Homo sapien
gagcatgatctcaggtgcccggtac

SEQ ID NO: 366609 - DNA, 25 bp, Homo sapien
gtggtgttctcaagctccgcacggg

SEQ ID NO: 366610 - DNA, 25 bp, Homo sapien
gaccacgtggtgttctcaagctccg

SEQ ID NO: 366611 - DNA, 25 bp, Homo sapien
gggcgaccacgtggtgttctcaagc

SEQ ID NO: 366612 - DNA, 25 bp, Homo sapien
gtgttctcaagctccgcacgggctc

SEQ ID NO: 366613 - DNA, 25 bp, Homo sapien
ctgagctcacagtcctcgttcacag

SEQ ID NO: 366614 - DNA, 25 bp, Homo sapien
cggtggatgatcccggccgagtgga

SEQ ID NO: 366615 - DNA, 25 bp, Homo sapien
ggtggatgatcccggccgagtggat

SEQ ID NO: 366616 - DNA, 25 bp, Homo sapien
ggatgatcccggccgagtggatgta

SEQ ID NO: 366617 - DNA, 25 bp, Homo sapien
tggatgatcccggccgagtggatgt

SEQ ID NO: 366618 - DNA, 25 bp, Homo sapien
aattgaacgtgctcgtcgctcagcg

SEQ ID NO: 366619 - DNA, 25 bp, Homo sapien
gacgatgttgttcaggtcggcgccc

SEQ ID NO: 366620 - DNA, 25 bp, Homo sapien
ttcagcccgcgcagcagctggtaaa

SEQ ID NO: 366621 - DNA, 25 bp, Homo sapien
cagcgcctggcacttgacgatgttg

SEQ ID NO: 366622 - DNA, 25 bp, Homo sapien
ctgaagtcctcgatggacgtggccg

SEQ ID NO: 366623 - DNA, 25 bp, Homo sapien
gacgtggccggcgtgaagacgtcca

SEQ ID NO: 366624 - DNA, 25 bp, Homo sapien
acttcgctgaagtcctcgatggacg

SEQ ID NO: 366625 - DNA, 25 bp, Homo sapien
tgaagacgtccagaagcccgatgac

SEQ ID NO: 366626 - DNA, 25 bp, Homo sapien
cttcaggtgcttgagcagccgcagc

SEQ ID NO: 366627 - DNA, 25 bp, Homo sapien
gttctcgtgcttcaggtgcttgagc

SEQ ID NO: 366628 - DNA, 25 bp, Homo sapien
tgcttcaggtgcttgagcagccgca

SEQ ID NO: 366629 - DNA, 25 bp, Homo sapien
tcgtgcttcaggtgcttgagcagcc

SEQ ID NO: 366630 - DNA, 25 bp, Homo sapien
gttctgcgcgcgtggatcagcgact

SEQ ID NO: 366631 - DNA, 25 bp, Homo sapien
tgcgcgcgtggatcagcgactggaa

SEQ ID NO: 366632 - DNA, 25 bp, Homo sapien
cgcgcgtggatcagcgactggaagg

SEQ ID NO: 366633 - DNA, 25 bp, Homo sapien
atcagcgactggaaggggcgcgaca

SEQ ID NO: 366634 - DNA, 25 bp, Homo sapien
gcgcagccgggcgtcgtaggccgaa

SEQ ID NO: 366635 - DNA, 25 bp, Homo sapien
ctggcgcagccgggcgtcgtaggcc

SEQ ID NO: 366636 - DNA, 25 bp, Homo sapien
tggcgcagccgggcgtcgtaggccg

SEQ ID NO: 366637 - DNA, 25 bp, Homo sapien
ggcgcagccgggcgtcgtaggccga

SEQ ID NO: 366638 - DNA, 25 bp, Homo sapien
gctgcggcacctcccacacggtctt

SEQ ID NO: 366639 - DNA, 25 bp, Homo sapien
ccgctgcggcacctcccacacggtc

SEQ ID NO: 366640 - DNA, 25 bp, Homo sapien
agaagccggcgcgagggcccgacat

SEQ ID NO: 366641 - DNA, 25 bp, Homo sapien
ctcctgccggtagaagccggcgcga

SEQ ID NO: 366642 - DNA, 25 bp, Homo sapien
ccgcgcccgcgcccgagccgagccc

SEQ ID NO: 366643 - DNA, 25 bp, Homo sapien
ccgagcccgagccgagcggagcgga

SEQ ID NO: 366644 - DNA, 25 bp, Homo sapien
gtccggagcagccgccgctccgccc

SEQ ID NO: 366645 - DNA, 25 bp, Homo sapien
cgagccgagcccgagccgagcggag

SEQ ID NO: 366646 - DNA, 25 bp, Homo sapien
gcgaaggaacgggtctcagtcccag

SEQ ID NO: 366647 - DNA, 25 bp, Homo sapien
cagtttccccattggaagccggcat

SEQ ID NO: 366648 - DNA, 25 bp, Homo sapien
ttttgcatgaccaagccccgtgcct

SEQ ID NO: 366649 - DNA, 25 bp, Homo sapien
tatatcggcaaccaaattaaaacag

SEQ ID NO: 366650 - DNA, 25 bp, Homo sapien
tggtcgcggagctgatttagcaggg

SEQ ID NO: 366651 - DNA, 25 bp, Homo sapien
gagctgatttagcaggggacttgtc

SEQ ID NO: 366652 - DNA, 25 bp, Homo sapien
gagaccaggcgatggtggtcgcgga

SEQ ID NO: 366653 - DNA, 25 bp, Homo sapien
caggcgatggtggtcgcggagctga

SEQ ID NO: 366654 - DNA, 25 bp, Homo sapien
tcgacagtgaacacccgatgctggt

SEQ ID NO: 366655 - DNA, 25 bp, Homo sapien
tcaggtacctatgtcccaaggcagc

SEQ ID NO: 366656 - DNA, 25 bp, Homo sapien
cataggatctgggaacttgccctgg

SEQ ID NO: 366657 - DNA, 25 bp, Homo sapien
tgcccggcggtattgctcagaggaa

SEQ ID NO: 366658 - DNA, 25 bp, Homo sapien
tcttctgggcggcaggatcctcctc

SEQ ID NO: 366659 - DNA, 25 bp, Homo sapien
cagcggcaatctgctgcaggcggaa

SEQ ID NO: 366660 - DNA, 25 bp, Homo sapien
gatcctcctccaaggcattgatgat

SEQ ID NO: 366661 - DNA, 25 bp, Homo sapien
tgttctccagtgcagcggcaatctg

SEQ ID NO: 366662 - DNA, 25 bp, Homo sapien
ccacgagggtgttcaaggagtccgt

SEQ ID NO: 366663 - DNA, 25 bp, Homo sapien
ggtggagtgccacgagggtgttcaa

SEQ ID NO: 366664 - DNA, 25 bp, Homo sapien
cttctgcgtgtattggtagagctgg

SEQ ID NO: 366665 - DNA, 25 bp, Homo sapien
ctcgtcatagtacttctgcgtgtat

SEQ ID NO: 366666 - DNA, 25 bp, Homo sapien
ctggggggtgacgggacagtcaggg

SEQ ID NO: 366667 - DNA, 25 bp, Homo sapien
gacacggccgtggatggagccgcag

SEQ ID NO: 366668 - DNA, 25 bp, Homo sapien
gcgctgtggacacggccgtggatgg

SEQ ID NO: 366669 - DNA, 25 bp, Homo sapien
gcgctgtgggcacggccgagggtgc

SEQ ID NO: 366670 - DNA, 25 bp, Homo sapien
gggcgctgtgggcacggccgagggt

SEQ ID NO: 366671 - DNA, 25 bp, Homo sapien
gcaccatctgccggatccccttgta

SEQ ID NO: 366672 - DNA, 25 bp, Homo sapien
ccatctgccggatccccttgtagta

SEQ ID NO: 366673 - DNA, 25 bp, Homo sapien
tgtcctggtcgctgacctgcaccat

SEQ ID NO: 366674 - DNA, 25 bp, Homo sapien
cctgcaccatctgccggatcccctt

SEQ ID NO: 366675 - DNA, 25 bp, Homo sapien
gagatctccttggcgtacagcagct

SEQ ID NO: 366676 - DNA, 25 bp, Homo sapien
catacctgacaacgccaattaaaca

SEQ ID NO: 366677 - DNA, 25 bp, Homo sapien
ggacttcatacctgacaacgccaat

SEQ ID NO: 366678 - DNA, 25 bp, Homo sapien
tttctgaaggacttcatacctgaca

SEQ ID NO: 366679 - DNA, 25 bp, Homo sapien
cctgacaacgccaattaaacataat

SEQ ID NO: 366680 - DNA, 25 bp, Homo sapien
cgagggatcttccccgacaaccaga

SEQ ID NO: 366681 - DNA, 25 bp, Homo sapien
acgagggatcttccccgacaaccag

SEQ ID NO: 366682 - DNA, 25 bp, Homo sapien
gagggatcttccccgacaaccagaa

SEQ ID NO: 366683 - DNA, 25 bp, Homo sapien
tacgagggatcttccccgacaacca

SEQ ID NO: 366684 - DNA, 25 bp, Homo sapien
cagcatgaggcatcccagtttaaca

SEQ ID NO: 366685 - DNA, 25 bp, Homo sapien
tattgtaggaatagaaactggccag

SEQ ID NO: 366686 - DNA, 25 bp, Homo sapien
taagtgcagtttacaagttctaagg

SEQ ID NO: 366687 - DNA, 25 bp, Homo sapien
tcttgtaaggaaaagctgcaacaat

SEQ ID NO: 366688 - DNA, 25 bp, Homo sapien
tgcttaagacaagcagccatatggg

SEQ ID NO: 366689 - DNA, 25 bp, Homo sapien
gaatagcaccttacatagtagagag

SEQ ID NO: 366690 - DNA, 25 bp, Homo sapien
gcttctcttttggtaggcggtggcc

SEQ ID NO: 366691 - DNA, 25 bp, Homo sapien
gaaggaacgccaggtagcattaagc

SEQ ID NO: 366692 - DNA, 25 bp, Homo sapien
ctgcctcgaccacccaaagtgctgg

SEQ ID NO: 366693 - DNA, 25 bp, Homo sapien
ccccagttcatgccattctcctgcc

SEQ ID NO: 366694 - DNA, 25 bp, Homo sapien
tgaaccactgcgcccggacaaggtt

SEQ ID NO: 366695 - DNA, 25 bp, Homo sapien
gtgaaccactgcgcccggacaaggt

SEQ ID NO: 366696 - DNA, 25 bp, Homo sapien
tctgtggctagaaacaggaccgtcc

SEQ ID NO: 366697 - DNA, 25 bp, Homo sapien
tgtgtgtcatccaagtacgtgagac

SEQ ID NO: 366698 - DNA, 25 bp, Homo sapien
tagcaggatcctatttcgtcgatgg

SEQ ID NO: 366699 - DNA, 25 bp, Homo sapien
ggaccgtccagaagtcacctgtaac

SEQ ID NO: 366700 - DNA, 25 bp, Homo sapien
aagtcagtcttcacgtggccggctg

SEQ ID NO: 366701 - DNA, 25 bp, Homo sapien
ccttctgtgggctcctgaaactcag

SEQ ID NO: 366702 - DNA, 25 bp, Homo sapien
taaaactactagagcagcacctgtc

SEQ ID NO: 366703 - DNA, 25 bp, Homo sapien
tactggccgccaaatcagtgtccag

SEQ ID NO: 366704 - DNA, 25 bp, Homo sapien
tgaaaccagttggacggcccagctt

SEQ ID NO: 366705 - DNA, 25 bp, Homo sapien
gggcctctcaggtcactcgtgccct

SEQ ID NO: 366706 - DNA, 25 bp, Homo sapien
taaatgctgcattggtaaagctggc

SEQ ID NO: 366707 - DNA, 25 bp, Homo sapien
ccagcttgcgtctcttctgcctgag

SEQ ID NO: 366708 - DNA, 25 bp, Homo sapien
gaagactggtttctagcactaccgg

SEQ ID NO: 366709 - DNA, 25 bp, Homo sapien
tgaaccaggctgcaagatttgactg

SEQ ID NO: 366710 - DNA, 25 bp, Homo sapien
cactttgtatccagctgcaagctca

SEQ ID NO: 366711 - DNA, 25 bp, Homo sapien
tgcagctacccaatagcccttggag

SEQ ID NO: 366712 - DNA, 25 bp, Homo sapien
caataaaagccgtgacgttcggaca

SEQ ID NO: 366713 - DNA, 25 bp, Homo sapien
taatgttctgatcacctgacagggc

SEQ ID NO: 366714 - DNA, 25 bp, Homo sapien
cgttcggacaaaccgcgtactgtga

SEQ ID NO: 366715 - DNA, 25 bp, Homo sapien
ggcatcaggtctctacagcttagca

SEQ ID NO: 366716 - DNA, 25 bp, Homo sapien
ccaggtgccaggaacttcggtcagg

SEQ ID NO: 366717 - DNA, 25 bp, Homo sapien
tggtttcagtggctcaagtgagccc

SEQ ID NO: 366718 - DNA, 25 bp, Homo sapien
agtggctcaagtgagcccaccctca

SEQ ID NO: 366719 - DNA, 25 bp, Homo sapien
caggcgccatctgtccggcctgagg

SEQ ID NO: 366720 - DNA, 25 bp, Homo sapien
tcgtcacaggcaaggacacaacagc

SEQ ID NO: 366721 - DNA, 25 bp, Homo sapien
tcgggtctagccagaaactgacgtc

SEQ ID NO: 366722 - DNA, 25 bp, Homo sapien
gacgtccacctcaagtgtcctctgg

SEQ ID NO: 366723 - DNA, 25 bp, Homo sapien
cagatgctgctcgttgcctggcagg

SEQ ID NO: 366724 - DNA, 25 bp, Homo sapien
tcccggcacggtgctcagctgtgac

SEQ ID NO: 366725 - DNA, 25 bp, Homo sapien
ggactatttacaggcccattgcggg

SEQ ID NO: 366726 - DNA, 25 bp, Homo sapien
gactctggttctagaaactcgcctg

SEQ ID NO: 366727 - DNA, 25 bp, Homo sapien
gctgtgacgccaaaataagttaggg

SEQ ID NO: 366728 - DNA, 25 bp, Homo sapien
gtcggtaacgaccggaagcagagca

SEQ ID NO: 366729 - DNA, 25 bp, Homo sapien
tggtcggtaacgaccggaagcagag

SEQ ID NO: 366730 - DNA, 25 bp, Homo sapien
cggtaacgaccggaagcagagcagc

SEQ ID NO: 366731 - DNA, 25 bp, Homo sapien
tagtggtcggtaacgaccggaagca

SEQ ID NO: 366732 - DNA, 25 bp, Homo sapien
acccactgctgggccgagggcacgt

SEQ ID NO: 366733 - DNA, 25 bp, Homo sapien
tggatccggtccacccactgctggg

SEQ ID NO: 366734 - DNA, 25 bp, Homo sapien
tcaggcgtccgacaggcagctctgg

SEQ ID NO: 366735 - DNA, 25 bp, Homo sapien
ggcagctctggatccggtccaccca

SEQ ID NO: 366736 - DNA, 25 bp, Homo sapien
tgggcacagaagttgtaaacgcgac

SEQ ID NO: 366737 - DNA, 25 bp, Homo sapien
cagaagttgtaaacgcgacgcgttg

SEQ ID NO: 366738 - DNA, 25 bp, Homo sapien
ttgtaaacgcgacgcgttgtcttca

SEQ ID NO: 366739 - DNA, 25 bp, Homo sapien
cacagaagttgtaaacgcgacgcgt

SEQ ID NO: 366740 - DNA, 25 bp, Homo sapien
ggaagggcgggttactgactccgca

SEQ ID NO: 366741 - DNA, 25 bp, Homo sapien
agggcgggttactgactccgcagcc

SEQ ID NO: 366742 - DNA, 25 bp, Homo sapien
aagggcgggttactgactccgcagc

SEQ ID NO: 366743 - DNA, 25 bp, Homo sapien
cagcccccacaccgcagagcccctc

SEQ ID NO: 366744 - DNA, 25 bp, Homo sapien
tgtccacacggtggtcgtagtagcg

SEQ ID NO: 366745 - DNA, 25 bp, Homo sapien
ccacagagtcagcggagccccctcc

SEQ ID NO: 366746 - DNA, 25 bp, Homo sapien
ggccacagagtcagcggagccccct

SEQ ID NO: 366747 - DNA, 25 bp, Homo sapien
gccacagagtcagcggagccccctc

SEQ ID NO: 366748 - DNA, 25 bp, Homo sapien
acagagtcagcggagccccctcccc

SEQ ID NO: 366749 - DNA, 25 bp, Homo sapien
cttgtacagagtgccctcgtaggac

SEQ ID NO: 366750 - DNA, 25 bp, Homo sapien
cttggtcttgtccagcacgaaccag

SEQ ID NO: 366751 - DNA, 25 bp, Homo sapien
gtgcttggtcttgtccagcacgaac

SEQ ID NO: 366752 - DNA, 25 bp, Homo sapien
aaccagcgggccttccaaggcttca

SEQ ID NO: 366753 - DNA, 25 bp, Homo sapien
gagccactactctggtcgctgtcca

SEQ ID NO: 366754 - DNA, 25 bp, Homo sapien
agccactactctggtcgctgtccag

SEQ ID NO: 366755 - DNA, 25 bp, Homo sapien
tacacacccagcgagcgacggtggt

SEQ ID NO: 366756 - DNA, 25 bp, Homo sapien
acacacccagcgagcgacggtggtg

SEQ ID NO: 366757 - DNA, 25 bp, Homo sapien
caggtacacacccagcgagcgacgg

SEQ ID NO: 366758 - DNA, 25 bp, Homo sapien
ggtacacacccagcgagcgacggtg

SEQ ID NO: 366759 - DNA, 25 bp, Homo sapien
cggtcccaggtgtccttccagcgct

SEQ ID NO: 366760 - DNA, 25 bp, Homo sapien
agttcccagtcatagggagggccct

SEQ ID NO: 366761 - DNA, 25 bp, Homo sapien
ccagttcccagtcatagggagggcc

SEQ ID NO: 366762 - DNA, 25 bp, Homo sapien
tgggccagttcccagtcatagggag

SEQ ID NO: 366763 - DNA, 25 bp, Homo sapien
ggccagttcccagtcatagggaggg

SEQ ID NO: 366764 - DNA, 25 bp, Homo sapien
ttgtggaacacaggcgtcctcttgc

SEQ ID NO: 366765 - DNA, 25 bp, Homo sapien
tgtaattgtggaacacaggcgtcct

SEQ ID NO: 366766 - DNA, 25 bp, Homo sapien
cgcatacatgtaattgtggaacaca

SEQ ID NO: 366767 - DNA, 25 bp, Homo sapien
cgtcctcgggcgcatacatgtaatt

SEQ ID NO: 366768 - DNA, 25 bp, Homo sapien
ccgtggctgccccagccccgactcc

SEQ ID NO: 366769 - DNA, 25 bp, Homo sapien
ctgccccagccccgactccccacat

SEQ ID NO: 366770 - DNA, 25 bp, Homo sapien
ggctgccccagccccgactccccac

SEQ ID NO: 366771 - DNA, 25 bp, Homo sapien
gccccagccccgactccccacatac

SEQ ID NO: 366772 - DNA, 25 bp, Homo sapien
tagtcagagtcgagcaggaaggtcc

SEQ ID NO: 366773 - DNA, 25 bp, Homo sapien
aaacggcgggacacatggtggtagc

SEQ ID NO: 366774 - DNA, 25 bp, Homo sapien
tcgagcaggaaggtccggaaacggc

SEQ ID NO: 366775 - DNA, 25 bp, Homo sapien
cggaaacggcgggacacatggtggt

SEQ ID NO: 366776 - DNA, 25 bp, Homo sapien
cagcaggcgaaagccctccagcgtg

SEQ ID NO: 366777 - DNA, 25 bp, Homo sapien
aagccctccagcgtgcggtagaagg

SEQ ID NO: 366778 - DNA, 25 bp, Homo sapien
tgtacgcagtccaggaactgcagga

SEQ ID NO: 366779 - DNA, 25 bp, Homo sapien
gaagcgatggccgaaggacagccac

SEQ ID NO: 366780 - DNA, 25 bp, Homo sapien
gcacggaggagcctgaatccaggag

SEQ ID NO: 366781 - DNA, 25 bp, Homo sapien
agcacggaggagcctgaatccagga

SEQ ID NO: 366782 - DNA, 25 bp, Homo sapien
cagcaccaaggcgggcagagggacg

SEQ ID NO: 366783 - DNA, 25 bp, Homo sapien
gggagggcccagcaccaaggcgggc

SEQ ID NO: 366784 - DNA, 25 bp, Homo sapien
cagagggacggggcagtgcagagac

SEQ ID NO: 366785 - DNA, 25 bp, Homo sapien
ccaaggggagggcccagcaccaagg

SEQ ID NO: 366786 - DNA, 25 bp, Homo sapien
tccagtgagcgcaggaaggaggctg

SEQ ID NO: 366787 - DNA, 25 bp, Homo sapien
ggatcagccactctgagtcctccag

SEQ ID NO: 366788 - DNA, 25 bp, Homo sapien
tctgagtcctccagtgagcgcagga

SEQ ID NO: 366789 - DNA, 25 bp, Homo sapien
agtcctccagtgagcgcaggaagga

SEQ ID NO: 366790 - DNA, 25 bp, Homo sapien
tgcctcgaatacctcaatgggcacc

SEQ ID NO: 366791 - DNA, 25 bp, Homo sapien
gccgtgcctcgaatacctcaatggg

SEQ ID NO: 366792 - DNA, 25 bp, Homo sapien
ctgccgtgcctcgaatacctcaatg

SEQ ID NO: 366793 - DNA, 25 bp, Homo sapien
cgtgcctcgaatacctcaatgggca

SEQ ID NO: 366794 - DNA, 25 bp, Homo sapien
ccccaaggatatagagggctgctcg

SEQ ID NO: 366795 - DNA, 25 bp, Homo sapien
ctgctcgctgcggacgcaggaagcc

SEQ ID NO: 366796 - DNA, 25 bp, Homo sapien
ccaaggatatagagggctgctcgct

SEQ ID NO: 366797 - DNA, 25 bp, Homo sapien
tccccaaggatatagagggctgctc

SEQ ID NO: 366798 - DNA, 25 bp, Homo sapien
agctagccgggagcccacatcggtg

SEQ ID NO: 366799 - DNA, 25 bp, Homo sapien
ccacatcggtgccaaggccactgct

SEQ ID NO: 366800 - DNA, 25 bp, Homo sapien
tgctgcgtccactggtccggacact

SEQ ID NO: 366801 - DNA, 25 bp, Homo sapien
gccagcgcgtctctgccagctagcc

SEQ ID NO: 366802 - DNA, 25 bp, Homo sapien
aggagatgccaggtaagcacccaaa

SEQ ID NO: 366803 - DNA, 25 bp, Homo sapien
atgccaggtaagcacccaaaggggg

SEQ ID NO: 366804 - DNA, 25 bp, Homo sapien
caggtaagcacccaaagggggccag

SEQ ID NO: 366805 - DNA, 25 bp, Homo sapien
agatgccaggtaagcacccaaaggg

SEQ ID NO: 366806 - DNA, 25 bp, Homo sapien
ggaccccagcagggccgtgcgagag

SEQ ID NO: 366807 - DNA, 25 bp, Homo sapien
cccagcagggccgtgcgagaggagg

SEQ ID NO: 366808 - DNA, 25 bp, Homo sapien
ggccgtgcgagaggagggctggaac

SEQ ID NO: 366809 - DNA, 25 bp, Homo sapien
cagggccgtgcgagaggagggctgg

SEQ ID NO: 366810 - DNA, 25 bp, Homo sapien
tcgttagtgtcaggtgtggagggag

SEQ ID NO: 366811 - DNA, 25 bp, Homo sapien
agtgcacactagaggccgccagcac

SEQ ID NO: 366812 - DNA, 25 bp, Homo sapien
ctcgggagacgggtcgttagtgtca

SEQ ID NO: 366813 - DNA, 25 bp, Homo sapien
ttagtgcccgcaataactcagtgca

SEQ ID NO: 366814 - DNA, 25 bp, Homo sapien
ggtgcggtccgtctggaggccgagg

SEQ ID NO: 366815 - DNA, 25 bp, Homo sapien
gtgcggtccgtctggaggccgaggc

SEQ ID NO: 366816 - DNA, 25 bp, Homo sapien
ggggtgcggtccgtctggaggccga

SEQ ID NO: 366817 - DNA, 25 bp, Homo sapien
ctcggggtgcggtccgtctggaggc

SEQ ID NO: 366818 - DNA, 25 bp, Homo sapien
cagagagaaggctcaggcctagccc

SEQ ID NO: 366819 - DNA, 25 bp, Homo sapien
agagaaggctcaggcctagccccag

SEQ ID NO: 366820 - DNA, 25 bp, Homo sapien
agagagaaggctcaggcctagcccc

SEQ ID NO: 366821 - DNA, 25 bp, Homo sapien
agaaggctcaggcctagccccaggc

SEQ ID NO: 366822 - DNA, 25 bp, Homo sapien
ctgggcgtgcccagcttgggggtgc

SEQ ID NO: 366823 - DNA, 25 bp, Homo sapien
ctacaggtcagagggttccaccaag

SEQ ID NO: 366824 - DNA, 25 bp, Homo sapien
agccccaagtccctgatcgcaggaa

SEQ ID NO: 366825 - DNA, 25 bp, Homo sapien
gcaggccgcagagcactccgtggca

SEQ ID NO: 366826 - DNA, 25 bp, Homo sapien
ccctgatcgcaggaaagtgggaaga

SEQ ID NO: 366827 - DNA, 25 bp, Homo sapien
cgagggtgggactgagagaggcaat

SEQ ID NO: 366828 - DNA, 25 bp, Homo sapien
cactacaggccaagcacaatgccag

SEQ ID NO: 366829 - DNA, 25 bp, Homo sapien
cctgtgtcctctgacggctgccaca

SEQ ID NO: 366830 - DNA, 25 bp, Homo sapien
tcgtccaccaagtggtcactacagg

SEQ ID NO: 366831 - DNA, 25 bp, Homo sapien
cgtagcggggcatggagctgaccac

SEQ ID NO: 366832 - DNA, 25 bp, Homo sapien
tgttgcgtcccgacgcgtcggcgta

SEQ ID NO: 366833 - DNA, 25 bp, Homo sapien
ggctactcgagtccgcctgggactg

SEQ ID NO: 366834 - DNA, 25 bp, Homo sapien
gagaagccgctaagcgtgttgcgtc

SEQ ID NO: 366835 - DNA, 25 bp, Homo sapien
gaggggagggtgagatagggcaggg

SEQ ID NO: 366836 - DNA, 25 bp, Homo sapien
gcacagggcaggacgcaggaggtac

SEQ ID NO: 366837 - DNA, 25 bp, Homo sapien
aggcacagggcaggacgcaggaggt

SEQ ID NO: 366838 - DNA, 25 bp, Homo sapien
gggagggtgagatagggcagggcag

SEQ ID NO: 366839 - DNA, 25 bp, Homo sapien
gaagaggccgacgacacctttgcca

SEQ ID NO: 366840 - DNA, 25 bp, Homo sapien
cgctgcgccagcagaccacggggaa

SEQ ID NO: 366841 - DNA, 25 bp, Homo sapien
aggccgacgacacctttgccatgca

SEQ ID NO: 366842 - DNA, 25 bp, Homo sapien
caccgccttggaccgcccgctgcgc

SEQ ID NO: 366843 - DNA, 25 bp, Homo sapien
cgtgaaggtggctggcgaccccacc

SEQ ID NO: 366844 - DNA, 25 bp, Homo sapien
agaggaggcagaggcgtgaaggtgg

SEQ ID NO: 366845 - DNA, 25 bp, Homo sapien
aggctcacgccccaagcagggcaag

SEQ ID NO: 366846 - DNA, 25 bp, Homo sapien
tcacgccccaagcagggcaagagga

SEQ ID NO: 366847 - DNA, 25 bp, Homo sapien
tgcccagaccgaggcgctggtagtc

SEQ ID NO: 366848 - DNA, 25 bp, Homo sapien
tcatgcggtcggagggcttcagggc

SEQ ID NO: 366849 - DNA, 25 bp, Homo sapien
cggagaaatgcggaagggctcagac

SEQ ID NO: 366850 - DNA, 25 bp, Homo sapien
gctggtagtcgcgacagcaagccct

SEQ ID NO: 366851 - DNA, 25 bp, Homo sapien
ggcggctggccccggtgctcccagc

SEQ ID NO: 366852 - DNA, 25 bp, Homo sapien
tgagatctcgtcctcctggtcctca

SEQ ID NO: 366853 - DNA, 25 bp, Homo sapien
ctggtcctcagggggcggctggccc

SEQ ID NO: 366854 - DNA, 25 bp, Homo sapien
ctgagatctcgtcctcctggtcctc

SEQ ID NO: 366855 - DNA, 25 bp, Homo sapien
tggcgttcttgaccaggttccggga

SEQ ID NO: 366856 - DNA, 25 bp, Homo sapien
gcgttcttgaccaggttccgggaca

SEQ ID NO: 366857 - DNA, 25 bp, Homo sapien
gaggagggacaaagatgagcacagg

SEQ ID NO: 366858 - DNA, 25 bp, Homo sapien
gaggaggagggacaaagatgagcac

SEQ ID NO: 366859 - DNA, 25 bp, Homo sapien
gaggcccacgagagtcagcaaaggt

SEQ ID NO: 366860 - DNA, 25 bp, Homo sapien
ctgaggcccacgagagtcagcaaag

SEQ ID NO: 366861 - DNA, 25 bp, Homo sapien
tgtccggcgggtaccgcagcttatg

SEQ ID NO: 366862 - DNA, 25 bp, Homo sapien
ttacggaagagctcggcgctgtcag

SEQ ID NO: 366863 - DNA, 25 bp, Homo sapien
aaggtgaacgcaaaggtggccctga

SEQ ID NO: 366864 - DNA, 25 bp, Homo sapien
tggtgactcgcggtggccggccagg

SEQ ID NO: 366865 - DNA, 25 bp, Homo sapien
gtctggacgctgatgcgcttctcct

SEQ ID NO: 366866 - DNA, 25 bp, Homo sapien
ggacgctgatgcgcttctccttggt

SEQ ID NO: 366867 - DNA, 25 bp, Homo sapien
gagctggtccacaggggtctggacg

SEQ ID NO: 366868 - DNA, 25 bp, Homo sapien
ctggacgctgatgcgcttctccttg

SEQ ID NO: 366869 - DNA, 25 bp, Homo sapien
atccccgtgaagatgacccggtacg

SEQ ID NO: 366870 - DNA, 25 bp, Homo sapien
gcatccccgtgaagatgacccggta

SEQ ID NO: 366871 - DNA, 25 bp, Homo sapien
catccccgtgaagatgacccggtac

SEQ ID NO: 366872 - DNA, 25 bp, Homo sapien
cctccagggtctcgatgtgcatctg

SEQ ID NO: 366873 - DNA, 25 bp, Homo sapien
cttctggatgggcggcagcctccgg

SEQ ID NO: 366874 - DNA, 25 bp, Homo sapien
gcctccagggtctcgatgtgcatct

SEQ ID NO: 366875 - DNA, 25 bp, Homo sapien
ctggcaccatgacatgcagcccctt

SEQ ID NO: 366876 - DNA, 25 bp, Homo sapien
tggcaccatgacatgcagccccttg

SEQ ID NO: 366877 - DNA, 25 bp, Homo sapien
ggcaccatgacatgcagccccttga

SEQ ID NO: 366878 - DNA, 25 bp, Homo sapien
gcaccatgacatgcagccccttgag

SEQ ID NO: 366879 - DNA, 25 bp, Homo sapien
gccccagctacgtcgcaggtctctg

SEQ ID NO: 366880 - DNA, 25 bp, Homo sapien
ccagctacgtcgcaggtctctgcat

SEQ ID NO: 366881 - DNA, 25 bp, Homo sapien
gctacgtcgcaggtctctgcatcct

SEQ ID NO: 366882 - DNA, 25 bp, Homo sapien
ctgcatcctcgaagccgctctccgt

SEQ ID NO: 366883 - DNA, 25 bp, Homo sapien
acgtctagggcagagcgctcgtcct

SEQ ID NO: 366884 - DNA, 25 bp, Homo sapien
cggcacgctcccgaagtaggcggct

SEQ ID NO: 366885 - DNA, 25 bp, Homo sapien
gcttctcacgactcagagttggcca

SEQ ID NO: 366886 - DNA, 25 bp, Homo sapien
tagctcatgcggttggcatagtgga

SEQ ID NO: 366887 - DNA, 25 bp, Homo sapien
accacacgcatgagccggggccacg

SEQ ID NO: 366888 - DNA, 25 bp, Homo sapien
gccacggcaccacacgcatgagccg

SEQ ID NO: 366889 - DNA, 25 bp, Homo sapien
cacggcaccacacgcatgagccggg

SEQ ID NO: 366890 - DNA, 25 bp, Homo sapien
ctgccacggcaccacacgcatgagc

SEQ ID NO: 366891 - DNA, 25 bp, Homo sapien
gagtctgcacatccccatagaacat

SEQ ID NO: 366892 - DNA, 25 bp, Homo sapien
tgcacatccccatagaacatggcct

SEQ ID NO: 366893 - DNA, 25 bp, Homo sapien
tgtgagtctgcacatccccatagaa

SEQ ID NO: 366894 - DNA, 25 bp, Homo sapien
agctgtatgcaaactgcgtcacccc

SEQ ID NO: 366895 - DNA, 25 bp, Homo sapien
agagccgccgcaatgccatgctcgt

SEQ ID NO: 366896 - DNA, 25 bp, Homo sapien
agaggcagcagagccgccgcaatgc

SEQ ID NO: 366897 - DNA, 25 bp, Homo sapien
agcagagccgccgcaatgccatgct

SEQ ID NO: 366898 - DNA, 25 bp, Homo sapien
gcagcagagccgccgcaatgccatg

SEQ ID NO: 366899 - DNA, 25 bp, Homo sapien
catacggacgacaaagtcaaactgc

SEQ ID NO: 366900 - DNA, 25 bp, Homo sapien
agggccctcaacacggctgggagca

SEQ ID NO: 366901 - DNA, 25 bp, Homo sapien
gcagttcatcatacggacgacaaag

SEQ ID NO: 366902 - DNA, 25 bp, Homo sapien
accgcacggttctgctgcacatgca

SEQ ID NO: 366903 - DNA, 25 bp, Homo sapien
gagggcacagagaagacccactcgg

SEQ ID NO: 366904 - DNA, 25 bp, Homo sapien
ggtggggaaaggagacacgggctga

SEQ ID NO: 366905 - DNA, 25 bp, Homo sapien
agacacgggctgagggcacagagaa

SEQ ID NO: 366906 - DNA, 25 bp, Homo sapien
gcacagagaagacccactcggggcc

SEQ ID NO: 366907 - DNA, 25 bp, Homo sapien
ccactgcaccgctccagtatggcag

SEQ ID NO: 366908 - DNA, 25 bp, Homo sapien
agccgccgggcgctgttgacatgca

SEQ ID NO: 366909 - DNA, 25 bp, Homo sapien
cacgtaggagatgcagttgcgcaca

SEQ ID NO: 366910 - DNA, 25 bp, Homo sapien
gcgctgttgacatgcagcccactgc

SEQ ID NO: 366911 - DNA, 25 bp, Homo sapien
gtggtcctcctctcggccttcacag

SEQ ID NO: 366912 - DNA, 25 bp, Homo sapien
agggcacggtggtcctcctctcggc

SEQ ID NO: 366913 - DNA, 25 bp, Homo sapien
gggcacggtggtcctcctctcggcc

SEQ ID NO: 366914 - DNA, 25 bp, Homo sapien
ggcacccgtcgcaggtggctgctct

SEQ ID NO: 366915 - DNA, 25 bp, Homo sapien
cttggctgcagcctggtccacgatc

SEQ ID NO: 366916 - DNA, 25 bp, Homo sapien
atcgccacggctgggtacgggttct

SEQ ID NO: 366917 - DNA, 25 bp, Homo sapien
tctgtaccttgtgcatcgccacggc

SEQ ID NO: 366918 - DNA, 25 bp, Homo sapien
gggtggttctcatccgcccgcatcc

SEQ ID NO: 366919 - DNA, 25 bp, Homo sapien
atccttgccacctcgtgggccacca

SEQ ID NO: 366920 - DNA, 25 bp, Homo sapien
tcctggacgtgacgcaggacacgct

SEQ ID NO: 366921 - DNA, 25 bp, Homo sapien
gcccgcatccttgccacctcgtggg

SEQ ID NO: 366922 - DNA, 25 bp, Homo sapien
ctcatcgaacaggtccgtagggcgg

SEQ ID NO: 366923 - DNA, 25 bp, Homo sapien
caccttcatcaggaaatcgtcctct

SEQ ID NO: 366924 - DNA, 25 bp, Homo sapien
atcgtcctctaccagcccacgctgg

SEQ ID NO: 366925 - DNA, 25 bp, Homo sapien
agggcggtatgggaccccacgctct

SEQ ID NO: 366926 - DNA, 25 bp, Homo sapien
tgcagcagctgagcgaacagccgca

SEQ ID NO: 366927 - DNA, 25 bp, Homo sapien
agccgcaggaagaccgcgcgcagct

SEQ ID NO: 366928 - DNA, 25 bp, Homo sapien
agcgaacagccgcaggaagaccgcg

SEQ ID NO: 366929 - DNA, 25 bp, Homo sapien
gctgagcgaacagccgcaggaagac

SEQ ID NO: 366930 - DNA, 25 bp, Homo sapien
ggtggatgtcgtgggcggagggaag

SEQ ID NO: 366931 - DNA, 25 bp, Homo sapien
tccagatcagcaacaatcacatcga

SEQ ID NO: 366932 - DNA, 25 bp, Homo sapien
aatggtgaccgtccctccatccaga

SEQ ID NO: 366933 - DNA, 25 bp, Homo sapien
ccagatcagcaacaatcacatcgag

SEQ ID NO: 366934 - DNA, 25 bp, Homo sapien
cacactcaggaatggtgaccgtccc

SEQ ID NO: 366935 - DNA, 25 bp, Homo sapien
caagggagccggcagtcagggacct

SEQ ID NO: 366936 - DNA, 25 bp, Homo sapien
tgcggaccaagggagccggcagtca

SEQ ID NO: 366937 - DNA, 25 bp, Homo sapien
caggcctgggccgtgaggtggacac

SEQ ID NO: 366938 - DNA, 25 bp, Homo sapien
ggtggacacaaagcacagcccttac

SEQ ID NO: 366939 - DNA, 25 bp, Homo sapien
aggccgcgttgaccccaatgatgaa

SEQ ID NO: 366940 - DNA, 25 bp, Homo sapien
tgagccaggggacgcggctgggcaa

SEQ ID NO: 366941 - DNA, 25 bp, Homo sapien
caggggacgcggctgggcaaagggg

SEQ ID NO: 366942 - DNA, 25 bp, Homo sapien
gcagtgagccaggggacgcggctgg

SEQ ID NO: 366943 - DNA, 25 bp, Homo sapien
agtgagccaggggacgcggctgggc

SEQ ID NO: 366944 - DNA, 25 bp, Homo sapien
ctgagaggaaacagcagtgccagga

SEQ ID NO: 366945 - DNA, 25 bp, Homo sapien
aaacagcagtgccaggaggccccta

SEQ ID NO: 366946 - DNA, 25 bp, Homo sapien
ctgtatctgagaggaaacagcagtg

SEQ ID NO: 366947 - DNA, 25 bp, Homo sapien
aacagcagtgccaggaggcccctac

SEQ ID NO: 366948 - DNA, 25 bp, Homo sapien
gagggcggcacagaacaaagacagc

SEQ ID NO: 366949 - DNA, 25 bp, Homo sapien
agaaccttgtgctccgtgagggcgg

SEQ ID NO: 366950 - DNA, 25 bp, Homo sapien
agagaaccttgtgctccgtgagggc

SEQ ID NO: 366951 - DNA, 25 bp, Homo sapien
gagaaccttgtgctccgtgagggcg

SEQ ID NO: 366952 - DNA, 25 bp, Homo sapien
gcggctgacgggcagcgagtcggcc

SEQ ID NO: 366953 - DNA, 25 bp, Homo sapien
cagcggctgacgggcagcgagtcgg

SEQ ID NO: 366954 - DNA, 25 bp, Homo sapien
gggccacgctgcagcggctgacggg

SEQ ID NO: 366955 - DNA, 25 bp, Homo sapien
ggctgacgggcagcgagtcggccag

SEQ ID NO: 366956 - DNA, 25 bp, Homo sapien
gcacaggacagacgggcagaaagac

SEQ ID NO: 366957 - DNA, 25 bp, Homo sapien
tggcaagagggaaacgccatgccct

SEQ ID NO: 366958 - DNA, 25 bp, Homo sapien
gcagaccctggtgtactgacagacc

SEQ ID NO: 366959 - DNA, 25 bp, Homo sapien
gaaagacacggttagacactccaac

SEQ ID NO: 366960 - DNA, 25 bp, Homo sapien
acgaggacgcaagagggagcatcca

SEQ ID NO: 366961 - DNA, 25 bp, Homo sapien
agagaggctgaacgacacaggccca

SEQ ID NO: 366962 - DNA, 25 bp, Homo sapien
cacaccatcaaaggagtggacagag

SEQ ID NO: 366963 - DNA, 25 bp, Homo sapien
caagctgacatcaacatccagagac

SEQ ID NO: 366964 - DNA, 25 bp, Homo sapien
ggctgtgcagataccagctgcctcc

SEQ ID NO: 366965 - DNA, 25 bp, Homo sapien
tggctgtgcagataccagctgcctc

SEQ ID NO: 366966 - DNA, 25 bp, Homo sapien
agcaggttcccaatcacgttctcca

SEQ ID NO: 366967 - DNA, 25 bp, Homo sapien
cagcaggttcccaatcacgttctcc

SEQ ID NO: 366968 - DNA, 25 bp, Homo sapien
gggagtggtgggacagccgatggaa

SEQ ID NO: 366969 - DNA, 25 bp, Homo sapien
agccgatggaagcaccctcgtcgtg

SEQ ID NO: 366970 - DNA, 25 bp, Homo sapien
gtgggacagccgatggaagcaccct

SEQ ID NO: 366971 - DNA, 25 bp, Homo sapien
atggaagcaccctcgtcgtgcctcg

SEQ ID NO: 366972 - DNA, 25 bp, Homo sapien
tggtcgagtcgcgacaccagtacca

SEQ ID NO: 366973 - DNA, 25 bp, Homo sapien
tgaacacctccgtgtggtcgagtcg

SEQ ID NO: 366974 - DNA, 25 bp, Homo sapien
gtaccagcgtcttcggtgcaaacag

SEQ ID NO: 366975 - DNA, 25 bp, Homo sapien
cgacaccagtaccagcgtcttcggt

SEQ ID NO: 366976 - DNA, 25 bp, Homo sapien
tgtggcatcctccacgcgcgtcgtt

SEQ ID NO: 366977 - DNA, 25 bp, Homo sapien
ctgtggcatcctccacgcgcgtcgt

SEQ ID NO: 366978 - DNA, 25 bp, Homo sapien
tggcatcctccacgcgcgtcgtttc

SEQ ID NO: 366979 - DNA, 25 bp, Homo sapien
gtggcatcctccacgcgcgtcgttt

SEQ ID NO: 366980 - DNA, 25 bp, Homo sapien
gccacggcccaaggatgcagcttca

SEQ ID NO: 366981 - DNA, 25 bp, Homo sapien
ccacggcccaaggatgcagcttcat

SEQ ID NO: 366982 - DNA, 25 bp, Homo sapien
cacggcccaaggatgcagcttcatt

SEQ ID NO: 366983 - DNA, 25 bp, Homo sapien
agcaggcgcagtagtggcgctcgga

SEQ ID NO: 366984 - DNA, 25 bp, Homo sapien
caagcaggcgcagtagtggcgctcg

SEQ ID NO: 366985 - DNA, 25 bp, Homo sapien
cagaaggtcaagcaggcgcagtagt

SEQ ID NO: 366986 - DNA, 25 bp, Homo sapien
caggcgcagtagtggcgctcggagt

SEQ ID NO: 366987 - DNA, 25 bp, Homo sapien
gaagcgctgcagaatctggccctgg

SEQ ID NO: 366988 - DNA, 25 bp, Homo sapien
ggaagcgctgcagaatctggccctg

SEQ ID NO: 366989 - DNA, 25 bp, Homo sapien
gcagcagctagacgggaaggatgga

SEQ ID NO: 366990 - DNA, 25 bp, Homo sapien
gatggagacttggtccaggacgacc

SEQ ID NO: 366991 - DNA, 25 bp, Homo sapien
tcagaggagagtgggacggtggtca

SEQ ID NO: 366992 - DNA, 25 bp, Homo sapien
ccaccgaaggatgcccagatggctt

SEQ ID NO: 366993 - DNA, 25 bp, Homo sapien
caggaagcccggtggggaccacagt

SEQ ID NO: 366994 - DNA, 25 bp, Homo sapien
ccctggagagccaaaccaggaagcc

SEQ ID NO: 366995 - DNA, 25 bp, Homo sapien
aggacggctccgcaggcctcccagg

SEQ ID NO: 366996 - DNA, 25 bp, Homo sapien
ggacactcagggtgtggctcccgca

SEQ ID NO: 366997 - DNA, 25 bp, Homo sapien
ccatcctctgtctggacgggcctct

SEQ ID NO: 366998 - DNA, 25 bp, Homo sapien
tcctctgtctggacgggcctctaca

SEQ ID NO: 366999 - DNA, 25 bp, Homo sapien
ggcccatcctctgtctggacgggcc

SEQ ID NO: 367000 - DNA, 25 bp, Homo sapien
atcctctgtctggacgggcctctac

SEQ ID NO: 367001 - DNA, 25 bp, Homo sapien
tgggcaaggcgggggtcatgctcaa

SEQ ID NO: 367002 - DNA, 25 bp, Homo sapien
gccagatgggcaaggcgggggtcat

SEQ ID NO: 367003 - DNA, 25 bp, Homo sapien
ccagatgggcaaggcgggggtcatg

SEQ ID NO: 367004 - DNA, 25 bp, Homo sapien
caaggcgggggtcatgctcaacaca

SEQ ID NO: 367005 - DNA, 25 bp, Homo sapien
tgctggcagcaccccatcatcagtg

SEQ ID NO: 367006 - DNA, 25 bp, Homo sapien
gctggcagcaccccatcatcagtgc

SEQ ID NO: 367007 - DNA, 25 bp, Homo sapien
atcagtgccaggctctgacgcctgg

SEQ ID NO: 367008 - DNA, 25 bp, Homo sapien
gggaggcaaagaaggatggcagcct

SEQ ID NO: 367009 - DNA, 25 bp, Homo sapien
ctgtggggaggcaaagaaggatggc

SEQ ID NO: 367010 - DNA, 25 bp, Homo sapien
tggggaggcaaagaaggatggcagc

SEQ ID NO: 367011 - DNA, 25 bp, Homo sapien
aggcaaagaaggatggcagcctctc

SEQ ID NO: 367012 - DNA, 25 bp, Homo sapien
ccacagtgcacgaagaccagccctg

SEQ ID NO: 367013 - DNA, 25 bp, Homo sapien
ccccacagtgcacgaagaccagccc

SEQ ID NO: 367014 - DNA, 25 bp, Homo sapien
ccctggccggctctgctgcttgtgg

SEQ ID NO: 367015 - DNA, 25 bp, Homo sapien
cacagtgcacgaagaccagccctgg

SEQ ID NO: 367016 - DNA, 25 bp, Homo sapien
gtgcacatggctccctcggccgcag

SEQ ID NO: 367017 - DNA, 25 bp, Homo sapien
caacgtgcacatggctccctcggcc

SEQ ID NO: 367018 - DNA, 25 bp, Homo sapien
acatggctccctcggccgcagcagc

SEQ ID NO: 367019 - DNA, 25 bp, Homo sapien
ccaaccccaacgtgcacatggctcc

SEQ ID NO: 367020 - DNA, 25 bp, Homo sapien
ggaggagaggcgaggccatagggtg

SEQ ID NO: 367021 - DNA, 25 bp, Homo sapien
catagggtgaaaggtctttttctca

SEQ ID NO: 367022 - DNA, 25 bp, Homo sapien
tagggtgaaaggtctttttctcaga

SEQ ID NO: 367023 - DNA, 25 bp, Homo sapien
gagaggcgaggccatagggtgaaag

SEQ ID NO: 367024 - DNA, 25 bp, Homo sapien
ggccagcgctggccaccatcactct

SEQ ID NO: 367025 - DNA, 25 bp, Homo sapien
gcagatgggccagcgctggccacca

SEQ ID NO: 367026 - DNA, 25 bp, Homo sapien
gatgggccagcgctggccaccatca

SEQ ID NO: 367027 - DNA, 25 bp, Homo sapien
ctgcagatgggccagcgctggccac

SEQ ID NO: 367028 - DNA, 25 bp, Homo sapien
atgcccctcataggtgcctcggtgc

SEQ ID NO: 367029 - DNA, 25 bp, Homo sapien
gcccctcataggtgcctcggtgcag

SEQ ID NO: 367030 - DNA, 25 bp, Homo sapien
tgcccctcataggtgcctcggtgca

SEQ ID NO: 367031 - DNA, 25 bp, Homo sapien
aacgccaccagcacgaagtagtccg

SEQ ID NO: 367032 - DNA, 25 bp, Homo sapien
ggtgcggcccgaacgccaccagcac

SEQ ID NO: 367033 - DNA, 25 bp, Homo sapien
gtgcggcccgaacgccaccagcacg

SEQ ID NO: 367034 - DNA, 25 bp, Homo sapien
ccgaacgccaccagcacgaagtagt

SEQ ID NO: 367035 - DNA, 25 bp, Homo sapien
gaggacggcgcgctcatggcccggc

SEQ ID NO: 367036 - DNA, 25 bp, Homo sapien
gccctggaccgcgcaccccggacac

SEQ ID NO: 367037 - DNA, 25 bp, Homo sapien
ctcgaggacggcgcgctcatggccc

SEQ ID NO: 367038 - DNA, 25 bp, Homo sapien
ggccctggaccgcgcaccccggaca

SEQ ID NO: 367039 - DNA, 25 bp, Homo sapien
gcggcccaggttcccgccgccatct

SEQ ID NO: 367040 - DNA, 25 bp, Homo sapien
ccgccgccatcttcccagccagccg

SEQ ID NO: 367041 - DNA, 25 bp, Homo sapien
cgccgccatcttcccagccagccgg

SEQ ID NO: 367042 - DNA, 25 bp, Homo sapien
gcggcggcccaggttcccgccgcca

SEQ ID NO: 367043 - DNA, 25 bp, Homo sapien
aacggacgcagagatcctcagctca

SEQ ID NO: 367044 - DNA, 25 bp, Homo sapien
ctcagctcacccaacagagaggcca

SEQ ID NO: 367045 - DNA, 25 bp, Homo sapien
ttggaacccgtgacaccaagtccag

SEQ ID NO: 367046 - DNA, 25 bp, Homo sapien
gtctcagcagcttggaacccgtgac

SEQ ID NO: 367047 - DNA, 25 bp, Homo sapien
tcccgggccggtcgccgagcgctcc

SEQ ID NO: 367048 - DNA, 25 bp, Homo sapien
caccagaaggcgcttggagtgaggc

SEQ ID NO: 367049 - DNA, 25 bp, Homo sapien
ggatcagctcggacgacggttcgcc

SEQ ID NO: 367050 - DNA, 25 bp, Homo sapien
gtgaggctggcggtcccgcggtccc

SEQ ID NO: 367051 - DNA, 25 bp, Homo sapien
tgtaccccggaagcagacgtctgct

SEQ ID NO: 367052 - DNA, 25 bp, Homo sapien
gtgacggtggtgagtacccagaccc

SEQ ID NO: 367053 - DNA, 25 bp, Homo sapien
tccctctcaggatgaaggtgacggt

SEQ ID NO: 367054 - DNA, 25 bp, Homo sapien
tactgcggacacttatgtaacctgg

SEQ ID NO: 367055 - DNA, 25 bp, Homo sapien
ggttttggacagctccaatgtctgg

SEQ ID NO: 367056 - DNA, 25 bp, Homo sapien
catttcaggcgggaagtctctgcag

SEQ ID NO: 367057 - DNA, 25 bp, Homo sapien
tggaaattctccacaagccaaggtt

SEQ ID NO: 367058 - DNA, 25 bp, Homo sapien
gctgtgcctggtcgtctcaccttct

SEQ ID NO: 367059 - DNA, 25 bp, Homo sapien
tattccatgtataggagccccttga

SEQ ID NO: 367060 - DNA, 25 bp, Homo sapien
ttattccatgtataggagccccttg

SEQ ID NO: 367061 - DNA, 25 bp, Homo sapien
tccatgtataggagccccttgaaga

SEQ ID NO: 367062 - DNA, 25 bp, Homo sapien
ttccatgtataggagccccttgaag

SEQ ID NO: 367063 - DNA, 25 bp, Homo sapien
ggtgcccagggagccacgccgtggc

SEQ ID NO: 367064 - DNA, 25 bp, Homo sapien
gcccagggagccacgccgtggcgga

SEQ ID NO: 367065 - DNA, 25 bp, Homo sapien
gggagccacgccgtggcggagcctg

SEQ ID NO: 367066 - DNA, 25 bp, Homo sapien
agccacgccgtggcggagcctgact

SEQ ID NO: 367067 - DNA, 25 bp, Homo sapien
aggggagacaatcccatcctcatgc

SEQ ID NO: 367068 - DNA, 25 bp, Homo sapien
agcttggtcgtgttttcctcctggg

SEQ ID NO: 367069 - DNA, 25 bp, Homo sapien
aagacgcctttattggtgcccagat

SEQ ID NO: 367070 - DNA, 25 bp, Homo sapien
tcacagaggcaatagtgggagtcct

SEQ ID NO: 367071 - DNA, 25 bp, Homo sapien
tgtgaagatgacgtggaagatgaca

SEQ ID NO: 367072 - DNA, 25 bp, Homo sapien
tggtcctcgaactactggagcaggg

SEQ ID NO: 367073 - DNA, 25 bp, Homo sapien
tgcggtggcctgttcggaggcagct

SEQ ID NO: 367074 - DNA, 25 bp, Homo sapien
ccggagagaacagggtgctagcagg

SEQ ID NO: 367075 - DNA, 25 bp, Homo sapien
ggctgcggtggcctgttcggaggca

SEQ ID NO: 367076 - DNA, 25 bp, Homo sapien
ctgcgggtgcgaggtgggcttttct

SEQ ID NO: 367077 - DNA, 25 bp, Homo sapien
tgcgggtgcgaggtgggcttttctc

SEQ ID NO: 367078 - DNA, 25 bp, Homo sapien
tcacccctgccacctcccccagcct

SEQ ID NO: 367079 - DNA, 25 bp, Homo sapien
cccagcctggctgacacccccttac

SEQ ID NO: 367080 - DNA, 25 bp, Homo sapien
tcccccagcctggctgacaccccct

SEQ ID NO: 367081 - DNA, 25 bp, Homo sapien
tgccacctcccccagcctggctgac

SEQ ID NO: 367082 - DNA, 25 bp, Homo sapien
ctgtagtccaaactgcctgagcagc

SEQ ID NO: 367083 - DNA, 25 bp, Homo sapien
cccagggacacggatgggaagaact

SEQ ID NO: 367084 - DNA, 25 bp, Homo sapien
cagggacacggatgggaagaactcc

SEQ ID NO: 367085 - DNA, 25 bp, Homo sapien
tgcctgagcagcgtctccagcgtgg

SEQ ID NO: 367086 - DNA, 25 bp, Homo sapien
ctcggacgtaggtgggcggctgctt

SEQ ID NO: 367087 - DNA, 25 bp, Homo sapien
ctgcttgtggaagggatacctggcc

SEQ ID NO: 367088 - DNA, 25 bp, Homo sapien
acttgtagcgctgggctcggacgta

SEQ ID NO: 367089 - DNA, 25 bp, Homo sapien
ctgggagaaccagtacttgtagcgc

SEQ ID NO: 367090 - DNA, 25 bp, Homo sapien
ctgcagcgagaggcatcagcgtggc

SEQ ID NO: 367091 - DNA, 25 bp, Homo sapien
cagcgagaggcatcagcgtggcccc

SEQ ID NO: 367092 - DNA, 25 bp, Homo sapien
gaggcatcagcgtggcccccacagt

SEQ ID NO: 367093 - DNA, 25 bp, Homo sapien
aggcatcagcgtggcccccacagta

SEQ ID NO: 367094 - DNA, 25 bp, Homo sapien
caggcttgtgaaccacgggctgtgc

SEQ ID NO: 367095 - DNA, 25 bp, Homo sapien
ctgcagcaggcgcaagaccaggctt

SEQ ID NO: 367096 - DNA, 25 bp, Homo sapien
aagaccaggcttgtgaaccacgggc

SEQ ID NO: 367097 - DNA, 25 bp, Homo sapien
caggcgcaagaccaggcttgtgaac

SEQ ID NO: 367098 - DNA, 25 bp, Homo sapien
tcccaggcttgtacatgaactcgat

SEQ ID NO: 367099 - DNA, 25 bp, Homo sapien
gctcaggttcccaggcttgtacatg

SEQ ID NO: 367100 - DNA, 25 bp, Homo sapien
caggttcccaggcttgtacatgaac

SEQ ID NO: 367101 - DNA, 25 bp, Homo sapien
caggcttgtacatgaactcgatctc

SEQ ID NO: 367102 - DNA, 25 bp, Homo sapien
gctgggcccgctgacctgggcccca

SEQ ID NO: 367103 - DNA, 25 bp, Homo sapien
caggcaggccgaggtcagctgggcc

SEQ ID NO: 367104 - DNA, 25 bp, Homo sapien
ggcaggccgaggtcagctgggcccg

SEQ ID NO: 367105 - DNA, 25 bp, Homo sapien
tgccaggcaggccgaggtcagctgg

SEQ ID NO: 367106 - DNA, 25 bp, Homo sapien
cggaagaggccgtaggagttggcca

SEQ ID NO: 367107 - DNA, 25 bp, Homo sapien
tccagtggtggccgtcgtaactgcc

SEQ ID NO: 367108 - DNA, 25 bp, Homo sapien
caagcccagtcatgcggcggaagag

SEQ ID NO: 367109 - DNA, 25 bp, Homo sapien
cagctgtaggtgctccacggcacca

SEQ ID NO: 367110 - DNA, 25 bp, Homo sapien
aggtgggaggttctcagggctgccc

SEQ ID NO: 367111 - DNA, 25 bp, Homo sapien
ctggagacaggtgggaggttctcag

SEQ ID NO: 367112 - DNA, 25 bp, Homo sapien
agacaggtgggaggttctcagggct

SEQ ID NO: 367113 - DNA, 25 bp, Homo sapien
caggtgggaggttctcagggctgcc

SEQ ID NO: 367114 - DNA, 25 bp, Homo sapien
cacaagggacagttggactacagca

SEQ ID NO: 367115 - DNA, 25 bp, Homo sapien
tacagcactgagcttccgtagccag

SEQ ID NO: 367116 - DNA, 25 bp, Homo sapien
gtcgcagtgcccacaagggacagtt

SEQ ID NO: 367117 - DNA, 25 bp, Homo sapien
aacaaggccacggtcgcagtgccca

SEQ ID NO: 367118 - DNA, 25 bp, Homo sapien
gggcaaggacccaaggtcgtcaggc

SEQ ID NO: 367119 - DNA, 25 bp, Homo sapien
tgtgggcaaggacccaaggtcgtca

SEQ ID NO: 367120 - DNA, 25 bp, Homo sapien
ctgtgggcaaggacccaaggtcgtc

SEQ ID NO: 367121 - DNA, 25 bp, Homo sapien
caaggacccaaggtcgtcaggccgg

SEQ ID NO: 367122 - DNA, 25 bp, Homo sapien
gtgccccctccctgcttcctgggcc

SEQ ID NO: 367123 - DNA, 25 bp, Homo sapien
cctccctgcttcctgggccatgtac

SEQ ID NO: 367124 - DNA, 25 bp, Homo sapien
ctgtgccccctccctgcttcctggg

SEQ ID NO: 367125 - DNA, 25 bp, Homo sapien
ccccctccctgcttcctgggccatg

SEQ ID NO: 367126 - DNA, 25 bp, Homo sapien
acagtgggcagcgtcagtgtcttca

SEQ ID NO: 367127 - DNA, 25 bp, Homo sapien
actgagaaaactggtggaaggtgaa

SEQ ID NO: 367128 - DNA, 25 bp, Homo sapien
tgtcttcagccactgagaaaactgg

SEQ ID NO: 367129 - DNA, 25 bp, Homo sapien
cacacagtgggcagcgtcagtgtct

SEQ ID NO: 367130 - DNA, 25 bp, Homo sapien
gtgtgaggactggtccgcccctgcc

SEQ ID NO: 367131 - DNA, 25 bp, Homo sapien
gggtgtgaggactggtccgcccctg

SEQ ID NO: 367132 - DNA, 25 bp, Homo sapien
ggtgtgaggactggtccgcccctgc

SEQ ID NO: 367133 - DNA, 25 bp, Homo sapien
tgcacagtgccataggccagaagcc

SEQ ID NO: 367134 - DNA, 25 bp, Homo sapien
cccgtagacggctagttccagcagc

SEQ ID NO: 367135 - DNA, 25 bp, Homo sapien
acctccaggccaaagtagtgcacag

SEQ ID NO: 367136 - DNA, 25 bp, Homo sapien
tggtgcgctgctgccagtcaacctc

SEQ ID NO: 367137 - DNA, 25 bp, Homo sapien
ccggtgatgataatcaggacctgca

SEQ ID NO: 367138 - DNA, 25 bp, Homo sapien
tcagcagccaggtgctggtcgtcca

SEQ ID NO: 367139 - DNA, 25 bp, Homo sapien
taagcaccagcgtcatcaggttgaa

SEQ ID NO: 367140 - DNA, 25 bp, Homo sapien
aagaagttgtagttgccggtgatga

SEQ ID NO: 367141 - DNA, 25 bp, Homo sapien
gggcggcacagcgatctcaattagg

SEQ ID NO: 367142 - DNA, 25 bp, Homo sapien
gtagaaagcagccaagcgcaggcgt

SEQ ID NO: 367143 - DNA, 25 bp, Homo sapien
gcaggcactgggtctcgtagtggta

SEQ ID NO: 367144 - DNA, 25 bp, Homo sapien
agaccggcaggtggtgtgcgaacca

SEQ ID NO: 367145 - DNA, 25 bp, Homo sapien
cctgaggcgaacatgaggcggaaca

SEQ ID NO: 367146 - DNA, 25 bp, Homo sapien
gaccacgcctgaggcgaacatgagg

SEQ ID NO: 367147 - DNA, 25 bp, Homo sapien
ggtcagcttgaccacgcctgaggcg

SEQ ID NO: 367148 - DNA, 25 bp, Homo sapien
gcttgaccacgcctgaggcgaacat

SEQ ID NO: 367149 - DNA, 25 bp, Homo sapien
cagccagaaggggaggtcttcgtgg

SEQ ID NO: 367150 - DNA, 25 bp, Homo sapien
gccagtctctagcagcagggagtcc

SEQ ID NO: 367151 - DNA, 25 bp, Homo sapien
tccttgcggtgggaggctggcctca

SEQ ID NO: 367152 - DNA, 25 bp, Homo sapien
ccaggaagccagtctctagcagcag

SEQ ID NO: 367153 - DNA, 25 bp, Homo sapien
tggaaataaaggaacacctggccca

SEQ ID NO: 367154 - DNA, 25 bp, Homo sapien
cactggaaataaaggaacacctggc

SEQ ID NO: 367155 - DNA, 25 bp, Homo sapien
tgtggactcaggtaaggtagaggca

SEQ ID NO: 367156 - DNA, 25 bp, Homo sapien
tgtgtctgtggactcaggtaaggta

SEQ ID NO: 367157 - DNA, 25 bp, Homo sapien
tgtctgtggactcaggtaaggtaga

SEQ ID NO: 367158 - DNA, 25 bp, Homo sapien
ctgtcagggagcgggtgtgtctgtg

SEQ ID NO: 367159 - DNA, 25 bp, Homo sapien
agcaagtagatgacagggtggcgca

SEQ ID NO: 367160 - DNA, 25 bp, Homo sapien
cagcaagtagatgacagggtggcgc

SEQ ID NO: 367161 - DNA, 25 bp, Homo sapien
gacagggtggcgcagtgggctcagc

SEQ ID NO: 367162 - DNA, 25 bp, Homo sapien
acagggtggcgcagtgggctcagca

SEQ ID NO: 367163 - DNA, 25 bp, Homo sapien
aggtaggatgccctcggggccatac

SEQ ID NO: 367164 - DNA, 25 bp, Homo sapien
agccccagtctcggcgcttcccaca

SEQ ID NO: 367165 - DNA, 25 bp, Homo sapien
gcttcccacagcagcgtcggggtct

SEQ ID NO: 367166 - DNA, 25 bp, Homo sapien
gtaggatgccctcggggccatacag

SEQ ID NO: 367167 - DNA, 25 bp, Homo sapien
cagcctaggtcagagcatgcggata

SEQ ID NO: 367168 - DNA, 25 bp, Homo sapien
tggacagcccttgcagactagacta

SEQ ID NO: 367169 - DNA, 25 bp, Homo sapien
gactagactacctctgagtcagggc

SEQ ID NO: 367170 - DNA, 25 bp, Homo sapien
gtcagagtctgcagtccctccagag

SEQ ID NO: 367171 - DNA, 25 bp, Homo sapien
tctcccacctctctcagagttctgt

SEQ ID NO: 367172 - DNA, 25 bp, Homo sapien
ggactgcgtgagtgccgggcacaga

SEQ ID NO: 367173 - DNA, 25 bp, Homo sapien
gaaaagaggacatagggtcccgcgc

SEQ ID NO: 367174 - DNA, 25 bp, Homo sapien
ccttacgggaaatggatcaccgcac

SEQ ID NO: 367175 - DNA, 25 bp, Homo sapien
gaaagcaaacatgaagacggccgcc

SEQ ID NO: 367176 - DNA, 25 bp, Homo sapien
cgtgtagagggaagcgaaagcaaac

SEQ ID NO: 367177 - DNA, 25 bp, Homo sapien
ctgggatttgcgtgtagagggaagc

SEQ ID NO: 367178 - DNA, 25 bp, Homo sapien
agacggccgccacgccctggaggaa

SEQ ID NO: 367179 - DNA, 25 bp, Homo sapien
ctacgcggcccgctagagcagggcc

SEQ ID NO: 367180 - DNA, 25 bp, Homo sapien
gcccgcccgcccgcggcagtcccag

SEQ ID NO: 367181 - DNA, 25 bp, Homo sapien
ccgcccgcccgcggcagtcccaggc

SEQ ID NO: 367182 - DNA, 25 bp, Homo sapien
cagccccaagccccgcctcctcggc

SEQ ID NO: 367183 - DNA, 25 bp, Homo sapien
gcccgcccgcggcagtcccaggccc

SEQ ID NO: 367184 - DNA, 25 bp, Homo sapien
caggccccgcctcctcaccgccccg

SEQ ID NO: 367185 - DNA, 25 bp, Homo sapien
gcagggagggatgggcggattcgag

SEQ ID NO: 367186 - DNA, 25 bp, Homo sapien
cctgcatcctgcgtgaaggtaggag

SEQ ID NO: 367187 - DNA, 25 bp, Homo sapien
ggcggattcgaggactggctgcctg

SEQ ID NO: 367188 - DNA, 25 bp, Homo sapien
ctgcccaggaggtacatgctgcggg

SEQ ID NO: 367189 - DNA, 25 bp, Homo sapien
agagcctgaggagtacatggagccc

SEQ ID NO: 367190 - DNA, 25 bp, Homo sapien
tagagcctgaggagtacatggagcc

SEQ ID NO: 367191 - DNA, 25 bp, Homo sapien
tctagagcctgaggagtacatggag

SEQ ID NO: 367192 - DNA, 25 bp, Homo sapien
ctttctagagcctgaggagtacatg

SEQ ID NO: 367193 - DNA, 25 bp, Homo sapien
tgtccctgagctacgaggagctggt

SEQ ID NO: 367194 - DNA, 25 bp, Homo sapien
ccgatgtccctgagctacgaggagc

SEQ ID NO: 367195 - DNA, 25 bp, Homo sapien
cctgagctacgaggagctggttcga

SEQ ID NO: 367196 - DNA, 25 bp, Homo sapien
ctacgaggagctggttcgaaggaat

SEQ ID NO: 367197 - DNA, 25 bp, Homo sapien
cagcgcatcagggactgggaggaca

SEQ ID NO: 367198 - DNA, 25 bp, Homo sapien
agagctgagccagcgcatcagggac

SEQ ID NO: 367199 - DNA, 25 bp, Homo sapien
cagagctgagccagcgcatcaggga

SEQ ID NO: 367200 - DNA, 25 bp, Homo sapien
atcagggactgggaggacacagtgc

SEQ ID NO: 367201 - DNA, 25 bp, Homo sapien
gggaccagctggtctcacggttccc

SEQ ID NO: 367202 - DNA, 25 bp, Homo sapien
aatgagtggtgtccctttgcggagc

SEQ ID NO: 367203 - DNA, 25 bp, Homo sapien
tttgacatccacacctatggggacc

SEQ ID NO: 367204 - DNA, 25 bp, Homo sapien
cgaggtgtgtcgttccatgctggcc

SEQ ID NO: 367205 - DNA, 25 bp, Homo sapien
cagtggagataacccagcagcccgg

SEQ ID NO: 367206 - DNA, 25 bp, Homo sapien
aatgactacacagtggagataaccc

SEQ ID NO: 367207 - DNA, 25 bp, Homo sapien
agcgagcgcacaagcgcttccagac

SEQ ID NO: 367208 - DNA, 25 bp, Homo sapien
tgagactgctcacgcaccagcgagc

SEQ ID NO: 367209 - DNA, 25 bp, Homo sapien
cgcagcccgtttaatgatggggccc

SEQ ID NO: 367210 - DNA, 25 bp, Homo sapien
gcccgtttaatgatggggcccagac

SEQ ID NO: 367211 - DNA, 25 bp, Homo sapien
cagcccgtttaatgatggggcccag

SEQ ID NO: 367212 - DNA, 25 bp, Homo sapien
aaacgcagcccgtttaatgatgggg

SEQ ID NO: 367213 - DNA, 25 bp, Homo sapien
tacacgcggtaactgtgactagcct

SEQ ID NO: 367214 - DNA, 25 bp, Homo sapien
cgtagtaatccgtgaagaggccgtc

SEQ ID NO: 367215 - DNA, 25 bp, Homo sapien
tcaagacaggacactgcggaaagcc

SEQ ID NO: 367216 - DNA, 25 bp, Homo sapien
cctgtttggtggagccggtcagacc

SEQ ID NO: 367217 - DNA, 25 bp, Homo sapien
ctgtgatcagcagccgggttcgaag

SEQ ID NO: 367218 - DNA, 25 bp, Homo sapien
atcagcagccgggttcgaagcccag

SEQ ID NO: 367219 - DNA, 25 bp, Homo sapien
tgtgatcagcagccgggttcgaagc

SEQ ID NO: 367220 - DNA, 25 bp, Homo sapien
tgatcagcagccgggttcgaagccc

SEQ ID NO: 367221 - DNA, 25 bp, Homo sapien
gccaggacctcagatgcagggcctg

SEQ ID NO: 367222 - DNA, 25 bp, Homo sapien
agccaggacctcagatgcagggcct

SEQ ID NO: 367223 - DNA, 25 bp, Homo sapien
tgccaagctgtggggctccgagtca

SEQ ID NO: 367224 - DNA, 25 bp, Homo sapien
ctgagagagcctgtgccaagctgtg

SEQ ID NO: 367225 - DNA, 25 bp, Homo sapien
caagctgtggggctccgagtcagca

SEQ ID NO: 367226 - DNA, 25 bp, Homo sapien
gcctgtgccaagctgtggggctccg

SEQ ID NO: 367227 - DNA, 25 bp, Homo sapien
ggaaacaagcacaggcgtcaggagc

SEQ ID NO: 367228 - DNA, 25 bp, Homo sapien
ggctgcccctgcgacttgagaccag

SEQ ID NO: 367229 - DNA, 25 bp, Homo sapien
ctggaaacaagcacaggcgtcagga

SEQ ID NO: 367230 - DNA, 25 bp, Homo sapien
tgggctgcccctgcgacttgagacc

SEQ ID NO: 367231 - DNA, 25 bp, Homo sapien
agctcagaactccacctccaccaaa

SEQ ID NO: 367232 - DNA, 25 bp, Homo sapien
tgagctcagaactccacctccacca

SEQ ID NO: 367233 - DNA, 25 bp, Homo sapien
ctcagaactccacctccaccaaaca

SEQ ID NO: 367234 - DNA, 25 bp, Homo sapien
tcagaactccacctccaccaaacat

SEQ ID NO: 367235 - DNA, 25 bp, Homo sapien
gaaaggttccaggaccactcgaagc

SEQ ID NO: 367236 - DNA, 25 bp, Homo sapien
cagtagccggagctgggaaactacc

SEQ ID NO: 367237 - DNA, 25 bp, Homo sapien
tgctaggtggaggtctcaggactcc

SEQ ID NO: 367238 - DNA, 25 bp, Homo sapien
tataactgtgcttggccgcgagaac

SEQ ID NO: 367239 - DNA, 25 bp, Homo sapien
tcccctcccagccccggcgtccgca

SEQ ID NO: 367240 - DNA, 25 bp, Homo sapien
aagcacgagaggaagcgccgacctc

SEQ ID NO: 367241 - DNA, 25 bp, Homo sapien
acaggctctcagcgcgtgcgcggaa

SEQ ID NO: 367242 - DNA, 25 bp, Homo sapien
ggagctgcgcatgcgcacacgggcg

SEQ ID NO: 367243 - DNA, 25 bp, Homo sapien
ggtcacgtgttcatcgagacggccc

SEQ ID NO: 367244 - DNA, 25 bp, Homo sapien
aatggcgcgcggtcggagagtacga

SEQ ID NO: 367245 - DNA, 25 bp, Homo sapien
tcggagagtacgagcgcctcctgca

SEQ ID NO: 367246 - DNA, 25 bp, Homo sapien
agggggcggcgaatggcgcgcggtc

SEQ ID NO: 367247 - DNA, 25 bp, Homo sapien
cgtcccggtgcacgcggagccaggg

SEQ ID NO: 367248 - DNA, 25 bp, Homo sapien
gggctgttagaggccgcgcggccgg

SEQ ID NO: 367249 - DNA, 25 bp, Homo sapien
ggggctgttagaggccgcgcggccg

SEQ ID NO: 367250 - DNA, 25 bp, Homo sapien
tgacccacgtcgaccagcagctctg

SEQ ID NO: 367251 - DNA, 25 bp, Homo sapien
agcctctgacccacgtcgaccagca

SEQ ID NO: 367252 - DNA, 25 bp, Homo sapien
ctctgacccacgtcgaccagcagct

SEQ ID NO: 367253 - DNA, 25 bp, Homo sapien
ggcgcagcctctgacccacgtcgac

SEQ ID NO: 367254 - DNA, 25 bp, Homo sapien
agaggcgcgggctcgggaaggggcg

SEQ ID NO: 367255 - DNA, 25 bp, Homo sapien
ctgagaggcgcgggctcgggaaggg

SEQ ID NO: 367256 - DNA, 25 bp, Homo sapien
gaaggggatggcggaggcggaagga

SEQ ID NO: 367257 - DNA, 25 bp, Homo sapien
aggggatggcggaggcggaaggacg

SEQ ID NO: 367258 - DNA, 25 bp, Homo sapien
agcatccgctcgaagcggccaaggg

SEQ ID NO: 367259 - DNA, 25 bp, Homo sapien
ggccaagggccgagccgtcgtccag

SEQ ID NO: 367260 - DNA, 25 bp, Homo sapien
tgccggcgttctgcgggacttcccg

SEQ ID NO: 367261 - DNA, 25 bp, Homo sapien
ttcccgagcacagggctcgggccag

SEQ ID NO: 367262 - DNA, 25 bp, Homo sapien
aggtcccttaagtctggcgggcctg

SEQ ID NO: 367263 - DNA, 25 bp, Homo sapien
agggcgtggcccacgcagcgaccca

SEQ ID NO: 367264 - DNA, 25 bp, Homo sapien
ttgtccatggcggtcagcgctgccg

SEQ ID NO: 367265 - DNA, 25 bp, Homo sapien
ggcctgcgccgtccatgcagagcag

SEQ ID NO: 367266 - DNA, 25 bp, Homo sapien
accagagcggacagcccctccacga

SEQ ID NO: 367267 - DNA, 25 bp, Homo sapien
ctccgaacttaacgtccaccaccag

SEQ ID NO: 367268 - DNA, 25 bp, Homo sapien
gaacttaacgtccaccaccagagcg

SEQ ID NO: 367269 - DNA, 25 bp, Homo sapien
acttaacgtccaccaccagagcgga

SEQ ID NO: 367270 - DNA, 25 bp, Homo sapien
gaggaggttggagacaatggagaac

SEQ ID NO: 367271 - DNA, 25 bp, Homo sapien
gaggttggagacaatggagaacctg

SEQ ID NO: 367272 - DNA, 25 bp, Homo sapien
cagaggaggttggagacaatggaga

SEQ ID NO: 367273 - DNA, 25 bp, Homo sapien
ggcagaggaggttggagacaatgga

SEQ ID NO: 367274 - DNA, 25 bp, Homo sapien
cttcttgggagagttcggggatgcc

SEQ ID NO: 367275 - DNA, 25 bp, Homo sapien
tcttgggagagttcggggatgccga

SEQ ID NO: 367276 - DNA, 25 bp, Homo sapien
ttcttgggagagttcggggatgccg

SEQ ID NO: 367277 - DNA, 25 bp, Homo sapien
taactcctaacgagaggcccttgac

SEQ ID NO: 367278 - DNA, 25 bp, Homo sapien
gcccttgacttgagtttggaggtca

SEQ ID NO: 367279 - DNA, 25 bp, Homo sapien
gcagcacctggtgggttgagtatca

SEQ ID NO: 367280 - DNA, 25 bp, Homo sapien
cacacggtcaggtgacgggtaactc

SEQ ID NO: 367281 - DNA, 25 bp, Homo sapien
tgctcactctgacccacgatacagc

SEQ ID NO: 367282 - DNA, 25 bp, Homo sapien
tgatgagtggcaggctgtccacggt

SEQ ID NO: 367283 - DNA, 25 bp, Homo sapien
tggctgcatataggattccgtccgc

SEQ ID NO: 367284 - DNA, 25 bp, Homo sapien
attccgtccgcaggaaccagctgct

SEQ ID NO: 367285 - DNA, 25 bp, Homo sapien
gactcatgagtaaccttgaccagtg

SEQ ID NO: 367286 - DNA, 25 bp, Homo sapien
gattaatgactgatccgtggcgccc

SEQ ID NO: 367287 - DNA, 25 bp, Homo sapien
tccactgatgatttcggcccaggcc

SEQ ID NO: 367288 - DNA, 25 bp, Homo sapien
tcttttagtgattctggccagggtc

SEQ ID NO: 367289 - DNA, 25 bp, Homo sapien
caggaatagactccagcttatccaa

SEQ ID NO: 367290 - DNA, 25 bp, Homo sapien
atccaggaatagactccagcttatc

SEQ ID NO: 367291 - DNA, 25 bp, Homo sapien
cccagaccacgtccgctgatcattg

SEQ ID NO: 367292 - DNA, 25 bp, Homo sapien
gaccacgtccgctgatcattggcac

SEQ ID NO: 367293 - DNA, 25 bp, Homo sapien
ggagctgcctgtggatggactggtt

SEQ ID NO: 367294 - DNA, 25 bp, Homo sapien
ggaaagtatttaagcagctataggg

SEQ ID NO: 367295 - DNA, 25 bp, Homo sapien
cagagggaggaaagtcctcagctcc

SEQ ID NO: 367296 - DNA, 25 bp, Homo sapien
catgtgcggtataggctcccgtctg

SEQ ID NO: 367297 - DNA, 25 bp, Homo sapien
agccacatgccgccagggcaggtgc

SEQ ID NO: 367298 - DNA, 25 bp, Homo sapien
ccacatgccgccagggcaggtgcga

SEQ ID NO: 367299 - DNA, 25 bp, Homo sapien
cttgcagccacatgccgccagggca

SEQ ID NO: 367300 - DNA, 25 bp, Homo sapien
acatgccgccagggcaggtgcgagg

SEQ ID NO: 367301 - DNA, 25 bp, Homo sapien
cccgaagtcggatggccatcagcat

SEQ ID NO: 367302 - DNA, 25 bp, Homo sapien
cctgtggaatgcttgtccacaagct

SEQ ID NO: 367303 - DNA, 25 bp, Homo sapien
agctgctgtcccgactgagccaggg

SEQ ID NO: 367304 - DNA, 25 bp, Homo sapien
acaagctgctggcgccaggcctctg

SEQ ID NO: 367305 - DNA, 25 bp, Homo sapien
gggggtacgcgtgagggtggcagcc

SEQ ID NO: 367306 - DNA, 25 bp, Homo sapien
tgggggtacgcgtgagggtggcagc

SEQ ID NO: 367307 - DNA, 25 bp, Homo sapien
tcccagtcggggtcaggaacgccca

SEQ ID NO: 367308 - DNA, 25 bp, Homo sapien
tggtagtggggcaccgtcgcacccc

SEQ ID NO: 367309 - DNA, 25 bp, Homo sapien
gacccaaagtctctcgggctgacct

SEQ ID NO: 367310 - DNA, 25 bp, Homo sapien
cagggacccaaagtctctcgggctg

SEQ ID NO: 367311 - DNA, 25 bp, Homo sapien
gcttcatgcggatcagctccgggag

SEQ ID NO: 367312 - DNA, 25 bp, Homo sapien
tgatgtccgcttcgctcaggcggcc

SEQ ID NO: 367313 - DNA, 25 bp, Homo sapien
tccgtctcgcttcatgcggatcagc

SEQ ID NO: 367314 - DNA, 25 bp, Homo sapien
acagcggccacgaagcccctgatgt

SEQ ID NO: 367315 - DNA, 25 bp, Homo sapien
ccggttcccggggtcatcaaggctg

SEQ ID NO: 367316 - DNA, 25 bp, Homo sapien
cggttcccggggtcatcaaggctgc

SEQ ID NO: 367317 - DNA, 25 bp, Homo sapien
ggttcccggggtcatcaaggctgcc

SEQ ID NO: 367318 - DNA, 25 bp, Homo sapien
gtgtcgccctcgtccgtgtctgcct

SEQ ID NO: 367319 - DNA, 25 bp, Homo sapien
gcgtcggtgtctgagccacgtgctc

SEQ ID NO: 367320 - DNA, 25 bp, Homo sapien
tttcccgtgtctctccggtgtccgc

SEQ ID NO: 367321 - DNA, 25 bp, Homo sapien
ccctcggtcccgtgtctgtgtcgcc

SEQ ID NO: 367322 - DNA, 25 bp, Homo sapien
cacgatgcggactcgcagactttaa

SEQ ID NO: 367323 - DNA, 25 bp, Homo sapien
ttcggagttgggacacggccccagc

SEQ ID NO: 367324 - DNA, 25 bp, Homo sapien
ccgtagggttcagggttcgcgcaca

SEQ ID NO: 367325 - DNA, 25 bp, Homo sapien
cagactttaagcaaacacgtgtggg

SEQ ID NO: 367326 - DNA, 25 bp, Homo sapien
agttgtccgcgtcggtcaccagcgg

SEQ ID NO: 367327 - DNA, 25 bp, Homo sapien
tcagttgtccgcgtcggtcaccagc

SEQ ID NO: 367328 - DNA, 25 bp, Homo sapien
accagcggggccaggtagtccgagt

SEQ ID NO: 367329 - DNA, 25 bp, Homo sapien
gtccgagtgccggatcccgaaactc

SEQ ID NO: 367330 - DNA, 25 bp, Homo sapien
ccggagacaccgctgacctcgcggg

SEQ ID NO: 367331 - DNA, 25 bp, Homo sapien
ggcccggagacaccgctgacctcgc

SEQ ID NO: 367332 - DNA, 25 bp, Homo sapien
gcgggcccggagacaccgctgacct

SEQ ID NO: 367333 - DNA, 25 bp, Homo sapien
ctgcgggcccggagacaccgctgac

SEQ ID NO: 367334 - DNA, 25 bp, Homo sapien
gacccccggggactctgatcccatc

SEQ ID NO: 367335 - DNA, 25 bp, Homo sapien
tggacccccggggactctgatccca

SEQ ID NO: 367336 - DNA, 25 bp, Homo sapien
catcactccgacctcaggccctccc

SEQ ID NO: 367337 - DNA, 25 bp, Homo sapien
tctgatcccatcactccgacctcag

SEQ ID NO: 367338 - DNA, 25 bp, Homo sapien
ggagcgaagtccgcgccagaatcgt

SEQ ID NO: 367339 - DNA, 25 bp, Homo sapien
ttgtaggccgcgggccctggcttcc

SEQ ID NO: 367340 - DNA, 25 bp, Homo sapien
cgaagtccgcgccagaatcgtgaac

SEQ ID NO: 367341 - DNA, 25 bp, Homo sapien
gtccgcgccagaatcgtgaactggg

SEQ ID NO: 367342 - DNA, 25 bp, Homo sapien
gcctccactgccgcggaccagggac

SEQ ID NO: 367343 - DNA, 25 bp, Homo sapien
cgcctccactgccgcggaccaggga

SEQ ID NO: 367344 - DNA, 25 bp, Homo sapien
tccactgccgcggaccagggacccc

SEQ ID NO: 367345 - DNA, 25 bp, Homo sapien
ctgccgcggaccagggaccccctgc

SEQ ID NO: 367346 - DNA, 25 bp, Homo sapien
tgctgaggtcctcgaagaaactgcc

SEQ ID NO: 367347 - DNA, 25 bp, Homo sapien
tgaggtcctcgaagaaactgccagc

SEQ ID NO: 367348 - DNA, 25 bp, Homo sapien
gagactttgccgatgacgcgcggac

SEQ ID NO: 367349 - DNA, 25 bp, Homo sapien
caagagcgagggcaccgtataggcc

SEQ ID NO: 367350 - DNA, 25 bp, Homo sapien
gcgcactggggtacgtcgcgttccc

SEQ ID NO: 367351 - DNA, 25 bp, Homo sapien
gacaccccagtttcggggagcaatg

SEQ ID NO: 367352 - DNA, 25 bp, Homo sapien
gagcaatggtgtgccgaggcgcact

SEQ ID NO: 367353 - DNA, 25 bp, Homo sapien
cccgctcgctccgggaagtacctgc

SEQ ID NO: 367354 - DNA, 25 bp, Homo sapien
tgagccacgatttatcaaagccccg

SEQ ID NO: 367355 - DNA, 25 bp, Homo sapien
ccgaatatgcggtgttagggtatcc

SEQ ID NO: 367356 - DNA, 25 bp, Homo sapien
cctccctggaggcagttcggcgttg

SEQ ID NO: 367357 - DNA, 25 bp, Homo sapien
tttgggatttgagatccggatatgg

SEQ ID NO: 367358 - DNA, 25 bp, Homo sapien
agcggcgtgggcggccgtagatgga

SEQ ID NO: 367359 - DNA, 25 bp, Homo sapien
gcacggtcatgcgagcgggcaccag

SEQ ID NO: 367360 - DNA, 25 bp, Homo sapien
gtcggtgccgcgcacggtcatgcga

SEQ ID NO: 367361 - DNA, 25 bp, Homo sapien
gggcgccgtcggtgccgcgcacggt

SEQ ID NO: 367362 - DNA, 25 bp, Homo sapien
cgcgacgggtcatgcagggcgtagc

SEQ ID NO: 367363 - DNA, 25 bp, Homo sapien
gaagcgcgcgccgaaggtgaaggcg

SEQ ID NO: 367364 - DNA, 25 bp, Homo sapien
ctgcgtggggaagcgcgcgccgaag

SEQ ID NO: 367365 - DNA, 25 bp, Homo sapien
cgcgcggccgcgacgggtcatgcag

SEQ ID NO: 367366 - DNA, 25 bp, Homo sapien
aggcacggttcagccccgagcgcag

SEQ ID NO: 367367 - DNA, 25 bp, Homo sapien
atccgagttagcgtctggccgggcc

SEQ ID NO: 367368 - DNA, 25 bp, Homo sapien
ctgggagcatccgagttagcgtctg

SEQ ID NO: 367369 - DNA, 25 bp, Homo sapien
ctagcaggcacggttcagccccgag

SEQ ID NO: 367370 - DNA, 25 bp, Homo sapien
cgccaaaggcccacccaggcgtccg

SEQ ID NO: 367371 - DNA, 25 bp, Homo sapien
tgttgggcggcagcttgtatttggg

SEQ ID NO: 367372 - DNA, 25 bp, Homo sapien
gggcctccgtagtgcgccgcgatgg

SEQ ID NO: 367373 - DNA, 25 bp, Homo sapien
caaaggcccacccaggcgtccgagc

SEQ ID NO: 367374 - DNA, 25 bp, Homo sapien
gggtggggggcgcttacggctcgca

SEQ ID NO: 367375 - DNA, 25 bp, Homo sapien
gtggggggcgcttacggctcgcagc

SEQ ID NO: 367376 - DNA, 25 bp, Homo sapien
tggggggcgcttacggctcgcagca

SEQ ID NO: 367377 - DNA, 25 bp, Homo sapien
ggggggcgcttacggctcgcagcac

SEQ ID NO: 367378 - DNA, 25 bp, Homo sapien
gactccaggcgcattaggcagggac

SEQ ID NO: 367379 - DNA, 25 bp, Homo sapien
caagtctagacccagacttggtgaa

SEQ ID NO: 367380 - DNA, 25 bp, Homo sapien
ggcccctgcaccgcaaattcttggg

SEQ ID NO: 367381 - DNA, 25 bp, Homo sapien
tggcgccagcaaaacaaacgcgagc

SEQ ID NO: 367382 - DNA, 25 bp, Homo sapien
aacaaagcgacgtggctggacatcc

SEQ ID NO: 367383 - DNA, 25 bp, Homo sapien
tgcagacaaaagcaaggatgggaat

SEQ ID NO: 367384 - DNA, 25 bp, Homo sapien
tagctcctagcgtgggaaaacaaag

SEQ ID NO: 367385 - DNA, 25 bp, Homo sapien
gtattgggccacaaaataatcacac

SEQ ID NO: 367386 - DNA, 25 bp, Homo sapien
ttaaagttcatatgcaaaaatgtgt

SEQ ID NO: 367387 - DNA, 25 bp, Homo sapien
cagtaagatttccaatgttaaaaat

SEQ ID NO: 367388 - DNA, 25 bp, Homo sapien
caaatttaaagttcatatgcaaaaa

SEQ ID NO: 367389 - DNA, 25 bp, Homo sapien
aacacaaatttaaagttcatatgca

SEQ ID NO: 367390 - DNA, 25 bp, Homo sapien
catgcgacagttaatttgatgcacc

SEQ ID NO: 367391 - DNA, 25 bp, Homo sapien
gcgacagttaatttgatgcaccagg

SEQ ID NO: 367392 - DNA, 25 bp, Homo sapien
aggtattaaccgcatgcgacagtta

SEQ ID NO: 367393 - DNA, 25 bp, Homo sapien
taaccgcatgcgacagttaatttga

SEQ ID NO: 367394 - DNA, 25 bp, Homo sapien
ccagccatcgcggcatctttctgca

SEQ ID NO: 367395 - DNA, 25 bp, Homo sapien
ttcttgacttccgctgttaacgtca

SEQ ID NO: 367396 - DNA, 25 bp, Homo sapien
ctgaagcccagccatcgcggcatct

SEQ ID NO: 367397 - DNA, 25 bp, Homo sapien
tcttgacttccgctgttaacgtcat

SEQ ID NO: 367398 - DNA, 25 bp, Homo sapien
cttactaggtaacgattcgctatgt

SEQ ID NO: 367399 - DNA, 25 bp, Homo sapien
taagtcgtgatagagattttcggag

SEQ ID NO: 367400 - DNA, 25 bp, Homo sapien
agaggttcggtgagtgtatcaggca

SEQ ID NO: 367401 - DNA, 25 bp, Homo sapien
tctgtttggaactaagtcgtgatag

SEQ ID NO: 367402 - DNA, 25 bp, Homo sapien
gagaccgggcctgaagaatccctaa

SEQ ID NO: 367403 - DNA, 25 bp, Homo sapien
caaaacaagttaggtctcgtaagtg

SEQ ID NO: 367404 - DNA, 25 bp, Homo sapien
caaagactagtcatctgccctgcct

SEQ ID NO: 367405 - DNA, 25 bp, Homo sapien
cgtaagtgacttcagccttgcttaa

SEQ ID NO: 367406 - DNA, 25 bp, Homo sapien
taacgcatggttgcaaaacgtgctg

SEQ ID NO: 367407 - DNA, 25 bp, Homo sapien
gcacattttcagctgcgaagcggag

SEQ ID NO: 367408 - DNA, 25 bp, Homo sapien
tagggcgatccacgtcattgagaaa

SEQ ID NO: 367409 - DNA, 25 bp, Homo sapien
cattcatgggaaactgcactgcgta

SEQ ID NO: 367410 - DNA, 25 bp, Homo sapien
tgaaattgtttaatgtcacacgtta

SEQ ID NO: 367411 - DNA, 25 bp, Homo sapien
gaaattgtttaatgtcacacgttaa

SEQ ID NO: 367412 - DNA, 25 bp, Homo sapien
tgtttaatgtcacacgttaaaataa

SEQ ID NO: 367413 - DNA, 25 bp, Homo sapien
attgtttaatgtcacacgttaaaat

SEQ ID NO: 367414 - DNA, 25 bp, Homo sapien
tacacacggtactttccagggagcc

SEQ ID NO: 367415 - DNA, 25 bp, Homo sapien
ctgagatgggattaagcaaggagca

SEQ ID NO: 367416 - DNA, 25 bp, Homo sapien
agaagtacctacatgccggcctgag

SEQ ID NO: 367417 - DNA, 25 bp, Homo sapien
tggcccgagacactcctgagatggg

SEQ ID NO: 367418 - DNA, 25 bp, Homo sapien
gcatacagctattcatgtgggtgcc

SEQ ID NO: 367419 - DNA, 25 bp, Homo sapien
cccagtgacctcttcatacgggcag

SEQ ID NO: 367420 - DNA, 25 bp, Homo sapien
agtgacctcttcatacgggcagagg

SEQ ID NO: 367421 - DNA, 25 bp, Homo sapien
tgacctcttcatacgggcagagggt

SEQ ID NO: 367422 - DNA, 25 bp, Homo sapien
ccagcgtagggttggtgcgcatcac

SEQ ID NO: 367423 - DNA, 25 bp, Homo sapien
catgtcataggccatccaggtcgcc

SEQ ID NO: 367424 - DNA, 25 bp, Homo sapien
tgcagttgacgaaggcatcctccag

SEQ ID NO: 367425 - DNA, 25 bp, Homo sapien
ttgcttggtctcatgcagcagctct

SEQ ID NO: 367426 - DNA, 25 bp, Homo sapien
gtccttattcagatctgacagcatt

SEQ ID NO: 367427 - DNA, 25 bp, Homo sapien
ttttccaagtccttattcagatctg

SEQ ID NO: 367428 - DNA, 25 bp, Homo sapien
caagtccttattcagatctgacagc

SEQ ID NO: 367429 - DNA, 25 bp, Homo sapien
cttattcagatctgacagcattttc

SEQ ID NO: 367430 - DNA, 25 bp, Homo sapien
gttgtcatagtttctttcctcaggg

SEQ ID NO: 367431 - DNA, 25 bp, Homo sapien
catagtttctttcctcagggtcagc

SEQ ID NO: 367432 - DNA, 25 bp, Homo sapien
ctttcctcagggtcagcatcatcca

SEQ ID NO: 367433 - DNA, 25 bp, Homo sapien
tttcctcagggtcagcatcatccat

SEQ ID NO: 367434 - DNA, 25 bp, Homo sapien
gcccccagcggccgcttgaggaaca

SEQ ID NO: 367435 - DNA, 25 bp, Homo sapien
gcttggcccgcgctccggtcctgct

SEQ ID NO: 367436 - DNA, 25 bp, Homo sapien
gcgctccggtcctgctctggcgccc

SEQ ID NO: 367437 - DNA, 25 bp, Homo sapien
gcccgcgctccggtcctgctctggc

SEQ ID NO: 367438 - DNA, 25 bp, Homo sapien
gagcttcccggcctgacagttttgc

SEQ ID NO: 367439 - DNA, 25 bp, Homo sapien
gagatgaagagcttcccggcctgac

SEQ ID NO: 367440 - DNA, 25 bp, Homo sapien
acgtcctgaggttgagggagaatcc

SEQ ID NO: 367441 - DNA, 25 bp, Homo sapien
gagaatcctgcggagatgaagagct

SEQ ID NO: 367442 - DNA, 25 bp, Homo sapien
tggcccgaatcaggaataattctga

SEQ ID NO: 367443 - DNA, 25 bp, Homo sapien
tgtgcttggcccgaatcaggaataa

SEQ ID NO: 367444 - DNA, 25 bp, Homo sapien
taattctgatggctaaggaagacag

SEQ ID NO: 367445 - DNA, 25 bp, Homo sapien
cagcttccgagagagtaggagaaag

SEQ ID NO: 367446 - DNA, 25 bp, Homo sapien
tatctcagagcctacgtcactcagc

SEQ ID NO: 367447 - DNA, 25 bp, Homo sapien
aagtccctcatgaacagtcttccag

SEQ ID NO: 367448 - DNA, 25 bp, Homo sapien
cactcagcagagtcacacatttcaa

SEQ ID NO: 367449 - DNA, 25 bp, Homo sapien
acacgtgggcgtggacagctatctc

SEQ ID NO: 367450 - DNA, 25 bp, Homo sapien
tatttttattagtatctatcaagaa

SEQ ID NO: 367451 - DNA, 25 bp, Homo sapien
ttttattagtatctatcaagaaaaa

SEQ ID NO: 367452 - DNA, 25 bp, Homo sapien
tccaccacctgggccctcagggagc

SEQ ID NO: 367453 - DNA, 25 bp, Homo sapien
ctccaccacctgggccctcagggag

SEQ ID NO: 367454 - DNA, 25 bp, Homo sapien
ctcagggagcagcatctgcccagcg

SEQ ID NO: 367455 - DNA, 25 bp, Homo sapien
ggagcagcatctgcccagcgaggac

SEQ ID NO: 367456 - DNA, 25 bp, Homo sapien
tgtgcacggccacccctcatgcctg

SEQ ID NO: 367457 - DNA, 25 bp, Homo sapien
cacggccacccctcatgcctgtgag

SEQ ID NO: 367458 - DNA, 25 bp, Homo sapien
gtgtggggacgaaagggcagctggc

SEQ ID NO: 367459 - DNA, 25 bp, Homo sapien
atgcctgtgagctgccacaggtccc

SEQ ID NO: 367460 - DNA, 25 bp, Homo sapien
cagggctttgcggatgtggtttcca

SEQ ID NO: 367461 - DNA, 25 bp, Homo sapien
ccagcagggctttgcggatgtggtt

SEQ ID NO: 367462 - DNA, 25 bp, Homo sapien
tttgcggatgtggtttccaaagcgc

SEQ ID NO: 367463 - DNA, 25 bp, Homo sapien
gaaaagatcagcaatgtccagcagg

SEQ ID NO: 367464 - DNA, 25 bp, Homo sapien
ccctctgttcccacaagcaaggatg

SEQ ID NO: 367465 - DNA, 25 bp, Homo sapien
tctgttcccacaagcaaggatgcct

SEQ ID NO: 367466 - DNA, 25 bp, Homo sapien
gagccaagagttcagatgcaccttc

SEQ ID NO: 367467 - DNA, 25 bp, Homo sapien
gatgcaccttcagatatgtacccac

SEQ ID NO: 367468 - DNA, 25 bp, Homo sapien
tgttctcgcctgcaatcatgtagga

SEQ ID NO: 367469 - DNA, 25 bp, Homo sapien
tctgagcttgagaacttgctggaga

SEQ ID NO: 367470 - DNA, 25 bp, Homo sapien
gatgtggaagaagatcgtgttctcg

SEQ ID NO: 367471 - DNA, 25 bp, Homo sapien
aaactccatagccatcatctgctac

SEQ ID NO: 367472 - DNA, 25 bp, Homo sapien
aaagccacctccagcgcccaggtga

SEQ ID NO: 367473 - DNA, 25 bp, Homo sapien
agagacgccagggttccgagagcac

SEQ ID NO: 367474 - DNA, 25 bp, Homo sapien
gctggtggagagacgccagggttcc

SEQ ID NO: 367475 - DNA, 25 bp, Homo sapien
ctctgggtcgaacatgcggatctgg

SEQ ID NO: 367476 - DNA, 25 bp, Homo sapien
agaagaggtgcctgtcgatccctgc

SEQ ID NO: 367477 - DNA, 25 bp, Homo sapien
gccaggcggtacatattctggtgct

SEQ ID NO: 367478 - DNA, 25 bp, Homo sapien
cttggagaccaagtaaaggcagaag

SEQ ID NO: 367479 - DNA, 25 bp, Homo sapien
tctggaagagatctcgcaggtctgc

SEQ ID NO: 367480 - DNA, 25 bp, Homo sapien
tctggtcattgaggcctcataggtc

SEQ ID NO: 367481 - DNA, 25 bp, Homo sapien
cacaaaggctgtggactcgctggta

SEQ ID NO: 367482 - DNA, 25 bp, Homo sapien
caggaacgcacagtctcagtccgtc

SEQ ID NO: 367483 - DNA, 25 bp, Homo sapien
tgaggcctcataggtcaggcagaac

SEQ ID NO: 367484 - DNA, 25 bp, Homo sapien
gggtgaatctggcaggtggaccctg

SEQ ID NO: 367485 - DNA, 25 bp, Homo sapien
gcaggtggaccctggtaccaccctg

SEQ ID NO: 367486 - DNA, 25 bp, Homo sapien
cctgccctctcagcagcgggaggcg

SEQ ID NO: 367487 - DNA, 25 bp, Homo sapien
ctgggatatacagaggggtgaatct

SEQ ID NO: 367488 - DNA, 25 bp, Homo sapien
gtaggaactctcgatgaccgcctgg

SEQ ID NO: 367489 - DNA, 25 bp, Homo sapien
ttggccacctggtaggaactctcga

SEQ ID NO: 367490 - DNA, 25 bp, Homo sapien
ggaagcagtacaactccacgtcgtc

SEQ ID NO: 367491 - DNA, 25 bp, Homo sapien
gcagcgcgatctgcacaaaggcatc

SEQ ID NO: 367492 - DNA, 25 bp, Homo sapien
cggtctccgtgtagcccaggtggaa

SEQ ID NO: 367493 - DNA, 25 bp, Homo sapien
ctgttttggaatgtcccactgcagc

SEQ ID NO: 367494 - DNA, 25 bp, Homo sapien
gttcggtttgcccaggcagtgcccg

SEQ ID NO: 367495 - DNA, 25 bp, Homo sapien
cccactgcagccgtgtaggaggtgc

SEQ ID NO: 367496 - DNA, 25 bp, Homo sapien
gacccaactggccattcttgaagga

SEQ ID NO: 367497 - DNA, 25 bp, Homo sapien
tgcccacgcatgctctgcattgaga

SEQ ID NO: 367498 - DNA, 25 bp, Homo sapien
aatgatgggagcatctgcccacgca

SEQ ID NO: 367499 - DNA, 25 bp, Homo sapien
ggaaatgagagtgaaggatttgtca

SEQ ID NO: 367500 - DNA, 25 bp, Homo sapien
aagaaagcggcacgctcgatggcct

SEQ ID NO: 367501 - DNA, 25 bp, Homo sapien
gctggcctcatcttcggggtcatag

SEQ ID NO: 367502 - DNA, 25 bp, Homo sapien
tcataggagtaggattcctcatcca

SEQ ID NO: 367503 - DNA, 25 bp, Homo sapien
ctaaagaaggcctggcgtgcctgcg

SEQ ID NO: 367504 - DNA, 25 bp, Homo sapien
ttcctcctgcagtgagggctgccag

SEQ ID NO: 367505 - DNA, 25 bp, Homo sapien
tggggaggggtcgtccaggatcctc

SEQ ID NO: 367506 - DNA, 25 bp, Homo sapien
cgtccaggatcctctggaactgcat

SEQ ID NO: 367507 - DNA, 25 bp, Homo sapien
tcctgcagtgagggctgccagcttc

SEQ ID NO: 367508 - DNA, 25 bp, Homo sapien
cagatcctgaggcttgagcagacgg

SEQ ID NO: 367509 - DNA, 25 bp, Homo sapien
gagccacagcttgaagaagcgtccc

SEQ ID NO: 367510 - DNA, 25 bp, Homo sapien
aagcgtcccttgtggtagacagcca

SEQ ID NO: 367511 - DNA, 25 bp, Homo sapien
gctgtctgagaggtgctgtagcaca

SEQ ID NO: 367512 - DNA, 25 bp, Homo sapien
ggatccgtgtgtcctaaaccaggcc

SEQ ID NO: 367513 - DNA, 25 bp, Homo sapien
tgtgatacaggccacgggcaagctg

SEQ ID NO: 367514 - DNA, 25 bp, Homo sapien
tgcagaccctgttttgctcggcctc

SEQ ID NO: 367515 - DNA, 25 bp, Homo sapien
atgcactaggtgacccctgcagacc

SEQ ID NO: 367516 - DNA, 25 bp, Homo sapien
cctaaggatacagtgtcagaagcag

SEQ ID NO: 367517 - DNA, 25 bp, Homo sapien
gcgccgggtctgtcctaagctttgg

SEQ ID NO: 367518 - DNA, 25 bp, Homo sapien
gggttgtgcaaaccgcctaaggata

SEQ ID NO: 367519 - DNA, 25 bp, Homo sapien
ggactcccttcaccatgcgcagtga

SEQ ID NO: 367520 - DNA, 25 bp, Homo sapien
ctgtgtccttgcccgggatccgagt

SEQ ID NO: 367521 - DNA, 25 bp, Homo sapien
tggtaggagcacataggcactatgc

SEQ ID NO: 367522 - DNA, 25 bp, Homo sapien
tggtgttgaacatcctctccatctg

SEQ ID NO: 367523 - DNA, 25 bp, Homo sapien
gagcacataggcactatgcccagtg

SEQ ID NO: 367524 - DNA, 25 bp, Homo sapien
tttacggcgatacatgatcatggcg

SEQ ID NO: 367525 - DNA, 25 bp, Homo sapien
gatcatggcgtggatgatgtttccc

SEQ ID NO: 367526 - DNA, 25 bp, Homo sapien
acgtctgtattcttgatgagcacaa

SEQ ID NO: 367527 - DNA, 25 bp, Homo sapien
aggcttgatttcttcacggtccagt

SEQ ID NO: 367528 - DNA, 25 bp, Homo sapien
cctccagatcccttgccttggagct

SEQ ID NO: 367529 - DNA, 25 bp, Homo sapien
gtcctccagatcccttgccttggag

SEQ ID NO: 367530 - DNA, 25 bp, Homo sapien
tgtcctccagatcccttgccttgga

SEQ ID NO: 367531 - DNA, 25 bp, Homo sapien
tcctccagatcccttgccttggagc

SEQ ID NO: 367532 - DNA, 25 bp, Homo sapien
gctgttcaccatgagagggctcctg

SEQ ID NO: 367533 - DNA, 25 bp, Homo sapien
cctgcctcgaaggtagatgtactct

SEQ ID NO: 367534 - DNA, 25 bp, Homo sapien
tgttcaccatgagagggctcctgcc

SEQ ID NO: 367535 - DNA, 25 bp, Homo sapien
agggctcctgcctcgaaggtagatg

SEQ ID NO: 367536 - DNA, 25 bp, Homo sapien
acaaggggcgcacagactctaggta

SEQ ID NO: 367537 - DNA, 25 bp, Homo sapien
tggccagcaactccatgcggtaata

SEQ ID NO: 367538 - DNA, 25 bp, Homo sapien
ggtaatattcctcatcatccaacaa

SEQ ID NO: 367539 - DNA, 25 bp, Homo sapien
gttacttgcccaccatgacttgagc

SEQ ID NO: 367540 - DNA, 25 bp, Homo sapien
tgtccagccagttatcatcaccgtg

SEQ ID NO: 367541 - DNA, 25 bp, Homo sapien
agccagttatcatcaccgtggggcc

SEQ ID NO: 367542 - DNA, 25 bp, Homo sapien
ctgtccagccagttatcatcaccgt

SEQ ID NO: 367543 - DNA, 25 bp, Homo sapien
tccagccagttatcatcaccgtggg

SEQ ID NO: 367544 - DNA, 25 bp, Homo sapien
aagctgtagagcatagggtgccggc

SEQ ID NO: 367545 - DNA, 25 bp, Homo sapien
tgccggctggatagaaggcggatac

SEQ ID NO: 367546 - DNA, 25 bp, Homo sapien
ggctggatagaaggcggatacacat

SEQ ID NO: 367547 - DNA, 25 bp, Homo sapien
atagggtgccggctggatagaaggc

SEQ ID NO: 367548 - DNA, 25 bp, Homo sapien
ctgtctgcctctcccgtctagctca

SEQ ID NO: 367549 - DNA, 25 bp, Homo sapien
ctcccgtctagctcagaaccccaaa

SEQ ID NO: 367550 - DNA, 25 bp, Homo sapien
ccccaaaggagtccaaagagtctca

SEQ ID NO: 367551 - DNA, 25 bp, Homo sapien
gagtctcaacccaggtgcctgaacc

SEQ ID NO: 367552 - DNA, 25 bp, Homo sapien
gcagcttcagggtttggcggaagaa

SEQ ID NO: 367553 - DNA, 25 bp, Homo sapien
cagacgcccgtggagaagatggcca

SEQ ID NO: 367554 - DNA, 25 bp, Homo sapien
aagaagatgcccgtcacccagacgc

SEQ ID NO: 367555 - DNA, 25 bp, Homo sapien
acccagacgcccgtggagaagatgg

SEQ ID NO: 367556 - DNA, 25 bp, Homo sapien
cctgagggaggcatctctggatgca

SEQ ID NO: 367557 - DNA, 25 bp, Homo sapien
gagggaggcatctctggatgcaact

SEQ ID NO: 367558 - DNA, 25 bp, Homo sapien
ccctgagggaggcatctctggatgc

SEQ ID NO: 367559 - DNA, 25 bp, Homo sapien
ggaggcatctctggatgcaactgac

SEQ ID NO: 367560 - DNA, 25 bp, Homo sapien
ggtacacgcccctgaggatgccatt

SEQ ID NO: 367561 - DNA, 25 bp, Homo sapien
catgatgacgaccagccagctggtg

SEQ ID NO: 367562 - DNA, 25 bp, Homo sapien
aaggagatgtccacgttgcagaagg

SEQ ID NO: 367563 - DNA, 25 bp, Homo sapien
ggaggaacccactgttgccatgatg

SEQ ID NO: 367564 - DNA, 25 bp, Homo sapien
gcggatcaggcgtttcttccaggag

SEQ ID NO: 367565 - DNA, 25 bp, Homo sapien
gaaggccacggcctggtgagcttcc

SEQ ID NO: 367566 - DNA, 25 bp, Homo sapien
tcccagacaggtagacgtgtttcag

SEQ ID NO: 367567 - DNA, 25 bp, Homo sapien
agggcctcccgactgagccggaagt

SEQ ID NO: 367568 - DNA, 25 bp, Homo sapien
gacgggggcagatgggtgcgcgggc

SEQ ID NO: 367569 - DNA, 25 bp, Homo sapien
gggtgcgcgggcgcgcttaggccgg

SEQ ID NO: 367570 - DNA, 25 bp, Homo sapien
agccagtccgcgacccctcgcgccc

SEQ ID NO: 367571 - DNA, 25 bp, Homo sapien
ccccaccccgcgactagcggctgcc

SEQ ID NO: 367572 - DNA, 25 bp, Homo sapien
agccttccgggtgggcacagccact

SEQ ID NO: 367573 - DNA, 25 bp, Homo sapien
agttggggggcgtcagcgagggcgc

SEQ ID NO: 367574 - DNA, 25 bp, Homo sapien
aaggacggcgaagggcagcctggag

SEQ ID NO: 367575 - DNA, 25 bp, Homo sapien
gccgccaaatcctcgcgccagcctt

SEQ ID NO: 367576 - DNA, 25 bp, Homo sapien
gacagaggcagggttcgggagcccg

SEQ ID NO: 367577 - DNA, 25 bp, Homo sapien
cgcccttccccacccgagcgcgcgg

SEQ ID NO: 367578 - DNA, 25 bp, Homo sapien
ccgtcctcgcccctgtgcagggctg

SEQ ID NO: 367579 - DNA, 25 bp, Homo sapien
cagaggcagggttcgggagcccgcc

SEQ ID NO: 367580 - DNA, 25 bp, Homo sapien
cactctggcccgtgtccccacgtcc

SEQ ID NO: 367581 - DNA, 25 bp, Homo sapien
gtgtccccacgtccttcaggcctag

SEQ ID NO: 367582 - DNA, 25 bp, Homo sapien
aggaacctgacacctactcccaaat

SEQ ID NO: 367583 - DNA, 25 bp, Homo sapien
cactcctgtccgtgcgtggggccag

SEQ ID NO: 367584 - DNA, 25 bp, Homo sapien
gccccagagtctcgtgaggatggtg

SEQ ID NO: 367585 - DNA, 25 bp, Homo sapien
cgcggctgggtttctgtgcggtgaa

SEQ ID NO: 367586 - DNA, 25 bp, Homo sapien
cagggcgcggctgggtttctgtgcg

SEQ ID NO: 367587 - DNA, 25 bp, Homo sapien
tctgtgcggtgaaggttgctcaaag

SEQ ID NO: 367588 - DNA, 25 bp, Homo sapien
gaaaaggtcaccgatgtgtcagctg

SEQ ID NO: 367589 - DNA, 25 bp, Homo sapien
ggtcaccgatgtgtcagctgctgcc

SEQ ID NO: 367590 - DNA, 25 bp, Homo sapien
tgctgcctgttctgggatcgctggt

SEQ ID NO: 367591 - DNA, 25 bp, Homo sapien
ctgctgcctgttctgggatcgctgg

SEQ ID NO: 367592 - DNA, 25 bp, Homo sapien
cagggtcgtcttcatacccccatca

SEQ ID NO: 367593 - DNA, 25 bp, Homo sapien
ctccccaagtcctagtatttattat

SEQ ID NO: 367594 - DNA, 25 bp, Homo sapien
caactggcagcatgaacgctaacca

SEQ ID NO: 367595 - DNA, 25 bp, Homo sapien
gatgggggaccccaactggcagcat

SEQ ID NO: 367596 - DNA, 25 bp, Homo sapien
gctctggcctgccagccatggggac

SEQ ID NO: 367597 - DNA, 25 bp, Homo sapien
tggcctgccagccatggggacctac

SEQ ID NO: 367598 - DNA, 25 bp, Homo sapien
acagcacggggctctggcctgccag

SEQ ID NO: 367599 - DNA, 25 bp, Homo sapien
tctggcctgccagccatggggacct

SEQ ID NO: 367600 - DNA, 25 bp, Homo sapien
gaacaggccggtctcctgaacctca

SEQ ID NO: 367601 - DNA, 25 bp, Homo sapien
tcaaactcaggaacaggccggtctc

SEQ ID NO: 367602 - DNA, 25 bp, Homo sapien
caggagaaatccaaggagtgggagg

SEQ ID NO: 367603 - DNA, 25 bp, Homo sapien
agtcgccagggccttctgctcgttg

SEQ ID NO: 367604 - DNA, 25 bp, Homo sapien
ggaagtagaactggaaccgagactg

SEQ ID NO: 367605 - DNA, 25 bp, Homo sapien
actggaaccgagactgggcatagtc

SEQ ID NO: 367606 - DNA, 25 bp, Homo sapien
gtagaactggaaccgagactgggca

SEQ ID NO: 367607 - DNA, 25 bp, Homo sapien
tgaggagtggacactggtcagctgc

SEQ ID NO: 367608 - DNA, 25 bp, Homo sapien
tggaggatggaccacagaccccaga

SEQ ID NO: 367609 - DNA, 25 bp, Homo sapien
caagtaaccaaattctatggtggac

SEQ ID NO: 367610 - DNA, 25 bp, Homo sapien
tctatggtggacatggatgcctgga

SEQ ID NO: 367611 - DNA, 25 bp, Homo sapien
aaattctatggtggacatggatgcc

SEQ ID NO: 367612 - DNA, 25 bp, Homo sapien
cgactgacttctaccagcaaatctt

SEQ ID NO: 367613 - DNA, 25 bp, Homo sapien
cctcttgggagagggtctcaccttt

SEQ ID NO: 367614 - DNA, 25 bp, Homo sapien
ctctgctcctcttgggagagggtct

SEQ ID NO: 367615 - DNA, 25 bp, Homo sapien
tctaccagcaaatcttcttccagtt

SEQ ID NO: 367616 - DNA, 25 bp, Homo sapien
gccaggtaatgacgaataaaatgca

SEQ ID NO: 367617 - DNA, 25 bp, Homo sapien
ctgccaggtaatgacgaataaaatg

SEQ ID NO: 367618 - DNA, 25 bp, Homo sapien
ccaggtaatgacgaataaaatgcaa

SEQ ID NO: 367619 - DNA, 25 bp, Homo sapien
tgccaggtaatgacgaataaaatgc

SEQ ID NO: 367620 - DNA, 25 bp, Homo sapien
tacgatcaatggccaagagtcagga

SEQ ID NO: 367621 - DNA, 25 bp, Homo sapien
acgatcaatggccaagagtcaggaa

SEQ ID NO: 367622 - DNA, 25 bp, Homo sapien
ctacgatcaatggccaagagtcagg

SEQ ID NO: 367623 - DNA, 25 bp, Homo sapien
cgatcaatggccaagagtcaggaat

SEQ ID NO: 367624 - DNA, 25 bp, Homo sapien
tcgtgagtataatcataaacccact

SEQ ID NO: 367625 - DNA, 25 bp, Homo sapien
tagtctgtgggccttgctttgtaga

SEQ ID NO: 367626 - DNA, 25 bp, Homo sapien
gaaaggccattcctcgtgagtataa

SEQ ID NO: 367627 - DNA, 25 bp, Homo sapien
agtctgtgggccttgctttgtagaa

SEQ ID NO: 367628 - DNA, 25 bp, Homo sapien
cctgttttcaagagccctatgggaa

SEQ ID NO: 367629 - DNA, 25 bp, Homo sapien
agaataaggtggacattcagtcccc

SEQ ID NO: 367630 - DNA, 25 bp, Homo sapien
gggagaataaggtggacattcagtc

SEQ ID NO: 367631 - DNA, 25 bp, Homo sapien
ctgttttcaagagccctatgggaac

SEQ ID NO: 367632 - DNA, 25 bp, Homo sapien
tgtactcgaagtccaccagcatgag

SEQ ID NO: 367633 - DNA, 25 bp, Homo sapien
tagttataactgctgtactcgaagt

SEQ ID NO: 367634 - DNA, 25 bp, Homo sapien
ctgtactcgaagtccaccagcatga

SEQ ID NO: 367635 - DNA, 25 bp, Homo sapien
ctatagttataactgctgtactcga

SEQ ID NO: 367636 - DNA, 25 bp, Homo sapien
tccatcttgggttaggagactcaga

SEQ ID NO: 367637 - DNA, 25 bp, Homo sapien
ctcttccatcttgggttaggagact

SEQ ID NO: 367638 - DNA, 25 bp, Homo sapien
tcttgggttaggagactcagatgcc

SEQ ID NO: 367639 - DNA, 25 bp, Homo sapien
tgggttaggagactcagatgccttc

SEQ ID NO: 367640 - DNA, 25 bp, Homo sapien
cattgtggcagaagacgactggcga

SEQ ID NO: 367641 - DNA, 25 bp, Homo sapien
acgactggcgatggggtagactcta

SEQ ID NO: 367642 - DNA, 25 bp, Homo sapien
cgatggggtagactctagtaacttc

SEQ ID NO: 367643 - DNA, 25 bp, Homo sapien
actggcgatggggtagactctagta

SEQ ID NO: 367644 - DNA, 25 bp, Homo sapien
acaggggtatgggagcatgggtcct

SEQ ID NO: 367645 - DNA, 25 bp, Homo sapien
ggggtatgggagcatgggtcctgag

SEQ ID NO: 367646 - DNA, 25 bp, Homo sapien
aggggtatgggagcatgggtcctga

SEQ ID NO: 367647 - DNA, 25 bp, Homo sapien
ctacaggggtatgggagcatgggtc

SEQ ID NO: 367648 - DNA, 25 bp, Homo sapien
catccttcaggctgtacatctccag

SEQ ID NO: 367649 - DNA, 25 bp, Homo sapien
ccagcaggttcatctcagggaggcc

SEQ ID NO: 367650 - DNA, 25 bp, Homo sapien
gggcaggtcctggatctgttttagg

SEQ ID NO: 367651 - DNA, 25 bp, Homo sapien
tgaggttgcccatctcatccttcag

SEQ ID NO: 367652 - DNA, 25 bp, Homo sapien
cctcaggccagactactgcacccct

SEQ ID NO: 367653 - DNA, 25 bp, Homo sapien
aagcccaaagaataggatacactgg

SEQ ID NO: 367654 - DNA, 25 bp, Homo sapien
gctattctttcccacccctcgccta

SEQ ID NO: 367655 - DNA, 25 bp, Homo sapien
tctttcccacccctcgcctatctac

SEQ ID NO: 367656 - DNA, 25 bp, Homo sapien
ccgacacatccgctggcatggaggt

SEQ ID NO: 367657 - DNA, 25 bp, Homo sapien
gcccatgacatcagatccactcaag

SEQ ID NO: 367658 - DNA, 25 bp, Homo sapien
tccgctggcatggaggttcagctca

SEQ ID NO: 367659 - DNA, 25 bp, Homo sapien
cacatccgctggcatggaggttcag

SEQ ID NO: 367660 - DNA, 25 bp, Homo sapien
cgccatcttcgtggcaatggctgct

SEQ ID NO: 367661 - DNA, 25 bp, Homo sapien
tctccatgccatgaaattgcgccat

SEQ ID NO: 367662 - DNA, 25 bp, Homo sapien
gctgctgacaacactggctctcgaa

SEQ ID NO: 367663 - DNA, 25 bp, Homo sapien
caacactggctctcgaagctcttga

SEQ ID NO: 367664 - DNA, 25 bp, Homo sapien
cccaggaagctatcagggtggtgat

SEQ ID NO: 367665 - DNA, 25 bp, Homo sapien
ctgcacccaggaagctatcagggtg

SEQ ID NO: 367666 - DNA, 25 bp, Homo sapien
cacccaggaagctatcagggtggtg

SEQ ID NO: 367667 - DNA, 25 bp, Homo sapien
tgcacccaggaagctatcagggtgg

SEQ ID NO: 367668 - DNA, 25 bp, Homo sapien
caatgaggggaagtcagggttttgg

SEQ ID NO: 367669 - DNA, 25 bp, Homo sapien
gcaatgaggggaagtcagggttttg

SEQ ID NO: 367670 - DNA, 25 bp, Homo sapien
ctggggcaatgaggggaagtcaggg

SEQ ID NO: 367671 - DNA, 25 bp, Homo sapien
tggggcaatgaggggaagtcagggt

SEQ ID NO: 367672 - DNA, 25 bp, Homo sapien
agacattgggcactggggtagggtt

SEQ ID NO: 367673 - DNA, 25 bp, Homo sapien
acattgggcactggggtagggttag

SEQ ID NO: 367674 - DNA, 25 bp, Homo sapien
gatgtggaggcagacattgggcact

SEQ ID NO: 367675 - DNA, 25 bp, Homo sapien
gtggaggtgccttggggaggagagg

SEQ ID NO: 367676 - DNA, 25 bp, Homo sapien
agccggccctctgggaagactccgt

SEQ ID NO: 367677 - DNA, 25 bp, Homo sapien
gctccgcaagtatggcgaacatcac

SEQ ID NO: 367678 - DNA, 25 bp, Homo sapien
tatggcgaacatcacgctttctagc

SEQ ID NO: 367679 - DNA, 25 bp, Homo sapien
gcgaccgctccgcaagtatggcgaa

SEQ ID NO: 367680 - DNA, 25 bp, Homo sapien
gtgttactcagaccgtgaacctcgg

SEQ ID NO: 367681 - DNA, 25 bp, Homo sapien
ggtgtcctcaactgcgcaacgggaa

SEQ ID NO: 367682 - DNA, 25 bp, Homo sapien
ggaacaatactacccgcatcgcgta

SEQ ID NO: 367683 - DNA, 25 bp, Homo sapien
caggcccaggcttcggtgtaatgag

SEQ ID NO: 367684 - DNA, 25 bp, Homo sapien
aggtggtccgggagcgagcagcgga

SEQ ID NO: 367685 - DNA, 25 bp, Homo sapien
ctgcaagatggctccgtacagccgc

SEQ ID NO: 367686 - DNA, 25 bp, Homo sapien
gcgagcagcggaagagcaggttgct

SEQ ID NO: 367687 - DNA, 25 bp, Homo sapien
tggctccgtacagccgcagaagcac

SEQ ID NO: 367688 - DNA, 25 bp, Homo sapien
acccacaccaggcgcgctcagcccg

SEQ ID NO: 367689 - DNA, 25 bp, Homo sapien
ccgatccgcgcaccggagaggctga

SEQ ID NO: 367690 - DNA, 25 bp, Homo sapien
gcgaaaacatggagcatcctgaggg

SEQ ID NO: 367691 - DNA, 25 bp, Homo sapien
gggcgaaaacatggagcatcctgag

SEQ ID NO: 367692 - DNA, 25 bp, Homo sapien
aaaacatggagcatcctgagggccc

SEQ ID NO: 367693 - DNA, 25 bp, Homo sapien
taaaccctcagctcctcgggctgca

SEQ ID NO: 367694 - DNA, 25 bp, Homo sapien
gtaaaccctcagctcctcgggctgc

SEQ ID NO: 367695 - DNA, 25 bp, Homo sapien
ggtaaaccctcagctcctcgggctg

SEQ ID NO: 367696 - DNA, 25 bp, Homo sapien
tactcccggcaccattggtaggctc

SEQ ID NO: 367697 - DNA, 25 bp, Homo sapien
aagtactcccggcaccattggtagg

SEQ ID NO: 367698 - DNA, 25 bp, Homo sapien
cgcccaagtactcccggcaccattg

SEQ ID NO: 367699 - DNA, 25 bp, Homo sapien
tcccggcaccattggtaggctcggc

SEQ ID NO: 367700 - DNA, 25 bp, Homo sapien
gctgcaagccgtctttggccaggca

SEQ ID NO: 367701 - DNA, 25 bp, Homo sapien
tcggcgtcacgcgacagcgacgagg

SEQ ID NO: 367702 - DNA, 25 bp, Homo sapien
acttagactgctgcaagccgtcttt

SEQ ID NO: 367703 - DNA, 25 bp, Homo sapien
ggtagtgtccgggcacttagactgc

SEQ ID NO: 367704 - DNA, 25 bp, Homo sapien
gctctttccgaaggccgaattccgc

SEQ ID NO: 367705 - DNA, 25 bp, Homo sapien
gaattccgcagatctctgccgggcc

SEQ ID NO: 367706 - DNA, 25 bp, Homo sapien
cctatgggcaaggaccaatggtctc

SEQ ID NO: 367707 - DNA, 25 bp, Homo sapien
tgggcttctccggtcatactcgggt

SEQ ID NO: 367708 - DNA, 25 bp, Homo sapien
gatgccctgcacaaacttagccaag

SEQ ID NO: 367709 - DNA, 25 bp, Homo sapien
gagcgtatacattgatcccaggcct

SEQ ID NO: 367710 - DNA, 25 bp, Homo sapien
gaatggctcctgctaaatcttggtg

SEQ ID NO: 367711 - DNA, 25 bp, Homo sapien
tttttacctagcagagggcggagcg

SEQ ID NO: 367712 - DNA, 25 bp, Homo sapien
gaacttcccattggagtccttcctg

SEQ ID NO: 367713 - DNA, 25 bp, Homo sapien
aagaaactaccctgagaccacgatg

SEQ ID NO: 367714 - DNA, 25 bp, Homo sapien
atctcagacctcgagccaggcttac

SEQ ID NO: 367715 - DNA, 25 bp, Homo sapien
cccagtggatatgctggtgacagcc

SEQ ID NO: 367716 - DNA, 25 bp, Homo sapien
cgcgggacgcgtcgctggtgtacga

SEQ ID NO: 367717 - DNA, 25 bp, Homo sapien
tggtggacatggagacgctgtgcgc

SEQ ID NO: 367718 - DNA, 25 bp, Homo sapien
cgggccctgcctattcctcagcaac

SEQ ID NO: 367719 - DNA, 25 bp, Homo sapien
cgtgacaccatcacgccgctgtggg

SEQ ID NO: 367720 - DNA, 25 bp, Homo sapien
taggccacggagtccgacggggcca

SEQ ID NO: 367721 - DNA, 25 bp, Homo sapien
ttctgcggctgccatccccgcaaca

SEQ ID NO: 367722 - DNA, 25 bp, Homo sapien
gtgagagtctgaccgtccccgagtc

SEQ ID NO: 367723 - DNA, 25 bp, Homo sapien
tagttccagcgctgcagccatttct

SEQ ID NO: 367724 - DNA, 25 bp, Homo sapien
cccacatggagctcagggggaagca

SEQ ID NO: 367725 - DNA, 25 bp, Homo sapien
gagtggttcttgatgctcacctgaa

SEQ ID NO: 367726 - DNA, 25 bp, Homo sapien
gatcatcccatccttgaccacaggg

SEQ ID NO: 367727 - DNA, 25 bp, Homo sapien
ccctgcggaggctaggagtggttct

SEQ ID NO: 367728 - DNA, 25 bp, Homo sapien
ggccttatctgaggtgccgtatcta

SEQ ID NO: 367729 - DNA, 25 bp, Homo sapien
tctagaagcacccttgggaattctc

SEQ ID NO: 367730 - DNA, 25 bp, Homo sapien
gggaattctccctagatacactcga

SEQ ID NO: 367731 - DNA, 25 bp, Homo sapien
tagctctttccgaaattgtgccggg

SEQ ID NO: 367732 - DNA, 25 bp, Homo sapien
ccagcacggctcaggtcagtgtgta

SEQ ID NO: 367733 - DNA, 25 bp, Homo sapien
acggctcaggtcagtgtgtagtggg

SEQ ID NO: 367734 - DNA, 25 bp, Homo sapien
agcacggctcaggtcagtgtgtagt

SEQ ID NO: 367735 - DNA, 25 bp, Homo sapien
ggccagcacggctcaggtcagtgtg

SEQ ID NO: 367736 - DNA, 25 bp, Homo sapien
cactatgtgcttaggtgactgcaga

SEQ ID NO: 367737 - DNA, 25 bp, Homo sapien
agtgctgtccgtaaaaaacacgtct

SEQ ID NO: 367738 - DNA, 25 bp, Homo sapien
tgagctaagggaagtatacacaaac

SEQ ID NO: 367739 - DNA, 25 bp, Homo sapien
cacgtcttcacagagccaacaagca

SEQ ID NO: 367740 - DNA, 25 bp, Homo sapien
cttgctctcctggtagcggctgctg

SEQ ID NO: 367741 - DNA, 25 bp, Homo sapien
gacttgctctcctggtagcggctgc

SEQ ID NO: 367742 - DNA, 25 bp, Homo sapien
ggtagcggctgctgactgtgagccc

SEQ ID NO: 367743 - DNA, 25 bp, Homo sapien
tgtgggcgctcccgggccctggtct

SEQ ID NO: 367744 - DNA, 25 bp, Homo sapien
ctggcggatcgcctggctcccaggc

SEQ ID NO: 367745 - DNA, 25 bp, Homo sapien
tttcttacgcttggagctctccagg

SEQ ID NO: 367746 - DNA, 25 bp, Homo sapien
aagatcaagggacctttgcccagca

SEQ ID NO: 367747 - DNA, 25 bp, Homo sapien
tggagacactgggttagcagctgcc

SEQ ID NO: 367748 - DNA, 25 bp, Homo sapien
gaaagaggctgcaactccaagatca

SEQ ID NO: 367749 - DNA, 25 bp, Homo sapien
gcctcaagggcaaactgggtcactg

SEQ ID NO: 367750 - DNA, 25 bp, Homo sapien
cagagcgttgccgttgaagggaaca

SEQ ID NO: 367751 - DNA, 25 bp, Homo sapien
gcaggaatagatgctcaagcccagc

SEQ ID NO: 367752 - DNA, 25 bp, Homo sapien
tagcaacgaacggtgtctgccacgg

SEQ ID NO: 367753 - DNA, 25 bp, Homo sapien
gctaggacaaatgctaccacgcctg

SEQ ID NO: 367754 - DNA, 25 bp, Homo sapien
gcctcgacctagtgggctgaagtga

SEQ ID NO: 367755 - DNA, 25 bp, Homo sapien
cctcgacctagtgggctgaagtgat

SEQ ID NO: 367756 - DNA, 25 bp, Homo sapien
ggtgaaatcttgtctctattaaata

SEQ ID NO: 367757 - DNA, 25 bp, Homo sapien
attagctgggcatggcagcacacac

SEQ ID NO: 367758 - DNA, 25 bp, Homo sapien
aaaaattagctgggcatggcagcac

SEQ ID NO: 367759 - DNA, 25 bp, Homo sapien
gaaatcttgtctctattaaataaaa

SEQ ID NO: 367760 - DNA, 25 bp, Homo sapien
cctgggcgacagagcgagactccgt

SEQ ID NO: 367761 - DNA, 25 bp, Homo sapien
cggagatggtaccactgcactctag

SEQ ID NO: 367762 - DNA, 25 bp, Homo sapien
tagcctgggcgacagagcgagactc

SEQ ID NO: 367763 - DNA, 25 bp, Homo sapien
agcggagatggtaccactgcactct

SEQ ID NO: 367764 - DNA, 25 bp, Homo sapien
cacaggtgaaatgcagaggcctggg

SEQ ID NO: 367765 - DNA, 25 bp, Homo sapien
gctgggtggagaatcgttagtagtg

SEQ ID NO: 367766 - DNA, 25 bp, Homo sapien
tagtgggtcaaaaggtgaaggcagg

SEQ ID NO: 367767 - DNA, 25 bp, Homo sapien
tgtgggcacaggtgaaatgcagagg

SEQ ID NO: 367768 - DNA, 25 bp, Homo sapien
tattacgttatcaggcacaaacccc

SEQ ID NO: 367769 - DNA, 25 bp, Homo sapien
ttgtacaagtcctgaacctctctgc

SEQ ID NO: 367770 - DNA, 25 bp, Homo sapien
agagccacgacaccagggttcaaat

SEQ ID NO: 367771 - DNA, 25 bp, Homo sapien
ccccaggattggacgaattgtcaca

SEQ ID NO: 367772 - DNA, 25 bp, Homo sapien
cagctgcgtctaactgggccttgag

SEQ ID NO: 367773 - DNA, 25 bp, Homo sapien
gctgcgtctaactgggccttgagca

SEQ ID NO: 367774 - DNA, 25 bp, Homo sapien
ggtcacagctgcgtctaactgggcc

SEQ ID NO: 367775 - DNA, 25 bp, Homo sapien
gctggggccgaaggtcacagctgcg

SEQ ID NO: 367776 - DNA, 25 bp, Homo sapien
cagagagctggaggcgtggcaggca

SEQ ID NO: 367777 - DNA, 25 bp, Homo sapien
gtcagagagctggaggcgtggcagg

SEQ ID NO: 367778 - DNA, 25 bp, Homo sapien
ggcagggtctgcagtggtatcactg

SEQ ID NO: 367779 - DNA, 25 bp, Homo sapien
gtctgcagtggtatcactgtgggca

SEQ ID NO: 367780 - DNA, 25 bp, Homo sapien
ggaggggccagggatctagggctcc

SEQ ID NO: 367781 - DNA, 25 bp, Homo sapien
gaggggccagggatctagggctccg

SEQ ID NO: 367782 - DNA, 25 bp, Homo sapien
aggggccagggatctagggctccgg

SEQ ID NO: 367783 - DNA, 25 bp, Homo sapien
gaggaggggccagggatctagggct

SEQ ID NO: 367784 - DNA, 25 bp, Homo sapien
cctgggtgaagaagtgagccttgta

SEQ ID NO: 367785 - DNA, 25 bp, Homo sapien
ctgggtgaagaagtgagccttgtac

SEQ ID NO: 367786 - DNA, 25 bp, Homo sapien
tccagtccgcacagcaaaaacccca

SEQ ID NO: 367787 - DNA, 25 bp, Homo sapien
gtaggacgggtagaagaagagagac

SEQ ID NO: 367788 - DNA, 25 bp, Homo sapien
tttccagtccgcacagcaaaaaccc

SEQ ID NO: 367789 - DNA, 25 bp, Homo sapien
ccacggacctcgtctgggtaggacg

SEQ ID NO: 367790 - DNA, 25 bp, Homo sapien
ggctgaggtcaaagccatccaaggt

SEQ ID NO: 367791 - DNA, 25 bp, Homo sapien
gagctggccagctcgtgggtcacgc

SEQ ID NO: 367792 - DNA, 25 bp, Homo sapien
caaagccatccaaggtgacattggg

SEQ ID NO: 367793 - DNA, 25 bp, Homo sapien
catccaaggtgacattgggcagtgg

SEQ ID NO: 367794 - DNA, 25 bp, Homo sapien
aggctctcggacaccgccctcgtag

SEQ ID NO: 367795 - DNA, 25 bp, Homo sapien
tcgggacatacgcatggtctcaggt

SEQ ID NO: 367796 - DNA, 25 bp, Homo sapien
ctttccacaccgcaagagaccggag

SEQ ID NO: 367797 - DNA, 25 bp, Homo sapien
gagcagccgcctcgggacatacgca

SEQ ID NO: 367798 - DNA, 25 bp, Homo sapien
gcgctcatgagccatggagccacag

SEQ ID NO: 367799 - DNA, 25 bp, Homo sapien
ggcgctcatgagccatggagccaca

SEQ ID NO: 367800 - DNA, 25 bp, Homo sapien
ggccctggcccgtgacagggccgga

SEQ ID NO: 367801 - DNA, 25 bp, Homo sapien
tggcccgtgacagggccggagcacc

SEQ ID NO: 367802 - DNA, 25 bp, Homo sapien
gacagggccggagcacccagctgcc

SEQ ID NO: 367803 - DNA, 25 bp, Homo sapien
cgtgacagggccggagcacccagct

SEQ ID NO: 367804 - DNA, 25 bp, Homo sapien
ccaggtcccctatggctgtcatcag

SEQ ID NO: 367805 - DNA, 25 bp, Homo sapien
ggcctgaacgctctgcaaagctctg

SEQ ID NO: 367806 - DNA, 25 bp, Homo sapien
ccattgtctgcagtgaagatgacca

SEQ ID NO: 367807 - DNA, 25 bp, Homo sapien
gatgaccagcgtctcttcaagcagc

SEQ ID NO: 367808 - DNA, 25 bp, Homo sapien
ccatgaggtcatgggcgaaagccat

SEQ ID NO: 367809 - DNA, 25 bp, Homo sapien
atgtagcgggcctctagtccgggca

SEQ ID NO: 367810 - DNA, 25 bp, Homo sapien
tccacggacaggttggccaacagtg

SEQ ID NO: 367811 - DNA, 25 bp, Homo sapien
tcacagccaccgtcgcaaggagtgg

SEQ ID NO: 367812 - DNA, 25 bp, Homo sapien
agcatcaagggctgggggactttgg

SEQ ID NO: 367813 - DNA, 25 bp, Homo sapien
gagcatcaagggctgggggactttg

SEQ ID NO: 367814 - DNA, 25 bp, Homo sapien
gcatcaagggctgggggactttggg

SEQ ID NO: 367815 - DNA, 25 bp, Homo sapien
aaggtgccacttgccggccattcct

SEQ ID NO: 367816 - DNA, 25 bp, Homo sapien
agggtacatgcccatccgaaccggg

SEQ ID NO: 367817 - DNA, 25 bp, Homo sapien
cattcctgtgaggtagcctcgggca

SEQ ID NO: 367818 - DNA, 25 bp, Homo sapien
gcctagaaatcgatggaagccctga

SEQ ID NO: 367819 - DNA, 25 bp, Homo sapien
atgttgggcggacgggcaacggcca

SEQ ID NO: 367820 - DNA, 25 bp, Homo sapien
ctagagggtgtgcacagagacacag

SEQ ID NO: 367821 - DNA, 25 bp, Homo sapien
gtcggcaaagatcagcacgatgttg

SEQ ID NO: 367822 - DNA, 25 bp, Homo sapien
caggtccccatagccgaggtcgtcg

SEQ ID NO: 367823 - DNA, 25 bp, Homo sapien
cagcaggctctttccgataccgcag

SEQ ID NO: 367824 - DNA, 25 bp, Homo sapien
tttccgataccgcagacccaggcgc

SEQ ID NO: 367825 - DNA, 25 bp, Homo sapien
ggctctttccgataccgcagaccca

SEQ ID NO: 367826 - DNA, 25 bp, Homo sapien
agcaggctctttccgataccgcaga

SEQ ID NO: 367827 - DNA, 25 bp, Homo sapien
ctgacggccgcctcctgaagctcca

SEQ ID NO: 367828 - DNA, 25 bp, Homo sapien
ggctgggacggaactcctccaggac

SEQ ID NO: 367829 - DNA, 25 bp, Homo sapien
cgcgggctgggacggaactcctcca

SEQ ID NO: 367830 - DNA, 25 bp, Homo sapien
tgggacggaactcctccaggaccag

SEQ ID NO: 367831 - DNA, 25 bp, Homo sapien
gggctgggacggaactcctccagga

SEQ ID NO: 367832 - DNA, 25 bp, Homo sapien
ttctcgagcggagatctgatcctcc

SEQ ID NO: 367833 - DNA, 25 bp, Homo sapien
ggcgtaagtcacttggcgctgacca

SEQ ID NO: 367834 - DNA, 25 bp, Homo sapien
gaggagccggtaccgggctgcgggc

SEQ ID NO: 367835 - DNA, 25 bp, Homo sapien
tcgcctagcggtccgggctcagggt

SEQ ID NO: 367836 - DNA, 25 bp, Homo sapien
cggactgactgttgacacctgtcat

SEQ ID NO: 367837 - DNA, 25 bp, Homo sapien
cggactgactgttgacacctgtcac

SEQ ID NO: 367838 - DNA, 25 bp, Homo sapien
tggcccctcctagggtggctcccca

SEQ ID NO: 367839 - DNA, 25 bp, Homo sapien
ttattctgtgtggctgagggcccca

SEQ ID NO: 367840 - DNA, 25 bp, Homo sapien
caaggttgctgtagtaattgggccc

SEQ ID NO: 367841 - DNA, 25 bp, Homo sapien
ctgagggccccaaggttgctgtagt

SEQ ID NO: 367842 - DNA, 25 bp, Homo sapien
gcaggacctggtctcctgatgggaa

SEQ ID NO: 367843 - DNA, 25 bp, Homo sapien
caagctcaggttgcccctcggggag

SEQ ID NO: 367844 - DNA, 25 bp, Homo sapien
ttgcgtttctccacaagctcaggtt

SEQ ID NO: 367845 - DNA, 25 bp, Homo sapien
gaagcgctttccctggtcactgacc

SEQ ID NO: 367846 - DNA, 25 bp, Homo sapien
ggtgagggttcaggactcgacttcc

SEQ ID NO: 367847 - DNA, 25 bp, Homo sapien
gttcaggactcgacttccactgaag

SEQ ID NO: 367848 - DNA, 25 bp, Homo sapien
tgagggttcaggactcgacttccac

SEQ ID NO: 367849 - DNA, 25 bp, Homo sapien
ctctggaagagcctctggggaccag

SEQ ID NO: 367850 - DNA, 25 bp, Homo sapien
gccagaacagaaagctgctcggtgg

SEQ ID NO: 367851 - DNA, 25 bp, Homo sapien
gtctctgccagcgagccccttgatg

SEQ ID NO: 367852 - DNA, 25 bp, Homo sapien
ctctgccagcgagccccttgatgtt

SEQ ID NO: 367853 - DNA, 25 bp, Homo sapien
aaagctgctcggtggcccagaaatc

SEQ ID NO: 367854 - DNA, 25 bp, Homo sapien
attggagctatcgcagctggttggc

SEQ ID NO: 367855 - DNA, 25 bp, Homo sapien
ttggagctatcgcagctggttggcg

SEQ ID NO: 367856 - DNA, 25 bp, Homo sapien
taattggagctatcgcagctggttg

SEQ ID NO: 367857 - DNA, 25 bp, Homo sapien
aattggagctatcgcagctggttgg

SEQ ID NO: 367858 - DNA, 25 bp, Homo sapien
gactgggaggttcttgtggaaccca

SEQ ID NO: 367859 - DNA, 25 bp, Homo sapien
atcaaccaccttgaggccctctggt

SEQ ID NO: 367860 - DNA, 25 bp, Homo sapien
cagctgggcagatacatgacctggc

SEQ ID NO: 367861 - DNA, 25 bp, Homo sapien
tctggttggtcccaactctgaaagg

SEQ ID NO: 367862 - DNA, 25 bp, Homo sapien
tcgttgcacaggtccaagagctcaa

SEQ ID NO: 367863 - DNA, 25 bp, Homo sapien
taaagcagatctacgccctgaagtg

SEQ ID NO: 367864 - DNA, 25 bp, Homo sapien
tctgacggaaacacccaaggctgtg

SEQ ID NO: 367865 - DNA, 25 bp, Homo sapien
tgtggcctcacagacgttggactca

SEQ ID NO: 367866 - DNA, 25 bp, Homo sapien
tcagcactcggagtgagcaggcaac

SEQ ID NO: 367867 - DNA, 25 bp, Homo sapien
gacattgaggaactgcaagccatgg

SEQ ID NO: 367868 - DNA, 25 bp, Homo sapien
tgaggaactgcaagccatggtgtga

SEQ ID NO: 367869 - DNA, 25 bp, Homo sapien
tggatgatgtcagcactcggagtga

SEQ ID NO: 367870 - DNA, 25 bp, Homo sapien
cctatataggatgagaggagcgatt

SEQ ID NO: 367871 - DNA, 25 bp, Homo sapien
tccgacagggttagtaataacagag

SEQ ID NO: 367872 - DNA, 25 bp, Homo sapien
caacatggacaaaaacctatatagg

SEQ ID NO: 367873 - DNA, 25 bp, Homo sapien
gagcgattggaggttaagtattcta

SEQ ID NO: 367874 - DNA, 25 bp, Homo sapien
caggatacccgagcctcttggaggt

SEQ ID NO: 367875 - DNA, 25 bp, Homo sapien
gccaggatacccgagcctcttggag

SEQ ID NO: 367876 - DNA, 25 bp, Homo sapien
ccaggatacccgagcctcttggagg

SEQ ID NO: 367877 - DNA, 25 bp, Homo sapien
agccaggatacccgagcctcttgga

SEQ ID NO: 367878 - DNA, 25 bp, Homo sapien
tgcaggggacatgctaatctctgaa

SEQ ID NO: 367879 - DNA, 25 bp, Homo sapien
aattttagtatatgtgctgcagaag

SEQ ID NO: 367880 - DNA, 25 bp, Homo sapien
gacatgctaatctctgaatcattct

SEQ ID NO: 367881 - DNA, 25 bp, Homo sapien
aggggacatgctaatctctgaatca

SEQ ID NO: 367882 - DNA, 25 bp, Homo sapien
tattttaccctcttggtgactgtgc

SEQ ID NO: 367883 - DNA, 25 bp, Homo sapien
tgtgtcagctctgtgtttattttac

SEQ ID NO: 367884 - DNA, 25 bp, Homo sapien
cacaggagtactgtcggtgggatga

SEQ ID NO: 367885 - DNA, 25 bp, Homo sapien
agccctggttgaccatcaacagcct

SEQ ID NO: 367886 - DNA, 25 bp, Homo sapien
tagcccgtggctcaggcggcaacgt

SEQ ID NO: 367887 - DNA, 25 bp, Homo sapien
cgccggatgaccagaaacagctgct

SEQ ID NO: 367888 - DNA, 25 bp, Homo sapien
cgttatgtgcgtcccgctgtgggtc

SEQ ID NO: 367889 - DNA, 25 bp, Homo sapien
cagctgctcactaaacgttatgtgc

SEQ ID NO: 367890 - DNA, 25 bp, Homo sapien
tcttcgctccgtccaagccgcagcg

SEQ ID NO: 367891 - DNA, 25 bp, Homo sapien
ttcagcgccagcctcttcgctccgt

SEQ ID NO: 367892 - DNA, 25 bp, Homo sapien
cagcctcttcgctccgtccaagccg

SEQ ID NO: 367893 - DNA, 25 bp, Homo sapien
gtccaagccgcagcgccgcaagagc

SEQ ID NO: 367894 - DNA, 25 bp, Homo sapien
cgcggtccgcgcccgggtggcctcg

SEQ ID NO: 367895 - DNA, 25 bp, Homo sapien
gcggtccgcgcccgggtggcctcga

SEQ ID NO: 367896 - DNA, 25 bp, Homo sapien
ggcagcttcgcccgcgagccctccc

SEQ ID NO: 367897 - DNA, 25 bp, Homo sapien
cccggccaaggaccggcggctggag

SEQ ID NO: 367898 - DNA, 25 bp, Homo sapien
ctgtgttcctgtccgtgggggccat

SEQ ID NO: 367899 - DNA, 25 bp, Homo sapien
ccggcgcggatctgccatccctaca

SEQ ID NO: 367900 - DNA, 25 bp, Homo sapien
gagcggcgccgctccactgtgttcc

SEQ ID NO: 367901 - DNA, 25 bp, Homo sapien
tgatttgagatctagggaggtggct

SEQ ID NO: 367902 - DNA, 25 bp, Homo sapien
gtgatttgagatctagggaggtggc

SEQ ID NO: 367903 - DNA, 25 bp, Homo sapien
tgtgatttgagatctagggaggtgg

SEQ ID NO: 367904 - DNA, 25 bp, Homo sapien
ttgtgatttgagatctagggaggtg

SEQ ID NO: 367905 - DNA, 25 bp, Homo sapien
tcgatcccccatggtcgggctcagg

SEQ ID NO: 367906 - DNA, 25 bp, Homo sapien
gtgggcccaggtctcgtcattggct

SEQ ID NO: 367907 - DNA, 25 bp, Homo sapien
caggtctcgtcattggctctgtcct

SEQ ID NO: 367908 - DNA, 25 bp, Homo sapien
agactcatcaggtgtcgatccccca

SEQ ID NO: 367909 - DNA, 25 bp, Homo sapien
gacatagggctgtcatcggccaagc

SEQ ID NO: 367910 - DNA, 25 bp, Homo sapien
gatggaagtccagtgctgtcccttg

SEQ ID NO: 367911 - DNA, 25 bp, Homo sapien
gattgggttcatgtgggtcctctgc

SEQ ID NO: 367912 - DNA, 25 bp, Homo sapien
caaccaatgttctgtgacacggccc

SEQ ID NO: 367913 - DNA, 25 bp, Homo sapien
tgtgtgcccaccgtggctgttgtca

SEQ ID NO: 367914 - DNA, 25 bp, Homo sapien
tgagtccagtcctgtttcagatctg

SEQ ID NO: 367915 - DNA, 25 bp, Homo sapien
taacttccggtgcttctggctgcag

SEQ ID NO: 367916 - DNA, 25 bp, Homo sapien
taatggctggagtccggtactcact

SEQ ID NO: 367917 - DNA, 25 bp, Homo sapien
agctgtgtctccagccccttgtgtt

SEQ ID NO: 367918 - DNA, 25 bp, Homo sapien
catggcaaagtagctttggaaacac

SEQ ID NO: 367919 - DNA, 25 bp, Homo sapien
tttgtaggtaaagttcatggcaaag

SEQ ID NO: 367920 - DNA, 25 bp, Homo sapien
aagttcatggcaaagtagctttgga

SEQ ID NO: 367921 - DNA, 25 bp, Homo sapien
taggtaaagttcatggcaaagtagc

SEQ ID NO: 367922 - DNA, 25 bp, Homo sapien
gttcctaggtctcccagaagaccca

SEQ ID NO: 367923 - DNA, 25 bp, Homo sapien
tgtgtgccgtggtctccagacctgc

SEQ ID NO: 367924 - DNA, 25 bp, Homo sapien
ttcctaggtctcccagaagacccat

SEQ ID NO: 367925 - DNA, 25 bp, Homo sapien
cgtggtctccagacctgctagagtc

SEQ ID NO: 367926 - DNA, 25 bp, Homo sapien
gagtaggaaggaggtacagaggagg

SEQ ID NO: 367927 - DNA, 25 bp, Homo sapien
gggagtaggaaggaggtacagagga

SEQ ID NO: 367928 - DNA, 25 bp, Homo sapien
tcggggagtaggaaggaggtacaga

SEQ ID NO: 367929 - DNA, 25 bp, Homo sapien
ccaggatccctgaaccctgttcggg

SEQ ID NO: 367930 - DNA, 25 bp, Homo sapien
gccagggtaggtgtccatcctgtga

SEQ ID NO: 367931 - DNA, 25 bp, Homo sapien
aggtacacctgccatcacaactcca

SEQ ID NO: 367932 - DNA, 25 bp, Homo sapien
gtaggtgtccatcctgtgatacagg

SEQ ID NO: 367933 - DNA, 25 bp, Homo sapien
cctgtgatacaggtccccaggccag

SEQ ID NO: 367934 - DNA, 25 bp, Homo sapien
tcaggaagttctgctctggatctga

SEQ ID NO: 367935 - DNA, 25 bp, Homo sapien
cagcttattctggtggttggtgcct

SEQ ID NO: 367936 - DNA, 25 bp, Homo sapien
ggaggccaggtccaatgggagcaaa

SEQ ID NO: 367937 - DNA, 25 bp, Homo sapien
tgctgaggcccacctcaggtgttct

SEQ ID NO: 367938 - DNA, 25 bp, Homo sapien
gtggtgaggacagcctttaagggga

SEQ ID NO: 367939 - DNA, 25 bp, Homo sapien
gctttaaggggagccccatgcgtgt

SEQ ID NO: 367940 - DNA, 25 bp, Homo sapien
gtgggagacaaaagacgaaacctgc

SEQ ID NO: 367941 - DNA, 25 bp, Homo sapien
aacctgctttaaggggagccccatg

SEQ ID NO: 367942 - DNA, 25 bp, Homo sapien
tgagcaggagcagcgagaatggctg

SEQ ID NO: 367943 - DNA, 25 bp, Homo sapien
gattggagatcagggtgagaaaaac

SEQ ID NO: 367944 - DNA, 25 bp, Homo sapien
gattgcccaggtaaataaggcatgg

SEQ ID NO: 367945 - DNA, 25 bp, Homo sapien
gataaggtttctgctcctcacggag

SEQ ID NO: 367946 - DNA, 25 bp, Homo sapien
tgacaaaattaaatgggccgggcca

SEQ ID NO: 367947 - DNA, 25 bp, Homo sapien
gatgagacctccagacaaccaggaa

SEQ ID NO: 367948 - DNA, 25 bp, Homo sapien
tagaaaaatcccctgacactcggag

SEQ ID NO: 367949 - DNA, 25 bp, Homo sapien
taccggtggagacttcagaacattc

SEQ ID NO: 367950 - DNA, 25 bp, Homo sapien
tattgaccctcgggctggttgagat

SEQ ID NO: 367951 - DNA, 25 bp, Homo sapien
attgaccctcgggctggttgagatc

SEQ ID NO: 367952 - DNA, 25 bp, Homo sapien
ctattgaccctcgggctggttgaga

SEQ ID NO: 367953 - DNA, 25 bp, Homo sapien
cctattgaccctcgggctggttgag

SEQ ID NO: 367954 - DNA, 25 bp, Homo sapien
tcacagcacgcatgagaggcagact

SEQ ID NO: 367955 - DNA, 25 bp, Homo sapien
tattcagcaacggacaggaaggtgg

SEQ ID NO: 367956 - DNA, 25 bp, Homo sapien
cagcacaaaccagttaaggcgaggg

SEQ ID NO: 367957 - DNA, 25 bp, Homo sapien
taaggctgccctcatgcaggtaaga

SEQ ID NO: 367958 - DNA, 25 bp, Homo sapien
aaatgctttggccacataggagggc

SEQ ID NO: 367959 - DNA, 25 bp, Homo sapien
cgtattgagtcgaatggcccatggc

SEQ ID NO: 367960 - DNA, 25 bp, Homo sapien
cataggagggcttgcgtattgagtc

SEQ ID NO: 367961 - DNA, 25 bp, Homo sapien
ttatgacccctgaaatgctttggcc

SEQ ID NO: 367962 - DNA, 25 bp, Homo sapien
cctgggcctatcatctatagctgac

SEQ ID NO: 367963 - DNA, 25 bp, Homo sapien
ctgggcctatcatctatagctgaca

SEQ ID NO: 367964 - DNA, 25 bp, Homo sapien
tgggcctatcatctatagctgacat

SEQ ID NO: 367965 - DNA, 25 bp, Homo sapien
tcagcgatttgagagatgccagagg

SEQ ID NO: 367966 - DNA, 25 bp, Homo sapien
caaactggtctaacgtagcacctag

SEQ ID NO: 367967 - DNA, 25 bp, Homo sapien
tagcacctagattttcaatgacggg

SEQ ID NO: 367968 - DNA, 25 bp, Homo sapien
tatcctttgcaagctgtgcaccccg

SEQ ID NO: 367969 - DNA, 25 bp, Homo sapien
tagcaagccacaagtaccagagagg

SEQ ID NO: 367970 - DNA, 25 bp, Homo sapien
gggtgaacaggcatatctgctagct

SEQ ID NO: 367971 - DNA, 25 bp, Homo sapien
caaacaatgcccgagattatcataa

SEQ ID NO: 367972 - DNA, 25 bp, Homo sapien
taaacacaatgcaaacaatgcccga

SEQ ID NO: 367973 - DNA, 25 bp, Homo sapien
acaggaggcacaaggtccaaactat

SEQ ID NO: 367974 - DNA, 25 bp, Homo sapien
ggaggcacaaggtccaaactattcc

SEQ ID NO: 367975 - DNA, 25 bp, Homo sapien
gaggcacaaggtccaaactattcct

SEQ ID NO: 367976 - DNA, 25 bp, Homo sapien
gcacaaggtccaaactattcctcaa

SEQ ID NO: 367977 - DNA, 25 bp, Homo sapien
taccttgtggtatggctgtaaggac

SEQ ID NO: 367978 - DNA, 25 bp, Homo sapien
aaatctggaatgaatagctatctgc

SEQ ID NO: 367979 - DNA, 25 bp, Homo sapien
tgatctcagctttacctagaagagc

SEQ ID NO: 367980 - DNA, 25 bp, Homo sapien
taactatagctaggcctgtcacctg

SEQ ID NO: 367981 - DNA, 25 bp, Homo sapien
actccgtctcagaacgaacaaagaa

SEQ ID NO: 367982 - DNA, 25 bp, Homo sapien
taaatcattacctcaggagaagccc

SEQ ID NO: 367983 - DNA, 25 bp, Homo sapien
aacaaaccagatgactgggagactg

SEQ ID NO: 367984 - DNA, 25 bp, Homo sapien
ccaaggaattgtccccgaggtgagc

SEQ ID NO: 367985 - DNA, 25 bp, Homo sapien
cagtccagagtttgctggtgctgac

SEQ ID NO: 367986 - DNA, 25 bp, Homo sapien
gaggctaataggatgggtgggttgc

SEQ ID NO: 367987 - DNA, 25 bp, Homo sapien
tcttccaccagtccagagtttgctg

SEQ ID NO: 367988 - DNA, 25 bp, Homo sapien
ggggatggcctagagagtttctcca

SEQ ID NO: 367989 - DNA, 25 bp, Homo sapien
tgctgctgctctgttcctggtctgg

SEQ ID NO: 367990 - DNA, 25 bp, Homo sapien
tcctggtctggcacgtcctcctctt

SEQ ID NO: 367991 - DNA, 25 bp, Homo sapien
gaggccgcctcctctgatggggtct

SEQ ID NO: 367992 - DNA, 25 bp, Homo sapien
gggtctcgatgctgctgctctgttc

SEQ ID NO: 367993 - DNA, 25 bp, Homo sapien
gaagtcctgggagttctgtttgtaa

SEQ ID NO: 367994 - DNA, 25 bp, Homo sapien
ctaatcgaattgcatcattgaagag

SEQ ID NO: 367995 - DNA, 25 bp, Homo sapien
tgtttgtaagacacagctaatcgaa

SEQ ID NO: 367996 - DNA, 25 bp, Homo sapien
gacacagctaatcgaattgcatcat

SEQ ID NO: 367997 - DNA, 25 bp, Homo sapien
gtaccatcagcagccgagacgaaat

SEQ ID NO: 367998 - DNA, 25 bp, Homo sapien
tcagcagccgagacgaaatacaggg

SEQ ID NO: 367999 - DNA, 25 bp, Homo sapien
ctgtagagagaaggtaggacattgg

SEQ ID NO: 368000 - DNA, 25 bp, Homo sapien
tagagagaaggtaggacattggtct

SEQ ID NO: 368001 - DNA, 25 bp, Homo sapien
gagagaaggtaggacattggtctgt

SEQ ID NO: 368002 - DNA, 25 bp, Homo sapien
gtagagagaaggtaggacattggtc

SEQ ID NO: 368003 - DNA, 25 bp, Homo sapien
caatcactgaaggttgcctgcccgg

SEQ ID NO: 368004 - DNA, 25 bp, Homo sapien
gaatgcaagcaaccaaccaagggtt

SEQ ID NO: 368005 - DNA, 25 bp, Homo sapien
gaattgctaacacccaggtgcaggg

SEQ ID NO: 368006 - DNA, 25 bp, Homo sapien
gaggccttcattccagaaagtggga

SEQ ID NO: 368007 - DNA, 25 bp, Homo sapien
aactcccgaagctctgtataccagg

SEQ ID NO: 368008 - DNA, 25 bp, Homo sapien
gggatctctggcctgaactcccgaa

SEQ ID NO: 368009 - DNA, 25 bp, Homo sapien
ttttattggccaccacgatgcatgg

SEQ ID NO: 368010 - DNA, 25 bp, Homo sapien
aggtgctcaggttcctataggtgac

SEQ ID NO: 368011 - DNA, 25 bp, Homo sapien
caagcaggtaagcacgagcacatgg

SEQ ID NO: 368012 - DNA, 25 bp, Homo sapien
tgaattgcagcctctctgaccgcag

SEQ ID NO: 368013 - DNA, 25 bp, Homo sapien
aaaatcttattcttggcccagtgca

SEQ ID NO: 368014 - DNA, 25 bp, Homo sapien
tttgtgggaacgctctgaattgcag

SEQ ID NO: 368015 - DNA, 25 bp, Homo sapien
gttagccatcacaactgcccctgat

SEQ ID NO: 368016 - DNA, 25 bp, Homo sapien
caagtgttagccatcacaactgccc

SEQ ID NO: 368017 - DNA, 25 bp, Homo sapien
gtgttagccatcacaactgcccctg

SEQ ID NO: 368018 - DNA, 25 bp, Homo sapien
gccatcacaactgcccctgattttt

SEQ ID NO: 368019 - DNA, 25 bp, Homo sapien
gtgattctcttgtctcggcctcctc

SEQ ID NO: 368020 - DNA, 25 bp, Homo sapien
tgattctcttgtctcggcctcctca

SEQ ID NO: 368021 - DNA, 25 bp, Homo sapien
gcaacacggttcaagctcagggcta

SEQ ID NO: 368022 - DNA, 25 bp, Homo sapien
tgccctagtacaacagtcagtggat

SEQ ID NO: 368023 - DNA, 25 bp, Homo sapien
tctgaaagacaactgagctgctgct

SEQ ID NO: 368024 - DNA, 25 bp, Homo sapien
cagctatttgtgcaagcaacacggt

SEQ ID NO: 368025 - DNA, 25 bp, Homo sapien
aggctcagatgccttttgtccaggt

SEQ ID NO: 368026 - DNA, 25 bp, Homo sapien
tctgttccttgttttgagagctgag

SEQ ID NO: 368027 - DNA, 25 bp, Homo sapien
tccttgttttgagagctgaggagga

SEQ ID NO: 368028 - DNA, 25 bp, Homo sapien
cagatgccttttgtccaggtctggt

SEQ ID NO: 368029 - DNA, 25 bp, Homo sapien
cccgtgtggtcagaaggcaagtgct

SEQ ID NO: 368030 - DNA, 25 bp, Homo sapien
agcatccccatctcaaggtttcaag

SEQ ID NO: 368031 - DNA, 25 bp, Homo sapien
gggtcgagccctggttccgtctctg

SEQ ID NO: 368032 - DNA, 25 bp, Homo sapien
caaggtttcaaggtggagggtcgag

SEQ ID NO: 368033 - DNA, 25 bp, Homo sapien
ggtggcaacctgtccatcccatgtg

SEQ ID NO: 368034 - DNA, 25 bp, Homo sapien
catttaaaagtggtggcctgagaac

SEQ ID NO: 368035 - DNA, 25 bp, Homo sapien
atgacaaactgcgaagaaacacggg

SEQ ID NO: 368036 - DNA, 25 bp, Homo sapien
gagagatgccacatattccagggct

SEQ ID NO: 368037 - DNA, 25 bp, Homo sapien
ggacacaggtatacagagctccttt

SEQ ID NO: 368038 - DNA, 25 bp, Homo sapien
cacgggtaggaacttctacaggaca

SEQ ID NO: 368039 - DNA, 25 bp, Homo sapien
ccagccagggaattcacgggtagga

SEQ ID NO: 368040 - DNA, 25 bp, Homo sapien
tcttggagcgactgcttcaccacac

SEQ ID NO: 368041 - DNA, 25 bp, Homo sapien
agcgtgcgccccctagggaaaggca

SEQ ID NO: 368042 - DNA, 25 bp, Homo sapien
gcatctactcagtcccagcgtgcgc

SEQ ID NO: 368043 - DNA, 25 bp, Homo sapien
tgggacccgcagcatctactcagtc

SEQ ID NO: 368044 - DNA, 25 bp, Homo sapien
ggttctctgggacccgcagcatcta

SEQ ID NO: 368045 - DNA, 25 bp, Homo sapien
ccagacttgcccagtgcctttgtcc

SEQ ID NO: 368046 - DNA, 25 bp, Homo sapien
cagacttgcccagtgcctttgtcca

SEQ ID NO: 368047 - DNA, 25 bp, Homo sapien
agacttgcccagtgcctttgtccac

SEQ ID NO: 368048 - DNA, 25 bp, Homo sapien
gccagacttgcccagtgcctttgtc

SEQ ID NO: 368049 - DNA, 25 bp, Homo sapien
gcatgcatgctctggaaccgctcct

SEQ ID NO: 368050 - DNA, 25 bp, Homo sapien
gccttgtggtagtaggaggcatgca

SEQ ID NO: 368051 - DNA, 25 bp, Homo sapien
tgcatgctctggaaccgctcctggc

SEQ ID NO: 368052 - DNA, 25 bp, Homo sapien
tgggccttgtggtagtaggaggcat

SEQ ID NO: 368053 - DNA, 25 bp, Homo sapien
atgtgaacacagacagacctacatg

SEQ ID NO: 368054 - DNA, 25 bp, Homo sapien
caatgtgaacacagacagacctaca

SEQ ID NO: 368055 - DNA, 25 bp, Homo sapien
ctgcaatgtgaacacagacagacct

SEQ ID NO: 368056 - DNA, 25 bp, Homo sapien
gcaatgtgaacacagacagacctac

SEQ ID NO: 368057 - DNA, 25 bp, Homo sapien
gagaaacagagactatacagcccca

SEQ ID NO: 368058 - DNA, 25 bp, Homo sapien
agagactatacagccccacacgtgt

SEQ ID NO: 368059 - DNA, 25 bp, Homo sapien
agggagaaacagagactatacagcc

SEQ ID NO: 368060 - DNA, 25 bp, Homo sapien
gaaacagagactatacagccccaca

SEQ ID NO: 368061 - DNA, 25 bp, Homo sapien
tgtgatgtgagaggtgtgtcttcac

SEQ ID NO: 368062 - DNA, 25 bp, Homo sapien
ctgagtgtgatgtgagaggtgtgtc

SEQ ID NO: 368063 - DNA, 25 bp, Homo sapien
agtgtgatgtgagaggtgtgtcttc

SEQ ID NO: 368064 - DNA, 25 bp, Homo sapien
tgagtgtgatgtgagaggtgtgtct

SEQ ID NO: 368065 - DNA, 25 bp, Homo sapien
tgtgtgtatgggaagacagtgggtc

SEQ ID NO: 368066 - DNA, 25 bp, Homo sapien
ccgtttcccacgtgacacgcagggt

SEQ ID NO: 368067 - DNA, 25 bp, Homo sapien
gacacgcagggtcctctaagttcca

SEQ ID NO: 368068 - DNA, 25 bp, Homo sapien
cacgtgacacgcagggtcctctaag

SEQ ID NO: 368069 - DNA, 25 bp, Homo sapien
ctgtgtgcccggccaaggagaagat

SEQ ID NO: 368070 - DNA, 25 bp, Homo sapien
accacagacggtagacagagtcagg

SEQ ID NO: 368071 - DNA, 25 bp, Homo sapien
cacagacggtagacagagtcaggca

SEQ ID NO: 368072 - DNA, 25 bp, Homo sapien
tatgacccgatggaaggtcgcagcc

SEQ ID NO: 368073 - DNA, 25 bp, Homo sapien
ggtgctggcctggacgccaggtcag

SEQ ID NO: 368074 - DNA, 25 bp, Homo sapien
gctctctgggttctctctagcaccc

SEQ ID NO: 368075 - DNA, 25 bp, Homo sapien
aggaaaactactgcctcgtcgaagg

SEQ ID NO: 368076 - DNA, 25 bp, Homo sapien
cctggacgccaggtcagagggctgg

SEQ ID NO: 368077 - DNA, 25 bp, Homo sapien
gggtcagggcgtacgtggacagctg

SEQ ID NO: 368078 - DNA, 25 bp, Homo sapien
tgtgtgcttgtacagggtcagggcg

SEQ ID NO: 368079 - DNA, 25 bp, Homo sapien
taccgtggctgtgtgcttgtacagg

SEQ ID NO: 368080 - DNA, 25 bp, Homo sapien
catctaccgtggctgtgtgcttgta

SEQ ID NO: 368081 - DNA, 25 bp, Homo sapien
catgagcgtgggaagacccacagga

SEQ ID NO: 368082 - DNA, 25 bp, Homo sapien
agcgtgggaagacccacaggaacaa

SEQ ID NO: 368083 - DNA, 25 bp, Homo sapien
gacactgatacatgagcgtgggaag

SEQ ID NO: 368084 - DNA, 25 bp, Homo sapien
cagtgggacactgatacatgagcgt

SEQ ID NO: 368085 - DNA, 25 bp, Homo sapien
catccatgagaaatctctccatgag

SEQ ID NO: 368086 - DNA, 25 bp, Homo sapien
gccatccatgagaaatctctccatg

SEQ ID NO: 368087 - DNA, 25 bp, Homo sapien
atccatgagaaatctctccatgagt

SEQ ID NO: 368088 - DNA, 25 bp, Homo sapien
aagccatccatgagaaatctctcca

SEQ ID NO: 368089 - DNA, 25 bp, Homo sapien
cattgaacttgggagctgggtatac

SEQ ID NO: 368090 - DNA, 25 bp, Homo sapien
gaaccacagtgttctcatgcactca

SEQ ID NO: 368091 - DNA, 25 bp, Homo sapien
tgggtataccaagatacattctccg

SEQ ID NO: 368092 - DNA, 25 bp, Homo sapien
cacttttactgtacaggcgtgctgt

SEQ ID NO: 368093 - DNA, 25 bp, Homo sapien
cccaatctgtcacggtggcatagtc

SEQ ID NO: 368094 - DNA, 25 bp, Homo sapien
tgacacacacaacggctcacgtgat

SEQ ID NO: 368095 - DNA, 25 bp, Homo sapien
acatacaatgtcctcagttgctcca

SEQ ID NO: 368096 - DNA, 25 bp, Homo sapien
aaattcctcagtccttatgacctgc

SEQ ID NO: 368097 - DNA, 25 bp, Homo sapien
cccttggtccaactcactcggtttg

SEQ ID NO: 368098 - DNA, 25 bp, Homo sapien
cactcggtttggttttgtcttctgc

SEQ ID NO: 368099 - DNA, 25 bp, Homo sapien
caggcagatgatcttcacgttgtca

SEQ ID NO: 368100 - DNA, 25 bp, Homo sapien
gatcttcacgttgtcatcagcatca

SEQ ID NO: 368101 - DNA, 25 bp, Homo sapien
agctgtagagaggggtccagcccaa

SEQ ID NO: 368102 - DNA, 25 bp, Homo sapien
cagcccaagggaggggagggtattg

SEQ ID NO: 368103 - DNA, 25 bp, Homo sapien
gtagagaggggtccagcccaaggga

SEQ ID NO: 368104 - DNA, 25 bp, Homo sapien
ctgtagagaggggtccagcccaagg

SEQ ID NO: 368105 - DNA, 25 bp, Homo sapien
ggctgttgtcagagataagtcccct

SEQ ID NO: 368106 - DNA, 25 bp, Homo sapien
aatagttaagtcctgcgcaccccaa

SEQ ID NO: 368107 - DNA, 25 bp, Homo sapien
gactgagatatggtatgcaattgac

SEQ ID NO: 368108 - DNA, 25 bp, Homo sapien
agtagcagagtatgacacacaggca

SEQ ID NO: 368109 - DNA, 25 bp, Homo sapien
cagaccttgcacagggttcagagga

SEQ ID NO: 368110 - DNA, 25 bp, Homo sapien
tacgacagaagtatgcacacgggtc

SEQ ID NO: 368111 - DNA, 25 bp, Homo sapien
tctactgtggtgagagctacgacag

SEQ ID NO: 368112 - DNA, 25 bp, Homo sapien
tcgccttgtttatccagggagacaa

SEQ ID NO: 368113 - DNA, 25 bp, Homo sapien
gaagacttgcttgtccgtgtccttg

SEQ ID NO: 368114 - DNA, 25 bp, Homo sapien
agacttgcttgtccgtgtccttgcc

SEQ ID NO: 368115 - DNA, 25 bp, Homo sapien
gacttgcttgtccgtgtccttgcca

SEQ ID NO: 368116 - DNA, 25 bp, Homo sapien
aagacttgcttgtccgtgtccttgc

SEQ ID NO: 368117 - DNA, 25 bp, Homo sapien
ttggccaccaaccatgtccaggcat

SEQ ID NO: 368118 - DNA, 25 bp, Homo sapien
atgtttttggccaccaaccatgtcc

SEQ ID NO: 368119 - DNA, 25 bp, Homo sapien
ccccacaacagcctcgcgaagccac

SEQ ID NO: 368120 - DNA, 25 bp, Homo sapien
ttttggccaccaaccatgtccaggc

SEQ ID NO: 368121 - DNA, 25 bp, Homo sapien
cacaccgctagggaggcctcggagg

SEQ ID NO: 368122 - DNA, 25 bp, Homo sapien
ctaagccagccaccggggcggattt

SEQ ID NO: 368123 - DNA, 25 bp, Homo sapien
cctctcgcccacaccgctagggagg

SEQ ID NO: 368124 - DNA, 25 bp, Homo sapien
tgtccccgcgtgctaagccagccac

SEQ ID NO: 368125 - DNA, 25 bp, Homo sapien
gcgtcctcgcagctgctacgcaacc

SEQ ID NO: 368126 - DNA, 25 bp, Homo sapien
agtctggactctgcgcgctctcgaa

SEQ ID NO: 368127 - DNA, 25 bp, Homo sapien
cgcagcgcactccacttccggctcg

SEQ ID NO: 368128 - DNA, 25 bp, Homo sapien
ggagagaccagggacgctgcgggtc

SEQ ID NO: 368129 - DNA, 25 bp, Homo sapien
ttgagcaattttctcgacttgtcga

SEQ ID NO: 368130 - DNA, 25 bp, Homo sapien
agcccagcaggtacgccgcccatgt

SEQ ID NO: 368131 - DNA, 25 bp, Homo sapien
attcgttattaactgagcaggaatc

SEQ ID NO: 368132 - DNA, 25 bp, Homo sapien
agaggaacccggtcctctccacaca

SEQ ID NO: 368133 - DNA, 25 bp, Homo sapien
gtccttaagactgacctgggagacg

SEQ ID NO: 368134 - DNA, 25 bp, Homo sapien
tccttaagactgacctgggagacgt

SEQ ID NO: 368135 - DNA, 25 bp, Homo sapien
tgagataaccatgacccaatgtgga

SEQ ID NO: 368136 - DNA, 25 bp, Homo sapien
gctggtcaaacacgatttctgggca

SEQ ID NO: 368137 - DNA, 25 bp, Homo sapien
tgtaatacctacatgtcgtgggagg

SEQ ID NO: 368138 - DNA, 25 bp, Homo sapien
tctgatggttaatcgtagacgtcta

SEQ ID NO: 368139 - DNA, 25 bp, Homo sapien
tggcctgcttcctcaggtagttcag

SEQ ID NO: 368140 - DNA, 25 bp, Homo sapien
gaaaggaaaaactctgctatttgac

SEQ ID NO: 368141 - DNA, 25 bp, Homo sapien
tgctgaatgacatcattggaaagga

SEQ ID NO: 368142 - DNA, 25 bp, Homo sapien
gggctgaaggattgtgatgaactct

SEQ ID NO: 368143 - DNA, 25 bp, Homo sapien
gctggagagggcgtgatggcccgtg

SEQ ID NO: 368144 - DNA, 25 bp, Homo sapien
cattgcccttctcggaactgctttt

SEQ ID NO: 368145 - DNA, 25 bp, Homo sapien
tgatggcccgtgtgcaggagtggaa

SEQ ID NO: 368146 - DNA, 25 bp, Homo sapien
attgtcattgcccttctcggaactg

SEQ ID NO: 368147 - DNA, 25 bp, Homo sapien
cctggagggaagtggtgtagtggtg

SEQ ID NO: 368148 - DNA, 25 bp, Homo sapien
cagcctggagggaagtggtgtagtg

SEQ ID NO: 368149 - DNA, 25 bp, Homo sapien
tcaccttgttacccagctggtctca

SEQ ID NO: 368150 - DNA, 25 bp, Homo sapien
ggagggaagtggtgtagtggtgtga

SEQ ID NO: 368151 - DNA, 25 bp, Homo sapien
cagtgcttttatttgttcccttttg

SEQ ID NO: 368152 - DNA, 25 bp, Homo sapien
ctttcagtgcttttatttgttccct

SEQ ID NO: 368153 - DNA, 25 bp, Homo sapien
cctgaatggcttttgatgtctctga

SEQ ID NO: 368154 - DNA, 25 bp, Homo sapien
tctggaaaggttgtttgtgtatctc

SEQ ID NO: 368155 - DNA, 25 bp, Homo sapien
gttgaatgcatatcttttgtctcag

SEQ ID NO: 368156 - DNA, 25 bp, Homo sapien
tgtttgtgtatctcagaataagtca

SEQ ID NO: 368157 - DNA, 25 bp, Homo sapien
agaacatggctagatctggtttccc

SEQ ID NO: 368158 - DNA, 25 bp, Homo sapien
aaagaacatggctagatctggtttc

SEQ ID NO: 368159 - DNA, 25 bp, Homo sapien
catggctagatctggtttccctata

SEQ ID NO: 368160 - DNA, 25 bp, Homo sapien
aacatggctagatctggtttcccta

SEQ ID NO: 368161 - DNA, 25 bp, Homo sapien
tgctctgtgttgtgggtaccatctg

SEQ ID NO: 368162 - DNA, 25 bp, Homo sapien
tgccggtaacggcacagcgtctggg

SEQ ID NO: 368163 - DNA, 25 bp, Homo sapien
caccctcaggctgtttgtgtgtcgc

SEQ ID NO: 368164 - DNA, 25 bp, Homo sapien
ctgggcaccctcaggctgtttgtgt

SEQ ID NO: 368165 - DNA, 25 bp, Homo sapien
ggcaccctcaggctgtttgtgtgtc

SEQ ID NO: 368166 - DNA, 25 bp, Homo sapien
gtccacaagcgccaaacacacgcaa

SEQ ID NO: 368167 - DNA, 25 bp, Homo sapien
tctggtccgggcaggcgaaggtctc

SEQ ID NO: 368168 - DNA, 25 bp, Homo sapien
cagcctctctggtccgggcaggcga

SEQ ID NO: 368169 - DNA, 25 bp, Homo sapien
tcccctctggagccattcccagctg

SEQ ID NO: 368170 - DNA, 25 bp, Homo sapien
cttcagggggatccataaagcctcc

SEQ ID NO: 368171 - DNA, 25 bp, Homo sapien
tgggcccgcatctggttgcgctcca

SEQ ID NO: 368172 - DNA, 25 bp, Homo sapien
ggctgctaggactttcctcgcaggg

SEQ ID NO: 368173 - DNA, 25 bp, Homo sapien
tgcttgccgcccgttggcctgttgg

SEQ ID NO: 368174 - DNA, 25 bp, Homo sapien
tcactggctctggcgagccctctta

SEQ ID NO: 368175 - DNA, 25 bp, Homo sapien
actggctctggcgagccctcttacc

SEQ ID NO: 368176 - DNA, 25 bp, Homo sapien
ctcactggctctggcgagccctctt

SEQ ID NO: 368177 - DNA, 25 bp, Homo sapien
tggctctggcgagccctcttacccc

SEQ ID NO: 368178 - DNA, 25 bp, Homo sapien
agaggcgactagaaatattcctttg

SEQ ID NO: 368179 - DNA, 25 bp, Homo sapien
ggaaaagaggcgactagaaatattc

SEQ ID NO: 368180 - DNA, 25 bp, Homo sapien
aaagaggcgactagaaatattcctt

SEQ ID NO: 368181 - DNA, 25 bp, Homo sapien
ttgaggaaaagaggcgactagaaat

SEQ ID NO: 368182 - DNA, 25 bp, Homo sapien
ccagagcaggccgatagagagatcg

SEQ ID NO: 368183 - DNA, 25 bp, Homo sapien
gccgatagagagatcggggagagct

SEQ ID NO: 368184 - DNA, 25 bp, Homo sapien
atagagagatcggggagagctgtcc

SEQ ID NO: 368185 - DNA, 25 bp, Homo sapien
cgatagagagatcggggagagctgt

SEQ ID NO: 368186 - DNA, 25 bp, Homo sapien
tctgggtaatgtcgtattcgccaca

SEQ ID NO: 368187 - DNA, 25 bp, Homo sapien
aggtacgatgaagaactggcccggg

SEQ ID NO: 368188 - DNA, 25 bp, Homo sapien
taatgtcgtattcgccacacagcag

SEQ ID NO: 368189 - DNA, 25 bp, Homo sapien
cttctctgggtaatgtcgtattcgc

SEQ ID NO: 368190 - DNA, 25 bp, Homo sapien
cctgcaacgtcttggggccttccca

SEQ ID NO: 368191 - DNA, 25 bp, Homo sapien
ccttttgagcgttcaggggactcgc

SEQ ID NO: 368192 - DNA, 25 bp, Homo sapien
ctctgaagagccctgagttccagtc

SEQ ID NO: 368193 - DNA, 25 bp, Homo sapien
gggactcgcatgggccttgcccctt

SEQ ID NO: 368194 - DNA, 25 bp, Homo sapien
cgttcaggggactcgcatgggcctt

SEQ ID NO: 368195 - DNA, 25 bp, Homo sapien
ggcagcccttgggaaaaagcgccca

SEQ ID NO: 368196 - DNA, 25 bp, Homo sapien
gcagcccttgggaaaaagcgcccaa

SEQ ID NO: 368197 - DNA, 25 bp, Homo sapien
tgtattcacacggttggcagagcgg

SEQ ID NO: 368198 - DNA, 25 bp, Homo sapien
cctaaactctggtctgagggctcca

SEQ ID NO: 368199 - DNA, 25 bp, Homo sapien
tgcggaacgggcaacatgatttctt

SEQ ID NO: 368200 - DNA, 25 bp, Homo sapien
ctgagtcaccaagtggacccctgga

SEQ ID NO: 368201 - DNA, 25 bp, Homo sapien
tgtctagcctctgtatctaagccaa

SEQ ID NO: 368202 - DNA, 25 bp, Homo sapien
cctgctctatcctcgggtgagtgga

SEQ ID NO: 368203 - DNA, 25 bp, Homo sapien
ctgagaagccctcttggatttctcc

SEQ ID NO: 368204 - DNA, 25 bp, Homo sapien
ttggatttctcctgtcccgtcttcc

SEQ ID NO: 368205 - DNA, 25 bp, Homo sapien
gcctgccacctcctccaccaacaaa

SEQ ID NO: 368206 - DNA, 25 bp, Homo sapien
cgccgaggcctgccacctcctccac

SEQ ID NO: 368207 - DNA, 25 bp, Homo sapien
aggcctgccacctcctccaccaaca

SEQ ID NO: 368208 - DNA, 25 bp, Homo sapien
ctgccacctcctccaccaacaaacg

SEQ ID NO: 368209 - DNA, 25 bp, Homo sapien
atattcttcggctatcagaataatc

SEQ ID NO: 368210 - DNA, 25 bp, Homo sapien
gggaatattcttcggctatcagaat

SEQ ID NO: 368211 - DNA, 25 bp, Homo sapien
actggggaatattcttcggctatca

SEQ ID NO: 368212 - DNA, 25 bp, Homo sapien
aatattcttcggctatcagaataat

SEQ ID NO: 368213 - DNA, 25 bp, Homo sapien
gatgaagaaactgccatacagatac

SEQ ID NO: 368214 - DNA, 25 bp, Homo sapien
ctgtccgtacacagcttcagggatg

SEQ ID NO: 368215 - DNA, 25 bp, Homo sapien
tacacagcttcagggatgaagaaac

SEQ ID NO: 368216 - DNA, 25 bp, Homo sapien
tccgtacacagcttcagggatgaag

SEQ ID NO: 368217 - DNA, 25 bp, Homo sapien
taactgcaacagtcaactacaatag

SEQ ID NO: 368218 - DNA, 25 bp, Homo sapien
gatttaagtaatcacgataccaccg

SEQ ID NO: 368219 - DNA, 25 bp, Homo sapien
ccaccgtacactacagatgatcagg

SEQ ID NO: 368220 - DNA, 25 bp, Homo sapien
gggccgactccattgcactcttaca

SEQ ID NO: 368221 - DNA, 25 bp, Homo sapien
agggtttgcgctcctgtgaaggtct

SEQ ID NO: 368222 - DNA, 25 bp, Homo sapien
ggtttgcgctcctgtgaaggtctaa

SEQ ID NO: 368223 - DNA, 25 bp, Homo sapien
gggtttgcgctcctgtgaaggtcta

SEQ ID NO: 368224 - DNA, 25 bp, Homo sapien
caagaacatcgtggctaatacagtg

SEQ ID NO: 368225 - DNA, 25 bp, Homo sapien
taagttcactcatggtagtaccagc

SEQ ID NO: 368226 - DNA, 25 bp, Homo sapien
tgagttcgtacccagaataagtgtc

SEQ ID NO: 368227 - DNA, 25 bp, Homo sapien
tttaagaagtcatcttcggctgggc

SEQ ID NO: 368228 - DNA, 25 bp, Homo sapien
ccatgagtactacagccgagaggcc

SEQ ID NO: 368229 - DNA, 25 bp, Homo sapien
cagcactttaatgggtgtccctggg

SEQ ID NO: 368230 - DNA, 25 bp, Homo sapien
ggtgctgcccgagttatcgggaccc

SEQ ID NO: 368231 - DNA, 25 bp, Homo sapien
tccacctcactgtggacacaagtct

SEQ ID NO: 368232 - DNA, 25 bp, Homo sapien
tttgctaaggagaacggaacaccca

SEQ ID NO: 368233 - DNA, 25 bp, Homo sapien
tctgatgtgcataagagcgtctggc

SEQ ID NO: 368234 - DNA, 25 bp, Homo sapien
gaggttcatgaaagtgtagggcccc

SEQ ID NO: 368235 - DNA, 25 bp, Homo sapien
caagtttatgtgcatggagcctcca

SEQ ID NO: 368236 - DNA, 25 bp, Homo sapien
tggccaataaggtgcattattaaca

SEQ ID NO: 368237 - DNA, 25 bp, Homo sapien
gaggtagtcttcctttgtcacgagg

SEQ ID NO: 368238 - DNA, 25 bp, Homo sapien
ggcatagcaccagtgccccatggag

SEQ ID NO: 368239 - DNA, 25 bp, Homo sapien
ttgagaacacaagtcttccactttt

SEQ ID NO: 368240 - DNA, 25 bp, Homo sapien
gcagttctcacccttggactgagag

SEQ ID NO: 368241 - DNA, 25 bp, Homo sapien
gctgagctgcagttctcacccttgg

SEQ ID NO: 368242 - DNA, 25 bp, Homo sapien
gctgcagttctcacccttggactga

SEQ ID NO: 368243 - DNA, 25 bp, Homo sapien
ttctcacccttggactgagagggaa

SEQ ID NO: 368244 - DNA, 25 bp, Homo sapien
gacaggcacggatggcgggtcccgt

SEQ ID NO: 368245 - DNA, 25 bp, Homo sapien
ttctgacaggcacggatggcgggtc

SEQ ID NO: 368246 - DNA, 25 bp, Homo sapien
ctgacaggcacggatggcgggtccc

SEQ ID NO: 368247 - DNA, 25 bp, Homo sapien
cagttctgacaggcacggatggcgg

SEQ ID NO: 368248 - DNA, 25 bp, Homo sapien
ctgtgtgccaagtgcaggtagcggc

SEQ ID NO: 368249 - DNA, 25 bp, Homo sapien
cctgtgtgccaagtgcaggtagcgg

SEQ ID NO: 368250 - DNA, 25 bp, Homo sapien
tgcctgtgtgccaagtgcaggtagc

SEQ ID NO: 368251 - DNA, 25 bp, Homo sapien
tgtgtgccaagtgcaggtagcggca

SEQ ID NO: 368252 - DNA, 25 bp, Homo sapien
tgcggctgagcagcaggttcagcgc

SEQ ID NO: 368253 - DNA, 25 bp, Homo sapien
atgcggctgagcagcaggttcagcg

SEQ ID NO: 368254 - DNA, 25 bp, Homo sapien
ggctgagcagcaggttcagcgccgc

SEQ ID NO: 368255 - DNA, 25 bp, Homo sapien
tgtgcagtcgccaggatgcggctga

SEQ ID NO: 368256 - DNA, 25 bp, Homo sapien
agggtagccgtgtggcacacgccct

SEQ ID NO: 368257 - DNA, 25 bp, Homo sapien
gacaggttctggggttgccaccgct

SEQ ID NO: 368258 - DNA, 25 bp, Homo sapien
ctggtggcgcggacaggttctgggg

SEQ ID NO: 368259 - DNA, 25 bp, Homo sapien
tggcgcggacaggttctggggttgc

SEQ ID NO: 368260 - DNA, 25 bp, Homo sapien
gcggacaggttctggggttgccacc

SEQ ID NO: 368261 - DNA, 25 bp, Homo sapien
tttgcagcaggttcccacgatcctg

SEQ ID NO: 368262 - DNA, 25 bp, Homo sapien
acagctgcggcgacgaggctttgca

SEQ ID NO: 368263 - DNA, 25 bp, Homo sapien
cgcaggcttgcgaccactgggccct

SEQ ID NO: 368264 - DNA, 25 bp, Homo sapien
gagcatcgccgagtacatcgccctt

SEQ ID NO: 368265 - DNA, 25 bp, Homo sapien
agcccatggtagaggctacagggct

SEQ ID NO: 368266 - DNA, 25 bp, Homo sapien
agctgagcccatggtagaggctaca

SEQ ID NO: 368267 - DNA, 25 bp, Homo sapien
gagcccatggtagaggctacagggc

SEQ ID NO: 368268 - DNA, 25 bp, Homo sapien
tgcagctgagcccatggtagaggct

SEQ ID NO: 368269 - DNA, 25 bp, Homo sapien
ctgctagagagagcccgtgcctccc

SEQ ID NO: 368270 - DNA, 25 bp, Homo sapien
agagcccgtgcctcccgctgctcgc

SEQ ID NO: 368271 - DNA, 25 bp, Homo sapien
gagagagcccgtgcctcccgctgct

SEQ ID NO: 368272 - DNA, 25 bp, Homo sapien
ccgtgcctcccgctgctcgcccttc

SEQ ID NO: 368273 - DNA, 25 bp, Homo sapien
actgaaggggcttgggcgctctggg

SEQ ID NO: 368274 - DNA, 25 bp, Homo sapien
gcccgtctggcccttgacagcggcg

SEQ ID NO: 368275 - DNA, 25 bp, Homo sapien
tgacagcggcggcacagagcctctc

SEQ ID NO: 368276 - DNA, 25 bp, Homo sapien
taagagtcgttgttggtgtagacca

SEQ ID NO: 368277 - DNA, 25 bp, Homo sapien
caggtccattgtcgtcttcttcatc

SEQ ID NO: 368278 - DNA, 25 bp, Homo sapien
tcaggtccattgtcgtcttcttcat

SEQ ID NO: 368279 - DNA, 25 bp, Homo sapien
aggtccattgtcgtcttcttcatca

SEQ ID NO: 368280 - DNA, 25 bp, Homo sapien
ttcaggtccattgtcgtcttcttca

SEQ ID NO: 368281 - DNA, 25 bp, Homo sapien
cccagcccccactctgaaggggcga

SEQ ID NO: 368282 - DNA, 25 bp, Homo sapien
agcccccactctgaaggggcgatcc

SEQ ID NO: 368283 - DNA, 25 bp, Homo sapien
cacctgctcccctcgtccccaggac

SEQ ID NO: 368284 - DNA, 25 bp, Homo sapien
ccccggctcaggcagggcctggtac

SEQ ID NO: 368285 - DNA, 25 bp, Homo sapien
aaggacgtcaagctggcactttcta

SEQ ID NO: 368286 - DNA, 25 bp, Homo sapien
cgtcaagctggcactttctatctac

SEQ ID NO: 368287 - DNA, 25 bp, Homo sapien
gttgtcctgttttcgccatcaagga

SEQ ID NO: 368288 - DNA, 25 bp, Homo sapien
atcagagttgtcctgttttcgccat

SEQ ID NO: 368289 - DNA, 25 bp, Homo sapien
atatttggatcagcaccagaatcta

SEQ ID NO: 368290 - DNA, 25 bp, Homo sapien
tgttaacagcataatggacagctgt

SEQ ID NO: 368291 - DNA, 25 bp, Homo sapien
taacagcataatggacagctgtgtt

SEQ ID NO: 368292 - DNA, 25 bp, Homo sapien
ggatcagcaccagaatctatgagaa

SEQ ID NO: 368293 - DNA, 25 bp, Homo sapien
ttttgccaccactgacaaattctca

SEQ ID NO: 368294 - DNA, 25 bp, Homo sapien
acaggacagcaattttgccaccact

SEQ ID NO: 368295 - DNA, 25 bp, Homo sapien
gcaattttgccaccactgacaaatt

SEQ ID NO: 368296 - DNA, 25 bp, Homo sapien
cagcaattttgccaccactgacaaa

SEQ ID NO: 368297 - DNA, 25 bp, Homo sapien
cttgttcttcactttaatgtctgta

SEQ ID NO: 368298 - DNA, 25 bp, Homo sapien
ttgttcttcactttaatgtctgtac

SEQ ID NO: 368299 - DNA, 25 bp, Homo sapien
caaatattttgaaaataacattggt

SEQ ID NO: 368300 - DNA, 25 bp, Homo sapien
attttgaaaataacattggttaatg

SEQ ID NO: 368301 - DNA, 25 bp, Homo sapien
gaaaataacattggttaatgtctac

SEQ ID NO: 368302 - DNA, 25 bp, Homo sapien
tttgaaaataacattggttaatgtc

SEQ ID NO: 368303 - DNA, 25 bp, Homo sapien
cagtcatacgggctcaagagacaca

SEQ ID NO: 368304 - DNA, 25 bp, Homo sapien
tatggccaataaaagtggtgtgtgg

SEQ ID NO: 368305 - DNA, 25 bp, Homo sapien
cttttccttatggccaataaaagtg

SEQ ID NO: 368306 - DNA, 25 bp, Homo sapien
ggccaataaaagtggtgtgtggcca

SEQ ID NO: 368307 - DNA, 25 bp, Homo sapien
ttccttatggccaataaaagtggtg

SEQ ID NO: 368308 - DNA, 25 bp, Homo sapien
cttatcaactccatttgcatttgca

SEQ ID NO: 368309 - DNA, 25 bp, Homo sapien
ttaaacttatcaactccatttgcat

SEQ ID NO: 368310 - DNA, 25 bp, Homo sapien
aaacttatcaactccatttgcattt

SEQ ID NO: 368311 - DNA, 25 bp, Homo sapien
atttaaacttatcaactccatttgc

SEQ ID NO: 368312 - DNA, 25 bp, Homo sapien
gaagagaatggccatttcccacccc

SEQ ID NO: 368313 - DNA, 25 bp, Homo sapien
caatccttctgacttgtacaaaagg

SEQ ID NO: 368314 - DNA, 25 bp, Homo sapien
taaagaatcctggagccattaatct

SEQ ID NO: 368315 - DNA, 25 bp, Homo sapien
caagtagacaacattagcgtcccta

SEQ ID NO: 368316 - DNA, 25 bp, Homo sapien
gatggatgaggcttagctctgttaa

SEQ ID NO: 368317 - DNA, 25 bp, Homo sapien
gacaaccacaagttggaacccacta

SEQ ID NO: 368318 - DNA, 25 bp, Homo sapien
gaagtctattgaatggcttcatggt

SEQ ID NO: 368319 - DNA, 25 bp, Homo sapien
taaccaacttacttgagatttagtg

SEQ ID NO: 368320 - DNA, 25 bp, Homo sapien
atgctgatcttctcaacgttgtctt

SEQ ID NO: 368321 - DNA, 25 bp, Homo sapien
ctgatcttctcaacgttgtcttaat

SEQ ID NO: 368322 - DNA, 25 bp, Homo sapien
gctgatcttctcaacgttgtcttaa

SEQ ID NO: 368323 - DNA, 25 bp, Homo sapien
gatcttctcaacgttgtcttaattt

SEQ ID NO: 368324 - DNA, 25 bp, Homo sapien
aatattgcacacaagatcctatgtg

SEQ ID NO: 368325 - DNA, 25 bp, Homo sapien
tctggcttggactactactactctt

SEQ ID NO: 368326 - DNA, 25 bp, Homo sapien
tccacaaagaagatgcaagttggta

SEQ ID NO: 368327 - DNA, 25 bp, Homo sapien
gagatccctactaacaaaatattgc

SEQ ID NO: 368328 - DNA, 25 bp, Homo sapien
ttgtttatattccaaaagttgttga

SEQ ID NO: 368329 - DNA, 25 bp, Homo sapien
tgagaatttttagatatcttttgtt

SEQ ID NO: 368330 - DNA, 25 bp, Homo sapien
ttgagaatttttagatatcttttgt

SEQ ID NO: 368331 - DNA, 25 bp, Homo sapien
tttatattccaaaagttgttgatga

SEQ ID NO: 368332 - DNA, 25 bp, Homo sapien
aatgtctgacacatactgaatatgg

SEQ ID NO: 368333 - DNA, 25 bp, Homo sapien
tattacatatgcatgccacccaggc

SEQ ID NO: 368334 - DNA, 25 bp, Homo sapien
tcttcacgttggatataaaatgtct

SEQ ID NO: 368335 - DNA, 25 bp, Homo sapien
gtgatagttataagctcccaaaggg

SEQ ID NO: 368336 - DNA, 25 bp, Homo sapien
ttctgctaaatatcatccttctgac

SEQ ID NO: 368337 - DNA, 25 bp, Homo sapien
tgccaaacacacagtctggttaaat

SEQ ID NO: 368338 - DNA, 25 bp, Homo sapien
tccttctgctaaatatcatccttct

SEQ ID NO: 368339 - DNA, 25 bp, Homo sapien
cacagtctggttaaattttccttct

SEQ ID NO: 368340 - DNA, 25 bp, Homo sapien
caagggtgcagcctcgtcaggtgtt

SEQ ID NO: 368341 - DNA, 25 bp, Homo sapien
ttcgtcaggtgttctttccaccaag

SEQ ID NO: 368342 - DNA, 25 bp, Homo sapien
tgcagcctcgtcaggtgttccttca

SEQ ID NO: 368343 - DNA, 25 bp, Homo sapien
cgtgtcaggtgttctttccgccaag

SEQ ID NO: 368344 - DNA, 25 bp, Homo sapien
caaggaggcataacgaacgaggaag

SEQ ID NO: 368345 - DNA, 25 bp, Homo sapien
ggcaaggaggcataacgaacgagga

SEQ ID NO: 368346 - DNA, 25 bp, Homo sapien
aggaggcataacgaacgaggaagtt

SEQ ID NO: 368347 - DNA, 25 bp, Homo sapien
gaggcataacgaacgaggaagttaa

SEQ ID NO: 368348 - DNA, 25 bp, Homo sapien
cagttacagagcaggtgtctaagga

SEQ ID NO: 368349 - DNA, 25 bp, Homo sapien
acttctatggaagagtggtcttgca

SEQ ID NO: 368350 - DNA, 25 bp, Homo sapien
tctaaggatgactaaggacagagca

SEQ ID NO: 368351 - DNA, 25 bp, Homo sapien
atagggttggactgcacactctaag

SEQ ID NO: 368352 - DNA, 25 bp, Homo sapien
ggaaaaatgttggtatgtgtactca

SEQ ID NO: 368353 - DNA, 25 bp, Homo sapien
cccgagggatgtatagctacactga

SEQ ID NO: 368354 - DNA, 25 bp, Homo sapien
ggtgggatctaccagactctcttgg

SEQ ID NO: 368355 - DNA, 25 bp, Homo sapien
tgtggcatgtgctgaaactctagtg

SEQ ID NO: 368356 - DNA, 25 bp, Homo sapien
tattgattgcctgccacgtggaagg

SEQ ID NO: 368357 - DNA, 25 bp, Homo sapien
gatataagagcgtccaataagtgct

SEQ ID NO: 368358 - DNA, 25 bp, Homo sapien
aaaatgcacaaatagcttttacaac

SEQ ID NO: 368359 - DNA, 25 bp, Homo sapien
gcacaaatagcttttacaactcaac

SEQ ID NO: 368360 - DNA, 25 bp, Homo sapien
aagagcgtccaataagtgcttgaag

SEQ ID NO: 368361 - DNA, 25 bp, Homo sapien
ctagtaagcttcatagttgacatca

SEQ ID NO: 368362 - DNA, 25 bp, Homo sapien
aagcttcatagttgacatcattata

SEQ ID NO: 368363 - DNA, 25 bp, Homo sapien
agcttcatagttgacatcattatat

SEQ ID NO: 368364 - DNA, 25 bp, Homo sapien
ttcagtcttttcaaagccactttgt

SEQ ID NO: 368365 - DNA, 25 bp, Homo sapien
tttcagtcttttcaaagccactttg

SEQ ID NO: 368366 - DNA, 25 bp, Homo sapien
ttcattgtgccgatatgcttgtgtg

SEQ ID NO: 368367 - DNA, 25 bp, Homo sapien
tttcattgtgccgatatgcttgtgt

SEQ ID NO: 368368 - DNA, 25 bp, Homo sapien
gctggctttcattgtgccgatatgc

SEQ ID NO: 368369 - DNA, 25 bp, Homo sapien
gcattgctggctttcattgtgccga

SEQ ID NO: 368370 - DNA, 25 bp, Homo sapien
cacatatattctctgtagaagggca

SEQ ID NO: 368371 - DNA, 25 bp, Homo sapien
catatattctctgtagaagggcact

SEQ ID NO: 368372 - DNA, 25 bp, Homo sapien
tcacacatatattctctgtagaagg

SEQ ID NO: 368373 - DNA, 25 bp, Homo sapien
tatattctctgtagaagggcactgg

SEQ ID NO: 368374 - DNA, 25 bp, Homo sapien
tagcagaagcaatccgtaaagtttt

SEQ ID NO: 368375 - DNA, 25 bp, Homo sapien
tgttgtaaaatgcagcgttggtgtc

SEQ ID NO: 368376 - DNA, 25 bp, Homo sapien
aaactttagtaagttagcagaagca

SEQ ID NO: 368377 - DNA, 25 bp, Homo sapien
ttgtttgttgtaaaatgcagcgttg

SEQ ID NO: 368378 - DNA, 25 bp, Homo sapien
gacctaaagtaatggatttgcccat

SEQ ID NO: 368379 - DNA, 25 bp, Homo sapien
aaatggacctaaagtaatggatttg

SEQ ID NO: 368380 - DNA, 25 bp, Homo sapien
aatggacctaaagtaatggatttgc

SEQ ID NO: 368381 - DNA, 25 bp, Homo sapien
tggacctaaagtaatggatttgccc

SEQ ID NO: 368382 - DNA, 25 bp, Homo sapien
aactggtaagccttgtccagatgac

SEQ ID NO: 368383 - DNA, 25 bp, Homo sapien
ctaggaactggtaagccttgtccag

SEQ ID NO: 368384 - DNA, 25 bp, Homo sapien
tgtccagatgacaagacactctttg

SEQ ID NO: 368385 - DNA, 25 bp, Homo sapien
cttgtccagatgacaagacactctt

SEQ ID NO: 368386 - DNA, 25 bp, Homo sapien
tgaagaagagtccaatcaagccact

SEQ ID NO: 368387 - DNA, 25 bp, Homo sapien
ccttgactcagcgaccatgaagaag

SEQ ID NO: 368388 - DNA, 25 bp, Homo sapien
cccttaaattcactagaagagaagg

SEQ ID NO: 368389 - DNA, 25 bp, Homo sapien
gaagagtccaatcaagccacttgaa

SEQ ID NO: 368390 - DNA, 25 bp, Homo sapien
tgtgtttgccctggttgacattatc

SEQ ID NO: 368391 - DNA, 25 bp, Homo sapien
tttgtgtttgccctggttgacatta

SEQ ID NO: 368392 - DNA, 25 bp, Homo sapien
gtttgccctggttgacattatcctt

SEQ ID NO: 368393 - DNA, 25 bp, Homo sapien
gccctggttgacattatccttttct

SEQ ID NO: 368394 - DNA, 25 bp, Homo sapien
tactagggtgctgtacccgcaggtg

SEQ ID NO: 368395 - DNA, 25 bp, Homo sapien
tagggtgctgtacccgcaggtgcct

SEQ ID NO: 368396 - DNA, 25 bp, Homo sapien
ctagggtgctgtacccgcaggtgcc

SEQ ID NO: 368397 - DNA, 25 bp, Homo sapien
ggtgctgtacccgcaggtgcctcat

SEQ ID NO: 368398 - DNA, 25 bp, Homo sapien
tcttggactccaaatcctctgcggc

SEQ ID NO: 368399 - DNA, 25 bp, Homo sapien
ctcttggactccaaatcctctgcgg

SEQ ID NO: 368400 - DNA, 25 bp, Homo sapien
tcctcattcattgcaagatagaatt

SEQ ID NO: 368401 - DNA, 25 bp, Homo sapien
ctttgcatagagttttccttcctca

SEQ ID NO: 368402 - DNA, 25 bp, Homo sapien
cctttgattgccacaatcccaactg

SEQ ID NO: 368403 - DNA, 25 bp, Homo sapien
tagaattcactttccacccctttga

SEQ ID NO: 368404 - DNA, 25 bp, Homo sapien
gccataggaacaaagtgggctgttt

SEQ ID NO: 368405 - DNA, 25 bp, Homo sapien
taagttattgccataggaacaaagt

SEQ ID NO: 368406 - DNA, 25 bp, Homo sapien
ttgtgtgtccatttagctgaggcat

SEQ ID NO: 368407 - DNA, 25 bp, Homo sapien
tccagaattagtcctttgaagttac

SEQ ID NO: 368408 - DNA, 25 bp, Homo sapien
ggtcccctcgtacatctttatgttc

SEQ ID NO: 368409 - DNA, 25 bp, Homo sapien
cagctaggtcccctcgtacatcttt

SEQ ID NO: 368410 - DNA, 25 bp, Homo sapien
gctaggtcccctcgtacatctttat

SEQ ID NO: 368411 - DNA, 25 bp, Homo sapien
ccctcgtacatctttatgttctttg

SEQ ID NO: 368412 - DNA, 25 bp, Homo sapien
atggggacaaagaatgcaccagagg

SEQ ID NO: 368413 - DNA, 25 bp, Homo sapien
gacaaagaatgcaccagaggggaca

SEQ ID NO: 368414 - DNA, 25 bp, Homo sapien
gggacaaagaatgcaccagagggga

SEQ ID NO: 368415 - DNA, 25 bp, Homo sapien
tgatggggacaaagaatgcaccaga

SEQ ID NO: 368416 - DNA, 25 bp, Homo sapien
catagaaaggtcaaggagtgcagcc

SEQ ID NO: 368417 - DNA, 25 bp, Homo sapien
tgtgcagcatagaaaggtcaaggag

SEQ ID NO: 368418 - DNA, 25 bp, Homo sapien
cagcatagaaaggtcaaggagtgca

SEQ ID NO: 368419 - DNA, 25 bp, Homo sapien
actgtgtgcagcatagaaaggtcaa

SEQ ID NO: 368420 - DNA, 25 bp, Homo sapien
caagtggtaggagccttggagggtg

SEQ ID NO: 368421 - DNA, 25 bp, Homo sapien
ctgtggaggccaagtggtaggagcc

SEQ ID NO: 368422 - DNA, 25 bp, Homo sapien
cagcgctggttcctttggcgtcggt

SEQ ID NO: 368423 - DNA, 25 bp, Homo sapien
gtgacagcagcgctggttcctttgg

SEQ ID NO: 368424 - DNA, 25 bp, Homo sapien
agccctcgcacccaccatggttacc

SEQ ID NO: 368425 - DNA, 25 bp, Homo sapien
ccacagagccctcgcacccaccatg

SEQ ID NO: 368426 - DNA, 25 bp, Homo sapien
ctgtgttgtggagtccatctgggag

SEQ ID NO: 368427 - DNA, 25 bp, Homo sapien
agagccctcgcacccaccatggtta

SEQ ID NO: 368428 - DNA, 25 bp, Homo sapien
tctttaccctttcatctatcccaaa

SEQ ID NO: 368429 - DNA, 25 bp, Homo sapien
cctctttaccctttcatctatccca

SEQ ID NO: 368430 - DNA, 25 bp, Homo sapien
gatgggctcaaacaaagggccaaat

SEQ ID NO: 368431 - DNA, 25 bp, Homo sapien
cagacgatgggctcaaacaaagggc

SEQ ID NO: 368432 - DNA, 25 bp, Homo sapien
gacgatgggctcaaacaaagggcca

SEQ ID NO: 368433 - DNA, 25 bp, Homo sapien
ccagacgatgggctcaaacaaaggg

SEQ ID NO: 368434 - DNA, 25 bp, Homo sapien
cacgctctacccttggggtgatgca

SEQ ID NO: 368435 - DNA, 25 bp, Homo sapien
cacacacgctctacccttggggtga

SEQ ID NO: 368436 - DNA, 25 bp, Homo sapien
cgctctacccttggggtgatgcact

SEQ ID NO: 368437 - DNA, 25 bp, Homo sapien
acacacgctctacccttggggtgat

SEQ ID NO: 368438 - DNA, 25 bp, Homo sapien
cagaatacgcttaatagatgactgc

SEQ ID NO: 368439 - DNA, 25 bp, Homo sapien
tacgcttaatagatgactgcttcat

SEQ ID NO: 368440 - DNA, 25 bp, Homo sapien
gaatacgcttaatagatgactgctt

SEQ ID NO: 368441 - DNA, 25 bp, Homo sapien
tttcagaatacgcttaatagatgac

SEQ ID NO: 368442 - DNA, 25 bp, Homo sapien
gaatgagctggttattgggatgtcc

SEQ ID NO: 368443 - DNA, 25 bp, Homo sapien
tcaggaatgagctggttattgggat

SEQ ID NO: 368444 - DNA, 25 bp, Homo sapien
tctgagctcttggtgcagctgcatc

SEQ ID NO: 368445 - DNA, 25 bp, Homo sapien
tgttcgagtcaccttgtccaccttt

SEQ ID NO: 368446 - DNA, 25 bp, Homo sapien
gatggcagtaatttccccagctgct

SEQ ID NO: 368447 - DNA, 25 bp, Homo sapien
cagctgctgcgagtgttcgagtcac

SEQ ID NO: 368448 - DNA, 25 bp, Homo sapien
ttcctcatgtcagctcttgagtcca

SEQ ID NO: 368449 - DNA, 25 bp, Homo sapien
tcctcatgtcagctcttgagtccat

SEQ ID NO: 368450 - DNA, 25 bp, Homo sapien
attcctcatgtcagctcttgagtcc

SEQ ID NO: 368451 - DNA, 25 bp, Homo sapien
caccacagtgaggaacatcactaca

SEQ ID NO: 368452 - DNA, 25 bp, Homo sapien
gaaggccgaattacagctgatgagg

SEQ ID NO: 368453 - DNA, 25 bp, Homo sapien
caggtgttacagatacataggtcca

SEQ ID NO: 368454 - DNA, 25 bp, Homo sapien
catcactacatgaatgaaggccgaa

SEQ ID NO: 368455 - DNA, 25 bp, Homo sapien
gtgaacagtatttgctgcccttggg

SEQ ID NO: 368456 - DNA, 25 bp, Homo sapien
ggtagactggtctgggtcacattag

SEQ ID NO: 368457 - DNA, 25 bp, Homo sapien
tttgctgcccttgggtagactggtc

SEQ ID NO: 368458 - DNA, 25 bp, Homo sapien
gactggtctgggtcacattagcatt

SEQ ID NO: 368459 - DNA, 25 bp, Homo sapien
tgggttacacgtccacagcagggtt

SEQ ID NO: 368460 - DNA, 25 bp, Homo sapien
tcatgcctggacacaaggatcacca

SEQ ID NO: 368461 - DNA, 25 bp, Homo sapien
cgggatggtctgagcagcccttttc

SEQ ID NO: 368462 - DNA, 25 bp, Homo sapien
acccagcacatgaccagacagtagc

SEQ ID NO: 368463 - DNA, 25 bp, Homo sapien
gtgcctttgccgaaaccagctcctg

SEQ ID NO: 368464 - DNA, 25 bp, Homo sapien
caggtcctagttgtgcctttgccga

SEQ ID NO: 368465 - DNA, 25 bp, Homo sapien
tcctggccagctggacctagccaga

SEQ ID NO: 368466 - DNA, 25 bp, Homo sapien
agcatgacaaggtgaacctctaaca

SEQ ID NO: 368467 - DNA, 25 bp, Homo sapien
gctggagtctcctggaacgatggca

SEQ ID NO: 368468 - DNA, 25 bp, Homo sapien
agtctcctggaacgatggcactgtt

SEQ ID NO: 368469 - DNA, 25 bp, Homo sapien
ttccgcctactcaacaggttattga

SEQ ID NO: 368470 - DNA, 25 bp, Homo sapien
gatccagctggagtctcctggaacg

SEQ ID NO: 368471 - DNA, 25 bp, Homo sapien
cattcttccctgtagtggtctcctt

SEQ ID NO: 368472 - DNA, 25 bp, Homo sapien
tcttccctgtagtggtctcctttgc

SEQ ID NO: 368473 - DNA, 25 bp, Homo sapien
cctgtagtggtctcctttgcctgaa

SEQ ID NO: 368474 - DNA, 25 bp, Homo sapien
tggaccattcttccctgtagtggtc

SEQ ID NO: 368475 - DNA, 25 bp, Homo sapien
gactacactgcatatgatgagttca

SEQ ID NO: 368476 - DNA, 25 bp, Homo sapien
tggcatccagtatgagtctccaagt

SEQ ID NO: 368477 - DNA, 25 bp, Homo sapien
gcaacaaattcacaataccacatgt

SEQ ID NO: 368478 - DNA, 25 bp, Homo sapien
agttcaaccactacatggcatccag

SEQ ID NO: 368479 - DNA, 25 bp, Homo sapien
ggtgttggatctctggccttggaaa

SEQ ID NO: 368480 - DNA, 25 bp, Homo sapien
tcagcaataagtggcagagacgtgg

SEQ ID NO: 368481 - DNA, 25 bp, Homo sapien
gctactggagaaggagccctccctt

SEQ ID NO: 368482 - DNA, 25 bp, Homo sapien
gaaaagataaccatgaggacaaggt

SEQ ID NO: 368483 - DNA, 25 bp, Homo sapien
tcaatctgtatctctgggcagaagt

SEQ ID NO: 368484 - DNA, 25 bp, Homo sapien
tgagatccttctctaagcatgaggg

SEQ ID NO: 368485 - DNA, 25 bp, Homo sapien
gcaaagctgtaacagaggtggtaac

SEQ ID NO: 368486 - DNA, 25 bp, Homo sapien
tccttgtctgctatgtcaatctgta

SEQ ID NO: 368487 - DNA, 25 bp, Homo sapien
gaggaaagcagaactgaactggtag

SEQ ID NO: 368488 - DNA, 25 bp, Homo sapien
aagcagaactgaactggtagcagac

SEQ ID NO: 368489 - DNA, 25 bp, Homo sapien
gaaagcagaactgaactggtagcag

SEQ ID NO: 368490 - DNA, 25 bp, Homo sapien
ggaaagcagaactgaactggtagca

SEQ ID NO: 368491 - DNA, 25 bp, Homo sapien
tccggtgccactgagctcttgggct

SEQ ID NO: 368492 - DNA, 25 bp, Homo sapien
catcaagggatgtctcacacttcac

SEQ ID NO: 368493 - DNA, 25 bp, Homo sapien
tatagcgtgtgcatggttgcaatcc

SEQ ID NO: 368494 - DNA, 25 bp, Homo sapien
tttcaccatcaagggatgtctcaca

SEQ ID NO: 368495 - DNA, 25 bp, Homo sapien
ggtttcttctcctgatggcctgcag

SEQ ID NO: 368496 - DNA, 25 bp, Homo sapien
tctcctgatggcctgcagattcaag

SEQ ID NO: 368497 - DNA, 25 bp, Homo sapien
tcctgatggcctgcagattcaagaa

SEQ ID NO: 368498 - DNA, 25 bp, Homo sapien
tttttaatgaactttcatagatctg

SEQ ID NO: 368499 - DNA, 25 bp, Homo sapien
ctgtcactgtctatgttttccaaat

SEQ ID NO: 368500 - DNA, 25 bp, Homo sapien
tgtcactgtctatgttttccaaatg

SEQ ID NO: 368501 - DNA, 25 bp, Homo sapien
gtcactgtctatgttttccaaatgg

SEQ ID NO: 368502 - DNA, 25 bp, Homo sapien
tagcgatctccggaatggcacacaa

SEQ ID NO: 368503 - DNA, 25 bp, Homo sapien
ctgttagcgatctccggaatggcac

SEQ ID NO: 368504 - DNA, 25 bp, Homo sapien
cgatctccggaatggcacacaattg

SEQ ID NO: 368505 - DNA, 25 bp, Homo sapien
tgttagcgatctccggaatggcaca

SEQ ID NO: 368506 - DNA, 25 bp, Homo sapien
tttcttgacaaaggaaatgtgagca

SEQ ID NO: 368507 - DNA, 25 bp, Homo sapien
tcttgacaaaggaaatgtgagcatc

SEQ ID NO: 368508 - DNA, 25 bp, Homo sapien
acaaaggaaatgtgagcatctgtgt

SEQ ID NO: 368509 - DNA, 25 bp, Homo sapien
ccataaatggtttcttgacaaagga

SEQ ID NO: 368510 - DNA, 25 bp, Homo sapien
cccagacatggatagggtcttggac

SEQ ID NO: 368511 - DNA, 25 bp, Homo sapien
atcccagacatggatagggtcttgg

SEQ ID NO: 368512 - DNA, 25 bp, Homo sapien
cagacatggatagggtcttggactc

SEQ ID NO: 368513 - DNA, 25 bp, Homo sapien
gacatggatagggtcttggactcca

SEQ ID NO: 368514 - DNA, 25 bp, Homo sapien
tcctgggtccttacaggccgtggaa

SEQ ID NO: 368515 - DNA, 25 bp, Homo sapien
gggaagactcccattaggctctgca

SEQ ID NO: 368516 - DNA, 25 bp, Homo sapien
acattcagctggcatttgttcaccc

SEQ ID NO: 368517 - DNA, 25 bp, Homo sapien
ttctactatgagatctgggaagact

SEQ ID NO: 368518 - DNA, 25 bp, Homo sapien
gtccccaaggcagtaaatcaaatgc

SEQ ID NO: 368519 - DNA, 25 bp, Homo sapien
tgtccccaaggcagtaaatcaaatg

SEQ ID NO: 368520 - DNA, 25 bp, Homo sapien
atgtccccaaggcagtaaatcaaat

SEQ ID NO: 368521 - DNA, 25 bp, Homo sapien
taattgaaaggaaccagtgtgctag

SEQ ID NO: 368522 - DNA, 25 bp, Homo sapien
gattaattgaaaggaaccagtgtgc

SEQ ID NO: 368523 - DNA, 25 bp, Homo sapien
ggaaccagtgtgctagatttcatga

SEQ ID NO: 368524 - DNA, 25 bp, Homo sapien
ttcagggattaattgaaaggaacca

SEQ ID NO: 368525 - DNA, 25 bp, Homo sapien
taatctgtgataatacaagagttct

SEQ ID NO: 368526 - DNA, 25 bp, Homo sapien
gttacctcaggtcaactgtggtcca

SEQ ID NO: 368527 - DNA, 25 bp, Homo sapien
agttacctcaggtcaactgtggtcc

SEQ ID NO: 368528 - DNA, 25 bp, Homo sapien
tacaagagttctcccttatccatgg

SEQ ID NO: 368529 - DNA, 25 bp, Homo sapien
cttgttgttcagcacaacatgtata

SEQ ID NO: 368530 - DNA, 25 bp, Homo sapien
gttcagcacaacatgtataaagatg

SEQ ID NO: 368531 - DNA, 25 bp, Homo sapien
atgacaataacagcccggagaaagg

SEQ ID NO: 368532 - DNA, 25 bp, Homo sapien
gtatgacaataacagcccggagaaa

SEQ ID NO: 368533 - DNA, 25 bp, Homo sapien
cgtactcacgagctgataattgtat

SEQ ID NO: 368534 - DNA, 25 bp, Homo sapien
tgtccgtactcacgagctgataatt

SEQ ID NO: 368535 - DNA, 25 bp, Homo sapien
aattatgtccgtactcacgagctga

SEQ ID NO: 368536 - DNA, 25 bp, Homo sapien
taggagtctatcttgaataatttct

SEQ ID NO: 368537 - DNA, 25 bp, Homo sapien
agcaaccaaaatagtgttaataact

SEQ ID NO: 368538 - DNA, 25 bp, Homo sapien
gaagcaaccaaaatagtgttaataa

SEQ ID NO: 368539 - DNA, 25 bp, Homo sapien
gagaagcaaccaaaatagtgttaat

SEQ ID NO: 368540 - DNA, 25 bp, Homo sapien
gcaaccaaaatagtgttaataacta

SEQ ID NO: 368541 - DNA, 25 bp, Homo sapien
tacaagaagggacctaattctgagt

SEQ ID NO: 368542 - DNA, 25 bp, Homo sapien
actgtacaagaagggacctaattct

SEQ ID NO: 368543 - DNA, 25 bp, Homo sapien
caagaagggacctaattctgagtgg

SEQ ID NO: 368544 - DNA, 25 bp, Homo sapien
aagggacctaattctgagtggtcta

SEQ ID NO: 368545 - DNA, 25 bp, Homo sapien
aacttgttccacatgccagtatctg

SEQ ID NO: 368546 - DNA, 25 bp, Homo sapien
tcacatttgcagtacccttgactcc

SEQ ID NO: 368547 - DNA, 25 bp, Homo sapien
taggtgactcactttagagcccttg

SEQ ID NO: 368548 - DNA, 25 bp, Homo sapien
cccttgtcatcaaagaaggaagatg

SEQ ID NO: 368549 - DNA, 25 bp, Homo sapien
ccggtagtagcgaacagatcgcgtc

SEQ ID NO: 368550 - DNA, 25 bp, Homo sapien
gccggtagtagcgaacagatcgcgt

SEQ ID NO: 368551 - DNA, 25 bp, Homo sapien
tagtagcgaacagatcgcgtctacc

SEQ ID NO: 368552 - DNA, 25 bp, Homo sapien
ggtagtagcgaacagatcgcgtcta

SEQ ID NO: 368553 - DNA, 25 bp, Homo sapien
ttgctcctgagatcaaatggcttct

SEQ ID NO: 368554 - DNA, 25 bp, Homo sapien
ggcattgaacaaacctcagccacca

SEQ ID NO: 368555 - DNA, 25 bp, Homo sapien
cttcttcacagtagaggcagtgggc

SEQ ID NO: 368556 - DNA, 25 bp, Homo sapien
gaggcagtgggcattgaacaaacct

SEQ ID NO: 368557 - DNA, 25 bp, Homo sapien
tcttctcgacggatgtggtacctcg

SEQ ID NO: 368558 - DNA, 25 bp, Homo sapien
catcttcataaaggagttttcatgg

SEQ ID NO: 368559 - DNA, 25 bp, Homo sapien
tccctcttgttcatgtcagtgtccc

SEQ ID NO: 368560 - DNA, 25 bp, Homo sapien
cctcggctccatgaaggcgctgtgg

SEQ ID NO: 368561 - DNA, 25 bp, Homo sapien
ttgacatcgtctgtccagcaggagt

SEQ ID NO: 368562 - DNA, 25 bp, Homo sapien
tgacatcgtctgtccagcaggagtt

SEQ ID NO: 368563 - DNA, 25 bp, Homo sapien
catctggaatatttcgatcagcgcc

SEQ ID NO: 368564 - DNA, 25 bp, Homo sapien
tggaatatttcgatcagcgccatgt

SEQ ID NO: 368565 - DNA, 25 bp, Homo sapien
tgtagatagcatagtgtagagcggt

SEQ ID NO: 368566 - DNA, 25 bp, Homo sapien
atatttcgatcagcgccatgttcca

SEQ ID NO: 368567 - DNA, 25 bp, Homo sapien
ttttgttcatgtacgccaagcaaaa

SEQ ID NO: 368568 - DNA, 25 bp, Homo sapien
tttttgttcatgtacgccaagcaaa

SEQ ID NO: 368569 - DNA, 25 bp, Homo sapien
tttgttcatgtacgccaagcaaaag

SEQ ID NO: 368570 - DNA, 25 bp, Homo sapien
gatagatcttgagaagatacatcaa

SEQ ID NO: 368571 - DNA, 25 bp, Homo sapien
cgtctgtccagatagatcttgagaa

SEQ ID NO: 368572 - DNA, 25 bp, Homo sapien
tctggccgtctgtccagatagatct

SEQ ID NO: 368573 - DNA, 25 bp, Homo sapien
acagcatactctctggccgtctgtc

SEQ ID NO: 368574 - DNA, 25 bp, Homo sapien
ttctgaatacaggaggaagggtcaa

SEQ ID NO: 368575 - DNA, 25 bp, Homo sapien
tgaatacaggaggaagggtcaattt

SEQ ID NO: 368576 - DNA, 25 bp, Homo sapien
ggttctgaatacaggaggaagggtc

SEQ ID NO: 368577 - DNA, 25 bp, Homo sapien
ctgaatacaggaggaagggtcaatt

SEQ ID NO: 368578 - DNA, 25 bp, Homo sapien
tatggaatgcctcaaagagttgtgc

SEQ ID NO: 368579 - DNA, 25 bp, Homo sapien
ctcaaagagttgtgctgcctcctta

SEQ ID NO: 368580 - DNA, 25 bp, Homo sapien
tggaatgcctcaaagagttgtgctg

SEQ ID NO: 368581 - DNA, 25 bp, Homo sapien
gcctcaaagagttgtgctgcctcct

SEQ ID NO: 368582 - DNA, 25 bp, Homo sapien
ctttatagtcagaaagtaattcaca

SEQ ID NO: 368583 - DNA, 25 bp, Homo sapien
gttttcagaagagatttttagcatc

SEQ ID NO: 368584 - DNA, 25 bp, Homo sapien
ctggattgctgttttcagaagagat

SEQ ID NO: 368585 - DNA, 25 bp, Homo sapien
tttctttatagtcagaaagtaattc

SEQ ID NO: 368586 - DNA, 25 bp, Homo sapien
tggcccacagggtaagacctactca

SEQ ID NO: 368587 - DNA, 25 bp, Homo sapien
gacaagtgggatcctaggatatcac

SEQ ID NO: 368588 - DNA, 25 bp, Homo sapien
ggagctgctgaggattagccaacca

SEQ ID NO: 368589 - DNA, 25 bp, Homo sapien
cccagccagtgaaatgttacaggaa

SEQ ID NO: 368590 - DNA, 25 bp, Homo sapien
cacatgctaggtgttagggtttaaa

SEQ ID NO: 368591 - DNA, 25 bp, Homo sapien
ctttcttgaggtagccttaggacct

SEQ ID NO: 368592 - DNA, 25 bp, Homo sapien
cttaggacctcactgatttttctac

SEQ ID NO: 368593 - DNA, 25 bp, Homo sapien
gagacttaaatattgaggctagcta

SEQ ID NO: 368594 - DNA, 25 bp, Homo sapien
ctggctggctattttcactgacttt

SEQ ID NO: 368595 - DNA, 25 bp, Homo sapien
gactttaagcctttgtgactcttcc

SEQ ID NO: 368596 - DNA, 25 bp, Homo sapien
ctctggctggctattttcactgact

SEQ ID NO: 368597 - DNA, 25 bp, Homo sapien
tttcactgactttaagcctttgtga

SEQ ID NO: 368598 - DNA, 25 bp, Homo sapien
ctctctatcacagtccttatttatt

SEQ ID NO: 368599 - DNA, 25 bp, Homo sapien
tatttatttctggttcttgagacat

SEQ ID NO: 368600 - DNA, 25 bp, Homo sapien
ttatttatttctggttcttgagaca

SEQ ID NO: 368601 - DNA, 25 bp, Homo sapien
ttatttctggttcttgagacatttt

SEQ ID NO: 368602 - DNA, 25 bp, Homo sapien
cttgagtggaagtttgatattaagg

SEQ ID NO: 368603 - DNA, 25 bp, Homo sapien
gagtggaagtttgatattaaggatg

SEQ ID NO: 368604 - DNA, 25 bp, Homo sapien
tggaagtttgatattaaggatggtt

SEQ ID NO: 368605 - DNA, 25 bp, Homo sapien
aagtttgatattaaggatggttatc

SEQ ID NO: 368606 - DNA, 25 bp, Homo sapien
atcccacaggattacttccatgctt

SEQ ID NO: 368607 - DNA, 25 bp, Homo sapien
ctggtaatcccacaggattacttcc

SEQ ID NO: 368608 - DNA, 25 bp, Homo sapien
ggtaatcccacaggattacttccat

SEQ ID NO: 368609 - DNA, 25 bp, Homo sapien
aggttttctggtaatcccacaggat

SEQ ID NO: 368610 - DNA, 25 bp, Homo sapien
ctgaaatacagccatgcagcagcac

SEQ ID NO: 368611 - DNA, 25 bp, Homo sapien
agcttgcttctgaaatacagccatg

SEQ ID NO: 368612 - DNA, 25 bp, Homo sapien
ccaatatcaatgtgagcagcttgct

SEQ ID NO: 368613 - DNA, 25 bp, Homo sapien
caaccaatatcaatgtgagcagctt

SEQ ID NO: 368614 - DNA, 25 bp, Homo sapien
ttgtttccgggtatcattttgttca

SEQ ID NO: 368615 - DNA, 25 bp, Homo sapien
gaattcattttctgttcagccactt

SEQ ID NO: 368616 - DNA, 25 bp, Homo sapien
tttgtttattagtcagaatctcatc

SEQ ID NO: 368617 - DNA, 25 bp, Homo sapien
ttcagaaagttgtttccgggtatca

SEQ ID NO: 368618 - DNA, 25 bp, Homo sapien
attgcatagcccttagaagtttatc

SEQ ID NO: 368619 - DNA, 25 bp, Homo sapien
cttcattcaattgcatagcccttag

SEQ ID NO: 368620 - DNA, 25 bp, Homo sapien
ttcaattgcatagcccttagaagtt

SEQ ID NO: 368621 - DNA, 25 bp, Homo sapien
catagcccttagaagtttatcagtc

SEQ ID NO: 368622 - DNA, 25 bp, Homo sapien
caggtacattaatcagtcatagatt

SEQ ID NO: 368623 - DNA, 25 bp, Homo sapien
agaagtccgcagtgccatacgagcc

SEQ ID NO: 368624 - DNA, 25 bp, Homo sapien
tcctgagcctgcctctaatgtcctc

SEQ ID NO: 368625 - DNA, 25 bp, Homo sapien
caagaagtccgcagtgccatacgag

SEQ ID NO: 368626 - DNA, 25 bp, Homo sapien
ctgagcctgcctctaatgtcctctg

SEQ ID NO: 368627 - DNA, 25 bp, Homo sapien
gccacagaacgccaagtcccctggg

SEQ ID NO: 368628 - DNA, 25 bp, Homo sapien
gtcagggccacagaacgccaagtcc

SEQ ID NO: 368629 - DNA, 25 bp, Homo sapien
tggtcagggccacagaacgccaagt

SEQ ID NO: 368630 - DNA, 25 bp, Homo sapien
cagaacgccaagtcccctgggtggt

SEQ ID NO: 368631 - DNA, 25 bp, Homo sapien
ctccagctactgagatgctgctctg

SEQ ID NO: 368632 - DNA, 25 bp, Homo sapien
tccagctactgagatgctgctctga

SEQ ID NO: 368633 - DNA, 25 bp, Homo sapien
ccggttggggcacatcagttcttct

SEQ ID NO: 368634 - DNA, 25 bp, Homo sapien
ttctcccatagaggttgggccccag

SEQ ID NO: 368635 - DNA, 25 bp, Homo sapien
cagttcttctcccatagaggttggg

SEQ ID NO: 368636 - DNA, 25 bp, Homo sapien
tcgctgccggttggggcacatcagt

SEQ ID NO: 368637 - DNA, 25 bp, Homo sapien
gggccacagaaaggcgagtcccctg

SEQ ID NO: 368638 - DNA, 25 bp, Homo sapien
tgaattatgaccaagccactccact

SEQ ID NO: 368639 - DNA, 25 bp, Homo sapien
ggctctacgttaactcttattagaa

SEQ ID NO: 368640 - DNA, 25 bp, Homo sapien
tgtgtctgttcctccttaaatggct

SEQ ID NO: 368641 - DNA, 25 bp, Homo sapien
tctgataatttgtgtctgttcctcc

SEQ ID NO: 368642 - DNA, 25 bp, Homo sapien
cacagaacttttgcacttgatcttt

SEQ ID NO: 368643 - DNA, 25 bp, Homo sapien
gaataatcacactagtcaaactgct

SEQ ID NO: 368644 - DNA, 25 bp, Homo sapien
ggaagcaggtgaaagttgaaactac

SEQ ID NO: 368645 - DNA, 25 bp, Homo sapien
gaagagtcccttgctaacaggtatg

SEQ ID NO: 368646 - DNA, 25 bp, Homo sapien
tgcagattaacactggaagagtccc

SEQ ID NO: 368647 - DNA, 25 bp, Homo sapien
ctgtattcatacttcttttcttcct

SEQ ID NO: 368648 - DNA, 25 bp, Homo sapien
tatgaaatatctttcaactgcattt

SEQ ID NO: 368649 - DNA, 25 bp, Homo sapien
tttatgaaatatctttcaactgcat

SEQ ID NO: 368650 - DNA, 25 bp, Homo sapien
tcctttatgaaatatctttcaactg

SEQ ID NO: 368651 - DNA, 25 bp, Homo sapien
ttagtatccaacatagccagaagct

SEQ ID NO: 368652 - DNA, 25 bp, Homo sapien
tacttacagtactggttagtatcca

SEQ ID NO: 368653 - DNA, 25 bp, Homo sapien
gcaaggaacattaaaggagctttac

SEQ ID NO: 368654 - DNA, 25 bp, Homo sapien
caataagcgatgagggttccagtaa

SEQ ID NO: 368655 - DNA, 25 bp, Homo sapien
tctgtccttccgcactcaggagcgg

SEQ ID NO: 368656 - DNA, 25 bp, Homo sapien
aacaacggcgtcaagctggctgaca

SEQ ID NO: 368657 - DNA, 25 bp, Homo sapien
caggcgacctcaacgtggagctgct

SEQ ID NO: 368658 - DNA, 25 bp, Homo sapien
gcaccaggcacctgcggattggcct

SEQ ID NO: 368659 - DNA, 25 bp, Homo sapien
ggagtagtgatactcaaacttctgg

SEQ ID NO: 368660 - DNA, 25 bp, Homo sapien
gacaatttttgccactcatactgta

SEQ ID NO: 368661 - DNA, 25 bp, Homo sapien
tctgtgagtcagacaatttttgcca

SEQ ID NO: 368662 - DNA, 25 bp, Homo sapien
actcatactgtaatggaagtgaacc

SEQ ID NO: 368663 - DNA, 25 bp, Homo sapien
tgtaatggaagtgaaccttcttttg

SEQ ID NO: 368664 - DNA, 25 bp, Homo sapien
aacagatgaagtcatttctgctaac

SEQ ID NO: 368665 - DNA, 25 bp, Homo sapien
tataacagatgaagtcatttctgct

SEQ ID NO: 368666 - DNA, 25 bp, Homo sapien
gatataacagatgaagtcatttctg

SEQ ID NO: 368667 - DNA, 25 bp, Homo sapien
agatataacagatgaagtcatttct

SEQ ID NO: 368668 - DNA, 25 bp, Homo sapien
gtacagctgtatgtcccagagtact

SEQ ID NO: 368669 - DNA, 25 bp, Homo sapien
cagctgtatgtcccagagtactcag

SEQ ID NO: 368670 - DNA, 25 bp, Homo sapien
acagctgtatgtcccagagtactca

SEQ ID NO: 368671 - DNA, 25 bp, Homo sapien
agctgtatgtcccagagtactcaga

SEQ ID NO: 368672 - DNA, 25 bp, Homo sapien
tttcttctctgcgctttttacgaca

SEQ ID NO: 368673 - DNA, 25 bp, Homo sapien
cttctctgcgctttttacgacagca

SEQ ID NO: 368674 - DNA, 25 bp, Homo sapien
tttttacgacagcaaaagatgataa

SEQ ID NO: 368675 - DNA, 25 bp, Homo sapien
ttttacgacagcaaaagatgataag

SEQ ID NO: 368676 - DNA, 25 bp, Homo sapien
ggactctgaggagtgcgttcaaagt

SEQ ID NO: 368677 - DNA, 25 bp, Homo sapien
tctgaggagtgcgttcaaagtcttc

SEQ ID NO: 368678 - DNA, 25 bp, Homo sapien
gggcagctaccttagcaggtgggag

SEQ ID NO: 368679 - DNA, 25 bp, Homo sapien
ccattcgacttagattaggggcagc

SEQ ID NO: 368680 - DNA, 25 bp, Homo sapien
gctctgtgcgggaatcatcacagga

SEQ ID NO: 368681 - DNA, 25 bp, Homo sapien
gacccatccttgctctgtgcgggaa

SEQ ID NO: 368682 - DNA, 25 bp, Homo sapien
tccttgctctgtgcgggaatcatca

SEQ ID NO: 368683 - DNA, 25 bp, Homo sapien
tatagacccatccttgctctgtgcg

SEQ ID NO: 368684 - DNA, 25 bp, Homo sapien
aaccaaaaacccattgatgctggca

SEQ ID NO: 368685 - DNA, 25 bp, Homo sapien
ctttaaccaaaaacccattgatgct

SEQ ID NO: 368686 - DNA, 25 bp, Homo sapien
aaaaacccattgatgctggcacaaa

SEQ ID NO: 368687 - DNA, 25 bp, Homo sapien
caaaaacccattgatgctggcacaa

SEQ ID NO: 368688 - DNA, 25 bp, Homo sapien
ggcttcgtgcactgaaaatttgaca

SEQ ID NO: 368689 - DNA, 25 bp, Homo sapien
gaaaactgcactatgtatggcttcg

SEQ ID NO: 368690 - DNA, 25 bp, Homo sapien
tcatcgactgtgatcctggtgtcca

SEQ ID NO: 368691 - DNA, 25 bp, Homo sapien
taccatgggtgatcaaggaagggct

SEQ ID NO: 368692 - DNA, 25 bp, Homo sapien
catctaaagggggatgaccacgtga

SEQ ID NO: 368693 - DNA, 25 bp, Homo sapien
gtgaagctctgtcatggaatgtcca

SEQ ID NO: 368694 - DNA, 25 bp, Homo sapien
gctctgtcatggaatgtccacacag

SEQ ID NO: 368695 - DNA, 25 bp, Homo sapien
ctaaagggggatgaccacgtgaaga

SEQ ID NO: 368696 - DNA, 25 bp, Homo sapien
tcaggtggtcggtcccatagcgctg

SEQ ID NO: 368697 - DNA, 25 bp, Homo sapien
atggcgcacagcagtagtagtggca

SEQ ID NO: 368698 - DNA, 25 bp, Homo sapien
cagcagggcgagaatcggctgctca

SEQ ID NO: 368699 - DNA, 25 bp, Homo sapien
ggaccggatgcctccaaggcatcta

SEQ ID NO: 368700 - DNA, 25 bp, Homo sapien
ttccaatggctccactgatgcaaca

SEQ ID NO: 368701 - DNA, 25 bp, Homo sapien
gcccaaatcccatgttagacgtaag

SEQ ID NO: 368702 - DNA, 25 bp, Homo sapien
cccaaatcccatgttagacgtaagt

SEQ ID NO: 368703 - DNA, 25 bp, Homo sapien
gagcaggggcaatgcgctgctgctg

SEQ ID NO: 368704 - DNA, 25 bp, Homo sapien
actggccggcgggagcacggccaca

SEQ ID NO: 368705 - DNA, 25 bp, Homo sapien
aatgcgctgctgctgggaactggcc

SEQ ID NO: 368706 - DNA, 25 bp, Homo sapien
gagcgaaggcgtggagcaggggcaa

SEQ ID NO: 368707 - DNA, 25 bp, Homo sapien
ggaccggctcagtgctgattcccgc

SEQ ID NO: 368708 - DNA, 25 bp, Homo sapien
cggcgggaccggctcagtgctgatt

SEQ ID NO: 368709 - DNA, 25 bp, Homo sapien
accggctcagtgctgattcccgcgg

SEQ ID NO: 368710 - DNA, 25 bp, Homo sapien
gcgggaccggctcagtgctgattcc

SEQ ID NO: 368711 - DNA, 25 bp, Homo sapien
gatcggctccccgcagtcgcagccc

SEQ ID NO: 368712 - DNA, 25 bp, Homo sapien
gctccccgcagtcgcagcccggaca

SEQ ID NO: 368713 - DNA, 25 bp, Homo sapien
ggctccccgcagtcgcagcccggac

SEQ ID NO: 368714 - DNA, 25 bp, Homo sapien
tcggctccccgcagtcgcagcccgg

SEQ ID NO: 368715 - DNA, 25 bp, Homo sapien
cagggcgacacagaacgcgcccagg

SEQ ID NO: 368716 - DNA, 25 bp, Homo sapien
ctcgagccgcagggcgacacagaac

SEQ ID NO: 368717 - DNA, 25 bp, Homo sapien
gcagggcgacacagaacgcgcccag

SEQ ID NO: 368718 - DNA, 25 bp, Homo sapien
agccgcagggcgacacagaacgcgc

SEQ ID NO: 368719 - DNA, 25 bp, Homo sapien
tggcgcctcaagctcgccgcccggc

SEQ ID NO: 368720 - DNA, 25 bp, Homo sapien
ctagcctggcgcctcaagctcgccg

SEQ ID NO: 368721 - DNA, 25 bp, Homo sapien
ccggcttccccgtgaacagtggccg

SEQ ID NO: 368722 - DNA, 25 bp, Homo sapien
cttccccgtgaacagtggccgttcg

SEQ ID NO: 368723 - DNA, 25 bp, Homo sapien
cacgcagcgcttgcagaccgtgagc

SEQ ID NO: 368724 - DNA, 25 bp, Homo sapien
gcagcgcttgcagaccgtgagcccg

SEQ ID NO: 368725 - DNA, 25 bp, Homo sapien
ccggctccacgcagcgcttgcagac

SEQ ID NO: 368726 - DNA, 25 bp, Homo sapien
ttgcagaccgtgagcccgcagggca

SEQ ID NO: 368727 - DNA, 25 bp, Homo sapien
tccagcctgagcagcgggcacttgg

SEQ ID NO: 368728 - DNA, 25 bp, Homo sapien
aagcacctctccagcttgcggctca

SEQ ID NO: 368729 - DNA, 25 bp, Homo sapien
ttggccgggaagcacctctccagct

SEQ ID NO: 368730 - DNA, 25 bp, Homo sapien
agcttgcggctcagcaccacgttca

SEQ ID NO: 368731 - DNA, 25 bp, Homo sapien
gagctgctccgggggccgcgggaaa

SEQ ID NO: 368732 - DNA, 25 bp, Homo sapien
gggccgcgggaaacttatcagcatc

SEQ ID NO: 368733 - DNA, 25 bp, Homo sapien
agagctgctccgggggccgcgggaa

SEQ ID NO: 368734 - DNA, 25 bp, Homo sapien
gggggccgcgggaaacttatcagca

SEQ ID NO: 368735 - DNA, 25 bp, Homo sapien
catgcacctggcgtgacaaagggaa

SEQ ID NO: 368736 - DNA, 25 bp, Homo sapien
cctggacaccggtagccactggcct

SEQ ID NO: 368737 - DNA, 25 bp, Homo sapien
cggccctaaacatgcacctggcgtg

SEQ ID NO: 368738 - DNA, 25 bp, Homo sapien
taaacatgcacctggcgtgacaaag

SEQ ID NO: 368739 - DNA, 25 bp, Homo sapien
tacgcagatgatttctgctcgggag

SEQ ID NO: 368740 - DNA, 25 bp, Homo sapien
cagatgatttctgctcgggagagaa

SEQ ID NO: 368741 - DNA, 25 bp, Homo sapien
ggtacgcagatgatttctgctcggg

SEQ ID NO: 368742 - DNA, 25 bp, Homo sapien
gagggtacgcagatgatttctgctc

SEQ ID NO: 368743 - DNA, 25 bp, Homo sapien
tcagtgacccagagcaccctcctat

SEQ ID NO: 368744 - DNA, 25 bp, Homo sapien
ttatgactccccttcttcagtgacc

SEQ ID NO: 368745 - DNA, 25 bp, Homo sapien
tatgactccccttcttcagtgaccc

SEQ ID NO: 368746 - DNA, 25 bp, Homo sapien
acccagagcaccctcctatcacagc

SEQ ID NO: 368747 - DNA, 25 bp, Homo sapien
cacccagagcttgtttttttcagag

SEQ ID NO: 368748 - DNA, 25 bp, Homo sapien
ttcagagcctagatgtgcaggatat

SEQ ID NO: 368749 - DNA, 25 bp, Homo sapien
aggatatagatgcacctcagaggtc

SEQ ID NO: 368750 - DNA, 25 bp, Homo sapien
agctgtggaaaccaggacctcctgc

SEQ ID NO: 368751 - DNA, 25 bp, Homo sapien
tggtacccatttttctgcccgcagg

SEQ ID NO: 368752 - DNA, 25 bp, Homo sapien
caggaggtacttgcgtggagccctt

SEQ ID NO: 368753 - DNA, 25 bp, Homo sapien
gaggtacttgcgtggagccctttct

SEQ ID NO: 368754 - DNA, 25 bp, Homo sapien
ggtacttgcgtggagccctttcttc

SEQ ID NO: 368755 - DNA, 25 bp, Homo sapien
gacctccagtctccggcaacgatgg

SEQ ID NO: 368756 - DNA, 25 bp, Homo sapien
tcacagacacggcagggagcgaagg

SEQ ID NO: 368757 - DNA, 25 bp, Homo sapien
acaaggcccatgtccgcaccgttcg

SEQ ID NO: 368758 - DNA, 25 bp, Homo sapien
gggagcgaagggcgcacactcacct

SEQ ID NO: 368759 - DNA, 25 bp, Homo sapien
caattggacttcctaatttcctaat

SEQ ID NO: 368760 - DNA, 25 bp, Homo sapien
cttttgcccattcgatatggtgttg

SEQ ID NO: 368761 - DNA, 25 bp, Homo sapien
gcccattcgatatggtgttggctgt

SEQ ID NO: 368762 - DNA, 25 bp, Homo sapien
caaatagggacaattggacttccta

SEQ ID NO: 368763 - DNA, 25 bp, Homo sapien
gtgctggcttgtagggaatattctt

SEQ ID NO: 368764 - DNA, 25 bp, Homo sapien
tgttgttcccaatgaattatccaag

SEQ ID NO: 368765 - DNA, 25 bp, Homo sapien
ggcttgtagggaatattcttaaaga

SEQ ID NO: 368766 - DNA, 25 bp, Homo sapien
tgttgttgttcccaatgaattatcc

SEQ ID NO: 368767 - DNA, 25 bp, Homo sapien
tggacacacggagatttaacacctg

SEQ ID NO: 368768 - DNA, 25 bp, Homo sapien
gataacttcctgacttgtgtttggg

SEQ ID NO: 368769 - DNA, 25 bp, Homo sapien
ttaacacctgcaaagttaagcctga

SEQ ID NO: 368770 - DNA, 25 bp, Homo sapien
ggcggcaagcctctgacggagataa

SEQ ID NO: 368771 - DNA, 25 bp, Homo sapien
tacaggtttcaaagcagggatacat

SEQ ID NO: 368772 - DNA, 25 bp, Homo sapien
tcttaaagtgaggtcctgggagtgc

SEQ ID NO: 368773 - DNA, 25 bp, Homo sapien
ggaagggaataacacccatccacat

SEQ ID NO: 368774 - DNA, 25 bp, Homo sapien
cagttacacagctgtggattgcaca

SEQ ID NO: 368775 - DNA, 25 bp, Homo sapien
aggaaccagccccacgggctcaaca

SEQ ID NO: 368776 - DNA, 25 bp, Homo sapien
gattaaaggcctcacagtaacaggt

SEQ ID NO: 368777 - DNA, 25 bp, Homo sapien
aaagcggcggtgaagatggattaaa

SEQ ID NO: 368778 - DNA, 25 bp, Homo sapien
acgggctcaacaaggccacagagca

SEQ ID NO: 368779 - DNA, 25 bp, Homo sapien
tttagtgaagatgtgcaaagggaag

SEQ ID NO: 368780 - DNA, 25 bp, Homo sapien
agtttagtgaagatgtgcaaaggga

SEQ ID NO: 368781 - DNA, 25 bp, Homo sapien
aagtttagtgaagatgtgcaaaggg

SEQ ID NO: 368782 - DNA, 25 bp, Homo sapien
gtttagtgaagatgtgcaaagggaa

SEQ ID NO: 368783 - DNA, 25 bp, Homo sapien
attgtgatggcttttttctttttct

SEQ ID NO: 368784 - DNA, 25 bp, Homo sapien
cttcattgtgatggcttttttcttt

SEQ ID NO: 368785 - DNA, 25 bp, Homo sapien
ttcgtatttttgttaagccattcat

SEQ ID NO: 368786 - DNA, 25 bp, Homo sapien
tttcgtatttttgttaagccattca

SEQ ID NO: 368787 - DNA, 25 bp, Homo sapien
gatcagagcccagacaggcgggagc

SEQ ID NO: 368788 - DNA, 25 bp, Homo sapien
catgagccggccgcagggggagggg

SEQ ID NO: 368789 - DNA, 25 bp, Homo sapien
cacgggcggcgttgtacacggcggt

SEQ ID NO: 368790 - DNA, 25 bp, Homo sapien
acgggcggcgttgtacacggcggtg

SEQ ID NO: 368791 - DNA, 25 bp, Homo sapien
tcacgggcggcgttgtacacggcgg

SEQ ID NO: 368792 - DNA, 25 bp, Homo sapien
cgccatcgaagtgcaccgagccacc

SEQ ID NO: 368793 - DNA, 25 bp, Homo sapien
catcgaagtgcaccgagccaccggc

SEQ ID NO: 368794 - DNA, 25 bp, Homo sapien
ccatcgaagtgcaccgagccaccgg

SEQ ID NO: 368795 - DNA, 25 bp, Homo sapien
gccatcgaagtgcaccgagccaccg

SEQ ID NO: 368796 - DNA, 25 bp, Homo sapien
ccacagcggcggcgcaccctccatg

SEQ ID NO: 368797 - DNA, 25 bp, Homo sapien
acagcggcggcgcaccctccatggt

SEQ ID NO: 368798 - DNA, 25 bp, Homo sapien
cacagcggcggcgcaccctccatgg

SEQ ID NO: 368799 - DNA, 25 bp, Homo sapien
ctccgcaccacgtccaggtggtccg

SEQ ID NO: 368800 - DNA, 25 bp, Homo sapien
tccgcaccacgtccaggtggtccgc

SEQ ID NO: 368801 - DNA, 25 bp, Homo sapien
cgcaccacgtccaggtggtccgcgc

SEQ ID NO: 368802 - DNA, 25 bp, Homo sapien
ccgcaccacgtccaggtggtccgcg

SEQ ID NO: 368803 - DNA, 25 bp, Homo sapien
cgtagctatcacgttccatgctggc

SEQ ID NO: 368804 - DNA, 25 bp, Homo sapien
gtagctatcacgttccatgctggcc

SEQ ID NO: 368805 - DNA, 25 bp, Homo sapien
gggacagtttaaagaatcagtaaga

SEQ ID NO: 368806 - DNA, 25 bp, Homo sapien
gtggatgctgcccatctgaggacta

SEQ ID NO: 368807 - DNA, 25 bp, Homo sapien
gactacacattgagagctacttgct

SEQ ID NO: 368808 - DNA, 25 bp, Homo sapien
tcagtatggagcatgcttcagagtc

SEQ ID NO: 368809 - DNA, 25 bp, Homo sapien
atttacatggataaagagtgaccac

SEQ ID NO: 368810 - DNA, 25 bp, Homo sapien
aagagtgaccactgtctttggctgg

SEQ ID NO: 368811 - DNA, 25 bp, Homo sapien
aattcccacatgtgcttggttgcaa

SEQ ID NO: 368812 - DNA, 25 bp, Homo sapien
cttcactgaattcccacatgtgctt

SEQ ID NO: 368813 - DNA, 25 bp, Homo sapien
cacttgagccgttcctggcattcga

SEQ ID NO: 368814 - DNA, 25 bp, Homo sapien
tgagccgttcctggcattcgaactg

SEQ ID NO: 368815 - DNA, 25 bp, Homo sapien
gaactgctcctcgtcgtttctctct

SEQ ID NO: 368816 - DNA, 25 bp, Homo sapien
ctggcacttgagccgttcctggcat

SEQ ID NO: 368817 - DNA, 25 bp, Homo sapien
atcctgcagaagtcctccgagcggc

SEQ ID NO: 368818 - DNA, 25 bp, Homo sapien
ggaggaaatcgagcatccagcctgc

SEQ ID NO: 368819 - DNA, 25 bp, Homo sapien
gttgcggatcctgcagaagtcctcc

SEQ ID NO: 368820 - DNA, 25 bp, Homo sapien
ctctgccctgttgcggatcctgcag

SEQ ID NO: 368821 - DNA, 25 bp, Homo sapien
caaactgtgcatcaagggtttttcc

SEQ ID NO: 368822 - DNA, 25 bp, Homo sapien
ttttcaaactgtgcatcaagggttt

SEQ ID NO: 368823 - DNA, 25 bp, Homo sapien
gctgcaattcttgtcaaaaactgac

SEQ ID NO: 368824 - DNA, 25 bp, Homo sapien
cctgctgcaattcttgtcaaaaact

SEQ ID NO: 368825 - DNA, 25 bp, Homo sapien
agaaaggttgatgatttttcactta

SEQ ID NO: 368826 - DNA, 25 bp, Homo sapien
ttcattagaaaggttgatgattttt

SEQ ID NO: 368827 - DNA, 25 bp, Homo sapien
tcattagaaaggttgatgatttttc

SEQ ID NO: 368828 - DNA, 25 bp, Homo sapien
cttcattagaaaggttgatgatttt

SEQ ID NO: 368829 - DNA, 25 bp, Homo sapien
ggccagcgtctgcccaatggctaac

SEQ ID NO: 368830 - DNA, 25 bp, Homo sapien
tctgcccaatggctaacagggggct

SEQ ID NO: 368831 - DNA, 25 bp, Homo sapien
agcgtctgcccaatggctaacaggg

SEQ ID NO: 368832 - DNA, 25 bp, Homo sapien
ccagcgtctgcccaatggctaacag

SEQ ID NO: 368833 - DNA, 25 bp, Homo sapien
tgcttaatagattttgttgtttcaa

SEQ ID NO: 368834 - DNA, 25 bp, Homo sapien
gcttaatagattttgttgtttcaaa

SEQ ID NO: 368835 - DNA, 25 bp, Homo sapien
tctgacattgtagtaaaagtaaatg

SEQ ID NO: 368836 - DNA, 25 bp, Homo sapien
tgcttgtgatcacctctgtatgaaa

SEQ ID NO: 368837 - DNA, 25 bp, Homo sapien
gccactgcttgtgatcacctctgta

SEQ ID NO: 368838 - DNA, 25 bp, Homo sapien
tactgagcccataatctcaggaatt

SEQ ID NO: 368839 - DNA, 25 bp, Homo sapien
gagacaccaacaggactagtaaaac

SEQ ID NO: 368840 - DNA, 25 bp, Homo sapien
cgagaaccaatttgagacaccaaca

SEQ ID NO: 368841 - DNA, 25 bp, Homo sapien
caccaacaggactagtaaaacatct

SEQ ID NO: 368842 - DNA, 25 bp, Homo sapien
caatttgagacaccaacaggactag

SEQ ID NO: 368843 - DNA, 25 bp, Homo sapien
actccaagtggctgcgttttcagca

SEQ ID NO: 368844 - DNA, 25 bp, Homo sapien
agcagtcacctatctgcttcttgac

SEQ ID NO: 368845 - DNA, 25 bp, Homo sapien
actgccatcaagctgactccaagtg

SEQ ID NO: 368846 - DNA, 25 bp, Homo sapien
cagcaagaggggaatagcagtcacc

SEQ ID NO: 368847 - DNA, 25 bp, Homo sapien
tcaggcagaagtgcggttcatcagc

SEQ ID NO: 368848 - DNA, 25 bp, Homo sapien
atcagcatcttgacaacatagtcta

SEQ ID NO: 368849 - DNA, 25 bp, Homo sapien
gcatcttgacaacatagtctattct

SEQ ID NO: 368850 - DNA, 25 bp, Homo sapien
tcttgacaacatagtctattctcac

SEQ ID NO: 368851 - DNA, 25 bp, Homo sapien
catgcactgaggtatggttggccaa

SEQ ID NO: 368852 - DNA, 25 bp, Homo sapien
gattatgagcatccattgtgagtgc

SEQ ID NO: 368853 - DNA, 25 bp, Homo sapien
ggatttggccagtctgctgacatca

SEQ ID NO: 368854 - DNA, 25 bp, Homo sapien
gtcatgcatcccaaaattacccaag

SEQ ID NO: 368855 - DNA, 25 bp, Homo sapien
gtgacaaatgcatgccacaaggtct

SEQ ID NO: 368856 - DNA, 25 bp, Homo sapien
taagttacgcatgtagtgacaaatg

SEQ ID NO: 368857 - DNA, 25 bp, Homo sapien
tctgtgatcctctgtccatagtaag

SEQ ID NO: 368858 - DNA, 25 bp, Homo sapien
gattgtatctgcaatgtgttgctgc

SEQ ID NO: 368859 - DNA, 25 bp, Homo sapien
tctgctcgctcctttacgccttcag

SEQ ID NO: 368860 - DNA, 25 bp, Homo sapien
gctcctttacgccttcagccagctc

SEQ ID NO: 368861 - DNA, 25 bp, Homo sapien
gctcgctcctttacgccttcagcca

SEQ ID NO: 368862 - DNA, 25 bp, Homo sapien
ggcttctgctcgctcctttacgcct

SEQ ID NO: 368863 - DNA, 25 bp, Homo sapien
actgcgtggagcttacagctggctg

SEQ ID NO: 368864 - DNA, 25 bp, Homo sapien
tgatttttgggtactgagcccggct

SEQ ID NO: 368865 - DNA, 25 bp, Homo sapien
atttttgggtactgagcccggctgc

SEQ ID NO: 368866 - DNA, 25 bp, Homo sapien
agcggttgatttttgggtactgagc

SEQ ID NO: 368867 - DNA, 25 bp, Homo sapien
gaagcggttgatttttgggtactga

SEQ ID NO: 368868 - DNA, 25 bp, Homo sapien
tggagaggctttctagctggtacca

SEQ ID NO: 368869 - DNA, 25 bp, Homo sapien
ggccttgaggaggttggagaggctt

SEQ ID NO: 368870 - DNA, 25 bp, Homo sapien
agaggctttctagctggtaccagtt

SEQ ID NO: 368871 - DNA, 25 bp, Homo sapien
ggaggttggagaggctttctagctg

SEQ ID NO: 368872 - DNA, 25 bp, Homo sapien
cctgcacctgcctcacgttcccact

SEQ ID NO: 368873 - DNA, 25 bp, Homo sapien
aaataggtccacggggttcatgctg

SEQ ID NO: 368874 - DNA, 25 bp, Homo sapien
taggtccacggggttcatgctgtag

SEQ ID NO: 368875 - DNA, 25 bp, Homo sapien
caaacaggtcgttggtctcaaatag

SEQ ID NO: 368876 - DNA, 25 bp, Homo sapien
gccgtacacagtcgtgcctgactgg

SEQ ID NO: 368877 - DNA, 25 bp, Homo sapien
ctgccgtacacagtcgtgcctgact

SEQ ID NO: 368878 - DNA, 25 bp, Homo sapien
cgtacacagtcgtgcctgactggct

SEQ ID NO: 368879 - DNA, 25 bp, Homo sapien
gtacacagtcgtgcctgactggctg

SEQ ID NO: 368880 - DNA, 25 bp, Homo sapien
ggtcgtagagatgcctcctcgtgct

SEQ ID NO: 368881 - DNA, 25 bp, Homo sapien
cgagtggtccatggggggcaggatg

SEQ ID NO: 368882 - DNA, 25 bp, Homo sapien
ggaggctgatggtcgagtggtccat

SEQ ID NO: 368883 - DNA, 25 bp, Homo sapien
gcaggatgttgttcttggggtcgta

SEQ ID NO: 368884 - DNA, 25 bp, Homo sapien
cttcgtgtcgtagatgtgccaccgg

SEQ ID NO: 368885 - DNA, 25 bp, Homo sapien
ttcgtgtcgtagatgtgccaccggg

SEQ ID NO: 368886 - DNA, 25 bp, Homo sapien
ggtcgtggaagagttgtcatacttg

SEQ ID NO: 368887 - DNA, 25 bp, Homo sapien
agggtcgtggaagagttgtcatact

SEQ ID NO: 368888 - DNA, 25 bp, Homo sapien
ttcagggtcgtggaagagttgtcat

SEQ ID NO: 368889 - DNA, 25 bp, Homo sapien
cagggtcgtggaagagttgtcatac

SEQ ID NO: 368890 - DNA, 25 bp, Homo sapien
tcgtatatctgtcggcccaggctga

SEQ ID NO: 368891 - DNA, 25 bp, Homo sapien
gagcctcagtagctggtctcctctt

SEQ ID NO: 368892 - DNA, 25 bp, Homo sapien
caaacacccagacagggagaccatg

SEQ ID NO: 368893 - DNA, 25 bp, Homo sapien
ggctgctctggttggtgcccagcgt

SEQ ID NO: 368894 - DNA, 25 bp, Homo sapien
tgcaaaggaacgaaagcaacgggga

SEQ ID NO: 368895 - DNA, 25 bp, Homo sapien
ctgcaaaggaacgaaagcaacgggg

SEQ ID NO: 368896 - DNA, 25 bp, Homo sapien
gcatcgggatatggccttgatccct

SEQ ID NO: 368897 - DNA, 25 bp, Homo sapien
gacacgcatcgggatatggccttga

SEQ ID NO: 368898 - DNA, 25 bp, Homo sapien
tcacccgacacgcatcgggatatgg

SEQ ID NO: 368899 - DNA, 25 bp, Homo sapien
gtctcgtctccccagcacagctagg

SEQ ID NO: 368900 - DNA, 25 bp, Homo sapien
tcacatgtggcctttttggccagct

SEQ ID NO: 368901 - DNA, 25 bp, Homo sapien
acatgtggcctttttggccagctca

SEQ ID NO: 368902 - DNA, 25 bp, Homo sapien
catgtggcctttttggccagctcat

SEQ ID NO: 368903 - DNA, 25 bp, Homo sapien
tgtcacatgtggcctttttggccag

SEQ ID NO: 368904 - DNA, 25 bp, Homo sapien
tgaagcttgtactcttgaatcagag

SEQ ID NO: 368905 - DNA, 25 bp, Homo sapien
cttggataagatcttcagatctctc

SEQ ID NO: 368906 - DNA, 25 bp, Homo sapien
gatcgctgaggccattgcattgctt

SEQ ID NO: 368907 - DNA, 25 bp, Homo sapien
cctgcctcctgttggcttggataag

SEQ ID NO: 368908 - DNA, 25 bp, Homo sapien
ctgactgtctatccatgtgtttgat

SEQ ID NO: 368909 - DNA, 25 bp, Homo sapien
tatgatggacattgttctgactgtc

SEQ ID NO: 368910 - DNA, 25 bp, Homo sapien
cccagtgaatgttgtacctcaagac

SEQ ID NO: 368911 - DNA, 25 bp, Homo sapien
ccatatgaaacccagtgaatgttgt

SEQ ID NO: 368912 - DNA, 25 bp, Homo sapien
caggggcagaggttattccactttg

SEQ ID NO: 368913 - DNA, 25 bp, Homo sapien
tgtctcacaagaaatgacagataaa

SEQ ID NO: 368914 - DNA, 25 bp, Homo sapien
gtctcacaagaaatgacagataaat

SEQ ID NO: 368915 - DNA, 25 bp, Homo sapien
tctcacaagaaatgacagataaata

SEQ ID NO: 368916 - DNA, 25 bp, Homo sapien
agcaccaaggatgtgtggccagtca

SEQ ID NO: 368917 - DNA, 25 bp, Homo sapien
gtgttctgatttcttgagtgatggc

SEQ ID NO: 368918 - DNA, 25 bp, Homo sapien
gatgtgtggccagtcagcatctgca

SEQ ID NO: 368919 - DNA, 25 bp, Homo sapien
tgtgttctgatttcttgagtgatgg

SEQ ID NO: 368920 - DNA, 25 bp, Homo sapien
gtatcctgcgtggtcccctttcctg

SEQ ID NO: 368921 - DNA, 25 bp, Homo sapien
gattgtttctgtggaccccaccctg

SEQ ID NO: 368922 - DNA, 25 bp, Homo sapien
tgtttctgtggaccccaccctgagt

SEQ ID NO: 368923 - DNA, 25 bp, Homo sapien
gctccttatgagtggtgttttccct

SEQ ID NO: 368924 - DNA, 25 bp, Homo sapien
ccatgaccggtatctgcagagccag

SEQ ID NO: 368925 - DNA, 25 bp, Homo sapien
tcagatcggatgcacagaaaaatgg

SEQ ID NO: 368926 - DNA, 25 bp, Homo sapien
gggaggacctccatgggacttccat

SEQ ID NO: 368927 - DNA, 25 bp, Homo sapien
gagggtgggtagcacactgtcctta

SEQ ID NO: 368928 - DNA, 25 bp, Homo sapien
gcagaaagggcccaatctggtggat

SEQ ID NO: 368929 - DNA, 25 bp, Homo sapien
gtcctgcctgggctgattggcaaag

SEQ ID NO: 368930 - DNA, 25 bp, Homo sapien
tggcaaagagctcactgacagtgtg

SEQ ID NO: 368931 - DNA, 25 bp, Homo sapien
tgactgggtccaggtcctgcctggg

SEQ ID NO: 368932 - DNA, 25 bp, Homo sapien
gcctgggctgattggcaaagagctc

SEQ ID NO: 368933 - DNA, 25 bp, Homo sapien
gggtgttggcctggtgtccctgaga

SEQ ID NO: 368934 - DNA, 25 bp, Homo sapien
ttgggtatgtggatgatgtccaggg

SEQ ID NO: 368935 - DNA, 25 bp, Homo sapien
tgtggatgatgtccagggtgttggc

SEQ ID NO: 368936 - DNA, 25 bp, Homo sapien
gcctggtgtccctgagacagcatta

SEQ ID NO: 368937 - DNA, 25 bp, Homo sapien
agtcccatacctaaagcatcctgtc

SEQ ID NO: 368938 - DNA, 25 bp, Homo sapien
aagtcccatacctaaagcatcctgt

SEQ ID NO: 368939 - DNA, 25 bp, Homo sapien
caagtcccatacctaaagcatcctg

SEQ ID NO: 368940 - DNA, 25 bp, Homo sapien
ccagggcagcatgcggccagctgct

SEQ ID NO: 368941 - DNA, 25 bp, Homo sapien
agacaaccgtcctgcatcgtgcctg

SEQ ID NO: 368942 - DNA, 25 bp, Homo sapien
cagagacaaccgtcctgcatcgtgc

SEQ ID NO: 368943 - DNA, 25 bp, Homo sapien
gtgaccagcacaacatggaagaagc

SEQ ID NO: 368944 - DNA, 25 bp, Homo sapien
gacgatggcggatttgttcaaaaga

SEQ ID NO: 368945 - DNA, 25 bp, Homo sapien
acgatggcggatttgttcaaaagaa

SEQ ID NO: 368946 - DNA, 25 bp, Homo sapien
tgacgatggcggatttgttcaaaag

SEQ ID NO: 368947 - DNA, 25 bp, Homo sapien
gatgacgatggcggatttgttcaaa

SEQ ID NO: 368948 - DNA, 25 bp, Homo sapien
taattttctgaaaaactgatgaatc

SEQ ID NO: 368949 - DNA, 25 bp, Homo sapien
taagtggacatgttgctgctgctga

SEQ ID NO: 368950 - DNA, 25 bp, Homo sapien
aataagtggacatgttgctgctgct

SEQ ID NO: 368951 - DNA, 25 bp, Homo sapien
gctgctgctgataattttctgaaaa

SEQ ID NO: 368952 - DNA, 25 bp, Homo sapien
gctggaagatggcaccattccaaac

SEQ ID NO: 368953 - DNA, 25 bp, Homo sapien
gccaggaggagtcttgtgccgttat

SEQ ID NO: 368954 - DNA, 25 bp, Homo sapien
aatctgtttcttggtctaatacgga

SEQ ID NO: 368955 - DNA, 25 bp, Homo sapien
aatacggaaaggctgtccattgcca

SEQ ID NO: 368956 - DNA, 25 bp, Homo sapien
cggctttccggcagcccctgggacg

SEQ ID NO: 368957 - DNA, 25 bp, Homo sapien
gacctggacgccctggacaagcagc

SEQ ID NO: 368958 - DNA, 25 bp, Homo sapien
gcaggagcggagacctggacgccct

SEQ ID NO: 368959 - DNA, 25 bp, Homo sapien
agcggagacctggacgccctggaca

SEQ ID NO: 368960 - DNA, 25 bp, Homo sapien
gagcagttggttgggagtctgagaa

SEQ ID NO: 368961 - DNA, 25 bp, Homo sapien
agataatagatttgggatcgccgat

SEQ ID NO: 368962 - DNA, 25 bp, Homo sapien
cgcggattttggattagataataga

SEQ ID NO: 368963 - DNA, 25 bp, Homo sapien
aatagatttgggatcgccgattggg

SEQ ID NO: 368964 - DNA, 25 bp, Homo sapien
tcagtggtgtctgctactccatact

SEQ ID NO: 368965 - DNA, 25 bp, Homo sapien
ctactccatactggggggtgccagg

SEQ ID NO: 368966 - DNA, 25 bp, Homo sapien
tcctcagtggtgtctgctactccat

SEQ ID NO: 368967 - DNA, 25 bp, Homo sapien
gtggtgtctgctactccatactggg

SEQ ID NO: 368968 - DNA, 25 bp, Homo sapien
tggccgggtacccctctgagatgaa

SEQ ID NO: 368969 - DNA, 25 bp, Homo sapien
actgaattcccttcctgaggtatag

SEQ ID NO: 368970 - DNA, 25 bp, Homo sapien
ttcccttcctgaggtatagtgaaaa

SEQ ID NO: 368971 - DNA, 25 bp, Homo sapien
tttccactgaattcccttcctgagg

SEQ ID NO: 368972 - DNA, 25 bp, Homo sapien
cctgaggtatagtgaaaatttccat

SEQ ID NO: 368973 - DNA, 25 bp, Homo sapien
ttgatgtaagtacttgctttacaca

SEQ ID NO: 368974 - DNA, 25 bp, Homo sapien
gtaagtacttgctttacacagtttg

SEQ ID NO: 368975 - DNA, 25 bp, Homo sapien
taagatcaaccaccatggactgaac

SEQ ID NO: 368976 - DNA, 25 bp, Homo sapien
gatgtaagtacttgctttacacagt

SEQ ID NO: 368977 - DNA, 25 bp, Homo sapien
cagtcaatcataagatccacatctg

SEQ ID NO: 368978 - DNA, 25 bp, Homo sapien
ccttgagaatggcttacttggatta

SEQ ID NO: 368979 - DNA, 25 bp, Homo sapien
tgcaggctgactgccccttgagaat

SEQ ID NO: 368980 - DNA, 25 bp, Homo sapien
agaaacaaggcagtcaatcataaga

SEQ ID NO: 368981 - DNA, 25 bp, Homo sapien
taaacttggttgttgtgagggctta

SEQ ID NO: 368982 - DNA, 25 bp, Homo sapien
taccagcacatagtgaaatgtagaa

SEQ ID NO: 368983 - DNA, 25 bp, Homo sapien
gtgaatttaccagcacatagtgaaa

SEQ ID NO: 368984 - DNA, 25 bp, Homo sapien
ggagtgaatttaccagcacatagtg

SEQ ID NO: 368985 - DNA, 25 bp, Homo sapien
gaatttaccagcacatagtgaaatg

SEQ ID NO: 368986 - DNA, 25 bp, Homo sapien
ggattccacaaatcaatgctatcta

SEQ ID NO: 368987 - DNA, 25 bp, Homo sapien
catcaggattccacaaatcaatgct

SEQ ID NO: 368988 - DNA, 25 bp, Homo sapien
tccacaaatcaatgctatctaactg

SEQ ID NO: 368989 - DNA, 25 bp, Homo sapien
caggagcatcaggattccacaaatc

SEQ ID NO: 368990 - DNA, 25 bp, Homo sapien
ctctgccccaggcagcacttctgaa

SEQ ID NO: 368991 - DNA, 25 bp, Homo sapien
gccccaggcagcacttctgaaacaa

SEQ ID NO: 368992 - DNA, 25 bp, Homo sapien
gatcctctgccccaggcagcacttc

SEQ ID NO: 368993 - DNA, 25 bp, Homo sapien
tgtgtgtggtcattggcttcccagg

SEQ ID NO: 368994 - DNA, 25 bp, Homo sapien
acgttggcgatctgcgtgaggtggc

SEQ ID NO: 368995 - DNA, 25 bp, Homo sapien
tctgcgtgaggtggcctatgttccc

SEQ ID NO: 368996 - DNA, 25 bp, Homo sapien
cgatctgcgtgaggtggcctatgtt

SEQ ID NO: 368997 - DNA, 25 bp, Homo sapien
ttggcgatctgcgtgaggtggccta

SEQ ID NO: 368998 - DNA, 25 bp, Homo sapien
ttagggaaagcaccctcaatgtcct

SEQ ID NO: 368999 - DNA, 25 bp, Homo sapien
aaagttggccgtcatctgctggatc

SEQ ID NO: 369000 - DNA, 25 bp, Homo sapien
tgttgttgtcatggtctgcaaactc

SEQ ID NO: 369001 - DNA, 25 bp, Homo sapien
tgtcatggtctgcaaactcctcatc

SEQ ID NO: 369002 - DNA, 25 bp, Homo sapien
gaagccaaactgatccacaaagttg

SEQ ID NO: 369003 - DNA, 25 bp, Homo sapien
tggtgctcatctggggcttcaacgc

SEQ ID NO: 369004 - DNA, 25 bp, Homo sapien
gctcatctggggcttcaacgctcct

SEQ ID NO: 369005 - DNA, 25 bp, Homo sapien
ggcctcagcaccctcatgcaactgg

SEQ ID NO: 369006 - DNA, 25 bp, Homo sapien
ctcagcaccctcatgcaactggaaa

SEQ ID NO: 369007 - DNA, 25 bp, Homo sapien
ctccgcgatcctgtcaaatggggcg

SEQ ID NO: 369008 - DNA, 25 bp, Homo sapien
taaaacgccaaggtcagtttccaga

SEQ ID NO: 369009 - DNA, 25 bp, Homo sapien
cagagtaaaacgccaaggtcagttt

SEQ ID NO: 369010 - DNA, 25 bp, Homo sapien
ctgcagagtaaaacgccaaggtcag

SEQ ID NO: 369011 - DNA, 25 bp, Homo sapien
aaacgccaaggtcagtttccagagg

SEQ ID NO: 369012 - DNA, 25 bp, Homo sapien
cacagcaagtgtcgctgtcctccga

SEQ ID NO: 369013 - DNA, 25 bp, Homo sapien
tgtcctcgttctcatcaaagtgctg

SEQ ID NO: 369014 - DNA, 25 bp, Homo sapien
tgcagcaggcctcagagccgcgctg

SEQ ID NO: 369015 - DNA, 25 bp, Homo sapien
caaagtgctggatgcggtcgctgca

SEQ ID NO: 369016 - DNA, 25 bp, Homo sapien
gttttgtgtccatcagagagctgca

SEQ ID NO: 369017 - DNA, 25 bp, Homo sapien
aggctttctcgaggccttggctctg

SEQ ID NO: 369018 - DNA, 25 bp, Homo sapien
ggctgtgttttgtgtccatcagaga

SEQ ID NO: 369019 - DNA, 25 bp, Homo sapien
tcagcctggctgtgttttgtgtcca

SEQ ID NO: 369020 - DNA, 25 bp, Homo sapien
cacacggaggtacacggaggtacat

SEQ ID NO: 369021 - DNA, 25 bp, Homo sapien
tgacacacacggaggtacacggagg

SEQ ID NO: 369022 - DNA, 25 bp, Homo sapien
acacacacggaggtacacggaggta

SEQ ID NO: 369023 - DNA, 25 bp, Homo sapien
cacacacggaggtacacggaggtac

SEQ ID NO: 369024 - DNA, 25 bp, Homo sapien
ctgaaggatgccagggaccttcttc

SEQ ID NO: 369025 - DNA, 25 bp, Homo sapien
tcactgaaggatgccagggaccttc

SEQ ID NO: 369026 - DNA, 25 bp, Homo sapien
actgaaggatgccagggaccttctt

SEQ ID NO: 369027 - DNA, 25 bp, Homo sapien
cactgaaggatgccagggaccttct

SEQ ID NO: 369028 - DNA, 25 bp, Homo sapien
acagacatggcctgctggtcaacag

SEQ ID NO: 369029 - DNA, 25 bp, Homo sapien
ggaactctgtatgactttcaacccg

SEQ ID NO: 369030 - DNA, 25 bp, Homo sapien
aggaatgaagcccacgcaggaactc

SEQ ID NO: 369031 - DNA, 25 bp, Homo sapien
gatgcaccgccaggtgtgaaaggca

SEQ ID NO: 369032 - DNA, 25 bp, Homo sapien
agtcttcaaacccaagttgcaatgg

SEQ ID NO: 369033 - DNA, 25 bp, Homo sapien
taaagctttcgggtgattatagcac

SEQ ID NO: 369034 - DNA, 25 bp, Homo sapien
cacccttggctgcatatttcaataa

SEQ ID NO: 369035 - DNA, 25 bp, Homo sapien
gagttgcggcctttcagtcttgatt

SEQ ID NO: 369036 - DNA, 25 bp, Homo sapien
tggagtcttagctataaatcattca

SEQ ID NO: 369037 - DNA, 25 bp, Homo sapien
ggacacaaggcaatgaagccctaac

SEQ ID NO: 369038 - DNA, 25 bp, Homo sapien
aatcattcaatgccagcaggtcaca

SEQ ID NO: 369039 - DNA, 25 bp, Homo sapien
gcagaatcaccgaagtctcccggag

SEQ ID NO: 369040 - DNA, 25 bp, Homo sapien
ttctaatgacatatgaaatagaagc

SEQ ID NO: 369041 - DNA, 25 bp, Homo sapien
ggtgccttgcactaccagatctgac

SEQ ID NO: 369042 - DNA, 25 bp, Homo sapien
tgtgcgaatctatcaaactccctgg

SEQ ID NO: 369043 - DNA, 25 bp, Homo sapien
tttacatagtttacacaggctggag

SEQ ID NO: 369044 - DNA, 25 bp, Homo sapien
taactccgtgcagtgtaaggtggct

SEQ ID NO: 369045 - DNA, 25 bp, Homo sapien
caattatacatagagtaagccgtct

SEQ ID NO: 369046 - DNA, 25 bp, Homo sapien
gcagtgcataatctgatagtcccag

SEQ ID NO: 369047 - DNA, 25 bp, Homo sapien
tacctgaattcttttatacccactg

SEQ ID NO: 369048 - DNA, 25 bp, Homo sapien
taagccgtctgaagttatcccacca

SEQ ID NO: 369049 - DNA, 25 bp, Homo sapien
catttcttactgtgaatccagcttc

SEQ ID NO: 369050 - DNA, 25 bp, Homo sapien
aatagtcaactacttaataaggatg

SEQ ID NO: 369051 - DNA, 25 bp, Homo sapien
ttttacatataagcaccacaataca

SEQ ID NO: 369052 - DNA, 25 bp, Homo sapien
ccacaatacaatcttattggtttgc

SEQ ID NO: 369053 - DNA, 25 bp, Homo sapien
tttttgtgaaatcgcttgagcagga

SEQ ID NO: 369054 - DNA, 25 bp, Homo sapien
cagcagtgtactttaatttctccct

SEQ ID NO: 369055 - DNA, 25 bp, Homo sapien
tttattagctattcatgaaccaggc

SEQ ID NO: 369056 - DNA, 25 bp, Homo sapien
taatacaccactttgcatacagcag

SEQ ID NO: 369057 - DNA, 25 bp, Homo sapien
tattctttctttggccacgtacagt

SEQ ID NO: 369058 - DNA, 25 bp, Homo sapien
ctatagttaaggtgcacacctggct

SEQ ID NO: 369059 - DNA, 25 bp, Homo sapien
gctttctaagctaaactgtctactg

SEQ ID NO: 369060 - DNA, 25 bp, Homo sapien
caaaagtatgactattacagtgcct

SEQ ID NO: 369061 - DNA, 25 bp, Homo sapien
gtttctgggcactctatcacattcc

SEQ ID NO: 369062 - DNA, 25 bp, Homo sapien
caccactctacttgatagtcgtaca

SEQ ID NO: 369063 - DNA, 25 bp, Homo sapien
tctatgagtctatttcttgaaaaca

SEQ ID NO: 369064 - DNA, 25 bp, Homo sapien
ggacatccaattgtttagcagcatt

SEQ ID NO: 369065 - DNA, 25 bp, Homo sapien
gtcccggtttctggccagcttgggc

SEQ ID NO: 369066 - DNA, 25 bp, Homo sapien
gtgagtgccttcactgaaactggcc

SEQ ID NO: 369067 - DNA, 25 bp, Homo sapien
ccaggtcccggtttctggccagctt

SEQ ID NO: 369068 - DNA, 25 bp, Homo sapien
cagcagttcctgtggagtgaggagc

SEQ ID NO: 369069 - DNA, 25 bp, Homo sapien
tatggagtccaggaccatctggccc

SEQ ID NO: 369070 - DNA, 25 bp, Homo sapien
ggtctatggagtccaggaccatctg

SEQ ID NO: 369071 - DNA, 25 bp, Homo sapien
acgtggtctatggagtccaggacca

SEQ ID NO: 369072 - DNA, 25 bp, Homo sapien
atggagtccaggaccatctggcccc

SEQ ID NO: 369073 - DNA, 25 bp, Homo sapien
caacttagactttaagcaggagtgt

SEQ ID NO: 369074 - DNA, 25 bp, Homo sapien
acttagactttaagcaggagtgtaa

SEQ ID NO: 369075 - DNA, 25 bp, Homo sapien
cttagactttaagcaggagtgtaaa

SEQ ID NO: 369076 - DNA, 25 bp, Homo sapien
gcaacttagactttaagcaggagtg

SEQ ID NO: 369077 - DNA, 25 bp, Homo sapien
caatagtagctatctcataggacac

SEQ ID NO: 369078 - DNA, 25 bp, Homo sapien
cataggacaccatcgtgatgcttaa

SEQ ID NO: 369079 - DNA, 25 bp, Homo sapien
tagctctgattgctcattgccttaa

SEQ ID NO: 369080 - DNA, 25 bp, Homo sapien
tgagtcctactttaaaccctgtcac

SEQ ID NO: 369081 - DNA, 25 bp, Homo sapien
tgaccactttcacatggccactggc

SEQ ID NO: 369082 - DNA, 25 bp, Homo sapien
ctgtatcaaaggtgttctattttct

SEQ ID NO: 369083 - DNA, 25 bp, Homo sapien
tgtcacagatatcaatctggcattt

SEQ ID NO: 369084 - DNA, 25 bp, Homo sapien
tgttaaccaggagagtgaccacttt

SEQ ID NO: 369085 - DNA, 25 bp, Homo sapien
tgcttcaatatctgcaccattgaaa

SEQ ID NO: 369086 - DNA, 25 bp, Homo sapien
ttcaatatctgcaccattgaaaagc

SEQ ID NO: 369087 - DNA, 25 bp, Homo sapien
tcaatatctgcaccattgaaaagca

SEQ ID NO: 369088 - DNA, 25 bp, Homo sapien
ggcgctatgttccagcagaataaca

SEQ ID NO: 369089 - DNA, 25 bp, Homo sapien
gcaggcgtcttcagggcggtaaggc

SEQ ID NO: 369090 - DNA, 25 bp, Homo sapien
agcgtccagtagtcccacgcggtct

SEQ ID NO: 369091 - DNA, 25 bp, Homo sapien
acgcggtctccctcaaactgaaaca

SEQ ID NO: 369092 - DNA, 25 bp, Homo sapien
aaacaagccccaccctgcgtagctt

SEQ ID NO: 369093 - DNA, 25 bp, Homo sapien
gcagcctatgcagagacacgttggg

SEQ ID NO: 369094 - DNA, 25 bp, Homo sapien
tgtcctaaccgatccgcgaccaagt

SEQ ID NO: 369095 - DNA, 25 bp, Homo sapien
caaactcccaagttgtcttttgact

SEQ ID NO: 369096 - DNA, 25 bp, Homo sapien
tcttttgactctgttgcagcctatg

SEQ ID NO: 369097 - DNA, 25 bp, Homo sapien
tcagcggagttagatggcagcaaag

SEQ ID NO: 369098 - DNA, 25 bp, Homo sapien
taaggatccaactaggtctgtccgc

SEQ ID NO: 369099 - DNA, 25 bp, Homo sapien
cgccgggtccactagatgtctgcag

SEQ ID NO: 369100 - DNA, 25 bp, Homo sapien
tcaaccagcgaacagtggaggaacg

SEQ ID NO: 369101 - DNA, 25 bp, Homo sapien
tttatatatttttaggcagagtctt

SEQ ID NO: 369102 - DNA, 25 bp, Homo sapien
tatatatttttaggcagagtcttgc

SEQ ID NO: 369103 - DNA, 25 bp, Homo sapien
tatttatatatttttaggcagagtc

SEQ ID NO: 369104 - DNA, 25 bp, Homo sapien
tgctctgttgcctaggctggagtgc

SEQ ID NO: 369105 - DNA, 25 bp, Homo sapien
tcatcgggagaagtagctttagaag

SEQ ID NO: 369106 - DNA, 25 bp, Homo sapien
gcacctgtgagcaagagtcatacac

SEQ ID NO: 369107 - DNA, 25 bp, Homo sapien
gctttagaagttaggtgatgaattc

SEQ ID NO: 369108 - DNA, 25 bp, Homo sapien
cactgttgactcctaagtgcccgga

SEQ ID NO: 369109 - DNA, 25 bp, Homo sapien
aaaactagaagtcaacaacaaggtg

SEQ ID NO: 369110 - DNA, 25 bp, Homo sapien
gcctgacagtgtagctgcaaactct

SEQ ID NO: 369111 - DNA, 25 bp, Homo sapien
gacgcaaagctaaactaactgctaa

SEQ ID NO: 369112 - DNA, 25 bp, Homo sapien
taagtagctaagaacaattgctctg

SEQ ID NO: 369113 - DNA, 25 bp, Homo sapien
gatatagatgccaatacaatagctg

SEQ ID NO: 369114 - DNA, 25 bp, Homo sapien
taggtctaaagggagatatagatgc

SEQ ID NO: 369115 - DNA, 25 bp, Homo sapien
gcactgaacagattgtctagataga

SEQ ID NO: 369116 - DNA, 25 bp, Homo sapien
actggagcaccgagatatataatat

SEQ ID NO: 369117 - DNA, 25 bp, Homo sapien
caggagccccagaaagattaaaact

SEQ ID NO: 369118 - DNA, 25 bp, Homo sapien
ggtaagccatcgctaccagaattct

SEQ ID NO: 369119 - DNA, 25 bp, Homo sapien
gagatacagacctgtccaagggagg

SEQ ID NO: 369120 - DNA, 25 bp, Homo sapien
tagagtgcacttgtccagattatga

SEQ ID NO: 369121 - DNA, 25 bp, Homo sapien
aacttcgggtcatcccaccaactgc

SEQ ID NO: 369122 - DNA, 25 bp, Homo sapien
gaggctgccacagtttcacggtctc

SEQ ID NO: 369123 - DNA, 25 bp, Homo sapien
ctgaggctgccacagtttcacggtc

SEQ ID NO: 369124 - DNA, 25 bp, Homo sapien
caacttcgggtcatcccaccaactg

SEQ ID NO: 369125 - DNA, 25 bp, Homo sapien
tgtgtcaaaatcagccctgtaaatc

SEQ ID NO: 369126 - DNA, 25 bp, Homo sapien
gtgagctaacatgcctgacagaatt

SEQ ID NO: 369127 - DNA, 25 bp, Homo sapien
caatctagatagagcttgagaccat

SEQ ID NO: 369128 - DNA, 25 bp, Homo sapien
ttgagaccatgacctaaaccactgt

SEQ ID NO: 369129 - DNA, 25 bp, Homo sapien
gcgcctggccggagaacaatggttt

SEQ ID NO: 369130 - DNA, 25 bp, Homo sapien
aagttgccccatcacgacctgttga

SEQ ID NO: 369131 - DNA, 25 bp, Homo sapien
gcaaaaacttcgcatagtacaccag

SEQ ID NO: 369132 - DNA, 25 bp, Homo sapien
tattacaaaagttaggagctctctc

SEQ ID NO: 369133 - DNA, 25 bp, Homo sapien
atgctgaggaaaaaccacggaccgc

SEQ ID NO: 369134 - DNA, 25 bp, Homo sapien
tgcaaaagcagatgggagcccttct

SEQ ID NO: 369135 - DNA, 25 bp, Homo sapien
caagttatcagggttcacaatggat

SEQ ID NO: 369136 - DNA, 25 bp, Homo sapien
atattccagggtgagctattgtccc

SEQ ID NO: 369137 - DNA, 25 bp, Homo sapien
atgtggtgataggttgagcaaaagc

SEQ ID NO: 369138 - DNA, 25 bp, Homo sapien
cagagtagatgttgaatgcttttgt

SEQ ID NO: 369139 - DNA, 25 bp, Homo sapien
ttttcaagtaaagaagcttatatat

SEQ ID NO: 369140 - DNA, 25 bp, Homo sapien
tagatagaaggaatgagttcaagag

SEQ ID NO: 369141 - DNA, 25 bp, Homo sapien
gattcataatatattgcctggtgag

SEQ ID NO: 369142 - DNA, 25 bp, Homo sapien
tataacattctcaaagatagctttg

SEQ ID NO: 369143 - DNA, 25 bp, Homo sapien
aatgtccataacaaccaaagggatc

SEQ ID NO: 369144 - DNA, 25 bp, Homo sapien
gatgtcttataagagtatgattcca

SEQ ID NO: 369145 - DNA, 25 bp, Homo sapien
atctccccctttggtgctcgctata

SEQ ID NO: 369146 - DNA, 25 bp, Homo sapien
tgggtgaggttgctacactacactt

SEQ ID NO: 369147 - DNA, 25 bp, Homo sapien
tccccctttggtgctcgctataaat

SEQ ID NO: 369148 - DNA, 25 bp, Homo sapien
tgcagctgccctagagaggtgaagc

SEQ ID NO: 369149 - DNA, 25 bp, Homo sapien
ttatttatactacatgttacacata

SEQ ID NO: 369150 - DNA, 25 bp, Homo sapien
taggtgcttccagtagagtaggacc

SEQ ID NO: 369151 - DNA, 25 bp, Homo sapien
cttagggctgagagggattatgcac

SEQ ID NO: 369152 - DNA, 25 bp, Homo sapien
tatgcacgacagaggtgacttcaga

SEQ ID NO: 369153 - DNA, 25 bp, Homo sapien
gagtaggacctcagaccttagggct

SEQ ID NO: 369154 - DNA, 25 bp, Homo sapien
tttatctggggtgagaacttacagt

SEQ ID NO: 369155 - DNA, 25 bp, Homo sapien
gttttcaagatataagcatatatca

SEQ ID NO: 369156 - DNA, 25 bp, Homo sapien
ttggttgatttatctggggtgagaa

SEQ ID NO: 369157 - DNA, 25 bp, Homo sapien
gatttatctggggtgagaacttaca

SEQ ID NO: 369158 - DNA, 25 bp, Homo sapien
taatccaccctctgtgtacatgggc

SEQ ID NO: 369159 - DNA, 25 bp, Homo sapien
gggcagctaccactttcgtcattta

SEQ ID NO: 369160 - DNA, 25 bp, Homo sapien
tcctcagtcgagaggcagcacacaa

SEQ ID NO: 369161 - DNA, 25 bp, Homo sapien
aaaatgaggcctaatgcagcatagc

SEQ ID NO: 369162 - DNA, 25 bp, Homo sapien
tgtccaaacactaagcatcagctga

SEQ ID NO: 369163 - DNA, 25 bp, Homo sapien
tctgcatgtgtgagttgtccaaaca

SEQ ID NO: 369164 - DNA, 25 bp, Homo sapien
ttttagttgactgtggtgcttcctc

SEQ ID NO: 369165 - DNA, 25 bp, Homo sapien
tatagaaatggttgtgtaggttgct

SEQ ID NO: 369166 - DNA, 25 bp, Homo sapien
tgatatagatgtacatgtttgctgt

SEQ ID NO: 369167 - DNA, 25 bp, Homo sapien
tcttctcagttctacgtcctcacaa

SEQ ID NO: 369168 - DNA, 25 bp, Homo sapien
tgacatttcatatgctcttctcagt

SEQ ID NO: 369169 - DNA, 25 bp, Homo sapien
tcctcacaatcagaggttttcccac

SEQ ID NO: 369170 - DNA, 25 bp, Homo sapien
tctctaaggaaacatatggtcacag

SEQ ID NO: 369171 - DNA, 25 bp, Homo sapien
catattaacagactggtgagagtcc

SEQ ID NO: 369172 - DNA, 25 bp, Homo sapien
ttgaagacgacatgctccagaagtg

SEQ ID NO: 369173 - DNA, 25 bp, Homo sapien
caaccccaagaatatgctgacagga

SEQ ID NO: 369174 - DNA, 25 bp, Homo sapien
catgacacaatggtgccctgggttt

SEQ ID NO: 369175 - DNA, 25 bp, Homo sapien
ccacagtggattggagagatacaaa

SEQ ID NO: 369176 - DNA, 25 bp, Homo sapien
ggtgatgccatttaatactctgaga

SEQ ID NO: 369177 - DNA, 25 bp, Homo sapien
gaagggcactatcaagggtgaatcc

SEQ ID NO: 369178 - DNA, 25 bp, Homo sapien
ttattcagcatcaaacttattcagg

SEQ ID NO: 369179 - DNA, 25 bp, Homo sapien
tttttggctattaaattgattcaat

SEQ ID NO: 369180 - DNA, 25 bp, Homo sapien
tgaacactgaatgttctaaaataat

SEQ ID NO: 369181 - DNA, 25 bp, Homo sapien
tcgtcaagacccatcttttattgag

SEQ ID NO: 369182 - DNA, 25 bp, Homo sapien
aacttcccttcttgcttcattcatt

SEQ ID NO: 369183 - DNA, 25 bp, Homo sapien
acttcccttcttgcttcattcattc

SEQ ID NO: 369184 - DNA, 25 bp, Homo sapien
tctccggctttacggcgccgcctgg

SEQ ID NO: 369185 - DNA, 25 bp, Homo sapien
cggtctcggccgtagaatgaagtag

SEQ ID NO: 369186 - DNA, 25 bp, Homo sapien
atgaagtaggagctgagaccccgcc

SEQ ID NO: 369187 - DNA, 25 bp, Homo sapien
cctccggtctcggccgtagaatgaa

SEQ ID NO: 369188 - DNA, 25 bp, Homo sapien
ggaacagctcgtacagaatctcttc

SEQ ID NO: 369189 - DNA, 25 bp, Homo sapien
agctcgtacagaatctcttcccgaa

SEQ ID NO: 369190 - DNA, 25 bp, Homo sapien
attcccaacaaacacggtcctgtcg

SEQ ID NO: 369191 - DNA, 25 bp, Homo sapien
tacagaatctcttcccgaactcggg

SEQ ID NO: 369192 - DNA, 25 bp, Homo sapien
tgcatatagtcactttggttagtgg

SEQ ID NO: 369193 - DNA, 25 bp, Homo sapien
ctatggcataagacaccgattctgg

SEQ ID NO: 369194 - DNA, 25 bp, Homo sapien
tggtcttccatataaacgaattcca

SEQ ID NO: 369195 - DNA, 25 bp, Homo sapien
gatactgcacgttaattggtcttcc

SEQ ID NO: 369196 - DNA, 25 bp, Homo sapien
tagttgtgtgaatttatcttaacac

SEQ ID NO: 369197 - DNA, 25 bp, Homo sapien
tgtgaatttatcttaacacagctct

SEQ ID NO: 369198 - DNA, 25 bp, Homo sapien
gttgtgtgaatttatcttaacacag

SEQ ID NO: 369199 - DNA, 25 bp, Homo sapien
tgtgtgaatttatcttaacacagct

SEQ ID NO: 369200 - DNA, 25 bp, Homo sapien
tcatgggctcggaaaaaaaagatat

SEQ ID NO: 369201 - DNA, 25 bp, Homo sapien
atcacttttcatgggctcggaaaaa

SEQ ID NO: 369202 - DNA, 25 bp, Homo sapien
ttcatgggctcggaaaaaaaagata

SEQ ID NO: 369203 - DNA, 25 bp, Homo sapien
tctatcacttttcatgggctcggaa

SEQ ID NO: 369204 - DNA, 25 bp, Homo sapien
catggcagaagtcatcacaggcagg

SEQ ID NO: 369205 - DNA, 25 bp, Homo sapien
agctcacgagagatggccaaactgg

SEQ ID NO: 369206 - DNA, 25 bp, Homo sapien
gatctacttgtgataacaaacccac

SEQ ID NO: 369207 - DNA, 25 bp, Homo sapien
aaaagagatgtatttcggctcatgg

SEQ ID NO: 369208 - DNA, 25 bp, Homo sapien
gcatgggaaaggaagatctgcccac

SEQ ID NO: 369209 - DNA, 25 bp, Homo sapien
tgggaaaggaagatctgcccaccaa

SEQ ID NO: 369210 - DNA, 25 bp, Homo sapien
tgcatgggaaaggaagatctgccca

SEQ ID NO: 369211 - DNA, 25 bp, Homo sapien
gaaaggaagatctgcccaccaacat

SEQ ID NO: 369212 - DNA, 25 bp, Homo sapien
tgaggtaaagaagtattattaattg

SEQ ID NO: 369213 - DNA, 25 bp, Homo sapien
cttgaggtaaagaagtattattaat

SEQ ID NO: 369214 - DNA, 25 bp, Homo sapien
tgcagtatgtcgtcactgccgtcca

SEQ ID NO: 369215 - DNA, 25 bp, Homo sapien
catgtctggccactgcaaacgtctt

SEQ ID NO: 369216 - DNA, 25 bp, Homo sapien
tactcaaatttcacttggactgcag

SEQ ID NO: 369217 - DNA, 25 bp, Homo sapien
tcccagtttagatttgggcaccata

SEQ ID NO: 369218 - DNA, 25 bp, Homo sapien
actattaggaagtggagctgtcatc

SEQ ID NO: 369219 - DNA, 25 bp, Homo sapien
gttgtctgtgctactatcactatca

SEQ ID NO: 369220 - DNA, 25 bp, Homo sapien
ttgtctctttcgtttattcatctga

SEQ ID NO: 369221 - DNA, 25 bp, Homo sapien
ggctacattcgttgcctctgttgtt

SEQ ID NO: 369222 - DNA, 25 bp, Homo sapien
gaacttttggctacattcgttgcct

SEQ ID NO: 369223 - DNA, 25 bp, Homo sapien
gaaagcttttgtcgttcaaggcaaa

SEQ ID NO: 369224 - DNA, 25 bp, Homo sapien
caatagtctatttgttgccaatggg

SEQ ID NO: 369225 - DNA, 25 bp, Homo sapien
gaatcccagcctatttgtagttgag

SEQ ID NO: 369226 - DNA, 25 bp, Homo sapien
tctcaaaccttgctagcaaaagagg

SEQ ID NO: 369227 - DNA, 25 bp, Homo sapien
ggcattgctgactttactggtgctc

SEQ ID NO: 369228 - DNA, 25 bp, Homo sapien
gacagacagtctaggttgatattgc

SEQ ID NO: 369229 - DNA, 25 bp, Homo sapien
aatagtgaacactgtcccgtggcac

SEQ ID NO: 369230 - DNA, 25 bp, Homo sapien
gatattgctgcaaatttgaaactga

SEQ ID NO: 369231 - DNA, 25 bp, Homo sapien
cggtgcgggcagtcagctttcacct

SEQ ID NO: 369232 - DNA, 25 bp, Homo sapien
cttagtccctgcctttcagtcctac

SEQ ID NO: 369233 - DNA, 25 bp, Homo sapien
acggtgggaggacacgcactccgcc

SEQ ID NO: 369234 - DNA, 25 bp, Homo sapien
agttcagcgccagcacggtgggagg

SEQ ID NO: 369235 - DNA, 25 bp, Homo sapien
cgcggacccgctgataggagccgcc

SEQ ID NO: 369236 - DNA, 25 bp, Homo sapien
ctctgaggattgagtgtgtacgccg

SEQ ID NO: 369237 - DNA, 25 bp, Homo sapien
ttggctactgaaacaagggctcgtc

SEQ ID NO: 369238 - DNA, 25 bp, Homo sapien
tgtacgccggtctgtctgtcccgtg

SEQ ID NO: 369239 - DNA, 25 bp, Homo sapien
cacgttcagggttcgaggactcacc

SEQ ID NO: 369240 - DNA, 25 bp, Homo sapien
ccaggaatatgtcactttactgaaa

SEQ ID NO: 369241 - DNA, 25 bp, Homo sapien
accaggaatatgtcactttactgaa

SEQ ID NO: 369242 - DNA, 25 bp, Homo sapien
cacaattcatatctaacaaaaaggt

SEQ ID NO: 369243 - DNA, 25 bp, Homo sapien
ataagaagggattttccgtaatcat

SEQ ID NO: 369244 - DNA, 25 bp, Homo sapien
tctctttccaaaggtctcttatagc

SEQ ID NO: 369245 - DNA, 25 bp, Homo sapien
cacgcagtgcagaaggaatcacttt

SEQ ID NO: 369246 - DNA, 25 bp, Homo sapien
tttttcaaagatgggacacgcagtg

SEQ ID NO: 369247 - DNA, 25 bp, Homo sapien
caaaggtctcttatagcctaaagta

SEQ ID NO: 369248 - DNA, 25 bp, Homo sapien
ttcattatgagtgggctagtgaagg

SEQ ID NO: 369249 - DNA, 25 bp, Homo sapien
ggctagtgaaggacaaaatatcagc

SEQ ID NO: 369250 - DNA, 25 bp, Homo sapien
cacaatgcatagagtagagatggtt

SEQ ID NO: 369251 - DNA, 25 bp, Homo sapien
atcaggatggatttaaaggtgttcc

SEQ ID NO: 369252 - DNA, 25 bp, Homo sapien
tgcccgtggacgtcagaactcaagg

SEQ ID NO: 369253 - DNA, 25 bp, Homo sapien
cgcagtcgacctagaacagttttgg

SEQ ID NO: 369254 - DNA, 25 bp, Homo sapien
cagtagactgagtaaggatgatccc

SEQ ID NO: 369255 - DNA, 25 bp, Homo sapien
cagttttggcatgcataggtgctca

SEQ ID NO: 369256 - DNA, 25 bp, Homo sapien
tgtcacttttattcataaccaattt

SEQ ID NO: 369257 - DNA, 25 bp, Homo sapien
cacttttattcataaccaatttctt

SEQ ID NO: 369258 - DNA, 25 bp, Homo sapien
atgatcaggatgattagggccaatg

SEQ ID NO: 369259 - DNA, 25 bp, Homo sapien
atttcctcttaagtttgtgacagca

SEQ ID NO: 369260 - DNA, 25 bp, Homo sapien
ttcatcagaaaagtcgagacataga

SEQ ID NO: 369261 - DNA, 25 bp, Homo sapien
cttttagtatggcccacaggtgctg

SEQ ID NO: 369262 - DNA, 25 bp, Homo sapien
caaatacagggaaacatgacaacca

SEQ ID NO: 369263 - DNA, 25 bp, Homo sapien
catgacaaccagaacgtaagtaggg

SEQ ID NO: 369264 - DNA, 25 bp, Homo sapien
tgtgagtacgaggttattttctggt

SEQ ID NO: 369265 - DNA, 25 bp, Homo sapien
catggcaggcccatcaaataattaa

SEQ ID NO: 369266 - DNA, 25 bp, Homo sapien
ccactggcttgtgagtacgaggtta

SEQ ID NO: 369267 - DNA, 25 bp, Homo sapien
atggcaggcccatcaaataattaac

SEQ ID NO: 369268 - DNA, 25 bp, Homo sapien
tagtattgtcaaagtgttacacaca

SEQ ID NO: 369269 - DNA, 25 bp, Homo sapien
gtttagtattgtcaaagtgttacac

SEQ ID NO: 369270 - DNA, 25 bp, Homo sapien
tttctttacttgcttaatttgatat

SEQ ID NO: 369271 - DNA, 25 bp, Homo sapien
tgttaaatgcttatgagagtttagt

SEQ ID NO: 369272 - DNA, 25 bp, Homo sapien
gccattccagccaaaatctgagctg

SEQ ID NO: 369273 - DNA, 25 bp, Homo sapien
cgttgatattgctgaagaatcagag

SEQ ID NO: 369274 - DNA, 25 bp, Homo sapien
agaagtgccactgcatagccatagc

SEQ ID NO: 369275 - DNA, 25 bp, Homo sapien
gctgaggtgagcatgttaaaacgtt

SEQ ID NO: 369276 - DNA, 25 bp, Homo sapien
caagtccctgatgaagtatggccaa

SEQ ID NO: 369277 - DNA, 25 bp, Homo sapien
tccctgatgaagtatggccaatttc

SEQ ID NO: 369278 - DNA, 25 bp, Homo sapien
gtcacaagtccctgatgaagtatgg

SEQ ID NO: 369279 - DNA, 25 bp, Homo sapien
attctagtcacaagtccctgatgaa

SEQ ID NO: 369280 - DNA, 25 bp, Homo sapien
aatgatcttcaaccagaagtatgag

SEQ ID NO: 369281 - DNA, 25 bp, Homo sapien
tcatttaatgtagagccgcaagggc

SEQ ID NO: 369282 - DNA, 25 bp, Homo sapien
agaaatggtaaagctgaaggtggca

SEQ ID NO: 369283 - DNA, 25 bp, Homo sapien
ggtggcagcacataacacttataag

SEQ ID NO: 369284 - DNA, 25 bp, Homo sapien
catgcaatattaaccatgacacttt

SEQ ID NO: 369285 - DNA, 25 bp, Homo sapien
catcatgcaatattaaccatgacac

SEQ ID NO: 369286 - DNA, 25 bp, Homo sapien
cccacatcatgcaatattaaccatg

SEQ ID NO: 369287 - DNA, 25 bp, Homo sapien
atgacccacatcatgcaatattaac

SEQ ID NO: 369288 - DNA, 25 bp, Homo sapien
gagcctttaccccatgcaatgtatc

SEQ ID NO: 369289 - DNA, 25 bp, Homo sapien
gcaggccttgtacgcatttctgtac

SEQ ID NO: 369290 - DNA, 25 bp, Homo sapien
tcccaagttattctaacatcagagc

SEQ ID NO: 369291 - DNA, 25 bp, Homo sapien
cattttctgagcaggccttgtacgc

SEQ ID NO: 369292 - DNA, 25 bp, Homo sapien
gggcatctttatagttaagcaatgg

SEQ ID NO: 369293 - DNA, 25 bp, Homo sapien
tgtacaaggttatttatgtattggg

SEQ ID NO: 369294 - DNA, 25 bp, Homo sapien
aatataattaggaaagtgtacaagg

SEQ ID NO: 369295 - DNA, 25 bp, Homo sapien
tattttagagttctgtgattatggg

SEQ ID NO: 369296 - DNA, 25 bp, Homo sapien
gattgaggtttgctgtcaagtccat

SEQ ID NO: 369297 - DNA, 25 bp, Homo sapien
ctgacatcaagttaataatttcccc

SEQ ID NO: 369298 - DNA, 25 bp, Homo sapien
ggagattgaggtttgctgtcaagtc

SEQ ID NO: 369299 - DNA, 25 bp, Homo sapien
catgagttgctgacatcaagttaat

SEQ ID NO: 369300 - DNA, 25 bp, Homo sapien
cattaggatttgaaaaggggcagac

SEQ ID NO: 369301 - DNA, 25 bp, Homo sapien
ccaaaggagatatacggccattagg

SEQ ID NO: 369302 - DNA, 25 bp, Homo sapien
agatatacggccattaggatttgaa

SEQ ID NO: 369303 - DNA, 25 bp, Homo sapien
aaaggagatatacggccattaggat

SEQ ID NO: 369304 - DNA, 25 bp, Homo sapien
ttggtataacaaacacaaggactgc

SEQ ID NO: 369305 - DNA, 25 bp, Homo sapien
taaagcatttattggtataacaaac

SEQ ID NO: 369306 - DNA, 25 bp, Homo sapien
cagctaaagcatttattggtataac

SEQ ID NO: 369307 - DNA, 25 bp, Homo sapien
tttattggtataacaaacacaagga

SEQ ID NO: 369308 - DNA, 25 bp, Homo sapien
tgcgccgggcctaaagtcatatttt

SEQ ID NO: 369309 - DNA, 25 bp, Homo sapien
tcagctcctgtttgacacatgtaac

SEQ ID NO: 369310 - DNA, 25 bp, Homo sapien
cactggctgacataagatacatgct

SEQ ID NO: 369311 - DNA, 25 bp, Homo sapien
tgcacactgtctaacacatggcggg

SEQ ID NO: 369312 - DNA, 25 bp, Homo sapien
ggagggttcccatgcataaagtttg

SEQ ID NO: 369313 - DNA, 25 bp, Homo sapien
tcctgatctcgaattttgataatct

SEQ ID NO: 369314 - DNA, 25 bp, Homo sapien
gaatgcaggttaatgtcaacatgga

SEQ ID NO: 369315 - DNA, 25 bp, Homo sapien
tggaaaatacagtaagatacctagc

SEQ ID NO: 369316 - DNA, 25 bp, Homo sapien
cacagctgagatcacggttggtaac

SEQ ID NO: 369317 - DNA, 25 bp, Homo sapien
gaacactttagtggctgttaaaatg

SEQ ID NO: 369318 - DNA, 25 bp, Homo sapien
tattaaacaaagacatcgatgtgaa

SEQ ID NO: 369319 - DNA, 25 bp, Homo sapien
gttggtaactcaaacagaggaatcc

SEQ ID NO: 369320 - DNA, 25 bp, Homo sapien
agaagctcctcagtgttgagaaagt

SEQ ID NO: 369321 - DNA, 25 bp, Homo sapien
agttcgtttcaatactttgaggaag

SEQ ID NO: 369322 - DNA, 25 bp, Homo sapien
tccaaacggcccagggatatctttg

SEQ ID NO: 369323 - DNA, 25 bp, Homo sapien
ctcctgtatagttcgtttcaatact

SEQ ID NO: 369324 - DNA, 25 bp, Homo sapien
gagaaagaagcatctgtaaacccaa

SEQ ID NO: 369325 - DNA, 25 bp, Homo sapien
agaaagaagcatctgtaaacccaat

SEQ ID NO: 369326 - DNA, 25 bp, Homo sapien
ggagaaagaagcatctgtaaaccca

SEQ ID NO: 369327 - DNA, 25 bp, Homo sapien
agctgattaagaacttgttcaattc

SEQ ID NO: 369328 - DNA, 25 bp, Homo sapien
gaaagctgattaagaacttgttcaa

SEQ ID NO: 369329 - DNA, 25 bp, Homo sapien
agagaaagctgattaagaacttgtt

SEQ ID NO: 369330 - DNA, 25 bp, Homo sapien
gagaaagctgattaagaacttgttc

SEQ ID NO: 369331 - DNA, 25 bp, Homo sapien
caggcctgctgagaaacataagcca

SEQ ID NO: 369332 - DNA, 25 bp, Homo sapien
tttggcaactgctccaaatctggaa

SEQ ID NO: 369333 - DNA, 25 bp, Homo sapien
gaaggagagcacaggcttccaatac

SEQ ID NO: 369334 - DNA, 25 bp, Homo sapien
agtttgatctccctttggcaactgc

SEQ ID NO: 369335 - DNA, 25 bp, Homo sapien
gcaactgctccaaatctggaaggag

SEQ ID NO: 369336 - DNA, 25 bp, Homo sapien
gctgctttccaacatgaacatcaat

SEQ ID NO: 369337 - DNA, 25 bp, Homo sapien
acatcaatagcagacaagggatcat

SEQ ID NO: 369338 - DNA, 25 bp, Homo sapien
atcatccaggaggtagacgtcggcc

SEQ ID NO: 369339 - DNA, 25 bp, Homo sapien
ttcaaaaggcccaaggaccctatca

SEQ ID NO: 369340 - DNA, 25 bp, Homo sapien
agaaagcataaatgaaactatggct

SEQ ID NO: 369341 - DNA, 25 bp, Homo sapien
aagaaagcataaatgaaactatggc

SEQ ID NO: 369342 - DNA, 25 bp, Homo sapien
gaaagcataaatgaaactatggcta

SEQ ID NO: 369343 - DNA, 25 bp, Homo sapien
aaagcataaatgaaactatggctac

SEQ ID NO: 369344 - DNA, 25 bp, Homo sapien
gcacagtgctagatatatcccctgc

SEQ ID NO: 369345 - DNA, 25 bp, Homo sapien
tttacaaggaataatgacatgctgc

SEQ ID NO: 369346 - DNA, 25 bp, Homo sapien
tatctcagagattacgaaaaatggc

SEQ ID NO: 369347 - DNA, 25 bp, Homo sapien
caagtcattgtgagccctgagctcc

SEQ ID NO: 369348 - DNA, 25 bp, Homo sapien
tttttcttgttcactgatgacttgg

SEQ ID NO: 369349 - DNA, 25 bp, Homo sapien
catttgtggcagaagtgtgagattg

SEQ ID NO: 369350 - DNA, 25 bp, Homo sapien
cttggtgcaaattagtgagattttt

SEQ ID NO: 369351 - DNA, 25 bp, Homo sapien
taagattcatttgtggcagaagtgt

SEQ ID NO: 369352 - DNA, 25 bp, Homo sapien
gattgcactgacttgctttagagca

SEQ ID NO: 369353 - DNA, 25 bp, Homo sapien
tagttctggagttgattgcactgac

SEQ ID NO: 369354 - DNA, 25 bp, Homo sapien
ggtctagttctggagttgattgcac

SEQ ID NO: 369355 - DNA, 25 bp, Homo sapien
tgcactgacttgctttagagcatga

SEQ ID NO: 369356 - DNA, 25 bp, Homo sapien
tggtcacctcgacttctgtgaagtg

SEQ ID NO: 369357 - DNA, 25 bp, Homo sapien
gaacttgcatgtcaatcctggtcac

SEQ ID NO: 369358 - DNA, 25 bp, Homo sapien
gaagtgctgcttcaaaaaatcaggc

SEQ ID NO: 369359 - DNA, 25 bp, Homo sapien
gaaatccttgcatgactctcagaag

SEQ ID NO: 369360 - DNA, 25 bp, Homo sapien
ttttttcattgagagctgttttcct

SEQ ID NO: 369361 - DNA, 25 bp, Homo sapien
cttttttcattgagagctgttttcc

SEQ ID NO: 369362 - DNA, 25 bp, Homo sapien
ccagagccagccaaaggcttggagg

SEQ ID NO: 369363 - DNA, 25 bp, Homo sapien
tgaccacagtcagccacacccagag

SEQ ID NO: 369364 - DNA, 25 bp, Homo sapien
cacacccagagccagccaaaggctt

SEQ ID NO: 369365 - DNA, 25 bp, Homo sapien
agagccagccaaaggcttggaggta

SEQ ID NO: 369366 - DNA, 25 bp, Homo sapien
gcttcttttgcccatgcactaagcc

SEQ ID NO: 369367 - DNA, 25 bp, Homo sapien
gcccatgcactaagccatagattct

SEQ ID NO: 369368 - DNA, 25 bp, Homo sapien
gccatagattctgtccaatgctcac

SEQ ID NO: 369369 - DNA, 25 bp, Homo sapien
gcactaagccatagattctgtccaa

SEQ ID NO: 369370 - DNA, 25 bp, Homo sapien
tagtgatgacgtaggctccagagca

SEQ ID NO: 369371 - DNA, 25 bp, Homo sapien
tgaacatacatggttcgagaggcag

SEQ ID NO: 369372 - DNA, 25 bp, Homo sapien
agccagggatcctctagtgatgacg

SEQ ID NO: 369373 - DNA, 25 bp, Homo sapien
ggggaggtgcagtacattatttaac

SEQ ID NO: 369374 - DNA, 25 bp, Homo sapien
cttggtgaaacgactgatgatctgg

SEQ ID NO: 369375 - DNA, 25 bp, Homo sapien
ttggtgaaacgactgatgatctggc

SEQ ID NO: 369376 - DNA, 25 bp, Homo sapien
caaggtatgacctgagagatgccag

SEQ ID NO: 369377 - DNA, 25 bp, Homo sapien
cactttgaggttatggacttgcgca

SEQ ID NO: 369378 - DNA, 25 bp, Homo sapien
gaaccttgactggatgaactactca

SEQ ID NO: 369379 - DNA, 25 bp, Homo sapien
tagggaccactagcaatatgtgact

SEQ ID NO: 369380 - DNA, 25 bp, Homo sapien
cccacaatgaccaaaactgttccaa

SEQ ID NO: 369381 - DNA, 25 bp, Homo sapien
gagaaatagaagaacactaagggaa

SEQ ID NO: 369382 - DNA, 25 bp, Homo sapien
tcacccacagccgtaaatagtaatg

SEQ ID NO: 369383 - DNA, 25 bp, Homo sapien
aataatatccaatgtacaattcacc

SEQ ID NO: 369384 - DNA, 25 bp, Homo sapien
tcctgtcaacctccggatttgccga

SEQ ID NO: 369385 - DNA, 25 bp, Homo sapien
gaaatgacaggagaacgggaccctc

SEQ ID NO: 369386 - DNA, 25 bp, Homo sapien
tgccgagagcttgccacatagtatc

SEQ ID NO: 369387 - DNA, 25 bp, Homo sapien
tccggatttgccgagagcttgccac

SEQ ID NO: 369388 - DNA, 25 bp, Homo sapien
catgtccaaatgctctgatggtgga

SEQ ID NO: 369389 - DNA, 25 bp, Homo sapien
gtattgctggataaacctctgttca

SEQ ID NO: 369390 - DNA, 25 bp, Homo sapien
catctctttgtattgctggataaac

SEQ ID NO: 369391 - DNA, 25 bp, Homo sapien
gatggtggacactcctgataaagtc

SEQ ID NO: 369392 - DNA, 25 bp, Homo sapien
gctgaatctatagaattgccagcca

SEQ ID NO: 369393 - DNA, 25 bp, Homo sapien
gacaaaccaactattgctgaatcta

SEQ ID NO: 369394 - DNA, 25 bp, Homo sapien
aaaaagcaccattaagttgccaaga

SEQ ID NO: 369395 - DNA, 25 bp, Homo sapien
ttgccaagaaattcaagtctaacag

SEQ ID NO: 369396 - DNA, 25 bp, Homo sapien
tttcaacagcaactgcattggtttc

SEQ ID NO: 369397 - DNA, 25 bp, Homo sapien
tttcatattcacaaactctttcaac

SEQ ID NO: 369398 - DNA, 25 bp, Homo sapien
ctctttcaacagcaactgcattggt

SEQ ID NO: 369399 - DNA, 25 bp, Homo sapien
tcaacagcaactgcattggtttcaa

SEQ ID NO: 369400 - DNA, 25 bp, Homo sapien
tgttcctcagtttcatgagcaaaag

SEQ ID NO: 369401 - DNA, 25 bp, Homo sapien
ttcctcagtttcatgagcaaaagag

SEQ ID NO: 369402 - DNA, 25 bp, Homo sapien
tcagtttcatgagcaaaagaggaag

SEQ ID NO: 369403 - DNA, 25 bp, Homo sapien
cctcagtttcatgagcaaaagagga

SEQ ID NO: 369404 - DNA, 25 bp, Homo sapien
gtgatatcttgcaacgctaaaccaa

SEQ ID NO: 369405 - DNA, 25 bp, Homo sapien
cattgtaatggaggtcttctagaca

SEQ ID NO: 369406 - DNA, 25 bp, Homo sapien
ggtatcgagcctgataattaataaa

SEQ ID NO: 369407 - DNA, 25 bp, Homo sapien
caagatcatcttggtatcgagcctg

SEQ ID NO: 369408 - DNA, 25 bp, Homo sapien
aaataagcaatttgatagtgtggat

SEQ ID NO: 369409 - DNA, 25 bp, Homo sapien
tgtggatttgcctgctccagtcctg

SEQ ID NO: 369410 - DNA, 25 bp, Homo sapien
tttgatagtgtggatttgcctgctc

SEQ ID NO: 369411 - DNA, 25 bp, Homo sapien
gctctctccacaacttctaaataag

SEQ ID NO: 369412 - DNA, 25 bp, Homo sapien
tttgccatgaaggtcatgaagtcca

SEQ ID NO: 369413 - DNA, 25 bp, Homo sapien
catgaagtccaatagttgatacatc

SEQ ID NO: 369414 - DNA, 25 bp, Homo sapien
taatattaagtttgccatgaaggtc

SEQ ID NO: 369415 - DNA, 25 bp, Homo sapien
gatacatcaattccgtcaataataa

SEQ ID NO: 369416 - DNA, 25 bp, Homo sapien
tctcaggaagggactgcacaaattg

SEQ ID NO: 369417 - DNA, 25 bp, Homo sapien
cagaatatttgtttaggggatccag

SEQ ID NO: 369418 - DNA, 25 bp, Homo sapien
cagcttgctatcagaatatttgttt

SEQ ID NO: 369419 - DNA, 25 bp, Homo sapien
aaataaaacagggtgccaaagcagg

SEQ ID NO: 369420 - DNA, 25 bp, Homo sapien
ctagacagaccagctgccattgtcc

SEQ ID NO: 369421 - DNA, 25 bp, Homo sapien
acagaccagctgccattgtcccatg

SEQ ID NO: 369422 - DNA, 25 bp, Homo sapien
tagacagaccagctgccattgtccc

SEQ ID NO: 369423 - DNA, 25 bp, Homo sapien
gacagaccagctgccattgtcccat

SEQ ID NO: 369424 - DNA, 25 bp, Homo sapien
tctcaaagtcaatggaggctgttgc

SEQ ID NO: 369425 - DNA, 25 bp, Homo sapien
tccttcctgattgtggtctgcacca

SEQ ID NO: 369426 - DNA, 25 bp, Homo sapien
caatgatagattgcagtctgtgagc

SEQ ID NO: 369427 - DNA, 25 bp, Homo sapien
ggctgttgcttcatccaagatgaga

SEQ ID NO: 369428 - DNA, 25 bp, Homo sapien
cgtatcaaattctgaggcgcttcga

SEQ ID NO: 369429 - DNA, 25 bp, Homo sapien
gcttcctgagtctagaacatgcacc

SEQ ID NO: 369430 - DNA, 25 bp, Homo sapien
gaaaagtcctttctgacgtatcaaa

SEQ ID NO: 369431 - DNA, 25 bp, Homo sapien
gaggcgcttcgaattccacaatgct

SEQ ID NO: 369432 - DNA, 25 bp, Homo sapien
tgtgttattccagcatccgttgtca

SEQ ID NO: 369433 - DNA, 25 bp, Homo sapien
tttttgtcactgagtcttgtgttat

SEQ ID NO: 369434 - DNA, 25 bp, Homo sapien
gagtcttgtgttattccagcatccg

SEQ ID NO: 369435 - DNA, 25 bp, Homo sapien
tgtcactgagtcttgtgttattcca

SEQ ID NO: 369436 - DNA, 25 bp, Homo sapien
tcggcccattaactcagcagcatag

SEQ ID NO: 369437 - DNA, 25 bp, Homo sapien
gacatgtcgataacagtacagccag

SEQ ID NO: 369438 - DNA, 25 bp, Homo sapien
gcagacacttgaactaccaatagcc

SEQ ID NO: 369439 - DNA, 25 bp, Homo sapien
atggttcagacccattacctcggcc

SEQ ID NO: 369440 - DNA, 25 bp, Homo sapien
taatccgttaatgcttttggaaaca

SEQ ID NO: 369441 - DNA, 25 bp, Homo sapien
aacaattgacaaaatagggcaggca

SEQ ID NO: 369442 - DNA, 25 bp, Homo sapien
tcgataggatgttgaaatgctggtc

SEQ ID NO: 369443 - DNA, 25 bp, Homo sapien
gctcatctcatgtcctgaagttgga

SEQ ID NO: 369444 - DNA, 25 bp, Homo sapien
cagggacccttctacggaggatggc

SEQ ID NO: 369445 - DNA, 25 bp, Homo sapien
tccgggaggctataggaacgccatc

SEQ ID NO: 369446 - DNA, 25 bp, Homo sapien
ggcccacgtcagtgctagcaataga

SEQ ID NO: 369447 - DNA, 25 bp, Homo sapien
tcccaaaacaaaggcagacggctga

SEQ ID NO: 369448 - DNA, 25 bp, Homo sapien
tgtaaaggacctgacccgctgttgc

SEQ ID NO: 369449 - DNA, 25 bp, Homo sapien
gctaagatatgtgtatggcctcaga

SEQ ID NO: 369450 - DNA, 25 bp, Homo sapien
tacgttgagttgtccagataggtcc

SEQ ID NO: 369451 - DNA, 25 bp, Homo sapien
cacagaaccattttagtaggcataa

SEQ ID NO: 369452 - DNA, 25 bp, Homo sapien
agaaagcagggttccttagacatac

SEQ ID NO: 369453 - DNA, 25 bp, Homo sapien
gatataaaaagaactggcaccctta

SEQ ID NO: 369454 - DNA, 25 bp, Homo sapien
tctttttagagcaggtagcaaggca

SEQ ID NO: 369455 - DNA, 25 bp, Homo sapien
taacatgcgcaaggactatataccc

SEQ ID NO: 369456 - DNA, 25 bp, Homo sapien
tgctcaagctccactattcctgccc

SEQ ID NO: 369457 - DNA, 25 bp, Homo sapien
tccattggctctcttgatccttcat

SEQ ID NO: 369458 - DNA, 25 bp, Homo sapien
cttatccattggctctcttgatcct

SEQ ID NO: 369459 - DNA, 25 bp, Homo sapien
ttcctttcctccagtcttatccatt

SEQ ID NO: 369460 - DNA, 25 bp, Homo sapien
cagcagcgttgttgagcaactgcat

SEQ ID NO: 369461 - DNA, 25 bp, Homo sapien
cgttgttgagcaactgcatgtgttc

SEQ ID NO: 369462 - DNA, 25 bp, Homo sapien
gaattagaattactgtccacaggga

SEQ ID NO: 369463 - DNA, 25 bp, Homo sapien
tctggctcccatgccccttttaagt

SEQ ID NO: 369464 - DNA, 25 bp, Homo sapien
tccatctactcttaagtacttccat

SEQ ID NO: 369465 - DNA, 25 bp, Homo sapien
catctactcttaagtacttccatca

SEQ ID NO: 369466 - DNA, 25 bp, Homo sapien
tctactcttaagtacttccatcaac

SEQ ID NO: 369467 - DNA, 25 bp, Homo sapien
tactcttaagtacttccatcaacat

SEQ ID NO: 369468 - DNA, 25 bp, Homo sapien
ggtccccatgtgcatctctatactt

SEQ ID NO: 369469 - DNA, 25 bp, Homo sapien
aatatttgaatctgactaatttgct

SEQ ID NO: 369470 - DNA, 25 bp, Homo sapien
gttctattggcacctttggtcccca

SEQ ID NO: 369471 - DNA, 25 bp, Homo sapien
cctttggtccccatgtgcatctcta

SEQ ID NO: 369472 - DNA, 25 bp, Homo sapien
agaggttgtcataggtcatgtcact

SEQ ID NO: 369473 - DNA, 25 bp, Homo sapien
acccagggatcatatatttgcatgg

SEQ ID NO: 369474 - DNA, 25 bp, Homo sapien
cacccagggatcatatatttgcatg

SEQ ID NO: 369475 - DNA, 25 bp, Homo sapien
tttcacccagggatcatatatttgc

SEQ ID NO: 369476 - DNA, 25 bp, Homo sapien
tttttgactaggcatgcttctggca

SEQ ID NO: 369477 - DNA, 25 bp, Homo sapien
cagtagtgacctctgtgttgccagg

SEQ ID NO: 369478 - DNA, 25 bp, Homo sapien
cattaaaatagctgtcgccgtcagt

SEQ ID NO: 369479 - DNA, 25 bp, Homo sapien
tatttgacccaagtgctgatttcct

SEQ ID NO: 369480 - DNA, 25 bp, Homo sapien
ccctgattgcaccactgaacttcag

SEQ ID NO: 369481 - DNA, 25 bp, Homo sapien
gcgggggttccagtgagccctgatt

SEQ ID NO: 369482 - DNA, 25 bp, Homo sapien
aggcgggggttccagtgagccctga

SEQ ID NO: 369483 - DNA, 25 bp, Homo sapien
agccctgattgcaccactgaacttc

SEQ ID NO: 369484 - DNA, 25 bp, Homo sapien
cataagaactccttatacctggtgt

SEQ ID NO: 369485 - DNA, 25 bp, Homo sapien
cagatgtgaggctcaagtcctttaa

SEQ ID NO: 369486 - DNA, 25 bp, Homo sapien
gatgctacagcctatctaaagcttc

SEQ ID NO: 369487 - DNA, 25 bp, Homo sapien
tgagttcgtaacacaagcaaccagg

SEQ ID NO: 369488 - DNA, 25 bp, Homo sapien
tgctctctctatggagcagattaaa

SEQ ID NO: 369489 - DNA, 25 bp, Homo sapien
caggaatacagtagttgtagcagtt

SEQ ID NO: 369490 - DNA, 25 bp, Homo sapien
tagcagttaatgatagaacttccag

SEQ ID NO: 369491 - DNA, 25 bp, Homo sapien
tcgttcccatatagtgataaatata

SEQ ID NO: 369492 - DNA, 25 bp, Homo sapien
gatgcaagccactgtaactcatgac

SEQ ID NO: 369493 - DNA, 25 bp, Homo sapien
gaaatcagaggtacctgcgcagtca

SEQ ID NO: 369494 - DNA, 25 bp, Homo sapien
gcagtcacccgcaaagggcacttag

SEQ ID NO: 369495 - DNA, 25 bp, Homo sapien
gaacccagaatgattgatgcaagcc

SEQ ID NO: 369496 - DNA, 25 bp, Homo sapien
catgttcagcgagtgcgtgtgcatg

SEQ ID NO: 369497 - DNA, 25 bp, Homo sapien
gggtcttgagtgaccatgcatgttc

SEQ ID NO: 369498 - DNA, 25 bp, Homo sapien
cagacatttcagtagtagcagttga

SEQ ID NO: 369499 - DNA, 25 bp, Homo sapien
gtccaagaacctcagcagacatttc

SEQ ID NO: 369500 - DNA, 25 bp, Homo sapien
caataccattactgcactagaacaa

SEQ ID NO: 369501 - DNA, 25 bp, Homo sapien
caagagatgtcctaaccattttgca

SEQ ID NO: 369502 - DNA, 25 bp, Homo sapien
tcaggatccaaaaagctcagctgga

SEQ ID NO: 369503 - DNA, 25 bp, Homo sapien
ggaatgcttgctatgtgccaagaga

SEQ ID NO: 369504 - DNA, 25 bp, Homo sapien
caagcatgcggctaagtaaatgcgc

SEQ ID NO: 369505 - DNA, 25 bp, Homo sapien
caacggccaaaaactagcgggagtg

SEQ ID NO: 369506 - DNA, 25 bp, Homo sapien
tgttacggaggaaactatagcccat

SEQ ID NO: 369507 - DNA, 25 bp, Homo sapien
cataaagtattggaggacaacggcc

SEQ ID NO: 369508 - DNA, 25 bp, Homo sapien
aatttggaactagatatccctggac

SEQ ID NO: 369509 - DNA, 25 bp, Homo sapien
tgagtttactgaagacgcagaagct

SEQ ID NO: 369510 - DNA, 25 bp, Homo sapien
ggtttaacaggccattgtacagatg

SEQ ID NO: 369511 - DNA, 25 bp, Homo sapien
tcaaaacttagttcgaagcgcacag

SEQ ID NO: 369512 - DNA, 25 bp, Homo sapien
tctcaatctgttggtgagtaccata

SEQ ID NO: 369513 - DNA, 25 bp, Homo sapien
gccagaattttgactgcttggatca

SEQ ID NO: 369514 - DNA, 25 bp, Homo sapien
cagtcacctgctgataatttgatgt

SEQ ID NO: 369515 - DNA, 25 bp, Homo sapien
atacccattagtaaatcctccttgg

SEQ ID NO: 369516 - DNA, 25 bp, Homo sapien
aatgtgtaccttggtgttttcagga

SEQ ID NO: 369517 - DNA, 25 bp, Homo sapien
attcagtgagatccacactaataat

SEQ ID NO: 369518 - DNA, 25 bp, Homo sapien
aataataatgtgtaccttggtgttt

SEQ ID NO: 369519 - DNA, 25 bp, Homo sapien
tcagtgagatccacactaataataa

SEQ ID NO: 369520 - DNA, 25 bp, Homo sapien
caggagcaccttgagaaagagatgt

SEQ ID NO: 369521 - DNA, 25 bp, Homo sapien
cactgaatgataggtatgagagcca

SEQ ID NO: 369522 - DNA, 25 bp, Homo sapien
gatgtctaatctcaatcatgtgact

SEQ ID NO: 369523 - DNA, 25 bp, Homo sapien
ggtatgagagccattatctcccagg

SEQ ID NO: 369524 - DNA, 25 bp, Homo sapien
taaaatatagacttgttaggaaagc

SEQ ID NO: 369525 - DNA, 25 bp, Homo sapien
gaattgcaccaagtataagttttgg

SEQ ID NO: 369526 - DNA, 25 bp, Homo sapien
aggaaagcgtgtgttttcatccttt

SEQ ID NO: 369527 - DNA, 25 bp, Homo sapien
gtggtaaaaccgctcctagaattgc

SEQ ID NO: 369528 - DNA, 25 bp, Homo sapien
gactgtaaaggtgaatcaggcccac

SEQ ID NO: 369529 - DNA, 25 bp, Homo sapien
cagtagcattgaaggcaacagtttc

SEQ ID NO: 369530 - DNA, 25 bp, Homo sapien
tcaaagggagtaccctggcaacatt

SEQ ID NO: 369531 - DNA, 25 bp, Homo sapien
tggaccctaacttggcctcatgatc

SEQ ID NO: 369532 - DNA, 25 bp, Homo sapien
tactctcttaactggctagaatggt

SEQ ID NO: 369533 - DNA, 25 bp, Homo sapien
tgttcgaatactctcttaactggct

SEQ ID NO: 369534 - DNA, 25 bp, Homo sapien
caaaccagagagtgttcgaatactc

SEQ ID NO: 369535 - DNA, 25 bp, Homo sapien
cttaactggctagaatggttgccca

SEQ ID NO: 369536 - DNA, 25 bp, Homo sapien
ttatgcaggcatatattgatggagg

SEQ ID NO: 369537 - DNA, 25 bp, Homo sapien
aatttcactgtgtggacaattttgc

SEQ ID NO: 369538 - DNA, 25 bp, Homo sapien
aattgcctgaattcttatgcaggca

SEQ ID NO: 369539 - DNA, 25 bp, Homo sapien
tcaaactacaactcggaaggtgaat

SEQ ID NO: 369540 - DNA, 25 bp, Homo sapien
ctttaggtaactcctcgtattcaat

SEQ ID NO: 369541 - DNA, 25 bp, Homo sapien
tcttatctcaatcttggttccaaat

SEQ ID NO: 369542 - DNA, 25 bp, Homo sapien
atcttatctcaatcttggttccaaa

SEQ ID NO: 369543 - DNA, 25 bp, Homo sapien
catcttatctcaatcttggttccaa

SEQ ID NO: 369544 - DNA, 25 bp, Homo sapien
aagaaccttccatactgggtcttca

SEQ ID NO: 369545 - DNA, 25 bp, Homo sapien
agtcagaaagttgggcaactttcca

SEQ ID NO: 369546 - DNA, 25 bp, Homo sapien
tgggtcttcagagtgacaaagtcag

SEQ ID NO: 369547 - DNA, 25 bp, Homo sapien
tttgctgttaagaaccttccatact

SEQ ID NO: 369548 - DNA, 25 bp, Homo sapien
ctgactctttcatgtgtcctagtag

SEQ ID NO: 369549 - DNA, 25 bp, Homo sapien
gactctttcatgtgtcctagtagtt

SEQ ID NO: 369550 - DNA, 25 bp, Homo sapien
ctctttcatgtgtcctagtagttta

SEQ ID NO: 369551 - DNA, 25 bp, Homo sapien
ctttcatgtgtcctagtagtttagc

SEQ ID NO: 369552 - DNA, 25 bp, Homo sapien
tatactgcttgggtgtgatctggca

SEQ ID NO: 369553 - DNA, 25 bp, Homo sapien
gcactgttagctttatccacttcaa

SEQ ID NO: 369554 - DNA, 25 bp, Homo sapien
tatacagttttatactgcttgggtg

SEQ ID NO: 369555 - DNA, 25 bp, Homo sapien
caagccatctggaggagtataattt

SEQ ID NO: 369556 - DNA, 25 bp, Homo sapien
tgtgggctggttggcttatggcatc

SEQ ID NO: 369557 - DNA, 25 bp, Homo sapien
gctggttggcttatggcatcatgcc

SEQ ID NO: 369558 - DNA, 25 bp, Homo sapien
tggttggcttatggcatcatgcccc

SEQ ID NO: 369559 - DNA, 25 bp, Homo sapien
tgggctggttggcttatggcatcat

SEQ ID NO: 369560 - DNA, 25 bp, Homo sapien
cactccgaatcgaaatggccactgc

SEQ ID NO: 369561 - DNA, 25 bp, Homo sapien
tggtgttctggatgataaacttgac

SEQ ID NO: 369562 - DNA, 25 bp, Homo sapien
gagaagaagacactccgaatcgaaa

SEQ ID NO: 369563 - DNA, 25 bp, Homo sapien
tggccactgccgcattggtgttctg

SEQ ID NO: 369564 - DNA, 25 bp, Homo sapien
catcaatttgaacccagtcaatgac

SEQ ID NO: 369565 - DNA, 25 bp, Homo sapien
tcccgggaggatagcagcttgtcca

SEQ ID NO: 369566 - DNA, 25 bp, Homo sapien
gggaattaatctaagtttgtgagcc

SEQ ID NO: 369567 - DNA, 25 bp, Homo sapien
aagtttgtgagccatgaactcatca

SEQ ID NO: 369568 - DNA, 25 bp, Homo sapien
ggagatgaggtctcaagatgtgaca

SEQ ID NO: 369569 - DNA, 25 bp, Homo sapien
gatgtgacatgtcaaatctggtcat

SEQ ID NO: 369570 - DNA, 25 bp, Homo sapien
caagatgtgacatgtcaaatctggt

SEQ ID NO: 369571 - DNA, 25 bp, Homo sapien
gaggtctcaagatgtgacatgtcaa

SEQ ID NO: 369572 - DNA, 25 bp, Homo sapien
ggccctttctcaacttgatgatgag

SEQ ID NO: 369573 - DNA, 25 bp, Homo sapien
tgctccacgtagtcattagggtcat

SEQ ID NO: 369574 - DNA, 25 bp, Homo sapien
gatgatgagaatgtcatcctgctcc

SEQ ID NO: 369575 - DNA, 25 bp, Homo sapien
cattagggtcatcatcttgtttcac

SEQ ID NO: 369576 - DNA, 25 bp, Homo sapien
tggcttgcccatggggtcacagggc

SEQ ID NO: 369577 - DNA, 25 bp, Homo sapien
agggcacctgtgactcatcctcatc

SEQ ID NO: 369578 - DNA, 25 bp, Homo sapien
cttgggtttggggtacactgcatgc

SEQ ID NO: 369579 - DNA, 25 bp, Homo sapien
ttggggtacactgcatgcctcatgg

SEQ ID NO: 369580 - DNA, 25 bp, Homo sapien
aggagggctcttaaactgacttagc

SEQ ID NO: 369581 - DNA, 25 bp, Homo sapien
cagtttgaaggctttcatatttggg

SEQ ID NO: 369582 - DNA, 25 bp, Homo sapien
agaggcccattccagtttgaaggct

SEQ ID NO: 369583 - DNA, 25 bp, Homo sapien
gaggaaggagggctcttaaactgac

SEQ ID NO: 369584 - DNA, 25 bp, Homo sapien
cagcagtgggaaagtttctgatgca

SEQ ID NO: 369585 - DNA, 25 bp, Homo sapien
ctttggtcataattggaagataaac

SEQ ID NO: 369586 - DNA, 25 bp, Homo sapien
tcttctagggttccttgacagcagt

SEQ ID NO: 369587 - DNA, 25 bp, Homo sapien
ggtcataattggaagataaacctct

SEQ ID NO: 369588 - DNA, 25 bp, Homo sapien
tagagatggccttcccattgtggac

SEQ ID NO: 369589 - DNA, 25 bp, Homo sapien
gccactgaaattgccatgtattaaa

SEQ ID NO: 369590 - DNA, 25 bp, Homo sapien
gttctcagcctcaacagtgccactg

SEQ ID NO: 369591 - DNA, 25 bp, Homo sapien
gcatatggcttctggaaaatagaga

SEQ ID NO: 369592 - DNA, 25 bp, Homo sapien
gactccacaacatattcagcacagc

SEQ ID NO: 369593 - DNA, 25 bp, Homo sapien
tgagccccaggaccaatggactcca

SEQ ID NO: 369594 - DNA, 25 bp, Homo sapien
ccaggaccaatggactccacaacat

SEQ ID NO: 369595 - DNA, 25 bp, Homo sapien
ggactccacaacatattcagcacag

SEQ ID NO: 369596 - DNA, 25 bp, Homo sapien
gttgggacacggacacagaaagcca

SEQ ID NO: 369597 - DNA, 25 bp, Homo sapien
tcagctggcgtaaccttgctcacaa

SEQ ID NO: 369598 - DNA, 25 bp, Homo sapien
caaccaacacagttgggacacggac

SEQ ID NO: 369599 - DNA, 25 bp, Homo sapien
tcttgatgccatcacaattggagct

SEQ ID NO: 369600 - DNA, 25 bp, Homo sapien
ggaaattgagttgggtcaaggactc

SEQ ID NO: 369601 - DNA, 25 bp, Homo sapien
ttggtgcccacattgactataaggt

SEQ ID NO: 369602 - DNA, 25 bp, Homo sapien
tgactataaggtttgccactcttgc

SEQ ID NO: 369603 - DNA, 25 bp, Homo sapien
tcttgttattgctgggactagtggc

SEQ ID NO: 369604 - DNA, 25 bp, Homo sapien
tgttcttaggacacggctagtgctc

SEQ ID NO: 369605 - DNA, 25 bp, Homo sapien
ttgaagacaaatctacacgcaagct

SEQ ID NO: 369606 - DNA, 25 bp, Homo sapien
gcttttgccttagcgaacaacagga

SEQ ID NO: 369607 - DNA, 25 bp, Homo sapien
tcctcaaccattgcatcccagtggg

SEQ ID NO: 369608 - DNA, 25 bp, Homo sapien
aaatgtgaaacagtgttcctcgtat

SEQ ID NO: 369609 - DNA, 25 bp, Homo sapien
cagtgttcctcgtatgggtaatgta

SEQ ID NO: 369610 - DNA, 25 bp, Homo sapien
gaaacagtgttcctcgtatgggtaa

SEQ ID NO: 369611 - DNA, 25 bp, Homo sapien
tgttcctcgtatgggtaatgtagca

SEQ ID NO: 369612 - DNA, 25 bp, Homo sapien
gagtcagatgcacggcttttcaatt

SEQ ID NO: 369613 - DNA, 25 bp, Homo sapien
actgagatttcaaaggtagaggaca

SEQ ID NO: 369614 - DNA, 25 bp, Homo sapien
tcatctagatatacactttcaggct

SEQ ID NO: 369615 - DNA, 25 bp, Homo sapien
aaaagtaataccatctaggctaagc

SEQ ID NO: 369616 - DNA, 25 bp, Homo sapien
ctccggcccctagatgtaaatgaat

SEQ ID NO: 369617 - DNA, 25 bp, Homo sapien
ccagagtactaggttggagtcaaac

SEQ ID NO: 369618 - DNA, 25 bp, Homo sapien
ggtgtaatgatctgagcccttatcc

SEQ ID NO: 369619 - DNA, 25 bp, Homo sapien
tagcccgtaatacccaagtcatctg

SEQ ID NO: 369620 - DNA, 25 bp, Homo sapien
accacagcttcctgtgaacacagca

SEQ ID NO: 369621 - DNA, 25 bp, Homo sapien
ccacagcttcctgtgaacacagcag

SEQ ID NO: 369622 - DNA, 25 bp, Homo sapien
gaaggagcacctggcgcatgagcac

SEQ ID NO: 369623 - DNA, 25 bp, Homo sapien
ggaggagcatctgaaggaggagcac

SEQ ID NO: 369624 - DNA, 25 bp, Homo sapien
taactacagttaaccagccagctga

SEQ ID NO: 369625 - DNA, 25 bp, Homo sapien
tctaagttggctacatgacgagaac

SEQ ID NO: 369626 - DNA, 25 bp, Homo sapien
tcatgccctttggtagtgacctccc

SEQ ID NO: 369627 - DNA, 25 bp, Homo sapien
tgctgagccagtccctgagttgaaa

SEQ ID NO: 369628 - DNA, 25 bp, Homo sapien
gggtcactgaattttggagctggaa

SEQ ID NO: 369629 - DNA, 25 bp, Homo sapien
cataagggtctagaggatctgtggc

SEQ ID NO: 369630 - DNA, 25 bp, Homo sapien
gaagttaagcttaaagggtcactga

SEQ ID NO: 369631 - DNA, 25 bp, Homo sapien
gaagaaggattaaagcacgattggg

SEQ ID NO: 369632 - DNA, 25 bp, Homo sapien
tcagactgtgactcaactttgaact

SEQ ID NO: 369633 - DNA, 25 bp, Homo sapien
tggtagaccctggaagctttcttat

SEQ ID NO: 369634 - DNA, 25 bp, Homo sapien
aattgtaaatggtagaccctggaag

SEQ ID NO: 369635 - DNA, 25 bp, Homo sapien
tgtaaatggtagaccctggaagctt

SEQ ID NO: 369636 - DNA, 25 bp, Homo sapien
gtgttctcaagtcaatatgttccag

SEQ ID NO: 369637 - DNA, 25 bp, Homo sapien
tccacgtcatgtcagtcattactct

SEQ ID NO: 369638 - DNA, 25 bp, Homo sapien
cacagcatgctgtgttccacgtcat

SEQ ID NO: 369639 - DNA, 25 bp, Homo sapien
gaatctgttcctccaaagcttttgt

SEQ ID NO: 369640 - DNA, 25 bp, Homo sapien
gataggtgccatattctacgatgag

SEQ ID NO: 369641 - DNA, 25 bp, Homo sapien
taaagtatgtgcctgggacaagacc

SEQ ID NO: 369642 - DNA, 25 bp, Homo sapien
tatgctgtattgacaactggctccc

SEQ ID NO: 369643 - DNA, 25 bp, Homo sapien
gattattggtgttgcaggcctgcca

SEQ ID NO: 369644 - DNA, 25 bp, Homo sapien
tggtaaagcaaccttttccttctgc

SEQ ID NO: 369645 - DNA, 25 bp, Homo sapien
ttttccttctgctgtcttctcagga

SEQ ID NO: 369646 - DNA, 25 bp, Homo sapien
ccttctgctgtcttctcaggagcat

SEQ ID NO: 369647 - DNA, 25 bp, Homo sapien
ttccttctgctgtcttctcaggagc

SEQ ID NO: 369648 - DNA, 25 bp, Homo sapien
tgacgagacaccagattgcctactg

SEQ ID NO: 369649 - DNA, 25 bp, Homo sapien
cactatcgcttcgtagctgttctca

SEQ ID NO: 369650 - DNA, 25 bp, Homo sapien
tatgcttacaagatggacaccatat

SEQ ID NO: 369651 - DNA, 25 bp, Homo sapien
agagtggcagcaataccagggagcc

SEQ ID NO: 369652 - DNA, 25 bp, Homo sapien
gaaagcaatgctatggtaacgagtg

SEQ ID NO: 369653 - DNA, 25 bp, Homo sapien
aaagcaatgctatggtaacgagtgt

SEQ ID NO: 369654 - DNA, 25 bp, Homo sapien
agcaatgctatggtaacgagtgtag

SEQ ID NO: 369655 - DNA, 25 bp, Homo sapien
ctgataagtgtgtttgaaagcaatg

SEQ ID NO: 369656 - DNA, 25 bp, Homo sapien
caaggatacaccctttgggatcagg

SEQ ID NO: 369657 - DNA, 25 bp, Homo sapien
ggacaaggatacaccctttgggatc

SEQ ID NO: 369658 - DNA, 25 bp, Homo sapien
tacaccctttgggatcaggtggtgg

SEQ ID NO: 369659 - DNA, 25 bp, Homo sapien
ggatacaccctttgggatcaggtgg

SEQ ID NO: 369660 - DNA, 25 bp, Homo sapien
cccatcagacgaaccgtggatctcg

SEQ ID NO: 369661 - DNA, 25 bp, Homo sapien
agacgaaccgtggatctcggcagaa

SEQ ID NO: 369662 - DNA, 25 bp, Homo sapien
tcagacgaaccgtggatctcggcag

SEQ ID NO: 369663 - DNA, 25 bp, Homo sapien
ccatcagacgaaccgtggatctcgg

SEQ ID NO: 369664 - DNA, 25 bp, Homo sapien
gggacagacaaactgcgattaccat

SEQ ID NO: 369665 - DNA, 25 bp, Homo sapien
catggaaatagcattagcaatggtt

SEQ ID NO: 369666 - DNA, 25 bp, Homo sapien
tctgagaggcagtcgggctttctag

SEQ ID NO: 369667 - DNA, 25 bp, Homo sapien
caggtaatctgcccgtctccatctt

SEQ ID NO: 369668 - DNA, 25 bp, Homo sapien
tcctctgcattagactttagttggg

SEQ ID NO: 369669 - DNA, 25 bp, Homo sapien
tgaagaatatgacaagccctctttc

SEQ ID NO: 369670 - DNA, 25 bp, Homo sapien
tcttcagcaatgaaagcatcatact

SEQ ID NO: 369671 - DNA, 25 bp, Homo sapien
ggcaccactgctgttgatgtaaaca

SEQ ID NO: 369672 - DNA, 25 bp, Homo sapien
cataaaatatcagtgtgcacgagct

SEQ ID NO: 369673 - DNA, 25 bp, Homo sapien
taaaatatcagtgtgcacgagcttc

SEQ ID NO: 369674 - DNA, 25 bp, Homo sapien
tcataaaatatcagtgtgcacgagc

SEQ ID NO: 369675 - DNA, 25 bp, Homo sapien
aaatatcagtgtgcacgagcttctc

SEQ ID NO: 369676 - DNA, 25 bp, Homo sapien
agaaacattcacctctgagatcaca

SEQ ID NO: 369677 - DNA, 25 bp, Homo sapien
tcacttcagctgagaaacattcacc

SEQ ID NO: 369678 - DNA, 25 bp, Homo sapien
gctgagaaacattcacctctgagat

SEQ ID NO: 369679 - DNA, 25 bp, Homo sapien
ttcagctgagaaacattcacctctg

SEQ ID NO: 369680 - DNA, 25 bp, Homo sapien
ggacatgacgtctgtggtttaagct

SEQ ID NO: 369681 - DNA, 25 bp, Homo sapien
gaaactgtacatactgcagtgtgaa

SEQ ID NO: 369682 - DNA, 25 bp, Homo sapien
tattccaagagtatcccagtattag

SEQ ID NO: 369683 - DNA, 25 bp, Homo sapien
tactggaatataggcacattaccat

SEQ ID NO: 369684 - DNA, 25 bp, Homo sapien
catattttgtattgttctaatgcaa

SEQ ID NO: 369685 - DNA, 25 bp, Homo sapien
aagttgtgattacctgctgcatgaa

SEQ ID NO: 369686 - DNA, 25 bp, Homo sapien
ataatcagacaggtttaaaagttgt

SEQ ID NO: 369687 - DNA, 25 bp, Homo sapien
tatattgacttgttacatgaagatg

SEQ ID NO: 369688 - DNA, 25 bp, Homo sapien
gggtactacagcttattgacatcag

SEQ ID NO: 369689 - DNA, 25 bp, Homo sapien
tctgatttactagagaatgttccca

SEQ ID NO: 369690 - DNA, 25 bp, Homo sapien
gagaaagggcatacatccacagatt

SEQ ID NO: 369691 - DNA, 25 bp, Homo sapien
acatgaccacgaagaatgctgttct

SEQ ID NO: 369692 - DNA, 25 bp, Homo sapien
ccaccctgatccttttcaatatata

SEQ ID NO: 369693 - DNA, 25 bp, Homo sapien
ggttttgtggttcccaatgtgtctg

SEQ ID NO: 369694 - DNA, 25 bp, Homo sapien
aagaggttttgtggttcccaatgtg

SEQ ID NO: 369695 - DNA, 25 bp, Homo sapien
tttgtggttcccaatgtgtctgtcc

SEQ ID NO: 369696 - DNA, 25 bp, Homo sapien
tcagccagcgaaagtgaacacagga

SEQ ID NO: 369697 - DNA, 25 bp, Homo sapien
ggtccttgcttaaccaggaagagct

SEQ ID NO: 369698 - DNA, 25 bp, Homo sapien
cagatgattcagacaggagtcacag

SEQ ID NO: 369699 - DNA, 25 bp, Homo sapien
aaactgtgtgcgagatttgtccccg

SEQ ID NO: 369700 - DNA, 25 bp, Homo sapien
ctcaatccttgctaaacacttggga

SEQ ID NO: 369701 - DNA, 25 bp, Homo sapien
ttgtcttgcaaacaccgaactgaaa

SEQ ID NO: 369702 - DNA, 25 bp, Homo sapien
gaattctaagctaaactcacaccag

SEQ ID NO: 369703 - DNA, 25 bp, Homo sapien
tacaaatcggactactccagtgagc

SEQ ID NO: 369704 - DNA, 25 bp, Homo sapien
tagctggcatggttgacagtgtgcc

SEQ ID NO: 369705 - DNA, 25 bp, Homo sapien
cagtcattcagctctaggctgcaga

SEQ ID NO: 369706 - DNA, 25 bp, Homo sapien
ggatagcacattactggcctctttg

SEQ ID NO: 369707 - DNA, 25 bp, Homo sapien
gcctaaaggcaaacaggatagcaca

SEQ ID NO: 369708 - DNA, 25 bp, Homo sapien
tctctagatgttgtctatcacatcc

SEQ ID NO: 369709 - DNA, 25 bp, Homo sapien
aaatgaacataattcaccaatccta

SEQ ID NO: 369710 - DNA, 25 bp, Homo sapien
tgtctatcacatccctttttaaaaa

SEQ ID NO: 369711 - DNA, 25 bp, Homo sapien
attcaccaatcctaagacagatctt

SEQ ID NO: 369712 - DNA, 25 bp, Homo sapien
tgttgatgagctgtcagtttcaaag

SEQ ID NO: 369713 - DNA, 25 bp, Homo sapien
gtcagtttcaaagcgccttgtcctt

SEQ ID NO: 369714 - DNA, 25 bp, Homo sapien
ggttcatccatgaacctgttgatga

SEQ ID NO: 369715 - DNA, 25 bp, Homo sapien
gagctgtcagtttcaaagcgccttg

SEQ ID NO: 369716 - DNA, 25 bp, Homo sapien
acctgggtctgtatctgactatgag

SEQ ID NO: 369717 - DNA, 25 bp, Homo sapien
ctgtatctgactatgagtggcaggt

SEQ ID NO: 369718 - DNA, 25 bp, Homo sapien
ggtctgtatctgactatgagtggca

SEQ ID NO: 369719 - DNA, 25 bp, Homo sapien
cggagtcatcctctaaagcctcctg

SEQ ID NO: 369720 - DNA, 25 bp, Homo sapien
gcgggaggacatcttacttggtaaa

SEQ ID NO: 369721 - DNA, 25 bp, Homo sapien
cactcagactgaattggtaagttac

SEQ ID NO: 369722 - DNA, 25 bp, Homo sapien
tatttcagatgtagactctgcaggg

SEQ ID NO: 369723 - DNA, 25 bp, Homo sapien
tctcttatgtaaacggaatgtggac

SEQ ID NO: 369724 - DNA, 25 bp, Homo sapien
tggctatttgtggtttcaatctgtg

SEQ ID NO: 369725 - DNA, 25 bp, Homo sapien
ttctctcttggctatttgtggtttc

SEQ ID NO: 369726 - DNA, 25 bp, Homo sapien
ggctatttgtggtttcaatctgtgc

SEQ ID NO: 369727 - DNA, 25 bp, Homo sapien
cttggctatttgtggtttcaatctg

SEQ ID NO: 369728 - DNA, 25 bp, Homo sapien
tcaagcttggtggaggtttaatcct

SEQ ID NO: 369729 - DNA, 25 bp, Homo sapien
cttgtacacgtatacttgattagta

SEQ ID NO: 369730 - DNA, 25 bp, Homo sapien
tcagcagaagacataccgccctcct

SEQ ID NO: 369731 - DNA, 25 bp, Homo sapien
taatcctgtgcccttgtacacgtat

SEQ ID NO: 369732 - DNA, 25 bp, Homo sapien
catctcgacccttgctgtgctgctg

SEQ ID NO: 369733 - DNA, 25 bp, Homo sapien
ctgcaggcatctcgacccttgctgt

SEQ ID NO: 369734 - DNA, 25 bp, Homo sapien
gcgcctgcaggcatctcgacccttg

SEQ ID NO: 369735 - DNA, 25 bp, Homo sapien
caggcatctcgacccttgctgtgct

SEQ ID NO: 369736 - DNA, 25 bp, Homo sapien
gatggctgctagttccgacacttga

SEQ ID NO: 369737 - DNA, 25 bp, Homo sapien
gatcggaataccaagatggctgcta

SEQ ID NO: 369738 - DNA, 25 bp, Homo sapien
tcagctggatcggaataccaagatg

SEQ ID NO: 369739 - DNA, 25 bp, Homo sapien
tccgacacttgatttactgacagct

SEQ ID NO: 369740 - DNA, 25 bp, Homo sapien
caaaaattgtgtctttcagtgcttt

SEQ ID NO: 369741 - DNA, 25 bp, Homo sapien
cactcagtcttcttccaaaaattgt

SEQ ID NO: 369742 - DNA, 25 bp, Homo sapien
ttccaaaaattgtgtctttcagtgc

SEQ ID NO: 369743 - DNA, 25 bp, Homo sapien
tcagtgctttctccactttgtccat

SEQ ID NO: 369744 - DNA, 25 bp, Homo sapien
tcactcctcatggttgaaagatggc

SEQ ID NO: 369745 - DNA, 25 bp, Homo sapien
cagtaagggtgtatcttctcactca

SEQ ID NO: 369746 - DNA, 25 bp, Homo sapien
aacccctgacttctaccagaggaat

SEQ ID NO: 369747 - DNA, 25 bp, Homo sapien
cagaggaatcaatccaacttcgtgt

SEQ ID NO: 369748 - DNA, 25 bp, Homo sapien
ttctcaaaaacttttgccagctgtc

SEQ ID NO: 369749 - DNA, 25 bp, Homo sapien
tcttgatctatatccaaggcatcct

SEQ ID NO: 369750 - DNA, 25 bp, Homo sapien
ggcatccttcttaatattcgacctt

SEQ ID NO: 369751 - DNA, 25 bp, Homo sapien
tattcgaccttatacctcctctgta

SEQ ID NO: 369752 - DNA, 25 bp, Homo sapien
caggccacctggttttgcctccgaa

SEQ ID NO: 369753 - DNA, 25 bp, Homo sapien
tgtcatcagagtccgtggacagact

SEQ ID NO: 369754 - DNA, 25 bp, Homo sapien
ttctagtgtagggatcagctgccat

SEQ ID NO: 369755 - DNA, 25 bp, Homo sapien
gtggacagactcagccaggccacct

SEQ ID NO: 369756 - DNA, 25 bp, Homo sapien
tgacggcttggtaaggtggaaatct

SEQ ID NO: 369757 - DNA, 25 bp, Homo sapien
cagctgggcacacttaactgccttg

SEQ ID NO: 369758 - DNA, 25 bp, Homo sapien
tcctgtagtcaaagggacccgccag

SEQ ID NO: 369759 - DNA, 25 bp, Homo sapien
aactgccttggatttgacggcttgg

SEQ ID NO: 369760 - DNA, 25 bp, Homo sapien
catgaaacgagaattggctggctgc

SEQ ID NO: 369761 - DNA, 25 bp, Homo sapien
ggtgatggatcccgcagtaaaatcc

SEQ ID NO: 369762 - DNA, 25 bp, Homo sapien
ataataataagaactgggtcttgag

SEQ ID NO: 369763 - DNA, 25 bp, Homo sapien
gctaaccccacaaagggatctataa

SEQ ID NO: 369764 - DNA, 25 bp, Homo sapien
cctgcattgcgctggagggaaatgt

SEQ ID NO: 369765 - DNA, 25 bp, Homo sapien
aaatgtagtcaccaagggctgccgc

SEQ ID NO: 369766 - DNA, 25 bp, Homo sapien
ctagttctcaaagcgctgatgtcct

SEQ ID NO: 369767 - DNA, 25 bp, Homo sapien
aaagcgctgatgtcctgctacctgc

SEQ ID NO: 369768 - DNA, 25 bp, Homo sapien
tagttacttggctgttgccttttcc

SEQ ID NO: 369769 - DNA, 25 bp, Homo sapien
gccgttgttgacagtaaacagtaaa

SEQ ID NO: 369770 - DNA, 25 bp, Homo sapien
tctgactgtacagcagtatatgccg

SEQ ID NO: 369771 - DNA, 25 bp, Homo sapien
ccagttcccctgtgacatgtaggta

SEQ ID NO: 369772 - DNA, 25 bp, Homo sapien
tctgcctggcccctaagtgtcggtt

SEQ ID NO: 369773 - DNA, 25 bp, Homo sapien
tttatttggttcagggagcactggc

SEQ ID NO: 369774 - DNA, 25 bp, Homo sapien
gaagagaagccatctgtaggtgtcc

SEQ ID NO: 369775 - DNA, 25 bp, Homo sapien
tcggttgccgcctggagtatgttga

SEQ ID NO: 369776 - DNA, 25 bp, Homo sapien
agtcagcctcgcagacattgcagca

SEQ ID NO: 369777 - DNA, 25 bp, Homo sapien
gtgagcgaggcgctcaaagtcagcc

SEQ ID NO: 369778 - DNA, 25 bp, Homo sapien
gaggcgctcaaagtcagcctcgcag

SEQ ID NO: 369779 - DNA, 25 bp, Homo sapien
tcaaagtcagcctcgcagacattgc

SEQ ID NO: 369780 - DNA, 25 bp, Homo sapien
ggagcattcctaacacctagaaaga

SEQ ID NO: 369781 - DNA, 25 bp, Homo sapien
cagcgactgatagcttttgtacctc

SEQ ID NO: 369782 - DNA, 25 bp, Homo sapien
taagtcatagcatcctagagtcctt

SEQ ID NO: 369783 - DNA, 25 bp, Homo sapien
gagtccttcggtgcagcgactgata

SEQ ID NO: 369784 - DNA, 25 bp, Homo sapien
ctggaatattctcggcttgctgggc

SEQ ID NO: 369785 - DNA, 25 bp, Homo sapien
catgccactatcaaaagagttcagg

SEQ ID NO: 369786 - DNA, 25 bp, Homo sapien
gaataagaagaagtagtgagcagct

SEQ ID NO: 369787 - DNA, 25 bp, Homo sapien
gctttgggaagtcacctaacataca

SEQ ID NO: 369788 - DNA, 25 bp, Homo sapien
aggtgaactcagactagaatcaaac

SEQ ID NO: 369789 - DNA, 25 bp, Homo sapien
tttgtaggtggtggtatagttttgc

SEQ ID NO: 369790 - DNA, 25 bp, Homo sapien
ttttgagttaggtgaactcagacta

SEQ ID NO: 369791 - DNA, 25 bp, Homo sapien
tgtaggtggtggtatagttttgcta

SEQ ID NO: 369792 - DNA, 25 bp, Homo sapien
cagactttttgctgactgaggccat

SEQ ID NO: 369793 - DNA, 25 bp, Homo sapien
ctgatcctcaggcataattattgcc

SEQ ID NO: 369794 - DNA, 25 bp, Homo sapien
tttctctcaccactgaagagctctg

SEQ ID NO: 369795 - DNA, 25 bp, Homo sapien
cctcaggcataattattgccatact

SEQ ID NO: 369796 - DNA, 25 bp, Homo sapien
tctcaccactgaagagctctgatcc

SEQ ID NO: 369797 - DNA, 25 bp, Homo sapien
agctatgttattagaaaacgatttt

SEQ ID NO: 369798 - DNA, 25 bp, Homo sapien
ttattagaaaacgatttttcaatgc

SEQ ID NO: 369799 - DNA, 25 bp, Homo sapien
gttcatgaaagctatgttattagaa

SEQ ID NO: 369800 - DNA, 25 bp, Homo sapien
catgaaagctatgttattagaaaac

SEQ ID NO: 369801 - DNA, 25 bp, Homo sapien
tagctgctcccagatttgtcaaaag

SEQ ID NO: 369802 - DNA, 25 bp, Homo sapien
tgtcatgggtcagcgcctcaaatgc

SEQ ID NO: 369803 - DNA, 25 bp, Homo sapien
tggctgctagcagtgtgtcctcggc

SEQ ID NO: 369804 - DNA, 25 bp, Homo sapien
ctgacagtccaaccgagaaaagggc

SEQ ID NO: 369805 - DNA, 25 bp, Homo sapien
tatctgtaacccttatcatttggca

SEQ ID NO: 369806 - DNA, 25 bp, Homo sapien
tgtaacccttatcatttggcaactc

SEQ ID NO: 369807 - DNA, 25 bp, Homo sapien
cccttatcatttggcaactctccat

SEQ ID NO: 369808 - DNA, 25 bp, Homo sapien
ggtttggtatctgtaacccttatca

SEQ ID NO: 369809 - DNA, 25 bp, Homo sapien
taaacactgcagactaggagagcca

SEQ ID NO: 369810 - DNA, 25 bp, Homo sapien
ggcaagtgatgacaaggcatctaaa

SEQ ID NO: 369811 - DNA, 25 bp, Homo sapien
ttaaaagctcctctgacctggcaac

SEQ ID NO: 369812 - DNA, 25 bp, Homo sapien
gacaattctggcaatcgattccaaa

SEQ ID NO: 369813 - DNA, 25 bp, Homo sapien
tgaccaccccagtaaagatctcagg

SEQ ID NO: 369814 - DNA, 25 bp, Homo sapien
tagaggttgggatcatctgactcca

SEQ ID NO: 369815 - DNA, 25 bp, Homo sapien
tattgaaaactcattaggccccatg

SEQ ID NO: 369816 - DNA, 25 bp, Homo sapien
gagggtcgtcacctataccaggatt

SEQ ID NO: 369817 - DNA, 25 bp, Homo sapien
ttaacaattggattaaacatctctg

SEQ ID NO: 369818 - DNA, 25 bp, Homo sapien
caacccgttgttgacataaataata

SEQ ID NO: 369819 - DNA, 25 bp, Homo sapien
ctagcaacccgttgttgacataaat

SEQ ID NO: 369820 - DNA, 25 bp, Homo sapien
taacaattggattaaacatctctgc

SEQ ID NO: 369821 - DNA, 25 bp, Homo sapien
gaaatctgtactctatagtctgcag

SEQ ID NO: 369822 - DNA, 25 bp, Homo sapien
ctgaaatctgtactctatagtctgc

SEQ ID NO: 369823 - DNA, 25 bp, Homo sapien
gtactctatagtctgcagtcatgaa

SEQ ID NO: 369824 - DNA, 25 bp, Homo sapien
tctgtactctatagtctgcagtcat

SEQ ID NO: 369825 - DNA, 25 bp, Homo sapien
tatacgcagattgaagattctttgt

SEQ ID NO: 369826 - DNA, 25 bp, Homo sapien
tagtatacgcagattgaagattctt

SEQ ID NO: 369827 - DNA, 25 bp, Homo sapien
cttgtatagtatacgcagattgaag

SEQ ID NO: 369828 - DNA, 25 bp, Homo sapien
ttctctcttgtatagtatacgcaga

SEQ ID NO: 369829 - DNA, 25 bp, Homo sapien
ttgtaccctctgacatagaaaccat

SEQ ID NO: 369830 - DNA, 25 bp, Homo sapien
ctcaggcccaagttgtaccctctga

SEQ ID NO: 369831 - DNA, 25 bp, Homo sapien
gttgctttgacctgttttgaatttg

SEQ ID NO: 369832 - DNA, 25 bp, Homo sapien
tatccttgatttctcacctggttgc

SEQ ID NO: 369833 - DNA, 25 bp, Homo sapien
gtggagtagagtagcagaagcagag

SEQ ID NO: 369834 - DNA, 25 bp, Homo sapien
ctgtggagtagagtagcagaagcag

SEQ ID NO: 369835 - DNA, 25 bp, Homo sapien
tgtggagtagagtagcagaagcaga

SEQ ID NO: 369836 - DNA, 25 bp, Homo sapien
tctctccttgattgggtcctgtatt

SEQ ID NO: 369837 - DNA, 25 bp, Homo sapien
ctctccttgattgggtcctgtatta

SEQ ID NO: 369838 - DNA, 25 bp, Homo sapien
ctccttgattgggtcctgtattaag

SEQ ID NO: 369839 - DNA, 25 bp, Homo sapien
ccttgattgggtcctgtattaagat

SEQ ID NO: 369840 - DNA, 25 bp, Homo sapien
ccaaagggttgacacatgggttcat

SEQ ID NO: 369841 - DNA, 25 bp, Homo sapien
tctgccaaagggttgacacatgggt

SEQ ID NO: 369842 - DNA, 25 bp, Homo sapien
tcttctgccaaagggttgacacatg

SEQ ID NO: 369843 - DNA, 25 bp, Homo sapien
tgccaaagggttgacacatgggttc

SEQ ID NO: 369844 - DNA, 25 bp, Homo sapien
ctgagcaacaatatgtattgaacac

SEQ ID NO: 369845 - DNA, 25 bp, Homo sapien
gaaaacaatcaacgaatttgacctc

SEQ ID NO: 369846 - DNA, 25 bp, Homo sapien
agatgctcatataatgggttattcc

SEQ ID NO: 369847 - DNA, 25 bp, Homo sapien
cctcttcatcaagtgagatgctcat

SEQ ID NO: 369848 - DNA, 25 bp, Homo sapien
catggatccttgagcctttctttga

SEQ ID NO: 369849 - DNA, 25 bp, Homo sapien
agttttgcaatgctaatgtgcatgt

SEQ ID NO: 369850 - DNA, 25 bp, Homo sapien
aaatcaaatgagaagtctaggagac

SEQ ID NO: 369851 - DNA, 25 bp, Homo sapien
tgcaatttttccgacccttcagcca

SEQ ID NO: 369852 - DNA, 25 bp, Homo sapien
tctaggagacatctggacatgcaaa

SEQ ID NO: 369853 - DNA, 25 bp, Homo sapien
agaacaggaaacgtgggaacatggc

SEQ ID NO: 369854 - DNA, 25 bp, Homo sapien
acaggaaacgtgggaacatggcagc

SEQ ID NO: 369855 - DNA, 25 bp, Homo sapien
gaacaggaaacgtgggaacatggca

SEQ ID NO: 369856 - DNA, 25 bp, Homo sapien
aacaggaaacgtgggaacatggcag

SEQ ID NO: 369857 - DNA, 25 bp, Homo sapien
gagtctggttttcagtggctgttac

SEQ ID NO: 369858 - DNA, 25 bp, Homo sapien
ttcagtggctgttactgccacggag

SEQ ID NO: 369859 - DNA, 25 bp, Homo sapien
ggttttcagtggctgttactgccac

SEQ ID NO: 369860 - DNA, 25 bp, Homo sapien
cagtggctgttactgccacggaggc

SEQ ID NO: 369861 - DNA, 25 bp, Homo sapien
gtcctaaattagtttcaatcacatt

SEQ ID NO: 369862 - DNA, 25 bp, Homo sapien
ggcacagtcctaaattagtttcaat

SEQ ID NO: 369863 - DNA, 25 bp, Homo sapien
tagtttcaatcacattattcttaca

SEQ ID NO: 369864 - DNA, 25 bp, Homo sapien
ttttgaatgcccaaaggactttctc

SEQ ID NO: 369865 - DNA, 25 bp, Homo sapien
cctccgttcatgcatctgaggatgc

SEQ ID NO: 369866 - DNA, 25 bp, Homo sapien
tattttgacggatttagcttccctg

SEQ ID NO: 369867 - DNA, 25 bp, Homo sapien
aaaaacctatgaaccattgagctgc

SEQ ID NO: 369868 - DNA, 25 bp, Homo sapien
tccctggagaaagctgcatatggaa

SEQ ID NO: 369869 - DNA, 25 bp, Homo sapien
cattgagctgctaataataattatc

SEQ ID NO: 369870 - DNA, 25 bp, Homo sapien
tattgcatacctttcggacatcctg

SEQ ID NO: 369871 - DNA, 25 bp, Homo sapien
tggcaaagtcccaagtacgtccaca

SEQ ID NO: 369872 - DNA, 25 bp, Homo sapien
gcctttagagtattttgcaattgat

SEQ ID NO: 369873 - DNA, 25 bp, Homo sapien
aaatgacaggatagcctttagagta

SEQ ID NO: 369874 - DNA, 25 bp, Homo sapien
gtcggatgctttggcagcacactca

SEQ ID NO: 369875 - DNA, 25 bp, Homo sapien
ctgaaagcaatgcagtcggatgctt

SEQ ID NO: 369876 - DNA, 25 bp, Homo sapien
cagaacacgggaattgacccttcca

SEQ ID NO: 369877 - DNA, 25 bp, Homo sapien
tgcagacatggcctccaaattcagt

SEQ ID NO: 369878 - DNA, 25 bp, Homo sapien
gggcttctccagaacacataattac

SEQ ID NO: 369879 - DNA, 25 bp, Homo sapien
ctgaaaagtagtagggcttctccag

SEQ ID NO: 369880 - DNA, 25 bp, Homo sapien
tgaaaagtagtagggcttctccaga

SEQ ID NO: 369881 - DNA, 25 bp, Homo sapien
gtagggcttctccagaacacataat

SEQ ID NO: 369882 - DNA, 25 bp, Homo sapien
tactgaaacgttgcacttttggctc

SEQ ID NO: 369883 - DNA, 25 bp, Homo sapien
cattttacagcaagatggcagggag

SEQ ID NO: 369884 - DNA, 25 bp, Homo sapien
caaagccttggattagggctgcacc

SEQ ID NO: 369885 - DNA, 25 bp, Homo sapien
tgctttcctctggaagcgtgccagc

SEQ ID NO: 369886 - DNA, 25 bp, Homo sapien
gcctccagtcacaaggtctgaacat

SEQ ID NO: 369887 - DNA, 25 bp, Homo sapien
cagttgctgtaactagtcctgcttg

SEQ ID NO: 369888 - DNA, 25 bp, Homo sapien
ttcttgttagaagcccaaactgtct

SEQ ID NO: 369889 - DNA, 25 bp, Homo sapien
ttgaccttcacacccacaagctgct

SEQ ID NO: 369890 - DNA, 25 bp, Homo sapien
aggcccacagactattttgtcttcc

SEQ ID NO: 369891 - DNA, 25 bp, Homo sapien
aacttaaggcccacagactattttg

SEQ ID NO: 369892 - DNA, 25 bp, Homo sapien
taaggcccacagactattttgtctt

SEQ ID NO: 369893 - DNA, 25 bp, Homo sapien
cttaaggcccacagactattttgtc

SEQ ID NO: 369894 - DNA, 25 bp, Homo sapien
ttacaacatccttggacttgacctc

SEQ ID NO: 369895 - DNA, 25 bp, Homo sapien
catccttggacttgacctctggtct

SEQ ID NO: 369896 - DNA, 25 bp, Homo sapien
ttggacttgacctctggtctctgtc

SEQ ID NO: 369897 - DNA, 25 bp, Homo sapien
caacatccttggacttgacctctgg

SEQ ID NO: 369898 - DNA, 25 bp, Homo sapien
tgaaattaaactccctggactgtgc

SEQ ID NO: 369899 - DNA, 25 bp, Homo sapien
gaaattaaactccctggactgtgca

SEQ ID NO: 369900 - DNA, 25 bp, Homo sapien
ttgaaattaaactccctggactgtg

SEQ ID NO: 369901 - DNA, 25 bp, Homo sapien
tattgtagctcagactggcttgtga

SEQ ID NO: 369902 - DNA, 25 bp, Homo sapien
tcagggactctgcctagatgcataa

SEQ ID NO: 369903 - DNA, 25 bp, Homo sapien
gcctagatgcataaatattgtagct

SEQ ID NO: 369904 - DNA, 25 bp, Homo sapien
cataaatattgtagctcagactggc

SEQ ID NO: 369905 - DNA, 25 bp, Homo sapien
ggcaaagaaggtaaccggcccatca

SEQ ID NO: 369906 - DNA, 25 bp, Homo sapien
gatgggagctgcaaacttcaccgaa

SEQ ID NO: 369907 - DNA, 25 bp, Homo sapien
gatgctgctgcacatgaaatctcaa

SEQ ID NO: 369908 - DNA, 25 bp, Homo sapien
tctaggcaaggtagaggccaacggt

SEQ ID NO: 369909 - DNA, 25 bp, Homo sapien
tctgtgggtatctctatacataagg

SEQ ID NO: 369910 - DNA, 25 bp, Homo sapien
ccataggtggtagacatctgtgggt

SEQ ID NO: 369911 - DNA, 25 bp, Homo sapien
tgggtatctctatacataaggaaga

SEQ ID NO: 369912 - DNA, 25 bp, Homo sapien
taggtggtagacatctgtgggtatc

SEQ ID NO: 369913 - DNA, 25 bp, Homo sapien
taatctttgagaggcatcagctgca

SEQ ID NO: 369914 - DNA, 25 bp, Homo sapien
gcctttggccaaccttagaactgaa

SEQ ID NO: 369915 - DNA, 25 bp, Homo sapien
ttggcctactttggactggatgagc

SEQ ID NO: 369916 - DNA, 25 bp, Homo sapien
tccggtcccttactagtagcttgca

SEQ ID NO: 369917 - DNA, 25 bp, Homo sapien
gctgtgtccaaatttgcctgcttca

SEQ ID NO: 369918 - DNA, 25 bp, Homo sapien
aatttgcctgcttcaccactggaga

SEQ ID NO: 369919 - DNA, 25 bp, Homo sapien
aagcagtcgcactccttgtagggca

SEQ ID NO: 369920 - DNA, 25 bp, Homo sapien
ccactggagagtgtagcaagcagtc

SEQ ID NO: 369921 - DNA, 25 bp, Homo sapien
tcatcttcgattggcccaagacaac

SEQ ID NO: 369922 - DNA, 25 bp, Homo sapien
tatccataggaagaatacaacagtt

SEQ ID NO: 369923 - DNA, 25 bp, Homo sapien
gctttgtatccataggaagaataca

SEQ ID NO: 369924 - DNA, 25 bp, Homo sapien
ggcccaagacaacctaaatgttgac

SEQ ID NO: 369925 - DNA, 25 bp, Homo sapien
tcctgaattgcatcgaaacaatcag

SEQ ID NO: 369926 - DNA, 25 bp, Homo sapien
aaacaatcagtttcgatgagttgag

SEQ ID NO: 369927 - DNA, 25 bp, Homo sapien
cgatgagttgagtgacagattttaa

SEQ ID NO: 369928 - DNA, 25 bp, Homo sapien
gagcctagccctgatataacccaaa

SEQ ID NO: 369929 - DNA, 25 bp, Homo sapien
ttttttgcttctaggtcctgcacca

SEQ ID NO: 369930 - DNA, 25 bp, Homo sapien
ccttttttgcttctaggtcctgcac

SEQ ID NO: 369931 - DNA, 25 bp, Homo sapien
cttttttgcttctaggtcctgcacc

SEQ ID NO: 369932 - DNA, 25 bp, Homo sapien
tttttgcttctaggtcctgcaccac

SEQ ID NO: 369933 - DNA, 25 bp, Homo sapien
cctgctcgtagctggttccttctgc

SEQ ID NO: 369934 - DNA, 25 bp, Homo sapien
aactccactgtgactctgctaaggg

SEQ ID NO: 369935 - DNA, 25 bp, Homo sapien
tcaggcctcagacttgaccggtgca

SEQ ID NO: 369936 - DNA, 25 bp, Homo sapien
gacactctggtggagctgcacctca

SEQ ID NO: 369937 - DNA, 25 bp, Homo sapien
gcctccttgcttgactgtgttctga

SEQ ID NO: 369938 - DNA, 25 bp, Homo sapien
gaaggtttttccaggcattatccca

SEQ ID NO: 369939 - DNA, 25 bp, Homo sapien
aatccaggcttgaagaagggacact

SEQ ID NO: 369940 - DNA, 25 bp, Homo sapien
tccctggagattgagggcctcccag

SEQ ID NO: 369941 - DNA, 25 bp, Homo sapien
aatcgtctttattaagctgagtcca

SEQ ID NO: 369942 - DNA, 25 bp, Homo sapien
tatccatagcactgtataaatcgtc

SEQ ID NO: 369943 - DNA, 25 bp, Homo sapien
cttctcttatccatagcactgtata

SEQ ID NO: 369944 - DNA, 25 bp, Homo sapien
gagtccatgagctatacctgctaat

SEQ ID NO: 369945 - DNA, 25 bp, Homo sapien
cagtacttaaaaggagtgtagccca

SEQ ID NO: 369946 - DNA, 25 bp, Homo sapien
gcttggataatacacagccattggg

SEQ ID NO: 369947 - DNA, 25 bp, Homo sapien
caagttgggacattgttcgtgggtc

SEQ ID NO: 369948 - DNA, 25 bp, Homo sapien
tcgtgggtccgaaagcccaaggaga

SEQ ID NO: 369949 - DNA, 25 bp, Homo sapien
gagtgtgacattaatctgagggaaa

SEQ ID NO: 369950 - DNA, 25 bp, Homo sapien
tggttcccatcagtgcttcgcttct

SEQ ID NO: 369951 - DNA, 25 bp, Homo sapien
tctcactaattgcaattcttatgaa

SEQ ID NO: 369952 - DNA, 25 bp, Homo sapien
ttatgaacttcctccaaagtagctg

SEQ ID NO: 369953 - DNA, 25 bp, Homo sapien
gaccaaaagaaagttgcctcagcaa

SEQ ID NO: 369954 - DNA, 25 bp, Homo sapien
cctcttagcaagagcaacttctaca

SEQ ID NO: 369955 - DNA, 25 bp, Homo sapien
cagaccaaaagaaagttgcctcagc

SEQ ID NO: 369956 - DNA, 25 bp, Homo sapien
tagcaagagcaacttctacacctgg

SEQ ID NO: 369957 - DNA, 25 bp, Homo sapien
gagatgaatacattattccaagaag

SEQ ID NO: 369958 - DNA, 25 bp, Homo sapien
gatgaatacattattccaagaagca

SEQ ID NO: 369959 - DNA, 25 bp, Homo sapien
agatgaatacattattccaagaagc

SEQ ID NO: 369960 - DNA, 25 bp, Homo sapien
aagagatgaatacattattccaaga

SEQ ID NO: 369961 - DNA, 25 bp, Homo sapien
gaagggccacagggcataaatgtgg

SEQ ID NO: 369962 - DNA, 25 bp, Homo sapien
ctgaagggccacagggcataaatgt

SEQ ID NO: 369963 - DNA, 25 bp, Homo sapien
tgaagggccacagggcataaatgtg

SEQ ID NO: 369964 - DNA, 25 bp, Homo sapien
gcctctcccagctggtaggagtttc

SEQ ID NO: 369965 - DNA, 25 bp, Homo sapien
ctctcccagctggtaggagtttctc

SEQ ID NO: 369966 - DNA, 25 bp, Homo sapien
gctggtaggagtttctccatgctca

SEQ ID NO: 369967 - DNA, 25 bp, Homo sapien
tcccctttatcttctggagccaggg

SEQ ID NO: 369968 - DNA, 25 bp, Homo sapien
gccacagtattcttgtcctgactcc

SEQ ID NO: 369969 - DNA, 25 bp, Homo sapien
cacagtattcttgtcctgactccag

SEQ ID NO: 369970 - DNA, 25 bp, Homo sapien
agctcttccttacttccatgtggaa

SEQ ID NO: 369971 - DNA, 25 bp, Homo sapien
cttacttccatgtggaattctcagt

SEQ ID NO: 369972 - DNA, 25 bp, Homo sapien
tgcccaatgtggtaggtggattcct

SEQ ID NO: 369973 - DNA, 25 bp, Homo sapien
ttttgctggcgaggatcaaggccga

SEQ ID NO: 369974 - DNA, 25 bp, Homo sapien
ctgaagtcagcagtattagcagcag

SEQ ID NO: 369975 - DNA, 25 bp, Homo sapien
gatcatggcagagtagcctgggact

SEQ ID NO: 369976 - DNA, 25 bp, Homo sapien
ggaaactgcttctcatttgaaatct

SEQ ID NO: 369977 - DNA, 25 bp, Homo sapien
acttcaatatgagggaaggaaactg

SEQ ID NO: 369978 - DNA, 25 bp, Homo sapien
tcaatatgagggaaggaaactgctt

SEQ ID NO: 369979 - DNA, 25 bp, Homo sapien
aaggaaactgcttctcatttgaaat

SEQ ID NO: 369980 - DNA, 25 bp, Homo sapien
aaagtctcccgctttgaacttgcct

SEQ ID NO: 369981 - DNA, 25 bp, Homo sapien
ccaactatttctttcgttgaaccat

SEQ ID NO: 369982 - DNA, 25 bp, Homo sapien
tcgtggcccaaacgaacaaatactc

SEQ ID NO: 369983 - DNA, 25 bp, Homo sapien
catcaaatacctcaatcccaactat

SEQ ID NO: 369984 - DNA, 25 bp, Homo sapien
ggcctttgcaaaaccaatattaggc

SEQ ID NO: 369985 - DNA, 25 bp, Homo sapien
ggtcaagggcagattgttgtaaaac

SEQ ID NO: 369986 - DNA, 25 bp, Homo sapien
tgtgttctgtacacgtattttctct

SEQ ID NO: 369987 - DNA, 25 bp, Homo sapien
taaaacagctaataaacaggaaaca

SEQ ID NO: 369988 - DNA, 25 bp, Homo sapien
caattttcaggccacatcgttttaa

SEQ ID NO: 369989 - DNA, 25 bp, Homo sapien
ttagcatttccagggtactactgcc

SEQ ID NO: 369990 - DNA, 25 bp, Homo sapien
gctattgtttatgatcactctgctg

SEQ ID NO: 369991 - DNA, 25 bp, Homo sapien
gctgcctcatctcgaactttatgta

SEQ ID NO: 369992 - DNA, 25 bp, Homo sapien
acaaatcgtagatcttctctggcgg

SEQ ID NO: 369993 - DNA, 25 bp, Homo sapien
aataccagggaatgtcaagtcaaac

SEQ ID NO: 369994 - DNA, 25 bp, Homo sapien
tgccacagaacgatgacacagggat

SEQ ID NO: 369995 - DNA, 25 bp, Homo sapien
tatacctgaaagcaagcgcttgcct

SEQ ID NO: 369996 - DNA, 25 bp, Homo sapien
aagtttagctacaaggccatataag

SEQ ID NO: 369997 - DNA, 25 bp, Homo sapien
tacaaggccatataagagtccttcc

SEQ ID NO: 369998 - DNA, 25 bp, Homo sapien
gggcgaactttccagctagagtttg

SEQ ID NO: 369999 - DNA, 25 bp, Homo sapien
tgctgcagtgtgtggttgctcaagt

SEQ ID NO: 370000 - DNA, 25 bp, Homo sapien
tcagtgtcattctcggtgtttgaaa

SEQ ID NO: 370001 - DNA, 25 bp, Homo sapien
tgtcagaaaattcgtacttccctaa

SEQ ID NO: 370002 - DNA, 25 bp, Homo sapien
cagggagttcctctatgcagtgtag

SEQ ID NO: 370003 - DNA, 25 bp, Homo sapien
cttccctaaattgggtgattgggtg

SEQ ID NO: 370004 - DNA, 25 bp, Homo sapien
gagagtgtctgttgccgaggttcat

SEQ ID NO: 370005 - DNA, 25 bp, Homo sapien
ttcatcacacttctccgaaagccct

SEQ ID NO: 370006 - DNA, 25 bp, Homo sapien
gaggctgagagtgtctgttgccgag

SEQ ID NO: 370007 - DNA, 25 bp, Homo sapien
tctgttgccgaggttcatttcatca

SEQ ID NO: 370008 - DNA, 25 bp, Homo sapien
tggccttttggatgatgctctttgt

SEQ ID NO: 370009 - DNA, 25 bp, Homo sapien
ttggccttttggatgatgctctttg

SEQ ID NO: 370010 - DNA, 25 bp, Homo sapien
ggccttttggatgatgctctttgtc

SEQ ID NO: 370011 - DNA, 25 bp, Homo sapien
gcaagacttcaccagctcaagacgg

SEQ ID NO: 370012 - DNA, 25 bp, Homo sapien
taccaacagcgatcagatgttcgcc

SEQ ID NO: 370013 - DNA, 25 bp, Homo sapien
gacggccatcttgatagacacggtt

SEQ ID NO: 370014 - DNA, 25 bp, Homo sapien
tcagataaggacataaccaggcaca

SEQ ID NO: 370015 - DNA, 25 bp, Homo sapien
ggttatctattcttctcctactcat

SEQ ID NO: 370016 - DNA, 25 bp, Homo sapien
cacttgatcacctccttttccaaat

SEQ ID NO: 370017 - DNA, 25 bp, Homo sapien
tcatatttgaaggtctagcttgaag

SEQ ID NO: 370018 - DNA, 25 bp, Homo sapien
tgaagccaattcagtccatgatttc

SEQ ID NO: 370019 - DNA, 25 bp, Homo sapien
gttgccgcctcaccatagtgatttc

SEQ ID NO: 370020 - DNA, 25 bp, Homo sapien
cacctgtcactagagtttggtgtca

SEQ ID NO: 370021 - DNA, 25 bp, Homo sapien
gtccattacccacacgtctctctta

SEQ ID NO: 370022 - DNA, 25 bp, Homo sapien
agtttggtgtcagtatagcaaaggg

SEQ ID NO: 370023 - DNA, 25 bp, Homo sapien
cttcaaaagcagatttctttttctt

SEQ ID NO: 370024 - DNA, 25 bp, Homo sapien
ttcttgtctgagagttctttctcca

SEQ ID NO: 370025 - DNA, 25 bp, Homo sapien
ctttttcttgtctgagagttctttc

SEQ ID NO: 370026 - DNA, 25 bp, Homo sapien
ttttcttgtctgagagttctttctc

SEQ ID NO: 370027 - DNA, 25 bp, Homo sapien
tacccacttgtattttgagctggcg

SEQ ID NO: 370028 - DNA, 25 bp, Homo sapien
taaggataaggaacctcagtaccca

SEQ ID NO: 370029 - DNA, 25 bp, Homo sapien
gcgtggtgtcctatttgcaggtaat

SEQ ID NO: 370030 - DNA, 25 bp, Homo sapien
gataaggaacctcagtacccacttg

SEQ ID NO: 370031 - DNA, 25 bp, Homo sapien
atggtgaggaggtctgccctcttcc

SEQ ID NO: 370032 - DNA, 25 bp, Homo sapien
gatggtgaggaggtctgccctcttc

SEQ ID NO: 370033 - DNA, 25 bp, Homo sapien
aggaggtctgccctcttcctactca

SEQ ID NO: 370034 - DNA, 25 bp, Homo sapien
ttagatggtgaggaggtctgccctc

SEQ ID NO: 370035 - DNA, 25 bp, Homo sapien
gtgtcactcccattttagtgtacat

SEQ ID NO: 370036 - DNA, 25 bp, Homo sapien
tgtgtcactcccattttagtgtaca

SEQ ID NO: 370037 - DNA, 25 bp, Homo sapien
gtcactcccattttagtgtacatgc

SEQ ID NO: 370038 - DNA, 25 bp, Homo sapien
tgtcactcccattttagtgtacatg

SEQ ID NO: 370039 - DNA, 25 bp, Homo sapien
tccagtggaagtcaagtttaagaaa

SEQ ID NO: 370040 - DNA, 25 bp, Homo sapien
tgtctccagtggaagtcaagtttaa

SEQ ID NO: 370041 - DNA, 25 bp, Homo sapien
gcctaagacactgtctccagtggaa

SEQ ID NO: 370042 - DNA, 25 bp, Homo sapien
acactgtctccagtggaagtcaagt

SEQ ID NO: 370043 - DNA, 25 bp, Homo sapien
agttccccagaagacctctaaggag

SEQ ID NO: 370044 - DNA, 25 bp, Homo sapien
ggcttgctccagtcaccactgtatt

SEQ ID NO: 370045 - DNA, 25 bp, Homo sapien
gtttgtcttgaacatagatagtacc

SEQ ID NO: 370046 - DNA, 25 bp, Homo sapien
cctctaaggagcaaacaagtttgtc

SEQ ID NO: 370047 - DNA, 25 bp, Homo sapien
ttagggaatcacaaagaggagcatg

SEQ ID NO: 370048 - DNA, 25 bp, Homo sapien
tcacaaagaggagcatgtgataaga

SEQ ID NO: 370049 - DNA, 25 bp, Homo sapien
acaaagaggagcatgtgataagaac

SEQ ID NO: 370050 - DNA, 25 bp, Homo sapien
aatcacaaagaggagcatgtgataa

SEQ ID NO: 370051 - DNA, 25 bp, Homo sapien
tctgtctggataccaccgaggaaga

SEQ ID NO: 370052 - DNA, 25 bp, Homo sapien
gtctggataccaccgaggaagattt

SEQ ID NO: 370053 - DNA, 25 bp, Homo sapien
aatctgtctggataccaccgaggaa

SEQ ID NO: 370054 - DNA, 25 bp, Homo sapien
tcaatctgtctggataccaccgagg

SEQ ID NO: 370055 - DNA, 25 bp, Homo sapien
tgtgtgatcaaattctttttctgaa

SEQ ID NO: 370056 - DNA, 25 bp, Homo sapien
tgtgatcaaattctttttctgaagc

SEQ ID NO: 370057 - DNA, 25 bp, Homo sapien
aattctttttctgaagcactgggat

SEQ ID NO: 370058 - DNA, 25 bp, Homo sapien
ttttctgaagcactgggatagagcc

SEQ ID NO: 370059 - DNA, 25 bp, Homo sapien
cagatatgggaccgtctgaatttcc

SEQ ID NO: 370060 - DNA, 25 bp, Homo sapien
agatatgggaccgtctgaatttcca

SEQ ID NO: 370061 - DNA, 25 bp, Homo sapien
gatatgggaccgtctgaatttccat

SEQ ID NO: 370062 - DNA, 25 bp, Homo sapien
ggcaggcagtagaccatgttgggag

SEQ ID NO: 370063 - DNA, 25 bp, Homo sapien
aaggcaggcagtagaccatgttggg

SEQ ID NO: 370064 - DNA, 25 bp, Homo sapien
aggcaggcagtagaccatgttggga

SEQ ID NO: 370065 - DNA, 25 bp, Homo sapien
gcaggcagtagaccatgttgggaga

SEQ ID NO: 370066 - DNA, 25 bp, Homo sapien
tcatcgaatcaattcaatgtcatct

SEQ ID NO: 370067 - DNA, 25 bp, Homo sapien
atcgaatcaattcaatgtcatcttg

SEQ ID NO: 370068 - DNA, 25 bp, Homo sapien
tcgaatcaattcaatgtcatcttgg

SEQ ID NO: 370069 - DNA, 25 bp, Homo sapien
cgaatcaattcaatgtcatcttgga

SEQ ID NO: 370070 - DNA, 25 bp, Homo sapien
aatgcttcagatatttcagtcttga

SEQ ID NO: 370071 - DNA, 25 bp, Homo sapien
tacaggacacgctgccattgccatg

SEQ ID NO: 370072 - DNA, 25 bp, Homo sapien
tatgcttaggccaagtacaggacac

SEQ ID NO: 370073 - DNA, 25 bp, Homo sapien
cattgccatggaaattaccaggtgc

SEQ ID NO: 370074 - DNA, 25 bp, Homo sapien
ttcatcagctatccttgattctcca

SEQ ID NO: 370075 - DNA, 25 bp, Homo sapien
ttgcggcacagcagtggaagcattt

SEQ ID NO: 370076 - DNA, 25 bp, Homo sapien
taatccttgcggcacagcagtggaa

SEQ ID NO: 370077 - DNA, 25 bp, Homo sapien
aaactctagagcttcatcagctatc

SEQ ID NO: 370078 - DNA, 25 bp, Homo sapien
tattcaaaaccacgaccacacagtt

SEQ ID NO: 370079 - DNA, 25 bp, Homo sapien
gaaacttaccagtaccttcaatagc

SEQ ID NO: 370080 - DNA, 25 bp, Homo sapien
cagtatggccagttcgtcttcaaga

SEQ ID NO: 370081 - DNA, 25 bp, Homo sapien
tggccacagaccttaaggttgttag

SEQ ID NO: 370082 - DNA, 25 bp, Homo sapien
cactcatgagaattatttctctccc

SEQ ID NO: 370083 - DNA, 25 bp, Homo sapien
agcagagtcatgtgctgatctgatg

SEQ ID NO: 370084 - DNA, 25 bp, Homo sapien
agagtcatgtgctgatctgatgtca

SEQ ID NO: 370085 - DNA, 25 bp, Homo sapien
taagaaggtttgaggctggcacatt

SEQ ID NO: 370086 - DNA, 25 bp, Homo sapien
agtcatgtgctgatctgatgtcata

SEQ ID NO: 370087 - DNA, 25 bp, Homo sapien
cctttctgtgtcacgcgttctctcc

SEQ ID NO: 370088 - DNA, 25 bp, Homo sapien
cataacgtcccaaaactgcgtaggg

SEQ ID NO: 370089 - DNA, 25 bp, Homo sapien
ctctcccctcgcctttctaggaatt

SEQ ID NO: 370090 - DNA, 25 bp, Homo sapien
aacatttccctccatgcccataacg

SEQ ID NO: 370091 - DNA, 25 bp, Homo sapien
gagaggggacggagggagcggccgc

SEQ ID NO: 370092 - DNA, 25 bp, Homo sapien
agagaggggacggagggagcggccg

SEQ ID NO: 370093 - DNA, 25 bp, Homo sapien
agggagagaggggacggagggagcg

SEQ ID NO: 370094 - DNA, 25 bp, Homo sapien
ggagagaggggacggagggagcggc

SEQ ID NO: 370095 - DNA, 25 bp, Homo sapien
acgttcctttgctgccggtccgcgg

SEQ ID NO: 370096 - DNA, 25 bp, Homo sapien
ggcgtcacgcgttcgcacgttcctt

SEQ ID NO: 370097 - DNA, 25 bp, Homo sapien
agagcgcgagccagtcgggcggcgt

SEQ ID NO: 370098 - DNA, 25 bp, Homo sapien
cccgggccatgagcgggcggaggac

SEQ ID NO: 370099 - DNA, 25 bp, Homo sapien
gcggccgcctcacgtctccacgcgg

SEQ ID NO: 370100 - DNA, 25 bp, Homo sapien
cgcggacggcctgggaggacagcgc

SEQ ID NO: 370101 - DNA, 25 bp, Homo sapien
gcgaaacgccgactgtgagggccac

SEQ ID NO: 370102 - DNA, 25 bp, Homo sapien
atggcggccggcgtgcgcgggcacc

SEQ ID NO: 370103 - DNA, 25 bp, Homo sapien
gcagcacgttctgctccacggtcat

SEQ ID NO: 370104 - DNA, 25 bp, Homo sapien
gctgcagcacgttctgctccacggt

SEQ ID NO: 370105 - DNA, 25 bp, Homo sapien
ctgctgcagcacgttctgctccacg

SEQ ID NO: 370106 - DNA, 25 bp, Homo sapien
cttctgcgccgcgctctgctgcagc

SEQ ID NO: 370107 - DNA, 25 bp, Homo sapien
cactgtaggaatgtgagggtcgctc

SEQ ID NO: 370108 - DNA, 25 bp, Homo sapien
ccacacagagcactgtaggaatgtg

SEQ ID NO: 370109 - DNA, 25 bp, Homo sapien
ggtcgctctcaatacctggcaccgt

SEQ ID NO: 370110 - DNA, 25 bp, Homo sapien
tgtgagggtcgctctcaatacctgg

SEQ ID NO: 370111 - DNA, 25 bp, Homo sapien
caacagatatagtgggggttttcca

SEQ ID NO: 370112 - DNA, 25 bp, Homo sapien
acccaacctttcaaccatatctgca

SEQ ID NO: 370113 - DNA, 25 bp, Homo sapien
tgcatcatgtttatgacccttaaga

SEQ ID NO: 370114 - DNA, 25 bp, Homo sapien
tcatgtttatgacccttaagagtat

SEQ ID NO: 370115 - DNA, 25 bp, Homo sapien
aaccatatctgcatcatgtttatga

SEQ ID NO: 370116 - DNA, 25 bp, Homo sapien
ctgtgatacgccctgatcctcaact

SEQ ID NO: 370117 - DNA, 25 bp, Homo sapien
tccaaggtggttcccatccaatcca

SEQ ID NO: 370118 - DNA, 25 bp, Homo sapien
cacttccatatctagagctcctctt

SEQ ID NO: 370119 - DNA, 25 bp, Homo sapien
gatacgccctgatcctcaactggaa

SEQ ID NO: 370120 - DNA, 25 bp, Homo sapien
gaacatgacttggtagcccacttgc

SEQ ID NO: 370121 - DNA, 25 bp, Homo sapien
cccagttgaacttctgcaacctgct

SEQ ID NO: 370122 - DNA, 25 bp, Homo sapien
aagaacatgacttggtagcccactt

SEQ ID NO: 370123 - DNA, 25 bp, Homo sapien
gctagcccagttgaacttctgcaac

SEQ ID NO: 370124 - DNA, 25 bp, Homo sapien
tggttaataacagcctgaccaccgc

SEQ ID NO: 370125 - DNA, 25 bp, Homo sapien
tgaccaccgcctaatggttgcctga

SEQ ID NO: 370126 - DNA, 25 bp, Homo sapien
tataatctgtgagatagccctgccg

SEQ ID NO: 370127 - DNA, 25 bp, Homo sapien
caaacccaaactgaaggacactgtg

SEQ ID NO: 370128 - DNA, 25 bp, Homo sapien
tctcagttgattcaaaaacgtctgc

SEQ ID NO: 370129 - DNA, 25 bp, Homo sapien
tgctgtagtatctgggtgtcattaa

SEQ ID NO: 370130 - DNA, 25 bp, Homo sapien
taatccccgtaatttctctcagttg

SEQ ID NO: 370131 - DNA, 25 bp, Homo sapien
tctgggtgtcattaatccccgtaat

SEQ ID NO: 370132 - DNA, 25 bp, Homo sapien
tgtatctatcattgccaggaagtgc

SEQ ID NO: 370133 - DNA, 25 bp, Homo sapien
ggtagtaagttgtctcctcctgctg

SEQ ID NO: 370134 - DNA, 25 bp, Homo sapien
tagcattcttcgcagtaaggaaagc

SEQ ID NO: 370135 - DNA, 25 bp, Homo sapien
caggaagtgctgtttggtagtaagt

SEQ ID NO: 370136 - DNA, 25 bp, Homo sapien
atccctcttatcttttgatcgctca

SEQ ID NO: 370137 - DNA, 25 bp, Homo sapien
agcacatcttgttctggagagcata

SEQ ID NO: 370138 - DNA, 25 bp, Homo sapien
tgttctggagagcatatactgtttt

SEQ ID NO: 370139 - DNA, 25 bp, Homo sapien
gatcgctcaattgtagcacatcttg

SEQ ID NO: 370140 - DNA, 25 bp, Homo sapien
gaatgccctgtttgattcggccaaa

SEQ ID NO: 370141 - DNA, 25 bp, Homo sapien
caaggcaattgctctctgaagatca

SEQ ID NO: 370142 - DNA, 25 bp, Homo sapien
tatcatctccagtgagatcaatcac

SEQ ID NO: 370143 - DNA, 25 bp, Homo sapien
ctaatggcttgttcctcatcagtta

SEQ ID NO: 370144 - DNA, 25 bp, Homo sapien
tgactctatgctccacagggacttt

SEQ ID NO: 370145 - DNA, 25 bp, Homo sapien
cctctgggatacagggtggctactg

SEQ ID NO: 370146 - DNA, 25 bp, Homo sapien
tcaggaagcactccagatgtgggct

SEQ ID NO: 370147 - DNA, 25 bp, Homo sapien
aactgttcatgctggacttgggacc

SEQ ID NO: 370148 - DNA, 25 bp, Homo sapien
tctagtctgttactgtggctctcaa

SEQ ID NO: 370149 - DNA, 25 bp, Homo sapien
gaatgggttatttcaaacgatctgt

SEQ ID NO: 370150 - DNA, 25 bp, Homo sapien
ttaattcctcaagctccaagattcc

SEQ ID NO: 370151 - DNA, 25 bp, Homo sapien
tgtattctcttacaactcaaaagtt

SEQ ID NO: 370152 - DNA, 25 bp, Homo sapien
gacccattggttattaaggtgcata

SEQ ID NO: 370153 - DNA, 25 bp, Homo sapien
tctctgagttgcacagttaatctgt

SEQ ID NO: 370154 - DNA, 25 bp, Homo sapien
tctagaacaggtttcactgtgtccc

SEQ ID NO: 370155 - DNA, 25 bp, Homo sapien
cactgatcttttgaattgctctttt

SEQ ID NO: 370156 - DNA, 25 bp, Homo sapien
tctttttctatcataagggtttcga

SEQ ID NO: 370157 - DNA, 25 bp, Homo sapien
ccaacattctttagcccaacgggag

SEQ ID NO: 370158 - DNA, 25 bp, Homo sapien
gagaatccctccaaacttctgtagg

SEQ ID NO: 370159 - DNA, 25 bp, Homo sapien
tctttagcccaacgggagctttgtc

SEQ ID NO: 370160 - DNA, 25 bp, Homo sapien
cagttctggagatgcctaaaggaca

SEQ ID NO: 370161 - DNA, 25 bp, Homo sapien
cattgcaactggcacaaggaggaca

SEQ ID NO: 370162 - DNA, 25 bp, Homo sapien
gagtcacagtctcaggtcgccttaa

SEQ ID NO: 370163 - DNA, 25 bp, Homo sapien
gaagcgtgataaattctcctcggag

SEQ ID NO: 370164 - DNA, 25 bp, Homo sapien
aaatcttgagcatttgatggaggct

SEQ ID NO: 370165 - DNA, 25 bp, Homo sapien
ggcttgtaattcagaactaatcttc

SEQ ID NO: 370166 - DNA, 25 bp, Homo sapien
tggtttcggggtaaatcttgagcat

SEQ ID NO: 370167 - DNA, 25 bp, Homo sapien
tcagaactaatcttctaaattccaa

SEQ ID NO: 370168 - DNA, 25 bp, Homo sapien
ggagacaactgaggaaagaccttaa

SEQ ID NO: 370169 - DNA, 25 bp, Homo sapien
tactaaagcgacaccaaaaattggc

SEQ ID NO: 370170 - DNA, 25 bp, Homo sapien
gggctgcacaagacgatcaattgaa

SEQ ID NO: 370171 - DNA, 25 bp, Homo sapien
taactgacaatagctgacacctagt

SEQ ID NO: 370172 - DNA, 25 bp, Homo sapien
tcagctcacgcataaaaggcaaatt

SEQ ID NO: 370173 - DNA, 25 bp, Homo sapien
gaagtgcaaatagatacctcagctc

SEQ ID NO: 370174 - DNA, 25 bp, Homo sapien
gaaagcatccttaagaatttcaact

SEQ ID NO: 370175 - DNA, 25 bp, Homo sapien
gctcttgatggatcaacatacttcc

SEQ ID NO: 370176 - DNA, 25 bp, Homo sapien
ggaaaggtgcttaatattgttcaga

SEQ ID NO: 370177 - DNA, 25 bp, Homo sapien
gcatgtgtactataatgatcctctg

SEQ ID NO: 370178 - DNA, 25 bp, Homo sapien
gaacaagtcagtgcaacagaactac

SEQ ID NO: 370179 - DNA, 25 bp, Homo sapien
tcaaatagtctcatattcttgggaa

SEQ ID NO: 370180 - DNA, 25 bp, Homo sapien
aaaatactagatgttgtaacatcaa

SEQ ID NO: 370181 - DNA, 25 bp, Homo sapien
tagatgttgtaacatcaaacctaga

SEQ ID NO: 370182 - DNA, 25 bp, Homo sapien
tggaaggcatcttctaaccaatcta

SEQ ID NO: 370183 - DNA, 25 bp, Homo sapien
gaaggcatcttctaaccaatctaat

SEQ ID NO: 370184 - DNA, 25 bp, Homo sapien
tttggaaggcatcttctaaccaatc

SEQ ID NO: 370185 - DNA, 25 bp, Homo sapien
ctaaccaatctaataatttgtgtgt

SEQ ID NO: 370186 - DNA, 25 bp, Homo sapien
gggccctgagtgaacagataaaaca

SEQ ID NO: 370187 - DNA, 25 bp, Homo sapien
tgggattcccataagtctgtcttga

SEQ ID NO: 370188 - DNA, 25 bp, Homo sapien
ttcgtagccgccatcctaattagtg

SEQ ID NO: 370189 - DNA, 25 bp, Homo sapien
gcaagatcccagaaacctaggtgac

SEQ ID NO: 370190 - DNA, 25 bp, Homo sapien
aaaacacttatgtggctatcacgca

SEQ ID NO: 370191 - DNA, 25 bp, Homo sapien
gataactatgatagctgcacccaca

SEQ ID NO: 370192 - DNA, 25 bp, Homo sapien
tacctgtcaactgcggataactatg

SEQ ID NO: 370193 - DNA, 25 bp, Homo sapien
gccacgttgcacaaggtacttattc

SEQ ID NO: 370194 - DNA, 25 bp, Homo sapien
tgccatagaacaactctaccatggg

SEQ ID NO: 370195 - DNA, 25 bp, Homo sapien
tctgccatagaacaactctaccatg

SEQ ID NO: 370196 - DNA, 25 bp, Homo sapien
caactctaccatggggttctttggc

SEQ ID NO: 370197 - DNA, 25 bp, Homo sapien
gaatctgccatagaacaactctacc

SEQ ID NO: 370198 - DNA, 25 bp, Homo sapien
agtgggtactgaccaaacatttcag

SEQ ID NO: 370199 - DNA, 25 bp, Homo sapien
acccattgacctgaagtgggtactg

SEQ ID NO: 370200 - DNA, 25 bp, Homo sapien
gatctttgaacccattgacctgaag

SEQ ID NO: 370201 - DNA, 25 bp, Homo sapien
agcttctaggcactcatgcagatct

SEQ ID NO: 370202 - DNA, 25 bp, Homo sapien
gttttcttcactgcaatcttaggca

SEQ ID NO: 370203 - DNA, 25 bp, Homo sapien
tcttcactgcaatcttaggcacagg

SEQ ID NO: 370204 - DNA, 25 bp, Homo sapien
ttgttttcttcactgcaatcttagg

SEQ ID NO: 370205 - DNA, 25 bp, Homo sapien
tttcttcactgcaatcttaggcaca

SEQ ID NO: 370206 - DNA, 25 bp, Homo sapien
ggtcttcccaatgcctgattaaatt

SEQ ID NO: 370207 - DNA, 25 bp, Homo sapien
tgttaacacaggtggtaattcagta

SEQ ID NO: 370208 - DNA, 25 bp, Homo sapien
ctggtcttcccaatgcctgattaaa

SEQ ID NO: 370209 - DNA, 25 bp, Homo sapien
aattcaaatcttgacaattcaaatg

SEQ ID NO: 370210 - DNA, 25 bp, Homo sapien
ctttctagcctttgttgtaataccg

SEQ ID NO: 370211 - DNA, 25 bp, Homo sapien
tctagcctttgttgtaataccgtga

SEQ ID NO: 370212 - DNA, 25 bp, Homo sapien
tgtaataccgtgaggtaatctttca

SEQ ID NO: 370213 - DNA, 25 bp, Homo sapien
gcctttgttgtaataccgtgaggta

SEQ ID NO: 370214 - DNA, 25 bp, Homo sapien
gaagacttggtaggcagctgagttt

SEQ ID NO: 370215 - DNA, 25 bp, Homo sapien
caatttcctcctttacgaagctgct

SEQ ID NO: 370216 - DNA, 25 bp, Homo sapien
catcttacacctgacacaatttcct

SEQ ID NO: 370217 - DNA, 25 bp, Homo sapien
cctcctttacgaagctgctgagaag

SEQ ID NO: 370218 - DNA, 25 bp, Homo sapien
tattattataaaacgtgatacgata

SEQ ID NO: 370219 - DNA, 25 bp, Homo sapien
tatacagcatatttgggcctttatt

SEQ ID NO: 370220 - DNA, 25 bp, Homo sapien
acgtgatacgatacttcaataaaac

SEQ ID NO: 370221 - DNA, 25 bp, Homo sapien
ttataaaacgtgatacgatacttca

SEQ ID NO: 370222 - DNA, 25 bp, Homo sapien
tatcgtcaacaggagaagtgcaaac

SEQ ID NO: 370223 - DNA, 25 bp, Homo sapien
tgggaccggaaccatagcttaaata

SEQ ID NO: 370224 - DNA, 25 bp, Homo sapien
acaggtttacttgaggcaaattcca

SEQ ID NO: 370225 - DNA, 25 bp, Homo sapien
gggaactagcgtcaatatcgtcaac

SEQ ID NO: 370226 - DNA, 25 bp, Homo sapien
gaagatagggctccctgttgttctg

SEQ ID NO: 370227 - DNA, 25 bp, Homo sapien
aagatagggctccctgttgttctgt

SEQ ID NO: 370228 - DNA, 25 bp, Homo sapien
tgaagatagggctccctgttgttct

SEQ ID NO: 370229 - DNA, 25 bp, Homo sapien
agatagggctccctgttgttctgtt

SEQ ID NO: 370230 - DNA, 25 bp, Homo sapien
tgtcctccagcgatgtaaacaactt

SEQ ID NO: 370231 - DNA, 25 bp, Homo sapien
gatctcgatgaaatggcagcaactg

SEQ ID NO: 370232 - DNA, 25 bp, Homo sapien
ccttggtgccggatgcatgggcaaa

SEQ ID NO: 370233 - DNA, 25 bp, Homo sapien
aaatctggaggtatccgggactgag

SEQ ID NO: 370234 - DNA, 25 bp, Homo sapien
tgttcgatggattctggatatgctt

SEQ ID NO: 370235 - DNA, 25 bp, Homo sapien
cattaattcaattgttcgatggatt

SEQ ID NO: 370236 - DNA, 25 bp, Homo sapien
aattcaattgttcgatggattctgg

SEQ ID NO: 370237 - DNA, 25 bp, Homo sapien
tcaattgttcgatggattctggata

SEQ ID NO: 370238 - DNA, 25 bp, Homo sapien
ggccttcgtgaactaaaacggcatg

SEQ ID NO: 370239 - DNA, 25 bp, Homo sapien
tataaccaccaaaagagtccctcac

SEQ ID NO: 370240 - DNA, 25 bp, Homo sapien
aaacggcatgtaatcgataaggaac

SEQ ID NO: 370241 - DNA, 25 bp, Homo sapien
aaatatatgcccagtagtgcccagc

SEQ ID NO: 370242 - DNA, 25 bp, Homo sapien
tatgacatgatctctggctctgagc

SEQ ID NO: 370243 - DNA, 25 bp, Homo sapien
taaatgcccagtagacagatgccag

SEQ ID NO: 370244 - DNA, 25 bp, Homo sapien
gacaagtcatcacacagttccaata

SEQ ID NO: 370245 - DNA, 25 bp, Homo sapien
gactgcctagctgattctgaatgac

SEQ ID NO: 370246 - DNA, 25 bp, Homo sapien
caaggggctgcccagtttctttatt

SEQ ID NO: 370247 - DNA, 25 bp, Homo sapien
ccaacaaggggctgcccagtttctt

SEQ ID NO: 370248 - DNA, 25 bp, Homo sapien
gctgcccagtttctttattaaactc

SEQ ID NO: 370249 - DNA, 25 bp, Homo sapien
ctataccaacaaggggctgcccagt

SEQ ID NO: 370250 - DNA, 25 bp, Homo sapien
caaaatctctcaaatccggtggtaa

SEQ ID NO: 370251 - DNA, 25 bp, Homo sapien
caaatcgttggttgtcttcctcaac

SEQ ID NO: 370252 - DNA, 25 bp, Homo sapien
tttctgggcaagttgtgcatcccat

SEQ ID NO: 370253 - DNA, 25 bp, Homo sapien
ttctgagacgctaaaagcttttcct

SEQ ID NO: 370254 - DNA, 25 bp, Homo sapien
aatctcaacaacagtatgcaggtaa

SEQ ID NO: 370255 - DNA, 25 bp, Homo sapien
ggctgaaaatctcaacaacagtatg

SEQ ID NO: 370256 - DNA, 25 bp, Homo sapien
tctgttccctacactgacagcaaag

SEQ ID NO: 370257 - DNA, 25 bp, Homo sapien
ggtaagtttgctcccctactcattc

SEQ ID NO: 370258 - DNA, 25 bp, Homo sapien
tctggaagacttcatgataggtggc

SEQ ID NO: 370259 - DNA, 25 bp, Homo sapien
cgttgtcacgggagttgaacctaca

SEQ ID NO: 370260 - DNA, 25 bp, Homo sapien
gacccactgaaacctagaatctttg

SEQ ID NO: 370261 - DNA, 25 bp, Homo sapien
gcaatagcctttcaatgcccatgag

SEQ ID NO: 370262 - DNA, 25 bp, Homo sapien
aactgtttcaggacttttatcttca

SEQ ID NO: 370263 - DNA, 25 bp, Homo sapien
catgctcatgtgatgccttggtaat

SEQ ID NO: 370264 - DNA, 25 bp, Homo sapien
ctttgagaaatcacttcttgatggc

SEQ ID NO: 370265 - DNA, 25 bp, Homo sapien
acttcttgatggctgctctagatat

SEQ ID NO: 370266 - DNA, 25 bp, Homo sapien
ccacctctacaactcgctgattaga

SEQ ID NO: 370267 - DNA, 25 bp, Homo sapien
ctcgctgattagaaagtggttggct

SEQ ID NO: 370268 - DNA, 25 bp, Homo sapien
tcataaatttccctacatgagggat

SEQ ID NO: 370269 - DNA, 25 bp, Homo sapien
ttccctacatgagggatcgccacct

SEQ ID NO: 370270 - DNA, 25 bp, Homo sapien
atgataataccttgcatgttcggtg

SEQ ID NO: 370271 - DNA, 25 bp, Homo sapien
tgtcatatacactcctggatttacc

SEQ ID NO: 370272 - DNA, 25 bp, Homo sapien
taccttgcatgttcggtgtcatcat

SEQ ID NO: 370273 - DNA, 25 bp, Homo sapien
ggatttacctatcgccatgataata

SEQ ID NO: 370274 - DNA, 25 bp, Homo sapien
gtttcttaagttctccatatgtgtg

SEQ ID NO: 370275 - DNA, 25 bp, Homo sapien
gcttgtctcctcacaaatgcacaca

SEQ ID NO: 370276 - DNA, 25 bp, Homo sapien
tctccctcctatctaggttaggctt

SEQ ID NO: 370277 - DNA, 25 bp, Homo sapien
ccatcagcaaaattagtttaagtca

SEQ ID NO: 370278 - DNA, 25 bp, Homo sapien
gtgtcttcttgggccaacttaacca

SEQ ID NO: 370279 - DNA, 25 bp, Homo sapien
aacttaaccaaccttgcatattcca

SEQ ID NO: 370280 - DNA, 25 bp, Homo sapien
ggttctggataaagtagaccactac

SEQ ID NO: 370281 - DNA, 25 bp, Homo sapien
gatgtaaacgataatcggtttctgg

SEQ ID NO: 370282 - DNA, 25 bp, Homo sapien
ctcatattcctccaagtttacttct

SEQ ID NO: 370283 - DNA, 25 bp, Homo sapien
gcttgagcaactttcattatgttgt

SEQ ID NO: 370284 - DNA, 25 bp, Homo sapien
ttcaggttttatcatttccagtttg

SEQ ID NO: 370285 - DNA, 25 bp, Homo sapien
tggcttgagcaactttcattatgtt

SEQ ID NO: 370286 - DNA, 25 bp, Homo sapien
gttgtgagtaggcaaactttttctg

SEQ ID NO: 370287 - DNA, 25 bp, Homo sapien
ctcaactctgtaactgcagtgtgaa

SEQ ID NO: 370288 - DNA, 25 bp, Homo sapien
cttgttgtcattagaatcaccttag

SEQ ID NO: 370289 - DNA, 25 bp, Homo sapien
ggtaaaatttgtcctgcaagtatga

SEQ ID NO: 370290 - DNA, 25 bp, Homo sapien
tatgagatacatagttgtttccctg

SEQ ID NO: 370291 - DNA, 25 bp, Homo sapien
gaatttcctataatcctgatgccac

SEQ ID NO: 370292 - DNA, 25 bp, Homo sapien
attttctagcccaattatgagatac

SEQ ID NO: 370293 - DNA, 25 bp, Homo sapien
tacatagttgtttccctgaatttcc

SEQ ID NO: 370294 - DNA, 25 bp, Homo sapien
tctagttaatccttctaatttggta

SEQ ID NO: 370295 - DNA, 25 bp, Homo sapien
caactaatacagaagctatccggat

SEQ ID NO: 370296 - DNA, 25 bp, Homo sapien
tttccaagttatatctcaaattcct

SEQ ID NO: 370297 - DNA, 25 bp, Homo sapien
attccacaagtaatatctgtcacca

SEQ ID NO: 370298 - DNA, 25 bp, Homo sapien
caattttaaactctagacgctcctg

SEQ ID NO: 370299 - DNA, 25 bp, Homo sapien
gacgctcctgccaataattactgtt

SEQ ID NO: 370300 - DNA, 25 bp, Homo sapien
caacattaagttgtagtagttcgtt

SEQ ID NO: 370301 - DNA, 25 bp, Homo sapien
taatgtatacattcatggcaaatca

SEQ ID NO: 370302 - DNA, 25 bp, Homo sapien
gttattctgataagcacagatgagg

SEQ ID NO: 370303 - DNA, 25 bp, Homo sapien
tataagcctttagacaagagttctt

SEQ ID NO: 370304 - DNA, 25 bp, Homo sapien
aatgtgatatcaattcttcatcatg

SEQ ID NO: 370305 - DNA, 25 bp, Homo sapien
tctgtataagcctttagacaagagt

SEQ ID NO: 370306 - DNA, 25 bp, Homo sapien
gaaggtttcagaggaaccatcaggt

SEQ ID NO: 370307 - DNA, 25 bp, Homo sapien
taatggcacttattccagaacaaac

SEQ ID NO: 370308 - DNA, 25 bp, Homo sapien
caattatgtctcctaccagactgag

SEQ ID NO: 370309 - DNA, 25 bp, Homo sapien
gaacactaaagtaatcttgacgagg

SEQ ID NO: 370310 - DNA, 25 bp, Homo sapien
tgtgaagggccagacgaggactatt

SEQ ID NO: 370311 - DNA, 25 bp, Homo sapien
gcttatgccgatcatcaacacaggg

SEQ ID NO: 370312 - DNA, 25 bp, Homo sapien
gcaacagcggtggagaaaacattat

SEQ ID NO: 370313 - DNA, 25 bp, Homo sapien
tgatcagatcatagggacagtttcc

SEQ ID NO: 370314 - DNA, 25 bp, Homo sapien
tcgatcctctccagattcgaagagt

SEQ ID NO: 370315 - DNA, 25 bp, Homo sapien
ccatttcttgaccaaggtaggaaca

SEQ ID NO: 370316 - DNA, 25 bp, Homo sapien
ttcgaagagttctgcggcttgctca

SEQ ID NO: 370317 - DNA, 25 bp, Homo sapien
ggtaggaacaccatcgatttctcat

SEQ ID NO: 370318 - DNA, 25 bp, Homo sapien
ggtaacttcggtggctcatggaaac

SEQ ID NO: 370319 - DNA, 25 bp, Homo sapien
gactgagggacaacatgattcgggc

SEQ ID NO: 370320 - DNA, 25 bp, Homo sapien
tgattcgggcaaatcgctcacagag

SEQ ID NO: 370321 - DNA, 25 bp, Homo sapien
taatctccatagaacaatcaagcag

SEQ ID NO: 370322 - DNA, 25 bp, Homo sapien
tagcagcaacaagcaaaccctgtga

SEQ ID NO: 370323 - DNA, 25 bp, Homo sapien
taaaaagagtttatacagtgtgttc

SEQ ID NO: 370324 - DNA, 25 bp, Homo sapien
agttaaaaactatagcagcaacaag

SEQ ID NO: 370325 - DNA, 25 bp, Homo sapien
taaagtctgtatagtcattttgtct

SEQ ID NO: 370326 - DNA, 25 bp, Homo sapien
tcatggaaggatccagactgaatgg

SEQ ID NO: 370327 - DNA, 25 bp, Homo sapien
gactgaatggaaagctgttgagaaa

SEQ ID NO: 370328 - DNA, 25 bp, Homo sapien
tatgtatcgtacacagtgctgaaca

SEQ ID NO: 370329 - DNA, 25 bp, Homo sapien
caggaaggtggcaaaagcatagttt

SEQ ID NO: 370330 - DNA, 25 bp, Homo sapien
tccaggatcttttgtgagaggcact

SEQ ID NO: 370331 - DNA, 25 bp, Homo sapien
tgaattcaaaacaggttccggtgcc

SEQ ID NO: 370332 - DNA, 25 bp, Homo sapien
tgcagaaatctgctcagtagacaac

SEQ ID NO: 370333 - DNA, 25 bp, Homo sapien
tttggcgacgctgtatcaaacatac

SEQ ID NO: 370334 - DNA, 25 bp, Homo sapien
atattgtagaaatatccatactgcc

SEQ ID NO: 370335 - DNA, 25 bp, Homo sapien
attgtagaaatatccatactgccca

SEQ ID NO: 370336 - DNA, 25 bp, Homo sapien
tattgtagaaatatccatactgccc

SEQ ID NO: 370337 - DNA, 25 bp, Homo sapien
gaaactaaggcagtagtaacagcct

SEQ ID NO: 370338 - DNA, 25 bp, Homo sapien
gctcctgaaacgatttcaaaagatt

SEQ ID NO: 370339 - DNA, 25 bp, Homo sapien
acaaagaagggtcagttgctatcac

SEQ ID NO: 370340 - DNA, 25 bp, Homo sapien
agtccaagaccaggcagattcccag

SEQ ID NO: 370341 - DNA, 25 bp, Homo sapien
gacccagaggcataactcgacaagt

SEQ ID NO: 370342 - DNA, 25 bp, Homo sapien
gaagctgtctactgatctggagaac

SEQ ID NO: 370343 - DNA, 25 bp, Homo sapien
cacaggttacgtgaagagtttctga

SEQ ID NO: 370344 - DNA, 25 bp, Homo sapien
taacatgttcccaagctgctgaagc

SEQ ID NO: 370345 - DNA, 25 bp, Homo sapien
gactgctgcttattaggttctgcca

SEQ ID NO: 370346 - DNA, 25 bp, Homo sapien
tgtaataacggcagcaaattccagc

SEQ ID NO: 370347 - DNA, 25 bp, Homo sapien
tgaggccgggactctgcaaactaca

SEQ ID NO: 370348 - DNA, 25 bp, Homo sapien
taggaagtactacagggaagttggc

SEQ ID NO: 370349 - DNA, 25 bp, Homo sapien
ctgaagtggtaaatattagcagaca

SEQ ID NO: 370350 - DNA, 25 bp, Homo sapien
gggcatatgaacctaataggacaaa

SEQ ID NO: 370351 - DNA, 25 bp, Homo sapien
tatgtgacccatgcaatgtcgtatg

SEQ ID NO: 370352 - DNA, 25 bp, Homo sapien
tacctgccaacataaaagttctctg

SEQ ID NO: 370353 - DNA, 25 bp, Homo sapien
tatgggttatgaacatgccttgtca

SEQ ID NO: 370354 - DNA, 25 bp, Homo sapien
tgaacatgatgtctatgggtttttc

SEQ ID NO: 370355 - DNA, 25 bp, Homo sapien
catcttcgaaacctgccaaactctt

SEQ ID NO: 370356 - DNA, 25 bp, Homo sapien
tcttgccttgcatgctgcaaatatc

SEQ ID NO: 370357 - DNA, 25 bp, Homo sapien
catcattcggaaataacccttgtca

SEQ ID NO: 370358 - DNA, 25 bp, Homo sapien
caggtgcctacttcttatgcttgga

SEQ ID NO: 370359 - DNA, 25 bp, Homo sapien
ttgaagccactctgacgagccttgg

SEQ ID NO: 370360 - DNA, 25 bp, Homo sapien
cagtgctcctcagaactcgtcgtag

SEQ ID NO: 370361 - DNA, 25 bp, Homo sapien
gctctaaagataatttaggccccat

SEQ ID NO: 370362 - DNA, 25 bp, Homo sapien
aagaggttcgtcctccacaagccga

SEQ ID NO: 370363 - DNA, 25 bp, Homo sapien
gtaagtgtatgcaagaggttcgtcc

SEQ ID NO: 370364 - DNA, 25 bp, Homo sapien
caagccgagattagatcaatcagca

SEQ ID NO: 370365 - DNA, 25 bp, Homo sapien
tatttgggtaagtgtatgcaagagg

SEQ ID NO: 370366 - DNA, 25 bp, Homo sapien
tcaaaaggcttatgacccagctggg

SEQ ID NO: 370367 - DNA, 25 bp, Homo sapien
taggcatttcggtgattacaaaaca

SEQ ID NO: 370368 - DNA, 25 bp, Homo sapien
tgagagtcatccttgcatagaggcc

SEQ ID NO: 370369 - DNA, 25 bp, Homo sapien
gaacctactaatttgcgggccacac

SEQ ID NO: 370370 - DNA, 25 bp, Homo sapien
tacggttatgcatgctcatctgtgt

SEQ ID NO: 370371 - DNA, 25 bp, Homo sapien
ctggcaaggttgttttcctggacgg

SEQ ID NO: 370372 - DNA, 25 bp, Homo sapien
gaattgatccctggtgcctgattta

SEQ ID NO: 370373 - DNA, 25 bp, Homo sapien
gcctgatttagttcatctggcaagg

SEQ ID NO: 370374 - DNA, 25 bp, Homo sapien
gacttttgatctggatctccaatgc

SEQ ID NO: 370375 - DNA, 25 bp, Homo sapien
tgtaatccactactgctcactgcag

SEQ ID NO: 370376 - DNA, 25 bp, Homo sapien
gcagttgtgtctactctacaatgaa

SEQ ID NO: 370377 - DNA, 25 bp, Homo sapien
ctgataaagtttttgtctggccatt

SEQ ID NO: 370378 - DNA, 25 bp, Homo sapien
cctcttagtttcagggcatattcgt

SEQ ID NO: 370379 - DNA, 25 bp, Homo sapien
gcatattcgtacttctcaggtatca

SEQ ID NO: 370380 - DNA, 25 bp, Homo sapien
gatgaggctatctataatctctcgc

SEQ ID NO: 370381 - DNA, 25 bp, Homo sapien
tcgctgtttccttactcctcttagt

SEQ ID NO: 370382 - DNA, 25 bp, Homo sapien
aaacaggtcactgctaagtcattgg

SEQ ID NO: 370383 - DNA, 25 bp, Homo sapien
tcacagggtttcttcaggtacactc

SEQ ID NO: 370384 - DNA, 25 bp, Homo sapien
taatctgtacttgcatctcctgaga

SEQ ID NO: 370385 - DNA, 25 bp, Homo sapien
tgtagatttctgtccaaacaggtca

SEQ ID NO: 370386 - DNA, 25 bp, Homo sapien
tcaagcaaattgtcgtagcatgatg

SEQ ID NO: 370387 - DNA, 25 bp, Homo sapien
tgtcgtagcatgatgttcatctttg

SEQ ID NO: 370388 - DNA, 25 bp, Homo sapien
ggtgacccatagacctatctaaact

SEQ ID NO: 370389 - DNA, 25 bp, Homo sapien
aaatatagtctggtgacccatagac

SEQ ID NO: 370390 - DNA, 25 bp, Homo sapien
gtctacttcttcactaggtaagtcc

SEQ ID NO: 370391 - DNA, 25 bp, Homo sapien
ttagtctacttcttcactaggtaag

SEQ ID NO: 370392 - DNA, 25 bp, Homo sapien
caatcctggagcttttcctcctaac

SEQ ID NO: 370393 - DNA, 25 bp, Homo sapien
cttgcaacaatcctggagcttttcc

SEQ ID NO: 370394 - DNA, 25 bp, Homo sapien
cactgtggctgtagacttgagagaa

SEQ ID NO: 370395 - DNA, 25 bp, Homo sapien
ttcaggaagtgctgtacactgtggc

SEQ ID NO: 370396 - DNA, 25 bp, Homo sapien
tgtggctagaggcataagtttactg

SEQ ID NO: 370397 - DNA, 25 bp, Homo sapien
tgtattacttggtcaagccccaccc

SEQ ID NO: 370398 - DNA, 25 bp, Homo sapien
caagccacatgttcctaagaggatt

SEQ ID NO: 370399 - DNA, 25 bp, Homo sapien
ccattgacaggagggtcaatatcca

SEQ ID NO: 370400 - DNA, 25 bp, Homo sapien
caggagggtcaatatccaagattat

SEQ ID NO: 370401 - DNA, 25 bp, Homo sapien
gttgagcagccgcttgtccattgac

SEQ ID NO: 370402 - DNA, 25 bp, Homo sapien
tggcttgtggtcgtttcggcagcac

SEQ ID NO: 370403 - DNA, 25 bp, Homo sapien
ggcttgtggtcgtttcggcagcaca

SEQ ID NO: 370404 - DNA, 25 bp, Homo sapien
gcttgtggtcgtttcggcagcacat

SEQ ID NO: 370405 - DNA, 25 bp, Homo sapien
gaggaggaacatgatccctgaatat

SEQ ID NO: 370406 - DNA, 25 bp, Homo sapien
catcaagttgagtatgagcttgatt

SEQ ID NO: 370407 - DNA, 25 bp, Homo sapien
gagaggaggaacatgatccctgaat

SEQ ID NO: 370408 - DNA, 25 bp, Homo sapien
aggaggaacatgatccctgaatatc

SEQ ID NO: 370409 - DNA, 25 bp, Homo sapien
tgaaccgatcgccattgtcagagga

SEQ ID NO: 370410 - DNA, 25 bp, Homo sapien
gaataggattaacttgctggtctgg

SEQ ID NO: 370411 - DNA, 25 bp, Homo sapien
tactgactggctggataggaaacat

SEQ ID NO: 370412 - DNA, 25 bp, Homo sapien
taatggcttagacccagactccatg

SEQ ID NO: 370413 - DNA, 25 bp, Homo sapien
agcttccatgaactgaggtggctca

SEQ ID NO: 370414 - DNA, 25 bp, Homo sapien
agggccaccagagcatgcagcttcc

SEQ ID NO: 370415 - DNA, 25 bp, Homo sapien
ggtgtaaaagctgacagggccacca

SEQ ID NO: 370416 - DNA, 25 bp, Homo sapien
aaggtgtaaaagctgacagggccac

SEQ ID NO: 370417 - DNA, 25 bp, Homo sapien
atcagtgtttcccagaacattagtg

SEQ ID NO: 370418 - DNA, 25 bp, Homo sapien
gagtttccgatcagtgtttcccaga

SEQ ID NO: 370419 - DNA, 25 bp, Homo sapien
agttgagtttccgatcagtgtttcc

SEQ ID NO: 370420 - DNA, 25 bp, Homo sapien
tccgatcagtgtttcccagaacatt

SEQ ID NO: 370421 - DNA, 25 bp, Homo sapien
ttggatacaggcatttgttactgcc

SEQ ID NO: 370422 - DNA, 25 bp, Homo sapien
cttttggatacaggcatttgttact

SEQ ID NO: 370423 - DNA, 25 bp, Homo sapien
ttttggatacaggcatttgttactg

SEQ ID NO: 370424 - DNA, 25 bp, Homo sapien
tttggatacaggcatttgttactgc

SEQ ID NO: 370425 - DNA, 25 bp, Homo sapien
gtggaagatagccatcgcttttccc

SEQ ID NO: 370426 - DNA, 25 bp, Homo sapien
ttcctccagaatacttcagtggaag

SEQ ID NO: 370427 - DNA, 25 bp, Homo sapien
tttgcacagagtggcgcatagccat

SEQ ID NO: 370428 - DNA, 25 bp, Homo sapien
gtttgcacagagtggcgcatagcca

SEQ ID NO: 370429 - DNA, 25 bp, Homo sapien
tgtttgcacagagtggcgcatagcc

SEQ ID NO: 370430 - DNA, 25 bp, Homo sapien
ctgtttgcacagagtggcgcatagc

SEQ ID NO: 370431 - DNA, 25 bp, Homo sapien
gtggccaatcggcaggctcctttct

SEQ ID NO: 370432 - DNA, 25 bp, Homo sapien
tctgcagcagggacacaataggtgc

SEQ ID NO: 370433 - DNA, 25 bp, Homo sapien
caataggtgcattggccacactgtc

SEQ ID NO: 370434 - DNA, 25 bp, Homo sapien
caatcggcaggctcctttctgcagc

SEQ ID NO: 370435 - DNA, 25 bp, Homo sapien
tgaggcggtcgctgctgtgaaatac

SEQ ID NO: 370436 - DNA, 25 bp, Homo sapien
gaagcaaatcttgttcagcccagct

SEQ ID NO: 370437 - DNA, 25 bp, Homo sapien
tagtggcaccctaagagagagtctc

SEQ ID NO: 370438 - DNA, 25 bp, Homo sapien
tgcagagctggcttcgagcatggcc

SEQ ID NO: 370439 - DNA, 25 bp, Homo sapien
tgcatgatgtaaatgagtttctcac

SEQ ID NO: 370440 - DNA, 25 bp, Homo sapien
ctgcatgatgtaaatgagtttctca

SEQ ID NO: 370441 - DNA, 25 bp, Homo sapien
tacctcatgaattaaaagggccatg

SEQ ID NO: 370442 - DNA, 25 bp, Homo sapien
gctgtgagtcggctagaagccaaaa

SEQ ID NO: 370443 - DNA, 25 bp, Homo sapien
gggagctcgtgactgattcaggaca

SEQ ID NO: 370444 - DNA, 25 bp, Homo sapien
catgcactattatgaaacccttgtc

SEQ ID NO: 370445 - DNA, 25 bp, Homo sapien
gctgacatcaactggtacatagtgg

SEQ ID NO: 370446 - DNA, 25 bp, Homo sapien
taacattgatgaggtaaagctgaca

SEQ ID NO: 370447 - DNA, 25 bp, Homo sapien
taatccccagaatttgtatgaccct

SEQ ID NO: 370448 - DNA, 25 bp, Homo sapien
tgtggccctacagcaatactgactg

SEQ ID NO: 370449 - DNA, 25 bp, Homo sapien
cagaattggccaatgcctctaggaa

SEQ ID NO: 370450 - DNA, 25 bp, Homo sapien
cctctaggaagttttaagcagctgg

SEQ ID NO: 370451 - DNA, 25 bp, Homo sapien
tgacctcttgagtagtcccagaact

SEQ ID NO: 370452 - DNA, 25 bp, Homo sapien
tagcctcggcttgcattgagcttgt

SEQ ID NO: 370453 - DNA, 25 bp, Homo sapien
tactgagcgtccctctttcttcagg

SEQ ID NO: 370454 - DNA, 25 bp, Homo sapien
gctggactttactgagcgtccctct

SEQ ID NO: 370455 - DNA, 25 bp, Homo sapien
ctgagcgtccctctttcttcaggga

SEQ ID NO: 370456 - DNA, 25 bp, Homo sapien
tgctctgtctgctggactttactga

SEQ ID NO: 370457 - DNA, 25 bp, Homo sapien
agaattggcactcattcaaaaactt

SEQ ID NO: 370458 - DNA, 25 bp, Homo sapien
ctataggtatactaatgctcatctc

SEQ ID NO: 370459 - DNA, 25 bp, Homo sapien
aagaaatgttgatttgtaaattcag

SEQ ID NO: 370460 - DNA, 25 bp, Homo sapien
cattcaaaaacttcctataggtata

SEQ ID NO: 370461 - DNA, 25 bp, Homo sapien
atcaccatgggcaagctaaagaaag

SEQ ID NO: 370462 - DNA, 25 bp, Homo sapien
acatcaccatgggcaagctaaagaa

SEQ ID NO: 370463 - DNA, 25 bp, Homo sapien
cttcacatcaccatgggcaagctaa

SEQ ID NO: 370464 - DNA, 25 bp, Homo sapien
tcacatcaccatgggcaagctaaag

SEQ ID NO: 370465 - DNA, 25 bp, Homo sapien
cagatgaagaactggttgggccttg

SEQ ID NO: 370466 - DNA, 25 bp, Homo sapien
ctggtttgcagaacgttgaactgtc

SEQ ID NO: 370467 - DNA, 25 bp, Homo sapien
tctccagatgaagaactggttgggc

SEQ ID NO: 370468 - DNA, 25 bp, Homo sapien
ttgcagaacgttgaactgtctccag

SEQ ID NO: 370469 - DNA, 25 bp, Homo sapien
aaaatctgtagatcaaacttgagaa

SEQ ID NO: 370470 - DNA, 25 bp, Homo sapien
taatcgaaattgatacaatgtcatg

SEQ ID NO: 370471 - DNA, 25 bp, Homo sapien
tattaatgagtcaatgcacaaatgc

SEQ ID NO: 370472 - DNA, 25 bp, Homo sapien
tataaagtgactatgcattcctaaa

SEQ ID NO: 370473 - DNA, 25 bp, Homo sapien
tctgcccagacccagttgagtccct

SEQ ID NO: 370474 - DNA, 25 bp, Homo sapien
cccagacccagttgagtccctctcc

SEQ ID NO: 370475 - DNA, 25 bp, Homo sapien
tgcccagacccagttgagtccctct

SEQ ID NO: 370476 - DNA, 25 bp, Homo sapien
ttctgcccagacccagttgagtccc

SEQ ID NO: 370477 - DNA, 25 bp, Homo sapien
tgttgggtgaccaaatctgcttggg

SEQ ID NO: 370478 - DNA, 25 bp, Homo sapien
ctcattgccaatagagttcacccag

SEQ ID NO: 370479 - DNA, 25 bp, Homo sapien
ttcatctatcgtggatgatactgcc

SEQ ID NO: 370480 - DNA, 25 bp, Homo sapien
tacccagattgtctttcatctatcg

SEQ ID NO: 370481 - DNA, 25 bp, Homo sapien
ccatgttggatcaaacaggatttag

SEQ ID NO: 370482 - DNA, 25 bp, Homo sapien
cctaactgcagagtagaactactgt

SEQ ID NO: 370483 - DNA, 25 bp, Homo sapien
aaagttctctatgcttaaggaagtc

SEQ ID NO: 370484 - DNA, 25 bp, Homo sapien
tgttactcatatagctcaggttcca

SEQ ID NO: 370485 - DNA, 25 bp, Homo sapien
agttgttcaccctcaagttaaggag

SEQ ID NO: 370486 - DNA, 25 bp, Homo sapien
taagctcactacaagggaattcaga

SEQ ID NO: 370487 - DNA, 25 bp, Homo sapien
ttcaggtaactgtaggatcaagctt

SEQ ID NO: 370488 - DNA, 25 bp, Homo sapien
taatcagaacgcagagagaaacttc

SEQ ID NO: 370489 - DNA, 25 bp, Homo sapien
gcaacagttgcgtagagtaaaagtg

SEQ ID NO: 370490 - DNA, 25 bp, Homo sapien
tataatttccatacgcttgccaccg

SEQ ID NO: 370491 - DNA, 25 bp, Homo sapien
gaggccccttccacaagctggctta

SEQ ID NO: 370492 - DNA, 25 bp, Homo sapien
ttgcctgtcaatctgagtgccggct

SEQ ID NO: 370493 - DNA, 25 bp, Homo sapien
gagaagtgacacaaagtcgaactaa

SEQ ID NO: 370494 - DNA, 25 bp, Homo sapien
taaggcggcaaaacatgaagccgtg

SEQ ID NO: 370495 - DNA, 25 bp, Homo sapien
tctgtttgcatcaccaaggttagtg

SEQ ID NO: 370496 - DNA, 25 bp, Homo sapien
ttttcagaaaaaggacacacgagac

SEQ ID NO: 370497 - DNA, 25 bp, Homo sapien
ctgacccttcaactggccaggaatt

SEQ ID NO: 370498 - DNA, 25 bp, Homo sapien
ttgctggcagtcagataacgcacag

SEQ ID NO: 370499 - DNA, 25 bp, Homo sapien
tggccaggaattctcacacaaagct

SEQ ID NO: 370500 - DNA, 25 bp, Homo sapien
ttcatgcagactgcgctatatattc

SEQ ID NO: 370501 - DNA, 25 bp, Homo sapien
tagcctttgcccttgaactgggtga

SEQ ID NO: 370502 - DNA, 25 bp, Homo sapien
tgcccttgaactgggtgagactgaa

SEQ ID NO: 370503 - DNA, 25 bp, Homo sapien
aataagtcgatgagccactggccca

SEQ ID NO: 370504 - DNA, 25 bp, Homo sapien
tcccctggaaacaataagtcgatga

SEQ ID NO: 370505 - DNA, 25 bp, Homo sapien
tatcctcttcctgatgattattaag

SEQ ID NO: 370506 - DNA, 25 bp, Homo sapien
atggaactttcctctgtaattgaac

SEQ ID NO: 370507 - DNA, 25 bp, Homo sapien
cactactacgttgtatttcctgtga

SEQ ID NO: 370508 - DNA, 25 bp, Homo sapien
tcctgtgattgagtttatcctcttc

SEQ ID NO: 370509 - DNA, 25 bp, Homo sapien
tgttggagtaaaagtctccttgtgg

SEQ ID NO: 370510 - DNA, 25 bp, Homo sapien
agtcattgagaaggttgctcagttt

SEQ ID NO: 370511 - DNA, 25 bp, Homo sapien
tattgtgttggagtaaaagtctcct

SEQ ID NO: 370512 - DNA, 25 bp, Homo sapien
gtcattgagaaggttgctcagtttc

SEQ ID NO: 370513 - DNA, 25 bp, Homo sapien
catttggatagaatgcttgcaattt

SEQ ID NO: 370514 - DNA, 25 bp, Homo sapien
atttggatagaatgcttgcaattta

SEQ ID NO: 370515 - DNA, 25 bp, Homo sapien
tttatttggataattatcccagtaa

SEQ ID NO: 370516 - DNA, 25 bp, Homo sapien
tatttggataattatcccagtaaaa

SEQ ID NO: 370517 - DNA, 25 bp, Homo sapien
caccaacctgagcagatcacatgag

SEQ ID NO: 370518 - DNA, 25 bp, Homo sapien
gaaatagactaggttttggacagcc

SEQ ID NO: 370519 - DNA, 25 bp, Homo sapien
caaaccctggtgtatacaacctgat

SEQ ID NO: 370520 - DNA, 25 bp, Homo sapien
tctatgacaaggattacatactgtt

SEQ ID NO: 370521 - DNA, 25 bp, Homo sapien
tcagccatcaaccaggagaggaaat

SEQ ID NO: 370522 - DNA, 25 bp, Homo sapien
tagttgtacgccactgtagttgatc

SEQ ID NO: 370523 - DNA, 25 bp, Homo sapien
tcacagaaggtcacaaaaggactga

SEQ ID NO: 370524 - DNA, 25 bp, Homo sapien
tgtagctgacggacaaaagaggtag

SEQ ID NO: 370525 - DNA, 25 bp, Homo sapien
ccttttgaatgagaagtacccatgt

SEQ ID NO: 370526 - DNA, 25 bp, Homo sapien
ggtgtatagtgacgctgtccaggca

SEQ ID NO: 370527 - DNA, 25 bp, Homo sapien
gaaaaagatacgctgtcatccggta

SEQ ID NO: 370528 - DNA, 25 bp, Homo sapien
tcacatgagtcaatacggtgcctcc

SEQ ID NO: 370529 - DNA, 25 bp, Homo sapien
cttacattctgagcaaaggcaatgg

SEQ ID NO: 370530 - DNA, 25 bp, Homo sapien
tacagctgatgtacctagatagtag

SEQ ID NO: 370531 - DNA, 25 bp, Homo sapien
ccctaaagggctacaagacatatgt

SEQ ID NO: 370532 - DNA, 25 bp, Homo sapien
gagacaaattctgagaccctaaagg

SEQ ID NO: 370533 - DNA, 25 bp, Homo sapien
tctgacagttggcacaagattttat

SEQ ID NO: 370534 - DNA, 25 bp, Homo sapien
cacattgcacatattaataatctca

SEQ ID NO: 370535 - DNA, 25 bp, Homo sapien
taaacctgtaagattgctgtaagta

SEQ ID NO: 370536 - DNA, 25 bp, Homo sapien
taatttagacatggactttcacagc

SEQ ID NO: 370537 - DNA, 25 bp, Homo sapien
tgctcttatgaaagataccccagag

SEQ ID NO: 370538 - DNA, 25 bp, Homo sapien
gctctcgtcagtgggattagtgctc

SEQ ID NO: 370539 - DNA, 25 bp, Homo sapien
catcactagtaatgtagagcttgct

SEQ ID NO: 370540 - DNA, 25 bp, Homo sapien
gaagtttcattccaagtcttgcagt

SEQ ID NO: 370541 - DNA, 25 bp, Homo sapien
caattgggttgtacacgggcaggaa

SEQ ID NO: 370542 - DNA, 25 bp, Homo sapien
gtgagaacatctaccatacctgaca

SEQ ID NO: 370543 - DNA, 25 bp, Homo sapien
tgagatagtctcagccatgatatac

SEQ ID NO: 370544 - DNA, 25 bp, Homo sapien
tcctaggaagcagacgactaataca

SEQ ID NO: 370545 - DNA, 25 bp, Homo sapien
ggtctgtcaacctgacagtgaacaa

SEQ ID NO: 370546 - DNA, 25 bp, Homo sapien
cctgacagtgaacaagggtatcagt

SEQ ID NO: 370547 - DNA, 25 bp, Homo sapien
gaacaagggtatcagtgacatacat

SEQ ID NO: 370548 - DNA, 25 bp, Homo sapien
tgtcaacctgacagtgaacaagggt

SEQ ID NO: 370549 - DNA, 25 bp, Homo sapien
atcccataatttgagacatctaagc

SEQ ID NO: 370550 - DNA, 25 bp, Homo sapien
taagtactaagggatgtatccatcc

SEQ ID NO: 370551 - DNA, 25 bp, Homo sapien
taagggatgtatccatcccataatt

SEQ ID NO: 370552 - DNA, 25 bp, Homo sapien
catcccataatttgagacatctaag

SEQ ID NO: 370553 - DNA, 25 bp, Homo sapien
gcttttacaagccaaatcagtgaat

SEQ ID NO: 370554 - DNA, 25 bp, Homo sapien
ttttacaagccaaatcagtgaattc

SEQ ID NO: 370555 - DNA, 25 bp, Homo sapien
aggcttttacaagccaaatcagtga

SEQ ID NO: 370556 - DNA, 25 bp, Homo sapien
aaggcttttacaagccaaatcagtg

SEQ ID NO: 370557 - DNA, 25 bp, Homo sapien
ttcaagatgtcgataagagagactg

SEQ ID NO: 370558 - DNA, 25 bp, Homo sapien
gagagagggcattggtttctgacac

SEQ ID NO: 370559 - DNA, 25 bp, Homo sapien
gctttttgttcataactggcattgg

SEQ ID NO: 370560 - DNA, 25 bp, Homo sapien
agcttcacttcatccgtcttcaaga

SEQ ID NO: 370561 - DNA, 25 bp, Homo sapien
ttagaatatgggagtggggaaacac

SEQ ID NO: 370562 - DNA, 25 bp, Homo sapien
gaatatgggagtggggaaacacaac

SEQ ID NO: 370563 - DNA, 25 bp, Homo sapien
tcacttagaatatgggagtggggaa

SEQ ID NO: 370564 - DNA, 25 bp, Homo sapien
tatgggagtggggaaacacaactgc

SEQ ID NO: 370565 - DNA, 25 bp, Homo sapien
aagactattcagtctaaaatttcaa

SEQ ID NO: 370566 - DNA, 25 bp, Homo sapien
ttatgctggaaatttaagactattc

SEQ ID NO: 370567 - DNA, 25 bp, Homo sapien
tatgctggaaatttaagactattca

SEQ ID NO: 370568 - DNA, 25 bp, Homo sapien
gactattcagtctaaaatttcaaat

SEQ ID NO: 370569 - DNA, 25 bp, Homo sapien
taattacagatctttcccaataccc

SEQ ID NO: 370570 - DNA, 25 bp, Homo sapien
gaatgaaagaacactcaattttaaa

SEQ ID NO: 370571 - DNA, 25 bp, Homo sapien
tagcaagggcatataacattatgtt

SEQ ID NO: 370572 - DNA, 25 bp, Homo sapien
tatgttatctttttagccccgttgc

SEQ ID NO: 370573 - DNA, 25 bp, Homo sapien
catattctttgtgactggttgattc

SEQ ID NO: 370574 - DNA, 25 bp, Homo sapien
tactaggacccatgggagatttctg

SEQ ID NO: 370575 - DNA, 25 bp, Homo sapien
ttgcattggctgctagaaatcttga

SEQ ID NO: 370576 - DNA, 25 bp, Homo sapien
tgactggttgattcgtggtctggaa

SEQ ID NO: 370577 - DNA, 25 bp, Homo sapien
taacaactcactgatctcatcgggt

SEQ ID NO: 370578 - DNA, 25 bp, Homo sapien
tagagtcacgtatgttgaaactgaa

SEQ ID NO: 370579 - DNA, 25 bp, Homo sapien
tccaaattatggaagtgtataggct

SEQ ID NO: 370580 - DNA, 25 bp, Homo sapien
catcgggttccagcttagagtcacg

SEQ ID NO: 370581 - DNA, 25 bp, Homo sapien
tatgacacatcatataaactgcagt

SEQ ID NO: 370582 - DNA, 25 bp, Homo sapien
gcagtattccatgtaagttaagcac

SEQ ID NO: 370583 - DNA, 25 bp, Homo sapien
gagagaccttgtgctataagagaaa

SEQ ID NO: 370584 - DNA, 25 bp, Homo sapien
ctggtcttgaagagaaggatacatt

SEQ ID NO: 370585 - DNA, 25 bp, Homo sapien
taagctcaatgctgtacaagtcaga

SEQ ID NO: 370586 - DNA, 25 bp, Homo sapien
tagggtaatactctctgacggtaga

SEQ ID NO: 370587 - DNA, 25 bp, Homo sapien
ctagagaaaacaccgcgctgtagct

SEQ ID NO: 370588 - DNA, 25 bp, Homo sapien
cttggaaggtcaacacttgggagaa

SEQ ID NO: 370589 - DNA, 25 bp, Homo sapien
ttaaaactaatagttcataggaatg

SEQ ID NO: 370590 - DNA, 25 bp, Homo sapien
gaatggtaaagactctttaacaaga

SEQ ID NO: 370591 - DNA, 25 bp, Homo sapien
caatgttctaaagagaccatgactc

SEQ ID NO: 370592 - DNA, 25 bp, Homo sapien
ccatgactcttaatactgagatttt

SEQ ID NO: 370593 - DNA, 25 bp, Homo sapien
tacatgagaatcaggtcacaacagg

SEQ ID NO: 370594 - DNA, 25 bp, Homo sapien
aggctcatgtacagagtccaggcag

SEQ ID NO: 370595 - DNA, 25 bp, Homo sapien
ggtcacaacaggctcatgtacagag

SEQ ID NO: 370596 - DNA, 25 bp, Homo sapien
gaatcaggtcacaacaggctcatgt

SEQ ID NO: 370597 - DNA, 25 bp, Homo sapien
cagtcagagaaagtgttcctgattc

SEQ ID NO: 370598 - DNA, 25 bp, Homo sapien
tgattcaggtttactcaactctgga

SEQ ID NO: 370599 - DNA, 25 bp, Homo sapien
gtgccagggctttggaccttcagca

SEQ ID NO: 370600 - DNA, 25 bp, Homo sapien
ctctggaggtatttgctccctagaa

SEQ ID NO: 370601 - DNA, 25 bp, Homo sapien
tacgtgatgtataaaacccaacaac

SEQ ID NO: 370602 - DNA, 25 bp, Homo sapien
tgcaaaacttgtatcctcgtcatag

SEQ ID NO: 370603 - DNA, 25 bp, Homo sapien
tgaatatggcagttcccagcacata

SEQ ID NO: 370604 - DNA, 25 bp, Homo sapien
tgtgcccactcaagggaagtacacc

SEQ ID NO: 370605 - DNA, 25 bp, Homo sapien
gatcatgagcgtgaggatgtccact

SEQ ID NO: 370606 - DNA, 25 bp, Homo sapien
gatgattgggagacactcagctcta

SEQ ID NO: 370607 - DNA, 25 bp, Homo sapien
gccagcattcgtgggaattccgcca

SEQ ID NO: 370608 - DNA, 25 bp, Homo sapien
ggctcctttgtgcagactcctggaa

SEQ ID NO: 370609 - DNA, 25 bp, Homo sapien
ttataacactggtagcaaacaaagg

SEQ ID NO: 370610 - DNA, 25 bp, Homo sapien
cactggtagcaaacaaaggtagtga

SEQ ID NO: 370611 - DNA, 25 bp, Homo sapien
gtagcaaacaaaggtagtgatatag

SEQ ID NO: 370612 - DNA, 25 bp, Homo sapien
taacactggtagcaaacaaaggtag

SEQ ID NO: 370613 - DNA, 25 bp, Homo sapien
ttacaccggcaagggcacacgtgtc

SEQ ID NO: 370614 - DNA, 25 bp, Homo sapien
tggtaatttacacgaagtacaggtg

SEQ ID NO: 370615 - DNA, 25 bp, Homo sapien
ttcaagagtctgatagaagtcactg

SEQ ID NO: 370616 - DNA, 25 bp, Homo sapien
tcccaagggtgcatattcaagagtc

SEQ ID NO: 370617 - DNA, 25 bp, Homo sapien
tcttcagttcactctatttggaatc

SEQ ID NO: 370618 - DNA, 25 bp, Homo sapien
tcaaaatttccgatggaagaaaggc

SEQ ID NO: 370619 - DNA, 25 bp, Homo sapien
agccctgtgaaagggagattggcca

SEQ ID NO: 370620 - DNA, 25 bp, Homo sapien
tttacaggatgttgcatatggttgt

SEQ ID NO: 370621 - DNA, 25 bp, Homo sapien
tccacctgccgatatgtaggttttt

SEQ ID NO: 370622 - DNA, 25 bp, Homo sapien
agtggtcctgccctttacaggcttc

SEQ ID NO: 370623 - DNA, 25 bp, Homo sapien
tacaggcttccaatgcaatagtcca

SEQ ID NO: 370624 - DNA, 25 bp, Homo sapien
ccatgcaacttttctgatccacctg

SEQ ID NO: 370625 - DNA, 25 bp, Homo sapien
tgagttgagaggtatattagtctgc

SEQ ID NO: 370626 - DNA, 25 bp, Homo sapien
tgaggccgggaatatcttgcctgca

SEQ ID NO: 370627 - DNA, 25 bp, Homo sapien
tgagagccccgccaaaggggaagcc

SEQ ID NO: 370628 - DNA, 25 bp, Homo sapien
agatcccatctaggcaaaaggagtg

SEQ ID NO: 370629 - DNA, 25 bp, Homo sapien
tgtgcagtagaaactgtccttaaga

SEQ ID NO: 370630 - DNA, 25 bp, Homo sapien
gatcactgtgcagtagaaactgtcc

SEQ ID NO: 370631 - DNA, 25 bp, Homo sapien
cagtagaaactgtccttaagaagat

SEQ ID NO: 370632 - DNA, 25 bp, Homo sapien
actttgatcactgtgcagtagaaac

SEQ ID NO: 370633 - DNA, 25 bp, Homo sapien
ggttcctctgatacgcacccaaaag

SEQ ID NO: 370634 - DNA, 25 bp, Homo sapien
taccctccctggatagtggaaagtg

SEQ ID NO: 370635 - DNA, 25 bp, Homo sapien
aattcccagaattcgtcagtgcaaa

SEQ ID NO: 370636 - DNA, 25 bp, Homo sapien
gaagtacagtcgaatgttcccagtg

SEQ ID NO: 370637 - DNA, 25 bp, Homo sapien
tccaatccacctcaagaacccaatt

SEQ ID NO: 370638 - DNA, 25 bp, Homo sapien
tgtcaaagcctccagacacatcgtc

SEQ ID NO: 370639 - DNA, 25 bp, Homo sapien
cagatgttctcacccagaaacaggc

SEQ ID NO: 370640 - DNA, 25 bp, Homo sapien
cattagcaatgcctaatgaatccaa

SEQ ID NO: 370641 - DNA, 25 bp, Homo sapien
taggagtcaaaactgccacatgcgg

SEQ ID NO: 370642 - DNA, 25 bp, Homo sapien
gaagcgtgcaagctcgatgtctaag

SEQ ID NO: 370643 - DNA, 25 bp, Homo sapien
caacctgcagggtatcaagtgggct

SEQ ID NO: 370644 - DNA, 25 bp, Homo sapien
ttaaaatggagtcaagaagcgtgca

SEQ ID NO: 370645 - DNA, 25 bp, Homo sapien
tcgagctgctccctattgttaaaag

SEQ ID NO: 370646 - DNA, 25 bp, Homo sapien
tgatgctgcaggtcattggtctaga

SEQ ID NO: 370647 - DNA, 25 bp, Homo sapien
tgatgtaacccttgctccgtctgag

SEQ ID NO: 370648 - DNA, 25 bp, Homo sapien
gcacggtccagagaatagccttgat

SEQ ID NO: 370649 - DNA, 25 bp, Homo sapien
agcagatgccgttttcttctcaccc

SEQ ID NO: 370650 - DNA, 25 bp, Homo sapien
ttcagataacattagctgctagtgt

SEQ ID NO: 370651 - DNA, 25 bp, Homo sapien
tacacatcgaataaactacaaaggc

SEQ ID NO: 370652 - DNA, 25 bp, Homo sapien
tcagaggcgaatgattttgctgcag

SEQ ID NO: 370653 - DNA, 25 bp, Homo sapien
gaaacaggacgattgtcagaggcga

SEQ ID NO: 370654 - DNA, 25 bp, Homo sapien
catggacttaccttcgccgtggcta

SEQ ID NO: 370655 - DNA, 25 bp, Homo sapien
gagttggtaggagcccattccgata

SEQ ID NO: 370656 - DNA, 25 bp, Homo sapien
cattccgatataacgctgcttctcc

SEQ ID NO: 370657 - DNA, 25 bp, Homo sapien
taatttcaagtgacatgagggcatg

SEQ ID NO: 370658 - DNA, 25 bp, Homo sapien
cttacaaaacgatagatattaaact

SEQ ID NO: 370659 - DNA, 25 bp, Homo sapien
agacaatgcgtatttgttttgtaaa

SEQ ID NO: 370660 - DNA, 25 bp, Homo sapien
ccctggactaatattaagattaaat

SEQ ID NO: 370661 - DNA, 25 bp, Homo sapien
agattaaataggtctgacactggaa

SEQ ID NO: 370662 - DNA, 25 bp, Homo sapien
agataactcaggttagagcagttca

SEQ ID NO: 370663 - DNA, 25 bp, Homo sapien
gagataactcaggttagagcagttc

SEQ ID NO: 370664 - DNA, 25 bp, Homo sapien
cttagatcaattcccgctgtcagca

SEQ ID NO: 370665 - DNA, 25 bp, Homo sapien
ttagatcaattcccgctgtcagcat

SEQ ID NO: 370666 - DNA, 25 bp, Homo sapien
ttcacctggtactactagaaggctc

SEQ ID NO: 370667 - DNA, 25 bp, Homo sapien
ctaaaatctatttgaattgctaccc

SEQ ID NO: 370668 - DNA, 25 bp, Homo sapien
aatctatttgaattgctacccactc

SEQ ID NO: 370669 - DNA, 25 bp, Homo sapien
actcctggacatataaggagggtcc

SEQ ID NO: 370670 - DNA, 25 bp, Homo sapien
tgttattttggagctatctctttat

SEQ ID NO: 370671 - DNA, 25 bp, Homo sapien
ttttggagctatctctttataatgc

SEQ ID NO: 370672 - DNA, 25 bp, Homo sapien
tattttggagctatctctttataat

SEQ ID NO: 370673 - DNA, 25 bp, Homo sapien
tttggagctatctctttataatgcc

SEQ ID NO: 370674 - DNA, 25 bp, Homo sapien
gatctggagttaaaatatccctgag

SEQ ID NO: 370675 - DNA, 25 bp, Homo sapien
tttcatgcgattaccagatctggag

SEQ ID NO: 370676 - DNA, 25 bp, Homo sapien
tgaagcatgtattctaccatgagga

SEQ ID NO: 370677 - DNA, 25 bp, Homo sapien
ccctgagatttgcagtccatgacaa

SEQ ID NO: 370678 - DNA, 25 bp, Homo sapien
aatatatgtatgtgcggctggtgat

SEQ ID NO: 370679 - DNA, 25 bp, Homo sapien
gcagtcctcaggaaactaagaacca

SEQ ID NO: 370680 - DNA, 25 bp, Homo sapien
tgaagctcaagttaaaactagcacc

SEQ ID NO: 370681 - DNA, 25 bp, Homo sapien
caaaactgatctgcataccatgtaa

SEQ ID NO: 370682 - DNA, 25 bp, Homo sapien
gagccaaagcccaaaatagactgtt

SEQ ID NO: 370683 - DNA, 25 bp, Homo sapien
aacaagctagatttaggtaggagcc

SEQ ID NO: 370684 - DNA, 25 bp, Homo sapien
tatcttgggaagatctacagcttgg

SEQ ID NO: 370685 - DNA, 25 bp, Homo sapien
taagtttacatgcttcgttcctgaa

SEQ ID NO: 370686 - DNA, 25 bp, Homo sapien
tttttcattatcatcttgtttctgg

SEQ ID NO: 370687 - DNA, 25 bp, Homo sapien
ttttcattatcatcttgtttctggt

SEQ ID NO: 370688 - DNA, 25 bp, Homo sapien
ttcattatcatcttgtttctggttt

SEQ ID NO: 370689 - DNA, 25 bp, Homo sapien
tctttttcattatcatcttgtttct

SEQ ID NO: 370690 - DNA, 25 bp, Homo sapien
acctctgacatcttaaatcataaag

SEQ ID NO: 370691 - DNA, 25 bp, Homo sapien
aacctctgacatcttaaatcataaa

SEQ ID NO: 370692 - DNA, 25 bp, Homo sapien
taacgtgatcttatagaaaggcggg

SEQ ID NO: 370693 - DNA, 25 bp, Homo sapien
gggaactactcttttaacgagctca

SEQ ID NO: 370694 - DNA, 25 bp, Homo sapien
ctcttttaacgagctcaatagagaa

SEQ ID NO: 370695 - DNA, 25 bp, Homo sapien
attaacgtgatcttatagaaaggcg

SEQ ID NO: 370696 - DNA, 25 bp, Homo sapien
tgtccagatgataatgatcgaactc

SEQ ID NO: 370697 - DNA, 25 bp, Homo sapien
tacattttagcccattgtccagatg

SEQ ID NO: 370698 - DNA, 25 bp, Homo sapien
cgaactctcttgacagtaaggtaaa

SEQ ID NO: 370699 - DNA, 25 bp, Homo sapien
gatattataagacagaacaactcct

SEQ ID NO: 370700 - DNA, 25 bp, Homo sapien
gggagcaaacaattgaggctgtaca

SEQ ID NO: 370701 - DNA, 25 bp, Homo sapien
tcctgtgcactggtatcatttgttc

SEQ ID NO: 370702 - DNA, 25 bp, Homo sapien
tgtgtgtgctatgacaagagttgcg

SEQ ID NO: 370703 - DNA, 25 bp, Homo sapien
ggctgtacagccaagtaatttttac

SEQ ID NO: 370704 - DNA, 25 bp, Homo sapien
tacagaatctagctccagaacctac

SEQ ID NO: 370705 - DNA, 25 bp, Homo sapien
catgatcattcagctagtatatggc

SEQ ID NO: 370706 - DNA, 25 bp, Homo sapien
caatacaaggtattgaacttacaga

SEQ ID NO: 370707 - DNA, 25 bp, Homo sapien
ggattaagaaacttccccatgatca

SEQ ID NO: 370708 - DNA, 25 bp, Homo sapien
ctaccactactagcttaaaagaatc

SEQ ID NO: 370709 - DNA, 25 bp, Homo sapien
tggaggacaattccaaatcactttg

SEQ ID NO: 370710 - DNA, 25 bp, Homo sapien
gcaataggcagattcagctactcat

SEQ ID NO: 370711 - DNA, 25 bp, Homo sapien
tagccgatattgtaactcctttccg

SEQ ID NO: 370712 - DNA, 25 bp, Homo sapien
actcaaaaccaccagtgaagtggtt

SEQ ID NO: 370713 - DNA, 25 bp, Homo sapien
tttcaatgggacatgagagtttgtg

SEQ ID NO: 370714 - DNA, 25 bp, Homo sapien
tggaccattgctagtacccctatat

SEQ ID NO: 370715 - DNA, 25 bp, Homo sapien
ttttttactgagagggcatctggtt

SEQ ID NO: 370716 - DNA, 25 bp, Homo sapien
caaaagttatccagggtcggctagg

SEQ ID NO: 370717 - DNA, 25 bp, Homo sapien
caggttcttgcagacagggttctac

SEQ ID NO: 370718 - DNA, 25 bp, Homo sapien
ggaagaactgcactaaacactagaa

SEQ ID NO: 370719 - DNA, 25 bp, Homo sapien
cagtattccttgtgtaaagaccaaa

SEQ ID NO: 370720 - DNA, 25 bp, Homo sapien
ttcttgttcaaatcttgacattgag

SEQ ID NO: 370721 - DNA, 25 bp, Homo sapien
tcttcttgttcaaatcttgacattg

SEQ ID NO: 370722 - DNA, 25 bp, Homo sapien
tcttgttcaaatcttgacattgaga

SEQ ID NO: 370723 - DNA, 25 bp, Homo sapien
ctcttcttgttcaaatcttgacatt

SEQ ID NO: 370724 - DNA, 25 bp, Homo sapien
ttcccaacaagccaaactgattgct

SEQ ID NO: 370725 - DNA, 25 bp, Homo sapien
tactgactccatatatgctttccac

SEQ ID NO: 370726 - DNA, 25 bp, Homo sapien
agctaaaggaatgcacattaacatt

SEQ ID NO: 370727 - DNA, 25 bp, Homo sapien
tcgtgtgctctctctagctaaagga

SEQ ID NO: 370728 - DNA, 25 bp, Homo sapien
tgggagaccctgaatagcacaagaa

SEQ ID NO: 370729 - DNA, 25 bp, Homo sapien
ctgtcttactactcattgtctggga

SEQ ID NO: 370730 - DNA, 25 bp, Homo sapien
aaaggtagtttgtgcctggatgaca

SEQ ID NO: 370731 - DNA, 25 bp, Homo sapien
ggtagagtacacagctagcaacgtg

SEQ ID NO: 370732 - DNA, 25 bp, Homo sapien
tatttcttgtaataatctgtctcca

SEQ ID NO: 370733 - DNA, 25 bp, Homo sapien
cagtgcatttggaagtatcacaatg

SEQ ID NO: 370734 - DNA, 25 bp, Homo sapien
tcaaaattctcccttactagtcact

SEQ ID NO: 370735 - DNA, 25 bp, Homo sapien
caggttttctagactctcaaaattc

SEQ ID NO: 370736 - DNA, 25 bp, Homo sapien
tggaaatgtcccacctcttggcaaa

SEQ ID NO: 370737 - DNA, 25 bp, Homo sapien
ccatgagggactttagccaaagtgt

SEQ ID NO: 370738 - DNA, 25 bp, Homo sapien
gaaagcggtacctctaatctcacaa

SEQ ID NO: 370739 - DNA, 25 bp, Homo sapien
caaaaatgagtactgccatgaggga

SEQ ID NO: 370740 - DNA, 25 bp, Homo sapien
tattaaccctattcctcatggtaaa

SEQ ID NO: 370741 - DNA, 25 bp, Homo sapien
tctgttccgggttgggatttgtcat

SEQ ID NO: 370742 - DNA, 25 bp, Homo sapien
aaatctggactgtttgttgttcagc

SEQ ID NO: 370743 - DNA, 25 bp, Homo sapien
ttgctagctgcctggctgaaatctg

SEQ ID NO: 370744 - DNA, 25 bp, Homo sapien
taatagcaaaaagggtgcggtcaga

SEQ ID NO: 370745 - DNA, 25 bp, Homo sapien
tttaatagcaaaaagggtgcggtca

SEQ ID NO: 370746 - DNA, 25 bp, Homo sapien
agcaaaaagggtgcggtcagatgtt

SEQ ID NO: 370747 - DNA, 25 bp, Homo sapien
atagcaaaaagggtgcggtcagatg

SEQ ID NO: 370748 - DNA, 25 bp, Homo sapien
ccagtgtacaagctctcaagataaa

SEQ ID NO: 370749 - DNA, 25 bp, Homo sapien
aaagtttcctccctaagcacacaga

SEQ ID NO: 370750 - DNA, 25 bp, Homo sapien
taaaggcccttttatgaatccagca

SEQ ID NO: 370751 - DNA, 25 bp, Homo sapien
ccacaccacgttgagagcccagtgt

SEQ ID NO: 370752 - DNA, 25 bp, Homo sapien
tttaagactgtgcttgctccatcgt

SEQ ID NO: 370753 - DNA, 25 bp, Homo sapien
tgtgcttgctccatcgtatcttagg

SEQ ID NO: 370754 - DNA, 25 bp, Homo sapien
gctccatcgtatcttaggtggcaac

SEQ ID NO: 370755 - DNA, 25 bp, Homo sapien
gactgtgcttgctccatcgtatctt

SEQ ID NO: 370756 - DNA, 25 bp, Homo sapien
ttttgcactgtatacttctcaataa

SEQ ID NO: 370757 - DNA, 25 bp, Homo sapien
cttctcaataagatgatcataccta

SEQ ID NO: 370758 - DNA, 25 bp, Homo sapien
ttctcaataagatgatcatacctac

SEQ ID NO: 370759 - DNA, 25 bp, Homo sapien
tgcactgtatacttctcaataagat

SEQ ID NO: 370760 - DNA, 25 bp, Homo sapien
acacttactagcactggaacttggg

SEQ ID NO: 370761 - DNA, 25 bp, Homo sapien
taacagcatcgactagaaacaccat

SEQ ID NO: 370762 - DNA, 25 bp, Homo sapien
ttaacacaggttcagatccagacat

SEQ ID NO: 370763 - DNA, 25 bp, Homo sapien
gaagcactctgcataggacctgaac

SEQ ID NO: 370764 - DNA, 25 bp, Homo sapien
gcatttaagaattctggacaccctt

SEQ ID NO: 370765 - DNA, 25 bp, Homo sapien
tagacaaggcccctctgctacatgt

SEQ ID NO: 370766 - DNA, 25 bp, Homo sapien
ggtatgcatgatgaacagcacagag

SEQ ID NO: 370767 - DNA, 25 bp, Homo sapien
aaaacatccataccctagacaaggc

SEQ ID NO: 370768 - DNA, 25 bp, Homo sapien
gaggaaaggatcctctatatacaag

SEQ ID NO: 370769 - DNA, 25 bp, Homo sapien
aggatcctctatatacaagactgaa

SEQ ID NO: 370770 - DNA, 25 bp, Homo sapien
tcttgtttctaatgtctaactttat

SEQ ID NO: 370771 - DNA, 25 bp, Homo sapien
cagtctctaccctggaggtgtttaa

SEQ ID NO: 370772 - DNA, 25 bp, Homo sapien
gtgagagtttcacatcaactgaatc

SEQ ID NO: 370773 - DNA, 25 bp, Homo sapien
gagctatgaaaagccagtgagagtt

SEQ ID NO: 370774 - DNA, 25 bp, Homo sapien
catatgctgaagaatagtgggatgg

SEQ ID NO: 370775 - DNA, 25 bp, Homo sapien
cctagacttattccatgagcttcgc

SEQ ID NO: 370776 - DNA, 25 bp, Homo sapien
gagcataaactactgttcgccatca

SEQ ID NO: 370777 - DNA, 25 bp, Homo sapien
taatgcttagaaagattaaccagcc

SEQ ID NO: 370778 - DNA, 25 bp, Homo sapien
tcatagaatgccaactgtgaaaggc

SEQ ID NO: 370779 - DNA, 25 bp, Homo sapien
tgaacaagaaatagtcccggctgtg

SEQ ID NO: 370780 - DNA, 25 bp, Homo sapien
aacttaggtccgataaaccactgag

SEQ ID NO: 370781 - DNA, 25 bp, Homo sapien
cctggtagtcccattttctatgtaa

SEQ ID NO: 370782 - DNA, 25 bp, Homo sapien
ttagttgctaccaacttaggtccga

SEQ ID NO: 370783 - DNA, 25 bp, Homo sapien
cactgagatactagagtaacctggt

SEQ ID NO: 370784 - DNA, 25 bp, Homo sapien
agctttttcatcaggataagcggtc

SEQ ID NO: 370785 - DNA, 25 bp, Homo sapien
taagcggtcataagaagttgatatt

SEQ ID NO: 370786 - DNA, 25 bp, Homo sapien
tcaggataagcggtcataagaagtt

SEQ ID NO: 370787 - DNA, 25 bp, Homo sapien
tttcatcaggataagcggtcataag

SEQ ID NO: 370788 - DNA, 25 bp, Homo sapien
aaaataccctcacaagggcaaggct

SEQ ID NO: 370789 - DNA, 25 bp, Homo sapien
gaatgcatgagtccattaatagcag

SEQ ID NO: 370790 - DNA, 25 bp, Homo sapien
gaatttgacagtaccaagccagcca

SEQ ID NO: 370791 - DNA, 25 bp, Homo sapien
gctagaagggattggagccccatct

SEQ ID NO: 370792 - DNA, 25 bp, Homo sapien
agctcagtagtaaaatgctctctga

SEQ ID NO: 370793 - DNA, 25 bp, Homo sapien
tgcagctcagtagtaaaatgctctc

SEQ ID NO: 370794 - DNA, 25 bp, Homo sapien
cagctcagtagtaaaatgctctctg

SEQ ID NO: 370795 - DNA, 25 bp, Homo sapien
gcagctcagtagtaaaatgctctct

SEQ ID NO: 370796 - DNA, 25 bp, Homo sapien
catacaccctaactgagaaaagggc

SEQ ID NO: 370797 - DNA, 25 bp, Homo sapien
tcagctcttttaggcactgcaaagt

SEQ ID NO: 370798 - DNA, 25 bp, Homo sapien
cgtgggtgttgacctacatctgaac

SEQ ID NO: 370799 - DNA, 25 bp, Homo sapien
tatatacagcaatgtcaaggcacga

SEQ ID NO: 370800 - DNA, 25 bp, Homo sapien
cccgtatgggatttgaggagtcaca

SEQ ID NO: 370801 - DNA, 25 bp, Homo sapien
gatacaatgctgcatcacaaaggca

SEQ ID NO: 370802 - DNA, 25 bp, Homo sapien
gcaccatgagtttgcttgccacaaa

SEQ ID NO: 370803 - DNA, 25 bp, Homo sapien
ccacaaatctcgtgagcagtgagga

SEQ ID NO: 370804 - DNA, 25 bp, Homo sapien
aacacatttatgcaatgtgctttat

SEQ ID NO: 370805 - DNA, 25 bp, Homo sapien
gtgctttatgatttttcaatgcatc

SEQ ID NO: 370806 - DNA, 25 bp, Homo sapien
atgcaatgtgctttatgatttttca

SEQ ID NO: 370807 - DNA, 25 bp, Homo sapien
tttttcaatgcatctataaatggaa

SEQ ID NO: 370808 - DNA, 25 bp, Homo sapien
caaacctgtaattaagagaggcctc

SEQ ID NO: 370809 - DNA, 25 bp, Homo sapien
tgtgcagccattacaaacgatgaaa

SEQ ID NO: 370810 - DNA, 25 bp, Homo sapien
taaactctgaagaaatgggtagctg

SEQ ID NO: 370811 - DNA, 25 bp, Homo sapien
ttgaaagaagcgcaaaggatacacc

SEQ ID NO: 370812 - DNA, 25 bp, Homo sapien
tctacatttttaatccgcagaggca

SEQ ID NO: 370813 - DNA, 25 bp, Homo sapien
gcaatctgcattacacaaagtactg

SEQ ID NO: 370814 - DNA, 25 bp, Homo sapien
gaaatcagactaagtggacacaggt

SEQ ID NO: 370815 - DNA, 25 bp, Homo sapien
gattcaaatggtaagacaatgtcag

SEQ ID NO: 370816 - DNA, 25 bp, Homo sapien
gaaaacaatgaggagatcagagctt

SEQ ID NO: 370817 - DNA, 25 bp, Homo sapien
tgttaaccatacgatcacctgttcc

SEQ ID NO: 370818 - DNA, 25 bp, Homo sapien
aaatcttcagaagtggtagccactg

SEQ ID NO: 370819 - DNA, 25 bp, Homo sapien
tagaagtagcccttatagcacagat

SEQ ID NO: 370820 - DNA, 25 bp, Homo sapien
ccataggtaggatttcaattagtaa

SEQ ID NO: 370821 - DNA, 25 bp, Homo sapien
gacacagttataaggcatgggagga

SEQ ID NO: 370822 - DNA, 25 bp, Homo sapien
ggaagagttgagaaattaagtgaca

SEQ ID NO: 370823 - DNA, 25 bp, Homo sapien
agggactgaaaattataccagcttg

SEQ ID NO: 370824 - DNA, 25 bp, Homo sapien
gatggcagccttggccaaaagacaa

SEQ ID NO: 370825 - DNA, 25 bp, Homo sapien
catagtgatatgagataaagcgcca

SEQ ID NO: 370826 - DNA, 25 bp, Homo sapien
gatgccaaaattgccaaccaagagg

SEQ ID NO: 370827 - DNA, 25 bp, Homo sapien
caaaagtactagaacgcaaggaggt

SEQ ID NO: 370828 - DNA, 25 bp, Homo sapien
gagtgttacagaagcctgtgatgtc

SEQ ID NO: 370829 - DNA, 25 bp, Homo sapien
gaggcaaaggtcacaatgagcagag

SEQ ID NO: 370830 - DNA, 25 bp, Homo sapien
ggatcccggcacagcttcacttctt

SEQ ID NO: 370831 - DNA, 25 bp, Homo sapien
aatctggtactgtcaattcttggtc

SEQ ID NO: 370832 - DNA, 25 bp, Homo sapien
ttctgaggttagtgttaaggagccc

SEQ ID NO: 370833 - DNA, 25 bp, Homo sapien
agtgttaaccagtggcccaatctga

SEQ ID NO: 370834 - DNA, 25 bp, Homo sapien
caaaaagcgttatcaggccacaaag

SEQ ID NO: 370835 - DNA, 25 bp, Homo sapien
tttcatatggaacaatccaggcctc

SEQ ID NO: 370836 - DNA, 25 bp, Homo sapien
cggaggttgaagtgacctgagacgg

SEQ ID NO: 370837 - DNA, 25 bp, Homo sapien
gaggttgaagtgacctgagacggtg

SEQ ID NO: 370838 - DNA, 25 bp, Homo sapien
ggttgaagtgacctgagacggtgcc

SEQ ID NO: 370839 - DNA, 25 bp, Homo sapien
ttgaagtgacctgagacggtgccac

SEQ ID NO: 370840 - DNA, 25 bp, Homo sapien
tacattttcatagctgctaactgct

SEQ ID NO: 370841 - DNA, 25 bp, Homo sapien
tatcaggcgtgaaagggacagcctc

SEQ ID NO: 370842 - DNA, 25 bp, Homo sapien
gattttttcttcaagggcgcctgta

SEQ ID NO: 370843 - DNA, 25 bp, Homo sapien
tggaaacgtctacctggcaagctgc

SEQ ID NO: 370844 - DNA, 25 bp, Homo sapien
ggtattccaggcacaaagcactgcg

SEQ ID NO: 370845 - DNA, 25 bp, Homo sapien
tctacctagcaactgagaacatgct

SEQ ID NO: 370846 - DNA, 25 bp, Homo sapien
gctggaatgcatctgctaatccttt

SEQ ID NO: 370847 - DNA, 25 bp, Homo sapien
tctgctgagccaatacattgctctg

SEQ ID NO: 370848 - DNA, 25 bp, Homo sapien
gcaatttacttctacaaacagacaa

SEQ ID NO: 370849 - DNA, 25 bp, Homo sapien
actgctgtctaggaggagcatctga

SEQ ID NO: 370850 - DNA, 25 bp, Homo sapien
catctgagtggatcgtgggaatgag

SEQ ID NO: 370851 - DNA, 25 bp, Homo sapien
ggagcatctgagtggatcgtgggaa

SEQ ID NO: 370852 - DNA, 25 bp, Homo sapien
gaaatatcagacaactgctgtctag

SEQ ID NO: 370853 - DNA, 25 bp, Homo sapien
aatggttttctcctatgatcacttt

SEQ ID NO: 370854 - DNA, 25 bp, Homo sapien
tctgtgtctatagtcggaatggtgc

SEQ ID NO: 370855 - DNA, 25 bp, Homo sapien
tattgcacctatcttaagcgtatgg

SEQ ID NO: 370856 - DNA, 25 bp, Homo sapien
catctggtcaacaggttgggcaaaa

SEQ ID NO: 370857 - DNA, 25 bp, Homo sapien
ttttcacaaaggtaggtcatagcac

SEQ ID NO: 370858 - DNA, 25 bp, Homo sapien
tagaagcgagcttgtgcggtccact

SEQ ID NO: 370859 - DNA, 25 bp, Homo sapien
acactgacacagacccatagaagcg

SEQ ID NO: 370860 - DNA, 25 bp, Homo sapien
tgacacagacccatagaagcgagct

SEQ ID NO: 370861 - DNA, 25 bp, Homo sapien
ggtccacttcaccacaagatcggat

SEQ ID NO: 370862 - DNA, 25 bp, Homo sapien
ttgtacagttaactcccagggtgta

SEQ ID NO: 370863 - DNA, 25 bp, Homo sapien
tgtacagttaactcccagggtgtaa

SEQ ID NO: 370864 - DNA, 25 bp, Homo sapien
cagttaactcccagggtgtaactct

SEQ ID NO: 370865 - DNA, 25 bp, Homo sapien
atcaatgatccaagatactcatgac

SEQ ID NO: 370866 - DNA, 25 bp, Homo sapien
taataaaggcccaaatcaatgatcc

SEQ ID NO: 370867 - DNA, 25 bp, Homo sapien
tgtttgaacatggagtgacaaccca

SEQ ID NO: 370868 - DNA, 25 bp, Homo sapien
caaatggaataatctaatagggctg

SEQ ID NO: 370869 - DNA, 25 bp, Homo sapien
taactagtagattgaccttggcaga

SEQ ID NO: 370870 - DNA, 25 bp, Homo sapien
aaaatgggccatttgatctctaagg

SEQ ID NO: 370871 - DNA, 25 bp, Homo sapien
taattcacgccttcacatagcatag

SEQ ID NO: 370872 - DNA, 25 bp, Homo sapien
tcttcttggataggtcactgaaatg

SEQ ID NO: 370873 - DNA, 25 bp, Homo sapien
gagaaacaggagtaagacacttcat

SEQ ID NO: 370874 - DNA, 25 bp, Homo sapien
tgttagacacaagaaaggagcacca

SEQ ID NO: 370875 - DNA, 25 bp, Homo sapien
aattcacaggctactacgaaggcag

SEQ ID NO: 370876 - DNA, 25 bp, Homo sapien
tagtctgcagacagccaaggttaac

SEQ ID NO: 370877 - DNA, 25 bp, Homo sapien
taacgatcagttttatgtgggccac

SEQ ID NO: 370878 - DNA, 25 bp, Homo sapien
cactgtggtaaaatatctcagccat

SEQ ID NO: 370879 - DNA, 25 bp, Homo sapien
tatgatgcctcatccaatggtagag

SEQ ID NO: 370880 - DNA, 25 bp, Homo sapien
tttccaatgtggtgccaataatgcc

SEQ ID NO: 370881 - DNA, 25 bp, Homo sapien
tcttttactgacaactactggcaca

SEQ ID NO: 370882 - DNA, 25 bp, Homo sapien
tattagcctgtgtctagatcaaatg

SEQ ID NO: 370883 - DNA, 25 bp, Homo sapien
tggagaatctaacatctaagaccca

SEQ ID NO: 370884 - DNA, 25 bp, Homo sapien
tcttggagaatctaacatctaagac

SEQ ID NO: 370885 - DNA, 25 bp, Homo sapien
gggaggattcttggagaatctaaca

SEQ ID NO: 370886 - DNA, 25 bp, Homo sapien
gattcttggagaatctaacatctaa

SEQ ID NO: 370887 - DNA, 25 bp, Homo sapien
ggtgaaacacagctagaccactgga

SEQ ID NO: 370888 - DNA, 25 bp, Homo sapien
gaaatgacgccaggtaaacagccca

SEQ ID NO: 370889 - DNA, 25 bp, Homo sapien
gctgacaaagtacagactctaaggg

SEQ ID NO: 370890 - DNA, 25 bp, Homo sapien
aagttgtctctccagcgaaatgacg

SEQ ID NO: 370891 - DNA, 25 bp, Homo sapien
gaagttctggagagatatccacaga

SEQ ID NO: 370892 - DNA, 25 bp, Homo sapien
tatacatgaagttctggagagatat

SEQ ID NO: 370893 - DNA, 25 bp, Homo sapien
gttctggagagatatccacagatat

SEQ ID NO: 370894 - DNA, 25 bp, Homo sapien
atatacatgaagttctggagagata

SEQ ID NO: 370895 - DNA, 25 bp, Homo sapien
ttcacgaaatagattaattaataaa

SEQ ID NO: 370896 - DNA, 25 bp, Homo sapien
ggtataagcaaagataattacagtg

SEQ ID NO: 370897 - DNA, 25 bp, Homo sapien
atttgaatatcagcattctaagtaa

SEQ ID NO: 370898 - DNA, 25 bp, Homo sapien
tctaagtaatccagtgaaactgaat

SEQ ID NO: 370899 - DNA, 25 bp, Homo sapien
aagtagaactgaacaaagcctgaaa

SEQ ID NO: 370900 - DNA, 25 bp, Homo sapien
ctgtaagtagaactgaacaaagcct

SEQ ID NO: 370901 - DNA, 25 bp, Homo sapien
tgtaagtagaactgaacaaagcctg

SEQ ID NO: 370902 - DNA, 25 bp, Homo sapien
acaaagcctgaaatctgagcttcaa

SEQ ID NO: 370903 - DNA, 25 bp, Homo sapien
ggtggaataatgattaatcgtaata

SEQ ID NO: 370904 - DNA, 25 bp, Homo sapien
tccttgttcttcctgcacgagactg

SEQ ID NO: 370905 - DNA, 25 bp, Homo sapien
ctctgctactactaggtaaaaggtg

SEQ ID NO: 370906 - DNA, 25 bp, Homo sapien
cacgagactggactcacctctgcta

SEQ ID NO: 370907 - DNA, 25 bp, Homo sapien
gaactagctagattgggttccatgt

SEQ ID NO: 370908 - DNA, 25 bp, Homo sapien
ggagctttaggtcactctaaccatg

SEQ ID NO: 370909 - DNA, 25 bp, Homo sapien
taaagaggcatgcatcaagaggaag

SEQ ID NO: 370910 - DNA, 25 bp, Homo sapien
ggaaggacagctgcccatagttcaa

SEQ ID NO: 370911 - DNA, 25 bp, Homo sapien
gcgcccagcctatcaagttggatct

SEQ ID NO: 370912 - DNA, 25 bp, Homo sapien
ctttgtcaaaaaggaacacgccatt

SEQ ID NO: 370913 - DNA, 25 bp, Homo sapien
tgtcagtaggtagatatcactagcc

SEQ ID NO: 370914 - DNA, 25 bp, Homo sapien
cagagattcccgtaaaagtggttca

SEQ ID NO: 370915 - DNA, 25 bp, Homo sapien
cagctgtaaccaatgacttgcagat

SEQ ID NO: 370916 - DNA, 25 bp, Homo sapien
tccagccatctaatcgggtaattta

SEQ ID NO: 370917 - DNA, 25 bp, Homo sapien
catcacataaatcgaaacacagctg

SEQ ID NO: 370918 - DNA, 25 bp, Homo sapien
gatttttacattgttcacttctgta

SEQ ID NO: 370919 - DNA, 25 bp, Homo sapien
catggagttagtggaaaatgcttct

SEQ ID NO: 370920 - DNA, 25 bp, Homo sapien
gatcaagaaaatagcgtaacatagc

SEQ ID NO: 370921 - DNA, 25 bp, Homo sapien
tctatgaaggatgccactatagcat

SEQ ID NO: 370922 - DNA, 25 bp, Homo sapien
caattcaagacagatcaatcccacc

SEQ ID NO: 370923 - DNA, 25 bp, Homo sapien
taaagctaataacatagcctcttcc

SEQ ID NO: 370924 - DNA, 25 bp, Homo sapien
ttcaaaaatgtgtatgatctcaggc

SEQ ID NO: 370925 - DNA, 25 bp, Homo sapien
tatccctgtggtatctcacctagta

SEQ ID NO: 370926 - DNA, 25 bp, Homo sapien
tggtatctcacctagtagctgaatt

SEQ ID NO: 370927 - DNA, 25 bp, Homo sapien
caattaccactgtcatatatacagg

SEQ ID NO: 370928 - DNA, 25 bp, Homo sapien
gagtttatactttgactatggctaa

SEQ ID NO: 370929 - DNA, 25 bp, Homo sapien
tatatacaggtttaaggtctcttct

SEQ ID NO: 370930 - DNA, 25 bp, Homo sapien
gcaagtattgccttgctagatcaac

SEQ ID NO: 370931 - DNA, 25 bp, Homo sapien
tgacctcgctatggctatcagacat

SEQ ID NO: 370932 - DNA, 25 bp, Homo sapien
tagacagttgcccacaatactttgg

SEQ ID NO: 370933 - DNA, 25 bp, Homo sapien
gataaattaatgtcatgacctcgct

SEQ ID NO: 370934 - DNA, 25 bp, Homo sapien
gaacactgcactcctagctctgtga

SEQ ID NO: 370935 - DNA, 25 bp, Homo sapien
tcacagtctagcatccaccctctcc

SEQ ID NO: 370936 - DNA, 25 bp, Homo sapien
actcacagtctagcatccaccctct

SEQ ID NO: 370937 - DNA, 25 bp, Homo sapien
attaactcacagtctagcatccacc

SEQ ID NO: 370938 - DNA, 25 bp, Homo sapien
taactcacagtctagcatccaccct

SEQ ID NO: 370939 - DNA, 25 bp, Homo sapien
ggcaaagcatctgatgctgactcag

SEQ ID NO: 370940 - DNA, 25 bp, Homo sapien
actcagagcgcttctgtgagcaggg

SEQ ID NO: 370941 - DNA, 25 bp, Homo sapien
cagcgagaggcgaggcaaagcatct

SEQ ID NO: 370942 - DNA, 25 bp, Homo sapien
cagatacacagcgagaggcgaggca

SEQ ID NO: 370943 - DNA, 25 bp, Homo sapien
ctagacacggatgcccgagcgagca

SEQ ID NO: 370944 - DNA, 25 bp, Homo sapien
acggatgcccgagcgagcacgcgcg

SEQ ID NO: 370945 - DNA, 25 bp, Homo sapien
agacacggatgcccgagcgagcacg

SEQ ID NO: 370946 - DNA, 25 bp, Homo sapien
acacggatgcccgagcgagcacgcg

SEQ ID NO: 370947 - DNA, 25 bp, Homo sapien
gcttctcactgactgactggctttt

SEQ ID NO: 370948 - DNA, 25 bp, Homo sapien
ttctcactgactgactggcttttac

SEQ ID NO: 370949 - DNA, 25 bp, Homo sapien
ctttgcttctcactgactgactggc

SEQ ID NO: 370950 - DNA, 25 bp, Homo sapien
ttgcttctcactgactgactggctt

SEQ ID NO: 370951 - DNA, 25 bp, Homo sapien
attaacataattataccacccccat

SEQ ID NO: 370952 - DNA, 25 bp, Homo sapien
acataattataccacccccatcacg

SEQ ID NO: 370953 - DNA, 25 bp, Homo sapien
taacataattataccacccccatca

SEQ ID NO: 370954 - DNA, 25 bp, Homo sapien
cataattataccacccccatcacgg

SEQ ID NO: 370955 - DNA, 25 bp, Homo sapien
tggccacagaagtggaatctggctc

SEQ ID NO: 370956 - DNA, 25 bp, Homo sapien
tagaacgcagggtaaaacaatcgga

SEQ ID NO: 370957 - DNA, 25 bp, Homo sapien
cataatgtaaaagtcctggccacag

SEQ ID NO: 370958 - DNA, 25 bp, Homo sapien
ccaaggtttagtagcatagaacgca

SEQ ID NO: 370959 - DNA, 25 bp, Homo sapien
ccttgtttgtggttcgagaacagaa

SEQ ID NO: 370960 - DNA, 25 bp, Homo sapien
tgtttgtggttcgagaacagaattt

SEQ ID NO: 370961 - DNA, 25 bp, Homo sapien
tgtggttcgagaacagaatttgtac

SEQ ID NO: 370962 - DNA, 25 bp, Homo sapien
gccttgtttgtggttcgagaacaga

SEQ ID NO: 370963 - DNA, 25 bp, Homo sapien
atgcggtagaattcttcttccagaa

SEQ ID NO: 370964 - DNA, 25 bp, Homo sapien
tagaattcttcttccagaaataagg

SEQ ID NO: 370965 - DNA, 25 bp, Homo sapien
tgatgcggtagaattcttcttccag

SEQ ID NO: 370966 - DNA, 25 bp, Homo sapien
gaattcttcttccagaaataaggat

SEQ ID NO: 370967 - DNA, 25 bp, Homo sapien
taggtcccaagagcctgacttgtga

SEQ ID NO: 370968 - DNA, 25 bp, Homo sapien
gatgttactaaaatacctcacaagt

SEQ ID NO: 370969 - DNA, 25 bp, Homo sapien
cgcctaggtcccaagagcctgactt

SEQ ID NO: 370970 - DNA, 25 bp, Homo sapien
aagagcctgacttgtgatgttacta

SEQ ID NO: 370971 - DNA, 25 bp, Homo sapien
tatggcacccatctaaggcaatagt

SEQ ID NO: 370972 - DNA, 25 bp, Homo sapien
tacaaacgctatttcagtgcaactg

SEQ ID NO: 370973 - DNA, 25 bp, Homo sapien
cacgtaggcccatgatatgtacaca

SEQ ID NO: 370974 - DNA, 25 bp, Homo sapien
tcatgttatttctaggcctcaagca

SEQ ID NO: 370975 - DNA, 25 bp, Homo sapien
tcatttggagctttaaaacttatat

SEQ ID NO: 370976 - DNA, 25 bp, Homo sapien
gaatctgaataggtacagtgtgcat

SEQ ID NO: 370977 - DNA, 25 bp, Homo sapien
ataaagaatctgaataggtacagtg

SEQ ID NO: 370978 - DNA, 25 bp, Homo sapien
gataaatgaagtagatgatataaat

SEQ ID NO: 370979 - DNA, 25 bp, Homo sapien
tattaaatgtaatcaagcttctgtg

SEQ ID NO: 370980 - DNA, 25 bp, Homo sapien
ctattaaatgtaatcaagcttctgt

SEQ ID NO: 370981 - DNA, 25 bp, Homo sapien
taaatgtaatcaagcttctgtgtac

SEQ ID NO: 370982 - DNA, 25 bp, Homo sapien
ccattgtgtgaacattgctattaaa

SEQ ID NO: 370983 - DNA, 25 bp, Homo sapien
taatatatgcgtctggctcaggctg

SEQ ID NO: 370984 - DNA, 25 bp, Homo sapien
cagtctctaagggatcagtgggatt

SEQ ID NO: 370985 - DNA, 25 bp, Homo sapien
tgagcaagctcacatcggcagcaga

SEQ ID NO: 370986 - DNA, 25 bp, Homo sapien
gatattgatcccatgaaccctgaaa

SEQ ID NO: 370987 - DNA, 25 bp, Homo sapien
tgactcatggcctagggaaagctaa

SEQ ID NO: 370988 - DNA, 25 bp, Homo sapien
ggatgtataaactactaatgttgac

SEQ ID NO: 370989 - DNA, 25 bp, Homo sapien
ttgaggctcacaaatcatcagacac

SEQ ID NO: 370990 - DNA, 25 bp, Homo sapien
ctagggaaagctaattcaaaggcaa

SEQ ID NO: 370991 - DNA, 25 bp, Homo sapien
tagataggtaaataatgggcaacga

SEQ ID NO: 370992 - DNA, 25 bp, Homo sapien
tattcttatagatgtgggtattcct

SEQ ID NO: 370993 - DNA, 25 bp, Homo sapien
tgggcaacgataatttcttgactca

SEQ ID NO: 370994 - DNA, 25 bp, Homo sapien
caatcactaagagataaggtaggga

SEQ ID NO: 370995 - DNA, 25 bp, Homo sapien
ctgtctggagccacggtacagtgtc

SEQ ID NO: 370996 - DNA, 25 bp, Homo sapien
tgactgtctggagccacggtacagt

SEQ ID NO: 370997 - DNA, 25 bp, Homo sapien
cagctgactgtctggagccacggta

SEQ ID NO: 370998 - DNA, 25 bp, Homo sapien
tctggagccacggtacagtgtctgg

SEQ ID NO: 370999 - DNA, 25 bp, Homo sapien
tatagttgagacaaagcgatagtac

SEQ ID NO: 371000 - DNA, 25 bp, Homo sapien
gaaaaggcttggagtagtcacccaa

SEQ ID NO: 371001 - DNA, 25 bp, Homo sapien
taatctggatacgtgtgtacacagc

SEQ ID NO: 371002 - DNA, 25 bp, Homo sapien
gccttggccattacgagactgtgat

SEQ ID NO: 371003 - DNA, 25 bp, Homo sapien
gtgtaatttcactcgttcatagggc

SEQ ID NO: 371004 - DNA, 25 bp, Homo sapien
tgtaatttcactcgttcatagggct

SEQ ID NO: 371005 - DNA, 25 bp, Homo sapien
cctttgtggatagatcactttctga

SEQ ID NO: 371006 - DNA, 25 bp, Homo sapien
catcagaacgttgtgtttacatctc

SEQ ID NO: 371007 - DNA, 25 bp, Homo sapien
tcccacctacgtagcataggatcgt

SEQ ID NO: 371008 - DNA, 25 bp, Homo sapien
tctcataagaacgtattttgtaaag

SEQ ID NO: 371009 - DNA, 25 bp, Homo sapien
tcattgccaaacatagcccagcttt

SEQ ID NO: 371010 - DNA, 25 bp, Homo sapien
tgtgttagccagtcatctaggagct

SEQ ID NO: 371011 - DNA, 25 bp, Homo sapien
gaaatccttcctatctagggaccag

SEQ ID NO: 371012 - DNA, 25 bp, Homo sapien
ggtgtgtctacataaagcttgctca

SEQ ID NO: 371013 - DNA, 25 bp, Homo sapien
aaattcaatgtacacctgtgagctg

SEQ ID NO: 371014 - DNA, 25 bp, Homo sapien
ggagatattctctggctgatgagac

SEQ ID NO: 371015 - DNA, 25 bp, Homo sapien
gatatgaatcacctgtataagacag

SEQ ID NO: 371016 - DNA, 25 bp, Homo sapien
tctgttccaatgaatatacccaggg

SEQ ID NO: 371017 - DNA, 25 bp, Homo sapien
cattaagttttctgcatccgtgcga

SEQ ID NO: 371018 - DNA, 25 bp, Homo sapien
ttctgcatccgtgcgacaagtctgg

SEQ ID NO: 371019 - DNA, 25 bp, Homo sapien
cctccattaagttttctgcatccgt

SEQ ID NO: 371020 - DNA, 25 bp, Homo sapien
taagttttctgcatccgtgcgacaa

SEQ ID NO: 371021 - DNA, 25 bp, Homo sapien
gcttcacataggttgggctgcccgg

SEQ ID NO: 371022 - DNA, 25 bp, Homo sapien
tatgaggctattgcaacagtacagg

SEQ ID NO: 371023 - DNA, 25 bp, Homo sapien
tgttgatctagaacagagagccctc

SEQ ID NO: 371024 - DNA, 25 bp, Homo sapien
ggaaactaacacagcttgacccttg

SEQ ID NO: 371025 - DNA, 25 bp, Homo sapien
gattaaaatatttctgcctagctca

SEQ ID NO: 371026 - DNA, 25 bp, Homo sapien
tgtcaatcaaataatccagggagtt

SEQ ID NO: 371027 - DNA, 25 bp, Homo sapien
aataacccagtttcatcaatgaata

SEQ ID NO: 371028 - DNA, 25 bp, Homo sapien
ggaactttagaaacatgtcaatcaa

SEQ ID NO: 371029 - DNA, 25 bp, Homo sapien
tctgttgggatttattacaatgtta

SEQ ID NO: 371030 - DNA, 25 bp, Homo sapien
tcaataaagtcaggttctctatgtt

SEQ ID NO: 371031 - DNA, 25 bp, Homo sapien
ctctatgttctgttgggatttatta

SEQ ID NO: 371032 - DNA, 25 bp, Homo sapien
cctcctcccactaacgtcaataaag

SEQ ID NO: 371033 - DNA, 25 bp, Homo sapien
tagcccatttgttggtaaaagctgc

SEQ ID NO: 371034 - DNA, 25 bp, Homo sapien
cccatttgatatagggttaagcttc

SEQ ID NO: 371035 - DNA, 25 bp, Homo sapien
tcaccttacatctgccaggatggct

SEQ ID NO: 371036 - DNA, 25 bp, Homo sapien
taagatagctaatttcatggacctg

SEQ ID NO: 371037 - DNA, 25 bp, Homo sapien
tcagggacatagtaccttcttggag

SEQ ID NO: 371038 - DNA, 25 bp, Homo sapien
ccttcagggacatagtaccttcttg

SEQ ID NO: 371039 - DNA, 25 bp, Homo sapien
tactgggccttcagggacatagtac

SEQ ID NO: 371040 - DNA, 25 bp, Homo sapien
tgggccttcagggacatagtacctt

SEQ ID NO: 371041 - DNA, 25 bp, Homo sapien
caatgaggatacagcactaaatcag

SEQ ID NO: 371042 - DNA, 25 bp, Homo sapien
cattcattcttaagtgataagtgcc

SEQ ID NO: 371043 - DNA, 25 bp, Homo sapien
taaatcagatagatgaggtcactgg

SEQ ID NO: 371044 - DNA, 25 bp, Homo sapien
ggtcactggcctcataggtatttag

SEQ ID NO: 371045 - DNA, 25 bp, Homo sapien
cagcacgtgggctagtactatccaa

SEQ ID NO: 371046 - DNA, 25 bp, Homo sapien
ccaatgatacctgcctttgagggca

SEQ ID NO: 371047 - DNA, 25 bp, Homo sapien
tatgtccctgagattcagcacgtgg

SEQ ID NO: 371048 - DNA, 25 bp, Homo sapien
ggtatgattcccagtatgtagcaaa

SEQ ID NO: 371049 - DNA, 25 bp, Homo sapien
taatcccagtaaattacttaagatc

SEQ ID NO: 371050 - DNA, 25 bp, Homo sapien
attacttaagatcgtagtgggtaca

SEQ ID NO: 371051 - DNA, 25 bp, Homo sapien
cccagtaaattacttaagatcgtag

SEQ ID NO: 371052 - DNA, 25 bp, Homo sapien
agtaaattacttaagatcgtagtgg

SEQ ID NO: 371053 - DNA, 25 bp, Homo sapien
gcaacatgcatcactggtaaaggct

SEQ ID NO: 371054 - DNA, 25 bp, Homo sapien
gaggagccagatgcactaactcact

SEQ ID NO: 371055 - DNA, 25 bp, Homo sapien
ccctggcttcaagaattacgagctt

SEQ ID NO: 371056 - DNA, 25 bp, Homo sapien
gatatgatgatgaccctcaaagtcc

SEQ ID NO: 371057 - DNA, 25 bp, Homo sapien
gctcatggagcagatgtatagaaac

SEQ ID NO: 371058 - DNA, 25 bp, Homo sapien
ggagcagatgtatagaaactaacaa

SEQ ID NO: 371059 - DNA, 25 bp, Homo sapien
atagaaactaacaaattccaaacag

SEQ ID NO: 371060 - DNA, 25 bp, Homo sapien
gatgtatagaaactaacaaattcca

SEQ ID NO: 371061 - DNA, 25 bp, Homo sapien
taaatttaacaagtaacacactcag

SEQ ID NO: 371062 - DNA, 25 bp, Homo sapien
cacactcagcgggaatttattggcc

SEQ ID NO: 371063 - DNA, 25 bp, Homo sapien
cactcagcgggaatttattggcctt

SEQ ID NO: 371064 - DNA, 25 bp, Homo sapien
caagtaacacactcagcgggaattt

SEQ ID NO: 371065 - DNA, 25 bp, Homo sapien
gatactgatattcacaactcaaagg

SEQ ID NO: 371066 - DNA, 25 bp, Homo sapien
aactcaaaggactaaggcagtcagc

SEQ ID NO: 371067 - DNA, 25 bp, Homo sapien
gaaccagctgttatatcctggatag

SEQ ID NO: 371068 - DNA, 25 bp, Homo sapien
gaataaggactctcactcagttctc

SEQ ID NO: 371069 - DNA, 25 bp, Homo sapien
gatgattgggagtgtcacgctctgt

SEQ ID NO: 371070 - DNA, 25 bp, Homo sapien
gcagatgattgggagtgtcacgctc

SEQ ID NO: 371071 - DNA, 25 bp, Homo sapien
agcatgcagatgattgggagtgtca

SEQ ID NO: 371072 - DNA, 25 bp, Homo sapien
gattgggagtgtcacgctctgtttt

SEQ ID NO: 371073 - DNA, 25 bp, Homo sapien
gcctagcacatcatatgctctctgg

SEQ ID NO: 371074 - DNA, 25 bp, Homo sapien
cagagcctagcacatcatatgctct

SEQ ID NO: 371075 - DNA, 25 bp, Homo sapien
gagcctagcacatcatatgctctct

SEQ ID NO: 371076 - DNA, 25 bp, Homo sapien
cctagcacatcatatgctctctgga

SEQ ID NO: 371077 - DNA, 25 bp, Homo sapien
atgtatcattgtttgctagatgtcc

SEQ ID NO: 371078 - DNA, 25 bp, Homo sapien
gatgtccataatagggcatttgtga

SEQ ID NO: 371079 - DNA, 25 bp, Homo sapien
cataatagggcatttgtgaataaac

SEQ ID NO: 371080 - DNA, 25 bp, Homo sapien
ttgctagatgtccataatagggcat

SEQ ID NO: 371081 - DNA, 25 bp, Homo sapien
agaggcctgacacattctgcattcc

SEQ ID NO: 371082 - DNA, 25 bp, Homo sapien
gaggcctgacacattctgcattccc

SEQ ID NO: 371083 - DNA, 25 bp, Homo sapien
tcattgatgtgtctcattttctgtg

SEQ ID NO: 371084 - DNA, 25 bp, Homo sapien
tgatgtgtctcattttctgtggcac

SEQ ID NO: 371085 - DNA, 25 bp, Homo sapien
attgatgtgtctcattttctgtggc

SEQ ID NO: 371086 - DNA, 25 bp, Homo sapien
cctcattgatgtgtctcattttctg

SEQ ID NO: 371087 - DNA, 25 bp, Homo sapien
cacactgtcagagaggttcttgccc

SEQ ID NO: 371088 - DNA, 25 bp, Homo sapien
cagtttggctttgctacccgagaaa

SEQ ID NO: 371089 - DNA, 25 bp, Homo sapien
caaagtagttatgccagccttcaca

SEQ ID NO: 371090 - DNA, 25 bp, Homo sapien
tttcaatggctaccaaaggcttgcc

SEQ ID NO: 371091 - DNA, 25 bp, Homo sapien
ccttgctcgagatatactgatgtgc

SEQ ID NO: 371092 - DNA, 25 bp, Homo sapien
gattacagtgtggaaccttgctcga

SEQ ID NO: 371093 - DNA, 25 bp, Homo sapien
cttactgcattgatgagagctccac

SEQ ID NO: 371094 - DNA, 25 bp, Homo sapien
aacttaccccatgctgatttgaccg

SEQ ID NO: 371095 - DNA, 25 bp, Homo sapien
agaacatctcacaatatgtttgtgc

SEQ ID NO: 371096 - DNA, 25 bp, Homo sapien
tatctggactactgctttagcttac

SEQ ID NO: 371097 - DNA, 25 bp, Homo sapien
tttagcttacccagaatgcattctg

SEQ ID NO: 371098 - DNA, 25 bp, Homo sapien
caacccaaagtatggatctgaattt

SEQ ID NO: 371099 - DNA, 25 bp, Homo sapien
gccaggtctgtgctaaagttaccaa

SEQ ID NO: 371100 - DNA, 25 bp, Homo sapien
gaatgtcctaactagctttgcagac

SEQ ID NO: 371101 - DNA, 25 bp, Homo sapien
tatgagcacaagttagagggtggca

SEQ ID NO: 371102 - DNA, 25 bp, Homo sapien
gatatccgagttgaattagtcccca

SEQ ID NO: 371103 - DNA, 25 bp, Homo sapien
gtctaaatcaagtactgagaagttc

SEQ ID NO: 371104 - DNA, 25 bp, Homo sapien
gtgtctaaatcaagtactgagaagt

SEQ ID NO: 371105 - DNA, 25 bp, Homo sapien
tctaaatcaagtactgagaagttct

SEQ ID NO: 371106 - DNA, 25 bp, Homo sapien
atgtgtctaaatcaagtactgagaa

SEQ ID NO: 371107 - DNA, 25 bp, Homo sapien
cacaaacgtctatgcccagttgggt

SEQ ID NO: 371108 - DNA, 25 bp, Homo sapien
gaatttaaggtattggccagggcca

SEQ ID NO: 371109 - DNA, 25 bp, Homo sapien
gaagcagacccatcccaagttgact

SEQ ID NO: 371110 - DNA, 25 bp, Homo sapien
aatagtgtgccgagagaaataagcc

SEQ ID NO: 371111 - DNA, 25 bp, Homo sapien
aatgatattggtgtaaaggaacaca

SEQ ID NO: 371112 - DNA, 25 bp, Homo sapien
tgatattggtgtaaaggaacacata

SEQ ID NO: 371113 - DNA, 25 bp, Homo sapien
tattggtgtaaaggaacacataaaa

SEQ ID NO: 371114 - DNA, 25 bp, Homo sapien
aacacccactctgactttaaactat

SEQ ID NO: 371115 - DNA, 25 bp, Homo sapien
gaaatccttaaatttgactcccata

SEQ ID NO: 371116 - DNA, 25 bp, Homo sapien
tacaaacttcaagacctacacactg

SEQ ID NO: 371117 - DNA, 25 bp, Homo sapien
aaacatttccgagaagtcaaagact

SEQ ID NO: 371118 - DNA, 25 bp, Homo sapien
cagccaaaacaacttgataaaagga

SEQ ID NO: 371119 - DNA, 25 bp, Homo sapien
tgccacaacaaactaagcagtcaag

SEQ ID NO: 371120 - DNA, 25 bp, Homo sapien
catccagagtgcagtgaataaatct

SEQ ID NO: 371121 - DNA, 25 bp, Homo sapien
cacatccagagtgcagtgaataaat

SEQ ID NO: 371122 - DNA, 25 bp, Homo sapien
aagcttccccattgggcggaaatcg

SEQ ID NO: 371123 - DNA, 25 bp, Homo sapien
ttagagtcctggttctgtccaaata

SEQ ID NO: 371124 - DNA, 25 bp, Homo sapien
atagaagcatatgagtcttctcttg

SEQ ID NO: 371125 - DNA, 25 bp, Homo sapien
agagtcctggttctgtccaaataga

SEQ ID NO: 371126 - DNA, 25 bp, Homo sapien
ttttagagtcctggttctgtccaaa

SEQ ID NO: 371127 - DNA, 25 bp, Homo sapien
cagacttccctgtgatacttctgag

SEQ ID NO: 371128 - DNA, 25 bp, Homo sapien
gatacttctgaggagcaccgaggct

SEQ ID NO: 371129 - DNA, 25 bp, Homo sapien
ccctgtgatacttctgaggagcacc

SEQ ID NO: 371130 - DNA, 25 bp, Homo sapien
cttctgaggagcaccgaggcttggt

SEQ ID NO: 371131 - DNA, 25 bp, Homo sapien
ttgaggccatagagtttccaatctc

SEQ ID NO: 371132 - DNA, 25 bp, Homo sapien
ggtccttacaatctgaatgcctctc

SEQ ID NO: 371133 - DNA, 25 bp, Homo sapien
gtgttttgaggccatagagtttcca

SEQ ID NO: 371134 - DNA, 25 bp, Homo sapien
atgtggtccttacaatctgaatgcc

SEQ ID NO: 371135 - DNA, 25 bp, Homo sapien
atcagcactgctcagaccagttccc

SEQ ID NO: 371136 - DNA, 25 bp, Homo sapien
tgggggcagacttgtcatcagcact

SEQ ID NO: 371137 - DNA, 25 bp, Homo sapien
caaatgactttggatagggatgggg

SEQ ID NO: 371138 - DNA, 25 bp, Homo sapien
agcactgctcagaccagttcccact

SEQ ID NO: 371139 - DNA, 25 bp, Homo sapien
tgctgacaaatatatctctcgattg

SEQ ID NO: 371140 - DNA, 25 bp, Homo sapien
ctagatttcaaagtccaaattttct

SEQ ID NO: 371141 - DNA, 25 bp, Homo sapien
tttgttgctttgttgctaaaatgtc

SEQ ID NO: 371142 - DNA, 25 bp, Homo sapien
ctcttctgggagagttttgtgtaac

SEQ ID NO: 371143 - DNA, 25 bp, Homo sapien
cttagatgagaaaaattgtggtttc

SEQ ID NO: 371144 - DNA, 25 bp, Homo sapien
tttcttagatgagaaaaattgtggt

SEQ ID NO: 371145 - DNA, 25 bp, Homo sapien
tcatttcttagatgagaaaaattgt

SEQ ID NO: 371146 - DNA, 25 bp, Homo sapien
tcttagatgagaaaaattgtggttt

SEQ ID NO: 371147 - DNA, 25 bp, Homo sapien
tcagggatgagcaattcctttcaag

SEQ ID NO: 371148 - DNA, 25 bp, Homo sapien
tgcagtgcaaatggcagcggtttca

SEQ ID NO: 371149 - DNA, 25 bp, Homo sapien
cagcttgtcattagtgtgcagtgca

SEQ ID NO: 371150 - DNA, 25 bp, Homo sapien
ggctttcatgcaaacatccagcttg

SEQ ID NO: 371151 - DNA, 25 bp, Homo sapien
ttcttacctcaagggaaattctgca

SEQ ID NO: 371152 - DNA, 25 bp, Homo sapien
tcccgcagaagggaaagagctgcat

SEQ ID NO: 371153 - DNA, 25 bp, Homo sapien
tcaagactgaatagagagggatccc

SEQ ID NO: 371154 - DNA, 25 bp, Homo sapien
taacatggttaccagaattaacaga

SEQ ID NO: 371155 - DNA, 25 bp, Homo sapien
gaggatgccaagtttcagttgccct

SEQ ID NO: 371156 - DNA, 25 bp, Homo sapien
agttgccctggcaacaataaccagg

SEQ ID NO: 371157 - DNA, 25 bp, Homo sapien
ctagtgtgacagacgatgactattt

SEQ ID NO: 371158 - DNA, 25 bp, Homo sapien
cagacgatgactatttggaggatgc

SEQ ID NO: 371159 - DNA, 25 bp, Homo sapien
cagttgaaaatgacactggacatcg

SEQ ID NO: 371160 - DNA, 25 bp, Homo sapien
taaagaaagcatcctattccacaca

SEQ ID NO: 371161 - DNA, 25 bp, Homo sapien
tcttcctcaccacaggtttgtctgt

SEQ ID NO: 371162 - DNA, 25 bp, Homo sapien
ctgttggctccatattctttcagaa

SEQ ID NO: 371163 - DNA, 25 bp, Homo sapien
tatctgaaaatacatctatgcagga

SEQ ID NO: 371164 - DNA, 25 bp, Homo sapien
catcctgtggatagtggtcatggac

SEQ ID NO: 371165 - DNA, 25 bp, Homo sapien
tatgcaggagaaacacattaagtcc

SEQ ID NO: 371166 - DNA, 25 bp, Homo sapien
tcatggactatgaacatattggtac

SEQ ID NO: 371167 - DNA, 25 bp, Homo sapien
cttcttaaatgtcacatacgggtca

SEQ ID NO: 371168 - DNA, 25 bp, Homo sapien
tagggttacattggcagctctttgc

SEQ ID NO: 371169 - DNA, 25 bp, Homo sapien
aaatggagcaaacgtactaaagact

SEQ ID NO: 371170 - DNA, 25 bp, Homo sapien
cctccctgatgtagggttacattgg

SEQ ID NO: 371171 - DNA, 25 bp, Homo sapien
atggagcaaacgtactaaagacttt

SEQ ID NO: 371172 - DNA, 25 bp, Homo sapien
tagaataagagtaatgcacaatggc

SEQ ID NO: 371173 - DNA, 25 bp, Homo sapien
caggcagtgttagaataagagtaat

SEQ ID NO: 371174 - DNA, 25 bp, Homo sapien
gagtaatgcacaatggcctcaatta

SEQ ID NO: 371175 - DNA, 25 bp, Homo sapien
cagtgttagaataagagtaatgcac

SEQ ID NO: 371176 - DNA, 25 bp, Homo sapien
ctgttagaaagaatgtcaacacccc

SEQ ID NO: 371177 - DNA, 25 bp, Homo sapien
agaaagaatgtcaacaccccatcaa

SEQ ID NO: 371178 - DNA, 25 bp, Homo sapien
aagaatgtcaacaccccatcaacca

SEQ ID NO: 371179 - DNA, 25 bp, Homo sapien
gttagaaagaatgtcaacaccccat

SEQ ID NO: 371180 - DNA, 25 bp, Homo sapien
gtttcagccagcaacaccagataaa

SEQ ID NO: 371181 - DNA, 25 bp, Homo sapien
tttcagccagcaacaccagataaac

SEQ ID NO: 371182 - DNA, 25 bp, Homo sapien
gaatcatattccaagtaaattcagc

SEQ ID NO: 371183 - DNA, 25 bp, Homo sapien
caggaatcatattccaagtaaattc

SEQ ID NO: 371184 - DNA, 25 bp, Homo sapien
tcatattccaagtaaattcagccat

SEQ ID NO: 371185 - DNA, 25 bp, Homo sapien
ttctacaggaatcatattccaagta

SEQ ID NO: 371186 - DNA, 25 bp, Homo sapien
ctgttgtgcgaaggcttaagatcat

SEQ ID NO: 371187 - DNA, 25 bp, Homo sapien
aatgaattttctctagcgcaactgt

SEQ ID NO: 371188 - DNA, 25 bp, Homo sapien
gaattttctctagcgcaactgttgt

SEQ ID NO: 371189 - DNA, 25 bp, Homo sapien
tctagcgcaactgttgtgcgaaggc

SEQ ID NO: 371190 - DNA, 25 bp, Homo sapien
tgtggttgatctccatgcacactca

SEQ ID NO: 371191 - DNA, 25 bp, Homo sapien
tggctgatgttttggtctacttttg

SEQ ID NO: 371192 - DNA, 25 bp, Homo sapien
ctattgtaacagttggctgatgttt

SEQ ID NO: 371193 - DNA, 25 bp, Homo sapien
ctgcaggtatccttgtggttgatct

SEQ ID NO: 371194 - DNA, 25 bp, Homo sapien
tctggcaattaggtcattattcttt

SEQ ID NO: 371195 - DNA, 25 bp, Homo sapien
ccaagtctcatgttgtatgcacgtt

SEQ ID NO: 371196 - DNA, 25 bp, Homo sapien
tatgcacgttttctggcaattaggt

SEQ ID NO: 371197 - DNA, 25 bp, Homo sapien
catgttgtatgcacgttttctggca

SEQ ID NO: 371198 - DNA, 25 bp, Homo sapien
aatgcctgataagagaaagcttctg

SEQ ID NO: 371199 - DNA, 25 bp, Homo sapien
gattcacgactaggtaggcctttgg

SEQ ID NO: 371200 - DNA, 25 bp, Homo sapien
ctgagaaagattcacgactaggtag

SEQ ID NO: 371201 - DNA, 25 bp, Homo sapien
tttggaaaactttgtgctacttgtg

SEQ ID NO: 371202 - DNA, 25 bp, Homo sapien
gtgctacttgtgtgcctcagggttt

SEQ ID NO: 371203 - DNA, 25 bp, Homo sapien
cactccatgtgttacgggaaaggga

SEQ ID NO: 371204 - DNA, 25 bp, Homo sapien
tggattagggctccacctgtacagc

SEQ ID NO: 371205 - DNA, 25 bp, Homo sapien
aaagggaaacgcaaactctctggtg

SEQ ID NO: 371206 - DNA, 25 bp, Homo sapien
ggctgccataacacaatactgtaga

SEQ ID NO: 371207 - DNA, 25 bp, Homo sapien
ctgatgttgttatcttgctttcttg

SEQ ID NO: 371208 - DNA, 25 bp, Homo sapien
ttcctgatgttgttatcttgctttc

SEQ ID NO: 371209 - DNA, 25 bp, Homo sapien
tcctgatgttgttatcttgctttct

SEQ ID NO: 371210 - DNA, 25 bp, Homo sapien
cctgatgttgttatcttgctttctt

SEQ ID NO: 371211 - DNA, 25 bp, Homo sapien
ctgctctaggtcagctttgctagac

SEQ ID NO: 371212 - DNA, 25 bp, Homo sapien
cagctttgctagacttgattttgaa

SEQ ID NO: 371213 - DNA, 25 bp, Homo sapien
taggtcagctttgctagacttgatt

SEQ ID NO: 371214 - DNA, 25 bp, Homo sapien
tctaggtcagctttgctagacttga

SEQ ID NO: 371215 - DNA, 25 bp, Homo sapien
ttatttatcaatcgttctttgtcat

SEQ ID NO: 371216 - DNA, 25 bp, Homo sapien
ctgctttctgaaagtttaactcttt

SEQ ID NO: 371217 - DNA, 25 bp, Homo sapien
ttatcaatcgttctttgtcatcttc

SEQ ID NO: 371218 - DNA, 25 bp, Homo sapien
gctgtcttggcttgtgagtaaaatg

SEQ ID NO: 371219 - DNA, 25 bp, Homo sapien
tgaatctctttcaatgtttggtccc

SEQ ID NO: 371220 - DNA, 25 bp, Homo sapien
gaatctctttcaatgtttggtccct

SEQ ID NO: 371221 - DNA, 25 bp, Homo sapien
ctgttgaatctctttcaatgtttgg

SEQ ID NO: 371222 - DNA, 25 bp, Homo sapien
gttgaatctctttcaatgtttggtc

SEQ ID NO: 371223 - DNA, 25 bp, Homo sapien
catacctatacttgtgtagaagatc

SEQ ID NO: 371224 - DNA, 25 bp, Homo sapien
gagaatcccatatacagctcttttc

SEQ ID NO: 371225 - DNA, 25 bp, Homo sapien
tgtgtttgtggaaaccagctcaggc

SEQ ID NO: 371226 - DNA, 25 bp, Homo sapien
tagaagatcattagtgcaggagatg

SEQ ID NO: 371227 - DNA, 25 bp, Homo sapien
tgacatcgaccatctcattaagtgt

SEQ ID NO: 371228 - DNA, 25 bp, Homo sapien
acctgacatcgaccatctcattaag

SEQ ID NO: 371229 - DNA, 25 bp, Homo sapien
cttaacctgacatcgaccatctcat

SEQ ID NO: 371230 - DNA, 25 bp, Homo sapien
tacttaacctgacatcgaccatctc

SEQ ID NO: 371231 - DNA, 25 bp, Homo sapien
ggatccagtcatgtcagatctactg

SEQ ID NO: 371232 - DNA, 25 bp, Homo sapien
gtcatgtcagatctactgtcctttt

SEQ ID NO: 371233 - DNA, 25 bp, Homo sapien
gatggatccagtcatgtcagatcta

SEQ ID NO: 371234 - DNA, 25 bp, Homo sapien
tcagatctactgtccttttccttgg

SEQ ID NO: 371235 - DNA, 25 bp, Homo sapien
tactccttgatcttgcctgaggtgg

SEQ ID NO: 371236 - DNA, 25 bp, Homo sapien
tgctctgcaataattgagggcagta

SEQ ID NO: 371237 - DNA, 25 bp, Homo sapien
gagggcagtaaagggtgggatggca

SEQ ID NO: 371238 - DNA, 25 bp, Homo sapien
ttactccttgatcttgcctgaggtg

SEQ ID NO: 371239 - DNA, 25 bp, Homo sapien
ggagcatccacccatcattacacaa

SEQ ID NO: 371240 - DNA, 25 bp, Homo sapien
tcattacacaacagtgaagtcttgg

SEQ ID NO: 371241 - DNA, 25 bp, Homo sapien
ctgattggagcatccacccatcatt

SEQ ID NO: 371242 - DNA, 25 bp, Homo sapien
cattacacaacagtgaagtcttggg

SEQ ID NO: 371243 - DNA, 25 bp, Homo sapien
tagccagacattcgacatcaggtgt

SEQ ID NO: 371244 - DNA, 25 bp, Homo sapien
cactgaagggctgcttggataaagc

SEQ ID NO: 371245 - DNA, 25 bp, Homo sapien
gaggacactggagttagattcagga

SEQ ID NO: 371246 - DNA, 25 bp, Homo sapien
tgctagctacaacttcagatggaac

SEQ ID NO: 371247 - DNA, 25 bp, Homo sapien
cttcttgggcacattgtccatgcct

SEQ ID NO: 371248 - DNA, 25 bp, Homo sapien
ccaccttggattggccatgtcctca

SEQ ID NO: 371249 - DNA, 25 bp, Homo sapien
tcttgggcacattgtccatgccttc

SEQ ID NO: 371250 - DNA, 25 bp, Homo sapien
ttgggcacattgtccatgccttctg

SEQ ID NO: 371251 - DNA, 25 bp, Homo sapien
gcatttaatgcttttactggaaagg

SEQ ID NO: 371252 - DNA, 25 bp, Homo sapien
ggaaaggttggatttatgttcacca

SEQ ID NO: 371253 - DNA, 25 bp, Homo sapien
attttgttattagttgccctagagc

SEQ ID NO: 371254 - DNA, 25 bp, Homo sapien
tcgattcctccattgctgccttatt

SEQ ID NO: 371255 - DNA, 25 bp, Homo sapien
gggttcacccttgtgacagcatagc

SEQ ID NO: 371256 - DNA, 25 bp, Homo sapien
caggcagttcacaagtcagtttcag

SEQ ID NO: 371257 - DNA, 25 bp, Homo sapien
tctggctaggacctcaagcttagga

SEQ ID NO: 371258 - DNA, 25 bp, Homo sapien
gcattcttaacggtagcctcttagg

SEQ ID NO: 371259 - DNA, 25 bp, Homo sapien
cagttccatgacagcctgcgaagtc

SEQ ID NO: 371260 - DNA, 25 bp, Homo sapien
gcagcaccacaatgcactctgaagg

SEQ ID NO: 371261 - DNA, 25 bp, Homo sapien
tctgaaggcaccaactcggtgggca

SEQ ID NO: 371262 - DNA, 25 bp, Homo sapien
cacggtgctagtgatcctgaggtac

SEQ ID NO: 371263 - DNA, 25 bp, Homo sapien
actacatcccattgctcggctcttt

SEQ ID NO: 371264 - DNA, 25 bp, Homo sapien
ccattgctcggctctttagtgtgct

SEQ ID NO: 371265 - DNA, 25 bp, Homo sapien
catcccattgctcggctctttagtg

SEQ ID NO: 371266 - DNA, 25 bp, Homo sapien
cggctctttagtgtgcttgcattca

SEQ ID NO: 371267 - DNA, 25 bp, Homo sapien
ataatatactgtccaaacactaagt

SEQ ID NO: 371268 - DNA, 25 bp, Homo sapien
taccaacgtgactttccaccaggaa

SEQ ID NO: 371269 - DNA, 25 bp, Homo sapien
tgtccaaacactaagtaccaacgtg

SEQ ID NO: 371270 - DNA, 25 bp, Homo sapien
ccaccaggaattgaagcagatcctg

SEQ ID NO: 371271 - DNA, 25 bp, Homo sapien
cgctcttcagtgttttaaggacaat

SEQ ID NO: 371272 - DNA, 25 bp, Homo sapien
cctgcatagacgtgatatttgaagc

SEQ ID NO: 371273 - DNA, 25 bp, Homo sapien
tggcaacacggacttgagttacctg

SEQ ID NO: 371274 - DNA, 25 bp, Homo sapien
tcccctttgtgttttcgctcttcag

SEQ ID NO: 371275 - DNA, 25 bp, Homo sapien
gttccctagcaggtaggatgttcat

SEQ ID NO: 371276 - DNA, 25 bp, Homo sapien
ccagggtaggagcaaagacgatggc

SEQ ID NO: 371277 - DNA, 25 bp, Homo sapien
tgttgtgactgccagggtaggagca

SEQ ID NO: 371278 - DNA, 25 bp, Homo sapien
ctgagttatactgaccagagcagag

SEQ ID NO: 371279 - DNA, 25 bp, Homo sapien
gagttatactgaccagagcagaggg

SEQ ID NO: 371280 - DNA, 25 bp, Homo sapien
tgagttatactgaccagagcagagg

SEQ ID NO: 371281 - DNA, 25 bp, Homo sapien
gctagctctagagttttactaatga

SEQ ID NO: 371282 - DNA, 25 bp, Homo sapien
tggcagaatcactagtagccacttc

SEQ ID NO: 371283 - DNA, 25 bp, Homo sapien
gcacatgctggcttactcttggcag

SEQ ID NO: 371284 - DNA, 25 bp, Homo sapien
cattcctatggagaccagcacatgc

SEQ ID NO: 371285 - DNA, 25 bp, Homo sapien
catgtgagtggtggaggttacggta

SEQ ID NO: 371286 - DNA, 25 bp, Homo sapien
gagtggtggaggttacggtagactc

SEQ ID NO: 371287 - DNA, 25 bp, Homo sapien
ttacggtagactccccgacatctgc

SEQ ID NO: 371288 - DNA, 25 bp, Homo sapien
cacaaatgcatgtgagtggtggagg

SEQ ID NO: 371289 - DNA, 25 bp, Homo sapien
gcactgttccaatttccatatatgt

SEQ ID NO: 371290 - DNA, 25 bp, Homo sapien
ttccaatttccatatatgtgtgcca

SEQ ID NO: 371291 - DNA, 25 bp, Homo sapien
tctctgcactgttccaatttccata

SEQ ID NO: 371292 - DNA, 25 bp, Homo sapien
cacgctaatctctgcactgttccaa

SEQ ID NO: 371293 - DNA, 25 bp, Homo sapien
ctggtagatccggaatgaaatgcag

SEQ ID NO: 371294 - DNA, 25 bp, Homo sapien
ggtagatccggaatgaaatgcagct

SEQ ID NO: 371295 - DNA, 25 bp, Homo sapien
tggtagatccggaatgaaatgcagc

SEQ ID NO: 371296 - DNA, 25 bp, Homo sapien
gtagatccggaatgaaatgcagctg

SEQ ID NO: 371297 - DNA, 25 bp, Homo sapien
tccatgacagtagtaaagttggatc

SEQ ID NO: 371298 - DNA, 25 bp, Homo sapien
gcctcaaaagttggtagaattactg

SEQ ID NO: 371299 - DNA, 25 bp, Homo sapien
gtgtcagaagaaggttgcctcaaaa

SEQ ID NO: 371300 - DNA, 25 bp, Homo sapien
tctagagacctttcaaaggacagaa

SEQ ID NO: 371301 - DNA, 25 bp, Homo sapien
aggattagttgagtccaggagatcg

SEQ ID NO: 371302 - DNA, 25 bp, Homo sapien
gtagtctcaactacccagaaggctg

SEQ ID NO: 371303 - DNA, 25 bp, Homo sapien
ttagttgagtccaggagatcgaggc

SEQ ID NO: 371304 - DNA, 25 bp, Homo sapien
ctgtagtctcaactacccagaaggc

SEQ ID NO: 371305 - DNA, 25 bp, Homo sapien
aaggatgctttctacacatgtatgt

SEQ ID NO: 371306 - DNA, 25 bp, Homo sapien
catatcattgttatactagagctta

SEQ ID NO: 371307 - DNA, 25 bp, Homo sapien
tagcccttgagcatgttgcatgatg

SEQ ID NO: 371308 - DNA, 25 bp, Homo sapien
tcttcatagtcattgggattataag

SEQ ID NO: 371309 - DNA, 25 bp, Homo sapien
ttcccatattctcaaggcagtctgt

SEQ ID NO: 371310 - DNA, 25 bp, Homo sapien
ccccagttggaattaatcttcccat

SEQ ID NO: 371311 - DNA, 25 bp, Homo sapien
ctgtttcacccatggctatagacct

SEQ ID NO: 371312 - DNA, 25 bp, Homo sapien
tgacatccccacgtggtcactacac

SEQ ID NO: 371313 - DNA, 25 bp, Homo sapien
agtcagtattagtagccaatggaag

SEQ ID NO: 371314 - DNA, 25 bp, Homo sapien
agtattagtagccaatggaaggata

SEQ ID NO: 371315 - DNA, 25 bp, Homo sapien
tattagtagccaatggaaggatata

SEQ ID NO: 371316 - DNA, 25 bp, Homo sapien
tcagtattagtagccaatggaagga

SEQ ID NO: 371317 - DNA, 25 bp, Homo sapien
taacggtccgtgattcagcttcttg

SEQ ID NO: 371318 - DNA, 25 bp, Homo sapien
tcttgataatctgccagtgcttgtg

SEQ ID NO: 371319 - DNA, 25 bp, Homo sapien
tgacttcccctaagtaccaccacca

SEQ ID NO: 371320 - DNA, 25 bp, Homo sapien
gcttgtggttcctggtaagtctgtt

SEQ ID NO: 371321 - DNA, 25 bp, Homo sapien
catacgagatggcacacgtatttat

SEQ ID NO: 371322 - DNA, 25 bp, Homo sapien
gaactgcatacgagatggcacacgt

SEQ ID NO: 371323 - DNA, 25 bp, Homo sapien
gtctgcaaggaactgcatacgagat

SEQ ID NO: 371324 - DNA, 25 bp, Homo sapien
caaggaactgcatacgagatggcac

SEQ ID NO: 371325 - DNA, 25 bp, Homo sapien
ccgctcggcaggtgaactcgcgtca

SEQ ID NO: 371326 - DNA, 25 bp, Homo sapien
ttgccttggcaaccgggcgaggcgc

SEQ ID NO: 371327 - DNA, 25 bp, Homo sapien
gcgaggcgctcttctgtccccggga

SEQ ID NO: 371328 - DNA, 25 bp, Homo sapien
ggtgaactcgcgtcacttccggcag

SEQ ID NO: 371329 - DNA, 25 bp, Homo sapien
ctgccgtgccgtgggcggcggctgc

SEQ ID NO: 371330 - DNA, 25 bp, Homo sapien
ctggtcccaggctccccgcgcctcg

SEQ ID NO: 371331 - DNA, 25 bp, Homo sapien
cggctgcaggtaggcggctctcgct

SEQ ID NO: 371332 - DNA, 25 bp, Homo sapien
tgcaggtaggcggctctcgctcctg

SEQ ID NO: 371333 - DNA, 25 bp, Homo sapien
ccgcacaggagcacgaagcacagca

SEQ ID NO: 371334 - DNA, 25 bp, Homo sapien
gagcacgaagcacagcaggagcgcc

SEQ ID NO: 371335 - DNA, 25 bp, Homo sapien
ccactactccgcacaggagcacgaa

SEQ ID NO: 371336 - DNA, 25 bp, Homo sapien
ctactccgcacaggagcacgaagca

SEQ ID NO: 371337 - DNA, 25 bp, Homo sapien
gccgatccgaggcaccgggcagctc

SEQ ID NO: 371338 - DNA, 25 bp, Homo sapien
gcgtttgcaattcagcctccccgcc

SEQ ID NO: 371339 - DNA, 25 bp, Homo sapien
gggcgactcgacacctgaaaactcg

SEQ ID NO: 371340 - DNA, 25 bp, Homo sapien
gtccattgaataatggcgtttgcaa

SEQ ID NO: 371341 - DNA, 25 bp, Homo sapien
gctatactaagtgcgcctcctagga

SEQ ID NO: 371342 - DNA, 25 bp, Homo sapien
gagcagtcgacaaacgcacttggca

SEQ ID NO: 371343 - DNA, 25 bp, Homo sapien
ggtctccttcacaatgcgcgtctgg

SEQ ID NO: 371344 - DNA, 25 bp, Homo sapien
tgattacgcctcctaatggtccacg

SEQ ID NO: 371345 - DNA, 25 bp, Homo sapien
tgacacgtaaggcaacagacacaca

SEQ ID NO: 371346 - DNA, 25 bp, Homo sapien
tgcaggtccctaggccacattagtt

SEQ ID NO: 371347 - DNA, 25 bp, Homo sapien
tgttggcaattgaagaacaccaccc

SEQ ID NO: 371348 - DNA, 25 bp, Homo sapien
caggatccccattcttgacacgtaa

SEQ ID NO: 371349 - DNA, 25 bp, Homo sapien
gaacacttaaaatccactcatagca

SEQ ID NO: 371350 - DNA, 25 bp, Homo sapien
gtttatctacatataacacattatt

SEQ ID NO: 371351 - DNA, 25 bp, Homo sapien
ttttgaaatatgtgtgccttgtgaa

SEQ ID NO: 371352 - DNA, 25 bp, Homo sapien
aaatccagggaattaacatatgcat

SEQ ID NO: 371353 - DNA, 25 bp, Homo sapien
tctctactacatagatcctaatttc

SEQ ID NO: 371354 - DNA, 25 bp, Homo sapien
ctactacatagatcctaatttcaga

SEQ ID NO: 371355 - DNA, 25 bp, Homo sapien
acatagatcctaatttcagaattct

SEQ ID NO: 371356 - DNA, 25 bp, Homo sapien
attctctactacatagatcctaatt

SEQ ID NO: 371357 - DNA, 25 bp, Homo sapien
gccccggagaactgatccacatcag

SEQ ID NO: 371358 - DNA, 25 bp, Homo sapien
ccacatcaggaacgggagctggagt

SEQ ID NO: 371359 - DNA, 25 bp, Homo sapien
ccgtgagtaggagcaaagaaactgc

SEQ ID NO: 371360 - DNA, 25 bp, Homo sapien
gctgtgcatcacagtccgtgagtag

SEQ ID NO: 371361 - DNA, 25 bp, Homo sapien
tttcacatttgactttggtggcaaa

SEQ ID NO: 371362 - DNA, 25 bp, Homo sapien
catttgactttggtggcaaagctca

SEQ ID NO: 371363 - DNA, 25 bp, Homo sapien
gcctccagggactatttcacatttg

SEQ ID NO: 371364 - DNA, 25 bp, Homo sapien
tcacatttgactttggtggcaaagc

SEQ ID NO: 371365 - DNA, 25 bp, Homo sapien
ttggcaatcaatccctgcataagat

SEQ ID NO: 371366 - DNA, 25 bp, Homo sapien
tttggcaatcaatccctgcataaga

SEQ ID NO: 371367 - DNA, 25 bp, Homo sapien
acagatgcaagaaatagctgcatca

SEQ ID NO: 371368 - DNA, 25 bp, Homo sapien
agctgcatcaccaatcatctgcaca

SEQ ID NO: 371369 - DNA, 25 bp, Homo sapien
actaagcgtaaatttgcatggcaga

SEQ ID NO: 371370 - DNA, 25 bp, Homo sapien
tgatggacacatcagatagttgcac

SEQ ID NO: 371371 - DNA, 25 bp, Homo sapien
ggtgatggacacatcagatagttgc

SEQ ID NO: 371372 - DNA, 25 bp, Homo sapien
gactggcaaggtgatggacacatca

SEQ ID NO: 371373 - DNA, 25 bp, Homo sapien
catccatgtgactggcaaggtgatg

SEQ ID NO: 371374 - DNA, 25 bp, Homo sapien
taacagacacgctaatggctcaggg

SEQ ID NO: 371375 - DNA, 25 bp, Homo sapien
ggaagacccacgctctccatatggt

SEQ ID NO: 371376 - DNA, 25 bp, Homo sapien
tatcttacgcacaggatcagagtcc

SEQ ID NO: 371377 - DNA, 25 bp, Homo sapien
tctcactcagcatggacgacttgga

SEQ ID NO: 371378 - DNA, 25 bp, Homo sapien
tgaactgtgtgcatctaggttgcgc

SEQ ID NO: 371379 - DNA, 25 bp, Homo sapien
gctcaataccagtttgctaagtaaa

SEQ ID NO: 371380 - DNA, 25 bp, Homo sapien
tagttgacgggtccacagctgactt

SEQ ID NO: 371381 - DNA, 25 bp, Homo sapien
aaagaagtagttgacgggtccacag

SEQ ID NO: 371382 - DNA, 25 bp, Homo sapien
cattactcgtaaaatgtactcggcc

SEQ ID NO: 371383 - DNA, 25 bp, Homo sapien
tcaccagatttgagatcattactcg

SEQ ID NO: 371384 - DNA, 25 bp, Homo sapien
tactcggcctttcagatctggatag

SEQ ID NO: 371385 - DNA, 25 bp, Homo sapien
tgtgccaatatctgacagttgtaaa

SEQ ID NO: 371386 - DNA, 25 bp, Homo sapien
tacactacgaggaagattaattctt

SEQ ID NO: 371387 - DNA, 25 bp, Homo sapien
atgccaacatccaaccattacacta

SEQ ID NO: 371388 - DNA, 25 bp, Homo sapien
ctgggaagaggaagtacaagtcttt

SEQ ID NO: 371389 - DNA, 25 bp, Homo sapien
gattaattcttaacccatggtactc

SEQ ID NO: 371390 - DNA, 25 bp, Homo sapien
gacaatttttgccactcatactgta

SEQ ID NO: 371391 - DNA, 25 bp, Homo sapien
tctgtgagtcagacaatttttgcca

SEQ ID NO: 371392 - DNA, 25 bp, Homo sapien
actcatactgtaatggaagtgaacc

SEQ ID NO: 371393 - DNA, 25 bp, Homo sapien
tgtaatggaagtgaaccttcttttg

SEQ ID NO: 371394 - DNA, 25 bp, Homo sapien
ggtacaaatactattatcagcagta

SEQ ID NO: 371395 - DNA, 25 bp, Homo sapien
tcaatggcatgtggtacaaatacta

SEQ ID NO: 371396 - DNA, 25 bp, Homo sapien
caatggcatgtggtacaaatactat

SEQ ID NO: 371397 - DNA, 25 bp, Homo sapien
tgtggtacaaatactattatcagca

SEQ ID NO: 371398 - DNA, 25 bp, Homo sapien
tactcagaagaggcattttttacag

SEQ ID NO: 371399 - DNA, 25 bp, Homo sapien
actcagaagaggcattttttacaga

SEQ ID NO: 371400 - DNA, 25 bp, Homo sapien
tgcaattagtccagctttatttgaa

SEQ ID NO: 371401 - DNA, 25 bp, Homo sapien
gcaagcaaagttcctataatggctc

SEQ ID NO: 371402 - DNA, 25 bp, Homo sapien
gagcaagcaaagttcctataatggc

SEQ ID NO: 371403 - DNA, 25 bp, Homo sapien
gcaattagtccagctttatttgaag

SEQ ID NO: 371404 - DNA, 25 bp, Homo sapien
cctccatggataccgaagaataact

SEQ ID NO: 371405 - DNA, 25 bp, Homo sapien
tgcaggaggtcctccatggataccg

SEQ ID NO: 371406 - DNA, 25 bp, Homo sapien
catggataccgaagaataactatgt

SEQ ID NO: 371407 - DNA, 25 bp, Homo sapien
gaggtcctccatggataccgaagaa

SEQ ID NO: 371408 - DNA, 25 bp, Homo sapien
tactgccgatgtagcttctggcagt

SEQ ID NO: 371409 - DNA, 25 bp, Homo sapien
tagcttctggcagtggacgtacggc

SEQ ID NO: 371410 - DNA, 25 bp, Homo sapien
cgtacggctctttggaggtggcaca

SEQ ID NO: 371411 - DNA, 25 bp, Homo sapien
gatgtagcttctggcagtggacgta

SEQ ID NO: 371412 - DNA, 25 bp, Homo sapien
ggactctgaggagtgcgttcaaagt

SEQ ID NO: 371413 - DNA, 25 bp, Homo sapien
tctgaggagtgcgttcaaagtcttc

SEQ ID NO: 371414 - DNA, 25 bp, Homo sapien
actctgaggagtgcgttcaaagtct

SEQ ID NO: 371415 - DNA, 25 bp, Homo sapien
gactctgaggagtgcgttcaaagtc

SEQ ID NO: 371416 - DNA, 25 bp, Homo sapien
gacccatccttgctctgtgctggaa

SEQ ID NO: 371417 - DNA, 25 bp, Homo sapien
ccatccttgctctgtgctggaatca

SEQ ID NO: 371418 - DNA, 25 bp, Homo sapien
tatagacccatccttgctctgtgct

SEQ ID NO: 371419 - DNA, 25 bp, Homo sapien
gctggaatcatcacaggaatcgcac

SEQ ID NO: 371420 - DNA, 25 bp, Homo sapien
ggtatgcaagtaagttcacccatgt

SEQ ID NO: 371421 - DNA, 25 bp, Homo sapien
ttcaaaggagctgtaaaaccaagta

SEQ ID NO: 371422 - DNA, 25 bp, Homo sapien
tcaaagcgctacatcttacttaggt

SEQ ID NO: 371423 - DNA, 25 bp, Homo sapien
gatagctagctcataggcaccagaa

SEQ ID NO: 371424 - DNA, 25 bp, Homo sapien
caataggataattttcattatatga

SEQ ID NO: 371425 - DNA, 25 bp, Homo sapien
tcaataggataattttcattatatg

SEQ ID NO: 371426 - DNA, 25 bp, Homo sapien
ataattttcattatatgaaagtcag

SEQ ID NO: 371427 - DNA, 25 bp, Homo sapien
attttcattatatgaaagtcaggaa

SEQ ID NO: 371428 - DNA, 25 bp, Homo sapien
tcaaatgtacatgctgcacgcacac

SEQ ID NO: 371429 - DNA, 25 bp, Homo sapien
taaccataatgaataagaggctggg

SEQ ID NO: 371430 - DNA, 25 bp, Homo sapien
cagaactggctggatgctgcggctc

SEQ ID NO: 371431 - DNA, 25 bp, Homo sapien
tctgaaagccctaaacactgctgaa

SEQ ID NO: 371432 - DNA, 25 bp, Homo sapien
ctttgattatgccttagacttacac

SEQ ID NO: 371433 - DNA, 25 bp, Homo sapien
tccagccattagagctataagatta

SEQ ID NO: 371434 - DNA, 25 bp, Homo sapien
tacttcatacccaatgttgtctcag

SEQ ID NO: 371435 - DNA, 25 bp, Homo sapien
tcagttccacttggcatattgtact

SEQ ID NO: 371436 - DNA, 25 bp, Homo sapien
gttttgtgccataaaagacctgtgt

SEQ ID NO: 371437 - DNA, 25 bp, Homo sapien
ggccaatactgcctttttgaagaga

SEQ ID NO: 371438 - DNA, 25 bp, Homo sapien
ggcacagaagtatcccaaatttgga

SEQ ID NO: 371439 - DNA, 25 bp, Homo sapien
ggaaataccggcagaaaaactgagc

SEQ ID NO: 371440 - DNA, 25 bp, Homo sapien
ctgtaactgtgaacatttaatggag

SEQ ID NO: 371441 - DNA, 25 bp, Homo sapien
actgctttctgtgttctaagcctct

SEQ ID NO: 371442 - DNA, 25 bp, Homo sapien
gtgccagcagccaacattgaacttg

SEQ ID NO: 371443 - DNA, 25 bp, Homo sapien
ttgggatagtgtgtgacagctgacc

SEQ ID NO: 371444 - DNA, 25 bp, Homo sapien
tgacctaagatgtaacctagacaca

SEQ ID NO: 371445 - DNA, 25 bp, Homo sapien
aaatgcaagataactcactttcttc

SEQ ID NO: 371446 - DNA, 25 bp, Homo sapien
gacgattaaatgacagggcctcttg

SEQ ID NO: 371447 - DNA, 25 bp, Homo sapien
ccttatcgggctatttcaagcagga

SEQ ID NO: 371448 - DNA, 25 bp, Homo sapien
tacctagtagccagaacattccacg

SEQ ID NO: 371449 - DNA, 25 bp, Homo sapien
tattagtgtcacaagggagatgcgt

SEQ ID NO: 371450 - DNA, 25 bp, Homo sapien
gaagtggacgatttgttctagcacc

SEQ ID NO: 371451 - DNA, 25 bp, Homo sapien
gaggcatgacaacgcgtgtttctgt

SEQ ID NO: 371452 - DNA, 25 bp, Homo sapien
tcaactctgttggatacgagaacac

SEQ ID NO: 371453 - DNA, 25 bp, Homo sapien
aattccatcagtcttgtaagggtac

SEQ ID NO: 371454 - DNA, 25 bp, Homo sapien
tgacgtgcccacctgatttatggga

SEQ ID NO: 371455 - DNA, 25 bp, Homo sapien
tatcgagggaatggccatcagaatc

SEQ ID NO: 371456 - DNA, 25 bp, Homo sapien
tagtgaagttagatgggccaaacca

SEQ ID NO: 371457 - DNA, 25 bp, Homo sapien
tcctcctggaatgcattgtgaccgg

SEQ ID NO: 371458 - DNA, 25 bp, Homo sapien
gaaattgaggtgtctcttacgtgct

SEQ ID NO: 371459 - DNA, 25 bp, Homo sapien
ccctcatgttgaaagactattagga

SEQ ID NO: 371460 - DNA, 25 bp, Homo sapien
tctccttggcctaatactcattagc

SEQ ID NO: 371461 - DNA, 25 bp, Homo sapien
aatgtgtggcaattttacctcagaa

SEQ ID NO: 371462 - DNA, 25 bp, Homo sapien
ttaagaagctaatcccaaataatac

SEQ ID NO: 371463 - DNA, 25 bp, Homo sapien
taatcccaaataatactggataacc

SEQ ID NO: 371464 - DNA, 25 bp, Homo sapien
atactggataaccacttttggtttg

SEQ ID NO: 371465 - DNA, 25 bp, Homo sapien
gaagctaatcccaaataatactgga

SEQ ID NO: 371466 - DNA, 25 bp, Homo sapien
aaaagaggcagttgagaggtttgct

SEQ ID NO: 371467 - DNA, 25 bp, Homo sapien
gaatgaaattgctgccgttgtcttc

SEQ ID NO: 371468 - DNA, 25 bp, Homo sapien
gagaaattgaccctaatacttcaag

SEQ ID NO: 371469 - DNA, 25 bp, Homo sapien
tcacaaggctagttcgaaaacatga

SEQ ID NO: 371470 - DNA, 25 bp, Homo sapien
gaggccgagcttgattctggattcc

SEQ ID NO: 371471 - DNA, 25 bp, Homo sapien
aaagttataaactcctgcgaggccg

SEQ ID NO: 371472 - DNA, 25 bp, Homo sapien
gcagcaggtttcgatggcttcagaa

SEQ ID NO: 371473 - DNA, 25 bp, Homo sapien
tcaaggcggttctttcaagagcggg

SEQ ID NO: 371474 - DNA, 25 bp, Homo sapien
gcaggcgcaccctggcgaggatgtt

SEQ ID NO: 371475 - DNA, 25 bp, Homo sapien
cttcgcgtcggtgttttttctggag

SEQ ID NO: 371476 - DNA, 25 bp, Homo sapien
gcaccctggcgaggatgttgtcggg

SEQ ID NO: 371477 - DNA, 25 bp, Homo sapien
tctggagctccgcttgtttgctgga

SEQ ID NO: 371478 - DNA, 25 bp, Homo sapien
agcgcgttacattccgcctccgggt

SEQ ID NO: 371479 - DNA, 25 bp, Homo sapien
ggctcctgccacgtttcccacagcg

SEQ ID NO: 371480 - DNA, 25 bp, Homo sapien
acgtttcccacagcgcgttacattc

SEQ ID NO: 371481 - DNA, 25 bp, Homo sapien
gcgcgttacattccgcctccgggtg

SEQ ID NO: 371482 - DNA, 25 bp, Homo sapien
acgtcgaaggctcgctggcgggcgg

SEQ ID NO: 371483 - DNA, 25 bp, Homo sapien
ggccgccgaatctccggccgaagag

SEQ ID NO: 371484 - DNA, 25 bp, Homo sapien
tcagttcccggccaggacacggtct

SEQ ID NO: 371485 - DNA, 25 bp, Homo sapien
gatggaaccaggttgcatgggctcc

SEQ ID NO: 371486 - DNA, 25 bp, Homo sapien
ggagtgccaacaaccgcctaaaata

SEQ ID NO: 371487 - DNA, 25 bp, Homo sapien
tatgcaaaacacagtggccggtgcc

SEQ ID NO: 371488 - DNA, 25 bp, Homo sapien
taaaatacagcagggcggctgcacg

SEQ ID NO: 371489 - DNA, 25 bp, Homo sapien
gctgggtctagaactcgccattccg

SEQ ID NO: 371490 - DNA, 25 bp, Homo sapien
ttaaagtttgccatgtacagtggca

SEQ ID NO: 371491 - DNA, 25 bp, Homo sapien
gaaagtgagtttagttcagtggcag

SEQ ID NO: 371492 - DNA, 25 bp, Homo sapien
tcagtggcagggtacaaagtcaata

SEQ ID NO: 371493 - DNA, 25 bp, Homo sapien
ttcgacaaaagatgttcaagacctg

SEQ ID NO: 371494 - DNA, 25 bp, Homo sapien
caagaaccaaacgtccctgaggaca

SEQ ID NO: 371495 - DNA, 25 bp, Homo sapien
tggcaccagcaaagacgtaggctat

SEQ ID NO: 371496 - DNA, 25 bp, Homo sapien
taggtgcctctgaagtagtgagacc

SEQ ID NO: 371497 - DNA, 25 bp, Homo sapien
tgtaaactaccagggagatgcgtgc

SEQ ID NO: 371498 - DNA, 25 bp, Homo sapien
caccggttacttagcagactgcgag

SEQ ID NO: 371499 - DNA, 25 bp, Homo sapien
ccggttacttagcagactgcgagag

SEQ ID NO: 371500 - DNA, 25 bp, Homo sapien
tgagccttctgtcacgcctgcataa

SEQ ID NO: 371501 - DNA, 25 bp, Homo sapien
ggttacttagcagactgcgagaggg

SEQ ID NO: 371502 - DNA, 25 bp, Homo sapien
tatgctgagtccacaacctccaaaa

SEQ ID NO: 371503 - DNA, 25 bp, Homo sapien
gattccctgaaggagtatagctgct

SEQ ID NO: 371504 - DNA, 25 bp, Homo sapien
cagtaaacctgctgaagtaagatcc

SEQ ID NO: 371505 - DNA, 25 bp, Homo sapien
taatgcaccggccagaatcactgga

SEQ ID NO: 371506 - DNA, 25 bp, Homo sapien
ttcctgagagccaagctgtaaagat

SEQ ID NO: 371507 - DNA, 25 bp, Homo sapien
gagccaagctgtaaagattgttatc

SEQ ID NO: 371508 - DNA, 25 bp, Homo sapien
ctagtgtgattttttcttgggtggt

SEQ ID NO: 371509 - DNA, 25 bp, Homo sapien
caagctgtaaagattgttatctctc

SEQ ID NO: 371510 - DNA, 25 bp, Homo sapien
cgtgaacccagacctcatggaggct

SEQ ID NO: 371511 - DNA, 25 bp, Homo sapien
tagtttaacgtgaacccagacctca

SEQ ID NO: 371512 - DNA, 25 bp, Homo sapien
ggtttcctggcgcttttgactcaca

SEQ ID NO: 371513 - DNA, 25 bp, Homo sapien
caggaatgccaattattcttagggt

SEQ ID NO: 371514 - DNA, 25 bp, Homo sapien
attagtattgagatgggagttacca

SEQ ID NO: 371515 - DNA, 25 bp, Homo sapien
ccagggtatagtttacactgattgt

SEQ ID NO: 371516 - DNA, 25 bp, Homo sapien
gctctaaaggggttctgttttcatg

SEQ ID NO: 371517 - DNA, 25 bp, Homo sapien
tattgagatgggagttaccatttca

SEQ ID NO: 371518 - DNA, 25 bp, Homo sapien
cactatgaacccagaagagtttttg

SEQ ID NO: 371519 - DNA, 25 bp, Homo sapien
tctgcactatgaacccagaagagtt

SEQ ID NO: 371520 - DNA, 25 bp, Homo sapien
tctgactgtgtcttctgcactatga

SEQ ID NO: 371521 - DNA, 25 bp, Homo sapien
gtgtcttctgcactatgaacccaga

SEQ ID NO: 371522 - DNA, 25 bp, Homo sapien
ggctttatcatactggaaacttggc

SEQ ID NO: 371523 - DNA, 25 bp, Homo sapien
gggcaaaaccatctatgatgctgta

SEQ ID NO: 371524 - DNA, 25 bp, Homo sapien
gatgctgtacagcactcaaatgaca

SEQ ID NO: 371525 - DNA, 25 bp, Homo sapien
tatggacagcaagttggcaataccc

SEQ ID NO: 371526 - DNA, 25 bp, Homo sapien
tctcctgcacggtgttatggatggg

SEQ ID NO: 371527 - DNA, 25 bp, Homo sapien
gctgccagcctgtctaaatccaggg

SEQ ID NO: 371528 - DNA, 25 bp, Homo sapien
gccatctatgacaacacgatgggcc

SEQ ID NO: 371529 - DNA, 25 bp, Homo sapien
tcttctgcttttagccaccagactt

SEQ ID NO: 371530 - DNA, 25 bp, Homo sapien
gaaagttttcctgagcaagggtgtg

SEQ ID NO: 371531 - DNA, 25 bp, Homo sapien
aaagttttcctgagcaagggtgtgt

SEQ ID NO: 371532 - DNA, 25 bp, Homo sapien
tggaaagttttcctgagcaagggtg

SEQ ID NO: 371533 - DNA, 25 bp, Homo sapien
tgtgctcaacaatgcggagagaatt

SEQ ID NO: 371534 - DNA, 25 bp, Homo sapien
ttcaacatgtgcgtaccactttgtg

SEQ ID NO: 371535 - DNA, 25 bp, Homo sapien
tctgagcgaatgcaaaaagcaattc

SEQ ID NO: 371536 - DNA, 25 bp, Homo sapien
tccattcagtgtttcaacatgtgcg

SEQ ID NO: 371537 - DNA, 25 bp, Homo sapien
tctttgtggaatctgtctcagctcc

SEQ ID NO: 371538 - DNA, 25 bp, Homo sapien
tcttttgctatgtgccgcaattgca

SEQ ID NO: 371539 - DNA, 25 bp, Homo sapien
tctggagacactcgcttttcaggtg

SEQ ID NO: 371540 - DNA, 25 bp, Homo sapien
catgagcactagttgataagacgac

SEQ ID NO: 371541 - DNA, 25 bp, Homo sapien
gggaccatgactcaccattggctga

SEQ ID NO: 371542 - DNA, 25 bp, Homo sapien
tggtatcaagcttcaccagagggaa

SEQ ID NO: 371543 - DNA, 25 bp, Homo sapien
gactctgttgtgaaaaccaagccct

SEQ ID NO: 371544 - DNA, 25 bp, Homo sapien
tctctcagtatttggtgcgatggcg

SEQ ID NO: 371545 - DNA, 25 bp, Homo sapien
taccttgccagatgctatcaccatg

SEQ ID NO: 371546 - DNA, 25 bp, Homo sapien
tgtaatatggatgcaacgtagtacc

SEQ ID NO: 371547 - DNA, 25 bp, Homo sapien
gaagactctaccctcacggatgaat

SEQ ID NO: 371548 - DNA, 25 bp, Homo sapien
gtagcaataatcaaaggagcccagt

SEQ ID NO: 371549 - DNA, 25 bp, Homo sapien
gtcaaatatatcttgacaggcatct

SEQ ID NO: 371550 - DNA, 25 bp, Homo sapien
caatgtcaagttcatgttagtgatt

SEQ ID NO: 371551 - DNA, 25 bp, Homo sapien
tgacaggcatcttgagatttggttt

SEQ ID NO: 371552 - DNA, 25 bp, Homo sapien
aatatatcttgacaggcatcttgag

SEQ ID NO: 371553 - DNA, 25 bp, Homo sapien
ggcctcacagctccatgtccgccac

SEQ ID NO: 371554 - DNA, 25 bp, Homo sapien
aaaagattctttggcctcacagctc

SEQ ID NO: 371555 - DNA, 25 bp, Homo sapien
ctcacagctccatgtccgccacgtt

SEQ ID NO: 371556 - DNA, 25 bp, Homo sapien
agtgcaagaaaaagattctttggcc

SEQ ID NO: 371557 - DNA, 25 bp, Homo sapien
gcaccaagttatgtaaagccagtcc

SEQ ID NO: 371558 - DNA, 25 bp, Homo sapien
tgtattatatttgctctccctgtgg

SEQ ID NO: 371559 - DNA, 25 bp, Homo sapien
cacagcatgttaacaactggacact

SEQ ID NO: 371560 - DNA, 25 bp, Homo sapien
ctagatagagtgtagaggcgcagtc

SEQ ID NO: 371561 - DNA, 25 bp, Homo sapien
cagaacttaagtggagcaggcggca

SEQ ID NO: 371562 - DNA, 25 bp, Homo sapien
ggtgtctccatatgccccatgtaag

SEQ ID NO: 371563 - DNA, 25 bp, Homo sapien
gttttgctgtaagttggtgtctcca

SEQ ID NO: 371564 - DNA, 25 bp, Homo sapien
gctttgtcataatagtgtgccctca

SEQ ID NO: 371565 - DNA, 25 bp, Homo sapien
gaaagtgttcattaatgttgaactt

SEQ ID NO: 371566 - DNA, 25 bp, Homo sapien
gaagataaggagcattaaactaact

SEQ ID NO: 371567 - DNA, 25 bp, Homo sapien
taaactaactatgtcaatagaacat

SEQ ID NO: 371568 - DNA, 25 bp, Homo sapien
aagtgttcattaatgttgaacttcc

SEQ ID NO: 371569 - DNA, 25 bp, Homo sapien
tgttcttccaccatccaagtaaggc

SEQ ID NO: 371570 - DNA, 25 bp, Homo sapien
gacagtcttgttgctggtccttacc

SEQ ID NO: 371571 - DNA, 25 bp, Homo sapien
gagcacaggtgaagatgtcggcacc

SEQ ID NO: 371572 - DNA, 25 bp, Homo sapien
tcctgaaattgcatagcagctccct

SEQ ID NO: 371573 - DNA, 25 bp, Homo sapien
cccatatatgaggagctggtttcca

SEQ ID NO: 371574 - DNA, 25 bp, Homo sapien
tctgcaacagaggagtatatatatg

SEQ ID NO: 371575 - DNA, 25 bp, Homo sapien
gaaactaggctaacaatatctggta

SEQ ID NO: 371576 - DNA, 25 bp, Homo sapien
tatacctgtcctattgatggtagcc

SEQ ID NO: 371577 - DNA, 25 bp, Homo sapien
caaaaagttggactgcccagggttg

SEQ ID NO: 371578 - DNA, 25 bp, Homo sapien
tttacagtacttaaatcatgctggg

SEQ ID NO: 371579 - DNA, 25 bp, Homo sapien
tgtgatagaactgaaccttggcgac

SEQ ID NO: 371580 - DNA, 25 bp, Homo sapien
taactcaagatagctttggaatgac

SEQ ID NO: 371581 - DNA, 25 bp, Homo sapien
cagtgtcccgtgcaggtcgtttttc

SEQ ID NO: 371582 - DNA, 25 bp, Homo sapien
gatctccgttcgatgcgaagcttcg

SEQ ID NO: 371583 - DNA, 25 bp, Homo sapien
caatgaagttagcaaagcagtgtcc

SEQ ID NO: 371584 - DNA, 25 bp, Homo sapien
aacctggtagctgaaaaggcctcgc

SEQ ID NO: 371585 - DNA, 25 bp, Homo sapien
ccgggtattcggtacccacgtgcat

SEQ ID NO: 371586 - DNA, 25 bp, Homo sapien
cagaccgacggaaagacggacttgg

SEQ ID NO: 371587 - DNA, 25 bp, Homo sapien
gccttcggtgtagttgccccggaca

SEQ ID NO: 371588 - DNA, 25 bp, Homo sapien
tccctctgggaggaatcccggagcg

SEQ ID NO: 371589 - DNA, 25 bp, Homo sapien
agattgatcaccaacaagaataatg

SEQ ID NO: 371590 - DNA, 25 bp, Homo sapien
acatgcttcacttgtccattgttag

SEQ ID NO: 371591 - DNA, 25 bp, Homo sapien
gattgatcaccaacaagaataatgg

SEQ ID NO: 371592 - DNA, 25 bp, Homo sapien
tggccaacatgcttcacttgtccat

SEQ ID NO: 371593 - DNA, 25 bp, Homo sapien
caagcaaaacacagggatagaggaa

SEQ ID NO: 371594 - DNA, 25 bp, Homo sapien
agagccaagcaaaacacagggatag

SEQ ID NO: 371595 - DNA, 25 bp, Homo sapien
tgggaccacagagatccatcaggaa

SEQ ID NO: 371596 - DNA, 25 bp, Homo sapien
gaccacagagatccatcaggaaggc

SEQ ID NO: 371597 - DNA, 25 bp, Homo sapien
tcccaaagtgctgagcatctgccca

SEQ ID NO: 371598 - DNA, 25 bp, Homo sapien
cccaaagtgctgagcatctgcccat

SEQ ID NO: 371599 - DNA, 25 bp, Homo sapien
tagcctttacactgtcccttgttga

SEQ ID NO: 371600 - DNA, 25 bp, Homo sapien
tacttaatgcagtcaagtgtacacc

SEQ ID NO: 371601 - DNA, 25 bp, Homo sapien
aataatgctttaccggctctctgga

SEQ ID NO: 371602 - DNA, 25 bp, Homo sapien
ttcttgctgggactctgacttatac

SEQ ID NO: 371603 - DNA, 25 bp, Homo sapien
agaaagttgtttcagctccagaaga

SEQ ID NO: 371604 - DNA, 25 bp, Homo sapien
gaaaagaaagttgtttcagctccag

SEQ ID NO: 371605 - DNA, 25 bp, Homo sapien
ctatggcaggaaaagaaagttgttt

SEQ ID NO: 371606 - DNA, 25 bp, Homo sapien
aagaaagttgtttcagctccagaag

SEQ ID NO: 371607 - DNA, 25 bp, Homo sapien
gtgcaagtctcagagtcccaagacc

SEQ ID NO: 371608 - DNA, 25 bp, Homo sapien
aggctgattctccaataaagggttt

SEQ ID NO: 371609 - DNA, 25 bp, Homo sapien
ttggagacagccctcggacaccttt

SEQ ID NO: 371610 - DNA, 25 bp, Homo sapien
ttgcactagagtgcaccaactgcct

SEQ ID NO: 371611 - DNA, 25 bp, Homo sapien
agccctcggacacctttgcactaga

SEQ ID NO: 371612 - DNA, 25 bp, Homo sapien
aactcaagaggccagcgggatcctc

SEQ ID NO: 371613 - DNA, 25 bp, Homo sapien
taggctgatttcacgactttgctat

SEQ ID NO: 371614 - DNA, 25 bp, Homo sapien
ttctttgagaaatacccatcctgtc

SEQ ID NO: 371615 - DNA, 25 bp, Homo sapien
gcatttcacgggagtatatatacca

SEQ ID NO: 371616 - DNA, 25 bp, Homo sapien
ttgtgggcctgttgtttagctccca

SEQ ID NO: 371617 - DNA, 25 bp, Homo sapien
cccggcctactatttctttctgtat

SEQ ID NO: 371618 - DNA, 25 bp, Homo sapien
ctgtatgttcttgtgggcctgttgt

SEQ ID NO: 371619 - DNA, 25 bp, Homo sapien
ctactatttctttctgtatgttctt

SEQ ID NO: 371620 - DNA, 25 bp, Homo sapien
gagtggccactagcagttacttaac

SEQ ID NO: 371621 - DNA, 25 bp, Homo sapien
tgtctaaacgcacaccagaagagag

SEQ ID NO: 371622 - DNA, 25 bp, Homo sapien
gaatccttagccctttatgcctggg

SEQ ID NO: 371623 - DNA, 25 bp, Homo sapien
tatgcctgggatactgaaattgcct

SEQ ID NO: 371624 - DNA, 25 bp, Homo sapien
atgttcactgacagatgaaatggat

SEQ ID NO: 371625 - DNA, 25 bp, Homo sapien
tacatataatgcaatactgtttagc

SEQ ID NO: 371626 - DNA, 25 bp, Homo sapien
taatactggattttattcacggaca

SEQ ID NO: 371627 - DNA, 25 bp, Homo sapien
gagtgtaaatactttggaatggagt

SEQ ID NO: 371628 - DNA, 25 bp, Homo sapien
tttggtgaatatagatatgagctgc

SEQ ID NO: 371629 - DNA, 25 bp, Homo sapien
cagttgggtttttatctagaagtga

SEQ ID NO: 371630 - DNA, 25 bp, Homo sapien
ccctgaaacattgagtttgctcagc

SEQ ID NO: 371631 - DNA, 25 bp, Homo sapien
taaataatgccagaccgtggaacca

SEQ ID NO: 371632 - DNA, 25 bp, Homo sapien
tgttcccttatgttgttgtctgtgc

SEQ ID NO: 371633 - DNA, 25 bp, Homo sapien
tctgtgcatctgaaaagacagcccc

SEQ ID NO: 371634 - DNA, 25 bp, Homo sapien
tgcatctgaaaagacagccccttct

SEQ ID NO: 371635 - DNA, 25 bp, Homo sapien
ctttctgaagcgtcatgatttccta

SEQ ID NO: 371636 - DNA, 25 bp, Homo sapien
gacctgttggttgttaaggagcatg

SEQ ID NO: 371637 - DNA, 25 bp, Homo sapien
taagagactcacttcactggtaagg

SEQ ID NO: 371638 - DNA, 25 bp, Homo sapien
tgatgtatcctggaatgttgctaac

SEQ ID NO: 371639 - DNA, 25 bp, Homo sapien
taatcagacccaactatatactgcg

SEQ ID NO: 371640 - DNA, 25 bp, Homo sapien
cagcttcatgtagctagcaggtcaa

SEQ ID NO: 371641 - DNA, 25 bp, Homo sapien
catgaagactgggtagctgttgagc

SEQ ID NO: 371642 - DNA, 25 bp, Homo sapien
ctggtgtaaacaaaagaggtcagct

SEQ ID NO: 371643 - DNA, 25 bp, Homo sapien
tcttgaggctgatgtattatccaac

SEQ ID NO: 371644 - DNA, 25 bp, Homo sapien
tggaaggtcttattgaggaaaccac

SEQ ID NO: 371645 - DNA, 25 bp, Homo sapien
accacatttaagaggacagcagtcc

SEQ ID NO: 371646 - DNA, 25 bp, Homo sapien
ggcgtgtgtgaggaaagaaaataac

SEQ ID NO: 371647 - DNA, 25 bp, Homo sapien
gcaggaatcagccattgcaaggctt

SEQ ID NO: 371648 - DNA, 25 bp, Homo sapien
tagagtttcgtcatattaacaaagc

SEQ ID NO: 371649 - DNA, 25 bp, Homo sapien
ctatttctcacagaaacttaaggtg

SEQ ID NO: 371650 - DNA, 25 bp, Homo sapien
tagtctttgtgaaactataactctt

SEQ ID NO: 371651 - DNA, 25 bp, Homo sapien
gaaatctgtactggactttcatagt

SEQ ID NO: 371652 - DNA, 25 bp, Homo sapien
tgccaggttcacaccattctcctgc

SEQ ID NO: 371653 - DNA, 25 bp, Homo sapien
gagggcagtggcatgatctcggctc

SEQ ID NO: 371654 - DNA, 25 bp, Homo sapien
agtctcatcagtcacccgggctgga

SEQ ID NO: 371655 - DNA, 25 bp, Homo sapien
gagtctcatcagtcacccgggctgg

SEQ ID NO: 371656 - DNA, 25 bp, Homo sapien
tgattaaacaccttcaggtctataa

SEQ ID NO: 371657 - DNA, 25 bp, Homo sapien
caggtttctcataggtttcatccaa

SEQ ID NO: 371658 - DNA, 25 bp, Homo sapien
tctgcaaaaatagtcaaccagcctc

SEQ ID NO: 371659 - DNA, 25 bp, Homo sapien
ctactaccttggcagcttggcaaaa

SEQ ID NO: 371660 - DNA, 25 bp, Homo sapien
agcaagaccaataagaccaaagtct

SEQ ID NO: 371661 - DNA, 25 bp, Homo sapien
gcaagaccaataagaccaaagtctg

SEQ ID NO: 371662 - DNA, 25 bp, Homo sapien
aagtgaggaggcgtcttccactcca

SEQ ID NO: 371663 - DNA, 25 bp, Homo sapien
gtccccaggtgaagagtgtatccat

SEQ ID NO: 371664 - DNA, 25 bp, Homo sapien
tatgtactcctgagggctaaactac

SEQ ID NO: 371665 - DNA, 25 bp, Homo sapien
cagtgtcattaattcccagaaggcc

SEQ ID NO: 371666 - DNA, 25 bp, Homo sapien
ttataggctcacagttgcatctgca

SEQ ID NO: 371667 - DNA, 25 bp, Homo sapien
tgtcagactgaaggcaccaagctgc

SEQ ID NO: 371668 - DNA, 25 bp, Homo sapien
caagaatcattagctgatggccaca

SEQ ID NO: 371669 - DNA, 25 bp, Homo sapien
ttgcatctgcaacatcaagccaaga

SEQ ID NO: 371670 - DNA, 25 bp, Homo sapien
cctgccaaccaaatgttattctttt

SEQ ID NO: 371671 - DNA, 25 bp, Homo sapien
taatttcaattaggttgtatagcat

SEQ ID NO: 371672 - DNA, 25 bp, Homo sapien
gttaatttcaattaggttgtatagc

SEQ ID NO: 371673 - DNA, 25 bp, Homo sapien
ttgttaatttcaattaggttgtata

SEQ ID NO: 371674 - DNA, 25 bp, Homo sapien
ggatggtctcgattgaaccagtttt

SEQ ID NO: 371675 - DNA, 25 bp, Homo sapien
ttctaattatgagcagaagttggcc

SEQ ID NO: 371676 - DNA, 25 bp, Homo sapien
ccttcctgattgatacccaaatgtt

SEQ ID NO: 371677 - DNA, 25 bp, Homo sapien
tgtgtccatatctccagccttcctg

SEQ ID NO: 371678 - DNA, 25 bp, Homo sapien
tttgaagtccatttgcttcatatca

SEQ ID NO: 371679 - DNA, 25 bp, Homo sapien
gaagtccatttgcttcatatcatgt

SEQ ID NO: 371680 - DNA, 25 bp, Homo sapien
tgaagtccatttgcttcatatcatg

SEQ ID NO: 371681 - DNA, 25 bp, Homo sapien
ttgaagtccatttgcttcatatcat

SEQ ID NO: 371682 - DNA, 25 bp, Homo sapien
gttcagaatcaacgtgctggcccat

SEQ ID NO: 371683 - DNA, 25 bp, Homo sapien
gaatcaacgtgctggcccatccagt

SEQ ID NO: 371684 - DNA, 25 bp, Homo sapien
cagaatcaacgtgctggcccatcca

SEQ ID NO: 371685 - DNA, 25 bp, Homo sapien
tctggggagggaccacctcctggtc

SEQ ID NO: 371686 - DNA, 25 bp, Homo sapien
caacttttccagataggggaagtgg

SEQ ID NO: 371687 - DNA, 25 bp, Homo sapien
aaagacttatgacatctttaggcaa

SEQ ID NO: 371688 - DNA, 25 bp, Homo sapien
ggagttggcagtttcagcttcacca

SEQ ID NO: 371689 - DNA, 25 bp, Homo sapien
gaagtgggtctgcattggttgccat

SEQ ID NO: 371690 - DNA, 25 bp, Homo sapien
tgtggaagacttcccaagccctgct

SEQ ID NO: 371691 - DNA, 25 bp, Homo sapien
taaatcttagtccatattctgtgga

SEQ ID NO: 371692 - DNA, 25 bp, Homo sapien
tattcaagatgacgacatcaattac

SEQ ID NO: 371693 - DNA, 25 bp, Homo sapien
gggctacacttgcaccacactttgt

SEQ ID NO: 371694 - DNA, 25 bp, Homo sapien
tagggaaacaaatgagaacgccatc

SEQ ID NO: 371695 - DNA, 25 bp, Homo sapien
cagagttgaagagacaccaagaaac

SEQ ID NO: 371696 - DNA, 25 bp, Homo sapien
ccacccaaattgcttagtcaggaat

SEQ ID NO: 371697 - DNA, 25 bp, Homo sapien
taaaaactatgcaccgaacaagatg

SEQ ID NO: 371698 - DNA, 25 bp, Homo sapien
acagctgctgagaaccaataaaaca

SEQ ID NO: 371699 - DNA, 25 bp, Homo sapien
gaatcacctttatcccaagttgtgt

SEQ ID NO: 371700 - DNA, 25 bp, Homo sapien
caccaccacgaaattgtggagagtc

SEQ ID NO: 371701 - DNA, 25 bp, Homo sapien
tcaaaatctcgatctctcagatggc

SEQ ID NO: 371702 - DNA, 25 bp, Homo sapien
attttcattgtttcagataactcac

SEQ ID NO: 371703 - DNA, 25 bp, Homo sapien
tgtcattttcattgtttcagataac

SEQ ID NO: 371704 - DNA, 25 bp, Homo sapien
aaaacactgtatctttgtcattttc

SEQ ID NO: 371705 - DNA, 25 bp, Homo sapien
ctgcaaaacactgtatctttgtcat

SEQ ID NO: 371706 - DNA, 25 bp, Homo sapien
tatccgatgagtctatattcaagga

SEQ ID NO: 371707 - DNA, 25 bp, Homo sapien
cgatgagtctatattcaaggacttt

SEQ ID NO: 371708 - DNA, 25 bp, Homo sapien
ttatccgatgagtctatattcaagg

SEQ ID NO: 371709 - DNA, 25 bp, Homo sapien
tccgatgagtctatattcaaggact

SEQ ID NO: 371710 - DNA, 25 bp, Homo sapien
gtctcctaaccagatttaatccagg

SEQ ID NO: 371711 - DNA, 25 bp, Homo sapien
tccaggccttacatcaattgcaaac

SEQ ID NO: 371712 - DNA, 25 bp, Homo sapien
catcaattgcaaacaatacaatgtc

SEQ ID NO: 371713 - DNA, 25 bp, Homo sapien
cttgccttgtcttctatgtctccta

SEQ ID NO: 371714 - DNA, 25 bp, Homo sapien
tctgaagcccttgcacttgataatg

SEQ ID NO: 371715 - DNA, 25 bp, Homo sapien
cacattgaagccataaggagggaga

SEQ ID NO: 371716 - DNA, 25 bp, Homo sapien
aagattgtattacctcatccatggg

SEQ ID NO: 371717 - DNA, 25 bp, Homo sapien
taaattcccgtcttaaatctgaagc

SEQ ID NO: 371718 - DNA, 25 bp, Homo sapien
tcttaaccctctaaactcttgcaac

SEQ ID NO: 371719 - DNA, 25 bp, Homo sapien
tagcaataggtcacttgggcaccaa

SEQ ID NO: 371720 - DNA, 25 bp, Homo sapien
agggcccttccctgacacatgggaa

SEQ ID NO: 371721 - DNA, 25 bp, Homo sapien
catcttcctatcttaaccctctaaa

SEQ ID NO: 371722 - DNA, 25 bp, Homo sapien
gatttaatcacctagcaccaagccc

SEQ ID NO: 371723 - DNA, 25 bp, Homo sapien
aagaagcatattttaccatgagaga

SEQ ID NO: 371724 - DNA, 25 bp, Homo sapien
acaaataactcacaggtttaacagg

SEQ ID NO: 371725 - DNA, 25 bp, Homo sapien
tagagaaaggagctgtgccacacac

SEQ ID NO: 371726 - DNA, 25 bp, Homo sapien
catcgaacaattggcagtggttacc

SEQ ID NO: 371727 - DNA, 25 bp, Homo sapien
tatatctaggtgtacatgcaggcat

SEQ ID NO: 371728 - DNA, 25 bp, Homo sapien
taggctttcaaagactcgagagtca

SEQ ID NO: 371729 - DNA, 25 bp, Homo sapien
aaagtttctgcatagacatacaccg

SEQ ID NO: 371730 - DNA, 25 bp, Homo sapien
cagaaaacacttatattgaacaact

SEQ ID NO: 371731 - DNA, 25 bp, Homo sapien
aaacacttatattgaacaactacca

SEQ ID NO: 371732 - DNA, 25 bp, Homo sapien
aacacttatattgaacaactaccat

SEQ ID NO: 371733 - DNA, 25 bp, Homo sapien
gaaaacacttatattgaacaactac

SEQ ID NO: 371734 - DNA, 25 bp, Homo sapien
cagccataccaccaccattatcaac

SEQ ID NO: 371735 - DNA, 25 bp, Homo sapien
agtccttcttagtcccattttctgg

SEQ ID NO: 371736 - DNA, 25 bp, Homo sapien
aaagcagagtccttcttagtcccat

SEQ ID NO: 371737 - DNA, 25 bp, Homo sapien
tttctggtacctgggacttttcaga

SEQ ID NO: 371738 - DNA, 25 bp, Homo sapien
tgcgaagccaccacacaaatctcta

SEQ ID NO: 371739 - DNA, 25 bp, Homo sapien
ccaaatgccgctagggaagtgtcat

SEQ ID NO: 371740 - DNA, 25 bp, Homo sapien
gtgtatagcatgctgtcaactccaa

SEQ ID NO: 371741 - DNA, 25 bp, Homo sapien
caaataaagctcaagggtccccatg

SEQ ID NO: 371742 - DNA, 25 bp, Homo sapien
aatgagcagagatgttgaagtgttc

SEQ ID NO: 371743 - DNA, 25 bp, Homo sapien
ctaatgagcagagatgttgaagtgt

SEQ ID NO: 371744 - DNA, 25 bp, Homo sapien
aaggtagtctcactcgtcccctagg

SEQ ID NO: 371745 - DNA, 25 bp, Homo sapien
gaagtgttctgctttactgacttga

SEQ ID NO: 371746 - DNA, 25 bp, Homo sapien
ttgacatagaagaaggttggcccac

SEQ ID NO: 371747 - DNA, 25 bp, Homo sapien
ggtcccatttgtttgcagctctcca

SEQ ID NO: 371748 - DNA, 25 bp, Homo sapien
gaatggttttcaagctgtgcctagg

SEQ ID NO: 371749 - DNA, 25 bp, Homo sapien
ggtgaaaatccctgtctccagttga

SEQ ID NO: 371750 - DNA, 25 bp, Homo sapien
tagggtcgttctgctggagaagaaa

SEQ ID NO: 371751 - DNA, 25 bp, Homo sapien
gggagctcctactttattaaggcaa

SEQ ID NO: 371752 - DNA, 25 bp, Homo sapien
gccaggggtacttagggagctccta

SEQ ID NO: 371753 - DNA, 25 bp, Homo sapien
tgtcaacctttagttacaaacatgc

SEQ ID NO: 371754 - DNA, 25 bp, Homo sapien
gctcttggtaataatcggctccatt

SEQ ID NO: 371755 - DNA, 25 bp, Homo sapien
tggtaataatcggctccatttattt

SEQ ID NO: 371756 - DNA, 25 bp, Homo sapien
cttggtaataatcggctccatttat

SEQ ID NO: 371757 - DNA, 25 bp, Homo sapien
tcttggtaataatcggctccattta

SEQ ID NO: 371758 - DNA, 25 bp, Homo sapien
aaatttgagtctataaggtgacaac

SEQ ID NO: 371759 - DNA, 25 bp, Homo sapien
gcaatcgtccttaaatgcaagacca

SEQ ID NO: 371760 - DNA, 25 bp, Homo sapien
ggttactacattcatgataacggct

SEQ ID NO: 371761 - DNA, 25 bp, Homo sapien
caattgcatccttatggttactaca

SEQ ID NO: 371762 - DNA, 25 bp, Homo sapien
tcatgagcatcaaatcagcaatctg

SEQ ID NO: 371763 - DNA, 25 bp, Homo sapien
ctgcacatataagaaggcaaaagtc

SEQ ID NO: 371764 - DNA, 25 bp, Homo sapien
tgcacatataagaaggcaaaagtca

SEQ ID NO: 371765 - DNA, 25 bp, Homo sapien
catgatgtagcgattatcacaagat

SEQ ID NO: 371766 - DNA, 25 bp, Homo sapien
aagagaaaacatgatgtagcgatta

SEQ ID NO: 371767 - DNA, 25 bp, Homo sapien
taagtctgatgctgtaaaagtgtac

SEQ ID NO: 371768 - DNA, 25 bp, Homo sapien
gatggacgtgttgtttggagtaggg

SEQ ID NO: 371769 - DNA, 25 bp, Homo sapien
ggccaaatgtaggtgaccaggaaac

SEQ ID NO: 371770 - DNA, 25 bp, Homo sapien
ttatcctttcgtgttccatgattga

SEQ ID NO: 371771 - DNA, 25 bp, Homo sapien
cttctttgcgaagattatcctttcg

SEQ ID NO: 371772 - DNA, 25 bp, Homo sapien
atgtaggtgaccaggaaacttcttc

SEQ ID NO: 371773 - DNA, 25 bp, Homo sapien
gatttgacagtcaagtcgctgcttg

SEQ ID NO: 371774 - DNA, 25 bp, Homo sapien
tttgacagtcaagtcgctgcttgaa

SEQ ID NO: 371775 - DNA, 25 bp, Homo sapien
gacagtcaagtcgctgcttgaaaga

SEQ ID NO: 371776 - DNA, 25 bp, Homo sapien
tgacagtcaagtcgctgcttgaaag

SEQ ID NO: 371777 - DNA, 25 bp, Homo sapien
gcttggaccacaccgttgcgctttg

SEQ ID NO: 371778 - DNA, 25 bp, Homo sapien
ttccccggcctctgacaagtgagag

SEQ ID NO: 371779 - DNA, 25 bp, Homo sapien
gtcccgtgtatgtcctagaggcgaa

SEQ ID NO: 371780 - DNA, 25 bp, Homo sapien
gttcaagacttcgagggtgcgcgtt

SEQ ID NO: 371781 - DNA, 25 bp, Homo sapien
gcggcggcagaaggctccgtggccg

SEQ ID NO: 371782 - DNA, 25 bp, Homo sapien
cgcggcggcagaaggctccgtggcc

SEQ ID NO: 371783 - DNA, 25 bp, Homo sapien
cggcggcagaaggctccgtggccgc

SEQ ID NO: 371784 - DNA, 25 bp, Homo sapien
gcagcagcgagaccacgcggctcat

SEQ ID NO: 371785 - DNA, 25 bp, Homo sapien
atgcaggtttccaacgccccggaga

SEQ ID NO: 371786 - DNA, 25 bp, Homo sapien
tctccccgctcgttcttcggggaga

SEQ ID NO: 371787 - DNA, 25 bp, Homo sapien
agagcctccgcccgagaacaggctg

SEQ ID NO: 371788 - DNA, 25 bp, Homo sapien
cggagagcctccgcccgagaacagg

SEQ ID NO: 371789 - DNA, 25 bp, Homo sapien
ggtcacagaaagcatccgagtgaac

SEQ ID NO: 371790 - DNA, 25 bp, Homo sapien
agaaagcatccgagtgaacacggtg

SEQ ID NO: 371791 - DNA, 25 bp, Homo sapien
cacagaaagcatccgagtgaacacg

SEQ ID NO: 371792 - DNA, 25 bp, Homo sapien
ctggtcacagaaagcatccgagtga

SEQ ID NO: 371793 - DNA, 25 bp, Homo sapien
tgagaacaaagaccgaatgcccagg

SEQ ID NO: 371794 - DNA, 25 bp, Homo sapien
ggaaaggcatctacacgcaatgacc

SEQ ID NO: 371795 - DNA, 25 bp, Homo sapien
tgtgtgccgaacctgcagtcattac

SEQ ID NO: 371796 - DNA, 25 bp, Homo sapien
gaagtccccaacttggaacgcagtg

SEQ ID NO: 371797 - DNA, 25 bp, Homo sapien
gaggaaaaggatctaatgtcacaga

SEQ ID NO: 371798 - DNA, 25 bp, Homo sapien
gaactatattctgaagctgtagaac

SEQ ID NO: 371799 - DNA, 25 bp, Homo sapien
gagtgatcggtaactacacatgtaa

SEQ ID NO: 371800 - DNA, 25 bp, Homo sapien
tctgaaaaaagtgtagagtgatcgg

SEQ ID NO: 371801 - DNA, 25 bp, Homo sapien
ttgtggataatagagcagtcctccg

SEQ ID NO: 371802 - DNA, 25 bp, Homo sapien
tccagaccctggacgatagacagct

SEQ ID NO: 371803 - DNA, 25 bp, Homo sapien
tcctccggtcctgcttgagggagtg

SEQ ID NO: 371804 - DNA, 25 bp, Homo sapien
ccctggacgatagacagcttgacac

SEQ ID NO: 371805 - DNA, 25 bp, Homo sapien
agggatgcttgaagtcagcaaaaca

SEQ ID NO: 371806 - DNA, 25 bp, Homo sapien
tgaagtcagcaaaacacaccttttg

SEQ ID NO: 371807 - DNA, 25 bp, Homo sapien
tttgtagcagggatgcttgaagtca

SEQ ID NO: 371808 - DNA, 25 bp, Homo sapien
aagtcagcaaaacacaccttttggc

SEQ ID NO: 371809 - DNA, 25 bp, Homo sapien
gccaggcgtgcctcctgaaagctca

SEQ ID NO: 371810 - DNA, 25 bp, Homo sapien
catcagaaatccctgtcccgggttt

SEQ ID NO: 371811 - DNA, 25 bp, Homo sapien
ttctgcttcattctcaaggctgagg

SEQ ID NO: 371812 - DNA, 25 bp, Homo sapien
tgaaagctcactcggctggacagtt

SEQ ID NO: 371813 - DNA, 25 bp, Homo sapien
gtgcttcatgttacacctgtcatca

SEQ ID NO: 371814 - DNA, 25 bp, Homo sapien
ttgcaaatataattgtgcttcatgt

SEQ ID NO: 371815 - DNA, 25 bp, Homo sapien
ggtgatacatcacaacacacttttc

SEQ ID NO: 371816 - DNA, 25 bp, Homo sapien
tggtgatacatcacaacacactttt

SEQ ID NO: 371817 - DNA, 25 bp, Homo sapien
taagataaggcttttctacaggggc

SEQ ID NO: 371818 - DNA, 25 bp, Homo sapien
tgcttcagtaacaaccacattctga

SEQ ID NO: 371819 - DNA, 25 bp, Homo sapien
accacattctgatgggtgtctcctg

SEQ ID NO: 371820 - DNA, 25 bp, Homo sapien
tctacaggggctgttggattaatct

SEQ ID NO: 371821 - DNA, 25 bp, Homo sapien
aagagcaggggtattgttggtataa

SEQ ID NO: 371822 - DNA, 25 bp, Homo sapien
acataaattagattgggaattatac

SEQ ID NO: 371823 - DNA, 25 bp, Homo sapien
ttccaaaagcaaccagtatcagtaa

SEQ ID NO: 371824 - DNA, 25 bp, Homo sapien
taactgcttaataagtcctgtaagg

SEQ ID NO: 371825 - DNA, 25 bp, Homo sapien
ctaactatggtacccaaggcagact

SEQ ID NO: 371826 - DNA, 25 bp, Homo sapien
gattcaccgtggacactaactatgg

SEQ ID NO: 371827 - DNA, 25 bp, Homo sapien
aatacaaacagaagggtaactgctt

SEQ ID NO: 371828 - DNA, 25 bp, Homo sapien
ggcctgtttgaaccgctgtatttta

SEQ ID NO: 371829 - DNA, 25 bp, Homo sapien
tgatgtctagattgaaaagtttagc

SEQ ID NO: 371830 - DNA, 25 bp, Homo sapien
gaacctacaaatatcaagtcttaca

SEQ ID NO: 371831 - DNA, 25 bp, Homo sapien
gtcttacatatagcttgatgtctag

SEQ ID NO: 371832 - DNA, 25 bp, Homo sapien
ggaattctggcccacatttccagcc

SEQ ID NO: 371833 - DNA, 25 bp, Homo sapien
ctgtctttccacaacacgataactt

SEQ ID NO: 371834 - DNA, 25 bp, Homo sapien
cagcctgtgcctagggttctgctat

SEQ ID NO: 371835 - DNA, 25 bp, Homo sapien
cctagggttctgctatcttctgtct

SEQ ID NO: 371836 - DNA, 25 bp, Homo sapien
cacagtgtagactggtttggactag

SEQ ID NO: 371837 - DNA, 25 bp, Homo sapien
aatccacagtgtagactggtttgga

SEQ ID NO: 371838 - DNA, 25 bp, Homo sapien
cagtgtagactggtttggactagtt

SEQ ID NO: 371839 - DNA, 25 bp, Homo sapien
tccacagtgtagactggtttggact

SEQ ID NO: 371840 - DNA, 25 bp, Homo sapien
tgccattccttatacagatccagaa

SEQ ID NO: 371841 - DNA, 25 bp, Homo sapien
tacagttcatcttgcagatcctttg

SEQ ID NO: 371842 - DNA, 25 bp, Homo sapien
gatttcaagccattccaagctattg

SEQ ID NO: 371843 - DNA, 25 bp, Homo sapien
gttctgatgccattccttatacaga

SEQ ID NO: 371844 - DNA, 25 bp, Homo sapien
ggagcacagggacatatgaagacca

SEQ ID NO: 371845 - DNA, 25 bp, Homo sapien
tagtcagaggctaaatacagctagg

SEQ ID NO: 371846 - DNA, 25 bp, Homo sapien
gagggaccacattgatttcagaacc

SEQ ID NO: 371847 - DNA, 25 bp, Homo sapien
tgcgatcactgatgggttccaaccc

SEQ ID NO: 371848 - DNA, 25 bp, Homo sapien
tcaccacacagaatcttttgatgta

SEQ ID NO: 371849 - DNA, 25 bp, Homo sapien
caccacacagaatcttttgatgtat

SEQ ID NO: 371850 - DNA, 25 bp, Homo sapien
gcattgctcagtatcccaacagtga

SEQ ID NO: 371851 - DNA, 25 bp, Homo sapien
catggcggcggaatttttcctatcc

SEQ ID NO: 371852 - DNA, 25 bp, Homo sapien
gaaacttcctcaagtggctctagaa

SEQ ID NO: 371853 - DNA, 25 bp, Homo sapien
caaagtacagattgttgagtgccac

SEQ ID NO: 371854 - DNA, 25 bp, Homo sapien
gggacctctctgtgcttgagtaaca

SEQ ID NO: 371855 - DNA, 25 bp, Homo sapien
aagtatcatttggatggtgaggcca

SEQ ID NO: 371856 - DNA, 25 bp, Homo sapien
gaccaagctttaattgagccttctg

SEQ ID NO: 371857 - DNA, 25 bp, Homo sapien
tgtttccgacccaatccaactttga

SEQ ID NO: 371858 - DNA, 25 bp, Homo sapien
gaatacatgctgacacactaaaaag

SEQ ID NO: 371859 - DNA, 25 bp, Homo sapien
taaaataaggctagggagagtgtac

SEQ ID NO: 371860 - DNA, 25 bp, Homo sapien
catcggatgtccaaagatagctctt

SEQ ID NO: 371861 - DNA, 25 bp, Homo sapien
ctgtgtaggtacctgagaatgcttc

SEQ ID NO: 371862 - DNA, 25 bp, Homo sapien
atgaagacagttgacgttgactgcc

SEQ ID NO: 371863 - DNA, 25 bp, Homo sapien
gaagacagttgacgttgactgccat

SEQ ID NO: 371864 - DNA, 25 bp, Homo sapien
tgaagacagttgacgttgactgcca

SEQ ID NO: 371865 - DNA, 25 bp, Homo sapien
tcagcaagaggccacgtatagatca

SEQ ID NO: 371866 - DNA, 25 bp, Homo sapien
tagtattccacagtactggccgcag

SEQ ID NO: 371867 - DNA, 25 bp, Homo sapien
tagcccatccagctgatgtagagag

SEQ ID NO: 371868 - DNA, 25 bp, Homo sapien
cattcgcacacagatatggccactg

SEQ ID NO: 371869 - DNA, 25 bp, Homo sapien
gctgggctgagagctttactagaca

SEQ ID NO: 371870 - DNA, 25 bp, Homo sapien
tgtatagtttctccacaacgtttgg

SEQ ID NO: 371871 - DNA, 25 bp, Homo sapien
tagacaattgggagcagtctgggca

SEQ ID NO: 371872 - DNA, 25 bp, Homo sapien
tgagatgtcaaaacaagagtgttgc

SEQ ID NO: 371873 - DNA, 25 bp, Homo sapien
tatagttgctaaataagggttcgta

SEQ ID NO: 371874 - DNA, 25 bp, Homo sapien
ttgtgtatagttgctaaataagggt

SEQ ID NO: 371875 - DNA, 25 bp, Homo sapien
ataaagtaattgtgggcccttgaag

SEQ ID NO: 371876 - DNA, 25 bp, Homo sapien
tgtgtgttgtgtatagttgctaaat

SEQ ID NO: 371877 - DNA, 25 bp, Homo sapien
tgtgtcaccataattgaaataaagc

SEQ ID NO: 371878 - DNA, 25 bp, Homo sapien
aaagcagttgtctattttgccagtg

SEQ ID NO: 371879 - DNA, 25 bp, Homo sapien
ctgaattggctgtgtcaccataatt

SEQ ID NO: 371880 - DNA, 25 bp, Homo sapien
agttgtctattttgccagtgtgatg

SEQ ID NO: 371881 - DNA, 25 bp, Homo sapien
ctgtggccaagctataaaaccattt

SEQ ID NO: 371882 - DNA, 25 bp, Homo sapien
tcatctgtggccaagctataaaacc

SEQ ID NO: 371883 - DNA, 25 bp, Homo sapien
aggccaaccacagtgagtgctgatt

SEQ ID NO: 371884 - DNA, 25 bp, Homo sapien
cacagtgagtgctgattcgctgatt

SEQ ID NO: 371885 - DNA, 25 bp, Homo sapien
caaccacagtgagtgctgattcgct

SEQ ID NO: 371886 - DNA, 25 bp, Homo sapien
agtgagtgctgattcgctgattccc

SEQ ID NO: 371887 - DNA, 25 bp, Homo sapien
tctgaactcagtgcgctttgatcaa

SEQ ID NO: 371888 - DNA, 25 bp, Homo sapien
tttatctgaactcagtgcgctttga

SEQ ID NO: 371889 - DNA, 25 bp, Homo sapien
tatctgaactcagtgcgctttgatc

SEQ ID NO: 371890 - DNA, 25 bp, Homo sapien
ttttatctgaactcagtgcgctttg

SEQ ID NO: 371891 - DNA, 25 bp, Homo sapien
ctttgcatgttggtatagatggtga

SEQ ID NO: 371892 - DNA, 25 bp, Homo sapien
atggtgatagtctcactctcagaga

SEQ ID NO: 371893 - DNA, 25 bp, Homo sapien
ccttcctttgcatgttggtatagat

SEQ ID NO: 371894 - DNA, 25 bp, Homo sapien
ttcctttgcatgttggtatagatgg

SEQ ID NO: 371895 - DNA, 25 bp, Homo sapien
attaacacatcccagaagaattcgt

SEQ ID NO: 371896 - DNA, 25 bp, Homo sapien
cagaagaattcgttcccatcaatta

SEQ ID NO: 371897 - DNA, 25 bp, Homo sapien
cacatcccagaagaattcgttccca

SEQ ID NO: 371898 - DNA, 25 bp, Homo sapien
caattacagcagaagttgtagtcac

SEQ ID NO: 371899 - DNA, 25 bp, Homo sapien
tagtttccattcgctgcttgcctta

SEQ ID NO: 371900 - DNA, 25 bp, Homo sapien
agtttccattcgctgcttgccttac

SEQ ID NO: 371901 - DNA, 25 bp, Homo sapien
attgccaatagttgtgaaagccttc

SEQ ID NO: 371902 - DNA, 25 bp, Homo sapien
cagaaattgccaatagttgtgaaag

SEQ ID NO: 371903 - DNA, 25 bp, Homo sapien
aaagatcagaaattgccaatagttg

SEQ ID NO: 371904 - DNA, 25 bp, Homo sapien
tacactgtagcagaaatatccccaa

SEQ ID NO: 371905 - DNA, 25 bp, Homo sapien
gcttgttcctaattgcagttccact

SEQ ID NO: 371906 - DNA, 25 bp, Homo sapien
tgtgcttgttcctaattgcagttcc

SEQ ID NO: 371907 - DNA, 25 bp, Homo sapien
tctgaggcttgtgttcccttgttct

SEQ ID NO: 371908 - DNA, 25 bp, Homo sapien
tgcaggtggccgtgactctcctttt

SEQ ID NO: 371909 - DNA, 25 bp, Homo sapien
tacaggatccccacttatgccgttc

SEQ ID NO: 371910 - DNA, 25 bp, Homo sapien
cagaatcgccttcaaagagcccttg

SEQ ID NO: 371911 - DNA, 25 bp, Homo sapien
gtgaactacacgcatcctgaactga

SEQ ID NO: 371912 - DNA, 25 bp, Homo sapien
gccgttccatgcgaagttgcctcag

SEQ ID NO: 371913 - DNA, 25 bp, Homo sapien
tctacttatagcaaacggactttta

SEQ ID NO: 371914 - DNA, 25 bp, Homo sapien
cagagctgagcgtatcagcaagggt

SEQ ID NO: 371915 - DNA, 25 bp, Homo sapien
caagggtcaagtgataaaagcagac

SEQ ID NO: 371916 - DNA, 25 bp, Homo sapien
catgtttgatcctgtactgcgggca

SEQ ID NO: 371917 - DNA, 25 bp, Homo sapien
catctctgaccctttggttttgaat

SEQ ID NO: 371918 - DNA, 25 bp, Homo sapien
tcatctctgaccctttggttttgaa

SEQ ID NO: 371919 - DNA, 25 bp, Homo sapien
ggcttacggcaggtagatactacta

SEQ ID NO: 371920 - DNA, 25 bp, Homo sapien
tcagatgagtacagcttccaagatt

SEQ ID NO: 371921 - DNA, 25 bp, Homo sapien
tgtcctagtcagattaaacccttgc

SEQ ID NO: 371922 - DNA, 25 bp, Homo sapien
ccaatgctgtctttgggtccaagcc

SEQ ID NO: 371923 - DNA, 25 bp, Homo sapien
ctgtcgactaattgcaccaataaac

SEQ ID NO: 371924 - DNA, 25 bp, Homo sapien
gtcgactaattgcaccaataaactt

SEQ ID NO: 371925 - DNA, 25 bp, Homo sapien
cgactaattgcaccaataaacttca

SEQ ID NO: 371926 - DNA, 25 bp, Homo sapien
tgtcgactaattgcaccaataaact

SEQ ID NO: 371927 - DNA, 25 bp, Homo sapien
tttcacacaagacaacaacaagcag

SEQ ID NO: 371928 - DNA, 25 bp, Homo sapien
gtgaatgagctggtattgtaggcat

SEQ ID NO: 371929 - DNA, 25 bp, Homo sapien
acactggtaggtgaatgagctggta

SEQ ID NO: 371930 - DNA, 25 bp, Homo sapien
agtgaaaacaatccagctgaaacac

SEQ ID NO: 371931 - DNA, 25 bp, Homo sapien
gcaaacagatggctaaccctctgaa

SEQ ID NO: 371932 - DNA, 25 bp, Homo sapien
gctgctgtgggtgtaagtctgaaaa

SEQ ID NO: 371933 - DNA, 25 bp, Homo sapien
acaaaagctttttggaagatccatg

SEQ ID NO: 371934 - DNA, 25 bp, Homo sapien
gattatggcacccacatgcattgct

SEQ ID NO: 371935 - DNA, 25 bp, Homo sapien
ctaataaatatagttcagcagggtg

SEQ ID NO: 371936 - DNA, 25 bp, Homo sapien
ggaggcctagatgagcagaacactt

SEQ ID NO: 371937 - DNA, 25 bp, Homo sapien
aataaatatagttcagcagggtgca

SEQ ID NO: 371938 - DNA, 25 bp, Homo sapien
gggaggcctagatgagcagaacact

SEQ ID NO: 371939 - DNA, 25 bp, Homo sapien
gtgtgtaagtgcactgcagcatgca

SEQ ID NO: 371940 - DNA, 25 bp, Homo sapien
tgcaggagttcagctttaatgttca

SEQ ID NO: 371941 - DNA, 25 bp, Homo sapien
gcaaatccttcctagcatacgctga

SEQ ID NO: 371942 - DNA, 25 bp, Homo sapien
gccttatttcatgctccattgagag

SEQ ID NO: 371943 - DNA, 25 bp, Homo sapien
gagggaaatcaagtagctcttgggc

SEQ ID NO: 371944 - DNA, 25 bp, Homo sapien
tagagccgcttacagattttggata

SEQ ID NO: 371945 - DNA, 25 bp, Homo sapien
tttcttcgggacatagtagagccgc

SEQ ID NO: 371946 - DNA, 25 bp, Homo sapien
tgatgatgcctatactctttaagac

SEQ ID NO: 371947 - DNA, 25 bp, Homo sapien
gacaccatcagcacaaagtgagttg

SEQ ID NO: 371948 - DNA, 25 bp, Homo sapien
ttcagcagtgtagagacttctggga

SEQ ID NO: 371949 - DNA, 25 bp, Homo sapien
tgtgggcttgagttggacaccatca

SEQ ID NO: 371950 - DNA, 25 bp, Homo sapien
attttaaccccatacttcagcagtg

SEQ ID NO: 371951 - DNA, 25 bp, Homo sapien
aaatactttgaactttgcaggccag

SEQ ID NO: 371952 - DNA, 25 bp, Homo sapien
gctttcctggtgagcattgtaggca

SEQ ID NO: 371953 - DNA, 25 bp, Homo sapien
gatgttgtagtgtagagggaaccac

SEQ ID NO: 371954 - DNA, 25 bp, Homo sapien
cagacaatatagacatgaagaggca

SEQ ID NO: 371955 - DNA, 25 bp, Homo sapien
atgttttaaaaaatgtatgggtcat

SEQ ID NO: 371956 - DNA, 25 bp, Homo sapien
tgtctgcccttgcagaatgttttaa

SEQ ID NO: 371957 - DNA, 25 bp, Homo sapien
tctgcccttgcagaatgttttaaaa

SEQ ID NO: 371958 - DNA, 25 bp, Homo sapien
ctgcccttgcagaatgttttaaaaa

SEQ ID NO: 371959 - DNA, 25 bp, Homo sapien
gacccgagtttcatagactctctaa

SEQ ID NO: 371960 - DNA, 25 bp, Homo sapien
tctctaaaagtcatggacccagtga

SEQ ID NO: 371961 - DNA, 25 bp, Homo sapien
ttccctgagtcattgacccgagttt

SEQ ID NO: 371962 - DNA, 25 bp, Homo sapien
actctctaaaagtcatggacccagt

SEQ ID NO: 371963 - DNA, 25 bp, Homo sapien
ctgaattatactgccacagagccct

SEQ ID NO: 371964 - DNA, 25 bp, Homo sapien
tacttgcccattttacgtgaaaatc

SEQ ID NO: 371965 - DNA, 25 bp, Homo sapien
ctagctctctgaattatactgccac

SEQ ID NO: 371966 - DNA, 25 bp, Homo sapien
ccattttacgtgaaaatctcaatct

SEQ ID NO: 371967 - DNA, 25 bp, Homo sapien
tttgtctactctttgactgatgcat

SEQ ID NO: 371968 - DNA, 25 bp, Homo sapien
gtttgtctactctttgactgatgca

SEQ ID NO: 371969 - DNA, 25 bp, Homo sapien
tgtttgtctactctttgactgatgc

SEQ ID NO: 371970 - DNA, 25 bp, Homo sapien
ctgtttgtctactctttgactgatg

SEQ ID NO: 371971 - DNA, 25 bp, Homo sapien
tctgcagtacatgaagagcttcccc

SEQ ID NO: 371972 - DNA, 25 bp, Homo sapien
gcagggcttctgcagtacatgaaga

SEQ ID NO: 371973 - DNA, 25 bp, Homo sapien
gctcccaaatggcatacatggccat

SEQ ID NO: 371974 - DNA, 25 bp, Homo sapien
catatgtctgaggttaatatcttcc

SEQ ID NO: 371975 - DNA, 25 bp, Homo sapien
tccaggtcccccagtatagccctac

SEQ ID NO: 371976 - DNA, 25 bp, Homo sapien
atccaggtcccccagtatagcccta

SEQ ID NO: 371977 - DNA, 25 bp, Homo sapien
atgcttgcttaggagggagttgctg

SEQ ID NO: 371978 - DNA, 25 bp, Homo sapien
agttgctgtatcgactaagggctat

SEQ ID NO: 371979 - DNA, 25 bp, Homo sapien
ggagggagttgctgtatcgactaag

SEQ ID NO: 371980 - DNA, 25 bp, Homo sapien
ctgtatcgactaagggctatgccac

SEQ ID NO: 371981 - DNA, 25 bp, Homo sapien
gccactggtgcttgaactcaatcca

SEQ ID NO: 371982 - DNA, 25 bp, Homo sapien
aagaggtgccgagtttccatgctgc

SEQ ID NO: 371983 - DNA, 25 bp, Homo sapien
gtgtgttcacccacctggaaactct

SEQ ID NO: 371984 - DNA, 25 bp, Homo sapien
tgagcttccactatgtagacatgat

SEQ ID NO: 371985 - DNA, 25 bp, Homo sapien
ctggctcaaatttaacatatttcac

SEQ ID NO: 371986 - DNA, 25 bp, Homo sapien
caaatttaacatatttcacccacat

SEQ ID NO: 371987 - DNA, 25 bp, Homo sapien
ggctcaaatttaacatatttcaccc

SEQ ID NO: 371988 - DNA, 25 bp, Homo sapien
ctcaaatttaacatatttcacccac

SEQ ID NO: 371989 - DNA, 25 bp, Homo sapien
aagagaagctgggattccacgtctt

SEQ ID NO: 371990 - DNA, 25 bp, Homo sapien
tatctgacaggtaagaaccttcttg

SEQ ID NO: 371991 - DNA, 25 bp, Homo sapien
tccagttggcactttgctgctccat

SEQ ID NO: 371992 - DNA, 25 bp, Homo sapien
aaccttcttgtcaggggccaccaca

SEQ ID NO: 371993 - DNA, 25 bp, Homo sapien
ccaacatgtattgcctggaagcaga

SEQ ID NO: 371994 - DNA, 25 bp, Homo sapien
taaatgcagtgaacttcctatgaca

SEQ ID NO: 371995 - DNA, 25 bp, Homo sapien
tgtccatctgtcattaataggaacc

SEQ ID NO: 371996 - DNA, 25 bp, Homo sapien
gtacatctctaagtataaatgcagt

SEQ ID NO: 371997 - DNA, 25 bp, Homo sapien
agcagtagttatggcatcatttcct

SEQ ID NO: 371998 - DNA, 25 bp, Homo sapien
ctccatgaactagtttgctcagtgt

SEQ ID NO: 371999 - DNA, 25 bp, Homo sapien
tatctttgatgatatcgcccctatc

SEQ ID NO: 372000 - DNA, 25 bp, Homo sapien
atatcgcccctatccaaagcagtag

SEQ ID NO: 372001 - DNA, 25 bp, Homo sapien
tcaggatctgagtaggttctgcccc

SEQ ID NO: 372002 - DNA, 25 bp, Homo sapien
aatagttctgaaccatgggtctaga

SEQ ID NO: 372003 - DNA, 25 bp, Homo sapien
gaagctgtatggcacagttaaaata

SEQ ID NO: 372004 - DNA, 25 bp, Homo sapien
taacacatttcattgctctcttgtc

SEQ ID NO: 372005 - DNA, 25 bp, Homo sapien
atttcttcttcgcttttatttgtat

SEQ ID NO: 372006 - DNA, 25 bp, Homo sapien
tgctcccatttcttcttcgctttta

SEQ ID NO: 372007 - DNA, 25 bp, Homo sapien
ctcccatttcttcttcgcttttatt

SEQ ID NO: 372008 - DNA, 25 bp, Homo sapien
cccatttcttcttcgcttttatttg

SEQ ID NO: 372009 - DNA, 25 bp, Homo sapien
cattggattgttgtttgctccacca

SEQ ID NO: 372010 - DNA, 25 bp, Homo sapien
tgacccacgtcaattctcttccaaa

SEQ ID NO: 372011 - DNA, 25 bp, Homo sapien
gaatgtaagaatttgtgtgacccac

SEQ ID NO: 372012 - DNA, 25 bp, Homo sapien
cttctcgcagctcccattggattgt

SEQ ID NO: 372013 - DNA, 25 bp, Homo sapien
tcttgtaaatcaaggctattgattc

SEQ ID NO: 372014 - DNA, 25 bp, Homo sapien
caaatctcttgtaaatcaaggctat

SEQ ID NO: 372015 - DNA, 25 bp, Homo sapien
cctcaaatctcttgtaaatcaaggc

SEQ ID NO: 372016 - DNA, 25 bp, Homo sapien
aacagagaataatggaatatgtgtg

SEQ ID NO: 372017 - DNA, 25 bp, Homo sapien
tatttccccaagtaattccagttga

SEQ ID NO: 372018 - DNA, 25 bp, Homo sapien
gtaattccagttgaaaggaaagctg

SEQ ID NO: 372019 - DNA, 25 bp, Homo sapien
attccagttgaaaggaaagctgttt

SEQ ID NO: 372020 - DNA, 25 bp, Homo sapien
caagtaattccagttgaaaggaaag

SEQ ID NO: 372021 - DNA, 25 bp, Homo sapien
gcaaagccaagtaattgcttcttaa

SEQ ID NO: 372022 - DNA, 25 bp, Homo sapien
agccaagtaattgcttcttaagacg

SEQ ID NO: 372023 - DNA, 25 bp, Homo sapien
agtaattgcttcttaagacgccatc

SEQ ID NO: 372024 - DNA, 25 bp, Homo sapien
caagtaattgcttcttaagacgcca

SEQ ID NO: 372025 - DNA, 25 bp, Homo sapien
tcgccgtcgacggcaatgtcgaaga

SEQ ID NO: 372026 - DNA, 25 bp, Homo sapien
cgccgtcgacggcaatgtcgaagaa

SEQ ID NO: 372027 - DNA, 25 bp, Homo sapien
gctcgccgtcgacggcaatgtcgaa

SEQ ID NO: 372028 - DNA, 25 bp, Homo sapien
gggctcgccgtcgacggcaatgtcg

SEQ ID NO: 372029 - DNA, 25 bp, Homo sapien
gaaggaatgacctggtggttaagat

SEQ ID NO: 372030 - DNA, 25 bp, Homo sapien
tgagctacagaaggaatgacctggt

SEQ ID NO: 372031 - DNA, 25 bp, Homo sapien
agctacagaaggaatgacctggtgg

SEQ ID NO: 372032 - DNA, 25 bp, Homo sapien
cagaaggaatgacctggtggttaag

SEQ ID NO: 372033 - DNA, 25 bp, Homo sapien
tcctcaataagatgccttttggttt

SEQ ID NO: 372034 - DNA, 25 bp, Homo sapien
cttcctcaataagatgccttttggt

SEQ ID NO: 372035 - DNA, 25 bp, Homo sapien
ggttttgttttatcatcattcctca

SEQ ID NO: 372036 - DNA, 25 bp, Homo sapien
ctcaataagatgccttttggttttg

SEQ ID NO: 372037 - DNA, 25 bp, Homo sapien
cctctgcttcatctaactcgtaggg

SEQ ID NO: 372038 - DNA, 25 bp, Homo sapien
atatactttatattgctgtgcttgg

SEQ ID NO: 372039 - DNA, 25 bp, Homo sapien
actttatattgctgtgcttggcatc

SEQ ID NO: 372040 - DNA, 25 bp, Homo sapien
tatactttatattgctgtgcttggc

SEQ ID NO: 372041 - DNA, 25 bp, Homo sapien
tgagctacgggaggacattcaaacc

SEQ ID NO: 372042 - DNA, 25 bp, Homo sapien
acagagaagtgcttaaaggagctga

SEQ ID NO: 372043 - DNA, 25 bp, Homo sapien
aaattactctgagctacgggaggac

SEQ ID NO: 372044 - DNA, 25 bp, Homo sapien
ttactctgagctacgggaggacatt

SEQ ID NO: 372045 - DNA, 25 bp, Homo sapien
ccagctggagcagggtaaagaacaa

SEQ ID NO: 372046 - DNA, 25 bp, Homo sapien
gatttttgaggtattctcctggccc

SEQ ID NO: 372047 - DNA, 25 bp, Homo sapien
cagccatgttggcaagatttctctg

SEQ ID NO: 372048 - DNA, 25 bp, Homo sapien
aagactctcatctgtagcacgtgaa

SEQ ID NO: 372049 - DNA, 25 bp, Homo sapien
ggacattcagcaaacttaaatctat

SEQ ID NO: 372050 - DNA, 25 bp, Homo sapien
tctcagggattggacattcagcaaa

SEQ ID NO: 372051 - DNA, 25 bp, Homo sapien
gacattcagcaaacttaaatctata

SEQ ID NO: 372052 - DNA, 25 bp, Homo sapien
aattctgttctcagggattggacat

SEQ ID NO: 372053 - DNA, 25 bp, Homo sapien
tcctcaaactttgtcctactgagaa

SEQ ID NO: 372054 - DNA, 25 bp, Homo sapien
cctcaaactttgtcctactgagaaa

SEQ ID NO: 372055 - DNA, 25 bp, Homo sapien
ttcctcaaactttgtcctactgaga

SEQ ID NO: 372056 - DNA, 25 bp, Homo sapien
gattcctcaaactttgtcctactga

SEQ ID NO: 372057 - DNA, 25 bp, Homo sapien
caatttatgactgtatacccgtgga

SEQ ID NO: 372058 - DNA, 25 bp, Homo sapien
caaagccctcaatttggagcctggg

SEQ ID NO: 372059 - DNA, 25 bp, Homo sapien
ggaattccaacgtagcacctctctg

SEQ ID NO: 372060 - DNA, 25 bp, Homo sapien
cagttataaccagtagaggctcctc

SEQ ID NO: 372061 - DNA, 25 bp, Homo sapien
cctggagatggcactttgtagggct

SEQ ID NO: 372062 - DNA, 25 bp, Homo sapien
tggcactttgtagggctgccaatct

SEQ ID NO: 372063 - DNA, 25 bp, Homo sapien
gagtatacatcacatgtccccagta

SEQ ID NO: 372064 - DNA, 25 bp, Homo sapien
cctctggaatggagtatacatcaca

SEQ ID NO: 372065 - DNA, 25 bp, Homo sapien
ctgtgtatagttcgatgtagggatc

SEQ ID NO: 372066 - DNA, 25 bp, Homo sapien
taatgacaacttccacaaaacagat

SEQ ID NO: 372067 - DNA, 25 bp, Homo sapien
tgaacagattggcaattgcactatt

SEQ ID NO: 372068 - DNA, 25 bp, Homo sapien
taggacattacctccatacaaagga

SEQ ID NO: 372069 - DNA, 25 bp, Homo sapien
tcttcacaagaattttcatacaagc

SEQ ID NO: 372070 - DNA, 25 bp, Homo sapien
gggtcttcacaagaattttcataca

SEQ ID NO: 372071 - DNA, 25 bp, Homo sapien
cttttagtgggtcttcacaagaatt

SEQ ID NO: 372072 - DNA, 25 bp, Homo sapien
tagtgggtcttcacaagaattttca

SEQ ID NO: 372073 - DNA, 25 bp, Homo sapien
tataaagtcgacttgcccaaacgct

SEQ ID NO: 372074 - DNA, 25 bp, Homo sapien
gagagtcatgggcattttccagaag

SEQ ID NO: 372075 - DNA, 25 bp, Homo sapien
aaacgctgagcaagcattagcggag

SEQ ID NO: 372076 - DNA, 25 bp, Homo sapien
cactggttctgaagcgaatgagctc

SEQ ID NO: 372077 - DNA, 25 bp, Homo sapien
gagcgggaaaggcattaagtatctc

SEQ ID NO: 372078 - DNA, 25 bp, Homo sapien
cttgagcgggaaaggcattaagtat

SEQ ID NO: 372079 - DNA, 25 bp, Homo sapien
gcgggaaaggcattaagtatctctt

SEQ ID NO: 372080 - DNA, 25 bp, Homo sapien
gggaaaggcattaagtatctctttg

SEQ ID NO: 372081 - DNA, 25 bp, Homo sapien
atgatgtaaccagtttagaatcttc

SEQ ID NO: 372082 - DNA, 25 bp, Homo sapien
gaatcttctgacttactcttactcc

SEQ ID NO: 372083 - DNA, 25 bp, Homo sapien
tactccaatgatcattccaagtcat

SEQ ID NO: 372084 - DNA, 25 bp, Homo sapien
tgttggtggtctcaaatgatgtaac

SEQ ID NO: 372085 - DNA, 25 bp, Homo sapien
cctcacttctagtaaagtcctactg

SEQ ID NO: 372086 - DNA, 25 bp, Homo sapien
ccaatcctcacttctagtaaagtcc

SEQ ID NO: 372087 - DNA, 25 bp, Homo sapien
cacttctagtaaagtcctactgtgg

SEQ ID NO: 372088 - DNA, 25 bp, Homo sapien
tctagtaaagtcctactgtggcttc

SEQ ID NO: 372089 - DNA, 25 bp, Homo sapien
catggatttaagttagaaccggtct

SEQ ID NO: 372090 - DNA, 25 bp, Homo sapien
tcatggatttaagttagaaccggtc

SEQ ID NO: 372091 - DNA, 25 bp, Homo sapien
attaatgatgggcttctgaaactga

SEQ ID NO: 372092 - DNA, 25 bp, Homo sapien
ttaatgatgggcttctgaaactgac

SEQ ID NO: 372093 - DNA, 25 bp, Homo sapien
gtagggcagaagtcaggcatatcct

SEQ ID NO: 372094 - DNA, 25 bp, Homo sapien
acaaggctcaaattcaggtgttggc

SEQ ID NO: 372095 - DNA, 25 bp, Homo sapien
ctcagtactcagtggccactacagt

SEQ ID NO: 372096 - DNA, 25 bp, Homo sapien
aagttctctactccagggtctcaca

SEQ ID NO: 372097 - DNA, 25 bp, Homo sapien
taagatgggtatggttagcagagat

SEQ ID NO: 372098 - DNA, 25 bp, Homo sapien
gatgaagtgagtattcgaggtgttc

SEQ ID NO: 372099 - DNA, 25 bp, Homo sapien
ctgtatctttaagatgggtatggtt

SEQ ID NO: 372100 - DNA, 25 bp, Homo sapien
cagagacttgatgaagtgagtattc

SEQ ID NO: 372101 - DNA, 25 bp, Homo sapien
cagagcttggcaattgtaagtttgc

SEQ ID NO: 372102 - DNA, 25 bp, Homo sapien
taggaatcttattggagaagaaatc

SEQ ID NO: 372103 - DNA, 25 bp, Homo sapien
aaagtgatgagtagcgtaggaatct

SEQ ID NO: 372104 - DNA, 25 bp, Homo sapien
tggtcaagaatgtcttcaaaagtat

SEQ ID NO: 372105 - DNA, 25 bp, Homo sapien
taaaggcgtcaaaagctggtagagg

SEQ ID NO: 372106 - DNA, 25 bp, Homo sapien
gatggtaaaggcgtcaaaagctggt

SEQ ID NO: 372107 - DNA, 25 bp, Homo sapien
aatagatggtaaaggcgtcaaaagc

SEQ ID NO: 372108 - DNA, 25 bp, Homo sapien
gaggtataatagatggtaaaggcgt

SEQ ID NO: 372109 - DNA, 25 bp, Homo sapien
ttgctgttcctttaactatcttaaa

SEQ ID NO: 372110 - DNA, 25 bp, Homo sapien
gccattttatctctattgctgttcc

SEQ ID NO: 372111 - DNA, 25 bp, Homo sapien
cctttaactatcttaaataactgca

SEQ ID NO: 372112 - DNA, 25 bp, Homo sapien
ggccattttatctctattgctgttc

SEQ ID NO: 372113 - DNA, 25 bp, Homo sapien
aatcatcatcgtaatgaccgtccat

SEQ ID NO: 372114 - DNA, 25 bp, Homo sapien
ggattcaaatcatcatcgtaatgac

SEQ ID NO: 372115 - DNA, 25 bp, Homo sapien
ctgtgacaaggtgaatacaaatgtc

SEQ ID NO: 372116 - DNA, 25 bp, Homo sapien
gacaaggtgaatacaaatgtctatt

SEQ ID NO: 372117 - DNA, 25 bp, Homo sapien
ctcggccttgtcctcagaccgcgct

SEQ ID NO: 372118 - DNA, 25 bp, Homo sapien
cttgtcctcagaccgcgctctctgg

SEQ ID NO: 372119 - DNA, 25 bp, Homo sapien
cctcagaccgcgctctctggctctt

SEQ ID NO: 372120 - DNA, 25 bp, Homo sapien
tcagaccgcgctctctggctcttcc

SEQ ID NO: 372121 - DNA, 25 bp, Homo sapien
gccagccacggagatcaccaagtcg

SEQ ID NO: 372122 - DNA, 25 bp, Homo sapien
cagccacggagatcaccaagtcgat

SEQ ID NO: 372123 - DNA, 25 bp, Homo sapien
cacggagatcaccaagtcgatcttg

SEQ ID NO: 372124 - DNA, 25 bp, Homo sapien
gaagccgccagccacggagatcacc

SEQ ID NO: 372125 - DNA, 25 bp, Homo sapien
ctccaagaaaaacacaggcaggccg

SEQ ID NO: 372126 - DNA, 25 bp, Homo sapien
ctgtagcccaggccacgatgacgat

SEQ ID NO: 372127 - DNA, 25 bp, Homo sapien
gacgatgtagtggacgttcgggaag

SEQ ID NO: 372128 - DNA, 25 bp, Homo sapien
tggacgttcgggaagggcacaatta

SEQ ID NO: 372129 - DNA, 25 bp, Homo sapien
caattacgatggaggcagagccgat

SEQ ID NO: 372130 - DNA, 25 bp, Homo sapien
atgccgggcagcatcagccctcgga

SEQ ID NO: 372131 - DNA, 25 bp, Homo sapien
tgtgcgccctcgaggcaggtgatgt

SEQ ID NO: 372132 - DNA, 25 bp, Homo sapien
gagaaaaattgatgccggcacccat

SEQ ID NO: 372133 - DNA, 25 bp, Homo sapien
cctcaggagcatggcgaactggaac

SEQ ID NO: 372134 - DNA, 25 bp, Homo sapien
actgttcaggcatccaggcagcatg

SEQ ID NO: 372135 - DNA, 25 bp, Homo sapien
aggcagcatgcagtccctgtacgag

SEQ ID NO: 372136 - DNA, 25 bp, Homo sapien
caatggccaccccttgctttcgtgc

SEQ ID NO: 372137 - DNA, 25 bp, Homo sapien
tagctccgtagagaggtcacggccc

SEQ ID NO: 372138 - DNA, 25 bp, Homo sapien
tatccaggcagtaactatacagtca

SEQ ID NO: 372139 - DNA, 25 bp, Homo sapien
gaacgcagcccctaaaaggcataca

SEQ ID NO: 372140 - DNA, 25 bp, Homo sapien
tagacgccaacctccgttaccattg

SEQ ID NO: 372141 - DNA, 25 bp, Homo sapien
gcccgatagccgatcacgttctcaa

SEQ ID NO: 372142 - DNA, 25 bp, Homo sapien
tgaagcataccaaattactgttggg

SEQ ID NO: 372143 - DNA, 25 bp, Homo sapien
caaattgccaatattgaaaacgagt

SEQ ID NO: 372144 - DNA, 25 bp, Homo sapien
taaacaaatatgcagtgtgtgaact

SEQ ID NO: 372145 - DNA, 25 bp, Homo sapien
actgttgggtgaaaaggcaagctat

SEQ ID NO: 372146 - DNA, 25 bp, Homo sapien
ttaaacagaatagcttataaacaac

SEQ ID NO: 372147 - DNA, 25 bp, Homo sapien
caagatgaaggcaccgccagattca

SEQ ID NO: 372148 - DNA, 25 bp, Homo sapien
aatacaacaacgataatataatttt

SEQ ID NO: 372149 - DNA, 25 bp, Homo sapien
agttcaagatgaaggcaccgccaga

SEQ ID NO: 372150 - DNA, 25 bp, Homo sapien
gaatccctccttatgattctcctca

SEQ ID NO: 372151 - DNA, 25 bp, Homo sapien
taatttcttgcaccattctactctt

SEQ ID NO: 372152 - DNA, 25 bp, Homo sapien
tgatgcatcgtcattatttccagaa

SEQ ID NO: 372153 - DNA, 25 bp, Homo sapien
caatttttgtagcatagtatataaa

SEQ ID NO: 372154 - DNA, 25 bp, Homo sapien
tttctggattctggtgtgtctgcca

SEQ ID NO: 372155 - DNA, 25 bp, Homo sapien
tccagtgacagtccttaaattcatg

SEQ ID NO: 372156 - DNA, 25 bp, Homo sapien
tatggtcatatggtcctagtatccc

SEQ ID NO: 372157 - DNA, 25 bp, Homo sapien
gccatgcttatcacatcagttttcc

SEQ ID NO: 372158 - DNA, 25 bp, Homo sapien
actgccagagcatcagctgagctga

SEQ ID NO: 372159 - DNA, 25 bp, Homo sapien
cattccagttcaggtttaaagacca

SEQ ID NO: 372160 - DNA, 25 bp, Homo sapien
cataatgtcagcaacatgcattgga

SEQ ID NO: 372161 - DNA, 25 bp, Homo sapien
tgtggcagcaatgctcaacgcagag

SEQ ID NO: 372162 - DNA, 25 bp, Homo sapien
tgtttaatgtgtttcttgttctgca

SEQ ID NO: 372163 - DNA, 25 bp, Homo sapien
gtttaatgtgtttcttgttctgcat

SEQ ID NO: 372164 - DNA, 25 bp, Homo sapien
gtgtttaatgtgtttcttgttctgc

SEQ ID NO: 372165 - DNA, 25 bp, Homo sapien
ctgtgtttaatgtgtttcttgttct

SEQ ID NO: 372166 - DNA, 25 bp, Homo sapien
tggaatgcagtggataaggcttgcc

SEQ ID NO: 372167 - DNA, 25 bp, Homo sapien
ggaaaactacctttgtgattatgat

SEQ ID NO: 372168 - DNA, 25 bp, Homo sapien
atgcagtggataaggcttgccctgg

SEQ ID NO: 372169 - DNA, 25 bp, Homo sapien
tgattatgatatctcctctgccatg

SEQ ID NO: 372170 - DNA, 25 bp, Homo sapien
tgcatctgcagcttgtttgaaggac

SEQ ID NO: 372171 - DNA, 25 bp, Homo sapien
ctcaggccattggagcacactctgc

SEQ ID NO: 372172 - DNA, 25 bp, Homo sapien
ccttggatttagcaatagcctgcat

SEQ ID NO: 372173 - DNA, 25 bp, Homo sapien
aaggactgtttggaggactatgctc

SEQ ID NO: 372174 - DNA, 25 bp, Homo sapien
tatagctttcaacacaccaatgacc

SEQ ID NO: 372175 - DNA, 25 bp, Homo sapien
agagggtaatttcccgcaagacctg

SEQ ID NO: 372176 - DNA, 25 bp, Homo sapien
tgcttcattaattcctctacacctg

SEQ ID NO: 372177 - DNA, 25 bp, Homo sapien
agaaatggcagaatctcaataaagg

SEQ ID NO: 372178 - DNA, 25 bp, Homo sapien
cagtccacaaagcttggtgctatga

SEQ ID NO: 372179 - DNA, 25 bp, Homo sapien
gtatcagctacaatccagtccacaa

SEQ ID NO: 372180 - DNA, 25 bp, Homo sapien
tacattccttttgtatcagctacaa

SEQ ID NO: 372181 - DNA, 25 bp, Homo sapien
ggtgctatgatgtggttgtattcca

SEQ ID NO: 372182 - DNA, 25 bp, Homo sapien
ttatcttatcatcagataatcctgt

SEQ ID NO: 372183 - DNA, 25 bp, Homo sapien
tcagataatcctgttaataatgtct

SEQ ID NO: 372184 - DNA, 25 bp, Homo sapien
tgttatcttatcatcagataatcct

SEQ ID NO: 372185 - DNA, 25 bp, Homo sapien
gttatcttatcatcagataatcctg

SEQ ID NO: 372186 - DNA, 25 bp, Homo sapien
ctgagagtcctaggttgatgtggcc

SEQ ID NO: 372187 - DNA, 25 bp, Homo sapien
tctcatttgagagacaaacccataa

SEQ ID NO: 372188 - DNA, 25 bp, Homo sapien
aaatcgcagaggagttgggttaatg

SEQ ID NO: 372189 - DNA, 25 bp, Homo sapien
tttgagagacaaacccataacgtca

SEQ ID NO: 372190 - DNA, 25 bp, Homo sapien
tgctgtcctcaaatactagattaga

SEQ ID NO: 372191 - DNA, 25 bp, Homo sapien
tggcaattaggtcatggagctcatc

SEQ ID NO: 372192 - DNA, 25 bp, Homo sapien
tccataagaaacaacctacatcttt

SEQ ID NO: 372193 - DNA, 25 bp, Homo sapien
ttagaatgcaaagggatggcaatta

SEQ ID NO: 372194 - DNA, 25 bp, Homo sapien
ttgccagctcaatggtagccagtat

SEQ ID NO: 372195 - DNA, 25 bp, Homo sapien
ctttaacaatgttattgccagctca

SEQ ID NO: 372196 - DNA, 25 bp, Homo sapien
aaggaagaagtcctgctttaacaat

SEQ ID NO: 372197 - DNA, 25 bp, Homo sapien
ggaagaagtcctgctttaacaatgt

SEQ ID NO: 372198 - DNA, 25 bp, Homo sapien
ttctcgctagtgtgccattcccagg

SEQ ID NO: 372199 - DNA, 25 bp, Homo sapien
caacatagtgcatctgtcaagcacc

SEQ ID NO: 372200 - DNA, 25 bp, Homo sapien
aattattcaacccttaccttcagct

SEQ ID NO: 372201 - DNA, 25 bp, Homo sapien
acttgataatattgccacctgtggc

SEQ ID NO: 372202 - DNA, 25 bp, Homo sapien
aatttatacttgcactgaggactcc

SEQ ID NO: 372203 - DNA, 25 bp, Homo sapien
gagatttttacactgaagtcttgaa

SEQ ID NO: 372204 - DNA, 25 bp, Homo sapien
actccagatctgtcataggaatagc

SEQ ID NO: 372205 - DNA, 25 bp, Homo sapien
tgttcccctgtgcacaagaccatca

SEQ ID NO: 372206 - DNA, 25 bp, Homo sapien
ccattccatgtcttggatgaggaca

SEQ ID NO: 372207 - DNA, 25 bp, Homo sapien
gatgaggacaggttaatggtcacaa

SEQ ID NO: 372208 - DNA, 25 bp, Homo sapien
tgctgtgaagacactcaaaaatgtg

SEQ ID NO: 372209 - DNA, 25 bp, Homo sapien
tgtgggaaagtttgcaacttcacag

SEQ ID NO: 372210 - DNA, 25 bp, Homo sapien
gacttgttgaatagtttgatcaaaa

SEQ ID NO: 372211 - DNA, 25 bp, Homo sapien
aagtttgcaacttcacagagacttg

SEQ ID NO: 372212 - DNA, 25 bp, Homo sapien
ctatgctagtgctggaaatgcagcc

SEQ ID NO: 372213 - DNA, 25 bp, Homo sapien
cattgtttatgggaacctgtcctcc

SEQ ID NO: 372214 - DNA, 25 bp, Homo sapien
tgctttaatttatggtgttccttcc

SEQ ID NO: 372215 - DNA, 25 bp, Homo sapien
cccactcaagctgacaacattgttt

SEQ ID NO: 372216 - DNA, 25 bp, Homo sapien
agatggagtcatctgtacgggcccc

SEQ ID NO: 372217 - DNA, 25 bp, Homo sapien
catttgcgccacagatgagggatca

SEQ ID NO: 372218 - DNA, 25 bp, Homo sapien
tatgacacgctagcctaaaacactg

SEQ ID NO: 372219 - DNA, 25 bp, Homo sapien
gattcattgagacctggtgccccaa

SEQ ID NO: 372220 - DNA, 25 bp, Homo sapien
ttccctatgggatcaaaaaggagtg

SEQ ID NO: 372221 - DNA, 25 bp, Homo sapien
gatttggtagaacaactccatcagc

SEQ ID NO: 372222 - DNA, 25 bp, Homo sapien
tgtgcatagccaccaaaggaaacag

SEQ ID NO: 372223 - DNA, 25 bp, Homo sapien
gctgaagctgcacagatggaaatct

SEQ ID NO: 372224 - DNA, 25 bp, Homo sapien
gatttagatgttcattgatcttcat

SEQ ID NO: 372225 - DNA, 25 bp, Homo sapien
ggcaattggccagtattactgtctc

SEQ ID NO: 372226 - DNA, 25 bp, Homo sapien
aattggccagtattactgtctcttt

SEQ ID NO: 372227 - DNA, 25 bp, Homo sapien
caattggccagtattactgtctctt

SEQ ID NO: 372228 - DNA, 25 bp, Homo sapien
ctggcaattggccagtattactgtc

SEQ ID NO: 372229 - DNA, 25 bp, Homo sapien
gtttggctgtggatgaacctctctg

SEQ ID NO: 372230 - DNA, 25 bp, Homo sapien
ggatgaacctctctggggtactcct

SEQ ID NO: 372231 - DNA, 25 bp, Homo sapien
ctaggcattgtcttctgtgtttggc

SEQ ID NO: 372232 - DNA, 25 bp, Homo sapien
taggcattgtcttctgtgtttggct

SEQ ID NO: 372233 - DNA, 25 bp, Homo sapien
catattctttccacttcacctgcat

SEQ ID NO: 372234 - DNA, 25 bp, Homo sapien
caagatcggctgtctgtggtctgtg

SEQ ID NO: 372235 - DNA, 25 bp, Homo sapien
agatcggctgtctgtggtctgtgtt

SEQ ID NO: 372236 - DNA, 25 bp, Homo sapien
tgtgtatgtgcccatattctttcca

SEQ ID NO: 372237 - DNA, 25 bp, Homo sapien
ggaagtcgtagaatcacaaataatc

SEQ ID NO: 372238 - DNA, 25 bp, Homo sapien
cgtgaatttgacttaaccaacttgg

SEQ ID NO: 372239 - DNA, 25 bp, Homo sapien
tttgacttcttcagtttcgtatcgt

SEQ ID NO: 372240 - DNA, 25 bp, Homo sapien
tcagtttcgtatcgtgaatttgact

SEQ ID NO: 372241 - DNA, 25 bp, Homo sapien
gaaacctccatgaactaataagcaa

SEQ ID NO: 372242 - DNA, 25 bp, Homo sapien
tggcattccaatcaacacataggta

SEQ ID NO: 372243 - DNA, 25 bp, Homo sapien
tgctcttgcgcacacatgacatgat

SEQ ID NO: 372244 - DNA, 25 bp, Homo sapien
ccaatttgctgtatagattcaatcc

SEQ ID NO: 372245 - DNA, 25 bp, Homo sapien
attattattaagaattgcatgctta

SEQ ID NO: 372246 - DNA, 25 bp, Homo sapien
ttattattaagaattgcatgcttat

SEQ ID NO: 372247 - DNA, 25 bp, Homo sapien
cattaatcttggaaacaggcatcat

SEQ ID NO: 372248 - DNA, 25 bp, Homo sapien
ttaccattaatcttggaaacaggca

SEQ ID NO: 372249 - DNA, 25 bp, Homo sapien
aaacaggcatcatttgtaaatccat

SEQ ID NO: 372250 - DNA, 25 bp, Homo sapien
ctgttatattaccattaatcttgga

SEQ ID NO: 372251 - DNA, 25 bp, Homo sapien
caaatttatcacaggattcatacaa

SEQ ID NO: 372252 - DNA, 25 bp, Homo sapien
tcaaagctcaaatttatcacaggat

SEQ ID NO: 372253 - DNA, 25 bp, Homo sapien
attcatacaaaatgcgtgtggcagc

SEQ ID NO: 372254 - DNA, 25 bp, Homo sapien
ttcatacaaaatgcgtgtggcagct

SEQ ID NO: 372255 - DNA, 25 bp, Homo sapien
cagagtatcgaattatgaatttctg

SEQ ID NO: 372256 - DNA, 25 bp, Homo sapien
ttttttcatgacagagtatcgaatt

SEQ ID NO: 372257 - DNA, 25 bp, Homo sapien
tttcatgacagagtatcgaattatg

SEQ ID NO: 372258 - DNA, 25 bp, Homo sapien
catgacagagtatcgaattatgaat

SEQ ID NO: 372259 - DNA, 25 bp, Homo sapien
tctcttctctatcccgcttcagttt

SEQ ID NO: 372260 - DNA, 25 bp, Homo sapien
tctgggagtaatgcattctccaggg

SEQ ID NO: 372261 - DNA, 25 bp, Homo sapien
aaaggaaccatcttctgggagtaat

SEQ ID NO: 372262 - DNA, 25 bp, Homo sapien
tctctatcccgcttcagttttttcc

SEQ ID NO: 372263 - DNA, 25 bp, Homo sapien
attatttgtgtccccagattccact

SEQ ID NO: 372264 - DNA, 25 bp, Homo sapien
gcagccaactctgagtgttgctcat

SEQ ID NO: 372265 - DNA, 25 bp, Homo sapien
cattatttgtgtccccagattccac

SEQ ID NO: 372266 - DNA, 25 bp, Homo sapien
tcttcattatttgtgtccccagatt

SEQ ID NO: 372267 - DNA, 25 bp, Homo sapien
gaggatactccttttactgaggcaa

SEQ ID NO: 372268 - DNA, 25 bp, Homo sapien
tattgaggacttcagaatggtggcc

SEQ ID NO: 372269 - DNA, 25 bp, Homo sapien
tatgcagggcttgatagtaagcact

SEQ ID NO: 372270 - DNA, 25 bp, Homo sapien
tgagagacttcatggtggctgtcct

SEQ ID NO: 372271 - DNA, 25 bp, Homo sapien
gaatgcataaagtgactttcacact

SEQ ID NO: 372272 - DNA, 25 bp, Homo sapien
ttaccattagacgtcctctcacagc

SEQ ID NO: 372273 - DNA, 25 bp, Homo sapien
caataattaccattagacgtcctct

SEQ ID NO: 372274 - DNA, 25 bp, Homo sapien
cactctggggtataaaacacatcaa

SEQ ID NO: 372275 - DNA, 25 bp, Homo sapien
cagcctatgaggttaatctgaactt

SEQ ID NO: 372276 - DNA, 25 bp, Homo sapien
taaaccggcaagtaagcgtcagagt

SEQ ID NO: 372277 - DNA, 25 bp, Homo sapien
ctgaactttttctgaaggacggaag

SEQ ID NO: 372278 - DNA, 25 bp, Homo sapien
gacggaaggccatgtatgctgtgct

SEQ ID NO: 372279 - DNA, 25 bp, Homo sapien
attgacttttggcatagaatttcgc

SEQ ID NO: 372280 - DNA, 25 bp, Homo sapien
gacttttggcatagaatttcgccta

SEQ ID NO: 372281 - DNA, 25 bp, Homo sapien
attattattgacttttggcatagaa

SEQ ID NO: 372282 - DNA, 25 bp, Homo sapien
ttggcatagaatttcgcctaagcat

SEQ ID NO: 372283 - DNA, 25 bp, Homo sapien
cccaggttcctgacattgcagtaag

SEQ ID NO: 372284 - DNA, 25 bp, Homo sapien
atgtcatccactcatatttaccatg

SEQ ID NO: 372285 - DNA, 25 bp, Homo sapien
ttattcatggctccggacaccacta

SEQ ID NO: 372286 - DNA, 25 bp, Homo sapien
gagatttacaggttttatttgctcc

SEQ ID NO: 372287 - DNA, 25 bp, Homo sapien
aaagttaaggacatatggaaattca

SEQ ID NO: 372288 - DNA, 25 bp, Homo sapien
ctgtcaggactgtgggaagtttaaa

SEQ ID NO: 372289 - DNA, 25 bp, Homo sapien
tgtcaggactgtgggaagtttaaaa

SEQ ID NO: 372290 - DNA, 25 bp, Homo sapien
aattcacaggaattgtgttggtcat

SEQ ID NO: 372291 - DNA, 25 bp, Homo sapien
ttagtttcatgtatatctttacatc

SEQ ID NO: 372292 - DNA, 25 bp, Homo sapien
gattcatggtgaattcaggtgaagg

SEQ ID NO: 372293 - DNA, 25 bp, Homo sapien
tgtttctgattcatggtgaattcag

SEQ ID NO: 372294 - DNA, 25 bp, Homo sapien
gtgaattcaggtgaaggaaaaacag

SEQ ID NO: 372295 - DNA, 25 bp, Homo sapien
gatactgagagacctaaatgacatt

SEQ ID NO: 372296 - DNA, 25 bp, Homo sapien
ccagggcttaatgatactgagagac

SEQ ID NO: 372297 - DNA, 25 bp, Homo sapien
aatgatactgagagacctaaatgac

SEQ ID NO: 372298 - DNA, 25 bp, Homo sapien
gcttaatgatactgagagacctaaa

SEQ ID NO: 372299 - DNA, 25 bp, Homo sapien
tcaagccaaaaagctactgccacag

SEQ ID NO: 372300 - DNA, 25 bp, Homo sapien
gaaacactttatgacactggtctgc

SEQ ID NO: 372301 - DNA, 25 bp, Homo sapien
gaaaaaatggcaagctattcagctg

SEQ ID NO: 372302 - DNA, 25 bp, Homo sapien
gttcagggaaaactggaggtccaca

SEQ ID NO: 372303 - DNA, 25 bp, Homo sapien
tctgaacacagctaataatgagcac

SEQ ID NO: 372304 - DNA, 25 bp, Homo sapien
tacctcactgctggattctataaaa

SEQ ID NO: 372305 - DNA, 25 bp, Homo sapien
tataggataatgctagcagaaacag

SEQ ID NO: 372306 - DNA, 25 bp, Homo sapien
atctactgagccaccattaccctga

SEQ ID NO: 372307 - DNA, 25 bp, Homo sapien
ttagagaactgccttgacgaaactt

SEQ ID NO: 372308 - DNA, 25 bp, Homo sapien
gagaactgccttgacgaaacttatt

SEQ ID NO: 372309 - DNA, 25 bp, Homo sapien
tttttagagaactgccttgacgaaa

SEQ ID NO: 372310 - DNA, 25 bp, Homo sapien
gaactgccttgacgaaacttattat

SEQ ID NO: 372311 - DNA, 25 bp, Homo sapien
gccttccgatgtaaagtttttgatg

SEQ ID NO: 372312 - DNA, 25 bp, Homo sapien
gatacggtctttgccttccgatgta

SEQ ID NO: 372313 - DNA, 25 bp, Homo sapien
ccttccgatgtaaagtttttgatga

SEQ ID NO: 372314 - DNA, 25 bp, Homo sapien
aaggatacggtctttgccttccgat

SEQ ID NO: 372315 - DNA, 25 bp, Homo sapien
agcacgtctgtgaagtaaaacatct

SEQ ID NO: 372316 - DNA, 25 bp, Homo sapien
cctctgggaagcacgtctgtgaagt

SEQ ID NO: 372317 - DNA, 25 bp, Homo sapien
tctgggaagcacgtctgtgaagtaa

SEQ ID NO: 372318 - DNA, 25 bp, Homo sapien
gggaagcacgtctgtgaagtaaaac

SEQ ID NO: 372319 - DNA, 25 bp, Homo sapien
caagtgtctgtccagcctcggtctc

SEQ ID NO: 372320 - DNA, 25 bp, Homo sapien
agtgccaagtgtctgtccagcctcg

SEQ ID NO: 372321 - DNA, 25 bp, Homo sapien
cagtgccaagtgtctgtccagcctc

SEQ ID NO: 372322 - DNA, 25 bp, Homo sapien
tgccaagtgtctgtccagcctcggt

SEQ ID NO: 372323 - DNA, 25 bp, Homo sapien
tgctgagaggggtagctttcaatat

SEQ ID NO: 372324 - DNA, 25 bp, Homo sapien
tgagaggggtagctttcaatatagc

SEQ ID NO: 372325 - DNA, 25 bp, Homo sapien
ctgagaggggtagctttcaatatag

SEQ ID NO: 372326 - DNA, 25 bp, Homo sapien
agaggggtagctttcaatatagctt

SEQ ID NO: 372327 - DNA, 25 bp, Homo sapien
agaaaggtcatcgttggtgggaagc

SEQ ID NO: 372328 - DNA, 25 bp, Homo sapien
gaaaggtcatcgttggtgggaagca

SEQ ID NO: 372329 - DNA, 25 bp, Homo sapien
gcagccgcagatctgggattccact

SEQ ID NO: 372330 - DNA, 25 bp, Homo sapien
ccgcagatctgggattccactggca

SEQ ID NO: 372331 - DNA, 25 bp, Homo sapien
agccgcagatctgggattccactgg

SEQ ID NO: 372332 - DNA, 25 bp, Homo sapien
gaagcagccgcagatctgggattcc

SEQ ID NO: 372333 - DNA, 25 bp, Homo sapien
ctgctccttccaggttaaggtttat

SEQ ID NO: 372334 - DNA, 25 bp, Homo sapien
ctccttccaggttaaggtttatatg

SEQ ID NO: 372335 - DNA, 25 bp, Homo sapien
tcagacagatctataactgccctct

SEQ ID NO: 372336 - DNA, 25 bp, Homo sapien
cagatctataactgccctctgactt

SEQ ID NO: 372337 - DNA, 25 bp, Homo sapien
tttatgtaagctgcgggctactgcc

SEQ ID NO: 372338 - DNA, 25 bp, Homo sapien
tcaatgttctgctttattgcaacta

SEQ ID NO: 372339 - DNA, 25 bp, Homo sapien
tcacggaccctatagggtttatgta

SEQ ID NO: 372340 - DNA, 25 bp, Homo sapien
ttgcaactatgttcacggaccctat

SEQ ID NO: 372341 - DNA, 25 bp, Homo sapien
tctataattggctgtgggctaagtc

SEQ ID NO: 372342 - DNA, 25 bp, Homo sapien
gaaacacttactctatgaacccaga

SEQ ID NO: 372343 - DNA, 25 bp, Homo sapien
ttcaggtcccagataagaaagaccc

SEQ ID NO: 372344 - DNA, 25 bp, Homo sapien
gaaagaccctgcatccttgaatgga

SEQ ID NO: 372345 - DNA, 25 bp, Homo sapien
gcagcctttagctggatacttttca

SEQ ID NO: 372346 - DNA, 25 bp, Homo sapien
agcagcctttagctggatacttttc

SEQ ID NO: 372347 - DNA, 25 bp, Homo sapien
aagcagcctttagctggatactttt

SEQ ID NO: 372348 - DNA, 25 bp, Homo sapien
cagcctttagctggatacttttcat

SEQ ID NO: 372349 - DNA, 25 bp, Homo sapien
taacttgatccttgacatgttttca

SEQ ID NO: 372350 - DNA, 25 bp, Homo sapien
ttacatcacctccgataaagcagga

SEQ ID NO: 372351 - DNA, 25 bp, Homo sapien
tccgataaagcaggaatactaaagt

SEQ ID NO: 372352 - DNA, 25 bp, Homo sapien
tcacctccgataaagcaggaatact

SEQ ID NO: 372353 - DNA, 25 bp, Homo sapien
tagccttcgtaaatttccatgttca

SEQ ID NO: 372354 - DNA, 25 bp, Homo sapien
gaactggtcagtatgatccatgtag

SEQ ID NO: 372355 - DNA, 25 bp, Homo sapien
agtatgatccatgtagccttcgtaa

SEQ ID NO: 372356 - DNA, 25 bp, Homo sapien
tccatgtagccttcgtaaatttcca

SEQ ID NO: 372357 - DNA, 25 bp, Homo sapien
ggcatttggtatccagcatcctact

SEQ ID NO: 372358 - DNA, 25 bp, Homo sapien
tcagaaatatccaggaaactttggg

SEQ ID NO: 372359 - DNA, 25 bp, Homo sapien
gggtaaatcccacagtagaagctct

SEQ ID NO: 372360 - DNA, 25 bp, Homo sapien
tgttcagtgtcttagcggcatttgg

SEQ ID NO: 372361 - DNA, 25 bp, Homo sapien
tagtataaagtttctgcattcatct

SEQ ID NO: 372362 - DNA, 25 bp, Homo sapien
ctcaaagttttaccctctgctctca

SEQ ID NO: 372363 - DNA, 25 bp, Homo sapien
gctcctacattcctaaaaaccctca

SEQ ID NO: 372364 - DNA, 25 bp, Homo sapien
ccctcaaagttttaccctctgctct

SEQ ID NO: 372365 - DNA, 25 bp, Homo sapien
ttctgctcctacattcctaaaaacc

SEQ ID NO: 372366 - DNA, 25 bp, Homo sapien
ttttctttgaccatatccagcccac

SEQ ID NO: 372367 - DNA, 25 bp, Homo sapien
tctttgaccatatccagcccactat

SEQ ID NO: 372368 - DNA, 25 bp, Homo sapien
tatccagcccactatcctccaagtt

SEQ ID NO: 372369 - DNA, 25 bp, Homo sapien
aaaattgtaacgctttgctcttcat

SEQ ID NO: 372370 - DNA, 25 bp, Homo sapien
ctaagagtacggacagggaaacatc

SEQ ID NO: 372371 - DNA, 25 bp, Homo sapien
tgtgggtccatcacttctgtcactg

SEQ ID NO: 372372 - DNA, 25 bp, Homo sapien
ctgtgtgggtccatcacttctgtca

SEQ ID NO: 372373 - DNA, 25 bp, Homo sapien
aagagtacggacagggaaacatcat

SEQ ID NO: 372374 - DNA, 25 bp, Homo sapien
ttctcgcctaaccacgacacagctt

SEQ ID NO: 372375 - DNA, 25 bp, Homo sapien
tcattctcgcctaaccacgacacag

SEQ ID NO: 372376 - DNA, 25 bp, Homo sapien
tcgcctaaccacgacacagcttgga

SEQ ID NO: 372377 - DNA, 25 bp, Homo sapien
gcctaaccacgacacagcttggaag

SEQ ID NO: 372378 - DNA, 25 bp, Homo sapien
tattatgcacagagacggggagccc

SEQ ID NO: 372379 - DNA, 25 bp, Homo sapien
agcccacatttgcccagattggcat

SEQ ID NO: 372380 - DNA, 25 bp, Homo sapien
tggtgatattatgcacagagacggg

SEQ ID NO: 372381 - DNA, 25 bp, Homo sapien
tggacttattggtgatattatgcac

SEQ ID NO: 372382 - DNA, 25 bp, Homo sapien
tgccgttacgcccttgtctcagcat

SEQ ID NO: 372383 - DNA, 25 bp, Homo sapien
cacgcttctgaaggactttgctgcc

SEQ ID NO: 372384 - DNA, 25 bp, Homo sapien
gaaggactttgctgccgttacgccc

SEQ ID NO: 372385 - DNA, 25 bp, Homo sapien
ctgttctcacgcttctgaaggactt

SEQ ID NO: 372386 - DNA, 25 bp, Homo sapien
acagaagaacagtcttttaatgaac

SEQ ID NO: 372387 - DNA, 25 bp, Homo sapien
accaggtcaacctggcaatcaatgg

SEQ ID NO: 372388 - DNA, 25 bp, Homo sapien
ttgcaacgcagagccatgaaggagg

SEQ ID NO: 372389 - DNA, 25 bp, Homo sapien
tagccagctggatcaaccaggtcaa

SEQ ID NO: 372390 - DNA, 25 bp, Homo sapien
ctgttcctggatgcgggttcctgct

SEQ ID NO: 372391 - DNA, 25 bp, Homo sapien
tctgttcctggatgcgggttcctgc

SEQ ID NO: 372392 - DNA, 25 bp, Homo sapien
tgttcctggatgcgggttcctgctc

SEQ ID NO: 372393 - DNA, 25 bp, Homo sapien
gttcctggatgcgggttcctgctct

SEQ ID NO: 372394 - DNA, 25 bp, Homo sapien
ctgaatgctactagcactctcaaag

SEQ ID NO: 372395 - DNA, 25 bp, Homo sapien
gcttcctgaatgctactagcactct

SEQ ID NO: 372396 - DNA, 25 bp, Homo sapien
ctctatcagcttcctgaatgctact

SEQ ID NO: 372397 - DNA, 25 bp, Homo sapien
tatcagcttcctgaatgctactagc

SEQ ID NO: 372398 - DNA, 25 bp, Homo sapien
ggcattgctactctcttctttggtg

SEQ ID NO: 372399 - DNA, 25 bp, Homo sapien
tgagttctcttgcagatctgtgtac

SEQ ID NO: 372400 - DNA, 25 bp, Homo sapien
gagtttgtcagatttgtagccttcc

SEQ ID NO: 372401 - DNA, 25 bp, Homo sapien
ctgttgatttaaagctggtcgtgat

SEQ ID NO: 372402 - DNA, 25 bp, Homo sapien
ccttttaagccttatctctcttctt

SEQ ID NO: 372403 - DNA, 25 bp, Homo sapien
gaaaggggctattgatagtgaattg

SEQ ID NO: 372404 - DNA, 25 bp, Homo sapien
ttggtctctttcgtcttctattctt

SEQ ID NO: 372405 - DNA, 25 bp, Homo sapien
tcttctattcttagagccttcttcc

SEQ ID NO: 372406 - DNA, 25 bp, Homo sapien
tgttgtccaaattcaacaatgctca

SEQ ID NO: 372407 - DNA, 25 bp, Homo sapien
catgattatgttgtccaaattcaac

SEQ ID NO: 372408 - DNA, 25 bp, Homo sapien
ctgcatgattatgttgtccaaattc

SEQ ID NO: 372409 - DNA, 25 bp, Homo sapien
ttatgttgtccaaattcaacaatgc

SEQ ID NO: 372410 - DNA, 25 bp, Homo sapien
ctagaccaaacagcacatcctctgg

SEQ ID NO: 372411 - DNA, 25 bp, Homo sapien
taagcaccgtgtccacaatctactg

SEQ ID NO: 372412 - DNA, 25 bp, Homo sapien
caatctactgtgaggagtggcagct

SEQ ID NO: 372413 - DNA, 25 bp, Homo sapien
tgctgctatttcctctatgccgtgt

SEQ ID NO: 372414 - DNA, 25 bp, Homo sapien
agtaaaactgaataggttgttctat

SEQ ID NO: 372415 - DNA, 25 bp, Homo sapien
tatttctgtagttcatcatcgtgtg

SEQ ID NO: 372416 - DNA, 25 bp, Homo sapien
catcgtgtgagatgtaagaagggct

SEQ ID NO: 372417 - DNA, 25 bp, Homo sapien
ataggttgttctatttcaaaaggat

SEQ ID NO: 372418 - DNA, 25 bp, Homo sapien
ccaacttgctgatgctactgtcccc

SEQ ID NO: 372419 - DNA, 25 bp, Homo sapien
tgctgatgctactgtcccccagtag

SEQ ID NO: 372420 - DNA, 25 bp, Homo sapien
gtcccccagtagcacctgtttattg

SEQ ID NO: 372421 - DNA, 25 bp, Homo sapien
cccccagtagcacctgtttattgtc

SEQ ID NO: 372422 - DNA, 25 bp, Homo sapien
tgccaacacaattccagcgatttat

SEQ ID NO: 372423 - DNA, 25 bp, Homo sapien
gcgtggcaaccaccgtgatgaattt

SEQ ID NO: 372424 - DNA, 25 bp, Homo sapien
catttatttcagtcagcgtggcaac

SEQ ID NO: 372425 - DNA, 25 bp, Homo sapien
tctatggagcatcgcgcttcgttcc

SEQ ID NO: 372426 - DNA, 25 bp, Homo sapien
agtaatagtgcttccagtgaaatgc

SEQ ID NO: 372427 - DNA, 25 bp, Homo sapien
taagttgtataagtaatagtgcttc

SEQ ID NO: 372428 - DNA, 25 bp, Homo sapien
tagtgcttccagtgaaatgcccttc

SEQ ID NO: 372429 - DNA, 25 bp, Homo sapien
tataagtaatagtgcttccagtgaa

SEQ ID NO: 372430 - DNA, 25 bp, Homo sapien
cttctcaagctcaccacgggtcacc

SEQ ID NO: 372431 - DNA, 25 bp, Homo sapien
ttctcaagctcaccacgggtcacct

SEQ ID NO: 372432 - DNA, 25 bp, Homo sapien
tctcaagctcaccacgggtcacctc

SEQ ID NO: 372433 - DNA, 25 bp, Homo sapien
tcttctcaagctcaccacgggtcac

SEQ ID NO: 372434 - DNA, 25 bp, Homo sapien
ggtatttgctcatccagatactgcc

SEQ ID NO: 372435 - DNA, 25 bp, Homo sapien
tgaagttggctcttcaatgcacagc

SEQ ID NO: 372436 - DNA, 25 bp, Homo sapien
gcgtatccacataacaaaaggctgg

SEQ ID NO: 372437 - DNA, 25 bp, Homo sapien
aactgtagttgtgtaaagcgtatcc

SEQ ID NO: 372438 - DNA, 25 bp, Homo sapien
gaaaaaccagccagttgactcagtg

SEQ ID NO: 372439 - DNA, 25 bp, Homo sapien
gggaagaacttccacactggcagtg

SEQ ID NO: 372440 - DNA, 25 bp, Homo sapien
ggaagaacttccacactggcagtgc

SEQ ID NO: 372441 - DNA, 25 bp, Homo sapien
gaagaacttccacactggcagtgcc

SEQ ID NO: 372442 - DNA, 25 bp, Homo sapien
tgagagcagaggcaagtaagccctg

SEQ ID NO: 372443 - DNA, 25 bp, Homo sapien
tagcagcccacagagattgattttc

SEQ ID NO: 372444 - DNA, 25 bp, Homo sapien
gacgctagccccatcttaaccaagt

SEQ ID NO: 372445 - DNA, 25 bp, Homo sapien
aatgcctggtcattgggagctctcc

SEQ ID NO: 372446 - DNA, 25 bp, Homo sapien
cattagtttgcttttcaacagttcc

SEQ ID NO: 372447 - DNA, 25 bp, Homo sapien
ctgctcattagtttgcttttcaaca

SEQ ID NO: 372448 - DNA, 25 bp, Homo sapien
tgctcattagtttgcttttcaacag

SEQ ID NO: 372449 - DNA, 25 bp, Homo sapien
tagtttgcttttcaacagttcccat

SEQ ID NO: 372450 - DNA, 25 bp, Homo sapien
tgggagagtaaagctcaattaaaca

SEQ ID NO: 372451 - DNA, 25 bp, Homo sapien
cccttgggagagtaaagctcaatta

SEQ ID NO: 372452 - DNA, 25 bp, Homo sapien
ctttcccttgggagagtaaagctca

SEQ ID NO: 372453 - DNA, 25 bp, Homo sapien
gagagtaaagctcaattaaacacac

SEQ ID NO: 372454 - DNA, 25 bp, Homo sapien
cttagggccctcagataattgcatg

SEQ ID NO: 372455 - DNA, 25 bp, Homo sapien
cagactcgtatcattggtgccaaaa

SEQ ID NO: 372456 - DNA, 25 bp, Homo sapien
taattgcatggagctctggaatagc

SEQ ID NO: 372457 - DNA, 25 bp, Homo sapien
tggcccaatttactttttagcagac

SEQ ID NO: 372458 - DNA, 25 bp, Homo sapien
tctggatcaatataatggctttgga

SEQ ID NO: 372459 - DNA, 25 bp, Homo sapien
cctatgcaagttccaccggtttgct

SEQ ID NO: 372460 - DNA, 25 bp, Homo sapien
tggctttggatcaataaaacagctc

SEQ ID NO: 372461 - DNA, 25 bp, Homo sapien
ttagttggaagcgtactggataaac

SEQ ID NO: 372462 - DNA, 25 bp, Homo sapien
aagtaatgatagaaatgatgtcggg

SEQ ID NO: 372463 - DNA, 25 bp, Homo sapien
aaccttggagttgaattcttgaact

SEQ ID NO: 372464 - DNA, 25 bp, Homo sapien
gaaaaccttggagttgaattcttga

SEQ ID NO: 372465 - DNA, 25 bp, Homo sapien
tcctctaagaagtaatgatagaaat

SEQ ID NO: 372466 - DNA, 25 bp, Homo sapien
gtttcttctgggtctgtcaactttc

SEQ ID NO: 372467 - DNA, 25 bp, Homo sapien
cattgtgttgtgcaaaataggtttc

SEQ ID NO: 372468 - DNA, 25 bp, Homo sapien
caaaccattgtgttgtgcaaaatag

SEQ ID NO: 372469 - DNA, 25 bp, Homo sapien
ctgtcaactttctcatgtgggtagg

SEQ ID NO: 372470 - DNA, 25 bp, Homo sapien
tctttgccgactcttggcttctaat

SEQ ID NO: 372471 - DNA, 25 bp, Homo sapien
cttggcttctaattgtcctttctct

SEQ ID NO: 372472 - DNA, 25 bp, Homo sapien
tctttctttgccgactcttggcttc

SEQ ID NO: 372473 - DNA, 25 bp, Homo sapien
tttctttgccgactcttggcttcta

SEQ ID NO: 372474 - DNA, 25 bp, Homo sapien
caggcatgggaagtacaaagtccca

SEQ ID NO: 372475 - DNA, 25 bp, Homo sapien
ctactctaaagcgtccagagtcgca

SEQ ID NO: 372476 - DNA, 25 bp, Homo sapien
tctaaagcgtccagagtcgcaggca

SEQ ID NO: 372477 - DNA, 25 bp, Homo sapien
gagtcgcaggcatgggaagtacaaa

SEQ ID NO: 372478 - DNA, 25 bp, Homo sapien
taccattgccaagattgtgactcca

SEQ ID NO: 372479 - DNA, 25 bp, Homo sapien
tttcatcaacatgaaggtcaattac

SEQ ID NO: 372480 - DNA, 25 bp, Homo sapien
tagattatctgggtgccacgaatat

SEQ ID NO: 372481 - DNA, 25 bp, Homo sapien
gaatattcactgctccattgcataa

SEQ ID NO: 372482 - DNA, 25 bp, Homo sapien
tctggtaatcagattttttctcttt

SEQ ID NO: 372483 - DNA, 25 bp, Homo sapien
ttctggtaatcagattttttctctt

SEQ ID NO: 372484 - DNA, 25 bp, Homo sapien
ctggtaatcagattttttctcttta

SEQ ID NO: 372485 - DNA, 25 bp, Homo sapien
tttctggtaatcagattttttctct

SEQ ID NO: 372486 - DNA, 25 bp, Homo sapien
cctcatccacttcacattcccaagt

SEQ ID NO: 372487 - DNA, 25 bp, Homo sapien
tcatccacttcacattcccaagtac

SEQ ID NO: 372488 - DNA, 25 bp, Homo sapien
tccacttcacattcccaagtacgag

SEQ ID NO: 372489 - DNA, 25 bp, Homo sapien
ctttcctcatccacttcacattccc

SEQ ID NO: 372490 - DNA, 25 bp, Homo sapien
tccacccaaagtccaaatctcggag

SEQ ID NO: 372491 - DNA, 25 bp, Homo sapien
gagaggaatcttcatgactgcactc

SEQ ID NO: 372492 - DNA, 25 bp, Homo sapien
ggagtaatgtttatcacctcgccct

SEQ ID NO: 372493 - DNA, 25 bp, Homo sapien
tctaatggataaactacgtaagcag

SEQ ID NO: 372494 - DNA, 25 bp, Homo sapien
aagtgtttcacttgcaaatctttgt

SEQ ID NO: 372495 - DNA, 25 bp, Homo sapien
ttaggttctagatgacgtggattct

SEQ ID NO: 372496 - DNA, 25 bp, Homo sapien
gatgacgtggattctatttccctca

SEQ ID NO: 372497 - DNA, 25 bp, Homo sapien
ttctatttccctcaagtgtttcact

SEQ ID NO: 372498 - DNA, 25 bp, Homo sapien
gcacctggcagaatggattagcata

SEQ ID NO: 372499 - DNA, 25 bp, Homo sapien
catgattgaaattactgagtctgtg

SEQ ID NO: 372500 - DNA, 25 bp, Homo sapien
atttgagattacatgtgcaaaatgc

SEQ ID NO: 372501 - DNA, 25 bp, Homo sapien
ataataacaatggaacgcattctgt

SEQ ID NO: 372502 - DNA, 25 bp, Homo sapien
gtgtcaccactcgagtccctgaact

SEQ ID NO: 372503 - DNA, 25 bp, Homo sapien
gccaactctacaacccaggataaat

SEQ ID NO: 372504 - DNA, 25 bp, Homo sapien
caggataaatggtgtcaccactcga

SEQ ID NO: 372505 - DNA, 25 bp, Homo sapien
aaagacgtgccatgaggagccaact

SEQ ID NO: 372506 - DNA, 25 bp, Homo sapien
ctctaacaccggctgattcattgat

SEQ ID NO: 372507 - DNA, 25 bp, Homo sapien
taacaccggctgattcattgatgtc

SEQ ID NO: 372508 - DNA, 25 bp, Homo sapien
caccggctgattcattgatgtcaca

SEQ ID NO: 372509 - DNA, 25 bp, Homo sapien
aacaccggctgattcattgatgtca

SEQ ID NO: 372510 - DNA, 25 bp, Homo sapien
gcagctgacaaccattacagctgga

SEQ ID NO: 372511 - DNA, 25 bp, Homo sapien
tgacaaccattacagctggatttag

SEQ ID NO: 372512 - DNA, 25 bp, Homo sapien
taaagcagctgacaaccattacagc

SEQ ID NO: 372513 - DNA, 25 bp, Homo sapien
cttaaagcagctgacaaccattaca

SEQ ID NO: 372514 - DNA, 25 bp, Homo sapien
cttcaaagggtgaagcaatcacagt

SEQ ID NO: 372515 - DNA, 25 bp, Homo sapien
ttcaaagggtgaagcaatcacagta

SEQ ID NO: 372516 - DNA, 25 bp, Homo sapien
tatgtttatcatcgagtttaccttc

SEQ ID NO: 372517 - DNA, 25 bp, Homo sapien
gaatcttttatgtttatcatcgagt

SEQ ID NO: 372518 - DNA, 25 bp, Homo sapien
tattatgttatgctatcttgtcaaa

SEQ ID NO: 372519 - DNA, 25 bp, Homo sapien
ggaggaatttctactcaaatttaca

SEQ ID NO: 372520 - DNA, 25 bp, Homo sapien
ggatatacaagaaggcttacacaca

SEQ ID NO: 372521 - DNA, 25 bp, Homo sapien
gtcaaaatatgtggattagacaaaa

SEQ ID NO: 372522 - DNA, 25 bp, Homo sapien
gctagagctgtaaaaaacactgacc

SEQ ID NO: 372523 - DNA, 25 bp, Homo sapien
atcagccgcgggtctgcgatgacaa

SEQ ID NO: 372524 - DNA, 25 bp, Homo sapien
aaacagagctcccatgcgattggag

SEQ ID NO: 372525 - DNA, 25 bp, Homo sapien
gcgatgacaaccatcagcagtggtg

SEQ ID NO: 372526 - DNA, 25 bp, Homo sapien
tatgcgaggtgttttctcgggactt

SEQ ID NO: 372527 - DNA, 25 bp, Homo sapien
cttctaattctctgcgttatatttc

SEQ ID NO: 372528 - DNA, 25 bp, Homo sapien
cttccaaaatatcatgtaagcttct

SEQ ID NO: 372529 - DNA, 25 bp, Homo sapien
ttgagataatatgcgaggtgttttc

SEQ ID NO: 372530 - DNA, 25 bp, Homo sapien
gcattttctagactcgcattgtgga

SEQ ID NO: 372531 - DNA, 25 bp, Homo sapien
ttctagactcgcattgtggacatga

SEQ ID NO: 372532 - DNA, 25 bp, Homo sapien
tgagcattttctagactcgcattgt

SEQ ID NO: 372533 - DNA, 25 bp, Homo sapien
cattttctagactcgcattgtggac

SEQ ID NO: 372534 - DNA, 25 bp, Homo sapien
gaatgcacacttggtactcaactcg

SEQ ID NO: 372535 - DNA, 25 bp, Homo sapien
tcttaactttcggtagaatgcacac

SEQ ID NO: 372536 - DNA, 25 bp, Homo sapien
tagttgccaactgtgaccttctcat

SEQ ID NO: 372537 - DNA, 25 bp, Homo sapien
tcaactcgccgatgctggttctgtg

SEQ ID NO: 372538 - DNA, 25 bp, Homo sapien
gggcaaataactgctcacttcgctc

SEQ ID NO: 372539 - DNA, 25 bp, Homo sapien
gctcagaaattatgcaataactgcc

SEQ ID NO: 372540 - DNA, 25 bp, Homo sapien
gggatattacacttttcttcaccaa

SEQ ID NO: 372541 - DNA, 25 bp, Homo sapien
tctttcatggctacttcatggtccc

SEQ ID NO: 372542 - DNA, 25 bp, Homo sapien
tctcctgcaagagcggttaagaggc

SEQ ID NO: 372543 - DNA, 25 bp, Homo sapien
aacgctgacgatgggtcctttcatc

SEQ ID NO: 372544 - DNA, 25 bp, Homo sapien
ggttaccgcgacctgcaaacgctga

SEQ ID NO: 372545 - DNA, 25 bp, Homo sapien
gttaagaggcagaatcaccggcccg

SEQ ID NO: 372546 - DNA, 25 bp, Homo sapien
taaattgaagtgagggagccgtggc

SEQ ID NO: 372547 - DNA, 25 bp, Homo sapien
cgcgtgtgcgagtgtaaattgaagt

SEQ ID NO: 372548 - DNA, 25 bp, Homo sapien
tctctgctccttaagattggggctt

SEQ ID NO: 372549 - DNA, 25 bp, Homo sapien
gagccgtggcaaacgcccggaacta

SEQ ID NO: 372550 - DNA, 25 bp, Homo sapien
gcgggctctgccctcggtcccagtg

SEQ ID NO: 372551 - DNA, 25 bp, Homo sapien
tccccgccaggagtgcaccgaggga

SEQ ID NO: 372552 - DNA, 25 bp, Homo sapien
ggtcccagtgcgctgcactggccag

SEQ ID NO: 372553 - DNA, 25 bp, Homo sapien
actggccagatccccgccaggagtg

SEQ ID NO: 372554 - DNA, 25 bp, Homo sapien
cggccatccgcaggttcatgcacgc

SEQ ID NO: 372555 - DNA, 25 bp, Homo sapien
cgcggtcccgggattcgtccgcagt

SEQ ID NO: 372556 - DNA, 25 bp, Homo sapien
tcgtccgcagtggagctcgaagtca

SEQ ID NO: 372557 - DNA, 25 bp, Homo sapien
gagctcgaagtcacgggttcggtcc

SEQ ID NO: 372558 - DNA, 25 bp, Homo sapien
ggggaggtgcggccgaggcgtatcc

SEQ ID NO: 372559 - DNA, 25 bp, Homo sapien
gcgcggcgaggggaggtgcggccga

SEQ ID NO: 372560 - DNA, 25 bp, Homo sapien
gcgaggggaggtgcggccgaggcgt

SEQ ID NO: 372561 - DNA, 25 bp, Homo sapien
cggcgaggggaggtgcggccgaggc

SEQ ID NO: 372562 - DNA, 25 bp, Homo sapien
tcctcgcaaagtgactgcaagctcc

SEQ ID NO: 372563 - DNA, 25 bp, Homo sapien
cctcctcgcaaagtgactgcaagct

SEQ ID NO: 372564 - DNA, 25 bp, Homo sapien
gctcctcctcgcaaagtgactgcaa

SEQ ID NO: 372565 - DNA, 25 bp, Homo sapien
tcctcctcgcaaagtgactgcaagc

SEQ ID NO: 372566 - DNA, 25 bp, Homo sapien
gacgtgacaccggtggacagtttca

SEQ ID NO: 372567 - DNA, 25 bp, Homo sapien
caccggtggacagtttcaaagttat

SEQ ID NO: 372568 - DNA, 25 bp, Homo sapien
tgacaccggtggacagtttcaaagt

SEQ ID NO: 372569 - DNA, 25 bp, Homo sapien
gttcaggacgtgacaccggtggaca

SEQ ID NO: 372570 - DNA, 25 bp, Homo sapien
gctactgacaagcaaccccagcagg

SEQ ID NO: 372571 - DNA, 25 bp, Homo sapien
actgacaagcaaccccagcaggtag

SEQ ID NO: 372572 - DNA, 25 bp, Homo sapien
tgacaagcaaccccagcaggtagaa

SEQ ID NO: 372573 - DNA, 25 bp, Homo sapien
tactgacaagcaaccccagcaggta

SEQ ID NO: 372574 - DNA, 25 bp, Homo sapien
ttctcttatttaagggtctccacac

SEQ ID NO: 372575 - DNA, 25 bp, Homo sapien
cacaacagatacaattttagggaca

SEQ ID NO: 372576 - DNA, 25 bp, Homo sapien
ctccacacaacagatacaattttag

SEQ ID NO: 372577 - DNA, 25 bp, Homo sapien
ccacacaacagatacaattttaggg

SEQ ID NO: 372578 - DNA, 25 bp, Homo sapien
caatcgtgtttcatccgccactaac

SEQ ID NO: 372579 - DNA, 25 bp, Homo sapien
gtttcatccgccactaacactatag

SEQ ID NO: 372580 - DNA, 25 bp, Homo sapien
tacaaactataggaatatccaacat

SEQ ID NO: 372581 - DNA, 25 bp, Homo sapien
aatctgcatccaatcgtgtttcatc

SEQ ID NO: 372582 - DNA, 25 bp, Homo sapien
caacttggctggtagaagacaactc

SEQ ID NO: 372583 - DNA, 25 bp, Homo sapien
gacacgtcatttgattggccagtca

SEQ ID NO: 372584 - DNA, 25 bp, Homo sapien
tgagatcacacatacgaagcgcata

SEQ ID NO: 372585 - DNA, 25 bp, Homo sapien
cagtcatgtacttcgagggaggcag

SEQ ID NO: 372586 - DNA, 25 bp, Homo sapien
gtgcccagaacatagcctgttcaca

SEQ ID NO: 372587 - DNA, 25 bp, Homo sapien
tgttcacaaagcaagttaatagcct

SEQ ID NO: 372588 - DNA, 25 bp, Homo sapien
ttaaagaagctcaagcataacagct

SEQ ID NO: 372589 - DNA, 25 bp, Homo sapien
gcagatataggtattaaagaagctc

SEQ ID NO: 372590 - DNA, 25 bp, Homo sapien
ccgtgcttcgatatataacttgcct

SEQ ID NO: 372591 - DNA, 25 bp, Homo sapien
tttggtcgaggcatgcacccggatt

SEQ ID NO: 372592 - DNA, 25 bp, Homo sapien
tagtgagtctgcataatcgcccgtg

SEQ ID NO: 372593 - DNA, 25 bp, Homo sapien
taatcgcccgtgcttcgatatataa

SEQ ID NO: 372594 - DNA, 25 bp, Homo sapien
accaaccacgtgatgtgaattctga

SEQ ID NO: 372595 - DNA, 25 bp, Homo sapien
tccaaccattcagccagaatacttc

SEQ ID NO: 372596 - DNA, 25 bp, Homo sapien
tacttcaatgaccaaccacgtgatg

SEQ ID NO: 372597 - DNA, 25 bp, Homo sapien
tgtgctggcaggaatccatttagca

SEQ ID NO: 372598 - DNA, 25 bp, Homo sapien
taacacaggttatgggaggaactcc

SEQ ID NO: 372599 - DNA, 25 bp, Homo sapien
tacagacactgcacaaagtggaggc

SEQ ID NO: 372600 - DNA, 25 bp, Homo sapien
tggaggcacaaccaaggtctacagg

SEQ ID NO: 372601 - DNA, 25 bp, Homo sapien
ggtatcactagagctcgaatcagga

SEQ ID NO: 372602 - DNA, 25 bp, Homo sapien
gtgttgtaattctctgtgggaccca

SEQ ID NO: 372603 - DNA, 25 bp, Homo sapien
taaccaccacagaaagatttgaggg

SEQ ID NO: 372604 - DNA, 25 bp, Homo sapien
gggaagtctactaggccacagtgag

SEQ ID NO: 372605 - DNA, 25 bp, Homo sapien
ttgcaacaagcatggacggtactct

SEQ ID NO: 372606 - DNA, 25 bp, Homo sapien
caactttcaatggagtaaaacagcc

SEQ ID NO: 372607 - DNA, 25 bp, Homo sapien
ccatgttcttatttaggtataaagc

SEQ ID NO: 372608 - DNA, 25 bp, Homo sapien
gtctttcagactatgaccatatatg

SEQ ID NO: 372609 - DNA, 25 bp, Homo sapien
aaacagccagtttggatttttgtgc

SEQ ID NO: 372610 - DNA, 25 bp, Homo sapien
ccttaggaagcttataaccttggtg

SEQ ID NO: 372611 - DNA, 25 bp, Homo sapien
gcggccttcgtattcctcacacaga

SEQ ID NO: 372612 - DNA, 25 bp, Homo sapien
gaatgataggtactagacgctggga

SEQ ID NO: 372613 - DNA, 25 bp, Homo sapien
aaacttgatctcatgaaggtagacc

SEQ ID NO: 372614 - DNA, 25 bp, Homo sapien
acataatttgataacatcatctaac

SEQ ID NO: 372615 - DNA, 25 bp, Homo sapien
cactctcctgtcacgcctaccgagt

SEQ ID NO: 372616 - DNA, 25 bp, Homo sapien
aacataatttgataacatcatctaa

SEQ ID NO: 372617 - DNA, 25 bp, Homo sapien
gagctagtatttgagtatgtaagga

SEQ ID NO: 372618 - DNA, 25 bp, Homo sapien
tacaaccttaacattttacgctgat

SEQ ID NO: 372619 - DNA, 25 bp, Homo sapien
taaggagtatatcttcatgtactaa

SEQ ID NO: 372620 - DNA, 25 bp, Homo sapien
ctgttagaccacaggagtacgttag

SEQ ID NO: 372621 - DNA, 25 bp, Homo sapien
tagatcttaaagtgcatcatttcag

SEQ ID NO: 372622 - DNA, 25 bp, Homo sapien
gaataaatatgactccctgattcca

SEQ ID NO: 372623 - DNA, 25 bp, Homo sapien
gatgaatgggcaatattaccaatgt

SEQ ID NO: 372624 - DNA, 25 bp, Homo sapien
tattgctagcaaaatgaggtacctt

SEQ ID NO: 372625 - DNA, 25 bp, Homo sapien
agtgaccccaacagataaatgtgaa

SEQ ID NO: 372626 - DNA, 25 bp, Homo sapien
gtagacaatattcaaagtgacccca

SEQ ID NO: 372627 - DNA, 25 bp, Homo sapien
caagtgggtcccagtatttcgaact

SEQ ID NO: 372628 - DNA, 25 bp, Homo sapien
cccagagttactgggcattagtgat

SEQ ID NO: 372629 - DNA, 25 bp, Homo sapien
ggtgggaaaggctatttgaatatcc

SEQ ID NO: 372630 - DNA, 25 bp, Homo sapien
caacaggatgtaggttactaccaat

SEQ ID NO: 372631 - DNA, 25 bp, Homo sapien
gggaaaggctatttgaatatccata

SEQ ID NO: 372632 - DNA, 25 bp, Homo sapien
caattcatcaacagaggtgggaaag

SEQ ID NO: 372633 - DNA, 25 bp, Homo sapien
ccacctgccaaacccgactcccata

SEQ ID NO: 372634 - DNA, 25 bp, Homo sapien
tgccaaacccgactcccataatgaa

SEQ ID NO: 372635 - DNA, 25 bp, Homo sapien
acccgactcccataatgaaatccag

SEQ ID NO: 372636 - DNA, 25 bp, Homo sapien
ccaaacccgactcccataatgaaat

SEQ ID NO: 372637 - DNA, 25 bp, Homo sapien
tattcaatgttgcactaaagccaag

SEQ ID NO: 372638 - DNA, 25 bp, Homo sapien
tcctcctaggatgaagaacacggca

SEQ ID NO: 372639 - DNA, 25 bp, Homo sapien
gaacacggcaaatacatctgtcctc

SEQ ID NO: 372640 - DNA, 25 bp, Homo sapien
tcaaatcagctttgttgcaggacaa

SEQ ID NO: 372641 - DNA, 25 bp, Homo sapien
gaaactcagtagcttcccgacaaga

SEQ ID NO: 372642 - DNA, 25 bp, Homo sapien
accagggtgaagtaacgcaagatcc

SEQ ID NO: 372643 - DNA, 25 bp, Homo sapien
cattcagccggtaagggaagaacgc

SEQ ID NO: 372644 - DNA, 25 bp, Homo sapien
gagctcacggatagtcacaacagaa

SEQ ID NO: 372645 - DNA, 25 bp, Homo sapien
gctatgtaggccttttcctgaagca

SEQ ID NO: 372646 - DNA, 25 bp, Homo sapien
ctatgtaggccttttcctgaagcaa

SEQ ID NO: 372647 - DNA, 25 bp, Homo sapien
ctttgctgtttttggctatgtaggc

SEQ ID NO: 372648 - DNA, 25 bp, Homo sapien
tgtttttggctatgtaggccttttc

SEQ ID NO: 372649 - DNA, 25 bp, Homo sapien
caaagatatgccttatcttggcctt

SEQ ID NO: 372650 - DNA, 25 bp, Homo sapien
tccccgtttctacacggcatcatgt

SEQ ID NO: 372651 - DNA, 25 bp, Homo sapien
gacattcatatagctcctttacagg

SEQ ID NO: 372652 - DNA, 25 bp, Homo sapien
cattaccagcatccacaaagatatg

SEQ ID NO: 372653 - DNA, 25 bp, Homo sapien
attttgtccaatagtgcaccgttaa

SEQ ID NO: 372654 - DNA, 25 bp, Homo sapien
gcctcttgacggacattcttaaatg

SEQ ID NO: 372655 - DNA, 25 bp, Homo sapien
aatagtgcaccgttaagtgcttaga

SEQ ID NO: 372656 - DNA, 25 bp, Homo sapien
cgttaagtgcttagatataaaacat

SEQ ID NO: 372657 - DNA, 25 bp, Homo sapien
ctcagagaagcggacctgaagccct

SEQ ID NO: 372658 - DNA, 25 bp, Homo sapien
taaccattaggaccaagatggacct

SEQ ID NO: 372659 - DNA, 25 bp, Homo sapien
tgaagccctgaactctagtcctacc

SEQ ID NO: 372660 - DNA, 25 bp, Homo sapien
gacaattaatgcagggacattccat

SEQ ID NO: 372661 - DNA, 25 bp, Homo sapien
cacaggcagcagatcgatccatggg

SEQ ID NO: 372662 - DNA, 25 bp, Homo sapien
tgtagatctagagccttcggctgtg

SEQ ID NO: 372663 - DNA, 25 bp, Homo sapien
gatccatgggccacttcaacggcat

SEQ ID NO: 372664 - DNA, 25 bp, Homo sapien
tatacccaatcgtaacacaggcagc

SEQ ID NO: 372665 - DNA, 25 bp, Homo sapien
gaactggtcagtgcaatttgccata

SEQ ID NO: 372666 - DNA, 25 bp, Homo sapien
caatatgtaccagtgagatctcaac

SEQ ID NO: 372667 - DNA, 25 bp, Homo sapien
tatgggcatgtgacttacagtggct

SEQ ID NO: 372668 - DNA, 25 bp, Homo sapien
ttccagatcagggtcgaggcagcaa

SEQ ID NO: 372669 - DNA, 25 bp, Homo sapien
ggctctttaactcctatagacaaaa

SEQ ID NO: 372670 - DNA, 25 bp, Homo sapien
gacaaaaaccaatcctacaaagcca

SEQ ID NO: 372671 - DNA, 25 bp, Homo sapien
gtagatattcagagtttaatggacc

SEQ ID NO: 372672 - DNA, 25 bp, Homo sapien
gttgtgatcactgcaccaccgcatt

SEQ ID NO: 372673 - DNA, 25 bp, Homo sapien
gtttctgcacactgtaagccttctt

SEQ ID NO: 372674 - DNA, 25 bp, Homo sapien
tgcacactgtaagccttcttagagt

SEQ ID NO: 372675 - DNA, 25 bp, Homo sapien
ttctctgttgtttctgcacactgta

SEQ ID NO: 372676 - DNA, 25 bp, Homo sapien
tcttagagtaactgctacactctgg

SEQ ID NO: 372677 - DNA, 25 bp, Homo sapien
tatgagttccggagtagaaggcaaa

SEQ ID NO: 372678 - DNA, 25 bp, Homo sapien
gaagtagaaggcagcggtaccagct

SEQ ID NO: 372679 - DNA, 25 bp, Homo sapien
tatcagttccggagtagaaggcagc

SEQ ID NO: 372680 - DNA, 25 bp, Homo sapien
tacggactaagaactgcggaggcag

SEQ ID NO: 372681 - DNA, 25 bp, Homo sapien
tcttttctaatggaaccactatgaa

SEQ ID NO: 372682 - DNA, 25 bp, Homo sapien
ccactcatgtttcaagaataatcaa

SEQ ID NO: 372683 - DNA, 25 bp, Homo sapien
tttgtaactcagagtatcctacaca

SEQ ID NO: 372684 - DNA, 25 bp, Homo sapien
gtagcagaaagcatttccatgtacc

SEQ ID NO: 372685 - DNA, 25 bp, Homo sapien
tccttttaaacttcacctgtcatgg

SEQ ID NO: 372686 - DNA, 25 bp, Homo sapien
tataagagggaacacattacaaagt

SEQ ID NO: 372687 - DNA, 25 bp, Homo sapien
gctgcaaatataggcagctgctctt

SEQ ID NO: 372688 - DNA, 25 bp, Homo sapien
tgtcatggttcaagcagaaactgtg

SEQ ID NO: 372689 - DNA, 25 bp, Homo sapien
tattcaagtaaaacagtgtgaatgt

SEQ ID NO: 372690 - DNA, 25 bp, Homo sapien
aatcttaagggaccatatttgtata

SEQ ID NO: 372691 - DNA, 25 bp, Homo sapien
ttaagggaccatatttgtatatgtg

SEQ ID NO: 372692 - DNA, 25 bp, Homo sapien
attcaagtaaaacagtgtgaatgtg

SEQ ID NO: 372693 - DNA, 25 bp, Homo sapien
tatagttaacaccaatagcatgtgg

SEQ ID NO: 372694 - DNA, 25 bp, Homo sapien
cgggtatactcgactttgtactgct

SEQ ID NO: 372695 - DNA, 25 bp, Homo sapien
tagctgacactacgaggatgacttc

SEQ ID NO: 372696 - DNA, 25 bp, Homo sapien
cataaaagaagacaacagctgttgg

SEQ ID NO: 372697 - DNA, 25 bp, Homo sapien
tctggcagtccagcgttcagttgac

SEQ ID NO: 372698 - DNA, 25 bp, Homo sapien
ttcagggaggccatttgggactgtc

SEQ ID NO: 372699 - DNA, 25 bp, Homo sapien
tgatctcccagatggcaagtggcac

SEQ ID NO: 372700 - DNA, 25 bp, Homo sapien
caagtggcaccaacagtcaggcatt

SEQ ID NO: 372701 - DNA, 25 bp, Homo sapien
ttgggtaagcatgataacaaattag

SEQ ID NO: 372702 - DNA, 25 bp, Homo sapien
caagcatgcaacaaggttttggtaa

SEQ ID NO: 372703 - DNA, 25 bp, Homo sapien
ggttttggtaattgggtaagcatga

SEQ ID NO: 372704 - DNA, 25 bp, Homo sapien
tttaatttttgacaacgcacacgac

SEQ ID NO: 372705 - DNA, 25 bp, Homo sapien
gaactgagtaaggaatgaagaagct

SEQ ID NO: 372706 - DNA, 25 bp, Homo sapien
tgaaggactaaaggaacggtcacaa

SEQ ID NO: 372707 - DNA, 25 bp, Homo sapien
ggaaagggtctaattgatgagcagc

SEQ ID NO: 372708 - DNA, 25 bp, Homo sapien
gagattacatcctatgggacaggga

SEQ ID NO: 372709 - DNA, 25 bp, Homo sapien
caaacgcctgtctcatatggttgta

SEQ ID NO: 372710 - DNA, 25 bp, Homo sapien
tcatagacactatccacggtggctc

SEQ ID NO: 372711 - DNA, 25 bp, Homo sapien
gattttgcttagatgtcacacctga

SEQ ID NO: 372712 - DNA, 25 bp, Homo sapien
tattcagttatgtgggagccatcac

SEQ ID NO: 372713 - DNA, 25 bp, Homo sapien
tgtagtggtcagcattcaatcccat

SEQ ID NO: 372714 - DNA, 25 bp, Homo sapien
aaatgtgggatcatgaagttggtcg

SEQ ID NO: 372715 - DNA, 25 bp, Homo sapien
ccttggcaggtgaagtcactagcat

SEQ ID NO: 372716 - DNA, 25 bp, Homo sapien
tatagaaactaattccctggttgta

SEQ ID NO: 372717 - DNA, 25 bp, Homo sapien
tatgagtcatgcgacttctgagaac

SEQ ID NO: 372718 - DNA, 25 bp, Homo sapien
cacgcagcgtttcctggtatgaagg

SEQ ID NO: 372719 - DNA, 25 bp, Homo sapien
tctgtcagctgagttagtcccatct

SEQ ID NO: 372720 - DNA, 25 bp, Homo sapien
gatgtgttgtgacccatgcaagtcc

SEQ ID NO: 372721 - DNA, 25 bp, Homo sapien
ttgatggacccacttccatgactag

SEQ ID NO: 372722 - DNA, 25 bp, Homo sapien
gttgatggacccacttccatgacta

SEQ ID NO: 372723 - DNA, 25 bp, Homo sapien
gatggacccacttccatgactagct

SEQ ID NO: 372724 - DNA, 25 bp, Homo sapien
tgatggacccacttccatgactagc

SEQ ID NO: 372725 - DNA, 25 bp, Homo sapien
ccttcttcaagataaagtgcttcgt

SEQ ID NO: 372726 - DNA, 25 bp, Homo sapien
taaacttgtcctcctgaatcagatc

SEQ ID NO: 372727 - DNA, 25 bp, Homo sapien
cctgtaataagtctctggttgccct

SEQ ID NO: 372728 - DNA, 25 bp, Homo sapien
gagaccttgcctgttgtgataatca

SEQ ID NO: 372729 - DNA, 25 bp, Homo sapien
tcaaggcaagtcgactatgatctca

SEQ ID NO: 372730 - DNA, 25 bp, Homo sapien
caaggcaagtcgactatgatctcat

SEQ ID NO: 372731 - DNA, 25 bp, Homo sapien
atgatctcatcagggcagttggctt

SEQ ID NO: 372732 - DNA, 25 bp, Homo sapien
atctcatcagggcagttggctttct

SEQ ID NO: 372733 - DNA, 25 bp, Homo sapien
taaggagcagaagtctaacgttagc

SEQ ID NO: 372734 - DNA, 25 bp, Homo sapien
tattagggaaagcatgaagactcca

SEQ ID NO: 372735 - DNA, 25 bp, Homo sapien
caaccatgtgcctccagaaatagga

SEQ ID NO: 372736 - DNA, 25 bp, Homo sapien
tactctactaaatgggatgcctgac

SEQ ID NO: 372737 - DNA, 25 bp, Homo sapien
tatctagaggttacaaatgcttcca

SEQ ID NO: 372738 - DNA, 25 bp, Homo sapien
cgccatgtgattgaagccttcatca

SEQ ID NO: 372739 - DNA, 25 bp, Homo sapien
ggaattgctctgagaagattacgcc

SEQ ID NO: 372740 - DNA, 25 bp, Homo sapien
catttagtccaattgtatctagagg

SEQ ID NO: 372741 - DNA, 25 bp, Homo sapien
caaggtttcctagactgcttgccat

SEQ ID NO: 372742 - DNA, 25 bp, Homo sapien
gaataagccctttacaacctggcag

SEQ ID NO: 372743 - DNA, 25 bp, Homo sapien
gactgcttgccattagacccctctt

SEQ ID NO: 372744 - DNA, 25 bp, Homo sapien
catgaatggagttggcaaggtttcc

SEQ ID NO: 372745 - DNA, 25 bp, Homo sapien
cactttcacagtaataattttagga

SEQ ID NO: 372746 - DNA, 25 bp, Homo sapien
gactctatctaaagcaaacactggt

SEQ ID NO: 372747 - DNA, 25 bp, Homo sapien
tcatacctttaaacgtaatactgta

SEQ ID NO: 372748 - DNA, 25 bp, Homo sapien
tatagggtagctatatttcactttc

SEQ ID NO: 372749 - DNA, 25 bp, Homo sapien
gctagccatctatcacctttgttta

SEQ ID NO: 372750 - DNA, 25 bp, Homo sapien
gaatctgtctggtcgtgggcttcct

SEQ ID NO: 372751 - DNA, 25 bp, Homo sapien
tcaataagattagtactagctctgc

SEQ ID NO: 372752 - DNA, 25 bp, Homo sapien
tctaaggttcctagtttgtatgcat

SEQ ID NO: 372753 - DNA, 25 bp, Homo sapien
cacagcagccacgagtgggatggaa

SEQ ID NO: 372754 - DNA, 25 bp, Homo sapien
cttgaggtgcacagcagccacgagt

SEQ ID NO: 372755 - DNA, 25 bp, Homo sapien
agcagccacgagtgggatggaacat

SEQ ID NO: 372756 - DNA, 25 bp, Homo sapien
ttgaggtgcacagcagccacgagtg

SEQ ID NO: 372757 - DNA, 25 bp, Homo sapien
tcagcattgatttggactatggcag

SEQ ID NO: 372758 - DNA, 25 bp, Homo sapien
tctgcaaaattgagtcaggtcaggt

SEQ ID NO: 372759 - DNA, 25 bp, Homo sapien
tggttaccagtccaacactagtgac

SEQ ID NO: 372760 - DNA, 25 bp, Homo sapien
ttgctactcagaaagtggttaccag

SEQ ID NO: 372761 - DNA, 25 bp, Homo sapien
tatctgtactcaaacctctttgatc

SEQ ID NO: 372762 - DNA, 25 bp, Homo sapien
atctgtactcaaacctctttgatct

SEQ ID NO: 372763 - DNA, 25 bp, Homo sapien
tctgtactcaaacctctttgatctt

SEQ ID NO: 372764 - DNA, 25 bp, Homo sapien
cttccacgtgctcaaatgcacgtac

SEQ ID NO: 372765 - DNA, 25 bp, Homo sapien
caaatgcacgtacttgagcttttgg

SEQ ID NO: 372766 - DNA, 25 bp, Homo sapien
cgtgctcaaatgcacgtacttgagc

SEQ ID NO: 372767 - DNA, 25 bp, Homo sapien
gcacgtacttgagcttttggtaaag

SEQ ID NO: 372768 - DNA, 25 bp, Homo sapien
gtgaagaatttagattctccaacac

SEQ ID NO: 372769 - DNA, 25 bp, Homo sapien
tttgctaagtgaaattgtcacttga

SEQ ID NO: 372770 - DNA, 25 bp, Homo sapien
agtgaaattgtcacttgaagaagag

SEQ ID NO: 372771 - DNA, 25 bp, Homo sapien
agaatttagattctccaacactaag

SEQ ID NO: 372772 - DNA, 25 bp, Homo sapien
gcattgtagatggttaaccgtgacc

SEQ ID NO: 372773 - DNA, 25 bp, Homo sapien
tactaccctctgtgttgaaattatc

SEQ ID NO: 372774 - DNA, 25 bp, Homo sapien
tgcttgacaacgatatatccctgca

SEQ ID NO: 372775 - DNA, 25 bp, Homo sapien
tcctttggcatctgttgcttgacaa

SEQ ID NO: 372776 - DNA, 25 bp, Homo sapien
gtttgaattcttgtggagataccac

SEQ ID NO: 372777 - DNA, 25 bp, Homo sapien
gcaggtgaactgctaactcggcaaa

SEQ ID NO: 372778 - DNA, 25 bp, Homo sapien
tgtcggaaatagtggtgacttcctc

SEQ ID NO: 372779 - DNA, 25 bp, Homo sapien
ttatgatacaaccagctgacagcag

SEQ ID NO: 372780 - DNA, 25 bp, Homo sapien
ggaaactgacaagcattgaacatgc

SEQ ID NO: 372781 - DNA, 25 bp, Homo sapien
aattattttgtacctctctgctgtg

SEQ ID NO: 372782 - DNA, 25 bp, Homo sapien
gaaaatgctccctatgaacatggta

SEQ ID NO: 372783 - DNA, 25 bp, Homo sapien
tgtagaatcttcatcccttggacac

SEQ ID NO: 372784 - DNA, 25 bp, Homo sapien
atgatatcacggaagtcaatttctc

SEQ ID NO: 372785 - DNA, 25 bp, Homo sapien
cggaagtcaatttctcccctggcct

SEQ ID NO: 372786 - DNA, 25 bp, Homo sapien
tcacggaagtcaatttctcccctgg

SEQ ID NO: 372787 - DNA, 25 bp, Homo sapien
tctgtatataccttcatcactttta

SEQ ID NO: 372788 - DNA, 25 bp, Homo sapien
cattgctaaaatgaatccataaaac

SEQ ID NO: 372789 - DNA, 25 bp, Homo sapien
tgaatccataaaacatgtacaaatt

SEQ ID NO: 372790 - DNA, 25 bp, Homo sapien
taaaatgaatccataaaacatgtac

SEQ ID NO: 372791 - DNA, 25 bp, Homo sapien
catgtacaaattatttactgcttac

SEQ ID NO: 372792 - DNA, 25 bp, Homo sapien
cacacttatttttgtgcacactgta

SEQ ID NO: 372793 - DNA, 25 bp, Homo sapien
gaacataagcagtatcatctaccat

SEQ ID NO: 372794 - DNA, 25 bp, Homo sapien
aatctctaaattcagcacacttatt

SEQ ID NO: 372795 - DNA, 25 bp, Homo sapien
gtctcttgcaacctcataatctcta

SEQ ID NO: 372796 - DNA, 25 bp, Homo sapien
tctctgaagtcttgacggcacctgt

SEQ ID NO: 372797 - DNA, 25 bp, Homo sapien
tatgtccatgggcattcaatgtgag

SEQ ID NO: 372798 - DNA, 25 bp, Homo sapien
tgaggatgaaagctgcacacctata

SEQ ID NO: 372799 - DNA, 25 bp, Homo sapien
taggattacggcctacagttgcatc

SEQ ID NO: 372800 - DNA, 25 bp, Homo sapien
ccttcactaccatcatttagagaat

SEQ ID NO: 372801 - DNA, 25 bp, Homo sapien
atacagaataaatagagacgaaaac

SEQ ID NO: 372802 - DNA, 25 bp, Homo sapien
aacaccttcactaccatcatttaga

SEQ ID NO: 372803 - DNA, 25 bp, Homo sapien
cagaataaatagagacgaaaacacc

SEQ ID NO: 372804 - DNA, 25 bp, Homo sapien
tgaaccaggagatggcgggttctgg

SEQ ID NO: 372805 - DNA, 25 bp, Homo sapien
tgaggcattgagattgctggcggca

SEQ ID NO: 372806 - DNA, 25 bp, Homo sapien
gaaccaggagatggcgggttctgga

SEQ ID NO: 372807 - DNA, 25 bp, Homo sapien
cttggaggaaagcttgcttttcatc

SEQ ID NO: 372808 - DNA, 25 bp, Homo sapien
cctgcagacataaggaccaccatca

SEQ ID NO: 372809 - DNA, 25 bp, Homo sapien
gacttggaggaaagcttgcttttca

SEQ ID NO: 372810 - DNA, 25 bp, Homo sapien
accatcactattgattatgttcctg

SEQ ID NO: 372811 - DNA, 25 bp, Homo sapien
ttcagtgaacgtgaagccatccaca

SEQ ID NO: 372812 - DNA, 25 bp, Homo sapien
cgagtgtgacttgaccattctcata

SEQ ID NO: 372813 - DNA, 25 bp, Homo sapien
cccttccgcatcacatacgagtgtg

SEQ ID NO: 372814 - DNA, 25 bp, Homo sapien
ttctggaataggctccccttccgca

SEQ ID NO: 372815 - DNA, 25 bp, Homo sapien
tgataaagtctaagggcatgaaagt

SEQ ID NO: 372816 - DNA, 25 bp, Homo sapien
tggcaactgtgtcatagtaacatac

SEQ ID NO: 372817 - DNA, 25 bp, Homo sapien
caatcctctatggtttcagatacga

SEQ ID NO: 372818 - DNA, 25 bp, Homo sapien
gggttgcagaagattatgactgtca

SEQ ID NO: 372819 - DNA, 25 bp, Homo sapien
tgcagcatattagctcaaacttggg

SEQ ID NO: 372820 - DNA, 25 bp, Homo sapien
tcgttaaagagtgcagaatctgtgc

SEQ ID NO: 372821 - DNA, 25 bp, Homo sapien
tgtgcagttgcatgagttgtacccc

SEQ ID NO: 372822 - DNA, 25 bp, Homo sapien
taaaatgccaagatgacgatgactg

SEQ ID NO: 372823 - DNA, 25 bp, Homo sapien
tgagcttccatgctgccctttgact

SEQ ID NO: 372824 - DNA, 25 bp, Homo sapien
ttgacttcgatacggccgtccaggc

SEQ ID NO: 372825 - DNA, 25 bp, Homo sapien
gctgccctttgacttcgatacggcc

SEQ ID NO: 372826 - DNA, 25 bp, Homo sapien
cctgaatctgacaacttcacatctt

SEQ ID NO: 372827 - DNA, 25 bp, Homo sapien
tttgatgccctccaattctgcttgc

SEQ ID NO: 372828 - DNA, 25 bp, Homo sapien
tcaaggtacatgctcttttgatgcc

SEQ ID NO: 372829 - DNA, 25 bp, Homo sapien
gtacatgctcttttgatgccctcca

SEQ ID NO: 372830 - DNA, 25 bp, Homo sapien
caattctgcttgcagcttcacagtc

SEQ ID NO: 372831 - DNA, 25 bp, Homo sapien
aagcatgcaaagttattttaatgaa

SEQ ID NO: 372832 - DNA, 25 bp, Homo sapien
atgtttcaaagcatgcaaagttatt

SEQ ID NO: 372833 - DNA, 25 bp, Homo sapien
ttgaaaaatcatatgtttcaaagca

SEQ ID NO: 372834 - DNA, 25 bp, Homo sapien
tcatatgtttcaaagcatgcaaagt

SEQ ID NO: 372835 - DNA, 25 bp, Homo sapien
tttctcataaactccacttttctga

SEQ ID NO: 372836 - DNA, 25 bp, Homo sapien
tctcataaactccacttttctgagg

SEQ ID NO: 372837 - DNA, 25 bp, Homo sapien
tcataaactccacttttctgaggac

SEQ ID NO: 372838 - DNA, 25 bp, Homo sapien
tcatttctcataaactccacttttc

SEQ ID NO: 372839 - DNA, 25 bp, Homo sapien
tgtaatgattacctagtcacaaaac

SEQ ID NO: 372840 - DNA, 25 bp, Homo sapien
tgcttcttagtaaagtaacgcctcg

SEQ ID NO: 372841 - DNA, 25 bp, Homo sapien
gctattacagtaaatgcggcttcta

SEQ ID NO: 372842 - DNA, 25 bp, Homo sapien
tactatgtaaccagtgcttactgca

SEQ ID NO: 372843 - DNA, 25 bp, Homo sapien
caatttatgtctgcaaatgagccat

SEQ ID NO: 372844 - DNA, 25 bp, Homo sapien
taaaacgaggacaatcgacagtatc

SEQ ID NO: 372845 - DNA, 25 bp, Homo sapien
cctaaatagttgcaggcagtagaac

SEQ ID NO: 372846 - DNA, 25 bp, Homo sapien
cttctaaggcttatcatctcaagga

SEQ ID NO: 372847 - DNA, 25 bp, Homo sapien
tgtctttgttgtcgggcttgttttc

SEQ ID NO: 372848 - DNA, 25 bp, Homo sapien
aatatgtctttgttgtcgggcttgt

SEQ ID NO: 372849 - DNA, 25 bp, Homo sapien
cctgatgaactgatgtttggcttag

SEQ ID NO: 372850 - DNA, 25 bp, Homo sapien
atgaactgatgtttggcttagccac

SEQ ID NO: 372851 - DNA, 25 bp, Homo sapien
agatgttgaaggaatttaacttctt

SEQ ID NO: 372852 - DNA, 25 bp, Homo sapien
aagatgttgaaggaatttaacttct

SEQ ID NO: 372853 - DNA, 25 bp, Homo sapien
gatgttgaaggaatttaacttcttc

SEQ ID NO: 372854 - DNA, 25 bp, Homo sapien
attggtcgtgtttttagcaggtaag

SEQ ID NO: 372855 - DNA, 25 bp, Homo sapien
actataagtctttaaattggtcgtg

SEQ ID NO: 372856 - DNA, 25 bp, Homo sapien
gatgctggtggattcgatttcacat

SEQ ID NO: 372857 - DNA, 25 bp, Homo sapien
cttatattgataggatttccttccc

SEQ ID NO: 372858 - DNA, 25 bp, Homo sapien
tagtggctgtgcaattatagcgtcc

SEQ ID NO: 372859 - DNA, 25 bp, Homo sapien
aatcttgttcctatatgattagtgg

SEQ ID NO: 372860 - DNA, 25 bp, Homo sapien
tatatgattagtggctgtgcaatta

SEQ ID NO: 372861 - DNA, 25 bp, Homo sapien
ttatagcgtccaaagtcattgtcag

SEQ ID NO: 372862 - DNA, 25 bp, Homo sapien
tattatgtactagcaaagtttgggc

SEQ ID NO: 372863 - DNA, 25 bp, Homo sapien
gctcattaataggaagtcagggttt

SEQ ID NO: 372864 - DNA, 25 bp, Homo sapien
gaagactacgtcaactcctgctcat

SEQ ID NO: 372865 - DNA, 25 bp, Homo sapien
gaaagcaggatcaacacctaggagg

SEQ ID NO: 372866 - DNA, 25 bp, Homo sapien
cattgcagacttcacatgtggacca

SEQ ID NO: 372867 - DNA, 25 bp, Homo sapien
gaatgtcagtcccacttttctcagg

SEQ ID NO: 372868 - DNA, 25 bp, Homo sapien
ttttctcaggaggtgcgcatggaca

SEQ ID NO: 372869 - DNA, 25 bp, Homo sapien
gaatgagagtagcatccgaactccc

SEQ ID NO: 372870 - DNA, 25 bp, Homo sapien
tccatgggagcgtacaattttccag

SEQ ID NO: 372871 - DNA, 25 bp, Homo sapien
cgtggtctgcgacagctctatgatc

SEQ ID NO: 372872 - DNA, 25 bp, Homo sapien
gaaggaaaccttggccgtggtctgc

SEQ ID NO: 372873 - DNA, 25 bp, Homo sapien
tgatcttcactccatagggactgga

SEQ ID NO: 372874 - DNA, 25 bp, Homo sapien
actgaagatcagcttgaattaacca

SEQ ID NO: 372875 - DNA, 25 bp, Homo sapien
aaaagccaatcatacaggtatactg

SEQ ID NO: 372876 - DNA, 25 bp, Homo sapien
gcttgaattaaccaacacattttga

SEQ ID NO: 372877 - DNA, 25 bp, Homo sapien
catacaggtatactgaagatcagct

SEQ ID NO: 372878 - DNA, 25 bp, Homo sapien
agggcaggtgacagcgacagcccaa

SEQ ID NO: 372879 - DNA, 25 bp, Homo sapien
caccttcccaagacaagatgcagtt

SEQ ID NO: 372880 - DNA, 25 bp, Homo sapien
tcatttcaccattaagctccccagg

SEQ ID NO: 372881 - DNA, 25 bp, Homo sapien
cagcccaatgaggtcaacagcacca

SEQ ID NO: 372882 - DNA, 25 bp, Homo sapien
aagatactccgcaagaaggtcaacc

SEQ ID NO: 372883 - DNA, 25 bp, Homo sapien
atatgggactacgtaaaaagactgg

SEQ ID NO: 372884 - DNA, 25 bp, Homo sapien
gaagaggtacttcacattcccttgt

SEQ ID NO: 372885 - DNA, 25 bp, Homo sapien
tccaggagaactttctaacccagca

SEQ ID NO: 372886 - DNA, 25 bp, Homo sapien
acattcataggacgctgaactattg

SEQ ID NO: 372887 - DNA, 25 bp, Homo sapien
gaacattcataggacgctgaactat

SEQ ID NO: 372888 - DNA, 25 bp, Homo sapien
attcataggacgctgaactattgtc

SEQ ID NO: 372889 - DNA, 25 bp, Homo sapien
tcataggacgctgaactattgtcat

SEQ ID NO: 372890 - DNA, 25 bp, Homo sapien
taaaagcccgccagcatttagatgc

SEQ ID NO: 372891 - DNA, 25 bp, Homo sapien
tgcaaataatggtactaaccacctg

SEQ ID NO: 372892 - DNA, 25 bp, Homo sapien
gaaagacaagtgcaacctgtttctg

SEQ ID NO: 372893 - DNA, 25 bp, Homo sapien
catatctgctacaaaaccacagagc

SEQ ID NO: 372894 - DNA, 25 bp, Homo sapien
aattgctatccttaggcaaatttgt

SEQ ID NO: 372895 - DNA, 25 bp, Homo sapien
taattgctatccttaggcaaatttg

SEQ ID NO: 372896 - DNA, 25 bp, Homo sapien
ctaattgctatccttaggcaaattt

SEQ ID NO: 372897 - DNA, 25 bp, Homo sapien
aacacatataatcttcccttatgaa

SEQ ID NO: 372898 - DNA, 25 bp, Homo sapien
ttggcatacaaatttataatggtag

SEQ ID NO: 372899 - DNA, 25 bp, Homo sapien
taatcttcccttatgaaattcattt

SEQ ID NO: 372900 - DNA, 25 bp, Homo sapien
ttataatggtagacgtaaaaacaca

SEQ ID NO: 372901 - DNA, 25 bp, Homo sapien
gctgcaaccctgatttcataagttg

SEQ ID NO: 372902 - DNA, 25 bp, Homo sapien
cataagttgtatttggttccaggtt

SEQ ID NO: 372903 - DNA, 25 bp, Homo sapien
tattttactgtagtctccttgtccc

SEQ ID NO: 372904 - DNA, 25 bp, Homo sapien
gaactggtaatgtttggaagatttc

SEQ ID NO: 372905 - DNA, 25 bp, Homo sapien
gctgtccatgtatggatggaggact

SEQ ID NO: 372906 - DNA, 25 bp, Homo sapien
gcttggctgtccatgtatggatgga

SEQ ID NO: 372907 - DNA, 25 bp, Homo sapien
tgtatggatggaggacttggttcac

SEQ ID NO: 372908 - DNA, 25 bp, Homo sapien
tccactgcttggctgtccatgtatg

SEQ ID NO: 372909 - DNA, 25 bp, Homo sapien
gaatatcccaatctattggcagctg

SEQ ID NO: 372910 - DNA, 25 bp, Homo sapien
taaactgtcggttcagaatatccca

SEQ ID NO: 372911 - DNA, 25 bp, Homo sapien
ggcatgctgaattcataaactgtcg

SEQ ID NO: 372912 - DNA, 25 bp, Homo sapien
taatgttgggctttggtggcatgct

SEQ ID NO: 372913 - DNA, 25 bp, Homo sapien
gattgctccacgactccttgatttg

SEQ ID NO: 372914 - DNA, 25 bp, Homo sapien
gcacgtgatagggatacttcacatc

SEQ ID NO: 372915 - DNA, 25 bp, Homo sapien
cagttccattgacctttcagcagca

SEQ ID NO: 372916 - DNA, 25 bp, Homo sapien
taatttatctctcaatgacgtcagc

SEQ ID NO: 372917 - DNA, 25 bp, Homo sapien
actggtagctgaaagtagcaatccc

SEQ ID NO: 372918 - DNA, 25 bp, Homo sapien
tagaacaataggacttgaggtcagc

SEQ ID NO: 372919 - DNA, 25 bp, Homo sapien
taaaacacgcaagacaaacttatgg

SEQ ID NO: 372920 - DNA, 25 bp, Homo sapien
taagcagcacaattgggatacacat

SEQ ID NO: 372921 - DNA, 25 bp, Homo sapien
ggcctagccctcatatgaaaagatt

SEQ ID NO: 372922 - DNA, 25 bp, Homo sapien
caagaaaggatagcagttgacagct

SEQ ID NO: 372923 - DNA, 25 bp, Homo sapien
ttatcggttgatgggttgcttctgc

SEQ ID NO: 372924 - DNA, 25 bp, Homo sapien
gaatgaatcacagagtccagaaccc

SEQ ID NO: 372925 - DNA, 25 bp, Homo sapien
ccataatgtgtgagttgagatatcg

SEQ ID NO: 372926 - DNA, 25 bp, Homo sapien
gagatatcgttttatctcagcaggg

SEQ ID NO: 372927 - DNA, 25 bp, Homo sapien
taaataagtattccgtgatctccaa

SEQ ID NO: 372928 - DNA, 25 bp, Homo sapien
tattggaaagatcaagtaaggttac

SEQ ID NO: 372929 - DNA, 25 bp, Homo sapien
tcacaaagcctattattttaccatc

SEQ ID NO: 372930 - DNA, 25 bp, Homo sapien
tttaccatctctgagaatattttta

SEQ ID NO: 372931 - DNA, 25 bp, Homo sapien
atctcagagttgtgaaataggtgtt

SEQ ID NO: 372932 - DNA, 25 bp, Homo sapien
gaaataggtgttcatgtaagaataa

SEQ ID NO: 372933 - DNA, 25 bp, Homo sapien
ctaggatgtaaaatgtctaaggttt

SEQ ID NO: 372934 - DNA, 25 bp, Homo sapien
tcctaggatgtaaaatgtctaaggt

SEQ ID NO: 372935 - DNA, 25 bp, Homo sapien
aaaaatcctaggatgtaaaatgtct

SEQ ID NO: 372936 - DNA, 25 bp, Homo sapien
aatcctaggatgtaaaatgtctaag

SEQ ID NO: 372937 - DNA, 25 bp, Homo sapien
tagcttcataactggtaatacggtc

SEQ ID NO: 372938 - DNA, 25 bp, Homo sapien
taatcttacactcaacacacaagct

SEQ ID NO: 372939 - DNA, 25 bp, Homo sapien
taacagtgaacgatacaatacacac

SEQ ID NO: 372940 - DNA, 25 bp, Homo sapien
aaaaatcctgatattccacatgcag

SEQ ID NO: 372941 - DNA, 25 bp, Homo sapien
tcttgaaagctagacccaaatatat

SEQ ID NO: 372942 - DNA, 25 bp, Homo sapien
gaaaactttacatgactagggatat

SEQ ID NO: 372943 - DNA, 25 bp, Homo sapien
gaaatcataatactacaaggccaga

SEQ ID NO: 372944 - DNA, 25 bp, Homo sapien
aaatgttatcatgcataatactggc

SEQ ID NO: 372945 - DNA, 25 bp, Homo sapien
gaaacacaagtgacagatacgggta

SEQ ID NO: 372946 - DNA, 25 bp, Homo sapien
catcccagcaactttgtggttcaca

SEQ ID NO: 372947 - DNA, 25 bp, Homo sapien
tagttctgtaggatgactgagtgtc

SEQ ID NO: 372948 - DNA, 25 bp, Homo sapien
caagcactagcaggtcgactttgag

SEQ ID NO: 372949 - DNA, 25 bp, Homo sapien
gttaccacaagaattagcagcagtg

SEQ ID NO: 372950 - DNA, 25 bp, Homo sapien
aggccaattactgctccaagcccaa

SEQ ID NO: 372951 - DNA, 25 bp, Homo sapien
gcagcaactcccaggccaattactg

SEQ ID NO: 372952 - DNA, 25 bp, Homo sapien
agcccaagaccattaaacagcgtgt

SEQ ID NO: 372953 - DNA, 25 bp, Homo sapien
acccacattgccgaataaagaagca

SEQ ID NO: 372954 - DNA, 25 bp, Homo sapien
tctttacttttgccactggagccac

SEQ ID NO: 372955 - DNA, 25 bp, Homo sapien
agcaacccacattgccgaataaaga

SEQ ID NO: 372956 - DNA, 25 bp, Homo sapien
ccacattgccgaataaagaagcagc

SEQ ID NO: 372957 - DNA, 25 bp, Homo sapien
aaaggtggacacctgtatttctcat

SEQ ID NO: 372958 - DNA, 25 bp, Homo sapien
tccttgagaaatgaccccattatga

SEQ ID NO: 372959 - DNA, 25 bp, Homo sapien
tatagggcagcgttaaagtctccag

SEQ ID NO: 372960 - DNA, 25 bp, Homo sapien
cccattatgattaggtaatacccgt

SEQ ID NO: 372961 - DNA, 25 bp, Homo sapien
cgtgattagtaactctttcatcctc

SEQ ID NO: 372962 - DNA, 25 bp, Homo sapien
gtggtttcatttggctcatttactg

SEQ ID NO: 372963 - DNA, 25 bp, Homo sapien
catcttcgtgattagtaactctttc

SEQ ID NO: 372964 - DNA, 25 bp, Homo sapien
gggctcccatcttcgtgattagtaa

SEQ ID NO: 372965 - DNA, 25 bp, Homo sapien
gaatgatgtcgttagaaactttaat

SEQ ID NO: 372966 - DNA, 25 bp, Homo sapien
atagtttctggatttagagcttctt

SEQ ID NO: 372967 - DNA, 25 bp, Homo sapien
ggatttagagcttctttcccatctt

SEQ ID NO: 372968 - DNA, 25 bp, Homo sapien
ttttgattgaatgatgtcgttagaa

SEQ ID NO: 372969 - DNA, 25 bp, Homo sapien
ggtcatagggtcacgcaatccaaat

SEQ ID NO: 372970 - DNA, 25 bp, Homo sapien
ccaaagtgttggtgccagtcagtct

SEQ ID NO: 372971 - DNA, 25 bp, Homo sapien
aacaaaagggaatggatcatgggca

SEQ ID NO: 372972 - DNA, 25 bp, Homo sapien
aataggactcatacacatgcagggc

SEQ ID NO: 372973 - DNA, 25 bp, Homo sapien
acaattttgatctggcacttcagtc

SEQ ID NO: 372974 - DNA, 25 bp, Homo sapien
tattatttcacttgcaatacacttt

SEQ ID NO: 372975 - DNA, 25 bp, Homo sapien
tataaagagatagagatttagaaag

SEQ ID NO: 372976 - DNA, 25 bp, Homo sapien
caatattatttcacttgcaatacac

SEQ ID NO: 372977 - DNA, 25 bp, Homo sapien
aatacgccagacaggaacgcaagga

SEQ ID NO: 372978 - DNA, 25 bp, Homo sapien
catccggaatagaacacatagtggc

SEQ ID NO: 372979 - DNA, 25 bp, Homo sapien
tattacctctgggagcttgcatagc

SEQ ID NO: 372980 - DNA, 25 bp, Homo sapien
aaagacactgcgacgatttggtgcc

SEQ ID NO: 372981 - DNA, 25 bp, Homo sapien
tttgttgaataagcacattatgtga

SEQ ID NO: 372982 - DNA, 25 bp, Homo sapien
tctgtgaaaaacaacattgggaacc

SEQ ID NO: 372983 - DNA, 25 bp, Homo sapien
taaataatgctaacaaacttattgt

SEQ ID NO: 372984 - DNA, 25 bp, Homo sapien
tcgtcagtgataatcttattgccaa

SEQ ID NO: 372985 - DNA, 25 bp, Homo sapien
tgtttctctactctcctatgtcggg

SEQ ID NO: 372986 - DNA, 25 bp, Homo sapien
ccttcgcatcagtgtaatcggccat

SEQ ID NO: 372987 - DNA, 25 bp, Homo sapien
taagcaacgttcctagtccctggtc

SEQ ID NO: 372988 - DNA, 25 bp, Homo sapien
ttgcttactgtcttccatgggaggc

SEQ ID NO: 372989 - DNA, 25 bp, Homo sapien
acacatcagagacttaattttggct

SEQ ID NO: 372990 - DNA, 25 bp, Homo sapien
aaacacatcagagacttaattttgg

SEQ ID NO: 372991 - DNA, 25 bp, Homo sapien
aacacatcagagacttaattttggc

SEQ ID NO: 372992 - DNA, 25 bp, Homo sapien
tctctgtatcagacacttccttcag

SEQ ID NO: 372993 - DNA, 25 bp, Homo sapien
tctttacgttctggctcaatttaat

SEQ ID NO: 372994 - DNA, 25 bp, Homo sapien
ccttcagttctttacgttctggctc

SEQ ID NO: 372995 - DNA, 25 bp, Homo sapien
tcttttggcctaaatgtactttctc

SEQ ID NO: 372996 - DNA, 25 bp, Homo sapien
gctgaaggaaaatgcactgcccaaa

SEQ ID NO: 372997 - DNA, 25 bp, Homo sapien
tgctgaaggaaaatgcactgcccaa

SEQ ID NO: 372998 - DNA, 25 bp, Homo sapien
aggaaaatgcactgcccaaaaccat

SEQ ID NO: 372999 - DNA, 25 bp, Homo sapien
tgaaggaaaatgcactgcccaaaac

SEQ ID NO: 373000 - DNA, 25 bp, Homo sapien
tacatcaccagccatggacaacaag

SEQ ID NO: 373001 - DNA, 25 bp, Homo sapien
tatttagaaagtgtacatcaccagc

SEQ ID NO: 373002 - DNA, 25 bp, Homo sapien
ccagccatggacaacaagtcataca

SEQ ID NO: 373003 - DNA, 25 bp, Homo sapien
tatgtggatgtgagtatttagaaag

SEQ ID NO: 373004 - DNA, 25 bp, Homo sapien
ttttattttagtcatgggtaatgtc

SEQ ID NO: 373005 - DNA, 25 bp, Homo sapien
ttaattgtcttagtgtgcttgccat

SEQ ID NO: 373006 - DNA, 25 bp, Homo sapien
ttttctttaattgtcttagtgtgct

SEQ ID NO: 373007 - DNA, 25 bp, Homo sapien
tctttaattgtcttagtgtgcttgc

SEQ ID NO: 373008 - DNA, 25 bp, Homo sapien
tttttctttaattgtcttagtgtgc

SEQ ID NO: 373009 - DNA, 25 bp, Homo sapien
cagatttgtgtctatggtttgagca

SEQ ID NO: 373010 - DNA, 25 bp, Homo sapien
aagcagatttgtgtctatggtttga

SEQ ID NO: 373011 - DNA, 25 bp, Homo sapien
tgtctatggtttgagcatcccctgc

SEQ ID NO: 373012 - DNA, 25 bp, Homo sapien
ttgtgtctatggtttgagcatcccc

SEQ ID NO: 373013 - DNA, 25 bp, Homo sapien
gagttgaataggtgctcagaggccc

SEQ ID NO: 373014 - DNA, 25 bp, Homo sapien
catgtaactaccacaaagctgaggg

SEQ ID NO: 373015 - DNA, 25 bp, Homo sapien
taaagcagcaattcggtatcatcat

SEQ ID NO: 373016 - DNA, 25 bp, Homo sapien
ttcagacaacctccgttaaatgcag

SEQ ID NO: 373017 - DNA, 25 bp, Homo sapien
tactggcttcaaaggttgggcttct

SEQ ID NO: 373018 - DNA, 25 bp, Homo sapien
caactctatgccgagagaaccttgg

SEQ ID NO: 373019 - DNA, 25 bp, Homo sapien
tatgccgagagaaccttggaccttt

SEQ ID NO: 373020 - DNA, 25 bp, Homo sapien
aactgcactcgaaccacatcagctt

SEQ ID NO: 373021 - DNA, 25 bp, Homo sapien
ctccgcatgaactgagctgagagtt

SEQ ID NO: 373022 - DNA, 25 bp, Homo sapien
ggcagaaagctctgacattctatgg

SEQ ID NO: 373023 - DNA, 25 bp, Homo sapien
cctggctcggctccgcatgaactga

SEQ ID NO: 373024 - DNA, 25 bp, Homo sapien
gaaagctctgacattctatggccta

SEQ ID NO: 373025 - DNA, 25 bp, Homo sapien
aaagggcatttcatcgacattcatg

SEQ ID NO: 373026 - DNA, 25 bp, Homo sapien
gcatttcatcgacattcatgatgct

SEQ ID NO: 373027 - DNA, 25 bp, Homo sapien
aaatgaaagggcatttcatcgacat

SEQ ID NO: 373028 - DNA, 25 bp, Homo sapien
tgaaagggcatttcatcgacattca

SEQ ID NO: 373029 - DNA, 25 bp, Homo sapien
ttaagcctgattgttcttttgtgct

SEQ ID NO: 373030 - DNA, 25 bp, Homo sapien
tactgtcaccaacacaacagcagtt

SEQ ID NO: 373031 - DNA, 25 bp, Homo sapien
gaagttcttgatttatgtcccagca

SEQ ID NO: 373032 - DNA, 25 bp, Homo sapien
tataaggcggcaagtgaatcagttt

SEQ ID NO: 373033 - DNA, 25 bp, Homo sapien
ttactgaacacctcatgcactgcat

SEQ ID NO: 373034 - DNA, 25 bp, Homo sapien
ctttactgaacacctcatgcactgc

SEQ ID NO: 373035 - DNA, 25 bp, Homo sapien
tctttactgaacacctcatgcactg

SEQ ID NO: 373036 - DNA, 25 bp, Homo sapien
tttactgaacacctcatgcactgca

SEQ ID NO: 373037 - DNA, 25 bp, Homo sapien
gaatgccttcaaaggccactcaatt

SEQ ID NO: 373038 - DNA, 25 bp, Homo sapien
tctctgacagattaagtgctgtaaa

SEQ ID NO: 373039 - DNA, 25 bp, Homo sapien
ctactgctctttaattctaaggaca

SEQ ID NO: 373040 - DNA, 25 bp, Homo sapien
tgtaaatcttttacagatgctgtca

SEQ ID NO: 373041 - DNA, 25 bp, Homo sapien
aatattcgtgcttttacaacaagca

SEQ ID NO: 373042 - DNA, 25 bp, Homo sapien
attcgtgcttttacaacaagcatgt

SEQ ID NO: 373043 - DNA, 25 bp, Homo sapien
tattcgtgcttttacaacaagcatg

SEQ ID NO: 373044 - DNA, 25 bp, Homo sapien
ttcgtgcttttacaacaagcatgta

SEQ ID NO: 373045 - DNA, 25 bp, Homo sapien
aagctggagaagtttccttagcatc

SEQ ID NO: 373046 - DNA, 25 bp, Homo sapien
tctctccagcgtggctctcctgtcc

SEQ ID NO: 373047 - DNA, 25 bp, Homo sapien
gctgcttgaagattctgcttgctcc

SEQ ID NO: 373048 - DNA, 25 bp, Homo sapien
aaacagctgcttgaagattctgctt

SEQ ID NO: 373049 - DNA, 25 bp, Homo sapien
tgcttgaagattctgcttgctccct

SEQ ID NO: 373050 - DNA, 25 bp, Homo sapien
acagctgcttgaagattctgcttgc

SEQ ID NO: 373051 - DNA, 25 bp, Homo sapien
ttcaagtggatgcttataatataaa

SEQ ID NO: 373052 - DNA, 25 bp, Homo sapien
tgagaggatatgtgtttttcaacgg

SEQ ID NO: 373053 - DNA, 25 bp, Homo sapien
tgtgtttttcaacgggctgatttgg

SEQ ID NO: 373054 - DNA, 25 bp, Homo sapien
caagtggatgcttataatataaaac

SEQ ID NO: 373055 - DNA, 25 bp, Homo sapien
tcacatctacctggatgtcattttg

SEQ ID NO: 373056 - DNA, 25 bp, Homo sapien
tgtcattttgctcactatttcgctt

SEQ ID NO: 373057 - DNA, 25 bp, Homo sapien
tatatctagtactgtcccccctgaa

SEQ ID NO: 373058 - DNA, 25 bp, Homo sapien
ctatttcgctttttggaaagtctca

SEQ ID NO: 373059 - DNA, 25 bp, Homo sapien
gaatcatggcaggatatgaaaggca

SEQ ID NO: 373060 - DNA, 25 bp, Homo sapien
cctcagaatcatggcaggatatgaa

SEQ ID NO: 373061 - DNA, 25 bp, Homo sapien
cagaatcatggcaggatatgaaagg

SEQ ID NO: 373062 - DNA, 25 bp, Homo sapien
tcagaatcatggcaggatatgaaag

SEQ ID NO: 373063 - DNA, 25 bp, Homo sapien
tataagtgagataggccaacacagg

SEQ ID NO: 373064 - DNA, 25 bp, Homo sapien
ttaagagcatgggtaatggtcaggc

SEQ ID NO: 373065 - DNA, 25 bp, Homo sapien
cagcagtccccgtcttattataagt

SEQ ID NO: 373066 - DNA, 25 bp, Homo sapien
caacacaggatttggccaagaggaa

SEQ ID NO: 373067 - DNA, 25 bp, Homo sapien
ggaaaacactgttatctgtgactct

SEQ ID NO: 373068 - DNA, 25 bp, Homo sapien
tctgtgactcttttctgcttaatgc

SEQ ID NO: 373069 - DNA, 25 bp, Homo sapien
tcaagccaattgaaaggccaagggc

SEQ ID NO: 373070 - DNA, 25 bp, Homo sapien
cctaaaggcgttggcaaggcaggaa

SEQ ID NO: 373071 - DNA, 25 bp, Homo sapien
ctttcatagcttgggctagagccat

SEQ ID NO: 373072 - DNA, 25 bp, Homo sapien
ggcaggtaggagcaatgacttcctt

SEQ ID NO: 373073 - DNA, 25 bp, Homo sapien
caggtaggagcaatgacttcctttc

SEQ ID NO: 373074 - DNA, 25 bp, Homo sapien
gacttcctttcatagcttgggctag

SEQ ID NO: 373075 - DNA, 25 bp, Homo sapien
tggtaggtagacccgttgggtcaca

SEQ ID NO: 373076 - DNA, 25 bp, Homo sapien
gtaggtagacccgttgggtcacatc

SEQ ID NO: 373077 - DNA, 25 bp, Homo sapien
ggtagacccgttgggtcacatctct

SEQ ID NO: 373078 - DNA, 25 bp, Homo sapien
taggtagacccgttgggtcacatct

SEQ ID NO: 373079 - DNA, 25 bp, Homo sapien
tttgtctgcctcagaaagcatgcat

SEQ ID NO: 373080 - DNA, 25 bp, Homo sapien
ggatgtgtttcagaagcagggagaa

SEQ ID NO: 373081 - DNA, 25 bp, Homo sapien
gggatgtgtttcagaagcagggaga

SEQ ID NO: 373082 - DNA, 25 bp, Homo sapien
tgtctgcctcagaaagcatgcattc

SEQ ID NO: 373083 - DNA, 25 bp, Homo sapien
tactcagatctgttaagaaagtact

SEQ ID NO: 373084 - DNA, 25 bp, Homo sapien
tatttgtttcctactatcatccaca

SEQ ID NO: 373085 - DNA, 25 bp, Homo sapien
catccacatgcacagatttaaaaac

SEQ ID NO: 373086 - DNA, 25 bp, Homo sapien
tattaacagggctatttaccaagtg

SEQ ID NO: 373087 - DNA, 25 bp, Homo sapien
gtggcagtacaactccaatctttgc

SEQ ID NO: 373088 - DNA, 25 bp, Homo sapien
gctccctttgaaagaccaatccagg

SEQ ID NO: 373089 - DNA, 25 bp, Homo sapien
ccagggacgaatccttgcttgtttc

SEQ ID NO: 373090 - DNA, 25 bp, Homo sapien
gcagtacaactccaatctttgcctt

SEQ ID NO: 373091 - DNA, 25 bp, Homo sapien
gaaactgaccatatagtgtacggaa

SEQ ID NO: 373092 - DNA, 25 bp, Homo sapien
ggcggatcttgtactttgagaccca

SEQ ID NO: 373093 - DNA, 25 bp, Homo sapien
taataacaagtaactggcggatctt

SEQ ID NO: 373094 - DNA, 25 bp, Homo sapien
ggaagaagtcttgaataactccagt

SEQ ID NO: 373095 - DNA, 25 bp, Homo sapien
atccagaataaaggacacctttgtg

SEQ ID NO: 373096 - DNA, 25 bp, Homo sapien
ctttccgcaggaatgttctttctta

SEQ ID NO: 373097 - DNA, 25 bp, Homo sapien
gaataaaggacacctttgtgtctat

SEQ ID NO: 373098 - DNA, 25 bp, Homo sapien
tctccactggcccgaatcctgaaaa

SEQ ID NO: 373099 - DNA, 25 bp, Homo sapien
tgctgccaccaaatctatgcttctc

SEQ ID NO: 373100 - DNA, 25 bp, Homo sapien
ttgctgccaccaaatctatgcttct

SEQ ID NO: 373101 - DNA, 25 bp, Homo sapien
tctttgctgccaccaaatctatgct

SEQ ID NO: 373102 - DNA, 25 bp, Homo sapien
tttgctgccaccaaatctatgcttc

SEQ ID NO: 373103 - DNA, 25 bp, Homo sapien
tggacccactaggagggccctgaag

SEQ ID NO: 373104 - DNA, 25 bp, Homo sapien
gatggacccactaggagggccctga

SEQ ID NO: 373105 - DNA, 25 bp, Homo sapien
caggattcaacaggatctgcaagag

SEQ ID NO: 373106 - DNA, 25 bp, Homo sapien
tgcaagagtcatggtggggatggac

SEQ ID NO: 373107 - DNA, 25 bp, Homo sapien
ggctccctggctgcttcataagcat

SEQ ID NO: 373108 - DNA, 25 bp, Homo sapien
catatagttacgaacatggcagtgg

SEQ ID NO: 373109 - DNA, 25 bp, Homo sapien
tattatcactgcagatccgagccat

SEQ ID NO: 373110 - DNA, 25 bp, Homo sapien
gcacataactatgctcctgctcttg

SEQ ID NO: 373111 - DNA, 25 bp, Homo sapien
gatgctgtggttgctaggatggaat

SEQ ID NO: 373112 - DNA, 25 bp, Homo sapien
aattgatgctgtggttgctaggatg

SEQ ID NO: 373113 - DNA, 25 bp, Homo sapien
ctgtggttgctaggatggaattcat

SEQ ID NO: 373114 - DNA, 25 bp, Homo sapien
gctgtggttgctaggatggaattca

SEQ ID NO: 373115 - DNA, 25 bp, Homo sapien
cagatgatgcggttgagttgtggaa

SEQ ID NO: 373116 - DNA, 25 bp, Homo sapien
caggcagatgatgcggttgagttgt

SEQ ID NO: 373117 - DNA, 25 bp, Homo sapien
gcaggcagatgatgcggttgagttg

SEQ ID NO: 373118 - DNA, 25 bp, Homo sapien
atgatgcggttgagttgtggaatcc

SEQ ID NO: 373119 - DNA, 25 bp, Homo sapien
catatgcctcccgtgtggtcatgag

SEQ ID NO: 373120 - DNA, 25 bp, Homo sapien
tgcctcccgtgtggtcatgaggaat

SEQ ID NO: 373121 - DNA, 25 bp, Homo sapien
tctaatgttacttccttggacccaa

SEQ ID NO: 373122 - DNA, 25 bp, Homo sapien
caggccaatgacagatcccacatat

SEQ ID NO: 373123 - DNA, 25 bp, Homo sapien
gttgaacgttcaggggatgggacat

SEQ ID NO: 373124 - DNA, 25 bp, Homo sapien
tatctgttgaacgttcaggggatgg

SEQ ID NO: 373125 - DNA, 25 bp, Homo sapien
ggctatctgttgaacgttcagggga

SEQ ID NO: 373126 - DNA, 25 bp, Homo sapien
tgttgaacgttcaggggatgggaca

SEQ ID NO: 373127 - DNA, 25 bp, Homo sapien
tgaccaccagcaatgacacataacc

SEQ ID NO: 373128 - DNA, 25 bp, Homo sapien
aagcaaaagaagttgtttatgacca

SEQ ID NO: 373129 - DNA, 25 bp, Homo sapien
tgacacataaccgtggagaattcaa

SEQ ID NO: 373130 - DNA, 25 bp, Homo sapien
aaagaagttgtttatgaccaccagc

SEQ ID NO: 373131 - DNA, 25 bp, Homo sapien
gaacgagagcaagatgaagtgcaaa

SEQ ID NO: 373132 - DNA, 25 bp, Homo sapien
aatgtggccattagcagacccagaa

SEQ ID NO: 373133 - DNA, 25 bp, Homo sapien
gtgcaaatggtgacatttgaagcag

SEQ ID NO: 373134 - DNA, 25 bp, Homo sapien
gcatggaacgagagcaagatgaagt

SEQ ID NO: 373135 - DNA, 25 bp, Homo sapien
tgtagattgtgtagcagtaaaggtg

SEQ ID NO: 373136 - DNA, 25 bp, Homo sapien
gtgtctttagtgaaggttgtccaca

SEQ ID NO: 373137 - DNA, 25 bp, Homo sapien
ctctctgtagattgtgtagcagtaa

SEQ ID NO: 373138 - DNA, 25 bp, Homo sapien
gactctctgtagattgtgtagcagt

SEQ ID NO: 373139 - DNA, 25 bp, Homo sapien
cttctttatcctgatttttgttcat

SEQ ID NO: 373140 - DNA, 25 bp, Homo sapien
acaaagtgtcttcagctggcttcat

SEQ ID NO: 373141 - DNA, 25 bp, Homo sapien
tgaaagcacatgaaacaaagtgtct

SEQ ID NO: 373142 - DNA, 25 bp, Homo sapien
gaaacaaagtgtcttcagctggctt

SEQ ID NO: 373143 - DNA, 25 bp, Homo sapien
catgaaacaaagtgtcttcagctgg

SEQ ID NO: 373144 - DNA, 25 bp, Homo sapien
ttgaaaataatggtacacatataga

SEQ ID NO: 373145 - DNA, 25 bp, Homo sapien
ataatggtacacatatagagtctcc

SEQ ID NO: 373146 - DNA, 25 bp, Homo sapien
aatggtacacatatagagtctccat

SEQ ID NO: 373147 - DNA, 25 bp, Homo sapien
gaaaataatggtacacatatagagt

SEQ ID NO: 373148 - DNA, 25 bp, Homo sapien
gcagccaaagccacatcattattgt

SEQ ID NO: 373149 - DNA, 25 bp, Homo sapien
gtccatcaagtccttggcagccaaa

SEQ ID NO: 373150 - DNA, 25 bp, Homo sapien
gccacatcattattgtctctactgc

SEQ ID NO: 373151 - DNA, 25 bp, Homo sapien
gcaatacttgtccatcaagtccttg

SEQ ID NO: 373152 - DNA, 25 bp, Homo sapien
ccactgtaagcttcatgcgctcttg

SEQ ID NO: 373153 - DNA, 25 bp, Homo sapien
tgctccgcacattctgtcaagccgt

SEQ ID NO: 373154 - DNA, 25 bp, Homo sapien
ttgttctacatttggctgaaactgc

SEQ ID NO: 373155 - DNA, 25 bp, Homo sapien
tctgatgtccctgtagcactgtctg

SEQ ID NO: 373156 - DNA, 25 bp, Homo sapien
atcattcattagactacactgaata

SEQ ID NO: 373157 - DNA, 25 bp, Homo sapien
tcatcattcattagactacactgaa

SEQ ID NO: 373158 - DNA, 25 bp, Homo sapien
ttctcatcattcattagactacact

SEQ ID NO: 373159 - DNA, 25 bp, Homo sapien
tctcatcattcattagactacactg

SEQ ID NO: 373160 - DNA, 25 bp, Homo sapien
ctatttgtaggctgtcatgttgcac

SEQ ID NO: 373161 - DNA, 25 bp, Homo sapien
ggctgtcatgttgcacgtgattttt

SEQ ID NO: 373162 - DNA, 25 bp, Homo sapien
tgtaggctgtcatgttgcacgtgat

SEQ ID NO: 373163 - DNA, 25 bp, Homo sapien
tgttgcacgtgatttttagtacact

SEQ ID NO: 373164 - DNA, 25 bp, Homo sapien
tctgtattcacacctgcactaacca

SEQ ID NO: 373165 - DNA, 25 bp, Homo sapien
tgttctgtattcacacctgcactaa

SEQ ID NO: 373166 - DNA, 25 bp, Homo sapien
gttctgtattcacacctgcactaac

SEQ ID NO: 373167 - DNA, 25 bp, Homo sapien
catgttctgtattcacacctgcact

SEQ ID NO: 373168 - DNA, 25 bp, Homo sapien
ttctcccttgtcacgttaatcactg

SEQ ID NO: 373169 - DNA, 25 bp, Homo sapien
gcaagtccagcctactcaatttacg

SEQ ID NO: 373170 - DNA, 25 bp, Homo sapien
cgttaatcactgtgtcacttctgat

SEQ ID NO: 373171 - DNA, 25 bp, Homo sapien
tctgatcagtatacactgcaagtcc

SEQ ID NO: 373172 - DNA, 25 bp, Homo sapien
agagccaagcacagagattcgataa

SEQ ID NO: 373173 - DNA, 25 bp, Homo sapien
gagagtggaacagtagccaaagagc

SEQ ID NO: 373174 - DNA, 25 bp, Homo sapien
agcttagtcactgagagcccaggag

SEQ ID NO: 373175 - DNA, 25 bp, Homo sapien
taatacagcagcttagtcactgaga

SEQ ID NO: 373176 - DNA, 25 bp, Homo sapien
tgtcttcgttgaatgatgccccaaa

SEQ ID NO: 373177 - DNA, 25 bp, Homo sapien
tcaaaatagtaccatggaggaggag

SEQ ID NO: 373178 - DNA, 25 bp, Homo sapien
gcgatgcttgcatggcaggtacact

SEQ ID NO: 373179 - DNA, 25 bp, Homo sapien
catagtgtgtcctgctgtgagcatc

SEQ ID NO: 373180 - DNA, 25 bp, Homo sapien
aggctgtaccctctaaatattgctg

SEQ ID NO: 373181 - DNA, 25 bp, Homo sapien
ccatgtgtaaaaggataccttctgt

SEQ ID NO: 373182 - DNA, 25 bp, Homo sapien
taagcagattgctttttgcccaaag

SEQ ID NO: 373183 - DNA, 25 bp, Homo sapien
cttctttcctttccgtaccatgtgt

SEQ ID NO: 373184 - DNA, 25 bp, Homo sapien
gacaatagaagcctagtattgcttg

SEQ ID NO: 373185 - DNA, 25 bp, Homo sapien
gaagcctagtattgcttgtaagcca

SEQ ID NO: 373186 - DNA, 25 bp, Homo sapien
ttgcttgtaagccagactgccatgg

SEQ ID NO: 373187 - DNA, 25 bp, Homo sapien
gtattgcttgtaagccagactgcca

SEQ ID NO: 373188 - DNA, 25 bp, Homo sapien
gttaacatgccactaacagttggct

SEQ ID NO: 373189 - DNA, 25 bp, Homo sapien
gataccatcagttgaccctgtggct

SEQ ID NO: 373190 - DNA, 25 bp, Homo sapien
gattgcctgttgtctagtccagtgg

SEQ ID NO: 373191 - DNA, 25 bp, Homo sapien
taaagctgatggtgcacatacctct

SEQ ID NO: 373192 - DNA, 25 bp, Homo sapien
cccaaacagctgagattaaagacat

SEQ ID NO: 373193 - DNA, 25 bp, Homo sapien
cttcccaaacagctgagattaaaga

SEQ ID NO: 373194 - DNA, 25 bp, Homo sapien
aacagctgagattaaagacataagc

SEQ ID NO: 373195 - DNA, 25 bp, Homo sapien
caaacagctgagattaaagacataa

SEQ ID NO: 373196 - DNA, 25 bp, Homo sapien
aaaactaaaacaagcttcaggtgct

SEQ ID NO: 373197 - DNA, 25 bp, Homo sapien
gaaaactaaaacaagcttcaggtgc

SEQ ID NO: 373198 - DNA, 25 bp, Homo sapien
aaactaaaacaagcttcaggtgctt

SEQ ID NO: 373199 - DNA, 25 bp, Homo sapien
atgcagcaagcacaaatggttaacc

SEQ ID NO: 373200 - DNA, 25 bp, Homo sapien
caagcacaaatggttaaccttgctc

SEQ ID NO: 373201 - DNA, 25 bp, Homo sapien
tcatttatttagctgctcatgtaag

SEQ ID NO: 373202 - DNA, 25 bp, Homo sapien
tagctgctcatgtaagtggacttgc

SEQ ID NO: 373203 - DNA, 25 bp, Homo sapien
cctaacactcatcgttgcttattca

SEQ ID NO: 373204 - DNA, 25 bp, Homo sapien
tactcgcttctgcagtggcgtgagg

SEQ ID NO: 373205 - DNA, 25 bp, Homo sapien
taaacagcctaacactcatcgttgc

SEQ ID NO: 373206 - DNA, 25 bp, Homo sapien
tattcttcctctactcgcttctgca

SEQ ID NO: 373207 - DNA, 25 bp, Homo sapien
ctcagggcacaaggtggaaaccagc

SEQ ID NO: 373208 - DNA, 25 bp, Homo sapien
gtcacaggtcgcaggagcctctccc

SEQ ID NO: 373209 - DNA, 25 bp, Homo sapien
catcatcttatctcaggtacacaca

SEQ ID NO: 373210 - DNA, 25 bp, Homo sapien
acatcatcttatctcaggtacacac

SEQ ID NO: 373211 - DNA, 25 bp, Homo sapien
gagctgagagagactggcgagagat

SEQ ID NO: 373212 - DNA, 25 bp, Homo sapien
ctgagagagactggcgagagataat

SEQ ID NO: 373213 - DNA, 25 bp, Homo sapien
tggagctgagagagactggcgagag

SEQ ID NO: 373214 - DNA, 25 bp, Homo sapien
agagagactggcgagagataatcat

SEQ ID NO: 373215 - DNA, 25 bp, Homo sapien
ggcatcccacagtgcaagagattca

SEQ ID NO: 373216 - DNA, 25 bp, Homo sapien
ttctgttgcgtgtgtcgttggtgct

SEQ ID NO: 373217 - DNA, 25 bp, Homo sapien
gaaccagagttttagggcatcccac

SEQ ID NO: 373218 - DNA, 25 bp, Homo sapien
ttttccaaagcaccctctaactgag

SEQ ID NO: 373219 - DNA, 25 bp, Homo sapien
gcacatggtacagccgatagatgac

SEQ ID NO: 373220 - DNA, 25 bp, Homo sapien
gaaggcacatggtacagccgataga

SEQ ID NO: 373221 - DNA, 25 bp, Homo sapien
atggtacagccgatagatgacagag

SEQ ID NO: 373222 - DNA, 25 bp, Homo sapien
tactccagaaggcacatggtacagc

SEQ ID NO: 373223 - DNA, 25 bp, Homo sapien
tcattcatggtcagggggatggatg

SEQ ID NO: 373224 - DNA, 25 bp, Homo sapien
catggtcagggggatggatgtatag

SEQ ID NO: 373225 - DNA, 25 bp, Homo sapien
cattcatggtcagggggatggatgt

SEQ ID NO: 373226 - DNA, 25 bp, Homo sapien
ttcatggtcagggggatggatgtat

SEQ ID NO: 373227 - DNA, 25 bp, Homo sapien
cgaaaattgccaatgtcgaccatat

SEQ ID NO: 373228 - DNA, 25 bp, Homo sapien
gaattagcaatacttgcacctcaga

SEQ ID NO: 373229 - DNA, 25 bp, Homo sapien
taaacctcatcagctagcatacttc

SEQ ID NO: 373230 - DNA, 25 bp, Homo sapien
tagcatacttccactgtgcaaaggt

SEQ ID NO: 373231 - DNA, 25 bp, Homo sapien
gccacctcttggcaggcttttagca

SEQ ID NO: 373232 - DNA, 25 bp, Homo sapien
taatattcaagtactgcacagtctg

SEQ ID NO: 373233 - DNA, 25 bp, Homo sapien
tgcacagtctgaaacacgtcacaag

SEQ ID NO: 373234 - DNA, 25 bp, Homo sapien
aaacacgtcacaagtccctttgcag

SEQ ID NO: 373235 - DNA, 25 bp, Homo sapien
atcctttaattcagagcccttcttc

SEQ ID NO: 373236 - DNA, 25 bp, Homo sapien
ggcacatcaattgtgcaagactccc

SEQ ID NO: 373237 - DNA, 25 bp, Homo sapien
ggtcctgttcagacgtaatttccac

SEQ ID NO: 373238 - DNA, 25 bp, Homo sapien
ttttaagcctaaatccctggctgtc

SEQ ID NO: 373239 - DNA, 25 bp, Homo sapien
aatcccgtgagctgagcactcactg

SEQ ID NO: 373240 - DNA, 25 bp, Homo sapien
caagtagctgacacctgaggtagtc

SEQ ID NO: 373241 - DNA, 25 bp, Homo sapien
ctgacacctgaggtagtctgattct

SEQ ID NO: 373242 - DNA, 25 bp, Homo sapien
ttctgaccaaggcatcaagtagctg

SEQ ID NO: 373243 - DNA, 25 bp, Homo sapien
gtctttctgaccaaggcatcaagta

SEQ ID NO: 373244 - DNA, 25 bp, Homo sapien
gcacagttgctaacaggccatcgac

SEQ ID NO: 373245 - DNA, 25 bp, Homo sapien
tgtacatttgttagggcagaggtcc

SEQ ID NO: 373246 - DNA, 25 bp, Homo sapien
tcatgccccaaggttatactgagag

SEQ ID NO: 373247 - DNA, 25 bp, Homo sapien
gaccattaccagttcatgacccagg

SEQ ID NO: 373248 - DNA, 25 bp, Homo sapien
cttctatcaaccatgcaagctgctt

SEQ ID NO: 373249 - DNA, 25 bp, Homo sapien
tcaaccatgcaagctgcttaggtct

SEQ ID NO: 373250 - DNA, 25 bp, Homo sapien
ctatcaaccatgcaagctgcttagg

SEQ ID NO: 373251 - DNA, 25 bp, Homo sapien
aaccatgcaagctgcttaggtctca

SEQ ID NO: 373252 - DNA, 25 bp, Homo sapien
tgctgaggtgcctcaaccacaaaag

SEQ ID NO: 373253 - DNA, 25 bp, Homo sapien
caaaagtagatatagccagtaggaa

SEQ ID NO: 373254 - DNA, 25 bp, Homo sapien
gtagatatagccagtaggaacacag

SEQ ID NO: 373255 - DNA, 25 bp, Homo sapien
ggtgcctcaaccacaaaagtagata

SEQ ID NO: 373256 - DNA, 25 bp, Homo sapien
gacccgttatgtaaattgtctccaa

SEQ ID NO: 373257 - DNA, 25 bp, Homo sapien
tatggactgagccttatgagaatct

SEQ ID NO: 373258 - DNA, 25 bp, Homo sapien
gaagatgtagcaactctttcttgac

SEQ ID NO: 373259 - DNA, 25 bp, Homo sapien
cagacaccatatttagccatcagaa

SEQ ID NO: 373260 - DNA, 25 bp, Homo sapien
tcttcaggatcttcccaaaaaacag

SEQ ID NO: 373261 - DNA, 25 bp, Homo sapien
gactgatgcaattgtgaggactgga

SEQ ID NO: 373262 - DNA, 25 bp, Homo sapien
gatctgggatcgactgacctaccta

SEQ ID NO: 373263 - DNA, 25 bp, Homo sapien
tctttgcacttcaaggatctgtgct

SEQ ID NO: 373264 - DNA, 25 bp, Homo sapien
aagctttgagagtattgttcaaagc

SEQ ID NO: 373265 - DNA, 25 bp, Homo sapien
gctttgagagtattgttcaaagcct

SEQ ID NO: 373266 - DNA, 25 bp, Homo sapien
gagagtattgttcaaagcctctttg

SEQ ID NO: 373267 - DNA, 25 bp, Homo sapien
tttgagagtattgttcaaagcctct

SEQ ID NO: 373268 - DNA, 25 bp, Homo sapien
tcaggggccgctttagtggaagaca

SEQ ID NO: 373269 - DNA, 25 bp, Homo sapien
tggttagtggtcctcgcctttcctc

SEQ ID NO: 373270 - DNA, 25 bp, Homo sapien
cttttccattaatgcaggggtggtc

SEQ ID NO: 373271 - DNA, 25 bp, Homo sapien
aattttagtgtctgttggttagtgg

SEQ ID NO: 373272 - DNA, 25 bp, Homo sapien
gggcagaggttctgccttcctcgga

SEQ ID NO: 373273 - DNA, 25 bp, Homo sapien
ttctgccttcctcggattctgggat

SEQ ID NO: 373274 - DNA, 25 bp, Homo sapien
cagaggttctgccttcctcggattc

SEQ ID NO: 373275 - DNA, 25 bp, Homo sapien
gggtcttgacgttatggctttggga

SEQ ID NO: 373276 - DNA, 25 bp, Homo sapien
ggattattgtagtggccctttgact

SEQ ID NO: 373277 - DNA, 25 bp, Homo sapien
ctggattattgtagtggccctttga

SEQ ID NO: 373278 - DNA, 25 bp, Homo sapien
gccctttgacttttgtgctgatgat

SEQ ID NO: 373279 - DNA, 25 bp, Homo sapien
cctttgacttttgtgctgatgatag

SEQ ID NO: 373280 - DNA, 25 bp, Homo sapien
tcagatagacattactcagaatttc

SEQ ID NO: 373281 - DNA, 25 bp, Homo sapien
gcttggagcaatatgctgctgtatt

SEQ ID NO: 373282 - DNA, 25 bp, Homo sapien
tgtgcatttgaacttagttgcttgg

SEQ ID NO: 373283 - DNA, 25 bp, Homo sapien
ctgctgtatttcttgattgtggaaa

SEQ ID NO: 373284 - DNA, 25 bp, Homo sapien
taatcgaagtttcacatcaaggagc

SEQ ID NO: 373285 - DNA, 25 bp, Homo sapien
taatttacgtaatcgaagtttcaca

SEQ ID NO: 373286 - DNA, 25 bp, Homo sapien
tacgtaatcgaagtttcacatcaag

SEQ ID NO: 373287 - DNA, 25 bp, Homo sapien
gaagtttcacatcaaggagcaacat

SEQ ID NO: 373288 - DNA, 25 bp, Homo sapien
taatggaatgtttatcagatttaga

SEQ ID NO: 373289 - DNA, 25 bp, Homo sapien
ctataatggaatgtttatcagattt

SEQ ID NO: 373290 - DNA, 25 bp, Homo sapien
tggaatgtttatcagatttagacaa

SEQ ID NO: 373291 - DNA, 25 bp, Homo sapien
aatggaatgtttatcagatttagac

SEQ ID NO: 373292 - DNA, 25 bp, Homo sapien
cagtatcagttttcttgcttccttt

SEQ ID NO: 373293 - DNA, 25 bp, Homo sapien
cagttttcttgcttcctttccactc

SEQ ID NO: 373294 - DNA, 25 bp, Homo sapien
tcttgcttcctttccactccggttc

SEQ ID NO: 373295 - DNA, 25 bp, Homo sapien
ttgcttcctttccactccggttctg

SEQ ID NO: 373296 - DNA, 25 bp, Homo sapien
aggtcttctgcatagaaattctcac

SEQ ID NO: 373297 - DNA, 25 bp, Homo sapien
tgattgtgttcagggcaaggtcttc

SEQ ID NO: 373298 - DNA, 25 bp, Homo sapien
caaggtcttctgcatagaaattctc

SEQ ID NO: 373299 - DNA, 25 bp, Homo sapien
ctttgattgtgttcagggcaaggtc

SEQ ID NO: 373300 - DNA, 25 bp, Homo sapien
tatctggtgtccctgtgtcttctcc

SEQ ID NO: 373301 - DNA, 25 bp, Homo sapien
tcaaatttatctggtgtccctgtgt

SEQ ID NO: 373302 - DNA, 25 bp, Homo sapien
cttcaaatttatctggtgtccctgt

SEQ ID NO: 373303 - DNA, 25 bp, Homo sapien
atttatctggtgtccctgtgtcttc

SEQ ID NO: 373304 - DNA, 25 bp, Homo sapien
tcatcactccacagtgtaaaagagt

SEQ ID NO: 373305 - DNA, 25 bp, Homo sapien
gagtgttcaaggcttattactgcaa

SEQ ID NO: 373306 - DNA, 25 bp, Homo sapien
gactttaaccaggtccattacactg

SEQ ID NO: 373307 - DNA, 25 bp, Homo sapien
tactgcaattgcaaaggcttgtgga

SEQ ID NO: 373308 - DNA, 25 bp, Homo sapien
aatattctatggtttgaaagtttat

SEQ ID NO: 373309 - DNA, 25 bp, Homo sapien
cactgaggaattttgagagcttgat

SEQ ID NO: 373310 - DNA, 25 bp, Homo sapien
ttttgagagcttgatcctgattctt

SEQ ID NO: 373311 - DNA, 25 bp, Homo sapien
cttcaggtcgtggagaaatattcta

SEQ ID NO: 373312 - DNA, 25 bp, Homo sapien
tctgtagagtttacagaacctggac

SEQ ID NO: 373313 - DNA, 25 bp, Homo sapien
tctgcggggaattgatctgataaga

SEQ ID NO: 373314 - DNA, 25 bp, Homo sapien
tcattcttgtctcacgtctgtagag

SEQ ID NO: 373315 - DNA, 25 bp, Homo sapien
caggctttagccttctgcggggaat

SEQ ID NO: 373316 - DNA, 25 bp, Homo sapien
cagggtgagtggattcttgaatgac

SEQ ID NO: 373317 - DNA, 25 bp, Homo sapien
cattcatctgttctaagcagggtga

SEQ ID NO: 373318 - DNA, 25 bp, Homo sapien
tggtcagtgatagaattggtccctc

SEQ ID NO: 373319 - DNA, 25 bp, Homo sapien
tttcttgatccaatccagtgccttc

SEQ ID NO: 373320 - DNA, 25 bp, Homo sapien
gtactgcatgcatggcatcaaaggc

SEQ ID NO: 373321 - DNA, 25 bp, Homo sapien
tcaaaggcatcatcagtttcataca

SEQ ID NO: 373322 - DNA, 25 bp, Homo sapien
tttcatttttgtctggtggagtact

SEQ ID NO: 373323 - DNA, 25 bp, Homo sapien
tcatttttgtctggtggagtactgc

SEQ ID NO: 373324 - DNA, 25 bp, Homo sapien
taatcagtgcatttatgcctaatcc

SEQ ID NO: 373325 - DNA, 25 bp, Homo sapien
cagtgcatttatgcctaatcctaga

SEQ ID NO: 373326 - DNA, 25 bp, Homo sapien
ccagttcaatatctgtggttaggga

SEQ ID NO: 373327 - DNA, 25 bp, Homo sapien
cctggaataatcagtgcatttatgc

SEQ ID NO: 373328 - DNA, 25 bp, Homo sapien
ttacagtaattcaggacatgtaaat

SEQ ID NO: 373329 - DNA, 25 bp, Homo sapien
gtaattcaggacatgtaaatatatc

SEQ ID NO: 373330 - DNA, 25 bp, Homo sapien
cagtaattcaggacatgtaaatata

SEQ ID NO: 373331 - DNA, 25 bp, Homo sapien
tacagtaattcaggacatgtaaata

SEQ ID NO: 373332 - DNA, 25 bp, Homo sapien
cctggaaaaccttttttctctgatg

SEQ ID NO: 373333 - DNA, 25 bp, Homo sapien
gcctgctttccctttgtctagatgc

SEQ ID NO: 373334 - DNA, 25 bp, Homo sapien
ctagatgcttgttctctggatattt

SEQ ID NO: 373335 - DNA, 25 bp, Homo sapien
gctttccctttgtctagatgcttgt

SEQ ID NO: 373336 - DNA, 25 bp, Homo sapien
gaaatatatgttttcccagcagttt

SEQ ID NO: 373337 - DNA, 25 bp, Homo sapien
cttagaaatatatgttttcccagca

SEQ ID NO: 373338 - DNA, 25 bp, Homo sapien
tagaaatatatgttttcccagcagt

SEQ ID NO: 373339 - DNA, 25 bp, Homo sapien
ggtgaacttagaaatatatgttttc

SEQ ID NO: 373340 - DNA, 25 bp, Homo sapien
gcagaaatgctacatcaggatattc

SEQ ID NO: 373341 - DNA, 25 bp, Homo sapien
tacttgtggctcttgtgaaaatatt

SEQ ID NO: 373342 - DNA, 25 bp, Homo sapien
tcataatcattacttgtggctcttg

SEQ ID NO: 373343 - DNA, 25 bp, Homo sapien
caaatggtcttctattgccttccca

SEQ ID NO: 373344 - DNA, 25 bp, Homo sapien
ttgaatctgactgaagtgccccatc

SEQ ID NO: 373345 - DNA, 25 bp, Homo sapien
ctgaagtgccccatcttcaaactca

SEQ ID NO: 373346 - DNA, 25 bp, Homo sapien
gatgaaactgaaagggattttgttc

SEQ ID NO: 373347 - DNA, 25 bp, Homo sapien
gcagcattccagaagtaaagggttg

SEQ ID NO: 373348 - DNA, 25 bp, Homo sapien
ctttgtaacatcatcttgctttgaa

SEQ ID NO: 373349 - DNA, 25 bp, Homo sapien
tctttgaatgactatatttgtggaa

SEQ ID NO: 373350 - DNA, 25 bp, Homo sapien
tttgaatgactatatttgtggaagt

SEQ ID NO: 373351 - DNA, 25 bp, Homo sapien
ctttgaatgactatatttgtggaag

SEQ ID NO: 373352 - DNA, 25 bp, Homo sapien
agttctctaattctccggtccctag

SEQ ID NO: 373353 - DNA, 25 bp, Homo sapien
tcaggtgccagcaatgttggagtgg

SEQ ID NO: 373354 - DNA, 25 bp, Homo sapien
tctaattctccggtccctagatgtc

SEQ ID NO: 373355 - DNA, 25 bp, Homo sapien
ttctctaattctccggtccctagat

SEQ ID NO: 373356 - DNA, 25 bp, Homo sapien
tactagttttctctaaggttcaatg

SEQ ID NO: 373357 - DNA, 25 bp, Homo sapien
ttttggtgttaatctaatctagctg

SEQ ID NO: 373358 - DNA, 25 bp, Homo sapien
ctgggtctcaatttactctattatc

SEQ ID NO: 373359 - DNA, 25 bp, Homo sapien
tctaatctagctgtattgatcttgt

SEQ ID NO: 373360 - DNA, 25 bp, Homo sapien
gcattgccttgacaccctggatccc

SEQ ID NO: 373361 - DNA, 25 bp, Homo sapien
ttgacaccctggatccctactggct

SEQ ID NO: 373362 - DNA, 25 bp, Homo sapien
cctggatccctactggcttgcatca

SEQ ID NO: 373363 - DNA, 25 bp, Homo sapien
accctggatccctactggcttgcat

SEQ ID NO: 373364 - DNA, 25 bp, Homo sapien
taatgtgattaacatagtccccaga

SEQ ID NO: 373365 - DNA, 25 bp, Homo sapien
tttataatgtgattaacatagtccc

SEQ ID NO: 373366 - DNA, 25 bp, Homo sapien
taacatagtccccagattcctgact

SEQ ID NO: 373367 - DNA, 25 bp, Homo sapien
gtgattaacatagtccccagattcc

SEQ ID NO: 373368 - DNA, 25 bp, Homo sapien
tgaatatcggattaggcaagaagga

SEQ ID NO: 373369 - DNA, 25 bp, Homo sapien
aggctctgaatatcggattaggcaa

SEQ ID NO: 373370 - DNA, 25 bp, Homo sapien
ggctctgaatatcggattaggcaag

SEQ ID NO: 373371 - DNA, 25 bp, Homo sapien
tctgaatatcggattaggcaagaag

SEQ ID NO: 373372 - DNA, 25 bp, Homo sapien
taacaggcatggaaatgtcatcctc

SEQ ID NO: 373373 - DNA, 25 bp, Homo sapien
actcggcctccactttcacatcttg

SEQ ID NO: 373374 - DNA, 25 bp, Homo sapien
gataataatactttcttctgaagca

SEQ ID NO: 373375 - DNA, 25 bp, Homo sapien
gagtcatggtcagactcatgacagg

SEQ ID NO: 373376 - DNA, 25 bp, Homo sapien
cactccatcgttctatagcccattg

SEQ ID NO: 373377 - DNA, 25 bp, Homo sapien
aatgcaatgagattttgagtgtagc

SEQ ID NO: 373378 - DNA, 25 bp, Homo sapien
gcttcagtgaggcagcaattatgcc

SEQ ID NO: 373379 - DNA, 25 bp, Homo sapien
gagtgtagcagtttcaatcctgtta

SEQ ID NO: 373380 - DNA, 25 bp, Homo sapien
gttcatgaatcgcttcctcctgctc

SEQ ID NO: 373381 - DNA, 25 bp, Homo sapien
tcctgctcttgcaaattcagtcctg

SEQ ID NO: 373382 - DNA, 25 bp, Homo sapien
gctgttcatgaatcgcttcctcctg

SEQ ID NO: 373383 - DNA, 25 bp, Homo sapien
gagctgctgttcatgaatcgcttcc

SEQ ID NO: 373384 - DNA, 25 bp, Homo sapien
gagaactgtgacaaatgaaaagtgt

SEQ ID NO: 373385 - DNA, 25 bp, Homo sapien
taatgagactttcagatctaggctc

SEQ ID NO: 373386 - DNA, 25 bp, Homo sapien
tgaaaagtgtttgatgggattggat

SEQ ID NO: 373387 - DNA, 25 bp, Homo sapien
tgggattggatatccataacaattc

SEQ ID NO: 373388 - DNA, 25 bp, Homo sapien
tgttcgtcttttcgaagcccagaaa

SEQ ID NO: 373389 - DNA, 25 bp, Homo sapien
ggctcattttttccactgcgttttg

SEQ ID NO: 373390 - DNA, 25 bp, Homo sapien
tcgtcttttcgaagcccagaaaggc

SEQ ID NO: 373391 - DNA, 25 bp, Homo sapien
tctttgttcgtcttttcgaagccca

SEQ ID NO: 373392 - DNA, 25 bp, Homo sapien
cctgaattctgttgcaatcagatga

SEQ ID NO: 373393 - DNA, 25 bp, Homo sapien
ctgaattctgttgcaatcagatgag

SEQ ID NO: 373394 - DNA, 25 bp, Homo sapien
ccagagtgagtgtcagcagaatagg

SEQ ID NO: 373395 - DNA, 25 bp, Homo sapien
gcactaaaagcacagcctagaggac

SEQ ID NO: 373396 - DNA, 25 bp, Homo sapien
gctgtcttcttgtctatacattatc

SEQ ID NO: 373397 - DNA, 25 bp, Homo sapien
tctatacattatcattggaagtttg

SEQ ID NO: 373398 - DNA, 25 bp, Homo sapien
tgagccacgatactgccactggatt

SEQ ID NO: 373399 - DNA, 25 bp, Homo sapien
agccacgatactgccactggattcc

SEQ ID NO: 373400 - DNA, 25 bp, Homo sapien
gtggttggatggcatgagagtggca

SEQ ID NO: 373401 - DNA, 25 bp, Homo sapien
ctgaggtggttggatggcatgagag

SEQ ID NO: 373402 - DNA, 25 bp, Homo sapien
gcagagcgcctttgtctccgctgga

SEQ ID NO: 373403 - DNA, 25 bp, Homo sapien
gcgcctttgtctccgctggagtcca

SEQ ID NO: 373404 - DNA, 25 bp, Homo sapien
cacactgcgcagagcgcctttgtct

SEQ ID NO: 373405 - DNA, 25 bp, Homo sapien
ctttgtctccgctggagtccacgac

SEQ ID NO: 373406 - DNA, 25 bp, Homo sapien
cagccaccatactggctccttaaag

SEQ ID NO: 373407 - DNA, 25 bp, Homo sapien
catactggctccttaaagctgctgg

SEQ ID NO: 373408 - DNA, 25 bp, Homo sapien
actggctccttaaagctgctggtac

SEQ ID NO: 373409 - DNA, 25 bp, Homo sapien
ccaccatactggctccttaaagctg

SEQ ID NO: 373410 - DNA, 25 bp, Homo sapien
gctgttaagaagtacagtctggcag

SEQ ID NO: 373411 - DNA, 25 bp, Homo sapien
catcctgcctgagcaaacacctgtt

SEQ ID NO: 373412 - DNA, 25 bp, Homo sapien
cagtactcctgtgaatgaatagtcc

SEQ ID NO: 373413 - DNA, 25 bp, Homo sapien
caactgttctactgtgtaactgctc

SEQ ID NO: 373414 - DNA, 25 bp, Homo sapien
ttgcagctccaagcgcctagcttca

SEQ ID NO: 373415 - DNA, 25 bp, Homo sapien
tccaagcgcctagcttcactaatag

SEQ ID NO: 373416 - DNA, 25 bp, Homo sapien
agctccaagcgcctagcttcactaa

SEQ ID NO: 373417 - DNA, 25 bp, Homo sapien
cacttgcagctccaagcgcctagct

SEQ ID NO: 373418 - DNA, 25 bp, Homo sapien
ataattccaggcaataaatatcgaa

SEQ ID NO: 373419 - DNA, 25 bp, Homo sapien
ttttaggaataattccaggcaataa

SEQ ID NO: 373420 - DNA, 25 bp, Homo sapien
tccaggcaataaatatcgaacattc

SEQ ID NO: 373421 - DNA, 25 bp, Homo sapien
aattccaggcaataaatatcgaaca

SEQ ID NO: 373422 - DNA, 25 bp, Homo sapien
gtacggtgagaggagcctctcaata

SEQ ID NO: 373423 - DNA, 25 bp, Homo sapien
cagctctgagagacaaatctgttaa

SEQ ID NO: 373424 - DNA, 25 bp, Homo sapien
ctgaagactttggtattcacttgga

SEQ ID NO: 373425 - DNA, 25 bp, Homo sapien
tttaggaggcatccaatggcttttt

SEQ ID NO: 373426 - DNA, 25 bp, Homo sapien
cagcagtcctgaggtggcaaaagat

SEQ ID NO: 373427 - DNA, 25 bp, Homo sapien
tggtagttcgattttgaaagtccaa

SEQ ID NO: 373428 - DNA, 25 bp, Homo sapien
caaggaccaacgtgaaactcagaca

SEQ ID NO: 373429 - DNA, 25 bp, Homo sapien
tctaggctaatttggtacacaatgt

SEQ ID NO: 373430 - DNA, 25 bp, Homo sapien
tgtgtcccaatgtgtaatccagtga

SEQ ID NO: 373431 - DNA, 25 bp, Homo sapien
tatcaccttctcctaggtctgcaga

SEQ ID NO: 373432 - DNA, 25 bp, Homo sapien
ggcctagagcaattgaacagtttta

SEQ ID NO: 373433 - DNA, 25 bp, Homo sapien
cctagagcaattgaacagttttaat

SEQ ID NO: 373434 - DNA, 25 bp, Homo sapien
gtgtctaagaattaccaagatttga

SEQ ID NO: 373435 - DNA, 25 bp, Homo sapien
agaatcgcttcaatccttgaggtgg

SEQ ID NO: 373436 - DNA, 25 bp, Homo sapien
gagaatcgcttcaatccttgaggtg

SEQ ID NO: 373437 - DNA, 25 bp, Homo sapien
tgagaatcgcttcaatccttgaggt

SEQ ID NO: 373438 - DNA, 25 bp, Homo sapien
ggaagtggcttctagatgttaaaca

SEQ ID NO: 373439 - DNA, 25 bp, Homo sapien
gatatacttatgctcttgctgtaaa

SEQ ID NO: 373440 - DNA, 25 bp, Homo sapien
actcattgcggtagtagtttttgac

SEQ ID NO: 373441 - DNA, 25 bp, Homo sapien
taatcatctgacttcccactcattg

SEQ ID NO: 373442 - DNA, 25 bp, Homo sapien
ctgctgatttccttgtcacttttag

SEQ ID NO: 373443 - DNA, 25 bp, Homo sapien
tccagttccacgtgtgtgctgctga

SEQ ID NO: 373444 - DNA, 25 bp, Homo sapien
cctccagttccacgtgtgtgctgct

SEQ ID NO: 373445 - DNA, 25 bp, Homo sapien
ccagttccacgtgtgtgctgctgat

SEQ ID NO: 373446 - DNA, 25 bp, Homo sapien
ctttcactcctgtccgtagtagagt

SEQ ID NO: 373447 - DNA, 25 bp, Homo sapien
acagaaccctccaaagaatacatcc

SEQ ID NO: 373448 - DNA, 25 bp, Homo sapien
agcacagaaccctccaaagaataca

SEQ ID NO: 373449 - DNA, 25 bp, Homo sapien
tgtccgtagtagagtctgacttctg

SEQ ID NO: 373450 - DNA, 25 bp, Homo sapien
aggcataagttctatttctgtgagc

SEQ ID NO: 373451 - DNA, 25 bp, Homo sapien
gcattgcttgttgtctaatggaatc

SEQ ID NO: 373452 - DNA, 25 bp, Homo sapien
ttgttgtctaatggaatcagagcct

SEQ ID NO: 373453 - DNA, 25 bp, Homo sapien
tcagtaaggtttgcggccatgtgct

SEQ ID NO: 373454 - DNA, 25 bp, Homo sapien
gactttgatctgtttctcatcagat

SEQ ID NO: 373455 - DNA, 25 bp, Homo sapien
ttgatctgtttctcatcagattcag

SEQ ID NO: 373456 - DNA, 25 bp, Homo sapien
cttgactttgatctgtttctcatca

SEQ ID NO: 373457 - DNA, 25 bp, Homo sapien
ctttgatctgtttctcatcagattc

SEQ ID NO: 373458 - DNA, 25 bp, Homo sapien
cgctgagctccaccaatactgttct

SEQ ID NO: 373459 - DNA, 25 bp, Homo sapien
cttgttggctctgagtgagcgtgca

SEQ ID NO: 373460 - DNA, 25 bp, Homo sapien
acagcactgactcataccaccttgt

SEQ ID NO: 373461 - DNA, 25 bp, Homo sapien
gctgagctccaccaatactgttctg

SEQ ID NO: 373462 - DNA, 25 bp, Homo sapien
ctctgacattttggcccctttccaa

SEQ ID NO: 373463 - DNA, 25 bp, Homo sapien
tctgtatggcctttctgctcaacaa

SEQ ID NO: 373464 - DNA, 25 bp, Homo sapien
tcaagcttctattttcagcatccat

SEQ ID NO: 373465 - DNA, 25 bp, Homo sapien
ccacaatataagttggagtggattc

SEQ ID NO: 373466 - DNA, 25 bp, Homo sapien
cagcagtgttcatggtatccaacag

SEQ ID NO: 373467 - DNA, 25 bp, Homo sapien
tatccaacaggcaagttaccaaagt

SEQ ID NO: 373468 - DNA, 25 bp, Homo sapien
tagcgttgtgcatataagcgtgtgt

SEQ ID NO: 373469 - DNA, 25 bp, Homo sapien
tgagaaatggaacattgcacgtgac

SEQ ID NO: 373470 - DNA, 25 bp, Homo sapien
tgctgtattttacttcccttttcat

SEQ ID NO: 373471 - DNA, 25 bp, Homo sapien
cattgctgtattttacttccctttt

SEQ ID NO: 373472 - DNA, 25 bp, Homo sapien
tattgtcattgctgtattttacttc

SEQ ID NO: 373473 - DNA, 25 bp, Homo sapien
ttgtcattgctgtattttacttccc

SEQ ID NO: 373474 - DNA, 25 bp, Homo sapien
atccttactgtgactttctatccct

SEQ ID NO: 373475 - DNA, 25 bp, Homo sapien
gccatccttactgtgactttctatc

SEQ ID NO: 373476 - DNA, 25 bp, Homo sapien
ccatccttactgtgactttctatcc

SEQ ID NO: 373477 - DNA, 25 bp, Homo sapien
catccttactgtgactttctatccc

SEQ ID NO: 373478 - DNA, 25 bp, Homo sapien
tggccaacaggaaaagtaccaatac

SEQ ID NO: 373479 - DNA, 25 bp, Homo sapien
gccaacaggaaaagtaccaatacca

SEQ ID NO: 373480 - DNA, 25 bp, Homo sapien
cttggccaacaggaaaagtaccaat

SEQ ID NO: 373481 - DNA, 25 bp, Homo sapien
caggaaaagtaccaataccaccaag

SEQ ID NO: 373482 - DNA, 25 bp, Homo sapien
ccaggtttgagaacaccagtctcca

SEQ ID NO: 373483 - DNA, 25 bp, Homo sapien
accaggtttgagaacaccagtctcc

SEQ ID NO: 373484 - DNA, 25 bp, Homo sapien
actttcttgatattgaggcccacat

SEQ ID NO: 373485 - DNA, 25 bp, Homo sapien
cagtgctgaactggcccggatggtt

SEQ ID NO: 373486 - DNA, 25 bp, Homo sapien
tagccagtgctgaactggcccggat

SEQ ID NO: 373487 - DNA, 25 bp, Homo sapien
catagccagtgctgaactggcccgg

SEQ ID NO: 373488 - DNA, 25 bp, Homo sapien
ggcatagccagtgctgaactggccc

SEQ ID NO: 373489 - DNA, 25 bp, Homo sapien
aatttagggtcatcttccagctttt

SEQ ID NO: 373490 - DNA, 25 bp, Homo sapien
ttagggtcatcttccagctttttac

SEQ ID NO: 373491 - DNA, 25 bp, Homo sapien
gaatttagggtcatcttccagcttt

SEQ ID NO: 373492 - DNA, 25 bp, Homo sapien
cttcaagaatttagggtcatcttcc

SEQ ID NO: 373493 - DNA, 25 bp, Homo sapien
catgtgctcgccaagaaccatatca

SEQ ID NO: 373494 - DNA, 25 bp, Homo sapien
tctcaacacacatgtgctcgccaag

SEQ ID NO: 373495 - DNA, 25 bp, Homo sapien
acacacatgtgctcgccaagaacca

SEQ ID NO: 373496 - DNA, 25 bp, Homo sapien
tcaacacacatgtgctcgccaagaa

SEQ ID NO: 373497 - DNA, 25 bp, Homo sapien
taatactttaaacctgccacaccca

SEQ ID NO: 373498 - DNA, 25 bp, Homo sapien
ccagctggtaactctactgcctgga

SEQ ID NO: 373499 - DNA, 25 bp, Homo sapien
cagctggtaactctactgcctggaa

SEQ ID NO: 373500 - DNA, 25 bp, Homo sapien
agacaagacaatttgagggggagat

SEQ ID NO: 373501 - DNA, 25 bp, Homo sapien
gtaactccataaatcaatacagatg

SEQ ID NO: 373502 - DNA, 25 bp, Homo sapien
ttttgctaaactgttgatacgttta

SEQ ID NO: 373503 - DNA, 25 bp, Homo sapien
cttcctgcattggtttagtttttgc

SEQ ID NO: 373504 - DNA, 25 bp, Homo sapien
gatacgtttatacaagtaactccat

SEQ ID NO: 373505 - DNA, 25 bp, Homo sapien
caaaaactgagattccggctggagc

SEQ ID NO: 373506 - DNA, 25 bp, Homo sapien
gaaggtagagattttcctcctagac

SEQ ID NO: 373507 - DNA, 25 bp, Homo sapien
caagtccagcaaagggaagcgtcat

SEQ ID NO: 373508 - DNA, 25 bp, Homo sapien
caaagcgaccaaagcataaatcccc

SEQ ID NO: 373509 - DNA, 25 bp, Homo sapien
ccaggcttttgaggaagcctaaaag

SEQ ID NO: 373510 - DNA, 25 bp, Homo sapien
gataccccaactccaggcttttgag

SEQ ID NO: 373511 - DNA, 25 bp, Homo sapien
agcctaaaaggttgtcttccactat

SEQ ID NO: 373512 - DNA, 25 bp, Homo sapien
tgtcttccactatagcgtctgcttt

SEQ ID NO: 373513 - DNA, 25 bp, Homo sapien
caaaaactgtgggtctaacttgcaa

SEQ ID NO: 373514 - DNA, 25 bp, Homo sapien
tatttcagatatggaggaaaacatt

SEQ ID NO: 373515 - DNA, 25 bp, Homo sapien
gaactcataggattaataaactagc

SEQ ID NO: 373516 - DNA, 25 bp, Homo sapien
aactagcactagtgttaaagtagca

SEQ ID NO: 373517 - DNA, 25 bp, Homo sapien
ggtgtgcagatgtgttgaagagtgg

SEQ ID NO: 373518 - DNA, 25 bp, Homo sapien
gaggtgtgcagatgtgttgaagagt

SEQ ID NO: 373519 - DNA, 25 bp, Homo sapien
aaagaggtgtgcagatgtgttgaag

SEQ ID NO: 373520 - DNA, 25 bp, Homo sapien
aagaggtgtgcagatgtgttgaaga

SEQ ID NO: 373521 - DNA, 25 bp, Homo sapien
ttggattccgacagcaagaccagtg

SEQ ID NO: 373522 - DNA, 25 bp, Homo sapien
atgttggattccgacagcaagacca

SEQ ID NO: 373523 - DNA, 25 bp, Homo sapien
ttccgacagcaagaccagtgggaaa

SEQ ID NO: 373524 - DNA, 25 bp, Homo sapien
ggattccgacagcaagaccagtggg

SEQ ID NO: 373525 - DNA, 25 bp, Homo sapien
taaaatgctgattcttgccaaaggc

SEQ ID NO: 373526 - DNA, 25 bp, Homo sapien
tctatgccagcatcccagataactg

SEQ ID NO: 373527 - DNA, 25 bp, Homo sapien
actactaggataatgtctgtgctga

SEQ ID NO: 373528 - DNA, 25 bp, Homo sapien
cttcagaagcccgaaaaatactgac

SEQ ID NO: 373529 - DNA, 25 bp, Homo sapien
tgaggagcaagaagagccagtgtga

SEQ ID NO: 373530 - DNA, 25 bp, Homo sapien
agcaagaagagccagtgtgagtccc

SEQ ID NO: 373531 - DNA, 25 bp, Homo sapien
aagaagagccagtgtgagtcccaaa

SEQ ID NO: 373532 - DNA, 25 bp, Homo sapien
agtccaatattccagggcaggaagg

SEQ ID NO: 373533 - DNA, 25 bp, Homo sapien
gaatgcaaaccttaagatttcagga

SEQ ID NO: 373534 - DNA, 25 bp, Homo sapien
gtgctgggatgatgctacacacttt

SEQ ID NO: 373535 - DNA, 25 bp, Homo sapien
tcaatggtttaacaatacggtctcc

SEQ ID NO: 373536 - DNA, 25 bp, Homo sapien
tagcagcccaggacttcaatggttt

SEQ ID NO: 373537 - DNA, 25 bp, Homo sapien
agaagggtattgtgcactgagagct

SEQ ID NO: 373538 - DNA, 25 bp, Homo sapien
ctgagagctcgtgggccaatgaata

SEQ ID NO: 373539 - DNA, 25 bp, Homo sapien
tattgtgcactgagagctcgtgggc

SEQ ID NO: 373540 - DNA, 25 bp, Homo sapien
tgtgcactgagagctcgtgggccaa

SEQ ID NO: 373541 - DNA, 25 bp, Homo sapien
gcatacatactttttgcgaataagt

SEQ ID NO: 373542 - DNA, 25 bp, Homo sapien
tgcactagtctctctttgcatacat

SEQ ID NO: 373543 - DNA, 25 bp, Homo sapien
ggacttctaatatctcctgcagaac

SEQ ID NO: 373544 - DNA, 25 bp, Homo sapien
tgatatagatccaaccttctaaact

SEQ ID NO: 373545 - DNA, 25 bp, Homo sapien
gctgacagctttctgcatatatttc

SEQ ID NO: 373546 - DNA, 25 bp, Homo sapien
ggctgacagctttctgcatatattt

SEQ ID NO: 373547 - DNA, 25 bp, Homo sapien
cgtagccatactctaaatgaaccaa

SEQ ID NO: 373548 - DNA, 25 bp, Homo sapien
gggtctctttctctcgtagccatac

SEQ ID NO: 373549 - DNA, 25 bp, Homo sapien
gctctctgccatatatgatcacctt

SEQ ID NO: 373550 - DNA, 25 bp, Homo sapien
tattctcctttctcatgacaatacg

SEQ ID NO: 373551 - DNA, 25 bp, Homo sapien
tgtcttttggaaagagataattcat

SEQ ID NO: 373552 - DNA, 25 bp, Homo sapien
ttcatgcatttttcttctaagtgaa

SEQ ID NO: 373553 - DNA, 25 bp, Homo sapien
tttggaaagagataattcatgcatt

SEQ ID NO: 373554 - DNA, 25 bp, Homo sapien
tttcttctaagtgaaatatcaccat

SEQ ID NO: 373555 - DNA, 25 bp, Homo sapien
tgttgtagacgatttctttacttgg

SEQ ID NO: 373556 - DNA, 25 bp, Homo sapien
tgttcccaggccacatttcaggctt

SEQ ID NO: 373557 - DNA, 25 bp, Homo sapien
cagtcccttggaaatagtattttag

SEQ ID NO: 373558 - DNA, 25 bp, Homo sapien
atcagggccacccatgttcccaggc

SEQ ID NO: 373559 - DNA, 25 bp, Homo sapien
gaagaatgtcaagctgctgatgacg

SEQ ID NO: 373560 - DNA, 25 bp, Homo sapien
cgatagagaattacacaaaaaagtg

SEQ ID NO: 373561 - DNA, 25 bp, Homo sapien
tactctgagcttcacccacacatgt

SEQ ID NO: 373562 - DNA, 25 bp, Homo sapien
tatagccaaaatgcaaggacctttt

SEQ ID NO: 373563 - DNA, 25 bp, Homo sapien
tacctctacacttgctccagagaaa

SEQ ID NO: 373564 - DNA, 25 bp, Homo sapien
acttagggctataactcaagattcc

SEQ ID NO: 373565 - DNA, 25 bp, Homo sapien
ctgacaattccaaacttagggctat

SEQ ID NO: 373566 - DNA, 25 bp, Homo sapien
caagattccatcaataatgtgcagt

SEQ ID NO: 373567 - DNA, 25 bp, Homo sapien
aagccctgagattaagctcctcaga

SEQ ID NO: 373568 - DNA, 25 bp, Homo sapien
tattcttgacatagagccctggctg

SEQ ID NO: 373569 - DNA, 25 bp, Homo sapien
cacatcaagaatattcttctggaag

SEQ ID NO: 373570 - DNA, 25 bp, Homo sapien
agcattttccccgacaggctgatcc

SEQ ID NO: 373571 - DNA, 25 bp, Homo sapien
gaatttcggatatcgacacttggtt

SEQ ID NO: 373572 - DNA, 25 bp, Homo sapien
ttggactcgtcaagttttcagaaag

SEQ ID NO: 373573 - DNA, 25 bp, Homo sapien
agcaggtctcagaatttcggatatc

SEQ ID NO: 373574 - DNA, 25 bp, Homo sapien
tttcttggactcgtcaagttttcag

SEQ ID NO: 373575 - DNA, 25 bp, Homo sapien
cttgttgcatattcgtcttgtttat

SEQ ID NO: 373576 - DNA, 25 bp, Homo sapien
gcatattcgtcttgtttatgagtag

SEQ ID NO: 373577 - DNA, 25 bp, Homo sapien
cgtcttgtttatgagtagtgataca

SEQ ID NO: 373578 - DNA, 25 bp, Homo sapien
tattcgtcttgtttatgagtagtga

SEQ ID NO: 373579 - DNA, 25 bp, Homo sapien
acagtgttgctatgtgggcttctcc

SEQ ID NO: 373580 - DNA, 25 bp, Homo sapien
gaagtcctcattgctgtggcatcct

SEQ ID NO: 373581 - DNA, 25 bp, Homo sapien
tcgtggcatcattgggaagtcctca

SEQ ID NO: 373582 - DNA, 25 bp, Homo sapien
gggcttctcctaaattctcagtcat

SEQ ID NO: 373583 - DNA, 25 bp, Homo sapien
tcctcacctgtcaaagtcttttgct

SEQ ID NO: 373584 - DNA, 25 bp, Homo sapien
tactgaacctcgacatttctcctca

SEQ ID NO: 373585 - DNA, 25 bp, Homo sapien
tttggttgtgtcatcccttcctgcc

SEQ ID NO: 373586 - DNA, 25 bp, Homo sapien
ctgcccattatcaccctttactgaa

SEQ ID NO: 373587 - DNA, 25 bp, Homo sapien
ttcaatgtgtttcccgttggcatac

SEQ ID NO: 373588 - DNA, 25 bp, Homo sapien
tggaatttcaatgtgtttcccgttg

SEQ ID NO: 373589 - DNA, 25 bp, Homo sapien
aatttcaatgtgtttcccgttggca

SEQ ID NO: 373590 - DNA, 25 bp, Homo sapien
cttggaatttcaatgtgtttcccgt

SEQ ID NO: 373591 - DNA, 25 bp, Homo sapien
caccaacccgatcagtgcaaaataa

SEQ ID NO: 373592 - DNA, 25 bp, Homo sapien
accaccaacccgatcagtgcaaaat

SEQ ID NO: 373593 - DNA, 25 bp, Homo sapien
ccaacccgatcagtgcaaaataaga

SEQ ID NO: 373594 - DNA, 25 bp, Homo sapien
caccaccaccaacccgatcagtgca

SEQ ID NO: 373595 - DNA, 25 bp, Homo sapien
ttattttgtgcgcagttcttctaca

SEQ ID NO: 373596 - DNA, 25 bp, Homo sapien
tattttgtgcgcagttcttctacaa

SEQ ID NO: 373597 - DNA, 25 bp, Homo sapien
cagtacataatagcagaaacctcca

SEQ ID NO: 373598 - DNA, 25 bp, Homo sapien
tacacattgggccagtacataatag

SEQ ID NO: 373599 - DNA, 25 bp, Homo sapien
cattgggccagtacataatagcaga

SEQ ID NO: 373600 - DNA, 25 bp, Homo sapien
tgggccagtacataatagcagaaac

SEQ ID NO: 373601 - DNA, 25 bp, Homo sapien
aagttttcacttgccctgagttagc

SEQ ID NO: 373602 - DNA, 25 bp, Homo sapien
catgtaggtggtatgactattgagg

SEQ ID NO: 373603 - DNA, 25 bp, Homo sapien
gagttagcggctctgctcatgtagg

SEQ ID NO: 373604 - DNA, 25 bp, Homo sapien
taactcaagccttcatcactaaggg

SEQ ID NO: 373605 - DNA, 25 bp, Homo sapien
cattagacagtaacaatagagtcct

SEQ ID NO: 373606 - DNA, 25 bp, Homo sapien
tggccaggaaaatcgaggcaaatct

SEQ ID NO: 373607 - DNA, 25 bp, Homo sapien
ttctctgccatacaagaaggaaagt

SEQ ID NO: 373608 - DNA, 25 bp, Homo sapien
tcaggtggccaggtttagaatgttt

SEQ ID NO: 373609 - DNA, 25 bp, Homo sapien
agacaggacctcctctggactcaga

SEQ ID NO: 373610 - DNA, 25 bp, Homo sapien
gttccagagcagcgcgatattactc

SEQ ID NO: 373611 - DNA, 25 bp, Homo sapien
gctctgcttcctgctatctgcctac

SEQ ID NO: 373612 - DNA, 25 bp, Homo sapien
gagcagcgcgatattactcagagct

SEQ ID NO: 373613 - DNA, 25 bp, Homo sapien
tcatgttcacatactgtttctcttc

SEQ ID NO: 373614 - DNA, 25 bp, Homo sapien
tttcatgttcacatactgtttctct

SEQ ID NO: 373615 - DNA, 25 bp, Homo sapien
catgttcacatactgtttctcttct

SEQ ID NO: 373616 - DNA, 25 bp, Homo sapien
ttttcatgttcacatactgtttctc

SEQ ID NO: 373617 - DNA, 25 bp, Homo sapien
ggatcaactacatagcaggcacact

SEQ ID NO: 373618 - DNA, 25 bp, Homo sapien
gaggagactgggactggctaaatgg

SEQ ID NO: 373619 - DNA, 25 bp, Homo sapien
gcaggcacacttaacaaaaactcca

SEQ ID NO: 373620 - DNA, 25 bp, Homo sapien
caactacatagcaggcacacttaac

SEQ ID NO: 373621 - DNA, 25 bp, Homo sapien
gttctcatcctcaccataagcaaag

SEQ ID NO: 373622 - DNA, 25 bp, Homo sapien
gcttctttggtgtctctaatgaaac

SEQ ID NO: 373623 - DNA, 25 bp, Homo sapien
aaccgtctgttgttcgttctcatcc

SEQ ID NO: 373624 - DNA, 25 bp, Homo sapien
tattggtcatatacttcccttgctt

SEQ ID NO: 373625 - DNA, 25 bp, Homo sapien
ctacagattgatatagaaaaatgga

SEQ ID NO: 373626 - DNA, 25 bp, Homo sapien
tacagattgatatagaaaaatggat

SEQ ID NO: 373627 - DNA, 25 bp, Homo sapien
acagattgatatagaaaaatggatt

SEQ ID NO: 373628 - DNA, 25 bp, Homo sapien
cagattgatatagaaaaatggattt

SEQ ID NO: 373629 - DNA, 25 bp, Homo sapien
gatttctttagcgataatccagaga

SEQ ID NO: 373630 - DNA, 25 bp, Homo sapien
ccctaaggaaaaccagtgagtgttg

SEQ ID NO: 373631 - DNA, 25 bp, Homo sapien
cagagaacaacctggaccctaagga

SEQ ID NO: 373632 - DNA, 25 bp, Homo sapien
ctatttgcatctggtgaagtaacac

SEQ ID NO: 373633 - DNA, 25 bp, Homo sapien
aatcaccagattcttgttcaaacct

SEQ ID NO: 373634 - DNA, 25 bp, Homo sapien
tcaccagattcttgttcaaacctct

SEQ ID NO: 373635 - DNA, 25 bp, Homo sapien
caccagattcttgttcaaacctctg

SEQ ID NO: 373636 - DNA, 25 bp, Homo sapien
aaatcaccagattcttgttcaaacc

SEQ ID NO: 373637 - DNA, 25 bp, Homo sapien
tcagtatctgacatattcttccatt

SEQ ID NO: 373638 - DNA, 25 bp, Homo sapien
ctcagtatctgacatattcttccat

SEQ ID NO: 373639 - DNA, 25 bp, Homo sapien
agtatctgacatattcttccattgg

SEQ ID NO: 373640 - DNA, 25 bp, Homo sapien
cagtatctgacatattcttccattg

SEQ ID NO: 373641 - DNA, 25 bp, Homo sapien
aatgtggtttattggccgatatcgc

SEQ ID NO: 373642 - DNA, 25 bp, Homo sapien
tcatgtagttgaatgcaaaaatgtg

SEQ ID NO: 373643 - DNA, 25 bp, Homo sapien
cgaagactttaatcaacatttcatg

SEQ ID NO: 373644 - DNA, 25 bp, Homo sapien
tctcgaagactttaatcaacatttc

SEQ ID NO: 373645 - DNA, 25 bp, Homo sapien
ttatgatatgaacaatggcaaggcc

SEQ ID NO: 373646 - DNA, 25 bp, Homo sapien
tgtccaagcactgggcatgatagac

SEQ ID NO: 373647 - DNA, 25 bp, Homo sapien
catatgttcgagtcccaacagccag

SEQ ID NO: 373648 - DNA, 25 bp, Homo sapien
aaatgagcctattatggtgggatcc

SEQ ID NO: 373649 - DNA, 25 bp, Homo sapien
ctccaatttatctctagctagtagg

SEQ ID NO: 373650 - DNA, 25 bp, Homo sapien
caatttatctctagctagtaggagt

SEQ ID NO: 373651 - DNA, 25 bp, Homo sapien
cagggctctccaatttatctctagc

SEQ ID NO: 373652 - DNA, 25 bp, Homo sapien
catccgtttcattttactcatgtca

SEQ ID NO: 373653 - DNA, 25 bp, Homo sapien
aaaagcagactctttgagctcttta

SEQ ID NO: 373654 - DNA, 25 bp, Homo sapien
ctgtgcctaaattccacatggaccc

SEQ ID NO: 373655 - DNA, 25 bp, Homo sapien
gcctaaattccacatggacccagaa

SEQ ID NO: 373656 - DNA, 25 bp, Homo sapien
agcagaaggttgaaaaagcagactc

SEQ ID NO: 373657 - DNA, 25 bp, Homo sapien
ttgcacaaactctccatgggatgca

SEQ ID NO: 373658 - DNA, 25 bp, Homo sapien
tgttggaagatgcttgcacaaactc

SEQ ID NO: 373659 - DNA, 25 bp, Homo sapien
ctttgttggaagatgcttgcacaaa

SEQ ID NO: 373660 - DNA, 25 bp, Homo sapien
aagaacactacatctttgttggaag

SEQ ID NO: 373661 - DNA, 25 bp, Homo sapien
attaggtggccaatttggctccctg

SEQ ID NO: 373662 - DNA, 25 bp, Homo sapien
ttcataagtttctgttctgcattgt

SEQ ID NO: 373663 - DNA, 25 bp, Homo sapien
cattgtggtctggtgccattaggtg

SEQ ID NO: 373664 - DNA, 25 bp, Homo sapien
ttctgcattgtggtctggtgccatt

SEQ ID NO: 373665 - DNA, 25 bp, Homo sapien
atagtcaattttgggtgaagagatt

SEQ ID NO: 373666 - DNA, 25 bp, Homo sapien
ttgggtgaagagattgaagcaaaga

SEQ ID NO: 373667 - DNA, 25 bp, Homo sapien
aattttgggtgaagagattgaagca

SEQ ID NO: 373668 - DNA, 25 bp, Homo sapien
gtgaagagattgaagcaaagatcat

SEQ ID NO: 373669 - DNA, 25 bp, Homo sapien
tcaaagcgacattcaaattttcagt

SEQ ID NO: 373670 - DNA, 25 bp, Homo sapien
aggatgatgagggatgcttgattgt

SEQ ID NO: 373671 - DNA, 25 bp, Homo sapien
cttgattgttatcatagttatttcc

SEQ ID NO: 373672 - DNA, 25 bp, Homo sapien
cttcaaagcgacattcaaattttca

SEQ ID NO: 373673 - DNA, 25 bp, Homo sapien
aaagccagaaatccgaaatttgatt

SEQ ID NO: 373674 - DNA, 25 bp, Homo sapien
tctaagtagatgtgcatattcacag

SEQ ID NO: 373675 - DNA, 25 bp, Homo sapien
aaatgatctatgcattctaagtaga

SEQ ID NO: 373676 - DNA, 25 bp, Homo sapien
tattcacagtcacgatttgctggca

SEQ ID NO: 373677 - DNA, 25 bp, Homo sapien
taaatgacttcctgaacgctgacac

SEQ ID NO: 373678 - DNA, 25 bp, Homo sapien
tgacttcctgaacgctgacacctgg

SEQ ID NO: 373679 - DNA, 25 bp, Homo sapien
tcctgaacgctgacacctggggcag

SEQ ID NO: 373680 - DNA, 25 bp, Homo sapien
aatgacttcctgaacgctgacacct

SEQ ID NO: 373681 - DNA, 25 bp, Homo sapien
agaaccaacgaagaccaacttgagg

SEQ ID NO: 373682 - DNA, 25 bp, Homo sapien
acgaagaccaacttgaggagcagca

SEQ ID NO: 373683 - DNA, 25 bp, Homo sapien
accaacgaagaccaacttgaggagc

SEQ ID NO: 373684 - DNA, 25 bp, Homo sapien
caacgaagaccaacttgaggagcag

SEQ ID NO: 373685 - DNA, 25 bp, Homo sapien
ctactacctcttgacaaatacatat

SEQ ID NO: 373686 - DNA, 25 bp, Homo sapien
tcttctactacctcttgacaaatac

SEQ ID NO: 373687 - DNA, 25 bp, Homo sapien
tctactacctcttgacaaatacata

SEQ ID NO: 373688 - DNA, 25 bp, Homo sapien
cttctactacctcttgacaaataca

SEQ ID NO: 373689 - DNA, 25 bp, Homo sapien
aattaccggcaaggagaatttgttg

SEQ ID NO: 373690 - DNA, 25 bp, Homo sapien
tgagctagggaacaggtaattaccg

SEQ ID NO: 373691 - DNA, 25 bp, Homo sapien
tccaggatttgagctagggaacagg

SEQ ID NO: 373692 - DNA, 25 bp, Homo sapien
gaacaggtaattaccggcaaggaga

SEQ ID NO: 373693 - DNA, 25 bp, Homo sapien
cataacatcttgaagtgtcttcatt

SEQ ID NO: 373694 - DNA, 25 bp, Homo sapien
agcataacatcttgaagtgtcttca

SEQ ID NO: 373695 - DNA, 25 bp, Homo sapien
aagcataacatcttgaagtgtcttc

SEQ ID NO: 373696 - DNA, 25 bp, Homo sapien
gaaagcataacatcttgaagtgtct

SEQ ID NO: 373697 - DNA, 25 bp, Homo sapien
tcacttgggatctaacctgagcact

SEQ ID NO: 373698 - DNA, 25 bp, Homo sapien
gaagtggtttgcagttactctggaa

SEQ ID NO: 373699 - DNA, 25 bp, Homo sapien
cttggtgtatccttcttccaggcat

SEQ ID NO: 373700 - DNA, 25 bp, Homo sapien
ctgacatctattggtgccttggtgt

SEQ ID NO: 373701 - DNA, 25 bp, Homo sapien
cctttagtcttggaacagtaagtgg

SEQ ID NO: 373702 - DNA, 25 bp, Homo sapien
ggcttaaaataagttccagagtcag

SEQ ID NO: 373703 - DNA, 25 bp, Homo sapien
gagggattctatgagacacaattgc

SEQ ID NO: 373704 - DNA, 25 bp, Homo sapien
caataagttgtaatgacaggcttca

SEQ ID NO: 373705 - DNA, 25 bp, Homo sapien
gagcttcccatagtagagtgccgat

SEQ ID NO: 373706 - DNA, 25 bp, Homo sapien
catgggtgaaaggaataatagctac

SEQ ID NO: 373707 - DNA, 25 bp, Homo sapien
gaataatagctacagctgttggcat

SEQ ID NO: 373708 - DNA, 25 bp, Homo sapien
tgccgatcatatacacatgggtgaa

SEQ ID NO: 373709 - DNA, 25 bp, Homo sapien
cttcctggtgaggaaagttgcaaag

SEQ ID NO: 373710 - DNA, 25 bp, Homo sapien
agttcattctgcttaagtaaaagac

SEQ ID NO: 373711 - DNA, 25 bp, Homo sapien
agagcaaatgaagccctcaaaagcc

SEQ ID NO: 373712 - DNA, 25 bp, Homo sapien
agttgcaaagttcattctgcttaag

SEQ ID NO: 373713 - DNA, 25 bp, Homo sapien
attttgtaagttctattatagtagc

SEQ ID NO: 373714 - DNA, 25 bp, Homo sapien
ctttctgctaccttccctatcctta

SEQ ID NO: 373715 - DNA, 25 bp, Homo sapien
ctttgggagaaggatatggtgagga

SEQ ID NO: 373716 - DNA, 25 bp, Homo sapien
tagtagctttgggagaaggatatgg

SEQ ID NO: 373717 - DNA, 25 bp, Homo sapien
gcttgtgcagcttctcaaaagagtt

SEQ ID NO: 373718 - DNA, 25 bp, Homo sapien
ttttgaaatccttgatcctccatgt

SEQ ID NO: 373719 - DNA, 25 bp, Homo sapien
ggacatagctgtgaactggcaagtt

SEQ ID NO: 373720 - DNA, 25 bp, Homo sapien
tcctaaattgggaaggacatagctg

SEQ ID NO: 373721 - DNA, 25 bp, Homo sapien
taaaattagaagagcggtgatttgg

SEQ ID NO: 373722 - DNA, 25 bp, Homo sapien
ttgtgtcagcttatgtcttctggga

SEQ ID NO: 373723 - DNA, 25 bp, Homo sapien
tgggatgcacactccaggataaaat

SEQ ID NO: 373724 - DNA, 25 bp, Homo sapien
aatttgaaaaatgagcgagtgcaaa

SEQ ID NO: 373725 - DNA, 25 bp, Homo sapien
tattgtagatttgccatcaagagac

SEQ ID NO: 373726 - DNA, 25 bp, Homo sapien
cttggatgcaaacggtagtcatgta

SEQ ID NO: 373727 - DNA, 25 bp, Homo sapien
catcaagagaccagataatctttga

SEQ ID NO: 373728 - DNA, 25 bp, Homo sapien
aaatagtgatatatgatgctgatcc

SEQ ID NO: 373729 - DNA, 25 bp, Homo sapien
attcttggacatgtagtttctgcat

SEQ ID NO: 373730 - DNA, 25 bp, Homo sapien
tgcttgcctgagaatatcggaattt

SEQ ID NO: 373731 - DNA, 25 bp, Homo sapien
cttgcctgagaatatcggaatttgt

SEQ ID NO: 373732 - DNA, 25 bp, Homo sapien
atgcttgcctgagaatatcggaatt

SEQ ID NO: 373733 - DNA, 25 bp, Homo sapien
gcctgagaatatcggaatttgtttt

SEQ ID NO: 373734 - DNA, 25 bp, Homo sapien
ccaaatacgtataagctgtctagag

SEQ ID NO: 373735 - DNA, 25 bp, Homo sapien
tgttggataacagctactggacaga

SEQ ID NO: 373736 - DNA, 25 bp, Homo sapien
tatttcttcatcacgttgccttgtc

SEQ ID NO: 373737 - DNA, 25 bp, Homo sapien
tctaagtatgcagatgttggataac

SEQ ID NO: 373738 - DNA, 25 bp, Homo sapien
acctttgaatcctcgtgcctccgaa

SEQ ID NO: 373739 - DNA, 25 bp, Homo sapien
catcaaatgatgtactgtgtgcttt

SEQ ID NO: 373740 - DNA, 25 bp, Homo sapien
atcccccttacttctatgtccatga

SEQ ID NO: 373741 - DNA, 25 bp, Homo sapien
gcctccgaagatgcaacctgagacc

SEQ ID NO: 373742 - DNA, 25 bp, Homo sapien
gcatctgtacatcatagaatatctg

SEQ ID NO: 373743 - DNA, 25 bp, Homo sapien
tctggctgcaccaacaccattatta

SEQ ID NO: 373744 - DNA, 25 bp, Homo sapien
gaatatctgaagctgtcgttttctc

SEQ ID NO: 373745 - DNA, 25 bp, Homo sapien
tgcaccaacaccattattacttgaa

SEQ ID NO: 373746 - DNA, 25 bp, Homo sapien
ggttcttccaaactctgaaacagca

SEQ ID NO: 373747 - DNA, 25 bp, Homo sapien
gttcttccaaactctgaaacagcat

SEQ ID NO: 373748 - DNA, 25 bp, Homo sapien
tggttcttccaaactctgaaacagc

SEQ ID NO: 373749 - DNA, 25 bp, Homo sapien
atggttcttccaaactctgaaacag

SEQ ID NO: 373750 - DNA, 25 bp, Homo sapien
ttgcattacaagctttttgcaatat

SEQ ID NO: 373751 - DNA, 25 bp, Homo sapien
gttatttgttgcctcgatggcttcc

SEQ ID NO: 373752 - DNA, 25 bp, Homo sapien
gcggagaggtaggtgtaatgtgaag

SEQ ID NO: 373753 - DNA, 25 bp, Homo sapien
aagttgttatttgttgcctcgatgg

SEQ ID NO: 373754 - DNA, 25 bp, Homo sapien
taagaacaagcctgactggataaat

SEQ ID NO: 373755 - DNA, 25 bp, Homo sapien
caaagtacgcaacatagcatttttc

SEQ ID NO: 373756 - DNA, 25 bp, Homo sapien
caccttgccaggtattagtccaacc

SEQ ID NO: 373757 - DNA, 25 bp, Homo sapien
tagtccaaccctgtgtggtttagcc

SEQ ID NO: 373758 - DNA, 25 bp, Homo sapien
gggaagcaaatacgacgatgaccaa

SEQ ID NO: 373759 - DNA, 25 bp, Homo sapien
gaattttgattgagctgataaatgg

SEQ ID NO: 373760 - DNA, 25 bp, Homo sapien
ggttagttgatgctacattgccaca

SEQ ID NO: 373761 - DNA, 25 bp, Homo sapien
gaccaaagatatggttgtattgatg

SEQ ID NO: 373762 - DNA, 25 bp, Homo sapien
aactaatgaacaatcgggggtggag

SEQ ID NO: 373763 - DNA, 25 bp, Homo sapien
aatgaacaatcgggggtggagtaca

SEQ ID NO: 373764 - DNA, 25 bp, Homo sapien
agaaataggtatcaagctggtagga

SEQ ID NO: 373765 - DNA, 25 bp, Homo sapien
ctaatgaacaatcgggggtggagta

SEQ ID NO: 373766 - DNA, 25 bp, Homo sapien
tagatatctttacataaaatacagg

SEQ ID NO: 373767 - DNA, 25 bp, Homo sapien
ggttcggggaatagatatctttaca

SEQ ID NO: 373768 - DNA, 25 bp, Homo sapien
aatttccaaggagacgaggaagtag

SEQ ID NO: 373769 - DNA, 25 bp, Homo sapien
ggaagtagagaagatctccaaaaaa

SEQ ID NO: 373770 - DNA, 25 bp, Homo sapien
ttgtttgcagcttgaaaatcacttg

SEQ ID NO: 373771 - DNA, 25 bp, Homo sapien
aaaatcacttgctgtactttcatgg

SEQ ID NO: 373772 - DNA, 25 bp, Homo sapien
tactttcatggtcattcatggatat

SEQ ID NO: 373773 - DNA, 25 bp, Homo sapien
gctaaaatttgtttgcagcttgaaa

SEQ ID NO: 373774 - DNA, 25 bp, Homo sapien
gatggaactctgtccagcaactgaa

SEQ ID NO: 373775 - DNA, 25 bp, Homo sapien
cagttttctgcagacggctagctag

SEQ ID NO: 373776 - DNA, 25 bp, Homo sapien
gattctgacccatcttaagagggta

SEQ ID NO: 373777 - DNA, 25 bp, Homo sapien
tgtgtacgactgttgggttctgcca

SEQ ID NO: 373778 - DNA, 25 bp, Homo sapien
tgccattccttttggtattttcatc

SEQ ID NO: 373779 - DNA, 25 bp, Homo sapien
agctttttctcatgtgtttggtggc

SEQ ID NO: 373780 - DNA, 25 bp, Homo sapien
cctttgtcagaaagatagatttcaa

SEQ ID NO: 373781 - DNA, 25 bp, Homo sapien
tatcctttgcccaatttctgatgga

SEQ ID NO: 373782 - DNA, 25 bp, Homo sapien
tcaataacttgattatccacaagag

SEQ ID NO: 373783 - DNA, 25 bp, Homo sapien
cacaagaatataaggatgcagcaat

SEQ ID NO: 373784 - DNA, 25 bp, Homo sapien
tgggcacttgggttggttctaaatc

SEQ ID NO: 373785 - DNA, 25 bp, Homo sapien
acatatacagggtctgtttatacac

SEQ ID NO: 373786 - DNA, 25 bp, Homo sapien
aaaacttcctcggagattatgtcaa

SEQ ID NO: 373787 - DNA, 25 bp, Homo sapien
gagattatgtcaatgagcagatgtg

SEQ ID NO: 373788 - DNA, 25 bp, Homo sapien
caccaaaacttcctcggagattatg

SEQ ID NO: 373789 - DNA, 25 bp, Homo sapien
tcctcggagattatgtcaatgagca

SEQ ID NO: 373790 - DNA, 25 bp, Homo sapien
tgaaatgcttagaagtaactgtgcc

SEQ ID NO: 373791 - DNA, 25 bp, Homo sapien
tgccaaaacacacgtgacaagtaag

SEQ ID NO: 373792 - DNA, 25 bp, Homo sapien
gagaaaagacattgcggatgtgcaa

SEQ ID NO: 373793 - DNA, 25 bp, Homo sapien
gcaaatatttagcacccaacagggt

SEQ ID NO: 373794 - DNA, 25 bp, Homo sapien
tactgtatgtatataatcagtcatc

SEQ ID NO: 373795 - DNA, 25 bp, Homo sapien
tcttctactgtatgtatataatcag

SEQ ID NO: 373796 - DNA, 25 bp, Homo sapien
gtatataatcagtcatcaattcatt

SEQ ID NO: 373797 - DNA, 25 bp, Homo sapien
ccttttgttcttctactgtatgtat

SEQ ID NO: 373798 - DNA, 25 bp, Homo sapien
aatgctagttaggaacaaaaccctg

SEQ ID NO: 373799 - DNA, 25 bp, Homo sapien
taaactgggtcacataataacgtcc

SEQ ID NO: 373800 - DNA, 25 bp, Homo sapien
tgtttcgccatctaatcaatcctgt

SEQ ID NO: 373801 - DNA, 25 bp, Homo sapien
tgttatcaaacaggacataccccat

SEQ ID NO: 373802 - DNA, 25 bp, Homo sapien
acaagtgccaatggggagtatccca

SEQ ID NO: 373803 - DNA, 25 bp, Homo sapien
taaaacaagtgccaatggggagtat

SEQ ID NO: 373804 - DNA, 25 bp, Homo sapien
agtaatatacttgtttgattacaca

SEQ ID NO: 373805 - DNA, 25 bp, Homo sapien
caatggggagtatcccaattaaaag

SEQ ID NO: 373806 - DNA, 25 bp, Homo sapien
tgaccaaatggtagagttctgtgcc

SEQ ID NO: 373807 - DNA, 25 bp, Homo sapien
cagccacagaccttactgatttaag

SEQ ID NO: 373808 - DNA, 25 bp, Homo sapien
tgccgattatgatgtgcatctggac

SEQ ID NO: 373809 - DNA, 25 bp, Homo sapien
cagaccttactgatttaaggtagac

SEQ ID NO: 373810 - DNA, 25 bp, Homo sapien
tataaggtccagaggttctaaaggc

SEQ ID NO: 373811 - DNA, 25 bp, Homo sapien
ggagaaacatcgtcacctgtagcaa

SEQ ID NO: 373812 - DNA, 25 bp, Homo sapien
ttggttccacaacactgtatcaggg

SEQ ID NO: 373813 - DNA, 25 bp, Homo sapien
tagtacttgcaagatgtagccacca

SEQ ID NO: 373814 - DNA, 25 bp, Homo sapien
tatccatcaacgtatccaagcctgg

SEQ ID NO: 373815 - DNA, 25 bp, Homo sapien
catttgtcctataggttggctcgga

SEQ ID NO: 373816 - DNA, 25 bp, Homo sapien
tggctcggataaatcaacacctttc

SEQ ID NO: 373817 - DNA, 25 bp, Homo sapien
taggagtagatcgttaataatgagg

SEQ ID NO: 373818 - DNA, 25 bp, Homo sapien
caagaactaatgacttacgatttcc

SEQ ID NO: 373819 - DNA, 25 bp, Homo sapien
gggcacacatcagttcaagaactaa

SEQ ID NO: 373820 - DNA, 25 bp, Homo sapien
tctcttcagatgattcgggcacaca

SEQ ID NO: 373821 - DNA, 25 bp, Homo sapien
tgtatttgggtattgacagagtcca

SEQ ID NO: 373822 - DNA, 25 bp, Homo sapien
agtttcatcatagagggaaggcaaa

SEQ ID NO: 373823 - DNA, 25 bp, Homo sapien
gaaatgttaatgttcccagtttcat

SEQ ID NO: 373824 - DNA, 25 bp, Homo sapien
aattggaatctgaaatgttaatgtt

SEQ ID NO: 373825 - DNA, 25 bp, Homo sapien
tgttcccagtttcatcatagaggga

SEQ ID NO: 373826 - DNA, 25 bp, Homo sapien
tgatggcaacatgcctgctcttaaa

SEQ ID NO: 373827 - DNA, 25 bp, Homo sapien
cggcaggtgccagctaaatcgattg

SEQ ID NO: 373828 - DNA, 25 bp, Homo sapien
aatcgattggcagcctgaaattttg

SEQ ID NO: 373829 - DNA, 25 bp, Homo sapien
catctgttatgatggcaacatgcct

SEQ ID NO: 373830 - DNA, 25 bp, Homo sapien
cagggtgctggtttctaacgtgtaa

SEQ ID NO: 373831 - DNA, 25 bp, Homo sapien
cataactattcacttggccttctaa

SEQ ID NO: 373832 - DNA, 25 bp, Homo sapien
cacatgatatatttgcagggtgctg

SEQ ID NO: 373833 - DNA, 25 bp, Homo sapien
ctgtggccaatggtccgagagtccc

SEQ ID NO: 373834 - DNA, 25 bp, Homo sapien
attcattaaagtcctccactcggag

SEQ ID NO: 373835 - DNA, 25 bp, Homo sapien
gtttgtatgaactggttcctttaca

SEQ ID NO: 373836 - DNA, 25 bp, Homo sapien
taaagtcctccactcggagtgggtg

SEQ ID NO: 373837 - DNA, 25 bp, Homo sapien
tcctccactcggagtgggtgaatca

SEQ ID NO: 373838 - DNA, 25 bp, Homo sapien
caaagcccacactgttccccaacct

SEQ ID NO: 373839 - DNA, 25 bp, Homo sapien
tcaaagcccacactgttccccaacc

SEQ ID NO: 373840 - DNA, 25 bp, Homo sapien
atcaaagcccacactgttccccaac

SEQ ID NO: 373841 - DNA, 25 bp, Homo sapien
gagtctgtgaactcttccacgtttt

SEQ ID NO: 373842 - DNA, 25 bp, Homo sapien
tctttgcctttgttagaagtcttat

SEQ ID NO: 373843 - DNA, 25 bp, Homo sapien
cctctagctctaccatattctttgc

SEQ ID NO: 373844 - DNA, 25 bp, Homo sapien
ttatgtgagtatcctctgtggagtc

SEQ ID NO: 373845 - DNA, 25 bp, Homo sapien
ctcttggtgacactcaggcccatta

SEQ ID NO: 373846 - DNA, 25 bp, Homo sapien
ctggaatgagttagttcaactccta

SEQ ID NO: 373847 - DNA, 25 bp, Homo sapien
aatgtcgggttctgcataatacata

SEQ ID NO: 373848 - DNA, 25 bp, Homo sapien
tgagttagttcaactcctatgatca

SEQ ID NO: 373849 - DNA, 25 bp, Homo sapien
tgaaaatgtcgggttctgcataata

SEQ ID NO: 373850 - DNA, 25 bp, Homo sapien
cctgctgagaatcttcattaactgt

SEQ ID NO: 373851 - DNA, 25 bp, Homo sapien
attgctaccttaacaccctgctgag

SEQ ID NO: 373852 - DNA, 25 bp, Homo sapien
taacaccctgctgagaatcttcatt

SEQ ID NO: 373853 - DNA, 25 bp, Homo sapien
tctgctgtaattgctaccttaacac

SEQ ID NO: 373854 - DNA, 25 bp, Homo sapien
gtcactgtaatctctacaaccccag

SEQ ID NO: 373855 - DNA, 25 bp, Homo sapien
tttttgcgatcctagggattaggga

SEQ ID NO: 373856 - DNA, 25 bp, Homo sapien
tattaacttaaacaccgatttgctc

SEQ ID NO: 373857 - DNA, 25 bp, Homo sapien
cagcccaagccattctatttaatgc

SEQ ID NO: 373858 - DNA, 25 bp, Homo sapien
tctgtcttaatgtcaatactttgca

SEQ ID NO: 373859 - DNA, 25 bp, Homo sapien
tatgcgatcagtatcactaaatgtg

SEQ ID NO: 373860 - DNA, 25 bp, Homo sapien
caattgagcatcaactatgcgatca

SEQ ID NO: 373861 - DNA, 25 bp, Homo sapien
gacattggcaaagtggttctgttct

SEQ ID NO: 373862 - DNA, 25 bp, Homo sapien
cagcgatcgatcaggatgggaacaa

SEQ ID NO: 373863 - DNA, 25 bp, Homo sapien
atgggaacaacttccatcatgaggc

SEQ ID NO: 373864 - DNA, 25 bp, Homo sapien
ggaggttgctggcataaatcgatac

SEQ ID NO: 373865 - DNA, 25 bp, Homo sapien
ccagctccgcagattgttacagcga

SEQ ID NO: 373866 - DNA, 25 bp, Homo sapien
cactggttgatcaatgactggatga

SEQ ID NO: 373867 - DNA, 25 bp, Homo sapien
tggctgccactggttgatcaatgac

SEQ ID NO: 373868 - DNA, 25 bp, Homo sapien
ctcaattatttctgacaggtggcag

SEQ ID NO: 373869 - DNA, 25 bp, Homo sapien
tcaatgactggatgaacaatgttgg

SEQ ID NO: 373870 - DNA, 25 bp, Homo sapien
cggcccatagtaagaccaaactgtc

SEQ ID NO: 373871 - DNA, 25 bp, Homo sapien
tcttctatactaggttgctggcatc

SEQ ID NO: 373872 - DNA, 25 bp, Homo sapien
tatactaggttgctggcatcggccc

SEQ ID NO: 373873 - DNA, 25 bp, Homo sapien
ggttgctggcatcggcccatagtaa

SEQ ID NO: 373874 - DNA, 25 bp, Homo sapien
agcagatactcatcaataggcgtta

SEQ ID NO: 373875 - DNA, 25 bp, Homo sapien
aataggcgttattggcaagatgcca

SEQ ID NO: 373876 - DNA, 25 bp, Homo sapien
tactcatcaataggcgttattggca

SEQ ID NO: 373877 - DNA, 25 bp, Homo sapien
catcaataggcgttattggcaagat

SEQ ID NO: 373878 - DNA, 25 bp, Homo sapien
ctccagtaccatctctatacaatat

SEQ ID NO: 373879 - DNA, 25 bp, Homo sapien
cacgtggccatatcatctgattcag

SEQ ID NO: 373880 - DNA, 25 bp, Homo sapien
tctgattcagctgcagtgccacagg

SEQ ID NO: 373881 - DNA, 25 bp, Homo sapien
tatacaatattttggcacacgtggc

SEQ ID NO: 373882 - DNA, 25 bp, Homo sapien
ggtaaatgaggattggtatccccat

SEQ ID NO: 373883 - DNA, 25 bp, Homo sapien
agtcactctggacatattctttaga

SEQ ID NO: 373884 - DNA, 25 bp, Homo sapien
aacttgtaaggtaaatgaggattgg

SEQ ID NO: 373885 - DNA, 25 bp, Homo sapien
ttctttagatctgtcaaaaggaggt

SEQ ID NO: 373886 - DNA, 25 bp, Homo sapien
gccagattgcatttgccgaaaatta

SEQ ID NO: 373887 - DNA, 25 bp, Homo sapien
tcattccatggcgtatcctgaaggg

SEQ ID NO: 373888 - DNA, 25 bp, Homo sapien
tattgcctcatagccaccagttgag

SEQ ID NO: 373889 - DNA, 25 bp, Homo sapien
tctgagtcacctggatatgcttgcc

SEQ ID NO: 373890 - DNA, 25 bp, Homo sapien
ggaagaatattataagacgtagatt

SEQ ID NO: 373891 - DNA, 25 bp, Homo sapien
gacgtagattaaagatagactggac

SEQ ID NO: 373892 - DNA, 25 bp, Homo sapien
tataagacgtagattaaagatagac

SEQ ID NO: 373893 - DNA, 25 bp, Homo sapien
gattaaagatagactggacactgca

SEQ ID NO: 373894 - DNA, 25 bp, Homo sapien
tctgcgatagaattaaaaagataga

SEQ ID NO: 373895 - DNA, 25 bp, Homo sapien
taactgtagtacagagtaagtggga

SEQ ID NO: 373896 - DNA, 25 bp, Homo sapien
caactctttaactgtagtacagagt

SEQ ID NO: 373897 - DNA, 25 bp, Homo sapien
aataattcatctgcgatagaattaa

SEQ ID NO: 373898 - DNA, 25 bp, Homo sapien
tcccacctgagagaacaaaatcttc

SEQ ID NO: 373899 - DNA, 25 bp, Homo sapien
ggcactgtccttcctagcactgtcc

SEQ ID NO: 373900 - DNA, 25 bp, Homo sapien
ggaacatcgaattctcccttcttca

SEQ ID NO: 373901 - DNA, 25 bp, Homo sapien
catctatgagaggaacatcgaattc

SEQ ID NO: 373902 - DNA, 25 bp, Homo sapien
cccaatagatactccaatatcgaac

SEQ ID NO: 373903 - DNA, 25 bp, Homo sapien
aatagatactccaatatcgaactgt

SEQ ID NO: 373904 - DNA, 25 bp, Homo sapien
cacccaatagatactccaatatcga

SEQ ID NO: 373905 - DNA, 25 bp, Homo sapien
gtcacccaatagatactccaatatc

SEQ ID NO: 373906 - DNA, 25 bp, Homo sapien
cagctgtaaagcttagtattgctat

SEQ ID NO: 373907 - DNA, 25 bp, Homo sapien
tgtcagctgtaaagcttagtattgc

SEQ ID NO: 373908 - DNA, 25 bp, Homo sapien
cctttacttcctcctattgagaggt

SEQ ID NO: 373909 - DNA, 25 bp, Homo sapien
ttgtaatgtcagctgtaaagcttag

SEQ ID NO: 373910 - DNA, 25 bp, Homo sapien
tgtttatcctactgatttgctggct

SEQ ID NO: 373911 - DNA, 25 bp, Homo sapien
gctgaagaacgtcggttgtttatcc

SEQ ID NO: 373912 - DNA, 25 bp, Homo sapien
ggcagaatcatctgacaacacggta

SEQ ID NO: 373913 - DNA, 25 bp, Homo sapien
gactgcctagcatctggagagagca

SEQ ID NO: 373914 - DNA, 25 bp, Homo sapien
gatataaccgatggtgataggtttg

SEQ ID NO: 373915 - DNA, 25 bp, Homo sapien
tcttttgatgatataaccgatggtg

SEQ ID NO: 373916 - DNA, 25 bp, Homo sapien
atcacttgtgatcttttgatgatat

SEQ ID NO: 373917 - DNA, 25 bp, Homo sapien
tgataggtttgtagtaactattgct

SEQ ID NO: 373918 - DNA, 25 bp, Homo sapien
ttgcctttatcgatgagaactttac

SEQ ID NO: 373919 - DNA, 25 bp, Homo sapien
catgttattgcctttatcgatgaga

SEQ ID NO: 373920 - DNA, 25 bp, Homo sapien
tgatatctgacccatatttgaactc

SEQ ID NO: 373921 - DNA, 25 bp, Homo sapien
ctctgatatctgacccatatttgaa

SEQ ID NO: 373922 - DNA, 25 bp, Homo sapien
taaatcctgcctaagtctgcagtta

SEQ ID NO: 373923 - DNA, 25 bp, Homo sapien
taataagatataaatcctgcctaag

SEQ ID NO: 373924 - DNA, 25 bp, Homo sapien
tacagaaagatgtattaacactctc

SEQ ID NO: 373925 - DNA, 25 bp, Homo sapien
cactctccttacaattgtacttcat

SEQ ID NO: 373926 - DNA, 25 bp, Homo sapien
ctgatacagctgctaacttagggaa

SEQ ID NO: 373927 - DNA, 25 bp, Homo sapien
gctgctaacttagggaactgaaatt

SEQ ID NO: 373928 - DNA, 25 bp, Homo sapien
gatacagctgctaacttagggaact

SEQ ID NO: 373929 - DNA, 25 bp, Homo sapien
tacagctgctaacttagggaactga

SEQ ID NO: 373930 - DNA, 25 bp, Homo sapien
tactgattcagtccgtagtctgttc

SEQ ID NO: 373931 - DNA, 25 bp, Homo sapien
gattcagtccgtagtctgttctttc

SEQ ID NO: 373932 - DNA, 25 bp, Homo sapien
aatgatttactgattcagtccgtag

SEQ ID NO: 373933 - DNA, 25 bp, Homo sapien
tcagtccgtagtctgttctttccac

SEQ ID NO: 373934 - DNA, 25 bp, Homo sapien
tcttgccacaattcaacagtaccaa

SEQ ID NO: 373935 - DNA, 25 bp, Homo sapien
acatatgtggttccatgtagagatg

SEQ ID NO: 373936 - DNA, 25 bp, Homo sapien
gcttcatgcacctcctaataaaata

SEQ ID NO: 373937 - DNA, 25 bp, Homo sapien
tgattgcctaactttacatatgtgg

SEQ ID NO: 373938 - DNA, 25 bp, Homo sapien
tgatgaaggctactgcattagcctg

SEQ ID NO: 373939 - DNA, 25 bp, Homo sapien
tttatgcttctccagtaggcaagtc

SEQ ID NO: 373940 - DNA, 25 bp, Homo sapien
tcctgtctgtggtagtgtgagatgc

SEQ ID NO: 373941 - DNA, 25 bp, Homo sapien
taggcaagtctcctgcctgttgatg

SEQ ID NO: 373942 - DNA, 25 bp, Homo sapien
attaaaactatcagatgcttcctcc

SEQ ID NO: 373943 - DNA, 25 bp, Homo sapien
tacattaaaactatcagatgcttcc

SEQ ID NO: 373944 - DNA, 25 bp, Homo sapien
cttacattaaaactatcagatgctt

SEQ ID NO: 373945 - DNA, 25 bp, Homo sapien
cattaaaactatcagatgcttcctc

SEQ ID NO: 373946 - DNA, 25 bp, Homo sapien
tagtggtaatacttccgctgacagc

SEQ ID NO: 373947 - DNA, 25 bp, Homo sapien
gaagttaggttgactgccaaggcga

SEQ ID NO: 373948 - DNA, 25 bp, Homo sapien
taactttggctaaatcctccaatga

SEQ ID NO: 373949 - DNA, 25 bp, Homo sapien
cgctgacagcgagtctgaagtacaa

SEQ ID NO: 373950 - DNA, 25 bp, Homo sapien
tcttttctgaggagtcacatgacct

SEQ ID NO: 373951 - DNA, 25 bp, Homo sapien
ctgggtggccatcctttataacttg

SEQ ID NO: 373952 - DNA, 25 bp, Homo sapien
gcagttggacaaggttctcaggaaa

SEQ ID NO: 373953 - DNA, 25 bp, Homo sapien
gctgtccagctaagaaagacttcat

SEQ ID NO: 373954 - DNA, 25 bp, Homo sapien
ttaggcattttatcatcactggcaa

SEQ ID NO: 373955 - DNA, 25 bp, Homo sapien
ggcattttatcatcactggcaaaat

SEQ ID NO: 373956 - DNA, 25 bp, Homo sapien
attttatcatcactggcaaaatatc

SEQ ID NO: 373957 - DNA, 25 bp, Homo sapien
tttatcatcactggcaaaatatctt

SEQ ID NO: 373958 - DNA, 25 bp, Homo sapien
tcagatcctcccgaaaaaagaccag

SEQ ID NO: 373959 - DNA, 25 bp, Homo sapien
gaccagctggttgacgtcttgattt

SEQ ID NO: 373960 - DNA, 25 bp, Homo sapien
ctaaatggacttgaaagcagatttt

SEQ ID NO: 373961 - DNA, 25 bp, Homo sapien
aaaagaccagctggttgacgtcttg

SEQ ID NO: 373962 - DNA, 25 bp, Homo sapien
tgctgctccacatgcagcttataga

SEQ ID NO: 373963 - DNA, 25 bp, Homo sapien
tgctccacatgcagcttatagaggc

SEQ ID NO: 373964 - DNA, 25 bp, Homo sapien
ccaaaggacccttttgtttctgctg

SEQ ID NO: 373965 - DNA, 25 bp, Homo sapien
tctgctgctccacatgcagcttata

SEQ ID NO: 373966 - DNA, 25 bp, Homo sapien
caatccgtgagtgttgctgcctcca

SEQ ID NO: 373967 - DNA, 25 bp, Homo sapien
tgccatgcattcctttcttgccctt

SEQ ID NO: 373968 - DNA, 25 bp, Homo sapien
tcagtcttagggaaggaatggcttc

SEQ ID NO: 373969 - DNA, 25 bp, Homo sapien
cttgctttgccaatccgtgagtgtt

SEQ ID NO: 373970 - DNA, 25 bp, Homo sapien
ttctctgatgaaggtctgttcctga

SEQ ID NO: 373971 - DNA, 25 bp, Homo sapien
ggtctgttcctgaccatctcggtca

SEQ ID NO: 373972 - DNA, 25 bp, Homo sapien
cactgggcacttcatactggtcttt

SEQ ID NO: 373973 - DNA, 25 bp, Homo sapien
catctgttcggattccactgggcac

SEQ ID NO: 373974 - DNA, 25 bp, Homo sapien
gatgacaattggtccatagaaaaag

SEQ ID NO: 373975 - DNA, 25 bp, Homo sapien
ctggcaggatttgaggatgtgtcct

SEQ ID NO: 373976 - DNA, 25 bp, Homo sapien
cagggatgcgtagtcttctgttagg

SEQ ID NO: 373977 - DNA, 25 bp, Homo sapien
tctgagaggtatcacagggatgcgt

SEQ ID NO: 373978 - DNA, 25 bp, Homo sapien
gagccctttgtggagtgaatgccta

SEQ ID NO: 373979 - DNA, 25 bp, Homo sapien
tgtaccgctctataggcaattggga

SEQ ID NO: 373980 - DNA, 25 bp, Homo sapien
ggagatctataaatgcagccagctt

SEQ ID NO: 373981 - DNA, 25 bp, Homo sapien
aaattatgcaggtcactttagcgcc

SEQ ID NO: 373982 - DNA, 25 bp, Homo sapien
tgtctagataaagctttatgaatgc

SEQ ID NO: 373983 - DNA, 25 bp, Homo sapien
tttgtctagataaagctttatgaat

SEQ ID NO: 373984 - DNA, 25 bp, Homo sapien
ttgtctagataaagctttatgaatg

SEQ ID NO: 373985 - DNA, 25 bp, Homo sapien
actatctgctagcatggctaatggt

SEQ ID NO: 373986 - DNA, 25 bp, Homo sapien
aactatctgctagcatggctaatgg

SEQ ID NO: 373987 - DNA, 25 bp, Homo sapien
ttaactatctgctagcatggctaat

SEQ ID NO: 373988 - DNA, 25 bp, Homo sapien
tatctgctagcatggctaatggttc

SEQ ID NO: 373989 - DNA, 25 bp, Homo sapien
ttagtcaccaggggctgcacctgaa

SEQ ID NO: 373990 - DNA, 25 bp, Homo sapien
agtcaccaggggctgcacctgaatt

SEQ ID NO: 373991 - DNA, 25 bp, Homo sapien
tagtcaccaggggctgcacctgaat

SEQ ID NO: 373992 - DNA, 25 bp, Homo sapien
ccagcaataagggaatccatcactg

SEQ ID NO: 373993 - DNA, 25 bp, Homo sapien
tcaaagggatgaactgacagacggt

SEQ ID NO: 373994 - DNA, 25 bp, Homo sapien
gacactacacggagcaaatgatgcc

SEQ ID NO: 373995 - DNA, 25 bp, Homo sapien
acagaagtcagaaagcggctgcctt

SEQ ID NO: 373996 - DNA, 25 bp, Homo sapien
gtggtcacccctttgagcacacgca

SEQ ID NO: 373997 - DNA, 25 bp, Homo sapien
gcctctttctttgggttgtccatgg

SEQ ID NO: 373998 - DNA, 25 bp, Homo sapien
tctttgggttgtccatggccctttc

SEQ ID NO: 373999 - DNA, 25 bp, Homo sapien
cacgcatattgctcgtgtctctttt

SEQ ID NO: 374000 - DNA, 25 bp, Homo sapien
tcagcttgaagaattgtctttatta

SEQ ID NO: 374001 - DNA, 25 bp, Homo sapien
ggtgctattatccttcagcttgaag

SEQ ID NO: 374002 - DNA, 25 bp, Homo sapien
tattatagtgcaagtccaccagcag

SEQ ID NO: 374003 - DNA, 25 bp, Homo sapien
gttctggcatttataagcttccatc

SEQ ID NO: 374004 - DNA, 25 bp, Homo sapien
gttgcatctccatactgctcttgtc

SEQ ID NO: 374005 - DNA, 25 bp, Homo sapien
tcctattttctgtgctattaacagc

SEQ ID NO: 374006 - DNA, 25 bp, Homo sapien
gtgctattaacagctgttgcatctc

SEQ ID NO: 374007 - DNA, 25 bp, Homo sapien
ctggagataatgatgttgtttccta

SEQ ID NO: 374008 - DNA, 25 bp, Homo sapien
tcttcattagagtgcacagcttcgg

SEQ ID NO: 374009 - DNA, 25 bp, Homo sapien
gctactcacgtaccctagaacaaag

SEQ ID NO: 374010 - DNA, 25 bp, Homo sapien
ctcttcattagagtgcacagcttcg

SEQ ID NO: 374011 - DNA, 25 bp, Homo sapien
agtgcagctactcacgtaccctaga

SEQ ID NO: 374012 - DNA, 25 bp, Homo sapien
cacagagttcttgcattagtgccag

SEQ ID NO: 374013 - DNA, 25 bp, Homo sapien
catcagttaatcacagagttcttgc

SEQ ID NO: 374014 - DNA, 25 bp, Homo sapien
caataacatcagttaatcacagagt

SEQ ID NO: 374015 - DNA, 25 bp, Homo sapien
agtcttcaataacatcagttaatca

SEQ ID NO: 374016 - DNA, 25 bp, Homo sapien
ccagcatactctttctcatcacttt

SEQ ID NO: 374017 - DNA, 25 bp, Homo sapien
tttctcatcacttttgcttccagcc

SEQ ID NO: 374018 - DNA, 25 bp, Homo sapien
tctcatcacttttgcttccagccat

SEQ ID NO: 374019 - DNA, 25 bp, Homo sapien
tctttctcatcacttttgcttccag

SEQ ID NO: 374020 - DNA, 25 bp, Homo sapien
gcaggaggtttatcttaattccctg

SEQ ID NO: 374021 - DNA, 25 bp, Homo sapien
aggaggtttatcttaattccctgca

SEQ ID NO: 374022 - DNA, 25 bp, Homo sapien
ggaggtttatcttaattccctgcat

SEQ ID NO: 374023 - DNA, 25 bp, Homo sapien
caggaggtttatcttaattccctgc

SEQ ID NO: 374024 - DNA, 25 bp, Homo sapien
caactcttttacctggtaactgcct

SEQ ID NO: 374025 - DNA, 25 bp, Homo sapien
ctggtaactgcctatgtctctaaga

SEQ ID NO: 374026 - DNA, 25 bp, Homo sapien
cctggtaactgcctatgtctctaag

SEQ ID NO: 374027 - DNA, 25 bp, Homo sapien
atcttttgtgacatgtcctgtctct

SEQ ID NO: 374028 - DNA, 25 bp, Homo sapien
cacagaggtgacgtagcgcaaaaaa

SEQ ID NO: 374029 - DNA, 25 bp, Homo sapien
aaacccacagaggtgacgtagcgca

SEQ ID NO: 374030 - DNA, 25 bp, Homo sapien
catttcactgatttgtcagaatcac

SEQ ID NO: 374031 - DNA, 25 bp, Homo sapien
cagctcttttccgttatagggcact

SEQ ID NO: 374032 - DNA, 25 bp, Homo sapien
ggaaaactcttatgctttgtcacgt

SEQ ID NO: 374033 - DNA, 25 bp, Homo sapien
gacaacatgtagtcctggaagtttc

SEQ ID NO: 374034 - DNA, 25 bp, Homo sapien
tccttccagagacgcccaatgttga

SEQ ID NO: 374035 - DNA, 25 bp, Homo sapien
tcccataggcaggttcttatactaa

SEQ ID NO: 374036 - DNA, 25 bp, Homo sapien
ggtctaagaatatccacttgaatac

SEQ ID NO: 374037 - DNA, 25 bp, Homo sapien
ggtaggtccacttctcccataggca

SEQ ID NO: 374038 - DNA, 25 bp, Homo sapien
tactaataacgcctcaagaatgtgg

SEQ ID NO: 374039 - DNA, 25 bp, Homo sapien
tcacaggatggaccagatgtgttgg

SEQ ID NO: 374040 - DNA, 25 bp, Homo sapien
gatgtgttggtatgagatgaagtca

SEQ ID NO: 374041 - DNA, 25 bp, Homo sapien
acttccttctcagactgcatgctga

SEQ ID NO: 374042 - DNA, 25 bp, Homo sapien
gagacaagatggcaggctgagaact

SEQ ID NO: 374043 - DNA, 25 bp, Homo sapien
acatgtaaatcagattttcccttgg

SEQ ID NO: 374044 - DNA, 25 bp, Homo sapien
tacatgtaaatcagattttcccttg

SEQ ID NO: 374045 - DNA, 25 bp, Homo sapien
gatggcactgggatataattccttt

SEQ ID NO: 374046 - DNA, 25 bp, Homo sapien
tgtgttcctgatatcatcccagtag

SEQ ID NO: 374047 - DNA, 25 bp, Homo sapien
taaaactcgacctcttgcaaagtgg

SEQ ID NO: 374048 - DNA, 25 bp, Homo sapien
ttttgcaaacatgatggagtccatt

SEQ ID NO: 374049 - DNA, 25 bp, Homo sapien
ctgggggataggcaactgaacttca

SEQ ID NO: 374050 - DNA, 25 bp, Homo sapien
tatcctgtattctgggggataggca

SEQ ID NO: 374051 - DNA, 25 bp, Homo sapien
ggcaactgaacttcatggtgaggga

SEQ ID NO: 374052 - DNA, 25 bp, Homo sapien
accacagatgttgtatcctgtattc

SEQ ID NO: 374053 - DNA, 25 bp, Homo sapien
tgtttcagctgggtagtctaagagg

SEQ ID NO: 374054 - DNA, 25 bp, Homo sapien
tcagctgggtagtctaagaggatca

SEQ ID NO: 374055 - DNA, 25 bp, Homo sapien
cagctgggtagtctaagaggatcat

SEQ ID NO: 374056 - DNA, 25 bp, Homo sapien
tttcagctgggtagtctaagaggat

SEQ ID NO: 374057 - DNA, 25 bp, Homo sapien
ggcggatctggccataataaaggct

SEQ ID NO: 374058 - DNA, 25 bp, Homo sapien
caaattgtcagcgacaaggcggatc

SEQ ID NO: 374059 - DNA, 25 bp, Homo sapien
taaccttgattgtcaagcctgctgg

SEQ ID NO: 374060 - DNA, 25 bp, Homo sapien
gctgggtctgtgaaactaactctgg

SEQ ID NO: 374061 - DNA, 25 bp, Homo sapien
cttctgagaacagacagtatcaggt

SEQ ID NO: 374062 - DNA, 25 bp, Homo sapien
tagcttctgagaacagacagtatca

SEQ ID NO: 374063 - DNA, 25 bp, Homo sapien
gcttagcttctgagaacagacagta

SEQ ID NO: 374064 - DNA, 25 bp, Homo sapien
gcttctgagaacagacagtatcagg

SEQ ID NO: 374065 - DNA, 25 bp, Homo sapien
tagtgaagcaaagctacttaagttc

SEQ ID NO: 374066 - DNA, 25 bp, Homo sapien
tgagatctgggaacttcagtagcta

SEQ ID NO: 374067 - DNA, 25 bp, Homo sapien
acttcagtagctagtgaagcaaagc

SEQ ID NO: 374068 - DNA, 25 bp, Homo sapien
ctgagatctgggaacttcagtagct

SEQ ID NO: 374069 - DNA, 25 bp, Homo sapien
gaaaaggcagccattgatactgaga

SEQ ID NO: 374070 - DNA, 25 bp, Homo sapien
tcaacctctagaataccaggagcag

SEQ ID NO: 374071 - DNA, 25 bp, Homo sapien
gatactgagaagacccttgtgttta

SEQ ID NO: 374072 - DNA, 25 bp, Homo sapien
cttgtgtttaaggacacccatggta

SEQ ID NO: 374073 - DNA, 25 bp, Homo sapien
gttcctttcgcctccacatgcccat

SEQ ID NO: 374074 - DNA, 25 bp, Homo sapien
atgttcctttcgcctccacatgccc

SEQ ID NO: 374075 - DNA, 25 bp, Homo sapien
ccatgttcctttcgcctccacatgc

SEQ ID NO: 374076 - DNA, 25 bp, Homo sapien
tgttcctttcgcctccacatgccca

SEQ ID NO: 374077 - DNA, 25 bp, Homo sapien
tctagcgggactgttgttacgatgc

SEQ ID NO: 374078 - DNA, 25 bp, Homo sapien
tacgatgctataaggctgagtcaag

SEQ ID NO: 374079 - DNA, 25 bp, Homo sapien
gactgttgttacgatgctataaggc

SEQ ID NO: 374080 - DNA, 25 bp, Homo sapien
caagtttcaagttctagcgggactg

SEQ ID NO: 374081 - DNA, 25 bp, Homo sapien
gatagtcttccactcctattctctt

SEQ ID NO: 374082 - DNA, 25 bp, Homo sapien
cttctagacttttgctgatagtctt

SEQ ID NO: 374083 - DNA, 25 bp, Homo sapien
tttggtgcccttatttcttctagac

SEQ ID NO: 374084 - DNA, 25 bp, Homo sapien
ttgtatgatttttggtgcccttatt

SEQ ID NO: 374085 - DNA, 25 bp, Homo sapien
tcccaaggggacctagtttcagctc

SEQ ID NO: 374086 - DNA, 25 bp, Homo sapien
gctaggtgattcataaccattgagc

SEQ ID NO: 374087 - DNA, 25 bp, Homo sapien
tctcctgttgcaattgaggaactac

SEQ ID NO: 374088 - DNA, 25 bp, Homo sapien
cataaccattgagccaagaaggtga

SEQ ID NO: 374089 - DNA, 25 bp, Homo sapien
gccgcttagcttggagcattttctg

SEQ ID NO: 374090 - DNA, 25 bp, Homo sapien
ttagacaagatatacgtaggtggag

SEQ ID NO: 374091 - DNA, 25 bp, Homo sapien
gcaggcaccaagagccgcttagctt

SEQ ID NO: 374092 - DNA, 25 bp, Homo sapien
cattttctgtttagctggaatagcc

SEQ ID NO: 374093 - DNA, 25 bp, Homo sapien
taaaggacttgtgttggtagataag

SEQ ID NO: 374094 - DNA, 25 bp, Homo sapien
caaattgttggaatgataaatcctc

SEQ ID NO: 374095 - DNA, 25 bp, Homo sapien
gataagtaaaattgtagactacaaa

SEQ ID NO: 374096 - DNA, 25 bp, Homo sapien
taggtaaaggacttgtgttggtaga

SEQ ID NO: 374097 - DNA, 25 bp, Homo sapien
gaactcacagttcggcctgccttgg

SEQ ID NO: 374098 - DNA, 25 bp, Homo sapien
tggttggatacctgtcctaaggaaa

SEQ ID NO: 374099 - DNA, 25 bp, Homo sapien
aatggtccctctcactacacctggg

SEQ ID NO: 374100 - DNA, 25 bp, Homo sapien
taggtaactgccgtcatgattcaat

SEQ ID NO: 374101 - DNA, 25 bp, Homo sapien
gctctttgagggcacattgtaagca

SEQ ID NO: 374102 - DNA, 25 bp, Homo sapien
tgctctttgagggcacattgtaagc

SEQ ID NO: 374103 - DNA, 25 bp, Homo sapien
ctggaggagtaagtgactgggtgct

SEQ ID NO: 374104 - DNA, 25 bp, Homo sapien
gagtaagtgactgggtgctctttga

SEQ ID NO: 374105 - DNA, 25 bp, Homo sapien
gtgctctctattccaagtgaaggaa

SEQ ID NO: 374106 - DNA, 25 bp, Homo sapien
tgtgctctctattccaagtgaagga

SEQ ID NO: 374107 - DNA, 25 bp, Homo sapien
ttgatacatcccacaggcatttgtc

SEQ ID NO: 374108 - DNA, 25 bp, Homo sapien
ttgatgctgctcagtctgtctgcct

SEQ ID NO: 374109 - DNA, 25 bp, Homo sapien
aacccattgattttgcagctcctgc

SEQ ID NO: 374110 - DNA, 25 bp, Homo sapien
agctcctgctgaggcaccgggaatt

SEQ ID NO: 374111 - DNA, 25 bp, Homo sapien
gagcataatggattacttgatgaat

SEQ ID NO: 374112 - DNA, 25 bp, Homo sapien
tttgagcataatggattacttgatg

SEQ ID NO: 374113 - DNA, 25 bp, Homo sapien
gatgatatggtattggaccacatca

SEQ ID NO: 374114 - DNA, 25 bp, Homo sapien
ggacacagggattgatgatatggta

SEQ ID NO: 374115 - DNA, 25 bp, Homo sapien
ttccttggattgactctcagttgga

SEQ ID NO: 374116 - DNA, 25 bp, Homo sapien
ctcagttggagctttgtcttgggca

SEQ ID NO: 374117 - DNA, 25 bp, Homo sapien
ctgtagggtgctagttttgagagtc

SEQ ID NO: 374118 - DNA, 25 bp, Homo sapien
gttcccatccaccacaagtactttg

SEQ ID NO: 374119 - DNA, 25 bp, Homo sapien
atggcgctctggatgagcatcaagc

SEQ ID NO: 374120 - DNA, 25 bp, Homo sapien
catggcgctctggatgagcatcaag

SEQ ID NO: 374121 - DNA, 25 bp, Homo sapien
tcctagtaggagaaccagcagaaga

SEQ ID NO: 374122 - DNA, 25 bp, Homo sapien
tccattcctagtaggagaaccagca

SEQ ID NO: 374123 - DNA, 25 bp, Homo sapien
ctttccattcctagtaggagaacca

SEQ ID NO: 374124 - DNA, 25 bp, Homo sapien
cattcctagtaggagaaccagcaga

SEQ ID NO: 374125 - DNA, 25 bp, Homo sapien
ttatgaatgtggaccatgaaagccc

SEQ ID NO: 374126 - DNA, 25 bp, Homo sapien
gaatgtggaccatgaaagcccaggg

SEQ ID NO: 374127 - DNA, 25 bp, Homo sapien
cctgctattcatttgggtggatgca

SEQ ID NO: 374128 - DNA, 25 bp, Homo sapien
tcctgcatggagttagtcttcctgc

SEQ ID NO: 374129 - DNA, 25 bp, Homo sapien
aagaagttgtgaacaaatatagtcc

SEQ ID NO: 374130 - DNA, 25 bp, Homo sapien
actcctggaacaagaagttgtgaac

SEQ ID NO: 374131 - DNA, 25 bp, Homo sapien
aacaaatatagtcctgtggtctttg

SEQ ID NO: 374132 - DNA, 25 bp, Homo sapien
tttgaggtgacctcaaaatagcatc

SEQ ID NO: 374133 - DNA, 25 bp, Homo sapien
cgagggcatcgtgcttcattttgaa

SEQ ID NO: 374134 - DNA, 25 bp, Homo sapien
gagtcaatgttgccgagggcatcgt

SEQ ID NO: 374135 - DNA, 25 bp, Homo sapien
ccgagggcatcgtgcttcattttga

SEQ ID NO: 374136 - DNA, 25 bp, Homo sapien
agagtcaatgttgccgagggcatcg

SEQ ID NO: 374137 - DNA, 25 bp, Homo sapien
tattgttcatggtcaatataccatt

SEQ ID NO: 374138 - DNA, 25 bp, Homo sapien
ggccttagcatttgcatattgttca

SEQ ID NO: 374139 - DNA, 25 bp, Homo sapien
catcatataggccttagcatttgca

SEQ ID NO: 374140 - DNA, 25 bp, Homo sapien
gggactccagacaacatcatatagg

SEQ ID NO: 374141 - DNA, 25 bp, Homo sapien
gaagaatgtggttctacacaggaca

SEQ ID NO: 374142 - DNA, 25 bp, Homo sapien
cacaggacagtgtgtgaagtaacaa

SEQ ID NO: 374143 - DNA, 25 bp, Homo sapien
gaaaatgccggctcattcgggtgcc

SEQ ID NO: 374144 - DNA, 25 bp, Homo sapien
gaagtaacaaggacagattagcctc

SEQ ID NO: 374145 - DNA, 25 bp, Homo sapien
gagcatgtaatattgttcttccact

SEQ ID NO: 374146 - DNA, 25 bp, Homo sapien
ttgttcttccacttaagtcacagga

SEQ ID NO: 374147 - DNA, 25 bp, Homo sapien
tcagcattgatggtattttctgaga

SEQ ID NO: 374148 - DNA, 25 bp, Homo sapien
taatattgttcttccacttaagtca

SEQ ID NO: 374149 - DNA, 25 bp, Homo sapien
tctgtaattacctacagcatttgaa

SEQ ID NO: 374150 - DNA, 25 bp, Homo sapien
tgtaattacctacagcatttgaagc

SEQ ID NO: 374151 - DNA, 25 bp, Homo sapien
ttctgtaattacctacagcatttga

SEQ ID NO: 374152 - DNA, 25 bp, Homo sapien
ctgtaattacctacagcatttgaag

SEQ ID NO: 374153 - DNA, 25 bp, Homo sapien
tgaggcagtgccaagcattccattt

SEQ ID NO: 374154 - DNA, 25 bp, Homo sapien
gaaagctataaatccacatgttgac

SEQ ID NO: 374155 - DNA, 25 bp, Homo sapien
tttgctgaaagctataaatccacat

SEQ ID NO: 374156 - DNA, 25 bp, Homo sapien
gctgaaagctataaatccacatgtt

SEQ ID NO: 374157 - DNA, 25 bp, Homo sapien
tttaaagctatgtcccacgtcttct

SEQ ID NO: 374158 - DNA, 25 bp, Homo sapien
cagccgcttgggaaaaagcgcttct

SEQ ID NO: 374159 - DNA, 25 bp, Homo sapien
gcttgggaaaaagcgcttctcccat

SEQ ID NO: 374160 - DNA, 25 bp, Homo sapien
ttaaagctatgtcccacgtcttctc

SEQ ID NO: 374161 - DNA, 25 bp, Homo sapien
ttagccacgatggccgccaggcgga

SEQ ID NO: 374162 - DNA, 25 bp, Homo sapien
gaccaggagatggcctcgaccatcg

SEQ ID NO: 374163 - DNA, 25 bp, Homo sapien
gatggcctcgaccatcgagcaccag

SEQ ID NO: 374164 - DNA, 25 bp, Homo sapien
gagatggcctcgaccatcgagcacc

SEQ ID NO: 374165 - DNA, 25 bp, Homo sapien
gccttcgcagcgtacgaccaccact

SEQ ID NO: 374166 - DNA, 25 bp, Homo sapien
aatgttgatgccttcgcagcgtacg

SEQ ID NO: 374167 - DNA, 25 bp, Homo sapien
ttcgcagcgtacgaccaccactttc

SEQ ID NO: 374168 - DNA, 25 bp, Homo sapien
ttgatgccttcgcagcgtacgacca

SEQ ID NO: 374169 - DNA, 25 bp, Homo sapien
catccgcttgcggaggaaacccagg

SEQ ID NO: 374170 - DNA, 25 bp, Homo sapien
cgggaaaggtgggtgttcatccgct

SEQ ID NO: 374171 - DNA, 25 bp, Homo sapien
tccgcttgcggaggaaacccaggta

SEQ ID NO: 374172 - DNA, 25 bp, Homo sapien
ctcgggaaaggtgggtgttcatccg

SEQ ID NO: 374173 - DNA, 25 bp, Homo sapien
cttgaggcggtccagagaagcctgg

SEQ ID NO: 374174 - DNA, 25 bp, Homo sapien
ttgaggcggtccagagaagcctggc

SEQ ID NO: 374175 - DNA, 25 bp, Homo sapien
gaagcctggcctcgcttggtcttgt

SEQ ID NO: 374176 - DNA, 25 bp, Homo sapien
cgcttggtcttgtggggcggcatac

SEQ ID NO: 374177 - DNA, 25 bp, Homo sapien
tgtcgtagggcggtgggatgcggtc

SEQ ID NO: 374178 - DNA, 25 bp, Homo sapien
gtagggcggtgggatgcggtcaaac

SEQ ID NO: 374179 - DNA, 25 bp, Homo sapien
cttgtcgtagggcggtgggatgcgg

SEQ ID NO: 374180 - DNA, 25 bp, Homo sapien
tcgtagggcggtgggatgcggtcaa

SEQ ID NO: 374181 - DNA, 25 bp, Homo sapien
cagccaacctcgtgagccaggcgcc

SEQ ID NO: 374182 - DNA, 25 bp, Homo sapien
ttcttgtaggcttcagacgcacaac

SEQ ID NO: 374183 - DNA, 25 bp, Homo sapien
aacctcgtgagccaggcgccccaga

SEQ ID NO: 374184 - DNA, 25 bp, Homo sapien
cctcgtgagccaggcgccccagata

SEQ ID NO: 374185 - DNA, 25 bp, Homo sapien
cttcttccggtagtggatcttggct

SEQ ID NO: 374186 - DNA, 25 bp, Homo sapien
ttcttctccatgttcttctcggcct

SEQ ID NO: 374187 - DNA, 25 bp, Homo sapien
ctccatgttcttctcggcctgtttc

SEQ ID NO: 374188 - DNA, 25 bp, Homo sapien
ccatgttcttctcggcctgtttccg

SEQ ID NO: 374189 - DNA, 25 bp, Homo sapien
ggtcttgaggacctctgtgtatttg

SEQ ID NO: 374190 - DNA, 25 bp, Homo sapien
tgtgggtcttgaggacctctgtgta

SEQ ID NO: 374191 - DNA, 25 bp, Homo sapien
tcagaccaggagtctgtgggtcttg

SEQ ID NO: 374192 - DNA, 25 bp, Homo sapien
tgggtcttgaggacctctgtgtatt

SEQ ID NO: 374193 - DNA, 25 bp, Homo sapien
gaggaattaacagtctttattgggc

SEQ ID NO: 374194 - DNA, 25 bp, Homo sapien
gcttcctgtgtccgaggctgcctgt

SEQ ID NO: 374195 - DNA, 25 bp, Homo sapien
atacaggtgagcacgggcgatgcct

SEQ ID NO: 374196 - DNA, 25 bp, Homo sapien
aggtgagcacgggcgatgcctgtaa

SEQ ID NO: 374197 - DNA, 25 bp, Homo sapien
ccagcttcctgtgtccgaggctgcc

SEQ ID NO: 374198 - DNA, 25 bp, Homo sapien
tgagttgtacagtatcacaaaagaa

SEQ ID NO: 374199 - DNA, 25 bp, Homo sapien
gcacaagacctctgttgatgatacc

SEQ ID NO: 374200 - DNA, 25 bp, Homo sapien
ctcatgagtctgttcttgaggtaga

SEQ ID NO: 374201 - DNA, 25 bp, Homo sapien
cctctgttgatgatacctcctgaag

SEQ ID NO: 374202 - DNA, 25 bp, Homo sapien
gagctctgggccacctcatatcgaa

SEQ ID NO: 374203 - DNA, 25 bp, Homo sapien
tatcgaacatgagtcagagctgtga

SEQ ID NO: 374204 - DNA, 25 bp, Homo sapien
tcctgggctacgctgctgatgtggt

SEQ ID NO: 374205 - DNA, 25 bp, Homo sapien
gctgctgatgtggtactggattcct

SEQ ID NO: 374206 - DNA, 25 bp, Homo sapien
cattattcgttcttgtcccttttgg

SEQ ID NO: 374207 - DNA, 25 bp, Homo sapien
gctccacagaaattgaacttaatgt

SEQ ID NO: 374208 - DNA, 25 bp, Homo sapien
tataccttgataacagctccacaga

SEQ ID NO: 374209 - DNA, 25 bp, Homo sapien
aatggtgccatccaactgtgcatgg

SEQ ID NO: 374210 - DNA, 25 bp, Homo sapien
cctctcatgagtgtgcaatctgagc

SEQ ID NO: 374211 - DNA, 25 bp, Homo sapien
cttttctggagcatcggcattggat

SEQ ID NO: 374212 - DNA, 25 bp, Homo sapien
accatggacctctgacttttgttaa

SEQ ID NO: 374213 - DNA, 25 bp, Homo sapien
tgctcacctctcatgagtgtgcaat

SEQ ID NO: 374214 - DNA, 25 bp, Homo sapien
gactagctctgtacagatatcatct

SEQ ID NO: 374215 - DNA, 25 bp, Homo sapien
tagaggaggactgtattggacacag

SEQ ID NO: 374216 - DNA, 25 bp, Homo sapien
tgtgacaaccaggtctatgcaggat

SEQ ID NO: 374217 - DNA, 25 bp, Homo sapien
tattccatatacttctgtgacaacc

SEQ ID NO: 374218 - DNA, 25 bp, Homo sapien
tttacatacaacctctgacgctggc

SEQ ID NO: 374219 - DNA, 25 bp, Homo sapien
gctgctaggccacgtgtgctcttta

SEQ ID NO: 374220 - DNA, 25 bp, Homo sapien
tatcaggtgttacatcctcaaacag

SEQ ID NO: 374221 - DNA, 25 bp, Homo sapien
tggctaatgactactgggctggcat

SEQ ID NO: 374222 - DNA, 25 bp, Homo sapien
gcttggagttggatggttcgcaccc

SEQ ID NO: 374223 - DNA, 25 bp, Homo sapien
caagttcctgttgactaattctgtg

SEQ ID NO: 374224 - DNA, 25 bp, Homo sapien
aattctgtgaccaccagtgacagtc

SEQ ID NO: 374225 - DNA, 25 bp, Homo sapien
cagtctttgagtccgtgaggcagag

SEQ ID NO: 374226 - DNA, 25 bp, Homo sapien
ggctttaagaatctgctttgtggtt

SEQ ID NO: 374227 - DNA, 25 bp, Homo sapien
tcagaggctttaagaatctgctttg

SEQ ID NO: 374228 - DNA, 25 bp, Homo sapien
tagaatcagaggctttaagaatctg

SEQ ID NO: 374229 - DNA, 25 bp, Homo sapien
aggagccgggccctagaatcagagg

SEQ ID NO: 374230 - DNA, 25 bp, Homo sapien
gaatttccaaaccacttagcctaga

SEQ ID NO: 374231 - DNA, 25 bp, Homo sapien
caacaggaatcccatatatcagggc

SEQ ID NO: 374232 - DNA, 25 bp, Homo sapien
tgagggtggccttatgaagtctgtc

SEQ ID NO: 374233 - DNA, 25 bp, Homo sapien
gtccaatattagtcctgcagttagg

SEQ ID NO: 374234 - DNA, 25 bp, Homo sapien
tcacctttcctaagttcattagcca

SEQ ID NO: 374235 - DNA, 25 bp, Homo sapien
gcacaaataaggaaacgacctcaaa

SEQ ID NO: 374236 - DNA, 25 bp, Homo sapien
tagaataagtgaatcacctttccta

SEQ ID NO: 374237 - DNA, 25 bp, Homo sapien
aacgacctcaaatagaataagtgaa

SEQ ID NO: 374238 - DNA, 25 bp, Homo sapien
tgatttgctgaaggttgaattcttg

SEQ ID NO: 374239 - DNA, 25 bp, Homo sapien
tcatgatgcaattgaaaagtggatg

SEQ ID NO: 374240 - DNA, 25 bp, Homo sapien
gaaaagtggatgagttgatttgctg

SEQ ID NO: 374241 - DNA, 25 bp, Homo sapien
ggaagtctgaattctactctgtggc

SEQ ID NO: 374242 - DNA, 25 bp, Homo sapien
tcctttttacactggtgtgtcgatg

SEQ ID NO: 374243 - DNA, 25 bp, Homo sapien
acactggtgtgtcgatggcctttcc

SEQ ID NO: 374244 - DNA, 25 bp, Homo sapien
aggatatttccaactttctcagacc

SEQ ID NO: 374245 - DNA, 25 bp, Homo sapien
aacactactaaggaaaacacaggat

SEQ ID NO: 374246 - DNA, 25 bp, Homo sapien
gatggaagatgtatggattcttcct

SEQ ID NO: 374247 - DNA, 25 bp, Homo sapien
gattcttccttttcggattcaggtg

SEQ ID NO: 374248 - DNA, 25 bp, Homo sapien
tcttgatctttctgaaagtcgcttt

SEQ ID NO: 374249 - DNA, 25 bp, Homo sapien
gaaagtcgcttttttcaggcacagg

SEQ ID NO: 374250 - DNA, 25 bp, Homo sapien
gatgcctatacattgtgttatcaat

SEQ ID NO: 374251 - DNA, 25 bp, Homo sapien
tatatgctagcatagggatggcaat

SEQ ID NO: 374252 - DNA, 25 bp, Homo sapien
gtaattccaaggctaccactgaggt

SEQ ID NO: 374253 - DNA, 25 bp, Homo sapien
ggcatgagtcaccagaaacggccca

SEQ ID NO: 374254 - DNA, 25 bp, Homo sapien
ctgctaagaagattctggtttctct

SEQ ID NO: 374255 - DNA, 25 bp, Homo sapien
agaagattctggtttctctggtcca

SEQ ID NO: 374256 - DNA, 25 bp, Homo sapien
taagaagattctggtttctctggtc

SEQ ID NO: 374257 - DNA, 25 bp, Homo sapien
gctaagaagattctggtttctctgg

SEQ ID NO: 374258 - DNA, 25 bp, Homo sapien
ctaagaccagacacttgatagttgt

SEQ ID NO: 374259 - DNA, 25 bp, Homo sapien
tgatagttgtctggagctggcggtt

SEQ ID NO: 374260 - DNA, 25 bp, Homo sapien
aagaccagacacttgatagttgtct

SEQ ID NO: 374261 - DNA, 25 bp, Homo sapien
gaccagacacttgatagttgtctgg

SEQ ID NO: 374262 - DNA, 25 bp, Homo sapien
tgttcagtttcatggatagaactgc

SEQ ID NO: 374263 - DNA, 25 bp, Homo sapien
ttaggcattcaggtgaatttgattt

SEQ ID NO: 374264 - DNA, 25 bp, Homo sapien
gttcagtttcatggatagaactgca

SEQ ID NO: 374265 - DNA, 25 bp, Homo sapien
ggcattcaggtgaatttgattttct

SEQ ID NO: 374266 - DNA, 25 bp, Homo sapien
cactgatgatacaacctttctgaag

SEQ ID NO: 374267 - DNA, 25 bp, Homo sapien
ggaacatgatctctttgaaacccac

SEQ ID NO: 374268 - DNA, 25 bp, Homo sapien
tatctacctctaagactccaaggcc

SEQ ID NO: 374269 - DNA, 25 bp, Homo sapien
ttactacaacaaaccagcttcaagg

SEQ ID NO: 374270 - DNA, 25 bp, Homo sapien
tgtccaagccttcctggttttcctg

SEQ ID NO: 374271 - DNA, 25 bp, Homo sapien
ttggttccccgcgcttgctctgcgg

SEQ ID NO: 374272 - DNA, 25 bp, Homo sapien
cccgcgcttgctctgcgggcggctc

SEQ ID NO: 374273 - DNA, 25 bp, Homo sapien
aggagcgtctccttggttccccgcg

SEQ ID NO: 374274 - DNA, 25 bp, Homo sapien
caggagcgtctccttggttccccgc

SEQ ID NO: 374275 - DNA, 25 bp, Homo sapien
ctttaacaaaccaaatgagggtcat

SEQ ID NO: 374276 - DNA, 25 bp, Homo sapien
cgtggcatttgacccaatgctttaa

SEQ ID NO: 374277 - DNA, 25 bp, Homo sapien
tcccgtggcatttgacccaatgctt

SEQ ID NO: 374278 - DNA, 25 bp, Homo sapien
cccgtggcatttgacccaatgcttt

SEQ ID NO: 374279 - DNA, 25 bp, Homo sapien
ctcacactggctcagcggaaggtct

SEQ ID NO: 374280 - DNA, 25 bp, Homo sapien
tgactgcagggactcgcttcctcaa

SEQ ID NO: 374281 - DNA, 25 bp, Homo sapien
agcggaaggtctgaactgtgctgaa

SEQ ID NO: 374282 - DNA, 25 bp, Homo sapien
agaagcaggacgacagccagctgga

SEQ ID NO: 374283 - DNA, 25 bp, Homo sapien
tgttcttgaaatgcagacaagttat

SEQ ID NO: 374284 - DNA, 25 bp, Homo sapien
gtctctggtaggttgttcttgaaat

SEQ ID NO: 374285 - DNA, 25 bp, Homo sapien
cattagagccatctccattgggtgg

SEQ ID NO: 374286 - DNA, 25 bp, Homo sapien
aaggtgacaggtaaggtctctggta

SEQ ID NO: 374287 - DNA, 25 bp, Homo sapien
aataatgtagtgttagtgccacccc

SEQ ID NO: 374288 - DNA, 25 bp, Homo sapien
cattcaagtatgtggtctcctgcag

SEQ ID NO: 374289 - DNA, 25 bp, Homo sapien
tacatacgaattgcctgattagagc

SEQ ID NO: 374290 - DNA, 25 bp, Homo sapien
ttttgacagggcagaatatcgtggt

SEQ ID NO: 374291 - DNA, 25 bp, Homo sapien
tgcggttataaagctggagtgacag

SEQ ID NO: 374292 - DNA, 25 bp, Homo sapien
tatgcacatgcggttataaagctgg

SEQ ID NO: 374293 - DNA, 25 bp, Homo sapien
gcacatgcggttataaagctggagt

SEQ ID NO: 374294 - DNA, 25 bp, Homo sapien
tttgtgtatgcacatgcggttataa

SEQ ID NO: 374295 - DNA, 25 bp, Homo sapien
cacagatttccccttcctggtttgt

SEQ ID NO: 374296 - DNA, 25 bp, Homo sapien
acagatttccccttcctggtttgtg

SEQ ID NO: 374297 - DNA, 25 bp, Homo sapien
ggatgaggcataaagaatttaaacc

SEQ ID NO: 374298 - DNA, 25 bp, Homo sapien
cagatttccccttcctggtttgtgc

SEQ ID NO: 374299 - DNA, 25 bp, Homo sapien
ctaatatgtaggagtcagttggagg

SEQ ID NO: 374300 - DNA, 25 bp, Homo sapien
taggagtcagttggaggcaaaaacc

SEQ ID NO: 374301 - DNA, 25 bp, Homo sapien
cccctatcacgattagcattaacag

SEQ ID NO: 374302 - DNA, 25 bp, Homo sapien
ggcaaaaacccctatcacgattagc

SEQ ID NO: 374303 - DNA, 25 bp, Homo sapien
tccatgtgaatgctagtaacaggca

SEQ ID NO: 374304 - DNA, 25 bp, Homo sapien
caaccgtattatgtggctaagctat

SEQ ID NO: 374305 - DNA, 25 bp, Homo sapien
tagattctctgctcgcacaaccgta

SEQ ID NO: 374306 - DNA, 25 bp, Homo sapien
tgcctgaacagaaaatcgttacctg

SEQ ID NO: 374307 - DNA, 25 bp, Homo sapien
caagaatttttgtaatgactggtca

SEQ ID NO: 374308 - DNA, 25 bp, Homo sapien
gtaatgactggtcaggaggaatccc

SEQ ID NO: 374309 - DNA, 25 bp, Homo sapien
taatgactggtcaggaggaatccct

SEQ ID NO: 374310 - DNA, 25 bp, Homo sapien
aatttttgtaatgactggtcaggag

SEQ ID NO: 374311 - DNA, 25 bp, Homo sapien
aatccaaacacagactcagtcttgc

SEQ ID NO: 374312 - DNA, 25 bp, Homo sapien
caaacacagactcagtcttgctcat

SEQ ID NO: 374313 - DNA, 25 bp, Homo sapien
cttcctccaatccaaacacagactc

SEQ ID NO: 374314 - DNA, 25 bp, Homo sapien
tccaatccaaacacagactcagtct

SEQ ID NO: 374315 - DNA, 25 bp, Homo sapien
gcttgagcgtctgtaaggaatccat

SEQ ID NO: 374316 - DNA, 25 bp, Homo sapien
tcttaaagcaaacatggatactgcc

SEQ ID NO: 374317 - DNA, 25 bp, Homo sapien
caaattgggacacgcatatgccagg

SEQ ID NO: 374318 - DNA, 25 bp, Homo sapien
tttaggagtggctactactgcagtg

SEQ ID NO: 374319 - DNA, 25 bp, Homo sapien
tagtaggactgttgatggaatatgc

SEQ ID NO: 374320 - DNA, 25 bp, Homo sapien
agagagtgaattcttgaatgctgtc

SEQ ID NO: 374321 - DNA, 25 bp, Homo sapien
ggtggagccctttaccaagatagat

SEQ ID NO: 374322 - DNA, 25 bp, Homo sapien
aatgctgtccttaggtatctgggtg

SEQ ID NO: 374323 - DNA, 25 bp, Homo sapien
cataggtgagggtacattgacagag

SEQ ID NO: 374324 - DNA, 25 bp, Homo sapien
tcatacgaagattccagggcgtgtc

SEQ ID NO: 374325 - DNA, 25 bp, Homo sapien
ccagtatgaagtatcagcagttcac

SEQ ID NO: 374326 - DNA, 25 bp, Homo sapien
gtgagggccctcttattccaagaac

SEQ ID NO: 374327 - DNA, 25 bp, Homo sapien
tgtcctgcggaactccgagtgcgcg

SEQ ID NO: 374328 - DNA, 25 bp, Homo sapien
ggacttgcgcgcgacggttctcacc

SEQ ID NO: 374329 - DNA, 25 bp, Homo sapien
ccgctgctatggaggcgctggccat

SEQ ID NO: 374330 - DNA, 25 bp, Homo sapien
ctccgagtgcgcgttcggtttccgg

SEQ ID NO: 374331 - DNA, 25 bp, Homo sapien
ctgtggaactctgtttccctgcaga

SEQ ID NO: 374332 - DNA, 25 bp, Homo sapien
ggtgaccgcgcccaggtatcgagca

SEQ ID NO: 374333 - DNA, 25 bp, Homo sapien
ggctgaaggcggagggcaacgacgc

SEQ ID NO: 374334 - DNA, 25 bp, Homo sapien
aggtatcgagcacaggtaacgcgcc

SEQ ID NO: 374335 - DNA, 25 bp, Homo sapien
gtgagtgtaacatttgggccaagga

SEQ ID NO: 374336 - DNA, 25 bp, Homo sapien
gagacggtcgatctatcgtggcgca

SEQ ID NO: 374337 - DNA, 25 bp, Homo sapien
actttcctggcgcagtggttgtgag

SEQ ID NO: 374338 - DNA, 25 bp, Homo sapien
cgtggcgcagggtcatatttgtacc

SEQ ID NO: 374339 - DNA, 25 bp, Homo sapien
agtaacactagggtgtcgaggcaca

SEQ ID NO: 374340 - DNA, 25 bp, Homo sapien
caaagtaacactagggtgtcgaggc

SEQ ID NO: 374341 - DNA, 25 bp, Homo sapien
taacactagggtgtcgaggcacatt

SEQ ID NO: 374342 - DNA, 25 bp, Homo sapien
acactagggtgtcgaggcacatttc

SEQ ID NO: 374343 - DNA, 25 bp, Homo sapien
gctagagggcgtgaaaaccagacga

SEQ ID NO: 374344 - DNA, 25 bp, Homo sapien
tgtatgcgggtagggaaacgcctcc

SEQ ID NO: 374345 - DNA, 25 bp, Homo sapien
cacgcctccgggattgatcggcttt

SEQ ID NO: 374346 - DNA, 25 bp, Homo sapien
gatcggctttgtgtctggtccgcgc

SEQ ID NO: 374347 - DNA, 25 bp, Homo sapien
ctgaggaggtcgagggtcccggcgg

SEQ ID NO: 374348 - DNA, 25 bp, Homo sapien
gctgctctgaggaggtcgagggtcc

SEQ ID NO: 374349 - DNA, 25 bp, Homo sapien
tgctctgaggaggtcgagggtcccg

SEQ ID NO: 374350 - DNA, 25 bp, Homo sapien
ctctgaggaggtcgagggtcccggc

SEQ ID NO: 374351 - DNA, 25 bp, Homo sapien
agggcgaccaccaggtagcgcagca

SEQ ID NO: 374352 - DNA, 25 bp, Homo sapien
ccagggcgaccaccaggtagcgcag

SEQ ID NO: 374353 - DNA, 25 bp, Homo sapien
gggcgaccaccaggtagcgcagcag

SEQ ID NO: 374354 - DNA, 25 bp, Homo sapien
gcccagggcgaccaccaggtagcgc

SEQ ID NO: 374355 - DNA, 25 bp, Homo sapien
tcgcctgggcgcaaggtcagacgcc

SEQ ID NO: 374356 - DNA, 25 bp, Homo sapien
ccagagccgcccagacactgtcagc

SEQ ID NO: 374357 - DNA, 25 bp, Homo sapien
acactgtcagccagcgccccgtggg

SEQ ID NO: 374358 - DNA, 25 bp, Homo sapien
tccgctcgcgggcaccctgggtttc

SEQ ID NO: 374359 - DNA, 25 bp, Homo sapien
cgtcccgttggatgtcccctgagga

SEQ ID NO: 374360 - DNA, 25 bp, Homo sapien
tctaacaatcgtcccgttggatgtc

SEQ ID NO: 374361 - DNA, 25 bp, Homo sapien
tggctcagcagccacgaattccctc

SEQ ID NO: 374362 - DNA, 25 bp, Homo sapien
aagtgcgctgcatatcgccggctca

SEQ ID NO: 374363 - DNA, 25 bp, Homo sapien
atactctgtcagagatgtaacttac

SEQ ID NO: 374364 - DNA, 25 bp, Homo sapien
agtgataatactctgtcagagatgt

SEQ ID NO: 374365 - DNA, 25 bp, Homo sapien
tcccaattagtcatttatctttgga

SEQ ID NO: 374366 - DNA, 25 bp, Homo sapien
cttacaaatatcctttcccaattag

SEQ ID NO: 374367 - DNA, 25 bp, Homo sapien
tttattacaggcttatggcttaccc

SEQ ID NO: 374368 - DNA, 25 bp, Homo sapien
agctcccgtgtttctcatttatgac

SEQ ID NO: 374369 - DNA, 25 bp, Homo sapien
cctaaaagtactctaagctcccgtg

SEQ ID NO: 374370 - DNA, 25 bp, Homo sapien
taagtcctgccttggaataagtcct

SEQ ID NO: 374371 - DNA, 25 bp, Homo sapien
ctcagactggccattgacatttagt

SEQ ID NO: 374372 - DNA, 25 bp, Homo sapien
agactggccattgacatttagtgtt

SEQ ID NO: 374373 - DNA, 25 bp, Homo sapien
tgcatcttctccctcagactggcca

SEQ ID NO: 374374 - DNA, 25 bp, Homo sapien
ctgcatcttctccctcagactggcc

SEQ ID NO: 374375 - DNA, 25 bp, Homo sapien
aaaggtaatgactatttcattacag

SEQ ID NO: 374376 - DNA, 25 bp, Homo sapien
cagctgttagccaacatgtctggct

SEQ ID NO: 374377 - DNA, 25 bp, Homo sapien
ggaccacagctgttagccaacatgt

SEQ ID NO: 374378 - DNA, 25 bp, Homo sapien
agctggaccacagctgttagccaac

SEQ ID NO: 374379 - DNA, 25 bp, Homo sapien
cagtatttgaaacccagtgctgtga

SEQ ID NO: 374380 - DNA, 25 bp, Homo sapien
gtcaccttggataagctacagcctc

SEQ ID NO: 374381 - DNA, 25 bp, Homo sapien
tccaatgtggtgacgcagatagaac

SEQ ID NO: 374382 - DNA, 25 bp, Homo sapien
tgaattactagccacgtcaccttgg

SEQ ID NO: 374383 - DNA, 25 bp, Homo sapien
gcttggctttttgagtaagtatcat

SEQ ID NO: 374384 - DNA, 25 bp, Homo sapien
gcaacagtcaattcaaatctagtag

SEQ ID NO: 374385 - DNA, 25 bp, Homo sapien
ctgtgacattaactatagattttag

SEQ ID NO: 374386 - DNA, 25 bp, Homo sapien
gattttagatagacggcaacagtca

SEQ ID NO: 374387 - DNA, 25 bp, Homo sapien
taactatagattttagatagacggc

SEQ ID NO: 374388 - DNA, 25 bp, Homo sapien
caaaagcactggcagaagttcataa

SEQ ID NO: 374389 - DNA, 25 bp, Homo sapien
tagtgtagccgtcatccaaacatac

SEQ ID NO: 374390 - DNA, 25 bp, Homo sapien
gtcttaaagttagcctcagaacatc

SEQ ID NO: 374391 - DNA, 25 bp, Homo sapien
cactagcagatgttaggtatagccc

SEQ ID NO: 374392 - DNA, 25 bp, Homo sapien
cagggaagagatatggacagccaaa

SEQ ID NO: 374393 - DNA, 25 bp, Homo sapien
tgctcagggaagagatatggacagc

SEQ ID NO: 374394 - DNA, 25 bp, Homo sapien
acaaagtgctcagggaagagatatg

SEQ ID NO: 374395 - DNA, 25 bp, Homo sapien
ttatgccacaaagtgctcagggaag

SEQ ID NO: 374396 - DNA, 25 bp, Homo sapien
tggtactctactgctgtgactactt

SEQ ID NO: 374397 - DNA, 25 bp, Homo sapien
cttggtactctactgctgtgactac

SEQ ID NO: 374398 - DNA, 25 bp, Homo sapien
gcagaaaacccataggccttatgat

SEQ ID NO: 374399 - DNA, 25 bp, Homo sapien
ctgtgactacttgttggtcttttgg

SEQ ID NO: 374400 - DNA, 25 bp, Homo sapien
tctaatctggaggaaacagtcttct

SEQ ID NO: 374401 - DNA, 25 bp, Homo sapien
ggagacactccgacccagtttcttc

SEQ ID NO: 374402 - DNA, 25 bp, Homo sapien
tggggttttgcaggctaaaatagcc

SEQ ID NO: 374403 - DNA, 25 bp, Homo sapien
tctgttgatagtagacaaaggagac

SEQ ID NO: 374404 - DNA, 25 bp, Homo sapien
tcatctcagctcgatttttaaaatc

SEQ ID NO: 374405 - DNA, 25 bp, Homo sapien
tccaggttttggccttgctcagatg

SEQ ID NO: 374406 - DNA, 25 bp, Homo sapien
acaacgatatttccccgcatcactt

SEQ ID NO: 374407 - DNA, 25 bp, Homo sapien
cacatttttgatccggatattgaaa

SEQ ID NO: 374408 - DNA, 25 bp, Homo sapien
gaggctcccagttgatgctggcatg

SEQ ID NO: 374409 - DNA, 25 bp, Homo sapien
gatgcttatggtctctgtaacttga

SEQ ID NO: 374410 - DNA, 25 bp, Homo sapien
aaggagtgggagacgtagtcacaca

SEQ ID NO: 374411 - DNA, 25 bp, Homo sapien
ggatcattaggaattgcctccacct

SEQ ID NO: 374412 - DNA, 25 bp, Homo sapien
cagacactttctagctgtatggcct

SEQ ID NO: 374413 - DNA, 25 bp, Homo sapien
caggtgcataacaacacaaatggct

SEQ ID NO: 374414 - DNA, 25 bp, Homo sapien
ggattcaaatcttagtccagacact

SEQ ID NO: 374415 - DNA, 25 bp, Homo sapien
ctggttttggagttaaccccatctg

SEQ ID NO: 374416 - DNA, 25 bp, Homo sapien
ttttctagcaaacggatgccatcct

SEQ ID NO: 374417 - DNA, 25 bp, Homo sapien
gaagagggtacttcacatgatggaa

SEQ ID NO: 374418 - DNA, 25 bp, Homo sapien
catccttaaaccatgtgtattcagg

SEQ ID NO: 374419 - DNA, 25 bp, Homo sapien
gtagctctaccacagttccactcag

SEQ ID NO: 374420 - DNA, 25 bp, Homo sapien
taagaagtaactgcatccaataggc

SEQ ID NO: 374421 - DNA, 25 bp, Homo sapien
tgtatcctttcagacttgccttggg

SEQ ID NO: 374422 - DNA, 25 bp, Homo sapien
cagttgctcagtgtaaaatcactca

SEQ ID NO: 374423 - DNA, 25 bp, Homo sapien
tgctgactgcgcctgctgactgctg

SEQ ID NO: 374424 - DNA, 25 bp, Homo sapien
gaattgcgggcttcacaggaatatt

SEQ ID NO: 374425 - DNA, 25 bp, Homo sapien
tccaacagaattgcgggcttcacag

SEQ ID NO: 374426 - DNA, 25 bp, Homo sapien
acttgcattcgtttcccaggacacc

SEQ ID NO: 374427 - DNA, 25 bp, Homo sapien
ggacacctgcgatatccaacagaat

SEQ ID NO: 374428 - DNA, 25 bp, Homo sapien
gctgtacttcacagtcgaattgcaa

SEQ ID NO: 374429 - DNA, 25 bp, Homo sapien
gaattgcaaaccatttgttcctccc

SEQ ID NO: 374430 - DNA, 25 bp, Homo sapien
tcacagtcgaattgcaaaccatttg

SEQ ID NO: 374431 - DNA, 25 bp, Homo sapien
cccaactgctgtacttcacagtcga

SEQ ID NO: 374432 - DNA, 25 bp, Homo sapien
tactacggctgctatgatgccactt

SEQ ID NO: 374433 - DNA, 25 bp, Homo sapien
ccaaggccacaaacggaaatcacta

SEQ ID NO: 374434 - DNA, 25 bp, Homo sapien
tgagcatagcatacaccaaggccac

SEQ ID NO: 374435 - DNA, 25 bp, Homo sapien
taaggccacaactactacggctgct

SEQ ID NO: 374436 - DNA, 25 bp, Homo sapien
ttggtgccaggattgtacagcttgc

SEQ ID NO: 374437 - DNA, 25 bp, Homo sapien
tccccaaaagccaagcagtgttggt

SEQ ID NO: 374438 - DNA, 25 bp, Homo sapien
tagagtctggatatttgccttgccc

SEQ ID NO: 374439 - DNA, 25 bp, Homo sapien
tagttgacataggagaaagacatgc

SEQ ID NO: 374440 - DNA, 25 bp, Homo sapien
ttcatgtaccaatgactcctacaat

SEQ ID NO: 374441 - DNA, 25 bp, Homo sapien
gataacctctacttggaatcaaata

SEQ ID NO: 374442 - DNA, 25 bp, Homo sapien
catacaagaaggacagtcataaaac

SEQ ID NO: 374443 - DNA, 25 bp, Homo sapien
aaactacagggcgttggggagctca

SEQ ID NO: 374444 - DNA, 25 bp, Homo sapien
gatgacaaactgtctgaagccatgg

SEQ ID NO: 374445 - DNA, 25 bp, Homo sapien
gctgccatagcctcagatagtttgt

SEQ ID NO: 374446 - DNA, 25 bp, Homo sapien
catagagccaaagttaggtctgcca

SEQ ID NO: 374447 - DNA, 25 bp, Homo sapien
caatggcagatgattcttcaaagga

SEQ ID NO: 374448 - DNA, 25 bp, Homo sapien
cacttacgtaagatgatgtctcccc

SEQ ID NO: 374449 - DNA, 25 bp, Homo sapien
gatagaagaataacctccctcactg

SEQ ID NO: 374450 - DNA, 25 bp, Homo sapien
tcgtgtcactcaataaaagcagaag

SEQ ID NO: 374451 - DNA, 25 bp, Homo sapien
gaactcactggctttattactgcta

SEQ ID NO: 374452 - DNA, 25 bp, Homo sapien
gaagccttgtgcacgtaaatgtagc

SEQ ID NO: 374453 - DNA, 25 bp, Homo sapien
tacacaaaccagagacttactaact

SEQ ID NO: 374454 - DNA, 25 bp, Homo sapien
gtcatgcaacaaaacatcagtgtga

SEQ ID NO: 374455 - DNA, 25 bp, Homo sapien
gaacatgaacatatatcttaggtag

SEQ ID NO: 374456 - DNA, 25 bp, Homo sapien
tcactcattgtcgtggctttagatg

SEQ ID NO: 374457 - DNA, 25 bp, Homo sapien
tcattgtcgtggctttagatgaaga

SEQ ID NO: 374458 - DNA, 25 bp, Homo sapien
cgtggctttagatgaagaattactc

SEQ ID NO: 374459 - DNA, 25 bp, Homo sapien
tgtcgtggctttagatgaagaatta

SEQ ID NO: 374460 - DNA, 25 bp, Homo sapien
ctatatttattgtaagaattctaca

SEQ ID NO: 374461 - DNA, 25 bp, Homo sapien
atttattgtaagaattctacaggta

SEQ ID NO: 374462 - DNA, 25 bp, Homo sapien
atatttattgtaagaattctacagg

SEQ ID NO: 374463 - DNA, 25 bp, Homo sapien
tattgtaagaattctacaggtaaaa

SEQ ID NO: 374464 - DNA, 25 bp, Homo sapien
ttaaattataaaggattttgtgtgc

SEQ ID NO: 374465 - DNA, 25 bp, Homo sapien
ttggtgtatctctaaagtggagtct

SEQ ID NO: 374466 - DNA, 25 bp, Homo sapien
caacggtggctttggtgtatctcta

SEQ ID NO: 374467 - DNA, 25 bp, Homo sapien
tgtgtaacaacggtggctttggtgt

SEQ ID NO: 374468 - DNA, 25 bp, Homo sapien
aacttgtgtaacaacggtggctttg

SEQ ID NO: 374469 - DNA, 25 bp, Homo sapien
tagtccagacacaagaagccagatt

SEQ ID NO: 374470 - DNA, 25 bp, Homo sapien
gtgtacctctttgcaaatgtcggac

SEQ ID NO: 374471 - DNA, 25 bp, Homo sapien
tatattttaggtgtcgacagaacta

SEQ ID NO: 374472 - DNA, 25 bp, Homo sapien
ttaaaatagcaagttcaggtgagtt

SEQ ID NO: 374473 - DNA, 25 bp, Homo sapien
tctctagaagttaggacgtggttaa

SEQ ID NO: 374474 - DNA, 25 bp, Homo sapien
cctaaatcagactctcgtgcagagt

SEQ ID NO: 374475 - DNA, 25 bp, Homo sapien
tctgtcagagtatttgttggacccc

SEQ ID NO: 374476 - DNA, 25 bp, Homo sapien
aatgagaccagaggttccttttgca

SEQ ID NO: 374477 - DNA, 25 bp, Homo sapien
ttgggcataagacccatcccgcttc

SEQ ID NO: 374478 - DNA, 25 bp, Homo sapien
tttgatgttgcttttagttcccagg

SEQ ID NO: 374479 - DNA, 25 bp, Homo sapien
aaacacaaagtgcaaatccttgggc

SEQ ID NO: 374480 - DNA, 25 bp, Homo sapien
tagttcccaggaatggaagtaaaca

SEQ ID NO: 374481 - DNA, 25 bp, Homo sapien
aaaatgtttgccgatccctgactcg

SEQ ID NO: 374482 - DNA, 25 bp, Homo sapien
tttgcccagaagaataggacatgcc

SEQ ID NO: 374483 - DNA, 25 bp, Homo sapien
tgtacttcaccaccatgagttggga

SEQ ID NO: 374484 - DNA, 25 bp, Homo sapien
aaagaagattaacctgcccagtgca

SEQ ID NO: 374485 - DNA, 25 bp, Homo sapien
gcaaatacaagtctggacaccagtg

SEQ ID NO: 374486 - DNA, 25 bp, Homo sapien
taaatctagttacaacagcaacaat

SEQ ID NO: 374487 - DNA, 25 bp, Homo sapien
caatgggattttaccagttgttagt

SEQ ID NO: 374488 - DNA, 25 bp, Homo sapien
tggtccagacttaggtcaaacctcc

SEQ ID NO: 374489 - DNA, 25 bp, Homo sapien
gtgtagactttaatcgaacaaagcc

SEQ ID NO: 374490 - DNA, 25 bp, Homo sapien
tagtgtagactttaatcgaacaaag

SEQ ID NO: 374491 - DNA, 25 bp, Homo sapien
gtagactttaatcgaacaaagccac

SEQ ID NO: 374492 - DNA, 25 bp, Homo sapien
tattagtgtagactttaatcgaaca

SEQ ID NO: 374493 - DNA, 25 bp, Homo sapien
tttatgaataacaataggtggatga

SEQ ID NO: 374494 - DNA, 25 bp, Homo sapien
tatgaataacaataggtggatgact

SEQ ID NO: 374495 - DNA, 25 bp, Homo sapien
gaataacaataggtggatgactctt

SEQ ID NO: 374496 - DNA, 25 bp, Homo sapien
tgaataacaataggtggatgactct

SEQ ID NO: 374497 - DNA, 25 bp, Homo sapien
ttgacgttgtgactgagagggtact

SEQ ID NO: 374498 - DNA, 25 bp, Homo sapien
gagatgctattgaaagcctgagata

SEQ ID NO: 374499 - DNA, 25 bp, Homo sapien
gataaaaggatgaaagtagtgactg

SEQ ID NO: 374500 - DNA, 25 bp, Homo sapien
tcccggagataaacgttgagatgct

SEQ ID NO: 374501 - DNA, 25 bp, Homo sapien
taaataccaaccacgttagatgctg

SEQ ID NO: 374502 - DNA, 25 bp, Homo sapien
gggtggaatttgacctgtctcttaa

SEQ ID NO: 374503 - DNA, 25 bp, Homo sapien
aatcaagggttacggaaattcagag

SEQ ID NO: 374504 - DNA, 25 bp, Homo sapien
gaattaacattccaggtggataggg

SEQ ID NO: 374505 - DNA, 25 bp, Homo sapien
gaagagcttcttaagaactgtgtgg

SEQ ID NO: 374506 - DNA, 25 bp, Homo sapien
tgtaacttcacatattagataacta

SEQ ID NO: 374507 - DNA, 25 bp, Homo sapien
attcatggaacaactttgtaacttc

SEQ ID NO: 374508 - DNA, 25 bp, Homo sapien
taattgctaaaagactggtatgaga

SEQ ID NO: 374509 - DNA, 25 bp, Homo sapien
ctgagggcaaatcggggcggcgcgg

SEQ ID NO: 374510 - DNA, 25 bp, Homo sapien
gggtcacagctgacctctacgtttg

SEQ ID NO: 374511 - DNA, 25 bp, Homo sapien
gacctctacgtttgtagaccttgga

SEQ ID NO: 374512 - DNA, 25 bp, Homo sapien
tagaccttggagtttgccgtagacc

SEQ ID NO: 374513 - DNA, 25 bp, Homo sapien
gacccagaaataagatcgataccct

SEQ ID NO: 374514 - DNA, 25 bp, Homo sapien
ctagatcagcgtggccttttgggac

SEQ ID NO: 374515 - DNA, 25 bp, Homo sapien
ggttttttcacgaggcctgggctgc

SEQ ID NO: 374516 - DNA, 25 bp, Homo sapien
gttttttcacgaggcctgggctgcc

SEQ ID NO: 374517 - DNA, 25 bp, Homo sapien
tggccttttgggactccagttctgg

SEQ ID NO: 374518 - DNA, 25 bp, Homo sapien
gagtgcaaggtgactgggagggtag

SEQ ID NO: 374519 - DNA, 25 bp, Homo sapien
ctgagtgcaaggtgactgggagggt

SEQ ID NO: 374520 - DNA, 25 bp, Homo sapien
tgagtgcaaggtgactgggagggta

SEQ ID NO: 374521 - DNA, 25 bp, Homo sapien
cgatggcgggtaggcgtgtgggggc

SEQ ID NO: 374522 - DNA, 25 bp, Homo sapien
ggcggagccagggccggaagtagag

SEQ ID NO: 374523 - DNA, 25 bp, Homo sapien
ccagggccggaagtagagcggaggt

SEQ ID NO: 374524 - DNA, 25 bp, Homo sapien
cggcggaggctttggcagctcggga

SEQ ID NO: 374525 - DNA, 25 bp, Homo sapien
tagacccgtccggtcgcagactgtc

SEQ ID NO: 374526 - DNA, 25 bp, Homo sapien
tctccgagacgcttcctgtccggtg

SEQ ID NO: 374527 - DNA, 25 bp, Homo sapien
ttcctgtccggtgagcgtcgaccga

SEQ ID NO: 374528 - DNA, 25 bp, Homo sapien
gaccgactgaaacggcggcccataa

SEQ ID NO: 374529 - DNA, 25 bp, Homo sapien
tcctcctgtttggcttctgtctcac

SEQ ID NO: 374530 - DNA, 25 bp, Homo sapien
tcctcctcctgtttggcttctgtct

SEQ ID NO: 374531 - DNA, 25 bp, Homo sapien
ctcctcctgtttggcttctgtctca

SEQ ID NO: 374532 - DNA, 25 bp, Homo sapien
acttcctcctcctgtttggcttctg

SEQ ID NO: 374533 - DNA, 25 bp, Homo sapien
ctgtgccaggggacccggaagcact

SEQ ID NO: 374534 - DNA, 25 bp, Homo sapien
ggaaaggccactcaaagagcgcatg

SEQ ID NO: 374535 - DNA, 25 bp, Homo sapien
cgcatgcgtacagagcaaggtttca

SEQ ID NO: 374536 - DNA, 25 bp, Homo sapien
tcaaattaggcgaagaaaagatggc

SEQ ID NO: 374537 - DNA, 25 bp, Homo sapien
ttatacacttcgataaccctaacga

SEQ ID NO: 374538 - DNA, 25 bp, Homo sapien
tcgataaccctaacgaacaggacgc

SEQ ID NO: 374539 - DNA, 25 bp, Homo sapien
taacgaacaggacgctgactcggag

SEQ ID NO: 374540 - DNA, 25 bp, Homo sapien
tttccctgcacctttatacacttcg

SEQ ID NO: 374541 - DNA, 25 bp, Homo sapien
caacggaggctcacgaggtacaagg

SEQ ID NO: 374542 - DNA, 25 bp, Homo sapien
gtacaaggaagcacaacgccccaat

SEQ ID NO: 374543 - DNA, 25 bp, Homo sapien
agggtgcgcaaaacgaccgcccaag

SEQ ID NO: 374544 - DNA, 25 bp, Homo sapien
gccccaatccgctttgttttacaca

SEQ ID NO: 374545 - DNA, 25 bp, Homo sapien
cgtgcagcgtctctccgggtaagac

SEQ ID NO: 374546 - DNA, 25 bp, Homo sapien
gcgagggctccacgtgcagcgtctc

SEQ ID NO: 374547 - DNA, 25 bp, Homo sapien
aacggcagcggcgagggctccacgt

SEQ ID NO: 374548 - DNA, 25 bp, Homo sapien
tccacgtgcagcgtctctccgggta

SEQ ID NO: 374549 - DNA, 25 bp, Homo sapien
cactccggaatcggccctgtcgccc

SEQ ID NO: 374550 - DNA, 25 bp, Homo sapien
atcggccctgtcgcccccgcccgca

SEQ ID NO: 374551 - DNA, 25 bp, Homo sapien
cggccctgtcgcccccgcccgcact

SEQ ID NO: 374552 - DNA, 25 bp, Homo sapien
ccactccggaatcggccctgtcgcc

SEQ ID NO: 374553 - DNA, 25 bp, Homo sapien
ggtccgctaacctgatcaaactggg

SEQ ID NO: 374554 - DNA, 25 bp, Homo sapien
gggtccctaaatccaaacacgcaca

SEQ ID NO: 374555 - DNA, 25 bp, Homo sapien
ctctcggtccgctaacctgatcaaa

SEQ ID NO: 374556 - DNA, 25 bp, Homo sapien
attgtcctctcggtccgctaacctg

SEQ ID NO: 374557 - DNA, 25 bp, Homo sapien
cccaatatattataagtggagtgtg

SEQ ID NO: 374558 - DNA, 25 bp, Homo sapien
gcttttctgtgtctgaggaaattaa

SEQ ID NO: 374559 - DNA, 25 bp, Homo sapien
aacagttgggaccctcaggtgaagg

SEQ ID NO: 374560 - DNA, 25 bp, Homo sapien
tacctgcgagattaactgcacattt

SEQ ID NO: 374561 - DNA, 25 bp, Homo sapien
taaagcctattccttaactggtgct

SEQ ID NO: 374562 - DNA, 25 bp, Homo sapien
tagggatctaccttgaaggacaaca

SEQ ID NO: 374563 - DNA, 25 bp, Homo sapien
gaagagtactaccttcagcaggcac

SEQ ID NO: 374564 - DNA, 25 bp, Homo sapien
caggtggaaaccgagtagggatcta

SEQ ID NO: 374565 - DNA, 25 bp, Homo sapien
tctccactgggatggacgcatgcat

SEQ ID NO: 374566 - DNA, 25 bp, Homo sapien
gcaggctccgttcacaagcacatct

SEQ ID NO: 374567 - DNA, 25 bp, Homo sapien
gcacatctagccgactgcgcagatt

SEQ ID NO: 374568 - DNA, 25 bp, Homo sapien
gacgcatgcatatggagcagactgc

SEQ ID NO: 374569 - DNA, 25 bp, Homo sapien
ttttctgacaaatagctggcaccca

SEQ ID NO: 374570 - DNA, 25 bp, Homo sapien
tcaatgtgaagatctgccggttagc

SEQ ID NO: 374571 - DNA, 25 bp, Homo sapien
cctcgaaggctctagaaaaacagca

SEQ ID NO: 374572 - DNA, 25 bp, Homo sapien
caaggaacggattctccctcgaagg

SEQ ID NO: 374573 - DNA, 25 bp, Homo sapien
gctaggatttggtacaaatgatgtc

SEQ ID NO: 374574 - DNA, 25 bp, Homo sapien
caaatgatgtctcttataaatgcaa

SEQ ID NO: 374575 - DNA, 25 bp, Homo sapien
tatcacactgatacaatgatatgca

SEQ ID NO: 374576 - DNA, 25 bp, Homo sapien
gttgtaccttagtagcagaatttac

SEQ ID NO: 374577 - DNA, 25 bp, Homo sapien
tctcaatttctatcagctcctctgc

SEQ ID NO: 374578 - DNA, 25 bp, Homo sapien
ctcaatttctatcagctcctctgct

SEQ ID NO: 374579 - DNA, 25 bp, Homo sapien
tctggctgaatgttacgcattttta

SEQ ID NO: 374580 - DNA, 25 bp, Homo sapien
tgtactctcaatactcagtatcctc

SEQ ID NO: 374581 - DNA, 25 bp, Homo sapien
gcattccctctttcttatgctggaa

SEQ ID NO: 374582 - DNA, 25 bp, Homo sapien
gataaacaagttgaaaagctctatt

SEQ ID NO: 374583 - DNA, 25 bp, Homo sapien
tatggcctggcttacacattcagct

SEQ ID NO: 374584 - DNA, 25 bp, Homo sapien
ggttcattgatgtctatggcctggc

SEQ ID NO: 374585 - DNA, 25 bp, Homo sapien
gctggcgcgtaggtttgttctacaa

SEQ ID NO: 374586 - DNA, 25 bp, Homo sapien
tatcttgcagacaaatttcatgagc

SEQ ID NO: 374587 - DNA, 25 bp, Homo sapien
caactgatggtgtcgtcatggcaca

SEQ ID NO: 374588 - DNA, 25 bp, Homo sapien
taactgtgtctgcatgtcataaagc

SEQ ID NO: 374589 - DNA, 25 bp, Homo sapien
tgaggacagcataccaccaaatttg

SEQ ID NO: 374590 - DNA, 25 bp, Homo sapien
tcatcagcttaaagacaggcttcca

SEQ ID NO: 374591 - DNA, 25 bp, Homo sapien
tacctgtacactaagctgtacagtt

SEQ ID NO: 374592 - DNA, 25 bp, Homo sapien
cctgtacactaagctgtacagttcc

SEQ ID NO: 374593 - DNA, 25 bp, Homo sapien
taagaaattacctgtacactaagct

SEQ ID NO: 374594 - DNA, 25 bp, Homo sapien
gaaattacctgtacactaagctgta

SEQ ID NO: 374595 - DNA, 25 bp, Homo sapien
gcccatcttgtcacttgttctgaag

SEQ ID NO: 374596 - DNA, 25 bp, Homo sapien
caacagtgtccgcaggtttaacaat

SEQ ID NO: 374597 - DNA, 25 bp, Homo sapien
ggatcaataacaacctcaacagtgt

SEQ ID NO: 374598 - DNA, 25 bp, Homo sapien
ttcctatagccttccagtgcagcag

SEQ ID NO: 374599 - DNA, 25 bp, Homo sapien
acccaatatagaattatgcatttta

SEQ ID NO: 374600 - DNA, 25 bp, Homo sapien
caagcttaattcctattattctacc

SEQ ID NO: 374601 - DNA, 25 bp, Homo sapien
ttcctattattctacccaatataga

SEQ ID NO: 374602 - DNA, 25 bp, Homo sapien
ttctatgtcaagcttaattcctatt

SEQ ID NO: 374603 - DNA, 25 bp, Homo sapien
tctgctcagtcctatcactgttttc

SEQ ID NO: 374604 - DNA, 25 bp, Homo sapien
tgctcagtcctatcactgttttcat

SEQ ID NO: 374605 - DNA, 25 bp, Homo sapien
cttgctactcccaaagaaatcatct

SEQ ID NO: 374606 - DNA, 25 bp, Homo sapien
cataaaatctgtcaatctgctcagt

SEQ ID NO: 374607 - DNA, 25 bp, Homo sapien
attacccaaaccacccaatgcagga

SEQ ID NO: 374608 - DNA, 25 bp, Homo sapien
tgaggtctatatcggtcatgctgaa

SEQ ID NO: 374609 - DNA, 25 bp, Homo sapien
tccccgaaatgttgagtgtggtgag

SEQ ID NO: 374610 - DNA, 25 bp, Homo sapien
aaatcttcttggttgagactacata

SEQ ID NO: 374611 - DNA, 25 bp, Homo sapien
gatcaaacagaaggcaacaaatgga

SEQ ID NO: 374612 - DNA, 25 bp, Homo sapien
gagaatgggtaggaagccacctgta

SEQ ID NO: 374613 - DNA, 25 bp, Homo sapien
gattctaatgttagcctgggcttga

SEQ ID NO: 374614 - DNA, 25 bp, Homo sapien
tcttccgtttctagatgagcagtaa

SEQ ID NO: 374615 - DNA, 25 bp, Homo sapien
tctgttgttcttgacttgccaatac

SEQ ID NO: 374616 - DNA, 25 bp, Homo sapien
tcatctgttgttcttgacttgccaa

SEQ ID NO: 374617 - DNA, 25 bp, Homo sapien
catctgttgttcttgacttgccaat

SEQ ID NO: 374618 - DNA, 25 bp, Homo sapien
tgttgttcttgacttgccaatacat

SEQ ID NO: 374619 - DNA, 25 bp, Homo sapien
gcagattgcactgatgctggaataa

SEQ ID NO: 374620 - DNA, 25 bp, Homo sapien
aactttaatggtagtaggtgtagca

SEQ ID NO: 374621 - DNA, 25 bp, Homo sapien
tgttcccaggtgagcttctatcttc

SEQ ID NO: 374622 - DNA, 25 bp, Homo sapien
aatcctcggcgctctttgtactttg

SEQ ID NO: 374623 - DNA, 25 bp, Homo sapien
tgtgcaaccagttcaggctgattta

SEQ ID NO: 374624 - DNA, 25 bp, Homo sapien
tccttatcagtaagaagttctagca

SEQ ID NO: 374625 - DNA, 25 bp, Homo sapien
gagtttctcatagttcatcgtaggc

SEQ ID NO: 374626 - DNA, 25 bp, Homo sapien
tcgtaggcttatttttacgctgtcc

SEQ ID NO: 374627 - DNA, 25 bp, Homo sapien
cataagcaagaggtcaacttttact

SEQ ID NO: 374628 - DNA, 25 bp, Homo sapien
catgtagagctacaagctacatgga

SEQ ID NO: 374629 - DNA, 25 bp, Homo sapien
tgatttttggtacggcataagcaag

SEQ ID NO: 374630 - DNA, 25 bp, Homo sapien
gagctacaagctacatggaattgat

SEQ ID NO: 374631 - DNA, 25 bp, Homo sapien
ggtcattgtttgtagcaggagctta

SEQ ID NO: 374632 - DNA, 25 bp, Homo sapien
gtatgggcatagaagtacatctctg

SEQ ID NO: 374633 - DNA, 25 bp, Homo sapien
catttggataatctctagcctgagg

SEQ ID NO: 374634 - DNA, 25 bp, Homo sapien
tgaatactaatgaggccgtacacct

SEQ ID NO: 374635 - DNA, 25 bp, Homo sapien
gaagcctagtagagtactgcatccg

SEQ ID NO: 374636 - DNA, 25 bp, Homo sapien
tcagaaaaaatgagacttcttacaa

SEQ ID NO: 374637 - DNA, 25 bp, Homo sapien
aatgagacttcttacaataatttac

SEQ ID NO: 374638 - DNA, 25 bp, Homo sapien
aatttacagactattccataagcag

SEQ ID NO: 374639 - DNA, 25 bp, Homo sapien
aacggttcaactccgctgcactgta

SEQ ID NO: 374640 - DNA, 25 bp, Homo sapien
cacattctgtgaccaaacggttcaa

SEQ ID NO: 374641 - DNA, 25 bp, Homo sapien
tggctgggcaattccatggagctgc

SEQ ID NO: 374642 - DNA, 25 bp, Homo sapien
tgcagagaagcagtagccagagcta

SEQ ID NO: 374643 - DNA, 25 bp, Homo sapien
tactgaccagtttagccttcctgac

SEQ ID NO: 374644 - DNA, 25 bp, Homo sapien
tgcttgattagatgaaacaggcaca

SEQ ID NO: 374645 - DNA, 25 bp, Homo sapien
catgcatcagactgtacagcctaga

SEQ ID NO: 374646 - DNA, 25 bp, Homo sapien
aggcacacatgctttagctgagaaa

SEQ ID NO: 374647 - DNA, 25 bp, Homo sapien
ctcttttgccagtcaacttcttact

SEQ ID NO: 374648 - DNA, 25 bp, Homo sapien
agttaataagccagatttaaacctg

SEQ ID NO: 374649 - DNA, 25 bp, Homo sapien
taacagctggtttattagaattaaa

SEQ ID NO: 374650 - DNA, 25 bp, Homo sapien
atccttaaaattggcttgagttaat

SEQ ID NO: 374651 - DNA, 25 bp, Homo sapien
ttttaaatctctgacaggaaaaaca

SEQ ID NO: 374652 - DNA, 25 bp, Homo sapien
taaatctctgacaggaaaaacagag

SEQ ID NO: 374653 - DNA, 25 bp, Homo sapien
cagttttttaaatctctgacaggaa

SEQ ID NO: 374654 - DNA, 25 bp, Homo sapien
aaatctctgacaggaaaaacagaga

SEQ ID NO: 374655 - DNA, 25 bp, Homo sapien
gaagactgcctataacaaaggtcgt

SEQ ID NO: 374656 - DNA, 25 bp, Homo sapien
gcaacttgtcaactctctaggccgt

SEQ ID NO: 374657 - DNA, 25 bp, Homo sapien
tctaggccgtaagaggatggtgcaa

SEQ ID NO: 374658 - DNA, 25 bp, Homo sapien
gcataataaactggcactacagggt

SEQ ID NO: 374659 - DNA, 25 bp, Homo sapien
tcctcttgatttggccacattatta

SEQ ID NO: 374660 - DNA, 25 bp, Homo sapien
tgcccccaaatacgtttcctcttga

SEQ ID NO: 374661 - DNA, 25 bp, Homo sapien
cattattagatttgtatcctccttc

SEQ ID NO: 374662 - DNA, 25 bp, Homo sapien
cttcccccgctgctgtatgccacat

SEQ ID NO: 374663 - DNA, 25 bp, Homo sapien
agatcaggtaaatgcattcactcag

SEQ ID NO: 374664 - DNA, 25 bp, Homo sapien
gattccagatgtggaatcctgatgt

SEQ ID NO: 374665 - DNA, 25 bp, Homo sapien
tgatgttctgccatgctcccattcc

SEQ ID NO: 374666 - DNA, 25 bp, Homo sapien
gttttgctgactcatagaagatcag

SEQ ID NO: 374667 - DNA, 25 bp, Homo sapien
gagcataggaagatctgtcattgca

SEQ ID NO: 374668 - DNA, 25 bp, Homo sapien
gatcataggcatagtgtagcttaaa

SEQ ID NO: 374669 - DNA, 25 bp, Homo sapien
cgcgatgcttacgcctgttatccca

SEQ ID NO: 374670 - DNA, 25 bp, Homo sapien
taagaaagagtagcagatcataggc

SEQ ID NO: 374671 - DNA, 25 bp, Homo sapien
tacctccataagaaagagtagcaga

SEQ ID NO: 374672 - DNA, 25 bp, Homo sapien
tcttttatcaagaaacctgccatga

SEQ ID NO: 374673 - DNA, 25 bp, Homo sapien
caaaaggtaccttctagtgatgggt

SEQ ID NO: 374674 - DNA, 25 bp, Homo sapien
agtgatgggttgaaaaaacaagcca

SEQ ID NO: 374675 - DNA, 25 bp, Homo sapien
cctgatagctccaaaaggtaccttc

SEQ ID NO: 374676 - DNA, 25 bp, Homo sapien
catttccatagaagaaaggtttcag

SEQ ID NO: 374677 - DNA, 25 bp, Homo sapien
cataccatttccatagaagaaaggt

SEQ ID NO: 374678 - DNA, 25 bp, Homo sapien
ttttcataccatttccatagaagaa

SEQ ID NO: 374679 - DNA, 25 bp, Homo sapien
ccatttccatagaagaaaggtttca

SEQ ID NO: 374680 - DNA, 25 bp, Homo sapien
actctgccagcccaagatgttctgt

SEQ ID NO: 374681 - DNA, 25 bp, Homo sapien
ccagcccaagatgttctgtggatga

SEQ ID NO: 374682 - DNA, 25 bp, Homo sapien
ttttgtggcaacttgtagagtgggt

SEQ ID NO: 374683 - DNA, 25 bp, Homo sapien
ttctgtggatgaacctgacggaccc

SEQ ID NO: 374684 - DNA, 25 bp, Homo sapien
cagagaaaggatcaaaaaggtagga

SEQ ID NO: 374685 - DNA, 25 bp, Homo sapien
tattgccttcctctcacaagaacgt

SEQ ID NO: 374686 - DNA, 25 bp, Homo sapien
gccctaacagcatacgaagaagcat

SEQ ID NO: 374687 - DNA, 25 bp, Homo sapien
tagtgccttgtgcatgatgatgctc

SEQ ID NO: 374688 - DNA, 25 bp, Homo sapien
taggaattaagaggatacacacgtt

SEQ ID NO: 374689 - DNA, 25 bp, Homo sapien
gacatgatcgctttctacactgtat

SEQ ID NO: 374690 - DNA, 25 bp, Homo sapien
tgtggtttgtgacccaattaagtcc

SEQ ID NO: 374691 - DNA, 25 bp, Homo sapien
ggcatgcctggacaaacccttcttt

SEQ ID NO: 374692 - DNA, 25 bp, Homo sapien
tagccataaggccagagagtcactc

SEQ ID NO: 374693 - DNA, 25 bp, Homo sapien
tgtgccttattggtgcttcaagcag

SEQ ID NO: 374694 - DNA, 25 bp, Homo sapien
ttcaagcagtgaagcaatagccctt

SEQ ID NO: 374695 - DNA, 25 bp, Homo sapien
ccacgctttcccaaggaggtaactg

SEQ ID NO: 374696 - DNA, 25 bp, Homo sapien
taatgagtgcacatggaaaaagaca

SEQ ID NO: 374697 - DNA, 25 bp, Homo sapien
tacaacgcttcactgcatagataca

SEQ ID NO: 374698 - DNA, 25 bp, Homo sapien
tattccaggaacaaatccttgccaa

SEQ ID NO: 374699 - DNA, 25 bp, Homo sapien
ataagcccgtaagccaagccaacat

SEQ ID NO: 374700 - DNA, 25 bp, Homo sapien
gatagcatctcgccctatcccaaat

SEQ ID NO: 374701 - DNA, 25 bp, Homo sapien
tatcccaaataccgccaccaaaatg

SEQ ID NO: 374702 - DNA, 25 bp, Homo sapien
cttgggccagttcctgaaatatctt

SEQ ID NO: 374703 - DNA, 25 bp, Homo sapien
tcttgtgtgcatccttatcggctat

SEQ ID NO: 374704 - DNA, 25 bp, Homo sapien
tctcttttcgtagattaaactcagg

SEQ ID NO: 374705 - DNA, 25 bp, Homo sapien
tgtttcagcatagaagtgagctctc

SEQ ID NO: 374706 - DNA, 25 bp, Homo sapien
ttggctccacccaatattctgaaag

SEQ ID NO: 374707 - DNA, 25 bp, Homo sapien
tctgaaagattgcaactcaacatgt

SEQ ID NO: 374708 - DNA, 25 bp, Homo sapien
ggcagtgtattagattcctagggct

SEQ ID NO: 374709 - DNA, 25 bp, Homo sapien
atgggcagtgtattagattcctagg

SEQ ID NO: 374710 - DNA, 25 bp, Homo sapien
ctagggctgctggaaccagttacca

SEQ ID NO: 374711 - DNA, 25 bp, Homo sapien
ggctgctggaaccagttaccacaaa

SEQ ID NO: 374712 - DNA, 25 bp, Homo sapien
ctgagtgtaagggttgacctggcat

SEQ ID NO: 374713 - DNA, 25 bp, Homo sapien
ccacttccttgctgagtgtaagggt

SEQ ID NO: 374714 - DNA, 25 bp, Homo sapien
tgtaagggttgacctggcatccaaa

SEQ ID NO: 374715 - DNA, 25 bp, Homo sapien
ggttgacctggcatccaaaatcccc

SEQ ID NO: 374716 - DNA, 25 bp, Homo sapien
tgaaacccgccaggcatttgacaca

SEQ ID NO: 374717 - DNA, 25 bp, Homo sapien
gacacacagtttgctgccagggaca

SEQ ID NO: 374718 - DNA, 25 bp, Homo sapien
cactctggagttagtaaaacctgaa

SEQ ID NO: 374719 - DNA, 25 bp, Homo sapien
tctggcttattggagaggaaatgac

SEQ ID NO: 374720 - DNA, 25 bp, Homo sapien
ccctttctatcattgatactgacat

SEQ ID NO: 374721 - DNA, 25 bp, Homo sapien
ttccctttctatcattgatactgac

SEQ ID NO: 374722 - DNA, 25 bp, Homo sapien
tcttccctttctatcattgatactg

SEQ ID NO: 374723 - DNA, 25 bp, Homo sapien
ccctcttagattcttccctttctat

SEQ ID NO: 374724 - DNA, 25 bp, Homo sapien
tatctggtatttgtcggtgtcttcg

SEQ ID NO: 374725 - DNA, 25 bp, Homo sapien
catactgccctacgtgacttctgca

SEQ ID NO: 374726 - DNA, 25 bp, Homo sapien
ggtgtcttcggtttagctgctttaa

SEQ ID NO: 374727 - DNA, 25 bp, Homo sapien
tccagtcctagctcgagctttccat

SEQ ID NO: 374728 - DNA, 25 bp, Homo sapien
agggccatctactttgaatacaggt

SEQ ID NO: 374729 - DNA, 25 bp, Homo sapien
ttcggaatattgatgtattcatgat

SEQ ID NO: 374730 - DNA, 25 bp, Homo sapien
gaagggccatctactttgaatacag

SEQ ID NO: 374731 - DNA, 25 bp, Homo sapien
tggatttcggaatattgatgtattc

SEQ ID NO: 374732 - DNA, 25 bp, Homo sapien
catgttaagagaaggcctatctgct

SEQ ID NO: 374733 - DNA, 25 bp, Homo sapien
gaattataacgagaagctctttttc

SEQ ID NO: 374734 - DNA, 25 bp, Homo sapien
ttctcattatttccctgagggaaag

SEQ ID NO: 374735 - DNA, 25 bp, Homo sapien
tgagggaaagtgttgggaagtgaga

SEQ ID NO: 374736 - DNA, 25 bp, Homo sapien
tcaacctgtgttcccttgtaaatgc

SEQ ID NO: 374737 - DNA, 25 bp, Homo sapien
tacttgaagtgatcaggctggcgct

SEQ ID NO: 374738 - DNA, 25 bp, Homo sapien
tcagaatttggacctagataggcca

SEQ ID NO: 374739 - DNA, 25 bp, Homo sapien
taagagtaatgatcaagggtcagca

SEQ ID NO: 374740 - DNA, 25 bp, Homo sapien
caggtttacttaagtcagcttcatc

SEQ ID NO: 374741 - DNA, 25 bp, Homo sapien
tgcaggtttacttaagtcagcttca

SEQ ID NO: 374742 - DNA, 25 bp, Homo sapien
ttacttaagtcagcttcatcttcca

SEQ ID NO: 374743 - DNA, 25 bp, Homo sapien
ggtttacttaagtcagcttcatctt

SEQ ID NO: 374744 - DNA, 25 bp, Homo sapien
ggcattgcaggtttacttaagtcag

SEQ ID NO: 374745 - DNA, 25 bp, Homo sapien
cattgcaggtttacttaagtcagtt

SEQ ID NO: 374746 - DNA, 25 bp, Homo sapien
ttgcaggtttacttaagtcagtttc

SEQ ID NO: 374747 - DNA, 25 bp, Homo sapien
gggcattgcaggtttacttaagtca

SEQ ID NO: 374748 - DNA, 25 bp, Homo sapien
gggtacgcaactaaatagttccagc

SEQ ID NO: 374749 - DNA, 25 bp, Homo sapien
gcaactaaatagttccagcaggcat

SEQ ID NO: 374750 - DNA, 25 bp, Homo sapien
ttagtaaccatagggtacgcaacta

SEQ ID NO: 374751 - DNA, 25 bp, Homo sapien
catagggtacgcaactaaatagttc

SEQ ID NO: 374752 - DNA, 25 bp, Homo sapien
taatcagagtcaggtgttccatggg

SEQ ID NO: 374753 - DNA, 25 bp, Homo sapien
tcagagttagaaaggcgttccactt

SEQ ID NO: 374754 - DNA, 25 bp, Homo sapien
tagccacatgctaaacttcttcgga

SEQ ID NO: 374755 - DNA, 25 bp, Homo sapien
tttatacaacttgtgtaacacatgc

SEQ ID NO: 374756 - DNA, 25 bp, Homo sapien
tgaaggcaaacatctatattcaaat

SEQ ID NO: 374757 - DNA, 25 bp, Homo sapien
attctcattcttaactgaaggcaaa

SEQ ID NO: 374758 - DNA, 25 bp, Homo sapien
cgttacttcttacctgattctcatt

SEQ ID NO: 374759 - DNA, 25 bp, Homo sapien
tcccgttacttcttacctgattctc

SEQ ID NO: 374760 - DNA, 25 bp, Homo sapien
tagtgtgggagcctctgctactcgc

SEQ ID NO: 374761 - DNA, 25 bp, Homo sapien
gatcacagtaatggcacatatggcc

SEQ ID NO: 374762 - DNA, 25 bp, Homo sapien
gggtgacaatgtgctctgctgaaaa

SEQ ID NO: 374763 - DNA, 25 bp, Homo sapien
gagtatgtccctcccaagtaacagc

SEQ ID NO: 374764 - DNA, 25 bp, Homo sapien
ggccaacatcattttagtccccagc

SEQ ID NO: 374765 - DNA, 25 bp, Homo sapien
agtccccagcagttcatagaaatat

SEQ ID NO: 374766 - DNA, 25 bp, Homo sapien
gaacctgtgtatggctctagaatct

SEQ ID NO: 374767 - DNA, 25 bp, Homo sapien
tcattcccatgattctggccaacat

SEQ ID NO: 374768 - DNA, 25 bp, Homo sapien
agggcacacctcgggcagaagtcca

SEQ ID NO: 374769 - DNA, 25 bp, Homo sapien
acctcgggcagaagtccaaagacct

SEQ ID NO: 374770 - DNA, 25 bp, Homo sapien
gcacacctcgggcagaagtccaaag

SEQ ID NO: 374771 - DNA, 25 bp, Homo sapien
tcgggcagaagtccaaagacctcag

SEQ ID NO: 374772 - DNA, 25 bp, Homo sapien
gaaaccgaggctttggcattttaca

SEQ ID NO: 374773 - DNA, 25 bp, Homo sapien
cacaaggaaaccgaggctttggcat

SEQ ID NO: 374774 - DNA, 25 bp, Homo sapien
ctgggcccatagcacaaggaaaccg

SEQ ID NO: 374775 - DNA, 25 bp, Homo sapien
ggcccatagcacaaggaaaccgagg

SEQ ID NO: 374776 - DNA, 25 bp, Homo sapien
ctctcagtggcatcggttgatgggt

SEQ ID NO: 374777 - DNA, 25 bp, Homo sapien
tgggcactgttgtgtcctccacagt

SEQ ID NO: 374778 - DNA, 25 bp, Homo sapien
cagtctctcagtggcatcggttgat

SEQ ID NO: 374779 - DNA, 25 bp, Homo sapien
gtcctccacagtctctcagtggcat

SEQ ID NO: 374780 - DNA, 25 bp, Homo sapien
tttatatggtagtcagaagttcctg

SEQ ID NO: 374781 - DNA, 25 bp, Homo sapien
cagtcattcaactctgtgtattcct

SEQ ID NO: 374782 - DNA, 25 bp, Homo sapien
tcctgtgtgatcttcgtaacctcca

SEQ ID NO: 374783 - DNA, 25 bp, Homo sapien
cttcacagatatgcttctttatatg

SEQ ID NO: 374784 - DNA, 25 bp, Homo sapien
cagacggtccttttaagagtatatt

SEQ ID NO: 374785 - DNA, 25 bp, Homo sapien
gaaaggccactggatattagtacat

SEQ ID NO: 374786 - DNA, 25 bp, Homo sapien
tatgatctgccaactctctaagaag

SEQ ID NO: 374787 - DNA, 25 bp, Homo sapien
taaggattttctgagtacccattag

SEQ ID NO: 374788 - DNA, 25 bp, Homo sapien
tctggctgagagaactctagatggt

SEQ ID NO: 374789 - DNA, 25 bp, Homo sapien
tcattctggctgagagaactctaga

SEQ ID NO: 374790 - DNA, 25 bp, Homo sapien
tgagagaactctagatggttcagac

SEQ ID NO: 374791 - DNA, 25 bp, Homo sapien
agaactctagatggttcagacttgc

SEQ ID NO: 374792 - DNA, 25 bp, Homo sapien
cttctcttatctgctagccagccac

SEQ ID NO: 374793 - DNA, 25 bp, Homo sapien
ctgctagccagccacacaggaagca

SEQ ID NO: 374794 - DNA, 25 bp, Homo sapien
atctgctagccagccacacaggaag

SEQ ID NO: 374795 - DNA, 25 bp, Homo sapien
tcttatctgctagccagccacacag

SEQ ID NO: 374796 - DNA, 25 bp, Homo sapien
gaatttattatcacatgcgaagtta

SEQ ID NO: 374797 - DNA, 25 bp, Homo sapien
tcagaggttgaacacaaagccaagc

SEQ ID NO: 374798 - DNA, 25 bp, Homo sapien
tctgacatgttgacttcattgctcg

SEQ ID NO: 374799 - DNA, 25 bp, Homo sapien
tgctcgtttgctcatttctatcaga

SEQ ID NO: 374800 - DNA, 25 bp, Homo sapien
ctccaacctcttttcgcggctgctg

SEQ ID NO: 374801 - DNA, 25 bp, Homo sapien
tccaacctcttttcgcggctgctgg

SEQ ID NO: 374802 - DNA, 25 bp, Homo sapien
gctccaacctcttttcgcggctgct

SEQ ID NO: 374803 - DNA, 25 bp, Homo sapien
ttgaagtcctaacccgacagtgtct

SEQ ID NO: 374804 - DNA, 25 bp, Homo sapien
tagggcacagtaagacacagaggga

SEQ ID NO: 374805 - DNA, 25 bp, Homo sapien
ggtaagttatggcacccctgcaggg

SEQ ID NO: 374806 - DNA, 25 bp, Homo sapien
taaaggccaaagatgagtgacagga

SEQ ID NO: 374807 - DNA, 25 bp, Homo sapien
tttgatgaggagttagcacacggtt

SEQ ID NO: 374808 - DNA, 25 bp, Homo sapien
gaatgaatacaattcaggatctact

SEQ ID NO: 374809 - DNA, 25 bp, Homo sapien
ttttattatgcaaagcttcaacgct

SEQ ID NO: 374810 - DNA, 25 bp, Homo sapien
cttttgtagctattgaaggctgaca

SEQ ID NO: 374811 - DNA, 25 bp, Homo sapien
tgggcatcattcaattaactgagca

SEQ ID NO: 374812 - DNA, 25 bp, Homo sapien
tgagccttcaataccagcagacact

SEQ ID NO: 374813 - DNA, 25 bp, Homo sapien
gcttcacatgcaagaattacactgg

SEQ ID NO: 374814 - DNA, 25 bp, Homo sapien
tttgtttggaaaaccctgatacaca

SEQ ID NO: 374815 - DNA, 25 bp, Homo sapien
gttttatgaatgtgcgtgtcattct

SEQ ID NO: 374816 - DNA, 25 bp, Homo sapien
gagatgtacattccaccttttgatc

SEQ ID NO: 374817 - DNA, 25 bp, Homo sapien
cagcacaacgtgactgagatgtaca

SEQ ID NO: 374818 - DNA, 25 bp, Homo sapien
tctgactcagcgcttggtgttttcc

SEQ ID NO: 374819 - DNA, 25 bp, Homo sapien
cacaggacccagcacgtaagaggtg

SEQ ID NO: 374820 - DNA, 25 bp, Homo sapien
gaggctcagttacagtgattcaaac

SEQ ID NO: 374821 - DNA, 25 bp, Homo sapien
aacaagttcatcaatctgccaggca

SEQ ID NO: 374822 - DNA, 25 bp, Homo sapien
tgcaagcaagcacgcatagagcaag

SEQ ID NO: 374823 - DNA, 25 bp, Homo sapien
caggcacccctgtaggttaggatat

SEQ ID NO: 374824 - DNA, 25 bp, Homo sapien
gaatataatcacatgcacctgaggg

SEQ ID NO: 374825 - DNA, 25 bp, Homo sapien
gggaggatacacaatcacagcagaa

SEQ ID NO: 374826 - DNA, 25 bp, Homo sapien
gacagcagttaatccctggcccaag

SEQ ID NO: 374827 - DNA, 25 bp, Homo sapien
agtgggttactgctaagtttgatca

SEQ ID NO: 374828 - DNA, 25 bp, Homo sapien
ttaacatttaactccttgttacata

SEQ ID NO: 374829 - DNA, 25 bp, Homo sapien
gattaacatttaactccttgttaca

SEQ ID NO: 374830 - DNA, 25 bp, Homo sapien
atttaactccttgttacatatgcaa

SEQ ID NO: 374831 - DNA, 25 bp, Homo sapien
aacatttaactccttgttacatatg

SEQ ID NO: 374832 - DNA, 25 bp, Homo sapien
cagctgggacacaaggcaccaagtc

SEQ ID NO: 374833 - DNA, 25 bp, Homo sapien
ggacacaaggcaccaagtccccagg

SEQ ID NO: 374834 - DNA, 25 bp, Homo sapien
gggcctggcccaagagatcactttt

SEQ ID NO: 374835 - DNA, 25 bp, Homo sapien
cctgggcctggcccaagagatcact

SEQ ID NO: 374836 - DNA, 25 bp, Homo sapien
gggcccctcccctacagcagacttc

SEQ ID NO: 374837 - DNA, 25 bp, Homo sapien
ctgaagccacaatccgagctctatg

SEQ ID NO: 374838 - DNA, 25 bp, Homo sapien
cctcccctacagcagacttctgcca

SEQ ID NO: 374839 - DNA, 25 bp, Homo sapien
tgaagccacaatccgagctctatgt

SEQ ID NO: 374840 - DNA, 25 bp, Homo sapien
caaccaatcatgtgctccaaacagt

SEQ ID NO: 374841 - DNA, 25 bp, Homo sapien
gggtacagcctcctgcctagctgct

SEQ ID NO: 374842 - DNA, 25 bp, Homo sapien
aaaccatatcactccacaccttgcc

SEQ ID NO: 374843 - DNA, 25 bp, Homo sapien
gacccagccccatgatgtaatcatc

SEQ ID NO: 374844 - DNA, 25 bp, Homo sapien
cactaacactctaaggtagtgtgtt

SEQ ID NO: 374845 - DNA, 25 bp, Homo sapien
ttcacactaacactctaaggtagtg

SEQ ID NO: 374846 - DNA, 25 bp, Homo sapien
cacactaacactctaaggtagtgtg

SEQ ID NO: 374847 - DNA, 25 bp, Homo sapien
cttttcacactaacactctaaggta

SEQ ID NO: 374848 - DNA, 25 bp, Homo sapien
gaagagatcttggttggctttggag

SEQ ID NO: 374849 - DNA, 25 bp, Homo sapien
gagctgaagatttctgaagagatct

SEQ ID NO: 374850 - DNA, 25 bp, Homo sapien
agagcaggagaaaaaacaccgggag

SEQ ID NO: 374851 - DNA, 25 bp, Homo sapien
ccgggagtcctccatagaacctcat

SEQ ID NO: 374852 - DNA, 25 bp, Homo sapien
ggataccctgtatcatcaactgaga

SEQ ID NO: 374853 - DNA, 25 bp, Homo sapien
tgtcctccatagaatgtgctccatc

SEQ ID NO: 374854 - DNA, 25 bp, Homo sapien
agatgtccaacccaacgtagcctgg

SEQ ID NO: 374855 - DNA, 25 bp, Homo sapien
ccatacgtgggaaactaaagcttct

SEQ ID NO: 374856 - DNA, 25 bp, Homo sapien
tttcatgtaacgcacatctgtgttg

SEQ ID NO: 374857 - DNA, 25 bp, Homo sapien
ttcatgtaacgcacatctgtgttgc

SEQ ID NO: 374858 - DNA, 25 bp, Homo sapien
gaatttgaagatatgtatcaaaaac

SEQ ID NO: 374859 - DNA, 25 bp, Homo sapien
tttgaagatatgtatcaaaaaccat

SEQ ID NO: 374860 - DNA, 25 bp, Homo sapien
gaattgaatttgaagatatgtatca

SEQ ID NO: 374861 - DNA, 25 bp, Homo sapien
ctgaattgaatttgaagatatgtat

SEQ ID NO: 374862 - DNA, 25 bp, Homo sapien
taccacccgataactggatatcttt

SEQ ID NO: 374863 - DNA, 25 bp, Homo sapien
tctgctctttaccacccgataactg

SEQ ID NO: 374864 - DNA, 25 bp, Homo sapien
tctttaccacccgataactggatat

SEQ ID NO: 374865 - DNA, 25 bp, Homo sapien
tgctctttaccacccgataactgga

SEQ ID NO: 374866 - DNA, 25 bp, Homo sapien
gcctgctggtatgataggtctggtt

SEQ ID NO: 374867 - DNA, 25 bp, Homo sapien
catttcagccatgcagctgttctca

SEQ ID NO: 374868 - DNA, 25 bp, Homo sapien
tatgataggtctggttgaattttag

SEQ ID NO: 374869 - DNA, 25 bp, Homo sapien
tcatttcgtggtggcctgctggtat

SEQ ID NO: 374870 - DNA, 25 bp, Homo sapien
gatcctgcttatgtaaggcagtcat

SEQ ID NO: 374871 - DNA, 25 bp, Homo sapien
tgatcctgcttatgtaaggcagtca

SEQ ID NO: 374872 - DNA, 25 bp, Homo sapien
ctttgatcctgcttatgtaaggcag

SEQ ID NO: 374873 - DNA, 25 bp, Homo sapien
ttgatcctgcttatgtaaggcagtc

SEQ ID NO: 374874 - DNA, 25 bp, Homo sapien
cccacctgtgcctcaaatttctctt

SEQ ID NO: 374875 - DNA, 25 bp, Homo sapien
aacctggtgctattgttgctttctc

SEQ ID NO: 374876 - DNA, 25 bp, Homo sapien
ctgaacggtgataaacctggtgcta

SEQ ID NO: 374877 - DNA, 25 bp, Homo sapien
tgctttctctcaagggctcggctgc

SEQ ID NO: 374878 - DNA, 25 bp, Homo sapien
tggagtccaatcttttcccacatac

SEQ ID NO: 374879 - DNA, 25 bp, Homo sapien
ttcccacatacattgaagtcaatac

SEQ ID NO: 374880 - DNA, 25 bp, Homo sapien
aaatcacggtgcctctggagtccaa

SEQ ID NO: 374881 - DNA, 25 bp, Homo sapien
tgcacatgtatgcagccgccagagc

SEQ ID NO: 374882 - DNA, 25 bp, Homo sapien
ctgtcattcgaaggaaattgtaaaa

SEQ ID NO: 374883 - DNA, 25 bp, Homo sapien
gttgctccataaagaggtgctaata

SEQ ID NO: 374884 - DNA, 25 bp, Homo sapien
tgctaatattgtcctccgtaaaggt

SEQ ID NO: 374885 - DNA, 25 bp, Homo sapien
agttgctccataaagaggtgctaat

SEQ ID NO: 374886 - DNA, 25 bp, Homo sapien
gtccacgtacacgtaatacaataag

SEQ ID NO: 374887 - DNA, 25 bp, Homo sapien
cacgtacacgtaatacaataagaaa

SEQ ID NO: 374888 - DNA, 25 bp, Homo sapien
tgtccacgtacacgtaatacaataa

SEQ ID NO: 374889 - DNA, 25 bp, Homo sapien
tccacgtacacgtaatacaataaga

SEQ ID NO: 374890 - DNA, 25 bp, Homo sapien
tatggtatacatgtgaataatttca

SEQ ID NO: 374891 - DNA, 25 bp, Homo sapien
tccagcattttagtccacaaatcac

SEQ ID NO: 374892 - DNA, 25 bp, Homo sapien
tactatggtatacatgtgaataatt

SEQ ID NO: 374893 - DNA, 25 bp, Homo sapien
ccagcattttagtccacaaatcact

SEQ ID NO: 374894 - DNA, 25 bp, Homo sapien
ctccagggtcgtcttcacagcgcat

SEQ ID NO: 374895 - DNA, 25 bp, Homo sapien
agcgtggcctccagggtcgtcttca

SEQ ID NO: 374896 - DNA, 25 bp, Homo sapien
gtggcctccagggtcgtcttcacag

SEQ ID NO: 374897 - DNA, 25 bp, Homo sapien
tggcctccagggtcgtcttcacagc

SEQ ID NO: 374898 - DNA, 25 bp, Homo sapien
ggcctgtgaggtatgacattgatac

SEQ ID NO: 374899 - DNA, 25 bp, Homo sapien
ttgttaggcctgtgaggtatgacat

SEQ ID NO: 374900 - DNA, 25 bp, Homo sapien
ttaggcctgtgaggtatgacattga

SEQ ID NO: 374901 - DNA, 25 bp, Homo sapien
tgtgaggtatgacattgatacaaca

SEQ ID NO: 374902 - DNA, 25 bp, Homo sapien
gtagaagcttgggctatttttccat

SEQ ID NO: 374903 - DNA, 25 bp, Homo sapien
agaagcttgggctatttttccattc

SEQ ID NO: 374904 - DNA, 25 bp, Homo sapien
tagaagcttgggctatttttccatt

SEQ ID NO: 374905 - DNA, 25 bp, Homo sapien
attcaagccagctgcgagatctctg

SEQ ID NO: 374906 - DNA, 25 bp, Homo sapien
ccagctgcgagatctctgttgaaaa

SEQ ID NO: 374907 - DNA, 25 bp, Homo sapien
gaccctggggaagaatgtaagagac

SEQ ID NO: 374908 - DNA, 25 bp, Homo sapien
gaatgtaagagacagctgcaagagc

SEQ ID NO: 374909 - DNA, 25 bp, Homo sapien
ctcatagccttacacagttttacaa

SEQ ID NO: 374910 - DNA, 25 bp, Homo sapien
catagccttacacagttttacaaca

SEQ ID NO: 374911 - DNA, 25 bp, Homo sapien
tagccttacacagttttacaacatg

SEQ ID NO: 374912 - DNA, 25 bp, Homo sapien
gccttacacagttttacaacatgca

SEQ ID NO: 374913 - DNA, 25 bp, Homo sapien
tcatatcgtgcagattctgcagcct

SEQ ID NO: 374914 - DNA, 25 bp, Homo sapien
caccattctctgataaatagtgaaa

SEQ ID NO: 374915 - DNA, 25 bp, Homo sapien
tcttaaacctctttacatcctgtcc

SEQ ID NO: 374916 - DNA, 25 bp, Homo sapien
gcctgggtcccttgttcatatcgtg

SEQ ID NO: 374917 - DNA, 25 bp, Homo sapien
tcagatttcatcgaaaaccacacca

SEQ ID NO: 374918 - DNA, 25 bp, Homo sapien
agtatgaatagagccagcaccggcc

SEQ ID NO: 374919 - DNA, 25 bp, Homo sapien
tcgaaaaccacaccatcctggtcat

SEQ ID NO: 374920 - DNA, 25 bp, Homo sapien
gggaataagtatgaatagagccagc

SEQ ID NO: 374921 - DNA, 25 bp, Homo sapien
tgtgagtcctgtaggatggagagca

SEQ ID NO: 374922 - DNA, 25 bp, Homo sapien
ctggatgtgagtcctgtaggatgga

SEQ ID NO: 374923 - DNA, 25 bp, Homo sapien
atggagagcattgcatagctagcag

SEQ ID NO: 374924 - DNA, 25 bp, Homo sapien
gagagcattgcatagctagcagaag

SEQ ID NO: 374925 - DNA, 25 bp, Homo sapien
ctggaagagcatgatgaggtggggt

SEQ ID NO: 374926 - DNA, 25 bp, Homo sapien
tggaagagcatgatgaggtggggtg

SEQ ID NO: 374927 - DNA, 25 bp, Homo sapien
ggaagagcatgatgaggtggggtgg

SEQ ID NO: 374928 - DNA, 25 bp, Homo sapien
ttatgggacatcattagattctgtt

SEQ ID NO: 374929 - DNA, 25 bp, Homo sapien
tggagcttcatgttcacaccttgac

SEQ ID NO: 374930 - DNA, 25 bp, Homo sapien
agcttcatgttcacaccttgactgg

SEQ ID NO: 374931 - DNA, 25 bp, Homo sapien
catgttcacaccttgactggagatc

SEQ ID NO: 374932 - DNA, 25 bp, Homo sapien
tcatgttcacaccttgactggagat

SEQ ID NO: 374933 - DNA, 25 bp, Homo sapien
tccgggtttgcaaacaaagcataga

SEQ ID NO: 374934 - DNA, 25 bp, Homo sapien
gagttgcaggccacaacaaggtccg

SEQ ID NO: 374935 - DNA, 25 bp, Homo sapien
catagatcagactgctgatgagggt

SEQ ID NO: 374936 - DNA, 25 bp, Homo sapien
taacatgagtgaagacggccctctc

SEQ ID NO: 374937 - DNA, 25 bp, Homo sapien
aagatgttgccggttttcagaaata

SEQ ID NO: 374938 - DNA, 25 bp, Homo sapien
aagaccatctgctatgtcaacaaca

SEQ ID NO: 374939 - DNA, 25 bp, Homo sapien
ggccatggcaaagatgttgccggtt

SEQ ID NO: 374940 - DNA, 25 bp, Homo sapien
tatcaagaccatctgctatgtcaac

SEQ ID NO: 374941 - DNA, 25 bp, Homo sapien
cttacagtatcatttctctctcagg

SEQ ID NO: 374942 - DNA, 25 bp, Homo sapien
tctctctcaggagcttggcttcttt

SEQ ID NO: 374943 - DNA, 25 bp, Homo sapien
tctcaggagcttggcttctttgaga

SEQ ID NO: 374944 - DNA, 25 bp, Homo sapien
tctctcaggagcttggcttctttga

SEQ ID NO: 374945 - DNA, 25 bp, Homo sapien
tgaggttcacaacacaagacgcttg

SEQ ID NO: 374946 - DNA, 25 bp, Homo sapien
tgatggaagacacgtaaacactggt

SEQ ID NO: 374947 - DNA, 25 bp, Homo sapien
taaatacaaggattcctccataggg

SEQ ID NO: 374948 - DNA, 25 bp, Homo sapien
accttgggagctggactgtatgcca

SEQ ID NO: 374949 - DNA, 25 bp, Homo sapien
ttgaacaataattgtaggcaaatga

SEQ ID NO: 374950 - DNA, 25 bp, Homo sapien
acaataattgtaggcaaatgaagat

SEQ ID NO: 374951 - DNA, 25 bp, Homo sapien
gaacaataattgtaggcaaatgaag

SEQ ID NO: 374952 - DNA, 25 bp, Homo sapien
ctttgaacaataattgtaggcaaat

SEQ ID NO: 374953 - DNA, 25 bp, Homo sapien
tttaaagaaattgcaagcaaacctc

SEQ ID NO: 374954 - DNA, 25 bp, Homo sapien
cttttaggtcaaccgtatcaatgcc

SEQ ID NO: 374955 - DNA, 25 bp, Homo sapien
tactccacaattcccttttaggtca

SEQ ID NO: 374956 - DNA, 25 bp, Homo sapien
tacaacctgcagaacactacgacaa

SEQ ID NO: 374957 - DNA, 25 bp, Homo sapien
tgcagacactctgctgagaagagcc

SEQ ID NO: 374958 - DNA, 25 bp, Homo sapien
tacaacagctcttcggggttcatag

SEQ ID NO: 374959 - DNA, 25 bp, Homo sapien
gggttcatagcatgctcatcgtctt

SEQ ID NO: 374960 - DNA, 25 bp, Homo sapien
tcagtctctggttgtgttccccagg

SEQ ID NO: 374961 - DNA, 25 bp, Homo sapien
ttctattcaatggaacccctgcctc

SEQ ID NO: 374962 - DNA, 25 bp, Homo sapien
agagctgctataacctcccatggag

SEQ ID NO: 374963 - DNA, 25 bp, Homo sapien
tgccatcatttccctgcatgcagtc

SEQ ID NO: 374964 - DNA, 25 bp, Homo sapien
gctctgtttaatccaccttgatctg

SEQ ID NO: 374965 - DNA, 25 bp, Homo sapien
ttttcttcagcttctaagaactcac

SEQ ID NO: 374966 - DNA, 25 bp, Homo sapien
aagttccaggatcttttttcttcag

SEQ ID NO: 374967 - DNA, 25 bp, Homo sapien
gcttctaagaactcacagattccca

SEQ ID NO: 374968 - DNA, 25 bp, Homo sapien
agttccaggatcttttttcttcagc

SEQ ID NO: 374969 - DNA, 25 bp, Homo sapien
aaagcctcacttttgaacacaaagg

SEQ ID NO: 374970 - DNA, 25 bp, Homo sapien
aagctgccacttatttaaagcctca

SEQ ID NO: 374971 - DNA, 25 bp, Homo sapien
tgcatctgaaatgaataagctgcca

SEQ ID NO: 374972 - DNA, 25 bp, Homo sapien
cttttgaacacaaagggaatattca

SEQ ID NO: 374973 - DNA, 25 bp, Homo sapien
cttcattgtcttcacttgcttctcc

SEQ ID NO: 374974 - DNA, 25 bp, Homo sapien
gtcttcacttgcttctcctccttcc

SEQ ID NO: 374975 - DNA, 25 bp, Homo sapien
cttcacttgcttctcctccttcctc

SEQ ID NO: 374976 - DNA, 25 bp, Homo sapien
tcacttgcttctcctccttcctcca

SEQ ID NO: 374977 - DNA, 25 bp, Homo sapien
gctaaagcctacgtacaaattccaa

SEQ ID NO: 374978 - DNA, 25 bp, Homo sapien
tgtgaagaaattgcagattgccgtg

SEQ ID NO: 374979 - DNA, 25 bp, Homo sapien
caaagggcagaaccaacgtcagatc

SEQ ID NO: 374980 - DNA, 25 bp, Homo sapien
gaagtcactgccactcagatgtgaa

SEQ ID NO: 374981 - DNA, 25 bp, Homo sapien
cataatgagcatagattccaggcag

SEQ ID NO: 374982 - DNA, 25 bp, Homo sapien
ctggttgcaggccatttgatactac

SEQ ID NO: 374983 - DNA, 25 bp, Homo sapien
ataagcaaatgccactggttgcagg

SEQ ID NO: 374984 - DNA, 25 bp, Homo sapien
ttggcataataccttggcagaataa

SEQ ID NO: 374985 - DNA, 25 bp, Homo sapien
ggatgatcgctggagggttctatct

SEQ ID NO: 374986 - DNA, 25 bp, Homo sapien
ggccatgatgtagattcttatgaag

SEQ ID NO: 374987 - DNA, 25 bp, Homo sapien
gatgatcgctggagggttctatctg

SEQ ID NO: 374988 - DNA, 25 bp, Homo sapien
tgatcgctggagggttctatctggc

SEQ ID NO: 374989 - DNA, 25 bp, Homo sapien
tttaagcctgctgtgagaactccat

SEQ ID NO: 374990 - DNA, 25 bp, Homo sapien
tattggaggatgatagtcgactctc

SEQ ID NO: 374991 - DNA, 25 bp, Homo sapien
tgcatcttgttcttagaaggtccct

SEQ ID NO: 374992 - DNA, 25 bp, Homo sapien
ggtccctttcgtgtgaggatctgac

SEQ ID NO: 374993 - DNA, 25 bp, Homo sapien
gggggaaaatccaatcaggcagccc

SEQ ID NO: 374994 - DNA, 25 bp, Homo sapien
agggggaaaatccaatcaggcagcc

SEQ ID NO: 374995 - DNA, 25 bp, Homo sapien
tagggggaaaatccaatcaggcagc

SEQ ID NO: 374996 - DNA, 25 bp, Homo sapien
ggggaaaatccaatcaggcagccct

SEQ ID NO: 374997 - DNA, 25 bp, Homo sapien
tgtggatgcacaagttgttggagta

SEQ ID NO: 374998 - DNA, 25 bp, Homo sapien
tggtaaagaggttgagctataactt

SEQ ID NO: 374999 - DNA, 25 bp, Homo sapien
taattgatactagacataagtcctt

SEQ ID NO: 375000 - DNA, 25 bp, Homo sapien
ttgagctataacttgtggatgcaca

SEQ ID NO: 375001 - DNA, 25 bp, Homo sapien
tcacgttaccatttctccagggtat

SEQ ID NO: 375002 - DNA, 25 bp, Homo sapien
catttctccagggtatgttgaaaaa

SEQ ID NO: 375003 - DNA, 25 bp, Homo sapien
taccatttctccagggtatgttgaa

SEQ ID NO: 375004 - DNA, 25 bp, Homo sapien
ctccagggtatgttgaaaaactact

SEQ ID NO: 375005 - DNA, 25 bp, Homo sapien
attcagtgaaatcccaaaacagtgc

SEQ ID NO: 375006 - DNA, 25 bp, Homo sapien
tttcttctgcgtgtggtcagaccca

SEQ ID NO: 375007 - DNA, 25 bp, Homo sapien
gactgaaatataacctacctgccag

SEQ ID NO: 375008 - DNA, 25 bp, Homo sapien
caattacactgtggctaagactctc

SEQ ID NO: 375009 - DNA, 25 bp, Homo sapien
gcagctgcataaaccatagggattc

SEQ ID NO: 375010 - DNA, 25 bp, Homo sapien
gagtcaatctgcagaatcagctggt

SEQ ID NO: 375011 - DNA, 25 bp, Homo sapien
tacagagctgtgttctcggctgaac

SEQ ID NO: 375012 - DNA, 25 bp, Homo sapien
tacagggcaatcagtcagtggttca

SEQ ID NO: 375013 - DNA, 25 bp, Homo sapien
tactatatctttgcatgttaggcca

SEQ ID NO: 375014 - DNA, 25 bp, Homo sapien
taatggaggtcttgccaggagctgt

SEQ ID NO: 375015 - DNA, 25 bp, Homo sapien
atttaaactctctgttctgggtggg

SEQ ID NO: 375016 - DNA, 25 bp, Homo sapien
caaatcgatgtgcaaagccttccag

SEQ ID NO: 375017 - DNA, 25 bp, Homo sapien
tggtcaaaccataacccaagagaaa

SEQ ID NO: 375018 - DNA, 25 bp, Homo sapien
gaccaggcctggtacataatgggca

SEQ ID NO: 375019 - DNA, 25 bp, Homo sapien
tattccaagcatgtaagaccaggcc

SEQ ID NO: 375020 - DNA, 25 bp, Homo sapien
taatcatatatcaataccctaggga

SEQ ID NO: 375021 - DNA, 25 bp, Homo sapien
tttatcatgggggtcattgctggga

SEQ ID NO: 375022 - DNA, 25 bp, Homo sapien
tgctgggattgccatatgcatctgc

SEQ ID NO: 375023 - DNA, 25 bp, Homo sapien
gggcactgcaattgcgggcattgtt

SEQ ID NO: 375024 - DNA, 25 bp, Homo sapien
aagaaccacagggcgacccgcgtgg

SEQ ID NO: 375025 - DNA, 25 bp, Homo sapien
tctgtggacccaaagattactaccc

SEQ ID NO: 375026 - DNA, 25 bp, Homo sapien
ttagatctaccgctctctgcccaat

SEQ ID NO: 375027 - DNA, 25 bp, Homo sapien
tcctgttgctgttagatctaccgct

SEQ ID NO: 375028 - DNA, 25 bp, Homo sapien
atggatctgtggacccaaagattac

SEQ ID NO: 375029 - DNA, 25 bp, Homo sapien
acatctttacaatttggacgtgatc

SEQ ID NO: 375030 - DNA, 25 bp, Homo sapien
ttaacatctttacaatttggacgtg

SEQ ID NO: 375031 - DNA, 25 bp, Homo sapien
actgaatacagacttgctgtattga

SEQ ID NO: 375032 - DNA, 25 bp, Homo sapien
gaatacagacttgctgtattgaact

SEQ ID NO: 375033 - DNA, 25 bp, Homo sapien
cagtggatgttcttcaagagtggtc

SEQ ID NO: 375034 - DNA, 25 bp, Homo sapien
ttcttcaagagtggtctccaggcaa

SEQ ID NO: 375035 - DNA, 25 bp, Homo sapien
tcagctgttcattagatgtcttaaa

SEQ ID NO: 375036 - DNA, 25 bp, Homo sapien
cacagcagtggatgttcttcaagag

SEQ ID NO: 375037 - DNA, 25 bp, Homo sapien
aaactatgaagtttagcaaagaggg

SEQ ID NO: 375038 - DNA, 25 bp, Homo sapien
tatcaaagctcagtcttaagctctc

SEQ ID NO: 375039 - DNA, 25 bp, Homo sapien
tccaaatgctcttatagaagcacat

SEQ ID NO: 375040 - DNA, 25 bp, Homo sapien
taaagcttagcaaggttgagcagcc

SEQ ID NO: 375041 - DNA, 25 bp, Homo sapien
ggagatcttcataccaaaaacactg

SEQ ID NO: 375042 - DNA, 25 bp, Homo sapien
gtccagggtaagattaagagcacag

SEQ ID NO: 375043 - DNA, 25 bp, Homo sapien
ggtcaggtgtccagggtaagattaa

SEQ ID NO: 375044 - DNA, 25 bp, Homo sapien
tgctgttgcatcatgatttgacact

SEQ ID NO: 375045 - DNA, 25 bp, Homo sapien
gggaagtccaagagcatggtgtcaa

SEQ ID NO: 375046 - DNA, 25 bp, Homo sapien
tttatttggctcatgattctggaag

SEQ ID NO: 375047 - DNA, 25 bp, Homo sapien
tggctcatgattctggaagctggga

SEQ ID NO: 375048 - DNA, 25 bp, Homo sapien
aagtccaagagcatggtgtcaacat

SEQ ID NO: 375049 - DNA, 25 bp, Homo sapien
caggtccattgtcaaagagcagtac

SEQ ID NO: 375050 - DNA, 25 bp, Homo sapien
aaaaatcatccgagccttcagcaag

SEQ ID NO: 375051 - DNA, 25 bp, Homo sapien
tagcgtgcaacgctcttcggtagcg

SEQ ID NO: 375052 - DNA, 25 bp, Homo sapien
tcggtagcgtttgacccaccgtaga

SEQ ID NO: 375053 - DNA, 25 bp, Homo sapien
gaagtcaaactgattctgtgattct

SEQ ID NO: 375054 - DNA, 25 bp, Homo sapien
aggtagaggtgcgagtataacttgg

SEQ ID NO: 375055 - DNA, 25 bp, Homo sapien
gtgaagtcaaactgattctgtgatt

SEQ ID NO: 375056 - DNA, 25 bp, Homo sapien
gtgcgagtataacttggagaatgtg

SEQ ID NO: 375057 - DNA, 25 bp, Homo sapien
cacttgtcaattcctcaagagagga

SEQ ID NO: 375058 - DNA, 25 bp, Homo sapien
gaatttcttgagtcaaaatccccat

SEQ ID NO: 375059 - DNA, 25 bp, Homo sapien
cccacaactgagaaacgagggttga

SEQ ID NO: 375060 - DNA, 25 bp, Homo sapien
cctccagggctgtacggctggaaaa

SEQ ID NO: 375061 - DNA, 25 bp, Homo sapien
tatcctctcgtgagtattcgtcaga

SEQ ID NO: 375062 - DNA, 25 bp, Homo sapien
tactgttgctcctactacgcttata

SEQ ID NO: 375063 - DNA, 25 bp, Homo sapien
tagatgattgccttgctcagtgtgg

SEQ ID NO: 375064 - DNA, 25 bp, Homo sapien
tgtgatggaaccacgccctactgtt

SEQ ID NO: 375065 - DNA, 25 bp, Homo sapien
tatggccaactggttatccaacacc

SEQ ID NO: 375066 - DNA, 25 bp, Homo sapien
tttagatagataccccagcaatggg

SEQ ID NO: 375067 - DNA, 25 bp, Homo sapien
ggctgatgtcaggaacggtgcttcc

SEQ ID NO: 375068 - DNA, 25 bp, Homo sapien
taagcctcaagggtcatgtttgaca

SEQ ID NO: 375069 - DNA, 25 bp, Homo sapien
tgcccttgggtcacggtccgggcta

SEQ ID NO: 375070 - DNA, 25 bp, Homo sapien
gaaggacctttgcagacgcttctgc

SEQ ID NO: 375071 - DNA, 25 bp, Homo sapien
ttgtctacgcaggtcagtgacggag

SEQ ID NO: 375072 - DNA, 25 bp, Homo sapien
tgccttttccgcgaggcgacggcag

SEQ ID NO: 375073 - DNA, 25 bp, Homo sapien
taagctgaaagagactatcctgacc

SEQ ID NO: 375074 - DNA, 25 bp, Homo sapien
tcagcatacttcaaggtagcagctc

SEQ ID NO: 375075 - DNA, 25 bp, Homo sapien
cacttgcaggcaagcttgctcgacc

SEQ ID NO: 375076 - DNA, 25 bp, Homo sapien
gcaacttcctatgggcctcagtggc

SEQ ID NO: 375077 - DNA, 25 bp, Homo sapien
tatttggcacacctccgaagatcca

SEQ ID NO: 375078 - DNA, 25 bp, Homo sapien
gccatgagggcgtggacaccttcgc

SEQ ID NO: 375079 - DNA, 25 bp, Homo sapien
gagccatcttgatccttgatggaag

SEQ ID NO: 375080 - DNA, 25 bp, Homo sapien
tgaggagagccatcttgatccttga

SEQ ID NO: 375081 - DNA, 25 bp, Homo sapien
tcacacataggtctggatccctcgc

SEQ ID NO: 375082 - DNA, 25 bp, Homo sapien
gatccctcgccttgtgagctgtcct

SEQ ID NO: 375083 - DNA, 25 bp, Homo sapien
ggtctggatccctcgccttgtgagc

SEQ ID NO: 375084 - DNA, 25 bp, Homo sapien
cacataggtctggatccctcgcctt

SEQ ID NO: 375085 - DNA, 25 bp, Homo sapien
gatgaaccactaggtaagccccaac

SEQ ID NO: 375086 - DNA, 25 bp, Homo sapien
ccacatgaagtgatatagtaaatgc

SEQ ID NO: 375087 - DNA, 25 bp, Homo sapien
ttaaatgtgacttggcagagggatg

SEQ ID NO: 375088 - DNA, 25 bp, Homo sapien
cagggcttcttgcaacttggtagaa

SEQ ID NO: 375089 - DNA, 25 bp, Homo sapien
cttcccactgggaatcaaagcagta

SEQ ID NO: 375090 - DNA, 25 bp, Homo sapien
catggcaatgagagtcagtggcagc

SEQ ID NO: 375091 - DNA, 25 bp, Homo sapien
atcaaagcagtaggaaagagaagcc

SEQ ID NO: 375092 - DNA, 25 bp, Homo sapien
ggcgattagggtagctgacagttta

SEQ ID NO: 375093 - DNA, 25 bp, Homo sapien
gttgtagcctcttccgtattagtct

SEQ ID NO: 375094 - DNA, 25 bp, Homo sapien
taagtgcacagaactacatctggat

SEQ ID NO: 375095 - DNA, 25 bp, Homo sapien
gaatccagaggataagaaatccatg

SEQ ID NO: 375096 - DNA, 25 bp, Homo sapien
gaggataagaaatccatgatgtagc

SEQ ID NO: 375097 - DNA, 25 bp, Homo sapien
tctgctccagaatccagaggataag

SEQ ID NO: 375098 - DNA, 25 bp, Homo sapien
taagaaatccatgatgtagcagcat

SEQ ID NO: 375099 - DNA, 25 bp, Homo sapien
tttaaacactgtatgaattcctcca

SEQ ID NO: 375100 - DNA, 25 bp, Homo sapien
atcatagacctacagcagattttat

SEQ ID NO: 375101 - DNA, 25 bp, Homo sapien
tatgaacctttcagcattctaagct

SEQ ID NO: 375102 - DNA, 25 bp, Homo sapien
tatgagatattgcaggtggaggacc

SEQ ID NO: 375103 - DNA, 25 bp, Homo sapien
gattatggaagagccagttcacacc

SEQ ID NO: 375104 - DNA, 25 bp, Homo sapien
cagagatcataagtgtttccaggca

SEQ ID NO: 375105 - DNA, 25 bp, Homo sapien
gatacgtcacttgggtagcaaaagg

SEQ ID NO: 375106 - DNA, 25 bp, Homo sapien
tgcctgtgcacgttcaaagcttctc

SEQ ID NO: 375107 - DNA, 25 bp, Homo sapien
tctacagaattgtgcttcttgggag

SEQ ID NO: 375108 - DNA, 25 bp, Homo sapien
ttgggagctgagctgacaacataca

SEQ ID NO: 375109 - DNA, 25 bp, Homo sapien
gtctttggcatattctacagaattg

SEQ ID NO: 375110 - DNA, 25 bp, Homo sapien
tgggagctgagctgacaacatacat

SEQ ID NO: 375111 - DNA, 25 bp, Homo sapien
caaataccgtgatactttgaacaac

SEQ ID NO: 375112 - DNA, 25 bp, Homo sapien
tgggcttatcaaataccgtgatact

SEQ ID NO: 375113 - DNA, 25 bp, Homo sapien
taccgtgatactttgaacaactcca

SEQ ID NO: 375114 - DNA, 25 bp, Homo sapien
catgaatttgggcttatcaaatacc

SEQ ID NO: 375115 - DNA, 25 bp, Homo sapien
atcagagaaagtggaatgacccagc

SEQ ID NO: 375116 - DNA, 25 bp, Homo sapien
ctagtgttgacaactatcattgcag

SEQ ID NO: 375117 - DNA, 25 bp, Homo sapien
ggctgctagtccccgaactgccaag

SEQ ID NO: 375118 - DNA, 25 bp, Homo sapien
tgttgacaactatcattgcagtttt

SEQ ID NO: 375119 - DNA, 25 bp, Homo sapien
ctgatgctgaccaccggctgctagt

SEQ ID NO: 375120 - DNA, 25 bp, Homo sapien
cagcttgcgtgctgtggactagtgc

SEQ ID NO: 375121 - DNA, 25 bp, Homo sapien
gcaaggcagcggctctatggtatgt

SEQ ID NO: 375122 - DNA, 25 bp, Homo sapien
gagacgccgccaaggcagcttgcgt

SEQ ID NO: 375123 - DNA, 25 bp, Homo sapien
ggactagtgcgttgtgtgacctcat

SEQ ID NO: 375124 - DNA, 25 bp, Homo sapien
tgggggcacaaccagcctctgagaa

SEQ ID NO: 375125 - DNA, 25 bp, Homo sapien
accagcctctgagaaagtaagtcat

SEQ ID NO: 375126 - DNA, 25 bp, Homo sapien
ctgggggcacaaccagcctctgaga

SEQ ID NO: 375127 - DNA, 25 bp, Homo sapien
acaaccagcctctgagaaagtaagt

SEQ ID NO: 375128 - DNA, 25 bp, Homo sapien
gaccaagcgtgcactgtctgaaatg

SEQ ID NO: 375129 - DNA, 25 bp, Homo sapien
ggagaccaagcgtgcactgtctgaa

SEQ ID NO: 375130 - DNA, 25 bp, Homo sapien
tttggagaccaagcgtgcactgtct

SEQ ID NO: 375131 - DNA, 25 bp, Homo sapien
ctttggagaccaagcgtgcactgtc

SEQ ID NO: 375132 - DNA, 25 bp, Homo sapien
caagccttttgaccgttgtaactgc

SEQ ID NO: 375133 - DNA, 25 bp, Homo sapien
tgtgtagagttgagcataacatcac

SEQ ID NO: 375134 - DNA, 25 bp, Homo sapien
gagttgagcataacatcacaagcct

SEQ ID NO: 375135 - DNA, 25 bp, Homo sapien
cataacatcacaagccttttgaccg

SEQ ID NO: 375136 - DNA, 25 bp, Homo sapien
tcctgcaactcaaactcctttggct

SEQ ID NO: 375137 - DNA, 25 bp, Homo sapien
tgaggcctcagggtaccaatggcac

SEQ ID NO: 375138 - DNA, 25 bp, Homo sapien
gcttcccaggggaatgattcactcc

SEQ ID NO: 375139 - DNA, 25 bp, Homo sapien
tgccttgtcgctccgatctctacag

SEQ ID NO: 375140 - DNA, 25 bp, Homo sapien
ttggtgtcatctcccgcatattcgt

SEQ ID NO: 375141 - DNA, 25 bp, Homo sapien
tctcccgcatattcgttaagttctc

SEQ ID NO: 375142 - DNA, 25 bp, Homo sapien
tgtcatctcccgcatattcgttaag

SEQ ID NO: 375143 - DNA, 25 bp, Homo sapien
ttttgtattggtgtcatctcccgca

SEQ ID NO: 375144 - DNA, 25 bp, Homo sapien
cagttgtgcgtaagaataagaggtc

SEQ ID NO: 375145 - DNA, 25 bp, Homo sapien
tatttggcccgaactgagtacagct

SEQ ID NO: 375146 - DNA, 25 bp, Homo sapien
tgcactgatgctgatatccacggca

SEQ ID NO: 375147 - DNA, 25 bp, Homo sapien
aggaagtgaccccaaaattgcgtgt

SEQ ID NO: 375148 - DNA, 25 bp, Homo sapien
tttgccagtactgtcctgcttcttt

SEQ ID NO: 375149 - DNA, 25 bp, Homo sapien
tcctgcttctttcctggaaaaggaa

SEQ ID NO: 375150 - DNA, 25 bp, Homo sapien
ttgccagtactgtcctgcttctttc

SEQ ID NO: 375151 - DNA, 25 bp, Homo sapien
tcctggaaaaggaatttcgcctcta

SEQ ID NO: 375152 - DNA, 25 bp, Homo sapien
ctggttgtgtactttgcgggccact

SEQ ID NO: 375153 - DNA, 25 bp, Homo sapien
tttctatggataacaaaactaggca

SEQ ID NO: 375154 - DNA, 25 bp, Homo sapien
tcctggaaactttccgaatggatta

SEQ ID NO: 375155 - DNA, 25 bp, Homo sapien
taggcaatgttgagtaaactccccg

SEQ ID NO: 375156 - DNA, 25 bp, Homo sapien
tgataggccaagtcaacagagcaaa

SEQ ID NO: 375157 - DNA, 25 bp, Homo sapien
gccgactaaaaatgataggccaagt

SEQ ID NO: 375158 - DNA, 25 bp, Homo sapien
gattcaattcccttggccgactaaa

SEQ ID NO: 375159 - DNA, 25 bp, Homo sapien
aagttgttggcattgattcaattcc

SEQ ID NO: 375160 - DNA, 25 bp, Homo sapien
ctgtgcaggtttacagccagtgccg

SEQ ID NO: 375161 - DNA, 25 bp, Homo sapien
cagccagtgccgattctgactggtt

SEQ ID NO: 375162 - DNA, 25 bp, Homo sapien
gctgattttcagcaggtaagcccca

SEQ ID NO: 375163 - DNA, 25 bp, Homo sapien
ggtaagccccagtacagctgtgcag

SEQ ID NO: 375164 - DNA, 25 bp, Homo sapien
ttatgagtacgcaaaagacatcctc

SEQ ID NO: 375165 - DNA, 25 bp, Homo sapien
taagagggacgatgaaggtttctgt

SEQ ID NO: 375166 - DNA, 25 bp, Homo sapien
atatttaagagggacgatgaaggtt

SEQ ID NO: 375167 - DNA, 25 bp, Homo sapien
gagtacgcaaaagacatcctctggg

SEQ ID NO: 375168 - DNA, 25 bp, Homo sapien
gaggttgtctcaaaacccatgtgct

SEQ ID NO: 375169 - DNA, 25 bp, Homo sapien
ttaagaggttgtctcaaaacccatg

SEQ ID NO: 375170 - DNA, 25 bp, Homo sapien
aaactcaatattggcatcgtatacc

SEQ ID NO: 375171 - DNA, 25 bp, Homo sapien
taccagttcccataggttctctgat

SEQ ID NO: 375172 - DNA, 25 bp, Homo sapien
taagggctagagcagagtcttttac

SEQ ID NO: 375173 - DNA, 25 bp, Homo sapien
gagcagagtcttttactatttcaag

SEQ ID NO: 375174 - DNA, 25 bp, Homo sapien
aaattgtaagggctagagcagagtc

SEQ ID NO: 375175 - DNA, 25 bp, Homo sapien
tttactatttcaaggctctgttgat

SEQ ID NO: 375176 - DNA, 25 bp, Homo sapien
ggtccaacagtcgtatcctggtgaa

SEQ ID NO: 375177 - DNA, 25 bp, Homo sapien
gaggagacacaatgagcttagtacc

SEQ ID NO: 375178 - DNA, 25 bp, Homo sapien
tgaggtgtgtagaacagggtcccac

SEQ ID NO: 375179 - DNA, 25 bp, Homo sapien
caaggaggatgaaacgccggaacaa

SEQ ID NO: 375180 - DNA, 25 bp, Homo sapien
tttgctaagggaatacatctggatc

SEQ ID NO: 375181 - DNA, 25 bp, Homo sapien
taactagcagtagcaggtgcaaaca

SEQ ID NO: 375182 - DNA, 25 bp, Homo sapien
gacagtcaagcgctcctctgtgcga

SEQ ID NO: 375183 - DNA, 25 bp, Homo sapien
gaaaatagtctatgcatggtccaaa

SEQ ID NO: 375184 - DNA, 25 bp, Homo sapien
gcgggggcgcgcgagtgtgagggtt

SEQ ID NO: 375185 - DNA, 25 bp, Homo sapien
cagttcgagcactaacgcgggggcg

SEQ ID NO: 375186 - DNA, 25 bp, Homo sapien
gggctagggcggtcgctctcgccat

SEQ ID NO: 375187 - DNA, 25 bp, Homo sapien
agtgtgagggttgcgggtccgcccg

SEQ ID NO: 375188 - DNA, 25 bp, Homo sapien
acactcaggtgtgcggatgtcaatg

SEQ ID NO: 375189 - DNA, 25 bp, Homo sapien
taggctggacaatgcttgacaatgc

SEQ ID NO: 375190 - DNA, 25 bp, Homo sapien
agtttgaaggagaaatgcaacggcg

SEQ ID NO: 375191 - DNA, 25 bp, Homo sapien
taatcctcgtagttcgaagtcgaag

SEQ ID NO: 375192 - DNA, 25 bp, Homo sapien
tttccataatactaggaggtaggag

SEQ ID NO: 375193 - DNA, 25 bp, Homo sapien
aaaacaccaagtcgcacatcatttg

SEQ ID NO: 375194 - DNA, 25 bp, Homo sapien
gattaaaagttatgagtcagagtca

SEQ ID NO: 375195 - DNA, 25 bp, Homo sapien
catttgttgtagaccatcgccacct

SEQ ID NO: 375196 - DNA, 25 bp, Homo sapien
tgcatctgccggttactgggttaag

SEQ ID NO: 375197 - DNA, 25 bp, Homo sapien
acagattgaatgcatctgccggtta

SEQ ID NO: 375198 - DNA, 25 bp, Homo sapien
tttgataggaaagctgcaggttgtc

SEQ ID NO: 375199 - DNA, 25 bp, Homo sapien
tctcagtgttttcaggctacgccct

SEQ ID NO: 375200 - DNA, 25 bp, Homo sapien
ttgtctaggtattgtgagcaacacc

SEQ ID NO: 375201 - DNA, 25 bp, Homo sapien
taattaggtgaaatatcatcttgtc

SEQ ID NO: 375202 - DNA, 25 bp, Homo sapien
ttgtgagcaacaccgccaacatcat

SEQ ID NO: 375203 - DNA, 25 bp, Homo sapien
tcatcttgtctaggtattgtgagca

SEQ ID NO: 375204 - DNA, 25 bp, Homo sapien
gagttggcacaggtatctccctagc

SEQ ID NO: 375205 - DNA, 25 bp, Homo sapien
tcacgatgatttgactttgcagcat

SEQ ID NO: 375206 - DNA, 25 bp, Homo sapien
gattgtctggcagagcaaacaaagc

SEQ ID NO: 375207 - DNA, 25 bp, Homo sapien
acatttgcacaaacttccttcacga

SEQ ID NO: 375208 - DNA, 25 bp, Homo sapien
tggaatagggagacttcccaggaat

SEQ ID NO: 375209 - DNA, 25 bp, Homo sapien
gttggaatagggagacttcccagga

SEQ ID NO: 375210 - DNA, 25 bp, Homo sapien
aatagggagacttcccaggaatcta

SEQ ID NO: 375211 - DNA, 25 bp, Homo sapien
gaatagggagacttcccaggaatct

SEQ ID NO: 375212 - DNA, 25 bp, Homo sapien
gagttgacacgcaagacagctggag

SEQ ID NO: 375213 - DNA, 25 bp, Homo sapien
actttgcctatgtcctgcaccctga

SEQ ID NO: 375214 - DNA, 25 bp, Homo sapien
tgcaccctgaggttactctcaacca

SEQ ID NO: 375215 - DNA, 25 bp, Homo sapien
tctcaaccacctgacatgacttggc

SEQ ID NO: 375216 - DNA, 25 bp, Homo sapien
cttccactttgcctatgtcctgcac

SEQ ID NO: 375217 - DNA, 25 bp, Homo sapien
tgagacccaaataacctcaggtagg

SEQ ID NO: 375218 - DNA, 25 bp, Homo sapien
gctatagaagttggagcagcagaag

SEQ ID NO: 375219 - DNA, 25 bp, Homo sapien
tgtgatcagtatgtctgttactctt

SEQ ID NO: 375220 - DNA, 25 bp, Homo sapien
tgggaaccagagcttcattcttgga

SEQ ID NO: 375221 - DNA, 25 bp, Homo sapien
tggctagtacattgaaaaatcttcc

SEQ ID NO: 375222 - DNA, 25 bp, Homo sapien
catacacattagttagcccagttaa

SEQ ID NO: 375223 - DNA, 25 bp, Homo sapien
cagatagatcaacttaactggctag

SEQ ID NO: 375224 - DNA, 25 bp, Homo sapien
caggtagtgttcagatcagcaaaac

SEQ ID NO: 375225 - DNA, 25 bp, Homo sapien
tacaactcaatctaagtcagtccac

SEQ ID NO: 375226 - DNA, 25 bp, Homo sapien
ggaaacaatcctagagagctcagag

SEQ ID NO: 375227 - DNA, 25 bp, Homo sapien
gataccacgaattgtgaacaaaggg

SEQ ID NO: 375228 - DNA, 25 bp, Homo sapien
tatgagtctcactagattgactgag

SEQ ID NO: 375229 - DNA, 25 bp, Homo sapien
cctggtttatatctactctctaaag

SEQ ID NO: 375230 - DNA, 25 bp, Homo sapien
tcattgcaatggtgtgggcaacagt

SEQ ID NO: 375231 - DNA, 25 bp, Homo sapien
gcagatctagtgttattcctaaaac

SEQ ID NO: 375232 - DNA, 25 bp, Homo sapien
ccactttagtgatatcttgcagatc

SEQ ID NO: 375233 - DNA, 25 bp, Homo sapien
tacagctcaagaacactcacaacac

SEQ ID NO: 375234 - DNA, 25 bp, Homo sapien
tatgtagatacagctcaagaacact

SEQ ID NO: 375235 - DNA, 25 bp, Homo sapien
aaaggccatgacttatgtagataca

SEQ ID NO: 375236 - DNA, 25 bp, Homo sapien
aggccatgacttatgtagatacagc

SEQ ID NO: 375237 - DNA, 25 bp, Homo sapien
aattctgtaagactaggatcagtgc

SEQ ID NO: 375238 - DNA, 25 bp, Homo sapien
cacaggaggatagatgcattagcac

SEQ ID NO: 375239 - DNA, 25 bp, Homo sapien
gcattagcactctaaagaatcatca

SEQ ID NO: 375240 - DNA, 25 bp, Homo sapien
tgacccctaagtaatctttgaaaca

SEQ ID NO: 375241 - DNA, 25 bp, Homo sapien
gatgattagattaaacacggccata

SEQ ID NO: 375242 - DNA, 25 bp, Homo sapien
gctaaactcaggcaacttaacaagt

SEQ ID NO: 375243 - DNA, 25 bp, Homo sapien
gttgggccagcttctaatacactag

SEQ ID NO: 375244 - DNA, 25 bp, Homo sapien
gaccaaatattcagctgagacttag

SEQ ID NO: 375245 - DNA, 25 bp, Homo sapien
accgcagccgaagggacacagacac

SEQ ID NO: 375246 - DNA, 25 bp, Homo sapien
ctcgcagctgccgactggggatgac

SEQ ID NO: 375247 - DNA, 25 bp, Homo sapien
aggaggagaccgcagccgaagggac

SEQ ID NO: 375248 - DNA, 25 bp, Homo sapien
gaagggacacagacacgccgcttca

SEQ ID NO: 375249 - DNA, 25 bp, Homo sapien
taagaggcagcgtgcagtgacgaac

SEQ ID NO: 375250 - DNA, 25 bp, Homo sapien
cagtgacgaactgttgaaattgcca

SEQ ID NO: 375251 - DNA, 25 bp, Homo sapien
gcagcgtgcagtgacgaactgttga

SEQ ID NO: 375252 - DNA, 25 bp, Homo sapien
cctttaagaggcagcgtgcagtgac

SEQ ID NO: 375253 - DNA, 25 bp, Homo sapien
caaatgagggcaccacaactgaatc

SEQ ID NO: 375254 - DNA, 25 bp, Homo sapien
gccatggagggtctgataaactttc

SEQ ID NO: 375255 - DNA, 25 bp, Homo sapien
tatagccagctgtcgataatgaact

SEQ ID NO: 375256 - DNA, 25 bp, Homo sapien
tgaacaagggctcgagtctcacaaa

SEQ ID NO: 375257 - DNA, 25 bp, Homo sapien
gaaagactacaggatagagcaagct

SEQ ID NO: 375258 - DNA, 25 bp, Homo sapien
ggactatatttctgccaatggacca

SEQ ID NO: 375259 - DNA, 25 bp, Homo sapien
gcaagcttgagctcctactgcatgg

SEQ ID NO: 375260 - DNA, 25 bp, Homo sapien
tactgcatggatcactactgtgctg

SEQ ID NO: 375261 - DNA, 25 bp, Homo sapien
tatatatgcaaaggactgagctagg

SEQ ID NO: 375262 - DNA, 25 bp, Homo sapien
gaccagcaggtaagtgacattcata

SEQ ID NO: 375263 - DNA, 25 bp, Homo sapien
tgttagttaacatcgatcgcaccaa

SEQ ID NO: 375264 - DNA, 25 bp, Homo sapien
tagacataacatggccaggacaaag

SEQ ID NO: 375265 - DNA, 25 bp, Homo sapien
cgcctggccctcttactttatattt

SEQ ID NO: 375266 - DNA, 25 bp, Homo sapien
tcattttaccaaatattctattctt

SEQ ID NO: 375267 - DNA, 25 bp, Homo sapien
tcatttatctcttcaaacatcctca

SEQ ID NO: 375268 - DNA, 25 bp, Homo sapien
tgcgcctggccctcttactttatat

SEQ ID NO: 375269 - DNA, 25 bp, Homo sapien
aacctgggaccttattgtggatgac

SEQ ID NO: 375270 - DNA, 25 bp, Homo sapien
tgagattcaaaccaaacacgagact

SEQ ID NO: 375271 - DNA, 25 bp, Homo sapien
ccagaaggaggtcaagcaatgcaag

SEQ ID NO: 375272 - DNA, 25 bp, Homo sapien
caaggagggttgtcagcagaaaaac

SEQ ID NO: 375273 - DNA, 25 bp, Homo sapien
tatagcctgtaggtgatcgtgaagt

SEQ ID NO: 375274 - DNA, 25 bp, Homo sapien
caatatgcaacgcttcaggactatg

SEQ ID NO: 375275 - DNA, 25 bp, Homo sapien
tctacaatcatatggcatgggccac

SEQ ID NO: 375276 - DNA, 25 bp, Homo sapien
ggccaccaaactggagtcccatgaa

SEQ ID NO: 375277 - DNA, 25 bp, Homo sapien
gattttataataatggcccttggaa

SEQ ID NO: 375278 - DNA, 25 bp, Homo sapien
tgaaagctattttgactaaaacgct

SEQ ID NO: 375279 - DNA, 25 bp, Homo sapien
tttctggaagaacatatctctgatt

SEQ ID NO: 375280 - DNA, 25 bp, Homo sapien
ctaaaacgctaactcaatgagaagg

SEQ ID NO: 375281 - DNA, 25 bp, Homo sapien
gagtactcatgagtgttctgggaaa

SEQ ID NO: 375282 - DNA, 25 bp, Homo sapien
gtgaataagaatgcctaaccaccta

SEQ ID NO: 375283 - DNA, 25 bp, Homo sapien
ttgtcagcagggtcttcgtgatctg

SEQ ID NO: 375284 - DNA, 25 bp, Homo sapien
gaagggctacttcacaggtggagca

SEQ ID NO: 375285 - DNA, 25 bp, Homo sapien
agctcggtgcataccagaaactgct

SEQ ID NO: 375286 - DNA, 25 bp, Homo sapien
gcagagctcggtgcataccagaaac

SEQ ID NO: 375287 - DNA, 25 bp, Homo sapien
gagcagagctcggtgcataccagaa

SEQ ID NO: 375288 - DNA, 25 bp, Homo sapien
ctggagcagagctcggtgcatacca

SEQ ID NO: 375289 - DNA, 25 bp, Homo sapien
gactggcaaacaggtctcagcacca

SEQ ID NO: 375290 - DNA, 25 bp, Homo sapien
caccagaaagcggtaatcttggcta

SEQ ID NO: 375291 - DNA, 25 bp, Homo sapien
ctcagcaccagaaagcggtaatctt

SEQ ID NO: 375292 - DNA, 25 bp, Homo sapien
cagaaagcggtaatcttggctatta

SEQ ID NO: 375293 - DNA, 25 bp, Homo sapien
tcttcaggctcttactagttggtgc

SEQ ID NO: 375294 - DNA, 25 bp, Homo sapien
caggctcttactagttggtgcttga

SEQ ID NO: 375295 - DNA, 25 bp, Homo sapien
cttactagttggtgcttgatgagca

SEQ ID NO: 375296 - DNA, 25 bp, Homo sapien
tggtcttcaggctcttactagttgg

SEQ ID NO: 375297 - DNA, 25 bp, Homo sapien
gcaaggacagctatggcactactta

SEQ ID NO: 375298 - DNA, 25 bp, Homo sapien
taggagagcttttgcagcaaggaca

SEQ ID NO: 375299 - DNA, 25 bp, Homo sapien
tatagtgactggagataggagagct

SEQ ID NO: 375300 - DNA, 25 bp, Homo sapien
gacttagctgcatttgatacagcga

SEQ ID NO: 375301 - DNA, 25 bp, Homo sapien
gttccaaatcaagctcatctctgct

SEQ ID NO: 375302 - DNA, 25 bp, Homo sapien
aagttccaaatcaagctcatctctg

SEQ ID NO: 375303 - DNA, 25 bp, Homo sapien
ccaaatcaagctcatctctgctatt

SEQ ID NO: 375304 - DNA, 25 bp, Homo sapien
tccaaatcaagctcatctctgctat

SEQ ID NO: 375305 - DNA, 25 bp, Homo sapien
gtagggcctaggctggactgacagc

SEQ ID NO: 375306 - DNA, 25 bp, Homo sapien
gttcgttttatttcgtagctctgca

SEQ ID NO: 375307 - DNA, 25 bp, Homo sapien
ccatgaatctatgttcgttttattt

SEQ ID NO: 375308 - DNA, 25 bp, Homo sapien
tttcgtagctctgcaatccccaggg

SEQ ID NO: 375309 - DNA, 25 bp, Homo sapien
tttcttatgcagaagtccatgagaa

SEQ ID NO: 375310 - DNA, 25 bp, Homo sapien
tatttatctttcttatgcagaagtc

SEQ ID NO: 375311 - DNA, 25 bp, Homo sapien
tatctttcttatgcagaagtccatg

SEQ ID NO: 375312 - DNA, 25 bp, Homo sapien
tctttcttatgcagaagtccatgag

SEQ ID NO: 375313 - DNA, 25 bp, Homo sapien
ctgggaacaatacggccaatctttt

SEQ ID NO: 375314 - DNA, 25 bp, Homo sapien
tagagctcctgaaccattccatact

SEQ ID NO: 375315 - DNA, 25 bp, Homo sapien
gaacaatacggccaatcttttgaat

SEQ ID NO: 375316 - DNA, 25 bp, Homo sapien
cagacactgggaacaatacggccaa

SEQ ID NO: 375317 - DNA, 25 bp, Homo sapien
gaattgctttgggaaccagccaggc

SEQ ID NO: 375318 - DNA, 25 bp, Homo sapien
aattacttgtgtttactggcaggac

SEQ ID NO: 375319 - DNA, 25 bp, Homo sapien
actattaacctgtcactgaagtggg

SEQ ID NO: 375320 - DNA, 25 bp, Homo sapien
ccagccaggcaacaaccaaagtggg

SEQ ID NO: 375321 - DNA, 25 bp, Homo sapien
gaagcatttgaatatgaatccacat

SEQ ID NO: 375322 - DNA, 25 bp, Homo sapien
tctttcaaaggtgaaatgatactaa

SEQ ID NO: 375323 - DNA, 25 bp, Homo sapien
ctgaagatccagttgtactaaggac

SEQ ID NO: 375324 - DNA, 25 bp, Homo sapien
gttctttcaaaggtgaaatgatact

SEQ ID NO: 375325 - DNA, 25 bp, Homo sapien
ttcaaaggtgaaatgatactaaatg

SEQ ID NO: 375326 - DNA, 25 bp, Homo sapien
tggcagctcatgtagattcagaaaa

SEQ ID NO: 375327 - DNA, 25 bp, Homo sapien
atttgtgagcagtagatctggcagc

SEQ ID NO: 375328 - DNA, 25 bp, Homo sapien
caaatcagttctgaacagagagccc

SEQ ID NO: 375329 - DNA, 25 bp, Homo sapien
cagagagcccatagtactttatttg

SEQ ID NO: 375330 - DNA, 25 bp, Homo sapien
caaccggaatttattattggcagct

SEQ ID NO: 375331 - DNA, 25 bp, Homo sapien
tgagttttgtttcagcccggtagaa

SEQ ID NO: 375332 - DNA, 25 bp, Homo sapien
tttgctatttgtcaaccggaattta

SEQ ID NO: 375333 - DNA, 25 bp, Homo sapien
tgacgattttcagaactgagttttg

SEQ ID NO: 375334 - DNA, 25 bp, Homo sapien
aacaccaccagcttcggtaccctgc

SEQ ID NO: 375335 - DNA, 25 bp, Homo sapien
acaccaccagcttcggtaccctgcg

SEQ ID NO: 375336 - DNA, 25 bp, Homo sapien
ccaccagcttcggtaccctgcgcat

SEQ ID NO: 375337 - DNA, 25 bp, Homo sapien
tctgtctccgcagactcaggagact

SEQ ID NO: 375338 - DNA, 25 bp, Homo sapien
caaaaaggccaattcaaagccattc

SEQ ID NO: 375339 - DNA, 25 bp, Homo sapien
aaggccaattcaaagccattcctcc

SEQ ID NO: 375340 - DNA, 25 bp, Homo sapien
gcccaaaaaggccaattcaaagcca

SEQ ID NO: 375341 - DNA, 25 bp, Homo sapien
gcttggcttaacaatctgttgccta

SEQ ID NO: 375342 - DNA, 25 bp, Homo sapien
gtgacacccactgcgccaactgcat

SEQ ID NO: 375343 - DNA, 25 bp, Homo sapien
gttacaataattcaaaggtgacacc

SEQ ID NO: 375344 - DNA, 25 bp, Homo sapien
ttgtctgcttggcttaacaatctgt

SEQ ID NO: 375345 - DNA, 25 bp, Homo sapien
gcagtcctctgatgcatcatcctca

SEQ ID NO: 375346 - DNA, 25 bp, Homo sapien
agcatcgcagtcctctgatgcatca

SEQ ID NO: 375347 - DNA, 25 bp, Homo sapien
agattcctaggccttcaaactcaaa

SEQ ID NO: 375348 - DNA, 25 bp, Homo sapien
gattcctaggccttcaaactcaaag

SEQ ID NO: 375349 - DNA, 25 bp, Homo sapien
gaggtggctacagtcccattcccgt

SEQ ID NO: 375350 - DNA, 25 bp, Homo sapien
tcggctgatgggatattggtagaaa

SEQ ID NO: 375351 - DNA, 25 bp, Homo sapien
ccagtatcatttcttgaggtggcta

SEQ ID NO: 375352 - DNA, 25 bp, Homo sapien
ttcaaagtgcacctaacagagtggt

SEQ ID NO: 375353 - DNA, 25 bp, Homo sapien
aatcttcagaagacatctttcctca

SEQ ID NO: 375354 - DNA, 25 bp, Homo sapien
ttatacttggaaaggcttgctggct

SEQ ID NO: 375355 - DNA, 25 bp, Homo sapien
ggttgttgacgcaggttgttggctg

SEQ ID NO: 375356 - DNA, 25 bp, Homo sapien
cctcacatgtgtggttgttgacgca

SEQ ID NO: 375357 - DNA, 25 bp, Homo sapien
ccttcataaacgcagcttgtgttca

SEQ ID NO: 375358 - DNA, 25 bp, Homo sapien
tttaggcttccttcataaacgcagc

SEQ ID NO: 375359 - DNA, 25 bp, Homo sapien
attgttctctcgattttcatttaac

SEQ ID NO: 375360 - DNA, 25 bp, Homo sapien
aagacatctgaatgtttaggcttcc

SEQ ID NO: 375361 - DNA, 25 bp, Homo sapien
ttagccacgaggtcatccaaaatga

SEQ ID NO: 375362 - DNA, 25 bp, Homo sapien
gaacattagccacgaggtcatccaa

SEQ ID NO: 375363 - DNA, 25 bp, Homo sapien
gccacgaggtcatccaaaatgatcc

SEQ ID NO: 375364 - DNA, 25 bp, Homo sapien
acagaaggaacattagccacgaggt

SEQ ID NO: 375365 - DNA, 25 bp, Homo sapien
ccagaggaagaagacgtattcttgg

SEQ ID NO: 375366 - DNA, 25 bp, Homo sapien
cgtattcttggcagcagagtaggga

SEQ ID NO: 375367 - DNA, 25 bp, Homo sapien
aaaggaactgcacttccagctggtg

SEQ ID NO: 375368 - DNA, 25 bp, Homo sapien
ggaaaggaactgcacttccagctgg

SEQ ID NO: 375369 - DNA, 25 bp, Homo sapien
gcatatgttgattgccttttcccac

SEQ ID NO: 375370 - DNA, 25 bp, Homo sapien
ccgagttttgcacaataaagggcat

SEQ ID NO: 375371 - DNA, 25 bp, Homo sapien
gatgtatgtagggaggcatcttcca

SEQ ID NO: 375372 - DNA, 25 bp, Homo sapien
catttcttgatcctagcggtccctg

SEQ ID NO: 375373 - DNA, 25 bp, Homo sapien
tatggactatgtgagatctcatcct

SEQ ID NO: 375374 - DNA, 25 bp, Homo sapien
gaaggagacccatttgattatggac

SEQ ID NO: 375375 - DNA, 25 bp, Homo sapien
ggacagcaggtggaattcggcaagg

SEQ ID NO: 375376 - DNA, 25 bp, Homo sapien
gactagcccacgcttggttctatgg

SEQ ID NO: 375377 - DNA, 25 bp, Homo sapien
aagacagacaacagatgaaggagag

SEQ ID NO: 375378 - DNA, 25 bp, Homo sapien
gatgggatctcttcattacgatgac

SEQ ID NO: 375379 - DNA, 25 bp, Homo sapien
ggaaaagtcacggaaaagacagaca

SEQ ID NO: 375380 - DNA, 25 bp, Homo sapien
tatagagtgaaggagacatagagct

SEQ ID NO: 375381 - DNA, 25 bp, Homo sapien
ggccctcccctgtatcactcccttc

SEQ ID NO: 375382 - DNA, 25 bp, Homo sapien
taggccctcccctgtatcactccct

SEQ ID NO: 375383 - DNA, 25 bp, Homo sapien
gctaggccctcccctgtatcactcc

SEQ ID NO: 375384 - DNA, 25 bp, Homo sapien
cctcccctgtatcactcccttccat

SEQ ID NO: 375385 - DNA, 25 bp, Homo sapien
catcattgttttctcgtagaacagc

SEQ ID NO: 375386 - DNA, 25 bp, Homo sapien
tctgttcctatattcattgtctctc

SEQ ID NO: 375387 - DNA, 25 bp, Homo sapien
gaacagcctctatttctctgccaac

SEQ ID NO: 375388 - DNA, 25 bp, Homo sapien
gttttctcgtagaacagcctctatt

SEQ ID NO: 375389 - DNA, 25 bp, Homo sapien
aaagaattctctcaaatgtcaggtg

SEQ ID NO: 375390 - DNA, 25 bp, Homo sapien
tctactataaaaagtctacttctac

SEQ ID NO: 375391 - DNA, 25 bp, Homo sapien
caatcaaggctagctaaattgtttt

SEQ ID NO: 375392 - DNA, 25 bp, Homo sapien
cctttcatcatgcattctactataa

SEQ ID NO: 375393 - DNA, 25 bp, Homo sapien
aggctctttaaaggatgtgcgtcca

SEQ ID NO: 375394 - DNA, 25 bp, Homo sapien
ggctctttaaaggatgtgcgtccac

SEQ ID NO: 375395 - DNA, 25 bp, Homo sapien
tctcttttgttgatattccagatcc

SEQ ID NO: 375396 - DNA, 25 bp, Homo sapien
gctatggaacccatttcagagaact

SEQ ID NO: 375397 - DNA, 25 bp, Homo sapien
taatgtaacgcgtcttctctccctt

SEQ ID NO: 375398 - DNA, 25 bp, Homo sapien
tactcttcaggggttgaaattacca

SEQ ID NO: 375399 - DNA, 25 bp, Homo sapien
ccctgaatgattcctactgctgtct

SEQ ID NO: 375400 - DNA, 25 bp, Homo sapien
cagtgtcttggtccaaaatgaagaa

SEQ ID NO: 375401 - DNA, 25 bp, Homo sapien
tgctgtctatatggctggtaccagt

SEQ ID NO: 375402 - DNA, 25 bp, Homo sapien
gaatgattcctactgctgtctatat

SEQ ID NO: 375403 - DNA, 25 bp, Homo sapien
gaatatgctgctgtctggcccatgc

SEQ ID NO: 375404 - DNA, 25 bp, Homo sapien
cagcaggtaaggagaatatgctgct

SEQ ID NO: 375405 - DNA, 25 bp, Homo sapien
taaggagaatatgctgctgtctggc

SEQ ID NO: 375406 - DNA, 25 bp, Homo sapien
caggtaaggagaatatgctgctgtc

SEQ ID NO: 375407 - DNA, 25 bp, Homo sapien
tcctgggtttaggtagctttgcact

SEQ ID NO: 375408 - DNA, 25 bp, Homo sapien
tgcactgggcattgcagttattaca

SEQ ID NO: 375409 - DNA, 25 bp, Homo sapien
aagtggggaggccagattcttcctg

SEQ ID NO: 375410 - DNA, 25 bp, Homo sapien
ctgggcattgcagttattacagctt

SEQ ID NO: 375411 - DNA, 25 bp, Homo sapien
gatgtgtgtcctcagttgaaagaga

SEQ ID NO: 375412 - DNA, 25 bp, Homo sapien
atgtgtgtcctcagttgaaagagag

SEQ ID NO: 375413 - DNA, 25 bp, Homo sapien
gtgtgtcctcagttgaaagagaggc

SEQ ID NO: 375414 - DNA, 25 bp, Homo sapien
tgatgtttatatccaggagacaatt

SEQ ID NO: 375415 - DNA, 25 bp, Homo sapien
tcttcaacaatgtcaagctttccac

SEQ ID NO: 375416 - DNA, 25 bp, Homo sapien
acaatgtcaagctttccacttgtgt

SEQ ID NO: 375417 - DNA, 25 bp, Homo sapien
ttgatgtttatatccaggagacaat

SEQ ID NO: 375418 - DNA, 25 bp, Homo sapien
tattgttctaaaagataatgcatat

SEQ ID NO: 375419 - DNA, 25 bp, Homo sapien
taaataattaaacattgctcctgat

SEQ ID NO: 375420 - DNA, 25 bp, Homo sapien
ggtaacatagcttccattataatta

SEQ ID NO: 375421 - DNA, 25 bp, Homo sapien
ccaaaacccataatgattataaagt

SEQ ID NO: 375422 - DNA, 25 bp, Homo sapien
cagttctgacaggatgtggcgtgca

SEQ ID NO: 375423 - DNA, 25 bp, Homo sapien
tatccgagaatcgaccacatgtcag

SEQ ID NO: 375424 - DNA, 25 bp, Homo sapien
tggcgtgcagcgtgacagcagactt

SEQ ID NO: 375425 - DNA, 25 bp, Homo sapien
cagactttccatgtttcgaggacca

SEQ ID NO: 375426 - DNA, 25 bp, Homo sapien
tgaccaaggagtgatccagtcactc

SEQ ID NO: 375427 - DNA, 25 bp, Homo sapien
cattctattgtctggaaaggtttcc

SEQ ID NO: 375428 - DNA, 25 bp, Homo sapien
tcattttcaagagttacacattcta

SEQ ID NO: 375429 - DNA, 25 bp, Homo sapien
taacctattcttcactgctaaacac

SEQ ID NO: 375430 - DNA, 25 bp, Homo sapien
gatgaatccaatgttgttggcagtg

SEQ ID NO: 375431 - DNA, 25 bp, Homo sapien
gtcagtagtggtgccgatgaatcca

SEQ ID NO: 375432 - DNA, 25 bp, Homo sapien
ggtgccgatgaatccaatgttgttg

SEQ ID NO: 375433 - DNA, 25 bp, Homo sapien
cattgtcagtagtggtgccgatgaa

SEQ ID NO: 375434 - DNA, 25 bp, Homo sapien
tctggttggtcaaagtacagaaatt

SEQ ID NO: 375435 - DNA, 25 bp, Homo sapien
caaaaatagtccttcttctggttgg

SEQ ID NO: 375436 - DNA, 25 bp, Homo sapien
catgtttggaatggctcggatgaac

SEQ ID NO: 375437 - DNA, 25 bp, Homo sapien
gtctccttcaatagtcagttgcttc

SEQ ID NO: 375438 - DNA, 25 bp, Homo sapien
gagagtcaggagcaccaacggtgta

SEQ ID NO: 375439 - DNA, 25 bp, Homo sapien
ccacactagttagggagggccatca

SEQ ID NO: 375440 - DNA, 25 bp, Homo sapien
tagggacctggaaaagctaatggtg

SEQ ID NO: 375441 - DNA, 25 bp, Homo sapien
acggtgtaagtccagtctaagggca

SEQ ID NO: 375442 - DNA, 25 bp, Homo sapien
cggcctcccaaagtgtatgcattta

SEQ ID NO: 375443 - DNA, 25 bp, Homo sapien
cctcccaaagtgtatgcatttatca

SEQ ID NO: 375444 - DNA, 25 bp, Homo sapien
tcccaaagtgtatgcatttatcatt

SEQ ID NO: 375445 - DNA, 25 bp, Homo sapien
ggcctcccaaagtgtatgcatttat

SEQ ID NO: 375446 - DNA, 25 bp, Homo sapien
gtgactgacctgttaatagtactca

SEQ ID NO: 375447 - DNA, 25 bp, Homo sapien
tagtttaaagccatcaggttggagc

SEQ ID NO: 375448 - DNA, 25 bp, Homo sapien
aggttggagcttgcagaaggttttc

SEQ ID NO: 375449 - DNA, 25 bp, Homo sapien
tgtttcacattacttagtttaaagc

SEQ ID NO: 375450 - DNA, 25 bp, Homo sapien
ctgagcaagccttttgatatgattt

SEQ ID NO: 375451 - DNA, 25 bp, Homo sapien
actgagcaagccttttgatatgatt

SEQ ID NO: 375452 - DNA, 25 bp, Homo sapien
cagtgtccaccctgtttacatctat

SEQ ID NO: 375453 - DNA, 25 bp, Homo sapien
attgcagaatgggacatagagcccc

SEQ ID NO: 375454 - DNA, 25 bp, Homo sapien
taatacactgccgtgtggtccagtg

SEQ ID NO: 375455 - DNA, 25 bp, Homo sapien
cccgaacgacactcaccagtttaat

SEQ ID NO: 375456 - DNA, 25 bp, Homo sapien
cataggatctcttcctggttttaac

SEQ ID NO: 375457 - DNA, 25 bp, Homo sapien
taactttgtcagaattccatatatt

SEQ ID NO: 375458 - DNA, 25 bp, Homo sapien
tagccataaacttttagtggacaaa

SEQ ID NO: 375459 - DNA, 25 bp, Homo sapien
cagatgttctagttggaaacgtata

SEQ ID NO: 375460 - DNA, 25 bp, Homo sapien
agtggagtatgagtatattcaaatc

SEQ ID NO: 375461 - DNA, 25 bp, Homo sapien
actgtttttagttagtggagtatga

SEQ ID NO: 375462 - DNA, 25 bp, Homo sapien
agaattgctatagggctcatgaaaa

SEQ ID NO: 375463 - DNA, 25 bp, Homo sapien
tataagaattgctatagggctcatg

SEQ ID NO: 375464 - DNA, 25 bp, Homo sapien
tgtgtctagctgttggcaacggcat

SEQ ID NO: 375465 - DNA, 25 bp, Homo sapien
cccatatgttgttgaccaggtttcc

SEQ ID NO: 375466 - DNA, 25 bp, Homo sapien
tgttggcaacggcattatggaaact

SEQ ID NO: 375467 - DNA, 25 bp, Homo sapien
ttctgagtctgaatctggtgacatc

SEQ ID NO: 375468 - DNA, 25 bp, Homo sapien
acagctcgtaacatactctcctcct

SEQ ID NO: 375469 - DNA, 25 bp, Homo sapien
ccatttcctggcatcatatacaatc

SEQ ID NO: 375470 - DNA, 25 bp, Homo sapien
agctcgtaacatactctcctcctgg

SEQ ID NO: 375471 - DNA, 25 bp, Homo sapien
tcctggcatcatatacaatccataa

SEQ ID NO: 375472 - DNA, 25 bp, Homo sapien
gttagcttcatccaggtgtaccatc

SEQ ID NO: 375473 - DNA, 25 bp, Homo sapien
ggctttttggatgctttcgttccca

SEQ ID NO: 375474 - DNA, 25 bp, Homo sapien
ggtattaaggctcatatccaatagt

SEQ ID NO: 375475 - DNA, 25 bp, Homo sapien
gcaagtgtcttaatatcccgtagga

SEQ ID NO: 375476 - DNA, 25 bp, Homo sapien
ttttcaagggaacatctgcccttac

SEQ ID NO: 375477 - DNA, 25 bp, Homo sapien
gtaatggcattagcataccctttaa

SEQ ID NO: 375478 - DNA, 25 bp, Homo sapien
taagataattctcaggagtctatga

SEQ ID NO: 375479 - DNA, 25 bp, Homo sapien
catagtatgataagctgtctagtaa

SEQ ID NO: 375480 - DNA, 25 bp, Homo sapien
ccaacggcatctcctctaagtgagg

SEQ ID NO: 375481 - DNA, 25 bp, Homo sapien
gtaatatccaccaaaccaacggcat

SEQ ID NO: 375482 - DNA, 25 bp, Homo sapien
tcttcgggtacataagtgtcccctg

SEQ ID NO: 375483 - DNA, 25 bp, Homo sapien
ggatgtgtcactaccaacccttggt

SEQ ID NO: 375484 - DNA, 25 bp, Homo sapien
tacaagctctcaatctccctccagg

SEQ ID NO: 375485 - DNA, 25 bp, Homo sapien
cctaaggacattcctccaggtaatt

SEQ ID NO: 375486 - DNA, 25 bp, Homo sapien
tctccctccaggttgtcctaaggac

SEQ ID NO: 375487 - DNA, 25 bp, Homo sapien
gttgtcctaaggacattcctccagg

SEQ ID NO: 375488 - DNA, 25 bp, Homo sapien
aaatatatgaattgccttagcgatc

SEQ ID NO: 375489 - DNA, 25 bp, Homo sapien
gatcactcggattccatccctggaa

SEQ ID NO: 375490 - DNA, 25 bp, Homo sapien
caatcctaaaccagttatcctaagg

SEQ ID NO: 375491 - DNA, 25 bp, Homo sapien
gaagcagctgagattgtttgtccaa

SEQ ID NO: 375492 - DNA, 25 bp, Homo sapien
cgaatgcatgcacattaaattgctc

SEQ ID NO: 375493 - DNA, 25 bp, Homo sapien
taattctccagttgggtgggttgtg

SEQ ID NO: 375494 - DNA, 25 bp, Homo sapien
tacgagcccatacaatattccaaag

SEQ ID NO: 375495 - DNA, 25 bp, Homo sapien
aattcagtacgctgattacgagccc

SEQ ID NO: 375496 - DNA, 25 bp, Homo sapien
ggtctatgtgtctgacgaaggtcta

SEQ ID NO: 375497 - DNA, 25 bp, Homo sapien
tggtctatgtgtctgacgaaggtct

SEQ ID NO: 375498 - DNA, 25 bp, Homo sapien
gatgagtgatctaatttctgggttc

SEQ ID NO: 375499 - DNA, 25 bp, Homo sapien
ttgtcgaagattggatggttgaaga

SEQ ID NO: 375500 - DNA, 25 bp, Homo sapien
ccttgtgaaaatttgctagattgtt

SEQ ID NO: 375501 - DNA, 25 bp, Homo sapien
aaaatttgctagattgttttcatcc

SEQ ID NO: 375502 - DNA, 25 bp, Homo sapien
gtgaaaatttgctagattgttttca

SEQ ID NO: 375503 - DNA, 25 bp, Homo sapien
ttcatccatttgagagactgtttct

SEQ ID NO: 375504 - DNA, 25 bp, Homo sapien
gatgtttttgggttgtgaatctagt

SEQ ID NO: 375505 - DNA, 25 bp, Homo sapien
gtgagatgtttttgggttgtgaatc

SEQ ID NO: 375506 - DNA, 25 bp, Homo sapien
gctttctaaaatcccgtgagactgt

SEQ ID NO: 375507 - DNA, 25 bp, Homo sapien
gactgtggattgaagttactatttt

SEQ ID NO: 375508 - DNA, 25 bp, Homo sapien
ttgactttttccatatacttgtccc

SEQ ID NO: 375509 - DNA, 25 bp, Homo sapien
ttctgtttattgactttttccatat

SEQ ID NO: 375510 - DNA, 25 bp, Homo sapien
tattgactttttccatatacttgtc

SEQ ID NO: 375511 - DNA, 25 bp, Homo sapien
tgtttattgactttttccatatact

SEQ ID NO: 375512 - DNA, 25 bp, Homo sapien
ttatctgcttaaacctattcctgtc

SEQ ID NO: 375513 - DNA, 25 bp, Homo sapien
ctactcttcgttctccttttatctg

SEQ ID NO: 375514 - DNA, 25 bp, Homo sapien
taaacctattcctgtctctctgctt

SEQ ID NO: 375515 - DNA, 25 bp, Homo sapien
cagggggatagcctactcttcgttc

SEQ ID NO: 375516 - DNA, 25 bp, Homo sapien
gtaagatccatgtcaggtcccttac

SEQ ID NO: 375517 - DNA, 25 bp, Homo sapien
tgtaagatccatgtcaggtccctta

SEQ ID NO: 375518 - DNA, 25 bp, Homo sapien
gaaagacggtgtgcctactatacat

SEQ ID NO: 375519 - DNA, 25 bp, Homo sapien
atgaaagacggtgtgcctactatac

SEQ ID NO: 375520 - DNA, 25 bp, Homo sapien
tgaaagacggtgtgcctactataca

SEQ ID NO: 375521 - DNA, 25 bp, Homo sapien
aatgtggtgaggagaaaattctgga

SEQ ID NO: 375522 - DNA, 25 bp, Homo sapien
tgccaattacaaaaagtgccaaagg

SEQ ID NO: 375523 - DNA, 25 bp, Homo sapien
cagactgccaatgaccagaatgaga

SEQ ID NO: 375524 - DNA, 25 bp, Homo sapien
gaagtattgttgtcacagactgcca

SEQ ID NO: 375525 - DNA, 25 bp, Homo sapien
agaactggcctctctattattacca

SEQ ID NO: 375526 - DNA, 25 bp, Homo sapien
gatgacgcagttggcagctctcaga

SEQ ID NO: 375527 - DNA, 25 bp, Homo sapien
tatcgtttcggatgaggtgtgttga

SEQ ID NO: 375528 - DNA, 25 bp, Homo sapien
gaagacgagaaaaatgaagctgtag

SEQ ID NO: 375529 - DNA, 25 bp, Homo sapien
gacctcctccaagggttgaggaaga

SEQ ID NO: 375530 - DNA, 25 bp, Homo sapien
aagagacctcctccaagggttgagg

SEQ ID NO: 375531 - DNA, 25 bp, Homo sapien
ctccaagggttgaggaagagtttag

SEQ ID NO: 375532 - DNA, 25 bp, Homo sapien
ctcctccaagggttgaggaagagtt

SEQ ID NO: 375533 - DNA, 25 bp, Homo sapien
cacaccaaagtgatccaaagaaaat

SEQ ID NO: 375534 - DNA, 25 bp, Homo sapien
tccatcagtgacatagcagttctca

SEQ ID NO: 375535 - DNA, 25 bp, Homo sapien
cagtgacatagcagttctcacacca

SEQ ID NO: 375536 - DNA, 25 bp, Homo sapien
tctccaactccatcagtgacatagc

SEQ ID NO: 375537 - DNA, 25 bp, Homo sapien
ttagctgggcacgatggcgggcccc

SEQ ID NO: 375538 - DNA, 25 bp, Homo sapien
gctgggcacgatggcgggcccctgt

SEQ ID NO: 375539 - DNA, 25 bp, Homo sapien
aatcccagctactcgggaggctgag

SEQ ID NO: 375540 - DNA, 25 bp, Homo sapien
aaatattagctgggcacgatggcgg

SEQ ID NO: 375541 - DNA, 25 bp, Homo sapien
ttggtattggtatttccacctactg

SEQ ID NO: 375542 - DNA, 25 bp, Homo sapien
ttggtatttccacctactgtgggct

SEQ ID NO: 375543 - DNA, 25 bp, Homo sapien
tattggtatttccacctactgtggg

SEQ ID NO: 375544 - DNA, 25 bp, Homo sapien
ggtattggtatttccacctactgtg

SEQ ID NO: 375545 - DNA, 25 bp, Homo sapien
ggcaggccagctgtttcagatggtt

SEQ ID NO: 375546 - DNA, 25 bp, Homo sapien
cagaagtagacatctggctcagaca

SEQ ID NO: 375547 - DNA, 25 bp, Homo sapien
tagataaattgttcccagtacctga

SEQ ID NO: 375548 - DNA, 25 bp, Homo sapien
tcatcctctggtcatgaactccatg

SEQ ID NO: 375549 - DNA, 25 bp, Homo sapien
tactagggtcctgtacccgcaggtc

SEQ ID NO: 375550 - DNA, 25 bp, Homo sapien
gggtcctgtacccgcaggtccctca

SEQ ID NO: 375551 - DNA, 25 bp, Homo sapien
ggtcctgtacccgcaggtccctcat

SEQ ID NO: 375552 - DNA, 25 bp, Homo sapien
aaaactgcgggatggcgatgctcag

SEQ ID NO: 375553 - DNA, 25 bp, Homo sapien
gatggcgatgctcagtggagaggtt

SEQ ID NO: 375554 - DNA, 25 bp, Homo sapien
aaactgcgggatggcgatgctcagt

SEQ ID NO: 375555 - DNA, 25 bp, Homo sapien
gcgggatggcgatgctcagtggaga

SEQ ID NO: 375556 - DNA, 25 bp, Homo sapien
tgatgtatacggttggggaggttaa

SEQ ID NO: 375557 - DNA, 25 bp, Homo sapien
ttctttattgatgtatacggttggg

SEQ ID NO: 375558 - DNA, 25 bp, Homo sapien
tattgatgtatacggttggggaggt

SEQ ID NO: 375559 - DNA, 25 bp, Homo sapien
tttctttattgatgtatacggttgg

SEQ ID NO: 375560 - DNA, 25 bp, Homo sapien
tttgcacatggctaaacaaatagat

SEQ ID NO: 375561 - DNA, 25 bp, Homo sapien
tgcacatggctaaacaaatagatct

SEQ ID NO: 375562 - DNA, 25 bp, Homo sapien
cattttagggcaatatttgcacatg

SEQ ID NO: 375563 - DNA, 25 bp, Homo sapien
ggcaatatttgcacatggctaaaca

SEQ ID NO: 375564 - DNA, 25 bp, Homo sapien
cctcagtcatctggttatcctggaa

SEQ ID NO: 375565 - DNA, 25 bp, Homo sapien
tcagtcatctggttatcctggaacc

SEQ ID NO: 375566 - DNA, 25 bp, Homo sapien
gtcatctggttatcctggaacctgt

SEQ ID NO: 375567 - DNA, 25 bp, Homo sapien
tcctcagtcatctggttatcctgga

SEQ ID NO: 375568 - DNA, 25 bp, Homo sapien
agtgtggccaggcaacctccttcca

SEQ ID NO: 375569 - DNA, 25 bp, Homo sapien
caaatgtatgtgttgccttgcacaa

SEQ ID NO: 375570 - DNA, 25 bp, Homo sapien
gaccaaagtatatacacagaccaaa

SEQ ID NO: 375571 - DNA, 25 bp, Homo sapien
taacagaatacatagaccaaagtat

SEQ ID NO: 375572 - DNA, 25 bp, Homo sapien
tggcccataattcttatcttgcaga

SEQ ID NO: 375573 - DNA, 25 bp, Homo sapien
tgtattataggcgttaagtgccata

SEQ ID NO: 375574 - DNA, 25 bp, Homo sapien
tataggcgttaagtgccatacctgg

SEQ ID NO: 375575 - DNA, 25 bp, Homo sapien
ttacaaggatcattgtcaaacatat

SEQ ID NO: 375576 - DNA, 25 bp, Homo sapien
ggctgagatggttccgctagtgggc

SEQ ID NO: 375577 - DNA, 25 bp, Homo sapien
ctcctgtacttcacattggcagagc

SEQ ID NO: 375578 - DNA, 25 bp, Homo sapien
ctctctcctgtacttcacattggca

SEQ ID NO: 375579 - DNA, 25 bp, Homo sapien
tgagatggttccgctagtgggccct

SEQ ID NO: 375580 - DNA, 25 bp, Homo sapien
tcgtggcagaagacaaggaggtgca

SEQ ID NO: 375581 - DNA, 25 bp, Homo sapien
agagagcttgtgcagagaaacttac

SEQ ID NO: 375582 - DNA, 25 bp, Homo sapien
gagagcttgtgcagagaaacttaca

SEQ ID NO: 375583 - DNA, 25 bp, Homo sapien
caatcgtggcagaagacaaggaggt

SEQ ID NO: 375584 - DNA, 25 bp, Homo sapien
ggaatccgaataccactgagaataa

SEQ ID NO: 375585 - DNA, 25 bp, Homo sapien
ctgagaataagagaaccattttgga

SEQ ID NO: 375586 - DNA, 25 bp, Homo sapien
tctgactggtttagtttccagtgca

SEQ ID NO: 375587 - DNA, 25 bp, Homo sapien
gcaggcaaattcaatgaaggaatcc

SEQ ID NO: 375588 - DNA, 25 bp, Homo sapien
ggttagtgaactgaatgattaccat

SEQ ID NO: 375589 - DNA, 25 bp, Homo sapien
ccactactcctttggattttggatc

SEQ ID NO: 375590 - DNA, 25 bp, Homo sapien
ttttggatcttcttggttagtgaac

SEQ ID NO: 375591 - DNA, 25 bp, Homo sapien
cccactactcctttggattttggat

SEQ ID NO: 375592 - DNA, 25 bp, Homo sapien
gccagaccttgcttaagacaacttc

SEQ ID NO: 375593 - DNA, 25 bp, Homo sapien
actggaggagctactcccagaagaa

SEQ ID NO: 375594 - DNA, 25 bp, Homo sapien
tctgtgaccatttgagcttcagctc

SEQ ID NO: 375595 - DNA, 25 bp, Homo sapien
gcacactggaggagctactcccaga

SEQ ID NO: 375596 - DNA, 25 bp, Homo sapien
gctgcttggctttcgccagaggaca

SEQ ID NO: 375597 - DNA, 25 bp, Homo sapien
tatgctgcttggctttcgccagagg

SEQ ID NO: 375598 - DNA, 25 bp, Homo sapien
ggctttatgctgcttggctttcgcc

SEQ ID NO: 375599 - DNA, 25 bp, Homo sapien
tttatgctgcttggctttcgccaga

SEQ ID NO: 375600 - DNA, 25 bp, Homo sapien
tgataaagaaacaatccctccaatt

SEQ ID NO: 375601 - DNA, 25 bp, Homo sapien
gagtagaatggtcaaattagaagac

SEQ ID NO: 375602 - DNA, 25 bp, Homo sapien
tgagaatcagccaagtattttaaaa

SEQ ID NO: 375603 - DNA, 25 bp, Homo sapien
tacttgatgtactacaacttgagaa

SEQ ID NO: 375604 - DNA, 25 bp, Homo sapien
aggttggaaaagtgtcagcaatgtt

SEQ ID NO: 375605 - DNA, 25 bp, Homo sapien
catctgatcatgaagattcctatca

SEQ ID NO: 375606 - DNA, 25 bp, Homo sapien
tcagcaatgttaccagttgccattt

SEQ ID NO: 375607 - DNA, 25 bp, Homo sapien
tatttgacaacatctgatcatgaag

SEQ ID NO: 375608 - DNA, 25 bp, Homo sapien
ctgcctggcaacacaaagatccatc

SEQ ID NO: 375609 - DNA, 25 bp, Homo sapien
aacacaaagatccatccggagggcg

SEQ ID NO: 375610 - DNA, 25 bp, Homo sapien
tggcaacacaaagatccatccggag

SEQ ID NO: 375611 - DNA, 25 bp, Homo sapien
aagatccatccggagggcggccaga

SEQ ID NO: 375612 - DNA, 25 bp, Homo sapien
ataagcatgtaatattaatgaaaga

SEQ ID NO: 375613 - DNA, 25 bp, Homo sapien
cataagcatgtaatattaatgaaag

SEQ ID NO: 375614 - DNA, 25 bp, Homo sapien
ccataagcatgtaatattaatgaaa

SEQ ID NO: 375615 - DNA, 25 bp, Homo sapien
ctttaatcaataggtaaagttccat

SEQ ID NO: 375616 - DNA, 25 bp, Homo sapien
gtatcttagatagctggaaccaatt

SEQ ID NO: 375617 - DNA, 25 bp, Homo sapien
ctaaattgacgagaaaagtttgttg

SEQ ID NO: 375618 - DNA, 25 bp, Homo sapien
ttgtcaggattgataaggcctctcc

SEQ ID NO: 375619 - DNA, 25 bp, Homo sapien
cattgggctctttctccaggggtag

SEQ ID NO: 375620 - DNA, 25 bp, Homo sapien
taacattgagctggattttcgaaca

SEQ ID NO: 375621 - DNA, 25 bp, Homo sapien
tttcaccagattctgatcaaatttt

SEQ ID NO: 375622 - DNA, 25 bp, Homo sapien
acattgagctggattttcgaacata

SEQ ID NO: 375623 - DNA, 25 bp, Homo sapien
ttctagtaacattgagctggatttt

SEQ ID NO: 375624 - DNA, 25 bp, Homo sapien
taatagtgagagtcctagaaagcca

SEQ ID NO: 375625 - DNA, 25 bp, Homo sapien
cagaggtgaatggtaggttactgcc

SEQ ID NO: 375626 - DNA, 25 bp, Homo sapien
tctatattgaaggtaccagccccat

SEQ ID NO: 375627 - DNA, 25 bp, Homo sapien
gaaagccacactaagccttctggga

SEQ ID NO: 375628 - DNA, 25 bp, Homo sapien
tcttcagcgtaaggaatctcagagg

SEQ ID NO: 375629 - DNA, 25 bp, Homo sapien
gttcttatggcctatttaaggactc

SEQ ID NO: 375630 - DNA, 25 bp, Homo sapien
taaatcctggtatcagagaaacaaa

SEQ ID NO: 375631 - DNA, 25 bp, Homo sapien
tatgaaaggattcgggttcttatgg

SEQ ID NO: 375632 - DNA, 25 bp, Homo sapien
attcttcgtgggcaaaaactgcaca

SEQ ID NO: 375633 - DNA, 25 bp, Homo sapien
tcttcgtgggcaaaaactgcacaga

SEQ ID NO: 375634 - DNA, 25 bp, Homo sapien
ttcttcgtgggcaaaaactgcacag

SEQ ID NO: 375635 - DNA, 25 bp, Homo sapien
ccaatggacggttaagaattgaccg

SEQ ID NO: 375636 - DNA, 25 bp, Homo sapien
tagtctataaagaaagaaggctccc

SEQ ID NO: 375637 - DNA, 25 bp, Homo sapien
cacatatttcagtagtccttgagaa

SEQ ID NO: 375638 - DNA, 25 bp, Homo sapien
ggcatttcagtatatgtatagcaca

SEQ ID NO: 375639 - DNA, 25 bp, Homo sapien
ttctgatcctcttgggcagaagcag

SEQ ID NO: 375640 - DNA, 25 bp, Homo sapien
ctcgtactttgtgctccctggatct

SEQ ID NO: 375641 - DNA, 25 bp, Homo sapien
cttccaggagcacaatcatccactg

SEQ ID NO: 375642 - DNA, 25 bp, Homo sapien
ggtctcagtttctgatcctcttggg

SEQ ID NO: 375643 - DNA, 25 bp, Homo sapien
tttggtctttgagttaacgctggaa

SEQ ID NO: 375644 - DNA, 25 bp, Homo sapien
tgggagatgattgggaaggcatatt

SEQ ID NO: 375645 - DNA, 25 bp, Homo sapien
tggtctttgagttaacgctggaatg

SEQ ID NO: 375646 - DNA, 25 bp, Homo sapien
gtctttgagttaacgctggaatgag

SEQ ID NO: 375647 - DNA, 25 bp, Homo sapien
tccagcacgggagaacggtgagggc

SEQ ID NO: 375648 - DNA, 25 bp, Homo sapien
gatcgagggtaggtctgcttctccc

SEQ ID NO: 375649 - DNA, 25 bp, Homo sapien
ctgatgtttgagggccagaagaatc

SEQ ID NO: 375650 - DNA, 25 bp, Homo sapien
ggagaacggtgagggccagaagact

SEQ ID NO: 375651 - DNA, 25 bp, Homo sapien
caggactgtcgatgctgtcagcact

SEQ ID NO: 375652 - DNA, 25 bp, Homo sapien
ttcttgctggcaccacaggactgtc

SEQ ID NO: 375653 - DNA, 25 bp, Homo sapien
tggccataaggcagcaaagtgaact

SEQ ID NO: 375654 - DNA, 25 bp, Homo sapien
tagaggcacacaatcaaccataggt

SEQ ID NO: 375655 - DNA, 25 bp, Homo sapien
cttgggggtccgactcagttggatc

SEQ ID NO: 375656 - DNA, 25 bp, Homo sapien
tgggggtccgactcagttggatcca

SEQ ID NO: 375657 - DNA, 25 bp, Homo sapien
ctacttgggggtccgactcagttgg

SEQ ID NO: 375658 - DNA, 25 bp, Homo sapien
acttgggggtccgactcagttggat

SEQ ID NO: 375659 - DNA, 25 bp, Homo sapien
cactcagagtgttcctgctatgact

SEQ ID NO: 375660 - DNA, 25 bp, Homo sapien
taattatatggatacaaagaggtcc

SEQ ID NO: 375661 - DNA, 25 bp, Homo sapien
taaatgatccctaagttaggtctgc

SEQ ID NO: 375662 - DNA, 25 bp, Homo sapien
tgactacttaagatgaaggacatac

SEQ ID NO: 375663 - DNA, 25 bp, Homo sapien
gccagcattctttatgttgcttcta

SEQ ID NO: 375664 - DNA, 25 bp, Homo sapien
tgccagcattctttatgttgcttct

SEQ ID NO: 375665 - DNA, 25 bp, Homo sapien
tatgataactgaaaagtagtaccgc

SEQ ID NO: 375666 - DNA, 25 bp, Homo sapien
ggctccgtcagcgatcatttgggca

SEQ ID NO: 375667 - DNA, 25 bp, Homo sapien
catgccatggtgcattgagcgttca

SEQ ID NO: 375668 - DNA, 25 bp, Homo sapien
gaaatatgtttgctcctaccccagc

SEQ ID NO: 375669 - DNA, 25 bp, Homo sapien
catatgggccacagctctttcctgt

SEQ ID NO: 375670 - DNA, 25 bp, Homo sapien
cagctctttcctgtttagcactttc

SEQ ID NO: 375671 - DNA, 25 bp, Homo sapien
tttcttccagcatctgttgagacat

SEQ ID NO: 375672 - DNA, 25 bp, Homo sapien
cctgtttagcactttcttccagcat

SEQ ID NO: 375673 - DNA, 25 bp, Homo sapien
agatatcttaatgcactctttggca

SEQ ID NO: 375674 - DNA, 25 bp, Homo sapien
tttacagaggccccaattagagcca

SEQ ID NO: 375675 - DNA, 25 bp, Homo sapien
gttttacagtgcgaatgtagcctac

SEQ ID NO: 375676 - DNA, 25 bp, Homo sapien
ttagagccaagatatcttaatgcac

SEQ ID NO: 375677 - DNA, 25 bp, Homo sapien
tccttatagttggccttgtagacca

SEQ ID NO: 375678 - DNA, 25 bp, Homo sapien
ttccttatagttggccttgtagacc

SEQ ID NO: 375679 - DNA, 25 bp, Homo sapien
cttccttatagttggccttgtagac

SEQ ID NO: 375680 - DNA, 25 bp, Homo sapien
tgcaagccagagaagcattctgtgt

SEQ ID NO: 375681 - DNA, 25 bp, Homo sapien
gagaagcattctgtgtagaggccca

SEQ ID NO: 375682 - DNA, 25 bp, Homo sapien
cgggtggtcattgcaagccagagaa

SEQ ID NO: 375683 - DNA, 25 bp, Homo sapien
tagagcgggtggtcattgcaagcca

SEQ ID NO: 375684 - DNA, 25 bp, Homo sapien
ctggaggaatgtaagcatttcccat

SEQ ID NO: 375685 - DNA, 25 bp, Homo sapien
tgctttcatccgtgtaccttgcttg

SEQ ID NO: 375686 - DNA, 25 bp, Homo sapien
agagctcctcgcctattgttcacaa

SEQ ID NO: 375687 - DNA, 25 bp, Homo sapien
gcctgtggagtctgttcgaagttac

SEQ ID NO: 375688 - DNA, 25 bp, Homo sapien
gaattatttagcaatcctgccagag

SEQ ID NO: 375689 - DNA, 25 bp, Homo sapien
ctgctaatcaaagcaagcctgtgga

SEQ ID NO: 375690 - DNA, 25 bp, Homo sapien
acttaaagcctgtccagaacactga

SEQ ID NO: 375691 - DNA, 25 bp, Homo sapien
gatataacccagaggacttaaagcc

SEQ ID NO: 375692 - DNA, 25 bp, Homo sapien
aggacttaaagcctgtccagaacac

SEQ ID NO: 375693 - DNA, 25 bp, Homo sapien
ggatataacccagaggacttaaagc

SEQ ID NO: 375694 - DNA, 25 bp, Homo sapien
tgagccccgtgcttcagacattcca

SEQ ID NO: 375695 - DNA, 25 bp, Homo sapien
tgtgagccccgtgcttcagacattc

SEQ ID NO: 375696 - DNA, 25 bp, Homo sapien
tattcgaagatgtgattatttcttc

SEQ ID NO: 375697 - DNA, 25 bp, Homo sapien
ggctctgtagcactgatattcgaag

SEQ ID NO: 375698 - DNA, 25 bp, Homo sapien
tacacctgcttattgatgccaaaag

SEQ ID NO: 375699 - DNA, 25 bp, Homo sapien
ataactataattgggacaacattca

SEQ ID NO: 375700 - DNA, 25 bp, Homo sapien
cataactataattgggacaacattc

SEQ ID NO: 375701 - DNA, 25 bp, Homo sapien
atctctcgatacctttttccctggc

SEQ ID NO: 375702 - DNA, 25 bp, Homo sapien
tcttggagatggaagcgttgaccgc

SEQ ID NO: 375703 - DNA, 25 bp, Homo sapien
ttgaatgggaagctatatttgggcc

SEQ ID NO: 375704 - DNA, 25 bp, Homo sapien
ggacctcttcttttatgcgcatcag

SEQ ID NO: 375705 - DNA, 25 bp, Homo sapien
ggagcagagcaaaattgtcttcctc

SEQ ID NO: 375706 - DNA, 25 bp, Homo sapien
catgtctcatgccacaggttattac

SEQ ID NO: 375707 - DNA, 25 bp, Homo sapien
taattaactttgaaggcatgtctca

SEQ ID NO: 375708 - DNA, 25 bp, Homo sapien
tagttaaaacgatcagaagatgacc

SEQ ID NO: 375709 - DNA, 25 bp, Homo sapien
acttcttttgcttaagtagtccttg

SEQ ID NO: 375710 - DNA, 25 bp, Homo sapien
gtttctcctctaaacatgaacacaa

SEQ ID NO: 375711 - DNA, 25 bp, Homo sapien
cctctaaacatgaacacaatgacct

SEQ ID NO: 375712 - DNA, 25 bp, Homo sapien
ttgcttaagtagtccttgtttctcc

SEQ ID NO: 375713 - DNA, 25 bp, Homo sapien
acggcgtggaacagtggtcttaaca

SEQ ID NO: 375714 - DNA, 25 bp, Homo sapien
gatcagcgttcgcacttcagtcagg

SEQ ID NO: 375715 - DNA, 25 bp, Homo sapien
cccaagtgacggcatagttgcttca

SEQ ID NO: 375716 - DNA, 25 bp, Homo sapien
gaatcctagccagcgtgttcctgac

SEQ ID NO: 375717 - DNA, 25 bp, Homo sapien
ttttgtcttcactgtgcccacattt

SEQ ID NO: 375718 - DNA, 25 bp, Homo sapien
attgcttttgtcttcactgtgccca

SEQ ID NO: 375719 - DNA, 25 bp, Homo sapien
actgtgcccacatttctattttgtt

SEQ ID NO: 375720 - DNA, 25 bp, Homo sapien
tgtcttcactgtgcccacatttcta

SEQ ID NO: 375721 - DNA, 25 bp, Homo sapien
ggttaagctcactcttgcatctgtg

SEQ ID NO: 375722 - DNA, 25 bp, Homo sapien
tgaagttgtcttcagccgagatcat

SEQ ID NO: 375723 - DNA, 25 bp, Homo sapien
ctgatctgggccaacctcagctgat

SEQ ID NO: 375724 - DNA, 25 bp, Homo sapien
cagccgggaactggttgaagttgtc

SEQ ID NO: 375725 - DNA, 25 bp, Homo sapien
taatgcttgtcatcctaagtgtcgg

SEQ ID NO: 375726 - DNA, 25 bp, Homo sapien
aagtgtcgggttccagcccaagctg

SEQ ID NO: 375727 - DNA, 25 bp, Homo sapien
gaatcacagacggttttgacacggt

SEQ ID NO: 375728 - DNA, 25 bp, Homo sapien
ctatctcagcacaagcgagcctggg

SEQ ID NO: 375729 - DNA, 25 bp, Homo sapien
ctgtgaagctcgataacaggaagct

SEQ ID NO: 375730 - DNA, 25 bp, Homo sapien
ttctcatagctgcaatagtcccata

SEQ ID NO: 375731 - DNA, 25 bp, Homo sapien
agctcgataacaggaagcttcatct

SEQ ID NO: 375732 - DNA, 25 bp, Homo sapien
tgcaatagtcccataaccagagtat

SEQ ID NO: 375733 - DNA, 25 bp, Homo sapien
agaagggctctgaacaaacaagggc

SEQ ID NO: 375734 - DNA, 25 bp, Homo sapien
taagcatgatcccatatgcatgaaa

SEQ ID NO: 375735 - DNA, 25 bp, Homo sapien
caagccatttatgcacaatgtcagt

SEQ ID NO: 375736 - DNA, 25 bp, Homo sapien
agttttgtgttcgatctaagcatga

SEQ ID NO: 375737 - DNA, 25 bp, Homo sapien
cggtccaaacggcactctttgattc

SEQ ID NO: 375738 - DNA, 25 bp, Homo sapien
caggcctttcggtccaaacggcact

SEQ ID NO: 375739 - DNA, 25 bp, Homo sapien
cctggcacaggcctttcggtccaaa

SEQ ID NO: 375740 - DNA, 25 bp, Homo sapien
ctttcggtccaaacggcactctttg

SEQ ID NO: 375741 - DNA, 25 bp, Homo sapien
tagccagctggcttctacatctagc

SEQ ID NO: 375742 - DNA, 25 bp, Homo sapien
caagctggcagacagattgattcta

SEQ ID NO: 375743 - DNA, 25 bp, Homo sapien
tggtcctgagaatagtcagcatagc

SEQ ID NO: 375744 - DNA, 25 bp, Homo sapien
gggaccaacagtcgacaaggcccat

SEQ ID NO: 375745 - DNA, 25 bp, Homo sapien
ggcagacctggcaactgcctggctt

SEQ ID NO: 375746 - DNA, 25 bp, Homo sapien
gcagacctggcaactgcctggcttg

SEQ ID NO: 375747 - DNA, 25 bp, Homo sapien
gacctggcaactgcctggcttgctt

SEQ ID NO: 375748 - DNA, 25 bp, Homo sapien
cagacctggcaactgcctggcttgc

SEQ ID NO: 375749 - DNA, 25 bp, Homo sapien
ctgaggaagagtttaacggaggaat

SEQ ID NO: 375750 - DNA, 25 bp, Homo sapien
gaagagtttaacggaggaattgaca

SEQ ID NO: 375751 - DNA, 25 bp, Homo sapien
caaaaccactgtaataacagatctc

SEQ ID NO: 375752 - DNA, 25 bp, Homo sapien
taacagatctcccaagtaccatctg

SEQ ID NO: 375753 - DNA, 25 bp, Homo sapien
aataacagatctcccaagtaccatc

SEQ ID NO: 375754 - DNA, 25 bp, Homo sapien
ccaagtaccatctgcgaagtggaac

SEQ ID NO: 375755 - DNA, 25 bp, Homo sapien
tctggcccttttggagtggataatg

SEQ ID NO: 375756 - DNA, 25 bp, Homo sapien
ggatgtctgtttaacggtttagtca

SEQ ID NO: 375757 - DNA, 25 bp, Homo sapien
taccccgggcctttgaatcaggatg

SEQ ID NO: 375758 - DNA, 25 bp, Homo sapien
atttgagggtgcttggcagagtcca

SEQ ID NO: 375759 - DNA, 25 bp, Homo sapien
ctcaaaacggttctctttggagcct

SEQ ID NO: 375760 - DNA, 25 bp, Homo sapien
gctgtgaactcaaaacggttctctt

SEQ ID NO: 375761 - DNA, 25 bp, Homo sapien
tagctgtgaactcaaaacggttctc

SEQ ID NO: 375762 - DNA, 25 bp, Homo sapien
tgtgaactcaaaacggttctctttg

SEQ ID NO: 375763 - DNA, 25 bp, Homo sapien
caatgccagcctgaagttcatacct

SEQ ID NO: 375764 - DNA, 25 bp, Homo sapien
ctgttcaagtgcatccgctgtgaaa

SEQ ID NO: 375765 - DNA, 25 bp, Homo sapien
gcatccgctgtgaaaatcctcctac

SEQ ID NO: 375766 - DNA, 25 bp, Homo sapien
cccaatgccagcctgaagttcatac

SEQ ID NO: 375767 - DNA, 25 bp, Homo sapien
caccatgaccaactgtgtagacacc

SEQ ID NO: 375768 - DNA, 25 bp, Homo sapien
ggtcaccatgaccaactgtgtagac

SEQ ID NO: 375769 - DNA, 25 bp, Homo sapien
catgaccaactgtgtagacacctgc

SEQ ID NO: 375770 - DNA, 25 bp, Homo sapien
agaggtcaccatgaccaactgtgta

SEQ ID NO: 375771 - DNA, 25 bp, Homo sapien
tatgtttcccagatatgcttgcagc

SEQ ID NO: 375772 - DNA, 25 bp, Homo sapien
caccaattagactgatttccatgaa

SEQ ID NO: 375773 - DNA, 25 bp, Homo sapien
cagctgcggtttagaagaaatgacg

SEQ ID NO: 375774 - DNA, 25 bp, Homo sapien
actttcctctagttgaagagtttga

SEQ ID NO: 375775 - DNA, 25 bp, Homo sapien
ttcctgcttctgacttattgctgat

SEQ ID NO: 375776 - DNA, 25 bp, Homo sapien
gcttctgacttattgctgatacgtc

SEQ ID NO: 375777 - DNA, 25 bp, Homo sapien
tgggagaaatgtgacctgggagctg

SEQ ID NO: 375778 - DNA, 25 bp, Homo sapien
acttattgctgatacgtctttcatg

SEQ ID NO: 375779 - DNA, 25 bp, Homo sapien
caatctgcttggtttcttaggaaaa

SEQ ID NO: 375780 - DNA, 25 bp, Homo sapien
accaggaaggatgccaatacgtgct

SEQ ID NO: 375781 - DNA, 25 bp, Homo sapien
gaacaaatcgtgcagggtcaaacaa

SEQ ID NO: 375782 - DNA, 25 bp, Homo sapien
ggatattccaatgaacacttgcacc

SEQ ID NO: 375783 - DNA, 25 bp, Homo sapien
cagcatcgtagttctgtatcacttt

SEQ ID NO: 375784 - DNA, 25 bp, Homo sapien
agcagcatcgtagttctgtatcact

SEQ ID NO: 375785 - DNA, 25 bp, Homo sapien
ctaagcagcatcgtagttctgtatc

SEQ ID NO: 375786 - DNA, 25 bp, Homo sapien
gcatcgtagttctgtatcactttta

SEQ ID NO: 375787 - DNA, 25 bp, Homo sapien
gatgaacggtatggatcctttttga

SEQ ID NO: 375788 - DNA, 25 bp, Homo sapien
tttgatccacaactatcagtacttg

SEQ ID NO: 375789 - DNA, 25 bp, Homo sapien
tcatctaaacttacgtccttggcca

SEQ ID NO: 375790 - DNA, 25 bp, Homo sapien
cagtacttgatttaatttgcctcct

SEQ ID NO: 375791 - DNA, 25 bp, Homo sapien
aatagttaagagaatcaggtccgtg

SEQ ID NO: 375792 - DNA, 25 bp, Homo sapien
aatgacatgagcctatggatctctg

SEQ ID NO: 375793 - DNA, 25 bp, Homo sapien
aatcaggtccgtgggtatgatcata

SEQ ID NO: 375794 - DNA, 25 bp, Homo sapien
cagatagtggttgctcttcttgatc

SEQ ID NO: 375795 - DNA, 25 bp, Homo sapien
agtgtaggccacaccatttgcaagc

SEQ ID NO: 375796 - DNA, 25 bp, Homo sapien
cattctgactcagtgtaggccacac

SEQ ID NO: 375797 - DNA, 25 bp, Homo sapien
tctcattctgactcagtgtaggcca

SEQ ID NO: 375798 - DNA, 25 bp, Homo sapien
tgactcagtgtaggccacaccattt

SEQ ID NO: 375799 - DNA, 25 bp, Homo sapien
tcaaaatagatgtctcagctgctcc

SEQ ID NO: 375800 - DNA, 25 bp, Homo sapien
tagctagggttaagtcaaggaaaca

SEQ ID NO: 375801 - DNA, 25 bp, Homo sapien
caaggaaacaggtactgggaggtat

SEQ ID NO: 375802 - DNA, 25 bp, Homo sapien
tttatgggctgcttgttgggcaacc

SEQ ID NO: 375803 - DNA, 25 bp, Homo sapien
aatgaagatttgaagtcatctccat

SEQ ID NO: 375804 - DNA, 25 bp, Homo sapien
atgaagatttgaagtcatctccata

SEQ ID NO: 375805 - DNA, 25 bp, Homo sapien
cataaggtgaccatagtctgaggaa

SEQ ID NO: 375806 - DNA, 25 bp, Homo sapien
tacaaggttatcaggtagcctagcc

SEQ ID NO: 375807 - DNA, 25 bp, Homo sapien
caaaaggctgagaataagggtacaa

SEQ ID NO: 375808 - DNA, 25 bp, Homo sapien
tgtggagattgcagccctcttcagg

SEQ ID NO: 375809 - DNA, 25 bp, Homo sapien
tccttctagccagcttactgagaat

SEQ ID NO: 375810 - DNA, 25 bp, Homo sapien
tactgtctaccttccacattcctgg

SEQ ID NO: 375811 - DNA, 25 bp, Homo sapien
taatgatttcgcttctgtactgaga

SEQ ID NO: 375812 - DNA, 25 bp, Homo sapien
ctcaaagggcttttacagaaatgaa

SEQ ID NO: 375813 - DNA, 25 bp, Homo sapien
cattaggaagggtccactacttgtg

SEQ ID NO: 375814 - DNA, 25 bp, Homo sapien
taggaagggtccactacttgtgtag

SEQ ID NO: 375815 - DNA, 25 bp, Homo sapien
atgacattaggaagggtccactact

SEQ ID NO: 375816 - DNA, 25 bp, Homo sapien
gaagggtccactacttgtgtagtga

SEQ ID NO: 375817 - DNA, 25 bp, Homo sapien
atgtaaactgtttggtagatgttat

SEQ ID NO: 375818 - DNA, 25 bp, Homo sapien
tgtaaactgtttggtagatgttatt

SEQ ID NO: 375819 - DNA, 25 bp, Homo sapien
gtaaactgtttggtagatgttatta

SEQ ID NO: 375820 - DNA, 25 bp, Homo sapien
cattcagcccacaaccatgtgttaa

SEQ ID NO: 375821 - DNA, 25 bp, Homo sapien
ccggcatatgacttcttgggagaca

SEQ ID NO: 375822 - DNA, 25 bp, Homo sapien
cacgttgtgaggcactatgggacag

SEQ ID NO: 375823 - DNA, 25 bp, Homo sapien
tcaacaaccctaactccaaacaatg

SEQ ID NO: 375824 - DNA, 25 bp, Homo sapien
catggtgttctccttatatgtggac

SEQ ID NO: 375825 - DNA, 25 bp, Homo sapien
gcttctggtgattttctgtcaatct

SEQ ID NO: 375826 - DNA, 25 bp, Homo sapien
tctccttatatgtggacctgtgtcc

SEQ ID NO: 375827 - DNA, 25 bp, Homo sapien
ttatctaatacagcatccattagga

SEQ ID NO: 375828 - DNA, 25 bp, Homo sapien
gaattttatccggtatgtccatctg

SEQ ID NO: 375829 - DNA, 25 bp, Homo sapien
gctggttcattcagtagctccacaa

SEQ ID NO: 375830 - DNA, 25 bp, Homo sapien
tctctgtgttaaccgatttgtagtc

SEQ ID NO: 375831 - DNA, 25 bp, Homo sapien
ttggctcttccctcatatccacaag

SEQ ID NO: 375832 - DNA, 25 bp, Homo sapien
ttgttttaccaattcacacctccat

SEQ ID NO: 375833 - DNA, 25 bp, Homo sapien
tgttttaccaattcacacctccatc

SEQ ID NO: 375834 - DNA, 25 bp, Homo sapien
tactgggtcagagaatacatttatt

SEQ ID NO: 375835 - DNA, 25 bp, Homo sapien
ctgggtcagagaatacatttatttt

SEQ ID NO: 375836 - DNA, 25 bp, Homo sapien
ccagtcatgaggttatccgggtaca

SEQ ID NO: 375837 - DNA, 25 bp, Homo sapien
gcaaacagatgatccgccagatgga

SEQ ID NO: 375838 - DNA, 25 bp, Homo sapien
aatctagaagctctctgcaccgtga

SEQ ID NO: 375839 - DNA, 25 bp, Homo sapien
tccgggtacacaccaagagtcactt

SEQ ID NO: 375840 - DNA, 25 bp, Homo sapien
cctggtggaaggcatatttttggca

SEQ ID NO: 375841 - DNA, 25 bp, Homo sapien
ttttggcaggcagaccgttcaactg

SEQ ID NO: 375842 - DNA, 25 bp, Homo sapien
tggccttcaagctggtaatactagt

SEQ ID NO: 375843 - DNA, 25 bp, Homo sapien
taatgccctaaatcagaaaatggcc

SEQ ID NO: 375844 - DNA, 25 bp, Homo sapien
tgctcaaatacaagctcatcgcctg

SEQ ID NO: 375845 - DNA, 25 bp, Homo sapien
cgcctgtacttggatatgttctttc

SEQ ID NO: 375846 - DNA, 25 bp, Homo sapien
tactgccattcaacattgccccatt

SEQ ID NO: 375847 - DNA, 25 bp, Homo sapien
tcaacattgccccattgtgctcaaa

SEQ ID NO: 375848 - DNA, 25 bp, Homo sapien
tttcttcaatggtcaagtgcacaca

SEQ ID NO: 375849 - DNA, 25 bp, Homo sapien
ggcttttgatggtattctggcttgt

SEQ ID NO: 375850 - DNA, 25 bp, Homo sapien
ctccttgatggttgagaagctttct

SEQ ID NO: 375851 - DNA, 25 bp, Homo sapien
tcttcaatggtcaagtgcacacata

SEQ ID NO: 375852 - DNA, 25 bp, Homo sapien
catctgactagtaaatggccatggg

SEQ ID NO: 375853 - DNA, 25 bp, Homo sapien
tgacaataacagcagaggctgaccg

SEQ ID NO: 375854 - DNA, 25 bp, Homo sapien
tatagcgtgaagtagagaggaccat

SEQ ID NO: 375855 - DNA, 25 bp, Homo sapien
tacccaagacttgtcacatctcaga

SEQ ID NO: 375856 - DNA, 25 bp, Homo sapien
cctatgatcttcagactcaagtaaa

SEQ ID NO: 375857 - DNA, 25 bp, Homo sapien
ggaaagaaacacagcatatacaaaa

SEQ ID NO: 375858 - DNA, 25 bp, Homo sapien
tctttgtcaccattctgagcttact

SEQ ID NO: 375859 - DNA, 25 bp, Homo sapien
aaacgaattgaggtaagctttgagc

SEQ ID NO: 375860 - DNA, 25 bp, Homo sapien
aattctatttatgaaagacatcatt

SEQ ID NO: 375861 - DNA, 25 bp, Homo sapien
aaatggggataagacatatagagaa

SEQ ID NO: 375862 - DNA, 25 bp, Homo sapien
aaacattagagtgcatcttcataat

SEQ ID NO: 375863 - DNA, 25 bp, Homo sapien
tcttcataatcatggcacaaagatt

SEQ ID NO: 375864 - DNA, 25 bp, Homo sapien
tccaccccaacaatctgatcgggta

SEQ ID NO: 375865 - DNA, 25 bp, Homo sapien
tttcatcaatcgactgactttcttc

SEQ ID NO: 375866 - DNA, 25 bp, Homo sapien
gatcgggtaaattgcttatcgtcat

SEQ ID NO: 375867 - DNA, 25 bp, Homo sapien
ccaacaatctgatcgggtaaattgc

SEQ ID NO: 375868 - DNA, 25 bp, Homo sapien
cattattacatctatgttgctcttt

SEQ ID NO: 375869 - DNA, 25 bp, Homo sapien
tgcattattacatctatgttgctct

SEQ ID NO: 375870 - DNA, 25 bp, Homo sapien
ttattacatctatgttgctctttct

SEQ ID NO: 375871 - DNA, 25 bp, Homo sapien
ccatggcttctattgcattattaca

SEQ ID NO: 375872 - DNA, 25 bp, Homo sapien
aactggtactgcctagttaatgatg

SEQ ID NO: 375873 - DNA, 25 bp, Homo sapien
attccatatagcatcatgacagaaa

SEQ ID NO: 375874 - DNA, 25 bp, Homo sapien
agaaacctaactgggtccagtgtct

SEQ ID NO: 375875 - DNA, 25 bp, Homo sapien
ctggtactgcctagttaatgatgta

SEQ ID NO: 375876 - DNA, 25 bp, Homo sapien
tagagatggcagctacagttattcc

SEQ ID NO: 375877 - DNA, 25 bp, Homo sapien
tgcctgcggtccactcttctagctg

SEQ ID NO: 375878 - DNA, 25 bp, Homo sapien
tgctctgcatagctccaatatttgg

SEQ ID NO: 375879 - DNA, 25 bp, Homo sapien
gatctgggttggaatatctgctcga

SEQ ID NO: 375880 - DNA, 25 bp, Homo sapien
gggttttgagaagactaagctgtac

SEQ ID NO: 375881 - DNA, 25 bp, Homo sapien
taagcttgtccttcgatcccctgat

SEQ ID NO: 375882 - DNA, 25 bp, Homo sapien
tctggaccagtggactaagcttgtc

SEQ ID NO: 375883 - DNA, 25 bp, Homo sapien
gcagccactgtatatgccttccagg

SEQ ID NO: 375884 - DNA, 25 bp, Homo sapien
tctgtgttggagtaaattccacggg

SEQ ID NO: 375885 - DNA, 25 bp, Homo sapien
tgctgctgagctttggctctgactc

SEQ ID NO: 375886 - DNA, 25 bp, Homo sapien
gggttaagcatgaaggattctgtgt

SEQ ID NO: 375887 - DNA, 25 bp, Homo sapien
ttccacggggcagggtaatgcccag

SEQ ID NO: 375888 - DNA, 25 bp, Homo sapien
atcttcaaaatctttggacaatttc

SEQ ID NO: 375889 - DNA, 25 bp, Homo sapien
ctttggacaatttcaatgtattcat

SEQ ID NO: 375890 - DNA, 25 bp, Homo sapien
attttgacccaacttaatatcttca

SEQ ID NO: 375891 - DNA, 25 bp, Homo sapien
ttgacccaacttaatatcttcaaaa

SEQ ID NO: 375892 - DNA, 25 bp, Homo sapien
ctacatagtgggggtgacaccaatt

SEQ ID NO: 375893 - DNA, 25 bp, Homo sapien
acatagtgggggtgacaccaattcc

SEQ ID NO: 375894 - DNA, 25 bp, Homo sapien
tacatagtgggggtgacaccaattc

SEQ ID NO: 375895 - DNA, 25 bp, Homo sapien
tagatctagatggaagacaacacaa

SEQ ID NO: 375896 - DNA, 25 bp, Homo sapien
cctgcgtttctatactagatctaga

SEQ ID NO: 375897 - DNA, 25 bp, Homo sapien
gacaacacaatatcctcacattcat

SEQ ID NO: 375898 - DNA, 25 bp, Homo sapien
cttttgacctgcgtttctatactag

SEQ ID NO: 375899 - DNA, 25 bp, Homo sapien
acagtggggtgctcctggcttcacc

SEQ ID NO: 375900 - DNA, 25 bp, Homo sapien
gtgctcctggcttcaccctttgcat

SEQ ID NO: 375901 - DNA, 25 bp, Homo sapien
gacagtggggtgctcctggcttcac

SEQ ID NO: 375902 - DNA, 25 bp, Homo sapien
tggggtgctcctggcttcacccttt

SEQ ID NO: 375903 - DNA, 25 bp, Homo sapien
cctctgccgtggccctctgtgtcat

SEQ ID NO: 375904 - DNA, 25 bp, Homo sapien
gtgcacacaggccatccgttgatac

SEQ ID NO: 375905 - DNA, 25 bp, Homo sapien
tgtgcacacaggccatccgttgata

SEQ ID NO: 375906 - DNA, 25 bp, Homo sapien
tgccaagcacgaatggagaaggatg

SEQ ID NO: 375907 - DNA, 25 bp, Homo sapien
acttaacaataatggttcttcaggg

SEQ ID NO: 375908 - DNA, 25 bp, Homo sapien
cagggactgcagaacttaacaataa

SEQ ID NO: 375909 - DNA, 25 bp, Homo sapien
taagaagaaccattcgtggttcatg

SEQ ID NO: 375910 - DNA, 25 bp, Homo sapien
caatgaggttgtgtcgttttggata

SEQ ID NO: 375911 - DNA, 25 bp, Homo sapien
tttccgcttcctaaagagcctgctg

SEQ ID NO: 375912 - DNA, 25 bp, Homo sapien
tcgttttggatatttggaacgcctc

SEQ ID NO: 375913 - DNA, 25 bp, Homo sapien
tggaacgcctctcagaatttccgct

SEQ ID NO: 375914 - DNA, 25 bp, Homo sapien
tctgtaatgagagggagctacctaa

SEQ ID NO: 375915 - DNA, 25 bp, Homo sapien
ggtcaatctgtaatgagagggagct

SEQ ID NO: 375916 - DNA, 25 bp, Homo sapien
gtatttactcccacaaactctatgg

SEQ ID NO: 375917 - DNA, 25 bp, Homo sapien
gaaacataagttgcagcttcttggt

SEQ ID NO: 375918 - DNA, 25 bp, Homo sapien
ggccactggtaatgaaccaaatgcc

SEQ ID NO: 375919 - DNA, 25 bp, Homo sapien
gtcttcttgagttagggagttatgg

SEQ ID NO: 375920 - DNA, 25 bp, Homo sapien
cactggtaatgaaccaaatgccaga

SEQ ID NO: 375921 - DNA, 25 bp, Homo sapien
cttgagttagggagttatggagaac

SEQ ID NO: 375922 - DNA, 25 bp, Homo sapien
gctgcatttggccagagggtccact

SEQ ID NO: 375923 - DNA, 25 bp, Homo sapien
catgcagctgcatttggccagaggg

SEQ ID NO: 375924 - DNA, 25 bp, Homo sapien
agggtccactgggatctcggctgct

SEQ ID NO: 375925 - DNA, 25 bp, Homo sapien
ctgggatctcggctgctgctatcat

SEQ ID NO: 375926 - DNA, 25 bp, Homo sapien
gctcctcactgccacacggatttcc

SEQ ID NO: 375927 - DNA, 25 bp, Homo sapien
tagttctctcttgtgccagttgctg

SEQ ID NO: 375928 - DNA, 25 bp, Homo sapien
tcctcactgccacacggatttcctt

SEQ ID NO: 375929 - DNA, 25 bp, Homo sapien
ttttctccaacttcatagttctctc

SEQ ID NO: 375930 - DNA, 25 bp, Homo sapien
aataggagtcacagtccagtgccat

SEQ ID NO: 375931 - DNA, 25 bp, Homo sapien
gaggcaataggagtcacagtccagt

SEQ ID NO: 375932 - DNA, 25 bp, Homo sapien
ctgaggcaataggagtcacagtcca

SEQ ID NO: 375933 - DNA, 25 bp, Homo sapien
ggcaataggagtcacagtccagtgc

SEQ ID NO: 375934 - DNA, 25 bp, Homo sapien
ggccactgagagtggttgagcctgt

SEQ ID NO: 375935 - DNA, 25 bp, Homo sapien
ctggccactgagagtggttgagcct

SEQ ID NO: 375936 - DNA, 25 bp, Homo sapien
tctggccactgagagtggttgagcc

SEQ ID NO: 375937 - DNA, 25 bp, Homo sapien
ttctggccactgagagtggttgagc

SEQ ID NO: 375938 - DNA, 25 bp, Homo sapien
tatttccttctgtttggaggttgat

SEQ ID NO: 375939 - DNA, 25 bp, Homo sapien
atatttccttctgtttggaggttga

SEQ ID NO: 375940 - DNA, 25 bp, Homo sapien
tttccttctgtttggaggttgattc

SEQ ID NO: 375941 - DNA, 25 bp, Homo sapien
atttccttctgtttggaggttgatt

SEQ ID NO: 375942 - DNA, 25 bp, Homo sapien
tggacccgaataactaacaatcacg

SEQ ID NO: 375943 - DNA, 25 bp, Homo sapien
ccttgctcctcatccatagaggacg

SEQ ID NO: 375944 - DNA, 25 bp, Homo sapien
catagaggacgcatatggacccgaa

SEQ ID NO: 375945 - DNA, 25 bp, Homo sapien
actttcccgacaccctgattccttg

SEQ ID NO: 375946 - DNA, 25 bp, Homo sapien
gagaagggtacttcttggatgaaag

SEQ ID NO: 375947 - DNA, 25 bp, Homo sapien
ggagaccgacgaggatctgcctctt

SEQ ID NO: 375948 - DNA, 25 bp, Homo sapien
aggaaagggagaataaggtctgatt

SEQ ID NO: 375949 - DNA, 25 bp, Homo sapien
gagatgctccattggttgtactcta

SEQ ID NO: 375950 - DNA, 25 bp, Homo sapien
ttgaaactcccagaagtctacaaat

SEQ ID NO: 375951 - DNA, 25 bp, Homo sapien
tgcctgtctgctagacttttctccc

SEQ ID NO: 375952 - DNA, 25 bp, Homo sapien
tgaggcattgccattgaaactccca

SEQ ID NO: 375953 - DNA, 25 bp, Homo sapien
cttcttgacgctgcctgtctgctag

SEQ ID NO: 375954 - DNA, 25 bp, Homo sapien
atagacaccttggaattgtcctttg

SEQ ID NO: 375955 - DNA, 25 bp, Homo sapien
agacaccttggaattgtcctttggt

SEQ ID NO: 375956 - DNA, 25 bp, Homo sapien
gaaatagacaccttggaattgtcct

SEQ ID NO: 375957 - DNA, 25 bp, Homo sapien
aagaaatagacaccttggaattgtc

SEQ ID NO: 375958 - DNA, 25 bp, Homo sapien
tatttaggcaaaactcttgttgctt

SEQ ID NO: 375959 - DNA, 25 bp, Homo sapien
tcccaactggacatgaaatttgagt

SEQ ID NO: 375960 - DNA, 25 bp, Homo sapien
tgaattgactgtgctgtcccaactg

SEQ ID NO: 375961 - DNA, 25 bp, Homo sapien
tacttcacatgataaacaactcata

SEQ ID NO: 375962 - DNA, 25 bp, Homo sapien
ccatgagcataccacagaatccaca

SEQ ID NO: 375963 - DNA, 25 bp, Homo sapien
cactttttgcttgagtctcatgtta

SEQ ID NO: 375964 - DNA, 25 bp, Homo sapien
tgagtctcatgttacatagaacccc

SEQ ID NO: 375965 - DNA, 25 bp, Homo sapien
taatggcacccatcgtcaactcttg

SEQ ID NO: 375966 - DNA, 25 bp, Homo sapien
gagcggaaagataacacagggtcac

SEQ ID NO: 375967 - DNA, 25 bp, Homo sapien
ggaacctgtctatactccgtgtgca

SEQ ID NO: 375968 - DNA, 25 bp, Homo sapien
caagctgagcttcacatactcggaa

SEQ ID NO: 375969 - DNA, 25 bp, Homo sapien
gggtcacttgcctggatcctcagga

SEQ ID NO: 375970 - DNA, 25 bp, Homo sapien
tattcaaactctggaaaagtagccc

SEQ ID NO: 375971 - DNA, 25 bp, Homo sapien
gacatgcttataagaaggactggca

SEQ ID NO: 375972 - DNA, 25 bp, Homo sapien
gcttagtgaaagtctcgccacatga

SEQ ID NO: 375973 - DNA, 25 bp, Homo sapien
gttttctgtgcataggctggttcac

SEQ ID NO: 375974 - DNA, 25 bp, Homo sapien
gatattggtgctttactccaattgc

SEQ ID NO: 375975 - DNA, 25 bp, Homo sapien
atattggtgctttactccaattgcc

SEQ ID NO: 375976 - DNA, 25 bp, Homo sapien
gacaccactgtgttttgggggccat

SEQ ID NO: 375977 - DNA, 25 bp, Homo sapien
ggacaccactgtgttttgggggcca

SEQ ID NO: 375978 - DNA, 25 bp, Homo sapien
ctggacaccactgtgttttgggggc

SEQ ID NO: 375979 - DNA, 25 bp, Homo sapien
tggacaccactgtgttttgggggcc

SEQ ID NO: 375980 - DNA, 25 bp, Homo sapien
attgtgataactgtagctgtccttc

SEQ ID NO: 375981 - DNA, 25 bp, Homo sapien
tgtcacctgcttgaagatgctgatt

SEQ ID NO: 375982 - DNA, 25 bp, Homo sapien
cctgcttgaagatgctgattgtgat

SEQ ID NO: 375983 - DNA, 25 bp, Homo sapien
ccttcagtgaatgtgttggaggcat

SEQ ID NO: 375984 - DNA, 25 bp, Homo sapien
tctgagggtcagtaagtgaagtaca

SEQ ID NO: 375985 - DNA, 25 bp, Homo sapien
aggattgtgttactccccgtgaaag

SEQ ID NO: 375986 - DNA, 25 bp, Homo sapien
tatttatagatgcagtgtcctgccc

SEQ ID NO: 375987 - DNA, 25 bp, Homo sapien
tccatctactgggtaaaatgactat

SEQ ID NO: 375988 - DNA, 25 bp, Homo sapien
tcctcttgcctttgtttccctcttg

SEQ ID NO: 375989 - DNA, 25 bp, Homo sapien
tcttcctcttgcctttgtttccctc

SEQ ID NO: 375990 - DNA, 25 bp, Homo sapien
cttgcctttgtttccctcttgttcg

SEQ ID NO: 375991 - DNA, 25 bp, Homo sapien
cctcttgcctttgtttccctcttgt

SEQ ID NO: 375992 - DNA, 25 bp, Homo sapien
gatcccacggtgttgaggctcaaac

SEQ ID NO: 375993 - DNA, 25 bp, Homo sapien
ggctggctgttactggatctctgga

SEQ ID NO: 375994 - DNA, 25 bp, Homo sapien
gatctctgaggagagcactgactgc

SEQ ID NO: 375995 - DNA, 25 bp, Homo sapien
gcagctaccattcctagagctagga

SEQ ID NO: 375996 - DNA, 25 bp, Homo sapien
taagtctgcactgaagttaggctag

SEQ ID NO: 375997 - DNA, 25 bp, Homo sapien
tcttgactgtcctttccgaaatcca

SEQ ID NO: 375998 - DNA, 25 bp, Homo sapien
tttccaagctttgggctttggcttg

SEQ ID NO: 375999 - DNA, 25 bp, Homo sapien
gaaatccatgctaatccaactcact

SEQ ID NO: 376000 - DNA, 25 bp, Homo sapien
tcagcaacgacaatttgtcaacata

SEQ ID NO: 376001 - DNA, 25 bp, Homo sapien
aaatgttccgtatgattgcacataa

SEQ ID NO: 376002 - DNA, 25 bp, Homo sapien
taatgtaataaatagtttgaactgg

SEQ ID NO: 376003 - DNA, 25 bp, Homo sapien
tatacttgatatataaacatcctta

SEQ ID NO: 376004 - DNA, 25 bp, Homo sapien
cagccaggtggaccagttgtgtgtc

SEQ ID NO: 376005 - DNA, 25 bp, Homo sapien
attcctccagcgactaacagatttg

SEQ ID NO: 376006 - DNA, 25 bp, Homo sapien
gcacagtgcttgtattggacctaaa

SEQ ID NO: 376007 - DNA, 25 bp, Homo sapien
gagaatggaatctgacatccctacc

SEQ ID NO: 376008 - DNA, 25 bp, Homo sapien
tgagtagatcccagcagactcagct

SEQ ID NO: 376009 - DNA, 25 bp, Homo sapien
tcagtattattgagtagatcccagc

SEQ ID NO: 376010 - DNA, 25 bp, Homo sapien
tattattgagtagatcccagcagac

SEQ ID NO: 376011 - DNA, 25 bp, Homo sapien
agatcagtattattgagtagatccc

SEQ ID NO: 376012 - DNA, 25 bp, Homo sapien
tcatagtgaatgaccagctggctgt

SEQ ID NO: 376013 - DNA, 25 bp, Homo sapien
tgttccctggtgagaatgagctcat

SEQ ID NO: 376014 - DNA, 25 bp, Homo sapien
ccagcttgctgagttagacctgcta

SEQ ID NO: 376015 - DNA, 25 bp, Homo sapien
tatgaacctggatgtatctgacgaa

SEQ ID NO: 376016 - DNA, 25 bp, Homo sapien
tcaaggtgagtctcgcctcagctag

SEQ ID NO: 376017 - DNA, 25 bp, Homo sapien
cagtgcaaccctttgggaacgtgcc

SEQ ID NO: 376018 - DNA, 25 bp, Homo sapien
ccttctgatgaaaattgagctgtcc

SEQ ID NO: 376019 - DNA, 25 bp, Homo sapien
tgcagccatggaacccgggttacag

SEQ ID NO: 376020 - DNA, 25 bp, Homo sapien
tagcagggacaacgcattccctacg

SEQ ID NO: 376021 - DNA, 25 bp, Homo sapien
ttccctacgtccttccaagtgcaga

SEQ ID NO: 376022 - DNA, 25 bp, Homo sapien
agtgcagacaccaacaccggcggac

SEQ ID NO: 376023 - DNA, 25 bp, Homo sapien
agcttccggtccgcggccttggacg

SEQ ID NO: 376024 - DNA, 25 bp, Homo sapien
gatccccgaactattcctaggcgcg

SEQ ID NO: 376025 - DNA, 25 bp, Homo sapien
gaaaagtgcccgttatagaggcggc

SEQ ID NO: 376026 - DNA, 25 bp, Homo sapien
taattgccctcctccatgattcagg

SEQ ID NO: 376027 - DNA, 25 bp, Homo sapien
cctaggcgcgttcgaatttgaggaa

SEQ ID NO: 376028 - DNA, 25 bp, Homo sapien
tactactgagcaatcaaaagaaagt

SEQ ID NO: 376029 - DNA, 25 bp, Homo sapien
ccatatgacgttctataacaagaaa

SEQ ID NO: 376030 - DNA, 25 bp, Homo sapien
ccctgagtgaaagaacccttacaca

SEQ ID NO: 376031 - DNA, 25 bp, Homo sapien
aaaatatctattgcatgactccaac

SEQ ID NO: 376032 - DNA, 25 bp, Homo sapien
ctgacataaccacgaagttatataa

SEQ ID NO: 376033 - DNA, 25 bp, Homo sapien
aaccacgaagttatataaatgctcc

SEQ ID NO: 376034 - DNA, 25 bp, Homo sapien
tgacataaccacgaagttatataaa

SEQ ID NO: 376035 - DNA, 25 bp, Homo sapien
ataaccacgaagttatataaatgct

SEQ ID NO: 376036 - DNA, 25 bp, Homo sapien
ggcttgcgccggatgttcgggttta

SEQ ID NO: 376037 - DNA, 25 bp, Homo sapien
taaatctgcgcctgcgtgcggcttg

SEQ ID NO: 376038 - DNA, 25 bp, Homo sapien
ttggttgtcaatgggttttctcgtc

SEQ ID NO: 376039 - DNA, 25 bp, Homo sapien
gggaccatcggctctgacgctagta

SEQ ID NO: 376040 - DNA, 25 bp, Homo sapien
cacggcgacagagcccataactgca

SEQ ID NO: 376041 - DNA, 25 bp, Homo sapien
gagtcgaagccagagtgacccctgg

SEQ ID NO: 376042 - DNA, 25 bp, Homo sapien
taacttccggaacgcggcattatgg

SEQ ID NO: 376043 - DNA, 25 bp, Homo sapien
tcctggtgacgaattgagagcgacg

SEQ ID NO: 376044 - DNA, 25 bp, Homo sapien
acagaacatgcagccaatgagatcg

SEQ ID NO: 376045 - DNA, 25 bp, Homo sapien
gagatcgcagtaccggaaagtagcc

SEQ ID NO: 376046 - DNA, 25 bp, Homo sapien
cgccagcagcggcatctcattggcc

SEQ ID NO: 376047 - DNA, 25 bp, Homo sapien
taactgctccgatcccacgggggaa

SEQ ID NO: 376048 - DNA, 25 bp, Homo sapien
ctgcttttcctaccagccgtatgaa

SEQ ID NO: 376049 - DNA, 25 bp, Homo sapien
ctagatatagtcaattggataagtg

SEQ ID NO: 376050 - DNA, 25 bp, Homo sapien
gaacacggctgcaaatccagctcca

SEQ ID NO: 376051 - DNA, 25 bp, Homo sapien
caattggataagtgacagatcctgc

SEQ ID NO: 376052 - DNA, 25 bp, Homo sapien
caactcactctaatcgatgtgggag

SEQ ID NO: 376053 - DNA, 25 bp, Homo sapien
caggatttcctatgcgtatcagcta

SEQ ID NO: 376054 - DNA, 25 bp, Homo sapien
catatcactctcttgatcggaagca

SEQ ID NO: 376055 - DNA, 25 bp, Homo sapien
gttcagtactagattcatctcccag

SEQ ID NO: 376056 - DNA, 25 bp, Homo sapien
ttacttactgacacaaaataacaat

SEQ ID NO: 376057 - DNA, 25 bp, Homo sapien
gaatcatcgattggaacagtttttc

SEQ ID NO: 376058 - DNA, 25 bp, Homo sapien
tttcagaggaatcatcgattggaac

SEQ ID NO: 376059 - DNA, 25 bp, Homo sapien
ctaaagtttcagaggaatcatcgat

SEQ ID NO: 376060 - DNA, 25 bp, Homo sapien
cagaggaatcatcgattggaacagt

SEQ ID NO: 376061 - DNA, 25 bp, Homo sapien
accttgttccaatccttttctaatg

SEQ ID NO: 376062 - DNA, 25 bp, Homo sapien
tcactttattgtcagtcttacagtc

SEQ ID NO: 376063 - DNA, 25 bp, Homo sapien
ctttattgtcagtcttacagtcttg

SEQ ID NO: 376064 - DNA, 25 bp, Homo sapien
cttggcagatattccattccacatt

SEQ ID NO: 376065 - DNA, 25 bp, Homo sapien
catacactccagttgtccaaactaa

SEQ ID NO: 376066 - DNA, 25 bp, Homo sapien
ggcgtcagatagtgcttcaaggcat

SEQ ID NO: 376067 - DNA, 25 bp, Homo sapien
ttgtccaaactaagaaccagacagt

SEQ ID NO: 376068 - DNA, 25 bp, Homo sapien
ggttcagatcttggcgtcagatagt

SEQ ID NO: 376069 - DNA, 25 bp, Homo sapien
taatcaaccacttgacccaactggt

SEQ ID NO: 376070 - DNA, 25 bp, Homo sapien
tactggacctcattatcacatacgt

SEQ ID NO: 376071 - DNA, 25 bp, Homo sapien
ctggctttggagttgtaatgctggc

SEQ ID NO: 376072 - DNA, 25 bp, Homo sapien
ctggtttgaactacaatactggacc

SEQ ID NO: 376073 - DNA, 25 bp, Homo sapien
ctttcacggttatttggcaaggaga

SEQ ID NO: 376074 - DNA, 25 bp, Homo sapien
tcccaaattactgagtcctttcacg

SEQ ID NO: 376075 - DNA, 25 bp, Homo sapien
tactgagtcctttcacggttatttg

SEQ ID NO: 376076 - DNA, 25 bp, Homo sapien
gaattcatgggaggattctctttag

SEQ ID NO: 376077 - DNA, 25 bp, Homo sapien
atttttacaattgttccagacattt

SEQ ID NO: 376078 - DNA, 25 bp, Homo sapien
tgttaatgccaaatcaggtggttca

SEQ ID NO: 376079 - DNA, 25 bp, Homo sapien
gtagttctctaagcactggtgtttg

SEQ ID NO: 376080 - DNA, 25 bp, Homo sapien
taagcactggtgtttgtgacaagtt

SEQ ID NO: 376081 - DNA, 25 bp, Homo sapien
gaaaagagttctttcggtgtcacaa

SEQ ID NO: 376082 - DNA, 25 bp, Homo sapien
gaaactggctcatggctaaagtaag

SEQ ID NO: 376083 - DNA, 25 bp, Homo sapien
ctcattaagaaactggctcatggct

SEQ ID NO: 376084 - DNA, 25 bp, Homo sapien
ctggaggctcaaggtttatttctaa

SEQ ID NO: 376085 - DNA, 25 bp, Homo sapien
aataagtagcgaagcagctcctggc

SEQ ID NO: 376086 - DNA, 25 bp, Homo sapien
tcatcccatccaataagtagcgaag

SEQ ID NO: 376087 - DNA, 25 bp, Homo sapien
ctgctgatagcctttaaaccgcact

SEQ ID NO: 376088 - DNA, 25 bp, Homo sapien
gctgatagcctttaaaccgcactgc

SEQ ID NO: 376089 - DNA, 25 bp, Homo sapien
gctttaagtattcctttactcactc

SEQ ID NO: 376090 - DNA, 25 bp, Homo sapien
aatgctttaagtattcctttactca

SEQ ID NO: 376091 - DNA, 25 bp, Homo sapien
tttagttcttcatccaacttttcag

SEQ ID NO: 376092 - DNA, 25 bp, Homo sapien
ttttcagtagaattaccaaatgctt

SEQ ID NO: 376093 - DNA, 25 bp, Homo sapien
gcaaaggtatagaggagttccatca

SEQ ID NO: 376094 - DNA, 25 bp, Homo sapien
agtttcaccagtcacatttcaggcg

SEQ ID NO: 376095 - DNA, 25 bp, Homo sapien
tactggccaggctctaaagggcacc

SEQ ID NO: 376096 - DNA, 25 bp, Homo sapien
aaaactgttcacttctggagcactg

SEQ ID NO: 376097 - DNA, 25 bp, Homo sapien
tagttcaccaccaaagatgcggtca

SEQ ID NO: 376098 - DNA, 25 bp, Homo sapien
gatcatactagttagttcaccacca

SEQ ID NO: 376099 - DNA, 25 bp, Homo sapien
aagatgcggtcaacaaaacttggca

SEQ ID NO: 376100 - DNA, 25 bp, Homo sapien
agttctgcattgatcacacatgatc

SEQ ID NO: 376101 - DNA, 25 bp, Homo sapien
tcaaggaaagattcatgaaccaagg

SEQ ID NO: 376102 - DNA, 25 bp, Homo sapien
caaggaaagattcatgaaccaagga

SEQ ID NO: 376103 - DNA, 25 bp, Homo sapien
aaggaaagattcatgaaccaaggag

SEQ ID NO: 376104 - DNA, 25 bp, Homo sapien
ggaaagattcatgaaccaaggagac

SEQ ID NO: 376105 - DNA, 25 bp, Homo sapien
gttaacaagccaagggtctcataat

SEQ ID NO: 376106 - DNA, 25 bp, Homo sapien
tctgcatgggctagtaatatacaaa

SEQ ID NO: 376107 - DNA, 25 bp, Homo sapien
tgtgcaagggattcgtgattagtct

SEQ ID NO: 376108 - DNA, 25 bp, Homo sapien
catttatgaacttaggtgtgcaagg

SEQ ID NO: 376109 - DNA, 25 bp, Homo sapien
cagcaaaaggcaacatcacatgtaa

SEQ ID NO: 376110 - DNA, 25 bp, Homo sapien
gacaaaattcgtttatctcatacac

SEQ ID NO: 376111 - DNA, 25 bp, Homo sapien
gacttatgtaagtcaccacggtgta

SEQ ID NO: 376112 - DNA, 25 bp, Homo sapien
tctcatacactagaaagcaatcttc

SEQ ID NO: 376113 - DNA, 25 bp, Homo sapien
tttctgtaagtgcttacttgttcca

SEQ ID NO: 376114 - DNA, 25 bp, Homo sapien
taagtgcttacttgttccagaagga

SEQ ID NO: 376115 - DNA, 25 bp, Homo sapien
tgtaactgtcgttatctttttcttc

SEQ ID NO: 376116 - DNA, 25 bp, Homo sapien
tcttttatgtaactgtcgttatctt

SEQ ID NO: 376117 - DNA, 25 bp, Homo sapien
aaaaaaccaagactgcatatttgta

SEQ ID NO: 376118 - DNA, 25 bp, Homo sapien
ccagaatggtgtgaatggtgagaaa

SEQ ID NO: 376119 - DNA, 25 bp, Homo sapien
cacaatccagaatggtgtgaatggt

SEQ ID NO: 376120 - DNA, 25 bp, Homo sapien
gtgtgccaagatctcgccatttgca

SEQ ID NO: 376121 - DNA, 25 bp, Homo sapien
gaaggccaaagcaagatgatcacaa

SEQ ID NO: 376122 - DNA, 25 bp, Homo sapien
aaaaaaattatgacgaaattggctg

SEQ ID NO: 376123 - DNA, 25 bp, Homo sapien
ttgaggagtttgggacatgcttggg

SEQ ID NO: 376124 - DNA, 25 bp, Homo sapien
tgttccaggagtatgactatcattc

SEQ ID NO: 376125 - DNA, 25 bp, Homo sapien
tcttcaggatggtcaatagtacaaa

SEQ ID NO: 376126 - DNA, 25 bp, Homo sapien
cattgctcccttccgttaggtaggc

SEQ ID NO: 376127 - DNA, 25 bp, Homo sapien
ggcaccatttaaattcctagtggga

SEQ ID NO: 376128 - DNA, 25 bp, Homo sapien
tgtctccgtgtgcatacttcacaaa

SEQ ID NO: 376129 - DNA, 25 bp, Homo sapien
tttggtccattacactgtctccgtg

SEQ ID NO: 376130 - DNA, 25 bp, Homo sapien
ccctgtttgcaagagtacagaaagc

SEQ ID NO: 376131 - DNA, 25 bp, Homo sapien
tcgaagtttctcattacgggtgaac

SEQ ID NO: 376132 - DNA, 25 bp, Homo sapien
tatgaagtactagataacaaatatt

SEQ ID NO: 376133 - DNA, 25 bp, Homo sapien
ctttttctatgaagtactagataac

SEQ ID NO: 376134 - DNA, 25 bp, Homo sapien
tattgtagaatttgtggagtaagag

SEQ ID NO: 376135 - DNA, 25 bp, Homo sapien
tgtagaatttgtggagtaagaggca

SEQ ID NO: 376136 - DNA, 25 bp, Homo sapien
ggaggagcaagagaaattagcatct

SEQ ID NO: 376137 - DNA, 25 bp, Homo sapien
gagcaagagaaattagcatctgctt

SEQ ID NO: 376138 - DNA, 25 bp, Homo sapien
tttttggcattggtgtaaacatgct

SEQ ID NO: 376139 - DNA, 25 bp, Homo sapien
ggcattggtgtaaacatgcttcctt

SEQ ID NO: 376140 - DNA, 25 bp, Homo sapien
tgccaatcgtactaaaaagagggac

SEQ ID NO: 376141 - DNA, 25 bp, Homo sapien
gaaacaaagtagtatgttgagacag

SEQ ID NO: 376142 - DNA, 25 bp, Homo sapien
gaaatctgaggagattgtgcctcca

SEQ ID NO: 376143 - DNA, 25 bp, Homo sapien
gagggacataaatgagttctaggaa

SEQ ID NO: 376144 - DNA, 25 bp, Homo sapien
ggagccaaatctaagatttccggaa

SEQ ID NO: 376145 - DNA, 25 bp, Homo sapien
gcaaaaaggagccaaatctaagatt

SEQ ID NO: 376146 - DNA, 25 bp, Homo sapien
ctaagatttccggaaactttatgtg

SEQ ID NO: 376147 - DNA, 25 bp, Homo sapien
catttaagggtgcaaaaaggagcca

SEQ ID NO: 376148 - DNA, 25 bp, Homo sapien
cccacgagagagtgcacgctgctta

SEQ ID NO: 376149 - DNA, 25 bp, Homo sapien
gctggcaacaggaacaggcattctc

SEQ ID NO: 376150 - DNA, 25 bp, Homo sapien
taaaagtccgtaacaggcatcacgg

SEQ ID NO: 376151 - DNA, 25 bp, Homo sapien
aaaatgtggtccatgaacagccagc

SEQ ID NO: 376152 - DNA, 25 bp, Homo sapien
caacttgccagtttctttaggagcc

SEQ ID NO: 376153 - DNA, 25 bp, Homo sapien
ctggctcagataccaaataactgaa

SEQ ID NO: 376154 - DNA, 25 bp, Homo sapien
ggagcctgaggataattcttaacaa

SEQ ID NO: 376155 - DNA, 25 bp, Homo sapien
caaccctagctattaacaactctga

SEQ ID NO: 376156 - DNA, 25 bp, Homo sapien
gtagaaaagctgtaagccacaggcc

SEQ ID NO: 376157 - DNA, 25 bp, Homo sapien
tacactatgcaaagggtctttaacc

SEQ ID NO: 376158 - DNA, 25 bp, Homo sapien
gccacaggccacttgatgcagttac

SEQ ID NO: 376159 - DNA, 25 bp, Homo sapien
tacacagatgtcatgggcaagacaa

SEQ ID NO: 376160 - DNA, 25 bp, Homo sapien
tatcaccgtgaagaacaagattaga

SEQ ID NO: 376161 - DNA, 25 bp, Homo sapien
gactatttgcggttcttgccttggc

SEQ ID NO: 376162 - DNA, 25 bp, Homo sapien
gtgtaatgccccgacctcatagtac

SEQ ID NO: 376163 - DNA, 25 bp, Homo sapien
ctccatataaggaatagagtaccct

SEQ ID NO: 376164 - DNA, 25 bp, Homo sapien
aatcaaacataaatggaaagattca

SEQ ID NO: 376165 - DNA, 25 bp, Homo sapien
tgaaaaatcaaacataaatggaaag

SEQ ID NO: 376166 - DNA, 25 bp, Homo sapien
tcaaacataaatggaaagattcaag

SEQ ID NO: 376167 - DNA, 25 bp, Homo sapien
aaaatcaaacataaatggaaagatt

SEQ ID NO: 376168 - DNA, 25 bp, Homo sapien
ggaggtacgcttgtgagtttagtac

SEQ ID NO: 376169 - DNA, 25 bp, Homo sapien
tgtgtcgctgatgtgaaaccactgc

SEQ ID NO: 376170 - DNA, 25 bp, Homo sapien
cacagcttgcacatgtgtgtcgctg

SEQ ID NO: 376171 - DNA, 25 bp, Homo sapien
tagtactttagttgtaggcacagct

SEQ ID NO: 376172 - DNA, 25 bp, Homo sapien
taaaagccataaatgtgtttccaga

SEQ ID NO: 376173 - DNA, 25 bp, Homo sapien
tatttcagccattataaaagccata

SEQ ID NO: 376174 - DNA, 25 bp, Homo sapien
ttttatcgttatttcagccattata

SEQ ID NO: 376175 - DNA, 25 bp, Homo sapien
aaaagccataaatgtgtttccagaa

SEQ ID NO: 376176 - DNA, 25 bp, Homo sapien
tccatcacccagatatattaaacac

SEQ ID NO: 376177 - DNA, 25 bp, Homo sapien
tttgctagagggacagtatacatcc

SEQ ID NO: 376178 - DNA, 25 bp, Homo sapien
gaactatgatagcaagagatgacca

SEQ ID NO: 376179 - DNA, 25 bp, Homo sapien
taagtagactgcagcataaggaacg

SEQ ID NO: 376180 - DNA, 25 bp, Homo sapien
taagtacagtaaggaccagttggtg

SEQ ID NO: 376181 - DNA, 25 bp, Homo sapien
tctgatggaggaacgtttcattttc

SEQ ID NO: 376182 - DNA, 25 bp, Homo sapien
tagtgtgtagtcagcccagttctgt

SEQ ID NO: 376183 - DNA, 25 bp, Homo sapien
gggaatgcacaacctaaaaatagta

SEQ ID NO: 376184 - DNA, 25 bp, Homo sapien
ttctgtagtgtgtagtcagcccagt

SEQ ID NO: 376185 - DNA, 25 bp, Homo sapien
gaaaccgaaggtgatgtaacatctg

SEQ ID NO: 376186 - DNA, 25 bp, Homo sapien
caaaaatagcagtgtactcttgtcc

SEQ ID NO: 376187 - DNA, 25 bp, Homo sapien
ggtattcaattccttagggctctgg

SEQ ID NO: 376188 - DNA, 25 bp, Homo sapien
cagaaactaaggtatgtagacttca

SEQ ID NO: 376189 - DNA, 25 bp, Homo sapien
tttcccagaaggctgtgcgtgctcc

SEQ ID NO: 376190 - DNA, 25 bp, Homo sapien
tactaacgggctgagcgtgctgccc

SEQ ID NO: 376191 - DNA, 25 bp, Homo sapien
gtgattttggaagggctcggccacc

SEQ ID NO: 376192 - DNA, 25 bp, Homo sapien
tcggcggcacgatcgacattgtaca

SEQ ID NO: 376193 - DNA, 25 bp, Homo sapien
tgcttcagacctggcggcagggaaa

SEQ ID NO: 376194 - DNA, 25 bp, Homo sapien
gccacagaggttgctcttctcgcga

SEQ ID NO: 376195 - DNA, 25 bp, Homo sapien
tcttctcgcgatgcttcagacctgg

SEQ ID NO: 376196 - DNA, 25 bp, Homo sapien
aaagggtgggctaattggagagcca

SEQ ID NO: 376197 - DNA, 25 bp, Homo sapien
ggcagatgctctgcctcgggaaaaa

SEQ ID NO: 376198 - DNA, 25 bp, Homo sapien
gagcggacgcctagagacaattttg

SEQ ID NO: 376199 - DNA, 25 bp, Homo sapien
gactttaattatcgtgcgcattccc

SEQ ID NO: 376200 - DNA, 25 bp, Homo sapien
tatggtgcccaacacagagcggacg

SEQ ID NO: 376201 - DNA, 25 bp, Homo sapien
cactgcgctgtgggagcgccttcct

SEQ ID NO: 376202 - DNA, 25 bp, Homo sapien
actgcgctgtgggagcgccttcctg

SEQ ID NO: 376203 - DNA, 25 bp, Homo sapien
ccactgcgctgtgggagcgccttcc

SEQ ID NO: 376204 - DNA, 25 bp, Homo sapien
ggaatcaaacaacgccactagatgg

SEQ ID NO: 376205 - DNA, 25 bp, Homo sapien
gatggaccgatatcaagaacacacc

SEQ ID NO: 376206 - DNA, 25 bp, Homo sapien
gattacgaagctgttgccagcccca

SEQ ID NO: 376207 - DNA, 25 bp, Homo sapien
gctacactacgaatgatcagcaagg

SEQ ID NO: 376208 - DNA, 25 bp, Homo sapien
cattgagattcctgatgtgatttaa

SEQ ID NO: 376209 - DNA, 25 bp, Homo sapien
agaatcatcttgagataagtcactg

SEQ ID NO: 376210 - DNA, 25 bp, Homo sapien
taattgcgtttagactatatttgcc

SEQ ID NO: 376211 - DNA, 25 bp, Homo sapien
catttggcatagagtcagaggagtg

SEQ ID NO: 376212 - DNA, 25 bp, Homo sapien
ttctcagtccagaaggaccccggta

SEQ ID NO: 376213 - DNA, 25 bp, Homo sapien
tctcagtccagaaggaccccggtaa

SEQ ID NO: 376214 - DNA, 25 bp, Homo sapien
gagaacgaggttttctacataaatg

SEQ ID NO: 376215 - DNA, 25 bp, Homo sapien
tgattctgcatcaaagccatcgcaa

SEQ ID NO: 376216 - DNA, 25 bp, Homo sapien
ttcaaacaacatactaaccatgccg

SEQ ID NO: 376217 - DNA, 25 bp, Homo sapien
catgccgttggcattcaattaatgt

SEQ ID NO: 376218 - DNA, 25 bp, Homo sapien
tttaaccactcaagttgtctttcac

SEQ ID NO: 376219 - DNA, 25 bp, Homo sapien
atgacagtaatttaaccactcaagt

SEQ ID NO: 376220 - DNA, 25 bp, Homo sapien
atttaaccactcaagttgtctttca

SEQ ID NO: 376221 - DNA, 25 bp, Homo sapien
cagtaatttaaccactcaagttgtc

SEQ ID NO: 376222 - DNA, 25 bp, Homo sapien
cttaagatctgctgcctcgttccac

SEQ ID NO: 376223 - DNA, 25 bp, Homo sapien
agatctgctgcctcgttccacataa

SEQ ID NO: 376224 - DNA, 25 bp, Homo sapien
tcgttccacataacttctaaaggtg

SEQ ID NO: 376225 - DNA, 25 bp, Homo sapien
ttctaaaggtgcaatcagctgaacc

SEQ ID NO: 376226 - DNA, 25 bp, Homo sapien
accggtgtcccagagtttcaatcag

SEQ ID NO: 376227 - DNA, 25 bp, Homo sapien
ggttagctgagacttccaaggtcca

SEQ ID NO: 376228 - DNA, 25 bp, Homo sapien
gcatcatcaggtaagcggactttct

SEQ ID NO: 376229 - DNA, 25 bp, Homo sapien
tataaagcagtccttactccacgga

SEQ ID NO: 376230 - DNA, 25 bp, Homo sapien
cactgcattccagcctgcgtgacag

SEQ ID NO: 376231 - DNA, 25 bp, Homo sapien
cagggctgtagtgagccatgattcc

SEQ ID NO: 376232 - DNA, 25 bp, Homo sapien
ccagcctgcgtgacagagcaagggg

SEQ ID NO: 376233 - DNA, 25 bp, Homo sapien
ctgggcccaggaggtcagggctgta

SEQ ID NO: 376234 - DNA, 25 bp, Homo sapien
gtaatccaagcacttcaagaagcca

SEQ ID NO: 376235 - DNA, 25 bp, Homo sapien
aacctgggcaaaatagcgagactcc

SEQ ID NO: 376236 - DNA, 25 bp, Homo sapien
aatccaagcacttcaagaagccaaa

SEQ ID NO: 376237 - DNA, 25 bp, Homo sapien
ccaagcacttcaagaagccaaaagc

SEQ ID NO: 376238 - DNA, 25 bp, Homo sapien
gagaagaaattgaaacctcttgcct

SEQ ID NO: 376239 - DNA, 25 bp, Homo sapien
gccaaatcaaagtcatgatgagaca

SEQ ID NO: 376240 - DNA, 25 bp, Homo sapien
aataaagatcaaggccaaatcaaag

SEQ ID NO: 376241 - DNA, 25 bp, Homo sapien
accccgcacagaccttttgatgtca

SEQ ID NO: 376242 - DNA, 25 bp, Homo sapien
ggccaaacttgttgcagagcataaa

SEQ ID NO: 376243 - DNA, 25 bp, Homo sapien
tcagagtgagcatccaatcgccagt

SEQ ID NO: 376244 - DNA, 25 bp, Homo sapien
gcacagtaatagactttggcttcag

SEQ ID NO: 376245 - DNA, 25 bp, Homo sapien
gatttccacgggcacagtaatagac

SEQ ID NO: 376246 - DNA, 25 bp, Homo sapien
agtagccaacttgctgacctttgga

SEQ ID NO: 376247 - DNA, 25 bp, Homo sapien
catggtgcagtgtgtaaaaagcctt

SEQ ID NO: 376248 - DNA, 25 bp, Homo sapien
gcagaatgaggtgctgcccaaccag

SEQ ID NO: 376249 - DNA, 25 bp, Homo sapien
cacaatcctagcacattgactgaag

SEQ ID NO: 376250 - DNA, 25 bp, Homo sapien
agcacgtcgtagagccattgtcctg

SEQ ID NO: 376251 - DNA, 25 bp, Homo sapien
tgggctaggcatacagacacgcata

SEQ ID NO: 376252 - DNA, 25 bp, Homo sapien
cctggaacagctctaggtgaggatc

SEQ ID NO: 376253 - DNA, 25 bp, Homo sapien
tctgaatagagacacctgggctagg

SEQ ID NO: 376254 - DNA, 25 bp, Homo sapien
ttctacaacagtgcgggcaagaggc

SEQ ID NO: 376255 - DNA, 25 bp, Homo sapien
cttgagctcaggagttccagaccag

SEQ ID NO: 376256 - DNA, 25 bp, Homo sapien
ttgagaggcggaggagggaggatct

SEQ ID NO: 376257 - DNA, 25 bp, Homo sapien
ccagcctgggcaacatagcgagacc

SEQ ID NO: 376258 - DNA, 25 bp, Homo sapien
agaccagcctgggcaacatagcgag

SEQ ID NO: 376259 - DNA, 25 bp, Homo sapien
aggatccaggaaggttacgaatgtc

SEQ ID NO: 376260 - DNA, 25 bp, Homo sapien
atccaggaaggttacgaatgtcaac

SEQ ID NO: 376261 - DNA, 25 bp, Homo sapien
gatccaggaaggttacgaatgtcaa

SEQ ID NO: 376262 - DNA, 25 bp, Homo sapien
ggatccaggaaggttacgaatgtca

SEQ ID NO: 376263 - DNA, 25 bp, Homo sapien
aaatgaaatgatgaacaaggtttct

SEQ ID NO: 376264 - DNA, 25 bp, Homo sapien
ccaggtggtcttcataatttggaaa

SEQ ID NO: 376265 - DNA, 25 bp, Homo sapien
gaaacaagcatcttcagtcaggccc

SEQ ID NO: 376266 - DNA, 25 bp, Homo sapien
tgcagtccgcactggtggaaagggc

SEQ ID NO: 376267 - DNA, 25 bp, Homo sapien
aatgaggtctcaccctattagacag

SEQ ID NO: 376268 - DNA, 25 bp, Homo sapien
aggtctcaccctattagacaggatg

SEQ ID NO: 376269 - DNA, 25 bp, Homo sapien
gaaatgaggtctcaccctattagac

SEQ ID NO: 376270 - DNA, 25 bp, Homo sapien
tgaggtctcaccctattagacagga

SEQ ID NO: 376271 - DNA, 25 bp, Homo sapien
tggcttagcacatcagtgggtttaa

SEQ ID NO: 376272 - DNA, 25 bp, Homo sapien
tcaccccagagttaggcttcattct

SEQ ID NO: 376273 - DNA, 25 bp, Homo sapien
aaagctcaggaatgggaggcactag

SEQ ID NO: 376274 - DNA, 25 bp, Homo sapien
aagaaaggctgtctccctacaccag

SEQ ID NO: 376275 - DNA, 25 bp, Homo sapien
ggacacatcaaaggaagcactctgc

SEQ ID NO: 376276 - DNA, 25 bp, Homo sapien
tctgtgtcaaaggtcaagtctcctg

SEQ ID NO: 376277 - DNA, 25 bp, Homo sapien
aaatggtttgcatcagctgaggatc

SEQ ID NO: 376278 - DNA, 25 bp, Homo sapien
ccttatatagacgtgaaaacagccc

SEQ ID NO: 376279 - DNA, 25 bp, Homo sapien
tggcaagtgtcacagggcccatgct

SEQ ID NO: 376280 - DNA, 25 bp, Homo sapien
tctcacagtgatcctgcgagcaggg

SEQ ID NO: 376281 - DNA, 25 bp, Homo sapien
gcttcacggaagaaaccactagagt

SEQ ID NO: 376282 - DNA, 25 bp, Homo sapien
gaacagatcgaatccaaggctcgct

SEQ ID NO: 376283 - DNA, 25 bp, Homo sapien
cagtaaacaagccacccctttcaca

SEQ ID NO: 376284 - DNA, 25 bp, Homo sapien
cccatcccgtaagggattgagtgct

SEQ ID NO: 376285 - DNA, 25 bp, Homo sapien
ataaatttaacatgagggagcactt

SEQ ID NO: 376286 - DNA, 25 bp, Homo sapien
tgagtgctgcgggctcagtaaacaa

SEQ ID NO: 376287 - DNA, 25 bp, Homo sapien
agtgactcagtagtctgggtagacc

SEQ ID NO: 376288 - DNA, 25 bp, Homo sapien
tagtctgggtagaccctcattctgg

SEQ ID NO: 376289 - DNA, 25 bp, Homo sapien
actcagtagtctgggtagaccctca

SEQ ID NO: 376290 - DNA, 25 bp, Homo sapien
agaaattttaatggctattcatagc

SEQ ID NO: 376291 - DNA, 25 bp, Homo sapien
aatacccattcccaggctttgccat

SEQ ID NO: 376292 - DNA, 25 bp, Homo sapien
aaatacccattcccaggctttgcca

SEQ ID NO: 376293 - DNA, 25 bp, Homo sapien
tatgttccaggctagtgtttctcaa

SEQ ID NO: 376294 - DNA, 25 bp, Homo sapien
gagctctagacttgcttctgaatta

SEQ ID NO: 376295 - DNA, 25 bp, Homo sapien
tacgtatgtagcttggtatgttcca

SEQ ID NO: 376296 - DNA, 25 bp, Homo sapien
gatcaataatacactcctaccatag

SEQ ID NO: 376297 - DNA, 25 bp, Homo sapien
aaaatacaaacagacttgcttcaca

SEQ ID NO: 376298 - DNA, 25 bp, Homo sapien
cattagtcctggcaaacttaaaata

SEQ ID NO: 376299 - DNA, 25 bp, Homo sapien
aatgttttaattcattagtcctggc

SEQ ID NO: 376300 - DNA, 25 bp, Homo sapien
gcattgataaacagcaagttgtggg

SEQ ID NO: 376301 - DNA, 25 bp, Homo sapien
tccgcttcccttcacaacccctctc

SEQ ID NO: 376302 - DNA, 25 bp, Homo sapien
ctgaggagcggagacagctgtcagg

SEQ ID NO: 376303 - DNA, 25 bp, Homo sapien
cagaccccagcgtcccacgggacct

SEQ ID NO: 376304 - DNA, 25 bp, Homo sapien
cttcccttcacaacccctctctcct

SEQ ID NO: 376305 - DNA, 25 bp, Homo sapien
tgcacctgctgcatagcagccactg

SEQ ID NO: 376306 - DNA, 25 bp, Homo sapien
caggctgcacctgctgcatagcagc

SEQ ID NO: 376307 - DNA, 25 bp, Homo sapien
cctgctgcatagcagccactgacaa

SEQ ID NO: 376308 - DNA, 25 bp, Homo sapien
tcagtgagagaccaggctgcacctg

SEQ ID NO: 376309 - DNA, 25 bp, Homo sapien
gtcgttgcctttgtggagtagagac

SEQ ID NO: 376310 - DNA, 25 bp, Homo sapien
tctgcacttgtgtaacccagagcca

SEQ ID NO: 376311 - DNA, 25 bp, Homo sapien
tgccttggccagtcgttgcctttgt

SEQ ID NO: 376312 - DNA, 25 bp, Homo sapien
gagtgtctgcacttgtgtaacccag

SEQ ID NO: 376313 - DNA, 25 bp, Homo sapien
tctcttggctacaggctgtaacaga

SEQ ID NO: 376314 - DNA, 25 bp, Homo sapien
cttttcatcacaccgtctggggaaa

SEQ ID NO: 376315 - DNA, 25 bp, Homo sapien
ttggctacaggctgtaacagagctt

SEQ ID NO: 376316 - DNA, 25 bp, Homo sapien
caccgtctggggaaacgaaccacag

SEQ ID NO: 376317 - DNA, 25 bp, Homo sapien
tagggaatggcatggattgtctcaa

SEQ ID NO: 376318 - DNA, 25 bp, Homo sapien
tttcccgcaccaagaaatcaagtac

SEQ ID NO: 376319 - DNA, 25 bp, Homo sapien
ctaaggatggaaagttgcactcctc

SEQ ID NO: 376320 - DNA, 25 bp, Homo sapien
tacaatcaccgaatcactttagcat

SEQ ID NO: 376321 - DNA, 25 bp, Homo sapien
cagaatcaagcattttgttagccac

SEQ ID NO: 376322 - DNA, 25 bp, Homo sapien
tcagaatcaagcattttgttagcca

SEQ ID NO: 376323 - DNA, 25 bp, Homo sapien
gctcagaatcaagcattttgttagc

SEQ ID NO: 376324 - DNA, 25 bp, Homo sapien
ctgctcagaatcaagcattttgtta

SEQ ID NO: 376325 - DNA, 25 bp, Homo sapien
tccagttagaatcataatttggccc

SEQ ID NO: 376326 - DNA, 25 bp, Homo sapien
tatttagcactacaagtagcaatgc

SEQ ID NO: 376327 - DNA, 25 bp, Homo sapien
gtagcaatgcaccaaaaagctctcc

SEQ ID NO: 376328 - DNA, 25 bp, Homo sapien
taaaaccctagtatagctttggaga

SEQ ID NO: 376329 - DNA, 25 bp, Homo sapien
gggcacctgagcctccgccttctcc

SEQ ID NO: 376330 - DNA, 25 bp, Homo sapien
gcctccgccttctcctgggtcttcc

SEQ ID NO: 376331 - DNA, 25 bp, Homo sapien
tgagcctccgccttctcctgggtct

SEQ ID NO: 376332 - DNA, 25 bp, Homo sapien
ctccgccttctcctgggtcttccag

SEQ ID NO: 376333 - DNA, 25 bp, Homo sapien
agcaggtaccctggctgtgctgatc

SEQ ID NO: 376334 - DNA, 25 bp, Homo sapien
tcagcaggtaccctggctgtgctga

SEQ ID NO: 376335 - DNA, 25 bp, Homo sapien
caggtaccctggctgtgctgatcat

SEQ ID NO: 376336 - DNA, 25 bp, Homo sapien
cagcaggtaccctggctgtgctgat

SEQ ID NO: 376337 - DNA, 25 bp, Homo sapien
cattgaggctaaaggcgatgcgtac

SEQ ID NO: 376338 - DNA, 25 bp, Homo sapien
attgaggctaaaggcgatgcgtaca

SEQ ID NO: 376339 - DNA, 25 bp, Homo sapien
gctaaaggcgatgcgtacaggcttg

SEQ ID NO: 376340 - DNA, 25 bp, Homo sapien
gaggctaaaggcgatgcgtacaggc

SEQ ID NO: 376341 - DNA, 25 bp, Homo sapien
tctagagatatgaggacacactgac

SEQ ID NO: 376342 - DNA, 25 bp, Homo sapien
tgaggctacctattaaaaaccatgg

SEQ ID NO: 376343 - DNA, 25 bp, Homo sapien
tctgtgagctcctagtcaagggcca

SEQ ID NO: 376344 - DNA, 25 bp, Homo sapien
caggtaggtgccctttctagagata

SEQ ID NO: 376345 - DNA, 25 bp, Homo sapien
tactagatccgaagattacttcgga

SEQ ID NO: 376346 - DNA, 25 bp, Homo sapien
gagaagagattactagatccgaaga

SEQ ID NO: 376347 - DNA, 25 bp, Homo sapien
gagattactagatccgaagattact

SEQ ID NO: 376348 - DNA, 25 bp, Homo sapien
tgtggagagaagagattactagatc

SEQ ID NO: 376349 - DNA, 25 bp, Homo sapien
catctggtttagctggcatccctac

SEQ ID NO: 376350 - DNA, 25 bp, Homo sapien
ccagaagtttcagggcttgcgaagc

SEQ ID NO: 376351 - DNA, 25 bp, Homo sapien
cagggcttgcgaagctgcttacaaa

SEQ ID NO: 376352 - DNA, 25 bp, Homo sapien
gcttacaaagctgccccaagttgat

SEQ ID NO: 376353 - DNA, 25 bp, Homo sapien
ttggcaataggcagctgttgctgga

SEQ ID NO: 376354 - DNA, 25 bp, Homo sapien
ataggcagctgttgctggatggcaa

SEQ ID NO: 376355 - DNA, 25 bp, Homo sapien
caataggcagctgttgctggatggc

SEQ ID NO: 376356 - DNA, 25 bp, Homo sapien
agatgcagttctaagaagcatttga

SEQ ID NO: 376357 - DNA, 25 bp, Homo sapien
ccccagagttagaccatcagtatac

SEQ ID NO: 376358 - DNA, 25 bp, Homo sapien
ctttcttgtaggagtccttggactc

SEQ ID NO: 376359 - DNA, 25 bp, Homo sapien
agaccatcagtatacactgtttcag

SEQ ID NO: 376360 - DNA, 25 bp, Homo sapien
tcttgtaggagtccttggactcccc

SEQ ID NO: 376361 - DNA, 25 bp, Homo sapien
tagctgctggtctaattctggaaag

SEQ ID NO: 376362 - DNA, 25 bp, Homo sapien
agctgctggtctaattctggaaaga

SEQ ID NO: 376363 - DNA, 25 bp, Homo sapien
gtagctgctggtctaattctggaaa

SEQ ID NO: 376364 - DNA, 25 bp, Homo sapien
ctatcttggcttgcggaagggctca

SEQ ID NO: 376365 - DNA, 25 bp, Homo sapien
taagaatgccaaactcaaatgacgt

SEQ ID NO: 376366 - DNA, 25 bp, Homo sapien
caaggcacacccacaaatgggaaaa

SEQ ID NO: 376367 - DNA, 25 bp, Homo sapien
caaatgacgttaggacacaaggcac

SEQ ID NO: 376368 - DNA, 25 bp, Homo sapien
accctggcagtagaacaccagctct

SEQ ID NO: 376369 - DNA, 25 bp, Homo sapien
gagtcaccctcagttggtttttaga

SEQ ID NO: 376370 - DNA, 25 bp, Homo sapien
ctgagtcaccctcagttggttttta

SEQ ID NO: 376371 - DNA, 25 bp, Homo sapien
agagaccaccctggcagtagaacac

SEQ ID NO: 376372 - DNA, 25 bp, Homo sapien
tgtgtttggttgtattgctggtaac

SEQ ID NO: 376373 - DNA, 25 bp, Homo sapien
aatgtgtttggttgtattgctggta

SEQ ID NO: 376374 - DNA, 25 bp, Homo sapien
aaatgtgtttggttgtattgctggt

SEQ ID NO: 376375 - DNA, 25 bp, Homo sapien
gaaatgtgtttggttgtattgctgg

SEQ ID NO: 376376 - DNA, 25 bp, Homo sapien
agctcctcccgaagtggattccact

SEQ ID NO: 376377 - DNA, 25 bp, Homo sapien
gttcatagcaagctcctcccgaagt

SEQ ID NO: 376378 - DNA, 25 bp, Homo sapien
tctgcctgagcttgccggttcatag

SEQ ID NO: 376379 - DNA, 25 bp, Homo sapien
ctgagcttgccggttcatagcaagc

SEQ ID NO: 376380 - DNA, 25 bp, Homo sapien
tcaggaccgatttaacaagatgaag

SEQ ID NO: 376381 - DNA, 25 bp, Homo sapien
agtaagagagaaaccgcagggtccg

SEQ ID NO: 376382 - DNA, 25 bp, Homo sapien
gaatgccggcttgagccacacggtg

SEQ ID NO: 376383 - DNA, 25 bp, Homo sapien
gcagggtccggttccaagaatgccg

SEQ ID NO: 376384 - DNA, 25 bp, Homo sapien
catcaggataaattaccaaccattt

SEQ ID NO: 376385 - DNA, 25 bp, Homo sapien
gcatcaggataaattaccaaccatt

SEQ ID NO: 376386 - DNA, 25 bp, Homo sapien
ggattcctcggagtcatgacaaggc

SEQ ID NO: 376387 - DNA, 25 bp, Homo sapien
cctcggagtcatgacaaggcggcag

SEQ ID NO: 376388 - DNA, 25 bp, Homo sapien
gattcctcggagtcatgacaaggcg

SEQ ID NO: 376389 - DNA, 25 bp, Homo sapien
ttcctcggagtcatgacaaggcggc

SEQ ID NO: 376390 - DNA, 25 bp, Homo sapien
ggcagtgctgtttgaacacctccat

SEQ ID NO: 376391 - DNA, 25 bp, Homo sapien
catggtattcttctgctatttggca

SEQ ID NO: 376392 - DNA, 25 bp, Homo sapien
tttgacctcatggtattcttctgct

SEQ ID NO: 376393 - DNA, 25 bp, Homo sapien
ttggcagtgctgtttgaacacctcc

SEQ ID NO: 376394 - DNA, 25 bp, Homo sapien
taatcccctgtagccaaaagtctag

SEQ ID NO: 376395 - DNA, 25 bp, Homo sapien
tgaagcatggcaaaccaagaaagga

SEQ ID NO: 376396 - DNA, 25 bp, Homo sapien
tatactgtccgaccaccattctggg

SEQ ID NO: 376397 - DNA, 25 bp, Homo sapien
aggttttgcagaagtctggccccaa

SEQ ID NO: 376398 - DNA, 25 bp, Homo sapien
cagtgtctgaacgactccaataaag

SEQ ID NO: 376399 - DNA, 25 bp, Homo sapien
tacgccagccaagctagaggcaaca

SEQ ID NO: 376400 - DNA, 25 bp, Homo sapien
gagttcaaaccttaagcagtgtctg

SEQ ID NO: 376401 - DNA, 25 bp, Homo sapien
catacatcattggtcataagccaga

SEQ ID NO: 376402 - DNA, 25 bp, Homo sapien
atttggtgatagatttcaaaagcca

SEQ ID NO: 376403 - DNA, 25 bp, Homo sapien
tctctactggatgagataaaatgct

SEQ ID NO: 376404 - DNA, 25 bp, Homo sapien
caatgactttcatattacatacaca

SEQ ID NO: 376405 - DNA, 25 bp, Homo sapien
tctaaacaccaaagtacccaataca

SEQ ID NO: 376406 - DNA, 25 bp, Homo sapien
ggtgtgtgcgccacacttggttaat

SEQ ID NO: 376407 - DNA, 25 bp, Homo sapien
aggtgtgtgcgccacacttggttaa

SEQ ID NO: 376408 - DNA, 25 bp, Homo sapien
tgggccaacctcaacgtccgattct

SEQ ID NO: 376409 - DNA, 25 bp, Homo sapien
tccgtcagagcctcgaattcccgaa

SEQ ID NO: 376410 - DNA, 25 bp, Homo sapien
tgttccacacattgagactgggcca

SEQ ID NO: 376411 - DNA, 25 bp, Homo sapien
gcctgatctaacttggcaatgagct

SEQ ID NO: 376412 - DNA, 25 bp, Homo sapien
tagatctgactcactattcatttaa

SEQ ID NO: 376413 - DNA, 25 bp, Homo sapien
agtcatcagcctcgtatgctcacac

SEQ ID NO: 376414 - DNA, 25 bp, Homo sapien
gcctcgtatgctcacactgaaaaat

SEQ ID NO: 376415 - DNA, 25 bp, Homo sapien
agaagcaatagatctgactcactat

SEQ ID NO: 376416 - DNA, 25 bp, Homo sapien
cacgattcttagctgggtcagtcaa

SEQ ID NO: 376417 - DNA, 25 bp, Homo sapien
gaagctggcaagcagtaaactcatt

SEQ ID NO: 376418 - DNA, 25 bp, Homo sapien
tattacaacagccagttagcattgg

SEQ ID NO: 376419 - DNA, 25 bp, Homo sapien
tctaccctgttgtacagcatgatca

SEQ ID NO: 376420 - DNA, 25 bp, Homo sapien
ggcaaaggcagagatgtttactgtg

SEQ ID NO: 376421 - DNA, 25 bp, Homo sapien
cctcccccagaacacacacaggcaa

SEQ ID NO: 376422 - DNA, 25 bp, Homo sapien
actgtgaggtcacatggcatgaagc

SEQ ID NO: 376423 - DNA, 25 bp, Homo sapien
aggcagagatgtttactgtgaggtc

SEQ ID NO: 376424 - DNA, 25 bp, Homo sapien
aacaatagttacaagttcactgatg

SEQ ID NO: 376425 - DNA, 25 bp, Homo sapien
tattagctgttactgatctaaaaca

SEQ ID NO: 376426 - DNA, 25 bp, Homo sapien
gagaaaatgtggtgataggtagaac

SEQ ID NO: 376427 - DNA, 25 bp, Homo sapien
gaatttactcgcatattcctattag

SEQ ID NO: 376428 - DNA, 25 bp, Homo sapien
ctttctccaagacctccattccatc

SEQ ID NO: 376429 - DNA, 25 bp, Homo sapien
tttctccaagacctccattccatcc

SEQ ID NO: 376430 - DNA, 25 bp, Homo sapien
gatcctcgggctttacaggcttgcc

SEQ ID NO: 376431 - DNA, 25 bp, Homo sapien
ggtgaatccacaggcgtctgcagca

SEQ ID NO: 376432 - DNA, 25 bp, Homo sapien
ccaagagggtgcctgaaggtcaaaa

SEQ ID NO: 376433 - DNA, 25 bp, Homo sapien
gactaaggcaagtttcagcacagga

SEQ ID NO: 376434 - DNA, 25 bp, Homo sapien
ctgggcaacaaacctgggcgacaaa

SEQ ID NO: 376435 - DNA, 25 bp, Homo sapien
cctgggcaacaaacctgggcgacaa

SEQ ID NO: 376436 - DNA, 25 bp, Homo sapien
cctggacatttttgaatagcttctt

SEQ ID NO: 376437 - DNA, 25 bp, Homo sapien
caaaaaacaacttgcaaggctaggc

SEQ ID NO: 376438 - DNA, 25 bp, Homo sapien
acttgcaaggctaggcgcgatggct

SEQ ID NO: 376439 - DNA, 25 bp, Homo sapien
gggcggattgcttcacctcaagagt

SEQ ID NO: 376440 - DNA, 25 bp, Homo sapien
tgtcaaagaatcagtcaatcaaaga

SEQ ID NO: 376441 - DNA, 25 bp, Homo sapien
aagaatcagtcaatcaaagatggct

SEQ ID NO: 376442 - DNA, 25 bp, Homo sapien
tcaaagaatcagtcaatcaaagatg

SEQ ID NO: 376443 - DNA, 25 bp, Homo sapien
caaagaatcagtcaatcaaagatgg

SEQ ID NO: 376444 - DNA, 25 bp, Homo sapien
ctccaaggccagaattgcatccttc

SEQ ID NO: 376445 - DNA, 25 bp, Homo sapien
ttcattgaggaacacatctgaaatt

SEQ ID NO: 376446 - DNA, 25 bp, Homo sapien
tctctccaaggccagaattgcatcc

SEQ ID NO: 376447 - DNA, 25 bp, Homo sapien
gtgattcattgaggaacacatctga

SEQ ID NO: 376448 - DNA, 25 bp, Homo sapien
aaggtgtcagatgcaccaaaatcac

SEQ ID NO: 376449 - DNA, 25 bp, Homo sapien
gatttattaatcattgaaaaggtgt

SEQ ID NO: 376450 - DNA, 25 bp, Homo sapien
aggtgtcagatgcaccaaaatcacc

SEQ ID NO: 376451 - DNA, 25 bp, Homo sapien
ctaatttctggatcttgatttatta

SEQ ID NO: 376452 - DNA, 25 bp, Homo sapien
aataatgaacgcttcctttgacagg

SEQ ID NO: 376453 - DNA, 25 bp, Homo sapien
tccagatggccaacaaagcataaca

SEQ ID NO: 376454 - DNA, 25 bp, Homo sapien
gaagctgcaaactagagccttagaa

SEQ ID NO: 376455 - DNA, 25 bp, Homo sapien
gaccactagcaaactattgagcaga

SEQ ID NO: 376456 - DNA, 25 bp, Homo sapien
cacttttagatggtgtgttgtccac

SEQ ID NO: 376457 - DNA, 25 bp, Homo sapien
actgagggcaagttgatttcaagca

SEQ ID NO: 376458 - DNA, 25 bp, Homo sapien
tcaggggacaaataaggacccaaca

SEQ ID NO: 376459 - DNA, 25 bp, Homo sapien
tgtccacgggcattgagtcactgag

SEQ ID NO: 376460 - DNA, 25 bp, Homo sapien
ccacaagtataagcattgtggttac

SEQ ID NO: 376461 - DNA, 25 bp, Homo sapien
gcctctgcatccacaagtataagca

SEQ ID NO: 376462 - DNA, 25 bp, Homo sapien
gcatccacaagtataagcattgtgg

SEQ ID NO: 376463 - DNA, 25 bp, Homo sapien
tgggcctctgcatccacaagtataa

SEQ ID NO: 376464 - DNA, 25 bp, Homo sapien
gggccattccctggtcttgtaggtg

SEQ ID NO: 376465 - DNA, 25 bp, Homo sapien
gaacatggggtcatcaacagacagg

SEQ ID NO: 376466 - DNA, 25 bp, Homo sapien
atgaccttgaccaggggtgcgaaga

SEQ ID NO: 376467 - DNA, 25 bp, Homo sapien
ccttgaccaggggtgcgaagaagtt

SEQ ID NO: 376468 - DNA, 25 bp, Homo sapien
gtggtgaggacatgccagtgagctt

SEQ ID NO: 376469 - DNA, 25 bp, Homo sapien
gggcaatgctgatccagcatggaaa

SEQ ID NO: 376470 - DNA, 25 bp, Homo sapien
gttgggggcaatgctgatccagcat

SEQ ID NO: 376471 - DNA, 25 bp, Homo sapien
atgctgatccagcatggaaagtgga

SEQ ID NO: 376472 - DNA, 25 bp, Homo sapien
ctaccaccctattgctgtagccaaa

SEQ ID NO: 376473 - DNA, 25 bp, Homo sapien
gctgtagccaaattcactatcatac

SEQ ID NO: 376474 - DNA, 25 bp, Homo sapien
tattgctgtagccaaattcactatc

SEQ ID NO: 376475 - DNA, 25 bp, Homo sapien
tgctgtagccaaattcactatcata

SEQ ID NO: 376476 - DNA, 25 bp, Homo sapien
gagattttccagtcttcggggtgga

SEQ ID NO: 376477 - DNA, 25 bp, Homo sapien
ggacaagcttacaatagccacttga

SEQ ID NO: 376478 - DNA, 25 bp, Homo sapien
gagaactcaattggcacagtgaatg

SEQ ID NO: 376479 - DNA, 25 bp, Homo sapien
cgactgcagtaagaaggaacatttt

SEQ ID NO: 376480 - DNA, 25 bp, Homo sapien
agaaactactagatatggaggacaa

SEQ ID NO: 376481 - DNA, 25 bp, Homo sapien
tggattttggcccaatgatgacaac

SEQ ID NO: 376482 - DNA, 25 bp, Homo sapien
tactgtctctgataacacatccagg

SEQ ID NO: 376483 - DNA, 25 bp, Homo sapien
ttaagaccacataccagactcctgg

SEQ ID NO: 376484 - DNA, 25 bp, Homo sapien
cctgatctattcgaaggaaacgtgt

SEQ ID NO: 376485 - DNA, 25 bp, Homo sapien
gaaaactcccatgtttctaggcaat

SEQ ID NO: 376486 - DNA, 25 bp, Homo sapien
tgtctgtaaggaaaccacaaggccc

SEQ ID NO: 376487 - DNA, 25 bp, Homo sapien
tctaacggataagaaggctgaagga

SEQ ID NO: 376488 - DNA, 25 bp, Homo sapien
ccagatagtgggacacaccaccaaa

SEQ ID NO: 376489 - DNA, 25 bp, Homo sapien
gtccaacctggtgagattacttaga

SEQ ID NO: 376490 - DNA, 25 bp, Homo sapien
ccaacctggtgagattacttagaat

SEQ ID NO: 376491 - DNA, 25 bp, Homo sapien
tcatagccagttgtccaacctggtg

SEQ ID NO: 376492 - DNA, 25 bp, Homo sapien
cagttgtccaacctggtgagattac

SEQ ID NO: 376493 - DNA, 25 bp, Homo sapien
tgtgaacctgatgatcgatgggact

SEQ ID NO: 376494 - DNA, 25 bp, Homo sapien
tgaacctgatgatcgatgggactgt

SEQ ID NO: 376495 - DNA, 25 bp, Homo sapien
tgatcgatgggactgttattcccca

SEQ ID NO: 376496 - DNA, 25 bp, Homo sapien
cctgatgatcgatgggactgttatt

SEQ ID NO: 376497 - DNA, 25 bp, Homo sapien
aaccacagtgattttgcatctgcaa

SEQ ID NO: 376498 - DNA, 25 bp, Homo sapien
gccttggaccaagaagcccacatct

SEQ ID NO: 376499 - DNA, 25 bp, Homo sapien
ttcctacatcttctggtctgatgcc

SEQ ID NO: 376500 - DNA, 25 bp, Homo sapien
ctacttcttgaatctgccttggacc

SEQ ID NO: 376501 - DNA, 25 bp, Homo sapien
tgcttgatgtactttttggaagagc

SEQ ID NO: 376502 - DNA, 25 bp, Homo sapien
ctgcttgatgtactttttggaagag

SEQ ID NO: 376503 - DNA, 25 bp, Homo sapien
ccagcataggccattaaggctgatg

SEQ ID NO: 376504 - DNA, 25 bp, Homo sapien
gcacaggattcccagcataggccat

SEQ ID NO: 376505 - DNA, 25 bp, Homo sapien
caggattcccagcataggccattaa

SEQ ID NO: 376506 - DNA, 25 bp, Homo sapien
gattcccagcataggccattaaggc

SEQ ID NO: 376507 - DNA, 25 bp, Homo sapien
tcagctgacaagataaatgcccctg

SEQ ID NO: 376508 - DNA, 25 bp, Homo sapien
gctgttctttttaggggcacggcac

SEQ ID NO: 376509 - DNA, 25 bp, Homo sapien
gacaagataaatgcccctgcagagc

SEQ ID NO: 376510 - DNA, 25 bp, Homo sapien
agctgacaagataaatgcccctgca

SEQ ID NO: 376511 - DNA, 25 bp, Homo sapien
caggaactaaagcattttgtggcag

SEQ ID NO: 376512 - DNA, 25 bp, Homo sapien
caaggctgcaatcaacgtgtctact

SEQ ID NO: 376513 - DNA, 25 bp, Homo sapien
gcagaattgagtaaatgtccccata

SEQ ID NO: 376514 - DNA, 25 bp, Homo sapien
tctcaaggctcaactagggtaagac

SEQ ID NO: 376515 - DNA, 25 bp, Homo sapien
gtctgaagatatggcaaaaacttca

SEQ ID NO: 376516 - DNA, 25 bp, Homo sapien
cttcagaattcatttgaagtttcat

SEQ ID NO: 376517 - DNA, 25 bp, Homo sapien
aacttcagaattcatttgaagtttc

SEQ ID NO: 376518 - DNA, 25 bp, Homo sapien
caagtctgaagatatggcaaaaact

SEQ ID NO: 376519 - DNA, 25 bp, Homo sapien
cttatacctattcccacatctcctc

SEQ ID NO: 376520 - DNA, 25 bp, Homo sapien
ttatacctattcccacatctcctca

SEQ ID NO: 376521 - DNA, 25 bp, Homo sapien
tatacctattcccacatctcctcac

SEQ ID NO: 376522 - DNA, 25 bp, Homo sapien
gaatacacctatgtaaacaccacct

SEQ ID NO: 376523 - DNA, 25 bp, Homo sapien
caataattacctgtgtccccaaaag

SEQ ID NO: 376524 - DNA, 25 bp, Homo sapien
gactccctggtgtaccttaccaata

SEQ ID NO: 376525 - DNA, 25 bp, Homo sapien
caccaggctagcttgttctcatctc

SEQ ID NO: 376526 - DNA, 25 bp, Homo sapien
ccataaacgttgcttagataaggag

SEQ ID NO: 376527 - DNA, 25 bp, Homo sapien
gcttacatactagatcaaagtgtag

SEQ ID NO: 376528 - DNA, 25 bp, Homo sapien
cctcatatgatagttatggcaaact

SEQ ID NO: 376529 - DNA, 25 bp, Homo sapien
aaggatgacctaaatacctcatatg

SEQ ID NO: 376530 - DNA, 25 bp, Homo sapien
catctatccacgttcaatattcaaa

SEQ ID NO: 376531 - DNA, 25 bp, Homo sapien
tgtttcagttgatacaccaggaata

SEQ ID NO: 376532 - DNA, 25 bp, Homo sapien
caaaggttgccatgcagtcttcagg

SEQ ID NO: 376533 - DNA, 25 bp, Homo sapien
gatacaccaggaatatctcaaatga

SEQ ID NO: 376534 - DNA, 25 bp, Homo sapien
ctaagtagcagagggatgacagaga

SEQ ID NO: 376535 - DNA, 25 bp, Homo sapien
taagtagcagagggatgacagagac

SEQ ID NO: 376536 - DNA, 25 bp, Homo sapien
taaaaatactcatggcgaatgggat

SEQ ID NO: 376537 - DNA, 25 bp, Homo sapien
ggacagtcgtaatcactctagtgag

SEQ ID NO: 376538 - DNA, 25 bp, Homo sapien
gaaagtggaagaaagcatcgagagc

SEQ ID NO: 376539 - DNA, 25 bp, Homo sapien
tcagagggcaaacattaagccacat

SEQ ID NO: 376540 - DNA, 25 bp, Homo sapien
cgcccgaaatcccttaaagattgat

SEQ ID NO: 376541 - DNA, 25 bp, Homo sapien
tgcgtattcagaagttctctgttaa

SEQ ID NO: 376542 - DNA, 25 bp, Homo sapien
taatagacaaaaatccgtgtttcta

SEQ ID NO: 376543 - DNA, 25 bp, Homo sapien
gtttctattagcagatacaaacaga

SEQ ID NO: 376544 - DNA, 25 bp, Homo sapien
cgcccagtggtgtcagccggcccat

SEQ ID NO: 376545 - DNA, 25 bp, Homo sapien
gacagtgaaacaagggcgcccacga

SEQ ID NO: 376546 - DNA, 25 bp, Homo sapien
cagccaggttcagcgcccagtggtg

SEQ ID NO: 376547 - DNA, 25 bp, Homo sapien
gacaggtgttcccttttcgctgtcg

SEQ ID NO: 376548 - DNA, 25 bp, Homo sapien
tcacagggtacttgagcttgctggg

SEQ ID NO: 376549 - DNA, 25 bp, Homo sapien
tgggcgtccaggttcacagggtact

SEQ ID NO: 376550 - DNA, 25 bp, Homo sapien
tgtgtatgaagtgcgtccagggttt

SEQ ID NO: 376551 - DNA, 25 bp, Homo sapien
tttgtggagcgcgtctagcagttgc

SEQ ID NO: 376552 - DNA, 25 bp, Homo sapien
ggtgcccgcgaacagcaggagagag

SEQ ID NO: 376553 - DNA, 25 bp, Homo sapien
ggtcgctttaccccttgaagagctc

SEQ ID NO: 376554 - DNA, 25 bp, Homo sapien
gtgcccgggtgcccgcgaacagcag

SEQ ID NO: 376555 - DNA, 25 bp, Homo sapien
agccgagtcgccgcgtgcccgggtg

SEQ ID NO: 376556 - DNA, 25 bp, Homo sapien
gcggaacggaaaggccaagcgcctc

SEQ ID NO: 376557 - DNA, 25 bp, Homo sapien
cctctcccttctgagggcggaacgg

SEQ ID NO: 376558 - DNA, 25 bp, Homo sapien
ctcgggagctgcaggacgccctaat

SEQ ID NO: 376559 - DNA, 25 bp, Homo sapien
cactcgaggaccacctctcctctcc

SEQ ID NO: 376560 - DNA, 25 bp, Homo sapien
tcaggtgactcactccttccgcgcg

SEQ ID NO: 376561 - DNA, 25 bp, Homo sapien
aggtgactcactccttccgcgcggc

SEQ ID NO: 376562 - DNA, 25 bp, Homo sapien
cggtcaggtgactcactccttccgc

SEQ ID NO: 376563 - DNA, 25 bp, Homo sapien
tgactcactccttccgcgcggccag

SEQ ID NO: 376564 - DNA, 25 bp, Homo sapien
gcgcggcgcggcccgactgactgaa

SEQ ID NO: 376565 - DNA, 25 bp, Homo sapien
actgactgaagcgagagcgcccggc

SEQ ID NO: 376566 - DNA, 25 bp, Homo sapien
cccgactgactgaagcgagagcgcc

SEQ ID NO: 376567 - DNA, 25 bp, Homo sapien
cgactgactgaagcgagagcgcccg

SEQ ID NO: 376568 - DNA, 25 bp, Homo sapien
tcttcgctaaatccagctcagcacg

SEQ ID NO: 376569 - DNA, 25 bp, Homo sapien
acaacgcgtgggcaaaactccaaca

SEQ ID NO: 376570 - DNA, 25 bp, Homo sapien
tcttacgcgattccacgcgcgacag

SEQ ID NO: 376571 - DNA, 25 bp, Homo sapien
catattgtgcgaggcttaattacaa

SEQ ID NO: 376572 - DNA, 25 bp, Homo sapien
catgccagcaaagaatccgagtgag

SEQ ID NO: 376573 - DNA, 25 bp, Homo sapien
tccgagtgagctgggcaaaatgctc

SEQ ID NO: 376574 - DNA, 25 bp, Homo sapien
actgaaactgaaggcatgccagcaa

SEQ ID NO: 376575 - DNA, 25 bp, Homo sapien
gaatccgagtgagctgggcaaaatg

SEQ ID NO: 376576 - DNA, 25 bp, Homo sapien
catattctttaggaggcgaaagccc

SEQ ID NO: 376577 - DNA, 25 bp, Homo sapien
ccctgcaggtttaagagttgacaca

SEQ ID NO: 376578 - DNA, 25 bp, Homo sapien
aaactagttgatggccaaaatgacc

SEQ ID NO: 376579 - DNA, 25 bp, Homo sapien
catagtatgcatagtaaccgaaaag

SEQ ID NO: 376580 - DNA, 25 bp, Homo sapien
catactacatatggacaactagaag

SEQ ID NO: 376581 - DNA, 25 bp, Homo sapien
caatctcatgcatcactgaaaggaa

SEQ ID NO: 376582 - DNA, 25 bp, Homo sapien
gaaaggaacctgacactaaactgtg

SEQ ID NO: 376583 - DNA, 25 bp, Homo sapien
taaactgtgctcaacttaaatcatc

SEQ ID NO: 376584 - DNA, 25 bp, Homo sapien
gcagctagcgctgctctagggatac

SEQ ID NO: 376585 - DNA, 25 bp, Homo sapien
gagttgttatcagggagcacaagta

SEQ ID NO: 376586 - DNA, 25 bp, Homo sapien
atgaggacagagttgttatcaggga

SEQ ID NO: 376587 - DNA, 25 bp, Homo sapien
ccctaaaatcccacaatcaggggct

SEQ ID NO: 376588 - DNA, 25 bp, Homo sapien
gaacggtgcatatgggcaagtgcca

SEQ ID NO: 376589 - DNA, 25 bp, Homo sapien
cctacaagtgttagctgggccatat

SEQ ID NO: 376590 - DNA, 25 bp, Homo sapien
cacaggaatgtggacatctggaaag

SEQ ID NO: 376591 - DNA, 25 bp, Homo sapien
gccagtggacatcaggaacggtgca

SEQ ID NO: 376592 - DNA, 25 bp, Homo sapien
aatgttgtcgggaagttcagtggaa

SEQ ID NO: 376593 - DNA, 25 bp, Homo sapien
cgggaagttcagtggaaagcatgct

SEQ ID NO: 376594 - DNA, 25 bp, Homo sapien
tgcataacaaatgttgtcgggaagt

SEQ ID NO: 376595 - DNA, 25 bp, Homo sapien
taacaaatgttgtcgggaagttcag

SEQ ID NO: 376596 - DNA, 25 bp, Homo sapien
tccctccacaaagatggtgacatcg

SEQ ID NO: 376597 - DNA, 25 bp, Homo sapien
tcttccgctggtcattaaggctgag

SEQ ID NO: 376598 - DNA, 25 bp, Homo sapien
gcctggcctacgattcttgagtgga

SEQ ID NO: 376599 - DNA, 25 bp, Homo sapien
gattcataggcaaaaaccgagttct

SEQ ID NO: 376600 - DNA, 25 bp, Homo sapien
tgatacctgcggagtttacactgag

SEQ ID NO: 376601 - DNA, 25 bp, Homo sapien
tttgacactagattccccagtacgg

SEQ ID NO: 376602 - DNA, 25 bp, Homo sapien
cagtacggactctgtcagttccaaa

SEQ ID NO: 376603 - DNA, 25 bp, Homo sapien
gatccctctggtccaaaagtgaaag

SEQ ID NO: 376604 - DNA, 25 bp, Homo sapien
tggacgtctgtacctgacaaaggct

SEQ ID NO: 376605 - DNA, 25 bp, Homo sapien
taccagcaaaattcaagtcaccata

SEQ ID NO: 376606 - DNA, 25 bp, Homo sapien
actgttgtgttttgcataccagcaa

SEQ ID NO: 376607 - DNA, 25 bp, Homo sapien
catgagggtctatggaagaattgtg

SEQ ID NO: 376608 - DNA, 25 bp, Homo sapien
ccctggtgcccaagtcggatttcaa

SEQ ID NO: 376609 - DNA, 25 bp, Homo sapien
tgcatttggcaaggagtgtccgtgc

SEQ ID NO: 376610 - DNA, 25 bp, Homo sapien
ggttctgggctctcactaatcctga

SEQ ID NO: 376611 - DNA, 25 bp, Homo sapien
gaacagccttcagtactcagagtac

SEQ ID NO: 376612 - DNA, 25 bp, Homo sapien
catggatacaatccagctgttctgg

SEQ ID NO: 376613 - DNA, 25 bp, Homo sapien
gacagcgctgtgcagcaattctgtt

SEQ ID NO: 376614 - DNA, 25 bp, Homo sapien
caagttttctcttgcgacagcgctg

SEQ ID NO: 376615 - DNA, 25 bp, Homo sapien
aattatccgttgtgcattgaatggc

SEQ ID NO: 376616 - DNA, 25 bp, Homo sapien
aattgagcattatatctgacctaga

SEQ ID NO: 376617 - DNA, 25 bp, Homo sapien
tatcacagcatatcatggtaaaaat

SEQ ID NO: 376618 - DNA, 25 bp, Homo sapien
tgaatctattcacaaccactaatga

SEQ ID NO: 376619 - DNA, 25 bp, Homo sapien
gattaggtagacagtaaagtcattc

SEQ ID NO: 376620 - DNA, 25 bp, Homo sapien
ttttctgcaaaaagcgaggctccct

SEQ ID NO: 376621 - DNA, 25 bp, Homo sapien
caaccctgagcgcaagtgtttgtga

SEQ ID NO: 376622 - DNA, 25 bp, Homo sapien
caaatcactaaggacggatgaggtc

SEQ ID NO: 376623 - DNA, 25 bp, Homo sapien
tgcgctttggttgagcagccagtaa

SEQ ID NO: 376624 - DNA, 25 bp, Homo sapien
aacggtacctactgcttgttcacag

SEQ ID NO: 376625 - DNA, 25 bp, Homo sapien
tcagaagccaatccaaaggaggatg

SEQ ID NO: 376626 - DNA, 25 bp, Homo sapien
agccatggactcctctaccaaagtt

SEQ ID NO: 376627 - DNA, 25 bp, Homo sapien
tagatgtaggtcaagaatgtgcgtg

SEQ ID NO: 376628 - DNA, 25 bp, Homo sapien
taaactgaaaattgatggtaacgcc

SEQ ID NO: 376629 - DNA, 25 bp, Homo sapien
gggcaatctgcagctgagtacttgg

SEQ ID NO: 376630 - DNA, 25 bp, Homo sapien
tgctggaggccggtcagataaactg

SEQ ID NO: 376631 - DNA, 25 bp, Homo sapien
ggtaacgccagttcaccatcaggag

SEQ ID NO: 376632 - DNA, 25 bp, Homo sapien
catatactctcaagggcaaggccaa

SEQ ID NO: 376633 - DNA, 25 bp, Homo sapien
cagatggagaaccaagactgtatcc

SEQ ID NO: 376634 - DNA, 25 bp, Homo sapien
tcatattaggctttcaagacgctgc

SEQ ID NO: 376635 - DNA, 25 bp, Homo sapien
ggagccgaagaacaaagccctaaga

SEQ ID NO: 376636 - DNA, 25 bp, Homo sapien
tcaggtacatttgggtaagaacatt

SEQ ID NO: 376637 - DNA, 25 bp, Homo sapien
ttagaagcaattttagagaatttta

SEQ ID NO: 376638 - DNA, 25 bp, Homo sapien
ttttatttaactgtcaacttatcac

SEQ ID NO: 376639 - DNA, 25 bp, Homo sapien
acttatcaccaacatctaacatttt

SEQ ID NO: 376640 - DNA, 25 bp, Homo sapien
tcatcaactaaggaaagattctctc

SEQ ID NO: 376641 - DNA, 25 bp, Homo sapien
tactaattaccgatcaaaagactaa

SEQ ID NO: 376642 - DNA, 25 bp, Homo sapien
tcagatatactaattaccgatcaaa

SEQ ID NO: 376643 - DNA, 25 bp, Homo sapien
taccgatcaaaagactaaactgagt

SEQ ID NO: 376644 - DNA, 25 bp, Homo sapien
gatagatttaagacgcctcctccat

SEQ ID NO: 376645 - DNA, 25 bp, Homo sapien
ccctgccgggccgtaaagatagatt

SEQ ID NO: 376646 - DNA, 25 bp, Homo sapien
tccatccctaggaggcaactttctt

SEQ ID NO: 376647 - DNA, 25 bp, Homo sapien
taggaggcaactttcttaggcctaa

SEQ ID NO: 376648 - DNA, 25 bp, Homo sapien
cagactctgcctccacgtaattcct

SEQ ID NO: 376649 - DNA, 25 bp, Homo sapien
gggcaagttcgtggctttcatggga

SEQ ID NO: 376650 - DNA, 25 bp, Homo sapien
tcaccttctacactctgaccttgga

SEQ ID NO: 376651 - DNA, 25 bp, Homo sapien
cccgctagtagtggagtgtgcagat

SEQ ID NO: 376652 - DNA, 25 bp, Homo sapien
ttgattccacattaagcttccctcc

SEQ ID NO: 376653 - DNA, 25 bp, Homo sapien
tcttagcagctatgtgctctacttc

SEQ ID NO: 376654 - DNA, 25 bp, Homo sapien
cctgtgttaaacttcatccttgatt

SEQ ID NO: 376655 - DNA, 25 bp, Homo sapien
gagcaggtatccagagttctcagaa

SEQ ID NO: 376656 - DNA, 25 bp, Homo sapien
cctggcaggcaaaggttgcaatgag

SEQ ID NO: 376657 - DNA, 25 bp, Homo sapien
tggcaggcaaaggttgcaatgagct

SEQ ID NO: 376658 - DNA, 25 bp, Homo sapien
gaacctggcaggcaaaggttgcaat

SEQ ID NO: 376659 - DNA, 25 bp, Homo sapien
acctggcaggcaaaggttgcaatga

SEQ ID NO: 376660 - DNA, 25 bp, Homo sapien
gcaagactccatctcaaaaaaaaaa

SEQ ID NO: 376661 - DNA, 25 bp, Homo sapien
acaacaaaaacaaatattagccaag

SEQ ID NO: 376662 - DNA, 25 bp, Homo sapien
caaaaacaaatattagccaagtgtg

SEQ ID NO: 376663 - DNA, 25 bp, Homo sapien
agcaagactccatctcaaaaaaaaa

SEQ ID NO: 376664 - DNA, 25 bp, Homo sapien
cctcactaagattaagaaggttaca

SEQ ID NO: 376665 - DNA, 25 bp, Homo sapien
tcaaggcttttttagtgggcatctc

SEQ ID NO: 376666 - DNA, 25 bp, Homo sapien
tgtgtctcccaaactctaggtgact

SEQ ID NO: 376667 - DNA, 25 bp, Homo sapien
agtcccagcactaccacattttcta

SEQ ID NO: 376668 - DNA, 25 bp, Homo sapien
tcagtcagggatagtaagagatgcc

SEQ ID NO: 376669 - DNA, 25 bp, Homo sapien
caaagctcaagtccgtcagtgcaga

SEQ ID NO: 376670 - DNA, 25 bp, Homo sapien
tactgctacaggaaccggaatagcc

SEQ ID NO: 376671 - DNA, 25 bp, Homo sapien
gagatgccacctggcgcttacagga

SEQ ID NO: 376672 - DNA, 25 bp, Homo sapien
gttgctcctttgtcttgatgtagtt

SEQ ID NO: 376673 - DNA, 25 bp, Homo sapien
ctgttgctcctttgtcttgatgtag

SEQ ID NO: 376674 - DNA, 25 bp, Homo sapien
gtctgttgctcctttgtcttgatgt

SEQ ID NO: 376675 - DNA, 25 bp, Homo sapien
tctgttgctcctttgtcttgatgta

SEQ ID NO: 376676 - DNA, 25 bp, Homo sapien
agttcctggttattgagtgctcctg

SEQ ID NO: 376677 - DNA, 25 bp, Homo sapien
aatgataaaaatcttcaaaagcatg

SEQ ID NO: 376678 - DNA, 25 bp, Homo sapien
tatttctaatgagaaataatgataa

SEQ ID NO: 376679 - DNA, 25 bp, Homo sapien
cggcgcccagcccactttttatatt

SEQ ID NO: 376680 - DNA, 25 bp, Homo sapien
atcttcaaaagcatgtttaacccac

SEQ ID NO: 376681 - DNA, 25 bp, Homo sapien
cacagagagatttcgatatacctgg

SEQ ID NO: 376682 - DNA, 25 bp, Homo sapien
aaagagccgagtacagtgtcaaatc

SEQ ID NO: 376683 - DNA, 25 bp, Homo sapien
gataaatgctatgatggacatcttg

SEQ ID NO: 376684 - DNA, 25 bp, Homo sapien
caaatcttagtttgagtagagatac

SEQ ID NO: 376685 - DNA, 25 bp, Homo sapien
cgccatcagcaacgttcaacaaaca

SEQ ID NO: 376686 - DNA, 25 bp, Homo sapien
agaccctactatgttccagccattg

SEQ ID NO: 376687 - DNA, 25 bp, Homo sapien
tctcctggccttgcgatgattacat

SEQ ID NO: 376688 - DNA, 25 bp, Homo sapien
tgcctttgcccagaattcatgtcag

SEQ ID NO: 376689 - DNA, 25 bp, Homo sapien
agaaaaagatcaaagtgcagcaagg

SEQ ID NO: 376690 - DNA, 25 bp, Homo sapien
aaaaagatcaaagtgcagcaaggtc

SEQ ID NO: 376691 - DNA, 25 bp, Homo sapien
aaagatcaaagtgcagcaaggtctg

SEQ ID NO: 376692 - DNA, 25 bp, Homo sapien
aagatcaaagtgcagcaaggtctgc

SEQ ID NO: 376693 - DNA, 25 bp, Homo sapien
atcggatcgtaggtagtggtgtgct

SEQ ID NO: 376694 - DNA, 25 bp, Homo sapien
caggctggtgatcggatcgtaggta

SEQ ID NO: 376695 - DNA, 25 bp, Homo sapien
tggtgatcggatcgtaggtagtggt

SEQ ID NO: 376696 - DNA, 25 bp, Homo sapien
cccaggctggtgatcggatcgtagg

SEQ ID NO: 376697 - DNA, 25 bp, Homo sapien
ggactgattactcattagctgccat

SEQ ID NO: 376698 - DNA, 25 bp, Homo sapien
aattacatcagaatggcatgggtcc

SEQ ID NO: 376699 - DNA, 25 bp, Homo sapien
cagataaatcatgagctccatagta

SEQ ID NO: 376700 - DNA, 25 bp, Homo sapien
tctgaccttgtttatggaggaagct

SEQ ID NO: 376701 - DNA, 25 bp, Homo sapien
caaagcattttctgagtcggccctt

SEQ ID NO: 376702 - DNA, 25 bp, Homo sapien
caggggacagctggcagataatatt

SEQ ID NO: 376703 - DNA, 25 bp, Homo sapien
gagtcctaacatgtgaaagtaaaac

SEQ ID NO: 376704 - DNA, 25 bp, Homo sapien
gtcattatttatgggtttcaaagca

SEQ ID NO: 376705 - DNA, 25 bp, Homo sapien
tgctccagaggaatcgatacaaaat

SEQ ID NO: 376706 - DNA, 25 bp, Homo sapien
agagagccctggcatatccgacagc

SEQ ID NO: 376707 - DNA, 25 bp, Homo sapien
gcagcttccaatgtttgctccagag

SEQ ID NO: 376708 - DNA, 25 bp, Homo sapien
caacaagaagaggatccatgggact

SEQ ID NO: 376709 - DNA, 25 bp, Homo sapien
caagtgcaagtcaaaggtaacccaa

SEQ ID NO: 376710 - DNA, 25 bp, Homo sapien
gaattagtctcagtacaatgcgcat

SEQ ID NO: 376711 - DNA, 25 bp, Homo sapien
ggctcataggtcctcagactacaga

SEQ ID NO: 376712 - DNA, 25 bp, Homo sapien
gaataggccagatcatgctacagta

SEQ ID NO: 376713 - DNA, 25 bp, Homo sapien
tagttgtcagtaggttgtttctatg

SEQ ID NO: 376714 - DNA, 25 bp, Homo sapien
catcccatcgcagtagctccttagt

SEQ ID NO: 376715 - DNA, 25 bp, Homo sapien
tatgaatgccccctccatcagaaac

SEQ ID NO: 376716 - DNA, 25 bp, Homo sapien
tccaattaatctaaatccctgctct

SEQ ID NO: 376717 - DNA, 25 bp, Homo sapien
cattgtaattgttcgagttgctctt

SEQ ID NO: 376718 - DNA, 25 bp, Homo sapien
gggatctagctcagattcctgctga

SEQ ID NO: 376719 - DNA, 25 bp, Homo sapien
gaagttgctatgaagccgggtttgc

SEQ ID NO: 376720 - DNA, 25 bp, Homo sapien
ccgggtttgccaactgagagcattg

SEQ ID NO: 376721 - DNA, 25 bp, Homo sapien
gggggcaccattcacatagacttca

SEQ ID NO: 376722 - DNA, 25 bp, Homo sapien
ccagggggcaccattcacatagact

SEQ ID NO: 376723 - DNA, 25 bp, Homo sapien
caccagggggcaccattcacataga

SEQ ID NO: 376724 - DNA, 25 bp, Homo sapien
gggcaccattcacatagacttcaac

SEQ ID NO: 376725 - DNA, 25 bp, Homo sapien
tacaccactggtagaagaatctgtc

SEQ ID NO: 376726 - DNA, 25 bp, Homo sapien
tctagaccgaagagttcaaaccgag

SEQ ID NO: 376727 - DNA, 25 bp, Homo sapien
cacagagcagtggtaggtcttatgc

SEQ ID NO: 376728 - DNA, 25 bp, Homo sapien
tctggccatttagctgctgggcttt

SEQ ID NO: 376729 - DNA, 25 bp, Homo sapien
gagttataaacagtggagtgaggct

SEQ ID NO: 376730 - DNA, 25 bp, Homo sapien
aagactcacctctctacaacaaaaa

SEQ ID NO: 376731 - DNA, 25 bp, Homo sapien
cactgggatgtcttggcatcagctc

SEQ ID NO: 376732 - DNA, 25 bp, Homo sapien
atggccagatatgcactgggatgtc

SEQ ID NO: 376733 - DNA, 25 bp, Homo sapien
catggagtccggaggcagactacct

SEQ ID NO: 376734 - DNA, 25 bp, Homo sapien
gagttcacatccctaggagatgcaa

SEQ ID NO: 376735 - DNA, 25 bp, Homo sapien
catcgtgattgagagcatggagtcc

SEQ ID NO: 376736 - DNA, 25 bp, Homo sapien
ttcacagtcaggtgttgaacgaacc

SEQ ID NO: 376737 - DNA, 25 bp, Homo sapien
tgcctcccgccagagaatgtagaca

SEQ ID NO: 376738 - DNA, 25 bp, Homo sapien
ctctctggagagcatgacatggata

SEQ ID NO: 376739 - DNA, 25 bp, Homo sapien
gaaggatacggtggaattgctctct

SEQ ID NO: 376740 - DNA, 25 bp, Homo sapien
cacctgctgaggtactaagggttag

SEQ ID NO: 376741 - DNA, 25 bp, Homo sapien
tattgtgccacgaaaagacaaagag

SEQ ID NO: 376742 - DNA, 25 bp, Homo sapien
gagaagccctttagtaggcgtagga

SEQ ID NO: 376743 - DNA, 25 bp, Homo sapien
aattccagtaagtgtgctccttgac

SEQ ID NO: 376744 - DNA, 25 bp, Homo sapien
tgtggacatagatattcatagcagc

SEQ ID NO: 376745 - DNA, 25 bp, Homo sapien
tgtcacagccaggagacttatgctc

SEQ ID NO: 376746 - DNA, 25 bp, Homo sapien
tttgcaacccctacagcttaatggg

SEQ ID NO: 376747 - DNA, 25 bp, Homo sapien
acaggaggtgaacctgctcagccca

SEQ ID NO: 376748 - DNA, 25 bp, Homo sapien
caggaggattatctgtggtgacagc

SEQ ID NO: 376749 - DNA, 25 bp, Homo sapien
tgagcaggagcattgcctgaaccat

SEQ ID NO: 376750 - DNA, 25 bp, Homo sapien
ctgctgagcaggagcattgcctgaa

SEQ ID NO: 376751 - DNA, 25 bp, Homo sapien
ctctcctcattcaggctgctgagca

SEQ ID NO: 376752 - DNA, 25 bp, Homo sapien
gctgagcaggagcattgcctgaacc

SEQ ID NO: 376753 - DNA, 25 bp, Homo sapien
cctgccaggttggtgataaatttac

SEQ ID NO: 376754 - DNA, 25 bp, Homo sapien
cactcttgaagtctattacaaggca

SEQ ID NO: 376755 - DNA, 25 bp, Homo sapien
ttactagtgcaaattaccatccagg

SEQ ID NO: 376756 - DNA, 25 bp, Homo sapien
ttacaaggcaattgctgaatacaga

SEQ ID NO: 376757 - DNA, 25 bp, Homo sapien
gagagagagcacctgtagcagcctg

SEQ ID NO: 376758 - DNA, 25 bp, Homo sapien
acagccaaacggcaggatttattgg

SEQ ID NO: 376759 - DNA, 25 bp, Homo sapien
aagatggctttaagggaaccaggtg

SEQ ID NO: 376760 - DNA, 25 bp, Homo sapien
tggtaccagcctcactcttagaaag

SEQ ID NO: 376761 - DNA, 25 bp, Homo sapien
caatcaatcattacggaagcacaca

SEQ ID NO: 376762 - DNA, 25 bp, Homo sapien
gctgagctagcaagcagaacagtta

SEQ ID NO: 376763 - DNA, 25 bp, Homo sapien
catgtgtgtgggaactcagtatcaa

SEQ ID NO: 376764 - DNA, 25 bp, Homo sapien
tgaatcagctttccctaaggcgtgt

SEQ ID NO: 376765 - DNA, 25 bp, Homo sapien
tgaggtcacagattaagcagggaag

SEQ ID NO: 376766 - DNA, 25 bp, Homo sapien
gaatggacatcacccagaatttggt

SEQ ID NO: 376767 - DNA, 25 bp, Homo sapien
tgttagtcaaagtctaccccatggg

SEQ ID NO: 376768 - DNA, 25 bp, Homo sapien
cctagtgacatcagggaactcccag

SEQ ID NO: 376769 - DNA, 25 bp, Homo sapien
tgattacacatgcactcctttgggt

SEQ ID NO: 376770 - DNA, 25 bp, Homo sapien
ccagctggacctgcaaagagtgcca

SEQ ID NO: 376771 - DNA, 25 bp, Homo sapien
gaaagcggcgctcaaacttcatggc

SEQ ID NO: 376772 - DNA, 25 bp, Homo sapien
tcaggtcagacattagaaagcggcg

SEQ ID NO: 376773 - DNA, 25 bp, Homo sapien
ttgcatggccacctttttgctcctg

SEQ ID NO: 376774 - DNA, 25 bp, Homo sapien
agttcctctctcttgtgccaggatt

SEQ ID NO: 376775 - DNA, 25 bp, Homo sapien
cagcaacagggctattttcaatgta

SEQ ID NO: 376776 - DNA, 25 bp, Homo sapien
cacttccatgtgctatttctacagc

SEQ ID NO: 376777 - DNA, 25 bp, Homo sapien
atccagaaagctgagcacatggtgt

SEQ ID NO: 376778 - DNA, 25 bp, Homo sapien
ccaagggcaggggagatgtatccat

SEQ ID NO: 376779 - DNA, 25 bp, Homo sapien
gaaagctgagcacatggtgtccaag

SEQ ID NO: 376780 - DNA, 25 bp, Homo sapien
gctgagcacatggtgtccaagggca

SEQ ID NO: 376781 - DNA, 25 bp, Homo sapien
gtgagatgaggcagttgtagaacta

SEQ ID NO: 376782 - DNA, 25 bp, Homo sapien
gaggcagttgtagaactaagtaaac

SEQ ID NO: 376783 - DNA, 25 bp, Homo sapien
cacagttatactacaagaacacagt

SEQ ID NO: 376784 - DNA, 25 bp, Homo sapien
aacagaaaggactgtagaggataaa

SEQ ID NO: 376785 - DNA, 25 bp, Homo sapien
agcaggcgaggttgaaatcatagtc

SEQ ID NO: 376786 - DNA, 25 bp, Homo sapien
acagcaggcgaggttgaaatcatag

SEQ ID NO: 376787 - DNA, 25 bp, Homo sapien
gcaggcgaggttgaaatcatagtcc

SEQ ID NO: 376788 - DNA, 25 bp, Homo sapien
cagcaggcgaggttgaaatcatagt

SEQ ID NO: 376789 - DNA, 25 bp, Homo sapien
tatttgatagtaccacaggctaact

SEQ ID NO: 376790 - DNA, 25 bp, Homo sapien
tactagggttgagaattggctctgc

SEQ ID NO: 376791 - DNA, 25 bp, Homo sapien
aatgcggtgcatatacccaatggag

SEQ ID NO: 376792 - DNA, 25 bp, Homo sapien
tgttcatgctggattcgcaagtcct

SEQ ID NO: 376793 - DNA, 25 bp, Homo sapien
gagcttcaagctcacaaccagcagc

SEQ ID NO: 376794 - DNA, 25 bp, Homo sapien
cagaaggcaccttgatgagatattg

SEQ ID NO: 376795 - DNA, 25 bp, Homo sapien
ctttataagcagatcctcccaggct

SEQ ID NO: 376796 - DNA, 25 bp, Homo sapien
gagatattgctccatggctttcaga

SEQ ID NO: 376797 - DNA, 25 bp, Homo sapien
tcgttgagaagggaccaagccaatt

SEQ ID NO: 376798 - DNA, 25 bp, Homo sapien
gacttttttgcctcgggtatggaca

SEQ ID NO: 376799 - DNA, 25 bp, Homo sapien
gaagcatttttctgaaccccactag

SEQ ID NO: 376800 - DNA, 25 bp, Homo sapien
ccttcagggagagtactgagcacct

SEQ ID NO: 376801 - DNA, 25 bp, Homo sapien
tgttcggggctggagacataaacct

SEQ ID NO: 376802 - DNA, 25 bp, Homo sapien
taacaatgtgttgggtgcttttgga

SEQ ID NO: 376803 - DNA, 25 bp, Homo sapien
gagttgtgaactgtaggcaccgcct

SEQ ID NO: 376804 - DNA, 25 bp, Homo sapien
tgcttttggagttgtgaactgtagg

SEQ ID NO: 376805 - DNA, 25 bp, Homo sapien
tgtgcccaaaaatatgactctaggt

SEQ ID NO: 376806 - DNA, 25 bp, Homo sapien
ggaaaagatcatctcaagctgagtc

SEQ ID NO: 376807 - DNA, 25 bp, Homo sapien
aaatgaactggtgctaggcgaggaa

SEQ ID NO: 376808 - DNA, 25 bp, Homo sapien
cattaagtcaaaagcatctccagtt

SEQ ID NO: 376809 - DNA, 25 bp, Homo sapien
tgagtggctacagagaaggctaccg

SEQ ID NO: 376810 - DNA, 25 bp, Homo sapien
cagagaaggctaccgtcctgctgtc

SEQ ID NO: 376811 - DNA, 25 bp, Homo sapien
taaggccaatattttgtcatgtgag

SEQ ID NO: 376812 - DNA, 25 bp, Homo sapien
tcccagaatgggaactgtaaggcca

SEQ ID NO: 376813 - DNA, 25 bp, Homo sapien
tactgtggactatgccccaaaacca

SEQ ID NO: 376814 - DNA, 25 bp, Homo sapien
tctgtgtccctagcggtgaatccat

SEQ ID NO: 376815 - DNA, 25 bp, Homo sapien
tctctggccccacaaatcaatgtag

SEQ ID NO: 376816 - DNA, 25 bp, Homo sapien
tctatctgtgggctacttgtctggc

SEQ ID NO: 376817 - DNA, 25 bp, Homo sapien
ttttgagcttatattctcctgggat

SEQ ID NO: 376818 - DNA, 25 bp, Homo sapien
tctttttgagcttatattctcctgg

SEQ ID NO: 376819 - DNA, 25 bp, Homo sapien
atataacctcaggatatctcttctc

SEQ ID NO: 376820 - DNA, 25 bp, Homo sapien
caaaaatataacctcaggatatctc

SEQ ID NO: 376821 - DNA, 25 bp, Homo sapien
ctttaaggagattggtcacaatata

SEQ ID NO: 376822 - DNA, 25 bp, Homo sapien
aggagattggtcacaatatactgac

SEQ ID NO: 376823 - DNA, 25 bp, Homo sapien
tttaaggagattggtcacaatatac

SEQ ID NO: 376824 - DNA, 25 bp, Homo sapien
taaggagattggtcacaatatactg

SEQ ID NO: 376825 - DNA, 25 bp, Homo sapien
gccactttcacccaggtgcaattgg

SEQ ID NO: 376826 - DNA, 25 bp, Homo sapien
tcagccatgcatcgaagacctcttc

SEQ ID NO: 376827 - DNA, 25 bp, Homo sapien
gctggagtaacaatgtcgagaacac

SEQ ID NO: 376828 - DNA, 25 bp, Homo sapien
ttatttctaccacgggatgaacagc

SEQ ID NO: 376829 - DNA, 25 bp, Homo sapien
cttgagagtgaacgggttcaaacat

SEQ ID NO: 376830 - DNA, 25 bp, Homo sapien
tgaacacaaacgcagacacttgggc

SEQ ID NO: 376831 - DNA, 25 bp, Homo sapien
gcctcggtgtcgaagcattgttcac

SEQ ID NO: 376832 - DNA, 25 bp, Homo sapien
cattctgtaaacacttggcctcggt

SEQ ID NO: 376833 - DNA, 25 bp, Homo sapien
cattcccagcggtagttcaacattc

SEQ ID NO: 376834 - DNA, 25 bp, Homo sapien
gatttaggcaaaccagtaagggctg

SEQ ID NO: 376835 - DNA, 25 bp, Homo sapien
aagggctggcactaacatcaaaatg

SEQ ID NO: 376836 - DNA, 25 bp, Homo sapien
ccacagggccagagaacgtcagtga

SEQ ID NO: 376837 - DNA, 25 bp, Homo sapien
tatgcaattagacttcccactggac

SEQ ID NO: 376838 - DNA, 25 bp, Homo sapien
gaagtacatcaacctctaatatcta

SEQ ID NO: 376839 - DNA, 25 bp, Homo sapien
tggagtatgatgaatctgaccagct

SEQ ID NO: 376840 - DNA, 25 bp, Homo sapien
ggatattttaagatccaccagcctc

SEQ ID NO: 376841 - DNA, 25 bp, Homo sapien
ccagcctctttcgtcttcacttata

SEQ ID NO: 376842 - DNA, 25 bp, Homo sapien
gaaaagagactgtggcgtgatccaa

SEQ ID NO: 376843 - DNA, 25 bp, Homo sapien
ttcaacgctatcatggaagaactgg

SEQ ID NO: 376844 - DNA, 25 bp, Homo sapien
tcataaatacctaggcaagaggcag

SEQ ID NO: 376845 - DNA, 25 bp, Homo sapien
caggtcaacggcacatgcgataggc

SEQ ID NO: 376846 - DNA, 25 bp, Homo sapien
cctggtggcacactgtcatttgact

SEQ ID NO: 376847 - DNA, 25 bp, Homo sapien
cacatgttgcatgctgatacacaag

SEQ ID NO: 376848 - DNA, 25 bp, Homo sapien
gccaatagtttacacctagaaccta

SEQ ID NO: 376849 - DNA, 25 bp, Homo sapien
ccgtaaggcagttacaacttagaca

SEQ ID NO: 376850 - DNA, 25 bp, Homo sapien
ggttaattcaaaggaggtgccatga

SEQ ID NO: 376851 - DNA, 25 bp, Homo sapien
gggcaacatttgcaacggaaggata

SEQ ID NO: 376852 - DNA, 25 bp, Homo sapien
ataatttatattcaggctcacacaa

SEQ ID NO: 376853 - DNA, 25 bp, Homo sapien
gagggatcagagtagagaaataact

SEQ ID NO: 376854 - DNA, 25 bp, Homo sapien
gctttaaatggctcccagttttgga

SEQ ID NO: 376855 - DNA, 25 bp, Homo sapien
tatgccatctgtgcaatcatacagc

SEQ ID NO: 376856 - DNA, 25 bp, Homo sapien
gacatatcaagaaatcccctaaagc

SEQ ID NO: 376857 - DNA, 25 bp, Homo sapien
catactatttgtcccaggtcagagt

SEQ ID NO: 376858 - DNA, 25 bp, Homo sapien
tggactgcaatgtaagcaaacccat

SEQ ID NO: 376859 - DNA, 25 bp, Homo sapien
tatttgctaagcataaatagccaca

SEQ ID NO: 376860 - DNA, 25 bp, Homo sapien
aaaagatgtgcccagtagaaaatgt

SEQ ID NO: 376861 - DNA, 25 bp, Homo sapien
gagagagggattcgaaaacagtcct

SEQ ID NO: 376862 - DNA, 25 bp, Homo sapien
ttgactgcaacccatgccatgaggt

SEQ ID NO: 376863 - DNA, 25 bp, Homo sapien
ccatgaggtcaagtgtggaactttc

SEQ ID NO: 376864 - DNA, 25 bp, Homo sapien
tgtacacaggatctatgcacaggct

SEQ ID NO: 376865 - DNA, 25 bp, Homo sapien
ttcagaatagagatgctcaacccag

SEQ ID NO: 376866 - DNA, 25 bp, Homo sapien
ggctgtcatgtctgccgtaaaaggc

SEQ ID NO: 376867 - DNA, 25 bp, Homo sapien
gtataatttcatcctctagagtact

SEQ ID NO: 376868 - DNA, 25 bp, Homo sapien
cagcaagtattgtctctcatcccaa

SEQ ID NO: 376869 - DNA, 25 bp, Homo sapien
ggcactaaagagacttcagcaagta

SEQ ID NO: 376870 - DNA, 25 bp, Homo sapien
cagggttgctgattaagtgaccaca

SEQ ID NO: 376871 - DNA, 25 bp, Homo sapien
cgaaccagggttgctgattaagtga

SEQ ID NO: 376872 - DNA, 25 bp, Homo sapien
gttgctgattaagtgaccacaggcc

SEQ ID NO: 376873 - DNA, 25 bp, Homo sapien
aaccagggttgctgattaagtgacc

SEQ ID NO: 376874 - DNA, 25 bp, Homo sapien
taacactcctgcttgcattgaaaag

SEQ ID NO: 376875 - DNA, 25 bp, Homo sapien
ttgaaaagacccaatggcaaatggc

SEQ ID NO: 376876 - DNA, 25 bp, Homo sapien
taagtaccacttggcaagatagtcc

SEQ ID NO: 376877 - DNA, 25 bp, Homo sapien
gatcacttcgttgagcttctgctaa

SEQ ID NO: 376878 - DNA, 25 bp, Homo sapien
gaagatagatactagtggctctctg

SEQ ID NO: 376879 - DNA, 25 bp, Homo sapien
taaggttcgtaatacaggaaacaca

SEQ ID NO: 376880 - DNA, 25 bp, Homo sapien
tctcagttgtcctagataacacatg

SEQ ID NO: 376881 - DNA, 25 bp, Homo sapien
ggaaggtagcaatctttacaacatc

SEQ ID NO: 376882 - DNA, 25 bp, Homo sapien
tactaagtgcatgtagaaggcgatc

SEQ ID NO: 376883 - DNA, 25 bp, Homo sapien
ttcaaattatcagctatgtcacaga

SEQ ID NO: 376884 - DNA, 25 bp, Homo sapien
ttcagtgaacaaggctactaagtgc

SEQ ID NO: 376885 - DNA, 25 bp, Homo sapien
tgtcacagaaagtgtacacaagttt

SEQ ID NO: 376886 - DNA, 25 bp, Homo sapien
actgtaacagaaggagacactgacc

SEQ ID NO: 376887 - DNA, 25 bp, Homo sapien
gaaggctaggacacctcctgtaatg

SEQ ID NO: 376888 - DNA, 25 bp, Homo sapien
tccttgttaggattgaaagcaggca

SEQ ID NO: 376889 - DNA, 25 bp, Homo sapien
gactagtcagataggctacagcctc

SEQ ID NO: 376890 - DNA, 25 bp, Homo sapien
ccaatgttaccagacctgtagctct

SEQ ID NO: 376891 - DNA, 25 bp, Homo sapien
aatatgttatctctctcaacaacat

SEQ ID NO: 376892 - DNA, 25 bp, Homo sapien
agtgattgaatatgttatctctctc

SEQ ID NO: 376893 - DNA, 25 bp, Homo sapien
gcctgtgcccttccaatgttaccag

SEQ ID NO: 376894 - DNA, 25 bp, Homo sapien
gtgagacccaagtcttgattcgtct

SEQ ID NO: 376895 - DNA, 25 bp, Homo sapien
caaacaatgggtgggaactgtaaca

SEQ ID NO: 376896 - DNA, 25 bp, Homo sapien
tcacacaccatgattccttctgggt

SEQ ID NO: 376897 - DNA, 25 bp, Homo sapien
ggctgctggcgaagtgtctaaacac

SEQ ID NO: 376898 - DNA, 25 bp, Homo sapien
tctccacgatggtgcatgggatgtt

SEQ ID NO: 376899 - DNA, 25 bp, Homo sapien
ccagccagtctccacgatggtgcat

SEQ ID NO: 376900 - DNA, 25 bp, Homo sapien
cagtctccacgatggtgcatgggat

SEQ ID NO: 376901 - DNA, 25 bp, Homo sapien
tcttcactctgatttgcccctctgt

SEQ ID NO: 376902 - DNA, 25 bp, Homo sapien
cccaaatctcgaattatagtttcca

SEQ ID NO: 376903 - DNA, 25 bp, Homo sapien
catataagatgttcctttgctcttt

SEQ ID NO: 376904 - DNA, 25 bp, Homo sapien
tctgataggcagtcaatttgttacc

SEQ ID NO: 376905 - DNA, 25 bp, Homo sapien
ttgggtcataactaactgatatggt

SEQ ID NO: 376906 - DNA, 25 bp, Homo sapien
tttgcccttccacgttccaccatga

SEQ ID NO: 376907 - DNA, 25 bp, Homo sapien
ccccgtctctcatgtgcatgcattc

SEQ ID NO: 376908 - DNA, 25 bp, Homo sapien
agaatgagtttggtcccccgtctct

SEQ ID NO: 376909 - DNA, 25 bp, Homo sapien
gacttagcaaaaaggccctcaccag

SEQ ID NO: 376910 - DNA, 25 bp, Homo sapien
acttatgtgagaaaattggccaggc

SEQ ID NO: 376911 - DNA, 25 bp, Homo sapien
caacttatgtgagaaaattggccag

SEQ ID NO: 376912 - DNA, 25 bp, Homo sapien
gccaacttatgtgagaaaattggcc

SEQ ID NO: 376913 - DNA, 25 bp, Homo sapien
cttatgtgagaaaattggccaggcg

SEQ ID NO: 376914 - DNA, 25 bp, Homo sapien
tgcagacattattggcagcttgttc

SEQ ID NO: 376915 - DNA, 25 bp, Homo sapien
cagtctcattctaggttcaaggtcc

SEQ ID NO: 376916 - DNA, 25 bp, Homo sapien
ctctgctcagggtccacgaagctga

SEQ ID NO: 376917 - DNA, 25 bp, Homo sapien
gagaagtctggacaaatttgctgtg

SEQ ID NO: 376918 - DNA, 25 bp, Homo sapien
ttaggttccagctggatataggaca

SEQ ID NO: 376919 - DNA, 25 bp, Homo sapien
taggacaatcagtggagcagctgtg

SEQ ID NO: 376920 - DNA, 25 bp, Homo sapien
cagctggatataggacaatcagtgg

SEQ ID NO: 376921 - DNA, 25 bp, Homo sapien
atataggacaatcagtggagcagct

SEQ ID NO: 376922 - DNA, 25 bp, Homo sapien
gctgcctgtgtccagtagatagctg

SEQ ID NO: 376923 - DNA, 25 bp, Homo sapien
gaaaaatcatggtcctaagccttag

SEQ ID NO: 376924 - DNA, 25 bp, Homo sapien
tgagagactatctgatcatggagaa

SEQ ID NO: 376925 - DNA, 25 bp, Homo sapien
aaggtgtatccaagtgtgtctggca

SEQ ID NO: 376926 - DNA, 25 bp, Homo sapien
ctgggtgagtgtccacaaagttgac

SEQ ID NO: 376927 - DNA, 25 bp, Homo sapien
gacagggctactggtctcagctgct

SEQ ID NO: 376928 - DNA, 25 bp, Homo sapien
tatgcgacaattagacgacagggct

SEQ ID NO: 376929 - DNA, 25 bp, Homo sapien
gatgtttttcattcacctgggtgag

SEQ ID NO: 376930 - DNA, 25 bp, Homo sapien
tcctcatcaatacgtgtcagtcctt

SEQ ID NO: 376931 - DNA, 25 bp, Homo sapien
ccttaaaagataagacaactgagct

SEQ ID NO: 376932 - DNA, 25 bp, Homo sapien
cctttgtctcattatctctgtggga

SEQ ID NO: 376933 - DNA, 25 bp, Homo sapien
cacatatgaagtgggttcagctcac

SEQ ID NO: 376934 - DNA, 25 bp, Homo sapien
tactccagaatgtaggcacaggcat

SEQ ID NO: 376935 - DNA, 25 bp, Homo sapien
caagaaagcaagtcgcttctgagtt

SEQ ID NO: 376936 - DNA, 25 bp, Homo sapien
tctgagtttcaaagctactccagaa

SEQ ID NO: 376937 - DNA, 25 bp, Homo sapien
gaaagcaagtcgcttctgagtttca

SEQ ID NO: 376938 - DNA, 25 bp, Homo sapien
tggcagcctgatgaaaagtatgctt

SEQ ID NO: 376939 - DNA, 25 bp, Homo sapien
aagtgcttggggacaatgggccgtg

SEQ ID NO: 376940 - DNA, 25 bp, Homo sapien
gcttggggacaatgggccgtgattg

SEQ ID NO: 376941 - DNA, 25 bp, Homo sapien
gtgcttggggacaatgggccgtgat

SEQ ID NO: 376942 - DNA, 25 bp, Homo sapien
tgatgaaaggcagtgtgccgacagc

SEQ ID NO: 376943 - DNA, 25 bp, Homo sapien
gctttaagtctgatggcttgggtac

SEQ ID NO: 376944 - DNA, 25 bp, Homo sapien
gcagtgtgccgacagctgctgagct

SEQ ID NO: 376945 - DNA, 25 bp, Homo sapien
gaaaggcagtgtgccgacagctgct

SEQ ID NO: 376946 - DNA, 25 bp, Homo sapien
ctctcgtgaggctttactgatgacc

SEQ ID NO: 376947 - DNA, 25 bp, Homo sapien
cttggacaagcttggacaaacaacc

SEQ ID NO: 376948 - DNA, 25 bp, Homo sapien
gctttactgatgaccttggcttcct

SEQ ID NO: 376949 - DNA, 25 bp, Homo sapien
actgacttggacaagcttggacaaa

SEQ ID NO: 376950 - DNA, 25 bp, Homo sapien
gctgttgctggaaaagtcggagctc

SEQ ID NO: 376951 - DNA, 25 bp, Homo sapien
cagaaggctcttgttcgctgcccag

SEQ ID NO: 376952 - DNA, 25 bp, Homo sapien
gatcacaggcaatcaaagaggactt

SEQ ID NO: 376953 - DNA, 25 bp, Homo sapien
gaagctaagatgttgcaggagagcc

SEQ ID NO: 376954 - DNA, 25 bp, Homo sapien
tccccaaggccagctcttcttccat

SEQ ID NO: 376955 - DNA, 25 bp, Homo sapien
gtccccaaggccagctcttcttcca

SEQ ID NO: 376956 - DNA, 25 bp, Homo sapien
tgtccccaaggccagctcttcttcc

SEQ ID NO: 376957 - DNA, 25 bp, Homo sapien
aatgtgatattggaacagtccctgg

SEQ ID NO: 376958 - DNA, 25 bp, Homo sapien
tgattttggagctcctgctttgtct

SEQ ID NO: 376959 - DNA, 25 bp, Homo sapien
tctgcagggatttaccaattagaac

SEQ ID NO: 376960 - DNA, 25 bp, Homo sapien
gaattgaaatgaggccaccaacccc

SEQ ID NO: 376961 - DNA, 25 bp, Homo sapien
aattagagctccatgctttgttttg

SEQ ID NO: 376962 - DNA, 25 bp, Homo sapien
ctaaattagagctccatgctttgtt

SEQ ID NO: 376963 - DNA, 25 bp, Homo sapien
taaattagagctccatgctttgttt

SEQ ID NO: 376964 - DNA, 25 bp, Homo sapien
aaattagagctccatgctttgtttt

SEQ ID NO: 376965 - DNA, 25 bp, Homo sapien
tgctgagtgactcgcttagctgaaa

SEQ ID NO: 376966 - DNA, 25 bp, Homo sapien
gctggtgctgagtgactcgcttagc

SEQ ID NO: 376967 - DNA, 25 bp, Homo sapien
ggtgctgagtgactcgcttagctga

SEQ ID NO: 376968 - DNA, 25 bp, Homo sapien
tgagtgactcgcttagctgaaaccc

SEQ ID NO: 376969 - DNA, 25 bp, Homo sapien
ctataaacagaagaacaaatctttc

SEQ ID NO: 376970 - DNA, 25 bp, Homo sapien
atctttctcataaaggaagctgtaa

SEQ ID NO: 376971 - DNA, 25 bp, Homo sapien
taaacagaagaacaaatctttctca

SEQ ID NO: 376972 - DNA, 25 bp, Homo sapien
aatctttctcataaaggaagctgta

SEQ ID NO: 376973 - DNA, 25 bp, Homo sapien
agttgcagaaaacatccagtgtttc

SEQ ID NO: 376974 - DNA, 25 bp, Homo sapien
tcatgagttcgagaacctgggttct

SEQ ID NO: 376975 - DNA, 25 bp, Homo sapien
tggcctgtggtctttctgtcaagct

SEQ ID NO: 376976 - DNA, 25 bp, Homo sapien
tcaagctggttgtgatagcaaggga

SEQ ID NO: 376977 - DNA, 25 bp, Homo sapien
tagcaagggatgctgaatgcgttca

SEQ ID NO: 376978 - DNA, 25 bp, Homo sapien
tcttgccttggtttgggagctcgga

SEQ ID NO: 376979 - DNA, 25 bp, Homo sapien
gagctcggaatctcgatcacctgaa

SEQ ID NO: 376980 - DNA, 25 bp, Homo sapien
cctgaagaccactctactggagcat

SEQ ID NO: 376981 - DNA, 25 bp, Homo sapien
taaggcaatgtttcactgtcacggg

SEQ ID NO: 376982 - DNA, 25 bp, Homo sapien
gagtgaaacctagcaactgccagga

SEQ ID NO: 376983 - DNA, 25 bp, Homo sapien
ccacactgagagagtatgccagagt

SEQ ID NO: 376984 - DNA, 25 bp, Homo sapien
tataacttaatcacaagattacgtg

SEQ ID NO: 376985 - DNA, 25 bp, Homo sapien
tcagtacttggatgtgtccaggaaa

SEQ ID NO: 376986 - DNA, 25 bp, Homo sapien
tccacactggaaactacatgtagtt

SEQ ID NO: 376987 - DNA, 25 bp, Homo sapien
accacccctgcaaagaggttttcat

SEQ ID NO: 376988 - DNA, 25 bp, Homo sapien
tcacttttatcaacagggagttaaa

SEQ ID NO: 376989 - DNA, 25 bp, Homo sapien
aataccatccacttgttccacactg

SEQ ID NO: 376990 - DNA, 25 bp, Homo sapien
gacttgggccttttcaatgctgtta

SEQ ID NO: 376991 - DNA, 25 bp, Homo sapien
ccattggccttagaatgaggtacaa

SEQ ID NO: 376992 - DNA, 25 bp, Homo sapien
tacttaacgtccttcagcgtgctgc

SEQ ID NO: 376993 - DNA, 25 bp, Homo sapien
gacagtcacctgcattaacgttcca

SEQ ID NO: 376994 - DNA, 25 bp, Homo sapien
cagttgaggggagctttttcctctc

SEQ ID NO: 376995 - DNA, 25 bp, Homo sapien
ttcagcataactggaaaactcagct

SEQ ID NO: 376996 - DNA, 25 bp, Homo sapien
tcctctcagtttcagcataactgga

SEQ ID NO: 376997 - DNA, 25 bp, Homo sapien
ctcagtttcagcataactggaaaac

SEQ ID NO: 376998 - DNA, 25 bp, Homo sapien
caaatagtcttgactgctcctttcg

SEQ ID NO: 376999 - DNA, 25 bp, Homo sapien
tgctcctttcgaacctctgtcctca

SEQ ID NO: 377000 - DNA, 25 bp, Homo sapien
tctgtcctcacaattgctgttagat

SEQ ID NO: 377001 - DNA, 25 bp, Homo sapien
tcttctcgtagcttttatttcaaat

SEQ ID NO: 377002 - DNA, 25 bp, Homo sapien
aagcatgtaacagggtgagtgagag

SEQ ID NO: 377003 - DNA, 25 bp, Homo sapien
aaagcatgtaacagggtgagtgaga

SEQ ID NO: 377004 - DNA, 25 bp, Homo sapien
caaagcatgtaacagggtgagtgag

SEQ ID NO: 377005 - DNA, 25 bp, Homo sapien
acaaagcatgtaacagggtgagtga

SEQ ID NO: 377006 - DNA, 25 bp, Homo sapien
gggtttcatgggcaaacgtcactat

SEQ ID NO: 377007 - DNA, 25 bp, Homo sapien
atccagccttctctgagtggagaga

SEQ ID NO: 377008 - DNA, 25 bp, Homo sapien
cgtcactattgaagaatccagcctt

SEQ ID NO: 377009 - DNA, 25 bp, Homo sapien
ggcagaaggacaacatgcactgggt

SEQ ID NO: 377010 - DNA, 25 bp, Homo sapien
cattaagaggttccagggagacact

SEQ ID NO: 377011 - DNA, 25 bp, Homo sapien
cccataggaacagccgccggggagt

SEQ ID NO: 377012 - DNA, 25 bp, Homo sapien
cagaggtgactgataattgctgtca

SEQ ID NO: 377013 - DNA, 25 bp, Homo sapien
gagacactgggagcccctgacatag

SEQ ID NO: 377014 - DNA, 25 bp, Homo sapien
tgcactccgatatttggctgtcaaa

SEQ ID NO: 377015 - DNA, 25 bp, Homo sapien
cactccgatatttggctgtcaaatt

SEQ ID NO: 377016 - DNA, 25 bp, Homo sapien
gctgtcaaatttgcctagagttcta

SEQ ID NO: 377017 - DNA, 25 bp, Homo sapien
ttatgtttacggatgcactccgata

SEQ ID NO: 377018 - DNA, 25 bp, Homo sapien
tcacccacaatgttaggaggggact

SEQ ID NO: 377019 - DNA, 25 bp, Homo sapien
taggaggggacttgttcccagactg

SEQ ID NO: 377020 - DNA, 25 bp, Homo sapien
tttgccctgtcatcccttctgtcag

SEQ ID NO: 377021 - DNA, 25 bp, Homo sapien
gtcagcctttcctggtgtatttcct

SEQ ID NO: 377022 - DNA, 25 bp, Homo sapien
gagcatagagtacatgccaccaaga

SEQ ID NO: 377023 - DNA, 25 bp, Homo sapien
ccctggcacaaggagcatagagtac

SEQ ID NO: 377024 - DNA, 25 bp, Homo sapien
tgagtaagtccatctgcatcatttt

SEQ ID NO: 377025 - DNA, 25 bp, Homo sapien
tcagttcaactgagtaagtccatct

SEQ ID NO: 377026 - DNA, 25 bp, Homo sapien
cagagcatgtcggttaacccagagt

SEQ ID NO: 377027 - DNA, 25 bp, Homo sapien
tcggttaacccagagtgtggccaca

SEQ ID NO: 377028 - DNA, 25 bp, Homo sapien
aacccagagtgtggccacatgaacg

SEQ ID NO: 377029 - DNA, 25 bp, Homo sapien
ctgaagtcagagcatgtcggttaac

SEQ ID NO: 377030 - DNA, 25 bp, Homo sapien
cagagaggacctcgtgtggcctgat

SEQ ID NO: 377031 - DNA, 25 bp, Homo sapien
taattgctgcagcacgtatagcggt

SEQ ID NO: 377032 - DNA, 25 bp, Homo sapien
tcatgagaccgctcggaggctcaga

SEQ ID NO: 377033 - DNA, 25 bp, Homo sapien
tatagcggtgtgaccctttggaact

SEQ ID NO: 377034 - DNA, 25 bp, Homo sapien
tcagtatgtttcacactgcctagga

SEQ ID NO: 377035 - DNA, 25 bp, Homo sapien
gcaccagcaggaaattggaccaagg

SEQ ID NO: 377036 - DNA, 25 bp, Homo sapien
ggaccaaggtagattcagccaacat

SEQ ID NO: 377037 - DNA, 25 bp, Homo sapien
tgaagatttggccagctctaagaag

SEQ ID NO: 377038 - DNA, 25 bp, Homo sapien
ccagctctaagaagagcaccagcag

SEQ ID NO: 377039 - DNA, 25 bp, Homo sapien
aggacagcagtactcacacaccaaa

SEQ ID NO: 377040 - DNA, 25 bp, Homo sapien
ccgcagtaaacagtgtcataggaca

SEQ ID NO: 377041 - DNA, 25 bp, Homo sapien
tcataggacagcagtactcacacac

SEQ ID NO: 377042 - DNA, 25 bp, Homo sapien
atcacaacatgttcccgcagtaaac

SEQ ID NO: 377043 - DNA, 25 bp, Homo sapien
gaaatggatggcttgcacgtcacct

SEQ ID NO: 377044 - DNA, 25 bp, Homo sapien
taatgattgctccttgagtctgagc

SEQ ID NO: 377045 - DNA, 25 bp, Homo sapien
cgtcacctcatcatcattcgtaatg

SEQ ID NO: 377046 - DNA, 25 bp, Homo sapien
tcattcgtaatgattgctccttgag

SEQ ID NO: 377047 - DNA, 25 bp, Homo sapien
gggtcccgggcgaggcagcgcgcgg

SEQ ID NO: 377048 - DNA, 25 bp, Homo sapien
ctgctcgggagacgtggtcggtcgc

SEQ ID NO: 377049 - DNA, 25 bp, Homo sapien
gagacgtggtcggtcgccgcaccaa

SEQ ID NO: 377050 - DNA, 25 bp, Homo sapien
tcgccgcaccaacgcgggtgtagcg

SEQ ID NO: 377051 - DNA, 25 bp, Homo sapien
gcagcggctgtatctcggcatgaat

SEQ ID NO: 377052 - DNA, 25 bp, Homo sapien
tactcaggatcggtgagtgagcccc

SEQ ID NO: 377053 - DNA, 25 bp, Homo sapien
tctgaccaaaggacgaatgagggag

SEQ ID NO: 377054 - DNA, 25 bp, Homo sapien
aagttgggtgcatctctcgggcgtc

SEQ ID NO: 377055 - DNA, 25 bp, Homo sapien
tcctctgtctgtgcctatcccccga

SEQ ID NO: 377056 - DNA, 25 bp, Homo sapien
ttccctcctctgtctgtgcctatcc

SEQ ID NO: 377057 - DNA, 25 bp, Homo sapien
ctcctctgtctgtgcctatcccccg

SEQ ID NO: 377058 - DNA, 25 bp, Homo sapien
ccctcctctgtctgtgcctatcccc

SEQ ID NO: 377059 - DNA, 25 bp, Homo sapien
caagcttttggagatcagttcattt

SEQ ID NO: 377060 - DNA, 25 bp, Homo sapien
ataaatatccacctaaccgggctct

SEQ ID NO: 377061 - DNA, 25 bp, Homo sapien
ggaagtgttgtagatcctgtggttc

SEQ ID NO: 377062 - DNA, 25 bp, Homo sapien
ctattattagagctgttgagttttg

SEQ ID NO: 377063 - DNA, 25 bp, Homo sapien
gaagtgttgtagatcctgtggttcc

SEQ ID NO: 377064 - DNA, 25 bp, Homo sapien
tgtcactattattagagctgttgag

SEQ ID NO: 377065 - DNA, 25 bp, Homo sapien
tgtttgtcaccggagacacaatgag

SEQ ID NO: 377066 - DNA, 25 bp, Homo sapien
tgtcaccggagacacaatgaggagt

SEQ ID NO: 377067 - DNA, 25 bp, Homo sapien
aaaaagagttgtgcattagatggat

SEQ ID NO: 377068 - DNA, 25 bp, Homo sapien
tgtttttatgtttgtcaccggagac

SEQ ID NO: 377069 - DNA, 25 bp, Homo sapien
tctatgtgcagtcttgtttttctgc

SEQ ID NO: 377070 - DNA, 25 bp, Homo sapien
tcttccttaattgaatttctattta

SEQ ID NO: 377071 - DNA, 25 bp, Homo sapien
tttacttcaactggttcctctgaca

SEQ ID NO: 377072 - DNA, 25 bp, Homo sapien
tttctgcttctctaaaaacctttca

SEQ ID NO: 377073 - DNA, 25 bp, Homo sapien
tagcgatagatgttctttggctctc

SEQ ID NO: 377074 - DNA, 25 bp, Homo sapien
ggctgccattcttagcgatagatgt

SEQ ID NO: 377075 - DNA, 25 bp, Homo sapien
gccattcttagcgatagatgttctt

SEQ ID NO: 377076 - DNA, 25 bp, Homo sapien
ttgttggctgccattcttagcgata

SEQ ID NO: 377077 - DNA, 25 bp, Homo sapien
caccccaactttccacaggtgccct

SEQ ID NO: 377078 - DNA, 25 bp, Homo sapien
taccacaccctgcaccccaactttc

SEQ ID NO: 377079 - DNA, 25 bp, Homo sapien
caactttccacaggtgcccttcttg

SEQ ID NO: 377080 - DNA, 25 bp, Homo sapien
tgcaccccaactttccacaggtgcc

SEQ ID NO: 377081 - DNA, 25 bp, Homo sapien
tcctgcagatgctctcttctttcca

SEQ ID NO: 377082 - DNA, 25 bp, Homo sapien
ctttccacttctgattggccacctt

SEQ ID NO: 377083 - DNA, 25 bp, Homo sapien
ttctttccacttctgattggccacc

SEQ ID NO: 377084 - DNA, 25 bp, Homo sapien
tccacttctgattggccaccttcat

SEQ ID NO: 377085 - DNA, 25 bp, Homo sapien
caaaccaccctgatttagctttagc

SEQ ID NO: 377086 - DNA, 25 bp, Homo sapien
tcaaaccaccctgatttagctttag

SEQ ID NO: 377087 - DNA, 25 bp, Homo sapien
gctcaaaccaccctgatttagcttt

SEQ ID NO: 377088 - DNA, 25 bp, Homo sapien
ggctcaaaccaccctgatttagctt

SEQ ID NO: 377089 - DNA, 25 bp, Homo sapien
ttttagtggaggactctgggataga

SEQ ID NO: 377090 - DNA, 25 bp, Homo sapien
ctgggatagatctgtcctcaaagtc

SEQ ID NO: 377091 - DNA, 25 bp, Homo sapien
tggttttagtggaggactctgggat

SEQ ID NO: 377092 - DNA, 25 bp, Homo sapien
gaacatataaatcttcaatgtttcc

SEQ ID NO: 377093 - DNA, 25 bp, Homo sapien
caggtgcttcgccttcttttcagga

SEQ ID NO: 377094 - DNA, 25 bp, Homo sapien
caggtggaattgtcatggataaaac

SEQ ID NO: 377095 - DNA, 25 bp, Homo sapien
taaaacactggtctatctcaatctc

SEQ ID NO: 377096 - DNA, 25 bp, Homo sapien
tgtctgctagcagtccaaagccttc

SEQ ID NO: 377097 - DNA, 25 bp, Homo sapien
ttttctagtttaatgatgatgatga

SEQ ID NO: 377098 - DNA, 25 bp, Homo sapien
ctctcaaaatgctggattaggtatg

SEQ ID NO: 377099 - DNA, 25 bp, Homo sapien
tgatgatgatttttaatagagaggg

SEQ ID NO: 377100 - DNA, 25 bp, Homo sapien
caccactcccggcctaagctttgtt

SEQ ID NO: 377101 - DNA, 25 bp, Homo sapien
gataatcttgcaagatgatgatata

SEQ ID NO: 377102 - DNA, 25 bp, Homo sapien
taatcttgcaagatgatgatatagc

SEQ ID NO: 377103 - DNA, 25 bp, Homo sapien
ttgcaggataatcttgcaagatgat

SEQ ID NO: 377104 - DNA, 25 bp, Homo sapien
caggataatcttgcaagatgatgat

SEQ ID NO: 377105 - DNA, 25 bp, Homo sapien
tctattctctccactcgtattgagc

SEQ ID NO: 377106 - DNA, 25 bp, Homo sapien
tccactcgtattgagcaagtactca

SEQ ID NO: 377107 - DNA, 25 bp, Homo sapien
cgtattgagcaagtactcattttct

SEQ ID NO: 377108 - DNA, 25 bp, Homo sapien
cattttctgttactcctacattcat

SEQ ID NO: 377109 - DNA, 25 bp, Homo sapien
taaccaccatctgaataccataagc

SEQ ID NO: 377110 - DNA, 25 bp, Homo sapien
tacaggtcagaaccactggaatggt

SEQ ID NO: 377111 - DNA, 25 bp, Homo sapien
tatcataagcatgaagctgaatcat

SEQ ID NO: 377112 - DNA, 25 bp, Homo sapien
gaagcctagtaccataagtataagc

SEQ ID NO: 377113 - DNA, 25 bp, Homo sapien
aatagtatttatgcccaggaaaagg

SEQ ID NO: 377114 - DNA, 25 bp, Homo sapien
ccctcagtgctatccaattggcgca

SEQ ID NO: 377115 - DNA, 25 bp, Homo sapien
tcaagttgaggtttatgcctgtgcg

SEQ ID NO: 377116 - DNA, 25 bp, Homo sapien
ggcgcaataacccatcaaagagatt

SEQ ID NO: 377117 - DNA, 25 bp, Homo sapien
tctgtgacttgacaggaggctacct

SEQ ID NO: 377118 - DNA, 25 bp, Homo sapien
ctcagggtgtcttaggctgtagcca

SEQ ID NO: 377119 - DNA, 25 bp, Homo sapien
cgtctcatcgcaaagcttgtctggg

SEQ ID NO: 377120 - DNA, 25 bp, Homo sapien
ttcactaggtagtagctgacttccc

SEQ ID NO: 377121 - DNA, 25 bp, Homo sapien
ctgaaaggccttgaatatcatcgta

SEQ ID NO: 377122 - DNA, 25 bp, Homo sapien
taaaagcaactaaaagaatattgcc

SEQ ID NO: 377123 - DNA, 25 bp, Homo sapien
agcaactaaaagaatattgccaatc

SEQ ID NO: 377124 - DNA, 25 bp, Homo sapien
ggccttgaatatcatcgtaagaatt

SEQ ID NO: 377125 - DNA, 25 bp, Homo sapien
tcaaatggtccccaatgctctggtt

SEQ ID NO: 377126 - DNA, 25 bp, Homo sapien
ggcagggctttgacaagagagtcaa

SEQ ID NO: 377127 - DNA, 25 bp, Homo sapien
tgtggcttccgtttcattctgtgaa

SEQ ID NO: 377128 - DNA, 25 bp, Homo sapien
ctgtgaattatgtgatgacaacttc

SEQ ID NO: 377129 - DNA, 25 bp, Homo sapien
taagtaggcaactagtgccaatttt

SEQ ID NO: 377130 - DNA, 25 bp, Homo sapien
taggcaactagtgccaattttcttg

SEQ ID NO: 377131 - DNA, 25 bp, Homo sapien
acaggagtcggccttcagccaaccg

SEQ ID NO: 377132 - DNA, 25 bp, Homo sapien
tcctttccgtcaatcacaggagtcg

SEQ ID NO: 377133 - DNA, 25 bp, Homo sapien
gggtcattacagtgctaacagcttg

SEQ ID NO: 377134 - DNA, 25 bp, Homo sapien
cacccaagacattgagatctctgca

SEQ ID NO: 377135 - DNA, 25 bp, Homo sapien
tatctctgactcttgctatcaccca

SEQ ID NO: 377136 - DNA, 25 bp, Homo sapien
gggctgttagcttctgggtcattac

SEQ ID NO: 377137 - DNA, 25 bp, Homo sapien
tcattaaggctactccagaactcca

SEQ ID NO: 377138 - DNA, 25 bp, Homo sapien
tgatgatcattaaggctactccaga

SEQ ID NO: 377139 - DNA, 25 bp, Homo sapien
cattaaggctactccagaactccat

SEQ ID NO: 377140 - DNA, 25 bp, Homo sapien
tgatcattaaggctactccagaact

SEQ ID NO: 377141 - DNA, 25 bp, Homo sapien
tgactgttaaaccacactgtgtggg

SEQ ID NO: 377142 - DNA, 25 bp, Homo sapien
gactgttaaaccacactgtgtgggc

SEQ ID NO: 377143 - DNA, 25 bp, Homo sapien
ttgaagttagtgatctcccctttag

SEQ ID NO: 377144 - DNA, 25 bp, Homo sapien
agttagtgatctcccctttagaaag

SEQ ID NO: 377145 - DNA, 25 bp, Homo sapien
ctaactgcaactgtagcccaccagg

SEQ ID NO: 377146 - DNA, 25 bp, Homo sapien
gcccaccagggaatggaaggttctc

SEQ ID NO: 377147 - DNA, 25 bp, Homo sapien
aatactctaactgcaactgtagccc

SEQ ID NO: 377148 - DNA, 25 bp, Homo sapien
tccctgagcaccaaatactctaact

SEQ ID NO: 377149 - DNA, 25 bp, Homo sapien
gggccagtctggagagctccagcat

SEQ ID NO: 377150 - DNA, 25 bp, Homo sapien
ttcctgggccagtctggagagctcc

SEQ ID NO: 377151 - DNA, 25 bp, Homo sapien
tcctgggccagtctggagagctcca

SEQ ID NO: 377152 - DNA, 25 bp, Homo sapien
cttccaagaacaaatgcaaagctaa

SEQ ID NO: 377153 - DNA, 25 bp, Homo sapien
cacttccaagaacaaatgcaaagct

SEQ ID NO: 377154 - DNA, 25 bp, Homo sapien
tccaagaacaaatgcaaagctaaca

SEQ ID NO: 377155 - DNA, 25 bp, Homo sapien
tgattcacttccaagaacaaatgca

SEQ ID NO: 377156 - DNA, 25 bp, Homo sapien
tacagcaagaattcctgccactcca

SEQ ID NO: 377157 - DNA, 25 bp, Homo sapien
ctccaggattggctattgctgatgg

SEQ ID NO: 377158 - DNA, 25 bp, Homo sapien
cccagtagtcagatagcaactttaa

SEQ ID NO: 377159 - DNA, 25 bp, Homo sapien
actttaaggtcactaggtcaccacg

SEQ ID NO: 377160 - DNA, 25 bp, Homo sapien
gctttctgagacgtttcaggcgctg

SEQ ID NO: 377161 - DNA, 25 bp, Homo sapien
tgctcggagtgagagggtgggagag

SEQ ID NO: 377162 - DNA, 25 bp, Homo sapien
caatggtgagtctaagaagaaggag

SEQ ID NO: 377163 - DNA, 25 bp, Homo sapien
aaagccaaattgctgccgaggccca

SEQ ID NO: 377164 - DNA, 25 bp, Homo sapien
acagcttagggattaatgtcctcca

SEQ ID NO: 377165 - DNA, 25 bp, Homo sapien
taattacaggaactgtgcatcagct

SEQ ID NO: 377166 - DNA, 25 bp, Homo sapien
tctaaggtggttcaagcatctactc

SEQ ID NO: 377167 - DNA, 25 bp, Homo sapien
catggatagggttgaagaaggttac

SEQ ID NO: 377168 - DNA, 25 bp, Homo sapien
agcagctcccacaacggctgaggca

SEQ ID NO: 377169 - DNA, 25 bp, Homo sapien
tcccacaacggctgaggcactcaga

SEQ ID NO: 377170 - DNA, 25 bp, Homo sapien
aacggctgaggcactcagaggcaga

SEQ ID NO: 377171 - DNA, 25 bp, Homo sapien
gaagcagctcccacaacggctgagg

SEQ ID NO: 377172 - DNA, 25 bp, Homo sapien
tccccaaaaccacaagcaatactgg

SEQ ID NO: 377173 - DNA, 25 bp, Homo sapien
aaccattaacaaagctgctggctcc

SEQ ID NO: 377174 - DNA, 25 bp, Homo sapien
taaacgttgaagtatctggaagctt

SEQ ID NO: 377175 - DNA, 25 bp, Homo sapien
aatactggacaacccagaaggtact

SEQ ID NO: 377176 - DNA, 25 bp, Homo sapien
gagagcggtatgttcttcagctctg

SEQ ID NO: 377177 - DNA, 25 bp, Homo sapien
taggtcatcatcgagagcggtatgt

SEQ ID NO: 377178 - DNA, 25 bp, Homo sapien
catcgagagcggtatgttcttcagc

SEQ ID NO: 377179 - DNA, 25 bp, Homo sapien
ttttgcataggtcatcatcgagagc

SEQ ID NO: 377180 - DNA, 25 bp, Homo sapien
cagaggtatgtgtccagcggctgtc

SEQ ID NO: 377181 - DNA, 25 bp, Homo sapien
agcccataggagactgtgtgcccaa

SEQ ID NO: 377182 - DNA, 25 bp, Homo sapien
caaagtcttcacgttgtgtccagca

SEQ ID NO: 377183 - DNA, 25 bp, Homo sapien
gaggccgctgctcaatagttaccag

SEQ ID NO: 377184 - DNA, 25 bp, Homo sapien
tccttggctataataaagagttctg

SEQ ID NO: 377185 - DNA, 25 bp, Homo sapien
gaggaagagtctgcacgcagaagca

SEQ ID NO: 377186 - DNA, 25 bp, Homo sapien
tgatgcatcttcatacaacaagagg

SEQ ID NO: 377187 - DNA, 25 bp, Homo sapien
taataaagagttctgatgcatcttc

SEQ ID NO: 377188 - DNA, 25 bp, Homo sapien
gatggcattgcaaggagcatccagt

SEQ ID NO: 377189 - DNA, 25 bp, Homo sapien
ggagcatccagttttatggagggtg

SEQ ID NO: 377190 - DNA, 25 bp, Homo sapien
agcatccagttttatggagggtgga

SEQ ID NO: 377191 - DNA, 25 bp, Homo sapien
ggatggcattgcaaggagcatccag

SEQ ID NO: 377192 - DNA, 25 bp, Homo sapien
gccatacaatctttttcgtcctaag

SEQ ID NO: 377193 - DNA, 25 bp, Homo sapien
cctgtactcctctgcttgtgatgtg

SEQ ID NO: 377194 - DNA, 25 bp, Homo sapien
gccgcggacccagatcttgtgaaac

SEQ ID NO: 377195 - DNA, 25 bp, Homo sapien
ccagaacctgccatacaatcttttt

SEQ ID NO: 377196 - DNA, 25 bp, Homo sapien
ctctgctaagccaggaacagctatg

SEQ ID NO: 377197 - DNA, 25 bp, Homo sapien
ccagctcctgaactactgccaagaa

SEQ ID NO: 377198 - DNA, 25 bp, Homo sapien
ctaatagccccttttttcatgtgac

SEQ ID NO: 377199 - DNA, 25 bp, Homo sapien
gctgtcatcccctctaatagcccct

SEQ ID NO: 377200 - DNA, 25 bp, Homo sapien
tttggatagcttggctgttgatttt

SEQ ID NO: 377201 - DNA, 25 bp, Homo sapien
tactatgacgaattactatttggat

SEQ ID NO: 377202 - DNA, 25 bp, Homo sapien
gttgcatgatttttactatgacgaa

SEQ ID NO: 377203 - DNA, 25 bp, Homo sapien
ttgtcagaagcagtgtgtaaagtca

SEQ ID NO: 377204 - DNA, 25 bp, Homo sapien
gccctgcccaagatgtctgagcatg

SEQ ID NO: 377205 - DNA, 25 bp, Homo sapien
tctccccaggagtgataacagagct

SEQ ID NO: 377206 - DNA, 25 bp, Homo sapien
gacagtctctctaagacatcaggga

SEQ ID NO: 377207 - DNA, 25 bp, Homo sapien
aatgtcaggcaagagaagtaccctc

SEQ ID NO: 377208 - DNA, 25 bp, Homo sapien
aagattctgagtttgcatgccacat

SEQ ID NO: 377209 - DNA, 25 bp, Homo sapien
gaagattctgagtttgcatgccaca

SEQ ID NO: 377210 - DNA, 25 bp, Homo sapien
gagaagattctgagtttgcatgcca

SEQ ID NO: 377211 - DNA, 25 bp, Homo sapien
agttcagctgagttacactgagaag

SEQ ID NO: 377212 - DNA, 25 bp, Homo sapien
gacccagagtaagttgtctggcagg

SEQ ID NO: 377213 - DNA, 25 bp, Homo sapien
agacccagagtaagttgtctggcag

SEQ ID NO: 377214 - DNA, 25 bp, Homo sapien
gaatccaacgccatagcccagggaa

SEQ ID NO: 377215 - DNA, 25 bp, Homo sapien
gggcggcagaatccaacgccatagc

SEQ ID NO: 377216 - DNA, 25 bp, Homo sapien
gttggtctgtagcaagaagactggc

SEQ ID NO: 377217 - DNA, 25 bp, Homo sapien
aatagtagaagcctgatccacaagt

SEQ ID NO: 377218 - DNA, 25 bp, Homo sapien
gaaggcattagccaacaaaatcagc

SEQ ID NO: 377219 - DNA, 25 bp, Homo sapien
gtttttcagatgaagcctgccagcc

SEQ ID NO: 377220 - DNA, 25 bp, Homo sapien
acaataaaggttatgagtagaggca

SEQ ID NO: 377221 - DNA, 25 bp, Homo sapien
gacaaactgagaacttgataattat

SEQ ID NO: 377222 - DNA, 25 bp, Homo sapien
ttcaagatttattttgagctagttc

SEQ ID NO: 377223 - DNA, 25 bp, Homo sapien
ccaggactcacatgctctgcaattc

SEQ ID NO: 377224 - DNA, 25 bp, Homo sapien
cagctgggttcctctctctataggg

SEQ ID NO: 377225 - DNA, 25 bp, Homo sapien
ggttacttgcactacccaggctcct

SEQ ID NO: 377226 - DNA, 25 bp, Homo sapien
cattgtgtgttgagtccagcccctg

SEQ ID NO: 377227 - DNA, 25 bp, Homo sapien
gcctgggtagtacaggtagccccca

SEQ ID NO: 377228 - DNA, 25 bp, Homo sapien
gagcagagggcagtgctgtagacca

SEQ ID NO: 377229 - DNA, 25 bp, Homo sapien
tgggagagcagagggcagtgctgta

SEQ ID NO: 377230 - DNA, 25 bp, Homo sapien
gagagcagagggcagtgctgtagac

SEQ ID NO: 377231 - DNA, 25 bp, Homo sapien
gcagagggcagtgctgtagaccagg

SEQ ID NO: 377232 - DNA, 25 bp, Homo sapien
ctgtagagagaggaacgcagctggc

SEQ ID NO: 377233 - DNA, 25 bp, Homo sapien
gagagaggaacgcagctggcaggtg

SEQ ID NO: 377234 - DNA, 25 bp, Homo sapien
tagagagaggaacgcagctggcagg

SEQ ID NO: 377235 - DNA, 25 bp, Homo sapien
tgtagagagaggaacgcagctggca

SEQ ID NO: 377236 - DNA, 25 bp, Homo sapien
tgggagcgacagctgctggaccgaa

SEQ ID NO: 377237 - DNA, 25 bp, Homo sapien
gagcaagtcgtctgacagggacagc

SEQ ID NO: 377238 - DNA, 25 bp, Homo sapien
acagctgctggaccgaaagcctaga

SEQ ID NO: 377239 - DNA, 25 bp, Homo sapien
ccgaaagcctagagatccagagcaa

SEQ ID NO: 377240 - DNA, 25 bp, Homo sapien
gaatctggatccgtaactcagggaa

SEQ ID NO: 377241 - DNA, 25 bp, Homo sapien
taacaagaagactgccaggctccag

SEQ ID NO: 377242 - DNA, 25 bp, Homo sapien
ggatccatttcccagcgagtagcag

SEQ ID NO: 377243 - DNA, 25 bp, Homo sapien
tagaagcgagatccacagattggtc

SEQ ID NO: 377244 - DNA, 25 bp, Homo sapien
agacatcctgtgtagtgtccagcac

SEQ ID NO: 377245 - DNA, 25 bp, Homo sapien
gggctttgtatccagtgtattccaa

SEQ ID NO: 377246 - DNA, 25 bp, Homo sapien
gaacctctatactctgcaggccctg

SEQ ID NO: 377247 - DNA, 25 bp, Homo sapien
gcataactgcgctacccaggcttct

SEQ ID NO: 377248 - DNA, 25 bp, Homo sapien
aacaggagttctgagctcaggtgat

SEQ ID NO: 377249 - DNA, 25 bp, Homo sapien
gttaacaggagttctgagctcaggt

SEQ ID NO: 377250 - DNA, 25 bp, Homo sapien
taacaggagttctgagctcaggtga

SEQ ID NO: 377251 - DNA, 25 bp, Homo sapien
ttaacaggagttctgagctcaggtg

SEQ ID NO: 377252 - DNA, 25 bp, Homo sapien
gatctggccaaagtgcaggatgtct

SEQ ID NO: 377253 - DNA, 25 bp, Homo sapien
taagtggaaactggatacctcaggt

SEQ ID NO: 377254 - DNA, 25 bp, Homo sapien
caaccaagagatccaaggccagtgt

SEQ ID NO: 377255 - DNA, 25 bp, Homo sapien
gctggtgggctcacagtaggtctcc

SEQ ID NO: 377256 - DNA, 25 bp, Homo sapien
gttcaatcatatacttccaagaggg

SEQ ID NO: 377257 - DNA, 25 bp, Homo sapien
ccaagagggctaggatgctgagtcc

SEQ ID NO: 377258 - DNA, 25 bp, Homo sapien
caatcacagatattggacaggctga

SEQ ID NO: 377259 - DNA, 25 bp, Homo sapien
tgagtgttgcagttccatagagtac

SEQ ID NO: 377260 - DNA, 25 bp, Homo sapien
tgccacaattctttctgcaaggcca

SEQ ID NO: 377261 - DNA, 25 bp, Homo sapien
tgctgtgttcagtcccagtagagcc

SEQ ID NO: 377262 - DNA, 25 bp, Homo sapien
ttttgaggtagttcccaattccaca

SEQ ID NO: 377263 - DNA, 25 bp, Homo sapien
gccacagacgttacatcagatttac

SEQ ID NO: 377264 - DNA, 25 bp, Homo sapien
tggcgatggccaatagtgtccgata

SEQ ID NO: 377265 - DNA, 25 bp, Homo sapien
ggttatttgcagatgactagaagag

SEQ ID NO: 377266 - DNA, 25 bp, Homo sapien
gcactggtgaagtctgaacgagcac

SEQ ID NO: 377267 - DNA, 25 bp, Homo sapien
gaacgagcacttcagtagagtggaa

SEQ ID NO: 377268 - DNA, 25 bp, Homo sapien
tagtcctctttaaggtctgcattgg

SEQ ID NO: 377269 - DNA, 25 bp, Homo sapien
tctgcattgggagccacagtactgt

SEQ ID NO: 377270 - DNA, 25 bp, Homo sapien
taaggtctgcattgggagccacagt

SEQ ID NO: 377271 - DNA, 25 bp, Homo sapien
tctttaaggtctgcattgggagcca

SEQ ID NO: 377272 - DNA, 25 bp, Homo sapien
ttgcaaagtccatcaactttactca

SEQ ID NO: 377273 - DNA, 25 bp, Homo sapien
taagtcatggttgactttgcaaagt

SEQ ID NO: 377274 - DNA, 25 bp, Homo sapien
tttgcaaagtccatcaactttactc

SEQ ID NO: 377275 - DNA, 25 bp, Homo sapien
tgcaaagtccatcaactttactcat

SEQ ID NO: 377276 - DNA, 25 bp, Homo sapien
tagctatgggcttgatggtggttat

SEQ ID NO: 377277 - DNA, 25 bp, Homo sapien
taatgagctactagtacagcaagga

SEQ ID NO: 377278 - DNA, 25 bp, Homo sapien
tctggactatggctatggatctagc

SEQ ID NO: 377279 - DNA, 25 bp, Homo sapien
tggttttggtagtctggactatggc

SEQ ID NO: 377280 - DNA, 25 bp, Homo sapien
tgatggtggcctgggctatgggcat

SEQ ID NO: 377281 - DNA, 25 bp, Homo sapien
cacgtgctactgtggtaactgtgat

SEQ ID NO: 377282 - DNA, 25 bp, Homo sapien
ctgcagccataattcgtgttttgta

SEQ ID NO: 377283 - DNA, 25 bp, Homo sapien
tgcagccataattcgtgttttgtac

SEQ ID NO: 377284 - DNA, 25 bp, Homo sapien
gcagccataattcgtgttttgtact

SEQ ID NO: 377285 - DNA, 25 bp, Homo sapien
ttttggccttttcagtcagactgta

SEQ ID NO: 377286 - DNA, 25 bp, Homo sapien
cagtcagactgtatgttcgctgcat

SEQ ID NO: 377287 - DNA, 25 bp, Homo sapien
tggccttttcagtcagactgtatgt

SEQ ID NO: 377288 - DNA, 25 bp, Homo sapien
cttttcagtcagactgtatgttcgc

SEQ ID NO: 377289 - DNA, 25 bp, Homo sapien
aagctggcatacaggcttgggtttc

SEQ ID NO: 377290 - DNA, 25 bp, Homo sapien
tgcttagcagatggataaagctggc

SEQ ID NO: 377291 - DNA, 25 bp, Homo sapien
gaacagtaagggctaggacaatctt

SEQ ID NO: 377292 - DNA, 25 bp, Homo sapien
cagtaagggctaggacaatcttctt

SEQ ID NO: 377293 - DNA, 25 bp, Homo sapien
gtagccacagcacccatagccatgg

SEQ ID NO: 377294 - DNA, 25 bp, Homo sapien
agccacagccgccataaccacagcc

SEQ ID NO: 377295 - DNA, 25 bp, Homo sapien
gccgccataaccacagcccaggcct

SEQ ID NO: 377296 - DNA, 25 bp, Homo sapien
ccatggccaccattgtagtttctgt

SEQ ID NO: 377297 - DNA, 25 bp, Homo sapien
tgtagccacagccacagaaggagcc

SEQ ID NO: 377298 - DNA, 25 bp, Homo sapien
cagccacagaaggagccatagccac

SEQ ID NO: 377299 - DNA, 25 bp, Homo sapien
cagtccaggcctccatagccaaagc

SEQ ID NO: 377300 - DNA, 25 bp, Homo sapien
aaagcccaggcctccgtagccacag

SEQ ID NO: 377301 - DNA, 25 bp, Homo sapien
aaggagtgggagacatagccatagc

SEQ ID NO: 377302 - DNA, 25 bp, Homo sapien
aggagtgggagacatagccatagcc

SEQ ID NO: 377303 - DNA, 25 bp, Homo sapien
gaaagtcatcaaaggagtcactgtg

SEQ ID NO: 377304 - DNA, 25 bp, Homo sapien
tatcatcaatcaagggaaaggctca

SEQ ID NO: 377305 - DNA, 25 bp, Homo sapien
ccatcatcctgataaaaggagaagt

SEQ ID NO: 377306 - DNA, 25 bp, Homo sapien
cagaattggtgaattgcaatgtcac

SEQ ID NO: 377307 - DNA, 25 bp, Homo sapien
tagctcataagagaatggcctaaac

SEQ ID NO: 377308 - DNA, 25 bp, Homo sapien
ttcataacaccatgggcagtagcag

SEQ ID NO: 377309 - DNA, 25 bp, Homo sapien
tagccatagccgctaagaccacagc

SEQ ID NO: 377310 - DNA, 25 bp, Homo sapien
gcagtagcaggcatagccatagccg

SEQ ID NO: 377311 - DNA, 25 bp, Homo sapien
tagcaagatgggcagtagtagccat

SEQ ID NO: 377312 - DNA, 25 bp, Homo sapien
catccatagccacgataaccacagc

SEQ ID NO: 377313 - DNA, 25 bp, Homo sapien
accatacccatagccaccataatag

SEQ ID NO: 377314 - DNA, 25 bp, Homo sapien
ccataatagttgctgtagtaaatca

SEQ ID NO: 377315 - DNA, 25 bp, Homo sapien
cacagtccttcccatagtcacagcc

SEQ ID NO: 377316 - DNA, 25 bp, Homo sapien
acagtccttcccatagtcacagcca

SEQ ID NO: 377317 - DNA, 25 bp, Homo sapien
cagaaagatggctgtagtaggacat

SEQ ID NO: 377318 - DNA, 25 bp, Homo sapien
ccacagtccttcccatagtcacagc

SEQ ID NO: 377319 - DNA, 25 bp, Homo sapien
ctggcagagtaagatgagtggcagc

SEQ ID NO: 377320 - DNA, 25 bp, Homo sapien
cagagtaagatgagtggcagccatg

SEQ ID NO: 377321 - DNA, 25 bp, Homo sapien
agtaagatgagtggcagccatgtct

SEQ ID NO: 377322 - DNA, 25 bp, Homo sapien
tggcagagtaagatgagtggcagcc

SEQ ID NO: 377323 - DNA, 25 bp, Homo sapien
gatgatggcgtacaaactcctcctc

SEQ ID NO: 377324 - DNA, 25 bp, Homo sapien
gtattcatggccctagtaatatagg

SEQ ID NO: 377325 - DNA, 25 bp, Homo sapien
gtgaaggatgatggcgtacaaactc

SEQ ID NO: 377326 - DNA, 25 bp, Homo sapien
cagagggtttggtataaagtatttg

SEQ ID NO: 377327 - DNA, 25 bp, Homo sapien
tatccatagccaccatagccacggc

SEQ ID NO: 377328 - DNA, 25 bp, Homo sapien
acaggaccagtatcttccatagcaa

SEQ ID NO: 377329 - DNA, 25 bp, Homo sapien
acagccatagccaccgcccaggact

SEQ ID NO: 377330 - DNA, 25 bp, Homo sapien
gactccatagccataacgcagacca

SEQ ID NO: 377331 - DNA, 25 bp, Homo sapien
caaatttaggaagtccatgtggaag

SEQ ID NO: 377332 - DNA, 25 bp, Homo sapien
gagaccacgaggttgagttgccaga

SEQ ID NO: 377333 - DNA, 25 bp, Homo sapien
cacgaggttgagttgccagatattt

SEQ ID NO: 377334 - DNA, 25 bp, Homo sapien
gaccacgaggttgagttgccagata

SEQ ID NO: 377335 - DNA, 25 bp, Homo sapien
cccagtcctccgtagtagttgccat

SEQ ID NO: 377336 - DNA, 25 bp, Homo sapien
ccaaagccagaggtataactatatt

SEQ ID NO: 377337 - DNA, 25 bp, Homo sapien
tccaggattctaaaggcaccaaagc

SEQ ID NO: 377338 - DNA, 25 bp, Homo sapien
tagccatagcccagtcctccgtagt

SEQ ID NO: 377339 - DNA, 25 bp, Homo sapien
cagtgcctgataataagcatgtagc

SEQ ID NO: 377340 - DNA, 25 bp, Homo sapien
cataatcatattggtggcagcagtc

SEQ ID NO: 377341 - DNA, 25 bp, Homo sapien
tagcataatcatattggtggcagca

SEQ ID NO: 377342 - DNA, 25 bp, Homo sapien
tcagtcagtgcctgataataagcat

SEQ ID NO: 377343 - DNA, 25 bp, Homo sapien
ttcctccgaacttctgtgatagtta

SEQ ID NO: 377344 - DNA, 25 bp, Homo sapien
tcctccgaacttctgtgatagttat

SEQ ID NO: 377345 - DNA, 25 bp, Homo sapien
cctccgaacttctgtgatagttatg

SEQ ID NO: 377346 - DNA, 25 bp, Homo sapien
tccgaacttctgtgatagttatgtt

SEQ ID NO: 377347 - DNA, 25 bp, Homo sapien
agtttctcagccttgcagcatccac

SEQ ID NO: 377348 - DNA, 25 bp, Homo sapien
taagtttctcagccttgcagcatcc

SEQ ID NO: 377349 - DNA, 25 bp, Homo sapien
aagtttctcagccttgcagcatcca

SEQ ID NO: 377350 - DNA, 25 bp, Homo sapien
tactatggagatccctgtggaggct

SEQ ID NO: 377351 - DNA, 25 bp, Homo sapien
ctgtggtgatgggtcgagctacggc

SEQ ID NO: 377352 - DNA, 25 bp, Homo sapien
agctacggctgtgtcaatggctctc

SEQ ID NO: 377353 - DNA, 25 bp, Homo sapien
cctaacaccgtgaattgctactact

SEQ ID NO: 377354 - DNA, 25 bp, Homo sapien
ccatgatggataaattgaattgatt

SEQ ID NO: 377355 - DNA, 25 bp, Homo sapien
ttggtttagtgactatgtagtgaaa

SEQ ID NO: 377356 - DNA, 25 bp, Homo sapien
gcatgctctcaatccatgatggata

SEQ ID NO: 377357 - DNA, 25 bp, Homo sapien
gactatgtagtgaaatatccaatta

SEQ ID NO: 377358 - DNA, 25 bp, Homo sapien
acctttaatctacatgttgccattt

SEQ ID NO: 377359 - DNA, 25 bp, Homo sapien
ccacctttaatctacatgttgccat

SEQ ID NO: 377360 - DNA, 25 bp, Homo sapien
cacctttaatctacatgttgccatt

SEQ ID NO: 377361 - DNA, 25 bp, Homo sapien
tcttcaagtcggaagttggagagga

SEQ ID NO: 377362 - DNA, 25 bp, Homo sapien
ggcatcaatgccagtgaccacatct

SEQ ID NO: 377363 - DNA, 25 bp, Homo sapien
gaccacatcttcaagtcggaagttg

SEQ ID NO: 377364 - DNA, 25 bp, Homo sapien
tcagcacaagggcatcaatgccagt

SEQ ID NO: 377365 - DNA, 25 bp, Homo sapien
tactgattggctgaaatccccgagg

SEQ ID NO: 377366 - DNA, 25 bp, Homo sapien
tatggctacccgctgggatatagcg

SEQ ID NO: 377367 - DNA, 25 bp, Homo sapien
tcggctatggctacaacggctgtgg

SEQ ID NO: 377368 - DNA, 25 bp, Homo sapien
gctttcggctacaggagatactcgc

SEQ ID NO: 377369 - DNA, 25 bp, Homo sapien
aatcacatgtaaggtgtttctgacc

SEQ ID NO: 377370 - DNA, 25 bp, Homo sapien
tatcctaccagtgatgaaaagcgtg

SEQ ID NO: 377371 - DNA, 25 bp, Homo sapien
gaccagagtccatgaatctactgtg

SEQ ID NO: 377372 - DNA, 25 bp, Homo sapien
gaaaagcgtgcagcagaaacgtgcc

SEQ ID NO: 377373 - DNA, 25 bp, Homo sapien
agaaggagggcgaaatctgtagggt

SEQ ID NO: 377374 - DNA, 25 bp, Homo sapien
gaaggagggcgaaatctgtagggta

SEQ ID NO: 377375 - DNA, 25 bp, Homo sapien
aagaaggagggcgaaatctgtaggg

SEQ ID NO: 377376 - DNA, 25 bp, Homo sapien
cttccatcttcttgctgacttcttg

SEQ ID NO: 377377 - DNA, 25 bp, Homo sapien
tcttgctgacttcttgctgtggtct

SEQ ID NO: 377378 - DNA, 25 bp, Homo sapien
catcttcttgctgacttcttgctgt

SEQ ID NO: 377379 - DNA, 25 bp, Homo sapien
cttgctgtggtctttgtctttgatg

SEQ ID NO: 377380 - DNA, 25 bp, Homo sapien
cttcccatgtgcttgggtgatacat

SEQ ID NO: 377381 - DNA, 25 bp, Homo sapien
tacagctttggtggtagcaacatca

SEQ ID NO: 377382 - DNA, 25 bp, Homo sapien
cccctgaactatggctgtggatgca

SEQ ID NO: 377383 - DNA, 25 bp, Homo sapien
tatgggaccaacttccatgggacct

SEQ ID NO: 377384 - DNA, 25 bp, Homo sapien
aacatcaacaacctgggcggctgct

SEQ ID NO: 377385 - DNA, 25 bp, Homo sapien
ttcccaatgtagaggtagcaaggca

SEQ ID NO: 377386 - DNA, 25 bp, Homo sapien
gcaaggcaatgtgcttaattaacca

SEQ ID NO: 377387 - DNA, 25 bp, Homo sapien
gataccaggttgaataaagggtctg

SEQ ID NO: 377388 - DNA, 25 bp, Homo sapien
tagatctggctggttcagttcagtc

SEQ ID NO: 377389 - DNA, 25 bp, Homo sapien
ttgatgtgacctccgcaatccttgg

SEQ ID NO: 377390 - DNA, 25 bp, Homo sapien
cacctgcaaactgataggtggtgct

SEQ ID NO: 377391 - DNA, 25 bp, Homo sapien
tgagctggcatagcgatgagcacct

SEQ ID NO: 377392 - DNA, 25 bp, Homo sapien
cactcctgatgtccgtcctgttctg

SEQ ID NO: 377393 - DNA, 25 bp, Homo sapien
tgtctctagtggatgtcagcccctg

SEQ ID NO: 377394 - DNA, 25 bp, Homo sapien
tctgccaaccagtgggaggagtctc

SEQ ID NO: 377395 - DNA, 25 bp, Homo sapien
gaacctgctaagtgtgtaggagcca

SEQ ID NO: 377396 - DNA, 25 bp, Homo sapien
gaggagtctctactgtctgccagcc

SEQ ID NO: 377397 - DNA, 25 bp, Homo sapien
gaggacgctgcattgttccagtggc

SEQ ID NO: 377398 - DNA, 25 bp, Homo sapien
gttaccacgacttccaccactgatg

SEQ ID NO: 377399 - DNA, 25 bp, Homo sapien
cactgtcaagagacctgctgtgagc

SEQ ID NO: 377400 - DNA, 25 bp, Homo sapien
tcaactgctccacaagaaattgctc

SEQ ID NO: 377401 - DNA, 25 bp, Homo sapien
tgacagcaccctgattttgatctcc

SEQ ID NO: 377402 - DNA, 25 bp, Homo sapien
cttgacagcaccctgattttgatct

SEQ ID NO: 377403 - DNA, 25 bp, Homo sapien
ttgacagcaccctgattttgatctc

SEQ ID NO: 377404 - DNA, 25 bp, Homo sapien
acctcttcatctgatatggaaaacc

SEQ ID NO: 377405 - DNA, 25 bp, Homo sapien
gtgcctgacctcttcatctgatatg

SEQ ID NO: 377406 - DNA, 25 bp, Homo sapien
ctgacctcttcatctgatatggaaa

SEQ ID NO: 377407 - DNA, 25 bp, Homo sapien
gcctgacctcttcatctgatatgga

SEQ ID NO: 377408 - DNA, 25 bp, Homo sapien
cccatagtctgcagtagagtcccca

SEQ ID NO: 377409 - DNA, 25 bp, Homo sapien
actggtgaagttcccatagtctgca

SEQ ID NO: 377410 - DNA, 25 bp, Homo sapien
tagtctgcagtagagtccccaagag

SEQ ID NO: 377411 - DNA, 25 bp, Homo sapien
ccgtcaagactggtgaagttcccat

SEQ ID NO: 377412 - DNA, 25 bp, Homo sapien
gaattcagtatcagtcagagacgtc

SEQ ID NO: 377413 - DNA, 25 bp, Homo sapien
atgggaattcagtatcagtcagaga

SEQ ID NO: 377414 - DNA, 25 bp, Homo sapien
agtatcagtcagagacgtcctgagg

SEQ ID NO: 377415 - DNA, 25 bp, Homo sapien
tcagtcagagacgtcctgaggaaac

SEQ ID NO: 377416 - DNA, 25 bp, Homo sapien
aaagatgtttgcatccagtttgatc

SEQ ID NO: 377417 - DNA, 25 bp, Homo sapien
cacaaaagatgtttgcatccagttt

SEQ ID NO: 377418 - DNA, 25 bp, Homo sapien
caaaagatgtttgcatccagtttga

SEQ ID NO: 377419 - DNA, 25 bp, Homo sapien
gatgtttgcatccagtttgatcttc

SEQ ID NO: 377420 - DNA, 25 bp, Homo sapien
ttatctgtgaatgacgtctctggtt

SEQ ID NO: 377421 - DNA, 25 bp, Homo sapien
tttatctgtgaatgacgtctctggt

SEQ ID NO: 377422 - DNA, 25 bp, Homo sapien
tatctgtgaatgacgtctctggttc

SEQ ID NO: 377423 - DNA, 25 bp, Homo sapien
ccttttggtatggtgaaggtctgtt

SEQ ID NO: 377424 - DNA, 25 bp, Homo sapien
tgaaccttttggtatggtgaaggtc

SEQ ID NO: 377425 - DNA, 25 bp, Homo sapien
gatgaaccttttggtatggtgaagg

SEQ ID NO: 377426 - DNA, 25 bp, Homo sapien
gtagatgaaccttttggtatggtga

SEQ ID NO: 377427 - DNA, 25 bp, Homo sapien
tggatcaccagatagagttgcttct

SEQ ID NO: 377428 - DNA, 25 bp, Homo sapien
ccgcgtacccatgtaatttagagca

SEQ ID NO: 377429 - DNA, 25 bp, Homo sapien
gcagtacgacaagccacagagagaa

SEQ ID NO: 377430 - DNA, 25 bp, Homo sapien
gtctctgaaacagccgcgtacccat

SEQ ID NO: 377431 - DNA, 25 bp, Homo sapien
aagctgccagggaggcaagatgtct

SEQ ID NO: 377432 - DNA, 25 bp, Homo sapien
gcagattgcttaagatttgccacga

SEQ ID NO: 377433 - DNA, 25 bp, Homo sapien
ccagggaggcaagatgtcttgtaga

SEQ ID NO: 377434 - DNA, 25 bp, Homo sapien
cagtagcctggcgaagcagattgct

SEQ ID NO: 377435 - DNA, 25 bp, Homo sapien
cactgagaccgcgtcgtgatgagga

SEQ ID NO: 377436 - DNA, 25 bp, Homo sapien
tccgaaccaacagcgaggcatgata

SEQ ID NO: 377437 - DNA, 25 bp, Homo sapien
gataaactttgcagtgtggttggcc

SEQ ID NO: 377438 - DNA, 25 bp, Homo sapien
tctccttcagagtatgtacctttcg

SEQ ID NO: 377439 - DNA, 25 bp, Homo sapien
ggttaccactgtcgccgctgtgctg

SEQ ID NO: 377440 - DNA, 25 bp, Homo sapien
tctcttgatggttaccactgtcgcc

SEQ ID NO: 377441 - DNA, 25 bp, Homo sapien
tgtcgccgctgtgctgctcatcaca

SEQ ID NO: 377442 - DNA, 25 bp, Homo sapien
gcatttctcttgatggttaccactg

SEQ ID NO: 377443 - DNA, 25 bp, Homo sapien
ctctccccacactttatgtacacag

SEQ ID NO: 377444 - DNA, 25 bp, Homo sapien
atgtacacagctttgtggtttgtga

SEQ ID NO: 377445 - DNA, 25 bp, Homo sapien
tctccttgaggagattccagttttt

SEQ ID NO: 377446 - DNA, 25 bp, Homo sapien
ctccttgaggagattccagtttttt

SEQ ID NO: 377447 - DNA, 25 bp, Homo sapien
gctacctgctttgccgctgtatatt

SEQ ID NO: 377448 - DNA, 25 bp, Homo sapien
ccaagggtgatactttgcgagggat

SEQ ID NO: 377449 - DNA, 25 bp, Homo sapien
tactttgcgagggatggcctgctga

SEQ ID NO: 377450 - DNA, 25 bp, Homo sapien
ttaagagtcagcgaatgccaagggt

SEQ ID NO: 377451 - DNA, 25 bp, Homo sapien
tgtaggctgggatgccttcactctg

SEQ ID NO: 377452 - DNA, 25 bp, Homo sapien
tccacgggtctgttgtgcccacatg

SEQ ID NO: 377453 - DNA, 25 bp, Homo sapien
gagtcaggtcttggatgtactgatt

SEQ ID NO: 377454 - DNA, 25 bp, Homo sapien
gaataggtgtatgtaacaaggtagg

SEQ ID NO: 377455 - DNA, 25 bp, Homo sapien
aattcttttacagcattcttctcca

SEQ ID NO: 377456 - DNA, 25 bp, Homo sapien
taaattcttttacagcattcttctc

SEQ ID NO: 377457 - DNA, 25 bp, Homo sapien
tttaaattcttttacagcattcttc

SEQ ID NO: 377458 - DNA, 25 bp, Homo sapien
attcttttacagcattcttctccag

SEQ ID NO: 377459 - DNA, 25 bp, Homo sapien
tcttcaaatatcagatcaattgtaa

SEQ ID NO: 377460 - DNA, 25 bp, Homo sapien
aatatcagatcaattgtaagaaact

SEQ ID NO: 377461 - DNA, 25 bp, Homo sapien
tcaattgtaagaaactggacaggac

SEQ ID NO: 377462 - DNA, 25 bp, Homo sapien
tcagatcaattgtaagaaactggac

SEQ ID NO: 377463 - DNA, 25 bp, Homo sapien
catgtcccaaagcaataatttcctg

SEQ ID NO: 377464 - DNA, 25 bp, Homo sapien
tcttcgtaagatgtagcatgtccca

SEQ ID NO: 377465 - DNA, 25 bp, Homo sapien
tccacttcttcgtaagatgtagcat

SEQ ID NO: 377466 - DNA, 25 bp, Homo sapien
gatgtagcatgtcccaaagcaataa

SEQ ID NO: 377467 - DNA, 25 bp, Homo sapien
gcagctaaggacagttttgttacac

SEQ ID NO: 377468 - DNA, 25 bp, Homo sapien
cacaatctgactctgtgctgagtta

SEQ ID NO: 377469 - DNA, 25 bp, Homo sapien
gaagaaatctgtgagtcctagggca

SEQ ID NO: 377470 - DNA, 25 bp, Homo sapien
tctgacctcagggacgagagccagc

SEQ ID NO: 377471 - DNA, 25 bp, Homo sapien
taaactcgtgaaaggatgacctgag

SEQ ID NO: 377472 - DNA, 25 bp, Homo sapien
agtaatcccctgtaatgatgcatgg

SEQ ID NO: 377473 - DNA, 25 bp, Homo sapien
tgggttctgtaatgccttgcagaca

SEQ ID NO: 377474 - DNA, 25 bp, Homo sapien
cttgcagacatgtttccggctccct

SEQ ID NO: 377475 - DNA, 25 bp, Homo sapien
gaggtgtgagcgctcatctgtgctg

SEQ ID NO: 377476 - DNA, 25 bp, Homo sapien
tgtgagcgctcatctgtgctgaaga

SEQ ID NO: 377477 - DNA, 25 bp, Homo sapien
ggtgtgagcgctcatctgtgctgaa

SEQ ID NO: 377478 - DNA, 25 bp, Homo sapien
gtgtgagcgctcatctgtgctgaag

SEQ ID NO: 377479 - DNA, 25 bp, Homo sapien
cttggtcatcctatcgcaagtttca

SEQ ID NO: 377480 - DNA, 25 bp, Homo sapien
gacaacgggtctggaaatttctgta

SEQ ID NO: 377481 - DNA, 25 bp, Homo sapien
ttcactctccaaaatagacaacggg

SEQ ID NO: 377482 - DNA, 25 bp, Homo sapien
tcctatcgcaagtttcactctccaa

SEQ ID NO: 377483 - DNA, 25 bp, Homo sapien
ggctgagaagtggaggaagtcacac

SEQ ID NO: 377484 - DNA, 25 bp, Homo sapien
ctatgtcataggctgagaagtggag

SEQ ID NO: 377485 - DNA, 25 bp, Homo sapien
cataggctgagaagtggaggaagtc

SEQ ID NO: 377486 - DNA, 25 bp, Homo sapien
taggctgagaagtggaggaagtcac

SEQ ID NO: 377487 - DNA, 25 bp, Homo sapien
taagtaatttagtaggctgttttca

SEQ ID NO: 377488 - DNA, 25 bp, Homo sapien
tgatgaagcccgctgtgtgtctttc

SEQ ID NO: 377489 - DNA, 25 bp, Homo sapien
gatgaagcccgctgtgtgtctttct

SEQ ID NO: 377490 - DNA, 25 bp, Homo sapien
ttcttcacaaggtctaagtaattta

SEQ ID NO: 377491 - DNA, 25 bp, Homo sapien
agatttcatcggtgatgaggaaagt

SEQ ID NO: 377492 - DNA, 25 bp, Homo sapien
aagaaaagatttcatcggtgatgag

SEQ ID NO: 377493 - DNA, 25 bp, Homo sapien
ttgaagacaatagtaggaaggccat

SEQ ID NO: 377494 - DNA, 25 bp, Homo sapien
gaaaagatttcatcggtgatgagga

SEQ ID NO: 377495 - DNA, 25 bp, Homo sapien
ctagaggagttagaagccacagctt

SEQ ID NO: 377496 - DNA, 25 bp, Homo sapien
cttggagggtgaggtattcagggca

SEQ ID NO: 377497 - DNA, 25 bp, Homo sapien
agggtgaggtattcagggcagaggc

SEQ ID NO: 377498 - DNA, 25 bp, Homo sapien
tggagggtgaggtattcagggcaga

SEQ ID NO: 377499 - DNA, 25 bp, Homo sapien
ctcttctctcctctttggctctggt

SEQ ID NO: 377500 - DNA, 25 bp, Homo sapien
tcttctctcctctttggctctggtc

SEQ ID NO: 377501 - DNA, 25 bp, Homo sapien
gttgttttagatcctgccagcaggg

SEQ ID NO: 377502 - DNA, 25 bp, Homo sapien
agcagcttggagttgttttagatcc

SEQ ID NO: 377503 - DNA, 25 bp, Homo sapien
ctgggggccagatgaaggccacatg

SEQ ID NO: 377504 - DNA, 25 bp, Homo sapien
ccagatgaaggccacatgtcagggc

SEQ ID NO: 377505 - DNA, 25 bp, Homo sapien
gtctggtgtcctccgtctgatggtg

SEQ ID NO: 377506 - DNA, 25 bp, Homo sapien
tgggtctggtgtcctccgtctgatg

SEQ ID NO: 377507 - DNA, 25 bp, Homo sapien
agggctgtgtttgggtctggtgtcc

SEQ ID NO: 377508 - DNA, 25 bp, Homo sapien
gtgtcctccgtctgatggtgagtca

SEQ ID NO: 377509 - DNA, 25 bp, Homo sapien
cctgtctattttgatgcactgtgaa

SEQ ID NO: 377510 - DNA, 25 bp, Homo sapien
tgtggacgcgttaaggccaagcctc

SEQ ID NO: 377511 - DNA, 25 bp, Homo sapien
cttgattgggctttgtgaaaaggcc

SEQ ID NO: 377512 - DNA, 25 bp, Homo sapien
gaattcccaagacgagcttccagtt

SEQ ID NO: 377513 - DNA, 25 bp, Homo sapien
accaggtacgttggaaggaagtgct

SEQ ID NO: 377514 - DNA, 25 bp, Homo sapien
ggaacaggactcagaccaggtacgt

SEQ ID NO: 377515 - DNA, 25 bp, Homo sapien
agctcctttgccgtcaagaactggg

SEQ ID NO: 377516 - DNA, 25 bp, Homo sapien
cactgcaactgaccaataagctcct

SEQ ID NO: 377517 - DNA, 25 bp, Homo sapien
catgccaacaagagcggagactgat

SEQ ID NO: 377518 - DNA, 25 bp, Homo sapien
gaggcctgcttagctgaagaaatcc

SEQ ID NO: 377519 - DNA, 25 bp, Homo sapien
caaagatccgtctccgtgtggtagg

SEQ ID NO: 377520 - DNA, 25 bp, Homo sapien
atttcccggagtctgtgcatgcacg

SEQ ID NO: 377521 - DNA, 25 bp, Homo sapien
gcaacagggcatccagttctcactg

SEQ ID NO: 377522 - DNA, 25 bp, Homo sapien
tcagacgcctctttgagggccctgc

SEQ ID NO: 377523 - DNA, 25 bp, Homo sapien
ctgacagccgtgatgagagccgatt

SEQ ID NO: 377524 - DNA, 25 bp, Homo sapien
gatagaaggcgtgttctcttccccg

SEQ ID NO: 377525 - DNA, 25 bp, Homo sapien
aagaggaagccaagcagggccggtc

SEQ ID NO: 377526 - DNA, 25 bp, Homo sapien
agcagggccggtcagaaagttgatc

SEQ ID NO: 377527 - DNA, 25 bp, Homo sapien
cagagtccctgaggaataaagttga

SEQ ID NO: 377528 - DNA, 25 bp, Homo sapien
tgatctgaggctttgcagagtccct

SEQ ID NO: 377529 - DNA, 25 bp, Homo sapien
cgtgaaacgcagtaaaagcactggg

SEQ ID NO: 377530 - DNA, 25 bp, Homo sapien
ggccgtgaaacgcagtaaaagcact

SEQ ID NO: 377531 - DNA, 25 bp, Homo sapien
tacaagagggccgtgaaacgcagta

SEQ ID NO: 377532 - DNA, 25 bp, Homo sapien
ctaatatacaagagggccgtgaaac

SEQ ID NO: 377533 - DNA, 25 bp, Homo sapien
aagatgaattccttccctcttttga

SEQ ID NO: 377534 - DNA, 25 bp, Homo sapien
cttgtaagatgaattccttccctct

SEQ ID NO: 377535 - DNA, 25 bp, Homo sapien
atgaattccttccctcttttgaact

SEQ ID NO: 377536 - DNA, 25 bp, Homo sapien
ctctcccaagtgacttgtaagatga

SEQ ID NO: 377537 - DNA, 25 bp, Homo sapien
aggacaggatgggtcttaatgattt

SEQ ID NO: 377538 - DNA, 25 bp, Homo sapien
caggatgggtcttaatgattttggt

SEQ ID NO: 377539 - DNA, 25 bp, Homo sapien
gacaggatgggtcttaatgattttg

SEQ ID NO: 377540 - DNA, 25 bp, Homo sapien
gtaggacaggatgggtcttaatgat

SEQ ID NO: 377541 - DNA, 25 bp, Homo sapien
ttcctgtccatagaagcggtaaatt

SEQ ID NO: 377542 - DNA, 25 bp, Homo sapien
ctgtccatagaagcggtaaattgtc

SEQ ID NO: 377543 - DNA, 25 bp, Homo sapien
ctctatcaacttgttttcttccaac

SEQ ID NO: 377544 - DNA, 25 bp, Homo sapien
catagaagcggtaaattgtctccat

SEQ ID NO: 377545 - DNA, 25 bp, Homo sapien
actgtccccatttgtcacatccatg

SEQ ID NO: 377546 - DNA, 25 bp, Homo sapien
cctttgtgcagtttcctcgccagca

SEQ ID NO: 377547 - DNA, 25 bp, Homo sapien
tccatgtctggatacttcttactga

SEQ ID NO: 377548 - DNA, 25 bp, Homo sapien
agcctggatcccgtgactcctttgt

SEQ ID NO: 377549 - DNA, 25 bp, Homo sapien
ttgtctgaactcttcgccccagtct

SEQ ID NO: 377550 - DNA, 25 bp, Homo sapien
cagtctgcctccgttgtccctctac

SEQ ID NO: 377551 - DNA, 25 bp, Homo sapien
ggtctcttgtctgaactcttcgccc

SEQ ID NO: 377552 - DNA, 25 bp, Homo sapien
ccccagtctgcctccgttgtccctc

SEQ ID NO: 377553 - DNA, 25 bp, Homo sapien
ctcatttgtgttgaagtggctcttc

SEQ ID NO: 377554 - DNA, 25 bp, Homo sapien
tctcatttgtgttgaagtggctctt

SEQ ID NO: 377555 - DNA, 25 bp, Homo sapien
taatatcccaatgtgtgccttatgg

SEQ ID NO: 377556 - DNA, 25 bp, Homo sapien
tactagagagtccacgggaactgat

SEQ ID NO: 377557 - DNA, 25 bp, Homo sapien
gttccttgggacaatccagttccta

SEQ ID NO: 377558 - DNA, 25 bp, Homo sapien
tcaccacacggctgtctgacattgc

SEQ ID NO: 377559 - DNA, 25 bp, Homo sapien
cattcagccgttcccatgcagcaga

SEQ ID NO: 377560 - DNA, 25 bp, Homo sapien
tggaaacattcagccgttcccatgc

SEQ ID NO: 377561 - DNA, 25 bp, Homo sapien
aaagaagagcgaaaatcatgtgcaa

SEQ ID NO: 377562 - DNA, 25 bp, Homo sapien
ctttgtggaaacattcagccgttcc

SEQ ID NO: 377563 - DNA, 25 bp, Homo sapien
taaggcttcgtacaattgtccaagg

SEQ ID NO: 377564 - DNA, 25 bp, Homo sapien
ccaaggttgactggacccaaggtag

SEQ ID NO: 377565 - DNA, 25 bp, Homo sapien
ttgcttctgcgcctctctctgggta

SEQ ID NO: 377566 - DNA, 25 bp, Homo sapien
caaggtagtcccatgacctggacca

SEQ ID NO: 377567 - DNA, 25 bp, Homo sapien
tctgggtctcgctggcctgaatgct

SEQ ID NO: 377568 - DNA, 25 bp, Homo sapien
agacacactccccttggtagaacat

SEQ ID NO: 377569 - DNA, 25 bp, Homo sapien
cagcctttatcaatggatgtctaag

SEQ ID NO: 377570 - DNA, 25 bp, Homo sapien
cttaaagaaacgttggcctgagact

SEQ ID NO: 377571 - DNA, 25 bp, Homo sapien
gaattcagctgtgtgtctcactcct

SEQ ID NO: 377572 - DNA, 25 bp, Homo sapien
tgttaactgagtaagcattcactag

SEQ ID NO: 377573 - DNA, 25 bp, Homo sapien
tgtgccacggtcaggtggcttccaa

SEQ ID NO: 377574 - DNA, 25 bp, Homo sapien
tacatgagacaatggacccaaggcc

SEQ ID NO: 377575 - DNA, 25 bp, Homo sapien
ggcagcatatcccatgacacttata

SEQ ID NO: 377576 - DNA, 25 bp, Homo sapien
ctttgtctgggaagaggctactgct

SEQ ID NO: 377577 - DNA, 25 bp, Homo sapien
gaatcctctttcgagtacctttgct

SEQ ID NO: 377578 - DNA, 25 bp, Homo sapien
tgaagtagataaccctggcagcata

SEQ ID NO: 377579 - DNA, 25 bp, Homo sapien
ctgtcttctacatggaagacagaag

SEQ ID NO: 377580 - DNA, 25 bp, Homo sapien
tgccatcttgtcaactttcaagttt

SEQ ID NO: 377581 - DNA, 25 bp, Homo sapien
cctctgtcttctacatggaagacag

SEQ ID NO: 377582 - DNA, 25 bp, Homo sapien
tgtgatatgctcgtggaagagcccc

SEQ ID NO: 377583 - DNA, 25 bp, Homo sapien
ttcagaagatgatggtattggcggt

SEQ ID NO: 377584 - DNA, 25 bp, Homo sapien
tatctgcagagcgacatgcaaataa

SEQ ID NO: 377585 - DNA, 25 bp, Homo sapien
tattggcggtagtgttgttaatgtg

SEQ ID NO: 377586 - DNA, 25 bp, Homo sapien
gaatcccatactgagtcttctgctg

SEQ ID NO: 377587 - DNA, 25 bp, Homo sapien
ctcccgacagctcccactaatcccc

SEQ ID NO: 377588 - DNA, 25 bp, Homo sapien
agctcccactaatccccagtcctct

SEQ ID NO: 377589 - DNA, 25 bp, Homo sapien
acagctcccactaatccccagtcct

SEQ ID NO: 377590 - DNA, 25 bp, Homo sapien
cgacagctcccactaatccccagtc

SEQ ID NO: 377591 - DNA, 25 bp, Homo sapien
gattgaattaccaactttgaactga

SEQ ID NO: 377592 - DNA, 25 bp, Homo sapien
tcatgtttggtacgttctgctcctc

SEQ ID NO: 377593 - DNA, 25 bp, Homo sapien
ctagagatgctgataggaggcaaga

SEQ ID NO: 377594 - DNA, 25 bp, Homo sapien
ggtgactcaaagccacagtagccag

SEQ ID NO: 377595 - DNA, 25 bp, Homo sapien
gctccagtttcagatgtagtgggag

SEQ ID NO: 377596 - DNA, 25 bp, Homo sapien
tcagtccatctctaatggtggaata

SEQ ID NO: 377597 - DNA, 25 bp, Homo sapien
tcttgctccagtttcagatgtagtg

SEQ ID NO: 377598 - DNA, 25 bp, Homo sapien
tggtggaataaaaggctctcttgct

SEQ ID NO: 377599 - DNA, 25 bp, Homo sapien
aaacttgtaattgcctgtgagagga

SEQ ID NO: 377600 - DNA, 25 bp, Homo sapien
tgttcagggcatacacaatttgttt

SEQ ID NO: 377601 - DNA, 25 bp, Homo sapien
ggaacacacttgagaattctaccag

SEQ ID NO: 377602 - DNA, 25 bp, Homo sapien
tgtcatgtggattcctctggtgcca

SEQ ID NO: 377603 - DNA, 25 bp, Homo sapien
taatcgtcgcatttactggctccag

SEQ ID NO: 377604 - DNA, 25 bp, Homo sapien
catctgaaaacactcggaagtctgg

SEQ ID NO: 377605 - DNA, 25 bp, Homo sapien
cacaatgtccacttcctaagaaggg

SEQ ID NO: 377606 - DNA, 25 bp, Homo sapien
tatcatctccggttcgatcgcgtcc

SEQ ID NO: 377607 - DNA, 25 bp, Homo sapien
gagagggtggcgattcatgtttcaa

SEQ ID NO: 377608 - DNA, 25 bp, Homo sapien
tactctgtgtccatgttcggaagct

SEQ ID NO: 377609 - DNA, 25 bp, Homo sapien
tcttccatgtctgagaatctccgtg

SEQ ID NO: 377610 - DNA, 25 bp, Homo sapien
ggtctatggctggtcttactctgtg

SEQ ID NO: 377611 - DNA, 25 bp, Homo sapien
tctggatacccttgttcataaagtc

SEQ ID NO: 377612 - DNA, 25 bp, Homo sapien
aagtctgtattgtggcttttggtgg

SEQ ID NO: 377613 - DNA, 25 bp, Homo sapien
tcataaagtctgtattgtggctttt

SEQ ID NO: 377614 - DNA, 25 bp, Homo sapien
gagttggtatggagttgaatttgcc

SEQ ID NO: 377615 - DNA, 25 bp, Homo sapien
tgggaaaaccagcatgggacgtcca

SEQ ID NO: 377616 - DNA, 25 bp, Homo sapien
catatgagaggatgctctcttcaga

SEQ ID NO: 377617 - DNA, 25 bp, Homo sapien
cgtcgctgtccttgctgcgttgaga

SEQ ID NO: 377618 - DNA, 25 bp, Homo sapien
gcgttgagacgtggccgtagatttt

SEQ ID NO: 377619 - DNA, 25 bp, Homo sapien
agtttagcctttgacagcttcccag

SEQ ID NO: 377620 - DNA, 25 bp, Homo sapien
ttagccaggtgaaatcaaagcctga

SEQ ID NO: 377621 - DNA, 25 bp, Homo sapien
aagcgagtgcagctccggggtctca

SEQ ID NO: 377622 - DNA, 25 bp, Homo sapien
ctggtgggaagcgagtgcagctccg

SEQ ID NO: 377623 - DNA, 25 bp, Homo sapien
cagggctttgctgactggtcccatg

SEQ ID NO: 377624 - DNA, 25 bp, Homo sapien
tgtgtcgctctgactccgtggttct

SEQ ID NO: 377625 - DNA, 25 bp, Homo sapien
tggagaggacggaagaggctccagg

SEQ ID NO: 377626 - DNA, 25 bp, Homo sapien
cagagtcctgtataatatgaggttc

SEQ ID NO: 377627 - DNA, 25 bp, Homo sapien
ctgtaggactttcttgtgtgcacat

SEQ ID NO: 377628 - DNA, 25 bp, Homo sapien
tgattccccctgtatgtgtatattc

SEQ ID NO: 377629 - DNA, 25 bp, Homo sapien
ttcctgttttgattccccctgtatg

SEQ ID NO: 377630 - DNA, 25 bp, Homo sapien
ttttgattccccctgtatgtgtata

SEQ ID NO: 377631 - DNA, 25 bp, Homo sapien
aatccaaacgacactgcccccgcaa

SEQ ID NO: 377632 - DNA, 25 bp, Homo sapien
aaagcaattgcgtgtgattttgttt

SEQ ID NO: 377633 - DNA, 25 bp, Homo sapien
agcaattgcgtgtgattttgtttcc

SEQ ID NO: 377634 - DNA, 25 bp, Homo sapien
ctgaatccaaacgacactgcccccg

SEQ ID NO: 377635 - DNA, 25 bp, Homo sapien
cagacttggaatcctcagatgagac

SEQ ID NO: 377636 - DNA, 25 bp, Homo sapien
tgatttcatctgacagggcacagcc

SEQ ID NO: 377637 - DNA, 25 bp, Homo sapien
cacagctgtatgtggttaccaggcc

SEQ ID NO: 377638 - DNA, 25 bp, Homo sapien
ctctccatggacgaagtgtttttgc

SEQ ID NO: 377639 - DNA, 25 bp, Homo sapien
gcaattactgtccatgttgacccac

SEQ ID NO: 377640 - DNA, 25 bp, Homo sapien
ggtggcttttagcaattactgtcca

SEQ ID NO: 377641 - DNA, 25 bp, Homo sapien
cttctctctctgattggtagcagag

SEQ ID NO: 377642 - DNA, 25 bp, Homo sapien
ttctccagccacgactgagccttat

SEQ ID NO: 377643 - DNA, 25 bp, Homo sapien
ctcagtactgggatgtggatgggca

SEQ ID NO: 377644 - DNA, 25 bp, Homo sapien
ttggtagcagagctgtcgtgctttg

SEQ ID NO: 377645 - DNA, 25 bp, Homo sapien
cctcgtaaactgtcggcctgctgtg

SEQ ID NO: 377646 - DNA, 25 bp, Homo sapien
tgaaaaccgaagacagtcaggcggc

SEQ ID NO: 377647 - DNA, 25 bp, Homo sapien
tggcctggagctcgattctgaaaac

SEQ ID NO: 377648 - DNA, 25 bp, Homo sapien
ccgtgaaagtcgaaggcaccttgct

SEQ ID NO: 377649 - DNA, 25 bp, Homo sapien
gaatgattggcccactttacgtatg

SEQ ID NO: 377650 - DNA, 25 bp, Homo sapien
tgtataagccgaactctggaaggtg

SEQ ID NO: 377651 - DNA, 25 bp, Homo sapien
gataatgtagtggacctgatcccct

SEQ ID NO: 377652 - DNA, 25 bp, Homo sapien
gatcaggaatcgaaggttaagccaa

SEQ ID NO: 377653 - DNA, 25 bp, Homo sapien
cattgtgccatgatgttatccgtca

SEQ ID NO: 377654 - DNA, 25 bp, Homo sapien
ttagcttgcttaggtttaacccagc

SEQ ID NO: 377655 - DNA, 25 bp, Homo sapien
cagctgctaaaggaggacttccgac

SEQ ID NO: 377656 - DNA, 25 bp, Homo sapien
catatttaccaactagtggcctggt

SEQ ID NO: 377657 - DNA, 25 bp, Homo sapien
tcaattaaagattcggccgggtgtg

SEQ ID NO: 377658 - DNA, 25 bp, Homo sapien
tcccaagaggtgtgttcttactacc

SEQ ID NO: 377659 - DNA, 25 bp, Homo sapien
caaagaactgttctgatagcgtgtt

SEQ ID NO: 377660 - DNA, 25 bp, Homo sapien
tttgcctcccaagtcaagtattcaa

SEQ ID NO: 377661 - DNA, 25 bp, Homo sapien
cacccggaggaagtggaagcactac

SEQ ID NO: 377662 - DNA, 25 bp, Homo sapien
tgtacgagaacttccggcgggagct

SEQ ID NO: 377663 - DNA, 25 bp, Homo sapien
gcatggcagcggtagaatctcaatc

SEQ ID NO: 377664 - DNA, 25 bp, Homo sapien
aaatcgtgtgctctcacggagggcg

SEQ ID NO: 377665 - DNA, 25 bp, Homo sapien
cacggccaggttgtactgagcatgt

SEQ ID NO: 377666 - DNA, 25 bp, Homo sapien
gaagattgcctcattgttctagggt

SEQ ID NO: 377667 - DNA, 25 bp, Homo sapien
ggctagttcgtctttgggcctgaac

SEQ ID NO: 377668 - DNA, 25 bp, Homo sapien
aaacctgccgtttgatggagcctta

SEQ ID NO: 377669 - DNA, 25 bp, Homo sapien
gagagccgtttaaggaggatgccca

SEQ ID NO: 377670 - DNA, 25 bp, Homo sapien
gaaattcggaaattcgcagagagcc

SEQ ID NO: 377671 - DNA, 25 bp, Homo sapien
aaagggagccaaccgggtagcaatg

SEQ ID NO: 377672 - DNA, 25 bp, Homo sapien
tggcagctggcaccgtaatgagtcc

SEQ ID NO: 377673 - DNA, 25 bp, Homo sapien
gtgtctttgacactttgaaggtgaa

SEQ ID NO: 377674 - DNA, 25 bp, Homo sapien
tagttttggtaatacttccagtaca

SEQ ID NO: 377675 - DNA, 25 bp, Homo sapien
aactgcttatttgacacatgacaca

SEQ ID NO: 377676 - DNA, 25 bp, Homo sapien
ctcagccccatcaatttttgcgggt

SEQ ID NO: 377677 - DNA, 25 bp, Homo sapien
gaaggggacctcttgatatcctgac

SEQ ID NO: 377678 - DNA, 25 bp, Homo sapien
gcagctatgggttgggaattggctt

SEQ ID NO: 377679 - DNA, 25 bp, Homo sapien
tcttggctgcatggtaagggaacag

SEQ ID NO: 377680 - DNA, 25 bp, Homo sapien
ccctctgtgtgcgaaggcagctatg

SEQ ID NO: 377681 - DNA, 25 bp, Homo sapien
ctttgtgtagcatccatagccccag

SEQ ID NO: 377682 - DNA, 25 bp, Homo sapien
tcctttgtgtagcatccatagcccc

SEQ ID NO: 377683 - DNA, 25 bp, Homo sapien
tttgtgtagcatccatagccccagc

SEQ ID NO: 377684 - DNA, 25 bp, Homo sapien
agttcctttgtgtagcatccatagc

SEQ ID NO: 377685 - DNA, 25 bp, Homo sapien
ggataacctgttaactgttcatcat

SEQ ID NO: 377686 - DNA, 25 bp, Homo sapien
ctattgaattgtagagactctcagc

SEQ ID NO: 377687 - DNA, 25 bp, Homo sapien
tcagctctattaccatcctgtggca

SEQ ID NO: 377688 - DNA, 25 bp, Homo sapien
tccttttgagtactaggataacctg

SEQ ID NO: 377689 - DNA, 25 bp, Homo sapien
tcatctgtgttccatagttacgggc

SEQ ID NO: 377690 - DNA, 25 bp, Homo sapien
tcttgttttaataccctcatctgtg

SEQ ID NO: 377691 - DNA, 25 bp, Homo sapien
gtgctgtagaatcccaatggtgtct

SEQ ID NO: 377692 - DNA, 25 bp, Homo sapien
cctgtctggtcttttgtgctgtaga

SEQ ID NO: 377693 - DNA, 25 bp, Homo sapien
tttcaaggcaactgttctatacagc

SEQ ID NO: 377694 - DNA, 25 bp, Homo sapien
aaagacattagtgtttttcaaggca

SEQ ID NO: 377695 - DNA, 25 bp, Homo sapien
tcagagtcacagcatgagctgaccc

SEQ ID NO: 377696 - DNA, 25 bp, Homo sapien
acagccaccatacaggggtcagagt

SEQ ID NO: 377697 - DNA, 25 bp, Homo sapien
tgcaagcccctccttgctagacttg

SEQ ID NO: 377698 - DNA, 25 bp, Homo sapien
cttgtccagaggcatctgtttgcaa

SEQ ID NO: 377699 - DNA, 25 bp, Homo sapien
cagaggcatctgtttgcaagcccct

SEQ ID NO: 377700 - DNA, 25 bp, Homo sapien
cctccttgctagacttgagctcctt

SEQ ID NO: 377701 - DNA, 25 bp, Homo sapien
ccagactttattggagtggttttgg

SEQ ID NO: 377702 - DNA, 25 bp, Homo sapien
cccagactttattggagtggttttg

SEQ ID NO: 377703 - DNA, 25 bp, Homo sapien
ttaggaatcaggtgtgtcccggttg

SEQ ID NO: 377704 - DNA, 25 bp, Homo sapien
taggaatcaggtgtgtcccggttgt

SEQ ID NO: 377705 - DNA, 25 bp, Homo sapien
ggaatcaggtgtgtcccggttgtaa

SEQ ID NO: 377706 - DNA, 25 bp, Homo sapien
aatcaggtgtgtcccggttgtaagt

SEQ ID NO: 377707 - DNA, 25 bp, Homo sapien
gaaaggcagcgagtgacctggattt

SEQ ID NO: 377708 - DNA, 25 bp, Homo sapien
ttttcctgcttaatttctggaccaa

SEQ ID NO: 377709 - DNA, 25 bp, Homo sapien
tctttttcctgcttaatttctggac

SEQ ID NO: 377710 - DNA, 25 bp, Homo sapien
gggatttgagaagctctttttcctg

SEQ ID NO: 377711 - DNA, 25 bp, Homo sapien
gatttgagaagctctttttcctgct

SEQ ID NO: 377712 - DNA, 25 bp, Homo sapien
tgtctcatcaagtaggcacatgtac

SEQ ID NO: 377713 - DNA, 25 bp, Homo sapien
tgtgattgtgcagtaacctaaagaa

SEQ ID NO: 377714 - DNA, 25 bp, Homo sapien
gcaaagctgctgttactctgtgatt

SEQ ID NO: 377715 - DNA, 25 bp, Homo sapien
ttttgatttctaggaacttctctgc

SEQ ID NO: 377716 - DNA, 25 bp, Homo sapien
gagcagattcgaccgtcttttccat

SEQ ID NO: 377717 - DNA, 25 bp, Homo sapien
gaccgtcttttccattgatcacttc

SEQ ID NO: 377718 - DNA, 25 bp, Homo sapien
acatgctctgtgttgcccccttgcc

SEQ ID NO: 377719 - DNA, 25 bp, Homo sapien
gcctgtgagcagattcgaccgtctt

SEQ ID NO: 377720 - DNA, 25 bp, Homo sapien
tttctgggagccgacctcagcgttt

SEQ ID NO: 377721 - DNA, 25 bp, Homo sapien
gcgttcacgtgctcagttgcaggta

SEQ ID NO: 377722 - DNA, 25 bp, Homo sapien
caggcaccttagcacgaaagtgagc

SEQ ID NO: 377723 - DNA, 25 bp, Homo sapien
tcccacaaggagtcgtcaggactgt

SEQ ID NO: 377724 - DNA, 25 bp, Homo sapien
gatttggtcgtatttgaatgtactg

SEQ ID NO: 377725 - DNA, 25 bp, Homo sapien
cagggatttggtcgtatttgaatgt

SEQ ID NO: 377726 - DNA, 25 bp, Homo sapien
acagcagggatttggtcgtatttga

SEQ ID NO: 377727 - DNA, 25 bp, Homo sapien
tcaagggtggttacggacagcaggg

SEQ ID NO: 377728 - DNA, 25 bp, Homo sapien
tccggaaaggctgggcgccctggta

SEQ ID NO: 377729 - DNA, 25 bp, Homo sapien
ggaaaggctgggcgccctggtacat

SEQ ID NO: 377730 - DNA, 25 bp, Homo sapien
cggaaaggctgggcgccctggtaca

SEQ ID NO: 377731 - DNA, 25 bp, Homo sapien
ctccggaaaggctgggcgccctggt

SEQ ID NO: 377732 - DNA, 25 bp, Homo sapien
tgtcgcgtaaacattggcatggcag

SEQ ID NO: 377733 - DNA, 25 bp, Homo sapien
gatgtcacatttggttgcctgggtt

SEQ ID NO: 377734 - DNA, 25 bp, Homo sapien
tccgggaactccttggatgtcacat

SEQ ID NO: 377735 - DNA, 25 bp, Homo sapien
catggcagtgggtaaacacaagctc

SEQ ID NO: 377736 - DNA, 25 bp, Homo sapien
aaacagagacatttagatgagcatg

SEQ ID NO: 377737 - DNA, 25 bp, Homo sapien
acatttagatgagcatgtctaatgg

SEQ ID NO: 377738 - DNA, 25 bp, Homo sapien
cagagacatttagatgagcatgtct

SEQ ID NO: 377739 - DNA, 25 bp, Homo sapien
tataaacagagacatttagatgagc

SEQ ID NO: 377740 - DNA, 25 bp, Homo sapien
ttctttcaagggctgtctggacacg

SEQ ID NO: 377741 - DNA, 25 bp, Homo sapien
tcctttctccgcatgtacacagtgg

SEQ ID NO: 377742 - DNA, 25 bp, Homo sapien
tacacagtggcttggagaaaccttt

SEQ ID NO: 377743 - DNA, 25 bp, Homo sapien
tctggacacggagcagataaaacct

SEQ ID NO: 377744 - DNA, 25 bp, Homo sapien
agttggctgcgggtaatcctctgtc

SEQ ID NO: 377745 - DNA, 25 bp, Homo sapien
gatggcccatttggagatcttgaca

SEQ ID NO: 377746 - DNA, 25 bp, Homo sapien
agggttgctgagtctccccacttgc

SEQ ID NO: 377747 - DNA, 25 bp, Homo sapien
ccccacttgcaatctgaggctttga

SEQ ID NO: 377748 - DNA, 25 bp, Homo sapien
gaagaggaggctggttggtaccatg

SEQ ID NO: 377749 - DNA, 25 bp, Homo sapien
aggctggttggtaccatgggcataa

SEQ ID NO: 377750 - DNA, 25 bp, Homo sapien
ccatgggcataatgctctgaatcct

SEQ ID NO: 377751 - DNA, 25 bp, Homo sapien
ggttggtaccatgggcataatgctc

SEQ ID NO: 377752 - DNA, 25 bp, Homo sapien
gggcaagaatctctacagtcaaggt

SEQ ID NO: 377753 - DNA, 25 bp, Homo sapien
gcaagaatctctacagtcaaggtgc

SEQ ID NO: 377754 - DNA, 25 bp, Homo sapien
ggtgggcaagaatctctacagtcaa

SEQ ID NO: 377755 - DNA, 25 bp, Homo sapien
ttggtgggcaagaatctctacagtc

SEQ ID NO: 377756 - DNA, 25 bp, Homo sapien
tcttgtactgaatcgtagagcttcc

SEQ ID NO: 377757 - DNA, 25 bp, Homo sapien
caaggaggcgtcgttttcatgagta

SEQ ID NO: 377758 - DNA, 25 bp, Homo sapien
cacttttagggaagagatcatcact

SEQ ID NO: 377759 - DNA, 25 bp, Homo sapien
tagagcttcctctagtaccttgcag

SEQ ID NO: 377760 - DNA, 25 bp, Homo sapien
tcgttgggtaattgcaggtcagtgc

SEQ ID NO: 377761 - DNA, 25 bp, Homo sapien
tctggctccagggtaaagagattcg

SEQ ID NO: 377762 - DNA, 25 bp, Homo sapien
aaacgtgcgcgccttgttgagcagc

SEQ ID NO: 377763 - DNA, 25 bp, Homo sapien
ctgaacgaggataggtgagagcccc

SEQ ID NO: 377764 - DNA, 25 bp, Homo sapien
tttctctgaacgttcgtgcataagg

SEQ ID NO: 377765 - DNA, 25 bp, Homo sapien
gcatcttttcttttgcggtgatgtg

SEQ ID NO: 377766 - DNA, 25 bp, Homo sapien
gtttctctgaacgtccgtgcatgca

SEQ ID NO: 377767 - DNA, 25 bp, Homo sapien
cttttgcggtgatgtgtgttatttt

SEQ ID NO: 377768 - DNA, 25 bp, Homo sapien
gatggcttcaaattcgcagatcttg

SEQ ID NO: 377769 - DNA, 25 bp, Homo sapien
ttgaagacaccttgattcctgacca

SEQ ID NO: 377770 - DNA, 25 bp, Homo sapien
cctgaccaagttggttctggagacc

SEQ ID NO: 377771 - DNA, 25 bp, Homo sapien
ggctgatggcttcaaattcgcagat

SEQ ID NO: 377772 - DNA, 25 bp, Homo sapien
ttttgttctatgaaggcttgaaaag

SEQ ID NO: 377773 - DNA, 25 bp, Homo sapien
taactgctgaaattactgcgagttg

SEQ ID NO: 377774 - DNA, 25 bp, Homo sapien
tgagggtacacctgaatgtggtcag

SEQ ID NO: 377775 - DNA, 25 bp, Homo sapien
tactgcgagttgagggtacacctga

SEQ ID NO: 377776 - DNA, 25 bp, Homo sapien
ggtacacctgaatgtggtcagttaa

SEQ ID NO: 377777 - DNA, 25 bp, Homo sapien
catctgagagcatagggttgaactt

SEQ ID NO: 377778 - DNA, 25 bp, Homo sapien
tgtttgtcaacttgctggctgagcc

SEQ ID NO: 377779 - DNA, 25 bp, Homo sapien
tccacaccggtagtaactcttggtg

SEQ ID NO: 377780 - DNA, 25 bp, Homo sapien
gatgacttatcttggcgtctgccag

SEQ ID NO: 377781 - DNA, 25 bp, Homo sapien
tcctggcagcaaatccgaagcctac

SEQ ID NO: 377782 - DNA, 25 bp, Homo sapien
tggaatattaaagccctgaggagcc

SEQ ID NO: 377783 - DNA, 25 bp, Homo sapien
aaaatgttatgcgtgtggctcagcc

SEQ ID NO: 377784 - DNA, 25 bp, Homo sapien
tattataatttagtggcccatgagg

SEQ ID NO: 377785 - DNA, 25 bp, Homo sapien
tgataagcgttcaaacatctagccc

SEQ ID NO: 377786 - DNA, 25 bp, Homo sapien
ttcaaacatctagccccagaggtct

SEQ ID NO: 377787 - DNA, 25 bp, Homo sapien
cttgtggtttttcatacggatatac

SEQ ID NO: 377788 - DNA, 25 bp, Homo sapien
tatacagtgcgctgataagcgttca

SEQ ID NO: 377789 - DNA, 25 bp, Homo sapien
agtttggcgaatctctgaaagccca

SEQ ID NO: 377790 - DNA, 25 bp, Homo sapien
gaaagcccattttgagcctgtttgt

SEQ ID NO: 377791 - DNA, 25 bp, Homo sapien
ggtggacaagccagtatcagtttgg

SEQ ID NO: 377792 - DNA, 25 bp, Homo sapien
ggaattgtccgtggaaatgacagcc

SEQ ID NO: 377793 - DNA, 25 bp, Homo sapien
gaatccagcagtttggacacacaca

SEQ ID NO: 377794 - DNA, 25 bp, Homo sapien
tttagccatggttctcagtggtggt

SEQ ID NO: 377795 - DNA, 25 bp, Homo sapien
gagaggattcccgacattcatgtgg

SEQ ID NO: 377796 - DNA, 25 bp, Homo sapien
ttttataaggctcgatgtgactgca

SEQ ID NO: 377797 - DNA, 25 bp, Homo sapien
aaggaggtactgaaattcttctctt

SEQ ID NO: 377798 - DNA, 25 bp, Homo sapien
aggaggtactgaaattcttctctta

SEQ ID NO: 377799 - DNA, 25 bp, Homo sapien
caaggaggtactgaaattcttctct

SEQ ID NO: 377800 - DNA, 25 bp, Homo sapien
ctggaggcaagcagtgatctgtgtg

SEQ ID NO: 377801 - DNA, 25 bp, Homo sapien
gctgctctggtgtgaaagccatcct

SEQ ID NO: 377802 - DNA, 25 bp, Homo sapien
gccatttgtcacttctctagaagta

SEQ ID NO: 377803 - DNA, 25 bp, Homo sapien
ctccgagggcccctcttgtccaatt

SEQ ID NO: 377804 - DNA, 25 bp, Homo sapien
ctagaatgttgttcgcttaaataca

SEQ ID NO: 377805 - DNA, 25 bp, Homo sapien
cgatcgaaggatccctttgctttgg

SEQ ID NO: 377806 - DNA, 25 bp, Homo sapien
tacaatcatatcacagcgatcgaag

SEQ ID NO: 377807 - DNA, 25 bp, Homo sapien
tgttgttcgcttaaatacaatcata

SEQ ID NO: 377808 - DNA, 25 bp, Homo sapien
ttgtgcgggccttgtaaagcaggaa

SEQ ID NO: 377809 - DNA, 25 bp, Homo sapien
ctcagaggcccccatagtgtcaatt

SEQ ID NO: 377810 - DNA, 25 bp, Homo sapien
cattttcttgttcctacttgcagac

SEQ ID NO: 377811 - DNA, 25 bp, Homo sapien
caggaaaatcaggaagagacgttgg

SEQ ID NO: 377812 - DNA, 25 bp, Homo sapien
tatgcctggcctgtatctgcaagtt

SEQ ID NO: 377813 - DNA, 25 bp, Homo sapien
tattaggatctaggaggaacaggga

SEQ ID NO: 377814 - DNA, 25 bp, Homo sapien
ggtgacatcttacttagctatactg

SEQ ID NO: 377815 - DNA, 25 bp, Homo sapien
ctgttggatattggtagagctctgc

SEQ ID NO: 377816 - DNA, 25 bp, Homo sapien
ccttggagccacttgccttgtggcc

SEQ ID NO: 377817 - DNA, 25 bp, Homo sapien
ccttgtggccgtgatgtaacatgga

SEQ ID NO: 377818 - DNA, 25 bp, Homo sapien
ggccgtgatgtaacatggaatgttt

SEQ ID NO: 377819 - DNA, 25 bp, Homo sapien
cacttgccttgtggccgtgatgtaa

SEQ ID NO: 377820 - DNA, 25 bp, Homo sapien
tcttgtgctttcagagtggcaaaat

SEQ ID NO: 377821 - DNA, 25 bp, Homo sapien
atgagttctggccattttcgaggct

SEQ ID NO: 377822 - DNA, 25 bp, Homo sapien
ggcttgccaaagatttttctccgca

SEQ ID NO: 377823 - DNA, 25 bp, Homo sapien
tggccattttcgaggcttgccaaag

SEQ ID NO: 377824 - DNA, 25 bp, Homo sapien
gaggtgacccctctaactcctgtgt

SEQ ID NO: 377825 - DNA, 25 bp, Homo sapien
acggtagttctaagaggcctcgcca

SEQ ID NO: 377826 - DNA, 25 bp, Homo sapien
ttggcctgaaaaactacagagagct

SEQ ID NO: 377827 - DNA, 25 bp, Homo sapien
gattctgtgcaaagtccagtgtcgc

SEQ ID NO: 377828 - DNA, 25 bp, Homo sapien
gatcttggggaggatggcatttaac

SEQ ID NO: 377829 - DNA, 25 bp, Homo sapien
gtatctccgaaggatcaagatcttg

SEQ ID NO: 377830 - DNA, 25 bp, Homo sapien
tgttgctgaagattttgtatctccg

SEQ ID NO: 377831 - DNA, 25 bp, Homo sapien
catttaactgaaggtgagtcttctg

SEQ ID NO: 377832 - DNA, 25 bp, Homo sapien
cgcgtgcgccgttcacaacagggtt

SEQ ID NO: 377833 - DNA, 25 bp, Homo sapien
catagactggtatcggtcagcagcc

SEQ ID NO: 377834 - DNA, 25 bp, Homo sapien
cacggacccaaggtttcagaatgaa

SEQ ID NO: 377835 - DNA, 25 bp, Homo sapien
gccggctggcatgctccttctgaat

SEQ ID NO: 377836 - DNA, 25 bp, Homo sapien
gatactcaatgtgttcatgagaggt

SEQ ID NO: 377837 - DNA, 25 bp, Homo sapien
catgagcaaaggtacaaagatactc

SEQ ID NO: 377838 - DNA, 25 bp, Homo sapien
gaaagccaatatgtccatggcaggg

SEQ ID NO: 377839 - DNA, 25 bp, Homo sapien
catgagaggtgctcattggtgcaaa

SEQ ID NO: 377840 - DNA, 25 bp, Homo sapien
gcagctcagaccagatgttcacaag

SEQ ID NO: 377841 - DNA, 25 bp, Homo sapien
cactggctgtgagatcgtagacaaa

SEQ ID NO: 377842 - DNA, 25 bp, Homo sapien
tgaatcttaagcttcctcacactgg

SEQ ID NO: 377843 - DNA, 25 bp, Homo sapien
tattccatggaacgtctacaccgca

SEQ ID NO: 377844 - DNA, 25 bp, Homo sapien
gaaggtaatttagaaagcaggccag

SEQ ID NO: 377845 - DNA, 25 bp, Homo sapien
catggtcactattaccaggaaggta

SEQ ID NO: 377846 - DNA, 25 bp, Homo sapien
acaaactggccggagagtgtgtctg

SEQ ID NO: 377847 - DNA, 25 bp, Homo sapien
tgtgtctgggaaggccatggtcact

SEQ ID NO: 377848 - DNA, 25 bp, Homo sapien
ccattagagttgttttccgacatgt

SEQ ID NO: 377849 - DNA, 25 bp, Homo sapien
atctgtaatgcacagaatgtcccct

SEQ ID NO: 377850 - DNA, 25 bp, Homo sapien
gacatgtaattctgatcattgccac

SEQ ID NO: 377851 - DNA, 25 bp, Homo sapien
cattcatccagccattagagttgtt

SEQ ID NO: 377852 - DNA, 25 bp, Homo sapien
tcaggtcctggccgtctcatatttg

SEQ ID NO: 377853 - DNA, 25 bp, Homo sapien
aggtcctggccgtctcatatttgca

SEQ ID NO: 377854 - DNA, 25 bp, Homo sapien
tggccgtctcatatttgcatatgtg

SEQ ID NO: 377855 - DNA, 25 bp, Homo sapien
gtcctggccgtctcatatttgcata

SEQ ID NO: 377856 - DNA, 25 bp, Homo sapien
taaaggagtcttttggagtagccat

SEQ ID NO: 377857 - DNA, 25 bp, Homo sapien
tgtcatacagaagaactgtggttaa

SEQ ID NO: 377858 - DNA, 25 bp, Homo sapien
ggagtagccattgcccctctttcag

SEQ ID NO: 377859 - DNA, 25 bp, Homo sapien
cagaggaaatgtcatacagaagaac

SEQ ID NO: 377860 - DNA, 25 bp, Homo sapien
atccaggaaacaatggttgatagtc

SEQ ID NO: 377861 - DNA, 25 bp, Homo sapien
agagaacaggtctttggatactgcc

SEQ ID NO: 377862 - DNA, 25 bp, Homo sapien
gggtatagtccgatccaggaaacaa

SEQ ID NO: 377863 - DNA, 25 bp, Homo sapien
gagggctgttaaaatgtaatgggta

SEQ ID NO: 377864 - DNA, 25 bp, Homo sapien
ggagtaaccagtgttcctcatgtgt

SEQ ID NO: 377865 - DNA, 25 bp, Homo sapien
caatgtagatgttttaggagtaacc

SEQ ID NO: 377866 - DNA, 25 bp, Homo sapien
gggcctattacacaatgactgctgt

SEQ ID NO: 377867 - DNA, 25 bp, Homo sapien
ggtgcccagatacgtggtcagatat

SEQ ID NO: 377868 - DNA, 25 bp, Homo sapien
tacttgacatagtcagttgcctgac

SEQ ID NO: 377869 - DNA, 25 bp, Homo sapien
tcaatctgcagggacctctcttggt

SEQ ID NO: 377870 - DNA, 25 bp, Homo sapien
gtcagttgcctgactacaaaccagg

SEQ ID NO: 377871 - DNA, 25 bp, Homo sapien
ctctcttggtacttgacatagtcag

SEQ ID NO: 377872 - DNA, 25 bp, Homo sapien
acagtgtgatggatggtgctgtggc

SEQ ID NO: 377873 - DNA, 25 bp, Homo sapien
tgtccccgtggccgactctgctgat

SEQ ID NO: 377874 - DNA, 25 bp, Homo sapien
cctcctgtccccgtggccgactctg

SEQ ID NO: 377875 - DNA, 25 bp, Homo sapien
tccccgtggccgactctgctgatgg

SEQ ID NO: 377876 - DNA, 25 bp, Homo sapien
tatcgtagggtcatcctcaagctcc

SEQ ID NO: 377877 - DNA, 25 bp, Homo sapien
tatctcccagatacattggatccag

SEQ ID NO: 377878 - DNA, 25 bp, Homo sapien
ggacatcgtcataccaaaaagactg

SEQ ID NO: 377879 - DNA, 25 bp, Homo sapien
aacttagtgctatatcgattccagg

SEQ ID NO: 377880 - DNA, 25 bp, Homo sapien
tccgccaggtatgaccctctctgtg

SEQ ID NO: 377881 - DNA, 25 bp, Homo sapien
gtccctgcagagctgataggagagt

SEQ ID NO: 377882 - DNA, 25 bp, Homo sapien
cctgcagagctgataggagagtctt

SEQ ID NO: 377883 - DNA, 25 bp, Homo sapien
tggtcctgggttccgccaggtatga

SEQ ID NO: 377884 - DNA, 25 bp, Homo sapien
gtgcccgtattctgggctcatggaa

SEQ ID NO: 377885 - DNA, 25 bp, Homo sapien
ctgggctcatggaagatttgttaat

SEQ ID NO: 377886 - DNA, 25 bp, Homo sapien
tgaacataaagtgcccgtattctgg

SEQ ID NO: 377887 - DNA, 25 bp, Homo sapien
ctccctgccggagcctgaacataaa

SEQ ID NO: 377888 - DNA, 25 bp, Homo sapien
gattaccctggttgagatccactgg

SEQ ID NO: 377889 - DNA, 25 bp, Homo sapien
tagtgaaacacctgcatacccaagg

SEQ ID NO: 377890 - DNA, 25 bp, Homo sapien
gcagtctgtgccaagtatcgaagga

SEQ ID NO: 377891 - DNA, 25 bp, Homo sapien
cattgctaaatgacccctggaggca

SEQ ID NO: 377892 - DNA, 25 bp, Homo sapien
cattctccacagaatagctagaggg

SEQ ID NO: 377893 - DNA, 25 bp, Homo sapien
gagggatctgaatagtttgcatcca

SEQ ID NO: 377894 - DNA, 25 bp, Homo sapien
caacatagccagacaatctctatga

SEQ ID NO: 377895 - DNA, 25 bp, Homo sapien
tagctagagggatctgaatagtttg

SEQ ID NO: 377896 - DNA, 25 bp, Homo sapien
gcattttctagatccacactgtaat

SEQ ID NO: 377897 - DNA, 25 bp, Homo sapien
ccccatggaccttgttgccatgctg

SEQ ID NO: 377898 - DNA, 25 bp, Homo sapien
atggaccttgttgccatgctggctg

SEQ ID NO: 377899 - DNA, 25 bp, Homo sapien
tgcattttctagatccacactgtaa

SEQ ID NO: 377900 - DNA, 25 bp, Homo sapien
tggtgagcagtttacactttcatat

SEQ ID NO: 377901 - DNA, 25 bp, Homo sapien
ggtgagcagtttacactttcatata

SEQ ID NO: 377902 - DNA, 25 bp, Homo sapien
atatggtgagcagtttacactttca

SEQ ID NO: 377903 - DNA, 25 bp, Homo sapien
tatggtgagcagtttacactttcat

SEQ ID NO: 377904 - DNA, 25 bp, Homo sapien
tccaggttgatggtcgcattccaga

SEQ ID NO: 377905 - DNA, 25 bp, Homo sapien
cttccaggttgatggtcgcattcca

SEQ ID NO: 377906 - DNA, 25 bp, Homo sapien
caggttgatggtcgcattccagatg

SEQ ID NO: 377907 - DNA, 25 bp, Homo sapien
gttgatggtcgcattccagatgtaa

SEQ ID NO: 377908 - DNA, 25 bp, Homo sapien
cagtcactgcccttataggctggtt

SEQ ID NO: 377909 - DNA, 25 bp, Homo sapien
gggcccagtcactgcccttataggc

SEQ ID NO: 377910 - DNA, 25 bp, Homo sapien
actgcccttataggctggttctcct

SEQ ID NO: 377911 - DNA, 25 bp, Homo sapien
tcactgcccttataggctggttctc

SEQ ID NO: 377912 - DNA, 25 bp, Homo sapien
ggctcattggctactgatctccaga

SEQ ID NO: 377913 - DNA, 25 bp, Homo sapien
gccttcccagttagttttagcaaga

SEQ ID NO: 377914 - DNA, 25 bp, Homo sapien
gtctaagtcaacctgccttcagcag

SEQ ID NO: 377915 - DNA, 25 bp, Homo sapien
tattctggatatctgatcacacctg

SEQ ID NO: 377916 - DNA, 25 bp, Homo sapien
cctcgaggtatcaggacctctgttc

SEQ ID NO: 377917 - DNA, 25 bp, Homo sapien
gctctggctagtacttccctgttgc

SEQ ID NO: 377918 - DNA, 25 bp, Homo sapien
actgagcttcgggccaggacgtctg

SEQ ID NO: 377919 - DNA, 25 bp, Homo sapien
gttgccttgggcaccacctcgaggt

SEQ ID NO: 377920 - DNA, 25 bp, Homo sapien
aatgtcactgagtgttgagagggag

SEQ ID NO: 377921 - DNA, 25 bp, Homo sapien
ctttgcaaatgtcactgagtgttga

SEQ ID NO: 377922 - DNA, 25 bp, Homo sapien
tgcaaatgtcactgagtgttgagag

SEQ ID NO: 377923 - DNA, 25 bp, Homo sapien
caaatgtcactgagtgttgagaggg

SEQ ID NO: 377924 - DNA, 25 bp, Homo sapien
ctggtttgctgcctggagactctca

SEQ ID NO: 377925 - DNA, 25 bp, Homo sapien
ggaatctgcagacagctccgggctt

SEQ ID NO: 377926 - DNA, 25 bp, Homo sapien
ccggaggttttcagaacaacacgat

SEQ ID NO: 377927 - DNA, 25 bp, Homo sapien
tgttgcttgtgcatccgacacctgc

SEQ ID NO: 377928 - DNA, 25 bp, Homo sapien
ctgtttgtttgtacccgtgatcacc

SEQ ID NO: 377929 - DNA, 25 bp, Homo sapien
tgtttgtttgtacccgtgatcaccc

SEQ ID NO: 377930 - DNA, 25 bp, Homo sapien
cacttccggttgttttccttgtgtg

SEQ ID NO: 377931 - DNA, 25 bp, Homo sapien
aggccctcagactgacgggaggcca

SEQ ID NO: 377932 - DNA, 25 bp, Homo sapien
cttgtgtgcccctgctaaaggttta

SEQ ID NO: 377933 - DNA, 25 bp, Homo sapien
gatctttgactgtactgggacccct

SEQ ID NO: 377934 - DNA, 25 bp, Homo sapien
ctttgttacggacagtggaggccac

SEQ ID NO: 377935 - DNA, 25 bp, Homo sapien
tcagactttgttacggacagtggag

SEQ ID NO: 377936 - DNA, 25 bp, Homo sapien
agtgattgtctcaatccctggctca

SEQ ID NO: 377937 - DNA, 25 bp, Homo sapien
tgatttagtgattgtctcaatccct

SEQ ID NO: 377938 - DNA, 25 bp, Homo sapien
ttggcaagaaaacatcactagaccc

SEQ ID NO: 377939 - DNA, 25 bp, Homo sapien
aactccaggccaagatcgtttcgct

SEQ ID NO: 377940 - DNA, 25 bp, Homo sapien
tgggtggaaaatggctgacatctca

SEQ ID NO: 377941 - DNA, 25 bp, Homo sapien
tgccttggtgaagtgcactgattct

SEQ ID NO: 377942 - DNA, 25 bp, Homo sapien
aggcgtgtcctgagcgtcagcttgc

SEQ ID NO: 377943 - DNA, 25 bp, Homo sapien
gcgtgtcctgagcgtcagcttgcat

SEQ ID NO: 377944 - DNA, 25 bp, Homo sapien
ggcaggcaggtaggcgtgtcctgag

SEQ ID NO: 377945 - DNA, 25 bp, Homo sapien
ggcgtgtcctgagcgtcagcttgca

SEQ ID NO: 377946 - DNA, 25 bp, Homo sapien
tgaggaccggcaagcttcaaattca

SEQ ID NO: 377947 - DNA, 25 bp, Homo sapien
cagtgttacgttggccttgactagg

SEQ ID NO: 377948 - DNA, 25 bp, Homo sapien
ttttcagtgttacgttggccttgac

SEQ ID NO: 377949 - DNA, 25 bp, Homo sapien
tgttttcagtgttacgttggccttg

SEQ ID NO: 377950 - DNA, 25 bp, Homo sapien
atgctgttttcagtgttacgttggc

SEQ ID NO: 377951 - DNA, 25 bp, Homo sapien
tccagcaatgaccagggttccataa

SEQ ID NO: 377952 - DNA, 25 bp, Homo sapien
tccaaggctgccttggatctgcttg

SEQ ID NO: 377953 - DNA, 25 bp, Homo sapien
tccataatgacttggttcagtccct

SEQ ID NO: 377954 - DNA, 25 bp, Homo sapien
tatattggaccttactttcccacca

SEQ ID NO: 377955 - DNA, 25 bp, Homo sapien
cctgcagatgaaccggggagcaaag

SEQ ID NO: 377956 - DNA, 25 bp, Homo sapien
gatgaaccggggagcaaagcacaca

SEQ ID NO: 377957 - DNA, 25 bp, Homo sapien
agatgaaccggggagcaaagcacac

SEQ ID NO: 377958 - DNA, 25 bp, Homo sapien
gtgcctgcagatgaaccggggagca

SEQ ID NO: 377959 - DNA, 25 bp, Homo sapien
gcaggtgttgacgtattgagctcat

SEQ ID NO: 377960 - DNA, 25 bp, Homo sapien
caggtgttgacgtattgagctcata

SEQ ID NO: 377961 - DNA, 25 bp, Homo sapien
aggtgttgacgtattgagctcatac

SEQ ID NO: 377962 - DNA, 25 bp, Homo sapien
cccttcgtcctgaccctgtaggatg

SEQ ID NO: 377963 - DNA, 25 bp, Homo sapien
gcttcaggttctaaatgcagcctca

SEQ ID NO: 377964 - DNA, 25 bp, Homo sapien
gacagcgggacgctcatttctgctg

SEQ ID NO: 377965 - DNA, 25 bp, Homo sapien
ccctgtaggatgatgcaggacagcg

SEQ ID NO: 377966 - DNA, 25 bp, Homo sapien
gtggagaggacggatgcaggaagct

SEQ ID NO: 377967 - DNA, 25 bp, Homo sapien
gctgccaagcccgtgacatgggtga

SEQ ID NO: 377968 - DNA, 25 bp, Homo sapien
gaggacggatgcaggaagcttccac

SEQ ID NO: 377969 - DNA, 25 bp, Homo sapien
tgacatgggtgattgggcagtggtc

SEQ ID NO: 377970 - DNA, 25 bp, Homo sapien
ccaaggcagcctggcatctggtcct

SEQ ID NO: 377971 - DNA, 25 bp, Homo sapien
taaagcacagctccgacgtgtcact

SEQ ID NO: 377972 - DNA, 25 bp, Homo sapien
tgtcactgccaagccaggctattct

SEQ ID NO: 377973 - DNA, 25 bp, Homo sapien
ttcgttgcctctcaaaccaaggcag

SEQ ID NO: 377974 - DNA, 25 bp, Homo sapien
tgagtgagtgcagacgccaccagct

SEQ ID NO: 377975 - DNA, 25 bp, Homo sapien
ttctgccctgagtgagtgcagacgc

SEQ ID NO: 377976 - DNA, 25 bp, Homo sapien
gagtgcagacgccaccagctggtcc

SEQ ID NO: 377977 - DNA, 25 bp, Homo sapien
tgccctgagtgagtgcagacgccac

SEQ ID NO: 377978 - DNA, 25 bp, Homo sapien
ttgatcttggtgcttcatctgtgtg

SEQ ID NO: 377979 - DNA, 25 bp, Homo sapien
gagggtttgtcttgatcttggtgct

SEQ ID NO: 377980 - DNA, 25 bp, Homo sapien
tttggattggatcacttgtggaaga

SEQ ID NO: 377981 - DNA, 25 bp, Homo sapien
ctttttggattggatcacttgtgga

SEQ ID NO: 377982 - DNA, 25 bp, Homo sapien
ccatagccctttcctggagtgtttg

SEQ ID NO: 377983 - DNA, 25 bp, Homo sapien
ggcttgctgagagcccattccgttt

SEQ ID NO: 377984 - DNA, 25 bp, Homo sapien
atcctgattgacctgtggcttgctg

SEQ ID NO: 377985 - DNA, 25 bp, Homo sapien
cttctggactgcatctgaaggtcct

SEQ ID NO: 377986 - DNA, 25 bp, Homo sapien
caccgttgtaactgagcagcattgg

SEQ ID NO: 377987 - DNA, 25 bp, Homo sapien
tctttttgacatagtggcagcccat

SEQ ID NO: 377988 - DNA, 25 bp, Homo sapien
gcattgccctcaaggtggcttctga

SEQ ID NO: 377989 - DNA, 25 bp, Homo sapien
caggtagcgaacttgttgtaccttc

SEQ ID NO: 377990 - DNA, 25 bp, Homo sapien
aattgccaggtagcgaacttgttgt

SEQ ID NO: 377991 - DNA, 25 bp, Homo sapien
gatctaacagaggagcgacctagat

SEQ ID NO: 377992 - DNA, 25 bp, Homo sapien
tctaacagaggagcgacctagatcc

SEQ ID NO: 377993 - DNA, 25 bp, Homo sapien
acagaggagcgacctagatcccagc

SEQ ID NO: 377994 - DNA, 25 bp, Homo sapien
taacagaggagcgacctagatccca

SEQ ID NO: 377995 - DNA, 25 bp, Homo sapien
gaagaaccgttgtgcagggtgccct

SEQ ID NO: 377996 - DNA, 25 bp, Homo sapien
ttccctaaatgggtgagtctccctg

SEQ ID NO: 377997 - DNA, 25 bp, Homo sapien
catgtcatattcaggaggcttcccc

SEQ ID NO: 377998 - DNA, 25 bp, Homo sapien
ccagctgtagtagtggttccctaaa

SEQ ID NO: 377999 - DNA, 25 bp, Homo sapien
caggagtttgccacgggctgtggtt

SEQ ID NO: 378000 - DNA, 25 bp, Homo sapien
tggtttgccacttgaccctaacctg

SEQ ID NO: 378001 - DNA, 25 bp, Homo sapien
ccaggagtttgccacgggctgtggt

SEQ ID NO: 378002 - DNA, 25 bp, Homo sapien
tgccacttgaccctaacctgccact

SEQ ID NO: 378003 - DNA, 25 bp, Homo sapien
taacatcggctttccgctggaacaa

SEQ ID NO: 378004 - DNA, 25 bp, Homo sapien
tttgtcccgtggttccacccagctg

SEQ ID NO: 378005 - DNA, 25 bp, Homo sapien
tggcaaaagagtcaccgaaccaggc

SEQ ID NO: 378006 - DNA, 25 bp, Homo sapien
gcagctgtcgtgtgcctgtgtaata

SEQ ID NO: 378007 - DNA, 25 bp, Homo sapien
aactcaacctagaagatggtgagat

SEQ ID NO: 378008 - DNA, 25 bp, Homo sapien
caacctagaagatggtgagattttc

SEQ ID NO: 378009 - DNA, 25 bp, Homo sapien
ctcaacctagaagatggtgagattt

SEQ ID NO: 378010 - DNA, 25 bp, Homo sapien
ctaactcaacctagaagatggtgag

SEQ ID NO: 378011 - DNA, 25 bp, Homo sapien
gggatgcgaagtgcggctgaccagc

SEQ ID NO: 378012 - DNA, 25 bp, Homo sapien
tcagaaggcgccttgcttccaccag

SEQ ID NO: 378013 - DNA, 25 bp, Homo sapien
gaagtgcggctgaccagctggtggg

SEQ ID NO: 378014 - DNA, 25 bp, Homo sapien
gatggctcagtgtggatcagaaggc

SEQ ID NO: 378015 - DNA, 25 bp, Homo sapien
cagagaggacgttgggaaaacacaa

SEQ ID NO: 378016 - DNA, 25 bp, Homo sapien
tgtgcacagagaggacgttgggaaa

SEQ ID NO: 378017 - DNA, 25 bp, Homo sapien
tgcacagagaggacgttgggaaaac

SEQ ID NO: 378018 - DNA, 25 bp, Homo sapien
cacagagaggacgttgggaaaacac

SEQ ID NO: 378019 - DNA, 25 bp, Homo sapien
gacctgggccaaccctacagttgga

SEQ ID NO: 378020 - DNA, 25 bp, Homo sapien
ggcaccggtggctggctcacagcat

SEQ ID NO: 378021 - DNA, 25 bp, Homo sapien
cagcatagacctgccttggacctgg

SEQ ID NO: 378022 - DNA, 25 bp, Homo sapien
tacagttggagctgagcaaacactg

SEQ ID NO: 378023 - DNA, 25 bp, Homo sapien
gggcaggccatactcattgataagc

SEQ ID NO: 378024 - DNA, 25 bp, Homo sapien
catactcattgataagcttgtgcat

SEQ ID NO: 378025 - DNA, 25 bp, Homo sapien
ggccatactcattgataagcttgtg

SEQ ID NO: 378026 - DNA, 25 bp, Homo sapien
ctcattgataagcttgtgcatgaag

SEQ ID NO: 378027 - DNA, 25 bp, Homo sapien
gagaaccaggtagagggcttgtggc

SEQ ID NO: 378028 - DNA, 25 bp, Homo sapien
gacatcccctttacgtgggcagcct

SEQ ID NO: 378029 - DNA, 25 bp, Homo sapien
ctctgacatcccctttacgtgggca

SEQ ID NO: 378030 - DNA, 25 bp, Homo sapien
ggtagagggcttgtggctgtcccaa

SEQ ID NO: 378031 - DNA, 25 bp, Homo sapien
ggaaggtatagagtgtgtctgagct

SEQ ID NO: 378032 - DNA, 25 bp, Homo sapien
tgatgggccttcagtttggtacttg

SEQ ID NO: 378033 - DNA, 25 bp, Homo sapien
cacctgatgggccttcagtttggta

SEQ ID NO: 378034 - DNA, 25 bp, Homo sapien
catggctgctggcacctgatgggcc

SEQ ID NO: 378035 - DNA, 25 bp, Homo sapien
gctggcacctgatgggccttcagtt

SEQ ID NO: 378036 - DNA, 25 bp, Homo sapien
cagaaaagtgtacgttattgtattt

SEQ ID NO: 378037 - DNA, 25 bp, Homo sapien
cctgatttctaaccccatagatgta

SEQ ID NO: 378038 - DNA, 25 bp, Homo sapien
taaccagcacatagatctagaaaca

SEQ ID NO: 378039 - DNA, 25 bp, Homo sapien
taaggaatcgcacaggatgtacttg

SEQ ID NO: 378040 - DNA, 25 bp, Homo sapien
cctggatactgagcctatgtgtaga

SEQ ID NO: 378041 - DNA, 25 bp, Homo sapien
ctgcaaatggttgcggaagaatttg

SEQ ID NO: 378042 - DNA, 25 bp, Homo sapien
gaatttgtacctggatactgagcct

SEQ ID NO: 378043 - DNA, 25 bp, Homo sapien
tgagcctatgtgtagaaaatcatgg

SEQ ID NO: 378044 - DNA, 25 bp, Homo sapien
ttggataaacttgccccgatttgta

SEQ ID NO: 378045 - DNA, 25 bp, Homo sapien
gagcttggcctgtgtttggataaac

SEQ ID NO: 378046 - DNA, 25 bp, Homo sapien
aggagcttggcctgtgtttggataa

SEQ ID NO: 378047 - DNA, 25 bp, Homo sapien
ttgccccgatttgtaactcagcagt

SEQ ID NO: 378048 - DNA, 25 bp, Homo sapien
gtggacacttgccagaccgcaaact

SEQ ID NO: 378049 - DNA, 25 bp, Homo sapien
tatagtctagcttgggtctctgtgg

SEQ ID NO: 378050 - DNA, 25 bp, Homo sapien
tcctccgtgacttgaagtcgtccct

SEQ ID NO: 378051 - DNA, 25 bp, Homo sapien
caaactcttagatggcaaggtctca

SEQ ID NO: 378052 - DNA, 25 bp, Homo sapien
gtggttgaaatcagccatcttctta

SEQ ID NO: 378053 - DNA, 25 bp, Homo sapien
tggttgaaatcagccatcttcttac

SEQ ID NO: 378054 - DNA, 25 bp, Homo sapien
caactggagtaaagtgtaagttctt

SEQ ID NO: 378055 - DNA, 25 bp, Homo sapien
ccaactggagtaaagtgtaagttct

SEQ ID NO: 378056 - DNA, 25 bp, Homo sapien
ccaaccaactggagtaaagtgtaag

SEQ ID NO: 378057 - DNA, 25 bp, Homo sapien
caaccaactggagtaaagtgtaagt

SEQ ID NO: 378058 - DNA, 25 bp, Homo sapien
gggcaagatctctatcaacccaacc

SEQ ID NO: 378059 - DNA, 25 bp, Homo sapien
ggtctcatgagctcgttcccactca

SEQ ID NO: 378060 - DNA, 25 bp, Homo sapien
aaccctcttttggccatcacctggg

SEQ ID NO: 378061 - DNA, 25 bp, Homo sapien
tcttcagatcctggggcaagatctc

SEQ ID NO: 378062 - DNA, 25 bp, Homo sapien
ctcctctgagccttgttggaggcct

SEQ ID NO: 378063 - DNA, 25 bp, Homo sapien
tcctctgagccttgttggaggcctc

SEQ ID NO: 378064 - DNA, 25 bp, Homo sapien
cctctgagccttgttggaggcctcc

SEQ ID NO: 378065 - DNA, 25 bp, Homo sapien
gagggtctgacctgcaaaacctctc

SEQ ID NO: 378066 - DNA, 25 bp, Homo sapien
cttgtaaacataggtcaatccatca

SEQ ID NO: 378067 - DNA, 25 bp, Homo sapien
gtgaacaggatttgctacccattgc

SEQ ID NO: 378068 - DNA, 25 bp, Homo sapien
gtcaatccatcaatcctagttcctg

SEQ ID NO: 378069 - DNA, 25 bp, Homo sapien
tgggatcgggacaatagtgacgtct

SEQ ID NO: 378070 - DNA, 25 bp, Homo sapien
ctgaggcagagctgggagactgcat

SEQ ID NO: 378071 - DNA, 25 bp, Homo sapien
tgaggcagagctgggagactgcatc

SEQ ID NO: 378072 - DNA, 25 bp, Homo sapien
tcctccagtgcgtgtgtgagattct

SEQ ID NO: 378073 - DNA, 25 bp, Homo sapien
catgggaagccgcagagattcctcc

SEQ ID NO: 378074 - DNA, 25 bp, Homo sapien
gaagctctttcactaggtgaagagg

SEQ ID NO: 378075 - DNA, 25 bp, Homo sapien
cttgaagctctttcactaggtgaag

SEQ ID NO: 378076 - DNA, 25 bp, Homo sapien
aaagcagcgttgggcctgtctcctt

SEQ ID NO: 378077 - DNA, 25 bp, Homo sapien
ttctagtgtgccgactgaaaccctg

SEQ ID NO: 378078 - DNA, 25 bp, Homo sapien
tagtgtgccgactgaaaccctggag

SEQ ID NO: 378079 - DNA, 25 bp, Homo sapien
tgcagttctagtgtgccgactgaaa

SEQ ID NO: 378080 - DNA, 25 bp, Homo sapien
tctaatgctcgtccaaagagcccgg

SEQ ID NO: 378081 - DNA, 25 bp, Homo sapien
cctagacttaaaagggagcacgtgg

SEQ ID NO: 378082 - DNA, 25 bp, Homo sapien
gcacgtggttaggaaatctcattag

SEQ ID NO: 378083 - DNA, 25 bp, Homo sapien
tacttgttctgggaattctcgcgcc

SEQ ID NO: 378084 - DNA, 25 bp, Homo sapien
agtcagagccgtccggatcgggtta

SEQ ID NO: 378085 - DNA, 25 bp, Homo sapien
agtcgtcgcgtctcctggtcttgcc

SEQ ID NO: 378086 - DNA, 25 bp, Homo sapien
ccgcgcgctggcaggtcttgaagga

SEQ ID NO: 378087 - DNA, 25 bp, Homo sapien
agctgtgccgcatcccgagtcagag

SEQ ID NO: 378088 - DNA, 25 bp, Homo sapien
tgggcgagagcagcgcgccgtgcgc

SEQ ID NO: 378089 - DNA, 25 bp, Homo sapien
gcccgcttttgtttacagacctcgc

SEQ ID NO: 378090 - DNA, 25 bp, Homo sapien
ttttgtttacagacctcgccattgg

SEQ ID NO: 378091 - DNA, 25 bp, Homo sapien
tgtttacagacctcgccattgggcg

SEQ ID NO: 378092 - DNA, 25 bp, Homo sapien
tttccacgtattgttttcgtgttca

SEQ ID NO: 378093 - DNA, 25 bp, Homo sapien
cacgtattgttttcgtgttcacaca

SEQ ID NO: 378094 - DNA, 25 bp, Homo sapien
cgatcgggctttccacgtattgttt

SEQ ID NO: 378095 - DNA, 25 bp, Homo sapien
tccacgtattgttttcgtgttcaca

SEQ ID NO: 378096 - DNA, 25 bp, Homo sapien
cgtcgcggagatcccggacgaccgt

SEQ ID NO: 378097 - DNA, 25 bp, Homo sapien
cgaccgtcgcgggtgagtaccgcgg

SEQ ID NO: 378098 - DNA, 25 bp, Homo sapien
gatcccggacgaccgtcgcgggtga

SEQ ID NO: 378099 - DNA, 25 bp, Homo sapien
gccccgtcgcggagatcccggacga

SEQ ID NO: 378100 - DNA, 25 bp, Homo sapien
ggagcgattgtcaggcggcccaatc

SEQ ID NO: 378101 - DNA, 25 bp, Homo sapien
ctcggattggctggccggaggcgga

SEQ ID NO: 378102 - DNA, 25 bp, Homo sapien
atcggagctcggtttcccacgggct

SEQ ID NO: 378103 - DNA, 25 bp, Homo sapien
ggccctgacagctccgattggcaga

SEQ ID NO: 378104 - DNA, 25 bp, Homo sapien
cagcccaactccgaacgccccgctc

SEQ ID NO: 378105 - DNA, 25 bp, Homo sapien
ctacagcccaactccgaacgccccg

SEQ ID NO: 378106 - DNA, 25 bp, Homo sapien
cccaactccgaacgccccgctcctg

SEQ ID NO: 378107 - DNA, 25 bp, Homo sapien
aactccgaacgccccgctcctgcat

SEQ ID NO: 378108 - DNA, 25 bp, Homo sapien
atgacaggcagcttcgcggacctat

SEQ ID NO: 378109 - DNA, 25 bp, Homo sapien
ggatacccggcgtgcgcccatagtc

SEQ ID NO: 378110 - DNA, 25 bp, Homo sapien
attggccacctccacctatgcgaga

SEQ ID NO: 378111 - DNA, 25 bp, Homo sapien
ccaactagagctccgtctgtgcacg

SEQ ID NO: 378112 - DNA, 25 bp, Homo sapien
gcacggtaagtgaaccctgggagtc

SEQ ID NO: 378113 - DNA, 25 bp, Homo sapien
tgcccagcaggtaagcgtaaggccc

SEQ ID NO: 378114 - DNA, 25 bp, Homo sapien
cagcaggtaagcgtaaggcccaaac

SEQ ID NO: 378115 - DNA, 25 bp, Homo sapien
tgttattccaagttcgcttgctggg

SEQ ID NO: 378116 - DNA, 25 bp, Homo sapien
gtaaactgcaactgtagtttccgga

SEQ ID NO: 378117 - DNA, 25 bp, Homo sapien
gcaactgtagtttccggattttaca

SEQ ID NO: 378118 - DNA, 25 bp, Homo sapien
tgtagtttccggattttacagagga

SEQ ID NO: 378119 - DNA, 25 bp, Homo sapien
tagtttccggattttacagaggagc

SEQ ID NO: 378120 - DNA, 25 bp, Homo sapien
ctcgtgtagggaaaggtttcgctcg

SEQ ID NO: 378121 - DNA, 25 bp, Homo sapien
ggtttcgctcgaggctgtaccgcca

SEQ ID NO: 378122 - DNA, 25 bp, Homo sapien
gcgtctccgtttccgcgttctccac

SEQ ID NO: 378123 - DNA, 25 bp, Homo sapien
gaggaggaagctccggcctcgtgta

SEQ ID NO: 378124 - DNA, 25 bp, Homo sapien
ccacagcgtgggcaattctttttgt

SEQ ID NO: 378125 - DNA, 25 bp, Homo sapien
cgaacacgtgtgtatggaatcaagg

SEQ ID NO: 378126 - DNA, 25 bp, Homo sapien
gaaggacgatgggagccctttactg

SEQ ID NO: 378127 - DNA, 25 bp, Homo sapien
gcaaagtggagaacagatttcaggg

SEQ ID NO: 378128 - DNA, 25 bp, Homo sapien
ccattagatggtaaggctaagaact

SEQ ID NO: 378129 - DNA, 25 bp, Homo sapien
gatggtaaggctaagaactgcctgt

SEQ ID NO: 378130 - DNA, 25 bp, Homo sapien
ctccattagatggtaaggctaagaa

SEQ ID NO: 378131 - DNA, 25 bp, Homo sapien
tagatggtaaggctaagaactgcct

SEQ ID NO: 378132 - DNA, 25 bp, Homo sapien
ttttgtcctgtattagctggctcct

SEQ ID NO: 378133 - DNA, 25 bp, Homo sapien
attattttgtcctgtattagctggc

SEQ ID NO: 378134 - DNA, 25 bp, Homo sapien
tgtcctgtattagctggctcctttt

SEQ ID NO: 378135 - DNA, 25 bp, Homo sapien
tcctgtattagctggctcctttttt

SEQ ID NO: 378136 - DNA, 25 bp, Homo sapien
cgttgttcagcttgtactgtttttc

SEQ ID NO: 378137 - DNA, 25 bp, Homo sapien
ttcctgtcctttgtgagatgtcgtt

SEQ ID NO: 378138 - DNA, 25 bp, Homo sapien
cctttgtgagatgtcgttgttcagc

SEQ ID NO: 378139 - DNA, 25 bp, Homo sapien
gagatgtcgttgttcagcttgtact

SEQ ID NO: 378140 - DNA, 25 bp, Homo sapien
cagtcaatactatgggggatatgta

SEQ ID NO: 378141 - DNA, 25 bp, Homo sapien
ggggatatgtatctcacaatacaga

SEQ ID NO: 378142 - DNA, 25 bp, Homo sapien
atactatgggggatatgtatctcac

SEQ ID NO: 378143 - DNA, 25 bp, Homo sapien
ctatgggggatatgtatctcacaat

SEQ ID NO: 378144 - DNA, 25 bp, Homo sapien
tgttgccttgtctcccacggtcttt

SEQ ID NO: 378145 - DNA, 25 bp, Homo sapien
tttgttgatacatcctgtctgctgt

SEQ ID NO: 378146 - DNA, 25 bp, Homo sapien
tatgtctactacagagttgttaggc

SEQ ID NO: 378147 - DNA, 25 bp, Homo sapien
tcccacggtctttgatcattatact

SEQ ID NO: 378148 - DNA, 25 bp, Homo sapien
cacgtatcctctgagaaacatgtga

SEQ ID NO: 378149 - DNA, 25 bp, Homo sapien
aagctgattgtgatgtttagttccc

SEQ ID NO: 378150 - DNA, 25 bp, Homo sapien
ccactcgagggctgatatttaaggg

SEQ ID NO: 378151 - DNA, 25 bp, Homo sapien
caacagtgaggctcctgaagctgat

SEQ ID NO: 378152 - DNA, 25 bp, Homo sapien
gtgaacatcgaaggaaggctgcctc

SEQ ID NO: 378153 - DNA, 25 bp, Homo sapien
tgacaagtttctcacgatggccgtg

SEQ ID NO: 378154 - DNA, 25 bp, Homo sapien
tcatttgacaagtttctcacgatgg

SEQ ID NO: 378155 - DNA, 25 bp, Homo sapien
cacgatggccgtgaatgtgaacatc

SEQ ID NO: 378156 - DNA, 25 bp, Homo sapien
cactccataggcgaatagtctgtaa

SEQ ID NO: 378157 - DNA, 25 bp, Homo sapien
cataggcgaatagtctgtaattgca

SEQ ID NO: 378158 - DNA, 25 bp, Homo sapien
ctccataggcgaatagtctgtaatt

SEQ ID NO: 378159 - DNA, 25 bp, Homo sapien
cagcactccataggcgaatagtctg

SEQ ID NO: 378160 - DNA, 25 bp, Homo sapien
gaggccctgtatacccaagcaattc

SEQ ID NO: 378161 - DNA, 25 bp, Homo sapien
aacgaggccctgtatacccaagcaa

SEQ ID NO: 378162 - DNA, 25 bp, Homo sapien
cgaggccctgtatacccaagcaatt

SEQ ID NO: 378163 - DNA, 25 bp, Homo sapien
ggccctgtatacccaagcaattcct

SEQ ID NO: 378164 - DNA, 25 bp, Homo sapien
tttcagtcggatgggattgcccttc

SEQ ID NO: 378165 - DNA, 25 bp, Homo sapien
agtcccatttttcagtcggatggga

SEQ ID NO: 378166 - DNA, 25 bp, Homo sapien
cagttttgtgggttatgagttatga

SEQ ID NO: 378167 - DNA, 25 bp, Homo sapien
ggttatgagttatgagctcttcctc

SEQ ID NO: 378168 - DNA, 25 bp, Homo sapien
agaaggagaccttagcttcactgac

SEQ ID NO: 378169 - DNA, 25 bp, Homo sapien
tctcaatgggcacaagcgagtcttg

SEQ ID NO: 378170 - DNA, 25 bp, Homo sapien
gggacatggcttctgcgaccgatat

SEQ ID NO: 378171 - DNA, 25 bp, Homo sapien
gagaaatacatcgtgtctgcctctg

SEQ ID NO: 378172 - DNA, 25 bp, Homo sapien
tgcctctggtgacaggaccatcaaa

SEQ ID NO: 378173 - DNA, 25 bp, Homo sapien
ctatctgcagtaggatgagcgtgtc

SEQ ID NO: 378174 - DNA, 25 bp, Homo sapien
cattgtaactggctcttcggattct

SEQ ID NO: 378175 - DNA, 25 bp, Homo sapien
cacaatgaggatgtactgcacttac

SEQ ID NO: 378176 - DNA, 25 bp, Homo sapien
gaacacgggtgaagttcttaacaca

SEQ ID NO: 378177 - DNA, 25 bp, Homo sapien
tggatgccagggtcaagcctgagga

SEQ ID NO: 378178 - DNA, 25 bp, Homo sapien
aatgtgggtgttgcctgccagtaag

SEQ ID NO: 378179 - DNA, 25 bp, Homo sapien
tgcctgccagtaagggagaaaccct

SEQ ID NO: 378180 - DNA, 25 bp, Homo sapien
tccaggagatggctagcggaaggca

SEQ ID NO: 378181 - DNA, 25 bp, Homo sapien
acgatcacactcattgcaaccccag

SEQ ID NO: 378182 - DNA, 25 bp, Homo sapien
cgatcacactcattgcaaccccagc

SEQ ID NO: 378183 - DNA, 25 bp, Homo sapien
atcacactcattgcaaccccagcct

SEQ ID NO: 378184 - DNA, 25 bp, Homo sapien
gatcacactcattgcaaccccagcc

SEQ ID NO: 378185 - DNA, 25 bp, Homo sapien
ctgctacagcaaatccagtaagccc

SEQ ID NO: 378186 - DNA, 25 bp, Homo sapien
tgctacagcaaatccagtaagcccc

SEQ ID NO: 378187 - DNA, 25 bp, Homo sapien
tggcagcaccactgcaggtcctcat

SEQ ID NO: 378188 - DNA, 25 bp, Homo sapien
ccccctccaacctggcagcaccact

SEQ ID NO: 378189 - DNA, 25 bp, Homo sapien
ctattccctttaaggcacataattt

SEQ ID NO: 378190 - DNA, 25 bp, Homo sapien
ctaccgcccccagcctcaaagttgt

SEQ ID NO: 378191 - DNA, 25 bp, Homo sapien
ttatctattccctttaaggcacata

SEQ ID NO: 378192 - DNA, 25 bp, Homo sapien
ctttaaggcacataattttcttaat

SEQ ID NO: 378193 - DNA, 25 bp, Homo sapien
ggcagaattcggtattctttttata

SEQ ID NO: 378194 - DNA, 25 bp, Homo sapien
tcttcccctgcaattttcttagtcc

SEQ ID NO: 378195 - DNA, 25 bp, Homo sapien
gcaattttcttagtccttagtatag

SEQ ID NO: 378196 - DNA, 25 bp, Homo sapien
tcttagtccttagtatagagtttct

SEQ ID NO: 378197 - DNA, 25 bp, Homo sapien
tcctggttccgaggactgcaacgga

SEQ ID NO: 378198 - DNA, 25 bp, Homo sapien
gactactttataggccagacctccg

SEQ ID NO: 378199 - DNA, 25 bp, Homo sapien
tgcaggagactacgacgcaaaccag

SEQ ID NO: 378200 - DNA, 25 bp, Homo sapien
aaaccccagacgctgcaggagacta

SEQ ID NO: 378201 - DNA, 25 bp, Homo sapien
ctgcactgggccgtcgcccttcagc

SEQ ID NO: 378202 - DNA, 25 bp, Homo sapien
tgctcgaaattgatgatgccctgca

SEQ ID NO: 378203 - DNA, 25 bp, Homo sapien
tgcactgggccgtcgcccttcagca

SEQ ID NO: 378204 - DNA, 25 bp, Homo sapien
ttctgctcgaaattgatgatgccct

SEQ ID NO: 378205 - DNA, 25 bp, Homo sapien
gggacgagcgggtgggagcggcctc

SEQ ID NO: 378206 - DNA, 25 bp, Homo sapien
gcctggcgggcgacccgctcctagc

SEQ ID NO: 378207 - DNA, 25 bp, Homo sapien
gagcgggtgggagcggcctcgcaaa

SEQ ID NO: 378208 - DNA, 25 bp, Homo sapien
cctagcaaaggtgcgcggggggacg

SEQ ID NO: 378209 - DNA, 25 bp, Homo sapien
aaagcgaagactccctgacctagag

SEQ ID NO: 378210 - DNA, 25 bp, Homo sapien
gaaaaggacctctgttcaaggctac

SEQ ID NO: 378211 - DNA, 25 bp, Homo sapien
tcaaataagctaactgtgcacccaa

SEQ ID NO: 378212 - DNA, 25 bp, Homo sapien
aatcatgacctagaacagaggccag

SEQ ID NO: 378213 - DNA, 25 bp, Homo sapien
tattttacaagagtcgttcagaagt

SEQ ID NO: 378214 - DNA, 25 bp, Homo sapien
caagagtcgttcagaagtttgtctc

SEQ ID NO: 378215 - DNA, 25 bp, Homo sapien
cttccttgcaacacgttttgtaatt

SEQ ID NO: 378216 - DNA, 25 bp, Homo sapien
ctgtatattttacaagagtcgttca

SEQ ID NO: 378217 - DNA, 25 bp, Homo sapien
tcctcagaggcgtcttaagaatagc

SEQ ID NO: 378218 - DNA, 25 bp, Homo sapien
agaagggattcctcagaggcgtctt

SEQ ID NO: 378219 - DNA, 25 bp, Homo sapien
ggcgtcttaagaatagcactggtgg

SEQ ID NO: 378220 - DNA, 25 bp, Homo sapien
ttaagaatagcactggtggccgggc

SEQ ID NO: 378221 - DNA, 25 bp, Homo sapien
taacacaggcctgggaagcgaaaaa

SEQ ID NO: 378222 - DNA, 25 bp, Homo sapien
taagtagctgtgctcgggtacaacc

SEQ ID NO: 378223 - DNA, 25 bp, Homo sapien
taaacacggaataggccaagccaag

SEQ ID NO: 378224 - DNA, 25 bp, Homo sapien
caggtaatggtgctccgtggctaca

SEQ ID NO: 378225 - DNA, 25 bp, Homo sapien
ccaggctgaccactttctagccagt

SEQ ID NO: 378226 - DNA, 25 bp, Homo sapien
ctttctagccagtgaacctccagca

SEQ ID NO: 378227 - DNA, 25 bp, Homo sapien
agcagccagacttgggagtggaaaa

SEQ ID NO: 378228 - DNA, 25 bp, Homo sapien
cagacttgggagtggaaaaatctgt

SEQ ID NO: 378229 - DNA, 25 bp, Homo sapien
ttaagaaaagtgcaaagttggagag

SEQ ID NO: 378230 - DNA, 25 bp, Homo sapien
aagaaaagtgcaaagttggagagag

SEQ ID NO: 378231 - DNA, 25 bp, Homo sapien
ctttaagaaaagtgcaaagttggag

SEQ ID NO: 378232 - DNA, 25 bp, Homo sapien
aaaagtgcaaagttggagagagttt

SEQ ID NO: 378233 - DNA, 25 bp, Homo sapien
caaactcatgaacatggaatccatg

SEQ ID NO: 378234 - DNA, 25 bp, Homo sapien
tcatgaacatggaatccatgcaggc

SEQ ID NO: 378235 - DNA, 25 bp, Homo sapien
catggaatccatgcaggccttcagt

SEQ ID NO: 378236 - DNA, 25 bp, Homo sapien
ggaatccatgcaggccttcagtcag

SEQ ID NO: 378237 - DNA, 25 bp, Homo sapien
ggtgtagagctactcttacatggca

SEQ ID NO: 378238 - DNA, 25 bp, Homo sapien
aatcacctcccagaccagaggcggt

SEQ ID NO: 378239 - DNA, 25 bp, Homo sapien
tactttggtcccactaagaagcctg

SEQ ID NO: 378240 - DNA, 25 bp, Homo sapien
taaatgcagcccctttgctcgaggc

SEQ ID NO: 378241 - DNA, 25 bp, Homo sapien
cagagcacaacctcgacagcacagg

SEQ ID NO: 378242 - DNA, 25 bp, Homo sapien
tgacattcacagagcacaacctcga

SEQ ID NO: 378243 - DNA, 25 bp, Homo sapien
gcaccaggggatgacattcacagag

SEQ ID NO: 378244 - DNA, 25 bp, Homo sapien
tgtgcaccaggggatgacattcaca

SEQ ID NO: 378245 - DNA, 25 bp, Homo sapien
agggggcggcattccaactgtatcc

SEQ ID NO: 378246 - DNA, 25 bp, Homo sapien
cgagggggcggcattccaactgtat

SEQ ID NO: 378247 - DNA, 25 bp, Homo sapien
gagggggcggcattccaactgtatc

SEQ ID NO: 378248 - DNA, 25 bp, Homo sapien
ttaaaatcccatggttatgatccaa

SEQ ID NO: 378249 - DNA, 25 bp, Homo sapien
tatctgtgccctttacttggtgcag

SEQ ID NO: 378250 - DNA, 25 bp, Homo sapien
tggtgcaggcagaatattcaacagc

SEQ ID NO: 378251 - DNA, 25 bp, Homo sapien
tatgccaagcagttctatctgtgcc

SEQ ID NO: 378252 - DNA, 25 bp, Homo sapien
taagcaacaccttggtacagccaca

SEQ ID NO: 378253 - DNA, 25 bp, Homo sapien
agaaacaagtctatggccaggcatg

SEQ ID NO: 378254 - DNA, 25 bp, Homo sapien
gctgacctgcatcacgacttctggg

SEQ ID NO: 378255 - DNA, 25 bp, Homo sapien
gaacagaaacaagtctatggccagg

SEQ ID NO: 378256 - DNA, 25 bp, Homo sapien
tggatagaggattaaagtgaggacc

SEQ ID NO: 378257 - DNA, 25 bp, Homo sapien
tagaggattaaagtgaggacctgca

SEQ ID NO: 378258 - DNA, 25 bp, Homo sapien
ttctggatagaggattaaagtgagg

SEQ ID NO: 378259 - DNA, 25 bp, Homo sapien
ttttctggatagaggattaaagtga

SEQ ID NO: 378260 - DNA, 25 bp, Homo sapien
gtctacacactaatgctctgggaag

SEQ ID NO: 378261 - DNA, 25 bp, Homo sapien
taacaaagctatgtcccaaggcctc

SEQ ID NO: 378262 - DNA, 25 bp, Homo sapien
aagtaaaagcattccagcatttggg

SEQ ID NO: 378263 - DNA, 25 bp, Homo sapien
tatgaactccagaaagctatcgcca

SEQ ID NO: 378264 - DNA, 25 bp, Homo sapien
gatcacagaatcttcaatagacaca

SEQ ID NO: 378265 - DNA, 25 bp, Homo sapien
gtgcggccaatgatgcaatggtctc

SEQ ID NO: 378266 - DNA, 25 bp, Homo sapien
caatgatgcaatggtctcctgagag

SEQ ID NO: 378267 - DNA, 25 bp, Homo sapien
atctttgtcagcagtcacattgccc

SEQ ID NO: 378268 - DNA, 25 bp, Homo sapien
taactatgttgtagaccaccacacg

SEQ ID NO: 378269 - DNA, 25 bp, Homo sapien
tacagtaaccttagttccgcagtca

SEQ ID NO: 378270 - DNA, 25 bp, Homo sapien
taatcctccatggtaagttacagta

SEQ ID NO: 378271 - DNA, 25 bp, Homo sapien
tcatgccaaatgaatgacgggccta

SEQ ID NO: 378272 - DNA, 25 bp, Homo sapien
acttccagcgtttcctgtctttgta

SEQ ID NO: 378273 - DNA, 25 bp, Homo sapien
caagccaaacgacttccagcgtttc

SEQ ID NO: 378274 - DNA, 25 bp, Homo sapien
acaagccaaacgacttccagcgttt

SEQ ID NO: 378275 - DNA, 25 bp, Homo sapien
cacaagccaaacgacttccagcgtt

SEQ ID NO: 378276 - DNA, 25 bp, Homo sapien
ttaaggggcctcagactacatccaa

SEQ ID NO: 378277 - DNA, 25 bp, Homo sapien
taaggggcctcagactacatccaag

SEQ ID NO: 378278 - DNA, 25 bp, Homo sapien
tatcaggatacatttctacagctag

SEQ ID NO: 378279 - DNA, 25 bp, Homo sapien
tacagctagcaggataacagatgag

SEQ ID NO: 378280 - DNA, 25 bp, Homo sapien
ggatacatttctacagctagcagga

SEQ ID NO: 378281 - DNA, 25 bp, Homo sapien
catttctacagctagcaggataaca

SEQ ID NO: 378282 - DNA, 25 bp, Homo sapien
cttccaagtgatcataaatcagttt

SEQ ID NO: 378283 - DNA, 25 bp, Homo sapien
catctgtgatttaagtctggcaaaa

SEQ ID NO: 378284 - DNA, 25 bp, Homo sapien
aagtttaatacccatctgtgattta

SEQ ID NO: 378285 - DNA, 25 bp, Homo sapien
caggtcattgaaacagacattttaa

SEQ ID NO: 378286 - DNA, 25 bp, Homo sapien
ttaagtctggcaaaatacaggtcat

SEQ ID NO: 378287 - DNA, 25 bp, Homo sapien
ggtttttattcacaggcttgaatga

SEQ ID NO: 378288 - DNA, 25 bp, Homo sapien
agtgccatacagggtttttattcac

SEQ ID NO: 378289 - DNA, 25 bp, Homo sapien
cattctggcaggtagataatcttac

SEQ ID NO: 378290 - DNA, 25 bp, Homo sapien
taatcttactagctagctgaggctg

SEQ ID NO: 378291 - DNA, 25 bp, Homo sapien
tgtgccagcgtctacccttgaatgt

SEQ ID NO: 378292 - DNA, 25 bp, Homo sapien
taatctgtaagtaggttgtgccagc

SEQ ID NO: 378293 - DNA, 25 bp, Homo sapien
tactataaattatcggactgcctgg

SEQ ID NO: 378294 - DNA, 25 bp, Homo sapien
caaggtaacggtgaaagctcctcaa

SEQ ID NO: 378295 - DNA, 25 bp, Homo sapien
ttctgaagagttacctgctgaggct

SEQ ID NO: 378296 - DNA, 25 bp, Homo sapien
cagaggctcctcgttagagactgga

SEQ ID NO: 378297 - DNA, 25 bp, Homo sapien
ttttttgtcacgtcataagggccga

SEQ ID NO: 378298 - DNA, 25 bp, Homo sapien
taaatctgagctatcatgaaagtga

SEQ ID NO: 378299 - DNA, 25 bp, Homo sapien
taaaatatttgctgtctagtcagcc

SEQ ID NO: 378300 - DNA, 25 bp, Homo sapien
tcagccaacctgttacttgaaaagc

SEQ ID NO: 378301 - DNA, 25 bp, Homo sapien
ccccgttgtcgggttcgcagtgccg

SEQ ID NO: 378302 - DNA, 25 bp, Homo sapien
ttttcgggtctgggcgccctcgctc

SEQ ID NO: 378303 - DNA, 25 bp, Homo sapien
cgcagtgccgggagcccgcaaaggg

SEQ ID NO: 378304 - DNA, 25 bp, Homo sapien
ccaagtctgtgcctgttcctctaac

SEQ ID NO: 378305 - DNA, 25 bp, Homo sapien
cccgggagcaccgcgtcgagcggag

SEQ ID NO: 378306 - DNA, 25 bp, Homo sapien
cgggagcaccgcgtcgagcggagcg

SEQ ID NO: 378307 - DNA, 25 bp, Homo sapien
gagcaccgcgtcgagcggagcgcgc

SEQ ID NO: 378308 - DNA, 25 bp, Homo sapien
gcaccgcgtcgagcggagcgcgcgt

SEQ ID NO: 378309 - DNA, 25 bp, Homo sapien
tcagcgtgaaagttagtgaatccac

SEQ ID NO: 378310 - DNA, 25 bp, Homo sapien
cacagctgcactggcattggcagaa

SEQ ID NO: 378311 - DNA, 25 bp, Homo sapien
taaggcctgcgtggatatccagtgc

SEQ ID NO: 378312 - DNA, 25 bp, Homo sapien
ttctcggtgttttcgctcgcgcaga

SEQ ID NO: 378313 - DNA, 25 bp, Homo sapien
cccagaagcctgttacggagagtac

SEQ ID NO: 378314 - DNA, 25 bp, Homo sapien
gtcattcatcaagtcaggctgtggg

SEQ ID NO: 378315 - DNA, 25 bp, Homo sapien
tagcatgtcagcagacgttggcaca

SEQ ID NO: 378316 - DNA, 25 bp, Homo sapien
tactaatggacacctcacccagaag

SEQ ID NO: 378317 - DNA, 25 bp, Homo sapien
tgttccagaacagatacaggtgctg

SEQ ID NO: 378318 - DNA, 25 bp, Homo sapien
tattggaaggttcgactcgtctgcc

SEQ ID NO: 378319 - DNA, 25 bp, Homo sapien
tagctgtgcaaatggccaccagatg

SEQ ID NO: 378320 - DNA, 25 bp, Homo sapien
tctatacctgtggattgtggccagc

SEQ ID NO: 378321 - DNA, 25 bp, Homo sapien
gatacatggtcatccggtccaaaaa

SEQ ID NO: 378322 - DNA, 25 bp, Homo sapien
acagttctacgtagctaaggaggcc

SEQ ID NO: 378323 - DNA, 25 bp, Homo sapien
ggtgaagattaatgattttcctccc

SEQ ID NO: 378324 - DNA, 25 bp, Homo sapien
tccattcagactttagtacctttaa

SEQ ID NO: 378325 - DNA, 25 bp, Homo sapien
ttacgtaagtaaggagcagacgcag

SEQ ID NO: 378326 - DNA, 25 bp, Homo sapien
tctcctgattcacactttgaaatag

SEQ ID NO: 378327 - DNA, 25 bp, Homo sapien
ttgaaatagatacgatgggccgggc

SEQ ID NO: 378328 - DNA, 25 bp, Homo sapien
agacgcagcagataccaccctctct

SEQ ID NO: 378329 - DNA, 25 bp, Homo sapien
gtggccatcctcttcacgcccatca

SEQ ID NO: 378330 - DNA, 25 bp, Homo sapien
ctgggtactcggtgctcccagtggc

SEQ ID NO: 378331 - DNA, 25 bp, Homo sapien
tcagatacgccaatccccgtatcat

SEQ ID NO: 378332 - DNA, 25 bp, Homo sapien
gtactcggtgctcccagtggccatc

SEQ ID NO: 378333 - DNA, 25 bp, Homo sapien
ggtcttgaccaggtgggaccttgtc

SEQ ID NO: 378334 - DNA, 25 bp, Homo sapien
ggtgggaccttgtcagccaaggaaa

SEQ ID NO: 378335 - DNA, 25 bp, Homo sapien
ggagatgagtctgcaaatgtaggaa

SEQ ID NO: 378336 - DNA, 25 bp, Homo sapien
caaatgtaggaagggtcttgaccag

SEQ ID NO: 378337 - DNA, 25 bp, Homo sapien
ctggggattggagggccattgaagg

SEQ ID NO: 378338 - DNA, 25 bp, Homo sapien
tggtccaagaccagtttgtataaca

SEQ ID NO: 378339 - DNA, 25 bp, Homo sapien
tgtataacagatttactggggattg

SEQ ID NO: 378340 - DNA, 25 bp, Homo sapien
ttctggtccaagaccagtttgtata

SEQ ID NO: 378341 - DNA, 25 bp, Homo sapien
ctttgtaaaagtcagaggatacctc

SEQ ID NO: 378342 - DNA, 25 bp, Homo sapien
aagtcagaggatacctctttgtggc

SEQ ID NO: 378343 - DNA, 25 bp, Homo sapien
gatctcggtaggtaatcatgaaggc

SEQ ID NO: 378344 - DNA, 25 bp, Homo sapien
acctctttgtggctgatgagatctc

SEQ ID NO: 378345 - DNA, 25 bp, Homo sapien
gctggtttctggcgagtgatgtttc

SEQ ID NO: 378346 - DNA, 25 bp, Homo sapien
gagctggtttctggcgagtgatgtt

SEQ ID NO: 378347 - DNA, 25 bp, Homo sapien
tggtttctggcgagtgatgtttcat

SEQ ID NO: 378348 - DNA, 25 bp, Homo sapien
ctggtttctggcgagtgatgtttca

SEQ ID NO: 378349 - DNA, 25 bp, Homo sapien
gtcatcttcctggtagtccaataga

SEQ ID NO: 378350 - DNA, 25 bp, Homo sapien
ctcacaaataatgaactggtagttt

SEQ ID NO: 378351 - DNA, 25 bp, Homo sapien
ggattcatgtcctcacaaataatga

SEQ ID NO: 378352 - DNA, 25 bp, Homo sapien
tccaatagagccagcatgccatctg

SEQ ID NO: 378353 - DNA, 25 bp, Homo sapien
cttaaagaaaatcatatatggggtc

SEQ ID NO: 378354 - DNA, 25 bp, Homo sapien
ttttccatttctaaatcatccttaa

SEQ ID NO: 378355 - DNA, 25 bp, Homo sapien
catttctaaatcatccttaaagaaa

SEQ ID NO: 378356 - DNA, 25 bp, Homo sapien
taaagaaaatcatatatggggtcac

SEQ ID NO: 378357 - DNA, 25 bp, Homo sapien
caactcttgatctgtccatgtggga

SEQ ID NO: 378358 - DNA, 25 bp, Homo sapien
cagcaatggcaatgcggagcttcat

SEQ ID NO: 378359 - DNA, 25 bp, Homo sapien
tctcaactcttgatctgtccatgtg

SEQ ID NO: 378360 - DNA, 25 bp, Homo sapien
caatgcggagcttcatctcaactct

SEQ ID NO: 378361 - DNA, 25 bp, Homo sapien
tacagtacctagcacggtgtctgag

SEQ ID NO: 378362 - DNA, 25 bp, Homo sapien
tagcacaggtgttccctttcccatg

SEQ ID NO: 378363 - DNA, 25 bp, Homo sapien
caaccaataagctgcaagaagccca

SEQ ID NO: 378364 - DNA, 25 bp, Homo sapien
gccctcatattcagtgtgcagaaag

SEQ ID NO: 378365 - DNA, 25 bp, Homo sapien
cgcataaacaattgcaactgccctg

SEQ ID NO: 378366 - DNA, 25 bp, Homo sapien
taaacaattgcaactgccctgacga

SEQ ID NO: 378367 - DNA, 25 bp, Homo sapien
actggaccctctcccaggatcccca

SEQ ID NO: 378368 - DNA, 25 bp, Homo sapien
aacaattgcaactgccctgacgaca

SEQ ID NO: 378369 - DNA, 25 bp, Homo sapien
gcagcaatgtaggaaccagggcgtt

SEQ ID NO: 378370 - DNA, 25 bp, Homo sapien
ttctgcaagcgctgtgactgtgctc

SEQ ID NO: 378371 - DNA, 25 bp, Homo sapien
ggcgctcgcctctcttcgatgcttt

SEQ ID NO: 378372 - DNA, 25 bp, Homo sapien
ggaaggctctcgaactccgtggact

SEQ ID NO: 378373 - DNA, 25 bp, Homo sapien
cctcttgcccggattctgggcttgg

SEQ ID NO: 378374 - DNA, 25 bp, Homo sapien
ttcggcggtgaaatcccccactggc

SEQ ID NO: 378375 - DNA, 25 bp, Homo sapien
ggctgcgcctcttgcccggattctg

SEQ ID NO: 378376 - DNA, 25 bp, Homo sapien
ctccggctgcgcctcttgcccggat

SEQ ID NO: 378377 - DNA, 25 bp, Homo sapien
ctgcgcggcctcggaggcgcgcgct

SEQ ID NO: 378378 - DNA, 25 bp, Homo sapien
agacagggagaacctgcgcggcctc

SEQ ID NO: 378379 - DNA, 25 bp, Homo sapien
ccagacagggagaacctgcgcggcc

SEQ ID NO: 378380 - DNA, 25 bp, Homo sapien
gcgcggcctcggaggcgcgcgctcc

SEQ ID NO: 378381 - DNA, 25 bp, Homo sapien
gagcggcggagtggacggagaagcc

SEQ ID NO: 378382 - DNA, 25 bp, Homo sapien
ggaggggagcggcggagtggacgga

SEQ ID NO: 378383 - DNA, 25 bp, Homo sapien
gggagcggcggagtggacggagaag

SEQ ID NO: 378384 - DNA, 25 bp, Homo sapien
gcggcggagtggacggagaagccac

SEQ ID NO: 378385 - DNA, 25 bp, Homo sapien
tcccgccggagagaagcgcgcggcg

SEQ ID NO: 378386 - DNA, 25 bp, Homo sapien
cttgggtcgggctcccgcgatcgct

SEQ ID NO: 378387 - DNA, 25 bp, Homo sapien
ccgctcccgccggagagaagcgcgc

SEQ ID NO: 378388 - DNA, 25 bp, Homo sapien
cgatcgctcctagccgtgcgctggg

SEQ ID NO: 378389 - DNA, 25 bp, Homo sapien
cgggtcccgtccaggaagctaatga

SEQ ID NO: 378390 - DNA, 25 bp, Homo sapien
gcgcgtagacaatagcggctgccca

SEQ ID NO: 378391 - DNA, 25 bp, Homo sapien
aggctcttcggcttccccggcttct

SEQ ID NO: 378392 - DNA, 25 bp, Homo sapien
agctaatgacagtcgccctgctcgg

SEQ ID NO: 378393 - DNA, 25 bp, Homo sapien
ggcccgcgcggctcctgctcgtctc

SEQ ID NO: 378394 - DNA, 25 bp, Homo sapien
ccgcgcggctcctgctcgtctcccg

SEQ ID NO: 378395 - DNA, 25 bp, Homo sapien
gcccgcgcggctcctgctcgtctcc

SEQ ID NO: 378396 - DNA, 25 bp, Homo sapien
gcgcggctcctgctcgtctcccgcg

SEQ ID NO: 378397 - DNA, 25 bp, Homo sapien
ccgccgcccccaggcgccgccggct

SEQ ID NO: 378398 - DNA, 25 bp, Homo sapien
ccgccgcgggcctggccgcgtcctc

SEQ ID NO: 378399 - DNA, 25 bp, Homo sapien
gggcctggccgcgtcctccgcgccg

SEQ ID NO: 378400 - DNA, 25 bp, Homo sapien
aggcgccgccggctcccccaggagc

SEQ ID NO: 378401 - DNA, 25 bp, Homo sapien
ctcgcggggcacgccgctcacccag

SEQ ID NO: 378402 - DNA, 25 bp, Homo sapien
cctcgcgcaccttggcaaaggagcc

SEQ ID NO: 378403 - DNA, 25 bp, Homo sapien
gatgaggtagttgcccacgcgcttg

SEQ ID NO: 378404 - DNA, 25 bp, Homo sapien
tgctgccgatgaggtagttgcccac

SEQ ID NO: 378405 - DNA, 25 bp, Homo sapien
aggtagttgcccacgcgcttgtggt

SEQ ID NO: 378406 - DNA, 25 bp, Homo sapien
gctagtgtcgccaggcggcgccctt

SEQ ID NO: 378407 - DNA, 25 bp, Homo sapien
tggttcccgcctcgccacggatccg

SEQ ID NO: 378408 - DNA, 25 bp, Homo sapien
ccgccttcgggaaaggctgcgagat

SEQ ID NO: 378409 - DNA, 25 bp, Homo sapien
gcccctgccggcctgaagggcagag

SEQ ID NO: 378410 - DNA, 25 bp, Homo sapien
actccgccttccctccttgcggctg

SEQ ID NO: 378411 - DNA, 25 bp, Homo sapien
ctgctcggttgggaagtgaactccg

SEQ ID NO: 378412 - DNA, 25 bp, Homo sapien
ctcggttgggaagtgaactccgcct

SEQ ID NO: 378413 - DNA, 25 bp, Homo sapien
ccttccctccttgcggctgacgcct

SEQ ID NO: 378414 - DNA, 25 bp, Homo sapien
taattttacatccaattaacatctc

SEQ ID NO: 378415 - DNA, 25 bp, Homo sapien
caccaatgggtccaggggaataatt

SEQ ID NO: 378416 - DNA, 25 bp, Homo sapien
ccgcagtccaccaatgggtccaggg

SEQ ID NO: 378417 - DNA, 25 bp, Homo sapien
tccaggggaataattttacatccaa

SEQ ID NO: 378418 - DNA, 25 bp, Homo sapien
gctgtggtcatctttgttttggcct

SEQ ID NO: 378419 - DNA, 25 bp, Homo sapien
ctgaggctgtggtcatctttgtttt

SEQ ID NO: 378420 - DNA, 25 bp, Homo sapien
gaacttcaggttgtaaatagcctga

SEQ ID NO: 378421 - DNA, 25 bp, Homo sapien
tttggccttagttaggcaataccca

SEQ ID NO: 378422 - DNA, 25 bp, Homo sapien
tccagttctctaagcatttcttgtt

SEQ ID NO: 378423 - DNA, 25 bp, Homo sapien
caggtgctttgcaaatgcctccttc

SEQ ID NO: 378424 - DNA, 25 bp, Homo sapien
gaagtccctgccaaggattaatagg

SEQ ID NO: 378425 - DNA, 25 bp, Homo sapien
tcttgttcctcagagcgattacccc

SEQ ID NO: 378426 - DNA, 25 bp, Homo sapien
tcggattggtatgcacgggtagcta

SEQ ID NO: 378427 - DNA, 25 bp, Homo sapien
cactgttgcgctgactcaaagcacc

SEQ ID NO: 378428 - DNA, 25 bp, Homo sapien
tagggttgtactcctctccgtgggc

SEQ ID NO: 378429 - DNA, 25 bp, Homo sapien
tgggcaccgtttctgcactgttgcg

SEQ ID NO: 378430 - DNA, 25 bp, Homo sapien
ctgcaggcatctaacaagaatgtgc

SEQ ID NO: 378431 - DNA, 25 bp, Homo sapien
tctacgtaatcaaggcaggcaagaa

SEQ ID NO: 378432 - DNA, 25 bp, Homo sapien
cagggcacccttctacgtaatcaag

SEQ ID NO: 378433 - DNA, 25 bp, Homo sapien
tctaacaagaatgtgcacgggaggg

SEQ ID NO: 378434 - DNA, 25 bp, Homo sapien
actcagttgccccagagttctcagg

SEQ ID NO: 378435 - DNA, 25 bp, Homo sapien
gagccctgatgattctaacctaaga

SEQ ID NO: 378436 - DNA, 25 bp, Homo sapien
aatctgctaatgagatgccacgccg

SEQ ID NO: 378437 - DNA, 25 bp, Homo sapien
gagaccacagtcgagcagcaaggta

SEQ ID NO: 378438 - DNA, 25 bp, Homo sapien
tcatctgttggagtcctaaccccag

SEQ ID NO: 378439 - DNA, 25 bp, Homo sapien
gaatagagcagtggtctcttcctca

SEQ ID NO: 378440 - DNA, 25 bp, Homo sapien
taaatatattccatgggatcaggtg

SEQ ID NO: 378441 - DNA, 25 bp, Homo sapien
tgagcatattctctgtaccagaaac

SEQ ID NO: 378442 - DNA, 25 bp, Homo sapien
ctttgcttccagggtccaaagacct

SEQ ID NO: 378443 - DNA, 25 bp, Homo sapien
tccttcactgtcctcttggcctttg

SEQ ID NO: 378444 - DNA, 25 bp, Homo sapien
tgcctgtctcttgctctttgcttcc

SEQ ID NO: 378445 - DNA, 25 bp, Homo sapien
gtcctcttggcctttgcctgtctct

SEQ ID NO: 378446 - DNA, 25 bp, Homo sapien
tcctcgatgagaagttgaaagtcct

SEQ ID NO: 378447 - DNA, 25 bp, Homo sapien
gattcctcgatgagaagttgaaagt

SEQ ID NO: 378448 - DNA, 25 bp, Homo sapien
aagtccagattcctcgatgagaagt

SEQ ID NO: 378449 - DNA, 25 bp, Homo sapien
tccagattcctcgatgagaagttga

SEQ ID NO: 378450 - DNA, 25 bp, Homo sapien
acctggcgtgtccagtgtccagcac

SEQ ID NO: 378451 - DNA, 25 bp, Homo sapien
atgactgaacctggcgtgtccagtg

SEQ ID NO: 378452 - DNA, 25 bp, Homo sapien
tgaacctggcgtgtccagtgtccag

SEQ ID NO: 378453 - DNA, 25 bp, Homo sapien
actgaacctggcgtgtccagtgtcc

SEQ ID NO: 378454 - DNA, 25 bp, Homo sapien
ccccaatcttagttccaaggcatgg

SEQ ID NO: 378455 - DNA, 25 bp, Homo sapien
aggtctgaggacccccagccacttc

SEQ ID NO: 378456 - DNA, 25 bp, Homo sapien
cttcagaaacagctaaatcttcccc

SEQ ID NO: 378457 - DNA, 25 bp, Homo sapien
ttcccccaatcttagttccaaggca

SEQ ID NO: 378458 - DNA, 25 bp, Homo sapien
tcttatcaatgacttttatggccac

SEQ ID NO: 378459 - DNA, 25 bp, Homo sapien
tcggatgtatctgcgggcttcggac

SEQ ID NO: 378460 - DNA, 25 bp, Homo sapien
ctctcgccgcaggtttttggtgaca

SEQ ID NO: 378461 - DNA, 25 bp, Homo sapien
tgcaggtgctctacggcagagatga

SEQ ID NO: 378462 - DNA, 25 bp, Homo sapien
taaaagggctgttgagaatttcctg

SEQ ID NO: 378463 - DNA, 25 bp, Homo sapien
tcctgagaagctcggtgctcatcct

SEQ ID NO: 378464 - DNA, 25 bp, Homo sapien
gcacaaggcacagcttccacttggt

SEQ ID NO: 378465 - DNA, 25 bp, Homo sapien
tctttgttgttctcgcgatcctgag

SEQ ID NO: 378466 - DNA, 25 bp, Homo sapien
gctttgcgggccactccatttacga

SEQ ID NO: 378467 - DNA, 25 bp, Homo sapien
taaactctcggagcttctgattctc

SEQ ID NO: 378468 - DNA, 25 bp, Homo sapien
cctggaacccgaccatcatgagaag

SEQ ID NO: 378469 - DNA, 25 bp, Homo sapien
gatgccacagtggattcccgagggc

SEQ ID NO: 378470 - DNA, 25 bp, Homo sapien
tggccgccataaactgagtcactgc

SEQ ID NO: 378471 - DNA, 25 bp, Homo sapien
gaaagttctgagactggccgccata

SEQ ID NO: 378472 - DNA, 25 bp, Homo sapien
gagactggccgccataaactgagtc

SEQ ID NO: 378473 - DNA, 25 bp, Homo sapien
gatggtcagttggaaagttctgaga

SEQ ID NO: 378474 - DNA, 25 bp, Homo sapien
gacactatgagcaacatcagatttg

SEQ ID NO: 378475 - DNA, 25 bp, Homo sapien
aaagcaagacctaaactggaacctg

SEQ ID NO: 378476 - DNA, 25 bp, Homo sapien
cctgagcggccaggcaaatatttca

SEQ ID NO: 378477 - DNA, 25 bp, Homo sapien
ggttggtgacactatgagcaacatc

SEQ ID NO: 378478 - DNA, 25 bp, Homo sapien
catctagtagcaaattctctatctt

SEQ ID NO: 378479 - DNA, 25 bp, Homo sapien
cattaggaacgttgtaggaaatctc

SEQ ID NO: 378480 - DNA, 25 bp, Homo sapien
agaaatacagtccagtctgtgaagt

SEQ ID NO: 378481 - DNA, 25 bp, Homo sapien
tgaagttaattgcacaccatggatc

SEQ ID NO: 378482 - DNA, 25 bp, Homo sapien
ctgcaaggcacatgaccattaggaa

SEQ ID NO: 378483 - DNA, 25 bp, Homo sapien
gaggtgaacaaaacaagctccgaat

SEQ ID NO: 378484 - DNA, 25 bp, Homo sapien
aagagaggtgaacaaaacaagctcc

SEQ ID NO: 378485 - DNA, 25 bp, Homo sapien
gtgaacaaaacaagctccgaattag

SEQ ID NO: 378486 - DNA, 25 bp, Homo sapien
ctgcaaagagaggtgaacaaaacaa

SEQ ID NO: 378487 - DNA, 25 bp, Homo sapien
ggatccctgcgcagttgctcaaacc

SEQ ID NO: 378488 - DNA, 25 bp, Homo sapien
cacactgtgtgctgaacggatccga

SEQ ID NO: 378489 - DNA, 25 bp, Homo sapien
atccgagtaacccaggatccctgcg

SEQ ID NO: 378490 - DNA, 25 bp, Homo sapien
tcctggcgagcagttcaggtgcagc

SEQ ID NO: 378491 - DNA, 25 bp, Homo sapien
accgtgaaaggcagcgtcccggtca

SEQ ID NO: 378492 - DNA, 25 bp, Homo sapien
aggctgaaaggctccaccgtgaaag

SEQ ID NO: 378493 - DNA, 25 bp, Homo sapien
ggtcaacatggcatacatgttcaca

SEQ ID NO: 378494 - DNA, 25 bp, Homo sapien
catttctttgtctaccatcttctgg

SEQ ID NO: 378495 - DNA, 25 bp, Homo sapien
tccacccctctgagataacacttag

SEQ ID NO: 378496 - DNA, 25 bp, Homo sapien
acccctctgagataacacttaggtt

SEQ ID NO: 378497 - DNA, 25 bp, Homo sapien
ctctgagataacacttaggttctcc

SEQ ID NO: 378498 - DNA, 25 bp, Homo sapien
ccctctgagataacacttaggttct

SEQ ID NO: 378499 - DNA, 25 bp, Homo sapien
tgttgcttaccctcaaaggacttgg

SEQ ID NO: 378500 - DNA, 25 bp, Homo sapien
gacttgggcaacaacccagggttgc

SEQ ID NO: 378501 - DNA, 25 bp, Homo sapien
tctattttcataaccgagcgctctg

SEQ ID NO: 378502 - DNA, 25 bp, Homo sapien
gaaccagaagtgctaaggacaaact

SEQ ID NO: 378503 - DNA, 25 bp, Homo sapien
gggaaagaatgcacgcatgttacag

SEQ ID NO: 378504 - DNA, 25 bp, Homo sapien
ggaaagaatgcacgcatgttacagg

SEQ ID NO: 378505 - DNA, 25 bp, Homo sapien
atttgggaaagaatgcacgcatgtt

SEQ ID NO: 378506 - DNA, 25 bp, Homo sapien
ttgggaaagaatgcacgcatgttac

SEQ ID NO: 378507 - DNA, 25 bp, Homo sapien
taagccagcgattcgccagtgcctg

SEQ ID NO: 378508 - DNA, 25 bp, Homo sapien
ccagtgcctgctgaatatttggcct

SEQ ID NO: 378509 - DNA, 25 bp, Homo sapien
ttgggataggtgacattacagggca

SEQ ID NO: 378510 - DNA, 25 bp, Homo sapien
tcttcacaggatccggttccaggag

SEQ ID NO: 378511 - DNA, 25 bp, Homo sapien
taccatcatctagatataccagtga

SEQ ID NO: 378512 - DNA, 25 bp, Homo sapien
agagagagaggaccagtcacccctg

SEQ ID NO: 378513 - DNA, 25 bp, Homo sapien
tgttctcgtattcagaaaagcggag

SEQ ID NO: 378514 - DNA, 25 bp, Homo sapien
aaagcggagggaatagtacaatcac

SEQ ID NO: 378515 - DNA, 25 bp, Homo sapien
tgacaaatagcgctccagtttcttg

SEQ ID NO: 378516 - DNA, 25 bp, Homo sapien
gagagcacagtgttgatcacgtcgc

SEQ ID NO: 378517 - DNA, 25 bp, Homo sapien
cagtttcttgtttaagaggaagtag

SEQ ID NO: 378518 - DNA, 25 bp, Homo sapien
agcttctcggtcatgtgcagcacga

SEQ ID NO: 378519 - DNA, 25 bp, Homo sapien
cataggactccttgggggccctgta

SEQ ID NO: 378520 - DNA, 25 bp, Homo sapien
tctatctggtagagccgggtcttgt

SEQ ID NO: 378521 - DNA, 25 bp, Homo sapien
gtacttttctatctggtagagccgg

SEQ ID NO: 378522 - DNA, 25 bp, Homo sapien
tagagccgggtcttgtagcagaggc

SEQ ID NO: 378523 - DNA, 25 bp, Homo sapien
tgagctcccatcacattcgcacaga

SEQ ID NO: 378524 - DNA, 25 bp, Homo sapien
actggctgcctaggagcccagtgtg

SEQ ID NO: 378525 - DNA, 25 bp, Homo sapien
tgtgggccccagtaaccaccatgct

SEQ ID NO: 378526 - DNA, 25 bp, Homo sapien
tgtcatcagtgtctctggacacctg

SEQ ID NO: 378527 - DNA, 25 bp, Homo sapien
ccatcctcatcttccccgagcccca

SEQ ID NO: 378528 - DNA, 25 bp, Homo sapien
ttccaaagggcttgtctccatcctc

SEQ ID NO: 378529 - DNA, 25 bp, Homo sapien
tcctcatcttccccgagccccacag

SEQ ID NO: 378530 - DNA, 25 bp, Homo sapien
ccttccaaagggcttgtctccatcc

SEQ ID NO: 378531 - DNA, 25 bp, Homo sapien
ctctctggctttaagcctgaaagcc

SEQ ID NO: 378532 - DNA, 25 bp, Homo sapien
tctctggctttaagcctgaaagcca

SEQ ID NO: 378533 - DNA, 25 bp, Homo sapien
gggacacgggttgatgacagcccta

SEQ ID NO: 378534 - DNA, 25 bp, Homo sapien
caccctggtttgctcacaatctgaa

SEQ ID NO: 378535 - DNA, 25 bp, Homo sapien
cactttctaggttcctcgggagaca

SEQ ID NO: 378536 - DNA, 25 bp, Homo sapien
ggctccgaatggactttccctgtga

SEQ ID NO: 378537 - DNA, 25 bp, Homo sapien
tcaagatctcgtgtccaggtgtcca

SEQ ID NO: 378538 - DNA, 25 bp, Homo sapien
gaattcaagatctcgtgtccaggtg

SEQ ID NO: 378539 - DNA, 25 bp, Homo sapien
ggcatggaattcaagatctcgtgtc

SEQ ID NO: 378540 - DNA, 25 bp, Homo sapien
ctgcacggcatggaattcaagatct

SEQ ID NO: 378541 - DNA, 25 bp, Homo sapien
ggttttggttccttgtcacccatca

SEQ ID NO: 378542 - DNA, 25 bp, Homo sapien
cagggcccagatgtcgttggctggt

SEQ ID NO: 378543 - DNA, 25 bp, Homo sapien
cttgtcacccatcacataagaagaa

SEQ ID NO: 378544 - DNA, 25 bp, Homo sapien
ccatcacataagaagaaacctggtt

SEQ ID NO: 378545 - DNA, 25 bp, Homo sapien
atgcaagctcctcacacggcaaggc

SEQ ID NO: 378546 - DNA, 25 bp, Homo sapien
ggtgggcgatggaattcaagctctc

SEQ ID NO: 378547 - DNA, 25 bp, Homo sapien
gctccagcacccacatagacttgag

SEQ ID NO: 378548 - DNA, 25 bp, Homo sapien
gatcttcagagggactatcacctcc

SEQ ID NO: 378549 - DNA, 25 bp, Homo sapien
agagtcagtccacgcagaagggtca

SEQ ID NO: 378550 - DNA, 25 bp, Homo sapien
aatgcagccaatcacccaattagac

SEQ ID NO: 378551 - DNA, 25 bp, Homo sapien
caagcacatgttaccaaatgcagcc

SEQ ID NO: 378552 - DNA, 25 bp, Homo sapien
aaatttcctagggagcaggatgcta

SEQ ID NO: 378553 - DNA, 25 bp, Homo sapien
cagtgatttcatagtaactggtgtc

SEQ ID NO: 378554 - DNA, 25 bp, Homo sapien
ggtgtctaaggagaaatcaagaaat

SEQ ID NO: 378555 - DNA, 25 bp, Homo sapien
tatgtcctccaagaacccctagcat

SEQ ID NO: 378556 - DNA, 25 bp, Homo sapien
tggtatgtcctccaagaacccctag

SEQ ID NO: 378557 - DNA, 25 bp, Homo sapien
aaatttctcccgtcactgacaaggg

SEQ ID NO: 378558 - DNA, 25 bp, Homo sapien
tagaaaagacaacacggcagttcct

SEQ ID NO: 378559 - DNA, 25 bp, Homo sapien
gatgcaaaacttctgcggaccagta

SEQ ID NO: 378560 - DNA, 25 bp, Homo sapien
tgtgcaaagagaccaaggttggcct

SEQ ID NO: 378561 - DNA, 25 bp, Homo sapien
taaagtcaccagctctacctgctaa

SEQ ID NO: 378562 - DNA, 25 bp, Homo sapien
tctacttttatgctaaagtcaccag

SEQ ID NO: 378563 - DNA, 25 bp, Homo sapien
agcaaaggcaatgttaccggctttc

SEQ ID NO: 378564 - DNA, 25 bp, Homo sapien
aaggcaatgttaccggctttcctga

SEQ ID NO: 378565 - DNA, 25 bp, Homo sapien
gggatgctgagcctcgtggcaagtg

SEQ ID NO: 378566 - DNA, 25 bp, Homo sapien
atgctgagcctcgtggcaagtgcca

SEQ ID NO: 378567 - DNA, 25 bp, Homo sapien
ggaaagacgacagggtagatgtggg

SEQ ID NO: 378568 - DNA, 25 bp, Homo sapien
ttgagtgggaaagacgacagggtag

SEQ ID NO: 378569 - DNA, 25 bp, Homo sapien
agagcatttgcaaaccaagagagct

SEQ ID NO: 378570 - DNA, 25 bp, Homo sapien
tgcaaaccaagagagctcgtctatt

SEQ ID NO: 378571 - DNA, 25 bp, Homo sapien
gcttctcagggaaatatctctctac

SEQ ID NO: 378572 - DNA, 25 bp, Homo sapien
ccaagagagctcgtctattttttca

SEQ ID NO: 378573 - DNA, 25 bp, Homo sapien
caaaacgcttggcagtggccattct

SEQ ID NO: 378574 - DNA, 25 bp, Homo sapien
tactagaatataatccatctgatag

SEQ ID NO: 378575 - DNA, 25 bp, Homo sapien
taaatcttgccttcgttgtactaga

SEQ ID NO: 378576 - DNA, 25 bp, Homo sapien
ccatctgataggaatgaatttgact

SEQ ID NO: 378577 - DNA, 25 bp, Homo sapien
ggaaacataactgcttccaccttca

SEQ ID NO: 378578 - DNA, 25 bp, Homo sapien
cactgtctacatttaaagattgtgc

SEQ ID NO: 378579 - DNA, 25 bp, Homo sapien
aaagattgtgcctgcaataacggct

SEQ ID NO: 378580 - DNA, 25 bp, Homo sapien
aataacggctttgcaaaggcaactg

SEQ ID NO: 378581 - DNA, 25 bp, Homo sapien
tgttctgaatctgtgtcataagcga

SEQ ID NO: 378582 - DNA, 25 bp, Homo sapien
tcttgtccaacttcttggagaatgg

SEQ ID NO: 378583 - DNA, 25 bp, Homo sapien
gacttggaggccttccggtccttca

SEQ ID NO: 378584 - DNA, 25 bp, Homo sapien
ctgtttgtgcgagggcaggttcttg

SEQ ID NO: 378585 - DNA, 25 bp, Homo sapien
agaggcgacatgcttccggatggca

SEQ ID NO: 378586 - DNA, 25 bp, Homo sapien
tatcttcgtgagcaaaagagaccag

SEQ ID NO: 378587 - DNA, 25 bp, Homo sapien
gaatttctgcgagccaagctgaccg

SEQ ID NO: 378588 - DNA, 25 bp, Homo sapien
cagcacttctacgtggtcgtcgcga

SEQ ID NO: 378589 - DNA, 25 bp, Homo sapien
taacagtccataatctgagtgcccc

SEQ ID NO: 378590 - DNA, 25 bp, Homo sapien
actccgcagaggaaacgtggcctgg

SEQ ID NO: 378591 - DNA, 25 bp, Homo sapien
caggtaatccctgctatgaaaggca

SEQ ID NO: 378592 - DNA, 25 bp, Homo sapien
ggagtgctcacaccctgacagatgt

SEQ ID NO: 378593 - DNA, 25 bp, Homo sapien
tcctcgaagaagaaactggcctgta

SEQ ID NO: 378594 - DNA, 25 bp, Homo sapien
gcttgaaatcagcatcgcacagaga

SEQ ID NO: 378595 - DNA, 25 bp, Homo sapien
gggcacagacacaatactggagaca

SEQ ID NO: 378596 - DNA, 25 bp, Homo sapien
tctgagccgcaccagttctgtgggc

SEQ ID NO: 378597 - DNA, 25 bp, Homo sapien
taacccctatccaacctgtgctgat

SEQ ID NO: 378598 - DNA, 25 bp, Homo sapien
agctggatacagtcagacaacacgg

SEQ ID NO: 378599 - DNA, 25 bp, Homo sapien
tcaaaagttgaagactccaggccat

SEQ ID NO: 378600 - DNA, 25 bp, Homo sapien
gactgcaccctgtcaagtgccagct

SEQ ID NO: 378601 - DNA, 25 bp, Homo sapien
ccagggaaataaaggctggctttgc

SEQ ID NO: 378602 - DNA, 25 bp, Homo sapien
gatttgtgttttgggatccttggac

SEQ ID NO: 378603 - DNA, 25 bp, Homo sapien
gccagggaaataaaggctggctttg

SEQ ID NO: 378604 - DNA, 25 bp, Homo sapien
tccttggactgagatgactatctga

SEQ ID NO: 378605 - DNA, 25 bp, Homo sapien
tgtgagggactgaaggatgtcacca

SEQ ID NO: 378606 - DNA, 25 bp, Homo sapien
ctgtcagagatgtgagggactgaag

SEQ ID NO: 378607 - DNA, 25 bp, Homo sapien
gatgtgagggactgaaggatgtcac

SEQ ID NO: 378608 - DNA, 25 bp, Homo sapien
gtcagagatgtgagggactgaagga

SEQ ID NO: 378609 - DNA, 25 bp, Homo sapien
ggtcagccaaatatccattctgtcc

SEQ ID NO: 378610 - DNA, 25 bp, Homo sapien
caaggtcagccaaatatccattctg

SEQ ID NO: 378611 - DNA, 25 bp, Homo sapien
tcagccaaatatccattctgtcccg

SEQ ID NO: 378612 - DNA, 25 bp, Homo sapien
agccaaatatccattctgtcccgct

SEQ ID NO: 378613 - DNA, 25 bp, Homo sapien
taagttctggaacccagtctgaagc

SEQ ID NO: 378614 - DNA, 25 bp, Homo sapien
tagaatgccctagagccgtggtgat

SEQ ID NO: 378615 - DNA, 25 bp, Homo sapien
cagcaagttcccaatgcgcaggtat

SEQ ID NO: 378616 - DNA, 25 bp, Homo sapien
cgttgcagctggaaaccgtctttag

SEQ ID NO: 378617 - DNA, 25 bp, Homo sapien
ctgccaggaataagaagcacgttct

SEQ ID NO: 378618 - DNA, 25 bp, Homo sapien
caggaataagaagcacgttctccac

SEQ ID NO: 378619 - DNA, 25 bp, Homo sapien
gccaggaataagaagcacgttctcc

SEQ ID NO: 378620 - DNA, 25 bp, Homo sapien
gaataagaagcacgttctccacaag

SEQ ID NO: 378621 - DNA, 25 bp, Homo sapien
tagaataaacctgagttcagagtcc

SEQ ID NO: 378622 - DNA, 25 bp, Homo sapien
gcaacgcggtcagttagcggcacat

SEQ ID NO: 378623 - DNA, 25 bp, Homo sapien
ttagcggcacatgtgcagctgttct

SEQ ID NO: 378624 - DNA, 25 bp, Homo sapien
ttcagagtccaggtcgccaatggca

SEQ ID NO: 378625 - DNA, 25 bp, Homo sapien
tgcttcggacttaccaaagggagag

SEQ ID NO: 378626 - DNA, 25 bp, Homo sapien
ttcaagagtggatgggacaaacagc

SEQ ID NO: 378627 - DNA, 25 bp, Homo sapien
tcagaaagacttttgtaggcacacc

SEQ ID NO: 378628 - DNA, 25 bp, Homo sapien
tcaagagctttacataaggccaggc

SEQ ID NO: 378629 - DNA, 25 bp, Homo sapien
ccattcctgtggctggcaaccaacc

SEQ ID NO: 378630 - DNA, 25 bp, Homo sapien
tgacagactcgagaccaggatggct

SEQ ID NO: 378631 - DNA, 25 bp, Homo sapien
ggccatgttccattctgcacagatg

SEQ ID NO: 378632 - DNA, 25 bp, Homo sapien
ggaacaaatagtaatgacagactcg

SEQ ID NO: 378633 - DNA, 25 bp, Homo sapien
catagaaagagagtgggcttcatcc

SEQ ID NO: 378634 - DNA, 25 bp, Homo sapien
tttgataaacctgcctgatgctcca

SEQ ID NO: 378635 - DNA, 25 bp, Homo sapien
gctcattggctctggacataacgaa

SEQ ID NO: 378636 - DNA, 25 bp, Homo sapien
ttcatcatacaagagggagcacagg

SEQ ID NO: 378637 - DNA, 25 bp, Homo sapien
ggttgagaaccagaccccttgactc

SEQ ID NO: 378638 - DNA, 25 bp, Homo sapien
gcttaatgcagatcaaggttgagaa

SEQ ID NO: 378639 - DNA, 25 bp, Homo sapien
gcttctgtagcacccactttgtaca

SEQ ID NO: 378640 - DNA, 25 bp, Homo sapien
tatccaatagtacaatcgcacagcc

SEQ ID NO: 378641 - DNA, 25 bp, Homo sapien
tgagtaccctgagttggatcctgga

SEQ ID NO: 378642 - DNA, 25 bp, Homo sapien
aattgcttcaaaccacaggagactg

SEQ ID NO: 378643 - DNA, 25 bp, Homo sapien
tagcgacacccaagtaaagtctgga

SEQ ID NO: 378644 - DNA, 25 bp, Homo sapien
gatactgggctagttctcctcaaga

SEQ ID NO: 378645 - DNA, 25 bp, Homo sapien
tgaagtgcagagaacgagtaagcaa

SEQ ID NO: 378646 - DNA, 25 bp, Homo sapien
aatgaatgggttgtataaaactgaa

SEQ ID NO: 378647 - DNA, 25 bp, Homo sapien
tcaattctgtaataggtgacaggaa

SEQ ID NO: 378648 - DNA, 25 bp, Homo sapien
gcagagaacgagtaagcaagtagct

SEQ ID NO: 378649 - DNA, 25 bp, Homo sapien
gatgtcctttcaagatgcccggtga

SEQ ID NO: 378650 - DNA, 25 bp, Homo sapien
ccccgggctagagcaatgttttgat

SEQ ID NO: 378651 - DNA, 25 bp, Homo sapien
tcttgctgtctcacacttcgtggag

SEQ ID NO: 378652 - DNA, 25 bp, Homo sapien
ggaattccgctttctcactcctcgg

SEQ ID NO: 378653 - DNA, 25 bp, Homo sapien
tacagtaggtacatatgcaatatgg

SEQ ID NO: 378654 - DNA, 25 bp, Homo sapien
ggtacatatgcaatatggctcatat

SEQ ID NO: 378655 - DNA, 25 bp, Homo sapien
caccatatacagtaggtacatatgc

SEQ ID NO: 378656 - DNA, 25 bp, Homo sapien
taaaatatcactcaacctgtcaaaa

SEQ ID NO: 378657 - DNA, 25 bp, Homo sapien
ggatctgtttccacacatagttggg

SEQ ID NO: 378658 - DNA, 25 bp, Homo sapien
tctgggagacagatgataagacaca

SEQ ID NO: 378659 - DNA, 25 bp, Homo sapien
gctgtgtgtcatggttgagatccca

SEQ ID NO: 378660 - DNA, 25 bp, Homo sapien
taatatggcagagtggaaaccagca

SEQ ID NO: 378661 - DNA, 25 bp, Homo sapien
tagaatgcaatccaaatgtttcctg

SEQ ID NO: 378662 - DNA, 25 bp, Homo sapien
gggcttcttcaatggtagaatgcaa

SEQ ID NO: 378663 - DNA, 25 bp, Homo sapien
tcctggcaacatggtggcaacagag

SEQ ID NO: 378664 - DNA, 25 bp, Homo sapien
gaaatacctggtgagctcctgatcc

SEQ ID NO: 378665 - DNA, 25 bp, Homo sapien
ggattttgaatacaggaacatccat

SEQ ID NO: 378666 - DNA, 25 bp, Homo sapien
tgatgtagggattttgaatacagga

SEQ ID NO: 378667 - DNA, 25 bp, Homo sapien
tagggattttgaatacaggaacatc

SEQ ID NO: 378668 - DNA, 25 bp, Homo sapien
ctgatgtagggattttgaatacagg

SEQ ID NO: 378669 - DNA, 25 bp, Homo sapien
aggctctccaatactcccattctca

SEQ ID NO: 378670 - DNA, 25 bp, Homo sapien
cccattctcatcagcagatctcgaa

SEQ ID NO: 378671 - DNA, 25 bp, Homo sapien
tgaatttacaaggagccaagagccc

SEQ ID NO: 378672 - DNA, 25 bp, Homo sapien
agagacgtcatttgcttctctcaga

SEQ ID NO: 378673 - DNA, 25 bp, Homo sapien
cctttccccaatgcctctgagccca

SEQ ID NO: 378674 - DNA, 25 bp, Homo sapien
ccctttccccaatgcctctgagccc

SEQ ID NO: 378675 - DNA, 25 bp, Homo sapien
tccacaaccctcatcccatctttct

SEQ ID NO: 378676 - DNA, 25 bp, Homo sapien
cttctctccacaaccctcatcccat

SEQ ID NO: 378677 - DNA, 25 bp, Homo sapien
ggcggctcatcagcactttagaaaa

SEQ ID NO: 378678 - DNA, 25 bp, Homo sapien
gcagaactcatacaacggcggctca

SEQ ID NO: 378679 - DNA, 25 bp, Homo sapien
tgaaactagagtatcggcagaactc

SEQ ID NO: 378680 - DNA, 25 bp, Homo sapien
ggatcatcttccgatccctaacatt

SEQ ID NO: 378681 - DNA, 25 bp, Homo sapien
gttcttggacctccaaatcctgaga

SEQ ID NO: 378682 - DNA, 25 bp, Homo sapien
aatcctgagactgcaaatttccact

SEQ ID NO: 378683 - DNA, 25 bp, Homo sapien
tgtcctgggttcttggacctccaaa

SEQ ID NO: 378684 - DNA, 25 bp, Homo sapien
cagacacttaggtttcatcactcca

SEQ ID NO: 378685 - DNA, 25 bp, Homo sapien
cctgaggtgccaaagcttcaacttg

SEQ ID NO: 378686 - DNA, 25 bp, Homo sapien
gatttcagtggacacctgaggtgcc

SEQ ID NO: 378687 - DNA, 25 bp, Homo sapien
acttgccgtggaaatctgagtgtga

SEQ ID NO: 378688 - DNA, 25 bp, Homo sapien
ttttaagtggtgagacccttgggca

SEQ ID NO: 378689 - DNA, 25 bp, Homo sapien
ataaggaatgttcttctgagtgggc

SEQ ID NO: 378690 - DNA, 25 bp, Homo sapien
tggcaaggctatttatgagggagca

SEQ ID NO: 378691 - DNA, 25 bp, Homo sapien
tctgaatagagggtatgaatcactc

SEQ ID NO: 378692 - DNA, 25 bp, Homo sapien
tgggcacatgtgcacgacatatgtc

SEQ ID NO: 378693 - DNA, 25 bp, Homo sapien
gactctccagagccttcaaggtcat

SEQ ID NO: 378694 - DNA, 25 bp, Homo sapien
cctctagagtgaggctctaagtcca

SEQ ID NO: 378695 - DNA, 25 bp, Homo sapien
ttcctctagagtgaggctctaagtc

SEQ ID NO: 378696 - DNA, 25 bp, Homo sapien
aggcccatcttccccggagagatga

SEQ ID NO: 378697 - DNA, 25 bp, Homo sapien
catcttccccggagagatgaaagca

SEQ ID NO: 378698 - DNA, 25 bp, Homo sapien
tgagcagccgggtgacttgcagact

SEQ ID NO: 378699 - DNA, 25 bp, Homo sapien
caagtgttgcacattaggaacggcc

SEQ ID NO: 378700 - DNA, 25 bp, Homo sapien
gcttcctccttgcaagagccggaga

SEQ ID NO: 378701 - DNA, 25 bp, Homo sapien
gagccggcgagctgtcaagatttcc

SEQ ID NO: 378702 - DNA, 25 bp, Homo sapien
aggatccttgccatccacgcagacg

SEQ ID NO: 378703 - DNA, 25 bp, Homo sapien
ttgccatccacgcagacgtttcggg

SEQ ID NO: 378704 - DNA, 25 bp, Homo sapien
catccacgcagacgtttcgggagaa

SEQ ID NO: 378705 - DNA, 25 bp, Homo sapien
gatccttgccatccacgcagacgtt

SEQ ID NO: 378706 - DNA, 25 bp, Homo sapien
agcagataccaccttgccttttttg

SEQ ID NO: 378707 - DNA, 25 bp, Homo sapien
agataccaccttgccttttttgcaa

SEQ ID NO: 378708 - DNA, 25 bp, Homo sapien
cagataccaccttgccttttttgca

SEQ ID NO: 378709 - DNA, 25 bp, Homo sapien
ataccaccttgccttttttgcaagt

SEQ ID NO: 378710 - DNA, 25 bp, Homo sapien
ggaggtgtagatttcattcgtaact

SEQ ID NO: 378711 - DNA, 25 bp, Homo sapien
aattaggaggtgtagatttcattcg

SEQ ID NO: 378712 - DNA, 25 bp, Homo sapien
ttggaaattaggaggtgtagatttc

SEQ ID NO: 378713 - DNA, 25 bp, Homo sapien
ggtgtagatttcattcgtaactcca

SEQ ID NO: 378714 - DNA, 25 bp, Homo sapien
aggcggggcagtttccctggctcaa

SEQ ID NO: 378715 - DNA, 25 bp, Homo sapien
ccaggacctggtgttcccattatct

SEQ ID NO: 378716 - DNA, 25 bp, Homo sapien
agtgctatttctgaccttatctcca

SEQ ID NO: 378717 - DNA, 25 bp, Homo sapien
tggtgttcccattatctgggcactg

SEQ ID NO: 378718 - DNA, 25 bp, Homo sapien
ctgagcagccgggaatgatgaaatg

SEQ ID NO: 378719 - DNA, 25 bp, Homo sapien
agcagccgggaatgatgaaatggat

SEQ ID NO: 378720 - DNA, 25 bp, Homo sapien
gccgggaatgatgaaatggatattg

SEQ ID NO: 378721 - DNA, 25 bp, Homo sapien
cagccgggaatgatgaaatggatat

SEQ ID NO: 378722 - DNA, 25 bp, Homo sapien
gaatctacataatttcctgagcggg

SEQ ID NO: 378723 - DNA, 25 bp, Homo sapien
caagtcgcgtctggagggcagtaac

SEQ ID NO: 378724 - DNA, 25 bp, Homo sapien
gatgatatcccagtcatgcccaggt

SEQ ID NO: 378725 - DNA, 25 bp, Homo sapien
gagtaggcggccaaacaagcaagtc

SEQ ID NO: 378726 - DNA, 25 bp, Homo sapien
tgaagttaccggaaatacgatgtgg

SEQ ID NO: 378727 - DNA, 25 bp, Homo sapien
cactagaatgcaggatgaagttacc

SEQ ID NO: 378728 - DNA, 25 bp, Homo sapien
gagccaaaacgtaaacaggtgagac

SEQ ID NO: 378729 - DNA, 25 bp, Homo sapien
taccggaaatacgatgtggcggtgc

SEQ ID NO: 378730 - DNA, 25 bp, Homo sapien
tgcacatggagtcatggcggtgtcc

SEQ ID NO: 378731 - DNA, 25 bp, Homo sapien
ctgcacatggagtcatggcggtgtc

SEQ ID NO: 378732 - DNA, 25 bp, Homo sapien
catggcggtgtccgcacaccgcctg

SEQ ID NO: 378733 - DNA, 25 bp, Homo sapien
ggcggtgtccgcacaccgcctgctt

SEQ ID NO: 378734 - DNA, 25 bp, Homo sapien
ccaagactcataatgtcaagggctg

SEQ ID NO: 378735 - DNA, 25 bp, Homo sapien
gacctttgtagaccaagactcataa

SEQ ID NO: 378736 - DNA, 25 bp, Homo sapien
acatttgctgatggatccttagacc

SEQ ID NO: 378737 - DNA, 25 bp, Homo sapien
tatttgttgggtaactgctcagggc

SEQ ID NO: 378738 - DNA, 25 bp, Homo sapien
gacagtgtgcttcatcgctatggaa

SEQ ID NO: 378739 - DNA, 25 bp, Homo sapien
ccgttgttagatcccacggttggct

SEQ ID NO: 378740 - DNA, 25 bp, Homo sapien
tcccacggttggctcacttgacagg

SEQ ID NO: 378741 - DNA, 25 bp, Homo sapien
ggacctggccctcttctgagacagt

SEQ ID NO: 378742 - DNA, 25 bp, Homo sapien
gggaatgtatgtatgacacagctga

SEQ ID NO: 378743 - DNA, 25 bp, Homo sapien
atttcagggaaagccgtgtgcctca

SEQ ID NO: 378744 - DNA, 25 bp, Homo sapien
gtatgtatgacacagctgactccat

SEQ ID NO: 378745 - DNA, 25 bp, Homo sapien
tatgacacagctgactccattttgc

SEQ ID NO: 378746 - DNA, 25 bp, Homo sapien
gagggtccctgtgatggcatttgca

SEQ ID NO: 378747 - DNA, 25 bp, Homo sapien
gagacgcagccacgcgaggagaccc

SEQ ID NO: 378748 - DNA, 25 bp, Homo sapien
gcatttgcaaaatacatccacaggg

SEQ ID NO: 378749 - DNA, 25 bp, Homo sapien
agccacgcgaggagaccccagggca

SEQ ID NO: 378750 - DNA, 25 bp, Homo sapien
ctgattgtaatctgccacgtgggaa

SEQ ID NO: 378751 - DNA, 25 bp, Homo sapien
ttctctttgggctgaaacgtgcgag

SEQ ID NO: 378752 - DNA, 25 bp, Homo sapien
tttccactgctgacccaggatctag

SEQ ID NO: 378753 - DNA, 25 bp, Homo sapien
tgaactcttaaggatgtgggaggcc

SEQ ID NO: 378754 - DNA, 25 bp, Homo sapien
tccactgtgagtatccctgctgggc

SEQ ID NO: 378755 - DNA, 25 bp, Homo sapien
agactgcctagtgcttcgggcccgg

SEQ ID NO: 378756 - DNA, 25 bp, Homo sapien
tcttccactgtgagtatccctgctg

SEQ ID NO: 378757 - DNA, 25 bp, Homo sapien
caacagcacccgaggggaggcggtg

SEQ ID NO: 378758 - DNA, 25 bp, Homo sapien
gagcactggctggtggatgtcagag

SEQ ID NO: 378759 - DNA, 25 bp, Homo sapien
tgggcaccatgggagtgagggacca

SEQ ID NO: 378760 - DNA, 25 bp, Homo sapien
gatgtcagagtgtctactctggttt

SEQ ID NO: 378761 - DNA, 25 bp, Homo sapien
tgagggaccacagcctttaacacag

SEQ ID NO: 378762 - DNA, 25 bp, Homo sapien
gcttggcttgcttatgtccccgtcc

SEQ ID NO: 378763 - DNA, 25 bp, Homo sapien
tggcttgcttatgtccccgtcccat

SEQ ID NO: 378764 - DNA, 25 bp, Homo sapien
ctgggtgcagcttggcttgcttatg

SEQ ID NO: 378765 - DNA, 25 bp, Homo sapien
gcagcttggcttgcttatgtccccg

SEQ ID NO: 378766 - DNA, 25 bp, Homo sapien
caaatgtttccccacagtgctaccc

SEQ ID NO: 378767 - DNA, 25 bp, Homo sapien
cacagccggagatctctcccaaatg

SEQ ID NO: 378768 - DNA, 25 bp, Homo sapien
cagtgggtcacagccggagatctct

SEQ ID NO: 378769 - DNA, 25 bp, Homo sapien
agccggagatctctcccaaatgttt

SEQ ID NO: 378770 - DNA, 25 bp, Homo sapien
gtctcaaaccgtgcctgaacgcggt

SEQ ID NO: 378771 - DNA, 25 bp, Homo sapien
tgaacgcggtgtctccacagagaac

SEQ ID NO: 378772 - DNA, 25 bp, Homo sapien
tgcaggctatacactcgccttggcc

SEQ ID NO: 378773 - DNA, 25 bp, Homo sapien
tgttctccatggtgggttgaggaca

SEQ ID NO: 378774 - DNA, 25 bp, Homo sapien
ggcagctgccccataagctgtaggg

SEQ ID NO: 378775 - DNA, 25 bp, Homo sapien
agccagtattcaagccctttgggaa

SEQ ID NO: 378776 - DNA, 25 bp, Homo sapien
aggcagctgccccataagctgtagg

SEQ ID NO: 378777 - DNA, 25 bp, Homo sapien
gtaggggacagccagtattcaagcc

SEQ ID NO: 378778 - DNA, 25 bp, Homo sapien
tccctggagaaattggtcagaatga

SEQ ID NO: 378779 - DNA, 25 bp, Homo sapien
tacttaccaaagaggagtaaccatc

SEQ ID NO: 378780 - DNA, 25 bp, Homo sapien
gacatttaacacttgggacaacatt

SEQ ID NO: 378781 - DNA, 25 bp, Homo sapien
tagaggtttgtctacccacagtgtc

SEQ ID NO: 378782 - DNA, 25 bp, Homo sapien
caccggcttatcgacgtttctggaa

SEQ ID NO: 378783 - DNA, 25 bp, Homo sapien
aaatgttccgatggcagtaattcac

SEQ ID NO: 378784 - DNA, 25 bp, Homo sapien
tctgtctttgaatgccgtaaatgtt

SEQ ID NO: 378785 - DNA, 25 bp, Homo sapien
gatgtttttgcagtatttagggata

SEQ ID NO: 378786 - DNA, 25 bp, Homo sapien
catcgtgagcattactcagaaacaa

SEQ ID NO: 378787 - DNA, 25 bp, Homo sapien
tggttgaatcagcatcatcgtgagc

SEQ ID NO: 378788 - DNA, 25 bp, Homo sapien
caaagggcgacaaagaataacactt

SEQ ID NO: 378789 - DNA, 25 bp, Homo sapien
cctccactttggctctcgggcggtg

SEQ ID NO: 378790 - DNA, 25 bp, Homo sapien
gcttcttccttgcaaggacgaattg

SEQ ID NO: 378791 - DNA, 25 bp, Homo sapien
gcagctgaggaaatctgtccttatc

SEQ ID NO: 378792 - DNA, 25 bp, Homo sapien
tatcatcaacaagggatgcttcttc

SEQ ID NO: 378793 - DNA, 25 bp, Homo sapien
ttgttccttgatccaagcagcaggg

SEQ ID NO: 378794 - DNA, 25 bp, Homo sapien
caataggaacccaaagtctgagaca

SEQ ID NO: 378795 - DNA, 25 bp, Homo sapien
aatagggcccctgaaagtcaccacg

SEQ ID NO: 378796 - DNA, 25 bp, Homo sapien
tttgaatccccaagtaactagccac

SEQ ID NO: 378797 - DNA, 25 bp, Homo sapien
ggaaggtcaggcttggctctacaaa

SEQ ID NO: 378798 - DNA, 25 bp, Homo sapien
tttgttgtgctaccaaaacacacgc

SEQ ID NO: 378799 - DNA, 25 bp, Homo sapien
gcagcttgacgctcctgcaggtcac

SEQ ID NO: 378800 - DNA, 25 bp, Homo sapien
aaacacacgcagcttgacgctcctg

SEQ ID NO: 378801 - DNA, 25 bp, Homo sapien
taccaaaacacacgcagcttgacgc

SEQ ID NO: 378802 - DNA, 25 bp, Homo sapien
cacacacctgcatagcctccccatt

SEQ ID NO: 378803 - DNA, 25 bp, Homo sapien
acacacctgcatagcctccccatta

SEQ ID NO: 378804 - DNA, 25 bp, Homo sapien
ccacacacctgcatagcctccccat

SEQ ID NO: 378805 - DNA, 25 bp, Homo sapien
tcttccgtagtcaactctctcttct

SEQ ID NO: 378806 - DNA, 25 bp, Homo sapien
tactgggtccgtgcaggtaatcaag

SEQ ID NO: 378807 - DNA, 25 bp, Homo sapien
gcaggtaatcaaggataatttttcc

SEQ ID NO: 378808 - DNA, 25 bp, Homo sapien
tgtgattatactgggtccgtgcagg

SEQ ID NO: 378809 - DNA, 25 bp, Homo sapien
tctgcaggaatcgtccaagtgtgtc

SEQ ID NO: 378810 - DNA, 25 bp, Homo sapien
gctatttggctggaagaaaggtcag

SEQ ID NO: 378811 - DNA, 25 bp, Homo sapien
tgcccacttatcagagctatttggc

SEQ ID NO: 378812 - DNA, 25 bp, Homo sapien
tgtgggtctctaggctcaaggtctg

SEQ ID NO: 378813 - DNA, 25 bp, Homo sapien
ccaggtagtattcatagctgtagta

SEQ ID NO: 378814 - DNA, 25 bp, Homo sapien
tcagcttcttctcgtccacgggaat

SEQ ID NO: 378815 - DNA, 25 bp, Homo sapien
cacgggaatgaggtccagatagtcc

SEQ ID NO: 378816 - DNA, 25 bp, Homo sapien
ggcagaggcgttggtcccgttggcc

SEQ ID NO: 378817 - DNA, 25 bp, Homo sapien
aatgcagagaaagccgggagtgccc

SEQ ID NO: 378818 - DNA, 25 bp, Homo sapien
gatgtctaccggagttaataagtga

SEQ ID NO: 378819 - DNA, 25 bp, Homo sapien
ttcctgctttcccatgatgtctacc

SEQ ID NO: 378820 - DNA, 25 bp, Homo sapien
caagcttattacagaagttagcaaa

SEQ ID NO: 378821 - DNA, 25 bp, Homo sapien
gacataggatgcatgacacccgaca

SEQ ID NO: 378822 - DNA, 25 bp, Homo sapien
gcgtgacgcccctgacataggatgt

SEQ ID NO: 378823 - DNA, 25 bp, Homo sapien
gacgtgtgacgcatctgacatacga

SEQ ID NO: 378824 - DNA, 25 bp, Homo sapien
gacatagggcgcatgacatatccga

SEQ ID NO: 378825 - DNA, 25 bp, Homo sapien
ccctttctgctctacgggagttagc

SEQ ID NO: 378826 - DNA, 25 bp, Homo sapien
tctgctctacgggagttagcctagg

SEQ ID NO: 378827 - DNA, 25 bp, Homo sapien
tgcggaggatgtgcgctgggctaca

SEQ ID NO: 378828 - DNA, 25 bp, Homo sapien
cgggagttagcctaggtctgctcat

SEQ ID NO: 378829 - DNA, 25 bp, Homo sapien
gccgttggtggaacagcttcagaga

SEQ ID NO: 378830 - DNA, 25 bp, Homo sapien
gggccgttggtggaacagcttcaga

SEQ ID NO: 378831 - DNA, 25 bp, Homo sapien
ttggtggaacagcttcagagacccc

SEQ ID NO: 378832 - DNA, 25 bp, Homo sapien
ggtggaacagcttcagagaccccag

SEQ ID NO: 378833 - DNA, 25 bp, Homo sapien
acccagaatgcgatcacgatggaat

SEQ ID NO: 378834 - DNA, 25 bp, Homo sapien
gctcacccagaatgcgatcacgatg

SEQ ID NO: 378835 - DNA, 25 bp, Homo sapien
cacccagaatgcgatcacgatggaa

SEQ ID NO: 378836 - DNA, 25 bp, Homo sapien
ctcacccagaatgcgatcacgatgg

SEQ ID NO: 378837 - DNA, 25 bp, Homo sapien
tcatctgcggggaggcggaccagga

SEQ ID NO: 378838 - DNA, 25 bp, Homo sapien
tctgcggggaggcggaccaggacat

SEQ ID NO: 378839 - DNA, 25 bp, Homo sapien
catctgcggggaggcggaccaggac

SEQ ID NO: 378840 - DNA, 25 bp, Homo sapien
ctcatctgcggggaggcggaccagg

SEQ ID NO: 378841 - DNA, 25 bp, Homo sapien
agcgtctgagtgacccacagactca

SEQ ID NO: 378842 - DNA, 25 bp, Homo sapien
acccacagactcacaccccttctta

SEQ ID NO: 378843 - DNA, 25 bp, Homo sapien
gtctgagtgacccacagactcacac

SEQ ID NO: 378844 - DNA, 25 bp, Homo sapien
tgacccacagactcacaccccttct

SEQ ID NO: 378845 - DNA, 25 bp, Homo sapien
agaacagtcattaggagagcagcag

SEQ ID NO: 378846 - DNA, 25 bp, Homo sapien
ctaagaacagtcattaggagagcag

SEQ ID NO: 378847 - DNA, 25 bp, Homo sapien
aacagtcattaggagagcagcagct

SEQ ID NO: 378848 - DNA, 25 bp, Homo sapien
taagaacagtcattaggagagcagc

SEQ ID NO: 378849 - DNA, 25 bp, Homo sapien
gccctcttcgggtgagcgatggcaa

SEQ ID NO: 378850 - DNA, 25 bp, Homo sapien
ttcgggtgagcgatggcaaaatata

SEQ ID NO: 378851 - DNA, 25 bp, Homo sapien
agccactggacaggccctcttcggg

SEQ ID NO: 378852 - DNA, 25 bp, Homo sapien
gacaggccctcttcgggtgagcgat

SEQ ID NO: 378853 - DNA, 25 bp, Homo sapien
aacactaagacgctgtgccaatgcg

SEQ ID NO: 378854 - DNA, 25 bp, Homo sapien
gctgaccagcttcctacgcttaggg

SEQ ID NO: 378855 - DNA, 25 bp, Homo sapien
caagacttccgtccgtaatggacat

SEQ ID NO: 378856 - DNA, 25 bp, Homo sapien
gatgtcggtgccatgcttcctagac

SEQ ID NO: 378857 - DNA, 25 bp, Homo sapien
aggccgtgactccaggggcatgttt

SEQ ID NO: 378858 - DNA, 25 bp, Homo sapien
aggttgaggccgtgactccaggggc

SEQ ID NO: 378859 - DNA, 25 bp, Homo sapien
tccctgtggcacggcaggcacttct

SEQ ID NO: 378860 - DNA, 25 bp, Homo sapien
tgtggcacggcaggcacttctggat

SEQ ID NO: 378861 - DNA, 25 bp, Homo sapien
ggcttgctcctgacgaggggacccc

SEQ ID NO: 378862 - DNA, 25 bp, Homo sapien
gaggagctctcctgtcgtagcggct

SEQ ID NO: 378863 - DNA, 25 bp, Homo sapien
tctgcaattgagaggtcctgtctcc

SEQ ID NO: 378864 - DNA, 25 bp, Homo sapien
attgagggtcagttcccagaggaga

SEQ ID NO: 378865 - DNA, 25 bp, Homo sapien
cagttcactcagctatggccacgat

SEQ ID NO: 378866 - DNA, 25 bp, Homo sapien
catgcaaatggcctctaagaagaac

SEQ ID NO: 378867 - DNA, 25 bp, Homo sapien
cagtaagcaagcaggctaggtgtgc

SEQ ID NO: 378868 - DNA, 25 bp, Homo sapien
tcaaaggcataggatgctcctgctc

SEQ ID NO: 378869 - DNA, 25 bp, Homo sapien
cagatccactgtcacataaagtcac

SEQ ID NO: 378870 - DNA, 25 bp, Homo sapien
tgcctgaaagctgtaggggacatat

SEQ ID NO: 378871 - DNA, 25 bp, Homo sapien
tagatctttcaagggtcccagatcc

SEQ ID NO: 378872 - DNA, 25 bp, Homo sapien
gctgggcactagaggactagatctt

SEQ ID NO: 378873 - DNA, 25 bp, Homo sapien
gtattagtatgactttttgaataag

SEQ ID NO: 378874 - DNA, 25 bp, Homo sapien
cataacaaagtattagtatgacttt

SEQ ID NO: 378875 - DNA, 25 bp, Homo sapien
ttctataaaaagtcataacaaagta

SEQ ID NO: 378876 - DNA, 25 bp, Homo sapien
gtttatttttcagcaggtgaggtgg

SEQ ID NO: 378877 - DNA, 25 bp, Homo sapien
gctcgagtttgaggcagcacttctg

SEQ ID NO: 378878 - DNA, 25 bp, Homo sapien
ttctgaatgcagaagagattcatct

SEQ ID NO: 378879 - DNA, 25 bp, Homo sapien
ggcttggagctcatcacaggaaata

SEQ ID NO: 378880 - DNA, 25 bp, Homo sapien
tcatcacaggaaatagctcgagttt

SEQ ID NO: 378881 - DNA, 25 bp, Homo sapien
gaatgtggggacttctaggccatga

SEQ ID NO: 378882 - DNA, 25 bp, Homo sapien
ttgaactgcccagtaaatgataaac

SEQ ID NO: 378883 - DNA, 25 bp, Homo sapien
taaactcgggcctgtaggtgcccag

SEQ ID NO: 378884 - DNA, 25 bp, Homo sapien
ggtgcccagcatcagagttgcaagg

SEQ ID NO: 378885 - DNA, 25 bp, Homo sapien
gacttactggagaccagtgatccct

SEQ ID NO: 378886 - DNA, 25 bp, Homo sapien
atggcatctaccttggagacatgca

SEQ ID NO: 378887 - DNA, 25 bp, Homo sapien
gggcctcctgaggtccatcttgact

SEQ ID NO: 378888 - DNA, 25 bp, Homo sapien
gcatctaccttggagacatgcaagg

SEQ ID NO: 378889 - DNA, 25 bp, Homo sapien
tttagggacatgaacagattcaccg

SEQ ID NO: 378890 - DNA, 25 bp, Homo sapien
ttgagaaggcccaagcccgggagct

SEQ ID NO: 378891 - DNA, 25 bp, Homo sapien
gtgctttccaccaaggacgtccttg

SEQ ID NO: 378892 - DNA, 25 bp, Homo sapien
accgtaaatgagacagtgctttcca

SEQ ID NO: 378893 - DNA, 25 bp, Homo sapien
cagtgtacacagagtgaagccgcag

SEQ ID NO: 378894 - DNA, 25 bp, Homo sapien
aaagctctttgtttctaccgcactg

SEQ ID NO: 378895 - DNA, 25 bp, Homo sapien
taagaaagcgtttggaagcagggcc

SEQ ID NO: 378896 - DNA, 25 bp, Homo sapien
tagagtcaggaggagaagctttagc

SEQ ID NO: 378897 - DNA, 25 bp, Homo sapien
aactcacatggagccccaagactct

SEQ ID NO: 378898 - DNA, 25 bp, Homo sapien
acagcaaactcacatggagccccaa

SEQ ID NO: 378899 - DNA, 25 bp, Homo sapien
ggacaaccggtacagcaaactcaca

SEQ ID NO: 378900 - DNA, 25 bp, Homo sapien
cgtgaccgggacaaccggtacagca

SEQ ID NO: 378901 - DNA, 25 bp, Homo sapien
gtgtcgtggagtgtccgctcgcccc

SEQ ID NO: 378902 - DNA, 25 bp, Homo sapien
cgagtcttcgtggatcggccaggcc

SEQ ID NO: 378903 - DNA, 25 bp, Homo sapien
agagcacccgaagagccactgggat

SEQ ID NO: 378904 - DNA, 25 bp, Homo sapien
ctgggatcagaaatgcgccccggtg

SEQ ID NO: 378905 - DNA, 25 bp, Homo sapien
agctcttcatgcgacaccttcaggg

SEQ ID NO: 378906 - DNA, 25 bp, Homo sapien
gatagggtcggctttgctgtctcca

SEQ ID NO: 378907 - DNA, 25 bp, Homo sapien
agtgacaggctgctaccagaccagt

SEQ ID NO: 378908 - DNA, 25 bp, Homo sapien
tcctgttgtgtgtgaagcaagctct

SEQ ID NO: 378909 - DNA, 25 bp, Homo sapien
tatgagcctcgtaaaagatgttggg

SEQ ID NO: 378910 - DNA, 25 bp, Homo sapien
agtaggcccaatcaagaaaggtcgg

SEQ ID NO: 378911 - DNA, 25 bp, Homo sapien
tgttgaaaccccatcccaagtgtga

SEQ ID NO: 378912 - DNA, 25 bp, Homo sapien
gaacaagtacaaaagctctcgggct

SEQ ID NO: 378913 - DNA, 25 bp, Homo sapien
aaaccggtcagatggctccggagcc

SEQ ID NO: 378914 - DNA, 25 bp, Homo sapien
acggcgacgagctggaggtctcaaa

SEQ ID NO: 378915 - DNA, 25 bp, Homo sapien
gaggtctcaaaaccggtcagatggc

SEQ ID NO: 378916 - DNA, 25 bp, Homo sapien
tccggagccgggatctttagctcca

SEQ ID NO: 378917 - DNA, 25 bp, Homo sapien
cgcagggctaaggacggcgtcacat

SEQ ID NO: 378918 - DNA, 25 bp, Homo sapien
gatccgcgtagtttccccgagagga

SEQ ID NO: 378919 - DNA, 25 bp, Homo sapien
gagaggaaatctccgttgccgccgt

SEQ ID NO: 378920 - DNA, 25 bp, Homo sapien
tagggaaagcgcagccttcgcgcgc

SEQ ID NO: 378921 - DNA, 25 bp, Homo sapien
tacctgccggcggaggccgggatgc

SEQ ID NO: 378922 - DNA, 25 bp, Homo sapien
acagtgcagtagaagaggcgcagga

SEQ ID NO: 378923 - DNA, 25 bp, Homo sapien
gagcgctgagatctctttggagcag

SEQ ID NO: 378924 - DNA, 25 bp, Homo sapien
gcgtcggcggttggcgtgcgcgtcc

SEQ ID NO: 378925 - DNA, 25 bp, Homo sapien
ccagtcgagggttcacctgggcgct

SEQ ID NO: 378926 - DNA, 25 bp, Homo sapien
tcgagggttcacctgggcgctccgc

SEQ ID NO: 378927 - DNA, 25 bp, Homo sapien
tgcccccagtcgagggttcacctgg

SEQ ID NO: 378928 - DNA, 25 bp, Homo sapien
tgcggctgcccccagtcgagggttc

SEQ ID NO: 378929 - DNA, 25 bp, Homo sapien
gcctccgaccacaacacgtgtattt

SEQ ID NO: 378930 - DNA, 25 bp, Homo sapien
acgcgggtgacaaacgcggcgcaac

SEQ ID NO: 378931 - DNA, 25 bp, Homo sapien
tgggcaaacgggctacgcgggtgac

SEQ ID NO: 378932 - DNA, 25 bp, Homo sapien
accacaacacgtgtattttacagcg

SEQ ID NO: 378933 - DNA, 25 bp, Homo sapien
caggtgtgcttcagcggcaaggaca

SEQ ID NO: 378934 - DNA, 25 bp, Homo sapien
gacatgtgttaccttaagcaactgc

SEQ ID NO: 378935 - DNA, 25 bp, Homo sapien
cagccttgccagagggagatccagg

SEQ ID NO: 378936 - DNA, 25 bp, Homo sapien
gcaactgcagcgctaacttaagcat

SEQ ID NO: 378937 - DNA, 25 bp, Homo sapien
ctgcactgaggacccgatagggacc

SEQ ID NO: 378938 - DNA, 25 bp, Homo sapien
cgatagggaccgactgtgcaaagcc

SEQ ID NO: 378939 - DNA, 25 bp, Homo sapien
acccgatagggaccgactgtgcaaa

SEQ ID NO: 378940 - DNA, 25 bp, Homo sapien
tgaggacccgatagggaccgactgt

SEQ ID NO: 378941 - DNA, 25 bp, Homo sapien
cttgttctttgctatgtactagcct

SEQ ID NO: 378942 - DNA, 25 bp, Homo sapien
tcaacttctggtttgcccttgttct

SEQ ID NO: 378943 - DNA, 25 bp, Homo sapien
tactagcctactgcacaaacaggac

SEQ ID NO: 378944 - DNA, 25 bp, Homo sapien
tgctatgtactagcctactgcacaa

SEQ ID NO: 378945 - DNA, 25 bp, Homo sapien
gcagagggatcccaagtttcctcta

SEQ ID NO: 378946 - DNA, 25 bp, Homo sapien
cctctgctagtttttgatgttccct

SEQ ID NO: 378947 - DNA, 25 bp, Homo sapien
gggacccctgacattctggcacttt

SEQ ID NO: 378948 - DNA, 25 bp, Homo sapien
ctatattgtacagacaatggctggg

SEQ ID NO: 378949 - DNA, 25 bp, Homo sapien
gatgatagccttccagtggccgctg

SEQ ID NO: 378950 - DNA, 25 bp, Homo sapien
gtggccgctggcgacatctcaaaat

SEQ ID NO: 378951 - DNA, 25 bp, Homo sapien
ttccagtggccgctggcgacatctc

SEQ ID NO: 378952 - DNA, 25 bp, Homo sapien
ttaatgcagtgatgatagccttcca

SEQ ID NO: 378953 - DNA, 25 bp, Homo sapien
taaagaagttactgcctctgctgag

SEQ ID NO: 378954 - DNA, 25 bp, Homo sapien
gaaactcagaagacaccagaatcac

SEQ ID NO: 378955 - DNA, 25 bp, Homo sapien
ttactcatactgagggaaaccaagt

SEQ ID NO: 378956 - DNA, 25 bp, Homo sapien
tcaccctatgggccaggctgtaaaa

SEQ ID NO: 378957 - DNA, 25 bp, Homo sapien
caacgtagccatagggttagcacca

SEQ ID NO: 378958 - DNA, 25 bp, Homo sapien
agaccatcaagcaactccaacgtag

SEQ ID NO: 378959 - DNA, 25 bp, Homo sapien
taaacatgacagaagtgccactgct

SEQ ID NO: 378960 - DNA, 25 bp, Homo sapien
gtggtctcactccttatcgcctgcg

SEQ ID NO: 378961 - DNA, 25 bp, Homo sapien
catgttttagattccttcttaaatt

SEQ ID NO: 378962 - DNA, 25 bp, Homo sapien
aatcctaggacaccatcactttgag

SEQ ID NO: 378963 - DNA, 25 bp, Homo sapien
tcttccttggaatgcttaactctga

SEQ ID NO: 378964 - DNA, 25 bp, Homo sapien
tattatttcgctgtctatggctccc

SEQ ID NO: 378965 - DNA, 25 bp, Homo sapien
tatggctcccactgtttttgtagca

SEQ ID NO: 378966 - DNA, 25 bp, Homo sapien
gaaagctgtcacgagtacgcatcgc

SEQ ID NO: 378967 - DNA, 25 bp, Homo sapien
tacgcatcgcatgggcctttgcaga

SEQ ID NO: 378968 - DNA, 25 bp, Homo sapien
taagcctgagaatttcggaagccac

SEQ ID NO: 378969 - DNA, 25 bp, Homo sapien
tcttgttcctcagtacagtacgatg

SEQ ID NO: 378970 - DNA, 25 bp, Homo sapien
cattagctttggaaggagcgttctg

SEQ ID NO: 378971 - DNA, 25 bp, Homo sapien
tcaagtatatccctccaaagctgta

SEQ ID NO: 378972 - DNA, 25 bp, Homo sapien
gagggacctttgcacttgaaagtgg

SEQ ID NO: 378973 - DNA, 25 bp, Homo sapien
tcattctgagtctttgtgtccaggg

SEQ ID NO: 378974 - DNA, 25 bp, Homo sapien
gagattgccagatattcccaaggga

SEQ ID NO: 378975 - DNA, 25 bp, Homo sapien
taacctgccttgacttgaatagcca

SEQ ID NO: 378976 - DNA, 25 bp, Homo sapien
ttcactgggtaaagatcgccgtccc

SEQ ID NO: 378977 - DNA, 25 bp, Homo sapien
gccgtcccctgtaaagagcatatag

SEQ ID NO: 378978 - DNA, 25 bp, Homo sapien
acctccttcgggctgcagaaggcaa

SEQ ID NO: 378979 - DNA, 25 bp, Homo sapien
gaactgaagacctccttcgggctgc

SEQ ID NO: 378980 - DNA, 25 bp, Homo sapien
ctgaagacctccttcgggctgcaga

SEQ ID NO: 378981 - DNA, 25 bp, Homo sapien
gaagacctccttcgggctgcagaag

SEQ ID NO: 378982 - DNA, 25 bp, Homo sapien
taacactgtctatacccagcggtaa

SEQ ID NO: 378983 - DNA, 25 bp, Homo sapien
gtcactgtccactgtttaaggtcca

SEQ ID NO: 378984 - DNA, 25 bp, Homo sapien
gacatggaggacaaactgtgcactc

SEQ ID NO: 378985 - DNA, 25 bp, Homo sapien
cggtaaatactccattcaagaggca

SEQ ID NO: 378986 - DNA, 25 bp, Homo sapien
tccagaaggttccacgaggttcagg

SEQ ID NO: 378987 - DNA, 25 bp, Homo sapien
gagaatatgtgggtaatgaagacaa

SEQ ID NO: 378988 - DNA, 25 bp, Homo sapien
aatgaagacaaatagtggagagtag

SEQ ID NO: 378989 - DNA, 25 bp, Homo sapien
cagaaggttccacgaggttcagggg

SEQ ID NO: 378990 - DNA, 25 bp, Homo sapien
ttcaagctgactggcgttagtgcac

SEQ ID NO: 378991 - DNA, 25 bp, Homo sapien
ttagtgcactttgaagtgggaagca

SEQ ID NO: 378992 - DNA, 25 bp, Homo sapien
tgactggcgttagtgcactttgaag

SEQ ID NO: 378993 - DNA, 25 bp, Homo sapien
gggatgccttcaagctgactggcgt

SEQ ID NO: 378994 - DNA, 25 bp, Homo sapien
ggcatgagaggttccctagagtggg

SEQ ID NO: 378995 - DNA, 25 bp, Homo sapien
agtgaccatgagcaaattactgaac

SEQ ID NO: 378996 - DNA, 25 bp, Homo sapien
tatctcaagtgaccatgagcaaatt

SEQ ID NO: 378997 - DNA, 25 bp, Homo sapien
gcctcataaaggagatggagaggaa

SEQ ID NO: 378998 - DNA, 25 bp, Homo sapien
tgtacgtcacgagatgaacactggg

SEQ ID NO: 378999 - DNA, 25 bp, Homo sapien
cctccttgatagacgcagagcggaa

SEQ ID NO: 379000 - DNA, 25 bp, Homo sapien
taacctgaagggatgcgggagctac

SEQ ID NO: 379001 - DNA, 25 bp, Homo sapien
aaggcctccagctagtgatccacag

SEQ ID NO: 379002 - DNA, 25 bp, Homo sapien
taagtccttcctctagtcccaggtg

SEQ ID NO: 379003 - DNA, 25 bp, Homo sapien
aaacctcgttctgggctacacctgg

SEQ ID NO: 379004 - DNA, 25 bp, Homo sapien
caatctctcctggtagtacagtggg

SEQ ID NO: 379005 - DNA, 25 bp, Homo sapien
tcttcccgagcacacaggagtagta

SEQ ID NO: 379006 - DNA, 25 bp, Homo sapien
tgagccacagtgcctggcctcttct

SEQ ID NO: 379007 - DNA, 25 bp, Homo sapien
agattcaagcaattctcctgcctca

SEQ ID NO: 379008 - DNA, 25 bp, Homo sapien
ctgcaacctccacctcccagattca

SEQ ID NO: 379009 - DNA, 25 bp, Homo sapien
ggaatacagtggtaagatctcagcc

SEQ ID NO: 379010 - DNA, 25 bp, Homo sapien
catattcttattctgagagtggtat

SEQ ID NO: 379011 - DNA, 25 bp, Homo sapien
atattcttattctgagagtggtatt

SEQ ID NO: 379012 - DNA, 25 bp, Homo sapien
tctgggtcagaaacctcggtctggg

SEQ ID NO: 379013 - DNA, 25 bp, Homo sapien
taagggaactcctcctgtttcaatg

SEQ ID NO: 379014 - DNA, 25 bp, Homo sapien
agggtactgagaagcgagccatgcc

SEQ ID NO: 379015 - DNA, 25 bp, Homo sapien
catggaccttagtgagaacaggcac

SEQ ID NO: 379016 - DNA, 25 bp, Homo sapien
ggaagggctgttcaatcaacaacat

SEQ ID NO: 379017 - DNA, 25 bp, Homo sapien
aatattcagtcgagttactagaggc

SEQ ID NO: 379018 - DNA, 25 bp, Homo sapien
ctggaaaatattcagtcgagttact

SEQ ID NO: 379019 - DNA, 25 bp, Homo sapien
cagtcgagttactagaggcccagga

SEQ ID NO: 379020 - DNA, 25 bp, Homo sapien
tattcagtcgagttactagaggccc

SEQ ID NO: 379021 - DNA, 25 bp, Homo sapien
aaatgccgattggacacttatcgta

SEQ ID NO: 379022 - DNA, 25 bp, Homo sapien
aaatagtccccatcacaggcatagg

SEQ ID NO: 379023 - DNA, 25 bp, Homo sapien
ttatcgtagaatgccgagggcactg

SEQ ID NO: 379024 - DNA, 25 bp, Homo sapien
gccgattggacacttatcgtagaat

SEQ ID NO: 379025 - DNA, 25 bp, Homo sapien
gctctacaataggtaggaattctat

SEQ ID NO: 379026 - DNA, 25 bp, Homo sapien
tattgaagtgtacaaagggggctct

SEQ ID NO: 379027 - DNA, 25 bp, Homo sapien
acaaagggggctctacaataggtag

SEQ ID NO: 379028 - DNA, 25 bp, Homo sapien
gaagtgtacaaagggggctctacaa

SEQ ID NO: 379029 - DNA, 25 bp, Homo sapien
cttccctttctacaggagtatttat

SEQ ID NO: 379030 - DNA, 25 bp, Homo sapien
cctttctacaggagtatttatggga

SEQ ID NO: 379031 - DNA, 25 bp, Homo sapien
tctacaggagtatttatgggagatg

SEQ ID NO: 379032 - DNA, 25 bp, Homo sapien
tccctttctacaggagtatttatgg

SEQ ID NO: 379033 - DNA, 25 bp, Homo sapien
tcatagtagctcgtggaatagctcc

SEQ ID NO: 379034 - DNA, 25 bp, Homo sapien
ggccttagggagagctacacagcat

SEQ ID NO: 379035 - DNA, 25 bp, Homo sapien
tcagaccccagaaggtgcagctttc

SEQ ID NO: 379036 - DNA, 25 bp, Homo sapien
cacaaatgctaacctgtcggcctgg

SEQ ID NO: 379037 - DNA, 25 bp, Homo sapien
tactttaggtctgaatttagtgcag

SEQ ID NO: 379038 - DNA, 25 bp, Homo sapien
gttcccaagaatctgcttattactt

SEQ ID NO: 379039 - DNA, 25 bp, Homo sapien
ttagtgcagacacgtgagcctctct

SEQ ID NO: 379040 - DNA, 25 bp, Homo sapien
agacacgtgagcctctctgagtcac

SEQ ID NO: 379041 - DNA, 25 bp, Homo sapien
caagtcctgcttgtgataaacacag

SEQ ID NO: 379042 - DNA, 25 bp, Homo sapien
taaacacagaggtcctgaacttggg

SEQ ID NO: 379043 - DNA, 25 bp, Homo sapien
caaatggaacaagtcctgcttgtga

SEQ ID NO: 379044 - DNA, 25 bp, Homo sapien
tctaggtcctcgttcccaaatggaa

SEQ ID NO: 379045 - DNA, 25 bp, Homo sapien
ccctcggggagcagttttcttagtg

SEQ ID NO: 379046 - DNA, 25 bp, Homo sapien
ccagacagctccttcgtttttaagg

SEQ ID NO: 379047 - DNA, 25 bp, Homo sapien
tcagactttctgttgagcattggca

SEQ ID NO: 379048 - DNA, 25 bp, Homo sapien
gtttttaaggcatctgctctgtgga

SEQ ID NO: 379049 - DNA, 25 bp, Homo sapien
tcaaactcaagaggatgggacccac

SEQ ID NO: 379050 - DNA, 25 bp, Homo sapien
atcaaactcaagaggatgggaccca

SEQ ID NO: 379051 - DNA, 25 bp, Homo sapien
tcatcaaactcaagaggatgggacc

SEQ ID NO: 379052 - DNA, 25 bp, Homo sapien
cctcatcaaactcaagaggatggga

SEQ ID NO: 379053 - DNA, 25 bp, Homo sapien
tgagagagctgtgaccatcaggatt

SEQ ID NO: 379054 - DNA, 25 bp, Homo sapien
tttcatccttaaatagccccacaca

SEQ ID NO: 379055 - DNA, 25 bp, Homo sapien
ttccagcttacgaaccatccacagg

SEQ ID NO: 379056 - DNA, 25 bp, Homo sapien
gggtcccctagctttaagctgagag

SEQ ID NO: 379057 - DNA, 25 bp, Homo sapien
tattggggtgcagggtacttcaggg

SEQ ID NO: 379058 - DNA, 25 bp, Homo sapien
tccaccactactggtgcggcggctg

SEQ ID NO: 379059 - DNA, 25 bp, Homo sapien
aaggcactgagtgccgaggctccag

SEQ ID NO: 379060 - DNA, 25 bp, Homo sapien
tccagggggtgcaagcgaggtcaga

SEQ ID NO: 379061 - DNA, 25 bp, Homo sapien
ctctgatccaccactactggtgcgg

SEQ ID NO: 379062 - DNA, 25 bp, Homo sapien
aacctgatccaatagtgccaggctc

SEQ ID NO: 379063 - DNA, 25 bp, Homo sapien
acctgatccaatagtgccaggctcc

SEQ ID NO: 379064 - DNA, 25 bp, Homo sapien
aaacctgatccaatagtgccaggct

SEQ ID NO: 379065 - DNA, 25 bp, Homo sapien
ccaagctgtgtctaaggccaaagag

SEQ ID NO: 379066 - DNA, 25 bp, Homo sapien
ggctctgcaaagggaaggacgcctc

SEQ ID NO: 379067 - DNA, 25 bp, Homo sapien
tgattgggttagctccctgtctccc

SEQ ID NO: 379068 - DNA, 25 bp, Homo sapien
gtgactgccagacccgaacctgggc

SEQ ID NO: 379069 - DNA, 25 bp, Homo sapien
agagggtagaaaagggacaggcttg

SEQ ID NO: 379070 - DNA, 25 bp, Homo sapien
gaaaagggacaggcttgaaaactgc

SEQ ID NO: 379071 - DNA, 25 bp, Homo sapien
gagggtagaaaagggacaggcttga

SEQ ID NO: 379072 - DNA, 25 bp, Homo sapien
aagggacaggcttgaaaactgctca

SEQ ID NO: 379073 - DNA, 25 bp, Homo sapien
gctggttctggcattcgtccagcac

SEQ ID NO: 379074 - DNA, 25 bp, Homo sapien
ctattgaccaggaggtggcaggccc

SEQ ID NO: 379075 - DNA, 25 bp, Homo sapien
gcccgctggttctggcattcgtcca

SEQ ID NO: 379076 - DNA, 25 bp, Homo sapien
tggcaggcccgctggttctggcatt

SEQ ID NO: 379077 - DNA, 25 bp, Homo sapien
tcctggacaaaggtcaggtccaaaa

SEQ ID NO: 379078 - DNA, 25 bp, Homo sapien
ccaaacacactgtccccctccgaag

SEQ ID NO: 379079 - DNA, 25 bp, Homo sapien
cacactgtccccctccgaagttact

SEQ ID NO: 379080 - DNA, 25 bp, Homo sapien
caaacacactgtccccctccgaagt

SEQ ID NO: 379081 - DNA, 25 bp, Homo sapien
cccctgagagttgtagcatcagtac

SEQ ID NO: 379082 - DNA, 25 bp, Homo sapien
tcactttgaggaacagcaattgcag

SEQ ID NO: 379083 - DNA, 25 bp, Homo sapien
gcacaagacacctctgaaacgcaga

SEQ ID NO: 379084 - DNA, 25 bp, Homo sapien
tgtgacccacccacggaagatggat

SEQ ID NO: 379085 - DNA, 25 bp, Homo sapien
tgtcttcaaggctatgacacagtcg

SEQ ID NO: 379086 - DNA, 25 bp, Homo sapien
ctaatggccgtcaagggtgtcttca

SEQ ID NO: 379087 - DNA, 25 bp, Homo sapien
actgagatcttgatgtgatttcctg

SEQ ID NO: 379088 - DNA, 25 bp, Homo sapien
tcgtctgtgagattcagcggttgga

SEQ ID NO: 379089 - DNA, 25 bp, Homo sapien
gcaatattttacaccatggaaggag

SEQ ID NO: 379090 - DNA, 25 bp, Homo sapien
tattttacaccatggaaggagggaa

SEQ ID NO: 379091 - DNA, 25 bp, Homo sapien
aatattttacaccatggaaggaggg

SEQ ID NO: 379092 - DNA, 25 bp, Homo sapien
aagggcaatattttacaccatggaa

SEQ ID NO: 379093 - DNA, 25 bp, Homo sapien
aacctacatttcctgaagggatgca

SEQ ID NO: 379094 - DNA, 25 bp, Homo sapien
cacacagcagatacgatatgcagca

SEQ ID NO: 379095 - DNA, 25 bp, Homo sapien
tgctgagctcaactccatggtcctg

SEQ ID NO: 379096 - DNA, 25 bp, Homo sapien
catggtcctgtgctagcgtgttaca

SEQ ID NO: 379097 - DNA, 25 bp, Homo sapien
taaaggtagccttgatgccaacaaa

SEQ ID NO: 379098 - DNA, 25 bp, Homo sapien
agtaacgcaacacccacatgcaagg

SEQ ID NO: 379099 - DNA, 25 bp, Homo sapien
tgtgcgtgtcacattacatcctggg

SEQ ID NO: 379100 - DNA, 25 bp, Homo sapien
cagcgatttcgtccccagattatgg

SEQ ID NO: 379101 - DNA, 25 bp, Homo sapien
aaatcattagtgagttgtaaccagc

SEQ ID NO: 379102 - DNA, 25 bp, Homo sapien
tttttcagccaaacaagcattggcg

SEQ ID NO: 379103 - DNA, 25 bp, Homo sapien
cattggcgttaactgcaaacaagag

SEQ ID NO: 379104 - DNA, 25 bp, Homo sapien
tagcggacaggtgcatttttcagcc

SEQ ID NO: 379105 - DNA, 25 bp, Homo sapien
ggaattggtgagctctgtccaagtc

SEQ ID NO: 379106 - DNA, 25 bp, Homo sapien
aaggaattggtgagctctgtccaag

SEQ ID NO: 379107 - DNA, 25 bp, Homo sapien
agaaggaattggtgagctctgtcca

SEQ ID NO: 379108 - DNA, 25 bp, Homo sapien
aattggtgagctctgtccaagtccc

SEQ ID NO: 379109 - DNA, 25 bp, Homo sapien
gctcctggtcttcacacacggtttt

SEQ ID NO: 379110 - DNA, 25 bp, Homo sapien
tcctggtcttcacacacggttttgt

SEQ ID NO: 379111 - DNA, 25 bp, Homo sapien
agctcctggtcttcacacacggttt

SEQ ID NO: 379112 - DNA, 25 bp, Homo sapien
ctggtcttcacacacggttttgttt

SEQ ID NO: 379113 - DNA, 25 bp, Homo sapien
tagatgttgaggaacttggattcat

SEQ ID NO: 379114 - DNA, 25 bp, Homo sapien
gtagatgttgaggaacttggattca

SEQ ID NO: 379115 - DNA, 25 bp, Homo sapien
aaccctggctaatacacacacaaaa

SEQ ID NO: 379116 - DNA, 25 bp, Homo sapien
ttacacgatcacaagatcgtgattg

SEQ ID NO: 379117 - DNA, 25 bp, Homo sapien
gaaccctggctaatacacacacaaa

SEQ ID NO: 379118 - DNA, 25 bp, Homo sapien
caataagcgcaggtccttgggctgt

SEQ ID NO: 379119 - DNA, 25 bp, Homo sapien
tagattttgatcaataagcgcaggt

SEQ ID NO: 379120 - DNA, 25 bp, Homo sapien
aagcgcaggtccttgggctgtttca

SEQ ID NO: 379121 - DNA, 25 bp, Homo sapien
tttgatcaataagcgcaggtccttg

SEQ ID NO: 379122 - DNA, 25 bp, Homo sapien
tggccaactgaattctgctgaaaag

SEQ ID NO: 379123 - DNA, 25 bp, Homo sapien
taagttagactagtaagcctgggaa

SEQ ID NO: 379124 - DNA, 25 bp, Homo sapien
caactgacagggatgttacttactg

SEQ ID NO: 379125 - DNA, 25 bp, Homo sapien
accattcggcttacagatttacctg

SEQ ID NO: 379126 - DNA, 25 bp, Homo sapien
tgaggacctgatgaacagggcaccc

SEQ ID NO: 379127 - DNA, 25 bp, Homo sapien
ccttccatgtgaggctgaggacctg

SEQ ID NO: 379128 - DNA, 25 bp, Homo sapien
caccaagggcaatggacgcaagtgc

SEQ ID NO: 379129 - DNA, 25 bp, Homo sapien
gaagggcgagcaggctttcactctg

SEQ ID NO: 379130 - DNA, 25 bp, Homo sapien
ccaaaggtttgtatttccacacgca

SEQ ID NO: 379131 - DNA, 25 bp, Homo sapien
tacagtggcccgacaatggtccctt

SEQ ID NO: 379132 - DNA, 25 bp, Homo sapien
cacgcatgcgtggttctgcccttag

SEQ ID NO: 379133 - DNA, 25 bp, Homo sapien
cacaggtgttgttggaacacacgca

SEQ ID NO: 379134 - DNA, 25 bp, Homo sapien
tgaggaaatggccaaggtcattcac

SEQ ID NO: 379135 - DNA, 25 bp, Homo sapien
ggaaatggccaaggtcattcacagt

SEQ ID NO: 379136 - DNA, 25 bp, Homo sapien
gacaaggtgtgcaagtgcaaataca

SEQ ID NO: 379137 - DNA, 25 bp, Homo sapien
gagacaaggtgtgcaagtgcaaata

SEQ ID NO: 379138 - DNA, 25 bp, Homo sapien
tgaccaagtccgactcctcagaact

SEQ ID NO: 379139 - DNA, 25 bp, Homo sapien
gcacaaggccccatatgacttgcct

SEQ ID NO: 379140 - DNA, 25 bp, Homo sapien
ttcctgcctgcttaagatccccaac

SEQ ID NO: 379141 - DNA, 25 bp, Homo sapien
cagaactgtgcacaaggccccatat

SEQ ID NO: 379142 - DNA, 25 bp, Homo sapien
gattcctctatcctggtgccctctg

SEQ ID NO: 379143 - DNA, 25 bp, Homo sapien
acacatgtgagagctggtgtctgat

SEQ ID NO: 379144 - DNA, 25 bp, Homo sapien
cacacatgtgagagctggtgtctga

SEQ ID NO: 379145 - DNA, 25 bp, Homo sapien
acacacatgtgagagctggtgtctg

SEQ ID NO: 379146 - DNA, 25 bp, Homo sapien
ttgctttttacccagatgaaagcat

SEQ ID NO: 379147 - DNA, 25 bp, Homo sapien
gatgaaagcatcctttcacaggatt

SEQ ID NO: 379148 - DNA, 25 bp, Homo sapien
aagcatcctttcacaggatttgcaa

SEQ ID NO: 379149 - DNA, 25 bp, Homo sapien
tgctttttacccagatgaaagcatc

SEQ ID NO: 379150 - DNA, 25 bp, Homo sapien
ggtattttttcacgcctggcaaaca

SEQ ID NO: 379151 - DNA, 25 bp, Homo sapien
ccttcgggataggacttgcaaagct

SEQ ID NO: 379152 - DNA, 25 bp, Homo sapien
ccaaaatggtgattgttgacgatga

SEQ ID NO: 379153 - DNA, 25 bp, Homo sapien
cacatgcgtaggtcacagtgaggta

SEQ ID NO: 379154 - DNA, 25 bp, Homo sapien
tatccaaggatgtactcaaagtgac

SEQ ID NO: 379155 - DNA, 25 bp, Homo sapien
tgtgacccgtgtccagtctaccgtc

SEQ ID NO: 379156 - DNA, 25 bp, Homo sapien
gaacctcagccaaaatgggccccat

SEQ ID NO: 379157 - DNA, 25 bp, Homo sapien
gaagttactggaacctcagtgtgac

SEQ ID NO: 379158 - DNA, 25 bp, Homo sapien
tgaatatatctccagatttagctgt

SEQ ID NO: 379159 - DNA, 25 bp, Homo sapien
gaatatatctccagatttagctgtc

SEQ ID NO: 379160 - DNA, 25 bp, Homo sapien
ttagttgcaccttcaaatgccaagt

SEQ ID NO: 379161 - DNA, 25 bp, Homo sapien
aagtaagacaaagaaactggctcac

SEQ ID NO: 379162 - DNA, 25 bp, Homo sapien
caaattggccatagatgagatctcc

SEQ ID NO: 379163 - DNA, 25 bp, Homo sapien
tgagatctccaacctgcacatttgg

SEQ ID NO: 379164 - DNA, 25 bp, Homo sapien
caaaattaaagtctgctggacggtt

SEQ ID NO: 379165 - DNA, 25 bp, Homo sapien
tcatgtgttcacaagcttctaaaac

SEQ ID NO: 379166 - DNA, 25 bp, Homo sapien
cttaacccatactcttccattcatt

SEQ ID NO: 379167 - DNA, 25 bp, Homo sapien
tccaaatactatcttcagtggatag

SEQ ID NO: 379168 - DNA, 25 bp, Homo sapien
caccgttgtcaacacacttgtcaga

SEQ ID NO: 379169 - DNA, 25 bp, Homo sapien
accgttgtcaacacacttgtcagat

SEQ ID NO: 379170 - DNA, 25 bp, Homo sapien
cgttgtcaacacacttgtcagattt

SEQ ID NO: 379171 - DNA, 25 bp, Homo sapien
ccgttgtcaacacacttgtcagatt

SEQ ID NO: 379172 - DNA, 25 bp, Homo sapien
gcaagggagactttccagggaagcc

SEQ ID NO: 379173 - DNA, 25 bp, Homo sapien
ggaagcccggtgaagttgctggatg

SEQ ID NO: 379174 - DNA, 25 bp, Homo sapien
gccctggcgccttcatgcccatcag

SEQ ID NO: 379175 - DNA, 25 bp, Homo sapien
aggccctggcgccttcatgcccatc

SEQ ID NO: 379176 - DNA, 25 bp, Homo sapien
tggatcaatcgctgtgagtatgttc

SEQ ID NO: 379177 - DNA, 25 bp, Homo sapien
caatggctggatcaatcgctgtgag

SEQ ID NO: 379178 - DNA, 25 bp, Homo sapien
gattagcaatggctggatcaatcgc

SEQ ID NO: 379179 - DNA, 25 bp, Homo sapien
aagaaggttttagattagcaatggc

SEQ ID NO: 379180 - DNA, 25 bp, Homo sapien
ctttacttaaagagaaatgctggta

SEQ ID NO: 379181 - DNA, 25 bp, Homo sapien
acttaaagagaaatgctggtagtaa

SEQ ID NO: 379182 - DNA, 25 bp, Homo sapien
ttacttaaagagaaatgctggtagt

SEQ ID NO: 379183 - DNA, 25 bp, Homo sapien
taaagagaaatgctggtagtaagcc

SEQ ID NO: 379184 - DNA, 25 bp, Homo sapien
tttcctcagaaccttcgatccgctt

SEQ ID NO: 379185 - DNA, 25 bp, Homo sapien
gagagttgctaacaagaattccatc

SEQ ID NO: 379186 - DNA, 25 bp, Homo sapien
tgccagagagttgctaacaagaatt

SEQ ID NO: 379187 - DNA, 25 bp, Homo sapien
gatccgcttgggtcgaagtttatac

SEQ ID NO: 379188 - DNA, 25 bp, Homo sapien
taacattgacaatgatcaggaacag

SEQ ID NO: 379189 - DNA, 25 bp, Homo sapien
agttcttaacattgacaatgatcag

SEQ ID NO: 379190 - DNA, 25 bp, Homo sapien
ttgacaatgatcaggaacagcaaga

SEQ ID NO: 379191 - DNA, 25 bp, Homo sapien
cattgacaatgatcaggaacagcaa

SEQ ID NO: 379192 - DNA, 25 bp, Homo sapien
ttcatcttcctcccctttgaatttc

SEQ ID NO: 379193 - DNA, 25 bp, Homo sapien
tcatcttcctcccctttgaatttcc

SEQ ID NO: 379194 - DNA, 25 bp, Homo sapien
tatgtacgaagtatatatgtgaacc

SEQ ID NO: 379195 - DNA, 25 bp, Homo sapien
actcccaggctaccaaaattcacgg

SEQ ID NO: 379196 - DNA, 25 bp, Homo sapien
tattagtagtagaagtagctcatga

SEQ ID NO: 379197 - DNA, 25 bp, Homo sapien
ggacgcttgagtcacttatatgaaa

SEQ ID NO: 379198 - DNA, 25 bp, Homo sapien
gactgtctacaccaaaataatcata

SEQ ID NO: 379199 - DNA, 25 bp, Homo sapien
ggctaatgaagaatgccagtccagc

SEQ ID NO: 379200 - DNA, 25 bp, Homo sapien
gctaatgaagaatgccagtccagca

SEQ ID NO: 379201 - DNA, 25 bp, Homo sapien
acagaaacagatgtctgcccaagca

SEQ ID NO: 379202 - DNA, 25 bp, Homo sapien
gaaacagatgtctgcccaagcaggg

SEQ ID NO: 379203 - DNA, 25 bp, Homo sapien
gaggaagagaacatgtcaggagctg

SEQ ID NO: 379204 - DNA, 25 bp, Homo sapien
ggaagagaacatgtcaggagctggg

SEQ ID NO: 379205 - DNA, 25 bp, Homo sapien
aagagaacatgtcaggagctgggag

SEQ ID NO: 379206 - DNA, 25 bp, Homo sapien
ctgcaggaggaagagaacatgtcag

SEQ ID NO: 379207 - DNA, 25 bp, Homo sapien
tgcagacactggacacgaacagcag

SEQ ID NO: 379208 - DNA, 25 bp, Homo sapien
ccagctgcaagtcgcggaagtcctt

SEQ ID NO: 379209 - DNA, 25 bp, Homo sapien
gatatgaagtcctacagaaccccga

SEQ ID NO: 379210 - DNA, 25 bp, Homo sapien
catgtttcttgggagcgaggtgtcc

SEQ ID NO: 379211 - DNA, 25 bp, Homo sapien
ccttcatagaaggtacaggtgaacc

SEQ ID NO: 379212 - DNA, 25 bp, Homo sapien
tattttggaatgtgctagaaacagc

SEQ ID NO: 379213 - DNA, 25 bp, Homo sapien
tcttcagaaagtgcgatcgcatcaa

SEQ ID NO: 379214 - DNA, 25 bp, Homo sapien
gcttcctggcctcacgagtgttgaa

SEQ ID NO: 379215 - DNA, 25 bp, Homo sapien
cactcatgagctcatgtttgctgag

SEQ ID NO: 379216 - DNA, 25 bp, Homo sapien
tgctaaccgttggtctaaacaagtc

SEQ ID NO: 379217 - DNA, 25 bp, Homo sapien
cgcctggcattataagcgctcaaca

SEQ ID NO: 379218 - DNA, 25 bp, Homo sapien
aagcagttagaatagcgcctggcat

SEQ ID NO: 379219 - DNA, 25 bp, Homo sapien
catgggctgatggttatcgtggctc

SEQ ID NO: 379220 - DNA, 25 bp, Homo sapien
ttagctatggaccagtgaggcttcc

SEQ ID NO: 379221 - DNA, 25 bp, Homo sapien
cacacccagaggaggcgactgttga

SEQ ID NO: 379222 - DNA, 25 bp, Homo sapien
tagtagtcccggatccttagttggc

SEQ ID NO: 379223 - DNA, 25 bp, Homo sapien
tatatcacccatgcttatgcatcct

SEQ ID NO: 379224 - DNA, 25 bp, Homo sapien
ttatatcacccatgcttatgcatcc

SEQ ID NO: 379225 - DNA, 25 bp, Homo sapien
attatatcacccatgcttatgcatc

SEQ ID NO: 379226 - DNA, 25 bp, Homo sapien
acaatcaggtaagcagattcactga

SEQ ID NO: 379227 - DNA, 25 bp, Homo sapien
atatatctgcacaaacacaatcagg

SEQ ID NO: 379228 - DNA, 25 bp, Homo sapien
aacacaatcaggtaagcagattcac

SEQ ID NO: 379229 - DNA, 25 bp, Homo sapien
ggtaagcagattcactgactggcta

SEQ ID NO: 379230 - DNA, 25 bp, Homo sapien
gaccttaacatcttcaacgtcctta

SEQ ID NO: 379231 - DNA, 25 bp, Homo sapien
ccttaaggctcataatgtggctttt

SEQ ID NO: 379232 - DNA, 25 bp, Homo sapien
taacatcttcaacgtccttaaggct

SEQ ID NO: 379233 - DNA, 25 bp, Homo sapien
caacgtccttaaggctcataatgtg

SEQ ID NO: 379234 - DNA, 25 bp, Homo sapien
ggtgactccaaacgtgatcgtgctc

SEQ ID NO: 379235 - DNA, 25 bp, Homo sapien
gggcgcaatgcctgtagggcaaaaa

SEQ ID NO: 379236 - DNA, 25 bp, Homo sapien
gactccaaacgtgatcgtgctccat

SEQ ID NO: 379237 - DNA, 25 bp, Homo sapien
tagggcaaaaagctgcttgtgtgct

SEQ ID NO: 379238 - DNA, 25 bp, Homo sapien
aaggtgcagcgtttgttccatgggg

SEQ ID NO: 379239 - DNA, 25 bp, Homo sapien
ctggacatagcagggacccaggtgt

SEQ ID NO: 379240 - DNA, 25 bp, Homo sapien
acatagcagggacccaggtgtgtgc

SEQ ID NO: 379241 - DNA, 25 bp, Homo sapien
gcagcgtttgttccatggggaggac

SEQ ID NO: 379242 - DNA, 25 bp, Homo sapien
gaacatctcagggtggaccccatcc

SEQ ID NO: 379243 - DNA, 25 bp, Homo sapien
gcacaggtaggcgatgaacatctca

SEQ ID NO: 379244 - DNA, 25 bp, Homo sapien
taggcgatgaacatctcagggtgga

SEQ ID NO: 379245 - DNA, 25 bp, Homo sapien
tcatgcacaggtaggcgatgaacat

SEQ ID NO: 379246 - DNA, 25 bp, Homo sapien
tagaggtaggcactgggcatctcag

SEQ ID NO: 379247 - DNA, 25 bp, Homo sapien
catgtagaggtaggcactgggcatc

SEQ ID NO: 379248 - DNA, 25 bp, Homo sapien
ctgggcatctcaggggtgaccttgt

SEQ ID NO: 379249 - DNA, 25 bp, Homo sapien
cactgggcatctcaggggtgacctt

SEQ ID NO: 379250 - DNA, 25 bp, Homo sapien
tatgtattctagcacgggagactgc

SEQ ID NO: 379251 - DNA, 25 bp, Homo sapien
gaagatgtgaacttgaactgaggcc

SEQ ID NO: 379252 - DNA, 25 bp, Homo sapien
tatatagctatgtcctgcagtactg

SEQ ID NO: 379253 - DNA, 25 bp, Homo sapien
gggtcgtgtacatctccttaaggat

SEQ ID NO: 379254 - DNA, 25 bp, Homo sapien
gtgctcagaaatgccatacttcctt

SEQ ID NO: 379255 - DNA, 25 bp, Homo sapien
ggttccctcggatggtgtgctcaga

SEQ ID NO: 379256 - DNA, 25 bp, Homo sapien
cctcggatggtgtgctcagaaatgc

SEQ ID NO: 379257 - DNA, 25 bp, Homo sapien
ccagggttccctcggatggtgtgct

SEQ ID NO: 379258 - DNA, 25 bp, Homo sapien
aaccttaattctctgagtgatgaac

SEQ ID NO: 379259 - DNA, 25 bp, Homo sapien
ccccttggatggcaggagtttttct

SEQ ID NO: 379260 - DNA, 25 bp, Homo sapien
gtttcaaagattcaggcttgtggcc

SEQ ID NO: 379261 - DNA, 25 bp, Homo sapien
tcagaaccgagggatgcaaaacctt

SEQ ID NO: 379262 - DNA, 25 bp, Homo sapien
atcaggcgtgttcagagtggtgcag

SEQ ID NO: 379263 - DNA, 25 bp, Homo sapien
ggcgtgttcagagtggtgcagccat

SEQ ID NO: 379264 - DNA, 25 bp, Homo sapien
caggcgtgttcagagtggtgcagcc

SEQ ID NO: 379265 - DNA, 25 bp, Homo sapien
cgtgttcagagtggtgcagccatat

SEQ ID NO: 379266 - DNA, 25 bp, Homo sapien
cctcatcaatctctggaacctgcat

SEQ ID NO: 379267 - DNA, 25 bp, Homo sapien
tctggctggaaatgtgagacccatc

SEQ ID NO: 379268 - DNA, 25 bp, Homo sapien
cagtgcatccgagaggagactctcc

SEQ ID NO: 379269 - DNA, 25 bp, Homo sapien
cagccatgccatagacccagtgcat

SEQ ID NO: 379270 - DNA, 25 bp, Homo sapien
tatagcttggcttcgagcccacagt

SEQ ID NO: 379271 - DNA, 25 bp, Homo sapien
ctctgtatcttcagtgcgccgctta

SEQ ID NO: 379272 - DNA, 25 bp, Homo sapien
tcagtgcgccgcttatagcttggct

SEQ ID NO: 379273 - DNA, 25 bp, Homo sapien
gcgccgcttatagcttggcttcgag

SEQ ID NO: 379274 - DNA, 25 bp, Homo sapien
atgagttgggcccttgtgtggttaa

SEQ ID NO: 379275 - DNA, 25 bp, Homo sapien
gcggctggcgtttcttccccaagct

SEQ ID NO: 379276 - DNA, 25 bp, Homo sapien
tcagtggcctgaagagttgcagcag

SEQ ID NO: 379277 - DNA, 25 bp, Homo sapien
caagctgtaatgctcgatgagttgg

SEQ ID NO: 379278 - DNA, 25 bp, Homo sapien
gcatccgggcgggaagtctcagcca

SEQ ID NO: 379279 - DNA, 25 bp, Homo sapien
gagcttgggcctcgctccttgggac

SEQ ID NO: 379280 - DNA, 25 bp, Homo sapien
ctccggacatgaggctctggacaca

SEQ ID NO: 379281 - DNA, 25 bp, Homo sapien
gacacagcgtttgctcttgagacca

SEQ ID NO: 379282 - DNA, 25 bp, Homo sapien
ctcagcatgggctgggacgatctca

SEQ ID NO: 379283 - DNA, 25 bp, Homo sapien
tcagcatgggctgggacgatctcac

SEQ ID NO: 379284 - DNA, 25 bp, Homo sapien
cacataacgtactggccgcaactca

SEQ ID NO: 379285 - DNA, 25 bp, Homo sapien
gcatcagcacataacgtactggccg

SEQ ID NO: 379286 - DNA, 25 bp, Homo sapien
gagcagctatgaattgcatcagcac

SEQ ID NO: 379287 - DNA, 25 bp, Homo sapien
ttagtaggataataaacggaatctg

SEQ ID NO: 379288 - DNA, 25 bp, Homo sapien
aaagcacaaaagtagattccttgat

SEQ ID NO: 379289 - DNA, 25 bp, Homo sapien
tgattgtgccaatgccacagaacag

SEQ ID NO: 379290 - DNA, 25 bp, Homo sapien
gattccttgattgtgccaatgccac

SEQ ID NO: 379291 - DNA, 25 bp, Homo sapien
ggtgctgcaggttattcctgtgttt

SEQ ID NO: 379292 - DNA, 25 bp, Homo sapien
acccgcatcccgaccccgggcacag

SEQ ID NO: 379293 - DNA, 25 bp, Homo sapien
aacgggctccaaatacaacccgcat

SEQ ID NO: 379294 - DNA, 25 bp, Homo sapien
atcccgaccccgggcacagagttag

SEQ ID NO: 379295 - DNA, 25 bp, Homo sapien
ctgcaacgggctccaaatacaaccc

SEQ ID NO: 379296 - DNA, 25 bp, Homo sapien
agagtacgtcagagcaccctgcgtg

SEQ ID NO: 379297 - DNA, 25 bp, Homo sapien
cactgagtccagcacaggtttctga

SEQ ID NO: 379298 - DNA, 25 bp, Homo sapien
ggccacacagagtacgtcagagcac

SEQ ID NO: 379299 - DNA, 25 bp, Homo sapien
cctgcgtggagcagacgaatccgca

SEQ ID NO: 379300 - DNA, 25 bp, Homo sapien
agagacttctctaaccctgctgcgg

SEQ ID NO: 379301 - DNA, 25 bp, Homo sapien
gatctattggaagctgaactcccag

SEQ ID NO: 379302 - DNA, 25 bp, Homo sapien
taactgtagccttctttaaccctgc

SEQ ID NO: 379303 - DNA, 25 bp, Homo sapien
aaagctgatgactggcagtgaccac

SEQ ID NO: 379304 - DNA, 25 bp, Homo sapien
tttcaagcgtaaaaatagggctgca

SEQ ID NO: 379305 - DNA, 25 bp, Homo sapien
taaaaatgtacagtgaatccgaaag

SEQ ID NO: 379306 - DNA, 25 bp, Homo sapien
tggattgagtaccaatatctagagt

SEQ ID NO: 379307 - DNA, 25 bp, Homo sapien
aaaattatcgccaagattcagcaag

SEQ ID NO: 379308 - DNA, 25 bp, Homo sapien
tattgtggccatcgagtagctctcc

SEQ ID NO: 379309 - DNA, 25 bp, Homo sapien
tcataatcctgacggttgcccagag

SEQ ID NO: 379310 - DNA, 25 bp, Homo sapien
gagggaggagcgtaaatttatacca

SEQ ID NO: 379311 - DNA, 25 bp, Homo sapien
ggtgatattagttgctaccgctctc

SEQ ID NO: 379312 - DNA, 25 bp, Homo sapien
aacagcaagactcagttctgggtcg

SEQ ID NO: 379313 - DNA, 25 bp, Homo sapien
ggcccggaataaacagcgactgacg

SEQ ID NO: 379314 - DNA, 25 bp, Homo sapien
ctggatatttctgggagggtcgctc

SEQ ID NO: 379315 - DNA, 25 bp, Homo sapien
caacctgaacgaagaagtgcggaca

SEQ ID NO: 379316 - DNA, 25 bp, Homo sapien
tagtttggacatcttttgcttagaa

SEQ ID NO: 379317 - DNA, 25 bp, Homo sapien
tgatttgtaaggcgatcaagttttg

SEQ ID NO: 379318 - DNA, 25 bp, Homo sapien
ggtgatttgtaaggcgatcaagttt

SEQ ID NO: 379319 - DNA, 25 bp, Homo sapien
gatttgtaaggcgatcaagttttgc

SEQ ID NO: 379320 - DNA, 25 bp, Homo sapien
caggtgatttgtaaggcgatcaagt

SEQ ID NO: 379321 - DNA, 25 bp, Homo sapien
gtgcggctgcacggctgccacagga

SEQ ID NO: 379322 - DNA, 25 bp, Homo sapien
cgtgcggctgcacggctgccacagg

SEQ ID NO: 379323 - DNA, 25 bp, Homo sapien
ctgccgtgcggctgcacggctgcca

SEQ ID NO: 379324 - DNA, 25 bp, Homo sapien
gccgtgcggctgcacggctgccaca

SEQ ID NO: 379325 - DNA, 25 bp, Homo sapien
cagtattaaagtcagtggtacacag

SEQ ID NO: 379326 - DNA, 25 bp, Homo sapien
gtacatatcctgtgaaacgtgctgt

SEQ ID NO: 379327 - DNA, 25 bp, Homo sapien
cctgtgaaacgtgctgtcatatgaa

SEQ ID NO: 379328 - DNA, 25 bp, Homo sapien
gaattttattgcttatgtggcatac

SEQ ID NO: 379329 - DNA, 25 bp, Homo sapien
gcagatctgtgagcaatgtttccta

SEQ ID NO: 379330 - DNA, 25 bp, Homo sapien
aaatatacatatcagcagcccagcc

SEQ ID NO: 379331 - DNA, 25 bp, Homo sapien
ggctttaacatccatgtgactagtg

SEQ ID NO: 379332 - DNA, 25 bp, Homo sapien
taaacttcactagtgcaaattgcag

SEQ ID NO: 379333 - DNA, 25 bp, Homo sapien
tatatgcagggaaggcacataccac

SEQ ID NO: 379334 - DNA, 25 bp, Homo sapien
gaaacagcctattttgtggtcactg

SEQ ID NO: 379335 - DNA, 25 bp, Homo sapien
caagtggatggatattctagcgctc

SEQ ID NO: 379336 - DNA, 25 bp, Homo sapien
tgccaatatgcaactgatcccgctt

SEQ ID NO: 379337 - DNA, 25 bp, Homo sapien
ggcaagccagtggattacagtgaaa

SEQ ID NO: 379338 - DNA, 25 bp, Homo sapien
tctaaagaacatggtaggcgcaaca

SEQ ID NO: 379339 - DNA, 25 bp, Homo sapien
gttttcacagctgcctttagctgcc

SEQ ID NO: 379340 - DNA, 25 bp, Homo sapien
caaggtagagtgtttgcagagtaga

SEQ ID NO: 379341 - DNA, 25 bp, Homo sapien
tccgccttcaggtgacaacctttta

SEQ ID NO: 379342 - DNA, 25 bp, Homo sapien
agctctaagggagtccatgtgagag

SEQ ID NO: 379343 - DNA, 25 bp, Homo sapien
ggagcagcagcggactcacgtctcc

SEQ ID NO: 379344 - DNA, 25 bp, Homo sapien
tgctgggctatctgcctgtgattcc

SEQ ID NO: 379345 - DNA, 25 bp, Homo sapien
caagcggttaggtcaagggttgatt

SEQ ID NO: 379346 - DNA, 25 bp, Homo sapien
taagtcctagatcagccttccactg

SEQ ID NO: 379347 - DNA, 25 bp, Homo sapien
tcagtctatactttgtccacaagga

SEQ ID NO: 379348 - DNA, 25 bp, Homo sapien
gaaataagggagcagttgcaatccg

SEQ ID NO: 379349 - DNA, 25 bp, Homo sapien
caaccagcctttgcttcgtctgtag

SEQ ID NO: 379350 - DNA, 25 bp, Homo sapien
aatcatccatgttgatatatgggaa

SEQ ID NO: 379351 - DNA, 25 bp, Homo sapien
atccatgttgacatatgggaaatca

SEQ ID NO: 379352 - DNA, 25 bp, Homo sapien
tcatccatgttgatatatgggaaat

SEQ ID NO: 379353 - DNA, 25 bp, Homo sapien
aaatcatccatgttgatatatggga

SEQ ID NO: 379354 - DNA, 25 bp, Homo sapien
tatgtttcattctgttcactagtgg

SEQ ID NO: 379355 - DNA, 25 bp, Homo sapien
actagtggaccataggattgctgta

SEQ ID NO: 379356 - DNA, 25 bp, Homo sapien
cattctgttcactagtggaccatag

SEQ ID NO: 379357 - DNA, 25 bp, Homo sapien
tctgttcactagtggaccataggat

SEQ ID NO: 379358 - DNA, 25 bp, Homo sapien
tcatcttcaataatcccagctccct

SEQ ID NO: 379359 - DNA, 25 bp, Homo sapien
agctccctgaatttcagtgcattct

SEQ ID NO: 379360 - DNA, 25 bp, Homo sapien
tctgcatattcatctacctgaagaa

SEQ ID NO: 379361 - DNA, 25 bp, Homo sapien
cagtgcattctgcatattcatctac

SEQ ID NO: 379362 - DNA, 25 bp, Homo sapien
gagatcctggtttgtgacgtcccac

SEQ ID NO: 379363 - DNA, 25 bp, Homo sapien
tcttcgatagaaccctgtgagctcc

SEQ ID NO: 379364 - DNA, 25 bp, Homo sapien
gaaaaggcaccgaacagaactgtcc

SEQ ID NO: 379365 - DNA, 25 bp, Homo sapien
ggcaaaagctattcatccgtcggtg

SEQ ID NO: 379366 - DNA, 25 bp, Homo sapien
taataaatttagttccgtgtcctga

SEQ ID NO: 379367 - DNA, 25 bp, Homo sapien
ggtacagcttctctaaaatggacga

SEQ ID NO: 379368 - DNA, 25 bp, Homo sapien
gaaaaaatcaagtcacatgacaggg

SEQ ID NO: 379369 - DNA, 25 bp, Homo sapien
cctgaaaccagggtgggtacagctt

SEQ ID NO: 379370 - DNA, 25 bp, Homo sapien
agtagcgttttttagcctcccacag

SEQ ID NO: 379371 - DNA, 25 bp, Homo sapien
taagcaagtttggtttcagtaccca

SEQ ID NO: 379372 - DNA, 25 bp, Homo sapien
gctgtggccttctaacaaatctagg

SEQ ID NO: 379373 - DNA, 25 bp, Homo sapien
tgtcataaaaggtacctctcggccg

SEQ ID NO: 379374 - DNA, 25 bp, Homo sapien
gatggaaagtcacatcagccttgtg

SEQ ID NO: 379375 - DNA, 25 bp, Homo sapien
cagaaccaacagggccatgctcctt

SEQ ID NO: 379376 - DNA, 25 bp, Homo sapien
tccaaaggctctaggctcaaatcct

SEQ ID NO: 379377 - DNA, 25 bp, Homo sapien
ctcctgtgtgcgtgtttaattttcc

SEQ ID NO: 379378 - DNA, 25 bp, Homo sapien
tcgacatgcaatgtagactggtccc

SEQ ID NO: 379379 - DNA, 25 bp, Homo sapien
aactgtccatggatactgggttcac

SEQ ID NO: 379380 - DNA, 25 bp, Homo sapien
tccagcagcggcttaaaggatacaa

SEQ ID NO: 379381 - DNA, 25 bp, Homo sapien
taaacgttttgaagactgccctcca

SEQ ID NO: 379382 - DNA, 25 bp, Homo sapien
tagccaatgatgtcgaagtctcacc

SEQ ID NO: 379383 - DNA, 25 bp, Homo sapien
gaatgcgtataagagaaaacggagg

SEQ ID NO: 379384 - DNA, 25 bp, Homo sapien
tgggaaagctgtcagacaatgaggc

SEQ ID NO: 379385 - DNA, 25 bp, Homo sapien
gagtgactagtactactgtagccaa

SEQ ID NO: 379386 - DNA, 25 bp, Homo sapien
caatcttgacgaaaggcacgtcttc

SEQ ID NO: 379387 - DNA, 25 bp, Homo sapien
atcttgacgaaaggcacgtcttcac

SEQ ID NO: 379388 - DNA, 25 bp, Homo sapien
ttacaatcttgacgaaaggcacgtc

SEQ ID NO: 379389 - DNA, 25 bp, Homo sapien
tgacgaaaggcacgtcttcacaggg

SEQ ID NO: 379390 - DNA, 25 bp, Homo sapien
tggttttgggctgaccgtcctgtct

SEQ ID NO: 379391 - DNA, 25 bp, Homo sapien
tgcaataaagaatacgccttgctga

SEQ ID NO: 379392 - DNA, 25 bp, Homo sapien
cacccaggcaatttaatatccatgg

SEQ ID NO: 379393 - DNA, 25 bp, Homo sapien
gccttgctgattagccacacccagg

SEQ ID NO: 379394 - DNA, 25 bp, Homo sapien
caagtgttcgagctttggatcatgc

SEQ ID NO: 379395 - DNA, 25 bp, Homo sapien
cctgtctctgggctagtcatttaaa

SEQ ID NO: 379396 - DNA, 25 bp, Homo sapien
ggtatacgctaaaacagccaggact

SEQ ID NO: 379397 - DNA, 25 bp, Homo sapien
gctatgtctgttgcaagtgaccaca

SEQ ID NO: 379398 - DNA, 25 bp, Homo sapien
tctccacaggtaatcaattgtttcc

SEQ ID NO: 379399 - DNA, 25 bp, Homo sapien
tttcttctccacaggtaatcaattg

SEQ ID NO: 379400 - DNA, 25 bp, Homo sapien
gtttccccaaacaatggttcatgaa

SEQ ID NO: 379401 - DNA, 25 bp, Homo sapien
cacaggtaatcaattgtttccccaa

SEQ ID NO: 379402 - DNA, 25 bp, Homo sapien
taaggttgacagtttgcctacccag

SEQ ID NO: 379403 - DNA, 25 bp, Homo sapien
taggccatcctagaagactggaaaa

SEQ ID NO: 379404 - DNA, 25 bp, Homo sapien
tactggacttgcatgtaaggttgac

SEQ ID NO: 379405 - DNA, 25 bp, Homo sapien
tattatcttaacctcagtctgggcc

SEQ ID NO: 379406 - DNA, 25 bp, Homo sapien
tctttccagctgttaggcaattttc

SEQ ID NO: 379407 - DNA, 25 bp, Homo sapien
attttcttcagtggtatggcatttt

SEQ ID NO: 379408 - DNA, 25 bp, Homo sapien
ttccagctgttaggcaattttcttc

SEQ ID NO: 379409 - DNA, 25 bp, Homo sapien
tttcttcagtggtatggcattttct

SEQ ID NO: 379410 - DNA, 25 bp, Homo sapien
aatagtcttccatatgcagaagttc

SEQ ID NO: 379411 - DNA, 25 bp, Homo sapien
ttttattatagggtgtgaggcctgg

SEQ ID NO: 379412 - DNA, 25 bp, Homo sapien
atttaggtctgtgactcttttcagg

SEQ ID NO: 379413 - DNA, 25 bp, Homo sapien
aattcctttgtcctatgaacaccaa

SEQ ID NO: 379414 - DNA, 25 bp, Homo sapien
tgttctcccttgagggttgccatag

SEQ ID NO: 379415 - DNA, 25 bp, Homo sapien
gagaagggaattacatgataggcaa

SEQ ID NO: 379416 - DNA, 25 bp, Homo sapien
gcctcagaaacagccttagaagaac

SEQ ID NO: 379417 - DNA, 25 bp, Homo sapien
tttgtagtcaaggtcaccacaagcc

SEQ ID NO: 379418 - DNA, 25 bp, Homo sapien
tgagcaagtaagtccatagtccaga

SEQ ID NO: 379419 - DNA, 25 bp, Homo sapien
cactggaggcgctgaagaaagcata

SEQ ID NO: 379420 - DNA, 25 bp, Homo sapien
gatatttagatcattcgacctggag

SEQ ID NO: 379421 - DNA, 25 bp, Homo sapien
ggcacagagaccttgactagctagt

SEQ ID NO: 379422 - DNA, 25 bp, Homo sapien
tgtcctatattctagactggtctgt

SEQ ID NO: 379423 - DNA, 25 bp, Homo sapien
agagtatcttattcttggttgggca

SEQ ID NO: 379424 - DNA, 25 bp, Homo sapien
gactgtccccactattagcaatgtt

SEQ ID NO: 379425 - DNA, 25 bp, Homo sapien
gaccaggccacttctcttatagact

SEQ ID NO: 379426 - DNA, 25 bp, Homo sapien
tttgcactaaccatcaggaaactag

SEQ ID NO: 379427 - DNA, 25 bp, Homo sapien
tagtgttacgtgaaagtctcatagc

SEQ ID NO: 379428 - DNA, 25 bp, Homo sapien
cccatggtgtggcatattaaagaac

SEQ ID NO: 379429 - DNA, 25 bp, Homo sapien
catttgcagtctgttcagttcagga

SEQ ID NO: 379430 - DNA, 25 bp, Homo sapien
ggactttgcagccttatctttaaaa

SEQ ID NO: 379431 - DNA, 25 bp, Homo sapien
ttaaaattaggtgcaaacagctagt

SEQ ID NO: 379432 - DNA, 25 bp, Homo sapien
ggttgaggcactggtttataagcat

SEQ ID NO: 379433 - DNA, 25 bp, Homo sapien
gctagtttctcaaatgacctcctaa

SEQ ID NO: 379434 - DNA, 25 bp, Homo sapien
tgaacgtgcgcaagcggaacgactc

SEQ ID NO: 379435 - DNA, 25 bp, Homo sapien
tgtggaagcgagtattcgaccgccg

SEQ ID NO: 379436 - DNA, 25 bp, Homo sapien
ctcgcgagaacaaagaggtgccccg

SEQ ID NO: 379437 - DNA, 25 bp, Homo sapien
cttctgctcgggcaagggacgcgtt

SEQ ID NO: 379438 - DNA, 25 bp, Homo sapien
gagctccggagagcgcgcgtgcgcc

SEQ ID NO: 379439 - DNA, 25 bp, Homo sapien
tggagctccggagagcgcgcgtgcg

SEQ ID NO: 379440 - DNA, 25 bp, Homo sapien
ccggctggagctccggagagcgcgc

SEQ ID NO: 379441 - DNA, 25 bp, Homo sapien
gctggagctccggagagcgcgcgtg

SEQ ID NO: 379442 - DNA, 25 bp, Homo sapien
ctgagggacaacagagcctactctt

SEQ ID NO: 379443 - DNA, 25 bp, Homo sapien
gagggacaacagagcctactctttc

SEQ ID NO: 379444 - DNA, 25 bp, Homo sapien
tgagggacaacagagcctactcttt

SEQ ID NO: 379445 - DNA, 25 bp, Homo sapien
cgctccgcgtaagtgcgaagacgca

SEQ ID NO: 379446 - DNA, 25 bp, Homo sapien
ccctcatctgtttggcgggaggctt

SEQ ID NO: 379447 - DNA, 25 bp, Homo sapien
cacattaccgctccgcgtaagtgcg

SEQ ID NO: 379448 - DNA, 25 bp, Homo sapien
gggaggcttcctcacattaccgctc

SEQ ID NO: 379449 - DNA, 25 bp, Homo sapien
ctcaggtcaaagtttggagaggact

SEQ ID NO: 379450 - DNA, 25 bp, Homo sapien
tgtccaatagcattcagtcaacgaa

SEQ ID NO: 379451 - DNA, 25 bp, Homo sapien
tccatttatatcaacgtagggtaaa

SEQ ID NO: 379452 - DNA, 25 bp, Homo sapien
ccaagagccattgaacatactgtga

SEQ ID NO: 379453 - DNA, 25 bp, Homo sapien
ggttgttacctgtagaatatgtcca

SEQ ID NO: 379454 - DNA, 25 bp, Homo sapien
ttgagaactacacattacctaggta

SEQ ID NO: 379455 - DNA, 25 bp, Homo sapien
taaactttgtgtaatccaaatccaa

SEQ ID NO: 379456 - DNA, 25 bp, Homo sapien
gaactacacattacctaggtaggat

SEQ ID NO: 379457 - DNA, 25 bp, Homo sapien
gctgcctgacatgatgcattgagaa

SEQ ID NO: 379458 - DNA, 25 bp, Homo sapien
tgatggacacacgaaaaaccctgac

SEQ ID NO: 379459 - DNA, 25 bp, Homo sapien
tcaagacttgaaagagcagggagta

SEQ ID NO: 379460 - DNA, 25 bp, Homo sapien
gactaggacgcacactaaaaacagt

SEQ ID NO: 379461 - DNA, 25 bp, Homo sapien
tcaattgagggtgttagaagcacac

SEQ ID NO: 379462 - DNA, 25 bp, Homo sapien
ctcttgaatgaacctatgaaagtcc

SEQ ID NO: 379463 - DNA, 25 bp, Homo sapien
tgaacctatgaaagtccctcaaaag

SEQ ID NO: 379464 - DNA, 25 bp, Homo sapien
aaaactcttgaatgaacctatgaaa

SEQ ID NO: 379465 - DNA, 25 bp, Homo sapien
ttgaatgaacctatgaaagtccctc

SEQ ID NO: 379466 - DNA, 25 bp, Homo sapien
agcaccaaaggtggtagatgatgag

SEQ ID NO: 379467 - DNA, 25 bp, Homo sapien
tcttcaacattgagagtcatgattc

SEQ ID NO: 379468 - DNA, 25 bp, Homo sapien
gagagtcatgattctgaaagcacca

SEQ ID NO: 379469 - DNA, 25 bp, Homo sapien
ttccatgcagtagcccattcttcaa

SEQ ID NO: 379470 - DNA, 25 bp, Homo sapien
tgccaataccccactgactggaaga

SEQ ID NO: 379471 - DNA, 25 bp, Homo sapien
tatgagccagtacaagtccatgcca

SEQ ID NO: 379472 - DNA, 25 bp, Homo sapien
gatggcttgcagtattgaaatcccc

SEQ ID NO: 379473 - DNA, 25 bp, Homo sapien
gaaatgctgacggaactaagtaaag

SEQ ID NO: 379474 - DNA, 25 bp, Homo sapien
gaaaagacatacaatagggcagcat

SEQ ID NO: 379475 - DNA, 25 bp, Homo sapien
tgtaagggctatggacatgacacac

SEQ ID NO: 379476 - DNA, 25 bp, Homo sapien
ccaacctagggttgcaactgatgag

SEQ ID NO: 379477 - DNA, 25 bp, Homo sapien
taacccaatttcatgctaccaagag

SEQ ID NO: 379478 - DNA, 25 bp, Homo sapien
gaagaggctgcgcatcaacatggag

SEQ ID NO: 379479 - DNA, 25 bp, Homo sapien
gaacttcacgctggtccaagacctg

SEQ ID NO: 379480 - DNA, 25 bp, Homo sapien
gagcttactcatccatagcggtggg

SEQ ID NO: 379481 - DNA, 25 bp, Homo sapien
gatatggctcttttcaacagggact

SEQ ID NO: 379482 - DNA, 25 bp, Homo sapien
gaaaggttgtgataaagctgcctct

SEQ ID NO: 379483 - DNA, 25 bp, Homo sapien
ttcaaatgaaaggttgtgataaagc

SEQ ID NO: 379484 - DNA, 25 bp, Homo sapien
ttccataagctgtgtatttcaaatg

SEQ ID NO: 379485 - DNA, 25 bp, Homo sapien
gggataaacacgctggcccatgctg

SEQ ID NO: 379486 - DNA, 25 bp, Homo sapien
gagaatgtgctctttcaactccaaa

SEQ ID NO: 379487 - DNA, 25 bp, Homo sapien
tttacacctcagatgagcagagctc

SEQ ID NO: 379488 - DNA, 25 bp, Homo sapien
catagataggatgcggtaggtctcc

SEQ ID NO: 379489 - DNA, 25 bp, Homo sapien
tgagaaaagagcttgccagtgcctg

SEQ ID NO: 379490 - DNA, 25 bp, Homo sapien
tttgggctatgacgccccagcccat

SEQ ID NO: 379491 - DNA, 25 bp, Homo sapien
tggctttgggctatgacgccccagc

SEQ ID NO: 379492 - DNA, 25 bp, Homo sapien
ggctttgggctatgacgccccagcc

SEQ ID NO: 379493 - DNA, 25 bp, Homo sapien
gcctggctttgggctatgacgcccc

SEQ ID NO: 379494 - DNA, 25 bp, Homo sapien
gtcagggtgggccaacagtattgac

SEQ ID NO: 379495 - DNA, 25 bp, Homo sapien
agggtgggccaacagtattgacagc

SEQ ID NO: 379496 - DNA, 25 bp, Homo sapien
gggtcagggtgggccaacagtattg

SEQ ID NO: 379497 - DNA, 25 bp, Homo sapien
tcagggtgggccaacagtattgaca

SEQ ID NO: 379498 - DNA, 25 bp, Homo sapien
ttttctcactaggttcgggctgatg

SEQ ID NO: 379499 - DNA, 25 bp, Homo sapien
gatgaatagacctctcccctctttt

SEQ ID NO: 379500 - DNA, 25 bp, Homo sapien
gacacttttctcactaggttcgggc

SEQ ID NO: 379501 - DNA, 25 bp, Homo sapien
ggttcgggctgatgaatagacctct

SEQ ID NO: 379502 - DNA, 25 bp, Homo sapien
catgttccgcaaaccaatatccttt

SEQ ID NO: 379503 - DNA, 25 bp, Homo sapien
cttctgggaacttcttgtcccacat

SEQ ID NO: 379504 - DNA, 25 bp, Homo sapien
tgtcgggaagttgctcacaaattct

SEQ ID NO: 379505 - DNA, 25 bp, Homo sapien
gggaagttgctcacaaattcttctg

SEQ ID NO: 379506 - DNA, 25 bp, Homo sapien
taataatcacggtacagccgagtgc

SEQ ID NO: 379507 - DNA, 25 bp, Homo sapien
gacaagacaatcgttggaacctggg

SEQ ID NO: 379508 - DNA, 25 bp, Homo sapien
ttaggtcatgaggagaacaggtgcc

SEQ ID NO: 379509 - DNA, 25 bp, Homo sapien
gcagaataggctgtcatgaacccgt

SEQ ID NO: 379510 - DNA, 25 bp, Homo sapien
ggagaccaagtaactgccagcataa

SEQ ID NO: 379511 - DNA, 25 bp, Homo sapien
gcacatcctttgagagtctttccgt

SEQ ID NO: 379512 - DNA, 25 bp, Homo sapien
gacatctgcgccaatgactcttata

SEQ ID NO: 379513 - DNA, 25 bp, Homo sapien
caaaccccttagcttgaccagcaag

SEQ ID NO: 379514 - DNA, 25 bp, Homo sapien
ccccttgaggattccagatattgaa

SEQ ID NO: 379515 - DNA, 25 bp, Homo sapien
ccatccccttgaggattccagatat

SEQ ID NO: 379516 - DNA, 25 bp, Homo sapien
tctcaatcctacattcttggttctc

SEQ ID NO: 379517 - DNA, 25 bp, Homo sapien
cttctcaatcctacattcttggttc

SEQ ID NO: 379518 - DNA, 25 bp, Homo sapien
aaggtagccataaggcttacagtgc

SEQ ID NO: 379519 - DNA, 25 bp, Homo sapien
aacaaggtagccataaggcttacag

SEQ ID NO: 379520 - DNA, 25 bp, Homo sapien
ggaacaaggtagccataaggcttac

SEQ ID NO: 379521 - DNA, 25 bp, Homo sapien
caaggtagccataaggcttacagtg

SEQ ID NO: 379522 - DNA, 25 bp, Homo sapien
gacaagtgggcactggacctgagaa

SEQ ID NO: 379523 - DNA, 25 bp, Homo sapien
ctgagaacaggtgaccacttgtttc

SEQ ID NO: 379524 - DNA, 25 bp, Homo sapien
gagaacaggtgaccacttgtttctg

SEQ ID NO: 379525 - DNA, 25 bp, Homo sapien
tggacaagtgggcactggacctgag

SEQ ID NO: 379526 - DNA, 25 bp, Homo sapien
gatgtatccatttgggcttggctgg

SEQ ID NO: 379527 - DNA, 25 bp, Homo sapien
cctcaactcataagacgtagccaga

SEQ ID NO: 379528 - DNA, 25 bp, Homo sapien
tggctgggtccaacatagtgtgact

SEQ ID NO: 379529 - DNA, 25 bp, Homo sapien
catgtatgcaattaaccacctgaag

SEQ ID NO: 379530 - DNA, 25 bp, Homo sapien
catggggctccctgttgcttgatga

SEQ ID NO: 379531 - DNA, 25 bp, Homo sapien
agagcaaaatccaggggtagcccca

SEQ ID NO: 379532 - DNA, 25 bp, Homo sapien
gagcaaaatccaggggtagccccag

SEQ ID NO: 379533 - DNA, 25 bp, Homo sapien
tgttgcttgatgaccagagagcaaa

SEQ ID NO: 379534 - DNA, 25 bp, Homo sapien
aatataaatagtcatggagtgctcc

SEQ ID NO: 379535 - DNA, 25 bp, Homo sapien
gaaaccgcaatcagcaagaaggcat

SEQ ID NO: 379536 - DNA, 25 bp, Homo sapien
cattggcttagcaaatgtagggact

SEQ ID NO: 379537 - DNA, 25 bp, Homo sapien
gggaatcaaggatcaataacatgcc

SEQ ID NO: 379538 - DNA, 25 bp, Homo sapien
caatgaaagtcgctgaagaagaata

SEQ ID NO: 379539 - DNA, 25 bp, Homo sapien
agaatatgaattttgcctgcggatt

SEQ ID NO: 379540 - DNA, 25 bp, Homo sapien
ctaggccatacaatgaaagtcgctg

SEQ ID NO: 379541 - DNA, 25 bp, Homo sapien
gcggatttgctaacactcgacaatc

SEQ ID NO: 379542 - DNA, 25 bp, Homo sapien
caatggctttcaaggatgatgcaca

SEQ ID NO: 379543 - DNA, 25 bp, Homo sapien
gactcacggtctccattctagccaa

SEQ ID NO: 379544 - DNA, 25 bp, Homo sapien
cagcaagggctgttgtaatctctca

SEQ ID NO: 379545 - DNA, 25 bp, Homo sapien
tgatgcacagctaggccataggaga

SEQ ID NO: 379546 - DNA, 25 bp, Homo sapien
aagtaaaagtatcaaggagtctccg

SEQ ID NO: 379547 - DNA, 25 bp, Homo sapien
tgggatcagcctacagcaacagtct

SEQ ID NO: 379548 - DNA, 25 bp, Homo sapien
ccatgtaaggactcagctagaaggt

SEQ ID NO: 379549 - DNA, 25 bp, Homo sapien
tctttggaacaactacgataggaca

SEQ ID NO: 379550 - DNA, 25 bp, Homo sapien
ggcacacactggaatcacatccgct

SEQ ID NO: 379551 - DNA, 25 bp, Homo sapien
acactggaatcacatccgctgagga

SEQ ID NO: 379552 - DNA, 25 bp, Homo sapien
atttctaaattttgccaaggcacac

SEQ ID NO: 379553 - DNA, 25 bp, Homo sapien
cacacactggaatcacatccgctga

SEQ ID NO: 379554 - DNA, 25 bp, Homo sapien
atttgtcatcaacctctatgggcca

SEQ ID NO: 379555 - DNA, 25 bp, Homo sapien
tgtcatcaacctctatgggccaaac

SEQ ID NO: 379556 - DNA, 25 bp, Homo sapien
tcatcaacctctatgggccaaacca

SEQ ID NO: 379557 - DNA, 25 bp, Homo sapien
ttgtcatcaacctctatgggccaaa

SEQ ID NO: 379558 - DNA, 25 bp, Homo sapien
aaggccaagcaagttgtgagaggac

SEQ ID NO: 379559 - DNA, 25 bp, Homo sapien
tcatgcatgacagtggaagaccaag

SEQ ID NO: 379560 - DNA, 25 bp, Homo sapien
gtcaggtgccacaaataagagaagt

SEQ ID NO: 379561 - DNA, 25 bp, Homo sapien
taagagaagtacagtaaggccaagc

SEQ ID NO: 379562 - DNA, 25 bp, Homo sapien
cttgtatcaactccttcgatatttg

SEQ ID NO: 379563 - DNA, 25 bp, Homo sapien
ttagctctctaaattaagttgagag

SEQ ID NO: 379564 - DNA, 25 bp, Homo sapien
taaaatcactattgaattagctctc

SEQ ID NO: 379565 - DNA, 25 bp, Homo sapien
gagaagttgttatttattgctggct

SEQ ID NO: 379566 - DNA, 25 bp, Homo sapien
ctggaaagacaagtgttgttggtaa

SEQ ID NO: 379567 - DNA, 25 bp, Homo sapien
gcttcatggatagcgcctctaacag

SEQ ID NO: 379568 - DNA, 25 bp, Homo sapien
tatggaggagtgtcagcatacactc

SEQ ID NO: 379569 - DNA, 25 bp, Homo sapien
catacactctaatagaacagtctgg

SEQ ID NO: 379570 - DNA, 25 bp, Homo sapien
tcaagttccctggccaccccaaaga

SEQ ID NO: 379571 - DNA, 25 bp, Homo sapien
ggccaccccaaagatccacatctca

SEQ ID NO: 379572 - DNA, 25 bp, Homo sapien
cacggttatcatgtccatctgcacc

SEQ ID NO: 379573 - DNA, 25 bp, Homo sapien
cggttatcatgtccatctgcaccaa

SEQ ID NO: 379574 - DNA, 25 bp, Homo sapien
tggtggctccggtagaaccctcgta

SEQ ID NO: 379575 - DNA, 25 bp, Homo sapien
tagaaccctcgtagtttttgatgca

SEQ ID NO: 379576 - DNA, 25 bp, Homo sapien
gtcagcctctggtggctccggtaga

SEQ ID NO: 379577 - DNA, 25 bp, Homo sapien
accctcgtagtttttgatgcaccag

SEQ ID NO: 379578 - DNA, 25 bp, Homo sapien
ctgtgagtccttatgccaaaattgg

SEQ ID NO: 379579 - DNA, 25 bp, Homo sapien
gtccttatgccaaaattggtcattt

SEQ ID NO: 379580 - DNA, 25 bp, Homo sapien
gagtccttatgccaaaattggtcat

SEQ ID NO: 379581 - DNA, 25 bp, Homo sapien
gtgagtccttatgccaaaattggtc

SEQ ID NO: 379582 - DNA, 25 bp, Homo sapien
tctcgcgaggctgcatgggattcca

SEQ ID NO: 379583 - DNA, 25 bp, Homo sapien
gaatttccgggtgatttggctgagc

SEQ ID NO: 379584 - DNA, 25 bp, Homo sapien
cctctaggatggagctgacggagcc

SEQ ID NO: 379585 - DNA, 25 bp, Homo sapien
cctacaaaaggaggtgtggacttca

SEQ ID NO: 379586 - DNA, 25 bp, Homo sapien
ggacatgtggagttaactatacctc

SEQ ID NO: 379587 - DNA, 25 bp, Homo sapien
ctggaaagtgtcagatcttagctgc

SEQ ID NO: 379588 - DNA, 25 bp, Homo sapien
tacagtttggtaaggccttgggaca

SEQ ID NO: 379589 - DNA, 25 bp, Homo sapien
tttgaaaactgttcggcttgtctgc

SEQ ID NO: 379590 - DNA, 25 bp, Homo sapien
ctgcaggtgatgctgtcggctgcct

SEQ ID NO: 379591 - DNA, 25 bp, Homo sapien
ggtgatgctgtcggctgccttccct

SEQ ID NO: 379592 - DNA, 25 bp, Homo sapien
caggtgatgctgtcggctgccttcc

SEQ ID NO: 379593 - DNA, 25 bp, Homo sapien
tgcaggtgatgctgtcggctgcctt

SEQ ID NO: 379594 - DNA, 25 bp, Homo sapien
cccacaatggcagttgttcagaaag

SEQ ID NO: 379595 - DNA, 25 bp, Homo sapien
agagattaatgcctgaaatgagcca

SEQ ID NO: 379596 - DNA, 25 bp, Homo sapien
gacaaatcccgcaggtagctgccac

SEQ ID NO: 379597 - DNA, 25 bp, Homo sapien
gaagcatttgcccattctcctcctg

SEQ ID NO: 379598 - DNA, 25 bp, Homo sapien
cgttttcctaaagacctcgaggctg

SEQ ID NO: 379599 - DNA, 25 bp, Homo sapien
tcctaaagacctcgaggctgtcata

SEQ ID NO: 379600 - DNA, 25 bp, Homo sapien
tccagagtcaccgttttcctaaaga

SEQ ID NO: 379601 - DNA, 25 bp, Homo sapien
taaagacctcgaggctgtcatagag

SEQ ID NO: 379602 - DNA, 25 bp, Homo sapien
ctgaaagaggtgggccaagatctga

SEQ ID NO: 379603 - DNA, 25 bp, Homo sapien
tgaaagaggtgggccaagatctgat

SEQ ID NO: 379604 - DNA, 25 bp, Homo sapien
gaaagaggtgggccaagatctgatt

SEQ ID NO: 379605 - DNA, 25 bp, Homo sapien
aagtccacgctctgatcagcagcca

SEQ ID NO: 379606 - DNA, 25 bp, Homo sapien
ttgcactgtgtaaaaggcctctgac

SEQ ID NO: 379607 - DNA, 25 bp, Homo sapien
tctcatttgcactgtgtaaaaggcc

SEQ ID NO: 379608 - DNA, 25 bp, Homo sapien
cttgtggccccgctgatttctgctc

SEQ ID NO: 379609 - DNA, 25 bp, Homo sapien
caaaacagtattgcattcagcccct

SEQ ID NO: 379610 - DNA, 25 bp, Homo sapien
tgcactgtacccatttacagccaaa

SEQ ID NO: 379611 - DNA, 25 bp, Homo sapien
gttatggaaggtggatcatctgcac

SEQ ID NO: 379612 - DNA, 25 bp, Homo sapien
tgggccaccatatggtttttacaca

SEQ ID NO: 379613 - DNA, 25 bp, Homo sapien
tcttgaaaggagattaggaagcagc

SEQ ID NO: 379614 - DNA, 25 bp, Homo sapien
tgaactgtcagtgttgccgtgctgt

SEQ ID NO: 379615 - DNA, 25 bp, Homo sapien
gctaccatttcttgaaaggagatta

SEQ ID NO: 379616 - DNA, 25 bp, Homo sapien
tacctctgtggaaatcggcactctc

SEQ ID NO: 379617 - DNA, 25 bp, Homo sapien
gctgcccggaagctgtgttccagaa

SEQ ID NO: 379618 - DNA, 25 bp, Homo sapien
tggcttgcagctggcagactctctt

SEQ ID NO: 379619 - DNA, 25 bp, Homo sapien
ctgcaagtgagttcccttcctcctg

SEQ ID NO: 379620 - DNA, 25 bp, Homo sapien
tttatgcaaagctgcaagtgagttc

SEQ ID NO: 379621 - DNA, 25 bp, Homo sapien
tcattcctagtatctcctcctcctt

SEQ ID NO: 379622 - DNA, 25 bp, Homo sapien
agatagcttttacaggaggactgga

SEQ ID NO: 379623 - DNA, 25 bp, Homo sapien
acctttcattcctagtatctcctcc

SEQ ID NO: 379624 - DNA, 25 bp, Homo sapien
agagagatagcttttacaggaggac

SEQ ID NO: 379625 - DNA, 25 bp, Homo sapien
gagctatcacatgcacgtttgtaga

SEQ ID NO: 379626 - DNA, 25 bp, Homo sapien
aatggcttagagaactggtcggagc

SEQ ID NO: 379627 - DNA, 25 bp, Homo sapien
accctgggctgatgggaatggctta

SEQ ID NO: 379628 - DNA, 25 bp, Homo sapien
cagccgagggctggattgtgaaccc

SEQ ID NO: 379629 - DNA, 25 bp, Homo sapien
gaggagcagcatctaccttaggcct

SEQ ID NO: 379630 - DNA, 25 bp, Homo sapien
caaaagataagagccgaggtcgtga

SEQ ID NO: 379631 - DNA, 25 bp, Homo sapien
gaagaaagtctacatgcagaggagg

SEQ ID NO: 379632 - DNA, 25 bp, Homo sapien
gaggtcgtgatctcctaatggccag

SEQ ID NO: 379633 - DNA, 25 bp, Homo sapien
aaattccatgaggattttactctta

SEQ ID NO: 379634 - DNA, 25 bp, Homo sapien
aattccatgaggattttactcttat

SEQ ID NO: 379635 - DNA, 25 bp, Homo sapien
ttttcttttcaaccagatggcaaat

SEQ ID NO: 379636 - DNA, 25 bp, Homo sapien
cttttcaaccagatggcaaattcca

SEQ ID NO: 379637 - DNA, 25 bp, Homo sapien
cagcttgcctccatgtagcaggtct

SEQ ID NO: 379638 - DNA, 25 bp, Homo sapien
gtctgatcacaggtagctcccatcc

SEQ ID NO: 379639 - DNA, 25 bp, Homo sapien
tccatgtagcaggtctgatcacagg

SEQ ID NO: 379640 - DNA, 25 bp, Homo sapien
ctgtccacatacacccagacgcatg

SEQ ID NO: 379641 - DNA, 25 bp, Homo sapien
tagggttctcagctctccaagatgg

SEQ ID NO: 379642 - DNA, 25 bp, Homo sapien
tagccagatagatcttgataagccc

SEQ ID NO: 379643 - DNA, 25 bp, Homo sapien
taagcccagtgaacaacctcatggt

SEQ ID NO: 379644 - DNA, 25 bp, Homo sapien
aacaacctcatggtgcgtgcgctgc

SEQ ID NO: 379645 - DNA, 25 bp, Homo sapien
cattcttcctctatagtttcactga

SEQ ID NO: 379646 - DNA, 25 bp, Homo sapien
gtttcactgaaattctgcagattca

SEQ ID NO: 379647 - DNA, 25 bp, Homo sapien
tcttcctctatagtttcactgaaat

SEQ ID NO: 379648 - DNA, 25 bp, Homo sapien
tttcactgaaattctgcagattcat

SEQ ID NO: 379649 - DNA, 25 bp, Homo sapien
tgaacaaaatcatctaatctgaata

SEQ ID NO: 379650 - DNA, 25 bp, Homo sapien
cctaatctgaacaaaatcatctaat

SEQ ID NO: 379651 - DNA, 25 bp, Homo sapien
catctaatctgaataagatcactac

SEQ ID NO: 379652 - DNA, 25 bp, Homo sapien
caaaatcatctaatctgaataagat

SEQ ID NO: 379653 - DNA, 25 bp, Homo sapien
taaggtccaggcaactgtattttgc

SEQ ID NO: 379654 - DNA, 25 bp, Homo sapien
agatccatggaacctgccctgttgt

SEQ ID NO: 379655 - DNA, 25 bp, Homo sapien
ggaatagcccggcacagatccatgg

SEQ ID NO: 379656 - DNA, 25 bp, Homo sapien
caagctcagggacctataattctgt

SEQ ID NO: 379657 - DNA, 25 bp, Homo sapien
gcaggaagcttctgttaaagatcag

SEQ ID NO: 379658 - DNA, 25 bp, Homo sapien
tgatgtccccctgcatactataggt

SEQ ID NO: 379659 - DNA, 25 bp, Homo sapien
gcatactataggtcatgccagttac

SEQ ID NO: 379660 - DNA, 25 bp, Homo sapien
ggttgccttgggttcttgatgtccc

SEQ ID NO: 379661 - DNA, 25 bp, Homo sapien
tgtcttttacgatgactttttcctg

SEQ ID NO: 379662 - DNA, 25 bp, Homo sapien
gacctcaaatttcactaccgcgtgt

SEQ ID NO: 379663 - DNA, 25 bp, Homo sapien
taccgcgtgtcttttacgatgactt

SEQ ID NO: 379664 - DNA, 25 bp, Homo sapien
tttcactaccgcgtgtcttttacga

SEQ ID NO: 379665 - DNA, 25 bp, Homo sapien
tagctccagtgtcaggaagttttgc

SEQ ID NO: 379666 - DNA, 25 bp, Homo sapien
agattcagccctttcggcgagccgg

SEQ ID NO: 379667 - DNA, 25 bp, Homo sapien
ctgagaatacaaagacacccaagat

SEQ ID NO: 379668 - DNA, 25 bp, Homo sapien
cagtgtcaggaagttttgccgaggc

SEQ ID NO: 379669 - DNA, 25 bp, Homo sapien
gggtttcatctgatctaagaacaaa

SEQ ID NO: 379670 - DNA, 25 bp, Homo sapien
agccagggtttcatctgatctaaga

SEQ ID NO: 379671 - DNA, 25 bp, Homo sapien
tcttttggacagaaggtggtctgtc

SEQ ID NO: 379672 - DNA, 25 bp, Homo sapien
tcatctgatctaagaacaaaacttt

SEQ ID NO: 379673 - DNA, 25 bp, Homo sapien
tgggaggattccatatttccaactt

SEQ ID NO: 379674 - DNA, 25 bp, Homo sapien
gtcttcaaactttctgagcggcttg

SEQ ID NO: 379675 - DNA, 25 bp, Homo sapien
gagacttccataagtctgggtccct

SEQ ID NO: 379676 - DNA, 25 bp, Homo sapien
agcctgaggcggagacttccataag

SEQ ID NO: 379677 - DNA, 25 bp, Homo sapien
tgttttcgcggcgaagcccctggtg

SEQ ID NO: 379678 - DNA, 25 bp, Homo sapien
cagaggcaagcctggcgctggctct

SEQ ID NO: 379679 - DNA, 25 bp, Homo sapien
gctttttgttcctgcgctcgcggtg

SEQ ID NO: 379680 - DNA, 25 bp, Homo sapien
cgctggctcttgttcgccggctttt

SEQ ID NO: 379681 - DNA, 25 bp, Homo sapien
gctccccaccaattgtgggcatggc

SEQ ID NO: 379682 - DNA, 25 bp, Homo sapien
cacggggttaatggcccatggtgat

SEQ ID NO: 379683 - DNA, 25 bp, Homo sapien
ccttccacggggttaatggcccatg

SEQ ID NO: 379684 - DNA, 25 bp, Homo sapien
tgccattcaaacatcgctccccacc

SEQ ID NO: 379685 - DNA, 25 bp, Homo sapien
taaagcctaatgtgaaattatccag

SEQ ID NO: 379686 - DNA, 25 bp, Homo sapien
tccgaacagtgagatttccataaag

SEQ ID NO: 379687 - DNA, 25 bp, Homo sapien
attacagacttttgtatccgaacag

SEQ ID NO: 379688 - DNA, 25 bp, Homo sapien
caggaaaggagctcttaaagcctaa

SEQ ID NO: 379689 - DNA, 25 bp, Homo sapien
aagacaagatgtggtctgattgggt

SEQ ID NO: 379690 - DNA, 25 bp, Homo sapien
gagacacaatataaatgactttgag

SEQ ID NO: 379691 - DNA, 25 bp, Homo sapien
gccttggacaattgtcagaaagctt

SEQ ID NO: 379692 - DNA, 25 bp, Homo sapien
tatcctgagtgatgcgtacatttat

SEQ ID NO: 379693 - DNA, 25 bp, Homo sapien
cctctggagtagtgcgagccaggac

SEQ ID NO: 379694 - DNA, 25 bp, Homo sapien
gcaggaagcctttgcgcacgtgcat

SEQ ID NO: 379695 - DNA, 25 bp, Homo sapien
gagctctcagagcatggatgtgatt

SEQ ID NO: 379696 - DNA, 25 bp, Homo sapien
ccacttctagggcatcttaaggatt

SEQ ID NO: 379697 - DNA, 25 bp, Homo sapien
cagcacctgcaaggaatggagcagc

SEQ ID NO: 379698 - DNA, 25 bp, Homo sapien
tccagcacctgcaaggaatggagca

SEQ ID NO: 379699 - DNA, 25 bp, Homo sapien
acctgcaaggaatggagcagctgct

SEQ ID NO: 379700 - DNA, 25 bp, Homo sapien
gcacctgcaaggaatggagcagctg

SEQ ID NO: 379701 - DNA, 25 bp, Homo sapien
ggcctattgtacttcatctcggaga

SEQ ID NO: 379702 - DNA, 25 bp, Homo sapien
gagatctccgccctgtggcctattg

SEQ ID NO: 379703 - DNA, 25 bp, Homo sapien
ttcagatatggctgaggcctcctga

SEQ ID NO: 379704 - DNA, 25 bp, Homo sapien
gacaaagaaggctccaggcctttct

SEQ ID NO: 379705 - DNA, 25 bp, Homo sapien
cagggtaatttacaaggcaggctgc

SEQ ID NO: 379706 - DNA, 25 bp, Homo sapien
tgcctgaaaacacagcggagaccct

SEQ ID NO: 379707 - DNA, 25 bp, Homo sapien
cagaggcctcttgatcgctcgtggg

SEQ ID NO: 379708 - DNA, 25 bp, Homo sapien
gtcccaagccgaggaggcgctgtat

SEQ ID NO: 379709 - DNA, 25 bp, Homo sapien
caggcctggaattaccccttctatt

SEQ ID NO: 379710 - DNA, 25 bp, Homo sapien
gtccatctgttccaggaaggttcca

SEQ ID NO: 379711 - DNA, 25 bp, Homo sapien
ggtccatctgttccaggaaggttcc

SEQ ID NO: 379712 - DNA, 25 bp, Homo sapien
ccatctgttccaggaaggttccacc

SEQ ID NO: 379713 - DNA, 25 bp, Homo sapien
gacactggctgtatccccaaaacca

SEQ ID NO: 379714 - DNA, 25 bp, Homo sapien
tgagaaggctttccagtgcctatac

SEQ ID NO: 379715 - DNA, 25 bp, Homo sapien
tgcatgttgccctgagaaggctttc

SEQ ID NO: 379716 - DNA, 25 bp, Homo sapien
gtgcctatactttgccgacactggc

SEQ ID NO: 379717 - DNA, 25 bp, Homo sapien
cagctgccatgtaacctccggttct

SEQ ID NO: 379718 - DNA, 25 bp, Homo sapien
ctgccatgtaacctccggttctggt

SEQ ID NO: 379719 - DNA, 25 bp, Homo sapien
aacctccatatcctcatagccccag

SEQ ID NO: 379720 - DNA, 25 bp, Homo sapien
tccatatcctcatagccccagctgc

SEQ ID NO: 379721 - DNA, 25 bp, Homo sapien
gcagctggcttatcatcagcgatca

SEQ ID NO: 379722 - DNA, 25 bp, Homo sapien
tcgcagctggcttatcatcagcgat

SEQ ID NO: 379723 - DNA, 25 bp, Homo sapien
cagctggcttatcatcagcgatcat

SEQ ID NO: 379724 - DNA, 25 bp, Homo sapien
catcgcagctggcttatcatcagcg

SEQ ID NO: 379725 - DNA, 25 bp, Homo sapien
ttagttttctaagcctgagcagctg

SEQ ID NO: 379726 - DNA, 25 bp, Homo sapien
gatgcccgttctctggttgatctag

SEQ ID NO: 379727 - DNA, 25 bp, Homo sapien
gccccatctcatcaactgtgatgga

SEQ ID NO: 379728 - DNA, 25 bp, Homo sapien
ctggacggatgagggtgccccatct

SEQ ID NO: 379729 - DNA, 25 bp, Homo sapien
ttggccccaactccagactcagatg

SEQ ID NO: 379730 - DNA, 25 bp, Homo sapien
gatgactgtccagctgactcaccag

SEQ ID NO: 379731 - DNA, 25 bp, Homo sapien
ttctgttgtctggaatgtgatgcca

SEQ ID NO: 379732 - DNA, 25 bp, Homo sapien
gatgccaaagaagttggccccaact

SEQ ID NO: 379733 - DNA, 25 bp, Homo sapien
gtagcagatgttgtaggtcctggtt

SEQ ID NO: 379734 - DNA, 25 bp, Homo sapien
tagcagatgttgtaggtcctggttg

SEQ ID NO: 379735 - DNA, 25 bp, Homo sapien
gaagctaggacagtctgtgccccag

SEQ ID NO: 379736 - DNA, 25 bp, Homo sapien
ggcactgcctgaaatgtacagatgg

SEQ ID NO: 379737 - DNA, 25 bp, Homo sapien
gagatcagggtgcttcctgcactga

SEQ ID NO: 379738 - DNA, 25 bp, Homo sapien
taaacttctctaagctggccccagt

SEQ ID NO: 379739 - DNA, 25 bp, Homo sapien
tagccatcagtaatgacgccaggtc

SEQ ID NO: 379740 - DNA, 25 bp, Homo sapien
atatctaccgcgcttcaggttgccc

SEQ ID NO: 379741 - DNA, 25 bp, Homo sapien
tccctgctagccatcagtaatgacg

SEQ ID NO: 379742 - DNA, 25 bp, Homo sapien
ccgggactgaatgacgccagagaga

SEQ ID NO: 379743 - DNA, 25 bp, Homo sapien
cttgtgttgtaagggtctggcttcc

SEQ ID NO: 379744 - DNA, 25 bp, Homo sapien
ttgagcccctgtagcatccagagct

SEQ ID NO: 379745 - DNA, 25 bp, Homo sapien
cccacgcaggtctggttctcgtctt

SEQ ID NO: 379746 - DNA, 25 bp, Homo sapien
tccttgagcccctgtagcatccaga

SEQ ID NO: 379747 - DNA, 25 bp, Homo sapien
ggaggcaaggctcccggcaccggaa

SEQ ID NO: 379748 - DNA, 25 bp, Homo sapien
ggctcccggcaccggaaagcaaagc

SEQ ID NO: 379749 - DNA, 25 bp, Homo sapien
ctcccggcaccggaaagcaaagcaa

SEQ ID NO: 379750 - DNA, 25 bp, Homo sapien
ggtggcggcgggaggcaaggctccc

SEQ ID NO: 379751 - DNA, 25 bp, Homo sapien
gaatggagtgctcatttgcagaggc

SEQ ID NO: 379752 - DNA, 25 bp, Homo sapien
tctcccacaaaagaccgggtgcgtg

SEQ ID NO: 379753 - DNA, 25 bp, Homo sapien
tgctcacattcaggctgcgtctcgg

SEQ ID NO: 379754 - DNA, 25 bp, Homo sapien
gcctggctgccaaacagaacgacgt

SEQ ID NO: 379755 - DNA, 25 bp, Homo sapien
actagaaattagatcccggtgccca

SEQ ID NO: 379756 - DNA, 25 bp, Homo sapien
cccaggacttgtccgggtcctgcgc

SEQ ID NO: 379757 - DNA, 25 bp, Homo sapien
aagcttgccctggtgcgtcctggag

SEQ ID NO: 379758 - DNA, 25 bp, Homo sapien
ctggtgcgtcctggaggcgtcccca

SEQ ID NO: 379759 - DNA, 25 bp, Homo sapien
gttctttgcgcgctcggtccagtgg

SEQ ID NO: 379760 - DNA, 25 bp, Homo sapien
tgtcctgcgaccgacttgcggcggt

SEQ ID NO: 379761 - DNA, 25 bp, Homo sapien
gagagcaagcggtctcaggttcttt

SEQ ID NO: 379762 - DNA, 25 bp, Homo sapien
ttgcggcggtgagagcaagcggtct

SEQ ID NO: 379763 - DNA, 25 bp, Homo sapien
gaagcgtggtgttatgtcgtccaac

SEQ ID NO: 379764 - DNA, 25 bp, Homo sapien
ttcaatccgcgtgtttcccagctgg

SEQ ID NO: 379765 - DNA, 25 bp, Homo sapien
tccaacggttacaaggatgacccat

SEQ ID NO: 379766 - DNA, 25 bp, Homo sapien
tagaatctgtcactcggacgacgca

SEQ ID NO: 379767 - DNA, 25 bp, Homo sapien
cagggacgagttatttccgcacggt

SEQ ID NO: 379768 - DNA, 25 bp, Homo sapien
ggacggactccagaagagtgttttg

SEQ ID NO: 379769 - DNA, 25 bp, Homo sapien
tactcgcgcgtctaggagatggccg

SEQ ID NO: 379770 - DNA, 25 bp, Homo sapien
gaattcacaactctcctttaggttg

SEQ ID NO: 379771 - DNA, 25 bp, Homo sapien
gatctataataagcatccgcacctt

SEQ ID NO: 379772 - DNA, 25 bp, Homo sapien
gaggagctcgctccgaaaagcctca

SEQ ID NO: 379773 - DNA, 25 bp, Homo sapien
cgctggtgtcgcgtcgatctataat

SEQ ID NO: 379774 - DNA, 25 bp, Homo sapien
tctggatgcgatttgaggagctcgc

SEQ ID NO: 379775 - DNA, 25 bp, Homo sapien
tgtccctgggatctaggctgcggct

SEQ ID NO: 379776 - DNA, 25 bp, Homo sapien
tgggtcacagccgagttgaggagag

SEQ ID NO: 379777 - DNA, 25 bp, Homo sapien
ccctgggatctaggctgcggctgct

SEQ ID NO: 379778 - DNA, 25 bp, Homo sapien
ggtcacagccgagttgaggagagtc

SEQ ID NO: 379779 - DNA, 25 bp, Homo sapien
gaaatggcccgcagagtagggatcc

SEQ ID NO: 379780 - DNA, 25 bp, Homo sapien
ttctcgcttttggtgagggagatgc

SEQ ID NO: 379781 - DNA, 25 bp, Homo sapien
gcagaaagagctgttgtcgctccga

SEQ ID NO: 379782 - DNA, 25 bp, Homo sapien
agcaaagtcgctctggagaaatggc

SEQ ID NO: 379783 - DNA, 25 bp, Homo sapien
ttatttcagggagcgttggtgaccc

SEQ ID NO: 379784 - DNA, 25 bp, Homo sapien
tccttttagctgcacgcgggtacct

SEQ ID NO: 379785 - DNA, 25 bp, Homo sapien
catgtgctgcatctggagaccacgg

SEQ ID NO: 379786 - DNA, 25 bp, Homo sapien
gcattctagaggcttcgggctttca

SEQ ID NO: 379787 - DNA, 25 bp, Homo sapien
gggaagatagtcgtcgcagctttcg

SEQ ID NO: 379788 - DNA, 25 bp, Homo sapien
tcgcagctttcgcagggtcctcctt

SEQ ID NO: 379789 - DNA, 25 bp, Homo sapien
ccccaggggaagatagtcgtcgcag

SEQ ID NO: 379790 - DNA, 25 bp, Homo sapien
tagtcgtcgcagctttcgcagggtc

SEQ ID NO: 379791 - DNA, 25 bp, Homo sapien
ctccgggccggcagaaaaaggtcat

SEQ ID NO: 379792 - DNA, 25 bp, Homo sapien
ccgacgacgtagacgacgaggtgct

SEQ ID NO: 379793 - DNA, 25 bp, Homo sapien
atgttgaggtcgtgcatgcgcttgc

SEQ ID NO: 379794 - DNA, 25 bp, Homo sapien
catgaggatgtagttgcgcgccagc

SEQ ID NO: 379795 - DNA, 25 bp, Homo sapien
cagcagacggagacttgagtaggcc

SEQ ID NO: 379796 - DNA, 25 bp, Homo sapien
ggcagagaggcgctggacacagccg

SEQ ID NO: 379797 - DNA, 25 bp, Homo sapien
tgagtaggccgtgcggtggacggat

SEQ ID NO: 379798 - DNA, 25 bp, Homo sapien
ccgacgggtggaagccagcgtggtg

SEQ ID NO: 379799 - DNA, 25 bp, Homo sapien
gggcagggcatgccgccccagtgct

SEQ ID NO: 379800 - DNA, 25 bp, Homo sapien
gctgccggcgcccatagccgacacg

SEQ ID NO: 379801 - DNA, 25 bp, Homo sapien
cgcccatagccgacacgtggtggtg

SEQ ID NO: 379802 - DNA, 25 bp, Homo sapien
cggcgcccatagccgacacgtggtg

SEQ ID NO: 379803 - DNA, 25 bp, Homo sapien
tcaggttaaagccagacagcgctcg

SEQ ID NO: 379804 - DNA, 25 bp, Homo sapien
gaaagccggcttagactccgatggg

SEQ ID NO: 379805 - DNA, 25 bp, Homo sapien
aagggtgttacacggcagacgctac

SEQ ID NO: 379806 - DNA, 25 bp, Homo sapien
tacaaagcccagtttgcaacgcagg

SEQ ID NO: 379807 - DNA, 25 bp, Homo sapien
ccgatgctccgggaaggaaatgtct

SEQ ID NO: 379808 - DNA, 25 bp, Homo sapien
aagtcccaaagtccgatgctccggg

SEQ ID NO: 379809 - DNA, 25 bp, Homo sapien
cctgcaagtcccaaagtccgatgct

SEQ ID NO: 379810 - DNA, 25 bp, Homo sapien
caaagtccgatgctccgggaaggaa

SEQ ID NO: 379811 - DNA, 25 bp, Homo sapien
tgacgggagaccgcctctgagcaga

SEQ ID NO: 379812 - DNA, 25 bp, Homo sapien
aggtggtgacgggagaccgcctctg

SEQ ID NO: 379813 - DNA, 25 bp, Homo sapien
cgggagaccgcctctgagcagaaag

SEQ ID NO: 379814 - DNA, 25 bp, Homo sapien
gtggtgacgggagaccgcctctgag

SEQ ID NO: 379815 - DNA, 25 bp, Homo sapien
ctttcaacaaccgtccttctatgca

SEQ ID NO: 379816 - DNA, 25 bp, Homo sapien
caaccgtccttctatgcagacacca

SEQ ID NO: 379817 - DNA, 25 bp, Homo sapien
gtccttctatgcagacaccaagcac

SEQ ID NO: 379818 - DNA, 25 bp, Homo sapien
aacaaccgtccttctatgcagacac

SEQ ID NO: 379819 - DNA, 25 bp, Homo sapien
cagtttaggcggctggcatggagga

SEQ ID NO: 379820 - DNA, 25 bp, Homo sapien
tccagtctcacccaccgtggtcaag

SEQ ID NO: 379821 - DNA, 25 bp, Homo sapien
gctggtggctggttgctactgaaag

SEQ ID NO: 379822 - DNA, 25 bp, Homo sapien
cggcgagtagccacctgttctaggg

SEQ ID NO: 379823 - DNA, 25 bp, Homo sapien
tttgcctcttcagttcctcgctgca

SEQ ID NO: 379824 - DNA, 25 bp, Homo sapien
acagccagtagcaatcactggggcc

SEQ ID NO: 379825 - DNA, 25 bp, Homo sapien
gctttgcctcttcagttcctcgctg

SEQ ID NO: 379826 - DNA, 25 bp, Homo sapien
aacagccagtagcaatcactggggc

SEQ ID NO: 379827 - DNA, 25 bp, Homo sapien
ccctggagattcagcccggccctga

SEQ ID NO: 379828 - DNA, 25 bp, Homo sapien
ttaatatcctgagttccctggagat

SEQ ID NO: 379829 - DNA, 25 bp, Homo sapien
gagttccctggagattcagcccggc

SEQ ID NO: 379830 - DNA, 25 bp, Homo sapien
tcctgagttccctggagattcagcc

SEQ ID NO: 379831 - DNA, 25 bp, Homo sapien
tttcctagtgactgcccgaggtgtg

SEQ ID NO: 379832 - DNA, 25 bp, Homo sapien
tcagttggcgacccttttcctagtg

SEQ ID NO: 379833 - DNA, 25 bp, Homo sapien
ttggcgacccttttcctagtgactg

SEQ ID NO: 379834 - DNA, 25 bp, Homo sapien
tgactgcccgaggtgtggaaggcac

SEQ ID NO: 379835 - DNA, 25 bp, Homo sapien
cagcagccgcgggactgacgcaggt

SEQ ID NO: 379836 - DNA, 25 bp, Homo sapien
gccgcgggactgacgcaggtatcat

SEQ ID NO: 379837 - DNA, 25 bp, Homo sapien
gcagccgcgggactgacgcaggtat

SEQ ID NO: 379838 - DNA, 25 bp, Homo sapien
ctggcaggagagcgcgcactcgcag

SEQ ID NO: 379839 - DNA, 25 bp, Homo sapien
ttgcaaactgaaggcccgctcgcgt

SEQ ID NO: 379840 - DNA, 25 bp, Homo sapien
tgccagatcgtcctggtggaccgcg

SEQ ID NO: 379841 - DNA, 25 bp, Homo sapien
ctgcagggccctcggtgtgctgtaa

SEQ ID NO: 379842 - DNA, 25 bp, Homo sapien
cgcgcccgctttcagggtttgcaaa

SEQ ID NO: 379843 - DNA, 25 bp, Homo sapien
gacaccagcgcgcagttcagagcgg

SEQ ID NO: 379844 - DNA, 25 bp, Homo sapien
gagcgggttccttaagcagtcttcc

SEQ ID NO: 379845 - DNA, 25 bp, Homo sapien
aagcgagggccggagaggacaccag

SEQ ID NO: 379846 - DNA, 25 bp, Homo sapien
cccaaataaagacgcggcctcctca

SEQ ID NO: 379847 - DNA, 25 bp, Homo sapien
tgtttgggccccatgcgcatgtagg

SEQ ID NO: 379848 - DNA, 25 bp, Homo sapien
tgtcgccaaaggaaaactgcgcgcg

SEQ ID NO: 379849 - DNA, 25 bp, Homo sapien
aaccagtggacggattgtggccgca

SEQ ID NO: 379850 - DNA, 25 bp, Homo sapien
tgatgtgcaaaagcccgtagcgggt

SEQ ID NO: 379851 - DNA, 25 bp, Homo sapien
aggacacccagagggctcgggtatt

SEQ ID NO: 379852 - DNA, 25 bp, Homo sapien
tattggggcagagcctgattggccc

SEQ ID NO: 379853 - DNA, 25 bp, Homo sapien
cagagcctgattggcccacggagct

SEQ ID NO: 379854 - DNA, 25 bp, Homo sapien
agcttccaagatcacccattatggc

SEQ ID NO: 379855 - DNA, 25 bp, Homo sapien
accccagggcatgcaaaggtgagaa

SEQ ID NO: 379856 - DNA, 25 bp, Homo sapien
cagaccccttgtgatgctgcaggac

SEQ ID NO: 379857 - DNA, 25 bp, Homo sapien
gagaacagaggccttgccttgcgtt

SEQ ID NO: 379858 - DNA, 25 bp, Homo sapien
cgtgcatcatgctcagtaccaggca

SEQ ID NO: 379859 - DNA, 25 bp, Homo sapien
gtcactgagtgttctccacatccac

SEQ ID NO: 379860 - DNA, 25 bp, Homo sapien
acatccacctggcacattaaacgtg

SEQ ID NO: 379861 - DNA, 25 bp, Homo sapien
ctgtcactgagtgttctccacatcc

SEQ ID NO: 379862 - DNA, 25 bp, Homo sapien
gcacattaaacgtgtactggataaa

SEQ ID NO: 379863 - DNA, 25 bp, Homo sapien
ggatggggtaatgtggtggccatca

SEQ ID NO: 379864 - DNA, 25 bp, Homo sapien
gatggggtaatgtggtggccatcaa

SEQ ID NO: 379865 - DNA, 25 bp, Homo sapien
ggggatggggtaatgtggtggccat

SEQ ID NO: 379866 - DNA, 25 bp, Homo sapien
tggggtaatgtggtggccatcaagt

SEQ ID NO: 379867 - DNA, 25 bp, Homo sapien
agggtccatttcaaagctcttaaat

SEQ ID NO: 379868 - DNA, 25 bp, Homo sapien
ccatttcaaagctcttaaatgttga

SEQ ID NO: 379869 - DNA, 25 bp, Homo sapien
ggtccatttcaaagctcttaaatgt

SEQ ID NO: 379870 - DNA, 25 bp, Homo sapien
tccatttcaaagctcttaaatgttg

SEQ ID NO: 379871 - DNA, 25 bp, Homo sapien
gagcttggtaccttccctacataaa

SEQ ID NO: 379872 - DNA, 25 bp, Homo sapien
gctcggtaaattgtgagcttggtac

SEQ ID NO: 379873 - DNA, 25 bp, Homo sapien
ttggactatggaagctcggtaaatt

SEQ ID NO: 379874 - DNA, 25 bp, Homo sapien
caaattctttttggactatggaagc

SEQ ID NO: 379875 - DNA, 25 bp, Homo sapien
cagagtccagccaaagagaggtgta

SEQ ID NO: 379876 - DNA, 25 bp, Homo sapien
gaacccagtcgaggagacagagtcc

SEQ ID NO: 379877 - DNA, 25 bp, Homo sapien
ccaaaggacctgcaggaaaaggcaa

SEQ ID NO: 379878 - DNA, 25 bp, Homo sapien
aattcgtggcactaacccttgaaga

SEQ ID NO: 379879 - DNA, 25 bp, Homo sapien
tacacaatgattgcttatgcccggg

SEQ ID NO: 379880 - DNA, 25 bp, Homo sapien
gctacacaatgattgcttatgcccg

SEQ ID NO: 379881 - DNA, 25 bp, Homo sapien
tatgcccggggctgttacaaacaag

SEQ ID NO: 379882 - DNA, 25 bp, Homo sapien
ttacaaacaaggctctgtcactctc

SEQ ID NO: 379883 - DNA, 25 bp, Homo sapien
ctcgcacttgcgttgcctttatctg

SEQ ID NO: 379884 - DNA, 25 bp, Homo sapien
ttaataaactggaaccaatcggtga

SEQ ID NO: 379885 - DNA, 25 bp, Homo sapien
gaaccaatcggtgaatgcgggctga

SEQ ID NO: 379886 - DNA, 25 bp, Homo sapien
aggtccttgggagagctcgcacttg

SEQ ID NO: 379887 - DNA, 25 bp, Homo sapien
tgcctttctatagtggtccagatgg

SEQ ID NO: 379888 - DNA, 25 bp, Homo sapien
cattgcgctgatgcaggttgacagt

SEQ ID NO: 379889 - DNA, 25 bp, Homo sapien
tctttggtgccttaattctagatct

SEQ ID NO: 379890 - DNA, 25 bp, Homo sapien
ctagatctgtccagttagtggaagc

SEQ ID NO: 379891 - DNA, 25 bp, Homo sapien
agccatatggatgttgcaaatatcc

SEQ ID NO: 379892 - DNA, 25 bp, Homo sapien
tgttctggaagccatatggatgttg

SEQ ID NO: 379893 - DNA, 25 bp, Homo sapien
tgatgctgaggccacaccgtggctg

SEQ ID NO: 379894 - DNA, 25 bp, Homo sapien
tctggaagccatatggatgttgcaa

SEQ ID NO: 379895 - DNA, 25 bp, Homo sapien
cttctggtgaatgacttctctatgt

SEQ ID NO: 379896 - DNA, 25 bp, Homo sapien
tatgtcttattaatcgtagatgccg

SEQ ID NO: 379897 - DNA, 25 bp, Homo sapien
ggtgaatgacttctctatgtcttat

SEQ ID NO: 379898 - DNA, 25 bp, Homo sapien
tacttttgcaactcatcattctttt

SEQ ID NO: 379899 - DNA, 25 bp, Homo sapien
tttgatcagaaaagccttcccagga

SEQ ID NO: 379900 - DNA, 25 bp, Homo sapien
tcttgccaggttgggatgcggtcca

SEQ ID NO: 379901 - DNA, 25 bp, Homo sapien
gaatattctagaatctccccagggt

SEQ ID NO: 379902 - DNA, 25 bp, Homo sapien
ggacacccgcagttctttgatcaga

SEQ ID NO: 379903 - DNA, 25 bp, Homo sapien
gaaaggccgtgtgaagacttcccag

SEQ ID NO: 379904 - DNA, 25 bp, Homo sapien
cttcccagggtgcagttaaggagac

SEQ ID NO: 379905 - DNA, 25 bp, Homo sapien
tctgtaagagctgacggctggatct

SEQ ID NO: 379906 - DNA, 25 bp, Homo sapien
tttttctctcggaggcgctctgacc

SEQ ID NO: 379907 - DNA, 25 bp, Homo sapien
cctttcatagagacgcagggccaag

SEQ ID NO: 379908 - DNA, 25 bp, Homo sapien
cattgaaccggcagaatgcaacagg

SEQ ID NO: 379909 - DNA, 25 bp, Homo sapien
ctgaagtcatttccccgcactgggt

SEQ ID NO: 379910 - DNA, 25 bp, Homo sapien
tgaaaagatgcgagcggttctggcc

SEQ ID NO: 379911 - DNA, 25 bp, Homo sapien
tacacattgctaataaacatgcatt

SEQ ID NO: 379912 - DNA, 25 bp, Homo sapien
tctcagagtgacctaacagatgtgg

SEQ ID NO: 379913 - DNA, 25 bp, Homo sapien
ttacattgcttctgtgagcaccaaa

SEQ ID NO: 379914 - DNA, 25 bp, Homo sapien
tagctcaaacagatgggcatgccct

SEQ ID NO: 379915 - DNA, 25 bp, Homo sapien
ccttcggtagttgttcttggacagg

SEQ ID NO: 379916 - DNA, 25 bp, Homo sapien
ttcggtagttgttcttggacaggga

SEQ ID NO: 379917 - DNA, 25 bp, Homo sapien
cttcggtagttgttcttggacaggg

SEQ ID NO: 379918 - DNA, 25 bp, Homo sapien
aagcgagtagcccttagctttgttc

SEQ ID NO: 379919 - DNA, 25 bp, Homo sapien
gaaggagctgcaaagcgagtagccc

SEQ ID NO: 379920 - DNA, 25 bp, Homo sapien
tgcaaagcgagtagcccttagcttt

SEQ ID NO: 379921 - DNA, 25 bp, Homo sapien
gagctgcaaagcgagtagcccttag

SEQ ID NO: 379922 - DNA, 25 bp, Homo sapien
ttgtttgccctatatcaggtgcccc

SEQ ID NO: 379923 - DNA, 25 bp, Homo sapien
tctctaggagaagcggaagccttgt

SEQ ID NO: 379924 - DNA, 25 bp, Homo sapien
gaagccttgtccgttgtttgcccta

SEQ ID NO: 379925 - DNA, 25 bp, Homo sapien
cagtaggtgttgatatttacactgt

SEQ ID NO: 379926 - DNA, 25 bp, Homo sapien
ccggggtctgtctcaaggggaggca

SEQ ID NO: 379927 - DNA, 25 bp, Homo sapien
gccagttactgtggccgctggcacg

SEQ ID NO: 379928 - DNA, 25 bp, Homo sapien
cagccagttactgtggccgctggca

SEQ ID NO: 379929 - DNA, 25 bp, Homo sapien
ggccagccagttactgtggccgctg

SEQ ID NO: 379930 - DNA, 25 bp, Homo sapien
ctgggctgaagcagcggcatgcaaa

SEQ ID NO: 379931 - DNA, 25 bp, Homo sapien
tgacttggatggtcccttgtgctgg

SEQ ID NO: 379932 - DNA, 25 bp, Homo sapien
cctgggcacgggatttgggactggt

SEQ ID NO: 379933 - DNA, 25 bp, Homo sapien
agcagcggcatgcaaagtgtgacag

SEQ ID NO: 379934 - DNA, 25 bp, Homo sapien
catatttcagtgccttggtagaggg

SEQ ID NO: 379935 - DNA, 25 bp, Homo sapien
tcaactggatatgctgcatatttca

SEQ ID NO: 379936 - DNA, 25 bp, Homo sapien
gtgccttggtagagggcctcagaag

SEQ ID NO: 379937 - DNA, 25 bp, Homo sapien
tcctccttgtaagacttatctctcc

SEQ ID NO: 379938 - DNA, 25 bp, Homo sapien
tatctcctccttgtaagacttatct

SEQ ID NO: 379939 - DNA, 25 bp, Homo sapien
tctcctccttgtaagacttatctct

SEQ ID NO: 379940 - DNA, 25 bp, Homo sapien
aagacttatctctcccccagccaag

SEQ ID NO: 379941 - DNA, 25 bp, Homo sapien
cctctgtcctgtagctgaggtgcca

SEQ ID NO: 379942 - DNA, 25 bp, Homo sapien
ctgtcctgtagctgaggtgccagat

SEQ ID NO: 379943 - DNA, 25 bp, Homo sapien
ttggggcaggccctggtgacatccc

SEQ ID NO: 379944 - DNA, 25 bp, Homo sapien
ggaccctctgtcctgtagctgaggt

SEQ ID NO: 379945 - DNA, 25 bp, Homo sapien
cggggcgcagccaatggaggcgcga

SEQ ID NO: 379946 - DNA, 25 bp, Homo sapien
gcagccaatggaggcgcgaggccgg

SEQ ID NO: 379947 - DNA, 25 bp, Homo sapien
ggtggcggggcgcagccaatggagg

SEQ ID NO: 379948 - DNA, 25 bp, Homo sapien
gggcgcagccaatggaggcgcgagg

SEQ ID NO: 379949 - DNA, 25 bp, Homo sapien
cgccctggggtgggccggtcggcag

SEQ ID NO: 379950 - DNA, 25 bp, Homo sapien
aggacgcccttcaggaacgccctgg

SEQ ID NO: 379951 - DNA, 25 bp, Homo sapien
tgggccggtcggcaggccgcccctc

SEQ ID NO: 379952 - DNA, 25 bp, Homo sapien
gccgaggacgcccttcaggaacgcc

SEQ ID NO: 379953 - DNA, 25 bp, Homo sapien
tcccggggaccgcgttcacgcgcgc

SEQ ID NO: 379954 - DNA, 25 bp, Homo sapien
gggaggccccgagctgcaagtctcc

SEQ ID NO: 379955 - DNA, 25 bp, Homo sapien
gagggaggccccgagctgcaagtct

SEQ ID NO: 379956 - DNA, 25 bp, Homo sapien
ctgcaagtctccgggccgctgtggc

SEQ ID NO: 379957 - DNA, 25 bp, Homo sapien
agctgcaagtctccgggccgctgtg

SEQ ID NO: 379958 - DNA, 25 bp, Homo sapien
gaggaggagggcggctgcctgtagc

SEQ ID NO: 379959 - DNA, 25 bp, Homo sapien
aggagggcggctgcctgtagcccac

SEQ ID NO: 379960 - DNA, 25 bp, Homo sapien
ctcgcgcgcagccttggggaggagg

SEQ ID NO: 379961 - DNA, 25 bp, Homo sapien
tcgcgcgcagccttggggaggaggg

SEQ ID NO: 379962 - DNA, 25 bp, Homo sapien
cgcccgggtgcgcgcctgacccggg

SEQ ID NO: 379963 - DNA, 25 bp, Homo sapien
tgcgcgcctgacccgggcccggggc

SEQ ID NO: 379964 - DNA, 25 bp, Homo sapien
gcccgggtgcgcgcctgacccgggc

SEQ ID NO: 379965 - DNA, 25 bp, Homo sapien
ctcgcgcagggcgtccatggccagg

SEQ ID NO: 379966 - DNA, 25 bp, Homo sapien
ccaggttcaggtcctgcatgcgctt

SEQ ID NO: 379967 - DNA, 25 bp, Homo sapien
ccgctcgcggctgttgatcttgcgc

SEQ ID NO: 379968 - DNA, 25 bp, Homo sapien
gcgcagggcgtccatggccaggttc

SEQ ID NO: 379969 - DNA, 25 bp, Homo sapien
ggaacttgcacacggcgcaggtgca

SEQ ID NO: 379970 - DNA, 25 bp, Homo sapien
cagtaggatgtagttgcgggcgagc

SEQ ID NO: 379971 - DNA, 25 bp, Homo sapien
cagcgagctgcccagcagtaggatg

SEQ ID NO: 379972 - DNA, 25 bp, Homo sapien
tccagcgccagcgacaggtacttgg

SEQ ID NO: 379973 - DNA, 25 bp, Homo sapien
caaggcgccctaagttctacatcgg

SEQ ID NO: 379974 - DNA, 25 bp, Homo sapien
tttctgcctaaagccgctggaaccg

SEQ ID NO: 379975 - DNA, 25 bp, Homo sapien
tctggactggaaggttcgaaatgct

SEQ ID NO: 379976 - DNA, 25 bp, Homo sapien
gaaatgctttccttgctcggcctcg

SEQ ID NO: 379977 - DNA, 25 bp, Homo sapien
gtccgtctgccacgtcccagaccgt

SEQ ID NO: 379978 - DNA, 25 bp, Homo sapien
tgtccgccgagggtccgtccgtctg

SEQ ID NO: 379979 - DNA, 25 bp, Homo sapien
gtctgcaccgcctaactggtctttt

SEQ ID NO: 379980 - DNA, 25 bp, Homo sapien
tgcctcttgagttccggcagcctcc

SEQ ID NO: 379981 - DNA, 25 bp, Homo sapien
tctctgcgacaaaacactggatacg

SEQ ID NO: 379982 - DNA, 25 bp, Homo sapien
tagtaaatcgggaacactggatgca

SEQ ID NO: 379983 - DNA, 25 bp, Homo sapien
gttcattagcgctcttgacaggacg

SEQ ID NO: 379984 - DNA, 25 bp, Homo sapien
caaacagctggtctacaaaagtgga

SEQ ID NO: 379985 - DNA, 25 bp, Homo sapien
aatcgaaactgactacgtatgtagc

SEQ ID NO: 379986 - DNA, 25 bp, Homo sapien
tatgtagctcttcaactgcaagacg

SEQ ID NO: 379987 - DNA, 25 bp, Homo sapien
ctgcaagacggcgagaaggaagacc

SEQ ID NO: 379988 - DNA, 25 bp, Homo sapien
tgaggaacagcggaaagcgccttcc

SEQ ID NO: 379989 - DNA, 25 bp, Homo sapien
caccgtcaggaaacaaggttagaag

SEQ ID NO: 379990 - DNA, 25 bp, Homo sapien
catagaaaatcaaagtaaactgcgg

SEQ ID NO: 379991 - DNA, 25 bp, Homo sapien
aataaagtgccagttaaattcggct

SEQ ID NO: 379992 - DNA, 25 bp, Homo sapien
taaattcggctactaccaacaacca

SEQ ID NO: 379993 - DNA, 25 bp, Homo sapien
ctatggcagaaaagaaaagcccctt

SEQ ID NO: 379994 - DNA, 25 bp, Homo sapien
gtcaattgaatgactcttcccaacc

SEQ ID NO: 379995 - DNA, 25 bp, Homo sapien
ccaaccatcaccttgctcttggcaa

SEQ ID NO: 379996 - DNA, 25 bp, Homo sapien
caattgaatgactcttcccaaccat

SEQ ID NO: 379997 - DNA, 25 bp, Homo sapien
aaccatcaccttgctcttggcaagt

SEQ ID NO: 379998 - DNA, 25 bp, Homo sapien
aggagaaagtctctgaagctgtgcc

SEQ ID NO: 379999 - DNA, 25 bp, Homo sapien
aatgacaaacctgcaaccgtcagag

SEQ ID NO: 380000 - DNA, 25 bp, Homo sapien
tgtctgtcagccgtctgcttgctca

SEQ ID NO: 380001 - DNA, 25 bp, Homo sapien
gaagccgttttctccttgcaccctg

SEQ ID NO: 380002 - DNA, 25 bp, Homo sapien
taccccgaggtgacgctctgctggt

SEQ ID NO: 380003 - DNA, 25 bp, Homo sapien
cattgtctgctagtcaagcgtgagg

SEQ ID NO: 380004 - DNA, 25 bp, Homo sapien
tgatactgtttggagctaccccgag

SEQ ID NO: 380005 - DNA, 25 bp, Homo sapien
aatgacatgcagtcagcttgtggcc

SEQ ID NO: 380006 - DNA, 25 bp, Homo sapien
gagatttgaattcgcccagtgcctg

SEQ ID NO: 380007 - DNA, 25 bp, Homo sapien
tctgtgagctaatatcagcttttcc

SEQ ID NO: 380008 - DNA, 25 bp, Homo sapien
cagaggcaatgtctgtggagatttg

SEQ ID NO: 380009 - DNA, 25 bp, Homo sapien
catttctgtgagctaatatcagctt

SEQ ID NO: 380010 - DNA, 25 bp, Homo sapien
tgcctgtccatcaaccccttgagat

SEQ ID NO: 380011 - DNA, 25 bp, Homo sapien
caagctataggtgtccagggttggg

SEQ ID NO: 380012 - DNA, 25 bp, Homo sapien
gtaggagcatttgattggcctccca

SEQ ID NO: 380013 - DNA, 25 bp, Homo sapien
gagatccaacatcctgggtaggagc

SEQ ID NO: 380014 - DNA, 25 bp, Homo sapien
ccacatcgcctgttacatcacctga

SEQ ID NO: 380015 - DNA, 25 bp, Homo sapien
tgcatttcagccacatcgcctgtta

SEQ ID NO: 380016 - DNA, 25 bp, Homo sapien
tttcagccacatcgcctgttacatc

SEQ ID NO: 380017 - DNA, 25 bp, Homo sapien
catttcagccacatcgcctgttaca

SEQ ID NO: 380018 - DNA, 25 bp, Homo sapien
ctcgggcaatagttaccaggctttt

SEQ ID NO: 380019 - DNA, 25 bp, Homo sapien
cattcattagctcgggcaatagtta

SEQ ID NO: 380020 - DNA, 25 bp, Homo sapien
tagctcgggcaatagttaccaggct

SEQ ID NO: 380021 - DNA, 25 bp, Homo sapien
cattagctcgggcaatagttaccag

SEQ ID NO: 380022 - DNA, 25 bp, Homo sapien
cccctgcaacgtagctgattgacaa

SEQ ID NO: 380023 - DNA, 25 bp, Homo sapien
gattgacaagtggaactacttttcc

SEQ ID NO: 380024 - DNA, 25 bp, Homo sapien
taaacaccagaatctattagcccct

SEQ ID NO: 380025 - DNA, 25 bp, Homo sapien
caccagaatctattagcccctgcaa

SEQ ID NO: 380026 - DNA, 25 bp, Homo sapien
gacatctgattgcaacgtctttaca

SEQ ID NO: 380027 - DNA, 25 bp, Homo sapien
cagcctttttcctcgattggattgg

SEQ ID NO: 380028 - DNA, 25 bp, Homo sapien
gatgatcaatctattcttttcaagg

SEQ ID NO: 380029 - DNA, 25 bp, Homo sapien
cgtctttacagatgatcaatctatt

SEQ ID NO: 380030 - DNA, 25 bp, Homo sapien
agtgacctttcacacgagcacttca

SEQ ID NO: 380031 - DNA, 25 bp, Homo sapien
cttagtgacctttcacacgagcact

SEQ ID NO: 380032 - DNA, 25 bp, Homo sapien
tagtgacctttcacacgagcacttc

SEQ ID NO: 380033 - DNA, 25 bp, Homo sapien
ttagtgacctttcacacgagcactt

SEQ ID NO: 380034 - DNA, 25 bp, Homo sapien
ttgttctcagtgggcgccgccttct

SEQ ID NO: 380035 - DNA, 25 bp, Homo sapien
gccactggttgcctaaggaaccggc

SEQ ID NO: 380036 - DNA, 25 bp, Homo sapien
ggccacaggccgaggtgaagatcct

SEQ ID NO: 380037 - DNA, 25 bp, Homo sapien
aagatcctgcccctggttctgttgt

SEQ ID NO: 380038 - DNA, 25 bp, Homo sapien
tctgttggtttctaggtccctcgtg

SEQ ID NO: 380039 - DNA, 25 bp, Homo sapien
gggcccagcttgtcctatcagaaac

SEQ ID NO: 380040 - DNA, 25 bp, Homo sapien
cctccgaggaaggaaagaattgctg

SEQ ID NO: 380041 - DNA, 25 bp, Homo sapien
tagacgctccttcgtctgcagatgg

SEQ ID NO: 380042 - DNA, 25 bp, Homo sapien
cacccaagtcaccactggcggcaga

SEQ ID NO: 380043 - DNA, 25 bp, Homo sapien
cggagcgcagggaccgggtcgccga

SEQ ID NO: 380044 - DNA, 25 bp, Homo sapien
cccaagtcaccactggcggcagatg

SEQ ID NO: 380045 - DNA, 25 bp, Homo sapien
ggcgccggagcgcagggaccgggtc

SEQ ID NO: 380046 - DNA, 25 bp, Homo sapien
cagcaggacaaaggctgaattcgat

SEQ ID NO: 380047 - DNA, 25 bp, Homo sapien
tcgataagacccttctttcaccttg

SEQ ID NO: 380048 - DNA, 25 bp, Homo sapien
ttggctttccaaccaagtcagagtg

SEQ ID NO: 380049 - DNA, 25 bp, Homo sapien
gctttccaaccaagtcagagtgcca

SEQ ID NO: 380050 - DNA, 25 bp, Homo sapien
ctctagcagctggaacttggcgact

SEQ ID NO: 380051 - DNA, 25 bp, Homo sapien
cgttgggctgataaaaacactcctc

SEQ ID NO: 380052 - DNA, 25 bp, Homo sapien
aaaggaaaatctgcccgggctgtca

SEQ ID NO: 380053 - DNA, 25 bp, Homo sapien
catccgaactcttgtgggcttgccc

SEQ ID NO: 380054 - DNA, 25 bp, Homo sapien
tggccgaacacctgcagaaagtgac

SEQ ID NO: 380055 - DNA, 25 bp, Homo sapien
gggacactggccgaacacctgcaga

SEQ ID NO: 380056 - DNA, 25 bp, Homo sapien
agactttctgtcagccaactgtttg

SEQ ID NO: 380057 - DNA, 25 bp, Homo sapien
cagactttctgtcagccaactgttt

SEQ ID NO: 380058 - DNA, 25 bp, Homo sapien
tgctgctcatgaaactctagtgccc

SEQ ID NO: 380059 - DNA, 25 bp, Homo sapien
tagaggtcacactagtttgtcctgg

SEQ ID NO: 380060 - DNA, 25 bp, Homo sapien
tgcagtccggagctaaacagtgtct

SEQ ID NO: 380061 - DNA, 25 bp, Homo sapien
ctgtggagatatgagccagatggct

SEQ ID NO: 380062 - DNA, 25 bp, Homo sapien
tttgcctcgtgaagcgggcattcag

SEQ ID NO: 380063 - DNA, 25 bp, Homo sapien
tttgccacggaggacaaaaagtctc

SEQ ID NO: 380064 - DNA, 25 bp, Homo sapien
gaacacggacgtgtgcttcctgggt

SEQ ID NO: 380065 - DNA, 25 bp, Homo sapien
gagaaagaggactgccaatcgccaa

SEQ ID NO: 380066 - DNA, 25 bp, Homo sapien
tggctctggccgcaaaatggtccaa

SEQ ID NO: 380067 - DNA, 25 bp, Homo sapien
aaggtgctgcgtgtgtcatatctca

SEQ ID NO: 380068 - DNA, 25 bp, Homo sapien
aatggtccaatacctgcttgcacgg

SEQ ID NO: 380069 - DNA, 25 bp, Homo sapien
tcactgagggatcgtattttataaa

SEQ ID NO: 380070 - DNA, 25 bp, Homo sapien
tagattcttcattgtcctgtcctcc

SEQ ID NO: 380071 - DNA, 25 bp, Homo sapien
gcttggcaagcgatatagcctgttt

SEQ ID NO: 380072 - DNA, 25 bp, Homo sapien
gaccgctatcacaggagaagcacct

SEQ ID NO: 380073 - DNA, 25 bp, Homo sapien
tgtcaacctcttgccgtaccagtga

SEQ ID NO: 380074 - DNA, 25 bp, Homo sapien
atcctctcctcccacatcatcggta

SEQ ID NO: 380075 - DNA, 25 bp, Homo sapien
taccgatgatgtgggaggagaggat

SEQ ID NO: 380076 - DNA, 25 bp, Homo sapien
ttcgcagtccgtggcacgagtctcc

SEQ ID NO: 380077 - DNA, 25 bp, Homo sapien
cttccggtcacaggagcttgggcca

SEQ ID NO: 380078 - DNA, 25 bp, Homo sapien
gaacagggcaaaacaagctcttccg

SEQ ID NO: 380079 - DNA, 25 bp, Homo sapien
tggcttcgcagtccgtggcacgagt

SEQ ID NO: 380080 - DNA, 25 bp, Homo sapien
tctctgacaacgatcgtggctgcat

SEQ ID NO: 380081 - DNA, 25 bp, Homo sapien
tatctctgacaacgatcgtggctgc

SEQ ID NO: 380082 - DNA, 25 bp, Homo sapien
tttatctctgacaacgatcgtggct

SEQ ID NO: 380083 - DNA, 25 bp, Homo sapien
ttatctctgacaacgatcgtggctg

SEQ ID NO: 380084 - DNA, 25 bp, Homo sapien
agtcttttctccggactgtgcagag

SEQ ID NO: 380085 - DNA, 25 bp, Homo sapien
ggcagtcttttctccggactgtgca

SEQ ID NO: 380086 - DNA, 25 bp, Homo sapien
gcaaactgctgcgtgcttgtcccat

SEQ ID NO: 380087 - DNA, 25 bp, Homo sapien
gcagtcttttctccggactgtgcag

SEQ ID NO: 380088 - DNA, 25 bp, Homo sapien
tctgctatgtactctcggaacagaa

SEQ ID NO: 380089 - DNA, 25 bp, Homo sapien
gctatgtactctcggaacagaaacc

SEQ ID NO: 380090 - DNA, 25 bp, Homo sapien
tatgtactctcggaacagaaaccga

SEQ ID NO: 380091 - DNA, 25 bp, Homo sapien
tactctcggaacagaaaccgatccc

SEQ ID NO: 380092 - DNA, 25 bp, Homo sapien
ggattctcctgtcgcaatgtctgat

SEQ ID NO: 380093 - DNA, 25 bp, Homo sapien
cagctgctctcgatagtgtgttcaa

SEQ ID NO: 380094 - DNA, 25 bp, Homo sapien
tccaggttgccagcggttatctgag

SEQ ID NO: 380095 - DNA, 25 bp, Homo sapien
agagagacctgacttcgccaagacc

SEQ ID NO: 380096 - DNA, 25 bp, Homo sapien
ccactgccttcacaaacctcccctt

SEQ ID NO: 380097 - DNA, 25 bp, Homo sapien
ctctccccagggtccgttttcatag

SEQ ID NO: 380098 - DNA, 25 bp, Homo sapien
ccagggtccgttttcatagcttcca

SEQ ID NO: 380099 - DNA, 25 bp, Homo sapien
gttttcatagcttccatgcccactg

SEQ ID NO: 380100 - DNA, 25 bp, Homo sapien
gggtctcgtcagtccccaagccctg

SEQ ID NO: 380101 - DNA, 25 bp, Homo sapien
tccttgggtctcgtcagtccccaag

SEQ ID NO: 380102 - DNA, 25 bp, Homo sapien
ttgggtctcgtcagtccccaagccc

SEQ ID NO: 380103 - DNA, 25 bp, Homo sapien
tttccttgggtctcgtcagtcccca

SEQ ID NO: 380104 - DNA, 25 bp, Homo sapien
ttggctcgagcccagcttccacttg

SEQ ID NO: 380105 - DNA, 25 bp, Homo sapien
tctgatgagttgagaactccatgca

SEQ ID NO: 380106 - DNA, 25 bp, Homo sapien
tgccctggaacttccggtggattct

SEQ ID NO: 380107 - DNA, 25 bp, Homo sapien
cagaacccagacctttgccaagcaa

SEQ ID NO: 380108 - DNA, 25 bp, Homo sapien
tgcaacttcaccgttcccaatccct

SEQ ID NO: 380109 - DNA, 25 bp, Homo sapien
ctttcaacgcatccactgatggcag

SEQ ID NO: 380110 - DNA, 25 bp, Homo sapien
gggcttggtcctttcaacgcatcca

SEQ ID NO: 380111 - DNA, 25 bp, Homo sapien
gaactttctatcacccagatctcct

SEQ ID NO: 380112 - DNA, 25 bp, Homo sapien
aggtggcaggaacgggcctcaatta

SEQ ID NO: 380113 - DNA, 25 bp, Homo sapien
caggtggcaggaacgggcctcaatt

SEQ ID NO: 380114 - DNA, 25 bp, Homo sapien
ggctgctcgggatctgttctcaagt

SEQ ID NO: 380115 - DNA, 25 bp, Homo sapien
ggatctgttctcaagttgttgcggg

SEQ ID NO: 380116 - DNA, 25 bp, Homo sapien
ctcagctccctggaccgtcgtggag

SEQ ID NO: 380117 - DNA, 25 bp, Homo sapien
gggatcctgccgtatgatgacaatt

SEQ ID NO: 380118 - DNA, 25 bp, Homo sapien
gccttttgggtgttgcgtttctcat

SEQ ID NO: 380119 - DNA, 25 bp, Homo sapien
tctggaggaacgggcccttttctga

SEQ ID NO: 380120 - DNA, 25 bp, Homo sapien
gactcgggtgggtaacagttctgaa

SEQ ID NO: 380121 - DNA, 25 bp, Homo sapien
tggaagcaattcacaacaccctgcc

SEQ ID NO: 380122 - DNA, 25 bp, Homo sapien
tcctcgatggttgtctttggggaag

SEQ ID NO: 380123 - DNA, 25 bp, Homo sapien
tccgtgaaccgtggcagatgcagcc

SEQ ID NO: 380124 - DNA, 25 bp, Homo sapien
tgggtcacgcgcagggcccatttta

SEQ ID NO: 380125 - DNA, 25 bp, Homo sapien
tgaaatctgccagctctcggaagca

SEQ ID NO: 380126 - DNA, 25 bp, Homo sapien
taactgtgacagtgcagtgtcaaac

SEQ ID NO: 380127 - DNA, 25 bp, Homo sapien
gaaggacagccatcacctttggcaa

SEQ ID NO: 380128 - DNA, 25 bp, Homo sapien
tgtgtgctctactccccttgtctgg

SEQ ID NO: 380129 - DNA, 25 bp, Homo sapien
tgaagatgctcctcggtgctgcagg

SEQ ID NO: 380130 - DNA, 25 bp, Homo sapien
gagagcctgtcggtggaaacttccc

SEQ ID NO: 380131 - DNA, 25 bp, Homo sapien
gaaaagatgattcctagttcttgtt

SEQ ID NO: 380132 - DNA, 25 bp, Homo sapien
tcccaggtgaaaagatgattcctag

SEQ ID NO: 380133 - DNA, 25 bp, Homo sapien
caggtgaaaagatgattcctagttc

SEQ ID NO: 380134 - DNA, 25 bp, Homo sapien
cttcccaggtgaaaagatgattcct

SEQ ID NO: 380135 - DNA, 25 bp, Homo sapien
aataagggatgtcctgatcagagaa

SEQ ID NO: 380136 - DNA, 25 bp, Homo sapien
gcaataagggatgtcctgatcagag

SEQ ID NO: 380137 - DNA, 25 bp, Homo sapien
cttgagttgtcattgttttgtcttg

SEQ ID NO: 380138 - DNA, 25 bp, Homo sapien
aagggatgtcctgatcagagaaagc

SEQ ID NO: 380139 - DNA, 25 bp, Homo sapien
tcactcacatgtttgcactcacagt

SEQ ID NO: 380140 - DNA, 25 bp, Homo sapien
acgggaactcctcatgtcacttggg

SEQ ID NO: 380141 - DNA, 25 bp, Homo sapien
actcagtgtcagctagggtgtcttg

SEQ ID NO: 380142 - DNA, 25 bp, Homo sapien
ggaatatcagagtgtaattacagca

SEQ ID NO: 380143 - DNA, 25 bp, Homo sapien
tcctccatacctgctatatcagaat

SEQ ID NO: 380144 - DNA, 25 bp, Homo sapien
aataaatgtctccacctgcgggcag

SEQ ID NO: 380145 - DNA, 25 bp, Homo sapien
aagtggcacttcacattctgggttc

SEQ ID NO: 380146 - DNA, 25 bp, Homo sapien
caggcaaagtggcacttcacattct

SEQ ID NO: 380147 - DNA, 25 bp, Homo sapien
tcatgtccaaaggtgatgtctgagc

SEQ ID NO: 380148 - DNA, 25 bp, Homo sapien
actcaccatcaacacagtaccaagt

SEQ ID NO: 380149 - DNA, 25 bp, Homo sapien
gcgcctggccggatgtactatacac

SEQ ID NO: 380150 - DNA, 25 bp, Homo sapien
ttcaggaggatatctggggatatct

SEQ ID NO: 380151 - DNA, 25 bp, Homo sapien
tgaccgcatcccagaggactgcggg

SEQ ID NO: 380152 - DNA, 25 bp, Homo sapien
tggttattatgacctgaaggtggcg

SEQ ID NO: 380153 - DNA, 25 bp, Homo sapien
gagaagcaccttcacggtcagctct

SEQ ID NO: 380154 - DNA, 25 bp, Homo sapien
tctcaaggaaaactggcgtagggtc

SEQ ID NO: 380155 - DNA, 25 bp, Homo sapien
gcaggcattgctcagacgtggtcta

SEQ ID NO: 380156 - DNA, 25 bp, Homo sapien
cgtggtctaagaagcgtgcagcagc

SEQ ID NO: 380157 - DNA, 25 bp, Homo sapien
tggtcttagcgccagaaatgtgtct

SEQ ID NO: 380158 - DNA, 25 bp, Homo sapien
tgtctgcccggaacaggagatatga

SEQ ID NO: 380159 - DNA, 25 bp, Homo sapien
ccaatgccacttccccttaagaact

SEQ ID NO: 380160 - DNA, 25 bp, Homo sapien
ttcccaatgccacttccccttaaga

SEQ ID NO: 380161 - DNA, 25 bp, Homo sapien
aatgccacttccccttaagaacttg

SEQ ID NO: 380162 - DNA, 25 bp, Homo sapien
tgccacttccccttaagaacttgta

SEQ ID NO: 380163 - DNA, 25 bp, Homo sapien
ttggcatgcgaggatggacagttct

SEQ ID NO: 380164 - DNA, 25 bp, Homo sapien
aatggtaaccgaatctgtgggagtg

SEQ ID NO: 380165 - DNA, 25 bp, Homo sapien
tctctatggagtgtgggtattggca

SEQ ID NO: 380166 - DNA, 25 bp, Homo sapien
catccacgctgctgttgtgacaacc

SEQ ID NO: 380167 - DNA, 25 bp, Homo sapien
tctgactaggcttctccaagaacaa

SEQ ID NO: 380168 - DNA, 25 bp, Homo sapien
gctatctgaaaaccaggctgcttcg

SEQ ID NO: 380169 - DNA, 25 bp, Homo sapien
aatcccttggcgcttctttggtgct

SEQ ID NO: 380170 - DNA, 25 bp, Homo sapien
ggagacaaatcccttggcgcttctt

SEQ ID NO: 380171 - DNA, 25 bp, Homo sapien
ctcgccttgcggctcccgagagatg

SEQ ID NO: 380172 - DNA, 25 bp, Homo sapien
aactgttcggctcgccggcgggatt

SEQ ID NO: 380173 - DNA, 25 bp, Homo sapien
cctacgaggagcgatacggaagcgc

SEQ ID NO: 380174 - DNA, 25 bp, Homo sapien
cgccgggaagaagcgtctttagtgc

SEQ ID NO: 380175 - DNA, 25 bp, Homo sapien
gggtgcaacgaaagcggactcccag

SEQ ID NO: 380176 - DNA, 25 bp, Homo sapien
gcagtggcaaatgcccggtatcctg

SEQ ID NO: 380177 - DNA, 25 bp, Homo sapien
aaatgcccggtatcctgggcatcct

SEQ ID NO: 380178 - DNA, 25 bp, Homo sapien
gggcgacgcgtggagggcgcaggac

SEQ ID NO: 380179 - DNA, 25 bp, Homo sapien
ggatactgagaaaccttggcaagca

SEQ ID NO: 380180 - DNA, 25 bp, Homo sapien
tccaatgtggctttgagtgtgcaag

SEQ ID NO: 380181 - DNA, 25 bp, Homo sapien
ttggcaagcagtgggacttagcccc

SEQ ID NO: 380182 - DNA, 25 bp, Homo sapien
cacgtctatgacagtacctctaggg

SEQ ID NO: 380183 - DNA, 25 bp, Homo sapien
acccagcataaagggcccactgttc

SEQ ID NO: 380184 - DNA, 25 bp, Homo sapien
ttcacccagcataaagggcccactg

SEQ ID NO: 380185 - DNA, 25 bp, Homo sapien
cttcacccagcataaagggcccact

SEQ ID NO: 380186 - DNA, 25 bp, Homo sapien
tcacccagcataaagggcccactgt

SEQ ID NO: 380187 - DNA, 25 bp, Homo sapien
ttttcctttaggtctgcaatctccc

SEQ ID NO: 380188 - DNA, 25 bp, Homo sapien
ttagtacctcctactgatatggcag

SEQ ID NO: 380189 - DNA, 25 bp, Homo sapien
cactttgctgctactagtttggctt

SEQ ID NO: 380190 - DNA, 25 bp, Homo sapien
tagtaagacgtcttgcaatccacgt

SEQ ID NO: 380191 - DNA, 25 bp, Homo sapien
tattaggcgaacataatcccacaga

SEQ ID NO: 380192 - DNA, 25 bp, Homo sapien
gcatgttcctttggcctacagacca

SEQ ID NO: 380193 - DNA, 25 bp, Homo sapien
tagtgcttccgtattcccacatgac

SEQ ID NO: 380194 - DNA, 25 bp, Homo sapien
tgcactgaagtctgaggcgagcttg

SEQ ID NO: 380195 - DNA, 25 bp, Homo sapien
ctagaagtcaggtgcaagtacatgc

SEQ ID NO: 380196 - DNA, 25 bp, Homo sapien
gtgtgaatctgctctggctccctcg

SEQ ID NO: 380197 - DNA, 25 bp, Homo sapien
tacatgcatcctagagtcaccaggg

SEQ ID NO: 380198 - DNA, 25 bp, Homo sapien
gagatgcaaggcttgacttccacag

SEQ ID NO: 380199 - DNA, 25 bp, Homo sapien
tctggtccccatttgtctccaacgg

SEQ ID NO: 380200 - DNA, 25 bp, Homo sapien
tgacctgacctctgacatgtggcct

SEQ ID NO: 380201 - DNA, 25 bp, Homo sapien
cagccagggcaacccctttatattt

SEQ ID NO: 380202 - DNA, 25 bp, Homo sapien
ccaacggtggcacatcttcatcttt

SEQ ID NO: 380203 - DNA, 25 bp, Homo sapien
gaaagtcttccctactccaaggtga

SEQ ID NO: 380204 - DNA, 25 bp, Homo sapien
caagaagaattttaaggagccccag

SEQ ID NO: 380205 - DNA, 25 bp, Homo sapien
gagacgagttgactgccaggagaca

SEQ ID NO: 380206 - DNA, 25 bp, Homo sapien
tatgtggaggactgacaacgccaag

SEQ ID NO: 380207 - DNA, 25 bp, Homo sapien
gcatagccaactacacatctaggtt

SEQ ID NO: 380208 - DNA, 25 bp, Homo sapien
ggtatgtgtcatcacacaccggcta

SEQ ID NO: 380209 - DNA, 25 bp, Homo sapien
gttcctaggctataaatctgtgcag

SEQ ID NO: 380210 - DNA, 25 bp, Homo sapien
catataaaaggtccatctttgccca

SEQ ID NO: 380211 - DNA, 25 bp, Homo sapien
ggttctggcaagaaacagctcattc

SEQ ID NO: 380212 - DNA, 25 bp, Homo sapien
gctcattcaaattaggatacacgct

SEQ ID NO: 380213 - DNA, 25 bp, Homo sapien
taaatagctggatacagttctactc

SEQ ID NO: 380214 - DNA, 25 bp, Homo sapien
gatagcatgtatagtccctgttcca

SEQ ID NO: 380215 - DNA, 25 bp, Homo sapien
tcaacattaggtgatcaaaattctg

SEQ ID NO: 380216 - DNA, 25 bp, Homo sapien
cattaggtgatcaaaattctgaagt

SEQ ID NO: 380217 - DNA, 25 bp, Homo sapien
ctgaaatcaacattaggtgatcaaa

SEQ ID NO: 380218 - DNA, 25 bp, Homo sapien
caaaattctgaagtgtctaattaaa

SEQ ID NO: 380219 - DNA, 25 bp, Homo sapien
tagagtcttctcttgacttttacat

SEQ ID NO: 380220 - DNA, 25 bp, Homo sapien
ttttagagtcttctcttgactttta

SEQ ID NO: 380221 - DNA, 25 bp, Homo sapien
tgctatttttagagtcttctcttga

SEQ ID NO: 380222 - DNA, 25 bp, Homo sapien
ctttgctatttttagagtcttctct

SEQ ID NO: 380223 - DNA, 25 bp, Homo sapien
ccatgagaaccaaattaagtgatct

SEQ ID NO: 380224 - DNA, 25 bp, Homo sapien
atgaaggcattctggctcaaaagca

SEQ ID NO: 380225 - DNA, 25 bp, Homo sapien
tgaaggcattctggctcaaaagcat

SEQ ID NO: 380226 - DNA, 25 bp, Homo sapien
catgagaaccaaattaagtgatctg

SEQ ID NO: 380227 - DNA, 25 bp, Homo sapien
catatgaaataccaaacacgaggct

SEQ ID NO: 380228 - DNA, 25 bp, Homo sapien
atgaaataccaaacacgaggctgat

SEQ ID NO: 380229 - DNA, 25 bp, Homo sapien
gaatcatatgaaataccaaacacga

SEQ ID NO: 380230 - DNA, 25 bp, Homo sapien
caggcgaatcatatgaaataccaaa

SEQ ID NO: 380231 - DNA, 25 bp, Homo sapien
acacctctggcagataacctctcca

SEQ ID NO: 380232 - DNA, 25 bp, Homo sapien
ttgtattctggccactgttcagtca

SEQ ID NO: 380233 - DNA, 25 bp, Homo sapien
tcttgggatctagaacccacacctc

SEQ ID NO: 380234 - DNA, 25 bp, Homo sapien
cagtcatttcttgggatctagaacc

SEQ ID NO: 380235 - DNA, 25 bp, Homo sapien
agaagaaaaagggcattgaaatttg

SEQ ID NO: 380236 - DNA, 25 bp, Homo sapien
agaagaagaaaaagggcattgaaat

SEQ ID NO: 380237 - DNA, 25 bp, Homo sapien
agagaagaagaaaaagggcattgaa

SEQ ID NO: 380238 - DNA, 25 bp, Homo sapien
gagaagaagaaaaagggcattgaaa

SEQ ID NO: 380239 - DNA, 25 bp, Homo sapien
taattcccatgataagatggaccgg

SEQ ID NO: 380240 - DNA, 25 bp, Homo sapien
cagcaatgtatagtgagttggtaca

SEQ ID NO: 380241 - DNA, 25 bp, Homo sapien
gaccggaaatttcgcaatgatatct

SEQ ID NO: 380242 - DNA, 25 bp, Homo sapien
cttgaaagtgcaagattcatctgtg

SEQ ID NO: 380243 - DNA, 25 bp, Homo sapien
ccttctaggacggtgacataggcct

SEQ ID NO: 380244 - DNA, 25 bp, Homo sapien
cataggcctcgtgtgtgcttctcca

SEQ ID NO: 380245 - DNA, 25 bp, Homo sapien
tatggccagccagaaattgtgtgag

SEQ ID NO: 380246 - DNA, 25 bp, Homo sapien
tgtgttcccgctgaatccttctagg

SEQ ID NO: 380247 - DNA, 25 bp, Homo sapien
ctgaacctggctccagacttcctgt

SEQ ID NO: 380248 - DNA, 25 bp, Homo sapien
gtaattcttcctcaacaatagatgg

SEQ ID NO: 380249 - DNA, 25 bp, Homo sapien
ttcaccatcacattaatgtggttgg

SEQ ID NO: 380250 - DNA, 25 bp, Homo sapien
cttcaatgacgagagataaatcaaa

SEQ ID NO: 380251 - DNA, 25 bp, Homo sapien
cttcttaacaattccctctgactgt

SEQ ID NO: 380252 - DNA, 25 bp, Homo sapien
tacaccggtgagagcaatttgtcca

SEQ ID NO: 380253 - DNA, 25 bp, Homo sapien
gacataagctgctgctacaccggtg

SEQ ID NO: 380254 - DNA, 25 bp, Homo sapien
aagatgcagggctgtctgataccag

SEQ ID NO: 380255 - DNA, 25 bp, Homo sapien
gcatttggagggctagggacaacaa

SEQ ID NO: 380256 - DNA, 25 bp, Homo sapien
aactgactgatgtctagtttctcat

SEQ ID NO: 380257 - DNA, 25 bp, Homo sapien
aaaactgtagctcagtgtggctaag

SEQ ID NO: 380258 - DNA, 25 bp, Homo sapien
agctcagtgtggctaagtaacttct

SEQ ID NO: 380259 - DNA, 25 bp, Homo sapien
aaactgactgatgtctagtttctca

SEQ ID NO: 380260 - DNA, 25 bp, Homo sapien
taacttgtcaatgatataggtgaaa

SEQ ID NO: 380261 - DNA, 25 bp, Homo sapien
cgtgtttggaattaacttgtcaatg

SEQ ID NO: 380262 - DNA, 25 bp, Homo sapien
cacagtagttcgtgtttggaattaa

SEQ ID NO: 380263 - DNA, 25 bp, Homo sapien
taaacagatacacagtagttcgtgt

SEQ ID NO: 380264 - DNA, 25 bp, Homo sapien
gattcctggccaggtggaaggaggg

SEQ ID NO: 380265 - DNA, 25 bp, Homo sapien
ctgattcctggccaggtggaaggag

SEQ ID NO: 380266 - DNA, 25 bp, Homo sapien
tgattcctggccaggtggaaggagg

SEQ ID NO: 380267 - DNA, 25 bp, Homo sapien
gaaagacctttagtgctccatgaat

SEQ ID NO: 380268 - DNA, 25 bp, Homo sapien
tatgagcgagagctgatgccagatc

SEQ ID NO: 380269 - DNA, 25 bp, Homo sapien
aataggcttgccctcagagtaaaag

SEQ ID NO: 380270 - DNA, 25 bp, Homo sapien
tcctgactccctgaaacaaaagcgt

SEQ ID NO: 380271 - DNA, 25 bp, Homo sapien
gtgattttctcgtacaccctggcaa

SEQ ID NO: 380272 - DNA, 25 bp, Homo sapien
tgattttctcgtacaccctggcaag

SEQ ID NO: 380273 - DNA, 25 bp, Homo sapien
agtgattttctcgtacaccctggca

SEQ ID NO: 380274 - DNA, 25 bp, Homo sapien
tcagtgattttctcgtacaccctgg

SEQ ID NO: 380275 - DNA, 25 bp, Homo sapien
gggatcacactgtttattgttctga

SEQ ID NO: 380276 - DNA, 25 bp, Homo sapien
gtaacagaaaggtgttcagccttca

SEQ ID NO: 380277 - DNA, 25 bp, Homo sapien
tgttctgatgtctgtgtaacagaaa

SEQ ID NO: 380278 - DNA, 25 bp, Homo sapien
atgtctgtgtaacagaaaggtgttc

SEQ ID NO: 380279 - DNA, 25 bp, Homo sapien
aaaaactaaccacatgatcagacgg

SEQ ID NO: 380280 - DNA, 25 bp, Homo sapien
agactgagttcaatcctgcagccag

SEQ ID NO: 380281 - DNA, 25 bp, Homo sapien
tacagagagggtggtacacctgact

SEQ ID NO: 380282 - DNA, 25 bp, Homo sapien
gatcagacggttggaacttccagct

SEQ ID NO: 380283 - DNA, 25 bp, Homo sapien
aatgagggctgacttgatgtgcaac

SEQ ID NO: 380284 - DNA, 25 bp, Homo sapien
taataatcaaagaatgagggctgac

SEQ ID NO: 380285 - DNA, 25 bp, Homo sapien
gcaacatgacgcattcacgccaagt

SEQ ID NO: 380286 - DNA, 25 bp, Homo sapien
gcattcacgccaagtaaaaatggaa

SEQ ID NO: 380287 - DNA, 25 bp, Homo sapien
cagaggcacgcctttaggatacaaa

SEQ ID NO: 380288 - DNA, 25 bp, Homo sapien
gacagttccagaatcagatctagcc

SEQ ID NO: 380289 - DNA, 25 bp, Homo sapien
cagctacaatgcactctatgtccaa

SEQ ID NO: 380290 - DNA, 25 bp, Homo sapien
tgaaggaatggcataatacagagat

SEQ ID NO: 380291 - DNA, 25 bp, Homo sapien
tggtgcttgtcaagaccaatgctat

SEQ ID NO: 380292 - DNA, 25 bp, Homo sapien
tattcctcctattttggcagattct

SEQ ID NO: 380293 - DNA, 25 bp, Homo sapien
agcatatataaccaatccatttcag

SEQ ID NO: 380294 - DNA, 25 bp, Homo sapien
tcagtgtcactatggtgcttgtcaa

SEQ ID NO: 380295 - DNA, 25 bp, Homo sapien
ggggcacagggatgcacgcttgtaa

SEQ ID NO: 380296 - DNA, 25 bp, Homo sapien
tagtgcattatgactgcacctgtga

SEQ ID NO: 380297 - DNA, 25 bp, Homo sapien
cactggggcacagggatgcacgctt

SEQ ID NO: 380298 - DNA, 25 bp, Homo sapien
attccagcccttagcgagaccttgc

SEQ ID NO: 380299 - DNA, 25 bp, Homo sapien
tgtttgctctttattttctacataa

SEQ ID NO: 380300 - DNA, 25 bp, Homo sapien
ttgctctttattttctacataataa

SEQ ID NO: 380301 - DNA, 25 bp, Homo sapien
gctctttattttctacataataaaa

SEQ ID NO: 380302 - DNA, 25 bp, Homo sapien
gtttgctctttattttctacataat

SEQ ID NO: 380303 - DNA, 25 bp, Homo sapien
tccaacggtggcaggttaggaaatg

SEQ ID NO: 380304 - DNA, 25 bp, Homo sapien
ggcttccaacggtggcaggttagga

SEQ ID NO: 380305 - DNA, 25 bp, Homo sapien
ggtggcaggttaggaaatggccagg

SEQ ID NO: 380306 - DNA, 25 bp, Homo sapien
caacggtggcaggttaggaaatggc

SEQ ID NO: 380307 - DNA, 25 bp, Homo sapien
tctgttgatgtaaatgacctccacc

SEQ ID NO: 380308 - DNA, 25 bp, Homo sapien
ctgcctcagtatcgctatcactttc

SEQ ID NO: 380309 - DNA, 25 bp, Homo sapien
gatgtaaatgacctccaccatatcc

SEQ ID NO: 380310 - DNA, 25 bp, Homo sapien
cagtatcgctatcactttcatcatc

SEQ ID NO: 380311 - DNA, 25 bp, Homo sapien
tgcacattatcaggatcctctgggt

SEQ ID NO: 380312 - DNA, 25 bp, Homo sapien
gatggagcatcttcggaccacaggc

SEQ ID NO: 380313 - DNA, 25 bp, Homo sapien
cggactccgggtctatcaactggga

SEQ ID NO: 380314 - DNA, 25 bp, Homo sapien
caactgggattctgtagaggtggca

SEQ ID NO: 380315 - DNA, 25 bp, Homo sapien
aatcctagagatgccggcaggtgca

SEQ ID NO: 380316 - DNA, 25 bp, Homo sapien
tcggaatcagcatagagagcactct

SEQ ID NO: 380317 - DNA, 25 bp, Homo sapien
gatgtctgacgctagaacaccacgt

SEQ ID NO: 380318 - DNA, 25 bp, Homo sapien
cccttggagaacacttgcagacgat

SEQ ID NO: 380319 - DNA, 25 bp, Homo sapien
cgcgcccgggagagcttgtccgcgg

SEQ ID NO: 380320 - DNA, 25 bp, Homo sapien
gggttccgcggcttcctccaagcac

SEQ ID NO: 380321 - DNA, 25 bp, Homo sapien
gcggcttccgggaaccagcggagat

SEQ ID NO: 380322 - DNA, 25 bp, Homo sapien
gcccgggagagcttgtccgcggcgg

SEQ ID NO: 380323 - DNA, 25 bp, Homo sapien
ccagccagctcccaaggctccacgc

SEQ ID NO: 380324 - DNA, 25 bp, Homo sapien
ctgacaccagcaggcagccacccag

SEQ ID NO: 380325 - DNA, 25 bp, Homo sapien
agccacccagccagctcccaaggct

SEQ ID NO: 380326 - DNA, 25 bp, Homo sapien
gccagctcccaaggctccacgccat

SEQ ID NO: 380327 - DNA, 25 bp, Homo sapien
gacagggaatcaaaagacgccggga

SEQ ID NO: 380328 - DNA, 25 bp, Homo sapien
gagtttagggcccagacggtctgta

SEQ ID NO: 380329 - DNA, 25 bp, Homo sapien
tgttacagaatcgacggcagcagca

SEQ ID NO: 380330 - DNA, 25 bp, Homo sapien
tactttatttagacgcccgccagca

SEQ ID NO: 380331 - DNA, 25 bp, Homo sapien
catttgagctgcattaggttggaga

SEQ ID NO: 380332 - DNA, 25 bp, Homo sapien
tggtgccccgattggagctcagctg

SEQ ID NO: 380333 - DNA, 25 bp, Homo sapien
tgcataaaagctgaggtcaatgtcc

SEQ ID NO: 380334 - DNA, 25 bp, Homo sapien
tgaacagccgtgaggagaaatttct

SEQ ID NO: 380335 - DNA, 25 bp, Homo sapien
tctgacattttcgggaggtggtacc

SEQ ID NO: 380336 - DNA, 25 bp, Homo sapien
tgacattttcgggaggtggtaccat

SEQ ID NO: 380337 - DNA, 25 bp, Homo sapien
ctgacattttcgggaggtggtacca

SEQ ID NO: 380338 - DNA, 25 bp, Homo sapien
agtcaggttccctttggcaaaagca

SEQ ID NO: 380339 - DNA, 25 bp, Homo sapien
gtgaaagtcaggttccctttggcaa

SEQ ID NO: 380340 - DNA, 25 bp, Homo sapien
tgttcttgaaattaacagaattcat

SEQ ID NO: 380341 - DNA, 25 bp, Homo sapien
cttaggtactgagctgtgaaagtca

SEQ ID NO: 380342 - DNA, 25 bp, Homo sapien
gtcaaccatcacaactagaaaacct

SEQ ID NO: 380343 - DNA, 25 bp, Homo sapien
aaaggtggccacgagaatttcccag

SEQ ID NO: 380344 - DNA, 25 bp, Homo sapien
cagtcacacggtgaccgtagtcaga

SEQ ID NO: 380345 - DNA, 25 bp, Homo sapien
agcagccctgtgattaacagtcaaa

SEQ ID NO: 380346 - DNA, 25 bp, Homo sapien
gaatctgattgtaggctatttggaa

SEQ ID NO: 380347 - DNA, 25 bp, Homo sapien
ggactatcttattcacctttctact

SEQ ID NO: 380348 - DNA, 25 bp, Homo sapien
gcaggccttggggatttttgtgaaa

SEQ ID NO: 380349 - DNA, 25 bp, Homo sapien
agccagcaatgcacagacgaggact

SEQ ID NO: 380350 - DNA, 25 bp, Homo sapien
gagaaatcacattccgtcaaggtag

SEQ ID NO: 380351 - DNA, 25 bp, Homo sapien
tacccagtctgaatgctcatctgca

SEQ ID NO: 380352 - DNA, 25 bp, Homo sapien
cacattccgtcaaggtagtattcat

SEQ ID NO: 380353 - DNA, 25 bp, Homo sapien
tggtcaccatacttggaaagacttg

SEQ ID NO: 380354 - DNA, 25 bp, Homo sapien
gaaacgcatatgtaaagaatcagca

SEQ ID NO: 380355 - DNA, 25 bp, Homo sapien
agtaccgtttttccagtattgcaca

SEQ ID NO: 380356 - DNA, 25 bp, Homo sapien
gtccaagtttcgtattcattctcaa

SEQ ID NO: 380357 - DNA, 25 bp, Homo sapien
gtattgcacattataagtccatgag

SEQ ID NO: 380358 - DNA, 25 bp, Homo sapien
acacaactggccgaagagagaggac

SEQ ID NO: 380359 - DNA, 25 bp, Homo sapien
taagtcacacagaaggttgccacac

SEQ ID NO: 380360 - DNA, 25 bp, Homo sapien
aggcagcctttccacactcggtaag

SEQ ID NO: 380361 - DNA, 25 bp, Homo sapien
taattgaggtctgttgctagctccc

SEQ ID NO: 380362 - DNA, 25 bp, Homo sapien
tgggttgtttgctcacagacaggct

SEQ ID NO: 380363 - DNA, 25 bp, Homo sapien
gaacacaataagttgtccatggctc

SEQ ID NO: 380364 - DNA, 25 bp, Homo sapien
gaaaccctcgaacttgaacacaata

SEQ ID NO: 380365 - DNA, 25 bp, Homo sapien
ttgttccgatcaggaagaaaccctc

SEQ ID NO: 380366 - DNA, 25 bp, Homo sapien
cctcagaagcgggtgtggtctcctt

SEQ ID NO: 380367 - DNA, 25 bp, Homo sapien
tcgctccaccagacagaaaaggttt

SEQ ID NO: 380368 - DNA, 25 bp, Homo sapien
cttagcggaggtgcatctcagggct

SEQ ID NO: 380369 - DNA, 25 bp, Homo sapien
caatcatgtctagggcaggtgtcta

SEQ ID NO: 380370 - DNA, 25 bp, Homo sapien
taaatatgcagtgtttaggcccatg

SEQ ID NO: 380371 - DNA, 25 bp, Homo sapien
taggcccatgggaaccttctctctt

SEQ ID NO: 380372 - DNA, 25 bp, Homo sapien
tgtgtgaaggactgtgttgacatcc

SEQ ID NO: 380373 - DNA, 25 bp, Homo sapien
cctccaagctagaagtgatccatat

SEQ ID NO: 380374 - DNA, 25 bp, Homo sapien
cgtgagatctggatgagggcaacat

SEQ ID NO: 380375 - DNA, 25 bp, Homo sapien
gaagtcactcactctcgggaggaca

SEQ ID NO: 380376 - DNA, 25 bp, Homo sapien
taaaccgccaggtctctcaggaagt

SEQ ID NO: 380377 - DNA, 25 bp, Homo sapien
ggatgaattagctcatgaatctgca

SEQ ID NO: 380378 - DNA, 25 bp, Homo sapien
gtagttctctaatttggcgcccgga

SEQ ID NO: 380379 - DNA, 25 bp, Homo sapien
ggaatgcttttgttactcaccccag

SEQ ID NO: 380380 - DNA, 25 bp, Homo sapien
ttcaaacagggatccatgggccccg

SEQ ID NO: 380381 - DNA, 25 bp, Homo sapien
tcccaggtcttgagaaagttccagg

SEQ ID NO: 380382 - DNA, 25 bp, Homo sapien
acagtgcgtggctcacagtgcacac

SEQ ID NO: 380383 - DNA, 25 bp, Homo sapien
tgcacactccttaaacgtctgaggg

SEQ ID NO: 380384 - DNA, 25 bp, Homo sapien
gctacagcaagtgcagtcacctgct

SEQ ID NO: 380385 - DNA, 25 bp, Homo sapien
gccaagagaacaaacactgcccatg

SEQ ID NO: 380386 - DNA, 25 bp, Homo sapien
agctccccttgttcggctccaggtc

SEQ ID NO: 380387 - DNA, 25 bp, Homo sapien
cgccctcacgagcacagcatttggc

SEQ ID NO: 380388 - DNA, 25 bp, Homo sapien
tgccaaccagcaccgccctcacgag

SEQ ID NO: 380389 - DNA, 25 bp, Homo sapien
ccagctccccttgttcggctccagg

SEQ ID NO: 380390 - DNA, 25 bp, Homo sapien
gctttaattagcgtcctgctttgct

SEQ ID NO: 380391 - DNA, 25 bp, Homo sapien
ttgcttatctttgacagagtccagg

SEQ ID NO: 380392 - DNA, 25 bp, Homo sapien
taattagcgtcctgctttgcttatc

SEQ ID NO: 380393 - DNA, 25 bp, Homo sapien
ttgactgctttaattagcgtcctgc

SEQ ID NO: 380394 - DNA, 25 bp, Homo sapien
cacaacgcagggatatttttctcaa

SEQ ID NO: 380395 - DNA, 25 bp, Homo sapien
ccaaggctgcctaaggaacttacca

SEQ ID NO: 380396 - DNA, 25 bp, Homo sapien
ggccacacccttgaattcctgtctg

SEQ ID NO: 380397 - DNA, 25 bp, Homo sapien
ttctcaatgatctgcgagccattct

SEQ ID NO: 380398 - DNA, 25 bp, Homo sapien
caggtgctgtggaagagaattccta

SEQ ID NO: 380399 - DNA, 25 bp, Homo sapien
catgaagaccgaggccatgaggatg

SEQ ID NO: 380400 - DNA, 25 bp, Homo sapien
cacagcaaggcgaagcagccgagga

SEQ ID NO: 380401 - DNA, 25 bp, Homo sapien
tgtcttcttgtaaacgcaccacagc

SEQ ID NO: 380402 - DNA, 25 bp, Homo sapien
gacacctggtctagaaggttcccag

SEQ ID NO: 380403 - DNA, 25 bp, Homo sapien
actgtatcacagtgggtacccgcca

SEQ ID NO: 380404 - DNA, 25 bp, Homo sapien
ggcaagagagaagtcaccactgtat

SEQ ID NO: 380405 - DNA, 25 bp, Homo sapien
cccagagtgggagcatttctaccag

SEQ ID NO: 380406 - DNA, 25 bp, Homo sapien
tacattaataggaccagacacgcca

SEQ ID NO: 380407 - DNA, 25 bp, Homo sapien
ggacaagggcctgatattagctatc

SEQ ID NO: 380408 - DNA, 25 bp, Homo sapien
gcaaggcattggtgaggcacacaca

SEQ ID NO: 380409 - DNA, 25 bp, Homo sapien
tcccaccactaggaaggaagcattg

SEQ ID NO: 380410 - DNA, 25 bp, Homo sapien
aatatcggaggctgaaatggctcac

SEQ ID NO: 380411 - DNA, 25 bp, Homo sapien
cagatcccttttgtggaggaggcgc

SEQ ID NO: 380412 - DNA, 25 bp, Homo sapien
aacacttgcctatggtcctgtgccc

SEQ ID NO: 380413 - DNA, 25 bp, Homo sapien
tgtgccccacttgccatcgagggta

SEQ ID NO: 380414 - DNA, 25 bp, Homo sapien
tctcagttaacacaacaccttttac

SEQ ID NO: 380415 - DNA, 25 bp, Homo sapien
agggcccaccctcattctttgttct

SEQ ID NO: 380416 - DNA, 25 bp, Homo sapien
ttttggttctcagttaacacaacac

SEQ ID NO: 380417 - DNA, 25 bp, Homo sapien
agcaaagggcccaccctcattcttt

SEQ ID NO: 380418 - DNA, 25 bp, Homo sapien
tctaccgttcattccgtctgttctt

SEQ ID NO: 380419 - DNA, 25 bp, Homo sapien
tcggaggtgagagcttatgccagca

SEQ ID NO: 380420 - DNA, 25 bp, Homo sapien
tggctccacggtcaagtctgcaaag

SEQ ID NO: 380421 - DNA, 25 bp, Homo sapien
caaagtcttctagcctcggaggtga

SEQ ID NO: 380422 - DNA, 25 bp, Homo sapien
cctctctaaactttggatccagtgg

SEQ ID NO: 380423 - DNA, 25 bp, Homo sapien
tggaacctgagggtagctccactac

SEQ ID NO: 380424 - DNA, 25 bp, Homo sapien
cagatggaacccctcttaatgtcat

SEQ ID NO: 380425 - DNA, 25 bp, Homo sapien
cactcagccttctggtatgacttaa

SEQ ID NO: 380426 - DNA, 25 bp, Homo sapien
actcactgctatacaaacgaagatt

SEQ ID NO: 380427 - DNA, 25 bp, Homo sapien
ctcactgctatacaaacgaagattt

SEQ ID NO: 380428 - DNA, 25 bp, Homo sapien
actgctatacaaacgaagatttttt

SEQ ID NO: 380429 - DNA, 25 bp, Homo sapien
tactcactgctatacaaacgaagat

SEQ ID NO: 380430 - DNA, 25 bp, Homo sapien
ggagggaaagaggacagttaatgat

SEQ ID NO: 380431 - DNA, 25 bp, Homo sapien
aaagaggacagttaatgatcaattt

SEQ ID NO: 380432 - DNA, 25 bp, Homo sapien
ggaaagaggacagttaatgatcaat

SEQ ID NO: 380433 - DNA, 25 bp, Homo sapien
aggacagttaatgatcaattttctc

SEQ ID NO: 380434 - DNA, 25 bp, Homo sapien
acagaagtgtgttatgatgaggatg

SEQ ID NO: 380435 - DNA, 25 bp, Homo sapien
attctcatccgacaatggaaaggag

SEQ ID NO: 380436 - DNA, 25 bp, Homo sapien
gacacttagcttgtcaaaaacatca

SEQ ID NO: 380437 - DNA, 25 bp, Homo sapien
tctgcaatgacacttagcttgtcaa

SEQ ID NO: 380438 - DNA, 25 bp, Homo sapien
ctgcccaggcggggtcccgaggctg

SEQ ID NO: 380439 - DNA, 25 bp, Homo sapien
cagccgagtgtgtttccttctcaga

SEQ ID NO: 380440 - DNA, 25 bp, Homo sapien
tgcaaagaatccaaaagtccgtgct

SEQ ID NO: 380441 - DNA, 25 bp, Homo sapien
tgagatggagtacgtcactgtgccc

SEQ ID NO: 380442 - DNA, 25 bp, Homo sapien
taaaactttaatggagcaccagcag

SEQ ID NO: 380443 - DNA, 25 bp, Homo sapien
cttgagggacggtgtgtaatctctg

SEQ ID NO: 380444 - DNA, 25 bp, Homo sapien
ttggctggatcagcggtaatccagc

SEQ ID NO: 380445 - DNA, 25 bp, Homo sapien
gctggatcagcggtaatccagccat

SEQ ID NO: 380446 - DNA, 25 bp, Homo sapien
gatattggctggatcagcggtaatc

SEQ ID NO: 380447 - DNA, 25 bp, Homo sapien
tcattatgtaaggaactgtggaggt

SEQ ID NO: 380448 - DNA, 25 bp, Homo sapien
tgtggaggttattggctctaaccag

SEQ ID NO: 380449 - DNA, 25 bp, Homo sapien
tctttaggaaaataacgctgtttga

SEQ ID NO: 380450 - DNA, 25 bp, Homo sapien
gtgtccttagtcttacgatctttag

SEQ ID NO: 380451 - DNA, 25 bp, Homo sapien
tactagagggaaagagggtacatac

SEQ ID NO: 380452 - DNA, 25 bp, Homo sapien
ctcatggttaccctcagatccagag

SEQ ID NO: 380453 - DNA, 25 bp, Homo sapien
ggtacatactccaaagagtcaatga

SEQ ID NO: 380454 - DNA, 25 bp, Homo sapien
caaagggatttctcatggttaccct

SEQ ID NO: 380455 - DNA, 25 bp, Homo sapien
cacaaacgtgcaagggcaactggag

SEQ ID NO: 380456 - DNA, 25 bp, Homo sapien
taaagaacctcttcagctgctgttg

SEQ ID NO: 380457 - DNA, 25 bp, Homo sapien
ctaaaccacaaacgtgcaagggcaa

SEQ ID NO: 380458 - DNA, 25 bp, Homo sapien
cacttatctctactgcaatggggta

SEQ ID NO: 380459 - DNA, 25 bp, Homo sapien
taaccttaattacctgctgtaggcc

SEQ ID NO: 380460 - DNA, 25 bp, Homo sapien
taatctcatcgattcagggccccac

SEQ ID NO: 380461 - DNA, 25 bp, Homo sapien
tctacatactttttgggacgcagaa

SEQ ID NO: 380462 - DNA, 25 bp, Homo sapien
tcctctggaggacttaaactgttat

SEQ ID NO: 380463 - DNA, 25 bp, Homo sapien
cagttacatgttcgcgcacgcgcag

SEQ ID NO: 380464 - DNA, 25 bp, Homo sapien
gccgcagatcccaccagttacatgt

SEQ ID NO: 380465 - DNA, 25 bp, Homo sapien
tgcacacgcgctgcccctcttagct

SEQ ID NO: 380466 - DNA, 25 bp, Homo sapien
atcgccccgtcctaagtcacaccgc

SEQ ID NO: 380467 - DNA, 25 bp, Homo sapien
tcgtcgcgcccaggaggacgaccat

SEQ ID NO: 380468 - DNA, 25 bp, Homo sapien
agcactagggtcgtcgcgcccagga

SEQ ID NO: 380469 - DNA, 25 bp, Homo sapien
cgccacggcgacgagcactagggtc

SEQ ID NO: 380470 - DNA, 25 bp, Homo sapien
gcggctgcggacaacacccatggcg

SEQ ID NO: 380471 - DNA, 25 bp, Homo sapien
agtggaccgaaggtttcccagactg

SEQ ID NO: 380472 - DNA, 25 bp, Homo sapien
gatttgcgagcccaggtcgggttta

SEQ ID NO: 380473 - DNA, 25 bp, Homo sapien
tcgggtttaatctttggcgcggcaa

SEQ ID NO: 380474 - DNA, 25 bp, Homo sapien
gaatcaaactcgacacaaagctctg

SEQ ID NO: 380475 - DNA, 25 bp, Homo sapien
tgactggatgctggcaatagcccca

SEQ ID NO: 380476 - DNA, 25 bp, Homo sapien
cattgcacctgcctgaatctgcact

SEQ ID NO: 380477 - DNA, 25 bp, Homo sapien
ccactggctgggtcttccccagaag

SEQ ID NO: 380478 - DNA, 25 bp, Homo sapien
ctgggtcttccccagaagccattgc

SEQ ID NO: 380479 - DNA, 25 bp, Homo sapien
aattgagtggtaggatagccactga

SEQ ID NO: 380480 - DNA, 25 bp, Homo sapien
gccctcagtctggacatccagctgc

SEQ ID NO: 380481 - DNA, 25 bp, Homo sapien
cacctgggtcatgaattgagtggta

SEQ ID NO: 380482 - DNA, 25 bp, Homo sapien
gtcatgaattgagtggtaggatagc

SEQ ID NO: 380483 - DNA, 25 bp, Homo sapien
gaaagtatagtgtatctcagcagct

SEQ ID NO: 380484 - DNA, 25 bp, Homo sapien
gggtgggaaagtatagtgtatctca

SEQ ID NO: 380485 - DNA, 25 bp, Homo sapien
gggaaagtatagtgtatctcagcag

SEQ ID NO: 380486 - DNA, 25 bp, Homo sapien
gtgggaaagtatagtgtatctcagc

SEQ ID NO: 380487 - DNA, 25 bp, Homo sapien
caacagcagctgtactccctgatgt

SEQ ID NO: 380488 - DNA, 25 bp, Homo sapien
cagcagctgtactccctgatgtggt

SEQ ID NO: 380489 - DNA, 25 bp, Homo sapien
gctgtactccctgatgtggtacccc

SEQ ID NO: 380490 - DNA, 25 bp, Homo sapien
tgcccaagcagtgcctctgagccct

SEQ ID NO: 380491 - DNA, 25 bp, Homo sapien
tttgataatcgaatgaaaaagtcac

SEQ ID NO: 380492 - DNA, 25 bp, Homo sapien
tgtcgacctctactttttgaggaga

SEQ ID NO: 380493 - DNA, 25 bp, Homo sapien
tccacctcaggataaagttgtcatc

SEQ ID NO: 380494 - DNA, 25 bp, Homo sapien
agtcacattcccgacagactcatcg

SEQ ID NO: 380495 - DNA, 25 bp, Homo sapien
tactagtaatattctgacacccaga

SEQ ID NO: 380496 - DNA, 25 bp, Homo sapien
cccagacaattttatccaattatcc

SEQ ID NO: 380497 - DNA, 25 bp, Homo sapien
gtgaagaaaagttgcatttggtact

SEQ ID NO: 380498 - DNA, 25 bp, Homo sapien
catttggtactagtaatattctgac

SEQ ID NO: 380499 - DNA, 25 bp, Homo sapien
ttttctgctcttatacgcaatttaa

SEQ ID NO: 380500 - DNA, 25 bp, Homo sapien
acctcataccatgaagaagtgtttt

SEQ ID NO: 380501 - DNA, 25 bp, Homo sapien
aaatggtgtaaatgagtcaacctca

SEQ ID NO: 380502 - DNA, 25 bp, Homo sapien
gctcttatacgcaatttaatttctt

SEQ ID NO: 380503 - DNA, 25 bp, Homo sapien
cacataacactatcttttgttccag

SEQ ID NO: 380504 - DNA, 25 bp, Homo sapien
gctatatgtaaagcttaaaccatcc

SEQ ID NO: 380505 - DNA, 25 bp, Homo sapien
agcttctaaatgtacttctggagga

SEQ ID NO: 380506 - DNA, 25 bp, Homo sapien
caggagagatgtgtatcactattgc

SEQ ID NO: 380507 - DNA, 25 bp, Homo sapien
tgacgtaagtagtgctgctttaact

SEQ ID NO: 380508 - DNA, 25 bp, Homo sapien
caattttccatgacgtaagtagtgc

SEQ ID NO: 380509 - DNA, 25 bp, Homo sapien
ctgtggtctttatacaatgtactgg

SEQ ID NO: 380510 - DNA, 25 bp, Homo sapien
ggtctttatacaatgtactggacta

SEQ ID NO: 380511 - DNA, 25 bp, Homo sapien
cacactgggttaagtaagcaagctg

SEQ ID NO: 380512 - DNA, 25 bp, Homo sapien
gagtgatatagaatatccccaacac

SEQ ID NO: 380513 - DNA, 25 bp, Homo sapien
gcaatgcttatctctagtgaatgga

SEQ ID NO: 380514 - DNA, 25 bp, Homo sapien
ccaagaaactgtgggtctgtgtata

SEQ ID NO: 380515 - DNA, 25 bp, Homo sapien
gattttggacactgacttctatatt

SEQ ID NO: 380516 - DNA, 25 bp, Homo sapien
atagttctgattttggacactgact

SEQ ID NO: 380517 - DNA, 25 bp, Homo sapien
tatgtataatcccatttaagaacat

SEQ ID NO: 380518 - DNA, 25 bp, Homo sapien
aggtcatgtttgcatatgtataatc

SEQ ID NO: 380519 - DNA, 25 bp, Homo sapien
gacactatgttaggggctaaggtta

SEQ ID NO: 380520 - DNA, 25 bp, Homo sapien
aggaaactcacaaacaatggaagag

SEQ ID NO: 380521 - DNA, 25 bp, Homo sapien
tggaggtggctcatatcaatatgca

SEQ ID NO: 380522 - DNA, 25 bp, Homo sapien
aataaatagtatccacactcaggaa

SEQ ID NO: 380523 - DNA, 25 bp, Homo sapien
aaacgttttgaggaaagacacactg

SEQ ID NO: 380524 - DNA, 25 bp, Homo sapien
gtatttcagtatcaaactttatctc

SEQ ID NO: 380525 - DNA, 25 bp, Homo sapien
cagatgcttgtacgcggagaaggta

SEQ ID NO: 380526 - DNA, 25 bp, Homo sapien
gaaagacacactgggtagttttgac

SEQ ID NO: 380527 - DNA, 25 bp, Homo sapien
tacaatctccagtaaaaactactgc

SEQ ID NO: 380528 - DNA, 25 bp, Homo sapien
ttacaatctccagtaaaaactactg

SEQ ID NO: 380529 - DNA, 25 bp, Homo sapien
attacaatctccagtaaaaactact

SEQ ID NO: 380530 - DNA, 25 bp, Homo sapien
tatggaatgaatcactaagggatct

SEQ ID NO: 380531 - DNA, 25 bp, Homo sapien
agtggataatcctggatcacaggcg

SEQ ID NO: 380532 - DNA, 25 bp, Homo sapien
cagactgttttggagcaccgatata

SEQ ID NO: 380533 - DNA, 25 bp, Homo sapien
gatcacaggcgtgtttccagactgt

SEQ ID NO: 380534 - DNA, 25 bp, Homo sapien
catccagcccacataaagtttaaaa

SEQ ID NO: 380535 - DNA, 25 bp, Homo sapien
caaaactgccttaacgttcagtggc

SEQ ID NO: 380536 - DNA, 25 bp, Homo sapien
tattcctggcaaataggagcagtgc

SEQ ID NO: 380537 - DNA, 25 bp, Homo sapien
tccttggaccagagactatgtggaa

SEQ ID NO: 380538 - DNA, 25 bp, Homo sapien
gcagctcccacggaggctgtgcatg

SEQ ID NO: 380539 - DNA, 25 bp, Homo sapien
ttcaaattaggaactgtaacatcag

SEQ ID NO: 380540 - DNA, 25 bp, Homo sapien
cacacaatatacagtcagtggtttc

SEQ ID NO: 380541 - DNA, 25 bp, Homo sapien
ttctcacatacagcgtcactaaaaa

SEQ ID NO: 380542 - DNA, 25 bp, Homo sapien
cagcgtcactaaaaacactgctttt

SEQ ID NO: 380543 - DNA, 25 bp, Homo sapien
ttacttttattatgtctagctacat

SEQ ID NO: 380544 - DNA, 25 bp, Homo sapien
tttattatgtctagctacattttta

SEQ ID NO: 380545 - DNA, 25 bp, Homo sapien
cttttattatgtctagctacatttt

SEQ ID NO: 380546 - DNA, 25 bp, Homo sapien
tagaattacttttattatgtctagc

SEQ ID NO: 380547 - DNA, 25 bp, Homo sapien
aatgacaaacgggagagcaaataat

SEQ ID NO: 380548 - DNA, 25 bp, Homo sapien
gaagactttcgcagcataaatgaca

SEQ ID NO: 380549 - DNA, 25 bp, Homo sapien
cataattgatgcatctcaagaagac

SEQ ID NO: 380550 - DNA, 25 bp, Homo sapien
cgggagagcaaataatgcaatacaa

SEQ ID NO: 380551 - DNA, 25 bp, Homo sapien
gatgagcacatggtttcccaggaac

SEQ ID NO: 380552 - DNA, 25 bp, Homo sapien
tgtttaggccttcaccattcagtgc

SEQ ID NO: 380553 - DNA, 25 bp, Homo sapien
caatggaattacgttctgacaaacg

SEQ ID NO: 380554 - DNA, 25 bp, Homo sapien
gctagcttcatagaagtgccaaaca

SEQ ID NO: 380555 - DNA, 25 bp, Homo sapien
gaaacatttttcgatttgttcctca

SEQ ID NO: 380556 - DNA, 25 bp, Homo sapien
tcttggctagtttgggaactgtatt

SEQ ID NO: 380557 - DNA, 25 bp, Homo sapien
tttgttcctcagaagttgaaagcag

SEQ ID NO: 380558 - DNA, 25 bp, Homo sapien
gaatcttggctagtttgggaactgt

SEQ ID NO: 380559 - DNA, 25 bp, Homo sapien
tcatacaaagtcctgctgtagttct

SEQ ID NO: 380560 - DNA, 25 bp, Homo sapien
tgctgtagttcttcacttgttttac

SEQ ID NO: 380561 - DNA, 25 bp, Homo sapien
ctgctgtagttcttcacttgtttta

SEQ ID NO: 380562 - DNA, 25 bp, Homo sapien
tacaaagtcctgctgtagttcttca

SEQ ID NO: 380563 - DNA, 25 bp, Homo sapien
taaatagttaagagcttgcccgtat

SEQ ID NO: 380564 - DNA, 25 bp, Homo sapien
tcaggctcccagtgtaactcctgct

SEQ ID NO: 380565 - DNA, 25 bp, Homo sapien
tctgtagttactgagaggaaggtga

SEQ ID NO: 380566 - DNA, 25 bp, Homo sapien
tgcccgtatttttaggacctatgat

SEQ ID NO: 380567 - DNA, 25 bp, Homo sapien
agctaagacaacaggcgcgcgccac

SEQ ID NO: 380568 - DNA, 25 bp, Homo sapien
ctttttttaaagagtctcacgctgt

SEQ ID NO: 380569 - DNA, 25 bp, Homo sapien
tttttaaagagtctcacgctgtcac

SEQ ID NO: 380570 - DNA, 25 bp, Homo sapien
agtagctaagacaacaggcgcgcgc

SEQ ID NO: 380571 - DNA, 25 bp, Homo sapien
tagcacggctgcacttaggctcaca

SEQ ID NO: 380572 - DNA, 25 bp, Homo sapien
aatggcgaacagacaggtgtggcac

SEQ ID NO: 380573 - DNA, 25 bp, Homo sapien
tcatccaatgcaagtccggtgacag

SEQ ID NO: 380574 - DNA, 25 bp, Homo sapien
cagacgtcatccttagccacggtgc

SEQ ID NO: 380575 - DNA, 25 bp, Homo sapien
tgtgagaacactgccctagaggcca

SEQ ID NO: 380576 - DNA, 25 bp, Homo sapien
tactgctagacgagaagccagcctg

SEQ ID NO: 380577 - DNA, 25 bp, Homo sapien
cctgtcggaacggtgctgtgagaac

SEQ ID NO: 380578 - DNA, 25 bp, Homo sapien
tattttaacgccaagcaggctgagc

SEQ ID NO: 380579 - DNA, 25 bp, Homo sapien
tgaagtacgttttcccagtggtgaa

SEQ ID NO: 380580 - DNA, 25 bp, Homo sapien
gacgcaaacgtccaaagtgacaagg

SEQ ID NO: 380581 - DNA, 25 bp, Homo sapien
cagatggtcttaaagcgtgaagcct

SEQ ID NO: 380582 - DNA, 25 bp, Homo sapien
cattcaatgaagactgagctccagc

SEQ ID NO: 380583 - DNA, 25 bp, Homo sapien
tttgttattactaagtaccagggca

SEQ ID NO: 380584 - DNA, 25 bp, Homo sapien
gcctgaacagggtgacttgttgccc

SEQ ID NO: 380585 - DNA, 25 bp, Homo sapien
gaatagtaaccgattgtcagcctga

SEQ ID NO: 380586 - DNA, 25 bp, Homo sapien
tccctagggagcatgctagacacac

SEQ ID NO: 380587 - DNA, 25 bp, Homo sapien
tcaatcagtgtttgtaccgtcaacg

SEQ ID NO: 380588 - DNA, 25 bp, Homo sapien
tgcgccatcttcaacaggtgagact

SEQ ID NO: 380589 - DNA, 25 bp, Homo sapien
tagatgggctaagtatttgctcaac

SEQ ID NO: 380590 - DNA, 25 bp, Homo sapien
gctagtcatctcagccaggccagta

SEQ ID NO: 380591 - DNA, 25 bp, Homo sapien
cgcagtgcagtgatcattccctggg

SEQ ID NO: 380592 - DNA, 25 bp, Homo sapien
gagatacataggataaggtatgtga

SEQ ID NO: 380593 - DNA, 25 bp, Homo sapien
ataggataaggtatgtgagaaggac

SEQ ID NO: 380594 - DNA, 25 bp, Homo sapien
taaggtatgtgagaaggactgcaga

SEQ ID NO: 380595 - DNA, 25 bp, Homo sapien
gataaggtatgtgagaaggactgca

SEQ ID NO: 380596 - DNA, 25 bp, Homo sapien
tgtcttgctacagacctgggggctg

SEQ ID NO: 380597 - DNA, 25 bp, Homo sapien
gtgtcttgctacagacctgggggct

SEQ ID NO: 380598 - DNA, 25 bp, Homo sapien
gggtgtcttgctacagacctggggg

SEQ ID NO: 380599 - DNA, 25 bp, Homo sapien
tgcagtgacaaatgctacatcccat

SEQ ID NO: 380600 - DNA, 25 bp, Homo sapien
tggtctccttcagcattaagtgagg

SEQ ID NO: 380601 - DNA, 25 bp, Homo sapien
atggtctccttcagcattaagtgag

SEQ ID NO: 380602 - DNA, 25 bp, Homo sapien
tggagccagtccaatggtctccttc

SEQ ID NO: 380603 - DNA, 25 bp, Homo sapien
ccctctggagccagtccaatggtct

SEQ ID NO: 380604 - DNA, 25 bp, Homo sapien
gagccaggccaacctcttcagaatc

SEQ ID NO: 380605 - DNA, 25 bp, Homo sapien
gggccatgcttggaacccacaggaa

SEQ ID NO: 380606 - DNA, 25 bp, Homo sapien
caggaatgaactcagggccttgaag

SEQ ID NO: 380607 - DNA, 25 bp, Homo sapien
gggcctcctgtctgctaaggagcca

SEQ ID NO: 380608 - DNA, 25 bp, Homo sapien
tttgtttgtcccctacatgggatga

SEQ ID NO: 380609 - DNA, 25 bp, Homo sapien
gtgcctccggaagcccagtgctgat

SEQ ID NO: 380610 - DNA, 25 bp, Homo sapien
caggtgcctccggaagcccagtgct

SEQ ID NO: 380611 - DNA, 25 bp, Homo sapien
cccctacatgggatgagtggcgctg

SEQ ID NO: 380612 - DNA, 25 bp, Homo sapien
gctgactgctccggctcttttgcca

SEQ ID NO: 380613 - DNA, 25 bp, Homo sapien
tttcagcactgcctgcttagtccca

SEQ ID NO: 380614 - DNA, 25 bp, Homo sapien
tgcttagtcccatcgctcctgggca

SEQ ID NO: 380615 - DNA, 25 bp, Homo sapien
ctgctgcaagcagccctactgttgg

SEQ ID NO: 380616 - DNA, 25 bp, Homo sapien
ggagagaagagcagatgggaagcct

SEQ ID NO: 380617 - DNA, 25 bp, Homo sapien
gaagagcagatgggaagcctaggca

SEQ ID NO: 380618 - DNA, 25 bp, Homo sapien
gagaagagcagatgggaagcctagg

SEQ ID NO: 380619 - DNA, 25 bp, Homo sapien
gagagaagagcagatgggaagccta

SEQ ID NO: 380620 - DNA, 25 bp, Homo sapien
cttccgccatttcttcaaagggctc

SEQ ID NO: 380621 - DNA, 25 bp, Homo sapien
tccttctcttccgccatttcttcaa

SEQ ID NO: 380622 - DNA, 25 bp, Homo sapien
gaagtgtcccctttgaccaaatgtg

SEQ ID NO: 380623 - DNA, 25 bp, Homo sapien
ggcaggaagaaatcgggccaaccca

SEQ ID NO: 380624 - DNA, 25 bp, Homo sapien
tcatccatgggttttgtttatgctt

SEQ ID NO: 380625 - DNA, 25 bp, Homo sapien
catcctccggggtcttgccatttaa

SEQ ID NO: 380626 - DNA, 25 bp, Homo sapien
ttgtggctaaagcaccatgcactgt

SEQ ID NO: 380627 - DNA, 25 bp, Homo sapien
actttgtggctaaagcaccatgcac

SEQ ID NO: 380628 - DNA, 25 bp, Homo sapien
caatcaactttgtggctaaagcacc

SEQ ID NO: 380629 - DNA, 25 bp, Homo sapien
ttttcaatcaactttgtggctaaag

SEQ ID NO: 380630 - DNA, 25 bp, Homo sapien
gctgggactacgaatacgtgccgcc

SEQ ID NO: 380631 - DNA, 25 bp, Homo sapien
aaagatggagtcgtagtatgtcgcc

SEQ ID NO: 380632 - DNA, 25 bp, Homo sapien
tttaaagatggagtcgtagtatgtc

SEQ ID NO: 380633 - DNA, 25 bp, Homo sapien
ctacgaatacgtgccgccacatgag

SEQ ID NO: 380634 - DNA, 25 bp, Homo sapien
ccataggggctacacagaatgacac

SEQ ID NO: 380635 - DNA, 25 bp, Homo sapien
tggcagctctcagcgtctggacctt

SEQ ID NO: 380636 - DNA, 25 bp, Homo sapien
tgacactggacagataggtggcagc

SEQ ID NO: 380637 - DNA, 25 bp, Homo sapien
tggaccttggactctttgccccact

SEQ ID NO: 380638 - DNA, 25 bp, Homo sapien
cagtcccggttttgcaaccatacag

SEQ ID NO: 380639 - DNA, 25 bp, Homo sapien
cagtcagcgtttctggtgacagaac

SEQ ID NO: 380640 - DNA, 25 bp, Homo sapien
acagcagaaccacaccgtaggaatc

SEQ ID NO: 380641 - DNA, 25 bp, Homo sapien
cagtctcagtgaatccagtcccggt

SEQ ID NO: 380642 - DNA, 25 bp, Homo sapien
gggtaggtgagtgtcttccctggat

SEQ ID NO: 380643 - DNA, 25 bp, Homo sapien
taggtgagtgtcttccctggattca

SEQ ID NO: 380644 - DNA, 25 bp, Homo sapien
ggtaggtgagtgtcttccctggatt

SEQ ID NO: 380645 - DNA, 25 bp, Homo sapien
gtaggtgagtgtcttccctggattc

SEQ ID NO: 380646 - DNA, 25 bp, Homo sapien
gtgtccgtggggattgacatagcca

SEQ ID NO: 380647 - DNA, 25 bp, Homo sapien
cgtggggattgacatagccaaaggc

SEQ ID NO: 380648 - DNA, 25 bp, Homo sapien
tccgtggggattgacatagccaaag

SEQ ID NO: 380649 - DNA, 25 bp, Homo sapien
gggattgacatagccaaaggcaggg

SEQ ID NO: 380650 - DNA, 25 bp, Homo sapien
tctctgactaccatcttccactgtt

SEQ ID NO: 380651 - DNA, 25 bp, Homo sapien
tgttgccttctctgactaccatctt

SEQ ID NO: 380652 - DNA, 25 bp, Homo sapien
tccatttcctgagaactctgttgcc

SEQ ID NO: 380653 - DNA, 25 bp, Homo sapien
atttcctgagaactctgttgccttc

SEQ ID NO: 380654 - DNA, 25 bp, Homo sapien
tctaaatggcgtggggtttgccctg

SEQ ID NO: 380655 - DNA, 25 bp, Homo sapien
aatggcctccgagcagggggaggga

SEQ ID NO: 380656 - DNA, 25 bp, Homo sapien
cctccgcctccagtcaaccccattt

SEQ ID NO: 380657 - DNA, 25 bp, Homo sapien
gcctccagtcaaccccattttgaaa

SEQ ID NO: 380658 - DNA, 25 bp, Homo sapien
gctttaatagcccccaaagtacata

SEQ ID NO: 380659 - DNA, 25 bp, Homo sapien
atgtttgctttaatagcccccaaag

SEQ ID NO: 380660 - DNA, 25 bp, Homo sapien
tcgaaatgtttgctttaatagcccc

SEQ ID NO: 380661 - DNA, 25 bp, Homo sapien
ttagtcgaaatgtttgctttaatag

SEQ ID NO: 380662 - DNA, 25 bp, Homo sapien
gatcgcacaattcgaggattcgccc

SEQ ID NO: 380663 - DNA, 25 bp, Homo sapien
ctcccggaacgtcctggagactgga

SEQ ID NO: 380664 - DNA, 25 bp, Homo sapien
ctctcctctcgggtgcttgatcgca

SEQ ID NO: 380665 - DNA, 25 bp, Homo sapien
ggagcctcccggaacgtcctggaga

SEQ ID NO: 380666 - DNA, 25 bp, Homo sapien
gctcaggtcgcggccggggccccgc

SEQ ID NO: 380667 - DNA, 25 bp, Homo sapien
gcgaccacagcagcgtcggtcgcat

SEQ ID NO: 380668 - DNA, 25 bp, Homo sapien
gcggcggcgaagactccgagcagca

SEQ ID NO: 380669 - DNA, 25 bp, Homo sapien
ggcggcggcgaagactccgagcagc

SEQ ID NO: 380670 - DNA, 25 bp, Homo sapien
cagcgaccacagcagcgtcggtcgc

SEQ ID NO: 380671 - DNA, 25 bp, Homo sapien
catgagtagctgctgaatcattgca

SEQ ID NO: 380672 - DNA, 25 bp, Homo sapien
ttggtaggtctccaaagttagctgt

SEQ ID NO: 380673 - DNA, 25 bp, Homo sapien
gcaccattcttggtaggtctccaaa

SEQ ID NO: 380674 - DNA, 25 bp, Homo sapien
gaatcattgcaccattcttggtagg

SEQ ID NO: 380675 - DNA, 25 bp, Homo sapien
aacaggcctcgtgctattgctcagg

SEQ ID NO: 380676 - DNA, 25 bp, Homo sapien
ctgctctgcgttgtacaggcgaatc

SEQ ID NO: 380677 - DNA, 25 bp, Homo sapien
tatttaaactgcacttggtagacaa

SEQ ID NO: 380678 - DNA, 25 bp, Homo sapien
cgttgtacaggcgaatcttcgggtg

SEQ ID NO: 380679 - DNA, 25 bp, Homo sapien
cttgaacccaggaggtggaagttgc

SEQ ID NO: 380680 - DNA, 25 bp, Homo sapien
aaatatacctattagccagccatgg

SEQ ID NO: 380681 - DNA, 25 bp, Homo sapien
agctactcaggaggcatgagaatca

SEQ ID NO: 380682 - DNA, 25 bp, Homo sapien
tagctcatgcctgtagtcccagcta

SEQ ID NO: 380683 - DNA, 25 bp, Homo sapien
gattattcttagagtgtagaacaac

SEQ ID NO: 380684 - DNA, 25 bp, Homo sapien
tagtgattattcttagagtgtagaa

SEQ ID NO: 380685 - DNA, 25 bp, Homo sapien
gtgattattcttagagtgtagaaca

SEQ ID NO: 380686 - DNA, 25 bp, Homo sapien
gaatagtgattattcttagagtgta

SEQ ID NO: 380687 - DNA, 25 bp, Homo sapien
gatgtcggccgtgaaccatttactg

SEQ ID NO: 380688 - DNA, 25 bp, Homo sapien
ttcacccctatggacatgatgtcgg

SEQ ID NO: 380689 - DNA, 25 bp, Homo sapien
ttgaaatccattgggaagcctgctg

SEQ ID NO: 380690 - DNA, 25 bp, Homo sapien
tcccagctcagctcgaaggcgtaga

SEQ ID NO: 380691 - DNA, 25 bp, Homo sapien
tcgataccgcaagtgaagaaaacct

SEQ ID NO: 380692 - DNA, 25 bp, Homo sapien
tgctggtcatttagggtgacaggca

SEQ ID NO: 380693 - DNA, 25 bp, Homo sapien
caacccctggtttagcaaatcacac

SEQ ID NO: 380694 - DNA, 25 bp, Homo sapien
ccaaggtcagagtgtgggtttgact

SEQ ID NO: 380695 - DNA, 25 bp, Homo sapien
ggccaacatggagaaatgccgtttc

SEQ ID NO: 380696 - DNA, 25 bp, Homo sapien
gccaacatggagaaatgccgtttct

SEQ ID NO: 380697 - DNA, 25 bp, Homo sapien
ttttcccagtaatggacataataac

SEQ ID NO: 380698 - DNA, 25 bp, Homo sapien
cacctcaatgttttctggaggcccg

SEQ ID NO: 380699 - DNA, 25 bp, Homo sapien
atgttttctggaggcccgacagtca

SEQ ID NO: 380700 - DNA, 25 bp, Homo sapien
ccgtggaggtatcagcgatgtcaaa

SEQ ID NO: 380701 - DNA, 25 bp, Homo sapien
aattttggcatacgctacacagagg

SEQ ID NO: 380702 - DNA, 25 bp, Homo sapien
ggcttaccgtccctacactgtttgc

SEQ ID NO: 380703 - DNA, 25 bp, Homo sapien
gatttcaagtttatccctcccattc

SEQ ID NO: 380704 - DNA, 25 bp, Homo sapien
ctgggagtcggaattttggcatacg

SEQ ID NO: 380705 - DNA, 25 bp, Homo sapien
aaatgcccgactctaaagatgttac

SEQ ID NO: 380706 - DNA, 25 bp, Homo sapien
catctgccattgtttcgtagcaaga

SEQ ID NO: 380707 - DNA, 25 bp, Homo sapien
cttgtaaacagtacactctggaggg

SEQ ID NO: 380708 - DNA, 25 bp, Homo sapien
caagatatgttgcttaaatgcccga

SEQ ID NO: 380709 - DNA, 25 bp, Homo sapien
aatgaaataaagcaagtggtagctg

SEQ ID NO: 380710 - DNA, 25 bp, Homo sapien
ctgtaatgaaataaagcaagtggta

SEQ ID NO: 380711 - DNA, 25 bp, Homo sapien
tgaaataaagcaagtggtagctgtc

SEQ ID NO: 380712 - DNA, 25 bp, Homo sapien
aaataaagcaagtggtagctgtctg

SEQ ID NO: 380713 - DNA, 25 bp, Homo sapien
atgcttacattaatagctaaagtca

SEQ ID NO: 380714 - DNA, 25 bp, Homo sapien
ctggtatgcttacattaatagctaa

SEQ ID NO: 380715 - DNA, 25 bp, Homo sapien
cttacattaatagctaaagtcaatc

SEQ ID NO: 380716 - DNA, 25 bp, Homo sapien
tggtatgcttacattaatagctaaa

SEQ ID NO: 380717 - DNA, 25 bp, Homo sapien
catcagttaatgttccatccatgct

SEQ ID NO: 380718 - DNA, 25 bp, Homo sapien
aagagcattcctgtcctagtaaaat

SEQ ID NO: 380719 - DNA, 25 bp, Homo sapien
tagtaaaatgggcaagtccctctac

SEQ ID NO: 380720 - DNA, 25 bp, Homo sapien
tccatccatgctgcttaaagagcat

SEQ ID NO: 380721 - DNA, 25 bp, Homo sapien
caggcctctatatttcaggaccagg

SEQ ID NO: 380722 - DNA, 25 bp, Homo sapien
tgcttggtggagtgtgaaaccagta

SEQ ID NO: 380723 - DNA, 25 bp, Homo sapien
tcttctatctgtaatgggatgcttg

SEQ ID NO: 380724 - DNA, 25 bp, Homo sapien
tgccagcaccgacagcaacgaaaat

SEQ ID NO: 380725 - DNA, 25 bp, Homo sapien
ccattaagatgtctgcgtggccggg

SEQ ID NO: 380726 - DNA, 25 bp, Homo sapien
tgatgtgtcaccattaagatgtctg

SEQ ID NO: 380727 - DNA, 25 bp, Homo sapien
gcagtggggccctgatgtgtcacca

SEQ ID NO: 380728 - DNA, 25 bp, Homo sapien
gggccctgatgtgtcaccattaaga

SEQ ID NO: 380729 - DNA, 25 bp, Homo sapien
atctctgtgtccacggctttgccca

SEQ ID NO: 380730 - DNA, 25 bp, Homo sapien
catttgtaacccaaatctctgtgtc

SEQ ID NO: 380731 - DNA, 25 bp, Homo sapien
acccaaatctctgtgtccacggctt

SEQ ID NO: 380732 - DNA, 25 bp, Homo sapien
tgtaacccaaatctctgtgtccacg

SEQ ID NO: 380733 - DNA, 25 bp, Homo sapien
tgggtgttgactctgccttagggcc

SEQ ID NO: 380734 - DNA, 25 bp, Homo sapien
aaatattagcaatacccactgggca

SEQ ID NO: 380735 - DNA, 25 bp, Homo sapien
taatccttcaacgacaccggagtgc

SEQ ID NO: 380736 - DNA, 25 bp, Homo sapien
tacagttcggtagtgccaagcacat

SEQ ID NO: 380737 - DNA, 25 bp, Homo sapien
tgcaaccctcagtgtaggcctgtgg

SEQ ID NO: 380738 - DNA, 25 bp, Homo sapien
taggcttagccatagattcaccaag

SEQ ID NO: 380739 - DNA, 25 bp, Homo sapien
tttgctcccgcaggctttaggctta

SEQ ID NO: 380740 - DNA, 25 bp, Homo sapien
tcacaagcattggtctcaggcactc

SEQ ID NO: 380741 - DNA, 25 bp, Homo sapien
aattggtatagttattttattcaga

SEQ ID NO: 380742 - DNA, 25 bp, Homo sapien
aagttgattctgtccaccaatgaca

SEQ ID NO: 380743 - DNA, 25 bp, Homo sapien
tctgtccaccaatgacataacttat

SEQ ID NO: 380744 - DNA, 25 bp, Homo sapien
gattctgtccaccaatgacataact

SEQ ID NO: 380745 - DNA, 25 bp, Homo sapien
tccggaaacgagataatggacacag

SEQ ID NO: 380746 - DNA, 25 bp, Homo sapien
cgtcatcctttggtgagctgtcctt

SEQ ID NO: 380747 - DNA, 25 bp, Homo sapien
cttgtccaaggcctctaagatgggc

SEQ ID NO: 380748 - DNA, 25 bp, Homo sapien
tggacacagagtcccagacgtcatc

SEQ ID NO: 380749 - DNA, 25 bp, Homo sapien
gaactctagcagctccgatggcttg

SEQ ID NO: 380750 - DNA, 25 bp, Homo sapien
gatggcttgatctcttccagggagc

SEQ ID NO: 380751 - DNA, 25 bp, Homo sapien
tacattttaagccagcacaccatgg

SEQ ID NO: 380752 - DNA, 25 bp, Homo sapien
caaagtcaagacgacgaccaggtct

SEQ ID NO: 380753 - DNA, 25 bp, Homo sapien
cctaacagagttgatttgccctctg

SEQ ID NO: 380754 - DNA, 25 bp, Homo sapien
ctgttctcctgctatagatgtatcc

SEQ ID NO: 380755 - DNA, 25 bp, Homo sapien
gcccaacagaagaagctcttctgtc

SEQ ID NO: 380756 - DNA, 25 bp, Homo sapien
cagagttgatttgccctctgtcctg

SEQ ID NO: 380757 - DNA, 25 bp, Homo sapien
cacagccccgactactggtgctcca

SEQ ID NO: 380758 - DNA, 25 bp, Homo sapien
acagcctacaggaatgtacccacag

SEQ ID NO: 380759 - DNA, 25 bp, Homo sapien
aggactactagcagttgctgtgtgc

SEQ ID NO: 380760 - DNA, 25 bp, Homo sapien
gttgtgcggtgcacagcctacagga

SEQ ID NO: 380761 - DNA, 25 bp, Homo sapien
ttctatttctgactctgccatgaat

SEQ ID NO: 380762 - DNA, 25 bp, Homo sapien
actgcaccttcaaatgctggagctc

SEQ ID NO: 380763 - DNA, 25 bp, Homo sapien
tatttctgactctgccatgaatttt

SEQ ID NO: 380764 - DNA, 25 bp, Homo sapien
ctgcaccttcaaatgctggagctca

SEQ ID NO: 380765 - DNA, 25 bp, Homo sapien
caagtatacccaattaaagatgcag

SEQ ID NO: 380766 - DNA, 25 bp, Homo sapien
cttctcatacagtttaatattgttg

SEQ ID NO: 380767 - DNA, 25 bp, Homo sapien
tgtttgttggagaaaatgaaccata

SEQ ID NO: 380768 - DNA, 25 bp, Homo sapien
tgaaccataaaaattgatttgctgt

SEQ ID NO: 380769 - DNA, 25 bp, Homo sapien
tgttagtaagctctgtcatgcttct

SEQ ID NO: 380770 - DNA, 25 bp, Homo sapien
gcttctagcaaattgtaagactaat

SEQ ID NO: 380771 - DNA, 25 bp, Homo sapien
tcatgcttctagcaaattgtaagac

SEQ ID NO: 380772 - DNA, 25 bp, Homo sapien
taagctctgtcatgcttctagcaaa

SEQ ID NO: 380773 - DNA, 25 bp, Homo sapien
cttgtgcacagagtatgaagcagtt

SEQ ID NO: 380774 - DNA, 25 bp, Homo sapien
atgaagcagttgtggagcgctgtgc

SEQ ID NO: 380775 - DNA, 25 bp, Homo sapien
acagagtatgaagcagttgtggagc

SEQ ID NO: 380776 - DNA, 25 bp, Homo sapien
tgcacagagtatgaagcagttgtgg

SEQ ID NO: 380777 - DNA, 25 bp, Homo sapien
ctagctctcaagctttgggtgaata

SEQ ID NO: 380778 - DNA, 25 bp, Homo sapien
tagtgtccacggctctaatgtaagc

SEQ ID NO: 380779 - DNA, 25 bp, Homo sapien
taatgtaagcccatttggcatcact

SEQ ID NO: 380780 - DNA, 25 bp, Homo sapien
ctctgggcccttattgctacttttg

SEQ ID NO: 380781 - DNA, 25 bp, Homo sapien
tgcccaaaggactagtttgaaagct

SEQ ID NO: 380782 - DNA, 25 bp, Homo sapien
gactgtgtaaggcagctcagcacca

SEQ ID NO: 380783 - DNA, 25 bp, Homo sapien
gagacaatcgcagtttaaaagcatg

SEQ ID NO: 380784 - DNA, 25 bp, Homo sapien
tatatctagaatgagcactgagcca

SEQ ID NO: 380785 - DNA, 25 bp, Homo sapien
tctggagatctgcttagtattgtaa

SEQ ID NO: 380786 - DNA, 25 bp, Homo sapien
ttacttcagtggagctttcttcccc

SEQ ID NO: 380787 - DNA, 25 bp, Homo sapien
tatgaactttgatcagtgcttcttc

SEQ ID NO: 380788 - DNA, 25 bp, Homo sapien
gagacctatttctctcagatatcag

SEQ ID NO: 380789 - DNA, 25 bp, Homo sapien
ggatcccttgacacttcagaggctc

SEQ ID NO: 380790 - DNA, 25 bp, Homo sapien
ctgcactgtggatcccttgacactt

SEQ ID NO: 380791 - DNA, 25 bp, Homo sapien
gctctgaactctcaggccggtcaca

SEQ ID NO: 380792 - DNA, 25 bp, Homo sapien
aggctctgaactctcaggccggtca

SEQ ID NO: 380793 - DNA, 25 bp, Homo sapien
atcgcgctgtaagacccgattttct

SEQ ID NO: 380794 - DNA, 25 bp, Homo sapien
gattttctcttttcggaggatccca

SEQ ID NO: 380795 - DNA, 25 bp, Homo sapien
cgcgctgtaagacccgattttctct

SEQ ID NO: 380796 - DNA, 25 bp, Homo sapien
tctcttttcggaggatcccatctcc

SEQ ID NO: 380797 - DNA, 25 bp, Homo sapien
tctaaggtaaatacgtgacctttca

SEQ ID NO: 380798 - DNA, 25 bp, Homo sapien
gggaagtggcatccgcatcgtctta

SEQ ID NO: 380799 - DNA, 25 bp, Homo sapien
ccaaagcagtgagacgggctaggct

SEQ ID NO: 380800 - DNA, 25 bp, Homo sapien
gagggaagtggcatccgcatcgtct

SEQ ID NO: 380801 - DNA, 25 bp, Homo sapien
tcactggagcagtggtagtcgcggg

SEQ ID NO: 380802 - DNA, 25 bp, Homo sapien
agcagtggtagtcgcgggtaggacc

SEQ ID NO: 380803 - DNA, 25 bp, Homo sapien
aataagtagcagcagagcattgtca

SEQ ID NO: 380804 - DNA, 25 bp, Homo sapien
ataagtagcagcagagcattgtcac

SEQ ID NO: 380805 - DNA, 25 bp, Homo sapien
gggaacaacattctttcgagaatta

SEQ ID NO: 380806 - DNA, 25 bp, Homo sapien
tctgatttcattcttacgagagtca

SEQ ID NO: 380807 - DNA, 25 bp, Homo sapien
ttctttcgagaattataaaccttga

SEQ ID NO: 380808 - DNA, 25 bp, Homo sapien
ttacgagagtcaagtacagaggcgg

SEQ ID NO: 380809 - DNA, 25 bp, Homo sapien
cgacggttttcgggacgccctgctg

SEQ ID NO: 380810 - DNA, 25 bp, Homo sapien
cggccgcgacgccctcccgaggccg

SEQ ID NO: 380811 - DNA, 25 bp, Homo sapien
ccgcgacgccctcccgaggccggag

SEQ ID NO: 380812 - DNA, 25 bp, Homo sapien
tgctgcggccgcgacgccctcccga

SEQ ID NO: 380813 - DNA, 25 bp, Homo sapien
cggcgctctatcctcgcgtctgctc

SEQ ID NO: 380814 - DNA, 25 bp, Homo sapien
ctctatcctcgcgtctgctcccagc

SEQ ID NO: 380815 - DNA, 25 bp, Homo sapien
ggctgaggtggagccgcgggacgcc

SEQ ID NO: 380816 - DNA, 25 bp, Homo sapien
gggctgaggtggagccgcgggacgc

SEQ ID NO: 380817 - DNA, 25 bp, Homo sapien
tagatagctgggtctgaactccggc

SEQ ID NO: 380818 - DNA, 25 bp, Homo sapien
cagacaagactgatcggccataggc

SEQ ID NO: 380819 - DNA, 25 bp, Homo sapien
tcacggtactgcacttcaagtcagc

SEQ ID NO: 380820 - DNA, 25 bp, Homo sapien
tcaagtcagcgtgcagaaacgcagc

SEQ ID NO: 380821 - DNA, 25 bp, Homo sapien
caagctcatgatcatgtgcatcatc

SEQ ID NO: 380822 - DNA, 25 bp, Homo sapien
aacaacagcaacaagctcatgatca

SEQ ID NO: 380823 - DNA, 25 bp, Homo sapien
cagcaacaagctcatgatcatgtgc

SEQ ID NO: 380824 - DNA, 25 bp, Homo sapien
gcaacaagctcatgatcatgtgcat

SEQ ID NO: 380825 - DNA, 25 bp, Homo sapien
gtatagacagttaagcaagcctcct

SEQ ID NO: 380826 - DNA, 25 bp, Homo sapien
gactctcgtgcagtttataatcggc

SEQ ID NO: 380827 - DNA, 25 bp, Homo sapien
tataatcggctggaggtatagacag

SEQ ID NO: 380828 - DNA, 25 bp, Homo sapien
gaagacttcttgagatgatgcagac

SEQ ID NO: 380829 - DNA, 25 bp, Homo sapien
ctcccacaatcccaatcggccggac

SEQ ID NO: 380830 - DNA, 25 bp, Homo sapien
atcggccggaccacctccgctcggg

SEQ ID NO: 380831 - DNA, 25 bp, Homo sapien
aaggctcccgaggtgccctgcctgg

SEQ ID NO: 380832 - DNA, 25 bp, Homo sapien
tggagctggtggtccccggtcggga

SEQ ID NO: 380833 - DNA, 25 bp, Homo sapien
ccatctgttaacctgataatcctca

SEQ ID NO: 380834 - DNA, 25 bp, Homo sapien
tatttaagaagctaactcctgagcc

SEQ ID NO: 380835 - DNA, 25 bp, Homo sapien
aaatcatattaaagactcagtagca

SEQ ID NO: 380836 - DNA, 25 bp, Homo sapien
gtagcaagcctaatcctcaaatccc

SEQ ID NO: 380837 - DNA, 25 bp, Homo sapien
tattgcctgacaacatgatgaatca

SEQ ID NO: 380838 - DNA, 25 bp, Homo sapien
aagttttatgttttcagctgggcac

SEQ ID NO: 380839 - DNA, 25 bp, Homo sapien
cctgacaacatgatgaatcacctcc

SEQ ID NO: 380840 - DNA, 25 bp, Homo sapien
gatgaatcacctccatgtttataag

SEQ ID NO: 380841 - DNA, 25 bp, Homo sapien
tatcctaaaccacgtcgtttgcagc

SEQ ID NO: 380842 - DNA, 25 bp, Homo sapien
tagatacaaaacagggaagtgtggg

SEQ ID NO: 380843 - DNA, 25 bp, Homo sapien
tgtaataaacaagcgtgtgtacccc

SEQ ID NO: 380844 - DNA, 25 bp, Homo sapien
ttaatccattatcccaagaggaagg

SEQ ID NO: 380845 - DNA, 25 bp, Homo sapien
tcagattcactaacaaagacgtcac

SEQ ID NO: 380846 - DNA, 25 bp, Homo sapien
gagcaagcaccctgacaagtactgt

SEQ ID NO: 380847 - DNA, 25 bp, Homo sapien
gattcaaggaatagcgagcaagcac

SEQ ID NO: 380848 - DNA, 25 bp, Homo sapien
tctgcgagaagtgctagaacttggc

SEQ ID NO: 380849 - DNA, 25 bp, Homo sapien
tttaacacacggctttcaggcgctc

SEQ ID NO: 380850 - DNA, 25 bp, Homo sapien
catgttagtgtctgacgcaggcgcc

SEQ ID NO: 380851 - DNA, 25 bp, Homo sapien
cataagttgtcagtccccagcagtg

SEQ ID NO: 380852 - DNA, 25 bp, Homo sapien
tgattggctccaaagggaatgcccg

SEQ ID NO: 380853 - DNA, 25 bp, Homo sapien
aagacctaaaaatctgctcgatgtt

SEQ ID NO: 380854 - DNA, 25 bp, Homo sapien
ctaaaaatctgctcgatgttggtcg

SEQ ID NO: 380855 - DNA, 25 bp, Homo sapien
aaatctgctcgatgttggtcgccat

SEQ ID NO: 380856 - DNA, 25 bp, Homo sapien
gaatttactgaccacgaaagaccta

SEQ ID NO: 380857 - DNA, 25 bp, Homo sapien
tggtttccttcaatgggtgtatttg

SEQ ID NO: 380858 - DNA, 25 bp, Homo sapien
acttcctctatcttctgcactattt

SEQ ID NO: 380859 - DNA, 25 bp, Homo sapien
cgtagttctgtatctaagaccccag

SEQ ID NO: 380860 - DNA, 25 bp, Homo sapien
catttggtagactcctggcagaggc

SEQ ID NO: 380861 - DNA, 25 bp, Homo sapien
aatatcttaaatactgaagtcaaaa

SEQ ID NO: 380862 - DNA, 25 bp, Homo sapien
atatcttaaatactgaagtcaaaaa

SEQ ID NO: 380863 - DNA, 25 bp, Homo sapien
taaatatcttaaatactgaagtcaa

SEQ ID NO: 380864 - DNA, 25 bp, Homo sapien
aaatatcttaaatactgaagtcaaa

SEQ ID NO: 380865 - DNA, 25 bp, Homo sapien
aacctggagactactacttttctga

SEQ ID NO: 380866 - DNA, 25 bp, Homo sapien
caaagtacatcaaataatgcctggc

SEQ ID NO: 380867 - DNA, 25 bp, Homo sapien
caaattttaccttatcatgcctacg

SEQ ID NO: 380868 - DNA, 25 bp, Homo sapien
cacttactaggttaatggtcttggc

SEQ ID NO: 380869 - DNA, 25 bp, Homo sapien
ttgtcagacattccccaaagtagag

SEQ ID NO: 380870 - DNA, 25 bp, Homo sapien
aattttgtcagacattccccaaagt

SEQ ID NO: 380871 - DNA, 25 bp, Homo sapien
cccaaagtagagttagattaaatca

SEQ ID NO: 380872 - DNA, 25 bp, Homo sapien
agattaaatcatataaacccatatt

SEQ ID NO: 380873 - DNA, 25 bp, Homo sapien
tctactttttctggagccctctttc

SEQ ID NO: 380874 - DNA, 25 bp, Homo sapien
tgtacagatacgcatctactttttc

SEQ ID NO: 380875 - DNA, 25 bp, Homo sapien
gtacagatacgcatctactttttct

SEQ ID NO: 380876 - DNA, 25 bp, Homo sapien
tttgtttttgtgctttttatgcttc

SEQ ID NO: 380877 - DNA, 25 bp, Homo sapien
tttgtgctttttatgcttctttgac

SEQ ID NO: 380878 - DNA, 25 bp, Homo sapien
tgtttttgtgctttttatgcttctt

SEQ ID NO: 380879 - DNA, 25 bp, Homo sapien
tttttgtgctttttatgcttctttg

SEQ ID NO: 380880 - DNA, 25 bp, Homo sapien
gagatttcgtctttgactcagattc

SEQ ID NO: 380881 - DNA, 25 bp, Homo sapien
ctaaatctatgttcccatcatcatg

SEQ ID NO: 380882 - DNA, 25 bp, Homo sapien
tcccatcatcatgagatttcgtctt

SEQ ID NO: 380883 - DNA, 25 bp, Homo sapien
aaaaggaatcagattctaaatctat

SEQ ID NO: 380884 - DNA, 25 bp, Homo sapien
caggaggttctagcacaactgcagg

SEQ ID NO: 380885 - DNA, 25 bp, Homo sapien
catggatggttctggcattactgcc

SEQ ID NO: 380886 - DNA, 25 bp, Homo sapien
cagatgggccaaatgctcttgtagg

SEQ ID NO: 380887 - DNA, 25 bp, Homo sapien
tctaagatgtgtggctctgatacct

SEQ ID NO: 380888 - DNA, 25 bp, Homo sapien
tacacctcagtaggtgtctctgatg

SEQ ID NO: 380889 - DNA, 25 bp, Homo sapien
tgatgtgcttggctcagggtacacc

SEQ ID NO: 380890 - DNA, 25 bp, Homo sapien
ctgatgataccacaagggtttctga

SEQ ID NO: 380891 - DNA, 25 bp, Homo sapien
ggaaaatccattgttgttgatgtgc

SEQ ID NO: 380892 - DNA, 25 bp, Homo sapien
cttagcgcttcaattgcagatgact

SEQ ID NO: 380893 - DNA, 25 bp, Homo sapien
gatggtacgtctacaggctgctctg

SEQ ID NO: 380894 - DNA, 25 bp, Homo sapien
gatgttgtcaccacagactgaacag

SEQ ID NO: 380895 - DNA, 25 bp, Homo sapien
gcaattcctgcgacaactgtggcac

SEQ ID NO: 380896 - DNA, 25 bp, Homo sapien
tgaatctgcaatctccgatggtacg

SEQ ID NO: 380897 - DNA, 25 bp, Homo sapien
cgtattataggattccagcgctgtc

SEQ ID NO: 380898 - DNA, 25 bp, Homo sapien
agggcacctccagggactgcgacac

SEQ ID NO: 380899 - DNA, 25 bp, Homo sapien
gcgctgtcgtcgagggcacctccag

SEQ ID NO: 380900 - DNA, 25 bp, Homo sapien
attccagcgctgtcgtcgagggcac

SEQ ID NO: 380901 - DNA, 25 bp, Homo sapien
aagtctcccccactaatgtagtagg

SEQ ID NO: 380902 - DNA, 25 bp, Homo sapien
tctcccccactaatgtagtaggcag

SEQ ID NO: 380903 - DNA, 25 bp, Homo sapien
tcccccactaatgtagtaggcagct

SEQ ID NO: 380904 - DNA, 25 bp, Homo sapien
gtctcccccactaatgtagtaggca

SEQ ID NO: 380905 - DNA, 25 bp, Homo sapien
tgttggatgctaatatatgggtctc

SEQ ID NO: 380906 - DNA, 25 bp, Homo sapien
gagtccatggtgttggacgctagca

SEQ ID NO: 380907 - DNA, 25 bp, Homo sapien
ggtctccatggtgttagaagctaat

SEQ ID NO: 380908 - DNA, 25 bp, Homo sapien
tatatgggattctggggccatcaag

SEQ ID NO: 380909 - DNA, 25 bp, Homo sapien
tgggagtccatggtgttggatgcta

SEQ ID NO: 380910 - DNA, 25 bp, Homo sapien
ggagtccatggagctagttgctaac

SEQ ID NO: 380911 - DNA, 25 bp, Homo sapien
agtccatggagctagttgctaacat

SEQ ID NO: 380912 - DNA, 25 bp, Homo sapien
tgggagtccatggagctagttgcta

SEQ ID NO: 380913 - DNA, 25 bp, Homo sapien
gagtccatggagctagttgctaaca

SEQ ID NO: 380914 - DNA, 25 bp, Homo sapien
tgggcatccatggtaccagacgcta

SEQ ID NO: 380915 - DNA, 25 bp, Homo sapien
catttgagagtccatagtgccagat

SEQ ID NO: 380916 - DNA, 25 bp, Homo sapien
cagaatcttgggtactagacgctaa

SEQ ID NO: 380917 - DNA, 25 bp, Homo sapien
tgagctaacctgtaaggatcctgag

SEQ ID NO: 380918 - DNA, 25 bp, Homo sapien
gaatcggtgtaagaatcagcagcca

SEQ ID NO: 380919 - DNA, 25 bp, Homo sapien
catagaccggtcagcagcagagtat

SEQ ID NO: 380920 - DNA, 25 bp, Homo sapien
catagatcggtcagctgcagagtac

SEQ ID NO: 380921 - DNA, 25 bp, Homo sapien
taggcactgctgaaggctccgaaat

SEQ ID NO: 380922 - DNA, 25 bp, Homo sapien
tccgggacagtcacaaccgaaggct

SEQ ID NO: 380923 - DNA, 25 bp, Homo sapien
gaaactgtcacagtcgattcctgga

SEQ ID NO: 380924 - DNA, 25 bp, Homo sapien
gaatggtaacatagtctggctcagc

SEQ ID NO: 380925 - DNA, 25 bp, Homo sapien
ttgaaggactgacaccgctggttcc

SEQ ID NO: 380926 - DNA, 25 bp, Homo sapien
tatatttataccatgttcactttcg

SEQ ID NO: 380927 - DNA, 25 bp, Homo sapien
tatttataccatgttcactttcgta

SEQ ID NO: 380928 - DNA, 25 bp, Homo sapien
accatgttcactttcgtaaaagtca

SEQ ID NO: 380929 - DNA, 25 bp, Homo sapien
tataccatgttcactttcgtaaaag

SEQ ID NO: 380930 - DNA, 25 bp, Homo sapien
caatactgtgcgctgtttagtctca

SEQ ID NO: 380931 - DNA, 25 bp, Homo sapien
cagagcaaaaggaccagtagaagat

SEQ ID NO: 380932 - DNA, 25 bp, Homo sapien
tttccccaacaggactagtaccagc

SEQ ID NO: 380933 - DNA, 25 bp, Homo sapien
taacaccagggtaggtatccaatac

SEQ ID NO: 380934 - DNA, 25 bp, Homo sapien
catactacttacaaccgggctggca

SEQ ID NO: 380935 - DNA, 25 bp, Homo sapien
gctctaaggcttgtaagacgttcca

SEQ ID NO: 380936 - DNA, 25 bp, Homo sapien
tgtccttaggaagtaacggtctcac

SEQ ID NO: 380937 - DNA, 25 bp, Homo sapien
gaatatctttagcaggcaaaggccc

SEQ ID NO: 380938 - DNA, 25 bp, Homo sapien
cgagatcttaatgaagagtctcttt

SEQ ID NO: 380939 - DNA, 25 bp, Homo sapien
ttcgagatcttaatgaagagtctct

SEQ ID NO: 380940 - DNA, 25 bp, Homo sapien
agatcttaatgaagagtctcttttc

SEQ ID NO: 380941 - DNA, 25 bp, Homo sapien
tcttaatgaagagtctcttttcttc

SEQ ID NO: 380942 - DNA, 25 bp, Homo sapien
aactgtctttcggttatccctggag

SEQ ID NO: 380943 - DNA, 25 bp, Homo sapien
ccgtgaacgtgtctgagagcgatga

SEQ ID NO: 380944 - DNA, 25 bp, Homo sapien
aacgagattcactggtacgcttgcg

SEQ ID NO: 380945 - DNA, 25 bp, Homo sapien
tgcgtcttgaacgtgaccgtgaacg

SEQ ID NO: 380946 - DNA, 25 bp, Homo sapien
gctccgacggctaggggtgcggctc

SEQ ID NO: 380947 - DNA, 25 bp, Homo sapien
tggggtgcggctccgacggctaggg

SEQ ID NO: 380948 - DNA, 25 bp, Homo sapien
gacggctaggggtgcggctccggcg

SEQ ID NO: 380949 - DNA, 25 bp, Homo sapien
cggcggcttggggtgcggctccgac

SEQ ID NO: 380950 - DNA, 25 bp, Homo sapien
tggtgagatactgaagcttcgtctt

SEQ ID NO: 380951 - DNA, 25 bp, Homo sapien
ggtgagatactgaagcttcgtcttc

SEQ ID NO: 380952 - DNA, 25 bp, Homo sapien
gaagcttcgtcttcttaccacagac

SEQ ID NO: 380953 - DNA, 25 bp, Homo sapien
aagggtgttcttgatcgccttaatc

SEQ ID NO: 380954 - DNA, 25 bp, Homo sapien
ggtgttcttgatcgccttaatctga

SEQ ID NO: 380955 - DNA, 25 bp, Homo sapien
gggtgttcttgatcgccttaatctg

SEQ ID NO: 380956 - DNA, 25 bp, Homo sapien
agggtgttcttgatcgccttaatct

SEQ ID NO: 380957 - DNA, 25 bp, Homo sapien
gggtgatctgcctcgttcagaagac

SEQ ID NO: 380958 - DNA, 25 bp, Homo sapien
ccaaatctgtcagacgtttgggtga

SEQ ID NO: 380959 - DNA, 25 bp, Homo sapien
gatctgcctcgttcagaagacctgg

SEQ ID NO: 380960 - DNA, 25 bp, Homo sapien
agacgtttgggtgatctgcctcgtt

SEQ ID NO: 380961 - DNA, 25 bp, Homo sapien
agccttagcacacatggcagctgca

SEQ ID NO: 380962 - DNA, 25 bp, Homo sapien
accagccttagcacacatggcagct

SEQ ID NO: 380963 - DNA, 25 bp, Homo sapien
gtggaggtgcaggctttaggtttgg

SEQ ID NO: 380964 - DNA, 25 bp, Homo sapien
gggacaccagccttagcacacatgg

SEQ ID NO: 380965 - DNA, 25 bp, Homo sapien
tggaaagcaaaagtaatgggaagta

SEQ ID NO: 380966 - DNA, 25 bp, Homo sapien
ctggaaagcaaaagtaatgggaagt

SEQ ID NO: 380967 - DNA, 25 bp, Homo sapien
cattcaaacgaaccgtcccactcct

SEQ ID NO: 380968 - DNA, 25 bp, Homo sapien
acgaaccgtcccactcctcagtcag

SEQ ID NO: 380969 - DNA, 25 bp, Homo sapien
caaacgaaccgtcccactcctcagt

SEQ ID NO: 380970 - DNA, 25 bp, Homo sapien
tcctccattcaaacgaaccgtccca

SEQ ID NO: 380971 - DNA, 25 bp, Homo sapien
atcagtgaacgcgtcgtgaatggaa

SEQ ID NO: 380972 - DNA, 25 bp, Homo sapien
cagtgaacgcgtcgtgaatggaaac

SEQ ID NO: 380973 - DNA, 25 bp, Homo sapien
ggcgatcagtgaacgcgtcgtgaat

SEQ ID NO: 380974 - DNA, 25 bp, Homo sapien
gaacgcgtcgtgaatggaaacgaaa

SEQ ID NO: 380975 - DNA, 25 bp, Homo sapien
caggaagaactgataatggccggcc

SEQ ID NO: 380976 - DNA, 25 bp, Homo sapien
tcgccaatggctggtaccaaacagc

SEQ ID NO: 380977 - DNA, 25 bp, Homo sapien
tccaagctccggtggcaaaagatca

SEQ ID NO: 380978 - DNA, 25 bp, Homo sapien
gccaaaacccgaaatgttgatgcga

SEQ ID NO: 380979 - DNA, 25 bp, Homo sapien
ggtacacctgtctctatacaagcag

SEQ ID NO: 380980 - DNA, 25 bp, Homo sapien
gcaatagaagcgtttacaaggtcct

SEQ ID NO: 380981 - DNA, 25 bp, Homo sapien
cctactatgtgcagagagagcactg

SEQ ID NO: 380982 - DNA, 25 bp, Homo sapien
taaggctagccaataacaagttcca

SEQ ID NO: 380983 - DNA, 25 bp, Homo sapien
gtttattcactattacatcatcatc

SEQ ID NO: 380984 - DNA, 25 bp, Homo sapien
tcttctttactctgtgcgatctgtt

SEQ ID NO: 380985 - DNA, 25 bp, Homo sapien
ctcttcatccgaaacatgaggttta

SEQ ID NO: 380986 - DNA, 25 bp, Homo sapien
cactgagtttaaagggatgatgata

SEQ ID NO: 380987 - DNA, 25 bp, Homo sapien
tctacataatctgaaggaaatgata

SEQ ID NO: 380988 - DNA, 25 bp, Homo sapien
taaatagttccacaagttacactgt

SEQ ID NO: 380989 - DNA, 25 bp, Homo sapien
gatattatccattatttctcacagt

SEQ ID NO: 380990 - DNA, 25 bp, Homo sapien
caatatgatatctacattaaatggt

SEQ ID NO: 380991 - DNA, 25 bp, Homo sapien
ctctgagggcaaattgctgctgaaa

SEQ ID NO: 380992 - DNA, 25 bp, Homo sapien
acactatccgcttcttttttccgat

SEQ ID NO: 380993 - DNA, 25 bp, Homo sapien
tccacaggaacccattctccataaa

SEQ ID NO: 380994 - DNA, 25 bp, Homo sapien
tttttccgatgttgagatccagatg

SEQ ID NO: 380995 - DNA, 25 bp, Homo sapien
caaatcagacataacataacaatga

SEQ ID NO: 380996 - DNA, 25 bp, Homo sapien
gaatccaaatcagacataacataac

SEQ ID NO: 380997 - DNA, 25 bp, Homo sapien
atggcagattcaggtataaaaaagg

SEQ ID NO: 380998 - DNA, 25 bp, Homo sapien
caatgaaatggcagattcaggtata

SEQ ID NO: 380999 - DNA, 25 bp, Homo sapien
tactgtcaaatgagaagctgcgggt

SEQ ID NO: 381000 - DNA, 25 bp, Homo sapien
gtgaattgcatcgagttactgtcaa

SEQ ID NO: 381001 - DNA, 25 bp, Homo sapien
ctgttctctgcaattcgatgctttt

SEQ ID NO: 381002 - DNA, 25 bp, Homo sapien
gcttggttccacaaagtgaattgca

SEQ ID NO: 381003 - DNA, 25 bp, Homo sapien
gcaaatcgggaagctaaatagttgt

SEQ ID NO: 381004 - DNA, 25 bp, Homo sapien
gctatagagccttgaagcaaatcgg

SEQ ID NO: 381005 - DNA, 25 bp, Homo sapien
agagccttgaagcaaatcgggaagc

SEQ ID NO: 381006 - DNA, 25 bp, Homo sapien
aaaatctagagctatagagccttga

SEQ ID NO: 381007 - DNA, 25 bp, Homo sapien
ttttccaatccagttcttgtgttga

SEQ ID NO: 381008 - DNA, 25 bp, Homo sapien
gatctgccctctccgatcaatccct

SEQ ID NO: 381009 - DNA, 25 bp, Homo sapien
ccagttcttgtgttgaacctgagga

SEQ ID NO: 381010 - DNA, 25 bp, Homo sapien
tgtgttgaacctgaggatctgccct

SEQ ID NO: 381011 - DNA, 25 bp, Homo sapien
gcaatgggctatgtacccaagatgc

SEQ ID NO: 381012 - DNA, 25 bp, Homo sapien
ttaagatacaactatagccccgtgg

SEQ ID NO: 381013 - DNA, 25 bp, Homo sapien
gaaaccatcattaagggcaatgggc

SEQ ID NO: 381014 - DNA, 25 bp, Homo sapien
ggctgagcattaggttaaacacaag

SEQ ID NO: 381015 - DNA, 25 bp, Homo sapien
cttcattgtacagaacttgttctct

SEQ ID NO: 381016 - DNA, 25 bp, Homo sapien
gcttcattgtacagaacttgttctc

SEQ ID NO: 381017 - DNA, 25 bp, Homo sapien
tcattgtacagaacttgttctctca

SEQ ID NO: 381018 - DNA, 25 bp, Homo sapien
cagcttcattgtacagaacttgttc

SEQ ID NO: 381019 - DNA, 25 bp, Homo sapien
ttttgagtctaatcttctaagcagc

SEQ ID NO: 381020 - DNA, 25 bp, Homo sapien
aaagggttaatgctcccacgaagtg

SEQ ID NO: 381021 - DNA, 25 bp, Homo sapien
cattattgccaggtaaaagtgcaga

SEQ ID NO: 381022 - DNA, 25 bp, Homo sapien
agttacatatatcgtcccacaagag

SEQ ID NO: 381023 - DNA, 25 bp, Homo sapien
atattacacattctagcagtgccgg

SEQ ID NO: 381024 - DNA, 25 bp, Homo sapien
taccaagaattaatgcccctgagga

SEQ ID NO: 381025 - DNA, 25 bp, Homo sapien
tcagcgttaaccacataagagaatc

SEQ ID NO: 381026 - DNA, 25 bp, Homo sapien
gcagtgccgggacctatgtgtttaa

SEQ ID NO: 381027 - DNA, 25 bp, Homo sapien
taatgcgaaaacatatactcaaagt

SEQ ID NO: 381028 - DNA, 25 bp, Homo sapien
aatgaatcaagattatcttaacctc

SEQ ID NO: 381029 - DNA, 25 bp, Homo sapien
ttttaatgcgaaaacatatactcaa

SEQ ID NO: 381030 - DNA, 25 bp, Homo sapien
gaatcaagattatcttaacctcata

SEQ ID NO: 381031 - DNA, 25 bp, Homo sapien
tactcttcaacagacttaccaaggg

SEQ ID NO: 381032 - DNA, 25 bp, Homo sapien
tgcctcaccatttatccccagaatg

SEQ ID NO: 381033 - DNA, 25 bp, Homo sapien
ggaaagcaaactattacacctgcga

SEQ ID NO: 381034 - DNA, 25 bp, Homo sapien
ttagctactcatctattcagatggc

SEQ ID NO: 381035 - DNA, 25 bp, Homo sapien
gaataagacctgtctagtagagaag

SEQ ID NO: 381036 - DNA, 25 bp, Homo sapien
ggaagtcagtaaatagctaacggct

SEQ ID NO: 381037 - DNA, 25 bp, Homo sapien
cttttttacaagtagaggctagctg

SEQ ID NO: 381038 - DNA, 25 bp, Homo sapien
taactcatgcataaggattcacaaa

SEQ ID NO: 381039 - DNA, 25 bp, Homo sapien
cctgagctctatttaacatgctcat

SEQ ID NO: 381040 - DNA, 25 bp, Homo sapien
ctgagctctatttaacatgctcatg

SEQ ID NO: 381041 - DNA, 25 bp, Homo sapien
taaggtaaaggatgttacaactcaa

SEQ ID NO: 381042 - DNA, 25 bp, Homo sapien
caggcctcgaatcactttcatttaa

SEQ ID NO: 381043 - DNA, 25 bp, Homo sapien
caaccatctagttagcaaaattctt

SEQ ID NO: 381044 - DNA, 25 bp, Homo sapien
aatgatcaggcctcgaatcactttc

SEQ ID NO: 381045 - DNA, 25 bp, Homo sapien
ttgggcaccagtattggccaactgt

SEQ ID NO: 381046 - DNA, 25 bp, Homo sapien
ggcaccagtattggccaactgttct

SEQ ID NO: 381047 - DNA, 25 bp, Homo sapien
ctgtacttcctgtgaactggccagg

SEQ ID NO: 381048 - DNA, 25 bp, Homo sapien
actggccaggaatagagttcagctg

SEQ ID NO: 381049 - DNA, 25 bp, Homo sapien
tacatcttcgtagcacgaggcgtcc

SEQ ID NO: 381050 - DNA, 25 bp, Homo sapien
cactagggcctaaatggtggtccac

SEQ ID NO: 381051 - DNA, 25 bp, Homo sapien
gatcttacaagaaggcacaggcact

SEQ ID NO: 381052 - DNA, 25 bp, Homo sapien
caaattgagcctgtggatcaccaga

SEQ ID NO: 381053 - DNA, 25 bp, Homo sapien
cacataaggcagatgctggactata

SEQ ID NO: 381054 - DNA, 25 bp, Homo sapien
gattaccactagacacctcagagac

SEQ ID NO: 381055 - DNA, 25 bp, Homo sapien
gaaattccaaagagttacttgccca

SEQ ID NO: 381056 - DNA, 25 bp, Homo sapien
aatgacttctacatgttgtggccca

SEQ ID NO: 381057 - DNA, 25 bp, Homo sapien
aggttcatccgtccctcttttccag

SEQ ID NO: 381058 - DNA, 25 bp, Homo sapien
caggttcatccgtccctcttttcca

SEQ ID NO: 381059 - DNA, 25 bp, Homo sapien
tccaggttcatccgtccctcttttc

SEQ ID NO: 381060 - DNA, 25 bp, Homo sapien
catgccaatgacgtgtgactagaca

SEQ ID NO: 381061 - DNA, 25 bp, Homo sapien
gctgatgcttggatattaactgcct

SEQ ID NO: 381062 - DNA, 25 bp, Homo sapien
tccttatttggtgcaggccatgcag

SEQ ID NO: 381063 - DNA, 25 bp, Homo sapien
cagtagctcaggaaatagtatgcac

SEQ ID NO: 381064 - DNA, 25 bp, Homo sapien
aatagtacggctggcactgaccggg

SEQ ID NO: 381065 - DNA, 25 bp, Homo sapien
ctcggtagcagcagtgttgtgaata

SEQ ID NO: 381066 - DNA, 25 bp, Homo sapien
tgttgtgaatagtacggctggcact

SEQ ID NO: 381067 - DNA, 25 bp, Homo sapien
agaagacagctacaaggatttggcc

SEQ ID NO: 381068 - DNA, 25 bp, Homo sapien
cactatttaggttcactggtatctc

SEQ ID NO: 381069 - DNA, 25 bp, Homo sapien
cagttttgaaacagtagccctcgtg

SEQ ID NO: 381070 - DNA, 25 bp, Homo sapien
gaacactcctgttttcgtccactat

SEQ ID NO: 381071 - DNA, 25 bp, Homo sapien
gaagaagcatactgttgtcatccaa

SEQ ID NO: 381072 - DNA, 25 bp, Homo sapien
caaaacggctcccattcctccagtt

SEQ ID NO: 381073 - DNA, 25 bp, Homo sapien
attcctccagttaccggggctgctc

SEQ ID NO: 381074 - DNA, 25 bp, Homo sapien
cccattcctccagttaccggggctg

SEQ ID NO: 381075 - DNA, 25 bp, Homo sapien
cggctcccattcctccagttaccgg

SEQ ID NO: 381076 - DNA, 25 bp, Homo sapien
tcggtctgtcttaaaatcaactagg

SEQ ID NO: 381077 - DNA, 25 bp, Homo sapien
aaatcaactaggatgggttccttat

SEQ ID NO: 381078 - DNA, 25 bp, Homo sapien
atcaactaggatgggttccttattg

SEQ ID NO: 381079 - DNA, 25 bp, Homo sapien
tttcggtctgtcttaaaatcaacta

SEQ ID NO: 381080 - DNA, 25 bp, Homo sapien
ttgcagcagagaagttcccagacct

SEQ ID NO: 381081 - DNA, 25 bp, Homo sapien
gttcccagacctcttttgtgctctt

SEQ ID NO: 381082 - DNA, 25 bp, Homo sapien
gtgctctttctcctactgcaacaag

SEQ ID NO: 381083 - DNA, 25 bp, Homo sapien
tgacagatctttcattgcagcagag

SEQ ID NO: 381084 - DNA, 25 bp, Homo sapien
tcttttattacagatctccatcaaa

SEQ ID NO: 381085 - DNA, 25 bp, Homo sapien
cttttattacagatctccatcaaag

SEQ ID NO: 381086 - DNA, 25 bp, Homo sapien
tttattacagatctccatcaaagca

SEQ ID NO: 381087 - DNA, 25 bp, Homo sapien
ttttattacagatctccatcaaagc

SEQ ID NO: 381088 - DNA, 25 bp, Homo sapien
acatacaattgggtctggtaagggc

SEQ ID NO: 381089 - DNA, 25 bp, Homo sapien
tacaattgggtctggtaagggctcc

SEQ ID NO: 381090 - DNA, 25 bp, Homo sapien
aacatacaattgggtctggtaaggg

SEQ ID NO: 381091 - DNA, 25 bp, Homo sapien
catacaattgggtctggtaagggct

SEQ ID NO: 381092 - DNA, 25 bp, Homo sapien
cccattgcttgaagaaccacagtag

SEQ ID NO: 381093 - DNA, 25 bp, Homo sapien
cctttggtacaaggcccattgcttg

SEQ ID NO: 381094 - DNA, 25 bp, Homo sapien
tggcattagccatgaggtcctttgg

SEQ ID NO: 381095 - DNA, 25 bp, Homo sapien
gcttgaagaaccacagtagctgctg

SEQ ID NO: 381096 - DNA, 25 bp, Homo sapien
taaatacaatttccatggtacaaaa

SEQ ID NO: 381097 - DNA, 25 bp, Homo sapien
ttaaatacaatttccatggtacaaa

SEQ ID NO: 381098 - DNA, 25 bp, Homo sapien
gttaaatacaatttccatggtacaa

SEQ ID NO: 381099 - DNA, 25 bp, Homo sapien
catactaaatgtactggcctctgca

SEQ ID NO: 381100 - DNA, 25 bp, Homo sapien
caaacagtcgtttggatgttagcca

SEQ ID NO: 381101 - DNA, 25 bp, Homo sapien
attacaggcaagtgttacagtagcc

SEQ ID NO: 381102 - DNA, 25 bp, Homo sapien
ttactctgatgccttcaaacagtcg

SEQ ID NO: 381103 - DNA, 25 bp, Homo sapien
aaacaccacgtttattccagagaag

SEQ ID NO: 381104 - DNA, 25 bp, Homo sapien
taaaacaccacgtttattccagaga

SEQ ID NO: 381105 - DNA, 25 bp, Homo sapien
ataaaacaccacgtttattccagag

SEQ ID NO: 381106 - DNA, 25 bp, Homo sapien
gtggtttgcaccctaacactctgga

SEQ ID NO: 381107 - DNA, 25 bp, Homo sapien
catctttacggaatgtggtgctgag

SEQ ID NO: 381108 - DNA, 25 bp, Homo sapien
ccacaggaggttgttcataaggagc

SEQ ID NO: 381109 - DNA, 25 bp, Homo sapien
aattgtctcatgcatctcagttggc

SEQ ID NO: 381110 - DNA, 25 bp, Homo sapien
atccaaaactcaatagtacctgatt

SEQ ID NO: 381111 - DNA, 25 bp, Homo sapien
cacccggcctcagtccaaatagttt

SEQ ID NO: 381112 - DNA, 25 bp, Homo sapien
caaaactcaatagtacctgattcct

SEQ ID NO: 381113 - DNA, 25 bp, Homo sapien
tcaatagtacctgattcctttatag

SEQ ID NO: 381114 - DNA, 25 bp, Homo sapien
tctggccgaggacctggcagaagcg

SEQ ID NO: 381115 - DNA, 25 bp, Homo sapien
tttccagaagcgtcgctgaacctgg

SEQ ID NO: 381116 - DNA, 25 bp, Homo sapien
acctggcgactggactctggccgag

SEQ ID NO: 381117 - DNA, 25 bp, Homo sapien
gggacagtgggcgttgacggccacc

SEQ ID NO: 381118 - DNA, 25 bp, Homo sapien
gctgcgctggcataggaagcgtgct

SEQ ID NO: 381119 - DNA, 25 bp, Homo sapien
gatgtcggtaggctgcgctggcata

SEQ ID NO: 381120 - DNA, 25 bp, Homo sapien
cgtgctgacgtcttatctgagttct

SEQ ID NO: 381121 - DNA, 25 bp, Homo sapien
gaagggagggatgtcggtaggctgc

SEQ ID NO: 381122 - DNA, 25 bp, Homo sapien
ctattcattcactccggctttcccc

SEQ ID NO: 381123 - DNA, 25 bp, Homo sapien
cactccggctttccccaggatcaaa

SEQ ID NO: 381124 - DNA, 25 bp, Homo sapien
cattcactccggctttccccaggat

SEQ ID NO: 381125 - DNA, 25 bp, Homo sapien
tattcattcactccggctttcccca

SEQ ID NO: 381126 - DNA, 25 bp, Homo sapien
tctctgctaagacaagatgctcagt

SEQ ID NO: 381127 - DNA, 25 bp, Homo sapien
gacctcagtcggatgaacatattcc

SEQ ID NO: 381128 - DNA, 25 bp, Homo sapien
gatgctcagttgacacatttgaaaa

SEQ ID NO: 381129 - DNA, 25 bp, Homo sapien
gataaaagctgttgcaggcctttgc

SEQ ID NO: 381130 - DNA, 25 bp, Homo sapien
tttgtagagagccttgtttcccaag

SEQ ID NO: 381131 - DNA, 25 bp, Homo sapien
cctcatggatgcgtgagggatgact

SEQ ID NO: 381132 - DNA, 25 bp, Homo sapien
tatctggagattttggtcttcatgg

SEQ ID NO: 381133 - DNA, 25 bp, Homo sapien
gcctggtcaacgaatgtacatctaa

SEQ ID NO: 381134 - DNA, 25 bp, Homo sapien
gatatgtataaaggccagttccctc

SEQ ID NO: 381135 - DNA, 25 bp, Homo sapien
cattacttgatagagcatatgtgtg

SEQ ID NO: 381136 - DNA, 25 bp, Homo sapien
caatgacagtctttattcggagctt

SEQ ID NO: 381137 - DNA, 25 bp, Homo sapien
ttaaggtagttatgtaggccgggca

SEQ ID NO: 381138 - DNA, 25 bp, Homo sapien
agggacaaatcagtgccgctcacgc

SEQ ID NO: 381139 - DNA, 25 bp, Homo sapien
tactacggagcaaccaagctacgct

SEQ ID NO: 381140 - DNA, 25 bp, Homo sapien
tcgcgagccgccgtactacggagca

SEQ ID NO: 381141 - DNA, 25 bp, Homo sapien
gctcgggattcttcctcgcgagccg

SEQ ID NO: 381142 - DNA, 25 bp, Homo sapien
tctgaagcgaggtgacagaaacccg

SEQ ID NO: 381143 - DNA, 25 bp, Homo sapien
cttttaaaagattggcctcgctgca

SEQ ID NO: 381144 - DNA, 25 bp, Homo sapien
accttgagcacactacgcctgggaa

SEQ ID NO: 381145 - DNA, 25 bp, Homo sapien
ggtttccaacttccctatgcaggag

SEQ ID NO: 381146 - DNA, 25 bp, Homo sapien
taagacaagtccacatcacaagtga

SEQ ID NO: 381147 - DNA, 25 bp, Homo sapien
tgaaaactgagctaggcagccaaac

SEQ ID NO: 381148 - DNA, 25 bp, Homo sapien
actactttaaggatgaatgctggac

SEQ ID NO: 381149 - DNA, 25 bp, Homo sapien
accactcaatgaagggccaaacgca

SEQ ID NO: 381150 - DNA, 25 bp, Homo sapien
gctgtggcaccatgctacattcaca

SEQ ID NO: 381151 - DNA, 25 bp, Homo sapien
aatatgccacattgtccactgatgc

SEQ ID NO: 381152 - DNA, 25 bp, Homo sapien
taatggttgtaaagtggtattctca

SEQ ID NO: 381153 - DNA, 25 bp, Homo sapien
tggaattgctaagccatataactct

SEQ ID NO: 381154 - DNA, 25 bp, Homo sapien
gatataataccagtttgggccaggc

SEQ ID NO: 381155 - DNA, 25 bp, Homo sapien
tatcagtgcagtactacgatgccag

SEQ ID NO: 381156 - DNA, 25 bp, Homo sapien
tattaaatcgtttccgccaggcgtg

SEQ ID NO: 381157 - DNA, 25 bp, Homo sapien
cacagtgatgtgaccctcttaggga

SEQ ID NO: 381158 - DNA, 25 bp, Homo sapien
gttcttctgtagttcacacaagtgg

SEQ ID NO: 381159 - DNA, 25 bp, Homo sapien
tgtgaatcggtactcagatgagtgc

SEQ ID NO: 381160 - DNA, 25 bp, Homo sapien
gaagctgaactaggaaattacctac

SEQ ID NO: 381161 - DNA, 25 bp, Homo sapien
gatgagtgccatcaagatcaattta

SEQ ID NO: 381162 - DNA, 25 bp, Homo sapien
tgtattcagaccttagcacctgtgc

SEQ ID NO: 381163 - DNA, 25 bp, Homo sapien
tctgattccctgaacgccgagtata

SEQ ID NO: 381164 - DNA, 25 bp, Homo sapien
tgtcactatgaaacgcaacttgctt

SEQ ID NO: 381165 - DNA, 25 bp, Homo sapien
tttagataaggcaccaccaaagcag

SEQ ID NO: 381166 - DNA, 25 bp, Homo sapien
gaactagctcagtccagcactttga

SEQ ID NO: 381167 - DNA, 25 bp, Homo sapien
tatggcacctatctgtaaagaagct

SEQ ID NO: 381168 - DNA, 25 bp, Homo sapien
ccagaaggatacatcggcgagcact

SEQ ID NO: 381169 - DNA, 25 bp, Homo sapien
gccaggcaatagacgaactgattca

SEQ ID NO: 381170 - DNA, 25 bp, Homo sapien
ggatactgttccatgcaataaaggc

SEQ ID NO: 381171 - DNA, 25 bp, Homo sapien
tgacaacttagccttactcccggaa

SEQ ID NO: 381172 - DNA, 25 bp, Homo sapien
tctttacaactgatttcgaggtcct

SEQ ID NO: 381173 - DNA, 25 bp, Homo sapien
ggaatacgaacttcaccaaagaggc

SEQ ID NO: 381174 - DNA, 25 bp, Homo sapien
cgcctggctaatgtttttgtttgta

SEQ ID NO: 381175 - DNA, 25 bp, Homo sapien
gagatgggtttctccatgttagcca

SEQ ID NO: 381176 - DNA, 25 bp, Homo sapien
gcctggctaatgtttttgtttgtat

SEQ ID NO: 381177 - DNA, 25 bp, Homo sapien
gtagagatgggtttctccatgttag

SEQ ID NO: 381178 - DNA, 25 bp, Homo sapien
ttctgttacttttaccttgctaatc

SEQ ID NO: 381179 - DNA, 25 bp, Homo sapien
ctgttacttttaccttgctaatcga

SEQ ID NO: 381180 - DNA, 25 bp, Homo sapien
ttacttttaccttgctaatcgacgc

SEQ ID NO: 381181 - DNA, 25 bp, Homo sapien
tgttacttttaccttgctaatcgac

SEQ ID NO: 381182 - DNA, 25 bp, Homo sapien
caaaaggtgttggaaactgagccat

SEQ ID NO: 381183 - DNA, 25 bp, Homo sapien
ccaaaaggtgttggaaactgagcca

SEQ ID NO: 381184 - DNA, 25 bp, Homo sapien
caccaaaaggtgttggaaactgagc

SEQ ID NO: 381185 - DNA, 25 bp, Homo sapien
ctctacagttatggcccagatatcc

SEQ ID NO: 381186 - DNA, 25 bp, Homo sapien
cagtaatgaatccagatattggctt

SEQ ID NO: 381187 - DNA, 25 bp, Homo sapien
ctgctgatcatgcttcgctctttcc

SEQ ID NO: 381188 - DNA, 25 bp, Homo sapien
tctttcctctacagttatggcccag

SEQ ID NO: 381189 - DNA, 25 bp, Homo sapien
tgctaaaacaggttgaggtaaccca

SEQ ID NO: 381190 - DNA, 25 bp, Homo sapien
tctgtgctaaaacaggttgaggtaa

SEQ ID NO: 381191 - DNA, 25 bp, Homo sapien
aaacaggttgaggtaacccagattg

SEQ ID NO: 381192 - DNA, 25 bp, Homo sapien
caggttgaggtaacccagattgaaa

SEQ ID NO: 381193 - DNA, 25 bp, Homo sapien
aagacagttgtctttgccaggcatg

SEQ ID NO: 381194 - DNA, 25 bp, Homo sapien
tccagtggaggaagttaagtctgcg

SEQ ID NO: 381195 - DNA, 25 bp, Homo sapien
taagtctgcggaagaaggttccagc

SEQ ID NO: 381196 - DNA, 25 bp, Homo sapien
tatatccgcagcacctcttaacagt

SEQ ID NO: 381197 - DNA, 25 bp, Homo sapien
gcatggcctgagaacaactgtgacc

SEQ ID NO: 381198 - DNA, 25 bp, Homo sapien
catggcctgagaacaactgtgacca

SEQ ID NO: 381199 - DNA, 25 bp, Homo sapien
tggcctgagaacaactgtgaccata

SEQ ID NO: 381200 - DNA, 25 bp, Homo sapien
gcctgagaacaactgtgaccataaa

SEQ ID NO: 381201 - DNA, 25 bp, Homo sapien
ggaaaactccacttgatccattctt

SEQ ID NO: 381202 - DNA, 25 bp, Homo sapien
aactggttgctgtttcatgacaggg

SEQ ID NO: 381203 - DNA, 25 bp, Homo sapien
aagtgcagagggtagctgatatcct

SEQ ID NO: 381204 - DNA, 25 bp, Homo sapien
tgcgctagaaatagcaactggttgc

SEQ ID NO: 381205 - DNA, 25 bp, Homo sapien
tcataatgttataaaccgagaggga

SEQ ID NO: 381206 - DNA, 25 bp, Homo sapien
cataatgttataaaccgagagggaa

SEQ ID NO: 381207 - DNA, 25 bp, Homo sapien
cagagatcttcagggattcagagca

SEQ ID NO: 381208 - DNA, 25 bp, Homo sapien
cagcagcggactgtaagtttcttcc

SEQ ID NO: 381209 - DNA, 25 bp, Homo sapien
gttaaagaacctccccatgaatcag

SEQ ID NO: 381210 - DNA, 25 bp, Homo sapien
tgggtcctgaccaaagattggctac

SEQ ID NO: 381211 - DNA, 25 bp, Homo sapien
tttactgagaacatcaatgtggtga

SEQ ID NO: 381212 - DNA, 25 bp, Homo sapien
gaacatcaatgtggtgaggaaagac

SEQ ID NO: 381213 - DNA, 25 bp, Homo sapien
acatcaatgtggtgaggaaagacag

SEQ ID NO: 381214 - DNA, 25 bp, Homo sapien
ctgagaacatcaatgtggtgaggaa

SEQ ID NO: 381215 - DNA, 25 bp, Homo sapien
tttgccagtgcagttcctttagcct

SEQ ID NO: 381216 - DNA, 25 bp, Homo sapien
tcttgcccgtggcaaaagcctccta

SEQ ID NO: 381217 - DNA, 25 bp, Homo sapien
ccaagctagtttttgccttaggact

SEQ ID NO: 381218 - DNA, 25 bp, Homo sapien
ttttcccaaaatacaggctagaatg

SEQ ID NO: 381219 - DNA, 25 bp, Homo sapien
gactggtttacagttcacgtgcaca

SEQ ID NO: 381220 - DNA, 25 bp, Homo sapien
aaggcttgacacagcatactgcgca

SEQ ID NO: 381221 - DNA, 25 bp, Homo sapien
gctggtcctgaactaggagcctcaa

SEQ ID NO: 381222 - DNA, 25 bp, Homo sapien
gacacgtaccccatctgtgctgcag

SEQ ID NO: 381223 - DNA, 25 bp, Homo sapien
tgtttcaagtgcaccaggtacccta

SEQ ID NO: 381224 - DNA, 25 bp, Homo sapien
caaaaggaaggcttgttgggccagt

SEQ ID NO: 381225 - DNA, 25 bp, Homo sapien
ttttcctgagtatgaagccctgtcc

SEQ ID NO: 381226 - DNA, 25 bp, Homo sapien
tgggccagtcttttgagttcatagg

SEQ ID NO: 381227 - DNA, 25 bp, Homo sapien
tctgtggccagaattgtcatttcca

SEQ ID NO: 381228 - DNA, 25 bp, Homo sapien
ctgtggccagaattgtcatttccac

SEQ ID NO: 381229 - DNA, 25 bp, Homo sapien
gcacagtagtcagccaatgatggga

SEQ ID NO: 381230 - DNA, 25 bp, Homo sapien
taagcctggctttttacggattgca

SEQ ID NO: 381231 - DNA, 25 bp, Homo sapien
tagtaaccggcataggctaattcag

SEQ ID NO: 381232 - DNA, 25 bp, Homo sapien
tcttgagggtgagacaatactttcc

SEQ ID NO: 381233 - DNA, 25 bp, Homo sapien
cactggagcaacagctgtaagcggt

SEQ ID NO: 381234 - DNA, 25 bp, Homo sapien
tccaacaactggaatggatcccatt

SEQ ID NO: 381235 - DNA, 25 bp, Homo sapien
tggaatggatcccattggcactgga

SEQ ID NO: 381236 - DNA, 25 bp, Homo sapien
tggcatgctggcgatacctcccata

SEQ ID NO: 381237 - DNA, 25 bp, Homo sapien
cagaggttgtataacagggggagcc

SEQ ID NO: 381238 - DNA, 25 bp, Homo sapien
gcagaggttgtataacagggggagc

SEQ ID NO: 381239 - DNA, 25 bp, Homo sapien
caggcagaggttgtataacaggggg

SEQ ID NO: 381240 - DNA, 25 bp, Homo sapien
aggcagaggttgtataacaggggga

SEQ ID NO: 381241 - DNA, 25 bp, Homo sapien
cctggaccagatctactaaaggaag

SEQ ID NO: 381242 - DNA, 25 bp, Homo sapien
ccctggaccagatctactaaaggaa

SEQ ID NO: 381243 - DNA, 25 bp, Homo sapien
ctggaccagatctactaaaggaaga

SEQ ID NO: 381244 - DNA, 25 bp, Homo sapien
ccaggacagattacagctaatgctc

SEQ ID NO: 381245 - DNA, 25 bp, Homo sapien
tcagacagtaaaactggcattcccc

SEQ ID NO: 381246 - DNA, 25 bp, Homo sapien
cgagaagtacttatatgaattcacc

SEQ ID NO: 381247 - DNA, 25 bp, Homo sapien
cagttcaagtataggaaatacctcc

SEQ ID NO: 381248 - DNA, 25 bp, Homo sapien
gacccattggacagtttcccagaga

SEQ ID NO: 381249 - DNA, 25 bp, Homo sapien
caatgtgccacaatcctgagctggc

SEQ ID NO: 381250 - DNA, 25 bp, Homo sapien
cacacttgccagtagttaggctgcg

SEQ ID NO: 381251 - DNA, 25 bp, Homo sapien
tacgtgaatatacaggacccatttc

SEQ ID NO: 381252 - DNA, 25 bp, Homo sapien
tattgaataattgcctgtatttcag

SEQ ID NO: 381253 - DNA, 25 bp, Homo sapien
cttgatgactgaggaacagcccact

SEQ ID NO: 381254 - DNA, 25 bp, Homo sapien
taagtgtccactcatagttttgtca

SEQ ID NO: 381255 - DNA, 25 bp, Homo sapien
gtcatgactattgaataattgcctg

SEQ ID NO: 381256 - DNA, 25 bp, Homo sapien
cagctgagcctgtggtaaacttgac

SEQ ID NO: 381257 - DNA, 25 bp, Homo sapien
tgagcctgtggtaaacttgactgca

SEQ ID NO: 381258 - DNA, 25 bp, Homo sapien
gccagctgagcctgtggtaaacttg

SEQ ID NO: 381259 - DNA, 25 bp, Homo sapien
gctgagcctgtggtaaacttgactg

SEQ ID NO: 381260 - DNA, 25 bp, Homo sapien
caatctaaccaagtttccactttat

SEQ ID NO: 381261 - DNA, 25 bp, Homo sapien
tctaaccaagtttccactttatcca

SEQ ID NO: 381262 - DNA, 25 bp, Homo sapien
atcaatgaggtgcattgccaggata

SEQ ID NO: 381263 - DNA, 25 bp, Homo sapien
tgccaggataaattcctctgctgta

SEQ ID NO: 381264 - DNA, 25 bp, Homo sapien
tccatcttgatcaatgtcagaaaga

SEQ ID NO: 381265 - DNA, 25 bp, Homo sapien
ttttccatcttgatcaatgtcagaa

SEQ ID NO: 381266 - DNA, 25 bp, Homo sapien
aggtggaatgtattctggaggcagg

SEQ ID NO: 381267 - DNA, 25 bp, Homo sapien
tggcagtggttggccagacatagct

SEQ ID NO: 381268 - DNA, 25 bp, Homo sapien
acaggtggcagtggttggccagaca

SEQ ID NO: 381269 - DNA, 25 bp, Homo sapien
ggtggcagtggttggccagacatag

SEQ ID NO: 381270 - DNA, 25 bp, Homo sapien
tctacagatgttgagcttatgacag

SEQ ID NO: 381271 - DNA, 25 bp, Homo sapien
tataccactgccagatcgaactctt

SEQ ID NO: 381272 - DNA, 25 bp, Homo sapien
aaaactggttcctctggtagcctct

SEQ ID NO: 381273 - DNA, 25 bp, Homo sapien
ctggttcctctggtagcctctgatc

SEQ ID NO: 381274 - DNA, 25 bp, Homo sapien
actgctttagacagacttccttcac

SEQ ID NO: 381275 - DNA, 25 bp, Homo sapien
cttcccacattcctgtttggacttc

SEQ ID NO: 381276 - DNA, 25 bp, Homo sapien
acttcactgctttagacagacttcc

SEQ ID NO: 381277 - DNA, 25 bp, Homo sapien
tcactgctttagacagacttccttc

SEQ ID NO: 381278 - DNA, 25 bp, Homo sapien
tctccagttccaggttgccacgttc

SEQ ID NO: 381279 - DNA, 25 bp, Homo sapien
ttccaggagagcttgccttcgtttc

SEQ ID NO: 381280 - DNA, 25 bp, Homo sapien
gagagcttgccttcgtttctccagt

SEQ ID NO: 381281 - DNA, 25 bp, Homo sapien
agttctcccgcttcttatcttcaaa

SEQ ID NO: 381282 - DNA, 25 bp, Homo sapien
tccagttgtcttttgcgctcttgct

SEQ ID NO: 381283 - DNA, 25 bp, Homo sapien
tctctctgccgttctagctcccgct

SEQ ID NO: 381284 - DNA, 25 bp, Homo sapien
ctctgccgttctagctcccgctgct

SEQ ID NO: 381285 - DNA, 25 bp, Homo sapien
tgtcttttgcgctcttgctcctggc

SEQ ID NO: 381286 - DNA, 25 bp, Homo sapien
tctccgccatataaacctttatatt

SEQ ID NO: 381287 - DNA, 25 bp, Homo sapien
ctctccgccatataaacctttatat

SEQ ID NO: 381288 - DNA, 25 bp, Homo sapien
actctccgccatataaacctttata

SEQ ID NO: 381289 - DNA, 25 bp, Homo sapien
tagttcttgccttcgattccgttcc

SEQ ID NO: 381290 - DNA, 25 bp, Homo sapien
gcctttcaagttcccgttttgcagc

SEQ ID NO: 381291 - DNA, 25 bp, Homo sapien
ctttgctttcagtacaactatgtcc

SEQ ID NO: 381292 - DNA, 25 bp, Homo sapien
gttcccactcaagttgtcgttgcct

SEQ ID NO: 381293 - DNA, 25 bp, Homo sapien
tcttgcctttgggtggtcaatcgac

SEQ ID NO: 381294 - DNA, 25 bp, Homo sapien
gacatctgatatcttgaagtttccc

SEQ ID NO: 381295 - DNA, 25 bp, Homo sapien
ggcaattctcaactctctagatttg

SEQ ID NO: 381296 - DNA, 25 bp, Homo sapien
ctgtagatgggtgatttcggcaatt

SEQ ID NO: 381297 - DNA, 25 bp, Homo sapien
tacacttacatgacacagtagttcc

SEQ ID NO: 381298 - DNA, 25 bp, Homo sapien
caggcaaatatgatcatccacaggc

SEQ ID NO: 381299 - DNA, 25 bp, Homo sapien
tcactcagtaacatggacacatctc

SEQ ID NO: 381300 - DNA, 25 bp, Homo sapien
gaacctgaatatcaaccagtaggtg

SEQ ID NO: 381301 - DNA, 25 bp, Homo sapien
tgtgcaaactgttctgctgaacttg

SEQ ID NO: 381302 - DNA, 25 bp, Homo sapien
gtgcaaactgttctgctgaacttgt

SEQ ID NO: 381303 - DNA, 25 bp, Homo sapien
ggtgctgccgagctagttcttttgc

SEQ ID NO: 381304 - DNA, 25 bp, Homo sapien
aaatatcaatctcctgtagttttga

SEQ ID NO: 381305 - DNA, 25 bp, Homo sapien
gcttctaaggctcttttaagtgtaa

SEQ ID NO: 381306 - DNA, 25 bp, Homo sapien
cagttggtctcgtaggtgctgccga

SEQ ID NO: 381307 - DNA, 25 bp, Homo sapien
gaaaatacagatgcctcttcttcac

SEQ ID NO: 381308 - DNA, 25 bp, Homo sapien
tttgaaaatacagatgcctcttctt

SEQ ID NO: 381309 - DNA, 25 bp, Homo sapien
gatgcctcttcttcactgactacct

SEQ ID NO: 381310 - DNA, 25 bp, Homo sapien
aatacagatgcctcttcttcactga

SEQ ID NO: 381311 - DNA, 25 bp, Homo sapien
gcttattgtgtatttctcttagttc

SEQ ID NO: 381312 - DNA, 25 bp, Homo sapien
gttctttctgtttcagtcgttcagc

SEQ ID NO: 381313 - DNA, 25 bp, Homo sapien
tctgtttcagtcgttcagcctccat

SEQ ID NO: 381314 - DNA, 25 bp, Homo sapien
tttctgtttcagtcgttcagcctcc

SEQ ID NO: 381315 - DNA, 25 bp, Homo sapien
tctatgatctttcgttcttgttctt

SEQ ID NO: 381316 - DNA, 25 bp, Homo sapien
gaaagcaagggattgttttattgac

SEQ ID NO: 381317 - DNA, 25 bp, Homo sapien
cattgctccccaaacctgaagttga

SEQ ID NO: 381318 - DNA, 25 bp, Homo sapien
aataataaagctggtattaaactga

SEQ ID NO: 381319 - DNA, 25 bp, Homo sapien
tgttttattgacttcaactactttg

SEQ ID NO: 381320 - DNA, 25 bp, Homo sapien
cttggtctctgatgctcgtcctcct

SEQ ID NO: 381321 - DNA, 25 bp, Homo sapien
gcctggacagctggcttagctggtt

SEQ ID NO: 381322 - DNA, 25 bp, Homo sapien
gtctctgatgctcgtcctcctgctg

SEQ ID NO: 381323 - DNA, 25 bp, Homo sapien
gatggaaaagccgacccagcttgtc

SEQ ID NO: 381324 - DNA, 25 bp, Homo sapien
agcagttaggatatgacccaaagtc

SEQ ID NO: 381325 - DNA, 25 bp, Homo sapien
ccaaagtctgaatcagccaaggagt

SEQ ID NO: 381326 - DNA, 25 bp, Homo sapien
ccagtgtgttgagtacaatgtagca

SEQ ID NO: 381327 - DNA, 25 bp, Homo sapien
ccaaggagtcaacttgtttgggagg

SEQ ID NO: 381328 - DNA, 25 bp, Homo sapien
ggatagtgatttcatcatggcttct

SEQ ID NO: 381329 - DNA, 25 bp, Homo sapien
ggtacagtgcccggtaatacaccac

SEQ ID NO: 381330 - DNA, 25 bp, Homo sapien
tggattcaaaggggtacagtgcccg

SEQ ID NO: 381331 - DNA, 25 bp, Homo sapien
tggatagtgatttcatcatggcttc

SEQ ID NO: 381332 - DNA, 25 bp, Homo sapien
ctcttgacaaagctggatattacca

SEQ ID NO: 381333 - DNA, 25 bp, Homo sapien
tttaaacttgctcatttgacagagg

SEQ ID NO: 381334 - DNA, 25 bp, Homo sapien
tgcatttttctgatcacccaagaag

SEQ ID NO: 381335 - DNA, 25 bp, Homo sapien
caccctctgccaattgtttaaggct

SEQ ID NO: 381336 - DNA, 25 bp, Homo sapien
taagccatccctttactgatggaca

SEQ ID NO: 381337 - DNA, 25 bp, Homo sapien
gccccttctttactgcccagtggta

SEQ ID NO: 381338 - DNA, 25 bp, Homo sapien
accactgcagtgaacatccatgtac

SEQ ID NO: 381339 - DNA, 25 bp, Homo sapien
ccaaaatgcaattatgctgcacata

SEQ ID NO: 381340 - DNA, 25 bp, Homo sapien
ctgggattttctctgcatagtttgc

SEQ ID NO: 381341 - DNA, 25 bp, Homo sapien
ctgaagaggttactgccaaaggggc

SEQ ID NO: 381342 - DNA, 25 bp, Homo sapien
gggtctcacgcaaggccagtttggg

SEQ ID NO: 381343 - DNA, 25 bp, Homo sapien
ctggagcgggaacctcattttctgg

SEQ ID NO: 381344 - DNA, 25 bp, Homo sapien
ggattccttgccttcaatttgtttc

SEQ ID NO: 381345 - DNA, 25 bp, Homo sapien
cttcctcccgccctgagtaattatt

SEQ ID NO: 381346 - DNA, 25 bp, Homo sapien
tcccgccctgagtaattattctttc

SEQ ID NO: 381347 - DNA, 25 bp, Homo sapien
ccttctccagcaatacatctggatt

SEQ ID NO: 381348 - DNA, 25 bp, Homo sapien
gtttctcattcgtgctggtgggcca

SEQ ID NO: 381349 - DNA, 25 bp, Homo sapien
ccgtggctggagtaaaggcggacct

SEQ ID NO: 381350 - DNA, 25 bp, Homo sapien
gcatcccagttatccgtttctggtt

SEQ ID NO: 381351 - DNA, 25 bp, Homo sapien
taactggccggcacttggaacggtg

SEQ ID NO: 381352 - DNA, 25 bp, Homo sapien
taacaaggcttgcttcaaaatgaca

SEQ ID NO: 381353 - DNA, 25 bp, Homo sapien
agtaagatcttacccactggtcaag

SEQ ID NO: 381354 - DNA, 25 bp, Homo sapien
gatttctggctcctgcactggattc

SEQ ID NO: 381355 - DNA, 25 bp, Homo sapien
tcccagcagtttctgtctgacaggc

SEQ ID NO: 381356 - DNA, 25 bp, Homo sapien
cttggtgaacatgaactcagctggg

SEQ ID NO: 381357 - DNA, 25 bp, Homo sapien
aggcctgccctaggtctcagctggg

SEQ ID NO: 381358 - DNA, 25 bp, Homo sapien
agatggatctgcctagaccctgtgt

SEQ ID NO: 381359 - DNA, 25 bp, Homo sapien
gatgggcacttgctgtttggcatga

SEQ ID NO: 381360 - DNA, 25 bp, Homo sapien
agtctctcccacgtgctcgcctctt

SEQ ID NO: 381361 - DNA, 25 bp, Homo sapien
ttaaggtgggcccttattctcaatc

SEQ ID NO: 381362 - DNA, 25 bp, Homo sapien
tttccttcggctcccataggcattg

SEQ ID NO: 381363 - DNA, 25 bp, Homo sapien
taggcattgtgactccaacctcttc

SEQ ID NO: 381364 - DNA, 25 bp, Homo sapien
actcttccctttaactgcgcattca

SEQ ID NO: 381365 - DNA, 25 bp, Homo sapien
tcttccctttaactgcgcattcatt

SEQ ID NO: 381366 - DNA, 25 bp, Homo sapien
ctcttccctttaactgcgcattcat

SEQ ID NO: 381367 - DNA, 25 bp, Homo sapien
tctttgccctgaccacggtacttag

SEQ ID NO: 381368 - DNA, 25 bp, Homo sapien
tttacgcccctgcagtgtggtttca

SEQ ID NO: 381369 - DNA, 25 bp, Homo sapien
aagctctacctgtcacaatgaatgg

SEQ ID NO: 381370 - DNA, 25 bp, Homo sapien
tttgtcggatccctcattcgcctgc

SEQ ID NO: 381371 - DNA, 25 bp, Homo sapien
ggcctttcaactgtgccctcactgg

SEQ ID NO: 381372 - DNA, 25 bp, Homo sapien
gatttctctacgtatggaccccagg

SEQ ID NO: 381373 - DNA, 25 bp, Homo sapien
gaaatcttccccgtgtctgctttgt

SEQ ID NO: 381374 - DNA, 25 bp, Homo sapien
tggatttcgaacacccctaagattg

SEQ ID NO: 381375 - DNA, 25 bp, Homo sapien
ggactttgacagctagggcttcgga

SEQ ID NO: 381376 - DNA, 25 bp, Homo sapien
caaaagcctcgaggtggaacactgc

SEQ ID NO: 381377 - DNA, 25 bp, Homo sapien
gcatcagcgtaaatttcacagaggg

SEQ ID NO: 381378 - DNA, 25 bp, Homo sapien
tgcactgccccatgagattacagat

SEQ ID NO: 381379 - DNA, 25 bp, Homo sapien
tatgttgcgctttgttatcaattag

SEQ ID NO: 381380 - DNA, 25 bp, Homo sapien
tagggcagacgtgagcatggcacct

SEQ ID NO: 381381 - DNA, 25 bp, Homo sapien
ttgtgtggaataacataaaggacct

SEQ ID NO: 381382 - DNA, 25 bp, Homo sapien
taaaggacctctcgttatgttgcgc

SEQ ID NO: 381383 - DNA, 25 bp, Homo sapien
tttggctctccaaggatatagggct

SEQ ID NO: 381384 - DNA, 25 bp, Homo sapien
tgaacttctccaaaccaccacatgt

SEQ ID NO: 381385 - DNA, 25 bp, Homo sapien
gctgttccaggacggtgatgacatc

SEQ ID NO: 381386 - DNA, 25 bp, Homo sapien
gtagacttccttatgggccctgaaa

SEQ ID NO: 381387 - DNA, 25 bp, Homo sapien
tactcgctttagactagcaggactc

SEQ ID NO: 381388 - DNA, 25 bp, Homo sapien
gctggagaggctactcgctttagac

SEQ ID NO: 381389 - DNA, 25 bp, Homo sapien
tctcccgaaacgaccggcttggctg

SEQ ID NO: 381390 - DNA, 25 bp, Homo sapien
tagactagcaggactctctgaagaa

SEQ ID NO: 381391 - DNA, 25 bp, Homo sapien
gactatgttaggtgaagcaatgacc

SEQ ID NO: 381392 - DNA, 25 bp, Homo sapien
tcttagtgaactgaatgggtctctt

SEQ ID NO: 381393 - DNA, 25 bp, Homo sapien
tagtttagctatagagatgctcgga

SEQ ID NO: 381394 - DNA, 25 bp, Homo sapien
gatgctcggaaaactcgattcttag

SEQ ID NO: 381395 - DNA, 25 bp, Homo sapien
tttggtggctttaatagggtcattc

SEQ ID NO: 381396 - DNA, 25 bp, Homo sapien
tgtctttagccctgaggcgctggta

SEQ ID NO: 381397 - DNA, 25 bp, Homo sapien
caggtcattcaaacgtcccagggaa

SEQ ID NO: 381398 - DNA, 25 bp, Homo sapien
catacctccacagtgaaaattggaa

SEQ ID NO: 381399 - DNA, 25 bp, Homo sapien
cagcaattgctggtggagagcactg

SEQ ID NO: 381400 - DNA, 25 bp, Homo sapien
ccagcagcaattgctggtggagagc

SEQ ID NO: 381401 - DNA, 25 bp, Homo sapien
ccgaggccagcagcaattgctggtg

SEQ ID NO: 381402 - DNA, 25 bp, Homo sapien
gccgaggccagcagcaattgctggt

SEQ ID NO: 381403 - DNA, 25 bp, Homo sapien
tcggttgattatcagagcctctgca

SEQ ID NO: 381404 - DNA, 25 bp, Homo sapien
taactcttgtgctcacgtgggcagc

SEQ ID NO: 381405 - DNA, 25 bp, Homo sapien
tgtcgagcctcgtgttgagtaagag

SEQ ID NO: 381406 - DNA, 25 bp, Homo sapien
ctctgcaggaggtactaatgaaaac

SEQ ID NO: 381407 - DNA, 25 bp, Homo sapien
gaagttaggacaagatccattcaag

SEQ ID NO: 381408 - DNA, 25 bp, Homo sapien
taggacaagatccattcaagagaaa

SEQ ID NO: 381409 - DNA, 25 bp, Homo sapien
ggacaagatccattcaagagaaagg

SEQ ID NO: 381410 - DNA, 25 bp, Homo sapien
gcaaaagcaagtttacgaataagga

SEQ ID NO: 381411 - DNA, 25 bp, Homo sapien
ggagaaatattgagatacggagaga

SEQ ID NO: 381412 - DNA, 25 bp, Homo sapien
gcttgattgtttaaagaaatcccag

SEQ ID NO: 381413 - DNA, 25 bp, Homo sapien
gatacggagagagcttgattgttta

SEQ ID NO: 381414 - DNA, 25 bp, Homo sapien
ttgattgtttaaagaaatcccagac

SEQ ID NO: 381415 - DNA, 25 bp, Homo sapien
aactctcgtaagtgtacatggcaat

SEQ ID NO: 381416 - DNA, 25 bp, Homo sapien
tcgtaagtgtacatggcaataaatt

SEQ ID NO: 381417 - DNA, 25 bp, Homo sapien
ctctcgtaagtgtacatggcaataa

SEQ ID NO: 381418 - DNA, 25 bp, Homo sapien
tgtccaccagtcaccatctttcttg

SEQ ID NO: 381419 - DNA, 25 bp, Homo sapien
ttactgcgcagtgccaaatgacaag

SEQ ID NO: 381420 - DNA, 25 bp, Homo sapien
agagaatcaccgcacagaaagggag

SEQ ID NO: 381421 - DNA, 25 bp, Homo sapien
caaagttccgctgtcaaacatcgtg

SEQ ID NO: 381422 - DNA, 25 bp, Homo sapien
caggtcacactggatttactgtcac

SEQ ID NO: 381423 - DNA, 25 bp, Homo sapien
ctaaactccctgttttcccagcagt

SEQ ID NO: 381424 - DNA, 25 bp, Homo sapien
cctaaactccctgttttcccagcag

SEQ ID NO: 381425 - DNA, 25 bp, Homo sapien
ccctgttttcccagcagttccagag

SEQ ID NO: 381426 - DNA, 25 bp, Homo sapien
ctccctgttttcccagcagttccag

SEQ ID NO: 381427 - DNA, 25 bp, Homo sapien
ttttccctagccatgtaagcccagt

SEQ ID NO: 381428 - DNA, 25 bp, Homo sapien
gggacctggcatacgcagccagcaa

SEQ ID NO: 381429 - DNA, 25 bp, Homo sapien
atcctagactacgtgaaatttccct

SEQ ID NO: 381430 - DNA, 25 bp, Homo sapien
agcaaatccgtctcttggcaattca

SEQ ID NO: 381431 - DNA, 25 bp, Homo sapien
gatagaagcacctggcggtcatggt

SEQ ID NO: 381432 - DNA, 25 bp, Homo sapien
gtcggccaccaggatagaagcacct

SEQ ID NO: 381433 - DNA, 25 bp, Homo sapien
ctggccctgcctgatgctttgcaga

SEQ ID NO: 381434 - DNA, 25 bp, Homo sapien
tctgcatgctatcaggggtcggcca

SEQ ID NO: 381435 - DNA, 25 bp, Homo sapien
tcctgaatgtgaaaagtcccatggg

SEQ ID NO: 381436 - DNA, 25 bp, Homo sapien
ttctactcactccagggaacaagta

SEQ ID NO: 381437 - DNA, 25 bp, Homo sapien
catgggaaaaactccagcggtacca

SEQ ID NO: 381438 - DNA, 25 bp, Homo sapien
caaaaaggtctcatgttctgacgag

SEQ ID NO: 381439 - DNA, 25 bp, Homo sapien
gagtgatccctgaatatcaggtgca

SEQ ID NO: 381440 - DNA, 25 bp, Homo sapien
atatcaggtgcaaatcatggcaggg

SEQ ID NO: 381441 - DNA, 25 bp, Homo sapien
ctgaatatcaggtgcaaatcatggc

SEQ ID NO: 381442 - DNA, 25 bp, Homo sapien
attttgagagtgatccctgaatatc

SEQ ID NO: 381443 - DNA, 25 bp, Homo sapien
tcaaaaccaatgtattgagctggat

SEQ ID NO: 381444 - DNA, 25 bp, Homo sapien
ccttgagccctcagtgggctgcaga

SEQ ID NO: 381445 - DNA, 25 bp, Homo sapien
tgagctggatttctacccaacgagt

SEQ ID NO: 381446 - DNA, 25 bp, Homo sapien
gagtaaggctccctgaatcgcccgt

SEQ ID NO: 381447 - DNA, 25 bp, Homo sapien
gttcttttttcggatcaaaatcagc

SEQ ID NO: 381448 - DNA, 25 bp, Homo sapien
cttttttcggatcaaaatcagctga

SEQ ID NO: 381449 - DNA, 25 bp, Homo sapien
tcggatcaaaatcagctgaccaggg

SEQ ID NO: 381450 - DNA, 25 bp, Homo sapien
tgaccaggggcgagagtgagctgct

SEQ ID NO: 381451 - DNA, 25 bp, Homo sapien
aatactaaagagtggtgccggcacg

SEQ ID NO: 381452 - DNA, 25 bp, Homo sapien
caactctaagcagggagtgggaccc

SEQ ID NO: 381453 - DNA, 25 bp, Homo sapien
tagtccactgcatggcaaaggtttc

SEQ ID NO: 381454 - DNA, 25 bp, Homo sapien
gagacgccattgctcagcggtaaga

SEQ ID NO: 381455 - DNA, 25 bp, Homo sapien
tggatccacgctgagagtcactctg

SEQ ID NO: 381456 - DNA, 25 bp, Homo sapien
tgagagtcactctggtgacagcgcc

SEQ ID NO: 381457 - DNA, 25 bp, Homo sapien
cctcatttgtggatccacgctgaga

SEQ ID NO: 381458 - DNA, 25 bp, Homo sapien
tcactctggtgacagcgccaggagc

SEQ ID NO: 381459 - DNA, 25 bp, Homo sapien
agatgaaaagttgagtgacagcccc

SEQ ID NO: 381460 - DNA, 25 bp, Homo sapien
agatgactgtccctataaacccggg

SEQ ID NO: 381461 - DNA, 25 bp, Homo sapien
cccgtaggcccatgtgatgactaaa

SEQ ID NO: 381462 - DNA, 25 bp, Homo sapien
tctgatcgaaacagccacctctggg

SEQ ID NO: 381463 - DNA, 25 bp, Homo sapien
ttatgtaaagcttacatataactga

SEQ ID NO: 381464 - DNA, 25 bp, Homo sapien
cagctcactttataacagagcactt

SEQ ID NO: 381465 - DNA, 25 bp, Homo sapien
tttaaaggcgcatcttttataatac

SEQ ID NO: 381466 - DNA, 25 bp, Homo sapien
taaaggcgcatcttttataatacag

SEQ ID NO: 381467 - DNA, 25 bp, Homo sapien
cgtcccagggcttagaagctttaca

SEQ ID NO: 381468 - DNA, 25 bp, Homo sapien
tgggaaccagcctatctggcgcttt

SEQ ID NO: 381469 - DNA, 25 bp, Homo sapien
gaagctttacataattagctgggaa

SEQ ID NO: 381470 - DNA, 25 bp, Homo sapien
ggagtgattttgctcgtcccagggc

SEQ ID NO: 381471 - DNA, 25 bp, Homo sapien
ccatcttccagttagagatgcgaaa

SEQ ID NO: 381472 - DNA, 25 bp, Homo sapien
tccagttagagatgcgaaactcctt

SEQ ID NO: 381473 - DNA, 25 bp, Homo sapien
aaaacaacctaagatatttaatgag

SEQ ID NO: 381474 - DNA, 25 bp, Homo sapien
tggaaaaactcaagtggcatgcaga

SEQ ID NO: 381475 - DNA, 25 bp, Homo sapien
ctactgagaccccagccgtttattt

SEQ ID NO: 381476 - DNA, 25 bp, Homo sapien
gaaaatgtggccttaatgccacagc

SEQ ID NO: 381477 - DNA, 25 bp, Homo sapien
gaagagcattccaacaagggttctg

SEQ ID NO: 381478 - DNA, 25 bp, Homo sapien
agctccatctcatgacctactgaga

SEQ ID NO: 381479 - DNA, 25 bp, Homo sapien
gaaagtgagtacaacatcctgcctg

SEQ ID NO: 381480 - DNA, 25 bp, Homo sapien
caactaatttcagcgggcctgagga

SEQ ID NO: 381481 - DNA, 25 bp, Homo sapien
cagctcaagcaaagaggcccagtgg

SEQ ID NO: 381482 - DNA, 25 bp, Homo sapien
ggactgcggctcatcacaaagtttg

SEQ ID NO: 381483 - DNA, 25 bp, Homo sapien
ttttctctcaagcttacaggaggta

SEQ ID NO: 381484 - DNA, 25 bp, Homo sapien
cattttctctcaagcttacaggagg

SEQ ID NO: 381485 - DNA, 25 bp, Homo sapien
tttctctcaagcttacaggaggtaa

SEQ ID NO: 381486 - DNA, 25 bp, Homo sapien
attttctctcaagcttacaggaggt

SEQ ID NO: 381487 - DNA, 25 bp, Homo sapien
ttcaaaagatttttctgctgctgta

SEQ ID NO: 381488 - DNA, 25 bp, Homo sapien
ctaaaatcagtgtttcaaaagattt

SEQ ID NO: 381489 - DNA, 25 bp, Homo sapien
gtttcaaaagatttttctgctgctg

SEQ ID NO: 381490 - DNA, 25 bp, Homo sapien
caaaagatttttctgctgctgtatc

SEQ ID NO: 381491 - DNA, 25 bp, Homo sapien
gtggaaggtaatcatcatttgacct

SEQ ID NO: 381492 - DNA, 25 bp, Homo sapien
atttgacctccaagaattccaaatc

SEQ ID NO: 381493 - DNA, 25 bp, Homo sapien
tggaaggtaatcatcatttgacctc

SEQ ID NO: 381494 - DNA, 25 bp, Homo sapien
ttgacctccaagaattccaaatctt

SEQ ID NO: 381495 - DNA, 25 bp, Homo sapien
tcattctgcgcggtgtagtcgtaca

SEQ ID NO: 381496 - DNA, 25 bp, Homo sapien
tcacataattggatgggaagagccc

SEQ ID NO: 381497 - DNA, 25 bp, Homo sapien
gatgatctggcccttgttgaaggcc

SEQ ID NO: 381498 - DNA, 25 bp, Homo sapien
gagccccacttgtccattgacttct

SEQ ID NO: 381499 - DNA, 25 bp, Homo sapien
tgagggggggatggacaacatatga

SEQ ID NO: 381500 - DNA, 25 bp, Homo sapien
gagggggggatggacaacatatgat

SEQ ID NO: 381501 - DNA, 25 bp, Homo sapien
ctgagggggggatggacaacatatg

SEQ ID NO: 381502 - DNA, 25 bp, Homo sapien
tgggatagtgggtctctttgaggac

SEQ ID NO: 381503 - DNA, 25 bp, Homo sapien
gtgatatgggatagtgggtctcttt

SEQ ID NO: 381504 - DNA, 25 bp, Homo sapien
atgggatagtgggtctctttgagga

SEQ ID NO: 381505 - DNA, 25 bp, Homo sapien
ggcagtgatatgggatagtgggtct

SEQ ID NO: 381506 - DNA, 25 bp, Homo sapien
aaggcagtaggtgatcatgctggaa

SEQ ID NO: 381507 - DNA, 25 bp, Homo sapien
taaaatgaggtaaactgctctgcag

SEQ ID NO: 381508 - DNA, 25 bp, Homo sapien
gcagtgagttcttctactcagaagg

SEQ ID NO: 381509 - DNA, 25 bp, Homo sapien
gcgatcacatgcaactaaggtaaaa

SEQ ID NO: 381510 - DNA, 25 bp, Homo sapien
ttgagtaactaggaaagccacaaaa

SEQ ID NO: 381511 - DNA, 25 bp, Homo sapien
tttgagtaactaggaaagccacaaa

SEQ ID NO: 381512 - DNA, 25 bp, Homo sapien
aatttgagtaactaggaaagccaca

SEQ ID NO: 381513 - DNA, 25 bp, Homo sapien
caatttgagtaactaggaaagccac

SEQ ID NO: 381514 - DNA, 25 bp, Homo sapien
tattacagttgttaaagccgcaggt

SEQ ID NO: 381515 - DNA, 25 bp, Homo sapien
caactgaacgaggaggagaggtcct

SEQ ID NO: 381516 - DNA, 25 bp, Homo sapien
caaacagggcttcagctacagcata

SEQ ID NO: 381517 - DNA, 25 bp, Homo sapien
catgcagcattccttgatagtgggt

SEQ ID NO: 381518 - DNA, 25 bp, Homo sapien
gcatttttgggaccattggcatcca

SEQ ID NO: 381519 - DNA, 25 bp, Homo sapien
aaagaaggagctatttttccttgca

SEQ ID NO: 381520 - DNA, 25 bp, Homo sapien
gaaggagctatttttccttgcattt

SEQ ID NO: 381521 - DNA, 25 bp, Homo sapien
gaccccgaataccagacatttcaaa

SEQ ID NO: 381522 - DNA, 25 bp, Homo sapien
ctcccatggtaaccccaccagtgag

SEQ ID NO: 381523 - DNA, 25 bp, Homo sapien
tctttccaaagatgcagccaccagt

SEQ ID NO: 381524 - DNA, 25 bp, Homo sapien
gctccaaactcccatggtaacccca

SEQ ID NO: 381525 - DNA, 25 bp, Homo sapien
tgaggaaatcacatgaggcaagagg

SEQ ID NO: 381526 - DNA, 25 bp, Homo sapien
gaaggcacttgattggattccatga

SEQ ID NO: 381527 - DNA, 25 bp, Homo sapien
aatgcacacaacctacctgctgttt

SEQ ID NO: 381528 - DNA, 25 bp, Homo sapien
ttgattggattccatgatgctcact

SEQ ID NO: 381529 - DNA, 25 bp, Homo sapien
gcacacaacctacctgctgttttgg

SEQ ID NO: 381530 - DNA, 25 bp, Homo sapien
tgagatagctcaaagtttttaggga

SEQ ID NO: 381531 - DNA, 25 bp, Homo sapien
cttgcaatgagatagctcaaagttt

SEQ ID NO: 381532 - DNA, 25 bp, Homo sapien
gcaatgagatagctcaaagttttta

SEQ ID NO: 381533 - DNA, 25 bp, Homo sapien
atgagatagctcaaagtttttaggg

SEQ ID NO: 381534 - DNA, 25 bp, Homo sapien
catcaaccaagagtctgctgagtag

SEQ ID NO: 381535 - DNA, 25 bp, Homo sapien
ctgagtaggctctggtctttggtcc

SEQ ID NO: 381536 - DNA, 25 bp, Homo sapien
cgtgtgaaacacaggcagcttgtcc

SEQ ID NO: 381537 - DNA, 25 bp, Homo sapien
tcgtgcacggattggtagggcaaat

SEQ ID NO: 381538 - DNA, 25 bp, Homo sapien
tgccaacacagtccagacgtgacat

SEQ ID NO: 381539 - DNA, 25 bp, Homo sapien
cagtccagacgtgacatttaaaagc

SEQ ID NO: 381540 - DNA, 25 bp, Homo sapien
tccagacgtgacatttaaaagccct

SEQ ID NO: 381541 - DNA, 25 bp, Homo sapien
ttattgtggagcgctgcatgggcct

SEQ ID NO: 381542 - DNA, 25 bp, Homo sapien
atgagaaataaaggacccagtgact

SEQ ID NO: 381543 - DNA, 25 bp, Homo sapien
ggctgaacgttccattctttgctgg

SEQ ID NO: 381544 - DNA, 25 bp, Homo sapien
taaaaaatccagcagccggcatgtc

SEQ ID NO: 381545 - DNA, 25 bp, Homo sapien
ccacagaatgccgtgatgagaaata

SEQ ID NO: 381546 - DNA, 25 bp, Homo sapien
ttcaacagggccatttggaaagcca

SEQ ID NO: 381547 - DNA, 25 bp, Homo sapien
tgacgtgggcccacgatgccacagt

SEQ ID NO: 381548 - DNA, 25 bp, Homo sapien
caccagatgtgggttctgactctct

SEQ ID NO: 381549 - DNA, 25 bp, Homo sapien
tctctgaggagggactcccatgatg

SEQ ID NO: 381550 - DNA, 25 bp, Homo sapien
gctgaatcccctttacttgttcttc

SEQ ID NO: 381551 - DNA, 25 bp, Homo sapien
cattcacatagttctcctcggtgac

SEQ ID NO: 381552 - DNA, 25 bp, Homo sapien
cgtggatgtatccttgtcgctttct

SEQ ID NO: 381553 - DNA, 25 bp, Homo sapien
tctcctcggtgacaatgagctcgtg

SEQ ID NO: 381554 - DNA, 25 bp, Homo sapien
gggtcaacatatccaagagatgtaa

SEQ ID NO: 381555 - DNA, 25 bp, Homo sapien
tcaggtcaggggcttttgtgggggc

SEQ ID NO: 381556 - DNA, 25 bp, Homo sapien
actcaggtcaggggcttttgtgggg

SEQ ID NO: 381557 - DNA, 25 bp, Homo sapien
cgccgatccgctgagagcagggaaa

SEQ ID NO: 381558 - DNA, 25 bp, Homo sapien
gtgtctgtaccttggctgagaggcc

SEQ ID NO: 381559 - DNA, 25 bp, Homo sapien
gaggtgaacgcctgctttcctgcag

SEQ ID NO: 381560 - DNA, 25 bp, Homo sapien
aaagggctcaggtgtctgtaccttg

SEQ ID NO: 381561 - DNA, 25 bp, Homo sapien
tagcaacctctttttctgtcagcag

SEQ ID NO: 381562 - DNA, 25 bp, Homo sapien
aatcatagcaacctctttttctgtc

SEQ ID NO: 381563 - DNA, 25 bp, Homo sapien
tacacataatcagctccttccagtt

SEQ ID NO: 381564 - DNA, 25 bp, Homo sapien
tgatattacacataatcagctcctt

SEQ ID NO: 381565 - DNA, 25 bp, Homo sapien
tctgccatcatttctgacagctgtc

SEQ ID NO: 381566 - DNA, 25 bp, Homo sapien
gacagctgtcctgagggtcctgctc

SEQ ID NO: 381567 - DNA, 25 bp, Homo sapien
cagctgtcctgagggtcctgctcca

SEQ ID NO: 381568 - DNA, 25 bp, Homo sapien
cgcacccggcccttctgccatcatt

SEQ ID NO: 381569 - DNA, 25 bp, Homo sapien
agacgcggctgccctgctcccgcca

SEQ ID NO: 381570 - DNA, 25 bp, Homo sapien
cccagacgcggctgccctgctcccg

SEQ ID NO: 381571 - DNA, 25 bp, Homo sapien
gacgcggctgccctgctcccgccat

SEQ ID NO: 381572 - DNA, 25 bp, Homo sapien
cttcccagacgcggctgccctgctc

SEQ ID NO: 381573 - DNA, 25 bp, Homo sapien
caagctgctctgggcacctgcccat

SEQ ID NO: 381574 - DNA, 25 bp, Homo sapien
cgccacgactgcctccaagctgctc

SEQ ID NO: 381575 - DNA, 25 bp, Homo sapien
acgactgcctccaagctgctctggg

SEQ ID NO: 381576 - DNA, 25 bp, Homo sapien
ctcccgccacgactgcctccaagct

SEQ ID NO: 381577 - DNA, 25 bp, Homo sapien
taagagtactctgcttgcggtgagc

SEQ ID NO: 381578 - DNA, 25 bp, Homo sapien
agagtactctgcttgcggtgagctg

SEQ ID NO: 381579 - DNA, 25 bp, Homo sapien
gccctaagagtactctgcttgcggt

SEQ ID NO: 381580 - DNA, 25 bp, Homo sapien
ccagggatcatgtgactcggctgct

SEQ ID NO: 381581 - DNA, 25 bp, Homo sapien
gcacggaaacacgggaggtgagccc

SEQ ID NO: 381582 - DNA, 25 bp, Homo sapien
catcttcttgcggactctcagcgct

SEQ ID NO: 381583 - DNA, 25 bp, Homo sapien
gggcagccccgttgagctggcggct

SEQ ID NO: 381584 - DNA, 25 bp, Homo sapien
tgcatgtgcggcagctgtgcgctca

SEQ ID NO: 381585 - DNA, 25 bp, Homo sapien
gcagaagcggatgtagggctgcatg

SEQ ID NO: 381586 - DNA, 25 bp, Homo sapien
gctgcccaaagatcgccactctggg

SEQ ID NO: 381587 - DNA, 25 bp, Homo sapien
cccaaagatcgccactctggggccc

SEQ ID NO: 381588 - DNA, 25 bp, Homo sapien
agctgcccaaagatcgccactctgg

SEQ ID NO: 381589 - DNA, 25 bp, Homo sapien
tgcccaaagatcgccactctggggc

SEQ ID NO: 381590 - DNA, 25 bp, Homo sapien
tgctacctccaaggaagaggtcctg

SEQ ID NO: 381591 - DNA, 25 bp, Homo sapien
aaggcgggagcacatcaagcagaac

SEQ ID NO: 381592 - DNA, 25 bp, Homo sapien
aacatcccctggtggactcccaact

SEQ ID NO: 381593 - DNA, 25 bp, Homo sapien
gactcccacaggctgtctaaggcgg

SEQ ID NO: 381594 - DNA, 25 bp, Homo sapien
ctgataactgtctccagggaccggg

SEQ ID NO: 381595 - DNA, 25 bp, Homo sapien
agctggcaacgacgtgccacattcc

SEQ ID NO: 381596 - DNA, 25 bp, Homo sapien
tgtctccagggaccgggacctgctc

SEQ ID NO: 381597 - DNA, 25 bp, Homo sapien
tcgcagctggcaacgacgtgccaca

SEQ ID NO: 381598 - DNA, 25 bp, Homo sapien
ttagaaacgggcagctgcattgact

SEQ ID NO: 381599 - DNA, 25 bp, Homo sapien
tttaaatgtacttaagaaacttgca

SEQ ID NO: 381600 - DNA, 25 bp, Homo sapien
aatccaaagttagtgacatcaatac

SEQ ID NO: 381601 - DNA, 25 bp, Homo sapien
tcaatactaatgtcagtgaggactc

SEQ ID NO: 381602 - DNA, 25 bp, Homo sapien
acatcaatactaatgtcagtgagga

SEQ ID NO: 381603 - DNA, 25 bp, Homo sapien
agtgggtatcttgttacccgttgca

SEQ ID NO: 381604 - DNA, 25 bp, Homo sapien
tacaccgaggatccattgccaatct

SEQ ID NO: 381605 - DNA, 25 bp, Homo sapien
taggcttcagtataaaactagagag

SEQ ID NO: 381606 - DNA, 25 bp, Homo sapien
gagtggcatccctttacaccgagga

SEQ ID NO: 381607 - DNA, 25 bp, Homo sapien
cattgcgggaagcagtgaatggtcc

SEQ ID NO: 381608 - DNA, 25 bp, Homo sapien
caatcacgtagcagatgacggccac

SEQ ID NO: 381609 - DNA, 25 bp, Homo sapien
atcctttcatggacggcgcccactt

SEQ ID NO: 381610 - DNA, 25 bp, Homo sapien
acggcgcccacttgagcaatcgcag

SEQ ID NO: 381611 - DNA, 25 bp, Homo sapien
cgtgcttcaagtggctgtggtccgg

SEQ ID NO: 381612 - DNA, 25 bp, Homo sapien
ccagggcgtgcttcaagtggctgtg

SEQ ID NO: 381613 - DNA, 25 bp, Homo sapien
gcaccccttcgttcacctgggaaca

SEQ ID NO: 381614 - DNA, 25 bp, Homo sapien
gatccactccagccggtcagagttc

SEQ ID NO: 381615 - DNA, 25 bp, Homo sapien
cagtcatggtgactccctcaggtgg

SEQ ID NO: 381616 - DNA, 25 bp, Homo sapien
cctcaggtggtgatggcctttgcag

SEQ ID NO: 381617 - DNA, 25 bp, Homo sapien
acggggctgcttccacacctttgct

SEQ ID NO: 381618 - DNA, 25 bp, Homo sapien
cacaaaatcccaaaatgggagccca

SEQ ID NO: 381619 - DNA, 25 bp, Homo sapien
cacggggctgcttccacacctttgc

SEQ ID NO: 381620 - DNA, 25 bp, Homo sapien
caaaatcccaaaatgggagcccaca

SEQ ID NO: 381621 - DNA, 25 bp, Homo sapien
cagagggcactgaggtggagatgat

SEQ ID NO: 381622 - DNA, 25 bp, Homo sapien
ggtggagatgatcccacagaggccc

SEQ ID NO: 381623 - DNA, 25 bp, Homo sapien
gtggagatgatcccacagaggcccc

SEQ ID NO: 381624 - DNA, 25 bp, Homo sapien
ggcactgaggtggagatgatcccac

SEQ ID NO: 381625 - DNA, 25 bp, Homo sapien
caggaagggaacagctccctccctc

SEQ ID NO: 381626 - DNA, 25 bp, Homo sapien
tgggcgctgaaacgcggctctaaca

SEQ ID NO: 381627 - DNA, 25 bp, Homo sapien
tgaaacgcggctctaacacctctcg

SEQ ID NO: 381628 - DNA, 25 bp, Homo sapien
gacccttagagacacggtgggcgct

SEQ ID NO: 381629 - DNA, 25 bp, Homo sapien
gaccccaaaggcttcgtgatctgag

SEQ ID NO: 381630 - DNA, 25 bp, Homo sapien
tgaaaaggaagccatacagctcctt

SEQ ID NO: 381631 - DNA, 25 bp, Homo sapien
gctgaagactttgtcggtgccagaa

SEQ ID NO: 381632 - DNA, 25 bp, Homo sapien
tgtgcagaaatttgcgcggccccaa

SEQ ID NO: 381633 - DNA, 25 bp, Homo sapien
gctttctgctcggagagtatagacg

SEQ ID NO: 381634 - DNA, 25 bp, Homo sapien
tactagaacctcatttaggaaaata

SEQ ID NO: 381635 - DNA, 25 bp, Homo sapien
tatagacgcggtcaatgtgggagat

SEQ ID NO: 381636 - DNA, 25 bp, Homo sapien
agatgggctcgtctccagaagggtc

SEQ ID NO: 381637 - DNA, 25 bp, Homo sapien
caggtacgctttctcgcgcttcttt

SEQ ID NO: 381638 - DNA, 25 bp, Homo sapien
ccaggtacgctttctcgcgcttctt

SEQ ID NO: 381639 - DNA, 25 bp, Homo sapien
tctcagtctctatgtagagttcaga

SEQ ID NO: 381640 - DNA, 25 bp, Homo sapien
tctctatgtagagttcagaagcagc

SEQ ID NO: 381641 - DNA, 25 bp, Homo sapien
gtttcaactcgatgccttcaaccac

SEQ ID NO: 381642 - DNA, 25 bp, Homo sapien
tgaccgacagggtttcaactcgatg

SEQ ID NO: 381643 - DNA, 25 bp, Homo sapien
catgtgaccgacagggtttcaactc

SEQ ID NO: 381644 - DNA, 25 bp, Homo sapien
ttcaaccacgttcaccatcaacctt

SEQ ID NO: 381645 - DNA, 25 bp, Homo sapien
ggtcacctcacagtacgggttgctc

SEQ ID NO: 381646 - DNA, 25 bp, Homo sapien
gcactgggaacccatggtcacctca

SEQ ID NO: 381647 - DNA, 25 bp, Homo sapien
cctggatcgtcttggtgatgtggca

SEQ ID NO: 381648 - DNA, 25 bp, Homo sapien
ggtccctctcgaacacagtgatgca

SEQ ID NO: 381649 - DNA, 25 bp, Homo sapien
agcggaccacaatctctcccgtggg

SEQ ID NO: 381650 - DNA, 25 bp, Homo sapien
ggtctttcttgatgtccgccacacg

SEQ ID NO: 381651 - DNA, 25 bp, Homo sapien
gacacttcgtaactggacctttgga

SEQ ID NO: 381652 - DNA, 25 bp, Homo sapien
acaactgcaggtccaagcggaccac

SEQ ID NO: 381653 - DNA, 25 bp, Homo sapien
tatgggatttcagcgaccctagaag

SEQ ID NO: 381654 - DNA, 25 bp, Homo sapien
cataatgagacctgtagtgaggaca

SEQ ID NO: 381655 - DNA, 25 bp, Homo sapien
aaggactgggcattgtaggccaaga

SEQ ID NO: 381656 - DNA, 25 bp, Homo sapien
tttatagtaaccagacccatccctc

SEQ ID NO: 381657 - DNA, 25 bp, Homo sapien
taagccagggcctgatcagaccgtc

SEQ ID NO: 381658 - DNA, 25 bp, Homo sapien
tctcaccgagtgatcagctctaggc

SEQ ID NO: 381659 - DNA, 25 bp, Homo sapien
gtgatcagctctaggcagcatttcc

SEQ ID NO: 381660 - DNA, 25 bp, Homo sapien
tgatcagaccgtctcaccgagtgat

SEQ ID NO: 381661 - DNA, 25 bp, Homo sapien
gaaggaacggctataacggtgcaca

SEQ ID NO: 381662 - DNA, 25 bp, Homo sapien
gaggtactctgccacaacgctgatg

SEQ ID NO: 381663 - DNA, 25 bp, Homo sapien
tatgaaatatcacaggcctccgagc

SEQ ID NO: 381664 - DNA, 25 bp, Homo sapien
aattgcttgaagtatgaccgggctc

SEQ ID NO: 381665 - DNA, 25 bp, Homo sapien
gtaaacaagcatatctggaccaagc

SEQ ID NO: 381666 - DNA, 25 bp, Homo sapien
caataaagccagaagtgccttgtcc

SEQ ID NO: 381667 - DNA, 25 bp, Homo sapien
agcacatcgctaaccttgaaaagga

SEQ ID NO: 381668 - DNA, 25 bp, Homo sapien
tcgagcccaaaatgaccctgttaca

SEQ ID NO: 381669 - DNA, 25 bp, Homo sapien
cccaggcaggtaggcaattacactg

SEQ ID NO: 381670 - DNA, 25 bp, Homo sapien
gcccaggcaggtaggcaattacact

SEQ ID NO: 381671 - DNA, 25 bp, Homo sapien
aggcaggtaggcaattacactgtag

SEQ ID NO: 381672 - DNA, 25 bp, Homo sapien
cttcctctagaaggggcccaggcag

SEQ ID NO: 381673 - DNA, 25 bp, Homo sapien
tgagccacgtcttcatcagaaaccg

SEQ ID NO: 381674 - DNA, 25 bp, Homo sapien
tgcagcctgacggacaaggaaagcc

SEQ ID NO: 381675 - DNA, 25 bp, Homo sapien
tctaaagcctgtaaggtcactgggc

SEQ ID NO: 381676 - DNA, 25 bp, Homo sapien
gaagtacaagccactgcgacaagga

SEQ ID NO: 381677 - DNA, 25 bp, Homo sapien
taggcttgcttgaatgccaccaagg

SEQ ID NO: 381678 - DNA, 25 bp, Homo sapien
tgagagatcacaacccagagatgga

SEQ ID NO: 381679 - DNA, 25 bp, Homo sapien
tgtcaggtctaaccagaagaggtct

SEQ ID NO: 381680 - DNA, 25 bp, Homo sapien
gggactccctaaatgaacagtgcat

SEQ ID NO: 381681 - DNA, 25 bp, Homo sapien
cagtgcacagaatggcagcggctgc

SEQ ID NO: 381682 - DNA, 25 bp, Homo sapien
gtggagccggcaccttgaaatctgc

SEQ ID NO: 381683 - DNA, 25 bp, Homo sapien
gagcaatgcctagcagctgcggtag

SEQ ID NO: 381684 - DNA, 25 bp, Homo sapien
gaaatctgccagtgaaaacagcgag

SEQ ID NO: 381685 - DNA, 25 bp, Homo sapien
ctgaccaggatgacaggactgtgga

SEQ ID NO: 381686 - DNA, 25 bp, Homo sapien
tgtgggtaggtacacacgcatgcgc

SEQ ID NO: 381687 - DNA, 25 bp, Homo sapien
tctgtccgcaaaccacgcgactagt

SEQ ID NO: 381688 - DNA, 25 bp, Homo sapien
gactgtggagcaacgtatttcctgt

SEQ ID NO: 381689 - DNA, 25 bp, Homo sapien
gacacccgcagaccagatcgtgtgg

SEQ ID NO: 381690 - DNA, 25 bp, Homo sapien
tgaggctacttacacagagggatct

SEQ ID NO: 381691 - DNA, 25 bp, Homo sapien
caaacattttggagcgtccagccca

SEQ ID NO: 381692 - DNA, 25 bp, Homo sapien
catggtcttctagaacttgaggcta

SEQ ID NO: 381693 - DNA, 25 bp, Homo sapien
cctttatatagtgggagttcgcctt

SEQ ID NO: 381694 - DNA, 25 bp, Homo sapien
gggccaactcccctatctatgcagg

SEQ ID NO: 381695 - DNA, 25 bp, Homo sapien
gctgatggagctaaggcaatacaac

SEQ ID NO: 381696 - DNA, 25 bp, Homo sapien
taagttcaccacctatacgtgtgag

SEQ ID NO: 381697 - DNA, 25 bp, Homo sapien
caaaggctatctgggagggttcgct

SEQ ID NO: 381698 - DNA, 25 bp, Homo sapien
cactgtggcccgcttgtcactggaa

SEQ ID NO: 381699 - DNA, 25 bp, Homo sapien
tcccatgcgaggtcatagctacagg

SEQ ID NO: 381700 - DNA, 25 bp, Homo sapien
ctctagtgggatagctgcgtcagcc

SEQ ID NO: 381701 - DNA, 25 bp, Homo sapien
cagctgaaagggttgttggttggtt

SEQ ID NO: 381702 - DNA, 25 bp, Homo sapien
acaattttccttgcacagctacaat

SEQ ID NO: 381703 - DNA, 25 bp, Homo sapien
catttatctgaagccgcaggacagc

SEQ ID NO: 381704 - DNA, 25 bp, Homo sapien
ttagctaacatttatctgaagccgc

SEQ ID NO: 381705 - DNA, 25 bp, Homo sapien
tggcgagaaatatgttgacatgtct

SEQ ID NO: 381706 - DNA, 25 bp, Homo sapien
aatgattgtgcgcattggcgagaaa

SEQ ID NO: 381707 - DNA, 25 bp, Homo sapien
gaaaattcttaaacttggagcaaca

SEQ ID NO: 381708 - DNA, 25 bp, Homo sapien
agggctatgcgggagattgtctaaa

SEQ ID NO: 381709 - DNA, 25 bp, Homo sapien
tcagccaaggacatgatagatgcat

SEQ ID NO: 381710 - DNA, 25 bp, Homo sapien
caagttgtactgctagcacacagag

SEQ ID NO: 381711 - DNA, 25 bp, Homo sapien
atagatgcatgtcgtgtccccaggg

SEQ ID NO: 381712 - DNA, 25 bp, Homo sapien
catttacaggccgtccttgaacggc

SEQ ID NO: 381713 - DNA, 25 bp, Homo sapien
taaaaaaggtgagggagacgcagtc

SEQ ID NO: 381714 - DNA, 25 bp, Homo sapien
gacgcagtctggtatatagcctctt

SEQ ID NO: 381715 - DNA, 25 bp, Homo sapien
ggaacttccgtcttaacaggcagaa

SEQ ID NO: 381716 - DNA, 25 bp, Homo sapien
tgtaactgaataggagaatgtctgc

SEQ ID NO: 381717 - DNA, 25 bp, Homo sapien
gattaggtaaacaaagcagccggga

SEQ ID NO: 381718 - DNA, 25 bp, Homo sapien
ttgcccaggcttgattaggtaaaca

SEQ ID NO: 381719 - DNA, 25 bp, Homo sapien
gtaaacaaagcagccgggaagctgg

SEQ ID NO: 381720 - DNA, 25 bp, Homo sapien
cttgattaggtaaacaaagcagccg

SEQ ID NO: 381721 - DNA, 25 bp, Homo sapien
tgtagtgtctgagccacaactcaag

SEQ ID NO: 381722 - DNA, 25 bp, Homo sapien
gacagagctctgttgtagtgtctga

SEQ ID NO: 381723 - DNA, 25 bp, Homo sapien
agaaggtaatgagaataaggagcca

SEQ ID NO: 381724 - DNA, 25 bp, Homo sapien
gctctgttgtagtgtctgagccaca

SEQ ID NO: 381725 - DNA, 25 bp, Homo sapien
tggggctggcgttgacaataaccat

SEQ ID NO: 381726 - DNA, 25 bp, Homo sapien
tctaaaatcactagtctgtcttccc

SEQ ID NO: 381727 - DNA, 25 bp, Homo sapien
tgtgccctgattgctgattgttcta

SEQ ID NO: 381728 - DNA, 25 bp, Homo sapien
cccctgatgaagacacccagttgtg

SEQ ID NO: 381729 - DNA, 25 bp, Homo sapien
tcttcccttgtaaaccccctgatga

SEQ ID NO: 381730 - DNA, 25 bp, Homo sapien
gcatttcaaaatcggactccgccac

SEQ ID NO: 381731 - DNA, 25 bp, Homo sapien
tgtcccacgttctgggagcacttcc

SEQ ID NO: 381732 - DNA, 25 bp, Homo sapien
gggtccaggaagatcatattctctc

SEQ ID NO: 381733 - DNA, 25 bp, Homo sapien
ctgaatgtgtttccttgccccaact

SEQ ID NO: 381734 - DNA, 25 bp, Homo sapien
agctatgactggagtttgctgtgtc

SEQ ID NO: 381735 - DNA, 25 bp, Homo sapien
tgttagtctaatgcccatctcagtg

SEQ ID NO: 381736 - DNA, 25 bp, Homo sapien
ggctcaggtgtacaaggaattccca

SEQ ID NO: 381737 - DNA, 25 bp, Homo sapien
taaaattggttcaggccaagcatga

SEQ ID NO: 381738 - DNA, 25 bp, Homo sapien
gatcaagtgtgagactccagggatg

SEQ ID NO: 381739 - DNA, 25 bp, Homo sapien
atgaacaatgcacgaatcgggcagc

SEQ ID NO: 381740 - DNA, 25 bp, Homo sapien
gagcaatgaacaatgcacgaatcgg

SEQ ID NO: 381741 - DNA, 25 bp, Homo sapien
taagatcaagtgtgagactccaggg

SEQ ID NO: 381742 - DNA, 25 bp, Homo sapien
aaccacaataccagtatcacacctg

SEQ ID NO: 381743 - DNA, 25 bp, Homo sapien
ccacaataccagtatcacacctgaa

SEQ ID NO: 381744 - DNA, 25 bp, Homo sapien
accacaataccagtatcacacctga

SEQ ID NO: 381745 - DNA, 25 bp, Homo sapien
cacaataccagtatcacacctgaaa

SEQ ID NO: 381746 - DNA, 25 bp, Homo sapien
ctcaggcaatcctctcatgtagctg

SEQ ID NO: 381747 - DNA, 25 bp, Homo sapien
tagctggaattacagtcctgagcca

SEQ ID NO: 381748 - DNA, 25 bp, Homo sapien
ggcctcaggcaatcctctcatgtag

SEQ ID NO: 381749 - DNA, 25 bp, Homo sapien
gtagctggaattacagtcctgagcc

SEQ ID NO: 381750 - DNA, 25 bp, Homo sapien
tggccagccatagagacgcatgatc

SEQ ID NO: 381751 - DNA, 25 bp, Homo sapien
gtctgtctaattcgaaggctgcttc

SEQ ID NO: 381752 - DNA, 25 bp, Homo sapien
agctcacgaagcctgctgcctcttg

SEQ ID NO: 381753 - DNA, 25 bp, Homo sapien
ggacagtctcgtgccaagatgccaa

SEQ ID NO: 381754 - DNA, 25 bp, Homo sapien
ttcctactgggactcgctccatcct

SEQ ID NO: 381755 - DNA, 25 bp, Homo sapien
tttggccatccatccggagcccgcc

SEQ ID NO: 381756 - DNA, 25 bp, Homo sapien
gagcccgccctgattctccacaggg

SEQ ID NO: 381757 - DNA, 25 bp, Homo sapien
gaaccagatgacatcctaaaggccc

SEQ ID NO: 381758 - DNA, 25 bp, Homo sapien
ccccagctttccttaaggaggaatg

SEQ ID NO: 381759 - DNA, 25 bp, Homo sapien
cttcactgggaacgccagaccagga

SEQ ID NO: 381760 - DNA, 25 bp, Homo sapien
tacgcattctgcaggcactaaccat

SEQ ID NO: 381761 - DNA, 25 bp, Homo sapien
ctggaccataacgacacagctgcct

SEQ ID NO: 381762 - DNA, 25 bp, Homo sapien
tgtggttgagtaaaaaggccttcgc

SEQ ID NO: 381763 - DNA, 25 bp, Homo sapien
catttcgggatagaactgaggttcc

SEQ ID NO: 381764 - DNA, 25 bp, Homo sapien
ggttccttaggatctactgtcatct

SEQ ID NO: 381765 - DNA, 25 bp, Homo sapien
ggccttcgcatttcgggatagaact

SEQ ID NO: 381766 - DNA, 25 bp, Homo sapien
tagtgactgttctagatattgcaat

SEQ ID NO: 381767 - DNA, 25 bp, Homo sapien
tcctgccttcttttgaattacttaa

SEQ ID NO: 381768 - DNA, 25 bp, Homo sapien
tacagtctacttcaagttactattt

SEQ ID NO: 381769 - DNA, 25 bp, Homo sapien
ttgcaatatgcattcctagtgtttt

SEQ ID NO: 381770 - DNA, 25 bp, Homo sapien
gaccattgattacaggagttcgcga

SEQ ID NO: 381771 - DNA, 25 bp, Homo sapien
gttacaggcacgcatataggctcca

SEQ ID NO: 381772 - DNA, 25 bp, Homo sapien
cagaggcttcctagcagtaccaggc

SEQ ID NO: 381773 - DNA, 25 bp, Homo sapien
ggagttcctggcatagtccccatca

SEQ ID NO: 381774 - DNA, 25 bp, Homo sapien
gggacattcaagcaggaggtacaaa

SEQ ID NO: 381775 - DNA, 25 bp, Homo sapien
taaagcccaaagaagaatcaagctg

SEQ ID NO: 381776 - DNA, 25 bp, Homo sapien
tcaaatagaggtacagggtagacag

SEQ ID NO: 381777 - DNA, 25 bp, Homo sapien
caaatgtgggtgtcatcaacagcaa

SEQ ID NO: 381778 - DNA, 25 bp, Homo sapien
tattgaatgcgtaccatgtgcctgg

SEQ ID NO: 381779 - DNA, 25 bp, Homo sapien
caaggctcccgcaattgtgcaagga

SEQ ID NO: 381780 - DNA, 25 bp, Homo sapien
ggccacaccgtcagcattttaggag

SEQ ID NO: 381781 - DNA, 25 bp, Homo sapien
tctgagcgaggacgaaagagacagc

SEQ ID NO: 381782 - DNA, 25 bp, Homo sapien
gggagttagactttgtactatgcac

SEQ ID NO: 381783 - DNA, 25 bp, Homo sapien
ggagttagactttgtactatgcact

SEQ ID NO: 381784 - DNA, 25 bp, Homo sapien
agttagactttgtactatgcacttg

SEQ ID NO: 381785 - DNA, 25 bp, Homo sapien
agggagcctgaatcatttcctgaat

SEQ ID NO: 381786 - DNA, 25 bp, Homo sapien
aagccccaaatgggtgtatggctac

SEQ ID NO: 381787 - DNA, 25 bp, Homo sapien
caagccccaaatgggtgtatggcta

SEQ ID NO: 381788 - DNA, 25 bp, Homo sapien
gcatgccagagcttagtgtcaccaa

SEQ ID NO: 381789 - DNA, 25 bp, Homo sapien
gccttaaatccaactcatgccgaga

SEQ ID NO: 381790 - DNA, 25 bp, Homo sapien
gattgccgtagccagtctctgctga

SEQ ID NO: 381791 - DNA, 25 bp, Homo sapien
tgtcaataacatctaccggcagaga

SEQ ID NO: 381792 - DNA, 25 bp, Homo sapien
tggttatgaccacgatctgatgggt

SEQ ID NO: 381793 - DNA, 25 bp, Homo sapien
tgatgggtcatcgttacttgaaggg

SEQ ID NO: 381794 - DNA, 25 bp, Homo sapien
tgagcagaggcttcgcttaacttcc

SEQ ID NO: 381795 - DNA, 25 bp, Homo sapien
tctcaatggaagaaccgcaagtgtc

SEQ ID NO: 381796 - DNA, 25 bp, Homo sapien
actttcgtgccagagataagccttg

SEQ ID NO: 381797 - DNA, 25 bp, Homo sapien
catctctaacggacagcggtcactt

SEQ ID NO: 381798 - DNA, 25 bp, Homo sapien
tcacatctctaacggacagcggtca

SEQ ID NO: 381799 - DNA, 25 bp, Homo sapien
acagcggtcactttcgtgccagaga

SEQ ID NO: 381800 - DNA, 25 bp, Homo sapien
caaggagggtagatcacttgagatc

SEQ ID NO: 381801 - DNA, 25 bp, Homo sapien
gccaaggagggtagatcacttgaga

SEQ ID NO: 381802 - DNA, 25 bp, Homo sapien
caaatgggccaggtgtggtcgctca

SEQ ID NO: 381803 - DNA, 25 bp, Homo sapien
tcgctcacatctgtaattccagcag

SEQ ID NO: 381804 - DNA, 25 bp, Homo sapien
tggcctctgtgaccagaatttgttc

SEQ ID NO: 381805 - DNA, 25 bp, Homo sapien
tgttcttgtggaatgtagccggaga

SEQ ID NO: 381806 - DNA, 25 bp, Homo sapien
attacactgatagtctactctggcc

SEQ ID NO: 381807 - DNA, 25 bp, Homo sapien
ggctaggaagtttggccacccctgc

SEQ ID NO: 381808 - DNA, 25 bp, Homo sapien
gactttcagtgcgtggctataggaa

SEQ ID NO: 381809 - DNA, 25 bp, Homo sapien
gagttcatgtgcttttccgaagaag

SEQ ID NO: 381810 - DNA, 25 bp, Homo sapien
tttaccaagtggaacaggagactcc

SEQ ID NO: 381811 - DNA, 25 bp, Homo sapien
cagttctggtaatctacaaagacaa

SEQ ID NO: 381812 - DNA, 25 bp, Homo sapien
gctgcagttccccacgcctagcccg

SEQ ID NO: 381813 - DNA, 25 bp, Homo sapien
ggcttaagggaagggcacagcgagg

SEQ ID NO: 381814 - DNA, 25 bp, Homo sapien
gaggccaagagtggggcttaaggga

SEQ ID NO: 381815 - DNA, 25 bp, Homo sapien
gcccttcctacaagcctgccctgga

SEQ ID NO: 381816 - DNA, 25 bp, Homo sapien
tacaaaattcgtagcaacccgcaca

SEQ ID NO: 381817 - DNA, 25 bp, Homo sapien
catcattcatcgtgacaagctgctg

SEQ ID NO: 381818 - DNA, 25 bp, Homo sapien
aggactcctgggtgactagtgccac

SEQ ID NO: 381819 - DNA, 25 bp, Homo sapien
ctgagagaataaatgtgagccctgc

SEQ ID NO: 381820 - DNA, 25 bp, Homo sapien
tttctatgccgcctcctctactccc

SEQ ID NO: 381821 - DNA, 25 bp, Homo sapien
gcccctctgtgatccggccctgcct

SEQ ID NO: 381822 - DNA, 25 bp, Homo sapien
tatgccgcctcctctactccctcag

SEQ ID NO: 381823 - DNA, 25 bp, Homo sapien
ctcattttctatgccgcctcctcta

SEQ ID NO: 381824 - DNA, 25 bp, Homo sapien
taagctaaatgtagtctatgcgtac

SEQ ID NO: 381825 - DNA, 25 bp, Homo sapien
caattaaaagcagggtcacaaagag

SEQ ID NO: 381826 - DNA, 25 bp, Homo sapien
tattcactatagcaacccaagtgtc

SEQ ID NO: 381827 - DNA, 25 bp, Homo sapien
ttccacttagatgagataccccaag

SEQ ID NO: 381828 - DNA, 25 bp, Homo sapien
cagtgagtcaaggtcgtgcctgggc

SEQ ID NO: 381829 - DNA, 25 bp, Homo sapien
catctatgtccacttggatgtagaa

SEQ ID NO: 381830 - DNA, 25 bp, Homo sapien
agtcaaggtcgtgcctgggcaacaa

SEQ ID NO: 381831 - DNA, 25 bp, Homo sapien
actccatctatgtccacttggatgt

SEQ ID NO: 381832 - DNA, 25 bp, Homo sapien
aatctttggcagagaaccactgtga

SEQ ID NO: 381833 - DNA, 25 bp, Homo sapien
ttctacattgtgacagacggacggg

SEQ ID NO: 381834 - DNA, 25 bp, Homo sapien
taataccccttagctttgcagagga

SEQ ID NO: 381835 - DNA, 25 bp, Homo sapien
tgcagaggacttgcgagacctttgc

SEQ ID NO: 381836 - DNA, 25 bp, Homo sapien
aattaaaacaggagcacaagcatgc

SEQ ID NO: 381837 - DNA, 25 bp, Homo sapien
tcaacagacgttttggagctccaag

SEQ ID NO: 381838 - DNA, 25 bp, Homo sapien
tgtttaagggtttctgctgccacca

SEQ ID NO: 381839 - DNA, 25 bp, Homo sapien
gagcaccgaggcaagattcaacaga

SEQ ID NO: 381840 - DNA, 25 bp, Homo sapien
gaccttaaaatgccgctggagaatg

SEQ ID NO: 381841 - DNA, 25 bp, Homo sapien
ccttaaaatgccgctggagaatgtg

SEQ ID NO: 381842 - DNA, 25 bp, Homo sapien
aagaccttaaaatgccgctggagaa

SEQ ID NO: 381843 - DNA, 25 bp, Homo sapien
ttaaaatgccgctggagaatgtgaa

SEQ ID NO: 381844 - DNA, 25 bp, Homo sapien
cttggtgctctggacaagatttgac

SEQ ID NO: 381845 - DNA, 25 bp, Homo sapien
atattggagcacttgcgattgagac

SEQ ID NO: 381846 - DNA, 25 bp, Homo sapien
caatctgggccaaatctggaatggg

SEQ ID NO: 381847 - DNA, 25 bp, Homo sapien
tctggaatgggtttccgaaagccaa

SEQ ID NO: 381848 - DNA, 25 bp, Homo sapien
tttaaatactctgtaagctctattc

SEQ ID NO: 381849 - DNA, 25 bp, Homo sapien
ttaaatactctgtaagctctattca

SEQ ID NO: 381850 - DNA, 25 bp, Homo sapien
ctttaaatactctgtaagctctatt

SEQ ID NO: 381851 - DNA, 25 bp, Homo sapien
tccggttcagatggttcaaacagct

SEQ ID NO: 381852 - DNA, 25 bp, Homo sapien
cctttccactcttccggttcagatg

SEQ ID NO: 381853 - DNA, 25 bp, Homo sapien
tccactcttccggttcagatggttc

SEQ ID NO: 381854 - DNA, 25 bp, Homo sapien
tcttccggttcagatggttcaaaca

SEQ ID NO: 381855 - DNA, 25 bp, Homo sapien
tctctgaggcttgtggtgttcaaat

SEQ ID NO: 381856 - DNA, 25 bp, Homo sapien
ggtgttcaaattctgctacccttaa

SEQ ID NO: 381857 - DNA, 25 bp, Homo sapien
tgttcaaattctgctacccttaact

SEQ ID NO: 381858 - DNA, 25 bp, Homo sapien
ctgaggcttgtggtgttcaaattct

SEQ ID NO: 381859 - DNA, 25 bp, Homo sapien
taaccaattaggtcatctgtcctca

SEQ ID NO: 381860 - DNA, 25 bp, Homo sapien
aaccaattaggtcatctgtcctcac

SEQ ID NO: 381861 - DNA, 25 bp, Homo sapien
tttgtgccgggccataagctagaca

SEQ ID NO: 381862 - DNA, 25 bp, Homo sapien
tcgagcccgtagtgttagcatgaga

SEQ ID NO: 381863 - DNA, 25 bp, Homo sapien
gaaagaccgctatttacaatgggcc

SEQ ID NO: 381864 - DNA, 25 bp, Homo sapien
taagaagaacagttggtcgagcccg

SEQ ID NO: 381865 - DNA, 25 bp, Homo sapien
cacaaattcatctggctccgactcg

SEQ ID NO: 381866 - DNA, 25 bp, Homo sapien
atgacccagcctgagtcaccggcat

SEQ ID NO: 381867 - DNA, 25 bp, Homo sapien
atctggctccgactcgcccacttct

SEQ ID NO: 381868 - DNA, 25 bp, Homo sapien
ctggctccgactcgcccacttcttc

SEQ ID NO: 381869 - DNA, 25 bp, Homo sapien
ccatatcatctgctacagaagttgt

SEQ ID NO: 381870 - DNA, 25 bp, Homo sapien
gtcagcttcctgacagccggggaat

SEQ ID NO: 381871 - DNA, 25 bp, Homo sapien
ggaatgagtgccttcactctgaagc

SEQ ID NO: 381872 - DNA, 25 bp, Homo sapien
agcttcctgacagccggggaatgag

SEQ ID NO: 381873 - DNA, 25 bp, Homo sapien
tgtttctctcgtcagtaaagccaga

SEQ ID NO: 381874 - DNA, 25 bp, Homo sapien
cacatgaatggtcatagttacacag

SEQ ID NO: 381875 - DNA, 25 bp, Homo sapien
ctatatgttttctgagggtaaggac

SEQ ID NO: 381876 - DNA, 25 bp, Homo sapien
tttcaagccacacgcatccatcaag

SEQ ID NO: 381877 - DNA, 25 bp, Homo sapien
gggccatcgttcacatctgcttcta

SEQ ID NO: 381878 - DNA, 25 bp, Homo sapien
tgtctctctttctactgtgcctggg

SEQ ID NO: 381879 - DNA, 25 bp, Homo sapien
taccatgatcgtcacacctgggcca

SEQ ID NO: 381880 - DNA, 25 bp, Homo sapien
tgcttctaaacgactggtacaactg

SEQ ID NO: 381881 - DNA, 25 bp, Homo sapien
tctgtttacgtaaaactctaactgc

SEQ ID NO: 381882 - DNA, 25 bp, Homo sapien
ggctcccagagtggtccttctcaaa

SEQ ID NO: 381883 - DNA, 25 bp, Homo sapien
tcaaacagcatgttgatcagatcac

SEQ ID NO: 381884 - DNA, 25 bp, Homo sapien
gtcttccctcttctactctcgggct

SEQ ID NO: 381885 - DNA, 25 bp, Homo sapien
ccctgaacagctgattgctcaagtg

SEQ ID NO: 381886 - DNA, 25 bp, Homo sapien
ctagacatgtaattgccgaagtgca

SEQ ID NO: 381887 - DNA, 25 bp, Homo sapien
tccagctgtaccaccctgaacagct

SEQ ID NO: 381888 - DNA, 25 bp, Homo sapien
ttgccgaagtgcatatggtgcctcc

SEQ ID NO: 381889 - DNA, 25 bp, Homo sapien
cgctccggtcttgatggtgttattt

SEQ ID NO: 381890 - DNA, 25 bp, Homo sapien
gaggatgcatacctcactcccatga

SEQ ID NO: 381891 - DNA, 25 bp, Homo sapien
gccagagcgtcccacaagaggatgc

SEQ ID NO: 381892 - DNA, 25 bp, Homo sapien
gggatacccgtgatgccatcgctcc

SEQ ID NO: 381893 - DNA, 25 bp, Homo sapien
tggaggtgccttcagcatgatcccc

SEQ ID NO: 381894 - DNA, 25 bp, Homo sapien
tttgggacataggtctctgccattg

SEQ ID NO: 381895 - DNA, 25 bp, Homo sapien
gccttggagccatgggttccatttg

SEQ ID NO: 381896 - DNA, 25 bp, Homo sapien
cctggaggtgccttcagcatgatcc

SEQ ID NO: 381897 - DNA, 25 bp, Homo sapien
tcagctgtgtcaagagagtccctct

SEQ ID NO: 381898 - DNA, 25 bp, Homo sapien
gacacaggtgctttgtacttccaga

SEQ ID NO: 381899 - DNA, 25 bp, Homo sapien
tgcctgagcagccatgaatactgga

SEQ ID NO: 381900 - DNA, 25 bp, Homo sapien
tagagttggaacttgtcagctgtgt

SEQ ID NO: 381901 - DNA, 25 bp, Homo sapien
accacagggcttggcgactgctgag

SEQ ID NO: 381902 - DNA, 25 bp, Homo sapien
ggccagtgtcaactacggtcttggg

SEQ ID NO: 381903 - DNA, 25 bp, Homo sapien
gatgaggcccagaaggcttcaaagg

SEQ ID NO: 381904 - DNA, 25 bp, Homo sapien
tgttctggccacatgcacctttggt

SEQ ID NO: 381905 - DNA, 25 bp, Homo sapien
ggggcagtcctcagggccaggcggg

SEQ ID NO: 381906 - DNA, 25 bp, Homo sapien
cccgcaaaatcaactggggggcagt

SEQ ID NO: 381907 - DNA, 25 bp, Homo sapien
ccaggcggggagagctgggtgagcc

SEQ ID NO: 381908 - DNA, 25 bp, Homo sapien
gcaaaatcaactggggggcagtcct

SEQ ID NO: 381909 - DNA, 25 bp, Homo sapien
ggccatccatgatcctgtactcttg

SEQ ID NO: 381910 - DNA, 25 bp, Homo sapien
ccatccatgatcctgtactcttggg

SEQ ID NO: 381911 - DNA, 25 bp, Homo sapien
ttggccatccatgatcctgtactct

SEQ ID NO: 381912 - DNA, 25 bp, Homo sapien
ttcttggccatccatgatcctgtac

SEQ ID NO: 381913 - DNA, 25 bp, Homo sapien
tttccctggcatcatcgtcagggac

SEQ ID NO: 381914 - DNA, 25 bp, Homo sapien
ttgtccaccaagtagtttccctggc

SEQ ID NO: 381915 - DNA, 25 bp, Homo sapien
tccaccaagtagtttccctggcatc

SEQ ID NO: 381916 - DNA, 25 bp, Homo sapien
tgtccaccaagtagtttccctggca

SEQ ID NO: 381917 - DNA, 25 bp, Homo sapien
ctgcctgtgccgaaagtggggaccc

SEQ ID NO: 381918 - DNA, 25 bp, Homo sapien
gggacccgagtgagttactgcacgt

SEQ ID NO: 381919 - DNA, 25 bp, Homo sapien
gtcccttggcactgcgtgaccttgg

SEQ ID NO: 381920 - DNA, 25 bp, Homo sapien
tgcacgttaacctccgaggacggtg

SEQ ID NO: 381921 - DNA, 25 bp, Homo sapien
tcgcggcgcaaggcggggtcgcggc

SEQ ID NO: 381922 - DNA, 25 bp, Homo sapien
cttcgcggcgcaaggcggggtcgcg

SEQ ID NO: 381923 - DNA, 25 bp, Homo sapien
ttcgcggcgcaaggcggggtcgcgg

SEQ ID NO: 381924 - DNA, 25 bp, Homo sapien
agctctcgaaccggctggaactttc

SEQ ID NO: 381925 - DNA, 25 bp, Homo sapien
tagctctcgaaccggctggaacttt

SEQ ID NO: 381926 - DNA, 25 bp, Homo sapien
gctctcgaaccggctggaactttcc

SEQ ID NO: 381927 - DNA, 25 bp, Homo sapien
ctagctctcgaaccggctggaactt

SEQ ID NO: 381928 - DNA, 25 bp, Homo sapien
aaagcacggtccgagagcgcgagcc

SEQ ID NO: 381929 - DNA, 25 bp, Homo sapien
ccggacggctcccaggcggcgaaag

SEQ ID NO: 381930 - DNA, 25 bp, Homo sapien
ctagaaactgctgcgccggacggct

SEQ ID NO: 381931 - DNA, 25 bp, Homo sapien
cccaggcggcgaaagcacggtccga

SEQ ID NO: 381932 - DNA, 25 bp, Homo sapien
gaggatcggcgagtgcggctcggaa

SEQ ID NO: 381933 - DNA, 25 bp, Homo sapien
gcctggaggatcggcgagtgcggct

SEQ ID NO: 381934 - DNA, 25 bp, Homo sapien
tggaggatcggcgagtgcggctcgg

SEQ ID NO: 381935 - DNA, 25 bp, Homo sapien
ggatcggcgagtgcggctcggaagc

SEQ ID NO: 381936 - DNA, 25 bp, Homo sapien
ccgctgcatggctttcaggattaaa

SEQ ID NO: 381937 - DNA, 25 bp, Homo sapien
ttcaggattaaagccagctcgtagc

SEQ ID NO: 381938 - DNA, 25 bp, Homo sapien
ctttcaggattaaagccagctcgta

SEQ ID NO: 381939 - DNA, 25 bp, Homo sapien
aggattaaagccagctcgtagcggg

SEQ ID NO: 381940 - DNA, 25 bp, Homo sapien
ccgacgctccgtgattgttagttta

SEQ ID NO: 381941 - DNA, 25 bp, Homo sapien
taatactcctcgcaattgacctgga

SEQ ID NO: 381942 - DNA, 25 bp, Homo sapien
tcaaacgtaaaaatgcgtccactcc

SEQ ID NO: 381943 - DNA, 25 bp, Homo sapien
gacctggagcctaatttcaaacgta

SEQ ID NO: 381944 - DNA, 25 bp, Homo sapien
ttcttccaaatccatgaagaacaag

SEQ ID NO: 381945 - DNA, 25 bp, Homo sapien
taacttcttccaaatccatgaagaa

SEQ ID NO: 381946 - DNA, 25 bp, Homo sapien
acttcttccaaatccatgaagaaca

SEQ ID NO: 381947 - DNA, 25 bp, Homo sapien
ttaacttcttccaaatccatgaaga

SEQ ID NO: 381948 - DNA, 25 bp, Homo sapien
cctttcggagttacatatgctggta

SEQ ID NO: 381949 - DNA, 25 bp, Homo sapien
ccaaaagggatattcaagaggctga

SEQ ID NO: 381950 - DNA, 25 bp, Homo sapien
tacaggttgcctctttcagtgtcac

SEQ ID NO: 381951 - DNA, 25 bp, Homo sapien
aactagagtgaaaaatgggtgctcc

SEQ ID NO: 381952 - DNA, 25 bp, Homo sapien
caggctgagtactgcggagaaaaaa

SEQ ID NO: 381953 - DNA, 25 bp, Homo sapien
caagctcaatttaaaggagtcaagc

SEQ ID NO: 381954 - DNA, 25 bp, Homo sapien
tgactttgctacaatccagatactg

SEQ ID NO: 381955 - DNA, 25 bp, Homo sapien
gaaatctttcaatgggcattcccgc

SEQ ID NO: 381956 - DNA, 25 bp, Homo sapien
cattatacagtatgcggctttacca

SEQ ID NO: 381957 - DNA, 25 bp, Homo sapien
cattcatgtattggcacttcagtct

SEQ ID NO: 381958 - DNA, 25 bp, Homo sapien
aattatcaagtgaaaccaaagggct

SEQ ID NO: 381959 - DNA, 25 bp, Homo sapien
tgaaatgaggctacctgggactgca

SEQ ID NO: 381960 - DNA, 25 bp, Homo sapien
tgttcacagggtcaagtcttccatt

SEQ ID NO: 381961 - DNA, 25 bp, Homo sapien
tgccaagcaaactacaaggacctag

SEQ ID NO: 381962 - DNA, 25 bp, Homo sapien
aaggacctagggttgacctgactca

SEQ ID NO: 381963 - DNA, 25 bp, Homo sapien
gctaagctgtttagggagggcccat

SEQ ID NO: 381964 - DNA, 25 bp, Homo sapien
aggggcaggaacaggactccttcct

SEQ ID NO: 381965 - DNA, 25 bp, Homo sapien
ggcaggaacaggactccttccttct

SEQ ID NO: 381966 - DNA, 25 bp, Homo sapien
tcaggggcaggaacaggactccttc

SEQ ID NO: 381967 - DNA, 25 bp, Homo sapien
cttagctgtagctcaggggcaggaa

SEQ ID NO: 381968 - DNA, 25 bp, Homo sapien
tggaaattctaacacaaagctaaga

SEQ ID NO: 381969 - DNA, 25 bp, Homo sapien
caggctgccaactcttgctctaatt

SEQ ID NO: 381970 - DNA, 25 bp, Homo sapien
gtgacaggtcagatctggcccggaa

SEQ ID NO: 381971 - DNA, 25 bp, Homo sapien
cccctaagaggtaactacatgtgtt

SEQ ID NO: 381972 - DNA, 25 bp, Homo sapien
gtgggtcgtgtctagatttttccaa

SEQ ID NO: 381973 - DNA, 25 bp, Homo sapien
aaacacatgcagagaccagcacctg

SEQ ID NO: 381974 - DNA, 25 bp, Homo sapien
actggataccataccactctgtggg

SEQ ID NO: 381975 - DNA, 25 bp, Homo sapien
ggacagttcccttctcactggatac

SEQ ID NO: 381976 - DNA, 25 bp, Homo sapien
tctgagttgcagctaagtctagtga

SEQ ID NO: 381977 - DNA, 25 bp, Homo sapien
taattgggattgagaacttagctcg

SEQ ID NO: 381978 - DNA, 25 bp, Homo sapien
tggactacacagagcaacacagcag

SEQ ID NO: 381979 - DNA, 25 bp, Homo sapien
gccaagtctgtaaaccatacgtgaa

SEQ ID NO: 381980 - DNA, 25 bp, Homo sapien
tgtaagtgccccaatgatcatgagc

SEQ ID NO: 381981 - DNA, 25 bp, Homo sapien
tgtgtagatcactgcaacaaggcct

SEQ ID NO: 381982 - DNA, 25 bp, Homo sapien
agagaggcaccaattgttacccagg

SEQ ID NO: 381983 - DNA, 25 bp, Homo sapien
gaatacagatccaccgagagcttgg

SEQ ID NO: 381984 - DNA, 25 bp, Homo sapien
aattccaagtgaacacacagcaaaa

SEQ ID NO: 381985 - DNA, 25 bp, Homo sapien
tgaaaattccaagtgaacacacagc

SEQ ID NO: 381986 - DNA, 25 bp, Homo sapien
aaattccaagtgaacacacagcaaa

SEQ ID NO: 381987 - DNA, 25 bp, Homo sapien
gaaagcctcctgatcatgggaagac

SEQ ID NO: 381988 - DNA, 25 bp, Homo sapien
tcataaccttggacatgtcgcagcc

SEQ ID NO: 381989 - DNA, 25 bp, Homo sapien
tggatatggaagagataggctgccc

SEQ ID NO: 381990 - DNA, 25 bp, Homo sapien
aatttaggccgaaggacacagcacc

SEQ ID NO: 381991 - DNA, 25 bp, Homo sapien
gcggttgtcgaattcactgtaatat

SEQ ID NO: 381992 - DNA, 25 bp, Homo sapien
ccaacttgtgcggttgtcgaattca

SEQ ID NO: 381993 - DNA, 25 bp, Homo sapien
tattgatagagctctgaatgtaaac

SEQ ID NO: 381994 - DNA, 25 bp, Homo sapien
ctgtaatatgtattcctcttattga

SEQ ID NO: 381995 - DNA, 25 bp, Homo sapien
gcaaactagcagagtcaatactggt

SEQ ID NO: 381996 - DNA, 25 bp, Homo sapien
taagaacggaaaggtgcaaactagc

SEQ ID NO: 381997 - DNA, 25 bp, Homo sapien
caataagcctcgtttctgtttccaa

SEQ ID NO: 381998 - DNA, 25 bp, Homo sapien
tactggtaaccagaaggcactaatc

SEQ ID NO: 381999 - DNA, 25 bp, Homo sapien
tgtagtgctcatagcaactctgaga

SEQ ID NO: 382000 - DNA, 25 bp, Homo sapien
tacctggtggcctttatgactggca

SEQ ID NO: 382001 - DNA, 25 bp, Homo sapien
taggaccagtttagataccgcattg

SEQ ID NO: 382002 - DNA, 25 bp, Homo sapien
taccgcattgtcttgggcttatcaa

SEQ ID NO: 382003 - DNA, 25 bp, Homo sapien
tctgctggcaatctataaactgaag

SEQ ID NO: 382004 - DNA, 25 bp, Homo sapien
tgataaacaagctactcggaggtga

SEQ ID NO: 382005 - DNA, 25 bp, Homo sapien
tgtggtaggctcattcctggctagc

SEQ ID NO: 382006 - DNA, 25 bp, Homo sapien
ttatcacatgttgctaagccaaggg

SEQ ID NO: 382007 - DNA, 25 bp, Homo sapien
gacgacagtaccttcagagatgaga

SEQ ID NO: 382008 - DNA, 25 bp, Homo sapien
agaagtcatgatacccctacagcag

SEQ ID NO: 382009 - DNA, 25 bp, Homo sapien
cgttgcaggcccaatcgtgatgcca

SEQ ID NO: 382010 - DNA, 25 bp, Homo sapien
gcacggagctgccatactgaaagaa

SEQ ID NO: 382011 - DNA, 25 bp, Homo sapien
ctctgcattggagggcacaggcaca

SEQ ID NO: 382012 - DNA, 25 bp, Homo sapien
tgcggcagataaaaaagagggctct

SEQ ID NO: 382013 - DNA, 25 bp, Homo sapien
tgaaggtttatactctgcggcagat

SEQ ID NO: 382014 - DNA, 25 bp, Homo sapien
gaatcaaccataccaacactgggca

SEQ ID NO: 382015 - DNA, 25 bp, Homo sapien
tggcttccagaggttactgaaagag

SEQ ID NO: 382016 - DNA, 25 bp, Homo sapien
gactccgtgtccatccaggctttta

SEQ ID NO: 382017 - DNA, 25 bp, Homo sapien
cagagaggtataaacaggtggcttc

SEQ ID NO: 382018 - DNA, 25 bp, Homo sapien
ccagatctacacttggacactgaaa

SEQ ID NO: 382019 - DNA, 25 bp, Homo sapien
tgcccgcctcacgttacaaagagtt

SEQ ID NO: 382020 - DNA, 25 bp, Homo sapien
agtggcctccaatatacccagctag

SEQ ID NO: 382021 - DNA, 25 bp, Homo sapien
ccactcaggaaggttactgaagcta

SEQ ID NO: 382022 - DNA, 25 bp, Homo sapien
tcatggaagtatcataaccaccacc

SEQ ID NO: 382023 - DNA, 25 bp, Homo sapien
caagatgtggcgaagaagggcacca

SEQ ID NO: 382024 - DNA, 25 bp, Homo sapien
tattaagtggaaacgcctgctgcaa

SEQ ID NO: 382025 - DNA, 25 bp, Homo sapien
gaagagtatctcgttggcaggacac

SEQ ID NO: 382026 - DNA, 25 bp, Homo sapien
gatagacgggtatacactgggcaca

SEQ ID NO: 382027 - DNA, 25 bp, Homo sapien
gcatcagaattaatataagagctag

SEQ ID NO: 382028 - DNA, 25 bp, Homo sapien
gattaagtctgctcagttccaatca

SEQ ID NO: 382029 - DNA, 25 bp, Homo sapien
tattgtaaggatatgagatagctca

SEQ ID NO: 382030 - DNA, 25 bp, Homo sapien
tactggtaggaatcgctgggtaaaa

SEQ ID NO: 382031 - DNA, 25 bp, Homo sapien
atcagggcctctatcgtacgtttca

SEQ ID NO: 382032 - DNA, 25 bp, Homo sapien
gcctctatcgtacgtttcaaagtag

SEQ ID NO: 382033 - DNA, 25 bp, Homo sapien
tcctataaggaagcgctcgttcacc

SEQ ID NO: 382034 - DNA, 25 bp, Homo sapien
tgtgggcagagatcctataaggaag

SEQ ID NO: 382035 - DNA, 25 bp, Homo sapien
tcgtcgcagagcacatctgcagaga

SEQ ID NO: 382036 - DNA, 25 bp, Homo sapien
gcattctcgtcgcagagcacatctg

SEQ ID NO: 382037 - DNA, 25 bp, Homo sapien
gcagcattctcgtcgcagagcacat

SEQ ID NO: 382038 - DNA, 25 bp, Homo sapien
acaagcagcattctcgtcgcagagc

SEQ ID NO: 382039 - DNA, 25 bp, Homo sapien
actgtcaggtttcaaatcagcgcct

SEQ ID NO: 382040 - DNA, 25 bp, Homo sapien
ggtttcaaatcagcgccttgccgta

SEQ ID NO: 382041 - DNA, 25 bp, Homo sapien
cagcgccttgccgtaatttcggata

SEQ ID NO: 382042 - DNA, 25 bp, Homo sapien
ttcggatacgtgtcatagcctctag

SEQ ID NO: 382043 - DNA, 25 bp, Homo sapien
gaattttccacaccaacaccttgtc

SEQ ID NO: 382044 - DNA, 25 bp, Homo sapien
ttgctccctctaacataaatgacat

SEQ ID NO: 382045 - DNA, 25 bp, Homo sapien
ccaaacgcccaggaatacagtaaga

SEQ ID NO: 382046 - DNA, 25 bp, Homo sapien
tatagcacgggtctaaatgagcctc

SEQ ID NO: 382047 - DNA, 25 bp, Homo sapien
gagctggcatgtgtggccaagtcca

SEQ ID NO: 382048 - DNA, 25 bp, Homo sapien
gactgtgcgcatcatcaagtatgcc

SEQ ID NO: 382049 - DNA, 25 bp, Homo sapien
ccatcatcaatggtggtccccagga

SEQ ID NO: 382050 - DNA, 25 bp, Homo sapien
catgtgaatcagaccacctggttgc

SEQ ID NO: 382051 - DNA, 25 bp, Homo sapien
gcacaaatgatgatatgcagatcag

SEQ ID NO: 382052 - DNA, 25 bp, Homo sapien
gatgcagcacaaatgatgatatgca

SEQ ID NO: 382053 - DNA, 25 bp, Homo sapien
gctgtgcagatcaatgatgcagcac

SEQ ID NO: 382054 - DNA, 25 bp, Homo sapien
aatgatgatatgcagatcagtgaca

SEQ ID NO: 382055 - DNA, 25 bp, Homo sapien
gaatagagacgaacacggagcaggt

SEQ ID NO: 382056 - DNA, 25 bp, Homo sapien
taaagcacagttgccataggaagaa

SEQ ID NO: 382057 - DNA, 25 bp, Homo sapien
aaagtacgttctcaccactggcaca

SEQ ID NO: 382058 - DNA, 25 bp, Homo sapien
tgttaaccctagcactccgaataga

SEQ ID NO: 382059 - DNA, 25 bp, Homo sapien
taatttttctgcgagtgggactggg

SEQ ID NO: 382060 - DNA, 25 bp, Homo sapien
gctgcggtgggtgcataaaaatcca

SEQ ID NO: 382061 - DNA, 25 bp, Homo sapien
tcctgggtcagagggtgtttgacaa

SEQ ID NO: 382062 - DNA, 25 bp, Homo sapien
tctcgagacaagtgctccaccatgc

SEQ ID NO: 382063 - DNA, 25 bp, Homo sapien
gatccactggtactgcaggttacag

SEQ ID NO: 382064 - DNA, 25 bp, Homo sapien
ttctcgtccatgctgcccaaatgtg

SEQ ID NO: 382065 - DNA, 25 bp, Homo sapien
tatttccacatggttacacaggctg

SEQ ID NO: 382066 - DNA, 25 bp, Homo sapien
tataaggctaaaatctggcgaatct

SEQ ID NO: 382067 - DNA, 25 bp, Homo sapien
agtttattactcaaagcaaaagttg

SEQ ID NO: 382068 - DNA, 25 bp, Homo sapien
ttactcaaagcaaaagttgtccata

SEQ ID NO: 382069 - DNA, 25 bp, Homo sapien
tattactcaaagcaaaagttgtcca

SEQ ID NO: 382070 - DNA, 25 bp, Homo sapien
tttattactcaaagcaaaagttgtc

SEQ ID NO: 382071 - DNA, 25 bp, Homo sapien
tcctggcgctttgggcatctcttgc

SEQ ID NO: 382072 - DNA, 25 bp, Homo sapien
tgttttgggaaacgacctcatcctc

SEQ ID NO: 382073 - DNA, 25 bp, Homo sapien
aagtctttccaatcagccccgagga

SEQ ID NO: 382074 - DNA, 25 bp, Homo sapien
ggtgacagacaccttgtgcagggca

SEQ ID NO: 382075 - DNA, 25 bp, Homo sapien
gaagcccaacatgccggcaaaaggg

SEQ ID NO: 382076 - DNA, 25 bp, Homo sapien
tgtctctgtactatgggaccctccc

SEQ ID NO: 382077 - DNA, 25 bp, Homo sapien
ctttagaatgcatcctgaatccctg

SEQ ID NO: 382078 - DNA, 25 bp, Homo sapien
agtaccccaggtatctgttaggaag

SEQ ID NO: 382079 - DNA, 25 bp, Homo sapien
gaatccaaagccagcaacatcgatc

SEQ ID NO: 382080 - DNA, 25 bp, Homo sapien
tgtccaactacttgcctacaactct

SEQ ID NO: 382081 - DNA, 25 bp, Homo sapien
aaagccagcaacatcgatcagcttc

SEQ ID NO: 382082 - DNA, 25 bp, Homo sapien
tttttgtccaactacttgcctacaa

SEQ ID NO: 382083 - DNA, 25 bp, Homo sapien
ttcccctcagaaagcatagcctgca

SEQ ID NO: 382084 - DNA, 25 bp, Homo sapien
ggagagtgatctcagcagacaagag

SEQ ID NO: 382085 - DNA, 25 bp, Homo sapien
tagtgtcttggcctgggttcccctc

SEQ ID NO: 382086 - DNA, 25 bp, Homo sapien
gtgatctcagcagacaagagtcggg

SEQ ID NO: 382087 - DNA, 25 bp, Homo sapien
gacggttttaattctgtgcaccatg

SEQ ID NO: 382088 - DNA, 25 bp, Homo sapien
tgcaagggtcatctggtccagcatt

SEQ ID NO: 382089 - DNA, 25 bp, Homo sapien
tcttgggcatcttgtggaagactca

SEQ ID NO: 382090 - DNA, 25 bp, Homo sapien
cattccacgggtttaacaagtcttg

SEQ ID NO: 382091 - DNA, 25 bp, Homo sapien
tataataccactcctccggtaaaga

SEQ ID NO: 382092 - DNA, 25 bp, Homo sapien
gatgagggctcacccttaatggcct

SEQ ID NO: 382093 - DNA, 25 bp, Homo sapien
gaaacattgccgcagactctgcctt

SEQ ID NO: 382094 - DNA, 25 bp, Homo sapien
taatggcctcaccttaactggatca

SEQ ID NO: 382095 - DNA, 25 bp, Homo sapien
catcagaactgctagactgtgtggc

SEQ ID NO: 382096 - DNA, 25 bp, Homo sapien
tgtgtggctcggctcctcaatgtga

SEQ ID NO: 382097 - DNA, 25 bp, Homo sapien
gacccgcggacgcatatttgccttg

SEQ ID NO: 382098 - DNA, 25 bp, Homo sapien
ttgtggtccagacaagacttgagcc

SEQ ID NO: 382099 - DNA, 25 bp, Homo sapien
gacccaagagaacggatggtgcact

SEQ ID NO: 382100 - DNA, 25 bp, Homo sapien
tgaggcctggccatatcatagaggg

SEQ ID NO: 382101 - DNA, 25 bp, Homo sapien
gacgaaatttcctcctactgaggga

SEQ ID NO: 382102 - DNA, 25 bp, Homo sapien
tatcagggttcttccagtgagacag

SEQ ID NO: 382103 - DNA, 25 bp, Homo sapien
aaccccttttgcatgctgagaatat

SEQ ID NO: 382104 - DNA, 25 bp, Homo sapien
tatgctgaatgtgcaaacaaacccc

SEQ ID NO: 382105 - DNA, 25 bp, Homo sapien
accccttttgcatgctgagaatatc

SEQ ID NO: 382106 - DNA, 25 bp, Homo sapien
tgcctaagtatgctgaatgtgcaaa

SEQ ID NO: 382107 - DNA, 25 bp, Homo sapien
aaaggcagagcatttgttctcagac

SEQ ID NO: 382108 - DNA, 25 bp, Homo sapien
gtggatattaagtgttttcacacac

SEQ ID NO: 382109 - DNA, 25 bp, Homo sapien
ttccacaatgtgcaaatactttaaa

SEQ ID NO: 382110 - DNA, 25 bp, Homo sapien
cctctgtgaggtaactggctaaatt

SEQ ID NO: 382111 - DNA, 25 bp, Homo sapien
tgcagtgctgcaatccctgctctct

SEQ ID NO: 382112 - DNA, 25 bp, Homo sapien
tgggagagctctacttctaaacagt

SEQ ID NO: 382113 - DNA, 25 bp, Homo sapien
tgtacactgggattctagaaagact

SEQ ID NO: 382114 - DNA, 25 bp, Homo sapien
gacaatgtattcgtcaagcccctat

SEQ ID NO: 382115 - DNA, 25 bp, Homo sapien
ttcttcgcagaaagtggcatggcct

SEQ ID NO: 382116 - DNA, 25 bp, Homo sapien
ccttgcaggaccgaggcatatgcgg

SEQ ID NO: 382117 - DNA, 25 bp, Homo sapien
aatgctggccggatggtgtcccctt

SEQ ID NO: 382118 - DNA, 25 bp, Homo sapien
tcagtaggccataggaaccatgaag

SEQ ID NO: 382119 - DNA, 25 bp, Homo sapien
gggcggtttcgctcagctcttcccc

SEQ ID NO: 382120 - DNA, 25 bp, Homo sapien
agctggtggccactcggcggccggg

SEQ ID NO: 382121 - DNA, 25 bp, Homo sapien
gcgactcgtggcaaaacgcctggac

SEQ ID NO: 382122 - DNA, 25 bp, Homo sapien
agggagaccccaacttgtcgcacgg

SEQ ID NO: 382123 - DNA, 25 bp, Homo sapien
cctggagtgggcatagctgagtccc

SEQ ID NO: 382124 - DNA, 25 bp, Homo sapien
ggttacacgacttgctcaggcctgt

SEQ ID NO: 382125 - DNA, 25 bp, Homo sapien
tgtccagtgaagtcaagggcagttc

SEQ ID NO: 382126 - DNA, 25 bp, Homo sapien
cacgtgaggttgtcttggtttcaca

SEQ ID NO: 382127 - DNA, 25 bp, Homo sapien
taaagctgaacaacgcaagtgtgaa

SEQ ID NO: 382128 - DNA, 25 bp, Homo sapien
caagagaccatattgtcaagtgacc

SEQ ID NO: 382129 - DNA, 25 bp, Homo sapien
ggaaactacagaataccacaggcaa

SEQ ID NO: 382130 - DNA, 25 bp, Homo sapien
caacatatgtctaagaggaggtcca

SEQ ID NO: 382131 - DNA, 25 bp, Homo sapien
gtcacaaggaagcttgccatccact

SEQ ID NO: 382132 - DNA, 25 bp, Homo sapien
aaggaagcttgccatccacttgcaa

SEQ ID NO: 382133 - DNA, 25 bp, Homo sapien
gaagtcacaaggaagcttgccatcc

SEQ ID NO: 382134 - DNA, 25 bp, Homo sapien
aggatgagaagtcacaaggaagctt

SEQ ID NO: 382135 - DNA, 25 bp, Homo sapien
ctcctgactcaatctgccatccccc

SEQ ID NO: 382136 - DNA, 25 bp, Homo sapien
cctcctgcctccgatgctgctctcc

SEQ ID NO: 382137 - DNA, 25 bp, Homo sapien
tcctgactcaatctgccatccccct

SEQ ID NO: 382138 - DNA, 25 bp, Homo sapien
atgctgctctccaaattcttgctcc

SEQ ID NO: 382139 - DNA, 25 bp, Homo sapien
gcctccgcatctcctagaaacaaag

SEQ ID NO: 382140 - DNA, 25 bp, Homo sapien
tgcacctgaagcagattcacaagct

SEQ ID NO: 382141 - DNA, 25 bp, Homo sapien
gttcaagaccatgcacctgaagcag

SEQ ID NO: 382142 - DNA, 25 bp, Homo sapien
tgagtgcctccgcatctcctagaaa

SEQ ID NO: 382143 - DNA, 25 bp, Homo sapien
cttagtctgccacttaccctggggc

SEQ ID NO: 382144 - DNA, 25 bp, Homo sapien
taacagtcactgtcgccacattttg

SEQ ID NO: 382145 - DNA, 25 bp, Homo sapien
cagtcacaaacactccagaaaattg

SEQ ID NO: 382146 - DNA, 25 bp, Homo sapien
taaagtccagtcacaaacactccag

SEQ ID NO: 382147 - DNA, 25 bp, Homo sapien
actttctctgcccggcgagactcaa

SEQ ID NO: 382148 - DNA, 25 bp, Homo sapien
tcttccagggatgcgtttgcttcac

SEQ ID NO: 382149 - DNA, 25 bp, Homo sapien
caaccatccagacgcctcttcttag

SEQ ID NO: 382150 - DNA, 25 bp, Homo sapien
ccagggatgcgtttgcttcactttc

SEQ ID NO: 382151 - DNA, 25 bp, Homo sapien
tccttgacatactatgacaagggaa

SEQ ID NO: 382152 - DNA, 25 bp, Homo sapien
tatgacaagggaactaatttcccta

SEQ ID NO: 382153 - DNA, 25 bp, Homo sapien
taaattccttgacatactatgacaa

SEQ ID NO: 382154 - DNA, 25 bp, Homo sapien
catactatgacaagggaactaattt

SEQ ID NO: 382155 - DNA, 25 bp, Homo sapien
cctccgcttgttaaatacctcatgg

SEQ ID NO: 382156 - DNA, 25 bp, Homo sapien
gcctgatccgtcctccgtattttct

SEQ ID NO: 382157 - DNA, 25 bp, Homo sapien
tcaaaattatcccctccgcttgtta

SEQ ID NO: 382158 - DNA, 25 bp, Homo sapien
tggccttcctgttacaggttcttgc

SEQ ID NO: 382159 - DNA, 25 bp, Homo sapien
ggctcaatatcccttgaatggaggc

SEQ ID NO: 382160 - DNA, 25 bp, Homo sapien
tatcagctaggtacagttttagcca

SEQ ID NO: 382161 - DNA, 25 bp, Homo sapien
taagttgggcattagcacctgtgac

SEQ ID NO: 382162 - DNA, 25 bp, Homo sapien
tactaagacctatgcctcgactggc

SEQ ID NO: 382163 - DNA, 25 bp, Homo sapien
ggttccatctgtcgctagctcctcc

SEQ ID NO: 382164 - DNA, 25 bp, Homo sapien
catctgtcgctagctcctccactgc

SEQ ID NO: 382165 - DNA, 25 bp, Homo sapien
agggttccatctgtcgctagctcct

SEQ ID NO: 382166 - DNA, 25 bp, Homo sapien
atctgtcgctagctcctccactgcc

SEQ ID NO: 382167 - DNA, 25 bp, Homo sapien
aattccaggtccacatagggtggcc

SEQ ID NO: 382168 - DNA, 25 bp, Homo sapien
ttccaggtccacatagggtggcctt

SEQ ID NO: 382169 - DNA, 25 bp, Homo sapien
catagggtggccttcaagctcttct

SEQ ID NO: 382170 - DNA, 25 bp, Homo sapien
tagggtggccttcaagctcttctca

SEQ ID NO: 382171 - DNA, 25 bp, Homo sapien
ttgtatccccagagctacacgcccc

SEQ ID NO: 382172 - DNA, 25 bp, Homo sapien
agagctacacgccccagaaagagca

SEQ ID NO: 382173 - DNA, 25 bp, Homo sapien
atccccagagctacacgccccagaa

SEQ ID NO: 382174 - DNA, 25 bp, Homo sapien
cccagagctacacgccccagaaaga

SEQ ID NO: 382175 - DNA, 25 bp, Homo sapien
tcacaacggaagagccaaaagagtt

SEQ ID NO: 382176 - DNA, 25 bp, Homo sapien
gacgggccaaggcaccgaccagaga

SEQ ID NO: 382177 - DNA, 25 bp, Homo sapien
cgaccagagactgctggaggctgca

SEQ ID NO: 382178 - DNA, 25 bp, Homo sapien
gaagagaattggtttgatcctcaca

SEQ ID NO: 382179 - DNA, 25 bp, Homo sapien
gcttggagcacgtgtgatctcatcg

SEQ ID NO: 382180 - DNA, 25 bp, Homo sapien
ctctagctatgtgcgggacccaagc

SEQ ID NO: 382181 - DNA, 25 bp, Homo sapien
cgtgtgatctcatcggacagaggag

SEQ ID NO: 382182 - DNA, 25 bp, Homo sapien
gcctgcagtgctctagctatgtgcg

SEQ ID NO: 382183 - DNA, 25 bp, Homo sapien
aaacccggccaattagatttcactg

SEQ ID NO: 382184 - DNA, 25 bp, Homo sapien
tcacagctgtgttttaaacccggcc

SEQ ID NO: 382185 - DNA, 25 bp, Homo sapien
ttttccaaaaggtaccacagcatta

SEQ ID NO: 382186 - DNA, 25 bp, Homo sapien
cattgcaatagtgcaccagcagttc

SEQ ID NO: 382187 - DNA, 25 bp, Homo sapien
gtacatctatggtcgacttgtacgc

SEQ ID NO: 382188 - DNA, 25 bp, Homo sapien
tagcaggcacgtgggatgctctgtc

SEQ ID NO: 382189 - DNA, 25 bp, Homo sapien
gcagatatctgtgtggcatcgtaca

SEQ ID NO: 382190 - DNA, 25 bp, Homo sapien
gctctgtcattagcagatatctgtg

SEQ ID NO: 382191 - DNA, 25 bp, Homo sapien
ctataaaagtgaggtgctggcagga

SEQ ID NO: 382192 - DNA, 25 bp, Homo sapien
aaagtgaggtgctggcaggacgtac

SEQ ID NO: 382193 - DNA, 25 bp, Homo sapien
tataaaagtgaggtgctggcaggac

SEQ ID NO: 382194 - DNA, 25 bp, Homo sapien
taaaagtgaggtgctggcaggacgt

SEQ ID NO: 382195 - DNA, 25 bp, Homo sapien
caggttgactgaaggatggtggggc

SEQ ID NO: 382196 - DNA, 25 bp, Homo sapien
gatggtggggcctttagcagaaaca

SEQ ID NO: 382197 - DNA, 25 bp, Homo sapien
gggcctttagcagaaacaaggagga

SEQ ID NO: 382198 - DNA, 25 bp, Homo sapien
gaaacaaggaggataggagaacatg

SEQ ID NO: 382199 - DNA, 25 bp, Homo sapien
tgctagatgttgaggattcaatgat

SEQ ID NO: 382200 - DNA, 25 bp, Homo sapien
gtgctagatgttgaggattcaatga

SEQ ID NO: 382201 - DNA, 25 bp, Homo sapien
ctgagggctgactggtataggaaca

SEQ ID NO: 382202 - DNA, 25 bp, Homo sapien
ggccaatcaacttctctcttctagg

SEQ ID NO: 382203 - DNA, 25 bp, Homo sapien
cctgcatgaaattgcctcctgaggg

SEQ ID NO: 382204 - DNA, 25 bp, Homo sapien
ggcagccaggtttatcctgcatgaa

SEQ ID NO: 382205 - DNA, 25 bp, Homo sapien
tgaatcaagagaccgagttgcacac

SEQ ID NO: 382206 - DNA, 25 bp, Homo sapien
tatgaatcaagagaccgagttgcac

SEQ ID NO: 382207 - DNA, 25 bp, Homo sapien
gatatgaatcaagagaccgagttgc

SEQ ID NO: 382208 - DNA, 25 bp, Homo sapien
ctagatatgaatcaagagaccgagt

SEQ ID NO: 382209 - DNA, 25 bp, Homo sapien
gggcttaaagaagtccagaccacca

SEQ ID NO: 382210 - DNA, 25 bp, Homo sapien
ggcttaaagaagtccagaccaccat

SEQ ID NO: 382211 - DNA, 25 bp, Homo sapien
cttggcagctccaccagaagtccat

SEQ ID NO: 382212 - DNA, 25 bp, Homo sapien
ggcagctccaccagaagtccattct

SEQ ID NO: 382213 - DNA, 25 bp, Homo sapien
gaaggccggggagcctgagcacaga

SEQ ID NO: 382214 - DNA, 25 bp, Homo sapien
agcacagacagctgatctgaatcca

SEQ ID NO: 382215 - DNA, 25 bp, Homo sapien
gacagctgatctgaatccaaatttt

SEQ ID NO: 382216 - DNA, 25 bp, Homo sapien
agctgatctgaatccaaattttagc

SEQ ID NO: 382217 - DNA, 25 bp, Homo sapien
ccctagggtcagaggaagccatgga

SEQ ID NO: 382218 - DNA, 25 bp, Homo sapien
ctagggtcagaggaagccatggatc

SEQ ID NO: 382219 - DNA, 25 bp, Homo sapien
ggatctctgcttgggggactccata

SEQ ID NO: 382220 - DNA, 25 bp, Homo sapien
gccatggatctctgcttgggggact

SEQ ID NO: 382221 - DNA, 25 bp, Homo sapien
gcctgcaggcacactgcgatgagca

SEQ ID NO: 382222 - DNA, 25 bp, Homo sapien
cactgcgatgagcacacctgtgcat

SEQ ID NO: 382223 - DNA, 25 bp, Homo sapien
acacatgggcgggaaagccgcctgc

SEQ ID NO: 382224 - DNA, 25 bp, Homo sapien
gggaaagccgcctgcaggcacactg

SEQ ID NO: 382225 - DNA, 25 bp, Homo sapien
gcatctcttggactctggttggtga

SEQ ID NO: 382226 - DNA, 25 bp, Homo sapien
atgcccataaagcagctggagtcca

SEQ ID NO: 382227 - DNA, 25 bp, Homo sapien
gtccattttgactggttggtaccag

SEQ ID NO: 382228 - DNA, 25 bp, Homo sapien
ggtatctcaccaacatatgcccata

SEQ ID NO: 382229 - DNA, 25 bp, Homo sapien
aattgagcaatgcttcttctgtttc

SEQ ID NO: 382230 - DNA, 25 bp, Homo sapien
ttaattgagcaatgcttcttctgtt

SEQ ID NO: 382231 - DNA, 25 bp, Homo sapien
ttgagcaatgcttcttctgtttcac

SEQ ID NO: 382232 - DNA, 25 bp, Homo sapien
attgagcaatgcttcttctgtttca

SEQ ID NO: 382233 - DNA, 25 bp, Homo sapien
gaaatgaggcataccttcccaaatt

SEQ ID NO: 382234 - DNA, 25 bp, Homo sapien
tgaggcataccttcccaaattttat

SEQ ID NO: 382235 - DNA, 25 bp, Homo sapien
gtgaaatgaggcataccttcccaaa

SEQ ID NO: 382236 - DNA, 25 bp, Homo sapien
ttgtgaaatgaggcataccttccca

SEQ ID NO: 382237 - DNA, 25 bp, Homo sapien
agtttcgtggtagttcatactcttc

SEQ ID NO: 382238 - DNA, 25 bp, Homo sapien
gtatgtatgagtaaatgcttcatca

SEQ ID NO: 382239 - DNA, 25 bp, Homo sapien
tatttgattgaaggacggagggaaa

SEQ ID NO: 382240 - DNA, 25 bp, Homo sapien
tcagtagagaatggtgagagtagct

SEQ ID NO: 382241 - DNA, 25 bp, Homo sapien
ccccagccaagcttgtcatcttaga

SEQ ID NO: 382242 - DNA, 25 bp, Homo sapien
tgggggtgtccgcagcaggcctgtt

SEQ ID NO: 382243 - DNA, 25 bp, Homo sapien
gccaagcttgtcatcttagatgcct

SEQ ID NO: 382244 - DNA, 25 bp, Homo sapien
cagccaagcttgtcatcttagatgc

SEQ ID NO: 382245 - DNA, 25 bp, Homo sapien
ggttttgccgtgcacagttggagct

SEQ ID NO: 382246 - DNA, 25 bp, Homo sapien
gcctcatgagctggttttcgcaaag

SEQ ID NO: 382247 - DNA, 25 bp, Homo sapien
aagaagcgaggccatcatccagaaa

SEQ ID NO: 382248 - DNA, 25 bp, Homo sapien
cacgacgccttgtttattgatttca

SEQ ID NO: 382249 - DNA, 25 bp, Homo sapien
aatttagtgttttggatagccctgg

SEQ ID NO: 382250 - DNA, 25 bp, Homo sapien
tgtcacacaactctggagggcactc

SEQ ID NO: 382251 - DNA, 25 bp, Homo sapien
cactctcagaggtgtgttgccccta

SEQ ID NO: 382252 - DNA, 25 bp, Homo sapien
gccggagcagaccaagacactgcgt

SEQ ID NO: 382253 - DNA, 25 bp, Homo sapien
acactgcagacagtttcgttttgct

SEQ ID NO: 382254 - DNA, 25 bp, Homo sapien
tgtccccaagcaatagtgcacgtat

SEQ ID NO: 382255 - DNA, 25 bp, Homo sapien
caagcaatagtgcacgtatcacagg

SEQ ID NO: 382256 - DNA, 25 bp, Homo sapien
ctgccttctttaagttgtccccaag

SEQ ID NO: 382257 - DNA, 25 bp, Homo sapien
ttcctgtttcttgaccagtccatgg

SEQ ID NO: 382258 - DNA, 25 bp, Homo sapien
ggccccaagcgatattgctttccag

SEQ ID NO: 382259 - DNA, 25 bp, Homo sapien
ttctcaggccccaagcgatattgct

SEQ ID NO: 382260 - DNA, 25 bp, Homo sapien
ggagattccatagctagcctgcttc

SEQ ID NO: 382261 - DNA, 25 bp, Homo sapien
gcaaacatgaacaaggcttgattcc

SEQ ID NO: 382262 - DNA, 25 bp, Homo sapien
tgccttcaaggagcgtagggtcctc

SEQ ID NO: 382263 - DNA, 25 bp, Homo sapien
tcctcaaccaggtcacgtctctggg

SEQ ID NO: 382264 - DNA, 25 bp, Homo sapien
cctgggcctcgacttggagcctgga

SEQ ID NO: 382265 - DNA, 25 bp, Homo sapien
ccgcgggcccagtgccttcccatcc

SEQ ID NO: 382266 - DNA, 25 bp, Homo sapien
tggtcctctggctctgcttcctaca

SEQ ID NO: 382267 - DNA, 25 bp, Homo sapien
caccgcgggcccagtgccttcccat

SEQ ID NO: 382268 - DNA, 25 bp, Homo sapien
cccatcctggtcctctggctctgct

SEQ ID NO: 382269 - DNA, 25 bp, Homo sapien
gattgcatctttgtgttgttctgat

SEQ ID NO: 382270 - DNA, 25 bp, Homo sapien
agggtcgggagggaagtacagcttg

SEQ ID NO: 382271 - DNA, 25 bp, Homo sapien
ggagggaagtacagcttgttctgat

SEQ ID NO: 382272 - DNA, 25 bp, Homo sapien
cagcttgttctgattgcatctttgt

SEQ ID NO: 382273 - DNA, 25 bp, Homo sapien
gtgatgagggggagagggaccaaat

SEQ ID NO: 382274 - DNA, 25 bp, Homo sapien
ctgtgtgatgagggggagagggacc

SEQ ID NO: 382275 - DNA, 25 bp, Homo sapien
tgtgatgagggggagagggaccaaa

SEQ ID NO: 382276 - DNA, 25 bp, Homo sapien
tgtgtgatgagggggagagggacca

SEQ ID NO: 382277 - DNA, 25 bp, Homo sapien
tgcaaaatcgcaggcatgcagagat

SEQ ID NO: 382278 - DNA, 25 bp, Homo sapien
ctgcaaaatcgcaggcatgcagaga

SEQ ID NO: 382279 - DNA, 25 bp, Homo sapien
aacatctgtgccgtccactgctcga

SEQ ID NO: 382280 - DNA, 25 bp, Homo sapien
aacattcatgccctcaactgcctgt

SEQ ID NO: 382281 - DNA, 25 bp, Homo sapien
gctcgatgaacattcatgccctcaa

SEQ ID NO: 382282 - DNA, 25 bp, Homo sapien
cgtccactgctcgatgaacattcat

SEQ ID NO: 382283 - DNA, 25 bp, Homo sapien
tccatgtttgcgtggaggagctaac

SEQ ID NO: 382284 - DNA, 25 bp, Homo sapien
caacagagggacagacgaagcctct

SEQ ID NO: 382285 - DNA, 25 bp, Homo sapien
tgatggctcagacaaagaataattc

SEQ ID NO: 382286 - DNA, 25 bp, Homo sapien
agaataattcaggagatggtaacta

SEQ ID NO: 382287 - DNA, 25 bp, Homo sapien
cacaggtaaacaaagggcagctcag

SEQ ID NO: 382288 - DNA, 25 bp, Homo sapien
ggtcttcctgcaagccacgctgcat

SEQ ID NO: 382289 - DNA, 25 bp, Homo sapien
tcagaaaagctaaagcctgggggtc

SEQ ID NO: 382290 - DNA, 25 bp, Homo sapien
cctgggggtcttcctgcaagccacg

SEQ ID NO: 382291 - DNA, 25 bp, Homo sapien
ccggagtcagggcttaggtttctga

SEQ ID NO: 382292 - DNA, 25 bp, Homo sapien
ggtcacccatctgggttcgtccact

SEQ ID NO: 382293 - DNA, 25 bp, Homo sapien
tgcccaaagccgaatcttcaggata

SEQ ID NO: 382294 - DNA, 25 bp, Homo sapien
tagagttcaaatggcgtttctaccc

SEQ ID NO: 382295 - DNA, 25 bp, Homo sapien
ttcaggactgtggctttgatgccag

SEQ ID NO: 382296 - DNA, 25 bp, Homo sapien
ggactgtggctttgatgccagttac

SEQ ID NO: 382297 - DNA, 25 bp, Homo sapien
tcaggactgtggctttgatgccagt

SEQ ID NO: 382298 - DNA, 25 bp, Homo sapien
caggactgtggctttgatgccagtt

SEQ ID NO: 382299 - DNA, 25 bp, Homo sapien
tccatgtcaagaaacgagctgtgtg

SEQ ID NO: 382300 - DNA, 25 bp, Homo sapien
gcttgggatccgagaagtttcagct

SEQ ID NO: 382301 - DNA, 25 bp, Homo sapien
ccttggagaaagaggccccctcctg

SEQ ID NO: 382302 - DNA, 25 bp, Homo sapien
ttagcttgggatccgagaagtttca

SEQ ID NO: 382303 - DNA, 25 bp, Homo sapien
gaacactttggtggtgtaactgtgt

SEQ ID NO: 382304 - DNA, 25 bp, Homo sapien
aaactcagccaggaggaacactttg

SEQ ID NO: 382305 - DNA, 25 bp, Homo sapien
ctgaacaagataggcaaactcagcc

SEQ ID NO: 382306 - DNA, 25 bp, Homo sapien
tcactgaacaagataggcaaactca

SEQ ID NO: 382307 - DNA, 25 bp, Homo sapien
gagaaacgggctgcaagggtactaa

SEQ ID NO: 382308 - DNA, 25 bp, Homo sapien
tcagtataattccaggcaagtgccg

SEQ ID NO: 382309 - DNA, 25 bp, Homo sapien
caagtgccgtgttctgaagacgcta

SEQ ID NO: 382310 - DNA, 25 bp, Homo sapien
tactaaggtactacatggaggagct

SEQ ID NO: 382311 - DNA, 25 bp, Homo sapien
ggaagaggaagaggaagaaggaaga

SEQ ID NO: 382312 - DNA, 25 bp, Homo sapien
aagaggaagaggaagaggaagaagg

SEQ ID NO: 382313 - DNA, 25 bp, Homo sapien
gaaagaagaaagaagaagaggaaga

SEQ ID NO: 382314 - DNA, 25 bp, Homo sapien
gaggaagaggaagaggaagaaggaa

SEQ ID NO: 382315 - DNA, 25 bp, Homo sapien
gctggcgttagcgagctctcttctg

SEQ ID NO: 382316 - DNA, 25 bp, Homo sapien
ctcttctgggttgcacacaagcctc

SEQ ID NO: 382317 - DNA, 25 bp, Homo sapien
gcgttagcgagctctcttctgggtt

SEQ ID NO: 382318 - DNA, 25 bp, Homo sapien
cttcttgctggcgttagcgagctct

SEQ ID NO: 382319 - DNA, 25 bp, Homo sapien
cctacccctaagtagaatatcataa

SEQ ID NO: 382320 - DNA, 25 bp, Homo sapien
caaatcgaaacaaaccatatttggt

SEQ ID NO: 382321 - DNA, 25 bp, Homo sapien
tggtatacatacttatcctacccct

SEQ ID NO: 382322 - DNA, 25 bp, Homo sapien
aaaatcaaatcgaaacaaaccatat

SEQ ID NO: 382323 - DNA, 25 bp, Homo sapien
aacaggatccaaaagggatttggct

SEQ ID NO: 382324 - DNA, 25 bp, Homo sapien
ggatttggcttttgaatacggatgc

SEQ ID NO: 382325 - DNA, 25 bp, Homo sapien
atgtggccgagtggcccatgcctgc

SEQ ID NO: 382326 - DNA, 25 bp, Homo sapien
tttgaatacggatgcatgagatgtg

SEQ ID NO: 382327 - DNA, 25 bp, Homo sapien
tccccaggtctaggcagagaccctt

SEQ ID NO: 382328 - DNA, 25 bp, Homo sapien
ggtctggctctgtgagtatagtctt

SEQ ID NO: 382329 - DNA, 25 bp, Homo sapien
ttttctcttgtaggaagcccagccg

SEQ ID NO: 382330 - DNA, 25 bp, Homo sapien
ccggttgttaccaatccatagtact

SEQ ID NO: 382331 - DNA, 25 bp, Homo sapien
gcaatttaaataataaaataggcga

SEQ ID NO: 382332 - DNA, 25 bp, Homo sapien
ctgcaatttaaataataaaataggc

SEQ ID NO: 382333 - DNA, 25 bp, Homo sapien
tgcaatttaaataataaaataggcg

SEQ ID NO: 382334 - DNA, 25 bp, Homo sapien
tgtgtgaaattggataaagtagaca

SEQ ID NO: 382335 - DNA, 25 bp, Homo sapien
ctgtgtgaaattggataaagtagac

SEQ ID NO: 382336 - DNA, 25 bp, Homo sapien
gtgtgaaattggataaagtagacat

SEQ ID NO: 382337 - DNA, 25 bp, Homo sapien
cattggagtgttcccgtctcttgga

SEQ ID NO: 382338 - DNA, 25 bp, Homo sapien
gatggtggccttcgattcttctaga

SEQ ID NO: 382339 - DNA, 25 bp, Homo sapien
cagctgttgtgttctggcgccaatt

SEQ ID NO: 382340 - DNA, 25 bp, Homo sapien
catcaactttggcttggagggcctc

SEQ ID NO: 382341 - DNA, 25 bp, Homo sapien
aaatgacattcacttgcccggaaag

SEQ ID NO: 382342 - DNA, 25 bp, Homo sapien
gataaatgctcctatgtccgtctgg

SEQ ID NO: 382343 - DNA, 25 bp, Homo sapien
gacgtcagatgttagcttggtgcct

SEQ ID NO: 382344 - DNA, 25 bp, Homo sapien
tccgtctggtaagcaagtgatagct

SEQ ID NO: 382345 - DNA, 25 bp, Homo sapien
tctaaattttgtcctagcaccctga

SEQ ID NO: 382346 - DNA, 25 bp, Homo sapien
tggaataacgagttctacaagcatt

SEQ ID NO: 382347 - DNA, 25 bp, Homo sapien
aaattttgtcctagcaccctgaggc

SEQ ID NO: 382348 - DNA, 25 bp, Homo sapien
cttgtgattggaataacgagttcta

SEQ ID NO: 382349 - DNA, 25 bp, Homo sapien
tccgctgtctcgaattccctgggtg

SEQ ID NO: 382350 - DNA, 25 bp, Homo sapien
taacgatatggtgccgcggtactag

SEQ ID NO: 382351 - DNA, 25 bp, Homo sapien
taaacgcgtacagagtttgagccca

SEQ ID NO: 382352 - DNA, 25 bp, Homo sapien
tcagtcaatatgcttagtaaacgcg

SEQ ID NO: 382353 - DNA, 25 bp, Homo sapien
gagagtgcactactccgtgcgcagg

SEQ ID NO: 382354 - DNA, 25 bp, Homo sapien
cggtgccgccgacgagagtgcacta

SEQ ID NO: 382355 - DNA, 25 bp, Homo sapien
ggaaaactacaggtcccgaaatgca

SEQ ID NO: 382356 - DNA, 25 bp, Homo sapien
accgctacgtgctcaggcgcagtgg

SEQ ID NO: 382357 - DNA, 25 bp, Homo sapien
gcctggccgcgcacaaaccacgact

SEQ ID NO: 382358 - DNA, 25 bp, Homo sapien
cgcctggccgcgcacaaaccacgac

SEQ ID NO: 382359 - DNA, 25 bp, Homo sapien
cactcccttctaccccgacgtcaca

SEQ ID NO: 382360 - DNA, 25 bp, Homo sapien
gggccggccgcgacatcgcagcatc

SEQ ID NO: 382361 - DNA, 25 bp, Homo sapien
ccttctaccccgacgtcacacactt

SEQ ID NO: 382362 - DNA, 25 bp, Homo sapien
ccgcgacatcgcagcatcccaaaga

SEQ ID NO: 382363 - DNA, 25 bp, Homo sapien
ggcctggcggccttcaccttccgga

SEQ ID NO: 382364 - DNA, 25 bp, Homo sapien
ttgacggcgcccgacggccaggtcc

SEQ ID NO: 382365 - DNA, 25 bp, Homo sapien
cggcgcgaccgggagccggcagact

SEQ ID NO: 382366 - DNA, 25 bp, Homo sapien
cgaccgggagccggcagacttttgt

SEQ ID NO: 382367 - DNA, 25 bp, Homo sapien
cattccaggggattgcttgtctccc

SEQ ID NO: 382368 - DNA, 25 bp, Homo sapien
ccgtaggcttgaaccaatcctgggc

SEQ ID NO: 382369 - DNA, 25 bp, Homo sapien
tgcttgtctccctagactctccggg

SEQ ID NO: 382370 - DNA, 25 bp, Homo sapien
caccgtaggcttgaaccaatcctgg

SEQ ID NO: 382371 - DNA, 25 bp, Homo sapien
ccaacactcagggagcaacacccgc

SEQ ID NO: 382372 - DNA, 25 bp, Homo sapien
tgggggctagttcagggtcctctcc

SEQ ID NO: 382373 - DNA, 25 bp, Homo sapien
ctcggagggcgacgtcggtgcctgt

SEQ ID NO: 382374 - DNA, 25 bp, Homo sapien
ttcccccagagctgcggatgaggac

SEQ ID NO: 382375 - DNA, 25 bp, Homo sapien
aagcgatgacaggtgtccgggtctc

SEQ ID NO: 382376 - DNA, 25 bp, Homo sapien
gtgtccgggtctctccctgctggaa

SEQ ID NO: 382377 - DNA, 25 bp, Homo sapien
atttcagggatccaccgagaagcga

SEQ ID NO: 382378 - DNA, 25 bp, Homo sapien
ggatccaccgagaagcgatgacagg

SEQ ID NO: 382379 - DNA, 25 bp, Homo sapien
tgcccgatctcagctgcccagactc

SEQ ID NO: 382380 - DNA, 25 bp, Homo sapien
gccctgcccgatctcagctgcccag

SEQ ID NO: 382381 - DNA, 25 bp, Homo sapien
cctgcccgatctcagctgcccagac

SEQ ID NO: 382382 - DNA, 25 bp, Homo sapien
agccctgcccgatctcagctgccca

SEQ ID NO: 382383 - DNA, 25 bp, Homo sapien
ccaatcataaggaggggtaggtcca

SEQ ID NO: 382384 - DNA, 25 bp, Homo sapien
ttggccctctacacggaagcctggg

SEQ ID NO: 382385 - DNA, 25 bp, Homo sapien
tgggcatcacttggccctctacacg

SEQ ID NO: 382386 - DNA, 25 bp, Homo sapien
caggtgaaccttgggcatcacttgg

SEQ ID NO: 382387 - DNA, 25 bp, Homo sapien
cacgaatcatgctgcgccctttgtc

SEQ ID NO: 382388 - DNA, 25 bp, Homo sapien
tctccttccagccacgaatcatgct

SEQ ID NO: 382389 - DNA, 25 bp, Homo sapien
tgctgcgccctttgtctgagctttc

SEQ ID NO: 382390 - DNA, 25 bp, Homo sapien
agctgttctcattcccggcctctac

SEQ ID NO: 382391 - DNA, 25 bp, Homo sapien
gtgaattcactcctgatcaacacaa

SEQ ID NO: 382392 - DNA, 25 bp, Homo sapien
ccccaacagacaagtacatgagagg

SEQ ID NO: 382393 - DNA, 25 bp, Homo sapien
cccaacagacaagtacatgagaggc

SEQ ID NO: 382394 - DNA, 25 bp, Homo sapien
aattcactcctgatcaacacaagcc

SEQ ID NO: 382395 - DNA, 25 bp, Homo sapien
gaatgcacactcgaagaaaaggcct

SEQ ID NO: 382396 - DNA, 25 bp, Homo sapien
cagaagtccagcgaataaatgtaca

SEQ ID NO: 382397 - DNA, 25 bp, Homo sapien
taatcaagctactggtgtagaactg

SEQ ID NO: 382398 - DNA, 25 bp, Homo sapien
taaaggaaccaaaacggcctgagca

SEQ ID NO: 382399 - DNA, 25 bp, Homo sapien
ttccaggctacctgaggcaatgact

SEQ ID NO: 382400 - DNA, 25 bp, Homo sapien
tagaggtgaaggtttgacgccatgc

SEQ ID NO: 382401 - DNA, 25 bp, Homo sapien
ggagctttaaacactgacttcattt

SEQ ID NO: 382402 - DNA, 25 bp, Homo sapien
tcactctggcatcagtacaaaagac

SEQ ID NO: 382403 - DNA, 25 bp, Homo sapien
ttctttgatacattttcaccccagc

SEQ ID NO: 382404 - DNA, 25 bp, Homo sapien
taatgctccgtgcaccttggctcag

SEQ ID NO: 382405 - DNA, 25 bp, Homo sapien
gcaaggttgggtactgtggactcac

SEQ ID NO: 382406 - DNA, 25 bp, Homo sapien
taccttagagaacaggtgaggccac

SEQ ID NO: 382407 - DNA, 25 bp, Homo sapien
ttgccaccgcaggtttcaagaagga

SEQ ID NO: 382408 - DNA, 25 bp, Homo sapien
tttcaaatgacctgtgactccccac

SEQ ID NO: 382409 - DNA, 25 bp, Homo sapien
acacacaaatgcagatggtttcagt

SEQ ID NO: 382410 - DNA, 25 bp, Homo sapien
cacaaatgcagatggtttcagtatg

SEQ ID NO: 382411 - DNA, 25 bp, Homo sapien
aatgacctgtgactccccacatctg

SEQ ID NO: 382412 - DNA, 25 bp, Homo sapien
tgggcacatgtggcaaatgaggtct

SEQ ID NO: 382413 - DNA, 25 bp, Homo sapien
taagcaaggccaaaggccatggtgg

SEQ ID NO: 382414 - DNA, 25 bp, Homo sapien
ggcaaatgaggtctgggttaagacc

SEQ ID NO: 382415 - DNA, 25 bp, Homo sapien
atggtggctgaggaatggcctgcag

SEQ ID NO: 382416 - DNA, 25 bp, Homo sapien
aacgatgagtgtaccctcaggcctg

SEQ ID NO: 382417 - DNA, 25 bp, Homo sapien
caagtgtgttctaagcccaccagtg

SEQ ID NO: 382418 - DNA, 25 bp, Homo sapien
taggcactgggtgacaacgatgagt

SEQ ID NO: 382419 - DNA, 25 bp, Homo sapien
gcatcaacacactggaatcaaggta

SEQ ID NO: 382420 - DNA, 25 bp, Homo sapien
agttgggactacacacccagtaagt

SEQ ID NO: 382421 - DNA, 25 bp, Homo sapien
catacccggccagtactggttcttt

SEQ ID NO: 382422 - DNA, 25 bp, Homo sapien
aaagccagcatacccggccagtact

SEQ ID NO: 382423 - DNA, 25 bp, Homo sapien
agcatacccggccagtactggttct

SEQ ID NO: 382424 - DNA, 25 bp, Homo sapien
caggtaaaagccagcatacccggcc

SEQ ID NO: 382425 - DNA, 25 bp, Homo sapien
taaataaattagcagggcctagtcc

SEQ ID NO: 382426 - DNA, 25 bp, Homo sapien
cacatgagtgtctactggtcagcag

SEQ ID NO: 382427 - DNA, 25 bp, Homo sapien
tacctaattttccaagatggccaga

SEQ ID NO: 382428 - DNA, 25 bp, Homo sapien
ccacgggcactgttgggatgatcag

SEQ ID NO: 382429 - DNA, 25 bp, Homo sapien
taatcattccgaggagtgcaaaaag

SEQ ID NO: 382430 - DNA, 25 bp, Homo sapien
gctgctgccgatgtctgttgtaaga

SEQ ID NO: 382431 - DNA, 25 bp, Homo sapien
atttcagaggtaatcattccgagga

SEQ ID NO: 382432 - DNA, 25 bp, Homo sapien
aagactacccctattaaacatatca

SEQ ID NO: 382433 - DNA, 25 bp, Homo sapien
gccatgggcgagatattgtccagat

SEQ ID NO: 382434 - DNA, 25 bp, Homo sapien
taatccacagggatccagcttgcca

SEQ ID NO: 382435 - DNA, 25 bp, Homo sapien
cttccttgtcggcaaagtggtggag

SEQ ID NO: 382436 - DNA, 25 bp, Homo sapien
gtggaggatgagtgagaggcagccg

SEQ ID NO: 382437 - DNA, 25 bp, Homo sapien
agtgtgcagtcatcccccaaaaagc

SEQ ID NO: 382438 - DNA, 25 bp, Homo sapien
gtctaacccagcccaaaggtggatg

SEQ ID NO: 382439 - DNA, 25 bp, Homo sapien
aggctactttgagggctttgtcaag

SEQ ID NO: 382440 - DNA, 25 bp, Homo sapien
tgagtggtcgaaatttaggtctgag

SEQ ID NO: 382441 - DNA, 25 bp, Homo sapien
gacagggagactctaggactaccat

SEQ ID NO: 382442 - DNA, 25 bp, Homo sapien
cactatatagcatttcacactgcgg

SEQ ID NO: 382443 - DNA, 25 bp, Homo sapien
gctccaagaaaacccctgtgtgagg

SEQ ID NO: 382444 - DNA, 25 bp, Homo sapien
cattcaacagtagagcaaaggacct

SEQ ID NO: 382445 - DNA, 25 bp, Homo sapien
gattgattgctcagtggtgatgtct

SEQ ID NO: 382446 - DNA, 25 bp, Homo sapien
gagtgtagtagtgtacatcgtactc

SEQ ID NO: 382447 - DNA, 25 bp, Homo sapien
aatctcggctcatgattctcgtgcc

SEQ ID NO: 382448 - DNA, 25 bp, Homo sapien
taagcagctaggttcatcagttact

SEQ ID NO: 382449 - DNA, 25 bp, Homo sapien
cagatgagtctctgcggagacctct

SEQ ID NO: 382450 - DNA, 25 bp, Homo sapien
ctctgcggagacctctctgttggtg

SEQ ID NO: 382451 - DNA, 25 bp, Homo sapien
ggcacagatgagtctctgcggagac

SEQ ID NO: 382452 - DNA, 25 bp, Homo sapien
tgagtctctgcggagacctctctgt

SEQ ID NO: 382453 - DNA, 25 bp, Homo sapien
ggaggacaaggagcctcaggtggag

SEQ ID NO: 382454 - DNA, 25 bp, Homo sapien
ggaagtcccgggaggctggagactc

SEQ ID NO: 382455 - DNA, 25 bp, Homo sapien
gacctgtccacactgcctcctagtg

SEQ ID NO: 382456 - DNA, 25 bp, Homo sapien
agcagtcctacagagacctgtccac

SEQ ID NO: 382457 - DNA, 25 bp, Homo sapien
tgtccacactgcctcctagtggtcg

SEQ ID NO: 382458 - DNA, 25 bp, Homo sapien
tcctagtggtcgctccatcaccttc

SEQ ID NO: 382459 - DNA, 25 bp, Homo sapien
gcccggcagcaacactcacgtattg

SEQ ID NO: 382460 - DNA, 25 bp, Homo sapien
cacttgagaatatcagttacctggg

SEQ ID NO: 382461 - DNA, 25 bp, Homo sapien
cccacccgtgtcctgagagttcaag

SEQ ID NO: 382462 - DNA, 25 bp, Homo sapien
tcacgtattgagtttagggacccac

SEQ ID NO: 382463 - DNA, 25 bp, Homo sapien
gagagggatgggacaggggaccgtg

SEQ ID NO: 382464 - DNA, 25 bp, Homo sapien
tcccagagagggatgggacagggga

SEQ ID NO: 382465 - DNA, 25 bp, Homo sapien
ctgtcccagagagggatgggacagg

SEQ ID NO: 382466 - DNA, 25 bp, Homo sapien
agggatgggacaggggaccgtgaca

SEQ ID NO: 382467 - DNA, 25 bp, Homo sapien
ccaggagatgcctggatgggtccag

SEQ ID NO: 382468 - DNA, 25 bp, Homo sapien
tgagtctgctgttccgggtgagccc

SEQ ID NO: 382469 - DNA, 25 bp, Homo sapien
caggagatgcctggatgggtccagg

SEQ ID NO: 382470 - DNA, 25 bp, Homo sapien
gttgagtctgctgttccgggtgagc

SEQ ID NO: 382471 - DNA, 25 bp, Homo sapien
caagaatcttgagctgtatctggga

SEQ ID NO: 382472 - DNA, 25 bp, Homo sapien
gcccagaagtccaagcaagaatctt

SEQ ID NO: 382473 - DNA, 25 bp, Homo sapien
gcttagatcacgagcatactcctga

SEQ ID NO: 382474 - DNA, 25 bp, Homo sapien
aagtaagtttgattccctctcggag

SEQ ID NO: 382475 - DNA, 25 bp, Homo sapien
actaagtgcgctgcatgcatctccc

SEQ ID NO: 382476 - DNA, 25 bp, Homo sapien
taaaaggacttggtatgtaccaggc

SEQ ID NO: 382477 - DNA, 25 bp, Homo sapien
aatacaggtcggcagtctcttcccc

SEQ ID NO: 382478 - DNA, 25 bp, Homo sapien
ggagaacacttatcacataatgctg

SEQ ID NO: 382479 - DNA, 25 bp, Homo sapien
taagcaagagagacctgtacagttt

SEQ ID NO: 382480 - DNA, 25 bp, Homo sapien
gaatgtgggcggaactattccacag

SEQ ID NO: 382481 - DNA, 25 bp, Homo sapien
caaggacggcacatttgtttgccaa

SEQ ID NO: 382482 - DNA, 25 bp, Homo sapien
tattccacaggagacaaggagaagc

SEQ ID NO: 382483 - DNA, 25 bp, Homo sapien
cacaaggaggactgcaatgactaac

SEQ ID NO: 382484 - DNA, 25 bp, Homo sapien
ttaacaagtcaaagctgggaagtgc

SEQ ID NO: 382485 - DNA, 25 bp, Homo sapien
taaacccctgaaatgcagaggcact

SEQ ID NO: 382486 - DNA, 25 bp, Homo sapien
tcttacaagggcatacaacggcttt

SEQ ID NO: 382487 - DNA, 25 bp, Homo sapien
gctatatacccttagttatcacccc

SEQ ID NO: 382488 - DNA, 25 bp, Homo sapien
tgtacagtgagcaccacaattttag

SEQ ID NO: 382489 - DNA, 25 bp, Homo sapien
acagattgtgtacagtgagcaccac

SEQ ID NO: 382490 - DNA, 25 bp, Homo sapien
cccgctagtgaaccactaatctatt

SEQ ID NO: 382491 - DNA, 25 bp, Homo sapien
caccaggccggtgtttcaacagcgt

SEQ ID NO: 382492 - DNA, 25 bp, Homo sapien
tcatatggccaactgcaccaggccg

SEQ ID NO: 382493 - DNA, 25 bp, Homo sapien
tgcaccaggccggtgtttcaacagc

SEQ ID NO: 382494 - DNA, 25 bp, Homo sapien
aagaccctgaagcatcatatggcca

SEQ ID NO: 382495 - DNA, 25 bp, Homo sapien
cattcaacgtctacatcgagtccga

SEQ ID NO: 382496 - DNA, 25 bp, Homo sapien
caggtcgtgctatgtcgttgaaaac

SEQ ID NO: 382497 - DNA, 25 bp, Homo sapien
caagaagctggagcactcgaacgac

SEQ ID NO: 382498 - DNA, 25 bp, Homo sapien
gctgagctacatccgctccaagaag

SEQ ID NO: 382499 - DNA, 25 bp, Homo sapien
gatcctgtctaacaccacagcggtg

SEQ ID NO: 382500 - DNA, 25 bp, Homo sapien
ggatgatcctgtctaacaccacagc

SEQ ID NO: 382501 - DNA, 25 bp, Homo sapien
gatgatcctgtctaacaccacagcg

SEQ ID NO: 382502 - DNA, 25 bp, Homo sapien
ctgtctaacaccacagcggtgacgc

SEQ ID NO: 382503 - DNA, 25 bp, Homo sapien
tgcctccaccatccctttactcact

SEQ ID NO: 382504 - DNA, 25 bp, Homo sapien
gcaagctacaaaagctgaggggaca

SEQ ID NO: 382505 - DNA, 25 bp, Homo sapien
ccctttactcactgtgcaagctaca

SEQ ID NO: 382506 - DNA, 25 bp, Homo sapien
accatccctttactcactgtgcaag

SEQ ID NO: 382507 - DNA, 25 bp, Homo sapien
aggccacagtttgagaacgttcagc

SEQ ID NO: 382508 - DNA, 25 bp, Homo sapien
tgggcctgacaaggccacagtttga

SEQ ID NO: 382509 - DNA, 25 bp, Homo sapien
cagatggattttgaacatctctggc

SEQ ID NO: 382510 - DNA, 25 bp, Homo sapien
aggcagaagcagaaacggccaggaa

SEQ ID NO: 382511 - DNA, 25 bp, Homo sapien
ctctccatcacccatagagaggtct

SEQ ID NO: 382512 - DNA, 25 bp, Homo sapien
aaagcaccagactcaagccacaccc

SEQ ID NO: 382513 - DNA, 25 bp, Homo sapien
tggcctgactctctgagtattcagt

SEQ ID NO: 382514 - DNA, 25 bp, Homo sapien
ccatcacccatagagaggtctggga

SEQ ID NO: 382515 - DNA, 25 bp, Homo sapien
cactttttttcaaagaccttcagct

SEQ ID NO: 382516 - DNA, 25 bp, Homo sapien
gggaccagctcttgggccttggcat

SEQ ID NO: 382517 - DNA, 25 bp, Homo sapien
cttcagctttttggggggaccagct

SEQ ID NO: 382518 - DNA, 25 bp, Homo sapien
ccagctcttgggccttggcatctcc

SEQ ID NO: 382519 - DNA, 25 bp, Homo sapien
tgggctgggccgtgcgtgtgggcgg

SEQ ID NO: 382520 - DNA, 25 bp, Homo sapien
gggccgtgcgtgtgggcggagtggg

SEQ ID NO: 382521 - DNA, 25 bp, Homo sapien
gggctgggccgtgcgtgtgggcgga

SEQ ID NO: 382522 - DNA, 25 bp, Homo sapien
gctgggccgtgcgtgtgggcggagt

SEQ ID NO: 382523 - DNA, 25 bp, Homo sapien
ggtcggctttctcgatcctaatgca

SEQ ID NO: 382524 - DNA, 25 bp, Homo sapien
tctccgacaggatctaaaacgcttc

SEQ ID NO: 382525 - DNA, 25 bp, Homo sapien
taggtagatctgtccgttggtcggc

SEQ ID NO: 382526 - DNA, 25 bp, Homo sapien
atgcaaaccttctgccggccttgag

SEQ ID NO: 382527 - DNA, 25 bp, Homo sapien
ggacacatcggtgcaccccttggag

SEQ ID NO: 382528 - DNA, 25 bp, Homo sapien
caggacacatcggtgcaccccttgg

SEQ ID NO: 382529 - DNA, 25 bp, Homo sapien
caccgaggtcgaagcccaggaagaa

SEQ ID NO: 382530 - DNA, 25 bp, Homo sapien
ctcgtccccatgagaacaccgaggt

SEQ ID NO: 382531 - DNA, 25 bp, Homo sapien
agccccagggcaatgagagttgtcc

SEQ ID NO: 382532 - DNA, 25 bp, Homo sapien
gcttttagcatacagcaacactccg

SEQ ID NO: 382533 - DNA, 25 bp, Homo sapien
tgctgaagatccagaagccccaggg

SEQ ID NO: 382534 - DNA, 25 bp, Homo sapien
tggaccccttagactttctcatggg

SEQ ID NO: 382535 - DNA, 25 bp, Homo sapien
tgttgacacaccagatggttgggtg

SEQ ID NO: 382536 - DNA, 25 bp, Homo sapien
gatggggatcaacctgtggacagca

SEQ ID NO: 382537 - DNA, 25 bp, Homo sapien
gacatgaatgtgttaagccacccat

SEQ ID NO: 382538 - DNA, 25 bp, Homo sapien
aatcagacagggaaatgttggtcaa

SEQ ID NO: 382539 - DNA, 25 bp, Homo sapien
aacagaggctagacccgtgaagaag

SEQ ID NO: 382540 - DNA, 25 bp, Homo sapien
cagcctgtgctgtgtaaagctggaa

SEQ ID NO: 382541 - DNA, 25 bp, Homo sapien
ttgaaaaagtcctggatcccgttca

SEQ ID NO: 382542 - DNA, 25 bp, Homo sapien
gatcccgttcagtggcaggcatcag

SEQ ID NO: 382543 - DNA, 25 bp, Homo sapien
gagctggtcagggtgcccattgtca

SEQ ID NO: 382544 - DNA, 25 bp, Homo sapien
tcagagctggtcagggtgcccattg

SEQ ID NO: 382545 - DNA, 25 bp, Homo sapien
gctggtcagggtgcccattgtcata

SEQ ID NO: 382546 - DNA, 25 bp, Homo sapien
cagagctggtcagggtgcccattgt

SEQ ID NO: 382547 - DNA, 25 bp, Homo sapien
cagtttagtctttgggccactcttg

SEQ ID NO: 382548 - DNA, 25 bp, Homo sapien
ttagtggttggaaggctagctgcag

SEQ ID NO: 382549 - DNA, 25 bp, Homo sapien
ttggaaggctagctgcagagcctga

SEQ ID NO: 382550 - DNA, 25 bp, Homo sapien
gacccccatctcagtttagtctttg

SEQ ID NO: 382551 - DNA, 25 bp, Homo sapien
tgatagaagtccctaaactcggagc

SEQ ID NO: 382552 - DNA, 25 bp, Homo sapien
ggagctgcaagtgcctgagcttgga

SEQ ID NO: 382553 - DNA, 25 bp, Homo sapien
agcatcgagtgtgaggctttggagc

SEQ ID NO: 382554 - DNA, 25 bp, Homo sapien
tccctaaactcggagcatcgagtgt

SEQ ID NO: 382555 - DNA, 25 bp, Homo sapien
aaatgtacataagtagagtccctca

SEQ ID NO: 382556 - DNA, 25 bp, Homo sapien
aagtccaacttgcatagcagtgcag

SEQ ID NO: 382557 - DNA, 25 bp, Homo sapien
tcggatggttccaatggtcagctct

SEQ ID NO: 382558 - DNA, 25 bp, Homo sapien
ttttatgctgattgagaagtccaac

SEQ ID NO: 382559 - DNA, 25 bp, Homo sapien
tcataagaatctactttgtttagag

SEQ ID NO: 382560 - DNA, 25 bp, Homo sapien
taagaatctactttgtttagagtaa

SEQ ID NO: 382561 - DNA, 25 bp, Homo sapien
atctactttgtttagagtaaaacag

SEQ ID NO: 382562 - DNA, 25 bp, Homo sapien
ctttcataagaatctactttgttta

SEQ ID NO: 382563 - DNA, 25 bp, Homo sapien
ggggatggtgcttactagtgggtag

SEQ ID NO: 382564 - DNA, 25 bp, Homo sapien
acatgggggatggtgcttactagtg

SEQ ID NO: 382565 - DNA, 25 bp, Homo sapien
tgggggatggtgcttactagtgggt

SEQ ID NO: 382566 - DNA, 25 bp, Homo sapien
catgggggatggtgcttactagtgg

SEQ ID NO: 382567 - DNA, 25 bp, Homo sapien
cagctgtttaggtgaacatttctcc

SEQ ID NO: 382568 - DNA, 25 bp, Homo sapien
cacgacggagtggttgtcctttcct

SEQ ID NO: 382569 - DNA, 25 bp, Homo sapien
catgtgagctcagctgacagaggca

SEQ ID NO: 382570 - DNA, 25 bp, Homo sapien
aaggccctgtgcccattgatgtggg

SEQ ID NO: 382571 - DNA, 25 bp, Homo sapien
cttcctcaacctctaccctctggaa

SEQ ID NO: 382572 - DNA, 25 bp, Homo sapien
ctcttcctcaacctctaccctctgg

SEQ ID NO: 382573 - DNA, 25 bp, Homo sapien
tcttcctcaacctctaccctctgga

SEQ ID NO: 382574 - DNA, 25 bp, Homo sapien
ttcctcaacctctaccctctggaat

SEQ ID NO: 382575 - DNA, 25 bp, Homo sapien
gagtccccgagtcctttgatgcaag

SEQ ID NO: 382576 - DNA, 25 bp, Homo sapien
catactaggccaggcagaaaggccc

SEQ ID NO: 382577 - DNA, 25 bp, Homo sapien
tcgaccgtgctaggatgactgcagc

SEQ ID NO: 382578 - DNA, 25 bp, Homo sapien
agttcgaaggagagccatactaggc

SEQ ID NO: 382579 - DNA, 25 bp, Homo sapien
cgtgaaaggtcatttcaatcatagc

SEQ ID NO: 382580 - DNA, 25 bp, Homo sapien
ccttctttcaggattctgatgaggg

SEQ ID NO: 382581 - DNA, 25 bp, Homo sapien
aatcaggtagatggatttgcttctc

SEQ ID NO: 382582 - DNA, 25 bp, Homo sapien
caagtgattgaggtgtgctgcctgt

SEQ ID NO: 382583 - DNA, 25 bp, Homo sapien
ctgaaattctcactccgtgactcac

SEQ ID NO: 382584 - DNA, 25 bp, Homo sapien
ctatgaataacaagtactcttccct

SEQ ID NO: 382585 - DNA, 25 bp, Homo sapien
caggaagaaggtccactatgaataa

SEQ ID NO: 382586 - DNA, 25 bp, Homo sapien
cagggagtagaacgtggaggaaact

SEQ ID NO: 382587 - DNA, 25 bp, Homo sapien
acagtgcccgtagaacccgcagaaa

SEQ ID NO: 382588 - DNA, 25 bp, Homo sapien
ttcacagtgcccgtagaacccgcag

SEQ ID NO: 382589 - DNA, 25 bp, Homo sapien
tgaacgcgcagccaaagtctgtcac

SEQ ID NO: 382590 - DNA, 25 bp, Homo sapien
agtgcccgtagaacccgcagaaagt

SEQ ID NO: 382591 - DNA, 25 bp, Homo sapien
ttttaaactggagaggctaacctca

SEQ ID NO: 382592 - DNA, 25 bp, Homo sapien
tatgagagggatgcagtgcctttcc

SEQ ID NO: 382593 - DNA, 25 bp, Homo sapien
gagagaccattgcatcgctgtccaa

SEQ ID NO: 382594 - DNA, 25 bp, Homo sapien
caagtggatagtagatctgtggcga

SEQ ID NO: 382595 - DNA, 25 bp, Homo sapien
gcttgcggaactcttcctggaatgc

SEQ ID NO: 382596 - DNA, 25 bp, Homo sapien
tgcttgcggaactcttcctggaatg

SEQ ID NO: 382597 - DNA, 25 bp, Homo sapien
tgaaaacagcagcaatgcaatgtgg

SEQ ID NO: 382598 - DNA, 25 bp, Homo sapien
ccgcctagtgcagagaggttgtgaa

SEQ ID NO: 382599 - DNA, 25 bp, Homo sapien
gtaggaagaggtaccacaggaagcc

SEQ ID NO: 382600 - DNA, 25 bp, Homo sapien
gggccactctctactggtaggaaga

SEQ ID NO: 382601 - DNA, 25 bp, Homo sapien
aaaattatccagaccaggaggccgg

SEQ ID NO: 382602 - DNA, 25 bp, Homo sapien
gaaaagtatgaattgcacgcagcga

SEQ ID NO: 382603 - DNA, 25 bp, Homo sapien
aaggacttgtctgagtgaccctgcg

SEQ ID NO: 382604 - DNA, 25 bp, Homo sapien
agttactgttcatggcacccgggaa

SEQ ID NO: 382605 - DNA, 25 bp, Homo sapien
tccctttcctgtgattctcacctgg

SEQ ID NO: 382606 - DNA, 25 bp, Homo sapien
gaagttcccgtcctctggagggaca

SEQ ID NO: 382607 - DNA, 25 bp, Homo sapien
gaaggagaaccataggccatggtga

SEQ ID NO: 382608 - DNA, 25 bp, Homo sapien
gctggtcccctacagagcttgctaa

SEQ ID NO: 382609 - DNA, 25 bp, Homo sapien
gactgcaagcatacacattccctct

SEQ ID NO: 382610 - DNA, 25 bp, Homo sapien
aaaggctccctgtactgaaaatgca

SEQ ID NO: 382611 - DNA, 25 bp, Homo sapien
ccttggtgtttgatgcatgttgcat

SEQ ID NO: 382612 - DNA, 25 bp, Homo sapien
tctcgaagcatcatccaggatgacc

SEQ ID NO: 382613 - DNA, 25 bp, Homo sapien
tgtttccccttagcctctcctgccc

SEQ ID NO: 382614 - DNA, 25 bp, Homo sapien
tttccccttagcctctcctgcccac

SEQ ID NO: 382615 - DNA, 25 bp, Homo sapien
ctctgtttccccttagcctctcctg

SEQ ID NO: 382616 - DNA, 25 bp, Homo sapien
tctgtttccccttagcctctcctgc

SEQ ID NO: 382617 - DNA, 25 bp, Homo sapien
gaaatgagctacagtaccacagggc

SEQ ID NO: 382618 - DNA, 25 bp, Homo sapien
gcatagttccttggaacaagcgtgg

SEQ ID NO: 382619 - DNA, 25 bp, Homo sapien
taggaggacatccaaggtgccctgg

SEQ ID NO: 382620 - DNA, 25 bp, Homo sapien
gcattggcccaaggcgggcatagtt

SEQ ID NO: 382621 - DNA, 25 bp, Homo sapien
caagccgtcaggaggttcaccgttt

SEQ ID NO: 382622 - DNA, 25 bp, Homo sapien
cagcaccaggactatcaagtggaat

SEQ ID NO: 382623 - DNA, 25 bp, Homo sapien
ttcaccgtttagaaccagggtgtca

SEQ ID NO: 382624 - DNA, 25 bp, Homo sapien
tggaataagatgtggctcaagccgt

SEQ ID NO: 382625 - DNA, 25 bp, Homo sapien
cactggtgcagttctccgaattttg

SEQ ID NO: 382626 - DNA, 25 bp, Homo sapien
gaattctggctcttggtttgcatca

SEQ ID NO: 382627 - DNA, 25 bp, Homo sapien
ttgtagtatgaagattgccaagtcc

SEQ ID NO: 382628 - DNA, 25 bp, Homo sapien
cacaagcttttgtctacatctctgg

SEQ ID NO: 382629 - DNA, 25 bp, Homo sapien
agtcagtaattaaagcaaggtggct

SEQ ID NO: 382630 - DNA, 25 bp, Homo sapien
taaagtcagtaattaaagcaaggtg

SEQ ID NO: 382631 - DNA, 25 bp, Homo sapien
aagtcagtaattaaagcaaggtggc

SEQ ID NO: 382632 - DNA, 25 bp, Homo sapien
aaagtcagtaattaaagcaaggtgg

SEQ ID NO: 382633 - DNA, 25 bp, Homo sapien
ctaaccagacactggtgttccctgg

SEQ ID NO: 382634 - DNA, 25 bp, Homo sapien
taaccagacactggtgttccctggg

SEQ ID NO: 382635 - DNA, 25 bp, Homo sapien
aaccagacactggtgttccctgggc

SEQ ID NO: 382636 - DNA, 25 bp, Homo sapien
ccagacactggtgttccctgggcct

SEQ ID NO: 382637 - DNA, 25 bp, Homo sapien
cgtgtgaaggactgacttgttgaga

SEQ ID NO: 382638 - DNA, 25 bp, Homo sapien
tgaaagctgcttagcgcagggatga

SEQ ID NO: 382639 - DNA, 25 bp, Homo sapien
ttgttgagaatgaaccagccgtggg

SEQ ID NO: 382640 - DNA, 25 bp, Homo sapien
tagaattcctactttgcgtgtgaag

SEQ ID NO: 382641 - DNA, 25 bp, Homo sapien
aatgctgcagcggaaggaaaaggtt

SEQ ID NO: 382642 - DNA, 25 bp, Homo sapien
taaggagagtatggaatgctgcagc

SEQ ID NO: 382643 - DNA, 25 bp, Homo sapien
gaaggaaaaggttttccaggcagca

SEQ ID NO: 382644 - DNA, 25 bp, Homo sapien
ctaaggagagtatggaatgctgcag

SEQ ID NO: 382645 - DNA, 25 bp, Homo sapien
cactccgaatggctagcaggcaact

SEQ ID NO: 382646 - DNA, 25 bp, Homo sapien
tccgaatggctagcaggcaactgac

SEQ ID NO: 382647 - DNA, 25 bp, Homo sapien
ccgaatggctagcaggcaactgact

SEQ ID NO: 382648 - DNA, 25 bp, Homo sapien
ctccgaatggctagcaggcaactga

SEQ ID NO: 382649 - DNA, 25 bp, Homo sapien
tgacactgaaacaaggggcgggggc

SEQ ID NO: 382650 - DNA, 25 bp, Homo sapien
cactgcccgttgtgcaatgctgtga

SEQ ID NO: 382651 - DNA, 25 bp, Homo sapien
tcaacactgcccgttgtgcaatgct

SEQ ID NO: 382652 - DNA, 25 bp, Homo sapien
aacactgcccgttgtgcaatgctgt

SEQ ID NO: 382653 - DNA, 25 bp, Homo sapien
tttgggatcctcggtattcaccacc

SEQ ID NO: 382654 - DNA, 25 bp, Homo sapien
gtattcaccacctcggcagccacca

SEQ ID NO: 382655 - DNA, 25 bp, Homo sapien
gggatcctcggtattcaccacctcg

SEQ ID NO: 382656 - DNA, 25 bp, Homo sapien
ctcggtattcaccacctcggcagcc

SEQ ID NO: 382657 - DNA, 25 bp, Homo sapien
tttagcctggactggagggtcacca

SEQ ID NO: 382658 - DNA, 25 bp, Homo sapien
tgagagagtactacttttctaagtt

SEQ ID NO: 382659 - DNA, 25 bp, Homo sapien
ctgttttagcctggactggagggtc

SEQ ID NO: 382660 - DNA, 25 bp, Homo sapien
ctggctgtgagagagtactactttt

SEQ ID NO: 382661 - DNA, 25 bp, Homo sapien
gccacagatagagttaaaccttgtt

SEQ ID NO: 382662 - DNA, 25 bp, Homo sapien
tgccacagatagagttaaaccttgt

SEQ ID NO: 382663 - DNA, 25 bp, Homo sapien
atgccacagatagagttaaaccttg

SEQ ID NO: 382664 - DNA, 25 bp, Homo sapien
cacagatagagttaaaccttgtttt

SEQ ID NO: 382665 - DNA, 25 bp, Homo sapien
aatctcgtaaaccaggtttgccctg

SEQ ID NO: 382666 - DNA, 25 bp, Homo sapien
gattctgatgcctttggcaacctgg

SEQ ID NO: 382667 - DNA, 25 bp, Homo sapien
tgtttctctgccctgtttgccgttt

SEQ ID NO: 382668 - DNA, 25 bp, Homo sapien
tgtttgccgtttgtggtaacctggc

SEQ ID NO: 382669 - DNA, 25 bp, Homo sapien
gactgtctcatggagttctttgtca

SEQ ID NO: 382670 - DNA, 25 bp, Homo sapien
cctcggagttcgagagggagaatct

SEQ ID NO: 382671 - DNA, 25 bp, Homo sapien
gaatggtcggcagcatgaaaagcat

SEQ ID NO: 382672 - DNA, 25 bp, Homo sapien
tggtgatgggaacctgaaacagcct

SEQ ID NO: 382673 - DNA, 25 bp, Homo sapien
gcagtctcacagttcttatgggaca

SEQ ID NO: 382674 - DNA, 25 bp, Homo sapien
cttatgggacagtgtccgggttcct

SEQ ID NO: 382675 - DNA, 25 bp, Homo sapien
tatgggacagtgtccgggttcctcc

SEQ ID NO: 382676 - DNA, 25 bp, Homo sapien
tggcagtctcacagttcttatggga

SEQ ID NO: 382677 - DNA, 25 bp, Homo sapien
ccatttgagggcacgggataggata

SEQ ID NO: 382678 - DNA, 25 bp, Homo sapien
agcgtgtcagtggagcagtagcccc

SEQ ID NO: 382679 - DNA, 25 bp, Homo sapien
tatggctgtactcctgtgtaataca

SEQ ID NO: 382680 - DNA, 25 bp, Homo sapien
taggataggtgacattgccacagag

SEQ ID NO: 382681 - DNA, 25 bp, Homo sapien
gattaacacttgatgccgtaaccat

SEQ ID NO: 382682 - DNA, 25 bp, Homo sapien
ggtgattaacacttgatgccgtaac

SEQ ID NO: 382683 - DNA, 25 bp, Homo sapien
tgacatttaggtgattaacacttga

SEQ ID NO: 382684 - DNA, 25 bp, Homo sapien
tttaggtgattaacacttgatgccg

SEQ ID NO: 382685 - DNA, 25 bp, Homo sapien
cttgattcccatctgcccgtgcagt

SEQ ID NO: 382686 - DNA, 25 bp, Homo sapien
gcagttgtgagtttcctcccatttc

SEQ ID NO: 382687 - DNA, 25 bp, Homo sapien
attttgcagttgtgagtttcctccc

SEQ ID NO: 382688 - DNA, 25 bp, Homo sapien
ccatctgcccgtgcagttctgcctc

SEQ ID NO: 382689 - DNA, 25 bp, Homo sapien
atgaactagttttagcagatgccct

SEQ ID NO: 382690 - DNA, 25 bp, Homo sapien
gatgaactagttttagcagatgccc

SEQ ID NO: 382691 - DNA, 25 bp, Homo sapien
cccatggagccctgtgatgcacact

SEQ ID NO: 382692 - DNA, 25 bp, Homo sapien
tgtgtttgtgctcccatggagccct

SEQ ID NO: 382693 - DNA, 25 bp, Homo sapien
caaatgagcatagccgctccagatg

SEQ ID NO: 382694 - DNA, 25 bp, Homo sapien
ggctcggatcctgaagaaaggccag

SEQ ID NO: 382695 - DNA, 25 bp, Homo sapien
gcatgtggccttcatgctggttgtc

SEQ ID NO: 382696 - DNA, 25 bp, Homo sapien
tcatgctggttgtcctctggactgt

SEQ ID NO: 382697 - DNA, 25 bp, Homo sapien
gtttttgcatgtggccttcatgctg

SEQ ID NO: 382698 - DNA, 25 bp, Homo sapien
ggccttcatgctggttgtcctctgg

SEQ ID NO: 382699 - DNA, 25 bp, Homo sapien
tccagctgcttcgggttgcagcatc

SEQ ID NO: 382700 - DNA, 25 bp, Homo sapien
ctccagctgcttcgggttgcagcat

SEQ ID NO: 382701 - DNA, 25 bp, Homo sapien
tgcttcgggttgcagcatctcattc

SEQ ID NO: 382702 - DNA, 25 bp, Homo sapien
ctgcttcgggttgcagcatctcatt

SEQ ID NO: 382703 - DNA, 25 bp, Homo sapien
gggattccgatgcaacacctgcagg

SEQ ID NO: 382704 - DNA, 25 bp, Homo sapien
ccattttacagtgaagacacggagg

SEQ ID NO: 382705 - DNA, 25 bp, Homo sapien
gccacccaggatccctgtgaggtat

SEQ ID NO: 382706 - DNA, 25 bp, Homo sapien
gaggtatgcgcttgttacgattcca

SEQ ID NO: 382707 - DNA, 25 bp, Homo sapien
gagaagtcagctcctcaggtgggac

SEQ ID NO: 382708 - DNA, 25 bp, Homo sapien
cagttgagaagtcagctcctcaggt

SEQ ID NO: 382709 - DNA, 25 bp, Homo sapien
gcctgaatctgctgccagttgagaa

SEQ ID NO: 382710 - DNA, 25 bp, Homo sapien
tcaggtgggacaaggaccctggcct

SEQ ID NO: 382711 - DNA, 25 bp, Homo sapien
cagtggccggcgaaggcagtgtgca

SEQ ID NO: 382712 - DNA, 25 bp, Homo sapien
ggagcttggcctgcatctgcgtaga

SEQ ID NO: 382713 - DNA, 25 bp, Homo sapien
gccagaatccttgaggcaggcttat

SEQ ID NO: 382714 - DNA, 25 bp, Homo sapien
tgggtgttgggagcagtgcccttcc

SEQ ID NO: 382715 - DNA, 25 bp, Homo sapien
cctgaggtactgtgttggtgttcca

SEQ ID NO: 382716 - DNA, 25 bp, Homo sapien
ggaaatgcccatcccggttcgaatg

SEQ ID NO: 382717 - DNA, 25 bp, Homo sapien
tcggccctttgtcgaggtggaaagc

SEQ ID NO: 382718 - DNA, 25 bp, Homo sapien
caaaggttctcgcaagataaaggca

SEQ ID NO: 382719 - DNA, 25 bp, Homo sapien
acagttcatgaactgcctggaaaca

SEQ ID NO: 382720 - DNA, 25 bp, Homo sapien
tcaaaacagaccacccttcagaaaa

SEQ ID NO: 382721 - DNA, 25 bp, Homo sapien
ggtccgcaatcagtaaaactgctgt

SEQ ID NO: 382722 - DNA, 25 bp, Homo sapien
aggtggtctggtccgcaatcagtaa

SEQ ID NO: 382723 - DNA, 25 bp, Homo sapien
cgccgccggggggcagtaacttcat

SEQ ID NO: 382724 - DNA, 25 bp, Homo sapien
ctgttcaaagaccagcggtcgccgc

SEQ ID NO: 382725 - DNA, 25 bp, Homo sapien
gttcaaagaccagcggtcgccgccg

SEQ ID NO: 382726 - DNA, 25 bp, Homo sapien
cagcggtcgccgccggggggcagta

SEQ ID NO: 382727 - DNA, 25 bp, Homo sapien
ccgcaggtagggagaagcagtctcc

SEQ ID NO: 382728 - DNA, 25 bp, Homo sapien
cttcgggagtccaagccagctggaa

SEQ ID NO: 382729 - DNA, 25 bp, Homo sapien
ccggagagctttgcaccgagggcct

SEQ ID NO: 382730 - DNA, 25 bp, Homo sapien
cccggtaatattgccagggaaggct

SEQ ID NO: 382731 - DNA, 25 bp, Homo sapien
ctttcccagcgccatccaaaagaac

SEQ ID NO: 382732 - DNA, 25 bp, Homo sapien
tctccaacgaataatgttctcccct

SEQ ID NO: 382733 - DNA, 25 bp, Homo sapien
taattctccaacgaataatgttctc

SEQ ID NO: 382734 - DNA, 25 bp, Homo sapien
ccatccaaaagaacccggagcatac

SEQ ID NO: 382735 - DNA, 25 bp, Homo sapien
cgactctggggttctcgaagtcctg

SEQ ID NO: 382736 - DNA, 25 bp, Homo sapien
aaataataagcactgtggaatcccg

SEQ ID NO: 382737 - DNA, 25 bp, Homo sapien
tggaatcccggggtaactggatatc

SEQ ID NO: 382738 - DNA, 25 bp, Homo sapien
gggtaactggatatccgactctggg

SEQ ID NO: 382739 - DNA, 25 bp, Homo sapien
ctcctgattgttgtttgaccctgtg

SEQ ID NO: 382740 - DNA, 25 bp, Homo sapien
ccttgatttcctgaaccgggagcca

SEQ ID NO: 382741 - DNA, 25 bp, Homo sapien
cttgatttcctgaaccgggagccag

SEQ ID NO: 382742 - DNA, 25 bp, Homo sapien
tgatttcctgaaccgggagccaggc

SEQ ID NO: 382743 - DNA, 25 bp, Homo sapien
aggactttgcccctaaccaacatgg

SEQ ID NO: 382744 - DNA, 25 bp, Homo sapien
ggaaggtcacgtgaagagaattccg

SEQ ID NO: 382745 - DNA, 25 bp, Homo sapien
ggcttcgggcttcgggcggcagaag

SEQ ID NO: 382746 - DNA, 25 bp, Homo sapien
aacatggccgccctgaggcttcggg

SEQ ID NO: 382747 - DNA, 25 bp, Homo sapien
tgaattctgcaaagccttaggccac

SEQ ID NO: 382748 - DNA, 25 bp, Homo sapien
tgtcttctaccactaggtggtagtg

SEQ ID NO: 382749 - DNA, 25 bp, Homo sapien
gtctgtcttctaccactaggtggta

SEQ ID NO: 382750 - DNA, 25 bp, Homo sapien
taccactaggtggtagtgtttccac

SEQ ID NO: 382751 - DNA, 25 bp, Homo sapien
tatattagggtagctgtcaacaggc

SEQ ID NO: 382752 - DNA, 25 bp, Homo sapien
tcggattatcaacaatatattaggg

SEQ ID NO: 382753 - DNA, 25 bp, Homo sapien
ttctgtttcataggagtccattcgg

SEQ ID NO: 382754 - DNA, 25 bp, Homo sapien
ggagtccattcggattatcaacaat

SEQ ID NO: 382755 - DNA, 25 bp, Homo sapien
cagatttgttacgagcattgaggag

SEQ ID NO: 382756 - DNA, 25 bp, Homo sapien
gcaagttcagatttgttacgagcat

SEQ ID NO: 382757 - DNA, 25 bp, Homo sapien
tgaggagctgcttggatggaacttc

SEQ ID NO: 382758 - DNA, 25 bp, Homo sapien
gttacgagcattgaggagctgcttg

SEQ ID NO: 382759 - DNA, 25 bp, Homo sapien
cagagggatcttttagaggcagatg

SEQ ID NO: 382760 - DNA, 25 bp, Homo sapien
ggatcttttagaggcagatgaggct

SEQ ID NO: 382761 - DNA, 25 bp, Homo sapien
tctgcagagggatcttttagaggca

SEQ ID NO: 382762 - DNA, 25 bp, Homo sapien
tgcagagggatcttttagaggcaga

SEQ ID NO: 382763 - DNA, 25 bp, Homo sapien
caaaaacaactttgcattaacagtc

SEQ ID NO: 382764 - DNA, 25 bp, Homo sapien
acacaaaaacaactttgcattaaca

SEQ ID NO: 382765 - DNA, 25 bp, Homo sapien
aaaacaactttgcattaacagtcca

SEQ ID NO: 382766 - DNA, 25 bp, Homo sapien
aaacaactttgcattaacagtccat

SEQ ID NO: 382767 - DNA, 25 bp, Homo sapien
ccaaacggtgtctctctgaaggagg

SEQ ID NO: 382768 - DNA, 25 bp, Homo sapien
gggttggtgctctaggcctctggta

SEQ ID NO: 382769 - DNA, 25 bp, Homo sapien
gtgctctaggcctctggtaatttcc

SEQ ID NO: 382770 - DNA, 25 bp, Homo sapien
gttggtgctctaggcctctggtaat

SEQ ID NO: 382771 - DNA, 25 bp, Homo sapien
tgtatggtcacctttaccaattgac

SEQ ID NO: 382772 - DNA, 25 bp, Homo sapien
gggtctccgatgagttggctgtctg

SEQ ID NO: 382773 - DNA, 25 bp, Homo sapien
caagcacctgaattcccatgggaat

SEQ ID NO: 382774 - DNA, 25 bp, Homo sapien
ccaattgactgactgtttcctcggg

SEQ ID NO: 382775 - DNA, 25 bp, Homo sapien
taagtggaatcaaacgcttcccaag

SEQ ID NO: 382776 - DNA, 25 bp, Homo sapien
gtaaggcaaacagaaccctgagtcc

SEQ ID NO: 382777 - DNA, 25 bp, Homo sapien
ccctgagtcctagatttgggagcaa

SEQ ID NO: 382778 - DNA, 25 bp, Homo sapien
aaagtgggattcatcagcaaaaagg

SEQ ID NO: 382779 - DNA, 25 bp, Homo sapien
ggctccctctgctctaaccacctgc

SEQ ID NO: 382780 - DNA, 25 bp, Homo sapien
cctctgctctaaccacctgcatctg

SEQ ID NO: 382781 - DNA, 25 bp, Homo sapien
tctgctctaaccacctgcatctgcc

SEQ ID NO: 382782 - DNA, 25 bp, Homo sapien
ctccctctgctctaaccacctgcat

SEQ ID NO: 382783 - DNA, 25 bp, Homo sapien
ctgtctgggtaggtacaggccagaa

SEQ ID NO: 382784 - DNA, 25 bp, Homo sapien
gctctgtctgggtaggtacaggcca

SEQ ID NO: 382785 - DNA, 25 bp, Homo sapien
ctctgtctgggtaggtacaggccag

SEQ ID NO: 382786 - DNA, 25 bp, Homo sapien
tctgggtaggtacaggccagaagct

SEQ ID NO: 382787 - DNA, 25 bp, Homo sapien
tgcctccaagttaagagcttgggaa

SEQ ID NO: 382788 - DNA, 25 bp, Homo sapien
ctgcctccaagttaagagcttggga

SEQ ID NO: 382789 - DNA, 25 bp, Homo sapien
tctgcctccaagttaagagcttggg

SEQ ID NO: 382790 - DNA, 25 bp, Homo sapien
gcctccaagttaagagcttgggaat

SEQ ID NO: 382791 - DNA, 25 bp, Homo sapien
gctgttgtccatgagggtccgcttc

SEQ ID NO: 382792 - DNA, 25 bp, Homo sapien
cgcacaaggagccagtcgagtttct

SEQ ID NO: 382793 - DNA, 25 bp, Homo sapien
gaggcccctcatatagacgcacaag

SEQ ID NO: 382794 - DNA, 25 bp, Homo sapien
ctctgaccagagatgggcgctgttg

SEQ ID NO: 382795 - DNA, 25 bp, Homo sapien
ctttggaagtgcccggcccgctgtc

SEQ ID NO: 382796 - DNA, 25 bp, Homo sapien
cggaggtgcagtgcacggctggaga

SEQ ID NO: 382797 - DNA, 25 bp, Homo sapien
gccgcggaggtgcagtgcacggctg

SEQ ID NO: 382798 - DNA, 25 bp, Homo sapien
ccgcgggccgcggaggtgcagtgca

SEQ ID NO: 382799 - DNA, 25 bp, Homo sapien
gtgcagtgcacggctggagagggct

SEQ ID NO: 382800 - DNA, 25 bp, Homo sapien
gctggagcttctccccgattgcgcg

SEQ ID NO: 382801 - DNA, 25 bp, Homo sapien
tgtgctccttgaaggacgccggctc

SEQ ID NO: 382802 - DNA, 25 bp, Homo sapien
ggacccgcagggcaaactccgcttg

SEQ ID NO: 382803 - DNA, 25 bp, Homo sapien
gggatcctgcggcaaaggtttagcc

SEQ ID NO: 382804 - DNA, 25 bp, Homo sapien
agatccctgtccttgatcgggactc

SEQ ID NO: 382805 - DNA, 25 bp, Homo sapien
tccttgatcgggactccttccttga

SEQ ID NO: 382806 - DNA, 25 bp, Homo sapien
ccttgacgctgcttaagggtcggtg

SEQ ID NO: 382807 - DNA, 25 bp, Homo sapien
ggactccttccttgacgctgcttaa

SEQ ID NO: 382808 - DNA, 25 bp, Homo sapien
tctctcagccagaggcgcggggacc

SEQ ID NO: 382809 - DNA, 25 bp, Homo sapien
cctccttggggcacctcggcaccct

SEQ ID NO: 382810 - DNA, 25 bp, Homo sapien
tcggcctcagtctcgccgtgcgccc

SEQ ID NO: 382811 - DNA, 25 bp, Homo sapien
gctgcgcgccgcttgtctcctcccc

SEQ ID NO: 382812 - DNA, 25 bp, Homo sapien
agaggctgccgtcccccgattgctg

SEQ ID NO: 382813 - DNA, 25 bp, Homo sapien
cgattgctgcggctcacccgagacc

SEQ ID NO: 382814 - DNA, 25 bp, Homo sapien
tgcgacctcaattgcctcggcctgg

SEQ ID NO: 382815 - DNA, 25 bp, Homo sapien
cgggccttcggcttctacgctgtcc

SEQ ID NO: 382816 - DNA, 25 bp, Homo sapien
tcccggcggccgttcacgcgcgcgg

SEQ ID NO: 382817 - DNA, 25 bp, Homo sapien
acgcgcgcggcctcgccgctaccct

SEQ ID NO: 382818 - DNA, 25 bp, Homo sapien
gacgaagagggtgatgtcgtgctcc

SEQ ID NO: 382819 - DNA, 25 bp, Homo sapien
cggcctcgccgctaccctcggcggg

SEQ ID NO: 382820 - DNA, 25 bp, Homo sapien
aagaattgagggaagcgagctttac

SEQ ID NO: 382821 - DNA, 25 bp, Homo sapien
ctaagaattgagggaagcgagcttt

SEQ ID NO: 382822 - DNA, 25 bp, Homo sapien
taagaattgagggaagcgagcttta

SEQ ID NO: 382823 - DNA, 25 bp, Homo sapien
tggaagcgcctgatgacaatcagga

SEQ ID NO: 382824 - DNA, 25 bp, Homo sapien
agtcctcccgcaaatgccctggaaa

SEQ ID NO: 382825 - DNA, 25 bp, Homo sapien
gatgaccaagacctcgaatggaagg

SEQ ID NO: 382826 - DNA, 25 bp, Homo sapien
tttgcttccaaaccattgagtcctc

SEQ ID NO: 382827 - DNA, 25 bp, Homo sapien
ctaggagggctggttaggatgttca

SEQ ID NO: 382828 - DNA, 25 bp, Homo sapien
aataacctcctgactaggagggctg

SEQ ID NO: 382829 - DNA, 25 bp, Homo sapien
gtgggatgctgaacccacaacccca

SEQ ID NO: 382830 - DNA, 25 bp, Homo sapien
tcaggtcaaaggacagtgggatgct

SEQ ID NO: 382831 - DNA, 25 bp, Homo sapien
ttcaagtattaaagcttcctttggc

SEQ ID NO: 382832 - DNA, 25 bp, Homo sapien
cttcaagtattaaagcttcctttgg

SEQ ID NO: 382833 - DNA, 25 bp, Homo sapien
tgcgttttttggcttcaagtattaa

SEQ ID NO: 382834 - DNA, 25 bp, Homo sapien
tgtctgcgttttttggcttcaagta

SEQ ID NO: 382835 - DNA, 25 bp, Homo sapien
tcttcccatgtgaactgaggttaaa

SEQ ID NO: 382836 - DNA, 25 bp, Homo sapien
gtcaccggcatcttgtattcttcca

SEQ ID NO: 382837 - DNA, 25 bp, Homo sapien
catacaagcagatgatgttcaagtc

SEQ ID NO: 382838 - DNA, 25 bp, Homo sapien
aacttcctcagttgtgtctctacag

SEQ ID NO: 382839 - DNA, 25 bp, Homo sapien
ttcaaggcaggaaagaacgtggctc

SEQ ID NO: 382840 - DNA, 25 bp, Homo sapien
gtatccttacaaccacagcaacggg

SEQ ID NO: 382841 - DNA, 25 bp, Homo sapien
gaaacagggagactagccagaagct

SEQ ID NO: 382842 - DNA, 25 bp, Homo sapien
catcaaaactgtgctaagaggccgt

SEQ ID NO: 382843 - DNA, 25 bp, Homo sapien
ctgtgttctgcgctggagatagaat

SEQ ID NO: 382844 - DNA, 25 bp, Homo sapien
tgttctgcgctggagatagaatgat

SEQ ID NO: 382845 - DNA, 25 bp, Homo sapien
gtgttctgcgctggagatagaatga

SEQ ID NO: 382846 - DNA, 25 bp, Homo sapien
gttctgcgctggagatagaatgatg

SEQ ID NO: 382847 - DNA, 25 bp, Homo sapien
atctcatcatttggagatctatctg

SEQ ID NO: 382848 - DNA, 25 bp, Homo sapien
tctcatcatttggagatctatctgt

SEQ ID NO: 382849 - DNA, 25 bp, Homo sapien
gctcctatggcctgctgctcatcgt

SEQ ID NO: 382850 - DNA, 25 bp, Homo sapien
catgctcctatggcctgctgctcat

SEQ ID NO: 382851 - DNA, 25 bp, Homo sapien
tgctcctatggcctgctgctcatcg

SEQ ID NO: 382852 - DNA, 25 bp, Homo sapien
tcaatacaagcacggattttagccg

SEQ ID NO: 382853 - DNA, 25 bp, Homo sapien
gcacggattttagccgaagatggac

SEQ ID NO: 382854 - DNA, 25 bp, Homo sapien
tttagccgaagatggacttggatac

SEQ ID NO: 382855 - DNA, 25 bp, Homo sapien
gggctgtcaatacaagcacggattt

SEQ ID NO: 382856 - DNA, 25 bp, Homo sapien
gccacttcatcagcactgtgttgcc

SEQ ID NO: 382857 - DNA, 25 bp, Homo sapien
tttacactgcatacccccagtggag

SEQ ID NO: 382858 - DNA, 25 bp, Homo sapien
tgtttgcatgctcaaccaatacttt

SEQ ID NO: 382859 - DNA, 25 bp, Homo sapien
tccatcccaatgctcgttgtctgta

SEQ ID NO: 382860 - DNA, 25 bp, Homo sapien
gccataaaaggagctaggctttccc

SEQ ID NO: 382861 - DNA, 25 bp, Homo sapien
tcttagcctctctgtaaggccaggg

SEQ ID NO: 382862 - DNA, 25 bp, Homo sapien
tggagcaggcgtcaagccatcgtac

SEQ ID NO: 382863 - DNA, 25 bp, Homo sapien
gcagatgggccatacagggcgtcta

SEQ ID NO: 382864 - DNA, 25 bp, Homo sapien
gccatcgtacaatgaaagggacaag

SEQ ID NO: 382865 - DNA, 25 bp, Homo sapien
agtctcttgcccagcacagcgtttc

SEQ ID NO: 382866 - DNA, 25 bp, Homo sapien
ttgcccagcacagcgtttctgcttt

SEQ ID NO: 382867 - DNA, 25 bp, Homo sapien
ttgccgggtctcagagcctcgggcc

SEQ ID NO: 382868 - DNA, 25 bp, Homo sapien
gaagccactcttgccgggtctcaga

SEQ ID NO: 382869 - DNA, 25 bp, Homo sapien
accctatggccatttcgaaggccac

SEQ ID NO: 382870 - DNA, 25 bp, Homo sapien
tcccaccaccctatggccatttcga

SEQ ID NO: 382871 - DNA, 25 bp, Homo sapien
accaccctatggccatttcgaaggc

SEQ ID NO: 382872 - DNA, 25 bp, Homo sapien
ccaccaccctatggccatttcgaag

SEQ ID NO: 382873 - DNA, 25 bp, Homo sapien
ttgattcagtgggtcctgctgcatg

SEQ ID NO: 382874 - DNA, 25 bp, Homo sapien
aaaaaatatacagagtttgattcag

SEQ ID NO: 382875 - DNA, 25 bp, Homo sapien
aaatatacagagtttgattcagtgg

SEQ ID NO: 382876 - DNA, 25 bp, Homo sapien
tgattcagtgggtcctgctgcatgg

SEQ ID NO: 382877 - DNA, 25 bp, Homo sapien
caatgcgagaacagcctaatgcagt

SEQ ID NO: 382878 - DNA, 25 bp, Homo sapien
aatgcgagaacagcctaatgcagta

SEQ ID NO: 382879 - DNA, 25 bp, Homo sapien
aacagcctaatgcagtaagttttac

SEQ ID NO: 382880 - DNA, 25 bp, Homo sapien
gagaacagcctaatgcagtaagttt

SEQ ID NO: 382881 - DNA, 25 bp, Homo sapien
actgtgagctttgtgaggctgcccc

SEQ ID NO: 382882 - DNA, 25 bp, Homo sapien
ggtttagaaccatccccttgctgct

SEQ ID NO: 382883 - DNA, 25 bp, Homo sapien
tgcagcatttgagccaattcagcct

SEQ ID NO: 382884 - DNA, 25 bp, Homo sapien
tgttgaaaagtacgtggcacttccc

SEQ ID NO: 382885 - DNA, 25 bp, Homo sapien
ccagcctcaatgtggagttggcggt

SEQ ID NO: 382886 - DNA, 25 bp, Homo sapien
caatgtggagttggcggtggatgta

SEQ ID NO: 382887 - DNA, 25 bp, Homo sapien
taccagcctcaatgtggagttggcg

SEQ ID NO: 382888 - DNA, 25 bp, Homo sapien
tttaccagcctcaatgtggagttgg

SEQ ID NO: 382889 - DNA, 25 bp, Homo sapien
gatgctgcgaatatcctcctgaggc

SEQ ID NO: 382890 - DNA, 25 bp, Homo sapien
catgcacatgcaaaatcattgcagg

SEQ ID NO: 382891 - DNA, 25 bp, Homo sapien
tataagtgccaacaccacaacatgc

SEQ ID NO: 382892 - DNA, 25 bp, Homo sapien
tcattgcaggttgataagaacggtc

SEQ ID NO: 382893 - DNA, 25 bp, Homo sapien
taaatataacgcctttcagccagag

SEQ ID NO: 382894 - DNA, 25 bp, Homo sapien
gggcaatttccgatactctcaccat

SEQ ID NO: 382895 - DNA, 25 bp, Homo sapien
gacgctgagaaaacgggcaatttcc

SEQ ID NO: 382896 - DNA, 25 bp, Homo sapien
ccagagaatcataaagagacgctga

SEQ ID NO: 382897 - DNA, 25 bp, Homo sapien
agtcatgaaaggagggtttgttccg

SEQ ID NO: 382898 - DNA, 25 bp, Homo sapien
tcgggggagctaatttctcctctaa

SEQ ID NO: 382899 - DNA, 25 bp, Homo sapien
tcctcgatcttattcacatccgtct

SEQ ID NO: 382900 - DNA, 25 bp, Homo sapien
gatcttattcacatccgtcttgact

SEQ ID NO: 382901 - DNA, 25 bp, Homo sapien
catcaaactgtgattgccaagctgc

SEQ ID NO: 382902 - DNA, 25 bp, Homo sapien
catctaggagaatggcactggacgg

SEQ ID NO: 382903 - DNA, 25 bp, Homo sapien
tcaaaattggaggatcacagacaag

SEQ ID NO: 382904 - DNA, 25 bp, Homo sapien
cagcagggtgtctaggatacagcca

SEQ ID NO: 382905 - DNA, 25 bp, Homo sapien
agaatttggcaaacacgtcatttcc

SEQ ID NO: 382906 - DNA, 25 bp, Homo sapien
ggcaaacacgtcatttcctgcggaa

SEQ ID NO: 382907 - DNA, 25 bp, Homo sapien
cctgcggaattagattcgggatgtt

SEQ ID NO: 382908 - DNA, 25 bp, Homo sapien
gcatccttcttcgtgttttttataa

SEQ ID NO: 382909 - DNA, 25 bp, Homo sapien
tatggagcttgggtaagaggttgca

SEQ ID NO: 382910 - DNA, 25 bp, Homo sapien
ctcggtgctgtaggcatctatttca

SEQ ID NO: 382911 - DNA, 25 bp, Homo sapien
tgtaggcatctatttcatcaggcag

SEQ ID NO: 382912 - DNA, 25 bp, Homo sapien
caggcagagggctatttaagtaatt

SEQ ID NO: 382913 - DNA, 25 bp, Homo sapien
gacagcacggctacaaacacattcc

SEQ ID NO: 382914 - DNA, 25 bp, Homo sapien
aaccaactctataagatgtgtgcga

SEQ ID NO: 382915 - DNA, 25 bp, Homo sapien
ggtctcactggcattctctctggta

SEQ ID NO: 382916 - DNA, 25 bp, Homo sapien
tgtgtgcgaatgtcagaggaaatca

SEQ ID NO: 382917 - DNA, 25 bp, Homo sapien
gtgttcaatctcttgatcagctgga

SEQ ID NO: 382918 - DNA, 25 bp, Homo sapien
aacatctgaatatgcgtgttcaatc

SEQ ID NO: 382919 - DNA, 25 bp, Homo sapien
cagctggacacgtatttgtgaactc

SEQ ID NO: 382920 - DNA, 25 bp, Homo sapien
catctctagcataagcattattcaa

SEQ ID NO: 382921 - DNA, 25 bp, Homo sapien
cttggttcacatttcagggcaggga

SEQ ID NO: 382922 - DNA, 25 bp, Homo sapien
caaacgaatcgtccctagagcaggt

SEQ ID NO: 382923 - DNA, 25 bp, Homo sapien
taatcgaagagcgaaagaggccact

SEQ ID NO: 382924 - DNA, 25 bp, Homo sapien
tatggttgacaaagacagctgactg

SEQ ID NO: 382925 - DNA, 25 bp, Homo sapien
ttataatttgtttcattttcaaggc

SEQ ID NO: 382926 - DNA, 25 bp, Homo sapien
tgtttcattttcaaggcacaaagag

SEQ ID NO: 382927 - DNA, 25 bp, Homo sapien
aatttgtttcattttcaaggcacaa

SEQ ID NO: 382928 - DNA, 25 bp, Homo sapien
tttgtttcattttcaaggcacaaag

SEQ ID NO: 382929 - DNA, 25 bp, Homo sapien
aatgagccaatggttgcctgtaggg

SEQ ID NO: 382930 - DNA, 25 bp, Homo sapien
gttgcctgtagggtaaatcaccaat

SEQ ID NO: 382931 - DNA, 25 bp, Homo sapien
acaaaatgagccaatggttgcctgt

SEQ ID NO: 382932 - DNA, 25 bp, Homo sapien
gtaaatcaccaatgctctccaacag

SEQ ID NO: 382933 - DNA, 25 bp, Homo sapien
ttcctcctccattccccttatgaag

SEQ ID NO: 382934 - DNA, 25 bp, Homo sapien
catgtataaacggtatatcctgaag

SEQ ID NO: 382935 - DNA, 25 bp, Homo sapien
catatgcacatgtataaacggtata

SEQ ID NO: 382936 - DNA, 25 bp, Homo sapien
gggatctgaaatccgtatgtttcat

SEQ ID NO: 382937 - DNA, 25 bp, Homo sapien
gaagtatcatggatttgaggtcctc

SEQ ID NO: 382938 - DNA, 25 bp, Homo sapien
caggtgctgattcgccggcggaaca

SEQ ID NO: 382939 - DNA, 25 bp, Homo sapien
tcctctgtactggaggcaggacgca

SEQ ID NO: 382940 - DNA, 25 bp, Homo sapien
cagtgcttggtcttgctgggaatcg

SEQ ID NO: 382941 - DNA, 25 bp, Homo sapien
cctttccagctgacgcccagagtga

SEQ ID NO: 382942 - DNA, 25 bp, Homo sapien
taagacgatacagctgcccgtcatg

SEQ ID NO: 382943 - DNA, 25 bp, Homo sapien
gaaagtccggttctaagacgataca

SEQ ID NO: 382944 - DNA, 25 bp, Homo sapien
gccagtgagcttgctccaagagcag

SEQ ID NO: 382945 - DNA, 25 bp, Homo sapien
caagcccagagaagccccctaggag

SEQ ID NO: 382946 - DNA, 25 bp, Homo sapien
ggcaagcccagagaagccccctagg

SEQ ID NO: 382947 - DNA, 25 bp, Homo sapien
gcaagcccagagaagccccctagga

SEQ ID NO: 382948 - DNA, 25 bp, Homo sapien
gtctggtcacgttcacagctctcca

SEQ ID NO: 382949 - DNA, 25 bp, Homo sapien
tcagcacctcagttaagtaattaat

SEQ ID NO: 382950 - DNA, 25 bp, Homo sapien
acagctctccaaaagagactgatgg

SEQ ID NO: 382951 - DNA, 25 bp, Homo sapien
gttaagtaattaataggtctggtca

SEQ ID NO: 382952 - DNA, 25 bp, Homo sapien
cagaactccccaccggaactttcat

SEQ ID NO: 382953 - DNA, 25 bp, Homo sapien
cccgagcgagcttgataagctgaaa

SEQ ID NO: 382954 - DNA, 25 bp, Homo sapien
gagacggtccccgagcgagcttgat

SEQ ID NO: 382955 - DNA, 25 bp, Homo sapien
tgataagctgaaagagacgctcagg

SEQ ID NO: 382956 - DNA, 25 bp, Homo sapien
ggcttgagatcaaggaagtgcctgc

SEQ ID NO: 382957 - DNA, 25 bp, Homo sapien
gcttgagatcaaggaagtgcctgca

SEQ ID NO: 382958 - DNA, 25 bp, Homo sapien
attcaacgatgagacacttccccgg

SEQ ID NO: 382959 - DNA, 25 bp, Homo sapien
tgcaagtggattcaacgatgagaca

SEQ ID NO: 382960 - DNA, 25 bp, Homo sapien
cgtcaactactcaaggggctgtggc

SEQ ID NO: 382961 - DNA, 25 bp, Homo sapien
acgcctataacccagcacataggga

SEQ ID NO: 382962 - DNA, 25 bp, Homo sapien
ggtgcctgtaacgtcaactactcaa

SEQ ID NO: 382963 - DNA, 25 bp, Homo sapien
tacgcctataacccagcacataggg

SEQ ID NO: 382964 - DNA, 25 bp, Homo sapien
tatcacgtcgaggtcttgccgttga

SEQ ID NO: 382965 - DNA, 25 bp, Homo sapien
tgccgttgaggttgtcgtaatgcag

SEQ ID NO: 382966 - DNA, 25 bp, Homo sapien
gtgctcagcgccttttagactttca

SEQ ID NO: 382967 - DNA, 25 bp, Homo sapien
cacgtggagtaatatcacgtcgagg

SEQ ID NO: 382968 - DNA, 25 bp, Homo sapien
tgaagaagttagactcctttcccag

SEQ ID NO: 382969 - DNA, 25 bp, Homo sapien
gtgcccaaccgctttgaagaagtta

SEQ ID NO: 382970 - DNA, 25 bp, Homo sapien
catctgttctctcagcaagcgaggc

SEQ ID NO: 382971 - DNA, 25 bp, Homo sapien
atttcttccccggcacatctgttct

SEQ ID NO: 382972 - DNA, 25 bp, Homo sapien
gattaaactgataaaccagaatcca

SEQ ID NO: 382973 - DNA, 25 bp, Homo sapien
attaaactgataaaccagaatccat

SEQ ID NO: 382974 - DNA, 25 bp, Homo sapien
tgaaacacgaaggtgtcctttgtgc

SEQ ID NO: 382975 - DNA, 25 bp, Homo sapien
ccaacgcacagaggagaatccagtg

SEQ ID NO: 382976 - DNA, 25 bp, Homo sapien
taggagatgtcgcagggaaaacgaa

SEQ ID NO: 382977 - DNA, 25 bp, Homo sapien
tcagtccccgaaagcgtgaaacacg

SEQ ID NO: 382978 - DNA, 25 bp, Homo sapien
gctttgcctgtgtcaaagtgtgggt

SEQ ID NO: 382979 - DNA, 25 bp, Homo sapien
gaactttgagaaccaggcttcagat

SEQ ID NO: 382980 - DNA, 25 bp, Homo sapien
aagtgtgggtacaacccattcaggg

SEQ ID NO: 382981 - DNA, 25 bp, Homo sapien
tgtgtcaaagtgtgggtacaaccca

SEQ ID NO: 382982 - DNA, 25 bp, Homo sapien
cgtgtgtggatgaaggccctctcca

SEQ ID NO: 382983 - DNA, 25 bp, Homo sapien
tccaacttgctacgaaaacattccc

SEQ ID NO: 382984 - DNA, 25 bp, Homo sapien
gttggttgttctgggcatcaggaac

SEQ ID NO: 382985 - DNA, 25 bp, Homo sapien
aacattcccattatcccgagggtgg

SEQ ID NO: 382986 - DNA, 25 bp, Homo sapien
cttatgggaagcagcaggatgaagg

SEQ ID NO: 382987 - DNA, 25 bp, Homo sapien
cacttggtaggtgccaatccagctt

SEQ ID NO: 382988 - DNA, 25 bp, Homo sapien
cagctttgaacctcgttgggacttc

SEQ ID NO: 382989 - DNA, 25 bp, Homo sapien
gttccatcaacaccaaatccttgtg

SEQ ID NO: 382990 - DNA, 25 bp, Homo sapien
ccttcgtgggtgctgcctgttgaca

SEQ ID NO: 382991 - DNA, 25 bp, Homo sapien
acagttgggcccttgaatgttggaa

SEQ ID NO: 382992 - DNA, 25 bp, Homo sapien
cattgccttcgcatatacagttggg

SEQ ID NO: 382993 - DNA, 25 bp, Homo sapien
tagacataacacttccttggaaagc

SEQ ID NO: 382994 - DNA, 25 bp, Homo sapien
tggaaagctcatacaccaagaagaa

SEQ ID NO: 382995 - DNA, 25 bp, Homo sapien
agaaggctaaaggcacttcctacat

SEQ ID NO: 382996 - DNA, 25 bp, Homo sapien
atggcagaaggctaaaggcacttcc

SEQ ID NO: 382997 - DNA, 25 bp, Homo sapien
ggcagaaggctaaaggcacttccta

SEQ ID NO: 382998 - DNA, 25 bp, Homo sapien
cagaaggctaaaggcacttcctaca

SEQ ID NO: 382999 - DNA, 25 bp, Homo sapien
gaattccgttgaagctccttgccta

SEQ ID NO: 383000 - DNA, 25 bp, Homo sapien
tgtgggcacgttgcaaaatacctct

SEQ ID NO: 383001 - DNA, 25 bp, Homo sapien
tagctttgctctaagtcatggcccc

SEQ ID NO: 383002 - DNA, 25 bp, Homo sapien
ccttgcctatgcacttcgggagaaa

SEQ ID NO: 383003 - DNA, 25 bp, Homo sapien
tttctccctggtacaaacgtatgga

SEQ ID NO: 383004 - DNA, 25 bp, Homo sapien
gaaatgtggtcctatttaagccagc

SEQ ID NO: 383005 - DNA, 25 bp, Homo sapien
catcctgaaaattcgtgcgtgggct

SEQ ID NO: 383006 - DNA, 25 bp, Homo sapien
acagtccacggtacacagtcgggtg

SEQ ID NO: 383007 - DNA, 25 bp, Homo sapien
aatttctgaaaagcaccattagccc

SEQ ID NO: 383008 - DNA, 25 bp, Homo sapien
gcagcttatgttgtcaggtcgttct

SEQ ID NO: 383009 - DNA, 25 bp, Homo sapien
tatagcagatctcggacaaactcag

SEQ ID NO: 383010 - DNA, 25 bp, Homo sapien
cacatgcagtagcactttggtaaga

SEQ ID NO: 383011 - DNA, 25 bp, Homo sapien
caccagtgtgacaggaaagattcat

SEQ ID NO: 383012 - DNA, 25 bp, Homo sapien
ctgtgcaccagtgtgacaggaaaga

SEQ ID NO: 383013 - DNA, 25 bp, Homo sapien
tgtgcaccagtgtgacaggaaagat

SEQ ID NO: 383014 - DNA, 25 bp, Homo sapien
tgcaccagtgtgacaggaaagattc

SEQ ID NO: 383015 - DNA, 25 bp, Homo sapien
gcaaacaggaagattcccggaggga

SEQ ID NO: 383016 - DNA, 25 bp, Homo sapien
tgtattcccacaaggaatccccaga

SEQ ID NO: 383017 - DNA, 25 bp, Homo sapien
gagggatgcaactcgccctgtttgg

SEQ ID NO: 383018 - DNA, 25 bp, Homo sapien
cagctacagctttgggtcattttta

SEQ ID NO: 383019 - DNA, 25 bp, Homo sapien
agttctccatggtgggcggcgagcg

SEQ ID NO: 383020 - DNA, 25 bp, Homo sapien
tcccgaaccagagcgacgtggtgga

SEQ ID NO: 383021 - DNA, 25 bp, Homo sapien
catcggcatcggcatgtcggccatg

SEQ ID NO: 383022 - DNA, 25 bp, Homo sapien
gcaagcgcagggaggcccgttccaa

SEQ ID NO: 383023 - DNA, 25 bp, Homo sapien
tgagtttaaaatggaccagctcctt

SEQ ID NO: 383024 - DNA, 25 bp, Homo sapien
gaaccgtctgctatttctgtttgcc

SEQ ID NO: 383025 - DNA, 25 bp, Homo sapien
ggagcttcagccaaggttgaacatt

SEQ ID NO: 383026 - DNA, 25 bp, Homo sapien
tagctgtaagattacacaggagctt

SEQ ID NO: 383027 - DNA, 25 bp, Homo sapien
agcagttagcccagatacagccctt

SEQ ID NO: 383028 - DNA, 25 bp, Homo sapien
gatttgagttcggtgctttccctag

SEQ ID NO: 383029 - DNA, 25 bp, Homo sapien
ccttgggcaccctagtagctgtaac

SEQ ID NO: 383030 - DNA, 25 bp, Homo sapien
tctcagaggcagaacataagcatgt

SEQ ID NO: 383031 - DNA, 25 bp, Homo sapien
agctcctggcagtggcgttcttcct

SEQ ID NO: 383032 - DNA, 25 bp, Homo sapien
ctcctggcagtggcgttcttcctcc

SEQ ID NO: 383033 - DNA, 25 bp, Homo sapien
tagctcctggcagtggcgttcttcc

SEQ ID NO: 383034 - DNA, 25 bp, Homo sapien
gctagctcctggcagtggcgttctt

SEQ ID NO: 383035 - DNA, 25 bp, Homo sapien
tgttttcggctcacagagctggctc

SEQ ID NO: 383036 - DNA, 25 bp, Homo sapien
gtactggaggtgttggccccgaatc

SEQ ID NO: 383037 - DNA, 25 bp, Homo sapien
catctccagtcgaggaggtgcaggc

SEQ ID NO: 383038 - DNA, 25 bp, Homo sapien
caatgagggccttgttagacacatc

SEQ ID NO: 383039 - DNA, 25 bp, Homo sapien
ttgagtaaataccatcctgtgccga

SEQ ID NO: 383040 - DNA, 25 bp, Homo sapien
taaccaagtttcaccgtcctgtgtg

SEQ ID NO: 383041 - DNA, 25 bp, Homo sapien
caacagagtacacggctatgagagg

SEQ ID NO: 383042 - DNA, 25 bp, Homo sapien
gatggtcctgtcatcccggttcagg

SEQ ID NO: 383043 - DNA, 25 bp, Homo sapien
tttactcatgagacactcgaggccc

SEQ ID NO: 383044 - DNA, 25 bp, Homo sapien
caaatatttagcatggatcccggta

SEQ ID NO: 383045 - DNA, 25 bp, Homo sapien
tatcaccagttagttgtacccatcg

SEQ ID NO: 383046 - DNA, 25 bp, Homo sapien
ctatttatgtgctcttattggcggc

SEQ ID NO: 383047 - DNA, 25 bp, Homo sapien
cttggagcctcagctttgcacgaca

SEQ ID NO: 383048 - DNA, 25 bp, Homo sapien
gctttgcacgacaggactggctctg

SEQ ID NO: 383049 - DNA, 25 bp, Homo sapien
ttggagcctcagctttgcacgacag

SEQ ID NO: 383050 - DNA, 25 bp, Homo sapien
caggactggctctggtttaaggaca

SEQ ID NO: 383051 - DNA, 25 bp, Homo sapien
tgaaatgagcacaaaacctgccggc

SEQ ID NO: 383052 - DNA, 25 bp, Homo sapien
gcagcctttgccgactggcattatt

SEQ ID NO: 383053 - DNA, 25 bp, Homo sapien
tctgaggcagatagagctctccaca

SEQ ID NO: 383054 - DNA, 25 bp, Homo sapien
caaaaatgccactaagtgcctgagg

SEQ ID NO: 383055 - DNA, 25 bp, Homo sapien
ctaagagagacacaactgccaagag

SEQ ID NO: 383056 - DNA, 25 bp, Homo sapien
agagacacaactgccaagagctgtt

SEQ ID NO: 383057 - DNA, 25 bp, Homo sapien
tttttccaagctgtggctgtagact

SEQ ID NO: 383058 - DNA, 25 bp, Homo sapien
acacaactgccaagagctgtttttc

SEQ ID NO: 383059 - DNA, 25 bp, Homo sapien
ttgggtgtctccgtggcacaggtcc

SEQ ID NO: 383060 - DNA, 25 bp, Homo sapien
tgttgggtgtctccgtggcacaggt

SEQ ID NO: 383061 - DNA, 25 bp, Homo sapien
cctgttgggtgtctccgtggcacag

SEQ ID NO: 383062 - DNA, 25 bp, Homo sapien
gggtgtctccgtggcacaggtcccc

SEQ ID NO: 383063 - DNA, 25 bp, Homo sapien
taaagcccggtactcagtgagaaag

SEQ ID NO: 383064 - DNA, 25 bp, Homo sapien
atcctggttctacccaagggcttga

SEQ ID NO: 383065 - DNA, 25 bp, Homo sapien
ggtgttcagagctgcatcctggttc

SEQ ID NO: 383066 - DNA, 25 bp, Homo sapien
taaagcaccgccctgtaaacattca

SEQ ID NO: 383067 - DNA, 25 bp, Homo sapien
cccagttattgtaggagacagagac

SEQ ID NO: 383068 - DNA, 25 bp, Homo sapien
cagaatgtgcccagttattgtagga

SEQ ID NO: 383069 - DNA, 25 bp, Homo sapien
cagagacggtcacacaccggcctat

SEQ ID NO: 383070 - DNA, 25 bp, Homo sapien
tcagactgattatcatgacagtgac

SEQ ID NO: 383071 - DNA, 25 bp, Homo sapien
ctgacagctagacttggcagtggct

SEQ ID NO: 383072 - DNA, 25 bp, Homo sapien
aagtttttctgtagttacatttcag

SEQ ID NO: 383073 - DNA, 25 bp, Homo sapien
tcaggcccggactgattcaacttct

SEQ ID NO: 383074 - DNA, 25 bp, Homo sapien
tgagacaattctcatgaaactgctc

SEQ ID NO: 383075 - DNA, 25 bp, Homo sapien
gaaactgctcagttatgatattgta

SEQ ID NO: 383076 - DNA, 25 bp, Homo sapien
gcttgctacacttgtcttggcccat

SEQ ID NO: 383077 - DNA, 25 bp, Homo sapien
tgcttttaggagaggcccgagtctc

SEQ ID NO: 383078 - DNA, 25 bp, Homo sapien
ttttgtcccgtgagtcttgggcgca

SEQ ID NO: 383079 - DNA, 25 bp, Homo sapien
tgggcgaaaaactccactgctcgtg

SEQ ID NO: 383080 - DNA, 25 bp, Homo sapien
cagccatctgtccaagggctttgca

SEQ ID NO: 383081 - DNA, 25 bp, Homo sapien
ccaagggctttgcaaggccagccta

SEQ ID NO: 383082 - DNA, 25 bp, Homo sapien
tcagccatctgtccaagggctttgc

SEQ ID NO: 383083 - DNA, 25 bp, Homo sapien
aagggctttgcaaggccagcctaga

SEQ ID NO: 383084 - DNA, 25 bp, Homo sapien
ctttcgaatcgggaaaggattgagg

SEQ ID NO: 383085 - DNA, 25 bp, Homo sapien
atgttgccggacagaaggctgtcct

SEQ ID NO: 383086 - DNA, 25 bp, Homo sapien
tttcgaatcgggaaaggattgagga

SEQ ID NO: 383087 - DNA, 25 bp, Homo sapien
gaggagggggaatgttgccggacag

SEQ ID NO: 383088 - DNA, 25 bp, Homo sapien
agggagaatggatcaaccccaggcc

SEQ ID NO: 383089 - DNA, 25 bp, Homo sapien
gcccctgggatgtcctgccaaactg

SEQ ID NO: 383090 - DNA, 25 bp, Homo sapien
atggttgtaggagcaattgttcttt

SEQ ID NO: 383091 - DNA, 25 bp, Homo sapien
gatgaatgaaggtccacgccagagt

SEQ ID NO: 383092 - DNA, 25 bp, Homo sapien
tttcccaggacgagtcaaaaactgc

SEQ ID NO: 383093 - DNA, 25 bp, Homo sapien
tctattcttcgggtgattcagccag

SEQ ID NO: 383094 - DNA, 25 bp, Homo sapien
tgttcatttgctgacatgctgccgg

SEQ ID NO: 383095 - DNA, 25 bp, Homo sapien
cagctgcttggaggtgagaatcttc

SEQ ID NO: 383096 - DNA, 25 bp, Homo sapien
cagagtagtggtccaagtctgggtc

SEQ ID NO: 383097 - DNA, 25 bp, Homo sapien
tgcagagtagtggtccaagtctggg

SEQ ID NO: 383098 - DNA, 25 bp, Homo sapien
gagtagtggtccaagtctgggtccc

SEQ ID NO: 383099 - DNA, 25 bp, Homo sapien
ctgcagagtagtggtccaagtctgg

SEQ ID NO: 383100 - DNA, 25 bp, Homo sapien
ttcttccggtgttggccttcacgaa

SEQ ID NO: 383101 - DNA, 25 bp, Homo sapien
tgaccccggggtgttgtacaacata

SEQ ID NO: 383102 - DNA, 25 bp, Homo sapien
catagacctcttcttccggtgttgg

SEQ ID NO: 383103 - DNA, 25 bp, Homo sapien
ccttcacgaaagatgggtaaagtgg

SEQ ID NO: 383104 - DNA, 25 bp, Homo sapien
gctgtgctcggtgactccctccaga

SEQ ID NO: 383105 - DNA, 25 bp, Homo sapien
tccatttgctgtgctcggtgactcc

SEQ ID NO: 383106 - DNA, 25 bp, Homo sapien
tttctgatcgagactttctggccat

SEQ ID NO: 383107 - DNA, 25 bp, Homo sapien
caggatatggtgttcctcgtctgct

SEQ ID NO: 383108 - DNA, 25 bp, Homo sapien
ccaaagtccttgagtggatggagct

SEQ ID NO: 383109 - DNA, 25 bp, Homo sapien
caagctgcatcaactttcccaaagt

SEQ ID NO: 383110 - DNA, 25 bp, Homo sapien
tggaaccattccccaagctgcatca

SEQ ID NO: 383111 - DNA, 25 bp, Homo sapien
tcccaaagtccttgagtggatggag

SEQ ID NO: 383112 - DNA, 25 bp, Homo sapien
cacaacctcatggcatctgggtcac

SEQ ID NO: 383113 - DNA, 25 bp, Homo sapien
gccacaacctcatggcatctgggtc

SEQ ID NO: 383114 - DNA, 25 bp, Homo sapien
ccacaacctcatggcatctgggtca

SEQ ID NO: 383115 - DNA, 25 bp, Homo sapien
tgttttgttctctatcgtgtcccca

SEQ ID NO: 383116 - DNA, 25 bp, Homo sapien
actgtcttcacaaacccaccgcaag

SEQ ID NO: 383117 - DNA, 25 bp, Homo sapien
ttgttctctatcgtgtccccacagg

SEQ ID NO: 383118 - DNA, 25 bp, Homo sapien
tgtcttcacaaacccaccgcaagtc

SEQ ID NO: 383119 - DNA, 25 bp, Homo sapien
tctgggagactaggtctacacagcc

SEQ ID NO: 383120 - DNA, 25 bp, Homo sapien
ctacacagccgcaaactgcattcag

SEQ ID NO: 383121 - DNA, 25 bp, Homo sapien
tctgtgagggctacatgggtatata

SEQ ID NO: 383122 - DNA, 25 bp, Homo sapien
tacatgggtatatagaaaagggtcc

SEQ ID NO: 383123 - DNA, 25 bp, Homo sapien
ttggatcctccaggctgccaacaga

SEQ ID NO: 383124 - DNA, 25 bp, Homo sapien
cagaccaaggccagtgagtgcttca

SEQ ID NO: 383125 - DNA, 25 bp, Homo sapien
gtgcttcagggagccttggatcctc

SEQ ID NO: 383126 - DNA, 25 bp, Homo sapien
gaaacaccggccctctcggcagcag

SEQ ID NO: 383127 - DNA, 25 bp, Homo sapien
gaacccaagccctggctggaactga

SEQ ID NO: 383128 - DNA, 25 bp, Homo sapien
tcctggaacccaagccctggctgga

SEQ ID NO: 383129 - DNA, 25 bp, Homo sapien
gcttctaatggtcttctaatggtcc

SEQ ID NO: 383130 - DNA, 25 bp, Homo sapien
cagtatgagtgtcgtttggtgcttc

SEQ ID NO: 383131 - DNA, 25 bp, Homo sapien
cttggactacttgaggacttccgga

SEQ ID NO: 383132 - DNA, 25 bp, Homo sapien
gccttggactacttgaggacttccg

SEQ ID NO: 383133 - DNA, 25 bp, Homo sapien
tggactacttgaggacttccggatg

SEQ ID NO: 383134 - DNA, 25 bp, Homo sapien
actacttgaggacttccggatgttc

SEQ ID NO: 383135 - DNA, 25 bp, Homo sapien
ttaggagttgttactttttgcagtg

SEQ ID NO: 383136 - DNA, 25 bp, Homo sapien
tgagacaagacataggttaggagtt

SEQ ID NO: 383137 - DNA, 25 bp, Homo sapien
gacaagacataggttaggagttgtt

SEQ ID NO: 383138 - DNA, 25 bp, Homo sapien
caagacataggttaggagttgttac

SEQ ID NO: 383139 - DNA, 25 bp, Homo sapien
tgccccagcatgtcagttttgccat

SEQ ID NO: 383140 - DNA, 25 bp, Homo sapien
cagggcacgatgatttgaaaacaaa

SEQ ID NO: 383141 - DNA, 25 bp, Homo sapien
agactcccctaggtgttcccagtgc

SEQ ID NO: 383142 - DNA, 25 bp, Homo sapien
ttttacactgagattcagggcacga

SEQ ID NO: 383143 - DNA, 25 bp, Homo sapien
aggtttgtgggtttgccgcccacag

SEQ ID NO: 383144 - DNA, 25 bp, Homo sapien
caccaaaatggctcagtctgcatac

SEQ ID NO: 383145 - DNA, 25 bp, Homo sapien
aaagcaaggtcttggtgtgtgtcac

SEQ ID NO: 383146 - DNA, 25 bp, Homo sapien
gccacccgcagacagatggctgggt

SEQ ID NO: 383147 - DNA, 25 bp, Homo sapien
atgtcacacaggtgaggtccacgag

SEQ ID NO: 383148 - DNA, 25 bp, Homo sapien
ccctgaatacttcagcagagagtcc

SEQ ID NO: 383149 - DNA, 25 bp, Homo sapien
acgaggactgcagaaactaggaagc

SEQ ID NO: 383150 - DNA, 25 bp, Homo sapien
ctgaatacttcagcagagagtccat

SEQ ID NO: 383151 - DNA, 25 bp, Homo sapien
gttgaagacagagcaatcgacggca

SEQ ID NO: 383152 - DNA, 25 bp, Homo sapien
tgaagacagagcaatcgacggcatt

SEQ ID NO: 383153 - DNA, 25 bp, Homo sapien
tcgacggcattcagtttgcactgca

SEQ ID NO: 383154 - DNA, 25 bp, Homo sapien
cagagcaatcgacggcattcagttt

SEQ ID NO: 383155 - DNA, 25 bp, Homo sapien
tataaacatgcattcctggacttca

SEQ ID NO: 383156 - DNA, 25 bp, Homo sapien
gcagcgcgcatactccatcattggt

SEQ ID NO: 383157 - DNA, 25 bp, Homo sapien
tgctgtgagtcctacattcaacgga

SEQ ID NO: 383158 - DNA, 25 bp, Homo sapien
ctggacttcaggcagcgcgcatact

SEQ ID NO: 383159 - DNA, 25 bp, Homo sapien
tgcctatgaatactatgacatgcgc

SEQ ID NO: 383160 - DNA, 25 bp, Homo sapien
gggacagatcgcagcacttcaacgt

SEQ ID NO: 383161 - DNA, 25 bp, Homo sapien
tgcgctcgttttgtcggctccctgg

SEQ ID NO: 383162 - DNA, 25 bp, Homo sapien
taatgagctgcctatgaatactatg

SEQ ID NO: 383163 - DNA, 25 bp, Homo sapien
cgcaggcaatctccctaggaagtta

SEQ ID NO: 383164 - DNA, 25 bp, Homo sapien
ggatcttaaataagccgcaggcaat

SEQ ID NO: 383165 - DNA, 25 bp, Homo sapien
tatattccctatggtaaagagaagc

SEQ ID NO: 383166 - DNA, 25 bp, Homo sapien
aaaagttcaagcagatcccctgaga

SEQ ID NO: 383167 - DNA, 25 bp, Homo sapien
gaacgtgtatgttggtctcccggga

SEQ ID NO: 383168 - DNA, 25 bp, Homo sapien
gccgatccgcagaaccagaacgttt

SEQ ID NO: 383169 - DNA, 25 bp, Homo sapien
tgcagggtcctaactcaatcggctt

SEQ ID NO: 383170 - DNA, 25 bp, Homo sapien
taagcaatcggttgctaggagccca

SEQ ID NO: 383171 - DNA, 25 bp, Homo sapien
tagaaccctgagtgtcatcgactgg

SEQ ID NO: 383172 - DNA, 25 bp, Homo sapien
gctgataccggaaaggcctgtgatt

SEQ ID NO: 383173 - DNA, 25 bp, Homo sapien
gatctgtttcgatctgcgccgcgga

SEQ ID NO: 383174 - DNA, 25 bp, Homo sapien
cagatgtgggagagctgtagaaccc

SEQ ID NO: 383175 - DNA, 25 bp, Homo sapien
aactttccttccagccgcgcgttct

SEQ ID NO: 383176 - DNA, 25 bp, Homo sapien
ccagccgcgcgttcttggggtcttt

SEQ ID NO: 383177 - DNA, 25 bp, Homo sapien
tccagccgcgcgttcttggggtctt

SEQ ID NO: 383178 - DNA, 25 bp, Homo sapien
tttccttccagccgcgcgttcttgg

SEQ ID NO: 383179 - DNA, 25 bp, Homo sapien
acgcggggcccgggcaggctgtccg

SEQ ID NO: 383180 - DNA, 25 bp, Homo sapien
agacgcggggcccgggcaggctgtc

SEQ ID NO: 383181 - DNA, 25 bp, Homo sapien
cgcggggcccgggcaggctgtccgg

SEQ ID NO: 383182 - DNA, 25 bp, Homo sapien
ggagacgcggggcccgggcaggctg

SEQ ID NO: 383183 - DNA, 25 bp, Homo sapien
ggccggctgcgactctatattggaa

SEQ ID NO: 383184 - DNA, 25 bp, Homo sapien
tatattggaacctcggaaacgcgcc

SEQ ID NO: 383185 - DNA, 25 bp, Homo sapien
tcgaacgctagttcttcccgggcga

SEQ ID NO: 383186 - DNA, 25 bp, Homo sapien
acaaaactgaactcgggtgctggca

SEQ ID NO: 383187 - DNA, 25 bp, Homo sapien
cagaacttgcctctagagcgggccg

SEQ ID NO: 383188 - DNA, 25 bp, Homo sapien
aaagcctacttttggagccgccaca

SEQ ID NO: 383189 - DNA, 25 bp, Homo sapien
tatcggttgaaactcctagctgagc

SEQ ID NO: 383190 - DNA, 25 bp, Homo sapien
taaactcggtgcatgcaaggctggg

SEQ ID NO: 383191 - DNA, 25 bp, Homo sapien
agtgcaggctccgtaaaatgcccgg

SEQ ID NO: 383192 - DNA, 25 bp, Homo sapien
gaaaaatctgtcacgtagcatccgc

SEQ ID NO: 383193 - DNA, 25 bp, Homo sapien
ggaattcctcacttcgtacacgctg

SEQ ID NO: 383194 - DNA, 25 bp, Homo sapien
tagcattactccagggaaacactgg

SEQ ID NO: 383195 - DNA, 25 bp, Homo sapien
ttccctacatcccattcgctttcta

SEQ ID NO: 383196 - DNA, 25 bp, Homo sapien
ctacatcccattcgctttctactct

SEQ ID NO: 383197 - DNA, 25 bp, Homo sapien
tccttccctacatcccattcgcttt

SEQ ID NO: 383198 - DNA, 25 bp, Homo sapien
tcccattcgctttctactctctgct

SEQ ID NO: 383199 - DNA, 25 bp, Homo sapien
gagaagtctccgcaaaaaatgttta

SEQ ID NO: 383200 - DNA, 25 bp, Homo sapien
ttctaagcaagtccaaaacaatcat

SEQ ID NO: 383201 - DNA, 25 bp, Homo sapien
taaccattacaatacagatcttagc

SEQ ID NO: 383202 - DNA, 25 bp, Homo sapien
cacttaactattgtttgagaggtag

SEQ ID NO: 383203 - DNA, 25 bp, Homo sapien
gaagggcccatattatgttcgttga

SEQ ID NO: 383204 - DNA, 25 bp, Homo sapien
ctttgcccacgggaagggcccatat

SEQ ID NO: 383205 - DNA, 25 bp, Homo sapien
ccatattatgttcgttgaacatggg

SEQ ID NO: 383206 - DNA, 25 bp, Homo sapien
acgggaagggcccatattatgttcg

SEQ ID NO: 383207 - DNA, 25 bp, Homo sapien
catgctccttcatcagcccatgtga

SEQ ID NO: 383208 - DNA, 25 bp, Homo sapien
cagcccatgtgatgtagatcactgt

SEQ ID NO: 383209 - DNA, 25 bp, Homo sapien
tacttgtaaggacatcttgcagttc

SEQ ID NO: 383210 - DNA, 25 bp, Homo sapien
gactccagcaggcaattgtggtgac

SEQ ID NO: 383211 - DNA, 25 bp, Homo sapien
cagaaggacaatgaggaagagatga

SEQ ID NO: 383212 - DNA, 25 bp, Homo sapien
gaacagggggcttccccaggcctca

SEQ ID NO: 383213 - DNA, 25 bp, Homo sapien
atgagggaacagggggcttccccag

SEQ ID NO: 383214 - DNA, 25 bp, Homo sapien
gaagagatgagggaacagggggctt

SEQ ID NO: 383215 - DNA, 25 bp, Homo sapien
agggtgaacagggccggtctcatca

SEQ ID NO: 383216 - DNA, 25 bp, Homo sapien
agggccggtctcatcactattcagt

SEQ ID NO: 383217 - DNA, 25 bp, Homo sapien
ttaaaaacgtgcataactgtcatca

SEQ ID NO: 383218 - DNA, 25 bp, Homo sapien
cataactgtcatcagggtgaacagg

SEQ ID NO: 383219 - DNA, 25 bp, Homo sapien
gggctacttgtagcatgtaacaagg

SEQ ID NO: 383220 - DNA, 25 bp, Homo sapien
taacaaggacgcatctcacagtact

SEQ ID NO: 383221 - DNA, 25 bp, Homo sapien
tgtttagtttgaaacaagtccacca

SEQ ID NO: 383222 - DNA, 25 bp, Homo sapien
tcatgcactaacagctctgcagaag

SEQ ID NO: 383223 - DNA, 25 bp, Homo sapien
ctcctctgttactgctagacctgca

SEQ ID NO: 383224 - DNA, 25 bp, Homo sapien
gtgtccacaaagatgctcctatatt

SEQ ID NO: 383225 - DNA, 25 bp, Homo sapien
ttactgctagacctgcagacccagt

SEQ ID NO: 383226 - DNA, 25 bp, Homo sapien
tgaatccattatgccctcctctgtt

SEQ ID NO: 383227 - DNA, 25 bp, Homo sapien
ccttctatggggacgcccatcctgt

SEQ ID NO: 383228 - DNA, 25 bp, Homo sapien
tggggacgcccatcctgtttccatt

SEQ ID NO: 383229 - DNA, 25 bp, Homo sapien
gctaaaaccagagacgaatgcttcg

SEQ ID NO: 383230 - DNA, 25 bp, Homo sapien
gcacgcctaggtcagtcatacaata

SEQ ID NO: 383231 - DNA, 25 bp, Homo sapien
ggagcaaagagacatggcacgccta

SEQ ID NO: 383232 - DNA, 25 bp, Homo sapien
taatcttgcgtgcttcaggccaggc

SEQ ID NO: 383233 - DNA, 25 bp, Homo sapien
caggctgtgctctgtaacccgtggc

SEQ ID NO: 383234 - DNA, 25 bp, Homo sapien
gaacaatgtgggtgcctgtcctagg

SEQ ID NO: 383235 - DNA, 25 bp, Homo sapien
ggcatcagatccactccttccaaaa

SEQ ID NO: 383236 - DNA, 25 bp, Homo sapien
gccacgtggaaatcatcaggttatt

SEQ ID NO: 383237 - DNA, 25 bp, Homo sapien
ctgtttcagcgtcggggtagagaca

SEQ ID NO: 383238 - DNA, 25 bp, Homo sapien
gaataatgccccattgattcaccgt

SEQ ID NO: 383239 - DNA, 25 bp, Homo sapien
acagctgtgctgaataatgccccat

SEQ ID NO: 383240 - DNA, 25 bp, Homo sapien
tgccccattgattcaccgtcaaaat

SEQ ID NO: 383241 - DNA, 25 bp, Homo sapien
tgggtctctcgaaagcctcccttct

SEQ ID NO: 383242 - DNA, 25 bp, Homo sapien
caggcccagtgggtctctcgaaagc

SEQ ID NO: 383243 - DNA, 25 bp, Homo sapien
ccagtgggtctctcgaaagcctccc

SEQ ID NO: 383244 - DNA, 25 bp, Homo sapien
cccttctggaggaatctgctctcac

SEQ ID NO: 383245 - DNA, 25 bp, Homo sapien
tgaagagaacgatttacagccactg

SEQ ID NO: 383246 - DNA, 25 bp, Homo sapien
tgcagttctctcgtttgtagcctcc

SEQ ID NO: 383247 - DNA, 25 bp, Homo sapien
cactgcagttctctcgtttgtagcc

SEQ ID NO: 383248 - DNA, 25 bp, Homo sapien
gaacgatttacagccactgcagttc

SEQ ID NO: 383249 - DNA, 25 bp, Homo sapien
ctcttcagaggccacgccaaaggac

SEQ ID NO: 383250 - DNA, 25 bp, Homo sapien
ttgtcccacatttggactcttcaga

SEQ ID NO: 383251 - DNA, 25 bp, Homo sapien
gaagcttcctagcatcctctctgat

SEQ ID NO: 383252 - DNA, 25 bp, Homo sapien
cgctttcggagggtcttgtcccaca

SEQ ID NO: 383253 - DNA, 25 bp, Homo sapien
aataagaaggcaacagggaggccac

SEQ ID NO: 383254 - DNA, 25 bp, Homo sapien
gaggataagttttcccaatggtagc

SEQ ID NO: 383255 - DNA, 25 bp, Homo sapien
aggccactgaggagcggtaaggtag

SEQ ID NO: 383256 - DNA, 25 bp, Homo sapien
ggtaggaaaggtgtttgcctcatga

SEQ ID NO: 383257 - DNA, 25 bp, Homo sapien
gcaactggacaatgggattattata

SEQ ID NO: 383258 - DNA, 25 bp, Homo sapien
aacccgtgggtccagttgcatgcaa

SEQ ID NO: 383259 - DNA, 25 bp, Homo sapien
attattataaaagaagatgcctgcc

SEQ ID NO: 383260 - DNA, 25 bp, Homo sapien
atgcctgccaaatgatgcctgctgt

SEQ ID NO: 383261 - DNA, 25 bp, Homo sapien
acttattgttcggatctcagaaggc

SEQ ID NO: 383262 - DNA, 25 bp, Homo sapien
caggcaagtcttcagctaatatgga

SEQ ID NO: 383263 - DNA, 25 bp, Homo sapien
tttccgtagagttccctggcagagg

SEQ ID NO: 383264 - DNA, 25 bp, Homo sapien
caaagcttgccctcgtttccgtaga

SEQ ID NO: 383265 - DNA, 25 bp, Homo sapien
tcaagtcaaaacttggctgaaccac

SEQ ID NO: 383266 - DNA, 25 bp, Homo sapien
gtcaaaacttggctgaaccacaaag

SEQ ID NO: 383267 - DNA, 25 bp, Homo sapien
acttggctgaaccacaaagcttcac

SEQ ID NO: 383268 - DNA, 25 bp, Homo sapien
caaaacttggctgaaccacaaagct

SEQ ID NO: 383269 - DNA, 25 bp, Homo sapien
gctttttggcctctccagcgacatt

SEQ ID NO: 383270 - DNA, 25 bp, Homo sapien
cacactagaaggatgttggaagaaa

SEQ ID NO: 383271 - DNA, 25 bp, Homo sapien
ttttggcctctccagcgacattctc

SEQ ID NO: 383272 - DNA, 25 bp, Homo sapien
tacatagcaataggtcacactagaa

SEQ ID NO: 383273 - DNA, 25 bp, Homo sapien
cagtagaaatactcacttggtaacc

SEQ ID NO: 383274 - DNA, 25 bp, Homo sapien
gcctacgtcttctctaagttggtga

SEQ ID NO: 383275 - DNA, 25 bp, Homo sapien
aattgtagctgatgcttccagtaga

SEQ ID NO: 383276 - DNA, 25 bp, Homo sapien
cttggtaacctcaagctatttctgg

SEQ ID NO: 383277 - DNA, 25 bp, Homo sapien
gcaggcttttggccaagcatcagcc

SEQ ID NO: 383278 - DNA, 25 bp, Homo sapien
ttgcaggcttttggccaagcatcag

SEQ ID NO: 383279 - DNA, 25 bp, Homo sapien
ccttgcaggcttttggccaagcatc

SEQ ID NO: 383280 - DNA, 25 bp, Homo sapien
aggcttttggccaagcatcagcccc

SEQ ID NO: 383281 - DNA, 25 bp, Homo sapien
tgacggggtctatctgcatcttcat

SEQ ID NO: 383282 - DNA, 25 bp, Homo sapien
catgacggggtctatctgcatcttc

SEQ ID NO: 383283 - DNA, 25 bp, Homo sapien
gacggggtctatctgcatcttcatg

SEQ ID NO: 383284 - DNA, 25 bp, Homo sapien
tcacatgacggggtctatctgcatc

SEQ ID NO: 383285 - DNA, 25 bp, Homo sapien
gcaagcaccctttgacaaacctagt

SEQ ID NO: 383286 - DNA, 25 bp, Homo sapien
tggcagcctattactccctgctctg

SEQ ID NO: 383287 - DNA, 25 bp, Homo sapien
agactgggtcactccattgaggtcc

SEQ ID NO: 383288 - DNA, 25 bp, Homo sapien
tagttctgccccgatgggcctgaac

SEQ ID NO: 383289 - DNA, 25 bp, Homo sapien
ggcctgtcaatcatgtcggtcccat

SEQ ID NO: 383290 - DNA, 25 bp, Homo sapien
ttccctggcctgtcaatcatgtcgg

SEQ ID NO: 383291 - DNA, 25 bp, Homo sapien
cggtcccattgggactggcttcagg

SEQ ID NO: 383292 - DNA, 25 bp, Homo sapien
caatcatgtcggtcccattgggact

SEQ ID NO: 383293 - DNA, 25 bp, Homo sapien
acagcaactcctctgagccccacaa

SEQ ID NO: 383294 - DNA, 25 bp, Homo sapien
cagcaactcctctgagccccacaaa

SEQ ID NO: 383295 - DNA, 25 bp, Homo sapien
aaacagcaactcctctgagccccac

SEQ ID NO: 383296 - DNA, 25 bp, Homo sapien
aacagcaactcctctgagccccaca

SEQ ID NO: 383297 - DNA, 25 bp, Homo sapien
cagtttttgaaagtactagatgatg

SEQ ID NO: 383298 - DNA, 25 bp, Homo sapien
tgggaaggacagttgtacaggagcc

SEQ ID NO: 383299 - DNA, 25 bp, Homo sapien
acagttgtacaggagccgaggcgag

SEQ ID NO: 383300 - DNA, 25 bp, Homo sapien
tcagcaggtcctaggggtaagaatg

SEQ ID NO: 383301 - DNA, 25 bp, Homo sapien
cgccagatacgaggtgaagcaccca

SEQ ID NO: 383302 - DNA, 25 bp, Homo sapien
cctgggctgccacgaaggcgtttgt

SEQ ID NO: 383303 - DNA, 25 bp, Homo sapien
caagagagtggtcctttcagggaac

SEQ ID NO: 383304 - DNA, 25 bp, Homo sapien
tctggccacaaggtagctgcattgc

SEQ ID NO: 383305 - DNA, 25 bp, Homo sapien
tatccctgtccaggagtgacatcgc

SEQ ID NO: 383306 - DNA, 25 bp, Homo sapien
gaaattgccacgtcttcctcaaagc

SEQ ID NO: 383307 - DNA, 25 bp, Homo sapien
taccccatcctatagctacatcagt

SEQ ID NO: 383308 - DNA, 25 bp, Homo sapien
atagattagattgggaaacttggcc

SEQ ID NO: 383309 - DNA, 25 bp, Homo sapien
gtgtacgggaacagaagtgcccagt

SEQ ID NO: 383310 - DNA, 25 bp, Homo sapien
gagggtgtacgggaacagaagtgcc

SEQ ID NO: 383311 - DNA, 25 bp, Homo sapien
acagaagtgcccagtcagtattagg

SEQ ID NO: 383312 - DNA, 25 bp, Homo sapien
cgggaacagaagtgcccagtcagta

SEQ ID NO: 383313 - DNA, 25 bp, Homo sapien
gacttcttgccaccctgttcacggg

SEQ ID NO: 383314 - DNA, 25 bp, Homo sapien
catccattgctgacttcggctacca

SEQ ID NO: 383315 - DNA, 25 bp, Homo sapien
aatggcgttgcggttccagccagga

SEQ ID NO: 383316 - DNA, 25 bp, Homo sapien
ctttcgggcttaaatgccacgggtg

SEQ ID NO: 383317 - DNA, 25 bp, Homo sapien
ctgcactctgtggagttgactttca

SEQ ID NO: 383318 - DNA, 25 bp, Homo sapien
ctctgcactctgtggagttgacttt

SEQ ID NO: 383319 - DNA, 25 bp, Homo sapien
tctgcactctgtggagttgactttc

SEQ ID NO: 383320 - DNA, 25 bp, Homo sapien
ccttgatgtatcttggttttgtcac

SEQ ID NO: 383321 - DNA, 25 bp, Homo sapien
ccaggtcagcccctaactcactcac

SEQ ID NO: 383322 - DNA, 25 bp, Homo sapien
tgttgagcaacagcctgagaatcag

SEQ ID NO: 383323 - DNA, 25 bp, Homo sapien
tcagctgttgagcaacagcctgaga

SEQ ID NO: 383324 - DNA, 25 bp, Homo sapien
gctgttgagcaacagcctgagaatc

SEQ ID NO: 383325 - DNA, 25 bp, Homo sapien
gattttcctaccagctgtctacttg

SEQ ID NO: 383326 - DNA, 25 bp, Homo sapien
tcccttgctattgagacttgctctc

SEQ ID NO: 383327 - DNA, 25 bp, Homo sapien
ggcatcccacacttagccataactg

SEQ ID NO: 383328 - DNA, 25 bp, Homo sapien
tgctctcacccagccaaagtcaagt

SEQ ID NO: 383329 - DNA, 25 bp, Homo sapien
caagtgtacacaagtagtcaatggc

SEQ ID NO: 383330 - DNA, 25 bp, Homo sapien
accagtctcttggtccaagtgtaca

SEQ ID NO: 383331 - DNA, 25 bp, Homo sapien
catggatgtgactggtatcaaacca

SEQ ID NO: 383332 - DNA, 25 bp, Homo sapien
caatggctggcagagtcacgatgaa

SEQ ID NO: 383333 - DNA, 25 bp, Homo sapien
ttatttgatacaagaaagttctggc

SEQ ID NO: 383334 - DNA, 25 bp, Homo sapien
gaggtaggagagaggccaccaaggg

SEQ ID NO: 383335 - DNA, 25 bp, Homo sapien
gaaggtctggactctggtacccaaa

SEQ ID NO: 383336 - DNA, 25 bp, Homo sapien
tcacaaaataaagggcctgaacgag

SEQ ID NO: 383337 - DNA, 25 bp, Homo sapien
ggtacccaaaagggctgctatcctg

SEQ ID NO: 383338 - DNA, 25 bp, Homo sapien
gggtttgtgcagaagtgttggttcc

SEQ ID NO: 383339 - DNA, 25 bp, Homo sapien
tcggtggggtttgtgcagaagtgtt

SEQ ID NO: 383340 - DNA, 25 bp, Homo sapien
ttgtgcagaagtgttggttccttcc

SEQ ID NO: 383341 - DNA, 25 bp, Homo sapien
ggtttgtgcagaagtgttggttcct

SEQ ID NO: 383342 - DNA, 25 bp, Homo sapien
cagagttgctgttattctggtagcc

SEQ ID NO: 383343 - DNA, 25 bp, Homo sapien
gttattctggtagccatttcttcct

SEQ ID NO: 383344 - DNA, 25 bp, Homo sapien
tctcgtaataacttctcagagttgc

SEQ ID NO: 383345 - DNA, 25 bp, Homo sapien
acttctcagagttgctgttattctg

SEQ ID NO: 383346 - DNA, 25 bp, Homo sapien
gtaagccacattcctttgcccggtg

SEQ ID NO: 383347 - DNA, 25 bp, Homo sapien
gactattgtctacacccgctctcag

SEQ ID NO: 383348 - DNA, 25 bp, Homo sapien
ggaaccgccaatcagctccttcaag

SEQ ID NO: 383349 - DNA, 25 bp, Homo sapien
tttcgtctgttcaaaggtaagccac

SEQ ID NO: 383350 - DNA, 25 bp, Homo sapien
tggctgttgctttctgcgtcgctct

SEQ ID NO: 383351 - DNA, 25 bp, Homo sapien
tttctaaaggatccccttgctgctc

SEQ ID NO: 383352 - DNA, 25 bp, Homo sapien
atggatccaccaacaagtccccggg

SEQ ID NO: 383353 - DNA, 25 bp, Homo sapien
tgctccgccatgagggatggatcca

SEQ ID NO: 383354 - DNA, 25 bp, Homo sapien
tggaggcatcctgtttgtcgaaaaa

SEQ ID NO: 383355 - DNA, 25 bp, Homo sapien
accggcagttaaagcagggttgcga

SEQ ID NO: 383356 - DNA, 25 bp, Homo sapien
ataacgcgcgggcaggcagcttttg

SEQ ID NO: 383357 - DNA, 25 bp, Homo sapien
agcgagaaaaccacaggcctgcgcg

SEQ ID NO: 383358 - DNA, 25 bp, Homo sapien
ctaaagttatgagatgatgccgttt

SEQ ID NO: 383359 - DNA, 25 bp, Homo sapien
taaagttatgagatgatgccgtttc

SEQ ID NO: 383360 - DNA, 25 bp, Homo sapien
aagttatgagatgatgccgtttcat

SEQ ID NO: 383361 - DNA, 25 bp, Homo sapien
aaagttatgagatgatgccgtttca

SEQ ID NO: 383362 - DNA, 25 bp, Homo sapien
acatgggttctgaatctggagtccg

SEQ ID NO: 383363 - DNA, 25 bp, Homo sapien
tctggagtccgcgtcaaacgagagg

SEQ ID NO: 383364 - DNA, 25 bp, Homo sapien
cactgttgtcgtgaacaattctggc

SEQ ID NO: 383365 - DNA, 25 bp, Homo sapien
tgtcccgtgtcctccgcactgttgt

SEQ ID NO: 383366 - DNA, 25 bp, Homo sapien
ctggcccccagacccacagcagcct

SEQ ID NO: 383367 - DNA, 25 bp, Homo sapien
caccttcagacccaacttgggttct

SEQ ID NO: 383368 - DNA, 25 bp, Homo sapien
ttagcactttctgcacacacgccag

SEQ ID NO: 383369 - DNA, 25 bp, Homo sapien
caatcataaatgactttctccccgc

SEQ ID NO: 383370 - DNA, 25 bp, Homo sapien
tccctttctggaggggttcggcatg

SEQ ID NO: 383371 - DNA, 25 bp, Homo sapien
gctgaaggatgcaatcataaatgac

SEQ ID NO: 383372 - DNA, 25 bp, Homo sapien
gatgcaatcataaatgactttctcc

SEQ ID NO: 383373 - DNA, 25 bp, Homo sapien
cctggagtggtaaaaagggagcatt

SEQ ID NO: 383374 - DNA, 25 bp, Homo sapien
agtactttacgagaacacaggctgg

SEQ ID NO: 383375 - DNA, 25 bp, Homo sapien
aacacaatcagggagtactttacga

SEQ ID NO: 383376 - DNA, 25 bp, Homo sapien
aaatataataactaggatgtcctgg

SEQ ID NO: 383377 - DNA, 25 bp, Homo sapien
gaaggcagccagtcaaccgctgtct

SEQ ID NO: 383378 - DNA, 25 bp, Homo sapien
aagagtggtctaggccgagagtaca

SEQ ID NO: 383379 - DNA, 25 bp, Homo sapien
acagcagtgggtaactcagtccacc

SEQ ID NO: 383380 - DNA, 25 bp, Homo sapien
cttgtggaaaaagaacgagagccct

SEQ ID NO: 383381 - DNA, 25 bp, Homo sapien
agaatcagactgtagttcctccttt

SEQ ID NO: 383382 - DNA, 25 bp, Homo sapien
aagaatcagactgtagttcctcctt

SEQ ID NO: 383383 - DNA, 25 bp, Homo sapien
tggtgaaaagctgcaaacggctccc

SEQ ID NO: 383384 - DNA, 25 bp, Homo sapien
tagtcactagtcttgcagcgtcgtt

SEQ ID NO: 383385 - DNA, 25 bp, Homo sapien
gcagcgtcgtttggttggtaacaca

SEQ ID NO: 383386 - DNA, 25 bp, Homo sapien
gaagttgaatcatgcagacgtgcgt

SEQ ID NO: 383387 - DNA, 25 bp, Homo sapien
gtggaggcgattgctttgaaagctc

SEQ ID NO: 383388 - DNA, 25 bp, Homo sapien
tgcagcctccgtggatggcagccat

SEQ ID NO: 383389 - DNA, 25 bp, Homo sapien
gcaggactgggagcaattaggagtt

SEQ ID NO: 383390 - DNA, 25 bp, Homo sapien
tctgccagcgactccccttgaagag

SEQ ID NO: 383391 - DNA, 25 bp, Homo sapien
tctaccttcaggttggaaacccaga

SEQ ID NO: 383392 - DNA, 25 bp, Homo sapien
gggttagatctctctactggcatgt

SEQ ID NO: 383393 - DNA, 25 bp, Homo sapien
ggattttctacatcggtgatctacc

SEQ ID NO: 383394 - DNA, 25 bp, Homo sapien
caagattataagatggcttggacac

SEQ ID NO: 383395 - DNA, 25 bp, Homo sapien
ctctctgttgcatgactggcaccat

SEQ ID NO: 383396 - DNA, 25 bp, Homo sapien
tgttgcatgactggcaccattctgc

SEQ ID NO: 383397 - DNA, 25 bp, Homo sapien
gccagtattgtttcatctttctcat

SEQ ID NO: 383398 - DNA, 25 bp, Homo sapien
tttttcagatgtgccagtattgttt

SEQ ID NO: 383399 - DNA, 25 bp, Homo sapien
ttgggtggagcatggagtggcttcc

SEQ ID NO: 383400 - DNA, 25 bp, Homo sapien
tctccttgttgggtggagcatggag

SEQ ID NO: 383401 - DNA, 25 bp, Homo sapien
acataggccaaagctcttttgcaag

SEQ ID NO: 383402 - DNA, 25 bp, Homo sapien
tgcaagttgaagttacccaatgctc

SEQ ID NO: 383403 - DNA, 25 bp, Homo sapien
ctggaaatggagttaaagttatcaa

SEQ ID NO: 383404 - DNA, 25 bp, Homo sapien
tggaaatggagttaaagttatcaaa

SEQ ID NO: 383405 - DNA, 25 bp, Homo sapien
actggaaatggagttaaagttatca

SEQ ID NO: 383406 - DNA, 25 bp, Homo sapien
gaaggagtctttgtgcagctgggtc

SEQ ID NO: 383407 - DNA, 25 bp, Homo sapien
gctcccttgtgtgtctagagcaaag

SEQ ID NO: 383408 - DNA, 25 bp, Homo sapien
gcagctgggtcttccaatgtccagt

SEQ ID NO: 383409 - DNA, 25 bp, Homo sapien
gtccagtttgcctgtgctcaccagg

SEQ ID NO: 383410 - DNA, 25 bp, Homo sapien
ttcagagcgagttgatgaatgaggc

SEQ ID NO: 383411 - DNA, 25 bp, Homo sapien
tgttcagagcgagttgatgaatgag

SEQ ID NO: 383412 - DNA, 25 bp, Homo sapien
agagcgagttgatgaatgaggctct

SEQ ID NO: 383413 - DNA, 25 bp, Homo sapien
tcagagcgagttgatgaatgaggct

SEQ ID NO: 383414 - DNA, 25 bp, Homo sapien
cactgaataattatgagcctgaaca

SEQ ID NO: 383415 - DNA, 25 bp, Homo sapien
tcactgaataattatgagcctgaac

SEQ ID NO: 383416 - DNA, 25 bp, Homo sapien
agataagccctcagtcaagacacag

SEQ ID NO: 383417 - DNA, 25 bp, Homo sapien
gccctcagtcaagacacagggaaag

SEQ ID NO: 383418 - DNA, 25 bp, Homo sapien
tcgtggatctgacctaatgggtgaa

SEQ ID NO: 383419 - DNA, 25 bp, Homo sapien
ctgacctaatgggtgaaacactggg

SEQ ID NO: 383420 - DNA, 25 bp, Homo sapien
ccaactgcactctgtgttcgtggat

SEQ ID NO: 383421 - DNA, 25 bp, Homo sapien
ggagcaaaaagcaccaccttcatta

SEQ ID NO: 383422 - DNA, 25 bp, Homo sapien
tcagagtgaaaatgcaacgaccatc

SEQ ID NO: 383423 - DNA, 25 bp, Homo sapien
gccaatttaggcatactgtgaacag

SEQ ID NO: 383424 - DNA, 25 bp, Homo sapien
gaaataatcagtcaacgaacccagg

SEQ ID NO: 383425 - DNA, 25 bp, Homo sapien
gaacccaggttttgtctacatgaca

SEQ ID NO: 383426 - DNA, 25 bp, Homo sapien
gaacagcatgttcgcctggttggga

SEQ ID NO: 383427 - DNA, 25 bp, Homo sapien
tggttggcgttgcatgaacagcatg

SEQ ID NO: 383428 - DNA, 25 bp, Homo sapien
tcgtgtggatgacaaagcacagttc

SEQ ID NO: 383429 - DNA, 25 bp, Homo sapien
tcagcttgtgctaaaatccttatct

SEQ ID NO: 383430 - DNA, 25 bp, Homo sapien
ttgaagacacctccaatttctgtag

SEQ ID NO: 383431 - DNA, 25 bp, Homo sapien
ggagtcatgctgttttcggagagta

SEQ ID NO: 383432 - DNA, 25 bp, Homo sapien
tccaaggactggtgggcccttacta

SEQ ID NO: 383433 - DNA, 25 bp, Homo sapien
ggaaggaagtagacataattgcaca

SEQ ID NO: 383434 - DNA, 25 bp, Homo sapien
tatcttacacgattgggatccccga

SEQ ID NO: 383435 - DNA, 25 bp, Homo sapien
gttaatcctaatgcgagccccaagg

SEQ ID NO: 383436 - DNA, 25 bp, Homo sapien
taatcctaatgcgagccccaaggag

SEQ ID NO: 383437 - DNA, 25 bp, Homo sapien
tgttaatcctaatgcgagccccaag

SEQ ID NO: 383438 - DNA, 25 bp, Homo sapien
atgttaatcctaatgcgagccccaa

SEQ ID NO: 383439 - DNA, 25 bp, Homo sapien
ggccccagagcaggtctttccttaa

SEQ ID NO: 383440 - DNA, 25 bp, Homo sapien
ctttcctctctactcatgccatcca

SEQ ID NO: 383441 - DNA, 25 bp, Homo sapien
tctactcatgccatccatgaggccc

SEQ ID NO: 383442 - DNA, 25 bp, Homo sapien
gccccagagcaggtctttccttaaa

SEQ ID NO: 383443 - DNA, 25 bp, Homo sapien
ctgcgtgtgacatgggtgatagtct

SEQ ID NO: 383444 - DNA, 25 bp, Homo sapien
tgtcttcctgctgaaagagttgggc

SEQ ID NO: 383445 - DNA, 25 bp, Homo sapien
tgggtgatagtctgtcttcctgctg

SEQ ID NO: 383446 - DNA, 25 bp, Homo sapien
tgacatgggtgatagtctgtcttcc

SEQ ID NO: 383447 - DNA, 25 bp, Homo sapien
taaagcaatgaaaagtgatgcaagt

SEQ ID NO: 383448 - DNA, 25 bp, Homo sapien
ctaaagcaatgaaaagtgatgcaag

SEQ ID NO: 383449 - DNA, 25 bp, Homo sapien
cactgtttgaagccacctgcacagt

SEQ ID NO: 383450 - DNA, 25 bp, Homo sapien
cacagggggcccgagtcatttcctt

SEQ ID NO: 383451 - DNA, 25 bp, Homo sapien
cttttttatgacactgattggttgc

SEQ ID NO: 383452 - DNA, 25 bp, Homo sapien
gataccttcgacatgttgaacacac

SEQ ID NO: 383453 - DNA, 25 bp, Homo sapien
ttcttctgctgcacagataccttcg

SEQ ID NO: 383454 - DNA, 25 bp, Homo sapien
cccatagtatcctggacccaggggt

SEQ ID NO: 383455 - DNA, 25 bp, Homo sapien
gcatgccctagatcccccagtggga

SEQ ID NO: 383456 - DNA, 25 bp, Homo sapien
ccaggggtgacattctatagtgccc

SEQ ID NO: 383457 - DNA, 25 bp, Homo sapien
tatagtgcccctcatggtttagttt

SEQ ID NO: 383458 - DNA, 25 bp, Homo sapien
gaagttaaggccaacactctgtgct

SEQ ID NO: 383459 - DNA, 25 bp, Homo sapien
ttgactccgtttgtcccttctctga

SEQ ID NO: 383460 - DNA, 25 bp, Homo sapien
ggccttcacagcttccgtttttcaa

SEQ ID NO: 383461 - DNA, 25 bp, Homo sapien
ccatgggccaatggttgatttgtct

SEQ ID NO: 383462 - DNA, 25 bp, Homo sapien
catccgaacaaagcccttttgcctg

SEQ ID NO: 383463 - DNA, 25 bp, Homo sapien
gctgtggcataggacatgtggcttt

SEQ ID NO: 383464 - DNA, 25 bp, Homo sapien
ggccagaaggccctgaaaacttata

SEQ ID NO: 383465 - DNA, 25 bp, Homo sapien
gaaggccctgaaaacttatatgcaa

SEQ ID NO: 383466 - DNA, 25 bp, Homo sapien
gtcttctcagctttgagtactgcat

SEQ ID NO: 383467 - DNA, 25 bp, Homo sapien
gcaagcgcaaaacttgtcttctcag

SEQ ID NO: 383468 - DNA, 25 bp, Homo sapien
tttaacggggaatcctgtgcaagcg

SEQ ID NO: 383469 - DNA, 25 bp, Homo sapien
ttctgtccctgtggactggcatcca

SEQ ID NO: 383470 - DNA, 25 bp, Homo sapien
agggcaggagtgtctaccgtttgca

SEQ ID NO: 383471 - DNA, 25 bp, Homo sapien
taccgtttgcacagtagtctgacga

SEQ ID NO: 383472 - DNA, 25 bp, Homo sapien
ggatttctccccagttgattccaaa

SEQ ID NO: 383473 - DNA, 25 bp, Homo sapien
aagaagggtggccacgtttccatct

SEQ ID NO: 383474 - DNA, 25 bp, Homo sapien
gtaaaagcagctggttttccttgcg

SEQ ID NO: 383475 - DNA, 25 bp, Homo sapien
gagttgccaaaggaacgaatggaat

SEQ ID NO: 383476 - DNA, 25 bp, Homo sapien
tgtaaaagcagctggttttccttgc

SEQ ID NO: 383477 - DNA, 25 bp, Homo sapien
ggaacgaatggaatacactgtagtt

SEQ ID NO: 383478 - DNA, 25 bp, Homo sapien
ctgacaagtaaaaatacctctgtaa

SEQ ID NO: 383479 - DNA, 25 bp, Homo sapien
tgagtaaaggagttgaggtaatggg

SEQ ID NO: 383480 - DNA, 25 bp, Homo sapien
tattgacagcatactgaaaatatcc

SEQ ID NO: 383481 - DNA, 25 bp, Homo sapien
ctctgttttgtctgtattgacagca

SEQ ID NO: 383482 - DNA, 25 bp, Homo sapien
ttgtctgtattgacagcatactgaa

SEQ ID NO: 383483 - DNA, 25 bp, Homo sapien
accagctctgttttgtctgtattga

SEQ ID NO: 383484 - DNA, 25 bp, Homo sapien
tactgtgccgtgagcttagccatta

SEQ ID NO: 383485 - DNA, 25 bp, Homo sapien
gcagcattgtgtcaagatgccaaat

SEQ ID NO: 383486 - DNA, 25 bp, Homo sapien
tagccattaccaggcagcattgtgt

SEQ ID NO: 383487 - DNA, 25 bp, Homo sapien
caagatgccaaatcctgttgttact

SEQ ID NO: 383488 - DNA, 25 bp, Homo sapien
tggcccaggtaagtaggttactgcc

SEQ ID NO: 383489 - DNA, 25 bp, Homo sapien
aggttactgccctggcatacctcat

SEQ ID NO: 383490 - DNA, 25 bp, Homo sapien
cccaggtaagtaggttactgccctg

SEQ ID NO: 383491 - DNA, 25 bp, Homo sapien
taagtaggttactgccctggcatac

SEQ ID NO: 383492 - DNA, 25 bp, Homo sapien
tttcagtgactctgaaagaagacct

SEQ ID NO: 383493 - DNA, 25 bp, Homo sapien
cagagcagctgaacacacagctttg

SEQ ID NO: 383494 - DNA, 25 bp, Homo sapien
gaagaaagccagagcagctgaacac

SEQ ID NO: 383495 - DNA, 25 bp, Homo sapien
gctgaacacacagctttgagcttcc

SEQ ID NO: 383496 - DNA, 25 bp, Homo sapien
acagctttgagcttcctgtaggtca

SEQ ID NO: 383497 - DNA, 25 bp, Homo sapien
agttctcaggccttgcttgacccca

SEQ ID NO: 383498 - DNA, 25 bp, Homo sapien
caggcctggactttactccagctca

SEQ ID NO: 383499 - DNA, 25 bp, Homo sapien
tcagcactgctgtaacccgatctct

SEQ ID NO: 383500 - DNA, 25 bp, Homo sapien
gggtgagtcagttcccgaacagttc

SEQ ID NO: 383501 - DNA, 25 bp, Homo sapien
actggtgttgccgaagcccctcact

SEQ ID NO: 383502 - DNA, 25 bp, Homo sapien
gcaggactggtgttgccgaagcccc

SEQ ID NO: 383503 - DNA, 25 bp, Homo sapien
ccctgaagtgggcaggactggtgtt

SEQ ID NO: 383504 - DNA, 25 bp, Homo sapien
gaagcccctcactctgagaggtgag

SEQ ID NO: 383505 - DNA, 25 bp, Homo sapien
cagtgcagagcctgacttgtctgca

SEQ ID NO: 383506 - DNA, 25 bp, Homo sapien
agtgcagagcctgacttgtctgcac

SEQ ID NO: 383507 - DNA, 25 bp, Homo sapien
cagaggtctcttgcaagatttgcag

SEQ ID NO: 383508 - DNA, 25 bp, Homo sapien
aagtcagaggtctcttgcaagattt

SEQ ID NO: 383509 - DNA, 25 bp, Homo sapien
gtcagaggtctcttgcaagatttgc

SEQ ID NO: 383510 - DNA, 25 bp, Homo sapien
aggtctcttgcaagatttgcaggtc

SEQ ID NO: 383511 - DNA, 25 bp, Homo sapien
gagacatggctttatcccacataga

SEQ ID NO: 383512 - DNA, 25 bp, Homo sapien
tagaaccaagtctgcgtcctttcat

SEQ ID NO: 383513 - DNA, 25 bp, Homo sapien
tttatcccacatagaaccaagtctg

SEQ ID NO: 383514 - DNA, 25 bp, Homo sapien
catagaaccaagtctgcgtcctttc

SEQ ID NO: 383515 - DNA, 25 bp, Homo sapien
attaatgacgctggttggaatctca

SEQ ID NO: 383516 - DNA, 25 bp, Homo sapien
gatgctctcttctcgtggctgtatt

SEQ ID NO: 383517 - DNA, 25 bp, Homo sapien
ttttacaagattaatgacgctggtt

SEQ ID NO: 383518 - DNA, 25 bp, Homo sapien
aaaattacattctgattatcgatgc

SEQ ID NO: 383519 - DNA, 25 bp, Homo sapien
cacttcctacgaccatctgccccat

SEQ ID NO: 383520 - DNA, 25 bp, Homo sapien
tctctggccacttcctacgaccatc

SEQ ID NO: 383521 - DNA, 25 bp, Homo sapien
tgctctctggccacttcctacgacc

SEQ ID NO: 383522 - DNA, 25 bp, Homo sapien
tggccacttcctacgaccatctgcc

SEQ ID NO: 383523 - DNA, 25 bp, Homo sapien
gaagttccatacagacatagatcta

SEQ ID NO: 383524 - DNA, 25 bp, Homo sapien
agttccatacagacatagatctacc

SEQ ID NO: 383525 - DNA, 25 bp, Homo sapien
gagaagttccatacagacatagatc

SEQ ID NO: 383526 - DNA, 25 bp, Homo sapien
ttccatacagacatagatctaccat

SEQ ID NO: 383527 - DNA, 25 bp, Homo sapien
catcctgaggtaccagttcttgacc

SEQ ID NO: 383528 - DNA, 25 bp, Homo sapien
gagcctctgtatcccgcatctctgt

SEQ ID NO: 383529 - DNA, 25 bp, Homo sapien
tggtccgtatttctggtcccgtgtg

SEQ ID NO: 383530 - DNA, 25 bp, Homo sapien
tctgtctcgctaggctgaactctcc

SEQ ID NO: 383531 - DNA, 25 bp, Homo sapien
agaaattagagcctgaagaataaag

SEQ ID NO: 383532 - DNA, 25 bp, Homo sapien
catcagagaaggcacgggcagccag

SEQ ID NO: 383533 - DNA, 25 bp, Homo sapien
ccctgttggactcagctgatgagaa

SEQ ID NO: 383534 - DNA, 25 bp, Homo sapien
aataaagaaaggatgaggccagcca

SEQ ID NO: 383535 - DNA, 25 bp, Homo sapien
gggaccactgatgtaggtaggagct

SEQ ID NO: 383536 - DNA, 25 bp, Homo sapien
ggtgagggaccactgatgtaggtag

SEQ ID NO: 383537 - DNA, 25 bp, Homo sapien
cccaggagtgtgcacgtgctcagtg

SEQ ID NO: 383538 - DNA, 25 bp, Homo sapien
taggtaggagctgcctacgtcagag

SEQ ID NO: 383539 - DNA, 25 bp, Homo sapien
cgtctgtagcaagcgtctgaactca

SEQ ID NO: 383540 - DNA, 25 bp, Homo sapien
gcacctcctgtgtttagtaatgcaa

SEQ ID NO: 383541 - DNA, 25 bp, Homo sapien
cagaacattgtgtcattgtgagggt

SEQ ID NO: 383542 - DNA, 25 bp, Homo sapien
gagggtgacactccttacgaaaggc

SEQ ID NO: 383543 - DNA, 25 bp, Homo sapien
tgttgggaatatctcctggggcttg

SEQ ID NO: 383544 - DNA, 25 bp, Homo sapien
gcttgtaggcttggaggggttattc

SEQ ID NO: 383545 - DNA, 25 bp, Homo sapien
tcattgttgggaatatctcctgggg

SEQ ID NO: 383546 - DNA, 25 bp, Homo sapien
cttgtaggcttggaggggttattct

SEQ ID NO: 383547 - DNA, 25 bp, Homo sapien
gattgtacctcatcacccaaaatgc

SEQ ID NO: 383548 - DNA, 25 bp, Homo sapien
ataactgatctcattttggagcttc

SEQ ID NO: 383549 - DNA, 25 bp, Homo sapien
cataactgatctcattttggagctt

SEQ ID NO: 383550 - DNA, 25 bp, Homo sapien
acttaagtgcagcaagacttgtagc

SEQ ID NO: 383551 - DNA, 25 bp, Homo sapien
aagacttgtagctggctttccttga

SEQ ID NO: 383552 - DNA, 25 bp, Homo sapien
ctgcaatatccaattcacatgaatc

SEQ ID NO: 383553 - DNA, 25 bp, Homo sapien
cttgattatgtctgcaatatccaat

SEQ ID NO: 383554 - DNA, 25 bp, Homo sapien
cccacacacattccctaggtgttga

SEQ ID NO: 383555 - DNA, 25 bp, Homo sapien
tgtcccacacacattccctaggtgt

SEQ ID NO: 383556 - DNA, 25 bp, Homo sapien
cacacattccctaggtgttgatcct

SEQ ID NO: 383557 - DNA, 25 bp, Homo sapien
cacattccctaggtgttgatccttg

SEQ ID NO: 383558 - DNA, 25 bp, Homo sapien
ttttttgatgcagaggatgccaagc

SEQ ID NO: 383559 - DNA, 25 bp, Homo sapien
agttatgctcaaaggcctgagttcc

SEQ ID NO: 383560 - DNA, 25 bp, Homo sapien
catggcttatcagacgttttccaga

SEQ ID NO: 383561 - DNA, 25 bp, Homo sapien
tctggcgcaagtgaaacaatactga

SEQ ID NO: 383562 - DNA, 25 bp, Homo sapien
cctggccgtggaggtaattatcctt

SEQ ID NO: 383563 - DNA, 25 bp, Homo sapien
aaacttgctactggcacctggccgt

SEQ ID NO: 383564 - DNA, 25 bp, Homo sapien
taattggccacagggaaacttgcta

SEQ ID NO: 383565 - DNA, 25 bp, Homo sapien
cattgtttgactggtgagtcgtgca

SEQ ID NO: 383566 - DNA, 25 bp, Homo sapien
taaaaacagagcttcagctgtttta

SEQ ID NO: 383567 - DNA, 25 bp, Homo sapien
aaaaacagagcttcagctgttttac

SEQ ID NO: 383568 - DNA, 25 bp, Homo sapien
ttaaaaacagagcttcagctgtttt

SEQ ID NO: 383569 - DNA, 25 bp, Homo sapien
ccctgtgtcgatagcagggctcagg

SEQ ID NO: 383570 - DNA, 25 bp, Homo sapien
tcaaaacaaagctagacgccctgtg

SEQ ID NO: 383571 - DNA, 25 bp, Homo sapien
aacaaagctagacgccctgtgtcga

SEQ ID NO: 383572 - DNA, 25 bp, Homo sapien
tagacgccctgtgtcgatagcaggg

SEQ ID NO: 383573 - DNA, 25 bp, Homo sapien
gaagaggactgaactcatctgtgga

SEQ ID NO: 383574 - DNA, 25 bp, Homo sapien
caacatcgtggaatgtggagattcc

SEQ ID NO: 383575 - DNA, 25 bp, Homo sapien
ggaattatatgaagaggactgaact

SEQ ID NO: 383576 - DNA, 25 bp, Homo sapien
tgtggagtacctgctcaatgagctg

SEQ ID NO: 383577 - DNA, 25 bp, Homo sapien
gagacttgagacttagagacttgag

SEQ ID NO: 383578 - DNA, 25 bp, Homo sapien
gagttgagaaccatgacccaggaga

SEQ ID NO: 383579 - DNA, 25 bp, Homo sapien
ttagagacttgagacttagagactt

SEQ ID NO: 383580 - DNA, 25 bp, Homo sapien
cagcttcaaacttcactccctggag

SEQ ID NO: 383581 - DNA, 25 bp, Homo sapien
gaagatcttatctggattacgaata

SEQ ID NO: 383582 - DNA, 25 bp, Homo sapien
gatcttatctggattacgaatagtg

SEQ ID NO: 383583 - DNA, 25 bp, Homo sapien
tatctggattacgaatagtgcgcat

SEQ ID NO: 383584 - DNA, 25 bp, Homo sapien
ctggaagatcttatctggattacga

SEQ ID NO: 383585 - DNA, 25 bp, Homo sapien
aaacaacagctcatactcttctgag

SEQ ID NO: 383586 - DNA, 25 bp, Homo sapien
tctgagagataaacagcttctgctg

SEQ ID NO: 383587 - DNA, 25 bp, Homo sapien
tgattggcccctaatgtagcaaagc

SEQ ID NO: 383588 - DNA, 25 bp, Homo sapien
caacagctcatactcttctgagaga

SEQ ID NO: 383589 - DNA, 25 bp, Homo sapien
tgccaacagtgatggttctgctgaa

SEQ ID NO: 383590 - DNA, 25 bp, Homo sapien
gcactggaacagtgcagttcttcct

SEQ ID NO: 383591 - DNA, 25 bp, Homo sapien
agtcagccgggttgataagataaca

SEQ ID NO: 383592 - DNA, 25 bp, Homo sapien
cacattgtgcagtaagtgcttcctc

SEQ ID NO: 383593 - DNA, 25 bp, Homo sapien
gacctgggccaaacatgtactgcac

SEQ ID NO: 383594 - DNA, 25 bp, Homo sapien
tgtactgcacatggagcctcgttta

SEQ ID NO: 383595 - DNA, 25 bp, Homo sapien
tagatactctaagctaatgccaaaa

SEQ ID NO: 383596 - DNA, 25 bp, Homo sapien
tcagggatggtagcaaacgtagaat

SEQ ID NO: 383597 - DNA, 25 bp, Homo sapien
gagtgagtaaatgagccgctggcct

SEQ ID NO: 383598 - DNA, 25 bp, Homo sapien
gcctggtgctaagccctttgccctc

SEQ ID NO: 383599 - DNA, 25 bp, Homo sapien
gaaatggagctgatgtcctgaatta

SEQ ID NO: 383600 - DNA, 25 bp, Homo sapien
tcctgcaggagtgagtaaatgagcc

SEQ ID NO: 383601 - DNA, 25 bp, Homo sapien
cagccatatacctttgatgggggta

SEQ ID NO: 383602 - DNA, 25 bp, Homo sapien
gggagtggcttgatcagaactgtca

SEQ ID NO: 383603 - DNA, 25 bp, Homo sapien
gactggcaatactttgcagtataca

SEQ ID NO: 383604 - DNA, 25 bp, Homo sapien
gaactgtcatagagagattagactg

SEQ ID NO: 383605 - DNA, 25 bp, Homo sapien
catgagtatcagtgggtctcctaga

SEQ ID NO: 383606 - DNA, 25 bp, Homo sapien
agctcggcgtaaggcatgagtatca

SEQ ID NO: 383607 - DNA, 25 bp, Homo sapien
gagagatctcgctcaggtcacttac

SEQ ID NO: 383608 - DNA, 25 bp, Homo sapien
tcggaaaattccgagagctcggcgt

SEQ ID NO: 383609 - DNA, 25 bp, Homo sapien
gaagtaaactcgaagaagatccacc

SEQ ID NO: 383610 - DNA, 25 bp, Homo sapien
cagaggcaatgccaggaacaggcga

SEQ ID NO: 383611 - DNA, 25 bp, Homo sapien
gagatgaaacacagtcacggcaagg

SEQ ID NO: 383612 - DNA, 25 bp, Homo sapien
tcatggaggacgtggatcttgtcat

SEQ ID NO: 383613 - DNA, 25 bp, Homo sapien
gaggacttcgtaaactctggtacac

SEQ ID NO: 383614 - DNA, 25 bp, Homo sapien
cagggtcgttggacccagaaaagca

SEQ ID NO: 383615 - DNA, 25 bp, Homo sapien
gcctcacatgcaggaggacttcgta

SEQ ID NO: 383616 - DNA, 25 bp, Homo sapien
gaagaaaattattgcagggtcgttg

SEQ ID NO: 383617 - DNA, 25 bp, Homo sapien
taagggtgtcatgacatcgttgccc

SEQ ID NO: 383618 - DNA, 25 bp, Homo sapien
tgcagaaaagacctctccggagaga

SEQ ID NO: 383619 - DNA, 25 bp, Homo sapien
tattgtaacctgtgcattggaccag

SEQ ID NO: 383620 - DNA, 25 bp, Homo sapien
ttgatttcagtctccctccttcggg

SEQ ID NO: 383621 - DNA, 25 bp, Homo sapien
tctggaagacgcctgagcttagaag

SEQ ID NO: 383622 - DNA, 25 bp, Homo sapien
cttcaccagttctggaagacgcctg

SEQ ID NO: 383623 - DNA, 25 bp, Homo sapien
ctgagcttagaagctgcacaggtga

SEQ ID NO: 383624 - DNA, 25 bp, Homo sapien
gacgcctgagcttagaagctgcaca

SEQ ID NO: 383625 - DNA, 25 bp, Homo sapien
cttccagtaggttcataaaatcctc

SEQ ID NO: 383626 - DNA, 25 bp, Homo sapien
ttccagtaggttcataaaatcctct

SEQ ID NO: 383627 - DNA, 25 bp, Homo sapien
taggaagataagagggaacctggac

SEQ ID NO: 383628 - DNA, 25 bp, Homo sapien
gagggaacctggaccagggatcatt

SEQ ID NO: 383629 - DNA, 25 bp, Homo sapien
taagagggaacctggaccagggatc

SEQ ID NO: 383630 - DNA, 25 bp, Homo sapien
ggaacctggaccagggatcattcca

SEQ ID NO: 383631 - DNA, 25 bp, Homo sapien
tgagctcagggctacacctttcctt

SEQ ID NO: 383632 - DNA, 25 bp, Homo sapien
ggcctgagaagcctgttcccctctg

SEQ ID NO: 383633 - DNA, 25 bp, Homo sapien
ttggcagtttctggtggaggccagc

SEQ ID NO: 383634 - DNA, 25 bp, Homo sapien
gaggatgagctcagggctacacctt

SEQ ID NO: 383635 - DNA, 25 bp, Homo sapien
atttatgcttcagtttgtgcaacgg

SEQ ID NO: 383636 - DNA, 25 bp, Homo sapien
ttatttatgcttcagtttgtgcaac

SEQ ID NO: 383637 - DNA, 25 bp, Homo sapien
tatttatgcttcagtttgtgcaacg

SEQ ID NO: 383638 - DNA, 25 bp, Homo sapien
gctttccattggaaaagtcatacat

SEQ ID NO: 383639 - DNA, 25 bp, Homo sapien
ttcgagttcaacaatggtagctatt

SEQ ID NO: 383640 - DNA, 25 bp, Homo sapien
caacaatggtagctattttcacagc

SEQ ID NO: 383641 - DNA, 25 bp, Homo sapien
ctgctttccattggaaaagtcatac

SEQ ID NO: 383642 - DNA, 25 bp, Homo sapien
ttctgaggtctcattagcaggcatg

SEQ ID NO: 383643 - DNA, 25 bp, Homo sapien
aagatcacagccgcgactgggtgct

SEQ ID NO: 383644 - DNA, 25 bp, Homo sapien
atcacagccgcgactgggtgctggc

SEQ ID NO: 383645 - DNA, 25 bp, Homo sapien
tccaagatcacagccgcgactgggt

SEQ ID NO: 383646 - DNA, 25 bp, Homo sapien
cgggtggaggactcagcttcggagc

SEQ ID NO: 383647 - DNA, 25 bp, Homo sapien
gtgcggcggcgccattcttcccacg

SEQ ID NO: 383648 - DNA, 25 bp, Homo sapien
ggcgccattcttcccacggcgggtg

SEQ ID NO: 383649 - DNA, 25 bp, Homo sapien
ccattcttcccacggcgggtggagg

SEQ ID NO: 383650 - DNA, 25 bp, Homo sapien
ggtggcatcgccctgtcccacgcac

SEQ ID NO: 383651 - DNA, 25 bp, Homo sapien
cttaagcgcaaggttctgtcttaga

SEQ ID NO: 383652 - DNA, 25 bp, Homo sapien
agtgggcctattagatccacctgag

SEQ ID NO: 383653 - DNA, 25 bp, Homo sapien
gcctattagatccacctgaggtgtt

SEQ ID NO: 383654 - DNA, 25 bp, Homo sapien
tgaggtgtttctccagccagtttgt

SEQ ID NO: 383655 - DNA, 25 bp, Homo sapien
gagtttaaggagcatcgattttcaa

SEQ ID NO: 383656 - DNA, 25 bp, Homo sapien
gactgtatcataatcaggtcctggt

SEQ ID NO: 383657 - DNA, 25 bp, Homo sapien
caaggtgagcttctagttgcagatg

SEQ ID NO: 383658 - DNA, 25 bp, Homo sapien
cttggcagtaattagttggctgact

SEQ ID NO: 383659 - DNA, 25 bp, Homo sapien
taaagagttccgcagttctgagaag

SEQ ID NO: 383660 - DNA, 25 bp, Homo sapien
tccataaagagttccgcagttctga

SEQ ID NO: 383661 - DNA, 25 bp, Homo sapien
ccataaagagttccgcagttctgag

SEQ ID NO: 383662 - DNA, 25 bp, Homo sapien
aagagttccgcagttctgagaagtc

SEQ ID NO: 383663 - DNA, 25 bp, Homo sapien
ggaacaactgctagacaactcttct

SEQ ID NO: 383664 - DNA, 25 bp, Homo sapien
aacaactgctagacaactcttctgg

SEQ ID NO: 383665 - DNA, 25 bp, Homo sapien
actcttctggcagaaacttaactgt

SEQ ID NO: 383666 - DNA, 25 bp, Homo sapien
actgctagacaactcttctggcaga

SEQ ID NO: 383667 - DNA, 25 bp, Homo sapien
ccaaagatgtgttgacagggtgtgt

SEQ ID NO: 383668 - DNA, 25 bp, Homo sapien
gcttcttctcccagcgtctgatgtg

SEQ ID NO: 383669 - DNA, 25 bp, Homo sapien
ctgagagtcgggcagccaaagatgt

SEQ ID NO: 383670 - DNA, 25 bp, Homo sapien
cccagcgtctgatgtggcttcggtg

SEQ ID NO: 383671 - DNA, 25 bp, Homo sapien
catgtgggaagcatcctgtctgctg

SEQ ID NO: 383672 - DNA, 25 bp, Homo sapien
tgcactggatgaaaacgctggggat

SEQ ID NO: 383673 - DNA, 25 bp, Homo sapien
atccccatgtgggaagcatcctgtc

SEQ ID NO: 383674 - DNA, 25 bp, Homo sapien
ccacaagcagcgggcttctctcttg

SEQ ID NO: 383675 - DNA, 25 bp, Homo sapien
tcggcattcattatggtgcatggtc

SEQ ID NO: 383676 - DNA, 25 bp, Homo sapien
ccactactcggcattcattatggtg

SEQ ID NO: 383677 - DNA, 25 bp, Homo sapien
caactccactactcggcattcatta

SEQ ID NO: 383678 - DNA, 25 bp, Homo sapien
agaatgccaacccaactgtcaccac

SEQ ID NO: 383679 - DNA, 25 bp, Homo sapien
taaccctggattgaagttcttttga

SEQ ID NO: 383680 - DNA, 25 bp, Homo sapien
tttgagatcttaaacctataagcct

SEQ ID NO: 383681 - DNA, 25 bp, Homo sapien
cctggattgaagttcttttgagatc

SEQ ID NO: 383682 - DNA, 25 bp, Homo sapien
cttttgagatcttaaacctataagc

SEQ ID NO: 383683 - DNA, 25 bp, Homo sapien
agctttgccttctacactgggtctt

SEQ ID NO: 383684 - DNA, 25 bp, Homo sapien
tcaatcctgtcctgaactggctcat

SEQ ID NO: 383685 - DNA, 25 bp, Homo sapien
tttgccttctacactgggtcttggg

SEQ ID NO: 383686 - DNA, 25 bp, Homo sapien
atcaatcctgtcctgaactggctca

SEQ ID NO: 383687 - DNA, 25 bp, Homo sapien
ctttaaatctccacatgtggagatg

SEQ ID NO: 383688 - DNA, 25 bp, Homo sapien
catgtggagatggagagtgaacatt

SEQ ID NO: 383689 - DNA, 25 bp, Homo sapien
taaatctccacatgtggagatggag

SEQ ID NO: 383690 - DNA, 25 bp, Homo sapien
tctccacatgtggagatggagagtg

SEQ ID NO: 383691 - DNA, 25 bp, Homo sapien
cctgccactgtgatgacggagtggg

SEQ ID NO: 383692 - DNA, 25 bp, Homo sapien
cagaacaaccagtcgccaatgggag

SEQ ID NO: 383693 - DNA, 25 bp, Homo sapien
tgtgttgaatgcttctggtgtggct

SEQ ID NO: 383694 - DNA, 25 bp, Homo sapien
tttgacagaaccacccagaacaacc

SEQ ID NO: 383695 - DNA, 25 bp, Homo sapien
tacattttgaaagggagagctaccc

SEQ ID NO: 383696 - DNA, 25 bp, Homo sapien
cactgtgtgttccagcgactttctt

SEQ ID NO: 383697 - DNA, 25 bp, Homo sapien
tccatagaggcagccaaacagtggg

SEQ ID NO: 383698 - DNA, 25 bp, Homo sapien
tgccctcggaacagcaggtcatcag

SEQ ID NO: 383699 - DNA, 25 bp, Homo sapien
taacagatttaggaaccatagaaac

SEQ ID NO: 383700 - DNA, 25 bp, Homo sapien
ctgataacagatttaggaaccatag

SEQ ID NO: 383701 - DNA, 25 bp, Homo sapien
cagatttaggaaccatagaaaccca

SEQ ID NO: 383702 - DNA, 25 bp, Homo sapien
gataacagatttaggaaccatagaa

SEQ ID NO: 383703 - DNA, 25 bp, Homo sapien
gaatatgatgttggtgctccctgcc

SEQ ID NO: 383704 - DNA, 25 bp, Homo sapien
tctttttgccctcgaggcacttggg

SEQ ID NO: 383705 - DNA, 25 bp, Homo sapien
cattttcgaatgctcaagaggaaca

SEQ ID NO: 383706 - DNA, 25 bp, Homo sapien
cacttgggcagtggagtctccattc

SEQ ID NO: 383707 - DNA, 25 bp, Homo sapien
ttttggcattgacaatcatagcatg

SEQ ID NO: 383708 - DNA, 25 bp, Homo sapien
tttggcattgacaatcatagcatgt

SEQ ID NO: 383709 - DNA, 25 bp, Homo sapien
ctggttaactggctctgcggtgcac

SEQ ID NO: 383710 - DNA, 25 bp, Homo sapien
tgagcccttggtgctacagtctccc

SEQ ID NO: 383711 - DNA, 25 bp, Homo sapien
tataggaaccatccatggcaagcca

SEQ ID NO: 383712 - DNA, 25 bp, Homo sapien
cagacatccggaagggttgagccct

SEQ ID NO: 383713 - DNA, 25 bp, Homo sapien
ccccatgctgagtacagagcagggg

SEQ ID NO: 383714 - DNA, 25 bp, Homo sapien
agccttcggtggctgccccatgctg

SEQ ID NO: 383715 - DNA, 25 bp, Homo sapien
ttctcaacttttgtggtacttccag

SEQ ID NO: 383716 - DNA, 25 bp, Homo sapien
cagacactgcaaaggtttccaccat

SEQ ID NO: 383717 - DNA, 25 bp, Homo sapien
gtctccaacactggtcacagactca

SEQ ID NO: 383718 - DNA, 25 bp, Homo sapien
aatgtttagctggatgctcaataga

SEQ ID NO: 383719 - DNA, 25 bp, Homo sapien
tccaacactggtcacagactcaggt

SEQ ID NO: 383720 - DNA, 25 bp, Homo sapien
gactcaggtacccagggaggttcaa

SEQ ID NO: 383721 - DNA, 25 bp, Homo sapien
gacaagcctgaccaaggcggcagag

SEQ ID NO: 383722 - DNA, 25 bp, Homo sapien
tctacgtgttgtgttgtcactccgc

SEQ ID NO: 383723 - DNA, 25 bp, Homo sapien
ggcggcagagaactttctacgtgtt

SEQ ID NO: 383724 - DNA, 25 bp, Homo sapien
tcccctttccccatgactgattcct

SEQ ID NO: 383725 - DNA, 25 bp, Homo sapien
tgcttccctgaagaagtctcagccc

SEQ ID NO: 383726 - DNA, 25 bp, Homo sapien
caagggcagtatcagaggtgttcag

SEQ ID NO: 383727 - DNA, 25 bp, Homo sapien
gtgttcaggctgaccatgggcctct

SEQ ID NO: 383728 - DNA, 25 bp, Homo sapien
gagcactaatctttcgggcctctgc

SEQ ID NO: 383729 - DNA, 25 bp, Homo sapien
agctcattggcagacaactccaaga

SEQ ID NO: 383730 - DNA, 25 bp, Homo sapien
tagctcattggcagacaactccaag

SEQ ID NO: 383731 - DNA, 25 bp, Homo sapien
gctcattggcagacaactccaagag

SEQ ID NO: 383732 - DNA, 25 bp, Homo sapien
cagttttcaagctggcgctgactca

SEQ ID NO: 383733 - DNA, 25 bp, Homo sapien
tcctcgagggagaccatttaactgg

SEQ ID NO: 383734 - DNA, 25 bp, Homo sapien
caagatgcgtatcctgtgtggaagg

SEQ ID NO: 383735 - DNA, 25 bp, Homo sapien
taactggtcattagggagacagcaa

SEQ ID NO: 383736 - DNA, 25 bp, Homo sapien
atgtggctaattgctcactggtctc

SEQ ID NO: 383737 - DNA, 25 bp, Homo sapien
gtccatgtcactcagtctggccatg

SEQ ID NO: 383738 - DNA, 25 bp, Homo sapien
tgtcactcagtctggccatgcagga

SEQ ID NO: 383739 - DNA, 25 bp, Homo sapien
ggccatgcaggatgtggctaattgc

SEQ ID NO: 383740 - DNA, 25 bp, Homo sapien
cccatggcagagagggcatttccct

SEQ ID NO: 383741 - DNA, 25 bp, Homo sapien
cagcaccccgatccccatggcagag

SEQ ID NO: 383742 - DNA, 25 bp, Homo sapien
gtcccatctgtaccttcggaatgcc

SEQ ID NO: 383743 - DNA, 25 bp, Homo sapien
ttcggaatgccatgcttccccttgc

SEQ ID NO: 383744 - DNA, 25 bp, Homo sapien
cattattgcaaaaattcactggtac

SEQ ID NO: 383745 - DNA, 25 bp, Homo sapien
tgcattattgcaaaaattcactggt

SEQ ID NO: 383746 - DNA, 25 bp, Homo sapien
gcattattgcaaaaattcactggta

SEQ ID NO: 383747 - DNA, 25 bp, Homo sapien
gaagtttgactaacatgcaccagga

SEQ ID NO: 383748 - DNA, 25 bp, Homo sapien
ggtcacaggcactagataacttcca

SEQ ID NO: 383749 - DNA, 25 bp, Homo sapien
attagaagtctcatccaagggtccc

SEQ ID NO: 383750 - DNA, 25 bp, Homo sapien
catttgtacggcatagagacctacc

SEQ ID NO: 383751 - DNA, 25 bp, Homo sapien
caaggaacctgctgtattatcagtg

SEQ ID NO: 383752 - DNA, 25 bp, Homo sapien
tctaggctgggctatgaggatccca

SEQ ID NO: 383753 - DNA, 25 bp, Homo sapien
taaggacaggatgggccaaggaacc

SEQ ID NO: 383754 - DNA, 25 bp, Homo sapien
tcagtggaggcttggtcctcaatcc

SEQ ID NO: 383755 - DNA, 25 bp, Homo sapien
tatcttaaagacctcatttcctaag

SEQ ID NO: 383756 - DNA, 25 bp, Homo sapien
tgtgatgtcagaattcggataatgc

SEQ ID NO: 383757 - DNA, 25 bp, Homo sapien
cttttaaggaagacttgaattctgt

SEQ ID NO: 383758 - DNA, 25 bp, Homo sapien
ggataatgcccaaattgatgcttag

SEQ ID NO: 383759 - DNA, 25 bp, Homo sapien
gtgagcataagtcaatggttatttt

SEQ ID NO: 383760 - DNA, 25 bp, Homo sapien
gccatagtaggtccctgttttctgt

SEQ ID NO: 383761 - DNA, 25 bp, Homo sapien
tggctgacaacctgccatagtaggt

SEQ ID NO: 383762 - DNA, 25 bp, Homo sapien
gacaacctgccatagtaggtccctg

SEQ ID NO: 383763 - DNA, 25 bp, Homo sapien
ttcaaccgggagaatatagattgtt

SEQ ID NO: 383764 - DNA, 25 bp, Homo sapien
agacctgcataatggtgcatagatt

SEQ ID NO: 383765 - DNA, 25 bp, Homo sapien
gggagaatatagattgttccagggc

SEQ ID NO: 383766 - DNA, 25 bp, Homo sapien
cataatggtgcatagattaggaaga

SEQ ID NO: 383767 - DNA, 25 bp, Homo sapien
ggaacaattagcaggagtacaaaaa

SEQ ID NO: 383768 - DNA, 25 bp, Homo sapien
tccagtctggagcatatgcatttat

SEQ ID NO: 383769 - DNA, 25 bp, Homo sapien
cacttgcttagcaaaagcctaaccc

SEQ ID NO: 383770 - DNA, 25 bp, Homo sapien
tatccaggtggtcttagttgttctc

SEQ ID NO: 383771 - DNA, 25 bp, Homo sapien
gaaggcactgggtaggactctgttt

SEQ ID NO: 383772 - DNA, 25 bp, Homo sapien
taacactgggccttttgccttggct

SEQ ID NO: 383773 - DNA, 25 bp, Homo sapien
tcagagaccagaaaccaatgttgct

SEQ ID NO: 383774 - DNA, 25 bp, Homo sapien
gtccctgtccttgggtgaaatcata

SEQ ID NO: 383775 - DNA, 25 bp, Homo sapien
ggctgtccatgttccgttcatggat

SEQ ID NO: 383776 - DNA, 25 bp, Homo sapien
tggatgaagacactctgataacagc

SEQ ID NO: 383777 - DNA, 25 bp, Homo sapien
cagctcactggtgcgaagggtttac

SEQ ID NO: 383778 - DNA, 25 bp, Homo sapien
aaatacccttgagtactggcagctg

SEQ ID NO: 383779 - DNA, 25 bp, Homo sapien
gcttcagagtaacttcaaggtgagg

SEQ ID NO: 383780 - DNA, 25 bp, Homo sapien
cacacgtgtgaagcgtagcttcaga

SEQ ID NO: 383781 - DNA, 25 bp, Homo sapien
gaaaatgagagcacacgtgtgaagc

SEQ ID NO: 383782 - DNA, 25 bp, Homo sapien
gagttcatccctttaattctctgag

SEQ ID NO: 383783 - DNA, 25 bp, Homo sapien
tttaattcattggatggccaccagg

SEQ ID NO: 383784 - DNA, 25 bp, Homo sapien
cccagggcaacgtggatgctgagat

SEQ ID NO: 383785 - DNA, 25 bp, Homo sapien
tccttggaaacatgaggcttcagct

SEQ ID NO: 383786 - DNA, 25 bp, Homo sapien
ttaggtgacccagcacggaatggcc

SEQ ID NO: 383787 - DNA, 25 bp, Homo sapien
caccccgctaatttgtgtgtatgta

SEQ ID NO: 383788 - DNA, 25 bp, Homo sapien
ctggagtcaagtggaacaatcgtgg

SEQ ID NO: 383789 - DNA, 25 bp, Homo sapien
ctatgctactgggacagctggctct

SEQ ID NO: 383790 - DNA, 25 bp, Homo sapien
tccatcctaccgctatgctactggg

SEQ ID NO: 383791 - DNA, 25 bp, Homo sapien
taccgctatgctactgggacagctg

SEQ ID NO: 383792 - DNA, 25 bp, Homo sapien
tcctaccgctatgctactgggacag

SEQ ID NO: 383793 - DNA, 25 bp, Homo sapien
ctgagttcaactgctgtgcctccac

SEQ ID NO: 383794 - DNA, 25 bp, Homo sapien
tcagtcccaaaccctgagttcaact

SEQ ID NO: 383795 - DNA, 25 bp, Homo sapien
aagatttccattgatccaaaggcct

SEQ ID NO: 383796 - DNA, 25 bp, Homo sapien
gagttcaactgctgtgcctccacct

SEQ ID NO: 383797 - DNA, 25 bp, Homo sapien
ccagatgtgggctttatattcgaca

SEQ ID NO: 383798 - DNA, 25 bp, Homo sapien
cagcgccagatgtgggctttatatt

SEQ ID NO: 383799 - DNA, 25 bp, Homo sapien
cgccagatgtgggctttatattcga

SEQ ID NO: 383800 - DNA, 25 bp, Homo sapien
cagatgtgggctttatattcgacat

SEQ ID NO: 383801 - DNA, 25 bp, Homo sapien
gaagataccaagactagtgttcact

SEQ ID NO: 383802 - DNA, 25 bp, Homo sapien
tagaagataccaagactagtgttca

SEQ ID NO: 383803 - DNA, 25 bp, Homo sapien
agaagataccaagactagtgttcac

SEQ ID NO: 383804 - DNA, 25 bp, Homo sapien
gtagaagataccaagactagtgttc

SEQ ID NO: 383805 - DNA, 25 bp, Homo sapien
ggctcttcaataactggatttttga

SEQ ID NO: 383806 - DNA, 25 bp, Homo sapien
agcatcggttggcttatggggctct

SEQ ID NO: 383807 - DNA, 25 bp, Homo sapien
gcttatggggctcttcaataactgg

SEQ ID NO: 383808 - DNA, 25 bp, Homo sapien
catcggttggcttatggggctcttc

SEQ ID NO: 383809 - DNA, 25 bp, Homo sapien
ctgcatttctgcccatagtcacaca

SEQ ID NO: 383810 - DNA, 25 bp, Homo sapien
gattcttagccaattgggggcacgg

SEQ ID NO: 383811 - DNA, 25 bp, Homo sapien
cctctaaatagccaggtctgcattt

SEQ ID NO: 383812 - DNA, 25 bp, Homo sapien
cacaatgtgaacaatttcagagtcg

SEQ ID NO: 383813 - DNA, 25 bp, Homo sapien
cctccccagactctagggataaggc

SEQ ID NO: 383814 - DNA, 25 bp, Homo sapien
gaagacaagcctttgcctccccaga

SEQ ID NO: 383815 - DNA, 25 bp, Homo sapien
tttgcctccccagactctagggata

SEQ ID NO: 383816 - DNA, 25 bp, Homo sapien
ttatttgatgagaggaagacaagcc

SEQ ID NO: 383817 - DNA, 25 bp, Homo sapien
atttccataagagctatcatccggc

SEQ ID NO: 383818 - DNA, 25 bp, Homo sapien
agtagccacgcccttgccagtgatg

SEQ ID NO: 383819 - DNA, 25 bp, Homo sapien
tatcatccggccatgtccagtggat

SEQ ID NO: 383820 - DNA, 25 bp, Homo sapien
gccagtgatggggatttccataaga

SEQ ID NO: 383821 - DNA, 25 bp, Homo sapien
cagagcacactgtaggggtttagca

SEQ ID NO: 383822 - DNA, 25 bp, Homo sapien
gaaaggaagggatgccccacgagca

SEQ ID NO: 383823 - DNA, 25 bp, Homo sapien
gaagggatgccccacgagcaatgat

SEQ ID NO: 383824 - DNA, 25 bp, Homo sapien
ggatgccccacgagcaatgatccag

SEQ ID NO: 383825 - DNA, 25 bp, Homo sapien
gaatgagcacgaggaaggcacgctg

SEQ ID NO: 383826 - DNA, 25 bp, Homo sapien
aggtgtggaatgagcacgaggaagg

SEQ ID NO: 383827 - DNA, 25 bp, Homo sapien
tgtggaatgagcacgaggaaggcac

SEQ ID NO: 383828 - DNA, 25 bp, Homo sapien
gagcacgaggaaggcacgctggctg

SEQ ID NO: 383829 - DNA, 25 bp, Homo sapien
ggtcaggcacttgtagaggttcccc

SEQ ID NO: 383830 - DNA, 25 bp, Homo sapien
cagctgctcggtgcgtgctctctgg

SEQ ID NO: 383831 - DNA, 25 bp, Homo sapien
tctggtccctcatgtaagttgcatt

SEQ ID NO: 383832 - DNA, 25 bp, Homo sapien
gggttgcctgcaagtagttgatttt

SEQ ID NO: 383833 - DNA, 25 bp, Homo sapien
aacaaatgactctctttttgtcatc

SEQ ID NO: 383834 - DNA, 25 bp, Homo sapien
gaaacaaatgactctctttttgtca

SEQ ID NO: 383835 - DNA, 25 bp, Homo sapien
atgactctctttttgtcatcagaaa

SEQ ID NO: 383836 - DNA, 25 bp, Homo sapien
gattgaaacaaatgactctcttttt

SEQ ID NO: 383837 - DNA, 25 bp, Homo sapien
cctccggattccatttgttctgtag

SEQ ID NO: 383838 - DNA, 25 bp, Homo sapien
cagtaggttggcgatgtttaataag

SEQ ID NO: 383839 - DNA, 25 bp, Homo sapien
tgaagattgacagtcctccggattc

SEQ ID NO: 383840 - DNA, 25 bp, Homo sapien
cagcttggcagtaggttggcgatgt

SEQ ID NO: 383841 - DNA, 25 bp, Homo sapien
gaaaattaatacaatgagatgccat

SEQ ID NO: 383842 - DNA, 25 bp, Homo sapien
gagcacaaactgagccgacactgaa

SEQ ID NO: 383843 - DNA, 25 bp, Homo sapien
tctgcacagtggattggcaaaatta

SEQ ID NO: 383844 - DNA, 25 bp, Homo sapien
gctattgtagcctgggctctcccag

SEQ ID NO: 383845 - DNA, 25 bp, Homo sapien
caaaaaaacttatataggatgatca

SEQ ID NO: 383846 - DNA, 25 bp, Homo sapien
aaaaaaacttatataggatgatcaa

SEQ ID NO: 383847 - DNA, 25 bp, Homo sapien
aaggaatcaaggcatattaagaaaa

SEQ ID NO: 383848 - DNA, 25 bp, Homo sapien
atcaaggaatcaaggcatattaaga

SEQ ID NO: 383849 - DNA, 25 bp, Homo sapien
gaaggttagcccacagagatgtctc

SEQ ID NO: 383850 - DNA, 25 bp, Homo sapien
tacaattgtatacggtggctctggg

SEQ ID NO: 383851 - DNA, 25 bp, Homo sapien
tcaaagctagtggacaaaatgcatc

SEQ ID NO: 383852 - DNA, 25 bp, Homo sapien
gaacttgctggacagtagacagggc

SEQ ID NO: 383853 - DNA, 25 bp, Homo sapien
tcatcacgtggctaaggtttggccc

SEQ ID NO: 383854 - DNA, 25 bp, Homo sapien
cattaattaccacacagggactgag

SEQ ID NO: 383855 - DNA, 25 bp, Homo sapien
gaggataattagtgcccactgggcc

SEQ ID NO: 383856 - DNA, 25 bp, Homo sapien
gacacatgtcaagatggagatgcca

SEQ ID NO: 383857 - DNA, 25 bp, Homo sapien
ccttggaattatcttgctttcccag

SEQ ID NO: 383858 - DNA, 25 bp, Homo sapien
cagtgcttggccaggaagtatggct

SEQ ID NO: 383859 - DNA, 25 bp, Homo sapien
gctgttaaaaagttgtgacctttgc

SEQ ID NO: 383860 - DNA, 25 bp, Homo sapien
tccagcagggctatggagacagtgc

SEQ ID NO: 383861 - DNA, 25 bp, Homo sapien
gcctgtaacttgacatgaaccttgc

SEQ ID NO: 383862 - DNA, 25 bp, Homo sapien
taaagtcacattagttcgggtaaga

SEQ ID NO: 383863 - DNA, 25 bp, Homo sapien
cacccagaacagctaggccacttgt

SEQ ID NO: 383864 - DNA, 25 bp, Homo sapien
tccatgagctggaaagtaaagtcac

SEQ ID NO: 383865 - DNA, 25 bp, Homo sapien
catttccaagatactcattttcacc

SEQ ID NO: 383866 - DNA, 25 bp, Homo sapien
atttccaagatactcattttcaccc

SEQ ID NO: 383867 - DNA, 25 bp, Homo sapien
tttccaagatactcattttcaccca

SEQ ID NO: 383868 - DNA, 25 bp, Homo sapien
ttccaagatactcattttcacccat

SEQ ID NO: 383869 - DNA, 25 bp, Homo sapien
cataatccgatttgtgtgaatgttg

SEQ ID NO: 383870 - DNA, 25 bp, Homo sapien
ccacgcttctaagattgctctgaga

SEQ ID NO: 383871 - DNA, 25 bp, Homo sapien
gaaaacacgagaagtcataatccga

SEQ ID NO: 383872 - DNA, 25 bp, Homo sapien
tgctctgagagcataccgtgtgttc

SEQ ID NO: 383873 - DNA, 25 bp, Homo sapien
cacttctgcgtttagttgtggaggg

SEQ ID NO: 383874 - DNA, 25 bp, Homo sapien
tctgcgtttagttgtggagggagac

SEQ ID NO: 383875 - DNA, 25 bp, Homo sapien
cttctgcgtttagttgtggagggag

SEQ ID NO: 383876 - DNA, 25 bp, Homo sapien
ccacttctgcgtttagttgtggagg

SEQ ID NO: 383877 - DNA, 25 bp, Homo sapien
ctgcgtgtctgtcatcacgttgacc

SEQ ID NO: 383878 - DNA, 25 bp, Homo sapien
cctgcgtgtctgtcatcacgttgac

SEQ ID NO: 383879 - DNA, 25 bp, Homo sapien
tcatgaacaacttgcagagcccgga

SEQ ID NO: 383880 - DNA, 25 bp, Homo sapien
gcagaaagtagatgaaatagcgcct

SEQ ID NO: 383881 - DNA, 25 bp, Homo sapien
gacaagtgcgttagctagccaggaa

SEQ ID NO: 383882 - DNA, 25 bp, Homo sapien
cacggtgtctgggaattctctggag

SEQ ID NO: 383883 - DNA, 25 bp, Homo sapien
ctggattgcccatgcccatctgtcc

SEQ ID NO: 383884 - DNA, 25 bp, Homo sapien
cacaggctcggcttcctggattgcc

SEQ ID NO: 383885 - DNA, 25 bp, Homo sapien
acaggctcggcttcctggattgccc

SEQ ID NO: 383886 - DNA, 25 bp, Homo sapien
cctggattgcccatgcccatctgtc

SEQ ID NO: 383887 - DNA, 25 bp, Homo sapien
tgagcctgttcgtttcaccgccttc

SEQ ID NO: 383888 - DNA, 25 bp, Homo sapien
gcagccaggagcctacttgcgctcc

SEQ ID NO: 383889 - DNA, 25 bp, Homo sapien
ctacttgagcctgttcgtttcaccg

SEQ ID NO: 383890 - DNA, 25 bp, Homo sapien
aggagcctacttgcgctccccagga

SEQ ID NO: 383891 - DNA, 25 bp, Homo sapien
ctggaggaggtgctgagtggacaca

SEQ ID NO: 383892 - DNA, 25 bp, Homo sapien
cgttccatgtgaacgcttggccatg

SEQ ID NO: 383893 - DNA, 25 bp, Homo sapien
aggagatgaggtccctactggagga

SEQ ID NO: 383894 - DNA, 25 bp, Homo sapien
ttccaccacagcagacgttccatgt

SEQ ID NO: 383895 - DNA, 25 bp, Homo sapien
tatccatggaggtccagtgtgtgtt

SEQ ID NO: 383896 - DNA, 25 bp, Homo sapien
ttttcccattgtatccatggaggtc

SEQ ID NO: 383897 - DNA, 25 bp, Homo sapien
gttttcccattgtatccatggaggt

SEQ ID NO: 383898 - DNA, 25 bp, Homo sapien
tgttttcccattgtatccatggagg

SEQ ID NO: 383899 - DNA, 25 bp, Homo sapien
agcagagccttgagactatggcagt

SEQ ID NO: 383900 - DNA, 25 bp, Homo sapien
gccttgagactatggcagtctggac

SEQ ID NO: 383901 - DNA, 25 bp, Homo sapien
ttagagtcccatagcgtttccctgt

SEQ ID NO: 383902 - DNA, 25 bp, Homo sapien
gagtcccatagcgtttccctgtgtg

SEQ ID NO: 383903 - DNA, 25 bp, Homo sapien
cttcacaggtgccattgaggttaaa

SEQ ID NO: 383904 - DNA, 25 bp, Homo sapien
tctttgagctaccatttctattcca

SEQ ID NO: 383905 - DNA, 25 bp, Homo sapien
ttcacaggtgccattgaggttaaat

SEQ ID NO: 383906 - DNA, 25 bp, Homo sapien
tcattcatgcgtctttgagctacca

SEQ ID NO: 383907 - DNA, 25 bp, Homo sapien
agggcaaggatcttctctctcagga

SEQ ID NO: 383908 - DNA, 25 bp, Homo sapien
tggagacagggcaaggatcttctct

SEQ ID NO: 383909 - DNA, 25 bp, Homo sapien
tcaggactctcattgatgtcttaac

SEQ ID NO: 383910 - DNA, 25 bp, Homo sapien
tctcattgatgtcttaactgttttc

SEQ ID NO: 383911 - DNA, 25 bp, Homo sapien
tcattgtcaggtgtttgatgctaca

SEQ ID NO: 383912 - DNA, 25 bp, Homo sapien
acctgcaaggctgacccagtgaagg

SEQ ID NO: 383913 - DNA, 25 bp, Homo sapien
aagacaccataggcacgaagctgct

SEQ ID NO: 383914 - DNA, 25 bp, Homo sapien
tgaaggcaaagtcgcagcaggctgc

SEQ ID NO: 383915 - DNA, 25 bp, Homo sapien
ttcattggtatttgatcttgtaagc

SEQ ID NO: 383916 - DNA, 25 bp, Homo sapien
cattggtatttgatcttgtaagctt

SEQ ID NO: 383917 - DNA, 25 bp, Homo sapien
ttactgacgaactatgcccactggt

SEQ ID NO: 383918 - DNA, 25 bp, Homo sapien
gaactatgcccactggtgggtttct

SEQ ID NO: 383919 - DNA, 25 bp, Homo sapien
gcagtctatccgttttgttatcttt

SEQ ID NO: 383920 - DNA, 25 bp, Homo sapien
cagtctatccgttttgttatctttt

SEQ ID NO: 383921 - DNA, 25 bp, Homo sapien
agcagtctatccgttttgttatctt

SEQ ID NO: 383922 - DNA, 25 bp, Homo sapien
tgaagatgtgagacccttgaggtga

SEQ ID NO: 383923 - DNA, 25 bp, Homo sapien
gaatctaagaccaaacattcaccca

SEQ ID NO: 383924 - DNA, 25 bp, Homo sapien
tgaggtgaagaatctaagaccaaac

SEQ ID NO: 383925 - DNA, 25 bp, Homo sapien
tcagcaccatcgataatggaccatt

SEQ ID NO: 383926 - DNA, 25 bp, Homo sapien
tttctgttgctcagcaaagcttggg

SEQ ID NO: 383927 - DNA, 25 bp, Homo sapien
ctcattgactctggcctgctacata

SEQ ID NO: 383928 - DNA, 25 bp, Homo sapien
ggcctgctacatatttcgtaatcat

SEQ ID NO: 383929 - DNA, 25 bp, Homo sapien
tcgtaatcatcgtattcaacattgg

SEQ ID NO: 383930 - DNA, 25 bp, Homo sapien
cactgaccctcgtttctgtttaggg

SEQ ID NO: 383931 - DNA, 25 bp, Homo sapien
ctgtttagggggcaatccatcatcc

SEQ ID NO: 383932 - DNA, 25 bp, Homo sapien
tgccctggatcagatatcttcactg

SEQ ID NO: 383933 - DNA, 25 bp, Homo sapien
ccatcatccttagctggcatccagg

SEQ ID NO: 383934 - DNA, 25 bp, Homo sapien
caccagcacatttgcgggacttgca

SEQ ID NO: 383935 - DNA, 25 bp, Homo sapien
ccttgacctagagccctgaggaccg

SEQ ID NO: 383936 - DNA, 25 bp, Homo sapien
cgggacttgcagatccttcagggtc

SEQ ID NO: 383937 - DNA, 25 bp, Homo sapien
cagggtctatcctcttgacattagc

SEQ ID NO: 383938 - DNA, 25 bp, Homo sapien
tgttaataaactcttccttatctga

SEQ ID NO: 383939 - DNA, 25 bp, Homo sapien
taataaactcttccttatctgactt

SEQ ID NO: 383940 - DNA, 25 bp, Homo sapien
gttaataaactcttccttatctgac

SEQ ID NO: 383941 - DNA, 25 bp, Homo sapien
ttaataaactcttccttatctgact

SEQ ID NO: 383942 - DNA, 25 bp, Homo sapien
aaagtagaggctttaccaagcaaag

SEQ ID NO: 383943 - DNA, 25 bp, Homo sapien
agcaaagatctgaagttggagtagc

SEQ ID NO: 383944 - DNA, 25 bp, Homo sapien
caaagatctgaagttggagtagctt

SEQ ID NO: 383945 - DNA, 25 bp, Homo sapien
tgaaagtagaggctttaccaagcaa

SEQ ID NO: 383946 - DNA, 25 bp, Homo sapien
tgtctccaagcattgggttctatag

SEQ ID NO: 383947 - DNA, 25 bp, Homo sapien
acataacgtaagagcagcacacagc

SEQ ID NO: 383948 - DNA, 25 bp, Homo sapien
tctataggattggttttgccagcca

SEQ ID NO: 383949 - DNA, 25 bp, Homo sapien
tctaaaatagacataacgtaagagc

SEQ ID NO: 383950 - DNA, 25 bp, Homo sapien
cgccatgtaactcggctgccgctgt

SEQ ID NO: 383951 - DNA, 25 bp, Homo sapien
gtggttgaccagactcccccatctt

SEQ ID NO: 383952 - DNA, 25 bp, Homo sapien
agtgcacaggcggttgccagagctc

SEQ ID NO: 383953 - DNA, 25 bp, Homo sapien
cgtcctctgggatctggcgccatgt

SEQ ID NO: 383954 - DNA, 25 bp, Homo sapien
gcagctccttgggagctgtgtattt

SEQ ID NO: 383955 - DNA, 25 bp, Homo sapien
tggcagctccttgggagctgtgtat

SEQ ID NO: 383956 - DNA, 25 bp, Homo sapien
agctccttgggagctgtgtattttc

SEQ ID NO: 383957 - DNA, 25 bp, Homo sapien
cagctccttgggagctgtgtatttt

SEQ ID NO: 383958 - DNA, 25 bp, Homo sapien
agagatggtttgtgggcccggcacc

SEQ ID NO: 383959 - DNA, 25 bp, Homo sapien
agatggtttgtgggcccggcaccgt

SEQ ID NO: 383960 - DNA, 25 bp, Homo sapien
atggtttgtgggcccggcaccgtct

SEQ ID NO: 383961 - DNA, 25 bp, Homo sapien
gtgtgagagatggtttgtgggcccg

SEQ ID NO: 383962 - DNA, 25 bp, Homo sapien
tcagaatttgtgcctcttgggtgcc

SEQ ID NO: 383963 - DNA, 25 bp, Homo sapien
ctcttgggtgccaaggagaccccca

SEQ ID NO: 383964 - DNA, 25 bp, Homo sapien
ccttgtacaggcagctgtatttggc

SEQ ID NO: 383965 - DNA, 25 bp, Homo sapien
tgcccagatggggacggctgccttc

SEQ ID NO: 383966 - DNA, 25 bp, Homo sapien
gcatggccatgatcttgcctgattt

SEQ ID NO: 383967 - DNA, 25 bp, Homo sapien
gacagcatggccatgatcttgcctg

SEQ ID NO: 383968 - DNA, 25 bp, Homo sapien
tttcaaaagcggagaggacacccca

SEQ ID NO: 383969 - DNA, 25 bp, Homo sapien
ggacaccccatgaaattcctctggc

SEQ ID NO: 383970 - DNA, 25 bp, Homo sapien
agccagagcgtcctctctggctaca

SEQ ID NO: 383971 - DNA, 25 bp, Homo sapien
atgcaaaggcctgggtttcagccag

SEQ ID NO: 383972 - DNA, 25 bp, Homo sapien
tccaagaggggatggtgcatgcaaa

SEQ ID NO: 383973 - DNA, 25 bp, Homo sapien
gctacattcaggtccacacttcctc

SEQ ID NO: 383974 - DNA, 25 bp, Homo sapien
gaaagtgctggttggagacgagtga

SEQ ID NO: 383975 - DNA, 25 bp, Homo sapien
tcctgaactgtgtgtgaaaagtact

SEQ ID NO: 383976 - DNA, 25 bp, Homo sapien
agacgaaaggtaccgtagaaatgct

SEQ ID NO: 383977 - DNA, 25 bp, Homo sapien
gcttaatattatggtcttcatctgg

SEQ ID NO: 383978 - DNA, 25 bp, Homo sapien
tgttaggcaccttcaccgtccagtg

SEQ ID NO: 383979 - DNA, 25 bp, Homo sapien
gaatgaatgccccacctatcgagtg

SEQ ID NO: 383980 - DNA, 25 bp, Homo sapien
tatcgagtgagccacgtgctgtctg

SEQ ID NO: 383981 - DNA, 25 bp, Homo sapien
taaatctaacgatagtgccatcagg

SEQ ID NO: 383982 - DNA, 25 bp, Homo sapien
cgtactcgtcttcctggttcatgaa

SEQ ID NO: 383983 - DNA, 25 bp, Homo sapien
ccaggtgcagtgaagctgtcttcgc

SEQ ID NO: 383984 - DNA, 25 bp, Homo sapien
caatgccctttggaaatgggatgca

SEQ ID NO: 383985 - DNA, 25 bp, Homo sapien
caattgatgtgagggccagagcagc

SEQ ID NO: 383986 - DNA, 25 bp, Homo sapien
cccttgcatgccagtggtgagagct

SEQ ID NO: 383987 - DNA, 25 bp, Homo sapien
cgccgacgccgaacacatttattct

SEQ ID NO: 383988 - DNA, 25 bp, Homo sapien
tatttcgaatgagccattttttccc

SEQ ID NO: 383989 - DNA, 25 bp, Homo sapien
cgcggcgagacttcggcctggagcc

SEQ ID NO: 383990 - DNA, 25 bp, Homo sapien
atttattcttatttcgaatgagcca

SEQ ID NO: 383991 - DNA, 25 bp, Homo sapien
gtagaggcctctcgagcgcccttaa

SEQ ID NO: 383992 - DNA, 25 bp, Homo sapien
acgccaaacgggtagaggcctctcg

SEQ ID NO: 383993 - DNA, 25 bp, Homo sapien
tgagcggttgtcaggacacaacgac

SEQ ID NO: 383994 - DNA, 25 bp, Homo sapien
cagagccaacgccaaacgggtagag

SEQ ID NO: 383995 - DNA, 25 bp, Homo sapien
agagcacgctcagggctaaagtagc

SEQ ID NO: 383996 - DNA, 25 bp, Homo sapien
gagcacgctcagggctaaagtagcc

SEQ ID NO: 383997 - DNA, 25 bp, Homo sapien
acgctcagggctaaagtagccgcac

SEQ ID NO: 383998 - DNA, 25 bp, Homo sapien
gcacgctcagggctaaagtagccgc

SEQ ID NO: 383999 - DNA, 25 bp, Homo sapien
gacttccggctcttggctcagggtg

SEQ ID NO: 384000 - DNA, 25 bp, Homo sapien
gacaccgccgtagaggaagtcatag

SEQ ID NO: 384001 - DNA, 25 bp, Homo sapien
gtggagctgttaggccgacaccgcc

SEQ ID NO: 384002 - DNA, 25 bp, Homo sapien
ggttctccttgattggccggtgcga

SEQ ID NO: 384003 - DNA, 25 bp, Homo sapien
acgatgggaagaagtgcttggttca

SEQ ID NO: 384004 - DNA, 25 bp, Homo sapien
cgatgggaagaagtgcttggttcat

SEQ ID NO: 384005 - DNA, 25 bp, Homo sapien
gccttcaagcagcagcgaatttctt

SEQ ID NO: 384006 - DNA, 25 bp, Homo sapien
tgaaccctatactttggctccgagc

SEQ ID NO: 384007 - DNA, 25 bp, Homo sapien
tctgctgctatcttattcctgaacc

SEQ ID NO: 384008 - DNA, 25 bp, Homo sapien
gatatctcgttccatggtttcagtg

SEQ ID NO: 384009 - DNA, 25 bp, Homo sapien
cacttgcagtagatccttgatttga

SEQ ID NO: 384010 - DNA, 25 bp, Homo sapien
ggtcacttgcagtagatccttgatt

SEQ ID NO: 384011 - DNA, 25 bp, Homo sapien
tggtcacttgcagtagatccttgat

SEQ ID NO: 384012 - DNA, 25 bp, Homo sapien
tcttcatcttcgtcatcatttaggt

SEQ ID NO: 384013 - DNA, 25 bp, Homo sapien
tatctaacaattgcagcgttgaaca

SEQ ID NO: 384014 - DNA, 25 bp, Homo sapien
ttaggcattatcagtctctataagg

SEQ ID NO: 384015 - DNA, 25 bp, Homo sapien
cagtctttatatgctgttcagttgg

SEQ ID NO: 384016 - DNA, 25 bp, Homo sapien
atgcaacggtaactcttacaaccct

SEQ ID NO: 384017 - DNA, 25 bp, Homo sapien
tctgtctttagattacggattaagg

SEQ ID NO: 384018 - DNA, 25 bp, Homo sapien
tgtctttagattacggattaaggct

SEQ ID NO: 384019 - DNA, 25 bp, Homo sapien
agattacggattaaggcttcctcag

SEQ ID NO: 384020 - DNA, 25 bp, Homo sapien
ttagattacggattaaggcttcctc

SEQ ID NO: 384021 - DNA, 25 bp, Homo sapien
caatttgatgtgactattcaccttg

SEQ ID NO: 384022 - DNA, 25 bp, Homo sapien
tgatgtgactattcaccttgaggca

SEQ ID NO: 384023 - DNA, 25 bp, Homo sapien
gtttgcaatttgatgtgactattca

SEQ ID NO: 384024 - DNA, 25 bp, Homo sapien
tttgagtttgcaatttgatgtgact

SEQ ID NO: 384025 - DNA, 25 bp, Homo sapien
actgcaacactctctatcttacatc

SEQ ID NO: 384026 - DNA, 25 bp, Homo sapien
aagaggcataggagaagttcctgga

SEQ ID NO: 384027 - DNA, 25 bp, Homo sapien
gaagttcctggagccaactctttcg

SEQ ID NO: 384028 - DNA, 25 bp, Homo sapien
cataggagaagttcctggagccaac

SEQ ID NO: 384029 - DNA, 25 bp, Homo sapien
gagccaactctttcgtgccagttca

SEQ ID NO: 384030 - DNA, 25 bp, Homo sapien
tcaagccactgatctgtctttggga

SEQ ID NO: 384031 - DNA, 25 bp, Homo sapien
tgggagcccggttatcgccactgat

SEQ ID NO: 384032 - DNA, 25 bp, Homo sapien
tgattctctaatgcagcttggctgc

SEQ ID NO: 384033 - DNA, 25 bp, Homo sapien
tagaatatttcttgttccggatttc

SEQ ID NO: 384034 - DNA, 25 bp, Homo sapien
tgctattatgatgtgaaatgatgcc

SEQ ID NO: 384035 - DNA, 25 bp, Homo sapien
taggccaggtcttctcaatttgtgg

SEQ ID NO: 384036 - DNA, 25 bp, Homo sapien
gaagaactagatttctgctattatg

SEQ ID NO: 384037 - DNA, 25 bp, Homo sapien
cagaatgtttgccaacatggttcac

SEQ ID NO: 384038 - DNA, 25 bp, Homo sapien
cttggatcacgggatgtggggctgc

SEQ ID NO: 384039 - DNA, 25 bp, Homo sapien
ggtatctgcccttggatcacgggat

SEQ ID NO: 384040 - DNA, 25 bp, Homo sapien
tatctgcccttggatcacgggatgt

SEQ ID NO: 384041 - DNA, 25 bp, Homo sapien
taggtatctgcccttggatcacggg

SEQ ID NO: 384042 - DNA, 25 bp, Homo sapien
gctgtggccactgtacaccttctgg

SEQ ID NO: 384043 - DNA, 25 bp, Homo sapien
actgtacaccttctggtggtttggt

SEQ ID NO: 384044 - DNA, 25 bp, Homo sapien
acaccttctggtggtttggtggtga

SEQ ID NO: 384045 - DNA, 25 bp, Homo sapien
tgtacaccttctggtggtttggtgg

SEQ ID NO: 384046 - DNA, 25 bp, Homo sapien
tgtggtctaatgcatcgatgaaacc

SEQ ID NO: 384047 - DNA, 25 bp, Homo sapien
cattttcttcccatgtgtggtctaa

SEQ ID NO: 384048 - DNA, 25 bp, Homo sapien
tgaaaccaaataaatccgcaaggga

SEQ ID NO: 384049 - DNA, 25 bp, Homo sapien
taactctgagagtcaagctgtggtt

SEQ ID NO: 384050 - DNA, 25 bp, Homo sapien
tctggttgtgcctgcatatgccttt

SEQ ID NO: 384051 - DNA, 25 bp, Homo sapien
caggctgaaccctgagtttggaacc

SEQ ID NO: 384052 - DNA, 25 bp, Homo sapien
ctgtctggttgtgcctgcatatgcc

SEQ ID NO: 384053 - DNA, 25 bp, Homo sapien
cacaggctgaaccctgagtttggaa

SEQ ID NO: 384054 - DNA, 25 bp, Homo sapien
tgggcagtggcttcaccacactgtc

SEQ ID NO: 384055 - DNA, 25 bp, Homo sapien
gggcagtggcttcaccacactgtct

SEQ ID NO: 384056 - DNA, 25 bp, Homo sapien
ctgggcagtggcttcaccacactgt

SEQ ID NO: 384057 - DNA, 25 bp, Homo sapien
gcagtggcttcaccacactgtctat

SEQ ID NO: 384058 - DNA, 25 bp, Homo sapien
cacaggttctcggtttgctagtgct

SEQ ID NO: 384059 - DNA, 25 bp, Homo sapien
tcctctgaaggcttagctgttagtc

SEQ ID NO: 384060 - DNA, 25 bp, Homo sapien
cactgcttccgtatttacagggatc

SEQ ID NO: 384061 - DNA, 25 bp, Homo sapien
acactaccaccgatattttcacagg

SEQ ID NO: 384062 - DNA, 25 bp, Homo sapien
ggctggccgaagctgttcccaacaa

SEQ ID NO: 384063 - DNA, 25 bp, Homo sapien
tattgtagcccccaattccctgaag

SEQ ID NO: 384064 - DNA, 25 bp, Homo sapien
gagagtggaccaccaagaccttgga

SEQ ID NO: 384065 - DNA, 25 bp, Homo sapien
tcaaagtaaagacctgacaggagag

SEQ ID NO: 384066 - DNA, 25 bp, Homo sapien
gacgtatctggtttgagtggactga

SEQ ID NO: 384067 - DNA, 25 bp, Homo sapien
cgtatctggtttgagtggactgagc

SEQ ID NO: 384068 - DNA, 25 bp, Homo sapien
tggacgtatctggtttgagtggact

SEQ ID NO: 384069 - DNA, 25 bp, Homo sapien
tctggtttgagtggactgagctggt

SEQ ID NO: 384070 - DNA, 25 bp, Homo sapien
ccgaaatgaggactaaagggaagca

SEQ ID NO: 384071 - DNA, 25 bp, Homo sapien
atgggaaaggctgccgccgaaatga

SEQ ID NO: 384072 - DNA, 25 bp, Homo sapien
gaggactaaagggaagcatttcatt

SEQ ID NO: 384073 - DNA, 25 bp, Homo sapien
gaagatgccgggcaggatgggaaag

SEQ ID NO: 384074 - DNA, 25 bp, Homo sapien
cctgtgtctgcaggatggtcagtgc

SEQ ID NO: 384075 - DNA, 25 bp, Homo sapien
ctgtgtctgcaggatggtcagtgcc

SEQ ID NO: 384076 - DNA, 25 bp, Homo sapien
ctatgatgccagctgcgttctgagg

SEQ ID NO: 384077 - DNA, 25 bp, Homo sapien
gccagctgcgttctgaggctccttc

SEQ ID NO: 384078 - DNA, 25 bp, Homo sapien
gctgtgtgtgcaacagaactccagg

SEQ ID NO: 384079 - DNA, 25 bp, Homo sapien
cagaactccaggtactgtgagctca

SEQ ID NO: 384080 - DNA, 25 bp, Homo sapien
gtggagctgggtgaatgtagcccca

SEQ ID NO: 384081 - DNA, 25 bp, Homo sapien
ctccaggtactgtgagctcagctgc

SEQ ID NO: 384082 - DNA, 25 bp, Homo sapien
tagcctctgcagaaacgagcaggac

SEQ ID NO: 384083 - DNA, 25 bp, Homo sapien
atggaagagggtgagttgagcccac

SEQ ID NO: 384084 - DNA, 25 bp, Homo sapien
gaaacgagcaggacaaatggaagag

SEQ ID NO: 384085 - DNA, 25 bp, Homo sapien
tcagcgtagcctctgcagaaacgag

SEQ ID NO: 384086 - DNA, 25 bp, Homo sapien
gtttttcccagcgagtcctctcctg

SEQ ID NO: 384087 - DNA, 25 bp, Homo sapien
tttcccagcgagtcctctcctgtaa

SEQ ID NO: 384088 - DNA, 25 bp, Homo sapien
aatggtttttcccagcgagtcctct

SEQ ID NO: 384089 - DNA, 25 bp, Homo sapien
ccagcgagtcctctcctgtaacttt

SEQ ID NO: 384090 - DNA, 25 bp, Homo sapien
tggaaagcaggatccaccggttcat

SEQ ID NO: 384091 - DNA, 25 bp, Homo sapien
ctggaaagcaggatccaccggttca

SEQ ID NO: 384092 - DNA, 25 bp, Homo sapien
gactcctatgaaccagtcttctcca

SEQ ID NO: 384093 - DNA, 25 bp, Homo sapien
agcaatagaccctccttcaactcgt

SEQ ID NO: 384094 - DNA, 25 bp, Homo sapien
ttcaactcgtggtagcctgtacgcc

SEQ ID NO: 384095 - DNA, 25 bp, Homo sapien
gctgcgagcctgagcggactcctat

SEQ ID NO: 384096 - DNA, 25 bp, Homo sapien
gctggtcctcccctaacatgtgtgg

SEQ ID NO: 384097 - DNA, 25 bp, Homo sapien
tgtgctgcttatggtgccacatcct

SEQ ID NO: 384098 - DNA, 25 bp, Homo sapien
gcacctgacgcagggtgtgctgctt

SEQ ID NO: 384099 - DNA, 25 bp, Homo sapien
caatcagcgtcgttccccgtagttt

SEQ ID NO: 384100 - DNA, 25 bp, Homo sapien
agaacacctgttggcttggcttgac

SEQ ID NO: 384101 - DNA, 25 bp, Homo sapien
cactgtttcagtgagcgcctgggtg

SEQ ID NO: 384102 - DNA, 25 bp, Homo sapien
ccacttcttgttggcgaaccgctga

SEQ ID NO: 384103 - DNA, 25 bp, Homo sapien
ttggattggtcggaaccctgagagc

SEQ ID NO: 384104 - DNA, 25 bp, Homo sapien
tctggattggtatatggggcagcct

SEQ ID NO: 384105 - DNA, 25 bp, Homo sapien
aagctctggattggtatatggggca

SEQ ID NO: 384106 - DNA, 25 bp, Homo sapien
actgacacatggggaaagacaggat

SEQ ID NO: 384107 - DNA, 25 bp, Homo sapien
tccaagctctggattggtatatggg

SEQ ID NO: 384108 - DNA, 25 bp, Homo sapien
taatggacgtcctgatgacccaagc

SEQ ID NO: 384109 - DNA, 25 bp, Homo sapien
tgtcactgggcgtaagatactgaga

SEQ ID NO: 384110 - DNA, 25 bp, Homo sapien
catgggttctagagtgggcttcccc

SEQ ID NO: 384111 - DNA, 25 bp, Homo sapien
taaaacagtcacaggagacctttcc

SEQ ID NO: 384112 - DNA, 25 bp, Homo sapien
aaatcattaattcgaactggcatac

SEQ ID NO: 384113 - DNA, 25 bp, Homo sapien
ttgatgggatcaaaggtagtcgtga

SEQ ID NO: 384114 - DNA, 25 bp, Homo sapien
tgttgcactgacaatgaaaatgaga

SEQ ID NO: 384115 - DNA, 25 bp, Homo sapien
cgtgagaatttctagcttgcgagac

SEQ ID NO: 384116 - DNA, 25 bp, Homo sapien
tgaaactccatggacaagagactgg

SEQ ID NO: 384117 - DNA, 25 bp, Homo sapien
aatggaagtcacaatcggccctggc

SEQ ID NO: 384118 - DNA, 25 bp, Homo sapien
gatgaaatgttctggcgagttgcct

SEQ ID NO: 384119 - DNA, 25 bp, Homo sapien
gcccttgggaggctagtgcacctgt

SEQ ID NO: 384120 - DNA, 25 bp, Homo sapien
tttcccacggctgctcactgtggat

SEQ ID NO: 384121 - DNA, 25 bp, Homo sapien
aacaatttgtatttcccacggctgc

SEQ ID NO: 384122 - DNA, 25 bp, Homo sapien
gatcaagggcttctgggttgtgagg

SEQ ID NO: 384123 - DNA, 25 bp, Homo sapien
gcagaacaatttgtatttcccacgg

SEQ ID NO: 384124 - DNA, 25 bp, Homo sapien
gtgtgtttagccttgacatctttca

SEQ ID NO: 384125 - DNA, 25 bp, Homo sapien
tgtgtttagccttgacatctttcat

SEQ ID NO: 384126 - DNA, 25 bp, Homo sapien
tagccttgattctcgtaagggctgc

SEQ ID NO: 384127 - DNA, 25 bp, Homo sapien
catgaaagctaatctgaatgacaat

SEQ ID NO: 384128 - DNA, 25 bp, Homo sapien
taagaagagttccagtagagtagcc

SEQ ID NO: 384129 - DNA, 25 bp, Homo sapien
gatttttcttgtggtacgtgcatga

SEQ ID NO: 384130 - DNA, 25 bp, Homo sapien
gctgacggccatgagatgctgcttt

SEQ ID NO: 384131 - DNA, 25 bp, Homo sapien
tggagcaaatcttctctatactggg

SEQ ID NO: 384132 - DNA, 25 bp, Homo sapien
tacttggtacccacagagtgatagc

SEQ ID NO: 384133 - DNA, 25 bp, Homo sapien
agtgatagcatcaggcatgctccaa

SEQ ID NO: 384134 - DNA, 25 bp, Homo sapien
tctctccatcactggctttgaacaa

SEQ ID NO: 384135 - DNA, 25 bp, Homo sapien
cgtgccctgttcgatggctctgttg

SEQ ID NO: 384136 - DNA, 25 bp, Homo sapien
ctagagctgatacagtacgtgccct

SEQ ID NO: 384137 - DNA, 25 bp, Homo sapien
gatacagtacgtgccctgttcgatg

SEQ ID NO: 384138 - DNA, 25 bp, Homo sapien
ggtggtaaacctccaactgctgact

SEQ ID NO: 384139 - DNA, 25 bp, Homo sapien
tccagctaaggatagaataggccct

SEQ ID NO: 384140 - DNA, 25 bp, Homo sapien
ggaacgtgtaacagaacccatgact

SEQ ID NO: 384141 - DNA, 25 bp, Homo sapien
tccgtactataggtaaatgctgggc

SEQ ID NO: 384142 - DNA, 25 bp, Homo sapien
gaaactactgacaacgacaggtggt

SEQ ID NO: 384143 - DNA, 25 bp, Homo sapien
tgtggtcttagtcccagcgattctg

SEQ ID NO: 384144 - DNA, 25 bp, Homo sapien
caaccatttgcatggctgggctcca

SEQ ID NO: 384145 - DNA, 25 bp, Homo sapien
ggagggcccgatagtaaccatttga

SEQ ID NO: 384146 - DNA, 25 bp, Homo sapien
cagtgtaggtcagctgatggcgaac

SEQ ID NO: 384147 - DNA, 25 bp, Homo sapien
ttcagtgtaggtcagctgatggcga

SEQ ID NO: 384148 - DNA, 25 bp, Homo sapien
tgtaggtcagctgatggcgaaccat

SEQ ID NO: 384149 - DNA, 25 bp, Homo sapien
gggttcagtgtaggtcagctgatgg

SEQ ID NO: 384150 - DNA, 25 bp, Homo sapien
ctgctttgttctggcgactttcctg

SEQ ID NO: 384151 - DNA, 25 bp, Homo sapien
ttctggcgactttcctgggcaggcc

SEQ ID NO: 384152 - DNA, 25 bp, Homo sapien
aagaatgactagctcagccagcggc

SEQ ID NO: 384153 - DNA, 25 bp, Homo sapien
ggaagaatgactagctcagccagcg

SEQ ID NO: 384154 - DNA, 25 bp, Homo sapien
taatgctcttccgaataaagtgctg

SEQ ID NO: 384155 - DNA, 25 bp, Homo sapien
gggcctgcttcttatctgacacagc

SEQ ID NO: 384156 - DNA, 25 bp, Homo sapien
tctggatggcaggtctaatgctctt

SEQ ID NO: 384157 - DNA, 25 bp, Homo sapien
cagctatcagagtctagtggttgtg

SEQ ID NO: 384158 - DNA, 25 bp, Homo sapien
gagttgtgtctactcaacaattagg

SEQ ID NO: 384159 - DNA, 25 bp, Homo sapien
tttagagtcgatgagttgtgtctac

SEQ ID NO: 384160 - DNA, 25 bp, Homo sapien
tactcaacaattaggaacttaatcc

SEQ ID NO: 384161 - DNA, 25 bp, Homo sapien
aatttatatagtttagagtcgatga

SEQ ID NO: 384162 - DNA, 25 bp, Homo sapien
ctggtcggcttccacatgggagctg

SEQ ID NO: 384163 - DNA, 25 bp, Homo sapien
ggtcggcttccacatgggagctgca

SEQ ID NO: 384164 - DNA, 25 bp, Homo sapien
tccacatgggagctgcaagtggcat

SEQ ID NO: 384165 - DNA, 25 bp, Homo sapien
cggcttccacatgggagctgcaagt

SEQ ID NO: 384166 - DNA, 25 bp, Homo sapien
tgttctgtcactggcttcgttccca

SEQ ID NO: 384167 - DNA, 25 bp, Homo sapien
tgtggactcgccctcctgttctgtc

SEQ ID NO: 384168 - DNA, 25 bp, Homo sapien
tgcctttcggctgtggactcgccct

SEQ ID NO: 384169 - DNA, 25 bp, Homo sapien
tgctccttagtcctctgcctttcgg

SEQ ID NO: 384170 - DNA, 25 bp, Homo sapien
cctttgtagtagagcactggaatga

SEQ ID NO: 384171 - DNA, 25 bp, Homo sapien
cctgcgaacctttgtagtagagcac

SEQ ID NO: 384172 - DNA, 25 bp, Homo sapien
cgtttcctgcgaacctttgtagtag

SEQ ID NO: 384173 - DNA, 25 bp, Homo sapien
tgactgagccccgtttcctgcgaac

SEQ ID NO: 384174 - DNA, 25 bp, Homo sapien
tctttctagtgtctaggtctggcgc

SEQ ID NO: 384175 - DNA, 25 bp, Homo sapien
acttccagattctcggtgttcagaa

SEQ ID NO: 384176 - DNA, 25 bp, Homo sapien
tagtgtctaggtctggcgctgccac

SEQ ID NO: 384177 - DNA, 25 bp, Homo sapien
cagaatccggtcctccgtcgtcttt

SEQ ID NO: 384178 - DNA, 25 bp, Homo sapien
aaatccttctggcaacaaggtatga

SEQ ID NO: 384179 - DNA, 25 bp, Homo sapien
tgtgtgtacttatgttagcttcttt

SEQ ID NO: 384180 - DNA, 25 bp, Homo sapien
tctggcaacaaggtatgagtccttt

SEQ ID NO: 384181 - DNA, 25 bp, Homo sapien
tatgagtccttttcggacacttcag

SEQ ID NO: 384182 - DNA, 25 bp, Homo sapien
tgtatcagctgacgggtaggtattg

SEQ ID NO: 384183 - DNA, 25 bp, Homo sapien
cagctgacgggtaggtattgagcac

SEQ ID NO: 384184 - DNA, 25 bp, Homo sapien
ggctatatagagtaagtgtttctct

SEQ ID NO: 384185 - DNA, 25 bp, Homo sapien
gaccctgtatcagctgacgggtagg

SEQ ID NO: 384186 - DNA, 25 bp, Homo sapien
caacggctgttcctggaatacggat

SEQ ID NO: 384187 - DNA, 25 bp, Homo sapien
acggctgttcctggaatacggattt

SEQ ID NO: 384188 - DNA, 25 bp, Homo sapien
gataatcaacggctgttcctggaat

SEQ ID NO: 384189 - DNA, 25 bp, Homo sapien
aatcaacggctgttcctggaatacg

SEQ ID NO: 384190 - DNA, 25 bp, Homo sapien
aaagcatgaagaggtattcatctgt

SEQ ID NO: 384191 - DNA, 25 bp, Homo sapien
agcatgaagaggtattcatctgtta

SEQ ID NO: 384192 - DNA, 25 bp, Homo sapien
ggtattcatctgttacggccctcac

SEQ ID NO: 384193 - DNA, 25 bp, Homo sapien
aagcatgaagaggtattcatctgtt

SEQ ID NO: 384194 - DNA, 25 bp, Homo sapien
tgtgagcccacgtgctaagctttcg

SEQ ID NO: 384195 - DNA, 25 bp, Homo sapien
gcagccatgccttgtgagcccacgt

SEQ ID NO: 384196 - DNA, 25 bp, Homo sapien
catgccttgtgagcccacgtgctaa

SEQ ID NO: 384197 - DNA, 25 bp, Homo sapien
cccacgtgctaagctttcgtgctct

SEQ ID NO: 384198 - DNA, 25 bp, Homo sapien
tgttgtggagggacatggctgggat

SEQ ID NO: 384199 - DNA, 25 bp, Homo sapien
tctgtgtcctggccgtcgccttcat

SEQ ID NO: 384200 - DNA, 25 bp, Homo sapien
gtgtgttgtggagggacatggctgg

SEQ ID NO: 384201 - DNA, 25 bp, Homo sapien
gatctgtgtcctggccgtcgccttc

SEQ ID NO: 384202 - DNA, 25 bp, Homo sapien
cgtacctggacctgctgaatcatag

SEQ ID NO: 384203 - DNA, 25 bp, Homo sapien
gaatcatagcccacatgtccaggtg

SEQ ID NO: 384204 - DNA, 25 bp, Homo sapien
cccagaacctgtggctgtagatgtg

SEQ ID NO: 384205 - DNA, 25 bp, Homo sapien
ataggaaggcttccgctgcccagaa

SEQ ID NO: 384206 - DNA, 25 bp, Homo sapien
ttacccaaggcgtatacctgccctg

SEQ ID NO: 384207 - DNA, 25 bp, Homo sapien
tgccctgtttgtttggagccggaag

SEQ ID NO: 384208 - DNA, 25 bp, Homo sapien
cgtatacctgccctgtttgtttgga

SEQ ID NO: 384209 - DNA, 25 bp, Homo sapien
agattttacccaaggcgtatacctg

SEQ ID NO: 384210 - DNA, 25 bp, Homo sapien
aagcatgctgggcaccgatctcttt

SEQ ID NO: 384211 - DNA, 25 bp, Homo sapien
tgggcaccgatctctttggaagcct

SEQ ID NO: 384212 - DNA, 25 bp, Homo sapien
gcatgctgggcaccgatctctttgg

SEQ ID NO: 384213 - DNA, 25 bp, Homo sapien
atgctgggcaccgatctctttggaa

SEQ ID NO: 384214 - DNA, 25 bp, Homo sapien
tttctgacatgtaagtatggctctt

SEQ ID NO: 384215 - DNA, 25 bp, Homo sapien
gctctttcagagcactagcactggg

SEQ ID NO: 384216 - DNA, 25 bp, Homo sapien
gacatgtaagtatggctctttcaga

SEQ ID NO: 384217 - DNA, 25 bp, Homo sapien
ctggaacttggcttagtgagtcagt

SEQ ID NO: 384218 - DNA, 25 bp, Homo sapien
ggtctgcaagagtcctgagcacagg

SEQ ID NO: 384219 - DNA, 25 bp, Homo sapien
taccagttgattatggaagatgaac

SEQ ID NO: 384220 - DNA, 25 bp, Homo sapien
ctgtccccgagttagagtgcaccac

SEQ ID NO: 384221 - DNA, 25 bp, Homo sapien
tgaacagccagatatagaggtctgc

SEQ ID NO: 384222 - DNA, 25 bp, Homo sapien
tgcctggattgtttcctcttggatg

SEQ ID NO: 384223 - DNA, 25 bp, Homo sapien
cttgcctggattgtttcctcttgga

SEQ ID NO: 384224 - DNA, 25 bp, Homo sapien
ctggattgtttcctcttggatgtaa

SEQ ID NO: 384225 - DNA, 25 bp, Homo sapien
gattgtttcctcttggatgtaacat

SEQ ID NO: 384226 - DNA, 25 bp, Homo sapien
gaagtcggttcattaactggcatcc

SEQ ID NO: 384227 - DNA, 25 bp, Homo sapien
ggagctgccatctttcatcaacagg

SEQ ID NO: 384228 - DNA, 25 bp, Homo sapien
cagtatagtctgctctgataccagc

SEQ ID NO: 384229 - DNA, 25 bp, Homo sapien
tggcagccacgtaactacagatctt

SEQ ID NO: 384230 - DNA, 25 bp, Homo sapien
tcattgattctaggaggagttctgg

SEQ ID NO: 384231 - DNA, 25 bp, Homo sapien
caaatccaacttgctgggaaactga

SEQ ID NO: 384232 - DNA, 25 bp, Homo sapien
gtataagcagacagtgtcctcctgg

SEQ ID NO: 384233 - DNA, 25 bp, Homo sapien
gagcacagggatgattaactccaca

SEQ ID NO: 384234 - DNA, 25 bp, Homo sapien
tcgtgtgcgctgcagtaacctctca

SEQ ID NO: 384235 - DNA, 25 bp, Homo sapien
actgagtttaggtcgcaggtcccct

SEQ ID NO: 384236 - DNA, 25 bp, Homo sapien
cgcgctgcgtaaagctgaggagcct

SEQ ID NO: 384237 - DNA, 25 bp, Homo sapien
tacacttagcgcatgttgctccggc

SEQ ID NO: 384238 - DNA, 25 bp, Homo sapien
ctgtttggtatttccacgtgccttg

SEQ ID NO: 384239 - DNA, 25 bp, Homo sapien
tggtatttccacgtgccttgggccc

SEQ ID NO: 384240 - DNA, 25 bp, Homo sapien
gtatttccacgtgccttgggcccgc

SEQ ID NO: 384241 - DNA, 25 bp, Homo sapien
tttggtatttccacgtgccttgggc

SEQ ID NO: 384242 - DNA, 25 bp, Homo sapien
ttggcggcgagtccgcgaacactgc

SEQ ID NO: 384243 - DNA, 25 bp, Homo sapien
tgcgcatgcgcgagccggaagctgc

SEQ ID NO: 384244 - DNA, 25 bp, Homo sapien
tccccgactgtactgggcgttggcg

SEQ ID NO: 384245 - DNA, 25 bp, Homo sapien
cccgggagactgaggacttggattg

SEQ ID NO: 384246 - DNA, 25 bp, Homo sapien
aaaccagaaccagtccattccatag

SEQ ID NO: 384247 - DNA, 25 bp, Homo sapien
tcaaggcacgcaagtacacagcctc

SEQ ID NO: 384248 - DNA, 25 bp, Homo sapien
aaggtctttcaggacatcaaggcac

SEQ ID NO: 384249 - DNA, 25 bp, Homo sapien
aaaaggtctttcaggacatcaaggc

SEQ ID NO: 384250 - DNA, 25 bp, Homo sapien
aaatcttgtctgtatcattccggtt

SEQ ID NO: 384251 - DNA, 25 bp, Homo sapien
cttgcccaggcaccatgctaaatct

SEQ ID NO: 384252 - DNA, 25 bp, Homo sapien
gctaaatcttgtctgtatcattccg

SEQ ID NO: 384253 - DNA, 25 bp, Homo sapien
caggcaccatgctaaatcttgtctg

SEQ ID NO: 384254 - DNA, 25 bp, Homo sapien
gcttgcccttggttctctgaggggt

SEQ ID NO: 384255 - DNA, 25 bp, Homo sapien
tcatattctcccagctgttcaatca

SEQ ID NO: 384256 - DNA, 25 bp, Homo sapien
ttcttcatattctcccagctgttca

SEQ ID NO: 384257 - DNA, 25 bp, Homo sapien
tggttctctgaggggttttcttcat

SEQ ID NO: 384258 - DNA, 25 bp, Homo sapien
gtcgtgggcgcgcacccgtgggtta

SEQ ID NO: 384259 - DNA, 25 bp, Homo sapien
gggcgcgcacccgtgggttacacgc

SEQ ID NO: 384260 - DNA, 25 bp, Homo sapien
cccgcagcgtgttccagagactgct

SEQ ID NO: 384261 - DNA, 25 bp, Homo sapien
cgggagccccgcagcgtgttccaga

SEQ ID NO: 384262 - DNA, 25 bp, Homo sapien
agatcgtcgatgtccagctggtgga

SEQ ID NO: 384263 - DNA, 25 bp, Homo sapien
gcgctacatggatgccggacgacat

SEQ ID NO: 384264 - DNA, 25 bp, Homo sapien
ccttgaaggcgatgcccgcgttgtt

SEQ ID NO: 384265 - DNA, 25 bp, Homo sapien
gcgttgttgaccagcacgtccaggc

SEQ ID NO: 384266 - DNA, 25 bp, Homo sapien
caggagccccagtgcatcggttctt

SEQ ID NO: 384267 - DNA, 25 bp, Homo sapien
ggagccccagtgcatcggttcttct

SEQ ID NO: 384268 - DNA, 25 bp, Homo sapien
cgccaggagccccagtgcatcggtt

SEQ ID NO: 384269 - DNA, 25 bp, Homo sapien
cccagtgcatcggttcttcttcggg

SEQ ID NO: 384270 - DNA, 25 bp, Homo sapien
aagctcaattcagaaaaactgcaga

SEQ ID NO: 384271 - DNA, 25 bp, Homo sapien
tctccaaggtttctgcactccctgc

SEQ ID NO: 384272 - DNA, 25 bp, Homo sapien
tggctggaaaactctcactttctcc

SEQ ID NO: 384273 - DNA, 25 bp, Homo sapien
agttcaaaatccatccagttgcctt

SEQ ID NO: 384274 - DNA, 25 bp, Homo sapien
tgaatatgaaagggtgtgggatcag

SEQ ID NO: 384275 - DNA, 25 bp, Homo sapien
ttgaatatgaaagggtgtgggatca

SEQ ID NO: 384276 - DNA, 25 bp, Homo sapien
cttgaatatgaaagggtgtgggatc

SEQ ID NO: 384277 - DNA, 25 bp, Homo sapien
tattagagggagtaattctgtgcac

SEQ ID NO: 384278 - DNA, 25 bp, Homo sapien
catctcgggtaccaaagaaatttgt

SEQ ID NO: 384279 - DNA, 25 bp, Homo sapien
aaatttgttttcatcgtcacttcag

SEQ ID NO: 384280 - DNA, 25 bp, Homo sapien
ctgtgcacacatctcgggtaccaaa

SEQ ID NO: 384281 - DNA, 25 bp, Homo sapien
aggtgagatttggaagagctgccct

SEQ ID NO: 384282 - DNA, 25 bp, Homo sapien
gaaccagagccttagaagtagcaca

SEQ ID NO: 384283 - DNA, 25 bp, Homo sapien
cttcgaattttggctgagtagagtc

SEQ ID NO: 384284 - DNA, 25 bp, Homo sapien
tcgaattttggctgagtagagtcag

SEQ ID NO: 384285 - DNA, 25 bp, Homo sapien
tcatatgagagacagttactggtat

SEQ ID NO: 384286 - DNA, 25 bp, Homo sapien
tgtagaaaggtgtgcaacaatcccg

SEQ ID NO: 384287 - DNA, 25 bp, Homo sapien
gaggtgaatgccaaatttgcaggga

SEQ ID NO: 384288 - DNA, 25 bp, Homo sapien
gaggaatacgcatagaaagtgtggt

SEQ ID NO: 384289 - DNA, 25 bp, Homo sapien
gacagaacggtgacgccaatcttcg

SEQ ID NO: 384290 - DNA, 25 bp, Homo sapien
cagtttcctggcgtggatcctggac

SEQ ID NO: 384291 - DNA, 25 bp, Homo sapien
taagggctctgacgctcatgatgct

SEQ ID NO: 384292 - DNA, 25 bp, Homo sapien
tgatggtctcactgcggaacttctg

SEQ ID NO: 384293 - DNA, 25 bp, Homo sapien
caattagtagtacattagtgagtgc

SEQ ID NO: 384294 - DNA, 25 bp, Homo sapien
taaatgccctttggaccaactcagg

SEQ ID NO: 384295 - DNA, 25 bp, Homo sapien
caactcaggacaaggtacaaaatgg

SEQ ID NO: 384296 - DNA, 25 bp, Homo sapien
cagatttacgtagtcaactgagtgc

SEQ ID NO: 384297 - DNA, 25 bp, Homo sapien
gtctttgtatactttgctgaaacac

SEQ ID NO: 384298 - DNA, 25 bp, Homo sapien
cagtctttgtatactttgctgaaac

SEQ ID NO: 384299 - DNA, 25 bp, Homo sapien
catcagtctttgtatactttgctga

SEQ ID NO: 384300 - DNA, 25 bp, Homo sapien
tctttgtatactttgctgaaacaca

SEQ ID NO: 384301 - DNA, 25 bp, Homo sapien
aattctcggaattgttgcagcctga

SEQ ID NO: 384302 - DNA, 25 bp, Homo sapien
gacctgcgtgtacagagacgtcaat

SEQ ID NO: 384303 - DNA, 25 bp, Homo sapien
catggttgctctgggctgtacagca

SEQ ID NO: 384304 - DNA, 25 bp, Homo sapien
gggtctaccctttccatgagctgtg

SEQ ID NO: 384305 - DNA, 25 bp, Homo sapien
ctatattgggattatggagatccga

SEQ ID NO: 384306 - DNA, 25 bp, Homo sapien
gaaggcatggattctgaccccgtgt

SEQ ID NO: 384307 - DNA, 25 bp, Homo sapien
gtagcccagctaatggaaggcatgg

SEQ ID NO: 384308 - DNA, 25 bp, Homo sapien
tgaccccgtgtcatgaacaactcct

SEQ ID NO: 384309 - DNA, 25 bp, Homo sapien
aggttgtcatagctttttgcttcta

SEQ ID NO: 384310 - DNA, 25 bp, Homo sapien
aaggttgtcatagctttttgcttct

SEQ ID NO: 384311 - DNA, 25 bp, Homo sapien
gagggcttcaggcacgcggctgctg

SEQ ID NO: 384312 - DNA, 25 bp, Homo sapien
gagcagcaaaaactgtgcagccgga

SEQ ID NO: 384313 - DNA, 25 bp, Homo sapien
tgtgcagccggagggccctatgtta

SEQ ID NO: 384314 - DNA, 25 bp, Homo sapien
gccctatgttaaaggaggctccagg

SEQ ID NO: 384315 - DNA, 25 bp, Homo sapien
aaattctctatcccagaatcattgg

SEQ ID NO: 384316 - DNA, 25 bp, Homo sapien
gcaggatcttgttggagattgggga

SEQ ID NO: 384317 - DNA, 25 bp, Homo sapien
ggcaggatcttgttggagattgggg

SEQ ID NO: 384318 - DNA, 25 bp, Homo sapien
aatatgtaatttgaacaaacaacat

SEQ ID NO: 384319 - DNA, 25 bp, Homo sapien
gggaatatgtaatttgaacaaacaa

SEQ ID NO: 384320 - DNA, 25 bp, Homo sapien
cactggcttactgcagttgtgcttc

SEQ ID NO: 384321 - DNA, 25 bp, Homo sapien
tccttcactggcactggcttactgc

SEQ ID NO: 384322 - DNA, 25 bp, Homo sapien
tggcttactgcagttgtgcttctga

SEQ ID NO: 384323 - DNA, 25 bp, Homo sapien
ctggcactggcttactgcagttgtg

SEQ ID NO: 384324 - DNA, 25 bp, Homo sapien
tgagcagcgatgacgcttccaggcc

SEQ ID NO: 384325 - DNA, 25 bp, Homo sapien
cagcagcactaatgatgtgagcagc

SEQ ID NO: 384326 - DNA, 25 bp, Homo sapien
gtctttcacaattgtccaaagacca

SEQ ID NO: 384327 - DNA, 25 bp, Homo sapien
ggttgcagtcctttaaggcctctag

SEQ ID NO: 384328 - DNA, 25 bp, Homo sapien
acactgtatctcttaatctacacgt

SEQ ID NO: 384329 - DNA, 25 bp, Homo sapien
tcttaatctacacgtttcctaccat

SEQ ID NO: 384330 - DNA, 25 bp, Homo sapien
ataataccaagcacactgagaggcc

SEQ ID NO: 384331 - DNA, 25 bp, Homo sapien
agtttaaagctttatgatgcataca

SEQ ID NO: 384332 - DNA, 25 bp, Homo sapien
aagaaccttggagatgagacagtga

SEQ ID NO: 384333 - DNA, 25 bp, Homo sapien
cacactgcaggagtcataggccctt

SEQ ID NO: 384334 - DNA, 25 bp, Homo sapien
tgtccactctgcttgctgtgccaca

SEQ ID NO: 384335 - DNA, 25 bp, Homo sapien
cctggctggtgagaaattcctagtt

SEQ ID NO: 384336 - DNA, 25 bp, Homo sapien
gagtactttactggctccggcggct

SEQ ID NO: 384337 - DNA, 25 bp, Homo sapien
caacaccgcaggtagggttatttgt

SEQ ID NO: 384338 - DNA, 25 bp, Homo sapien
ctccggaatttgaccaccaagggag

SEQ ID NO: 384339 - DNA, 25 bp, Homo sapien
cacacacatttagccctccggaatt

SEQ ID NO: 384340 - DNA, 25 bp, Homo sapien
tctttccaaccttacgaacagcagt

SEQ ID NO: 384341 - DNA, 25 bp, Homo sapien
tgatgctgaggcactggaaagtcca

SEQ ID NO: 384342 - DNA, 25 bp, Homo sapien
gaggcactggaaagtccaaaggcag

SEQ ID NO: 384343 - DNA, 25 bp, Homo sapien
tttccaaccttacgaacagcagtct

SEQ ID NO: 384344 - DNA, 25 bp, Homo sapien
tattggctaactcaggatagagcag

SEQ ID NO: 384345 - DNA, 25 bp, Homo sapien
tagccaactggactaaagcaagtgc

SEQ ID NO: 384346 - DNA, 25 bp, Homo sapien
tacttggctgagagcatcggcagac

SEQ ID NO: 384347 - DNA, 25 bp, Homo sapien
tataagcactgggtaaggaagggaa

SEQ ID NO: 384348 - DNA, 25 bp, Homo sapien
tcgaaaatgtttgcgttacgaggaa

SEQ ID NO: 384349 - DNA, 25 bp, Homo sapien
taatcgaaaatgtttgcgttacgag

SEQ ID NO: 384350 - DNA, 25 bp, Homo sapien
gcaggtaatcgaaaatgtttgcgtt

SEQ ID NO: 384351 - DNA, 25 bp, Homo sapien
tgtttgcgttacgaggaagtttaca

SEQ ID NO: 384352 - DNA, 25 bp, Homo sapien
gacactaaaatgtcttggtagccac

SEQ ID NO: 384353 - DNA, 25 bp, Homo sapien
gaaagcagacactaaaatgtcttgg

SEQ ID NO: 384354 - DNA, 25 bp, Homo sapien
aatgtcttggtagccacactgattt

SEQ ID NO: 384355 - DNA, 25 bp, Homo sapien
catatcatgagccaagcatgggggg

SEQ ID NO: 384356 - DNA, 25 bp, Homo sapien
ggtcaggattatgcatggtcccaac

SEQ ID NO: 384357 - DNA, 25 bp, Homo sapien
gccacctcatgtagctgaaacctcg

SEQ ID NO: 384358 - DNA, 25 bp, Homo sapien
tgggtcacaaagtggcttagggtca

SEQ ID NO: 384359 - DNA, 25 bp, Homo sapien
gaagacaattcctacaatgccacct

SEQ ID NO: 384360 - DNA, 25 bp, Homo sapien
tctgcatccagcgactgtctgagca

SEQ ID NO: 384361 - DNA, 25 bp, Homo sapien
ttgtggtctgaaggactgaatgtcc

SEQ ID NO: 384362 - DNA, 25 bp, Homo sapien
tcatctgcatccagcgactgtctga

SEQ ID NO: 384363 - DNA, 25 bp, Homo sapien
tgaatgtccacagccgttccctcat

SEQ ID NO: 384364 - DNA, 25 bp, Homo sapien
tccgcgaggggacgagacaccgcgg

SEQ ID NO: 384365 - DNA, 25 bp, Homo sapien
ccgcgaggggacgagacaccgcggg

SEQ ID NO: 384366 - DNA, 25 bp, Homo sapien
gcgaggggacgagacaccgcgggcc

SEQ ID NO: 384367 - DNA, 25 bp, Homo sapien
ctccgcgaggggacgagacaccgcg

SEQ ID NO: 384368 - DNA, 25 bp, Homo sapien
ctatggtgcacgaggatgaatgagg

SEQ ID NO: 384369 - DNA, 25 bp, Homo sapien
atggtgcacgaggatgaatgaggag

SEQ ID NO: 384370 - DNA, 25 bp, Homo sapien
tatggtgcacgaggatgaatgagga

SEQ ID NO: 384371 - DNA, 25 bp, Homo sapien
agctcccggcgtgactggcttctcg

SEQ ID NO: 384372 - DNA, 25 bp, Homo sapien
cttctcggcagaccactcggttgga

SEQ ID NO: 384373 - DNA, 25 bp, Homo sapien
tcagtggaccgtgagtgctccagct

SEQ ID NO: 384374 - DNA, 25 bp, Homo sapien
gcacatcgagagaggggcacatgat

SEQ ID NO: 384375 - DNA, 25 bp, Homo sapien
taaggaaggactacacctactagaa

SEQ ID NO: 384376 - DNA, 25 bp, Homo sapien
tctgaaagcggaatatatgtgcaca

SEQ ID NO: 384377 - DNA, 25 bp, Homo sapien
ccagtatcgtggtaaaggctaggct

SEQ ID NO: 384378 - DNA, 25 bp, Homo sapien
tatgtgcacaagtctgcaaagagtg

SEQ ID NO: 384379 - DNA, 25 bp, Homo sapien
tcagctttagcttttggtcgagatg

SEQ ID NO: 384380 - DNA, 25 bp, Homo sapien
gctttagcttttggtcgagatgagg

SEQ ID NO: 384381 - DNA, 25 bp, Homo sapien
tctgcagggtcacataagtttggca

SEQ ID NO: 384382 - DNA, 25 bp, Homo sapien
gcttttggtcgagatgaggtttctc

SEQ ID NO: 384383 - DNA, 25 bp, Homo sapien
cgggcggccttatggatcttgacca

SEQ ID NO: 384384 - DNA, 25 bp, Homo sapien
ttcaggcccaggatgtaatccagct

SEQ ID NO: 384385 - DNA, 25 bp, Homo sapien
cttcaggcccaggatgtaatccagc

SEQ ID NO: 384386 - DNA, 25 bp, Homo sapien
tcaggcccaggatgtaatccagctt

SEQ ID NO: 384387 - DNA, 25 bp, Homo sapien
caggcccaggatgtaatccagcttc

SEQ ID NO: 384388 - DNA, 25 bp, Homo sapien
cggacacggatatgacactgttgaa

SEQ ID NO: 384389 - DNA, 25 bp, Homo sapien
agagggagaagtcaatgtgcttctg

SEQ ID NO: 384390 - DNA, 25 bp, Homo sapien
aggatatttaccacctgctcacgga

SEQ ID NO: 384391 - DNA, 25 bp, Homo sapien
ggttggccaccccaatagggaagca

SEQ ID NO: 384392 - DNA, 25 bp, Homo sapien
ctggcccttgctggcattcttcctc

SEQ ID NO: 384393 - DNA, 25 bp, Homo sapien
ctcctcctcgtcatctctggctcca

SEQ ID NO: 384394 - DNA, 25 bp, Homo sapien
ctcgtcatctctggctccagcccca

SEQ ID NO: 384395 - DNA, 25 bp, Homo sapien
ggcccttgctggcattcttcctctt

SEQ ID NO: 384396 - DNA, 25 bp, Homo sapien
cgaggaggggccgtctgtgccctct

SEQ ID NO: 384397 - DNA, 25 bp, Homo sapien
gaggaggggccgtctgtgccctctg

SEQ ID NO: 384398 - DNA, 25 bp, Homo sapien
tccgaggaggggccgtctgtgccct

SEQ ID NO: 384399 - DNA, 25 bp, Homo sapien
gaggggccgtctgtgccctctgttc

SEQ ID NO: 384400 - DNA, 25 bp, Homo sapien
cgccgcgcagactaagttctgggat

SEQ ID NO: 384401 - DNA, 25 bp, Homo sapien
gctagtgtcaatgccgccgcgcaga

SEQ ID NO: 384402 - DNA, 25 bp, Homo sapien
gcagactaagttctgggatccagtg

SEQ ID NO: 384403 - DNA, 25 bp, Homo sapien
cagctagtgtcaatgccgccgcgca

SEQ ID NO: 384404 - DNA, 25 bp, Homo sapien
tgcgtggagggcggaccgggcttcg

SEQ ID NO: 384405 - DNA, 25 bp, Homo sapien
ctgcgtggagggcggaccgggcttc

SEQ ID NO: 384406 - DNA, 25 bp, Homo sapien
aagtcgtcgatgtccagttggtgga

SEQ ID NO: 384407 - DNA, 25 bp, Homo sapien
tcttgaaggcgacggccgcgttgtt

SEQ ID NO: 384408 - DNA, 25 bp, Homo sapien
gttgttgaccagtacgttgagcccc

SEQ ID NO: 384409 - DNA, 25 bp, Homo sapien
aactgtcggcacagttcgcgcgcga

SEQ ID NO: 384410 - DNA, 25 bp, Homo sapien
atgtcaaagggcattggatcatcac

SEQ ID NO: 384411 - DNA, 25 bp, Homo sapien
cgttgcacatgtttctagtggcaaa

SEQ ID NO: 384412 - DNA, 25 bp, Homo sapien
tatcggcagtaactcgttgcacatg

SEQ ID NO: 384413 - DNA, 25 bp, Homo sapien
catgaggtttcattatcggcagtaa

SEQ ID NO: 384414 - DNA, 25 bp, Homo sapien
ttgctcaggattaagtccattctta

SEQ ID NO: 384415 - DNA, 25 bp, Homo sapien
gttgctcaggattaagtccattctt

SEQ ID NO: 384416 - DNA, 25 bp, Homo sapien
tgttgctcaggattaagtccattct

SEQ ID NO: 384417 - DNA, 25 bp, Homo sapien
actgcatccggcctgatttcattac

SEQ ID NO: 384418 - DNA, 25 bp, Homo sapien
tgcatccggcctgatttcattactt

SEQ ID NO: 384419 - DNA, 25 bp, Homo sapien
gccccacaaataactgggcccacag

SEQ ID NO: 384420 - DNA, 25 bp, Homo sapien
catccggcctgatttcattactttt

SEQ ID NO: 384421 - DNA, 25 bp, Homo sapien
gtgtctcactgtggaacctttcctg

SEQ ID NO: 384422 - DNA, 25 bp, Homo sapien
gccaggatcctcgataagaccgtga

SEQ ID NO: 384423 - DNA, 25 bp, Homo sapien
catggaccaactggccttgtggctc

SEQ ID NO: 384424 - DNA, 25 bp, Homo sapien
cataaggtgagttgggccagccttc

SEQ ID NO: 384425 - DNA, 25 bp, Homo sapien
tttattaagcagcaagctccgaagc

SEQ ID NO: 384426 - DNA, 25 bp, Homo sapien
ttattaagcagcaagctccgaagca

SEQ ID NO: 384427 - DNA, 25 bp, Homo sapien
cagttaagggtcatccaaatgagct

SEQ ID NO: 384428 - DNA, 25 bp, Homo sapien
tctgaccagcagttgacagttaagg

SEQ ID NO: 384429 - DNA, 25 bp, Homo sapien
taatggcagcccttctctaagaatg

SEQ ID NO: 384430 - DNA, 25 bp, Homo sapien
tgctgggcagaccatccaataaggg

SEQ ID NO: 384431 - DNA, 25 bp, Homo sapien
agatgcacagtaacaactctgatcc

SEQ ID NO: 384432 - DNA, 25 bp, Homo sapien
aaaacctatagctggagcagtcaac

SEQ ID NO: 384433 - DNA, 25 bp, Homo sapien
ctatagctggagcagtcaacagagg

SEQ ID NO: 384434 - DNA, 25 bp, Homo sapien
aacaactctgatccaatccagctgg

SEQ ID NO: 384435 - DNA, 25 bp, Homo sapien
cacacctggcttaaatgctcctctt

SEQ ID NO: 384436 - DNA, 25 bp, Homo sapien
gctggagtgtactgatacaaacacg

SEQ ID NO: 384437 - DNA, 25 bp, Homo sapien
tcctcttgatggttggcctctttct

SEQ ID NO: 384438 - DNA, 25 bp, Homo sapien
gtgtactgatacaaacacggctcac

SEQ ID NO: 384439 - DNA, 25 bp, Homo sapien
cattgggccaatccagaaaggtggg

SEQ ID NO: 384440 - DNA, 25 bp, Homo sapien
tttcctacagcatagggtgaacccc

SEQ ID NO: 384441 - DNA, 25 bp, Homo sapien
cccaacatcggaggcaggtctcagt

SEQ ID NO: 384442 - DNA, 25 bp, Homo sapien
gaggatgggcaaccatgacacagcc

SEQ ID NO: 384443 - DNA, 25 bp, Homo sapien
tgaactaaggcaaaggactatagtc

SEQ ID NO: 384444 - DNA, 25 bp, Homo sapien
ggtctaatttgccataggttctcaa

SEQ ID NO: 384445 - DNA, 25 bp, Homo sapien
caagtaggtagaactaaaggtgagc

SEQ ID NO: 384446 - DNA, 25 bp, Homo sapien
tgggaaagcattaagcaggacatat

SEQ ID NO: 384447 - DNA, 25 bp, Homo sapien
tgaaggcgaggcagtggtcaatgag

SEQ ID NO: 384448 - DNA, 25 bp, Homo sapien
gttcgtgaaggcgaggcagtggtca

SEQ ID NO: 384449 - DNA, 25 bp, Homo sapien
tcgtgaaggcgaggcagtggtcaat

SEQ ID NO: 384450 - DNA, 25 bp, Homo sapien
ctggagttcgtgaaggcgaggcagt

SEQ ID NO: 384451 - DNA, 25 bp, Homo sapien
actcccgagcgtcctttagaaatgt

SEQ ID NO: 384452 - DNA, 25 bp, Homo sapien
aactcccgagcgtcctttagaaatg

SEQ ID NO: 384453 - DNA, 25 bp, Homo sapien
tggcctcgctccttttaactcccga

SEQ ID NO: 384454 - DNA, 25 bp, Homo sapien
ctcccgagcgtcctttagaaatgtt

SEQ ID NO: 384455 - DNA, 25 bp, Homo sapien
ggctccagccaacccgaagtgggcc

SEQ ID NO: 384456 - DNA, 25 bp, Homo sapien
ccaacccgaagtgggccacttgtgg

SEQ ID NO: 384457 - DNA, 25 bp, Homo sapien
gccacttgtggatgaaggctgtcat

SEQ ID NO: 384458 - DNA, 25 bp, Homo sapien
ccgaagtgggccacttgtggatgaa

SEQ ID NO: 384459 - DNA, 25 bp, Homo sapien
ttgggacccctgctaagttgcccca

SEQ ID NO: 384460 - DNA, 25 bp, Homo sapien
gccctcggaggtgctttggagtcac

SEQ ID NO: 384461 - DNA, 25 bp, Homo sapien
aagggtgcgcggcacctggttcacc

SEQ ID NO: 384462 - DNA, 25 bp, Homo sapien
acattggtcagtgcccgcccaaggt

SEQ ID NO: 384463 - DNA, 25 bp, Homo sapien
tcttccttagcttctccgccatggg

SEQ ID NO: 384464 - DNA, 25 bp, Homo sapien
gggctgctccgggaaaggcctcgta

SEQ ID NO: 384465 - DNA, 25 bp, Homo sapien
gtgtcgcttcgtagccgggctgctc

SEQ ID NO: 384466 - DNA, 25 bp, Homo sapien
gaaaggcctcgtacaggtgagcggg

SEQ ID NO: 384467 - DNA, 25 bp, Homo sapien
cgggagccagaaccgccgaggaaga

SEQ ID NO: 384468 - DNA, 25 bp, Homo sapien
agccggagaaccagcggcagcggct

SEQ ID NO: 384469 - DNA, 25 bp, Homo sapien
gagccggagaaccagcggcagcggc

SEQ ID NO: 384470 - DNA, 25 bp, Homo sapien
agccagaaccgccgaggaagagccg

SEQ ID NO: 384471 - DNA, 25 bp, Homo sapien
gcgcgctcacgtgcggcgcggagga

SEQ ID NO: 384472 - DNA, 25 bp, Homo sapien
ctgttggcgggcgcgctcacgtgcg

SEQ ID NO: 384473 - DNA, 25 bp, Homo sapien
tggcgggcgcgctcacgtgcggcgc

SEQ ID NO: 384474 - DNA, 25 bp, Homo sapien
gtggccctgttggcgggcgcgctca

SEQ ID NO: 384475 - DNA, 25 bp, Homo sapien
ctagcaaagtcttcccaattgtggg

SEQ ID NO: 384476 - DNA, 25 bp, Homo sapien
taaggcaacactgcgggtaacagtc

SEQ ID NO: 384477 - DNA, 25 bp, Homo sapien
tgcgggtaacagtccccgcgagcag

SEQ ID NO: 384478 - DNA, 25 bp, Homo sapien
gctgcagtcgcgagtgtaaggcaac

SEQ ID NO: 384479 - DNA, 25 bp, Homo sapien
taatggcagcagacttgtggggccg

SEQ ID NO: 384480 - DNA, 25 bp, Homo sapien
atggcagcagacttgtggggccggg

SEQ ID NO: 384481 - DNA, 25 bp, Homo sapien
ggcagcagacttgtggggccggggg

SEQ ID NO: 384482 - DNA, 25 bp, Homo sapien
ctaatggcagcagacttgtggggcc

SEQ ID NO: 384483 - DNA, 25 bp, Homo sapien
gagcttgtttcccatctacctctct

SEQ ID NO: 384484 - DNA, 25 bp, Homo sapien
ctctcagtagcactctgcggcagac

SEQ ID NO: 384485 - DNA, 25 bp, Homo sapien
gcttgtttcccatctacctctctga

SEQ ID NO: 384486 - DNA, 25 bp, Homo sapien
tgcggcagaccacttctttaagcag

SEQ ID NO: 384487 - DNA, 25 bp, Homo sapien
aatggcagaggtcctttctgtttcc

SEQ ID NO: 384488 - DNA, 25 bp, Homo sapien
caccaatggcagaggtcctttctgt

SEQ ID NO: 384489 - DNA, 25 bp, Homo sapien
tcaagtcaccaatggcagaggtcct

SEQ ID NO: 384490 - DNA, 25 bp, Homo sapien
agtcaccaatggcagaggtcctttc

SEQ ID NO: 384491 - DNA, 25 bp, Homo sapien
ttcaaatatttagcaaggcttctgg

SEQ ID NO: 384492 - DNA, 25 bp, Homo sapien
aaatatttagcaaggcttctgggcc

SEQ ID NO: 384493 - DNA, 25 bp, Homo sapien
tatttagcaaggcttctgggccagg

SEQ ID NO: 384494 - DNA, 25 bp, Homo sapien
tgggcaatcctgttcaaatatttag

SEQ ID NO: 384495 - DNA, 25 bp, Homo sapien
caagtgaagatatgagatccgccca

SEQ ID NO: 384496 - DNA, 25 bp, Homo sapien
cttgttgagtttgccaagtgaagat

SEQ ID NO: 384497 - DNA, 25 bp, Homo sapien
tcactcgaggactcaaaatttctca

SEQ ID NO: 384498 - DNA, 25 bp, Homo sapien
tatctgtaatcatttaagagctcct

SEQ ID NO: 384499 - DNA, 25 bp, Homo sapien
tacatgttgtagtggtcatctgagc

SEQ ID NO: 384500 - DNA, 25 bp, Homo sapien
ctacatgttgtagtggtcatctgag

SEQ ID NO: 384501 - DNA, 25 bp, Homo sapien
acatgttgtagtggtcatctgagca

SEQ ID NO: 384502 - DNA, 25 bp, Homo sapien
ggaacactcacgcattgcttttggt

SEQ ID NO: 384503 - DNA, 25 bp, Homo sapien
tgcttttggtggatatgtaaaatgg

SEQ ID NO: 384504 - DNA, 25 bp, Homo sapien
agcaatgcccctcctaagtatgcac

SEQ ID NO: 384505 - DNA, 25 bp, Homo sapien
tagcgtttccgtatgtcccagcaat

SEQ ID NO: 384506 - DNA, 25 bp, Homo sapien
aggacaagcaagcactaccacggct

SEQ ID NO: 384507 - DNA, 25 bp, Homo sapien
ctacgtgctgcagcgtagtggcatg

SEQ ID NO: 384508 - DNA, 25 bp, Homo sapien
ctcagcactacgtgctgcagcgtag

SEQ ID NO: 384509 - DNA, 25 bp, Homo sapien
gctgggaggacaagcaagcactacc

SEQ ID NO: 384510 - DNA, 25 bp, Homo sapien
acctccaccctcacggtcatagcca

SEQ ID NO: 384511 - DNA, 25 bp, Homo sapien
cacctccaccctcacggtcatagcc

SEQ ID NO: 384512 - DNA, 25 bp, Homo sapien
ccacctccaccctcacggtcatagc

SEQ ID NO: 384513 - DNA, 25 bp, Homo sapien
caccaaggcgtgacatggagtttct

SEQ ID NO: 384514 - DNA, 25 bp, Homo sapien
gaggccgagcatgctaatgctagct

SEQ ID NO: 384515 - DNA, 25 bp, Homo sapien
tcccgaagtggtgtgggatatcaca

SEQ ID NO: 384516 - DNA, 25 bp, Homo sapien
taccttgatatacagctacactggg

SEQ ID NO: 384517 - DNA, 25 bp, Homo sapien
tgccacagcatgccaaggctgggaa

SEQ ID NO: 384518 - DNA, 25 bp, Homo sapien
gaaaccagggctaaaggagctcatt

SEQ ID NO: 384519 - DNA, 25 bp, Homo sapien
tgacatccccaaaagatccaagcat

SEQ ID NO: 384520 - DNA, 25 bp, Homo sapien
accagggctaaaggagctcatttct

SEQ ID NO: 384521 - DNA, 25 bp, Homo sapien
tggctctcgggttgaggatggtcca

SEQ ID NO: 384522 - DNA, 25 bp, Homo sapien
ccacgtcagcctgcagaagaaacag

SEQ ID NO: 384523 - DNA, 25 bp, Homo sapien
tccagggttgtgagctcagctagga

SEQ ID NO: 384524 - DNA, 25 bp, Homo sapien
tgtgagctcagctaggacatgtgtg

SEQ ID NO: 384525 - DNA, 25 bp, Homo sapien
aacagtgtatacaggggctgggcac

SEQ ID NO: 384526 - DNA, 25 bp, Homo sapien
agaaccatctctcggcagctgggtg

SEQ ID NO: 384527 - DNA, 25 bp, Homo sapien
tgaaagaaccatctctcggcagctg

SEQ ID NO: 384528 - DNA, 25 bp, Homo sapien
ggaaggggccgcaacagtgtataca

SEQ ID NO: 384529 - DNA, 25 bp, Homo sapien
agcacttgctgcgtatgccgggcag

SEQ ID NO: 384530 - DNA, 25 bp, Homo sapien
cacgatagcctgttctgaatccagt

SEQ ID NO: 384531 - DNA, 25 bp, Homo sapien
gaacgcagagcctcaggccggcagc

SEQ ID NO: 384532 - DNA, 25 bp, Homo sapien
caggccggcagcgaagcacacagct

SEQ ID NO: 384533 - DNA, 25 bp, Homo sapien
ggaagaacgccttcgggacacagtc

SEQ ID NO: 384534 - DNA, 25 bp, Homo sapien
tgaccctcagcgctacagcagattg

SEQ ID NO: 384535 - DNA, 25 bp, Homo sapien
gagtggctgttcagagctccaggct

SEQ ID NO: 384536 - DNA, 25 bp, Homo sapien
ttcttctagagaactcccagaggcc

SEQ ID NO: 384537 - DNA, 25 bp, Homo sapien
tactgaagaacgagctggagctcag

SEQ ID NO: 384538 - DNA, 25 bp, Homo sapien
attcagccccttttactgaagaacg

SEQ ID NO: 384539 - DNA, 25 bp, Homo sapien
aatcctccaaagtcagcaccattca

SEQ ID NO: 384540 - DNA, 25 bp, Homo sapien
gcagagtatttcaggtccgccagcg

SEQ ID NO: 384541 - DNA, 25 bp, Homo sapien
ggtgacacaggctcaaacgctcagt

SEQ ID NO: 384542 - DNA, 25 bp, Homo sapien
aacgaggagttgcatttttcacggt

SEQ ID NO: 384543 - DNA, 25 bp, Homo sapien
gtaagtcagccaatttaaaagcacg

SEQ ID NO: 384544 - DNA, 25 bp, Homo sapien
acgtctcccaccaagcaaacgagga

SEQ ID NO: 384545 - DNA, 25 bp, Homo sapien
cagtttcactatccagaaacccaaa

SEQ ID NO: 384546 - DNA, 25 bp, Homo sapien
ttccaggacagtttcactatccaga

SEQ ID NO: 384547 - DNA, 25 bp, Homo sapien
ggctggccagtaagcttaatatacg

SEQ ID NO: 384548 - DNA, 25 bp, Homo sapien
gccagtaagcttaatatacgtatca

SEQ ID NO: 384549 - DNA, 25 bp, Homo sapien
ccaagactggaattagcacaaaaca

SEQ ID NO: 384550 - DNA, 25 bp, Homo sapien
tcatggtcggtcttggtgacttttc

SEQ ID NO: 384551 - DNA, 25 bp, Homo sapien
gccaagactggaattagcacaaaac

SEQ ID NO: 384552 - DNA, 25 bp, Homo sapien
aagactggaattagcacaaaacagg

SEQ ID NO: 384553 - DNA, 25 bp, Homo sapien
aactcttcctcacgtgtgatttagc

SEQ ID NO: 384554 - DNA, 25 bp, Homo sapien
agtgcgagggcagggactatctcac

SEQ ID NO: 384555 - DNA, 25 bp, Homo sapien
ggcagaacaggccttccctctacag

SEQ ID NO: 384556 - DNA, 25 bp, Homo sapien
ttaaaaggtctcccaagcacggctc

SEQ ID NO: 384557 - DNA, 25 bp, Homo sapien
gctgtccttcgtggcacagagtaac

SEQ ID NO: 384558 - DNA, 25 bp, Homo sapien
tcgatgctgtccttcgtggcacaga

SEQ ID NO: 384559 - DNA, 25 bp, Homo sapien
ccgagaagcaaggtcgagagtgtga

SEQ ID NO: 384560 - DNA, 25 bp, Homo sapien
agagtgtgaacagatcgatgctgtc

SEQ ID NO: 384561 - DNA, 25 bp, Homo sapien
ccagagcttttaagtggacaccact

SEQ ID NO: 384562 - DNA, 25 bp, Homo sapien
gagccgtcttggcaacaaggagtac

SEQ ID NO: 384563 - DNA, 25 bp, Homo sapien
gccagccatttggtccccacgattt

SEQ ID NO: 384564 - DNA, 25 bp, Homo sapien
gataatctcgtaggtttccagagct

SEQ ID NO: 384565 - DNA, 25 bp, Homo sapien
tgcagtgggaggaagtacttctcgt

SEQ ID NO: 384566 - DNA, 25 bp, Homo sapien
acttctcgtacagggtgagcagcac

SEQ ID NO: 384567 - DNA, 25 bp, Homo sapien
ctgtcggagatctcggagccctctt

SEQ ID NO: 384568 - DNA, 25 bp, Homo sapien
gagccctcttcaaggccgggcagca

SEQ ID NO: 384569 - DNA, 25 bp, Homo sapien
cacaactgagagcaggtgagtggca

SEQ ID NO: 384570 - DNA, 25 bp, Homo sapien
tgccaaaaggacaaccatggaaagc

SEQ ID NO: 384571 - DNA, 25 bp, Homo sapien
cacaagacagcaccgctttggtaca

SEQ ID NO: 384572 - DNA, 25 bp, Homo sapien
ggaaagccaagctgtcacaagacag

SEQ ID NO: 384573 - DNA, 25 bp, Homo sapien
aagcagcgtcaccagtggatcaggg

SEQ ID NO: 384574 - DNA, 25 bp, Homo sapien
aagagaagcagcgtcaccagtggat

SEQ ID NO: 384575 - DNA, 25 bp, Homo sapien
gagaagcagcgtcaccagtggatca

SEQ ID NO: 384576 - DNA, 25 bp, Homo sapien
tttaagagaagcagcgtcaccagtg

SEQ ID NO: 384577 - DNA, 25 bp, Homo sapien
acctctttgccaaccaccagcgaca

SEQ ID NO: 384578 - DNA, 25 bp, Homo sapien
aaccaccagcgacagtctcaggagc

SEQ ID NO: 384579 - DNA, 25 bp, Homo sapien
tttgccaaccaccagcgacagtctc

SEQ ID NO: 384580 - DNA, 25 bp, Homo sapien
ccagagggcggtgtaaaacacctct

SEQ ID NO: 384581 - DNA, 25 bp, Homo sapien
gctgtgcccacatgtcgcctcctcc

SEQ ID NO: 384582 - DNA, 25 bp, Homo sapien
ccacatgtcgcctcctccccatgcc

SEQ ID NO: 384583 - DNA, 25 bp, Homo sapien
tccccatgccctgtgaggaacacag

SEQ ID NO: 384584 - DNA, 25 bp, Homo sapien
cccatgaggatgctgtgcccacatg

SEQ ID NO: 384585 - DNA, 25 bp, Homo sapien
ctccctttcctggatgtccctttgc

SEQ ID NO: 384586 - DNA, 25 bp, Homo sapien
ccctttcctggatgtccctttgcag

SEQ ID NO: 384587 - DNA, 25 bp, Homo sapien
atgtccctttgcagcttcagtgaca

SEQ ID NO: 384588 - DNA, 25 bp, Homo sapien
ggatgtccctttgcagcttcagtga

SEQ ID NO: 384589 - DNA, 25 bp, Homo sapien
ccaggtggcgaaagacagcaagaca

SEQ ID NO: 384590 - DNA, 25 bp, Homo sapien
tcaaagtgtgggaacaccaccaggt

SEQ ID NO: 384591 - DNA, 25 bp, Homo sapien
ggaagagagcttcccttgaagggcc

SEQ ID NO: 384592 - DNA, 25 bp, Homo sapien
gaggttaccatttctaagggcacga

SEQ ID NO: 384593 - DNA, 25 bp, Homo sapien
aaacagaacgatttccagattattt

SEQ ID NO: 384594 - DNA, 25 bp, Homo sapien
tccaacagggaggcacgcaaagact

SEQ ID NO: 384595 - DNA, 25 bp, Homo sapien
ttatttctttgcacaagaacatttg

SEQ ID NO: 384596 - DNA, 25 bp, Homo sapien
aacagggaggcacgcaaagacttca

SEQ ID NO: 384597 - DNA, 25 bp, Homo sapien
aatgcgcacgatgtcagatctgagg

SEQ ID NO: 384598 - DNA, 25 bp, Homo sapien
tcagtagggtctgggtggcggctga

SEQ ID NO: 384599 - DNA, 25 bp, Homo sapien
tagtaaccatgcatacagtcttctg

SEQ ID NO: 384600 - DNA, 25 bp, Homo sapien
gggggatggctctctcattggaatc

SEQ ID NO: 384601 - DNA, 25 bp, Homo sapien
taaaagatccttggagtatttttca

SEQ ID NO: 384602 - DNA, 25 bp, Homo sapien
aaaaaataagacgactggtcttcat

SEQ ID NO: 384603 - DNA, 25 bp, Homo sapien
cgactggtcttcataagaatttgag

SEQ ID NO: 384604 - DNA, 25 bp, Homo sapien
tcagattctggcacaacggtatttc

SEQ ID NO: 384605 - DNA, 25 bp, Homo sapien
caggtatgcatgatggcgttcctcc

SEQ ID NO: 384606 - DNA, 25 bp, Homo sapien
gactgatgaggacgcgaaaaggctt

SEQ ID NO: 384607 - DNA, 25 bp, Homo sapien
gcgttcctccacgtcagcatctatg

SEQ ID NO: 384608 - DNA, 25 bp, Homo sapien
tatttctggcttgtcaagcagactg

SEQ ID NO: 384609 - DNA, 25 bp, Homo sapien
tgggtgtagctaagtttaagatcag

SEQ ID NO: 384610 - DNA, 25 bp, Homo sapien
gatgacttcgagaaacaaattccca

SEQ ID NO: 384611 - DNA, 25 bp, Homo sapien
cttatcagcgaatttccactctggg

SEQ ID NO: 384612 - DNA, 25 bp, Homo sapien
aataaaaggccctgatgacttcgag

SEQ ID NO: 384613 - DNA, 25 bp, Homo sapien
tcaaaacaccttgtcatataatccc

SEQ ID NO: 384614 - DNA, 25 bp, Homo sapien
taaagcattcctcaaaacaccttgt

SEQ ID NO: 384615 - DNA, 25 bp, Homo sapien
ttatcagcaaatttaccgttttgac

SEQ ID NO: 384616 - DNA, 25 bp, Homo sapien
tatcagcaaatttaccgttttgaca

SEQ ID NO: 384617 - DNA, 25 bp, Homo sapien
ttcctcacgctgtaacgctgcttca

SEQ ID NO: 384618 - DNA, 25 bp, Homo sapien
ctgacgctgttcctcacgctgtaac

SEQ ID NO: 384619 - DNA, 25 bp, Homo sapien
cacgctgtaacgctgcttcactggt

SEQ ID NO: 384620 - DNA, 25 bp, Homo sapien
cgctgttcctcacgctgtaacgctg

SEQ ID NO: 384621 - DNA, 25 bp, Homo sapien
cgcagagctccgagaccgtgggggg

SEQ ID NO: 384622 - DNA, 25 bp, Homo sapien
gcagagctccgagaccgtgggggga

SEQ ID NO: 384623 - DNA, 25 bp, Homo sapien
agagctccgagaccgtggggggagg

SEQ ID NO: 384624 - DNA, 25 bp, Homo sapien
ggcgcagagctccgagaccgtgggg

SEQ ID NO: 384625 - DNA, 25 bp, Homo sapien
gggtttgcacctcagagtaaagttc

SEQ ID NO: 384626 - DNA, 25 bp, Homo sapien
tgggtttgcacctcagagtaaagtt

SEQ ID NO: 384627 - DNA, 25 bp, Homo sapien
tgaaacacgtcttcaaggcatgcgt

SEQ ID NO: 384628 - DNA, 25 bp, Homo sapien
tgtcctcagcaagaggctgcaccag

SEQ ID NO: 384629 - DNA, 25 bp, Homo sapien
gcatgcgtgagttcaggtaaactta

SEQ ID NO: 384630 - DNA, 25 bp, Homo sapien
ttccgctggtggactccgtgtcgag

SEQ ID NO: 384631 - DNA, 25 bp, Homo sapien
tcttggatgcaaagaaacgtcctct

SEQ ID NO: 384632 - DNA, 25 bp, Homo sapien
tggagaccctcgtgctgtgaacaag

SEQ ID NO: 384633 - DNA, 25 bp, Homo sapien
gaagcatcttcgtcaccgggaatca

SEQ ID NO: 384634 - DNA, 25 bp, Homo sapien
tcttcctcggacaggtagacaggga

SEQ ID NO: 384635 - DNA, 25 bp, Homo sapien
ggttgtgtccagagctcttatagcg

SEQ ID NO: 384636 - DNA, 25 bp, Homo sapien
tctggaggtagcagtcagtcacaca

SEQ ID NO: 384637 - DNA, 25 bp, Homo sapien
tcttcaatgacaagcgccagggact

SEQ ID NO: 384638 - DNA, 25 bp, Homo sapien
acagcagcaaatagtcatgagggac

SEQ ID NO: 384639 - DNA, 25 bp, Homo sapien
gattccaaagcacacgagccaccct

SEQ ID NO: 384640 - DNA, 25 bp, Homo sapien
tgattccaaagcacacgagccaccc

SEQ ID NO: 384641 - DNA, 25 bp, Homo sapien
attctacgcaggtgacgtgatgctc

SEQ ID NO: 384642 - DNA, 25 bp, Homo sapien
ccaggcagtgcagccggtagaacaa

SEQ ID NO: 384643 - DNA, 25 bp, Homo sapien
gggcatggcagatgatgtcctcgca

SEQ ID NO: 384644 - DNA, 25 bp, Homo sapien
gatgtcctcgcagatgttggccgta

SEQ ID NO: 384645 - DNA, 25 bp, Homo sapien
gatggaggtggcggccagaaaggct

SEQ ID NO: 384646 - DNA, 25 bp, Homo sapien
caggggccggggtgctgcaggatgg

SEQ ID NO: 384647 - DNA, 25 bp, Homo sapien
ggaggtggcggccagaaaggctcac

SEQ ID NO: 384648 - DNA, 25 bp, Homo sapien
aggggccggggtgctgcaggatgga

SEQ ID NO: 384649 - DNA, 25 bp, Homo sapien
cagatgccagatcacggaaaatcta

SEQ ID NO: 384650 - DNA, 25 bp, Homo sapien
aaaatctaaacagagcttccagcct

SEQ ID NO: 384651 - DNA, 25 bp, Homo sapien
gaaaatctaaacagagcttccagcc

SEQ ID NO: 384652 - DNA, 25 bp, Homo sapien
agatgccagatcacggaaaatctaa

SEQ ID NO: 384653 - DNA, 25 bp, Homo sapien
tatcaaaggagcgattgtgagatgt

SEQ ID NO: 384654 - DNA, 25 bp, Homo sapien
tcaaaggagcgattgtgagatgtta

SEQ ID NO: 384655 - DNA, 25 bp, Homo sapien
ctatcaaaggagcgattgtgagatg

SEQ ID NO: 384656 - DNA, 25 bp, Homo sapien
caaaggagcgattgtgagatgttac

SEQ ID NO: 384657 - DNA, 25 bp, Homo sapien
acgtccccgagggagagcgcacgca

SEQ ID NO: 384658 - DNA, 25 bp, Homo sapien
gttcgaggatgcgagccacgtcccc

SEQ ID NO: 384659 - DNA, 25 bp, Homo sapien
tgcttgaggcagtggatggaggttc

SEQ ID NO: 384660 - DNA, 25 bp, Homo sapien
ggctgtccagcacgacaaacaagga

SEQ ID NO: 384661 - DNA, 25 bp, Homo sapien
aatgtggaacaataaaatgtttcct

SEQ ID NO: 384662 - DNA, 25 bp, Homo sapien
aatgtttcctatttgatagggcagc

SEQ ID NO: 384663 - DNA, 25 bp, Homo sapien
atgtggaacaataaaatgtttccta

SEQ ID NO: 384664 - DNA, 25 bp, Homo sapien
atttgatagggcagccagcttttcc

SEQ ID NO: 384665 - DNA, 25 bp, Homo sapien
tcgctggagaacgactcagaagcct

SEQ ID NO: 384666 - DNA, 25 bp, Homo sapien
gagctttccgtagaaactctggcca

SEQ ID NO: 384667 - DNA, 25 bp, Homo sapien
tctcggtgcgagaccttcaaatagc

SEQ ID NO: 384668 - DNA, 25 bp, Homo sapien
tctggaagctccacgtagtagggca

SEQ ID NO: 384669 - DNA, 25 bp, Homo sapien
gagaccagctgcatcattatcctga

SEQ ID NO: 384670 - DNA, 25 bp, Homo sapien
gaccagctgcatcattatcctgatc

SEQ ID NO: 384671 - DNA, 25 bp, Homo sapien
actgagaccagctgcatcattatcc

SEQ ID NO: 384672 - DNA, 25 bp, Homo sapien
ccagctgcatcattatcctgatcaa

SEQ ID NO: 384673 - DNA, 25 bp, Homo sapien
caagctgtggatgaactccacgttc

SEQ ID NO: 384674 - DNA, 25 bp, Homo sapien
tgcagcaagctgtggatgaactcca

SEQ ID NO: 384675 - DNA, 25 bp, Homo sapien
actcctgaactttgcacctctgcag

SEQ ID NO: 384676 - DNA, 25 bp, Homo sapien
tgtggatgaactccacgttcttccc

SEQ ID NO: 384677 - DNA, 25 bp, Homo sapien
ggcaaggaatgcgtgaccaagctca

SEQ ID NO: 384678 - DNA, 25 bp, Homo sapien
tgcatgccgtaaccgtaggcgggct

SEQ ID NO: 384679 - DNA, 25 bp, Homo sapien
gttccaagacaatcagcacctgcag

SEQ ID NO: 384680 - DNA, 25 bp, Homo sapien
gcgctgatggcctgctggaagttca

SEQ ID NO: 384681 - DNA, 25 bp, Homo sapien
aatggtcgttagaccttctagaagg

SEQ ID NO: 384682 - DNA, 25 bp, Homo sapien
tagaccttctagaagggtgagtgga

SEQ ID NO: 384683 - DNA, 25 bp, Homo sapien
gactaatggtcgttagaccttctag

SEQ ID NO: 384684 - DNA, 25 bp, Homo sapien
gacaaaaatgactaatggtcgttag

SEQ ID NO: 384685 - DNA, 25 bp, Homo sapien
cttcgtggcccctaggagatcgaca

SEQ ID NO: 384686 - DNA, 25 bp, Homo sapien
atttctggcattcctcaagttggca

SEQ ID NO: 384687 - DNA, 25 bp, Homo sapien
catggtgttaacagttcgaggcagc

SEQ ID NO: 384688 - DNA, 25 bp, Homo sapien
cctaggagatcgacaggtctctttt

SEQ ID NO: 384689 - DNA, 25 bp, Homo sapien
cagatggtgagcgaccgagtcctgc

SEQ ID NO: 384690 - DNA, 25 bp, Homo sapien
cagtaacacagatggtgagcgaccg

SEQ ID NO: 384691 - DNA, 25 bp, Homo sapien
cacagtaacacagatggtgagcgac

SEQ ID NO: 384692 - DNA, 25 bp, Homo sapien
taacacagatggtgagcgaccgagt

SEQ ID NO: 384693 - DNA, 25 bp, Homo sapien
aatgcaggatggcaaggctcatccc

SEQ ID NO: 384694 - DNA, 25 bp, Homo sapien
ggctctcaactgatgtcagatgtgg

SEQ ID NO: 384695 - DNA, 25 bp, Homo sapien
ctgatgtcagatgtggcagataatt

SEQ ID NO: 384696 - DNA, 25 bp, Homo sapien
aggctcatccctgcggccacatctg

SEQ ID NO: 384697 - DNA, 25 bp, Homo sapien
tactgtgacgctgggctttctttct

SEQ ID NO: 384698 - DNA, 25 bp, Homo sapien
tcatcttactgtgacgctgggcttt

SEQ ID NO: 384699 - DNA, 25 bp, Homo sapien
acactgccgcaacagccgctgtcaa

SEQ ID NO: 384700 - DNA, 25 bp, Homo sapien
gcaacagccgctgtcaactgaaccc

SEQ ID NO: 384701 - DNA, 25 bp, Homo sapien
ttagctgggatgcacttgccgttgg

SEQ ID NO: 384702 - DNA, 25 bp, Homo sapien
gggtgctgagtgcacacaccaagtc

SEQ ID NO: 384703 - DNA, 25 bp, Homo sapien
cgacaagggttagctgggatgcact

SEQ ID NO: 384704 - DNA, 25 bp, Homo sapien
agtgcacacaccaagtcgacaaggg

SEQ ID NO: 384705 - DNA, 25 bp, Homo sapien
cctggggaggtcgaggctatggtga

SEQ ID NO: 384706 - DNA, 25 bp, Homo sapien
atcatttgagcctggggaggtcgag

SEQ ID NO: 384707 - DNA, 25 bp, Homo sapien
gcctggggaggtcgaggctatggtg

SEQ ID NO: 384708 - DNA, 25 bp, Homo sapien
ggggaggtcgaggctatggtgagct

SEQ ID NO: 384709 - DNA, 25 bp, Homo sapien
gaggataactgactgggtgacgccc

SEQ ID NO: 384710 - DNA, 25 bp, Homo sapien
taactgactgggtgacgcccaacgg

SEQ ID NO: 384711 - DNA, 25 bp, Homo sapien
acgacaccactcagtgcacatagag

SEQ ID NO: 384712 - DNA, 25 bp, Homo sapien
atagagcattgtcgattaacactgg

SEQ ID NO: 384713 - DNA, 25 bp, Homo sapien
tcaagtaatgtgaaggaatacaacc

SEQ ID NO: 384714 - DNA, 25 bp, Homo sapien
tcctttatagcccaggaaagactag

SEQ ID NO: 384715 - DNA, 25 bp, Homo sapien
tacaacctaaacacactcgctctgg

SEQ ID NO: 384716 - DNA, 25 bp, Homo sapien
cttcaggacctcgaagaaccccttg

SEQ ID NO: 384717 - DNA, 25 bp, Homo sapien
caggaatgtccactaggggcgattt

SEQ ID NO: 384718 - DNA, 25 bp, Homo sapien
aaaactgcaacacaggaatgtccac

SEQ ID NO: 384719 - DNA, 25 bp, Homo sapien
taacaggcctcacataaagcttcgc

SEQ ID NO: 384720 - DNA, 25 bp, Homo sapien
gaacaatggctctctagtagtctag

SEQ ID NO: 384721 - DNA, 25 bp, Homo sapien
aacatgggaaggcacactgagaacg

SEQ ID NO: 384722 - DNA, 25 bp, Homo sapien
aaagtgttcaaagtacgctgcacag

SEQ ID NO: 384723 - DNA, 25 bp, Homo sapien
ttcaatactcccaacagtgaagaaa

SEQ ID NO: 384724 - DNA, 25 bp, Homo sapien
tttcaatactcccaacagtgaagaa

SEQ ID NO: 384725 - DNA, 25 bp, Homo sapien
gtggggctagattcaactgtacaga

SEQ ID NO: 384726 - DNA, 25 bp, Homo sapien
aaatacccaggtggggctagattca

SEQ ID NO: 384727 - DNA, 25 bp, Homo sapien
ttccaggttgggagttcttgttaca

SEQ ID NO: 384728 - DNA, 25 bp, Homo sapien
tgcaggtctttttggtccttcttgt

SEQ ID NO: 384729 - DNA, 25 bp, Homo sapien
ttcttgttacaaagtcattcagcat

SEQ ID NO: 384730 - DNA, 25 bp, Homo sapien
ctgcaggtctttttggtccttcttg

SEQ ID NO: 384731 - DNA, 25 bp, Homo sapien
aacagccactgtgggaatgtctgtc

SEQ ID NO: 384732 - DNA, 25 bp, Homo sapien
gggtgaggtctataaacagccactg

SEQ ID NO: 384733 - DNA, 25 bp, Homo sapien
ggttctctgctctccaacgctgttt

SEQ ID NO: 384734 - DNA, 25 bp, Homo sapien
gaaaaactccatcctggtaaatctg

SEQ ID NO: 384735 - DNA, 25 bp, Homo sapien
aggaagagccggcaatgttccccac

SEQ ID NO: 384736 - DNA, 25 bp, Homo sapien
ttcttctagagaggcctgaggttgg

SEQ ID NO: 384737 - DNA, 25 bp, Homo sapien
gcaatgttccccacagcttctagga

SEQ ID NO: 384738 - DNA, 25 bp, Homo sapien
ttgctccaaggaagagccggcaatg

SEQ ID NO: 384739 - DNA, 25 bp, Homo sapien
aacaaagaaagagtctgggtgaatg

SEQ ID NO: 384740 - DNA, 25 bp, Homo sapien
cagttttaattagatataactgaca

SEQ ID NO: 384741 - DNA, 25 bp, Homo sapien
ggtatacatttcaggttataacatg

SEQ ID NO: 384742 - DNA, 25 bp, Homo sapien
aagaaagagtctgggtgaatgaaca

SEQ ID NO: 384743 - DNA, 25 bp, Homo sapien
agagggcttgcacgctgtacaccga

SEQ ID NO: 384744 - DNA, 25 bp, Homo sapien
ggcttgcacgctgtacaccgacggg

SEQ ID NO: 384745 - DNA, 25 bp, Homo sapien
accgacggggcggatgaagacacca

SEQ ID NO: 384746 - DNA, 25 bp, Homo sapien
agagagagggcttgcacgctgtaca

SEQ ID NO: 384747 - DNA, 25 bp, Homo sapien
tgtctttgcaacaattcgtgatggc

SEQ ID NO: 384748 - DNA, 25 bp, Homo sapien
acaattcgtgatggcgctcatttcc

SEQ ID NO: 384749 - DNA, 25 bp, Homo sapien
tttgcaacaattcgtgatggcgctc

SEQ ID NO: 384750 - DNA, 25 bp, Homo sapien
gcaacaattcgtgatggcgctcatt

SEQ ID NO: 384751 - DNA, 25 bp, Homo sapien
gattaacggcacagctttctccttc

SEQ ID NO: 384752 - DNA, 25 bp, Homo sapien
cttcgataaaccatgtccaggaggg

SEQ ID NO: 384753 - DNA, 25 bp, Homo sapien
tagtaaagcagacgggagattaacg

SEQ ID NO: 384754 - DNA, 25 bp, Homo sapien
tggttgcgtaagtatggaaaaacat

SEQ ID NO: 384755 - DNA, 25 bp, Homo sapien
ctccaggctcgctttgtgtaggcat

SEQ ID NO: 384756 - DNA, 25 bp, Homo sapien
aaagcggggtcgagaaacagctcca

SEQ ID NO: 384757 - DNA, 25 bp, Homo sapien
cacaggaagtatccatctgaaagaa

SEQ ID NO: 384758 - DNA, 25 bp, Homo sapien
cagcccggaagctgggagcattgta

SEQ ID NO: 384759 - DNA, 25 bp, Homo sapien
gagtcaaaagatggtcaataatgga

SEQ ID NO: 384760 - DNA, 25 bp, Homo sapien
agtcaaaagatggtcaataatggac

SEQ ID NO: 384761 - DNA, 25 bp, Homo sapien
atgagtcaaaagatggtcaataatg

SEQ ID NO: 384762 - DNA, 25 bp, Homo sapien
catgagtcaaaagatggtcaataat

SEQ ID NO: 384763 - DNA, 25 bp, Homo sapien
ggtaaaggtggtattgatcaagttc

SEQ ID NO: 384764 - DNA, 25 bp, Homo sapien
ctgaagacagcaaaagcctggcgct

SEQ ID NO: 384765 - DNA, 25 bp, Homo sapien
ggcgctttaacagcatggctttctg

SEQ ID NO: 384766 - DNA, 25 bp, Homo sapien
tattgatcaagttctccactgaaga

SEQ ID NO: 384767 - DNA, 25 bp, Homo sapien
caggcaagttcagtgtcccacagct

SEQ ID NO: 384768 - DNA, 25 bp, Homo sapien
ccaggcaagttcagtgtcccacagc

SEQ ID NO: 384769 - DNA, 25 bp, Homo sapien
ggggctgggcctatccacgagcatc

SEQ ID NO: 384770 - DNA, 25 bp, Homo sapien
atgttgaggagatattcttagcagc

SEQ ID NO: 384771 - DNA, 25 bp, Homo sapien
caattcagagaccattattggccac

SEQ ID NO: 384772 - DNA, 25 bp, Homo sapien
cagcaactatggatgtctgtccaac

SEQ ID NO: 384773 - DNA, 25 bp, Homo sapien
ccaactctgagattgtctgtcaggc

SEQ ID NO: 384774 - DNA, 25 bp, Homo sapien
gatcttcttcaagctgtgtgaatgt

SEQ ID NO: 384775 - DNA, 25 bp, Homo sapien
ttttagatcttcttcaagctgtgtg

SEQ ID NO: 384776 - DNA, 25 bp, Homo sapien
tttagatcttcttcaagctgtgtga

SEQ ID NO: 384777 - DNA, 25 bp, Homo sapien
tagatcttcttcaagctgtgtgaat

SEQ ID NO: 384778 - DNA, 25 bp, Homo sapien
tttgcatccgggactgaaactttcg

SEQ ID NO: 384779 - DNA, 25 bp, Homo sapien
gggtccatttgcatccgggactgaa

SEQ ID NO: 384780 - DNA, 25 bp, Homo sapien
ctgagggtccatttgcatccgggac

SEQ ID NO: 384781 - DNA, 25 bp, Homo sapien
tgcatccgggactgaaactttcgtt

SEQ ID NO: 384782 - DNA, 25 bp, Homo sapien
gaaaagaaagcgctgtgtccaagaa

SEQ ID NO: 384783 - DNA, 25 bp, Homo sapien
ttgaaataatggcatcttgtcaggt

SEQ ID NO: 384784 - DNA, 25 bp, Homo sapien
gcaagctgataaatacaagatgagt

SEQ ID NO: 384785 - DNA, 25 bp, Homo sapien
caggtggaaaagaaagcgctgtgtc

SEQ ID NO: 384786 - DNA, 25 bp, Homo sapien
tcctgacagtgtggggtttgcattc

SEQ ID NO: 384787 - DNA, 25 bp, Homo sapien
tagaagttctagaatcctgacagtg

SEQ ID NO: 384788 - DNA, 25 bp, Homo sapien
ctctacatccgacaggaaggcaggg

SEQ ID NO: 384789 - DNA, 25 bp, Homo sapien
ttgcattcttggtgattctcctcta

SEQ ID NO: 384790 - DNA, 25 bp, Homo sapien
aagcgggaattcactcttcatggtg

SEQ ID NO: 384791 - DNA, 25 bp, Homo sapien
gaagaatggcatcaactgcctgatg

SEQ ID NO: 384792 - DNA, 25 bp, Homo sapien
gctggaaacagaatgttggcgcaga

SEQ ID NO: 384793 - DNA, 25 bp, Homo sapien
tgttggcgcagaagcgggaattcac

SEQ ID NO: 384794 - DNA, 25 bp, Homo sapien
ggaaagtccaagaatggagttcctg

SEQ ID NO: 384795 - DNA, 25 bp, Homo sapien
ggagttcctgggctatcagcaggca

SEQ ID NO: 384796 - DNA, 25 bp, Homo sapien
aagatccttgggctatctgtgacag

SEQ ID NO: 384797 - DNA, 25 bp, Homo sapien
catattcgatgcattcttccagttg

SEQ ID NO: 384798 - DNA, 25 bp, Homo sapien
tggaaataggcttgttcaaaagcac

SEQ ID NO: 384799 - DNA, 25 bp, Homo sapien
caaattttgtgctactgttagatga

SEQ ID NO: 384800 - DNA, 25 bp, Homo sapien
tatattacaaggcatttagggaggt

SEQ ID NO: 384801 - DNA, 25 bp, Homo sapien
cgcacctagcctgaaatctactttc

SEQ ID NO: 384802 - DNA, 25 bp, Homo sapien
actgcagaaattgtggttttggttc

SEQ ID NO: 384803 - DNA, 25 bp, Homo sapien
tatttttcacccctgattatgggaa

SEQ ID NO: 384804 - DNA, 25 bp, Homo sapien
tctaccagggccatattagcagtga

SEQ ID NO: 384805 - DNA, 25 bp, Homo sapien
tatggagatcaacagttactgtgac

SEQ ID NO: 384806 - DNA, 25 bp, Homo sapien
ggacctgttctacaagtacagccgc

SEQ ID NO: 384807 - DNA, 25 bp, Homo sapien
tgttctacaagtacagccgcatccg

SEQ ID NO: 384808 - DNA, 25 bp, Homo sapien
agccggtacggccttgtgcccttcg

SEQ ID NO: 384809 - DNA, 25 bp, Homo sapien
cgcatccgcgagatcgagctcaaga

SEQ ID NO: 384810 - DNA, 25 bp, Homo sapien
aactaccgtgctatatcctgtgaca

SEQ ID NO: 384811 - DNA, 25 bp, Homo sapien
gacacaaaatatgcgcaggacagta

SEQ ID NO: 384812 - DNA, 25 bp, Homo sapien
ggcactgcggagactatatccgtaa

SEQ ID NO: 384813 - DNA, 25 bp, Homo sapien
tagacgtacatcacgcgtgtaggac

SEQ ID NO: 384814 - DNA, 25 bp, Homo sapien
aggccagagtgcagcttactgcaaa

SEQ ID NO: 384815 - DNA, 25 bp, Homo sapien
ggccagagtgcagcttactgcaaac

SEQ ID NO: 384816 - DNA, 25 bp, Homo sapien
agaaacaatgagcaacctagcagca

SEQ ID NO: 384817 - DNA, 25 bp, Homo sapien
acaatgagcaacctagcagcaatga

SEQ ID NO: 384818 - DNA, 25 bp, Homo sapien
agctcttagctcttcactgaaaagg

SEQ ID NO: 384819 - DNA, 25 bp, Homo sapien
atagaattaggcttgtaggctgggc

SEQ ID NO: 384820 - DNA, 25 bp, Homo sapien
gagctacaaagccaggaacggcctc

SEQ ID NO: 384821 - DNA, 25 bp, Homo sapien
cttgagcgagctacaaagccaggaa

SEQ ID NO: 384822 - DNA, 25 bp, Homo sapien
caggaacggcctccgccgcaacccg

SEQ ID NO: 384823 - DNA, 25 bp, Homo sapien
agcgagctacaaagccaggaacggc

SEQ ID NO: 384824 - DNA, 25 bp, Homo sapien
cgcgctgaggcgtatcccgcggggt

SEQ ID NO: 384825 - DNA, 25 bp, Homo sapien
gctgaggcgtatcccgcggggtggc

SEQ ID NO: 384826 - DNA, 25 bp, Homo sapien
gtatcccgcggggtggctgcgccgc

SEQ ID NO: 384827 - DNA, 25 bp, Homo sapien
gcgtatcccgcggggtggctgcgcc

SEQ ID NO: 384828 - DNA, 25 bp, Homo sapien
tgggcctgaacaagactcaacctcg

SEQ ID NO: 384829 - DNA, 25 bp, Homo sapien
gagatttctgtcagtcaggttccca

SEQ ID NO: 384830 - DNA, 25 bp, Homo sapien
gagtgcccgctaacaatgctggtct

SEQ ID NO: 384831 - DNA, 25 bp, Homo sapien
catgagctgtatgtagtttgccaac

SEQ ID NO: 384832 - DNA, 25 bp, Homo sapien
tggagactgagtgaaactctacctc

SEQ ID NO: 384833 - DNA, 25 bp, Homo sapien
ggagactgagtgaaactctacctca

SEQ ID NO: 384834 - DNA, 25 bp, Homo sapien
cactaagggttcaccctttgtgcct

SEQ ID NO: 384835 - DNA, 25 bp, Homo sapien
tgcatcagctaaatccacagcagca

SEQ ID NO: 384836 - DNA, 25 bp, Homo sapien
gaaaaaagcattgaagtatgggagg

SEQ ID NO: 384837 - DNA, 25 bp, Homo sapien
taacaaaccatatagtaattcaacc

SEQ ID NO: 384838 - DNA, 25 bp, Homo sapien
tactaccctggctagctcatttgta

SEQ ID NO: 384839 - DNA, 25 bp, Homo sapien
gacttagctgcttgctccaggatac

SEQ ID NO: 384840 - DNA, 25 bp, Homo sapien
gatacatctggaagatacaatctag

SEQ ID NO: 384841 - DNA, 25 bp, Homo sapien
tatccctgtgttaaacaacattgag

SEQ ID NO: 384842 - DNA, 25 bp, Homo sapien
taacactgggaaccaactaaacagc

SEQ ID NO: 384843 - DNA, 25 bp, Homo sapien
ccaggtgtgactagtagaatttgta

SEQ ID NO: 384844 - DNA, 25 bp, Homo sapien
aattcagcaactgcactgaatggcc

SEQ ID NO: 384845 - DNA, 25 bp, Homo sapien
ctattaattcagcaactgcactgaa

SEQ ID NO: 384846 - DNA, 25 bp, Homo sapien
atggccaggtgtgactagtagaatt

SEQ ID NO: 384847 - DNA, 25 bp, Homo sapien
actatgtttctcagggtgggcccca

SEQ ID NO: 384848 - DNA, 25 bp, Homo sapien
ctatgtttctcagggtgggccccaa

SEQ ID NO: 384849 - DNA, 25 bp, Homo sapien
agtttgaagaaattctgattttaca

SEQ ID NO: 384850 - DNA, 25 bp, Homo sapien
acacaagtttgaagaaattctgatt

SEQ ID NO: 384851 - DNA, 25 bp, Homo sapien
ctgggaaacacaagtttgaagaaat

SEQ ID NO: 384852 - DNA, 25 bp, Homo sapien
gaaacacaagtttgaagaaattctg

SEQ ID NO: 384853 - DNA, 25 bp, Homo sapien
tcaagcatatatggtcatttatcac

SEQ ID NO: 384854 - DNA, 25 bp, Homo sapien
cattcccattgtcggtgaatgtcaa

SEQ ID NO: 384855 - DNA, 25 bp, Homo sapien
gtttagcgttcacatcaggatcata

SEQ ID NO: 384856 - DNA, 25 bp, Homo sapien
tgtaatttatcagaagtcataccat

SEQ ID NO: 384857 - DNA, 25 bp, Homo sapien
ggtgactttgtcactgaagccaaag

SEQ ID NO: 384858 - DNA, 25 bp, Homo sapien
ccagacgcatagaacccgacttgaa

SEQ ID NO: 384859 - DNA, 25 bp, Homo sapien
agccattcccatataatccaactgg

SEQ ID NO: 384860 - DNA, 25 bp, Homo sapien
tagaacccgacttgaagccattccc

SEQ ID NO: 384861 - DNA, 25 bp, Homo sapien
tgaagccattcccatataatccaac

SEQ ID NO: 384862 - DNA, 25 bp, Homo sapien
catgctttctccatttttggtaaaa

SEQ ID NO: 384863 - DNA, 25 bp, Homo sapien
ctcatgctttctccatttttggtaa

SEQ ID NO: 384864 - DNA, 25 bp, Homo sapien
tcatgctttctccatttttggtaaa

SEQ ID NO: 384865 - DNA, 25 bp, Homo sapien
gctcatgctttctccatttttggta

SEQ ID NO: 384866 - DNA, 25 bp, Homo sapien
caagtaggtctgagacaaaaggccc

SEQ ID NO: 384867 - DNA, 25 bp, Homo sapien
ccaagtaggtctgagacaaaaggcc

SEQ ID NO: 384868 - DNA, 25 bp, Homo sapien
agtaggtctgagacaaaaggcccac

SEQ ID NO: 384869 - DNA, 25 bp, Homo sapien
ttccaagtaggtctgagacaaaagg

SEQ ID NO: 384870 - DNA, 25 bp, Homo sapien
tattggaacaacaacatgctccgct

SEQ ID NO: 384871 - DNA, 25 bp, Homo sapien
gccactattggaacaacaacatgct

SEQ ID NO: 384872 - DNA, 25 bp, Homo sapien
tgttgaatgccactattggaacaac

SEQ ID NO: 384873 - DNA, 25 bp, Homo sapien
caacaacatgctccgcttttatgac

SEQ ID NO: 384874 - DNA, 25 bp, Homo sapien
ttactagtctacaataaccctgaag

SEQ ID NO: 384875 - DNA, 25 bp, Homo sapien
cagaggacagaggtaagaaatggaa

SEQ ID NO: 384876 - DNA, 25 bp, Homo sapien
gtaaacagaagagctatgggaagtt

SEQ ID NO: 384877 - DNA, 25 bp, Homo sapien
taaagttatcctgccttttgtggtc

SEQ ID NO: 384878 - DNA, 25 bp, Homo sapien
gaattgcagcaaggctggcttttga

SEQ ID NO: 384879 - DNA, 25 bp, Homo sapien
tgccagtaacttctgttccgtggaa

SEQ ID NO: 384880 - DNA, 25 bp, Homo sapien
cgtccccttcttgcctataatagca

SEQ ID NO: 384881 - DNA, 25 bp, Homo sapien
tgttccagaattgcagcaaggctgg

SEQ ID NO: 384882 - DNA, 25 bp, Homo sapien
cgagagatgaatataacaccaccac

SEQ ID NO: 384883 - DNA, 25 bp, Homo sapien
aatggcctctataacatatcctggg

SEQ ID NO: 384884 - DNA, 25 bp, Homo sapien
gcacgtgcactttacttcccaaacg

SEQ ID NO: 384885 - DNA, 25 bp, Homo sapien
caaacggtcaacatctatgtccacg

SEQ ID NO: 384886 - DNA, 25 bp, Homo sapien
ctaaatcctcgggaattctgatatc

SEQ ID NO: 384887 - DNA, 25 bp, Homo sapien
tttcaaaatcgaactctgttgcatt

SEQ ID NO: 384888 - DNA, 25 bp, Homo sapien
tctgatatcatatttatccttttca

SEQ ID NO: 384889 - DNA, 25 bp, Homo sapien
ctcatctaaatcctcgggaattctg

SEQ ID NO: 384890 - DNA, 25 bp, Homo sapien
ggctttagatataatatactgcaat

SEQ ID NO: 384891 - DNA, 25 bp, Homo sapien
gtaggcaagactcttcgaaaccagc

SEQ ID NO: 384892 - DNA, 25 bp, Homo sapien
tcttggctttagatataatatactg

SEQ ID NO: 384893 - DNA, 25 bp, Homo sapien
aagactcttcgaaaccagctgtgtc

SEQ ID NO: 384894 - DNA, 25 bp, Homo sapien
taaaaattttggtcgataaacatca

SEQ ID NO: 384895 - DNA, 25 bp, Homo sapien
cagttgaatccaaaggtaattctca

SEQ ID NO: 384896 - DNA, 25 bp, Homo sapien
ccttaactgacatccaactttttca

SEQ ID NO: 384897 - DNA, 25 bp, Homo sapien
ttgatgagtctatttctgtgataca

SEQ ID NO: 384898 - DNA, 25 bp, Homo sapien
catcattatcccataatgatcttta

SEQ ID NO: 384899 - DNA, 25 bp, Homo sapien
ttgagataggacctcaccctgttgc

SEQ ID NO: 384900 - DNA, 25 bp, Homo sapien
tacaaggacgtacaaccacacctgg

SEQ ID NO: 384901 - DNA, 25 bp, Homo sapien
caccgtactcagctgaggtagagac

SEQ ID NO: 384902 - DNA, 25 bp, Homo sapien
ccaaataactaagactacaaggacg

SEQ ID NO: 384903 - DNA, 25 bp, Homo sapien
tctgctagctaaaatgttgaactca

SEQ ID NO: 384904 - DNA, 25 bp, Homo sapien
tctgctctattaaaaaccatcaggt

SEQ ID NO: 384905 - DNA, 25 bp, Homo sapien
ccaaagttaggtatccagttgctaa

SEQ ID NO: 384906 - DNA, 25 bp, Homo sapien
gattatctacgtgtgactaacaagt

SEQ ID NO: 384907 - DNA, 25 bp, Homo sapien
ctcattagtatagtcgaaatcttgt

SEQ ID NO: 384908 - DNA, 25 bp, Homo sapien
aaggaaattacactctataattcca

SEQ ID NO: 384909 - DNA, 25 bp, Homo sapien
gaaatcttgtttattatgagttggc

SEQ ID NO: 384910 - DNA, 25 bp, Homo sapien
tgtactcattagtatagtcgaaatc

SEQ ID NO: 384911 - DNA, 25 bp, Homo sapien
cacttccggtctcaaagatttcaga

SEQ ID NO: 384912 - DNA, 25 bp, Homo sapien
cattagtaatgtagcttgccgtgtg

SEQ ID NO: 384913 - DNA, 25 bp, Homo sapien
tgtcttagaacacaacccacttggt

SEQ ID NO: 384914 - DNA, 25 bp, Homo sapien
gaatggctggtatccttaactctcc

SEQ ID NO: 384915 - DNA, 25 bp, Homo sapien
gatttaagtccaagaacggacaggc

SEQ ID NO: 384916 - DNA, 25 bp, Homo sapien
ggctaaccctactgctttgtgcaaa

SEQ ID NO: 384917 - DNA, 25 bp, Homo sapien
aaaaaagaggagcataaaccaggat

SEQ ID NO: 384918 - DNA, 25 bp, Homo sapien
gcaaacaaaagtactctattctggg

SEQ ID NO: 384919 - DNA, 25 bp, Homo sapien
cttcaactggcaaatttagaggata

SEQ ID NO: 384920 - DNA, 25 bp, Homo sapien
tcatttcattccagtaatcattcag

SEQ ID NO: 384921 - DNA, 25 bp, Homo sapien
tgtatatcttcaactggcaaattta

SEQ ID NO: 384922 - DNA, 25 bp, Homo sapien
tagaggatattctgtatttttcttc

SEQ ID NO: 384923 - DNA, 25 bp, Homo sapien
tgaacccatgtctgatcaggacgct

SEQ ID NO: 384924 - DNA, 25 bp, Homo sapien
aatttccgccactttagacaggcat

SEQ ID NO: 384925 - DNA, 25 bp, Homo sapien
tgggtcagggttattggagcaatac

SEQ ID NO: 384926 - DNA, 25 bp, Homo sapien
ggagcaataccatttttcaggaagt

SEQ ID NO: 384927 - DNA, 25 bp, Homo sapien
tgaacagtactttccgtctttccaa

SEQ ID NO: 384928 - DNA, 25 bp, Homo sapien
caaaaagggtactaccaactctatg

SEQ ID NO: 384929 - DNA, 25 bp, Homo sapien
gtgaacagtactttccgtctttcca

SEQ ID NO: 384930 - DNA, 25 bp, Homo sapien
taagtgggatgtaccaaatcctcat

SEQ ID NO: 384931 - DNA, 25 bp, Homo sapien
cataagtgggatgtaccaaatcctc

SEQ ID NO: 384932 - DNA, 25 bp, Homo sapien
gttttttcataagtgggatgtacca

SEQ ID NO: 384933 - DNA, 25 bp, Homo sapien
tttcataagtgggatgtaccaaatc

SEQ ID NO: 384934 - DNA, 25 bp, Homo sapien
atacagctcacaacagcagactgct

SEQ ID NO: 384935 - DNA, 25 bp, Homo sapien
tctgcatacagctcacaacagcaga

SEQ ID NO: 384936 - DNA, 25 bp, Homo sapien
aattcatgtatcacctcttctgtta

SEQ ID NO: 384937 - DNA, 25 bp, Homo sapien
gggtattcactaatgattcctctgc

SEQ ID NO: 384938 - DNA, 25 bp, Homo sapien
ggaccagagcttctatggcactcac

SEQ ID NO: 384939 - DNA, 25 bp, Homo sapien
gcactggaccagagcttctatggca

SEQ ID NO: 384940 - DNA, 25 bp, Homo sapien
cactggaccagagcttctatggcac

SEQ ID NO: 384941 - DNA, 25 bp, Homo sapien
ctggaccagagcttctatggcactc

SEQ ID NO: 384942 - DNA, 25 bp, Homo sapien
ccatcctcaccggtataaactgcag

SEQ ID NO: 384943 - DNA, 25 bp, Homo sapien
tatctcagtagcaccctaattttag

SEQ ID NO: 384944 - DNA, 25 bp, Homo sapien
taagaccagataactcagtccagaa

SEQ ID NO: 384945 - DNA, 25 bp, Homo sapien
tataatcaacagtaagcccttcagg

SEQ ID NO: 384946 - DNA, 25 bp, Homo sapien
tcatttccggttgtctgatcctgaa

SEQ ID NO: 384947 - DNA, 25 bp, Homo sapien
atcatttccggttgtctgatcctga

SEQ ID NO: 384948 - DNA, 25 bp, Homo sapien
gcccaaaacacaagatataatcttc

SEQ ID NO: 384949 - DNA, 25 bp, Homo sapien
tttctagtgtgacatgcccaaaaca

SEQ ID NO: 384950 - DNA, 25 bp, Homo sapien
aactatttctagtgtgacatgccca

SEQ ID NO: 384951 - DNA, 25 bp, Homo sapien
aaggaactatttctagtgtgacatg

SEQ ID NO: 384952 - DNA, 25 bp, Homo sapien
tgttgctctcaggttcagactgagg

SEQ ID NO: 384953 - DNA, 25 bp, Homo sapien
gaaagagcagttggccgaaacaaca

SEQ ID NO: 384954 - DNA, 25 bp, Homo sapien
cagactgaggtggaacttgatgatt

SEQ ID NO: 384955 - DNA, 25 bp, Homo sapien
gaaaagcttggagttgaaagagcag

SEQ ID NO: 384956 - DNA, 25 bp, Homo sapien
tggaaaaccaatcttagccactgac

SEQ ID NO: 384957 - DNA, 25 bp, Homo sapien
gaacctacaatgatcccgaattgca

SEQ ID NO: 384958 - DNA, 25 bp, Homo sapien
ccgaattgcatcactgtcacagaag

SEQ ID NO: 384959 - DNA, 25 bp, Homo sapien
gtggcagaagtagggtttagcctaa

SEQ ID NO: 384960 - DNA, 25 bp, Homo sapien
cttaactgttatataggcttccggg

SEQ ID NO: 384961 - DNA, 25 bp, Homo sapien
catcttaatgaagggtacacagaac

SEQ ID NO: 384962 - DNA, 25 bp, Homo sapien
gactgtctcatattgggcgagcaca

SEQ ID NO: 384963 - DNA, 25 bp, Homo sapien
tatttgggccttgtgttagacctcc

SEQ ID NO: 384964 - DNA, 25 bp, Homo sapien
taaacacatcgtcaagctgcacagc

SEQ ID NO: 384965 - DNA, 25 bp, Homo sapien
cagtatttccctggtcgcatcggga

SEQ ID NO: 384966 - DNA, 25 bp, Homo sapien
aatacagcatcggtttcagtggact

SEQ ID NO: 384967 - DNA, 25 bp, Homo sapien
ttctacacaggagggcagaatcact

SEQ ID NO: 384968 - DNA, 25 bp, Homo sapien
tgagttcttcacactgtgaacggat

SEQ ID NO: 384969 - DNA, 25 bp, Homo sapien
ctgtgaacggatttgtgacttttcc

SEQ ID NO: 384970 - DNA, 25 bp, Homo sapien
tgaaacatctgttgccgtctgttga

SEQ ID NO: 384971 - DNA, 25 bp, Homo sapien
gatttacagactcctcaatgttact

SEQ ID NO: 384972 - DNA, 25 bp, Homo sapien
taagttaccgtgcatttacagagaa

SEQ ID NO: 384973 - DNA, 25 bp, Homo sapien
taaacacctaaactgtaaggcagct

SEQ ID NO: 384974 - DNA, 25 bp, Homo sapien
taattgtaggactgctctgatccta

SEQ ID NO: 384975 - DNA, 25 bp, Homo sapien
tttgctgaaaacactgggaaaccat

SEQ ID NO: 384976 - DNA, 25 bp, Homo sapien
catagccagcagttgtcctacgtta

SEQ ID NO: 384977 - DNA, 25 bp, Homo sapien
ttcaacaacttgtcctaaaatctca

SEQ ID NO: 384978 - DNA, 25 bp, Homo sapien
agatcaagatcaggcacaatcatag

SEQ ID NO: 384979 - DNA, 25 bp, Homo sapien
cctacgttaactcgaagagatcgga

SEQ ID NO: 384980 - DNA, 25 bp, Homo sapien
gctcaatgccaacaattcacaggta

SEQ ID NO: 384981 - DNA, 25 bp, Homo sapien
aacagagtcatgagttagcttcagc

SEQ ID NO: 384982 - DNA, 25 bp, Homo sapien
tcaatactgtatatgaccgacacgt

SEQ ID NO: 384983 - DNA, 25 bp, Homo sapien
tatggcatagccctcgacttagaga

SEQ ID NO: 384984 - DNA, 25 bp, Homo sapien
gacagaaaaccagcttcataccaaa

SEQ ID NO: 384985 - DNA, 25 bp, Homo sapien
ttgggaaattacaattgtgacagaa

SEQ ID NO: 384986 - DNA, 25 bp, Homo sapien
aatttgggaaattacaattgtgaca

SEQ ID NO: 384987 - DNA, 25 bp, Homo sapien
ccagcttcataccaaaaatacactt

SEQ ID NO: 384988 - DNA, 25 bp, Homo sapien
atattaagtctttaaaagtagcatt

SEQ ID NO: 384989 - DNA, 25 bp, Homo sapien
caacctgggcagtatctggggcatc

SEQ ID NO: 384990 - DNA, 25 bp, Homo sapien
tgggactaagttataccacaggctt

SEQ ID NO: 384991 - DNA, 25 bp, Homo sapien
caacattacttctgactatgagggt

SEQ ID NO: 384992 - DNA, 25 bp, Homo sapien
agtacagaagatccgccctcaccaa

SEQ ID NO: 384993 - DNA, 25 bp, Homo sapien
aagggaattcctataacgcaattct

SEQ ID NO: 384994 - DNA, 25 bp, Homo sapien
agaggcaccgtcacctcccgcgcag

SEQ ID NO: 384995 - DNA, 25 bp, Homo sapien
ggacccggacagtcagaggcaccgt

SEQ ID NO: 384996 - DNA, 25 bp, Homo sapien
ccgcccccgcatgggcgggacctca

SEQ ID NO: 384997 - DNA, 25 bp, Homo sapien
cggacagtcagaggcaccgtcacct

SEQ ID NO: 384998 - DNA, 25 bp, Homo sapien
tccacctaaaatgcttcgctgggtc

SEQ ID NO: 384999 - DNA, 25 bp, Homo sapien
tatgatacgccgctacatccagaaa

SEQ ID NO: 385000 - DNA, 25 bp, Homo sapien
cgcgaccaaaagagccgcggagctg

SEQ ID NO: 385001 - DNA, 25 bp, Homo sapien
taacaccttgctagctccacctaaa

SEQ ID NO: 385002 - DNA, 25 bp, Homo sapien
gcaaagggttattgagcgctgaata

SEQ ID NO: 385003 - DNA, 25 bp, Homo sapien
aaagggttattgagcgctgaatagg

SEQ ID NO: 385004 - DNA, 25 bp, Homo sapien
agcagcaaagggttattgagcgctg

SEQ ID NO: 385005 - DNA, 25 bp, Homo sapien
cagcaaagggttattgagcgctgaa

SEQ ID NO: 385006 - DNA, 25 bp, Homo sapien
ttcaagacaggagaaagctgcaaaa

SEQ ID NO: 385007 - DNA, 25 bp, Homo sapien
cttcaagacaggagaaagctgcaaa

SEQ ID NO: 385008 - DNA, 25 bp, Homo sapien
caagacaggagaaagctgcaaaatg

SEQ ID NO: 385009 - DNA, 25 bp, Homo sapien
tcaagacaggagaaagctgcaaaat

SEQ ID NO: 385010 - DNA, 25 bp, Homo sapien
ctatttcacaagtgatgactttcat

SEQ ID NO: 385011 - DNA, 25 bp, Homo sapien
gacattggtgtccacgccggcagac

SEQ ID NO: 385012 - DNA, 25 bp, Homo sapien
gccggcagacgccagtctgtggatc

SEQ ID NO: 385013 - DNA, 25 bp, Homo sapien
cacgccggcagacgccagtctgtgg

SEQ ID NO: 385014 - DNA, 25 bp, Homo sapien
cctgacattggtgtccacgccggca

SEQ ID NO: 385015 - DNA, 25 bp, Homo sapien
agtgttcccggatgtctatctctgc

SEQ ID NO: 385016 - DNA, 25 bp, Homo sapien
gaatgaaaactattgcttcaagcag

SEQ ID NO: 385017 - DNA, 25 bp, Homo sapien
ggatgtctatctctgccccagttta

SEQ ID NO: 385018 - DNA, 25 bp, Homo sapien
tattgcttcaagcagtgttcccgga

SEQ ID NO: 385019 - DNA, 25 bp, Homo sapien
ttgctttcattgttcaccgcaggcc

SEQ ID NO: 385020 - DNA, 25 bp, Homo sapien
accgcaggccctggaaatttagcat

SEQ ID NO: 385021 - DNA, 25 bp, Homo sapien
tagtttgttgacatacgttaattca

SEQ ID NO: 385022 - DNA, 25 bp, Homo sapien
gctagatgacaaagtagtttagttt

SEQ ID NO: 385023 - DNA, 25 bp, Homo sapien
tggagaaaaacgcacaacattgacg

SEQ ID NO: 385024 - DNA, 25 bp, Homo sapien
aaaacgcacaacattgacggctttg

SEQ ID NO: 385025 - DNA, 25 bp, Homo sapien
gagaaaaacgcacaacattgacggc

SEQ ID NO: 385026 - DNA, 25 bp, Homo sapien
aaaaattccacgatggcttttccat

SEQ ID NO: 385027 - DNA, 25 bp, Homo sapien
gatctgctccggctccttgttatca

SEQ ID NO: 385028 - DNA, 25 bp, Homo sapien
agagtcttcacaaccgtccagttct

SEQ ID NO: 385029 - DNA, 25 bp, Homo sapien
tcaccttccacaataggatgacagc

SEQ ID NO: 385030 - DNA, 25 bp, Homo sapien
cctcgtcctcatcctgaaaagcgat

SEQ ID NO: 385031 - DNA, 25 bp, Homo sapien
taaattcccatcagttgcccagcaa

SEQ ID NO: 385032 - DNA, 25 bp, Homo sapien
gttgcccagcaaatatcatacacat

SEQ ID NO: 385033 - DNA, 25 bp, Homo sapien
ccatatgatggctgtgttatccaca

SEQ ID NO: 385034 - DNA, 25 bp, Homo sapien
gttatccacagaggcagaagccatt

SEQ ID NO: 385035 - DNA, 25 bp, Homo sapien
catattgacccaaagggtcccaggt

SEQ ID NO: 385036 - DNA, 25 bp, Homo sapien
ggtcccaggttactccttggacata

SEQ ID NO: 385037 - DNA, 25 bp, Homo sapien
tcccaggttactccttggacataac

SEQ ID NO: 385038 - DNA, 25 bp, Homo sapien
gctcagagtagcaacatattgaccc

SEQ ID NO: 385039 - DNA, 25 bp, Homo sapien
ataaagatttactaagttcagggcg

SEQ ID NO: 385040 - DNA, 25 bp, Homo sapien
tgagattgcgccacaacacctgcct

SEQ ID NO: 385041 - DNA, 25 bp, Homo sapien
ctgagattgtgagattgcgccacaa

SEQ ID NO: 385042 - DNA, 25 bp, Homo sapien
ataataaagatttactaagttcagg

SEQ ID NO: 385043 - DNA, 25 bp, Homo sapien
taaaaatcaccgtagcacacctgta

SEQ ID NO: 385044 - DNA, 25 bp, Homo sapien
ataaaaatcaccgtagcacacctgt

SEQ ID NO: 385045 - DNA, 25 bp, Homo sapien
ttgagaccagcatcgtcaatacggt

SEQ ID NO: 385046 - DNA, 25 bp, Homo sapien
aagtaatataggaggcactcctcat

SEQ ID NO: 385047 - DNA, 25 bp, Homo sapien
caaaaggactattaagtaatatagg

SEQ ID NO: 385048 - DNA, 25 bp, Homo sapien
ttagaatacaacagaagattctatg

SEQ ID NO: 385049 - DNA, 25 bp, Homo sapien
gaatacaacagaagattctatgaaa

SEQ ID NO: 385050 - DNA, 25 bp, Homo sapien
tccagacagcatcttcgaaacattg

SEQ ID NO: 385051 - DNA, 25 bp, Homo sapien
ctgtatactgtatactcgcagcacc

SEQ ID NO: 385052 - DNA, 25 bp, Homo sapien
agccacacgcttcttctgtatactg

SEQ ID NO: 385053 - DNA, 25 bp, Homo sapien
tcgaaacattgaaagccacacgctt

SEQ ID NO: 385054 - DNA, 25 bp, Homo sapien
gaaagacttcatgctgtcgtcgtga

SEQ ID NO: 385055 - DNA, 25 bp, Homo sapien
ctggcgtgagaagcaaagatccgtc

SEQ ID NO: 385056 - DNA, 25 bp, Homo sapien
cgtcgtgaaacatccggtagcttct

SEQ ID NO: 385057 - DNA, 25 bp, Homo sapien
gtgaaactcagtctacggaagaaag

SEQ ID NO: 385058 - DNA, 25 bp, Homo sapien
tcatacacaactacatacaatttca

SEQ ID NO: 385059 - DNA, 25 bp, Homo sapien
catacacaactacatacaatttcat

SEQ ID NO: 385060 - DNA, 25 bp, Homo sapien
ttgccatagggcaccgttgagcctc

SEQ ID NO: 385061 - DNA, 25 bp, Homo sapien
gaagcaccgtgactagattcagctg

SEQ ID NO: 385062 - DNA, 25 bp, Homo sapien
gagaacatagtgagcctttgccata

SEQ ID NO: 385063 - DNA, 25 bp, Homo sapien
ggcaattcctcgattgaagcaccgt

SEQ ID NO: 385064 - DNA, 25 bp, Homo sapien
cataagtggtattcattacattttc

SEQ ID NO: 385065 - DNA, 25 bp, Homo sapien
acataagtggtattcattacatttt

SEQ ID NO: 385066 - DNA, 25 bp, Homo sapien
gttcaaagtagaccggacagcagcg

SEQ ID NO: 385067 - DNA, 25 bp, Homo sapien
agtagaccggacagcagcgaacagc

SEQ ID NO: 385068 - DNA, 25 bp, Homo sapien
tcagttcaaagtagaccggacagca

SEQ ID NO: 385069 - DNA, 25 bp, Homo sapien
aaagtagaccggacagcagcgaaca

SEQ ID NO: 385070 - DNA, 25 bp, Homo sapien
cctgtttcggagagaaaacataaca

SEQ ID NO: 385071 - DNA, 25 bp, Homo sapien
tctggtgacctgtttcggagagaaa

SEQ ID NO: 385072 - DNA, 25 bp, Homo sapien
gaaaacataacacacccctgaggct

SEQ ID NO: 385073 - DNA, 25 bp, Homo sapien
agaaaacataacacacccctgaggc

SEQ ID NO: 385074 - DNA, 25 bp, Homo sapien
agaagcacggaatcctccgaggcca

SEQ ID NO: 385075 - DNA, 25 bp, Homo sapien
gaagcacggaatcctccgaggccac

SEQ ID NO: 385076 - DNA, 25 bp, Homo sapien
ctgggtgtcatacagaagcacggaa

SEQ ID NO: 385077 - DNA, 25 bp, Homo sapien
acagaagcacggaatcctccgaggc

SEQ ID NO: 385078 - DNA, 25 bp, Homo sapien
caaaatcacaagcttgtttgaaggc

SEQ ID NO: 385079 - DNA, 25 bp, Homo sapien
cttagaagagggaagttcgagcaaa

SEQ ID NO: 385080 - DNA, 25 bp, Homo sapien
atcacaagcttgtttgaaggcaaaa

SEQ ID NO: 385081 - DNA, 25 bp, Homo sapien
agggaagttcgagcaaaatcacaag

SEQ ID NO: 385082 - DNA, 25 bp, Homo sapien
agttacagaccttaccaacactctc

SEQ ID NO: 385083 - DNA, 25 bp, Homo sapien
gttacagaccttaccaacactctca

SEQ ID NO: 385084 - DNA, 25 bp, Homo sapien
acagaccttaccaacactctcacat

SEQ ID NO: 385085 - DNA, 25 bp, Homo sapien
tacagaccttaccaacactctcaca

SEQ ID NO: 385086 - DNA, 25 bp, Homo sapien
tcacaaatgagcagtaaccgtccgt

SEQ ID NO: 385087 - DNA, 25 bp, Homo sapien
tgagcagtaaccgtccgtggaagaa

SEQ ID NO: 385088 - DNA, 25 bp, Homo sapien
ggtcctggcgaagaccctcgatgtg

SEQ ID NO: 385089 - DNA, 25 bp, Homo sapien
gcttttgacagcaggagtgatggag

SEQ ID NO: 385090 - DNA, 25 bp, Homo sapien
gaacttggtggagtgtccgtcttta

SEQ ID NO: 385091 - DNA, 25 bp, Homo sapien
ctgtagaaggggtggaaatcacact

SEQ ID NO: 385092 - DNA, 25 bp, Homo sapien
tcttctgtagaaggggtggaaatca

SEQ ID NO: 385093 - DNA, 25 bp, Homo sapien
agaacttggtggagtgtccgtcttt

SEQ ID NO: 385094 - DNA, 25 bp, Homo sapien
ctttgttttcatcgagtctgggccg

SEQ ID NO: 385095 - DNA, 25 bp, Homo sapien
ggactgccctgagcgtctccaggcg

SEQ ID NO: 385096 - DNA, 25 bp, Homo sapien
tcaagggtccagactttccgtgcct

SEQ ID NO: 385097 - DNA, 25 bp, Homo sapien
ttcatcgagtctgggccgctttagc

SEQ ID NO: 385098 - DNA, 25 bp, Homo sapien
tgcacacaccgggagcctggtaggc

SEQ ID NO: 385099 - DNA, 25 bp, Homo sapien
gcttcgagcagaagccgaggtccca

SEQ ID NO: 385100 - DNA, 25 bp, Homo sapien
tccatggaagccctggtctcaggca

SEQ ID NO: 385101 - DNA, 25 bp, Homo sapien
gagaaaaatcagtacacatgtcact

SEQ ID NO: 385102 - DNA, 25 bp, Homo sapien
tgattttcacactggataacgttga

SEQ ID NO: 385103 - DNA, 25 bp, Homo sapien
tggataacgttgaaccgctccagtt

SEQ ID NO: 385104 - DNA, 25 bp, Homo sapien
tgaaccgctccagtttcagaaactc

SEQ ID NO: 385105 - DNA, 25 bp, Homo sapien
cgttcatgtcccaagttaaaaatgg

SEQ ID NO: 385106 - DNA, 25 bp, Homo sapien
ttcttattgaaaaggagtccctcca

SEQ ID NO: 385107 - DNA, 25 bp, Homo sapien
gcactttcacgaggatgccagggag

SEQ ID NO: 385108 - DNA, 25 bp, Homo sapien
taaaattcgacagagtaaaatctca

SEQ ID NO: 385109 - DNA, 25 bp, Homo sapien
taatcaatcaactccttagaagtga

SEQ ID NO: 385110 - DNA, 25 bp, Homo sapien
cacaatcaatgcacaagaaacagat

SEQ ID NO: 385111 - DNA, 25 bp, Homo sapien
aatcaatgcacaagaaacagatttg

SEQ ID NO: 385112 - DNA, 25 bp, Homo sapien
caatcaatgcacaagaaacagattt

SEQ ID NO: 385113 - DNA, 25 bp, Homo sapien
ccacaatcaatgcacaagaaacaga

SEQ ID NO: 385114 - DNA, 25 bp, Homo sapien
cttggaaaatgaaactccagctgca

SEQ ID NO: 385115 - DNA, 25 bp, Homo sapien
atgaaactccagctgcacaattccc

SEQ ID NO: 385116 - DNA, 25 bp, Homo sapien
gaaaatgaaactccagctgcacaat

SEQ ID NO: 385117 - DNA, 25 bp, Homo sapien
ttggaaaatgaaactccagctgcac

SEQ ID NO: 385118 - DNA, 25 bp, Homo sapien
gctctggcttccctttgactgcaaa

SEQ ID NO: 385119 - DNA, 25 bp, Homo sapien
gaggcttgccgggtgcttaaaccac

SEQ ID NO: 385120 - DNA, 25 bp, Homo sapien
aaccccagacaacattggtgtgact

SEQ ID NO: 385121 - DNA, 25 bp, Homo sapien
gctctccaggcataagataagccag

SEQ ID NO: 385122 - DNA, 25 bp, Homo sapien
agccaaatccatagcagaatatggg

SEQ ID NO: 385123 - DNA, 25 bp, Homo sapien
cagggcatcgataaagtaatctctc

SEQ ID NO: 385124 - DNA, 25 bp, Homo sapien
tttgtcaggcaggagaaataacatt

SEQ ID NO: 385125 - DNA, 25 bp, Homo sapien
ctctcttttgaggtgtgcttttgaa

SEQ ID NO: 385126 - DNA, 25 bp, Homo sapien
caacgcggtctttcatcatgtgata

SEQ ID NO: 385127 - DNA, 25 bp, Homo sapien
gaagactagttcatagattcctgtc

SEQ ID NO: 385128 - DNA, 25 bp, Homo sapien
caggtacatttcagggaagactagt

SEQ ID NO: 385129 - DNA, 25 bp, Homo sapien
tagtcctcagtaggcattattccat

SEQ ID NO: 385130 - DNA, 25 bp, Homo sapien
tgtgaaaccacgaatgcctttgggc

SEQ ID NO: 385131 - DNA, 25 bp, Homo sapien
acacagacacgggattgggagcacg

SEQ ID NO: 385132 - DNA, 25 bp, Homo sapien
tgtaagtgagaaaggccacaccagg

SEQ ID NO: 385133 - DNA, 25 bp, Homo sapien
caaagggacgatggataactgagct

SEQ ID NO: 385134 - DNA, 25 bp, Homo sapien
tgtgatccaggaataaaccttgcgg

SEQ ID NO: 385135 - DNA, 25 bp, Homo sapien
gcttcctcggaaaaagacagttgcc

SEQ ID NO: 385136 - DNA, 25 bp, Homo sapien
tgaaaacactaggagctgcatcccg

SEQ ID NO: 385137 - DNA, 25 bp, Homo sapien
tgttactctgtctcctaaggcgctg

SEQ ID NO: 385138 - DNA, 25 bp, Homo sapien
cacagcgggtacaggctgaacgact

SEQ ID NO: 385139 - DNA, 25 bp, Homo sapien
gaacgactacgtgtgagtccccaca

SEQ ID NO: 385140 - DNA, 25 bp, Homo sapien
tgctttgcctgtcctgccaggacga

SEQ ID NO: 385141 - DNA, 25 bp, Homo sapien
catgaagtttgagattggccaggcc

SEQ ID NO: 385142 - DNA, 25 bp, Homo sapien
atagattgtgtttgcacttgaattt

SEQ ID NO: 385143 - DNA, 25 bp, Homo sapien
tatagattgtgtttgcacttgaatt

SEQ ID NO: 385144 - DNA, 25 bp, Homo sapien
agtcaccttattcaaatctggactc

SEQ ID NO: 385145 - DNA, 25 bp, Homo sapien
caaggtaaagcttcagcaggcttct

SEQ ID NO: 385146 - DNA, 25 bp, Homo sapien
aaagcttcagcaggcttctgagtca

SEQ ID NO: 385147 - DNA, 25 bp, Homo sapien
gcttcagcaggcttctgagtcacct

SEQ ID NO: 385148 - DNA, 25 bp, Homo sapien
ccatggcagatattcgcagaggcat

SEQ ID NO: 385149 - DNA, 25 bp, Homo sapien
aggaagatgagactcgaggttttct

SEQ ID NO: 385150 - DNA, 25 bp, Homo sapien
tcctcttgcacatgggagctggagt

SEQ ID NO: 385151 - DNA, 25 bp, Homo sapien
tcctggaagcgtctggttggcagaa

SEQ ID NO: 385152 - DNA, 25 bp, Homo sapien
ctccggctggcaagggacctgaaca

SEQ ID NO: 385153 - DNA, 25 bp, Homo sapien
aaaagcagttgctcgttgatcagaa

SEQ ID NO: 385154 - DNA, 25 bp, Homo sapien
aacaaacaaaagcagttgctcgttg

SEQ ID NO: 385155 - DNA, 25 bp, Homo sapien
tgctcgttgatcagaatcgaccagc

SEQ ID NO: 385156 - DNA, 25 bp, Homo sapien
gaatcgaccagcatgcatctagggc

SEQ ID NO: 385157 - DNA, 25 bp, Homo sapien
ttccaccaacagaccatccgaatca

SEQ ID NO: 385158 - DNA, 25 bp, Homo sapien
tcttccgtcagcactggtttcacag

SEQ ID NO: 385159 - DNA, 25 bp, Homo sapien
tctcttatctccaacttgtagcaaa

SEQ ID NO: 385160 - DNA, 25 bp, Homo sapien
tccaacttgtagcaaattgtccctc

SEQ ID NO: 385161 - DNA, 25 bp, Homo sapien
tcctggacatcgctgtcaagcaagt

SEQ ID NO: 385162 - DNA, 25 bp, Homo sapien
tcagcgaatcattcctcaaagggct

SEQ ID NO: 385163 - DNA, 25 bp, Homo sapien
gcatttgcggtgtgctcagtgacga

SEQ ID NO: 385164 - DNA, 25 bp, Homo sapien
ggccaaacatctcttaatcagcgaa

SEQ ID NO: 385165 - DNA, 25 bp, Homo sapien
ggaagacacgcagaagcccaagtaa

SEQ ID NO: 385166 - DNA, 25 bp, Homo sapien
agacacgcagaagcccaagtaagtc

SEQ ID NO: 385167 - DNA, 25 bp, Homo sapien
acacgcagaagcccaagtaagtccc

SEQ ID NO: 385168 - DNA, 25 bp, Homo sapien
aagacacgcagaagcccaagtaagt

SEQ ID NO: 385169 - DNA, 25 bp, Homo sapien
ttgtccacaccagattccttcgctg

SEQ ID NO: 385170 - DNA, 25 bp, Homo sapien
acaccaaccagagcccggcggattg

SEQ ID NO: 385171 - DNA, 25 bp, Homo sapien
gcttttggtccatgcccagggcgtt

SEQ ID NO: 385172 - DNA, 25 bp, Homo sapien
ccgtcccattgccagggacacaagg

SEQ ID NO: 385173 - DNA, 25 bp, Homo sapien
tccagttgtaacatttgcccaaggg

SEQ ID NO: 385174 - DNA, 25 bp, Homo sapien
gggagaacttgcagctgccaactca

SEQ ID NO: 385175 - DNA, 25 bp, Homo sapien
gatgcagaccccgagtcagaaacaa

SEQ ID NO: 385176 - DNA, 25 bp, Homo sapien
cagagagacgcatggtttgaaacca

SEQ ID NO: 385177 - DNA, 25 bp, Homo sapien
gccaggcggaatcagtagacattga

SEQ ID NO: 385178 - DNA, 25 bp, Homo sapien
gattacgacgtgatgcaggatcctg

SEQ ID NO: 385179 - DNA, 25 bp, Homo sapien
tgctacaactgggactgaaggctca

SEQ ID NO: 385180 - DNA, 25 bp, Homo sapien
caacaagagtttggccataccggac

SEQ ID NO: 385181 - DNA, 25 bp, Homo sapien
ggcaagatcaccttctacactggca

SEQ ID NO: 385182 - DNA, 25 bp, Homo sapien
gaaggatctggtgaaactggctaaa

SEQ ID NO: 385183 - DNA, 25 bp, Homo sapien
tatcattgccttcgtgggaagccca

SEQ ID NO: 385184 - DNA, 25 bp, Homo sapien
taaggtgtacctagcttcagagaag

SEQ ID NO: 385185 - DNA, 25 bp, Homo sapien
aaaatcctgactgtcgctcatcctc

SEQ ID NO: 385186 - DNA, 25 bp, Homo sapien
ggtgggcatggatcaagatttgcca

SEQ ID NO: 385187 - DNA, 25 bp, Homo sapien
catgtgttgtggcccaaaatcctga

SEQ ID NO: 385188 - DNA, 25 bp, Homo sapien
ttgtggcccaaaatcctgactgtcg

SEQ ID NO: 385189 - DNA, 25 bp, Homo sapien
gtgatgcaaatgaaggcctttcttc

SEQ ID NO: 385190 - DNA, 25 bp, Homo sapien
atgaaggcctttcttcggcctttgg

SEQ ID NO: 385191 - DNA, 25 bp, Homo sapien
cctttggaaaggtttggctttgctg

SEQ ID NO: 385192 - DNA, 25 bp, Homo sapien
gaaaggtttggctttgctgctgcca

SEQ ID NO: 385193 - DNA, 25 bp, Homo sapien
accccagcccagagcgggtgcttgg

SEQ ID NO: 385194 - DNA, 25 bp, Homo sapien
gcccagagcgggtgcttgggaagag

SEQ ID NO: 385195 - DNA, 25 bp, Homo sapien
gcttgggaagagaggcggcctgtcc

SEQ ID NO: 385196 - DNA, 25 bp, Homo sapien
cttgggaagagaggcggcctgtcca

SEQ ID NO: 385197 - DNA, 25 bp, Homo sapien
gactatgacaagtgtgcggccgcta

SEQ ID NO: 385198 - DNA, 25 bp, Homo sapien
tcctggcaaaagtgggctcttggca

SEQ ID NO: 385199 - DNA, 25 bp, Homo sapien
tgtccccgcagaagatcctgaggtc

SEQ ID NO: 385200 - DNA, 25 bp, Homo sapien
cacgggtgggctctttgcgaatcca

SEQ ID NO: 385201 - DNA, 25 bp, Homo sapien
cccctgatgttgtgaaaatgttgct

SEQ ID NO: 385202 - DNA, 25 bp, Homo sapien
tgctcgtcatcaggagatgacagca

SEQ ID NO: 385203 - DNA, 25 bp, Homo sapien
acaggtagactctgtgtgcgcggct

SEQ ID NO: 385204 - DNA, 25 bp, Homo sapien
tcgcgggactcgcattggaagacag

SEQ ID NO: 385205 - DNA, 25 bp, Homo sapien
aagccttgggtcctctgccacatgt

SEQ ID NO: 385206 - DNA, 25 bp, Homo sapien
gccttgggtcctctgccacatgttc

SEQ ID NO: 385207 - DNA, 25 bp, Homo sapien
gaagccttgggtcctctgccacatg

SEQ ID NO: 385208 - DNA, 25 bp, Homo sapien
agccttgggtcctctgccacatgtt

SEQ ID NO: 385209 - DNA, 25 bp, Homo sapien
tgagctgcctggaaagtagcttttt

SEQ ID NO: 385210 - DNA, 25 bp, Homo sapien
gcaacttgagctgcctggaaagtag

SEQ ID NO: 385211 - DNA, 25 bp, Homo sapien
gaaagtagctttttgacacttggca

SEQ ID NO: 385212 - DNA, 25 bp, Homo sapien
cctggaaagtagctttttgacactt

SEQ ID NO: 385213 - DNA, 25 bp, Homo sapien
atctccacctgtggcgctagggccg

SEQ ID NO: 385214 - DNA, 25 bp, Homo sapien
caagatggcggacaccggaagtgcc

SEQ ID NO: 385215 - DNA, 25 bp, Homo sapien
tggtttccggtctgagctgctccca

SEQ ID NO: 385216 - DNA, 25 bp, Homo sapien
gcccaaagcaacacaaagagccact

SEQ ID NO: 385217 - DNA, 25 bp, Homo sapien
agcagggaggactctcgaagtgtgg

SEQ ID NO: 385218 - DNA, 25 bp, Homo sapien
ggactctcgaagtgtgggccagaca

SEQ ID NO: 385219 - DNA, 25 bp, Homo sapien
cagggaggactctcgaagtgtgggc

SEQ ID NO: 385220 - DNA, 25 bp, Homo sapien
gaggactctcgaagtgtgggccaga

SEQ ID NO: 385221 - DNA, 25 bp, Homo sapien
gtgtccccattcagtgtttggaact

SEQ ID NO: 385222 - DNA, 25 bp, Homo sapien
cattcagtgtttggaactggcattc

SEQ ID NO: 385223 - DNA, 25 bp, Homo sapien
ccattcagtgtttggaactggcatt

SEQ ID NO: 385224 - DNA, 25 bp, Homo sapien
tccccattcagtgtttggaactggc

SEQ ID NO: 385225 - DNA, 25 bp, Homo sapien
ggcaggacacctccacatgggtcca

SEQ ID NO: 385226 - DNA, 25 bp, Homo sapien
ccattctcacaagtgcccaccagcc

SEQ ID NO: 385227 - DNA, 25 bp, Homo sapien
tctgaatgtgacattggaatatcag

SEQ ID NO: 385228 - DNA, 25 bp, Homo sapien
tgaatgtgacattggaatatcaggt

SEQ ID NO: 385229 - DNA, 25 bp, Homo sapien
actccaagggcagtcaaggtggccc

SEQ ID NO: 385230 - DNA, 25 bp, Homo sapien
caagggcagtcaaggtggcccagca

SEQ ID NO: 385231 - DNA, 25 bp, Homo sapien
tccaagggcagtcaaggtggcccag

SEQ ID NO: 385232 - DNA, 25 bp, Homo sapien
aactccaagggcagtcaaggtggcc

SEQ ID NO: 385233 - DNA, 25 bp, Homo sapien
ccttctctcgaggtcacagggctgg

SEQ ID NO: 385234 - DNA, 25 bp, Homo sapien
tgggccttggtgttcaccctccgtg

SEQ ID NO: 385235 - DNA, 25 bp, Homo sapien
ctgggtaggacatcagtgtctggct

SEQ ID NO: 385236 - DNA, 25 bp, Homo sapien
cgtgagggagccctgactggcacat

SEQ ID NO: 385237 - DNA, 25 bp, Homo sapien
taaggctagcattccaaccgcatgg

SEQ ID NO: 385238 - DNA, 25 bp, Homo sapien
aaccgcatgggtgaaagtctttctc

SEQ ID NO: 385239 - DNA, 25 bp, Homo sapien
ttgtcagtgcgtatcctcttcggag

SEQ ID NO: 385240 - DNA, 25 bp, Homo sapien
aatccctggtgctgcgatgaggacg

SEQ ID NO: 385241 - DNA, 25 bp, Homo sapien
ttcaacaccaaatacatctttctca

SEQ ID NO: 385242 - DNA, 25 bp, Homo sapien
ggccaaccgtgatctttctgacagc

SEQ ID NO: 385243 - DNA, 25 bp, Homo sapien
gacaagtggctatgctggccaaccg

SEQ ID NO: 385244 - DNA, 25 bp, Homo sapien
cctccagggccgttgtgtgctgaca

SEQ ID NO: 385245 - DNA, 25 bp, Homo sapien
ccgttgtgtgctgacaagtggctat

SEQ ID NO: 385246 - DNA, 25 bp, Homo sapien
ccaatgaaggtaaagagcttattcg

SEQ ID NO: 385247 - DNA, 25 bp, Homo sapien
tagggcccctccaattctccctcca

SEQ ID NO: 385248 - DNA, 25 bp, Homo sapien
tctatttccacaccaatgaaggtaa

SEQ ID NO: 385249 - DNA, 25 bp, Homo sapien
cacaccaatgaaggtaaagagctta

SEQ ID NO: 385250 - DNA, 25 bp, Homo sapien
ctagagaaggccaggaggagttccc

SEQ ID NO: 385251 - DNA, 25 bp, Homo sapien
gagaaggccaggaggagttcccgga

SEQ ID NO: 385252 - DNA, 25 bp, Homo sapien
tagagaaggccaggaggagttcccg

SEQ ID NO: 385253 - DNA, 25 bp, Homo sapien
agagaaggccaggaggagttcccgg

SEQ ID NO: 385254 - DNA, 25 bp, Homo sapien
ggacctcttgacaggtctccaagaa

SEQ ID NO: 385255 - DNA, 25 bp, Homo sapien
gccggcattagacagtgagcagata

SEQ ID NO: 385256 - DNA, 25 bp, Homo sapien
tagagaatttgtgggatatgagcag

SEQ ID NO: 385257 - DNA, 25 bp, Homo sapien
gcactgtgactgttgccggcattag

SEQ ID NO: 385258 - DNA, 25 bp, Homo sapien
caggaataaatcctgtccgcaggga

SEQ ID NO: 385259 - DNA, 25 bp, Homo sapien
cagaggctccaggaataaatcctgt

SEQ ID NO: 385260 - DNA, 25 bp, Homo sapien
aacagtgcatctgctcggagatctc

SEQ ID NO: 385261 - DNA, 25 bp, Homo sapien
tgtccgcagggaacagtgcatctgc

SEQ ID NO: 385262 - DNA, 25 bp, Homo sapien
caagaaggatggcttgtctgcggct

SEQ ID NO: 385263 - DNA, 25 bp, Homo sapien
caggacaggagcagttgcaatgagt

SEQ ID NO: 385264 - DNA, 25 bp, Homo sapien
cgtgaaaatttgtccccctgctgtg

SEQ ID NO: 385265 - DNA, 25 bp, Homo sapien
gcttcattgatctctgtcagtgagt

SEQ ID NO: 385266 - DNA, 25 bp, Homo sapien
cagtgagaccgccaatgtcagaagt

SEQ ID NO: 385267 - DNA, 25 bp, Homo sapien
gctagcagtgagaccgccaatgtca

SEQ ID NO: 385268 - DNA, 25 bp, Homo sapien
gaccgccaatgtcagaagtttagct

SEQ ID NO: 385269 - DNA, 25 bp, Homo sapien
gggctagcagtgagaccgccaatgt

SEQ ID NO: 385270 - DNA, 25 bp, Homo sapien
ggggagtaagaatatcttcttggca

SEQ ID NO: 385271 - DNA, 25 bp, Homo sapien
ggagtaagaatatcttcttggcagg

SEQ ID NO: 385272 - DNA, 25 bp, Homo sapien
agtaagaatatcttcttggcaggtg

SEQ ID NO: 385273 - DNA, 25 bp, Homo sapien
gagtaagaatatcttcttggcaggt

SEQ ID NO: 385274 - DNA, 25 bp, Homo sapien
tgtggttgtacctggacaagccctt

SEQ ID NO: 385275 - DNA, 25 bp, Homo sapien
cctgtgttgtggttgtacctggaca

SEQ ID NO: 385276 - DNA, 25 bp, Homo sapien
tgttgtggttgtacctggacaagcc

SEQ ID NO: 385277 - DNA, 25 bp, Homo sapien
cctgtaaccctgtgttgtggttgta

SEQ ID NO: 385278 - DNA, 25 bp, Homo sapien
acaattcccgtgctgagtacgggtc

SEQ ID NO: 385279 - DNA, 25 bp, Homo sapien
cagggcacgggagccgaaccacctt

SEQ ID NO: 385280 - DNA, 25 bp, Homo sapien
gagtacgggtcacccagacccaaga

SEQ ID NO: 385281 - DNA, 25 bp, Homo sapien
tgcagggcacgggagccgaaccacc

SEQ ID NO: 385282 - DNA, 25 bp, Homo sapien
aacttaatgagactaaatcgttgat

SEQ ID NO: 385283 - DNA, 25 bp, Homo sapien
gactaaatcgttgataagtcctgtt

SEQ ID NO: 385284 - DNA, 25 bp, Homo sapien
taatgagactaaatcgttgataagt

SEQ ID NO: 385285 - DNA, 25 bp, Homo sapien
cgttgataagtcctgttttgaagca

SEQ ID NO: 385286 - DNA, 25 bp, Homo sapien
ctctttaagcacatgtctagatgat

SEQ ID NO: 385287 - DNA, 25 bp, Homo sapien
tctttaagcacatgtctagatgatt

SEQ ID NO: 385288 - DNA, 25 bp, Homo sapien
gccaaaaggctccacgtgtctttcg

SEQ ID NO: 385289 - DNA, 25 bp, Homo sapien
ttgctgagccctgtctgccaaaagg

SEQ ID NO: 385290 - DNA, 25 bp, Homo sapien
cacagtctccgaacctccatgggag

SEQ ID NO: 385291 - DNA, 25 bp, Homo sapien
aattgctggacctctttttgctgag

SEQ ID NO: 385292 - DNA, 25 bp, Homo sapien
aataggtcccagaggagaccacgca

SEQ ID NO: 385293 - DNA, 25 bp, Homo sapien
cactgctctggaataggtcccagag

SEQ ID NO: 385294 - DNA, 25 bp, Homo sapien
tctggaataggtcccagaggagacc

SEQ ID NO: 385295 - DNA, 25 bp, Homo sapien
tggaataggtcccagaggagaccac

SEQ ID NO: 385296 - DNA, 25 bp, Homo sapien
catcgaatacactttcccattaggg

SEQ ID NO: 385297 - DNA, 25 bp, Homo sapien
taattcaaatatggcgtaatggcgc

SEQ ID NO: 385298 - DNA, 25 bp, Homo sapien
actgaatccacgtctgtctttttga

SEQ ID NO: 385299 - DNA, 25 bp, Homo sapien
tccttaagagtttgggggatcagaa

SEQ ID NO: 385300 - DNA, 25 bp, Homo sapien
gaactccacagaacgagggtgcagc

SEQ ID NO: 385301 - DNA, 25 bp, Homo sapien
catcttcggcatttctcagaactcc

SEQ ID NO: 385302 - DNA, 25 bp, Homo sapien
gatgtcaggtttagctctcagggag

SEQ ID NO: 385303 - DNA, 25 bp, Homo sapien
tgacaaacactgagccgagctcctg

SEQ ID NO: 385304 - DNA, 25 bp, Homo sapien
gaggaccctcaaccattttctatag

SEQ ID NO: 385305 - DNA, 25 bp, Homo sapien
gatgcattagtcaggattcactgga

SEQ ID NO: 385306 - DNA, 25 bp, Homo sapien
aaccaatagagtgtgtgaataccga

SEQ ID NO: 385307 - DNA, 25 bp, Homo sapien
tacacatgtctttttgagtcccggc

SEQ ID NO: 385308 - DNA, 25 bp, Homo sapien
gagccccagatactggccaggtgat

SEQ ID NO: 385309 - DNA, 25 bp, Homo sapien
tactaggaagatcagcagtttcacc

SEQ ID NO: 385310 - DNA, 25 bp, Homo sapien
tgaatgacaaagatagatgggacca

SEQ ID NO: 385311 - DNA, 25 bp, Homo sapien
tgtgaacattgcatagcccaggacc

SEQ ID NO: 385312 - DNA, 25 bp, Homo sapien
cattcgaggccttggacaggtgctc

SEQ ID NO: 385313 - DNA, 25 bp, Homo sapien
ggtaacagaatgcactgtcaagaga

SEQ ID NO: 385314 - DNA, 25 bp, Homo sapien
cagatgcttctgtatagccaacagc

SEQ ID NO: 385315 - DNA, 25 bp, Homo sapien
gatagtcattctagggtgctcttgc

SEQ ID NO: 385316 - DNA, 25 bp, Homo sapien
cgtcttggggttgtaacgctgctgt

SEQ ID NO: 385317 - DNA, 25 bp, Homo sapien
ccatggcgtcttggggttgtaacgc

SEQ ID NO: 385318 - DNA, 25 bp, Homo sapien
tgactccttcacaacactatctggg

SEQ ID NO: 385319 - DNA, 25 bp, Homo sapien
tgtcctgtgagcaaatgggccatct

SEQ ID NO: 385320 - DNA, 25 bp, Homo sapien
ctctggggaggcgaaggagcctctc

SEQ ID NO: 385321 - DNA, 25 bp, Homo sapien
gctctggggaggcgaaggagcctct

SEQ ID NO: 385322 - DNA, 25 bp, Homo sapien
tctggggaggcgaaggagcctctca

SEQ ID NO: 385323 - DNA, 25 bp, Homo sapien
ctggggaggcgaaggagcctctcag

SEQ ID NO: 385324 - DNA, 25 bp, Homo sapien
tctgtttccttgagctccagtttgc

SEQ ID NO: 385325 - DNA, 25 bp, Homo sapien
cgatggagacaagcaattgggaata

SEQ ID NO: 385326 - DNA, 25 bp, Homo sapien
tttgctgaggttgagtttctgccgg

SEQ ID NO: 385327 - DNA, 25 bp, Homo sapien
caagagagtgtgatcgatggagaca

SEQ ID NO: 385328 - DNA, 25 bp, Homo sapien
caaaacactcctccacaaaggccac

SEQ ID NO: 385329 - DNA, 25 bp, Homo sapien
gctccctggtcgtgctctctgaatt

SEQ ID NO: 385330 - DNA, 25 bp, Homo sapien
agtgtgcggaaagcgagggcctgca

SEQ ID NO: 385331 - DNA, 25 bp, Homo sapien
ggccctgcacgctccctggtcgtgc

SEQ ID NO: 385332 - DNA, 25 bp, Homo sapien
gcctgataatgtcatcaaccaacag

SEQ ID NO: 385333 - DNA, 25 bp, Homo sapien
tgccccagtgtgacgtgacgttgag

SEQ ID NO: 385334 - DNA, 25 bp, Homo sapien
aatgcacctgctgcctgataatgtc

SEQ ID NO: 385335 - DNA, 25 bp, Homo sapien
acgttgagtgctggggcctaaagtc

SEQ ID NO: 385336 - DNA, 25 bp, Homo sapien
tgttcatcgaacacctcacaggtgc

SEQ ID NO: 385337 - DNA, 25 bp, Homo sapien
cagccaggaatgcattctcgggcca

SEQ ID NO: 385338 - DNA, 25 bp, Homo sapien
tggattccactcagatcagacgaca

SEQ ID NO: 385339 - DNA, 25 bp, Homo sapien
tctcgggccagatcggtcgaattca

SEQ ID NO: 385340 - DNA, 25 bp, Homo sapien
tcatctgtccaacgctgagggttgt

SEQ ID NO: 385341 - DNA, 25 bp, Homo sapien
gaattgcctgcatggccacgaactg

SEQ ID NO: 385342 - DNA, 25 bp, Homo sapien
aacagagggcacgtcaggaaacggc

SEQ ID NO: 385343 - DNA, 25 bp, Homo sapien
gcacagcctggtttggcctgagaat

SEQ ID NO: 385344 - DNA, 25 bp, Homo sapien
gcactggatatctctgtgacaggca

SEQ ID NO: 385345 - DNA, 25 bp, Homo sapien
ccaggagggaagacctgggacaggc

SEQ ID NO: 385346 - DNA, 25 bp, Homo sapien
caggagggaagacctgggacaggca

SEQ ID NO: 385347 - DNA, 25 bp, Homo sapien
aggagggaagacctgggacaggcac

SEQ ID NO: 385348 - DNA, 25 bp, Homo sapien
tggtgactacagatggggtttggtg

SEQ ID NO: 385349 - DNA, 25 bp, Homo sapien
atggtgactacagatggggtttggt

SEQ ID NO: 385350 - DNA, 25 bp, Homo sapien
cacagggagcaggtcagtggtcttc

SEQ ID NO: 385351 - DNA, 25 bp, Homo sapien
gacacagtcatagggcacaatcaag

SEQ ID NO: 385352 - DNA, 25 bp, Homo sapien
tcttggcatcatggactcatgggct

SEQ ID NO: 385353 - DNA, 25 bp, Homo sapien
cattcatgccaggtgccgcatagga

SEQ ID NO: 385354 - DNA, 25 bp, Homo sapien
cgtatataactcaggacatgtctcc

SEQ ID NO: 385355 - DNA, 25 bp, Homo sapien
gcaggattggatgggatagggaaga

SEQ ID NO: 385356 - DNA, 25 bp, Homo sapien
ctgccgtagaagcaggattggatgg

SEQ ID NO: 385357 - DNA, 25 bp, Homo sapien
attggatgggatagggaagagaatg

SEQ ID NO: 385358 - DNA, 25 bp, Homo sapien
aggattggatgggatagggaagaga

SEQ ID NO: 385359 - DNA, 25 bp, Homo sapien
ctgggcacaggatgctgggtagggg

SEQ ID NO: 385360 - DNA, 25 bp, Homo sapien
tgggcacaggatgctgggtaggggg

SEQ ID NO: 385361 - DNA, 25 bp, Homo sapien
ctggagtgtcttctaggatgaaacc

SEQ ID NO: 385362 - DNA, 25 bp, Homo sapien
tccctggagtgtcttctaggatgaa

SEQ ID NO: 385363 - DNA, 25 bp, Homo sapien
ttgcacttcgttccctggagtgtct

SEQ ID NO: 385364 - DNA, 25 bp, Homo sapien
caccattgcacttcgttccctggag

SEQ ID NO: 385365 - DNA, 25 bp, Homo sapien
tgttgtgatagccagtaaatcagcg

SEQ ID NO: 385366 - DNA, 25 bp, Homo sapien
ctgttagaaaaacatgcgcccagct

SEQ ID NO: 385367 - DNA, 25 bp, Homo sapien
gatgctgcggcaatgataatattcc

SEQ ID NO: 385368 - DNA, 25 bp, Homo sapien
taaatcagcgaagggacgaattgac

SEQ ID NO: 385369 - DNA, 25 bp, Homo sapien
catctagacgcttcttgtaatgacc

SEQ ID NO: 385370 - DNA, 25 bp, Homo sapien
tcaaaggacataaccatcaacatga

SEQ ID NO: 385371 - DNA, 25 bp, Homo sapien
taatacagccttccttgtaggcaag

SEQ ID NO: 385372 - DNA, 25 bp, Homo sapien
tgtaatgacctcagtgaaatcaaag

SEQ ID NO: 385373 - DNA, 25 bp, Homo sapien
tgcttttcaatattccccttaggaa

SEQ ID NO: 385374 - DNA, 25 bp, Homo sapien
ttaggaaaggcgagctcatgcgacc

SEQ ID NO: 385375 - DNA, 25 bp, Homo sapien
tgaagcggatcaggcgccccctggt

SEQ ID NO: 385376 - DNA, 25 bp, Homo sapien
caatattccccttaggaaaggcgag

SEQ ID NO: 385377 - DNA, 25 bp, Homo sapien
cagggttaatccagtccggtgccac

SEQ ID NO: 385378 - DNA, 25 bp, Homo sapien
gcagggttaatccagtccggtgcca

SEQ ID NO: 385379 - DNA, 25 bp, Homo sapien
tgcagggttaatccagtccggtgcc

SEQ ID NO: 385380 - DNA, 25 bp, Homo sapien
ggttaatccagtccggtgccaccgc

SEQ ID NO: 385381 - DNA, 25 bp, Homo sapien
gatgggaaagctggggtcacctcac

SEQ ID NO: 385382 - DNA, 25 bp, Homo sapien
ggatgggaaagctggggtcacctca

SEQ ID NO: 385383 - DNA, 25 bp, Homo sapien
ctggatgggaaagctggggtcacct

SEQ ID NO: 385384 - DNA, 25 bp, Homo sapien
tggatgggaaagctggggtcacctc

SEQ ID NO: 385385 - DNA, 25 bp, Homo sapien
cactgacgtgtctcgggcatttcaa

SEQ ID NO: 385386 - DNA, 25 bp, Homo sapien
gaaaatagagtcatccagaccagct

SEQ ID NO: 385387 - DNA, 25 bp, Homo sapien
tacgtgagcgtactgaaaagatgtt

SEQ ID NO: 385388 - DNA, 25 bp, Homo sapien
gctcagaggcgtcaataaattgcaa

SEQ ID NO: 385389 - DNA, 25 bp, Homo sapien
tcccaattctgctccaggtcagtgc

SEQ ID NO: 385390 - DNA, 25 bp, Homo sapien
ctggatccctgaggacagagactgg

SEQ ID NO: 385391 - DNA, 25 bp, Homo sapien
agagctttctggatccctgaggaca

SEQ ID NO: 385392 - DNA, 25 bp, Homo sapien
ctgctccaggtcagtgccgagggcc

SEQ ID NO: 385393 - DNA, 25 bp, Homo sapien
aggcctgatatttgccacgtaggca

SEQ ID NO: 385394 - DNA, 25 bp, Homo sapien
ctggctgtgtcaatatttgcctggt

SEQ ID NO: 385395 - DNA, 25 bp, Homo sapien
gatatttgccacgtaggcatttcat

SEQ ID NO: 385396 - DNA, 25 bp, Homo sapien
ggctgtgtcaatatttgcctggttc

SEQ ID NO: 385397 - DNA, 25 bp, Homo sapien
cagaacccatggtttgctcttgggc

SEQ ID NO: 385398 - DNA, 25 bp, Homo sapien
acacagaacccatggtttgctcttg

SEQ ID NO: 385399 - DNA, 25 bp, Homo sapien
cccatggtttgctcttgggctagac

SEQ ID NO: 385400 - DNA, 25 bp, Homo sapien
gaacccatggtttgctcttgggcta

SEQ ID NO: 385401 - DNA, 25 bp, Homo sapien
aaacttaattctgtgtttgtgccaa

SEQ ID NO: 385402 - DNA, 25 bp, Homo sapien
tagtggaatctgattctgacattgg

SEQ ID NO: 385403 - DNA, 25 bp, Homo sapien
tccacttgtgtgtgaactcgggccg

SEQ ID NO: 385404 - DNA, 25 bp, Homo sapien
tctgacattggggtacctctggact

SEQ ID NO: 385405 - DNA, 25 bp, Homo sapien
tcagatcagtatggggagagataaa

SEQ ID NO: 385406 - DNA, 25 bp, Homo sapien
tgccggttgtcaggtgtgtgcgtgg

SEQ ID NO: 385407 - DNA, 25 bp, Homo sapien
ctctgccggttgtcaggtgtgtgcg

SEQ ID NO: 385408 - DNA, 25 bp, Homo sapien
tcacttgtagattcagatcagtatg

SEQ ID NO: 385409 - DNA, 25 bp, Homo sapien
gatttttcccgtgatggagctccag

SEQ ID NO: 385410 - DNA, 25 bp, Homo sapien
aataatatgcaaaaccgggccctgg

SEQ ID NO: 385411 - DNA, 25 bp, Homo sapien
ccagagtcacggatccatgtaaagg

SEQ ID NO: 385412 - DNA, 25 bp, Homo sapien
aacgttgacttagggcttgaccgcg

SEQ ID NO: 385413 - DNA, 25 bp, Homo sapien
taatcaagagggatcaggtttgcca

SEQ ID NO: 385414 - DNA, 25 bp, Homo sapien
caggaggcccttgttgggataatca

SEQ ID NO: 385415 - DNA, 25 bp, Homo sapien
caaggagtcttcagcgcatggtggt

SEQ ID NO: 385416 - DNA, 25 bp, Homo sapien
tagaagacgagtctgaatacgagtc

SEQ ID NO: 385417 - DNA, 25 bp, Homo sapien
gaatgggaactggtaaacaggattc

SEQ ID NO: 385418 - DNA, 25 bp, Homo sapien
actggtaaacaggattcccaggaca

SEQ ID NO: 385419 - DNA, 25 bp, Homo sapien
tgggaactggtaaacaggattccca

SEQ ID NO: 385420 - DNA, 25 bp, Homo sapien
tggagaatgggaactggtaaacagg

SEQ ID NO: 385421 - DNA, 25 bp, Homo sapien
tgtgagccataatccatggatacat

SEQ ID NO: 385422 - DNA, 25 bp, Homo sapien
tgagcagtggtctgtgagatctgct

SEQ ID NO: 385423 - DNA, 25 bp, Homo sapien
acctggccaggataagctttgagca

SEQ ID NO: 385424 - DNA, 25 bp, Homo sapien
agacaggtcttcttacactgcccag

SEQ ID NO: 385425 - DNA, 25 bp, Homo sapien
tccaaggtggtagttggcatgacca

SEQ ID NO: 385426 - DNA, 25 bp, Homo sapien
ctttttgggctatcaggctgggctg

SEQ ID NO: 385427 - DNA, 25 bp, Homo sapien
aaacggctgagaggaagactttttg

SEQ ID NO: 385428 - DNA, 25 bp, Homo sapien
gagaggaagactttttgggctatca

SEQ ID NO: 385429 - DNA, 25 bp, Homo sapien
gaaattggatgagcgccctgttgtg

SEQ ID NO: 385430 - DNA, 25 bp, Homo sapien
ggtgtgccctcgtggactctcaggt

SEQ ID NO: 385431 - DNA, 25 bp, Homo sapien
cacagctgggtgtgccctcgtggac

SEQ ID NO: 385432 - DNA, 25 bp, Homo sapien
tggactctcaggtggacagaaattg

SEQ ID NO: 385433 - DNA, 25 bp, Homo sapien
tcaaaagagccatgttctccccttt

SEQ ID NO: 385434 - DNA, 25 bp, Homo sapien
tttgtgggtggtaagtgggacctga

SEQ ID NO: 385435 - DNA, 25 bp, Homo sapien
catgttctccccttttgtgggtggt

SEQ ID NO: 385436 - DNA, 25 bp, Homo sapien
tcaatgaggatccttcaaaagagcc

SEQ ID NO: 385437 - DNA, 25 bp, Homo sapien
tcactgactggattcctcctccttg

SEQ ID NO: 385438 - DNA, 25 bp, Homo sapien
tcccctttgccagcgctgtgcttca

SEQ ID NO: 385439 - DNA, 25 bp, Homo sapien
gcttgtcacccactatcatttggcc

SEQ ID NO: 385440 - DNA, 25 bp, Homo sapien
gcgctgtgcttcagccgtgtttctg

SEQ ID NO: 385441 - DNA, 25 bp, Homo sapien
acgtgtgcgccgttccactcggcaa

SEQ ID NO: 385442 - DNA, 25 bp, Homo sapien
tatgaagactgaaggtctgatctct

SEQ ID NO: 385443 - DNA, 25 bp, Homo sapien
tggatgattcgctttgtttctccca

SEQ ID NO: 385444 - DNA, 25 bp, Homo sapien
cactcggcaatactggatgattcgc

SEQ ID NO: 385445 - DNA, 25 bp, Homo sapien
cacatttattgcaattgctgaacag

SEQ ID NO: 385446 - DNA, 25 bp, Homo sapien
tctcacatttattgcaattgctgaa

SEQ ID NO: 385447 - DNA, 25 bp, Homo sapien
tgcaattgctgaacagagtttttct

SEQ ID NO: 385448 - DNA, 25 bp, Homo sapien
ttgcaattgctgaacagagtttttc

SEQ ID NO: 385449 - DNA, 25 bp, Homo sapien
actttgtgttcagcggccactgtga

SEQ ID NO: 385450 - DNA, 25 bp, Homo sapien
ggcttctccgaaatcacactttgtg

SEQ ID NO: 385451 - DNA, 25 bp, Homo sapien
cactgggtcagcaaggttgaggtct

SEQ ID NO: 385452 - DNA, 25 bp, Homo sapien
ttcactgggtcagcaaggttgaggt

SEQ ID NO: 385453 - DNA, 25 bp, Homo sapien
cttcacaggcaacatggtcatggaa

SEQ ID NO: 385454 - DNA, 25 bp, Homo sapien
taaagcaatggatgcaatctgcagt

SEQ ID NO: 385455 - DNA, 25 bp, Homo sapien
gcctgatttatcagaccatgttcat

SEQ ID NO: 385456 - DNA, 25 bp, Homo sapien
tgcgatgacttagctggtgcgtgaa

SEQ ID NO: 385457 - DNA, 25 bp, Homo sapien
gcaaagccctcctttcggtctggaa

SEQ ID NO: 385458 - DNA, 25 bp, Homo sapien
gggctctcggtccagattaacggaa

SEQ ID NO: 385459 - DNA, 25 bp, Homo sapien
cctcaaaatcctgggtcggggagag

SEQ ID NO: 385460 - DNA, 25 bp, Homo sapien
ggagaggcagcacatctgctcccca

SEQ ID NO: 385461 - DNA, 25 bp, Homo sapien
cctgagaaggcttcgggacttcggt

SEQ ID NO: 385462 - DNA, 25 bp, Homo sapien
ttcggtgggccccttacgatgcaca

SEQ ID NO: 385463 - DNA, 25 bp, Homo sapien
gactcatctcgagcacccaggggtg

SEQ ID NO: 385464 - DNA, 25 bp, Homo sapien
aacatccagtgaccgaccttcagtg

SEQ ID NO: 385465 - DNA, 25 bp, Homo sapien
cctgaagctgatcgtcttggttcat

SEQ ID NO: 385466 - DNA, 25 bp, Homo sapien
tggttcatgtgcttggacttggttg

SEQ ID NO: 385467 - DNA, 25 bp, Homo sapien
tcctgtcccaggatttgcatagctg

SEQ ID NO: 385468 - DNA, 25 bp, Homo sapien
tgcatagctgctgcccaattctcca

SEQ ID NO: 385469 - DNA, 25 bp, Homo sapien
ctgcgatccatccccagcggaagcc

SEQ ID NO: 385470 - DNA, 25 bp, Homo sapien
tgcgatccatccccagcggaagccg

SEQ ID NO: 385471 - DNA, 25 bp, Homo sapien
gcgatccatccccagcggaagccga

SEQ ID NO: 385472 - DNA, 25 bp, Homo sapien
tctaaatggcggttcacccactggc

SEQ ID NO: 385473 - DNA, 25 bp, Homo sapien
ggaagaaattcaggccccaagagga

SEQ ID NO: 385474 - DNA, 25 bp, Homo sapien
gagtccgaggcaccgttctaaatgg

SEQ ID NO: 385475 - DNA, 25 bp, Homo sapien
ggattttccgcttcagatgctccgc

SEQ ID NO: 385476 - DNA, 25 bp, Homo sapien
aatggaaaagtaccgggcaggtgct

SEQ ID NO: 385477 - DNA, 25 bp, Homo sapien
tggaaaagtaccgggcaggtgctca

SEQ ID NO: 385478 - DNA, 25 bp, Homo sapien
atggaaaagtaccgggcaggtgctc

SEQ ID NO: 385479 - DNA, 25 bp, Homo sapien
gaatggaaaagtaccgggcaggtgc

SEQ ID NO: 385480 - DNA, 25 bp, Homo sapien
ttagagctaatacccacaggccgta

SEQ ID NO: 385481 - DNA, 25 bp, Homo sapien
caggccgtatgtgggatagttagta

SEQ ID NO: 385482 - DNA, 25 bp, Homo sapien
cctcggaaaaggacacttagagcta

SEQ ID NO: 385483 - DNA, 25 bp, Homo sapien
gcctctgtggaattgtgaaggaaga

SEQ ID NO: 385484 - DNA, 25 bp, Homo sapien
aatgcccaagcctggcgagtcggac

SEQ ID NO: 385485 - DNA, 25 bp, Homo sapien
ctggctgcgctgacagctgccggct

SEQ ID NO: 385486 - DNA, 25 bp, Homo sapien
tcctgttgcagcggcttgagcagag

SEQ ID NO: 385487 - DNA, 25 bp, Homo sapien
agcagagggccatgggctagcggcg

SEQ ID NO: 385488 - DNA, 25 bp, Homo sapien
ttggtgctccgaaaccgcgacgcca

SEQ ID NO: 385489 - DNA, 25 bp, Homo sapien
acatcgtggccagggctcgcaggct

SEQ ID NO: 385490 - DNA, 25 bp, Homo sapien
cggagtccacatcgtggccagggct

SEQ ID NO: 385491 - DNA, 25 bp, Homo sapien
ccttgcggagtccacatcgtggcca

SEQ ID NO: 385492 - DNA, 25 bp, Homo sapien
tcgagatcatgtggggactctcggc

SEQ ID NO: 385493 - DNA, 25 bp, Homo sapien
gggactctcggccgtgtgccacagg

SEQ ID NO: 385494 - DNA, 25 bp, Homo sapien
cttggcgtcgagatcatgtggggac

SEQ ID NO: 385495 - DNA, 25 bp, Homo sapien
atcatgtggggactctcggccgtgt

SEQ ID NO: 385496 - DNA, 25 bp, Homo sapien
aggaggcggcgcgactcgttggcca

SEQ ID NO: 385497 - DNA, 25 bp, Homo sapien
gcaggcgcggccgagaggaggcggc

SEQ ID NO: 385498 - DNA, 25 bp, Homo sapien
cctgccggggaggatcgagccttcc

SEQ ID NO: 385499 - DNA, 25 bp, Homo sapien
gcgtcctcgccctcccggtgttgca

SEQ ID NO: 385500 - DNA, 25 bp, Homo sapien
ccggagctaggatgggcggcaggga

SEQ ID NO: 385501 - DNA, 25 bp, Homo sapien
tcctgagcgccggtcgccggacccc

SEQ ID NO: 385502 - DNA, 25 bp, Homo sapien
cagggactctcccgggagagacccg

SEQ ID NO: 385503 - DNA, 25 bp, Homo sapien
gggaagtcgcggtgagtgcacacgg

SEQ ID NO: 385504 - DNA, 25 bp, Homo sapien
gcgtttgtttatggcagacccgcct

SEQ ID NO: 385505 - DNA, 25 bp, Homo sapien
tccttcgtcgagtgctcgaaccggc

SEQ ID NO: 385506 - DNA, 25 bp, Homo sapien
gagcccgcgatgtgtggctaggcgc

SEQ ID NO: 385507 - DNA, 25 bp, Homo sapien
tggctaggcgcagcacctccgctgt

SEQ ID NO: 385508 - DNA, 25 bp, Homo sapien
cgggagccaggtgagtccgcggagt

SEQ ID NO: 385509 - DNA, 25 bp, Homo sapien
gggcatattagacccggccgtgctc

SEQ ID NO: 385510 - DNA, 25 bp, Homo sapien
gccccgttcctgctcgctcctgttt

SEQ ID NO: 385511 - DNA, 25 bp, Homo sapien
gggctggaccgtcctgcagcaaccg

SEQ ID NO: 385512 - DNA, 25 bp, Homo sapien
gtccagctgcgaagtgatggccgac

SEQ ID NO: 385513 - DNA, 25 bp, Homo sapien
cctcctggtcttggccgcattcttg

SEQ ID NO: 385514 - DNA, 25 bp, Homo sapien
gcttggcaagctcgtaaaactcgcc

SEQ ID NO: 385515 - DNA, 25 bp, Homo sapien
catcttcaggtagctcgtggtgagg

SEQ ID NO: 385516 - DNA, 25 bp, Homo sapien
aagccgaagaccctcacgcaacctc

SEQ ID NO: 385517 - DNA, 25 bp, Homo sapien
ggcaacccctctgggcgggctggct

SEQ ID NO: 385518 - DNA, 25 bp, Homo sapien
ggctggcttgcgcttcccgcctggg

SEQ ID NO: 385519 - DNA, 25 bp, Homo sapien
gaccaggagagggtttggtcgcctg

SEQ ID NO: 385520 - DNA, 25 bp, Homo sapien
cagcgcgccactatttcttcctgtt

SEQ ID NO: 385521 - DNA, 25 bp, Homo sapien
ccagcgcgccactatttcttcctgt

SEQ ID NO: 385522 - DNA, 25 bp, Homo sapien
tccgagtcttccgcaccgcgggtcc

SEQ ID NO: 385523 - DNA, 25 bp, Homo sapien
cctgttccgagtcttccgcaccgcg

SEQ ID NO: 385524 - DNA, 25 bp, Homo sapien
tccgatttcgagtagagtgcctggt

SEQ ID NO: 385525 - DNA, 25 bp, Homo sapien
gaacgcaaaaggtcgagctttccga

SEQ ID NO: 385526 - DNA, 25 bp, Homo sapien
gcggccagcacaaataacaggcttg

SEQ ID NO: 385527 - DNA, 25 bp, Homo sapien
tgcggcggaagttgtctccctacct

SEQ ID NO: 385528 - DNA, 25 bp, Homo sapien
tatctttgccacgttccgagtagga

SEQ ID NO: 385529 - DNA, 25 bp, Homo sapien
ctaaaacatcaaccggagtggaatc

SEQ ID NO: 385530 - DNA, 25 bp, Homo sapien
gtagcgacgaccttgggcaacagct

SEQ ID NO: 385531 - DNA, 25 bp, Homo sapien
gggtcaccattgagcggacaagtag

SEQ ID NO: 385532 - DNA, 25 bp, Homo sapien
caaacagcgaacagcttctgagcag

SEQ ID NO: 385533 - DNA, 25 bp, Homo sapien
catgcggttaaggaacggctcttcc

SEQ ID NO: 385534 - DNA, 25 bp, Homo sapien
catcttttaacaggctctccgggaa

SEQ ID NO: 385535 - DNA, 25 bp, Homo sapien
agtgagtgccctctcgtccggattc

SEQ ID NO: 385536 - DNA, 25 bp, Homo sapien
ccaaatgcctggagacttgctttcc

SEQ ID NO: 385537 - DNA, 25 bp, Homo sapien
cgcacagagccggtttaaaggtggc

SEQ ID NO: 385538 - DNA, 25 bp, Homo sapien
taaaggtggctgagcggtacaccca

SEQ ID NO: 385539 - DNA, 25 bp, Homo sapien
tgccaccagtgcaagctgctcaagg

SEQ ID NO: 385540 - DNA, 25 bp, Homo sapien
taggacagcctatagcttgagcctc

SEQ ID NO: 385541 - DNA, 25 bp, Homo sapien
aaaaggatcccagtaaattgtcgca

SEQ ID NO: 385542 - DNA, 25 bp, Homo sapien
gcgtttatgacccagaagccgcagc

SEQ ID NO: 385543 - DNA, 25 bp, Homo sapien
ccaggttctcgcctagttgctctag

SEQ ID NO: 385544 - DNA, 25 bp, Homo sapien
acgcaagcacatattgggatcctgg

SEQ ID NO: 385545 - DNA, 25 bp, Homo sapien
gattgcaaaccacttcgaagtcaag

SEQ ID NO: 385546 - DNA, 25 bp, Homo sapien
ctggagctttctgcgcgggcagcct

SEQ ID NO: 385547 - DNA, 25 bp, Homo sapien
aagtcaagaaggatatgtgcgtggc

SEQ ID NO: 385548 - DNA, 25 bp, Homo sapien
gaggcagccagcttcgcgccttcct

SEQ ID NO: 385549 - DNA, 25 bp, Homo sapien
caggtcacagaccatagacagcacc

SEQ ID NO: 385550 - DNA, 25 bp, Homo sapien
agaagactatttgggagcaaacggg

SEQ ID NO: 385551 - DNA, 25 bp, Homo sapien
ctcctcttccgaagctggtcctggg

SEQ ID NO: 385552 - DNA, 25 bp, Homo sapien
tcctgcactgtgaggtggccgtccc

SEQ ID NO: 385553 - DNA, 25 bp, Homo sapien
agagcactgcaggacctgtggggac

SEQ ID NO: 385554 - DNA, 25 bp, Homo sapien
tgcaggacctgtggggacgctgtgc

SEQ ID NO: 385555 - DNA, 25 bp, Homo sapien
cctgtggggacgctgtgctgttgga

SEQ ID NO: 385556 - DNA, 25 bp, Homo sapien
cctgtggtttcctgccggaggggtg

SEQ ID NO: 385557 - DNA, 25 bp, Homo sapien
gcagtgttaacggtgagcgtggcct

SEQ ID NO: 385558 - DNA, 25 bp, Homo sapien
ctgtgcagtgttaacggtgagcgtg

SEQ ID NO: 385559 - DNA, 25 bp, Homo sapien
gtgcagtgttaacggtgagcgtggc

SEQ ID NO: 385560 - DNA, 25 bp, Homo sapien
cagtgttaacggtgagcgtggcctc

SEQ ID NO: 385561 - DNA, 25 bp, Homo sapien
gatttccaaaaagcgacaaaggcac

SEQ ID NO: 385562 - DNA, 25 bp, Homo sapien
cagttgtcctggagccacctttgcc

SEQ ID NO: 385563 - DNA, 25 bp, Homo sapien
tcgtggcggcagcatttacaactgt

SEQ ID NO: 385564 - DNA, 25 bp, Homo sapien
tggtgaagtaagacttaactaagga

SEQ ID NO: 385565 - DNA, 25 bp, Homo sapien
cgcatcaccaccgtgatcacagcag

SEQ ID NO: 385566 - DNA, 25 bp, Homo sapien
cccgcatcaccaccgtgatcacagc

SEQ ID NO: 385567 - DNA, 25 bp, Homo sapien
ccgcatcaccaccgtgatcacagca

SEQ ID NO: 385568 - DNA, 25 bp, Homo sapien
ggagatcctggagatcgttcccggg

SEQ ID NO: 385569 - DNA, 25 bp, Homo sapien
gcaaagcccttccaagcgggcagcc

SEQ ID NO: 385570 - DNA, 25 bp, Homo sapien
cgccctgggcatcgcggtctctgga

SEQ ID NO: 385571 - DNA, 25 bp, Homo sapien
gttcccgaggagtcgccgtgcagtc

SEQ ID NO: 385572 - DNA, 25 bp, Homo sapien
cacaggccgaactggaaagggtctc

SEQ ID NO: 385573 - DNA, 25 bp, Homo sapien
atgggccacaggccgaactggaaag

SEQ ID NO: 385574 - DNA, 25 bp, Homo sapien
ggatgggccacaggccgaactggaa

SEQ ID NO: 385575 - DNA, 25 bp, Homo sapien
gccacaggccgaactggaaagggtc

SEQ ID NO: 385576 - DNA, 25 bp, Homo sapien
ccacgagcgcggtcctccttccaat

SEQ ID NO: 385577 - DNA, 25 bp, Homo sapien
cttctccctgtgaggggtttacctg

SEQ ID NO: 385578 - DNA, 25 bp, Homo sapien
cttccaatccgaaaccttctccctg

SEQ ID NO: 385579 - DNA, 25 bp, Homo sapien
gcgcggtcctccttccaatccgaaa

SEQ ID NO: 385580 - DNA, 25 bp, Homo sapien
aagtgcgatcccagctccttggcga

SEQ ID NO: 385581 - DNA, 25 bp, Homo sapien
gcgatcccagctccttggcgacgcc

SEQ ID NO: 385582 - DNA, 25 bp, Homo sapien
caagtgcgatcccagctccttggcg

SEQ ID NO: 385583 - DNA, 25 bp, Homo sapien
gtgcgatcccagctccttggcgacg

SEQ ID NO: 385584 - DNA, 25 bp, Homo sapien
gagcctgcggcggctgcgctcctcc

SEQ ID NO: 385585 - DNA, 25 bp, Homo sapien
agcctgcggcggctgcgctcctccc

SEQ ID NO: 385586 - DNA, 25 bp, Homo sapien
cctgcggcggctgcgctcctccccc

SEQ ID NO: 385587 - DNA, 25 bp, Homo sapien
gcctgcggcggctgcgctcctcccc

SEQ ID NO: 385588 - DNA, 25 bp, Homo sapien
gcatccgacatgctaagcgtccatc

SEQ ID NO: 385589 - DNA, 25 bp, Homo sapien
tagggtagggttggccgcaggccgc

SEQ ID NO: 385590 - DNA, 25 bp, Homo sapien
taagcgtccatccctccgcagtggg

SEQ ID NO: 385591 - DNA, 25 bp, Homo sapien
cgcaggccgcatccgacatgctaag

SEQ ID NO: 385592 - DNA, 25 bp, Homo sapien
aatcaaggcaggacgcgttggctca

SEQ ID NO: 385593 - DNA, 25 bp, Homo sapien
catttgaaagatcgggatgtgtccc

SEQ ID NO: 385594 - DNA, 25 bp, Homo sapien
caagttctggttatccgggtgggct

SEQ ID NO: 385595 - DNA, 25 bp, Homo sapien
ttggaaagcacttgaccacgctcgg

SEQ ID NO: 385596 - DNA, 25 bp, Homo sapien
tatgaaacttgcaacacacccagct

SEQ ID NO: 385597 - DNA, 25 bp, Homo sapien
tataataactgcaaagacgcccgtc

SEQ ID NO: 385598 - DNA, 25 bp, Homo sapien
tatgacttcgtagcttcaaatggcc

SEQ ID NO: 385599 - DNA, 25 bp, Homo sapien
gaagttccccagcacttagttgtcc

SEQ ID NO: 385600 - DNA, 25 bp, Homo sapien
gcctaaatggacagaagcggtctcg

SEQ ID NO: 385601 - DNA, 25 bp, Homo sapien
gcggtctcggatatatacatgattt

SEQ ID NO: 385602 - DNA, 25 bp, Homo sapien
gacagaagcggtctcggatatatac

SEQ ID NO: 385603 - DNA, 25 bp, Homo sapien
ctgggataagcctaaatggacagaa

SEQ ID NO: 385604 - DNA, 25 bp, Homo sapien
gaaacatgtccctttgtggagctct

SEQ ID NO: 385605 - DNA, 25 bp, Homo sapien
cgggttttggcagaatctcggaaca

SEQ ID NO: 385606 - DNA, 25 bp, Homo sapien
cataagcagatagtccgggttttgg

SEQ ID NO: 385607 - DNA, 25 bp, Homo sapien
taataccgtaacgtgcagaccagca

SEQ ID NO: 385608 - DNA, 25 bp, Homo sapien
aagtgttgtccactccgaggccgac

SEQ ID NO: 385609 - DNA, 25 bp, Homo sapien
cccttgctggcgatctgaggggact

SEQ ID NO: 385610 - DNA, 25 bp, Homo sapien
gtgttgtccactccgaggccgacca

SEQ ID NO: 385611 - DNA, 25 bp, Homo sapien
tggaagtgttgtccactccgaggcc

SEQ ID NO: 385612 - DNA, 25 bp, Homo sapien
gccaggaacagaactttgatctctg

SEQ ID NO: 385613 - DNA, 25 bp, Homo sapien
gagctctgaactgtctcccacactg

SEQ ID NO: 385614 - DNA, 25 bp, Homo sapien
agagctctgaactgtctcccacact

SEQ ID NO: 385615 - DNA, 25 bp, Homo sapien
cagagctctgaactgtctcccacac

SEQ ID NO: 385616 - DNA, 25 bp, Homo sapien
ggccgtgaggacagcggtcatctca

SEQ ID NO: 385617 - DNA, 25 bp, Homo sapien
tcatctcatcgtggtcagaaggatg

SEQ ID NO: 385618 - DNA, 25 bp, Homo sapien
cataaatactgttgcccgtgagctc

SEQ ID NO: 385619 - DNA, 25 bp, Homo sapien
cagaaggatggatgtattcataaat

SEQ ID NO: 385620 - DNA, 25 bp, Homo sapien
ggaattctgacccaagagcacgagg

SEQ ID NO: 385621 - DNA, 25 bp, Homo sapien
cgagttttaggcacggcatcttggt

SEQ ID NO: 385622 - DNA, 25 bp, Homo sapien
tagacccgtgatgctgtaatccctg

SEQ ID NO: 385623 - DNA, 25 bp, Homo sapien
ggttctggccaacaataggagcttg

SEQ ID NO: 385624 - DNA, 25 bp, Homo sapien
tattccaaccgcaccaatgtgttcc

SEQ ID NO: 385625 - DNA, 25 bp, Homo sapien
ttcccccatccttattccaaccgca

SEQ ID NO: 385626 - DNA, 25 bp, Homo sapien
cccatccttattccaaccgcaccaa

SEQ ID NO: 385627 - DNA, 25 bp, Homo sapien
tccttattccaaccgcaccaatgtg

SEQ ID NO: 385628 - DNA, 25 bp, Homo sapien
tccttttcgccaagacacatttcat

SEQ ID NO: 385629 - DNA, 25 bp, Homo sapien
gtcaggcccgcgttccttttcgcca

SEQ ID NO: 385630 - DNA, 25 bp, Homo sapien
gaaagaacgacctctctatctcata

SEQ ID NO: 385631 - DNA, 25 bp, Homo sapien
ttgtatccgctgcaggtcaggcccg

SEQ ID NO: 385632 - DNA, 25 bp, Homo sapien
cagctcctccccgcacccatgactc

SEQ ID NO: 385633 - DNA, 25 bp, Homo sapien
agctcctccccgcacccatgactcc

SEQ ID NO: 385634 - DNA, 25 bp, Homo sapien
agcctccaagagactgtgcaccacg

SEQ ID NO: 385635 - DNA, 25 bp, Homo sapien
tgctggagagctctacattagtggg

SEQ ID NO: 385636 - DNA, 25 bp, Homo sapien
gatgacgagtttgtgctcccgtgcc

SEQ ID NO: 385637 - DNA, 25 bp, Homo sapien
tctgcagacgctcttgaaaacacac

SEQ ID NO: 385638 - DNA, 25 bp, Homo sapien
catgaacatgttactgtacagcttg

SEQ ID NO: 385639 - DNA, 25 bp, Homo sapien
tacagcttgatctcggtgatggcac

SEQ ID NO: 385640 - DNA, 25 bp, Homo sapien
cagccccacaatctggtagcaggag

SEQ ID NO: 385641 - DNA, 25 bp, Homo sapien
caggagtcgtacagggacatgtcca

SEQ ID NO: 385642 - DNA, 25 bp, Homo sapien
tgatactgatattgcgagaaagctg

SEQ ID NO: 385643 - DNA, 25 bp, Homo sapien
gagaaagctgctacggtgagaaaga

SEQ ID NO: 385644 - DNA, 25 bp, Homo sapien
ctgctacggtgagaaagaacccact

SEQ ID NO: 385645 - DNA, 25 bp, Homo sapien
tattgcgagaaagctgctacggtga

SEQ ID NO: 385646 - DNA, 25 bp, Homo sapien
ggtatagggtcttctcgatcaggtc

SEQ ID NO: 385647 - DNA, 25 bp, Homo sapien
tggaacacgtcgcagccgtgcacgt

SEQ ID NO: 385648 - DNA, 25 bp, Homo sapien
cacgtgatggtatagggtcttctcg

SEQ ID NO: 385649 - DNA, 25 bp, Homo sapien
gtggtgtgcgtagcggaggtggaac

SEQ ID NO: 385650 - DNA, 25 bp, Homo sapien
acgcatctgtggacctagcggcctg

SEQ ID NO: 385651 - DNA, 25 bp, Homo sapien
cacgggtttctgtccatagagattt

SEQ ID NO: 385652 - DNA, 25 bp, Homo sapien
tctaacgtccctgagccaacagaag

SEQ ID NO: 385653 - DNA, 25 bp, Homo sapien
cgacaccctgggagtatcgagttcc

SEQ ID NO: 385654 - DNA, 25 bp, Homo sapien
tcagagtccccttggacaacttcaa

SEQ ID NO: 385655 - DNA, 25 bp, Homo sapien
ctttcagagtccccttggacaactt

SEQ ID NO: 385656 - DNA, 25 bp, Homo sapien
agcctgtgcctgcttgccctttcag

SEQ ID NO: 385657 - DNA, 25 bp, Homo sapien
ttcagagtccccttggacaacttca

SEQ ID NO: 385658 - DNA, 25 bp, Homo sapien
acagtagcaatcactgtcaatcttg

SEQ ID NO: 385659 - DNA, 25 bp, Homo sapien
cagctaaggtcagagtcacaggaca

SEQ ID NO: 385660 - DNA, 25 bp, Homo sapien
ttttctggttgtttctctagcacag

SEQ ID NO: 385661 - DNA, 25 bp, Homo sapien
tttctggttgtttctctagcacagc

SEQ ID NO: 385662 - DNA, 25 bp, Homo sapien
atgaagaccccgactctgaagaccc

SEQ ID NO: 385663 - DNA, 25 bp, Homo sapien
gaggcgtgtgacattccagttgagt

SEQ ID NO: 385664 - DNA, 25 bp, Homo sapien
ccctgcttgggagttgactgtcttc

SEQ ID NO: 385665 - DNA, 25 bp, Homo sapien
tctagctttggagaggcgtgtgaca

SEQ ID NO: 385666 - DNA, 25 bp, Homo sapien
agagtgaggcctccacaatcacaaa

SEQ ID NO: 385667 - DNA, 25 bp, Homo sapien
gagagtgaggcctccacaatcacaa

SEQ ID NO: 385668 - DNA, 25 bp, Homo sapien
gtgaggcctccacaatcacaaagct

SEQ ID NO: 385669 - DNA, 25 bp, Homo sapien
gaggcctccacaatcacaaagctcc

SEQ ID NO: 385670 - DNA, 25 bp, Homo sapien
agccacggggccagctctagctgat

SEQ ID NO: 385671 - DNA, 25 bp, Homo sapien
ggccagctctagctgatggagttga

SEQ ID NO: 385672 - DNA, 25 bp, Homo sapien
tgaaagacttgagtctcaggtctgc

SEQ ID NO: 385673 - DNA, 25 bp, Homo sapien
tccagctacactcggttgtggcaga

SEQ ID NO: 385674 - DNA, 25 bp, Homo sapien
gctctcggtgacctcacccactgcc

SEQ ID NO: 385675 - DNA, 25 bp, Homo sapien
cccacgacagatgcgtctgggcatc

SEQ ID NO: 385676 - DNA, 25 bp, Homo sapien
acagatgcgtctgggcatctcactg

SEQ ID NO: 385677 - DNA, 25 bp, Homo sapien
acccactgcccacgacagatgcgtc

SEQ ID NO: 385678 - DNA, 25 bp, Homo sapien
gaggtgccccctcgcctgacctctg

SEQ ID NO: 385679 - DNA, 25 bp, Homo sapien
gacctctgcaaacctgtgctcccca

SEQ ID NO: 385680 - DNA, 25 bp, Homo sapien
tctttaggggctgcgatttcttcag

SEQ ID NO: 385681 - DNA, 25 bp, Homo sapien
accacaccgacatgacgcccgcatg

SEQ ID NO: 385682 - DNA, 25 bp, Homo sapien
gatacatggtgtctacttccagctc

SEQ ID NO: 385683 - DNA, 25 bp, Homo sapien
gggtctctcccggaccatgcagaga

SEQ ID NO: 385684 - DNA, 25 bp, Homo sapien
cagtgttgcgtaacgagcatgccac

SEQ ID NO: 385685 - DNA, 25 bp, Homo sapien
gctcaagggtataggcaaaggccat

SEQ ID NO: 385686 - DNA, 25 bp, Homo sapien
aggaggtttaaccagaatgaaatgg

SEQ ID NO: 385687 - DNA, 25 bp, Homo sapien
acgaggaggaggtttaaccagaatg

SEQ ID NO: 385688 - DNA, 25 bp, Homo sapien
ttttacatgggagagaagattgtgg

SEQ ID NO: 385689 - DNA, 25 bp, Homo sapien
aggcaggaatccagtctccatcaag

SEQ ID NO: 385690 - DNA, 25 bp, Homo sapien
aaaatgacagataattttcactttc

SEQ ID NO: 385691 - DNA, 25 bp, Homo sapien
tttcttcttttcagctttccttgac

SEQ ID NO: 385692 - DNA, 25 bp, Homo sapien
tgaaaatgacagataattttcactt

SEQ ID NO: 385693 - DNA, 25 bp, Homo sapien
tcactttcttcttttcagctttcct

SEQ ID NO: 385694 - DNA, 25 bp, Homo sapien
gataatcagtccttacttcatatgg

SEQ ID NO: 385695 - DNA, 25 bp, Homo sapien
taccccctccaacaaactgtgtgat

SEQ ID NO: 385696 - DNA, 25 bp, Homo sapien
tgaaaaagtgggcacgtgcatacac

SEQ ID NO: 385697 - DNA, 25 bp, Homo sapien
tgtgtgatcctagactagctaccaa

SEQ ID NO: 385698 - DNA, 25 bp, Homo sapien
gcacaagtctagaaagacacccttg

SEQ ID NO: 385699 - DNA, 25 bp, Homo sapien
actggcccctggacctaactagcag

SEQ ID NO: 385700 - DNA, 25 bp, Homo sapien
acacccttggatgtctgggtcctca

SEQ ID NO: 385701 - DNA, 25 bp, Homo sapien
gaggaaagtgccagaacccgcaggt

SEQ ID NO: 385702 - DNA, 25 bp, Homo sapien
ctgcaagcacaaggtgacaggagtc

SEQ ID NO: 385703 - DNA, 25 bp, Homo sapien
tgtgcaccacggtggcgtagctctg

SEQ ID NO: 385704 - DNA, 25 bp, Homo sapien
taattgacactcacgatgcagtggg

SEQ ID NO: 385705 - DNA, 25 bp, Homo sapien
gcttggacagcagccggtagtactt

SEQ ID NO: 385706 - DNA, 25 bp, Homo sapien
acgagcggctgttgtgcaccacggt

SEQ ID NO: 385707 - DNA, 25 bp, Homo sapien
gcggcatggcaagggtcacagcctg

SEQ ID NO: 385708 - DNA, 25 bp, Homo sapien
ggagcaaggtgattgaacgtacaat

SEQ ID NO: 385709 - DNA, 25 bp, Homo sapien
taaagtgcaaacgagaactcttttc

SEQ ID NO: 385710 - DNA, 25 bp, Homo sapien
cccatgtaaagtgcaaacgagaact

SEQ ID NO: 385711 - DNA, 25 bp, Homo sapien
ctcagcagggtcatgttcacacaag

SEQ ID NO: 385712 - DNA, 25 bp, Homo sapien
tcagcagggtcatgttcacacaagg

SEQ ID NO: 385713 - DNA, 25 bp, Homo sapien
aactcagcagggtcatgttcacaca

SEQ ID NO: 385714 - DNA, 25 bp, Homo sapien
agcagggtcatgttcacacaaggag

SEQ ID NO: 385715 - DNA, 25 bp, Homo sapien
gtgcattctcacatcgggggcccat

SEQ ID NO: 385716 - DNA, 25 bp, Homo sapien
caggaggcaagagtccgggactctt

SEQ ID NO: 385717 - DNA, 25 bp, Homo sapien
aagagtccgggactcttcacaggtc

SEQ ID NO: 385718 - DNA, 25 bp, Homo sapien
cctgaccaccagctttgtgcattct

SEQ ID NO: 385719 - DNA, 25 bp, Homo sapien
aatttcctagtttcttgtgaggtag

SEQ ID NO: 385720 - DNA, 25 bp, Homo sapien
cttgtgaggtagacaaggcggtcct

SEQ ID NO: 385721 - DNA, 25 bp, Homo sapien
gacaaggcggtcctccaggagtcct

SEQ ID NO: 385722 - DNA, 25 bp, Homo sapien
taagggtttgttctcagctttgtct

SEQ ID NO: 385723 - DNA, 25 bp, Homo sapien
caagggctgcccctaccctcgccac

SEQ ID NO: 385724 - DNA, 25 bp, Homo sapien
catccaagggctgcccctaccctcg

SEQ ID NO: 385725 - DNA, 25 bp, Homo sapien
tgcccctaccctcgccaccactgca

SEQ ID NO: 385726 - DNA, 25 bp, Homo sapien
ccaaccccatccaagggctgcccct

SEQ ID NO: 385727 - DNA, 25 bp, Homo sapien
tggcaaagaagatggatgaagggcc

SEQ ID NO: 385728 - DNA, 25 bp, Homo sapien
ctgcatggcaaagaagatggatgaa

SEQ ID NO: 385729 - DNA, 25 bp, Homo sapien
catggcaaagaagatggatgaaggg

SEQ ID NO: 385730 - DNA, 25 bp, Homo sapien
agaagatggatgaagggccagcgag

SEQ ID NO: 385731 - DNA, 25 bp, Homo sapien
gaacttggccggcaacattggcttt

SEQ ID NO: 385732 - DNA, 25 bp, Homo sapien
gctcaggaaaaagcgtgccacctca

SEQ ID NO: 385733 - DNA, 25 bp, Homo sapien
taggatggcgtgtacagaaggtcac

SEQ ID NO: 385734 - DNA, 25 bp, Homo sapien
cctagcagtgttcgccggtggctct

SEQ ID NO: 385735 - DNA, 25 bp, Homo sapien
ttccccacgagcagacctgacccac

SEQ ID NO: 385736 - DNA, 25 bp, Homo sapien
cttccccacgagcagacctgaccca

SEQ ID NO: 385737 - DNA, 25 bp, Homo sapien
cgccatggctgcttcggctcccggc

SEQ ID NO: 385738 - DNA, 25 bp, Homo sapien
tggctgcttcggctcccggccgtgc

SEQ ID NO: 385739 - DNA, 25 bp, Homo sapien
atggctgcttcggctcccggccgtg

SEQ ID NO: 385740 - DNA, 25 bp, Homo sapien
ccatggctgcttcggctcccggccg

SEQ ID NO: 385741 - DNA, 25 bp, Homo sapien
tgcccaaagcgtgagggttctgtct

SEQ ID NO: 385742 - DNA, 25 bp, Homo sapien
cccaaagcgtgagggttctgtctcc

SEQ ID NO: 385743 - DNA, 25 bp, Homo sapien
agcagaaagagggcaagtttgccca

SEQ ID NO: 385744 - DNA, 25 bp, Homo sapien
caaagcgtgagggttctgtctccat

SEQ ID NO: 385745 - DNA, 25 bp, Homo sapien
tgcattgagagcaagaaagcacagc

SEQ ID NO: 385746 - DNA, 25 bp, Homo sapien
gcattgagagcaagaaagcacagca

SEQ ID NO: 385747 - DNA, 25 bp, Homo sapien
ctgcattgagagcaagaaagcacag

SEQ ID NO: 385748 - DNA, 25 bp, Homo sapien
gccctttatactgtcactagtgtcc

SEQ ID NO: 385749 - DNA, 25 bp, Homo sapien
tatactgtcactagtgtccccgagg

SEQ ID NO: 385750 - DNA, 25 bp, Homo sapien
ctgtcactagtgtccccgaggcagg

SEQ ID NO: 385751 - DNA, 25 bp, Homo sapien
ctttatactgtcactagtgtccccg

SEQ ID NO: 385752 - DNA, 25 bp, Homo sapien
ccctgggttggtgagtggcatttct

SEQ ID NO: 385753 - DNA, 25 bp, Homo sapien
gccaataggccgtttgtctcaaata

SEQ ID NO: 385754 - DNA, 25 bp, Homo sapien
aactagcatgtacagggcaggtccc

SEQ ID NO: 385755 - DNA, 25 bp, Homo sapien
cgtgtccttgggagtaggcacatca

SEQ ID NO: 385756 - DNA, 25 bp, Homo sapien
ctgccaccaggagaaggtgaaaggc

SEQ ID NO: 385757 - DNA, 25 bp, Homo sapien
accaggagaaggtgaaaggccattc

SEQ ID NO: 385758 - DNA, 25 bp, Homo sapien
aggagaaggtgaaaggccattcctt

SEQ ID NO: 385759 - DNA, 25 bp, Homo sapien
tgccaccaggagaaggtgaaaggcc

SEQ ID NO: 385760 - DNA, 25 bp, Homo sapien
cgagcaaacaggagtcagtctgcgt

SEQ ID NO: 385761 - DNA, 25 bp, Homo sapien
ctggcggtatctccgcagaggacat

SEQ ID NO: 385762 - DNA, 25 bp, Homo sapien
aacaggagtcagtctgcgtcctggg

SEQ ID NO: 385763 - DNA, 25 bp, Homo sapien
ctggggttggtccagcgagcaaaca

SEQ ID NO: 385764 - DNA, 25 bp, Homo sapien
ccacattttagtggcactgcaggca

SEQ ID NO: 385765 - DNA, 25 bp, Homo sapien
cggtctacactctgagcggcagtta

SEQ ID NO: 385766 - DNA, 25 bp, Homo sapien
cagcttgttggcaggcttgtcgcaa

SEQ ID NO: 385767 - DNA, 25 bp, Homo sapien
taggtctcggtgcaatgggaataca

SEQ ID NO: 385768 - DNA, 25 bp, Homo sapien
gatgcaaatctaagggatccgtggc

SEQ ID NO: 385769 - DNA, 25 bp, Homo sapien
tgttcacgggtatggcagatgcaaa

SEQ ID NO: 385770 - DNA, 25 bp, Homo sapien
ccttggttatatgaggggcccaaga

SEQ ID NO: 385771 - DNA, 25 bp, Homo sapien
tatgaggggcccaagatgttcacgg

SEQ ID NO: 385772 - DNA, 25 bp, Homo sapien
ttggtgatgatgaccgaggcgccca

SEQ ID NO: 385773 - DNA, 25 bp, Homo sapien
agcgcgggctcctcgcggtagtggc

SEQ ID NO: 385774 - DNA, 25 bp, Homo sapien
gtagtggccgcagctcgggaagctc

SEQ ID NO: 385775 - DNA, 25 bp, Homo sapien
gccgggccagcacgcggtggtagtt

SEQ ID NO: 385776 - DNA, 25 bp, Homo sapien
tattaggttgccacagtaacagctc

SEQ ID NO: 385777 - DNA, 25 bp, Homo sapien
gaaaaatgtcggtggtatctcctag

SEQ ID NO: 385778 - DNA, 25 bp, Homo sapien
taaaagggctcgtgacacaggcgtc

SEQ ID NO: 385779 - DNA, 25 bp, Homo sapien
gaagtcaagaaacgctatccccagc

SEQ ID NO: 385780 - DNA, 25 bp, Homo sapien
caagggaggcggaaaatacaggctc

SEQ ID NO: 385781 - DNA, 25 bp, Homo sapien
tagcattctagataacacaagggcc

SEQ ID NO: 385782 - DNA, 25 bp, Homo sapien
ccactcttagggcttagggcggaag

SEQ ID NO: 385783 - DNA, 25 bp, Homo sapien
gatccattggccgtattaaacctcc

SEQ ID NO: 385784 - DNA, 25 bp, Homo sapien
ggtcgccccttgccctggagtctgg

SEQ ID NO: 385785 - DNA, 25 bp, Homo sapien
cctgatgtgagagcaagtggccgac

SEQ ID NO: 385786 - DNA, 25 bp, Homo sapien
ctggcactgggaactctgctaggga

SEQ ID NO: 385787 - DNA, 25 bp, Homo sapien
actgcagcaggctgacgttgcctga

SEQ ID NO: 385788 - DNA, 25 bp, Homo sapien
aaaatcgtggttgagtttcactgca

SEQ ID NO: 385789 - DNA, 25 bp, Homo sapien
ttgtcaaaggctatggagatgttcc

SEQ ID NO: 385790 - DNA, 25 bp, Homo sapien
gaagtgtggccttgtcaaaggctat

SEQ ID NO: 385791 - DNA, 25 bp, Homo sapien
tccctcacgcaggagactcagttgt

SEQ ID NO: 385792 - DNA, 25 bp, Homo sapien
gatgttccgggcatactgctgtgct

SEQ ID NO: 385793 - DNA, 25 bp, Homo sapien
taatataaggcaagccctctctcag

SEQ ID NO: 385794 - DNA, 25 bp, Homo sapien
tgtaatataaggcaagccctctctc

SEQ ID NO: 385795 - DNA, 25 bp, Homo sapien
gtaatataaggcaagccctctctca

SEQ ID NO: 385796 - DNA, 25 bp, Homo sapien
tccaggtcttacccagtcaggctaa

SEQ ID NO: 385797 - DNA, 25 bp, Homo sapien
ccaggtcttacccagtcaggctaat

SEQ ID NO: 385798 - DNA, 25 bp, Homo sapien
gtcttacccagtcaggctaattcca

SEQ ID NO: 385799 - DNA, 25 bp, Homo sapien
aggtcttacccagtcaggctaattc

SEQ ID NO: 385800 - DNA, 25 bp, Homo sapien
ggtgtggccccatagcgaagtctaa

SEQ ID NO: 385801 - DNA, 25 bp, Homo sapien
ccaaaatatgctcttgcgcccaggc

SEQ ID NO: 385802 - DNA, 25 bp, Homo sapien
gcaagactgtgcagctcacggaata

SEQ ID NO: 385803 - DNA, 25 bp, Homo sapien
caagagttactgtccacccggtggt

SEQ ID NO: 385804 - DNA, 25 bp, Homo sapien
tggtccctaaccagatgtcaccgtc

SEQ ID NO: 385805 - DNA, 25 bp, Homo sapien
ttttgtgtggccttcactaggaccc

SEQ ID NO: 385806 - DNA, 25 bp, Homo sapien
ctttgattgaaataggcccctgttg

SEQ ID NO: 385807 - DNA, 25 bp, Homo sapien
tgtcaccgtcagcacacaaatcatg

SEQ ID NO: 385808 - DNA, 25 bp, Homo sapien
tgggaggttgaggagggcaggagtt

SEQ ID NO: 385809 - DNA, 25 bp, Homo sapien
aaagtagccagacatggtgatgggt

SEQ ID NO: 385810 - DNA, 25 bp, Homo sapien
agaccagcctggccaacatggtgaa

SEQ ID NO: 385811 - DNA, 25 bp, Homo sapien
tgaaaccccatctctactaaaaaca

SEQ ID NO: 385812 - DNA, 25 bp, Homo sapien
ctgcctcaatctcccacatagctgg

SEQ ID NO: 385813 - DNA, 25 bp, Homo sapien
tttgagttggagtctctatgttgcc

SEQ ID NO: 385814 - DNA, 25 bp, Homo sapien
ttgagttggagtctctatgttgcct

SEQ ID NO: 385815 - DNA, 25 bp, Homo sapien
ctcctgcctcaatctcccacatagc

SEQ ID NO: 385816 - DNA, 25 bp, Homo sapien
aagagaatcattctacgatactgtt

SEQ ID NO: 385817 - DNA, 25 bp, Homo sapien
tgggacttacctagatgacttatgt

SEQ ID NO: 385818 - DNA, 25 bp, Homo sapien
tacacttttaatgagaagtgggact

SEQ ID NO: 385819 - DNA, 25 bp, Homo sapien
tacatcattgtaagagctccaaaat

SEQ ID NO: 385820 - DNA, 25 bp, Homo sapien
cagaagtcgggcctcttctgcccct

SEQ ID NO: 385821 - DNA, 25 bp, Homo sapien
gtcagaagtcgggcctcttctgccc

SEQ ID NO: 385822 - DNA, 25 bp, Homo sapien
ctgtcagaagtcgggcctcttctgc

SEQ ID NO: 385823 - DNA, 25 bp, Homo sapien
tgtcagaagtcgggcctcttctgcc

SEQ ID NO: 385824 - DNA, 25 bp, Homo sapien
tctgaaagctgaatccactgggctc

SEQ ID NO: 385825 - DNA, 25 bp, Homo sapien
ctgaaagctgaatccactgggctcc

SEQ ID NO: 385826 - DNA, 25 bp, Homo sapien
gatcttgtggaggatccggagactc

SEQ ID NO: 385827 - DNA, 25 bp, Homo sapien
aagatcttgtggaggatccggagac

SEQ ID NO: 385828 - DNA, 25 bp, Homo sapien
ctgaaaaggggggtgagaagatctt

SEQ ID NO: 385829 - DNA, 25 bp, Homo sapien
aaggggggtgagaagatcttgtgga

SEQ ID NO: 385830 - DNA, 25 bp, Homo sapien
acgtgagtcggtgtccatcctctga

SEQ ID NO: 385831 - DNA, 25 bp, Homo sapien
aaatagcggcagcacttcccagtag

SEQ ID NO: 385832 - DNA, 25 bp, Homo sapien
tgtggacactctccaccaagagccg

SEQ ID NO: 385833 - DNA, 25 bp, Homo sapien
agaaacactgttcgcagacatctgc

SEQ ID NO: 385834 - DNA, 25 bp, Homo sapien
gggcccaagtggccgggtggagctg

SEQ ID NO: 385835 - DNA, 25 bp, Homo sapien
tgtaggaaggaattcgttaccttca

SEQ ID NO: 385836 - DNA, 25 bp, Homo sapien
gaacgaaaatctgttgtagaattgg

SEQ ID NO: 385837 - DNA, 25 bp, Homo sapien
tggattccgaaccaggtttcgttca

SEQ ID NO: 385838 - DNA, 25 bp, Homo sapien
catggagcaaagccctgcctgaaag

SEQ ID NO: 385839 - DNA, 25 bp, Homo sapien
gggccataaacccagcgtgtcatgg

SEQ ID NO: 385840 - DNA, 25 bp, Homo sapien
tgtagtcgatacctgcagctctcag

SEQ ID NO: 385841 - DNA, 25 bp, Homo sapien
catgctgagcctgtagtcgatacct

SEQ ID NO: 385842 - DNA, 25 bp, Homo sapien
gacagacacaggatccaactcagaa

SEQ ID NO: 385843 - DNA, 25 bp, Homo sapien
agacagacacaggatccaactcaga

SEQ ID NO: 385844 - DNA, 25 bp, Homo sapien
agtgtccctgttgaaacagggttga

SEQ ID NO: 385845 - DNA, 25 bp, Homo sapien
ttctcctctcctagcagaagtgtcc

SEQ ID NO: 385846 - DNA, 25 bp, Homo sapien
agaagtgtccctgttgaaacagggt

SEQ ID NO: 385847 - DNA, 25 bp, Homo sapien
ccattctcctctcctagcagaagtg

SEQ ID NO: 385848 - DNA, 25 bp, Homo sapien
tcctgacacctttggcggtatggta

SEQ ID NO: 385849 - DNA, 25 bp, Homo sapien
attttggaacgttcccagtgtgtct

SEQ ID NO: 385850 - DNA, 25 bp, Homo sapien
tgttggcaaagcagtctttggagcc

SEQ ID NO: 385851 - DNA, 25 bp, Homo sapien
ccttccttatttgagcgtgtttcct

SEQ ID NO: 385852 - DNA, 25 bp, Homo sapien
ggttggtgtgtactcggctccggca

SEQ ID NO: 385853 - DNA, 25 bp, Homo sapien
ttctcgcaaatgctgaaagcggtct

SEQ ID NO: 385854 - DNA, 25 bp, Homo sapien
ggtctcactgaacagtcaccgctgc

SEQ ID NO: 385855 - DNA, 25 bp, Homo sapien
ttggccgacccagcaggaacttggc

SEQ ID NO: 385856 - DNA, 25 bp, Homo sapien
cacgtgttgtaacagctctgtggtt

SEQ ID NO: 385857 - DNA, 25 bp, Homo sapien
accacgtgttgtaacagctctgtgg

SEQ ID NO: 385858 - DNA, 25 bp, Homo sapien
ccacgtgttgtaacagctctgtggt

SEQ ID NO: 385859 - DNA, 25 bp, Homo sapien
caccacgtgttgtaacagctctgtg

SEQ ID NO: 385860 - DNA, 25 bp, Homo sapien
catgagtcactctagaaagcctggg

SEQ ID NO: 385861 - DNA, 25 bp, Homo sapien
tcactctagaaagcctgggggtcac

SEQ ID NO: 385862 - DNA, 25 bp, Homo sapien
tgagtcactctagaaagcctggggg

SEQ ID NO: 385863 - DNA, 25 bp, Homo sapien
gtcactctagaaagcctgggggtca

SEQ ID NO: 385864 - DNA, 25 bp, Homo sapien
gcagaagacgaagcgcatttccttt

SEQ ID NO: 385865 - DNA, 25 bp, Homo sapien
gagcaccgtcaatgtgtcctcgcag

SEQ ID NO: 385866 - DNA, 25 bp, Homo sapien
cttttttgcggttccagtgtgatga

SEQ ID NO: 385867 - DNA, 25 bp, Homo sapien
gcttggtcaccatgcttcgtgtttg

SEQ ID NO: 385868 - DNA, 25 bp, Homo sapien
gaagtctattccatgctgaacatcg

SEQ ID NO: 385869 - DNA, 25 bp, Homo sapien
cctgtgcgagcgtttctggaatcca

SEQ ID NO: 385870 - DNA, 25 bp, Homo sapien
acttctgcacacaaggtcgccctgt

SEQ ID NO: 385871 - DNA, 25 bp, Homo sapien
caaaggccggcttgtcaatggaaga

SEQ ID NO: 385872 - DNA, 25 bp, Homo sapien
taccgtacctgctgggagcgttgca

SEQ ID NO: 385873 - DNA, 25 bp, Homo sapien
tcagatgagtggcagttaccgtacc

SEQ ID NO: 385874 - DNA, 25 bp, Homo sapien
gcgttgcattgaacccagggaccag

SEQ ID NO: 385875 - DNA, 25 bp, Homo sapien
caagaggaactaatggaccccgtgg

SEQ ID NO: 385876 - DNA, 25 bp, Homo sapien
tttaccaagaggtcacggagagccc

SEQ ID NO: 385877 - DNA, 25 bp, Homo sapien
taccaagaggtcacggagagcccct

SEQ ID NO: 385878 - DNA, 25 bp, Homo sapien
aagaggtcacggagagcccctcttc

SEQ ID NO: 385879 - DNA, 25 bp, Homo sapien
attttaccaagaggtcacggagagc

SEQ ID NO: 385880 - DNA, 25 bp, Homo sapien
tctcgctttgtagaaggatgcgctt

SEQ ID NO: 385881 - DNA, 25 bp, Homo sapien
tcaagcctctcgctttgtagaagga

SEQ ID NO: 385882 - DNA, 25 bp, Homo sapien
gaaggatgcgcttcctcatgtttgt

SEQ ID NO: 385883 - DNA, 25 bp, Homo sapien
ttgtagaaggatgcgcttcctcatg

SEQ ID NO: 385884 - DNA, 25 bp, Homo sapien
ttctaagggaaattatgagccgcct

SEQ ID NO: 385885 - DNA, 25 bp, Homo sapien
cttgtaattatgttggcatcagatg

SEQ ID NO: 385886 - DNA, 25 bp, Homo sapien
gcagtgtggtagaattctttcagga

SEQ ID NO: 385887 - DNA, 25 bp, Homo sapien
gcatcagatgttggcatcctttgaa

SEQ ID NO: 385888 - DNA, 25 bp, Homo sapien
cctgaagtcagcgtttccgatagct

SEQ ID NO: 385889 - DNA, 25 bp, Homo sapien
gctcattttctatatctacaacaca

SEQ ID NO: 385890 - DNA, 25 bp, Homo sapien
tccacttcctgaagtcagcgtttcc

SEQ ID NO: 385891 - DNA, 25 bp, Homo sapien
agcgtttccgatagctcattttcta

SEQ ID NO: 385892 - DNA, 25 bp, Homo sapien
taggcggcttggacatctcgcagaa

SEQ ID NO: 385893 - DNA, 25 bp, Homo sapien
tcgcagaatacatcaaacagtaggg

SEQ ID NO: 385894 - DNA, 25 bp, Homo sapien
tagaacagctcatttcagttcccag

SEQ ID NO: 385895 - DNA, 25 bp, Homo sapien
tgacccttagccagctgtaggcggc

SEQ ID NO: 385896 - DNA, 25 bp, Homo sapien
catctccatgggtcgcacagcctgg

SEQ ID NO: 385897 - DNA, 25 bp, Homo sapien
ggtcatctccatgggtcgcacagcc

SEQ ID NO: 385898 - DNA, 25 bp, Homo sapien
ggtggtcatctccatgggtcgcaca

SEQ ID NO: 385899 - DNA, 25 bp, Homo sapien
tggtcatctccatgggtcgcacagc

SEQ ID NO: 385900 - DNA, 25 bp, Homo sapien
tggccccctgcccaaggtggtgtca

SEQ ID NO: 385901 - DNA, 25 bp, Homo sapien
cagctcggggtgaaagaaattcgcc

SEQ ID NO: 385902 - DNA, 25 bp, Homo sapien
tcgccgtcacccaagtggactgtct

SEQ ID NO: 385903 - DNA, 25 bp, Homo sapien
ggtgaaagaaattcgccgtcaccca

SEQ ID NO: 385904 - DNA, 25 bp, Homo sapien
ctgtggcattgccgacgtctggaga

SEQ ID NO: 385905 - DNA, 25 bp, Homo sapien
attgccgacgtctggagatggtgga

SEQ ID NO: 385906 - DNA, 25 bp, Homo sapien
gcattgccgacgtctggagatggtg

SEQ ID NO: 385907 - DNA, 25 bp, Homo sapien
tcatgctgtggcattgccgacgtct

SEQ ID NO: 385908 - DNA, 25 bp, Homo sapien
gagtactgaactctggagatccacg

SEQ ID NO: 385909 - DNA, 25 bp, Homo sapien
gaaaagcagagtttcgttcagcacc

SEQ ID NO: 385910 - DNA, 25 bp, Homo sapien
gagtgccatcagtgtagcgagtact

SEQ ID NO: 385911 - DNA, 25 bp, Homo sapien
gctccagtgaagcataacgatccat

SEQ ID NO: 385912 - DNA, 25 bp, Homo sapien
tgtgcatagtcagggaaatctttgt

SEQ ID NO: 385913 - DNA, 25 bp, Homo sapien
ctggctatgtgcatagtcagggaaa

SEQ ID NO: 385914 - DNA, 25 bp, Homo sapien
catagtcagggaaatctttgtcttc

SEQ ID NO: 385915 - DNA, 25 bp, Homo sapien
tgctgagattctggctatgtgcata

SEQ ID NO: 385916 - DNA, 25 bp, Homo sapien
ggacttttgtgggactctgctacga

SEQ ID NO: 385917 - DNA, 25 bp, Homo sapien
ccagaatagttttgtcacagtgact

SEQ ID NO: 385918 - DNA, 25 bp, Homo sapien
taagtggggccgtgttccagaatag

SEQ ID NO: 385919 - DNA, 25 bp, Homo sapien
tctgctacgaatacaagcaaaccgt

SEQ ID NO: 385920 - DNA, 25 bp, Homo sapien
tgagccggtgtctgccaaatgttat

SEQ ID NO: 385921 - DNA, 25 bp, Homo sapien
aattagacttgcattgagccggtgt

SEQ ID NO: 385922 - DNA, 25 bp, Homo sapien
tgttatttttagaagccttctcacc

SEQ ID NO: 385923 - DNA, 25 bp, Homo sapien
tcattaactaagaagcaaattagac

SEQ ID NO: 385924 - DNA, 25 bp, Homo sapien
ttccctggctggcttgtagaccccg

SEQ ID NO: 385925 - DNA, 25 bp, Homo sapien
gctggcttgtagaccccgactggcc

SEQ ID NO: 385926 - DNA, 25 bp, Homo sapien
tggctggcttgtagaccccgactgg

SEQ ID NO: 385927 - DNA, 25 bp, Homo sapien
cctggctggcttgtagaccccgact

SEQ ID NO: 385928 - DNA, 25 bp, Homo sapien
gtgcctgcgggctcttacggccata

SEQ ID NO: 385929 - DNA, 25 bp, Homo sapien
agcacccggcattcctacatggtct

SEQ ID NO: 385930 - DNA, 25 bp, Homo sapien
tagcgtccgtgatcggacaagcagg

SEQ ID NO: 385931 - DNA, 25 bp, Homo sapien
gcattcctacatggtctcccatgca

SEQ ID NO: 385932 - DNA, 25 bp, Homo sapien
tgctgctgaaggcttccccacaaac

SEQ ID NO: 385933 - DNA, 25 bp, Homo sapien
attgctgctgaaggcttccccacaa

SEQ ID NO: 385934 - DNA, 25 bp, Homo sapien
ctgagcagcattgctgctgaaggct

SEQ ID NO: 385935 - DNA, 25 bp, Homo sapien
ctgctgaaggcttccccacaaacat

SEQ ID NO: 385936 - DNA, 25 bp, Homo sapien
gctgtagagtggactctgcatgaat

SEQ ID NO: 385937 - DNA, 25 bp, Homo sapien
aatattgattgagtaaatatgcgac

SEQ ID NO: 385938 - DNA, 25 bp, Homo sapien
gagcctgctgtagagtggactctgc

SEQ ID NO: 385939 - DNA, 25 bp, Homo sapien
tggactctgcatgaatattgattga

SEQ ID NO: 385940 - DNA, 25 bp, Homo sapien
tgtagggtccagaatttttctcgtg

SEQ ID NO: 385941 - DNA, 25 bp, Homo sapien
gagattgtagggtccagaatttttc

SEQ ID NO: 385942 - DNA, 25 bp, Homo sapien
caaagggcagtctcttgtggtaggg

SEQ ID NO: 385943 - DNA, 25 bp, Homo sapien
gaatttttctcgtggttgccttcat

SEQ ID NO: 385944 - DNA, 25 bp, Homo sapien
ttctgccattgctgaattccttcct

SEQ ID NO: 385945 - DNA, 25 bp, Homo sapien
tccaggtccaagagatgtgatgtag

SEQ ID NO: 385946 - DNA, 25 bp, Homo sapien
gtgatgtaggctctataaggctcat

SEQ ID NO: 385947 - DNA, 25 bp, Homo sapien
tcagccatgcgagagcagcgatggt

SEQ ID NO: 385948 - DNA, 25 bp, Homo sapien
gacaaagtcgtcgtgccagccaatt

SEQ ID NO: 385949 - DNA, 25 bp, Homo sapien
gcttgtacggtacaacgctccgtgg

SEQ ID NO: 385950 - DNA, 25 bp, Homo sapien
cctttccagagtgtgagtgccagac

SEQ ID NO: 385951 - DNA, 25 bp, Homo sapien
cactcacatggtagcctggtggaag

SEQ ID NO: 385952 - DNA, 25 bp, Homo sapien
cagagccttcacttcgtctcctgga

SEQ ID NO: 385953 - DNA, 25 bp, Homo sapien
gagccttcacttcgtctcctggagc

SEQ ID NO: 385954 - DNA, 25 bp, Homo sapien
gactagggtggatggacttctccca

SEQ ID NO: 385955 - DNA, 25 bp, Homo sapien
gctgtctcccagactagggtggatg

SEQ ID NO: 385956 - DNA, 25 bp, Homo sapien
ttcattggaagaaactgtcccttgg

SEQ ID NO: 385957 - DNA, 25 bp, Homo sapien
tggagagagggaggttgtactatac

SEQ ID NO: 385958 - DNA, 25 bp, Homo sapien
tcagacacaacctgtgcggtgcctc

SEQ ID NO: 385959 - DNA, 25 bp, Homo sapien
gacacaacctgtgcggtgcctcagt

SEQ ID NO: 385960 - DNA, 25 bp, Homo sapien
agatcgtcccgatgagtgtccagct

SEQ ID NO: 385961 - DNA, 25 bp, Homo sapien
tagttccaccattgggcaggtccca

SEQ ID NO: 385962 - DNA, 25 bp, Homo sapien
gctcaatcaaaatcacggcaggtat

SEQ ID NO: 385963 - DNA, 25 bp, Homo sapien
agagtatattccctgtccaccatgg

SEQ ID NO: 385964 - DNA, 25 bp, Homo sapien
gggagtcctaagttaaagtctcagc

SEQ ID NO: 385965 - DNA, 25 bp, Homo sapien
gctcttataacttgaggcatcccct

SEQ ID NO: 385966 - DNA, 25 bp, Homo sapien
tggtaaagctataacgggagtccta

SEQ ID NO: 385967 - DNA, 25 bp, Homo sapien
taggtgctcagtagtagtagtttcg

SEQ ID NO: 385968 - DNA, 25 bp, Homo sapien
taacatagtatagaacctgccgtgg

SEQ ID NO: 385969 - DNA, 25 bp, Homo sapien
ctgatatgcttggaatcctggtgga

SEQ ID NO: 385970 - DNA, 25 bp, Homo sapien
tggagtgttcgaggtggattctgca

SEQ ID NO: 385971 - DNA, 25 bp, Homo sapien
tctgcaagtcgtggcaatctccctg

SEQ ID NO: 385972 - DNA, 25 bp, Homo sapien
ggaaagtcgaatgagttccatgccc

SEQ ID NO: 385973 - DNA, 25 bp, Homo sapien
gcttcccacgctaacagtagtggtg

SEQ ID NO: 385974 - DNA, 25 bp, Homo sapien
ggtgctgtcccatcaacacggaata

SEQ ID NO: 385975 - DNA, 25 bp, Homo sapien
cacggaatatgtgtggcccctctgg

SEQ ID NO: 385976 - DNA, 25 bp, Homo sapien
tctgcatgaggggtattccgtcact

SEQ ID NO: 385977 - DNA, 25 bp, Homo sapien
tcactgtgagatcccaaacgccaca

SEQ ID NO: 385978 - DNA, 25 bp, Homo sapien
tgagatcccaaacgccacatttttt

SEQ ID NO: 385979 - DNA, 25 bp, Homo sapien
gggtattccgtcactgtgagatccc

SEQ ID NO: 385980 - DNA, 25 bp, Homo sapien
gtggaagcgattagacctgtcataa

SEQ ID NO: 385981 - DNA, 25 bp, Homo sapien
ctggagacacaggtggaagcgatta

SEQ ID NO: 385982 - DNA, 25 bp, Homo sapien
tctggaggcgaagtgaatagattga

SEQ ID NO: 385983 - DNA, 25 bp, Homo sapien
gagcttgacagtgttgtcctaaaga

SEQ ID NO: 385984 - DNA, 25 bp, Homo sapien
tgctggagaggatgggcttccaaaa

SEQ ID NO: 385985 - DNA, 25 bp, Homo sapien
agaggatgggcttccaaaacccgct

SEQ ID NO: 385986 - DNA, 25 bp, Homo sapien
atgctggagaggatgggcttccaaa

SEQ ID NO: 385987 - DNA, 25 bp, Homo sapien
tggagaggatgggcttccaaaaccc

SEQ ID NO: 385988 - DNA, 25 bp, Homo sapien
cctgggatcttttggagtcatggct

SEQ ID NO: 385989 - DNA, 25 bp, Homo sapien
tatgtttccttgtcgctgtctggca

SEQ ID NO: 385990 - DNA, 25 bp, Homo sapien
gaactctcttgcctgggatcttttg

SEQ ID NO: 385991 - DNA, 25 bp, Homo sapien
tcgctgtctggcaacccgcgttctg

SEQ ID NO: 385992 - DNA, 25 bp, Homo sapien
cacactgctgtagtagaaatcacga

SEQ ID NO: 385993 - DNA, 25 bp, Homo sapien
tgctgtagtagaaatcacgaccatc

SEQ ID NO: 385994 - DNA, 25 bp, Homo sapien
gaaatcacgaccatcaagtctccct

SEQ ID NO: 385995 - DNA, 25 bp, Homo sapien
tagtagaaatcacgaccatcaagtc

SEQ ID NO: 385996 - DNA, 25 bp, Homo sapien
ctgttgaggtcttgcaatctgttag

SEQ ID NO: 385997 - DNA, 25 bp, Homo sapien
tgaggtcttgcaatctgttagctga

SEQ ID NO: 385998 - DNA, 25 bp, Homo sapien
ggtcttgcaatctgttagctgaaac

SEQ ID NO: 385999 - DNA, 25 bp, Homo sapien
gcaatctgttagctgaaacagacga

SEQ ID NO: 386000 - DNA, 25 bp, Homo sapien
tgatcagattcaggatctctggatg

SEQ ID NO: 386001 - DNA, 25 bp, Homo sapien
ctcaaggaagatggccctggtatga

SEQ ID NO: 386002 - DNA, 25 bp, Homo sapien
aggaagatggccctggtatgacatt

SEQ ID NO: 386003 - DNA, 25 bp, Homo sapien
tcttcctcaaggaagatggccctgg

SEQ ID NO: 386004 - DNA, 25 bp, Homo sapien
cacgccctgagagtgcggacaggct

SEQ ID NO: 386005 - DNA, 25 bp, Homo sapien
ctgagagtgcggacaggctgaggct

SEQ ID NO: 386006 - DNA, 25 bp, Homo sapien
gaggctcccgcacatccgcagaggg

SEQ ID NO: 386007 - DNA, 25 bp, Homo sapien
caggctgaggctcccgcacatccgc

SEQ ID NO: 386008 - DNA, 25 bp, Homo sapien
gctgctcagaagattctccccactg

SEQ ID NO: 386009 - DNA, 25 bp, Homo sapien
tgttgtcatgttcgttcctccctcc

SEQ ID NO: 386010 - DNA, 25 bp, Homo sapien
tctccctgttgtcatgttcgttcct

SEQ ID NO: 386011 - DNA, 25 bp, Homo sapien
gaaggcgctgctcagaagattctcc

SEQ ID NO: 386012 - DNA, 25 bp, Homo sapien
gaaatggtgtgaatctgtggcacta

SEQ ID NO: 386013 - DNA, 25 bp, Homo sapien
tagaaatcaggcctcacctacaatc

SEQ ID NO: 386014 - DNA, 25 bp, Homo sapien
gcaccttacgaagaagttggcttga

SEQ ID NO: 386015 - DNA, 25 bp, Homo sapien
tttgaagccaactgtcagcctctga

SEQ ID NO: 386016 - DNA, 25 bp, Homo sapien
gatgtttagcctttgacccagccac

SEQ ID NO: 386017 - DNA, 25 bp, Homo sapien
ctctttagcagggacggtattgatt

SEQ ID NO: 386018 - DNA, 25 bp, Homo sapien
tctgtatgctttcagctcgggttga

SEQ ID NO: 386019 - DNA, 25 bp, Homo sapien
tcttttctgcatgctaagtcctggg

SEQ ID NO: 386020 - DNA, 25 bp, Homo sapien
taaagatggactgtagtatctgtgc

SEQ ID NO: 386021 - DNA, 25 bp, Homo sapien
ccttccagtttccaattagacatat

SEQ ID NO: 386022 - DNA, 25 bp, Homo sapien
agacatatttaaagatggactgtag

SEQ ID NO: 386023 - DNA, 25 bp, Homo sapien
ataatctcatgtccagtcagccttc

SEQ ID NO: 386024 - DNA, 25 bp, Homo sapien
tgcctggtgcgtcaccaaattctca

SEQ ID NO: 386025 - DNA, 25 bp, Homo sapien
gctaccgtgcctggtgcgtcaccaa

SEQ ID NO: 386026 - DNA, 25 bp, Homo sapien
aattctcatgaccaaacccttctct

SEQ ID NO: 386027 - DNA, 25 bp, Homo sapien
accaaattctcatgaccaaaccctt

SEQ ID NO: 386028 - DNA, 25 bp, Homo sapien
ttgtgcattgctcccgtagcctggg

SEQ ID NO: 386029 - DNA, 25 bp, Homo sapien
ttgtgggtgttcatcgtggccaacg

SEQ ID NO: 386030 - DNA, 25 bp, Homo sapien
ctgggacatctgcttaggatctggg

SEQ ID NO: 386031 - DNA, 25 bp, Homo sapien
ccaacggtggctaacagtgtgtagg

SEQ ID NO: 386032 - DNA, 25 bp, Homo sapien
agaagctagctgccttgtttctgtt

SEQ ID NO: 386033 - DNA, 25 bp, Homo sapien
tcccagttgagaagctagctgcctt

SEQ ID NO: 386034 - DNA, 25 bp, Homo sapien
ccagttgagaagctagctgccttgt

SEQ ID NO: 386035 - DNA, 25 bp, Homo sapien
aagctagctgccttgtttctgtttc

SEQ ID NO: 386036 - DNA, 25 bp, Homo sapien
gacacccagacaccatggtagcgtg

SEQ ID NO: 386037 - DNA, 25 bp, Homo sapien
tcggagaccttcatcgacacccaga

SEQ ID NO: 386038 - DNA, 25 bp, Homo sapien
tagcgtgtgattcccactataaaac

SEQ ID NO: 386039 - DNA, 25 bp, Homo sapien
cagcgacggtcagcccttggcattt

SEQ ID NO: 386040 - DNA, 25 bp, Homo sapien
ttctgctttgatcggagcacccagc

SEQ ID NO: 386041 - DNA, 25 bp, Homo sapien
gcttgaaggcgtttgcatggtccat

SEQ ID NO: 386042 - DNA, 25 bp, Homo sapien
cgacgtatcagtgacagcgcggttc

SEQ ID NO: 386043 - DNA, 25 bp, Homo sapien
ggcaaacaccctggacgacgtatca

SEQ ID NO: 386044 - DNA, 25 bp, Homo sapien
tgccaactcagaagcgggaagggct

SEQ ID NO: 386045 - DNA, 25 bp, Homo sapien
tggttccacagagcgcgtatccctg

SEQ ID NO: 386046 - DNA, 25 bp, Homo sapien
tgcagctgtcatcactaatacttaa

SEQ ID NO: 386047 - DNA, 25 bp, Homo sapien
ggctgcagttatgcctgggagcact

SEQ ID NO: 386048 - DNA, 25 bp, Homo sapien
taaagtatgtctgattgcgtctgca

SEQ ID NO: 386049 - DNA, 25 bp, Homo sapien
taactgctgtgtgagcatccagaga

SEQ ID NO: 386050 - DNA, 25 bp, Homo sapien
ctgtagggaatgaaggaacagccct

SEQ ID NO: 386051 - DNA, 25 bp, Homo sapien
tggtgggtacgtacttctaggcctc

SEQ ID NO: 386052 - DNA, 25 bp, Homo sapien
tcccacacttcgagccggcgtttgg

SEQ ID NO: 386053 - DNA, 25 bp, Homo sapien
tctaggcgcgcacctgtgaggacgt

SEQ ID NO: 386054 - DNA, 25 bp, Homo sapien
agctgtggattgacagccggacgcc

SEQ ID NO: 386055 - DNA, 25 bp, Homo sapien
tgaccgtgaaccaggagagacagct

SEQ ID NO: 386056 - DNA, 25 bp, Homo sapien
tgagctcgtgcgcgccacggtgcgg

SEQ ID NO: 386057 - DNA, 25 bp, Homo sapien
cggcggctgcgtgcctcgcgctgtt

SEQ ID NO: 386058 - DNA, 25 bp, Homo sapien
ggtcgccggccggctgagctcgtgc

SEQ ID NO: 386059 - DNA, 25 bp, Homo sapien
gctcgtgcgcgccacggtgcggcgg

SEQ ID NO: 386060 - DNA, 25 bp, Homo sapien
taaggtcttgttaccatgcaggaac

SEQ ID NO: 386061 - DNA, 25 bp, Homo sapien
ggagtggtccttatagccataattc

SEQ ID NO: 386062 - DNA, 25 bp, Homo sapien
aagtctctcctcagcgggaactgca

SEQ ID NO: 386063 - DNA, 25 bp, Homo sapien
ggaactgcacgtccttctccagtga

SEQ ID NO: 386064 - DNA, 25 bp, Homo sapien
cagcttatctggtatctcttgaaca

SEQ ID NO: 386065 - DNA, 25 bp, Homo sapien
cagccggctcttgaaaattgggtac

SEQ ID NO: 386066 - DNA, 25 bp, Homo sapien
tgcttcctagcataagatgttccag

SEQ ID NO: 386067 - DNA, 25 bp, Homo sapien
gatttggcacttctagcttgtctcc

SEQ ID NO: 386068 - DNA, 25 bp, Homo sapien
tgaaggagtcttaaaccagatgcga

SEQ ID NO: 386069 - DNA, 25 bp, Homo sapien
tagaagtctgtagctcccacataga

SEQ ID NO: 386070 - DNA, 25 bp, Homo sapien
tgatgccctcttgggtcacaaacaa

SEQ ID NO: 386071 - DNA, 25 bp, Homo sapien
tgtgcttcggaatcccagctttagg

SEQ ID NO: 386072 - DNA, 25 bp, Homo sapien
tcataacagattaggtggtgacctc

SEQ ID NO: 386073 - DNA, 25 bp, Homo sapien
cacttatggccgacagttgagagag

SEQ ID NO: 386074 - DNA, 25 bp, Homo sapien
gcctctagtgaagttccgccatggg

SEQ ID NO: 386075 - DNA, 25 bp, Homo sapien
gactgagcgtcactgccagaggtca

SEQ ID NO: 386076 - DNA, 25 bp, Homo sapien
ggaaagcagtacaacctttacaagc

SEQ ID NO: 386077 - DNA, 25 bp, Homo sapien
tttacaagcagttatcaaggtgggt

SEQ ID NO: 386078 - DNA, 25 bp, Homo sapien
tccctgggaggtgacgtttgaccta

SEQ ID NO: 386079 - DNA, 25 bp, Homo sapien
gaggcaagccctaaaggacaggtag

SEQ ID NO: 386080 - DNA, 25 bp, Homo sapien
tcccgaatccgccagtagcggtagg

SEQ ID NO: 386081 - DNA, 25 bp, Homo sapien
ccgaatccgccagtagcggtaggtg

SEQ ID NO: 386082 - DNA, 25 bp, Homo sapien
cagcacctcccgaatccgccagtag

SEQ ID NO: 386083 - DNA, 25 bp, Homo sapien
aatccgccagtagcggtaggtgacg

SEQ ID NO: 386084 - DNA, 25 bp, Homo sapien
ggctttggtgcatttcacaaaggct

SEQ ID NO: 386085 - DNA, 25 bp, Homo sapien
gctttggtgcatttcacaaaggctc

SEQ ID NO: 386086 - DNA, 25 bp, Homo sapien
gctgggactttcttgtggcgcttca

SEQ ID NO: 386087 - DNA, 25 bp, Homo sapien
cttcgggccgtgttcctgggtagca

SEQ ID NO: 386088 - DNA, 25 bp, Homo sapien
ggcgcttcacctggcacttaattaa

SEQ ID NO: 386089 - DNA, 25 bp, Homo sapien
aaaagtctctggttcgtagatggcc

SEQ ID NO: 386090 - DNA, 25 bp, Homo sapien
gacatctaccgaatcctcgggtccg

SEQ ID NO: 386091 - DNA, 25 bp, Homo sapien
ccttgccttcggtgctggacagtgg

SEQ ID NO: 386092 - DNA, 25 bp, Homo sapien
aataaagcctggagcggcgggcttc

SEQ ID NO: 386093 - DNA, 25 bp, Homo sapien
ccgatggcggccttggaaagaatgc

SEQ ID NO: 386094 - DNA, 25 bp, Homo sapien
gatgtgaggagtcccggcttctccg

SEQ ID NO: 386095 - DNA, 25 bp, Homo sapien
gtgggatgtgaggagtcccggcttc

SEQ ID NO: 386096 - DNA, 25 bp, Homo sapien
tgctgggcttcccctgccggatgtg

SEQ ID NO: 386097 - DNA, 25 bp, Homo sapien
gctgggcttcccctgccggatgtgg

SEQ ID NO: 386098 - DNA, 25 bp, Homo sapien
caggacccgaggagctccgtgaggg

SEQ ID NO: 386099 - DNA, 25 bp, Homo sapien
gagcccgcgccccttgctgcggcgc

SEQ ID NO: 386100 - DNA, 25 bp, Homo sapien
gcgccggcctacgagcgcgcctaga

SEQ ID NO: 386101 - DNA, 25 bp, Homo sapien
gggctaacgcgctcacctacccgcg

SEQ ID NO: 386102 - DNA, 25 bp, Homo sapien
tctccggcccgcgcggtggcggagg

SEQ ID NO: 386103 - DNA, 25 bp, Homo sapien
cagggagcgtccccggggcagtgac

SEQ ID NO: 386104 - DNA, 25 bp, Homo sapien
ctccagggagcgtccccggggcagt

SEQ ID NO: 386105 - DNA, 25 bp, Homo sapien
ctctccggcccgcgcggtggcggag

SEQ ID NO: 386106 - DNA, 25 bp, Homo sapien
aggtgtctggatccaaggtcgccac

SEQ ID NO: 386107 - DNA, 25 bp, Homo sapien
gtctggatccaaggtcgccacggcg

SEQ ID NO: 386108 - DNA, 25 bp, Homo sapien
ctggatccaaggtcgccacggcgcg

SEQ ID NO: 386109 - DNA, 25 bp, Homo sapien
gtgtctggatccaaggtcgccacgg

SEQ ID NO: 386110 - DNA, 25 bp, Homo sapien
ctgaaacccaaaggctccctttgat

SEQ ID NO: 386111 - DNA, 25 bp, Homo sapien
aaagtgtgttggtcagccctaggtt

SEQ ID NO: 386112 - DNA, 25 bp, Homo sapien
gtgtgttggtcagccctaggttcaa

SEQ ID NO: 386113 - DNA, 25 bp, Homo sapien
cttacaggatgctgaaacccaaagg

SEQ ID NO: 386114 - DNA, 25 bp, Homo sapien
aattgcttctagagggtgctttttc

SEQ ID NO: 386115 - DNA, 25 bp, Homo sapien
accattaatcaacctgaacctcgtc

SEQ ID NO: 386116 - DNA, 25 bp, Homo sapien
taatcaacctgaacctcgtcctaaa

SEQ ID NO: 386117 - DNA, 25 bp, Homo sapien
tgaacctcgtcctaaattgcttcta

SEQ ID NO: 386118 - DNA, 25 bp, Homo sapien
tcagtagactcatcgtcgtagaagt

SEQ ID NO: 386119 - DNA, 25 bp, Homo sapien
gaagtcaatcgtggcttgcactggg

SEQ ID NO: 386120 - DNA, 25 bp, Homo sapien
ttgcactgggaaactggccagtact

SEQ ID NO: 386121 - DNA, 25 bp, Homo sapien
tgctccccggaactccgcaggtatt

SEQ ID NO: 386122 - DNA, 25 bp, Homo sapien
tggctcttcagcttcggaagcagac

SEQ ID NO: 386123 - DNA, 25 bp, Homo sapien
ggatcgctgcccttggttgatgccc

SEQ ID NO: 386124 - DNA, 25 bp, Homo sapien
cctcctgaggatcgctgcccttggt

SEQ ID NO: 386125 - DNA, 25 bp, Homo sapien
gatgaggagcacttgccaccccttg

SEQ ID NO: 386126 - DNA, 25 bp, Homo sapien
gagacaccttgagggagcggaccct

SEQ ID NO: 386127 - DNA, 25 bp, Homo sapien
gagagacggttctactccctataaa

SEQ ID NO: 386128 - DNA, 25 bp, Homo sapien
ctggctcgggtgtccccaagagaac

SEQ ID NO: 386129 - DNA, 25 bp, Homo sapien
actcagcagggatgcgtagtgtcct

SEQ ID NO: 386130 - DNA, 25 bp, Homo sapien
gtgcaccaaaaacgaattgccaggg

SEQ ID NO: 386131 - DNA, 25 bp, Homo sapien
gtcgacgtgcacagcccaggcgagt

SEQ ID NO: 386132 - DNA, 25 bp, Homo sapien
cagtcgacgtgcacagcccaggcga

SEQ ID NO: 386133 - DNA, 25 bp, Homo sapien
cacagtcgacgtgcacagcccaggc

SEQ ID NO: 386134 - DNA, 25 bp, Homo sapien
tcgacgtgcacagcccaggcgagtg

SEQ ID NO: 386135 - DNA, 25 bp, Homo sapien
ttctccctgagcatcctctggcaag

SEQ ID NO: 386136 - DNA, 25 bp, Homo sapien
tggggacgtccctcaggctaataca

SEQ ID NO: 386137 - DNA, 25 bp, Homo sapien
cctctggggacgtccctcaggctaa

SEQ ID NO: 386138 - DNA, 25 bp, Homo sapien
acgtccctcaggctaatacacagct

SEQ ID NO: 386139 - DNA, 25 bp, Homo sapien
tccagttgtagtatacgtgcagctg

SEQ ID NO: 386140 - DNA, 25 bp, Homo sapien
aagatctgaagtaaacgacatcaga

SEQ ID NO: 386141 - DNA, 25 bp, Homo sapien
taaacgacatcagatcagatatcca

SEQ ID NO: 386142 - DNA, 25 bp, Homo sapien
gaagtaaacgacatcagatcagata

SEQ ID NO: 386143 - DNA, 25 bp, Homo sapien
tctgaagtaaacgacatcagatcag

SEQ ID NO: 386144 - DNA, 25 bp, Homo sapien
cacgtcagccgacggcgggagggag

SEQ ID NO: 386145 - DNA, 25 bp, Homo sapien
cgcgagcctcggacgcgggcagcag

SEQ ID NO: 386146 - DNA, 25 bp, Homo sapien
ggcgttgaagcgaggtgcgtcacgt

SEQ ID NO: 386147 - DNA, 25 bp, Homo sapien
gcgggtggcggcgttgaagcgaggt

SEQ ID NO: 386148 - DNA, 25 bp, Homo sapien
gcccggcagcgcgccgggtgtgcac

SEQ ID NO: 386149 - DNA, 25 bp, Homo sapien
cgggacaaggtgacacatccgggag

SEQ ID NO: 386150 - DNA, 25 bp, Homo sapien
catctcggctgcagcgggacaaggt

SEQ ID NO: 386151 - DNA, 25 bp, Homo sapien
gctgcagcgggacaaggtgacacat

SEQ ID NO: 386152 - DNA, 25 bp, Homo sapien
tagcagcaaccaaaagtcataagga

SEQ ID NO: 386153 - DNA, 25 bp, Homo sapien
gagataaatccataggctgacacag

SEQ ID NO: 386154 - DNA, 25 bp, Homo sapien
ccaaggtggctacaagcaaatttag

SEQ ID NO: 386155 - DNA, 25 bp, Homo sapien
cataggatctgacatacattaggta

SEQ ID NO: 386156 - DNA, 25 bp, Homo sapien
ttttgctcgcaaaccaccaaaagtg

SEQ ID NO: 386157 - DNA, 25 bp, Homo sapien
gaggctttccctaacactatagtgg

SEQ ID NO: 386158 - DNA, 25 bp, Homo sapien
aattattaccagcatatggttggcc

SEQ ID NO: 386159 - DNA, 25 bp, Homo sapien
tggttggccaaaaaatataccctga

SEQ ID NO: 386160 - DNA, 25 bp, Homo sapien
tctctgcagggtcactatggatcca

SEQ ID NO: 386161 - DNA, 25 bp, Homo sapien
tctggctcccagacaaagctgatag

SEQ ID NO: 386162 - DNA, 25 bp, Homo sapien
taggaactcaaaagtgatgccagct

SEQ ID NO: 386163 - DNA, 25 bp, Homo sapien
tatatccagttaaagttccagcagg

SEQ ID NO: 386164 - DNA, 25 bp, Homo sapien
gagtaccaggtatatgggaaatgct

SEQ ID NO: 386165 - DNA, 25 bp, Homo sapien
tgtgtttcctcgcatatcaaatggg

SEQ ID NO: 386166 - DNA, 25 bp, Homo sapien
gatactacctacctgatcaatctgt

SEQ ID NO: 386167 - DNA, 25 bp, Homo sapien
ggatgcttccagctaaatagtctac

SEQ ID NO: 386168 - DNA, 25 bp, Homo sapien
tactgtcacgtttcaagatcactgg

SEQ ID NO: 386169 - DNA, 25 bp, Homo sapien
tagagtggtacagggtaagtctgcc

SEQ ID NO: 386170 - DNA, 25 bp, Homo sapien
catgtcaccaagctaggaaggattc

SEQ ID NO: 386171 - DNA, 25 bp, Homo sapien
taaatagaggatcatcaagggcatc

SEQ ID NO: 386172 - DNA, 25 bp, Homo sapien
aaagattctcgtccccattctgctg

SEQ ID NO: 386173 - DNA, 25 bp, Homo sapien
tacttggaacctatgcccaaggaaa

SEQ ID NO: 386174 - DNA, 25 bp, Homo sapien
taactcctatcagaacactgagctc

SEQ ID NO: 386175 - DNA, 25 bp, Homo sapien
tcctggcttctatggtatattagaa

SEQ ID NO: 386176 - DNA, 25 bp, Homo sapien
ggcataatccgccacagtgaaatct

SEQ ID NO: 386177 - DNA, 25 bp, Homo sapien
taatcattgctcataaattcagcag

SEQ ID NO: 386178 - DNA, 25 bp, Homo sapien
aagacacaatcatccacgtgagggc

SEQ ID NO: 386179 - DNA, 25 bp, Homo sapien
ttctaacaaggcataatccgccaca

SEQ ID NO: 386180 - DNA, 25 bp, Homo sapien
tctcactttggatataatctttata

SEQ ID NO: 386181 - DNA, 25 bp, Homo sapien
attcctctcactttggatataatct

SEQ ID NO: 386182 - DNA, 25 bp, Homo sapien
aaattcctctcactttggatataat

SEQ ID NO: 386183 - DNA, 25 bp, Homo sapien
ggatataatctttatattgcacacc

SEQ ID NO: 386184 - DNA, 25 bp, Homo sapien
tatttaagtgctggcaaaaactcta

SEQ ID NO: 386185 - DNA, 25 bp, Homo sapien
tattctagcctgttaaatgttaaga

SEQ ID NO: 386186 - DNA, 25 bp, Homo sapien
tattgctatgacaggatggatggac

SEQ ID NO: 386187 - DNA, 25 bp, Homo sapien
caaaaatggatatggagagggaaga

SEQ ID NO: 386188 - DNA, 25 bp, Homo sapien
ggacagaaattggtttactacacca

SEQ ID NO: 386189 - DNA, 25 bp, Homo sapien
ttggtttactacaccatatactgca

SEQ ID NO: 386190 - DNA, 25 bp, Homo sapien
tactacaccatatactgcagatgtc

SEQ ID NO: 386191 - DNA, 25 bp, Homo sapien
caccatatactgcagatgtcaaatt

SEQ ID NO: 386192 - DNA, 25 bp, Homo sapien
cacagggatgcaatcgtgatattac

SEQ ID NO: 386193 - DNA, 25 bp, Homo sapien
ccacacagggatgcaatcgtgatat

SEQ ID NO: 386194 - DNA, 25 bp, Homo sapien
acacagggatgcaatcgtgatatta

SEQ ID NO: 386195 - DNA, 25 bp, Homo sapien
cacacagggatgcaatcgtgatatt

SEQ ID NO: 386196 - DNA, 25 bp, Homo sapien
gccaaatccacaatatcttccatca

SEQ ID NO: 386197 - DNA, 25 bp, Homo sapien
ccatcaactcaagatgttgtagttt

SEQ ID NO: 386198 - DNA, 25 bp, Homo sapien
ttcaaatttatctcagaagcacgtg

SEQ ID NO: 386199 - DNA, 25 bp, Homo sapien
atttatctcagaagcacgtgaattg

SEQ ID NO: 386200 - DNA, 25 bp, Homo sapien
aattctcaataagcctccaataagg

SEQ ID NO: 386201 - DNA, 25 bp, Homo sapien
ttacaaccaattctcaataagcctc

SEQ ID NO: 386202 - DNA, 25 bp, Homo sapien
ataagcctccaataaggaatgaatc

SEQ ID NO: 386203 - DNA, 25 bp, Homo sapien
ctcaataagcctccaataaggaatg

SEQ ID NO: 386204 - DNA, 25 bp, Homo sapien
tggggaaacataagccaggtaaata

SEQ ID NO: 386205 - DNA, 25 bp, Homo sapien
cagaggcctaataatttcatttggg

SEQ ID NO: 386206 - DNA, 25 bp, Homo sapien
catttggggaaacataagccaggta

SEQ ID NO: 386207 - DNA, 25 bp, Homo sapien
tttcatttggggaaacataagccag

SEQ ID NO: 386208 - DNA, 25 bp, Homo sapien
taacataggccaacaattgtcaatt

SEQ ID NO: 386209 - DNA, 25 bp, Homo sapien
gttacatcgcctgcatattttatcc

SEQ ID NO: 386210 - DNA, 25 bp, Homo sapien
tgtcaattgatcctaatttagttag

SEQ ID NO: 386211 - DNA, 25 bp, Homo sapien
tagttagaattgttacatcgcctgc

SEQ ID NO: 386212 - DNA, 25 bp, Homo sapien
ctgagtcaagtaacaatttaaagca

SEQ ID NO: 386213 - DNA, 25 bp, Homo sapien
ctctttttcagccatatataacaaa

SEQ ID NO: 386214 - DNA, 25 bp, Homo sapien
gaaatcacttaactacatatctcat

SEQ ID NO: 386215 - DNA, 25 bp, Homo sapien
actacatatctcattttcccaaaca

SEQ ID NO: 386216 - DNA, 25 bp, Homo sapien
tcctttgaatgtcatagcgaagctc

SEQ ID NO: 386217 - DNA, 25 bp, Homo sapien
ttgaatgtcatagcgaagctcaaaa

SEQ ID NO: 386218 - DNA, 25 bp, Homo sapien
cgcgcccagcgagcatttcctttga

SEQ ID NO: 386219 - DNA, 25 bp, Homo sapien
tcatagcgaagctcaaaaggtttca

SEQ ID NO: 386220 - DNA, 25 bp, Homo sapien
tacaatccatacaactttgagtttt

SEQ ID NO: 386221 - DNA, 25 bp, Homo sapien
aagttcttcaagcaaattgcagtct

SEQ ID NO: 386222 - DNA, 25 bp, Homo sapien
caagcaaattgcagtcttccattac

SEQ ID NO: 386223 - DNA, 25 bp, Homo sapien
tctatacaatccatacaactttgag

SEQ ID NO: 386224 - DNA, 25 bp, Homo sapien
ctctggtgtaatagataatagctat

SEQ ID NO: 386225 - DNA, 25 bp, Homo sapien
tctggtgtaatagataatagctata

SEQ ID NO: 386226 - DNA, 25 bp, Homo sapien
ggaaaaagagcagtggctacagagc

SEQ ID NO: 386227 - DNA, 25 bp, Homo sapien
ccttcaaaggctgctacaatattag

SEQ ID NO: 386228 - DNA, 25 bp, Homo sapien
cggattccctcattccctgtggaga

SEQ ID NO: 386229 - DNA, 25 bp, Homo sapien
gctgctacaatattaggcggcctga

SEQ ID NO: 386230 - DNA, 25 bp, Homo sapien
aaagagctcggttaccataaagaag

SEQ ID NO: 386231 - DNA, 25 bp, Homo sapien
acaaagagctcggttaccataaaga

SEQ ID NO: 386232 - DNA, 25 bp, Homo sapien
tgtccagtacgaagaaaacaaagag

SEQ ID NO: 386233 - DNA, 25 bp, Homo sapien
taaactgtccagtacgaagaaaaca

SEQ ID NO: 386234 - DNA, 25 bp, Homo sapien
caattttcacaagaggctagccaag

SEQ ID NO: 386235 - DNA, 25 bp, Homo sapien
gataaaagtctttctcaggcatggg

SEQ ID NO: 386236 - DNA, 25 bp, Homo sapien
aggagtgcatcctcgccaaactggg

SEQ ID NO: 386237 - DNA, 25 bp, Homo sapien
gagactctacatccaggctgcctgg

SEQ ID NO: 386238 - DNA, 25 bp, Homo sapien
gaaggataatcatttcctcataaac

SEQ ID NO: 386239 - DNA, 25 bp, Homo sapien
cgtttattgactatttagaccattt

SEQ ID NO: 386240 - DNA, 25 bp, Homo sapien
ggataatcatttcctcataaacgtt

SEQ ID NO: 386241 - DNA, 25 bp, Homo sapien
cataaacgtttattgactatttaga

SEQ ID NO: 386242 - DNA, 25 bp, Homo sapien
gggttgcagagtatgcacatcttca

SEQ ID NO: 386243 - DNA, 25 bp, Homo sapien
ggcatgtacatatcttcttgggtac

SEQ ID NO: 386244 - DNA, 25 bp, Homo sapien
gatatgagcctagaagtgggttgca

SEQ ID NO: 386245 - DNA, 25 bp, Homo sapien
caatgctatcatgaaggcatgtaca

SEQ ID NO: 386246 - DNA, 25 bp, Homo sapien
tgctaccaatcacagttgggatctg

SEQ ID NO: 386247 - DNA, 25 bp, Homo sapien
cattacataagctgttggaactgca

SEQ ID NO: 386248 - DNA, 25 bp, Homo sapien
taaagtctatctgtctgctaccaat

SEQ ID NO: 386249 - DNA, 25 bp, Homo sapien
tccacgagtctcacaagaatgaact

SEQ ID NO: 386250 - DNA, 25 bp, Homo sapien
taactgattctggacttggaaggga

SEQ ID NO: 386251 - DNA, 25 bp, Homo sapien
aaaagtatgcaagaattttgcaagc

SEQ ID NO: 386252 - DNA, 25 bp, Homo sapien
tgactctcttaaaccataccataaa

SEQ ID NO: 386253 - DNA, 25 bp, Homo sapien
tgcaagccatataagggatattcct

SEQ ID NO: 386254 - DNA, 25 bp, Homo sapien
cagcagccatcctacattctgaggg

SEQ ID NO: 386255 - DNA, 25 bp, Homo sapien
gagggtcatgactaagaggaacttc

SEQ ID NO: 386256 - DNA, 25 bp, Homo sapien
aataggagaagctacccaaatgccc

SEQ ID NO: 386257 - DNA, 25 bp, Homo sapien
cactaaatacaaacaccaggtccag

SEQ ID NO: 386258 - DNA, 25 bp, Homo sapien
tgtacctatgcatagcattcttttg

SEQ ID NO: 386259 - DNA, 25 bp, Homo sapien
gaagtatttcttgcacatttcgaca

SEQ ID NO: 386260 - DNA, 25 bp, Homo sapien
aaaagtattatatcttgcatatgtg

SEQ ID NO: 386261 - DNA, 25 bp, Homo sapien
agagtcacaatcacaactacccagg

SEQ ID NO: 386262 - DNA, 25 bp, Homo sapien
agtgttcttcagaatagtggctctc

SEQ ID NO: 386263 - DNA, 25 bp, Homo sapien
gggtccccacgctgatcatggatct

SEQ ID NO: 386264 - DNA, 25 bp, Homo sapien
cacccacccagaatacgcagagatg

SEQ ID NO: 386265 - DNA, 25 bp, Homo sapien
gagatgacctctcaatcactaaggc

SEQ ID NO: 386266 - DNA, 25 bp, Homo sapien
catttttcacattcaggcacaccca

SEQ ID NO: 386267 - DNA, 25 bp, Homo sapien
ccaggttcaaggatcagcaaagatt

SEQ ID NO: 386268 - DNA, 25 bp, Homo sapien
tctaatgaaggctatccgcagagca

SEQ ID NO: 386269 - DNA, 25 bp, Homo sapien
tagatacattcctaggccacctgaa

SEQ ID NO: 386270 - DNA, 25 bp, Homo sapien
aaatctggatgcagaagtccacctg

SEQ ID NO: 386271 - DNA, 25 bp, Homo sapien
gtgattatcccaccttagcctccca

SEQ ID NO: 386272 - DNA, 25 bp, Homo sapien
gattatcccaccttagcctcccaag

SEQ ID NO: 386273 - DNA, 25 bp, Homo sapien
ctcgctgcagcctcatacttcctgg

SEQ ID NO: 386274 - DNA, 25 bp, Homo sapien
gctcaggtgattatcccaccttagc

SEQ ID NO: 386275 - DNA, 25 bp, Homo sapien
taacccaggagactggccaattgaa

SEQ ID NO: 386276 - DNA, 25 bp, Homo sapien
ttctaggtcaaagcaataaatccac

SEQ ID NO: 386277 - DNA, 25 bp, Homo sapien
tcacagtaacagcaggactgtcagt

SEQ ID NO: 386278 - DNA, 25 bp, Homo sapien
cccaacaatggacggcacggtggaa

SEQ ID NO: 386279 - DNA, 25 bp, Homo sapien
ccccttcactcagcttttcattgtt

SEQ ID NO: 386280 - DNA, 25 bp, Homo sapien
cattgttatctctaagtgcagctcc

SEQ ID NO: 386281 - DNA, 25 bp, Homo sapien
atcttccatccagccgtctcccctt

SEQ ID NO: 386282 - DNA, 25 bp, Homo sapien
gggatgtgctcaggctagatcttcc

SEQ ID NO: 386283 - DNA, 25 bp, Homo sapien
aaagagcatcacaataacgataatg

SEQ ID NO: 386284 - DNA, 25 bp, Homo sapien
gagcatcacaataacgataatgacc

SEQ ID NO: 386285 - DNA, 25 bp, Homo sapien
agaaagagcatcacaataacgataa

SEQ ID NO: 386286 - DNA, 25 bp, Homo sapien
agagcatcacaataacgataatgac

SEQ ID NO: 386287 - DNA, 25 bp, Homo sapien
ctgctgaattagatccttgattccc

SEQ ID NO: 386288 - DNA, 25 bp, Homo sapien
tgctgaattagatccttgattccct

SEQ ID NO: 386289 - DNA, 25 bp, Homo sapien
gctgaattagatccttgattccctc

SEQ ID NO: 386290 - DNA, 25 bp, Homo sapien
tgaattagatccttgattccctcag

SEQ ID NO: 386291 - DNA, 25 bp, Homo sapien
tgtaaccaaaagaatcttaggtgaa

SEQ ID NO: 386292 - DNA, 25 bp, Homo sapien
ctgtaaccaaaagaatcttaggtga

SEQ ID NO: 386293 - DNA, 25 bp, Homo sapien
attggatccttatttgctgttcgac

SEQ ID NO: 386294 - DNA, 25 bp, Homo sapien
cataaaaggctttaattggatcctt

SEQ ID NO: 386295 - DNA, 25 bp, Homo sapien
gctttaattggatccttatttgctg

SEQ ID NO: 386296 - DNA, 25 bp, Homo sapien
ctgttttcataaaaggctttaattg

SEQ ID NO: 386297 - DNA, 25 bp, Homo sapien
ggccatttcgtgattaatttttctg

SEQ ID NO: 386298 - DNA, 25 bp, Homo sapien
ttctccacaaagttaagtgaagtag

SEQ ID NO: 386299 - DNA, 25 bp, Homo sapien
ctttagattctgattaccaccgttg

SEQ ID NO: 386300 - DNA, 25 bp, Homo sapien
gtaaatataggtgctgataaactcc

SEQ ID NO: 386301 - DNA, 25 bp, Homo sapien
atggtggtgaaaattcaggatgaca

SEQ ID NO: 386302 - DNA, 25 bp, Homo sapien
tggtggtgaaaattcaggatgacag

SEQ ID NO: 386303 - DNA, 25 bp, Homo sapien
gatggtggtgaaaattcaggatgac

SEQ ID NO: 386304 - DNA, 25 bp, Homo sapien
catgttgaaaaccaaatcctcaagg

SEQ ID NO: 386305 - DNA, 25 bp, Homo sapien
cctcaaggcgatggtaataggaagt

SEQ ID NO: 386306 - DNA, 25 bp, Homo sapien
tctggatatctgtgtccccgacaag

SEQ ID NO: 386307 - DNA, 25 bp, Homo sapien
gacttagcctacagcactgttatgg

SEQ ID NO: 386308 - DNA, 25 bp, Homo sapien
cagaaatgtggtacgtgggtgtaac

SEQ ID NO: 386309 - DNA, 25 bp, Homo sapien
gagagatacaggagataactcctgt

SEQ ID NO: 386310 - DNA, 25 bp, Homo sapien
gatttaggtctaccatagatacaga

SEQ ID NO: 386311 - DNA, 25 bp, Homo sapien
aatagtgatcattatgatttaggtc

SEQ ID NO: 386312 - DNA, 25 bp, Homo sapien
tgtgaacacaaaagtatttgttcct

SEQ ID NO: 386313 - DNA, 25 bp, Homo sapien
ctgtgaacacaaaagtatttgttcc

SEQ ID NO: 386314 - DNA, 25 bp, Homo sapien
gtgaacacaaaagtatttgttccta

SEQ ID NO: 386315 - DNA, 25 bp, Homo sapien
tgaacacaaaagtatttgttcctaa

SEQ ID NO: 386316 - DNA, 25 bp, Homo sapien
tgattcattgtttcgagatttttgt

SEQ ID NO: 386317 - DNA, 25 bp, Homo sapien
ctgattcattgtttcgagatttttg

SEQ ID NO: 386318 - DNA, 25 bp, Homo sapien
tctgattcattgtttcgagattttt

SEQ ID NO: 386319 - DNA, 25 bp, Homo sapien
ttctgattcattgtttcgagatttt

SEQ ID NO: 386320 - DNA, 25 bp, Homo sapien
agaaaactgtttctccaagatgttc

SEQ ID NO: 386321 - DNA, 25 bp, Homo sapien
tagaaaactgtttctccaagatgtt

SEQ ID NO: 386322 - DNA, 25 bp, Homo sapien
aactctgtaaaggcctgtgcagcgc

SEQ ID NO: 386323 - DNA, 25 bp, Homo sapien
ctctgtaaaggcctgtgcagcgctg

SEQ ID NO: 386324 - DNA, 25 bp, Homo sapien
caactctgtaaaggcctgtgcagcg

SEQ ID NO: 386325 - DNA, 25 bp, Homo sapien
ctgtaaaggcctgtgcagcgctgcg

SEQ ID NO: 386326 - DNA, 25 bp, Homo sapien
caggctgtcctattccaaggagaga

SEQ ID NO: 386327 - DNA, 25 bp, Homo sapien
gagaaatggcaagtccatagacgac

SEQ ID NO: 386328 - DNA, 25 bp, Homo sapien
catagttaatcatggccaggttcaa

SEQ ID NO: 386329 - DNA, 25 bp, Homo sapien
ccatagacgaccaaaacatagttaa

SEQ ID NO: 386330 - DNA, 25 bp, Homo sapien
gggagacattattaatctgtgacac

SEQ ID NO: 386331 - DNA, 25 bp, Homo sapien
ctgtgacactgagatcaaggaaaat

SEQ ID NO: 386332 - DNA, 25 bp, Homo sapien
aatagaattagagagcattcatggg

SEQ ID NO: 386333 - DNA, 25 bp, Homo sapien
aaaatgaatcttgggcactgtcaac

SEQ ID NO: 386334 - DNA, 25 bp, Homo sapien
ggtagtgttcaataatcctcttaaa

SEQ ID NO: 386335 - DNA, 25 bp, Homo sapien
cttttccaattccacagtaggccaa

SEQ ID NO: 386336 - DNA, 25 bp, Homo sapien
gtgttcaataatcctcttaaactgg

SEQ ID NO: 386337 - DNA, 25 bp, Homo sapien
aattccacagtaggccaagcaatca

SEQ ID NO: 386338 - DNA, 25 bp, Homo sapien
ttttttgtccctgcaacagtttgct

SEQ ID NO: 386339 - DNA, 25 bp, Homo sapien
ttttgtccctgcaacagtttgctga

SEQ ID NO: 386340 - DNA, 25 bp, Homo sapien
tttgtccctgcaacagtttgctgag

SEQ ID NO: 386341 - DNA, 25 bp, Homo sapien
tttttgtccctgcaacagtttgctg

SEQ ID NO: 386342 - DNA, 25 bp, Homo sapien
ctaaagtcataattatgaaaaaggc

SEQ ID NO: 386343 - DNA, 25 bp, Homo sapien
aaagtcaccaaagatctcaagctta

SEQ ID NO: 386344 - DNA, 25 bp, Homo sapien
ctcaaagtgattgagagcttctaga

SEQ ID NO: 386345 - DNA, 25 bp, Homo sapien
aagttaacactccaggaagacgata

SEQ ID NO: 386346 - DNA, 25 bp, Homo sapien
gaagacgataaatcaaggttcttgc

SEQ ID NO: 386347 - DNA, 25 bp, Homo sapien
gctgagactcttcaataatcacatt

SEQ ID NO: 386348 - DNA, 25 bp, Homo sapien
gaatcctaacactcccattatcttc

SEQ ID NO: 386349 - DNA, 25 bp, Homo sapien
aacatcacctcatccagaatcctaa

SEQ ID NO: 386350 - DNA, 25 bp, Homo sapien
atccagaatcctaacactcccatta

SEQ ID NO: 386351 - DNA, 25 bp, Homo sapien
caacatcacctcatccagaatccta

SEQ ID NO: 386352 - DNA, 25 bp, Homo sapien
tgtatatctggatcttagaatatcc

SEQ ID NO: 386353 - DNA, 25 bp, Homo sapien
tggcatctggcactggagggaactt

SEQ ID NO: 386354 - DNA, 25 bp, Homo sapien
tctgatagcaacaaatggcatctgg

SEQ ID NO: 386355 - DNA, 25 bp, Homo sapien
gagggaacttgcattcttcaacaaa

SEQ ID NO: 386356 - DNA, 25 bp, Homo sapien
tgggtgcctccaattacagattgtt

SEQ ID NO: 386357 - DNA, 25 bp, Homo sapien
gattttgcaagttaatgtcccactg

SEQ ID NO: 386358 - DNA, 25 bp, Homo sapien
ttgggtgcctccaattacagattgt

SEQ ID NO: 386359 - DNA, 25 bp, Homo sapien
gaaatgattttgcaagttaatgtcc

SEQ ID NO: 386360 - DNA, 25 bp, Homo sapien
ggcaacagctgatgcgtataaaacc

SEQ ID NO: 386361 - DNA, 25 bp, Homo sapien
tctattttacagtactggcaacagc

SEQ ID NO: 386362 - DNA, 25 bp, Homo sapien
cagtcaggggtaagacatattcctt

SEQ ID NO: 386363 - DNA, 25 bp, Homo sapien
ggggtaagacatattccttgtagaa

SEQ ID NO: 386364 - DNA, 25 bp, Homo sapien
accttcacagtcaggggtaagacat

SEQ ID NO: 386365 - DNA, 25 bp, Homo sapien
cacagtcaggggtaagacatattcc

SEQ ID NO: 386366 - DNA, 25 bp, Homo sapien
ttctgtttcagaataggtcttggag

SEQ ID NO: 386367 - DNA, 25 bp, Homo sapien
tctttcttgtgctaacttttttgct

SEQ ID NO: 386368 - DNA, 25 bp, Homo sapien
tgcttcttttttttggatctttctc

SEQ ID NO: 386369 - DNA, 25 bp, Homo sapien
ttgtcttctttcagtcttagtttct

SEQ ID NO: 386370 - DNA, 25 bp, Homo sapien
attttttgtcttctttcagtcttag

SEQ ID NO: 386371 - DNA, 25 bp, Homo sapien
gattactttctcttaagtcctcctc

SEQ ID NO: 386372 - DNA, 25 bp, Homo sapien
ctcttcatttttgggtggattactt

SEQ ID NO: 386373 - DNA, 25 bp, Homo sapien
ttctgctcttcatttttgggtggat

SEQ ID NO: 386374 - DNA, 25 bp, Homo sapien
tggattactttctcttaagtcctcc

SEQ ID NO: 386375 - DNA, 25 bp, Homo sapien
atggctgtattctgtatgccggatt

SEQ ID NO: 386376 - DNA, 25 bp, Homo sapien
gcatggctgtattctgtatgccgga

SEQ ID NO: 386377 - DNA, 25 bp, Homo sapien
catggctgtattctgtatgccggat

SEQ ID NO: 386378 - DNA, 25 bp, Homo sapien
agcatggctgtattctgtatgccgg

SEQ ID NO: 386379 - DNA, 25 bp, Homo sapien
tccaggcggctaatttgggctccac

SEQ ID NO: 386380 - DNA, 25 bp, Homo sapien
ggatccaggcggctaatttgggctc

SEQ ID NO: 386381 - DNA, 25 bp, Homo sapien
tttgggctccacttctttaagctca

SEQ ID NO: 386382 - DNA, 25 bp, Homo sapien
caggcggctaatttgggctccactt

SEQ ID NO: 386383 - DNA, 25 bp, Homo sapien
ttccgagggccttagtcaacaaatg

SEQ ID NO: 386384 - DNA, 25 bp, Homo sapien
tatgtgcatgatgtaagtccaccca

SEQ ID NO: 386385 - DNA, 25 bp, Homo sapien
tgaacagccagcaaaaaggagctct

SEQ ID NO: 386386 - DNA, 25 bp, Homo sapien
taagggaccatgtagaatactcaca

SEQ ID NO: 386387 - DNA, 25 bp, Homo sapien
gctccataacgagaaaagaaagttc

SEQ ID NO: 386388 - DNA, 25 bp, Homo sapien
aagcagtttaagagatgctccataa

SEQ ID NO: 386389 - DNA, 25 bp, Homo sapien
ccttcaatgatgctggctcagagaa

SEQ ID NO: 386390 - DNA, 25 bp, Homo sapien
agtttaagagatgctccataacgag

SEQ ID NO: 386391 - DNA, 25 bp, Homo sapien
gtaacatgcaatctttcccatgatg

SEQ ID NO: 386392 - DNA, 25 bp, Homo sapien
taacatgcaatctttcccatgatgc

SEQ ID NO: 386393 - DNA, 25 bp, Homo sapien
tcagtgtaacatgcaatctttccca

SEQ ID NO: 386394 - DNA, 25 bp, Homo sapien
gtgtaacatgcaatctttcccatga

SEQ ID NO: 386395 - DNA, 25 bp, Homo sapien
tcaagggcagagacaagtgtaagca

SEQ ID NO: 386396 - DNA, 25 bp, Homo sapien
cccagttctaggctcttcccattaa

SEQ ID NO: 386397 - DNA, 25 bp, Homo sapien
atgaaccaaactaaggaagaagctg

SEQ ID NO: 386398 - DNA, 25 bp, Homo sapien
tctggccctcccgtattgagtttac

SEQ ID NO: 386399 - DNA, 25 bp, Homo sapien
ctaaagccttaaaataacgcctcat

SEQ ID NO: 386400 - DNA, 25 bp, Homo sapien
tacatttccatatagtacactaaag

SEQ ID NO: 386401 - DNA, 25 bp, Homo sapien
tactactggcataggccatgttcta

SEQ ID NO: 386402 - DNA, 25 bp, Homo sapien
tatttggctttgacacaagtgtagt

SEQ ID NO: 386403 - DNA, 25 bp, Homo sapien
ttccttaacacagtacagcggctgt

SEQ ID NO: 386404 - DNA, 25 bp, Homo sapien
gtttccttaacacagtacagcggct

SEQ ID NO: 386405 - DNA, 25 bp, Homo sapien
ttgtttccttaacacagtacagcgg

SEQ ID NO: 386406 - DNA, 25 bp, Homo sapien
tgtttccttaacacagtacagcggc

SEQ ID NO: 386407 - DNA, 25 bp, Homo sapien
atcctttggcttctttttcttgctt

SEQ ID NO: 386408 - DNA, 25 bp, Homo sapien
tgcttttgtttttcaccttggttga

SEQ ID NO: 386409 - DNA, 25 bp, Homo sapien
ctttggcttctttttcttgcttttg

SEQ ID NO: 386410 - DNA, 25 bp, Homo sapien
tgaatcctttggcttctttttcttg

SEQ ID NO: 386411 - DNA, 25 bp, Homo sapien
gaagttgttccagacccaactaaca

SEQ ID NO: 386412 - DNA, 25 bp, Homo sapien
agttactgaagttgttccagaccca

SEQ ID NO: 386413 - DNA, 25 bp, Homo sapien
ttgttccagacccaactaacatagg

SEQ ID NO: 386414 - DNA, 25 bp, Homo sapien
ctatggtcttcacttgaagtgatga

SEQ ID NO: 386415 - DNA, 25 bp, Homo sapien
ccgaagatggtcaggcactgcaaat

SEQ ID NO: 386416 - DNA, 25 bp, Homo sapien
tcttgccgaagatggtcaggcactg

SEQ ID NO: 386417 - DNA, 25 bp, Homo sapien
ccatagcttcttattgcggacaaca

SEQ ID NO: 386418 - DNA, 25 bp, Homo sapien
tactgtgttggtcatagagagcttc

SEQ ID NO: 386419 - DNA, 25 bp, Homo sapien
gtccaagggaccatgttcctccaaa

SEQ ID NO: 386420 - DNA, 25 bp, Homo sapien
tgttcctccaaaaactgagagaagt

SEQ ID NO: 386421 - DNA, 25 bp, Homo sapien
ccatgttcctccaaaaactgagaga

SEQ ID NO: 386422 - DNA, 25 bp, Homo sapien
gaccatgttcctccaaaaactgaga

SEQ ID NO: 386423 - DNA, 25 bp, Homo sapien
cagctggattcagttgtagtttaac

SEQ ID NO: 386424 - DNA, 25 bp, Homo sapien
tccctagcagctggattcagttgta

SEQ ID NO: 386425 - DNA, 25 bp, Homo sapien
ctggcggtgtctgggtgatatcaaa

SEQ ID NO: 386426 - DNA, 25 bp, Homo sapien
gtttaactcgtacatactcccctgc

SEQ ID NO: 386427 - DNA, 25 bp, Homo sapien
cctataaaggcaaccataggagaat

SEQ ID NO: 386428 - DNA, 25 bp, Homo sapien
aaggcaaccataggagaatcttgat

SEQ ID NO: 386429 - DNA, 25 bp, Homo sapien
cttgttaggaaagaactcatacaca

SEQ ID NO: 386430 - DNA, 25 bp, Homo sapien
gaactcatacacatccctcttgttt

SEQ ID NO: 386431 - DNA, 25 bp, Homo sapien
aaaggattatatggctcagtattga

SEQ ID NO: 386432 - DNA, 25 bp, Homo sapien
tggctcagtattgacttcttggtgt

SEQ ID NO: 386433 - DNA, 25 bp, Homo sapien
gtccctggtctcttctaagccctta

SEQ ID NO: 386434 - DNA, 25 bp, Homo sapien
tgcctagatctgaacccagccagtc

SEQ ID NO: 386435 - DNA, 25 bp, Homo sapien
catgaagaaatctgaagcaggcgat

SEQ ID NO: 386436 - DNA, 25 bp, Homo sapien
gaatttacctcagagctcagtcacc

SEQ ID NO: 386437 - DNA, 25 bp, Homo sapien
agaagttcagctgaggccgcacaag

SEQ ID NO: 386438 - DNA, 25 bp, Homo sapien
ccctccactagccatgtatctgatg

SEQ ID NO: 386439 - DNA, 25 bp, Homo sapien
acaaaatactctgggtgactttaca

SEQ ID NO: 386440 - DNA, 25 bp, Homo sapien
tctgatgatcagtcttgactaacag

SEQ ID NO: 386441 - DNA, 25 bp, Homo sapien
cagttctagtatgtctaaggctcca

SEQ ID NO: 386442 - DNA, 25 bp, Homo sapien
cccagctattgatccagacttctgg

SEQ ID NO: 386443 - DNA, 25 bp, Homo sapien
ggaatgttatgacagttacctttac

SEQ ID NO: 386444 - DNA, 25 bp, Homo sapien
atttaatatgttatcccagctattg

SEQ ID NO: 386445 - DNA, 25 bp, Homo sapien
tgattaaggtcccactaagctagtt

SEQ ID NO: 386446 - DNA, 25 bp, Homo sapien
ggccatatgctaagtattcttaaag

SEQ ID NO: 386447 - DNA, 25 bp, Homo sapien
tgctaagtattcttaaagtggtttg

SEQ ID NO: 386448 - DNA, 25 bp, Homo sapien
gcctggccatatgctaagtattctt

SEQ ID NO: 386449 - DNA, 25 bp, Homo sapien
cgcgcctggccatatgctaagtatt

SEQ ID NO: 386450 - DNA, 25 bp, Homo sapien
acttcacatttgctttagggaaact

SEQ ID NO: 386451 - DNA, 25 bp, Homo sapien
aaatctcactattatcaatgacggc

SEQ ID NO: 386452 - DNA, 25 bp, Homo sapien
tcctatgtagttgctggtttgaaac

SEQ ID NO: 386453 - DNA, 25 bp, Homo sapien
caatgacggcttaatgaaatcctaa

SEQ ID NO: 386454 - DNA, 25 bp, Homo sapien
tccgacgtgcccagaagtgttcaca

SEQ ID NO: 386455 - DNA, 25 bp, Homo sapien
tcagtggaacacactcccaagctgg

SEQ ID NO: 386456 - DNA, 25 bp, Homo sapien
tgacggtgccatagcttaaacaatg

SEQ ID NO: 386457 - DNA, 25 bp, Homo sapien
tgattacagtaagacaccccgaaga

SEQ ID NO: 386458 - DNA, 25 bp, Homo sapien
tgaaggaaccaatctaattccgtct

SEQ ID NO: 386459 - DNA, 25 bp, Homo sapien
tccaaatcttgaaggaaccaatcta

SEQ ID NO: 386460 - DNA, 25 bp, Homo sapien
gaaccaatctaattccgtctttgag

SEQ ID NO: 386461 - DNA, 25 bp, Homo sapien
tcttgaaggaaccaatctaattccg

SEQ ID NO: 386462 - DNA, 25 bp, Homo sapien
tttcttcttcagtgattttagtctt

SEQ ID NO: 386463 - DNA, 25 bp, Homo sapien
ttcactggcatttgaaaccttttta

SEQ ID NO: 386464 - DNA, 25 bp, Homo sapien
tcttcagtgattttagtctttcttg

SEQ ID NO: 386465 - DNA, 25 bp, Homo sapien
cagtgattttagtctttcttggatt

SEQ ID NO: 386466 - DNA, 25 bp, Homo sapien
actgatccagatgtaattcatgttc

SEQ ID NO: 386467 - DNA, 25 bp, Homo sapien
gatttcaagggactgatccagatgt

SEQ ID NO: 386468 - DNA, 25 bp, Homo sapien
gggactgatccagatgtaattcatg

SEQ ID NO: 386469 - DNA, 25 bp, Homo sapien
caagggactgatccagatgtaattc

SEQ ID NO: 386470 - DNA, 25 bp, Homo sapien
acagctctctgatgactctcttcat

SEQ ID NO: 386471 - DNA, 25 bp, Homo sapien
cacagctctctgatgactctcttca

SEQ ID NO: 386472 - DNA, 25 bp, Homo sapien
cagctctctgatgactctcttcata

SEQ ID NO: 386473 - DNA, 25 bp, Homo sapien
agctctctgatgactctcttcataa

SEQ ID NO: 386474 - DNA, 25 bp, Homo sapien
tagatcagaagacatatgagtattt

SEQ ID NO: 386475 - DNA, 25 bp, Homo sapien
gccagtagatcagaagacatatgag

SEQ ID NO: 386476 - DNA, 25 bp, Homo sapien
gacatatgagtattttacaaatgac

SEQ ID NO: 386477 - DNA, 25 bp, Homo sapien
cattcaaaccactttcccatttctc

SEQ ID NO: 386478 - DNA, 25 bp, Homo sapien
tgactccatgatctgtagcttatac

SEQ ID NO: 386479 - DNA, 25 bp, Homo sapien
tccttccagttttcaagtacggata

SEQ ID NO: 386480 - DNA, 25 bp, Homo sapien
aaggcttctgcttgtgactccatga

SEQ ID NO: 386481 - DNA, 25 bp, Homo sapien
agaaaggcttctgcttgtgactcca

SEQ ID NO: 386482 - DNA, 25 bp, Homo sapien
tctaaatgacgtgctgagaacaccc

SEQ ID NO: 386483 - DNA, 25 bp, Homo sapien
ttatcttctaaatgacgtgctgaga

SEQ ID NO: 386484 - DNA, 25 bp, Homo sapien
tgagaacacccacgaaactgcaata

SEQ ID NO: 386485 - DNA, 25 bp, Homo sapien
tgacgtgctgagaacacccacgaaa

SEQ ID NO: 386486 - DNA, 25 bp, Homo sapien
tcccatgaacgtatatcagactcca

SEQ ID NO: 386487 - DNA, 25 bp, Homo sapien
gaaacaattcccatgaacgtatatc

SEQ ID NO: 386488 - DNA, 25 bp, Homo sapien
caattcccatgaacgtatatcagac

SEQ ID NO: 386489 - DNA, 25 bp, Homo sapien
tagaaagaaacaattcccatgaacg

SEQ ID NO: 386490 - DNA, 25 bp, Homo sapien
ttagaaagttcactgagccgagaac

SEQ ID NO: 386491 - DNA, 25 bp, Homo sapien
aaatgaaagctcagaaatctgcact

SEQ ID NO: 386492 - DNA, 25 bp, Homo sapien
cagaaatctgcactttagaaagttc

SEQ ID NO: 386493 - DNA, 25 bp, Homo sapien
gaaagttcactgagccgagaaccat

SEQ ID NO: 386494 - DNA, 25 bp, Homo sapien
ccttattgggttgagaactttcagc

SEQ ID NO: 386495 - DNA, 25 bp, Homo sapien
agcaacctcaggatacgatcttttc

SEQ ID NO: 386496 - DNA, 25 bp, Homo sapien
agcatcattactcccatgctttggg

SEQ ID NO: 386497 - DNA, 25 bp, Homo sapien
atattgcttctctatggcatatctg

SEQ ID NO: 386498 - DNA, 25 bp, Homo sapien
tcccacgtggacacatggggcctgg

SEQ ID NO: 386499 - DNA, 25 bp, Homo sapien
tggcttgaacgcgcagcacgtcctg

SEQ ID NO: 386500 - DNA, 25 bp, Homo sapien
ccacagggcttcgttctgacagagc

SEQ ID NO: 386501 - DNA, 25 bp, Homo sapien
gcttgcagaagtcacaagcccttgg

SEQ ID NO: 386502 - DNA, 25 bp, Homo sapien
ggccatcgtcgcctgaagactcagg

SEQ ID NO: 386503 - DNA, 25 bp, Homo sapien
atgggaataccactgacaggtgctc

SEQ ID NO: 386504 - DNA, 25 bp, Homo sapien
catgggaataccactgacaggtgct

SEQ ID NO: 386505 - DNA, 25 bp, Homo sapien
acatgggaataccactgacaggtgc

SEQ ID NO: 386506 - DNA, 25 bp, Homo sapien
tgggaataccactgacaggtgctca

SEQ ID NO: 386507 - DNA, 25 bp, Homo sapien
cagttcgataaagtattaaacacag

SEQ ID NO: 386508 - DNA, 25 bp, Homo sapien
tcagttcgataaagtattaaacaca

SEQ ID NO: 386509 - DNA, 25 bp, Homo sapien
tgagacaagaggcaactctgtcccc

SEQ ID NO: 386510 - DNA, 25 bp, Homo sapien
gaaacgctactgaagagcctgccat

SEQ ID NO: 386511 - DNA, 25 bp, Homo sapien
tcatctttcacagctgagacaagag

SEQ ID NO: 386512 - DNA, 25 bp, Homo sapien
cctgaacagcggaaaccagaggtgg

SEQ ID NO: 386513 - DNA, 25 bp, Homo sapien
caacagaaagttctctactgctaag

SEQ ID NO: 386514 - DNA, 25 bp, Homo sapien
gaagaccactgataacaacaataac

SEQ ID NO: 386515 - DNA, 25 bp, Homo sapien
caataactatctaaaaagcataact

SEQ ID NO: 386516 - DNA, 25 bp, Homo sapien
gagtgagtgatgaatgacaacagaa

SEQ ID NO: 386517 - DNA, 25 bp, Homo sapien
acaatttcatcaatactcaatcctg

SEQ ID NO: 386518 - DNA, 25 bp, Homo sapien
caatttcatcaatactcaatcctga

SEQ ID NO: 386519 - DNA, 25 bp, Homo sapien
ttttctgttcatctagaatgtgttc

SEQ ID NO: 386520 - DNA, 25 bp, Homo sapien
ttctgttcatctagaatgtgttctg

SEQ ID NO: 386521 - DNA, 25 bp, Homo sapien
tgtctttagtacattgctctctagg

SEQ ID NO: 386522 - DNA, 25 bp, Homo sapien
acaagagggaagcaaccagttatcc

SEQ ID NO: 386523 - DNA, 25 bp, Homo sapien
aataaataaggataaactggaacat

SEQ ID NO: 386524 - DNA, 25 bp, Homo sapien
aaactggaacatctagataaaatac

SEQ ID NO: 386525 - DNA, 25 bp, Homo sapien
aacaaccaccgagggtgagccctgg

SEQ ID NO: 386526 - DNA, 25 bp, Homo sapien
gaatggggctaaatcatggattaaa

SEQ ID NO: 386527 - DNA, 25 bp, Homo sapien
cattcaagtacattgaaattcagtt

SEQ ID NO: 386528 - DNA, 25 bp, Homo sapien
aaatgaatggggctaaatcatggat

SEQ ID NO: 386529 - DNA, 25 bp, Homo sapien
tctagaaatgaatggggctaaatca

SEQ ID NO: 386530 - DNA, 25 bp, Homo sapien
agagagaaggctcagatcccccacg

SEQ ID NO: 386531 - DNA, 25 bp, Homo sapien
tcagatcccccacgatggtcagagc

SEQ ID NO: 386532 - DNA, 25 bp, Homo sapien
gagcccttgtcactcatgtgcaggg

SEQ ID NO: 386533 - DNA, 25 bp, Homo sapien
gaaggctcagatcccccacgatggt

SEQ ID NO: 386534 - DNA, 25 bp, Homo sapien
actggatgtacaaagttcatgtact

SEQ ID NO: 386535 - DNA, 25 bp, Homo sapien
gtacaaagttcatgtacttgaccat

SEQ ID NO: 386536 - DNA, 25 bp, Homo sapien
gatgtacaaagttcatgtacttgac

SEQ ID NO: 386537 - DNA, 25 bp, Homo sapien
tggatgtacaaagttcatgtacttg

SEQ ID NO: 386538 - DNA, 25 bp, Homo sapien
tccaaagccatggttacacagaaga

SEQ ID NO: 386539 - DNA, 25 bp, Homo sapien
aagccatggttacacagaagaaaat

SEQ ID NO: 386540 - DNA, 25 bp, Homo sapien
caaagccatggttacacagaagaaa

SEQ ID NO: 386541 - DNA, 25 bp, Homo sapien
tcacggtctatcttggggtgggtgt

SEQ ID NO: 386542 - DNA, 25 bp, Homo sapien
tgtctctcccaaggcatgactcggc

SEQ ID NO: 386543 - DNA, 25 bp, Homo sapien
ggctgagaagaccttgaactgctgt

SEQ ID NO: 386544 - DNA, 25 bp, Homo sapien
caatgcccagtgcaaagctcggagc

SEQ ID NO: 386545 - DNA, 25 bp, Homo sapien
gctcggagccaggtttagtttgaaa

SEQ ID NO: 386546 - DNA, 25 bp, Homo sapien
ggcacaaaatgagtcccatctgggt

SEQ ID NO: 386547 - DNA, 25 bp, Homo sapien
gtcccatctgggtctttagcagctg

SEQ ID NO: 386548 - DNA, 25 bp, Homo sapien
tctgagcgccttgaaggcacaaaat

SEQ ID NO: 386549 - DNA, 25 bp, Homo sapien
tactctagctcactgcctcttaact

SEQ ID NO: 386550 - DNA, 25 bp, Homo sapien
aaaggaaaatcatgacggaagccca

SEQ ID NO: 386551 - DNA, 25 bp, Homo sapien
ttttatgtgaccagaagatccccag

SEQ ID NO: 386552 - DNA, 25 bp, Homo sapien
tatgggataatcacatggcatggtg

SEQ ID NO: 386553 - DNA, 25 bp, Homo sapien
taatccctgacatagaaagctggcc

SEQ ID NO: 386554 - DNA, 25 bp, Homo sapien
tgcccacatttgagcacacgcacgt

SEQ ID NO: 386555 - DNA, 25 bp, Homo sapien
tttgtgatacttgtgcccacatttg

SEQ ID NO: 386556 - DNA, 25 bp, Homo sapien
gcacacgcacgttttttgatttgaa

SEQ ID NO: 386557 - DNA, 25 bp, Homo sapien
cacgttttttgatttgaacacctcg

SEQ ID NO: 386558 - DNA, 25 bp, Homo sapien
aaggatggccaaaaagagctcttac

SEQ ID NO: 386559 - DNA, 25 bp, Homo sapien
aaatatttgaaggtcccaatgcatg

SEQ ID NO: 386560 - DNA, 25 bp, Homo sapien
aatagtttgaaagcacaataaatac

SEQ ID NO: 386561 - DNA, 25 bp, Homo sapien
caatgcatgctgtaaggatggccaa

SEQ ID NO: 386562 - DNA, 25 bp, Homo sapien
gcacacaaatgctcacggtacctag

SEQ ID NO: 386563 - DNA, 25 bp, Homo sapien
cccagaacggtacgagcaggactgt

SEQ ID NO: 386564 - DNA, 25 bp, Homo sapien
tggaaaggacggtctccagagctgc

SEQ ID NO: 386565 - DNA, 25 bp, Homo sapien
tataagaccctgtacccaaggaggc

SEQ ID NO: 386566 - DNA, 25 bp, Homo sapien
caggagatcacgaccctggcaggcc

SEQ ID NO: 386567 - DNA, 25 bp, Homo sapien
aggagatcacgaccctggcaggccg

SEQ ID NO: 386568 - DNA, 25 bp, Homo sapien
gagatcacgaccctggcaggccggg

SEQ ID NO: 386569 - DNA, 25 bp, Homo sapien
agatcacgaccctggcaggccgggc

SEQ ID NO: 386570 - DNA, 25 bp, Homo sapien
tcttcggattcaacacactggtgga

SEQ ID NO: 386571 - DNA, 25 bp, Homo sapien
cactggtggatgacactttagtgaa

SEQ ID NO: 386572 - DNA, 25 bp, Homo sapien
tagccgtcattttattagccactgt

SEQ ID NO: 386573 - DNA, 25 bp, Homo sapien
gccactgttggcaatcatcaaagta

SEQ ID NO: 386574 - DNA, 25 bp, Homo sapien
tgctaaggaaggcagcggagttcaa

SEQ ID NO: 386575 - DNA, 25 bp, Homo sapien
tctgtttcaaactaaggcgtgagct

SEQ ID NO: 386576 - DNA, 25 bp, Homo sapien
gaatactgcttcgagacgttcatag

SEQ ID NO: 386577 - DNA, 25 bp, Homo sapien
tgatcctcatgcacgttaacaccca

SEQ ID NO: 386578 - DNA, 25 bp, Homo sapien
agagataaagccagatgcactggag

SEQ ID NO: 386579 - DNA, 25 bp, Homo sapien
cccagagataaagccagatgcactg

SEQ ID NO: 386580 - DNA, 25 bp, Homo sapien
gataaagccagatgcactggagccc

SEQ ID NO: 386581 - DNA, 25 bp, Homo sapien
ataaagccagatgcactggagcccc

SEQ ID NO: 386582 - DNA, 25 bp, Homo sapien
cctgcagtactgaggccttccatca

SEQ ID NO: 386583 - DNA, 25 bp, Homo sapien
ctgtgacctcccatgtattgtgtga

SEQ ID NO: 386584 - DNA, 25 bp, Homo sapien
tattgtgtgattgtagatgacatcc

SEQ ID NO: 386585 - DNA, 25 bp, Homo sapien
gattgtagatgacatccgtctcccc

SEQ ID NO: 386586 - DNA, 25 bp, Homo sapien
cagaactcccaggctaacgggatcc

SEQ ID NO: 386587 - DNA, 25 bp, Homo sapien
tcaccacgtgttgagacgcgcgaag

SEQ ID NO: 386588 - DNA, 25 bp, Homo sapien
cattagtgttattctgggtcaggcc

SEQ ID NO: 386589 - DNA, 25 bp, Homo sapien
caagaataaatgatgaccgccggaa

SEQ ID NO: 386590 - DNA, 25 bp, Homo sapien
tttgaattgttacgtcaccctggcg

SEQ ID NO: 386591 - DNA, 25 bp, Homo sapien
taacgctgattcagggcggcagcag

SEQ ID NO: 386592 - DNA, 25 bp, Homo sapien
tgggctcgtctatacgctgctggac

SEQ ID NO: 386593 - DNA, 25 bp, Homo sapien
cagttacatcgcagacatgggctcg

SEQ ID NO: 386594 - DNA, 25 bp, Homo sapien
tcttcggctgtaggcgtggtcacgt

SEQ ID NO: 386595 - DNA, 25 bp, Homo sapien
gctctggagtcttggtgggcaaggg

SEQ ID NO: 386596 - DNA, 25 bp, Homo sapien
gagtcttggtgggcaaggggaacga

SEQ ID NO: 386597 - DNA, 25 bp, Homo sapien
ctgctctggagtcttggtgggcaag

SEQ ID NO: 386598 - DNA, 25 bp, Homo sapien
gaacgaaccttccagtccatttcta

SEQ ID NO: 386599 - DNA, 25 bp, Homo sapien
ttgggaaatgcccgttttggcagga

SEQ ID NO: 386600 - DNA, 25 bp, Homo sapien
caggaatacattttggctccgctgt

SEQ ID NO: 386601 - DNA, 25 bp, Homo sapien
ccagggcttcatgcagagtagacat

SEQ ID NO: 386602 - DNA, 25 bp, Homo sapien
cgctgtgctgtgaattcggaggaaa

SEQ ID NO: 386603 - DNA, 25 bp, Homo sapien
agatgtttggctaccttgggctgca

SEQ ID NO: 386604 - DNA, 25 bp, Homo sapien
tctccatgatctgttactaggcaaa

SEQ ID NO: 386605 - DNA, 25 bp, Homo sapien
tgaagcgcatccagacaacgtggct

SEQ ID NO: 386606 - DNA, 25 bp, Homo sapien
ttgggctgcaactgtcccactcttg

SEQ ID NO: 386607 - DNA, 25 bp, Homo sapien
tatgtttgctcctgttgttactggg

SEQ ID NO: 386608 - DNA, 25 bp, Homo sapien
gttactgggtaggttctgaacagca

SEQ ID NO: 386609 - DNA, 25 bp, Homo sapien
gcccctctccgcaaggtggtagcag

SEQ ID NO: 386610 - DNA, 25 bp, Homo sapien
ggtccttgacttgatgaatttggtc

SEQ ID NO: 386611 - DNA, 25 bp, Homo sapien
aattgcctaagagatctgtccagag

SEQ ID NO: 386612 - DNA, 25 bp, Homo sapien
gcagcagtgatgactgagtagtacc

SEQ ID NO: 386613 - DNA, 25 bp, Homo sapien
ttgggactgtttccaccctgaaaga

SEQ ID NO: 386614 - DNA, 25 bp, Homo sapien
ttcagaggaagctgcgtacgtagcc

SEQ ID NO: 386615 - DNA, 25 bp, Homo sapien
ccgagccactgatgttaaactataa

SEQ ID NO: 386616 - DNA, 25 bp, Homo sapien
cttctgagaagttgtgcctgtggct

SEQ ID NO: 386617 - DNA, 25 bp, Homo sapien
agtcatgggtcttctccgagccact

SEQ ID NO: 386618 - DNA, 25 bp, Homo sapien
agagattcacttcctaagtcatggg

SEQ ID NO: 386619 - DNA, 25 bp, Homo sapien
gcttctctgatgagcacgcacacca

SEQ ID NO: 386620 - DNA, 25 bp, Homo sapien
acttgacaatatggcctttcccagg

SEQ ID NO: 386621 - DNA, 25 bp, Homo sapien
gggttggctcttggtgacgcgagtg

SEQ ID NO: 386622 - DNA, 25 bp, Homo sapien
tcttggtgacgcgagtgggtcccag

SEQ ID NO: 386623 - DNA, 25 bp, Homo sapien
gggacttggaggagcccctcgaagc

SEQ ID NO: 386624 - DNA, 25 bp, Homo sapien
gaatgcttgtttccaggcggctctt

SEQ ID NO: 386625 - DNA, 25 bp, Homo sapien
cccctcgaagcaggctctgagtggt

SEQ ID NO: 386626 - DNA, 25 bp, Homo sapien
tgccagtggtttccgctgtgagagc

SEQ ID NO: 386627 - DNA, 25 bp, Homo sapien
cagctcttccacctatttcatggta

SEQ ID NO: 386628 - DNA, 25 bp, Homo sapien
catggtatttagctatctccttgcc

SEQ ID NO: 386629 - DNA, 25 bp, Homo sapien
ttagctatctccttgcctcgccgaa

SEQ ID NO: 386630 - DNA, 25 bp, Homo sapien
cctcgccgaaaatgcagtttgtggt

SEQ ID NO: 386631 - DNA, 25 bp, Homo sapien
cttattaagggatcagtttggccag

SEQ ID NO: 386632 - DNA, 25 bp, Homo sapien
cattataccctgttgatatgtgacg

SEQ ID NO: 386633 - DNA, 25 bp, Homo sapien
tatagagatctatgtatgccagttc

SEQ ID NO: 386634 - DNA, 25 bp, Homo sapien
tgatctcctgtgaagctgtcgggtt

SEQ ID NO: 386635 - DNA, 25 bp, Homo sapien
ggctcttcagaaccccagggagaaa

SEQ ID NO: 386636 - DNA, 25 bp, Homo sapien
gaagtacgttaacagtgcactgccc

SEQ ID NO: 386637 - DNA, 25 bp, Homo sapien
gatctgaatatttaacacccggttc

SEQ ID NO: 386638 - DNA, 25 bp, Homo sapien
caatcagcgctttgcaggactagca

SEQ ID NO: 386639 - DNA, 25 bp, Homo sapien
aagaagctgactgtgcccaaaattc

SEQ ID NO: 386640 - DNA, 25 bp, Homo sapien
tcttttggattttgcaggacgtggc

SEQ ID NO: 386641 - DNA, 25 bp, Homo sapien
agaagctgactgtgcccaaaattct

SEQ ID NO: 386642 - DNA, 25 bp, Homo sapien
tggattttgcaggacgtggcaggaa

SEQ ID NO: 386643 - DNA, 25 bp, Homo sapien
taacttcataatgccccaaccattt

SEQ ID NO: 386644 - DNA, 25 bp, Homo sapien
ctgttccagggcttacttgtctgcc

SEQ ID NO: 386645 - DNA, 25 bp, Homo sapien
ccatttccttataacagtacactgg

SEQ ID NO: 386646 - DNA, 25 bp, Homo sapien
gaaaggacaaagctgatcgtggcca

SEQ ID NO: 386647 - DNA, 25 bp, Homo sapien
cctgacatagccaagattccaggat

SEQ ID NO: 386648 - DNA, 25 bp, Homo sapien
ccacgatccatttccggctgcacag

SEQ ID NO: 386649 - DNA, 25 bp, Homo sapien
ccaggatatttgcagaagagtggca

SEQ ID NO: 386650 - DNA, 25 bp, Homo sapien
caaacacttcctgacatagccaaga

SEQ ID NO: 386651 - DNA, 25 bp, Homo sapien
aaccattgatcattctgtgcctcga

SEQ ID NO: 386652 - DNA, 25 bp, Homo sapien
ggtttccgtgaactgacgcacttag

SEQ ID NO: 386653 - DNA, 25 bp, Homo sapien
catccatgctgttgcgtagatcagt

SEQ ID NO: 386654 - DNA, 25 bp, Homo sapien
tgcctcgatttgatcagccacaaca

SEQ ID NO: 386655 - DNA, 25 bp, Homo sapien
tgcccagtaatgagatggctggatc

SEQ ID NO: 386656 - DNA, 25 bp, Homo sapien
tatgcccagtaatgagatggctgga

SEQ ID NO: 386657 - DNA, 25 bp, Homo sapien
gcccagtaatgagatggctggatca

SEQ ID NO: 386658 - DNA, 25 bp, Homo sapien
atgcccagtaatgagatggctggat

SEQ ID NO: 386659 - DNA, 25 bp, Homo sapien
gcttttatgttgcaaaattgtgata

SEQ ID NO: 386660 - DNA, 25 bp, Homo sapien
tatgttgcaaaattgtgatattcac

SEQ ID NO: 386661 - DNA, 25 bp, Homo sapien
atattgcttttatgttgcaaaattg

SEQ ID NO: 386662 - DNA, 25 bp, Homo sapien
ttgcaaaattgtgatattcacatcc

SEQ ID NO: 386663 - DNA, 25 bp, Homo sapien
tccttccttgcgtgcgtccgtgcat

SEQ ID NO: 386664 - DNA, 25 bp, Homo sapien
catcactttccgtattatcaccttc

SEQ ID NO: 386665 - DNA, 25 bp, Homo sapien
tccctccttccttgcgtgcgtccgt

SEQ ID NO: 386666 - DNA, 25 bp, Homo sapien
cactttccgtattatcaccttcttt

SEQ ID NO: 386667 - DNA, 25 bp, Homo sapien
ttccaaatcctcagagccattacag

SEQ ID NO: 386668 - DNA, 25 bp, Homo sapien
tcattcattcctagattctaaaacc

SEQ ID NO: 386669 - DNA, 25 bp, Homo sapien
aaccttttccaaatcctcagagcca

SEQ ID NO: 386670 - DNA, 25 bp, Homo sapien
ccttttccaaatcctcagagccatt

SEQ ID NO: 386671 - DNA, 25 bp, Homo sapien
tgtttccttctaactcccggatcca

SEQ ID NO: 386672 - DNA, 25 bp, Homo sapien
tatggagaactgataggtaaccttg

SEQ ID NO: 386673 - DNA, 25 bp, Homo sapien
tgataggtaaccttgcttgactttg

SEQ ID NO: 386674 - DNA, 25 bp, Homo sapien
gctgatatcaatcatggaagccttg

SEQ ID NO: 386675 - DNA, 25 bp, Homo sapien
ccagcttgtgatagatctggaatgc

SEQ ID NO: 386676 - DNA, 25 bp, Homo sapien
ctcccagcttgtgatagatctggaa

SEQ ID NO: 386677 - DNA, 25 bp, Homo sapien
cctcccagcttgtgatagatctgga

SEQ ID NO: 386678 - DNA, 25 bp, Homo sapien
cccagcttgtgatagatctggaatg

SEQ ID NO: 386679 - DNA, 25 bp, Homo sapien
aagggattggtgagcttgataataa

SEQ ID NO: 386680 - DNA, 25 bp, Homo sapien
ttttattgtaatgaagcagggcaca

SEQ ID NO: 386681 - DNA, 25 bp, Homo sapien
tgtcttgcaagtctggatgttttag

SEQ ID NO: 386682 - DNA, 25 bp, Homo sapien
tcttgcaagtctggatgttttagaa

SEQ ID NO: 386683 - DNA, 25 bp, Homo sapien
actgacattttgttcacattagtca

SEQ ID NO: 386684 - DNA, 25 bp, Homo sapien
cattttgttcacattagtcattgga

SEQ ID NO: 386685 - DNA, 25 bp, Homo sapien
tgttcacattagtcattggagacat

SEQ ID NO: 386686 - DNA, 25 bp, Homo sapien
tttgttcacattagtcattggagac

SEQ ID NO: 386687 - DNA, 25 bp, Homo sapien
gagacatcatagactcacacataga

SEQ ID NO: 386688 - DNA, 25 bp, Homo sapien
gacatcatagactcacacatagatg

SEQ ID NO: 386689 - DNA, 25 bp, Homo sapien
agagacatcatagactcacacatag

SEQ ID NO: 386690 - DNA, 25 bp, Homo sapien
gcagagacatcatagactcacacat

SEQ ID NO: 386691 - DNA, 25 bp, Homo sapien
ctgagttgacagaatggaaggcatc

SEQ ID NO: 386692 - DNA, 25 bp, Homo sapien
taggtcatggcacagagaccttctg

SEQ ID NO: 386693 - DNA, 25 bp, Homo sapien
cgtggactacgaactttgcagctgc

SEQ ID NO: 386694 - DNA, 25 bp, Homo sapien
tgctggaaacaggaacacattcgtg

SEQ ID NO: 386695 - DNA, 25 bp, Homo sapien
tcactctggagttgaaagagggacc

SEQ ID NO: 386696 - DNA, 25 bp, Homo sapien
actctggagttgaaagagggaccat

SEQ ID NO: 386697 - DNA, 25 bp, Homo sapien
atctgcatccggccttcctctcgct

SEQ ID NO: 386698 - DNA, 25 bp, Homo sapien
agagggaccatctgcatccggcctt

SEQ ID NO: 386699 - DNA, 25 bp, Homo sapien
tccttcagataaaagtatgcgtcct

SEQ ID NO: 386700 - DNA, 25 bp, Homo sapien
gaagtgattccaccaatatgcactc

SEQ ID NO: 386701 - DNA, 25 bp, Homo sapien
ctatctgatgcctatttgggaaagc

SEQ ID NO: 386702 - DNA, 25 bp, Homo sapien
tgtgccctgcctgtgtatatctatc

SEQ ID NO: 386703 - DNA, 25 bp, Homo sapien
gacatcgcaggaattccggacgctg

SEQ ID NO: 386704 - DNA, 25 bp, Homo sapien
gagaccagcgttgggaaattaggct

SEQ ID NO: 386705 - DNA, 25 bp, Homo sapien
cgcccaggttttgtggcgcccgaga

SEQ ID NO: 386706 - DNA, 25 bp, Homo sapien
gatgaatccccttgtgctgttactg

SEQ ID NO: 386707 - DNA, 25 bp, Homo sapien
ttcctccggtgagtctcagcctcgg

SEQ ID NO: 386708 - DNA, 25 bp, Homo sapien
cgctccgaacctgcgcagcgagaag

SEQ ID NO: 386709 - DNA, 25 bp, Homo sapien
aaatggcgcgcgctccgaacctgcg

SEQ ID NO: 386710 - DNA, 25 bp, Homo sapien
ccggcggcttcttcccgaggaggat

SEQ ID NO: 386711 - DNA, 25 bp, Homo sapien
tgggcaagctggtcgatccactgaa

SEQ ID NO: 386712 - DNA, 25 bp, Homo sapien
taatgattcacaactccagactggc

SEQ ID NO: 386713 - DNA, 25 bp, Homo sapien
gagcctggcacttgtgaaaacaacg

SEQ ID NO: 386714 - DNA, 25 bp, Homo sapien
tatgaccttagaccagtcagtgccc

SEQ ID NO: 386715 - DNA, 25 bp, Homo sapien
acacacgaaaacacctcagggcagc

SEQ ID NO: 386716 - DNA, 25 bp, Homo sapien
tacaggaaacgtgaaagccttctca

SEQ ID NO: 386717 - DNA, 25 bp, Homo sapien
ttcagtggcacaagattataaggca

SEQ ID NO: 386718 - DNA, 25 bp, Homo sapien
caaagacaaactggcacacgcctaa

SEQ ID NO: 386719 - DNA, 25 bp, Homo sapien
tacgcaccagcattgtttaaaagag

SEQ ID NO: 386720 - DNA, 25 bp, Homo sapien
ttaagaacaatagaggctgggcagt

SEQ ID NO: 386721 - DNA, 25 bp, Homo sapien
tatccatatacctggtgaaccagcc

SEQ ID NO: 386722 - DNA, 25 bp, Homo sapien
tatacatgcaaggaagtacgcacca

SEQ ID NO: 386723 - DNA, 25 bp, Homo sapien
tccatccactcttcaagatcgagac

SEQ ID NO: 386724 - DNA, 25 bp, Homo sapien
ccaatagactgtcaagtcctcaggt

SEQ ID NO: 386725 - DNA, 25 bp, Homo sapien
tccacaatgcacactcgaatcccca

SEQ ID NO: 386726 - DNA, 25 bp, Homo sapien
tcaagatcgagacccagtcccatct

SEQ ID NO: 386727 - DNA, 25 bp, Homo sapien
gaaatactcactttggtctgttgga

SEQ ID NO: 386728 - DNA, 25 bp, Homo sapien
cgtaacatccgtgatagcagggaca

SEQ ID NO: 386729 - DNA, 25 bp, Homo sapien
ttttcaggcaaatactaagatgctc

SEQ ID NO: 386730 - DNA, 25 bp, Homo sapien
tccttaggcctactcaagaactatt

SEQ ID NO: 386731 - DNA, 25 bp, Homo sapien
gagagagcaaaacactactggtcct

SEQ ID NO: 386732 - DNA, 25 bp, Homo sapien
tagcgtggtctctaccccaaaagtc

SEQ ID NO: 386733 - DNA, 25 bp, Homo sapien
ctaggagccggtacagtcacatgat

SEQ ID NO: 386734 - DNA, 25 bp, Homo sapien
cagcatatgcaaagactaggagccg

SEQ ID NO: 386735 - DNA, 25 bp, Homo sapien
gctttaagaaagctcattcagctga

SEQ ID NO: 386736 - DNA, 25 bp, Homo sapien
cagggtatcactcaaagtgtactca

SEQ ID NO: 386737 - DNA, 25 bp, Homo sapien
gattcactattatgtcccaagagct

SEQ ID NO: 386738 - DNA, 25 bp, Homo sapien
ggcaggaaccatgaatatccatctg

SEQ ID NO: 386739 - DNA, 25 bp, Homo sapien
gaaaaagtgattacctatagggcag

SEQ ID NO: 386740 - DNA, 25 bp, Homo sapien
ccagtatgggtcaggttcaatagct

SEQ ID NO: 386741 - DNA, 25 bp, Homo sapien
gacactgccgcaaccatctgattaa

SEQ ID NO: 386742 - DNA, 25 bp, Homo sapien
taatctgaggatagagcctgccagt

SEQ ID NO: 386743 - DNA, 25 bp, Homo sapien
gtatgctccaaaggcaaagctgaag

SEQ ID NO: 386744 - DNA, 25 bp, Homo sapien
gaaaagcacagtatgctccaaaggc

SEQ ID NO: 386745 - DNA, 25 bp, Homo sapien
cctaacacgagtgggaaaatgtaag

SEQ ID NO: 386746 - DNA, 25 bp, Homo sapien
ggcaaagctgaagaggagcctaaca

SEQ ID NO: 386747 - DNA, 25 bp, Homo sapien
gaaatgatcgcttgcccaaagctca

SEQ ID NO: 386748 - DNA, 25 bp, Homo sapien
tatcaagatgagtacagttcaactg

SEQ ID NO: 386749 - DNA, 25 bp, Homo sapien
agttagaaatacaccactgcaggta

SEQ ID NO: 386750 - DNA, 25 bp, Homo sapien
aatctgtatttatgatccgtatcaa

SEQ ID NO: 386751 - DNA, 25 bp, Homo sapien
caagtcaagaagtactggcagccac

SEQ ID NO: 386752 - DNA, 25 bp, Homo sapien
agtgtgataagctggaaaatggtcc

SEQ ID NO: 386753 - DNA, 25 bp, Homo sapien
cacaagtcaagtaatgctggcatcc

SEQ ID NO: 386754 - DNA, 25 bp, Homo sapien
tggtaaaattttgggagctgtctcc

SEQ ID NO: 386755 - DNA, 25 bp, Homo sapien
aaaatcttaaaggaacacatggtct

SEQ ID NO: 386756 - DNA, 25 bp, Homo sapien
agaaactatctaatctaggccaggg

SEQ ID NO: 386757 - DNA, 25 bp, Homo sapien
ccaaagggcaaaatttactagatga

SEQ ID NO: 386758 - DNA, 25 bp, Homo sapien
tgaataacataataaccaaagggca

SEQ ID NO: 386759 - DNA, 25 bp, Homo sapien
caattacaactggatgtagccacag

SEQ ID NO: 386760 - DNA, 25 bp, Homo sapien
taatgtatgactacgcacacaccat

SEQ ID NO: 386761 - DNA, 25 bp, Homo sapien
gaagtggctaacactgggacgtccc

SEQ ID NO: 386762 - DNA, 25 bp, Homo sapien
gatgccatgacactggatgacgtcc

SEQ ID NO: 386763 - DNA, 25 bp, Homo sapien
cgcaccctgtcccatcactttatat

SEQ ID NO: 386764 - DNA, 25 bp, Homo sapien
ccaccgcaccctgtcccatcacttt

SEQ ID NO: 386765 - DNA, 25 bp, Homo sapien
caccctgtcccatcactttatattt

SEQ ID NO: 386766 - DNA, 25 bp, Homo sapien
cctgtcccatcactttatattttca

SEQ ID NO: 386767 - DNA, 25 bp, Homo sapien
tactgctgaagccaagaggctaggg

SEQ ID NO: 386768 - DNA, 25 bp, Homo sapien
caaacttcatagtgccaagctgggc

SEQ ID NO: 386769 - DNA, 25 bp, Homo sapien
cagctagttttgagtgatcgacaca

SEQ ID NO: 386770 - DNA, 25 bp, Homo sapien
taagtgagctactggacaaaagcag

SEQ ID NO: 386771 - DNA, 25 bp, Homo sapien
actgtagtgaccacctatgatcgtg

SEQ ID NO: 386772 - DNA, 25 bp, Homo sapien
gactgtagtgaccacctatgatcgt

SEQ ID NO: 386773 - DNA, 25 bp, Homo sapien
tgagactgtagtgaccacctatgat

SEQ ID NO: 386774 - DNA, 25 bp, Homo sapien
ctgagactgtagtgaccacctatga

SEQ ID NO: 386775 - DNA, 25 bp, Homo sapien
acatcaaaatgagccgagtatggtg

SEQ ID NO: 386776 - DNA, 25 bp, Homo sapien
attttctgtgtaagtccaggagacg

SEQ ID NO: 386777 - DNA, 25 bp, Homo sapien
caggagacgtgcaataggtgagaaa

SEQ ID NO: 386778 - DNA, 25 bp, Homo sapien
aattaacatcaaaatgagccgagta

SEQ ID NO: 386779 - DNA, 25 bp, Homo sapien
tgggacttcattcacagacttgcca

SEQ ID NO: 386780 - DNA, 25 bp, Homo sapien
tggcacagcggaatacaatgaaaat

SEQ ID NO: 386781 - DNA, 25 bp, Homo sapien
gcttcatgtagaaaaagtgggttgt

SEQ ID NO: 386782 - DNA, 25 bp, Homo sapien
aactggtggattacatacaaaatgc

SEQ ID NO: 386783 - DNA, 25 bp, Homo sapien
ctgattccaggaagtcaaggctgca

SEQ ID NO: 386784 - DNA, 25 bp, Homo sapien
ccagcctgggcaacagggtgagatc

SEQ ID NO: 386785 - DNA, 25 bp, Homo sapien
gtgagccctgatcatgccactgcac

SEQ ID NO: 386786 - DNA, 25 bp, Homo sapien
actccagcctgggcaacagggtgag

SEQ ID NO: 386787 - DNA, 25 bp, Homo sapien
tcctgacagccctacgagtaggtag

SEQ ID NO: 386788 - DNA, 25 bp, Homo sapien
cagaaggattaactggcctaaggtc

SEQ ID NO: 386789 - DNA, 25 bp, Homo sapien
tgtgaactatggtcccacattaaag

SEQ ID NO: 386790 - DNA, 25 bp, Homo sapien
tgtgccaaccacttggctaaggcat

SEQ ID NO: 386791 - DNA, 25 bp, Homo sapien
tatgttggccaagttcctaggtcag

SEQ ID NO: 386792 - DNA, 25 bp, Homo sapien
gcaagacaattaccccaactgagga

SEQ ID NO: 386793 - DNA, 25 bp, Homo sapien
caaaatgtgcctattaccacggaaa

SEQ ID NO: 386794 - DNA, 25 bp, Homo sapien
caagtggtgctacaagtgggtcata

SEQ ID NO: 386795 - DNA, 25 bp, Homo sapien
ggaagagtccagcggcaaaactata

SEQ ID NO: 386796 - DNA, 25 bp, Homo sapien
tcaagtctcatatcatcctgatggg

SEQ ID NO: 386797 - DNA, 25 bp, Homo sapien
cgtcttctttcaagtctcatatcat

SEQ ID NO: 386798 - DNA, 25 bp, Homo sapien
agagtccagcggcaaaactataaca

SEQ ID NO: 386799 - DNA, 25 bp, Homo sapien
caaagagtggttgctaggttcccca

SEQ ID NO: 386800 - DNA, 25 bp, Homo sapien
tcagggatccttgtatgcagagcag

SEQ ID NO: 386801 - DNA, 25 bp, Homo sapien
tctgcctacaggtaaagccattact

SEQ ID NO: 386802 - DNA, 25 bp, Homo sapien
gaaagcagttacctgagtgtggagc

SEQ ID NO: 386803 - DNA, 25 bp, Homo sapien
ccttcagaacttattgtgtcctcca

SEQ ID NO: 386804 - DNA, 25 bp, Homo sapien
gactcatgaataagatctcctgtgc

SEQ ID NO: 386805 - DNA, 25 bp, Homo sapien
tgtggattctatccccagcagtgtc

SEQ ID NO: 386806 - DNA, 25 bp, Homo sapien
tccagggaactcaaaactatctcca

SEQ ID NO: 386807 - DNA, 25 bp, Homo sapien
cccggctggttattcatcttaaaca

SEQ ID NO: 386808 - DNA, 25 bp, Homo sapien
cggctggttattcatcttaaacagt

SEQ ID NO: 386809 - DNA, 25 bp, Homo sapien
ccggctggttattcatcttaaacag

SEQ ID NO: 386810 - DNA, 25 bp, Homo sapien
gcttactgtgcctgataaaaaccaa

SEQ ID NO: 386811 - DNA, 25 bp, Homo sapien
ttgcttgtttaagaacacatgttcc

SEQ ID NO: 386812 - DNA, 25 bp, Homo sapien
caccttttgaggagatgatctacac

SEQ ID NO: 386813 - DNA, 25 bp, Homo sapien
gagtaactcatttatgaagccctgg

SEQ ID NO: 386814 - DNA, 25 bp, Homo sapien
tgacaaatcataccatactaacaat

SEQ ID NO: 386815 - DNA, 25 bp, Homo sapien
ttttcaatttgaagccatcttattt

SEQ ID NO: 386816 - DNA, 25 bp, Homo sapien
ttttaggtagaaatagaacacagct

SEQ ID NO: 386817 - DNA, 25 bp, Homo sapien
tctggcatgactaccttggtcaagt

SEQ ID NO: 386818 - DNA, 25 bp, Homo sapien
gaggccccagtgagctacaaaagca

SEQ ID NO: 386819 - DNA, 25 bp, Homo sapien
aatgtccaggtacgcacaaaagcag

SEQ ID NO: 386820 - DNA, 25 bp, Homo sapien
ctatggttgcggacagtggctcaca

SEQ ID NO: 386821 - DNA, 25 bp, Homo sapien
gcagaaagacacaacccatacgggt

SEQ ID NO: 386822 - DNA, 25 bp, Homo sapien
ttctcataacaacaaggcaaaggct

SEQ ID NO: 386823 - DNA, 25 bp, Homo sapien
aggatcgcaagacatcactaggtga

SEQ ID NO: 386824 - DNA, 25 bp, Homo sapien
caagacctccttgggtaaggatcgc

SEQ ID NO: 386825 - DNA, 25 bp, Homo sapien
caattagtgctttggagggaagtac

SEQ ID NO: 386826 - DNA, 25 bp, Homo sapien
caggctacagctattgctcagtcaa

SEQ ID NO: 386827 - DNA, 25 bp, Homo sapien
tgtcaacccactagccaaaagagca

SEQ ID NO: 386828 - DNA, 25 bp, Homo sapien
agtggccaatatgtgttactacagg

SEQ ID NO: 386829 - DNA, 25 bp, Homo sapien
gctttcttattaccctctagtggcc

SEQ ID NO: 386830 - DNA, 25 bp, Homo sapien
gcctggccaagggtcaacatttcta

SEQ ID NO: 386831 - DNA, 25 bp, Homo sapien
tcttgcggaggtgacaatgccattc

SEQ ID NO: 386832 - DNA, 25 bp, Homo sapien
tgtgacatccagatagctatgaaag

SEQ ID NO: 386833 - DNA, 25 bp, Homo sapien
catccagcatggatagaatcagact

SEQ ID NO: 386834 - DNA, 25 bp, Homo sapien
tcttcacctcaacattggttaatga

SEQ ID NO: 386835 - DNA, 25 bp, Homo sapien
ttctctttcttcatggtccgcctca

SEQ ID NO: 386836 - DNA, 25 bp, Homo sapien
tctaatagtataacttcatctaaat

SEQ ID NO: 386837 - DNA, 25 bp, Homo sapien
tcttctcataagcttttgtgatatc

SEQ ID NO: 386838 - DNA, 25 bp, Homo sapien
tgcttggatctagttttggactgcc

SEQ ID NO: 386839 - DNA, 25 bp, Homo sapien
gacaaacattctccactgctctgta

SEQ ID NO: 386840 - DNA, 25 bp, Homo sapien
ggatacagacttacctacctaggtc

SEQ ID NO: 386841 - DNA, 25 bp, Homo sapien
tctgttcaagaactggacactacct

SEQ ID NO: 386842 - DNA, 25 bp, Homo sapien
tatcctacgggtaggatgaaccatg

SEQ ID NO: 386843 - DNA, 25 bp, Homo sapien
tacgggtaggatgaaccatgatcat

SEQ ID NO: 386844 - DNA, 25 bp, Homo sapien
ggtaggatgaaccatgatcatgata

SEQ ID NO: 386845 - DNA, 25 bp, Homo sapien
ccaataattatcctacgggtaggat

SEQ ID NO: 386846 - DNA, 25 bp, Homo sapien
ttacggcaaacaacatcgccagcat

SEQ ID NO: 386847 - DNA, 25 bp, Homo sapien
gtttacggcaaacaacatcgccagc

SEQ ID NO: 386848 - DNA, 25 bp, Homo sapien
caggtttacggcaaacaacatcgcc

SEQ ID NO: 386849 - DNA, 25 bp, Homo sapien
ggtttacggcaaacaacatcgccag

SEQ ID NO: 386850 - DNA, 25 bp, Homo sapien
tcacttatgtttggctggcgacggt

SEQ ID NO: 386851 - DNA, 25 bp, Homo sapien
tgcaagccgaacagatgaaggtttg

SEQ ID NO: 386852 - DNA, 25 bp, Homo sapien
tggcgacggtcactgtactgatgtg

SEQ ID NO: 386853 - DNA, 25 bp, Homo sapien
tggaatgaaaatgacggtgcaagcc

SEQ ID NO: 386854 - DNA, 25 bp, Homo sapien
tgtaacatgacaatatcaggcatca

SEQ ID NO: 386855 - DNA, 25 bp, Homo sapien
gtaacatgacaatatcaggcatcac

SEQ ID NO: 386856 - DNA, 25 bp, Homo sapien
gtcacggaaggtttggggcatccgc

SEQ ID NO: 386857 - DNA, 25 bp, Homo sapien
ttttctcaggggagcagttgctggg

SEQ ID NO: 386858 - DNA, 25 bp, Homo sapien
ctgggtcacggaaggtttggggcat

SEQ ID NO: 386859 - DNA, 25 bp, Homo sapien
cacggaaggtttggggcatccgcct

SEQ ID NO: 386860 - DNA, 25 bp, Homo sapien
aaaggaacctttgcctatcaaggag

SEQ ID NO: 386861 - DNA, 25 bp, Homo sapien
tggccctgttggtgtcttcgcttct

SEQ ID NO: 386862 - DNA, 25 bp, Homo sapien
tatgactagaatcgtctccctggcc

SEQ ID NO: 386863 - DNA, 25 bp, Homo sapien
tatcaaggagtcaatttcgtaacga

SEQ ID NO: 386864 - DNA, 25 bp, Homo sapien
tggctacggaaatggagaaatccct

SEQ ID NO: 386865 - DNA, 25 bp, Homo sapien
ggacctgaacctcaacgtggacact

SEQ ID NO: 386866 - DNA, 25 bp, Homo sapien
caagcaggactctatcgtcacaggg

SEQ ID NO: 386867 - DNA, 25 bp, Homo sapien
gaaaaaggagttcaacgtcaagcag

SEQ ID NO: 386868 - DNA, 25 bp, Homo sapien
ttcttgctccacacgatcatatgcc

SEQ ID NO: 386869 - DNA, 25 bp, Homo sapien
ttttaatggcaacccattcttgctc

SEQ ID NO: 386870 - DNA, 25 bp, Homo sapien
gaagtcgcacttctatctgtgcttg

SEQ ID NO: 386871 - DNA, 25 bp, Homo sapien
tgttcatgagctcaagaagtcgcac

SEQ ID NO: 386872 - DNA, 25 bp, Homo sapien
agttactggaaagatgaccctatgg

SEQ ID NO: 386873 - DNA, 25 bp, Homo sapien
catggtatgctacatggaaggcaca

SEQ ID NO: 386874 - DNA, 25 bp, Homo sapien
tgcagatgccccaaaaatggttcca

SEQ ID NO: 386875 - DNA, 25 bp, Homo sapien
caaatggtaccagtaagttgcaaat

SEQ ID NO: 386876 - DNA, 25 bp, Homo sapien
tacttaactatatgccagctatgtc

SEQ ID NO: 386877 - DNA, 25 bp, Homo sapien
gggtcacctcatgtaagttataact

SEQ ID NO: 386878 - DNA, 25 bp, Homo sapien
cccttgaatggaaatgggtcacctc

SEQ ID NO: 386879 - DNA, 25 bp, Homo sapien
cattgtgtaagtcaatcatccttag

SEQ ID NO: 386880 - DNA, 25 bp, Homo sapien
ctggagtcgcaaggaaaagcagtgc

SEQ ID NO: 386881 - DNA, 25 bp, Homo sapien
caaagagacccctcggaaattggtg

SEQ ID NO: 386882 - DNA, 25 bp, Homo sapien
tgcacatctgttgcgcaaactttcg

SEQ ID NO: 386883 - DNA, 25 bp, Homo sapien
gtttctcagcaagtcatagaggttg

SEQ ID NO: 386884 - DNA, 25 bp, Homo sapien
cacctctggagaccgataaaagcga

SEQ ID NO: 386885 - DNA, 25 bp, Homo sapien
cattggcaccactgaacagaggttc

SEQ ID NO: 386886 - DNA, 25 bp, Homo sapien
gcaaggtcataaggcattcccagta

SEQ ID NO: 386887 - DNA, 25 bp, Homo sapien
gagggaccacatatcaatggcaagg

SEQ ID NO: 386888 - DNA, 25 bp, Homo sapien
tgagcaggtggaatacccagaactt

SEQ ID NO: 386889 - DNA, 25 bp, Homo sapien
gcttttggtgcttggtcaagaatat

SEQ ID NO: 386890 - DNA, 25 bp, Homo sapien
gaacttccactattttattcatctg

SEQ ID NO: 386891 - DNA, 25 bp, Homo sapien
ttggtgcttggtcaagaatatgagc

SEQ ID NO: 386892 - DNA, 25 bp, Homo sapien
tcttgaagaaactgtgctgcagagc

SEQ ID NO: 386893 - DNA, 25 bp, Homo sapien
ggtcctcctgtttccactccaagaa

SEQ ID NO: 386894 - DNA, 25 bp, Homo sapien
ttgaacttcaagtagtcagcgaccg

SEQ ID NO: 386895 - DNA, 25 bp, Homo sapien
gctgcagagcataataaggttgaat

SEQ ID NO: 386896 - DNA, 25 bp, Homo sapien
tgagcttgacgatgtactggaggtg

SEQ ID NO: 386897 - DNA, 25 bp, Homo sapien
gaggtggtgcccgaagactgagact

SEQ ID NO: 386898 - DNA, 25 bp, Homo sapien
ggcttgtagatacactattacttgt

SEQ ID NO: 386899 - DNA, 25 bp, Homo sapien
agactgctccatggcggggcttgta

SEQ ID NO: 386900 - DNA, 25 bp, Homo sapien
gcccaccactgtgccgatgctggtg

SEQ ID NO: 386901 - DNA, 25 bp, Homo sapien
gaccgggctctcccactgttgcttg

SEQ ID NO: 386902 - DNA, 25 bp, Homo sapien
ggactgtgtgtctcgcagtccatgg

SEQ ID NO: 386903 - DNA, 25 bp, Homo sapien
cgatgctggtgcgtcggatccgacc

SEQ ID NO: 386904 - DNA, 25 bp, Homo sapien
caagcaaatgaaccacgtgcgagct

SEQ ID NO: 386905 - DNA, 25 bp, Homo sapien
gacacaagcaaatgaaccacgtgcg

SEQ ID NO: 386906 - DNA, 25 bp, Homo sapien
ggtgacacaagcaaatgaaccacgt

SEQ ID NO: 386907 - DNA, 25 bp, Homo sapien
gcaaatgaaccacgtgcgagctcac

SEQ ID NO: 386908 - DNA, 25 bp, Homo sapien
ttctaaaggcacctggcatccagtg

SEQ ID NO: 386909 - DNA, 25 bp, Homo sapien
tctaaaggcacctggcatccagtgc

SEQ ID NO: 386910 - DNA, 25 bp, Homo sapien
tcattctaaaggcacctggcatcca

SEQ ID NO: 386911 - DNA, 25 bp, Homo sapien
cattctaaaggcacctggcatccag

SEQ ID NO: 386912 - DNA, 25 bp, Homo sapien
gacaggaacgtcatgaacctctagg

SEQ ID NO: 386913 - DNA, 25 bp, Homo sapien
tgaacctctagggtaaatgatacgg

SEQ ID NO: 386914 - DNA, 25 bp, Homo sapien
gaacgtcatgaacctctagggtaaa

SEQ ID NO: 386915 - DNA, 25 bp, Homo sapien
ttagacaggaacgtcatgaacctct

SEQ ID NO: 386916 - DNA, 25 bp, Homo sapien
gaggactgtttccaagctttaatct

SEQ ID NO: 386917 - DNA, 25 bp, Homo sapien
tccaagctttaatcttccatcaaaa

SEQ ID NO: 386918 - DNA, 25 bp, Homo sapien
tcagaggactgtttccaagctttaa

SEQ ID NO: 386919 - DNA, 25 bp, Homo sapien
gactgtttccaagctttaatcttcc

SEQ ID NO: 386920 - DNA, 25 bp, Homo sapien
gaggagcaggaaattgctgacgcac

SEQ ID NO: 386921 - DNA, 25 bp, Homo sapien
ggatgagtttcaacagtgacctgtg

SEQ ID NO: 386922 - DNA, 25 bp, Homo sapien
tctgttgaggggctacatgaaaggt

SEQ ID NO: 386923 - DNA, 25 bp, Homo sapien
catggtgatgatgcaatgcattctg

SEQ ID NO: 386924 - DNA, 25 bp, Homo sapien
acatgaaaggttgtttcttgaacag

SEQ ID NO: 386925 - DNA, 25 bp, Homo sapien
gtggtggtgatggtgatgggaactg

SEQ ID NO: 386926 - DNA, 25 bp, Homo sapien
cttgttgtccatggtggtggtgatg

SEQ ID NO: 386927 - DNA, 25 bp, Homo sapien
gtggtgatggtgatgggaactgtta

SEQ ID NO: 386928 - DNA, 25 bp, Homo sapien
tggtgatggtgatgggaactgttac

SEQ ID NO: 386929 - DNA, 25 bp, Homo sapien
gctattcgttggagaattgtagacc

SEQ ID NO: 386930 - DNA, 25 bp, Homo sapien
gtagaggagctattcgttggagaat

SEQ ID NO: 386931 - DNA, 25 bp, Homo sapien
cgttggagaattgtagacccttggc

SEQ ID NO: 386932 - DNA, 25 bp, Homo sapien
cttgggtagaggagctattcgttgg

SEQ ID NO: 386933 - DNA, 25 bp, Homo sapien
gatgtccagctatgccagtctcttg

SEQ ID NO: 386934 - DNA, 25 bp, Homo sapien
gttgcacacaaactcctgtcatggg

SEQ ID NO: 386935 - DNA, 25 bp, Homo sapien
cattctgtccaaagtccaaggtatt

SEQ ID NO: 386936 - DNA, 25 bp, Homo sapien
ccaaggtattagcagccactgggcg

SEQ ID NO: 386937 - DNA, 25 bp, Homo sapien
aaaaccccactgtgactgggatgtg

SEQ ID NO: 386938 - DNA, 25 bp, Homo sapien
ggatacctctgagctatccatgaag

SEQ ID NO: 386939 - DNA, 25 bp, Homo sapien
ccgtgcccaagtgtgtttagaggac

SEQ ID NO: 386940 - DNA, 25 bp, Homo sapien
gcggttcagtgtgttaatctcctcc

SEQ ID NO: 386941 - DNA, 25 bp, Homo sapien
ctgtggcctctgcaacgggagagcc

SEQ ID NO: 386942 - DNA, 25 bp, Homo sapien
gagtccaaatccataaggccaaagg

SEQ ID NO: 386943 - DNA, 25 bp, Homo sapien
ataggagagttctgatccccgccac

SEQ ID NO: 386944 - DNA, 25 bp, Homo sapien
gaccgacccgttgattgcttctcag

SEQ ID NO: 386945 - DNA, 25 bp, Homo sapien
tgcttgcactcatactctggacctg

SEQ ID NO: 386946 - DNA, 25 bp, Homo sapien
gaaacgcggtgttctgctgagtcat

SEQ ID NO: 386947 - DNA, 25 bp, Homo sapien
gagataccacgtgccgagaaaaagc

SEQ ID NO: 386948 - DNA, 25 bp, Homo sapien
taaggcagcgtaatctcaacacgag

SEQ ID NO: 386949 - DNA, 25 bp, Homo sapien
gtttatgtttacaatgcacagaagt

SEQ ID NO: 386950 - DNA, 25 bp, Homo sapien
caatgcacagaagtcctgtaaccaa

SEQ ID NO: 386951 - DNA, 25 bp, Homo sapien
taaccaaactgtgtagtaaagcaca

SEQ ID NO: 386952 - DNA, 25 bp, Homo sapien
cacaggtatttaaccttttccatgc

SEQ ID NO: 386953 - DNA, 25 bp, Homo sapien
aaagcatagtaaagagtctgaggac

SEQ ID NO: 386954 - DNA, 25 bp, Homo sapien
gatactatacctaccagacctggac

SEQ ID NO: 386955 - DNA, 25 bp, Homo sapien
gaccgcatgactataatacaaaggg

SEQ ID NO: 386956 - DNA, 25 bp, Homo sapien
cagagattgctgatgcctatgtcaa

SEQ ID NO: 386957 - DNA, 25 bp, Homo sapien
gaagtctgggtataccgaagtcacg

SEQ ID NO: 386958 - DNA, 25 bp, Homo sapien
caggcctagataagaaaccagggtt

SEQ ID NO: 386959 - DNA, 25 bp, Homo sapien
cgaagtcacgcacggcttttgtccc

SEQ ID NO: 386960 - DNA, 25 bp, Homo sapien
gatgtatgttttcacgcaaggaaac

SEQ ID NO: 386961 - DNA, 25 bp, Homo sapien
tctctagctatgagaactcggccaa

SEQ ID NO: 386962 - DNA, 25 bp, Homo sapien
catgactcaggctctagtactgtgc

SEQ ID NO: 386963 - DNA, 25 bp, Homo sapien
gctgggactgaaccaggctacctgg

SEQ ID NO: 386964 - DNA, 25 bp, Homo sapien
gaagccggtttaagacttgtctctg

SEQ ID NO: 386965 - DNA, 25 bp, Homo sapien
tggcccctggatgcgtgatcacaag

SEQ ID NO: 386966 - DNA, 25 bp, Homo sapien
agaacccaggctcgatgtagtcacc

SEQ ID NO: 386967 - DNA, 25 bp, Homo sapien
caggctaatactgagagaacccagg

SEQ ID NO: 386968 - DNA, 25 bp, Homo sapien
tgtaacagactttccttggagtggg

SEQ ID NO: 386969 - DNA, 25 bp, Homo sapien
cccatgattaggtcccttgtttcag

SEQ ID NO: 386970 - DNA, 25 bp, Homo sapien
catccaaatccacggcccattgtaa

SEQ ID NO: 386971 - DNA, 25 bp, Homo sapien
gtgaacagttaaatcccatgattag

SEQ ID NO: 386972 - DNA, 25 bp, Homo sapien
cagttaaatcccatgattaggtccc

SEQ ID NO: 386973 - DNA, 25 bp, Homo sapien
ggtaagaatcccatgtaagcgctct

SEQ ID NO: 386974 - DNA, 25 bp, Homo sapien
tacataatcagtgggagatgccttc

SEQ ID NO: 386975 - DNA, 25 bp, Homo sapien
tagtgaatacgcacgtgggagccct

SEQ ID NO: 386976 - DNA, 25 bp, Homo sapien
tccgcctacagaaagaggtagcccg

SEQ ID NO: 386977 - DNA, 25 bp, Homo sapien
gtcccaagaccgtttgctggtaaga

SEQ ID NO: 386978 - DNA, 25 bp, Homo sapien
ccaagaccgtttgctggtaagacat

SEQ ID NO: 386979 - DNA, 25 bp, Homo sapien
agctgtcccaagaccgtttgctggt

SEQ ID NO: 386980 - DNA, 25 bp, Homo sapien
agaccgtttgctggtaagacattct

SEQ ID NO: 386981 - DNA, 25 bp, Homo sapien
tgaccagaaattggccattcccagg

SEQ ID NO: 386982 - DNA, 25 bp, Homo sapien
gattttgcattgctagcaagcaccc

SEQ ID NO: 386983 - DNA, 25 bp, Homo sapien
tatttacgtatcctaggctgtcctc

SEQ ID NO: 386984 - DNA, 25 bp, Homo sapien
gatgctaatgtcgtcagcccactga

SEQ ID NO: 386985 - DNA, 25 bp, Homo sapien
ctgctgcagacagcctgaaccagca

SEQ ID NO: 386986 - DNA, 25 bp, Homo sapien
gcagacagcctgaaccagcagtggg

SEQ ID NO: 386987 - DNA, 25 bp, Homo sapien
agcctgaaccagcagtggggaaagc

SEQ ID NO: 386988 - DNA, 25 bp, Homo sapien
tggggaaagcggaagcagagcagga

SEQ ID NO: 386989 - DNA, 25 bp, Homo sapien
gagctctcctgttcctgaacagccg

SEQ ID NO: 386990 - DNA, 25 bp, Homo sapien
tcctgttcctgaacagccgatagcc

SEQ ID NO: 386991 - DNA, 25 bp, Homo sapien
cagaagccaaagtcgtccctgctct

SEQ ID NO: 386992 - DNA, 25 bp, Homo sapien
gctgatgcctaatctgcaatgggca

SEQ ID NO: 386993 - DNA, 25 bp, Homo sapien
gtggttctcaccaaggtgccttcct

SEQ ID NO: 386994 - DNA, 25 bp, Homo sapien
tggtggttctcaccaaggtgccttc

SEQ ID NO: 386995 - DNA, 25 bp, Homo sapien
tggttctcaccaaggtgccttcctc

SEQ ID NO: 386996 - DNA, 25 bp, Homo sapien
ggtggttctcaccaaggtgccttcc

SEQ ID NO: 386997 - DNA, 25 bp, Homo sapien
cgcaagatcaatggccttgtcaggt

SEQ ID NO: 386998 - DNA, 25 bp, Homo sapien
aggaagctcccgcaagatcaatggc

SEQ ID NO: 386999 - DNA, 25 bp, Homo sapien
gctcccgcaagatcaatggccttgt

SEQ ID NO: 387000 - DNA, 25 bp, Homo sapien
ttcaggaagctcccgcaagatcaat

SEQ ID NO: 387001 - DNA, 25 bp, Homo sapien
tgtggagaatccttctggaagattt

SEQ ID NO: 387002 - DNA, 25 bp, Homo sapien
cctccctcctctgactctggcctac

SEQ ID NO: 387003 - DNA, 25 bp, Homo sapien
tctgctttttctccagctgctctgg

SEQ ID NO: 387004 - DNA, 25 bp, Homo sapien
tgctctgggcttcttctcccctttc

SEQ ID NO: 387005 - DNA, 25 bp, Homo sapien
ccctccctcctctgactctggccta

SEQ ID NO: 387006 - DNA, 25 bp, Homo sapien
agccacaggctcatcgtttggagct

SEQ ID NO: 387007 - DNA, 25 bp, Homo sapien
cacaggctcatcgtttggagcttct

SEQ ID NO: 387008 - DNA, 25 bp, Homo sapien
aggctcatcgtttggagcttctttc

SEQ ID NO: 387009 - DNA, 25 bp, Homo sapien
gccacaggctcatcgtttggagctt

SEQ ID NO: 387010 - DNA, 25 bp, Homo sapien
cacatgcttgcgtatttatgcaggg

SEQ ID NO: 387011 - DNA, 25 bp, Homo sapien
cccatctccggagggtgtgcgtgct

SEQ ID NO: 387012 - DNA, 25 bp, Homo sapien
gcagggacacatgcttgcgtattta

SEQ ID NO: 387013 - DNA, 25 bp, Homo sapien
gacggacaagggtggcccatcccat

SEQ ID NO: 387014 - DNA, 25 bp, Homo sapien
gctgctcccgaacagtcctcgggct

SEQ ID NO: 387015 - DNA, 25 bp, Homo sapien
caccaggccttgtgagggtaggggg

SEQ ID NO: 387016 - DNA, 25 bp, Homo sapien
ccctcaggccttcgcccagagcaga

SEQ ID NO: 387017 - DNA, 25 bp, Homo sapien
aaggcttcacgtgggatgtgtagca

SEQ ID NO: 387018 - DNA, 25 bp, Homo sapien
tactgaaaagaatccggtcccatgg

SEQ ID NO: 387019 - DNA, 25 bp, Homo sapien
gccgtgtggttgccgtagtaattga

SEQ ID NO: 387020 - DNA, 25 bp, Homo sapien
ggaaccgatcacatttactgaaaag

SEQ ID NO: 387021 - DNA, 25 bp, Homo sapien
atgagaccgccctggaaaatctggg

SEQ ID NO: 387022 - DNA, 25 bp, Homo sapien
gaattcttatctacatgaatagttc

SEQ ID NO: 387023 - DNA, 25 bp, Homo sapien
cttatctacatgaatagttcttaac

SEQ ID NO: 387024 - DNA, 25 bp, Homo sapien
cctgaattcttatctacatgaatag

SEQ ID NO: 387025 - DNA, 25 bp, Homo sapien
ttcctgaattcttatctacatgaat

SEQ ID NO: 387026 - DNA, 25 bp, Homo sapien
cggcccaacacaaccgttgccttct

SEQ ID NO: 387027 - DNA, 25 bp, Homo sapien
tagacttctgctggcatacttcccc

SEQ ID NO: 387028 - DNA, 25 bp, Homo sapien
gagtgggtgtccctccgttcacctc

SEQ ID NO: 387029 - DNA, 25 bp, Homo sapien
agcagtgagtgggtgtccctccgtt

SEQ ID NO: 387030 - DNA, 25 bp, Homo sapien
gggtccttgactcctagacttctgc

SEQ ID NO: 387031 - DNA, 25 bp, Homo sapien
ggcagcatgttagccttttaaaggc

SEQ ID NO: 387032 - DNA, 25 bp, Homo sapien
tgttcacgccactcaagctgaagga

SEQ ID NO: 387033 - DNA, 25 bp, Homo sapien
tctttgagtcccatccagagccatg

SEQ ID NO: 387034 - DNA, 25 bp, Homo sapien
gaattcaggcatgtcgccttggagc

SEQ ID NO: 387035 - DNA, 25 bp, Homo sapien
gctcttcagcttcacacacatatag

SEQ ID NO: 387036 - DNA, 25 bp, Homo sapien
ctatataaggctcttcagcttcaca

SEQ ID NO: 387037 - DNA, 25 bp, Homo sapien
ggctcttcagcttcacacacatata

SEQ ID NO: 387038 - DNA, 25 bp, Homo sapien
cttcagcttcacacacatatagaca

SEQ ID NO: 387039 - DNA, 25 bp, Homo sapien
aatgcatcaggggatctttcacata

SEQ ID NO: 387040 - DNA, 25 bp, Homo sapien
taaaaaatgcatcaggggatctttc

SEQ ID NO: 387041 - DNA, 25 bp, Homo sapien
caggggatctttcacatactgtgac

SEQ ID NO: 387042 - DNA, 25 bp, Homo sapien
gcatcaggggatctttcacatactg

SEQ ID NO: 387043 - DNA, 25 bp, Homo sapien
cataacctctaaatttccagtggga

SEQ ID NO: 387044 - DNA, 25 bp, Homo sapien
tctcggattcggaatcatcttcttt

SEQ ID NO: 387045 - DNA, 25 bp, Homo sapien
gaggaggtcagacaaagcactgggc

SEQ ID NO: 387046 - DNA, 25 bp, Homo sapien
tagcagttctcggattcggaatcat

SEQ ID NO: 387047 - DNA, 25 bp, Homo sapien
tcaggacaagacagcgtgtcaccag

SEQ ID NO: 387048 - DNA, 25 bp, Homo sapien
taatgaggctactctggctgcgatg

SEQ ID NO: 387049 - DNA, 25 bp, Homo sapien
tcagctaagctcagtgcactgggcc

SEQ ID NO: 387050 - DNA, 25 bp, Homo sapien
gaacccaacctcgtgtcttcaggac

SEQ ID NO: 387051 - DNA, 25 bp, Homo sapien
cgagagccggtagcaaatacccgaa

SEQ ID NO: 387052 - DNA, 25 bp, Homo sapien
tcggaagacgccatggcaaccgcag

SEQ ID NO: 387053 - DNA, 25 bp, Homo sapien
gggagctcccagtcaatcgacgccg

SEQ ID NO: 387054 - DNA, 25 bp, Homo sapien
gacaagcgggctgcgttctttcgcc

SEQ ID NO: 387055 - DNA, 25 bp, Homo sapien
tgtcctaaggtccagtagacgttcc

SEQ ID NO: 387056 - DNA, 25 bp, Homo sapien
tcacgggcagtaaggacgtgcaccc

SEQ ID NO: 387057 - DNA, 25 bp, Homo sapien
caacttcggagctttagggcattcg

SEQ ID NO: 387058 - DNA, 25 bp, Homo sapien
tgcaccctcggagcaagcctgtttt

SEQ ID NO: 387059 - DNA, 25 bp, Homo sapien
gtcagttgctgagggcccaggtcac

SEQ ID NO: 387060 - DNA, 25 bp, Homo sapien
cacgtaatcgggatgcatttgctaa

SEQ ID NO: 387061 - DNA, 25 bp, Homo sapien
cgtgccactacaccgtcagttgctg

SEQ ID NO: 387062 - DNA, 25 bp, Homo sapien
aggcctgtggacacgtaatcgggat

SEQ ID NO: 387063 - DNA, 25 bp, Homo sapien
ggattggctaaagcgactccctggt

SEQ ID NO: 387064 - DNA, 25 bp, Homo sapien
tgcattacccccaagggattggcta

SEQ ID NO: 387065 - DNA, 25 bp, Homo sapien
ccctgtgtgtctgtcgcacttggca

SEQ ID NO: 387066 - DNA, 25 bp, Homo sapien
aagccccacgcaaccctgtggagat

SEQ ID NO: 387067 - DNA, 25 bp, Homo sapien
tagatgagaactttccgcaatctcg

SEQ ID NO: 387068 - DNA, 25 bp, Homo sapien
cattagagggtagatgagaactttc

SEQ ID NO: 387069 - DNA, 25 bp, Homo sapien
gcactgtaagaatttcttctgtgta

SEQ ID NO: 387070 - DNA, 25 bp, Homo sapien
cgcaatctcgacaactgcactgtaa

SEQ ID NO: 387071 - DNA, 25 bp, Homo sapien
gcttggctgccatggtaactcccag

SEQ ID NO: 387072 - DNA, 25 bp, Homo sapien
cagtgcttcctcgtcttaaccaaga

SEQ ID NO: 387073 - DNA, 25 bp, Homo sapien
aaatgattgactccccaagtgtctg

SEQ ID NO: 387074 - DNA, 25 bp, Homo sapien
cccagcacttgtgggtgcctggtta

SEQ ID NO: 387075 - DNA, 25 bp, Homo sapien
cgtttttgtaatgtgagcctctgaa

SEQ ID NO: 387076 - DNA, 25 bp, Homo sapien
tttagcacaactgaacgaagagcct

SEQ ID NO: 387077 - DNA, 25 bp, Homo sapien
gaagagccttgacaacacgttggcc

SEQ ID NO: 387078 - DNA, 25 bp, Homo sapien
gttctgtgtctgtgacgggcaccca

SEQ ID NO: 387079 - DNA, 25 bp, Homo sapien
tcacagatcctgcttttatctttca

SEQ ID NO: 387080 - DNA, 25 bp, Homo sapien
cacagatcctgcttttatctttcat

SEQ ID NO: 387081 - DNA, 25 bp, Homo sapien
atcacagatcctgcttttatctttc

SEQ ID NO: 387082 - DNA, 25 bp, Homo sapien
tctgagtgtcttggtctgatggcca

SEQ ID NO: 387083 - DNA, 25 bp, Homo sapien
cttgcaaccagtgatgctctccttt

SEQ ID NO: 387084 - DNA, 25 bp, Homo sapien
cctccccatgagaagggcaccttgg

SEQ ID NO: 387085 - DNA, 25 bp, Homo sapien
ttttcttgcaaccagtgatgctctc

SEQ ID NO: 387086 - DNA, 25 bp, Homo sapien
tccccatgagaagggcaccttggaa

SEQ ID NO: 387087 - DNA, 25 bp, Homo sapien
gctgctggaactggaacatgccaac

SEQ ID NO: 387088 - DNA, 25 bp, Homo sapien
ccggcacaccggctgctggaactgg

SEQ ID NO: 387089 - DNA, 25 bp, Homo sapien
tctggctctgctgaacatcgcccgg

SEQ ID NO: 387090 - DNA, 25 bp, Homo sapien
tggctctgctgaacatcgcccggca

SEQ ID NO: 387091 - DNA, 25 bp, Homo sapien
cctccaggaagccttatgacaactc

SEQ ID NO: 387092 - DNA, 25 bp, Homo sapien
tgcatccagtgagaggccactctct

SEQ ID NO: 387093 - DNA, 25 bp, Homo sapien
tccctgcttggagtaactaaacaag

SEQ ID NO: 387094 - DNA, 25 bp, Homo sapien
tcacacatcaccctcagctgctgtc

SEQ ID NO: 387095 - DNA, 25 bp, Homo sapien
ggctgaacatgggtctgaaggcctc

SEQ ID NO: 387096 - DNA, 25 bp, Homo sapien
cacgtggggctgaacatgggtctga

SEQ ID NO: 387097 - DNA, 25 bp, Homo sapien
aacatgggtctgaaggcctctatgg

SEQ ID NO: 387098 - DNA, 25 bp, Homo sapien
tgaacatgggtctgaaggcctctat

SEQ ID NO: 387099 - DNA, 25 bp, Homo sapien
cagccagaaccgctcttcgagtggg

SEQ ID NO: 387100 - DNA, 25 bp, Homo sapien
tgagatcatttgcatgtgtatttgc

SEQ ID NO: 387101 - DNA, 25 bp, Homo sapien
atttgcattctccctggatgagaaa

SEQ ID NO: 387102 - DNA, 25 bp, Homo sapien
agtgggcaccgcatcatcactgcca

SEQ ID NO: 387103 - DNA, 25 bp, Homo sapien
cttgaccaggtacaaggagcatctc

SEQ ID NO: 387104 - DNA, 25 bp, Homo sapien
ttgaccaggtacaaggagcatctca

SEQ ID NO: 387105 - DNA, 25 bp, Homo sapien
tgaccaggtacaaggagcatctcat

SEQ ID NO: 387106 - DNA, 25 bp, Homo sapien
gcacagtggcgtttctgtccttgag

SEQ ID NO: 387107 - DNA, 25 bp, Homo sapien
agccaggcaaggtgtcctccactac

SEQ ID NO: 387108 - DNA, 25 bp, Homo sapien
gtccttgagtgcagtctgacacata

SEQ ID NO: 387109 - DNA, 25 bp, Homo sapien
catccccgacattgaagaggctcag

SEQ ID NO: 387110 - DNA, 25 bp, Homo sapien
tccgacacggatgggtcaagagaga

SEQ ID NO: 387111 - DNA, 25 bp, Homo sapien
taaggattcgtgaggtccgacacgg

SEQ ID NO: 387112 - DNA, 25 bp, Homo sapien
tggtccctccagcagaatttctttt

SEQ ID NO: 387113 - DNA, 25 bp, Homo sapien
ccaaagggacctcagcatgttcagc

SEQ ID NO: 387114 - DNA, 25 bp, Homo sapien
cttgaaagggcagtctagaggctcc

SEQ ID NO: 387115 - DNA, 25 bp, Homo sapien
gtgcaaccaagtgtaacccaaagtg

SEQ ID NO: 387116 - DNA, 25 bp, Homo sapien
gccgtgccaagtataacccaaagtg

SEQ ID NO: 387117 - DNA, 25 bp, Homo sapien
cagttgaagctctgggttaacccca

SEQ ID NO: 387118 - DNA, 25 bp, Homo sapien
aaaagtcaaagctgtcagactagag

SEQ ID NO: 387119 - DNA, 25 bp, Homo sapien
gggagatcatctaaaagtcaaagct

SEQ ID NO: 387120 - DNA, 25 bp, Homo sapien
tagagagtaggctctgcagaacaga

SEQ ID NO: 387121 - DNA, 25 bp, Homo sapien
gactactgagggagatcatctaaaa

SEQ ID NO: 387122 - DNA, 25 bp, Homo sapien
gtcatcagctgtgcagtaacatggg

SEQ ID NO: 387123 - DNA, 25 bp, Homo sapien
tcatggttaacagagggtgtacccc

SEQ ID NO: 387124 - DNA, 25 bp, Homo sapien
ttatccttggtggtaagaagttgcc

SEQ ID NO: 387125 - DNA, 25 bp, Homo sapien
tcctggagatgcgattcagatcccc

SEQ ID NO: 387126 - DNA, 25 bp, Homo sapien
gacactccaggataggtgaccacaa

SEQ ID NO: 387127 - DNA, 25 bp, Homo sapien
ttggaaagactggaacaactgtcac

SEQ ID NO: 387128 - DNA, 25 bp, Homo sapien
tctctctgagggcaacgctttgacc

SEQ ID NO: 387129 - DNA, 25 bp, Homo sapien
caatccctgggagatcttgttcttg

SEQ ID NO: 387130 - DNA, 25 bp, Homo sapien
taaacataccttgttagagcaggga

SEQ ID NO: 387131 - DNA, 25 bp, Homo sapien
ggtggagctacccaacaggtgttga

SEQ ID NO: 387132 - DNA, 25 bp, Homo sapien
cagtttctgtcatccccaggagagg

SEQ ID NO: 387133 - DNA, 25 bp, Homo sapien
taaacaacaggacgtctatagagtg

SEQ ID NO: 387134 - DNA, 25 bp, Homo sapien
gggtgtgcccatctccaacgttcct

SEQ ID NO: 387135 - DNA, 25 bp, Homo sapien
gtgtgcccatctccaacgttcctgt

SEQ ID NO: 387136 - DNA, 25 bp, Homo sapien
ccatctccaacgttcctgtcattca

SEQ ID NO: 387137 - DNA, 25 bp, Homo sapien
gggggtgtgcccatctccaacgttc

SEQ ID NO: 387138 - DNA, 25 bp, Homo sapien
gctgggctggccctgagcgaatcgt

SEQ ID NO: 387139 - DNA, 25 bp, Homo sapien
ctggccctgagcgaatcgtgaagaa

SEQ ID NO: 387140 - DNA, 25 bp, Homo sapien
cctgagcgaatcgtgaagaaggcat

SEQ ID NO: 387141 - DNA, 25 bp, Homo sapien
gccctgagcgaatcgtgaagaaggc

SEQ ID NO: 387142 - DNA, 25 bp, Homo sapien
gacagtgaatgcttgggctgacagc

SEQ ID NO: 387143 - DNA, 25 bp, Homo sapien
agtcggtgcacgctgaggacaatag

SEQ ID NO: 387144 - DNA, 25 bp, Homo sapien
cctctgtttgggtaatatgtcactc

SEQ ID NO: 387145 - DNA, 25 bp, Homo sapien
tcccattgtgtcagagaatcttcct

SEQ ID NO: 387146 - DNA, 25 bp, Homo sapien
tcattcaccaagctgagagcttcag

SEQ ID NO: 387147 - DNA, 25 bp, Homo sapien
tccctagttgccaagtcatcattca

SEQ ID NO: 387148 - DNA, 25 bp, Homo sapien
agtcatcattcaccaagctgagagc

SEQ ID NO: 387149 - DNA, 25 bp, Homo sapien
caccaagctgagagcttcagtgaga

SEQ ID NO: 387150 - DNA, 25 bp, Homo sapien
cagagcaggtgtccctgtgtcctct

SEQ ID NO: 387151 - DNA, 25 bp, Homo sapien
cacagctgccgtagaggtgggagct

SEQ ID NO: 387152 - DNA, 25 bp, Homo sapien
cctttcaaggaaggccgtttgattg

SEQ ID NO: 387153 - DNA, 25 bp, Homo sapien
caaggaaggccgtttgattgtgttt

SEQ ID NO: 387154 - DNA, 25 bp, Homo sapien
ctgcacaggaggggccacatggaaa

SEQ ID NO: 387155 - DNA, 25 bp, Homo sapien
caggaggggccacatggaaaaggtc

SEQ ID NO: 387156 - DNA, 25 bp, Homo sapien
tgcacaggaggggccacatggaaaa

SEQ ID NO: 387157 - DNA, 25 bp, Homo sapien
cacaggaggggccacatggaaaagg

SEQ ID NO: 387158 - DNA, 25 bp, Homo sapien
cctgggctggcgttggtgccatgca

SEQ ID NO: 387159 - DNA, 25 bp, Homo sapien
acagcaaagagggaccatgaggaaa

SEQ ID NO: 387160 - DNA, 25 bp, Homo sapien
caaagagggaccatgaggaaaggct

SEQ ID NO: 387161 - DNA, 25 bp, Homo sapien
tggcgttggtgccatgcacagagcc

SEQ ID NO: 387162 - DNA, 25 bp, Homo sapien
cattattgagggacaccacccgtac

SEQ ID NO: 387163 - DNA, 25 bp, Homo sapien
cactgtccataaaacgtgtggaggg

SEQ ID NO: 387164 - DNA, 25 bp, Homo sapien
taaatggccctagaaacttacactg

SEQ ID NO: 387165 - DNA, 25 bp, Homo sapien
ccagggttggaagtgttcacgtatc

SEQ ID NO: 387166 - DNA, 25 bp, Homo sapien
catacctgtggctgttaccccacct

SEQ ID NO: 387167 - DNA, 25 bp, Homo sapien
gcatacctgtggctgttaccccacc

SEQ ID NO: 387168 - DNA, 25 bp, Homo sapien
tgcatacctgtggctgttaccccac

SEQ ID NO: 387169 - DNA, 25 bp, Homo sapien
ttgcatacctgtggctgttacccca

SEQ ID NO: 387170 - DNA, 25 bp, Homo sapien
caaacacccggcttcctcgaagtga

SEQ ID NO: 387171 - DNA, 25 bp, Homo sapien
tgtgctacgggcaaacacccggctt

SEQ ID NO: 387172 - DNA, 25 bp, Homo sapien
tcctcgaagtgatgccagtgctact

SEQ ID NO: 387173 - DNA, 25 bp, Homo sapien
agtgatgccagtgctacttccttct

SEQ ID NO: 387174 - DNA, 25 bp, Homo sapien
tgttcatccacatcccttactctaa

SEQ ID NO: 387175 - DNA, 25 bp, Homo sapien
aaagggctgtaacttagatgagctg

SEQ ID NO: 387176 - DNA, 25 bp, Homo sapien
ctaaagggctgtaacttagatgagc

SEQ ID NO: 387177 - DNA, 25 bp, Homo sapien
ctctaaagggctgtaacttagatga

SEQ ID NO: 387178 - DNA, 25 bp, Homo sapien
cagaaggcccatgtcatcgtggtga

SEQ ID NO: 387179 - DNA, 25 bp, Homo sapien
gatcgtcatgtgtaagctggcctgg

SEQ ID NO: 387180 - DNA, 25 bp, Homo sapien
gatttccccggctgaatcaagattg

SEQ ID NO: 387181 - DNA, 25 bp, Homo sapien
tgaatctggatttctcgggagcccg

SEQ ID NO: 387182 - DNA, 25 bp, Homo sapien
gatgggttgagaacatcaggaacac

SEQ ID NO: 387183 - DNA, 25 bp, Homo sapien
agaacaggcaacactcccaggtctc

SEQ ID NO: 387184 - DNA, 25 bp, Homo sapien
cagaatgcctgaacgcttcaggtca

SEQ ID NO: 387185 - DNA, 25 bp, Homo sapien
tctgctcccagcttgatgggttgag

SEQ ID NO: 387186 - DNA, 25 bp, Homo sapien
actgatgtgtttccaagcaggtctg

SEQ ID NO: 387187 - DNA, 25 bp, Homo sapien
ctgatgtgtttccaagcaggtctgt

SEQ ID NO: 387188 - DNA, 25 bp, Homo sapien
gatgtgtttccaagcaggtctgttt

SEQ ID NO: 387189 - DNA, 25 bp, Homo sapien
tgatgtgtttccaagcaggtctgtt

SEQ ID NO: 387190 - DNA, 25 bp, Homo sapien
gccaggtcggaaagccctgctgaga

SEQ ID NO: 387191 - DNA, 25 bp, Homo sapien
aatggtcttcaaaatccatgccagg

SEQ ID NO: 387192 - DNA, 25 bp, Homo sapien
ttcaaaatccatgccaggtcggaaa

SEQ ID NO: 387193 - DNA, 25 bp, Homo sapien
aatccatgccaggtcggaaagccct

SEQ ID NO: 387194 - DNA, 25 bp, Homo sapien
tgagatagaatagcctctgacagga

SEQ ID NO: 387195 - DNA, 25 bp, Homo sapien
gatagaatagcctctgacaggatga

SEQ ID NO: 387196 - DNA, 25 bp, Homo sapien
tgctccccaccgcattcctgttctt

SEQ ID NO: 387197 - DNA, 25 bp, Homo sapien
ggccactgagatagaatagcctctg

SEQ ID NO: 387198 - DNA, 25 bp, Homo sapien
caccaaagttgcaggccgtcaaagc

SEQ ID NO: 387199 - DNA, 25 bp, Homo sapien
gccgtcaaagcctgagtcgggtaaa

SEQ ID NO: 387200 - DNA, 25 bp, Homo sapien
ggatgtggtaaatccaccaaagttg

SEQ ID NO: 387201 - DNA, 25 bp, Homo sapien
tcgggtaaaacatgggattccttca

SEQ ID NO: 387202 - DNA, 25 bp, Homo sapien
ctgtcctgggatattggctgctgtc

SEQ ID NO: 387203 - DNA, 25 bp, Homo sapien
ttgtctatgtgagcaggctccaaca

SEQ ID NO: 387204 - DNA, 25 bp, Homo sapien
acaatagcccgtacccattcagagg

SEQ ID NO: 387205 - DNA, 25 bp, Homo sapien
tcttttgacagataatttcccgcat

SEQ ID NO: 387206 - DNA, 25 bp, Homo sapien
agaaagtaatcatgggcaaagcagc

SEQ ID NO: 387207 - DNA, 25 bp, Homo sapien
ttggcaactcagacacagaggcctg

SEQ ID NO: 387208 - DNA, 25 bp, Homo sapien
aagcagctgttcacaacatgagtca

SEQ ID NO: 387209 - DNA, 25 bp, Homo sapien
agccaggcggccaccatcatcactg

SEQ ID NO: 387210 - DNA, 25 bp, Homo sapien
ttgcgcattcccctgcctcctttgc

SEQ ID NO: 387211 - DNA, 25 bp, Homo sapien
caggtatcactaaggctgcccagtc

SEQ ID NO: 387212 - DNA, 25 bp, Homo sapien
tctccacttcccctccttgcgcatt

SEQ ID NO: 387213 - DNA, 25 bp, Homo sapien
cgcaagaccgccttctgacaattct

SEQ ID NO: 387214 - DNA, 25 bp, Homo sapien
caagagagtaacagctatgacatgt

SEQ ID NO: 387215 - DNA, 25 bp, Homo sapien
gcatcctgtaagtcgctgtagcttg

SEQ ID NO: 387216 - DNA, 25 bp, Homo sapien
tgtggcatgcgttcttgcagaagca

SEQ ID NO: 387217 - DNA, 25 bp, Homo sapien
cgctgtagcttgcaggtgcaggcca

SEQ ID NO: 387218 - DNA, 25 bp, Homo sapien
tggtccaccttgaaatcaccaccat

SEQ ID NO: 387219 - DNA, 25 bp, Homo sapien
gttgtcatgagccattctaccccag

SEQ ID NO: 387220 - DNA, 25 bp, Homo sapien
cagagaagaggtactcatcatttcc

SEQ ID NO: 387221 - DNA, 25 bp, Homo sapien
atccctttgggcatggtccaccttg

SEQ ID NO: 387222 - DNA, 25 bp, Homo sapien
cctttcaggtgtcgttcagaaattt

SEQ ID NO: 387223 - DNA, 25 bp, Homo sapien
ctttcaggtgtcgttcagaaatttc

SEQ ID NO: 387224 - DNA, 25 bp, Homo sapien
ttaaacctttcaggtgtcgttcaga

SEQ ID NO: 387225 - DNA, 25 bp, Homo sapien
ataatttcaacctgacttttaggag

SEQ ID NO: 387226 - DNA, 25 bp, Homo sapien
tttaggaggtttagtcaaagtcagc

SEQ ID NO: 387227 - DNA, 25 bp, Homo sapien
ttctgggcatctattccacgggctg

SEQ ID NO: 387228 - DNA, 25 bp, Homo sapien
gcatctattccacgggctggatgat

SEQ ID NO: 387229 - DNA, 25 bp, Homo sapien
tcatgttgatgttactttatgcgtt

SEQ ID NO: 387230 - DNA, 25 bp, Homo sapien
tactttatgcgttatttggagttca

SEQ ID NO: 387231 - DNA, 25 bp, Homo sapien
ctttatgcgttatttggagttcatc

SEQ ID NO: 387232 - DNA, 25 bp, Homo sapien
gatgttactttatgcgttatttgga

SEQ ID NO: 387233 - DNA, 25 bp, Homo sapien
gtggtaagaggctcctctctgcctg

SEQ ID NO: 387234 - DNA, 25 bp, Homo sapien
attgtggtaagaggctcctctctgc

SEQ ID NO: 387235 - DNA, 25 bp, Homo sapien
gtgacacttagcctctctactggcc

SEQ ID NO: 387236 - DNA, 25 bp, Homo sapien
cttattcagctctgtgacgtgacac

SEQ ID NO: 387237 - DNA, 25 bp, Homo sapien
agagctagtacagctagacggactg

SEQ ID NO: 387238 - DNA, 25 bp, Homo sapien
gctagacggactgacacagcagagc

SEQ ID NO: 387239 - DNA, 25 bp, Homo sapien
gagctagtacagctagacggactga

SEQ ID NO: 387240 - DNA, 25 bp, Homo sapien
tagacggactgacacagcagagctg

SEQ ID NO: 387241 - DNA, 25 bp, Homo sapien
tgttgctgacttccgcgggagtaag

SEQ ID NO: 387242 - DNA, 25 bp, Homo sapien
taaaataccaccaataatcacagtc

SEQ ID NO: 387243 - DNA, 25 bp, Homo sapien
ccaccaataatcacagtctatcaaa

SEQ ID NO: 387244 - DNA, 25 bp, Homo sapien
caaagcatgttcaggtatcctcttc

SEQ ID NO: 387245 - DNA, 25 bp, Homo sapien
gccatggcaccgtgtcagggaagag

SEQ ID NO: 387246 - DNA, 25 bp, Homo sapien
ccatggcaccgtgtcagggaagagg

SEQ ID NO: 387247 - DNA, 25 bp, Homo sapien
tgccatggcaccgtgtcagggaaga

SEQ ID NO: 387248 - DNA, 25 bp, Homo sapien
ggtactgctgttttagactttcaga

SEQ ID NO: 387249 - DNA, 25 bp, Homo sapien
gaagaatggtactgctgttttagac

SEQ ID NO: 387250 - DNA, 25 bp, Homo sapien
ctgcagataatacctttggcaggga

SEQ ID NO: 387251 - DNA, 25 bp, Homo sapien
caactgttgacctgtgtatttcatg

SEQ ID NO: 387252 - DNA, 25 bp, Homo sapien
tgttctggaggcatttcacaccacc

SEQ ID NO: 387253 - DNA, 25 bp, Homo sapien
ctgtcctcagagtcaatttcagcta

SEQ ID NO: 387254 - DNA, 25 bp, Homo sapien
cctcagagtcaatttcagctaacat

SEQ ID NO: 387255 - DNA, 25 bp, Homo sapien
ttctggaggcatttcacaccacctt

SEQ ID NO: 387256 - DNA, 25 bp, Homo sapien
aacaggtgagtggacgagcattcat

SEQ ID NO: 387257 - DNA, 25 bp, Homo sapien
gaagaacaggtgagtggacgagcat

SEQ ID NO: 387258 - DNA, 25 bp, Homo sapien
gaacaggtgagtggacgagcattca

SEQ ID NO: 387259 - DNA, 25 bp, Homo sapien
agaacaggtgagtggacgagcattc

SEQ ID NO: 387260 - DNA, 25 bp, Homo sapien
cttgacccagctcccgtgactttcc

SEQ ID NO: 387261 - DNA, 25 bp, Homo sapien
gctcccgtgactttccttccacatt

SEQ ID NO: 387262 - DNA, 25 bp, Homo sapien
ttgccttgacccagctcccgtgact

SEQ ID NO: 387263 - DNA, 25 bp, Homo sapien
cccagctcccgtgactttccttcca

SEQ ID NO: 387264 - DNA, 25 bp, Homo sapien
tctccaacttcacggagatggctgg

SEQ ID NO: 387265 - DNA, 25 bp, Homo sapien
ccatgggctcgtatctcctgcccca

SEQ ID NO: 387266 - DNA, 25 bp, Homo sapien
accaggtctccaacttcacggagat

SEQ ID NO: 387267 - DNA, 25 bp, Homo sapien
caacttcacggagatggctgggcat

SEQ ID NO: 387268 - DNA, 25 bp, Homo sapien
ctttcatccatccagcacacagctg

SEQ ID NO: 387269 - DNA, 25 bp, Homo sapien
tttcatccatccagcacacagctga

SEQ ID NO: 387270 - DNA, 25 bp, Homo sapien
ccatccagcacacagctgagaggcc

SEQ ID NO: 387271 - DNA, 25 bp, Homo sapien
tccagcacacagctgagaggcccac

SEQ ID NO: 387272 - DNA, 25 bp, Homo sapien
gcaccaatgtccttgctacctccaa

SEQ ID NO: 387273 - DNA, 25 bp, Homo sapien
accaatgtccttgctacctccaaca

SEQ ID NO: 387274 - DNA, 25 bp, Homo sapien
tgtccttgctacctccaacaggaac

SEQ ID NO: 387275 - DNA, 25 bp, Homo sapien
caatgtccttgctacctccaacagg

SEQ ID NO: 387276 - DNA, 25 bp, Homo sapien
gagtgttcctacaaggcttccatga

SEQ ID NO: 387277 - DNA, 25 bp, Homo sapien
tgtgtgcacgatgaccagacaggtg

SEQ ID NO: 387278 - DNA, 25 bp, Homo sapien
tggagacccaagaaaagtggcctct

SEQ ID NO: 387279 - DNA, 25 bp, Homo sapien
tgttccgtgcccgtaatgttccagg

SEQ ID NO: 387280 - DNA, 25 bp, Homo sapien
tctttgccaacgagggtcagactac

SEQ ID NO: 387281 - DNA, 25 bp, Homo sapien
acttctttgccaacgagggtcagac

SEQ ID NO: 387282 - DNA, 25 bp, Homo sapien
tgccaacgagggtcagactacacat

SEQ ID NO: 387283 - DNA, 25 bp, Homo sapien
gcaaacttctttgccaacgagggtc

SEQ ID NO: 387284 - DNA, 25 bp, Homo sapien
tcaaggagtgttgggcccaagccca

SEQ ID NO: 387285 - DNA, 25 bp, Homo sapien
acactccacatgtctccttgactgg

SEQ ID NO: 387286 - DNA, 25 bp, Homo sapien
tcagcactcaaggagtgttgggccc

SEQ ID NO: 387287 - DNA, 25 bp, Homo sapien
gtctccttgactggccactgttggg

SEQ ID NO: 387288 - DNA, 25 bp, Homo sapien
cagcctctcggtgctgatgtgaaat

SEQ ID NO: 387289 - DNA, 25 bp, Homo sapien
tcatgattgagtgaagccaccccgt

SEQ ID NO: 387290 - DNA, 25 bp, Homo sapien
cagccgcgagcagaatggagtctcc

SEQ ID NO: 387291 - DNA, 25 bp, Homo sapien
tcgccatccgtcgtgtagtgaattg

SEQ ID NO: 387292 - DNA, 25 bp, Homo sapien
gatgacaacggcatctctgctattc

SEQ ID NO: 387293 - DNA, 25 bp, Homo sapien
gctggagatgacaacggcatctctg

SEQ ID NO: 387294 - DNA, 25 bp, Homo sapien
cctcaagattagtggggtcacggct

SEQ ID NO: 387295 - DNA, 25 bp, Homo sapien
tcctcaagattagtggggtcacggc

SEQ ID NO: 387296 - DNA, 25 bp, Homo sapien
ttggaatatgtttcctcccccacag

SEQ ID NO: 387297 - DNA, 25 bp, Homo sapien
tggcatttttcaacagagctgcgtg

SEQ ID NO: 387298 - DNA, 25 bp, Homo sapien
ttgctatcaaccgtcccatgctctg

SEQ ID NO: 387299 - DNA, 25 bp, Homo sapien
tctgcttaacaagtaaatgctgctt

SEQ ID NO: 387300 - DNA, 25 bp, Homo sapien
tttgccagggctcaactggccaacc

SEQ ID NO: 387301 - DNA, 25 bp, Homo sapien
agaggtgcaggccacgtctttgcca

SEQ ID NO: 387302 - DNA, 25 bp, Homo sapien
aggtgcaggccacgtctttgccagg

SEQ ID NO: 387303 - DNA, 25 bp, Homo sapien
tgcaggccacgtctttgccagggct

SEQ ID NO: 387304 - DNA, 25 bp, Homo sapien
tccactctccccctgcaccgctggt

SEQ ID NO: 387305 - DNA, 25 bp, Homo sapien
cctctgaagctccactctccccctg

SEQ ID NO: 387306 - DNA, 25 bp, Homo sapien
tctccccctgcaccgctggtgtggg

SEQ ID NO: 387307 - DNA, 25 bp, Homo sapien
ttctccccctctgaagctccactct

SEQ ID NO: 387308 - DNA, 25 bp, Homo sapien
tggaagaaacacgtcacagcattta

SEQ ID NO: 387309 - DNA, 25 bp, Homo sapien
gctggaagaaacacgtcacagcatt

SEQ ID NO: 387310 - DNA, 25 bp, Homo sapien
gttgctggaagaaacacgtcacagc

SEQ ID NO: 387311 - DNA, 25 bp, Homo sapien
gggttgctggaagaaacacgtcaca

SEQ ID NO: 387312 - DNA, 25 bp, Homo sapien
gtgaccacagctgctgagaaatctt

SEQ ID NO: 387313 - DNA, 25 bp, Homo sapien
tgggtgaccacagctgctgagaaat

SEQ ID NO: 387314 - DNA, 25 bp, Homo sapien
aaatcttcccagaagaggtaggtct

SEQ ID NO: 387315 - DNA, 25 bp, Homo sapien
acagctgctgagaaatcttcccaga

SEQ ID NO: 387316 - DNA, 25 bp, Homo sapien
gcacagtttggcaggtgcagtgcgc

SEQ ID NO: 387317 - DNA, 25 bp, Homo sapien
agtttggcaggtgcagtgcgcagcc

SEQ ID NO: 387318 - DNA, 25 bp, Homo sapien
ctggagcgcacagtttggcaggtgc

SEQ ID NO: 387319 - DNA, 25 bp, Homo sapien
gagcgcacagtttggcaggtgcagt

SEQ ID NO: 387320 - DNA, 25 bp, Homo sapien
cagctcaaggccagcaaaaacagag

SEQ ID NO: 387321 - DNA, 25 bp, Homo sapien
gcctccaaatcccagttggaactca

SEQ ID NO: 387322 - DNA, 25 bp, Homo sapien
taatcttcactcagcagggatcctg

SEQ ID NO: 387323 - DNA, 25 bp, Homo sapien
cagggatcctgtggcctccaaatcc

SEQ ID NO: 387324 - DNA, 25 bp, Homo sapien
gaccctttggctggcgatcccagat

SEQ ID NO: 387325 - DNA, 25 bp, Homo sapien
tggcagttctccgaccctttggctg

SEQ ID NO: 387326 - DNA, 25 bp, Homo sapien
ttctccgaccctttggctggcgatc

SEQ ID NO: 387327 - DNA, 25 bp, Homo sapien
ggctggcgatcccagatgctgcaga

SEQ ID NO: 387328 - DNA, 25 bp, Homo sapien
accaccccagccctggaattggagc

SEQ ID NO: 387329 - DNA, 25 bp, Homo sapien
aatggaccaccccagccctggaatt

SEQ ID NO: 387330 - DNA, 25 bp, Homo sapien
caccccagccctggaattggagctc

SEQ ID NO: 387331 - DNA, 25 bp, Homo sapien
ccccagccctggaattggagctcac

SEQ ID NO: 387332 - DNA, 25 bp, Homo sapien
gatgaagtgggccatcccatctaca

SEQ ID NO: 387333 - DNA, 25 bp, Homo sapien
acactcacagaagcaaaacgggagc

SEQ ID NO: 387334 - DNA, 25 bp, Homo sapien
ctctgacctgtgttgtacacacacg

SEQ ID NO: 387335 - DNA, 25 bp, Homo sapien
tccatggcctttgtcacgtggaaaa

SEQ ID NO: 387336 - DNA, 25 bp, Homo sapien
tgaactccaaaacccagccgaggct

SEQ ID NO: 387337 - DNA, 25 bp, Homo sapien
gaggctccatctagcctcaagtttc

SEQ ID NO: 387338 - DNA, 25 bp, Homo sapien
agtcctgttaacctcttgaactcca

SEQ ID NO: 387339 - DNA, 25 bp, Homo sapien
agccgaggctccatctagcctcaag

SEQ ID NO: 387340 - DNA, 25 bp, Homo sapien
gtgaaatgcccgtccatagagggag

SEQ ID NO: 387341 - DNA, 25 bp, Homo sapien
tgaaatgcccgtccatagagggagg

SEQ ID NO: 387342 - DNA, 25 bp, Homo sapien
aaaggaagatgagaacgacgctgtg

SEQ ID NO: 387343 - DNA, 25 bp, Homo sapien
tggcctgtggacctgggcactatca

SEQ ID NO: 387344 - DNA, 25 bp, Homo sapien
gacctgacaataccaatgggctttg

SEQ ID NO: 387345 - DNA, 25 bp, Homo sapien
tcttgacccatatgcagtgaagcac

SEQ ID NO: 387346 - DNA, 25 bp, Homo sapien
tggttatttcgcagggagggggtca

SEQ ID NO: 387347 - DNA, 25 bp, Homo sapien
gttatttcgcagggagggggtcagc

SEQ ID NO: 387348 - DNA, 25 bp, Homo sapien
gtcagcaggtcgaggagctcagggc

SEQ ID NO: 387349 - DNA, 25 bp, Homo sapien
ctcctctgcatggttgagaatcctg

SEQ ID NO: 387350 - DNA, 25 bp, Homo sapien
tctcctctgcatggttgagaatcct

SEQ ID NO: 387351 - DNA, 25 bp, Homo sapien
catctcctctgcatggttgagaatc

SEQ ID NO: 387352 - DNA, 25 bp, Homo sapien
ccatctcctctgcatggttgagaat

SEQ ID NO: 387353 - DNA, 25 bp, Homo sapien
ttcatgaaactggtcatttagagag

SEQ ID NO: 387354 - DNA, 25 bp, Homo sapien
agagttcagtactgctgagtacttg

SEQ ID NO: 387355 - DNA, 25 bp, Homo sapien
acttcccacttcatcctttacagtg

SEQ ID NO: 387356 - DNA, 25 bp, Homo sapien
ttcatcctttacagtgaggattccc

SEQ ID NO: 387357 - DNA, 25 bp, Homo sapien
gcctctccttgggtctttgtggaaa

SEQ ID NO: 387358 - DNA, 25 bp, Homo sapien
ccttgggtctttgtggaaactggca

SEQ ID NO: 387359 - DNA, 25 bp, Homo sapien
ttgcctctccttgggtctttgtgga

SEQ ID NO: 387360 - DNA, 25 bp, Homo sapien
gaaactggcactggctctgtctcca

SEQ ID NO: 387361 - DNA, 25 bp, Homo sapien
gcaacagagccaaagaagccaagag

SEQ ID NO: 387362 - DNA, 25 bp, Homo sapien
cataaatgctgaggggctaagagta

SEQ ID NO: 387363 - DNA, 25 bp, Homo sapien
gtaggacatgcagaaagtctaagga

SEQ ID NO: 387364 - DNA, 25 bp, Homo sapien
tgctaggcataaatgctgaggggct

SEQ ID NO: 387365 - DNA, 25 bp, Homo sapien
tgcagaaagtctaaggatatcaggg

SEQ ID NO: 387366 - DNA, 25 bp, Homo sapien
cacggagtttccttgtacagatttg

SEQ ID NO: 387367 - DNA, 25 bp, Homo sapien
cagggatgtaacgggtgaccttcct

SEQ ID NO: 387368 - DNA, 25 bp, Homo sapien
ggatagaatcccttgagactactga

SEQ ID NO: 387369 - DNA, 25 bp, Homo sapien
ggagtgcttggaaccaggatagaat

SEQ ID NO: 387370 - DNA, 25 bp, Homo sapien
tgcaaggaacacaccattggaggca

SEQ ID NO: 387371 - DNA, 25 bp, Homo sapien
tgtggagctgcatgaaacaggtctg

SEQ ID NO: 387372 - DNA, 25 bp, Homo sapien
catcctcagcatgccgtgtgaagtg

SEQ ID NO: 387373 - DNA, 25 bp, Homo sapien
caagcagatgtaaccctggccaggt

SEQ ID NO: 387374 - DNA, 25 bp, Homo sapien
ctatgaggttgtcgtgggcttccct

SEQ ID NO: 387375 - DNA, 25 bp, Homo sapien
tgaggttgtcgtgggcttccctgac

SEQ ID NO: 387376 - DNA, 25 bp, Homo sapien
ttgtcgtgggcttccctgacactgc

SEQ ID NO: 387377 - DNA, 25 bp, Homo sapien
cctgacactgccagagttctcagca

SEQ ID NO: 387378 - DNA, 25 bp, Homo sapien
attgtgcgtctgagctgaagggtgt

SEQ ID NO: 387379 - DNA, 25 bp, Homo sapien
tcccattgtgcgtctgagctgaagg

SEQ ID NO: 387380 - DNA, 25 bp, Homo sapien
gctgaagggtgttacagcctttccc

SEQ ID NO: 387381 - DNA, 25 bp, Homo sapien
ctgaagggtgttacagcctttccct

SEQ ID NO: 387382 - DNA, 25 bp, Homo sapien
ggattaggacatggctatcttcggg

SEQ ID NO: 387383 - DNA, 25 bp, Homo sapien
ggagactctgcccatctcaagattc

SEQ ID NO: 387384 - DNA, 25 bp, Homo sapien
tttttatgccacaaggtaacattca

SEQ ID NO: 387385 - DNA, 25 bp, Homo sapien
tacatctgtaaagatccttttttta

SEQ ID NO: 387386 - DNA, 25 bp, Homo sapien
gaaagaaagcaagttcaaaccacag

SEQ ID NO: 387387 - DNA, 25 bp, Homo sapien
atcggactgggatatggtgaagctc

SEQ ID NO: 387388 - DNA, 25 bp, Homo sapien
cacagagagtgatgccagagatctg

SEQ ID NO: 387389 - DNA, 25 bp, Homo sapien
gcagaataaaattacaggtgaatct

SEQ ID NO: 387390 - DNA, 25 bp, Homo sapien
tctgtagagcagaccctttcagagc

SEQ ID NO: 387391 - DNA, 25 bp, Homo sapien
gcaagcaggttaagaagtagattcc

SEQ ID NO: 387392 - DNA, 25 bp, Homo sapien
taggactggttgcacagtgtgatcc

SEQ ID NO: 387393 - DNA, 25 bp, Homo sapien
cagagcttgtagttgtgaagttcca

SEQ ID NO: 387394 - DNA, 25 bp, Homo sapien
agtgtttgggtgttgcggggagagg

SEQ ID NO: 387395 - DNA, 25 bp, Homo sapien
tttgggtgttgcggggagaggcaca

SEQ ID NO: 387396 - DNA, 25 bp, Homo sapien
tgtttgggtgttgcggggagaggca

SEQ ID NO: 387397 - DNA, 25 bp, Homo sapien
ctgagtgtttgggtgttgcggggag

SEQ ID NO: 387398 - DNA, 25 bp, Homo sapien
caagggacccaagatggctctgagg

SEQ ID NO: 387399 - DNA, 25 bp, Homo sapien
ctggccactcaatggtgagacgtta

SEQ ID NO: 387400 - DNA, 25 bp, Homo sapien
gtgagacgttactgctgaaggaagc

SEQ ID NO: 387401 - DNA, 25 bp, Homo sapien
tcaggccaccaagggacccaagatg

SEQ ID NO: 387402 - DNA, 25 bp, Homo sapien
aactttccccagagcaatttgcatc

SEQ ID NO: 387403 - DNA, 25 bp, Homo sapien
gggtgactgtacagattcccttaac

SEQ ID NO: 387404 - DNA, 25 bp, Homo sapien
cttgaccttacaactttccccagag

SEQ ID NO: 387405 - DNA, 25 bp, Homo sapien
tcccttaacagcagaaaccacaact

SEQ ID NO: 387406 - DNA, 25 bp, Homo sapien
gccgctgggattatgcaatggtgca

SEQ ID NO: 387407 - DNA, 25 bp, Homo sapien
gcaccttcgtgcattgccgctggga

SEQ ID NO: 387408 - DNA, 25 bp, Homo sapien
taagccaagctctttgcatcaacaa

SEQ ID NO: 387409 - DNA, 25 bp, Homo sapien
taaacagagacttgccataggaccc

SEQ ID NO: 387410 - DNA, 25 bp, Homo sapien
gggcccaagtgaatctcggaaacca

SEQ ID NO: 387411 - DNA, 25 bp, Homo sapien
aagggagcataagcttgggcccaag

SEQ ID NO: 387412 - DNA, 25 bp, Homo sapien
tgcattctcgcccttcttgccctaa

SEQ ID NO: 387413 - DNA, 25 bp, Homo sapien
caatgcttcttatactcctactgca

SEQ ID NO: 387414 - DNA, 25 bp, Homo sapien
taaacaaatctgagagccgcttgat

SEQ ID NO: 387415 - DNA, 25 bp, Homo sapien
aaagaagtcctcaaagacctcctct

SEQ ID NO: 387416 - DNA, 25 bp, Homo sapien
ggcagagcatgctcttcagtgttct

SEQ ID NO: 387417 - DNA, 25 bp, Homo sapien
tgatgctcgattcctggatctcagg

SEQ ID NO: 387418 - DNA, 25 bp, Homo sapien
cagcttcagtgtctaatttcagtgt

SEQ ID NO: 387419 - DNA, 25 bp, Homo sapien
acaccagcttcagtgtctaatttca

SEQ ID NO: 387420 - DNA, 25 bp, Homo sapien
aggacaccagcttcagtgtctaatt

SEQ ID NO: 387421 - DNA, 25 bp, Homo sapien
ctgcacagaggacaccagcttcagt

SEQ ID NO: 387422 - DNA, 25 bp, Homo sapien
gatttccaagaagagcgtcagggca

SEQ ID NO: 387423 - DNA, 25 bp, Homo sapien
taaatggatccgtgcagacgcatcg

SEQ ID NO: 387424 - DNA, 25 bp, Homo sapien
tagggaccacaatctcagcattagc

SEQ ID NO: 387425 - DNA, 25 bp, Homo sapien
gcatcgcagcactcccaacatttga

SEQ ID NO: 387426 - DNA, 25 bp, Homo sapien
ggaaagcaggcctccatgagagcca

SEQ ID NO: 387427 - DNA, 25 bp, Homo sapien
gcctccatgagagccagctgtgaac

SEQ ID NO: 387428 - DNA, 25 bp, Homo sapien
agccagctgtgaacgcttcctgtgt

SEQ ID NO: 387429 - DNA, 25 bp, Homo sapien
gctgtgaacgcttcctgtgttcctg

SEQ ID NO: 387430 - DNA, 25 bp, Homo sapien
ggtatgattgtgcacttaagggtca

SEQ ID NO: 387431 - DNA, 25 bp, Homo sapien
cacttaagggtcaggggtgtgacct

SEQ ID NO: 387432 - DNA, 25 bp, Homo sapien
tcggggtgggatgaggtatgattgt

SEQ ID NO: 387433 - DNA, 25 bp, Homo sapien
tctgtcttgggtcggggtgggatga

SEQ ID NO: 387434 - DNA, 25 bp, Homo sapien
gacctttctgcagctattggactgg

SEQ ID NO: 387435 - DNA, 25 bp, Homo sapien
tacaaggaaatgattggacctttct

SEQ ID NO: 387436 - DNA, 25 bp, Homo sapien
ccttacaagcagtaattacaaggaa

SEQ ID NO: 387437 - DNA, 25 bp, Homo sapien
cagctattggactggctctgatttc

SEQ ID NO: 387438 - DNA, 25 bp, Homo sapien
ctacttctccatctgtggccgcttt

SEQ ID NO: 387439 - DNA, 25 bp, Homo sapien
tacttctccatctgtggccgctttg

SEQ ID NO: 387440 - DNA, 25 bp, Homo sapien
acttctccatctgtggccgctttgt

SEQ ID NO: 387441 - DNA, 25 bp, Homo sapien
tttgaaccaagcatggatacagaga

SEQ ID NO: 387442 - DNA, 25 bp, Homo sapien
ggttcatttgaaccaagcatggata

SEQ ID NO: 387443 - DNA, 25 bp, Homo sapien
cctctggttcatttgaaccaagcat

SEQ ID NO: 387444 - DNA, 25 bp, Homo sapien
tggggggaaagatgagccctcccca

SEQ ID NO: 387445 - DNA, 25 bp, Homo sapien
caaggctgagtaggtccacaaataa

SEQ ID NO: 387446 - DNA, 25 bp, Homo sapien
gggactttctaccagactcacagag

SEQ ID NO: 387447 - DNA, 25 bp, Homo sapien
ttgtggatcctgttgggaccagcca

SEQ ID NO: 387448 - DNA, 25 bp, Homo sapien
gtcgtcccctgctgagaggccatgt

SEQ ID NO: 387449 - DNA, 25 bp, Homo sapien
tttcttcaggacttgctgttcctcc

SEQ ID NO: 387450 - DNA, 25 bp, Homo sapien
tcttcaggacttgctgttcctccat

SEQ ID NO: 387451 - DNA, 25 bp, Homo sapien
ttcttcaggacttgctgttcctcca

SEQ ID NO: 387452 - DNA, 25 bp, Homo sapien
ctttcttcaggacttgctgttcctc

SEQ ID NO: 387453 - DNA, 25 bp, Homo sapien
ggtttctgggtcccttgttcctgca

SEQ ID NO: 387454 - DNA, 25 bp, Homo sapien
gtttctgggtcccttgttcctgcat

SEQ ID NO: 387455 - DNA, 25 bp, Homo sapien
ctggctgggtttctgggtcccttgt

SEQ ID NO: 387456 - DNA, 25 bp, Homo sapien
agtttcccagatgccgtaagcccac

SEQ ID NO: 387457 - DNA, 25 bp, Homo sapien
gccccaaatcttgttccaaaacaca

SEQ ID NO: 387458 - DNA, 25 bp, Homo sapien
cagtttcccagatgccgtaagccca

SEQ ID NO: 387459 - DNA, 25 bp, Homo sapien
ggttttatcattgcacttgggttta

SEQ ID NO: 387460 - DNA, 25 bp, Homo sapien
ttcccactgcacacttggttttatc

SEQ ID NO: 387461 - DNA, 25 bp, Homo sapien
cttggttttatcattgcacttgggt

SEQ ID NO: 387462 - DNA, 25 bp, Homo sapien
cacttggttttatcattgcacttgg

SEQ ID NO: 387463 - DNA, 25 bp, Homo sapien
ggtttttctaatgcaaggtccagta

SEQ ID NO: 387464 - DNA, 25 bp, Homo sapien
ttccaggtttttctaatgcaaggtc

SEQ ID NO: 387465 - DNA, 25 bp, Homo sapien
ctccataccttgtaactttttccag

SEQ ID NO: 387466 - DNA, 25 bp, Homo sapien
ttctaatgcaaggtccagtatcttt

SEQ ID NO: 387467 - DNA, 25 bp, Homo sapien
ctttcaattccacagtagccagtgg

SEQ ID NO: 387468 - DNA, 25 bp, Homo sapien
tctttcaattccacagtagccagtg

SEQ ID NO: 387469 - DNA, 25 bp, Homo sapien
tatggtcctttgaaacatcaagcct

SEQ ID NO: 387470 - DNA, 25 bp, Homo sapien
acctatggtcctttgaaacatcaag

SEQ ID NO: 387471 - DNA, 25 bp, Homo sapien
cattgtaagttgtcttttccttaca

SEQ ID NO: 387472 - DNA, 25 bp, Homo sapien
tgtcttttccttacagtttctatta

SEQ ID NO: 387473 - DNA, 25 bp, Homo sapien
caagcccattgtaagttgtcttttc

SEQ ID NO: 387474 - DNA, 25 bp, Homo sapien
agcccattgtaagttgtcttttcct

SEQ ID NO: 387475 - DNA, 25 bp, Homo sapien
taacggtaggagtaaatagtagcag

SEQ ID NO: 387476 - DNA, 25 bp, Homo sapien
tctcctcgcctctgataataatgac

SEQ ID NO: 387477 - DNA, 25 bp, Homo sapien
tacttatgttcttggttatgctgcc

SEQ ID NO: 387478 - DNA, 25 bp, Homo sapien
tcattcctgggtatggctttggcta

SEQ ID NO: 387479 - DNA, 25 bp, Homo sapien
cagcagtgccgtaatacgcacgtca

SEQ ID NO: 387480 - DNA, 25 bp, Homo sapien
gacgtctggcgcattgtaagaacaa

SEQ ID NO: 387481 - DNA, 25 bp, Homo sapien
gaatgtttcatgagacgtctggcgc

SEQ ID NO: 387482 - DNA, 25 bp, Homo sapien
catgttggttatgatgatacccagc

SEQ ID NO: 387483 - DNA, 25 bp, Homo sapien
gcccctgccaagtgggaagcctatt

SEQ ID NO: 387484 - DNA, 25 bp, Homo sapien
aagacggcccctgccaagtgggaag

SEQ ID NO: 387485 - DNA, 25 bp, Homo sapien
atgtttacagaaacgagtggacaag

SEQ ID NO: 387486 - DNA, 25 bp, Homo sapien
aaacgagtggacaagacggcccctg

SEQ ID NO: 387487 - DNA, 25 bp, Homo sapien
gaatgaatgaagaccctttctcaca

SEQ ID NO: 387488 - DNA, 25 bp, Homo sapien
gaagaccctttctcacagtaacaaa

SEQ ID NO: 387489 - DNA, 25 bp, Homo sapien
gaatgaagaccctttctcacagtaa

SEQ ID NO: 387490 - DNA, 25 bp, Homo sapien
aatgaatgaagaccctttctcacag

SEQ ID NO: 387491 - DNA, 25 bp, Homo sapien
tgttaactgtctttgacaggagatc

SEQ ID NO: 387492 - DNA, 25 bp, Homo sapien
catgaagcaatattccgaggatttg

SEQ ID NO: 387493 - DNA, 25 bp, Homo sapien
tgtacatgaagcaatattccgagga

SEQ ID NO: 387494 - DNA, 25 bp, Homo sapien
ttgttaactgtctttgacaggagat

SEQ ID NO: 387495 - DNA, 25 bp, Homo sapien
ctgttggcagccaaattcctgtctg

SEQ ID NO: 387496 - DNA, 25 bp, Homo sapien
ttccaaggaaccattacaattaaga

SEQ ID NO: 387497 - DNA, 25 bp, Homo sapien
tcctgtctgggaaaatgtatgagcc

SEQ ID NO: 387498 - DNA, 25 bp, Homo sapien
tttaaccatcattatgttgtgcatt

SEQ ID NO: 387499 - DNA, 25 bp, Homo sapien
gatgtgtgaagagacccacttcact

SEQ ID NO: 387500 - DNA, 25 bp, Homo sapien
tggatgtgtgaagagacccacttca

SEQ ID NO: 387501 - DNA, 25 bp, Homo sapien
gaagagacccacttcactattctgc

SEQ ID NO: 387502 - DNA, 25 bp, Homo sapien
tgtgaagagacccacttcactattc

SEQ ID NO: 387503 - DNA, 25 bp, Homo sapien
tctgttgtgacttaattttaatgca

SEQ ID NO: 387504 - DNA, 25 bp, Homo sapien
aagtctggtaatgatctgactgggc

SEQ ID NO: 387505 - DNA, 25 bp, Homo sapien
aggtgtgagatacaggtgcaaacct

SEQ ID NO: 387506 - DNA, 25 bp, Homo sapien
tgcaaacctggatgtctgttgtgac

SEQ ID NO: 387507 - DNA, 25 bp, Homo sapien
aataccatcatgacaccctgacagc

SEQ ID NO: 387508 - DNA, 25 bp, Homo sapien
cagccctggaaagctgcctcgagga

SEQ ID NO: 387509 - DNA, 25 bp, Homo sapien
ggatttgcgcaataccatcatgaca

SEQ ID NO: 387510 - DNA, 25 bp, Homo sapien
cagcaacaggctcgttcttcagaga

SEQ ID NO: 387511 - DNA, 25 bp, Homo sapien
tgagacatgagaatttcttgaactg

SEQ ID NO: 387512 - DNA, 25 bp, Homo sapien
ggctgcagtgatccgtgattgaacc

SEQ ID NO: 387513 - DNA, 25 bp, Homo sapien
gacatgagaatttcttgaactggga

SEQ ID NO: 387514 - DNA, 25 bp, Homo sapien
acatgagaatttcttgaactgggag

SEQ ID NO: 387515 - DNA, 25 bp, Homo sapien
catgacctgccaaccaatttgtgtc

SEQ ID NO: 387516 - DNA, 25 bp, Homo sapien
gtgtcttgactgctccattctcaag

SEQ ID NO: 387517 - DNA, 25 bp, Homo sapien
tcacagtgccaaggatagcctggaa

SEQ ID NO: 387518 - DNA, 25 bp, Homo sapien
gatcacacatcattctcagtccaca

SEQ ID NO: 387519 - DNA, 25 bp, Homo sapien
gaaccccatggttattccacattag

SEQ ID NO: 387520 - DNA, 25 bp, Homo sapien
taatatgggcaaatatgtcactgtc

SEQ ID NO: 387521 - DNA, 25 bp, Homo sapien
gattcatggatccactaatatgggc

SEQ ID NO: 387522 - DNA, 25 bp, Homo sapien
ccacattaggtggatcctgactgca

SEQ ID NO: 387523 - DNA, 25 bp, Homo sapien
attccagaactttcttgatttccaa

SEQ ID NO: 387524 - DNA, 25 bp, Homo sapien
tcattccagaactttcttgatttcc

SEQ ID NO: 387525 - DNA, 25 bp, Homo sapien
tccagaactttcttgatttccaagg

SEQ ID NO: 387526 - DNA, 25 bp, Homo sapien
cagaactttcttgatttccaaggtt

SEQ ID NO: 387527 - DNA, 25 bp, Homo sapien
tgaactgaatggactcatactgggc

SEQ ID NO: 387528 - DNA, 25 bp, Homo sapien
gcactttcggtcttggcatgaacag

SEQ ID NO: 387529 - DNA, 25 bp, Homo sapien
tgggccagcactttcggtcttggca

SEQ ID NO: 387530 - DNA, 25 bp, Homo sapien
gcatgaactgaatggactcatactg

SEQ ID NO: 387531 - DNA, 25 bp, Homo sapien
aaatgtacattcactaaatatggaa

SEQ ID NO: 387532 - DNA, 25 bp, Homo sapien
gacagctttgcaattaaatgtacat

SEQ ID NO: 387533 - DNA, 25 bp, Homo sapien
tttattaatgacagctttgcaatta

SEQ ID NO: 387534 - DNA, 25 bp, Homo sapien
aatatggaaacaagtgagaactaac

SEQ ID NO: 387535 - DNA, 25 bp, Homo sapien
cacagggaggcatgcttcaacgtac

SEQ ID NO: 387536 - DNA, 25 bp, Homo sapien
gcttggtcattacctcactgggctg

SEQ ID NO: 387537 - DNA, 25 bp, Homo sapien
tgagtccttcaccacgctgtacagc

SEQ ID NO: 387538 - DNA, 25 bp, Homo sapien
catgaaatgggctgatgtaccagga

SEQ ID NO: 387539 - DNA, 25 bp, Homo sapien
caaccctttcttgggatgagctgca

SEQ ID NO: 387540 - DNA, 25 bp, Homo sapien
aaccctttcttgggatgagctgcag

SEQ ID NO: 387541 - DNA, 25 bp, Homo sapien
ctccaaccctttcttgggatgagct

SEQ ID NO: 387542 - DNA, 25 bp, Homo sapien
tccaaccctttcttgggatgagctg

SEQ ID NO: 387543 - DNA, 25 bp, Homo sapien
tttgccaagtcagccctgctgcacg

SEQ ID NO: 387544 - DNA, 25 bp, Homo sapien
gggggtgcctctttgccaagtcagc

SEQ ID NO: 387545 - DNA, 25 bp, Homo sapien
ctcgcattcctctgggggtgcctct

SEQ ID NO: 387546 - DNA, 25 bp, Homo sapien
tcgcattcctctgggggtgcctctt

SEQ ID NO: 387547 - DNA, 25 bp, Homo sapien
ggcacacaaactgggaggtcaccga

SEQ ID NO: 387548 - DNA, 25 bp, Homo sapien
tgggaggtcaccgatcacaggaatc

SEQ ID NO: 387549 - DNA, 25 bp, Homo sapien
ggaatccactccagcaagtgtccca

SEQ ID NO: 387550 - DNA, 25 bp, Homo sapien
gacaccatgtgcaattctgggacat

SEQ ID NO: 387551 - DNA, 25 bp, Homo sapien
tgattcttgacactgagataccgtg

SEQ ID NO: 387552 - DNA, 25 bp, Homo sapien
gataccgtgtagcaactgcattgcc

SEQ ID NO: 387553 - DNA, 25 bp, Homo sapien
aagtgccatgtcctttgtgcccctg

SEQ ID NO: 387554 - DNA, 25 bp, Homo sapien
gggaggtcactcaatgtagaaacag

SEQ ID NO: 387555 - DNA, 25 bp, Homo sapien
aattatcttgtttaaatctggcaaa

SEQ ID NO: 387556 - DNA, 25 bp, Homo sapien
ttatcttgtttaaatctggcaaaac

SEQ ID NO: 387557 - DNA, 25 bp, Homo sapien
tggaattatcttgtttaaatctggc

SEQ ID NO: 387558 - DNA, 25 bp, Homo sapien
ggaattatcttgtttaaatctggca

SEQ ID NO: 387559 - DNA, 25 bp, Homo sapien
gaaaaaggcatccaatgggccactt

SEQ ID NO: 387560 - DNA, 25 bp, Homo sapien
attgcttggaaatcagagaatgtag

SEQ ID NO: 387561 - DNA, 25 bp, Homo sapien
aaaggcatccaatgggccacttccc

SEQ ID NO: 387562 - DNA, 25 bp, Homo sapien
cttggaaatcagagaatgtagagca

SEQ ID NO: 387563 - DNA, 25 bp, Homo sapien
ctgtctccctggtcagccatgtagg

SEQ ID NO: 387564 - DNA, 25 bp, Homo sapien
ccaggaccccactgggtaagcacag

SEQ ID NO: 387565 - DNA, 25 bp, Homo sapien
ggaccaggaccccactgggtaagca

SEQ ID NO: 387566 - DNA, 25 bp, Homo sapien
gccatgtaggctgtagtagagcagc

SEQ ID NO: 387567 - DNA, 25 bp, Homo sapien
tccgctctcctgctagacccaagct

SEQ ID NO: 387568 - DNA, 25 bp, Homo sapien
ggcagtgaccctgtcttgacctgca

SEQ ID NO: 387569 - DNA, 25 bp, Homo sapien
agtgaccctgtcttgacctgcacct

SEQ ID NO: 387570 - DNA, 25 bp, Homo sapien
agggcagtgaccctgtcttgacctg

SEQ ID NO: 387571 - DNA, 25 bp, Homo sapien
tttatggattcacacagagctctct

SEQ ID NO: 387572 - DNA, 25 bp, Homo sapien
cttttatggattcacacagagctct

SEQ ID NO: 387573 - DNA, 25 bp, Homo sapien
tcacacagagctctctgaaggatgg

SEQ ID NO: 387574 - DNA, 25 bp, Homo sapien
acacagagctctctgaaggatgggc

SEQ ID NO: 387575 - DNA, 25 bp, Homo sapien
tcatggagtgaaaagctttaagcac

SEQ ID NO: 387576 - DNA, 25 bp, Homo sapien
gatgaggcttcatggagtgaaaagc

SEQ ID NO: 387577 - DNA, 25 bp, Homo sapien
ttcatggagtgaaaagctttaagca

SEQ ID NO: 387578 - DNA, 25 bp, Homo sapien
tgaggcttcatggagtgaaaagctt

SEQ ID NO: 387579 - DNA, 25 bp, Homo sapien
cttccctgcctagcgtgagcctgtg

SEQ ID NO: 387580 - DNA, 25 bp, Homo sapien
taggcatagtgggtgacctgagcac

SEQ ID NO: 387581 - DNA, 25 bp, Homo sapien
tgagcactggtgctccagtgagtga

SEQ ID NO: 387582 - DNA, 25 bp, Homo sapien
ggtgacctgagcactggtgctccag

SEQ ID NO: 387583 - DNA, 25 bp, Homo sapien
tggagtgtggatgttgtggatgtcc

SEQ ID NO: 387584 - DNA, 25 bp, Homo sapien
ctggagtgtggatgttgtggatgtc

SEQ ID NO: 387585 - DNA, 25 bp, Homo sapien
gctcctcttgggtgtagatcaatgc

SEQ ID NO: 387586 - DNA, 25 bp, Homo sapien
tgtagatcaatgctcttgttctggt

SEQ ID NO: 387587 - DNA, 25 bp, Homo sapien
ctagatggcatatcagtttgttcca

SEQ ID NO: 387588 - DNA, 25 bp, Homo sapien
cattgtgtttctgctgattcctgct

SEQ ID NO: 387589 - DNA, 25 bp, Homo sapien
tgttgttggaaacatggttaaggcc

SEQ ID NO: 387590 - DNA, 25 bp, Homo sapien
ttggaaacatggttaaggcccctca

SEQ ID NO: 387591 - DNA, 25 bp, Homo sapien
tggaaacatggttaaggcccctcac

SEQ ID NO: 387592 - DNA, 25 bp, Homo sapien
ggctgttgttggaaacatggttaag

SEQ ID NO: 387593 - DNA, 25 bp, Homo sapien
aatcctacctgaatcacatcaagaa

SEQ ID NO: 387594 - DNA, 25 bp, Homo sapien
agaaagcgtctttgcagtttgaaaa

SEQ ID NO: 387595 - DNA, 25 bp, Homo sapien
caacttgcaggtgggatccagaacc

SEQ ID NO: 387596 - DNA, 25 bp, Homo sapien
cacatagcgcaacttcagagaagat

SEQ ID NO: 387597 - DNA, 25 bp, Homo sapien
gggcggagactatcacctctctctg

SEQ ID NO: 387598 - DNA, 25 bp, Homo sapien
gagctccaccgtgtcatcagccatt

SEQ ID NO: 387599 - DNA, 25 bp, Homo sapien
cagcacaactgatcttctatcctgg

SEQ ID NO: 387600 - DNA, 25 bp, Homo sapien
ccctcatggcctgggcggagactat

SEQ ID NO: 387601 - DNA, 25 bp, Homo sapien
cagcttgtacctttggggagacctt

SEQ ID NO: 387602 - DNA, 25 bp, Homo sapien
cgttgactaaacccaaaggagagag

SEQ ID NO: 387603 - DNA, 25 bp, Homo sapien
tcagcttgtacctttggggagacct

SEQ ID NO: 387604 - DNA, 25 bp, Homo sapien
tctccctctccgttgactaaaccca

SEQ ID NO: 387605 - DNA, 25 bp, Homo sapien
aacttgggtccatgtgagctgtctg

SEQ ID NO: 387606 - DNA, 25 bp, Homo sapien
ccaacttgggtccatgtgagctgtc

SEQ ID NO: 387607 - DNA, 25 bp, Homo sapien
accccaacttgggtccatgtgagct

SEQ ID NO: 387608 - DNA, 25 bp, Homo sapien
ttaaccccaacttgggtccatgtga

SEQ ID NO: 387609 - DNA, 25 bp, Homo sapien
ggtacggtgtttctgtctggagccc

SEQ ID NO: 387610 - DNA, 25 bp, Homo sapien
gatcccataaccagactcagcagag

SEQ ID NO: 387611 - DNA, 25 bp, Homo sapien
acagtgacacgggagcatggctctg

SEQ ID NO: 387612 - DNA, 25 bp, Homo sapien
cagcttgaaggtgacacacagtgac

SEQ ID NO: 387613 - DNA, 25 bp, Homo sapien
gttttccttcgatggcaaacccaca

SEQ ID NO: 387614 - DNA, 25 bp, Homo sapien
ttttccttcgatggcaaacccacac

SEQ ID NO: 387615 - DNA, 25 bp, Homo sapien
ttccttcgatggcaaacccacacac

SEQ ID NO: 387616 - DNA, 25 bp, Homo sapien
ccttcgatggcaaacccacacacac

SEQ ID NO: 387617 - DNA, 25 bp, Homo sapien
gttcacagtaacactcttcagaaca

SEQ ID NO: 387618 - DNA, 25 bp, Homo sapien
tgttcacagtaacactcttcagaac

SEQ ID NO: 387619 - DNA, 25 bp, Homo sapien
ttcacagtaacactcttcagaacag

SEQ ID NO: 387620 - DNA, 25 bp, Homo sapien
tactatgatgctgtaatgtaacact

SEQ ID NO: 387621 - DNA, 25 bp, Homo sapien
gaaactgacatggtgattctagaat

SEQ ID NO: 387622 - DNA, 25 bp, Homo sapien
actagagtagccaaaagaatcttga

SEQ ID NO: 387623 - DNA, 25 bp, Homo sapien
gaactaaattgaagatctcacactg

SEQ ID NO: 387624 - DNA, 25 bp, Homo sapien
cagagtggttatgctaatatcagac

SEQ ID NO: 387625 - DNA, 25 bp, Homo sapien
gaaaaaagatatgtcgtgccactag

SEQ ID NO: 387626 - DNA, 25 bp, Homo sapien
ttcagctatatattgtccacagagg

SEQ ID NO: 387627 - DNA, 25 bp, Homo sapien
tagcaactttagagagccagagtgg

SEQ ID NO: 387628 - DNA, 25 bp, Homo sapien
tgcccagccgtgagcaagtcattct

SEQ ID NO: 387629 - DNA, 25 bp, Homo sapien
cagaggacctggatctaagaggcca

SEQ ID NO: 387630 - DNA, 25 bp, Homo sapien
taagaggccaagttcatttgcacga

SEQ ID NO: 387631 - DNA, 25 bp, Homo sapien
cattcgccggcagactgggagtgtc

SEQ ID NO: 387632 - DNA, 25 bp, Homo sapien
tgggcatccagtccgggctctccaa

SEQ ID NO: 387633 - DNA, 25 bp, Homo sapien
tagtgggcatccagtccgggctctc

SEQ ID NO: 387634 - DNA, 25 bp, Homo sapien
cagcacaggattctagtgggcatcc

SEQ ID NO: 387635 - DNA, 25 bp, Homo sapien
tctagtgggcatccagtccgggctc

SEQ ID NO: 387636 - DNA, 25 bp, Homo sapien
agattgggagacattgggcagagga

SEQ ID NO: 387637 - DNA, 25 bp, Homo sapien
gattgggagacattgggcagaggag

SEQ ID NO: 387638 - DNA, 25 bp, Homo sapien
tcaagtcagagaaatgctcagtcca

SEQ ID NO: 387639 - DNA, 25 bp, Homo sapien
gctggatgggaagttatgtcaagtc

SEQ ID NO: 387640 - DNA, 25 bp, Homo sapien
gatgggaagttatgtcaagtcagag

SEQ ID NO: 387641 - DNA, 25 bp, Homo sapien
tgtttagggttcctcaaaatgaaga

SEQ ID NO: 387642 - DNA, 25 bp, Homo sapien
aacataagcgccgtgtacctcttac

SEQ ID NO: 387643 - DNA, 25 bp, Homo sapien
ttcaaaaatacctccagcgtgccac

SEQ ID NO: 387644 - DNA, 25 bp, Homo sapien
aaaaatacctccagcgtgccacatg

SEQ ID NO: 387645 - DNA, 25 bp, Homo sapien
cacatgccccagagttaacataagc

SEQ ID NO: 387646 - DNA, 25 bp, Homo sapien
gcgaggtttcgccttacggcaatct

SEQ ID NO: 387647 - DNA, 25 bp, Homo sapien
ttacattccttacacctaccacaga

SEQ ID NO: 387648 - DNA, 25 bp, Homo sapien
gaggatagtctaaactctcatgaaa

SEQ ID NO: 387649 - DNA, 25 bp, Homo sapien
ccaaactcaggatcgtttacattcc

SEQ ID NO: 387650 - DNA, 25 bp, Homo sapien
tgcggaagtacagaggagacaaacg

SEQ ID NO: 387651 - DNA, 25 bp, Homo sapien
cagtcaaatactacattcgttgtaa

SEQ ID NO: 387652 - DNA, 25 bp, Homo sapien
taaattcttatttccttcaagtgac

SEQ ID NO: 387653 - DNA, 25 bp, Homo sapien
aaacgttggcgttacaggagcaatg

SEQ ID NO: 387654 - DNA, 25 bp, Homo sapien
taactttgcctctctattccgtgcc

SEQ ID NO: 387655 - DNA, 25 bp, Homo sapien
tatgcaaaaaacttcgtgggctgct

SEQ ID NO: 387656 - DNA, 25 bp, Homo sapien
tatcatgcttacagctcagtctctg

SEQ ID NO: 387657 - DNA, 25 bp, Homo sapien
tcccacgggccagtcattgacagct

SEQ ID NO: 387658 - DNA, 25 bp, Homo sapien
tactgttggttaccagtgggtcagc

SEQ ID NO: 387659 - DNA, 25 bp, Homo sapien
tcttctctgatatatgagtcaaggg

SEQ ID NO: 387660 - DNA, 25 bp, Homo sapien
ggtggcgccattaactgtgtcttcc

SEQ ID NO: 387661 - DNA, 25 bp, Homo sapien
tcattgctcatctatctgcctctct

SEQ ID NO: 387662 - DNA, 25 bp, Homo sapien
actgtgtgttgttactcatttgact

SEQ ID NO: 387663 - DNA, 25 bp, Homo sapien
atgtttccaaactgtgtgttgttac

SEQ ID NO: 387664 - DNA, 25 bp, Homo sapien
ttaagtactcttgtcagatatttgt

SEQ ID NO: 387665 - DNA, 25 bp, Homo sapien
gattttaagtactcttgtcagatat

SEQ ID NO: 387666 - DNA, 25 bp, Homo sapien
gaaatgaaagaagcaaccccagaaa

SEQ ID NO: 387667 - DNA, 25 bp, Homo sapien
catagaggcaaacccagcaagtgag

SEQ ID NO: 387668 - DNA, 25 bp, Homo sapien
caatgacaagggtaatttcggattc

SEQ ID NO: 387669 - DNA, 25 bp, Homo sapien
ttgagtggctatagggtataacgcc

SEQ ID NO: 387670 - DNA, 25 bp, Homo sapien
cacctgcaggctacgtgctcctgtg

SEQ ID NO: 387671 - DNA, 25 bp, Homo sapien
agatctggggaactgactcagcagg

SEQ ID NO: 387672 - DNA, 25 bp, Homo sapien
ctgagccggtaggcaggaacacact

SEQ ID NO: 387673 - DNA, 25 bp, Homo sapien
gcccaatctcagctgaagatcccag

SEQ ID NO: 387674 - DNA, 25 bp, Homo sapien
aagaagccaggctcatctagcaaga

SEQ ID NO: 387675 - DNA, 25 bp, Homo sapien
tatgcaacctaaattctggtgggag

SEQ ID NO: 387676 - DNA, 25 bp, Homo sapien
catgaagaagcctactgacgctgct

SEQ ID NO: 387677 - DNA, 25 bp, Homo sapien
tatagaaaacgtgtgcaagagctcc

SEQ ID NO: 387678 - DNA, 25 bp, Homo sapien
agtaattgtcaattaccagaaggtg

SEQ ID NO: 387679 - DNA, 25 bp, Homo sapien
tgtctcctaggatgtaaatgccttg

SEQ ID NO: 387680 - DNA, 25 bp, Homo sapien
gataaatctagaatgcatactgaaa

SEQ ID NO: 387681 - DNA, 25 bp, Homo sapien
agggtatgaaggtttgtcacattga

SEQ ID NO: 387682 - DNA, 25 bp, Homo sapien
ggtacaccagtaacccaagcaggga

SEQ ID NO: 387683 - DNA, 25 bp, Homo sapien
cgttctaggtcagagaggaatccca

SEQ ID NO: 387684 - DNA, 25 bp, Homo sapien
tgcctaaggttatgatgcccaacgt

SEQ ID NO: 387685 - DNA, 25 bp, Homo sapien
catcctgagtggcaaacacaaggcc

SEQ ID NO: 387686 - DNA, 25 bp, Homo sapien
gttgtggccaaacattatgaaatca

SEQ ID NO: 387687 - DNA, 25 bp, Homo sapien
tttccacacagtgttgtggccaaac

SEQ ID NO: 387688 - DNA, 25 bp, Homo sapien
atgaaatcatttactctcagagata

SEQ ID NO: 387689 - DNA, 25 bp, Homo sapien
tgtggccaaacattatgaaatcatt

SEQ ID NO: 387690 - DNA, 25 bp, Homo sapien
agaggaagtaaacagtgagcgctgg

SEQ ID NO: 387691 - DNA, 25 bp, Homo sapien
gaggaagtaaacagtgagcgctgga

SEQ ID NO: 387692 - DNA, 25 bp, Homo sapien
aggaagtaaacagtgagcgctggaa

SEQ ID NO: 387693 - DNA, 25 bp, Homo sapien
ggaagtaaacagtgagcgctggaag

SEQ ID NO: 387694 - DNA, 25 bp, Homo sapien
ggctaccatgggattctgctactgc

SEQ ID NO: 387695 - DNA, 25 bp, Homo sapien
tcactcactccgcaggtcaggtgtc

SEQ ID NO: 387696 - DNA, 25 bp, Homo sapien
caggtcaggtgtcttcttcaaggca

SEQ ID NO: 387697 - DNA, 25 bp, Homo sapien
aaggcaggtagaacgtcctcgctcc

SEQ ID NO: 387698 - DNA, 25 bp, Homo sapien
gaacgctctgctccatgttaacagc

SEQ ID NO: 387699 - DNA, 25 bp, Homo sapien
gactgagtgtaagtccagtactgct

SEQ ID NO: 387700 - DNA, 25 bp, Homo sapien
tggcaatacaacctattcctcaggg

SEQ ID NO: 387701 - DNA, 25 bp, Homo sapien
gacctacctataagaagtgctgggc

SEQ ID NO: 387702 - DNA, 25 bp, Homo sapien
tagagaaatgacaaagatgtttcat

SEQ ID NO: 387703 - DNA, 25 bp, Homo sapien
cttagagaaatgacaaagatgtttc

SEQ ID NO: 387704 - DNA, 25 bp, Homo sapien
ttagagaaatgacaaagatgtttca

SEQ ID NO: 387705 - DNA, 25 bp, Homo sapien
tagccaatggttgtctgggattcca

SEQ ID NO: 387706 - DNA, 25 bp, Homo sapien
taagtccccatgaataaacgcgatg

SEQ ID NO: 387707 - DNA, 25 bp, Homo sapien
tcacaaaagtggcagcgaacagggt

SEQ ID NO: 387708 - DNA, 25 bp, Homo sapien
tgaaatgggctcaccgggttctaag

SEQ ID NO: 387709 - DNA, 25 bp, Homo sapien
ggagagagataccacaggcacaaac

SEQ ID NO: 387710 - DNA, 25 bp, Homo sapien
ccagagagctggcactgaatcaaga

SEQ ID NO: 387711 - DNA, 25 bp, Homo sapien
taagatgttcggctctggcagacag

SEQ ID NO: 387712 - DNA, 25 bp, Homo sapien
ggctcgtctcatccagcacatggta

SEQ ID NO: 387713 - DNA, 25 bp, Homo sapien
gatgtggaaacagcttgcagggtta

SEQ ID NO: 387714 - DNA, 25 bp, Homo sapien
cagtttttgagagtgcgtctacaca

SEQ ID NO: 387715 - DNA, 25 bp, Homo sapien
gcagggttaaacctggatggcgccc

SEQ ID NO: 387716 - DNA, 25 bp, Homo sapien
gctggtttagccacaagatcaaagg

SEQ ID NO: 387717 - DNA, 25 bp, Homo sapien
tctggatgccacagggatacgggac

SEQ ID NO: 387718 - DNA, 25 bp, Homo sapien
ttactaataagctctcggatggtgc

SEQ ID NO: 387719 - DNA, 25 bp, Homo sapien
tagaggaaacaatggcatcagcccc

SEQ ID NO: 387720 - DNA, 25 bp, Homo sapien
gagtcagttttccacacggcttcag

SEQ ID NO: 387721 - DNA, 25 bp, Homo sapien
tgtaatcagcaagcatgactgagac

SEQ ID NO: 387722 - DNA, 25 bp, Homo sapien
ccaccggaccttacaaacatcagca

SEQ ID NO: 387723 - DNA, 25 bp, Homo sapien
tttgtgctaactgtaatcagcaagc

SEQ ID NO: 387724 - DNA, 25 bp, Homo sapien
tttcctgtattgtcaggcagctgaa

SEQ ID NO: 387725 - DNA, 25 bp, Homo sapien
gggtattctttacaggcttgagatt

SEQ ID NO: 387726 - DNA, 25 bp, Homo sapien
ttaaccagtcatagcccatttattt

SEQ ID NO: 387727 - DNA, 25 bp, Homo sapien
gttacctcttggtatgagctttatt

SEQ ID NO: 387728 - DNA, 25 bp, Homo sapien
tcaaaggaatgcagggcactagacc

SEQ ID NO: 387729 - DNA, 25 bp, Homo sapien
ttaaactagttcagttccaggccag

SEQ ID NO: 387730 - DNA, 25 bp, Homo sapien
gaaaaggtgtaaacatgcccgtggc

SEQ ID NO: 387731 - DNA, 25 bp, Homo sapien
taaggaatggagatctaaagcaacc

SEQ ID NO: 387732 - DNA, 25 bp, Homo sapien
tccaggccagggattttagccacat

SEQ ID NO: 387733 - DNA, 25 bp, Homo sapien
gatttgttgacttatacatatattg

SEQ ID NO: 387734 - DNA, 25 bp, Homo sapien
gacactcttaaaaacgagacactct

SEQ ID NO: 387735 - DNA, 25 bp, Homo sapien
gaccagatatttagataaattgaaa

SEQ ID NO: 387736 - DNA, 25 bp, Homo sapien
gagacactcttaaggcactcttaag

SEQ ID NO: 387737 - DNA, 25 bp, Homo sapien
tgccaggcaccatgtgagcactatt

SEQ ID NO: 387738 - DNA, 25 bp, Homo sapien
ttttgggtcaggaatactccactac

SEQ ID NO: 387739 - DNA, 25 bp, Homo sapien
tattgctgaataagacgtggcttgt

SEQ ID NO: 387740 - DNA, 25 bp, Homo sapien
tgtttcaagcagaagaccgaccaga

SEQ ID NO: 387741 - DNA, 25 bp, Homo sapien
ggatgaaaaagggagccaatgcatg

SEQ ID NO: 387742 - DNA, 25 bp, Homo sapien
tttctggacactctgcgttgtgttg

SEQ ID NO: 387743 - DNA, 25 bp, Homo sapien
gggagccaatgcatgactcccaacc

SEQ ID NO: 387744 - DNA, 25 bp, Homo sapien
tgtgttgtaatttccccaggatgaa

SEQ ID NO: 387745 - DNA, 25 bp, Homo sapien
ggttcattcattcatggcatttttt

SEQ ID NO: 387746 - DNA, 25 bp, Homo sapien
acatctggttcattcattcatggca

SEQ ID NO: 387747 - DNA, 25 bp, Homo sapien
attcattcatggcatttttttcacc

SEQ ID NO: 387748 - DNA, 25 bp, Homo sapien
tcatggcatttttttcaccttaaac

SEQ ID NO: 387749 - DNA, 25 bp, Homo sapien
cacgtggagggcgactttgagccca

SEQ ID NO: 387750 - DNA, 25 bp, Homo sapien
tggagactcagacagtgcacgctgc

SEQ ID NO: 387751 - DNA, 25 bp, Homo sapien
catccttctagggtgatgccccagg

SEQ ID NO: 387752 - DNA, 25 bp, Homo sapien
tgcacacaggagtgtcaaagactgg

SEQ ID NO: 387753 - DNA, 25 bp, Homo sapien
ttaagtagcattttggagtccgtcc

SEQ ID NO: 387754 - DNA, 25 bp, Homo sapien
taagactcacttaagaaccatggga

SEQ ID NO: 387755 - DNA, 25 bp, Homo sapien
tggtaagtacacactgccaggagtt

SEQ ID NO: 387756 - DNA, 25 bp, Homo sapien
cacagttagtgtgagatttccgaca

SEQ ID NO: 387757 - DNA, 25 bp, Homo sapien
gagaaaccgcttcatctgatgatga

SEQ ID NO: 387758 - DNA, 25 bp, Homo sapien
aataataaatgatgcgagaaaccgc

SEQ ID NO: 387759 - DNA, 25 bp, Homo sapien
tctggctgccaattcttgccctggg

SEQ ID NO: 387760 - DNA, 25 bp, Homo sapien
aatagaaattgtggtttccggctct

SEQ ID NO: 387761 - DNA, 25 bp, Homo sapien
tagaagtcagctttttctgtccatt

SEQ ID NO: 387762 - DNA, 25 bp, Homo sapien
ctagaagtcagctttttctgtccat

SEQ ID NO: 387763 - DNA, 25 bp, Homo sapien
gagcatcctataagcacctttatca

SEQ ID NO: 387764 - DNA, 25 bp, Homo sapien
atcacaagtcttataaagagaaaag

SEQ ID NO: 387765 - DNA, 25 bp, Homo sapien
cctccactcatgagcatcctataag

SEQ ID NO: 387766 - DNA, 25 bp, Homo sapien
tataagcacctttatcacaagtctt

SEQ ID NO: 387767 - DNA, 25 bp, Homo sapien
tctccttttgggcagtgtccattgc

SEQ ID NO: 387768 - DNA, 25 bp, Homo sapien
tgtcggtgatgagcaagcactgtgc

SEQ ID NO: 387769 - DNA, 25 bp, Homo sapien
gatgggatgactgcgtctctcccgc

SEQ ID NO: 387770 - DNA, 25 bp, Homo sapien
tctctcccgcttgtgtcttacttgg

SEQ ID NO: 387771 - DNA, 25 bp, Homo sapien
gggacagggaatcccagctgcaggg

SEQ ID NO: 387772 - DNA, 25 bp, Homo sapien
ggcagaggggacagggaatcccagc

SEQ ID NO: 387773 - DNA, 25 bp, Homo sapien
agcggcagctcctcccctccatgga

SEQ ID NO: 387774 - DNA, 25 bp, Homo sapien
gcagcggcagctcctcccctccatg

SEQ ID NO: 387775 - DNA, 25 bp, Homo sapien
gatgtccccgacgatgacctaatgg

SEQ ID NO: 387776 - DNA, 25 bp, Homo sapien
catgacaagtcaccagttcagcggc

SEQ ID NO: 387777 - DNA, 25 bp, Homo sapien
gggaattgaactcctccactgcaac

SEQ ID NO: 387778 - DNA, 25 bp, Homo sapien
cacgtgatgactagcatggactcca

SEQ ID NO: 387779 - DNA, 25 bp, Homo sapien
aaggtgccgatgttgtctgggaagc

SEQ ID NO: 387780 - DNA, 25 bp, Homo sapien
ccaagggaaggtgccgatgttgtct

SEQ ID NO: 387781 - DNA, 25 bp, Homo sapien
gggaaggtgccgatgttgtctggga

SEQ ID NO: 387782 - DNA, 25 bp, Homo sapien
cccaagggaaggtgccgatgttgtc

SEQ ID NO: 387783 - DNA, 25 bp, Homo sapien
tcttggtgtcctccggttgggctct

SEQ ID NO: 387784 - DNA, 25 bp, Homo sapien
cccactcaggtctggctcatggagg

SEQ ID NO: 387785 - DNA, 25 bp, Homo sapien
gggctctcatgctcattaccaaggg

SEQ ID NO: 387786 - DNA, 25 bp, Homo sapien
taccaagggcatccaagtcaagttg

SEQ ID NO: 387787 - DNA, 25 bp, Homo sapien
ccaagttaaagcatttgccacaaag

SEQ ID NO: 387788 - DNA, 25 bp, Homo sapien
tggaaaaggtgacccatccatatac

SEQ ID NO: 387789 - DNA, 25 bp, Homo sapien
aggacacttgtttcccttgatggga

SEQ ID NO: 387790 - DNA, 25 bp, Homo sapien
tgatgggaggacgttcccacccttc

SEQ ID NO: 387791 - DNA, 25 bp, Homo sapien
aaatgcccagcagcaataggaccca

SEQ ID NO: 387792 - DNA, 25 bp, Homo sapien
atttatccttgcaaaatgcccagca

SEQ ID NO: 387793 - DNA, 25 bp, Homo sapien
cagcagcaataggacccatgtcctg

SEQ ID NO: 387794 - DNA, 25 bp, Homo sapien
tgcccagcagcaataggacccatgt

SEQ ID NO: 387795 - DNA, 25 bp, Homo sapien
gaccgctgttctggcaagagaggcc

SEQ ID NO: 387796 - DNA, 25 bp, Homo sapien
tcatggctcatgaccgctgttctgg

SEQ ID NO: 387797 - DNA, 25 bp, Homo sapien
caggaggtaactggaagggattcct

SEQ ID NO: 387798 - DNA, 25 bp, Homo sapien
ccggcatccgaaaagcaagaacagg

SEQ ID NO: 387799 - DNA, 25 bp, Homo sapien
gccaccactccgctccgcatttccc

SEQ ID NO: 387800 - DNA, 25 bp, Homo sapien
caccactccgctccgcatttcccaa

SEQ ID NO: 387801 - DNA, 25 bp, Homo sapien
ccaccactccgctccgcatttccca

SEQ ID NO: 387802 - DNA, 25 bp, Homo sapien
ttgccaccactccgctccgcatttc

SEQ ID NO: 387803 - DNA, 25 bp, Homo sapien
agcacactgaactttccgatcagat

SEQ ID NO: 387804 - DNA, 25 bp, Homo sapien
actgaactttccgatcagatccctg

SEQ ID NO: 387805 - DNA, 25 bp, Homo sapien
aactttccgatcagatccctgactg

SEQ ID NO: 387806 - DNA, 25 bp, Homo sapien
gcctctgcctccacgcacacatttt

SEQ ID NO: 387807 - DNA, 25 bp, Homo sapien
tcaaggaatacagcgccgagcatca

SEQ ID NO: 387808 - DNA, 25 bp, Homo sapien
catcttggctcttggggatcttttg

SEQ ID NO: 387809 - DNA, 25 bp, Homo sapien
catcagccgagcctggtcttgctct

SEQ ID NO: 387810 - DNA, 25 bp, Homo sapien
ggcccggcccttgcgagcagccagc

SEQ ID NO: 387811 - DNA, 25 bp, Homo sapien
gaggagaggacttcagaactgacca

SEQ ID NO: 387812 - DNA, 25 bp, Homo sapien
catgaaagggtcagcatccacagct

SEQ ID NO: 387813 - DNA, 25 bp, Homo sapien
acctgtccccatgcccatgaaaggg

SEQ ID NO: 387814 - DNA, 25 bp, Homo sapien
accttcaagtctcctgctggcggga

SEQ ID NO: 387815 - DNA, 25 bp, Homo sapien
gatactgcaacaaggtaccatgggc

SEQ ID NO: 387816 - DNA, 25 bp, Homo sapien
cagacacacctgagatagggcccag

SEQ ID NO: 387817 - DNA, 25 bp, Homo sapien
gaattagcagaagccataagtggtc

SEQ ID NO: 387818 - DNA, 25 bp, Homo sapien
tgtaatatagaacgtgcacactacc

SEQ ID NO: 387819 - DNA, 25 bp, Homo sapien
caaaccctggttcaccaagggatgg

SEQ ID NO: 387820 - DNA, 25 bp, Homo sapien
tgctgttggatccaaactcctagtc

SEQ ID NO: 387821 - DNA, 25 bp, Homo sapien
gagactgcaaggtttggacttcaaa

SEQ ID NO: 387822 - DNA, 25 bp, Homo sapien
ggatggaatgagtgttcctcagcca

SEQ ID NO: 387823 - DNA, 25 bp, Homo sapien
cagaagcccggttgttggtagttat

SEQ ID NO: 387824 - DNA, 25 bp, Homo sapien
aacacaggatacgtgctgcaggtgc

SEQ ID NO: 387825 - DNA, 25 bp, Homo sapien
gactccaggccgctttgatggagaa

SEQ ID NO: 387826 - DNA, 25 bp, Homo sapien
gcaggtgctcttctggacggagtcc

SEQ ID NO: 387827 - DNA, 25 bp, Homo sapien
ttactactaaagacctggcggaggc

SEQ ID NO: 387828 - DNA, 25 bp, Homo sapien
tctgtggactgaccttgtaaaagac

SEQ ID NO: 387829 - DNA, 25 bp, Homo sapien
ccatcgccacaaactctatcggaga

SEQ ID NO: 387830 - DNA, 25 bp, Homo sapien
tttagagtagagtttggaatcccac

SEQ ID NO: 387831 - DNA, 25 bp, Homo sapien
gcattttcaccacccggtgtccttg

SEQ ID NO: 387832 - DNA, 25 bp, Homo sapien
gcgctgcattttcaccacccggtgt

SEQ ID NO: 387833 - DNA, 25 bp, Homo sapien
ctgcggttccctctctggaatgctc

SEQ ID NO: 387834 - DNA, 25 bp, Homo sapien
gctgcattttcaccacccggtgtcc

SEQ ID NO: 387835 - DNA, 25 bp, Homo sapien
tcaggcagtatgaaagggataattc

SEQ ID NO: 387836 - DNA, 25 bp, Homo sapien
taagaaaaactcgaaggctaggatg

SEQ ID NO: 387837 - DNA, 25 bp, Homo sapien
gaaaaactcgaaggctaggatgtgc

SEQ ID NO: 387838 - DNA, 25 bp, Homo sapien
gcacataagaaaaactcgaaggcta

SEQ ID NO: 387839 - DNA, 25 bp, Homo sapien
tagaaacacaaatgtcccaggtgcc

SEQ ID NO: 387840 - DNA, 25 bp, Homo sapien
agggatggagagttcgggccacccg

SEQ ID NO: 387841 - DNA, 25 bp, Homo sapien
atggagagttcgggccacccgcact

SEQ ID NO: 387842 - DNA, 25 bp, Homo sapien
gggccacccgcactgaagtctcatt

SEQ ID NO: 387843 - DNA, 25 bp, Homo sapien
gagttcgggccacccgcactgaagt

SEQ ID NO: 387844 - DNA, 25 bp, Homo sapien
gaacgtctttcctgcattgagaggg

SEQ ID NO: 387845 - DNA, 25 bp, Homo sapien
gaaagttggccatttgaccacaggc

SEQ ID NO: 387846 - DNA, 25 bp, Homo sapien
gagggatagcaaggttctctccacg

SEQ ID NO: 387847 - DNA, 25 bp, Homo sapien
catttacggatgaccactgagtttc

SEQ ID NO: 387848 - DNA, 25 bp, Homo sapien
cctgcatagtactcattaagagaag

SEQ ID NO: 387849 - DNA, 25 bp, Homo sapien
tagtactcattaagagaaggcaggc

SEQ ID NO: 387850 - DNA, 25 bp, Homo sapien
catagtactcattaagagaaggcag

SEQ ID NO: 387851 - DNA, 25 bp, Homo sapien
ttttcctgcatagtactcattaaga

SEQ ID NO: 387852 - DNA, 25 bp, Homo sapien
catgttgaacctggtgtgacacacc

SEQ ID NO: 387853 - DNA, 25 bp, Homo sapien
cattttagacgaggagcttgaagac

SEQ ID NO: 387854 - DNA, 25 bp, Homo sapien
ggtcttgcggcttcttcttaaagtg

SEQ ID NO: 387855 - DNA, 25 bp, Homo sapien
gcatcctggcacgtgcatgttgaac

SEQ ID NO: 387856 - DNA, 25 bp, Homo sapien
catgagttggatgtgcacatgacct

SEQ ID NO: 387857 - DNA, 25 bp, Homo sapien
tcccagaatgggtaacaggctacag

SEQ ID NO: 387858 - DNA, 25 bp, Homo sapien
cccagaatgggtaacaggctacagc

SEQ ID NO: 387859 - DNA, 25 bp, Homo sapien
tcaatcattggttgatgaccagtga

SEQ ID NO: 387860 - DNA, 25 bp, Homo sapien
tgtggactaagaggagttttcacct

SEQ ID NO: 387861 - DNA, 25 bp, Homo sapien
cttcaatcattggttgatgaccagt

SEQ ID NO: 387862 - DNA, 25 bp, Homo sapien
caatcattggttgatgaccagtgaa

SEQ ID NO: 387863 - DNA, 25 bp, Homo sapien
gccagaggggactttagaatgttca

SEQ ID NO: 387864 - DNA, 25 bp, Homo sapien
gaggtatatggtgaaggctcccctg

SEQ ID NO: 387865 - DNA, 25 bp, Homo sapien
gtcacatgggttttagcatcatcaa

SEQ ID NO: 387866 - DNA, 25 bp, Homo sapien
aactgtggtgaatggagcatccaga

SEQ ID NO: 387867 - DNA, 25 bp, Homo sapien
catgttccttatcgtagagtgtagc

SEQ ID NO: 387868 - DNA, 25 bp, Homo sapien
gagaaacttagtagctgagacacgt

SEQ ID NO: 387869 - DNA, 25 bp, Homo sapien
gctgagacacgtttcttccccttct

SEQ ID NO: 387870 - DNA, 25 bp, Homo sapien
tgctttgagcgtcatggaaaagaga

SEQ ID NO: 387871 - DNA, 25 bp, Homo sapien
caaacgacaagactgcaggtctgag

SEQ ID NO: 387872 - DNA, 25 bp, Homo sapien
agggcagacaaacgacaagactgca

SEQ ID NO: 387873 - DNA, 25 bp, Homo sapien
gcccagcatgcaccaagacagggca

SEQ ID NO: 387874 - DNA, 25 bp, Homo sapien
ataaaaaagtcaggcccagcatgca

SEQ ID NO: 387875 - DNA, 25 bp, Homo sapien
agccgaggagccaagctcaagggcc

SEQ ID NO: 387876 - DNA, 25 bp, Homo sapien
aggagccaagctcaagggccgagat

SEQ ID NO: 387877 - DNA, 25 bp, Homo sapien
ccgagatgggctgcaaaactcattt

SEQ ID NO: 387878 - DNA, 25 bp, Homo sapien
ggccgagatgggctgcaaaactcat

SEQ ID NO: 387879 - DNA, 25 bp, Homo sapien
tcccggaagttctgccccgcagtgc

SEQ ID NO: 387880 - DNA, 25 bp, Homo sapien
ggcagcggactggtcttgcaggtcc

SEQ ID NO: 387881 - DNA, 25 bp, Homo sapien
tatttgtagacggttttatgctgtg

SEQ ID NO: 387882 - DNA, 25 bp, Homo sapien
agtatgtatttgtagacggttttat

SEQ ID NO: 387883 - DNA, 25 bp, Homo sapien
tagacggttttatgctgtgaaaatg

SEQ ID NO: 387884 - DNA, 25 bp, Homo sapien
gaaaacttgctacacctcagaacta

SEQ ID NO: 387885 - DNA, 25 bp, Homo sapien
gggctgcacgcaatgaacttccagt

SEQ ID NO: 387886 - DNA, 25 bp, Homo sapien
ctggaggggctgcacgcaatgaact

SEQ ID NO: 387887 - DNA, 25 bp, Homo sapien
aggggctgcacgcaatgaacttcca

SEQ ID NO: 387888 - DNA, 25 bp, Homo sapien
tgcacgcaatgaacttccagtctcc

SEQ ID NO: 387889 - DNA, 25 bp, Homo sapien
ggggtgggaggacagttctctccag

SEQ ID NO: 387890 - DNA, 25 bp, Homo sapien
ggtgggaggacagttctctccaggg

SEQ ID NO: 387891 - DNA, 25 bp, Homo sapien
tgagcctttggtgcagcacctctgc

SEQ ID NO: 387892 - DNA, 25 bp, Homo sapien
gtgggaggacagttctctccagggc

SEQ ID NO: 387893 - DNA, 25 bp, Homo sapien
tttgattgtaatcgggcacagtcct

SEQ ID NO: 387894 - DNA, 25 bp, Homo sapien
gcatcttggtcatgggttgctacta

SEQ ID NO: 387895 - DNA, 25 bp, Homo sapien
tttctgtcaggtgcgaaaagcttgg

SEQ ID NO: 387896 - DNA, 25 bp, Homo sapien
cctaaggaagggtccatctgctttg

SEQ ID NO: 387897 - DNA, 25 bp, Homo sapien
tcatttaattcctgtgaaacgtcag

SEQ ID NO: 387898 - DNA, 25 bp, Homo sapien
tctgtttgctgctgccacacggagc

SEQ ID NO: 387899 - DNA, 25 bp, Homo sapien
gcacctgtgatgcagcaacttcatt

SEQ ID NO: 387900 - DNA, 25 bp, Homo sapien
taaggactacacctaagcagcgagg

SEQ ID NO: 387901 - DNA, 25 bp, Homo sapien
tgttggtgcacatctgcagaaagag

SEQ ID NO: 387902 - DNA, 25 bp, Homo sapien
cagaaagaggccgtttacgtggaat

SEQ ID NO: 387903 - DNA, 25 bp, Homo sapien
cgtttacgtggaatttcaaatctgg

SEQ ID NO: 387904 - DNA, 25 bp, Homo sapien
ggtgcacatctgcagaaagaggccg

SEQ ID NO: 387905 - DNA, 25 bp, Homo sapien
gcttggacagtagtcctctcttatc

SEQ ID NO: 387906 - DNA, 25 bp, Homo sapien
cttatccgcgattccactttccatg

SEQ ID NO: 387907 - DNA, 25 bp, Homo sapien
gttccttggcttggacagtagtcct

SEQ ID NO: 387908 - DNA, 25 bp, Homo sapien
tattctgttatagcttgggagtcca

SEQ ID NO: 387909 - DNA, 25 bp, Homo sapien
aattattcacgagcacctgatctgc

SEQ ID NO: 387910 - DNA, 25 bp, Homo sapien
ttggcctacgccaggcaaaagtcag

SEQ ID NO: 387911 - DNA, 25 bp, Homo sapien
ttgcaatcgctatccacctggaagg

SEQ ID NO: 387912 - DNA, 25 bp, Homo sapien
cattggagattgcttaaaacagggc

SEQ ID NO: 387913 - DNA, 25 bp, Homo sapien
gagcagttttccatattgctaagtg

SEQ ID NO: 387914 - DNA, 25 bp, Homo sapien
tattgctaagtgttcatctacgaca

SEQ ID NO: 387915 - DNA, 25 bp, Homo sapien
cagagcagttttccatattgctaag

SEQ ID NO: 387916 - DNA, 25 bp, Homo sapien
tcatctacgacatcattttcctgca

SEQ ID NO: 387917 - DNA, 25 bp, Homo sapien
attcataaagggatcgagtccccat

SEQ ID NO: 387918 - DNA, 25 bp, Homo sapien
tgtattaccaccgttccaatactgt

SEQ ID NO: 387919 - DNA, 25 bp, Homo sapien
gatcgagtccccataatattccttg

SEQ ID NO: 387920 - DNA, 25 bp, Homo sapien
tgccaactagttgacatctccacac

SEQ ID NO: 387921 - DNA, 25 bp, Homo sapien
tctggaaaaggatctactggtgtct

SEQ ID NO: 387922 - DNA, 25 bp, Homo sapien
gaatttgatgcaactcacatttggg

SEQ ID NO: 387923 - DNA, 25 bp, Homo sapien
gcaggcactagcactgacgtcagta

SEQ ID NO: 387924 - DNA, 25 bp, Homo sapien
gacgtcagtattgtgtacagagaaa

SEQ ID NO: 387925 - DNA, 25 bp, Homo sapien
tggactcttcccttcggagaaatat

SEQ ID NO: 387926 - DNA, 25 bp, Homo sapien
gggatgaagccaaggtccctgttat

SEQ ID NO: 387927 - DNA, 25 bp, Homo sapien
taaatgacgcatcggggtcaccgag

SEQ ID NO: 387928 - DNA, 25 bp, Homo sapien
ctgcaaagttactggttgattgaaa

SEQ ID NO: 387929 - DNA, 25 bp, Homo sapien
tgtcataattggagtctgcgaggtg

SEQ ID NO: 387930 - DNA, 25 bp, Homo sapien
gacagtctgtcatgcacacagtgca

SEQ ID NO: 387931 - DNA, 25 bp, Homo sapien
taaactcctgtgatggtgactcgtg

SEQ ID NO: 387932 - DNA, 25 bp, Homo sapien
gttgcacctttagggacagttggcc

SEQ ID NO: 387933 - DNA, 25 bp, Homo sapien
gactgtgggcaagagacgtaacttc

SEQ ID NO: 387934 - DNA, 25 bp, Homo sapien
tgtagtagccgcactttgagatgct

SEQ ID NO: 387935 - DNA, 25 bp, Homo sapien
ggttttgtgataactggaccagggc

SEQ ID NO: 387936 - DNA, 25 bp, Homo sapien
cacattttttggaggtggcgtcaca

SEQ ID NO: 387937 - DNA, 25 bp, Homo sapien
cttactcgcgagtgaattggatttc

SEQ ID NO: 387938 - DNA, 25 bp, Homo sapien
cctttctggccttctgaattttgcc

SEQ ID NO: 387939 - DNA, 25 bp, Homo sapien
gatccttgctatttgtctccttgcc

SEQ ID NO: 387940 - DNA, 25 bp, Homo sapien
tctctgtcctcggatccttgctatt

SEQ ID NO: 387941 - DNA, 25 bp, Homo sapien
ttcacaggagataaggcttgtggca

SEQ ID NO: 387942 - DNA, 25 bp, Homo sapien
cacaggagataaggcttgtggcatc

SEQ ID NO: 387943 - DNA, 25 bp, Homo sapien
gcttgtggcatccaattcagtttcc

SEQ ID NO: 387944 - DNA, 25 bp, Homo sapien
acaggagataaggcttgtggcatcc

SEQ ID NO: 387945 - DNA, 25 bp, Homo sapien
gaagtagtgaagtgttccccagaca

SEQ ID NO: 387946 - DNA, 25 bp, Homo sapien
tttggaacggtgttcagcatgtgtg

SEQ ID NO: 387947 - DNA, 25 bp, Homo sapien
gcacccctcagggtcgccatgctgg

SEQ ID NO: 387948 - DNA, 25 bp, Homo sapien
gccagattccaatgcggtgctcagt

SEQ ID NO: 387949 - DNA, 25 bp, Homo sapien
ttcccaagaagtgaactgaagcact

SEQ ID NO: 387950 - DNA, 25 bp, Homo sapien
ggctgccgctctggaagtaacgcta

SEQ ID NO: 387951 - DNA, 25 bp, Homo sapien
tcagaagtagcagcgttctgtgcga

SEQ ID NO: 387952 - DNA, 25 bp, Homo sapien
gacggaagagtctaaaacagtttca

SEQ ID NO: 387953 - DNA, 25 bp, Homo sapien
gaagggtgtccaggctcaattcagc

SEQ ID NO: 387954 - DNA, 25 bp, Homo sapien
taatcactagatactgctccgtaag

SEQ ID NO: 387955 - DNA, 25 bp, Homo sapien
gaagttggaccctccatcgacacgt

SEQ ID NO: 387956 - DNA, 25 bp, Homo sapien
ctgtagcaggcgagtacagatgcct

SEQ ID NO: 387957 - DNA, 25 bp, Homo sapien
tgcaggtgtgattcccgtgaagact

SEQ ID NO: 387958 - DNA, 25 bp, Homo sapien
catcacagtcctgtccgtaggctgt

SEQ ID NO: 387959 - DNA, 25 bp, Homo sapien
gattcccgtgaagactctgtgtcat

SEQ ID NO: 387960 - DNA, 25 bp, Homo sapien
gaagactctgtgtcatcacagtcct

SEQ ID NO: 387961 - DNA, 25 bp, Homo sapien
gacttgagttttccacagaagtggc

SEQ ID NO: 387962 - DNA, 25 bp, Homo sapien
tgagaaggacttgagttttccacag

SEQ ID NO: 387963 - DNA, 25 bp, Homo sapien
aggacttgagttttccacagaagtg

SEQ ID NO: 387964 - DNA, 25 bp, Homo sapien
ttatctgagaaggacttgagttttc

SEQ ID NO: 387965 - DNA, 25 bp, Homo sapien
ctgtatgaaacagatctgtttccca

SEQ ID NO: 387966 - DNA, 25 bp, Homo sapien
tatctgtatgaaacagatctgtttc

SEQ ID NO: 387967 - DNA, 25 bp, Homo sapien
tctgtatgaaacagatctgtttccc

SEQ ID NO: 387968 - DNA, 25 bp, Homo sapien
tcatatctgtatgaaacagatctgt

SEQ ID NO: 387969 - DNA, 25 bp, Homo sapien
tgtgaattgctgaacatcgtttgga

SEQ ID NO: 387970 - DNA, 25 bp, Homo sapien
tagatacaggccaactcttgcactg

SEQ ID NO: 387971 - DNA, 25 bp, Homo sapien
ttgcactgacacctttgtgaattgc

SEQ ID NO: 387972 - DNA, 25 bp, Homo sapien
tgaacatcgtttggaggttttacaa

SEQ ID NO: 387973 - DNA, 25 bp, Homo sapien
ctttttggatcctttgtggcttctc

SEQ ID NO: 387974 - DNA, 25 bp, Homo sapien
tttttggatcctttgtggcttctca

SEQ ID NO: 387975 - DNA, 25 bp, Homo sapien
ttttggatcctttgtggcttctcag

SEQ ID NO: 387976 - DNA, 25 bp, Homo sapien
gcggctggtagtgtgcctttctctg

SEQ ID NO: 387977 - DNA, 25 bp, Homo sapien
cttctcttcgtggacttcgtgacat

SEQ ID NO: 387978 - DNA, 25 bp, Homo sapien
gcttctcttcgtggacttcgtgaca

SEQ ID NO: 387979 - DNA, 25 bp, Homo sapien
aacctgactgaatactgaatcccag

SEQ ID NO: 387980 - DNA, 25 bp, Homo sapien
ttcctgatgatctggtgccttcttc

SEQ ID NO: 387981 - DNA, 25 bp, Homo sapien
tctacctccccatacagaacacaga

SEQ ID NO: 387982 - DNA, 25 bp, Homo sapien
cagatttcctgatgatctggtgcct

SEQ ID NO: 387983 - DNA, 25 bp, Homo sapien
gctgtgttcaccataactgtgggga

SEQ ID NO: 387984 - DNA, 25 bp, Homo sapien
ggcagaacacccaagcaaaattatg

SEQ ID NO: 387985 - DNA, 25 bp, Homo sapien
gtggctatacatggaaaaagcaggc

SEQ ID NO: 387986 - DNA, 25 bp, Homo sapien
ggaagggcagccagttacgtctgct

SEQ ID NO: 387987 - DNA, 25 bp, Homo sapien
tttctgtcccatatggccccgtcca

SEQ ID NO: 387988 - DNA, 25 bp, Homo sapien
tgagtgctcagttcatacttgttaa

SEQ ID NO: 387989 - DNA, 25 bp, Homo sapien
catatggccccgtccacagctctgt

SEQ ID NO: 387990 - DNA, 25 bp, Homo sapien
gtgctcagttcatacttgttaaagg

SEQ ID NO: 387991 - DNA, 25 bp, Homo sapien
cctcatcgtccaaccaatgtgcctg

SEQ ID NO: 387992 - DNA, 25 bp, Homo sapien
atcgtccaaccaatgtgcctgccat

SEQ ID NO: 387993 - DNA, 25 bp, Homo sapien
tcatcgtccaaccaatgtgcctgcc

SEQ ID NO: 387994 - DNA, 25 bp, Homo sapien
tcgtccaaccaatgtgcctgccatt

SEQ ID NO: 387995 - DNA, 25 bp, Homo sapien
tacctgtgatcttcacatgcctcag

SEQ ID NO: 387996 - DNA, 25 bp, Homo sapien
ctgtgatcttcacatgcctcagttt

SEQ ID NO: 387997 - DNA, 25 bp, Homo sapien
cctgtgatcttcacatgcctcagtt

SEQ ID NO: 387998 - DNA, 25 bp, Homo sapien
cctacctgtgatcttcacatgcctc

SEQ ID NO: 387999 - DNA, 25 bp, Homo sapien
gcggaagggctcttgcagtgacatt

SEQ ID NO: 388000 - DNA, 25 bp, Homo sapien
tgatggtacccttcccctagcttca

SEQ ID NO: 388001 - DNA, 25 bp, Homo sapien
tgccccttgttcatggaatgcatgg

SEQ ID NO: 388002 - DNA, 25 bp, Homo sapien
gcaaaggtctaaaagctgccccttg

SEQ ID NO: 388003 - DNA, 25 bp, Homo sapien
tcataatttggtgtcggattcccct

SEQ ID NO: 388004 - DNA, 25 bp, Homo sapien
acaggacaacaagggctattaatgg

SEQ ID NO: 388005 - DNA, 25 bp, Homo sapien
aagacaggacaacaagggctattaa

SEQ ID NO: 388006 - DNA, 25 bp, Homo sapien
ttggccatgcatcataatttggtgt

SEQ ID NO: 388007 - DNA, 25 bp, Homo sapien
agtgatccccttgacatctgtcagt

SEQ ID NO: 388008 - DNA, 25 bp, Homo sapien
tcagtcccggcaataaaagctggtg

SEQ ID NO: 388009 - DNA, 25 bp, Homo sapien
aaaagctggtgaactctgtgtccac

SEQ ID NO: 388010 - DNA, 25 bp, Homo sapien
ctgtgtccactggtggaggtgataa

SEQ ID NO: 388011 - DNA, 25 bp, Homo sapien
cgttgtaggtattttgggcccacag

SEQ ID NO: 388012 - DNA, 25 bp, Homo sapien
cacagtgtacaactgagccttcagt

SEQ ID NO: 388013 - DNA, 25 bp, Homo sapien
ttttgggcccacagtgtacaactga

SEQ ID NO: 388014 - DNA, 25 bp, Homo sapien
gagccttcagttgggattcagtggg

SEQ ID NO: 388015 - DNA, 25 bp, Homo sapien
ttcattaacaaaggacttgctctgg

SEQ ID NO: 388016 - DNA, 25 bp, Homo sapien
ttcatgtggcagaggtgtctttagg

SEQ ID NO: 388017 - DNA, 25 bp, Homo sapien
gctgcgtttcgggtctcttcatgtg

SEQ ID NO: 388018 - DNA, 25 bp, Homo sapien
acttgctctggatgtaagctgcgtt

SEQ ID NO: 388019 - DNA, 25 bp, Homo sapien
ggccgacatttgctgcagtcttggg

SEQ ID NO: 388020 - DNA, 25 bp, Homo sapien
caggacgtcgctggatcttcaggac

SEQ ID NO: 388021 - DNA, 25 bp, Homo sapien
gaactggaacgcgtcacattcagga

SEQ ID NO: 388022 - DNA, 25 bp, Homo sapien
gtgtgtttttcacttggccgacatt

SEQ ID NO: 388023 - DNA, 25 bp, Homo sapien
tccccattcccattgtcaagtgggc

SEQ ID NO: 388024 - DNA, 25 bp, Homo sapien
cccattcccattgtcaagtgggcaa

SEQ ID NO: 388025 - DNA, 25 bp, Homo sapien
ccccattcccattgtcaagtgggca

SEQ ID NO: 388026 - DNA, 25 bp, Homo sapien
ccattcccattgtcaagtgggcaaa

SEQ ID NO: 388027 - DNA, 25 bp, Homo sapien
tttacctggagatccgagagagcct

SEQ ID NO: 388028 - DNA, 25 bp, Homo sapien
gagcagctgcgtgtgtttacctgga

SEQ ID NO: 388029 - DNA, 25 bp, Homo sapien
ctgaccatctgggtaggactcaggc

SEQ ID NO: 388030 - DNA, 25 bp, Homo sapien
gtaacttcgcaccttgtgtactcag

SEQ ID NO: 388031 - DNA, 25 bp, Homo sapien
tacgtttacacgtggagcatgagaa

SEQ ID NO: 388032 - DNA, 25 bp, Homo sapien
tctccactgacttggcccggaaagc

SEQ ID NO: 388033 - DNA, 25 bp, Homo sapien
aagagacctgggacccattccctcg

SEQ ID NO: 388034 - DNA, 25 bp, Homo sapien
tttcctagctgtgagccggccttca

SEQ ID NO: 388035 - DNA, 25 bp, Homo sapien
gagggagccaccaggttccagacag

SEQ ID NO: 388036 - DNA, 25 bp, Homo sapien
cgtgcttcctgacttgagccacaaa

SEQ ID NO: 388037 - DNA, 25 bp, Homo sapien
tcagggctgacgtgcttcctgactt

SEQ ID NO: 388038 - DNA, 25 bp, Homo sapien
ctgtgggattcggtttgcaggtctc

SEQ ID NO: 388039 - DNA, 25 bp, Homo sapien
tgtgggattcggtttgcaggtctca

SEQ ID NO: 388040 - DNA, 25 bp, Homo sapien
aactgggtttccaaagtcaagcaca

SEQ ID NO: 388041 - DNA, 25 bp, Homo sapien
actgggtttccaaagtcaagcacac

SEQ ID NO: 388042 - DNA, 25 bp, Homo sapien
taaactgggtttccaaagtcaagca

SEQ ID NO: 388043 - DNA, 25 bp, Homo sapien
atcttcgttttctctgatatgccca

SEQ ID NO: 388044 - DNA, 25 bp, Homo sapien
cgttttctctgatatgcccaatgca

SEQ ID NO: 388045 - DNA, 25 bp, Homo sapien
ttcgttttctctgatatgcccaatg

SEQ ID NO: 388046 - DNA, 25 bp, Homo sapien
gttttctctgatatgcccaatgcat

SEQ ID NO: 388047 - DNA, 25 bp, Homo sapien
ccttgcacatttgtgaaggtgaact

SEQ ID NO: 388048 - DNA, 25 bp, Homo sapien
gatcagtgggtgtaacagtgttgca

SEQ ID NO: 388049 - DNA, 25 bp, Homo sapien
tgttctgagtttgaggcagccagac

SEQ ID NO: 388050 - DNA, 25 bp, Homo sapien
tgttgcaaggatgttctgagtttga

SEQ ID NO: 388051 - DNA, 25 bp, Homo sapien
cactttgatgcaatgagtaagggaa

SEQ ID NO: 388052 - DNA, 25 bp, Homo sapien
gccattcttgctgcgaaggcacagg

SEQ ID NO: 388053 - DNA, 25 bp, Homo sapien
tgaagtaaaacaccaaagccactgt

SEQ ID NO: 388054 - DNA, 25 bp, Homo sapien
aaaagagtaggcataaaagtgggtg

SEQ ID NO: 388055 - DNA, 25 bp, Homo sapien
tgttggttgtcgtccttgtttagaa

SEQ ID NO: 388056 - DNA, 25 bp, Homo sapien
actgggacaccagggaatgatgttc

SEQ ID NO: 388057 - DNA, 25 bp, Homo sapien
ggagattcaaagtaagcaaggactg

SEQ ID NO: 388058 - DNA, 25 bp, Homo sapien
ttctgttggttgtcgtccttgttta

SEQ ID NO: 388059 - DNA, 25 bp, Homo sapien
aggacggcactggtcaggacaacat

SEQ ID NO: 388060 - DNA, 25 bp, Homo sapien
caaggatcaggacggcactggtcag

SEQ ID NO: 388061 - DNA, 25 bp, Homo sapien
ctccagcaaggatcaggacggcact

SEQ ID NO: 388062 - DNA, 25 bp, Homo sapien
gtaagctctgtgattgtgagtaaaa

SEQ ID NO: 388063 - DNA, 25 bp, Homo sapien
tcggtgatgccaaaacagccgtttc

SEQ ID NO: 388064 - DNA, 25 bp, Homo sapien
tgatgccaaaacagccgtttcccat

SEQ ID NO: 388065 - DNA, 25 bp, Homo sapien
cagccctcggtgatgccaaaacagc

SEQ ID NO: 388066 - DNA, 25 bp, Homo sapien
cctcggtgatgccaaaacagccgtt

SEQ ID NO: 388067 - DNA, 25 bp, Homo sapien
gcagtttgccacatcatcaagggag

SEQ ID NO: 388068 - DNA, 25 bp, Homo sapien
ggtaaccagaacgtttgactggcca

SEQ ID NO: 388069 - DNA, 25 bp, Homo sapien
tttgactggccatgtggctcgcagg

SEQ ID NO: 388070 - DNA, 25 bp, Homo sapien
tgtgcttggtccttgcagtttgcca

SEQ ID NO: 388071 - DNA, 25 bp, Homo sapien
gtctctggtgtgtagcgatgcttca

SEQ ID NO: 388072 - DNA, 25 bp, Homo sapien
gactttatcttgtgtactgcaggct

SEQ ID NO: 388073 - DNA, 25 bp, Homo sapien
gctccccagctttcaaacgtaggca

SEQ ID NO: 388074 - DNA, 25 bp, Homo sapien
cttcattgtagggtcacgtaaggac

SEQ ID NO: 388075 - DNA, 25 bp, Homo sapien
gcatgcttgctatcacacaggtcct

SEQ ID NO: 388076 - DNA, 25 bp, Homo sapien
aatacactgggtttgctgtagggcc

SEQ ID NO: 388077 - DNA, 25 bp, Homo sapien
tctagactgtatggcaatggaggag

SEQ ID NO: 388078 - DNA, 25 bp, Homo sapien
gagacagcctcgtgcaatacactgg

SEQ ID NO: 388079 - DNA, 25 bp, Homo sapien
aaggggtgaatgcttgtgtcatgaa

SEQ ID NO: 388080 - DNA, 25 bp, Homo sapien
ggggtgaatgcttgtgtcatgaaat

SEQ ID NO: 388081 - DNA, 25 bp, Homo sapien
aggggtgaatgcttgtgtcatgaaa

SEQ ID NO: 388082 - DNA, 25 bp, Homo sapien
aaaggggtgaatgcttgtgtcatga

SEQ ID NO: 388083 - DNA, 25 bp, Homo sapien
gaatgccgtgcaatctggaaagtgg

SEQ ID NO: 388084 - DNA, 25 bp, Homo sapien
tgtgcatgccgtggaatctagaatc

SEQ ID NO: 388085 - DNA, 25 bp, Homo sapien
catcgtggaatctagaaagtgggcg

SEQ ID NO: 388086 - DNA, 25 bp, Homo sapien
aatctaggcggtgaatgcgaatgcc

SEQ ID NO: 388087 - DNA, 25 bp, Homo sapien
agtcagatttgactcaaggtgagaa

SEQ ID NO: 388088 - DNA, 25 bp, Homo sapien
gatttgactcaaggtgagaagatac

SEQ ID NO: 388089 - DNA, 25 bp, Homo sapien
tcagatttgactcaaggtgagaaga

SEQ ID NO: 388090 - DNA, 25 bp, Homo sapien
tttgactcaaggtgagaagatacag

SEQ ID NO: 388091 - DNA, 25 bp, Homo sapien
cagtgtcctttcatgggtcctgtca

SEQ ID NO: 388092 - DNA, 25 bp, Homo sapien
tccagccagaaacccctttgtaata

SEQ ID NO: 388093 - DNA, 25 bp, Homo sapien
tctcgatggcccaatgacatgggac

SEQ ID NO: 388094 - DNA, 25 bp, Homo sapien
ttgatgtctcgatggcccaatgaca

SEQ ID NO: 388095 - DNA, 25 bp, Homo sapien
cagtgtgtaaggttacttgggcttt

SEQ ID NO: 388096 - DNA, 25 bp, Homo sapien
cccagtgtgtaaggttacttgggct

SEQ ID NO: 388097 - DNA, 25 bp, Homo sapien
caggagtatggcaaaggagttcttt

SEQ ID NO: 388098 - DNA, 25 bp, Homo sapien
gagcaggagtatggcaaaggagttc

SEQ ID NO: 388099 - DNA, 25 bp, Homo sapien
gaggcgcgtgcagtcgggtgcggat

SEQ ID NO: 388100 - DNA, 25 bp, Homo sapien
caccccgaaattgacaagggccagg

SEQ ID NO: 388101 - DNA, 25 bp, Homo sapien
gggagggacggctcgccagtgcggg

SEQ ID NO: 388102 - DNA, 25 bp, Homo sapien
ctcttccgacggcgccgggacaggt

SEQ ID NO: 388103 - DNA, 25 bp, Homo sapien
cgacggcggcgctaacctctcggta

SEQ ID NO: 388104 - DNA, 25 bp, Homo sapien
tgcccggctcccacgctggctacag

SEQ ID NO: 388105 - DNA, 25 bp, Homo sapien
ggcgctaacctctcggtaagtccag

SEQ ID NO: 388106 - DNA, 25 bp, Homo sapien
gctaacctctcggtaagtccagcgc

SEQ ID NO: 388107 - DNA, 25 bp, Homo sapien
cgcgcacggccaaggcacgcgcgct

SEQ ID NO: 388108 - DNA, 25 bp, Homo sapien
gaacccggcgcccacaccatgggct

SEQ ID NO: 388109 - DNA, 25 bp, Homo sapien
gagttagtgcgacccggctcggcgc

SEQ ID NO: 388110 - DNA, 25 bp, Homo sapien
accatgggctgagcccgtcggcgcc

SEQ ID NO: 388111 - DNA, 25 bp, Homo sapien
cctgcccacatccaaccctgagcct

SEQ ID NO: 388112 - DNA, 25 bp, Homo sapien
gctaagggctttgcttcatggagca

SEQ ID NO: 388113 - DNA, 25 bp, Homo sapien
tttggaatgtctgggagctaagggc

SEQ ID NO: 388114 - DNA, 25 bp, Homo sapien
ccagacttgggggtctccgtgtgtt

SEQ ID NO: 388115 - DNA, 25 bp, Homo sapien
gcaaacatagacaacaaaaagccca

SEQ ID NO: 388116 - DNA, 25 bp, Homo sapien
gggcaaacatagacaacaaaaagcc

SEQ ID NO: 388117 - DNA, 25 bp, Homo sapien
caaacatagacaacaaaaagcccat

SEQ ID NO: 388118 - DNA, 25 bp, Homo sapien
ctgggcaaacatagacaacaaaaag

SEQ ID NO: 388119 - DNA, 25 bp, Homo sapien
ctggatcaggtccacgggcgccttc

SEQ ID NO: 388120 - DNA, 25 bp, Homo sapien
cagtttggttctgcaccaatgctgg

SEQ ID NO: 388121 - DNA, 25 bp, Homo sapien
tttggttctgcaccaatgctggaag

SEQ ID NO: 388122 - DNA, 25 bp, Homo sapien
gccagtttggttctgcaccaatgct

SEQ ID NO: 388123 - DNA, 25 bp, Homo sapien
ctcaacagacgtggtctggtctggg

SEQ ID NO: 388124 - DNA, 25 bp, Homo sapien
gatagactcacatagaaacagacag

SEQ ID NO: 388125 - DNA, 25 bp, Homo sapien
tttggtgatagactcacatagaaac

SEQ ID NO: 388126 - DNA, 25 bp, Homo sapien
aaacagacagctagctcaacagacg

SEQ ID NO: 388127 - DNA, 25 bp, Homo sapien
tgcagtcagctcctggctacggcct

SEQ ID NO: 388128 - DNA, 25 bp, Homo sapien
tgtgactgaatgctaatatctgtga

SEQ ID NO: 388129 - DNA, 25 bp, Homo sapien
gaatgttatgtgactgaatgctaat

SEQ ID NO: 388130 - DNA, 25 bp, Homo sapien
gctacggcctcgtccctccttagat

SEQ ID NO: 388131 - DNA, 25 bp, Homo sapien
tgcctgcctctccttggttcttaga

SEQ ID NO: 388132 - DNA, 25 bp, Homo sapien
cctctccttggttcttagagttgcc

SEQ ID NO: 388133 - DNA, 25 bp, Homo sapien
tgcctctccttggttcttagagttg

SEQ ID NO: 388134 - DNA, 25 bp, Homo sapien
tcagagccctttggtgcctgcctct

SEQ ID NO: 388135 - DNA, 25 bp, Homo sapien
tccacaatctgcaccaagagttgca

SEQ ID NO: 388136 - DNA, 25 bp, Homo sapien
caatctgcaccaagagttgcagatc

SEQ ID NO: 388137 - DNA, 25 bp, Homo sapien
atccacaatctgcaccaagagttgc

SEQ ID NO: 388138 - DNA, 25 bp, Homo sapien
cacaatctgcaccaagagttgcaga

SEQ ID NO: 388139 - DNA, 25 bp, Homo sapien
tctccagccagtttggatgttcact

SEQ ID NO: 388140 - DNA, 25 bp, Homo sapien
caagtctccagccagtttggatgtt

SEQ ID NO: 388141 - DNA, 25 bp, Homo sapien
cagccagtttggatgttcactttca

SEQ ID NO: 388142 - DNA, 25 bp, Homo sapien
gccagtttggatgttcactttcaat

SEQ ID NO: 388143 - DNA, 25 bp, Homo sapien
attttcctgcagcttagaaaagatt

SEQ ID NO: 388144 - DNA, 25 bp, Homo sapien
ttcctgcagcttagaaaagatttca

SEQ ID NO: 388145 - DNA, 25 bp, Homo sapien
ctgaagttccattgcattttcctgc

SEQ ID NO: 388146 - DNA, 25 bp, Homo sapien
tcactgaagttccattgcattttcc

SEQ ID NO: 388147 - DNA, 25 bp, Homo sapien
gtactccaggctgttttaattgcat

SEQ ID NO: 388148 - DNA, 25 bp, Homo sapien
tatgatcctctgtggggtactccag

SEQ ID NO: 388149 - DNA, 25 bp, Homo sapien
tttgcaaggcaccaggggtctctga

SEQ ID NO: 388150 - DNA, 25 bp, Homo sapien
atctatgatcctctgtggggtactc

SEQ ID NO: 388151 - DNA, 25 bp, Homo sapien
aaaatctcccctgtcatactcaatt

SEQ ID NO: 388152 - DNA, 25 bp, Homo sapien
tactcaattctcgtaaataagtggc

SEQ ID NO: 388153 - DNA, 25 bp, Homo sapien
tcgtaaataagtggcttgccagagg

SEQ ID NO: 388154 - DNA, 25 bp, Homo sapien
gccagaggcgcactgtagttaaacc

SEQ ID NO: 388155 - DNA, 25 bp, Homo sapien
ttctgagcattgactgacagcagct

SEQ ID NO: 388156 - DNA, 25 bp, Homo sapien
tttgccaagaggttctgagcattga

SEQ ID NO: 388157 - DNA, 25 bp, Homo sapien
ctccagcttcagaggtggaccgagc

SEQ ID NO: 388158 - DNA, 25 bp, Homo sapien
cagcttcagaggtggaccgagcttc

SEQ ID NO: 388159 - DNA, 25 bp, Homo sapien
ggtggaagtggacatcacacccact

SEQ ID NO: 388160 - DNA, 25 bp, Homo sapien
tctgctgccgcaagcccacagccca

SEQ ID NO: 388161 - DNA, 25 bp, Homo sapien
aggtggcaaacatagtccaccaggc

SEQ ID NO: 388162 - DNA, 25 bp, Homo sapien
tctttgctcaggtggcaaacatagt

SEQ ID NO: 388163 - DNA, 25 bp, Homo sapien
ctttccaggaggtcccctgagcagg

SEQ ID NO: 388164 - DNA, 25 bp, Homo sapien
ccctgagcaggctttaagatccact

SEQ ID NO: 388165 - DNA, 25 bp, Homo sapien
ggctttaagatccactgtctctctc

SEQ ID NO: 388166 - DNA, 25 bp, Homo sapien
ggaggtcccctgagcaggctttaag

SEQ ID NO: 388167 - DNA, 25 bp, Homo sapien
caatgtgaccataatatcacactgc

SEQ ID NO: 388168 - DNA, 25 bp, Homo sapien
aatgtgaccataatatcacactgcc

SEQ ID NO: 388169 - DNA, 25 bp, Homo sapien
ttaatcggggaaactgcgaagtgta

SEQ ID NO: 388170 - DNA, 25 bp, Homo sapien
gaaactgcgaagtgtaactgctggg

SEQ ID NO: 388171 - DNA, 25 bp, Homo sapien
ggagcgcctggccagctgataaacg

SEQ ID NO: 388172 - DNA, 25 bp, Homo sapien
cctggccagctgataaacgtgttct

SEQ ID NO: 388173 - DNA, 25 bp, Homo sapien
aaagtgagttgtcaaagtcagtgaa

SEQ ID NO: 388174 - DNA, 25 bp, Homo sapien
ccttttgtaacaacgagaagtcagt

SEQ ID NO: 388175 - DNA, 25 bp, Homo sapien
taatccgacgaataaagtgagttgt

SEQ ID NO: 388176 - DNA, 25 bp, Homo sapien
gtcagtgaaattatcctaggactaa

SEQ ID NO: 388177 - DNA, 25 bp, Homo sapien
ctcagcagctcaatgccaaactctt

SEQ ID NO: 388178 - DNA, 25 bp, Homo sapien
tcagcagctcaatgccaaactcttt

SEQ ID NO: 388179 - DNA, 25 bp, Homo sapien
cagcagctcaatgccaaactctttc

SEQ ID NO: 388180 - DNA, 25 bp, Homo sapien
gcagctcaatgccaaactctttcat

SEQ ID NO: 388181 - DNA, 25 bp, Homo sapien
ctggctgacacaggccctgaggctg

SEQ ID NO: 388182 - DNA, 25 bp, Homo sapien
ctgacacaggccctgaggctgccac

SEQ ID NO: 388183 - DNA, 25 bp, Homo sapien
tggctgacacaggccctgaggctgc

SEQ ID NO: 388184 - DNA, 25 bp, Homo sapien
gctgacacaggccctgaggctgcca

SEQ ID NO: 388185 - DNA, 25 bp, Homo sapien
ccagaacacgctggatggaaaggtt

SEQ ID NO: 388186 - DNA, 25 bp, Homo sapien
actccccagtggtcgacgcagagca

SEQ ID NO: 388187 - DNA, 25 bp, Homo sapien
actgatgctacagacccaggctcca

SEQ ID NO: 388188 - DNA, 25 bp, Homo sapien
tggtcgacgcagagcactgatgcta

SEQ ID NO: 388189 - DNA, 25 bp, Homo sapien
taaatataccaatttctctggcaat

SEQ ID NO: 388190 - DNA, 25 bp, Homo sapien
aaaatactgaggctggcccggcaca

SEQ ID NO: 388191 - DNA, 25 bp, Homo sapien
tttctgtaaagtgacgatgacagat

SEQ ID NO: 388192 - DNA, 25 bp, Homo sapien
gatattttcgcttactaatgcaagt

SEQ ID NO: 388193 - DNA, 25 bp, Homo sapien
agcagtacccattcgcctagcaggg

SEQ ID NO: 388194 - DNA, 25 bp, Homo sapien
tcaagtattcttccggtgcagctgt

SEQ ID NO: 388195 - DNA, 25 bp, Homo sapien
ttcatgacaccgtttgcctcgagcg

SEQ ID NO: 388196 - DNA, 25 bp, Homo sapien
tgaacggactcgtgctttgagagca

SEQ ID NO: 388197 - DNA, 25 bp, Homo sapien
tccaattctgcactgccattcgtcc

SEQ ID NO: 388198 - DNA, 25 bp, Homo sapien
tgtcctgtttaagtgccttggcaca

SEQ ID NO: 388199 - DNA, 25 bp, Homo sapien
ccatgtcctgtttaagtgccttggc

SEQ ID NO: 388200 - DNA, 25 bp, Homo sapien
gccattcgtcccctcttatctctga

SEQ ID NO: 388201 - DNA, 25 bp, Homo sapien
cagagctgcagagccgcggctacct

SEQ ID NO: 388202 - DNA, 25 bp, Homo sapien
tccagagctgcagagccgcggctac

SEQ ID NO: 388203 - DNA, 25 bp, Homo sapien
ctgcttccagccctgaggctccaga

SEQ ID NO: 388204 - DNA, 25 bp, Homo sapien
ggctccagagctgcagagccgcggc

SEQ ID NO: 388205 - DNA, 25 bp, Homo sapien
cctgagctgagcttacgagtgtaaa

SEQ ID NO: 388206 - DNA, 25 bp, Homo sapien
ccagagctggcgctgattcggtgtg

SEQ ID NO: 388207 - DNA, 25 bp, Homo sapien
gacaaggatatctttcaaagcaggt

SEQ ID NO: 388208 - DNA, 25 bp, Homo sapien
gaataaggcaatgagatgctccacc

SEQ ID NO: 388209 - DNA, 25 bp, Homo sapien
tttctgaggcaaagcgatgcccagg

SEQ ID NO: 388210 - DNA, 25 bp, Homo sapien
catctgcatctcgaagtcacttagg

SEQ ID NO: 388211 - DNA, 25 bp, Homo sapien
caggaatcagacatgggcgtgaacc

SEQ ID NO: 388212 - DNA, 25 bp, Homo sapien
tgagggtgaaaccacgctccatctg

SEQ ID NO: 388213 - DNA, 25 bp, Homo sapien
acccctcattgtcatagcccagtga

SEQ ID NO: 388214 - DNA, 25 bp, Homo sapien
tccacccctcattgtcatagcccag

SEQ ID NO: 388215 - DNA, 25 bp, Homo sapien
tcttccacccctcattgtcatagcc

SEQ ID NO: 388216 - DNA, 25 bp, Homo sapien
cacccctcattgtcatagcccagtg

SEQ ID NO: 388217 - DNA, 25 bp, Homo sapien
aaataaatcagcaagtgccgtgaga

SEQ ID NO: 388218 - DNA, 25 bp, Homo sapien
aatgcatgagtaagggaaggcgtca

SEQ ID NO: 388219 - DNA, 25 bp, Homo sapien
aggcctctcgagcaacactagggag

SEQ ID NO: 388220 - DNA, 25 bp, Homo sapien
cactagggaggcaagcggacgccat

SEQ ID NO: 388221 - DNA, 25 bp, Homo sapien
atgcaggcccgttcctactgaggac

SEQ ID NO: 388222 - DNA, 25 bp, Homo sapien
gaggaccattgtcccatagcccact

SEQ ID NO: 388223 - DNA, 25 bp, Homo sapien
gttcctcctgccgaaatgcagattt

SEQ ID NO: 388224 - DNA, 25 bp, Homo sapien
ctctgggagaacgagatgcaggccc

SEQ ID NO: 388225 - DNA, 25 bp, Homo sapien
ggttttctcgccatccttccccaca

SEQ ID NO: 388226 - DNA, 25 bp, Homo sapien
agctggttttctcgccatccttccc

SEQ ID NO: 388227 - DNA, 25 bp, Homo sapien
aagctggttttctcgccatccttcc

SEQ ID NO: 388228 - DNA, 25 bp, Homo sapien
tcattcagcaggtacgaggtgctca

SEQ ID NO: 388229 - DNA, 25 bp, Homo sapien
cattcagcaggtacgaggtgctcag

SEQ ID NO: 388230 - DNA, 25 bp, Homo sapien
aatgtttctgaatgactgccagcat

SEQ ID NO: 388231 - DNA, 25 bp, Homo sapien
tcagcaggtacgaggtgctcagcaa

SEQ ID NO: 388232 - DNA, 25 bp, Homo sapien
catttggtggagtgtttcccctcac

SEQ ID NO: 388233 - DNA, 25 bp, Homo sapien
tagctgcttcgccagcaaacctgat

SEQ ID NO: 388234 - DNA, 25 bp, Homo sapien
tgatacaacttgtttccacgaggtc

SEQ ID NO: 388235 - DNA, 25 bp, Homo sapien
cacgaggtccgaatgaccctgaggc

SEQ ID NO: 388236 - DNA, 25 bp, Homo sapien
ggagcccttcacagttttcaaactg

SEQ ID NO: 388237 - DNA, 25 bp, Homo sapien
ctgtggagcccttcacagttttcaa

SEQ ID NO: 388238 - DNA, 25 bp, Homo sapien
tgtggagcccttcacagttttcaaa

SEQ ID NO: 388239 - DNA, 25 bp, Homo sapien
tggagcccttcacagttttcaaact

SEQ ID NO: 388240 - DNA, 25 bp, Homo sapien
accacctgggacatgcccctttggt

SEQ ID NO: 388241 - DNA, 25 bp, Homo sapien
tttacctctaaattccagtggtcac

SEQ ID NO: 388242 - DNA, 25 bp, Homo sapien
tttggtgcaggttgaagaaccagag

SEQ ID NO: 388243 - DNA, 25 bp, Homo sapien
catgcccctttggtgcaggttgaag

SEQ ID NO: 388244 - DNA, 25 bp, Homo sapien
tattctgtaaaactgataatcccta

SEQ ID NO: 388245 - DNA, 25 bp, Homo sapien
tgaactgagtcagacgtgtacagat

SEQ ID NO: 388246 - DNA, 25 bp, Homo sapien
ccaaaatagtaatagcgacccgttg

SEQ ID NO: 388247 - DNA, 25 bp, Homo sapien
gctttaggcaagtctgaacaaccaa

SEQ ID NO: 388248 - DNA, 25 bp, Homo sapien
taaccttgggcctcctctacagaat

SEQ ID NO: 388249 - DNA, 25 bp, Homo sapien
tacgtccttaagactatggcaaatg

SEQ ID NO: 388250 - DNA, 25 bp, Homo sapien
tgaagaccaccggttcccgacagtg

SEQ ID NO: 388251 - DNA, 25 bp, Homo sapien
gatgattatggaacctacgtcctta

SEQ ID NO: 388252 - DNA, 25 bp, Homo sapien
gggggctaggaggtggtgctttgct

SEQ ID NO: 388253 - DNA, 25 bp, Homo sapien
gggctccctgagtggagccatattt

SEQ ID NO: 388254 - DNA, 25 bp, Homo sapien
ctgggggctaggaggtggtgctttg

SEQ ID NO: 388255 - DNA, 25 bp, Homo sapien
gctccctgagtggagccatatttcc

SEQ ID NO: 388256 - DNA, 25 bp, Homo sapien
gaagctcacttgccccaagcagact

SEQ ID NO: 388257 - DNA, 25 bp, Homo sapien
tttctccctcaggctacttgcacag

SEQ ID NO: 388258 - DNA, 25 bp, Homo sapien
caaagctcagctacttcccgaagct

SEQ ID NO: 388259 - DNA, 25 bp, Homo sapien
acttgccccaagcagactgccttgt

SEQ ID NO: 388260 - DNA, 25 bp, Homo sapien
ctgtgtccccgagtcgtggtgctga

SEQ ID NO: 388261 - DNA, 25 bp, Homo sapien
ggctccaaatgaggcgcttcctgta

SEQ ID NO: 388262 - DNA, 25 bp, Homo sapien
gatcattctatcacaaaaaggctcc

SEQ ID NO: 388263 - DNA, 25 bp, Homo sapien
gaacctctgaatgggcttaggacta

SEQ ID NO: 388264 - DNA, 25 bp, Homo sapien
ctggtggcaccgaagggcagccggg

SEQ ID NO: 388265 - DNA, 25 bp, Homo sapien
ggcagccgggcttgggtaataaggc

SEQ ID NO: 388266 - DNA, 25 bp, Homo sapien
taaggccctgaaattgagccgaccc

SEQ ID NO: 388267 - DNA, 25 bp, Homo sapien
ggccctgaaattgagccgaccccat

SEQ ID NO: 388268 - DNA, 25 bp, Homo sapien
agactttccgtggagcgctcggcgt

SEQ ID NO: 388269 - DNA, 25 bp, Homo sapien
aattccgcagcgacggagcagtggt

SEQ ID NO: 388270 - DNA, 25 bp, Homo sapien
ctaacgccaaacctgcctttggaat

SEQ ID NO: 388271 - DNA, 25 bp, Homo sapien
gagtgtgcgccctgggagccgggcg

SEQ ID NO: 388272 - DNA, 25 bp, Homo sapien
gacaccgcactcgtcagtctctgga

SEQ ID NO: 388273 - DNA, 25 bp, Homo sapien
ggagcgacaccgcactcgtcagtct

SEQ ID NO: 388274 - DNA, 25 bp, Homo sapien
gcgacaccgcactcgtcagtctctg

SEQ ID NO: 388275 - DNA, 25 bp, Homo sapien
ctggagcgacaccgcactcgtcagt

SEQ ID NO: 388276 - DNA, 25 bp, Homo sapien
gcagggccggcgcttggtcgggacg

SEQ ID NO: 388277 - DNA, 25 bp, Homo sapien
ttggtcgggacggtggctgctcggc

SEQ ID NO: 388278 - DNA, 25 bp, Homo sapien
cgccggccagagacgatcagggagg

SEQ ID NO: 388279 - DNA, 25 bp, Homo sapien
cggctgctcggtgcgcgccgggcga

SEQ ID NO: 388280 - DNA, 25 bp, Homo sapien
ccacgctctcctcgcacgaccgagg

SEQ ID NO: 388281 - DNA, 25 bp, Homo sapien
caaatgctgtaggaacgagaaaata

SEQ ID NO: 388282 - DNA, 25 bp, Homo sapien
gatctcatttccgacaggttcccca

SEQ ID NO: 388283 - DNA, 25 bp, Homo sapien
taaaggcagcccagcgcaaccagat

SEQ ID NO: 388284 - DNA, 25 bp, Homo sapien
caacagtacccttattggaacaagt

SEQ ID NO: 388285 - DNA, 25 bp, Homo sapien
gatggatcgctgcttttaaaccaaa

SEQ ID NO: 388286 - DNA, 25 bp, Homo sapien
taacacacatttgaaggtagtttgc

SEQ ID NO: 388287 - DNA, 25 bp, Homo sapien
caagtttggtgttgctgatggatcg

SEQ ID NO: 388288 - DNA, 25 bp, Homo sapien
tcatagacatcttgggtgttgccag

SEQ ID NO: 388289 - DNA, 25 bp, Homo sapien
cttccttaggcttgcagactgcttg

SEQ ID NO: 388290 - DNA, 25 bp, Homo sapien
gtgttgccagttatccatccagagc

SEQ ID NO: 388291 - DNA, 25 bp, Homo sapien
catccagagccggatgggtcagctc

SEQ ID NO: 388292 - DNA, 25 bp, Homo sapien
gtcatacagtgaagcaacggaggcc

SEQ ID NO: 388293 - DNA, 25 bp, Homo sapien
tcatggtagccaacaaaggctggtc

SEQ ID NO: 388294 - DNA, 25 bp, Homo sapien
cagtcttgggtccaaagtggccaca

SEQ ID NO: 388295 - DNA, 25 bp, Homo sapien
tactaagagctaagccccgtgctgg

SEQ ID NO: 388296 - DNA, 25 bp, Homo sapien
agctctaagcctagctccatggcct

SEQ ID NO: 388297 - DNA, 25 bp, Homo sapien
aaagctctaagcctagctccatggc

SEQ ID NO: 388298 - DNA, 25 bp, Homo sapien
gttcatggctatggaactgaaggct

SEQ ID NO: 388299 - DNA, 25 bp, Homo sapien
gcaaagctctaagcctagctccatg

SEQ ID NO: 388300 - DNA, 25 bp, Homo sapien
tacagagctctcaaccagtggctag

SEQ ID NO: 388301 - DNA, 25 bp, Homo sapien
gaactgattccaagcacggatctgc

SEQ ID NO: 388302 - DNA, 25 bp, Homo sapien
ggttagcaccgatgaatggccttca

SEQ ID NO: 388303 - DNA, 25 bp, Homo sapien
ttccatggccagcttaggtgagtgc

SEQ ID NO: 388304 - DNA, 25 bp, Homo sapien
ggctgagttctacagctaacaggta

SEQ ID NO: 388305 - DNA, 25 bp, Homo sapien
cattggtggcatcaagacttgatcc

SEQ ID NO: 388306 - DNA, 25 bp, Homo sapien
gcatttctcagtatcacaatgggat

SEQ ID NO: 388307 - DNA, 25 bp, Homo sapien
tcccaaaggtctcaagaggaaagca

SEQ ID NO: 388308 - DNA, 25 bp, Homo sapien
gtccatattcttgattccgaaatca

SEQ ID NO: 388309 - DNA, 25 bp, Homo sapien
ccctctgtaactgttagccacaggg

SEQ ID NO: 388310 - DNA, 25 bp, Homo sapien
catattcttgattccgaaatcattc

SEQ ID NO: 388311 - DNA, 25 bp, Homo sapien
gagtgtccctctgtaactgttagcc

SEQ ID NO: 388312 - DNA, 25 bp, Homo sapien
catatcgtggaggagaagaacaaca

SEQ ID NO: 388313 - DNA, 25 bp, Homo sapien
tcctcctagagatcgagttttccaa

SEQ ID NO: 388314 - DNA, 25 bp, Homo sapien
caaatagtctatagtcacatggcca

SEQ ID NO: 388315 - DNA, 25 bp, Homo sapien
gctagggctacaaccagttttctgg

SEQ ID NO: 388316 - DNA, 25 bp, Homo sapien
cttaaacagcttcccatcaaccaag

SEQ ID NO: 388317 - DNA, 25 bp, Homo sapien
gagctgtagcggttgggtctgtctg

SEQ ID NO: 388318 - DNA, 25 bp, Homo sapien
ttcagttcttaaacagcttcccatc

SEQ ID NO: 388319 - DNA, 25 bp, Homo sapien
gataggagctgtagcggttgggtct

SEQ ID NO: 388320 - DNA, 25 bp, Homo sapien
taagtaggcctgcttgttctctgag

SEQ ID NO: 388321 - DNA, 25 bp, Homo sapien
tgtccggccaaatcaaacaagcaga

SEQ ID NO: 388322 - DNA, 25 bp, Homo sapien
tttcagaaaccgcataagcatcgtc

SEQ ID NO: 388323 - DNA, 25 bp, Homo sapien
tgcaagacgctaaactttgaggagg

SEQ ID NO: 388324 - DNA, 25 bp, Homo sapien
caatagtccctgattaaactggcaa

SEQ ID NO: 388325 - DNA, 25 bp, Homo sapien
ttaaaacagactcgtaaaatggtca

SEQ ID NO: 388326 - DNA, 25 bp, Homo sapien
ggtcaaagtgactgaaatgattgta

SEQ ID NO: 388327 - DNA, 25 bp, Homo sapien
tgtgggcaatcctaccaatagtccc

SEQ ID NO: 388328 - DNA, 25 bp, Homo sapien
gaaatggaatccaagcctgttggca

SEQ ID NO: 388329 - DNA, 25 bp, Homo sapien
ttgctcttcatttagagaaggaaaa

SEQ ID NO: 388330 - DNA, 25 bp, Homo sapien
cttcttgcagtgtttgctcttcatt

SEQ ID NO: 388331 - DNA, 25 bp, Homo sapien
catcaaaggtgtcaaaggctggctg

SEQ ID NO: 388332 - DNA, 25 bp, Homo sapien
catgcagggttatgcttacgccagt

SEQ ID NO: 388333 - DNA, 25 bp, Homo sapien
cagaaagaactaccgatgggtaagg

SEQ ID NO: 388334 - DNA, 25 bp, Homo sapien
ggcatgtttccaactaatagctctg

SEQ ID NO: 388335 - DNA, 25 bp, Homo sapien
taaacaatgacacgaagaactacag

SEQ ID NO: 388336 - DNA, 25 bp, Homo sapien
aaaggcaattcacagttggcggagt

SEQ ID NO: 388337 - DNA, 25 bp, Homo sapien
ttgctgcacggggttaacaaaggca

SEQ ID NO: 388338 - DNA, 25 bp, Homo sapien
acaaaggcaattcacagttggcgga

SEQ ID NO: 388339 - DNA, 25 bp, Homo sapien
cttgctgcacggggttaacaaaggc

SEQ ID NO: 388340 - DNA, 25 bp, Homo sapien
ggcgccgctgttcctttttgaagcc

SEQ ID NO: 388341 - DNA, 25 bp, Homo sapien
caggcgccgctgttcctttttgaag

SEQ ID NO: 388342 - DNA, 25 bp, Homo sapien
tctttggaatgcccaggcgccgctg

SEQ ID NO: 388343 - DNA, 25 bp, Homo sapien
ctttggaatgcccaggcgccgctgt

SEQ ID NO: 388344 - DNA, 25 bp, Homo sapien
gaaagcgttccttgccaaggttaca

SEQ ID NO: 388345 - DNA, 25 bp, Homo sapien
tgatcatttgctccagatgttccca

SEQ ID NO: 388346 - DNA, 25 bp, Homo sapien
catgccgaacctctgcagattcacg

SEQ ID NO: 388347 - DNA, 25 bp, Homo sapien
ggttacacagcatctggccattcat

SEQ ID NO: 388348 - DNA, 25 bp, Homo sapien
ttacaaagtgcacgtccacccggaa

SEQ ID NO: 388349 - DNA, 25 bp, Homo sapien
tcacaggcccgaggaatggtaaaac

SEQ ID NO: 388350 - DNA, 25 bp, Homo sapien
aatgagtttccctggccctcagacg

SEQ ID NO: 388351 - DNA, 25 bp, Homo sapien
acacatgtgcccaagaactttgaaa

SEQ ID NO: 388352 - DNA, 25 bp, Homo sapien
cagacacaggagacgtaagatggca

SEQ ID NO: 388353 - DNA, 25 bp, Homo sapien
tctatcgcaaaaggtccagatggtg

SEQ ID NO: 388354 - DNA, 25 bp, Homo sapien
tcaaaaaacgagagaaagcaaccca

SEQ ID NO: 388355 - DNA, 25 bp, Homo sapien
taatctcatggtgctccacgtccct

SEQ ID NO: 388356 - DNA, 25 bp, Homo sapien
ttgctgttaatccaatgaggaacgg

SEQ ID NO: 388357 - DNA, 25 bp, Homo sapien
taatccaatgaggaacggaggtgag

SEQ ID NO: 388358 - DNA, 25 bp, Homo sapien
gctgttaatccaatgaggaacggag

SEQ ID NO: 388359 - DNA, 25 bp, Homo sapien
tgttaatccaatgaggaacggaggt

SEQ ID NO: 388360 - DNA, 25 bp, Homo sapien
ccaaatctggtgtgcatgactatac

SEQ ID NO: 388361 - DNA, 25 bp, Homo sapien
cctacagtagagagattccaagtct

SEQ ID NO: 388362 - DNA, 25 bp, Homo sapien
gcttatagctcaacacccacgtgtg

SEQ ID NO: 388363 - DNA, 25 bp, Homo sapien
tcttaagggcagaatcaatcggact

SEQ ID NO: 388364 - DNA, 25 bp, Homo sapien
gctcagagctgagtacgctgggtgt

SEQ ID NO: 388365 - DNA, 25 bp, Homo sapien
tgtggaggccggacacatgctgtcc

SEQ ID NO: 388366 - DNA, 25 bp, Homo sapien
cagagcagtaggtgacgctgacgga

SEQ ID NO: 388367 - DNA, 25 bp, Homo sapien
cgctgacggagctgagccgagactt

SEQ ID NO: 388368 - DNA, 25 bp, Homo sapien
tcaggggagtcgtggtctttgggag

SEQ ID NO: 388369 - DNA, 25 bp, Homo sapien
caggggagtcgtggtctttgggagt

SEQ ID NO: 388370 - DNA, 25 bp, Homo sapien
ctcaggggagtcgtggtctttggga

SEQ ID NO: 388371 - DNA, 25 bp, Homo sapien
agctctcgaaggaaggaacccgttg

SEQ ID NO: 388372 - DNA, 25 bp, Homo sapien
catggttggcttattgaggcagaga

SEQ ID NO: 388373 - DNA, 25 bp, Homo sapien
cagcaaggacgactggctgttccag

SEQ ID NO: 388374 - DNA, 25 bp, Homo sapien
gtaatccttgaaagacatggttggc

SEQ ID NO: 388375 - DNA, 25 bp, Homo sapien
ctagcttagaaacaccctcggtgaa

SEQ ID NO: 388376 - DNA, 25 bp, Homo sapien
tattcctcagaacgtcccaggtgga

SEQ ID NO: 388377 - DNA, 25 bp, Homo sapien
gagggagtggcctgtcaattttcac

SEQ ID NO: 388378 - DNA, 25 bp, Homo sapien
ggtactgtggctcgaaaggaagcaa

SEQ ID NO: 388379 - DNA, 25 bp, Homo sapien
agagcctagatcttccgaccctaag

SEQ ID NO: 388380 - DNA, 25 bp, Homo sapien
tcttcctcagaaacgcaatggccgt

SEQ ID NO: 388381 - DNA, 25 bp, Homo sapien
gcacgggacaggcattctagaacca

SEQ ID NO: 388382 - DNA, 25 bp, Homo sapien
tgtgagcaccgatagctgtctgcct

SEQ ID NO: 388383 - DNA, 25 bp, Homo sapien
gcaggatttgtctgatagcagctcc

SEQ ID NO: 388384 - DNA, 25 bp, Homo sapien
ccgtctccagtccagctgatgaatg

SEQ ID NO: 388385 - DNA, 25 bp, Homo sapien
tgccacagctgaataggtccacttc

SEQ ID NO: 388386 - DNA, 25 bp, Homo sapien
ggcgagcttaaactcccatccgtct

SEQ ID NO: 388387 - DNA, 25 bp, Homo sapien
gttttcaagcccagagatttcccag

SEQ ID NO: 388388 - DNA, 25 bp, Homo sapien
cttttttgtgcccaaagaactgagt

SEQ ID NO: 388389 - DNA, 25 bp, Homo sapien
ctcagcagtactggtgaaccctttt

SEQ ID NO: 388390 - DNA, 25 bp, Homo sapien
aagattctcagcagtactggtgaac

SEQ ID NO: 388391 - DNA, 25 bp, Homo sapien
ggccttctcctttagacagggctcc

SEQ ID NO: 388392 - DNA, 25 bp, Homo sapien
atgaggcttgttcccccgatggaca

SEQ ID NO: 388393 - DNA, 25 bp, Homo sapien
tgctgggctcagctaaggagtggac

SEQ ID NO: 388394 - DNA, 25 bp, Homo sapien
tcagctaaggagtggacagaaggct

SEQ ID NO: 388395 - DNA, 25 bp, Homo sapien
tcagtcctccgtgtcgggctggacg

SEQ ID NO: 388396 - DNA, 25 bp, Homo sapien
gcgtgcagttcctcgggcgtgaacc

SEQ ID NO: 388397 - DNA, 25 bp, Homo sapien
agcaagttctggaggtcgcacacga

SEQ ID NO: 388398 - DNA, 25 bp, Homo sapien
tagcgcttccccgacgtcttgtgga

SEQ ID NO: 388399 - DNA, 25 bp, Homo sapien
cgtggtttgggatgcaataaggcca

SEQ ID NO: 388400 - DNA, 25 bp, Homo sapien
tagaattagctgtgccgttgctgcc

SEQ ID NO: 388401 - DNA, 25 bp, Homo sapien
aacttctcttagtcggcccttggca

SEQ ID NO: 388402 - DNA, 25 bp, Homo sapien
tgccacaagggaggcagcctggtca

SEQ ID NO: 388403 - DNA, 25 bp, Homo sapien
agcagggattaccccccacaggcct

SEQ ID NO: 388404 - DNA, 25 bp, Homo sapien
cacaggccttatccctgtaagtcta

SEQ ID NO: 388405 - DNA, 25 bp, Homo sapien
cttgccagacaaccaaggcaagaaa

SEQ ID NO: 388406 - DNA, 25 bp, Homo sapien
ccccacaggccttatccctgtaagt

SEQ ID NO: 388407 - DNA, 25 bp, Homo sapien
gacacacgagtgaacaaagatggga

SEQ ID NO: 388408 - DNA, 25 bp, Homo sapien
ctgtggacactgagcaaaaaggagc

SEQ ID NO: 388409 - DNA, 25 bp, Homo sapien
gctattaagatggttgagacacacg

SEQ ID NO: 388410 - DNA, 25 bp, Homo sapien
gacaaactgtgcttcgttcaagagg

SEQ ID NO: 388411 - DNA, 25 bp, Homo sapien
cttttgtgggtattgaggcagcgca

SEQ ID NO: 388412 - DNA, 25 bp, Homo sapien
gttttctccgaatgaatggctccga

SEQ ID NO: 388413 - DNA, 25 bp, Homo sapien
taactgttaggctgaaccccatgaa

SEQ ID NO: 388414 - DNA, 25 bp, Homo sapien
taaaggccgggaatacacatgactc

SEQ ID NO: 388415 - DNA, 25 bp, Homo sapien
ttattattgagagagtaaaggccca

SEQ ID NO: 388416 - DNA, 25 bp, Homo sapien
tgtgcttctgaccttatgccactca

SEQ ID NO: 388417 - DNA, 25 bp, Homo sapien
tccgggccacagtctttgctggatc

SEQ ID NO: 388418 - DNA, 25 bp, Homo sapien
cagctagcaagagtcagatgtggta

SEQ ID NO: 388419 - DNA, 25 bp, Homo sapien
gtgctgagccccaggtctatgtctg

SEQ ID NO: 388420 - DNA, 25 bp, Homo sapien
ttgggatttgctctggggtccatac

SEQ ID NO: 388421 - DNA, 25 bp, Homo sapien
tgggatttgctctggggtccataca

SEQ ID NO: 388422 - DNA, 25 bp, Homo sapien
ggttgggatttgctctggggtccat

SEQ ID NO: 388423 - DNA, 25 bp, Homo sapien
gatttgctctggggtccatacatag

SEQ ID NO: 388424 - DNA, 25 bp, Homo sapien
agtggcttccagaaagcgtgggcag

SEQ ID NO: 388425 - DNA, 25 bp, Homo sapien
agggctccttcactaggaagtggct

SEQ ID NO: 388426 - DNA, 25 bp, Homo sapien
aagtggcttccagaaagcgtgggca

SEQ ID NO: 388427 - DNA, 25 bp, Homo sapien
acttgagaacatttagtaggcttgt

SEQ ID NO: 388428 - DNA, 25 bp, Homo sapien
acatcagtcacttgagaacatttag

SEQ ID NO: 388429 - DNA, 25 bp, Homo sapien
ttagtaggcttgttttttccatgct

SEQ ID NO: 388430 - DNA, 25 bp, Homo sapien
catttagtaggcttgttttttccat

SEQ ID NO: 388431 - DNA, 25 bp, Homo sapien
tttttctgtactctttgcttccatc

SEQ ID NO: 388432 - DNA, 25 bp, Homo sapien
taattggctcatggtatctttcatg

SEQ ID NO: 388433 - DNA, 25 bp, Homo sapien
aattggctcatggtatctttcatga

SEQ ID NO: 388434 - DNA, 25 bp, Homo sapien
catggtgtccagcaggttttcagcc

SEQ ID NO: 388435 - DNA, 25 bp, Homo sapien
cagcaggttttcagccatagatttt

SEQ ID NO: 388436 - DNA, 25 bp, Homo sapien
gtctttgcctgggctgtactgtctg

SEQ ID NO: 388437 - DNA, 25 bp, Homo sapien
ctttgcctgggctgtactgtctgca

SEQ ID NO: 388438 - DNA, 25 bp, Homo sapien
tttgcctgggctgtactgtctgcag

SEQ ID NO: 388439 - DNA, 25 bp, Homo sapien
tgtgcccttgtgtctttgcctgggc

SEQ ID NO: 388440 - DNA, 25 bp, Homo sapien
ccacgcagatgagtgtttctgagga

SEQ ID NO: 388441 - DNA, 25 bp, Homo sapien
tgcatatgttgcacgctgtttctca

SEQ ID NO: 388442 - DNA, 25 bp, Homo sapien
tgtttctgaggataattgggaagac

SEQ ID NO: 388443 - DNA, 25 bp, Homo sapien
cctgcatatgttgcacgctgtttct

SEQ ID NO: 388444 - DNA, 25 bp, Homo sapien
cactcagggatgtgtgctcaccttt

SEQ ID NO: 388445 - DNA, 25 bp, Homo sapien
tgctgttcatgacccgaggtaggag

SEQ ID NO: 388446 - DNA, 25 bp, Homo sapien
gctcaggtctttggtaaaaggtcca

SEQ ID NO: 388447 - DNA, 25 bp, Homo sapien
cagggcggaatttatgggagtacct

SEQ ID NO: 388448 - DNA, 25 bp, Homo sapien
tcgcctttcgataatgagggcagca

SEQ ID NO: 388449 - DNA, 25 bp, Homo sapien
gctcttgaatgaacaagactgttgt

SEQ ID NO: 388450 - DNA, 25 bp, Homo sapien
cagagtgattcaaaagtgggtaatc

SEQ ID NO: 388451 - DNA, 25 bp, Homo sapien
ccttgactggagtacagctcttgaa

SEQ ID NO: 388452 - DNA, 25 bp, Homo sapien
catgcatagatcaatactgagattt

SEQ ID NO: 388453 - DNA, 25 bp, Homo sapien
gatcaatactgagatttttccacaa

SEQ ID NO: 388454 - DNA, 25 bp, Homo sapien
ttttccacaaattgaggagtagagt

SEQ ID NO: 388455 - DNA, 25 bp, Homo sapien
ccacaaattgaggagtagagtttgc

SEQ ID NO: 388456 - DNA, 25 bp, Homo sapien
tgtgtgaatgcatgggaaatctcaa

SEQ ID NO: 388457 - DNA, 25 bp, Homo sapien
agacacgaggtttccaagtgcctgc

SEQ ID NO: 388458 - DNA, 25 bp, Homo sapien
ctggggttggtccatataaaagcct

SEQ ID NO: 388459 - DNA, 25 bp, Homo sapien
cttcacagacacgaggtttccaagt

SEQ ID NO: 388460 - DNA, 25 bp, Homo sapien
gcaaagaaatctaggtaggagctct

SEQ ID NO: 388461 - DNA, 25 bp, Homo sapien
tgtcagccctcgtgactactcctgg

SEQ ID NO: 388462 - DNA, 25 bp, Homo sapien
ctactcctggagtttatcgctgaca

SEQ ID NO: 388463 - DNA, 25 bp, Homo sapien
tagacttagcctaggctccaccagg

SEQ ID NO: 388464 - DNA, 25 bp, Homo sapien
gccatgagcaactcgctcatggtcc

SEQ ID NO: 388465 - DNA, 25 bp, Homo sapien
gggactttgccatgagcaactcgct

SEQ ID NO: 388466 - DNA, 25 bp, Homo sapien
gactttgccatgagcaactcgctca

SEQ ID NO: 388467 - DNA, 25 bp, Homo sapien
tcctctgggactttgccatgagcaa

SEQ ID NO: 388468 - DNA, 25 bp, Homo sapien
gaggctacgccctgtccctttctgt

SEQ ID NO: 388469 - DNA, 25 bp, Homo sapien
cagcaaacccagagggtcgaagtga

SEQ ID NO: 388470 - DNA, 25 bp, Homo sapien
tgatattatattccctgcccaggtc

SEQ ID NO: 388471 - DNA, 25 bp, Homo sapien
aactgggagtggctgacagcactct

SEQ ID NO: 388472 - DNA, 25 bp, Homo sapien
gtgctggtcattctccaaatttgtt

SEQ ID NO: 388473 - DNA, 25 bp, Homo sapien
tggcttgcacttcgcaggccctctt

SEQ ID NO: 388474 - DNA, 25 bp, Homo sapien
tcaaataaacccaagagtgctggtc

SEQ ID NO: 388475 - DNA, 25 bp, Homo sapien
gggaggcttcccatcatttgtctga

SEQ ID NO: 388476 - DNA, 25 bp, Homo sapien
gttttttggtgcagtgtgcaccttc

SEQ ID NO: 388477 - DNA, 25 bp, Homo sapien
ttttttggtgcagtgtgcaccttcc

SEQ ID NO: 388478 - DNA, 25 bp, Homo sapien
tgttttttggtgcagtgtgcacctt

SEQ ID NO: 388479 - DNA, 25 bp, Homo sapien
gtgtcttatctcagtcacaagtgct

SEQ ID NO: 388480 - DNA, 25 bp, Homo sapien
tcctccgtgtcttatctcagtcaca

SEQ ID NO: 388481 - DNA, 25 bp, Homo sapien
tctcctccgtgtcttatctcagtca

SEQ ID NO: 388482 - DNA, 25 bp, Homo sapien
tccgtgtcttatctcagtcacaagt

SEQ ID NO: 388483 - DNA, 25 bp, Homo sapien
agggaatcatgtagacaaggtacaa

SEQ ID NO: 388484 - DNA, 25 bp, Homo sapien
tgtaagggaatcatgtagacaaggt

SEQ ID NO: 388485 - DNA, 25 bp, Homo sapien
aggaagcttgtaagggaatcatgta

SEQ ID NO: 388486 - DNA, 25 bp, Homo sapien
aagcttgtaagggaatcatgtagac

SEQ ID NO: 388487 - DNA, 25 bp, Homo sapien
ttaataaaatttcgaggcaggcaat

SEQ ID NO: 388488 - DNA, 25 bp, Homo sapien
aataaatgggcctaatggtccgaca

SEQ ID NO: 388489 - DNA, 25 bp, Homo sapien
tcagattagtaatccagtggcaagc

SEQ ID NO: 388490 - DNA, 25 bp, Homo sapien
gggtacagatacttatagccccttc

SEQ ID NO: 388491 - DNA, 25 bp, Homo sapien
agcagctgctcttccctttctgtct

SEQ ID NO: 388492 - DNA, 25 bp, Homo sapien
tctctgtggaactggagatcagaca

SEQ ID NO: 388493 - DNA, 25 bp, Homo sapien
cttcaggatctctgtggaactggag

SEQ ID NO: 388494 - DNA, 25 bp, Homo sapien
ggatctctgtggaactggagatcag

SEQ ID NO: 388495 - DNA, 25 bp, Homo sapien
ccacgatgaaggctagagggttaga

SEQ ID NO: 388496 - DNA, 25 bp, Homo sapien
tagaatgctggtaagaaaagatcag

SEQ ID NO: 388497 - DNA, 25 bp, Homo sapien
acagtgactggcgttctgggtacct

SEQ ID NO: 388498 - DNA, 25 bp, Homo sapien
tattgagcttgacacgatcccagag

SEQ ID NO: 388499 - DNA, 25 bp, Homo sapien
cgtttgagtagatcagcccctattt

SEQ ID NO: 388500 - DNA, 25 bp, Homo sapien
ccaggatcgtttgagtagatcagcc

SEQ ID NO: 388501 - DNA, 25 bp, Homo sapien
ttccttgcagcttcaagcaggttga

SEQ ID NO: 388502 - DNA, 25 bp, Homo sapien
gcctgtccccgagcaccaaattcct

SEQ ID NO: 388503 - DNA, 25 bp, Homo sapien
ctaagggaaagatcaagctgtccat

SEQ ID NO: 388504 - DNA, 25 bp, Homo sapien
ttctctccacccagtactgtggact

SEQ ID NO: 388505 - DNA, 25 bp, Homo sapien
cacccagtactgtggacttgcagca

SEQ ID NO: 388506 - DNA, 25 bp, Homo sapien
gtgtgttaccgcctggagttgcctc

SEQ ID NO: 388507 - DNA, 25 bp, Homo sapien
ctgtggtctcataacaaaaggccac

SEQ ID NO: 388508 - DNA, 25 bp, Homo sapien
cctccctcctgatggaagttatcca

SEQ ID NO: 388509 - DNA, 25 bp, Homo sapien
taacaaaaggccaccggctctcttc

SEQ ID NO: 388510 - DNA, 25 bp, Homo sapien
cttcctccctcctgatggaagttat

SEQ ID NO: 388511 - DNA, 25 bp, Homo sapien
gcctttgctgacgttggagccctgg

SEQ ID NO: 388512 - DNA, 25 bp, Homo sapien
tactagactgtttgttaagggctgc

SEQ ID NO: 388513 - DNA, 25 bp, Homo sapien
cccagttttgagtgtgggagctcca

SEQ ID NO: 388514 - DNA, 25 bp, Homo sapien
ttttctgcacaacccctgaagggaa

SEQ ID NO: 388515 - DNA, 25 bp, Homo sapien
tctgagctttgtgccctgttcccac

SEQ ID NO: 388516 - DNA, 25 bp, Homo sapien
gctttgtgccctgttcccacctccc

SEQ ID NO: 388517 - DNA, 25 bp, Homo sapien
tgagctttgtgccctgttcccacct

SEQ ID NO: 388518 - DNA, 25 bp, Homo sapien
ttctgagctttgtgccctgttccca

SEQ ID NO: 388519 - DNA, 25 bp, Homo sapien
cccgaacgttgaagcgctgctgtca

SEQ ID NO: 388520 - DNA, 25 bp, Homo sapien
ggatctggcgttggaacctctgccc

SEQ ID NO: 388521 - DNA, 25 bp, Homo sapien
aacctctgccccgaacgttgaagcg

SEQ ID NO: 388522 - DNA, 25 bp, Homo sapien
cttcggcagggatctggcgttggaa

SEQ ID NO: 388523 - DNA, 25 bp, Homo sapien
ctgggaggttctagccattgttgag

SEQ ID NO: 388524 - DNA, 25 bp, Homo sapien
ctgccacggtatatggctcaaggaa

SEQ ID NO: 388525 - DNA, 25 bp, Homo sapien
ccatagggctgccacggtatatggc

SEQ ID NO: 388526 - DNA, 25 bp, Homo sapien
tgggaggttctagccattgttgagc

SEQ ID NO: 388527 - DNA, 25 bp, Homo sapien
gtagcctcgggctttcttccacaag

SEQ ID NO: 388528 - DNA, 25 bp, Homo sapien
tcaatgtcagtggtcgcttcttaca

SEQ ID NO: 388529 - DNA, 25 bp, Homo sapien
gatcccgatagattcaggcctcagg

SEQ ID NO: 388530 - DNA, 25 bp, Homo sapien
gcctcaggtagccaaacagggcatc

SEQ ID NO: 388531 - DNA, 25 bp, Homo sapien
caccttgattgagtagaatgccact

SEQ ID NO: 388532 - DNA, 25 bp, Homo sapien
tgaaattggaaccacaacacttggg

SEQ ID NO: 388533 - DNA, 25 bp, Homo sapien
caggttcgtgggtaatattgtcaac

SEQ ID NO: 388534 - DNA, 25 bp, Homo sapien
tctaaaccatagtgaagaattggcc

SEQ ID NO: 388535 - DNA, 25 bp, Homo sapien
aaggagcactgttgccatacacagc

SEQ ID NO: 388536 - DNA, 25 bp, Homo sapien
gctgttgagattcatgtaaacaaag

SEQ ID NO: 388537 - DNA, 25 bp, Homo sapien
tggaaaggagcactgttgccataca

SEQ ID NO: 388538 - DNA, 25 bp, Homo sapien
ccgtgcgtgctaagcagagtttgga

SEQ ID NO: 388539 - DNA, 25 bp, Homo sapien
cactctgggggcttagggaaatacg

SEQ ID NO: 388540 - DNA, 25 bp, Homo sapien
tgaaacggaagtgacaagagcccac

SEQ ID NO: 388541 - DNA, 25 bp, Homo sapien
gaaatgaaacggaagtgacaagagc

SEQ ID NO: 388542 - DNA, 25 bp, Homo sapien
ggaagtgacaagagcccactctggg

SEQ ID NO: 388543 - DNA, 25 bp, Homo sapien
ctcctctagtgggaatgtgctttat

SEQ ID NO: 388544 - DNA, 25 bp, Homo sapien
tttgctcctctagtgggaatgtgct

SEQ ID NO: 388545 - DNA, 25 bp, Homo sapien
cctctagtgggaatgtgctttatgg

SEQ ID NO: 388546 - DNA, 25 bp, Homo sapien
cttttgctcctctagtgggaatgtg

SEQ ID NO: 388547 - DNA, 25 bp, Homo sapien
tgaccgtcattgatgccacacgtgg

SEQ ID NO: 388548 - DNA, 25 bp, Homo sapien
gcttgacaagggcaggtcctttgca

SEQ ID NO: 388549 - DNA, 25 bp, Homo sapien
aggtgggcgttgacagcagtaaatc

SEQ ID NO: 388550 - DNA, 25 bp, Homo sapien
gcagtaaatcctgactgggcagcca

SEQ ID NO: 388551 - DNA, 25 bp, Homo sapien
ggatggaggagcccggaggcccctg

SEQ ID NO: 388552 - DNA, 25 bp, Homo sapien
aggatggaggagcccggaggcccct

SEQ ID NO: 388553 - DNA, 25 bp, Homo sapien
gatggaggagcccggaggcccctgc

SEQ ID NO: 388554 - DNA, 25 bp, Homo sapien
cccagcagcgaggcccccctgtgga

SEQ ID NO: 388555 - DNA, 25 bp, Homo sapien
aatgagatcccaccatgttccacag

SEQ ID NO: 388556 - DNA, 25 bp, Homo sapien
ggacaatgagatcccaccatgttcc

SEQ ID NO: 388557 - DNA, 25 bp, Homo sapien
ccacaggagattcctcgctgggagg

SEQ ID NO: 388558 - DNA, 25 bp, Homo sapien
accatgttccacaggagattcctcg

SEQ ID NO: 388559 - DNA, 25 bp, Homo sapien
tctccccttcctactgagttgccag

SEQ ID NO: 388560 - DNA, 25 bp, Homo sapien
tcctactgagttgccagcacttatg

SEQ ID NO: 388561 - DNA, 25 bp, Homo sapien
actgagttgccagcacttatgaaac

SEQ ID NO: 388562 - DNA, 25 bp, Homo sapien
ccttcctactgagttgccagcactt

SEQ ID NO: 388563 - DNA, 25 bp, Homo sapien
cagatagaggaggttccagccctgc

SEQ ID NO: 388564 - DNA, 25 bp, Homo sapien
tcaacaaacaccatccctactgcag

SEQ ID NO: 388565 - DNA, 25 bp, Homo sapien
tttcttttgagatcctgtgcccctt

SEQ ID NO: 388566 - DNA, 25 bp, Homo sapien
tttgtgtcttatgggaaatcggtgc

SEQ ID NO: 388567 - DNA, 25 bp, Homo sapien
taagctccatttcagttcccccaaa

SEQ ID NO: 388568 - DNA, 25 bp, Homo sapien
agctctgggccaatcacagtgtgtg

SEQ ID NO: 388569 - DNA, 25 bp, Homo sapien
caaagaactctgattgggccagctc

SEQ ID NO: 388570 - DNA, 25 bp, Homo sapien
ccagctctgggccaatcacagtgtg

SEQ ID NO: 388571 - DNA, 25 bp, Homo sapien
gggtgaagatgccacgaagcccatc

SEQ ID NO: 388572 - DNA, 25 bp, Homo sapien
tgaaataaggtctgcccttgtttct

SEQ ID NO: 388573 - DNA, 25 bp, Homo sapien
caagcacggagcactgatgcttggg

SEQ ID NO: 388574 - DNA, 25 bp, Homo sapien
ggccctgttctgtcgttcagaacaa

SEQ ID NO: 388575 - DNA, 25 bp, Homo sapien
tggatttccagaatcaaccgtggga

SEQ ID NO: 388576 - DNA, 25 bp, Homo sapien
tccctgcagatgtggaccttcctgg

SEQ ID NO: 388577 - DNA, 25 bp, Homo sapien
gaagctggcggttgactctcgtaag

SEQ ID NO: 388578 - DNA, 25 bp, Homo sapien
taattacagcgaagtgaagctggcg

SEQ ID NO: 388579 - DNA, 25 bp, Homo sapien
taagtgggaaattccaagcctggac

SEQ ID NO: 388580 - DNA, 25 bp, Homo sapien
aaggctgatcccgtatgaagcccgc

SEQ ID NO: 388581 - DNA, 25 bp, Homo sapien
gacacagggtctgtttgttgaatgc

SEQ ID NO: 388582 - DNA, 25 bp, Homo sapien
tgccatccctgtctgcatgaatgga

SEQ ID NO: 388583 - DNA, 25 bp, Homo sapien
acttctcagagtcctcgtccatcac

SEQ ID NO: 388584 - DNA, 25 bp, Homo sapien
tgttcaaacagaacgaacttctcag

SEQ ID NO: 388585 - DNA, 25 bp, Homo sapien
aaacagaacgaacttctcagagtcc

SEQ ID NO: 388586 - DNA, 25 bp, Homo sapien
tttgttcaaacagaacgaacttctc

SEQ ID NO: 388587 - DNA, 25 bp, Homo sapien
aagggcaggattttgctggagtcca

SEQ ID NO: 388588 - DNA, 25 bp, Homo sapien
tgtaagggcaggattttgctggagt

SEQ ID NO: 388589 - DNA, 25 bp, Homo sapien
tttgtgtaagggcaggattttgctg

SEQ ID NO: 388590 - DNA, 25 bp, Homo sapien
gcaggattttgctggagtccagctt

SEQ ID NO: 388591 - DNA, 25 bp, Homo sapien
tcacaccctgttggagactggctgg

SEQ ID NO: 388592 - DNA, 25 bp, Homo sapien
taccaccaacaatgtggcaagggcc

SEQ ID NO: 388593 - DNA, 25 bp, Homo sapien
acactcaggttaacaaggacaatac

SEQ ID NO: 388594 - DNA, 25 bp, Homo sapien
ggtctggacccttctaagccactga

SEQ ID NO: 388595 - DNA, 25 bp, Homo sapien
gacgtctagctagaagatttacaga

SEQ ID NO: 388596 - DNA, 25 bp, Homo sapien
agggacgtctagctagaagatttac

SEQ ID NO: 388597 - DNA, 25 bp, Homo sapien
gaagatttacagattgggggaacat

SEQ ID NO: 388598 - DNA, 25 bp, Homo sapien
gaagggacgtctagctagaagattt

SEQ ID NO: 388599 - DNA, 25 bp, Homo sapien
ggaatcttggtccaatctctctaca

SEQ ID NO: 388600 - DNA, 25 bp, Homo sapien
tacatcttggtttcctactctgaaa

SEQ ID NO: 388601 - DNA, 25 bp, Homo sapien
cagtccttggaatcttggtccaatc

SEQ ID NO: 388602 - DNA, 25 bp, Homo sapien
tgaaatacgcaggtcacatccatgc

SEQ ID NO: 388603 - DNA, 25 bp, Homo sapien
ttgcgctggttcctttacccggaga

SEQ ID NO: 388604 - DNA, 25 bp, Homo sapien
ttcctttacccggagagcacttcca

SEQ ID NO: 388605 - DNA, 25 bp, Homo sapien
ctggttcctttacccggagagcact

SEQ ID NO: 388606 - DNA, 25 bp, Homo sapien
cgctggttcctttacccggagagca

SEQ ID NO: 388607 - DNA, 25 bp, Homo sapien
tcttaattgtagagccgaagccgtg

SEQ ID NO: 388608 - DNA, 25 bp, Homo sapien
ccctgcacggatgaggaaagggccc

SEQ ID NO: 388609 - DNA, 25 bp, Homo sapien
cttggttcaggtcggccacatcctg

SEQ ID NO: 388610 - DNA, 25 bp, Homo sapien
tcctgtggaatgaaacaccctgcac

SEQ ID NO: 388611 - DNA, 25 bp, Homo sapien
tcacaggatgacagtgcgccgaagt

SEQ ID NO: 388612 - DNA, 25 bp, Homo sapien
tgcgccgaagtccatccccgggctg

SEQ ID NO: 388613 - DNA, 25 bp, Homo sapien
agtcacaggatgacagtgcgccgaa

SEQ ID NO: 388614 - DNA, 25 bp, Homo sapien
acaggatgacagtgcgccgaagtcc

SEQ ID NO: 388615 - DNA, 25 bp, Homo sapien
ggccatagtaatcgcctttgtgcat

SEQ ID NO: 388616 - DNA, 25 bp, Homo sapien
tcaagctgtaggcaaatctcggagg

SEQ ID NO: 388617 - DNA, 25 bp, Homo sapien
ccttggtccagacaagaatcaccca

SEQ ID NO: 388618 - DNA, 25 bp, Homo sapien
ctttgtgcataccttggtccagaca

SEQ ID NO: 388619 - DNA, 25 bp, Homo sapien
gggttgcttagcacttttgactggg

SEQ ID NO: 388620 - DNA, 25 bp, Homo sapien
accggtgcccttttaggcgaggcag

SEQ ID NO: 388621 - DNA, 25 bp, Homo sapien
cagggtgacttccataaccggtgcc

SEQ ID NO: 388622 - DNA, 25 bp, Homo sapien
gctggcgtgcattgaaaggagagat

SEQ ID NO: 388623 - DNA, 25 bp, Homo sapien
gagcaaagctgcaaatgccaaacca

SEQ ID NO: 388624 - DNA, 25 bp, Homo sapien
taggtttctagtgtccatgccagtg

SEQ ID NO: 388625 - DNA, 25 bp, Homo sapien
gaatatgcctgctgccttcgggcag

SEQ ID NO: 388626 - DNA, 25 bp, Homo sapien
cagttaccagggaagtcagagcaaa

SEQ ID NO: 388627 - DNA, 25 bp, Homo sapien
ccatcagccgttatctttgaaggaa

SEQ ID NO: 388628 - DNA, 25 bp, Homo sapien
ttgagtctggttccttgtcttcagg

SEQ ID NO: 388629 - DNA, 25 bp, Homo sapien
cacccatcagccgttatctttgaag

SEQ ID NO: 388630 - DNA, 25 bp, Homo sapien
cttgcacccatcagccgttatcttt

SEQ ID NO: 388631 - DNA, 25 bp, Homo sapien
gcagaaagcagacctacatgtatgg

SEQ ID NO: 388632 - DNA, 25 bp, Homo sapien
tgtccctgcgagagacacattgaag

SEQ ID NO: 388633 - DNA, 25 bp, Homo sapien
tcaacctcggacagaaaagcgcatc

SEQ ID NO: 388634 - DNA, 25 bp, Homo sapien
ttcctgccaaaagcgctagggtctg

SEQ ID NO: 388635 - DNA, 25 bp, Homo sapien
tgcagtgaccgagccacctgggtct

SEQ ID NO: 388636 - DNA, 25 bp, Homo sapien
tttttgaggtcagcgtgactgctgt

SEQ ID NO: 388637 - DNA, 25 bp, Homo sapien
acctgggtctcgtcctcattaagga

SEQ ID NO: 388638 - DNA, 25 bp, Homo sapien
cacagctgggttgcgctgttttcca

SEQ ID NO: 388639 - DNA, 25 bp, Homo sapien
tctccgctcagtagcatttggaccc

SEQ ID NO: 388640 - DNA, 25 bp, Homo sapien
ctctgggccggcacacacactgttc

SEQ ID NO: 388641 - DNA, 25 bp, Homo sapien
actgttcactctgccgagacacctt

SEQ ID NO: 388642 - DNA, 25 bp, Homo sapien
gagacacctttccttctccgctcag

SEQ ID NO: 388643 - DNA, 25 bp, Homo sapien
ctccagccccctctgaagccctccc

SEQ ID NO: 388644 - DNA, 25 bp, Homo sapien
tgcttttttccacaaccctcctgaa

SEQ ID NO: 388645 - DNA, 25 bp, Homo sapien
ctctccagccccctctgaagccctc

SEQ ID NO: 388646 - DNA, 25 bp, Homo sapien
cctgaacttctccagccaccgcagc

SEQ ID NO: 388647 - DNA, 25 bp, Homo sapien
ctggagccttcctggaacagaggct

SEQ ID NO: 388648 - DNA, 25 bp, Homo sapien
tttgtttggagctcagcgggctgtg

SEQ ID NO: 388649 - DNA, 25 bp, Homo sapien
ggagccttcctggaacagaggctac

SEQ ID NO: 388650 - DNA, 25 bp, Homo sapien
gtttggagctcagcgggctgtgtgt

SEQ ID NO: 388651 - DNA, 25 bp, Homo sapien
cagattgtgcaggagcttgtcttca

SEQ ID NO: 388652 - DNA, 25 bp, Homo sapien
caatgggccagattgtgcaggagct

SEQ ID NO: 388653 - DNA, 25 bp, Homo sapien
ttatatccaatgggccagattgtgc

SEQ ID NO: 388654 - DNA, 25 bp, Homo sapien
ggccagattgtgcaggagcttgtct

SEQ ID NO: 388655 - DNA, 25 bp, Homo sapien
tcctgggattagctgacttctgggc

SEQ ID NO: 388656 - DNA, 25 bp, Homo sapien
gacccaatgaaaaagctcttgaaaa

SEQ ID NO: 388657 - DNA, 25 bp, Homo sapien
tctgcccagagccaaggtttgttgc

SEQ ID NO: 388658 - DNA, 25 bp, Homo sapien
tcttgaaaaggtaagaggtctgccc

SEQ ID NO: 388659 - DNA, 25 bp, Homo sapien
cgaggcctgtgtcaacttcagcaga

SEQ ID NO: 388660 - DNA, 25 bp, Homo sapien
acccctgcacaggagcgaggcctgt

SEQ ID NO: 388661 - DNA, 25 bp, Homo sapien
cttcagcagagcgagaatgaggaca

SEQ ID NO: 388662 - DNA, 25 bp, Homo sapien
gaatgggtggaccattgccctgcat

SEQ ID NO: 388663 - DNA, 25 bp, Homo sapien
agatggataaggacaagggtctctg

SEQ ID NO: 388664 - DNA, 25 bp, Homo sapien
tccaccacttagctgcgtgtcatcc

SEQ ID NO: 388665 - DNA, 25 bp, Homo sapien
agaagatggataaggacaagggtct

SEQ ID NO: 388666 - DNA, 25 bp, Homo sapien
taaggacaagggtctctgggttggc

SEQ ID NO: 388667 - DNA, 25 bp, Homo sapien
ttctttttccagctcgagagaacaa

SEQ ID NO: 388668 - DNA, 25 bp, Homo sapien
tttccagctcgagagaacaaagggc

SEQ ID NO: 388669 - DNA, 25 bp, Homo sapien
ttccagctcgagagaacaaagggca

SEQ ID NO: 388670 - DNA, 25 bp, Homo sapien
tttttccagctcgagagaacaaagg

SEQ ID NO: 388671 - DNA, 25 bp, Homo sapien
cagcgttcagagatgcagagcagag

SEQ ID NO: 388672 - DNA, 25 bp, Homo sapien
tccagaaatgtccagcacggggcat

SEQ ID NO: 388673 - DNA, 25 bp, Homo sapien
cggaaatacccaggactgtccgagg

SEQ ID NO: 388674 - DNA, 25 bp, Homo sapien
ggggaggtgccccaacatctgtgtt

SEQ ID NO: 388675 - DNA, 25 bp, Homo sapien
gggctttataaggagcaggtaactg

SEQ ID NO: 388676 - DNA, 25 bp, Homo sapien
tgagtctgtcagtcaggttgcaggt

SEQ ID NO: 388677 - DNA, 25 bp, Homo sapien
aggcaggtacgaggatccctgagtc

SEQ ID NO: 388678 - DNA, 25 bp, Homo sapien
gagcaggtaactggcaaatcacgga

SEQ ID NO: 388679 - DNA, 25 bp, Homo sapien
ttttgcaaatgggaggtcaggctag

SEQ ID NO: 388680 - DNA, 25 bp, Homo sapien
tcagtgttactcataagaagtcata

SEQ ID NO: 388681 - DNA, 25 bp, Homo sapien
aggtcaggctaggtaggaaaagaca

SEQ ID NO: 388682 - DNA, 25 bp, Homo sapien
cttgggagttggaaagtcttggaga

SEQ ID NO: 388683 - DNA, 25 bp, Homo sapien
ctccactggcgtccaagaaacggaa

SEQ ID NO: 388684 - DNA, 25 bp, Homo sapien
caatgttagtaatcccgtcagaagt

SEQ ID NO: 388685 - DNA, 25 bp, Homo sapien
aaacatgcctggtggcctacgtggg

SEQ ID NO: 388686 - DNA, 25 bp, Homo sapien
gcgtccaagaaacggaaatctccca

SEQ ID NO: 388687 - DNA, 25 bp, Homo sapien
gaggaaacaaagtaagtggctggat

SEQ ID NO: 388688 - DNA, 25 bp, Homo sapien
tgggtttaggcaactggtcagcccc

SEQ ID NO: 388689 - DNA, 25 bp, Homo sapien
taagatccggtaaaggcatgacaga

SEQ ID NO: 388690 - DNA, 25 bp, Homo sapien
agttcttgagaacccaggtgagagg

SEQ ID NO: 388691 - DNA, 25 bp, Homo sapien
cagctctacgctcaaatttatttct

SEQ ID NO: 388692 - DNA, 25 bp, Homo sapien
gcagctctacgctcaaatttatttc

SEQ ID NO: 388693 - DNA, 25 bp, Homo sapien
cgcagctctacgctcaaatttattt

SEQ ID NO: 388694 - DNA, 25 bp, Homo sapien
ccgcagctctacgctcaaatttatt

SEQ ID NO: 388695 - DNA, 25 bp, Homo sapien
caaggtctgttttcctgatcggtga

SEQ ID NO: 388696 - DNA, 25 bp, Homo sapien
cgtggtcaccttgcatgtgagagca

SEQ ID NO: 388697 - DNA, 25 bp, Homo sapien
aaggtctgcagctacagtccctgag

SEQ ID NO: 388698 - DNA, 25 bp, Homo sapien
gggtagactgtttgcagcaggcact

SEQ ID NO: 388699 - DNA, 25 bp, Homo sapien
tggatattcccaaccgctctgagtg

SEQ ID NO: 388700 - DNA, 25 bp, Homo sapien
gtttcctggaaagctgtggccacaa

SEQ ID NO: 388701 - DNA, 25 bp, Homo sapien
caaacccaagtacaggtgacccagg

SEQ ID NO: 388702 - DNA, 25 bp, Homo sapien
tgagtgaattccagggaggcatccc

SEQ ID NO: 388703 - DNA, 25 bp, Homo sapien
aggaaacagagtccggcctcgagct

SEQ ID NO: 388704 - DNA, 25 bp, Homo sapien
caggaaacagagtccggcctcgagc

SEQ ID NO: 388705 - DNA, 25 bp, Homo sapien
gaaacagagtccggcctcgagctga

SEQ ID NO: 388706 - DNA, 25 bp, Homo sapien
ggaaacagagtccggcctcgagctg

SEQ ID NO: 388707 - DNA, 25 bp, Homo sapien
gagccaaaagccagaacaagtcgag

SEQ ID NO: 388708 - DNA, 25 bp, Homo sapien
gctgttgcccgacacacaccgttgt

SEQ ID NO: 388709 - DNA, 25 bp, Homo sapien
tccaccccagaacagcccaaattcc

SEQ ID NO: 388710 - DNA, 25 bp, Homo sapien
agtcgaggccgctgctgttgcccga

SEQ ID NO: 388711 - DNA, 25 bp, Homo sapien
gcatgtgaatgaggctttcctgagc

SEQ ID NO: 388712 - DNA, 25 bp, Homo sapien
tccagtgtgcggttgccaagcatgt

SEQ ID NO: 388713 - DNA, 25 bp, Homo sapien
gcttccatggcgcatgccggaggaa

SEQ ID NO: 388714 - DNA, 25 bp, Homo sapien
tgggtccgttcagcccattttgtgg

SEQ ID NO: 388715 - DNA, 25 bp, Homo sapien
tgccctagcgagtgcacaggtctgg

SEQ ID NO: 388716 - DNA, 25 bp, Homo sapien
cgtgccctagcgagtgcacaggtct

SEQ ID NO: 388717 - DNA, 25 bp, Homo sapien
tcgtgccctagcgagtgcacaggtc

SEQ ID NO: 388718 - DNA, 25 bp, Homo sapien
ccctagcgagtgcacaggtctggcc

SEQ ID NO: 388719 - DNA, 25 bp, Homo sapien
ttaacaacagtcgaggctatgactg

SEQ ID NO: 388720 - DNA, 25 bp, Homo sapien
aacaacagtcgaggctatgactgac

SEQ ID NO: 388721 - DNA, 25 bp, Homo sapien
taacaacagtcgaggctatgactga

SEQ ID NO: 388722 - DNA, 25 bp, Homo sapien
tcagccgtggctgccggccaagatg

SEQ ID NO: 388723 - DNA, 25 bp, Homo sapien
ggcttttggccccatgtcctcggca

SEQ ID NO: 388724 - DNA, 25 bp, Homo sapien
caagatggccgcgtgggcagcctca

SEQ ID NO: 388725 - DNA, 25 bp, Homo sapien
tgggcagcctcacattccttctcgg

SEQ ID NO: 388726 - DNA, 25 bp, Homo sapien
ttttcctctgggcgatcatcacctc

SEQ ID NO: 388727 - DNA, 25 bp, Homo sapien
gtcttttcctctgggcgatcatcac

SEQ ID NO: 388728 - DNA, 25 bp, Homo sapien
tctgtttgttgactgtccccttcac

SEQ ID NO: 388729 - DNA, 25 bp, Homo sapien
tcttttcctctgggcgatcatcacc

SEQ ID NO: 388730 - DNA, 25 bp, Homo sapien
tgtcccctgagtacaggaatgcttg

SEQ ID NO: 388731 - DNA, 25 bp, Homo sapien
gcatctttgtgcaaacgtcccgccc

SEQ ID NO: 388732 - DNA, 25 bp, Homo sapien
ccgagaactcgaccctgggctgggc

SEQ ID NO: 388733 - DNA, 25 bp, Homo sapien
tcccctgagtacaggaatgcttgct

SEQ ID NO: 388734 - DNA, 25 bp, Homo sapien
gaagagggtattaatagcaactttc

SEQ ID NO: 388735 - DNA, 25 bp, Homo sapien
gcatctggagaaggccgagcttcct

SEQ ID NO: 388736 - DNA, 25 bp, Homo sapien
catctggagaaggccgagcttcctg

SEQ ID NO: 388737 - DNA, 25 bp, Homo sapien
tgtccttcctccacgacgatgtact

SEQ ID NO: 388738 - DNA, 25 bp, Homo sapien
ccagcgaggtgtgggtctggagcca

SEQ ID NO: 388739 - DNA, 25 bp, Homo sapien
ccatgtggaggctcaaaagagcaga

SEQ ID NO: 388740 - DNA, 25 bp, Homo sapien
aggatgtagctgcaggaatcccagg

SEQ ID NO: 388741 - DNA, 25 bp, Homo sapien
taacatgcagacaaggcatgaaggg

SEQ ID NO: 388742 - DNA, 25 bp, Homo sapien
aaggccctctacacgaacagcgctg

SEQ ID NO: 388743 - DNA, 25 bp, Homo sapien
tattcacgtctctattcctaacatg

SEQ ID NO: 388744 - DNA, 25 bp, Homo sapien
acaaagcgagctgccaaaccaaaca

SEQ ID NO: 388745 - DNA, 25 bp, Homo sapien
agtcaacctgtaggctgaaagtggg

SEQ ID NO: 388746 - DNA, 25 bp, Homo sapien
tcgggatgttgtcagagacaggccc

SEQ ID NO: 388747 - DNA, 25 bp, Homo sapien
gaaatgacgtaggaatcatttccca

SEQ ID NO: 388748 - DNA, 25 bp, Homo sapien
cagagaggatgcaggaaatgacgta

SEQ ID NO: 388749 - DNA, 25 bp, Homo sapien
ctttgcttgtattcgtgtagtaacc

SEQ ID NO: 388750 - DNA, 25 bp, Homo sapien
tattcgtgtagtaacctttgaagac

SEQ ID NO: 388751 - DNA, 25 bp, Homo sapien
ctttgaagactataaaaccgtctat

SEQ ID NO: 388752 - DNA, 25 bp, Homo sapien
ttaagaatggaaactcataggccat

SEQ ID NO: 388753 - DNA, 25 bp, Homo sapien
taggaaccatcggagatgatggaca

SEQ ID NO: 388754 - DNA, 25 bp, Homo sapien
cagggcctggtattgccacagtcca

SEQ ID NO: 388755 - DNA, 25 bp, Homo sapien
gggactctgaggctgtaaccttagg

SEQ ID NO: 388756 - DNA, 25 bp, Homo sapien
taaccttaggaaccatcggagatga

SEQ ID NO: 388757 - DNA, 25 bp, Homo sapien
agagaagactcagatgtcctttcca

SEQ ID NO: 388758 - DNA, 25 bp, Homo sapien
tgcagagaattgttctggagcattt

SEQ ID NO: 388759 - DNA, 25 bp, Homo sapien
ctgcagagaattgttctggagcatt

SEQ ID NO: 388760 - DNA, 25 bp, Homo sapien
aacctccaaacaactcgtcaaccag

SEQ ID NO: 388761 - DNA, 25 bp, Homo sapien
acctccaaacaactcgtcaaccagc

SEQ ID NO: 388762 - DNA, 25 bp, Homo sapien
taacctccaaacaactcgtcaacca

SEQ ID NO: 388763 - DNA, 25 bp, Homo sapien
tgaacagagggaatgccttctgatg

SEQ ID NO: 388764 - DNA, 25 bp, Homo sapien
gcctgtcatcatggctaaggataca

SEQ ID NO: 388765 - DNA, 25 bp, Homo sapien
tctgatgcctgtcatcatggctaag

SEQ ID NO: 388766 - DNA, 25 bp, Homo sapien
agggaatgccttctgatgcctgtca

SEQ ID NO: 388767 - DNA, 25 bp, Homo sapien
agagctgccactggctcggttcaga

SEQ ID NO: 388768 - DNA, 25 bp, Homo sapien
gatttctgtgaaccaaggtggcagg

SEQ ID NO: 388769 - DNA, 25 bp, Homo sapien
ttcactgtgcaatttggctgacggc

SEQ ID NO: 388770 - DNA, 25 bp, Homo sapien
tgtgcaatttggctgacggcctagg

SEQ ID NO: 388771 - DNA, 25 bp, Homo sapien
gtgaaatcttcacgagcagtcctgg

SEQ ID NO: 388772 - DNA, 25 bp, Homo sapien
tcagtgtgaggaactccagacccaa

SEQ ID NO: 388773 - DNA, 25 bp, Homo sapien
gctattataactccctcagtgtgag

SEQ ID NO: 388774 - DNA, 25 bp, Homo sapien
cttgggcaaagccagggttagtgaa

SEQ ID NO: 388775 - DNA, 25 bp, Homo sapien
gaggacagtcccactcatggggccc

SEQ ID NO: 388776 - DNA, 25 bp, Homo sapien
ttacaaagacatagccaaccccagg

SEQ ID NO: 388777 - DNA, 25 bp, Homo sapien
agtcccactcatggggcccctggtt

SEQ ID NO: 388778 - DNA, 25 bp, Homo sapien
cccctggttacaaagacatagccaa

SEQ ID NO: 388779 - DNA, 25 bp, Homo sapien
aatgacattggaatgcgtctttgtg

SEQ ID NO: 388780 - DNA, 25 bp, Homo sapien
cattggaatgcgtctttgtgtggat

SEQ ID NO: 388781 - DNA, 25 bp, Homo sapien
ttgtgtggattctggctactgtcac

SEQ ID NO: 388782 - DNA, 25 bp, Homo sapien
gctactgtcactgcacacttgcagg

SEQ ID NO: 388783 - DNA, 25 bp, Homo sapien
tccacaccaagagaggctacgaata

SEQ ID NO: 388784 - DNA, 25 bp, Homo sapien
gaatcccaagttgcggctgtcacag

SEQ ID NO: 388785 - DNA, 25 bp, Homo sapien
gacaggtcaccgagaaattctagct

SEQ ID NO: 388786 - DNA, 25 bp, Homo sapien
gaatatgggcctcgcaaagggcaga

SEQ ID NO: 388787 - DNA, 25 bp, Homo sapien
tcccccctgttggtgggtgtccgca

SEQ ID NO: 388788 - DNA, 25 bp, Homo sapien
ccttcagaaaccaccgagagagaca

SEQ ID NO: 388789 - DNA, 25 bp, Homo sapien
aggtagtgctgacgggctgtgtccc

SEQ ID NO: 388790 - DNA, 25 bp, Homo sapien
tgggctgagcagtaagtggtccttc

SEQ ID NO: 388791 - DNA, 25 bp, Homo sapien
catggggatgcaggaagttcgtccc

SEQ ID NO: 388792 - DNA, 25 bp, Homo sapien
ccaggggcacatggggatgcaggaa

SEQ ID NO: 388793 - DNA, 25 bp, Homo sapien
acatggggatgcaggaagttcgtcc

SEQ ID NO: 388794 - DNA, 25 bp, Homo sapien
cttggttgaccttgactggctcgga

SEQ ID NO: 388795 - DNA, 25 bp, Homo sapien
tgagaaagacgtgtcctctctgaga

SEQ ID NO: 388796 - DNA, 25 bp, Homo sapien
gagaaggctccgcatccctctacat

SEQ ID NO: 388797 - DNA, 25 bp, Homo sapien
tgtgtggcacactgggacactccat

SEQ ID NO: 388798 - DNA, 25 bp, Homo sapien
tgctgagggactaacagtctgcttt

SEQ ID NO: 388799 - DNA, 25 bp, Homo sapien
gccctgctgagggactaacagtctg

SEQ ID NO: 388800 - DNA, 25 bp, Homo sapien
tctgccctgctgagggactaacagt

SEQ ID NO: 388801 - DNA, 25 bp, Homo sapien
cctgctgagggactaacagtctgct

SEQ ID NO: 388802 - DNA, 25 bp, Homo sapien
gggagtgacggaatgaagtacaaat

SEQ ID NO: 388803 - DNA, 25 bp, Homo sapien
ctggggagtgacggaatgaagtaca

SEQ ID NO: 388804 - DNA, 25 bp, Homo sapien
tggggagtgacggaatgaagtacaa

SEQ ID NO: 388805 - DNA, 25 bp, Homo sapien
ggagtgacggaatgaagtacaaatg

SEQ ID NO: 388806 - DNA, 25 bp, Homo sapien
ggtagatgcagtcacggcagacaca

SEQ ID NO: 388807 - DNA, 25 bp, Homo sapien
tccaggcaagggtgaattcgctcct

SEQ ID NO: 388808 - DNA, 25 bp, Homo sapien
aaatggagcttacagccccagaggg

SEQ ID NO: 388809 - DNA, 25 bp, Homo sapien
tcccgaagagtgatttcccgaagct

SEQ ID NO: 388810 - DNA, 25 bp, Homo sapien
cataagcaggtatacacatgtgcgt

SEQ ID NO: 388811 - DNA, 25 bp, Homo sapien
gattctagtcttcgtaagtgcgcct

SEQ ID NO: 388812 - DNA, 25 bp, Homo sapien
catgtttgtccattgccggctgcgg

SEQ ID NO: 388813 - DNA, 25 bp, Homo sapien
tgaagcctgtgacgcagccaagtgt

SEQ ID NO: 388814 - DNA, 25 bp, Homo sapien
cccacactctctgactgcgtccttc

SEQ ID NO: 388815 - DNA, 25 bp, Homo sapien
aacatagggtaggagcagcgtcctc

SEQ ID NO: 388816 - DNA, 25 bp, Homo sapien
atgccccccaacatagggtaggagc

SEQ ID NO: 388817 - DNA, 25 bp, Homo sapien
atgactgaagctcttcttctcttct

SEQ ID NO: 388818 - DNA, 25 bp, Homo sapien
agctgttggtcctggatccggttca

SEQ ID NO: 388819 - DNA, 25 bp, Homo sapien
cagagtgctgtctcaagctgttggt

SEQ ID NO: 388820 - DNA, 25 bp, Homo sapien
tttgagcctcagacgtcaacttggg

SEQ ID NO: 388821 - DNA, 25 bp, Homo sapien
aattagctgtagaccctccggatgg

SEQ ID NO: 388822 - DNA, 25 bp, Homo sapien
aaaactttgcaaaagacaccgactg

SEQ ID NO: 388823 - DNA, 25 bp, Homo sapien
gagggtccgttctccctcagctgga

SEQ ID NO: 388824 - DNA, 25 bp, Homo sapien
gacaccgactgcacggagccactgt

SEQ ID NO: 388825 - DNA, 25 bp, Homo sapien
tgcagaggatgcacacggtggaaaa

SEQ ID NO: 388826 - DNA, 25 bp, Homo sapien
gagctgtggcccacggttggagggc

SEQ ID NO: 388827 - DNA, 25 bp, Homo sapien
tggcccacggttggagggcccactc

SEQ ID NO: 388828 - DNA, 25 bp, Homo sapien
gttggagggcccactcgccaacggc

SEQ ID NO: 388829 - DNA, 25 bp, Homo sapien
acgagctgtggcccacggttggagg

SEQ ID NO: 388830 - DNA, 25 bp, Homo sapien
cagtcggctgcgttctaggctgatg

SEQ ID NO: 388831 - DNA, 25 bp, Homo sapien
tccttaggataagccttgggatttc

SEQ ID NO: 388832 - DNA, 25 bp, Homo sapien
gccattgactagtgactttctgttc

SEQ ID NO: 388833 - DNA, 25 bp, Homo sapien
tctgttatgtgctgcccggctcatg

SEQ ID NO: 388834 - DNA, 25 bp, Homo sapien
tctggaccccctggcatggtctctg

SEQ ID NO: 388835 - DNA, 25 bp, Homo sapien
ctggtgagacctgggtgagctttgc

SEQ ID NO: 388836 - DNA, 25 bp, Homo sapien
cacatcagaagcagtaggtgacccg

SEQ ID NO: 388837 - DNA, 25 bp, Homo sapien
tctgggagcttcagctgtcacatca

SEQ ID NO: 388838 - DNA, 25 bp, Homo sapien
gccttgcacgtgcagcctgaggtct

SEQ ID NO: 388839 - DNA, 25 bp, Homo sapien
tgcacgtgcagcctgaggtctgccc

SEQ ID NO: 388840 - DNA, 25 bp, Homo sapien
cagcctgaggtctgcccacgggctc

SEQ ID NO: 388841 - DNA, 25 bp, Homo sapien
ccttggccttgcacgtgcagcctga

SEQ ID NO: 388842 - DNA, 25 bp, Homo sapien
cttggcagacttcagttatcttggt

SEQ ID NO: 388843 - DNA, 25 bp, Homo sapien
gacttcagttatcttggtgtttgac

SEQ ID NO: 388844 - DNA, 25 bp, Homo sapien
ggaggggatgaactgatctatgaca

SEQ ID NO: 388845 - DNA, 25 bp, Homo sapien
gtttgacacgatggcatcagtgccc

SEQ ID NO: 388846 - DNA, 25 bp, Homo sapien
ttccttccgatggatccaccgaggg

SEQ ID NO: 388847 - DNA, 25 bp, Homo sapien
gacgcatccccaggttaccaaggaa

SEQ ID NO: 388848 - DNA, 25 bp, Homo sapien
ctttgcaggtggtagaagacttgtc

SEQ ID NO: 388849 - DNA, 25 bp, Homo sapien
ggtagaagacttgtcacttcccctc

SEQ ID NO: 388850 - DNA, 25 bp, Homo sapien
tacagagatattcgagcactgtcct

SEQ ID NO: 388851 - DNA, 25 bp, Homo sapien
ggcaagaaggccactacagagatat

SEQ ID NO: 388852 - DNA, 25 bp, Homo sapien
gccactacagagatattcgagcact

SEQ ID NO: 388853 - DNA, 25 bp, Homo sapien
gatattcgagcactgtccttgtgct

SEQ ID NO: 388854 - DNA, 25 bp, Homo sapien
aggccaaggcggattcttcctcagg

SEQ ID NO: 388855 - DNA, 25 bp, Homo sapien
caatttcctctactctatgcccggg

SEQ ID NO: 388856 - DNA, 25 bp, Homo sapien
tctgtgctccaaccatcgaggtgtg

SEQ ID NO: 388857 - DNA, 25 bp, Homo sapien
tgacttgactccctgcatgctgtac

SEQ ID NO: 388858 - DNA, 25 bp, Homo sapien
tttggaagctttggactgagagcca

SEQ ID NO: 388859 - DNA, 25 bp, Homo sapien
gacgtggagtcccttcgcagaaaag

SEQ ID NO: 388860 - DNA, 25 bp, Homo sapien
tgcctccgtcaaagccgctgtgtaa

SEQ ID NO: 388861 - DNA, 25 bp, Homo sapien
gaaaagaaactctccacataggagc

SEQ ID NO: 388862 - DNA, 25 bp, Homo sapien
ttgcttcggcctccgcagcaccttg

SEQ ID NO: 388863 - DNA, 25 bp, Homo sapien
gaaccccaaggctcagagcttgctg

SEQ ID NO: 388864 - DNA, 25 bp, Homo sapien
aacgcagatggaaccccaaggctca

SEQ ID NO: 388865 - DNA, 25 bp, Homo sapien
tagacggcaccagttcaacgcagat

SEQ ID NO: 388866 - DNA, 25 bp, Homo sapien
cagaagaatctatggaaggtggtac

SEQ ID NO: 388867 - DNA, 25 bp, Homo sapien
acagaagaatctatggaaggtggta

SEQ ID NO: 388868 - DNA, 25 bp, Homo sapien
gaacagaagaatctatggaaggtgg

SEQ ID NO: 388869 - DNA, 25 bp, Homo sapien
tgggaacagaagaatctatggaagg

SEQ ID NO: 388870 - DNA, 25 bp, Homo sapien
cttgttgggcagacacaggtctccc

SEQ ID NO: 388871 - DNA, 25 bp, Homo sapien
ttgggcagacacaggtctccccgct

SEQ ID NO: 388872 - DNA, 25 bp, Homo sapien
tgttgggcagacacaggtctccccg

SEQ ID NO: 388873 - DNA, 25 bp, Homo sapien
tgggcagacacaggtctccccgcta

SEQ ID NO: 388874 - DNA, 25 bp, Homo sapien
gcgagaggatgaggagcgcggcccg

SEQ ID NO: 388875 - DNA, 25 bp, Homo sapien
cactcattcagcaagggcttagcga

SEQ ID NO: 388876 - DNA, 25 bp, Homo sapien
ttcagcaagggcttagcgagaggat

SEQ ID NO: 388877 - DNA, 25 bp, Homo sapien
gggagctcccgttctcagcccacac

SEQ ID NO: 388878 - DNA, 25 bp, Homo sapien
caattgcagtctacatcttccttga

SEQ ID NO: 388879 - DNA, 25 bp, Homo sapien
cttccttgatcatgatccatgggcc

SEQ ID NO: 388880 - DNA, 25 bp, Homo sapien
cactggctgtgtatcacaattgcag

SEQ ID NO: 388881 - DNA, 25 bp, Homo sapien
cacaggcacgttttcttgggcaatg

SEQ ID NO: 388882 - DNA, 25 bp, Homo sapien
ttagttgtgcattataatagtgcac

SEQ ID NO: 388883 - DNA, 25 bp, Homo sapien
tagtgcactggctatgtactgccat

SEQ ID NO: 388884 - DNA, 25 bp, Homo sapien
cacagtagtgcactggctatgtact

SEQ ID NO: 388885 - DNA, 25 bp, Homo sapien
tataatagtgcactggcggtgtatt

SEQ ID NO: 388886 - DNA, 25 bp, Homo sapien
ggttgaggtcgcagcatcttgagcc

SEQ ID NO: 388887 - DNA, 25 bp, Homo sapien
ctcaggaaacatgcggtgcagccct

SEQ ID NO: 388888 - DNA, 25 bp, Homo sapien
tcttgagcccaggtcaagctccttg

SEQ ID NO: 388889 - DNA, 25 bp, Homo sapien
caaagcctgacaatgttctgacagc

SEQ ID NO: 388890 - DNA, 25 bp, Homo sapien
ctgactggcactgaagccgcctccc

SEQ ID NO: 388891 - DNA, 25 bp, Homo sapien
cctgactggcactgaagccgcctcc

SEQ ID NO: 388892 - DNA, 25 bp, Homo sapien
actggcactgaagccgcctccccat

SEQ ID NO: 388893 - DNA, 25 bp, Homo sapien
tgactggcactgaagccgcctcccc

SEQ ID NO: 388894 - DNA, 25 bp, Homo sapien
gggaacagtcattaggtagtaagtg

SEQ ID NO: 388895 - DNA, 25 bp, Homo sapien
ggaaaaagatgcatctaaagcccag

SEQ ID NO: 388896 - DNA, 25 bp, Homo sapien
gtgttcgctggagaatggaacagct

SEQ ID NO: 388897 - DNA, 25 bp, Homo sapien
gatgcatctaaagcccaggaagtgc

SEQ ID NO: 388898 - DNA, 25 bp, Homo sapien
actgtcttgtgaaaagggtcagcat

SEQ ID NO: 388899 - DNA, 25 bp, Homo sapien
ttcagcactgtcttgtgaaaagggt

SEQ ID NO: 388900 - DNA, 25 bp, Homo sapien
tgtcttgtgaaaagggtcagcattt

SEQ ID NO: 388901 - DNA, 25 bp, Homo sapien
ctttcagcactgtcttgtgaaaagg

SEQ ID NO: 388902 - DNA, 25 bp, Homo sapien
acacgtgtgttattgtctcctgtct

SEQ ID NO: 388903 - DNA, 25 bp, Homo sapien
cacacgtgtgttattgtctcctgtc

SEQ ID NO: 388904 - DNA, 25 bp, Homo sapien
acgtgtgttattgtctcctgtcttc

SEQ ID NO: 388905 - DNA, 25 bp, Homo sapien
cacgtgtgttattgtctcctgtctt

SEQ ID NO: 388906 - DNA, 25 bp, Homo sapien
acagtgaaaaagctgggatggaagt

SEQ ID NO: 388907 - DNA, 25 bp, Homo sapien
ggatggaagtgaggctttcttcacc

SEQ ID NO: 388908 - DNA, 25 bp, Homo sapien
tactcgtggggaacagtgaaaaagc

SEQ ID NO: 388909 - DNA, 25 bp, Homo sapien
gaggctttcttcaccacatcgatgg

SEQ ID NO: 388910 - DNA, 25 bp, Homo sapien
gctctgaggagtccatgcggctctc

SEQ ID NO: 388911 - DNA, 25 bp, Homo sapien
ctggttggaaacctggaggctctga

SEQ ID NO: 388912 - DNA, 25 bp, Homo sapien
gaggctctgaggagtccatgcggct

SEQ ID NO: 388913 - DNA, 25 bp, Homo sapien
ggttctgggtgtgaagcatgagcat

SEQ ID NO: 388914 - DNA, 25 bp, Homo sapien
gctgtcagaccgtccccaatctctt

SEQ ID NO: 388915 - DNA, 25 bp, Homo sapien
ggccatggctctgatgaaggatgcc

SEQ ID NO: 388916 - DNA, 25 bp, Homo sapien
aagtttctattttccagcagctcca

SEQ ID NO: 388917 - DNA, 25 bp, Homo sapien
aaggatgccgtgctgtcagaccgtc

SEQ ID NO: 388918 - DNA, 25 bp, Homo sapien
tatctgaaccttatagccacattcc

SEQ ID NO: 388919 - DNA, 25 bp, Homo sapien
ttatctgaaccttatagccacattc

SEQ ID NO: 388920 - DNA, 25 bp, Homo sapien
atgcttatctgaaccttatagccac

SEQ ID NO: 388921 - DNA, 25 bp, Homo sapien
gcttatctgaaccttatagccacat

SEQ ID NO: 388922 - DNA, 25 bp, Homo sapien
tgagcattgctgtgacgcctcagga

SEQ ID NO: 388923 - DNA, 25 bp, Homo sapien
gacgcctcaggaatccaatgcgtgt

SEQ ID NO: 388924 - DNA, 25 bp, Homo sapien
ccaatgcgtgttctcagatgtctga

SEQ ID NO: 388925 - DNA, 25 bp, Homo sapien
gtgttctcagatgtctgagtgctgg

SEQ ID NO: 388926 - DNA, 25 bp, Homo sapien
tctccattgggtcagatgtggggct

SEQ ID NO: 388927 - DNA, 25 bp, Homo sapien
tgccttgcaagtactctgaacaggg

SEQ ID NO: 388928 - DNA, 25 bp, Homo sapien
gaacaggggtgtctccattgggtca

SEQ ID NO: 388929 - DNA, 25 bp, Homo sapien
tttataacaagcacctgcttcttgg

SEQ ID NO: 388930 - DNA, 25 bp, Homo sapien
ccaacttcaggagatactgggcctg

SEQ ID NO: 388931 - DNA, 25 bp, Homo sapien
tggagatgttggacttctctctttg

SEQ ID NO: 388932 - DNA, 25 bp, Homo sapien
gggccccagaatgggcaggcagcat

SEQ ID NO: 388933 - DNA, 25 bp, Homo sapien
agatgttggacttctctctttggcc

SEQ ID NO: 388934 - DNA, 25 bp, Homo sapien
cctggcagttctggcagtccaggtt

SEQ ID NO: 388935 - DNA, 25 bp, Homo sapien
ctggcagtccaggttggtttctcgg

SEQ ID NO: 388936 - DNA, 25 bp, Homo sapien
aggcctggcagttctggcagtccag

SEQ ID NO: 388937 - DNA, 25 bp, Homo sapien
tggcagtccaggttggtttctcggc

SEQ ID NO: 388938 - DNA, 25 bp, Homo sapien
ctggaaaggaaattcaaggtcatgt

SEQ ID NO: 388939 - DNA, 25 bp, Homo sapien
gaaaggaaattcaaggtcatgtggg

SEQ ID NO: 388940 - DNA, 25 bp, Homo sapien
tggaaaggaaattcaaggtcatgtg

SEQ ID NO: 388941 - DNA, 25 bp, Homo sapien
ggaaaggaaattcaaggtcatgtgg

SEQ ID NO: 388942 - DNA, 25 bp, Homo sapien
cgtccagaacgtgtttcctgctgca

SEQ ID NO: 388943 - DNA, 25 bp, Homo sapien
catagagcatggctctaagttctac

SEQ ID NO: 388944 - DNA, 25 bp, Homo sapien
ggctctaagttctactctcaagttg

SEQ ID NO: 388945 - DNA, 25 bp, Homo sapien
tgtctgaattcaaaagtcttcgtcc

SEQ ID NO: 388946 - DNA, 25 bp, Homo sapien
gatgccatggttctggggccctaca

SEQ ID NO: 388947 - DNA, 25 bp, Homo sapien
ggccctacagctggaataacccaga

SEQ ID NO: 388948 - DNA, 25 bp, Homo sapien
tatgggcacatggagtcccccctgg

SEQ ID NO: 388949 - DNA, 25 bp, Homo sapien
ccctggccctgatggcacagaggat

SEQ ID NO: 388950 - DNA, 25 bp, Homo sapien
gttgatttgactttgcccaaggcta

SEQ ID NO: 388951 - DNA, 25 bp, Homo sapien
gctggttgatttgactttgcccaag

SEQ ID NO: 388952 - DNA, 25 bp, Homo sapien
agagccagctggttgatttgacttt

SEQ ID NO: 388953 - DNA, 25 bp, Homo sapien
ccagctggttgatttgactttgccc

SEQ ID NO: 388954 - DNA, 25 bp, Homo sapien
gatgaaagtgcgatcattttgatta

SEQ ID NO: 388955 - DNA, 25 bp, Homo sapien
aaacgaagggagatgaaagtgcgat

SEQ ID NO: 388956 - DNA, 25 bp, Homo sapien
tagtgaaattccagggtgatgtcac

SEQ ID NO: 388957 - DNA, 25 bp, Homo sapien
taaaagtaatccagggttatcggca

SEQ ID NO: 388958 - DNA, 25 bp, Homo sapien
cattccaaatgatactggctgcata

SEQ ID NO: 388959 - DNA, 25 bp, Homo sapien
cagcgtagatcaaaattgtgaaccc

SEQ ID NO: 388960 - DNA, 25 bp, Homo sapien
taaatgagatctatcagatgtctgc

SEQ ID NO: 388961 - DNA, 25 bp, Homo sapien
gctgcataatcaggtgtcaaggcac

SEQ ID NO: 388962 - DNA, 25 bp, Homo sapien
ttgacaatgcaacaatctagttttc

SEQ ID NO: 388963 - DNA, 25 bp, Homo sapien
agggaccacttctagagttgaccaa

SEQ ID NO: 388964 - DNA, 25 bp, Homo sapien
tgcaggtgatcaggacaggtacagc

SEQ ID NO: 388965 - DNA, 25 bp, Homo sapien
gtgatcaggacaggtacagcacagg

SEQ ID NO: 388966 - DNA, 25 bp, Homo sapien
tacagcacaggcagcgacagtgtga

SEQ ID NO: 388967 - DNA, 25 bp, Homo sapien
ctttgcaggtgatcaggacaggtac

SEQ ID NO: 388968 - DNA, 25 bp, Homo sapien
gactgagccatcactatcgctggga

SEQ ID NO: 388969 - DNA, 25 bp, Homo sapien
gcaatacgagagagtacagggctca

SEQ ID NO: 388970 - DNA, 25 bp, Homo sapien
gaaaaggtggttgcaagatcaaggc

SEQ ID NO: 388971 - DNA, 25 bp, Homo sapien
tgggattccgcagtccatcattgag

SEQ ID NO: 388972 - DNA, 25 bp, Homo sapien
actggccaaagacttgaccactcca

SEQ ID NO: 388973 - DNA, 25 bp, Homo sapien
cactggccaaagacttgaccactcc

SEQ ID NO: 388974 - DNA, 25 bp, Homo sapien
ctggccaaagacttgaccactccaa

SEQ ID NO: 388975 - DNA, 25 bp, Homo sapien
tggccaaagacttgaccactccaag

SEQ ID NO: 388976 - DNA, 25 bp, Homo sapien
tctcaggtagtttagggattccatt

SEQ ID NO: 388977 - DNA, 25 bp, Homo sapien
gaacacgtacatgaaaatgtttgcc

SEQ ID NO: 388978 - DNA, 25 bp, Homo sapien
ctgtaatctcaggtagtttagggat

SEQ ID NO: 388979 - DNA, 25 bp, Homo sapien
ctaaaaaaattggaacacgtacatg

SEQ ID NO: 388980 - DNA, 25 bp, Homo sapien
ttgacaaaaagcgtggaacttgact

SEQ ID NO: 388981 - DNA, 25 bp, Homo sapien
ctatgttgcagaagatcaacagtat

SEQ ID NO: 388982 - DNA, 25 bp, Homo sapien
tgcagaagatcaacagtatcagtgg

SEQ ID NO: 388983 - DNA, 25 bp, Homo sapien
aagcgtggaacttgacttttcaggt

SEQ ID NO: 388984 - DNA, 25 bp, Homo sapien
ggtgtgtgtggttctcgcgtggatc

SEQ ID NO: 388985 - DNA, 25 bp, Homo sapien
ggtctccgtgaagccgcggcgtcca

SEQ ID NO: 388986 - DNA, 25 bp, Homo sapien
tggcagccgcgacggcgcctaaggc

SEQ ID NO: 388987 - DNA, 25 bp, Homo sapien
cgcagctggaaggtgcgcgggcctg

SEQ ID NO: 388988 - DNA, 25 bp, Homo sapien
ggtgaaggcgccgtgccgagctggg

SEQ ID NO: 388989 - DNA, 25 bp, Homo sapien
gtgaaggcgccgtgccgagctggga

SEQ ID NO: 388990 - DNA, 25 bp, Homo sapien
ttcggagaggtggtgaaggcgccgt

SEQ ID NO: 388991 - DNA, 25 bp, Homo sapien
agaggtggtgaaggcgccgtgccga

SEQ ID NO: 388992 - DNA, 25 bp, Homo sapien
aggaaaatggaaacggacgatgagg

SEQ ID NO: 388993 - DNA, 25 bp, Homo sapien
tcccggacgccacggccagcggcgc

SEQ ID NO: 388994 - DNA, 25 bp, Homo sapien
acgatgaggggacggccccacagct

SEQ ID NO: 388995 - DNA, 25 bp, Homo sapien
ttccgctaccgccacgaacggaggc

SEQ ID NO: 388996 - DNA, 25 bp, Homo sapien
ctgggcagtcgaaatttggagcggg

SEQ ID NO: 388997 - DNA, 25 bp, Homo sapien
aatttggagcgggtgctcagtacac

SEQ ID NO: 388998 - DNA, 25 bp, Homo sapien
gagcgggtgctcagtacactaatgc

SEQ ID NO: 388999 - DNA, 25 bp, Homo sapien
agtacactaatgctaccccagtctc

SEQ ID NO: 389000 - DNA, 25 bp, Homo sapien
ggatatccagtttcctaagctctta

SEQ ID NO: 389001 - DNA, 25 bp, Homo sapien
tacttaccttcgtgactactgacaa

SEQ ID NO: 389002 - DNA, 25 bp, Homo sapien
cataatagaccagttaacccaggag

SEQ ID NO: 389003 - DNA, 25 bp, Homo sapien
caggcgatgtcatgtatttcggtac

SEQ ID NO: 389004 - DNA, 25 bp, Homo sapien
tgtgtgcagaatttaaatcatggcc

SEQ ID NO: 389005 - DNA, 25 bp, Homo sapien
aactcggtgaagactattttatgca

SEQ ID NO: 389006 - DNA, 25 bp, Homo sapien
gcctaaacttattgtaactgcatga

SEQ ID NO: 389007 - DNA, 25 bp, Homo sapien
tcttcatcatggaactgtgaaatca

SEQ ID NO: 389008 - DNA, 25 bp, Homo sapien
gctccttttgtagtatactttcatc

SEQ ID NO: 389009 - DNA, 25 bp, Homo sapien
ttttttagcataagccagaatattc

SEQ ID NO: 389010 - DNA, 25 bp, Homo sapien
ccagaatattctaacctactaagtc

SEQ ID NO: 389011 - DNA, 25 bp, Homo sapien
agccagaatattctaacctactaag

SEQ ID NO: 389012 - DNA, 25 bp, Homo sapien
aagaggcaggtcttaatcagttaga

SEQ ID NO: 389013 - DNA, 25 bp, Homo sapien
cattgtggcctgtactaggattaga

SEQ ID NO: 389014 - DNA, 25 bp, Homo sapien
tggtcgtggtataacaaagaagtgt

SEQ ID NO: 389015 - DNA, 25 bp, Homo sapien
gaccacttgatatgactaattcagg

SEQ ID NO: 389016 - DNA, 25 bp, Homo sapien
ccagtcagctcttgtacagacatgt

SEQ ID NO: 389017 - DNA, 25 bp, Homo sapien
cagctcttgtacagacatgtgctct

SEQ ID NO: 389018 - DNA, 25 bp, Homo sapien
gggttcctcccagtcagctcttgta

SEQ ID NO: 389019 - DNA, 25 bp, Homo sapien
tcctcccagtcagctcttgtacaga

SEQ ID NO: 389020 - DNA, 25 bp, Homo sapien
agaaaaagttcagaaggttggcatt

SEQ ID NO: 389021 - DNA, 25 bp, Homo sapien
cagaaggttggcattggtggtttca

SEQ ID NO: 389022 - DNA, 25 bp, Homo sapien
aaagttcagaaggttggcattggtg

SEQ ID NO: 389023 - DNA, 25 bp, Homo sapien
ctgtactcatctgcccttcagtcag

SEQ ID NO: 389024 - DNA, 25 bp, Homo sapien
tctaaatgtgaatcagtccttggac

SEQ ID NO: 389025 - DNA, 25 bp, Homo sapien
gaggcagtccaattgacctaactga

SEQ ID NO: 389026 - DNA, 25 bp, Homo sapien
gagatgaccagtatatagagcctag

SEQ ID NO: 389027 - DNA, 25 bp, Homo sapien
tagagcctagatggactgtagcagc

SEQ ID NO: 389028 - DNA, 25 bp, Homo sapien
tagagagctatcaccatttcagaac

SEQ ID NO: 389029 - DNA, 25 bp, Homo sapien
gataggtgggaaacctcctctcatt

SEQ ID NO: 389030 - DNA, 25 bp, Homo sapien
aaaactggtgatagatgtcaaatcc

SEQ ID NO: 389031 - DNA, 25 bp, Homo sapien
gacattatcaactgagataggtggg

SEQ ID NO: 389032 - DNA, 25 bp, Homo sapien
tacttgataggttatgctactccag

SEQ ID NO: 389033 - DNA, 25 bp, Homo sapien
cccatctgtattccaattgtagagg

SEQ ID NO: 389034 - DNA, 25 bp, Homo sapien
tactgcttccatgtgcaatcctaag

SEQ ID NO: 389035 - DNA, 25 bp, Homo sapien
gaaatagaggaattcgtgtgcctta

SEQ ID NO: 389036 - DNA, 25 bp, Homo sapien
tctactgaagttaagagcattccca

SEQ ID NO: 389037 - DNA, 25 bp, Homo sapien
gaatgctctatataaaacttgtgtg

SEQ ID NO: 389038 - DNA, 25 bp, Homo sapien
tgctctgagttaacctggtagccag

SEQ ID NO: 389039 - DNA, 25 bp, Homo sapien
gttccctcattgtaaacgtgctctg

SEQ ID NO: 389040 - DNA, 25 bp, Homo sapien
tgcatcaggcctttgttatcacaga

SEQ ID NO: 389041 - DNA, 25 bp, Homo sapien
tctgtcacacaattaagctagtcgg

SEQ ID NO: 389042 - DNA, 25 bp, Homo sapien
caccagaatacctgaggagaccagc

SEQ ID NO: 389043 - DNA, 25 bp, Homo sapien
cacacgtgtgggttgatcagtattc

SEQ ID NO: 389044 - DNA, 25 bp, Homo sapien
tgtactgctagaagtgtcatttggg

SEQ ID NO: 389045 - DNA, 25 bp, Homo sapien
ctgtggtaaaaaccctagtatgtag

SEQ ID NO: 389046 - DNA, 25 bp, Homo sapien
actacagatagtcccacacttgaca

SEQ ID NO: 389047 - DNA, 25 bp, Homo sapien
ttctcctggttatgggcagttaggt

SEQ ID NO: 389048 - DNA, 25 bp, Homo sapien
gcatcaccacacccggctaattttt

SEQ ID NO: 389049 - DNA, 25 bp, Homo sapien
ttcacctcctgggttcaagcgattc

SEQ ID NO: 389050 - DNA, 25 bp, Homo sapien
gtcttggctcactgctaccttcacc

SEQ ID NO: 389051 - DNA, 25 bp, Homo sapien
catcaccacacccggctaatttttt

SEQ ID NO: 389052 - DNA, 25 bp, Homo sapien
gtttgtcttgatccaataacggtag

SEQ ID NO: 389053 - DNA, 25 bp, Homo sapien
aaggagaacggcagctagctatctg

SEQ ID NO: 389054 - DNA, 25 bp, Homo sapien
gatgtggtgatcattgcccatgaca

SEQ ID NO: 389055 - DNA, 25 bp, Homo sapien
gcctaggattcaggcacgtagtttg

SEQ ID NO: 389056 - DNA, 25 bp, Homo sapien
gaagtgagatgtaccttgatacatg

SEQ ID NO: 389057 - DNA, 25 bp, Homo sapien
ggcttagccagaaattgatctgctt

SEQ ID NO: 389058 - DNA, 25 bp, Homo sapien
caatttcagtaaccttgggctgggt

SEQ ID NO: 389059 - DNA, 25 bp, Homo sapien
agtatttgggttatgcggcttagcc

SEQ ID NO: 389060 - DNA, 25 bp, Homo sapien
gtgcagcctcggctcactgcactgc

SEQ ID NO: 389061 - DNA, 25 bp, Homo sapien
ttttcttcttggcattcttatttaa

SEQ ID NO: 389062 - DNA, 25 bp, Homo sapien
tcttcttggcattcttatttaatta

SEQ ID NO: 389063 - DNA, 25 bp, Homo sapien
cttcttggcattcttatttaattat

SEQ ID NO: 389064 - DNA, 25 bp, Homo sapien
tagacacatgagattgtagcacgga

SEQ ID NO: 389065 - DNA, 25 bp, Homo sapien
cctgtggtaaatactaggtagtcac

SEQ ID NO: 389066 - DNA, 25 bp, Homo sapien
tagcacggaatcctaaaatcctagg

SEQ ID NO: 389067 - DNA, 25 bp, Homo sapien
tagacgttcttaagctcatgagcct

SEQ ID NO: 389068 - DNA, 25 bp, Homo sapien
tcaaatgagggtaattatatccatc

SEQ ID NO: 389069 - DNA, 25 bp, Homo sapien
caccttactgtgtaatggaacacca

SEQ ID NO: 389070 - DNA, 25 bp, Homo sapien
catatatgcattgtataaggatcaa

SEQ ID NO: 389071 - DNA, 25 bp, Homo sapien
cacattgttatttgctgtactcacc

SEQ ID NO: 389072 - DNA, 25 bp, Homo sapien
tttgtactggtaccccaggaggatg

SEQ ID NO: 389073 - DNA, 25 bp, Homo sapien
tacttgtgtcaagctccatgtcgtt

SEQ ID NO: 389074 - DNA, 25 bp, Homo sapien
tagaactggccagaccttagaagag

SEQ ID NO: 389075 - DNA, 25 bp, Homo sapien
cttcagcaagctgccctagggtagg

SEQ ID NO: 389076 - DNA, 25 bp, Homo sapien
tcttagttccgtgccagactggttt

SEQ ID NO: 389077 - DNA, 25 bp, Homo sapien
tgtggcactaatcaggacactgttt

SEQ ID NO: 389078 - DNA, 25 bp, Homo sapien
gatgtgatgctactcttagctgcac

SEQ ID NO: 389079 - DNA, 25 bp, Homo sapien
tacatgtggctaaactgctaatggg

SEQ ID NO: 389080 - DNA, 25 bp, Homo sapien
tatttacctctggtaaagatgtgct

SEQ ID NO: 389081 - DNA, 25 bp, Homo sapien
tctagctttgttgtgtatctcatca

SEQ ID NO: 389082 - DNA, 25 bp, Homo sapien
tagaggctgcagtaatgtatttacc

SEQ ID NO: 389083 - DNA, 25 bp, Homo sapien
tatttttcttgggttctctgagctt

SEQ ID NO: 389084 - DNA, 25 bp, Homo sapien
gaaatttagcagtcttattgctcct

SEQ ID NO: 389085 - DNA, 25 bp, Homo sapien
tactatgttgtcctgtagtcatgat

SEQ ID NO: 389086 - DNA, 25 bp, Homo sapien
tgttgtcctgtagtcatgatctatt

SEQ ID NO: 389087 - DNA, 25 bp, Homo sapien
agatgttctactgccttatgccttc

SEQ ID NO: 389088 - DNA, 25 bp, Homo sapien
aacttttacctcccagattcgtgat

SEQ ID NO: 389089 - DNA, 25 bp, Homo sapien
caacttttacctcccagattcgtga

SEQ ID NO: 389090 - DNA, 25 bp, Homo sapien
acttttacctcccagattcgtgatt

SEQ ID NO: 389091 - DNA, 25 bp, Homo sapien
aggctacacagagacttgagagtct

SEQ ID NO: 389092 - DNA, 25 bp, Homo sapien
tgtcagcagcgtcataaaaatcttg

SEQ ID NO: 389093 - DNA, 25 bp, Homo sapien
tagttacagcagttgcagggattcg

SEQ ID NO: 389094 - DNA, 25 bp, Homo sapien
caactgggcggtttcattcgcttcc

SEQ ID NO: 389095 - DNA, 25 bp, Homo sapien
tatgccactgtagtgcttgtgctcc

SEQ ID NO: 389096 - DNA, 25 bp, Homo sapien
cgagcgacccggagcgggcgacctt

SEQ ID NO: 389097 - DNA, 25 bp, Homo sapien
gcggcggtgaatcgccccctcttgt

SEQ ID NO: 389098 - DNA, 25 bp, Homo sapien
cagacgaccggtccgtgaaatgacc

SEQ ID NO: 389099 - DNA, 25 bp, Homo sapien
ctgccgcctcacaaagcccgggcag

SEQ ID NO: 389100 - DNA, 25 bp, Homo sapien
tcctcgaagcgaggggtcttccgtg

SEQ ID NO: 389101 - DNA, 25 bp, Homo sapien
tcctgtcctcgaagcgaggggtctt

SEQ ID NO: 389102 - DNA, 25 bp, Homo sapien
gcggcgagccaatcctcactttaaa

SEQ ID NO: 389103 - DNA, 25 bp, Homo sapien
gtcttccgtgcggggcaagacgcac

SEQ ID NO: 389104 - DNA, 25 bp, Homo sapien
tatgtaattttctgccgggctgctg

SEQ ID NO: 389105 - DNA, 25 bp, Homo sapien
ttggatggatccagccgagccgtca

SEQ ID NO: 389106 - DNA, 25 bp, Homo sapien
gtccatgcttggatggatccagccg

SEQ ID NO: 389107 - DNA, 25 bp, Homo sapien
ctcttcctaaggagggtctgcggcc

SEQ ID NO: 389108 - DNA, 25 bp, Homo sapien
gctggatgcgcggaggaaactcata

SEQ ID NO: 389109 - DNA, 25 bp, Homo sapien
caagaggattctaactgcacatgac

SEQ ID NO: 389110 - DNA, 25 bp, Homo sapien
ctcaaggtcaagctggtggagccaa

SEQ ID NO: 389111 - DNA, 25 bp, Homo sapien
ttgttaacgcgcattccaggaaggc

SEQ ID NO: 389112 - DNA, 25 bp, Homo sapien
gcttgctgaattaacagatgtaagg

SEQ ID NO: 389113 - DNA, 25 bp, Homo sapien
tgtaaggagttaacttactgttgca

SEQ ID NO: 389114 - DNA, 25 bp, Homo sapien
cacttgttagtgcttgctgaattaa

SEQ ID NO: 389115 - DNA, 25 bp, Homo sapien
aacttactgttgcactagctcaaac

SEQ ID NO: 389116 - DNA, 25 bp, Homo sapien
ggtaacactggtaatcttgcagcat

SEQ ID NO: 389117 - DNA, 25 bp, Homo sapien
gcagcatcagatcactgtcccacag

SEQ ID NO: 389118 - DNA, 25 bp, Homo sapien
tcttaacaatctagctaccagcctg

SEQ ID NO: 389119 - DNA, 25 bp, Homo sapien
tatccttatgaccaacgccctcatg

SEQ ID NO: 389120 - DNA, 25 bp, Homo sapien
cacagatccgaagtctcaccttggg

SEQ ID NO: 389121 - DNA, 25 bp, Homo sapien
agcctcctgcttagaatttctctcc

SEQ ID NO: 389122 - DNA, 25 bp, Homo sapien
accacagatccgaagtctcaccttg

SEQ ID NO: 389123 - DNA, 25 bp, Homo sapien
gaatttctctccacgcttctgtcct

SEQ ID NO: 389124 - DNA, 25 bp, Homo sapien
gagcttggaacagccctagcacata

SEQ ID NO: 389125 - DNA, 25 bp, Homo sapien
tctttttccaagcaagaccagcatg

SEQ ID NO: 389126 - DNA, 25 bp, Homo sapien
ggcacaattttgagctcctgagtta

SEQ ID NO: 389127 - DNA, 25 bp, Homo sapien
tacaccttcccgactagattggagg

SEQ ID NO: 389128 - DNA, 25 bp, Homo sapien
ccattcctcatcaattcacctatta

SEQ ID NO: 389129 - DNA, 25 bp, Homo sapien
gagacaccagctagattttacaatt

SEQ ID NO: 389130 - DNA, 25 bp, Homo sapien
ttttaaatagagacaccagctagat

SEQ ID NO: 389131 - DNA, 25 bp, Homo sapien
taaatagagacaccagctagatttt

SEQ ID NO: 389132 - DNA, 25 bp, Homo sapien
tctcaaggcaatctcccagtgggag

SEQ ID NO: 389133 - DNA, 25 bp, Homo sapien
cagttagataagctcgccctgtagg

SEQ ID NO: 389134 - DNA, 25 bp, Homo sapien
tctgctgataatttgcaaggtttct

SEQ ID NO: 389135 - DNA, 25 bp, Homo sapien
aactcttgacaatccatgcctttgc

SEQ ID NO: 389136 - DNA, 25 bp, Homo sapien
gggtgcgctgctctcgcacattttc

SEQ ID NO: 389137 - DNA, 25 bp, Homo sapien
gctctcgcacattttcaggtctcat

SEQ ID NO: 389138 - DNA, 25 bp, Homo sapien
gcgctgctctcgcacattttcaggt

SEQ ID NO: 389139 - DNA, 25 bp, Homo sapien
tgctttggtggacgggtgcgctgct

SEQ ID NO: 389140 - DNA, 25 bp, Homo sapien
tgatggaattgaagggaaacggcac

SEQ ID NO: 389141 - DNA, 25 bp, Homo sapien
ggaccatcatctgtagctccattcc

SEQ ID NO: 389142 - DNA, 25 bp, Homo sapien
acgaagatacgagacactcgctggg

SEQ ID NO: 389143 - DNA, 25 bp, Homo sapien
cctctcggttgcaaatgaaggtaac

SEQ ID NO: 389144 - DNA, 25 bp, Homo sapien
gtcagcttaacattccacagatggg

SEQ ID NO: 389145 - DNA, 25 bp, Homo sapien
aactggtgggccgtatgtaacagct

SEQ ID NO: 389146 - DNA, 25 bp, Homo sapien
ttatgggaggctctgactgtctcgg

SEQ ID NO: 389147 - DNA, 25 bp, Homo sapien
tgtaacagctgaccaacgtgaagat

SEQ ID NO: 389148 - DNA, 25 bp, Homo sapien
ttgatttgttgtgagcactactgca

SEQ ID NO: 389149 - DNA, 25 bp, Homo sapien
tgatttgttgtgagcactactgcac

SEQ ID NO: 389150 - DNA, 25 bp, Homo sapien
ttgattgatttgttgtgagcactac

SEQ ID NO: 389151 - DNA, 25 bp, Homo sapien
gattgatttgttgtgagcactactg

SEQ ID NO: 389152 - DNA, 25 bp, Homo sapien
actattagtacagaacaccctgcag

SEQ ID NO: 389153 - DNA, 25 bp, Homo sapien
cattatgctgtctgtggaatcctac

SEQ ID NO: 389154 - DNA, 25 bp, Homo sapien
taattggtcagtatccgtatgggtc

SEQ ID NO: 389155 - DNA, 25 bp, Homo sapien
tccgcccgtgttagcattgaagttg

SEQ ID NO: 389156 - DNA, 25 bp, Homo sapien
aggcgccgccaaggaagaggtgagt

SEQ ID NO: 389157 - DNA, 25 bp, Homo sapien
gtcacgcggccgggcattgttctcg

SEQ ID NO: 389158 - DNA, 25 bp, Homo sapien
tgggtttcccgtgagccgctggcct

SEQ ID NO: 389159 - DNA, 25 bp, Homo sapien
gctgtaagtaaagcgagccccgtaa

SEQ ID NO: 389160 - DNA, 25 bp, Homo sapien
cactataggacaggagcgatggctc

SEQ ID NO: 389161 - DNA, 25 bp, Homo sapien
taacctacacatatatgcgggcatc

SEQ ID NO: 389162 - DNA, 25 bp, Homo sapien
tcaagtgcagtctgtggaacgcacg

SEQ ID NO: 389163 - DNA, 25 bp, Homo sapien
tgcgggcatcacaaactaaaattcc

SEQ ID NO: 389164 - DNA, 25 bp, Homo sapien
tggctgtgctgggtccgctacggca

SEQ ID NO: 389165 - DNA, 25 bp, Homo sapien
gcggtgaagccaagcgccccagaac

SEQ ID NO: 389166 - DNA, 25 bp, Homo sapien
cccggacgctcctggctgtgctggg

SEQ ID NO: 389167 - DNA, 25 bp, Homo sapien
gggaccacaacaacagcggcgaccg

SEQ ID NO: 389168 - DNA, 25 bp, Homo sapien
aaccacgcccagtggtcggccgcgg

SEQ ID NO: 389169 - DNA, 25 bp, Homo sapien
gatcctaagaacattgcatccaaac

SEQ ID NO: 389170 - DNA, 25 bp, Homo sapien
cgggaggaggatcctaagaacattg

SEQ ID NO: 389171 - DNA, 25 bp, Homo sapien
aagaacattgcatccaaacacgaag

SEQ ID NO: 389172 - DNA, 25 bp, Homo sapien
gcggcatccccaccggcccttggga

SEQ ID NO: 389173 - DNA, 25 bp, Homo sapien
ctacgccagacccgccgggggactg

SEQ ID NO: 389174 - DNA, 25 bp, Homo sapien
gcatccccaccggcccttgggaggc

SEQ ID NO: 389175 - DNA, 25 bp, Homo sapien
cggcatccccaccggcccttgggag

SEQ ID NO: 389176 - DNA, 25 bp, Homo sapien
ccgggacctggaacagctgacttcg

SEQ ID NO: 389177 - DNA, 25 bp, Homo sapien
gattaacggaaacgaggctgacagc

SEQ ID NO: 389178 - DNA, 25 bp, Homo sapien
aagcttacggaccaaccaagacgct

SEQ ID NO: 389179 - DNA, 25 bp, Homo sapien
aagacgctactacggccttcagtcg

SEQ ID NO: 389180 - DNA, 25 bp, Homo sapien
tgagaatgtcgaatggtgtggctgc

SEQ ID NO: 389181 - DNA, 25 bp, Homo sapien
ccatagacagatgaactaataaaca

SEQ ID NO: 389182 - DNA, 25 bp, Homo sapien
attttagcattatctacaatagtca

SEQ ID NO: 389183 - DNA, 25 bp, Homo sapien
catagaattaccatagattcaggaa

SEQ ID NO: 389184 - DNA, 25 bp, Homo sapien
cagtagggacaactctccatttaga

SEQ ID NO: 389185 - DNA, 25 bp, Homo sapien
catttagagcttggaagccgcgacc

SEQ ID NO: 389186 - DNA, 25 bp, Homo sapien
tctccatttagagcttggaagccgc

SEQ ID NO: 389187 - DNA, 25 bp, Homo sapien
tccgcctgccgcacagtagggacaa

SEQ ID NO: 389188 - DNA, 25 bp, Homo sapien
ttcatgtcctggatctccgctctca

SEQ ID NO: 389189 - DNA, 25 bp, Homo sapien
ctgtggagagctcctgcttcatgtc

SEQ ID NO: 389190 - DNA, 25 bp, Homo sapien
catgggttttgagcttatccgtcat

SEQ ID NO: 389191 - DNA, 25 bp, Homo sapien
ggcaaactcgtccatcatgttgact

SEQ ID NO: 389192 - DNA, 25 bp, Homo sapien
ttctagagagtggaacaaaagcctc

SEQ ID NO: 389193 - DNA, 25 bp, Homo sapien
gacccgggaggtgacactcagaaga

SEQ ID NO: 389194 - DNA, 25 bp, Homo sapien
gacactgctgggcatttttctagag

SEQ ID NO: 389195 - DNA, 25 bp, Homo sapien
ccagcaaataagaggaaagtaatac

SEQ ID NO: 389196 - DNA, 25 bp, Homo sapien
acgggctgccctgagaaagcgctct

SEQ ID NO: 389197 - DNA, 25 bp, Homo sapien
ggctgccctgagaaagcgctcttca

SEQ ID NO: 389198 - DNA, 25 bp, Homo sapien
tgccctgagaaagcgctcttcatca

SEQ ID NO: 389199 - DNA, 25 bp, Homo sapien
tgcacacactgtgaccggggtccct

SEQ ID NO: 389200 - DNA, 25 bp, Homo sapien
ttcccagtgtgcacagtacacgaac

SEQ ID NO: 389201 - DNA, 25 bp, Homo sapien
tttcccagtgtgcacagtacacgaa

SEQ ID NO: 389202 - DNA, 25 bp, Homo sapien
ttcccttataatacactttctgatt

SEQ ID NO: 389203 - DNA, 25 bp, Homo sapien
taattatgtcagtcctgaaaaatta

SEQ ID NO: 389204 - DNA, 25 bp, Homo sapien
ttttaagtcacccaccatctcatta

SEQ ID NO: 389205 - DNA, 25 bp, Homo sapien
ggaacaatcgctcaacatatttaga

SEQ ID NO: 389206 - DNA, 25 bp, Homo sapien
ctgcaatacgtagaaagcgacactt

SEQ ID NO: 389207 - DNA, 25 bp, Homo sapien
cgtagaaagcgacacttatcaccca

SEQ ID NO: 389208 - DNA, 25 bp, Homo sapien
tatcttggctaattgagctgtccga

SEQ ID NO: 389209 - DNA, 25 bp, Homo sapien
cacttatcacccattttatcttggc

SEQ ID NO: 389210 - DNA, 25 bp, Homo sapien
tgaaggtggaacagcccgaactccc

SEQ ID NO: 389211 - DNA, 25 bp, Homo sapien
atgacccggctgacgctctagcaca

SEQ ID NO: 389212 - DNA, 25 bp, Homo sapien
ggtcaccaactccaatgacccggct

SEQ ID NO: 389213 - DNA, 25 bp, Homo sapien
gacacacgacacgacagctgaaggt

SEQ ID NO: 389214 - DNA, 25 bp, Homo sapien
gagagcgtgcatgaagtacaccagg

SEQ ID NO: 389215 - DNA, 25 bp, Homo sapien
tgatgtcatctataagcctctcgct

SEQ ID NO: 389216 - DNA, 25 bp, Homo sapien
caggcccttcaaaccacactgggat

SEQ ID NO: 389217 - DNA, 25 bp, Homo sapien
gaaaagctggttctctacctggagg

SEQ ID NO: 389218 - DNA, 25 bp, Homo sapien
agagcagagcccaacagctccagga

SEQ ID NO: 389219 - DNA, 25 bp, Homo sapien
cagagcccaacagctccaggagagg

SEQ ID NO: 389220 - DNA, 25 bp, Homo sapien
agcagagcccaacagctccaggaga

SEQ ID NO: 389221 - DNA, 25 bp, Homo sapien
ctcggggcagagcagagcccaacag

SEQ ID NO: 389222 - DNA, 25 bp, Homo sapien
tgaatcctttgccttggttaccgga

SEQ ID NO: 389223 - DNA, 25 bp, Homo sapien
gatatttacggcagctgctaaaggt

SEQ ID NO: 389224 - DNA, 25 bp, Homo sapien
ggttaccggatcacatggtactgca

SEQ ID NO: 389225 - DNA, 25 bp, Homo sapien
tcacatggtactgcaactcggatat

SEQ ID NO: 389226 - DNA, 25 bp, Homo sapien
agatgagcacgcacagccactaatg

SEQ ID NO: 389227 - DNA, 25 bp, Homo sapien
tcaaattaaagacgagctcagcagc

SEQ ID NO: 389228 - DNA, 25 bp, Homo sapien
taatgtcccttggtgaaaccttgaa

SEQ ID NO: 389229 - DNA, 25 bp, Homo sapien
aactctccagactgagcacctcaag

SEQ ID NO: 389230 - DNA, 25 bp, Homo sapien
atttactcggcacgacagccacagg

SEQ ID NO: 389231 - DNA, 25 bp, Homo sapien
aaatgagtgagatcatcagggcagc

SEQ ID NO: 389232 - DNA, 25 bp, Homo sapien
taggaaaggctaccaggcggtctag

SEQ ID NO: 389233 - DNA, 25 bp, Homo sapien
gggttatccatttactcggcacgac

SEQ ID NO: 389234 - DNA, 25 bp, Homo sapien
acaaagacattcaccatgagagcgc

SEQ ID NO: 389235 - DNA, 25 bp, Homo sapien
tgagagcgcataccagcagtgctgc

SEQ ID NO: 389236 - DNA, 25 bp, Homo sapien
ttcaccatgagagcgcataccagca

SEQ ID NO: 389237 - DNA, 25 bp, Homo sapien
gacattcaccatgagagcgcatacc

SEQ ID NO: 389238 - DNA, 25 bp, Homo sapien
atccaacaggtaattccaacaccac

SEQ ID NO: 389239 - DNA, 25 bp, Homo sapien
aatccaacaggtaattccaacacca

SEQ ID NO: 389240 - DNA, 25 bp, Homo sapien
acaatagcgacaactttgttacaga

SEQ ID NO: 389241 - DNA, 25 bp, Homo sapien
tgaagcacaatagcgacaactttgt

SEQ ID NO: 389242 - DNA, 25 bp, Homo sapien
tcagctgaacggatgaagcacaata

SEQ ID NO: 389243 - DNA, 25 bp, Homo sapien
tgaacggatgaagcacaatagcgac

SEQ ID NO: 389244 - DNA, 25 bp, Homo sapien
cacatttcgtacagatcgaggacgg

SEQ ID NO: 389245 - DNA, 25 bp, Homo sapien
ggagaaaaagcccacgcaatgtcaa

SEQ ID NO: 389246 - DNA, 25 bp, Homo sapien
caatgcatcatggtctcgtggatac

SEQ ID NO: 389247 - DNA, 25 bp, Homo sapien
cataagagggcaaatcacaagtgac

SEQ ID NO: 389248 - DNA, 25 bp, Homo sapien
aatagaattatactttgtaggccac

SEQ ID NO: 389249 - DNA, 25 bp, Homo sapien
aattatactttgtaggccacacagg

SEQ ID NO: 389250 - DNA, 25 bp, Homo sapien
tagaattatactttgtaggccacac

SEQ ID NO: 389251 - DNA, 25 bp, Homo sapien
ttaatagaattatactttgtaggcc

SEQ ID NO: 389252 - DNA, 25 bp, Homo sapien
cacaagcatttgcaaagattttaat

SEQ ID NO: 389253 - DNA, 25 bp, Homo sapien
caagcatttgcaaagattttaatta

SEQ ID NO: 389254 - DNA, 25 bp, Homo sapien
acacaagcatttgcaaagattttaa

SEQ ID NO: 389255 - DNA, 25 bp, Homo sapien
agcatttgcaaagattttaattaga

SEQ ID NO: 389256 - DNA, 25 bp, Homo sapien
tggtgactcagttaacagccacttg

SEQ ID NO: 389257 - DNA, 25 bp, Homo sapien
cagcaaacaagtagctgtaaggcag

SEQ ID NO: 389258 - DNA, 25 bp, Homo sapien
taacagccacttgtcagttgcgggt

SEQ ID NO: 389259 - DNA, 25 bp, Homo sapien
gactcagttaacagccacttgtcag

SEQ ID NO: 389260 - DNA, 25 bp, Homo sapien
tcatctgttaaaacaaatggcaggc

SEQ ID NO: 389261 - DNA, 25 bp, Homo sapien
caaaagcacagatgctaacgccagt

SEQ ID NO: 389262 - DNA, 25 bp, Homo sapien
gggacaagagtcgtaagatgcacat

SEQ ID NO: 389263 - DNA, 25 bp, Homo sapien
taacgccagtcaccctagttctatg

SEQ ID NO: 389264 - DNA, 25 bp, Homo sapien
tacagagcacagtaaagtgaagcgc

SEQ ID NO: 389265 - DNA, 25 bp, Homo sapien
aatctgctgcctcatacgggtgtag

SEQ ID NO: 389266 - DNA, 25 bp, Homo sapien
gataaacggcgctgacagacttgct

SEQ ID NO: 389267 - DNA, 25 bp, Homo sapien
tgtgatacaactctgacgaatagga

SEQ ID NO: 389268 - DNA, 25 bp, Homo sapien
cagccatcattgtttcaactggcag

SEQ ID NO: 389269 - DNA, 25 bp, Homo sapien
aaattatttgccaattggatggatg

SEQ ID NO: 389270 - DNA, 25 bp, Homo sapien
cagtatgtccagttagtgatgttaa

SEQ ID NO: 389271 - DNA, 25 bp, Homo sapien
tcttttggtttcataattcccatct

SEQ ID NO: 389272 - DNA, 25 bp, Homo sapien
gctacatgtttacttccagatgcaa

SEQ ID NO: 389273 - DNA, 25 bp, Homo sapien
tacatgtttacttccagatgcaaca

SEQ ID NO: 389274 - DNA, 25 bp, Homo sapien
tagctacatgtttacttccagatgc

SEQ ID NO: 389275 - DNA, 25 bp, Homo sapien
gtagctacatgtttacttccagatg

SEQ ID NO: 389276 - DNA, 25 bp, Homo sapien
tcagggcagtcctaggcagttcaag

SEQ ID NO: 389277 - DNA, 25 bp, Homo sapien
gaaccagacagatgcagtactgcct

SEQ ID NO: 389278 - DNA, 25 bp, Homo sapien
tgacctagccttggcagtcacgcag

SEQ ID NO: 389279 - DNA, 25 bp, Homo sapien
ccaccttttggtagcgagtcacgag

SEQ ID NO: 389280 - DNA, 25 bp, Homo sapien
ggcccacgtcgtaaaagtatcacta

SEQ ID NO: 389281 - DNA, 25 bp, Homo sapien
gcaaaaatgagctcctttaggcctc

SEQ ID NO: 389282 - DNA, 25 bp, Homo sapien
tcccattcacaaggattctgccctt

SEQ ID NO: 389283 - DNA, 25 bp, Homo sapien
cataagaaatttagcactatatcaa

SEQ ID NO: 389284 - DNA, 25 bp, Homo sapien
atgcttaagaaatacgctgtttcaa

SEQ ID NO: 389285 - DNA, 25 bp, Homo sapien
tgcttaagaaatacgctgtttcaag

SEQ ID NO: 389286 - DNA, 25 bp, Homo sapien
gatgcttaagaaatacgctgtttca

SEQ ID NO: 389287 - DNA, 25 bp, Homo sapien
acctggcctaaattatgtaacttca

SEQ ID NO: 389288 - DNA, 25 bp, Homo sapien
tttcatcacgttaagtaatacagcg

SEQ ID NO: 389289 - DNA, 25 bp, Homo sapien
tagaatgagttaacagcttggcgaa

SEQ ID NO: 389290 - DNA, 25 bp, Homo sapien
tagaaactctattcattaacaaggc

SEQ ID NO: 389291 - DNA, 25 bp, Homo sapien
tgtggccatggcgtttagtccctta

SEQ ID NO: 389292 - DNA, 25 bp, Homo sapien
ctttccaacgcatccatgccctctg

SEQ ID NO: 389293 - DNA, 25 bp, Homo sapien
ctctgtgcacttcttgactcctggg

SEQ ID NO: 389294 - DNA, 25 bp, Homo sapien
tgttccttgtccaagccatatgatc

SEQ ID NO: 389295 - DNA, 25 bp, Homo sapien
ttcagttcccctgctatagcacagg

SEQ ID NO: 389296 - DNA, 25 bp, Homo sapien
gaacatcatggttagatcctacaaa

SEQ ID NO: 389297 - DNA, 25 bp, Homo sapien
tgttaccagctgtgtccaggaccct

SEQ ID NO: 389298 - DNA, 25 bp, Homo sapien
tgttgaccatcagagcacttcagtc

SEQ ID NO: 389299 - DNA, 25 bp, Homo sapien
tgtgattgttcagaaaaggctatta

SEQ ID NO: 389300 - DNA, 25 bp, Homo sapien
tggaagtttaagttctcagtatgat

SEQ ID NO: 389301 - DNA, 25 bp, Homo sapien
tcagaaaaggctattaatagaaatt

SEQ ID NO: 389302 - DNA, 25 bp, Homo sapien
tcagaagactttctctgtgattgtt

SEQ ID NO: 389303 - DNA, 25 bp, Homo sapien
caggcacaggcgatttttcacggaa

SEQ ID NO: 389304 - DNA, 25 bp, Homo sapien
tagaaaacaataggaggtctgcagc

SEQ ID NO: 389305 - DNA, 25 bp, Homo sapien
tctgcagcatgcaagagaagcccag

SEQ ID NO: 389306 - DNA, 25 bp, Homo sapien
gatgagcatttcttcggcgtggcat

SEQ ID NO: 389307 - DNA, 25 bp, Homo sapien
taagagactaagatggctaggcttc

SEQ ID NO: 389308 - DNA, 25 bp, Homo sapien
tcaggagagggacaattgcaaacgt

SEQ ID NO: 389309 - DNA, 25 bp, Homo sapien
caaacatgggacaattgaagttcac

SEQ ID NO: 389310 - DNA, 25 bp, Homo sapien
tctacagaaataacagtgactggcg

SEQ ID NO: 389311 - DNA, 25 bp, Homo sapien
tatatccagaatattcacagcaatt

SEQ ID NO: 389312 - DNA, 25 bp, Homo sapien
ttatatccagaatattcacagcaat

SEQ ID NO: 389313 - DNA, 25 bp, Homo sapien
ttgataattgggcttcaccaaaatt

SEQ ID NO: 389314 - DNA, 25 bp, Homo sapien
agaacaaattgataattgggcttca

SEQ ID NO: 389315 - DNA, 25 bp, Homo sapien
agtagccatccctttcaccatagtg

SEQ ID NO: 389316 - DNA, 25 bp, Homo sapien
gagaaaagacacctgaccgttgtat

SEQ ID NO: 389317 - DNA, 25 bp, Homo sapien
gaatgattcagacatataccttgat

SEQ ID NO: 389318 - DNA, 25 bp, Homo sapien
tgccttgttgcaaaagcaggagaaa

SEQ ID NO: 389319 - DNA, 25 bp, Homo sapien
gtgagccacaagatcttttctgcca

SEQ ID NO: 389320 - DNA, 25 bp, Homo sapien
tgctgtgtatggctccttcaaatct

SEQ ID NO: 389321 - DNA, 25 bp, Homo sapien
gaatttcccaatcaactgccaacag

SEQ ID NO: 389322 - DNA, 25 bp, Homo sapien
ccaaaaacttgaaaaggcactgctg

SEQ ID NO: 389323 - DNA, 25 bp, Homo sapien
ttcccgtcaccgaagacaaacgcga

SEQ ID NO: 389324 - DNA, 25 bp, Homo sapien
tgctgcccgagtgcgcatgcgcgcg

SEQ ID NO: 389325 - DNA, 25 bp, Homo sapien
ctcctgctgcccgagtgcgcatgcg

SEQ ID NO: 389326 - DNA, 25 bp, Homo sapien
aagacaaacgcgaggccacactgac

SEQ ID NO: 389327 - DNA, 25 bp, Homo sapien
gactgacagagccttaagaggtcag

SEQ ID NO: 389328 - DNA, 25 bp, Homo sapien
caggaggatcgtttacagacgtcta

SEQ ID NO: 389329 - DNA, 25 bp, Homo sapien
ttaagaggtcaggagagcgccagag

SEQ ID NO: 389330 - DNA, 25 bp, Homo sapien
tgacaggctccctcgtctcggtgcg

SEQ ID NO: 389331 - DNA, 25 bp, Homo sapien
ctccagggttggatgctcccgcaat

SEQ ID NO: 389332 - DNA, 25 bp, Homo sapien
tggatgctcccgcaatggcaaaact

SEQ ID NO: 389333 - DNA, 25 bp, Homo sapien
actccgctctcgttactgtcatggg

SEQ ID NO: 389334 - DNA, 25 bp, Homo sapien
aatggcaaaactccgctctcgttac

SEQ ID NO: 389335 - DNA, 25 bp, Homo sapien
cccagaggcatgtttcccaccccct

SEQ ID NO: 389336 - DNA, 25 bp, Homo sapien
gagccccagaggcatgtttcccacc

SEQ ID NO: 389337 - DNA, 25 bp, Homo sapien
ccagaggcatgtttcccaccccctc

SEQ ID NO: 389338 - DNA, 25 bp, Homo sapien
gccccagaggcatgtttcccacccc

SEQ ID NO: 389339 - DNA, 25 bp, Homo sapien
gattgggtggcaccgacgttccgaa

SEQ ID NO: 389340 - DNA, 25 bp, Homo sapien
tccgaagcagagaggaatctcccag

SEQ ID NO: 389341 - DNA, 25 bp, Homo sapien
caccgacgttccgaagcagagagga

SEQ ID NO: 389342 - DNA, 25 bp, Homo sapien
ctgcccatcatggattgggtggcac

SEQ ID NO: 389343 - DNA, 25 bp, Homo sapien
cattggcccaggaatattttgggat

SEQ ID NO: 389344 - DNA, 25 bp, Homo sapien
tccattggcccaggaatattttggg

SEQ ID NO: 389345 - DNA, 25 bp, Homo sapien
ccattggcccaggaatattttggga

SEQ ID NO: 389346 - DNA, 25 bp, Homo sapien
tagacaaatcctgacagtgacacag

SEQ ID NO: 389347 - DNA, 25 bp, Homo sapien
ccctgtcagggaatgcgccgctaga

SEQ ID NO: 389348 - DNA, 25 bp, Homo sapien
ccatttcgacagttggaaagaggac

SEQ ID NO: 389349 - DNA, 25 bp, Homo sapien
tgtagcaacaaacactttgataacc

SEQ ID NO: 389350 - DNA, 25 bp, Homo sapien
tcagaaaagagtataggaagaaaga

SEQ ID NO: 389351 - DNA, 25 bp, Homo sapien
aaagagtataggaagaaagagtcca

SEQ ID NO: 389352 - DNA, 25 bp, Homo sapien
aagaaagagtccaccagacacctac

SEQ ID NO: 389353 - DNA, 25 bp, Homo sapien
aggaagaaagagtccaccagacacc

SEQ ID NO: 389354 - DNA, 25 bp, Homo sapien
tcttacggcaggtccagcttgcaca

SEQ ID NO: 389355 - DNA, 25 bp, Homo sapien
caaagcactggttatgaaggtcggc

SEQ ID NO: 389356 - DNA, 25 bp, Homo sapien
taactgctgctaaaatgctggtcga

SEQ ID NO: 389357 - DNA, 25 bp, Homo sapien
cacatacttattgcagagccacagc

SEQ ID NO: 389358 - DNA, 25 bp, Homo sapien
gctgtgcatcttggagacggcaggg

SEQ ID NO: 389359 - DNA, 25 bp, Homo sapien
taaagatcggttccaggggctgtgc

SEQ ID NO: 389360 - DNA, 25 bp, Homo sapien
ttaaagatcggttccaggggctgtg

SEQ ID NO: 389361 - DNA, 25 bp, Homo sapien
ctgtgcatcttggagacggcaggga

SEQ ID NO: 389362 - DNA, 25 bp, Homo sapien
ctgtgtaacacgtaatgactgtatc

SEQ ID NO: 389363 - DNA, 25 bp, Homo sapien
aacacgtaatgactgtatctgccag

SEQ ID NO: 389364 - DNA, 25 bp, Homo sapien
taatgactgtatctgccagtagcca

SEQ ID NO: 389365 - DNA, 25 bp, Homo sapien
cgtaatgactgtatctgccagtagc

SEQ ID NO: 389366 - DNA, 25 bp, Homo sapien
caaaaaacccactacttcttgctgt

SEQ ID NO: 389367 - DNA, 25 bp, Homo sapien
taaagtcgattttattcgcttccaa

SEQ ID NO: 389368 - DNA, 25 bp, Homo sapien
tactgctcctcattgaagatctggg

SEQ ID NO: 389369 - DNA, 25 bp, Homo sapien
gcaatatctaattccttaaagtcga

SEQ ID NO: 389370 - DNA, 25 bp, Homo sapien
ccaatacgaacaggcacaagaccat

SEQ ID NO: 389371 - DNA, 25 bp, Homo sapien
catagagggcgactgttttggcaaa

SEQ ID NO: 389372 - DNA, 25 bp, Homo sapien
caactggagtgattggaaacttggt

SEQ ID NO: 389373 - DNA, 25 bp, Homo sapien
gatgctcaatgaagctaccacccca

SEQ ID NO: 389374 - DNA, 25 bp, Homo sapien
gaggagccaaaccaaggaaggaata

SEQ ID NO: 389375 - DNA, 25 bp, Homo sapien
ctcctaccacccacaggtctggggt

SEQ ID NO: 389376 - DNA, 25 bp, Homo sapien
tctcccctcctaccacccacaggtc

SEQ ID NO: 389377 - DNA, 25 bp, Homo sapien
cccctcctaccacccacaggtctgg

SEQ ID NO: 389378 - DNA, 25 bp, Homo sapien
ctagactctcccctcctaccaccca

SEQ ID NO: 389379 - DNA, 25 bp, Homo sapien
ctaaaactaggcaccctagtccttg

SEQ ID NO: 389380 - DNA, 25 bp, Homo sapien
ttgccggatttcagcgcccatgatg

SEQ ID NO: 389381 - DNA, 25 bp, Homo sapien
ggacttgccggatttcagcgcccat

SEQ ID NO: 389382 - DNA, 25 bp, Homo sapien
tatgacaaggacttgccggatttca

SEQ ID NO: 389383 - DNA, 25 bp, Homo sapien
aaggacttgccggatttcagcgccc

SEQ ID NO: 389384 - DNA, 25 bp, Homo sapien
atcaccattgggaagggacgatgct

SEQ ID NO: 389385 - DNA, 25 bp, Homo sapien
caccattgggaagggacgatgcttc

SEQ ID NO: 389386 - DNA, 25 bp, Homo sapien
ccattgggaagggacgatgcttcct

SEQ ID NO: 389387 - DNA, 25 bp, Homo sapien
attgggaagggacgatgcttccttg

SEQ ID NO: 389388 - DNA, 25 bp, Homo sapien
ttcagggaggttgcccacatcttca

SEQ ID NO: 389389 - DNA, 25 bp, Homo sapien
ttcactgccctctttttgtgcctca

SEQ ID NO: 389390 - DNA, 25 bp, Homo sapien
gggcttcagggaggttgcccacatc

SEQ ID NO: 389391 - DNA, 25 bp, Homo sapien
agggaggttgcccacatcttcactg

SEQ ID NO: 389392 - DNA, 25 bp, Homo sapien
ctgctgtgaaaaagcgaaaactcac

SEQ ID NO: 389393 - DNA, 25 bp, Homo sapien
tcaaactgctgtgaaaaagcgaaaa

SEQ ID NO: 389394 - DNA, 25 bp, Homo sapien
caaactgctgtgaaaaagcgaaaac

SEQ ID NO: 389395 - DNA, 25 bp, Homo sapien
aactgctgtgaaaaagcgaaaactc

SEQ ID NO: 389396 - DNA, 25 bp, Homo sapien
tctgtggctgtctctccttcttctt

SEQ ID NO: 389397 - DNA, 25 bp, Homo sapien
ctgtggctgtctctccttcttcttc

SEQ ID NO: 389398 - DNA, 25 bp, Homo sapien
cttctgtggctgtctctccttcttc

SEQ ID NO: 389399 - DNA, 25 bp, Homo sapien
ctcttctgtggctgtctctccttct

SEQ ID NO: 389400 - DNA, 25 bp, Homo sapien
ccccttccgcaccctccatggctat

SEQ ID NO: 389401 - DNA, 25 bp, Homo sapien
taggaatcttcgtcttctccaggct

SEQ ID NO: 389402 - DNA, 25 bp, Homo sapien
ctaggaatcttcgtcttctccaggc

SEQ ID NO: 389403 - DNA, 25 bp, Homo sapien
tggaagaaatgaagcatgaaaaggc

SEQ ID NO: 389404 - DNA, 25 bp, Homo sapien
ggagaagtggaagaaatgaagcatg

SEQ ID NO: 389405 - DNA, 25 bp, Homo sapien
ctggagaagtggaagaaatgaagca

SEQ ID NO: 389406 - DNA, 25 bp, Homo sapien
gaagtggaagaaatgaagcatgaaa

SEQ ID NO: 389407 - DNA, 25 bp, Homo sapien
catacagtacggtaactagcagctt

SEQ ID NO: 389408 - DNA, 25 bp, Homo sapien
cagtacggtaactagcagcttttcc

SEQ ID NO: 389409 - DNA, 25 bp, Homo sapien
caaaatgtgccgcagatagcataca

SEQ ID NO: 389410 - DNA, 25 bp, Homo sapien
cgcagatagcatacagtacggtaac

SEQ ID NO: 389411 - DNA, 25 bp, Homo sapien
gggacatccctactattcaaattgg

SEQ ID NO: 389412 - DNA, 25 bp, Homo sapien
taaacttctactgacgatggaaaat

SEQ ID NO: 389413 - DNA, 25 bp, Homo sapien
caaattggactttggtgcaaagagc

SEQ ID NO: 389414 - DNA, 25 bp, Homo sapien
tacatgcaccaattcttaactagag

SEQ ID NO: 389415 - DNA, 25 bp, Homo sapien
tccatgtacatctaaccaggtcagg

SEQ ID NO: 389416 - DNA, 25 bp, Homo sapien
taagtcctcagtaaccctgggtgtg

SEQ ID NO: 389417 - DNA, 25 bp, Homo sapien
gattcgggagatacctccatgtaca

SEQ ID NO: 389418 - DNA, 25 bp, Homo sapien
ccaggtcaggcagcataagtcctca

SEQ ID NO: 389419 - DNA, 25 bp, Homo sapien
cataaacggtcttcacatttaattt

SEQ ID NO: 389420 - DNA, 25 bp, Homo sapien
gcataaacggtcttcacatttaatt

SEQ ID NO: 389421 - DNA, 25 bp, Homo sapien
cataaggcgcatttgaagaaatact

SEQ ID NO: 389422 - DNA, 25 bp, Homo sapien
aacctgtttctgagataagtagcat

SEQ ID NO: 389423 - DNA, 25 bp, Homo sapien
taagatggtctagctatgcagagca

SEQ ID NO: 389424 - DNA, 25 bp, Homo sapien
tatcacagagaacttccatgccttg

SEQ ID NO: 389425 - DNA, 25 bp, Homo sapien
aaatatgagaaatagcaaggtgggc

SEQ ID NO: 389426 - DNA, 25 bp, Homo sapien
gcttattgtcagcatagatatttat

SEQ ID NO: 389427 - DNA, 25 bp, Homo sapien
gggtttttatctttgcttattgtca

SEQ ID NO: 389428 - DNA, 25 bp, Homo sapien
aaaatatgagaaatagcaaggtggg

SEQ ID NO: 389429 - DNA, 25 bp, Homo sapien
agacagaatgcgaggaccaaagcca

SEQ ID NO: 389430 - DNA, 25 bp, Homo sapien
caggcaccgtagaggaaccgtactg

SEQ ID NO: 389431 - DNA, 25 bp, Homo sapien
gggcccgaacggcatcgagtctgaa

SEQ ID NO: 389432 - DNA, 25 bp, Homo sapien
aaccgtactgtggtccaggaccgag

SEQ ID NO: 389433 - DNA, 25 bp, Homo sapien
aaccctgtgggtggacagtgaccca

SEQ ID NO: 389434 - DNA, 25 bp, Homo sapien
ttccctctgtaactggcgctggtgg

SEQ ID NO: 389435 - DNA, 25 bp, Homo sapien
cctctgatggtgcaactaagaaaac

SEQ ID NO: 389436 - DNA, 25 bp, Homo sapien
atagtaagtgagaagggcaaggcac

SEQ ID NO: 389437 - DNA, 25 bp, Homo sapien
aaacttcggatctgaggccactgac

SEQ ID NO: 389438 - DNA, 25 bp, Homo sapien
gaaacttcggatctgaggccactga

SEQ ID NO: 389439 - DNA, 25 bp, Homo sapien
agaccactcgcatccttgtctttgc

SEQ ID NO: 389440 - DNA, 25 bp, Homo sapien
tgatcaggaggtcttcggcactgta

SEQ ID NO: 389441 - DNA, 25 bp, Homo sapien
cctcagggttatccctgcgtggtgc

SEQ ID NO: 389442 - DNA, 25 bp, Homo sapien
atcctcatgcctattcagcaggcca

SEQ ID NO: 389443 - DNA, 25 bp, Homo sapien
tctggggttggttgattatgaagcc

SEQ ID NO: 389444 - DNA, 25 bp, Homo sapien
ccctgcctcagaggttctagaagca

SEQ ID NO: 389445 - DNA, 25 bp, Homo sapien
gattatgaagccctgcctcagaggt

SEQ ID NO: 389446 - DNA, 25 bp, Homo sapien
cgtggcctctcagtgtggcgcggca

SEQ ID NO: 389447 - DNA, 25 bp, Homo sapien
catcaaagggaatgtactgaatgaa

SEQ ID NO: 389448 - DNA, 25 bp, Homo sapien
cagtggcagattggaggtgtggagg

SEQ ID NO: 389449 - DNA, 25 bp, Homo sapien
gtcatgggcagtggcagattggagg

SEQ ID NO: 389450 - DNA, 25 bp, Homo sapien
tcatatccttgggtcatcaaaggga

SEQ ID NO: 389451 - DNA, 25 bp, Homo sapien
tcttattccctgacaaggctatcag

SEQ ID NO: 389452 - DNA, 25 bp, Homo sapien
ttattccctgacaaggctatcaggc

SEQ ID NO: 389453 - DNA, 25 bp, Homo sapien
acagctgtctctttggtcaggaaag

SEQ ID NO: 389454 - DNA, 25 bp, Homo sapien
cagctgtctctttggtcaggaaagc

SEQ ID NO: 389455 - DNA, 25 bp, Homo sapien
catgagtgccctcgccctgtgggct

SEQ ID NO: 389456 - DNA, 25 bp, Homo sapien
tggtttgagtttcatgagtgccctc

SEQ ID NO: 389457 - DNA, 25 bp, Homo sapien
agtttcatgagtgccctcgccctgt

SEQ ID NO: 389458 - DNA, 25 bp, Homo sapien
tcttggtccgaatcccagtttcaaa

SEQ ID NO: 389459 - DNA, 25 bp, Homo sapien
cagacttatgtctaccttttcccaa

SEQ ID NO: 389460 - DNA, 25 bp, Homo sapien
agctctcagacttatgtctaccttt

SEQ ID NO: 389461 - DNA, 25 bp, Homo sapien
tcatctgctgcccggaggatgcatg

SEQ ID NO: 389462 - DNA, 25 bp, Homo sapien
tcttctgctctcaagctttcatctg

SEQ ID NO: 389463 - DNA, 25 bp, Homo sapien
catctgctgcccggaggatgcatgg

SEQ ID NO: 389464 - DNA, 25 bp, Homo sapien
ctttcatctgctgcccggaggatgc

SEQ ID NO: 389465 - DNA, 25 bp, Homo sapien
cttgaagacatcactctctttgcag

SEQ ID NO: 389466 - DNA, 25 bp, Homo sapien
tcttgaagacatcactctctttgca

SEQ ID NO: 389467 - DNA, 25 bp, Homo sapien
gagtctgccacacttggagtcctct

SEQ ID NO: 389468 - DNA, 25 bp, Homo sapien
cactttgaaagcacttctgagcctc

SEQ ID NO: 389469 - DNA, 25 bp, Homo sapien
ttcaatcactttgaaagcacttctg

SEQ ID NO: 389470 - DNA, 25 bp, Homo sapien
cttttctgagtctgccacacttgga

SEQ ID NO: 389471 - DNA, 25 bp, Homo sapien
gagcataagatgttggagaggagag

SEQ ID NO: 389472 - DNA, 25 bp, Homo sapien
ttgctggagcataagatgttggaga

SEQ ID NO: 389473 - DNA, 25 bp, Homo sapien
ggagcataagatgttggagaggaga

SEQ ID NO: 389474 - DNA, 25 bp, Homo sapien
tcattgctggagcataagatgttgg

SEQ ID NO: 389475 - DNA, 25 bp, Homo sapien
gccatagtgagaagtgtgcatttaa

SEQ ID NO: 389476 - DNA, 25 bp, Homo sapien
gtgcatttaacctggggattcccaa

SEQ ID NO: 389477 - DNA, 25 bp, Homo sapien
gtgagaagtgtgcatttaacctggg

SEQ ID NO: 389478 - DNA, 25 bp, Homo sapien
aaactgccatagtgagaagtgtgca

SEQ ID NO: 389479 - DNA, 25 bp, Homo sapien
tgaaggtttgtcatagccaccatca

SEQ ID NO: 389480 - DNA, 25 bp, Homo sapien
cgggtcttcaggctgaaggtttgtc

SEQ ID NO: 389481 - DNA, 25 bp, Homo sapien
cctcccgggtcttcaggctgaaggt

SEQ ID NO: 389482 - DNA, 25 bp, Homo sapien
caggctgaaggtttgtcatagccac

SEQ ID NO: 389483 - DNA, 25 bp, Homo sapien
gatatcccaatatagtccatgccca

SEQ ID NO: 389484 - DNA, 25 bp, Homo sapien
tgcaggttttgctccttaagtccct

SEQ ID NO: 389485 - DNA, 25 bp, Homo sapien
catttgatgcaaacgtgcaggtttt

SEQ ID NO: 389486 - DNA, 25 bp, Homo sapien
taagtccctgttgattgatatccca

SEQ ID NO: 389487 - DNA, 25 bp, Homo sapien
tattgctagaagctgtgccagtgtg

SEQ ID NO: 389488 - DNA, 25 bp, Homo sapien
gatgccactctgaatgtctcctgca

SEQ ID NO: 389489 - DNA, 25 bp, Homo sapien
gcaaataccgtaagttcctcagtgg

SEQ ID NO: 389490 - DNA, 25 bp, Homo sapien
agctcagggcgatctgtctcgggat

SEQ ID NO: 389491 - DNA, 25 bp, Homo sapien
aggagtgtgaccagatcagccctct

SEQ ID NO: 389492 - DNA, 25 bp, Homo sapien
aatgtgccaagaagcgaggagtgtg

SEQ ID NO: 389493 - DNA, 25 bp, Homo sapien
gaaccaaacaagtgagagtccttgc

SEQ ID NO: 389494 - DNA, 25 bp, Homo sapien
gtgaccagatcagccctctgaacct

SEQ ID NO: 389495 - DNA, 25 bp, Homo sapien
acattggaagggttgggtaattgct

SEQ ID NO: 389496 - DNA, 25 bp, Homo sapien
ggaggccgtggtggaatccatctca

SEQ ID NO: 389497 - DNA, 25 bp, Homo sapien
cagtgagtgtacataaagcccttgg

SEQ ID NO: 389498 - DNA, 25 bp, Homo sapien
tacagcatctggtctgaaagtgaca

SEQ ID NO: 389499 - DNA, 25 bp, Homo sapien
caatgatatccgttttgtaggaaca

SEQ ID NO: 389500 - DNA, 25 bp, Homo sapien
aaatgatatccattaaacctaaggg

SEQ ID NO: 389501 - DNA, 25 bp, Homo sapien
aaatcaaaggaacagactgcctggg

SEQ ID NO: 389502 - DNA, 25 bp, Homo sapien
tgggcttagccctgacaccacatgc

SEQ ID NO: 389503 - DNA, 25 bp, Homo sapien
aatgtcctctgttcctgggtgcgac

SEQ ID NO: 389504 - DNA, 25 bp, Homo sapien
tcattgtcacaaccaagggcgatgg

SEQ ID NO: 389505 - DNA, 25 bp, Homo sapien
ggtgcacgttttacatgaccagagc

SEQ ID NO: 389506 - DNA, 25 bp, Homo sapien
cggcagtggcgaaagagtaattcac

SEQ ID NO: 389507 - DNA, 25 bp, Homo sapien
ccaaaaggagggattcgaagagttg

SEQ ID NO: 389508 - DNA, 25 bp, Homo sapien
tttcctgacagcgaacaactagtct

SEQ ID NO: 389509 - DNA, 25 bp, Homo sapien
tgaaaccaagatgatagtgccaacc

SEQ ID NO: 389510 - DNA, 25 bp, Homo sapien
ccattctaattccatgacaaactga

SEQ ID NO: 389511 - DNA, 25 bp, Homo sapien
ggccagtcattccaccaaaccgatt

SEQ ID NO: 389512 - DNA, 25 bp, Homo sapien
caccaaaccgattgtgccttgcaga

SEQ ID NO: 389513 - DNA, 25 bp, Homo sapien
tcattccaccaaaccgattgtgcct

SEQ ID NO: 389514 - DNA, 25 bp, Homo sapien
caaaccgattgtgccttgcagataa

SEQ ID NO: 389515 - DNA, 25 bp, Homo sapien
gaccgcactaaatccaaaatgaggg

SEQ ID NO: 389516 - DNA, 25 bp, Homo sapien
ccgcactaaatccaaaatgagggta

SEQ ID NO: 389517 - DNA, 25 bp, Homo sapien
ctgaccgcactaaatccaaaatgag

SEQ ID NO: 389518 - DNA, 25 bp, Homo sapien
gcactaaatccaaaatgagggtaaa

SEQ ID NO: 389519 - DNA, 25 bp, Homo sapien
tctctcccatcgctgaatacaacca

SEQ ID NO: 389520 - DNA, 25 bp, Homo sapien
ccatcgctgaatacaaccagcatca

SEQ ID NO: 389521 - DNA, 25 bp, Homo sapien
tcccatcgctgaatacaaccagcat

SEQ ID NO: 389522 - DNA, 25 bp, Homo sapien
gctctctcccatcgctgaatacaac

SEQ ID NO: 389523 - DNA, 25 bp, Homo sapien
gctgaagccgtcctggcctgcttgc

SEQ ID NO: 389524 - DNA, 25 bp, Homo sapien
tgctgaagccgtcctggcctgcttg

SEQ ID NO: 389525 - DNA, 25 bp, Homo sapien
ctgaagccgtcctggcctgcttgct

SEQ ID NO: 389526 - DNA, 25 bp, Homo sapien
cactcccagttagtggcttcatcct

SEQ ID NO: 389527 - DNA, 25 bp, Homo sapien
gacagtccaccgtttgtgacacaga

SEQ ID NO: 389528 - DNA, 25 bp, Homo sapien
gggaccgctgtcctttggtctgcat

SEQ ID NO: 389529 - DNA, 25 bp, Homo sapien
tctgcaggtccctaggaaactcctg

SEQ ID NO: 389530 - DNA, 25 bp, Homo sapien
gaaggactgcgttcaccatatgcct

SEQ ID NO: 389531 - DNA, 25 bp, Homo sapien
gggaaggactgcgttcaccatatgc

SEQ ID NO: 389532 - DNA, 25 bp, Homo sapien
ggactgcgttcaccatatgccttgt

SEQ ID NO: 389533 - DNA, 25 bp, Homo sapien
cagctggggaaggactgcgttcacc

SEQ ID NO: 389534 - DNA, 25 bp, Homo sapien
accaggagatctccgcactttgtgc

SEQ ID NO: 389535 - DNA, 25 bp, Homo sapien
agatctccgcactttgtgctttgcc

SEQ ID NO: 389536 - DNA, 25 bp, Homo sapien
tgaaccaggagatctccgcactttg

SEQ ID NO: 389537 - DNA, 25 bp, Homo sapien
ctccctgaaccaggagatctccgca

SEQ ID NO: 389538 - DNA, 25 bp, Homo sapien
gtgaaagtctttgcattaacttgag

SEQ ID NO: 389539 - DNA, 25 bp, Homo sapien
caacatgaagtttaagtccatgaac

SEQ ID NO: 389540 - DNA, 25 bp, Homo sapien
acactgtcaccaatgcccagaggac

SEQ ID NO: 389541 - DNA, 25 bp, Homo sapien
ctaatactcatttgacaacatgaag

SEQ ID NO: 389542 - DNA, 25 bp, Homo sapien
ggatcactcagcaacgtgcttcttg

SEQ ID NO: 389543 - DNA, 25 bp, Homo sapien
ctggctgggcccacgcgtggatgca

SEQ ID NO: 389544 - DNA, 25 bp, Homo sapien
ggatgggaacccaggatcactcagc

SEQ ID NO: 389545 - DNA, 25 bp, Homo sapien
tgcacgggtgcggaggatgggaacc

SEQ ID NO: 389546 - DNA, 25 bp, Homo sapien
gaggctatcttcctagtgctaaatg

SEQ ID NO: 389547 - DNA, 25 bp, Homo sapien
gaggagattttcctgtacgctgagc

SEQ ID NO: 389548 - DNA, 25 bp, Homo sapien
ggtacacaccgttcctgtcagagag

SEQ ID NO: 389549 - DNA, 25 bp, Homo sapien
ggaacccattctttagaggtacaca

SEQ ID NO: 389550 - DNA, 25 bp, Homo sapien
ggttggtggcctcataagaagaaag

SEQ ID NO: 389551 - DNA, 25 bp, Homo sapien
caatgctatggacggaattgtgtcc

SEQ ID NO: 389552 - DNA, 25 bp, Homo sapien
gatcctaattcaatagggttggtgg

SEQ ID NO: 389553 - DNA, 25 bp, Homo sapien
attgtgtccacccaaagttcatgtg

SEQ ID NO: 389554 - DNA, 25 bp, Homo sapien
tattgagagacctaagactctgacg

SEQ ID NO: 389555 - DNA, 25 bp, Homo sapien
ccaagtcactgattcccaagcagtt

SEQ ID NO: 389556 - DNA, 25 bp, Homo sapien
agcagttccgagtgagtcactgtaa

SEQ ID NO: 389557 - DNA, 25 bp, Homo sapien
tcactgtaatgggcatggcggaaga

SEQ ID NO: 389558 - DNA, 25 bp, Homo sapien
caaaaacagctgatcctacaagtac

SEQ ID NO: 389559 - DNA, 25 bp, Homo sapien
ccacttcctccatatgttaatccat

SEQ ID NO: 389560 - DNA, 25 bp, Homo sapien
aataggctattttgactaagacaaa

SEQ ID NO: 389561 - DNA, 25 bp, Homo sapien
tcctccatatgttaatccattttaa

SEQ ID NO: 389562 - DNA, 25 bp, Homo sapien
tggtttcaatggcctctcttccaga

SEQ ID NO: 389563 - DNA, 25 bp, Homo sapien
cagaagcccagtggagactttcgaa

SEQ ID NO: 389564 - DNA, 25 bp, Homo sapien
tactagccaataactccagaaggtc

SEQ ID NO: 389565 - DNA, 25 bp, Homo sapien
tggatacattttcttacttgaacac

SEQ ID NO: 389566 - DNA, 25 bp, Homo sapien
gcttggtataaatcctcgggtccaa

SEQ ID NO: 389567 - DNA, 25 bp, Homo sapien
aaatcctcgggtccaaaggccagag

SEQ ID NO: 389568 - DNA, 25 bp, Homo sapien
ctgcttggtataaatcctcgggtcc

SEQ ID NO: 389569 - DNA, 25 bp, Homo sapien
ataaatcctcgggtccaaaggccag

SEQ ID NO: 389570 - DNA, 25 bp, Homo sapien
ccatgcaagctggagacgctgggat

SEQ ID NO: 389571 - DNA, 25 bp, Homo sapien
accaagagcctcagaaccagatatg

SEQ ID NO: 389572 - DNA, 25 bp, Homo sapien
gagacgctgggatgccaggagtgtg

SEQ ID NO: 389573 - DNA, 25 bp, Homo sapien
tatgccaatggtgtaactatcagtc

SEQ ID NO: 389574 - DNA, 25 bp, Homo sapien
gaccaccaggctgtatggcctgacc

SEQ ID NO: 389575 - DNA, 25 bp, Homo sapien
cagccagtcaataacggaatggcag

SEQ ID NO: 389576 - DNA, 25 bp, Homo sapien
ctccaaacacatctagaccaccagg

SEQ ID NO: 389577 - DNA, 25 bp, Homo sapien
caataacggaatggcagtttctcca

SEQ ID NO: 389578 - DNA, 25 bp, Homo sapien
gctccataattatcaggttctgggc

SEQ ID NO: 389579 - DNA, 25 bp, Homo sapien
ttttgctgggtaagaggaacctctg

SEQ ID NO: 389580 - DNA, 25 bp, Homo sapien
gtttgaaagctaaagccacagtgta

SEQ ID NO: 389581 - DNA, 25 bp, Homo sapien
aactgtcagtgtagaatgctccata

SEQ ID NO: 389582 - DNA, 25 bp, Homo sapien
gggagtctccaattgcctgtctgta

SEQ ID NO: 389583 - DNA, 25 bp, Homo sapien
gctgcaggtctggaaaccacgcatt

SEQ ID NO: 389584 - DNA, 25 bp, Homo sapien
gctctgcagcccttaacctacggga

SEQ ID NO: 389585 - DNA, 25 bp, Homo sapien
cctgtctgtagggatatggcaccag

SEQ ID NO: 389586 - DNA, 25 bp, Homo sapien
atacatcaatctcatcttcgggaaa

SEQ ID NO: 389587 - DNA, 25 bp, Homo sapien
tagactgtacatgctaaaatacaaa

SEQ ID NO: 389588 - DNA, 25 bp, Homo sapien
tcaatctcatcttcgggaaagccat

SEQ ID NO: 389589 - DNA, 25 bp, Homo sapien
tttagactgtacatgctaaaataca

SEQ ID NO: 389590 - DNA, 25 bp, Homo sapien
tttcgtttccgctgcactgctggtg

SEQ ID NO: 389591 - DNA, 25 bp, Homo sapien
cctgcagtctgtatctgggagctta

SEQ ID NO: 389592 - DNA, 25 bp, Homo sapien
cctgaggacaaaagcgatggaccca

SEQ ID NO: 389593 - DNA, 25 bp, Homo sapien
gatggccatgcgctcagccaactgt

SEQ ID NO: 389594 - DNA, 25 bp, Homo sapien
cagaagcagttcagtcagatagtca

SEQ ID NO: 389595 - DNA, 25 bp, Homo sapien
cttcagaagcagttcagtcagatag

SEQ ID NO: 389596 - DNA, 25 bp, Homo sapien
aagcagttcagtcagatagtcaaca

SEQ ID NO: 389597 - DNA, 25 bp, Homo sapien
gaagcagttcagtcagatagtcaac

SEQ ID NO: 389598 - DNA, 25 bp, Homo sapien
taatgtatgggacgctcttggagac

SEQ ID NO: 389599 - DNA, 25 bp, Homo sapien
gaatggctgcctgatgggaaactca

SEQ ID NO: 389600 - DNA, 25 bp, Homo sapien
tcgccagaaaacacgtagccggtgc

SEQ ID NO: 389601 - DNA, 25 bp, Homo sapien
tgccagtagtccaagagagtccgag

SEQ ID NO: 389602 - DNA, 25 bp, Homo sapien
tagtatgaagagtgtgcgtgcccaa

SEQ ID NO: 389603 - DNA, 25 bp, Homo sapien
caagagacgggcctattattgcctg

SEQ ID NO: 389604 - DNA, 25 bp, Homo sapien
gaaacttgtccggatgtgcctctgg

SEQ ID NO: 389605 - DNA, 25 bp, Homo sapien
catccagccctgtgaatgaaggagc

SEQ ID NO: 389606 - DNA, 25 bp, Homo sapien
tgtctggaactgtggaccacgcctg

SEQ ID NO: 389607 - DNA, 25 bp, Homo sapien
tgcaaaggtgaaaacgagtgaggcc

SEQ ID NO: 389608 - DNA, 25 bp, Homo sapien
tggcttccaccttactgaacatggg

SEQ ID NO: 389609 - DNA, 25 bp, Homo sapien
ttgttcagaaccagcttccactgag

SEQ ID NO: 389610 - DNA, 25 bp, Homo sapien
aatgttattataagaggagggtcag

SEQ ID NO: 389611 - DNA, 25 bp, Homo sapien
agttattgccaagagtgattttatc

SEQ ID NO: 389612 - DNA, 25 bp, Homo sapien
caaactaagacacttccaaatggag

SEQ ID NO: 389613 - DNA, 25 bp, Homo sapien
ttgtctataaatcgcccagtctgtg

SEQ ID NO: 389614 - DNA, 25 bp, Homo sapien
gcgacacagccatggaaattgctat

SEQ ID NO: 389615 - DNA, 25 bp, Homo sapien
taccacctttgagagatcccctgag

SEQ ID NO: 389616 - DNA, 25 bp, Homo sapien
ttaaaatctgccaggagcgacacag

SEQ ID NO: 389617 - DNA, 25 bp, Homo sapien
cttgtgggtgcctgaataccacctt

SEQ ID NO: 389618 - DNA, 25 bp, Homo sapien
tctctggagccgaattgaaccaagt

SEQ ID NO: 389619 - DNA, 25 bp, Homo sapien
taactctgcgcttctttgaccagtg

SEQ ID NO: 389620 - DNA, 25 bp, Homo sapien
tgagccaacagacctcacgctggct

SEQ ID NO: 389621 - DNA, 25 bp, Homo sapien
aatttgactgcgaagtctcctctgg

SEQ ID NO: 389622 - DNA, 25 bp, Homo sapien
tagcagatccccctaatatacaagg

SEQ ID NO: 389623 - DNA, 25 bp, Homo sapien
cataagagtctagcagatcccccta

SEQ ID NO: 389624 - DNA, 25 bp, Homo sapien
cagatccccctaatatacaaggaaa

SEQ ID NO: 389625 - DNA, 25 bp, Homo sapien
gagtctagcagatccccctaatata

SEQ ID NO: 389626 - DNA, 25 bp, Homo sapien
tggacttgtcattcccgacaggaca

SEQ ID NO: 389627 - DNA, 25 bp, Homo sapien
taagactctgaagcgtagggtccca

SEQ ID NO: 389628 - DNA, 25 bp, Homo sapien
gatcgaggagccaatctgtaccgca

SEQ ID NO: 389629 - DNA, 25 bp, Homo sapien
gggtcccattgctttgcttccgaaa

SEQ ID NO: 389630 - DNA, 25 bp, Homo sapien
cgcctaaagaggcataactgcccat

SEQ ID NO: 389631 - DNA, 25 bp, Homo sapien
gctgccatccacagtcagaacgggc

SEQ ID NO: 389632 - DNA, 25 bp, Homo sapien
tctcactgcaacaagcacaatttgc

SEQ ID NO: 389633 - DNA, 25 bp, Homo sapien
gaacgggcctacatctcaccaatct

SEQ ID NO: 389634 - DNA, 25 bp, Homo sapien
gccaggtggaaaattactccattca

SEQ ID NO: 389635 - DNA, 25 bp, Homo sapien
aagcagccagccaggtggaaaatta

SEQ ID NO: 389636 - DNA, 25 bp, Homo sapien
tgcagcgggtgagaggtgtggaagc

SEQ ID NO: 389637 - DNA, 25 bp, Homo sapien
ctactgctgcctgcagcgggtgaga

SEQ ID NO: 389638 - DNA, 25 bp, Homo sapien
catcgtcatgtgattctaaaggcga

SEQ ID NO: 389639 - DNA, 25 bp, Homo sapien
aaggtgtttactgtcttcagcttca

SEQ ID NO: 389640 - DNA, 25 bp, Homo sapien
cacataacatcgagtttaagggtaa

SEQ ID NO: 389641 - DNA, 25 bp, Homo sapien
ctaaaggcgaaaagatgactgctgc

SEQ ID NO: 389642 - DNA, 25 bp, Homo sapien
tgtgagagggatcgtctgtggctca

SEQ ID NO: 389643 - DNA, 25 bp, Homo sapien
ccttagatagcatctaggtgtgaga

SEQ ID NO: 389644 - DNA, 25 bp, Homo sapien
ctcagggtggcatccggttgccatc

SEQ ID NO: 389645 - DNA, 25 bp, Homo sapien
tgtggctcaggtgtcatcacgagcc

SEQ ID NO: 389646 - DNA, 25 bp, Homo sapien
ttagagaactgtgcttcccatcgtt

SEQ ID NO: 389647 - DNA, 25 bp, Homo sapien
gagaactgtgcttcccatcgttgca

SEQ ID NO: 389648 - DNA, 25 bp, Homo sapien
tcacttagagaactgtgcttcccat

SEQ ID NO: 389649 - DNA, 25 bp, Homo sapien
aactgtgcttcccatcgttgcagct

SEQ ID NO: 389650 - DNA, 25 bp, Homo sapien
catcttactcagacactcaggttgg

SEQ ID NO: 389651 - DNA, 25 bp, Homo sapien
actcagacactcaggttggtagaag

SEQ ID NO: 389652 - DNA, 25 bp, Homo sapien
tggtagaagcttcatcctaaaactg

SEQ ID NO: 389653 - DNA, 25 bp, Homo sapien
cattggtgggtgagggaattctgct

SEQ ID NO: 389654 - DNA, 25 bp, Homo sapien
ggaaaatcacaagccccatctcttg

SEQ ID NO: 389655 - DNA, 25 bp, Homo sapien
cgcagccaagatttaccaaggatta

SEQ ID NO: 389656 - DNA, 25 bp, Homo sapien
tctgagacgctccttgacttcgcct

SEQ ID NO: 389657 - DNA, 25 bp, Homo sapien
gaggccatgctgtgtaacatcttgc

SEQ ID NO: 389658 - DNA, 25 bp, Homo sapien
ccatatgtggtcaaagcagtggatc

SEQ ID NO: 389659 - DNA, 25 bp, Homo sapien
caaagcatcataggtaggctgcagg

SEQ ID NO: 389660 - DNA, 25 bp, Homo sapien
gagcattggccctcagctggcaact

SEQ ID NO: 389661 - DNA, 25 bp, Homo sapien
cattgttcatgtaggctggcagctt

SEQ ID NO: 389662 - DNA, 25 bp, Homo sapien
tgagcatgcagcgacttaaccacgg

SEQ ID NO: 389663 - DNA, 25 bp, Homo sapien
gcccgtgcttgaagtaagcctctgt

SEQ ID NO: 389664 - DNA, 25 bp, Homo sapien
gaaagtaaaaccttgcagcccgtgc

SEQ ID NO: 389665 - DNA, 25 bp, Homo sapien
ccattcgtggcatgagaggaatcct

SEQ ID NO: 389666 - DNA, 25 bp, Homo sapien
tggaagtggcgttaagccaccaaaa

SEQ ID NO: 389667 - DNA, 25 bp, Homo sapien
agtggaagtggcgttaagccaccaa

SEQ ID NO: 389668 - DNA, 25 bp, Homo sapien
gctggagagtggaagtggcgttaag

SEQ ID NO: 389669 - DNA, 25 bp, Homo sapien
gagcaagtagacaggaggaatctga

SEQ ID NO: 389670 - DNA, 25 bp, Homo sapien
actttccccgattctatggcaaccg

SEQ ID NO: 389671 - DNA, 25 bp, Homo sapien
taaggagatcctgcagtgaagagaa

SEQ ID NO: 389672 - DNA, 25 bp, Homo sapien
tgtcaaaggcaaagagtgccccgtg

SEQ ID NO: 389673 - DNA, 25 bp, Homo sapien
cccttgaatctaggcatggtcatgg

SEQ ID NO: 389674 - DNA, 25 bp, Homo sapien
tctggaaccgtgagcaaatgccttt

SEQ ID NO: 389675 - DNA, 25 bp, Homo sapien
tccaaaaatcgaaaccaggctcagt

SEQ ID NO: 389676 - DNA, 25 bp, Homo sapien
caatcggcaatctccaccaggaagg

SEQ ID NO: 389677 - DNA, 25 bp, Homo sapien
attgttctaagccaccaggttatgg

SEQ ID NO: 389678 - DNA, 25 bp, Homo sapien
acaaggtctgtatagtgggccctaa

SEQ ID NO: 389679 - DNA, 25 bp, Homo sapien
tgcatggccgagaaatgactacgct

SEQ ID NO: 389680 - DNA, 25 bp, Homo sapien
tatgaatatccatcaagcaagctgg

SEQ ID NO: 389681 - DNA, 25 bp, Homo sapien
gttgctcaagaaacgaactccctgg

SEQ ID NO: 389682 - DNA, 25 bp, Homo sapien
tacccatgtggttaagcattatgtc

SEQ ID NO: 389683 - DNA, 25 bp, Homo sapien
gttgcaccactttcgctattagaag

SEQ ID NO: 389684 - DNA, 25 bp, Homo sapien
gccctgggaggctaatatgaccact

SEQ ID NO: 389685 - DNA, 25 bp, Homo sapien
ctttctaattgtggagctcttccca

SEQ ID NO: 389686 - DNA, 25 bp, Homo sapien
ccgaacacgactttcttgaaagtat

SEQ ID NO: 389687 - DNA, 25 bp, Homo sapien
tgggtcccgaacacgactttcttga

SEQ ID NO: 389688 - DNA, 25 bp, Homo sapien
acacgactttcttgaaagtatagcc

SEQ ID NO: 389689 - DNA, 25 bp, Homo sapien
ctgggtcccgaacacgactttcttg

SEQ ID NO: 389690 - DNA, 25 bp, Homo sapien
cagatccggcagagtatctgctgtg

SEQ ID NO: 389691 - DNA, 25 bp, Homo sapien
tccagatccggcagagtatctgctg

SEQ ID NO: 389692 - DNA, 25 bp, Homo sapien
ctccagatccggcagagtatctgct

SEQ ID NO: 389693 - DNA, 25 bp, Homo sapien
gatccggcagagtatctgctgtgct

SEQ ID NO: 389694 - DNA, 25 bp, Homo sapien
tgtctggcctctagagagtcctgat

SEQ ID NO: 389695 - DNA, 25 bp, Homo sapien
cagcaagggtgcttcatttcctaaa

SEQ ID NO: 389696 - DNA, 25 bp, Homo sapien
tgtcctctctccatacaaatgtaga

SEQ ID NO: 389697 - DNA, 25 bp, Homo sapien
gttgtcttaccccagatgacaggta

SEQ ID NO: 389698 - DNA, 25 bp, Homo sapien
tgccaggacgaccagcacagtcagg

SEQ ID NO: 389699 - DNA, 25 bp, Homo sapien
gccctgcacctccatatgttcttcc

SEQ ID NO: 389700 - DNA, 25 bp, Homo sapien
gtgccaggacgaccagcacagtcag

SEQ ID NO: 389701 - DNA, 25 bp, Homo sapien
tgtgaaaagtcgtccagctgtacct

SEQ ID NO: 389702 - DNA, 25 bp, Homo sapien
gagtcaggtcttcctcgaagcccag

SEQ ID NO: 389703 - DNA, 25 bp, Homo sapien
ccagctgacaccgttggagagcgct

SEQ ID NO: 389704 - DNA, 25 bp, Homo sapien
gagattctcgccctgaaaatggcaa

SEQ ID NO: 389705 - DNA, 25 bp, Homo sapien
tccgggccacacaatgccaacagaa

SEQ ID NO: 389706 - DNA, 25 bp, Homo sapien
cctgtgagaagtccgggccacacaa

SEQ ID NO: 389707 - DNA, 25 bp, Homo sapien
cacacaatgccaacagaacaagcat

SEQ ID NO: 389708 - DNA, 25 bp, Homo sapien
agaagtccgggccacacaatgccaa

SEQ ID NO: 389709 - DNA, 25 bp, Homo sapien
ctggaaggtagccaatttttcaagt

SEQ ID NO: 389710 - DNA, 25 bp, Homo sapien
cataaatcaactgtgtgctgtaacc

SEQ ID NO: 389711 - DNA, 25 bp, Homo sapien
gaatggatctccataaatcaactgt

SEQ ID NO: 389712 - DNA, 25 bp, Homo sapien
gttaaatgaatggatctccataaat

SEQ ID NO: 389713 - DNA, 25 bp, Homo sapien
cctctgagaggtgaagcggtcattg

SEQ ID NO: 389714 - DNA, 25 bp, Homo sapien
gatcatctccgaggtgaagttcccg

SEQ ID NO: 389715 - DNA, 25 bp, Homo sapien
taaggtaagcagatccatgcaggcg

SEQ ID NO: 389716 - DNA, 25 bp, Homo sapien
catgcaggcgactgttctggaggct

SEQ ID NO: 389717 - DNA, 25 bp, Homo sapien
tccaggtagccacgcaagtcaaagt

SEQ ID NO: 389718 - DNA, 25 bp, Homo sapien
caaggttcattctcagcgactacaa

SEQ ID NO: 389719 - DNA, 25 bp, Homo sapien
tgcactttgaaggtcgctgggctcc

SEQ ID NO: 389720 - DNA, 25 bp, Homo sapien
gctgggctccggaacaaaataatag

SEQ ID NO: 389721 - DNA, 25 bp, Homo sapien
taaaaagcagacgagggtataagat

SEQ ID NO: 389722 - DNA, 25 bp, Homo sapien
tttccaggcatcgtggatgaaggag

SEQ ID NO: 389723 - DNA, 25 bp, Homo sapien
gacagcagatgtgattggccttatc

SEQ ID NO: 389724 - DNA, 25 bp, Homo sapien
aaggtcgccatatgatttttccagg

SEQ ID NO: 389725 - DNA, 25 bp, Homo sapien
cactgtgtgggagctttgtgactga

SEQ ID NO: 389726 - DNA, 25 bp, Homo sapien
tacccacgacatgacaggatgctct

SEQ ID NO: 389727 - DNA, 25 bp, Homo sapien
tgtgactgagcgagaactttaggtt

SEQ ID NO: 389728 - DNA, 25 bp, Homo sapien
cagtcttgagttgaaggttggacca

SEQ ID NO: 389729 - DNA, 25 bp, Homo sapien
cagcagcagcgtattgtaagagtac

SEQ ID NO: 389730 - DNA, 25 bp, Homo sapien
gcagttgcagccacaacaacgacgg

SEQ ID NO: 389731 - DNA, 25 bp, Homo sapien
ggtgcctgctagtccaagtccaact

SEQ ID NO: 389732 - DNA, 25 bp, Homo sapien
taagagtacacgtcggcgtcagaag

SEQ ID NO: 389733 - DNA, 25 bp, Homo sapien
tcagaaaatagatgtggtttcaaac

SEQ ID NO: 389734 - DNA, 25 bp, Homo sapien
ttgttttcagaaaatagatgtggtt

SEQ ID NO: 389735 - DNA, 25 bp, Homo sapien
tgttttcagaaaatagatgtggttt

SEQ ID NO: 389736 - DNA, 25 bp, Homo sapien
gaaaatagatgtggtttcaaactta

SEQ ID NO: 389737 - DNA, 25 bp, Homo sapien
gatgaaagtttatcctggtccatgg

SEQ ID NO: 389738 - DNA, 25 bp, Homo sapien
ggtccatggactctactccccagtt

SEQ ID NO: 389739 - DNA, 25 bp, Homo sapien
ggaagtccatagctttgccgctgcg

SEQ ID NO: 389740 - DNA, 25 bp, Homo sapien
taattggcaatggatacctacgtag

SEQ ID NO: 389741 - DNA, 25 bp, Homo sapien
ctacaattagaccattttatgttca

SEQ ID NO: 389742 - DNA, 25 bp, Homo sapien
tacaattagaccattttatgttcat

SEQ ID NO: 389743 - DNA, 25 bp, Homo sapien
ttgtagccggagttttcatttccac

SEQ ID NO: 389744 - DNA, 25 bp, Homo sapien
gaattgtagccggagttttcatttc

SEQ ID NO: 389745 - DNA, 25 bp, Homo sapien
ttcatctgaattgtagccggagttt

SEQ ID NO: 389746 - DNA, 25 bp, Homo sapien
catctgaattgtagccggagttttc

SEQ ID NO: 389747 - DNA, 25 bp, Homo sapien
caaaaaccaagctgtgtgctctaac

SEQ ID NO: 389748 - DNA, 25 bp, Homo sapien
taagtggcaaaaaccaagctgtgtg

SEQ ID NO: 389749 - DNA, 25 bp, Homo sapien
ctgcaacagaagaacaattttagag

SEQ ID NO: 389750 - DNA, 25 bp, Homo sapien
caattttagagtcattaagtggcaa

SEQ ID NO: 389751 - DNA, 25 bp, Homo sapien
cactggattcacaggatttgggagg

SEQ ID NO: 389752 - DNA, 25 bp, Homo sapien
tcaggatcactggattcacaggatt

SEQ ID NO: 389753 - DNA, 25 bp, Homo sapien
ggatcactggattcacaggatttgg

SEQ ID NO: 389754 - DNA, 25 bp, Homo sapien
gttcaggatcactggattcacagga

SEQ ID NO: 389755 - DNA, 25 bp, Homo sapien
tgagcacgtgggagcgggtaaccag

SEQ ID NO: 389756 - DNA, 25 bp, Homo sapien
tcagccctcaagcttatcagcatag

SEQ ID NO: 389757 - DNA, 25 bp, Homo sapien
cagcatagaacttgcatgcagagca

SEQ ID NO: 389758 - DNA, 25 bp, Homo sapien
ggccccaagggtccaagtacagatg

SEQ ID NO: 389759 - DNA, 25 bp, Homo sapien
aagtggccagttgaccacaacaagg

SEQ ID NO: 389760 - DNA, 25 bp, Homo sapien
aaaaggaacctctgtaccagcgtca

SEQ ID NO: 389761 - DNA, 25 bp, Homo sapien
caagctgtagcttcactattctggc

SEQ ID NO: 389762 - DNA, 25 bp, Homo sapien
ggcattcggaattcagaggtcctca

SEQ ID NO: 389763 - DNA, 25 bp, Homo sapien
tataaggaactaaggcttattgcag

SEQ ID NO: 389764 - DNA, 25 bp, Homo sapien
aggcttattgcagaatggagaaagt

SEQ ID NO: 389765 - DNA, 25 bp, Homo sapien
gaactaaggcttattgcagaatgga

SEQ ID NO: 389766 - DNA, 25 bp, Homo sapien
tctataaggaactaaggcttattgc

SEQ ID NO: 389767 - DNA, 25 bp, Homo sapien
gcagttgccgtcctgttcacaaaac

SEQ ID NO: 389768 - DNA, 25 bp, Homo sapien
gaggatgcagcatgagcagagagcg

SEQ ID NO: 389769 - DNA, 25 bp, Homo sapien
tatgtggtcagcagttgccgtcctg

SEQ ID NO: 389770 - DNA, 25 bp, Homo sapien
cagagagcgagtgtatgtggtcagc

SEQ ID NO: 389771 - DNA, 25 bp, Homo sapien
cctcctgaaattgccgagtgttaac

SEQ ID NO: 389772 - DNA, 25 bp, Homo sapien
tgaaattgccgagtgttaacagatc

SEQ ID NO: 389773 - DNA, 25 bp, Homo sapien
aaattgccgagtgttaacagatcac

SEQ ID NO: 389774 - DNA, 25 bp, Homo sapien
cctgaaattgccgagtgttaacaga

SEQ ID NO: 389775 - DNA, 25 bp, Homo sapien
acttcttaaagagcgtgcattgttt

SEQ ID NO: 389776 - DNA, 25 bp, Homo sapien
tctaaacttcttaaagagcgtgcat

SEQ ID NO: 389777 - DNA, 25 bp, Homo sapien
atttctaaacttcttaaagagcgtg

SEQ ID NO: 389778 - DNA, 25 bp, Homo sapien
taaacttcttaaagagcgtgcattg

SEQ ID NO: 389779 - DNA, 25 bp, Homo sapien
aatgggttgagatcactgtaaaatg

SEQ ID NO: 389780 - DNA, 25 bp, Homo sapien
ttaatgggttgagatcactgtaaaa

SEQ ID NO: 389781 - DNA, 25 bp, Homo sapien
caatttaatgggttgagatcactgt

SEQ ID NO: 389782 - DNA, 25 bp, Homo sapien
aaagtcaatttaatgggttgagatc

SEQ ID NO: 389783 - DNA, 25 bp, Homo sapien
ggcctgggtggacgttgatcagccc

SEQ ID NO: 389784 - DNA, 25 bp, Homo sapien
gctggcctgggtggacgttgatcag

SEQ ID NO: 389785 - DNA, 25 bp, Homo sapien
tggcctgggtggacgttgatcagcc

SEQ ID NO: 389786 - DNA, 25 bp, Homo sapien
gcctgggtggacgttgatcagcccg

SEQ ID NO: 389787 - DNA, 25 bp, Homo sapien
aattgtcagccaagtgctcagtgga

SEQ ID NO: 389788 - DNA, 25 bp, Homo sapien
gctatactacagttgtattactgac

SEQ ID NO: 389789 - DNA, 25 bp, Homo sapien
gccatcgccgtgttttgaattgtca

SEQ ID NO: 389790 - DNA, 25 bp, Homo sapien
ggctttgctatactacagttgtatt

SEQ ID NO: 389791 - DNA, 25 bp, Homo sapien
tttgaactctgggaaaatcgattcc

SEQ ID NO: 389792 - DNA, 25 bp, Homo sapien
tgatgactccgacatctcctcttca

SEQ ID NO: 389793 - DNA, 25 bp, Homo sapien
tcttcaggtaatgttggcaaagctg

SEQ ID NO: 389794 - DNA, 25 bp, Homo sapien
tctcactgtcaagtatcagttctga

SEQ ID NO: 389795 - DNA, 25 bp, Homo sapien
cataagatatttaggaacgtgcaca

SEQ ID NO: 389796 - DNA, 25 bp, Homo sapien
tgcggagtaggtgaggtccatcctc

SEQ ID NO: 389797 - DNA, 25 bp, Homo sapien
taggccacatctaattcatttgagg

SEQ ID NO: 389798 - DNA, 25 bp, Homo sapien
catcctctgcaaagcataggccaca

SEQ ID NO: 389799 - DNA, 25 bp, Homo sapien
cgagaaataaccttgaccatgaagt

SEQ ID NO: 389800 - DNA, 25 bp, Homo sapien
caccattttcggttgagagctgcct

SEQ ID NO: 389801 - DNA, 25 bp, Homo sapien
tagaaactggctgagtgcacagaca

SEQ ID NO: 389802 - DNA, 25 bp, Homo sapien
agagctgcatcttcccgagaaataa

SEQ ID NO: 389803 - DNA, 25 bp, Homo sapien
gactgacccatacggactacactga

SEQ ID NO: 389804 - DNA, 25 bp, Homo sapien
agagtggatggccagaaccctgtca

SEQ ID NO: 389805 - DNA, 25 bp, Homo sapien
tggtccagtggatggtaacagttcc

SEQ ID NO: 389806 - DNA, 25 bp, Homo sapien
taagcagtggagcacactaccaggc

SEQ ID NO: 389807 - DNA, 25 bp, Homo sapien
cacgaagggactaactcggtccttg

SEQ ID NO: 389808 - DNA, 25 bp, Homo sapien
caagattcatgaagggaacccacga

SEQ ID NO: 389809 - DNA, 25 bp, Homo sapien
tcatgaagggaacccacgaagggac

SEQ ID NO: 389810 - DNA, 25 bp, Homo sapien
aatcaagattcatgaagggaaccca

SEQ ID NO: 389811 - DNA, 25 bp, Homo sapien
ggctgcttgcgagatggaactggag

SEQ ID NO: 389812 - DNA, 25 bp, Homo sapien
taaaatcgtcttagagcagcgtcct

SEQ ID NO: 389813 - DNA, 25 bp, Homo sapien
tttgcgagggttgacaccaatgccg

SEQ ID NO: 389814 - DNA, 25 bp, Homo sapien
tgtggcaaagacaggctcatctgca

SEQ ID NO: 389815 - DNA, 25 bp, Homo sapien
gctgactgtgttgcctccgagaaga

SEQ ID NO: 389816 - DNA, 25 bp, Homo sapien
gaaccatagaggaagttaaacagcc

SEQ ID NO: 389817 - DNA, 25 bp, Homo sapien
taaacagccagggactaacagcttc

SEQ ID NO: 389818 - DNA, 25 bp, Homo sapien
ccgtcagtgtagagatgacacacca

SEQ ID NO: 389819 - DNA, 25 bp, Homo sapien
tgacacaccacgtctgcaagcagga

SEQ ID NO: 389820 - DNA, 25 bp, Homo sapien
atcccagtgttctgttatctgccag

SEQ ID NO: 389821 - DNA, 25 bp, Homo sapien
agaactgacaatcccagtgttctgt

SEQ ID NO: 389822 - DNA, 25 bp, Homo sapien
cacagcgagctaagatacagaagaa

SEQ ID NO: 389823 - DNA, 25 bp, Homo sapien
gggaagggagtactgcagactcggt

SEQ ID NO: 389824 - DNA, 25 bp, Homo sapien
gggtgtctcctgggttagagaccat

SEQ ID NO: 389825 - DNA, 25 bp, Homo sapien
gcaagggctacagccttttcccaag

SEQ ID NO: 389826 - DNA, 25 bp, Homo sapien
gggctacagccttttcccaagcgct

SEQ ID NO: 389827 - DNA, 25 bp, Homo sapien
aagcaagggctacagccttttccca

SEQ ID NO: 389828 - DNA, 25 bp, Homo sapien
aagggctacagccttttcccaagcg

SEQ ID NO: 389829 - DNA, 25 bp, Homo sapien
ggtgtctcctgggttagagatcatc

SEQ ID NO: 389830 - DNA, 25 bp, Homo sapien
tgtacgtgagtggtgccctcagtgt

SEQ ID NO: 389831 - DNA, 25 bp, Homo sapien
acagccttttcccaagcgctcataa

SEQ ID NO: 389832 - DNA, 25 bp, Homo sapien
gcctctgtgtacgtgagtggtgccc

SEQ ID NO: 389833 - DNA, 25 bp, Homo sapien
gaggggacaagagttctaaacagac

SEQ ID NO: 389834 - DNA, 25 bp, Homo sapien
aggaggggacaagagttctaaacag

SEQ ID NO: 389835 - DNA, 25 bp, Homo sapien
ggaggggacaagagttctaaacaga

SEQ ID NO: 389836 - DNA, 25 bp, Homo sapien
ggcacagcccaaggagtatccttgg

SEQ ID NO: 389837 - DNA, 25 bp, Homo sapien
cagagtgcacgaacggcctgggcac

SEQ ID NO: 389838 - DNA, 25 bp, Homo sapien
caaaacacagagtgcacgaacggcc

SEQ ID NO: 389839 - DNA, 25 bp, Homo sapien
tgcatacatacaccaccctgagacc

SEQ ID NO: 389840 - DNA, 25 bp, Homo sapien
caagagagctcctcagcttggatgc

SEQ ID NO: 389841 - DNA, 25 bp, Homo sapien
tcccaagagagctcctcagcttgga

SEQ ID NO: 389842 - DNA, 25 bp, Homo sapien
agctcctcagcttggatgctgcttt

SEQ ID NO: 389843 - DNA, 25 bp, Homo sapien
catcccaagagagctcctcagcttg

SEQ ID NO: 389844 - DNA, 25 bp, Homo sapien
tgagctactccgtcatctccatgac

SEQ ID NO: 389845 - DNA, 25 bp, Homo sapien
caccatcctctctgtgagctgcacc

SEQ ID NO: 389846 - DNA, 25 bp, Homo sapien
actgcactatgccttccatgatggc

SEQ ID NO: 389847 - DNA, 25 bp, Homo sapien
tttcatgaactgtcttggtgagatc

SEQ ID NO: 389848 - DNA, 25 bp, Homo sapien
tgcagacatagcgctgttttaatcc

SEQ ID NO: 389849 - DNA, 25 bp, Homo sapien
catcctccttggaacggagactgca

SEQ ID NO: 389850 - DNA, 25 bp, Homo sapien
atcctccttggaacggagactgcac

SEQ ID NO: 389851 - DNA, 25 bp, Homo sapien
ctgttttaatccagcacagatgaag

SEQ ID NO: 389852 - DNA, 25 bp, Homo sapien
gtcccaacatcgtgaggctctgaag

SEQ ID NO: 389853 - DNA, 25 bp, Homo sapien
gagtgggccctcaactgtcccaaaa

SEQ ID NO: 389854 - DNA, 25 bp, Homo sapien
tcccaaaaaagcgttgtgcagactg

SEQ ID NO: 389855 - DNA, 25 bp, Homo sapien
tgttactctgccagtcccggtacag

SEQ ID NO: 389856 - DNA, 25 bp, Homo sapien
gctgctccaccggttctggcttttc

SEQ ID NO: 389857 - DNA, 25 bp, Homo sapien
ctggagccaatgagatgcattcacc

SEQ ID NO: 389858 - DNA, 25 bp, Homo sapien
aagcctggccgacatctgagagcac

SEQ ID NO: 389859 - DNA, 25 bp, Homo sapien
aagagctgcccggtggcatcatgcc

SEQ ID NO: 389860 - DNA, 25 bp, Homo sapien
gatgagacctccaagttcggcaaag

SEQ ID NO: 389861 - DNA, 25 bp, Homo sapien
cctgcggttattcaagagaagccca

SEQ ID NO: 389862 - DNA, 25 bp, Homo sapien
tttgcaccaagtcacaaggctctgt

SEQ ID NO: 389863 - DNA, 25 bp, Homo sapien
tctgccacggttgagccaagcgtaa

SEQ ID NO: 389864 - DNA, 25 bp, Homo sapien
tctctgattccaacggatgcatttt

SEQ ID NO: 389865 - DNA, 25 bp, Homo sapien
gttacgaagttgttaatttcagctg

SEQ ID NO: 389866 - DNA, 25 bp, Homo sapien
cctggatctctgattccaacggatg

SEQ ID NO: 389867 - DNA, 25 bp, Homo sapien
tttcagctgaagtttcctggatctc

SEQ ID NO: 389868 - DNA, 25 bp, Homo sapien
aaagaatactgagatttgtgtcatt

SEQ ID NO: 389869 - DNA, 25 bp, Homo sapien
ttctcatgaaggacgtaggctctac

SEQ ID NO: 389870 - DNA, 25 bp, Homo sapien
cacatggatgtcaagagactccaaa

SEQ ID NO: 389871 - DNA, 25 bp, Homo sapien
ctcacatggatgtcaagagactcca

SEQ ID NO: 389872 - DNA, 25 bp, Homo sapien
aggtaggacactccctgggctagaa

SEQ ID NO: 389873 - DNA, 25 bp, Homo sapien
ggatgtgactccacgggcatgggct

SEQ ID NO: 389874 - DNA, 25 bp, Homo sapien
gctagaaagaagagatgtgtcctcc

SEQ ID NO: 389875 - DNA, 25 bp, Homo sapien
tgaaccccaaaccacatggaggtag

SEQ ID NO: 389876 - DNA, 25 bp, Homo sapien
ggcatctccttcagcgcagcttggg

SEQ ID NO: 389877 - DNA, 25 bp, Homo sapien
tagaagcacgctcaggaaagaaagc

SEQ ID NO: 389878 - DNA, 25 bp, Homo sapien
gaaagaaagccgggcaaagtctggc

SEQ ID NO: 389879 - DNA, 25 bp, Homo sapien
acaggagctgatagaagcacgctca

SEQ ID NO: 389880 - DNA, 25 bp, Homo sapien
ctccagtcaccccagtaagcccttc

SEQ ID NO: 389881 - DNA, 25 bp, Homo sapien
gcccttctaagggtttcttgtctgc

SEQ ID NO: 389882 - DNA, 25 bp, Homo sapien
cccttctaagggtttcttgtctgct

SEQ ID NO: 389883 - DNA, 25 bp, Homo sapien
agtcaccccagtaagcccttctaag

SEQ ID NO: 389884 - DNA, 25 bp, Homo sapien
gaatggcagcatctcgacaagcagt

SEQ ID NO: 389885 - DNA, 25 bp, Homo sapien
caagcagttccctagatggatcata

SEQ ID NO: 389886 - DNA, 25 bp, Homo sapien
tgtgctgtagcatcctgatatcaac

SEQ ID NO: 389887 - DNA, 25 bp, Homo sapien
ccccggtgctgtgtcttctcgtaag

SEQ ID NO: 389888 - DNA, 25 bp, Homo sapien
caagcagaagggacccactgcttcc

SEQ ID NO: 389889 - DNA, 25 bp, Homo sapien
ctggactgttcatttttgcctttgc

SEQ ID NO: 389890 - DNA, 25 bp, Homo sapien
cagacaggtacccagactcagccag

SEQ ID NO: 389891 - DNA, 25 bp, Homo sapien
cccaagcagaagggacccactgctt

SEQ ID NO: 389892 - DNA, 25 bp, Homo sapien
agtctgcagagcccacgctgaggca

SEQ ID NO: 389893 - DNA, 25 bp, Homo sapien
cagagcccacgctgaggcagccacc

SEQ ID NO: 389894 - DNA, 25 bp, Homo sapien
gtctgcagagcccacgctgaggcag

SEQ ID NO: 389895 - DNA, 25 bp, Homo sapien
ctgcagagcccacgctgaggcagcc

SEQ ID NO: 389896 - DNA, 25 bp, Homo sapien
gctgccatctctcgttgatccaagg

SEQ ID NO: 389897 - DNA, 25 bp, Homo sapien
ttgatccaaggtgctccacagagca

SEQ ID NO: 389898 - DNA, 25 bp, Homo sapien
agagcaccaattccccatgcatctg

SEQ ID NO: 389899 - DNA, 25 bp, Homo sapien
atctggaccatgcaaagtcttgcac

SEQ ID NO: 389900 - DNA, 25 bp, Homo sapien
tgcagacacggcatcttcctggatg

SEQ ID NO: 389901 - DNA, 25 bp, Homo sapien
cgcctgaaatcagcgtccctggtgc

SEQ ID NO: 389902 - DNA, 25 bp, Homo sapien
aaatgctcctgtttgggaccctcca

SEQ ID NO: 389903 - DNA, 25 bp, Homo sapien
ctccacaacaccttgtccccatgca

SEQ ID NO: 389904 - DNA, 25 bp, Homo sapien
gatgttttccaagggatctagagag

SEQ ID NO: 389905 - DNA, 25 bp, Homo sapien
gccacaatgaccaatttaatgcagg

SEQ ID NO: 389906 - DNA, 25 bp, Homo sapien
gaaggcagtacaagttctccctaaa

SEQ ID NO: 389907 - DNA, 25 bp, Homo sapien
tcagttatgactgctaagaagagca

SEQ ID NO: 389908 - DNA, 25 bp, Homo sapien
tcttgtcttttccattggttgcccc

SEQ ID NO: 389909 - DNA, 25 bp, Homo sapien
tgtcttgtcttttccattggttgcc

SEQ ID NO: 389910 - DNA, 25 bp, Homo sapien
gtcttgtcttttccattggttgccc

SEQ ID NO: 389911 - DNA, 25 bp, Homo sapien
caaactaagtcttaagtactcctag

SEQ ID NO: 389912 - DNA, 25 bp, Homo sapien
ctaagtcttaagtactcctagaata

SEQ ID NO: 389913 - DNA, 25 bp, Homo sapien
caaatcaaactaagtcttaagtact

SEQ ID NO: 389914 - DNA, 25 bp, Homo sapien
atcaaactaagtcttaagtactcct

SEQ ID NO: 389915 - DNA, 25 bp, Homo sapien
aactctgatatgaccacaatccaca

SEQ ID NO: 389916 - DNA, 25 bp, Homo sapien
tcctcaaactctgatatgaccacaa

SEQ ID NO: 389917 - DNA, 25 bp, Homo sapien
tccgtgtaccatgatccatcctcaa

SEQ ID NO: 389918 - DNA, 25 bp, Homo sapien
agcaaaactctgaatcgcaggctgc

SEQ ID NO: 389919 - DNA, 25 bp, Homo sapien
tcccccgagctatgttctagattgg

SEQ ID NO: 389920 - DNA, 25 bp, Homo sapien
tctagattggctgctagagagcttt

SEQ ID NO: 389921 - DNA, 25 bp, Homo sapien
gctagagagctttcttgggtgaccc

SEQ ID NO: 389922 - DNA, 25 bp, Homo sapien
agagagctttcttgggtgaccctgg

SEQ ID NO: 389923 - DNA, 25 bp, Homo sapien
aaagcccctgtctgtccgctcctcc

SEQ ID NO: 389924 - DNA, 25 bp, Homo sapien
cctgtctgtccgctcctccagatag

SEQ ID NO: 389925 - DNA, 25 bp, Homo sapien
cccctgtctgtccgctcctccagat

SEQ ID NO: 389926 - DNA, 25 bp, Homo sapien
tgtctgtccgctcctccagataggc

SEQ ID NO: 389927 - DNA, 25 bp, Homo sapien
caaagttgccacagcttagctgtac

SEQ ID NO: 389928 - DNA, 25 bp, Homo sapien
tgcaaagttgccacagcttagctgt

SEQ ID NO: 389929 - DNA, 25 bp, Homo sapien
tagtctctgcaaagttgccacagct

SEQ ID NO: 389930 - DNA, 25 bp, Homo sapien
tctctgcaaagttgccacagcttag

SEQ ID NO: 389931 - DNA, 25 bp, Homo sapien
ctgaggagggatgaggggcttacac

SEQ ID NO: 389932 - DNA, 25 bp, Homo sapien
gaggagggatgaggggcttacaccg

SEQ ID NO: 389933 - DNA, 25 bp, Homo sapien
aggagggatgaggggcttacaccga

SEQ ID NO: 389934 - DNA, 25 bp, Homo sapien
tgaggagggatgaggggcttacacc

SEQ ID NO: 389935 - DNA, 25 bp, Homo sapien
gccacctccttgtccccttaatgac

SEQ ID NO: 389936 - DNA, 25 bp, Homo sapien
cacctccttgtccccttaatgacac

SEQ ID NO: 389937 - DNA, 25 bp, Homo sapien
ccacctccttgtccccttaatgaca

SEQ ID NO: 389938 - DNA, 25 bp, Homo sapien
aacgccagagcatgattcgatttcc

SEQ ID NO: 389939 - DNA, 25 bp, Homo sapien
gagcatgattcgatttccaattgtt

SEQ ID NO: 389940 - DNA, 25 bp, Homo sapien
cgccagagcatgattcgatttccaa

SEQ ID NO: 389941 - DNA, 25 bp, Homo sapien
tgattcgatttccaattgttttcag

SEQ ID NO: 389942 - DNA, 25 bp, Homo sapien
tgcctccaccaagaaaatacatcgt

SEQ ID NO: 389943 - DNA, 25 bp, Homo sapien
tgcgatatccccttgatgcttacag

SEQ ID NO: 389944 - DNA, 25 bp, Homo sapien
aatacatcgtatttctcctgtggac

SEQ ID NO: 389945 - DNA, 25 bp, Homo sapien
tcctgtggactcatgtgcgatatcc

SEQ ID NO: 389946 - DNA, 25 bp, Homo sapien
tttctccttgtgggacatttgcttc

SEQ ID NO: 389947 - DNA, 25 bp, Homo sapien
catttgcttctccttccataccctt

SEQ ID NO: 389948 - DNA, 25 bp, Homo sapien
tctgaggcttccctgcttcatgtta

SEQ ID NO: 389949 - DNA, 25 bp, Homo sapien
tgaggcttccctgcttcatgttatt

SEQ ID NO: 389950 - DNA, 25 bp, Homo sapien
aatcagcagctagctgccccaacag

SEQ ID NO: 389951 - DNA, 25 bp, Homo sapien
caggaatcagcagctagctgcccca

SEQ ID NO: 389952 - DNA, 25 bp, Homo sapien
cccaggaatcagcagctagctgccc

SEQ ID NO: 389953 - DNA, 25 bp, Homo sapien
aggaatcagcagctagctgccccaa

SEQ ID NO: 389954 - DNA, 25 bp, Homo sapien
tatgaattgtttctggctggacacc

SEQ ID NO: 389955 - DNA, 25 bp, Homo sapien
gtggcacatgccaggcaacattagg

SEQ ID NO: 389956 - DNA, 25 bp, Homo sapien
cattaggagcagtcaagcatctgct

SEQ ID NO: 389957 - DNA, 25 bp, Homo sapien
tctatcgtgtcgctaaatatcttcc

SEQ ID NO: 389958 - DNA, 25 bp, Homo sapien
gaagctggaggacatcattccccga

SEQ ID NO: 389959 - DNA, 25 bp, Homo sapien
tttgtaaggagtagagggccatccc

SEQ ID NO: 389960 - DNA, 25 bp, Homo sapien
tgcagaggtgcattgcccaagacgg

SEQ ID NO: 389961 - DNA, 25 bp, Homo sapien
ccaggcaggtgcactagaaggatag

SEQ ID NO: 389962 - DNA, 25 bp, Homo sapien
acagcttgactaaggacagcttgaa

SEQ ID NO: 389963 - DNA, 25 bp, Homo sapien
tgactaaggacagcttgaattcaag

SEQ ID NO: 389964 - DNA, 25 bp, Homo sapien
gagacaatcagagaggtatgatgag

SEQ ID NO: 389965 - DNA, 25 bp, Homo sapien
gatgagaaacagcttgactaaggac

SEQ ID NO: 389966 - DNA, 25 bp, Homo sapien
gccattgtcatgtccagattgcagt

SEQ ID NO: 389967 - DNA, 25 bp, Homo sapien
tatggacgaaacgaatgccattgtc

SEQ ID NO: 389968 - DNA, 25 bp, Homo sapien
tagtggcctagaggcctttgcagag

SEQ ID NO: 389969 - DNA, 25 bp, Homo sapien
agcagggcgtctaaacgagtggtat

SEQ ID NO: 389970 - DNA, 25 bp, Homo sapien
ttcagatcaacactcggttgtacct

SEQ ID NO: 389971 - DNA, 25 bp, Homo sapien
gctcccagtgttaggtttatgttca

SEQ ID NO: 389972 - DNA, 25 bp, Homo sapien
tgtactgggcatggcgtggccagag

SEQ ID NO: 389973 - DNA, 25 bp, Homo sapien
cggttgtaccttaaagcacaggcca

SEQ ID NO: 389974 - DNA, 25 bp, Homo sapien
agatgggaaacctggcacctgagaa

SEQ ID NO: 389975 - DNA, 25 bp, Homo sapien
tccctgcagcattgtcatggaggag

SEQ ID NO: 389976 - DNA, 25 bp, Homo sapien
gacgtcagggagcactgctgtttca

SEQ ID NO: 389977 - DNA, 25 bp, Homo sapien
ggcctccaaggaggcatgtagctgg

SEQ ID NO: 389978 - DNA, 25 bp, Homo sapien
agagagtccagttcccggggcggcg

SEQ ID NO: 389979 - DNA, 25 bp, Homo sapien
tttaaggaatcgctacttttctgta

SEQ ID NO: 389980 - DNA, 25 bp, Homo sapien
ggaatcgctacttttctgtatactt

SEQ ID NO: 389981 - DNA, 25 bp, Homo sapien
gtcagatgctgttagaggagtggca

SEQ ID NO: 389982 - DNA, 25 bp, Homo sapien
tgcatctgcagagctgtaagcagcc

SEQ ID NO: 389983 - DNA, 25 bp, Homo sapien
agcagcctcctctcaattttcctag

SEQ ID NO: 389984 - DNA, 25 bp, Homo sapien
gtttccacctgggacccttcaatca

SEQ ID NO: 389985 - DNA, 25 bp, Homo sapien
tttcctagatcctaatcagtttcca

SEQ ID NO: 389986 - DNA, 25 bp, Homo sapien
ccaagagcctcgctgccaccctggg

SEQ ID NO: 389987 - DNA, 25 bp, Homo sapien
caagagcctcgctgccaccctgggc

SEQ ID NO: 389988 - DNA, 25 bp, Homo sapien
tctcctgggacctgggccaagagcc

SEQ ID NO: 389989 - DNA, 25 bp, Homo sapien
ggacctgggccaagagcctcgctgc

SEQ ID NO: 389990 - DNA, 25 bp, Homo sapien
ccagtgcagccaagacggaaaaaca

SEQ ID NO: 389991 - DNA, 25 bp, Homo sapien
tgggcctctgtgctgtataccttac

SEQ ID NO: 389992 - DNA, 25 bp, Homo sapien
cagtcgtggaaggtaaatgtctttc

SEQ ID NO: 389993 - DNA, 25 bp, Homo sapien
tagtctgatgagacccggcgtgttc

SEQ ID NO: 389994 - DNA, 25 bp, Homo sapien
atggccaccgctgcacgttctgtct

SEQ ID NO: 389995 - DNA, 25 bp, Homo sapien
gaatggccaccgctgcacgttctgt

SEQ ID NO: 389996 - DNA, 25 bp, Homo sapien
tgtctctggtgcatccatgtcaatg

SEQ ID NO: 389997 - DNA, 25 bp, Homo sapien
cacgttctgtctctggtgcatccat

SEQ ID NO: 389998 - DNA, 25 bp, Homo sapien
aatatcacaggtttctgtacatgca

SEQ ID NO: 389999 - DNA, 25 bp, Homo sapien
cattggaggtttgctatgcgtgtgt

SEQ ID NO: 390000 - DNA, 25 bp, Homo sapien
tcctacaagggtataaatatcacag

SEQ ID NO: 390001 - DNA, 25 bp, Homo sapien
gaaacatagagattaagctactcac

SEQ ID NO: 390002 - DNA, 25 bp, Homo sapien
aaagcatcctcattataagccagat

SEQ ID NO: 390003 - DNA, 25 bp, Homo sapien
agccagtatagacagtgcccctact

SEQ ID NO: 390004 - DNA, 25 bp, Homo sapien
gctgtgcatggagagtcccctctaa

SEQ ID NO: 390005 - DNA, 25 bp, Homo sapien
aagaaccactccattgggattttct

SEQ ID NO: 390006 - DNA, 25 bp, Homo sapien
gaattactgatgctccaaattgctg

SEQ ID NO: 390007 - DNA, 25 bp, Homo sapien
gacattgaattactgatgctccaaa

SEQ ID NO: 390008 - DNA, 25 bp, Homo sapien
gatgctccaaattgctggcacccca

SEQ ID NO: 390009 - DNA, 25 bp, Homo sapien
ctgaagggacattgaattactgatg

SEQ ID NO: 390010 - DNA, 25 bp, Homo sapien
gcaccttgacaaggactgtcctgct

SEQ ID NO: 390011 - DNA, 25 bp, Homo sapien
gaagacttgagtgattgattctcca

SEQ ID NO: 390012 - DNA, 25 bp, Homo sapien
ccacagcaggagttgaatacacatg

SEQ ID NO: 390013 - DNA, 25 bp, Homo sapien
tctccatgatctgccgtgctgtgcc

SEQ ID NO: 390014 - DNA, 25 bp, Homo sapien
ctacaagaaagacccccagtagaag

SEQ ID NO: 390015 - DNA, 25 bp, Homo sapien
ggtccatgtgatggtagtagctctt

SEQ ID NO: 390016 - DNA, 25 bp, Homo sapien
catgtgatggtagtagctctttaaa

SEQ ID NO: 390017 - DNA, 25 bp, Homo sapien
ctttaaaccgtcagatgccagagaa

SEQ ID NO: 390018 - DNA, 25 bp, Homo sapien
aatcagtgcatgcataacaggtgag

SEQ ID NO: 390019 - DNA, 25 bp, Homo sapien
agctggggtgatagtaatcagtgca

SEQ ID NO: 390020 - DNA, 25 bp, Homo sapien
actggatgactgtctcgagggatgc

SEQ ID NO: 390021 - DNA, 25 bp, Homo sapien
ctcttctgtatctgcagtgtcctca

SEQ ID NO: 390022 - DNA, 25 bp, Homo sapien
aatggcacagccatttgcatggcag

SEQ ID NO: 390023 - DNA, 25 bp, Homo sapien
ggctgctggcttggttgcaaacaaa

SEQ ID NO: 390024 - DNA, 25 bp, Homo sapien
gatttattgggttggctccgtgcct

SEQ ID NO: 390025 - DNA, 25 bp, Homo sapien
caaatcacacgaaagagcctgagca

SEQ ID NO: 390026 - DNA, 25 bp, Homo sapien
catccagtttctggaccagaaagtg

SEQ ID NO: 390027 - DNA, 25 bp, Homo sapien
tttctggaccagaaagtgagaactt

SEQ ID NO: 390028 - DNA, 25 bp, Homo sapien
actcccgtcaattgctttcatccag

SEQ ID NO: 390029 - DNA, 25 bp, Homo sapien
tcaacttgagacatctgcattgtca

SEQ ID NO: 390030 - DNA, 25 bp, Homo sapien
ggatactgcccttcctctgtaccac

SEQ ID NO: 390031 - DNA, 25 bp, Homo sapien
gaaacttccagtgcattcctcccta

SEQ ID NO: 390032 - DNA, 25 bp, Homo sapien
tctgtaccacattctccagccttct

SEQ ID NO: 390033 - DNA, 25 bp, Homo sapien
cagaggctgttttgcattcacccta

SEQ ID NO: 390034 - DNA, 25 bp, Homo sapien
cagattcgccggaggcagggctcct

SEQ ID NO: 390035 - DNA, 25 bp, Homo sapien
tcttgaatttaaggagggctcgcca

SEQ ID NO: 390036 - DNA, 25 bp, Homo sapien
tggcctcttgaatttaaggagggct

SEQ ID NO: 390037 - DNA, 25 bp, Homo sapien
aggagggctcgccaggatcccgcat

SEQ ID NO: 390038 - DNA, 25 bp, Homo sapien
ttgtccatctctgcagccgttgctg

SEQ ID NO: 390039 - DNA, 25 bp, Homo sapien
tgtccatctctgcagccgttgctgg

SEQ ID NO: 390040 - DNA, 25 bp, Homo sapien
tctgatgacataagtcctccactga

SEQ ID NO: 390041 - DNA, 25 bp, Homo sapien
ctccattctcccgaaatgggaatct

SEQ ID NO: 390042 - DNA, 25 bp, Homo sapien
gaaaggcacctgtgtgcagcggcat

SEQ ID NO: 390043 - DNA, 25 bp, Homo sapien
tgtaggaaaatgagctcctcccgcg

SEQ ID NO: 390044 - DNA, 25 bp, Homo sapien
taaagcccgcatggcttcccgtgtg

SEQ ID NO: 390045 - DNA, 25 bp, Homo sapien
tatcaccgttcgtacccagtggaca

SEQ ID NO: 390046 - DNA, 25 bp, Homo sapien
cagtgggttcatggtgtgcaaatcc

SEQ ID NO: 390047 - DNA, 25 bp, Homo sapien
tcctgccgtcagaccatgagctgga

SEQ ID NO: 390048 - DNA, 25 bp, Homo sapien
cctgggctggagacactaactgggt

SEQ ID NO: 390049 - DNA, 25 bp, Homo sapien
taactgggtttagctcactgggaag

SEQ ID NO: 390050 - DNA, 25 bp, Homo sapien
cactgctccttaccactgtcccaga

SEQ ID NO: 390051 - DNA, 25 bp, Homo sapien
cctccactgctccttaccactgtcc

SEQ ID NO: 390052 - DNA, 25 bp, Homo sapien
ccactgctccttaccactgtcccag

SEQ ID NO: 390053 - DNA, 25 bp, Homo sapien
tccactgctccttaccactgtccca

SEQ ID NO: 390054 - DNA, 25 bp, Homo sapien
gaaggaatctgtacatttcaggacc

SEQ ID NO: 390055 - DNA, 25 bp, Homo sapien
cagaaggaatctgtacatttcagga

SEQ ID NO: 390056 - DNA, 25 bp, Homo sapien
aggaatctgtacatttcaggaccag

SEQ ID NO: 390057 - DNA, 25 bp, Homo sapien
agaaggaatctgtacatttcaggac

SEQ ID NO: 390058 - DNA, 25 bp, Homo sapien
ggttctaatgcaccgttagtggagg

SEQ ID NO: 390059 - DNA, 25 bp, Homo sapien
catggttctaatgcaccgttagtgg

SEQ ID NO: 390060 - DNA, 25 bp, Homo sapien
accatggttctaatgcaccgttagt

SEQ ID NO: 390061 - DNA, 25 bp, Homo sapien
tggttctaatgcaccgttagtggag

SEQ ID NO: 390062 - DNA, 25 bp, Homo sapien
aacaccgtggccctgctttcaggta

SEQ ID NO: 390063 - DNA, 25 bp, Homo sapien
tcagttgtccaaaacgaagaagggc

SEQ ID NO: 390064 - DNA, 25 bp, Homo sapien
ttaatagccatctaacaccgtggcc

SEQ ID NO: 390065 - DNA, 25 bp, Homo sapien
ggtacaattcctccactcattaagt

SEQ ID NO: 390066 - DNA, 25 bp, Homo sapien
ctgccttccctgggatcccagttcc

SEQ ID NO: 390067 - DNA, 25 bp, Homo sapien
tgccttccctgggatcccagttcca

SEQ ID NO: 390068 - DNA, 25 bp, Homo sapien
gccttccctgggatcccagttccat

SEQ ID NO: 390069 - DNA, 25 bp, Homo sapien
ttaagttctccacattgtagcccat

SEQ ID NO: 390070 - DNA, 25 bp, Homo sapien
agacctgggcaattaagttctccac

SEQ ID NO: 390071 - DNA, 25 bp, Homo sapien
ggcaattaagttctccacattgtag

SEQ ID NO: 390072 - DNA, 25 bp, Homo sapien
agaagacctgggcaattaagttctc

SEQ ID NO: 390073 - DNA, 25 bp, Homo sapien
aaagcaagagctctgatgccttcct

SEQ ID NO: 390074 - DNA, 25 bp, Homo sapien
gacagtgaggttaatgagaaacaaa

SEQ ID NO: 390075 - DNA, 25 bp, Homo sapien
gggcttgcaagggacttctattggt

SEQ ID NO: 390076 - DNA, 25 bp, Homo sapien
tggttgccctccatatggacagtga

SEQ ID NO: 390077 - DNA, 25 bp, Homo sapien
tttactgagcagttgcattgccatc

SEQ ID NO: 390078 - DNA, 25 bp, Homo sapien
gccatcaaagcagtaaaagactcac

SEQ ID NO: 390079 - DNA, 25 bp, Homo sapien
gcattgccatcaaagcagtaaaaga

SEQ ID NO: 390080 - DNA, 25 bp, Homo sapien
tactgagcagttgcattgccatcaa

SEQ ID NO: 390081 - DNA, 25 bp, Homo sapien
gccaactgcgagtttagatggtgca

SEQ ID NO: 390082 - DNA, 25 bp, Homo sapien
gaggagccaactgcgagtttagatg

SEQ ID NO: 390083 - DNA, 25 bp, Homo sapien
tagatggtgcagtaaaagtcccttg

SEQ ID NO: 390084 - DNA, 25 bp, Homo sapien
tgcgagtttagatggtgcagtaaaa

SEQ ID NO: 390085 - DNA, 25 bp, Homo sapien
gacaccatgagctcacaggatgact

SEQ ID NO: 390086 - DNA, 25 bp, Homo sapien
tttccaaagggccacgtgacaccat

SEQ ID NO: 390087 - DNA, 25 bp, Homo sapien
acttaacttggagcgaattacttcg

SEQ ID NO: 390088 - DNA, 25 bp, Homo sapien
tggccttgggttgataacacttaac

SEQ ID NO: 390089 - DNA, 25 bp, Homo sapien
cagcgtgtgtgtgtcgccctaagtg

SEQ ID NO: 390090 - DNA, 25 bp, Homo sapien
ggtgcaggggacattgctcattagc

SEQ ID NO: 390091 - DNA, 25 bp, Homo sapien
gggctgccaagtgtgcagcgtgtgt

SEQ ID NO: 390092 - DNA, 25 bp, Homo sapien
ttcctaatgaatagtcggcagtggg

SEQ ID NO: 390093 - DNA, 25 bp, Homo sapien
ctctgggtaccaatgtgtcgctgac

SEQ ID NO: 390094 - DNA, 25 bp, Homo sapien
tctcttggggtaaccggcctgctct

SEQ ID NO: 390095 - DNA, 25 bp, Homo sapien
tctgccaaatcagagctgttcaaca

SEQ ID NO: 390096 - DNA, 25 bp, Homo sapien
gctgttcaacaaggaactccccaga

SEQ ID NO: 390097 - DNA, 25 bp, Homo sapien
ttcatttgtgaacttctgtgcaata

SEQ ID NO: 390098 - DNA, 25 bp, Homo sapien
tattcatttgtgaacttctgtgcaa

SEQ ID NO: 390099 - DNA, 25 bp, Homo sapien
catttgtgaacttctgtgcaatatc

SEQ ID NO: 390100 - DNA, 25 bp, Homo sapien
ctattcatttgtgaacttctgtgca

SEQ ID NO: 390101 - DNA, 25 bp, Homo sapien
taagccctccgttgagatttccaaa

SEQ ID NO: 390102 - DNA, 25 bp, Homo sapien
cagtctcctcattttcgtaagccct

SEQ ID NO: 390103 - DNA, 25 bp, Homo sapien
ttccaaattgtgacctttaacagct

SEQ ID NO: 390104 - DNA, 25 bp, Homo sapien
ctgctggcctccctagaagacagga

SEQ ID NO: 390105 - DNA, 25 bp, Homo sapien
tcccctggcgctgtcttacagagct

SEQ ID NO: 390106 - DNA, 25 bp, Homo sapien
atcccgcaaaactacttccgagcat

SEQ ID NO: 390107 - DNA, 25 bp, Homo sapien
tctttaccagcggtgttggatcatg

SEQ ID NO: 390108 - DNA, 25 bp, Homo sapien
ttggatcatgattggccctcccctg

SEQ ID NO: 390109 - DNA, 25 bp, Homo sapien
ctcagtgcgaggacggagctgtgga

SEQ ID NO: 390110 - DNA, 25 bp, Homo sapien
cgaggacggagctgtggagtcccat

SEQ ID NO: 390111 - DNA, 25 bp, Homo sapien
tcctcagtgcgaggacggagctgtg

SEQ ID NO: 390112 - DNA, 25 bp, Homo sapien
gcttggtcctcagtgcgaggacgga

SEQ ID NO: 390113 - DNA, 25 bp, Homo sapien
agatgctgcctctttggctcccagg

SEQ ID NO: 390114 - DNA, 25 bp, Homo sapien
caggctggccttttgtattgtatct

SEQ ID NO: 390115 - DNA, 25 bp, Homo sapien
tgtattgtatctgggtgtgctggct

SEQ ID NO: 390116 - DNA, 25 bp, Homo sapien
acagcccctctcctttaatattcag

SEQ ID NO: 390117 - DNA, 25 bp, Homo sapien
cagaaggccaggtgaagagcctctg

SEQ ID NO: 390118 - DNA, 25 bp, Homo sapien
tgtgacctctgctgcggctggcagt

SEQ ID NO: 390119 - DNA, 25 bp, Homo sapien
gccagaaggccaggtgaagagcctc

SEQ ID NO: 390120 - DNA, 25 bp, Homo sapien
agttgccatggaagcagctctctcc

SEQ ID NO: 390121 - DNA, 25 bp, Homo sapien
tctctcaagcccttttctaatctcg

SEQ ID NO: 390122 - DNA, 25 bp, Homo sapien
gaaaacagcatttttccggtggtgc

SEQ ID NO: 390123 - DNA, 25 bp, Homo sapien
catttttccggtggtgcattttgca

SEQ ID NO: 390124 - DNA, 25 bp, Homo sapien
ttctccttctctctcaagccctttt

SEQ ID NO: 390125 - DNA, 25 bp, Homo sapien
caagaaccggattggcaagagcgag

SEQ ID NO: 390126 - DNA, 25 bp, Homo sapien
agcatccgcatgtacgccaagaacc

SEQ ID NO: 390127 - DNA, 25 bp, Homo sapien
catgtacgccaagaaccggattggc

SEQ ID NO: 390128 - DNA, 25 bp, Homo sapien
ttggcaagagcgagcccagcaacga

SEQ ID NO: 390129 - DNA, 25 bp, Homo sapien
ccctcgcagcgtgaataatgtgtgt

SEQ ID NO: 390130 - DNA, 25 bp, Homo sapien
atctcccccagtcggctgatctgtg

SEQ ID NO: 390131 - DNA, 25 bp, Homo sapien
tcccccagtcggctgatctgtgctt

SEQ ID NO: 390132 - DNA, 25 bp, Homo sapien
ccatgtccctcgcagcgtgaataat

SEQ ID NO: 390133 - DNA, 25 bp, Homo sapien
agtggccatcgtccattccactaac

SEQ ID NO: 390134 - DNA, 25 bp, Homo sapien
tgtgtggtgagcaccaccaaggcag

SEQ ID NO: 390135 - DNA, 25 bp, Homo sapien
tgtggtgagcaccaccaaggcagac

SEQ ID NO: 390136 - DNA, 25 bp, Homo sapien
gtggtgagcaccaccaaggcagacc

SEQ ID NO: 390137 - DNA, 25 bp, Homo sapien
ttgtgtggtgagcaccaccaaggca

SEQ ID NO: 390138 - DNA, 25 bp, Homo sapien
catggacatccaagatctgaaaagt

SEQ ID NO: 390139 - DNA, 25 bp, Homo sapien
tgaggatgggctttgtaacgggtcc

SEQ ID NO: 390140 - DNA, 25 bp, Homo sapien
ccagcccattggagggagttagtgg

SEQ ID NO: 390141 - DNA, 25 bp, Homo sapien
acagaaatgtatgcatggacatcca

SEQ ID NO: 390142 - DNA, 25 bp, Homo sapien
ctgcagtgggactctgaactgcccc

SEQ ID NO: 390143 - DNA, 25 bp, Homo sapien
gctgcagtgggactctgaactgccc

SEQ ID NO: 390144 - DNA, 25 bp, Homo sapien
agaagaataagacagagaacaaggg

SEQ ID NO: 390145 - DNA, 25 bp, Homo sapien
acccctagttcaccctgaggactgt

SEQ ID NO: 390146 - DNA, 25 bp, Homo sapien
gactgttatccttgagaagaataag

SEQ ID NO: 390147 - DNA, 25 bp, Homo sapien
tctgacacagaaggtgcacacccca

SEQ ID NO: 390148 - DNA, 25 bp, Homo sapien
acaggtctctgaccaggtttcagca

SEQ ID NO: 390149 - DNA, 25 bp, Homo sapien
cctcctgtccgtggtggctcacagg

SEQ ID NO: 390150 - DNA, 25 bp, Homo sapien
tccgtcctgtccacagtttctcttg

SEQ ID NO: 390151 - DNA, 25 bp, Homo sapien
tgctgtccacagtttctccggtgcc

SEQ ID NO: 390152 - DNA, 25 bp, Homo sapien
tgaaacctgctaaggcccccagcat

SEQ ID NO: 390153 - DNA, 25 bp, Homo sapien
aaacctgctaaggcccccagcatgc

SEQ ID NO: 390154 - DNA, 25 bp, Homo sapien
gaatgaaacctgctaaggcccccag

SEQ ID NO: 390155 - DNA, 25 bp, Homo sapien
atgaaacctgctaaggcccccagca

SEQ ID NO: 390156 - DNA, 25 bp, Homo sapien
tcacttcatcaaccatggcaaccag

SEQ ID NO: 390157 - DNA, 25 bp, Homo sapien
tggaagacgatgaggggagaatcac

SEQ ID NO: 390158 - DNA, 25 bp, Homo sapien
gtcccaagtggaagacgatgagggg

SEQ ID NO: 390159 - DNA, 25 bp, Homo sapien
tgtcatcaaggcggaagcatgtgca

SEQ ID NO: 390160 - DNA, 25 bp, Homo sapien
cttggggacctggaatccatccaag

SEQ ID NO: 390161 - DNA, 25 bp, Homo sapien
caggccactgattgccttggggacc

SEQ ID NO: 390162 - DNA, 25 bp, Homo sapien
tggggacctggaatccatccaagga

SEQ ID NO: 390163 - DNA, 25 bp, Homo sapien
gaaggaccaggccactgattgcctt

SEQ ID NO: 390164 - DNA, 25 bp, Homo sapien
tggctcccacatcgggagcagggac

SEQ ID NO: 390165 - DNA, 25 bp, Homo sapien
aggaggcaactccaatcctgcacct

SEQ ID NO: 390166 - DNA, 25 bp, Homo sapien
ggaggcaactccaatcctgcacctt

SEQ ID NO: 390167 - DNA, 25 bp, Homo sapien
ctcttggctcccacatcgggagcag

SEQ ID NO: 390168 - DNA, 25 bp, Homo sapien
tctaggaaatgcaagtgcattcccc

SEQ ID NO: 390169 - DNA, 25 bp, Homo sapien
tgaaatctaggaaatgcaagtgcat

SEQ ID NO: 390170 - DNA, 25 bp, Homo sapien
ggaaatgcaagtgcattccccaggg

SEQ ID NO: 390171 - DNA, 25 bp, Homo sapien
aatgcaagtgcattccccagggacc

SEQ ID NO: 390172 - DNA, 25 bp, Homo sapien
atctgagtctgagaatgggcagtgt

SEQ ID NO: 390173 - DNA, 25 bp, Homo sapien
tctttcatgcagttggcctggccaa

SEQ ID NO: 390174 - DNA, 25 bp, Homo sapien
gaatgggcagtgtctttcatgcagt

SEQ ID NO: 390175 - DNA, 25 bp, Homo sapien
cttgttggcaggaggatctgagtct

SEQ ID NO: 390176 - DNA, 25 bp, Homo sapien
tcatctttaagtatccgggtattta

SEQ ID NO: 390177 - DNA, 25 bp, Homo sapien
ttcctgttctttgctagggcccgat

SEQ ID NO: 390178 - DNA, 25 bp, Homo sapien
cagaaaagacctttggagcagactt

SEQ ID NO: 390179 - DNA, 25 bp, Homo sapien
gttttgacatcctgaaacgctgtgc

SEQ ID NO: 390180 - DNA, 25 bp, Homo sapien
tctccccggagatgcaggtcagatg

SEQ ID NO: 390181 - DNA, 25 bp, Homo sapien
tagattgatacagaatgggccattg

SEQ ID NO: 390182 - DNA, 25 bp, Homo sapien
gaatgctgctaggaacaatactttc

SEQ ID NO: 390183 - DNA, 25 bp, Homo sapien
caggtcagatgccatgttttctgtg

SEQ ID NO: 390184 - DNA, 25 bp, Homo sapien
tgggtacatggaaataagctgatgg

SEQ ID NO: 390185 - DNA, 25 bp, Homo sapien
ggccttgtgaatgggtacatggaaa

SEQ ID NO: 390186 - DNA, 25 bp, Homo sapien
gaatgcaagtgcctggttgtgatgc

SEQ ID NO: 390187 - DNA, 25 bp, Homo sapien
atgcaagtgcctggttgtgatgctc

SEQ ID NO: 390188 - DNA, 25 bp, Homo sapien
gaagagtccgaatccatcaaagcca

SEQ ID NO: 390189 - DNA, 25 bp, Homo sapien
tgattgaaggatgggcagacaacca

SEQ ID NO: 390190 - DNA, 25 bp, Homo sapien
ggccgggacccatcaaacgcagcag

SEQ ID NO: 390191 - DNA, 25 bp, Homo sapien
gagaagatttccgtattcttaatac

SEQ ID NO: 390192 - DNA, 25 bp, Homo sapien
taaaatctgaggagcaatgttgacc

SEQ ID NO: 390193 - DNA, 25 bp, Homo sapien
taggcttcaagaatggacgatgccc

SEQ ID NO: 390194 - DNA, 25 bp, Homo sapien
actaaggagatgaggtggcccctgc

SEQ ID NO: 390195 - DNA, 25 bp, Homo sapien
ccagatctcggtactcagtggcagt

SEQ ID NO: 390196 - DNA, 25 bp, Homo sapien
tactatgcgctttcctacacatgca

SEQ ID NO: 390197 - DNA, 25 bp, Homo sapien
tcaggtagcttaaaccatggaaagt

SEQ ID NO: 390198 - DNA, 25 bp, Homo sapien
tggtttcctttcgaatacagcagcc

SEQ ID NO: 390199 - DNA, 25 bp, Homo sapien
taagactgtaattgacctcaggtag

SEQ ID NO: 390200 - DNA, 25 bp, Homo sapien
ttgctcattagctgttccaaccttg

SEQ ID NO: 390201 - DNA, 25 bp, Homo sapien
accttggcactatcagcttccactg

SEQ ID NO: 390202 - DNA, 25 bp, Homo sapien
tatcagcttccactgaattccaaac

SEQ ID NO: 390203 - DNA, 25 bp, Homo sapien
gctcattagctgttccaaccttggc

SEQ ID NO: 390204 - DNA, 25 bp, Homo sapien
gggatgccgtcttctaatgacatca

SEQ ID NO: 390205 - DNA, 25 bp, Homo sapien
caaatgtcatctcgcctaggtggag

SEQ ID NO: 390206 - DNA, 25 bp, Homo sapien
cagctttgtgcacagaaacagcctt

SEQ ID NO: 390207 - DNA, 25 bp, Homo sapien
gtgtctgctcgccttccactcgagg

SEQ ID NO: 390208 - DNA, 25 bp, Homo sapien
gatttgagcagacacccactaaagg

SEQ ID NO: 390209 - DNA, 25 bp, Homo sapien
taaagtataaagcaacacagtctcc

SEQ ID NO: 390210 - DNA, 25 bp, Homo sapien
gaaacacacggatggccaataggca

SEQ ID NO: 390211 - DNA, 25 bp, Homo sapien
aataggtgacgatttcttaggacac

SEQ ID NO: 390212 - DNA, 25 bp, Homo sapien
tcaggtagcaggagtctataacgtt

SEQ ID NO: 390213 - DNA, 25 bp, Homo sapien
cagggaatagagatgttcgtcaaaa

SEQ ID NO: 390214 - DNA, 25 bp, Homo sapien
tgcttagtgaagtaagccacgcaca

SEQ ID NO: 390215 - DNA, 25 bp, Homo sapien
ggccatcagatttattgcaggtaga

SEQ ID NO: 390216 - DNA, 25 bp, Homo sapien
gtgggttccactccattttaattca

SEQ ID NO: 390217 - DNA, 25 bp, Homo sapien
cagtgggttccactccattttaatt

SEQ ID NO: 390218 - DNA, 25 bp, Homo sapien
tcagtgggttccactccattttaat

SEQ ID NO: 390219 - DNA, 25 bp, Homo sapien
tgggttccactccattttaattcat

SEQ ID NO: 390220 - DNA, 25 bp, Homo sapien
catttctctatagcgtcttatcagc

SEQ ID NO: 390221 - DNA, 25 bp, Homo sapien
ctatagcgtcttatcagctgcatac

SEQ ID NO: 390222 - DNA, 25 bp, Homo sapien
catgtgtccggatatcatttctcta

SEQ ID NO: 390223 - DNA, 25 bp, Homo sapien
tctctatagcgtcttatcagctgca

SEQ ID NO: 390224 - DNA, 25 bp, Homo sapien
tgaaagaatcacaagaattgagatt

SEQ ID NO: 390225 - DNA, 25 bp, Homo sapien
ttgaaagaatcacaagaattgagat

SEQ ID NO: 390226 - DNA, 25 bp, Homo sapien
acctaagtcagtgagtggataactg

SEQ ID NO: 390227 - DNA, 25 bp, Homo sapien
aacgtgctgagaattctagtggagg

SEQ ID NO: 390228 - DNA, 25 bp, Homo sapien
tgctgagaattctagtggaggcacc

SEQ ID NO: 390229 - DNA, 25 bp, Homo sapien
tctagtggaggcacctaagtcagtg

SEQ ID NO: 390230 - DNA, 25 bp, Homo sapien
tctcaaatctttgtcattcatgaac

SEQ ID NO: 390231 - DNA, 25 bp, Homo sapien
tctagtcagatacaattgccttcca

SEQ ID NO: 390232 - DNA, 25 bp, Homo sapien
ttaactagccatacagataaatgca

SEQ ID NO: 390233 - DNA, 25 bp, Homo sapien
tgcaatcattgaatgccatctgtgc

SEQ ID NO: 390234 - DNA, 25 bp, Homo sapien
ctgcgtgtttcctagtccccctaag

SEQ ID NO: 390235 - DNA, 25 bp, Homo sapien
tccccctaagtagcttcatctttcc

SEQ ID NO: 390236 - DNA, 25 bp, Homo sapien
cagagggcaggccaactgcgtgttt

SEQ ID NO: 390237 - DNA, 25 bp, Homo sapien
tttccctcctagcagtagaccccta

SEQ ID NO: 390238 - DNA, 25 bp, Homo sapien
ctctgttgtcctgttgttgttgttg

SEQ ID NO: 390239 - DNA, 25 bp, Homo sapien
tgttgttgtggttttgagatggggt

SEQ ID NO: 390240 - DNA, 25 bp, Homo sapien
gttgttgttgtggttttgagatggg

SEQ ID NO: 390241 - DNA, 25 bp, Homo sapien
ttgttgttgttgtggttttgagatg

SEQ ID NO: 390242 - DNA, 25 bp, Homo sapien
gttggctttcccgatccgtcgtcca

SEQ ID NO: 390243 - DNA, 25 bp, Homo sapien
tgtctggttggctttcccgatccgt

SEQ ID NO: 390244 - DNA, 25 bp, Homo sapien
ctgtctggttggctttcccgatccg

SEQ ID NO: 390245 - DNA, 25 bp, Homo sapien
ctggttggctttcccgatccgtcgt

SEQ ID NO: 390246 - DNA, 25 bp, Homo sapien
aaggatcatgatgagaccagaactt

SEQ ID NO: 390247 - DNA, 25 bp, Homo sapien
tgagagatcccctgtagcgacactg

SEQ ID NO: 390248 - DNA, 25 bp, Homo sapien
tcatgcctatgtgggtgattggtac

SEQ ID NO: 390249 - DNA, 25 bp, Homo sapien
ggagtgagaccaaacaaggatcatg

SEQ ID NO: 390250 - DNA, 25 bp, Homo sapien
gagagatcttaaggaaacataacgt

SEQ ID NO: 390251 - DNA, 25 bp, Homo sapien
gaaaatacagaaccatactatgtga

SEQ ID NO: 390252 - DNA, 25 bp, Homo sapien
tattgccatggttagcatgagttac

SEQ ID NO: 390253 - DNA, 25 bp, Homo sapien
aacataacgttggatgggaaaagtg

SEQ ID NO: 390254 - DNA, 25 bp, Homo sapien
gttcccacaccacgcgtgccgtgga

SEQ ID NO: 390255 - DNA, 25 bp, Homo sapien
ggcaccgagtgttctcccgcagcgg

SEQ ID NO: 390256 - DNA, 25 bp, Homo sapien
tgggagcgtttttcagcctgcagtt

SEQ ID NO: 390257 - DNA, 25 bp, Homo sapien
ggcggcggctccaaggccgattcct

SEQ ID NO: 390258 - DNA, 25 bp, Homo sapien
cacacaatacgtcctcttaggatac

SEQ ID NO: 390259 - DNA, 25 bp, Homo sapien
acctgttctctcacttttgcatcct

SEQ ID NO: 390260 - DNA, 25 bp, Homo sapien
ttctcatttattccccgtgtcctca

SEQ ID NO: 390261 - DNA, 25 bp, Homo sapien
cgtgtcctcacgtccacacctgttc

SEQ ID NO: 390262 - DNA, 25 bp, Homo sapien
aaatggttgctgtctaacagctgac

SEQ ID NO: 390263 - DNA, 25 bp, Homo sapien
gactgatagactccacactttttac

SEQ ID NO: 390264 - DNA, 25 bp, Homo sapien
gctattacggatccatctaaaatgg

SEQ ID NO: 390265 - DNA, 25 bp, Homo sapien
catctcttgattggctattacggat

SEQ ID NO: 390266 - DNA, 25 bp, Homo sapien
gctgctccgcatcagaggtcatgca

SEQ ID NO: 390267 - DNA, 25 bp, Homo sapien
gctgttatggattgagtgctgctcc

SEQ ID NO: 390268 - DNA, 25 bp, Homo sapien
ccctgttcgtggagctgttatggat

SEQ ID NO: 390269 - DNA, 25 bp, Homo sapien
tgtattccctgttcgtggagctgtt

SEQ ID NO: 390270 - DNA, 25 bp, Homo sapien
tggagacttgagagactctgacagc

SEQ ID NO: 390271 - DNA, 25 bp, Homo sapien
ctggaagcggttaaaacgcagtcag

SEQ ID NO: 390272 - DNA, 25 bp, Homo sapien
cggttaaaacgcagtcagatgcatt

SEQ ID NO: 390273 - DNA, 25 bp, Homo sapien
gatgcattgtgtatgtatggagact

SEQ ID NO: 390274 - DNA, 25 bp, Homo sapien
cagggaagcaaaaagctgcattccc

SEQ ID NO: 390275 - DNA, 25 bp, Homo sapien
agactcagggaagcaaaaagctgca

SEQ ID NO: 390276 - DNA, 25 bp, Homo sapien
gccttggttgaagactcagggaagc

SEQ ID NO: 390277 - DNA, 25 bp, Homo sapien
ctgccttggttgaagactcagggaa

SEQ ID NO: 390278 - DNA, 25 bp, Homo sapien
gtgagggccgtggcagggagtgatt

SEQ ID NO: 390279 - DNA, 25 bp, Homo sapien
ctgtgagggccgtggcagggagtga

SEQ ID NO: 390280 - DNA, 25 bp, Homo sapien
tgtgagggccgtggcagggagtgat

SEQ ID NO: 390281 - DNA, 25 bp, Homo sapien
tgagttggagcctccatgggacccg

SEQ ID NO: 390282 - DNA, 25 bp, Homo sapien
taggcacaggcataaagtcagcttt

SEQ ID NO: 390283 - DNA, 25 bp, Homo sapien
tgacattccgaactgatggctgatg

SEQ ID NO: 390284 - DNA, 25 bp, Homo sapien
gcaaaatgagctgccctgagttgga

SEQ ID NO: 390285 - DNA, 25 bp, Homo sapien
cagaacactttgttgccttaggcag

SEQ ID NO: 390286 - DNA, 25 bp, Homo sapien
cactttgttgccttaggcaggttca

SEQ ID NO: 390287 - DNA, 25 bp, Homo sapien
tatcagaacactttgttgccttagg

SEQ ID NO: 390288 - DNA, 25 bp, Homo sapien
gctttatcagaacactttgttgcct

SEQ ID NO: 390289 - DNA, 25 bp, Homo sapien
acaccttctttctgtagctttgatc

SEQ ID NO: 390290 - DNA, 25 bp, Homo sapien
cctttgtttccatggaatcacacct

SEQ ID NO: 390291 - DNA, 25 bp, Homo sapien
cttcctttgtttccatggaatcaca

SEQ ID NO: 390292 - DNA, 25 bp, Homo sapien
ttgtttccatggaatcacaccttct

SEQ ID NO: 390293 - DNA, 25 bp, Homo sapien
tgcctctgggaaagtatcttgtact

SEQ ID NO: 390294 - DNA, 25 bp, Homo sapien
acacaacaaagcttgctgggcctct

SEQ ID NO: 390295 - DNA, 25 bp, Homo sapien
ctagctggtgctcctaggaagcaca

SEQ ID NO: 390296 - DNA, 25 bp, Homo sapien
cagccctttgagttatgcctctggg

SEQ ID NO: 390297 - DNA, 25 bp, Homo sapien
gccctgggtgcttaacggaagataa

SEQ ID NO: 390298 - DNA, 25 bp, Homo sapien
gggtctgaccagcaaagcactgtat

SEQ ID NO: 390299 - DNA, 25 bp, Homo sapien
tgacatggccttagcagagtccaca

SEQ ID NO: 390300 - DNA, 25 bp, Homo sapien
aaagtcaagcagacaagccagcagg

SEQ ID NO: 390301 - DNA, 25 bp, Homo sapien
gtgaccgctgcccaatttcagagcc

SEQ ID NO: 390302 - DNA, 25 bp, Homo sapien
gcccaatttcagagccctcagtttt

SEQ ID NO: 390303 - DNA, 25 bp, Homo sapien
ctgataggtgaccgctgcccaattt

SEQ ID NO: 390304 - DNA, 25 bp, Homo sapien
gctgcccaatttcagagccctcagt

SEQ ID NO: 390305 - DNA, 25 bp, Homo sapien
tctctaatggacacggactgccctt

SEQ ID NO: 390306 - DNA, 25 bp, Homo sapien
cgcactcgcctgcagaaaccttgag

SEQ ID NO: 390307 - DNA, 25 bp, Homo sapien
tgtgggtctgcctgcactgggtctc

SEQ ID NO: 390308 - DNA, 25 bp, Homo sapien
agttctcgtcgtgggaaccctcaga

SEQ ID NO: 390309 - DNA, 25 bp, Homo sapien
ctgtgacaagtttcacaccagcagg

SEQ ID NO: 390310 - DNA, 25 bp, Homo sapien
tcttgctgagccagttaggtgggct

SEQ ID NO: 390311 - DNA, 25 bp, Homo sapien
gggccccagtccagttctaggagaa

SEQ ID NO: 390312 - DNA, 25 bp, Homo sapien
gggccatcctcgtgtccttctgaag

SEQ ID NO: 390313 - DNA, 25 bp, Homo sapien
taaaaatcctccctattggccaaga

SEQ ID NO: 390314 - DNA, 25 bp, Homo sapien
tacatgagtgcagtacagtaagatg

SEQ ID NO: 390315 - DNA, 25 bp, Homo sapien
aattaaggtcatgcaatcactttgg

SEQ ID NO: 390316 - DNA, 25 bp, Homo sapien
gaagctgtgtataaggcagggctac

SEQ ID NO: 390317 - DNA, 25 bp, Homo sapien
cacgttattttgaccaattccaaca

SEQ ID NO: 390318 - DNA, 25 bp, Homo sapien
catgtgctagactttgatgagtctg

SEQ ID NO: 390319 - DNA, 25 bp, Homo sapien
gatgagtctgttggattatactcga

SEQ ID NO: 390320 - DNA, 25 bp, Homo sapien
tcataattttagtggtttcaaaatc

SEQ ID NO: 390321 - DNA, 25 bp, Homo sapien
gggagctcatccatgttcaggccat

SEQ ID NO: 390322 - DNA, 25 bp, Homo sapien
tgtacaaagaggaaacaacaataac

SEQ ID NO: 390323 - DNA, 25 bp, Homo sapien
tgtaacaagtgacactcacggactg

SEQ ID NO: 390324 - DNA, 25 bp, Homo sapien
tttatggctgcaaatgactgtgctc

SEQ ID NO: 390325 - DNA, 25 bp, Homo sapien
cagaggtgcaaagagagtgttttac

SEQ ID NO: 390326 - DNA, 25 bp, Homo sapien
gaaagagtgacttatgtataggcag

SEQ ID NO: 390327 - DNA, 25 bp, Homo sapien
agtgttttactggaagtgcagggtt

SEQ ID NO: 390328 - DNA, 25 bp, Homo sapien
tgtagactcatgaatattagaactg

SEQ ID NO: 390329 - DNA, 25 bp, Homo sapien
gcagtcgatgtaagaatcccagcac

SEQ ID NO: 390330 - DNA, 25 bp, Homo sapien
tctatgcagtcgatgtaagaatccc

SEQ ID NO: 390331 - DNA, 25 bp, Homo sapien
ggtaggtaggttatgttctctcctc

SEQ ID NO: 390332 - DNA, 25 bp, Homo sapien
ctctcctctttctatgcagtcgatg

SEQ ID NO: 390333 - DNA, 25 bp, Homo sapien
tacaacactcctctaagttcttaaa

SEQ ID NO: 390334 - DNA, 25 bp, Homo sapien
tttacaacactcctctaagttctta

SEQ ID NO: 390335 - DNA, 25 bp, Homo sapien
attggagttttacaacactcctcta

SEQ ID NO: 390336 - DNA, 25 bp, Homo sapien
tggagttttacaacactcctctaag

SEQ ID NO: 390337 - DNA, 25 bp, Homo sapien
tgcctagtcgcagatagagatgcat

SEQ ID NO: 390338 - DNA, 25 bp, Homo sapien
tctgcctagtcgcagatagagatgc

SEQ ID NO: 390339 - DNA, 25 bp, Homo sapien
gacctctgcctagtcgcagatagag

SEQ ID NO: 390340 - DNA, 25 bp, Homo sapien
agtccttcccttctcgaatgttctc

SEQ ID NO: 390341 - DNA, 25 bp, Homo sapien
tcttttggcagatgtccttgtcttc

SEQ ID NO: 390342 - DNA, 25 bp, Homo sapien
ggcagatgtccttgtcttctacaca

SEQ ID NO: 390343 - DNA, 25 bp, Homo sapien
gcagatgtccttgtcttctacacac

SEQ ID NO: 390344 - DNA, 25 bp, Homo sapien
cccatcctcttttggcagatgtcct

SEQ ID NO: 390345 - DNA, 25 bp, Homo sapien
aaaggagagccgcatacagggtttc

SEQ ID NO: 390346 - DNA, 25 bp, Homo sapien
ggcatgattagagcatccgctcctg

SEQ ID NO: 390347 - DNA, 25 bp, Homo sapien
ctgtttccacagctatgaggcgggt

SEQ ID NO: 390348 - DNA, 25 bp, Homo sapien
tgtctcaggatttcacccacggttc

SEQ ID NO: 390349 - DNA, 25 bp, Homo sapien
agtgacacccacaatagacagctgt

SEQ ID NO: 390350 - DNA, 25 bp, Homo sapien
tgcagaacctgccaaatatcactgg

SEQ ID NO: 390351 - DNA, 25 bp, Homo sapien
agcattgagtgggatgctggatgca

SEQ ID NO: 390352 - DNA, 25 bp, Homo sapien
gcagagcattgagtgggatgctgga

SEQ ID NO: 390353 - DNA, 25 bp, Homo sapien
atacttctcaaccaagtaggtgttt

SEQ ID NO: 390354 - DNA, 25 bp, Homo sapien
taaatacttctcaaccaagtaggtg

SEQ ID NO: 390355 - DNA, 25 bp, Homo sapien
tataaatacttctcaaccaagtagg

SEQ ID NO: 390356 - DNA, 25 bp, Homo sapien
gcctataaatacttctcaaccaagt

SEQ ID NO: 390357 - DNA, 25 bp, Homo sapien
gtgcacggggttagctttggattca

SEQ ID NO: 390358 - DNA, 25 bp, Homo sapien
gaaatgaaggagcactaacacccca

SEQ ID NO: 390359 - DNA, 25 bp, Homo sapien
ccccatctcttgatcaaacacgtga

SEQ ID NO: 390360 - DNA, 25 bp, Homo sapien
gacagcgtgatgggcctgcttagct

SEQ ID NO: 390361 - DNA, 25 bp, Homo sapien
gaacaccacggccttgatgacttta

SEQ ID NO: 390362 - DNA, 25 bp, Homo sapien
tattagcaggcggttcaaggaccac

SEQ ID NO: 390363 - DNA, 25 bp, Homo sapien
taagatctgatttgaacaccacggc

SEQ ID NO: 390364 - DNA, 25 bp, Homo sapien
tgagaggccttaagatctgatttga

SEQ ID NO: 390365 - DNA, 25 bp, Homo sapien
catgttccccagtctcatcaagcaa

SEQ ID NO: 390366 - DNA, 25 bp, Homo sapien
tcccctcccttgtgctccatgttcc

SEQ ID NO: 390367 - DNA, 25 bp, Homo sapien
gttccccagtctcatcaagcaattc

SEQ ID NO: 390368 - DNA, 25 bp, Homo sapien
tcccttgtgctccatgttccccagt

SEQ ID NO: 390369 - DNA, 25 bp, Homo sapien
ttgttccagggaacgtggcagagac

SEQ ID NO: 390370 - DNA, 25 bp, Homo sapien
cactgcgcagtgtctgtctgtagag

SEQ ID NO: 390371 - DNA, 25 bp, Homo sapien
accggtgtctttgtacttgtgcagg

SEQ ID NO: 390372 - DNA, 25 bp, Homo sapien
tgaaggacagtggaagcattgctcc

SEQ ID NO: 390373 - DNA, 25 bp, Homo sapien
cggtaattaaactctgaaggcagcc

SEQ ID NO: 390374 - DNA, 25 bp, Homo sapien
ttaaatagtaatacactcgccttgt

SEQ ID NO: 390375 - DNA, 25 bp, Homo sapien
gccctgatgttcagctaaaagctgg

SEQ ID NO: 390376 - DNA, 25 bp, Homo sapien
ctaggccctcgggtggctgttgaca

SEQ ID NO: 390377 - DNA, 25 bp, Homo sapien
acggatggggtggacatcggcatca

SEQ ID NO: 390378 - DNA, 25 bp, Homo sapien
tggttcagtacggatggggtggaca

SEQ ID NO: 390379 - DNA, 25 bp, Homo sapien
ttcttgtgaatattccccgggaaca

SEQ ID NO: 390380 - DNA, 25 bp, Homo sapien
tcttgtgaatattccccgggaacat

SEQ ID NO: 390381 - DNA, 25 bp, Homo sapien
gggtactgaaatacagggctttggc

SEQ ID NO: 390382 - DNA, 25 bp, Homo sapien
gtactgaaatacagggctttggctt

SEQ ID NO: 390383 - DNA, 25 bp, Homo sapien
aatacagggctttggctttcccagg

SEQ ID NO: 390384 - DNA, 25 bp, Homo sapien
ctgggtactgaaatacagggctttg

SEQ ID NO: 390385 - DNA, 25 bp, Homo sapien
gggccacaatagtgacctccagcag

SEQ ID NO: 390386 - DNA, 25 bp, Homo sapien
tcgtgcaggcgacagacgtattgct

SEQ ID NO: 390387 - DNA, 25 bp, Homo sapien
tttctagggcaggatccaagtagtt

SEQ ID NO: 390388 - DNA, 25 bp, Homo sapien
gtagtttttgtgagcattgcagcca

SEQ ID NO: 390389 - DNA, 25 bp, Homo sapien
ccagttctccttattgccaagcagc

SEQ ID NO: 390390 - DNA, 25 bp, Homo sapien
cacagggagcaactaggtctgtaca

SEQ ID NO: 390391 - DNA, 25 bp, Homo sapien
cacaccagttctccttattgccaag

SEQ ID NO: 390392 - DNA, 25 bp, Homo sapien
agcacaccttgctggcacaccagtt

SEQ ID NO: 390393 - DNA, 25 bp, Homo sapien
ttaaggatgcatgtggacaggcaat

SEQ ID NO: 390394 - DNA, 25 bp, Homo sapien
ccatgtgatgttaaggatgcatgtg

SEQ ID NO: 390395 - DNA, 25 bp, Homo sapien
ttgaagcccccgaggcactgagtgt

SEQ ID NO: 390396 - DNA, 25 bp, Homo sapien
gcaatatggcccttcttcagataag

SEQ ID NO: 390397 - DNA, 25 bp, Homo sapien
gtgtgatgagaacagtgatgttgat

SEQ ID NO: 390398 - DNA, 25 bp, Homo sapien
agctctccgcacatcgccatgggca

SEQ ID NO: 390399 - DNA, 25 bp, Homo sapien
gatgttgatgaatgtaaaagcactt

SEQ ID NO: 390400 - DNA, 25 bp, Homo sapien
tgtaaaagcacttcgcagactgcag

SEQ ID NO: 390401 - DNA, 25 bp, Homo sapien
tcgacctacaacttggtgaggccaa

SEQ ID NO: 390402 - DNA, 25 bp, Homo sapien
caacactgggaatcaaatttcgacc

SEQ ID NO: 390403 - DNA, 25 bp, Homo sapien
gagaggtgggtggaataattcttca

SEQ ID NO: 390404 - DNA, 25 bp, Homo sapien
ccgtaacaccctcttatttggtcag

SEQ ID NO: 390405 - DNA, 25 bp, Homo sapien
gcaatattggaagccatgcacccag

SEQ ID NO: 390406 - DNA, 25 bp, Homo sapien
tgcaatattggaagccatgcaccca

SEQ ID NO: 390407 - DNA, 25 bp, Homo sapien
ctgcaatattggaagccatgcaccc

SEQ ID NO: 390408 - DNA, 25 bp, Homo sapien
aaggcatctgcagtttagattctcc

SEQ ID NO: 390409 - DNA, 25 bp, Homo sapien
ggaacgcctttaagtccatgcctgg

SEQ ID NO: 390410 - DNA, 25 bp, Homo sapien
gattctccttgtaccaattttgcaa

SEQ ID NO: 390411 - DNA, 25 bp, Homo sapien
gagtcatgtggatcaggaacgcctt

SEQ ID NO: 390412 - DNA, 25 bp, Homo sapien
ccagatggtttagacagggcaatac

SEQ ID NO: 390413 - DNA, 25 bp, Homo sapien
gatggtttagacagggcaatacccc

SEQ ID NO: 390414 - DNA, 25 bp, Homo sapien
gtttagacagggcaatacccctcta

SEQ ID NO: 390415 - DNA, 25 bp, Homo sapien
ttagacagggcaatacccctctaag

SEQ ID NO: 390416 - DNA, 25 bp, Homo sapien
aattcagtcctaacaatgctctccc

SEQ ID NO: 390417 - DNA, 25 bp, Homo sapien
tccccaacaattcagtcctaacaat

SEQ ID NO: 390418 - DNA, 25 bp, Homo sapien
acaattcagtcctaacaatgctctc

SEQ ID NO: 390419 - DNA, 25 bp, Homo sapien
caacaattcagtcctaacaatgctc

SEQ ID NO: 390420 - DNA, 25 bp, Homo sapien
gaatcctcgagatgttcgtgtggac

SEQ ID NO: 390421 - DNA, 25 bp, Homo sapien
gtaaagagtggatattgtctcgctg

SEQ ID NO: 390422 - DNA, 25 bp, Homo sapien
gatgttcgtgtggactatgtcccaa

SEQ ID NO: 390423 - DNA, 25 bp, Homo sapien
ctcagcccagaatcctcgagatgtt

SEQ ID NO: 390424 - DNA, 25 bp, Homo sapien
tctcctcgcggcaaatctgacttgg

SEQ ID NO: 390425 - DNA, 25 bp, Homo sapien
cgaacttggagatctcaggacctca

SEQ ID NO: 390426 - DNA, 25 bp, Homo sapien
tcaagcaagtcagtaggaccagtca

SEQ ID NO: 390427 - DNA, 25 bp, Homo sapien
gactgcaaggcttctaaggacccga

SEQ ID NO: 390428 - DNA, 25 bp, Homo sapien
gccaccaatactcttgagccaactt

SEQ ID NO: 390429 - DNA, 25 bp, Homo sapien
caccaatactcttgagccaacttga

SEQ ID NO: 390430 - DNA, 25 bp, Homo sapien
cagtaaagggacaaggattaaagat

SEQ ID NO: 390431 - DNA, 25 bp, Homo sapien
gacaaggattaaagattcctgtctt

SEQ ID NO: 390432 - DNA, 25 bp, Homo sapien
ttagaggatgtcatgtggaagttcc

SEQ ID NO: 390433 - DNA, 25 bp, Homo sapien
agaggatgtcatgtggaagttccat

SEQ ID NO: 390434 - DNA, 25 bp, Homo sapien
tagaggatgtcatgtggaagttcca

SEQ ID NO: 390435 - DNA, 25 bp, Homo sapien
taattgtttatacagcccttctctt

SEQ ID NO: 390436 - DNA, 25 bp, Homo sapien
tcctgcttaattaattgtttataca

SEQ ID NO: 390437 - DNA, 25 bp, Homo sapien
aattgtttatacagcccttctcttt

SEQ ID NO: 390438 - DNA, 25 bp, Homo sapien
cctgtctctgatccgggaacactga

SEQ ID NO: 390439 - DNA, 25 bp, Homo sapien
tattagctgcctgtctctgatccgg

SEQ ID NO: 390440 - DNA, 25 bp, Homo sapien
gatgaaccttttattagctgcctgt

SEQ ID NO: 390441 - DNA, 25 bp, Homo sapien
gatccgggaacactgatgacaggtg

SEQ ID NO: 390442 - DNA, 25 bp, Homo sapien
gacaaagctgggcttgattccgctt

SEQ ID NO: 390443 - DNA, 25 bp, Homo sapien
gctgggcttgattccgcttggatcc

SEQ ID NO: 390444 - DNA, 25 bp, Homo sapien
gcttgattccgcttggatccctggc

SEQ ID NO: 390445 - DNA, 25 bp, Homo sapien
ttccgcttggatccctggcttctca

SEQ ID NO: 390446 - DNA, 25 bp, Homo sapien
taatgagcaaacatgggaatcccct

SEQ ID NO: 390447 - DNA, 25 bp, Homo sapien
gacagtttgccaataacgaggagaa

SEQ ID NO: 390448 - DNA, 25 bp, Homo sapien
cagcctcgccgtgcttgaaatcagg

SEQ ID NO: 390449 - DNA, 25 bp, Homo sapien
gaaacgatctgaattaaccctgact

SEQ ID NO: 390450 - DNA, 25 bp, Homo sapien
ccctcgtttacaggaagctgcggat

SEQ ID NO: 390451 - DNA, 25 bp, Homo sapien
tgcagttgcacacaaatgaagacac

SEQ ID NO: 390452 - DNA, 25 bp, Homo sapien
tagggttacccacatggtaagggca

SEQ ID NO: 390453 - DNA, 25 bp, Homo sapien
gggaccccagttttccatgctgcac

SEQ ID NO: 390454 - DNA, 25 bp, Homo sapien
taagagctcaagttgattaccgcag

SEQ ID NO: 390455 - DNA, 25 bp, Homo sapien
tgtccgtctgtatgttgctgagccc

SEQ ID NO: 390456 - DNA, 25 bp, Homo sapien
gacccttggaggcacattggtgaca

SEQ ID NO: 390457 - DNA, 25 bp, Homo sapien
gaagacgaagcctcatttgcccgat

SEQ ID NO: 390458 - DNA, 25 bp, Homo sapien
gtttcaccttcagctttatcttact

SEQ ID NO: 390459 - DNA, 25 bp, Homo sapien
ttcaccttcagctttatcttactca

SEQ ID NO: 390460 - DNA, 25 bp, Homo sapien
ctgtttcaccttcagctttatctta

SEQ ID NO: 390461 - DNA, 25 bp, Homo sapien
tcaccttcagctttatcttactcat

SEQ ID NO: 390462 - DNA, 25 bp, Homo sapien
agcctggtctgtgtcagaacgggct

SEQ ID NO: 390463 - DNA, 25 bp, Homo sapien
ctgcaagtagcctggtctgtgtcag

SEQ ID NO: 390464 - DNA, 25 bp, Homo sapien
cccggcggcgccagcatccagctgg

SEQ ID NO: 390465 - DNA, 25 bp, Homo sapien
gcaagtagcctggtctgtgtcagaa

SEQ ID NO: 390466 - DNA, 25 bp, Homo sapien
acctggtgttgcctgcggtccttgg

SEQ ID NO: 390467 - DNA, 25 bp, Homo sapien
ccatgaactgactggtttcaaacaa

SEQ ID NO: 390468 - DNA, 25 bp, Homo sapien
agtccctccctctagcgacatgtga

SEQ ID NO: 390469 - DNA, 25 bp, Homo sapien
catgtgacttttgccctgtgtgtgt

SEQ ID NO: 390470 - DNA, 25 bp, Homo sapien
gacaccaagaatgggggtcgtgtaa

SEQ ID NO: 390471 - DNA, 25 bp, Homo sapien
acaatagcagctagtctgcagggcc

SEQ ID NO: 390472 - DNA, 25 bp, Homo sapien
gccacaatagcagctagtctgcagg

SEQ ID NO: 390473 - DNA, 25 bp, Homo sapien
ctggagagcccctgtgtgacaccaa

SEQ ID NO: 390474 - DNA, 25 bp, Homo sapien
ttttgcccctccagcacctgcatgc

SEQ ID NO: 390475 - DNA, 25 bp, Homo sapien
ccttttgcccctccagcacctgcat

SEQ ID NO: 390476 - DNA, 25 bp, Homo sapien
ctggccttttgcccctccagcacct

SEQ ID NO: 390477 - DNA, 25 bp, Homo sapien
ggccttttgcccctccagcacctgc

SEQ ID NO: 390478 - DNA, 25 bp, Homo sapien
tctggcccatgagtgacttatctga

SEQ ID NO: 390479 - DNA, 25 bp, Homo sapien
gccccgtagcttgatctctgtagat

SEQ ID NO: 390480 - DNA, 25 bp, Homo sapien
aaagtatttttcaaggctccctgca

SEQ ID NO: 390481 - DNA, 25 bp, Homo sapien
aggaagcagcgtgccccttttctta

SEQ ID NO: 390482 - DNA, 25 bp, Homo sapien
aaatcatgttatagttaaaacaagt

SEQ ID NO: 390483 - DNA, 25 bp, Homo sapien
atcatgttatagttaaaacaagtta

SEQ ID NO: 390484 - DNA, 25 bp, Homo sapien
tgttttatagatcctttctaccttg

SEQ ID NO: 390485 - DNA, 25 bp, Homo sapien
aatcatgttatagttaaaacaagtt

SEQ ID NO: 390486 - DNA, 25 bp, Homo sapien
gcggttttgatgctctacatgttta

SEQ ID NO: 390487 - DNA, 25 bp, Homo sapien
cggttttgatgctctacatgtttag

SEQ ID NO: 390488 - DNA, 25 bp, Homo sapien
agaaacttctctagtaatgaactat

SEQ ID NO: 390489 - DNA, 25 bp, Homo sapien
ctagtaatgaactatagaaatgatc

SEQ ID NO: 390490 - DNA, 25 bp, Homo sapien
cacagctggccagctttgaggttgg

SEQ ID NO: 390491 - DNA, 25 bp, Homo sapien
cagctttgaggttggggtcatctgt

SEQ ID NO: 390492 - DNA, 25 bp, Homo sapien
tgcagcacagctggccagctttgag

SEQ ID NO: 390493 - DNA, 25 bp, Homo sapien
gccagctttgaggttggggtcatct

SEQ ID NO: 390494 - DNA, 25 bp, Homo sapien
gcttcccatgggaccaatatcttcc

SEQ ID NO: 390495 - DNA, 25 bp, Homo sapien
cgtattctggggatctggactttcc

SEQ ID NO: 390496 - DNA, 25 bp, Homo sapien
acagttgcttcaaacagctgacatc

SEQ ID NO: 390497 - DNA, 25 bp, Homo sapien
gtcttcaaggcttccgtattctggg

SEQ ID NO: 390498 - DNA, 25 bp, Homo sapien
gaaagttgctttgattcctgtgcca

SEQ ID NO: 390499 - DNA, 25 bp, Homo sapien
aaagttgctttgattcctgtgccat

SEQ ID NO: 390500 - DNA, 25 bp, Homo sapien
ccaagacaagagtatcctggaaagt

SEQ ID NO: 390501 - DNA, 25 bp, Homo sapien
gacaagagtatcctggaaagttgct

SEQ ID NO: 390502 - DNA, 25 bp, Homo sapien
tgagcatccagtgaaagtcagctgt

SEQ ID NO: 390503 - DNA, 25 bp, Homo sapien
tgtgagtacactcttcatagacgcc

SEQ ID NO: 390504 - DNA, 25 bp, Homo sapien
gagtttcagatcactagatttcccc

SEQ ID NO: 390505 - DNA, 25 bp, Homo sapien
tctacagatgtgtactgagcatcca

SEQ ID NO: 390506 - DNA, 25 bp, Homo sapien
agacacggccccttgtccagtctta

SEQ ID NO: 390507 - DNA, 25 bp, Homo sapien
tcttatgagctaccagtctgtcctg

SEQ ID NO: 390508 - DNA, 25 bp, Homo sapien
tgtccagtcttatgagctaccagtc

SEQ ID NO: 390509 - DNA, 25 bp, Homo sapien
gccccttgtccagtcttatgagcta

SEQ ID NO: 390510 - DNA, 25 bp, Homo sapien
gttccttctggagcgacactgccat

SEQ ID NO: 390511 - DNA, 25 bp, Homo sapien
ctgttccttctggagcgacactgcc

SEQ ID NO: 390512 - DNA, 25 bp, Homo sapien
gtggtggggacggctgttccttctg

SEQ ID NO: 390513 - DNA, 25 bp, Homo sapien
tgttccttctggagcgacactgcca

SEQ ID NO: 390514 - DNA, 25 bp, Homo sapien
ccagttgcattttggtcacatgtgc

SEQ ID NO: 390515 - DNA, 25 bp, Homo sapien
cttggctgcaacagtgaattccagc

SEQ ID NO: 390516 - DNA, 25 bp, Homo sapien
ggtattatgtggttgcttggctgca

SEQ ID NO: 390517 - DNA, 25 bp, Homo sapien
agctgcattgatgaccactggaaaa

SEQ ID NO: 390518 - DNA, 25 bp, Homo sapien
tgctggttggaatactgttctaatg

SEQ ID NO: 390519 - DNA, 25 bp, Homo sapien
ggtcccctgtcgtgacaattgcctt

SEQ ID NO: 390520 - DNA, 25 bp, Homo sapien
tgggtccactggttggtcccctgtc

SEQ ID NO: 390521 - DNA, 25 bp, Homo sapien
cgtggtgctggttggaatactgttc

SEQ ID NO: 390522 - DNA, 25 bp, Homo sapien
attttctctcgcctggttgccctgt

SEQ ID NO: 390523 - DNA, 25 bp, Homo sapien
gaatgcattttctctcgcctggttg

SEQ ID NO: 390524 - DNA, 25 bp, Homo sapien
ccttttctgcggctggcggaggcct

SEQ ID NO: 390525 - DNA, 25 bp, Homo sapien
gttgccctgtgcctgaagcaccctt

SEQ ID NO: 390526 - DNA, 25 bp, Homo sapien
tcagtactgcgttttttccatggat

SEQ ID NO: 390527 - DNA, 25 bp, Homo sapien
ctcttcaagttccaaagacctgggc

SEQ ID NO: 390528 - DNA, 25 bp, Homo sapien
gtgatgctgacgtgcccgctcctcc

SEQ ID NO: 390529 - DNA, 25 bp, Homo sapien
gcagtccatcaatctccgcaggcaa

SEQ ID NO: 390530 - DNA, 25 bp, Homo sapien
aatctccgcaggcaaggctccggga

SEQ ID NO: 390531 - DNA, 25 bp, Homo sapien
gtggcgcgcgcctcggaggtggcag

SEQ ID NO: 390532 - DNA, 25 bp, Homo sapien
ggaaacacaggtgttgcagcgggta

SEQ ID NO: 390533 - DNA, 25 bp, Homo sapien
gcccgcagaagggtgcatttgcacc

SEQ ID NO: 390534 - DNA, 25 bp, Homo sapien
ttgcagcgggtagcgggcccgcaga

SEQ ID NO: 390535 - DNA, 25 bp, Homo sapien
ttgttttcaactgtacagcggagga

SEQ ID NO: 390536 - DNA, 25 bp, Homo sapien
aggaaccgggcaaaggcaaccgcag

SEQ ID NO: 390537 - DNA, 25 bp, Homo sapien
gcaaccgcaggtcaggcgaggtcca

SEQ ID NO: 390538 - DNA, 25 bp, Homo sapien
ggaggaccgtattcacagcaatatc

SEQ ID NO: 390539 - DNA, 25 bp, Homo sapien
tcctttgtcattttggtgtgaccac

SEQ ID NO: 390540 - DNA, 25 bp, Homo sapien
ttcaataaatgccagtggatcgttc

SEQ ID NO: 390541 - DNA, 25 bp, Homo sapien
ggcagaaccagcgcaatacagcatt

SEQ ID NO: 390542 - DNA, 25 bp, Homo sapien
tgtgaccacggtttgctgcctcggg

SEQ ID NO: 390543 - DNA, 25 bp, Homo sapien
gtcttctcagcaaagcttcctactg

SEQ ID NO: 390544 - DNA, 25 bp, Homo sapien
gttttaaccccagagcacattctag

SEQ ID NO: 390545 - DNA, 25 bp, Homo sapien
tgtgtttcattaccatttctcctgg

SEQ ID NO: 390546 - DNA, 25 bp, Homo sapien
aaagcttcctactgcattgtgtttc

SEQ ID NO: 390547 - DNA, 25 bp, Homo sapien
ccttgcaggtggctagtgtgcaagt

SEQ ID NO: 390548 - DNA, 25 bp, Homo sapien
aataggtcaaccagccagatgcagg

SEQ ID NO: 390549 - DNA, 25 bp, Homo sapien
agggacagaatcaggcccatcccct

SEQ ID NO: 390550 - DNA, 25 bp, Homo sapien
cctgggttgcatttgggaaggacca

SEQ ID NO: 390551 - DNA, 25 bp, Homo sapien
tgtctggtttcaatgaatcaaaaca

SEQ ID NO: 390552 - DNA, 25 bp, Homo sapien
gtgtctggtttcaatgaatcaaaac

SEQ ID NO: 390553 - DNA, 25 bp, Homo sapien
agtgtctggtttcaatgaatcaaaa

SEQ ID NO: 390554 - DNA, 25 bp, Homo sapien
gaagaaatgggtgggtcgctgctga

SEQ ID NO: 390555 - DNA, 25 bp, Homo sapien
ctcaatcagttcattggaggaagaa

SEQ ID NO: 390556 - DNA, 25 bp, Homo sapien
ttgatcatctctgccgtttgcagtt

SEQ ID NO: 390557 - DNA, 25 bp, Homo sapien
tgggtgggtcgctgctgacattctt

SEQ ID NO: 390558 - DNA, 25 bp, Homo sapien
ggatttctccgctcatctcatctgg

SEQ ID NO: 390559 - DNA, 25 bp, Homo sapien
tatgaacaccgttctttcaagaggg

SEQ ID NO: 390560 - DNA, 25 bp, Homo sapien
gggccacgctggatcattccccaga

SEQ ID NO: 390561 - DNA, 25 bp, Homo sapien
tgaaagccccgtgctaaaaccagga

SEQ ID NO: 390562 - DNA, 25 bp, Homo sapien
tgtgggctggtccagaccccatctt

SEQ ID NO: 390563 - DNA, 25 bp, Homo sapien
cctgctttgaggctctcttggtaaa

SEQ ID NO: 390564 - DNA, 25 bp, Homo sapien
ggtaaaatgtctggcctaagacagg

SEQ ID NO: 390565 - DNA, 25 bp, Homo sapien
ctggcctaagacaggacgttttttg

SEQ ID NO: 390566 - DNA, 25 bp, Homo sapien
cggggcttataaaatgcagacgcct

SEQ ID NO: 390567 - DNA, 25 bp, Homo sapien
aaatgcagacgccttgtcttcacag

SEQ ID NO: 390568 - DNA, 25 bp, Homo sapien
ccggggcttataaaatgcagacgcc

SEQ ID NO: 390569 - DNA, 25 bp, Homo sapien
atgcagacgccttgtcttcacagca

SEQ ID NO: 390570 - DNA, 25 bp, Homo sapien
taagtgttcagtacacatttcccat

SEQ ID NO: 390571 - DNA, 25 bp, Homo sapien
cggagcccggcatatgttaagtgtt

SEQ ID NO: 390572 - DNA, 25 bp, Homo sapien
tcagtacacatttcccattccagac

SEQ ID NO: 390573 - DNA, 25 bp, Homo sapien
ggagtccggagcccggcatatgtta

SEQ ID NO: 390574 - DNA, 25 bp, Homo sapien
tggtcctggcaacaggtctttcaag

SEQ ID NO: 390575 - DNA, 25 bp, Homo sapien
ttctaagcattccatcaccaggtca

SEQ ID NO: 390576 - DNA, 25 bp, Homo sapien
gagctccttgagtactctcccatgg

SEQ ID NO: 390577 - DNA, 25 bp, Homo sapien
tcaggagttcaggtacttgtcccgc

SEQ ID NO: 390578 - DNA, 25 bp, Homo sapien
acagtgggactccagtactgcttga

SEQ ID NO: 390579 - DNA, 25 bp, Homo sapien
ctgagacttttggaattgggtaaca

SEQ ID NO: 390580 - DNA, 25 bp, Homo sapien
attgtttgtaacctgtatgtttcgg

SEQ ID NO: 390581 - DNA, 25 bp, Homo sapien
aacctgtatgtttcggtcacccttg

SEQ ID NO: 390582 - DNA, 25 bp, Homo sapien
aggtacaaacctgctgagtgactca

SEQ ID NO: 390583 - DNA, 25 bp, Homo sapien
gagtgactcaacctgtttcctgtgt

SEQ ID NO: 390584 - DNA, 25 bp, Homo sapien
tggcctggtcacctatgcggacagt

SEQ ID NO: 390585 - DNA, 25 bp, Homo sapien
tgctctctctcgtaatttgcaggta

SEQ ID NO: 390586 - DNA, 25 bp, Homo sapien
gggtataacgtaattggtggtcagc

SEQ ID NO: 390587 - DNA, 25 bp, Homo sapien
gatacaggccagcaatgggtgccca

SEQ ID NO: 390588 - DNA, 25 bp, Homo sapien
aagacaaagggtgagtcctcctgtt

SEQ ID NO: 390589 - DNA, 25 bp, Homo sapien
ccaaaggaaagcctgtgcgatacag

SEQ ID NO: 390590 - DNA, 25 bp, Homo sapien
tcagaatttaggagatcagtgtccc

SEQ ID NO: 390591 - DNA, 25 bp, Homo sapien
tcagccaatctcaggatgagggctt

SEQ ID NO: 390592 - DNA, 25 bp, Homo sapien
cctggcaagactaagagttcacttt

SEQ ID NO: 390593 - DNA, 25 bp, Homo sapien
ttttaatagtagacccctggcaaga

SEQ ID NO: 390594 - DNA, 25 bp, Homo sapien
taccaagcacaatgctgggcacctg

SEQ ID NO: 390595 - DNA, 25 bp, Homo sapien
tgtacactcaggagtcctaagggac

SEQ ID NO: 390596 - DNA, 25 bp, Homo sapien
cctaagggacaagtgtttgaaatca

SEQ ID NO: 390597 - DNA, 25 bp, Homo sapien
ggcagtagagagaccatggattcca

SEQ ID NO: 390598 - DNA, 25 bp, Homo sapien
caaagttgattcgaacatgcacggg

SEQ ID NO: 390599 - DNA, 25 bp, Homo sapien
tttccttacgtcctgtcttttgcaa

SEQ ID NO: 390600 - DNA, 25 bp, Homo sapien
gagaaaataattcaggtaacaagca

SEQ ID NO: 390601 - DNA, 25 bp, Homo sapien
catgcacgggtgttttatagaaacc

SEQ ID NO: 390602 - DNA, 25 bp, Homo sapien
gagtatgttctagaccttggttcct

SEQ ID NO: 390603 - DNA, 25 bp, Homo sapien
cttaagagagtatgttctagacctt

SEQ ID NO: 390604 - DNA, 25 bp, Homo sapien
taagagagtatgttctagaccttgg

SEQ ID NO: 390605 - DNA, 25 bp, Homo sapien
tgttctagaccttggttcctgcggg

SEQ ID NO: 390606 - DNA, 25 bp, Homo sapien
ggtggatttttcctatttctagtca

SEQ ID NO: 390607 - DNA, 25 bp, Homo sapien
gtggatttttcctatttctagtcat

SEQ ID NO: 390608 - DNA, 25 bp, Homo sapien
attttgagtctgaaaaggtggattt

SEQ ID NO: 390609 - DNA, 25 bp, Homo sapien
tgagtctgaaaaggtggatttttcc

SEQ ID NO: 390610 - DNA, 25 bp, Homo sapien
actaggggtcatgtgaggttcatgt

SEQ ID NO: 390611 - DNA, 25 bp, Homo sapien
gatgaggccacaggtttccatagca

SEQ ID NO: 390612 - DNA, 25 bp, Homo sapien
aaaccgtgaggctgttgctggatga

SEQ ID NO: 390613 - DNA, 25 bp, Homo sapien
gcaacagaagtgatggcaagccctg

SEQ ID NO: 390614 - DNA, 25 bp, Homo sapien
tctagctccagatctaactgccagt

SEQ ID NO: 390615 - DNA, 25 bp, Homo sapien
ctagctccagatctaactgccagtt

SEQ ID NO: 390616 - DNA, 25 bp, Homo sapien
agaagggcggccaacctggcactcc

SEQ ID NO: 390617 - DNA, 25 bp, Homo sapien
agctgctcattctctgagtaacctt

SEQ ID NO: 390618 - DNA, 25 bp, Homo sapien
gcagaagggcggccaacctggcact

SEQ ID NO: 390619 - DNA, 25 bp, Homo sapien
gaagggcggccaacctggcactcca

SEQ ID NO: 390620 - DNA, 25 bp, Homo sapien
catgctttatgagtcgttcctgatc

SEQ ID NO: 390621 - DNA, 25 bp, Homo sapien
cattgaaatagttaccgatgggctg

SEQ ID NO: 390622 - DNA, 25 bp, Homo sapien
gatgggctgtaaatcacatgcaatg

SEQ ID NO: 390623 - DNA, 25 bp, Homo sapien
gagtcgttcctgatcattgaaatag

SEQ ID NO: 390624 - DNA, 25 bp, Homo sapien
tatgctgatccaccaagagaaagga

SEQ ID NO: 390625 - DNA, 25 bp, Homo sapien
gagaaatatgctgatccaccaagag

SEQ ID NO: 390626 - DNA, 25 bp, Homo sapien
taaggagggtatgcatggagaaata

SEQ ID NO: 390627 - DNA, 25 bp, Homo sapien
tatgcatggagaaatatgctgatcc

SEQ ID NO: 390628 - DNA, 25 bp, Homo sapien
tggcctataccctcaaggatgttag

SEQ ID NO: 390629 - DNA, 25 bp, Homo sapien
ggctctgctgcttgtattctcgtcg

SEQ ID NO: 390630 - DNA, 25 bp, Homo sapien
tattctcgtcgtttctctttccaca

SEQ ID NO: 390631 - DNA, 25 bp, Homo sapien
cagggtcccgtgtgatcatcattgt

SEQ ID NO: 390632 - DNA, 25 bp, Homo sapien
cacagaaaataacggtgaactcagc

SEQ ID NO: 390633 - DNA, 25 bp, Homo sapien
caaaggttggttctctgcaccctct

SEQ ID NO: 390634 - DNA, 25 bp, Homo sapien
tctgctttgaccaatcaggatagtg

SEQ ID NO: 390635 - DNA, 25 bp, Homo sapien
ctgaggcggtaaacatagaaatgac

SEQ ID NO: 390636 - DNA, 25 bp, Homo sapien
agccacgggaaatgctgttcacact

SEQ ID NO: 390637 - DNA, 25 bp, Homo sapien
gccacagccacgggaaatgctgttc

SEQ ID NO: 390638 - DNA, 25 bp, Homo sapien
cagccacgggaaatgctgttcacac

SEQ ID NO: 390639 - DNA, 25 bp, Homo sapien
cacagccacgggaaatgctgttcac

SEQ ID NO: 390640 - DNA, 25 bp, Homo sapien
gagcttctttgaagacacagctagg

SEQ ID NO: 390641 - DNA, 25 bp, Homo sapien
cagtgcaagcactctagctccacaa

SEQ ID NO: 390642 - DNA, 25 bp, Homo sapien
tcctgagtcctgatgctggagcttc

SEQ ID NO: 390643 - DNA, 25 bp, Homo sapien
cacatgctcggaatggatgagacag

SEQ ID NO: 390644 - DNA, 25 bp, Homo sapien
ggctgatgcagcctcaccgactcct

SEQ ID NO: 390645 - DNA, 25 bp, Homo sapien
gacatttctgctcatggtgagggct

SEQ ID NO: 390646 - DNA, 25 bp, Homo sapien
cgactcctctctgcaagtccatcag

SEQ ID NO: 390647 - DNA, 25 bp, Homo sapien
gggctcccagtggttgtcctgctgt

SEQ ID NO: 390648 - DNA, 25 bp, Homo sapien
gagagccatggttctgagttccatc

SEQ ID NO: 390649 - DNA, 25 bp, Homo sapien
gctcatagggtgcattgacctctgt

SEQ ID NO: 390650 - DNA, 25 bp, Homo sapien
caaaggttactcctctttcggagat

SEQ ID NO: 390651 - DNA, 25 bp, Homo sapien
tccatcctgctcatagggtgcattg

SEQ ID NO: 390652 - DNA, 25 bp, Homo sapien
gaaatatcagtccttacggtgctca

SEQ ID NO: 390653 - DNA, 25 bp, Homo sapien
tccagtaggaacatgggaaatccac

SEQ ID NO: 390654 - DNA, 25 bp, Homo sapien
ggaaatccacaggtaaacatgcaca

SEQ ID NO: 390655 - DNA, 25 bp, Homo sapien
cagagagagacccatgaaatatcag

SEQ ID NO: 390656 - DNA, 25 bp, Homo sapien
gcttcctttcagattcgacatacag

SEQ ID NO: 390657 - DNA, 25 bp, Homo sapien
tgcgtaacaggccttttaattccca

SEQ ID NO: 390658 - DNA, 25 bp, Homo sapien
tgacaatctccctcatccgtgtatt

SEQ ID NO: 390659 - DNA, 25 bp, Homo sapien
gccttttgggcagggactgcgtaac

SEQ ID NO: 390660 - DNA, 25 bp, Homo sapien
tggaatgcagccctcatacactcat

SEQ ID NO: 390661 - DNA, 25 bp, Homo sapien
taattgcctgctgtccgttcctcat

SEQ ID NO: 390662 - DNA, 25 bp, Homo sapien
ctcatacactcatgctgggcggctg

SEQ ID NO: 390663 - DNA, 25 bp, Homo sapien
tgctgggcggctgtaattgcctgct

SEQ ID NO: 390664 - DNA, 25 bp, Homo sapien
ggctcgccttggttcagacactggg

SEQ ID NO: 390665 - DNA, 25 bp, Homo sapien
ggtgctcgagaaactgacctggagt

SEQ ID NO: 390666 - DNA, 25 bp, Homo sapien
catcggctgttgagttgggactttc

SEQ ID NO: 390667 - DNA, 25 bp, Homo sapien
tgttgagtcagcaacactcaggagg

SEQ ID NO: 390668 - DNA, 25 bp, Homo sapien
gctgagtcttggaatccttctatgc

SEQ ID NO: 390669 - DNA, 25 bp, Homo sapien
tccctggatacagcgactgctgcca

SEQ ID NO: 390670 - DNA, 25 bp, Homo sapien
ccttctatgccattttctagactaa

SEQ ID NO: 390671 - DNA, 25 bp, Homo sapien
tgaagctgagtcttggaatccttct

SEQ ID NO: 390672 - DNA, 25 bp, Homo sapien
cttccattcatagtcaatggtttct

SEQ ID NO: 390673 - DNA, 25 bp, Homo sapien
gacatcgagagattgtgaggacttg

SEQ ID NO: 390674 - DNA, 25 bp, Homo sapien
ggagaaagacatcgagagattgtga

SEQ ID NO: 390675 - DNA, 25 bp, Homo sapien
ttgtgaggacttgtgacagccctga

SEQ ID NO: 390676 - DNA, 25 bp, Homo sapien
ccttgtctatcctccttgggtgcta

SEQ ID NO: 390677 - DNA, 25 bp, Homo sapien
caatgcccatagcacccaagtcact

SEQ ID NO: 390678 - DNA, 25 bp, Homo sapien
atagcacccaagtcactggcccgcc

SEQ ID NO: 390679 - DNA, 25 bp, Homo sapien
ctcaatgcccatagcacccaagtca

SEQ ID NO: 390680 - DNA, 25 bp, Homo sapien
atgcccatagcacccaagtcactgg

SEQ ID NO: 390681 - DNA, 25 bp, Homo sapien
ctgggtttttactggcgcctccact

SEQ ID NO: 390682 - DNA, 25 bp, Homo sapien
tgggtttttactggcgcctccactc

SEQ ID NO: 390683 - DNA, 25 bp, Homo sapien
tctgggtttttactggcgcctccac

SEQ ID NO: 390684 - DNA, 25 bp, Homo sapien
ctctgggtttttactggcgcctcca

SEQ ID NO: 390685 - DNA, 25 bp, Homo sapien
gttggtctgcgccaggatcctccat

SEQ ID NO: 390686 - DNA, 25 bp, Homo sapien
tgttgcccggagaactgctgtagac

SEQ ID NO: 390687 - DNA, 25 bp, Homo sapien
tgctgtagacacgtaactgctgggt

SEQ ID NO: 390688 - DNA, 25 bp, Homo sapien
ggtgagtgtccatcagttggtctgc

SEQ ID NO: 390689 - DNA, 25 bp, Homo sapien
ctcatcaccgttcacggagacccaa

SEQ ID NO: 390690 - DNA, 25 bp, Homo sapien
tcagaccctcatcaccgttcacgga

SEQ ID NO: 390691 - DNA, 25 bp, Homo sapien
agaccctcatcaccgttcacggaga

SEQ ID NO: 390692 - DNA, 25 bp, Homo sapien
tcaccgttcacggagacccaagcag

SEQ ID NO: 390693 - DNA, 25 bp, Homo sapien
tgtcacagcctaccaagccttgtcc

SEQ ID NO: 390694 - DNA, 25 bp, Homo sapien
gtcacagcctaccaagccttgtcct

SEQ ID NO: 390695 - DNA, 25 bp, Homo sapien
tcacagcctaccaagccttgtcctg

SEQ ID NO: 390696 - DNA, 25 bp, Homo sapien
gcactcagcaccctacttgggactg

SEQ ID NO: 390697 - DNA, 25 bp, Homo sapien
tcatcaaagagtctgccaggtcctc

SEQ ID NO: 390698 - DNA, 25 bp, Homo sapien
atctgtccgtcgtagggtggatgct

SEQ ID NO: 390699 - DNA, 25 bp, Homo sapien
gactgagcacaacatccaggcacta

SEQ ID NO: 390700 - DNA, 25 bp, Homo sapien
tgcatcgtggttcatggcacaaagg

SEQ ID NO: 390701 - DNA, 25 bp, Homo sapien
ctattgttagtgttgctgtcagccg

SEQ ID NO: 390702 - DNA, 25 bp, Homo sapien
ggcacaaaggcaggctattgctatt

SEQ ID NO: 390703 - DNA, 25 bp, Homo sapien
ccttttgaacaccattgcatcgtgg

SEQ ID NO: 390704 - DNA, 25 bp, Homo sapien
acattttcaccttgagttgatgcta

SEQ ID NO: 390705 - DNA, 25 bp, Homo sapien
gaacgacctacattttcaccttgag

SEQ ID NO: 390706 - DNA, 25 bp, Homo sapien
gaggggctcccgttttcagagaaga

SEQ ID NO: 390707 - DNA, 25 bp, Homo sapien
ctgggcccagggaacgacctacatt

SEQ ID NO: 390708 - DNA, 25 bp, Homo sapien
cacaaagtgcttctcaggaggtgtt

SEQ ID NO: 390709 - DNA, 25 bp, Homo sapien
gactcgtaactgaaacctgcttcca

SEQ ID NO: 390710 - DNA, 25 bp, Homo sapien
gatttgcaagaggtgcgtgctttcc

SEQ ID NO: 390711 - DNA, 25 bp, Homo sapien
tctgcattattggatgaagggcact

SEQ ID NO: 390712 - DNA, 25 bp, Homo sapien
ttcctcagcagctgatgactcaggg

SEQ ID NO: 390713 - DNA, 25 bp, Homo sapien
agcagctgatgactcagggatgctg

SEQ ID NO: 390714 - DNA, 25 bp, Homo sapien
cctcagcagctgatgactcagggat

SEQ ID NO: 390715 - DNA, 25 bp, Homo sapien
tcagcagctgatgactcagggatgc

SEQ ID NO: 390716 - DNA, 25 bp, Homo sapien
ggggctgcgcaggtgcttggtttcc

SEQ ID NO: 390717 - DNA, 25 bp, Homo sapien
ccctgcggtgttggggggcttgtgg

SEQ ID NO: 390718 - DNA, 25 bp, Homo sapien
ttggccacgacaaggcgggtctgga

SEQ ID NO: 390719 - DNA, 25 bp, Homo sapien
ggcttggccacgacaaggcgggtct

SEQ ID NO: 390720 - DNA, 25 bp, Homo sapien
ccccggcttggccacgacaaggcgg

SEQ ID NO: 390721 - DNA, 25 bp, Homo sapien
tctatataagattcaaactgctgct

SEQ ID NO: 390722 - DNA, 25 bp, Homo sapien
gcagaggcagttgtgtttctcctca

SEQ ID NO: 390723 - DNA, 25 bp, Homo sapien
atcctcaagaaattggcgtcgcgaa

SEQ ID NO: 390724 - DNA, 25 bp, Homo sapien
caaatgttccgtggttatggaatgt

SEQ ID NO: 390725 - DNA, 25 bp, Homo sapien
cctgggtctggtaccttctctggaa

SEQ ID NO: 390726 - DNA, 25 bp, Homo sapien
tacttcattaataccaaggtctgca

SEQ ID NO: 390727 - DNA, 25 bp, Homo sapien
ctgggtctggtaccttctctggaaa

SEQ ID NO: 390728 - DNA, 25 bp, Homo sapien
tccctgggtctggtaccttctctgg

SEQ ID NO: 390729 - DNA, 25 bp, Homo sapien
ctggtgggctggtgatttcacagta

SEQ ID NO: 390730 - DNA, 25 bp, Homo sapien
tggtgggctggtgatttcacagtag

SEQ ID NO: 390731 - DNA, 25 bp, Homo sapien
tcttccaggtgtacgatggctcccc

SEQ ID NO: 390732 - DNA, 25 bp, Homo sapien
gcaggtgccacagttacagcagcca

SEQ ID NO: 390733 - DNA, 25 bp, Homo sapien
atggctccccctgtgactgactgag

SEQ ID NO: 390734 - DNA, 25 bp, Homo sapien
tgagtgggctcctgcaggtgccaca

SEQ ID NO: 390735 - DNA, 25 bp, Homo sapien
gccctccagtttaaatggcaaatgg

SEQ ID NO: 390736 - DNA, 25 bp, Homo sapien
cacgtactggctctttgatgcatgt

SEQ ID NO: 390737 - DNA, 25 bp, Homo sapien
tggtctcaagtagccagaagcatct

SEQ ID NO: 390738 - DNA, 25 bp, Homo sapien
tgggttctggagaccatcttccaac

SEQ ID NO: 390739 - DNA, 25 bp, Homo sapien
cagaagcatttgcttcccattcctg

SEQ ID NO: 390740 - DNA, 25 bp, Homo sapien
taaacactggtttctgtaggcacca

SEQ ID NO: 390741 - DNA, 25 bp, Homo sapien
ggaattcacctccatgtcatcgcga

SEQ ID NO: 390742 - DNA, 25 bp, Homo sapien
gatgtgaatcataaacactggtttc

SEQ ID NO: 390743 - DNA, 25 bp, Homo sapien
cgtcgccacacaactttttgactca

SEQ ID NO: 390744 - DNA, 25 bp, Homo sapien
gccacacaactttttgactcatatt

SEQ ID NO: 390745 - DNA, 25 bp, Homo sapien
cacgtcgccacacaactttttgact

SEQ ID NO: 390746 - DNA, 25 bp, Homo sapien
ttctctccagttgcttccatgggag

SEQ ID NO: 390747 - DNA, 25 bp, Homo sapien
cactgtctttgagcatttggtgcca

SEQ ID NO: 390748 - DNA, 25 bp, Homo sapien
caaccagttagcttgcagaagtggg

SEQ ID NO: 390749 - DNA, 25 bp, Homo sapien
tgccattttgggatagtgaggttcc

SEQ ID NO: 390750 - DNA, 25 bp, Homo sapien
ggatggtagccttttcgagaagcac

SEQ ID NO: 390751 - DNA, 25 bp, Homo sapien
aatggtgcccgcatctggaattatc

SEQ ID NO: 390752 - DNA, 25 bp, Homo sapien
agaacactcgatgtgagcatctgca

SEQ ID NO: 390753 - DNA, 25 bp, Homo sapien
accccaatggtgcccgcatctggaa

SEQ ID NO: 390754 - DNA, 25 bp, Homo sapien
cagcctttccaagaacactcgatgt

SEQ ID NO: 390755 - DNA, 25 bp, Homo sapien
gagacaccattgctccctagttgtg

SEQ ID NO: 390756 - DNA, 25 bp, Homo sapien
tagttgtgccaagccatccatgaag

SEQ ID NO: 390757 - DNA, 25 bp, Homo sapien
tgaagccactaaaacggcagggctc

SEQ ID NO: 390758 - DNA, 25 bp, Homo sapien
tttctacttggcaggaggcacttga

SEQ ID NO: 390759 - DNA, 25 bp, Homo sapien
gctgcgggcagggatgggcgcgcac

SEQ ID NO: 390760 - DNA, 25 bp, Homo sapien
gttgggcaagttcttctccgctgcc

SEQ ID NO: 390761 - DNA, 25 bp, Homo sapien
ggcgcgcccagcctagccggtcccg

SEQ ID NO: 390762 - DNA, 25 bp, Homo sapien
cgaatttcctcggaaagcgccccag

SEQ ID NO: 390763 - DNA, 25 bp, Homo sapien
gcagcgcccgggccagtgcgcccat

SEQ ID NO: 390764 - DNA, 25 bp, Homo sapien
agcagcgcccgggccagtgcgccca

SEQ ID NO: 390765 - DNA, 25 bp, Homo sapien
tgaagggcgcgggggccagctccgg

SEQ ID NO: 390766 - DNA, 25 bp, Homo sapien
cgcgggggccagctccggggcggcg

SEQ ID NO: 390767 - DNA, 25 bp, Homo sapien
cgtgaagggcgcgggggccagctcc

SEQ ID NO: 390768 - DNA, 25 bp, Homo sapien
gctccggggcggcgcgcaggagcca

SEQ ID NO: 390769 - DNA, 25 bp, Homo sapien
gagcgccaagccgtcggcgtggcgc

SEQ ID NO: 390770 - DNA, 25 bp, Homo sapien
actacgcggttcgtggccgcggcca

SEQ ID NO: 390771 - DNA, 25 bp, Homo sapien
ggtgggcgcaactacgcggttcgtg

SEQ ID NO: 390772 - DNA, 25 bp, Homo sapien
agggcgagcgccaagccgtcggcgt

SEQ ID NO: 390773 - DNA, 25 bp, Homo sapien
ccagagtccccctgcaggttgtcta

SEQ ID NO: 390774 - DNA, 25 bp, Homo sapien
cggccagagtccccctgcaggttgt

SEQ ID NO: 390775 - DNA, 25 bp, Homo sapien
gagtccccctgcaggttgtctacca

SEQ ID NO: 390776 - DNA, 25 bp, Homo sapien
agtccccctgcaggttgtctaccat

SEQ ID NO: 390777 - DNA, 25 bp, Homo sapien
tctgcgggggggtcccgatcagcat

SEQ ID NO: 390778 - DNA, 25 bp, Homo sapien
gggggtcccgatcagcatctccagg

SEQ ID NO: 390779 - DNA, 25 bp, Homo sapien
cttctgcgggggggtcccgatcagc

SEQ ID NO: 390780 - DNA, 25 bp, Homo sapien
cgggggggtcccgatcagcatctcc

SEQ ID NO: 390781 - DNA, 25 bp, Homo sapien
cgctaagccgcgtggaggcgtctct

SEQ ID NO: 390782 - DNA, 25 bp, Homo sapien
aacgagcccgaaaagcccgcggcag

SEQ ID NO: 390783 - DNA, 25 bp, Homo sapien
gctttgggggcgacgctaagccgcg

SEQ ID NO: 390784 - DNA, 25 bp, Homo sapien
cgtggaggcgtctctggacagcccc

SEQ ID NO: 390785 - DNA, 25 bp, Homo sapien
gcgcacacccctcagtgcgccccgg

SEQ ID NO: 390786 - DNA, 25 bp, Homo sapien
gtcctccgcgactcaagagcgagcg

SEQ ID NO: 390787 - DNA, 25 bp, Homo sapien
aagttctgaaacactcgcgcacacc

SEQ ID NO: 390788 - DNA, 25 bp, Homo sapien
ctgccgtcctccgcgactcaagagc

SEQ ID NO: 390789 - DNA, 25 bp, Homo sapien
gccacgagcctctttagcaatgaga

SEQ ID NO: 390790 - DNA, 25 bp, Homo sapien
caactccgagaaaggaaagcgggcg

SEQ ID NO: 390791 - DNA, 25 bp, Homo sapien
gtactgcgcctttggaagccggcca

SEQ ID NO: 390792 - DNA, 25 bp, Homo sapien
caagcgagccacttcttaaccgggt

SEQ ID NO: 390793 - DNA, 25 bp, Homo sapien
cacatgttcccacgtgttggctgca

SEQ ID NO: 390794 - DNA, 25 bp, Homo sapien
gggattcattcaaggcctgttccaa

SEQ ID NO: 390795 - DNA, 25 bp, Homo sapien
tacagccaagttaagctccctcagc

SEQ ID NO: 390796 - DNA, 25 bp, Homo sapien
tagtagagagaattccctcgcatca

SEQ ID NO: 390797 - DNA, 25 bp, Homo sapien
cggagttccggagggtccagttgca

SEQ ID NO: 390798 - DNA, 25 bp, Homo sapien
gaacagcacggagttccggagggtc

SEQ ID NO: 390799 - DNA, 25 bp, Homo sapien
tggggtgtacgttcagggttctctg

SEQ ID NO: 390800 - DNA, 25 bp, Homo sapien
ctaacaccttggggtgtacgttcag

SEQ ID NO: 390801 - DNA, 25 bp, Homo sapien
atccagcccttcattctgttgctca

SEQ ID NO: 390802 - DNA, 25 bp, Homo sapien
cagcccttcattctgttgctcattc

SEQ ID NO: 390803 - DNA, 25 bp, Homo sapien
tggatccagcccttcattctgttgc

SEQ ID NO: 390804 - DNA, 25 bp, Homo sapien
ctggatccagcccttcattctgttg

SEQ ID NO: 390805 - DNA, 25 bp, Homo sapien
tgccaacaaggccatttcccaagca

SEQ ID NO: 390806 - DNA, 25 bp, Homo sapien
cacccccgtggcatgaaatcctggg

SEQ ID NO: 390807 - DNA, 25 bp, Homo sapien
tgctgccaacaaggccatttcccaa

SEQ ID NO: 390808 - DNA, 25 bp, Homo sapien
ctgggggctgctttagaaattgttt

SEQ ID NO: 390809 - DNA, 25 bp, Homo sapien
gctggtacctggaagactttctgat

SEQ ID NO: 390810 - DNA, 25 bp, Homo sapien
cagaccatattaaccctggcattgc

SEQ ID NO: 390811 - DNA, 25 bp, Homo sapien
ggcattgctggtacctggaagactt

SEQ ID NO: 390812 - DNA, 25 bp, Homo sapien
aaagcaagccagaccatattaaccc

SEQ ID NO: 390813 - DNA, 25 bp, Homo sapien
gaatgagacccctagaaaaaactgc

SEQ ID NO: 390814 - DNA, 25 bp, Homo sapien
tgagacccctagaaaaaactgcgtg

SEQ ID NO: 390815 - DNA, 25 bp, Homo sapien
cgaggagtttttggaacacgacctg

SEQ ID NO: 390816 - DNA, 25 bp, Homo sapien
tttggaacacgacctgcttgaggtg

SEQ ID NO: 390817 - DNA, 25 bp, Homo sapien
tggaagccaagaactagaagccagg

SEQ ID NO: 390818 - DNA, 25 bp, Homo sapien
gaggtagtatagaacatgtcaggaa

SEQ ID NO: 390819 - DNA, 25 bp, Homo sapien
taggacaggttcaaaaggccctcca

SEQ ID NO: 390820 - DNA, 25 bp, Homo sapien
tccttttgagcagtatggaagccaa

SEQ ID NO: 390821 - DNA, 25 bp, Homo sapien
cacccagctgatatggtcaggttac

SEQ ID NO: 390822 - DNA, 25 bp, Homo sapien
ggaagcctctagtgatatcagacca

SEQ ID NO: 390823 - DNA, 25 bp, Homo sapien
gatatgataaggtcaggtgggcaca

SEQ ID NO: 390824 - DNA, 25 bp, Homo sapien
tgggcacagctaccctaatggacag

SEQ ID NO: 390825 - DNA, 25 bp, Homo sapien
aaaaccaatttcagacaaagatggg

SEQ ID NO: 390826 - DNA, 25 bp, Homo sapien
catgctgggtttgctagtttgggaa

SEQ ID NO: 390827 - DNA, 25 bp, Homo sapien
cccagtatgctctgttcatccaaca

SEQ ID NO: 390828 - DNA, 25 bp, Homo sapien
caggcctccagtggttagcattcaa

SEQ ID NO: 390829 - DNA, 25 bp, Homo sapien
ggctggcagcttgttgagtgtagaa

SEQ ID NO: 390830 - DNA, 25 bp, Homo sapien
ctgtcctctgcaataatgccctctt

SEQ ID NO: 390831 - DNA, 25 bp, Homo sapien
tttcctgcctaggacccatggcatc

SEQ ID NO: 390832 - DNA, 25 bp, Homo sapien
ccagcagactcaagcctgtcctctg

SEQ ID NO: 390833 - DNA, 25 bp, Homo sapien
tagaaagacacatgttgagagacac

SEQ ID NO: 390834 - DNA, 25 bp, Homo sapien
tattgctgtacaggctcctactaga

SEQ ID NO: 390835 - DNA, 25 bp, Homo sapien
tgtgagccatttcactattgctgta

SEQ ID NO: 390836 - DNA, 25 bp, Homo sapien
gcctgattctggaatgtggtggttt

SEQ ID NO: 390837 - DNA, 25 bp, Homo sapien
ctaagtcctgcgttccccagaaggc

SEQ ID NO: 390838 - DNA, 25 bp, Homo sapien
tggctgagagtaaacgataaaccgt

SEQ ID NO: 390839 - DNA, 25 bp, Homo sapien
tgttgcctttgagacccatgctaag

SEQ ID NO: 390840 - DNA, 25 bp, Homo sapien
gataaaccgtacaaaggctgttgcc

SEQ ID NO: 390841 - DNA, 25 bp, Homo sapien
ggccgccgcctttacttgctccgtc

SEQ ID NO: 390842 - DNA, 25 bp, Homo sapien
cgccgcctttacttgctccgtccat

SEQ ID NO: 390843 - DNA, 25 bp, Homo sapien
ctgctggccgccgcctttacttgct

SEQ ID NO: 390844 - DNA, 25 bp, Homo sapien
gctggccgccgcctttacttgctcc

SEQ ID NO: 390845 - DNA, 25 bp, Homo sapien
taattgttctggtgaactgcaagct

SEQ ID NO: 390846 - DNA, 25 bp, Homo sapien
tgtttaataattgttctggtgaact

SEQ ID NO: 390847 - DNA, 25 bp, Homo sapien
cttgatttagcaacttagaatgata

SEQ ID NO: 390848 - DNA, 25 bp, Homo sapien
ttatgtgatatatcttaacctcttc

SEQ ID NO: 390849 - DNA, 25 bp, Homo sapien
catgtctacataacgaagcttccac

SEQ ID NO: 390850 - DNA, 25 bp, Homo sapien
taaatttccagacagctgaggttcc

SEQ ID NO: 390851 - DNA, 25 bp, Homo sapien
tattagatgctcaacagccccaagt

SEQ ID NO: 390852 - DNA, 25 bp, Homo sapien
taagagcttgctcctttacagaggt

SEQ ID NO: 390853 - DNA, 25 bp, Homo sapien
gacatcatctcacgcctggcgtgtc

SEQ ID NO: 390854 - DNA, 25 bp, Homo sapien
gcagcacaatcatcacttgctgtag

SEQ ID NO: 390855 - DNA, 25 bp, Homo sapien
gtgtacttagttacagcaggtccag

SEQ ID NO: 390856 - DNA, 25 bp, Homo sapien
cgtgtcccgaattgagctccagctg

SEQ ID NO: 390857 - DNA, 25 bp, Homo sapien
ttctatacatgtaatgatgtaggct

SEQ ID NO: 390858 - DNA, 25 bp, Homo sapien
ctggcttttgtgaccacggactggt

SEQ ID NO: 390859 - DNA, 25 bp, Homo sapien
tggcatgtgtgccaaaccaagatgc

SEQ ID NO: 390860 - DNA, 25 bp, Homo sapien
caagatgcagaaacttctattcacc

SEQ ID NO: 390861 - DNA, 25 bp, Homo sapien
tcggccaggtttagccctccactgg

SEQ ID NO: 390862 - DNA, 25 bp, Homo sapien
tggtgcttgaaaccaaggctgagct

SEQ ID NO: 390863 - DNA, 25 bp, Homo sapien
catgaagaagcttgcactggagagg

SEQ ID NO: 390864 - DNA, 25 bp, Homo sapien
cactgagccttaaaagagaatggat

SEQ ID NO: 390865 - DNA, 25 bp, Homo sapien
agtgcggggttcctgccacggcaaa

SEQ ID NO: 390866 - DNA, 25 bp, Homo sapien
ttccagtgtcaacgagaatctgtag

SEQ ID NO: 390867 - DNA, 25 bp, Homo sapien
ccacggcaaagttactgcttccagt

SEQ ID NO: 390868 - DNA, 25 bp, Homo sapien
ctctctgtgtcaaagtacgtgtcta

SEQ ID NO: 390869 - DNA, 25 bp, Homo sapien
ggaaccatctgccacttgaatgcaa

SEQ ID NO: 390870 - DNA, 25 bp, Homo sapien
gagatgtgtcccacggtagcctgaa

SEQ ID NO: 390871 - DNA, 25 bp, Homo sapien
caattgcctctgcatagcgaaagga

SEQ ID NO: 390872 - DNA, 25 bp, Homo sapien
cagatcagaaccttgagtggtcaga

SEQ ID NO: 390873 - DNA, 25 bp, Homo sapien
ggatgcgtcacatctgattcagcca

SEQ ID NO: 390874 - DNA, 25 bp, Homo sapien
aagtgggatgcgtcacatctgattc

SEQ ID NO: 390875 - DNA, 25 bp, Homo sapien
ctcaaacgcagaagtgggatgcgtc

SEQ ID NO: 390876 - DNA, 25 bp, Homo sapien
tcaaacgcagaagtgggatgcgtca

SEQ ID NO: 390877 - DNA, 25 bp, Homo sapien
tggccctccggctttgcagggctgc

SEQ ID NO: 390878 - DNA, 25 bp, Homo sapien
ctgtgtgacacgggtaggtgccggc

SEQ ID NO: 390879 - DNA, 25 bp, Homo sapien
taggtgccggcatcccagagggagg

SEQ ID NO: 390880 - DNA, 25 bp, Homo sapien
tgcctggccctccggctttgcaggg

SEQ ID NO: 390881 - DNA, 25 bp, Homo sapien
cactgtgacgtcaaagcccttggag

SEQ ID NO: 390882 - DNA, 25 bp, Homo sapien
gggatggtgacgaggtcttccccaa

SEQ ID NO: 390883 - DNA, 25 bp, Homo sapien
gcccttggagcggtatgtgctagac

SEQ ID NO: 390884 - DNA, 25 bp, Homo sapien
taagctaggccaagtattccattcc

SEQ ID NO: 390885 - DNA, 25 bp, Homo sapien
tctatactccagaagcataaaaggc

SEQ ID NO: 390886 - DNA, 25 bp, Homo sapien
ggctttgacaactgggagacactgg

SEQ ID NO: 390887 - DNA, 25 bp, Homo sapien
tccgtaaacagctgtgaggtgccgg

SEQ ID NO: 390888 - DNA, 25 bp, Homo sapien
ccagatttcagaagccctcgtgtgc

SEQ ID NO: 390889 - DNA, 25 bp, Homo sapien
agaaggtctccagagaacttgatgg

SEQ ID NO: 390890 - DNA, 25 bp, Homo sapien
cacatctgcatggagaaaacgttgg

SEQ ID NO: 390891 - DNA, 25 bp, Homo sapien
tgtcaccagggagtcgaagaaggtc

SEQ ID NO: 390892 - DNA, 25 bp, Homo sapien
gttggtcccagatccagcaacgggc

SEQ ID NO: 390893 - DNA, 25 bp, Homo sapien
cagattaaggctttggcctccaatt

SEQ ID NO: 390894 - DNA, 25 bp, Homo sapien
gggtataccagatgtctcctttata

SEQ ID NO: 390895 - DNA, 25 bp, Homo sapien
tggtagtaccactcttccttaatag

SEQ ID NO: 390896 - DNA, 25 bp, Homo sapien
tatacaaacttggttcaattccacc

SEQ ID NO: 390897 - DNA, 25 bp, Homo sapien
acagcttccaccaccgcatcaaaca

SEQ ID NO: 390898 - DNA, 25 bp, Homo sapien
ccacgatggccttgtctgcgttata

SEQ ID NO: 390899 - DNA, 25 bp, Homo sapien
gcttccaccaccgcatcaaacacct

SEQ ID NO: 390900 - DNA, 25 bp, Homo sapien
cagagatgcgcgggccacagcttcc

SEQ ID NO: 390901 - DNA, 25 bp, Homo sapien
gacccgtgagtgtcccgaggactca

SEQ ID NO: 390902 - DNA, 25 bp, Homo sapien
ggacccgtgagtgtcccgaggactc

SEQ ID NO: 390903 - DNA, 25 bp, Homo sapien
tcagcaactcggggacccgtgagtg

SEQ ID NO: 390904 - DNA, 25 bp, Homo sapien
gcaactcggggacccgtgagtgtcc

SEQ ID NO: 390905 - DNA, 25 bp, Homo sapien
agaacacgcagtgctgctcctcagc

SEQ ID NO: 390906 - DNA, 25 bp, Homo sapien
catggcgcaatagttcagagatgct

SEQ ID NO: 390907 - DNA, 25 bp, Homo sapien
tgaaaattggaaatacatggcgcaa

SEQ ID NO: 390908 - DNA, 25 bp, Homo sapien
ttcagagatgctcagaacacgcagt

SEQ ID NO: 390909 - DNA, 25 bp, Homo sapien
ctgcggtggaatctgccggctggac

SEQ ID NO: 390910 - DNA, 25 bp, Homo sapien
tggaatctgccggctggacatggca

SEQ ID NO: 390911 - DNA, 25 bp, Homo sapien
tgtctattgtagcacatccagggca

SEQ ID NO: 390912 - DNA, 25 bp, Homo sapien
gaaggactgtatctgatgtgtctat

SEQ ID NO: 390913 - DNA, 25 bp, Homo sapien
ggcaggattgtgatacggaatgacc

SEQ ID NO: 390914 - DNA, 25 bp, Homo sapien
gaattcgtccagcacgccagctggg

SEQ ID NO: 390915 - DNA, 25 bp, Homo sapien
aatgacctgctggagttctcgtctc

SEQ ID NO: 390916 - DNA, 25 bp, Homo sapien
tctcgtctctcaggtagatggagat

SEQ ID NO: 390917 - DNA, 25 bp, Homo sapien
ttccatgccagatgagcagaccaga

SEQ ID NO: 390918 - DNA, 25 bp, Homo sapien
attccatgccagatgagcagaccag

SEQ ID NO: 390919 - DNA, 25 bp, Homo sapien
gattccatgccagatgagcagacca

SEQ ID NO: 390920 - DNA, 25 bp, Homo sapien
attgtaatatcattcagtgcagtgc

SEQ ID NO: 390921 - DNA, 25 bp, Homo sapien
acacaggcagggctaaatgctttgc

SEQ ID NO: 390922 - DNA, 25 bp, Homo sapien
ttgtaatatcattcagtgcagtgcc

SEQ ID NO: 390923 - DNA, 25 bp, Homo sapien
tttatagttaaagagacacaggcag

SEQ ID NO: 390924 - DNA, 25 bp, Homo sapien
ggggtgattttggagggagcagaaa

SEQ ID NO: 390925 - DNA, 25 bp, Homo sapien
gggactgtgaggggtgattttggag

SEQ ID NO: 390926 - DNA, 25 bp, Homo sapien
ggtgattttggagggagcagaaaag

SEQ ID NO: 390927 - DNA, 25 bp, Homo sapien
ctgtagggggtttgagggactgtga

SEQ ID NO: 390928 - DNA, 25 bp, Homo sapien
acacacgaatacacagagtcctggg

SEQ ID NO: 390929 - DNA, 25 bp, Homo sapien
ttcctgtgagtaatgattagcctta

SEQ ID NO: 390930 - DNA, 25 bp, Homo sapien
tgaaacaggcagacacacgaataca

SEQ ID NO: 390931 - DNA, 25 bp, Homo sapien
taatgattagccttaaagggcagag

SEQ ID NO: 390932 - DNA, 25 bp, Homo sapien
caatattattgatcagtgacagcac

SEQ ID NO: 390933 - DNA, 25 bp, Homo sapien
gaagatcaaaagcatggtgatcaat

SEQ ID NO: 390934 - DNA, 25 bp, Homo sapien
gacagcacaggtgacccacatgcac

SEQ ID NO: 390935 - DNA, 25 bp, Homo sapien
gtgacagcacaggtgacccacatgc

SEQ ID NO: 390936 - DNA, 25 bp, Homo sapien
aaaattgctgaggtcacacgcatgc

SEQ ID NO: 390937 - DNA, 25 bp, Homo sapien
tcacaaaattgctgaggtcacacgc

SEQ ID NO: 390938 - DNA, 25 bp, Homo sapien
cacaaaattgctgaggtcacacgca

SEQ ID NO: 390939 - DNA, 25 bp, Homo sapien
aattgctgaggtcacacgcatgctc

SEQ ID NO: 390940 - DNA, 25 bp, Homo sapien
ggaaatgccgaatcggtaacattca

SEQ ID NO: 390941 - DNA, 25 bp, Homo sapien
tcttctgggctctgtcgaagatgac

SEQ ID NO: 390942 - DNA, 25 bp, Homo sapien
gtggcaccgatcaccagcgcatttg

SEQ ID NO: 390943 - DNA, 25 bp, Homo sapien
taacattcataattcaggccggccc

SEQ ID NO: 390944 - DNA, 25 bp, Homo sapien
tcatgtgcctcaagttgtacaagct

SEQ ID NO: 390945 - DNA, 25 bp, Homo sapien
cagctcttgggtgctaaatgtctca

SEQ ID NO: 390946 - DNA, 25 bp, Homo sapien
caacctgcagcaagaaaaattcaca

SEQ ID NO: 390947 - DNA, 25 bp, Homo sapien
ggctgccataatccatcatgtgcct

SEQ ID NO: 390948 - DNA, 25 bp, Homo sapien
ttgataatgagtgcctgtggaagat

SEQ ID NO: 390949 - DNA, 25 bp, Homo sapien
caatgtctcgagttacaattttaat

SEQ ID NO: 390950 - DNA, 25 bp, Homo sapien
ctttcatcaatgtctcgagttacaa

SEQ ID NO: 390951 - DNA, 25 bp, Homo sapien
tctggttgataatgagtgcctgtgg

SEQ ID NO: 390952 - DNA, 25 bp, Homo sapien
tacggttgccgataagggatgaaat

SEQ ID NO: 390953 - DNA, 25 bp, Homo sapien
cctgaaatggctgctctggcaatgt

SEQ ID NO: 390954 - DNA, 25 bp, Homo sapien
agcgctcccaggcctatcaggacaa

SEQ ID NO: 390955 - DNA, 25 bp, Homo sapien
ggtaggtccctgaaatggctgctct

SEQ ID NO: 390956 - DNA, 25 bp, Homo sapien
gagaaaggcccggaaatttcagaca

SEQ ID NO: 390957 - DNA, 25 bp, Homo sapien
ctctgttgagaaaggcccggaaatt

SEQ ID NO: 390958 - DNA, 25 bp, Homo sapien
tcctctgttgagaaaggcccggaaa

SEQ ID NO: 390959 - DNA, 25 bp, Homo sapien
catcctctgttgagaaaggcccgga

SEQ ID NO: 390960 - DNA, 25 bp, Homo sapien
gcagcagcaggacgattaagacaag

SEQ ID NO: 390961 - DNA, 25 bp, Homo sapien
ggactcatcattgacgacctcaggg

SEQ ID NO: 390962 - DNA, 25 bp, Homo sapien
cacaaaatgggctcgctcaaagact

SEQ ID NO: 390963 - DNA, 25 bp, Homo sapien
tcatgagcgcataggacacaatcca

SEQ ID NO: 390964 - DNA, 25 bp, Homo sapien
gaatctagaaggcatctgggagcag

SEQ ID NO: 390965 - DNA, 25 bp, Homo sapien
gtgggcacaggagaaagcgccacca

SEQ ID NO: 390966 - DNA, 25 bp, Homo sapien
tagctgagttcatggttgcttgagg

SEQ ID NO: 390967 - DNA, 25 bp, Homo sapien
cagagattgaagacgggtgggcaca

SEQ ID NO: 390968 - DNA, 25 bp, Homo sapien
tcagaagaggcttgtgaggaccatc

SEQ ID NO: 390969 - DNA, 25 bp, Homo sapien
ggtacagcttggttacatccccagg

SEQ ID NO: 390970 - DNA, 25 bp, Homo sapien
tagacactttggcataacgaacccc

SEQ ID NO: 390971 - DNA, 25 bp, Homo sapien
tgtaccactttgacccaggttgagg

SEQ ID NO: 390972 - DNA, 25 bp, Homo sapien
caaaacatgatttattaattttaag

SEQ ID NO: 390973 - DNA, 25 bp, Homo sapien
catgatttattaattttaagcaaga

SEQ ID NO: 390974 - DNA, 25 bp, Homo sapien
ctcatcaaaacatgatttattaatt

SEQ ID NO: 390975 - DNA, 25 bp, Homo sapien
aaacatgatttattaattttaagca

SEQ ID NO: 390976 - DNA, 25 bp, Homo sapien
tatgcttgaggctaaccagttctgc

SEQ ID NO: 390977 - DNA, 25 bp, Homo sapien
tgacaacgggccctgatacaagagc

SEQ ID NO: 390978 - DNA, 25 bp, Homo sapien
tataaggctatgtcaaggaaacggc

SEQ ID NO: 390979 - DNA, 25 bp, Homo sapien
tacaaacgatacttctgcaggaggg

SEQ ID NO: 390980 - DNA, 25 bp, Homo sapien
tctattacccaaagcactgcggagt

SEQ ID NO: 390981 - DNA, 25 bp, Homo sapien
tagtgtccaagaagtacccgaggct

SEQ ID NO: 390982 - DNA, 25 bp, Homo sapien
gagatcggacaccaatcacttgtgg

SEQ ID NO: 390983 - DNA, 25 bp, Homo sapien
tgaaccaatccttgctccgcgtggg

SEQ ID NO: 390984 - DNA, 25 bp, Homo sapien
cgggctcctgccttcgcacggtgga

SEQ ID NO: 390985 - DNA, 25 bp, Homo sapien
tcgggctcctgccttcgcacggtgg

SEQ ID NO: 390986 - DNA, 25 bp, Homo sapien
gctgcctgcaggccggggcaagcca

SEQ ID NO: 390987 - DNA, 25 bp, Homo sapien
cgctgcctgcaggccggggcaagcc

SEQ ID NO: 390988 - DNA, 25 bp, Homo sapien
ccgctgcctgcaggccggggcaagc

SEQ ID NO: 390989 - DNA, 25 bp, Homo sapien
cccctgaagtaggttctggaatcct

SEQ ID NO: 390990 - DNA, 25 bp, Homo sapien
ctccccctgaagtaggttctggaat

SEQ ID NO: 390991 - DNA, 25 bp, Homo sapien
gctgggaatgcagtccctggtcgcc

SEQ ID NO: 390992 - DNA, 25 bp, Homo sapien
atgcagtccctggtcgcccgtgtgg

SEQ ID NO: 390993 - DNA, 25 bp, Homo sapien
cacgtgtcccttatgggttttctgc

SEQ ID NO: 390994 - DNA, 25 bp, Homo sapien
caggaagaagcggaagcagaactca

SEQ ID NO: 390995 - DNA, 25 bp, Homo sapien
atgggttttctgcatcatcatgatg

SEQ ID NO: 390996 - DNA, 25 bp, Homo sapien
catgatgctcgtggccagcatggga

SEQ ID NO: 390997 - DNA, 25 bp, Homo sapien
agggccagctgaccaactacgtgga

SEQ ID NO: 390998 - DNA, 25 bp, Homo sapien
gagccaggggtgatgttatccagaa

SEQ ID NO: 390999 - DNA, 25 bp, Homo sapien
ctacgtggaaagcaagaggctctct

SEQ ID NO: 391000 - DNA, 25 bp, Homo sapien
ggctctctgtgtcccagcatgcacc

SEQ ID NO: 391001 - DNA, 25 bp, Homo sapien
gatccccaaacaggaatagctcctc

SEQ ID NO: 391002 - DNA, 25 bp, Homo sapien
caagttaaaactccgagcccagttg

SEQ ID NO: 391003 - DNA, 25 bp, Homo sapien
cacgggtacaccttcattccaaaca

SEQ ID NO: 391004 - DNA, 25 bp, Homo sapien
tgacccatgatagtcacagtggcct

SEQ ID NO: 391005 - DNA, 25 bp, Homo sapien
gcaaggggcgggcagcggtcgtgtc

SEQ ID NO: 391006 - DNA, 25 bp, Homo sapien
gctcccaggcgaccgcagccagcgg

SEQ ID NO: 391007 - DNA, 25 bp, Homo sapien
gcggcagctcccaggcgaccgcagc

SEQ ID NO: 391008 - DNA, 25 bp, Homo sapien
cgggcagcggtcgtgtcgggcaggg

SEQ ID NO: 391009 - DNA, 25 bp, Homo sapien
tgggttggacaccagcaatcagagc

SEQ ID NO: 391010 - DNA, 25 bp, Homo sapien
caatagaaatttcggctgggctcgt

SEQ ID NO: 391011 - DNA, 25 bp, Homo sapien
tcatggaagtatcccagccgctaga

SEQ ID NO: 391012 - DNA, 25 bp, Homo sapien
cactgggatcgggacatcatcagaa

SEQ ID NO: 391013 - DNA, 25 bp, Homo sapien
tatgtcaaagcagctaatcaagcac

SEQ ID NO: 391014 - DNA, 25 bp, Homo sapien
tccttgaacgtttatgtcaaagcag

SEQ ID NO: 391015 - DNA, 25 bp, Homo sapien
caaacgtccttgaacgtttatgtca

SEQ ID NO: 391016 - DNA, 25 bp, Homo sapien
aaagcagctaatcaagcaccttgtg

SEQ ID NO: 391017 - DNA, 25 bp, Homo sapien
cagctgctgtgaacgacttggtggc

SEQ ID NO: 391018 - DNA, 25 bp, Homo sapien
agcagctgctgtgaacgacttggtg

SEQ ID NO: 391019 - DNA, 25 bp, Homo sapien
ctgctgtgaacgacttggtggcggc

SEQ ID NO: 391020 - DNA, 25 bp, Homo sapien
ctgtgaacgacttggtggcggccct

SEQ ID NO: 391021 - DNA, 25 bp, Homo sapien
aggcctctccccgatgctgcggatg

SEQ ID NO: 391022 - DNA, 25 bp, Homo sapien
gcatctggaatgagctctgcgagca

SEQ ID NO: 391023 - DNA, 25 bp, Homo sapien
aggtaccccgaataccaggcacaca

SEQ ID NO: 391024 - DNA, 25 bp, Homo sapien
acacaaggaggcgaagaccacgaac

SEQ ID NO: 391025 - DNA, 25 bp, Homo sapien
gacatgcgcaggagggctttccaga

SEQ ID NO: 391026 - DNA, 25 bp, Homo sapien
ctgtttcgtgtggacatgcgcagga

SEQ ID NO: 391027 - DNA, 25 bp, Homo sapien
ggctttccagaagggaggtgtttga

SEQ ID NO: 391028 - DNA, 25 bp, Homo sapien
cctccagggagtatgtggctttagt

SEQ ID NO: 391029 - DNA, 25 bp, Homo sapien
ttctagacttgcagcccctggcgct

SEQ ID NO: 391030 - DNA, 25 bp, Homo sapien
ggacttcccctacgggatcggcagc

SEQ ID NO: 391031 - DNA, 25 bp, Homo sapien
ctggcagcccgtcagccatgagcat

SEQ ID NO: 391032 - DNA, 25 bp, Homo sapien
atcggcagcagaacgagcaggtccc

SEQ ID NO: 391033 - DNA, 25 bp, Homo sapien
aggcagcagctgctaaacttaggtg

SEQ ID NO: 391034 - DNA, 25 bp, Homo sapien
cctggcctcaatcccatgacaggtt

SEQ ID NO: 391035 - DNA, 25 bp, Homo sapien
aggcctggcctcaatcccatgacag

SEQ ID NO: 391036 - DNA, 25 bp, Homo sapien
gctgctaaacttaggtgaagggaaa

SEQ ID NO: 391037 - DNA, 25 bp, Homo sapien
tgaagactccacaaacgaggcaaag

SEQ ID NO: 391038 - DNA, 25 bp, Homo sapien
ggccctgatggctcctaaaagataa

SEQ ID NO: 391039 - DNA, 25 bp, Homo sapien
gaagatccccaccatgagggtatga

SEQ ID NO: 391040 - DNA, 25 bp, Homo sapien
gaataaggcagggtctctttgcaac

SEQ ID NO: 391041 - DNA, 25 bp, Homo sapien
caggccctgctgtcagaaacttatg

SEQ ID NO: 391042 - DNA, 25 bp, Homo sapien
gcaagacagctccatggttcgttta

SEQ ID NO: 391043 - DNA, 25 bp, Homo sapien
ggtattcgcctgaaaacacgttgaa

SEQ ID NO: 391044 - DNA, 25 bp, Homo sapien
catgaatgggaatactcaggaatcc

SEQ ID NO: 391045 - DNA, 25 bp, Homo sapien
gagctttttgcccaggacgctatga

SEQ ID NO: 391046 - DNA, 25 bp, Homo sapien
cccaggacgctatgatgtcagatcc

SEQ ID NO: 391047 - DNA, 25 bp, Homo sapien
gatcctggagatatctctcctagca

SEQ ID NO: 391048 - DNA, 25 bp, Homo sapien
gtgaggaactgagctttttgcccag

SEQ ID NO: 391049 - DNA, 25 bp, Homo sapien
gaaactccaagcagcggtcggaaaa

SEQ ID NO: 391050 - DNA, 25 bp, Homo sapien
acctgctgcttggcggagaacacca

SEQ ID NO: 391051 - DNA, 25 bp, Homo sapien
agaaagtatatagccattaacatcc

SEQ ID NO: 391052 - DNA, 25 bp, Homo sapien
aagtatatagccattaacatcccac

SEQ ID NO: 391053 - DNA, 25 bp, Homo sapien
gaataagaaagtatatagccattaa

SEQ ID NO: 391054 - DNA, 25 bp, Homo sapien
tccgctgagtaacctgtaggcatag

SEQ ID NO: 391055 - DNA, 25 bp, Homo sapien
caaagcagattttggcgtacttgct

SEQ ID NO: 391056 - DNA, 25 bp, Homo sapien
tgccacctccgctgagtaacctgta

SEQ ID NO: 391057 - DNA, 25 bp, Homo sapien
acctccgctgagtaacctgtaggca

SEQ ID NO: 391058 - DNA, 25 bp, Homo sapien
tggatgctctcagccttttgcctga

SEQ ID NO: 391059 - DNA, 25 bp, Homo sapien
ctcatttccacttggatgctctcag

SEQ ID NO: 391060 - DNA, 25 bp, Homo sapien
gagaccaacgacatatggttctctc

SEQ ID NO: 391061 - DNA, 25 bp, Homo sapien
tccctggtgaatacagcggagcttt

SEQ ID NO: 391062 - DNA, 25 bp, Homo sapien
tgccatactgctcagggcggtcttg

SEQ ID NO: 391063 - DNA, 25 bp, Homo sapien
tcttataatttagacaaatggctag

SEQ ID NO: 391064 - DNA, 25 bp, Homo sapien
agttttgccatactgctcagggcgg

SEQ ID NO: 391065 - DNA, 25 bp, Homo sapien
tcagtgtctacagactcagtccctc

SEQ ID NO: 391066 - DNA, 25 bp, Homo sapien
tgcattcgccttggtgcagctcccg

SEQ ID NO: 391067 - DNA, 25 bp, Homo sapien
tttccttgaaagtctgcattcgcct

SEQ ID NO: 391068 - DNA, 25 bp, Homo sapien
attcgccttggtgcagctcccgaga

SEQ ID NO: 391069 - DNA, 25 bp, Homo sapien
ttccttgaaagtctgcattcgcctt

SEQ ID NO: 391070 - DNA, 25 bp, Homo sapien
tcaagtaccaagaggcgtgcgactc

SEQ ID NO: 391071 - DNA, 25 bp, Homo sapien
aatgtcagtctcatctgctgtcccc

SEQ ID NO: 391072 - DNA, 25 bp, Homo sapien
gaagtcttcgcctgaccaaatgtca

SEQ ID NO: 391073 - DNA, 25 bp, Homo sapien
ctgaaatggagctaagcattagtca

SEQ ID NO: 391074 - DNA, 25 bp, Homo sapien
catttcccagctgttctcccataag

SEQ ID NO: 391075 - DNA, 25 bp, Homo sapien
atttcccagctgttctcccataagt

SEQ ID NO: 391076 - DNA, 25 bp, Homo sapien
cgcgcaaaagtctcgaaaacccaag

SEQ ID NO: 391077 - DNA, 25 bp, Homo sapien
ttgttagaaccacaaataatctgtg

SEQ ID NO: 391078 - DNA, 25 bp, Homo sapien
cctagactaaatcacgcgcaaaagt

SEQ ID NO: 391079 - DNA, 25 bp, Homo sapien
tgttgttagaaccacaaataatctg

SEQ ID NO: 391080 - DNA, 25 bp, Homo sapien
cctcagccaggcccacccgcctcat

SEQ ID NO: 391081 - DNA, 25 bp, Homo sapien
cctcttcccacagaaacaccagagc

SEQ ID NO: 391082 - DNA, 25 bp, Homo sapien
ccctcagccaggcccacccgcctca

SEQ ID NO: 391083 - DNA, 25 bp, Homo sapien
ccgcctcttcccacagaaacaccag

SEQ ID NO: 391084 - DNA, 25 bp, Homo sapien
ccctcagccaggcccacccgcctca

SEQ ID NO: 391085 - DNA, 25 bp, Homo sapien
cctcagccaggcccacccgcctcat

SEQ ID NO: 391086 - DNA, 25 bp, Homo sapien
cccacagaaacaccagagccccctc

SEQ ID NO: 391087 - DNA, 25 bp, Homo sapien
agaaacaccagagccccctcagcca

SEQ ID NO: 391088 - DNA, 25 bp, Homo sapien
agaaacaccagagccccctcagcca

SEQ ID NO: 391089 - DNA, 25 bp, Homo sapien
aaacaccagagccccctcagccagg

SEQ ID NO: 391090 - DNA, 25 bp, Homo sapien
ccgcctcatcccacagaaacaccag

SEQ ID NO: 391091 - DNA, 25 bp, Homo sapien
ccacagaaacaccagagccccctca

SEQ ID NO: 391092 - DNA, 25 bp, Homo sapien
actagggcgcacttgtggcaccagg

SEQ ID NO: 391093 - DNA, 25 bp, Homo sapien
ttcttccctgtctatctccagcaaa

SEQ ID NO: 391094 - DNA, 25 bp, Homo sapien
gatgtaatgacccagcctgcagaga

SEQ ID NO: 391095 - DNA, 25 bp, Homo sapien
aagttcacagaactagggcgcactt

SEQ ID NO: 391096 - DNA, 25 bp, Homo sapien
caaaacatcgtgttgctgtcacatt

SEQ ID NO: 391097 - DNA, 25 bp, Homo sapien
acatatcaaaacatcgtgttgctgt

SEQ ID NO: 391098 - DNA, 25 bp, Homo sapien
tatcaaaacatcgtgttgctgtcac

SEQ ID NO: 391099 - DNA, 25 bp, Homo sapien
tcaaaacatcgtgttgctgtcacat

SEQ ID NO: 391100 - DNA, 25 bp, Homo sapien
aaatgttctatgaattcaattagag

SEQ ID NO: 391101 - DNA, 25 bp, Homo sapien
ctctagattactcaggagagctgct

SEQ ID NO: 391102 - DNA, 25 bp, Homo sapien
tcttattatatcatgagagctaaaa

SEQ ID NO: 391103 - DNA, 25 bp, Homo sapien
attagagtttaagaggatctacata

SEQ ID NO: 391104 - DNA, 25 bp, Homo sapien
gggtgcaggcgttttctattcttcg

SEQ ID NO: 391105 - DNA, 25 bp, Homo sapien
ggccaacaactgcagtcaagagtca

SEQ ID NO: 391106 - DNA, 25 bp, Homo sapien
tactgttctgcttaggttaactgca

SEQ ID NO: 391107 - DNA, 25 bp, Homo sapien
ttaactgcagagtacaactgtgtcc

SEQ ID NO: 391108 - DNA, 25 bp, Homo sapien
ctctggacgtgtgaacattcactgg

SEQ ID NO: 391109 - DNA, 25 bp, Homo sapien
ttcactggggtaccatagggactat

SEQ ID NO: 391110 - DNA, 25 bp, Homo sapien
aaccctgcagatggtgtgctagctc

SEQ ID NO: 391111 - DNA, 25 bp, Homo sapien
cttgggggtcccagcgctcgctgct

SEQ ID NO: 391112 - DNA, 25 bp, Homo sapien
aataaactttgtcatcggtccagag

SEQ ID NO: 391113 - DNA, 25 bp, Homo sapien
cataggtcaccatgaagagcaggga

SEQ ID NO: 391114 - DNA, 25 bp, Homo sapien
cttgtgcttccgtcgtcataggtca

SEQ ID NO: 391115 - DNA, 25 bp, Homo sapien
cagcactctgaataaactttgtcat

SEQ ID NO: 391116 - DNA, 25 bp, Homo sapien
tcctgatttctttacttccaagtgc

SEQ ID NO: 391117 - DNA, 25 bp, Homo sapien
tgaatttcggaagggagttccaagc

SEQ ID NO: 391118 - DNA, 25 bp, Homo sapien
aagtgcttctatggcattcttggca

SEQ ID NO: 391119 - DNA, 25 bp, Homo sapien
tacccagctagacctgaatttcatg

SEQ ID NO: 391120 - DNA, 25 bp, Homo sapien
ctgcgcacagcctggacatcactgg

SEQ ID NO: 391121 - DNA, 25 bp, Homo sapien
cacagcctggacatcactggttttt

SEQ ID NO: 391122 - DNA, 25 bp, Homo sapien
ttgattgcagaagctgtgcggaggg

SEQ ID NO: 391123 - DNA, 25 bp, Homo sapien
ttgcagaagctgtgcggagggatct

SEQ ID NO: 391124 - DNA, 25 bp, Homo sapien
tggttagataaggtgggacaaggcc

SEQ ID NO: 391125 - DNA, 25 bp, Homo sapien
ccgccgcccttgctagttaaataag

SEQ ID NO: 391126 - DNA, 25 bp, Homo sapien
gcccttgctagttaaataagctggg

SEQ ID NO: 391127 - DNA, 25 bp, Homo sapien
aaataagctggggtggttagataag

SEQ ID NO: 391128 - DNA, 25 bp, Homo sapien
tcagcttcgttctttgggtatgcag

SEQ ID NO: 391129 - DNA, 25 bp, Homo sapien
cagccttctatctggatctctgcag

SEQ ID NO: 391130 - DNA, 25 bp, Homo sapien
ggtatgcagccttctatctggatct

SEQ ID NO: 391131 - DNA, 25 bp, Homo sapien
cgttctttgggtatgcagccttcta

SEQ ID NO: 391132 - DNA, 25 bp, Homo sapien
taagattcttgagcgattccagctg

SEQ ID NO: 391133 - DNA, 25 bp, Homo sapien
gaacacatttactcaggaccctgca

SEQ ID NO: 391134 - DNA, 25 bp, Homo sapien
tgatcataacatagctccacctgga

SEQ ID NO: 391135 - DNA, 25 bp, Homo sapien
tgaatacattcacaggcccacagga

SEQ ID NO: 391136 - DNA, 25 bp, Homo sapien
gcacgtgtggaacatcctggactct

SEQ ID NO: 391137 - DNA, 25 bp, Homo sapien
tagagagtgaggtgttcagttgccc

SEQ ID NO: 391138 - DNA, 25 bp, Homo sapien
ggctcagagaaggaatattaaccca

SEQ ID NO: 391139 - DNA, 25 bp, Homo sapien
tcttagccccgaatcacatgtgtca

SEQ ID NO: 391140 - DNA, 25 bp, Homo sapien
tacagtgtgcagcttggtaaagagg

SEQ ID NO: 391141 - DNA, 25 bp, Homo sapien
gcgccagcgcctctgtgtgctgatg

SEQ ID NO: 391142 - DNA, 25 bp, Homo sapien
ctgactctatggaaagcgccagcgc

SEQ ID NO: 391143 - DNA, 25 bp, Homo sapien
acatcagggagcgttacagtgtgca

SEQ ID NO: 391144 - DNA, 25 bp, Homo sapien
cgctgcacgttcaggatggagaaat

SEQ ID NO: 391145 - DNA, 25 bp, Homo sapien
acttgagcccggaagtttaaggctg

SEQ ID NO: 391146 - DNA, 25 bp, Homo sapien
gcctgggaaacagagcaggaagacc

SEQ ID NO: 391147 - DNA, 25 bp, Homo sapien
tcccaatgcattgggaggccgaggc

SEQ ID NO: 391148 - DNA, 25 bp, Homo sapien
cagtgagctatgatggtaccattgc

SEQ ID NO: 391149 - DNA, 25 bp, Homo sapien
atcctggccagacgcagggactcac

SEQ ID NO: 391150 - DNA, 25 bp, Homo sapien
cctggccagacgcagggactcacac

SEQ ID NO: 391151 - DNA, 25 bp, Homo sapien
tcctggccagacgcagggactcaca

SEQ ID NO: 391152 - DNA, 25 bp, Homo sapien
tgagcactaagtccttgagatacat

SEQ ID NO: 391153 - DNA, 25 bp, Homo sapien
gagatacatatcgagtcaggcagac

SEQ ID NO: 391154 - DNA, 25 bp, Homo sapien
tgaccaagcactggcactgaatgcg

SEQ ID NO: 391155 - DNA, 25 bp, Homo sapien
actgaatgcgaccttatctccccgg

SEQ ID NO: 391156 - DNA, 25 bp, Homo sapien
gcttgcaaccagtccgagagctctg

SEQ ID NO: 391157 - DNA, 25 bp, Homo sapien
cacgggcatagccactattgctggc

SEQ ID NO: 391158 - DNA, 25 bp, Homo sapien
aggatcacgtaagcacccctgggaa

SEQ ID NO: 391159 - DNA, 25 bp, Homo sapien
gaagtctaaggcaagctgcgtctcc

SEQ ID NO: 391160 - DNA, 25 bp, Homo sapien
acactgcatcccagggtgttgagat

SEQ ID NO: 391161 - DNA, 25 bp, Homo sapien
gggagtttccctacatatgcttaaa

SEQ ID NO: 391162 - DNA, 25 bp, Homo sapien
cagaatgcttttgggtctatcatcc

SEQ ID NO: 391163 - DNA, 25 bp, Homo sapien
tggttacccagcttaggcagcactg

SEQ ID NO: 391164 - DNA, 25 bp, Homo sapien
tctttccaggcgcatcactggagag

SEQ ID NO: 391165 - DNA, 25 bp, Homo sapien
ctgtccctgtccacgcttgaggagc

SEQ ID NO: 391166 - DNA, 25 bp, Homo sapien
tgcttagtccatcttccaccagggt

SEQ ID NO: 391167 - DNA, 25 bp, Homo sapien
gcccaggatgtgcttagtccatctt

SEQ ID NO: 391168 - DNA, 25 bp, Homo sapien
tgaggagccggtgcctgtccccgat

SEQ ID NO: 391169 - DNA, 25 bp, Homo sapien
gatttcccagtgatacacgaaggca

SEQ ID NO: 391170 - DNA, 25 bp, Homo sapien
tgaactacggaaccactcagggaag

SEQ ID NO: 391171 - DNA, 25 bp, Homo sapien
tatggtcaatcagagcggcccttag

SEQ ID NO: 391172 - DNA, 25 bp, Homo sapien
tcttgtgtaacaggacagggtgccg

SEQ ID NO: 391173 - DNA, 25 bp, Homo sapien
tctggtgtgtgcctggtgaaccatc

SEQ ID NO: 391174 - DNA, 25 bp, Homo sapien
tcacggagacgacacggaagagccg

SEQ ID NO: 391175 - DNA, 25 bp, Homo sapien
tagggaggattttctgacacgggcc

SEQ ID NO: 391176 - DNA, 25 bp, Homo sapien
gacacgggcctgttgagtaaggaat

SEQ ID NO: 391177 - DNA, 25 bp, Homo sapien
tgagctgattaagtttgagaggaca

SEQ ID NO: 391178 - DNA, 25 bp, Homo sapien
tcttgctaagcgtatcatgagctga

SEQ ID NO: 391179 - DNA, 25 bp, Homo sapien
tcaccctcattttcatgaagggcag

SEQ ID NO: 391180 - DNA, 25 bp, Homo sapien
cattttcatgaagggcaggtcttgc

SEQ ID NO: 391181 - DNA, 25 bp, Homo sapien
ctcagaggggcggatcttccagcag

SEQ ID NO: 391182 - DNA, 25 bp, Homo sapien
aggggcggatcttccagcagagcca

SEQ ID NO: 391183 - DNA, 25 bp, Homo sapien
gtcttgcatcctccccgcgcagcct

SEQ ID NO: 391184 - DNA, 25 bp, Homo sapien
gtctcagcgtttcctaatgagctct

SEQ ID NO: 391185 - DNA, 25 bp, Homo sapien
gggctcctagcgatacaatctcagg

SEQ ID NO: 391186 - DNA, 25 bp, Homo sapien
actttgggggctcctagcgatacaa

SEQ ID NO: 391187 - DNA, 25 bp, Homo sapien
tcctctgctcgtcacagctttcaca

SEQ ID NO: 391188 - DNA, 25 bp, Homo sapien
gatacaatctcaggattcagctcct

SEQ ID NO: 391189 - DNA, 25 bp, Homo sapien
caagactgtttagttgccacggaag

SEQ ID NO: 391190 - DNA, 25 bp, Homo sapien
tcatcgccgtttgctgaaacagagc

SEQ ID NO: 391191 - DNA, 25 bp, Homo sapien
gaagaaaaatgtccacgtgcaggaa

SEQ ID NO: 391192 - DNA, 25 bp, Homo sapien
gaaacagagctcatgggaaactttt

SEQ ID NO: 391193 - DNA, 25 bp, Homo sapien
ctcctaccataaaacacaacccgca

SEQ ID NO: 391194 - DNA, 25 bp, Homo sapien
cttaagatccatagaataagtattc

SEQ ID NO: 391195 - DNA, 25 bp, Homo sapien
tcctaccataaaacacaacccgcat

SEQ ID NO: 391196 - DNA, 25 bp, Homo sapien
taagtattcttatgcccagacacac

SEQ ID NO: 391197 - DNA, 25 bp, Homo sapien
tcatggtcaacaagtcagctaatgg

SEQ ID NO: 391198 - DNA, 25 bp, Homo sapien
gggagccacacaactccaaagggcc

SEQ ID NO: 391199 - DNA, 25 bp, Homo sapien
gcctgcttgaggtttggtgcctagc

SEQ ID NO: 391200 - DNA, 25 bp, Homo sapien
tgagagccgactggattctggatgc

SEQ ID NO: 391201 - DNA, 25 bp, Homo sapien
gcacctccgatcttcctgacaagct

SEQ ID NO: 391202 - DNA, 25 bp, Homo sapien
ctacttggcacctccgatcttcctg

SEQ ID NO: 391203 - DNA, 25 bp, Homo sapien
tttcgagaagaaaattgacttctcc

SEQ ID NO: 391204 - DNA, 25 bp, Homo sapien
catttgtggtggcactgtgccgaat

SEQ ID NO: 391205 - DNA, 25 bp, Homo sapien
gagaaagttgaagtccttggcgagg

SEQ ID NO: 391206 - DNA, 25 bp, Homo sapien
tctcctccggtagggccaaggcttg

SEQ ID NO: 391207 - DNA, 25 bp, Homo sapien
agctctggtccccgatgacggcgat

SEQ ID NO: 391208 - DNA, 25 bp, Homo sapien
cgatgacggcgatggctggcagggc

SEQ ID NO: 391209 - DNA, 25 bp, Homo sapien
gagctctggtccccgatgacggcga

SEQ ID NO: 391210 - DNA, 25 bp, Homo sapien
aggtggcgctgcttgctgcggaggg

SEQ ID NO: 391211 - DNA, 25 bp, Homo sapien
gcttgctgcggagggaaggtggtcc

SEQ ID NO: 391212 - DNA, 25 bp, Homo sapien
tgcggagggaaggtggtccgttgaa

SEQ ID NO: 391213 - DNA, 25 bp, Homo sapien
tggcgctgcttgctgcggagggaag

SEQ ID NO: 391214 - DNA, 25 bp, Homo sapien
catatcatgatcctaaataagaggt

SEQ ID NO: 391215 - DNA, 25 bp, Homo sapien
ggcaaggtccctgcacctgactgac

SEQ ID NO: 391216 - DNA, 25 bp, Homo sapien
tctttaagaaggcttcgcctgtcac

SEQ ID NO: 391217 - DNA, 25 bp, Homo sapien
caaggaaaaggtgtctcatatcatg

SEQ ID NO: 391218 - DNA, 25 bp, Homo sapien
ggctttgcggttgttgcagggggct

SEQ ID NO: 391219 - DNA, 25 bp, Homo sapien
ccttggagaaaccatcagatgcctc

SEQ ID NO: 391220 - DNA, 25 bp, Homo sapien
gagaaaccatcagatgcctcccggc

SEQ ID NO: 391221 - DNA, 25 bp, Homo sapien
ccaccttgctctgggcaaccttgga

SEQ ID NO: 391222 - DNA, 25 bp, Homo sapien
ccctgtaattgtcccggtgggcagc

SEQ ID NO: 391223 - DNA, 25 bp, Homo sapien
gggctccggtacatgtccaggctcc

SEQ ID NO: 391224 - DNA, 25 bp, Homo sapien
gtcagcatgtcaggtgtctgcccca

SEQ ID NO: 391225 - DNA, 25 bp, Homo sapien
gccatggaacccctctcaaggagtg

SEQ ID NO: 391226 - DNA, 25 bp, Homo sapien
aggtgctgctatccttgggaagtgt

SEQ ID NO: 391227 - DNA, 25 bp, Homo sapien
gaagtgttcgctgccggagtaagca

SEQ ID NO: 391228 - DNA, 25 bp, Homo sapien
agtaagcaccctgagctccgatgga

SEQ ID NO: 391229 - DNA, 25 bp, Homo sapien
gagcaagtggctatagccacagtcc

SEQ ID NO: 391230 - DNA, 25 bp, Homo sapien
gaagctctagctcggtgttccggta

SEQ ID NO: 391231 - DNA, 25 bp, Homo sapien
ggtagctgatccttccggcccatgc

SEQ ID NO: 391232 - DNA, 25 bp, Homo sapien
tggccagggtcctgaagctctagct

SEQ ID NO: 391233 - DNA, 25 bp, Homo sapien
gcaccagcggacacctggttacgat

SEQ ID NO: 391234 - DNA, 25 bp, Homo sapien
gaggtgacagcaatgggttcagccc

SEQ ID NO: 391235 - DNA, 25 bp, Homo sapien
agaggagcggctgccagatccgaac

SEQ ID NO: 391236 - DNA, 25 bp, Homo sapien
tgacagcaatgggttcagccccatg

SEQ ID NO: 391237 - DNA, 25 bp, Homo sapien
gatccgaacctcagaatgacgtggg

SEQ ID NO: 391238 - DNA, 25 bp, Homo sapien
gtcctcggcatgggatgactcgatg

SEQ ID NO: 391239 - DNA, 25 bp, Homo sapien
gggatgactcgatgagaggggacct

SEQ ID NO: 391240 - DNA, 25 bp, Homo sapien
ctcggcatgggatgactcgatgaga

SEQ ID NO: 391241 - DNA, 25 bp, Homo sapien
gccaccagagggtcctcggcatggg

SEQ ID NO: 391242 - DNA, 25 bp, Homo sapien
gctggggtgcagaccttttgcaatt

SEQ ID NO: 391243 - DNA, 25 bp, Homo sapien
aacttgctaattgagggtatccagc

SEQ ID NO: 391244 - DNA, 25 bp, Homo sapien
tgcaatttgaagttaggaaacttgc

SEQ ID NO: 391245 - DNA, 25 bp, Homo sapien
gcttctgttttagaggggtgaacac

SEQ ID NO: 391246 - DNA, 25 bp, Homo sapien
atgtcaacgaacattgcaagatgtc

SEQ ID NO: 391247 - DNA, 25 bp, Homo sapien
gatgtcaacgaacattgcaagatgt

SEQ ID NO: 391248 - DNA, 25 bp, Homo sapien
cctgcacatatggtgtgctgttggt

SEQ ID NO: 391249 - DNA, 25 bp, Homo sapien
acagatgtcaacgaacattgcaaga

SEQ ID NO: 391250 - DNA, 25 bp, Homo sapien
atgccccggccattcccggccatga

SEQ ID NO: 391251 - DNA, 25 bp, Homo sapien
ccgatgtctcggggctggttgtcca

SEQ ID NO: 391252 - DNA, 25 bp, Homo sapien
atgccgggaaggtcaatgatggtca

SEQ ID NO: 391253 - DNA, 25 bp, Homo sapien
gaacctcaggggaggtgatctccag

SEQ ID NO: 391254 - DNA, 25 bp, Homo sapien
tggtaactgagcacactgtacaacg

SEQ ID NO: 391255 - DNA, 25 bp, Homo sapien
agtcccatagggcacgtggctgtaa

SEQ ID NO: 391256 - DNA, 25 bp, Homo sapien
tggtcaccaggtcaaggcttggtaa

SEQ ID NO: 391257 - DNA, 25 bp, Homo sapien
cactgttagggattaaccagtccca

SEQ ID NO: 391258 - DNA, 25 bp, Homo sapien
cccgttagctaagtgttgaatacaa

SEQ ID NO: 391259 - DNA, 25 bp, Homo sapien
gacagtgagacaggtaaggagacac

SEQ ID NO: 391260 - DNA, 25 bp, Homo sapien
taagctgcttgtgccaacccgttag

SEQ ID NO: 391261 - DNA, 25 bp, Homo sapien
gaaaggcatgtaaaggccaaaagct

SEQ ID NO: 391262 - DNA, 25 bp, Homo sapien
agagtgaaaatgctccccggaacag

SEQ ID NO: 391263 - DNA, 25 bp, Homo sapien
taggcattgtaagctgtccagcaga

SEQ ID NO: 391264 - DNA, 25 bp, Homo sapien
cagcagactctgtggcctttaccca

SEQ ID NO: 391265 - DNA, 25 bp, Homo sapien
gaaggatgactctgccatggtggcc

SEQ ID NO: 391266 - DNA, 25 bp, Homo sapien
gctctgggctgggaatcaccgtatt

SEQ ID NO: 391267 - DNA, 25 bp, Homo sapien
gcttgtgtgcttattccctttgcta

SEQ ID NO: 391268 - DNA, 25 bp, Homo sapien
tgaacaagttttaacgttgatcgtc

SEQ ID NO: 391269 - DNA, 25 bp, Homo sapien
cattgaataatagatgctatacttc

SEQ ID NO: 391270 - DNA, 25 bp, Homo sapien
ttgatcgtcctttagttgaaaactc

SEQ ID NO: 391271 - DNA, 25 bp, Homo sapien
ttctgtgtcccattagcccgagctg

SEQ ID NO: 391272 - DNA, 25 bp, Homo sapien
tgatggcgcaaaggcaacattgtcc

SEQ ID NO: 391273 - DNA, 25 bp, Homo sapien
tatagttgtgctcagacagtgcccc

SEQ ID NO: 391274 - DNA, 25 bp, Homo sapien
gaaaaagctggcaccttgggacata

SEQ ID NO: 391275 - DNA, 25 bp, Homo sapien
tggcaatgtccacgttacagggaac

SEQ ID NO: 391276 - DNA, 25 bp, Homo sapien
caagttgatcgtctgctgcctctgg

SEQ ID NO: 391277 - DNA, 25 bp, Homo sapien
ttccgggtccacctcatgggccatg

SEQ ID NO: 391278 - DNA, 25 bp, Homo sapien
tcagcgcctccgtggtggcaatgtc

SEQ ID NO: 391279 - DNA, 25 bp, Homo sapien
tcagtgcccctgtccattagatctg

SEQ ID NO: 391280 - DNA, 25 bp, Homo sapien
caagctcagcctgtttgtgatctcc

SEQ ID NO: 391281 - DNA, 25 bp, Homo sapien
attcatgacgcttttctcagtgccc

SEQ ID NO: 391282 - DNA, 25 bp, Homo sapien
ggtacgtgaggttccgcaccacatt

SEQ ID NO: 391283 - DNA, 25 bp, Homo sapien
ttggatatgcatgatgagttcagtg

SEQ ID NO: 391284 - DNA, 25 bp, Homo sapien
agtctttctgccagtcggggaaccg

SEQ ID NO: 391285 - DNA, 25 bp, Homo sapien
ggatatgcatgatgagttcagtggt

SEQ ID NO: 391286 - DNA, 25 bp, Homo sapien
taagtctttctgccagtcggggaac

SEQ ID NO: 391287 - DNA, 25 bp, Homo sapien
ccttctggtggctctcccttatttg

SEQ ID NO: 391288 - DNA, 25 bp, Homo sapien
tcctcggtcgccttctggtggctct

SEQ ID NO: 391289 - DNA, 25 bp, Homo sapien
tatttgtccttctaacaacgggagc

SEQ ID NO: 391290 - DNA, 25 bp, Homo sapien
tgtccttctaacaacgggagcgatt

SEQ ID NO: 391291 - DNA, 25 bp, Homo sapien
cagtgtcacgtggagtcctgcggaa

SEQ ID NO: 391292 - DNA, 25 bp, Homo sapien
acgtggagtcctgcggaaatcctca

SEQ ID NO: 391293 - DNA, 25 bp, Homo sapien
tgtcacgtggagtcctgcggaaatc

SEQ ID NO: 391294 - DNA, 25 bp, Homo sapien
aaggatgcagtgtcacgtggagtcc

SEQ ID NO: 391295 - DNA, 25 bp, Homo sapien
ttgtataaacgggtctcattctccc

SEQ ID NO: 391296 - DNA, 25 bp, Homo sapien
gcaagtatgcctacccagtttttaa

SEQ ID NO: 391297 - DNA, 25 bp, Homo sapien
aacttttcgatgtcctgattaaaca

SEQ ID NO: 391298 - DNA, 25 bp, Homo sapien
tttgggtattagttgcaagtatgcc

SEQ ID NO: 391299 - DNA, 25 bp, Homo sapien
aattgccctgtgttgagttgctgag

SEQ ID NO: 391300 - DNA, 25 bp, Homo sapien
tgctgaggtcgatgccccatatttc

SEQ ID NO: 391301 - DNA, 25 bp, Homo sapien
ggacatagcctctggtctgggtaaa

SEQ ID NO: 391302 - DNA, 25 bp, Homo sapien
tgctgattaccaagggttccacggt

SEQ ID NO: 391303 - DNA, 25 bp, Homo sapien
ctttccacggaggtaaacagtgctg

SEQ ID NO: 391304 - DNA, 25 bp, Homo sapien
gcagacgtcgtaaagctagcaacag

SEQ ID NO: 391305 - DNA, 25 bp, Homo sapien
cactgtacgcagaggcaatgttgca

SEQ ID NO: 391306 - DNA, 25 bp, Homo sapien
tacagccacagtttaccgttggagg

SEQ ID NO: 391307 - DNA, 25 bp, Homo sapien
acagacctccatggtgaattctgct

SEQ ID NO: 391308 - DNA, 25 bp, Homo sapien
aacagacctccatggtgaattctgc

SEQ ID NO: 391309 - DNA, 25 bp, Homo sapien
cagacctccatggtgaattctgcta

SEQ ID NO: 391310 - DNA, 25 bp, Homo sapien
agacctccatggtgaattctgctaa

SEQ ID NO: 391311 - DNA, 25 bp, Homo sapien
tttctggagcatgctaagggcgggc

SEQ ID NO: 391312 - DNA, 25 bp, Homo sapien
gaagctccttgcctcgatactgctt

SEQ ID NO: 391313 - DNA, 25 bp, Homo sapien
tgtagttgacaaatcccagaagctc

SEQ ID NO: 391314 - DNA, 25 bp, Homo sapien
tggatgtactgatgcacgatgatct

SEQ ID NO: 391315 - DNA, 25 bp, Homo sapien
tatgagagtgatggtttgggagtcc

SEQ ID NO: 391316 - DNA, 25 bp, Homo sapien
ttgggagtcctgcttgaaagtcctc

SEQ ID NO: 391317 - DNA, 25 bp, Homo sapien
tatggaaggtatgagagtgatggtt

SEQ ID NO: 391318 - DNA, 25 bp, Homo sapien
aaggtatgagagtgatggtttggga

SEQ ID NO: 391319 - DNA, 25 bp, Homo sapien
gtctgcaggctggtttggtaactcc

SEQ ID NO: 391320 - DNA, 25 bp, Homo sapien
tgtctgcaggctggtttggtaactc

SEQ ID NO: 391321 - DNA, 25 bp, Homo sapien
gatgatacactgacccattccagga

SEQ ID NO: 391322 - DNA, 25 bp, Homo sapien
gctgagggctcccaccataatgagg

SEQ ID NO: 391323 - DNA, 25 bp, Homo sapien
ggagactgagttccctagacctgca

SEQ ID NO: 391324 - DNA, 25 bp, Homo sapien
tagacctgcaaaccgcgataggaga

SEQ ID NO: 391325 - DNA, 25 bp, Homo sapien
ttttggccacgttaatgaaagcttg

SEQ ID NO: 391326 - DNA, 25 bp, Homo sapien
cgtaaggtcgtgcagaacagatggc

SEQ ID NO: 391327 - DNA, 25 bp, Homo sapien
tggagccccacatcctgcgtaaggt

SEQ ID NO: 391328 - DNA, 25 bp, Homo sapien
tccaggtgactagcaagtgaactct

SEQ ID NO: 391329 - DNA, 25 bp, Homo sapien
caaggttaaacagccagtggtccag

SEQ ID NO: 391330 - DNA, 25 bp, Homo sapien
aattttatctacagcccaagtgcca

SEQ ID NO: 391331 - DNA, 25 bp, Homo sapien
tcagagccttacacgagggtgacct

SEQ ID NO: 391332 - DNA, 25 bp, Homo sapien
ggcccgggaaggacaatggacatct

SEQ ID NO: 391333 - DNA, 25 bp, Homo sapien
cgtacatcctcgacctgggcaaaat

SEQ ID NO: 391334 - DNA, 25 bp, Homo sapien
tcggactttcttcagaacaacactg

SEQ ID NO: 391335 - DNA, 25 bp, Homo sapien
tggatgcctatttcagtaaaggagg

SEQ ID NO: 391336 - DNA, 25 bp, Homo sapien
ggaaaccgaagactcattactggga

SEQ ID NO: 391337 - DNA, 25 bp, Homo sapien
catattctgtgaaggcgtccccaga

SEQ ID NO: 391338 - DNA, 25 bp, Homo sapien
taaatgggatctggttggcgagacg

SEQ ID NO: 391339 - DNA, 25 bp, Homo sapien
ggagtcaccattctctcggagcata

SEQ ID NO: 391340 - DNA, 25 bp, Homo sapien
tcctgtagtatctgcatcatggctt

SEQ ID NO: 391341 - DNA, 25 bp, Homo sapien
tgaagcagccaggaatagcgatttt

SEQ ID NO: 391342 - DNA, 25 bp, Homo sapien
gtcgcgcctgagtgagccggtaaat

SEQ ID NO: 391343 - DNA, 25 bp, Homo sapien
aattgacagagtgcgtgtcgcgcct

SEQ ID NO: 391344 - DNA, 25 bp, Homo sapien
tgagccggtaaattctctccttaag

SEQ ID NO: 391345 - DNA, 25 bp, Homo sapien
gattcttctcttggtagcggtctca

SEQ ID NO: 391346 - DNA, 25 bp, Homo sapien
tgtaactgtgtgctacgggacccaa

SEQ ID NO: 391347 - DNA, 25 bp, Homo sapien
catgctctgatgctgagggagtaca

SEQ ID NO: 391348 - DNA, 25 bp, Homo sapien
cccttagaatgaatgagtacgcaca

SEQ ID NO: 391349 - DNA, 25 bp, Homo sapien
tagtgacagaagagtttggccccaa

SEQ ID NO: 391350 - DNA, 25 bp, Homo sapien
aggtatctccatcacttacacagca

SEQ ID NO: 391351 - DNA, 25 bp, Homo sapien
cactggatctgaaagggaccggcta

SEQ ID NO: 391352 - DNA, 25 bp, Homo sapien
ggaagctcatcataatcagggaaac

SEQ ID NO: 391353 - DNA, 25 bp, Homo sapien
caatgacagtgaaccatgggaagca

SEQ ID NO: 391354 - DNA, 25 bp, Homo sapien
aattacccataatgatgatcactgg

SEQ ID NO: 391355 - DNA, 25 bp, Homo sapien
ttaaggaatctatatgttcatcatt

SEQ ID NO: 391356 - DNA, 25 bp, Homo sapien
atcatttgaaacatacaggaaaaca

SEQ ID NO: 391357 - DNA, 25 bp, Homo sapien
ggaatctatatgttcatcatttgaa

SEQ ID NO: 391358 - DNA, 25 bp, Homo sapien
ctggtgagctttggagagccaagct

SEQ ID NO: 391359 - DNA, 25 bp, Homo sapien
gtgagctttggagagccaagctggg

SEQ ID NO: 391360 - DNA, 25 bp, Homo sapien
tactggtgagctttggagagccaag

SEQ ID NO: 391361 - DNA, 25 bp, Homo sapien
atactggtgagctttggagagccaa

SEQ ID NO: 391362 - DNA, 25 bp, Homo sapien
cgcttttggtcctcaaggtcaaggc

SEQ ID NO: 391363 - DNA, 25 bp, Homo sapien
cgtctgacgtggtcgcttttggtcc

SEQ ID NO: 391364 - DNA, 25 bp, Homo sapien
tcctcaaggtcaaggccagactttt

SEQ ID NO: 391365 - DNA, 25 bp, Homo sapien
actgctggcgtctgacgtggtcgct

SEQ ID NO: 391366 - DNA, 25 bp, Homo sapien
cccccagcctggacccggttctgct

SEQ ID NO: 391367 - DNA, 25 bp, Homo sapien
tcccccagcctggacccggttctgc

SEQ ID NO: 391368 - DNA, 25 bp, Homo sapien
ctcccccagcctggacccggttctg

SEQ ID NO: 391369 - DNA, 25 bp, Homo sapien
cggacaattcagtttcggtttcatt

SEQ ID NO: 391370 - DNA, 25 bp, Homo sapien
catttctgctcgctggtttccagaa

SEQ ID NO: 391371 - DNA, 25 bp, Homo sapien
tgcactgggcttacttctccctgcg

SEQ ID NO: 391372 - DNA, 25 bp, Homo sapien
tggtcctgcaaacacgggcctcagg

SEQ ID NO: 391373 - DNA, 25 bp, Homo sapien
tggcctctgctaccaggctgaggac

SEQ ID NO: 391374 - DNA, 25 bp, Homo sapien
gctgaggaccgggtcaaccggcaac

SEQ ID NO: 391375 - DNA, 25 bp, Homo sapien
tccgggcacagcgtggttcggtgct

SEQ ID NO: 391376 - DNA, 25 bp, Homo sapien
ggcctggcctctgctaccaggctga

SEQ ID NO: 391377 - DNA, 25 bp, Homo sapien
ctcttgcagttgagacaagaggaag

SEQ ID NO: 391378 - DNA, 25 bp, Homo sapien
gctccaggcccaggtggacttaggt

SEQ ID NO: 391379 - DNA, 25 bp, Homo sapien
tccaggcccaggtggacttaggtgc

SEQ ID NO: 391380 - DNA, 25 bp, Homo sapien
tgctccaggcccaggtggacttagg

SEQ ID NO: 391381 - DNA, 25 bp, Homo sapien
cctgctccaggcccaggtggactta

SEQ ID NO: 391382 - DNA, 25 bp, Homo sapien
aagaatggcagcgttgatggctcag

SEQ ID NO: 391383 - DNA, 25 bp, Homo sapien
cccaggctcgatgtttcccttagca

SEQ ID NO: 391384 - DNA, 25 bp, Homo sapien
ggcagcgttgatggctcagttccca

SEQ ID NO: 391385 - DNA, 25 bp, Homo sapien
tggctcagttcccaggctcgatgtt

SEQ ID NO: 391386 - DNA, 25 bp, Homo sapien
agttgctgtggcatgcacccggtgt

SEQ ID NO: 391387 - DNA, 25 bp, Homo sapien
cgttttaccagctcctatttaagat

SEQ ID NO: 391388 - DNA, 25 bp, Homo sapien
agttgctctgggtgtacctctgaca

SEQ ID NO: 391389 - DNA, 25 bp, Homo sapien
gtaggtatcagcctcgttttaccag

SEQ ID NO: 391390 - DNA, 25 bp, Homo sapien
ctaccagataagtttcacactctta

SEQ ID NO: 391391 - DNA, 25 bp, Homo sapien
gaactcaggacccaggtcacactca

SEQ ID NO: 391392 - DNA, 25 bp, Homo sapien
tatactctgataatggccctctctt

SEQ ID NO: 391393 - DNA, 25 bp, Homo sapien
cccaggtcacactcagaggctttgt

SEQ ID NO: 391394 - DNA, 25 bp, Homo sapien
agagctatggttccaatccaggtga

SEQ ID NO: 391395 - DNA, 25 bp, Homo sapien
caatccaggtgatcattctccaaac

SEQ ID NO: 391396 - DNA, 25 bp, Homo sapien
taaggagctgggttccatattggta

SEQ ID NO: 391397 - DNA, 25 bp, Homo sapien
tcccagaggagtaggattatcacac

SEQ ID NO: 391398 - DNA, 25 bp, Homo sapien
ggtaacatcagctagagggactcgt

SEQ ID NO: 391399 - DNA, 25 bp, Homo sapien
aaacaaggaccgctcggtaacatca

SEQ ID NO: 391400 - DNA, 25 bp, Homo sapien
ggttcgtcctaatgagaacactcac

SEQ ID NO: 391401 - DNA, 25 bp, Homo sapien
gctcgccattgttcccgcatgtcta

SEQ ID NO: 391402 - DNA, 25 bp, Homo sapien
caggaacagtgccttgggaacgcag

SEQ ID NO: 391403 - DNA, 25 bp, Homo sapien
ctgtttccaacagcgggaggcttcc

SEQ ID NO: 391404 - DNA, 25 bp, Homo sapien
gcaggctgggctgatgctttctgaa

SEQ ID NO: 391405 - DNA, 25 bp, Homo sapien
tgataaccagatagaggcacaacct

SEQ ID NO: 391406 - DNA, 25 bp, Homo sapien
ggcatgagcctgctgttggcccgaa

SEQ ID NO: 391407 - DNA, 25 bp, Homo sapien
tcaaacgacatataagctagctgct

SEQ ID NO: 391408 - DNA, 25 bp, Homo sapien
tttcccatctcaaacgacatataag

SEQ ID NO: 391409 - DNA, 25 bp, Homo sapien
ctgttggcccgaattaaaagttctg

SEQ ID NO: 391410 - DNA, 25 bp, Homo sapien
tgcagcacttgcctcgcgggaactc

SEQ ID NO: 391411 - DNA, 25 bp, Homo sapien
gctccgggcgcagaaacgaaaccta

SEQ ID NO: 391412 - DNA, 25 bp, Homo sapien
cagaaacgaaacctagctcctggcc

SEQ ID NO: 391413 - DNA, 25 bp, Homo sapien
gaactcgcgggagacgcaggttctc

SEQ ID NO: 391414 - DNA, 25 bp, Homo sapien
gcggcctccgctctcgcttcgcctc

SEQ ID NO: 391415 - DNA, 25 bp, Homo sapien
gagtgcggcctccgctctcgcttcg

SEQ ID NO: 391416 - DNA, 25 bp, Homo sapien
gtgcggcctccgctctcgcttcgcc

SEQ ID NO: 391417 - DNA, 25 bp, Homo sapien
tgcggcctccgctctcgcttcgcct

SEQ ID NO: 391418 - DNA, 25 bp, Homo sapien
tagcagccgagaaggtgcccccgtc

SEQ ID NO: 391419 - DNA, 25 bp, Homo sapien
gctcctagcgcggttactgggcgct

SEQ ID NO: 391420 - DNA, 25 bp, Homo sapien
ggagcgctagtctccgccacgaacg

SEQ ID NO: 391421 - DNA, 25 bp, Homo sapien
gtcgtgcccgtgctccggagcgcta

SEQ ID NO: 391422 - DNA, 25 bp, Homo sapien
cccatcagcgcccttgctatgatta

SEQ ID NO: 391423 - DNA, 25 bp, Homo sapien
gagcccgcccatcagcgcccttgct

SEQ ID NO: 391424 - DNA, 25 bp, Homo sapien
gaaccagaatcaggcgtgctccgag

SEQ ID NO: 391425 - DNA, 25 bp, Homo sapien
atcagcgcccttgctatgattatga

SEQ ID NO: 391426 - DNA, 25 bp, Homo sapien
tttctgatgcgtcatcaggagcctg

SEQ ID NO: 391427 - DNA, 25 bp, Homo sapien
ggatgtttctgatgcgtcatcagga

SEQ ID NO: 391428 - DNA, 25 bp, Homo sapien
gcgggttagggggatgtttctgatg

SEQ ID NO: 391429 - DNA, 25 bp, Homo sapien
tgtttctgatgcgtcatcaggagcc

SEQ ID NO: 391430 - DNA, 25 bp, Homo sapien
tgggtttgctttcgcgcgttcccag

SEQ ID NO: 391431 - DNA, 25 bp, Homo sapien
cccgcttactagagtccctcggaga

SEQ ID NO: 391432 - DNA, 25 bp, Homo sapien
cgcgcagccgtggatctgaaacttt

SEQ ID NO: 391433 - DNA, 25 bp, Homo sapien
tagaagtcgacggaaagcagtggtc

SEQ ID NO: 391434 - DNA, 25 bp, Homo sapien
gatgacacagccattttaggagccc

SEQ ID NO: 391435 - DNA, 25 bp, Homo sapien
tagaggcgcggttagcatcactgga

SEQ ID NO: 391436 - DNA, 25 bp, Homo sapien
aactacgatggaccccgagggtgcg

SEQ ID NO: 391437 - DNA, 25 bp, Homo sapien
cctttattcagcaggatcggcgaga

SEQ ID NO: 391438 - DNA, 25 bp, Homo sapien
ggcgtgtccaccgtgacactgggat

SEQ ID NO: 391439 - DNA, 25 bp, Homo sapien
cgtgtccaccgtgacactgggattc

SEQ ID NO: 391440 - DNA, 25 bp, Homo sapien
gggcgcgagggaggcgtgtccaccg

SEQ ID NO: 391441 - DNA, 25 bp, Homo sapien
agggaggcgtgtccaccgtgacact

SEQ ID NO: 391442 - DNA, 25 bp, Homo sapien
tggctggatggcggcgttcttcact

SEQ ID NO: 391443 - DNA, 25 bp, Homo sapien
ccagaaccgatctcctcgcagtgtg

SEQ ID NO: 391444 - DNA, 25 bp, Homo sapien
ctgtagcctccgacccagaaccgat

SEQ ID NO: 391445 - DNA, 25 bp, Homo sapien
cgatctcctcgcagtgtggccacag

SEQ ID NO: 391446 - DNA, 25 bp, Homo sapien
cacctgtggaggatcgcaaaagcga

SEQ ID NO: 391447 - DNA, 25 bp, Homo sapien
tgagaccaggacttgtaccacatga

SEQ ID NO: 391448 - DNA, 25 bp, Homo sapien
gagaatcactcattgcctgctgggt

SEQ ID NO: 391449 - DNA, 25 bp, Homo sapien
gaccccagtgaataaggacccagtg

SEQ ID NO: 391450 - DNA, 25 bp, Homo sapien
tctaatatacgttccttcaaataaa

SEQ ID NO: 391451 - DNA, 25 bp, Homo sapien
ctctaatatacgttccttcaaataa

SEQ ID NO: 391452 - DNA, 25 bp, Homo sapien
ttaaatggtatcacagagctgttct

SEQ ID NO: 391453 - DNA, 25 bp, Homo sapien
agttaaatggtatcacagagctgtt

SEQ ID NO: 391454 - DNA, 25 bp, Homo sapien
tccccagagcgtagaagagtgcctg

SEQ ID NO: 391455 - DNA, 25 bp, Homo sapien
gactctgactagttgttcatggtga

SEQ ID NO: 391456 - DNA, 25 bp, Homo sapien
taagcagctgggtgcattcaaccat

SEQ ID NO: 391457 - DNA, 25 bp, Homo sapien
ctccctgctcaaggcgcttcaagaa

SEQ ID NO: 391458 - DNA, 25 bp, Homo sapien
tccattcagtaatagagggtgggat

SEQ ID NO: 391459 - DNA, 25 bp, Homo sapien
cattcagtaatagagggtgggatgc

SEQ ID NO: 391460 - DNA, 25 bp, Homo sapien
gcagcagctggatcagcttttgcga

SEQ ID NO: 391461 - DNA, 25 bp, Homo sapien
cgatgtccacttcggaaacaaccat

SEQ ID NO: 391462 - DNA, 25 bp, Homo sapien
cgatgacggcgatggctggcagggc

SEQ ID NO: 391463 - DNA, 25 bp, Homo sapien
ggagctcttgcccgagctctggtcc

SEQ ID NO: 391464 - DNA, 25 bp, Homo sapien
tgggaagggcaactcctgacagtgc

SEQ ID NO: 391465 - DNA, 25 bp, Homo sapien
ctgacagtgcctccaacacggagct

SEQ ID NO: 391466 - DNA, 25 bp, Homo sapien
ctgggaagggcaactcctgacagtg

SEQ ID NO: 391467 - DNA, 25 bp, Homo sapien
gcaccagcgggcatctggtcacgat

SEQ ID NO: 391468 - DNA, 25 bp, Homo sapien
tctacctctgaagcatccgaaatct

SEQ ID NO: 391469 - DNA, 25 bp, Homo sapien
tatcttcgttcacaagtttcttcag

SEQ ID NO: 391470 - DNA, 25 bp, Homo sapien
agtcctggtaactgaccttgcctct

SEQ ID NO: 391471 - DNA, 25 bp, Homo sapien
gacatctcgggagctgatctccagg

SEQ ID NO: 391472 - DNA, 25 bp, Homo sapien
gatctccagggtgattagctcatga

SEQ ID NO: 391473 - DNA, 25 bp, Homo sapien
tattagagtcagatccgggacatct

SEQ ID NO: 391474 - DNA, 25 bp, Homo sapien
tatgccaggaaggtctattagagtc

SEQ ID NO: 391475 - DNA, 25 bp, Homo sapien
cctctggatgtacttcttgatgagt

SEQ ID NO: 391476 - DNA, 25 bp, Homo sapien
cctgggccatgctgagagcctctgt

SEQ ID NO: 391477 - DNA, 25 bp, Homo sapien
tctgtggtggcgatgtccacattac

SEQ ID NO: 391478 - DNA, 25 bp, Homo sapien
gctgattgtctcctgcctctggatg

SEQ ID NO: 391479 - DNA, 25 bp, Homo sapien
gacaatcatgtaacccttcttcagg

SEQ ID NO: 391480 - DNA, 25 bp, Homo sapien
tgctggccccggcacttgacaatca

SEQ ID NO: 391481 - DNA, 25 bp, Homo sapien
tcttcaggtggaacacgaggttccg

SEQ ID NO: 391482 - DNA, 25 bp, Homo sapien
ttgtccaccagatcaggcttcgtca

SEQ ID NO: 391483 - DNA, 25 bp, Homo sapien
ctgggcttggactgatccatgatga

SEQ ID NO: 391484 - DNA, 25 bp, Homo sapien
catgatgaaacccaggcaagcgcac

SEQ ID NO: 391485 - DNA, 25 bp, Homo sapien
tgatccatgatgaaacccaggcaag

SEQ ID NO: 391486 - DNA, 25 bp, Homo sapien
tccatgatgaaacccaggcaagcgc

SEQ ID NO: 391487 - DNA, 25 bp, Homo sapien
gcagttggtacccaacaaatactca

SEQ ID NO: 391488 - DNA, 25 bp, Homo sapien
tatgactgaattttagcaatctagg

SEQ ID NO: 391489 - DNA, 25 bp, Homo sapien
gttgcttacaactggatggaatgtc

SEQ ID NO: 391490 - DNA, 25 bp, Homo sapien
tggtgtctgactatagacttggtca

SEQ ID NO: 391491 - DNA, 25 bp, Homo sapien
tgatgtagccagaacacgcatgtct

SEQ ID NO: 391492 - DNA, 25 bp, Homo sapien
cgatttccaccttgatgtagccaga

SEQ ID NO: 391493 - DNA, 25 bp, Homo sapien
cagaacacgcatgtctgcctttttg

SEQ ID NO: 391494 - DNA, 25 bp, Homo sapien
gaagagaacacaggaccgatttcca

SEQ ID NO: 391495 - DNA, 25 bp, Homo sapien
gccaggcagggaaccgtggcctttc

SEQ ID NO: 391496 - DNA, 25 bp, Homo sapien
ttctgccaggcagggaaccgtggcc

SEQ ID NO: 391497 - DNA, 25 bp, Homo sapien
caggcagggaaccgtggcctttcct

SEQ ID NO: 391498 - DNA, 25 bp, Homo sapien
ctgccaggcagggaaccgtggcctt

SEQ ID NO: 391499 - DNA, 25 bp, Homo sapien
tgtggtcccctgaaaaggaatatcc

SEQ ID NO: 391500 - DNA, 25 bp, Homo sapien
ggcccagtagatatagtctatcagc

SEQ ID NO: 391501 - DNA, 25 bp, Homo sapien
tgtgtacagtgatgtttaagaagcc

SEQ ID NO: 391502 - DNA, 25 bp, Homo sapien
taagaagccagcaaggttcagctct

SEQ ID NO: 391503 - DNA, 25 bp, Homo sapien
cattttcgtcttccggtatgtcgac

SEQ ID NO: 391504 - DNA, 25 bp, Homo sapien
gattttctaacaggggcagagattt

SEQ ID NO: 391505 - DNA, 25 bp, Homo sapien
tgtcgacaccatacttttgtagctc

SEQ ID NO: 391506 - DNA, 25 bp, Homo sapien
gttattctctggtgagtctccttga

SEQ ID NO: 391507 - DNA, 25 bp, Homo sapien
cagctccatgcagctggcaacactc

SEQ ID NO: 391508 - DNA, 25 bp, Homo sapien
gctccatgcagctggcaacactcac

SEQ ID NO: 391509 - DNA, 25 bp, Homo sapien
ctccagctccatgcagctggcaaca

SEQ ID NO: 391510 - DNA, 25 bp, Homo sapien
tccagctccatgcagctggcaacac

SEQ ID NO: 391511 - DNA, 25 bp, Homo sapien
ggagtgaagaaggaagtgcataagg

SEQ ID NO: 391512 - DNA, 25 bp, Homo sapien
cagatgtctttggatcagccttggg

SEQ ID NO: 391513 - DNA, 25 bp, Homo sapien
gtgaagaaggaagtgcataaggccc

SEQ ID NO: 391514 - DNA, 25 bp, Homo sapien
cctttgagtgctacgggccagatgt

SEQ ID NO: 391515 - DNA, 25 bp, Homo sapien
gcagtgatgtcctgattaaaggcat

SEQ ID NO: 391516 - DNA, 25 bp, Homo sapien
ggtaaacagccgaatgtcttcctcc

SEQ ID NO: 391517 - DNA, 25 bp, Homo sapien
catttgtggaactcgtgtcggagtc

SEQ ID NO: 391518 - DNA, 25 bp, Homo sapien
tccttgcatgagagcagtgatgtcc

SEQ ID NO: 391519 - DNA, 25 bp, Homo sapien
gttaaaaatatatggttcaggccag

SEQ ID NO: 391520 - DNA, 25 bp, Homo sapien
gggtgagtgaattttagtatattca

SEQ ID NO: 391521 - DNA, 25 bp, Homo sapien
aaatatatggttcaggccaggcaca

SEQ ID NO: 391522 - DNA, 25 bp, Homo sapien
aaaaaaagtgtatgggtgagtgaat

SEQ ID NO: 391523 - DNA, 25 bp, Homo sapien
cttcttaaaaacgtactcgagtatg

SEQ ID NO: 391524 - DNA, 25 bp, Homo sapien
cgagtatgaagttttgtgaatccaa

SEQ ID NO: 391525 - DNA, 25 bp, Homo sapien
gaaatgagcatgaacactttctgga

SEQ ID NO: 391526 - DNA, 25 bp, Homo sapien
actgcatgcccattagaaatgagca

SEQ ID NO: 391527 - DNA, 25 bp, Homo sapien
atttctggatttttctactcaaaat

SEQ ID NO: 391528 - DNA, 25 bp, Homo sapien
tgattttcaaatttctggatttttc

SEQ ID NO: 391529 - DNA, 25 bp, Homo sapien
ctgattttcaaatttctggattttt

SEQ ID NO: 391530 - DNA, 25 bp, Homo sapien
ttcaaatttctggatttttctactc

SEQ ID NO: 391531 - DNA, 25 bp, Homo sapien
atatccacagccggctcttccagtg

SEQ ID NO: 391532 - DNA, 25 bp, Homo sapien
gatttgctgtttcacgattgtctca

SEQ ID NO: 391533 - DNA, 25 bp, Homo sapien
gtttcacgattgtctcaaatgtcct

SEQ ID NO: 391534 - DNA, 25 bp, Homo sapien
ccgtcacggtgtgtagcatatccac

SEQ ID NO: 391535 - DNA, 25 bp, Homo sapien
aacagccgattttgagtgtgaagcc

SEQ ID NO: 391536 - DNA, 25 bp, Homo sapien
cctgaggaatgggtcgcaagaacct

SEQ ID NO: 391537 - DNA, 25 bp, Homo sapien
tactggaaatacacctctgaatgag

SEQ ID NO: 391538 - DNA, 25 bp, Homo sapien
tctccgcggtgaggttccaagagct

SEQ ID NO: 391539 - DNA, 25 bp, Homo sapien
cctaaatagctgcaaagaatgtaat

SEQ ID NO: 391540 - DNA, 25 bp, Homo sapien
gcaaatgacccctggcatacattta

SEQ ID NO: 391541 - DNA, 25 bp, Homo sapien
aatttgctggaagaatcttaaaagc

SEQ ID NO: 391542 - DNA, 25 bp, Homo sapien
aatattggtaggatcatttgttctc

SEQ ID NO: 391543 - DNA, 25 bp, Homo sapien
tctgtggaggttaaaaaactcttca

SEQ ID NO: 391544 - DNA, 25 bp, Homo sapien
ggcaggtgcatcctaaacatcttac

SEQ ID NO: 391545 - DNA, 25 bp, Homo sapien
catatccatcagataatccacaggg

SEQ ID NO: 391546 - DNA, 25 bp, Homo sapien
tggctaagtctggtctcttggccca

SEQ ID NO: 391547 - DNA, 25 bp, Homo sapien
tagagaaactggttgccaaaacctg

SEQ ID NO: 391548 - DNA, 25 bp, Homo sapien
tgcaatgcacccctgtatacctggt

SEQ ID NO: 391549 - DNA, 25 bp, Homo sapien
tggtcctggcagtagacaatctgtt

SEQ ID NO: 391550 - DNA, 25 bp, Homo sapien
tctggaagtggaggcggatcagctt

SEQ ID NO: 391551 - DNA, 25 bp, Homo sapien
tcttgttctgctctaatgtcttcaa

SEQ ID NO: 391552 - DNA, 25 bp, Homo sapien
gaagagtctgttgccgagctggact

SEQ ID NO: 391553 - DNA, 25 bp, Homo sapien
ggaagagtctgttgccgagctggac

SEQ ID NO: 391554 - DNA, 25 bp, Homo sapien
aagagtctgttgccgagctggactg

SEQ ID NO: 391555 - DNA, 25 bp, Homo sapien
ctggaaagccccaaaatcccaggat

SEQ ID NO: 391556 - DNA, 25 bp, Homo sapien
gccatcaggtgctgaaagatctcct

SEQ ID NO: 391557 - DNA, 25 bp, Homo sapien
tgataggccatcaggtgctgaaaga

SEQ ID NO: 391558 - DNA, 25 bp, Homo sapien
ctggtgataggccatcaggtgctga

SEQ ID NO: 391559 - DNA, 25 bp, Homo sapien
tcaggtgctgaaagatctcctccat

SEQ ID NO: 391560 - DNA, 25 bp, Homo sapien
caaccaaagcatgtgtctacgcgat

SEQ ID NO: 391561 - DNA, 25 bp, Homo sapien
tacgcgatagcttccatttagtctg

SEQ ID NO: 391562 - DNA, 25 bp, Homo sapien
caagacagattgcagaccctaaagg

SEQ ID NO: 391563 - DNA, 25 bp, Homo sapien
tgaatcgtgcagtatcaaccaaagc

SEQ ID NO: 391564 - DNA, 25 bp, Homo sapien
tgtggctggagatgcgcttgctggc

SEQ ID NO: 391565 - DNA, 25 bp, Homo sapien
ggtgtcgctccgctccttcaggagc

SEQ ID NO: 391566 - DNA, 25 bp, Homo sapien
caggaacttccgcttgtcgctggtg

SEQ ID NO: 391567 - DNA, 25 bp, Homo sapien
gccgtacgtctggagcatgaagaac

SEQ ID NO: 391568 - DNA, 25 bp, Homo sapien
ttcccagtacgaagacagcatcctt

SEQ ID NO: 391569 - DNA, 25 bp, Homo sapien
tgctaaatcaccacggctaacggat

SEQ ID NO: 391570 - DNA, 25 bp, Homo sapien
tcaagtcgtcagtccagtggctacc

SEQ ID NO: 391571 - DNA, 25 bp, Homo sapien
taacggataagcagagacggactat

SEQ ID NO: 391572 - DNA, 25 bp, Homo sapien
catggaagggccgagctgtctgatg

SEQ ID NO: 391573 - DNA, 25 bp, Homo sapien
tgcaacactttgacacctctgactc

SEQ ID NO: 391574 - DNA, 25 bp, Homo sapien
aggaacatccttgcgggcaccttgg

SEQ ID NO: 391575 - DNA, 25 bp, Homo sapien
gcaaaatagaatcctgtgcaacact

SEQ ID NO: 391576 - DNA, 25 bp, Homo sapien
tctggatgactagttaggacaggcc

SEQ ID NO: 391577 - DNA, 25 bp, Homo sapien
gaggggcagttccattgcttgcctg

SEQ ID NO: 391578 - DNA, 25 bp, Homo sapien
gcaggccacggaagccggagagcag

SEQ ID NO: 391579 - DNA, 25 bp, Homo sapien
gagcagggtgtgatgccagcgctgc

SEQ ID NO: 391580 - DNA, 25 bp, Homo sapien
agcgctgcccgtcatggctgggaat

SEQ ID NO: 391581 - DNA, 25 bp, Homo sapien
ggctcaatggccccattacagtttt

SEQ ID NO: 391582 - DNA, 25 bp, Homo sapien
gggatagtccctgttagagttgaag

SEQ ID NO: 391583 - DNA, 25 bp, Homo sapien
tgtgaatcagccttacattcctgcc

SEQ ID NO: 391584 - DNA, 25 bp, Homo sapien
tactcggcatactccctgtggaggg

SEQ ID NO: 391585 - DNA, 25 bp, Homo sapien
catctcttatctgagagcacctcag

SEQ ID NO: 391586 - DNA, 25 bp, Homo sapien
agtctctaggctgcatacagcacaa

SEQ ID NO: 391587 - DNA, 25 bp, Homo sapien
tctaggctgcatacagcacaaggac

SEQ ID NO: 391588 - DNA, 25 bp, Homo sapien
aacagcacccaagtctctacttgaa

SEQ ID NO: 391589 - DNA, 25 bp, Homo sapien
tcgcaaggtatagcttccttcctgg

SEQ ID NO: 391590 - DNA, 25 bp, Homo sapien
cagggagagagtttgtgcacagaaa

SEQ ID NO: 391591 - DNA, 25 bp, Homo sapien
tccacctctgtgacttcgcaaggta

SEQ ID NO: 391592 - DNA, 25 bp, Homo sapien
tcatccaacacaaggcaagttgctt

SEQ ID NO: 391593 - DNA, 25 bp, Homo sapien
ttggcactgtaaggtgcttgctccc

SEQ ID NO: 391594 - DNA, 25 bp, Homo sapien
tcctaaaaggtgttgtaatggtgaa

SEQ ID NO: 391595 - DNA, 25 bp, Homo sapien
cagggaccttggaaacagttggcac

SEQ ID NO: 391596 - DNA, 25 bp, Homo sapien
ttattgccccttcttatttatgtga

SEQ ID NO: 391597 - DNA, 25 bp, Homo sapien
ccccattgagatcttcctgctgagt

SEQ ID NO: 391598 - DNA, 25 bp, Homo sapien
caattttggatgagcatggagctgt

SEQ ID NO: 391599 - DNA, 25 bp, Homo sapien
ggccaattttggatgagcatggagc

SEQ ID NO: 391600 - DNA, 25 bp, Homo sapien
gctgccccattgagatcttcctgct

SEQ ID NO: 391601 - DNA, 25 bp, Homo sapien
tgaataaccacatgtgccctggcgc

SEQ ID NO: 391602 - DNA, 25 bp, Homo sapien
cagggctatccctaccgaccttagg

SEQ ID NO: 391603 - DNA, 25 bp, Homo sapien
cctattattgtagggcctgggctcc

SEQ ID NO: 391604 - DNA, 25 bp, Homo sapien
tctgtcgggcttctgtgaataacca

SEQ ID NO: 391605 - DNA, 25 bp, Homo sapien
tcagagctggccgagaattctagcc

SEQ ID NO: 391606 - DNA, 25 bp, Homo sapien
aggttaagatagcacgtggaatggc

SEQ ID NO: 391607 - DNA, 25 bp, Homo sapien
tgcttcccagaaaaaggtttgcact

SEQ ID NO: 391608 - DNA, 25 bp, Homo sapien
gactggtttcctgttaagccctcgc

SEQ ID NO: 391609 - DNA, 25 bp, Homo sapien
gccattgatttctccccaacagcag

SEQ ID NO: 391610 - DNA, 25 bp, Homo sapien
cagatggtgagtgaatgacgataca

SEQ ID NO: 391611 - DNA, 25 bp, Homo sapien
taaagaatacatagcccattgggca

SEQ ID NO: 391612 - DNA, 25 bp, Homo sapien
gagattatgagtacaggagcctggc

SEQ ID NO: 391613 - DNA, 25 bp, Homo sapien
tgccgctgaaagacaactgcacctg

SEQ ID NO: 391614 - DNA, 25 bp, Homo sapien
tgggtggaattagtaggcaccaaac

SEQ ID NO: 391615 - DNA, 25 bp, Homo sapien
acagaaataagtgagttgccgctga

SEQ ID NO: 391616 - DNA, 25 bp, Homo sapien
tgcacctgccctatgtgctggagag

SEQ ID NO: 391617 - DNA, 25 bp, Homo sapien
tgcactccccatgctcttccaaaca

SEQ ID NO: 391618 - DNA, 25 bp, Homo sapien
tgctgcactccccatgctcttccaa

SEQ ID NO: 391619 - DNA, 25 bp, Homo sapien
ctgctgcactccccatgctcttcca

SEQ ID NO: 391620 - DNA, 25 bp, Homo sapien
agcagctggtgacccatcctagaca

SEQ ID NO: 391621 - DNA, 25 bp, Homo sapien
gggattccccgtggagttgacagca

SEQ ID NO: 391622 - DNA, 25 bp, Homo sapien
tagacacaggggattccccgtggag

SEQ ID NO: 391623 - DNA, 25 bp, Homo sapien
ctggtgacccatcctagacacaggg

SEQ ID NO: 391624 - DNA, 25 bp, Homo sapien
tgtgtctccccatcattgtgaatgg

SEQ ID NO: 391625 - DNA, 25 bp, Homo sapien
atcattgtgaatggcctgtgttcgg

SEQ ID NO: 391626 - DNA, 25 bp, Homo sapien
cttattgcaatgatcctgtgtctcc

SEQ ID NO: 391627 - DNA, 25 bp, Homo sapien
ttcacgggggaagttcttattgcaa

SEQ ID NO: 391628 - DNA, 25 bp, Homo sapien
cttccacgtgcatctcacacacggg

SEQ ID NO: 391629 - DNA, 25 bp, Homo sapien
cacaggtgctttcgccttccacgtg

SEQ ID NO: 391630 - DNA, 25 bp, Homo sapien
ggtgctttcgccttccacgtgcatc

SEQ ID NO: 391631 - DNA, 25 bp, Homo sapien
cgctgagcacaggtgctttcgcctt

SEQ ID NO: 391632 - DNA, 25 bp, Homo sapien
agccttggacatcgggcactgtgtc

SEQ ID NO: 391633 - DNA, 25 bp, Homo sapien
cagccttggacatcgggcactgtgt

SEQ ID NO: 391634 - DNA, 25 bp, Homo sapien
ccttggacatcgggcactgtgtcca

SEQ ID NO: 391635 - DNA, 25 bp, Homo sapien
tcagccttggacatcgggcactgtg

SEQ ID NO: 391636 - DNA, 25 bp, Homo sapien
gcagacagaaaaccgagtgaggaat

SEQ ID NO: 391637 - DNA, 25 bp, Homo sapien
gatcgctagcaaggtggcagacaga

SEQ ID NO: 391638 - DNA, 25 bp, Homo sapien
tctcttctcgtcgtgtccacagcaa

SEQ ID NO: 391639 - DNA, 25 bp, Homo sapien
cccagtgggctgatcgctagcaagg

SEQ ID NO: 391640 - DNA, 25 bp, Homo sapien
gtctctactgtaatgatccctgtcc

SEQ ID NO: 391641 - DNA, 25 bp, Homo sapien
tactgtaatgatccctgtcccccat

SEQ ID NO: 391642 - DNA, 25 bp, Homo sapien
tgtctctactgtaatgatccctgtc

SEQ ID NO: 391643 - DNA, 25 bp, Homo sapien
tgcaacaggtcgtccttccccattg

SEQ ID NO: 391644 - DNA, 25 bp, Homo sapien
cccattgcaataggtcctccttctc

SEQ ID NO: 391645 - DNA, 25 bp, Homo sapien
gtaataatcccccttcgcatttgca

SEQ ID NO: 391646 - DNA, 25 bp, Homo sapien
tcccttgtccctattgtaataatcc

SEQ ID NO: 391647 - DNA, 25 bp, Homo sapien
cagtccacgcataatatgtggtggc

SEQ ID NO: 391648 - DNA, 25 bp, Homo sapien
cgcataatatgtggtggcagagccc

SEQ ID NO: 391649 - DNA, 25 bp, Homo sapien
cagaccagtccacgcataatatgtg

SEQ ID NO: 391650 - DNA, 25 bp, Homo sapien
accagaccagtccacgcataatatg

SEQ ID NO: 391651 - DNA, 25 bp, Homo sapien
cggtcatgagtgcatgtcggtgcat

SEQ ID NO: 391652 - DNA, 25 bp, Homo sapien
ttgatgtgagcggtcatgagtgcat

SEQ ID NO: 391653 - DNA, 25 bp, Homo sapien
atgtgagcggtcatgagtgcatgtc

SEQ ID NO: 391654 - DNA, 25 bp, Homo sapien
cttccggttgatgtgagcggtcatg

SEQ ID NO: 391655 - DNA, 25 bp, Homo sapien
tccacagcagactgcatgacctcct

SEQ ID NO: 391656 - DNA, 25 bp, Homo sapien
ctccttcttaggcagatgtggcagg

SEQ ID NO: 391657 - DNA, 25 bp, Homo sapien
tgtgtttctggatgtccacagcaga

SEQ ID NO: 391658 - DNA, 25 bp, Homo sapien
tgcatgacctccttcttaggcagat

SEQ ID NO: 391659 - DNA, 25 bp, Homo sapien
gcagtaagacttcccggcagagggc

SEQ ID NO: 391660 - DNA, 25 bp, Homo sapien
tgctggaggcagacacacattcctg

SEQ ID NO: 391661 - DNA, 25 bp, Homo sapien
agcccctgcagctaaagttgctgga

SEQ ID NO: 391662 - DNA, 25 bp, Homo sapien
gcccggttgcctgggcttgttccca

SEQ ID NO: 391663 - DNA, 25 bp, Homo sapien
tatcaagctgaagtgcccgtgtctc

SEQ ID NO: 391664 - DNA, 25 bp, Homo sapien
ggaaatgcatgaaattgcccggagc

SEQ ID NO: 391665 - DNA, 25 bp, Homo sapien
cagggattcaataaggcacgtgtgc

SEQ ID NO: 391666 - DNA, 25 bp, Homo sapien
gagtatctaaccctgtgcctggtca

SEQ ID NO: 391667 - DNA, 25 bp, Homo sapien
cactcacggcgaatagggctagggt

SEQ ID NO: 391668 - DNA, 25 bp, Homo sapien
cactgcaaggttacaggcccgatgg

SEQ ID NO: 391669 - DNA, 25 bp, Homo sapien
aaactctacccagggccatgatggc

SEQ ID NO: 391670 - DNA, 25 bp, Homo sapien
caatgacgttggatcaggtcctcac

SEQ ID NO: 391671 - DNA, 25 bp, Homo sapien
gctgccagaatcacaggagactctg

SEQ ID NO: 391672 - DNA, 25 bp, Homo sapien
gactctgtcccggagggctgggaag

SEQ ID NO: 391673 - DNA, 25 bp, Homo sapien
ggcaactgaacagcccattggccat

SEQ ID NO: 391674 - DNA, 25 bp, Homo sapien
agctggcaactgaacagcccattgg

SEQ ID NO: 391675 - DNA, 25 bp, Homo sapien
gaaaacacacactgggtagccatga

SEQ ID NO: 391676 - DNA, 25 bp, Homo sapien
atcaaacaagccctggtcaccctga

SEQ ID NO: 391677 - DNA, 25 bp, Homo sapien
ctctgctttcactggatcaacactg

SEQ ID NO: 391678 - DNA, 25 bp, Homo sapien
aatgaatcaatgaaggctgtgtagc

SEQ ID NO: 391679 - DNA, 25 bp, Homo sapien
tcagaaatgagcttcgtgggtgagc

SEQ ID NO: 391680 - DNA, 25 bp, Homo sapien
gccacgagggattttccgcagtcct

SEQ ID NO: 391681 - DNA, 25 bp, Homo sapien
cttcgtgggtgagctcacgctggca

SEQ ID NO: 391682 - DNA, 25 bp, Homo sapien
ctgagtcagatcagaggccaggaag

SEQ ID NO: 391683 - DNA, 25 bp, Homo sapien
gggacacgggtctgcgctttgcttc

SEQ ID NO: 391684 - DNA, 25 bp, Homo sapien
agctaggagacacttttggtcccag

SEQ ID NO: 391685 - DNA, 25 bp, Homo sapien
cacttttggtcccaggagggacagg

SEQ ID NO: 391686 - DNA, 25 bp, Homo sapien
agctgcctccggacacgggacacgg

SEQ ID NO: 391687 - DNA, 25 bp, Homo sapien
attctggtgccccaatgcaggtttc

SEQ ID NO: 391688 - DNA, 25 bp, Homo sapien
tcttgtggagttatgttgagctccc

SEQ ID NO: 391689 - DNA, 25 bp, Homo sapien
gtgccccaatgcaggtttcatcttg

SEQ ID NO: 391690 - DNA, 25 bp, Homo sapien
ggagttatgttgagctcccactcac

SEQ ID NO: 391691 - DNA, 25 bp, Homo sapien
gggcctctcggacacagcgatgctt

SEQ ID NO: 391692 - DNA, 25 bp, Homo sapien
ggagggcatgtccatactctttccc

SEQ ID NO: 391693 - DNA, 25 bp, Homo sapien
gaaataagccattgccaggagcagc

SEQ ID NO: 391694 - DNA, 25 bp, Homo sapien
acagcgatgcttcgctggacccgtg

SEQ ID NO: 391695 - DNA, 25 bp, Homo sapien
caggccctcatttgctaaacctata

SEQ ID NO: 391696 - DNA, 25 bp, Homo sapien
tgctaaacctataagggtagaagga

SEQ ID NO: 391697 - DNA, 25 bp, Homo sapien
ccaccaagcacccactaccggtgcc

SEQ ID NO: 391698 - DNA, 25 bp, Homo sapien
gtttaattcacaggccctcatttgc

SEQ ID NO: 391699 - DNA, 25 bp, Homo sapien
gataagaaccgtgatgctgccggca

SEQ ID NO: 391700 - DNA, 25 bp, Homo sapien
agcctctcagaaggacccacaggcc

SEQ ID NO: 391701 - DNA, 25 bp, Homo sapien
gagaaaagataagaaccgtgatgct

SEQ ID NO: 391702 - DNA, 25 bp, Homo sapien
gccaggtcctggatcagagagaaaa

SEQ ID NO: 391703 - DNA, 25 bp, Homo sapien
cagttgctcgggtcatctggaccag

SEQ ID NO: 391704 - DNA, 25 bp, Homo sapien
ttccctcctgtaacgcttgcactag

SEQ ID NO: 391705 - DNA, 25 bp, Homo sapien
tgctggaagacggtctctgtccacc

SEQ ID NO: 391706 - DNA, 25 bp, Homo sapien
tgaggcccgtgacccggagctctgc

SEQ ID NO: 391707 - DNA, 25 bp, Homo sapien
ggctttggggtgaatccgcaggccc

SEQ ID NO: 391708 - DNA, 25 bp, Homo sapien
ttctgtaaggtttctggcgcacagg

SEQ ID NO: 391709 - DNA, 25 bp, Homo sapien
cgggagctggttctgtaaggtttct

SEQ ID NO: 391710 - DNA, 25 bp, Homo sapien
gtttctggcgcacagggctccgcac

SEQ ID NO: 391711 - DNA, 25 bp, Homo sapien
tcagcctcttgatcccgtctgttcg

SEQ ID NO: 391712 - DNA, 25 bp, Homo sapien
tccatggcttccgcatgggctggct

SEQ ID NO: 391713 - DNA, 25 bp, Homo sapien
tgcccggtgccccaccgctcctgct

SEQ ID NO: 391714 - DNA, 25 bp, Homo sapien
gatcccgtctgttcgctgcccggtg

SEQ ID NO: 391715 - DNA, 25 bp, Homo sapien
gtgactcagagatggccttgacaaa

SEQ ID NO: 391716 - DNA, 25 bp, Homo sapien
gatccaagaactgctgacatcctgg

SEQ ID NO: 391717 - DNA, 25 bp, Homo sapien
atcctggctctgacaacgtgaacct

SEQ ID NO: 391718 - DNA, 25 bp, Homo sapien
tggctctgacaacgtgaacctcaga

SEQ ID NO: 391719 - DNA, 25 bp, Homo sapien
cttagtaacccgaggatactcgtgg

SEQ ID NO: 391720 - DNA, 25 bp, Homo sapien
cccttcaggagacggagtgtatgga

SEQ ID NO: 391721 - DNA, 25 bp, Homo sapien
gaattcggtgcccacgaaacagcct

SEQ ID NO: 391722 - DNA, 25 bp, Homo sapien
cctgtgcatctgagaagagcccgct

SEQ ID NO: 391723 - DNA, 25 bp, Homo sapien
accccggagggccaccctgctcagg

SEQ ID NO: 391724 - DNA, 25 bp, Homo sapien
ttcctggcataagcgcgtgacagcg

SEQ ID NO: 391725 - DNA, 25 bp, Homo sapien
ggcctgccatgggtccttagccctg

SEQ ID NO: 391726 - DNA, 25 bp, Homo sapien
gctgttcctggcataagcgcgtgac

SEQ ID NO: 391727 - DNA, 25 bp, Homo sapien
cagtgactgtgctgatgatgtctgg

SEQ ID NO: 391728 - DNA, 25 bp, Homo sapien
ggtccaggtgcagaagggctttccc

SEQ ID NO: 391729 - DNA, 25 bp, Homo sapien
tccaggtgccccagagtctggtgct

SEQ ID NO: 391730 - DNA, 25 bp, Homo sapien
ctttcccggatgagggaacagcagg

SEQ ID NO: 391731 - DNA, 25 bp, Homo sapien
catttctacattgtgatcggggtac

SEQ ID NO: 391732 - DNA, 25 bp, Homo sapien
gaggggctcggagtctggtgagggc

SEQ ID NO: 391733 - DNA, 25 bp, Homo sapien
aggcactgaccctgctccgaggggc

SEQ ID NO: 391734 - DNA, 25 bp, Homo sapien
aggtggccggagattgtgtctactt

SEQ ID NO: 391735 - DNA, 25 bp, Homo sapien
ttaaaacactcgcaagtgttggatg

SEQ ID NO: 391736 - DNA, 25 bp, Homo sapien
aacactcgcaagtgttggatgcctt

SEQ ID NO: 391737 - DNA, 25 bp, Homo sapien
taaaacactcgcaagtgttggatgc

SEQ ID NO: 391738 - DNA, 25 bp, Homo sapien
aaaacactcgcaagtgttggatgcc

SEQ ID NO: 391739 - DNA, 25 bp, Homo sapien
gtggccatacacttcagatccttca

SEQ ID NO: 391740 - DNA, 25 bp, Homo sapien
tgagtcatgtgggtcatgccacgtg

SEQ ID NO: 391741 - DNA, 25 bp, Homo sapien
ttcggctttgcagcagaactccact

SEQ ID NO: 391742 - DNA, 25 bp, Homo sapien
atgccacgtgccagaaccatcttcg

SEQ ID NO: 391743 - DNA, 25 bp, Homo sapien
tcctgatgttgagtcatgtgggtca

SEQ ID NO: 391744 - DNA, 25 bp, Homo sapien
ccatgcagggcgacccagtgatgag

SEQ ID NO: 391745 - DNA, 25 bp, Homo sapien
gcccgtgcaggatgacccggtgatt

SEQ ID NO: 391746 - DNA, 25 bp, Homo sapien
cgtgcaggatgacccggtgattaga

SEQ ID NO: 391747 - DNA, 25 bp, Homo sapien
cccatgcagggcgacccagtgatga

SEQ ID NO: 391748 - DNA, 25 bp, Homo sapien
attgtggagtgatggaaaacctggt

SEQ ID NO: 391749 - DNA, 25 bp, Homo sapien
gtgattgtggagtgatggaaaacct

SEQ ID NO: 391750 - DNA, 25 bp, Homo sapien
gaagagctggcagggtcctttgctt

SEQ ID NO: 391751 - DNA, 25 bp, Homo sapien
ttgaagagctggcagggtcctttgc

SEQ ID NO: 391752 - DNA, 25 bp, Homo sapien
aaagtgcaagtcttctttgagggac

SEQ ID NO: 391753 - DNA, 25 bp, Homo sapien
gagaggaaggcgatggttttacgga

SEQ ID NO: 391754 - DNA, 25 bp, Homo sapien
tcttctttgagggacttaacagctg

SEQ ID NO: 391755 - DNA, 25 bp, Homo sapien
gatggttttacggaaagtgcaagtc

SEQ ID NO: 391756 - DNA, 25 bp, Homo sapien
ttttacactcacacacagcttgcaa

SEQ ID NO: 391757 - DNA, 25 bp, Homo sapien
cacagcttgcaaagcagcattgtga

SEQ ID NO: 391758 - DNA, 25 bp, Homo sapien
gaagtttcaacgcttttacactcac

SEQ ID NO: 391759 - DNA, 25 bp, Homo sapien
gcagcattgtgatagttcactttta

SEQ ID NO: 391760 - DNA, 25 bp, Homo sapien
cacgcccacaaatgcgtttccaatt

SEQ ID NO: 391761 - DNA, 25 bp, Homo sapien
atacggcaagcccttgcaaactggt

SEQ ID NO: 391762 - DNA, 25 bp, Homo sapien
gcgtttccaattacaccatctatgg

SEQ ID NO: 391763 - DNA, 25 bp, Homo sapien
tacaccatctatggaggatacggca

SEQ ID NO: 391764 - DNA, 25 bp, Homo sapien
ctgtgaccagtgagagttttggagg

SEQ ID NO: 391765 - DNA, 25 bp, Homo sapien
tgtgaccagtgagagttttggagga

SEQ ID NO: 391766 - DNA, 25 bp, Homo sapien
tgaccagtgagagttttggaggaga

SEQ ID NO: 391767 - DNA, 25 bp, Homo sapien
gagagaggggggctagggctcctcc

SEQ ID NO: 391768 - DNA, 25 bp, Homo sapien
ccacggcaggcagcagcccctgggc

SEQ ID NO: 391769 - DNA, 25 bp, Homo sapien
ctgccacggcaggcagcagcccctg

SEQ ID NO: 391770 - DNA, 25 bp, Homo sapien
tgccacggcaggcagcagcccctgg

SEQ ID NO: 391771 - DNA, 25 bp, Homo sapien
gccacggcaggcagcagcccctggg

SEQ ID NO: 391772 - DNA, 25 bp, Homo sapien
tggagcaagtgttccacgataggaa

SEQ ID NO: 391773 - DNA, 25 bp, Homo sapien
ggaaatgcaagaccagcaatgtcca

SEQ ID NO: 391774 - DNA, 25 bp, Homo sapien
tccacgataggaaatgcaagaccag

SEQ ID NO: 391775 - DNA, 25 bp, Homo sapien
ctgtgtcatggagcaagtgttccac

SEQ ID NO: 391776 - DNA, 25 bp, Homo sapien
acagtggagaaggccagtagacctc

SEQ ID NO: 391777 - DNA, 25 bp, Homo sapien
gatccaatgctaggtggcacagtgg

SEQ ID NO: 391778 - DNA, 25 bp, Homo sapien
ttctgcttcagccaacacaacttgg

SEQ ID NO: 391779 - DNA, 25 bp, Homo sapien
caacttggcagatccaatgctaggt

SEQ ID NO: 391780 - DNA, 25 bp, Homo sapien
tccattcatggactggcacaggtgg

SEQ ID NO: 391781 - DNA, 25 bp, Homo sapien
cctttgtccattcatggactggcac

SEQ ID NO: 391782 - DNA, 25 bp, Homo sapien
gatttatggctatgttgtcagccac

SEQ ID NO: 391783 - DNA, 25 bp, Homo sapien
ctggcacaggtggatttatggctat

SEQ ID NO: 391784 - DNA, 25 bp, Homo sapien
ccaggagaatctccgcaacatgtgg

SEQ ID NO: 391785 - DNA, 25 bp, Homo sapien
ggaggtggagtgattgtgcaaagca

SEQ ID NO: 391786 - DNA, 25 bp, Homo sapien
gtggtgttgctggaagactcgaatc

SEQ ID NO: 391787 - DNA, 25 bp, Homo sapien
ttgctggaagactcgaatcacatct

SEQ ID NO: 391788 - DNA, 25 bp, Homo sapien
agaggccgcctgcacgcctcagggt

SEQ ID NO: 391789 - DNA, 25 bp, Homo sapien
tgcggggtaaaatctgtgaacagtc

SEQ ID NO: 391790 - DNA, 25 bp, Homo sapien
ggtccccgcagcagaccacatcact

SEQ ID NO: 391791 - DNA, 25 bp, Homo sapien
ggtcttgcggggtaaaatctgtgaa

SEQ ID NO: 391792 - DNA, 25 bp, Homo sapien
aaccagatggtcagagtagggagcc

SEQ ID NO: 391793 - DNA, 25 bp, Homo sapien
tggataacctgtgcgcagaggccac

SEQ ID NO: 391794 - DNA, 25 bp, Homo sapien
agggtcccgtccaggtctacaggtg

SEQ ID NO: 391795 - DNA, 25 bp, Homo sapien
tggaggatgtttcccgtgtcacagc

SEQ ID NO: 391796 - DNA, 25 bp, Homo sapien
tggaccctcttcctatgcgcagatg

SEQ ID NO: 391797 - DNA, 25 bp, Homo sapien
gattcagaaccaatgatgggaacgg

SEQ ID NO: 391798 - DNA, 25 bp, Homo sapien
tcaggtcctccgtccagtgagtgag

SEQ ID NO: 391799 - DNA, 25 bp, Homo sapien
ggcccggctatggttgtattttaca

SEQ ID NO: 391800 - DNA, 25 bp, Homo sapien
acctttcttcatggcggccctgcag

SEQ ID NO: 391801 - DNA, 25 bp, Homo sapien
tgttgcgggaagagcctttcatgaa

SEQ ID NO: 391802 - DNA, 25 bp, Homo sapien
aagcaggagccacctttcttcatgg

SEQ ID NO: 391803 - DNA, 25 bp, Homo sapien
gtgttgcgggaagagcctttcatga

SEQ ID NO: 391804 - DNA, 25 bp, Homo sapien
gggcccgccctcacacacctgactg

SEQ ID NO: 391805 - DNA, 25 bp, Homo sapien
caagggagccgcatgaggaggtgcc

SEQ ID NO: 391806 - DNA, 25 bp, Homo sapien
ggctggagggcccgccctcacacac

SEQ ID NO: 391807 - DNA, 25 bp, Homo sapien
agccgcatgaggaggtgcccaggct

SEQ ID NO: 391808 - DNA, 25 bp, Homo sapien
cttccctctgaatcatgggatgttc

SEQ ID NO: 391809 - DNA, 25 bp, Homo sapien
tgtgtagaacacgtgcatttgctcg

SEQ ID NO: 391810 - DNA, 25 bp, Homo sapien
atttgctcggaaaaatggaggactc

SEQ ID NO: 391811 - DNA, 25 bp, Homo sapien
aggtaccactggagaatgacctgga

SEQ ID NO: 391812 - DNA, 25 bp, Homo sapien
gttttttcgttcaggagcatcttct

SEQ ID NO: 391813 - DNA, 25 bp, Homo sapien
ttctgtgttttttcgttcaggagca

SEQ ID NO: 391814 - DNA, 25 bp, Homo sapien
ctattctgtgttttttcgttcagga

SEQ ID NO: 391815 - DNA, 25 bp, Homo sapien
tgtgttttttcgttcaggagcatct

SEQ ID NO: 391816 - DNA, 25 bp, Homo sapien
gacatagacagtattacctaggtag

SEQ ID NO: 391817 - DNA, 25 bp, Homo sapien
taggtagatgcactgctcacctgcg

SEQ ID NO: 391818 - DNA, 25 bp, Homo sapien
agccacaggcctaagtcattaaaaa

SEQ ID NO: 391819 - DNA, 25 bp, Homo sapien
ttttatctccacacgcagtatgaag

SEQ ID NO: 391820 - DNA, 25 bp, Homo sapien
gggctgctgatctcgatcctgcatg

SEQ ID NO: 391821 - DNA, 25 bp, Homo sapien
gcctcttactctgaacgcattctga

SEQ ID NO: 391822 - DNA, 25 bp, Homo sapien
gcgtccgtgggattcagcctcttac

SEQ ID NO: 391823 - DNA, 25 bp, Homo sapien
cctgcatggccagcgtgcgtccgtg

SEQ ID NO: 391824 - DNA, 25 bp, Homo sapien
ggaaattctaacctcaccagcctgg

SEQ ID NO: 391825 - DNA, 25 bp, Homo sapien
cgttgtccatgcaggcacttcatga

SEQ ID NO: 391826 - DNA, 25 bp, Homo sapien
caggcgggtcaacagtctctccgtg

SEQ ID NO: 391827 - DNA, 25 bp, Homo sapien
ggaactcgaattcacaattcctgga

SEQ ID NO: 391828 - DNA, 25 bp, Homo sapien
tataattatcatctgcgtggatccc

SEQ ID NO: 391829 - DNA, 25 bp, Homo sapien
accgacatctcgaagcaggtccctc

SEQ ID NO: 391830 - DNA, 25 bp, Homo sapien
cctctatcccacatgtcagggacag

SEQ ID NO: 391831 - DNA, 25 bp, Homo sapien
taattatcatctgcgtggatcccca

SEQ ID NO: 391832 - DNA, 25 bp, Homo sapien
catccggcactgtaacatttcttaa

SEQ ID NO: 391833 - DNA, 25 bp, Homo sapien
tttttccatggactctgagtgtctg

SEQ ID NO: 391834 - DNA, 25 bp, Homo sapien
tctgtcttaagaggaacgggaccag

SEQ ID NO: 391835 - DNA, 25 bp, Homo sapien
acctggagctggttttacgcctctt

SEQ ID NO: 391836 - DNA, 25 bp, Homo sapien
cagggagcgcctgcgttcttgattc

SEQ ID NO: 391837 - DNA, 25 bp, Homo sapien
cgccagcgctgagatccttgtcaca

SEQ ID NO: 391838 - DNA, 25 bp, Homo sapien
gctgagtcccatcctcgaatgctca

SEQ ID NO: 391839 - DNA, 25 bp, Homo sapien
ggacctgtccagacaggctgagtcc

SEQ ID NO: 391840 - DNA, 25 bp, Homo sapien
aaggagcgtccttggccagaccgag

SEQ ID NO: 391841 - DNA, 25 bp, Homo sapien
gctccacgaggaaggtcttggctgg

SEQ ID NO: 391842 - DNA, 25 bp, Homo sapien
atttggcaaagctgagcccgctgtg

SEQ ID NO: 391843 - DNA, 25 bp, Homo sapien
gctgtgcgtctaagcagactccaag

SEQ ID NO: 391844 - DNA, 25 bp, Homo sapien
gatggcgttacataagatacatctg

SEQ ID NO: 391845 - DNA, 25 bp, Homo sapien
tgagggatggcgttacataagatac

SEQ ID NO: 391846 - DNA, 25 bp, Homo sapien
tgcatgagggatggcgttacataag

SEQ ID NO: 391847 - DNA, 25 bp, Homo sapien
ggcgttacataagatacatctggct

SEQ ID NO: 391848 - DNA, 25 bp, Homo sapien
cattccgtgtcctcgaagcatggca

SEQ ID NO: 391849 - DNA, 25 bp, Homo sapien
aagtgcaggcagctcgcattccgtg

SEQ ID NO: 391850 - DNA, 25 bp, Homo sapien
ttaggcacaagctccgtagagaggg

SEQ ID NO: 391851 - DNA, 25 bp, Homo sapien
gatgagtgaccttgcctgtatggcg

SEQ ID NO: 391852 - DNA, 25 bp, Homo sapien
gaaaacgttctgtgccaagtgccgc

SEQ ID NO: 391853 - DNA, 25 bp, Homo sapien
tgtggcatccaaaggcggaaggctc

SEQ ID NO: 391854 - DNA, 25 bp, Homo sapien
tcagtggagaattcgttttggaccc

SEQ ID NO: 391855 - DNA, 25 bp, Homo sapien
tcgggcctctggaatgctctagcgt

SEQ ID NO: 391856 - DNA, 25 bp, Homo sapien
caggcatccatggaatcagcaggag

SEQ ID NO: 391857 - DNA, 25 bp, Homo sapien
taaagggcaaatgacctcgcagaga

SEQ ID NO: 391858 - DNA, 25 bp, Homo sapien
gaactaaggaatgttcatccccagg

SEQ ID NO: 391859 - DNA, 25 bp, Homo sapien
gctttgggctcatgacgaaacaccc

SEQ ID NO: 391860 - DNA, 25 bp, Homo sapien
tgaacgccagttacagctggacaac

SEQ ID NO: 391861 - DNA, 25 bp, Homo sapien
tcctgaccgtgacctttgataccgt

SEQ ID NO: 391862 - DNA, 25 bp, Homo sapien
gacttagctttgcagagtatctcca

SEQ ID NO: 391863 - DNA, 25 bp, Homo sapien
gcacaaccgccaaaatgacgtccag

SEQ ID NO: 391864 - DNA, 25 bp, Homo sapien
tgggaaagcaccgtctgcctcaggt

SEQ ID NO: 391865 - DNA, 25 bp, Homo sapien
gcctgacacacatgcttacacggat

SEQ ID NO: 391866 - DNA, 25 bp, Homo sapien
gaaatgctcattacgtacgtgaaag

SEQ ID NO: 391867 - DNA, 25 bp, Homo sapien
tagtttagcagtgtgtttgcctgac

SEQ ID NO: 391868 - DNA, 25 bp, Homo sapien
cccggggtcgccgtcaactggtgag

SEQ ID NO: 391869 - DNA, 25 bp, Homo sapien
ggggtcgccgtcaactggtgagaca

SEQ ID NO: 391870 - DNA, 25 bp, Homo sapien
cagctgtcatgtcctcccacgttgg

SEQ ID NO: 391871 - DNA, 25 bp, Homo sapien
tcccacgttggcgacacagggagga

SEQ ID NO: 391872 - DNA, 25 bp, Homo sapien
gctccctccatgggacctgttgtgg

SEQ ID NO: 391873 - DNA, 25 bp, Homo sapien
gtgctggtgtaactcatcttcgtgt

SEQ ID NO: 391874 - DNA, 25 bp, Homo sapien
gctgtgtctgaccataagtactgtg

SEQ ID NO: 391875 - DNA, 25 bp, Homo sapien
catcttcgtgttccttgtgctgtgt

SEQ ID NO: 391876 - DNA, 25 bp, Homo sapien
gcctcacagtgaggatgagatctga

SEQ ID NO: 391877 - DNA, 25 bp, Homo sapien
gattgtgcagtatcctcagttgggt

SEQ ID NO: 391878 - DNA, 25 bp, Homo sapien
agaggcatttgaccctcttccaggg

SEQ ID NO: 391879 - DNA, 25 bp, Homo sapien
cacatttgttactgacactgggcag

SEQ ID NO: 391880 - DNA, 25 bp, Homo sapien
gccagacagacgttgctgctcattt

SEQ ID NO: 391881 - DNA, 25 bp, Homo sapien
tacttgtatgtcatcaactacgtaa

SEQ ID NO: 391882 - DNA, 25 bp, Homo sapien
agtgaaattctacttgtatgtcatc

SEQ ID NO: 391883 - DNA, 25 bp, Homo sapien
tatgtcatcaactacgtaagacgtg

SEQ ID NO: 391884 - DNA, 25 bp, Homo sapien
tgctgtgaaggaaatcgcagagcgc

SEQ ID NO: 391885 - DNA, 25 bp, Homo sapien
ccctccctgaagaagtgacgttaag

SEQ ID NO: 391886 - DNA, 25 bp, Homo sapien
tgccgaggagggtccaagtatatcc

SEQ ID NO: 391887 - DNA, 25 bp, Homo sapien
tatatcccactgtgcaaggctgcca

SEQ ID NO: 391888 - DNA, 25 bp, Homo sapien
cctgggcctggtgtctagtcctcta

SEQ ID NO: 391889 - DNA, 25 bp, Homo sapien
tagtcctctatcttgtagcaaagcc

SEQ ID NO: 391890 - DNA, 25 bp, Homo sapien
cccaaataaattcgggcacctgctg

SEQ ID NO: 391891 - DNA, 25 bp, Homo sapien
tcatcagcgtgtgcaaaaggtgctc

SEQ ID NO: 391892 - DNA, 25 bp, Homo sapien
aggccggcatgctacaggagagact

SEQ ID NO: 391893 - DNA, 25 bp, Homo sapien
aggtctggaggagcagcaaccatcc

SEQ ID NO: 391894 - DNA, 25 bp, Homo sapien
tcatgtcacgtaggtgtgcgcaggt

SEQ ID NO: 391895 - DNA, 25 bp, Homo sapien
taaaagggcccgatgttccattgta

SEQ ID NO: 391896 - DNA, 25 bp, Homo sapien
tggagctcggctttctcagagagga

SEQ ID NO: 391897 - DNA, 25 bp, Homo sapien
tactggctccgtttgaccgatctcc

SEQ ID NO: 391898 - DNA, 25 bp, Homo sapien
cctgagatgcaccatctgttactgg

SEQ ID NO: 391899 - DNA, 25 bp, Homo sapien
tccgtttgaccgatctccttgttca

SEQ ID NO: 391900 - DNA, 25 bp, Homo sapien
ccagcttggggtaccccctgtggag

SEQ ID NO: 391901 - DNA, 25 bp, Homo sapien
cagcttggggtaccccctgtggagg

SEQ ID NO: 391902 - DNA, 25 bp, Homo sapien
gccagcttggggtaccccctgtgga

SEQ ID NO: 391903 - DNA, 25 bp, Homo sapien
tagccagcttggggtaccccctgtg

SEQ ID NO: 391904 - DNA, 25 bp, Homo sapien
ggtggtgatcccaccccggtgcaca

SEQ ID NO: 391905 - DNA, 25 bp, Homo sapien
gagaatgcaatgatgtcaacactcg

SEQ ID NO: 391906 - DNA, 25 bp, Homo sapien
cgtattttgtttcaagctcggacat

SEQ ID NO: 391907 - DNA, 25 bp, Homo sapien
ggtagcagtgacagttctccttgga

SEQ ID NO: 391908 - DNA, 25 bp, Homo sapien
tatagtggacacattgacaatcctc

SEQ ID NO: 391909 - DNA, 25 bp, Homo sapien
ccagccgtgggctgtatgtagtaat

SEQ ID NO: 391910 - DNA, 25 bp, Homo sapien
tattgtgtaagtgaattccagccgt

SEQ ID NO: 391911 - DNA, 25 bp, Homo sapien
tcctcttgaagacgagatatgacga

SEQ ID NO: 391912 - DNA, 25 bp, Homo sapien
tcactgatagccatggaagctcttg

SEQ ID NO: 391913 - DNA, 25 bp, Homo sapien
cgggcatagccctcagtgattaatt

SEQ ID NO: 391914 - DNA, 25 bp, Homo sapien
agaacaatgaatggcacgggctacc

SEQ ID NO: 391915 - DNA, 25 bp, Homo sapien
tcaatacaatgatcacccttgggaa

SEQ ID NO: 391916 - DNA, 25 bp, Homo sapien
tctctaacctggtcattcactgtgc

SEQ ID NO: 391917 - DNA, 25 bp, Homo sapien
gtcattcactgtgctataaggccca

SEQ ID NO: 391918 - DNA, 25 bp, Homo sapien
tgtctctaacctggtcattcactgt

SEQ ID NO: 391919 - DNA, 25 bp, Homo sapien
cactgtgctataaggcccactgcca

SEQ ID NO: 391920 - DNA, 25 bp, Homo sapien
ccggggcttcgtacagtcactgccc

SEQ ID NO: 391921 - DNA, 25 bp, Homo sapien
ctcatttcctgtatcccccggggct

SEQ ID NO: 391922 - DNA, 25 bp, Homo sapien
gtcgagtcgggtcacagacgtgtcc

SEQ ID NO: 391923 - DNA, 25 bp, Homo sapien
gtggaacagcgtcggcacttgcctg

SEQ ID NO: 391924 - DNA, 25 bp, Homo sapien
acagacgtgtcctgcgggccccatg

SEQ ID NO: 391925 - DNA, 25 bp, Homo sapien
cagccacaggtggaacagcgtcggc

SEQ ID NO: 391926 - DNA, 25 bp, Homo sapien
acacgttgtctccatccaatggcct

SEQ ID NO: 391927 - DNA, 25 bp, Homo sapien
ataccaaggtctagggctctgcttc

SEQ ID NO: 391928 - DNA, 25 bp, Homo sapien
taccaaggtctagggctctgcttcc

SEQ ID NO: 391929 - DNA, 25 bp, Homo sapien
tgtagacacgcacacgttgtctcca

SEQ ID NO: 391930 - DNA, 25 bp, Homo sapien
catggccccggctattgttgaccgt

SEQ ID NO: 391931 - DNA, 25 bp, Homo sapien
ggcaacacattctgcgggctcaaag

SEQ ID NO: 391932 - DNA, 25 bp, Homo sapien
tcactatcagcaaagggcaacacat

SEQ ID NO: 391933 - DNA, 25 bp, Homo sapien
taaatctcgcttcttgctgttggcg

SEQ ID NO: 391934 - DNA, 25 bp, Homo sapien
cagactcgcaggatgcatcatcggg

SEQ ID NO: 391935 - DNA, 25 bp, Homo sapien
attccttcgtctgcccggcatgggc

SEQ ID NO: 391936 - DNA, 25 bp, Homo sapien
ggcacagactcgcaggatgcatcat

SEQ ID NO: 391937 - DNA, 25 bp, Homo sapien
tgggccacattccttcgtctgcccg

SEQ ID NO: 391938 - DNA, 25 bp, Homo sapien
cattcccaagggaggcttaaccaag

SEQ ID NO: 391939 - DNA, 25 bp, Homo sapien
cctgggcattcccaagggaggctta

SEQ ID NO: 391940 - DNA, 25 bp, Homo sapien
tcccaagggaggcttaaccaagcca

SEQ ID NO: 391941 - DNA, 25 bp, Homo sapien
tgggcattcccaagggaggcttaac

SEQ ID NO: 391942 - DNA, 25 bp, Homo sapien
gtccacagtgtccatagtactggat

SEQ ID NO: 391943 - DNA, 25 bp, Homo sapien
gaggacctcgtgtgctgtcgctgac

SEQ ID NO: 391944 - DNA, 25 bp, Homo sapien
tggatactctctgtccaggaggacc

SEQ ID NO: 391945 - DNA, 25 bp, Homo sapien
tcgctgacagatggagggctggcca

SEQ ID NO: 391946 - DNA, 25 bp, Homo sapien
cagaaggatactaccttgtctctgc

SEQ ID NO: 391947 - DNA, 25 bp, Homo sapien
ctcaccagaagctttgaatcttata

SEQ ID NO: 391948 - DNA, 25 bp, Homo sapien
taaacctgccggcaagaagcatctc

SEQ ID NO: 391949 - DNA, 25 bp, Homo sapien
agctctgctaccgtcggcatgcacc

SEQ ID NO: 391950 - DNA, 25 bp, Homo sapien
tctcaggacgggctcattaaacacc

SEQ ID NO: 391951 - DNA, 25 bp, Homo sapien
ctcaggacgggctcattaaacacca

SEQ ID NO: 391952 - DNA, 25 bp, Homo sapien
catctcaggacgggctcattaaaca

SEQ ID NO: 391953 - DNA, 25 bp, Homo sapien
tcatctcaggacgggctcattaaac

SEQ ID NO: 391954 - DNA, 25 bp, Homo sapien
aggcagccgggtcagcagtgtcttc

SEQ ID NO: 391955 - DNA, 25 bp, Homo sapien
cgggttatctctgctccttttatcc

SEQ ID NO: 391956 - DNA, 25 bp, Homo sapien
ctctgctccttttatccagcatgga

SEQ ID NO: 391957 - DNA, 25 bp, Homo sapien
gcatggaatagagcacagctttccc

SEQ ID NO: 391958 - DNA, 25 bp, Homo sapien
agctcccccgaagtcggctgacaga

SEQ ID NO: 391959 - DNA, 25 bp, Homo sapien
tgctgatgctgatcaaagttgatca

SEQ ID NO: 391960 - DNA, 25 bp, Homo sapien
gactatcaagtatctcgtgggcaag

SEQ ID NO: 391961 - DNA, 25 bp, Homo sapien
aacgccagcgtctgtttcttgacaa

SEQ ID NO: 391962 - DNA, 25 bp, Homo sapien
tcaaagttgatcaaagtggacagat

SEQ ID NO: 391963 - DNA, 25 bp, Homo sapien
atggtgacgccagtcccacgcaggg

SEQ ID NO: 391964 - DNA, 25 bp, Homo sapien
gcagtagggaaacccgaggcaagaa

SEQ ID NO: 391965 - DNA, 25 bp, Homo sapien
tgtcccccagaatggtgacgccagt

SEQ ID NO: 391966 - DNA, 25 bp, Homo sapien
caagaagcaggacatacgtggggct

SEQ ID NO: 391967 - DNA, 25 bp, Homo sapien
tcccgctatcctggaagaatgcggg

SEQ ID NO: 391968 - DNA, 25 bp, Homo sapien
ccaggttaccacaaaggtacaggcg

SEQ ID NO: 391969 - DNA, 25 bp, Homo sapien
ctgcggctcccgctatcctggaaga

SEQ ID NO: 391970 - DNA, 25 bp, Homo sapien
cacaaaggtacaggcggtgtccagc

SEQ ID NO: 391971 - DNA, 25 bp, Homo sapien
ctaaactagcctttctcgggagcct

SEQ ID NO: 391972 - DNA, 25 bp, Homo sapien
tcctttgctgatatcctaaactagc

SEQ ID NO: 391973 - DNA, 25 bp, Homo sapien
tgctgatatcctaaactagcctttc

SEQ ID NO: 391974 - DNA, 25 bp, Homo sapien
gatatcctaaactagcctttctcgg

SEQ ID NO: 391975 - DNA, 25 bp, Homo sapien
tcagcgggtactccagcttgtggca

SEQ ID NO: 391976 - DNA, 25 bp, Homo sapien
tatgctctttcagtgtatctcagcg

SEQ ID NO: 391977 - DNA, 25 bp, Homo sapien
ggagaagacaaaattggtgtttaga

SEQ ID NO: 391978 - DNA, 25 bp, Homo sapien
gcttgtggcattcccatgtgactgg

SEQ ID NO: 391979 - DNA, 25 bp, Homo sapien
tgagtaatcatcacctacatggcca

SEQ ID NO: 391980 - DNA, 25 bp, Homo sapien
gtccatcttggtagctgtcacttca

SEQ ID NO: 391981 - DNA, 25 bp, Homo sapien
taccagtggtaggaaagatattctc

SEQ ID NO: 391982 - DNA, 25 bp, Homo sapien
tattgccaacattccataccagtgg

SEQ ID NO: 391983 - DNA, 25 bp, Homo sapien
tactatgtataatttgtaattgaaa

SEQ ID NO: 391984 - DNA, 25 bp, Homo sapien
catttacttccagatagagcagagg

SEQ ID NO: 391985 - DNA, 25 bp, Homo sapien
gatcccagacactcaagaattagca

SEQ ID NO: 391986 - DNA, 25 bp, Homo sapien
tgggcaaggccattctctacatcat

SEQ ID NO: 391987 - DNA, 25 bp, Homo sapien
ggaagtcccctacagtcagtttata

SEQ ID NO: 391988 - DNA, 25 bp, Homo sapien
tcattcagatcttaggtctcagctg

SEQ ID NO: 391989 - DNA, 25 bp, Homo sapien
tttagcctaatggagaacaattgtt

SEQ ID NO: 391990 - DNA, 25 bp, Homo sapien
ttgaaaccagattttatagagacct

SEQ ID NO: 391991 - DNA, 25 bp, Homo sapien
ttttaaacaggatcaaagctggttc

SEQ ID NO: 391992 - DNA, 25 bp, Homo sapien
atcctgttgaccaggatggccttga

SEQ ID NO: 391993 - DNA, 25 bp, Homo sapien
tgaccaggatggccttgagatctcc

SEQ ID NO: 391994 - DNA, 25 bp, Homo sapien
catcctgttgaccaggatggccttg

SEQ ID NO: 391995 - DNA, 25 bp, Homo sapien
tgttgaccaggatggccttgagatc

SEQ ID NO: 391996 - DNA, 25 bp, Homo sapien
aattccgcaagagcgcgcgttcgga

SEQ ID NO: 391997 - DNA, 25 bp, Homo sapien
ggagaattccgcaagagcgcgcgtt

SEQ ID NO: 391998 - DNA, 25 bp, Homo sapien
ttcgggagaattccgcaagagcgcg

SEQ ID NO: 391999 - DNA, 25 bp, Homo sapien
gttcgggagaattccgcaagagcgc

SEQ ID NO: 392000 - DNA, 25 bp, Homo sapien
cacatctcttcccggcttttcggga

SEQ ID NO: 392001 - DNA, 25 bp, Homo sapien
ccggcggtcccgcagagcatagcac

SEQ ID NO: 392002 - DNA, 25 bp, Homo sapien
ggcagggagtcaagacgccacccgt

SEQ ID NO: 392003 - DNA, 25 bp, Homo sapien
gcgaccgtctccccgcttggaggag

SEQ ID NO: 392004 - DNA, 25 bp, Homo sapien
cgcgagccgagtgtgagcggaaagg

SEQ ID NO: 392005 - DNA, 25 bp, Homo sapien
ttcaagatggatggaatcacagcgg

SEQ ID NO: 392006 - DNA, 25 bp, Homo sapien
agatggatggaatcacagcggcagc

SEQ ID NO: 392007 - DNA, 25 bp, Homo sapien
aaattcaagatggatggaatcacag

SEQ ID NO: 392008 - DNA, 25 bp, Homo sapien
agcgatgcctgcgatgacctcatcc

SEQ ID NO: 392009 - DNA, 25 bp, Homo sapien
tccggcaggcggcaaagtcccctga

SEQ ID NO: 392010 - DNA, 25 bp, Homo sapien
tccaccggtgaacgggagcgcgtcc

SEQ ID NO: 392011 - DNA, 25 bp, Homo sapien
tccgagggactaagcgctcgcgcca

SEQ ID NO: 392012 - DNA, 25 bp, Homo sapien
aatggaagcgctctgagcgactagc

SEQ ID NO: 392013 - DNA, 25 bp, Homo sapien
gggcactatgcgaagtctccggctg

SEQ ID NO: 392014 - DNA, 25 bp, Homo sapien
aaaaagatcacagccctccgatgag

SEQ ID NO: 392015 - DNA, 25 bp, Homo sapien
gagtgtctgcgggagaaccgtccct

SEQ ID NO: 392016 - DNA, 25 bp, Homo sapien
gctttcctcccggtcggtgttgaca

SEQ ID NO: 392017 - DNA, 25 bp, Homo sapien
tgccaggctcccgggttattcccga

SEQ ID NO: 392018 - DNA, 25 bp, Homo sapien
agtgcagcggtttccctgccaggct

SEQ ID NO: 392019 - DNA, 25 bp, Homo sapien
aggctcccgggttattcccgatgat

SEQ ID NO: 392020 - DNA, 25 bp, Homo sapien
ctcccgggttattcccgatgatttg

SEQ ID NO: 392021 - DNA, 25 bp, Homo sapien
tctgtatctggaagcgtcctctcca

SEQ ID NO: 392022 - DNA, 25 bp, Homo sapien
cgctctgggtgtgacctgttccgtc

SEQ ID NO: 392023 - DNA, 25 bp, Homo sapien
gacctgttccgtcccttcacttgat

SEQ ID NO: 392024 - DNA, 25 bp, Homo sapien
cctctgtatctggaagcgtcctctc

SEQ ID NO: 392025 - DNA, 25 bp, Homo sapien
agcccagcgggaggacagttggaac

SEQ ID NO: 392026 - DNA, 25 bp, Homo sapien
gaacagaggctctgactaccgtggg

SEQ ID NO: 392027 - DNA, 25 bp, Homo sapien
gccccaggaatgctgcgccctcggg

SEQ ID NO: 392028 - DNA, 25 bp, Homo sapien
tctgactaccgtgggaacagctcac

SEQ ID NO: 392029 - DNA, 25 bp, Homo sapien
caattataaggtcacagcattggat

SEQ ID NO: 392030 - DNA, 25 bp, Homo sapien
taaggtcacgttcaaacatacagag

SEQ ID NO: 392031 - DNA, 25 bp, Homo sapien
cgcgggcgtcttcagtccttggtgc

SEQ ID NO: 392032 - DNA, 25 bp, Homo sapien
tcaaagttccggagagtagaagtcc

SEQ ID NO: 392033 - DNA, 25 bp, Homo sapien
gatctcaagtcagtatcacctccct

SEQ ID NO: 392034 - DNA, 25 bp, Homo sapien
gtcacagccaaaacccgacaaagtg

SEQ ID NO: 392035 - DNA, 25 bp, Homo sapien
cacaaactcgtttgggacacagagg

SEQ ID NO: 392036 - DNA, 25 bp, Homo sapien
ccagagagtccaagacgacgatggt

SEQ ID NO: 392037 - DNA, 25 bp, Homo sapien
gactgtcctatccatccagagtgtg

SEQ ID NO: 392038 - DNA, 25 bp, Homo sapien
catcagtgggtatgctccaaagagg

SEQ ID NO: 392039 - DNA, 25 bp, Homo sapien
gctcagtattgaggacgactgtcct

SEQ ID NO: 392040 - DNA, 25 bp, Homo sapien
aatttcacggagatctgggtcagcc

SEQ ID NO: 392041 - DNA, 25 bp, Homo sapien
ttcattatccacatgacattggctc

SEQ ID NO: 392042 - DNA, 25 bp, Homo sapien
tctgctatttgttcaacaggaaagt

SEQ ID NO: 392043 - DNA, 25 bp, Homo sapien
ccacagtgatctggacgtcggcagg

SEQ ID NO: 392044 - DNA, 25 bp, Homo sapien
tcacatcgttaatctcaacttggag

SEQ ID NO: 392045 - DNA, 25 bp, Homo sapien
ctctgcggctgccacgtcagagcag

SEQ ID NO: 392046 - DNA, 25 bp, Homo sapien
aaaccagccatgcgccaggtctggg

SEQ ID NO: 392047 - DNA, 25 bp, Homo sapien
cgtcaccaagggcatctccggtctg

SEQ ID NO: 392048 - DNA, 25 bp, Homo sapien
tgggtacagggcgctcactgtgtct

SEQ ID NO: 392049 - DNA, 25 bp, Homo sapien
ccaagggcatctccggtctgtgcag

SEQ ID NO: 392050 - DNA, 25 bp, Homo sapien
ccagcacacgctgcattgacttgtc

SEQ ID NO: 392051 - DNA, 25 bp, Homo sapien
agcacacgctgcattgacttgtctg

SEQ ID NO: 392052 - DNA, 25 bp, Homo sapien
cagcacacgctgcattgacttgtct

SEQ ID NO: 392053 - DNA, 25 bp, Homo sapien
ctgcctctctccttcaagggacccc

SEQ ID NO: 392054 - DNA, 25 bp, Homo sapien
gaccccaaggtctcccagttgttca

SEQ ID NO: 392055 - DNA, 25 bp, Homo sapien
gcctctctccttcaagggaccccaa

SEQ ID NO: 392056 - DNA, 25 bp, Homo sapien
ctctctccttcaagggaccccaagg

SEQ ID NO: 392057 - DNA, 25 bp, Homo sapien
ggcccgacaagtatggaccagttag

SEQ ID NO: 392058 - DNA, 25 bp, Homo sapien
caccagagcaggcccgacaagtatg

SEQ ID NO: 392059 - DNA, 25 bp, Homo sapien
agcaggcccgacaagtatggaccag

SEQ ID NO: 392060 - DNA, 25 bp, Homo sapien
ccgacaagtatggaccagttagtca

SEQ ID NO: 392061 - DNA, 25 bp, Homo sapien
tgtgcctcacaatcatcagcgtgtg

SEQ ID NO: 392062 - DNA, 25 bp, Homo sapien
tattaaagtagatcccgtgctgacc

SEQ ID NO: 392063 - DNA, 25 bp, Homo sapien
gttctgacttcttaaaccaagcaag

SEQ ID NO: 392064 - DNA, 25 bp, Homo sapien
gcaagttccaagcactgagacgagg

SEQ ID NO: 392065 - DNA, 25 bp, Homo sapien
tgacaagcggctaatatgcctggcg

SEQ ID NO: 392066 - DNA, 25 bp, Homo sapien
gcaagtggtccgagcaacctgctca

SEQ ID NO: 392067 - DNA, 25 bp, Homo sapien
ccctatctacctgtgcgttggcgta

SEQ ID NO: 392068 - DNA, 25 bp, Homo sapien
cttaacagcccagcaccttgtaggc

SEQ ID NO: 392069 - DNA, 25 bp, Homo sapien
tggaggtcagccacatgcggagatc

SEQ ID NO: 392070 - DNA, 25 bp, Homo sapien
tcagagagataaaggcgtcccacaa

SEQ ID NO: 392071 - DNA, 25 bp, Homo sapien
tttgtgatcaaagagcgtggccaga

SEQ ID NO: 392072 - DNA, 25 bp, Homo sapien
ggtgaccaacatcgcatcgggacaa

SEQ ID NO: 392073 - DNA, 25 bp, Homo sapien
cctcaggagcattcaagtagaccga

SEQ ID NO: 392074 - DNA, 25 bp, Homo sapien
ctagaagtgagtggcaacaggtcct

SEQ ID NO: 392075 - DNA, 25 bp, Homo sapien
tcctccggcagtgatgagctacctg

SEQ ID NO: 392076 - DNA, 25 bp, Homo sapien
gaggctgggcctgtttgacatcaca

SEQ ID NO: 392077 - DNA, 25 bp, Homo sapien
acaggtgtcaaccagccatgtgacc

SEQ ID NO: 392078 - DNA, 25 bp, Homo sapien
tacaggtgtcaaccagccatgtgac

SEQ ID NO: 392079 - DNA, 25 bp, Homo sapien
cagccatgtgacctgcatgacctcc

SEQ ID NO: 392080 - DNA, 25 bp, Homo sapien
ccagccatgtgacctgcatgacctc

SEQ ID NO: 392081 - DNA, 25 bp, Homo sapien
tcttttgagaaaatcggatgaggac

SEQ ID NO: 392082 - DNA, 25 bp, Homo sapien
cttgtttggcctatccttcccgtgg

SEQ ID NO: 392083 - DNA, 25 bp, Homo sapien
tctgaaaccgtgacttgacttgtaa

SEQ ID NO: 392084 - DNA, 25 bp, Homo sapien
ttaatgggatttgccctcaagatcg

SEQ ID NO: 392085 - DNA, 25 bp, Homo sapien
tgacggccattcatcctcccggctg

SEQ ID NO: 392086 - DNA, 25 bp, Homo sapien
gaatgctcagtcgttgcaagaacca

SEQ ID NO: 392087 - DNA, 25 bp, Homo sapien
tccaggcgtgcagaatgctcagtcg

SEQ ID NO: 392088 - DNA, 25 bp, Homo sapien
ggagggactcagaagctgacggcca

SEQ ID NO: 392089 - DNA, 25 bp, Homo sapien
gcttcccagaatagccgtgaccagc

SEQ ID NO: 392090 - DNA, 25 bp, Homo sapien
cattcaaggctcagacgggtcgcat

SEQ ID NO: 392091 - DNA, 25 bp, Homo sapien
tgttctttcccgtggagatcacaaa

SEQ ID NO: 392092 - DNA, 25 bp, Homo sapien
aaacacttcattccgacattcaagg

SEQ ID NO: 392093 - DNA, 25 bp, Homo sapien
cggtccactgtccatgggaccactg

SEQ ID NO: 392094 - DNA, 25 bp, Homo sapien
gtccacggtccactgtccatgggac

SEQ ID NO: 392095 - DNA, 25 bp, Homo sapien
ctgtccacggtccactgtccatggg

SEQ ID NO: 392096 - DNA, 25 bp, Homo sapien
cacggtccactgtccatgggaccac

SEQ ID NO: 392097 - DNA, 25 bp, Homo sapien
aagggctgtgtcatgtccaccgcag

SEQ ID NO: 392098 - DNA, 25 bp, Homo sapien
aaagggctgtgtcatgtccaccgca

SEQ ID NO: 392099 - DNA, 25 bp, Homo sapien
gaaagggctgtgtcatgtccaccgc

SEQ ID NO: 392100 - DNA, 25 bp, Homo sapien
gggctgtgtcatgtccaccgcagtc

SEQ ID NO: 392101 - DNA, 25 bp, Homo sapien
tctgaggcacaagtatgcagcgact

SEQ ID NO: 392102 - DNA, 25 bp, Homo sapien
tgacgtttgctttctaggtggcctt

SEQ ID NO: 392103 - DNA, 25 bp, Homo sapien
tcagtggagggtagataagaagctc

SEQ ID NO: 392104 - DNA, 25 bp, Homo sapien
gcagagccaggtctaaccccagatt

SEQ ID NO: 392105 - DNA, 25 bp, Homo sapien
gaagaaagcacccaagatcaaagtc

SEQ ID NO: 392106 - DNA, 25 bp, Homo sapien
tgggtgccactgcataggattttgc

SEQ ID NO: 392107 - DNA, 25 bp, Homo sapien
gggtgccactgcataggattttgcc

SEQ ID NO: 392108 - DNA, 25 bp, Homo sapien
ttttgggtggagaagaaagcaccca

SEQ ID NO: 392109 - DNA, 25 bp, Homo sapien
ccccagccgcaaggattttcaaaag

SEQ ID NO: 392110 - DNA, 25 bp, Homo sapien
cacagttacggagctgacaagtcca

SEQ ID NO: 392111 - DNA, 25 bp, Homo sapien
tcagatatgcgctctttgtcaggat

SEQ ID NO: 392112 - DNA, 25 bp, Homo sapien
gggcccaagagagccaacgtgtagt

SEQ ID NO: 392113 - DNA, 25 bp, Homo sapien
cggaaggcgaagagacacgagaaac

SEQ ID NO: 392114 - DNA, 25 bp, Homo sapien
ctgtcgctttctcgtggcaaggcca

SEQ ID NO: 392115 - DNA, 25 bp, Homo sapien
cagcatgggcctgtcgctttctcgt

SEQ ID NO: 392116 - DNA, 25 bp, Homo sapien
ttcagaggtgcttccgtaacacagc

SEQ ID NO: 392117 - DNA, 25 bp, Homo sapien
ttccacttcggagactgtggccctc

SEQ ID NO: 392118 - DNA, 25 bp, Homo sapien
gccctccacgggcagcagttgccgg

SEQ ID NO: 392119 - DNA, 25 bp, Homo sapien
cagttgccgggttggatggaaagcg

SEQ ID NO: 392120 - DNA, 25 bp, Homo sapien
gatggaaagcgagggtgcggcctgg

SEQ ID NO: 392121 - DNA, 25 bp, Homo sapien
ccagccccgaggtcctgagcatcgt

SEQ ID NO: 392122 - DNA, 25 bp, Homo sapien
gcccacagcactgaccagagccagc

SEQ ID NO: 392123 - DNA, 25 bp, Homo sapien
tcctgagcatcgtccggcagtggtg

SEQ ID NO: 392124 - DNA, 25 bp, Homo sapien
cagtggtggcagtacagggctctgg

SEQ ID NO: 392125 - DNA, 25 bp, Homo sapien
ttgctgcacagcgaccccactccac

SEQ ID NO: 392126 - DNA, 25 bp, Homo sapien
cactccacaagcaacagggactgga

SEQ ID NO: 392127 - DNA, 25 bp, Homo sapien
gctgaaccccaaatcaccctgcggg

SEQ ID NO: 392128 - DNA, 25 bp, Homo sapien
tggcatcaccagtggggtagttact

SEQ ID NO: 392129 - DNA, 25 bp, Homo sapien
tgtgtccggtaaaccatcttagggc

SEQ ID NO: 392130 - DNA, 25 bp, Homo sapien
tggtagcccaacagggagaggcctt

SEQ ID NO: 392131 - DNA, 25 bp, Homo sapien
tgttcatagccctcacagcagtcag

SEQ ID NO: 392132 - DNA, 25 bp, Homo sapien
cagtagaggccgagctgttcatagc

SEQ ID NO: 392133 - DNA, 25 bp, Homo sapien
gccagggtctcttacagaaggtgat

SEQ ID NO: 392134 - DNA, 25 bp, Homo sapien
caggccagggtctcttacagaaggt

SEQ ID NO: 392135 - DNA, 25 bp, Homo sapien
tgcagcaggccagggtctcttacag

SEQ ID NO: 392136 - DNA, 25 bp, Homo sapien
gcaggccagggtctcttacagaagg

SEQ ID NO: 392137 - DNA, 25 bp, Homo sapien
aaaaaggcggctttgatcaaaagag

SEQ ID NO: 392138 - DNA, 25 bp, Homo sapien
ctccaaggagccaacctgctgtgtg

SEQ ID NO: 392139 - DNA, 25 bp, Homo sapien
gtggcatcccagaaaaaggcggctt

SEQ ID NO: 392140 - DNA, 25 bp, Homo sapien
agctccaaggagccaacctgctgtg

SEQ ID NO: 392141 - DNA, 25 bp, Homo sapien
atctgccaggtccagcttcgggccc

SEQ ID NO: 392142 - DNA, 25 bp, Homo sapien
aacatctgccaggtccagcttcggg

SEQ ID NO: 392143 - DNA, 25 bp, Homo sapien
acatctgccaggtccagcttcgggc

SEQ ID NO: 392144 - DNA, 25 bp, Homo sapien
tctgccaggtccagcttcgggccct

SEQ ID NO: 392145 - DNA, 25 bp, Homo sapien
gtgcttcctggtgctgaattctgcc

SEQ ID NO: 392146 - DNA, 25 bp, Homo sapien
gctgaattctgcctgtaggtctgtg

SEQ ID NO: 392147 - DNA, 25 bp, Homo sapien
gtcggtgcttcctggtgctgaattc

SEQ ID NO: 392148 - DNA, 25 bp, Homo sapien
cctgtaggtctgtggcctgttcggg

SEQ ID NO: 392149 - DNA, 25 bp, Homo sapien
ctgatttgctgcacggggacctcac

SEQ ID NO: 392150 - DNA, 25 bp, Homo sapien
gtgaactgcccggactgattcaggg

SEQ ID NO: 392151 - DNA, 25 bp, Homo sapien
caggccccaggtcttgacgtgaact

SEQ ID NO: 392152 - DNA, 25 bp, Homo sapien
aggtggatggttcaggcccctctgc

SEQ ID NO: 392153 - DNA, 25 bp, Homo sapien
caggtcttgacgtgaactgcccgga

SEQ ID NO: 392154 - DNA, 25 bp, Homo sapien
tcaagtccaggacagtcgatgtcca

SEQ ID NO: 392155 - DNA, 25 bp, Homo sapien
aagtccaggacagtcgatgtccaag

SEQ ID NO: 392156 - DNA, 25 bp, Homo sapien
ttctcaagtccaggacagtcgatgt

SEQ ID NO: 392157 - DNA, 25 bp, Homo sapien
gggccatgcagtagcgcccccctga

SEQ ID NO: 392158 - DNA, 25 bp, Homo sapien
cactgatgattatggacccaggaca

SEQ ID NO: 392159 - DNA, 25 bp, Homo sapien
gatgattatggacccaggacaggtt

SEQ ID NO: 392160 - DNA, 25 bp, Homo sapien
ctacacaagggaaaacactgatgat

SEQ ID NO: 392161 - DNA, 25 bp, Homo sapien
cacaagggaaaacactgatgattat

SEQ ID NO: 392162 - DNA, 25 bp, Homo sapien
ggagttccttgaagtccattttcac

SEQ ID NO: 392163 - DNA, 25 bp, Homo sapien
tggtgacgttgtaccaggagcccac

SEQ ID NO: 392164 - DNA, 25 bp, Homo sapien
agaaggcgcatgtggttcaggagcc

SEQ ID NO: 392165 - DNA, 25 bp, Homo sapien
caaggaatgcagaaggcgcatgtgg

SEQ ID NO: 392166 - DNA, 25 bp, Homo sapien
tggaggccattggttgcagggcgct

SEQ ID NO: 392167 - DNA, 25 bp, Homo sapien
ccattggttgcagggcgctggtgac

SEQ ID NO: 392168 - DNA, 25 bp, Homo sapien
gacggtggaggccattggttgcagg

SEQ ID NO: 392169 - DNA, 25 bp, Homo sapien
aggtggtggacggtggaggccattg

SEQ ID NO: 392170 - DNA, 25 bp, Homo sapien
tcacttcatagacacgcttcgcaat

SEQ ID NO: 392171 - DNA, 25 bp, Homo sapien
catagacacgcttcgcaatgtcacc

SEQ ID NO: 392172 - DNA, 25 bp, Homo sapien
cacctggacgctgatcacttcatag

SEQ ID NO: 392173 - DNA, 25 bp, Homo sapien
tggcaggcccagtagcagccgcgac

SEQ ID NO: 392174 - DNA, 25 bp, Homo sapien
ggagcttcctggtgacagacgcacc

SEQ ID NO: 392175 - DNA, 25 bp, Homo sapien
tggtgacagacgcaccagtacgagc

SEQ ID NO: 392176 - DNA, 25 bp, Homo sapien
agtacgagccctccaggtttgcgca

SEQ ID NO: 392177 - DNA, 25 bp, Homo sapien
ccaggttcagcttccgtggagacgt

SEQ ID NO: 392178 - DNA, 25 bp, Homo sapien
ggtagctggtcttcaccctgtacag

SEQ ID NO: 392179 - DNA, 25 bp, Homo sapien
tgaggaccacgtagtcactgactgg

SEQ ID NO: 392180 - DNA, 25 bp, Homo sapien
ctgagcaactccataccccggtaaa

SEQ ID NO: 392181 - DNA, 25 bp, Homo sapien
cccggacatggaaagtgtggttctg

SEQ ID NO: 392182 - DNA, 25 bp, Homo sapien
cttctccgtcaggttgtggtttaca

SEQ ID NO: 392183 - DNA, 25 bp, Homo sapien
cacactgctgcggttgagtaacttc

SEQ ID NO: 392184 - DNA, 25 bp, Homo sapien
tctagaaaagtcctggtactccaca

SEQ ID NO: 392185 - DNA, 25 bp, Homo sapien
tattgtgacttcaaatacctgggca

SEQ ID NO: 392186 - DNA, 25 bp, Homo sapien
tgccggtcaatctggaacactgtgc

SEQ ID NO: 392187 - DNA, 25 bp, Homo sapien
agcttcccacttcggtacaagtcag

SEQ ID NO: 392188 - DNA, 25 bp, Homo sapien
gagagacacgatctgcattctcagc

SEQ ID NO: 392189 - DNA, 25 bp, Homo sapien
tcctgcacggtgagcttgagcctca

SEQ ID NO: 392190 - DNA, 25 bp, Homo sapien
gcctgcagaaggagcttaataactt

SEQ ID NO: 392191 - DNA, 25 bp, Homo sapien
gggtgctgcgaatgcttacaatgga

SEQ ID NO: 392192 - DNA, 25 bp, Homo sapien
ctgcaggaccactgaacagcgtggg

SEQ ID NO: 392193 - DNA, 25 bp, Homo sapien
gaatgcttacaatggattcatccag

SEQ ID NO: 392194 - DNA, 25 bp, Homo sapien
ctgcccgcaccagcacctcagctct

SEQ ID NO: 392195 - DNA, 25 bp, Homo sapien
ctcagctctgaaatgtggaggaagc

SEQ ID NO: 392196 - DNA, 25 bp, Homo sapien
gagacctgcccgcaccagcacctca

SEQ ID NO: 392197 - DNA, 25 bp, Homo sapien
ccgcaccagcacctcagctctgaaa

SEQ ID NO: 392198 - DNA, 25 bp, Homo sapien
tctacagatcctcgccgtgaaggtg

SEQ ID NO: 392199 - DNA, 25 bp, Homo sapien
catgcacggcctgaggcgtcaccat

SEQ ID NO: 392200 - DNA, 25 bp, Homo sapien
ggcgtccgaagacaccagtagtcat

SEQ ID NO: 392201 - DNA, 25 bp, Homo sapien
taggtggaccacagcgcaaatacct

SEQ ID NO: 392202 - DNA, 25 bp, Homo sapien
acctacacagcccaccgtgactggc

SEQ ID NO: 392203 - DNA, 25 bp, Homo sapien
agcccaccgtgactggcgcaggaaa

SEQ ID NO: 392204 - DNA, 25 bp, Homo sapien
gggaaagaccgaacacatggccacc

SEQ ID NO: 392205 - DNA, 25 bp, Homo sapien
gtgactggcgcaggaaaccccaggc

SEQ ID NO: 392206 - DNA, 25 bp, Homo sapien
agcagtcgtgttccgcgctgtccac

SEQ ID NO: 392207 - DNA, 25 bp, Homo sapien
cagccggtgagcagtcgtgttccgc

SEQ ID NO: 392208 - DNA, 25 bp, Homo sapien
cgtccctggtggtacggcactggca

SEQ ID NO: 392209 - DNA, 25 bp, Homo sapien
caggttgatgcaccaggcagccggt

SEQ ID NO: 392210 - DNA, 25 bp, Homo sapien
tgaagttctctaggccgagggctgc

SEQ ID NO: 392211 - DNA, 25 bp, Homo sapien
catttcgcagccacgtgggattcag

SEQ ID NO: 392212 - DNA, 25 bp, Homo sapien
gattcagaagtgtttcccgggtgga

SEQ ID NO: 392213 - DNA, 25 bp, Homo sapien
caggtctacagaaccggagggtcca

SEQ ID NO: 392214 - DNA, 25 bp, Homo sapien
tgagatccaactcctgcacagattc

SEQ ID NO: 392215 - DNA, 25 bp, Homo sapien
ggctgagatccaactcctgcacaga

SEQ ID NO: 392216 - DNA, 25 bp, Homo sapien
gggctgtcacggctgagatccaact

SEQ ID NO: 392217 - DNA, 25 bp, Homo sapien
tgtcacggctgagatccaactcctg

SEQ ID NO: 392218 - DNA, 25 bp, Homo sapien
ggtggagtccatagcaagatccgcc

SEQ ID NO: 392219 - DNA, 25 bp, Homo sapien
tggagtccatagcaagatccgcctc

SEQ ID NO: 392220 - DNA, 25 bp, Homo sapien
cggtgctggtcacattggagaccat

SEQ ID NO: 392221 - DNA, 25 bp, Homo sapien
tggaagccggtgctggtcacattgg

SEQ ID NO: 392222 - DNA, 25 bp, Homo sapien
gacagtgtcacactcgtgttccagg

SEQ ID NO: 392223 - DNA, 25 bp, Homo sapien
cagtgtcacactcgtgttccaggtc

SEQ ID NO: 392224 - DNA, 25 bp, Homo sapien
ccccgacagtgtcacactcgtgttc

SEQ ID NO: 392225 - DNA, 25 bp, Homo sapien
ccgacagtgtcacactcgtgttcca

SEQ ID NO: 392226 - DNA, 25 bp, Homo sapien
ggcaccttctttcccacatgctttg

SEQ ID NO: 392227 - DNA, 25 bp, Homo sapien
tttcagatgagctctggcaccttct

SEQ ID NO: 392228 - DNA, 25 bp, Homo sapien
tctttcccacatgctttggccatga

SEQ ID NO: 392229 - DNA, 25 bp, Homo sapien
tgtcctcactttcagatgagctctg

SEQ ID NO: 392230 - DNA, 25 bp, Homo sapien
gcttgcgttgcgaaaggattctgag

SEQ ID NO: 392231 - DNA, 25 bp, Homo sapien
cctgaagaatagttctaggaaatct

SEQ ID NO: 392232 - DNA, 25 bp, Homo sapien
ttctaggaaatctcgatactcctgg

SEQ ID NO: 392233 - DNA, 25 bp, Homo sapien
gacctttccaatgagcttccgggct

SEQ ID NO: 392234 - DNA, 25 bp, Homo sapien
aaggcggtgagaaatgcagctgaca

SEQ ID NO: 392235 - DNA, 25 bp, Homo sapien
gtgacgctgacgacttccatcctga

SEQ ID NO: 392236 - DNA, 25 bp, Homo sapien
cctgtatgaaggtgtcgcctctgat

SEQ ID NO: 392237 - DNA, 25 bp, Homo sapien
gcaagtgaaactccaccacgatgct

SEQ ID NO: 392238 - DNA, 25 bp, Homo sapien
cccgggagtaaccaggagatgcaca

SEQ ID NO: 392239 - DNA, 25 bp, Homo sapien
caagttagcatgtggacgtatttcc

SEQ ID NO: 392240 - DNA, 25 bp, Homo sapien
taagaaccagaaaagcgtggccagg

SEQ ID NO: 392241 - DNA, 25 bp, Homo sapien
tgctctgagagcatagcttgcctct

SEQ ID NO: 392242 - DNA, 25 bp, Homo sapien
aacagaagaacatccctgggggctt

SEQ ID NO: 392243 - DNA, 25 bp, Homo sapien
aaacagaagaacatccctgggggct

SEQ ID NO: 392244 - DNA, 25 bp, Homo sapien
gtttcgacaggatgtccccggcaca

SEQ ID NO: 392245 - DNA, 25 bp, Homo sapien
tcctccctcgcagctacaagtgaaa

SEQ ID NO: 392246 - DNA, 25 bp, Homo sapien
cacagggtctctcagaatattccac

SEQ ID NO: 392247 - DNA, 25 bp, Homo sapien
agacccgagggtgtttcgacaggat

SEQ ID NO: 392248 - DNA, 25 bp, Homo sapien
tccactaagaccccgtttagcagga

SEQ ID NO: 392249 - DNA, 25 bp, Homo sapien
tcccttcacttgacgcagattcctg

SEQ ID NO: 392250 - DNA, 25 bp, Homo sapien
ctcccttcacttgacgcagattcct

SEQ ID NO: 392251 - DNA, 25 bp, Homo sapien
gccaacgtggggtcagtgttaaatc

SEQ ID NO: 392252 - DNA, 25 bp, Homo sapien
caggaagcgcttctggatggcgaca

SEQ ID NO: 392253 - DNA, 25 bp, Homo sapien
tgactgctccggtcaggttcagccg

SEQ ID NO: 392254 - DNA, 25 bp, Homo sapien
ttctcgatctcacagagcaccctga

SEQ ID NO: 392255 - DNA, 25 bp, Homo sapien
cattgctgtggctcacgttgcagga

SEQ ID NO: 392256 - DNA, 25 bp, Homo sapien
tggaacgacgctggcctcctttcta

SEQ ID NO: 392257 - DNA, 25 bp, Homo sapien
tgtgtccagtaccaggctgagctgg

SEQ ID NO: 392258 - DNA, 25 bp, Homo sapien
gttggagacgaacaagggcctgcat

SEQ ID NO: 392259 - DNA, 25 bp, Homo sapien
gcagggccctgaacacgaagccttt

SEQ ID NO: 392260 - DNA, 25 bp, Homo sapien
aggtggtggatgatgccctcctggg

SEQ ID NO: 392261 - DNA, 25 bp, Homo sapien
gacaggtcgttcctcagcgtggtcc

SEQ ID NO: 392262 - DNA, 25 bp, Homo sapien
aggtcgttcctcagcgtggtcctca

SEQ ID NO: 392263 - DNA, 25 bp, Homo sapien
tggtcctcaccacggtgttcgtcat

SEQ ID NO: 392264 - DNA, 25 bp, Homo sapien
tgacatcgtcactggcagacacgct

SEQ ID NO: 392265 - DNA, 25 bp, Homo sapien
ggagagtctccgataaacaactgca

SEQ ID NO: 392266 - DNA, 25 bp, Homo sapien
taacaaaattcccagcgccgtggag

SEQ ID NO: 392267 - DNA, 25 bp, Homo sapien
ccgtcaggaccaccttgaggttgct

SEQ ID NO: 392268 - DNA, 25 bp, Homo sapien
cgatggagtcgttgataaaggaaaa

SEQ ID NO: 392269 - DNA, 25 bp, Homo sapien
gatcctcagcttgaactgggcctta

SEQ ID NO: 392270 - DNA, 25 bp, Homo sapien
gagttgccgttctcaatcacgttgg

SEQ ID NO: 392271 - DNA, 25 bp, Homo sapien
atgcagacgcggagtttgcagtgca

SEQ ID NO: 392272 - DNA, 25 bp, Homo sapien
tccttctgtcccattgctcaggaag

SEQ ID NO: 392273 - DNA, 25 bp, Homo sapien
tgtaaagaattctcttgtagagaac

SEQ ID NO: 392274 - DNA, 25 bp, Homo sapien
cagcctgctgtcattaggacctgag

SEQ ID NO: 392275 - DNA, 25 bp, Homo sapien
gcaggctcctcgtgtgtggccctca

SEQ ID NO: 392276 - DNA, 25 bp, Homo sapien
gcagcaaccgaaagttattgcaatt

SEQ ID NO: 392277 - DNA, 25 bp, Homo sapien
cttcagaccggatgaggggtcccca

SEQ ID NO: 392278 - DNA, 25 bp, Homo sapien
cactattttgcagcaaccgaaagtt

SEQ ID NO: 392279 - DNA, 25 bp, Homo sapien
cggatgaggggtccccaggacatct

SEQ ID NO: 392280 - DNA, 25 bp, Homo sapien
attcgttgtcaagggcgtctatagc

SEQ ID NO: 392281 - DNA, 25 bp, Homo sapien
cgtgtgtgggtataattcgttgtca

SEQ ID NO: 392282 - DNA, 25 bp, Homo sapien
tgggtataattcgttgtcaagggcg

SEQ ID NO: 392283 - DNA, 25 bp, Homo sapien
ggcgtctatagccaggtcacagcca

SEQ ID NO: 392284 - DNA, 25 bp, Homo sapien
ctcggggaggagacaggcacaggtg

SEQ ID NO: 392285 - DNA, 25 bp, Homo sapien
gaggagacaggcacaggtgagagat

SEQ ID NO: 392286 - DNA, 25 bp, Homo sapien
ggggaggagacaggcacaggtgaga

SEQ ID NO: 392287 - DNA, 25 bp, Homo sapien
ggaggagacaggcacaggtgagaga

SEQ ID NO: 392288 - DNA, 25 bp, Homo sapien
tggccaccacaataaggaccacata

SEQ ID NO: 392289 - DNA, 25 bp, Homo sapien
tctctggtagcgcacgatcagaagg

SEQ ID NO: 392290 - DNA, 25 bp, Homo sapien
tctggtagcgcacgatcagaagggt

SEQ ID NO: 392291 - DNA, 25 bp, Homo sapien
aaggaccacataaccggcacccagg

SEQ ID NO: 392292 - DNA, 25 bp, Homo sapien
ttttcgaaagagcatcaagagcgcg

SEQ ID NO: 392293 - DNA, 25 bp, Homo sapien
cagcgggacatgacttgggaagaac

SEQ ID NO: 392294 - DNA, 25 bp, Homo sapien
ttaagtaactcatcggctcctctgg

SEQ ID NO: 392295 - DNA, 25 bp, Homo sapien
atatttgccaaagggtgacggacgc

SEQ ID NO: 392296 - DNA, 25 bp, Homo sapien
gggcatccaggcagaagcatgtcca

SEQ ID NO: 392297 - DNA, 25 bp, Homo sapien
gcacatggatctctgtcgactcaga

SEQ ID NO: 392298 - DNA, 25 bp, Homo sapien
catggatctctgtcgactcagaggg

SEQ ID NO: 392299 - DNA, 25 bp, Homo sapien
tctctgtcgactcagaggggcatcc

SEQ ID NO: 392300 - DNA, 25 bp, Homo sapien
gcaggtatgggaggcacccggcaga

SEQ ID NO: 392301 - DNA, 25 bp, Homo sapien
gggcaggtatgggaggcacccggca

SEQ ID NO: 392302 - DNA, 25 bp, Homo sapien
agcgggcttggagggtgtagctgtc

SEQ ID NO: 392303 - DNA, 25 bp, Homo sapien
cagagggacccagcgggcttggagg

SEQ ID NO: 392304 - DNA, 25 bp, Homo sapien
ctccagcaggcgctcatcgtttctg

SEQ ID NO: 392305 - DNA, 25 bp, Homo sapien
ttctgcacagctgaagtcaaggagc

SEQ ID NO: 392306 - DNA, 25 bp, Homo sapien
gctgcgtgccgtcagctgcatgcac

SEQ ID NO: 392307 - DNA, 25 bp, Homo sapien
atgcaccagttgtccctccagcagg

SEQ ID NO: 392308 - DNA, 25 bp, Homo sapien
cctgccagcagggacgactccagga

SEQ ID NO: 392309 - DNA, 25 bp, Homo sapien
ctgccagcagggacgactccaggag

SEQ ID NO: 392310 - DNA, 25 bp, Homo sapien
ggggaacactaatctgccccctctg

SEQ ID NO: 392311 - DNA, 25 bp, Homo sapien
gggaacactaatctgccccctctga

SEQ ID NO: 392312 - DNA, 25 bp, Homo sapien
cctctgagtcctgggttccacatcc

SEQ ID NO: 392313 - DNA, 25 bp, Homo sapien
tgcactctgccccagcgcgtgtcca

SEQ ID NO: 392314 - DNA, 25 bp, Homo sapien
caagcacgggggtcagtgctgcact

SEQ ID NO: 392315 - DNA, 25 bp, Homo sapien
tgccccagcgcgtgtccactgattt

SEQ ID NO: 392316 - DNA, 25 bp, Homo sapien
ccacggcgcctgcagagtgagcaag

SEQ ID NO: 392317 - DNA, 25 bp, Homo sapien
cgcccaccgccctaaatttctctgg

SEQ ID NO: 392318 - DNA, 25 bp, Homo sapien
gactataaggaactgtgggtccttg

SEQ ID NO: 392319 - DNA, 25 bp, Homo sapien
aaggaactgtgggtccttgtgccac

SEQ ID NO: 392320 - DNA, 25 bp, Homo sapien
tctggactataaggaactgtgggtc

SEQ ID NO: 392321 - DNA, 25 bp, Homo sapien
tgcctgagaacagttcttgccccag

SEQ ID NO: 392322 - DNA, 25 bp, Homo sapien
caaatctgtgatgtttccagccggg

SEQ ID NO: 392323 - DNA, 25 bp, Homo sapien
tgaagcccaaggctcctgagcggag

SEQ ID NO: 392324 - DNA, 25 bp, Homo sapien
cctgagcggagatgtctcaatcatg

SEQ ID NO: 392325 - DNA, 25 bp, Homo sapien
tgtttggcggtgtttgtacaaacag

SEQ ID NO: 392326 - DNA, 25 bp, Homo sapien
tggcggtgtttgtacaaacagagag

SEQ ID NO: 392327 - DNA, 25 bp, Homo sapien
atgtgtttggcggtgtttgtacaaa

SEQ ID NO: 392328 - DNA, 25 bp, Homo sapien
gcggtgtttgtacaaacagagaggc

SEQ ID NO: 392329 - DNA, 25 bp, Homo sapien
ctctgtcttctctcaggcgtctcct

SEQ ID NO: 392330 - DNA, 25 bp, Homo sapien
ttctctcaggcgtctcctggactct

SEQ ID NO: 392331 - DNA, 25 bp, Homo sapien
tctgtcttctctcaggcgtctcctg

SEQ ID NO: 392332 - DNA, 25 bp, Homo sapien
acaagtccgcctacagaatccgtgg

SEQ ID NO: 392333 - DNA, 25 bp, Homo sapien
tacagaatccgtggctgtgatggtc

SEQ ID NO: 392334 - DNA, 25 bp, Homo sapien
cgcctacagaatccgtggctgtgat

SEQ ID NO: 392335 - DNA, 25 bp, Homo sapien
tctgtcctgacaagtccgcctacag

SEQ ID NO: 392336 - DNA, 25 bp, Homo sapien
gcttttgccttcgtgatgcgatcct

SEQ ID NO: 392337 - DNA, 25 bp, Homo sapien
cctgctgcataccagcttttgcctt

SEQ ID NO: 392338 - DNA, 25 bp, Homo sapien
ttgccttcgtgatgcgatcctccat

SEQ ID NO: 392339 - DNA, 25 bp, Homo sapien
cataccagcttttgccttcgtgatg

SEQ ID NO: 392340 - DNA, 25 bp, Homo sapien
ggttctctcgtacgtgtacatggga

SEQ ID NO: 392341 - DNA, 25 bp, Homo sapien
tcgtacgtgtacatgggacgctttc

SEQ ID NO: 392342 - DNA, 25 bp, Homo sapien
gtgtacatgggacgctttctctttt

SEQ ID NO: 392343 - DNA, 25 bp, Homo sapien
tgatcttggttctctcgtacgtgta

SEQ ID NO: 392344 - DNA, 25 bp, Homo sapien
ctcgagcatccaaaacatggccgac

SEQ ID NO: 392345 - DNA, 25 bp, Homo sapien
catggccgacatttaagcagcgttt

SEQ ID NO: 392346 - DNA, 25 bp, Homo sapien
aacttgctgtcagatggagcaggac

SEQ ID NO: 392347 - DNA, 25 bp, Homo sapien
gctcagacacacgaacacgcatggc

SEQ ID NO: 392348 - DNA, 25 bp, Homo sapien
tcttcaatcttaaagcatgcaccat

SEQ ID NO: 392349 - DNA, 25 bp, Homo sapien
tctcccgctgtgactgtgtggccat

SEQ ID NO: 392350 - DNA, 25 bp, Homo sapien
gcaccattttgaggttccagaaaga

SEQ ID NO: 392351 - DNA, 25 bp, Homo sapien
gcagctgagcgggtgtaagagcagg

SEQ ID NO: 392352 - DNA, 25 bp, Homo sapien
gctcttccagggcatgcactgatac

SEQ ID NO: 392353 - DNA, 25 bp, Homo sapien
agtcccaggcgagccagtgctttcg

SEQ ID NO: 392354 - DNA, 25 bp, Homo sapien
ttgcggcaggcgccactgtccactt

SEQ ID NO: 392355 - DNA, 25 bp, Homo sapien
accatcccgtgttggcagtcccagg

SEQ ID NO: 392356 - DNA, 25 bp, Homo sapien
cgtgggcttattgttcagcagtgag

SEQ ID NO: 392357 - DNA, 25 bp, Homo sapien
tcactttctgcactgccgttggcct

SEQ ID NO: 392358 - DNA, 25 bp, Homo sapien
gccgttggccttgtcatgttaacaa

SEQ ID NO: 392359 - DNA, 25 bp, Homo sapien
gccgatgagttctgggatgtacgct

SEQ ID NO: 392360 - DNA, 25 bp, Homo sapien
aacaaatgtctcaggctccggtggc

SEQ ID NO: 392361 - DNA, 25 bp, Homo sapien
gggcgtttgtattcaagctgtgctg

SEQ ID NO: 392362 - DNA, 25 bp, Homo sapien
tgtttggccctcgctcctctcaggg

SEQ ID NO: 392363 - DNA, 25 bp, Homo sapien
tgctgtggaactgtgttctgccatt

SEQ ID NO: 392364 - DNA, 25 bp, Homo sapien
tgctgtgtgctgtggaactgtgttc

SEQ ID NO: 392365 - DNA, 25 bp, Homo sapien
acctcctctggtcaccacccctctg

SEQ ID NO: 392366 - DNA, 25 bp, Homo sapien
ctcctctggtcaccacccctctgca

SEQ ID NO: 392367 - DNA, 25 bp, Homo sapien
cgggggcttcaccctgctggagcac

SEQ ID NO: 392368 - DNA, 25 bp, Homo sapien
ccgcgggggcttcaccctgctggag

SEQ ID NO: 392369 - DNA, 25 bp, Homo sapien
gcgggggcttcaccctgctggagca

SEQ ID NO: 392370 - DNA, 25 bp, Homo sapien
cgcgggggcttcaccctgctggagc

SEQ ID NO: 392371 - DNA, 25 bp, Homo sapien
agtgcctccagccacattaactcgt

SEQ ID NO: 392372 - DNA, 25 bp, Homo sapien
tgaagcccatcatcggtgtcatccg

SEQ ID NO: 392373 - DNA, 25 bp, Homo sapien
cgttttaggtgtgcttgattcactc

SEQ ID NO: 392374 - DNA, 25 bp, Homo sapien
gcgcctctaacgagtgcctcgggtg

SEQ ID NO: 392375 - DNA, 25 bp, Homo sapien
ctgcaggcatgtaaagccccccaaa

SEQ ID NO: 392376 - DNA, 25 bp, Homo sapien
aagccccccaaactacaaatgatga

SEQ ID NO: 392377 - DNA, 25 bp, Homo sapien
aaacataggtagtccagctgctgcc

SEQ ID NO: 392378 - DNA, 25 bp, Homo sapien
ccacaaacataggtagtccagctgc

SEQ ID NO: 392379 - DNA, 25 bp, Homo sapien
tgaacttgtgactcccctgcacaca

SEQ ID NO: 392380 - DNA, 25 bp, Homo sapien
atcctcacaccggaccccaagtcct

SEQ ID NO: 392381 - DNA, 25 bp, Homo sapien
cacagaaaccgagtgcaggatcctc

SEQ ID NO: 392382 - DNA, 25 bp, Homo sapien
cacaggcccacctgaacttgtgact

SEQ ID NO: 392383 - DNA, 25 bp, Homo sapien
ggcccggctggccgcacatgctcac

SEQ ID NO: 392384 - DNA, 25 bp, Homo sapien
ggcacagagtcggtgatccctgatg

SEQ ID NO: 392385 - DNA, 25 bp, Homo sapien
tcttaggtctcaggaagcgaagttc

SEQ ID NO: 392386 - DNA, 25 bp, Homo sapien
gtcggtgatccctgatgtctgctga

SEQ ID NO: 392387 - DNA, 25 bp, Homo sapien
gagcacggggctgaatcttaggtct

SEQ ID NO: 392388 - DNA, 25 bp, Homo sapien
ttgtccacccctgcgttcccagcat

SEQ ID NO: 392389 - DNA, 25 bp, Homo sapien
tttgtccacccctgcgttcccagca

SEQ ID NO: 392390 - DNA, 25 bp, Homo sapien
catccgtgggtaaacgctgctgctg

SEQ ID NO: 392391 - DNA, 25 bp, Homo sapien
gggatccatccgtgggtaaacgctg

SEQ ID NO: 392392 - DNA, 25 bp, Homo sapien
catggagatgacattgcagagggca

SEQ ID NO: 392393 - DNA, 25 bp, Homo sapien
cgtgggtaaacgctgctgctgcatg

SEQ ID NO: 392394 - DNA, 25 bp, Homo sapien
tcaatagcagaccaaccggaacaaa

SEQ ID NO: 392395 - DNA, 25 bp, Homo sapien
caatagcagaccaaccggaacaaaa

SEQ ID NO: 392396 - DNA, 25 bp, Homo sapien
agcagaccaaccggaacaaaacctg

SEQ ID NO: 392397 - DNA, 25 bp, Homo sapien
ggctttactcctccatgcttcctgt

SEQ ID NO: 392398 - DNA, 25 bp, Homo sapien
cctgtgctgaattgttgtgtagaaa

SEQ ID NO: 392399 - DNA, 25 bp, Homo sapien
tgccggcccccggttttcactgctc

SEQ ID NO: 392400 - DNA, 25 bp, Homo sapien
tgcttcctgtgctgaattgttgtgt

SEQ ID NO: 392401 - DNA, 25 bp, Homo sapien
aatttacatgacagcatatttctca

SEQ ID NO: 392402 - DNA, 25 bp, Homo sapien
gggaaaaagcaatttacatgacagc

SEQ ID NO: 392403 - DNA, 25 bp, Homo sapien
aaaagcaatttacatgacagcatat

SEQ ID NO: 392404 - DNA, 25 bp, Homo sapien
caatttacatgacagcatatttctc

SEQ ID NO: 392405 - DNA, 25 bp, Homo sapien
gtgaaaggcatgtctcacatggcgg

SEQ ID NO: 392406 - DNA, 25 bp, Homo sapien
aaggcatgtctcacatggcggcaga

SEQ ID NO: 392407 - DNA, 25 bp, Homo sapien
ggcatgtctcacatggcggcagaca

SEQ ID NO: 392408 - DNA, 25 bp, Homo sapien
catggcggcagacaagagagagagc

SEQ ID NO: 392409 - DNA, 25 bp, Homo sapien
catgtggctggggaagcctcatgat

SEQ ID NO: 392410 - DNA, 25 bp, Homo sapien
gtggctggggaagcctcatgatcat

SEQ ID NO: 392411 - DNA, 25 bp, Homo sapien
tgtggctggggaagcctcatgatca

SEQ ID NO: 392412 - DNA, 25 bp, Homo sapien
ccatgtggctggggaagcctcatga

SEQ ID NO: 392413 - DNA, 25 bp, Homo sapien
cttcagctcgagaataggcaattgg

SEQ ID NO: 392414 - DNA, 25 bp, Homo sapien
tcgagaataggcaattggcttcagc

SEQ ID NO: 392415 - DNA, 25 bp, Homo sapien
tggcttcagccggtggatggccccc

SEQ ID NO: 392416 - DNA, 25 bp, Homo sapien
gaataggcaattggcttcagccggt

SEQ ID NO: 392417 - DNA, 25 bp, Homo sapien
cggctcagccgctgcgcggggtgcg

SEQ ID NO: 392418 - DNA, 25 bp, Homo sapien
gcggtgccgaccgagaaagcggcca

SEQ ID NO: 392419 - DNA, 25 bp, Homo sapien
cggtgccgaccgagaaagcggccat

SEQ ID NO: 392420 - DNA, 25 bp, Homo sapien
tggcggtgccgaccgagaaagcggc

SEQ ID NO: 392421 - DNA, 25 bp, Homo sapien
catggcggtgccgaccgagaaagcg

SEQ ID NO: 392422 - DNA, 25 bp, Homo sapien
agtccgtgctctctgccggtgcaag

SEQ ID NO: 392423 - DNA, 25 bp, Homo sapien
ctagtccgtgctctctgccggtgca

SEQ ID NO: 392424 - DNA, 25 bp, Homo sapien
gtgcaaggggcatcccgaggctcca

SEQ ID NO: 392425 - DNA, 25 bp, Homo sapien
tccgtgctctctgccggtgcaaggg

SEQ ID NO: 392426 - DNA, 25 bp, Homo sapien
tgcagtcgcaggctccggctctctg

SEQ ID NO: 392427 - DNA, 25 bp, Homo sapien
tctctctccggcgcgcgcagaaagg

SEQ ID NO: 392428 - DNA, 25 bp, Homo sapien
gtccccaccgcgtctctctctccgg

SEQ ID NO: 392429 - DNA, 25 bp, Homo sapien
gggagagggtgtccccgggagtgca

SEQ ID NO: 392430 - DNA, 25 bp, Homo sapien
ccgccatccctctccggagctcggg

SEQ ID NO: 392431 - DNA, 25 bp, Homo sapien
tgtccagcagtgaactcgccgacac

SEQ ID NO: 392432 - DNA, 25 bp, Homo sapien
tgtgtccagcagtgaactcgccgac

SEQ ID NO: 392433 - DNA, 25 bp, Homo sapien
ccccgccatccctctccggagctcg

SEQ ID NO: 392434 - DNA, 25 bp, Homo sapien
aaccagaaagggagattcctgacca

SEQ ID NO: 392435 - DNA, 25 bp, Homo sapien
aaagggagattcctgaccacccctg

SEQ ID NO: 392436 - DNA, 25 bp, Homo sapien
ctctacgatgttggtgtgctgggcg

SEQ ID NO: 392437 - DNA, 25 bp, Homo sapien
ggcctgatgattggtttgttgtttg

SEQ ID NO: 392438 - DNA, 25 bp, Homo sapien
ggtgtgctgggcgtagacatgaagg

SEQ ID NO: 392439 - DNA, 25 bp, Homo sapien
catgaagggcgctaggataaggtga

SEQ ID NO: 392440 - DNA, 25 bp, Homo sapien
taactacacagatacacggcgtgga

SEQ ID NO: 392441 - DNA, 25 bp, Homo sapien
cacggcgtggaatacggaagacttt

SEQ ID NO: 392442 - DNA, 25 bp, Homo sapien
gcctcggggaagtaatatcagggta

SEQ ID NO: 392443 - DNA, 25 bp, Homo sapien
tcagggtagtaactacacagataca

SEQ ID NO: 392444 - DNA, 25 bp, Homo sapien
ccggagcgtgccatgcactgtgggc

SEQ ID NO: 392445 - DNA, 25 bp, Homo sapien
agcgtgccatgcactgtgggcttac

SEQ ID NO: 392446 - DNA, 25 bp, Homo sapien
cggagcgtgccatgcactgtgggct

SEQ ID NO: 392447 - DNA, 25 bp, Homo sapien
gagcgtgccatgcactgtgggctta

SEQ ID NO: 392448 - DNA, 25 bp, Homo sapien
aagaggtaactgtcggtcaaatcct

SEQ ID NO: 392449 - DNA, 25 bp, Homo sapien
caagaggtaactgtcggtcaaatcc

SEQ ID NO: 392450 - DNA, 25 bp, Homo sapien
agaggtaactgtcggtcaaatcctg

SEQ ID NO: 392451 - DNA, 25 bp, Homo sapien
gactagccggggcctaactctgctt

SEQ ID NO: 392452 - DNA, 25 bp, Homo sapien
accatcagattattgctttcagggt

SEQ ID NO: 392453 - DNA, 25 bp, Homo sapien
ccatcagattattgctttcagggtg

SEQ ID NO: 392454 - DNA, 25 bp, Homo sapien
tcaaggactagccggggcctaactc

SEQ ID NO: 392455 - DNA, 25 bp, Homo sapien
gggaatattttcctgggcgctgagc

SEQ ID NO: 392456 - DNA, 25 bp, Homo sapien
agaccctgtttggattgttcctggc

SEQ ID NO: 392457 - DNA, 25 bp, Homo sapien
agcagagtggcctgtgattgcagtt

SEQ ID NO: 392458 - DNA, 25 bp, Homo sapien
gagtggcctgtgattgcagtttgaa

SEQ ID NO: 392459 - DNA, 25 bp, Homo sapien
gacacacaccgacttgggctccgtc

SEQ ID NO: 392460 - DNA, 25 bp, Homo sapien
agacacacaccgacttgggctccgt

SEQ ID NO: 392461 - DNA, 25 bp, Homo sapien
acacacaccgacttgggctccgtca

SEQ ID NO: 392462 - DNA, 25 bp, Homo sapien
cacacaccgacttgggctccgtcat

SEQ ID NO: 392463 - DNA, 25 bp, Homo sapien
gggcttccgtgaggttattatctac

SEQ ID NO: 392464 - DNA, 25 bp, Homo sapien
cagggtccttcaggaaccgaatagg

SEQ ID NO: 392465 - DNA, 25 bp, Homo sapien
cattcagcaggtccgtctcagtggc

SEQ ID NO: 392466 - DNA, 25 bp, Homo sapien
cgaataggaaaggtccctgaattca

SEQ ID NO: 392467 - DNA, 25 bp, Homo sapien
agcttgatacacaaagcagccgccc

SEQ ID NO: 392468 - DNA, 25 bp, Homo sapien
caaacaacctgttgcctccttcaga

SEQ ID NO: 392469 - DNA, 25 bp, Homo sapien
gcgttgggaagagaagctcagcctc

SEQ ID NO: 392470 - DNA, 25 bp, Homo sapien
aatagaataaattgaccacagcagt

SEQ ID NO: 392471 - DNA, 25 bp, Homo sapien
gagatgatgccaaatacaaactccg

SEQ ID NO: 392472 - DNA, 25 bp, Homo sapien
cagagatgatgccaaatacaaactc

SEQ ID NO: 392473 - DNA, 25 bp, Homo sapien
ttggagtcgcacagagatgatgcca

SEQ ID NO: 392474 - DNA, 25 bp, Homo sapien
gatgatgccaaatacaaactccgcc

SEQ ID NO: 392475 - DNA, 25 bp, Homo sapien
ctacgtgagtgaattccttgaggga

SEQ ID NO: 392476 - DNA, 25 bp, Homo sapien
tattatatgatctagttttccctcc

SEQ ID NO: 392477 - DNA, 25 bp, Homo sapien
ttttccctccaaagacatcattagt

SEQ ID NO: 392478 - DNA, 25 bp, Homo sapien
gagaatagttcctctcacaattatg

SEQ ID NO: 392479 - DNA, 25 bp, Homo sapien
tctgtacttggctgggcttttcccc

SEQ ID NO: 392480 - DNA, 25 bp, Homo sapien
ctctcaaggtagctctggattgtaa

SEQ ID NO: 392481 - DNA, 25 bp, Homo sapien
cctctcaaggtagctctggattgta

SEQ ID NO: 392482 - DNA, 25 bp, Homo sapien
ctgtacttggctgggcttttcccct

SEQ ID NO: 392483 - DNA, 25 bp, Homo sapien
ctgacctcatttcctgcaagggcca

SEQ ID NO: 392484 - DNA, 25 bp, Homo sapien
ctcccaaagcaggactctgacctca

SEQ ID NO: 392485 - DNA, 25 bp, Homo sapien
ccaaagcaggactctgacctcattt

SEQ ID NO: 392486 - DNA, 25 bp, Homo sapien
tgacctcatttcctgcaagggccat

SEQ ID NO: 392487 - DNA, 25 bp, Homo sapien
gaaacagaaagaacgtgactcaggt

SEQ ID NO: 392488 - DNA, 25 bp, Homo sapien
ggttcactttcaagacaggcagttg

SEQ ID NO: 392489 - DNA, 25 bp, Homo sapien
aacacttctcccaaaacagtgggag

SEQ ID NO: 392490 - DNA, 25 bp, Homo sapien
ggttccacccttatcagtttacaga

SEQ ID NO: 392491 - DNA, 25 bp, Homo sapien
tgttttctcccgggcgttgagctcg

SEQ ID NO: 392492 - DNA, 25 bp, Homo sapien
tctcccgggcgttgagctcgggcaa

SEQ ID NO: 392493 - DNA, 25 bp, Homo sapien
agctcgggcaagagcgcgaacgtca

SEQ ID NO: 392494 - DNA, 25 bp, Homo sapien
aagagcgcgaacgtcaccctgcgtc

SEQ ID NO: 392495 - DNA, 25 bp, Homo sapien
cgcgcggcagcgcgcacccgccccg

SEQ ID NO: 392496 - DNA, 25 bp, Homo sapien
tagcgagcgttgaccggtagtaacc

SEQ ID NO: 392497 - DNA, 25 bp, Homo sapien
cgcggcagcgcgcacccgccccgcc

SEQ ID NO: 392498 - DNA, 25 bp, Homo sapien
acgcgcggcagcgcgcacccgcccc

SEQ ID NO: 392499 - DNA, 25 bp, Homo sapien
gcttcctggaccggtgttcctggac

SEQ ID NO: 392500 - DNA, 25 bp, Homo sapien
caggcttcctggaccggtgttcctg

SEQ ID NO: 392501 - DNA, 25 bp, Homo sapien
aggcttcctggaccggtgttcctgg

SEQ ID NO: 392502 - DNA, 25 bp, Homo sapien
ggcttcctggaccggtgttcctgga

SEQ ID NO: 392503 - DNA, 25 bp, Homo sapien
tagttatcatagatgtacccttcct

SEQ ID NO: 392504 - DNA, 25 bp, Homo sapien
tgtttttagtaatgtaacaccatag

SEQ ID NO: 392505 - DNA, 25 bp, Homo sapien
cttcttgttgcaaaggttttcatcc

SEQ ID NO: 392506 - DNA, 25 bp, Homo sapien
tgtaacaccatagttatcatagatg

SEQ ID NO: 392507 - DNA, 25 bp, Homo sapien
tctagagacttagccaactcagata

SEQ ID NO: 392508 - DNA, 25 bp, Homo sapien
tcatattctagagacttagccaact

SEQ ID NO: 392509 - DNA, 25 bp, Homo sapien
gagacttagccaactcagatattga

SEQ ID NO: 392510 - DNA, 25 bp, Homo sapien
gaaattcatattctagagacttagc

SEQ ID NO: 392511 - DNA, 25 bp, Homo sapien
gccataagtgtgaaggcagtaaaca

SEQ ID NO: 392512 - DNA, 25 bp, Homo sapien
ccataagtgtgaaggcagtaaacat

SEQ ID NO: 392513 - DNA, 25 bp, Homo sapien
caagcgtggcccgtgctggtcacgc

SEQ ID NO: 392514 - DNA, 25 bp, Homo sapien
tgcgggaacgcacatctggtgggtg

SEQ ID NO: 392515 - DNA, 25 bp, Homo sapien
gtcccctgggtggtgcgggaacgca

SEQ ID NO: 392516 - DNA, 25 bp, Homo sapien
gtgctggtcacgctgtttactctcc

SEQ ID NO: 392517 - DNA, 25 bp, Homo sapien
acccagcagggcatttttaatgcaa

SEQ ID NO: 392518 - DNA, 25 bp, Homo sapien
tgcaagagaatcccttaggaaacag

SEQ ID NO: 392519 - DNA, 25 bp, Homo sapien
cccagcagggcatttttaatgcaag

SEQ ID NO: 392520 - DNA, 25 bp, Homo sapien
atgcaagagaatcccttaggaaaca

SEQ ID NO: 392521 - DNA, 25 bp, Homo sapien
taggatcgagtgttactaaatactg

SEQ ID NO: 392522 - DNA, 25 bp, Homo sapien
tactaaatactgagagaagggctca

SEQ ID NO: 392523 - DNA, 25 bp, Homo sapien
cacagaggacggtggaaatggccga

SEQ ID NO: 392524 - DNA, 25 bp, Homo sapien
tcttctgttaggatcgagtgttact

SEQ ID NO: 392525 - DNA, 25 bp, Homo sapien
ttgatcgaattccaggccattccga

SEQ ID NO: 392526 - DNA, 25 bp, Homo sapien
ctgctgttcttgatcgaattccagg

SEQ ID NO: 392527 - DNA, 25 bp, Homo sapien
gaattccaggccattccgaggaaga

SEQ ID NO: 392528 - DNA, 25 bp, Homo sapien
ccattccgaggaagaagggaagccg

SEQ ID NO: 392529 - DNA, 25 bp, Homo sapien
gcttaaatgagttccccagatgtca

SEQ ID NO: 392530 - DNA, 25 bp, Homo sapien
caaagctatcctatatccagtgaca

SEQ ID NO: 392531 - DNA, 25 bp, Homo sapien
tggatggcgaattcagtcactgcac

SEQ ID NO: 392532 - DNA, 25 bp, Homo sapien
gcctctgtagaaactggtgcattta

SEQ ID NO: 392533 - DNA, 25 bp, Homo sapien
actgtcttagataacccctgcctga

SEQ ID NO: 392534 - DNA, 25 bp, Homo sapien
cctgcctgatagtgagagctccttg

SEQ ID NO: 392535 - DNA, 25 bp, Homo sapien
tgtaccattttggagggtcaccatc

SEQ ID NO: 392536 - DNA, 25 bp, Homo sapien
catagtcaccagtctagtccaagat

SEQ ID NO: 392537 - DNA, 25 bp, Homo sapien
caggtcgaagtgaaaatgctgggcc

SEQ ID NO: 392538 - DNA, 25 bp, Homo sapien
gcttcatgaagccaaacaacgtctg

SEQ ID NO: 392539 - DNA, 25 bp, Homo sapien
gccacagagggtgcgtatcttcaac

SEQ ID NO: 392540 - DNA, 25 bp, Homo sapien
cagtgctgctgagagcgctgtattc

SEQ ID NO: 392541 - DNA, 25 bp, Homo sapien
tgccgcagggcacgattctaagctt

SEQ ID NO: 392542 - DNA, 25 bp, Homo sapien
tatatagatctactatgccgcaggg

SEQ ID NO: 392543 - DNA, 25 bp, Homo sapien
cagccaggcggtaatctcagcaaca

SEQ ID NO: 392544 - DNA, 25 bp, Homo sapien
taaactgagtggtctggctccggag

SEQ ID NO: 392545 - DNA, 25 bp, Homo sapien
taaatgatcgcagcagccctaaaag

SEQ ID NO: 392546 - DNA, 25 bp, Homo sapien
tttcacaagacagggagaggcttgg

SEQ ID NO: 392547 - DNA, 25 bp, Homo sapien
tatatcacgcccaggtttcacaaga

SEQ ID NO: 392548 - DNA, 25 bp, Homo sapien
gccctaaaagggaggtatatcacgc

SEQ ID NO: 392549 - DNA, 25 bp, Homo sapien
gcagagagggcccaccctctgtaga

SEQ ID NO: 392550 - DNA, 25 bp, Homo sapien
aagaccacctcctggcgggagggca

SEQ ID NO: 392551 - DNA, 25 bp, Homo sapien
cctctgtagactccgggcaaaagtt

SEQ ID NO: 392552 - DNA, 25 bp, Homo sapien
gttctgtctgttgcactgctagcat

SEQ ID NO: 392553 - DNA, 25 bp, Homo sapien
tgcggcctctggatactctgacagg

SEQ ID NO: 392554 - DNA, 25 bp, Homo sapien
atctgtagccagtacacccagccag

SEQ ID NO: 392555 - DNA, 25 bp, Homo sapien
tggcggtacagacagaccaacctct

SEQ ID NO: 392556 - DNA, 25 bp, Homo sapien
gtgagtagggaccagacaccacagt

SEQ ID NO: 392557 - DNA, 25 bp, Homo sapien
gaatgcagatgggatatttgttgtg

SEQ ID NO: 392558 - DNA, 25 bp, Homo sapien
tgcagatgggatatttgttgtgaca

SEQ ID NO: 392559 - DNA, 25 bp, Homo sapien
cagatgggatatttgttgtgacatt

SEQ ID NO: 392560 - DNA, 25 bp, Homo sapien
ctcatcacccaggcacgcaggtgac

SEQ ID NO: 392561 - DNA, 25 bp, Homo sapien
tgacaatgcttgagccctgtaggcc

SEQ ID NO: 392562 - DNA, 25 bp, Homo sapien
cattttcgattttgcaggacacgca

SEQ ID NO: 392563 - DNA, 25 bp, Homo sapien
tgtaggccagacatcggcacccttt

SEQ ID NO: 392564 - DNA, 25 bp, Homo sapien
cactgagctctccagtttagcagaa

SEQ ID NO: 392565 - DNA, 25 bp, Homo sapien
tcctccatgggatcgccaggaaacc

SEQ ID NO: 392566 - DNA, 25 bp, Homo sapien
tgaccacgtgcaggatgccgcactg

SEQ ID NO: 392567 - DNA, 25 bp, Homo sapien
tccctggacttggactgaccacgtg

SEQ ID NO: 392568 - DNA, 25 bp, Homo sapien
gactttgccactgatagcgaccacc

SEQ ID NO: 392569 - DNA, 25 bp, Homo sapien
cagcttcacccgagaagcaacacaa

SEQ ID NO: 392570 - DNA, 25 bp, Homo sapien
gggttgaagtgagcatctactctga

SEQ ID NO: 392571 - DNA, 25 bp, Homo sapien
ctgaatgcctttagggccacgtgac

SEQ ID NO: 392572 - DNA, 25 bp, Homo sapien
tcacccgagaagcaacacaactcat

SEQ ID NO: 392573 - DNA, 25 bp, Homo sapien
tccaaccgcaaacatcaaaacactg

SEQ ID NO: 392574 - DNA, 25 bp, Homo sapien
ccgtttagtaaacttgcagccagca

SEQ ID NO: 392575 - DNA, 25 bp, Homo sapien
ccacatccaggaggtcagctttcca

SEQ ID NO: 392576 - DNA, 25 bp, Homo sapien
gagaagatgccatgcagacagtact

SEQ ID NO: 392577 - DNA, 25 bp, Homo sapien
ctgcagctcctatgaacccctgtgt

SEQ ID NO: 392578 - DNA, 25 bp, Homo sapien
tggactctgttatcggggtgcagcc

SEQ ID NO: 392579 - DNA, 25 bp, Homo sapien
cggaaagatggtgtgaagctgtcct

SEQ ID NO: 392580 - DNA, 25 bp, Homo sapien
aacccctgtgtgcactcggaaagat

SEQ ID NO: 392581 - DNA, 25 bp, Homo sapien
ggggctgctgcactggatgcagcct

SEQ ID NO: 392582 - DNA, 25 bp, Homo sapien
gctgcactggatgcagcctccagga

SEQ ID NO: 392583 - DNA, 25 bp, Homo sapien
ggctgctgcactggatgcagcctcc

SEQ ID NO: 392584 - DNA, 25 bp, Homo sapien
tcacccggggctgctgcactggatg

SEQ ID NO: 392585 - DNA, 25 bp, Homo sapien
gagcattcggccctctcatgggaag

SEQ ID NO: 392586 - DNA, 25 bp, Homo sapien
gaccccaggaacaggacatggcatg

SEQ ID NO: 392587 - DNA, 25 bp, Homo sapien
tggaatttgcaccaaacagagagtg

SEQ ID NO: 392588 - DNA, 25 bp, Homo sapien
gagctctcacctttgacagtgcctg

SEQ ID NO: 392589 - DNA, 25 bp, Homo sapien
tgactatggccacgacccacctgag

SEQ ID NO: 392590 - DNA, 25 bp, Homo sapien
catctgactatggccacgacccacc

SEQ ID NO: 392591 - DNA, 25 bp, Homo sapien
ctgactatggccacgacccacctga

SEQ ID NO: 392592 - DNA, 25 bp, Homo sapien
tctgactatggccacgacccacctg

SEQ ID NO: 392593 - DNA, 25 bp, Homo sapien
gatatccccaagaaagcactaagtg

SEQ ID NO: 392594 - DNA, 25 bp, Homo sapien
cttgaggcctacacagattagcggg

SEQ ID NO: 392595 - DNA, 25 bp, Homo sapien
gagcaagctctctgcaccatggagt

SEQ ID NO: 392596 - DNA, 25 bp, Homo sapien
gggtgaaccagctcgtacaatagga

SEQ ID NO: 392597 - DNA, 25 bp, Homo sapien
agtcagagagctgcggaagccagtc

SEQ ID NO: 392598 - DNA, 25 bp, Homo sapien
gaagcttgggactgccactcattac

SEQ ID NO: 392599 - DNA, 25 bp, Homo sapien
gccttaatttggatgtggagtccct

SEQ ID NO: 392600 - DNA, 25 bp, Homo sapien
ctgccaccaggtgccgccttaattt

SEQ ID NO: 392601 - DNA, 25 bp, Homo sapien
ggacctaatgagacagggacctgtg

SEQ ID NO: 392602 - DNA, 25 bp, Homo sapien
catagataggacaccggaaaatgcc

SEQ ID NO: 392603 - DNA, 25 bp, Homo sapien
attttagcttccacacgtttcaggg

SEQ ID NO: 392604 - DNA, 25 bp, Homo sapien
tgtagtatcagatcagaatccactg

SEQ ID NO: 392605 - DNA, 25 bp, Homo sapien
gccccggaaggacccataatggcca

SEQ ID NO: 392606 - DNA, 25 bp, Homo sapien
aactcaccactattgaacttcccgg

SEQ ID NO: 392607 - DNA, 25 bp, Homo sapien
atgttcatcagcgtggacttcccgg

SEQ ID NO: 392608 - DNA, 25 bp, Homo sapien
gccaggatgttcatcagcgtggact

SEQ ID NO: 392609 - DNA, 25 bp, Homo sapien
tgtagcaggacaccttccggaagca

SEQ ID NO: 392610 - DNA, 25 bp, Homo sapien
atgtagcaggacaccttccggaagc

SEQ ID NO: 392611 - DNA, 25 bp, Homo sapien
gcctcctgcacagtgagatgcggca

SEQ ID NO: 392612 - DNA, 25 bp, Homo sapien
gcacagtgagatgcggcagcagcat

SEQ ID NO: 392613 - DNA, 25 bp, Homo sapien
ccagtggtgcgagttaggaattcca

SEQ ID NO: 392614 - DNA, 25 bp, Homo sapien
catttagaggtaagaaagccccagg

SEQ ID NO: 392615 - DNA, 25 bp, Homo sapien
cataaggccactagccacggtgcaa

SEQ ID NO: 392616 - DNA, 25 bp, Homo sapien
cacagtgcagctaggcataaggcca

SEQ ID NO: 392617 - DNA, 25 bp, Homo sapien
cctgaagcttcagatgtgccgacac

SEQ ID NO: 392618 - DNA, 25 bp, Homo sapien
tcctgaagcttcagatgtgccgaca

SEQ ID NO: 392619 - DNA, 25 bp, Homo sapien
tctcctgaagcttcagatgtgccga

SEQ ID NO: 392620 - DNA, 25 bp, Homo sapien
ctcctgaagcttcagatgtgccgac

SEQ ID NO: 392621 - DNA, 25 bp, Homo sapien
gagccattggcactaacccggcaaa

SEQ ID NO: 392622 - DNA, 25 bp, Homo sapien
tagctattacagatgaccggagagg

SEQ ID NO: 392623 - DNA, 25 bp, Homo sapien
ccagcactagctgcagtggagagga

SEQ ID NO: 392624 - DNA, 25 bp, Homo sapien
gggaaatgccggaaatagaattgct

SEQ ID NO: 392625 - DNA, 25 bp, Homo sapien
ttgttcaatccagccgaagaggaat

SEQ ID NO: 392626 - DNA, 25 bp, Homo sapien
ctctctgcattgttcaatccagccg

SEQ ID NO: 392627 - DNA, 25 bp, Homo sapien
tctgcattgttcaatccagccgaag

SEQ ID NO: 392628 - DNA, 25 bp, Homo sapien
cattgttcaatccagccgaagagga

SEQ ID NO: 392629 - DNA, 25 bp, Homo sapien
tccaccctcacggaggggatgctgg

SEQ ID NO: 392630 - DNA, 25 bp, Homo sapien
ccgctgtgggtgcctttccctccgc

SEQ ID NO: 392631 - DNA, 25 bp, Homo sapien
ccaccctcacggaggggatgctgga

SEQ ID NO: 392632 - DNA, 25 bp, Homo sapien
tgtgggtgcctttccctccgcaccc

SEQ ID NO: 392633 - DNA, 25 bp, Homo sapien
tcttggccgactgagtggctctggt

SEQ ID NO: 392634 - DNA, 25 bp, Homo sapien
tggtcttcccaggacgaggcctcca

SEQ ID NO: 392635 - DNA, 25 bp, Homo sapien
gatcttctggaaccactgggcgacg

SEQ ID NO: 392636 - DNA, 25 bp, Homo sapien
agctggcatcgactgctggtcttcc

SEQ ID NO: 392637 - DNA, 25 bp, Homo sapien
tctgagggccgccaacccagaaaca

SEQ ID NO: 392638 - DNA, 25 bp, Homo sapien
ctctgagggccgccaacccagaaac

SEQ ID NO: 392639 - DNA, 25 bp, Homo sapien
ctgagggccgccaacccagaaacag

SEQ ID NO: 392640 - DNA, 25 bp, Homo sapien
cagtgccccatacggagaaggtgtc

SEQ ID NO: 392641 - DNA, 25 bp, Homo sapien
ggtcagatacaagggcctgcatcct

SEQ ID NO: 392642 - DNA, 25 bp, Homo sapien
cagggcacgttcctcactgctaagc

SEQ ID NO: 392643 - DNA, 25 bp, Homo sapien
gtcctgatgagggacagagactgcc

SEQ ID NO: 392644 - DNA, 25 bp, Homo sapien
gggctcatcgaagaacatgactgga

SEQ ID NO: 392645 - DNA, 25 bp, Homo sapien
cgcgtgttggcgcaagacagcaagc

SEQ ID NO: 392646 - DNA, 25 bp, Homo sapien
gatggccaggcgcttgcgctgacca

SEQ ID NO: 392647 - DNA, 25 bp, Homo sapien
gcaagcccagcgctgtcagtatctc

SEQ ID NO: 392648 - DNA, 25 bp, Homo sapien
ctggtcgaacagctcgaagagtttg

SEQ ID NO: 392649 - DNA, 25 bp, Homo sapien
tgagcgagccctttcatcagcgaga

SEQ ID NO: 392650 - DNA, 25 bp, Homo sapien
aacagctcgaagagtttggcgctgg

SEQ ID NO: 392651 - DNA, 25 bp, Homo sapien
gtgcaaatgatggagcgaccccctt

SEQ ID NO: 392652 - DNA, 25 bp, Homo sapien
tggtaggttgggcagttcagaccca

SEQ ID NO: 392653 - DNA, 25 bp, Homo sapien
caaatatggcacaagattgcagact

SEQ ID NO: 392654 - DNA, 25 bp, Homo sapien
cagacttttccccggtacacacatt

SEQ ID NO: 392655 - DNA, 25 bp, Homo sapien
cacacattgtccttgactcaggacg

SEQ ID NO: 392656 - DNA, 25 bp, Homo sapien
agctggtacggaggccaccacacct

SEQ ID NO: 392657 - DNA, 25 bp, Homo sapien
agctacccgcttcctcccagctggt

SEQ ID NO: 392658 - DNA, 25 bp, Homo sapien
cccgcttcctcccagctggtacgga

SEQ ID NO: 392659 - DNA, 25 bp, Homo sapien
ctctggcagagccagctacccgctt

SEQ ID NO: 392660 - DNA, 25 bp, Homo sapien
atcacccccgaggtctctcttgtgg

SEQ ID NO: 392661 - DNA, 25 bp, Homo sapien
tgatcaccgtactcgccggatgcaa

SEQ ID NO: 392662 - DNA, 25 bp, Homo sapien
caaagaaaagggttcacctcggcat

SEQ ID NO: 392663 - DNA, 25 bp, Homo sapien
tcagagggccggtgccaaagaaaag

SEQ ID NO: 392664 - DNA, 25 bp, Homo sapien
gggagcgggtgaaagccagtccgga

SEQ ID NO: 392665 - DNA, 25 bp, Homo sapien
cagggggcttcgggatttgcattac

SEQ ID NO: 392666 - DNA, 25 bp, Homo sapien
ttcttgctcggaaagagctctcatg

SEQ ID NO: 392667 - DNA, 25 bp, Homo sapien
gtgaaagccagtccggagccacggc

SEQ ID NO: 392668 - DNA, 25 bp, Homo sapien
gcagaactgcgtgaggcagctggca

SEQ ID NO: 392669 - DNA, 25 bp, Homo sapien
gaggatgcagaactgcgtgaggcag

SEQ ID NO: 392670 - DNA, 25 bp, Homo sapien
ggatgcagaactgcgtgaggcagct

SEQ ID NO: 392671 - DNA, 25 bp, Homo sapien
ggcagccttccatggacgaggagtc

SEQ ID NO: 392672 - DNA, 25 bp, Homo sapien
agaccttcttggcttcgttcccgat

SEQ ID NO: 392673 - DNA, 25 bp, Homo sapien
tgtcagaacagtaggcatgagggcc

SEQ ID NO: 392674 - DNA, 25 bp, Homo sapien
cagcaggccaatgaggaggccgatc

SEQ ID NO: 392675 - DNA, 25 bp, Homo sapien
ggaagccggagttgctcaagacctt

SEQ ID NO: 392676 - DNA, 25 bp, Homo sapien
tcaggtgttcccgaagaaagactcc

SEQ ID NO: 392677 - DNA, 25 bp, Homo sapien
tgtaccagtagttcaggtgttcccg

SEQ ID NO: 392678 - DNA, 25 bp, Homo sapien
tgttcccgaagaaagactcccatct

SEQ ID NO: 392679 - DNA, 25 bp, Homo sapien
cagtagttcaggtgttcccgaagaa

SEQ ID NO: 392680 - DNA, 25 bp, Homo sapien
tcatggtgcccagcgcggcaaacag

SEQ ID NO: 392681 - DNA, 25 bp, Homo sapien
gacgtcatccagtacacgatgctgc

SEQ ID NO: 392682 - DNA, 25 bp, Homo sapien
agcacaaagcgcacggcgtcggacg

SEQ ID NO: 392683 - DNA, 25 bp, Homo sapien
cgtcggacggctgcgacgtcatcca

SEQ ID NO: 392684 - DNA, 25 bp, Homo sapien
aggcggctccgatcagcaggcccag

SEQ ID NO: 392685 - DNA, 25 bp, Homo sapien
gtggaggcggctccgatcagcaggc

SEQ ID NO: 392686 - DNA, 25 bp, Homo sapien
acgtggaggcggctccgatcagcag

SEQ ID NO: 392687 - DNA, 25 bp, Homo sapien
cagggacgtggaggcggctccgatc

SEQ ID NO: 392688 - DNA, 25 bp, Homo sapien
gatcctgaccctcgacaatgcgggc

SEQ ID NO: 392689 - DNA, 25 bp, Homo sapien
gctgcccgctgtgcgcactgtggaa

SEQ ID NO: 392690 - DNA, 25 bp, Homo sapien
cccgctgtgcgcactgtggaagcca

SEQ ID NO: 392691 - DNA, 25 bp, Homo sapien
aagccagctgatcctgaccctcgac

SEQ ID NO: 392692 - DNA, 25 bp, Homo sapien
cttctgggcagggtaatgatgatgc

SEQ ID NO: 392693 - DNA, 25 bp, Homo sapien
tgtggggtcaccatctctgaggacc

SEQ ID NO: 392694 - DNA, 25 bp, Homo sapien
tgcttaatgtggcagaaggtgcagc

SEQ ID NO: 392695 - DNA, 25 bp, Homo sapien
aaggtgcagcgttcccgaggtgtgg

SEQ ID NO: 392696 - DNA, 25 bp, Homo sapien
gacagatgtagcagaacctgcagcc

SEQ ID NO: 392697 - DNA, 25 bp, Homo sapien
ggacagatgtagcagaacctgcagc

SEQ ID NO: 392698 - DNA, 25 bp, Homo sapien
aggacagatgtagcagaacctgcag

SEQ ID NO: 392699 - DNA, 25 bp, Homo sapien
acagatgtagcagaacctgcagcct

SEQ ID NO: 392700 - DNA, 25 bp, Homo sapien
aacaggagcaccgggatggctgtca

SEQ ID NO: 392701 - DNA, 25 bp, Homo sapien
taggagatgtaggacatccactgta

SEQ ID NO: 392702 - DNA, 25 bp, Homo sapien
acgaagaaccccgagaacaggagca

SEQ ID NO: 392703 - DNA, 25 bp, Homo sapien
taggacatccactgtaggtacgtgg

SEQ ID NO: 392704 - DNA, 25 bp, Homo sapien
tcagcacttgttaggagcactcggc

SEQ ID NO: 392705 - DNA, 25 bp, Homo sapien
gaactagcaggaagatggaaggcct

SEQ ID NO: 392706 - DNA, 25 bp, Homo sapien
tgtgagcccctcacgctgttggaga

SEQ ID NO: 392707 - DNA, 25 bp, Homo sapien
tctcggcaacgtccagaacacttgg

SEQ ID NO: 392708 - DNA, 25 bp, Homo sapien
gagcggtacatattcactggtgaaa

SEQ ID NO: 392709 - DNA, 25 bp, Homo sapien
aagacaaacacgtgcaacagctcca

SEQ ID NO: 392710 - DNA, 25 bp, Homo sapien
cacgccgttggctgaaggtcaatgt

SEQ ID NO: 392711 - DNA, 25 bp, Homo sapien
tgttggagcacacgcagattgtcga

SEQ ID NO: 392712 - DNA, 25 bp, Homo sapien
cagatcttcccggtctaagccatag

SEQ ID NO: 392713 - DNA, 25 bp, Homo sapien
atggagaggatgaccccttcgaacc

SEQ ID NO: 392714 - DNA, 25 bp, Homo sapien
gaagtggcacgtctcgtcgatgtca

SEQ ID NO: 392715 - DNA, 25 bp, Homo sapien
aatcccgagtacgatgaagtccagg

SEQ ID NO: 392716 - DNA, 25 bp, Homo sapien
agtctctgtgtcgtcggtcgggcac

SEQ ID NO: 392717 - DNA, 25 bp, Homo sapien
tcctcgattctagacgtgccctcgg

SEQ ID NO: 392718 - DNA, 25 bp, Homo sapien
gccacagtgtctaatcttcctgttt

SEQ ID NO: 392719 - DNA, 25 bp, Homo sapien
agagtggctgagcacgagacaccca

SEQ ID NO: 392720 - DNA, 25 bp, Homo sapien
gcgattgatcgacttttggcttgca

SEQ ID NO: 392721 - DNA, 25 bp, Homo sapien
aaatggaatcgctccatgctcggac

SEQ ID NO: 392722 - DNA, 25 bp, Homo sapien
catggctcagtggagatggtgtcca

SEQ ID NO: 392723 - DNA, 25 bp, Homo sapien
cctggtgctaaggagcgactggact

SEQ ID NO: 392724 - DNA, 25 bp, Homo sapien
tctgatgccatctcgttggcctcct

SEQ ID NO: 392725 - DNA, 25 bp, Homo sapien
cctcttgcacagttagcccatcttt

SEQ ID NO: 392726 - DNA, 25 bp, Homo sapien
cagttagcccatctttcactgctgg

SEQ ID NO: 392727 - DNA, 25 bp, Homo sapien
caaaggtcgtgcctgaatttcccta

SEQ ID NO: 392728 - DNA, 25 bp, Homo sapien
caaaggttacgaggaaaatgcccag

SEQ ID NO: 392729 - DNA, 25 bp, Homo sapien
gggacccttgctgaacctggaagag

SEQ ID NO: 392730 - DNA, 25 bp, Homo sapien
catcggaagccctgattctaggaga

SEQ ID NO: 392731 - DNA, 25 bp, Homo sapien
gagggcttaggtgctctccgaaacc

SEQ ID NO: 392732 - DNA, 25 bp, Homo sapien
taatactatcaaacacacgcctgga

SEQ ID NO: 392733 - DNA, 25 bp, Homo sapien
cacacagggagtttcggagaattca

SEQ ID NO: 392734 - DNA, 25 bp, Homo sapien
tctccacggagaggtacctgtcacg

SEQ ID NO: 392735 - DNA, 25 bp, Homo sapien
cacgagtactctgatgcaaggccac

SEQ ID NO: 392736 - DNA, 25 bp, Homo sapien
ttttcttcttgcagtaaaggctgat

SEQ ID NO: 392737 - DNA, 25 bp, Homo sapien
ttcttttcttcttgcagtaaaggct

SEQ ID NO: 392738 - DNA, 25 bp, Homo sapien
tcttttcttcttgcagtaaaggctg

SEQ ID NO: 392739 - DNA, 25 bp, Homo sapien
cttttcttcttgcagtaaaggctga

SEQ ID NO: 392740 - DNA, 25 bp, Homo sapien
ttcattgcgttctaattcggctggc

SEQ ID NO: 392741 - DNA, 25 bp, Homo sapien
tatatttatacgctctgcgcctccc

SEQ ID NO: 392742 - DNA, 25 bp, Homo sapien
ttcggctggcatttgactaaggcct

SEQ ID NO: 392743 - DNA, 25 bp, Homo sapien
ggttttgactatactcttcccatct

SEQ ID NO: 392744 - DNA, 25 bp, Homo sapien
gagaaagggctcatctacagccacg

SEQ ID NO: 392745 - DNA, 25 bp, Homo sapien
catcgacttaggagaatgcaaagcc

SEQ ID NO: 392746 - DNA, 25 bp, Homo sapien
tcccagagggacaacaaacgcattc

SEQ ID NO: 392747 - DNA, 25 bp, Homo sapien
tgaagcatctgacgctgaacacagg

SEQ ID NO: 392748 - DNA, 25 bp, Homo sapien
cacacagacgatggtggcgcgctat

SEQ ID NO: 392749 - DNA, 25 bp, Homo sapien
gagatctgatctcgtaacctcaggg

SEQ ID NO: 392750 - DNA, 25 bp, Homo sapien
tactgtgtgcagtatcagggccacg

SEQ ID NO: 392751 - DNA, 25 bp, Homo sapien
caaatacatatatgcccgtggctgt

SEQ ID NO: 392752 - DNA, 25 bp, Homo sapien
catcctagggtctgtctgggttcaa

SEQ ID NO: 392753 - DNA, 25 bp, Homo sapien
gcacgcctttgcacgctgattagag

SEQ ID NO: 392754 - DNA, 25 bp, Homo sapien
ctctgtggtccgtaaggtgcagtca

SEQ ID NO: 392755 - DNA, 25 bp, Homo sapien
tgttccagtggcgtgagacaaccaa

SEQ ID NO: 392756 - DNA, 25 bp, Homo sapien
ggtgccgcgcggctgcatggatgct

SEQ ID NO: 392757 - DNA, 25 bp, Homo sapien
tccgaagacggggtgccgcgcggct

SEQ ID NO: 392758 - DNA, 25 bp, Homo sapien
gattctggagtgctccgaagacggg

SEQ ID NO: 392759 - DNA, 25 bp, Homo sapien
ggattctggagtgctccgaagacgg

SEQ ID NO: 392760 - DNA, 25 bp, Homo sapien
tgcacgggttctagagcgctccgat

SEQ ID NO: 392761 - DNA, 25 bp, Homo sapien
tgataaagatgtgccagacgctgcg

SEQ ID NO: 392762 - DNA, 25 bp, Homo sapien
catggattctggagcactctgacga

SEQ ID NO: 392763 - DNA, 25 bp, Homo sapien
tagaacgctatgacgaggagatgcc

SEQ ID NO: 392764 - DNA, 25 bp, Homo sapien
caaggtgtggctggcacatctgatc

SEQ ID NO: 392765 - DNA, 25 bp, Homo sapien
ggctggcacatctgatcttcaatgc

SEQ ID NO: 392766 - DNA, 25 bp, Homo sapien
tggcacatctgatcttcaatgccat

SEQ ID NO: 392767 - DNA, 25 bp, Homo sapien
cgagcaccaaggtgtggctggcaca

SEQ ID NO: 392768 - DNA, 25 bp, Homo sapien
aggattcataatttccaatggcgag

SEQ ID NO: 392769 - DNA, 25 bp, Homo sapien
gagttcttgcctccgaaatgagtgg

SEQ ID NO: 392770 - DNA, 25 bp, Homo sapien
catcactgtattccaaggattcata

SEQ ID NO: 392771 - DNA, 25 bp, Homo sapien
cccatgtgggcttccataagtagca

SEQ ID NO: 392772 - DNA, 25 bp, Homo sapien
agagccgggaccaggaatcctctcc

SEQ ID NO: 392773 - DNA, 25 bp, Homo sapien
gccgggaccaggaatcctctcctct

SEQ ID NO: 392774 - DNA, 25 bp, Homo sapien
gagccgggaccaggaatcctctcct

SEQ ID NO: 392775 - DNA, 25 bp, Homo sapien
cgggaccaggaatcctctcctctgc

SEQ ID NO: 392776 - DNA, 25 bp, Homo sapien
tggaaggcaggttgggctctcccat

SEQ ID NO: 392777 - DNA, 25 bp, Homo sapien
tctggaaggcaggttgggctctccc

SEQ ID NO: 392778 - DNA, 25 bp, Homo sapien
tgtgggaatgcaggctctggaaggc

SEQ ID NO: 392779 - DNA, 25 bp, Homo sapien
gctctggaaggcaggttgggctctc

SEQ ID NO: 392780 - DNA, 25 bp, Homo sapien
gcacggcctacagctctgacaacag

SEQ ID NO: 392781 - DNA, 25 bp, Homo sapien
gggcccgatgcccactaccgcacgg

SEQ ID NO: 392782 - DNA, 25 bp, Homo sapien
ctaccgcacggcctacagctctgac

SEQ ID NO: 392783 - DNA, 25 bp, Homo sapien
gcccactaccgcacggcctacagct

SEQ ID NO: 392784 - DNA, 25 bp, Homo sapien
acaatgaccacgcatccgggaggtg

SEQ ID NO: 392785 - DNA, 25 bp, Homo sapien
aggtgaaaggttgcagccccggcat

SEQ ID NO: 392786 - DNA, 25 bp, Homo sapien
tgtgcttgttatatgcacgtgacaa

SEQ ID NO: 392787 - DNA, 25 bp, Homo sapien
ggacccatgctcagcttgtgcttgt

SEQ ID NO: 392788 - DNA, 25 bp, Homo sapien
agaaactccttattgtaattaaatg

SEQ ID NO: 392789 - DNA, 25 bp, Homo sapien
catttaattacaataaggagtttct

SEQ ID NO: 392790 - DNA, 25 bp, Homo sapien
gcatgtgccacatcaactctgagtt

SEQ ID NO: 392791 - DNA, 25 bp, Homo sapien
caataccagaaaactgagcggtgat

SEQ ID NO: 392792 - DNA, 25 bp, Homo sapien
tgagcggtgatgcagaccctataac

SEQ ID NO: 392793 - DNA, 25 bp, Homo sapien
tctgctgcttgagtaatcgagtgac

SEQ ID NO: 392794 - DNA, 25 bp, Homo sapien
tcgtgatgactcaggaagggtcttc

SEQ ID NO: 392795 - DNA, 25 bp, Homo sapien
actcaggaagggtcttcgagcctct

SEQ ID NO: 392796 - DNA, 25 bp, Homo sapien
attcaggtcgtgatgactcaggaag

SEQ ID NO: 392797 - DNA, 25 bp, Homo sapien
tgtgcagagtgaggggcggcaccca

SEQ ID NO: 392798 - DNA, 25 bp, Homo sapien
gcagactggagtgcatcacacggaa

SEQ ID NO: 392799 - DNA, 25 bp, Homo sapien
tatttctggccgtcagtccatgcct

SEQ ID NO: 392800 - DNA, 25 bp, Homo sapien
tgcttcctggtagagcaggtctggc

SEQ ID NO: 392801 - DNA, 25 bp, Homo sapien
tgtcggcccaggactggctcagtgc

SEQ ID NO: 392802 - DNA, 25 bp, Homo sapien
gcaccaatgcattcagggactgtct

SEQ ID NO: 392803 - DNA, 25 bp, Homo sapien
gaaggccgagagtggctgcggcttc

SEQ ID NO: 392804 - DNA, 25 bp, Homo sapien
ctgcaccaatgcattcagggactgt

SEQ ID NO: 392805 - DNA, 25 bp, Homo sapien
aggtatgagccaagtccgaaggccg

SEQ ID NO: 392806 - DNA, 25 bp, Homo sapien
ctcaatgtacttgggaatcacttgg

SEQ ID NO: 392807 - DNA, 25 bp, Homo sapien
tccgaggtttcaggagggacgtgaa

SEQ ID NO: 392808 - DNA, 25 bp, Homo sapien
tcaactcaatgtacttgggaatcac

SEQ ID NO: 392809 - DNA, 25 bp, Homo sapien
aactcaatgtacttgggaatcactt

SEQ ID NO: 392810 - DNA, 25 bp, Homo sapien
tagccagggactcatggagaccagc

SEQ ID NO: 392811 - DNA, 25 bp, Homo sapien
atgatagccagggactcatggagac

SEQ ID NO: 392812 - DNA, 25 bp, Homo sapien
gcggccgagtggacccgtggtcctg

SEQ ID NO: 392813 - DNA, 25 bp, Homo sapien
tcatggagaccagcaatcggatggg

SEQ ID NO: 392814 - DNA, 25 bp, Homo sapien
caccagccagtgttgtcttagcctc

SEQ ID NO: 392815 - DNA, 25 bp, Homo sapien
cctgccctccatcgggcagagccca

SEQ ID NO: 392816 - DNA, 25 bp, Homo sapien
agaacgcgagagtcccggagccctc

SEQ ID NO: 392817 - DNA, 25 bp, Homo sapien
atgagctgccgcgtgccctgccctc

SEQ ID NO: 392818 - DNA, 25 bp, Homo sapien
agtcaagtactcttctgcccaaggg

SEQ ID NO: 392819 - DNA, 25 bp, Homo sapien
caagtactcttctgcccaagggctg

SEQ ID NO: 392820 - DNA, 25 bp, Homo sapien
ctggaagtcaagtactcttctgccc

SEQ ID NO: 392821 - DNA, 25 bp, Homo sapien
ggaagtcaagtactcttctgcccaa

SEQ ID NO: 392822 - DNA, 25 bp, Homo sapien
cacggatgagctgacaccatcgcag

SEQ ID NO: 392823 - DNA, 25 bp, Homo sapien
gacacggatgagctgacaccatcgc

SEQ ID NO: 392824 - DNA, 25 bp, Homo sapien
acggatgagctgacaccatcgcagg

SEQ ID NO: 392825 - DNA, 25 bp, Homo sapien
caggacggccgccagttttccacag

SEQ ID NO: 392826 - DNA, 25 bp, Homo sapien
atgtgaattttctgtgcctcccggg

SEQ ID NO: 392827 - DNA, 25 bp, Homo sapien
ttctcaggcagttgtctgcaggcca

SEQ ID NO: 392828 - DNA, 25 bp, Homo sapien
ggccacttggcatgaggctctaggt

SEQ ID NO: 392829 - DNA, 25 bp, Homo sapien
ggctctaggtgcaggaacgtcttta

SEQ ID NO: 392830 - DNA, 25 bp, Homo sapien
cctgtcagcctcatctccatggaga

SEQ ID NO: 392831 - DNA, 25 bp, Homo sapien
agcccctcctgctgaagatgggaca

SEQ ID NO: 392832 - DNA, 25 bp, Homo sapien
ctccatggagagcagcccctcctgc

SEQ ID NO: 392833 - DNA, 25 bp, Homo sapien
agagcagcccctcctgctgaagatg

SEQ ID NO: 392834 - DNA, 25 bp, Homo sapien
ccatgggctgggtcccaggtgccat

SEQ ID NO: 392835 - DNA, 25 bp, Homo sapien
gaaggccatgggctgggtcccaggt

SEQ ID NO: 392836 - DNA, 25 bp, Homo sapien
aggccatgggctgggtcccaggtgc

SEQ ID NO: 392837 - DNA, 25 bp, Homo sapien
gccatgggctgggtcccaggtgcca

SEQ ID NO: 392838 - DNA, 25 bp, Homo sapien
agagagcctggaggtacttgacccg

SEQ ID NO: 392839 - DNA, 25 bp, Homo sapien
gtacttgacccggacccagaggagc

SEQ ID NO: 392840 - DNA, 25 bp, Homo sapien
agagttttcatggatcgagtccctg

SEQ ID NO: 392841 - DNA, 25 bp, Homo sapien
gttgcccagtggtgaacagtcagca

SEQ ID NO: 392842 - DNA, 25 bp, Homo sapien
tatgacaacacaggcttccgccagg

SEQ ID NO: 392843 - DNA, 25 bp, Homo sapien
gaagtggtctcttttgcatgggtca

SEQ ID NO: 392844 - DNA, 25 bp, Homo sapien
aggtggtcgcagcaggaatcctgaa

SEQ ID NO: 392845 - DNA, 25 bp, Homo sapien
gtctcttttgcatgggtcaggtggt

SEQ ID NO: 392846 - DNA, 25 bp, Homo sapien
aagtggcagaagtggagtggagatg

SEQ ID NO: 392847 - DNA, 25 bp, Homo sapien
agaagtggcagaagtggagtggaga

SEQ ID NO: 392848 - DNA, 25 bp, Homo sapien
tgtggtcatgggagggtggcagaag

SEQ ID NO: 392849 - DNA, 25 bp, Homo sapien
tcaagttctgagtgtggtcatggga

SEQ ID NO: 392850 - DNA, 25 bp, Homo sapien
ctgcaaccaaggagccctggcccat

SEQ ID NO: 392851 - DNA, 25 bp, Homo sapien
catctcgtagctgactgtttcctgg

SEQ ID NO: 392852 - DNA, 25 bp, Homo sapien
tgtggcctgtccgttcttcccacag

SEQ ID NO: 392853 - DNA, 25 bp, Homo sapien
tgggctttccacacaacatctcgta

SEQ ID NO: 392854 - DNA, 25 bp, Homo sapien
ctggtgtgtggcctgtccgttcttc

SEQ ID NO: 392855 - DNA, 25 bp, Homo sapien
ctctctacccctgggtggggtgaag

SEQ ID NO: 392856 - DNA, 25 bp, Homo sapien
ccatgccctttggattcctgctggc

SEQ ID NO: 392857 - DNA, 25 bp, Homo sapien
gccctttggattcctgctggctcac

SEQ ID NO: 392858 - DNA, 25 bp, Homo sapien
tctgcccatgccctttggattcctg

SEQ ID NO: 392859 - DNA, 25 bp, Homo sapien
ctctcgcagaggttctgcatcttct

SEQ ID NO: 392860 - DNA, 25 bp, Homo sapien
gctctcgcagaggttctgcatcttc

SEQ ID NO: 392861 - DNA, 25 bp, Homo sapien
tctcgcagaggttctgcatcttctg

SEQ ID NO: 392862 - DNA, 25 bp, Homo sapien
ttcacgtcgcgatggatccagaccc

SEQ ID NO: 392863 - DNA, 25 bp, Homo sapien
catcatgcgacaaagacaaagcggg

SEQ ID NO: 392864 - DNA, 25 bp, Homo sapien
gcagtccctgatagcaaagcagaca

SEQ ID NO: 392865 - DNA, 25 bp, Homo sapien
caaagacatctcgaggcagtccctg

SEQ ID NO: 392866 - DNA, 25 bp, Homo sapien
gcccgaggtatgtgcagggcactct

SEQ ID NO: 392867 - DNA, 25 bp, Homo sapien
catggagccgtgttctataggcaac

SEQ ID NO: 392868 - DNA, 25 bp, Homo sapien
tactgttctgcacagaaaagctcgg

SEQ ID NO: 392869 - DNA, 25 bp, Homo sapien
tgtgttcacacgaaagcccgaggta

SEQ ID NO: 392870 - DNA, 25 bp, Homo sapien
gaacagtagtgcctgatagactcct

SEQ ID NO: 392871 - DNA, 25 bp, Homo sapien
caaatgccaagacgacctcagaggt

SEQ ID NO: 392872 - DNA, 25 bp, Homo sapien
tgctgagagtgaggtctgggaaaca

SEQ ID NO: 392873 - DNA, 25 bp, Homo sapien
ccttgcagtgaccaatgttgagttc

SEQ ID NO: 392874 - DNA, 25 bp, Homo sapien
actcgtgccgagtcatggcccttgt

SEQ ID NO: 392875 - DNA, 25 bp, Homo sapien
aaggactgcctggacgcatctctca

SEQ ID NO: 392876 - DNA, 25 bp, Homo sapien
tctcaggcgtttgccgtcagcacat

SEQ ID NO: 392877 - DNA, 25 bp, Homo sapien
tgggacggagaaagtaagactgtct

SEQ ID NO: 392878 - DNA, 25 bp, Homo sapien
ctgtcccgccagagctgtactccag

SEQ ID NO: 392879 - DNA, 25 bp, Homo sapien
cccgccagagctgtactccagcggg

SEQ ID NO: 392880 - DNA, 25 bp, Homo sapien
ccagagctgtactccagcggggagc

SEQ ID NO: 392881 - DNA, 25 bp, Homo sapien
ttaggagtgaaagtgcattccagac

SEQ ID NO: 392882 - DNA, 25 bp, Homo sapien
tcttcctgcccttaggccaagaagc

SEQ ID NO: 392883 - DNA, 25 bp, Homo sapien
cttcctgcccttaggccaagaagct

SEQ ID NO: 392884 - DNA, 25 bp, Homo sapien
gagaccttggcgtagagctgcgtct

SEQ ID NO: 392885 - DNA, 25 bp, Homo sapien
gggctgctgcggctcttgagcttgt

SEQ ID NO: 392886 - DNA, 25 bp, Homo sapien
cttgttggagaccttggcgtagagc

SEQ ID NO: 392887 - DNA, 25 bp, Homo sapien
gaccttggcgtagagctgcgtctcc

SEQ ID NO: 392888 - DNA, 25 bp, Homo sapien
ctccgccgtcttcctccccgtggct

SEQ ID NO: 392889 - DNA, 25 bp, Homo sapien
ccccgtggctgccaacgctttcagc

SEQ ID NO: 392890 - DNA, 25 bp, Homo sapien
ctccccgtggctgccaacgctttca

SEQ ID NO: 392891 - DNA, 25 bp, Homo sapien
tccccgtggctgccaacgctttcag

SEQ ID NO: 392892 - DNA, 25 bp, Homo sapien
agagtgtcacgtgtgggaagacctc

SEQ ID NO: 392893 - DNA, 25 bp, Homo sapien
tttgcacactggcgcttgctctctc

SEQ ID NO: 392894 - DNA, 25 bp, Homo sapien
tgaagaagtcacagagtgtcacgtg

SEQ ID NO: 392895 - DNA, 25 bp, Homo sapien
gtcgtctagggaagggtcattgcaa

SEQ ID NO: 392896 - DNA, 25 bp, Homo sapien
tggcgaaggtcatggcgaattcccg

SEQ ID NO: 392897 - DNA, 25 bp, Homo sapien
cactgacgaagaagccgaggtagct

SEQ ID NO: 392898 - DNA, 25 bp, Homo sapien
ttcagcgcctcgtacaggcattcca

SEQ ID NO: 392899 - DNA, 25 bp, Homo sapien
cgaattcccggatgacgtctgcggg

SEQ ID NO: 392900 - DNA, 25 bp, Homo sapien
tcagcctcaggttagggccatgtcc

SEQ ID NO: 392901 - DNA, 25 bp, Homo sapien
ctgaaaatccagaagcgggaaacgg

SEQ ID NO: 392902 - DNA, 25 bp, Homo sapien
acgaaggaggctctagttaaattgc

SEQ ID NO: 392903 - DNA, 25 bp, Homo sapien
atgtagtggctcacgaaggaggctc

SEQ ID NO: 392904 - DNA, 25 bp, Homo sapien
ggccaggatctgtgcttcatacatg

SEQ ID NO: 392905 - DNA, 25 bp, Homo sapien
aagctgccatccaagtggaagccca

SEQ ID NO: 392906 - DNA, 25 bp, Homo sapien
gccaggatctgtgcttcatacatgt

SEQ ID NO: 392907 - DNA, 25 bp, Homo sapien
ttcagggatggatttacaggccagg

SEQ ID NO: 392908 - DNA, 25 bp, Homo sapien
tgtgctctccccgaaagctcctggg

SEQ ID NO: 392909 - DNA, 25 bp, Homo sapien
gtgctctccccgaaagctcctggga

SEQ ID NO: 392910 - DNA, 25 bp, Homo sapien
gctgtgctctccccgaaagctcctg

SEQ ID NO: 392911 - DNA, 25 bp, Homo sapien
ctctccccgaaagctcctgggaagg

SEQ ID NO: 392912 - DNA, 25 bp, Homo sapien
cagatgcagctgtttggtgcaaggc

SEQ ID NO: 392913 - DNA, 25 bp, Homo sapien
agtagagtgctgcggtccactggca

SEQ ID NO: 392914 - DNA, 25 bp, Homo sapien
caaagcgcatgtctcgggagtagag

SEQ ID NO: 392915 - DNA, 25 bp, Homo sapien
cttgtgggccaaggtcagatgcagc

SEQ ID NO: 392916 - DNA, 25 bp, Homo sapien
agcccgtccgctgtgagatcccaat

SEQ ID NO: 392917 - DNA, 25 bp, Homo sapien
cgatccgtgtagttttccggcagga

SEQ ID NO: 392918 - DNA, 25 bp, Homo sapien
ttcacccacgtgtcagactcactgg

SEQ ID NO: 392919 - DNA, 25 bp, Homo sapien
tgtagtcaccaggacttagcgtcag

SEQ ID NO: 392920 - DNA, 25 bp, Homo sapien
gatggccacgatggtgtttttccag

SEQ ID NO: 392921 - DNA, 25 bp, Homo sapien
cagttgttccaaccatcagtcttga

SEQ ID NO: 392922 - DNA, 25 bp, Homo sapien
cacagctctgaaggtgccaggaagc

SEQ ID NO: 392923 - DNA, 25 bp, Homo sapien
tcagtcttgacacctgcaagagctc

SEQ ID NO: 392924 - DNA, 25 bp, Homo sapien
tctgtggctagactgaaggtgtaca

SEQ ID NO: 392925 - DNA, 25 bp, Homo sapien
ggcctgtaagctgctaagactcctt

SEQ ID NO: 392926 - DNA, 25 bp, Homo sapien
gactccttgccgtttgtggaagaaa

SEQ ID NO: 392927 - DNA, 25 bp, Homo sapien
tgtggaagaaattccccgctgcatc

SEQ ID NO: 392928 - DNA, 25 bp, Homo sapien
tgaaagcattctcggggtcagcacc

SEQ ID NO: 392929 - DNA, 25 bp, Homo sapien
tcaggaccagacagttctcggtggc

SEQ ID NO: 392930 - DNA, 25 bp, Homo sapien
cggacgatgcagaatttccagctgc

SEQ ID NO: 392931 - DNA, 25 bp, Homo sapien
cttgtgaagtccacgctggcccgga

SEQ ID NO: 392932 - DNA, 25 bp, Homo sapien
gtatgaattctgcttctgagcacca

SEQ ID NO: 392933 - DNA, 25 bp, Homo sapien
ccaggtatgaattctgcttctgagc

SEQ ID NO: 392934 - DNA, 25 bp, Homo sapien
tgaggggccgtccttttatggctcc

SEQ ID NO: 392935 - DNA, 25 bp, Homo sapien
ttcccatagctggtcattctctgtt

SEQ ID NO: 392936 - DNA, 25 bp, Homo sapien
ttctgagaaaccctccaggactgcc

SEQ ID NO: 392937 - DNA, 25 bp, Homo sapien
ttcttctgagaaaccctccaggact

SEQ ID NO: 392938 - DNA, 25 bp, Homo sapien
tcttctgagaaaccctccaggactg

SEQ ID NO: 392939 - DNA, 25 bp, Homo sapien
ctgagaaaccctccaggactgccct

SEQ ID NO: 392940 - DNA, 25 bp, Homo sapien
cgtggcgaaccaccagcacgctctt

SEQ ID NO: 392941 - DNA, 25 bp, Homo sapien
gaaccaccagcacgctcttccttgc

SEQ ID NO: 392942 - DNA, 25 bp, Homo sapien
agatctgatccactctctccccgtg

SEQ ID NO: 392943 - DNA, 25 bp, Homo sapien
cagccatgccttcccgaagatctga

SEQ ID NO: 392944 - DNA, 25 bp, Homo sapien
actttcttgggtctgctgggcttct

SEQ ID NO: 392945 - DNA, 25 bp, Homo sapien
gaaattgtgacactacaggcttcct

SEQ ID NO: 392946 - DNA, 25 bp, Homo sapien
tctggtgtgtgattgtcatctgcca

SEQ ID NO: 392947 - DNA, 25 bp, Homo sapien
ggttcggctaacctagcaactgtga

SEQ ID NO: 392948 - DNA, 25 bp, Homo sapien
gactccgtcttggcagactgcaggg

SEQ ID NO: 392949 - DNA, 25 bp, Homo sapien
gaaaatgccacacgatgataatggg

SEQ ID NO: 392950 - DNA, 25 bp, Homo sapien
tcaaagtctttgatcccacgactcc

SEQ ID NO: 392951 - DNA, 25 bp, Homo sapien
tgataatgggggatcgttttcaaag

SEQ ID NO: 392952 - DNA, 25 bp, Homo sapien
gccataatcagtgttgctgttattg

SEQ ID NO: 392953 - DNA, 25 bp, Homo sapien
tattgttacctttcctactagacag

SEQ ID NO: 392954 - DNA, 25 bp, Homo sapien
caggctggatgcctgctagccataa

SEQ ID NO: 392955 - DNA, 25 bp, Homo sapien
cctgctagccataatcagtgttgct

SEQ ID NO: 392956 - DNA, 25 bp, Homo sapien
cactgtatcaaagggtgtgtagcta

SEQ ID NO: 392957 - DNA, 25 bp, Homo sapien
ctcagtcacgtagaagcagaaccgc

SEQ ID NO: 392958 - DNA, 25 bp, Homo sapien
gactcgatgaactcaatggtctctt

SEQ ID NO: 392959 - DNA, 25 bp, Homo sapien
gggtctctgcagttaaccattggtg

SEQ ID NO: 392960 - DNA, 25 bp, Homo sapien
gattctgataccactgtccagtagc

SEQ ID NO: 392961 - DNA, 25 bp, Homo sapien
agagctgattctgataccactgtcc

SEQ ID NO: 392962 - DNA, 25 bp, Homo sapien
gataccactgtccagtagcgcgtcc

SEQ ID NO: 392963 - DNA, 25 bp, Homo sapien
tctgataccactgtccagtagcgcg

SEQ ID NO: 392964 - DNA, 25 bp, Homo sapien
ttccaggatgagtttggccgtctgc

SEQ ID NO: 392965 - DNA, 25 bp, Homo sapien
cttccaggatgagtttggccgtctg

SEQ ID NO: 392966 - DNA, 25 bp, Homo sapien
ctgaaaacacgaaggctggacctgc

SEQ ID NO: 392967 - DNA, 25 bp, Homo sapien
ttctgatcttgccaccctcgtccct

SEQ ID NO: 392968 - DNA, 25 bp, Homo sapien
ggtccccagatactcggagaccctg

SEQ ID NO: 392969 - DNA, 25 bp, Homo sapien
tttctgatcttgccaccctcgtccc

SEQ ID NO: 392970 - DNA, 25 bp, Homo sapien
gaagggtccccagatactcggagac

SEQ ID NO: 392971 - DNA, 25 bp, Homo sapien
ctggattcaacagaatacaagtgtt

SEQ ID NO: 392972 - DNA, 25 bp, Homo sapien
gattcaacagaatacaagtgtttat

SEQ ID NO: 392973 - DNA, 25 bp, Homo sapien
tcaacagaatacaagtgtttatcat

SEQ ID NO: 392974 - DNA, 25 bp, Homo sapien
tggattcaacagaatacaagtgttt

SEQ ID NO: 392975 - DNA, 25 bp, Homo sapien
ccaggttccactcgtatcttgattt

SEQ ID NO: 392976 - DNA, 25 bp, Homo sapien
tccaggttccactcgtatcttgatt

SEQ ID NO: 392977 - DNA, 25 bp, Homo sapien
aggttccactcgtatcttgattttt

SEQ ID NO: 392978 - DNA, 25 bp, Homo sapien
caggttccactcgtatcttgatttt

SEQ ID NO: 392979 - DNA, 25 bp, Homo sapien
aatcagtgtcaatgttgaaatttgc

SEQ ID NO: 392980 - DNA, 25 bp, Homo sapien
ctgtaatcagtgtcaatgttgaaat

SEQ ID NO: 392981 - DNA, 25 bp, Homo sapien
cagtgtcaatgttgaaatttgcctc

SEQ ID NO: 392982 - DNA, 25 bp, Homo sapien
tgtcaatgttgaaatttgcctcttt

SEQ ID NO: 392983 - DNA, 25 bp, Homo sapien
ctcgccgtgcacctgtccatgtact

SEQ ID NO: 392984 - DNA, 25 bp, Homo sapien
gacgatttgcaccatgctcgccgtg

SEQ ID NO: 392985 - DNA, 25 bp, Homo sapien
tgtactcctggtagctctcggccgg

SEQ ID NO: 392986 - DNA, 25 bp, Homo sapien
tctcggccggcatgagggcggacag

SEQ ID NO: 392987 - DNA, 25 bp, Homo sapien
gccccaggggctgttcatactgagg

SEQ ID NO: 392988 - DNA, 25 bp, Homo sapien
catactgaggatggtgaggcactta

SEQ ID NO: 392989 - DNA, 25 bp, Homo sapien
gggctgttcatactgaggatggtga

SEQ ID NO: 392990 - DNA, 25 bp, Homo sapien
tcagagataattccccaagccccag

SEQ ID NO: 392991 - DNA, 25 bp, Homo sapien
agcagtggccgcgtgcaggagtcca

SEQ ID NO: 392992 - DNA, 25 bp, Homo sapien
gagccgtgactcacaattaggatga

SEQ ID NO: 392993 - DNA, 25 bp, Homo sapien
ttctcacgagttgggcaaaatcccc

SEQ ID NO: 392994 - DNA, 25 bp, Homo sapien
ctttctcacgagttgggcaaaatcc

SEQ ID NO: 392995 - DNA, 25 bp, Homo sapien
gtcttcgggatgcttgattttgtgg

SEQ ID NO: 392996 - DNA, 25 bp, Homo sapien
gatgcttgattttgtggcccaaaga

SEQ ID NO: 392997 - DNA, 25 bp, Homo sapien
gcttgattttgtggcccaaagagcc

SEQ ID NO: 392998 - DNA, 25 bp, Homo sapien
cgggatgcttgattttgtggcccaa

SEQ ID NO: 392999 - DNA, 25 bp, Homo sapien
ctccgggggcacgtggatcctggtg

SEQ ID NO: 393000 - DNA, 25 bp, Homo sapien
ccgggggcacgtggatcctggtggc

SEQ ID NO: 393001 - DNA, 25 bp, Homo sapien
cgggggcacgtggatcctggtggcc

SEQ ID NO: 393002 - DNA, 25 bp, Homo sapien
tccgggggcacgtggatcctggtgg

SEQ ID NO: 393003 - DNA, 25 bp, Homo sapien
ttcgcataagagccggtgggcacag

SEQ ID NO: 393004 - DNA, 25 bp, Homo sapien
cttcgcataagagccggtgggcaca

SEQ ID NO: 393005 - DNA, 25 bp, Homo sapien
tcgcataagagccggtgggcacagt

SEQ ID NO: 393006 - DNA, 25 bp, Homo sapien
tgaggttgactgacctatccaccag

SEQ ID NO: 393007 - DNA, 25 bp, Homo sapien
tgagctgactggtaaaaagttggca

SEQ ID NO: 393008 - DNA, 25 bp, Homo sapien
ctgtttttctacgagagctgcaagg

SEQ ID NO: 393009 - DNA, 25 bp, Homo sapien
tcctggaccgtctgtttttctacga

SEQ ID NO: 393010 - DNA, 25 bp, Homo sapien
cccacaacttatggcaaacaagctg

SEQ ID NO: 393011 - DNA, 25 bp, Homo sapien
tgcccacaacttatggcaaacaagc

SEQ ID NO: 393012 - DNA, 25 bp, Homo sapien
cactgctgcccacaacttatggcaa

SEQ ID NO: 393013 - DNA, 25 bp, Homo sapien
tgctgcccacaacttatggcaaaca

SEQ ID NO: 393014 - DNA, 25 bp, Homo sapien
gaagcatgtttctactcaggtgcag

SEQ ID NO: 393015 - DNA, 25 bp, Homo sapien
aatccagggcgctcggaaatgtctg

SEQ ID NO: 393016 - DNA, 25 bp, Homo sapien
taattgctgagtgacaatgacccac

SEQ ID NO: 393017 - DNA, 25 bp, Homo sapien
cataattgggacacaccaccctgga

SEQ ID NO: 393018 - DNA, 25 bp, Homo sapien
aaatgctgcgttcgccccgtgggtc

SEQ ID NO: 393019 - DNA, 25 bp, Homo sapien
tccagttaaatgctgcgttcgcccc

SEQ ID NO: 393020 - DNA, 25 bp, Homo sapien
tcagttgcctgagatccagttcctc

SEQ ID NO: 393021 - DNA, 25 bp, Homo sapien
tcagggtcttcaccggtgggttcac

SEQ ID NO: 393022 - DNA, 25 bp, Homo sapien
acaaatcacattgggtgagactaag

SEQ ID NO: 393023 - DNA, 25 bp, Homo sapien
ggttatgacaacatcaccgtggctc

SEQ ID NO: 393024 - DNA, 25 bp, Homo sapien
tctgaggttatgacaacatcaccgt

SEQ ID NO: 393025 - DNA, 25 bp, Homo sapien
tggtttctgcctctccactctgagg

SEQ ID NO: 393026 - DNA, 25 bp, Homo sapien
atgggtccacagatgggagttacaa

SEQ ID NO: 393027 - DNA, 25 bp, Homo sapien
gatgggagttacaaaggcgaaagcc

SEQ ID NO: 393028 - DNA, 25 bp, Homo sapien
gggatataaaagtgcgtctcgtgct

SEQ ID NO: 393029 - DNA, 25 bp, Homo sapien
gaaatattccgggatataaaagtgc

SEQ ID NO: 393030 - DNA, 25 bp, Homo sapien
ccagccacctgccctgtgctccccg

SEQ ID NO: 393031 - DNA, 25 bp, Homo sapien
ctgccctgtgctccccgcagctggg

SEQ ID NO: 393032 - DNA, 25 bp, Homo sapien
agccacctgccctgtgctccccgca

SEQ ID NO: 393033 - DNA, 25 bp, Homo sapien
acctgccctgtgctccccgcagctg

SEQ ID NO: 393034 - DNA, 25 bp, Homo sapien
cctggaagttagagtcccgggcagt

SEQ ID NO: 393035 - DNA, 25 bp, Homo sapien
tgtacatgctgcagggcggcatcct

SEQ ID NO: 393036 - DNA, 25 bp, Homo sapien
ttcctggaagttagagtcccgggca

SEQ ID NO: 393037 - DNA, 25 bp, Homo sapien
agctgcagacactcggtgtacatgc

SEQ ID NO: 393038 - DNA, 25 bp, Homo sapien
aatttaatgattagaccatggaaaa

SEQ ID NO: 393039 - DNA, 25 bp, Homo sapien
ttagcccatgtggatatggctaaag

SEQ ID NO: 393040 - DNA, 25 bp, Homo sapien
tagcccatgtggatatggctaaaga

SEQ ID NO: 393041 - DNA, 25 bp, Homo sapien
tttagcccatgtggatatggctaaa

SEQ ID NO: 393042 - DNA, 25 bp, Homo sapien
agcccatgtggatatggctaaagag

SEQ ID NO: 393043 - DNA, 25 bp, Homo sapien
ttttcctttcttccgacttctgatc

SEQ ID NO: 393044 - DNA, 25 bp, Homo sapien
atccagccctaaattcctccgcagc

SEQ ID NO: 393045 - DNA, 25 bp, Homo sapien
gtggctgtgcattcgatgctgccat

SEQ ID NO: 393046 - DNA, 25 bp, Homo sapien
tttcttccgacttctgatccttgca

SEQ ID NO: 393047 - DNA, 25 bp, Homo sapien
aaccttcgtctccataaaggtctgt

SEQ ID NO: 393048 - DNA, 25 bp, Homo sapien
gagatgtgcaccgattcctttccaa

SEQ ID NO: 393049 - DNA, 25 bp, Homo sapien
ctttccaaccttcgtctccataaag

SEQ ID NO: 393050 - DNA, 25 bp, Homo sapien
acaagtgttcagctcgagatgtgca

SEQ ID NO: 393051 - DNA, 25 bp, Homo sapien
ggcagtgtccgcaaagttccagttc

SEQ ID NO: 393052 - DNA, 25 bp, Homo sapien
cagttctgctcggacttcctccgta

SEQ ID NO: 393053 - DNA, 25 bp, Homo sapien
gctcggacttcctccgtagcagcat

SEQ ID NO: 393054 - DNA, 25 bp, Homo sapien
tccaggggcagtgtccgcaaagttc

SEQ ID NO: 393055 - DNA, 25 bp, Homo sapien
tgctccaggtgccagagtcgctgct

SEQ ID NO: 393056 - DNA, 25 bp, Homo sapien
aacatctggttggatagcagggctg

SEQ ID NO: 393057 - DNA, 25 bp, Homo sapien
gtcgctgctggccaaggatcccgga

SEQ ID NO: 393058 - DNA, 25 bp, Homo sapien
aagagacacagctcgggatgaatcc

SEQ ID NO: 393059 - DNA, 25 bp, Homo sapien
ccagctgctgctgggctgtgaaacc

SEQ ID NO: 393060 - DNA, 25 bp, Homo sapien
ggccagctgctgctgggctgtgaaa

SEQ ID NO: 393061 - DNA, 25 bp, Homo sapien
ctacaagagggccagctgctgctgg

SEQ ID NO: 393062 - DNA, 25 bp, Homo sapien
agctgctgctgggctgtgaaaccca

SEQ ID NO: 393063 - DNA, 25 bp, Homo sapien
gaacttcgtttgacacctccacgtg

SEQ ID NO: 393064 - DNA, 25 bp, Homo sapien
aacttccaggttacatcagcgtcac

SEQ ID NO: 393065 - DNA, 25 bp, Homo sapien
gtgtaacagtcgtccagttcaaaga

SEQ ID NO: 393066 - DNA, 25 bp, Homo sapien
tcagcgtcacagttagctagctctg

SEQ ID NO: 393067 - DNA, 25 bp, Homo sapien
ctgctagagtggacctgcagctcca

SEQ ID NO: 393068 - DNA, 25 bp, Homo sapien
tgctagagtggacctgcagctccat

SEQ ID NO: 393069 - DNA, 25 bp, Homo sapien
ctctggtgcttagagtggcgctgcc

SEQ ID NO: 393070 - DNA, 25 bp, Homo sapien
tctctgatggttaagagccgcccct

SEQ ID NO: 393071 - DNA, 25 bp, Homo sapien
tccttggggcattgagacctgcctt

SEQ ID NO: 393072 - DNA, 25 bp, Homo sapien
cccacagagctggtgaaggactcac

SEQ ID NO: 393073 - DNA, 25 bp, Homo sapien
ctaagtcactcttccttagggctgc

SEQ ID NO: 393074 - DNA, 25 bp, Homo sapien
taagtcactcttccttagggctgct

SEQ ID NO: 393075 - DNA, 25 bp, Homo sapien
aagtcactcttccttagggctgctg

SEQ ID NO: 393076 - DNA, 25 bp, Homo sapien
tttcaattaggacagctgggagcgg

SEQ ID NO: 393077 - DNA, 25 bp, Homo sapien
caaccttttgagtatgataggccta

SEQ ID NO: 393078 - DNA, 25 bp, Homo sapien
taactagactcagcaattatttgcg

SEQ ID NO: 393079 - DNA, 25 bp, Homo sapien
aaagaccttggtattccactctgag

SEQ ID NO: 393080 - DNA, 25 bp, Homo sapien
tggataagcagcacaaaatctagaa

SEQ ID NO: 393081 - DNA, 25 bp, Homo sapien
ttttccagcatactctttgattgcc

SEQ ID NO: 393082 - DNA, 25 bp, Homo sapien
aactctgtaatacgtcttttcctgc

SEQ ID NO: 393083 - DNA, 25 bp, Homo sapien
catacaaacataacaccgtgcacga

SEQ ID NO: 393084 - DNA, 25 bp, Homo sapien
ccaggactaagatgaagtgagccga

SEQ ID NO: 393085 - DNA, 25 bp, Homo sapien
aatgcttctgtcgttagccgggtgc

SEQ ID NO: 393086 - DNA, 25 bp, Homo sapien
tgcagtgctgtgtgtatctagttcc

SEQ ID NO: 393087 - DNA, 25 bp, Homo sapien
tgagccgagaggagatcgtatcata

SEQ ID NO: 393088 - DNA, 25 bp, Homo sapien
agaccatgtcggacctgggctcgga

SEQ ID NO: 393089 - DNA, 25 bp, Homo sapien
cctcgaggttgggtttggagagtga

SEQ ID NO: 393090 - DNA, 25 bp, Homo sapien
aagggcttcccagggtgcgcagcgg

SEQ ID NO: 393091 - DNA, 25 bp, Homo sapien
ctagaggcgctgcggctgtgatcca

SEQ ID NO: 393092 - DNA, 25 bp, Homo sapien
acagccgacaaaagtgatggatttc

SEQ ID NO: 393093 - DNA, 25 bp, Homo sapien
gcgacggcgaggtccaggtcagaga

SEQ ID NO: 393094 - DNA, 25 bp, Homo sapien
cgttgtggcgtcacagaacagccga

SEQ ID NO: 393095 - DNA, 25 bp, Homo sapien
ccaggtggctcctcgttgtggcgtc

SEQ ID NO: 393096 - DNA, 25 bp, Homo sapien
gagtgaagttgtttacagacaagag

SEQ ID NO: 393097 - DNA, 25 bp, Homo sapien
ctagccgcgaatcccgaagggtcag

SEQ ID NO: 393098 - DNA, 25 bp, Homo sapien
gagaagagatcttggcggacacatc

SEQ ID NO: 393099 - DNA, 25 bp, Homo sapien
ggacacatcacagctagccgcgaat

SEQ ID NO: 393100 - DNA, 25 bp, Homo sapien
gcagatttccaagcctgcacgtgta

SEQ ID NO: 393101 - DNA, 25 bp, Homo sapien
catgcgtgtgcgtctgtgattgtgt

SEQ ID NO: 393102 - DNA, 25 bp, Homo sapien
tgtaaaacccggacggacatcactg

SEQ ID NO: 393103 - DNA, 25 bp, Homo sapien
cggagtgcgtcaggtaaagcagatt

SEQ ID NO: 393104 - DNA, 25 bp, Homo sapien
gaagatcagcagcttattcaccgcg

SEQ ID NO: 393105 - DNA, 25 bp, Homo sapien
tggaatctcgtgtgttgttgtaact

SEQ ID NO: 393106 - DNA, 25 bp, Homo sapien
ttagcattgggaagaatctctaggg

SEQ ID NO: 393107 - DNA, 25 bp, Homo sapien
gggtaactgccaatatgtagagaag

SEQ ID NO: 393108 - DNA, 25 bp, Homo sapien
agggtattagtgaggcatgttcgac

SEQ ID NO: 393109 - DNA, 25 bp, Homo sapien
tcatggctgagaacgcagtttttaa

SEQ ID NO: 393110 - DNA, 25 bp, Homo sapien
tggtatcttactgccacagcgtcca

SEQ ID NO: 393111 - DNA, 25 bp, Homo sapien
tgtgtctaaactgcacaagggtatt

SEQ ID NO: 393112 - DNA, 25 bp, Homo sapien
tacagaggaaccgtggccactgttg

SEQ ID NO: 393113 - DNA, 25 bp, Homo sapien
tccactctctcgagggccttcccct

SEQ ID NO: 393114 - DNA, 25 bp, Homo sapien
aggaaccgtggccactgttgccctc

SEQ ID NO: 393115 - DNA, 25 bp, Homo sapien
agaaacgaagtacagaggaaccgtg

SEQ ID NO: 393116 - DNA, 25 bp, Homo sapien
caacatgtatttaggctcagcaatc

SEQ ID NO: 393117 - DNA, 25 bp, Homo sapien
gtcccacactctgttttggtgagag

SEQ ID NO: 393118 - DNA, 25 bp, Homo sapien
taggcgagggagcagtgagtcccac

SEQ ID NO: 393119 - DNA, 25 bp, Homo sapien
ttctcggaggcaatgcagcaacatg

SEQ ID NO: 393120 - DNA, 25 bp, Homo sapien
tttaataattggagcatctggtatg

SEQ ID NO: 393121 - DNA, 25 bp, Homo sapien
gaaacacgttccagttgtgtaggga

SEQ ID NO: 393122 - DNA, 25 bp, Homo sapien
tagggaatgcgtcagaagcacaacc

SEQ ID NO: 393123 - DNA, 25 bp, Homo sapien
tctggtatgtgtcaagttctgtgcg

SEQ ID NO: 393124 - DNA, 25 bp, Homo sapien
tccactctggggctaacttgttgcc

SEQ ID NO: 393125 - DNA, 25 bp, Homo sapien
tttcagtgaagcattcctctgtagc

SEQ ID NO: 393126 - DNA, 25 bp, Homo sapien
ctctgtagctgagctccactctggg

SEQ ID NO: 393127 - DNA, 25 bp, Homo sapien
tgaagcattcctctgtagctgagct

SEQ ID NO: 393128 - DNA, 25 bp, Homo sapien
tccttgatcgtgaagaacgggcagc

SEQ ID NO: 393129 - DNA, 25 bp, Homo sapien
tgtgctcggcctacggatataaaac

SEQ ID NO: 393130 - DNA, 25 bp, Homo sapien
gggcagcggccatgaacaacaatga

SEQ ID NO: 393131 - DNA, 25 bp, Homo sapien
gaaggagtaggcgttcccagtccta

SEQ ID NO: 393132 - DNA, 25 bp, Homo sapien
cctcgcaggcacgtgacagaggcag

SEQ ID NO: 393133 - DNA, 25 bp, Homo sapien
tccctgttaggctgcgggagcccgc

SEQ ID NO: 393134 - DNA, 25 bp, Homo sapien
ctggccagtcccctagaagctactg

SEQ ID NO: 393135 - DNA, 25 bp, Homo sapien
ggttcttacccttgcgggccagtgc

SEQ ID NO: 393136 - DNA, 25 bp, Homo sapien
catcgcggcagacaatgcgcagggt

SEQ ID NO: 393137 - DNA, 25 bp, Homo sapien
gaaggtcgctgtcactcgcattggc

SEQ ID NO: 393138 - DNA, 25 bp, Homo sapien
gagggccactcttctagatgtcgta

SEQ ID NO: 393139 - DNA, 25 bp, Homo sapien
tgctcagccgacaaacaacgcaaag

SEQ ID NO: 393140 - DNA, 25 bp, Homo sapien
cgtgggccgtaagggctggaaggct

SEQ ID NO: 393141 - DNA, 25 bp, Homo sapien
tcaccaggattacggcgtgggccgt

SEQ ID NO: 393142 - DNA, 25 bp, Homo sapien
tctcggtcaccaggattacggcgtg

SEQ ID NO: 393143 - DNA, 25 bp, Homo sapien
tggccagcggcgaggggactttccg

SEQ ID NO: 393144 - DNA, 25 bp, Homo sapien
ggaaagggcaggctttagcaattcc

SEQ ID NO: 393145 - DNA, 25 bp, Homo sapien
gcaattcctcctttggaaattcaaa

SEQ ID NO: 393146 - DNA, 25 bp, Homo sapien
gacccggaaagggcaggctttagca

SEQ ID NO: 393147 - DNA, 25 bp, Homo sapien
gctttagcaattcctcctttggaaa

SEQ ID NO: 393148 - DNA, 25 bp, Homo sapien
cttcagacgatttaagttcaagggc

SEQ ID NO: 393149 - DNA, 25 bp, Homo sapien
acgatttaagttcaagggccggcag

SEQ ID NO: 393150 - DNA, 25 bp, Homo sapien
caacttcagacgatttaagttcaag

SEQ ID NO: 393151 - DNA, 25 bp, Homo sapien
cagacgatttaagttcaagggccgg

SEQ ID NO: 393152 - DNA, 25 bp, Homo sapien
aacagaacgtgtaaatgcaggtcca

SEQ ID NO: 393153 - DNA, 25 bp, Homo sapien
tgacttggtgaatcacaggtctggg

SEQ ID NO: 393154 - DNA, 25 bp, Homo sapien
aaggcgctttccatattaaagatga

SEQ ID NO: 393155 - DNA, 25 bp, Homo sapien
gaaaatggtcactatctctttcccc

SEQ ID NO: 393156 - DNA, 25 bp, Homo sapien
aatgggtctggatctactctgggaa

SEQ ID NO: 393157 - DNA, 25 bp, Homo sapien
tacttcaaaaccacgtctgctcaaa

SEQ ID NO: 393158 - DNA, 25 bp, Homo sapien
caacagtgtctggaaacggatggtc

SEQ ID NO: 393159 - DNA, 25 bp, Homo sapien
gaagcaaacgtcttcctctcaagtg

SEQ ID NO: 393160 - DNA, 25 bp, Homo sapien
cactgagcctcggtcgcagaataag

SEQ ID NO: 393161 - DNA, 25 bp, Homo sapien
actgaccactgagcctcggtcgcag

SEQ ID NO: 393162 - DNA, 25 bp, Homo sapien
gaataagatgcttcataaatgagtc

SEQ ID NO: 393163 - DNA, 25 bp, Homo sapien
cctcggtcgcagaataagatgcttc

SEQ ID NO: 393164 - DNA, 25 bp, Homo sapien
tgagatgatgaagcgaatgccagcg

SEQ ID NO: 393165 - DNA, 25 bp, Homo sapien
gaatgccagcggggagtcgagccat

SEQ ID NO: 393166 - DNA, 25 bp, Homo sapien
gaatgagatgatgaagcgaatgcca

SEQ ID NO: 393167 - DNA, 25 bp, Homo sapien
cgaatgccagcggggagtcgagcca

SEQ ID NO: 393168 - DNA, 25 bp, Homo sapien
taggctttcgagataagtgaaaact

SEQ ID NO: 393169 - DNA, 25 bp, Homo sapien
cttaactatgctgataggctttcga

SEQ ID NO: 393170 - DNA, 25 bp, Homo sapien
gctgataggctttcgagataagtga

SEQ ID NO: 393171 - DNA, 25 bp, Homo sapien
tatgctgataggctttcgagataag

SEQ ID NO: 393172 - DNA, 25 bp, Homo sapien
tcctcacagagacgacaggcagtgc

SEQ ID NO: 393173 - DNA, 25 bp, Homo sapien
cgacaggcagtgctttccatgattc

SEQ ID NO: 393174 - DNA, 25 bp, Homo sapien
tgccccacaagcttttcaagtgacg

SEQ ID NO: 393175 - DNA, 25 bp, Homo sapien
gcagaataacttgtttctacataat

SEQ ID NO: 393176 - DNA, 25 bp, Homo sapien
gctccaaaggtcacagaattgcagt

SEQ ID NO: 393177 - DNA, 25 bp, Homo sapien
tcaagcggatgagtgtttaaggccc

SEQ ID NO: 393178 - DNA, 25 bp, Homo sapien
tcaaaggtctgcaaacgttttccac

SEQ ID NO: 393179 - DNA, 25 bp, Homo sapien
gtttaacatcccctgaaagctgctg

SEQ ID NO: 393180 - DNA, 25 bp, Homo sapien
ccctcgccaggtgagcaaattctca

SEQ ID NO: 393181 - DNA, 25 bp, Homo sapien
cgtggcgttccagagacaatgcaaa

SEQ ID NO: 393182 - DNA, 25 bp, Homo sapien
aactggtaagcaaacccctcgccag

SEQ ID NO: 393183 - DNA, 25 bp, Homo sapien
gaggatatttacataaccacaggtt

SEQ ID NO: 393184 - DNA, 25 bp, Homo sapien
ccatcagttatggagttggcatgac

SEQ ID NO: 393185 - DNA, 25 bp, Homo sapien
gacaggcctaagctgggatcttggt

SEQ ID NO: 393186 - DNA, 25 bp, Homo sapien
ggatataggcttcggcagcagacag

SEQ ID NO: 393187 - DNA, 25 bp, Homo sapien
cataatcggagtgtgcctctctggc

SEQ ID NO: 393188 - DNA, 25 bp, Homo sapien
ggccacgcccaaagggcctaagcat

SEQ ID NO: 393189 - DNA, 25 bp, Homo sapien
agtcaatctggccacgcccaaaggg

SEQ ID NO: 393190 - DNA, 25 bp, Homo sapien
tgcctcccatggaagtcaatctggc

SEQ ID NO: 393191 - DNA, 25 bp, Homo sapien
atggaagtcaatctggccacgccca

SEQ ID NO: 393192 - DNA, 25 bp, Homo sapien
ggatgacacggcccttgtgaaacaa

SEQ ID NO: 393193 - DNA, 25 bp, Homo sapien
atgacacggcccttgtgaaacaaac

SEQ ID NO: 393194 - DNA, 25 bp, Homo sapien
taggatgacacggcccttgtgaaac

SEQ ID NO: 393195 - DNA, 25 bp, Homo sapien
cttaggatgacacggcccttgtgaa

SEQ ID NO: 393196 - DNA, 25 bp, Homo sapien
gtgagcatgttacttgctgcccctg

SEQ ID NO: 393197 - DNA, 25 bp, Homo sapien
gacgctgaacaccaggctttttgca

SEQ ID NO: 393198 - DNA, 25 bp, Homo sapien
tccacagaaccagcaagcagggcca

SEQ ID NO: 393199 - DNA, 25 bp, Homo sapien
aaagccatcgccctggagtttggtg

SEQ ID NO: 393200 - DNA, 25 bp, Homo sapien
gggcagcggacccagacttcctgtt

SEQ ID NO: 393201 - DNA, 25 bp, Homo sapien
cagcttcatcccaagcagtgcagta

SEQ ID NO: 393202 - DNA, 25 bp, Homo sapien
cagtgcagtacttgtggagctcacc

SEQ ID NO: 393203 - DNA, 25 bp, Homo sapien
cacagtcggtctcattgtcagggag

SEQ ID NO: 393204 - DNA, 25 bp, Homo sapien
gcattactgctgctaaagtgattaa

SEQ ID NO: 393205 - DNA, 25 bp, Homo sapien
ctggacggaccgataatcgacttac

SEQ ID NO: 393206 - DNA, 25 bp, Homo sapien
taaagtgattaatagcaaggctgga

SEQ ID NO: 393207 - DNA, 25 bp, Homo sapien
gttacatctgggaacagcattactg

SEQ ID NO: 393208 - DNA, 25 bp, Homo sapien
caaaatgcaaatgatcttcagcaca

SEQ ID NO: 393209 - DNA, 25 bp, Homo sapien
aatgcaaatgatcttcagcacattt

SEQ ID NO: 393210 - DNA, 25 bp, Homo sapien
gtcatgtgctttttggtaggagagg

SEQ ID NO: 393211 - DNA, 25 bp, Homo sapien
gacaccgtggcggtgaagtcatgtg

SEQ ID NO: 393212 - DNA, 25 bp, Homo sapien
ctgaggtacatccccacggcatagg

SEQ ID NO: 393213 - DNA, 25 bp, Homo sapien
ccccacggcataggcgcacaggaag

SEQ ID NO: 393214 - DNA, 25 bp, Homo sapien
ggtacatccccacggcataggcgca

SEQ ID NO: 393215 - DNA, 25 bp, Homo sapien
agcagctgctgatagttgttcttat

SEQ ID NO: 393216 - DNA, 25 bp, Homo sapien
tcatctgacatagcgaacaaaacag

SEQ ID NO: 393217 - DNA, 25 bp, Homo sapien
gggctgaatggctgtaccctatcag

SEQ ID NO: 393218 - DNA, 25 bp, Homo sapien
ggctgtaccctatcagatctgattt

SEQ ID NO: 393219 - DNA, 25 bp, Homo sapien
tgatttcatctgacatagcgaacaa

SEQ ID NO: 393220 - DNA, 25 bp, Homo sapien
taccctaagccgaacagggcggtga

SEQ ID NO: 393221 - DNA, 25 bp, Homo sapien
taggtaatacctaatcggcaggcgc

SEQ ID NO: 393222 - DNA, 25 bp, Homo sapien
gctggcgagcatcccgaaagttagg

SEQ ID NO: 393223 - DNA, 25 bp, Homo sapien
ctgagttaccacgtagaatccgaaa

SEQ ID NO: 393224 - DNA, 25 bp, Homo sapien
tggtctgcaccagcccgttgatgac

SEQ ID NO: 393225 - DNA, 25 bp, Homo sapien
aggtgacgacgctgggccagccggt

SEQ ID NO: 393226 - DNA, 25 bp, Homo sapien
tgggccagccggtggtctgcaccag

SEQ ID NO: 393227 - DNA, 25 bp, Homo sapien
agccggtggtctgcaccagcccgtt

SEQ ID NO: 393228 - DNA, 25 bp, Homo sapien
cgagtgacacggacttcaccaggcc

SEQ ID NO: 393229 - DNA, 25 bp, Homo sapien
gctcccctgtctcgtgggacacagg

SEQ ID NO: 393230 - DNA, 25 bp, Homo sapien
gcggagctcccctgtctcgtgggac

SEQ ID NO: 393231 - DNA, 25 bp, Homo sapien
agctgtcagaggagccgccgagtga

SEQ ID NO: 393232 - DNA, 25 bp, Homo sapien
cagcatgtggacacccagtagccag

SEQ ID NO: 393233 - DNA, 25 bp, Homo sapien
ccagcgatcaatgaccccaagatgt

SEQ ID NO: 393234 - DNA, 25 bp, Homo sapien
aagagaaagcacactatccccatgg

SEQ ID NO: 393235 - DNA, 25 bp, Homo sapien
tgccacgatggctccaggcacgacg

SEQ ID NO: 393236 - DNA, 25 bp, Homo sapien
ggaggagcacctgacgtcgttcgga

SEQ ID NO: 393237 - DNA, 25 bp, Homo sapien
gaggagcacctgacgtcgttcggat

SEQ ID NO: 393238 - DNA, 25 bp, Homo sapien
ttctgtctgacaccgcacaggcagg

SEQ ID NO: 393239 - DNA, 25 bp, Homo sapien
gctagggcagggctcattcatggca

SEQ ID NO: 393240 - DNA, 25 bp, Homo sapien
tcatggcagccaacgtggtcagcaa

SEQ ID NO: 393241 - DNA, 25 bp, Homo sapien
gacgtgcagccaccaacttaagtga

SEQ ID NO: 393242 - DNA, 25 bp, Homo sapien
gcatggtgactcgacatcaacgcac

SEQ ID NO: 393243 - DNA, 25 bp, Homo sapien
agccgctgaaaggcccgagcgcgct

SEQ ID NO: 393244 - DNA, 25 bp, Homo sapien
tgactcgacatcaacgcacctggag

SEQ ID NO: 393245 - DNA, 25 bp, Homo sapien
acagcatggtgactcgacatcaacg

SEQ ID NO: 393246 - DNA, 25 bp, Homo sapien
atctgtttgtaccattctcatagcc

SEQ ID NO: 393247 - DNA, 25 bp, Homo sapien
gagtctcaatctgtttgtaccattc

SEQ ID NO: 393248 - DNA, 25 bp, Homo sapien
tctcaatctgtttgtaccattctca

SEQ ID NO: 393249 - DNA, 25 bp, Homo sapien
cagaggcttgttcttttcgctcttc

SEQ ID NO: 393250 - DNA, 25 bp, Homo sapien
tgacgacgtggttcgggtggatgga

SEQ ID NO: 393251 - DNA, 25 bp, Homo sapien
tgaagctgatggcggccgtgccact

SEQ ID NO: 393252 - DNA, 25 bp, Homo sapien
tggttcgggtggatggagcccttcc

SEQ ID NO: 393253 - DNA, 25 bp, Homo sapien
ggagaatgacgacgtggttcgggtg

SEQ ID NO: 393254 - DNA, 25 bp, Homo sapien
cctgtgggagggcaagtgcactggg

SEQ ID NO: 393255 - DNA, 25 bp, Homo sapien
atgggctcacgctcaaggcctgtgg

SEQ ID NO: 393256 - DNA, 25 bp, Homo sapien
ccaggtggcacagtagtcagggcct

SEQ ID NO: 393257 - DNA, 25 bp, Homo sapien
aaagagaatccagccgggctcgcga

SEQ ID NO: 393258 - DNA, 25 bp, Homo sapien
aagagttctcgtatagccgggtgca

SEQ ID NO: 393259 - DNA, 25 bp, Homo sapien
catcagagtcgagtcaatgcaaaca

SEQ ID NO: 393260 - DNA, 25 bp, Homo sapien
gattttcatactacatcgcctggaa

SEQ ID NO: 393261 - DNA, 25 bp, Homo sapien
tggctttagcacctccagacacgta

SEQ ID NO: 393262 - DNA, 25 bp, Homo sapien
cattcgtgatgtacaggggcagcca

SEQ ID NO: 393263 - DNA, 25 bp, Homo sapien
cagaagaggaaagtatagctgacca

SEQ ID NO: 393264 - DNA, 25 bp, Homo sapien
gaaagtatagctgaccagcttggca

SEQ ID NO: 393265 - DNA, 25 bp, Homo sapien
ccacattcgtgatgtacaggggcag

SEQ ID NO: 393266 - DNA, 25 bp, Homo sapien
gatccaaagttcagtgtagcccacg

SEQ ID NO: 393267 - DNA, 25 bp, Homo sapien
taatctatagctgcagccactgcgg

SEQ ID NO: 393268 - DNA, 25 bp, Homo sapien
catgaactggtagccctagctggga

SEQ ID NO: 393269 - DNA, 25 bp, Homo sapien
tgtcacacggctttagaactgcaga

SEQ ID NO: 393270 - DNA, 25 bp, Homo sapien
acgtcaaacagggtggagagctccc

SEQ ID NO: 393271 - DNA, 25 bp, Homo sapien
cccacgtcaaacagggtggagagct

SEQ ID NO: 393272 - DNA, 25 bp, Homo sapien
aaagattccgcccacgtcaaacagg

SEQ ID NO: 393273 - DNA, 25 bp, Homo sapien
tccgcccacgtcaaacagggtggag

SEQ ID NO: 393274 - DNA, 25 bp, Homo sapien
tcataacaagaagacctcaagcgat

SEQ ID NO: 393275 - DNA, 25 bp, Homo sapien
gttcccctgagcagtgaatcaactc

SEQ ID NO: 393276 - DNA, 25 bp, Homo sapien
aggtgacggcctgaccctcttgggc

SEQ ID NO: 393277 - DNA, 25 bp, Homo sapien
aactcagagatcatgcgccttgcga

SEQ ID NO: 393278 - DNA, 25 bp, Homo sapien
tctccagtcggtctgagatcacacc

SEQ ID NO: 393279 - DNA, 25 bp, Homo sapien
cttttctccagtcggtctgagatca

SEQ ID NO: 393280 - DNA, 25 bp, Homo sapien
gcccttttctccagtcggtctgaga

SEQ ID NO: 393281 - DNA, 25 bp, Homo sapien
agtcggtctgagatcacacctgcca

SEQ ID NO: 393282 - DNA, 25 bp, Homo sapien
caagccccatcttgctgacggtgga

SEQ ID NO: 393283 - DNA, 25 bp, Homo sapien
ctcaagccccatcttgctgacggtg

SEQ ID NO: 393284 - DNA, 25 bp, Homo sapien
gccccatcttgctgacggtggagaa

SEQ ID NO: 393285 - DNA, 25 bp, Homo sapien
gatggtggcctcaagccccatcttg

SEQ ID NO: 393286 - DNA, 25 bp, Homo sapien
gagagccccgcatgcataggagcag

SEQ ID NO: 393287 - DNA, 25 bp, Homo sapien
aagaatggaaatgtgccctccagag

SEQ ID NO: 393288 - DNA, 25 bp, Homo sapien
ccccgcatgcataggagcagcctga

SEQ ID NO: 393289 - DNA, 25 bp, Homo sapien
ctccagagagccccgcatgcatagg

SEQ ID NO: 393290 - DNA, 25 bp, Homo sapien
gatgagtgtgtagggcccactgacc

SEQ ID NO: 393291 - DNA, 25 bp, Homo sapien
ggtcggcggagacggcggtggtgat

SEQ ID NO: 393292 - DNA, 25 bp, Homo sapien
ggtgatgagtgtgtagggcccactg

SEQ ID NO: 393293 - DNA, 25 bp, Homo sapien
ctgaccagggctccgctgagcagca

SEQ ID NO: 393294 - DNA, 25 bp, Homo sapien
agaagggccgaatcccccagcgcct

SEQ ID NO: 393295 - DNA, 25 bp, Homo sapien
ggatgagaagggccgaatcccccag

SEQ ID NO: 393296 - DNA, 25 bp, Homo sapien
tgagaagggccgaatcccccagcgc

SEQ ID NO: 393297 - DNA, 25 bp, Homo sapien
atgagaagggccgaatcccccagcg

SEQ ID NO: 393298 - DNA, 25 bp, Homo sapien
tgcctttcagacttttatgagtccc

SEQ ID NO: 393299 - DNA, 25 bp, Homo sapien
tcaatgatggccgtcacggtggaga

SEQ ID NO: 393300 - DNA, 25 bp, Homo sapien
gcgcgttgcctttcagacttttatg

SEQ ID NO: 393301 - DNA, 25 bp, Homo sapien
agggcgtgcgcgttgcctttcagac

SEQ ID NO: 393302 - DNA, 25 bp, Homo sapien
ctaagacaccaaacctcccagagct

SEQ ID NO: 393303 - DNA, 25 bp, Homo sapien
caaacctcccagagctaaaactctc

SEQ ID NO: 393304 - DNA, 25 bp, Homo sapien
aagacaccaaacctcccagagctaa

SEQ ID NO: 393305 - DNA, 25 bp, Homo sapien
gacaccaaacctcccagagctaaaa

SEQ ID NO: 393306 - DNA, 25 bp, Homo sapien
caggtgtggcaactcctgattttcg

SEQ ID NO: 393307 - DNA, 25 bp, Homo sapien
actgtgcgtgctccccatacaaggg

SEQ ID NO: 393308 - DNA, 25 bp, Homo sapien
gtgctccccatacaagggctcaggg

SEQ ID NO: 393309 - DNA, 25 bp, Homo sapien
ctgattttcgcctggcaggtgcagc

SEQ ID NO: 393310 - DNA, 25 bp, Homo sapien
cagccccccataacgtcccccatgt

SEQ ID NO: 393311 - DNA, 25 bp, Homo sapien
cataacgtcccccatgtaggaagga

SEQ ID NO: 393312 - DNA, 25 bp, Homo sapien
ccataacgtcccccatgtaggaagg

SEQ ID NO: 393313 - DNA, 25 bp, Homo sapien
cccataacgtcccccatgtaggaag

SEQ ID NO: 393314 - DNA, 25 bp, Homo sapien
ggctttactggagacccccacgcag

SEQ ID NO: 393315 - DNA, 25 bp, Homo sapien
atctaccaaacactcggctttactg

SEQ ID NO: 393316 - DNA, 25 bp, Homo sapien
tggagacccccacgcagcaagtgac

SEQ ID NO: 393317 - DNA, 25 bp, Homo sapien
tgggtctaccgagccaccttcatct

SEQ ID NO: 393318 - DNA, 25 bp, Homo sapien
gagacaaaacagaggagtgcaccga

SEQ ID NO: 393319 - DNA, 25 bp, Homo sapien
cccggctgcgattctaactgtctgg

SEQ ID NO: 393320 - DNA, 25 bp, Homo sapien
tggagcttccgttccagtggcagga

SEQ ID NO: 393321 - DNA, 25 bp, Homo sapien
gaaacgcagaacaaggaaacgcagc

SEQ ID NO: 393322 - DNA, 25 bp, Homo sapien
ccaggccatgtgtcacatggcaatg

SEQ ID NO: 393323 - DNA, 25 bp, Homo sapien
ggttgccagtagagcgccaagttag

SEQ ID NO: 393324 - DNA, 25 bp, Homo sapien
gactgcagtccactgaggcacaagg

SEQ ID NO: 393325 - DNA, 25 bp, Homo sapien
acttggtgcaggttaacagaaggcc

SEQ ID NO: 393326 - DNA, 25 bp, Homo sapien
agaacagggtttcacagcagagtca

SEQ ID NO: 393327 - DNA, 25 bp, Homo sapien
cactgaataagcatgcgggcacctc

SEQ ID NO: 393328 - DNA, 25 bp, Homo sapien
gattctaagcactgtgaacgcccca

SEQ ID NO: 393329 - DNA, 25 bp, Homo sapien
gacggaacgccgctgtacaacataa

SEQ ID NO: 393330 - DNA, 25 bp, Homo sapien
tgggcagcactcactcatggaagga

SEQ ID NO: 393331 - DNA, 25 bp, Homo sapien
tccaccacaggagtggtaaacaggg

SEQ ID NO: 393332 - DNA, 25 bp, Homo sapien
tctagactgctagggctgtgtcgca

SEQ ID NO: 393333 - DNA, 25 bp, Homo sapien
tgctaggagccagtttccaccacag

SEQ ID NO: 393334 - DNA, 25 bp, Homo sapien
acaagatgtatctattgagggtgca

SEQ ID NO: 393335 - DNA, 25 bp, Homo sapien
tctccctgagaaagtgtaagaaaga

SEQ ID NO: 393336 - DNA, 25 bp, Homo sapien
tggtcgatacaaagttggaaaatac

SEQ ID NO: 393337 - DNA, 25 bp, Homo sapien
gaaaagcctacatctgactaataca

SEQ ID NO: 393338 - DNA, 25 bp, Homo sapien
caattcccctaaagtgaagggcagg

SEQ ID NO: 393339 - DNA, 25 bp, Homo sapien
cctgggcactgaaggagtctcctcc

SEQ ID NO: 393340 - DNA, 25 bp, Homo sapien
tccatgccatggcaaggatgttggc

SEQ ID NO: 393341 - DNA, 25 bp, Homo sapien
gatgttggcagctggacccaggctc

SEQ ID NO: 393342 - DNA, 25 bp, Homo sapien
accaagcttccatgccatggcaagg

SEQ ID NO: 393343 - DNA, 25 bp, Homo sapien
gcaacatgaactgcgccatcactga

SEQ ID NO: 393344 - DNA, 25 bp, Homo sapien
gatgataaatcctcccaccgaaggg

SEQ ID NO: 393345 - DNA, 25 bp, Homo sapien
cacgtagttttggaagatggacaca

SEQ ID NO: 393346 - DNA, 25 bp, Homo sapien
ggtcggctactcatgtgttatctcc

SEQ ID NO: 393347 - DNA, 25 bp, Homo sapien
taaaacacattgctccagccggacg

SEQ ID NO: 393348 - DNA, 25 bp, Homo sapien
catgtaaaacacattgctccagccg

SEQ ID NO: 393349 - DNA, 25 bp, Homo sapien
ctgcaaacatcagcatgtaaaacac

SEQ ID NO: 393350 - DNA, 25 bp, Homo sapien
gcaaacatcagcatgtaaaacacat

SEQ ID NO: 393351 - DNA, 25 bp, Homo sapien
tcccatcccttcaggtgaaagaagt

SEQ ID NO: 393352 - DNA, 25 bp, Homo sapien
tcaaactttctcaacacaggagggc

SEQ ID NO: 393353 - DNA, 25 bp, Homo sapien
gacttgtaaagatgtgtatgcaccc

SEQ ID NO: 393354 - DNA, 25 bp, Homo sapien
ggcagaagccagaaggcgactcagt

SEQ ID NO: 393355 - DNA, 25 bp, Homo sapien
gctacagaaatcctatgctgcaggg

SEQ ID NO: 393356 - DNA, 25 bp, Homo sapien
tgcaagcatggctcttcgagggtcc

SEQ ID NO: 393357 - DNA, 25 bp, Homo sapien
gagggtcctggctctatgacgaagt

SEQ ID NO: 393358 - DNA, 25 bp, Homo sapien
cgccttgtctcttacccagtgtggg

SEQ ID NO: 393359 - DNA, 25 bp, Homo sapien
cgaagaggcctatgattatgaaaag

SEQ ID NO: 393360 - DNA, 25 bp, Homo sapien
tgttatctgtgggtacgggatgaac

SEQ ID NO: 393361 - DNA, 25 bp, Homo sapien
tgaaaagtgctagcccgaagaggcc

SEQ ID NO: 393362 - DNA, 25 bp, Homo sapien
tatgaaaagctgatcattaagagag

SEQ ID NO: 393363 - DNA, 25 bp, Homo sapien
caagaggaccataatgcgggtggcc

SEQ ID NO: 393364 - DNA, 25 bp, Homo sapien
ttctcaggtgactctaaagccaggt

SEQ ID NO: 393365 - DNA, 25 bp, Homo sapien
ccttcacatgtttgagggctcaacg

SEQ ID NO: 393366 - DNA, 25 bp, Homo sapien
cttttgggagagatgcagcctgaac

SEQ ID NO: 393367 - DNA, 25 bp, Homo sapien
cttgcatgctcagccggaggcctgg

SEQ ID NO: 393368 - DNA, 25 bp, Homo sapien
agcagcggggcttgcatgctcagcc

SEQ ID NO: 393369 - DNA, 25 bp, Homo sapien
caagagcagcggggcttgcatgctc

SEQ ID NO: 393370 - DNA, 25 bp, Homo sapien
gggcttgcatgctcagccggaggcc

SEQ ID NO: 393371 - DNA, 25 bp, Homo sapien
ggtgagcccacctgttactggagca

SEQ ID NO: 393372 - DNA, 25 bp, Homo sapien
cccacctgttactggagcaggcaca

SEQ ID NO: 393373 - DNA, 25 bp, Homo sapien
agcccacctgttactggagcaggca

SEQ ID NO: 393374 - DNA, 25 bp, Homo sapien
tgagcccacctgttactggagcagg

SEQ ID NO: 393375 - DNA, 25 bp, Homo sapien
acttggtcccccgtagctgaccctg

SEQ ID NO: 393376 - DNA, 25 bp, Homo sapien
ctcagctccttgtgtatgaggcgga

SEQ ID NO: 393377 - DNA, 25 bp, Homo sapien
gctccttgtgtatgaggcggatcag

SEQ ID NO: 393378 - DNA, 25 bp, Homo sapien
ccttgtgtatgaggcggatcaggaa

SEQ ID NO: 393379 - DNA, 25 bp, Homo sapien
ttctttcaggaaagccaggtgcaga

SEQ ID NO: 393380 - DNA, 25 bp, Homo sapien
gatgctggataaacccttgcacctt

SEQ ID NO: 393381 - DNA, 25 bp, Homo sapien
tttgaggagagattaccactaaccc

SEQ ID NO: 393382 - DNA, 25 bp, Homo sapien
tttggagccggctttcacgcacgga

SEQ ID NO: 393383 - DNA, 25 bp, Homo sapien
aggtcactctttccatgcagggccc

SEQ ID NO: 393384 - DNA, 25 bp, Homo sapien
ccggccttgttgtcacgcgtgcatt

SEQ ID NO: 393385 - DNA, 25 bp, Homo sapien
gtcttcggttctctggcttggctca

SEQ ID NO: 393386 - DNA, 25 bp, Homo sapien
tctgtgtcttttccaggtgcgtgtg

SEQ ID NO: 393387 - DNA, 25 bp, Homo sapien
tcttgatgttgtgtggcgctggctc

SEQ ID NO: 393388 - DNA, 25 bp, Homo sapien
tgggtctgagctccgtcttggtttc

SEQ ID NO: 393389 - DNA, 25 bp, Homo sapien
tccaacctggttgtcggccttcttg

SEQ ID NO: 393390 - DNA, 25 bp, Homo sapien
ttaggtcagtccgaaacatcatggg

SEQ ID NO: 393391 - DNA, 25 bp, Homo sapien
tgggtgcctccaaccggaggtgctt

SEQ ID NO: 393392 - DNA, 25 bp, Homo sapien
gactttggggcgctctgtggctggc

SEQ ID NO: 393393 - DNA, 25 bp, Homo sapien
tgcctccaaccggaggtgcttcctg

SEQ ID NO: 393394 - DNA, 25 bp, Homo sapien
tggcaagcctgggtgcctccaaccg

SEQ ID NO: 393395 - DNA, 25 bp, Homo sapien
ggttgctgggcttggacccgccaat

SEQ ID NO: 393396 - DNA, 25 bp, Homo sapien
cagataagtattttgctagacacaa

SEQ ID NO: 393397 - DNA, 25 bp, Homo sapien
tatgtattaaaaacagtcccaggtg

SEQ ID NO: 393398 - DNA, 25 bp, Homo sapien
cagccagagaacaattggagtttgt

SEQ ID NO: 393399 - DNA, 25 bp, Homo sapien
tatgtgtccaaacccgagaaacctc

SEQ ID NO: 393400 - DNA, 25 bp, Homo sapien
gaggtccccaagtgaacttccacag

SEQ ID NO: 393401 - DNA, 25 bp, Homo sapien
accatgcacatctggacggtcagca

SEQ ID NO: 393402 - DNA, 25 bp, Homo sapien
gaaacctcaatgtgtccaagcctga

SEQ ID NO: 393403 - DNA, 25 bp, Homo sapien
tctgctctgagacgcacagtatagc

SEQ ID NO: 393404 - DNA, 25 bp, Homo sapien
accccatggatacgagtgctgcaca

SEQ ID NO: 393405 - DNA, 25 bp, Homo sapien
tattcgcggcagctcttggactctg

SEQ ID NO: 393406 - DNA, 25 bp, Homo sapien
tctcagggtttagctcagagggttc

SEQ ID NO: 393407 - DNA, 25 bp, Homo sapien
gtgccgaaagcgtctgagggactcc

SEQ ID NO: 393408 - DNA, 25 bp, Homo sapien
gtctgagggactccaaactcctctt

SEQ ID NO: 393409 - DNA, 25 bp, Homo sapien
gctggtgtagacagaggtgtttcca

SEQ ID NO: 393410 - DNA, 25 bp, Homo sapien
ctcttcaggcttatcgtgagctggt

SEQ ID NO: 393411 - DNA, 25 bp, Homo sapien
aaggcaagaggaaaacgcaggcata

SEQ ID NO: 393412 - DNA, 25 bp, Homo sapien
agccatttggtgctatcaggaagtc

SEQ ID NO: 393413 - DNA, 25 bp, Homo sapien
aacgcaggcatagatataaacaggg

SEQ ID NO: 393414 - DNA, 25 bp, Homo sapien
ccctcggggagccatttggtgctat

SEQ ID NO: 393415 - DNA, 25 bp, Homo sapien
ggtgccaaaaggagcttctgcagac

SEQ ID NO: 393416 - DNA, 25 bp, Homo sapien
agggctcccggcaatcgaagtgcag

SEQ ID NO: 393417 - DNA, 25 bp, Homo sapien
tgcagacacagttccgcgtgcaggg

SEQ ID NO: 393418 - DNA, 25 bp, Homo sapien
tcctggagtactgatgagaggtgcc

SEQ ID NO: 393419 - DNA, 25 bp, Homo sapien
gcctggatctgcaggcggtggccga

SEQ ID NO: 393420 - DNA, 25 bp, Homo sapien
aggcggtggccgaggccatggtaca

SEQ ID NO: 393421 - DNA, 25 bp, Homo sapien
atctgcaggcggtggccgaggccat

SEQ ID NO: 393422 - DNA, 25 bp, Homo sapien
gtggccgaggccatggtacagccca

SEQ ID NO: 393423 - DNA, 25 bp, Homo sapien
tggtagatttgaagcaggaaaggca

SEQ ID NO: 393424 - DNA, 25 bp, Homo sapien
aaggcaggctgttgacaactgtcaa

SEQ ID NO: 393425 - DNA, 25 bp, Homo sapien
ggcaggctgttgacaactgtcaagg

SEQ ID NO: 393426 - DNA, 25 bp, Homo sapien
aggaaaggcaggctgttgacaactg

SEQ ID NO: 393427 - DNA, 25 bp, Homo sapien
gctttggaagagagccgggtctttc

SEQ ID NO: 393428 - DNA, 25 bp, Homo sapien
acagacctgagaggccgcagcattc

SEQ ID NO: 393429 - DNA, 25 bp, Homo sapien
tccaaggatcccaattcaggcggga

SEQ ID NO: 393430 - DNA, 25 bp, Homo sapien
ccttggcgtggacgcggtcacagac

SEQ ID NO: 393431 - DNA, 25 bp, Homo sapien
gagcttctgtttagtcctgcacgtt

SEQ ID NO: 393432 - DNA, 25 bp, Homo sapien
tgaggagcttctgtttagtcctgca

SEQ ID NO: 393433 - DNA, 25 bp, Homo sapien
cttctgtttagtcctgcacgttcct

SEQ ID NO: 393434 - DNA, 25 bp, Homo sapien
cctgaattgaactctccgttccctt

SEQ ID NO: 393435 - DNA, 25 bp, Homo sapien
tggacatgaggccatggcttgattt

SEQ ID NO: 393436 - DNA, 25 bp, Homo sapien
gatttccctcttgaagacgttgagc

SEQ ID NO: 393437 - DNA, 25 bp, Homo sapien
tgaggccatggcttgatttccctct

SEQ ID NO: 393438 - DNA, 25 bp, Homo sapien
cgttgagcttttgtggcagctgttg

SEQ ID NO: 393439 - DNA, 25 bp, Homo sapien
tgaagttcccaccagtcctgccgga

SEQ ID NO: 393440 - DNA, 25 bp, Homo sapien
tcctgccggaagtgctacggctgcc

SEQ ID NO: 393441 - DNA, 25 bp, Homo sapien
gtgtccagtggtcctcagcgggtct

SEQ ID NO: 393442 - DNA, 25 bp, Homo sapien
tacggctgccctggcgatctaggtg

SEQ ID NO: 393443 - DNA, 25 bp, Homo sapien
tttgggccactgctgtagcctccgt

SEQ ID NO: 393444 - DNA, 25 bp, Homo sapien
agaatttgggccactgctgtagcct

SEQ ID NO: 393445 - DNA, 25 bp, Homo sapien
ttgggccactgctgtagcctccgta

SEQ ID NO: 393446 - DNA, 25 bp, Homo sapien
aatttgggccactgctgtagcctcc

SEQ ID NO: 393447 - DNA, 25 bp, Homo sapien
ctagcccagcgtggcccgctgtact

SEQ ID NO: 393448 - DNA, 25 bp, Homo sapien
gcgtggcccgctgtactgggaacca

SEQ ID NO: 393449 - DNA, 25 bp, Homo sapien
gccagaccggaaagcctcattttct

SEQ ID NO: 393450 - DNA, 25 bp, Homo sapien
accagggccctggatgagcagccag

SEQ ID NO: 393451 - DNA, 25 bp, Homo sapien
gccagcattgggacaggctttgcct

SEQ ID NO: 393452 - DNA, 25 bp, Homo sapien
tgcgaaatcccctaaagctcaggtc

SEQ ID NO: 393453 - DNA, 25 bp, Homo sapien
gtgacaacaggtacgggccagcatt

SEQ ID NO: 393454 - DNA, 25 bp, Homo sapien
ctttgcctgtaagagggctggtctg

SEQ ID NO: 393455 - DNA, 25 bp, Homo sapien
ctgggaccgctgtgccttcaccggg

SEQ ID NO: 393456 - DNA, 25 bp, Homo sapien
caccgggctgcgcttgtgcacttgt

SEQ ID NO: 393457 - DNA, 25 bp, Homo sapien
ctccacgtgtatgggcggctcgctg

SEQ ID NO: 393458 - DNA, 25 bp, Homo sapien
ggccggcatctccacgtgtatgggc

SEQ ID NO: 393459 - DNA, 25 bp, Homo sapien
tgggaacacttaaaagaagagctgg

SEQ ID NO: 393460 - DNA, 25 bp, Homo sapien
gtgatggctacagctccgggcggcg

SEQ ID NO: 393461 - DNA, 25 bp, Homo sapien
tggagtgatggctacagctccgggc

SEQ ID NO: 393462 - DNA, 25 bp, Homo sapien
ttctgggaacacttaaaagaagagc

SEQ ID NO: 393463 - DNA, 25 bp, Homo sapien
tttcaagaggtaatggctcgtggag

SEQ ID NO: 393464 - DNA, 25 bp, Homo sapien
aatacaagccttcggaagatgccgg

SEQ ID NO: 393465 - DNA, 25 bp, Homo sapien
catgtgctgcgagggagttgttggc

SEQ ID NO: 393466 - DNA, 25 bp, Homo sapien
taatggctcgtggagaaaatacaag

SEQ ID NO: 393467 - DNA, 25 bp, Homo sapien
caacttttgtcaagtcaagttgaca

SEQ ID NO: 393468 - DNA, 25 bp, Homo sapien
acttttgtcaagtcaagttgacaat

SEQ ID NO: 393469 - DNA, 25 bp, Homo sapien
aacttttgtcaagtcaagttgacaa

SEQ ID NO: 393470 - DNA, 25 bp, Homo sapien
cacggagcaaagaactccagggagg

SEQ ID NO: 393471 - DNA, 25 bp, Homo sapien
ggcttaggggagaagcacagaccct

SEQ ID NO: 393472 - DNA, 25 bp, Homo sapien
cagggagggactggattgcatgagg

SEQ ID NO: 393473 - DNA, 25 bp, Homo sapien
gactggattgcatgagggcaccggg

SEQ ID NO: 393474 - DNA, 25 bp, Homo sapien
tcgagatcctggttgagtaaccaca

SEQ ID NO: 393475 - DNA, 25 bp, Homo sapien
gcctcgagatcctggttgagtaacc

SEQ ID NO: 393476 - DNA, 25 bp, Homo sapien
gagatcctggttgagtaaccacagc

SEQ ID NO: 393477 - DNA, 25 bp, Homo sapien
cctcgagatcctggttgagtaacca

SEQ ID NO: 393478 - DNA, 25 bp, Homo sapien
cagtagtatgattttgaatgctgac

SEQ ID NO: 393479 - DNA, 25 bp, Homo sapien
cttccaccacgtgcggcggagccca

SEQ ID NO: 393480 - DNA, 25 bp, Homo sapien
caggctcctcaatgtggagcagagt

SEQ ID NO: 393481 - DNA, 25 bp, Homo sapien
ggtgtccaaaccaggctcctcaatg

SEQ ID NO: 393482 - DNA, 25 bp, Homo sapien
gcctgttggtgtccaaaccaggctc

SEQ ID NO: 393483 - DNA, 25 bp, Homo sapien
aggacttcccatgcatctgggtcca

SEQ ID NO: 393484 - DNA, 25 bp, Homo sapien
tcagcttggcctgacgttgggtttt

SEQ ID NO: 393485 - DNA, 25 bp, Homo sapien
catgaatcgatccacagtgtgggtc

SEQ ID NO: 393486 - DNA, 25 bp, Homo sapien
ggttgtggtgataacaccagaaagt

SEQ ID NO: 393487 - DNA, 25 bp, Homo sapien
tctcattaggaacctatggcacgta

SEQ ID NO: 393488 - DNA, 25 bp, Homo sapien
gagtgatgtccaagacccttctcat

SEQ ID NO: 393489 - DNA, 25 bp, Homo sapien
cagaggagagagtgatgtccaagac

SEQ ID NO: 393490 - DNA, 25 bp, Homo sapien
tatacacaactttctgccggcacca

SEQ ID NO: 393491 - DNA, 25 bp, Homo sapien
gcgttagccggtggggccagtgctt

SEQ ID NO: 393492 - DNA, 25 bp, Homo sapien
gggcaatggcaaaagcgttagccgg

SEQ ID NO: 393493 - DNA, 25 bp, Homo sapien
gcaatggcaaaagcgttagccggtg

SEQ ID NO: 393494 - DNA, 25 bp, Homo sapien
tgtgaacacagtggcactcgccagc

SEQ ID NO: 393495 - DNA, 25 bp, Homo sapien
cttcgcctctcccatgcagcgcaga

SEQ ID NO: 393496 - DNA, 25 bp, Homo sapien
cctttgccgattgctgaagggtgaa

SEQ ID NO: 393497 - DNA, 25 bp, Homo sapien
cagttgtctgttgacacccgagctg

SEQ ID NO: 393498 - DNA, 25 bp, Homo sapien
atgcagcgcagacgctacgtcgcct

SEQ ID NO: 393499 - DNA, 25 bp, Homo sapien
tctgaccctttcttgcagggagagc

SEQ ID NO: 393500 - DNA, 25 bp, Homo sapien
tcctgccagcccgcttcttctattg

SEQ ID NO: 393501 - DNA, 25 bp, Homo sapien
ctctgaccctttcttgcagggagag

SEQ ID NO: 393502 - DNA, 25 bp, Homo sapien
ctgccagcccgcttcttctattgct

SEQ ID NO: 393503 - DNA, 25 bp, Homo sapien
tcggccacagtagcctggaggttga

SEQ ID NO: 393504 - DNA, 25 bp, Homo sapien
agccgcagaaagttccttggtggga

SEQ ID NO: 393505 - DNA, 25 bp, Homo sapien
gggcccgaatgcttcggccacagta

SEQ ID NO: 393506 - DNA, 25 bp, Homo sapien
tagcctggaggttgattcttagccc

SEQ ID NO: 393507 - DNA, 25 bp, Homo sapien
tcctttcctcgtgcacttccccagg

SEQ ID NO: 393508 - DNA, 25 bp, Homo sapien
cttgccttctctcggtgcattttgg

SEQ ID NO: 393509 - DNA, 25 bp, Homo sapien
tttctctcctgcttatccgtccctg

SEQ ID NO: 393510 - DNA, 25 bp, Homo sapien
tctcggtgcattttggtggcctcca

SEQ ID NO: 393511 - DNA, 25 bp, Homo sapien
tgaacaccaagaggaatcagcctgt

SEQ ID NO: 393512 - DNA, 25 bp, Homo sapien
tgggcgggatgcaccaagaatcaga

SEQ ID NO: 393513 - DNA, 25 bp, Homo sapien
cacgacgagctcttcaggataacca

SEQ ID NO: 393514 - DNA, 25 bp, Homo sapien
tgtataatgaacctgccacgacgag

SEQ ID NO: 393515 - DNA, 25 bp, Homo sapien
catctggcctagtcttctgtaacca

SEQ ID NO: 393516 - DNA, 25 bp, Homo sapien
gcttggcacttagttattctccatc

SEQ ID NO: 393517 - DNA, 25 bp, Homo sapien
gagccccagaaggacgagtgcccgc

SEQ ID NO: 393518 - DNA, 25 bp, Homo sapien
ccttattgtcatctggcctagtctt

SEQ ID NO: 393519 - DNA, 25 bp, Homo sapien
ctggtggacggtcacaggctttaca

SEQ ID NO: 393520 - DNA, 25 bp, Homo sapien
gacggtcacaggctttacagacacc

SEQ ID NO: 393521 - DNA, 25 bp, Homo sapien
caggctttacagacacccccagggc

SEQ ID NO: 393522 - DNA, 25 bp, Homo sapien
gggccatctggagctctggtggcag

SEQ ID NO: 393523 - DNA, 25 bp, Homo sapien
ggtcctggccctgggtgcaggtcgc

SEQ ID NO: 393524 - DNA, 25 bp, Homo sapien
gtggtcctggccctgggtgcaggtc

SEQ ID NO: 393525 - DNA, 25 bp, Homo sapien
ccgtggtcctggccctgggtgcagg

SEQ ID NO: 393526 - DNA, 25 bp, Homo sapien
tcagatgccgtggtcctggccctgg

SEQ ID NO: 393527 - DNA, 25 bp, Homo sapien
ggcggctgcactcggactttttact

SEQ ID NO: 393528 - DNA, 25 bp, Homo sapien
gctgcactcggactttttactgtac

SEQ ID NO: 393529 - DNA, 25 bp, Homo sapien
tttactgtactttcccgacgccagc

SEQ ID NO: 393530 - DNA, 25 bp, Homo sapien
gcccggcggctgcactcggactttt

SEQ ID NO: 393531 - DNA, 25 bp, Homo sapien
gatggccttgggccggtagctggag

SEQ ID NO: 393532 - DNA, 25 bp, Homo sapien
gccttgggccggtagctggaggagc

SEQ ID NO: 393533 - DNA, 25 bp, Homo sapien
ccttgggccggtagctggaggagcc

SEQ ID NO: 393534 - DNA, 25 bp, Homo sapien
tggccttgggccggtagctggagga

SEQ ID NO: 393535 - DNA, 25 bp, Homo sapien
aaattaaaggcttcatgtgccagcc

SEQ ID NO: 393536 - DNA, 25 bp, Homo sapien
tgcccggcgggccgatccaccggaa

SEQ ID NO: 393537 - DNA, 25 bp, Homo sapien
tgctcgccccctccgcggaccacga

SEQ ID NO: 393538 - DNA, 25 bp, Homo sapien
tgcgggggagcagtgtccccgccgg

SEQ ID NO: 393539 - DNA, 25 bp, Homo sapien
acaggtaaggccaagccaggagaca

SEQ ID NO: 393540 - DNA, 25 bp, Homo sapien
tgtcaacctggagctttgccggagc

SEQ ID NO: 393541 - DNA, 25 bp, Homo sapien
gagacaccggcacttgctgcccggg

SEQ ID NO: 393542 - DNA, 25 bp, Homo sapien
ggcctccctcagacaacttcagatt

SEQ ID NO: 393543 - DNA, 25 bp, Homo sapien
tggctaccagttctgcacaaagggc

SEQ ID NO: 393544 - DNA, 25 bp, Homo sapien
atggctaccagttctgcacaaaggg

SEQ ID NO: 393545 - DNA, 25 bp, Homo sapien
caggccatcctcatggctaccagtt

SEQ ID NO: 393546 - DNA, 25 bp, Homo sapien
catggctaccagttctgcacaaagg

SEQ ID NO: 393547 - DNA, 25 bp, Homo sapien
gaattcggaccacaccaatgggaag

SEQ ID NO: 393548 - DNA, 25 bp, Homo sapien
tgacttttcggcacccttgggctaa

SEQ ID NO: 393549 - DNA, 25 bp, Homo sapien
gctgtagctctcaagtggtcaggca

SEQ ID NO: 393550 - DNA, 25 bp, Homo sapien
cctggattcccagattgggcggcat

SEQ ID NO: 393551 - DNA, 25 bp, Homo sapien
gaagacgaaggtgcgggctgtggga

SEQ ID NO: 393552 - DNA, 25 bp, Homo sapien
gacgaaggtgcgggctgtgggacct

SEQ ID NO: 393553 - DNA, 25 bp, Homo sapien
agacgaaggtgcgggctgtgggacc

SEQ ID NO: 393554 - DNA, 25 bp, Homo sapien
ggaagacgaaggtgcgggctgtggg

SEQ ID NO: 393555 - DNA, 25 bp, Homo sapien
gacaacgagagctgtcttttgccca

SEQ ID NO: 393556 - DNA, 25 bp, Homo sapien
ctcgctgacaacgagagctgtcttt

SEQ ID NO: 393557 - DNA, 25 bp, Homo sapien
cgctgacaacgagagctgtcttttg

SEQ ID NO: 393558 - DNA, 25 bp, Homo sapien
ctgacaacgagagctgtcttttgcc

SEQ ID NO: 393559 - DNA, 25 bp, Homo sapien
aggactgggctaccgggcccagcct

SEQ ID NO: 393560 - DNA, 25 bp, Homo sapien
ggtgattgggtgagagagggttcag

SEQ ID NO: 393561 - DNA, 25 bp, Homo sapien
ctcaggaagtcttggccccctgggg

SEQ ID NO: 393562 - DNA, 25 bp, Homo sapien
agagagggttcagggttgcccacca

SEQ ID NO: 393563 - DNA, 25 bp, Homo sapien
tatcgggctgtgccgtctggtctct

SEQ ID NO: 393564 - DNA, 25 bp, Homo sapien
atcgggctgtgccgtctggtctctg

SEQ ID NO: 393565 - DNA, 25 bp, Homo sapien
ctatcgggctgtgccgtctggtctc

SEQ ID NO: 393566 - DNA, 25 bp, Homo sapien
tcgggctgtgccgtctggtctctgg

SEQ ID NO: 393567 - DNA, 25 bp, Homo sapien
aatgcaagcacccaactggccttgg

SEQ ID NO: 393568 - DNA, 25 bp, Homo sapien
tacacggtacccagagcgtggtctt

SEQ ID NO: 393569 - DNA, 25 bp, Homo sapien
tatttggacccctggaaatgcaagc

SEQ ID NO: 393570 - DNA, 25 bp, Homo sapien
gcaaactgccttctctgcgagccgt

SEQ ID NO: 393571 - DNA, 25 bp, Homo sapien
agggagggtttattgttcatatatt

SEQ ID NO: 393572 - DNA, 25 bp, Homo sapien
aaagcggaatgtacagtgggggtca

SEQ ID NO: 393573 - DNA, 25 bp, Homo sapien
gagggagggtttattgttcatatat

SEQ ID NO: 393574 - DNA, 25 bp, Homo sapien
gaaagcggaatgtacagtgggggtc

SEQ ID NO: 393575 - DNA, 25 bp, Homo sapien
gactcaagacgtggagaggccttcg

SEQ ID NO: 393576 - DNA, 25 bp, Homo sapien
gcagacaaatgacaaatcggcccca

SEQ ID NO: 393577 - DNA, 25 bp, Homo sapien
gctgcgacgcatcacaggctgtaca

SEQ ID NO: 393578 - DNA, 25 bp, Homo sapien
taccaagtgccagtgtgttctagca

SEQ ID NO: 393579 - DNA, 25 bp, Homo sapien
gcaaagcatgttggggttgtttgct

SEQ ID NO: 393580 - DNA, 25 bp, Homo sapien
gttgtttgctgtttcgccagcatgg

SEQ ID NO: 393581 - DNA, 25 bp, Homo sapien
attgtgatctccagccaacctcctc

SEQ ID NO: 393582 - DNA, 25 bp, Homo sapien
ttgctgtttcgccagcatggccctt

SEQ ID NO: 393583 - DNA, 25 bp, Homo sapien
caagtagcaccaaggcacatggcct

SEQ ID NO: 393584 - DNA, 25 bp, Homo sapien
aaggctgtttcgcaagcaagtagca

SEQ ID NO: 393585 - DNA, 25 bp, Homo sapien
ccgttgagtggcagccgtgattaca

SEQ ID NO: 393586 - DNA, 25 bp, Homo sapien
gggacccttgaaactcatggatcct

SEQ ID NO: 393587 - DNA, 25 bp, Homo sapien
ctgggtccgtgccattcggctgtct

SEQ ID NO: 393588 - DNA, 25 bp, Homo sapien
tctgctaccgaatgctcctagctgg

SEQ ID NO: 393589 - DNA, 25 bp, Homo sapien
taggatcgccctggtcagttgttga

SEQ ID NO: 393590 - DNA, 25 bp, Homo sapien
tctcttacctctaggatcgccctgg

SEQ ID NO: 393591 - DNA, 25 bp, Homo sapien
tggatttggggggccaccgtgacaa

SEQ ID NO: 393592 - DNA, 25 bp, Homo sapien
ctggatttggggggccaccgtgaca

SEQ ID NO: 393593 - DNA, 25 bp, Homo sapien
ccatgtctgcaaagcggtgcaggca

SEQ ID NO: 393594 - DNA, 25 bp, Homo sapien
ggcccatgtctgcaaagcggtgcag

SEQ ID NO: 393595 - DNA, 25 bp, Homo sapien
tgcaggccagcgagtcgcagggcag

SEQ ID NO: 393596 - DNA, 25 bp, Homo sapien
tctgcaaagcggtgcaggcaggacc

SEQ ID NO: 393597 - DNA, 25 bp, Homo sapien
tgtctgtgaggccgttcatggccac

SEQ ID NO: 393598 - DNA, 25 bp, Homo sapien
tctgtgaggccgttcatggccactg

SEQ ID NO: 393599 - DNA, 25 bp, Homo sapien
agtgtctgtgaggccgttcatggcc

SEQ ID NO: 393600 - DNA, 25 bp, Homo sapien
ctgtgaggccgttcatggccactgc

SEQ ID NO: 393601 - DNA, 25 bp, Homo sapien
cccacagacggtcctgtctgctgca

SEQ ID NO: 393602 - DNA, 25 bp, Homo sapien
aggtggccgccggaagaatgctggc

SEQ ID NO: 393603 - DNA, 25 bp, Homo sapien
ctggctgcacatccgatgctgtttg

SEQ ID NO: 393604 - DNA, 25 bp, Homo sapien
tgctgcacctatttcccccgggagg

SEQ ID NO: 393605 - DNA, 25 bp, Homo sapien
gaatgtgtcctggtgcagcgcgatc

SEQ ID NO: 393606 - DNA, 25 bp, Homo sapien
cctcctcgtgacctggatctctggg

SEQ ID NO: 393607 - DNA, 25 bp, Homo sapien
gtgtcctggtgcagcgcgatcccct

SEQ ID NO: 393608 - DNA, 25 bp, Homo sapien
gcgatcccctcctcgtgacctggat

SEQ ID NO: 393609 - DNA, 25 bp, Homo sapien
cgggcaggcattccggaaggttctt

SEQ ID NO: 393610 - DNA, 25 bp, Homo sapien
aggacacagactcgatgccagcagc

SEQ ID NO: 393611 - DNA, 25 bp, Homo sapien
cagcctggcatcgacacttccttgc

SEQ ID NO: 393612 - DNA, 25 bp, Homo sapien
aaaataggacacagactcgatgcca

SEQ ID NO: 393613 - DNA, 25 bp, Homo sapien
tacgtgtcactcaggcacacggttt

SEQ ID NO: 393614 - DNA, 25 bp, Homo sapien
gcacacggtttgactggattcctgg

SEQ ID NO: 393615 - DNA, 25 bp, Homo sapien
tcacggttggtacgggccatggccc

SEQ ID NO: 393616 - DNA, 25 bp, Homo sapien
tcagctcacggttggtacgggccat

SEQ ID NO: 393617 - DNA, 25 bp, Homo sapien
tgactgcttcttactcctgggactc

SEQ ID NO: 393618 - DNA, 25 bp, Homo sapien
gactgggcaggctcgtctgacttta

SEQ ID NO: 393619 - DNA, 25 bp, Homo sapien
tactcctgggactctcaactcaact

SEQ ID NO: 393620 - DNA, 25 bp, Homo sapien
caggctcgtctgactttactcagaa

SEQ ID NO: 393621 - DNA, 25 bp, Homo sapien
tagcatccgcatcttctgtccaagg

SEQ ID NO: 393622 - DNA, 25 bp, Homo sapien
aagcgccgggttagcatccgcatct

SEQ ID NO: 393623 - DNA, 25 bp, Homo sapien
gctgtggtggaagcgccgggttagc

SEQ ID NO: 393624 - DNA, 25 bp, Homo sapien
gggatggccgcgctcgctccccagt

SEQ ID NO: 393625 - DNA, 25 bp, Homo sapien
gcagaacaggtccatgatgtcgctg

SEQ ID NO: 393626 - DNA, 25 bp, Homo sapien
gagttgcagtacttgctgaagatta

SEQ ID NO: 393627 - DNA, 25 bp, Homo sapien
catgatgtcgctggagttgcagtac

SEQ ID NO: 393628 - DNA, 25 bp, Homo sapien
ccggtggcgatgcagaacaggtcca

SEQ ID NO: 393629 - DNA, 25 bp, Homo sapien
gtcgtcggtggtcagcagggagatg

SEQ ID NO: 393630 - DNA, 25 bp, Homo sapien
cgttctgaattcgcgggcatggtgg

SEQ ID NO: 393631 - DNA, 25 bp, Homo sapien
ggcatggtggggtcgatggagacca

SEQ ID NO: 393632 - DNA, 25 bp, Homo sapien
atggagaccatggcgtcgtcggtgg

SEQ ID NO: 393633 - DNA, 25 bp, Homo sapien
catgtctactgagcgctcactgagg

SEQ ID NO: 393634 - DNA, 25 bp, Homo sapien
tccactgggacctcgctgagtggga

SEQ ID NO: 393635 - DNA, 25 bp, Homo sapien
gacagctctggacacgtccactggg

SEQ ID NO: 393636 - DNA, 25 bp, Homo sapien
gctgaggacggcactggccatgtct

SEQ ID NO: 393637 - DNA, 25 bp, Homo sapien
gccatgtccatatcatggtacctca

SEQ ID NO: 393638 - DNA, 25 bp, Homo sapien
tccatatcatggtacctcatctgtc

SEQ ID NO: 393639 - DNA, 25 bp, Homo sapien
tgtctccatcttcttcgcctgtatc

SEQ ID NO: 393640 - DNA, 25 bp, Homo sapien
tgtatcctcaactgcgtgtgtctcc

SEQ ID NO: 393641 - DNA, 25 bp, Homo sapien
cctgaaagcacaaattgacgggcat

SEQ ID NO: 393642 - DNA, 25 bp, Homo sapien
tagtggaactagcttacagggagtg

SEQ ID NO: 393643 - DNA, 25 bp, Homo sapien
ctcaggcacctgtgtggaaatcggg

SEQ ID NO: 393644 - DNA, 25 bp, Homo sapien
cctgggtggttgcaatctgcagcca

SEQ ID NO: 393645 - DNA, 25 bp, Homo sapien
tactgaggtgtctgatttatctcct

SEQ ID NO: 393646 - DNA, 25 bp, Homo sapien
gccatcacatcagcaacagagggaa

SEQ ID NO: 393647 - DNA, 25 bp, Homo sapien
ttctcccacgcaagagactcagagg

SEQ ID NO: 393648 - DNA, 25 bp, Homo sapien
cattcaaccaattcagaggccagcc

SEQ ID NO: 393649 - DNA, 25 bp, Homo sapien
cagagaggcgtgtccagcaacttct

SEQ ID NO: 393650 - DNA, 25 bp, Homo sapien
aaaaacaacaagttacggagtgatg

SEQ ID NO: 393651 - DNA, 25 bp, Homo sapien
acggagtgatgtatagagaatgagc

SEQ ID NO: 393652 - DNA, 25 bp, Homo sapien
caagttacggagtgatgtatagaga

SEQ ID NO: 393653 - DNA, 25 bp, Homo sapien
gagtgatgtatagagaatgagctca

SEQ ID NO: 393654 - DNA, 25 bp, Homo sapien
gtgggttgaaagagcgtgctccact

SEQ ID NO: 393655 - DNA, 25 bp, Homo sapien
gtgcaggtgggttgaaagagcgtgc

SEQ ID NO: 393656 - DNA, 25 bp, Homo sapien
caggtgggttgaaagagcgtgctcc

SEQ ID NO: 393657 - DNA, 25 bp, Homo sapien
ttgaaagagcgtgctccactgtgct

SEQ ID NO: 393658 - DNA, 25 bp, Homo sapien
caggcagatgctattccttgaccca

SEQ ID NO: 393659 - DNA, 25 bp, Homo sapien
gaaacctggtaagagaggtgctaca

SEQ ID NO: 393660 - DNA, 25 bp, Homo sapien
cagtcagtggccaagaggagtaaga

SEQ ID NO: 393661 - DNA, 25 bp, Homo sapien
tgctacaaggacacagggcggcaga

SEQ ID NO: 393662 - DNA, 25 bp, Homo sapien
acagtgcagccaatggaacaggcat

SEQ ID NO: 393663 - DNA, 25 bp, Homo sapien
aaggacagtgcagccaatggaacag

SEQ ID NO: 393664 - DNA, 25 bp, Homo sapien
ggacagtgcagccaatggaacaggc

SEQ ID NO: 393665 - DNA, 25 bp, Homo sapien
ggaaggacagtgcagccaatggaac

SEQ ID NO: 393666 - DNA, 25 bp, Homo sapien
ctctgttgagctgatggcggctgta

SEQ ID NO: 393667 - DNA, 25 bp, Homo sapien
gaagtcgaaaatgcactgggatctc

SEQ ID NO: 393668 - DNA, 25 bp, Homo sapien
ccccaaatgaacaagagaggatggt

SEQ ID NO: 393669 - DNA, 25 bp, Homo sapien
aaaacgtttctgtcgctgacacacg

SEQ ID NO: 393670 - DNA, 25 bp, Homo sapien
tctggcagctgcctggacccatttc

SEQ ID NO: 393671 - DNA, 25 bp, Homo sapien
tcagactctggcagctgcctggacc

SEQ ID NO: 393672 - DNA, 25 bp, Homo sapien
tggcagctgcctggacccatttcag

SEQ ID NO: 393673 - DNA, 25 bp, Homo sapien
gcagctgcctggacccatttcagca

SEQ ID NO: 393674 - DNA, 25 bp, Homo sapien
catgggtactactgccgatcacagg

SEQ ID NO: 393675 - DNA, 25 bp, Homo sapien
aaatgttgtcatgggtactactgcc

SEQ ID NO: 393676 - DNA, 25 bp, Homo sapien
cacaggtgctgtatcaagttggaaa

SEQ ID NO: 393677 - DNA, 25 bp, Homo sapien
tctataatgttcgtgtttggtcaat

SEQ ID NO: 393678 - DNA, 25 bp, Homo sapien
cggagagttgcttgatggccacagg

SEQ ID NO: 393679 - DNA, 25 bp, Homo sapien
ttgatggccacaggtctcactttgt

SEQ ID NO: 393680 - DNA, 25 bp, Homo sapien
gagttgcttgatggccacaggtctc

SEQ ID NO: 393681 - DNA, 25 bp, Homo sapien
cacaggtctcactttgtacggagtg

SEQ ID NO: 393682 - DNA, 25 bp, Homo sapien
taaattcacacgacaggatctggag

SEQ ID NO: 393683 - DNA, 25 bp, Homo sapien
gaaaccagagataacttagagtacc

SEQ ID NO: 393684 - DNA, 25 bp, Homo sapien
tctacggtagtcaagatggtgtgct

SEQ ID NO: 393685 - DNA, 25 bp, Homo sapien
gcaacttcagtcaaaatcctagcag

SEQ ID NO: 393686 - DNA, 25 bp, Homo sapien
tgaacgagattaacagcagactaga

SEQ ID NO: 393687 - DNA, 25 bp, Homo sapien
gctgtactagctaaaacacaatgag

SEQ ID NO: 393688 - DNA, 25 bp, Homo sapien
gaaaacatcttaagttgccagaggg

SEQ ID NO: 393689 - DNA, 25 bp, Homo sapien
caatggaagacgtcacggaaaagtc

SEQ ID NO: 393690 - DNA, 25 bp, Homo sapien
aagcacgcactctgcggatgcgcct

SEQ ID NO: 393691 - DNA, 25 bp, Homo sapien
agctcaagcacgcactctgcggatg

SEQ ID NO: 393692 - DNA, 25 bp, Homo sapien
cactctgcggatgcgcctccttatg

SEQ ID NO: 393693 - DNA, 25 bp, Homo sapien
cagaagctcaagcacgcactctgcg

SEQ ID NO: 393694 - DNA, 25 bp, Homo sapien
taatattctatttcttgctataaag

SEQ ID NO: 393695 - DNA, 25 bp, Homo sapien
ctagaatggaataatattctatttc

SEQ ID NO: 393696 - DNA, 25 bp, Homo sapien
gagccactgtacttggcctagaatg

SEQ ID NO: 393697 - DNA, 25 bp, Homo sapien
gccactgtacttggcctagaatgga

SEQ ID NO: 393698 - DNA, 25 bp, Homo sapien
tggagtccagcagattctccgggtc

SEQ ID NO: 393699 - DNA, 25 bp, Homo sapien
gtcataggagactttaggtttgttc

SEQ ID NO: 393700 - DNA, 25 bp, Homo sapien
gccggatcaggtccgctttgggcca

SEQ ID NO: 393701 - DNA, 25 bp, Homo sapien
ttaggtttgttccagggcaatcctg

SEQ ID NO: 393702 - DNA, 25 bp, Homo sapien
tctttagataatgcaaaatctgcat

SEQ ID NO: 393703 - DNA, 25 bp, Homo sapien
cctctttagataatgcaaaatctgc

SEQ ID NO: 393704 - DNA, 25 bp, Homo sapien
acagtgggctcacggaaccgcctct

SEQ ID NO: 393705 - DNA, 25 bp, Homo sapien
tcacggaaccgcctctttagataat

SEQ ID NO: 393706 - DNA, 25 bp, Homo sapien
aataaaataccagccacacatagtg

SEQ ID NO: 393707 - DNA, 25 bp, Homo sapien
ataaaataccagccacacatagtgg

SEQ ID NO: 393708 - DNA, 25 bp, Homo sapien
tgggctctacctgtccactttcaaa

SEQ ID NO: 393709 - DNA, 25 bp, Homo sapien
tacctgtccactttcaaatgctcct

SEQ ID NO: 393710 - DNA, 25 bp, Homo sapien
gtggttctcttgtcctcgacaccag

SEQ ID NO: 393711 - DNA, 25 bp, Homo sapien
gactggccacggcttgtggttctct

SEQ ID NO: 393712 - DNA, 25 bp, Homo sapien
gcgccagcacgctctggattaattc

SEQ ID NO: 393713 - DNA, 25 bp, Homo sapien
cctgcgccagcacgctctggattaa

SEQ ID NO: 393714 - DNA, 25 bp, Homo sapien
ccagcacgctctggattaattcttc

SEQ ID NO: 393715 - DNA, 25 bp, Homo sapien
tgcgccagcacgctctggattaatt

SEQ ID NO: 393716 - DNA, 25 bp, Homo sapien
tttctctaggacagccaagtgattt

SEQ ID NO: 393717 - DNA, 25 bp, Homo sapien
ttctctaggacagccaagtgatttg

SEQ ID NO: 393718 - DNA, 25 bp, Homo sapien
tacgacatggcctcttcaacttgcc

SEQ ID NO: 393719 - DNA, 25 bp, Homo sapien
tttccgggaagagcatggggggagc

SEQ ID NO: 393720 - DNA, 25 bp, Homo sapien
ttacgacatggcctcttcaacttgc

SEQ ID NO: 393721 - DNA, 25 bp, Homo sapien
tcttcgacccactgccagccctgct

SEQ ID NO: 393722 - DNA, 25 bp, Homo sapien
tgctccacctcaatccagagggagg

SEQ ID NO: 393723 - DNA, 25 bp, Homo sapien
acagctcccctcttcgacccactgc

SEQ ID NO: 393724 - DNA, 25 bp, Homo sapien
ctttccaggacacccggctgctttg

SEQ ID NO: 393725 - DNA, 25 bp, Homo sapien
ctgaggtctgaggtcgggacgtctt

SEQ ID NO: 393726 - DNA, 25 bp, Homo sapien
attctcctttggagccgggtctccg

SEQ ID NO: 393727 - DNA, 25 bp, Homo sapien
gtctgaggtcgggacgtctttgtcc

SEQ ID NO: 393728 - DNA, 25 bp, Homo sapien
acattctcctttggagccgggtctc

SEQ ID NO: 393729 - DNA, 25 bp, Homo sapien
aatgtcactcttgcatttctcaatc

SEQ ID NO: 393730 - DNA, 25 bp, Homo sapien
atctccaccacttttagtccttcca

SEQ ID NO: 393731 - DNA, 25 bp, Homo sapien
cttcttaatgtcactcttgcatttc

SEQ ID NO: 393732 - DNA, 25 bp, Homo sapien
cactcttgcatttctcaatctccac

SEQ ID NO: 393733 - DNA, 25 bp, Homo sapien
ctgcttctggccgccagctcctccc

SEQ ID NO: 393734 - DNA, 25 bp, Homo sapien
ttctggccgccagctcctccctcat

SEQ ID NO: 393735 - DNA, 25 bp, Homo sapien
gcttctggccgccagctcctccctc

SEQ ID NO: 393736 - DNA, 25 bp, Homo sapien
ctgctgcttctggccgccagctcct

SEQ ID NO: 393737 - DNA, 25 bp, Homo sapien
ccccgaagcgcctgtgaaggatgcc

SEQ ID NO: 393738 - DNA, 25 bp, Homo sapien
tcccaggagaatgacttctgtgtcc

SEQ ID NO: 393739 - DNA, 25 bp, Homo sapien
gcgcctgtgaaggatgcctgttccc

SEQ ID NO: 393740 - DNA, 25 bp, Homo sapien
ggagaatgacttctgtgtccccagt

SEQ ID NO: 393741 - DNA, 25 bp, Homo sapien
tgttttgtgtaaacattcgcacatg

SEQ ID NO: 393742 - DNA, 25 bp, Homo sapien
tcgcacatgtgctgtctctgtaagt

SEQ ID NO: 393743 - DNA, 25 bp, Homo sapien
tcttcaccgagcaagacagtttgac

SEQ ID NO: 393744 - DNA, 25 bp, Homo sapien
ggagggttatggaaatcttcaccga

SEQ ID NO: 393745 - DNA, 25 bp, Homo sapien
tgtgtgacattcaccaggctatggg

SEQ ID NO: 393746 - DNA, 25 bp, Homo sapien
ggctccctgtgtacttggacgatgg

SEQ ID NO: 393747 - DNA, 25 bp, Homo sapien
ccctatgggtgtgaacttgcttgga

SEQ ID NO: 393748 - DNA, 25 bp, Homo sapien
ggctgggccgatctgggttcacacc

SEQ ID NO: 393749 - DNA, 25 bp, Homo sapien
ccccagaggctgaatgaggagcagc

SEQ ID NO: 393750 - DNA, 25 bp, Homo sapien
gtccccagaggctgaatgaggagca

SEQ ID NO: 393751 - DNA, 25 bp, Homo sapien
tgtgctggcttcagggtggtcccca

SEQ ID NO: 393752 - DNA, 25 bp, Homo sapien
cttccggttgggcagtgtgctggct

SEQ ID NO: 393753 - DNA, 25 bp, Homo sapien
cacataggagcagggcaaagtgagc

SEQ ID NO: 393754 - DNA, 25 bp, Homo sapien
agtgagccaggcatgtttcagagga

SEQ ID NO: 393755 - DNA, 25 bp, Homo sapien
ggtatcgaggtatcccacataggag

SEQ ID NO: 393756 - DNA, 25 bp, Homo sapien
tagcacacgttagcaatccagtccc

SEQ ID NO: 393757 - DNA, 25 bp, Homo sapien
gggtaagtgggaacatcgcgtcgag

SEQ ID NO: 393758 - DNA, 25 bp, Homo sapien
catcgcgtcgaggagtcaacttctt

SEQ ID NO: 393759 - DNA, 25 bp, Homo sapien
actgtacttacaggggcagttggtc

SEQ ID NO: 393760 - DNA, 25 bp, Homo sapien
tcttgtggttatccaaaaaactgta

SEQ ID NO: 393761 - DNA, 25 bp, Homo sapien
ctttctaaggcacctgcgtcagact

SEQ ID NO: 393762 - DNA, 25 bp, Homo sapien
aaggcacctgcgtcagactcacagg

SEQ ID NO: 393763 - DNA, 25 bp, Homo sapien
ccgcacccagcttctcccgttctct

SEQ ID NO: 393764 - DNA, 25 bp, Homo sapien
ttctaaggcacctgcgtcagactca

SEQ ID NO: 393765 - DNA, 25 bp, Homo sapien
caaagccagacgtcaaaggtcggct

SEQ ID NO: 393766 - DNA, 25 bp, Homo sapien
tcaaaggtcggcttccgcagggcct

SEQ ID NO: 393767 - DNA, 25 bp, Homo sapien
gacgtcaaaggtcggcttccgcagg

SEQ ID NO: 393768 - DNA, 25 bp, Homo sapien
gcctcgatggtctctggagagagca

SEQ ID NO: 393769 - DNA, 25 bp, Homo sapien
cgcagccccttccttgaggagagat

SEQ ID NO: 393770 - DNA, 25 bp, Homo sapien
ggctgccaccggcgtgcatgagggt

SEQ ID NO: 393771 - DNA, 25 bp, Homo sapien
tcctggcaggggtgttctgcagcac

SEQ ID NO: 393772 - DNA, 25 bp, Homo sapien
gaggagagatttgctcctggcaggg

SEQ ID NO: 393773 - DNA, 25 bp, Homo sapien
ggggcagccggttgcctgtgccttg

SEQ ID NO: 393774 - DNA, 25 bp, Homo sapien
gggcagccggttgcctgtgccttgc

SEQ ID NO: 393775 - DNA, 25 bp, Homo sapien
caagcaggaaaacgtccttagattt

SEQ ID NO: 393776 - DNA, 25 bp, Homo sapien
gcttgtcaaagagcacaggtgagct

SEQ ID NO: 393777 - DNA, 25 bp, Homo sapien
tctgccctttgcagagacatcgctg

SEQ ID NO: 393778 - DNA, 25 bp, Homo sapien
catcgctgcggccgagcttgtcaaa

SEQ ID NO: 393779 - DNA, 25 bp, Homo sapien
cacttgcggccacagatgggagctt

SEQ ID NO: 393780 - DNA, 25 bp, Homo sapien
tcaaggcagtcctgaaaggcagatg

SEQ ID NO: 393781 - DNA, 25 bp, Homo sapien
gctgatcggcagacagagacacttg

SEQ ID NO: 393782 - DNA, 25 bp, Homo sapien
caaaagggcatgttacgaactgaac

SEQ ID NO: 393783 - DNA, 25 bp, Homo sapien
gagaattcttaggacagcgaccggg

SEQ ID NO: 393784 - DNA, 25 bp, Homo sapien
tcttaactgcagtgcccagatgcgg

SEQ ID NO: 393785 - DNA, 25 bp, Homo sapien
gggccagttccgaagtcaaggagaa

SEQ ID NO: 393786 - DNA, 25 bp, Homo sapien
tacatccagaaacgctgaactgtgt

SEQ ID NO: 393787 - DNA, 25 bp, Homo sapien
cagcccgaggtcgtggtacatgtgc

SEQ ID NO: 393788 - DNA, 25 bp, Homo sapien
gcccgaggtcgtggtacatgtgctc

SEQ ID NO: 393789 - DNA, 25 bp, Homo sapien
ctgaccagcccgaggtcgtggtaca

SEQ ID NO: 393790 - DNA, 25 bp, Homo sapien
gtgacagggttgatgctgaagtccc

SEQ ID NO: 393791 - DNA, 25 bp, Homo sapien
tccctccattcctgtggaactggat

SEQ ID NO: 393792 - DNA, 25 bp, Homo sapien
attcctgtggaactggatgaaacca

SEQ ID NO: 393793 - DNA, 25 bp, Homo sapien
accacgtgcccaggaagaaccgaag

SEQ ID NO: 393794 - DNA, 25 bp, Homo sapien
gaaccgaaggcgggtttggcactca

SEQ ID NO: 393795 - DNA, 25 bp, Homo sapien
ttctgtagttgtcgtggacgcagaa

SEQ ID NO: 393796 - DNA, 25 bp, Homo sapien
tgggccacgcagaagcagtgccgga

SEQ ID NO: 393797 - DNA, 25 bp, Homo sapien
gtttctgtagttgtcgtggacgcag

SEQ ID NO: 393798 - DNA, 25 bp, Homo sapien
agcagtgccggaagttgtggaaggg

SEQ ID NO: 393799 - DNA, 25 bp, Homo sapien
caggggtgcgtccctaggaggggcg

SEQ ID NO: 393800 - DNA, 25 bp, Homo sapien
gcaggggtgcgtccctaggaggggc

SEQ ID NO: 393801 - DNA, 25 bp, Homo sapien
gctctcttcactcggagggtgggat

SEQ ID NO: 393802 - DNA, 25 bp, Homo sapien
gggcgtaggtgtttgctctcttcac

SEQ ID NO: 393803 - DNA, 25 bp, Homo sapien
taagcgggggacaaaggcccctgca

SEQ ID NO: 393804 - DNA, 25 bp, Homo sapien
gaaaacagggcgtaggtgtttgctc

SEQ ID NO: 393805 - DNA, 25 bp, Homo sapien
atggtccagatcgtggcagatggcc

SEQ ID NO: 393806 - DNA, 25 bp, Homo sapien
tgttgtagccgggatggtccagatc

SEQ ID NO: 393807 - DNA, 25 bp, Homo sapien
caggatatccgtttgtgagaacttc

SEQ ID NO: 393808 - DNA, 25 bp, Homo sapien
gatggccgctgtcattaggatcagg

SEQ ID NO: 393809 - DNA, 25 bp, Homo sapien
agaagatgttgcactcaggctcggc

SEQ ID NO: 393810 - DNA, 25 bp, Homo sapien
ggatctgcttgaacccatcaggtgg

SEQ ID NO: 393811 - DNA, 25 bp, Homo sapien
gatgtcattgtagcggaccgccagc

SEQ ID NO: 393812 - DNA, 25 bp, Homo sapien
gctctgtgcgggcattgatctggta

SEQ ID NO: 393813 - DNA, 25 bp, Homo sapien
cctctttttggggctccactctggg

SEQ ID NO: 393814 - DNA, 25 bp, Homo sapien
ctctttttggggctccactctgggc

SEQ ID NO: 393815 - DNA, 25 bp, Homo sapien
tctttttggggctccactctgggcc

SEQ ID NO: 393816 - DNA, 25 bp, Homo sapien
gacctactgcagacgaagatttgcc

SEQ ID NO: 393817 - DNA, 25 bp, Homo sapien
gatgcagcgttctctcttcacggtt

SEQ ID NO: 393818 - DNA, 25 bp, Homo sapien
cacggttgctccttgacctactgca

SEQ ID NO: 393819 - DNA, 25 bp, Homo sapien
cagcttatcgtagccacacagggca

SEQ ID NO: 393820 - DNA, 25 bp, Homo sapien
gtcagtggccaagattaatgtgatc

SEQ ID NO: 393821 - DNA, 25 bp, Homo sapien
gtggccaagattaatgtgatcattc

SEQ ID NO: 393822 - DNA, 25 bp, Homo sapien
cagtggccaagattaatgtgatcat

SEQ ID NO: 393823 - DNA, 25 bp, Homo sapien
tggccaagattaatgtgatcattcc

SEQ ID NO: 393824 - DNA, 25 bp, Homo sapien
tcgttgctgtagtcaaaattctcca

SEQ ID NO: 393825 - DNA, 25 bp, Homo sapien
gtgctcctcgttgctgtagtcaaaa

SEQ ID NO: 393826 - DNA, 25 bp, Homo sapien
cctcgttgctgtagtcaaaattctc

SEQ ID NO: 393827 - DNA, 25 bp, Homo sapien
gctcctcgttgctgtagtcaaaatt

SEQ ID NO: 393828 - DNA, 25 bp, Homo sapien
cacataggtgggctttcagagtgcc

SEQ ID NO: 393829 - DNA, 25 bp, Homo sapien
ctgtgccttcatgggagagctggtt

SEQ ID NO: 393830 - DNA, 25 bp, Homo sapien
cagatgctgggcaacctaagtgcac

SEQ ID NO: 393831 - DNA, 25 bp, Homo sapien
tggatggatgacctgcttcgccagc

SEQ ID NO: 393832 - DNA, 25 bp, Homo sapien
gacttccattggacggacctcgtta

SEQ ID NO: 393833 - DNA, 25 bp, Homo sapien
acccaaggctctgcgacttccattg

SEQ ID NO: 393834 - DNA, 25 bp, Homo sapien
gagatatcacagcattttatcaaaa

SEQ ID NO: 393835 - DNA, 25 bp, Homo sapien
ctctaataaacagtccacccaaggc

SEQ ID NO: 393836 - DNA, 25 bp, Homo sapien
cccaggcgtgctcgtttaacgcaaa

SEQ ID NO: 393837 - DNA, 25 bp, Homo sapien
caggcgtgctcgtttaacgcaaacc

SEQ ID NO: 393838 - DNA, 25 bp, Homo sapien
accacccaggcgtgctcgtttaacg

SEQ ID NO: 393839 - DNA, 25 bp, Homo sapien
aagtggggctaataagagtggctgg

SEQ ID NO: 393840 - DNA, 25 bp, Homo sapien
gataggcagaggtgagttggatgga

SEQ ID NO: 393841 - DNA, 25 bp, Homo sapien
cagaggtgagttggatggatgtatc

SEQ ID NO: 393842 - DNA, 25 bp, Homo sapien
aggtgagttggatggatgtatccca

SEQ ID NO: 393843 - DNA, 25 bp, Homo sapien
tgagttggatggatgtatcccagga

SEQ ID NO: 393844 - DNA, 25 bp, Homo sapien
gtccatgaacggtgccacaggaagg

SEQ ID NO: 393845 - DNA, 25 bp, Homo sapien
tggtcactttgtctcggtccatgaa

SEQ ID NO: 393846 - DNA, 25 bp, Homo sapien
cactgtttcaaacattgggatcagg

SEQ ID NO: 393847 - DNA, 25 bp, Homo sapien
cattgggatcaggacaaacttgatg

SEQ ID NO: 393848 - DNA, 25 bp, Homo sapien
tcagagtccctcgttcttaaggcaa

SEQ ID NO: 393849 - DNA, 25 bp, Homo sapien
ttaaggcaatgggaaacgtcggaga

SEQ ID NO: 393850 - DNA, 25 bp, Homo sapien
tgccctagagcagaaggatgcgcag

SEQ ID NO: 393851 - DNA, 25 bp, Homo sapien
ccatgaggtcctacagaaagtcccc

SEQ ID NO: 393852 - DNA, 25 bp, Homo sapien
gcttcagctcctcgtagcgatctcg

SEQ ID NO: 393853 - DNA, 25 bp, Homo sapien
tggcgtcatctatccgcttcagctc

SEQ ID NO: 393854 - DNA, 25 bp, Homo sapien
tagcgatctcgggattcccaaagtg

SEQ ID NO: 393855 - DNA, 25 bp, Homo sapien
tgatctcctcaaccatggggaagag

SEQ ID NO: 393856 - DNA, 25 bp, Homo sapien
ttctgatggaaggtacacgtgtgcc

SEQ ID NO: 393857 - DNA, 25 bp, Homo sapien
tcagtcgagggagatgagaccaacc

SEQ ID NO: 393858 - DNA, 25 bp, Homo sapien
tgattcttgtgaagggcacggccag

SEQ ID NO: 393859 - DNA, 25 bp, Homo sapien
tccgtagaaagactgcgtgggccct

SEQ ID NO: 393860 - DNA, 25 bp, Homo sapien
tttcacctctttggcgtgtctctcc

SEQ ID NO: 393861 - DNA, 25 bp, Homo sapien
ccttttcacctctttggcgtgtctc

SEQ ID NO: 393862 - DNA, 25 bp, Homo sapien
ggccttttcacctctttggcgtgtc

SEQ ID NO: 393863 - DNA, 25 bp, Homo sapien
acctctttggcgtgtctctcctttt

SEQ ID NO: 393864 - DNA, 25 bp, Homo sapien
agcttctgttgcctggaggtgctgc

SEQ ID NO: 393865 - DNA, 25 bp, Homo sapien
gacatgggcttttcagaggcagctc

SEQ ID NO: 393866 - DNA, 25 bp, Homo sapien
cgctacccttggtgcctcatctggg

SEQ ID NO: 393867 - DNA, 25 bp, Homo sapien
gctgcaacgtgaaagcctgtggtcc

SEQ ID NO: 393868 - DNA, 25 bp, Homo sapien
ggtggccccagacgtcaagctgtca

SEQ ID NO: 393869 - DNA, 25 bp, Homo sapien
gacgtcaagctgtcagtcttcttct

SEQ ID NO: 393870 - DNA, 25 bp, Homo sapien
ccagacgtcaagctgtcagtcttct

SEQ ID NO: 393871 - DNA, 25 bp, Homo sapien
gccccagacgtcaagctgtcagtct

SEQ ID NO: 393872 - DNA, 25 bp, Homo sapien
tgtatgcgctgagatgccacttcag

SEQ ID NO: 393873 - DNA, 25 bp, Homo sapien
cattgtatgcgctgagatgccactt

SEQ ID NO: 393874 - DNA, 25 bp, Homo sapien
ttgtatgcgctgagatgccacttca

SEQ ID NO: 393875 - DNA, 25 bp, Homo sapien
tcattgtatgcgctgagatgccact

SEQ ID NO: 393876 - DNA, 25 bp, Homo sapien
aagaagggaaacgatgactgatttg

SEQ ID NO: 393877 - DNA, 25 bp, Homo sapien
ggaagaagggaaacgatgactgatt

SEQ ID NO: 393878 - DNA, 25 bp, Homo sapien
gaagggaaacgatgactgatttgtt

SEQ ID NO: 393879 - DNA, 25 bp, Homo sapien
ctggaagaagggaaacgatgactga

SEQ ID NO: 393880 - DNA, 25 bp, Homo sapien
cagtgaacaaaatggttcttagaaa

SEQ ID NO: 393881 - DNA, 25 bp, Homo sapien
agctcttccctgcacaaggatcccg

SEQ ID NO: 393882 - DNA, 25 bp, Homo sapien
acatggtcttgtggtgccaggtgcc

SEQ ID NO: 393883 - DNA, 25 bp, Homo sapien
ttagaaaacatggtcttgtggtgcc

SEQ ID NO: 393884 - DNA, 25 bp, Homo sapien
ctctaccaaagaagaagtacagtac

SEQ ID NO: 393885 - DNA, 25 bp, Homo sapien
agaagaagtacagtacccatttccg

SEQ ID NO: 393886 - DNA, 25 bp, Homo sapien
cccatttccgtataagaatatatta

SEQ ID NO: 393887 - DNA, 25 bp, Homo sapien
tacagtacccatttccgtataagaa

SEQ ID NO: 393888 - DNA, 25 bp, Homo sapien
tgaatttacagggacgtacgcaccg

SEQ ID NO: 393889 - DNA, 25 bp, Homo sapien
taatgctgaatttacagggacgtac

SEQ ID NO: 393890 - DNA, 25 bp, Homo sapien
tcaattgctctaagatacatctggg

SEQ ID NO: 393891 - DNA, 25 bp, Homo sapien
gtacgcaccgcatcacactggtcaa

SEQ ID NO: 393892 - DNA, 25 bp, Homo sapien
cacatgcagcccatgattcagctca

SEQ ID NO: 393893 - DNA, 25 bp, Homo sapien
cgtaggcacatctgtcttgtcctga

SEQ ID NO: 393894 - DNA, 25 bp, Homo sapien
tctccggggccgtaggcacatctgt

SEQ ID NO: 393895 - DNA, 25 bp, Homo sapien
ctggtgcgggcaggctctgggtgtg

SEQ ID NO: 393896 - DNA, 25 bp, Homo sapien
ctatgctgggcatgcccccaggcct

SEQ ID NO: 393897 - DNA, 25 bp, Homo sapien
tatgctgggcatgcccccaggcctg

SEQ ID NO: 393898 - DNA, 25 bp, Homo sapien
ctgggggaacgcctctgctgctgga

SEQ ID NO: 393899 - DNA, 25 bp, Homo sapien
ccaggcctgggggaacgcctctgct

SEQ ID NO: 393900 - DNA, 25 bp, Homo sapien
gaacatctctttgcagcggatggaa

SEQ ID NO: 393901 - DNA, 25 bp, Homo sapien
tagtcttgctgtcccaaattctttg

SEQ ID NO: 393902 - DNA, 25 bp, Homo sapien
gagaaaaaacgaacatctctttgca

SEQ ID NO: 393903 - DNA, 25 bp, Homo sapien
cagcggatggaagattgtatagtct

SEQ ID NO: 393904 - DNA, 25 bp, Homo sapien
ctgctacagccgcttcctccaggcc

SEQ ID NO: 393905 - DNA, 25 bp, Homo sapien
ccggtggccacgcacggggaactct

SEQ ID NO: 393906 - DNA, 25 bp, Homo sapien
ccttggcctgcggggagacaacagc

SEQ ID NO: 393907 - DNA, 25 bp, Homo sapien
acgcacggggaactctgcgagtcct

SEQ ID NO: 393908 - DNA, 25 bp, Homo sapien
tggggcagacaggttttgccctttc

SEQ ID NO: 393909 - DNA, 25 bp, Homo sapien
ctggggcagacaggttttgcccttt

SEQ ID NO: 393910 - DNA, 25 bp, Homo sapien
ttcacccctataatcagtggatctt

SEQ ID NO: 393911 - DNA, 25 bp, Homo sapien
cctggggcagacaggttttgccctt

SEQ ID NO: 393912 - DNA, 25 bp, Homo sapien
tggatttttgccaaggtcctggagg

SEQ ID NO: 393913 - DNA, 25 bp, Homo sapien
gatttttgccaaggtcctggaggaa

SEQ ID NO: 393914 - DNA, 25 bp, Homo sapien
ggtggatttttgccaaggtcctgga

SEQ ID NO: 393915 - DNA, 25 bp, Homo sapien
gtcctggaggaagagtattttccat

SEQ ID NO: 393916 - DNA, 25 bp, Homo sapien
ctgtggttggtcttgggtggcagtt

SEQ ID NO: 393917 - DNA, 25 bp, Homo sapien
gttggtcttgggtggcagtttccca

SEQ ID NO: 393918 - DNA, 25 bp, Homo sapien
cttgggtggcagtttcccatctggc

SEQ ID NO: 393919 - DNA, 25 bp, Homo sapien
cttttctctgtggttggtcttgggt

SEQ ID NO: 393920 - DNA, 25 bp, Homo sapien
tgtgcaatatccagcgtccctttgt

SEQ ID NO: 393921 - DNA, 25 bp, Homo sapien
ggctgaaggtgtgaacaagattgtt

SEQ ID NO: 393922 - DNA, 25 bp, Homo sapien
ttgtccttcaacagaagtcctcttg

SEQ ID NO: 393923 - DNA, 25 bp, Homo sapien
tgtgccagtaaacaaatttccccgc

SEQ ID NO: 393924 - DNA, 25 bp, Homo sapien
tctctggtggaggaatgacaatttt

SEQ ID NO: 393925 - DNA, 25 bp, Homo sapien
cattttaataatggacagttcccta

SEQ ID NO: 393926 - DNA, 25 bp, Homo sapien
gcggtcaccgccttgcattttaata

SEQ ID NO: 393927 - DNA, 25 bp, Homo sapien
cagttccctaatggagaaaagtgaa

SEQ ID NO: 393928 - DNA, 25 bp, Homo sapien
tcttctcgggtcctggcactctgtg

SEQ ID NO: 393929 - DNA, 25 bp, Homo sapien
ggatgtcctgaccactcttctcggg

SEQ ID NO: 393930 - DNA, 25 bp, Homo sapien
aactctgcaccaggacaattctggg

SEQ ID NO: 393931 - DNA, 25 bp, Homo sapien
tgtccccataagtaaactctcctca

SEQ ID NO: 393932 - DNA, 25 bp, Homo sapien
ggttctcatcgggaccacagcaggg

SEQ ID NO: 393933 - DNA, 25 bp, Homo sapien
tagtgccctggttctcatcgggacc

SEQ ID NO: 393934 - DNA, 25 bp, Homo sapien
cactagtgccctggttctcatcggg

SEQ ID NO: 393935 - DNA, 25 bp, Homo sapien
gccctggttctcatcgggaccacag

SEQ ID NO: 393936 - DNA, 25 bp, Homo sapien
ctgagggacccgctgaggcatccag

SEQ ID NO: 393937 - DNA, 25 bp, Homo sapien
ccgctgaggcatccagagcacatct

SEQ ID NO: 393938 - DNA, 25 bp, Homo sapien
gcatccagagcacatctcgtggcca

SEQ ID NO: 393939 - DNA, 25 bp, Homo sapien
agagcacatctcgtggccacagctc

SEQ ID NO: 393940 - DNA, 25 bp, Homo sapien
ctaaggagcggaatgaaaaaccctg

SEQ ID NO: 393941 - DNA, 25 bp, Homo sapien
tgctaaggagcggaatgaaaaaccc

SEQ ID NO: 393942 - DNA, 25 bp, Homo sapien
ctgctaaggagcggaatgaaaaacc

SEQ ID NO: 393943 - DNA, 25 bp, Homo sapien
cttctgctaaggagcggaatgaaaa

SEQ ID NO: 393944 - DNA, 25 bp, Homo sapien
ctggagcagatggtcccgagacccc

SEQ ID NO: 393945 - DNA, 25 bp, Homo sapien
ggagcagatggtcccgagacccctt

SEQ ID NO: 393946 - DNA, 25 bp, Homo sapien
agatggtcccgagaccccttcctgc

SEQ ID NO: 393947 - DNA, 25 bp, Homo sapien
atggtcccgagaccccttcctgcca

SEQ ID NO: 393948 - DNA, 25 bp, Homo sapien
acccctccttctcccaactgaggca

SEQ ID NO: 393949 - DNA, 25 bp, Homo sapien
cagcgagtgcctccctgggaacttg

SEQ ID NO: 393950 - DNA, 25 bp, Homo sapien
tctccttcatcctcaccttcacagc

SEQ ID NO: 393951 - DNA, 25 bp, Homo sapien
cccaggctgtgctcttgggccatct

SEQ ID NO: 393952 - DNA, 25 bp, Homo sapien
gtcgaggcatgggctcagccactgc

SEQ ID NO: 393953 - DNA, 25 bp, Homo sapien
ctggggtcgaggcatgggctcagcc

SEQ ID NO: 393954 - DNA, 25 bp, Homo sapien
tggggtcgaggcatgggctcagcca

SEQ ID NO: 393955 - DNA, 25 bp, Homo sapien
gggtcgaggcatgggctcagccact

SEQ ID NO: 393956 - DNA, 25 bp, Homo sapien
cctggccatgtgggacatctgttct

SEQ ID NO: 393957 - DNA, 25 bp, Homo sapien
tcctggccatgtgggacatctgttc

SEQ ID NO: 393958 - DNA, 25 bp, Homo sapien
ctcaggatggcacctggcggggact

SEQ ID NO: 393959 - DNA, 25 bp, Homo sapien
tggaccacttgcgtgcgatctgtcg

SEQ ID NO: 393960 - DNA, 25 bp, Homo sapien
cacttatgtgcgatccgtggaccac

SEQ ID NO: 393961 - DNA, 25 bp, Homo sapien
aaaaataccctcgagcatatggagc

SEQ ID NO: 393962 - DNA, 25 bp, Homo sapien
tctgtcggccgacgatgagcttgtt

SEQ ID NO: 393963 - DNA, 25 bp, Homo sapien
tcaccacggtgggaaggattcctgc

SEQ ID NO: 393964 - DNA, 25 bp, Homo sapien
tcagtcctggcggtggaggttctcc

SEQ ID NO: 393965 - DNA, 25 bp, Homo sapien
tgcaggagtttagcaacacccaggt

SEQ ID NO: 393966 - DNA, 25 bp, Homo sapien
tccgaggttctcaccaagatccaga

SEQ ID NO: 393967 - DNA, 25 bp, Homo sapien
tacttgcgcgtggaattgctggctc

SEQ ID NO: 393968 - DNA, 25 bp, Homo sapien
cctcaacgcctagtgtttgcggctg

SEQ ID NO: 393969 - DNA, 25 bp, Homo sapien
tggaaaacgcagtgcatcctcaacg

SEQ ID NO: 393970 - DNA, 25 bp, Homo sapien
tcatgatcgacttggaaggcccaca

SEQ ID NO: 393971 - DNA, 25 bp, Homo sapien
cacgaggtaactccctgctgcaggg

SEQ ID NO: 393972 - DNA, 25 bp, Homo sapien
tctgttagtagccagtcctcaggtc

SEQ ID NO: 393973 - DNA, 25 bp, Homo sapien
ggtccaccgaggactctgggagtca

SEQ ID NO: 393974 - DNA, 25 bp, Homo sapien
gtagtggctttctccgggcgtgcaa

SEQ ID NO: 393975 - DNA, 25 bp, Homo sapien
gcagtgtggaatagaccccatttca

SEQ ID NO: 393976 - DNA, 25 bp, Homo sapien
gacggttgctgatggccatgtcctt

SEQ ID NO: 393977 - DNA, 25 bp, Homo sapien
ttagagcgtggagcctcttggttcc

SEQ ID NO: 393978 - DNA, 25 bp, Homo sapien
tcctggcggatgacaacctggccat

SEQ ID NO: 393979 - DNA, 25 bp, Homo sapien
tctccactgaattagtgctgtaatg

SEQ ID NO: 393980 - DNA, 25 bp, Homo sapien
cactgaattagtgctgtaatgaatt

SEQ ID NO: 393981 - DNA, 25 bp, Homo sapien
tccactgaattagtgctgtaatgaa

SEQ ID NO: 393982 - DNA, 25 bp, Homo sapien
tctctccactgaattagtgctgtaa

SEQ ID NO: 393983 - DNA, 25 bp, Homo sapien
agccacaacccggagggcggtcaca

SEQ ID NO: 393984 - DNA, 25 bp, Homo sapien
tacttggaatcgtgcgaagtgcact

SEQ ID NO: 393985 - DNA, 25 bp, Homo sapien
cactccatcagatcaccttggtgag

SEQ ID NO: 393986 - DNA, 25 bp, Homo sapien
tgaactgccaaacccgaaacaccga

SEQ ID NO: 393987 - DNA, 25 bp, Homo sapien
ccagctaccgcggaaaaagatccag

SEQ ID NO: 393988 - DNA, 25 bp, Homo sapien
caggcatctagtagccatcatcagg

SEQ ID NO: 393989 - DNA, 25 bp, Homo sapien
catctagtagccatcatcaggtcct

SEQ ID NO: 393990 - DNA, 25 bp, Homo sapien
atcaggtcctacgtctctccagcta

SEQ ID NO: 393991 - DNA, 25 bp, Homo sapien
ctcgggcctggttaagacttcttat

SEQ ID NO: 393992 - DNA, 25 bp, Homo sapien
tgaaaaaaggtctgtgggctcacaa

SEQ ID NO: 393993 - DNA, 25 bp, Homo sapien
aaaggagggacacccaagagggcag

SEQ ID NO: 393994 - DNA, 25 bp, Homo sapien
tggggagatactcccaggaagcaga

SEQ ID NO: 393995 - DNA, 25 bp, Homo sapien
gacaatgcttatgtcgtcttgccag

SEQ ID NO: 393996 - DNA, 25 bp, Homo sapien
tccaggggtggacatacattttagg

SEQ ID NO: 393997 - DNA, 25 bp, Homo sapien
caaccaccatgaaattaatgggtct

SEQ ID NO: 393998 - DNA, 25 bp, Homo sapien
cataacattcgatttagggtccacc

SEQ ID NO: 393999 - DNA, 25 bp, Homo sapien
gcaatccttgaattatggccacata

SEQ ID NO: 394000 - DNA, 25 bp, Homo sapien
ggctgggccacgctccttctgaaag

SEQ ID NO: 394001 - DNA, 25 bp, Homo sapien
cacgctccttctgaaaggtctaggg

SEQ ID NO: 394002 - DNA, 25 bp, Homo sapien
gccagcaatccttgaattatggcca

SEQ ID NO: 394003 - DNA, 25 bp, Homo sapien
ggattacaacagtaagaatttattc

SEQ ID NO: 394004 - DNA, 25 bp, Homo sapien
attacaacagtaagaatttattctc

SEQ ID NO: 394005 - DNA, 25 bp, Homo sapien
tacaacagtaagaatttattctcac

SEQ ID NO: 394006 - DNA, 25 bp, Homo sapien
tggattacaacagtaagaatttatt

SEQ ID NO: 394007 - DNA, 25 bp, Homo sapien
aatgtacacattaccacatatcagg

SEQ ID NO: 394008 - DNA, 25 bp, Homo sapien
ggaaacacatcctaccagtgaatga

SEQ ID NO: 394009 - DNA, 25 bp, Homo sapien
ctgctcaccaggctttcagtgggct

SEQ ID NO: 394010 - DNA, 25 bp, Homo sapien
gagcaggagccgttcaggaaacaca

SEQ ID NO: 394011 - DNA, 25 bp, Homo sapien
cagtgaatgaacacccttgtttctc

SEQ ID NO: 394012 - DNA, 25 bp, Homo sapien
ggcggtgacagcgggcgcaccaagc

SEQ ID NO: 394013 - DNA, 25 bp, Homo sapien
acagcgggcgcaccaagcagggcca

SEQ ID NO: 394014 - DNA, 25 bp, Homo sapien
ggccacagcagctgcgcgcgcaccc

SEQ ID NO: 394015 - DNA, 25 bp, Homo sapien
agcgggcgcaccaagcagggccaca

SEQ ID NO: 394016 - DNA, 25 bp, Homo sapien
tcgtccttgccgcagcaaacacggg

SEQ ID NO: 394017 - DNA, 25 bp, Homo sapien
gctcgtccttgccgcagcaaacacg

SEQ ID NO: 394018 - DNA, 25 bp, Homo sapien
ccggctcgtccttgccgcagcaaac

SEQ ID NO: 394019 - DNA, 25 bp, Homo sapien
cttcagcgccccggctcgtccttgc

SEQ ID NO: 394020 - DNA, 25 bp, Homo sapien
ctagaggtcgcggacaggcccggac

SEQ ID NO: 394021 - DNA, 25 bp, Homo sapien
ggccccgtggcggtcagtcctgggc

SEQ ID NO: 394022 - DNA, 25 bp, Homo sapien
tcaccccatcccctacgtaggctcg

SEQ ID NO: 394023 - DNA, 25 bp, Homo sapien
gcccaactaggacggctagaggtcg

SEQ ID NO: 394024 - DNA, 25 bp, Homo sapien
ggacgctcgctggccacatccgggc

SEQ ID NO: 394025 - DNA, 25 bp, Homo sapien
gggagcgcccgtcggcacggggcac

SEQ ID NO: 394026 - DNA, 25 bp, Homo sapien
ggggaaccgcgggacgctcgctggc

SEQ ID NO: 394027 - DNA, 25 bp, Homo sapien
tgggaacgtccacccgagtctgccg

SEQ ID NO: 394028 - DNA, 25 bp, Homo sapien
cagagaagccgtgcgggagccgcac

SEQ ID NO: 394029 - DNA, 25 bp, Homo sapien
tcagagaagccgtgcgggagccgca

SEQ ID NO: 394030 - DNA, 25 bp, Homo sapien
agccgtgcgggagccgcacagcggc

SEQ ID NO: 394031 - DNA, 25 bp, Homo sapien
agaagccgtgcgggagccgcacagc

SEQ ID NO: 394032 - DNA, 25 bp, Homo sapien
gattccgcagacaaagaaaccgtag

SEQ ID NO: 394033 - DNA, 25 bp, Homo sapien
gaaaccgtagaagcaagtcctcgaa

SEQ ID NO: 394034 - DNA, 25 bp, Homo sapien
ggaattctgtggctgacccttttca

SEQ ID NO: 394035 - DNA, 25 bp, Homo sapien
gcaagtcctcgaaacacctgggctt

SEQ ID NO: 394036 - DNA, 25 bp, Homo sapien
aaccacagatgggtctcaaagagac

SEQ ID NO: 394037 - DNA, 25 bp, Homo sapien
aaaactcactgtcgtgcttcgaagg

SEQ ID NO: 394038 - DNA, 25 bp, Homo sapien
gcttcgaaggctgactaatctattt

SEQ ID NO: 394039 - DNA, 25 bp, Homo sapien
taaggtggctttctggcaagctcac

SEQ ID NO: 394040 - DNA, 25 bp, Homo sapien
tatgatgtaggattgcagacacaga

SEQ ID NO: 394041 - DNA, 25 bp, Homo sapien
tcaactaattgttcatcagtaaaca

SEQ ID NO: 394042 - DNA, 25 bp, Homo sapien
caccaaaggagaggataatgttagc

SEQ ID NO: 394043 - DNA, 25 bp, Homo sapien
gacacagactaaaattcaccaaagg

SEQ ID NO: 394044 - DNA, 25 bp, Homo sapien
gaaaatatgggcctgcacgtatcca

SEQ ID NO: 394045 - DNA, 25 bp, Homo sapien
ggaaagctggacacctctgatgaaa

SEQ ID NO: 394046 - DNA, 25 bp, Homo sapien
tcctcagggagaacgcatgtgctgg

SEQ ID NO: 394047 - DNA, 25 bp, Homo sapien
caaggatgagagctttgggtacctc

SEQ ID NO: 394048 - DNA, 25 bp, Homo sapien
agtttcactcttttgggtcaggcta

SEQ ID NO: 394049 - DNA, 25 bp, Homo sapien
cactgtgtgtaaatagaaattacgt

SEQ ID NO: 394050 - DNA, 25 bp, Homo sapien
gcctatttttttactgagccactat

SEQ ID NO: 394051 - DNA, 25 bp, Homo sapien
gagccactatttacactgtgtgtaa

SEQ ID NO: 394052 - DNA, 25 bp, Homo sapien
catctgtgaatagcacgctgccact

SEQ ID NO: 394053 - DNA, 25 bp, Homo sapien
tgagaggcctctggttttcgaagcc

SEQ ID NO: 394054 - DNA, 25 bp, Homo sapien
taatgtccacatgcggcttctgcag

SEQ ID NO: 394055 - DNA, 25 bp, Homo sapien
cactgggactgggactagctacctt

SEQ ID NO: 394056 - DNA, 25 bp, Homo sapien
ttcggtggcgcagacaaccctgatt

SEQ ID NO: 394057 - DNA, 25 bp, Homo sapien
gaaaccgtggttattctcaacagga

SEQ ID NO: 394058 - DNA, 25 bp, Homo sapien
gcacgggtttttccagatgcccctc

SEQ ID NO: 394059 - DNA, 25 bp, Homo sapien
ccaaattgcttggtggtatctgatc

SEQ ID NO: 394060 - DNA, 25 bp, Homo sapien
caagaaggcgtcatgtaaggcacat

SEQ ID NO: 394061 - DNA, 25 bp, Homo sapien
gccgcgcttgttagggatcatgcac

SEQ ID NO: 394062 - DNA, 25 bp, Homo sapien
cacttggcgtactgatcaaagagca

SEQ ID NO: 394063 - DNA, 25 bp, Homo sapien
gaaatgcagttcctaagggctggga

SEQ ID NO: 394064 - DNA, 25 bp, Homo sapien
ggcacggactgcctagtgagaccgc

SEQ ID NO: 394065 - DNA, 25 bp, Homo sapien
tgcctagtgagaccgcggccccata

SEQ ID NO: 394066 - DNA, 25 bp, Homo sapien
ccagtactggggcacggactgccta

SEQ ID NO: 394067 - DNA, 25 bp, Homo sapien
cccatacagacacggctctgcaagg

SEQ ID NO: 394068 - DNA, 25 bp, Homo sapien
ctccacaaggtgagtatcttcggtg

SEQ ID NO: 394069 - DNA, 25 bp, Homo sapien
tatcttcggtgtggtgtagggacac

SEQ ID NO: 394070 - DNA, 25 bp, Homo sapien
acaaggtgagtatcttcggtgtggt

SEQ ID NO: 394071 - DNA, 25 bp, Homo sapien
agtatcttcggtgtggtgtagggac

SEQ ID NO: 394072 - DNA, 25 bp, Homo sapien
ctaccaagcgttcttcatcaaccct

SEQ ID NO: 394073 - DNA, 25 bp, Homo sapien
taccaagcgttcttcatcaacccta

SEQ ID NO: 394074 - DNA, 25 bp, Homo sapien
accaagcgttcttcatcaaccctat

SEQ ID NO: 394075 - DNA, 25 bp, Homo sapien
ggcgcttacctaccaagcattcttc

SEQ ID NO: 394076 - DNA, 25 bp, Homo sapien
aggcgcttacctaccaagcattctt

SEQ ID NO: 394077 - DNA, 25 bp, Homo sapien
caggcgcttacctaccaagcattct

SEQ ID NO: 394078 - DNA, 25 bp, Homo sapien
acaggcgcttacctaccaagcattc

SEQ ID NO: 394079 - DNA, 25 bp, Homo sapien
tgagaccaacacaaggacagctctt

SEQ ID NO: 394080 - DNA, 25 bp, Homo sapien
cagctctttatgaatgactcggctc

SEQ ID NO: 394081 - DNA, 25 bp, Homo sapien
ctgcggaggaaacacgatgcccatg

SEQ ID NO: 394082 - DNA, 25 bp, Homo sapien
gctctttatgaatgactcggctcac

SEQ ID NO: 394083 - DNA, 25 bp, Homo sapien
tacgtgctgtagtcatgatgctgca

SEQ ID NO: 394084 - DNA, 25 bp, Homo sapien
gtcgaggtgactcccggcctgagga

SEQ ID NO: 394085 - DNA, 25 bp, Homo sapien
attttgagagttcgaggttgaggtc

SEQ ID NO: 394086 - DNA, 25 bp, Homo sapien
ttgaggtctaagaaggtgtacgtgc

SEQ ID NO: 394087 - DNA, 25 bp, Homo sapien
cagtgaagacggtggaaggttcatc

SEQ ID NO: 394088 - DNA, 25 bp, Homo sapien
aggttcatcttcacaccgagggccc

SEQ ID NO: 394089 - DNA, 25 bp, Homo sapien
atttttgcactccaggatgcagtga

SEQ ID NO: 394090 - DNA, 25 bp, Homo sapien
gatgcagtgaagacggtggaaggtt

SEQ ID NO: 394091 - DNA, 25 bp, Homo sapien
tgcccagtgattcataaccttagag

SEQ ID NO: 394092 - DNA, 25 bp, Homo sapien
cagtagaatcacaccgctctaaagc

SEQ ID NO: 394093 - DNA, 25 bp, Homo sapien
taatgcgaaattgactaggctgagc

SEQ ID NO: 394094 - DNA, 25 bp, Homo sapien
agtgaaaccgattatgcacagcggg

SEQ ID NO: 394095 - DNA, 25 bp, Homo sapien
cccagcttgagaactattaaatgaa

SEQ ID NO: 394096 - DNA, 25 bp, Homo sapien
catcacagtagttccacggatccca

SEQ ID NO: 394097 - DNA, 25 bp, Homo sapien
gggaatcctgtaagatgttaatggc

SEQ ID NO: 394098 - DNA, 25 bp, Homo sapien
tgcaaatagcaggatagaaaagttg

SEQ ID NO: 394099 - DNA, 25 bp, Homo sapien
tattacagacaggtctctaagggtg

SEQ ID NO: 394100 - DNA, 25 bp, Homo sapien
tcctattgcttcagatccgttctag

SEQ ID NO: 394101 - DNA, 25 bp, Homo sapien
cgttctagaataaaggccaaggtca

SEQ ID NO: 394102 - DNA, 25 bp, Homo sapien
tacactagaaggaacactgttttag

SEQ ID NO: 394103 - DNA, 25 bp, Homo sapien
tcagccacttactcagcctgaggct

SEQ ID NO: 394104 - DNA, 25 bp, Homo sapien
cactgtctagttttcctcccacgaa

SEQ ID NO: 394105 - DNA, 25 bp, Homo sapien
gagtctctgaatacaggcagttgaa

SEQ ID NO: 394106 - DNA, 25 bp, Homo sapien
cgtggtgccgtttcctaaaggattg

SEQ ID NO: 394107 - DNA, 25 bp, Homo sapien
ctcgaacatctgagctcgtgaccct

SEQ ID NO: 394108 - DNA, 25 bp, Homo sapien
gaacatctgagctcgtgaccctccc

SEQ ID NO: 394109 - DNA, 25 bp, Homo sapien
agctcgtgaccctcccatgtcagcc

SEQ ID NO: 394110 - DNA, 25 bp, Homo sapien
tgagctcgtgaccctcccatgtcag

SEQ ID NO: 394111 - DNA, 25 bp, Homo sapien
cggtgtgcatatcccgcaagtggac

SEQ ID NO: 394112 - DNA, 25 bp, Homo sapien
caacccagtatgagggacggtgtgc

SEQ ID NO: 394113 - DNA, 25 bp, Homo sapien
tgagggacggtgtgcatatcccgca

SEQ ID NO: 394114 - DNA, 25 bp, Homo sapien
ccgcaagtggactgataaaacccat

SEQ ID NO: 394115 - DNA, 25 bp, Homo sapien
gggagatgcaacaatactttactta

SEQ ID NO: 394116 - DNA, 25 bp, Homo sapien
ggagaaccattgtgcttaccatgaa

SEQ ID NO: 394117 - DNA, 25 bp, Homo sapien
tctgtttgtagatctaggagaacca

SEQ ID NO: 394118 - DNA, 25 bp, Homo sapien
tatggaaacttaatcgaggaatgtg

SEQ ID NO: 394119 - DNA, 25 bp, Homo sapien
cagcccctccgagctgccgtgagtg

SEQ ID NO: 394120 - DNA, 25 bp, Homo sapien
agcagcccctccgagctgccgtgag

SEQ ID NO: 394121 - DNA, 25 bp, Homo sapien
cccctccgagctgccgtgagtgtta

SEQ ID NO: 394122 - DNA, 25 bp, Homo sapien
cagtagctgtcctgctgtccacagc

SEQ ID NO: 394123 - DNA, 25 bp, Homo sapien
tcttaatatgggaatatccctcacc

SEQ ID NO: 394124 - DNA, 25 bp, Homo sapien
tgggaatatccctcaccacgatcct

SEQ ID NO: 394125 - DNA, 25 bp, Homo sapien
caaccaaaagtcttaatatgggaat

SEQ ID NO: 394126 - DNA, 25 bp, Homo sapien
ggaatatccctcaccacgatcctaa

SEQ ID NO: 394127 - DNA, 25 bp, Homo sapien
ttatggacaatctggtaggcgtgga

SEQ ID NO: 394128 - DNA, 25 bp, Homo sapien
ccagaggcttgcaggttagggtttt

SEQ ID NO: 394129 - DNA, 25 bp, Homo sapien
ggtgcagctaaatggttgagatgaa

SEQ ID NO: 394130 - DNA, 25 bp, Homo sapien
ggcgtggagctagaggatgggtgca

SEQ ID NO: 394131 - DNA, 25 bp, Homo sapien
tggtattagagtgtttccggcttat

SEQ ID NO: 394132 - DNA, 25 bp, Homo sapien
tgtttccggcttatggagaatacct

SEQ ID NO: 394133 - DNA, 25 bp, Homo sapien
attagagtgtttccggcttatggag

SEQ ID NO: 394134 - DNA, 25 bp, Homo sapien
gagtgtttccggcttatggagaata

SEQ ID NO: 394135 - DNA, 25 bp, Homo sapien
aagatgatagtcttggctttgggcg

SEQ ID NO: 394136 - DNA, 25 bp, Homo sapien
agcctgcggccaagagatggctaat

SEQ ID NO: 394137 - DNA, 25 bp, Homo sapien
actattacaagatgatagtcttggc

SEQ ID NO: 394138 - DNA, 25 bp, Homo sapien
tggctaatgctcaaagttctcttgg

SEQ ID NO: 394139 - DNA, 25 bp, Homo sapien
tatacatttcctacgctgttgggag

SEQ ID NO: 394140 - DNA, 25 bp, Homo sapien
gggtatacaccacctgcaatattgg

SEQ ID NO: 394141 - DNA, 25 bp, Homo sapien
ggtgtacaccctctgcgatactaag

SEQ ID NO: 394142 - DNA, 25 bp, Homo sapien
tgggaaaaatatcacagcacgggta

SEQ ID NO: 394143 - DNA, 25 bp, Homo sapien
cagcgtaatgcgaggcaagtgccag

SEQ ID NO: 394144 - DNA, 25 bp, Homo sapien
taggccggtatttctacgtctcgca

SEQ ID NO: 394145 - DNA, 25 bp, Homo sapien
gacgcagcggtgtgttatctgccga

SEQ ID NO: 394146 - DNA, 25 bp, Homo sapien
ttgggactgcccttacggatcagct

SEQ ID NO: 394147 - DNA, 25 bp, Homo sapien
tgcagcaatcgggacccgcagtgcc

SEQ ID NO: 394148 - DNA, 25 bp, Homo sapien
gacacagcctcgctcaatgggagga

SEQ ID NO: 394149 - DNA, 25 bp, Homo sapien
gtccaaccgtcacgccgacgctggg

SEQ ID NO: 394150 - DNA, 25 bp, Homo sapien
tcttcatcacactgacaagcggctg

SEQ ID NO: 394151 - DNA, 25 bp, Homo sapien
cgctcgccacggccgaggccggggc

SEQ ID NO: 394152 - DNA, 25 bp, Homo sapien
ctcgccacggccgaggccggggccg

SEQ ID NO: 394153 - DNA, 25 bp, Homo sapien
gctcgccacggccgaggccggggcc

SEQ ID NO: 394154 - DNA, 25 bp, Homo sapien
ccgctcgccacggccgaggccgggg

SEQ ID NO: 394155 - DNA, 25 bp, Homo sapien
ccaaacactgccgtcagcgagcggc

SEQ ID NO: 394156 - DNA, 25 bp, Homo sapien
tcatccattaccacgacccgtgtga

SEQ ID NO: 394157 - DNA, 25 bp, Homo sapien
gacccgtgtgacagaagcggctctt

SEQ ID NO: 394158 - DNA, 25 bp, Homo sapien
agaagcggctcttcccaccaattcc

SEQ ID NO: 394159 - DNA, 25 bp, Homo sapien
gaactcgaattatctgaggtacgcc

SEQ ID NO: 394160 - DNA, 25 bp, Homo sapien
tactggcagaggttcacatttcacc

SEQ ID NO: 394161 - DNA, 25 bp, Homo sapien
gaggtacgcctgtgtacaaggacag

SEQ ID NO: 394162 - DNA, 25 bp, Homo sapien
tacttattttactgcggtggtctgg

SEQ ID NO: 394163 - DNA, 25 bp, Homo sapien
tattcctagtgaagacgctgtgcac

SEQ ID NO: 394164 - DNA, 25 bp, Homo sapien
aaggaggagtccatcaatgcagtaa

SEQ ID NO: 394165 - DNA, 25 bp, Homo sapien
tttaagtaactgacacagccaccac

SEQ ID NO: 394166 - DNA, 25 bp, Homo sapien
cactgaggccagattgtcaaagtat

SEQ ID NO: 394167 - DNA, 25 bp, Homo sapien
gctggacacatgctgcacacctgtt

SEQ ID NO: 394168 - DNA, 25 bp, Homo sapien
ggacacatgctgcacacctgttatc

SEQ ID NO: 394169 - DNA, 25 bp, Homo sapien
tagctggacacatgctgcacacctg

SEQ ID NO: 394170 - DNA, 25 bp, Homo sapien
aaattagctggacacatgctgcaca

SEQ ID NO: 394171 - DNA, 25 bp, Homo sapien
taagcaatgttatcctgaccagtca

SEQ ID NO: 394172 - DNA, 25 bp, Homo sapien
gggatcagcacaactgctctcggtg

SEQ ID NO: 394173 - DNA, 25 bp, Homo sapien
tgtagaccctaaccagtatcccagg

SEQ ID NO: 394174 - DNA, 25 bp, Homo sapien
ccagcgctcaatgggaactagtcac

SEQ ID NO: 394175 - DNA, 25 bp, Homo sapien
ccatgcctgcccatgattattaact

SEQ ID NO: 394176 - DNA, 25 bp, Homo sapien
gccacagtggatcgttacttattat

SEQ ID NO: 394177 - DNA, 25 bp, Homo sapien
accatgcctgcccatgattattaac

SEQ ID NO: 394178 - DNA, 25 bp, Homo sapien
aggaagccacagtggatcgttactt

SEQ ID NO: 394179 - DNA, 25 bp, Homo sapien
tgtgagtcacagtgctcggctgctt

SEQ ID NO: 394180 - DNA, 25 bp, Homo sapien
catgctgacctccaaagaaggatac

SEQ ID NO: 394181 - DNA, 25 bp, Homo sapien
caggtggtaagaccctcatgtgaga

SEQ ID NO: 394182 - DNA, 25 bp, Homo sapien
gcaggtcacgaaacctaggaaggac

SEQ ID NO: 394183 - DNA, 25 bp, Homo sapien
cagccactcaaggcgcctggaagct

SEQ ID NO: 394184 - DNA, 25 bp, Homo sapien
tggaagctcggcccgcgagtcctgt

SEQ ID NO: 394185 - DNA, 25 bp, Homo sapien
cccgcgagtcctgttgatgtaggcc

SEQ ID NO: 394186 - DNA, 25 bp, Homo sapien
tgcagcagggcaacgtggaggcccg

SEQ ID NO: 394187 - DNA, 25 bp, Homo sapien
gaaaatctctttggacacaaccact

SEQ ID NO: 394188 - DNA, 25 bp, Homo sapien
ccacttccacaaactgaaggtgctg

SEQ ID NO: 394189 - DNA, 25 bp, Homo sapien
cagtagacttgccagggctttttaa

SEQ ID NO: 394190 - DNA, 25 bp, Homo sapien
ggtaaccatacaggaacagacccac

SEQ ID NO: 394191 - DNA, 25 bp, Homo sapien
tggtgcaggtcacagacatttagag

SEQ ID NO: 394192 - DNA, 25 bp, Homo sapien
catgggtgtggaaaaacactgcaga

SEQ ID NO: 394193 - DNA, 25 bp, Homo sapien
ccacggccggcatggccttgctgct

SEQ ID NO: 394194 - DNA, 25 bp, Homo sapien
agagcagccgggctggaccacggcc

SEQ ID NO: 394195 - DNA, 25 bp, Homo sapien
caaatcatcttgggtgaaaagcgaa

SEQ ID NO: 394196 - DNA, 25 bp, Homo sapien
aaatcatcttgggtgaaaagcgaat

SEQ ID NO: 394197 - DNA, 25 bp, Homo sapien
gctgtctatacttaatgtctgtgta

SEQ ID NO: 394198 - DNA, 25 bp, Homo sapien
gatagctgtctatacttaatgtctg

SEQ ID NO: 394199 - DNA, 25 bp, Homo sapien
ctgttgcccatcttgatagctgtct

SEQ ID NO: 394200 - DNA, 25 bp, Homo sapien
gcccatcttgatagctgtctatact

SEQ ID NO: 394201 - DNA, 25 bp, Homo sapien
ctcaggaccaggacgggccatttct

SEQ ID NO: 394202 - DNA, 25 bp, Homo sapien
tttctcccgcggtggatttggccat

SEQ ID NO: 394203 - DNA, 25 bp, Homo sapien
agcttcctcaggaccaggacgggcc

SEQ ID NO: 394204 - DNA, 25 bp, Homo sapien
cgggccatttctcccgcggtggatt

SEQ ID NO: 394205 - DNA, 25 bp, Homo sapien
tctgcatcgggttcagagcagtttg

SEQ ID NO: 394206 - DNA, 25 bp, Homo sapien
gtctttaactctgttactacttgca

SEQ ID NO: 394207 - DNA, 25 bp, Homo sapien
acatccatcggggtctgagactcca

SEQ ID NO: 394208 - DNA, 25 bp, Homo sapien
gctcactccttctgcatcgggttca

SEQ ID NO: 394209 - DNA, 25 bp, Homo sapien
cagagccctgtgtagattgttcaca

SEQ ID NO: 394210 - DNA, 25 bp, Homo sapien
tacatcaaaactggcagaagttgtg

SEQ ID NO: 394211 - DNA, 25 bp, Homo sapien
ctggcagaagttgtgccttcagagc

SEQ ID NO: 394212 - DNA, 25 bp, Homo sapien
tacaaaattttcgatgtctacatca

SEQ ID NO: 394213 - DNA, 25 bp, Homo sapien
gcaatccagtgatgacggaaccaag

SEQ ID NO: 394214 - DNA, 25 bp, Homo sapien
tgatgccggatctttgtgtacccag

SEQ ID NO: 394215 - DNA, 25 bp, Homo sapien
caagatggctcgaagggaatccagt

SEQ ID NO: 394216 - DNA, 25 bp, Homo sapien
aaacacgtggttacactctggcagg

SEQ ID NO: 394217 - DNA, 25 bp, Homo sapien
tccagctcaagaagatgaatgcgca

SEQ ID NO: 394218 - DNA, 25 bp, Homo sapien
gacaagcaatgtatcgactgcagaa

SEQ ID NO: 394219 - DNA, 25 bp, Homo sapien
gcagagttcgttaaccttttccagc

SEQ ID NO: 394220 - DNA, 25 bp, Homo sapien
ggtgagtacgggcttccaggctctc

SEQ ID NO: 394221 - DNA, 25 bp, Homo sapien
gagagacatgccatacctgtggact

SEQ ID NO: 394222 - DNA, 25 bp, Homo sapien
tgtggacaggcaaaggaaccagaac

SEQ ID NO: 394223 - DNA, 25 bp, Homo sapien
cagtgagcgactgaaaggtgtcccc

SEQ ID NO: 394224 - DNA, 25 bp, Homo sapien
tcttattcgagatggcacaggccag

SEQ ID NO: 394225 - DNA, 25 bp, Homo sapien
acgtttccctgctgcagcgcggacg

SEQ ID NO: 394226 - DNA, 25 bp, Homo sapien
tgccaccgtcgccatggctacgttt

SEQ ID NO: 394227 - DNA, 25 bp, Homo sapien
gatggtgcctgtgatggcactttga

SEQ ID NO: 394228 - DNA, 25 bp, Homo sapien
ggtgcctgtgatggcactttgaatc

SEQ ID NO: 394229 - DNA, 25 bp, Homo sapien
cattctaacacacaggaccattttc

SEQ ID NO: 394230 - DNA, 25 bp, Homo sapien
ctaacacacaggaccattttctgca

SEQ ID NO: 394231 - DNA, 25 bp, Homo sapien
tactgtcattctaacacacaggacc

SEQ ID NO: 394232 - DNA, 25 bp, Homo sapien
tatttatactgtcattctaacacac

SEQ ID NO: 394233 - DNA, 25 bp, Homo sapien
ccacttggccttggggagtgacgac

SEQ ID NO: 394234 - DNA, 25 bp, Homo sapien
tgtcccaggcgacaatgtctgtgtg

SEQ ID NO: 394235 - DNA, 25 bp, Homo sapien
tggatcctaattgtcccaggcgaca

SEQ ID NO: 394236 - DNA, 25 bp, Homo sapien
cgtgacaggctgatacactgtgcca

SEQ ID NO: 394237 - DNA, 25 bp, Homo sapien
caagtacttacaactgcaggtggag

SEQ ID NO: 394238 - DNA, 25 bp, Homo sapien
gaaattctcacatatccaagtactt

SEQ ID NO: 394239 - DNA, 25 bp, Homo sapien
tgattgtagtcgaggcccatgcacg

SEQ ID NO: 394240 - DNA, 25 bp, Homo sapien
aaacagccaaggatcggacagggaa

SEQ ID NO: 394241 - DNA, 25 bp, Homo sapien
tgatgcaagatgctgagatcttggt

SEQ ID NO: 394242 - DNA, 25 bp, Homo sapien
gcaagatgctgagatcttggtttaa

SEQ ID NO: 394243 - DNA, 25 bp, Homo sapien
gatgcaagatgctgagatcttggtt

SEQ ID NO: 394244 - DNA, 25 bp, Homo sapien
cttgatgcaagatgctgagatcttg

SEQ ID NO: 394245 - DNA, 25 bp, Homo sapien
cctcttgttcttagatgaaccatca

SEQ ID NO: 394246 - DNA, 25 bp, Homo sapien
gcatgctttggcaggacgcccctct

SEQ ID NO: 394247 - DNA, 25 bp, Homo sapien
tcacgttcgtggcatgctttggcag

SEQ ID NO: 394248 - DNA, 25 bp, Homo sapien
gagccaggaccgcatcacgttcgtg

SEQ ID NO: 394249 - DNA, 25 bp, Homo sapien
tctacaccaggcttgatacaatcta

SEQ ID NO: 394250 - DNA, 25 bp, Homo sapien
gtttaacggttcagcggtgacgata

SEQ ID NO: 394251 - DNA, 25 bp, Homo sapien
catcatgaggagcagctatgcagtc

SEQ ID NO: 394252 - DNA, 25 bp, Homo sapien
cagcggtgacgataacagcagcgac

SEQ ID NO: 394253 - DNA, 25 bp, Homo sapien
gttgacttggagtagtgtcaaattt

SEQ ID NO: 394254 - DNA, 25 bp, Homo sapien
gtagtgtcaaatttgtctgagcagc

SEQ ID NO: 394255 - DNA, 25 bp, Homo sapien
gtgtcaaatttgtctgagcagcaat

SEQ ID NO: 394256 - DNA, 25 bp, Homo sapien
tagtgtcaaatttgtctgagcagca

SEQ ID NO: 394257 - DNA, 25 bp, Homo sapien
aaacctctgaactggccggttctga

SEQ ID NO: 394258 - DNA, 25 bp, Homo sapien
gaattcgtcttctggcattgatgaa

SEQ ID NO: 394259 - DNA, 25 bp, Homo sapien
ggtggctgtgcgactcctgatgcaa

SEQ ID NO: 394260 - DNA, 25 bp, Homo sapien
tccaacattggctgaagaattcgtc

SEQ ID NO: 394261 - DNA, 25 bp, Homo sapien
taatccccaccccatggtccaccat

SEQ ID NO: 394262 - DNA, 25 bp, Homo sapien
accccatggtccaccatgtctggcc

SEQ ID NO: 394263 - DNA, 25 bp, Homo sapien
ccaccccatggtccaccatgtctgg

SEQ ID NO: 394264 - DNA, 25 bp, Homo sapien
tccccaccccatggtccaccatgtc

SEQ ID NO: 394265 - DNA, 25 bp, Homo sapien
ctgtagctactccgagctactcggg

SEQ ID NO: 394266 - DNA, 25 bp, Homo sapien
cctgtagctactccgagctactcgg

SEQ ID NO: 394267 - DNA, 25 bp, Homo sapien
caggcacctgtagctactccgagct

SEQ ID NO: 394268 - DNA, 25 bp, Homo sapien
gcacctgtagctactccgagctact

SEQ ID NO: 394269 - DNA, 25 bp, Homo sapien
tgttcacgggcgtggtgatggtgac

SEQ ID NO: 394270 - DNA, 25 bp, Homo sapien
tggccccgtccgaggacagagactg

SEQ ID NO: 394271 - DNA, 25 bp, Homo sapien
acgttcatgttcacgggcgtggtga

SEQ ID NO: 394272 - DNA, 25 bp, Homo sapien
ggccccgtccgaggacagagactga

SEQ ID NO: 394273 - DNA, 25 bp, Homo sapien
cacactggcagtttcgggtgcagca

SEQ ID NO: 394274 - DNA, 25 bp, Homo sapien
tcacggtttagaaaatggcagcgct

SEQ ID NO: 394275 - DNA, 25 bp, Homo sapien
acttgaaagaagtcgctgcaccggc

SEQ ID NO: 394276 - DNA, 25 bp, Homo sapien
tatgtacggtgagagctcctaacgg

SEQ ID NO: 394277 - DNA, 25 bp, Homo sapien
taagatgtcattctcggccgggcgc

SEQ ID NO: 394278 - DNA, 25 bp, Homo sapien
ttaagatgtcattctcggccgggcg

SEQ ID NO: 394279 - DNA, 25 bp, Homo sapien
tgacctcaaacatgctgggcagtga

SEQ ID NO: 394280 - DNA, 25 bp, Homo sapien
tctgtctctaagtgccaggaatggg

SEQ ID NO: 394281 - DNA, 25 bp, Homo sapien
tatctggaatcaaagcgcaaaggcc

SEQ ID NO: 394282 - DNA, 25 bp, Homo sapien
aggccaagctagtccctcggtggga

SEQ ID NO: 394283 - DNA, 25 bp, Homo sapien
cctgaacagccaatgaatgaacaaa

SEQ ID NO: 394284 - DNA, 25 bp, Homo sapien
gggtgactacagaccctacatgtca

SEQ ID NO: 394285 - DNA, 25 bp, Homo sapien
gactagtccgatgcagtgtggtcct

SEQ ID NO: 394286 - DNA, 25 bp, Homo sapien
tgtggtcctagtttctcaatatgca

SEQ ID NO: 394287 - DNA, 25 bp, Homo sapien
tggaaatacaacacagtgcctcagt

SEQ ID NO: 394288 - DNA, 25 bp, Homo sapien
gcttgaaacaatacagtcagctgtc

SEQ ID NO: 394289 - DNA, 25 bp, Homo sapien
tgaagccctggaagcctagagagac

SEQ ID NO: 394290 - DNA, 25 bp, Homo sapien
taataaagttcatgcccgtcctctc

SEQ ID NO: 394291 - DNA, 25 bp, Homo sapien
atgaactattaatatccgctgtcat

SEQ ID NO: 394292 - DNA, 25 bp, Homo sapien
catctggtctcctttcaatgaacta

SEQ ID NO: 394293 - DNA, 25 bp, Homo sapien
caatgaactattaatatccgctgtc

SEQ ID NO: 394294 - DNA, 25 bp, Homo sapien
gtgctgcttggtcatctggtctcct

SEQ ID NO: 394295 - DNA, 25 bp, Homo sapien
actccctgggcgtggcgaggccgtg

SEQ ID NO: 394296 - DNA, 25 bp, Homo sapien
cgtggcgaggccgtgcagtcttcac

SEQ ID NO: 394297 - DNA, 25 bp, Homo sapien
tgggcgtggcgaggccgtgcagtct

SEQ ID NO: 394298 - DNA, 25 bp, Homo sapien
cctgggcgtggcgaggccgtgcagt

SEQ ID NO: 394299 - DNA, 25 bp, Homo sapien
gggtgtccacgccgcttctgtaacc

SEQ ID NO: 394300 - DNA, 25 bp, Homo sapien
ggggtgtccacgccgcttctgtaac

SEQ ID NO: 394301 - DNA, 25 bp, Homo sapien
ggtgtccacgccgcttctgtaaccc

SEQ ID NO: 394302 - DNA, 25 bp, Homo sapien
ggccaggagcacgccaaggagccgg

SEQ ID NO: 394303 - DNA, 25 bp, Homo sapien
agcacgccaaggagccggaagcaag

SEQ ID NO: 394304 - DNA, 25 bp, Homo sapien
aggagcacgccaaggagccggaagc

SEQ ID NO: 394305 - DNA, 25 bp, Homo sapien
ccaggagcacgccaaggagccggaa

SEQ ID NO: 394306 - DNA, 25 bp, Homo sapien
cagatggaggctagcattcttttta

SEQ ID NO: 394307 - DNA, 25 bp, Homo sapien
ctcaagggcatatccgctggcttct

SEQ ID NO: 394308 - DNA, 25 bp, Homo sapien
ggctcagatggaggctagcattctt

SEQ ID NO: 394309 - DNA, 25 bp, Homo sapien
ttctcccgccaggaaggacagtgag

SEQ ID NO: 394310 - DNA, 25 bp, Homo sapien
gagtggcaggcacccctgtccagtg

SEQ ID NO: 394311 - DNA, 25 bp, Homo sapien
taggcaagtcgtcccaacaagtgtt

SEQ ID NO: 394312 - DNA, 25 bp, Homo sapien
catgctgtgccaactggtccaaggg

SEQ ID NO: 394313 - DNA, 25 bp, Homo sapien
ggcaggcccgaaaaaggcaccataa

SEQ ID NO: 394314 - DNA, 25 bp, Homo sapien
ctcctagcagaaagggttaggcaag

SEQ ID NO: 394315 - DNA, 25 bp, Homo sapien
ggccagaccaagcacactgcaagca

SEQ ID NO: 394316 - DNA, 25 bp, Homo sapien
cacggtggcacccaaaagtttagag

SEQ ID NO: 394317 - DNA, 25 bp, Homo sapien
gcactggggaacacggtggcaccca

SEQ ID NO: 394318 - DNA, 25 bp, Homo sapien
agaccaagcacactgcaagcagctt

SEQ ID NO: 394319 - DNA, 25 bp, Homo sapien
aacagatgggctcgaacagacgctg

SEQ ID NO: 394320 - DNA, 25 bp, Homo sapien
gagaatcgcatctcaccgaacacgt

SEQ ID NO: 394321 - DNA, 25 bp, Homo sapien
ggctgcactaggctcacactacagg

SEQ ID NO: 394322 - DNA, 25 bp, Homo sapien
gaaaatgccgctgtgttacgagatc

SEQ ID NO: 394323 - DNA, 25 bp, Homo sapien
ccatcggggcaccataatgtctgtt

SEQ ID NO: 394324 - DNA, 25 bp, Homo sapien
ctctggagccgctggtgagcgcaca

SEQ ID NO: 394325 - DNA, 25 bp, Homo sapien
gcagccacaagcaccgccacctcgt

SEQ ID NO: 394326 - DNA, 25 bp, Homo sapien
accgccacctcgtggcctgtgagtc

SEQ ID NO: 394327 - DNA, 25 bp, Homo sapien
cctcttccaggaaacggcacttggt

SEQ ID NO: 394328 - DNA, 25 bp, Homo sapien
cagaggcgtggaaacttcttggcag

SEQ ID NO: 394329 - DNA, 25 bp, Homo sapien
gggctagggtgccagcatgctgcct

SEQ ID NO: 394330 - DNA, 25 bp, Homo sapien
ggtttggagttgaggtaaccacaga

SEQ ID NO: 394331 - DNA, 25 bp, Homo sapien
acagagccgctgtggacacgaacaa

SEQ ID NO: 394332 - DNA, 25 bp, Homo sapien
tcgggcccccatgacggtgttgttc

SEQ ID NO: 394333 - DNA, 25 bp, Homo sapien
gccgctgtggacacgaacaaaggct

SEQ ID NO: 394334 - DNA, 25 bp, Homo sapien
ctctcgggcccccatgacggtgttg

SEQ ID NO: 394335 - DNA, 25 bp, Homo sapien
cacttgaaagtgaacaatcagcggc

SEQ ID NO: 394336 - DNA, 25 bp, Homo sapien
tccagaaagttgtgtaggcaccacc

SEQ ID NO: 394337 - DNA, 25 bp, Homo sapien
ccaggtaggatgaacacaggcaatg

SEQ ID NO: 394338 - DNA, 25 bp, Homo sapien
aatattgagagagaagtcggccagg

SEQ ID NO: 394339 - DNA, 25 bp, Homo sapien
gggtgaagacagaatcaggccagag

SEQ ID NO: 394340 - DNA, 25 bp, Homo sapien
ggggtgaagacagaatcaggccaga

SEQ ID NO: 394341 - DNA, 25 bp, Homo sapien
ggtgaagacagaatcaggccagaga

SEQ ID NO: 394342 - DNA, 25 bp, Homo sapien
ttctggaagattcggcggcggagca

SEQ ID NO: 394343 - DNA, 25 bp, Homo sapien
gggccaaaagcaaggcgctgggccg

SEQ ID NO: 394344 - DNA, 25 bp, Homo sapien
cggctttctggaagattcggcggcg

SEQ ID NO: 394345 - DNA, 25 bp, Homo sapien
aggcgaggggccaaaagcaaggcgc

SEQ ID NO: 394346 - DNA, 25 bp, Homo sapien
tgatgggcaccgtccgtgtctttcg

SEQ ID NO: 394347 - DNA, 25 bp, Homo sapien
ggaggcgcagcacgttcctctgccc

SEQ ID NO: 394348 - DNA, 25 bp, Homo sapien
gagctgatgggcaccgtccgtgtct

SEQ ID NO: 394349 - DNA, 25 bp, Homo sapien
cggaggcgcagcacgttcctctgcc

SEQ ID NO: 394350 - DNA, 25 bp, Homo sapien
tcatgatgtaactccatccctgtcc

SEQ ID NO: 394351 - DNA, 25 bp, Homo sapien
cgcgatcccggcctccaatgccacc

SEQ ID NO: 394352 - DNA, 25 bp, Homo sapien
tgtcccctccccacatcgccggctt

SEQ ID NO: 394353 - DNA, 25 bp, Homo sapien
tccccacatcgccggctttattgtt

SEQ ID NO: 394354 - DNA, 25 bp, Homo sapien
aacaacaccgtttatcatctttctc

SEQ ID NO: 394355 - DNA, 25 bp, Homo sapien
tttctctcccgcaggctggctgaag

SEQ ID NO: 394356 - DNA, 25 bp, Homo sapien
aaacaacaccgtttatcatctttct

SEQ ID NO: 394357 - DNA, 25 bp, Homo sapien
acaaaaacaacaccgtttatcatct

SEQ ID NO: 394358 - DNA, 25 bp, Homo sapien
tgcaacctccgagtccttggttcaa

SEQ ID NO: 394359 - DNA, 25 bp, Homo sapien
actgcaacctccgagtccttggttc

SEQ ID NO: 394360 - DNA, 25 bp, Homo sapien
aacctccgagtccttggttcaagtg

SEQ ID NO: 394361 - DNA, 25 bp, Homo sapien
gcaacctccgagtccttggttcaag

SEQ ID NO: 394362 - DNA, 25 bp, Homo sapien
ctctcggaaaatgacacagcgttgc

SEQ ID NO: 394363 - DNA, 25 bp, Homo sapien
tactctcggaaaatgacacagcgtt

SEQ ID NO: 394364 - DNA, 25 bp, Homo sapien
ctcggaaaatgacacagcgttgctg

SEQ ID NO: 394365 - DNA, 25 bp, Homo sapien
ttactctcggaaaatgacacagcgt

SEQ ID NO: 394366 - DNA, 25 bp, Homo sapien
agggccagtagtccgtgtccgtgtt

SEQ ID NO: 394367 - DNA, 25 bp, Homo sapien
atgtgttcgtgggagggagcgtgga

SEQ ID NO: 394368 - DNA, 25 bp, Homo sapien
tggatgctcacacggcacactgagg

SEQ ID NO: 394369 - DNA, 25 bp, Homo sapien
gcgagtttgtgtcaagaaccccatg

SEQ ID NO: 394370 - DNA, 25 bp, Homo sapien
atctgggcgattctgagccatgcca

SEQ ID NO: 394371 - DNA, 25 bp, Homo sapien
acgggagcgtgacaggaggcggtcg

SEQ ID NO: 394372 - DNA, 25 bp, Homo sapien
ccttatgtctgctagaaagtgttgt

SEQ ID NO: 394373 - DNA, 25 bp, Homo sapien
gcggtcgagagatcgtgaaagatct

SEQ ID NO: 394374 - DNA, 25 bp, Homo sapien
tgagcgcctgaagcgtggggtcagt

SEQ ID NO: 394375 - DNA, 25 bp, Homo sapien
ttgattatgatttcctgtgaccatt

SEQ ID NO: 394376 - DNA, 25 bp, Homo sapien
tttgattatgatttcctgtgaccat

SEQ ID NO: 394377 - DNA, 25 bp, Homo sapien
gagcgcctgaagcgtggggtcagtg

SEQ ID NO: 394378 - DNA, 25 bp, Homo sapien
tctcccagatattacgaagaagaag

SEQ ID NO: 394379 - DNA, 25 bp, Homo sapien
taacctcctttagatcagggatggc

SEQ ID NO: 394380 - DNA, 25 bp, Homo sapien
taatcaagcaagagggcggttagct

SEQ ID NO: 394381 - DNA, 25 bp, Homo sapien
gaagaatagatgttgtaacctcctt

SEQ ID NO: 394382 - DNA, 25 bp, Homo sapien
tgtcacccgtgacggacttcagaga

SEQ ID NO: 394383 - DNA, 25 bp, Homo sapien
gtcacccgtgacggacttcagagaa

SEQ ID NO: 394384 - DNA, 25 bp, Homo sapien
cttggattggtaattgagaaagtct

SEQ ID NO: 394385 - DNA, 25 bp, Homo sapien
tgtcttttcagtttcgccgtgagga

SEQ ID NO: 394386 - DNA, 25 bp, Homo sapien
gctcctttaaccagttgaatttgaa

SEQ ID NO: 394387 - DNA, 25 bp, Homo sapien
tcttattaaagcgtggatggcaagc

SEQ ID NO: 394388 - DNA, 25 bp, Homo sapien
aatttgagagcataccatggctggc

SEQ ID NO: 394389 - DNA, 25 bp, Homo sapien
tacttgagggcgtccacaataccgt

SEQ ID NO: 394390 - DNA, 25 bp, Homo sapien
tttaatcatcgaccctgctttcagg

SEQ ID NO: 394391 - DNA, 25 bp, Homo sapien
taccgtaaggttgcgtgaactgtcc

SEQ ID NO: 394392 - DNA, 25 bp, Homo sapien
gactgcattgcctctttacgttaag

SEQ ID NO: 394393 - DNA, 25 bp, Homo sapien
taatttaggcattccaggtcagtgc

SEQ ID NO: 394394 - DNA, 25 bp, Homo sapien
tttaggcaatcctagccacccttgg

SEQ ID NO: 394395 - DNA, 25 bp, Homo sapien
gccagaatacctgagtgagaccaac

SEQ ID NO: 394396 - DNA, 25 bp, Homo sapien
ttgatccttggaacgaaaggatggc

SEQ ID NO: 394397 - DNA, 25 bp, Homo sapien
aagtagttgatccttggaacgaaag

SEQ ID NO: 394398 - DNA, 25 bp, Homo sapien
gatccttggaacgaaaggatggcca

SEQ ID NO: 394399 - DNA, 25 bp, Homo sapien
tagttgatccttggaacgaaaggat

SEQ ID NO: 394400 - DNA, 25 bp, Homo sapien
tgggcttatttggtgtgctgttgaa

SEQ ID NO: 394401 - DNA, 25 bp, Homo sapien
tgtgaagtcgacagggacggttcct

SEQ ID NO: 394402 - DNA, 25 bp, Homo sapien
tcattcttgggcttatttggtgtgc

SEQ ID NO: 394403 - DNA, 25 bp, Homo sapien
ttagtacccgtgtgaagtcgacagg

SEQ ID NO: 394404 - DNA, 25 bp, Homo sapien
acatgcccttatgcttggataattt

SEQ ID NO: 394405 - DNA, 25 bp, Homo sapien
ggcacatgcccttatgcttggataa

SEQ ID NO: 394406 - DNA, 25 bp, Homo sapien
aggcacatgcccttatgcttggata

SEQ ID NO: 394407 - DNA, 25 bp, Homo sapien
gcacatgcccttatgcttggataat

SEQ ID NO: 394408 - DNA, 25 bp, Homo sapien
gatggctgtcacatcggctgctcaa

SEQ ID NO: 394409 - DNA, 25 bp, Homo sapien
gtgattccgcttgaaaagccacctg

SEQ ID NO: 394410 - DNA, 25 bp, Homo sapien
gagaacgttcaccacagcgatggag

SEQ ID NO: 394411 - DNA, 25 bp, Homo sapien
tgtagctgtcccaatgcactgaact

SEQ ID NO: 394412 - DNA, 25 bp, Homo sapien
ctgttcctccgccactgagagagcc

SEQ ID NO: 394413 - DNA, 25 bp, Homo sapien
gagacagaaaaccactctggccagc

SEQ ID NO: 394414 - DNA, 25 bp, Homo sapien
agaaagaacagacacgtggtacagg

SEQ ID NO: 394415 - DNA, 25 bp, Homo sapien
gacacgtggtacagggtctgagaca

SEQ ID NO: 394416 - DNA, 25 bp, Homo sapien
tacataaaatatctctagggcccgc

SEQ ID NO: 394417 - DNA, 25 bp, Homo sapien
tgacctatatggaccccaggtgcag

SEQ ID NO: 394418 - DNA, 25 bp, Homo sapien
gagacctcactaggaacagcactga

SEQ ID NO: 394419 - DNA, 25 bp, Homo sapien
tagggcccgcatgaaactggtcaca

SEQ ID NO: 394420 - DNA, 25 bp, Homo sapien
cctgtaatccgagtttgggaccagc

SEQ ID NO: 394421 - DNA, 25 bp, Homo sapien
gaaggcgttttgacacatgctacca

SEQ ID NO: 394422 - DNA, 25 bp, Homo sapien
ggaaggcgttttgacacatgctacc

SEQ ID NO: 394423 - DNA, 25 bp, Homo sapien
aggaaggcgttttgacacatgctac

SEQ ID NO: 394424 - DNA, 25 bp, Homo sapien
ctcccagattccagcaattcttcca

SEQ ID NO: 394425 - DNA, 25 bp, Homo sapien
cccagattccagcaattcttccacc

SEQ ID NO: 394426 - DNA, 25 bp, Homo sapien
cagtggcactgtctcggtttactgc

SEQ ID NO: 394427 - DNA, 25 bp, Homo sapien
tgcagtggcactgtctcggtttact

SEQ ID NO: 394428 - DNA, 25 bp, Homo sapien
gggtctgcactagccgggaaaactg

SEQ ID NO: 394429 - DNA, 25 bp, Homo sapien
gctgctgccctgttagagaatccta

SEQ ID NO: 394430 - DNA, 25 bp, Homo sapien
gaagcaaggccacccgtaatcgtgt

SEQ ID NO: 394431 - DNA, 25 bp, Homo sapien
gctggacgcctctcctgttgctaaa

SEQ ID NO: 394432 - DNA, 25 bp, Homo sapien
ggtgctcggattcctcggtgatctc

SEQ ID NO: 394433 - DNA, 25 bp, Homo sapien
atctccggcctcacgagcgtggtgg

SEQ ID NO: 394434 - DNA, 25 bp, Homo sapien
cccgggtgctcggattcctcggtga

SEQ ID NO: 394435 - DNA, 25 bp, Homo sapien
gtgatctccggcctcacgagcgtgg

SEQ ID NO: 394436 - DNA, 25 bp, Homo sapien
ggtcatgggtgacggggacagagcc

SEQ ID NO: 394437 - DNA, 25 bp, Homo sapien
actgccaggacgtgcaggtcatggg

SEQ ID NO: 394438 - DNA, 25 bp, Homo sapien
ggacagagccagtgacgtcccgccc

SEQ ID NO: 394439 - DNA, 25 bp, Homo sapien
caggacgtgcaggtcatgggtgacg

SEQ ID NO: 394440 - DNA, 25 bp, Homo sapien
taagttggggagaggatcctctttc

SEQ ID NO: 394441 - DNA, 25 bp, Homo sapien
tagagataattctgtcccacagcac

SEQ ID NO: 394442 - DNA, 25 bp, Homo sapien
gcagggagagtgtgccatagacccc

SEQ ID NO: 394443 - DNA, 25 bp, Homo sapien
agctgccctcagagtgcaacgtggg

SEQ ID NO: 394444 - DNA, 25 bp, Homo sapien
ccggccgcctgaggacgttctgcag

SEQ ID NO: 394445 - DNA, 25 bp, Homo sapien
aaggccattggctgcctcgacggga

SEQ ID NO: 394446 - DNA, 25 bp, Homo sapien
cctcgacgggaactgcagccgagtg

SEQ ID NO: 394447 - DNA, 25 bp, Homo sapien
gggcctcgggcctgtcgcaggtgtg

SEQ ID NO: 394448 - DNA, 25 bp, Homo sapien
acgctgtagggcctggcggctcaga

SEQ ID NO: 394449 - DNA, 25 bp, Homo sapien
ggcttctgagtgagccagcgcctga

SEQ ID NO: 394450 - DNA, 25 bp, Homo sapien
agaggccgccgtgggacgtcgaggc

SEQ ID NO: 394451 - DNA, 25 bp, Homo sapien
cgtgggacgtcgaggctctgccaca

SEQ ID NO: 394452 - DNA, 25 bp, Homo sapien
ttaaaactcgtggagaagaagctgc

SEQ ID NO: 394453 - DNA, 25 bp, Homo sapien
cgcatgcttgttaaaactcgtggag

SEQ ID NO: 394454 - DNA, 25 bp, Homo sapien
gagccctatggcgtttcatgcttgt

SEQ ID NO: 394455 - DNA, 25 bp, Homo sapien
gaagctgcaaggtgccataattcca

SEQ ID NO: 394456 - DNA, 25 bp, Homo sapien
tgggcagcgcagtgtggagccaagg

SEQ ID NO: 394457 - DNA, 25 bp, Homo sapien
agcgcagtgtggagccaaggccgag

SEQ ID NO: 394458 - DNA, 25 bp, Homo sapien
cagtgtggagccaaggccgagccct

SEQ ID NO: 394459 - DNA, 25 bp, Homo sapien
ctgggcagcgcagtgtggagccaag

SEQ ID NO: 394460 - DNA, 25 bp, Homo sapien
ggaggctggcaggagtcagcggggc

SEQ ID NO: 394461 - DNA, 25 bp, Homo sapien
aggctggcaggagtcagcggggcct

SEQ ID NO: 394462 - DNA, 25 bp, Homo sapien
ctggaggctggcaggagtcagcggg

SEQ ID NO: 394463 - DNA, 25 bp, Homo sapien
gaggctggcaggagtcagcggggcc

SEQ ID NO: 394464 - DNA, 25 bp, Homo sapien
agggccccagggtgcgcttgaacca

SEQ ID NO: 394465 - DNA, 25 bp, Homo sapien
aaaaactggtcgaacagccggctgg

SEQ ID NO: 394466 - DNA, 25 bp, Homo sapien
cctcgccgaaaaactggtcgaacag

SEQ ID NO: 394467 - DNA, 25 bp, Homo sapien
aggggtgctggatggtcacgtccat

SEQ ID NO: 394468 - DNA, 25 bp, Homo sapien
agcacggtgcggaagagggactggc

SEQ ID NO: 394469 - DNA, 25 bp, Homo sapien
gactggcggtagtaggggctgatgg

SEQ ID NO: 394470 - DNA, 25 bp, Homo sapien
aggggctgatggtggacgacaggaa

SEQ ID NO: 394471 - DNA, 25 bp, Homo sapien
ccggagtccagcacggtgcggaaga

SEQ ID NO: 394472 - DNA, 25 bp, Homo sapien
gaaagcaaaggtggattcaggctgc

SEQ ID NO: 394473 - DNA, 25 bp, Homo sapien
ggccacctgcctgacggagcaagac

SEQ ID NO: 394474 - DNA, 25 bp, Homo sapien
atgaagtgggacgaggccacctgcc

SEQ ID NO: 394475 - DNA, 25 bp, Homo sapien
gagcaagaccagagtccatcgctct

SEQ ID NO: 394476 - DNA, 25 bp, Homo sapien
tgtggctggtgccttacaaagcaca

SEQ ID NO: 394477 - DNA, 25 bp, Homo sapien
caggtctccgggactcaggagacca

SEQ ID NO: 394478 - DNA, 25 bp, Homo sapien
ttcgccaccacgcatgcctggatgg

SEQ ID NO: 394479 - DNA, 25 bp, Homo sapien
aacccgggagctggcattcgccacc

SEQ ID NO: 394480 - DNA, 25 bp, Homo sapien
ccttggcagggcacctaagtaaact

SEQ ID NO: 394481 - DNA, 25 bp, Homo sapien
gcaggccgagctcattggaggaggt

SEQ ID NO: 394482 - DNA, 25 bp, Homo sapien
caagagctttgctagccgtgggcag

SEQ ID NO: 394483 - DNA, 25 bp, Homo sapien
attggaggaggtgctaggaacgccc

SEQ ID NO: 394484 - DNA, 25 bp, Homo sapien
ccggctggttgtttggctatggtca

SEQ ID NO: 394485 - DNA, 25 bp, Homo sapien
cagacaggcatgaccctcgacctgt

SEQ ID NO: 394486 - DNA, 25 bp, Homo sapien
gctgaatgctactggtgggccggct

SEQ ID NO: 394487 - DNA, 25 bp, Homo sapien
tagataagttggctggttatgggct

SEQ ID NO: 394488 - DNA, 25 bp, Homo sapien
cagagacagggcgggtcccggttat

SEQ ID NO: 394489 - DNA, 25 bp, Homo sapien
cgggtcccggttatcagaacagaga

SEQ ID NO: 394490 - DNA, 25 bp, Homo sapien
ggcgggtcccggttatcagaacaga

SEQ ID NO: 394491 - DNA, 25 bp, Homo sapien
ggtcccggttatcagaacagagatg

SEQ ID NO: 394492 - DNA, 25 bp, Homo sapien
tccaaacgtgccatgtggagctgcc

SEQ ID NO: 394493 - DNA, 25 bp, Homo sapien
aaatccaaacgtgccatgtggagct

SEQ ID NO: 394494 - DNA, 25 bp, Homo sapien
aaacgtgccatgtggagctgcccag

SEQ ID NO: 394495 - DNA, 25 bp, Homo sapien
ctgaaatccaaacgtgccatgtgga

SEQ ID NO: 394496 - DNA, 25 bp, Homo sapien
tggcgctcgttgtgctttccgtgga

SEQ ID NO: 394497 - DNA, 25 bp, Homo sapien
tgacgaacttgtcccggtcggatcg

SEQ ID NO: 394498 - DNA, 25 bp, Homo sapien
ggatctccacaaagtcgtcctgcac

SEQ ID NO: 394499 - DNA, 25 bp, Homo sapien
cacatcgaggaagatgacgaacttg

SEQ ID NO: 394500 - DNA, 25 bp, Homo sapien
aagagagggccgactggtccacgtt

SEQ ID NO: 394501 - DNA, 25 bp, Homo sapien
cggtagcggcggtggaactcacggg

SEQ ID NO: 394502 - DNA, 25 bp, Homo sapien
cacgggaaatgtagccgtggtcgtc

SEQ ID NO: 394503 - DNA, 25 bp, Homo sapien
gtccacgttggacggcaggcggtag

SEQ ID NO: 394504 - DNA, 25 bp, Homo sapien
ctcgctcggcgtgggtggcatccag

SEQ ID NO: 394505 - DNA, 25 bp, Homo sapien
caggccagtctggatcttggggcca

SEQ ID NO: 394506 - DNA, 25 bp, Homo sapien
acagaaggtcagcatgccatcggca

SEQ ID NO: 394507 - DNA, 25 bp, Homo sapien
ttctcctcccgcgacacggggatgg

SEQ ID NO: 394508 - DNA, 25 bp, Homo sapien
gggacaccctgagaccctaagctct

SEQ ID NO: 394509 - DNA, 25 bp, Homo sapien
ccccaagagcggcactacatagagg

SEQ ID NO: 394510 - DNA, 25 bp, Homo sapien
tgtttattgattgccgcgggctgcg

SEQ ID NO: 394511 - DNA, 25 bp, Homo sapien
tgtgaggtgcggtcacttccgccac

SEQ ID NO: 394512 - DNA, 25 bp, Homo sapien
agcacgagtgcccttaaagcccagc

SEQ ID NO: 394513 - DNA, 25 bp, Homo sapien
agcagaccccgagagaaccggacgg

SEQ ID NO: 394514 - DNA, 25 bp, Homo sapien
gggaagctgccgagttccacctcct

SEQ ID NO: 394515 - DNA, 25 bp, Homo sapien
cccgagagaacaggacgacccagca

SEQ ID NO: 394516 - DNA, 25 bp, Homo sapien
ggatgcccctcggtgagcgcagcag

SEQ ID NO: 394517 - DNA, 25 bp, Homo sapien
ggcccacccgccgtggcgtctgctt

SEQ ID NO: 394518 - DNA, 25 bp, Homo sapien
caggccgagtctccctccccgtggc

SEQ ID NO: 394519 - DNA, 25 bp, Homo sapien
cgccgtggcgtctgcttccccttgg

SEQ ID NO: 394520 - DNA, 25 bp, Homo sapien
gtcccagtgcctcagggtcccggtg

SEQ ID NO: 394521 - DNA, 25 bp, Homo sapien
gtgccatgggggtcccagtgcctca

SEQ ID NO: 394522 - DNA, 25 bp, Homo sapien
catgggggtcccagtgcctcagggt

SEQ ID NO: 394523 - DNA, 25 bp, Homo sapien
ctggtgccatgggggtcccagtgcc

SEQ ID NO: 394524 - DNA, 25 bp, Homo sapien
ttgaaaacccgttggtgtcagtgtc

SEQ ID NO: 394525 - DNA, 25 bp, Homo sapien
tgtctgtgttctcccgggtggaggc

SEQ ID NO: 394526 - DNA, 25 bp, Homo sapien
agtgtctgtgttctcccgggtggag

SEQ ID NO: 394527 - DNA, 25 bp, Homo sapien
gttctcccgggtggaggctgcgccc

SEQ ID NO: 394528 - DNA, 25 bp, Homo sapien
tccgtggcacgtgatgtcactgggc

SEQ ID NO: 394529 - DNA, 25 bp, Homo sapien
tggcacgtgatgtcactgggcgtca

SEQ ID NO: 394530 - DNA, 25 bp, Homo sapien
cagtgtccgtggcacgtgatgtcac

SEQ ID NO: 394531 - DNA, 25 bp, Homo sapien
tcactgggcgtcactatggccgccc

SEQ ID NO: 394532 - DNA, 25 bp, Homo sapien
tcatcaaagatgaccgaggagcgtc

SEQ ID NO: 394533 - DNA, 25 bp, Homo sapien
ttttcaggcagcctcagaaaactag

SEQ ID NO: 394534 - DNA, 25 bp, Homo sapien
tgtggactcagcacgaaaaagctgt

SEQ ID NO: 394535 - DNA, 25 bp, Homo sapien
aaaaagctgtctgactttcacctat

SEQ ID NO: 394536 - DNA, 25 bp, Homo sapien
aagtcgtgagactacagaggccgcg

SEQ ID NO: 394537 - DNA, 25 bp, Homo sapien
aattggtaacaactgcagcccgtcc

SEQ ID NO: 394538 - DNA, 25 bp, Homo sapien
tccatgccgtgaatgaagtgccccg

SEQ ID NO: 394539 - DNA, 25 bp, Homo sapien
tatgagaatcagcaacacgagggcc

SEQ ID NO: 394540 - DNA, 25 bp, Homo sapien
ttgcctctctgtcccatcccagggc

SEQ ID NO: 394541 - DNA, 25 bp, Homo sapien
ttgcaggttgcatctcagcctctcg

SEQ ID NO: 394542 - DNA, 25 bp, Homo sapien
cctcttttgcaggttgcatctcagc

SEQ ID NO: 394543 - DNA, 25 bp, Homo sapien
actgctgtcctcttttgcaggttgc

SEQ ID NO: 394544 - DNA, 25 bp, Homo sapien
agttcccagatgttccagacaaccc

SEQ ID NO: 394545 - DNA, 25 bp, Homo sapien
agacaaccctcgcatgcgagaccat

SEQ ID NO: 394546 - DNA, 25 bp, Homo sapien
gtcggaacagcatggaccaaacgat

SEQ ID NO: 394547 - DNA, 25 bp, Homo sapien
agcatggaccaaacgatggtttcgg

SEQ ID NO: 394548 - DNA, 25 bp, Homo sapien
catgggccgcattcaagatcagtga

SEQ ID NO: 394549 - DNA, 25 bp, Homo sapien
atgggccgcattcaagatcagtgag

SEQ ID NO: 394550 - DNA, 25 bp, Homo sapien
ccatgggccgcattcaagatcagtg

SEQ ID NO: 394551 - DNA, 25 bp, Homo sapien
tcacagccccttgggagtggccttg

SEQ ID NO: 394552 - DNA, 25 bp, Homo sapien
gatgctgctaagtgctgagtcccat

SEQ ID NO: 394553 - DNA, 25 bp, Homo sapien
ttccaggtggcatctctaaatcaag

SEQ ID NO: 394554 - DNA, 25 bp, Homo sapien
caggaagccaacgtgacctttagtc

SEQ ID NO: 394555 - DNA, 25 bp, Homo sapien
tctggtttgacggaagctctgggca

SEQ ID NO: 394556 - DNA, 25 bp, Homo sapien
gaagctctagattggcagaagccct

SEQ ID NO: 394557 - DNA, 25 bp, Homo sapien
ctcgtggttggtggaagctctagct

SEQ ID NO: 394558 - DNA, 25 bp, Homo sapien
ggagtccacttaggtccaaagctgc

SEQ ID NO: 394559 - DNA, 25 bp, Homo sapien
gagctcagacacctggccccacacg

SEQ ID NO: 394560 - DNA, 25 bp, Homo sapien
tccggggtccggctgccggcatgga

SEQ ID NO: 394561 - DNA, 25 bp, Homo sapien
tggaggtcaaggtccgcaagaacgt

SEQ ID NO: 394562 - DNA, 25 bp, Homo sapien
ggtcaaggtccgcaagaacgtcctc

SEQ ID NO: 394563 - DNA, 25 bp, Homo sapien
caaggtccgcaagaacgtcctcttt

SEQ ID NO: 394564 - DNA, 25 bp, Homo sapien
caccttcccgtcacatgcaatgtga

SEQ ID NO: 394565 - DNA, 25 bp, Homo sapien
gggggaggtgcgtccagggtgcagc

SEQ ID NO: 394566 - DNA, 25 bp, Homo sapien
tcaccttcccgtcacatgcaatgtg

SEQ ID NO: 394567 - DNA, 25 bp, Homo sapien
gaggggggaggtgcgtccagggtgc

SEQ ID NO: 394568 - DNA, 25 bp, Homo sapien
ttcactggagtggatgcctgactcc

SEQ ID NO: 394569 - DNA, 25 bp, Homo sapien
gttcactggagtggatgcctgactc

SEQ ID NO: 394570 - DNA, 25 bp, Homo sapien
tcactggagtggatgcctgactcca

SEQ ID NO: 394571 - DNA, 25 bp, Homo sapien
cactggagtggatgcctgactccaa

SEQ ID NO: 394572 - DNA, 25 bp, Homo sapien
cgtgtattgtctattgattgcccca

SEQ ID NO: 394573 - DNA, 25 bp, Homo sapien
gagttcaaatttcttgcagcctggt

SEQ ID NO: 394574 - DNA, 25 bp, Homo sapien
tattcctactactaaagcttgatcc

SEQ ID NO: 394575 - DNA, 25 bp, Homo sapien
gccccaagtgctctatgaggtctcc

SEQ ID NO: 394576 - DNA, 25 bp, Homo sapien
tcggtcgcctaaactggtcacctga

SEQ ID NO: 394577 - DNA, 25 bp, Homo sapien
gcccttagctcggtcgcctaaactg

SEQ ID NO: 394578 - DNA, 25 bp, Homo sapien
cccacaatccacttgagctgaccca

SEQ ID NO: 394579 - DNA, 25 bp, Homo sapien
gaggaggtgtaaaggcccttagctc

SEQ ID NO: 394580 - DNA, 25 bp, Homo sapien
tgccatttactctggcttccaggca

SEQ ID NO: 394581 - DNA, 25 bp, Homo sapien
gagagctgcgccagtaggacaaaga

SEQ ID NO: 394582 - DNA, 25 bp, Homo sapien
agagcagccaccagtccaaaatgga

SEQ ID NO: 394583 - DNA, 25 bp, Homo sapien
ctgttggcgagagtgacggaggcgc

SEQ ID NO: 394584 - DNA, 25 bp, Homo sapien
aggtggcaccttcccgctgaaaggt

SEQ ID NO: 394585 - DNA, 25 bp, Homo sapien
tcatcccgacggctcactgggcagg

SEQ ID NO: 394586 - DNA, 25 bp, Homo sapien
gcaggtggcaccttcccgctgaaag

SEQ ID NO: 394587 - DNA, 25 bp, Homo sapien
agtgcctgccctgggtcatcccgac

SEQ ID NO: 394588 - DNA, 25 bp, Homo sapien
tctgcgtgacactcaggtctgactt

SEQ ID NO: 394589 - DNA, 25 bp, Homo sapien
ccgtgggcatgagtgacagttctcc

SEQ ID NO: 394590 - DNA, 25 bp, Homo sapien
gactggtcaacatccaaagccgtgg

SEQ ID NO: 394591 - DNA, 25 bp, Homo sapien
tctgacttcatgacaccagactggt

SEQ ID NO: 394592 - DNA, 25 bp, Homo sapien
tggggcccgtcgcttccactcaagg

SEQ ID NO: 394593 - DNA, 25 bp, Homo sapien
ggcccgtcgcttccactcaaggagg

SEQ ID NO: 394594 - DNA, 25 bp, Homo sapien
gtcgcttccactcaaggaggcagat

SEQ ID NO: 394595 - DNA, 25 bp, Homo sapien
ccgtcgcttccactcaaggaggcag

SEQ ID NO: 394596 - DNA, 25 bp, Homo sapien
cattgtagccgttccaagagcaaga

SEQ ID NO: 394597 - DNA, 25 bp, Homo sapien
tcctgcggtctggtgcattgtagcc

SEQ ID NO: 394598 - DNA, 25 bp, Homo sapien
caagtgcccgttgtgagctcatcct

SEQ ID NO: 394599 - DNA, 25 bp, Homo sapien
catgggcatctctgcgtatcagaag

SEQ ID NO: 394600 - DNA, 25 bp, Homo sapien
gatggccaaattccaacgaacctgg

SEQ ID NO: 394601 - DNA, 25 bp, Homo sapien
ctgggcagatccagccagaaactgg

SEQ ID NO: 394602 - DNA, 25 bp, Homo sapien
agatgtgtctctgcgcttgtgccag

SEQ ID NO: 394603 - DNA, 25 bp, Homo sapien
aaatttggaagcatcgctgatggcc

SEQ ID NO: 394604 - DNA, 25 bp, Homo sapien
gcgtctgctggcgttgggttttccc

SEQ ID NO: 394605 - DNA, 25 bp, Homo sapien
gcaaaacgccgcatgcagggcaggt

SEQ ID NO: 394606 - DNA, 25 bp, Homo sapien
aggtcagcaggtcccattccaccag

SEQ ID NO: 394607 - DNA, 25 bp, Homo sapien
tcttctcatctaaggagagaggagg

SEQ ID NO: 394608 - DNA, 25 bp, Homo sapien
cacgggcttgcaattccccaaactg

SEQ ID NO: 394609 - DNA, 25 bp, Homo sapien
ggccacggttcgctgtgctctctgg

SEQ ID NO: 394610 - DNA, 25 bp, Homo sapien
gccgggccacggttcgctgtgctct

SEQ ID NO: 394611 - DNA, 25 bp, Homo sapien
tgcattgagctgtcacgggcttgca

SEQ ID NO: 394612 - DNA, 25 bp, Homo sapien
ttcctctccaaacagccccacggtc

SEQ ID NO: 394613 - DNA, 25 bp, Homo sapien
ccgccagctcttgggaatacatgga

SEQ ID NO: 394614 - DNA, 25 bp, Homo sapien
tcctctccaaacagccccacggtct

SEQ ID NO: 394615 - DNA, 25 bp, Homo sapien
cccgccagctcttgggaatacatgg

SEQ ID NO: 394616 - DNA, 25 bp, Homo sapien
gactgtcagggcggccaccatccag

SEQ ID NO: 394617 - DNA, 25 bp, Homo sapien
ttcctgctcccatctgagagccccg

SEQ ID NO: 394618 - DNA, 25 bp, Homo sapien
gccccgggtgtgatgaggactgtca

SEQ ID NO: 394619 - DNA, 25 bp, Homo sapien
tcccatctgagagccccgggtgtga

SEQ ID NO: 394620 - DNA, 25 bp, Homo sapien
ctgtctcggccttgctgtctcggct

SEQ ID NO: 394621 - DNA, 25 bp, Homo sapien
tcctcggccttgctatcagcacttt

SEQ ID NO: 394622 - DNA, 25 bp, Homo sapien
ttggagcaaccactggagcttcgct

SEQ ID NO: 394623 - DNA, 25 bp, Homo sapien
gctgtctcggctttgctgtcctcgg

SEQ ID NO: 394624 - DNA, 25 bp, Homo sapien
tccatcaggagtgtgtgttacacag

SEQ ID NO: 394625 - DNA, 25 bp, Homo sapien
ccataggcggttatttcagtgtttc

SEQ ID NO: 394626 - DNA, 25 bp, Homo sapien
agcaggaaccataggcggttatttc

SEQ ID NO: 394627 - DNA, 25 bp, Homo sapien
tttccatcaggagtgtgtgttacac

SEQ ID NO: 394628 - DNA, 25 bp, Homo sapien
cacggccacgtgagttaccgtcagc

SEQ ID NO: 394629 - DNA, 25 bp, Homo sapien
gagcagctcagggatagccacggcc

SEQ ID NO: 394630 - DNA, 25 bp, Homo sapien
gccacgtgagttaccgtcagcagcc

SEQ ID NO: 394631 - DNA, 25 bp, Homo sapien
tcagggatagccacggccacgtgag

SEQ ID NO: 394632 - DNA, 25 bp, Homo sapien
tcattgacacccatctgcaatgctg

SEQ ID NO: 394633 - DNA, 25 bp, Homo sapien
cagtcactgcggaacatcagacacg

SEQ ID NO: 394634 - DNA, 25 bp, Homo sapien
tctccaggctcgtgtccttgggcag

SEQ ID NO: 394635 - DNA, 25 bp, Homo sapien
ctgagaaaggacaccgtggcgccaa

SEQ ID NO: 394636 - DNA, 25 bp, Homo sapien
tggcccgactgggagcacgtgacac

SEQ ID NO: 394637 - DNA, 25 bp, Homo sapien
ttggctgtcattgcaccaactggaa

SEQ ID NO: 394638 - DNA, 25 bp, Homo sapien
gcacgtgacacccgtctttaattcc

SEQ ID NO: 394639 - DNA, 25 bp, Homo sapien
agaagaccctttccatcctggcccg

SEQ ID NO: 394640 - DNA, 25 bp, Homo sapien
gatttccttccgtctggaggaggga

SEQ ID NO: 394641 - DNA, 25 bp, Homo sapien
cagcaggcacttagggatgatctca

SEQ ID NO: 394642 - DNA, 25 bp, Homo sapien
tgatctcagcggtgacggcttcgta

SEQ ID NO: 394643 - DNA, 25 bp, Homo sapien
ctggcagacagggtcaccatggtcg

SEQ ID NO: 394644 - DNA, 25 bp, Homo sapien
caaagcaggccattacgaagcaata

SEQ ID NO: 394645 - DNA, 25 bp, Homo sapien
cgacatgtggccgttcggctgccaa

SEQ ID NO: 394646 - DNA, 25 bp, Homo sapien
tgctgcctgaatgaccgacatgtgg

SEQ ID NO: 394647 - DNA, 25 bp, Homo sapien
cagaaggcattttcccgcaaacagg

SEQ ID NO: 394648 - DNA, 25 bp, Homo sapien
caatctcactcttctggttaagcac

SEQ ID NO: 394649 - DNA, 25 bp, Homo sapien
ttctggttaagcactggcttcttcc

SEQ ID NO: 394650 - DNA, 25 bp, Homo sapien
gtgagcctcgaggtggatccagccc

SEQ ID NO: 394651 - DNA, 25 bp, Homo sapien
gcactggcttcttccgcttaggtcc

SEQ ID NO: 394652 - DNA, 25 bp, Homo sapien
tcccagatctttgggggtagttcac

SEQ ID NO: 394653 - DNA, 25 bp, Homo sapien
acagtcccaagatgagagtgtgctc

SEQ ID NO: 394654 - DNA, 25 bp, Homo sapien
gggggtagttcacagtcccaagatg

SEQ ID NO: 394655 - DNA, 25 bp, Homo sapien
gtcccaagatgagagtgtgctccag

SEQ ID NO: 394656 - DNA, 25 bp, Homo sapien
agaagactcgttccgtgtgtccgtg

SEQ ID NO: 394657 - DNA, 25 bp, Homo sapien
tgtggctctcagaagactcgttccg

SEQ ID NO: 394658 - DNA, 25 bp, Homo sapien
gtgtgtccgtgtggcggtgagccgc

SEQ ID NO: 394659 - DNA, 25 bp, Homo sapien
ggtgagccgccctggcgaggatctt

SEQ ID NO: 394660 - DNA, 25 bp, Homo sapien
tctgggcctttggaatattccggca

SEQ ID NO: 394661 - DNA, 25 bp, Homo sapien
acaactgccggctccttgggctcat

SEQ ID NO: 394662 - DNA, 25 bp, Homo sapien
cacacgtcactgtctgtgacagcct

SEQ ID NO: 394663 - DNA, 25 bp, Homo sapien
caagttcccaggcaaggccgtggtg

SEQ ID NO: 394664 - DNA, 25 bp, Homo sapien
ggctgtctccatgaaggccaccagg

SEQ ID NO: 394665 - DNA, 25 bp, Homo sapien
taaggtgtcacttgcctcggtttcc

SEQ ID NO: 394666 - DNA, 25 bp, Homo sapien
tcccagggacctagaaagatagctc

SEQ ID NO: 394667 - DNA, 25 bp, Homo sapien
ttgcccaaccgtattctgaaacgag

SEQ ID NO: 394668 - DNA, 25 bp, Homo sapien
taacatgggaatttgagggatgcaa

SEQ ID NO: 394669 - DNA, 25 bp, Homo sapien
ctctggtgcgaagggaacgggtggc

SEQ ID NO: 394670 - DNA, 25 bp, Homo sapien
gggccggacctcattcttctgagtg

SEQ ID NO: 394671 - DNA, 25 bp, Homo sapien
cttgagatggatccatctagcttcc

SEQ ID NO: 394672 - DNA, 25 bp, Homo sapien
ccatgggtacttgctgtagtccagc

SEQ ID NO: 394673 - DNA, 25 bp, Homo sapien
gcctccagggagtgttcccgacctg

SEQ ID NO: 394674 - DNA, 25 bp, Homo sapien
gaggatcatctgtaaccagcaccag

SEQ ID NO: 394675 - DNA, 25 bp, Homo sapien
catagccactgtgagagccgaggtc

SEQ ID NO: 394676 - DNA, 25 bp, Homo sapien
tgagtcagtttctagccggttacac

SEQ ID NO: 394677 - DNA, 25 bp, Homo sapien
ggacctcacacttgggcactgcttg

SEQ ID NO: 394678 - DNA, 25 bp, Homo sapien
gctgattagaggacacaggcgtttc

SEQ ID NO: 394679 - DNA, 25 bp, Homo sapien
gcttgtgccgccgtaaaaggttgta

SEQ ID NO: 394680 - DNA, 25 bp, Homo sapien
ttcaaggacttttcgggcatatgct

SEQ ID NO: 394681 - DNA, 25 bp, Homo sapien
gatgatcccacattgacagaaggct

SEQ ID NO: 394682 - DNA, 25 bp, Homo sapien
gagagacgtgtgatgacctggaccc

SEQ ID NO: 394683 - DNA, 25 bp, Homo sapien
cacagcggtgcagactttacgacag

SEQ ID NO: 394684 - DNA, 25 bp, Homo sapien
gctgtggaaaccgtctcacagctga

SEQ ID NO: 394685 - DNA, 25 bp, Homo sapien
gtggaaaccgtctcacagctgaggg

SEQ ID NO: 394686 - DNA, 25 bp, Homo sapien
tggaaaccgtctcacagctgagggg

SEQ ID NO: 394687 - DNA, 25 bp, Homo sapien
tatccgtgtatgtaaaccgcctgtt

SEQ ID NO: 394688 - DNA, 25 bp, Homo sapien
tccgtgtatgtaaaccgcctgttct

SEQ ID NO: 394689 - DNA, 25 bp, Homo sapien
ccgtgtatgtaaaccgcctgttgtc

SEQ ID NO: 394690 - DNA, 25 bp, Homo sapien
tccgtgtatgtaaaccgcctgttgt

SEQ ID NO: 394691 - DNA, 25 bp, Homo sapien
tcttccaaatcctggagcctctgaa

SEQ ID NO: 394692 - DNA, 25 bp, Homo sapien
cggcaacctcgtgccagatcctgag

SEQ ID NO: 394693 - DNA, 25 bp, Homo sapien
cagcccagtcgcacgtgcaggtgtt

SEQ ID NO: 394694 - DNA, 25 bp, Homo sapien
aaggtttgttgttttacactgctca

SEQ ID NO: 394695 - DNA, 25 bp, Homo sapien
tcagtgagtgcgcagcagttcccat

SEQ ID NO: 394696 - DNA, 25 bp, Homo sapien
gccctgctcagacagggcgtcctgg

SEQ ID NO: 394697 - DNA, 25 bp, Homo sapien
ttctgacctcacacttgaggtccgc

SEQ ID NO: 394698 - DNA, 25 bp, Homo sapien
tgcgccgggaccacaatgtttttaa

SEQ ID NO: 394699 - DNA, 25 bp, Homo sapien
caaagactgggcgaaaggctgtccg

SEQ ID NO: 394700 - DNA, 25 bp, Homo sapien
tacatgggagacaggtagacactac

SEQ ID NO: 394701 - DNA, 25 bp, Homo sapien
tgccttgccgcagagaaaacaccaa

SEQ ID NO: 394702 - DNA, 25 bp, Homo sapien
tcctgttgttaagaagcgtccctgt

SEQ ID NO: 394703 - DNA, 25 bp, Homo sapien
tcatcctgtcaatcaagcgagtggg

SEQ ID NO: 394704 - DNA, 25 bp, Homo sapien
ggctctgaccgttggctggaatcat

SEQ ID NO: 394705 - DNA, 25 bp, Homo sapien
gccttgcgggttcgaatgatcctct

SEQ ID NO: 394706 - DNA, 25 bp, Homo sapien
taaagctgggttcccacagcgtcat

SEQ ID NO: 394707 - DNA, 25 bp, Homo sapien
gcggtcgccagggcaacggcctcat

SEQ ID NO: 394708 - DNA, 25 bp, Homo sapien
ggcccgcggtcgccagggcaacggc

SEQ ID NO: 394709 - DNA, 25 bp, Homo sapien
cccgcggtcgccagggcaacggcct

SEQ ID NO: 394710 - DNA, 25 bp, Homo sapien
ccgcggtcgccagggcaacggcctc

SEQ ID NO: 394711 - DNA, 25 bp, Homo sapien
ccttggttcccgactctctgtagct

SEQ ID NO: 394712 - DNA, 25 bp, Homo sapien
tgcatggcagccacacccgtgggtc

SEQ ID NO: 394713 - DNA, 25 bp, Homo sapien
gggcatccagtctcgactccggtgg

SEQ ID NO: 394714 - DNA, 25 bp, Homo sapien
tctgcttaaagatccctctcagtgg

SEQ ID NO: 394715 - DNA, 25 bp, Homo sapien
gggaccttgtgcacgtggaaccata

SEQ ID NO: 394716 - DNA, 25 bp, Homo sapien
gaaccatacggcatttgtcctcttg

SEQ ID NO: 394717 - DNA, 25 bp, Homo sapien
tgggaccagcttcgttcacgcagca

SEQ ID NO: 394718 - DNA, 25 bp, Homo sapien
cctttgtgttgtagcatgtctcaga

SEQ ID NO: 394719 - DNA, 25 bp, Homo sapien
agctcagcccaggtgacttccaacc

SEQ ID NO: 394720 - DNA, 25 bp, Homo sapien
gggtggcttcacaccggcccaagtg

SEQ ID NO: 394721 - DNA, 25 bp, Homo sapien
acagttctttttgctgacggaatca

SEQ ID NO: 394722 - DNA, 25 bp, Homo sapien
caagtgccagtatgttccacagttc

SEQ ID NO: 394723 - DNA, 25 bp, Homo sapien
cttatccggcttccataaggtggat

SEQ ID NO: 394724 - DNA, 25 bp, Homo sapien
ccggcttccataaggtggatttgca

SEQ ID NO: 394725 - DNA, 25 bp, Homo sapien
gcttccataaggtggatttgcagaa

SEQ ID NO: 394726 - DNA, 25 bp, Homo sapien
tccataaggtggatttgcagaaagc

SEQ ID NO: 394727 - DNA, 25 bp, Homo sapien
ttggctacgctgcagtcacaaacag

SEQ ID NO: 394728 - DNA, 25 bp, Homo sapien
cacaagttcattgcctgcacttcgg

SEQ ID NO: 394729 - DNA, 25 bp, Homo sapien
gctgacaaagtgagctccttccgtg

SEQ ID NO: 394730 - DNA, 25 bp, Homo sapien
tgttccagccgctgtgcttggcgtg

SEQ ID NO: 394731 - DNA, 25 bp, Homo sapien
gcctgggaacgggcaggctgcgggg

SEQ ID NO: 394732 - DNA, 25 bp, Homo sapien
ctgcagaccggcctgggagcgccct

SEQ ID NO: 394733 - DNA, 25 bp, Homo sapien
cattcctaatgtgtcccgaggacaa

SEQ ID NO: 394734 - DNA, 25 bp, Homo sapien
tgtgctggcctgtattgacacgccg

SEQ ID NO: 394735 - DNA, 25 bp, Homo sapien
tctcgtttgttcagccggaaggtct

SEQ ID NO: 394736 - DNA, 25 bp, Homo sapien
tcaaagccgtcgtggaaagaacagc

SEQ ID NO: 394737 - DNA, 25 bp, Homo sapien
ggagaagatcggaaggctgggagcc

SEQ ID NO: 394738 - DNA, 25 bp, Homo sapien
agaaggcaaggtctcaaagggagaa

SEQ ID NO: 394739 - DNA, 25 bp, Homo sapien
ggcaaggtctcaaagggagaagatc

SEQ ID NO: 394740 - DNA, 25 bp, Homo sapien
atccctgcaaagtgggactcagggc

SEQ ID NO: 394741 - DNA, 25 bp, Homo sapien
aataccaagttggagtgagtcccca

SEQ ID NO: 394742 - DNA, 25 bp, Homo sapien
tgactgctgggtcctccgtggagaa

SEQ ID NO: 394743 - DNA, 25 bp, Homo sapien
gagtccccagggttcatgtatcact

SEQ ID NO: 394744 - DNA, 25 bp, Homo sapien
atgtatcactctgcacccggaagga

SEQ ID NO: 394745 - DNA, 25 bp, Homo sapien
tacatgtggacgcaggttaaaggac

SEQ ID NO: 394746 - DNA, 25 bp, Homo sapien
tgctctcaaggactgtggacaccgg

SEQ ID NO: 394747 - DNA, 25 bp, Homo sapien
caggtttcagagtgtgaacggcccc

SEQ ID NO: 394748 - DNA, 25 bp, Homo sapien
ctggaataacaagcagaggcggcgt

SEQ ID NO: 394749 - DNA, 25 bp, Homo sapien
gtgggtctgccaaaatgccccgaga

SEQ ID NO: 394750 - DNA, 25 bp, Homo sapien
tgtgtcctggttactcaagcctgag

SEQ ID NO: 394751 - DNA, 25 bp, Homo sapien
caaggagcactccactcagtagggt

SEQ ID NO: 394752 - DNA, 25 bp, Homo sapien
agagagctgccacccttgtaggtca

SEQ ID NO: 394753 - DNA, 25 bp, Homo sapien
tctacttggtgagggcggcattatc

SEQ ID NO: 394754 - DNA, 25 bp, Homo sapien
tacagtccaaatccggcaaagtggc

SEQ ID NO: 394755 - DNA, 25 bp, Homo sapien
tactgtcgagggacaaggaacttgc

SEQ ID NO: 394756 - DNA, 25 bp, Homo sapien
tgtacgcagcgtgcaagagacaact

SEQ ID NO: 394757 - DNA, 25 bp, Homo sapien
gctgttcaagctgcaccgtgatggg

SEQ ID NO: 394758 - DNA, 25 bp, Homo sapien
cctacttcagttagagaaagggcgt

SEQ ID NO: 394759 - DNA, 25 bp, Homo sapien
ccgtgatgggcacttggttctgtct

SEQ ID NO: 394760 - DNA, 25 bp, Homo sapien
tgcaaaaaataaaccgtcagtagcc

SEQ ID NO: 394761 - DNA, 25 bp, Homo sapien
aggctccgcgctcatggcctggcct

SEQ ID NO: 394762 - DNA, 25 bp, Homo sapien
ggagacacgttttgtcagttgcttc

SEQ ID NO: 394763 - DNA, 25 bp, Homo sapien
tggagtccttgtgagtcagactcct

SEQ ID NO: 394764 - DNA, 25 bp, Homo sapien
tcagactcctgagtcaggaccacca

SEQ ID NO: 394765 - DNA, 25 bp, Homo sapien
gctggtagtcgcagctcatggaagt

SEQ ID NO: 394766 - DNA, 25 bp, Homo sapien
tcttggtggctggtagtcgcagctc

SEQ ID NO: 394767 - DNA, 25 bp, Homo sapien
gaagtctgccagggcgcgtagcctt

SEQ ID NO: 394768 - DNA, 25 bp, Homo sapien
gtagtcgcagctcatggaagtctgc

SEQ ID NO: 394769 - DNA, 25 bp, Homo sapien
aggtgttcgcttttggtgtcggcct

SEQ ID NO: 394770 - DNA, 25 bp, Homo sapien
cgcttttggtgtcggcctttgagct

SEQ ID NO: 394771 - DNA, 25 bp, Homo sapien
cttcttgaaggcaagagcgcccaga

SEQ ID NO: 394772 - DNA, 25 bp, Homo sapien
caagagcgcccagaggtgttcgctt

SEQ ID NO: 394773 - DNA, 25 bp, Homo sapien
tgccaagtacttccgcaggtcatcc

SEQ ID NO: 394774 - DNA, 25 bp, Homo sapien
gactggcagattcaaggaagctttc

SEQ ID NO: 394775 - DNA, 25 bp, Homo sapien
gatgtccttcatgggaccacaggcc

SEQ ID NO: 394776 - DNA, 25 bp, Homo sapien
tggagctccggaaagctcgggaccc

SEQ ID NO: 394777 - DNA, 25 bp, Homo sapien
tccacacggtgataagtgagtggct

SEQ ID NO: 394778 - DNA, 25 bp, Homo sapien
ttttgagcgcacaccagagctgctt

SEQ ID NO: 394779 - DNA, 25 bp, Homo sapien
cagccagcctcgcagcatgtaagag

SEQ ID NO: 394780 - DNA, 25 bp, Homo sapien
tggagcaagccgcaaggagcttttg

SEQ ID NO: 394781 - DNA, 25 bp, Homo sapien
cctttgaggtgtgagggccttgatc

SEQ ID NO: 394782 - DNA, 25 bp, Homo sapien
gaggcctccgtgagaacctttgagg

SEQ ID NO: 394783 - DNA, 25 bp, Homo sapien
cttctctgaccagcaagcacattct

SEQ ID NO: 394784 - DNA, 25 bp, Homo sapien
agctcgctgactgcctgcacagtgg

SEQ ID NO: 394785 - DNA, 25 bp, Homo sapien
ttggcaggaggcttgcaggagcttt

SEQ ID NO: 394786 - DNA, 25 bp, Homo sapien
tggcaggaggcttgcaggagctttc

SEQ ID NO: 394787 - DNA, 25 bp, Homo sapien
tcacctggttgtcggtggcccgcgt

SEQ ID NO: 394788 - DNA, 25 bp, Homo sapien
gacttgctgttttgatcgtcggccg

SEQ ID NO: 394789 - DNA, 25 bp, Homo sapien
gcccatcatcattccgacttgctgt

SEQ ID NO: 394790 - DNA, 25 bp, Homo sapien
aagccagacagctggccttgctgga

SEQ ID NO: 394791 - DNA, 25 bp, Homo sapien
caggaacccggtgtgtcgtaagtga

SEQ ID NO: 394792 - DNA, 25 bp, Homo sapien
ccaagggtgctttccgtggccgtgt

SEQ ID NO: 394793 - DNA, 25 bp, Homo sapien
gattctagctaggttgcaggacgtg

SEQ ID NO: 394794 - DNA, 25 bp, Homo sapien
tgtaggtgctacgttgaacagcccc

SEQ ID NO: 394795 - DNA, 25 bp, Homo sapien
agtggctttgctgtccctggtctgg

SEQ ID NO: 394796 - DNA, 25 bp, Homo sapien
tgggcctgactctgacacgcagccc

SEQ ID NO: 394797 - DNA, 25 bp, Homo sapien
cgcctgtctgccagtggctttgctg

SEQ ID NO: 394798 - DNA, 25 bp, Homo sapien
cttgtcctcatcctcgcctgtctgc

SEQ ID NO: 394799 - DNA, 25 bp, Homo sapien
tgaccagaatgcaaaacagagagac

SEQ ID NO: 394800 - DNA, 25 bp, Homo sapien
cagaagatgggataggatgaagtac

SEQ ID NO: 394801 - DNA, 25 bp, Homo sapien
cagtcaccgagacaaaaggctcaga

SEQ ID NO: 394802 - DNA, 25 bp, Homo sapien
gaagagagaaatacggaatttgacc

SEQ ID NO: 394803 - DNA, 25 bp, Homo sapien
tgactttgccccctgcgcacttggt

SEQ ID NO: 394804 - DNA, 25 bp, Homo sapien
cggcagctgagcacaacgcagatga

SEQ ID NO: 394805 - DNA, 25 bp, Homo sapien
ccccatatctgtgtccggtgggcag

SEQ ID NO: 394806 - DNA, 25 bp, Homo sapien
tgagcacaacgcagatgactttgcc

SEQ ID NO: 394807 - DNA, 25 bp, Homo sapien
aacgtgacaggccagcgaggctgta

SEQ ID NO: 394808 - DNA, 25 bp, Homo sapien
tgtagacgtggccacgcatcactgc

SEQ ID NO: 394809 - DNA, 25 bp, Homo sapien
aaccagacagtgatgaagcaaagcc

SEQ ID NO: 394810 - DNA, 25 bp, Homo sapien
ggctcccgaacttagagcacggtga

SEQ ID NO: 394811 - DNA, 25 bp, Homo sapien
gagtaagttagatatgcccagggaa

SEQ ID NO: 394812 - DNA, 25 bp, Homo sapien
tcttgctgtgcgacacatgggctcc

SEQ ID NO: 394813 - DNA, 25 bp, Homo sapien
gaatcaagtggctgaacacgtcacg

SEQ ID NO: 394814 - DNA, 25 bp, Homo sapien
caagtctcaggtgtacgattcagca

SEQ ID NO: 394815 - DNA, 25 bp, Homo sapien
ggcaccagctgactcatcagaaggg

SEQ ID NO: 394816 - DNA, 25 bp, Homo sapien
ctggcaccagctgactcatcagaag

SEQ ID NO: 394817 - DNA, 25 bp, Homo sapien
tggcaccagctgactcatcagaagg

SEQ ID NO: 394818 - DNA, 25 bp, Homo sapien
gcagccacactttaccaccggctgg

SEQ ID NO: 394819 - DNA, 25 bp, Homo sapien
gagccccagaaacaagcacacgtat

SEQ ID NO: 394820 - DNA, 25 bp, Homo sapien
accgagggccctgtggacggctggt

SEQ ID NO: 394821 - DNA, 25 bp, Homo sapien
ctggggcagagaccgagggccctgt

SEQ ID NO: 394822 - DNA, 25 bp, Homo sapien
ggcacatgcagattctcgccgtctc

SEQ ID NO: 394823 - DNA, 25 bp, Homo sapien
gcacatgcagattctcgccgtctcc

SEQ ID NO: 394824 - DNA, 25 bp, Homo sapien
acatgcagattctcgccgtctccat

SEQ ID NO: 394825 - DNA, 25 bp, Homo sapien
atgcagattctcgccgtctccatca

SEQ ID NO: 394826 - DNA, 25 bp, Homo sapien
actgaaccatggaaagcgaaaccgc

SEQ ID NO: 394827 - DNA, 25 bp, Homo sapien
tcctcccctcagacagagactgggt

SEQ ID NO: 394828 - DNA, 25 bp, Homo sapien
gctgtccgtgcacatacatcctgaa

SEQ ID NO: 394829 - DNA, 25 bp, Homo sapien
gcactcaggcacaagcgtgttccct

SEQ ID NO: 394830 - DNA, 25 bp, Homo sapien
gactctaggtgtgtgccacaatacc

SEQ ID NO: 394831 - DNA, 25 bp, Homo sapien
accaaggctggagtgtgatctcggc

SEQ ID NO: 394832 - DNA, 25 bp, Homo sapien
tgggactctaggtgtgtgccacaat

SEQ ID NO: 394833 - DNA, 25 bp, Homo sapien
actctaggtgtgtgccacaatacct

SEQ ID NO: 394834 - DNA, 25 bp, Homo sapien
agctcattaaccatcagagctgctt

SEQ ID NO: 394835 - DNA, 25 bp, Homo sapien
tgtctggcagctcattaaccatcag

SEQ ID NO: 394836 - DNA, 25 bp, Homo sapien
cagtccgaaaagagcaaatccttgt

SEQ ID NO: 394837 - DNA, 25 bp, Homo sapien
tggctccgagcattcctcttgctgt

SEQ ID NO: 394838 - DNA, 25 bp, Homo sapien
cacagttgcttggatttcacgagcc

SEQ ID NO: 394839 - DNA, 25 bp, Homo sapien
tcacgagccagcatattgtggaaca

SEQ ID NO: 394840 - DNA, 25 bp, Homo sapien
tgtggaacactagctcatctgagcc

SEQ ID NO: 394841 - DNA, 25 bp, Homo sapien
gaatgaatgcaggagaacctaccaa

SEQ ID NO: 394842 - DNA, 25 bp, Homo sapien
cttctcgccaccctttgtaggagcc

SEQ ID NO: 394843 - DNA, 25 bp, Homo sapien
ctgtgaatgttgatggcgtatctca

SEQ ID NO: 394844 - DNA, 25 bp, Homo sapien
gtgaatgttgatggcgtatctcagg

SEQ ID NO: 394845 - DNA, 25 bp, Homo sapien
aatgttgatggcgtatctcaggtca

SEQ ID NO: 394846 - DNA, 25 bp, Homo sapien
ttgatggcgtatctcaggtcaccac

SEQ ID NO: 394847 - DNA, 25 bp, Homo sapien
ggtatcaatgcacatatctggagtt

SEQ ID NO: 394848 - DNA, 25 bp, Homo sapien
acggatgcggtatgggatattcctt

SEQ ID NO: 394849 - DNA, 25 bp, Homo sapien
gcctggtatcaatgcacatatctgg

SEQ ID NO: 394850 - DNA, 25 bp, Homo sapien
tgagcctggtatcaatgcacatatc

SEQ ID NO: 394851 - DNA, 25 bp, Homo sapien
acataagtaatcaaagtatagagtt

SEQ ID NO: 394852 - DNA, 25 bp, Homo sapien
cataagtaatcaaagtatagagttt

SEQ ID NO: 394853 - DNA, 25 bp, Homo sapien
tacataagtaatcaaagtatagagt

SEQ ID NO: 394854 - DNA, 25 bp, Homo sapien
cgagcctgagacgagcagcagatcg

SEQ ID NO: 394855 - DNA, 25 bp, Homo sapien
tacgagcctgagacgagcagcagat

SEQ ID NO: 394856 - DNA, 25 bp, Homo sapien
acgagcctgagacgagcagcagatc

SEQ ID NO: 394857 - DNA, 25 bp, Homo sapien
ctacgagcctgagacgagcagcaga

SEQ ID NO: 394858 - DNA, 25 bp, Homo sapien
tagtcacggctttcttcgagccctt

SEQ ID NO: 394859 - DNA, 25 bp, Homo sapien
ctgcgccttagtcacggctttcttc

SEQ ID NO: 394860 - DNA, 25 bp, Homo sapien
gcgccttagtcacggctttcttcga

SEQ ID NO: 394861 - DNA, 25 bp, Homo sapien
ccttagtcacggctttcttcgagcc

SEQ ID NO: 394862 - DNA, 25 bp, Homo sapien
agctgcttcatgtattctctttgga

SEQ ID NO: 394863 - DNA, 25 bp, Homo sapien
ttttgtgctaacaaatatctataca

SEQ ID NO: 394864 - DNA, 25 bp, Homo sapien
gaagcgagactggagggtgtgttca

SEQ ID NO: 394865 - DNA, 25 bp, Homo sapien
ccaagctttctagtccattttaata

SEQ ID NO: 394866 - DNA, 25 bp, Homo sapien
gagtctcaaggcttcttcactgtgc

SEQ ID NO: 394867 - DNA, 25 bp, Homo sapien
tcaaatcgttgagggatggaacagc

SEQ ID NO: 394868 - DNA, 25 bp, Homo sapien
tcaggcttggcagggacagtttgct

SEQ ID NO: 394869 - DNA, 25 bp, Homo sapien
gcagcattggcatttgcagttaaaa

SEQ ID NO: 394870 - DNA, 25 bp, Homo sapien
ccaaaattcaggctgtagacggcga

SEQ ID NO: 394871 - DNA, 25 bp, Homo sapien
ccggcgctgcctttcggttgccaaa

SEQ ID NO: 394872 - DNA, 25 bp, Homo sapien
gttagccagggttaggacttgacca

SEQ ID NO: 394873 - DNA, 25 bp, Homo sapien
gctgatggcgtcacaaaggcgccgc

SEQ ID NO: 394874 - DNA, 25 bp, Homo sapien
ctgggcaaattggatctcggccggc

SEQ ID NO: 394875 - DNA, 25 bp, Homo sapien
gatgtactggcgcagcttcttcacc

SEQ ID NO: 394876 - DNA, 25 bp, Homo sapien
ggatgcccttctcgctggacgccag

SEQ ID NO: 394877 - DNA, 25 bp, Homo sapien
ccctctgcgtcttcacgctgatgta

SEQ ID NO: 394878 - DNA, 25 bp, Homo sapien
gagctgattatcagcccagagaggc

SEQ ID NO: 394879 - DNA, 25 bp, Homo sapien
tttcaaaccactcctagggcacgtg

SEQ ID NO: 394880 - DNA, 25 bp, Homo sapien
tgcctctgcataggcggtttccgct

SEQ ID NO: 394881 - DNA, 25 bp, Homo sapien
gaacagcctatcaagaagagcaacc

SEQ ID NO: 394882 - DNA, 25 bp, Homo sapien
cactggtgtaaactggtcttaggcc

SEQ ID NO: 394883 - DNA, 25 bp, Homo sapien
aaaagttggagcctgtcatcgggag

SEQ ID NO: 394884 - DNA, 25 bp, Homo sapien
tgtccacgacgttcatgctgcggag

SEQ ID NO: 394885 - DNA, 25 bp, Homo sapien
tgataggcactaaccagacaggact

SEQ ID NO: 394886 - DNA, 25 bp, Homo sapien
aagttgcagaactgataagataggc

SEQ ID NO: 394887 - DNA, 25 bp, Homo sapien
ccagtgccaagaatagcgtacataa

SEQ ID NO: 394888 - DNA, 25 bp, Homo sapien
gttaaagcaagagcgcaacactgtt

SEQ ID NO: 394889 - DNA, 25 bp, Homo sapien
gatcattttatgactgtgagcaccc

SEQ ID NO: 394890 - DNA, 25 bp, Homo sapien
gggacactgacgctgctttggaata

SEQ ID NO: 394891 - DNA, 25 bp, Homo sapien
tttatcagctacagggtagggtggc

SEQ ID NO: 394892 - DNA, 25 bp, Homo sapien
tcagcgtgaggaagcaaatgtcatc

SEQ ID NO: 394893 - DNA, 25 bp, Homo sapien
caaagtggccacttatgaaatcggc

SEQ ID NO: 394894 - DNA, 25 bp, Homo sapien
cccacatgcagtagaagagcccctt

SEQ ID NO: 394895 - DNA, 25 bp, Homo sapien
tgcacccacatgcagtagaagagcc

SEQ ID NO: 394896 - DNA, 25 bp, Homo sapien
tcatcctgcacccacatgcagtaga

SEQ ID NO: 394897 - DNA, 25 bp, Homo sapien
tgcagtagaagagccccttccagat

SEQ ID NO: 394898 - DNA, 25 bp, Homo sapien
gtgcaatggtgttggcgagctcttc

SEQ ID NO: 394899 - DNA, 25 bp, Homo sapien
ttaacagcatggactagctgtgcaa

SEQ ID NO: 394900 - DNA, 25 bp, Homo sapien
ctgtgcaatggtgttggcgagctct

SEQ ID NO: 394901 - DNA, 25 bp, Homo sapien
acagcatggactagctgtgcaatgg

SEQ ID NO: 394902 - DNA, 25 bp, Homo sapien
tcctttccattctcgattcatggtt

SEQ ID NO: 394903 - DNA, 25 bp, Homo sapien
gattcatggtttgccaaaaggtctg

SEQ ID NO: 394904 - DNA, 25 bp, Homo sapien
atagtatttgtccaggcgtagcctg

SEQ ID NO: 394905 - DNA, 25 bp, Homo sapien
ggcgtagcctgtctattcctttcca

SEQ ID NO: 394906 - DNA, 25 bp, Homo sapien
agccatttcgcttcaagacttcaaa

SEQ ID NO: 394907 - DNA, 25 bp, Homo sapien
actgcctcaggaccagacgaatcag

SEQ ID NO: 394908 - DNA, 25 bp, Homo sapien
ttcccagccatttcgcttcaagact

SEQ ID NO: 394909 - DNA, 25 bp, Homo sapien
aggactgcctcaggaccagacgaat

SEQ ID NO: 394910 - DNA, 25 bp, Homo sapien
taggagactgactctcaggacacag

SEQ ID NO: 394911 - DNA, 25 bp, Homo sapien
tccttcatcaggacatccaagaaaa

SEQ ID NO: 394912 - DNA, 25 bp, Homo sapien
tcaatgaagtggaatctcactccat

SEQ ID NO: 394913 - DNA, 25 bp, Homo sapien
tctcaggacacaggacctccttcat

SEQ ID NO: 394914 - DNA, 25 bp, Homo sapien
gaatggatcgataaacttgagattc

SEQ ID NO: 394915 - DNA, 25 bp, Homo sapien
aattttgcagaatggatcgataaac

SEQ ID NO: 394916 - DNA, 25 bp, Homo sapien
ccttcgtcttcgcagcaattttgca

SEQ ID NO: 394917 - DNA, 25 bp, Homo sapien
ttcgtcttcgcagcaattttgcaga

SEQ ID NO: 394918 - DNA, 25 bp, Homo sapien
gatctacgatagcttcgaagacacc

SEQ ID NO: 394919 - DNA, 25 bp, Homo sapien
aaaaggagactgatctacgatagct

SEQ ID NO: 394920 - DNA, 25 bp, Homo sapien
caccccgagctatggtctgtaccag

SEQ ID NO: 394921 - DNA, 25 bp, Homo sapien
aagacaccccgagctatggtctgta

SEQ ID NO: 394922 - DNA, 25 bp, Homo sapien
tgttcctccatcgtctcttcaggca

SEQ ID NO: 394923 - DNA, 25 bp, Homo sapien
ttctgttcctccatcgtctcttcag

SEQ ID NO: 394924 - DNA, 25 bp, Homo sapien
ttgtcttctgttcctccatcgtctc

SEQ ID NO: 394925 - DNA, 25 bp, Homo sapien
gtcttctgttcctccatcgtctctt

SEQ ID NO: 394926 - DNA, 25 bp, Homo sapien
tgacagctcttctcaaggatacctc

SEQ ID NO: 394927 - DNA, 25 bp, Homo sapien
ttctcaaggatacctcattttcagg

SEQ ID NO: 394928 - DNA, 25 bp, Homo sapien
cagctcttctcaaggatacctcatt

SEQ ID NO: 394929 - DNA, 25 bp, Homo sapien
gctcttctcaaggatacctcatttt

SEQ ID NO: 394930 - DNA, 25 bp, Homo sapien
tagatacaaattttgctaagcatgg

SEQ ID NO: 394931 - DNA, 25 bp, Homo sapien
agacagggtcgctggtagctctgtt

SEQ ID NO: 394932 - DNA, 25 bp, Homo sapien
tctccacacctagactagactattt

SEQ ID NO: 394933 - DNA, 25 bp, Homo sapien
gagacagggtcgctggtagctctgt

SEQ ID NO: 394934 - DNA, 25 bp, Homo sapien
atgagtctccacacctagactagac

SEQ ID NO: 394935 - DNA, 25 bp, Homo sapien
tcactgagtccatcttttctggaat

SEQ ID NO: 394936 - DNA, 25 bp, Homo sapien
tcctcaaaggttccacagtcatctc

SEQ ID NO: 394937 - DNA, 25 bp, Homo sapien
tctttcatcactgagtccatctttt

SEQ ID NO: 394938 - DNA, 25 bp, Homo sapien
tcttttctggaatggtttttgccca

SEQ ID NO: 394939 - DNA, 25 bp, Homo sapien
atgagtttggagaggcgcttcctgt

SEQ ID NO: 394940 - DNA, 25 bp, Homo sapien
ggagtcgatcagcaacagccttata

SEQ ID NO: 394941 - DNA, 25 bp, Homo sapien
tttggagaggcgcttcctgttgaag

SEQ ID NO: 394942 - DNA, 25 bp, Homo sapien
ggtcatttccaggagtcgatcagca

SEQ ID NO: 394943 - DNA, 25 bp, Homo sapien
cccacgctgtactgcggtatgacta

SEQ ID NO: 394944 - DNA, 25 bp, Homo sapien
caagtgtccctagtgaatgacgggt

SEQ ID NO: 394945 - DNA, 25 bp, Homo sapien
gtggatttctcaaccaaggcaaggc

SEQ ID NO: 394946 - DNA, 25 bp, Homo sapien
aaggcaagggatcacaagccctcgg

SEQ ID NO: 394947 - DNA, 25 bp, Homo sapien
ctttccttgactgaggatttggtca

SEQ ID NO: 394948 - DNA, 25 bp, Homo sapien
atgctttccttgactgaggatttgg

SEQ ID NO: 394949 - DNA, 25 bp, Homo sapien
gcagaaatgtcctccgcaaaactga

SEQ ID NO: 394950 - DNA, 25 bp, Homo sapien
tccgcaaaactgagttgagatatac

SEQ ID NO: 394951 - DNA, 25 bp, Homo sapien
ttcctccatccccaactgtgactgg

SEQ ID NO: 394952 - DNA, 25 bp, Homo sapien
caagggtaaaaaccatagatctcga

SEQ ID NO: 394953 - DNA, 25 bp, Homo sapien
tccttctgtccgtttataaacacat

SEQ ID NO: 394954 - DNA, 25 bp, Homo sapien
tctcgagtggtcatcaaacagccgc

SEQ ID NO: 394955 - DNA, 25 bp, Homo sapien
tcttcctctacacaaaagactctgc

SEQ ID NO: 394956 - DNA, 25 bp, Homo sapien
gaagactgctttcactgtcctcttc

SEQ ID NO: 394957 - DNA, 25 bp, Homo sapien
tgaagactgctttcactgtcctctt

SEQ ID NO: 394958 - DNA, 25 bp, Homo sapien
cctgccccggttctgttccagggat

SEQ ID NO: 394959 - DNA, 25 bp, Homo sapien
ctggctcggccacacgtgccttcag

SEQ ID NO: 394960 - DNA, 25 bp, Homo sapien
tggctcggccacacgtgccttcagg

SEQ ID NO: 394961 - DNA, 25 bp, Homo sapien
gctccctgccccggttctgttccag

SEQ ID NO: 394962 - DNA, 25 bp, Homo sapien
ctgaggatgactgccactcgggcca

SEQ ID NO: 394963 - DNA, 25 bp, Homo sapien
tggacaggccactgccattgacggg

SEQ ID NO: 394964 - DNA, 25 bp, Homo sapien
ttaggagttgggctccacctgtcgg

SEQ ID NO: 394965 - DNA, 25 bp, Homo sapien
cattgacgggcacaactccaagttt

SEQ ID NO: 394966 - DNA, 25 bp, Homo sapien
ctggggttgcccagcttcggactcc

SEQ ID NO: 394967 - DNA, 25 bp, Homo sapien
ggttgcccagcttcggactccagca

SEQ ID NO: 394968 - DNA, 25 bp, Homo sapien
ggtgtggctgttcgccccctctgcg

SEQ ID NO: 394969 - DNA, 25 bp, Homo sapien
agcgtggtgtggctgttcgccccct

SEQ ID NO: 394970 - DNA, 25 bp, Homo sapien
gactcgaggctagaaatgggcctcc

SEQ ID NO: 394971 - DNA, 25 bp, Homo sapien
tgcagtgacactacgtttgccggcc

SEQ ID NO: 394972 - DNA, 25 bp, Homo sapien
caagaaaggcaatgtctctggccct

SEQ ID NO: 394973 - DNA, 25 bp, Homo sapien
cacagacctgcacatacaagtggat

SEQ ID NO: 394974 - DNA, 25 bp, Homo sapien
tgccgctgccgacacacgggtggct

SEQ ID NO: 394975 - DNA, 25 bp, Homo sapien
cactcattgcgtgtgcagcaactga

SEQ ID NO: 394976 - DNA, 25 bp, Homo sapien
gagaccgggtctcgtacttggctct

SEQ ID NO: 394977 - DNA, 25 bp, Homo sapien
tggctccggcaggttcaagtgtgcc

SEQ ID NO: 394978 - DNA, 25 bp, Homo sapien
gacagcccttccattcggcagagct

SEQ ID NO: 394979 - DNA, 25 bp, Homo sapien
cgacggcccgcggtcttccgcaccg

SEQ ID NO: 394980 - DNA, 25 bp, Homo sapien
gcagacagcccttccattcggcaga

SEQ ID NO: 394981 - DNA, 25 bp, Homo sapien
gcggtcttccgcaccgcacttgcag

SEQ ID NO: 394982 - DNA, 25 bp, Homo sapien
aaacttcacaaagtcgctctctgcc

SEQ ID NO: 394983 - DNA, 25 bp, Homo sapien
tcagggaactgcaagtcccactgct

SEQ ID NO: 394984 - DNA, 25 bp, Homo sapien
gtcaaacttcacaaagtcgctctct

SEQ ID NO: 394985 - DNA, 25 bp, Homo sapien
ttctgaagaacaggggctttggtaa

SEQ ID NO: 394986 - DNA, 25 bp, Homo sapien
gtgactttcttggagctggatggtg

SEQ ID NO: 394987 - DNA, 25 bp, Homo sapien
aaggtgactttcttggagctggatg

SEQ ID NO: 394988 - DNA, 25 bp, Homo sapien
aggtgactttcttggagctggatgg

SEQ ID NO: 394989 - DNA, 25 bp, Homo sapien
tgactttcttggagctggatggtgt

SEQ ID NO: 394990 - DNA, 25 bp, Homo sapien
acaccttagacagcgtcctgcctgg

SEQ ID NO: 394991 - DNA, 25 bp, Homo sapien
tgtcccttcaacaccttagacagcg

SEQ ID NO: 394992 - DNA, 25 bp, Homo sapien
ttaagtgggtccgacagctgtccct

SEQ ID NO: 394993 - DNA, 25 bp, Homo sapien
tgctaggacgaagcagggccatctc

SEQ ID NO: 394994 - DNA, 25 bp, Homo sapien
cgaaggccactcgagaagggcccgt

SEQ ID NO: 394995 - DNA, 25 bp, Homo sapien
agggcccgtgggactgaccaagata

SEQ ID NO: 394996 - DNA, 25 bp, Homo sapien
tcagaagaaatccatagccctgggc

SEQ ID NO: 394997 - DNA, 25 bp, Homo sapien
ggcttctgttcagggtcgaaggcca

SEQ ID NO: 394998 - DNA, 25 bp, Homo sapien
caaattccgcagaactgagagctca

SEQ ID NO: 394999 - DNA, 25 bp, Homo sapien
gaatgagtgtgctccacgcaaggac

SEQ ID NO: 395000 - DNA, 25 bp, Homo sapien
tggagagctcaaacgcaaacatggt

SEQ ID NO: 395001 - DNA, 25 bp, Homo sapien
gaacctcgtgcacacaacttatggg

SEQ ID NO: 395002 - DNA, 25 bp, Homo sapien
catggagccggtcaggcagtgactc

SEQ ID NO: 395003 - DNA, 25 bp, Homo sapien
gaacggtctgaactgtaagtgcacg

SEQ ID NO: 395004 - DNA, 25 bp, Homo sapien
taagtgcacgcttccgcatttgaga

SEQ ID NO: 395005 - DNA, 25 bp, Homo sapien
taatgaacttacaggagaacggtct

SEQ ID NO: 395006 - DNA, 25 bp, Homo sapien
ggactggccgcgttttgctgaaaaa

SEQ ID NO: 395007 - DNA, 25 bp, Homo sapien
caaagccatagctgggaccttggag

SEQ ID NO: 395008 - DNA, 25 bp, Homo sapien
gacttggctttgacgagtactgaca

SEQ ID NO: 395009 - DNA, 25 bp, Homo sapien
tctgatgttcgcaggtgaaacccca

SEQ ID NO: 395010 - DNA, 25 bp, Homo sapien
gcctataaagactccgccatgcctg

SEQ ID NO: 395011 - DNA, 25 bp, Homo sapien
tgtggacttgtctgggatccaaaga

SEQ ID NO: 395012 - DNA, 25 bp, Homo sapien
caccctagctggagtcagtttctgg

SEQ ID NO: 395013 - DNA, 25 bp, Homo sapien
gccaacacccagaacaggctgtctg

SEQ ID NO: 395014 - DNA, 25 bp, Homo sapien
gcggcggacccgatcagcgcagacg

SEQ ID NO: 395015 - DNA, 25 bp, Homo sapien
ttctgacctcagcgggcggctccga

SEQ ID NO: 395016 - DNA, 25 bp, Homo sapien
agacgcctccttctgacctcagcgg

SEQ ID NO: 395017 - DNA, 25 bp, Homo sapien
gctcccctcggctgcgactctggct

SEQ ID NO: 395018 - DNA, 25 bp, Homo sapien
gacgtggctctgtatggagagcacc

SEQ ID NO: 395019 - DNA, 25 bp, Homo sapien
ggttgcccacgtagccgcggatgac

SEQ ID NO: 395020 - DNA, 25 bp, Homo sapien
tgtatggagagcacccggcactcct

SEQ ID NO: 395021 - DNA, 25 bp, Homo sapien
tagccgcggatgacgtggctctgta

SEQ ID NO: 395022 - DNA, 25 bp, Homo sapien
tccaaacacaggctcaaggttttgc

SEQ ID NO: 395023 - DNA, 25 bp, Homo sapien
tgaagcccagacgtgcagatggtcc

SEQ ID NO: 395024 - DNA, 25 bp, Homo sapien
cagtcgcaacaaatctgtgctacac

SEQ ID NO: 395025 - DNA, 25 bp, Homo sapien
aaacacaggctcaaggttttgctct

SEQ ID NO: 395026 - DNA, 25 bp, Homo sapien
gattgaatgctggaccctcgaagga

SEQ ID NO: 395027 - DNA, 25 bp, Homo sapien
tcctgcagcacggaggtcacatgtg

SEQ ID NO: 395028 - DNA, 25 bp, Homo sapien
agacgtgcttgggacaatctctgca

SEQ ID NO: 395029 - DNA, 25 bp, Homo sapien
taaatgggtctcgagctaaggcccc

SEQ ID NO: 395030 - DNA, 25 bp, Homo sapien
aatcagctcctgacttgagggccct

SEQ ID NO: 395031 - DNA, 25 bp, Homo sapien
caggtaggagtcaggtgctgacatc

SEQ ID NO: 395032 - DNA, 25 bp, Homo sapien
ttctgctcctgtccggagaagcggg

SEQ ID NO: 395033 - DNA, 25 bp, Homo sapien
gttactcgctgctcgcgtccacatg

SEQ ID NO: 395034 - DNA, 25 bp, Homo sapien
gctggaccgcaggagctctccgact

SEQ ID NO: 395035 - DNA, 25 bp, Homo sapien
tcctgccgagagagaaagccagtca

SEQ ID NO: 395036 - DNA, 25 bp, Homo sapien
tcaacctcatcagtcatccggctgg

SEQ ID NO: 395037 - DNA, 25 bp, Homo sapien
tagaaagggtcgcaacttcctcctg

SEQ ID NO: 395038 - DNA, 25 bp, Homo sapien
acctgtcagtgtgatgagatctctc

SEQ ID NO: 395039 - DNA, 25 bp, Homo sapien
gatggattgggccacgcgattgcca

SEQ ID NO: 395040 - DNA, 25 bp, Homo sapien
taaaagaaggactcaacgactgttg

SEQ ID NO: 395041 - DNA, 25 bp, Homo sapien
taaaaactgagtcatatggccaggc

SEQ ID NO: 395042 - DNA, 25 bp, Homo sapien
gactcagaagacgacaatgcacggg

SEQ ID NO: 395043 - DNA, 25 bp, Homo sapien
tccaacttcatgtgccagacaaagc

SEQ ID NO: 395044 - DNA, 25 bp, Homo sapien
gaaaggtatctcctgctgttacaca

SEQ ID NO: 395045 - DNA, 25 bp, Homo sapien
tattcatcagcatcgcaagctggtc

SEQ ID NO: 395046 - DNA, 25 bp, Homo sapien
ggctggcaaacgtatccgagaatga

SEQ ID NO: 395047 - DNA, 25 bp, Homo sapien
cgagaatgaagtcgctattttctgc

SEQ ID NO: 395048 - DNA, 25 bp, Homo sapien
taagcaacgatgacacaaatcctga

SEQ ID NO: 395049 - DNA, 25 bp, Homo sapien
aatgagagcacgagcaagctgagcc

SEQ ID NO: 395050 - DNA, 25 bp, Homo sapien
gcaaatgtaccagcccgaatccaca

SEQ ID NO: 395051 - DNA, 25 bp, Homo sapien
acacagatagcttgcagtatttcaa

SEQ ID NO: 395052 - DNA, 25 bp, Homo sapien
cctctatacacagatagcttgcagt

SEQ ID NO: 395053 - DNA, 25 bp, Homo sapien
tatacacagatagcttgcagtattt

SEQ ID NO: 395054 - DNA, 25 bp, Homo sapien
tggacagagttcaccgcgtcaatct

SEQ ID NO: 395055 - DNA, 25 bp, Homo sapien
agttcaccgcgtcaatctcaaatcc

SEQ ID NO: 395056 - DNA, 25 bp, Homo sapien
tgaaaactggacagagttcaccgcg

SEQ ID NO: 395057 - DNA, 25 bp, Homo sapien
aactggacagagttcaccgcgtcaa

SEQ ID NO: 395058 - DNA, 25 bp, Homo sapien
cgtgaccaccccagtaacaaccctg

SEQ ID NO: 395059 - DNA, 25 bp, Homo sapien
agctggttgcgccacttcacgccag

SEQ ID NO: 395060 - DNA, 25 bp, Homo sapien
caccccagtaacaaccctgggcagg

SEQ ID NO: 395061 - DNA, 25 bp, Homo sapien
tgagctggttgcgccacttcacgcc

SEQ ID NO: 395062 - DNA, 25 bp, Homo sapien
ctcagtccgggaagctcagacaggg

SEQ ID NO: 395063 - DNA, 25 bp, Homo sapien
caagcccagctcacggtgtggaaaa

SEQ ID NO: 395064 - DNA, 25 bp, Homo sapien
cagggaaccaacaacgcagcttgtg

SEQ ID NO: 395065 - DNA, 25 bp, Homo sapien
ccactgggaatactggccacaaggt

SEQ ID NO: 395066 - DNA, 25 bp, Homo sapien
ccccttccctgcagcagggaccacc

SEQ ID NO: 395067 - DNA, 25 bp, Homo sapien
gcagcagggaccaccaagcccagca

SEQ ID NO: 395068 - DNA, 25 bp, Homo sapien
cttccctgcagcagggaccaccaag

SEQ ID NO: 395069 - DNA, 25 bp, Homo sapien
ctgccccttccctgcagcagggacc

SEQ ID NO: 395070 - DNA, 25 bp, Homo sapien
taattcagccataacagccatgagg

SEQ ID NO: 395071 - DNA, 25 bp, Homo sapien
gataagacagcaggtctcgccctga

SEQ ID NO: 395072 - DNA, 25 bp, Homo sapien
actaatacagggtgccatcgggaag

SEQ ID NO: 395073 - DNA, 25 bp, Homo sapien
tcctatcgaaacagagggcatggtc

SEQ ID NO: 395074 - DNA, 25 bp, Homo sapien
cccgaaggagatcactaggcgcagt

SEQ ID NO: 395075 - DNA, 25 bp, Homo sapien
ttggcaggtcccaacggctgcccac

SEQ ID NO: 395076 - DNA, 25 bp, Homo sapien
gtggacggctcctccccatggactg

SEQ ID NO: 395077 - DNA, 25 bp, Homo sapien
ccatggactggctcaaacccgaagg

SEQ ID NO: 395078 - DNA, 25 bp, Homo sapien
tggggccgtgggcttcccttgacac

SEQ ID NO: 395079 - DNA, 25 bp, Homo sapien
gtgggcttcccttgacacccgccca

SEQ ID NO: 395080 - DNA, 25 bp, Homo sapien
ggcttcccttgacacccgcccactc

SEQ ID NO: 395081 - DNA, 25 bp, Homo sapien
cttcccttgacacccgcccactctc

SEQ ID NO: 395082 - DNA, 25 bp, Homo sapien
gcctcaggccttcgtacaactcctg

SEQ ID NO: 395083 - DNA, 25 bp, Homo sapien
gttcagcctcaggccttcgtacaac

SEQ ID NO: 395084 - DNA, 25 bp, Homo sapien
tcagcctcaggccttcgtacaactc

SEQ ID NO: 395085 - DNA, 25 bp, Homo sapien
caggccttcgtacaactcctggagc

SEQ ID NO: 395086 - DNA, 25 bp, Homo sapien
tgagcacgtagtcatatttattcat

SEQ ID NO: 395087 - DNA, 25 bp, Homo sapien
gtgagcacgtagtcatatttattca

SEQ ID NO: 395088 - DNA, 25 bp, Homo sapien
ctgtgagcacgtagtcatatttatt

SEQ ID NO: 395089 - DNA, 25 bp, Homo sapien
tgtgagcacgtagtcatatttattc

SEQ ID NO: 395090 - DNA, 25 bp, Homo sapien
cacgatcaactgtggcacaaagaaa

SEQ ID NO: 395091 - DNA, 25 bp, Homo sapien
agaagcaccagcagaccctgcagag

SEQ ID NO: 395092 - DNA, 25 bp, Homo sapien
ctgtggcacaaagaaagagaagcac

SEQ ID NO: 395093 - DNA, 25 bp, Homo sapien
caccagcagaccctgcagaggggtg

SEQ ID NO: 395094 - DNA, 25 bp, Homo sapien
agggggagaatccaggtcaccctca

SEQ ID NO: 395095 - DNA, 25 bp, Homo sapien
tagggggagaatccaggtcaccctc

SEQ ID NO: 395096 - DNA, 25 bp, Homo sapien
tggccaggaacgacttgtccctcgt

SEQ ID NO: 395097 - DNA, 25 bp, Homo sapien
ccatggccaggaacgacttgtccct

SEQ ID NO: 395098 - DNA, 25 bp, Homo sapien
accatggccaggaacgacttgtccc

SEQ ID NO: 395099 - DNA, 25 bp, Homo sapien
caggaacgacttgtccctcgtataa

SEQ ID NO: 395100 - DNA, 25 bp, Homo sapien
ctagcccagcggacttcagcaggcc

SEQ ID NO: 395101 - DNA, 25 bp, Homo sapien
tctagcccagcggacttcagcaggc

SEQ ID NO: 395102 - DNA, 25 bp, Homo sapien
ttctagcccagcggacttcagcagg

SEQ ID NO: 395103 - DNA, 25 bp, Homo sapien
cagatagcgggatcgtgtaacagtc

SEQ ID NO: 395104 - DNA, 25 bp, Homo sapien
caattcaggagcattcaggacattc

SEQ ID NO: 395105 - DNA, 25 bp, Homo sapien
tcaagcgccatccacattgcagagt

SEQ ID NO: 395106 - DNA, 25 bp, Homo sapien
taggccctggtaacgtctagtctgc

SEQ ID NO: 395107 - DNA, 25 bp, Homo sapien
agcaaaggctacagctgacgagtaa

SEQ ID NO: 395108 - DNA, 25 bp, Homo sapien
aacctcgatcttccaggctcgggcg

SEQ ID NO: 395109 - DNA, 25 bp, Homo sapien
aggctacagctgacgagtaagaaac

SEQ ID NO: 395110 - DNA, 25 bp, Homo sapien
tacagctgacgagtaagaaaccctc

SEQ ID NO: 395111 - DNA, 25 bp, Homo sapien
ttgtcacccaagactggatcacaca

SEQ ID NO: 395112 - DNA, 25 bp, Homo sapien
gtcccacttgtcacccaagactgga

SEQ ID NO: 395113 - DNA, 25 bp, Homo sapien
ccacttgtcacccaagactggatca

SEQ ID NO: 395114 - DNA, 25 bp, Homo sapien
gccgtcccacttgtcacccaagact

SEQ ID NO: 395115 - DNA, 25 bp, Homo sapien
agttagacacttagagatgtgggcc

SEQ ID NO: 395116 - DNA, 25 bp, Homo sapien
ctggctggacaggaatagctccact

SEQ ID NO: 395117 - DNA, 25 bp, Homo sapien
tgtctttttacccctggacagagga

SEQ ID NO: 395118 - DNA, 25 bp, Homo sapien
tggacagaggagtcccaccgagtta

SEQ ID NO: 395119 - DNA, 25 bp, Homo sapien
tactacacagctcatgggttaagtg

SEQ ID NO: 395120 - DNA, 25 bp, Homo sapien
ggcttctggactggtcacagtggat

SEQ ID NO: 395121 - DNA, 25 bp, Homo sapien
cgcctctaaattctaggcttctgga

SEQ ID NO: 395122 - DNA, 25 bp, Homo sapien
gatccgacgtccaggtctgtgggct

SEQ ID NO: 395123 - DNA, 25 bp, Homo sapien
cagatactgaaatcgcctgggcgct

SEQ ID NO: 395124 - DNA, 25 bp, Homo sapien
gacaggagctcgtgtttaggccact

SEQ ID NO: 395125 - DNA, 25 bp, Homo sapien
gagaagcccgctgtgctcagtgaat

SEQ ID NO: 395126 - DNA, 25 bp, Homo sapien
caaacgcaagtgtctgccgagggtc

SEQ ID NO: 395127 - DNA, 25 bp, Homo sapien
gaccaggaaatcgaaggaaagctct

SEQ ID NO: 395128 - DNA, 25 bp, Homo sapien
tgtccccgatccctggaccaggaaa

SEQ ID NO: 395129 - DNA, 25 bp, Homo sapien
aagctctttagagccccattttggg

SEQ ID NO: 395130 - DNA, 25 bp, Homo sapien
ggtggcacgtggatgtccccgatcc

SEQ ID NO: 395131 - DNA, 25 bp, Homo sapien
gataatgtctgcaagcggcaccact

SEQ ID NO: 395132 - DNA, 25 bp, Homo sapien
gcaagcggcaccactttttctttgt

SEQ ID NO: 395133 - DNA, 25 bp, Homo sapien
tcggcctcaaactggttgggcgtga

SEQ ID NO: 395134 - DNA, 25 bp, Homo sapien
ctggttgggcgtgataatgtctgca

SEQ ID NO: 395135 - DNA, 25 bp, Homo sapien
gtggatcttccggccactcagtaac

SEQ ID NO: 395136 - DNA, 25 bp, Homo sapien
ctggctgtggatcttccggccactc

SEQ ID NO: 395137 - DNA, 25 bp, Homo sapien
tggctgtggatcttccggccactca

SEQ ID NO: 395138 - DNA, 25 bp, Homo sapien
gctgtggatcttccggccactcagt

SEQ ID NO: 395139 - DNA, 25 bp, Homo sapien
caggtcggagctggtgatgaccacg

SEQ ID NO: 395140 - DNA, 25 bp, Homo sapien
aatcaggtagttgctgccctgcggg

SEQ ID NO: 395141 - DNA, 25 bp, Homo sapien
cccagcacaatcaggtagttgctgc

SEQ ID NO: 395142 - DNA, 25 bp, Homo sapien
gatgaccacggtgtcggggcccata

SEQ ID NO: 395143 - DNA, 25 bp, Homo sapien
agtgcccacaaagacggcgtccact

SEQ ID NO: 395144 - DNA, 25 bp, Homo sapien
tccggatgcgttccatcaccacgga

SEQ ID NO: 395145 - DNA, 25 bp, Homo sapien
ggtgcttgtgtgtccacgccaggag

SEQ ID NO: 395146 - DNA, 25 bp, Homo sapien
tttgcgaatgtccatccggatgcgt

SEQ ID NO: 395147 - DNA, 25 bp, Homo sapien
gggaggacagacttgctgtgcccct

SEQ ID NO: 395148 - DNA, 25 bp, Homo sapien
cggagagcccggagggctgagcaga

SEQ ID NO: 395149 - DNA, 25 bp, Homo sapien
tggaggacaggctgcggactgccca

SEQ ID NO: 395150 - DNA, 25 bp, Homo sapien
cggctccgccaatgcacgtgctgaa

SEQ ID NO: 395151 - DNA, 25 bp, Homo sapien
cagaacgtggtgcaaggtagacacg

SEQ ID NO: 395152 - DNA, 25 bp, Homo sapien
ttgcacactggatggtcctctgcag

SEQ ID NO: 395153 - DNA, 25 bp, Homo sapien
tggtcctctgcagaacgtggtgcaa

SEQ ID NO: 395154 - DNA, 25 bp, Homo sapien
ggtgcaaggtagacacggtcttctc

SEQ ID NO: 395155 - DNA, 25 bp, Homo sapien
tctgggtcctcgatgtcccttttgc

SEQ ID NO: 395156 - DNA, 25 bp, Homo sapien
ctgggcctcactccttccccggcct

SEQ ID NO: 395157 - DNA, 25 bp, Homo sapien
gcaccgtggcctggacgacgatctc

SEQ ID NO: 395158 - DNA, 25 bp, Homo sapien
tggacgacgatctctgggtcctcga

SEQ ID NO: 395159 - DNA, 25 bp, Homo sapien
cagatgccggacactcatgaaagaa

SEQ ID NO: 395160 - DNA, 25 bp, Homo sapien
caaagcacgactggcacgtttcaca

SEQ ID NO: 395161 - DNA, 25 bp, Homo sapien
caagtttcggtcatggctctaaggc

SEQ ID NO: 395162 - DNA, 25 bp, Homo sapien
gaagggagccgggttttcagatcac

SEQ ID NO: 395163 - DNA, 25 bp, Homo sapien
cccgagatggcaaacaggggcccgt

SEQ ID NO: 395164 - DNA, 25 bp, Homo sapien
acagggaacacccccgagatggcaa

SEQ ID NO: 395165 - DNA, 25 bp, Homo sapien
agatggcaaacaggggcccgtcttc

SEQ ID NO: 395166 - DNA, 25 bp, Homo sapien
aacacccccgagatggcaaacaggg

SEQ ID NO: 395167 - DNA, 25 bp, Homo sapien
tgccgatgggttacaagaggtcccg

SEQ ID NO: 395168 - DNA, 25 bp, Homo sapien
caaagaggctatggtcagaatgaca

SEQ ID NO: 395169 - DNA, 25 bp, Homo sapien
aaatccccagggactaaacgagcag

SEQ ID NO: 395170 - DNA, 25 bp, Homo sapien
ggaaacatggctgcgaaacccgtgt

SEQ ID NO: 395171 - DNA, 25 bp, Homo sapien
tggaaacgggccgtggacagggcag

SEQ ID NO: 395172 - DNA, 25 bp, Homo sapien
ccagctgctccgtggtttgacagca

SEQ ID NO: 395173 - DNA, 25 bp, Homo sapien
gcctctgccgaagtcaggagagacg

SEQ ID NO: 395174 - DNA, 25 bp, Homo sapien
agagacgaacatgcccgggtggaaa

SEQ ID NO: 395175 - DNA, 25 bp, Homo sapien
tactcatcagcgtggctaagccaag

SEQ ID NO: 395176 - DNA, 25 bp, Homo sapien
gaattcatccttacggtctacaggg

SEQ ID NO: 395177 - DNA, 25 bp, Homo sapien
taaccttggcaggactaggcaacaa

SEQ ID NO: 395178 - DNA, 25 bp, Homo sapien
taagcaggcgatgttggaccagtat

SEQ ID NO: 395179 - DNA, 25 bp, Homo sapien
agacttccgggcagtggacttggcc

SEQ ID NO: 395180 - DNA, 25 bp, Homo sapien
taccacctaacagagacgagtcgca

SEQ ID NO: 395181 - DNA, 25 bp, Homo sapien
catctgagtgctcggtggacggaca

SEQ ID NO: 395182 - DNA, 25 bp, Homo sapien
aaattccaagattccgccgggtgca

SEQ ID NO: 395183 - DNA, 25 bp, Homo sapien
caggagacacacatgcgacagaaag

SEQ ID NO: 395184 - DNA, 25 bp, Homo sapien
caaactgcagagtcgacaggagaca

SEQ ID NO: 395185 - DNA, 25 bp, Homo sapien
gcaggaacgtggttttagacgccga

SEQ ID NO: 395186 - DNA, 25 bp, Homo sapien
tagacgccgattgaaaaccagtgtc

SEQ ID NO: 395187 - DNA, 25 bp, Homo sapien
tgtttattctgccagaatcgaaaga

SEQ ID NO: 395188 - DNA, 25 bp, Homo sapien
cctgtttattctgccagaatcgaaa

SEQ ID NO: 395189 - DNA, 25 bp, Homo sapien
acatttttaagatattgaccagtca

SEQ ID NO: 395190 - DNA, 25 bp, Homo sapien
catctaaacttactcattaaactgt

SEQ ID NO: 395191 - DNA, 25 bp, Homo sapien
ggacagggtcctgcttggctcagac

SEQ ID NO: 395192 - DNA, 25 bp, Homo sapien
cagggtcctgcttggctcagacagt

SEQ ID NO: 395193 - DNA, 25 bp, Homo sapien
gtcctgcttggctcagacagtggga

SEQ ID NO: 395194 - DNA, 25 bp, Homo sapien
ctcttgctctgggacagggtcctgc

SEQ ID NO: 395195 - DNA, 25 bp, Homo sapien
gaaatggccccgcagtatactggtg

SEQ ID NO: 395196 - DNA, 25 bp, Homo sapien
cccaccagaaatgggtttcctgttg

SEQ ID NO: 395197 - DNA, 25 bp, Homo sapien
ccatcaaagcttgtcccaggcaagg

SEQ ID NO: 395198 - DNA, 25 bp, Homo sapien
ggtgagtggccctgtggcactggaa

SEQ ID NO: 395199 - DNA, 25 bp, Homo sapien
ccttcacggagatgctggcttcgca

SEQ ID NO: 395200 - DNA, 25 bp, Homo sapien
tatgacggctcgagcttgacacagg

SEQ ID NO: 395201 - DNA, 25 bp, Homo sapien
gaaagtcactcgagggcttcagagc

SEQ ID NO: 395202 - DNA, 25 bp, Homo sapien
gctcaaaatgaggacaaaggcgctt

SEQ ID NO: 395203 - DNA, 25 bp, Homo sapien
tacacagtgctgtaggaccgaggct

SEQ ID NO: 395204 - DNA, 25 bp, Homo sapien
taaatcaggaatgacgcagccatga

SEQ ID NO: 395205 - DNA, 25 bp, Homo sapien
tgcaatcactagatgaagctccggt

SEQ ID NO: 395206 - DNA, 25 bp, Homo sapien
tttgatgcctccgaagagctgagct

SEQ ID NO: 395207 - DNA, 25 bp, Homo sapien
ctataggcgtgagcccccactccag

SEQ ID NO: 395208 - DNA, 25 bp, Homo sapien
cgtgagcccccactccaggcctggg

SEQ ID NO: 395209 - DNA, 25 bp, Homo sapien
ataggcgtgagcccccactccaggc

SEQ ID NO: 395210 - DNA, 25 bp, Homo sapien
ggcgtgagcccccactccaggcctg

SEQ ID NO: 395211 - DNA, 25 bp, Homo sapien
agccggctccgatctccacggtgat

SEQ ID NO: 395212 - DNA, 25 bp, Homo sapien
gagacattgggctccgctgaataca

SEQ ID NO: 395213 - DNA, 25 bp, Homo sapien
cacggtgatccgatagcaagcgggt

SEQ ID NO: 395214 - DNA, 25 bp, Homo sapien
tgggaattgatagcccggagcaggg

SEQ ID NO: 395215 - DNA, 25 bp, Homo sapien
gccaccgccgagacccagcacatcg

SEQ ID NO: 395216 - DNA, 25 bp, Homo sapien
cagcacatcgccgaccaggtgggtg

SEQ ID NO: 395217 - DNA, 25 bp, Homo sapien
gccgagtcccctcgccagattccct

SEQ ID NO: 395218 - DNA, 25 bp, Homo sapien
ccaagatgatgtgcggggcgccctc

SEQ ID NO: 395219 - DNA, 25 bp, Homo sapien
aatgggtatttcacgcgcacagtgg

SEQ ID NO: 395220 - DNA, 25 bp, Homo sapien
ctcacacagtgggtatgtcgcgcgc

SEQ ID NO: 395221 - DNA, 25 bp, Homo sapien
cacagtgggtatgtcgcactcacac

SEQ ID NO: 395222 - DNA, 25 bp, Homo sapien
acacagcgggcatgtcaggtgcaca

SEQ ID NO: 395223 - DNA, 25 bp, Homo sapien
tgcgcacagtgggtgtgtcgcacgc

SEQ ID NO: 395224 - DNA, 25 bp, Homo sapien
atgcgcacagtgggtgtgtcgcacg

SEQ ID NO: 395225 - DNA, 25 bp, Homo sapien
gcacgcacagtgggtatgtcgcaca

SEQ ID NO: 395226 - DNA, 25 bp, Homo sapien
cacagtgggtatgtcgcacacacac

SEQ ID NO: 395227 - DNA, 25 bp, Homo sapien
cagcacactgagcacgcgcctcctg

SEQ ID NO: 395228 - DNA, 25 bp, Homo sapien
ctgtcccggagtcgcctggtaccca

SEQ ID NO: 395229 - DNA, 25 bp, Homo sapien
tcccggagtcgcctggtacccagca

SEQ ID NO: 395230 - DNA, 25 bp, Homo sapien
tgctcattccccgccaggcgctgag

SEQ ID NO: 395231 - DNA, 25 bp, Homo sapien
ccggtcccgggtcacctgctcattc

SEQ ID NO: 395232 - DNA, 25 bp, Homo sapien
tcccgggtcacctgctcattccccg

SEQ ID NO: 395233 - DNA, 25 bp, Homo sapien
ggtcacctgctcattccccgccagg

SEQ ID NO: 395234 - DNA, 25 bp, Homo sapien
cctggcgacgatgtatttccggagc

SEQ ID NO: 395235 - DNA, 25 bp, Homo sapien
gacgatgtatttccggagcttcctc

SEQ ID NO: 395236 - DNA, 25 bp, Homo sapien
ctgagtcctggcgacgatgtatttc

SEQ ID NO: 395237 - DNA, 25 bp, Homo sapien
gcgacgatgtatttccggagcttcc

SEQ ID NO: 395238 - DNA, 25 bp, Homo sapien
ctaagctggacagtggccacaaggt

SEQ ID NO: 395239 - DNA, 25 bp, Homo sapien
ttcctaagctggacagtggccacaa

SEQ ID NO: 395240 - DNA, 25 bp, Homo sapien
tcctaagctggacagtggccacaag

SEQ ID NO: 395241 - DNA, 25 bp, Homo sapien
aagctggacagtggccacaaggtta

SEQ ID NO: 395242 - DNA, 25 bp, Homo sapien
cagcaacggttggaccaaatgaatc

SEQ ID NO: 395243 - DNA, 25 bp, Homo sapien
aacagcaacggttggaccaaatgaa

SEQ ID NO: 395244 - DNA, 25 bp, Homo sapien
caacggttggaccaaatgaatccca

SEQ ID NO: 395245 - DNA, 25 bp, Homo sapien
tcaaaacagcaacggttggaccaaa

SEQ ID NO: 395246 - DNA, 25 bp, Homo sapien
agcagctcgtcgtgcgtaaaaccac

SEQ ID NO: 395247 - DNA, 25 bp, Homo sapien
ccacatgcaataaaacagtcctttc

SEQ ID NO: 395248 - DNA, 25 bp, Homo sapien
cacatgcaataaaacagtcctttcc

SEQ ID NO: 395249 - DNA, 25 bp, Homo sapien
acaccttcagcagctcgtcgtgcgt

SEQ ID NO: 395250 - DNA, 25 bp, Homo sapien
ctgaaaagcatgaacgagctgggaa

SEQ ID NO: 395251 - DNA, 25 bp, Homo sapien
gcgcctccgtggtctgaaaagcatg

SEQ ID NO: 395252 - DNA, 25 bp, Homo sapien
aaagcatgaacgagctgggaaatag

SEQ ID NO: 395253 - DNA, 25 bp, Homo sapien
gaacgagctgggaaatagtccttcc

SEQ ID NO: 395254 - DNA, 25 bp, Homo sapien
tcaggaccatcaggcggaattcagt

SEQ ID NO: 395255 - DNA, 25 bp, Homo sapien
tcaagtgagtcctacagacaggcag

SEQ ID NO: 395256 - DNA, 25 bp, Homo sapien
ggtaagaacttctcaactccggtca

SEQ ID NO: 395257 - DNA, 25 bp, Homo sapien
agagaaccactgaggagcacgaagc

SEQ ID NO: 395258 - DNA, 25 bp, Homo sapien
gccagaaggcctgaaggaacaggtg

SEQ ID NO: 395259 - DNA, 25 bp, Homo sapien
cagaaggcctgaaggaacaggtgct

SEQ ID NO: 395260 - DNA, 25 bp, Homo sapien
ggtctgccagaaggcctgaaggaac

SEQ ID NO: 395261 - DNA, 25 bp, Homo sapien
tctgccagaaggcctgaaggaacag

SEQ ID NO: 395262 - DNA, 25 bp, Homo sapien
tagaatttatccaggcgcagcctgt

SEQ ID NO: 395263 - DNA, 25 bp, Homo sapien
caatgcccgtccactcgcgattcat

SEQ ID NO: 395264 - DNA, 25 bp, Homo sapien
catgtagaatttatccaggcgcagc

SEQ ID NO: 395265 - DNA, 25 bp, Homo sapien
tatccaggcgcagcctgtcaatgcc

SEQ ID NO: 395266 - DNA, 25 bp, Homo sapien
gaaccttcaaggactcgttcaggac

SEQ ID NO: 395267 - DNA, 25 bp, Homo sapien
ttcagaaccttcaaggactcgttca

SEQ ID NO: 395268 - DNA, 25 bp, Homo sapien
cttcaaggactcgttcaggaccatc

SEQ ID NO: 395269 - DNA, 25 bp, Homo sapien
aaggactcgttcaggaccatccgca

SEQ ID NO: 395270 - DNA, 25 bp, Homo sapien
aggcagcctcgatgagccccaagac

SEQ ID NO: 395271 - DNA, 25 bp, Homo sapien
caggcagcctcgatgagccccaaga

SEQ ID NO: 395272 - DNA, 25 bp, Homo sapien
acaggcagcctcgatgagccccaag

SEQ ID NO: 395273 - DNA, 25 bp, Homo sapien
gacaggcagcctcgatgagccccaa

SEQ ID NO: 395274 - DNA, 25 bp, Homo sapien
caggaagatctcgatgaagtggctc

SEQ ID NO: 395275 - DNA, 25 bp, Homo sapien
aagtggctcttcacaccgttggggg

SEQ ID NO: 395276 - DNA, 25 bp, Homo sapien
tcggcgcccactttggtcagctcct

SEQ ID NO: 395277 - DNA, 25 bp, Homo sapien
tcttcacaccgttgggggcctggct

SEQ ID NO: 395278 - DNA, 25 bp, Homo sapien
tctgcagaaggggtcgatgaacttc

SEQ ID NO: 395279 - DNA, 25 bp, Homo sapien
attctgcagaaggggtcgatgaact

SEQ ID NO: 395280 - DNA, 25 bp, Homo sapien
cagaaggggtcgatgaacttcaggt

SEQ ID NO: 395281 - DNA, 25 bp, Homo sapien
gaaggggtcgatgaacttcaggttc

SEQ ID NO: 395282 - DNA, 25 bp, Homo sapien
tgcctcgagtgatgttgttcaaaac

SEQ ID NO: 395283 - DNA, 25 bp, Homo sapien
tcttcaatggcaagcggggcctgct

SEQ ID NO: 395284 - DNA, 25 bp, Homo sapien
tcagaggactcatcactgtccgacg

SEQ ID NO: 395285 - DNA, 25 bp, Homo sapien
caatcgtctcaaagatgcctcgagt

SEQ ID NO: 395286 - DNA, 25 bp, Homo sapien
ctgcgggcggcttctcagacctctt

SEQ ID NO: 395287 - DNA, 25 bp, Homo sapien
tgcgggcggcttctcagacctcttc

SEQ ID NO: 395288 - DNA, 25 bp, Homo sapien
aaacatccaggaatggagagcccgc

SEQ ID NO: 395289 - DNA, 25 bp, Homo sapien
gtgcccaacgtgtgctggccccaaa

SEQ ID NO: 395290 - DNA, 25 bp, Homo sapien
tccgtgcaccctggtcggagcacgg

SEQ ID NO: 395291 - DNA, 25 bp, Homo sapien
agcacgggcacaggcgggaaacacc

SEQ ID NO: 395292 - DNA, 25 bp, Homo sapien
ggccgccactgtccctgtcgtcacc

SEQ ID NO: 395293 - DNA, 25 bp, Homo sapien
tggagaacggggccgccactgtccc

SEQ ID NO: 395294 - DNA, 25 bp, Homo sapien
ctggagaacggggccgccactgtcc

SEQ ID NO: 395295 - DNA, 25 bp, Homo sapien
ttgtagagacgctttctgttctgag

SEQ ID NO: 395296 - DNA, 25 bp, Homo sapien
ctgttagcaactgcctcgtagtcaa

SEQ ID NO: 395297 - DNA, 25 bp, Homo sapien
tggcggctggccatttcaaacagtc

SEQ ID NO: 395298 - DNA, 25 bp, Homo sapien
tcaaacagtctgttagcaactgcct

SEQ ID NO: 395299 - DNA, 25 bp, Homo sapien
tggtgccattgtcagtgcccggccg

SEQ ID NO: 395300 - DNA, 25 bp, Homo sapien
attgtcagtgcccggccgatcctca

SEQ ID NO: 395301 - DNA, 25 bp, Homo sapien
tgccattgtcagtgcccggccgatc

SEQ ID NO: 395302 - DNA, 25 bp, Homo sapien
caaggtggtgccattgtcagtgccc

SEQ ID NO: 395303 - DNA, 25 bp, Homo sapien
tccttccgataacctatgccagttc

SEQ ID NO: 395304 - DNA, 25 bp, Homo sapien
catcgacgcccactaggaaaccgtc

SEQ ID NO: 395305 - DNA, 25 bp, Homo sapien
cttccgataacctatgccagttcca

SEQ ID NO: 395306 - DNA, 25 bp, Homo sapien
tccgataacctatgccagttccatc

SEQ ID NO: 395307 - DNA, 25 bp, Homo sapien
tcttcgtcttcttctgccgcctccc

SEQ ID NO: 395308 - DNA, 25 bp, Homo sapien
gcctcccttcaagcaggcgcctgca

SEQ ID NO: 395309 - DNA, 25 bp, Homo sapien
tcaagcaggcgcctgcaggccttct

SEQ ID NO: 395310 - DNA, 25 bp, Homo sapien
caggcgcctgcaggccttctctggg

SEQ ID NO: 395311 - DNA, 25 bp, Homo sapien
catgggaaatgagatggacggcttc

SEQ ID NO: 395312 - DNA, 25 bp, Homo sapien
cagacgcatcccgtgtccagtgtgg

SEQ ID NO: 395313 - DNA, 25 bp, Homo sapien
gccggctacaaagaggaggccactg

SEQ ID NO: 395314 - DNA, 25 bp, Homo sapien
ttcaatggcacggagctctgggcaa

SEQ ID NO: 395315 - DNA, 25 bp, Homo sapien
gacattggccgcctttgctcgggca

SEQ ID NO: 395316 - DNA, 25 bp, Homo sapien
tcctggacattggccgcctttgctc

SEQ ID NO: 395317 - DNA, 25 bp, Homo sapien
tcaggggccgaggtgtcctccttct

SEQ ID NO: 395318 - DNA, 25 bp, Homo sapien
gccgcctttgctcgggcactggtca

SEQ ID NO: 395319 - DNA, 25 bp, Homo sapien
cagtcttcggagtttgaccttctgg

SEQ ID NO: 395320 - DNA, 25 bp, Homo sapien
ccagttcctgggatgctggccccta

SEQ ID NO: 395321 - DNA, 25 bp, Homo sapien
aggagttctggagccacggtcctga

SEQ ID NO: 395322 - DNA, 25 bp, Homo sapien
tcctgagtctacagaacagcccggt

SEQ ID NO: 395323 - DNA, 25 bp, Homo sapien
caagggctgcgcggcattttatttt

SEQ ID NO: 395324 - DNA, 25 bp, Homo sapien
aagggctgcgcggcattttattttc

SEQ ID NO: 395325 - DNA, 25 bp, Homo sapien
gggctgcgcggcattttattttctg

SEQ ID NO: 395326 - DNA, 25 bp, Homo sapien
agggctgcgcggcattttattttct

SEQ ID NO: 395327 - DNA, 25 bp, Homo sapien
caagaaagcgttataatgcaccccg

SEQ ID NO: 395328 - DNA, 25 bp, Homo sapien
taggacacacctgaagcgacacttc

SEQ ID NO: 395329 - DNA, 25 bp, Homo sapien
tgaatataaaccaccacactgctcg

SEQ ID NO: 395330 - DNA, 25 bp, Homo sapien
tcgccaccggcagtttacgttagac

SEQ ID NO: 395331 - DNA, 25 bp, Homo sapien
gcactgtctgtaccgtgggatgtca

SEQ ID NO: 395332 - DNA, 25 bp, Homo sapien
ccgactagacatggtgagcccaaaa

SEQ ID NO: 395333 - DNA, 25 bp, Homo sapien
tacacagcagcgtgactcaagacgg

SEQ ID NO: 395334 - DNA, 25 bp, Homo sapien
gacaaacgggcagatgcaatgcact

SEQ ID NO: 395335 - DNA, 25 bp, Homo sapien
gttctcttcacggtagaagagtcca

SEQ ID NO: 395336 - DNA, 25 bp, Homo sapien
ttcacggtagaagagtccatttggg

SEQ ID NO: 395337 - DNA, 25 bp, Homo sapien
gcggcgctggccattgccgttctct

SEQ ID NO: 395338 - DNA, 25 bp, Homo sapien
ggccattgccgttctcttcacggta

SEQ ID NO: 395339 - DNA, 25 bp, Homo sapien
actcgcccaaacagatcctgggtca

SEQ ID NO: 395340 - DNA, 25 bp, Homo sapien
agaagctccactcagggagagaacg

SEQ ID NO: 395341 - DNA, 25 bp, Homo sapien
agggagagaacgaggcactcgccca

SEQ ID NO: 395342 - DNA, 25 bp, Homo sapien
gaacgaggcactcgcccaaacagat

SEQ ID NO: 395343 - DNA, 25 bp, Homo sapien
acagggtagggatagtgccaggagg

SEQ ID NO: 395344 - DNA, 25 bp, Homo sapien
agggtccatcccaggccgtggtaca

SEQ ID NO: 395345 - DNA, 25 bp, Homo sapien
ggtagggatagtgccaggagggcca

SEQ ID NO: 395346 - DNA, 25 bp, Homo sapien
cccaggccgtggtacacaggtagag

SEQ ID NO: 395347 - DNA, 25 bp, Homo sapien
ggagctgcccattgcgctgcccctg

SEQ ID NO: 395348 - DNA, 25 bp, Homo sapien
tcactctccgccaaatcacccagag

SEQ ID NO: 395349 - DNA, 25 bp, Homo sapien
cgccaaatcacccagagcagttttc

SEQ ID NO: 395350 - DNA, 25 bp, Homo sapien
cagcgttttcgaatcctctcactct

SEQ ID NO: 395351 - DNA, 25 bp, Homo sapien
cccagtagctcctgtgtccgttcac

SEQ ID NO: 395352 - DNA, 25 bp, Homo sapien
ccccagtagctcctgtgtccgttca

SEQ ID NO: 395353 - DNA, 25 bp, Homo sapien
ccagtagctcctgtgtccgttcacc

SEQ ID NO: 395354 - DNA, 25 bp, Homo sapien
gacagagactgagaccttggccatg

SEQ ID NO: 395355 - DNA, 25 bp, Homo sapien
cagatgctgctagcgtgcactggca

SEQ ID NO: 395356 - DNA, 25 bp, Homo sapien
atggagctgccgcacaaggaacaca

SEQ ID NO: 395357 - DNA, 25 bp, Homo sapien
tctccaggacacagccgtcctcgga

SEQ ID NO: 395358 - DNA, 25 bp, Homo sapien
caccaagcataaagcctcaggcttg

SEQ ID NO: 395359 - DNA, 25 bp, Homo sapien
tgcctgtgtggacttgtgtatgagt

SEQ ID NO: 395360 - DNA, 25 bp, Homo sapien
acattcccgaagctgcagcactgct

SEQ ID NO: 395361 - DNA, 25 bp, Homo sapien
caggcttggagatcacaggaagtgc

SEQ ID NO: 395362 - DNA, 25 bp, Homo sapien
ggccagtaattatcctttcttgtaa

SEQ ID NO: 395363 - DNA, 25 bp, Homo sapien
ctcctttaactggtgagactggtgc

SEQ ID NO: 395364 - DNA, 25 bp, Homo sapien
tgaaccagcggatacaggcacatgt

SEQ ID NO: 395365 - DNA, 25 bp, Homo sapien
tcctgggacaaaatccattacttga

SEQ ID NO: 395366 - DNA, 25 bp, Homo sapien
ccggactcgatccaggggcctctcc

SEQ ID NO: 395367 - DNA, 25 bp, Homo sapien
cggactcgatccaggggcctctccc

SEQ ID NO: 395368 - DNA, 25 bp, Homo sapien
ggcctctccccattgggcacggcgc

SEQ ID NO: 395369 - DNA, 25 bp, Homo sapien
aggggcctctccccattgggcacgg

SEQ ID NO: 395370 - DNA, 25 bp, Homo sapien
gagtcgttcttgaaaggtgctccag

SEQ ID NO: 395371 - DNA, 25 bp, Homo sapien
tgggccacagcttgctccgaatgag

SEQ ID NO: 395372 - DNA, 25 bp, Homo sapien
acgttgcggtatgagaaggacctgc

SEQ ID NO: 395373 - DNA, 25 bp, Homo sapien
tcccactgcaaatatccggctttgg

SEQ ID NO: 395374 - DNA, 25 bp, Homo sapien
gggggcctcattggacaacttgccc

SEQ ID NO: 395375 - DNA, 25 bp, Homo sapien
ggggcctcattggacaacttgccca

SEQ ID NO: 395376 - DNA, 25 bp, Homo sapien
tgtatcgacacttgaccgtggcggg

SEQ ID NO: 395377 - DNA, 25 bp, Homo sapien
cccggctggcaacactgtatcgaca

SEQ ID NO: 395378 - DNA, 25 bp, Homo sapien
tgccgcgcccttggacttattcata

SEQ ID NO: 395379 - DNA, 25 bp, Homo sapien
attcatagttggcacccggctggca

SEQ ID NO: 395380 - DNA, 25 bp, Homo sapien
ccgccgcgctcctcggccctgggcc

SEQ ID NO: 395381 - DNA, 25 bp, Homo sapien
cacctgctcgtcgcgcgggcgtccc

SEQ ID NO: 395382 - DNA, 25 bp, Homo sapien
acctgctcgtcgcgcgggcgtcccc

SEQ ID NO: 395383 - DNA, 25 bp, Homo sapien
ccacctgctcgtcgcgcgggcgtcc

SEQ ID NO: 395384 - DNA, 25 bp, Homo sapien
gatacaagaagcgagttgtaacagg

SEQ ID NO: 395385 - DNA, 25 bp, Homo sapien
cagaaatggatacaagaagcgagtt

SEQ ID NO: 395386 - DNA, 25 bp, Homo sapien
agcgagttgtaacaggcacaggcta

SEQ ID NO: 395387 - DNA, 25 bp, Homo sapien
caagaagcgagttgtaacaggcaca

SEQ ID NO: 395388 - DNA, 25 bp, Homo sapien
cctcaagaagatacttaagactaac

SEQ ID NO: 395389 - DNA, 25 bp, Homo sapien
aatgtcaatggcatgcagctgcttt

SEQ ID NO: 395390 - DNA, 25 bp, Homo sapien
cagaatatttaaggcccctacacct

SEQ ID NO: 395391 - DNA, 25 bp, Homo sapien
gctgctttttagacaatgtcctcaa

SEQ ID NO: 395392 - DNA, 25 bp, Homo sapien
tcaaagtgcggaggggatgggaggc

SEQ ID NO: 395393 - DNA, 25 bp, Homo sapien
ggtcaaagtgcggaggggatgggag

SEQ ID NO: 395394 - DNA, 25 bp, Homo sapien
ggaggcaggtgtatcagtcacgtgt

SEQ ID NO: 395395 - DNA, 25 bp, Homo sapien
cttgtttacgaggtcaaagtgcgga

SEQ ID NO: 395396 - DNA, 25 bp, Homo sapien
gatgtaagcctaaaggcggccctgc

SEQ ID NO: 395397 - DNA, 25 bp, Homo sapien
tctgatttgaccagggatagcatcc

SEQ ID NO: 395398 - DNA, 25 bp, Homo sapien
agcatccgtggactttcagcacccg

SEQ ID NO: 395399 - DNA, 25 bp, Homo sapien
cacaacctcgggcaagtaactcaag

SEQ ID NO: 395400 - DNA, 25 bp, Homo sapien
gaagattgatgaacagggtaaatgt

SEQ ID NO: 395401 - DNA, 25 bp, Homo sapien
gtgattgggcaagttaaggacaccc

SEQ ID NO: 395402 - DNA, 25 bp, Homo sapien
aacagggtaaatgtgattgggcaag

SEQ ID NO: 395403 - DNA, 25 bp, Homo sapien
tgattgggcaagttaaggacacccc

SEQ ID NO: 395404 - DNA, 25 bp, Homo sapien
cagtgccaagcactaggggctctgc

SEQ ID NO: 395405 - DNA, 25 bp, Homo sapien
caacgggcctgcactggctcttcag

SEQ ID NO: 395406 - DNA, 25 bp, Homo sapien
tgatggtgacaacgggcctgcactg

SEQ ID NO: 395407 - DNA, 25 bp, Homo sapien
tctgcaatgtgagagcctaagcggg

SEQ ID NO: 395408 - DNA, 25 bp, Homo sapien
aacagggacatcacaagagtttttg

SEQ ID NO: 395409 - DNA, 25 bp, Homo sapien
gagagggggggcaaagcgtggaagc

SEQ ID NO: 395410 - DNA, 25 bp, Homo sapien
ggccagagagggggggcaaagcgtg

SEQ ID NO: 395411 - DNA, 25 bp, Homo sapien
aagagtttttgacaaggccagagag

SEQ ID NO: 395412 - DNA, 25 bp, Homo sapien
ccacgctgcgatctagaaacaccag

SEQ ID NO: 395413 - DNA, 25 bp, Homo sapien
caatgagatggagcagctaaagatc

SEQ ID NO: 395414 - DNA, 25 bp, Homo sapien
aatcacgtcccacgctgcgatctag

SEQ ID NO: 395415 - DNA, 25 bp, Homo sapien
tagaaacaccagtccaccggcgata

SEQ ID NO: 395416 - DNA, 25 bp, Homo sapien
cggaagactaaagatggagtcactc

SEQ ID NO: 395417 - DNA, 25 bp, Homo sapien
gaccctgtgaaagaggcctcagtct

SEQ ID NO: 395418 - DNA, 25 bp, Homo sapien
ggagtcactctggtcctatacccac

SEQ ID NO: 395419 - DNA, 25 bp, Homo sapien
tagctggaccctgtcagaatctgtg

SEQ ID NO: 395420 - DNA, 25 bp, Homo sapien
ggcagtctcagtcgaaagcgaggct

SEQ ID NO: 395421 - DNA, 25 bp, Homo sapien
tataactgggaaaacggagcggcat

SEQ ID NO: 395422 - DNA, 25 bp, Homo sapien
ttccaggcaggctaaagtccaaggc

SEQ ID NO: 395423 - DNA, 25 bp, Homo sapien
tgacatccaggtcgaagtcaccagg

SEQ ID NO: 395424 - DNA, 25 bp, Homo sapien
ttaacatattgccacctgtcacgtg

SEQ ID NO: 395425 - DNA, 25 bp, Homo sapien
gaaaagggtagctactgtctctgag

SEQ ID NO: 395426 - DNA, 25 bp, Homo sapien
tgaatctgtcctaccataaatgtga

SEQ ID NO: 395427 - DNA, 25 bp, Homo sapien
tgcccacttaatgccagtgagcagg

SEQ ID NO: 395428 - DNA, 25 bp, Homo sapien
gatgcaaacgccatgtatgttggtt

SEQ ID NO: 395429 - DNA, 25 bp, Homo sapien
tccaggaatgaaacctccgataaca

SEQ ID NO: 395430 - DNA, 25 bp, Homo sapien
ggtttcatagacactggattttcca

SEQ ID NO: 395431 - DNA, 25 bp, Homo sapien
cgggctcacatctgactccaactgt

SEQ ID NO: 395432 - DNA, 25 bp, Homo sapien
ttcttcctccaaatcagcttatata

SEQ ID NO: 395433 - DNA, 25 bp, Homo sapien
agcttatataagaaactggcactgg

SEQ ID NO: 395434 - DNA, 25 bp, Homo sapien
acagagtcatcaaacaacaggccct

SEQ ID NO: 395435 - DNA, 25 bp, Homo sapien
gaccagcctgatttttagtagacca

SEQ ID NO: 395436 - DNA, 25 bp, Homo sapien
gccctgcaagtttccatgccaggca

SEQ ID NO: 395437 - DNA, 25 bp, Homo sapien
tatggcatcacgattgccatgtcgc

SEQ ID NO: 395438 - DNA, 25 bp, Homo sapien
ctttgcaggcttcggcttcctatgg

SEQ ID NO: 395439 - DNA, 25 bp, Homo sapien
ctgcctgtatttggagcccctgacc

SEQ ID NO: 395440 - DNA, 25 bp, Homo sapien
tcgagaacaggccatgatgatgacg

SEQ ID NO: 395441 - DNA, 25 bp, Homo sapien
acaggccatgatgatgacggcggtt

SEQ ID NO: 395442 - DNA, 25 bp, Homo sapien
gagaacaggccatgatgatgacggc

SEQ ID NO: 395443 - DNA, 25 bp, Homo sapien
agaacaggccatgatgatgacggcg

SEQ ID NO: 395444 - DNA, 25 bp, Homo sapien
taagattacagcctctgcccggctg

SEQ ID NO: 395445 - DNA, 25 bp, Homo sapien
cagccgccccctctgggatgggagg

SEQ ID NO: 395446 - DNA, 25 bp, Homo sapien
tgctaagattacagcctctgcccgg

SEQ ID NO: 395447 - DNA, 25 bp, Homo sapien
cccagccgccccctctgggatggga

SEQ ID NO: 395448 - DNA, 25 bp, Homo sapien
tgagcggacctttgtaggacaacct

SEQ ID NO: 395449 - DNA, 25 bp, Homo sapien
gaacttggcactggacgctgggttt

SEQ ID NO: 395450 - DNA, 25 bp, Homo sapien
agggtctcgctatgtggccccagag

SEQ ID NO: 395451 - DNA, 25 bp, Homo sapien
gggagcagtcaacctagaaccagtt

SEQ ID NO: 395452 - DNA, 25 bp, Homo sapien
catgtcaacgtgcttgcgcaggact

SEQ ID NO: 395453 - DNA, 25 bp, Homo sapien
aaggcacacatgtcaacgtgcttgc

SEQ ID NO: 395454 - DNA, 25 bp, Homo sapien
cacacatgtcaacgtgcttgcgcag

SEQ ID NO: 395455 - DNA, 25 bp, Homo sapien
gtcaacgtgcttgcgcaggactgga

SEQ ID NO: 395456 - DNA, 25 bp, Homo sapien
gaacagctgccctcagggcttccgg

SEQ ID NO: 395457 - DNA, 25 bp, Homo sapien
caaggcacaaggtcagcagagccag

SEQ ID NO: 395458 - DNA, 25 bp, Homo sapien
ccctcagggcttccggctggacaag

SEQ ID NO: 395459 - DNA, 25 bp, Homo sapien
gtgggaacagctgccctcagggctt

SEQ ID NO: 395460 - DNA, 25 bp, Homo sapien
gagcgcagctctaggacactttcca

SEQ ID NO: 395461 - DNA, 25 bp, Homo sapien
gcacactcgggttctagtagactga

SEQ ID NO: 395462 - DNA, 25 bp, Homo sapien
tatgaacttatgaacggcaccagac

SEQ ID NO: 395463 - DNA, 25 bp, Homo sapien
caaagtctgccttccagcgaggcgg

SEQ ID NO: 395464 - DNA, 25 bp, Homo sapien
gctgtgtgataagcagcaggtattt

SEQ ID NO: 395465 - DNA, 25 bp, Homo sapien
gaagatggatctgctgttcgtgaaa

SEQ ID NO: 395466 - DNA, 25 bp, Homo sapien
acattttcctggctcggcgcgatgg

SEQ ID NO: 395467 - DNA, 25 bp, Homo sapien
cacaaagctcataaattccttgtaa

SEQ ID NO: 395468 - DNA, 25 bp, Homo sapien
gggaggaagaaatcttgctggatcc

SEQ ID NO: 395469 - DNA, 25 bp, Homo sapien
accaagaggatatgaccaggcccca

SEQ ID NO: 395470 - DNA, 25 bp, Homo sapien
acactcacaaaagaggccaagccag

SEQ ID NO: 395471 - DNA, 25 bp, Homo sapien
tctgcaagccaggacggcagaagca

SEQ ID NO: 395472 - DNA, 25 bp, Homo sapien
tcaggggactggcatatgggagctg

SEQ ID NO: 395473 - DNA, 25 bp, Homo sapien
gggagctggcgtgccgggcacccat

SEQ ID NO: 395474 - DNA, 25 bp, Homo sapien
atatgggagctggtgctcggcaggg

SEQ ID NO: 395475 - DNA, 25 bp, Homo sapien
ccttggggggctggcgtgctcaggg

SEQ ID NO: 395476 - DNA, 25 bp, Homo sapien
aatccaataagcagcttttggccag

SEQ ID NO: 395477 - DNA, 25 bp, Homo sapien
cacagctgcgggctctgccgtcggg

SEQ ID NO: 395478 - DNA, 25 bp, Homo sapien
aggttcgtcctcctgcgcacagctg

SEQ ID NO: 395479 - DNA, 25 bp, Homo sapien
tgccgtcggggcaccggctaatcca

SEQ ID NO: 395480 - DNA, 25 bp, Homo sapien
ttcagccctcggtcctgtgctgcct

SEQ ID NO: 395481 - DNA, 25 bp, Homo sapien
gctgcctgaagccggcgagaaggac

SEQ ID NO: 395482 - DNA, 25 bp, Homo sapien
cttcagccctcggtcctgtgctgcc

SEQ ID NO: 395483 - DNA, 25 bp, Homo sapien
tgtgctgcctgaagccggcgagaag

SEQ ID NO: 395484 - DNA, 25 bp, Homo sapien
cagtagaagtaataggccaaagcca

SEQ ID NO: 395485 - DNA, 25 bp, Homo sapien
gaggcaggccgggtagctgctcagc

SEQ ID NO: 395486 - DNA, 25 bp, Homo sapien
ccacacagatccctgagaagaggca

SEQ ID NO: 395487 - DNA, 25 bp, Homo sapien
ataggccaaagccaccgccagcagg

SEQ ID NO: 395488 - DNA, 25 bp, Homo sapien
agggcaaaggagaaatgcacatcct

SEQ ID NO: 395489 - DNA, 25 bp, Homo sapien
ggagaaatgcacatccttggaaacg

SEQ ID NO: 395490 - DNA, 25 bp, Homo sapien
aaaggagaaatgcacatccttggaa

SEQ ID NO: 395491 - DNA, 25 bp, Homo sapien
tgaagacctgagggcaaaggagaaa

SEQ ID NO: 395492 - DNA, 25 bp, Homo sapien
accacagcagcccagggtgaccgct

SEQ ID NO: 395493 - DNA, 25 bp, Homo sapien
acagcagcccagggtgaccgctgca

SEQ ID NO: 395494 - DNA, 25 bp, Homo sapien
cacagcagcccagggtgaccgctgc

SEQ ID NO: 395495 - DNA, 25 bp, Homo sapien
agcagcccagggtgaccgctgcacc

SEQ ID NO: 395496 - DNA, 25 bp, Homo sapien
gctccagattccaggcacccagggc

SEQ ID NO: 395497 - DNA, 25 bp, Homo sapien
gaggtggagggatgtggaaagctcc

SEQ ID NO: 395498 - DNA, 25 bp, Homo sapien
tgatggtctcactggccggagagtg

SEQ ID NO: 395499 - DNA, 25 bp, Homo sapien
tggagggatgtggaaagctcccagg

SEQ ID NO: 395500 - DNA, 25 bp, Homo sapien
cggagagtggtgatgttgggtggga

SEQ ID NO: 395501 - DNA, 25 bp, Homo sapien
tgaggacagaagaccaacaccgttg

SEQ ID NO: 395502 - DNA, 25 bp, Homo sapien
aggtcccagatccccttagggtctg

SEQ ID NO: 395503 - DNA, 25 bp, Homo sapien
ctgtgggagcgtgaaaccataggcg

SEQ ID NO: 395504 - DNA, 25 bp, Homo sapien
caacaccgttggtagaaggtggaag

SEQ ID NO: 395505 - DNA, 25 bp, Homo sapien
gaggcagtgtctgaaggtgcaggag

SEQ ID NO: 395506 - DNA, 25 bp, Homo sapien
ttccctccctcggtgaggaggcagt

SEQ ID NO: 395507 - DNA, 25 bp, Homo sapien
ggaggcagtgtctgaaggtgcagga

SEQ ID NO: 395508 - DNA, 25 bp, Homo sapien
cctccctcggtgaggaggcagtgtc

SEQ ID NO: 395509 - DNA, 25 bp, Homo sapien
tgacatcacgcatgagggcacaatg

SEQ ID NO: 395510 - DNA, 25 bp, Homo sapien
cagaaacgagcccaggacttgaggc

SEQ ID NO: 395511 - DNA, 25 bp, Homo sapien
ggcgcggttgcaggctctctgacat

SEQ ID NO: 395512 - DNA, 25 bp, Homo sapien
tgcggtgactgtggcccacgctgat

SEQ ID NO: 395513 - DNA, 25 bp, Homo sapien
aaacgcagcgtggacaagtgtgacg

SEQ ID NO: 395514 - DNA, 25 bp, Homo sapien
gaaggcaggcatgccgctgacagca

SEQ ID NO: 395515 - DNA, 25 bp, Homo sapien
ccacagctcattggaagtgcgggct

SEQ ID NO: 395516 - DNA, 25 bp, Homo sapien
tttcgggccctgcattgggtcctcc

SEQ ID NO: 395517 - DNA, 25 bp, Homo sapien
aagctccactgttactgtcagcaga

SEQ ID NO: 395518 - DNA, 25 bp, Homo sapien
gctccactgttactgtcagcagacg

SEQ ID NO: 395519 - DNA, 25 bp, Homo sapien
gcacaggaggggaccacggtgagcc

SEQ ID NO: 395520 - DNA, 25 bp, Homo sapien
ggaaagctccactgttactgtcagc

SEQ ID NO: 395521 - DNA, 25 bp, Homo sapien
gattttgactctgtaaagcatagtg

SEQ ID NO: 395522 - DNA, 25 bp, Homo sapien
gccatcatgatttgacagccaccat

SEQ ID NO: 395523 - DNA, 25 bp, Homo sapien
tagctagtagaacctaaatgccatc

SEQ ID NO: 395524 - DNA, 25 bp, Homo sapien
taagcccaagtttaaatatgcaagg

SEQ ID NO: 395525 - DNA, 25 bp, Homo sapien
ttttgacgtgctccctcgctgaagg

SEQ ID NO: 395526 - DNA, 25 bp, Homo sapien
gagcccaattctaggagcaagtcca

SEQ ID NO: 395527 - DNA, 25 bp, Homo sapien
tcctcaaaggaagtctctgcggcag

SEQ ID NO: 395528 - DNA, 25 bp, Homo sapien
gaaagtctacgcagagactccccgg

SEQ ID NO: 395529 - DNA, 25 bp, Homo sapien
gggtgcacggcccctcgctgaggac

SEQ ID NO: 395530 - DNA, 25 bp, Homo sapien
ggtgcacggcccctcgctgaggaca

SEQ ID NO: 395531 - DNA, 25 bp, Homo sapien
gcacagctggacgaagttgatgacc

SEQ ID NO: 395532 - DNA, 25 bp, Homo sapien
agaccactcaccacgaagacaaagc

SEQ ID NO: 395533 - DNA, 25 bp, Homo sapien
gcaggtgcagcacgaactgggtctt

SEQ ID NO: 395534 - DNA, 25 bp, Homo sapien
aagacaaagccgaccagcaggtgca

SEQ ID NO: 395535 - DNA, 25 bp, Homo sapien
aaggctctccatgatggccgcagag

SEQ ID NO: 395536 - DNA, 25 bp, Homo sapien
gggtgccgcataattagtctccagt

SEQ ID NO: 395537 - DNA, 25 bp, Homo sapien
tgttgtatacttcctttttcgctta

SEQ ID NO: 395538 - DNA, 25 bp, Homo sapien
ctgtacgggcaagatgaaggctctc

SEQ ID NO: 395539 - DNA, 25 bp, Homo sapien
gcctgggcccgatatgaaattcctt

SEQ ID NO: 395540 - DNA, 25 bp, Homo sapien
aaggcagccttcagcggatctcagg

SEQ ID NO: 395541 - DNA, 25 bp, Homo sapien
caaagacatcctgcacgggtgaaca

SEQ ID NO: 395542 - DNA, 25 bp, Homo sapien
catctttgtcacacgtgggcctcag

SEQ ID NO: 395543 - DNA, 25 bp, Homo sapien
agcactccgaagcgctcacacatgg

SEQ ID NO: 395544 - DNA, 25 bp, Homo sapien
caaagcgctctaccgtggcctggtc

SEQ ID NO: 395545 - DNA, 25 bp, Homo sapien
acagtgtacactccgtgcaggacca

SEQ ID NO: 395546 - DNA, 25 bp, Homo sapien
cacagaggaagtcgatctcgaagtt

SEQ ID NO: 395547 - DNA, 25 bp, Homo sapien
cacttccgcttgcagaacacaatct

SEQ ID NO: 395548 - DNA, 25 bp, Homo sapien
ccttcttagcgaggaccttggagct

SEQ ID NO: 395549 - DNA, 25 bp, Homo sapien
aatctccagaaagtaccacgtccag

SEQ ID NO: 395550 - DNA, 25 bp, Homo sapien
gggtagtccgacaggcgcctcagcc

SEQ ID NO: 395551 - DNA, 25 bp, Homo sapien
ttggtctccgtgaagcgcgtcccct

SEQ ID NO: 395552 - DNA, 25 bp, Homo sapien
acctccatgctaacgcggtgcttgg

SEQ ID NO: 395553 - DNA, 25 bp, Homo sapien
cacttgactgcggtggtgaagccct

SEQ ID NO: 395554 - DNA, 25 bp, Homo sapien
gaggacaggaagccccttagcagcc

SEQ ID NO: 395555 - DNA, 25 bp, Homo sapien
agcatagcggtggccccggctcggg

SEQ ID NO: 395556 - DNA, 25 bp, Homo sapien
tgagcatagcggtggccccggctcg

SEQ ID NO: 395557 - DNA, 25 bp, Homo sapien
gagcatagcggtggccccggctcgg

SEQ ID NO: 395558 - DNA, 25 bp, Homo sapien
tcacgcacatgtccgcctcgtactt

SEQ ID NO: 395559 - DNA, 25 bp, Homo sapien
tcttcccgtagaggatccccagcag

SEQ ID NO: 395560 - DNA, 25 bp, Homo sapien
atccccagcagggacgggttcttgt

SEQ ID NO: 395561 - DNA, 25 bp, Homo sapien
tccgcctcgtacttcttcccgtaga

SEQ ID NO: 395562 - DNA, 25 bp, Homo sapien
gagagcaagacgtgcctcaagggct

SEQ ID NO: 395563 - DNA, 25 bp, Homo sapien
ctaaccacccaaggatgagagcaag

SEQ ID NO: 395564 - DNA, 25 bp, Homo sapien
tatgatcgggcaaaataaaggcagc

SEQ ID NO: 395565 - DNA, 25 bp, Homo sapien
caagggctcctctcgtgaagatgac

SEQ ID NO: 395566 - DNA, 25 bp, Homo sapien
tacagtttatgaagccactgagctg

SEQ ID NO: 395567 - DNA, 25 bp, Homo sapien
cagtttatgaagccactgagctgct

SEQ ID NO: 395568 - DNA, 25 bp, Homo sapien
ggtacagtttatgaagccactgagc

SEQ ID NO: 395569 - DNA, 25 bp, Homo sapien
acagtttatgaagccactgagctgc

SEQ ID NO: 395570 - DNA, 25 bp, Homo sapien
cacactgtgtccgtgcaaaggcagg

SEQ ID NO: 395571 - DNA, 25 bp, Homo sapien
tggttctaacgtcccgccttgaatg

SEQ ID NO: 395572 - DNA, 25 bp, Homo sapien
ggtccaattcttagagggtcccagc

SEQ ID NO: 395573 - DNA, 25 bp, Homo sapien
taggcatcacagcacgagacttcag

SEQ ID NO: 395574 - DNA, 25 bp, Homo sapien
gattatatatctcctggagcgcgtc

SEQ ID NO: 395575 - DNA, 25 bp, Homo sapien
gcaggcttaaactgctcccctggaa

SEQ ID NO: 395576 - DNA, 25 bp, Homo sapien
ggaaacatgcccttctgattatata

SEQ ID NO: 395577 - DNA, 25 bp, Homo sapien
ggtccacggcctccgggcaggctta

SEQ ID NO: 395578 - DNA, 25 bp, Homo sapien
atcaggagaggtgatccgctggcaa

SEQ ID NO: 395579 - DNA, 25 bp, Homo sapien
gatccgctggcaaagacgcccaaga

SEQ ID NO: 395580 - DNA, 25 bp, Homo sapien
caaaccccaagaaagtcaggatcag

SEQ ID NO: 395581 - DNA, 25 bp, Homo sapien
cccaagaaagtcaggatcaggagag

SEQ ID NO: 395582 - DNA, 25 bp, Homo sapien
aggtcccggaccctgtggctgatac

SEQ ID NO: 395583 - DNA, 25 bp, Homo sapien
gctgatactgtgaggcccgtcagag

SEQ ID NO: 395584 - DNA, 25 bp, Homo sapien
ctgtgatgagtcaccaggtcccgga

SEQ ID NO: 395585 - DNA, 25 bp, Homo sapien
gagctgttagcgacagtgtccatta

SEQ ID NO: 395586 - DNA, 25 bp, Homo sapien
tgtgtctccacggacagagacccct

SEQ ID NO: 395587 - DNA, 25 bp, Homo sapien
ccggagctcaccacagggacaggct

SEQ ID NO: 395588 - DNA, 25 bp, Homo sapien
ctgatgagtcgtggtgggcctggca

SEQ ID NO: 395589 - DNA, 25 bp, Homo sapien
tgttcggccccaggctagctgatga

SEQ ID NO: 395590 - DNA, 25 bp, Homo sapien
ctgtcagtgagtaggtgtggcccgc

SEQ ID NO: 395591 - DNA, 25 bp, Homo sapien
ctttttgctgtaaaacgtgttactg

SEQ ID NO: 395592 - DNA, 25 bp, Homo sapien
agagaagaggtgagacggatgactt

SEQ ID NO: 395593 - DNA, 25 bp, Homo sapien
tgagacggatgactttgcctttttg

SEQ ID NO: 395594 - DNA, 25 bp, Homo sapien
taaactcttggtttccgtagctgga

SEQ ID NO: 395595 - DNA, 25 bp, Homo sapien
tcttggtttccgtagctggagcctt

SEQ ID NO: 395596 - DNA, 25 bp, Homo sapien
atcagtctgcgaactccaaaggaag

SEQ ID NO: 395597 - DNA, 25 bp, Homo sapien
tttctatctcagttactcctatcag

SEQ ID NO: 395598 - DNA, 25 bp, Homo sapien
tccgacttcgaggaatggacctgac

SEQ ID NO: 395599 - DNA, 25 bp, Homo sapien
ttaactggataccaccgtcagggcc

SEQ ID NO: 395600 - DNA, 25 bp, Homo sapien
cctgacgttcgtgccggtgtgctta

SEQ ID NO: 395601 - DNA, 25 bp, Homo sapien
cacacaaggtcagataggagctagg

SEQ ID NO: 395602 - DNA, 25 bp, Homo sapien
caagttgagcgttctaccactgcca

SEQ ID NO: 395603 - DNA, 25 bp, Homo sapien
tgggctgatggtaccgcaaccaagt

SEQ ID NO: 395604 - DNA, 25 bp, Homo sapien
gatgagggcgctgtgacttagaaca

SEQ ID NO: 395605 - DNA, 25 bp, Homo sapien
caagtcgaaagccaaatgcaggtgg

SEQ ID NO: 395606 - DNA, 25 bp, Homo sapien
ccatggctcagtgcagaatttatac

SEQ ID NO: 395607 - DNA, 25 bp, Homo sapien
acagtgtctgcaagcgtgtctcgca

SEQ ID NO: 395608 - DNA, 25 bp, Homo sapien
tatgtgcatggtcgtacccttcagc

SEQ ID NO: 395609 - DNA, 25 bp, Homo sapien
cacacatggagacggatgagcagcg

SEQ ID NO: 395610 - DNA, 25 bp, Homo sapien
tttattgctcttaaagacttggtgt

SEQ ID NO: 395611 - DNA, 25 bp, Homo sapien
accagatgaggtgtgacccctgcgc

SEQ ID NO: 395612 - DNA, 25 bp, Homo sapien
ttattgctcttaaagacttggtgtt

SEQ ID NO: 395613 - DNA, 25 bp, Homo sapien
aaaccagatgaggtgtgacccctgc

SEQ ID NO: 395614 - DNA, 25 bp, Homo sapien
taaaaaatgtaaaggagctctcctc

SEQ ID NO: 395615 - DNA, 25 bp, Homo sapien
atgtaaaggagctctcctccccttt

SEQ ID NO: 395616 - DNA, 25 bp, Homo sapien
cccttttccttctggatgaaaagca

SEQ ID NO: 395617 - DNA, 25 bp, Homo sapien
ccttttccttctggatgaaaagcaa

SEQ ID NO: 395618 - DNA, 25 bp, Homo sapien
cacctgggcctaagctgggaggcca

SEQ ID NO: 395619 - DNA, 25 bp, Homo sapien
gaatttggacataacatcaactgaa

SEQ ID NO: 395620 - DNA, 25 bp, Homo sapien
aggcctagaatgtgcctcaccccga

SEQ ID NO: 395621 - DNA, 25 bp, Homo sapien
ggcatcagcgatgccaggcctagaa

SEQ ID NO: 395622 - DNA, 25 bp, Homo sapien
tacactgtcgccgagtaccagacaa

SEQ ID NO: 395623 - DNA, 25 bp, Homo sapien
tagggtgcgcgtctggtacactgtc

SEQ ID NO: 395624 - DNA, 25 bp, Homo sapien
accagactgcgcttcctgaggacag

SEQ ID NO: 395625 - DNA, 25 bp, Homo sapien
gaggacagggaccttaaagcacctc

SEQ ID NO: 395626 - DNA, 25 bp, Homo sapien
aaagattctcatgccacggtgcgcg

SEQ ID NO: 395627 - DNA, 25 bp, Homo sapien
gaattaacaagcagccagtggcgag

SEQ ID NO: 395628 - DNA, 25 bp, Homo sapien
tcaaaattcatcgacaggacgtgct

SEQ ID NO: 395629 - DNA, 25 bp, Homo sapien
tgcaagggctagaagcacatcgcgc

SEQ ID NO: 395630 - DNA, 25 bp, Homo sapien
caatgggtccctttgaaactggcca

SEQ ID NO: 395631 - DNA, 25 bp, Homo sapien
gaagtgtaagttagcagccctcacc

SEQ ID NO: 395632 - DNA, 25 bp, Homo sapien
tacacaagagctactcgcgctcggg

SEQ ID NO: 395633 - DNA, 25 bp, Homo sapien
catgcgcactcaggtcaatggtttg

SEQ ID NO: 395634 - DNA, 25 bp, Homo sapien
tttccccttggagacatctatgcag

SEQ ID NO: 395635 - DNA, 25 bp, Homo sapien
tgtatacatgccacttaggaaaacc

SEQ ID NO: 395636 - DNA, 25 bp, Homo sapien
gccttgaaaagtgccatcggcagga

SEQ ID NO: 395637 - DNA, 25 bp, Homo sapien
cagaaagcaactcgtagggaaggga

SEQ ID NO: 395638 - DNA, 25 bp, Homo sapien
tgctccgaggacactggagatgttc

SEQ ID NO: 395639 - DNA, 25 bp, Homo sapien
gaagcattccttccttgctccgagg

SEQ ID NO: 395640 - DNA, 25 bp, Homo sapien
gacctagcgtcattgtggccacttc

SEQ ID NO: 395641 - DNA, 25 bp, Homo sapien
aaagcaggtacagaccccacacact

SEQ ID NO: 395642 - DNA, 25 bp, Homo sapien
ctgccatcagcagaccttagaggca

SEQ ID NO: 395643 - DNA, 25 bp, Homo sapien
ccaggaatccaaactggggggccag

SEQ ID NO: 395644 - DNA, 25 bp, Homo sapien
ggaaggcacgcgtctcctccgtgca

SEQ ID NO: 395645 - DNA, 25 bp, Homo sapien
gaccttagaggcaccaggaatccaa

SEQ ID NO: 395646 - DNA, 25 bp, Homo sapien
caagatcaagttctgagctcagccg

SEQ ID NO: 395647 - DNA, 25 bp, Homo sapien
ttgactctgaactagctggacggct

SEQ ID NO: 395648 - DNA, 25 bp, Homo sapien
agccctgtgaatgaacggcagttcc

SEQ ID NO: 395649 - DNA, 25 bp, Homo sapien
tcctcatcgggtagcatgtgggctg

SEQ ID NO: 395650 - DNA, 25 bp, Homo sapien
caattgaaacagactgacagccact

SEQ ID NO: 395651 - DNA, 25 bp, Homo sapien
tacttgctggccaatatagcacagg

SEQ ID NO: 395652 - DNA, 25 bp, Homo sapien
gcacaggaattgaccaattgaaaca

SEQ ID NO: 395653 - DNA, 25 bp, Homo sapien
agtaggtatcatgggcaccgcacca

SEQ ID NO: 395654 - DNA, 25 bp, Homo sapien
ccaggaagcgttggaaaatggacac

SEQ ID NO: 395655 - DNA, 25 bp, Homo sapien
gccaggaagcgttggaaaatggaca

SEQ ID NO: 395656 - DNA, 25 bp, Homo sapien
agaaagaggaaaacgtaagccatag

SEQ ID NO: 395657 - DNA, 25 bp, Homo sapien
tacaatgaaccagattctgtattta

SEQ ID NO: 395658 - DNA, 25 bp, Homo sapien
gctctacatatgtccaaaggaggct

SEQ ID NO: 395659 - DNA, 25 bp, Homo sapien
ctaaagcagctctacatatgtccaa

SEQ ID NO: 395660 - DNA, 25 bp, Homo sapien
aaaaacaggccatcaacacatgtgg

SEQ ID NO: 395661 - DNA, 25 bp, Homo sapien
cagcccagcatggtacgtccagtaa

SEQ ID NO: 395662 - DNA, 25 bp, Homo sapien
tgggagacacctgggacattgctca

SEQ ID NO: 395663 - DNA, 25 bp, Homo sapien
cgatccacaagacggtcagagtttg

SEQ ID NO: 395664 - DNA, 25 bp, Homo sapien
tccggagccggttgcgccgcagctg

SEQ ID NO: 395665 - DNA, 25 bp, Homo sapien
agctccggagccggttgcgccgcag

SEQ ID NO: 395666 - DNA, 25 bp, Homo sapien
aggcagctccggagccggttgcgcc

SEQ ID NO: 395667 - DNA, 25 bp, Homo sapien
ggcagctccggagccggttgcgccg

SEQ ID NO: 395668 - DNA, 25 bp, Homo sapien
tccatggtgtagatcaccggcggca

SEQ ID NO: 395669 - DNA, 25 bp, Homo sapien
atggtgtagatcaccggcggcagcg

SEQ ID NO: 395670 - DNA, 25 bp, Homo sapien
catggtgtagatcaccggcggcagc

SEQ ID NO: 395671 - DNA, 25 bp, Homo sapien
ctccatggtgtagatcaccggcggc

SEQ ID NO: 395672 - DNA, 25 bp, Homo sapien
ccaaactgtgtacctaggcttccca

SEQ ID NO: 395673 - DNA, 25 bp, Homo sapien
aactcttcagaaacacatcttgtag

SEQ ID NO: 395674 - DNA, 25 bp, Homo sapien
taacagcacgggttcccaaactgtg

SEQ ID NO: 395675 - DNA, 25 bp, Homo sapien
caccctggagttgggctaataacac

SEQ ID NO: 395676 - DNA, 25 bp, Homo sapien
aagctgctgagagagcgttggataa

SEQ ID NO: 395677 - DNA, 25 bp, Homo sapien
gagcgttggataaacagaggtaaat

SEQ ID NO: 395678 - DNA, 25 bp, Homo sapien
tctccattccattggttctcttgga

SEQ ID NO: 395679 - DNA, 25 bp, Homo sapien
gctgagagagcgttggataaacaga

SEQ ID NO: 395680 - DNA, 25 bp, Homo sapien
cactgtgctgacctgagataagtac

SEQ ID NO: 395681 - DNA, 25 bp, Homo sapien
caacagaaggttattgcgctcacag

SEQ ID NO: 395682 - DNA, 25 bp, Homo sapien
ggtatgtcaaaacccgcagagggca

SEQ ID NO: 395683 - DNA, 25 bp, Homo sapien
cacaggctgggtaaattataagcaa

SEQ ID NO: 395684 - DNA, 25 bp, Homo sapien
ggcagacgttgctttcaccctggat

SEQ ID NO: 395685 - DNA, 25 bp, Homo sapien
tatctccgtatcatgacaagcagtg

SEQ ID NO: 395686 - DNA, 25 bp, Homo sapien
tactcagagggtcgcaaggtttctg

SEQ ID NO: 395687 - DNA, 25 bp, Homo sapien
aaacatgtcatgttgctggcagacg

SEQ ID NO: 395688 - DNA, 25 bp, Homo sapien
aaacaactaaacagcattcatcaga

SEQ ID NO: 395689 - DNA, 25 bp, Homo sapien
caattgtttgaagtcactgagaaaa

SEQ ID NO: 395690 - DNA, 25 bp, Homo sapien
tgtaaacaattgtttgaagtcactg

SEQ ID NO: 395691 - DNA, 25 bp, Homo sapien
cagcattcatcagaagaggggaaat

SEQ ID NO: 395692 - DNA, 25 bp, Homo sapien
gcagctcctctttgaattgaacaaa

SEQ ID NO: 395693 - DNA, 25 bp, Homo sapien
acagcactctgtccagtaaatatgg

SEQ ID NO: 395694 - DNA, 25 bp, Homo sapien
tctgtccagtaaatatggaggaagg

SEQ ID NO: 395695 - DNA, 25 bp, Homo sapien
gtgaatcatcttcggagcccggcca

SEQ ID NO: 395696 - DNA, 25 bp, Homo sapien
atcctcttcccctgctggtactcac

SEQ ID NO: 395697 - DNA, 25 bp, Homo sapien
cgcatcctcttcccctgctggtact

SEQ ID NO: 395698 - DNA, 25 bp, Homo sapien
catcctcttcccctgctggtactca

SEQ ID NO: 395699 - DNA, 25 bp, Homo sapien
cgcgcatcctcttcccctgctggta

SEQ ID NO: 395700 - DNA, 25 bp, Homo sapien
gagacatgggaacacgaccacgctc

SEQ ID NO: 395701 - DNA, 25 bp, Homo sapien
acagcacgccagaccagggcgcaaa

SEQ ID NO: 395702 - DNA, 25 bp, Homo sapien
acgctcggcgccacggtgagcacag

SEQ ID NO: 395703 - DNA, 25 bp, Homo sapien
agggcgcaaacacgcaacagcaagt

SEQ ID NO: 395704 - DNA, 25 bp, Homo sapien
ttaatgaaagggtgaaatacaaatc

SEQ ID NO: 395705 - DNA, 25 bp, Homo sapien
taaacactttctgaacacaatgcaa

SEQ ID NO: 395706 - DNA, 25 bp, Homo sapien
caactatttaatgaaagggtgaaat

SEQ ID NO: 395707 - DNA, 25 bp, Homo sapien
tattaggtcacacaacagtcaaatt

SEQ ID NO: 395708 - DNA, 25 bp, Homo sapien
tgaaagagcttaccgtaacagacct

SEQ ID NO: 395709 - DNA, 25 bp, Homo sapien
taacagacctacactacaagcaagg

SEQ ID NO: 395710 - DNA, 25 bp, Homo sapien
ccttcggtcagcaggaaatccagac

SEQ ID NO: 395711 - DNA, 25 bp, Homo sapien
ttctcatgggaaacaatggaaccca

SEQ ID NO: 395712 - DNA, 25 bp, Homo sapien
agaactggagtctcttgtcaaggct

SEQ ID NO: 395713 - DNA, 25 bp, Homo sapien
aagaactggagtctcttgtcaaggc

SEQ ID NO: 395714 - DNA, 25 bp, Homo sapien
gaagaactggagtctcttgtcaagg

SEQ ID NO: 395715 - DNA, 25 bp, Homo sapien
atgtaggacggccagtcatggacgt

SEQ ID NO: 395716 - DNA, 25 bp, Homo sapien
gacggccagtcatggacgtgtgggc

SEQ ID NO: 395717 - DNA, 25 bp, Homo sapien
ctgaaatgtaggacggccagtcatg

SEQ ID NO: 395718 - DNA, 25 bp, Homo sapien
cggccagtcatggacgtgtgggcgc

SEQ ID NO: 395719 - DNA, 25 bp, Homo sapien
atcattttcaactatcactattaac

SEQ ID NO: 395720 - DNA, 25 bp, Homo sapien
attttgtccacaatagaggttcggg

SEQ ID NO: 395721 - DNA, 25 bp, Homo sapien
ttcttattttgtccacaatagaggt

SEQ ID NO: 395722 - DNA, 25 bp, Homo sapien
taaccagtccacagagctatgagcc

SEQ ID NO: 395723 - DNA, 25 bp, Homo sapien
ttcctgagttcgagaagagtccttc

SEQ ID NO: 395724 - DNA, 25 bp, Homo sapien
atcctcaaacttgcctaggtttttg

SEQ ID NO: 395725 - DNA, 25 bp, Homo sapien
tccctcaaggttctcatgtcatcct

SEQ ID NO: 395726 - DNA, 25 bp, Homo sapien
taagaagcaatgtcctgagtttggt

SEQ ID NO: 395727 - DNA, 25 bp, Homo sapien
accagggcgtcctcgaactgctgca

SEQ ID NO: 395728 - DNA, 25 bp, Homo sapien
cggccccgaagttgaccacatactg

SEQ ID NO: 395729 - DNA, 25 bp, Homo sapien
acatactgagagaagagggcgtcca

SEQ ID NO: 395730 - DNA, 25 bp, Homo sapien
cagttcgtcgtactgcaccagggcg

SEQ ID NO: 395731 - DNA, 25 bp, Homo sapien
gccactgagttgtggaaaggacatt

SEQ ID NO: 395732 - DNA, 25 bp, Homo sapien
caaagataacccctggatggaaggc

SEQ ID NO: 395733 - DNA, 25 bp, Homo sapien
aaagaaagatgaacacccaagggca

SEQ ID NO: 395734 - DNA, 25 bp, Homo sapien
gagatgcccactacagcactgcttg

SEQ ID NO: 395735 - DNA, 25 bp, Homo sapien
cactatgagccagtatccatcggcg

SEQ ID NO: 395736 - DNA, 25 bp, Homo sapien
taatgtatgcaccagttattgccat

SEQ ID NO: 395737 - DNA, 25 bp, Homo sapien
gcatcacaagcacatggacctgtga

SEQ ID NO: 395738 - DNA, 25 bp, Homo sapien
aagctcctatgatatgacctcaagg

SEQ ID NO: 395739 - DNA, 25 bp, Homo sapien
gacctgtgattaccagcctgcctga

SEQ ID NO: 395740 - DNA, 25 bp, Homo sapien
tggcttctcgcctctggatcgattc

SEQ ID NO: 395741 - DNA, 25 bp, Homo sapien
tgcgcagatctaacagggtggcttc

SEQ ID NO: 395742 - DNA, 25 bp, Homo sapien
cactggcgagagaacaggtaactgc

SEQ ID NO: 395743 - DNA, 25 bp, Homo sapien
gattcccgcttctccatatctatgg

SEQ ID NO: 395744 - DNA, 25 bp, Homo sapien
cagcgagaccttccacagtaagaca

SEQ ID NO: 395745 - DNA, 25 bp, Homo sapien
gagccgcctgcctcgtatgttacta

SEQ ID NO: 395746 - DNA, 25 bp, Homo sapien
caaggtatgtgaagggcacaaaccc

SEQ ID NO: 395747 - DNA, 25 bp, Homo sapien
tatcctagaaggttctctcaagtcc

SEQ ID NO: 395748 - DNA, 25 bp, Homo sapien
cgctgaactgagtccgcagggaaca

SEQ ID NO: 395749 - DNA, 25 bp, Homo sapien
tacaaagcaggaagacgtacagtgc

SEQ ID NO: 395750 - DNA, 25 bp, Homo sapien
tcctaggagaccacgagagactctt

SEQ ID NO: 395751 - DNA, 25 bp, Homo sapien
aaagtagcagcatcaggtagcggca

SEQ ID NO: 395752 - DNA, 25 bp, Homo sapien
tgagtcgatctgtgcccggtcacag

SEQ ID NO: 395753 - DNA, 25 bp, Homo sapien
tgtgggcaatgtttgagtcgatctg

SEQ ID NO: 395754 - DNA, 25 bp, Homo sapien
acagtgtgggcaatgtttgagtcga

SEQ ID NO: 395755 - DNA, 25 bp, Homo sapien
gtgcccggtcacagcagccttctat

SEQ ID NO: 395756 - DNA, 25 bp, Homo sapien
tgacacaagtccacatagatagccc

SEQ ID NO: 395757 - DNA, 25 bp, Homo sapien
tccacatagatagcccaaggacttt

SEQ ID NO: 395758 - DNA, 25 bp, Homo sapien
tgttgagatcttctgagttaggtcc

SEQ ID NO: 395759 - DNA, 25 bp, Homo sapien
caaaaggtcaactgtcctgttgaga

SEQ ID NO: 395760 - DNA, 25 bp, Homo sapien
tgtgaaattacaaaccggccaatgc

SEQ ID NO: 395761 - DNA, 25 bp, Homo sapien
gtaattcagagagacagtggtgcat

SEQ ID NO: 395762 - DNA, 25 bp, Homo sapien
ggccaatgccaacggaaactacatg

SEQ ID NO: 395763 - DNA, 25 bp, Homo sapien
tccgaagtgatctgaaatggtctca

SEQ ID NO: 395764 - DNA, 25 bp, Homo sapien
ttccactgacgataatgcttctttc

SEQ ID NO: 395765 - DNA, 25 bp, Homo sapien
aaagcttccactgacgataatgctt

SEQ ID NO: 395766 - DNA, 25 bp, Homo sapien
ccactgacgataatgcttctttcag

SEQ ID NO: 395767 - DNA, 25 bp, Homo sapien
gcttccactgacgataatgcttctt

SEQ ID NO: 395768 - DNA, 25 bp, Homo sapien
tataatttctgtgtgagcaaaccca

SEQ ID NO: 395769 - DNA, 25 bp, Homo sapien
caaggactttctgcacgtgggtgac

SEQ ID NO: 395770 - DNA, 25 bp, Homo sapien
tataagaggtacagccattacgggc

SEQ ID NO: 395771 - DNA, 25 bp, Homo sapien
atgacccgggaatgacgctgaccca

SEQ ID NO: 395772 - DNA, 25 bp, Homo sapien
tccaacaaacttagcagatcgaatc

SEQ ID NO: 395773 - DNA, 25 bp, Homo sapien
tttcaatggtggcatgggacaaatc

SEQ ID NO: 395774 - DNA, 25 bp, Homo sapien
acatttcaatggtggcatgggacaa

SEQ ID NO: 395775 - DNA, 25 bp, Homo sapien
atcctcccaatgcttgtatacattt

SEQ ID NO: 395776 - DNA, 25 bp, Homo sapien
gaggactgggtaagagaatctacac

SEQ ID NO: 395777 - DNA, 25 bp, Homo sapien
aatggtaaccacatgacccactggg

SEQ ID NO: 395778 - DNA, 25 bp, Homo sapien
tgcagtagctttacatcaatggcct

SEQ ID NO: 395779 - DNA, 25 bp, Homo sapien
catgaacctgacacatgcagtagct

SEQ ID NO: 395780 - DNA, 25 bp, Homo sapien
gctttcattacagctagggataatc

SEQ ID NO: 395781 - DNA, 25 bp, Homo sapien
tagggataatcaacacactgaaacc

SEQ ID NO: 395782 - DNA, 25 bp, Homo sapien
tacagctagggataatcaacacact

SEQ ID NO: 395783 - DNA, 25 bp, Homo sapien
caaacagtagctttcattacagcta

SEQ ID NO: 395784 - DNA, 25 bp, Homo sapien
tccaaggtgcttttgacattcggcc

SEQ ID NO: 395785 - DNA, 25 bp, Homo sapien
agtttttcagtgctccttgaagata

SEQ ID NO: 395786 - DNA, 25 bp, Homo sapien
tcagtgctccttgaagatagatttc

SEQ ID NO: 395787 - DNA, 25 bp, Homo sapien
agccctcagccaggtagtttttcag

SEQ ID NO: 395788 - DNA, 25 bp, Homo sapien
ctcctggcagaagtgcttgcgctcc

SEQ ID NO: 395789 - DNA, 25 bp, Homo sapien
tggcagaagtgcttgcgctcctctt

SEQ ID NO: 395790 - DNA, 25 bp, Homo sapien
aaagtcaagtatctcctggcagaag

SEQ ID NO: 395791 - DNA, 25 bp, Homo sapien
gcaaagtcaagtatctcctggcaga

SEQ ID NO: 395792 - DNA, 25 bp, Homo sapien
agaagaaaaagagatgggaagaact

SEQ ID NO: 395793 - DNA, 25 bp, Homo sapien
gaagaagaaaaagagatgggaagaa

SEQ ID NO: 395794 - DNA, 25 bp, Homo sapien
tattcatcaacgaaaggacttgcca

SEQ ID NO: 395795 - DNA, 25 bp, Homo sapien
cagcttgggcgcgttaaagactcca

SEQ ID NO: 395796 - DNA, 25 bp, Homo sapien
cagcagatgtggtcacggctctacc

SEQ ID NO: 395797 - DNA, 25 bp, Homo sapien
gactaacgtcatgatgctcccgaga

SEQ ID NO: 395798 - DNA, 25 bp, Homo sapien
ccttctcaggagcatgtggacgttt

SEQ ID NO: 395799 - DNA, 25 bp, Homo sapien
acatttcatacaactccagcgcggg

SEQ ID NO: 395800 - DNA, 25 bp, Homo sapien
tgtgcttggtaagccactccgcagt

SEQ ID NO: 395801 - DNA, 25 bp, Homo sapien
cccagtcgtgttcaaggagttatca

SEQ ID NO: 395802 - DNA, 25 bp, Homo sapien
cacggccctgctttacaaacttgaa

SEQ ID NO: 395803 - DNA, 25 bp, Homo sapien
aagtcaagttcccaccctgaacgca

SEQ ID NO: 395804 - DNA, 25 bp, Homo sapien
gacagttcttgtaagctccacggcc

SEQ ID NO: 395805 - DNA, 25 bp, Homo sapien
taggagaacaaaggactctactcaa

SEQ ID NO: 395806 - DNA, 25 bp, Homo sapien
gtcaaagaatcaggcatttgaaacc

SEQ ID NO: 395807 - DNA, 25 bp, Homo sapien
ctagagtcaaagaatcaggcatttg

SEQ ID NO: 395808 - DNA, 25 bp, Homo sapien
agaatcaggcatttgaaaccacgtc

SEQ ID NO: 395809 - DNA, 25 bp, Homo sapien
aagaatcaggcatttgaaaccacgt

SEQ ID NO: 395810 - DNA, 25 bp, Homo sapien
tagatgtgagggaggacgaaccaca

SEQ ID NO: 395811 - DNA, 25 bp, Homo sapien
agtacacgtcgtactgcacaatggg

SEQ ID NO: 395812 - DNA, 25 bp, Homo sapien
gggctcctgtgagtacacgtcgtac

SEQ ID NO: 395813 - DNA, 25 bp, Homo sapien
gtgtatacgttccaggttccttggc

SEQ ID NO: 395814 - DNA, 25 bp, Homo sapien
tggcatctcagcaggtctcctcaga

SEQ ID NO: 395815 - DNA, 25 bp, Homo sapien
aaacattcagataaacaaaagaggc

SEQ ID NO: 395816 - DNA, 25 bp, Homo sapien
tgaaaaagcaattacaggaaagcaa

SEQ ID NO: 395817 - DNA, 25 bp, Homo sapien
tctcttaaaggcagacacagctaaa

SEQ ID NO: 395818 - DNA, 25 bp, Homo sapien
tcgtgttggagtagaccacagccct

SEQ ID NO: 395819 - DNA, 25 bp, Homo sapien
tataatggccggtagtgacagtgaa

SEQ ID NO: 395820 - DNA, 25 bp, Homo sapien
cacaggatgagcatggcttcggcat

SEQ ID NO: 395821 - DNA, 25 bp, Homo sapien
cttcggcattgctaagctgcaggct

SEQ ID NO: 395822 - DNA, 25 bp, Homo sapien
tcaaattcgatcacgtggtacgcag

SEQ ID NO: 395823 - DNA, 25 bp, Homo sapien
tctgtggtaaccatgcagcggccag

SEQ ID NO: 395824 - DNA, 25 bp, Homo sapien
gactgatgctcgtgaccttgtcgga

SEQ ID NO: 395825 - DNA, 25 bp, Homo sapien
ccttgtcggaggactgaatccggag

SEQ ID NO: 395826 - DNA, 25 bp, Homo sapien
ctggcctcgtcaccggtctaatgga

SEQ ID NO: 395827 - DNA, 25 bp, Homo sapien
tttcagtggacagacaccgaggcac

SEQ ID NO: 395828 - DNA, 25 bp, Homo sapien
tggacatgacccaagttttacgccc

SEQ ID NO: 395829 - DNA, 25 bp, Homo sapien
taacctcttacagcaaactccctgg

SEQ ID NO: 395830 - DNA, 25 bp, Homo sapien
gagctaagcgccaccttcgtgaatg

SEQ ID NO: 395831 - DNA, 25 bp, Homo sapien
tctgggctacgagacttgggcacac

SEQ ID NO: 395832 - DNA, 25 bp, Homo sapien
tacaacattcgtcttcaggcgtgga

SEQ ID NO: 395833 - DNA, 25 bp, Homo sapien
gatatcctgtggctctgggaccgaa

SEQ ID NO: 395834 - DNA, 25 bp, Homo sapien
aagaggtgaataccccagcacacag

SEQ ID NO: 395835 - DNA, 25 bp, Homo sapien
catacagacaagagaaacgaacgca

SEQ ID NO: 395836 - DNA, 25 bp, Homo sapien
agagtcacctcaacggcggaagagc

SEQ ID NO: 395837 - DNA, 25 bp, Homo sapien
ggccgcggagccatgcatgttgcaa

SEQ ID NO: 395838 - DNA, 25 bp, Homo sapien
cgctgaaggtcagtgcgatgactgt

SEQ ID NO: 395839 - DNA, 25 bp, Homo sapien
ctgtggagtagatggaccacgggca

SEQ ID NO: 395840 - DNA, 25 bp, Homo sapien
tgtgtgtggtcctgaagggtacgct

SEQ ID NO: 395841 - DNA, 25 bp, Homo sapien
atggaccacgggcagtcaatcgaca

SEQ ID NO: 395842 - DNA, 25 bp, Homo sapien
tcagtggtactagttgcaggtcggt

SEQ ID NO: 395843 - DNA, 25 bp, Homo sapien
ggactgcgtgttcagtggtactagt

SEQ ID NO: 395844 - DNA, 25 bp, Homo sapien
tacaagataactatctgacagctga

SEQ ID NO: 395845 - DNA, 25 bp, Homo sapien
ggtcggtactatcaccggtatctac

SEQ ID NO: 395846 - DNA, 25 bp, Homo sapien
ggaggctcttctgtccacttgagtt

SEQ ID NO: 395847 - DNA, 25 bp, Homo sapien
ttcccagacgaagaacaccgactgc

SEQ ID NO: 395848 - DNA, 25 bp, Homo sapien
tatacggctttaaggagatagacag

SEQ ID NO: 395849 - DNA, 25 bp, Homo sapien
tccaacagagaaccggcaatgcaga

SEQ ID NO: 395850 - DNA, 25 bp, Homo sapien
cacccagagttgcagtaggacacag

SEQ ID NO: 395851 - DNA, 25 bp, Homo sapien
tctgttcggacatgggacaaactcc

SEQ ID NO: 395852 - DNA, 25 bp, Homo sapien
tcttcagagagacacgcgagcactg

SEQ ID NO: 395853 - DNA, 25 bp, Homo sapien
gatagacacctatctgctcggctgg

SEQ ID NO: 395854 - DNA, 25 bp, Homo sapien
cctccaagaggtctgagagcctcgt

SEQ ID NO: 395855 - DNA, 25 bp, Homo sapien
gagcctcgtgatcaaaacctccagg

SEQ ID NO: 395856 - DNA, 25 bp, Homo sapien
gctcatcagattcagtcagtgcttc

SEQ ID NO: 395857 - DNA, 25 bp, Homo sapien
agatctcagccttcacgttgtataa

SEQ ID NO: 395858 - DNA, 25 bp, Homo sapien
tgtgccatctcgtgtaacacaggaa

SEQ ID NO: 395859 - DNA, 25 bp, Homo sapien
gatttcagcagctttcgcaggcatt

SEQ ID NO: 395860 - DNA, 25 bp, Homo sapien
gaccccactggatttcaatacagct

SEQ ID NO: 395861 - DNA, 25 bp, Homo sapien
ggaagctgacactggtaccatacag

SEQ ID NO: 395862 - DNA, 25 bp, Homo sapien
gcctgaagataaagccatgcacttt

SEQ ID NO: 395863 - DNA, 25 bp, Homo sapien
cagtgccttgtagctgcgcctgaag

SEQ ID NO: 395864 - DNA, 25 bp, Homo sapien
ggtggcaacccctatttcattgagt

SEQ ID NO: 395865 - DNA, 25 bp, Homo sapien
gtctgacaaaacactgcggacacag

SEQ ID NO: 395866 - DNA, 25 bp, Homo sapien
aagagcggcatcacttccatgtgga

SEQ ID NO: 395867 - DNA, 25 bp, Homo sapien
gcatggagatgacaccgcagctttt

SEQ ID NO: 395868 - DNA, 25 bp, Homo sapien
gaggtacttgaacagcctgacgtcg

SEQ ID NO: 395869 - DNA, 25 bp, Homo sapien
gcccagttgctactgttgtcgacaa

SEQ ID NO: 395870 - DNA, 25 bp, Homo sapien
ggtcgtccccgtgcttgtctactga

SEQ ID NO: 395871 - DNA, 25 bp, Homo sapien
taggcctttgtgctcgctgctgcag

SEQ ID NO: 395872 - DNA, 25 bp, Homo sapien
ctgctgcaggccgaatgcacgctgc

SEQ ID NO: 395873 - DNA, 25 bp, Homo sapien
ggatgaccaggacttgtgtgcccga

SEQ ID NO: 395874 - DNA, 25 bp, Homo sapien
tcagtagaccagtggaggacattcc

SEQ ID NO: 395875 - DNA, 25 bp, Homo sapien
ttcagtacctttcacgtggctccgg

SEQ ID NO: 395876 - DNA, 25 bp, Homo sapien
tggaaactttcatgagcagcgtgtg

SEQ ID NO: 395877 - DNA, 25 bp, Homo sapien
aatgagaggatctgcggtaaacggc

SEQ ID NO: 395878 - DNA, 25 bp, Homo sapien
gctggacccgactctatctgcttga

SEQ ID NO: 395879 - DNA, 25 bp, Homo sapien
catttgcccagtaaattaagagtac

SEQ ID NO: 395880 - DNA, 25 bp, Homo sapien
atatttccccggtctgtgcctcctt

SEQ ID NO: 395881 - DNA, 25 bp, Homo sapien
gggattcacacgagggccacccact

SEQ ID NO: 395882 - DNA, 25 bp, Homo sapien
tcctgggagtagaaccagatacaag

SEQ ID NO: 395883 - DNA, 25 bp, Homo sapien
catttccaggcaattaagcgccgta

SEQ ID NO: 395884 - DNA, 25 bp, Homo sapien
cggattacagtctcttctgacggaa

SEQ ID NO: 395885 - DNA, 25 bp, Homo sapien
tcccaggctgacgacacggattaca

SEQ ID NO: 395886 - DNA, 25 bp, Homo sapien
aacatttacatcagcccagtttgcc

SEQ ID NO: 395887 - DNA, 25 bp, Homo sapien
aattctgtatgggatatctggcatc

SEQ ID NO: 395888 - DNA, 25 bp, Homo sapien
gaccttcctaggctgtgctgacaat

SEQ ID NO: 395889 - DNA, 25 bp, Homo sapien
tttccaatcataggacatcccatga

SEQ ID NO: 395890 - DNA, 25 bp, Homo sapien
aatgacttttcatagtaaaccatga

SEQ ID NO: 395891 - DNA, 25 bp, Homo sapien
tggaatacctgcagtgtcaaagtca

SEQ ID NO: 395892 - DNA, 25 bp, Homo sapien
ggtcttacagcctgatgtatatagg

SEQ ID NO: 395893 - DNA, 25 bp, Homo sapien
gtcacagaatcccaacacattgtat

SEQ ID NO: 395894 - DNA, 25 bp, Homo sapien
tttcagaattacaatgcttacattt

SEQ ID NO: 395895 - DNA, 25 bp, Homo sapien
ttttcagaattacaatgcttacatt

SEQ ID NO: 395896 - DNA, 25 bp, Homo sapien
ttcagaattacaatgcttacatttt

SEQ ID NO: 395897 - DNA, 25 bp, Homo sapien
cacggccgtcgcacgtgtgccgcag

SEQ ID NO: 395898 - DNA, 25 bp, Homo sapien
cgtcgcacgtgtgccgcagctcaac

SEQ ID NO: 395899 - DNA, 25 bp, Homo sapien
gtgtgccgcagctcaacccggcggc

SEQ ID NO: 395900 - DNA, 25 bp, Homo sapien
ccggcggccgcccacagagacactt

SEQ ID NO: 395901 - DNA, 25 bp, Homo sapien
ctgctgttctcaccccgcctgcgcg

SEQ ID NO: 395902 - DNA, 25 bp, Homo sapien
gctcgctcgttagggaccagtcccg

SEQ ID NO: 395903 - DNA, 25 bp, Homo sapien
ctggacgctcgctcgttagggacca

SEQ ID NO: 395904 - DNA, 25 bp, Homo sapien
gacgctcgctcgttagggaccagtc

SEQ ID NO: 395905 - DNA, 25 bp, Homo sapien
tgcccacgggactgataactgaatt

SEQ ID NO: 395906 - DNA, 25 bp, Homo sapien
gaatttccatcgcaggtaaaattta

SEQ ID NO: 395907 - DNA, 25 bp, Homo sapien
taaggtcaaatacagtgactctatt

SEQ ID NO: 395908 - DNA, 25 bp, Homo sapien
aatacagtgactctattgcccacgg

SEQ ID NO: 395909 - DNA, 25 bp, Homo sapien
gacagccccacgcacttgacgttgt

SEQ ID NO: 395910 - DNA, 25 bp, Homo sapien
acgatgatagcgaggcggccatccg

SEQ ID NO: 395911 - DNA, 25 bp, Homo sapien
cttgacgttgtaccgagtggccagg

SEQ ID NO: 395912 - DNA, 25 bp, Homo sapien
cttcatcgacgatgatagcgaggcg

SEQ ID NO: 395913 - DNA, 25 bp, Homo sapien
gaccaggctgaccagcagcgcatcg

SEQ ID NO: 395914 - DNA, 25 bp, Homo sapien
ccaggctgaccagcagcgcatcgcc

SEQ ID NO: 395915 - DNA, 25 bp, Homo sapien
aggctgaccagcagcgcatcgcccc

SEQ ID NO: 395916 - DNA, 25 bp, Homo sapien
agaccaggctgaccagcagcgcatc

SEQ ID NO: 395917 - DNA, 25 bp, Homo sapien
gaaggacacactgtgcacagagccc

SEQ ID NO: 395918 - DNA, 25 bp, Homo sapien
catcaggggagaaggacacactgtg

SEQ ID NO: 395919 - DNA, 25 bp, Homo sapien
tgcacagagcccttgaagtggaagt

SEQ ID NO: 395920 - DNA, 25 bp, Homo sapien
gtgcacagagcccttgaagtggaag

SEQ ID NO: 395921 - DNA, 25 bp, Homo sapien
cgaaggcgttgaactcccgcttctt

SEQ ID NO: 395922 - DNA, 25 bp, Homo sapien
tccgtccagtcgatgcaggtggtct

SEQ ID NO: 395923 - DNA, 25 bp, Homo sapien
catcgtagggcccaaaataggtctt

SEQ ID NO: 395924 - DNA, 25 bp, Homo sapien
taggtcttgtccagaacgaaggcgt

SEQ ID NO: 395925 - DNA, 25 bp, Homo sapien
caggccacgatggcatccttatgtc

SEQ ID NO: 395926 - DNA, 25 bp, Homo sapien
ccagcgctcggctccgaacacccag

SEQ ID NO: 395927 - DNA, 25 bp, Homo sapien
cttatgtccccccagtgcatagtag

SEQ ID NO: 395928 - DNA, 25 bp, Homo sapien
cccagtgcatagtagatgaggttgt

SEQ ID NO: 395929 - DNA, 25 bp, Homo sapien
cactccgtcctggctgagtgagtac

SEQ ID NO: 395930 - DNA, 25 bp, Homo sapien
actccgtcctggctgagtgagtaca

SEQ ID NO: 395931 - DNA, 25 bp, Homo sapien
ctccgtcctggctgagtgagtacag

SEQ ID NO: 395932 - DNA, 25 bp, Homo sapien
cgctgcaacaggtctgctttccagc

SEQ ID NO: 395933 - DNA, 25 bp, Homo sapien
tcctcccgctgcaacaggtctgctt

SEQ ID NO: 395934 - DNA, 25 bp, Homo sapien
tcccgctgcaacaggtctgctttcc

SEQ ID NO: 395935 - DNA, 25 bp, Homo sapien
ccgctgcaacaggtctgctttccag

SEQ ID NO: 395936 - DNA, 25 bp, Homo sapien
cggagtggcttttccccggatggtg

SEQ ID NO: 395937 - DNA, 25 bp, Homo sapien
cagccgtgagtacttcacttttcct

SEQ ID NO: 395938 - DNA, 25 bp, Homo sapien
ttctcctcctcggccggagtggctt

SEQ ID NO: 395939 - DNA, 25 bp, Homo sapien
tcctcctcggccggagtggcttttc

SEQ ID NO: 395940 - DNA, 25 bp, Homo sapien
tcagaccactcgctgcgcccactca

SEQ ID NO: 395941 - DNA, 25 bp, Homo sapien
gggccccgaagcaggactcagacca

SEQ ID NO: 395942 - DNA, 25 bp, Homo sapien
tcgctgcgcccactcacagcccggt

SEQ ID NO: 395943 - DNA, 25 bp, Homo sapien
agcgggccccgaagcaggactcaga

SEQ ID NO: 395944 - DNA, 25 bp, Homo sapien
gcagctgtcaggttgttaaaatccc

SEQ ID NO: 395945 - DNA, 25 bp, Homo sapien
gagtggatgaggttaaactctggca

SEQ ID NO: 395946 - DNA, 25 bp, Homo sapien
gaccaagaggtgagacttcttatga

SEQ ID NO: 395947 - DNA, 25 bp, Homo sapien
gaagcaaagccagtgaccaagaggt

SEQ ID NO: 395948 - DNA, 25 bp, Homo sapien
atccagtcccccgagctattgatgg

SEQ ID NO: 395949 - DNA, 25 bp, Homo sapien
gatggccactgaggcgatgctctga

SEQ ID NO: 395950 - DNA, 25 bp, Homo sapien
gctattgatggccactgaggcgatg

SEQ ID NO: 395951 - DNA, 25 bp, Homo sapien
tgaggcgatgctctgatctgaaatg

SEQ ID NO: 395952 - DNA, 25 bp, Homo sapien
gtccccgccagtcacgatgtactgt

SEQ ID NO: 395953 - DNA, 25 bp, Homo sapien
cacgatgtactgtccgtcgggcgag

SEQ ID NO: 395954 - DNA, 25 bp, Homo sapien
tggccctgctgcttgagcacgtagg

SEQ ID NO: 395955 - DNA, 25 bp, Homo sapien
gagcacgtaggactcactctgccac

SEQ ID NO: 395956 - DNA, 25 bp, Homo sapien
ctggagtgctccgtaaaagtgacga

SEQ ID NO: 395957 - DNA, 25 bp, Homo sapien
tgaggtcaccacaacgtagccggtg

SEQ ID NO: 395958 - DNA, 25 bp, Homo sapien
tggcagtaaaggtcacaccggtcac

SEQ ID NO: 395959 - DNA, 25 bp, Homo sapien
gcacggtcccgtccatggatgaggt

SEQ ID NO: 395960 - DNA, 25 bp, Homo sapien
agtcctgcgcccctgcagagacgat

SEQ ID NO: 395961 - DNA, 25 bp, Homo sapien
acacgaaaatctcaaaggagtcctg

SEQ ID NO: 395962 - DNA, 25 bp, Homo sapien
accgccacacaggagaactgggtgg

SEQ ID NO: 395963 - DNA, 25 bp, Homo sapien
gcagagacgatctcaccgctcgcat

SEQ ID NO: 395964 - DNA, 25 bp, Homo sapien
gccaggacggacttcattgggttaa

SEQ ID NO: 395965 - DNA, 25 bp, Homo sapien
cagctgtcaaacatgtcccataggc

SEQ ID NO: 395966 - DNA, 25 bp, Homo sapien
catcagaggtcagggccagcgtctc

SEQ ID NO: 395967 - DNA, 25 bp, Homo sapien
gatgggcccttcgtgtccagacaaa

SEQ ID NO: 395968 - DNA, 25 bp, Homo sapien
cgcgtgcttggctgtaatcttgtcc

SEQ ID NO: 395969 - DNA, 25 bp, Homo sapien
ccagaaggtgatctgtgagttcagt

SEQ ID NO: 395970 - DNA, 25 bp, Homo sapien
gtgagttcagtgtggccacagccag

SEQ ID NO: 395971 - DNA, 25 bp, Homo sapien
tcagggcgaaaagtcacagccagag

SEQ ID NO: 395972 - DNA, 25 bp, Homo sapien
acttggacatgcctcccgccaggat

SEQ ID NO: 395973 - DNA, 25 bp, Homo sapien
atctcgaacctcttcatgagaatct

SEQ ID NO: 395974 - DNA, 25 bp, Homo sapien
tggtagatgcacacgaacttggaca

SEQ ID NO: 395975 - DNA, 25 bp, Homo sapien
catggcgtccaaagacaggttgcaa

SEQ ID NO: 395976 - DNA, 25 bp, Homo sapien
cctggcagtggtatcgcgactccat

SEQ ID NO: 395977 - DNA, 25 bp, Homo sapien
cagtggtatcgcgactccatcctcc

SEQ ID NO: 395978 - DNA, 25 bp, Homo sapien
tagtgccaggttgccaaactctgtc

SEQ ID NO: 395979 - DNA, 25 bp, Homo sapien
tggcagtggtatcgcgactccatcc

SEQ ID NO: 395980 - DNA, 25 bp, Homo sapien
cctgatctcaggtttgaagtgccga

SEQ ID NO: 395981 - DNA, 25 bp, Homo sapien
ctcaggtttgaagtgccgagaactc

SEQ ID NO: 395982 - DNA, 25 bp, Homo sapien
ttgaagtgccgagaactcatgtcac

SEQ ID NO: 395983 - DNA, 25 bp, Homo sapien
gtttgaagtgccgagaactcatgtc

SEQ ID NO: 395984 - DNA, 25 bp, Homo sapien
acgggctctccgtgatggcagagcc

SEQ ID NO: 395985 - DNA, 25 bp, Homo sapien
gcagtgcgcaggagacgggctctcc

SEQ ID NO: 395986 - DNA, 25 bp, Homo sapien
ctagagcaagggcataccaggcctg

SEQ ID NO: 395987 - DNA, 25 bp, Homo sapien
gccatgtttcaaagctcagtgcatc

SEQ ID NO: 395988 - DNA, 25 bp, Homo sapien
aatcaggaggaaccgggacgtctgc

SEQ ID NO: 395989 - DNA, 25 bp, Homo sapien
caagtcttctgtctagctcaggcgt

SEQ ID NO: 395990 - DNA, 25 bp, Homo sapien
gcaaatatgtacacgcatgcgtcct

SEQ ID NO: 395991 - DNA, 25 bp, Homo sapien
cattcccctgggacaaagtgcaaaa

SEQ ID NO: 395992 - DNA, 25 bp, Homo sapien
cagggagtagatgaggagtccctcc

SEQ ID NO: 395993 - DNA, 25 bp, Homo sapien
tgtccagctcaaacgggtcaaagag

SEQ ID NO: 395994 - DNA, 25 bp, Homo sapien
tgctctcgttgagccggagggccat

SEQ ID NO: 395995 - DNA, 25 bp, Homo sapien
gtgaagtcctgctggcgcagtgcct

SEQ ID NO: 395996 - DNA, 25 bp, Homo sapien
agcttctgtccgtgcaacatgagca

SEQ ID NO: 395997 - DNA, 25 bp, Homo sapien
tccaggtggcgagacacttcaaagg

SEQ ID NO: 395998 - DNA, 25 bp, Homo sapien
tttgtgagtccagaggaggtagaat

SEQ ID NO: 395999 - DNA, 25 bp, Homo sapien
gaggaagctaaaaactccagcactt

SEQ ID NO: 396000 - DNA, 25 bp, Homo sapien
tttcgacaggtcgtccaggtgccgc

SEQ ID NO: 396001 - DNA, 25 bp, Homo sapien
tcgacaggtcgtccaggtgccgctg

SEQ ID NO: 396002 - DNA, 25 bp, Homo sapien
gtttcgacaggtcgtccaggtgccg

SEQ ID NO: 396003 - DNA, 25 bp, Homo sapien
agtttcgacaggtcgtccaggtgcc

SEQ ID NO: 396004 - DNA, 25 bp, Homo sapien
ccccaggccctgcacccacacgtac

SEQ ID NO: 396005 - DNA, 25 bp, Homo sapien
ggaaaggctgcctggtcctacgaat

SEQ ID NO: 396006 - DNA, 25 bp, Homo sapien
cactgcctgtgcaagtgacctgcaa

SEQ ID NO: 396007 - DNA, 25 bp, Homo sapien
cgcggatgaatcctcgcagcagcag

SEQ ID NO: 396008 - DNA, 25 bp, Homo sapien
cggcaatccctccaagagcctggag

SEQ ID NO: 396009 - DNA, 25 bp, Homo sapien
tacagagctctgtgaaaagtccagg

SEQ ID NO: 396010 - DNA, 25 bp, Homo sapien
gaaacccggcaactgattggcaaca

SEQ ID NO: 396011 - DNA, 25 bp, Homo sapien
taaataagggagctagacaaccctc

SEQ ID NO: 396012 - DNA, 25 bp, Homo sapien
cagagcaactcgcaaacaggacaga

SEQ ID NO: 396013 - DNA, 25 bp, Homo sapien
cacaggggatggtcaatgccagcaa

SEQ ID NO: 396014 - DNA, 25 bp, Homo sapien
tggtcaatgccagcaacgcccaggc

SEQ ID NO: 396015 - DNA, 25 bp, Homo sapien
gggatggtcaatgccagcaacgccc

SEQ ID NO: 396016 - DNA, 25 bp, Homo sapien
tggcctgtcctgcacccaaccacct

SEQ ID NO: 396017 - DNA, 25 bp, Homo sapien
tctagggagcgttttgtgccccgct

SEQ ID NO: 396018 - DNA, 25 bp, Homo sapien
gccccgctgcttggaaactgctagt

SEQ ID NO: 396019 - DNA, 25 bp, Homo sapien
tagtgcgtactgcatgttatagtgg

SEQ ID NO: 396020 - DNA, 25 bp, Homo sapien
cccagcgggtctagggagcgttttg

SEQ ID NO: 396021 - DNA, 25 bp, Homo sapien
gatgcaggctgtcatcttcagatgc

SEQ ID NO: 396022 - DNA, 25 bp, Homo sapien
tcctcctccaagcagatgcaggctg

SEQ ID NO: 396023 - DNA, 25 bp, Homo sapien
taggccagcatctcttcttctgagt

SEQ ID NO: 396024 - DNA, 25 bp, Homo sapien
tccaagcagatgcaggctgtcatct

SEQ ID NO: 396025 - DNA, 25 bp, Homo sapien
tggcaggtcttagccggcacaatcc

SEQ ID NO: 396026 - DNA, 25 bp, Homo sapien
tcatgtgaatacctctctgagacgc

SEQ ID NO: 396027 - DNA, 25 bp, Homo sapien
tgtcctgatgggctacatgtgtgca

SEQ ID NO: 396028 - DNA, 25 bp, Homo sapien
gtggcacaagggtcccatctccctg

SEQ ID NO: 396029 - DNA, 25 bp, Homo sapien
tacaacataaccctttttaatctga

SEQ ID NO: 396030 - DNA, 25 bp, Homo sapien
tctgaagtgtagacttcatcctcac

SEQ ID NO: 396031 - DNA, 25 bp, Homo sapien
catctgatgatctagccacggctgt

SEQ ID NO: 396032 - DNA, 25 bp, Homo sapien
tgtccatcactaggactttactgcc

SEQ ID NO: 396033 - DNA, 25 bp, Homo sapien
actgccgcgttgtccatcactagga

SEQ ID NO: 396034 - DNA, 25 bp, Homo sapien
ctgccaatccttgcaagatagtggg

SEQ ID NO: 396035 - DNA, 25 bp, Homo sapien
tatgcatgggttagttcacagagga

SEQ ID NO: 396036 - DNA, 25 bp, Homo sapien
ctgtttgttatgcatgggttagttc

SEQ ID NO: 396037 - DNA, 25 bp, Homo sapien
gctgctcgggtcctagctggaattc

SEQ ID NO: 396038 - DNA, 25 bp, Homo sapien
taatgtgaatggttactgctggcgg

SEQ ID NO: 396039 - DNA, 25 bp, Homo sapien
gtcggaaggtcacgcagggacagag

SEQ ID NO: 396040 - DNA, 25 bp, Homo sapien
gcggtgaggacagcggggtcggaag

SEQ ID NO: 396041 - DNA, 25 bp, Homo sapien
ggggtcggaaggtcacgcagggaca

SEQ ID NO: 396042 - DNA, 25 bp, Homo sapien
gggacagagcgtgcgcacccacccc

SEQ ID NO: 396043 - DNA, 25 bp, Homo sapien
cgtgaatgcagatgccgcagcgagc

SEQ ID NO: 396044 - DNA, 25 bp, Homo sapien
cagggacgtgaatgcagatgccgca

SEQ ID NO: 396045 - DNA, 25 bp, Homo sapien
ggacagggacgtgaatgcagatgcc

SEQ ID NO: 396046 - DNA, 25 bp, Homo sapien
gcagcgagcctcgaggccaccagga

SEQ ID NO: 396047 - DNA, 25 bp, Homo sapien
gagaacagcgaaggctgatctctgg

SEQ ID NO: 396048 - DNA, 25 bp, Homo sapien
ccttgggcagagaacagcgaaggct

SEQ ID NO: 396049 - DNA, 25 bp, Homo sapien
gcagagaacagcgaaggctgatctc

SEQ ID NO: 396050 - DNA, 25 bp, Homo sapien
gccgaccttgggcagagaacagcga

SEQ ID NO: 396051 - DNA, 25 bp, Homo sapien
tgaaggagccgacgtggggcggcgg

SEQ ID NO: 396052 - DNA, 25 bp, Homo sapien
tggggtgaaggagccgacgtggggc

SEQ ID NO: 396053 - DNA, 25 bp, Homo sapien
gtgaaggagccgacgtggggcggcg

SEQ ID NO: 396054 - DNA, 25 bp, Homo sapien
cttggggtgaaggagccgacgtggg

SEQ ID NO: 396055 - DNA, 25 bp, Homo sapien
ctgcgagaggagcgggagctgaccc

SEQ ID NO: 396056 - DNA, 25 bp, Homo sapien
gcgagaggagcgggagctgacccgg

SEQ ID NO: 396057 - DNA, 25 bp, Homo sapien
gaggagcgggagctgacccggggga

SEQ ID NO: 396058 - DNA, 25 bp, Homo sapien
gagaggagcgggagctgacccgggg

SEQ ID NO: 396059 - DNA, 25 bp, Homo sapien
gtggatctcggtcccatcgtagact

SEQ ID NO: 396060 - DNA, 25 bp, Homo sapien
gatctcggtcccatcgtagactccg

SEQ ID NO: 396061 - DNA, 25 bp, Homo sapien
tcgtggatctcggtcccatcgtaga

SEQ ID NO: 396062 - DNA, 25 bp, Homo sapien
tcgtagactccgcatccagacagca

SEQ ID NO: 396063 - DNA, 25 bp, Homo sapien
tgcagtcatttccagtagcacagga

SEQ ID NO: 396064 - DNA, 25 bp, Homo sapien
catttctaggctctaggtgacagca

SEQ ID NO: 396065 - DNA, 25 bp, Homo sapien
taggacccagaaataccacgcaact

SEQ ID NO: 396066 - DNA, 25 bp, Homo sapien
ggaattacttcccatgcgtcagaaa

SEQ ID NO: 396067 - DNA, 25 bp, Homo sapien
tctgagggacgtcaggagcaaagat

SEQ ID NO: 396068 - DNA, 25 bp, Homo sapien
gagcaaagatctggacttcagcccc

SEQ ID NO: 396069 - DNA, 25 bp, Homo sapien
cccttggtgtggtcaatcacgtgca

SEQ ID NO: 396070 - DNA, 25 bp, Homo sapien
gccttcggacggctgccccttggtg

SEQ ID NO: 396071 - DNA, 25 bp, Homo sapien
tgtgattttgccacgggcgatcctc

SEQ ID NO: 396072 - DNA, 25 bp, Homo sapien
agatggcagcatcatggttggctgc

SEQ ID NO: 396073 - DNA, 25 bp, Homo sapien
gcagcatcatggttggctgcactga

SEQ ID NO: 396074 - DNA, 25 bp, Homo sapien
tcctcgcagactcggtcaaaacatt

SEQ ID NO: 396075 - DNA, 25 bp, Homo sapien
tctgctccacatggaaagcggaaga

SEQ ID NO: 396076 - DNA, 25 bp, Homo sapien
ctgctccacatggaaagcggaagac

SEQ ID NO: 396077 - DNA, 25 bp, Homo sapien
catctgctccacatggaaagcggaa

SEQ ID NO: 396078 - DNA, 25 bp, Homo sapien
atctgctccacatggaaagcggaag

SEQ ID NO: 396079 - DNA, 25 bp, Homo sapien
gtgtgggcggcaccgacgaggcttg

SEQ ID NO: 396080 - DNA, 25 bp, Homo sapien
cggcaccgacgaggcttgctggctt

SEQ ID NO: 396081 - DNA, 25 bp, Homo sapien
ggctttcaggagaccggggacgaca

SEQ ID NO: 396082 - DNA, 25 bp, Homo sapien
accgacgaggcttgctggctttcag

SEQ ID NO: 396083 - DNA, 25 bp, Homo sapien
gacaaaagatcgagcctgacgtggg

SEQ ID NO: 396084 - DNA, 25 bp, Homo sapien
agacggcagcgacgcagggacaact

SEQ ID NO: 396085 - DNA, 25 bp, Homo sapien
cagagcctcgtggagacggcagcga

SEQ ID NO: 396086 - DNA, 25 bp, Homo sapien
ccacacacggtgtcagtggtcagag

SEQ ID NO: 396087 - DNA, 25 bp, Homo sapien
caagcactcttgcttcgatgaccgt

SEQ ID NO: 396088 - DNA, 25 bp, Homo sapien
ctcttgcttcgatgaccgtgaaaga

SEQ ID NO: 396089 - DNA, 25 bp, Homo sapien
tgaaagaaacgccagtttacctgcg

SEQ ID NO: 396090 - DNA, 25 bp, Homo sapien
tttacctgcgacaccagcatccaca

SEQ ID NO: 396091 - DNA, 25 bp, Homo sapien
ctttcccgtccacggcaaacgtgct

SEQ ID NO: 396092 - DNA, 25 bp, Homo sapien
caatctttcccgtccacggcaaacg

SEQ ID NO: 396093 - DNA, 25 bp, Homo sapien
atctttcccgtccacggcaaacgtg

SEQ ID NO: 396094 - DNA, 25 bp, Homo sapien
tgcaatctttcccgtccacggcaaa

SEQ ID NO: 396095 - DNA, 25 bp, Homo sapien
gggagccaagagaattccaggcctc

SEQ ID NO: 396096 - DNA, 25 bp, Homo sapien
tgagttttcaggatcagcggcagct

SEQ ID NO: 396097 - DNA, 25 bp, Homo sapien
tccaggcctcctctagggaagtgca

SEQ ID NO: 396098 - DNA, 25 bp, Homo sapien
cagtgacatcgtgtgaaatcccctc

SEQ ID NO: 396099 - DNA, 25 bp, Homo sapien
tctgagagtgacttcccggcagcag

SEQ ID NO: 396100 - DNA, 25 bp, Homo sapien
ctgagagtgacttcccggcagcaga

SEQ ID NO: 396101 - DNA, 25 bp, Homo sapien
ctgccagcaccagacgcagctgaga

SEQ ID NO: 396102 - DNA, 25 bp, Homo sapien
gatgttcacccacgcaagtgcggct

SEQ ID NO: 396103 - DNA, 25 bp, Homo sapien
cgggaggctcgtggaagcatcacac

SEQ ID NO: 396104 - DNA, 25 bp, Homo sapien
agctgagacctggacagcacagcgc

SEQ ID NO: 396105 - DNA, 25 bp, Homo sapien
gggagacagaggattccgatagatc

SEQ ID NO: 396106 - DNA, 25 bp, Homo sapien
ctcatccttgttcggctgacagaac

SEQ ID NO: 396107 - DNA, 25 bp, Homo sapien
gattccgatagatcctcatccttgt

SEQ ID NO: 396108 - DNA, 25 bp, Homo sapien
actcggtagtgagcggccatcgcga

SEQ ID NO: 396109 - DNA, 25 bp, Homo sapien
ccgaggtggagaccatgggcgaaac

SEQ ID NO: 396110 - DNA, 25 bp, Homo sapien
atgggcgaaaccttcaccccggctg

SEQ ID NO: 396111 - DNA, 25 bp, Homo sapien
tgtgacacggctgcagcagggacct

SEQ ID NO: 396112 - DNA, 25 bp, Homo sapien
cccggctgtgacacggctgcagcag

SEQ ID NO: 396113 - DNA, 25 bp, Homo sapien
ggctcctccctctgggcgctcatcc

SEQ ID NO: 396114 - DNA, 25 bp, Homo sapien
tttaatcagtcacagaagaaagggc

SEQ ID NO: 396115 - DNA, 25 bp, Homo sapien
tttcatcgagatttttaatcagtca

SEQ ID NO: 396116 - DNA, 25 bp, Homo sapien
aagaaagggccatgggctcctccct

SEQ ID NO: 396117 - DNA, 25 bp, Homo sapien
gaacagaaattaccctcgccatgac

SEQ ID NO: 396118 - DNA, 25 bp, Homo sapien
agggtaatgatgtgcggctgcccca

SEQ ID NO: 396119 - DNA, 25 bp, Homo sapien
tgaaaggcgaaaagaacacgggtca

SEQ ID NO: 396120 - DNA, 25 bp, Homo sapien
ttcagtgacctgtgtcgtccagcgc

SEQ ID NO: 396121 - DNA, 25 bp, Homo sapien
cacctcgacgcctctgagcaccttg

SEQ ID NO: 396122 - DNA, 25 bp, Homo sapien
ccttggccgcgaggacaggtgcaat

SEQ ID NO: 396123 - DNA, 25 bp, Homo sapien
tgcggtcccggcataaggccacttg

SEQ ID NO: 396124 - DNA, 25 bp, Homo sapien
acagtcacctcgacgcctctgagca

SEQ ID NO: 396125 - DNA, 25 bp, Homo sapien
tggccgtgaaggagccggtcctcat

SEQ ID NO: 396126 - DNA, 25 bp, Homo sapien
tcagatgaagaactggccgtgaagg

SEQ ID NO: 396127 - DNA, 25 bp, Homo sapien
atggggcagggcaacaggcaacagg

SEQ ID NO: 396128 - DNA, 25 bp, Homo sapien
aactggccgtgaaggagccggtcct

SEQ ID NO: 396129 - DNA, 25 bp, Homo sapien
gaaggaacctgttcccaattcacat

SEQ ID NO: 396130 - DNA, 25 bp, Homo sapien
aggaacctgttcccaattcacatgc

SEQ ID NO: 396131 - DNA, 25 bp, Homo sapien
aaggaacctgttcccaattcacatg

SEQ ID NO: 396132 - DNA, 25 bp, Homo sapien
ggcaggaccctgctttctgtatgat

SEQ ID NO: 396133 - DNA, 25 bp, Homo sapien
gttctcagataacttggaagaggag

SEQ ID NO: 396134 - DNA, 25 bp, Homo sapien
gaggagaactcgctcctggtgcagt

SEQ ID NO: 396135 - DNA, 25 bp, Homo sapien
agtctgtgccggcaggaccctgctt

SEQ ID NO: 396136 - DNA, 25 bp, Homo sapien
tcaggtgtggagccccggcccctcc

SEQ ID NO: 396137 - DNA, 25 bp, Homo sapien
ttcaggtgtggagccccggcccctc

SEQ ID NO: 396138 - DNA, 25 bp, Homo sapien
gtgtgcagagttacggaaaaagcca

SEQ ID NO: 396139 - DNA, 25 bp, Homo sapien
gtgcagagttacggaaaaagccacc

SEQ ID NO: 396140 - DNA, 25 bp, Homo sapien
tgtgcagagttacggaaaaagccac

SEQ ID NO: 396141 - DNA, 25 bp, Homo sapien
tgcagagttacggaaaaagccaccc

SEQ ID NO: 396142 - DNA, 25 bp, Homo sapien
gatgtagtggagtgccgtctcgcac

SEQ ID NO: 396143 - DNA, 25 bp, Homo sapien
catggctccgatcccatcatggatg

SEQ ID NO: 396144 - DNA, 25 bp, Homo sapien
tccgatcccatcatggatgtagtgg

SEQ ID NO: 396145 - DNA, 25 bp, Homo sapien
cccatcatggatgtagtggagtgcc

SEQ ID NO: 396146 - DNA, 25 bp, Homo sapien
tttccagtgagttccagcaccttcc

SEQ ID NO: 396147 - DNA, 25 bp, Homo sapien
tccagtgagttccagcaccttcctc

SEQ ID NO: 396148 - DNA, 25 bp, Homo sapien
cagtgagttccagcaccttcctcac

SEQ ID NO: 396149 - DNA, 25 bp, Homo sapien
ttccagtgagttccagcaccttcct

SEQ ID NO: 396150 - DNA, 25 bp, Homo sapien
tcctgatcaggaggcttgcaaacct

SEQ ID NO: 396151 - DNA, 25 bp, Homo sapien
tattctctgcggctacagggattgc

SEQ ID NO: 396152 - DNA, 25 bp, Homo sapien
ggcctctgtatgtgagagcagccca

SEQ ID NO: 396153 - DNA, 25 bp, Homo sapien
gaacgcctgcaggtttcggcaaaga

SEQ ID NO: 396154 - DNA, 25 bp, Homo sapien
ccttcggacgcatctgcaagcttct

SEQ ID NO: 396155 - DNA, 25 bp, Homo sapien
tatttcccttcggacgcatctgcaa

SEQ ID NO: 396156 - DNA, 25 bp, Homo sapien
actttatttcccttcggacgcatct

SEQ ID NO: 396157 - DNA, 25 bp, Homo sapien
gcctggcaccaacgctaccatcact

SEQ ID NO: 396158 - DNA, 25 bp, Homo sapien
tagtgggagcaacagggccctggaa

SEQ ID NO: 396159 - DNA, 25 bp, Homo sapien
tcagaagaagtagtgggagcaacag

SEQ ID NO: 396160 - DNA, 25 bp, Homo sapien
gtgggagcaacagggccctggaagg

SEQ ID NO: 396161 - DNA, 25 bp, Homo sapien
aagtagtgggagcaacagggccctg

SEQ ID NO: 396162 - DNA, 25 bp, Homo sapien
atcccggagagccaccacgaagtat

SEQ ID NO: 396163 - DNA, 25 bp, Homo sapien
gagccaccacgaagtatcccaaagt

SEQ ID NO: 396164 - DNA, 25 bp, Homo sapien
aggaggcacacgtaggctgaagcat

SEQ ID NO: 396165 - DNA, 25 bp, Homo sapien
cacacgtaggctgaagcatccagga

SEQ ID NO: 396166 - DNA, 25 bp, Homo sapien
tgagctacagcgtctaacgttcaag

SEQ ID NO: 396167 - DNA, 25 bp, Homo sapien
tgagaccaagggatcagagcttcgg

SEQ ID NO: 396168 - DNA, 25 bp, Homo sapien
tggagcccctgatgcagcttcactg

SEQ ID NO: 396169 - DNA, 25 bp, Homo sapien
gagaagtcatggctgtgaatcccac

SEQ ID NO: 396170 - DNA, 25 bp, Homo sapien
atcataagaggtgtggcgttttgcc

SEQ ID NO: 396171 - DNA, 25 bp, Homo sapien
tttctcgtgtactgaaaagcggtgt

SEQ ID NO: 396172 - DNA, 25 bp, Homo sapien
gtttctcgtgtactgaaaggtggcg

SEQ ID NO: 396173 - DNA, 25 bp, Homo sapien
ccattggaacctgggcatacggtca

SEQ ID NO: 396174 - DNA, 25 bp, Homo sapien
ggactcgggtcaggagaatattccc

SEQ ID NO: 396175 - DNA, 25 bp, Homo sapien
agggccacaaatcacctgtcctggg

SEQ ID NO: 396176 - DNA, 25 bp, Homo sapien
gacaagaaacctgtggtcgccagac

SEQ ID NO: 396177 - DNA, 25 bp, Homo sapien
ccagatgaaaatgccggctgggcat

SEQ ID NO: 396178 - DNA, 25 bp, Homo sapien
cataatgtgtaagggagcttcaccc

SEQ ID NO: 396179 - DNA, 25 bp, Homo sapien
tagctttgcgaggaatcaccagacc

SEQ ID NO: 396180 - DNA, 25 bp, Homo sapien
tctggctgcacaatactccgtcgtg

SEQ ID NO: 396181 - DNA, 25 bp, Homo sapien
tgttgatctgttcctcggtccacgg

SEQ ID NO: 396182 - DNA, 25 bp, Homo sapien
gctctcttggtacagcgctagtctg

SEQ ID NO: 396183 - DNA, 25 bp, Homo sapien
tggagtgggcccattcccatggtgt

SEQ ID NO: 396184 - DNA, 25 bp, Homo sapien
ggcccattcccatggtgtaaacacc

SEQ ID NO: 396185 - DNA, 25 bp, Homo sapien
ttggtacagcgctagtctgtggagt

SEQ ID NO: 396186 - DNA, 25 bp, Homo sapien
ctagtttgggctccacaaaaggcct

SEQ ID NO: 396187 - DNA, 25 bp, Homo sapien
aaggcaggtttctccggcaagaacg

SEQ ID NO: 396188 - DNA, 25 bp, Homo sapien
cagctgaagacaagatggctcaggc

SEQ ID NO: 396189 - DNA, 25 bp, Homo sapien
ggagattgctctcttcacgttagtg

SEQ ID NO: 396190 - DNA, 25 bp, Homo sapien
gtggccacagaggtctccgctagtt

SEQ ID NO: 396191 - DNA, 25 bp, Homo sapien
cagccgcatttgtcgtgcatgtctg

SEQ ID NO: 396192 - DNA, 25 bp, Homo sapien
tccgctagttgaggccggcatggct

SEQ ID NO: 396193 - DNA, 25 bp, Homo sapien
tctgtgtggatatggctcctccagg

SEQ ID NO: 396194 - DNA, 25 bp, Homo sapien
aatagctgtagtttccaacggttgc

SEQ ID NO: 396195 - DNA, 25 bp, Homo sapien
tgactagtcagtggcttcagcaaca

SEQ ID NO: 396196 - DNA, 25 bp, Homo sapien
taccatttctaggatccgctgcacc

SEQ ID NO: 396197 - DNA, 25 bp, Homo sapien
caacggttgcagtagctgactagtc

SEQ ID NO: 396198 - DNA, 25 bp, Homo sapien
cagaaaccggtaagatgtgccagcc

SEQ ID NO: 396199 - DNA, 25 bp, Homo sapien
gaaaccgcagatgtttgtcctcgca

SEQ ID NO: 396200 - DNA, 25 bp, Homo sapien
caaaggcacctgtgtacgcggagta

SEQ ID NO: 396201 - DNA, 25 bp, Homo sapien
tacgcttcacatacgaggactggct

SEQ ID NO: 396202 - DNA, 25 bp, Homo sapien
tacctctggaatagcgattgccatg

SEQ ID NO: 396203 - DNA, 25 bp, Homo sapien
gcatggcaggcgataccggacccca

SEQ ID NO: 396204 - DNA, 25 bp, Homo sapien
gccatgattgatgtcagtagcctgg

SEQ ID NO: 396205 - DNA, 25 bp, Homo sapien
ggaaacgtggtcagatgtgacctct

SEQ ID NO: 396206 - DNA, 25 bp, Homo sapien
ctcctgatgccttgggcaggccatg

SEQ ID NO: 396207 - DNA, 25 bp, Homo sapien
tatctgccagcgacccatgattgtt

SEQ ID NO: 396208 - DNA, 25 bp, Homo sapien
tctgtgtcattttgcccggatcctg

SEQ ID NO: 396209 - DNA, 25 bp, Homo sapien
ctgtgtgggcgcatggcttatctgc

SEQ ID NO: 396210 - DNA, 25 bp, Homo sapien
ggagttctcagcttggacccttatc

SEQ ID NO: 396211 - DNA, 25 bp, Homo sapien
aagggagagagttcatattgcaatc

SEQ ID NO: 396212 - DNA, 25 bp, Homo sapien
cctggggtgatgagggcccttccca

SEQ ID NO: 396213 - DNA, 25 bp, Homo sapien
ggctgtctgcatacagacttctcag

SEQ ID NO: 396214 - DNA, 25 bp, Homo sapien
cggtggggatccgagcctcagccca

SEQ ID NO: 396215 - DNA, 25 bp, Homo sapien
tccacggcgttctctacatcttggt

SEQ ID NO: 396216 - DNA, 25 bp, Homo sapien
tcctccatgcgcaggaggcggtggg

SEQ ID NO: 396217 - DNA, 25 bp, Homo sapien
tgccctgtctagcagcctcacccag

SEQ ID NO: 396218 - DNA, 25 bp, Homo sapien
cttgctggggtctccggcgtctgcc

SEQ ID NO: 396219 - DNA, 25 bp, Homo sapien
tggggtctccggcgtctgcccggga

SEQ ID NO: 396220 - DNA, 25 bp, Homo sapien
ttgctggggtctccggcgtctgccc

SEQ ID NO: 396221 - DNA, 25 bp, Homo sapien
tctccggcgtctgcccgggaagcag

SEQ ID NO: 396222 - DNA, 25 bp, Homo sapien
aatacgattcctgcttggttcccag

SEQ ID NO: 396223 - DNA, 25 bp, Homo sapien
caaacgcaggttgctgtgccagacc

SEQ ID NO: 396224 - DNA, 25 bp, Homo sapien
cggcccaagaaacagtcacggttga

SEQ ID NO: 396225 - DNA, 25 bp, Homo sapien
caatgtatgactgttccccgaagag

SEQ ID NO: 396226 - DNA, 25 bp, Homo sapien
gacagggtctagctagtcccccagg

SEQ ID NO: 396227 - DNA, 25 bp, Homo sapien
ctgtatcatgatcccatgctcagct

SEQ ID NO: 396228 - DNA, 25 bp, Homo sapien
gaattttatacacaggacctgtatc

SEQ ID NO: 396229 - DNA, 25 bp, Homo sapien
tgtgcccgacctgccaagtatttga

SEQ ID NO: 396230 - DNA, 25 bp, Homo sapien
ccatcacgctggctcatgggacggg

SEQ ID NO: 396231 - DNA, 25 bp, Homo sapien
cacaggaccacacgtggtggtgcgc

SEQ ID NO: 396232 - DNA, 25 bp, Homo sapien
cgttccgttgggttctggagactca

SEQ ID NO: 396233 - DNA, 25 bp, Homo sapien
ggtggtgcgcgatgtacttcctgaa

SEQ ID NO: 396234 - DNA, 25 bp, Homo sapien
ttcgtggacaatctggtgctgaaca

SEQ ID NO: 396235 - DNA, 25 bp, Homo sapien
tctggatgttcgtggacaatctggt

SEQ ID NO: 396236 - DNA, 25 bp, Homo sapien
ggctcctgcagtacgcacggcccaa

SEQ ID NO: 396237 - DNA, 25 bp, Homo sapien
cttcttctggatgttcgtggacaat

SEQ ID NO: 396238 - DNA, 25 bp, Homo sapien
agcaacagagtaagagtccccatca

SEQ ID NO: 396239 - DNA, 25 bp, Homo sapien
taagttgcacgcattcagtgtgtcc

SEQ ID NO: 396240 - DNA, 25 bp, Homo sapien
aaaggcggtatttgtgccgcggcac

SEQ ID NO: 396241 - DNA, 25 bp, Homo sapien
ctggagcttcctctaaaaggcggta

SEQ ID NO: 396242 - DNA, 25 bp, Homo sapien
gcagcctcgggagcaaacactcttt

SEQ ID NO: 396243 - DNA, 25 bp, Homo sapien
tcctgggttcctctccgatagtggc

SEQ ID NO: 396244 - DNA, 25 bp, Homo sapien
tgggccctcaatgcagcgactagtg

SEQ ID NO: 396245 - DNA, 25 bp, Homo sapien
tcaaagtccagtcctcaggagcaag

SEQ ID NO: 396246 - DNA, 25 bp, Homo sapien
cctcgcttggcctcgggtcccggcg

SEQ ID NO: 396247 - DNA, 25 bp, Homo sapien
ctcagaagccggcgtagcgccgcgt

SEQ ID NO: 396248 - DNA, 25 bp, Homo sapien
gaagccggcgtagcgccgcgtccgt

SEQ ID NO: 396249 - DNA, 25 bp, Homo sapien
cggcgtagcgccgcgtccgtcgcca

SEQ ID NO: 396250 - DNA, 25 bp, Homo sapien
ggcgtagcgccgcgtccgtcgccat

SEQ ID NO: 396251 - DNA, 25 bp, Homo sapien
tcgtggtcagccagcgcgtgcagca

SEQ ID NO: 396252 - DNA, 25 bp, Homo sapien
agtgggaaggcgctgtccacggcca

SEQ ID NO: 396253 - DNA, 25 bp, Homo sapien
tgtccacggccaccgcgatctccgt

SEQ ID NO: 396254 - DNA, 25 bp, Homo sapien
ccaccgcgatctccgtgcggtgcag

SEQ ID NO: 396255 - DNA, 25 bp, Homo sapien
ccggccatagcgctccaggttgtag

SEQ ID NO: 396256 - DNA, 25 bp, Homo sapien
ccttttccttcagatgaagcgtctc

SEQ ID NO: 396257 - DNA, 25 bp, Homo sapien
catagcgctccaggttgtagtcctt

SEQ ID NO: 396258 - DNA, 25 bp, Homo sapien
aggatgggctgcagccggccatagc

SEQ ID NO: 396259 - DNA, 25 bp, Homo sapien
tctgggtggcggtaccaaagccttg

SEQ ID NO: 396260 - DNA, 25 bp, Homo sapien
ctgctggcgcggcagctcgagcctc

SEQ ID NO: 396261 - DNA, 25 bp, Homo sapien
tggcgcggcagctcgagcctcttct

SEQ ID NO: 396262 - DNA, 25 bp, Homo sapien
agtctgggtggcggtaccaaagcct

SEQ ID NO: 396263 - DNA, 25 bp, Homo sapien
ctgcgctgctctccggcttcttggg

SEQ ID NO: 396264 - DNA, 25 bp, Homo sapien
ctctgcgctgctctccggcttcttg

SEQ ID NO: 396265 - DNA, 25 bp, Homo sapien
cgctgctctccggcttcttgggggg

SEQ ID NO: 396266 - DNA, 25 bp, Homo sapien
tgcgctgctctccggcttcttgggg

SEQ ID NO: 396267 - DNA, 25 bp, Homo sapien
ctctctggactgaagctgacatggt

SEQ ID NO: 396268 - DNA, 25 bp, Homo sapien
ggacgtccccggaggacatggccac

SEQ ID NO: 396269 - DNA, 25 bp, Homo sapien
ggaggacatggccacagctctctgg

SEQ ID NO: 396270 - DNA, 25 bp, Homo sapien
acctgctggatgaggatcccctcca

SEQ ID NO: 396271 - DNA, 25 bp, Homo sapien
ttcccactgccggagtcttcgaact

SEQ ID NO: 396272 - DNA, 25 bp, Homo sapien
tcccttggctcgaaccagaggcttc

SEQ ID NO: 396273 - DNA, 25 bp, Homo sapien
acttgctgggagtgtagaactcccc

SEQ ID NO: 396274 - DNA, 25 bp, Homo sapien
gagtgtagaactccccgccaacctg

SEQ ID NO: 396275 - DNA, 25 bp, Homo sapien
tgctggcccagcctagcctcacctc

SEQ ID NO: 396276 - DNA, 25 bp, Homo sapien
ctgctggcccagcctagcctcacct

SEQ ID NO: 396277 - DNA, 25 bp, Homo sapien
cctgctggcccagcctagcctcacc

SEQ ID NO: 396278 - DNA, 25 bp, Homo sapien
ccctgctggcccagcctagcctcac

SEQ ID NO: 396279 - DNA, 25 bp, Homo sapien
gcctggaccaaacgccatgctctta

SEQ ID NO: 396280 - DNA, 25 bp, Homo sapien
ctaccccattaagaaaccatgctgg

SEQ ID NO: 396281 - DNA, 25 bp, Homo sapien
tgagcatggcattcccagtggatcc

SEQ ID NO: 396282 - DNA, 25 bp, Homo sapien
cagctgagagcagcgggtacagcct

SEQ ID NO: 396283 - DNA, 25 bp, Homo sapien
gaacccttcctcacagggcagtggg

SEQ ID NO: 396284 - DNA, 25 bp, Homo sapien
cccttcctcacagggcagtggggcc

SEQ ID NO: 396285 - DNA, 25 bp, Homo sapien
ccaggcccagggaggtctctcccga

SEQ ID NO: 396286 - DNA, 25 bp, Homo sapien
caggcccagggaggtctctcccgac

SEQ ID NO: 396287 - DNA, 25 bp, Homo sapien
acaggcaagagacgcccatgcagac

SEQ ID NO: 396288 - DNA, 25 bp, Homo sapien
ccccggaactgtacaccaaccacat

SEQ ID NO: 396289 - DNA, 25 bp, Homo sapien
aaacccggtttcttgcaggctgctg

SEQ ID NO: 396290 - DNA, 25 bp, Homo sapien
ctggcacaggcaagagacgcccatg

SEQ ID NO: 396291 - DNA, 25 bp, Homo sapien
acacggcacactcgtcctcattctt

SEQ ID NO: 396292 - DNA, 25 bp, Homo sapien
cccgccgtcccgacacacggcacac

SEQ ID NO: 396293 - DNA, 25 bp, Homo sapien
gacacacggcacactcgtcctcatt

SEQ ID NO: 396294 - DNA, 25 bp, Homo sapien
agctccccgccgtcccgacacacgg

SEQ ID NO: 396295 - DNA, 25 bp, Homo sapien
tcctggactgttgcctgcaggcagc

SEQ ID NO: 396296 - DNA, 25 bp, Homo sapien
cggggtctccacgggtggctcctgg

SEQ ID NO: 396297 - DNA, 25 bp, Homo sapien
cctcctggactgttgcctgcaggca

SEQ ID NO: 396298 - DNA, 25 bp, Homo sapien
tgcacctcctggactgttgcctgca

SEQ ID NO: 396299 - DNA, 25 bp, Homo sapien
ccatgccggctaggggttccccagg

SEQ ID NO: 396300 - DNA, 25 bp, Homo sapien
tgcttgtagacaagagtcgtgtcca

SEQ ID NO: 396301 - DNA, 25 bp, Homo sapien
agccggcaggtgcttgtagacaaga

SEQ ID NO: 396302 - DNA, 25 bp, Homo sapien
aagagtcgtgtccatgccggctagg

SEQ ID NO: 396303 - DNA, 25 bp, Homo sapien
gggtgcagggccgaggagtccagcc

SEQ ID NO: 396304 - DNA, 25 bp, Homo sapien
gtagggggtgcagggccgaggagtc

SEQ ID NO: 396305 - DNA, 25 bp, Homo sapien
tgcagggccgaggagtccagccctg

SEQ ID NO: 396306 - DNA, 25 bp, Homo sapien
acacagtagggggtgcagggccgag

SEQ ID NO: 396307 - DNA, 25 bp, Homo sapien
cagtggaaggcagcggcgcagtgag

SEQ ID NO: 396308 - DNA, 25 bp, Homo sapien
gcgcagtgagtacaccgcagcacgt

SEQ ID NO: 396309 - DNA, 25 bp, Homo sapien
ctgggaagtggcagcgccagtggaa

SEQ ID NO: 396310 - DNA, 25 bp, Homo sapien
gcagcacgtccgtaccatctccgca

SEQ ID NO: 396311 - DNA, 25 bp, Homo sapien
agcaggatctgcagcgcaggcccgt

SEQ ID NO: 396312 - DNA, 25 bp, Homo sapien
tcacgtctcctgagcaggatctgca

SEQ ID NO: 396313 - DNA, 25 bp, Homo sapien
cgtctcctgagcaggatctgcagcg

SEQ ID NO: 396314 - DNA, 25 bp, Homo sapien
tcctgagcaggatctgcagcgcagg

SEQ ID NO: 396315 - DNA, 25 bp, Homo sapien
cttggcaggcccaggggccaggcgg

SEQ ID NO: 396316 - DNA, 25 bp, Homo sapien
gggccagcaccccctccacaggggc

SEQ ID NO: 396317 - DNA, 25 bp, Homo sapien
cccaggggccaggcgggcggggctg

SEQ ID NO: 396318 - DNA, 25 bp, Homo sapien
cagcaccccctccacaggggctggg

SEQ ID NO: 396319 - DNA, 25 bp, Homo sapien
gctcagaagggactccaggtcatcc

SEQ ID NO: 396320 - DNA, 25 bp, Homo sapien
tcgctcagaagggactccaggtcat

SEQ ID NO: 396321 - DNA, 25 bp, Homo sapien
cgctcagaagggactccaggtcatc

SEQ ID NO: 396322 - DNA, 25 bp, Homo sapien
ctcgctcagaagggactccaggtca

SEQ ID NO: 396323 - DNA, 25 bp, Homo sapien
tgctctggatggcccactgcaggat

SEQ ID NO: 396324 - DNA, 25 bp, Homo sapien
actgcaggatgccatcgaaggtgtg

SEQ ID NO: 396325 - DNA, 25 bp, Homo sapien
gggccatgctctggatggcccactg

SEQ ID NO: 396326 - DNA, 25 bp, Homo sapien
ggcccactgcaggatgccatcgaag

SEQ ID NO: 396327 - DNA, 25 bp, Homo sapien
catgatggctggtgtccccagaaac

SEQ ID NO: 396328 - DNA, 25 bp, Homo sapien
gggcagggtttaatttccaggcaca

SEQ ID NO: 396329 - DNA, 25 bp, Homo sapien
cactgacaagaggtggcgctgtccc

SEQ ID NO: 396330 - DNA, 25 bp, Homo sapien
ttagtaggtcaccaggcaaggagag

SEQ ID NO: 396331 - DNA, 25 bp, Homo sapien
gaaagcatagatgaacacaatgcag

SEQ ID NO: 396332 - DNA, 25 bp, Homo sapien
aaaaggtggaagcacccaggtgtct

SEQ ID NO: 396333 - DNA, 25 bp, Homo sapien
aaaaggaagcagatttcggcacatg

SEQ ID NO: 396334 - DNA, 25 bp, Homo sapien
ggccagagtttccattcaggaagct

SEQ ID NO: 396335 - DNA, 25 bp, Homo sapien
gagcgaaacccaaacgaggcgctgg

SEQ ID NO: 396336 - DNA, 25 bp, Homo sapien
ttcggtttgtgaaagctcagcgggc

SEQ ID NO: 396337 - DNA, 25 bp, Homo sapien
cagcgggctgatcgctaggatttga

SEQ ID NO: 396338 - DNA, 25 bp, Homo sapien
cggaggttccttgctgtcggccgca

SEQ ID NO: 396339 - DNA, 25 bp, Homo sapien
ggcggccgaaacacgggcccagctc

SEQ ID NO: 396340 - DNA, 25 bp, Homo sapien
cggcggccgaaacacgggcccagct

SEQ ID NO: 396341 - DNA, 25 bp, Homo sapien
cgctggtcaggacgccgatggcctt

SEQ ID NO: 396342 - DNA, 25 bp, Homo sapien
ttgcccgcgcccgacgcccgcagct

SEQ ID NO: 396343 - DNA, 25 bp, Homo sapien
ccgccgctggtcaggacgccgatgg

SEQ ID NO: 396344 - DNA, 25 bp, Homo sapien
gtcaggacgccgatggccttgcccg

SEQ ID NO: 396345 - DNA, 25 bp, Homo sapien
tcttgccacagctgtgaaaagggcg

SEQ ID NO: 396346 - DNA, 25 bp, Homo sapien
aggacactgccagtagccggcaaca

SEQ ID NO: 396347 - DNA, 25 bp, Homo sapien
tgaactctaaaagacagaccagacc

SEQ ID NO: 396348 - DNA, 25 bp, Homo sapien
gtgtgtgtccgcattttctcaacca

SEQ ID NO: 396349 - DNA, 25 bp, Homo sapien
ggagctcacatacagagacgctgca

SEQ ID NO: 396350 - DNA, 25 bp, Homo sapien
tgttccctgtccacgcatgggagct

SEQ ID NO: 396351 - DNA, 25 bp, Homo sapien
tgcccactccatatcaggcactggg

SEQ ID NO: 396352 - DNA, 25 bp, Homo sapien
cccaactgggatgccatgatcggcc

SEQ ID NO: 396353 - DNA, 25 bp, Homo sapien
tacatccaacaaacgcagacttcag

SEQ ID NO: 396354 - DNA, 25 bp, Homo sapien
cctgctgcccggctgacatagaggg

SEQ ID NO: 396355 - DNA, 25 bp, Homo sapien
gaggctggctgttccatacatccaa

SEQ ID NO: 396356 - DNA, 25 bp, Homo sapien
gcaaggtggcctgtcttgtccccaa

SEQ ID NO: 396357 - DNA, 25 bp, Homo sapien
tgcaacctgcacctcctggttcaag

SEQ ID NO: 396358 - DNA, 25 bp, Homo sapien
tcttgtttgttttttgcaacagagt

SEQ ID NO: 396359 - DNA, 25 bp, Homo sapien
caacctgcacctcctggttcaagcg

SEQ ID NO: 396360 - DNA, 25 bp, Homo sapien
tttcttgtttgttttttgcaacaga

SEQ ID NO: 396361 - DNA, 25 bp, Homo sapien
ctgcgataacaggaaaccaacgtcc

SEQ ID NO: 396362 - DNA, 25 bp, Homo sapien
tgcgataacaggaaaccaacgtcca

SEQ ID NO: 396363 - DNA, 25 bp, Homo sapien
gcgataacaggaaaccaacgtccaa

SEQ ID NO: 396364 - DNA, 25 bp, Homo sapien
gaaaccaacgtccaaacacaccagc

SEQ ID NO: 396365 - DNA, 25 bp, Homo sapien
tcaatgtgccactgggcgggtcagc

SEQ ID NO: 396366 - DNA, 25 bp, Homo sapien
tccaggcggagtcaatgtgccactg

SEQ ID NO: 396367 - DNA, 25 bp, Homo sapien
ccaggccaccgtccaaccacagggc

SEQ ID NO: 396368 - DNA, 25 bp, Homo sapien
cagctccaggcggagtcaatgtgcc

SEQ ID NO: 396369 - DNA, 25 bp, Homo sapien
ttgagaaaccccagggatcggcaca

SEQ ID NO: 396370 - DNA, 25 bp, Homo sapien
tcggcacactgttctcacgtagcag

SEQ ID NO: 396371 - DNA, 25 bp, Homo sapien
aaaccccagggatcggcacactgtt

SEQ ID NO: 396372 - DNA, 25 bp, Homo sapien
cccagggatcggcacactgttctca

SEQ ID NO: 396373 - DNA, 25 bp, Homo sapien
tctccagcttggcgtggggctcagc

SEQ ID NO: 396374 - DNA, 25 bp, Homo sapien
gagaggactctcgacctctaccctg

SEQ ID NO: 396375 - DNA, 25 bp, Homo sapien
cccacgagaggactctcgacctcta

SEQ ID NO: 396376 - DNA, 25 bp, Homo sapien
tcctgctcaagcctcggcagctccc

SEQ ID NO: 396377 - DNA, 25 bp, Homo sapien
ggactctcgacctctaccctggtta

SEQ ID NO: 396378 - DNA, 25 bp, Homo sapien
gaaagaaacagtctgtcccagcggg

SEQ ID NO: 396379 - DNA, 25 bp, Homo sapien
gaaacagtctgtcccagcgggggcc

SEQ ID NO: 396380 - DNA, 25 bp, Homo sapien
gtgaaagaaacagtctgtcccagcg

SEQ ID NO: 396381 - DNA, 25 bp, Homo sapien
acagtctgtcccagcgggggccttg

SEQ ID NO: 396382 - DNA, 25 bp, Homo sapien
acagcccggacagcagcgttcatgc

SEQ ID NO: 396383 - DNA, 25 bp, Homo sapien
tggcacccacataaatgcccatgcg

SEQ ID NO: 396384 - DNA, 25 bp, Homo sapien
gaagactttggcacccacataaatg

SEQ ID NO: 396385 - DNA, 25 bp, Homo sapien
atgcgcgtcacagcccggacagcag

SEQ ID NO: 396386 - DNA, 25 bp, Homo sapien
gaggcagtagggcatccgctgctcc

SEQ ID NO: 396387 - DNA, 25 bp, Homo sapien
gcagtagggcatccgctgctcctgc

SEQ ID NO: 396388 - DNA, 25 bp, Homo sapien
caggacggagggcgagccccaaatc

SEQ ID NO: 396389 - DNA, 25 bp, Homo sapien
gctgaggcagtagggcatccgctgc

SEQ ID NO: 396390 - DNA, 25 bp, Homo sapien
aaaggagtgtagacaggtaaaagag

SEQ ID NO: 396391 - DNA, 25 bp, Homo sapien
ctcttttacctgtctacactccttt

SEQ ID NO: 396392 - DNA, 25 bp, Homo sapien
cagccagttggcctgcttgatgttc

SEQ ID NO: 396393 - DNA, 25 bp, Homo sapien
ggatgatgttggagacgctcagcca

SEQ ID NO: 396394 - DNA, 25 bp, Homo sapien
acctccctccacgaggccctcatag

SEQ ID NO: 396395 - DNA, 25 bp, Homo sapien
tgttggagacgctcagccagttggc

SEQ ID NO: 396396 - DNA, 25 bp, Homo sapien
cgagtccaagtgcaacatgcatccg

SEQ ID NO: 396397 - DNA, 25 bp, Homo sapien
gtgtgtctgtctgcgagtccaagtg

SEQ ID NO: 396398 - DNA, 25 bp, Homo sapien
agtgcaacatgcatccgcgttccca

SEQ ID NO: 396399 - DNA, 25 bp, Homo sapien
tctgtctgcgagtccaagtgcaaca

SEQ ID NO: 396400 - DNA, 25 bp, Homo sapien
agcgagcgctgccaatgatagtgcc

SEQ ID NO: 396401 - DNA, 25 bp, Homo sapien
gagcgctgccaatgatagtgccgcc

SEQ ID NO: 396402 - DNA, 25 bp, Homo sapien
gtaaaggccttgcagcgagcgctgc

SEQ ID NO: 396403 - DNA, 25 bp, Homo sapien
taaaggccttgcagcgagcgctgcc

SEQ ID NO: 396404 - DNA, 25 bp, Homo sapien
cgtgctggaccaggttgtaggccgc

SEQ ID NO: 396405 - DNA, 25 bp, Homo sapien
tggaccaggttgtaggccgctgccc

SEQ ID NO: 396406 - DNA, 25 bp, Homo sapien
atgccgtgctggaccaggttgtagg

SEQ ID NO: 396407 - DNA, 25 bp, Homo sapien
tgctggaccaggttgtaggccgctg

SEQ ID NO: 396408 - DNA, 25 bp, Homo sapien
ctgcggaagatgttggcacctgtga

SEQ ID NO: 396409 - DNA, 25 bp, Homo sapien
aggctgccccactcgctgcggaaga

SEQ ID NO: 396410 - DNA, 25 bp, Homo sapien
atccccgccgatgacgcacaggttg

SEQ ID NO: 396411 - DNA, 25 bp, Homo sapien
tgccccactcgctgcggaagatgtt

SEQ ID NO: 396412 - DNA, 25 bp, Homo sapien
gcgatgttcaggtgcgagtaggtcc

SEQ ID NO: 396413 - DNA, 25 bp, Homo sapien
tcgttatcgatggagcccactaggc

SEQ ID NO: 396414 - DNA, 25 bp, Homo sapien
gtcggtgccgcagaagtcgttatcg

SEQ ID NO: 396415 - DNA, 25 bp, Homo sapien
tccatgatgcggtggagggccgagt

SEQ ID NO: 396416 - DNA, 25 bp, Homo sapien
gcagtgccggcccatcacttccagc

SEQ ID NO: 396417 - DNA, 25 bp, Homo sapien
cagtgccggcccatcacttccagca

SEQ ID NO: 396418 - DNA, 25 bp, Homo sapien
ccctgaggccagtgcagataccagc

SEQ ID NO: 396419 - DNA, 25 bp, Homo sapien
cagtgcagataccagcgccaggtac

SEQ ID NO: 396420 - DNA, 25 bp, Homo sapien
tcacacatgaagttctcccagccgt

SEQ ID NO: 396421 - DNA, 25 bp, Homo sapien
atgaacagccagtcggcccctgagg

SEQ ID NO: 396422 - DNA, 25 bp, Homo sapien
gtcagacacccggaagatgggctgc

SEQ ID NO: 396423 - DNA, 25 bp, Homo sapien
cacccggaagatgggctgcaggtcc

SEQ ID NO: 396424 - DNA, 25 bp, Homo sapien
ggtgaggtcagacacccggaagatg

SEQ ID NO: 396425 - DNA, 25 bp, Homo sapien
gcaaggcgggaacccgcatgttaca

SEQ ID NO: 396426 - DNA, 25 bp, Homo sapien
tctgagccacaagccccatgtttgc

SEQ ID NO: 396427 - DNA, 25 bp, Homo sapien
ctctgggaactgaaagagcttttcg

SEQ ID NO: 396428 - DNA, 25 bp, Homo sapien
aacatttgtgggactcgctctgagc

SEQ ID NO: 396429 - DNA, 25 bp, Homo sapien
ttttcggccgtccacttcaatgacc

SEQ ID NO: 396430 - DNA, 25 bp, Homo sapien
tccacactggtgcacataggacaca

SEQ ID NO: 396431 - DNA, 25 bp, Homo sapien
ccttccaggcgggaagacgcacagg

SEQ ID NO: 396432 - DNA, 25 bp, Homo sapien
atgaggctgggcccactaggacgcc

SEQ ID NO: 396433 - DNA, 25 bp, Homo sapien
gaacaagagggctctgcccgaaagc

SEQ ID NO: 396434 - DNA, 25 bp, Homo sapien
tgggtcaaagacacgacagggctca

SEQ ID NO: 396435 - DNA, 25 bp, Homo sapien
ctgggtcaaagacacgacagggctc

SEQ ID NO: 396436 - DNA, 25 bp, Homo sapien
gggtcaaagacacgacagggctcag

SEQ ID NO: 396437 - DNA, 25 bp, Homo sapien
gatgatgatgttcagtcgggaccca

SEQ ID NO: 396438 - DNA, 25 bp, Homo sapien
cgtagctggacgagatgggcttccc

SEQ ID NO: 396439 - DNA, 25 bp, Homo sapien
ttcccgttgcggtcaatggcaccct

SEQ ID NO: 396440 - DNA, 25 bp, Homo sapien
tccttcacgtagctggacgagatgg

SEQ ID NO: 396441 - DNA, 25 bp, Homo sapien
acagttacacgggtgtcgaagccca

SEQ ID NO: 396442 - DNA, 25 bp, Homo sapien
caggatccggtcgaaggcagagggc

SEQ ID NO: 396443 - DNA, 25 bp, Homo sapien
acgggtgtcgaagcccagcctctga

SEQ ID NO: 396444 - DNA, 25 bp, Homo sapien
gtccctccccgctgcacgtggccca

SEQ ID NO: 396445 - DNA, 25 bp, Homo sapien
cgtgttccacacaggttttttcatc

SEQ ID NO: 396446 - DNA, 25 bp, Homo sapien
ggcacaggcggcaccttattctggg

SEQ ID NO: 396447 - DNA, 25 bp, Homo sapien
tcatcttgcaagtgaggcacaggcg

SEQ ID NO: 396448 - DNA, 25 bp, Homo sapien
cagccctgtagaagcccagcagctg

SEQ ID NO: 396449 - DNA, 25 bp, Homo sapien
cctggtgtgtgtccgcaccggccaa

SEQ ID NO: 396450 - DNA, 25 bp, Homo sapien
ctgccatcgctaggcgcgcaaggca

SEQ ID NO: 396451 - DNA, 25 bp, Homo sapien
tgcgatggatcctcccgtggaggcc

SEQ ID NO: 396452 - DNA, 25 bp, Homo sapien
tcatgtcgtgacttccctggtgtgt

SEQ ID NO: 396453 - DNA, 25 bp, Homo sapien
agccgcactgactggttccccgaga

SEQ ID NO: 396454 - DNA, 25 bp, Homo sapien
agggtgaccacgcaggccggcgtgt

SEQ ID NO: 396455 - DNA, 25 bp, Homo sapien
cgtgtcaggcgtggcttccagcagc

SEQ ID NO: 396456 - DNA, 25 bp, Homo sapien
gactggttccccgagagggtgacca

SEQ ID NO: 396457 - DNA, 25 bp, Homo sapien
tggcctcgtcaaacctcttgtcatc

SEQ ID NO: 396458 - DNA, 25 bp, Homo sapien
tgggtggcctcgtcaaacctcttgt

SEQ ID NO: 396459 - DNA, 25 bp, Homo sapien
caccacggagctgggtggcctcgtc

SEQ ID NO: 396460 - DNA, 25 bp, Homo sapien
ccaccacggagctgggtggcctcgt

SEQ ID NO: 396461 - DNA, 25 bp, Homo sapien
ggacccagccatgtaagagtgcagg

SEQ ID NO: 396462 - DNA, 25 bp, Homo sapien
tcgatcttcagacgcggtgcctaga

SEQ ID NO: 396463 - DNA, 25 bp, Homo sapien
tgcctagaaggatgacccaggccag

SEQ ID NO: 396464 - DNA, 25 bp, Homo sapien
ccatgtcctgggcttgtatccacag

SEQ ID NO: 396465 - DNA, 25 bp, Homo sapien
aggcagggcaccttccacagaaggt

SEQ ID NO: 396466 - DNA, 25 bp, Homo sapien
ccggcatccagctcaagggagggtt

SEQ ID NO: 396467 - DNA, 25 bp, Homo sapien
ggcacacggcccgatggaagctcag

SEQ ID NO: 396468 - DNA, 25 bp, Homo sapien
tggaggcacgcatgggaacccagac

SEQ ID NO: 396469 - DNA, 25 bp, Homo sapien
tctggtgggcgaggagcttgtaaat

SEQ ID NO: 396470 - DNA, 25 bp, Homo sapien
ctggtgggcgaggagcttgtaaatg

SEQ ID NO: 396471 - DNA, 25 bp, Homo sapien
tggtgggcgaggagcttgtaaatgt

SEQ ID NO: 396472 - DNA, 25 bp, Homo sapien
ggtgggcgaggagcttgtaaatgtt

SEQ ID NO: 396473 - DNA, 25 bp, Homo sapien
gcagaataactgagcccgttcctcc

SEQ ID NO: 396474 - DNA, 25 bp, Homo sapien
tggccgtgactctctctacaggacc

SEQ ID NO: 396475 - DNA, 25 bp, Homo sapien
ccaaagatgtccatggaagggagga

SEQ ID NO: 396476 - DNA, 25 bp, Homo sapien
gagttaagcctgtggcctgacttca

SEQ ID NO: 396477 - DNA, 25 bp, Homo sapien
ttcgtggagaccaggttgccccacc

SEQ ID NO: 396478 - DNA, 25 bp, Homo sapien
cacggagggtagagcccgctgacta

SEQ ID NO: 396479 - DNA, 25 bp, Homo sapien
tgggtcctggtacgagccagccctg

SEQ ID NO: 396480 - DNA, 25 bp, Homo sapien
ccctgccaggttctgggttcgtgga

SEQ ID NO: 396481 - DNA, 25 bp, Homo sapien
aaaagagacacggtgcaagcctggc

SEQ ID NO: 396482 - DNA, 25 bp, Homo sapien
catccatgtgaatccagtgacggcc

SEQ ID NO: 396483 - DNA, 25 bp, Homo sapien
aactgccctgggaatacggtatctg

SEQ ID NO: 396484 - DNA, 25 bp, Homo sapien
cagttaatttaacctgatggaccca

SEQ ID NO: 396485 - DNA, 25 bp, Homo sapien
tccatgggagatgccggtccgcacc

SEQ ID NO: 396486 - DNA, 25 bp, Homo sapien
cacgtatactgtgtgtccatgggag

SEQ ID NO: 396487 - DNA, 25 bp, Homo sapien
tgacccttggctaggccttcgaagc

SEQ ID NO: 396488 - DNA, 25 bp, Homo sapien
cttcgaagccatcgtgcaccacgta

SEQ ID NO: 396489 - DNA, 25 bp, Homo sapien
acgtcgtgccagcctacttcttgca

SEQ ID NO: 396490 - DNA, 25 bp, Homo sapien
cagccggccacgtcgtgccagccta

SEQ ID NO: 396491 - DNA, 25 bp, Homo sapien
gccacgtcgtgccagcctacttctt

SEQ ID NO: 396492 - DNA, 25 bp, Homo sapien
ccggccacgtcgtgccagcctactt

SEQ ID NO: 396493 - DNA, 25 bp, Homo sapien
cagggcgtgaataccatagatgcgg

SEQ ID NO: 396494 - DNA, 25 bp, Homo sapien
accgaccaccagcagggcgtgaata

SEQ ID NO: 396495 - DNA, 25 bp, Homo sapien
gaataccatagatgcggatgttctc

SEQ ID NO: 396496 - DNA, 25 bp, Homo sapien
caccagcagggcgtgaataccatag

SEQ ID NO: 396497 - DNA, 25 bp, Homo sapien
gtgccaggacaccacgttcagcgat

SEQ ID NO: 396498 - DNA, 25 bp, Homo sapien
ctgctgacctgtcatgtgccccgtg

SEQ ID NO: 396499 - DNA, 25 bp, Homo sapien
agcctggtgtcatctcaggatgcct

SEQ ID NO: 396500 - DNA, 25 bp, Homo sapien
tcaggatgcctaccagggaaactgg

SEQ ID NO: 396501 - DNA, 25 bp, Homo sapien
tccatggcggcatttacagcagtgt

SEQ ID NO: 396502 - DNA, 25 bp, Homo sapien
aagtcggtgccagggacgttgttgc

SEQ ID NO: 396503 - DNA, 25 bp, Homo sapien
acgatgcagagctcctcgtagcgcc

SEQ ID NO: 396504 - DNA, 25 bp, Homo sapien
ggctgggatgacacacatgacgatg

SEQ ID NO: 396505 - DNA, 25 bp, Homo sapien
tgggcatggcaggccggtgtccagg

SEQ ID NO: 396506 - DNA, 25 bp, Homo sapien
ccttccctgtaggccgtcggcatgg

SEQ ID NO: 396507 - DNA, 25 bp, Homo sapien
ttccctgtaggccgtcggcatggct

SEQ ID NO: 396508 - DNA, 25 bp, Homo sapien
tccctgtaggccgtcggcatggcta

SEQ ID NO: 396509 - DNA, 25 bp, Homo sapien
cctgtaggccgtcggcatggctacc

SEQ ID NO: 396510 - DNA, 25 bp, Homo sapien
gcttggtccccgaggcagactgttt

SEQ ID NO: 396511 - DNA, 25 bp, Homo sapien
tcctcgaagacgtaggcggcgtcgg

SEQ ID NO: 396512 - DNA, 25 bp, Homo sapien
cagactgtttgatgcggtcacagct

SEQ ID NO: 396513 - DNA, 25 bp, Homo sapien
taagtcgtggatgttgaaagggtcc

SEQ ID NO: 396514 - DNA, 25 bp, Homo sapien
ctgtcttcatcttctccgtcatgtg

SEQ ID NO: 396515 - DNA, 25 bp, Homo sapien
tgtcttcatcttctccgtcatgtgc

SEQ ID NO: 396516 - DNA, 25 bp, Homo sapien
gctcccaggaaagccgccctggccc

SEQ ID NO: 396517 - DNA, 25 bp, Homo sapien
gcagcagggcctgagtcggcgggaa

SEQ ID NO: 396518 - DNA, 25 bp, Homo sapien
tcggcgggaacgagttcaggtctcc

SEQ ID NO: 396519 - DNA, 25 bp, Homo sapien
ccccgagagttggacgcgcagctgt

SEQ ID NO: 396520 - DNA, 25 bp, Homo sapien
ccctctgatgagtacaggttgtaca

SEQ ID NO: 396521 - DNA, 25 bp, Homo sapien
caggtggcccaggacattggtcctg

SEQ ID NO: 396522 - DNA, 25 bp, Homo sapien
tggtcctgcagtcgaagacgccctt

SEQ ID NO: 396523 - DNA, 25 bp, Homo sapien
caggaactccgtggtgtagtagtca

SEQ ID NO: 396524 - DNA, 25 bp, Homo sapien
gacctcacctagatacaggcctcgg

SEQ ID NO: 396525 - DNA, 25 bp, Homo sapien
tcagcatgtgaatgccctggctcgg

SEQ ID NO: 396526 - DNA, 25 bp, Homo sapien
gttcccgtctgttcccgatcgagga

SEQ ID NO: 396527 - DNA, 25 bp, Homo sapien
cagggccaccataaggcagggagca

SEQ ID NO: 396528 - DNA, 25 bp, Homo sapien
agcttctccgacaaccacagcatgg

SEQ ID NO: 396529 - DNA, 25 bp, Homo sapien
tgcggtaaacctcgcgcagcttctc

SEQ ID NO: 396530 - DNA, 25 bp, Homo sapien
gcttggtcccatagttccggtcaaa

SEQ ID NO: 396531 - DNA, 25 bp, Homo sapien
ccttgcggtaaacctcgcgcagctt

SEQ ID NO: 396532 - DNA, 25 bp, Homo sapien
ttcttcaggccgatcacgcaggccg

SEQ ID NO: 396533 - DNA, 25 bp, Homo sapien
ccgagtctggggcattggcgaacac

SEQ ID NO: 396534 - DNA, 25 bp, Homo sapien
tctttcttgagctcagtgacggggc

SEQ ID NO: 396535 - DNA, 25 bp, Homo sapien
gggctgaaggccaccgccttcttct

SEQ ID NO: 396536 - DNA, 25 bp, Homo sapien
atgcggtattgtgccagcatcttca

SEQ ID NO: 396537 - DNA, 25 bp, Homo sapien
ccctgacacgtaggcggccatactg

SEQ ID NO: 396538 - DNA, 25 bp, Homo sapien
accactgctcccgtggcatgcggtg

SEQ ID NO: 396539 - DNA, 25 bp, Homo sapien
ttgtccatgctcagggtgcggcggg

SEQ ID NO: 396540 - DNA, 25 bp, Homo sapien
cacagtcagggtgattttatttcta

SEQ ID NO: 396541 - DNA, 25 bp, Homo sapien
tctcaacacaacctaggcgccagca

SEQ ID NO: 396542 - DNA, 25 bp, Homo sapien
cagcctaccggccaggtagagcaag

SEQ ID NO: 396543 - DNA, 25 bp, Homo sapien
tagaaaaggtgacaggtgctgcacg

SEQ ID NO: 396544 - DNA, 25 bp, Homo sapien
gagacttcgagaatgctggcaccca

SEQ ID NO: 396545 - DNA, 25 bp, Homo sapien
tgcaggctgtcctccctaataaaag

SEQ ID NO: 396546 - DNA, 25 bp, Homo sapien
caaggcatggttgtgacagtcttcc

SEQ ID NO: 396547 - DNA, 25 bp, Homo sapien
tcagattctccgagtgtgccggtca

SEQ ID NO: 396548 - DNA, 25 bp, Homo sapien
gccaggtgggatttgtatgagcccc

SEQ ID NO: 396549 - DNA, 25 bp, Homo sapien
tatgagcccctcctttgcttggatg

SEQ ID NO: 396550 - DNA, 25 bp, Homo sapien
cccgcagacagggtttgcagaggcc

SEQ ID NO: 396551 - DNA, 25 bp, Homo sapien
caggtgaagtaagtgccgggctctc

SEQ ID NO: 396552 - DNA, 25 bp, Homo sapien
tgttttgcccaacagcggatgtgcc

SEQ ID NO: 396553 - DNA, 25 bp, Homo sapien
ttaggcatctgccatccggcacagg

SEQ ID NO: 396554 - DNA, 25 bp, Homo sapien
tgaggaaccggctgctactctggga

SEQ ID NO: 396555 - DNA, 25 bp, Homo sapien
tggcagcgggtcacgaacgcatttg

SEQ ID NO: 396556 - DNA, 25 bp, Homo sapien
tccacctattggaggcactcgtgcc

SEQ ID NO: 396557 - DNA, 25 bp, Homo sapien
gcttctgtgagtagcagccctgctc

SEQ ID NO: 396558 - DNA, 25 bp, Homo sapien
tgtcctgtgaagtctcctccagagg

SEQ ID NO: 396559 - DNA, 25 bp, Homo sapien
tatctggcaagcagcatcgcactgg

SEQ ID NO: 396560 - DNA, 25 bp, Homo sapien
tggaaagagtcccacagccggagtt

SEQ ID NO: 396561 - DNA, 25 bp, Homo sapien
taacatggaggtattacaagtgccc

SEQ ID NO: 396562 - DNA, 25 bp, Homo sapien
catttctgtcacatctcgggaggga

SEQ ID NO: 396563 - DNA, 25 bp, Homo sapien
tacctgacagggaaacgtggagctt

SEQ ID NO: 396564 - DNA, 25 bp, Homo sapien
gatgtaagtattgcactgatcatct

SEQ ID NO: 396565 - DNA, 25 bp, Homo sapien
gatgtaagtattgcctcacagatgt

SEQ ID NO: 396566 - DNA, 25 bp, Homo sapien
cacagatgtaagtattgcctcacag

SEQ ID NO: 396567 - DNA, 25 bp, Homo sapien
cacagatgtaagtattgcactgatc

SEQ ID NO: 396568 - DNA, 25 bp, Homo sapien
tagaatcgcgtcagagaagggcgcc

SEQ ID NO: 396569 - DNA, 25 bp, Homo sapien
cctctgctcgctgcgcgcttccggg

SEQ ID NO: 396570 - DNA, 25 bp, Homo sapien
ggtcgcgttagaatcgcgtcagaga

SEQ ID NO: 396571 - DNA, 25 bp, Homo sapien
gcgcttccggggtcgcgttagaatc

SEQ ID NO: 396572 - DNA, 25 bp, Homo sapien
aagcactgaccttaagttttgcaac

SEQ ID NO: 396573 - DNA, 25 bp, Homo sapien
aaatatttcaagcactgaccttaag

SEQ ID NO: 396574 - DNA, 25 bp, Homo sapien
aatatttcaagcactgaccttaagt

SEQ ID NO: 396575 - DNA, 25 bp, Homo sapien
atttcaagcactgaccttaagtttt

SEQ ID NO: 396576 - DNA, 25 bp, Homo sapien
ccagattatccgtttgggtggtgtc

SEQ ID NO: 396577 - DNA, 25 bp, Homo sapien
gtgggatcacacacatggttgagcc

SEQ ID NO: 396578 - DNA, 25 bp, Homo sapien
tccctgggtgggatcacacacatgg

SEQ ID NO: 396579 - DNA, 25 bp, Homo sapien
tggtcaggtcgaagattaaatcata

SEQ ID NO: 396580 - DNA, 25 bp, Homo sapien
gcgggctcctcagaggacactccag

SEQ ID NO: 396581 - DNA, 25 bp, Homo sapien
catggtcgctgtggcaggctttgcc

SEQ ID NO: 396582 - DNA, 25 bp, Homo sapien
ggcactggcacactctggtcctgag

SEQ ID NO: 396583 - DNA, 25 bp, Homo sapien
agccgtgggccattcggctgaccct

SEQ ID NO: 396584 - DNA, 25 bp, Homo sapien
tcatgtgaagccctcatccggttct

SEQ ID NO: 396585 - DNA, 25 bp, Homo sapien
cagctgccagcgacatggtttcgca

SEQ ID NO: 396586 - DNA, 25 bp, Homo sapien
taatggtaacaacctcaggtgactg

SEQ ID NO: 396587 - DNA, 25 bp, Homo sapien
cccagcggccgttcataatggtaac

SEQ ID NO: 396588 - DNA, 25 bp, Homo sapien
cttgtcattgttgccgaaggggcac

SEQ ID NO: 396589 - DNA, 25 bp, Homo sapien
tccccaggtcagtgacccttctggg

SEQ ID NO: 396590 - DNA, 25 bp, Homo sapien
ttgctgcgccggagattggagacca

SEQ ID NO: 396591 - DNA, 25 bp, Homo sapien
cgaaggggcactgtagcctccagct

SEQ ID NO: 396592 - DNA, 25 bp, Homo sapien
gttttcaggaatccacgaactgagg

SEQ ID NO: 396593 - DNA, 25 bp, Homo sapien
cagcatcagacagtttggaactttc

SEQ ID NO: 396594 - DNA, 25 bp, Homo sapien
gaatccacgaactgaggctttcttg

SEQ ID NO: 396595 - DNA, 25 bp, Homo sapien
ccagcatcagacagtttggaacttt

SEQ ID NO: 396596 - DNA, 25 bp, Homo sapien
caatgggtttgtgctgaacagctgc

SEQ ID NO: 396597 - DNA, 25 bp, Homo sapien
ctgactgctaggagtgctttgccgg

SEQ ID NO: 396598 - DNA, 25 bp, Homo sapien
tcggtgcagcagatctcaggttgcc

SEQ ID NO: 396599 - DNA, 25 bp, Homo sapien
ttctgtgcgggacagactcggtgca

SEQ ID NO: 396600 - DNA, 25 bp, Homo sapien
cgggtcacaacatcaagagttcgag

SEQ ID NO: 396601 - DNA, 25 bp, Homo sapien
ttttgctggtaacaaataacctaga

SEQ ID NO: 396602 - DNA, 25 bp, Homo sapien
taacctagaaaagttcagatgaggc

SEQ ID NO: 396603 - DNA, 25 bp, Homo sapien
gtgggcgggtcacaacatcaagagt

SEQ ID NO: 396604 - DNA, 25 bp, Homo sapien
tccaagtgctgctcatgcgtgtagc

SEQ ID NO: 396605 - DNA, 25 bp, Homo sapien
aaaggcatcggttggcatctcctgg

SEQ ID NO: 396606 - DNA, 25 bp, Homo sapien
catgcgtgtagccacactgacacac

SEQ ID NO: 396607 - DNA, 25 bp, Homo sapien
tggctcaggcccgtgaagacgatgt

SEQ ID NO: 396608 - DNA, 25 bp, Homo sapien
ccccggtcaccgagatcaagagatt

SEQ ID NO: 396609 - DNA, 25 bp, Homo sapien
cttgaccaggcctctgcggaaaatg

SEQ ID NO: 396610 - DNA, 25 bp, Homo sapien
tgggtcatgaggtggtagatcacgc

SEQ ID NO: 396611 - DNA, 25 bp, Homo sapien
ggaaaatgctcttcagccgcggctt

SEQ ID NO: 396612 - DNA, 25 bp, Homo sapien
tggcgactccgatggtgatgagctc

SEQ ID NO: 396613 - DNA, 25 bp, Homo sapien
agctcgccttccttgtagctgctgc

SEQ ID NO: 396614 - DNA, 25 bp, Homo sapien
tgtgggacccccctgtgatgatcca

SEQ ID NO: 396615 - DNA, 25 bp, Homo sapien
cctgcttcatgacgccggtgtggga

SEQ ID NO: 396616 - DNA, 25 bp, Homo sapien
tactggccgtgggtcccgtcgtcca

SEQ ID NO: 396617 - DNA, 25 bp, Homo sapien
tgctgtctaggcaggtcaggttccc

SEQ ID NO: 396618 - DNA, 25 bp, Homo sapien
gtctgctccgatatgaacttctcca

SEQ ID NO: 396619 - DNA, 25 bp, Homo sapien
tcctcatccagtatgtactcggcgg

SEQ ID NO: 396620 - DNA, 25 bp, Homo sapien
agaccgccctcccactggctaaaat

SEQ ID NO: 396621 - DNA, 25 bp, Homo sapien
ctgcgagcacacaggtgagctgcca

SEQ ID NO: 396622 - DNA, 25 bp, Homo sapien
aaaatgggcaagagaagatgaccct

SEQ ID NO: 396623 - DNA, 25 bp, Homo sapien
cctcccactggctaaaatgggcaag

SEQ ID NO: 396624 - DNA, 25 bp, Homo sapien
ccacgcacacgatggggatcttgat

SEQ ID NO: 396625 - DNA, 25 bp, Homo sapien
gaagaacacgctcagtttctgctgg

SEQ ID NO: 396626 - DNA, 25 bp, Homo sapien
caatcctgctttccgtgaaggtctc

SEQ ID NO: 396627 - DNA, 25 bp, Homo sapien
tttttggtccactcgacaatcctgc

SEQ ID NO: 396628 - DNA, 25 bp, Homo sapien
tctgctggatcagggagatagtgat

SEQ ID NO: 396629 - DNA, 25 bp, Homo sapien
tggtgaccgtcgtgcccgtcagcct

SEQ ID NO: 396630 - DNA, 25 bp, Homo sapien
acatgctggtgaccgtcgtgcccgt

SEQ ID NO: 396631 - DNA, 25 bp, Homo sapien
gcagccacatgctggtgaccgtcgt

SEQ ID NO: 396632 - DNA, 25 bp, Homo sapien
ggctgacagtgtctctgcaaagcag

SEQ ID NO: 396633 - DNA, 25 bp, Homo sapien
cttgccttcccggaagacagtcagc

SEQ ID NO: 396634 - DNA, 25 bp, Homo sapien
ccttcccggaagacagtcagcagct

SEQ ID NO: 396635 - DNA, 25 bp, Homo sapien
gccgcctccggacgatatcttggat

SEQ ID NO: 396636 - DNA, 25 bp, Homo sapien
agcagctgccgcctccggacgatat

SEQ ID NO: 396637 - DNA, 25 bp, Homo sapien
catgaagatctcactgcgggcaatg

SEQ ID NO: 396638 - DNA, 25 bp, Homo sapien
gccaaagtggtcttggctccgtgag

SEQ ID NO: 396639 - DNA, 25 bp, Homo sapien
ggtggtcccagttctcgtggccaaa

SEQ ID NO: 396640 - DNA, 25 bp, Homo sapien
cactgccagtttcagctggtggtcc

SEQ ID NO: 396641 - DNA, 25 bp, Homo sapien
tagagcaaggtgtcccaggtgacaa

SEQ ID NO: 396642 - DNA, 25 bp, Homo sapien
gtccaggttctcgtacaggtagagc

SEQ ID NO: 396643 - DNA, 25 bp, Homo sapien
agctgcaccccgttctccaggaaga

SEQ ID NO: 396644 - DNA, 25 bp, Homo sapien
ctcaggcttgttggagatgagtgca

SEQ ID NO: 396645 - DNA, 25 bp, Homo sapien
caagccgggcgctcgggatcctcca

SEQ ID NO: 396646 - DNA, 25 bp, Homo sapien
gcgcaagccgggcgctcgggatcct

SEQ ID NO: 396647 - DNA, 25 bp, Homo sapien
gcgcgcaagccgggcgctcgggatc

SEQ ID NO: 396648 - DNA, 25 bp, Homo sapien
gcaagccgggcgctcgggatcctcc

SEQ ID NO: 396649 - DNA, 25 bp, Homo sapien
gataaagcggctgcgtgaagtcccc

SEQ ID NO: 396650 - DNA, 25 bp, Homo sapien
gagccgcagccggtcgttgtgccgg

SEQ ID NO: 396651 - DNA, 25 bp, Homo sapien
ttgagcttgacgtggggaacgggca

SEQ ID NO: 396652 - DNA, 25 bp, Homo sapien
ttgacgtggggaacgggcagcagga

SEQ ID NO: 396653 - DNA, 25 bp, Homo sapien
ccgacggttctggacaatggcccaa

SEQ ID NO: 396654 - DNA, 25 bp, Homo sapien
cctgaggaacgcttgtagagggacc

SEQ ID NO: 396655 - DNA, 25 bp, Homo sapien
tggcccaaatgagaaggtcacggat

SEQ ID NO: 396656 - DNA, 25 bp, Homo sapien
catggtgaaggtcacatggcctgag

SEQ ID NO: 396657 - DNA, 25 bp, Homo sapien
aggccgctgcgatgcagtcctggct

SEQ ID NO: 396658 - DNA, 25 bp, Homo sapien
caaggccgctgcgatgcagtcctgg

SEQ ID NO: 396659 - DNA, 25 bp, Homo sapien
aaggccgctgcgatgcagtcctggc

SEQ ID NO: 396660 - DNA, 25 bp, Homo sapien
ccaaggccgctgcgatgcagtcctg

SEQ ID NO: 396661 - DNA, 25 bp, Homo sapien
cccaggcctcggacacgcgggtgag

SEQ ID NO: 396662 - DNA, 25 bp, Homo sapien
tcgtccttccggtagcactcggtga

SEQ ID NO: 396663 - DNA, 25 bp, Homo sapien
tcggacacgcgggtgagcagtttct

SEQ ID NO: 396664 - DNA, 25 bp, Homo sapien
gctctctcttcgtccttccggtagc

SEQ ID NO: 396665 - DNA, 25 bp, Homo sapien
agatgaggccggtgaggagcagcgg

SEQ ID NO: 396666 - DNA, 25 bp, Homo sapien
acagcccattgtccacggagagctg

SEQ ID NO: 396667 - DNA, 25 bp, Homo sapien
ggaaggccagcatgcacagggtcac

SEQ ID NO: 396668 - DNA, 25 bp, Homo sapien
agagctggccccaccacaccttggt

SEQ ID NO: 396669 - DNA, 25 bp, Homo sapien
tgttcaggtggaagaccaccacggg

SEQ ID NO: 396670 - DNA, 25 bp, Homo sapien
agaccaccacgggtgcggtgaagaa

SEQ ID NO: 396671 - DNA, 25 bp, Homo sapien
gcatctcctcgcacaccaaggagaa

SEQ ID NO: 396672 - DNA, 25 bp, Homo sapien
atggcacactcgcaccaggagggca

SEQ ID NO: 396673 - DNA, 25 bp, Homo sapien
ccgcactcgtcagggtcatagaaga

SEQ ID NO: 396674 - DNA, 25 bp, Homo sapien
gaagagcaagattgcgccgacgtcc

SEQ ID NO: 396675 - DNA, 25 bp, Homo sapien
gaagtcactgaagtacaaggctgcc

SEQ ID NO: 396676 - DNA, 25 bp, Homo sapien
gccgacgtccagcttattccagaag

SEQ ID NO: 396677 - DNA, 25 bp, Homo sapien
ggatgacgcgcccggggtacagcgt

SEQ ID NO: 396678 - DNA, 25 bp, Homo sapien
ggggtacagcgtcgccgggatgagc

SEQ ID NO: 396679 - DNA, 25 bp, Homo sapien
gagaggatgacgcgcccggggtaca

SEQ ID NO: 396680 - DNA, 25 bp, Homo sapien
gcatgagccggaggcagaacaggat

SEQ ID NO: 396681 - DNA, 25 bp, Homo sapien
tccgcttcacaatgatgatcttggg

SEQ ID NO: 396682 - DNA, 25 bp, Homo sapien
atccgcttcacaatgatgatcttgg

SEQ ID NO: 396683 - DNA, 25 bp, Homo sapien
catccgcttcacaatgatgatcttg

SEQ ID NO: 396684 - DNA, 25 bp, Homo sapien
tgaggtaggagtggtagacggcccc

SEQ ID NO: 396685 - DNA, 25 bp, Homo sapien
tagcccgggatctgcccgaagatgg

SEQ ID NO: 396686 - DNA, 25 bp, Homo sapien
tccacccggcgctcgttgtggatga

SEQ ID NO: 396687 - DNA, 25 bp, Homo sapien
gatgaggatggcctgcttggccacc

SEQ ID NO: 396688 - DNA, 25 bp, Homo sapien
gcttgtaggggtcggtgccattggg

SEQ ID NO: 396689 - DNA, 25 bp, Homo sapien
cgtcgcgtcgctctcggggcactta

SEQ ID NO: 396690 - DNA, 25 bp, Homo sapien
gctctcggggcacttaggcttgtag

SEQ ID NO: 396691 - DNA, 25 bp, Homo sapien
gaacatggcgatgaggaggttgagc

SEQ ID NO: 396692 - DNA, 25 bp, Homo sapien
aacttccaaatctggtccgtgtgct

SEQ ID NO: 396693 - DNA, 25 bp, Homo sapien
acttccaaatctggtccgtgtgctc

SEQ ID NO: 396694 - DNA, 25 bp, Homo sapien
gcggcgcggcggggcggccgtggta

SEQ ID NO: 396695 - DNA, 25 bp, Homo sapien
gaggaggatgaaggggggcggcgcg

SEQ ID NO: 396696 - DNA, 25 bp, Homo sapien
ctgaggaggatgaaggggggcggcg

SEQ ID NO: 396697 - DNA, 25 bp, Homo sapien
ggaggatgaaggggggcggcgcggc

SEQ ID NO: 396698 - DNA, 25 bp, Homo sapien
tggccggagtcttcaggaccaccct

SEQ ID NO: 396699 - DNA, 25 bp, Homo sapien
ctcttggccggagtcttcaggacca

SEQ ID NO: 396700 - DNA, 25 bp, Homo sapien
gcctcttggccggagtcttcaggac

SEQ ID NO: 396701 - DNA, 25 bp, Homo sapien
tcttggccggagtcttcaggaccac

SEQ ID NO: 396702 - DNA, 25 bp, Homo sapien
ccgggtggccaggacattcaggaga

SEQ ID NO: 396703 - DNA, 25 bp, Homo sapien
agcagcctgagtgacctgcacgcct

SEQ ID NO: 396704 - DNA, 25 bp, Homo sapien
gcagcctgagtgacctgcacgcctg

SEQ ID NO: 396705 - DNA, 25 bp, Homo sapien
ctgcacgcctgctgagcgtccaggg

SEQ ID NO: 396706 - DNA, 25 bp, Homo sapien
cgcctgctgagcgtccagggttctg

SEQ ID NO: 396707 - DNA, 25 bp, Homo sapien
ggagggggccagtcctgagtggcag

SEQ ID NO: 396708 - DNA, 25 bp, Homo sapien
cagggtgggcggacagaccagggga

SEQ ID NO: 396709 - DNA, 25 bp, Homo sapien
aggtagatctcccaggatagcaggg

SEQ ID NO: 396710 - DNA, 25 bp, Homo sapien
tcaggtagatctcccaggatagcag

SEQ ID NO: 396711 - DNA, 25 bp, Homo sapien
cctcgatcttctgctcgggccgctg

SEQ ID NO: 396712 - DNA, 25 bp, Homo sapien
tttgctggaactgtcggttctggag

SEQ ID NO: 396713 - DNA, 25 bp, Homo sapien
caggtgggacatgtactcatggtgc

SEQ ID NO: 396714 - DNA, 25 bp, Homo sapien
aggtgggacatgtactcatggtgcc

SEQ ID NO: 396715 - DNA, 25 bp, Homo sapien
ggtgggacatgtactcatggtgcct

SEQ ID NO: 396716 - DNA, 25 bp, Homo sapien
cagcccactcccttaaggcaggagg

SEQ ID NO: 396717 - DNA, 25 bp, Homo sapien
ccactcccttaaggcaggaggctgc

SEQ ID NO: 396718 - DNA, 25 bp, Homo sapien
caggccacaccgctggccagtggtg

SEQ ID NO: 396719 - DNA, 25 bp, Homo sapien
gtccagcccactcccttaaggcagg

SEQ ID NO: 396720 - DNA, 25 bp, Homo sapien
ctgcaagatcaggtcgactgaagca

SEQ ID NO: 396721 - DNA, 25 bp, Homo sapien
caagatcaggtcgactgaagcacat

SEQ ID NO: 396722 - DNA, 25 bp, Homo sapien
gcaagatcaggtcgactgaagcaca

SEQ ID NO: 396723 - DNA, 25 bp, Homo sapien
agatcaggtcgactgaagcacatca

SEQ ID NO: 396724 - DNA, 25 bp, Homo sapien
ggccctgggaacgccacaccgctct

SEQ ID NO: 396725 - DNA, 25 bp, Homo sapien
tgggaacgccacaccgctctgcaga

SEQ ID NO: 396726 - DNA, 25 bp, Homo sapien
ctgggaacgccacaccgctctgcag

SEQ ID NO: 396727 - DNA, 25 bp, Homo sapien
ccctgggaacgccacaccgctctgc

SEQ ID NO: 396728 - DNA, 25 bp, Homo sapien
gagcccgacctcttcagtgggtcca

SEQ ID NO: 396729 - DNA, 25 bp, Homo sapien
ggagcccgacctcttcagtgggtcc

SEQ ID NO: 396730 - DNA, 25 bp, Homo sapien
cgctggcccgcagcgtcctcacgat

SEQ ID NO: 396731 - DNA, 25 bp, Homo sapien
ctccgagctgaagccgctggcccgc

SEQ ID NO: 396732 - DNA, 25 bp, Homo sapien
cgtcctcacgatccagtgcagggct

SEQ ID NO: 396733 - DNA, 25 bp, Homo sapien
tggggacgtccgcctccgagctgaa

SEQ ID NO: 396734 - DNA, 25 bp, Homo sapien
ccgcaggacaaggacttcctctgtg

SEQ ID NO: 396735 - DNA, 25 bp, Homo sapien
gacgtgacgcaaggcggagcccggg

SEQ ID NO: 396736 - DNA, 25 bp, Homo sapien
gacagtcaggaagacgtgacgcaag

SEQ ID NO: 396737 - DNA, 25 bp, Homo sapien
caggacaaggacttcctctgtggtc

SEQ ID NO: 396738 - DNA, 25 bp, Homo sapien
cggctcctccgcggccttctgggag

SEQ ID NO: 396739 - DNA, 25 bp, Homo sapien
ggctcctccgcggccttctgggagg

SEQ ID NO: 396740 - DNA, 25 bp, Homo sapien
ccggctcctccgcggccttctggga

SEQ ID NO: 396741 - DNA, 25 bp, Homo sapien
ggaagcgcgtgacagggcagttggg

SEQ ID NO: 396742 - DNA, 25 bp, Homo sapien
ttcacgtggtagctgtcgcccggct

SEQ ID NO: 396743 - DNA, 25 bp, Homo sapien
gaggtgccgggcattcacgtggtag

SEQ ID NO: 396744 - DNA, 25 bp, Homo sapien
cgggcattcacgtggtagctgtcgc

SEQ ID NO: 396745 - DNA, 25 bp, Homo sapien
ctgccgtgtaaaagggtgggtcata

SEQ ID NO: 396746 - DNA, 25 bp, Homo sapien
aaaagggtgggtcatagatcaggaa

SEQ ID NO: 396747 - DNA, 25 bp, Homo sapien
ccgtgtaaaagggtgggtcatagat

SEQ ID NO: 396748 - DNA, 25 bp, Homo sapien
gtgtaaaagggtgggtcatagatca

SEQ ID NO: 396749 - DNA, 25 bp, Homo sapien
tctcccatggggtccatggcggccg

SEQ ID NO: 396750 - DNA, 25 bp, Homo sapien
tcccatggggtccatggcggccgcg

SEQ ID NO: 396751 - DNA, 25 bp, Homo sapien
ctcccatggggtccatggcggccgc

SEQ ID NO: 396752 - DNA, 25 bp, Homo sapien
cccatggggtccatggcggccgcgt

SEQ ID NO: 396753 - DNA, 25 bp, Homo sapien
tgtactggatcgtggacagtggctc

SEQ ID NO: 396754 - DNA, 25 bp, Homo sapien
caggccatccaccacgttgtactgg

SEQ ID NO: 396755 - DNA, 25 bp, Homo sapien
gggcaacccggcctgcactgtgtac

SEQ ID NO: 396756 - DNA, 25 bp, Homo sapien
ctgcactgtgtacggcccgtggaag

SEQ ID NO: 396757 - DNA, 25 bp, Homo sapien
gcaagttctagaaacgggcgatttc

SEQ ID NO: 396758 - DNA, 25 bp, Homo sapien
cagagtgtgctaaccacgggcagca

SEQ ID NO: 396759 - DNA, 25 bp, Homo sapien
gaagaaatgcactgccgctatcgtg

SEQ ID NO: 396760 - DNA, 25 bp, Homo sapien
gcggcatccacgtctacagaaggtc

SEQ ID NO: 396761 - DNA, 25 bp, Homo sapien
cccgcgcccacgcagtcctgtgcgg

SEQ ID NO: 396762 - DNA, 25 bp, Homo sapien
cacgcagtcctgtgcggcccatggg

SEQ ID NO: 396763 - DNA, 25 bp, Homo sapien
gtgtggttgggtccgaagcagctga

SEQ ID NO: 396764 - DNA, 25 bp, Homo sapien
cgtgaccatggggtacagcgtgtgg

SEQ ID NO: 396765 - DNA, 25 bp, Homo sapien
tgctcggagagagggagcttcacca

SEQ ID NO: 396766 - DNA, 25 bp, Homo sapien
gcccagtgctcggagagagggagct

SEQ ID NO: 396767 - DNA, 25 bp, Homo sapien
cggagagagggagcttcaccaccag

SEQ ID NO: 396768 - DNA, 25 bp, Homo sapien
tgcagatggctccatcctcgttccg

SEQ ID NO: 396769 - DNA, 25 bp, Homo sapien
ttcagcttccgaggtagcatctccc

SEQ ID NO: 396770 - DNA, 25 bp, Homo sapien
atccgcttcagcttccgaggtagca

SEQ ID NO: 396771 - DNA, 25 bp, Homo sapien
gcttcagcttccgaggtagcatctc

SEQ ID NO: 396772 - DNA, 25 bp, Homo sapien
ccgcttcagcttccgaggtagcatc

SEQ ID NO: 396773 - DNA, 25 bp, Homo sapien
ctccatgccgcacttcagcaagttt

SEQ ID NO: 396774 - DNA, 25 bp, Homo sapien
ccatgccgcacttcagcaagttttc

SEQ ID NO: 396775 - DNA, 25 bp, Homo sapien
tccatgccgcacttcagcaagtttt

SEQ ID NO: 396776 - DNA, 25 bp, Homo sapien
ggcattgtccgtgttcctcgggtca

SEQ ID NO: 396777 - DNA, 25 bp, Homo sapien
gggtcatccatgtagcctttgtaca

SEQ ID NO: 396778 - DNA, 25 bp, Homo sapien
ggccaccgtctcgatccaggcattg

SEQ ID NO: 396779 - DNA, 25 bp, Homo sapien
cgtgttcctcgggtcatccatgtag

SEQ ID NO: 396780 - DNA, 25 bp, Homo sapien
agagttcagcctgttcagctccacg

SEQ ID NO: 396781 - DNA, 25 bp, Homo sapien
tccacgtcattctggtcctggaagt

SEQ ID NO: 396782 - DNA, 25 bp, Homo sapien
gccatcggatggaggcccccgagtc

SEQ ID NO: 396783 - DNA, 25 bp, Homo sapien
cccccgagtcgcaggcgtgcaggtt

SEQ ID NO: 396784 - DNA, 25 bp, Homo sapien
gaggcccccgagtcgcaggcgtgca

SEQ ID NO: 396785 - DNA, 25 bp, Homo sapien
ctgccatcggatggaggcccccgag

SEQ ID NO: 396786 - DNA, 25 bp, Homo sapien
catagagtgggatgcgcctgtccac

SEQ ID NO: 396787 - DNA, 25 bp, Homo sapien
gtagtgagccccgaactcagcggct

SEQ ID NO: 396788 - DNA, 25 bp, Homo sapien
gagggtcttgtggttcgcatagagt

SEQ ID NO: 396789 - DNA, 25 bp, Homo sapien
tcttgtggttcgcatagagtgggat

SEQ ID NO: 396790 - DNA, 25 bp, Homo sapien
ttgaggcacctcgaaacatggaggc

SEQ ID NO: 396791 - DNA, 25 bp, Homo sapien
cagtcaggagttcagacagtgcccc

SEQ ID NO: 396792 - DNA, 25 bp, Homo sapien
cacggagtttatcctgacagtcagg

SEQ ID NO: 396793 - DNA, 25 bp, Homo sapien
ggaacgtctatggactggagccgcc

SEQ ID NO: 396794 - DNA, 25 bp, Homo sapien
agggcatgtggatgcctgcatcctg

SEQ ID NO: 396795 - DNA, 25 bp, Homo sapien
ctggagcccaggtttaggaaaatga

SEQ ID NO: 396796 - DNA, 25 bp, Homo sapien
ggccctggacgtgtcaggaacttta

SEQ ID NO: 396797 - DNA, 25 bp, Homo sapien
gtgccagggcacattggcaccacca

SEQ ID NO: 396798 - DNA, 25 bp, Homo sapien
ggagctctggccatcgtgtctgcat

SEQ ID NO: 396799 - DNA, 25 bp, Homo sapien
ggttctgggttgtctagtgattcca

SEQ ID NO: 396800 - DNA, 25 bp, Homo sapien
tccatgaaaattggttggctgcata

SEQ ID NO: 396801 - DNA, 25 bp, Homo sapien
aattggttggcacccaaaataacag

SEQ ID NO: 396802 - DNA, 25 bp, Homo sapien
gccgcgactccggcctgcgcgggcg

SEQ ID NO: 396803 - DNA, 25 bp, Homo sapien
ctgcgaccgcgcccgcgaccactag

SEQ ID NO: 396804 - DNA, 25 bp, Homo sapien
tcggagcccgccagacccagctcca

SEQ ID NO: 396805 - DNA, 25 bp, Homo sapien
accgcgcccgcgaccactagctggg

SEQ ID NO: 396806 - DNA, 25 bp, Homo sapien
gcaggcaaggccttatccaaccaga

SEQ ID NO: 396807 - DNA, 25 bp, Homo sapien
gaagcagtgcagtccactctggcag

SEQ ID NO: 396808 - DNA, 25 bp, Homo sapien
gatggagctggtttccgcaggcaag

SEQ ID NO: 396809 - DNA, 25 bp, Homo sapien
aaccagacatgaaaccgccatcctg

SEQ ID NO: 396810 - DNA, 25 bp, Homo sapien
ttgttggcatcgagcttcaggagca

SEQ ID NO: 396811 - DNA, 25 bp, Homo sapien
agagacaagactcccgggtggagac

SEQ ID NO: 396812 - DNA, 25 bp, Homo sapien
gatggcgttgtgagacagatccagc

SEQ ID NO: 396813 - DNA, 25 bp, Homo sapien
cctctggatgcggttgtaagacagg

SEQ ID NO: 396814 - DNA, 25 bp, Homo sapien
aggcgatctcgtccacagagtcggg

SEQ ID NO: 396815 - DNA, 25 bp, Homo sapien
gacaggcgtatcttggcgctgagtt

SEQ ID NO: 396816 - DNA, 25 bp, Homo sapien
gctgggcagagacttcaggtactcc

SEQ ID NO: 396817 - DNA, 25 bp, Homo sapien
cacatagtacacgacgtaggcgatc

SEQ ID NO: 396818 - DNA, 25 bp, Homo sapien
taaacaagggcaagtcagctcctca

SEQ ID NO: 396819 - DNA, 25 bp, Homo sapien
tcctgatggtatcgtcacgggcagt

SEQ ID NO: 396820 - DNA, 25 bp, Homo sapien
gacagcccgggttgaagttccactg

SEQ ID NO: 396821 - DNA, 25 bp, Homo sapien
actccgggccttggaaaaagagctg

SEQ ID NO: 396822 - DNA, 25 bp, Homo sapien
tcagagttccttagaagccgggctc

SEQ ID NO: 396823 - DNA, 25 bp, Homo sapien
tctgggctgcaaagaactgagtcac

SEQ ID NO: 396824 - DNA, 25 bp, Homo sapien
tgctattgaccaagagcctgcacga

SEQ ID NO: 396825 - DNA, 25 bp, Homo sapien
attttgcagacacccgggaggagct

SEQ ID NO: 396826 - DNA, 25 bp, Homo sapien
atgaacagctgccacactcaacgga

SEQ ID NO: 396827 - DNA, 25 bp, Homo sapien
tcaacggaggtctcatatacgacat

SEQ ID NO: 396828 - DNA, 25 bp, Homo sapien
cctgtgtgtgtgaaactcgctatga

SEQ ID NO: 396829 - DNA, 25 bp, Homo sapien
ggacacactagtgcatccaatggaa

SEQ ID NO: 396830 - DNA, 25 bp, Homo sapien
caagccctgcgggaaatccagcgag

SEQ ID NO: 396831 - DNA, 25 bp, Homo sapien
aagacacacagctgacgggagagcg

SEQ ID NO: 396832 - DNA, 25 bp, Homo sapien
gaatgaacagcagctacaaacgtcc

SEQ ID NO: 396833 - DNA, 25 bp, Homo sapien
gcccacgcattcacagaggcgcgtg

SEQ ID NO: 396834 - DNA, 25 bp, Homo sapien
acctgagcgtccactccatctccag

SEQ ID NO: 396835 - DNA, 25 bp, Homo sapien
ggtggccggcatcatccagcggcac

SEQ ID NO: 396836 - DNA, 25 bp, Homo sapien
aactgcaggtggccggcatcatcca

SEQ ID NO: 396837 - DNA, 25 bp, Homo sapien
gcatcatccagcggcacctgagcgt

SEQ ID NO: 396838 - DNA, 25 bp, Homo sapien
ttctcgggggttctcacgccttgac

SEQ ID NO: 396839 - DNA, 25 bp, Homo sapien
tcgggggttctcacgccttgactct

SEQ ID NO: 396840 - DNA, 25 bp, Homo sapien
tcttcttctcgggggttctcacgcc

SEQ ID NO: 396841 - DNA, 25 bp, Homo sapien
gttctcacgccttgactctctggcg

SEQ ID NO: 396842 - DNA, 25 bp, Homo sapien
gaggacctggttaaaactgtccaca

SEQ ID NO: 396843 - DNA, 25 bp, Homo sapien
ccccgcatcatacgggaagaggacc

SEQ ID NO: 396844 - DNA, 25 bp, Homo sapien
ccttccccgcatcatacgggaagag

SEQ ID NO: 396845 - DNA, 25 bp, Homo sapien
catcatacgggaagaggacctggtt

SEQ ID NO: 396846 - DNA, 25 bp, Homo sapien
accatgactaatgatgcaaaaaatc

SEQ ID NO: 396847 - DNA, 25 bp, Homo sapien
ttctcacatggcatttaaccatgac

SEQ ID NO: 396848 - DNA, 25 bp, Homo sapien
acatggcatttaaccatgactaatg

SEQ ID NO: 396849 - DNA, 25 bp, Homo sapien
atgactaatgatgcaaaaaatcatc

SEQ ID NO: 396850 - DNA, 25 bp, Homo sapien
tctaactgccggtctaaacacagca

SEQ ID NO: 396851 - DNA, 25 bp, Homo sapien
accacacttgaatctaactgccggt

SEQ ID NO: 396852 - DNA, 25 bp, Homo sapien
cttgaatctaactgccggtctaaac

SEQ ID NO: 396853 - DNA, 25 bp, Homo sapien
taactgccggtctaaacacagcatc

SEQ ID NO: 396854 - DNA, 25 bp, Homo sapien
ttcccgctcttagagcaacctggct

SEQ ID NO: 396855 - DNA, 25 bp, Homo sapien
gcgcatgtgtgcacctttcctcggg

SEQ ID NO: 396856 - DNA, 25 bp, Homo sapien
gctgccttcacactcgaatgctgtc

SEQ ID NO: 396857 - DNA, 25 bp, Homo sapien
gctccaaagacctgatcgtcaaaac

SEQ ID NO: 396858 - DNA, 25 bp, Homo sapien
ggcgtcttttgttcactcgtgggag

SEQ ID NO: 396859 - DNA, 25 bp, Homo sapien
tatgaatcacgtgcaagccgctgtg

SEQ ID NO: 396860 - DNA, 25 bp, Homo sapien
aagagtgccctttacccgttgctgc

SEQ ID NO: 396861 - DNA, 25 bp, Homo sapien
gaaaactgcagggaaccctcgtgac

SEQ ID NO: 396862 - DNA, 25 bp, Homo sapien
acagtgaagtgtgaccggaagacag

SEQ ID NO: 396863 - DNA, 25 bp, Homo sapien
gcctgttaccaggtggaccgtggtc

SEQ ID NO: 396864 - DNA, 25 bp, Homo sapien
tgtgaccggaagacaggagtgtgag

SEQ ID NO: 396865 - DNA, 25 bp, Homo sapien
ttaccaggtggaccgtggtccagcg

SEQ ID NO: 396866 - DNA, 25 bp, Homo sapien
atttcactggggttgcaggtggggc

SEQ ID NO: 396867 - DNA, 25 bp, Homo sapien
gatttcactggggttgcaggtgggg

SEQ ID NO: 396868 - DNA, 25 bp, Homo sapien
tcagatttcactggggttgcaggtg

SEQ ID NO: 396869 - DNA, 25 bp, Homo sapien
cagatttcactggggttgcaggtgg

SEQ ID NO: 396870 - DNA, 25 bp, Homo sapien
tggtagggttttcgaaggcagacat

SEQ ID NO: 396871 - DNA, 25 bp, Homo sapien
gatgaggccccagttaaaagaggaa

SEQ ID NO: 396872 - DNA, 25 bp, Homo sapien
gagcatacactcaggcaggctccca

SEQ ID NO: 396873 - DNA, 25 bp, Homo sapien
cctgccggcgtctgtggtgtgctct

SEQ ID NO: 396874 - DNA, 25 bp, Homo sapien
cagcatccggcagcttctatctctg

SEQ ID NO: 396875 - DNA, 25 bp, Homo sapien
gagaatcagtgcgaagtgttattga

SEQ ID NO: 396876 - DNA, 25 bp, Homo sapien
caatgagaccctctagttatcaaaa

SEQ ID NO: 396877 - DNA, 25 bp, Homo sapien
tccaaccccatagccgtgtctaggg

SEQ ID NO: 396878 - DNA, 25 bp, Homo sapien
tagcagtcttgccacaagagcacac

SEQ ID NO: 396879 - DNA, 25 bp, Homo sapien
tgcccagtttctatcggctggaatg

SEQ ID NO: 396880 - DNA, 25 bp, Homo sapien
gcaaatacctagactaaaatgtggg

SEQ ID NO: 396881 - DNA, 25 bp, Homo sapien
aagggtgccgctcgctagcagtctt

SEQ ID NO: 396882 - DNA, 25 bp, Homo sapien
cgattcggagatgcaaaacctgatt

SEQ ID NO: 396883 - DNA, 25 bp, Homo sapien
tctgtcagttcttgaaccactaagc

SEQ ID NO: 396884 - DNA, 25 bp, Homo sapien
caacaaatggagctccgattcggag

SEQ ID NO: 396885 - DNA, 25 bp, Homo sapien
cgttggtcaggatacgcctcatctt

SEQ ID NO: 396886 - DNA, 25 bp, Homo sapien
agtctcacagctaataaggaagaag

SEQ ID NO: 396887 - DNA, 25 bp, Homo sapien
ttctgacgttatgctgagtgtcacc

SEQ ID NO: 396888 - DNA, 25 bp, Homo sapien
ggaaacctctcaatggccgtgcaaa

SEQ ID NO: 396889 - DNA, 25 bp, Homo sapien
aagactgaggtttcacacttgagac

SEQ ID NO: 396890 - DNA, 25 bp, Homo sapien
ggcggtggcgcaggtgagaactgac

SEQ ID NO: 396891 - DNA, 25 bp, Homo sapien
tcaggggtggttggggcggtggcgc

SEQ ID NO: 396892 - DNA, 25 bp, Homo sapien
gtcggggtctgtagcggtggtggga

SEQ ID NO: 396893 - DNA, 25 bp, Homo sapien
cgcaggtgagaactgacgtttggtc

SEQ ID NO: 396894 - DNA, 25 bp, Homo sapien
tgttagccacgatttcaagccaacg

SEQ ID NO: 396895 - DNA, 25 bp, Homo sapien
gaccttttgcgggtgaagcacaact

SEQ ID NO: 396896 - DNA, 25 bp, Homo sapien
gaggatcagctgctcatcgacactg

SEQ ID NO: 396897 - DNA, 25 bp, Homo sapien
tcttttgtcccacactcgcgaggat

SEQ ID NO: 396898 - DNA, 25 bp, Homo sapien
catttctgacagctgggttaaattc

SEQ ID NO: 396899 - DNA, 25 bp, Homo sapien
cctgtggactgggatagtctgaaga

SEQ ID NO: 396900 - DNA, 25 bp, Homo sapien
taaaatgaagcctaacagtaaatac

SEQ ID NO: 396901 - DNA, 25 bp, Homo sapien
acactgcagggctttctaactgcac

SEQ ID NO: 396902 - DNA, 25 bp, Homo sapien
tgtggtgaaaccgaagccggcttct

SEQ ID NO: 396903 - DNA, 25 bp, Homo sapien
gcagaatcgggcactagatgcctta

SEQ ID NO: 396904 - DNA, 25 bp, Homo sapien
gcttctgatgtgagcctcggtgcag

SEQ ID NO: 396905 - DNA, 25 bp, Homo sapien
tgtcctacagcgagtgtgacccagg

SEQ ID NO: 396906 - DNA, 25 bp, Homo sapien
aagactcgggaagggagtgccctct

SEQ ID NO: 396907 - DNA, 25 bp, Homo sapien
tttgccctgttacttctgaactcct

SEQ ID NO: 396908 - DNA, 25 bp, Homo sapien
cagtcaccctaggaccgggagggct

SEQ ID NO: 396909 - DNA, 25 bp, Homo sapien
tgtgtgccgctcagctgtgcgtgcc

SEQ ID NO: 396910 - DNA, 25 bp, Homo sapien
tagacccttcgaggggaagagtctc

SEQ ID NO: 396911 - DNA, 25 bp, Homo sapien
gaggggaagagtctccaagatgaac

SEQ ID NO: 396912 - DNA, 25 bp, Homo sapien
gacccttcgaggggaagagtctcca

SEQ ID NO: 396913 - DNA, 25 bp, Homo sapien
ttcgaggggaagagtctccaagatg

SEQ ID NO: 396914 - DNA, 25 bp, Homo sapien
tgcaggcttcgagtgcccgctgcct

SEQ ID NO: 396915 - DNA, 25 bp, Homo sapien
gatgttgcatcctccccgacaacaa

SEQ ID NO: 396916 - DNA, 25 bp, Homo sapien
ttcatgcccgtcgtgcggagggata

SEQ ID NO: 396917 - DNA, 25 bp, Homo sapien
agctgccaccagacatgattacttc

SEQ ID NO: 396918 - DNA, 25 bp, Homo sapien
gaggatcttcctcgctgtggcaaac

SEQ ID NO: 396919 - DNA, 25 bp, Homo sapien
caaacagtcacagctacgatgtgga

SEQ ID NO: 396920 - DNA, 25 bp, Homo sapien
cctagacgttcggtgctgcagactg

SEQ ID NO: 396921 - DNA, 25 bp, Homo sapien
tatgtcatcaactccgtcatctacg

SEQ ID NO: 396922 - DNA, 25 bp, Homo sapien
agcaggtggtgctcgtaggacgcac

SEQ ID NO: 396923 - DNA, 25 bp, Homo sapien
tctgaggctgggactagagggatca

SEQ ID NO: 396924 - DNA, 25 bp, Homo sapien
ggactagagggatcagggtgggctt

SEQ ID NO: 396925 - DNA, 25 bp, Homo sapien
tggtgctcgtaggacgcacagcact

SEQ ID NO: 396926 - DNA, 25 bp, Homo sapien
tctgctttgggaccttgcctggtgc

SEQ ID NO: 396927 - DNA, 25 bp, Homo sapien
tcctctgaccggctgcggatctgct

SEQ ID NO: 396928 - DNA, 25 bp, Homo sapien
ctggtgcccacggagctgtgtcctc

SEQ ID NO: 396929 - DNA, 25 bp, Homo sapien
ctgtgtcctcacctgtggcgccctc

SEQ ID NO: 396930 - DNA, 25 bp, Homo sapien
agccaaagtccagatgctgctgaag

SEQ ID NO: 396931 - DNA, 25 bp, Homo sapien
tccagcagataggaatagtcacatc

SEQ ID NO: 396932 - DNA, 25 bp, Homo sapien
gacggctgttctccagcagatagga

SEQ ID NO: 396933 - DNA, 25 bp, Homo sapien
ggtggccctggacggctgttctcca

SEQ ID NO: 396934 - DNA, 25 bp, Homo sapien
tcttcatgaaatgacgtcgggactg

SEQ ID NO: 396935 - DNA, 25 bp, Homo sapien
cagaaatggaaccaccggaaccaag

SEQ ID NO: 396936 - DNA, 25 bp, Homo sapien
gtctgggctagcgacccatggcgaa

SEQ ID NO: 396937 - DNA, 25 bp, Homo sapien
ttttcaggccgcgtgtgaaggccag

SEQ ID NO: 396938 - DNA, 25 bp, Homo sapien
acaccctacaccgtgggtgaagagg

SEQ ID NO: 396939 - DNA, 25 bp, Homo sapien
tggcgctcccagataaacaaggcct

SEQ ID NO: 396940 - DNA, 25 bp, Homo sapien
ctgaggaggacagttgccacagacc

SEQ ID NO: 396941 - DNA, 25 bp, Homo sapien
tagtggaggtacaacccaggctgct

SEQ ID NO: 396942 - DNA, 25 bp, Homo sapien
tgtcatatgacccagcctagctgga

SEQ ID NO: 396943 - DNA, 25 bp, Homo sapien
tcagtctgagacctgtgggagccct

SEQ ID NO: 396944 - DNA, 25 bp, Homo sapien
tgttctgaaggcgagtgatgtccac

SEQ ID NO: 396945 - DNA, 25 bp, Homo sapien
aagtcagacaaggagcacacacggt

SEQ ID NO: 396946 - DNA, 25 bp, Homo sapien
tcaaagcacacaggagccgcggcag

SEQ ID NO: 396947 - DNA, 25 bp, Homo sapien
aaagcacacaggagccgcggcagcc

SEQ ID NO: 396948 - DNA, 25 bp, Homo sapien
cttcaaagcacacaggagccgcggc

SEQ ID NO: 396949 - DNA, 25 bp, Homo sapien
aagcacacaggagccgcggcagcct

SEQ ID NO: 396950 - DNA, 25 bp, Homo sapien
aaaccgcccagatctcatcagactg

SEQ ID NO: 396951 - DNA, 25 bp, Homo sapien
gagaaggcttgaagaaaaccgccca

SEQ ID NO: 396952 - DNA, 25 bp, Homo sapien
caattgctggcattaaaagaagaca

SEQ ID NO: 396953 - DNA, 25 bp, Homo sapien
actgaaagggcgctgagcccaagga

SEQ ID NO: 396954 - DNA, 25 bp, Homo sapien
agctgcgtgtcacccatgccatcct

SEQ ID NO: 396955 - DNA, 25 bp, Homo sapien
ctctccagctaagggtccccggatg

SEQ ID NO: 396956 - DNA, 25 bp, Homo sapien
ccccggatgtttgacaaaaatcctg

SEQ ID NO: 396957 - DNA, 25 bp, Homo sapien
ctggccagctgcgtgtcacccatgc

SEQ ID NO: 396958 - DNA, 25 bp, Homo sapien
ttctcgtcaactaggcaaggtctcc

SEQ ID NO: 396959 - DNA, 25 bp, Homo sapien
ttcttcacgacactgcaccaaggtg

SEQ ID NO: 396960 - DNA, 25 bp, Homo sapien
taacagctgttgtgccacggagagg

SEQ ID NO: 396961 - DNA, 25 bp, Homo sapien
gatggaaaggcaccacaagtgactt

SEQ ID NO: 396962 - DNA, 25 bp, Homo sapien
tctaacgaatgagctggtggggggc

SEQ ID NO: 396963 - DNA, 25 bp, Homo sapien
atctaacgaatgagctggtgggggg

SEQ ID NO: 396964 - DNA, 25 bp, Homo sapien
catctaacgaatgagctggtggggg

SEQ ID NO: 396965 - DNA, 25 bp, Homo sapien
tcatctaacgaatgagctggtgggg

SEQ ID NO: 396966 - DNA, 25 bp, Homo sapien
ttaatgcgtgcagagaattgctccg

SEQ ID NO: 396967 - DNA, 25 bp, Homo sapien
cagctttacgtggatgttcagggca

SEQ ID NO: 396968 - DNA, 25 bp, Homo sapien
gaaaccgggagtgtgaccaccttga

SEQ ID NO: 396969 - DNA, 25 bp, Homo sapien
caaatggtgacatcgagcagcaacg

SEQ ID NO: 396970 - DNA, 25 bp, Homo sapien
cacagctttgcgtggtgatcacacc

SEQ ID NO: 396971 - DNA, 25 bp, Homo sapien
cgtaggttcatgtggcgtccttgcc

SEQ ID NO: 396972 - DNA, 25 bp, Homo sapien
tccatcatccaagcaagtacgtagg

SEQ ID NO: 396973 - DNA, 25 bp, Homo sapien
agctacactatgagccctgggcaca

SEQ ID NO: 396974 - DNA, 25 bp, Homo sapien
gtgctcctgactaagccggtcccta

SEQ ID NO: 396975 - DNA, 25 bp, Homo sapien
tctttgggcattagccatcctagtg

SEQ ID NO: 396976 - DNA, 25 bp, Homo sapien
tgggttttaccatggacccgtgctc

SEQ ID NO: 396977 - DNA, 25 bp, Homo sapien
gtttctccacagtgtcgccagcata

SEQ ID NO: 396978 - DNA, 25 bp, Homo sapien
tgtgaatgtgaccagtctagtgacc

SEQ ID NO: 396979 - DNA, 25 bp, Homo sapien
tggaacatccccaaggttcatccat

SEQ ID NO: 396980 - DNA, 25 bp, Homo sapien
catataagtggaacatccccaaggt

SEQ ID NO: 396981 - DNA, 25 bp, Homo sapien
ggcacctaccattctaccttttgtc

SEQ ID NO: 396982 - DNA, 25 bp, Homo sapien
aggccggccgcagcctgatggacat

SEQ ID NO: 396983 - DNA, 25 bp, Homo sapien
caaaacgctgatgagaatgcccgcc

SEQ ID NO: 396984 - DNA, 25 bp, Homo sapien
ccagctgcagagaccaaaacgctga

SEQ ID NO: 396985 - DNA, 25 bp, Homo sapien
gctgatgagaatgcccgcccctggg

SEQ ID NO: 396986 - DNA, 25 bp, Homo sapien
gtcaccttccgggaagctgccctgg

SEQ ID NO: 396987 - DNA, 25 bp, Homo sapien
ccgagggttctgcccgttttagcag

SEQ ID NO: 396988 - DNA, 25 bp, Homo sapien
tctgcccgttttagcagcaatgcga

SEQ ID NO: 396989 - DNA, 25 bp, Homo sapien
gcccgttttagcagcaatgcgaggg

SEQ ID NO: 396990 - DNA, 25 bp, Homo sapien
ggcccgcctgctgtatgcctgtctc

SEQ ID NO: 396991 - DNA, 25 bp, Homo sapien
atgccggcccgcctgctgtatgcct

SEQ ID NO: 396992 - DNA, 25 bp, Homo sapien
gccgccctgtatgccggcccgcctg

SEQ ID NO: 396993 - DNA, 25 bp, Homo sapien
ctgtatgccggcccgcctgctgtat

SEQ ID NO: 396994 - DNA, 25 bp, Homo sapien
ctctgaggattcctcttcatgctgc

SEQ ID NO: 396995 - DNA, 25 bp, Homo sapien
tccgttgcaagcctgtctgctgcaa

SEQ ID NO: 396996 - DNA, 25 bp, Homo sapien
gcccgtccgttgcaagcctgtctgc

SEQ ID NO: 396997 - DNA, 25 bp, Homo sapien
gctgcgtgcccgtccgttgcaagcc

SEQ ID NO: 396998 - DNA, 25 bp, Homo sapien
tggggcttcctctccgtgctgccag

SEQ ID NO: 396999 - DNA, 25 bp, Homo sapien
gcctcctgcagcttttcctcaggcc

SEQ ID NO: 397000 - DNA, 25 bp, Homo sapien
gcttcctctccgtgctgccagcagt

SEQ ID NO: 397001 - DNA, 25 bp, Homo sapien
gcagcttttcctcaggccaaaagtc

SEQ ID NO: 397002 - DNA, 25 bp, Homo sapien
gacgactgcccagagagctgctgtg

SEQ ID NO: 397003 - DNA, 25 bp, Homo sapien
tggacgactgcccagagagctgctg

SEQ ID NO: 397004 - DNA, 25 bp, Homo sapien
ggacgactgcccagagagctgctgt

SEQ ID NO: 397005 - DNA, 25 bp, Homo sapien
ggtggacgactgcccagagagctgc

SEQ ID NO: 397006 - DNA, 25 bp, Homo sapien
gaaacagaaccgcacatacaatcct

SEQ ID NO: 397007 - DNA, 25 bp, Homo sapien
tttcaagcactcaagagccacgtgt

SEQ ID NO: 397008 - DNA, 25 bp, Homo sapien
aagtgaggaatggaaccgcaattcg

SEQ ID NO: 397009 - DNA, 25 bp, Homo sapien
tatttaacccggtacatccagaatg

SEQ ID NO: 397010 - DNA, 25 bp, Homo sapien
ttccgaaaatccttgcagccctgag

SEQ ID NO: 397011 - DNA, 25 bp, Homo sapien
ggcaggtcccgtttctccagagttg

SEQ ID NO: 397012 - DNA, 25 bp, Homo sapien
cagcaatgctgagctttcatgccga

SEQ ID NO: 397013 - DNA, 25 bp, Homo sapien
ctggccagccggtggtcactgtgtc

SEQ ID NO: 397014 - DNA, 25 bp, Homo sapien
agtctagccgccagccggcttgctg

SEQ ID NO: 397015 - DNA, 25 bp, Homo sapien
ctgtgtgcccatcccctcctgctgt

SEQ ID NO: 397016 - DNA, 25 bp, Homo sapien
cccgtgtgcaggtccacctgctgtg

SEQ ID NO: 397017 - DNA, 25 bp, Homo sapien
tgccgccccgtgtgcaggtccacct

SEQ ID NO: 397018 - DNA, 25 bp, Homo sapien
tgccagccagcttgctgcacatcct

SEQ ID NO: 397019 - DNA, 25 bp, Homo sapien
gcaagccagtctgctgtgtgcccgt

SEQ ID NO: 397020 - DNA, 25 bp, Homo sapien
tgccagcagtctagctgccagccag

SEQ ID NO: 397021 - DNA, 25 bp, Homo sapien
tgctgcgtgcctgtctgctgcaagc

SEQ ID NO: 397022 - DNA, 25 bp, Homo sapien
gaggaggcacagcaagccagctggc

SEQ ID NO: 397023 - DNA, 25 bp, Homo sapien
gggaggaggcacagcaagccagctg

SEQ ID NO: 397024 - DNA, 25 bp, Homo sapien
aggaggcacagcaagccagctggca

SEQ ID NO: 397025 - DNA, 25 bp, Homo sapien
ggaggaggcacagcaagccagctgg

SEQ ID NO: 397026 - DNA, 25 bp, Homo sapien
agcacgaagaggaaatcccagagca

SEQ ID NO: 397027 - DNA, 25 bp, Homo sapien
cagcacgaagaggaaatcccagagc

SEQ ID NO: 397028 - DNA, 25 bp, Homo sapien
cacgaagaggaaatcccagagcaga

SEQ ID NO: 397029 - DNA, 25 bp, Homo sapien
gcacgaagaggaaatcccagagcag

SEQ ID NO: 397030 - DNA, 25 bp, Homo sapien
actgctggcagcacgagggcgtgca

SEQ ID NO: 397031 - DNA, 25 bp, Homo sapien
acaggcttgcagcagacagtcttgc

SEQ ID NO: 397032 - DNA, 25 bp, Homo sapien
agactgctggcagcacgagggcgtg

SEQ ID NO: 397033 - DNA, 25 bp, Homo sapien
ttgcagcagacagtcttgcagcaga

SEQ ID NO: 397034 - DNA, 25 bp, Homo sapien
cagagcagatgggcacagagccgac

SEQ ID NO: 397035 - DNA, 25 bp, Homo sapien
aagccccagagcagatgggcacaga

SEQ ID NO: 397036 - DNA, 25 bp, Homo sapien
tgctggctttgggaggaggtgcagc

SEQ ID NO: 397037 - DNA, 25 bp, Homo sapien
cacgcagcagccctgctggctttgg

SEQ ID NO: 397038 - DNA, 25 bp, Homo sapien
ggagcacagcaggaagggacgggca

SEQ ID NO: 397039 - DNA, 25 bp, Homo sapien
agggacacgcaggaggctgggcggc

SEQ ID NO: 397040 - DNA, 25 bp, Homo sapien
aggaggtgggagcacagcaggaagg

SEQ ID NO: 397041 - DNA, 25 bp, Homo sapien
gagcaaacaggcacacagctcacag

SEQ ID NO: 397042 - DNA, 25 bp, Homo sapien
gcttgagggcgtccaaagaaggctc

SEQ ID NO: 397043 - DNA, 25 bp, Homo sapien
gactatcagctttcaggtgggacct

SEQ ID NO: 397044 - DNA, 25 bp, Homo sapien
gccatgggaactttctagaagcgcc

SEQ ID NO: 397045 - DNA, 25 bp, Homo sapien
gagcaattcaggacgcgactatcag

SEQ ID NO: 397046 - DNA, 25 bp, Homo sapien
aggcattaatcaacacacctgggtg

SEQ ID NO: 397047 - DNA, 25 bp, Homo sapien
actatgacacgactaacaacacagg

SEQ ID NO: 397048 - DNA, 25 bp, Homo sapien
acagcagagggttgtgcacaaagga

SEQ ID NO: 397049 - DNA, 25 bp, Homo sapien
gacaagtattgtgcagcagaaggat

SEQ ID NO: 397050 - DNA, 25 bp, Homo sapien
ctgctgcaagactgtctgctgcaag

SEQ ID NO: 397051 - DNA, 25 bp, Homo sapien
tctgctgcaagactgtctgctgcaa

SEQ ID NO: 397052 - DNA, 25 bp, Homo sapien
tgctgcaagactgtctgctgcaagc

SEQ ID NO: 397053 - DNA, 25 bp, Homo sapien
gacgactgcccagagagctgctgtg

SEQ ID NO: 397054 - DNA, 25 bp, Homo sapien
ggacgactgcccagagagctgctgt

SEQ ID NO: 397055 - DNA, 25 bp, Homo sapien
tggacgactgcccagagagctgctg

SEQ ID NO: 397056 - DNA, 25 bp, Homo sapien
ggtggacgactgcccagagagctgc

SEQ ID NO: 397057 - DNA, 25 bp, Homo sapien
ctaagcaagcatcctgtagatactc

SEQ ID NO: 397058 - DNA, 25 bp, Homo sapien
gaatcactaagcaagcatcctgtag

SEQ ID NO: 397059 - DNA, 25 bp, Homo sapien
ttaagcctgaatcactaagcaagca

SEQ ID NO: 397060 - DNA, 25 bp, Homo sapien
cctgaatcactaagcaagcatcctg

SEQ ID NO: 397061 - DNA, 25 bp, Homo sapien
cagcatgaaccggaatcatcagagc

SEQ ID NO: 397062 - DNA, 25 bp, Homo sapien
tggcagcatgaaccggaatcatcag

SEQ ID NO: 397063 - DNA, 25 bp, Homo sapien
tgaaccggaatcatcagagcaggtg

SEQ ID NO: 397064 - DNA, 25 bp, Homo sapien
tggctggcagcatgaaccggaatca

SEQ ID NO: 397065 - DNA, 25 bp, Homo sapien
ggagcatgcggggcggcaaaggaga

SEQ ID NO: 397066 - DNA, 25 bp, Homo sapien
agcatgcggggcggcaaaggagaga

SEQ ID NO: 397067 - DNA, 25 bp, Homo sapien
gcggggcggcaaaggagagacacac

SEQ ID NO: 397068 - DNA, 25 bp, Homo sapien
catgcggggcggcaaaggagagaca

SEQ ID NO: 397069 - DNA, 25 bp, Homo sapien
gagaaacccacagttggtacgtgtc

SEQ ID NO: 397070 - DNA, 25 bp, Homo sapien
tgagctgggacagtgacgagaaacc

SEQ ID NO: 397071 - DNA, 25 bp, Homo sapien
cactcaggctttggatgatcttaag

SEQ ID NO: 397072 - DNA, 25 bp, Homo sapien
gatggccagctgaccactgatgtcc

SEQ ID NO: 397073 - DNA, 25 bp, Homo sapien
catggtggatgcagcaatcacatac

SEQ ID NO: 397074 - DNA, 25 bp, Homo sapien
gaggagactcggctgacatggccca

SEQ ID NO: 397075 - DNA, 25 bp, Homo sapien
aaggtgtgcaggagtcggtgcagcc

SEQ ID NO: 397076 - DNA, 25 bp, Homo sapien
caatcacatacgtcctggtgcagca

SEQ ID NO: 397077 - DNA, 25 bp, Homo sapien
cgtgcccatcagcagctggactcct

SEQ ID NO: 397078 - DNA, 25 bp, Homo sapien
tggactcctggcctgagcagaggcc

SEQ ID NO: 397079 - DNA, 25 bp, Homo sapien
ctggccctgggggacgtgcccatca

SEQ ID NO: 397080 - DNA, 25 bp, Homo sapien
aggacaggaccggagccggctggcc

SEQ ID NO: 397081 - DNA, 25 bp, Homo sapien
ctgggggaggtgtaagtgagtgtgt

SEQ ID NO: 397082 - DNA, 25 bp, Homo sapien
tgggggaggtgtaagtgagtgtgtg

SEQ ID NO: 397083 - DNA, 25 bp, Homo sapien
gggggaggtgtaagtgagtgtgtga

SEQ ID NO: 397084 - DNA, 25 bp, Homo sapien
aggagtcggagtaagcgctggagcg

SEQ ID NO: 397085 - DNA, 25 bp, Homo sapien
tcggagtaagcgctggagcggatgg

SEQ ID NO: 397086 - DNA, 25 bp, Homo sapien
ggatggacatggtggacgcggccat

SEQ ID NO: 397087 - DNA, 25 bp, Homo sapien
gtaagcgctggagcggatggacatg

SEQ ID NO: 397088 - DNA, 25 bp, Homo sapien
cagcaggggctggatacacggctca

SEQ ID NO: 397089 - DNA, 25 bp, Homo sapien
tacacggctcactggggtgcagacc

SEQ ID NO: 397090 - DNA, 25 bp, Homo sapien
caggggctggatacacggctcactg

SEQ ID NO: 397091 - DNA, 25 bp, Homo sapien
ctggatacacggctcactggggtgc

SEQ ID NO: 397092 - DNA, 25 bp, Homo sapien
ccggctggcagctagactgctggca

SEQ ID NO: 397093 - DNA, 25 bp, Homo sapien
gccggctggcagctagactgctggc

SEQ ID NO: 397094 - DNA, 25 bp, Homo sapien
agccggctggcagctagactgctgg

SEQ ID NO: 397095 - DNA, 25 bp, Homo sapien
aagccggctggcagctagactgctg

SEQ ID NO: 397096 - DNA, 25 bp, Homo sapien
ggtgggcgcacagcacacaggtttg

SEQ ID NO: 397097 - DNA, 25 bp, Homo sapien
gaggcctggcggcaatagctgggct

SEQ ID NO: 397098 - DNA, 25 bp, Homo sapien
ggcctggcggcaatagctgggctgg

SEQ ID NO: 397099 - DNA, 25 bp, Homo sapien
ggaggcctggcggcaatagctgggc

SEQ ID NO: 397100 - DNA, 25 bp, Homo sapien
tgggaggtccaaggactggcaggga

SEQ ID NO: 397101 - DNA, 25 bp, Homo sapien
gggccgcagacgctttattggtgct

SEQ ID NO: 397102 - DNA, 25 bp, Homo sapien
ccgcagacgctttattggtgctcag

SEQ ID NO: 397103 - DNA, 25 bp, Homo sapien
cagcgaccagcggagggttgtggtc

SEQ ID NO: 397104 - DNA, 25 bp, Homo sapien
agctgggggaggtgtgtgagtgagt

SEQ ID NO: 397105 - DNA, 25 bp, Homo sapien
ggtgagctgggggaggtgtgtgagt

SEQ ID NO: 397106 - DNA, 25 bp, Homo sapien
gctggagtggggaggcggtgagctg

SEQ ID NO: 397107 - DNA, 25 bp, Homo sapien
ctggagtggggaggcggtgagctgg

SEQ ID NO: 397108 - DNA, 25 bp, Homo sapien
tcgactacccgccaagagtcagtgc

SEQ ID NO: 397109 - DNA, 25 bp, Homo sapien
ctctctgggcagtcgactacccgcc

SEQ ID NO: 397110 - DNA, 25 bp, Homo sapien
ggcagtcgactacccgccaagagtc

SEQ ID NO: 397111 - DNA, 25 bp, Homo sapien
gactacccgccaagagtcagtgcag

SEQ ID NO: 397112 - DNA, 25 bp, Homo sapien
caggcacatagcagacggacttaga

SEQ ID NO: 397113 - DNA, 25 bp, Homo sapien
acacaggcttgttacagacgggcac

SEQ ID NO: 397114 - DNA, 25 bp, Homo sapien
aggcttgttacagacgggcacgcag

SEQ ID NO: 397115 - DNA, 25 bp, Homo sapien
aagactcggagcaggtaggcacgaa

SEQ ID NO: 397116 - DNA, 25 bp, Homo sapien
gcagcaagcaggctggcagctagac

SEQ ID NO: 397117 - DNA, 25 bp, Homo sapien
gaggcggtgcagcaagcaggctggc

SEQ ID NO: 397118 - DNA, 25 bp, Homo sapien
caggaggcggtgcagcaagcaggct

SEQ ID NO: 397119 - DNA, 25 bp, Homo sapien
cagcaagcaggctggcagctagact

SEQ ID NO: 397120 - DNA, 25 bp, Homo sapien
caggtggacttgcacacagggtggc

SEQ ID NO: 397121 - DNA, 25 bp, Homo sapien
cagaggcaccgcaggaggggacggg

SEQ ID NO: 397122 - DNA, 25 bp, Homo sapien
ggcacgcagcaggtggacttgcaca

SEQ ID NO: 397123 - DNA, 25 bp, Homo sapien
aggaggcagaggcaccgcaggaggg

SEQ ID NO: 397124 - DNA, 25 bp, Homo sapien
agggaaacacaggaggccgtgcggc

SEQ ID NO: 397125 - DNA, 25 bp, Homo sapien
agagcagaggctgtagcaggcaggg

SEQ ID NO: 397126 - DNA, 25 bp, Homo sapien
ggaaacacaggaggccgtgcggcag

SEQ ID NO: 397127 - DNA, 25 bp, Homo sapien
gaggagggaaacacaggaggccgtg

SEQ ID NO: 397128 - DNA, 25 bp, Homo sapien
gggactccggatcacatccagggct

SEQ ID NO: 397129 - DNA, 25 bp, Homo sapien
ggactccggatcacatccagggctg

SEQ ID NO: 397130 - DNA, 25 bp, Homo sapien
aagggactccggatcacatccaggg

SEQ ID NO: 397131 - DNA, 25 bp, Homo sapien
agggactccggatcacatccagggc

SEQ ID NO: 397132 - DNA, 25 bp, Homo sapien
gtgtgagacagaggcggctttatta

SEQ ID NO: 397133 - DNA, 25 bp, Homo sapien
ctgctgggggttagttctgcagaac

SEQ ID NO: 397134 - DNA, 25 bp, Homo sapien
catcctggtccccaagacaaagagc

SEQ ID NO: 397135 - DNA, 25 bp, Homo sapien
gaggcggctttattagaactagagg

SEQ ID NO: 397136 - DNA, 25 bp, Homo sapien
tcaaatgcgcacagcgacctggcgg

SEQ ID NO: 397137 - DNA, 25 bp, Homo sapien
agcttgtgccacttccccgacgtgg

SEQ ID NO: 397138 - DNA, 25 bp, Homo sapien
cgcacagcgacctggcggaaagagt

SEQ ID NO: 397139 - DNA, 25 bp, Homo sapien
cctggcggaaagagtgcagcagctt

SEQ ID NO: 397140 - DNA, 25 bp, Homo sapien
ctggggtggggaggaggtgagctgg

SEQ ID NO: 397141 - DNA, 25 bp, Homo sapien
tggggtggggaggaggtgagctggg

SEQ ID NO: 397142 - DNA, 25 bp, Homo sapien
ccaggagtcggagtaagcgctggag

SEQ ID NO: 397143 - DNA, 25 bp, Homo sapien
aggagtcggagtaagcgctggagca

SEQ ID NO: 397144 - DNA, 25 bp, Homo sapien
tcggagtaagcgctggagcagacag

SEQ ID NO: 397145 - DNA, 25 bp, Homo sapien
gagtcggagtaagcgctggagcaga

SEQ ID NO: 397146 - DNA, 25 bp, Homo sapien
gccggctggcagctagactgctggc

SEQ ID NO: 397147 - DNA, 25 bp, Homo sapien
ccggctggcagctagactgctggca

SEQ ID NO: 397148 - DNA, 25 bp, Homo sapien
agccggctggcagctagactgctgg

SEQ ID NO: 397149 - DNA, 25 bp, Homo sapien
aagccggctggcagctagactgctg

SEQ ID NO: 397150 - DNA, 25 bp, Homo sapien
gatgggcttgcagtagacagtcttg

SEQ ID NO: 397151 - DNA, 25 bp, Homo sapien
gcgtgaagaggaagccctagagcag

SEQ ID NO: 397152 - DNA, 25 bp, Homo sapien
ctggcagcgtgaagaggaagcccta

SEQ ID NO: 397153 - DNA, 25 bp, Homo sapien
ctggcagcatgaagaggaatcctca

SEQ ID NO: 397154 - DNA, 25 bp, Homo sapien
caggccaggcgggagcttgcggggc

SEQ ID NO: 397155 - DNA, 25 bp, Homo sapien
ttcttgcctgagcagaggctgtagc

SEQ ID NO: 397156 - DNA, 25 bp, Homo sapien
ctgtagcaggccaggcgggagcttg

SEQ ID NO: 397157 - DNA, 25 bp, Homo sapien
acagcaggaggagacgggcacacag

SEQ ID NO: 397158 - DNA, 25 bp, Homo sapien
ttgtcacattgggtataagcaacac

SEQ ID NO: 397159 - DNA, 25 bp, Homo sapien
gactggagaatcctgcttggcagca

SEQ ID NO: 397160 - DNA, 25 bp, Homo sapien
aagtgtgacgcgctcaaaatcccct

SEQ ID NO: 397161 - DNA, 25 bp, Homo sapien
ctctgtggctactgatggagctggt

SEQ ID NO: 397162 - DNA, 25 bp, Homo sapien
ggtggcgtgtggctgggctggtact

SEQ ID NO: 397163 - DNA, 25 bp, Homo sapien
tggcgtgtggctgggctggtactgg

SEQ ID NO: 397164 - DNA, 25 bp, Homo sapien
gtggcgtgtggctgggctggtactg

SEQ ID NO: 397165 - DNA, 25 bp, Homo sapien
gcagctcacgggcacatagcaggat

SEQ ID NO: 397166 - DNA, 25 bp, Homo sapien
ggctgtgtatgcagcaggttggctg

SEQ ID NO: 397167 - DNA, 25 bp, Homo sapien
aggagggagccacgcacacaatgcg

SEQ ID NO: 397168 - DNA, 25 bp, Homo sapien
acacaatgcgcgtgcagctcacggg

SEQ ID NO: 397169 - DNA, 25 bp, Homo sapien
caccccgaagattggcaagagggag

SEQ ID NO: 397170 - DNA, 25 bp, Homo sapien
gcagcaccccgaagattggcaagag

SEQ ID NO: 397171 - DNA, 25 bp, Homo sapien
cagcaccccgaagattggcaagagg

SEQ ID NO: 397172 - DNA, 25 bp, Homo sapien
ccgaagattggcaagagggagtcac

SEQ ID NO: 397173 - DNA, 25 bp, Homo sapien
cagcaggaaggggtgctgcaggaga

SEQ ID NO: 397174 - DNA, 25 bp, Homo sapien
tcagcagcaggaaggggtgctgcag

SEQ ID NO: 397175 - DNA, 25 bp, Homo sapien
agcagcaggaaggggtgctgcagga

SEQ ID NO: 397176 - DNA, 25 bp, Homo sapien
gcaggaaggggtgctgcaggagatg

SEQ ID NO: 397177 - DNA, 25 bp, Homo sapien
cacggagggatacaggtgtgtaccc

SEQ ID NO: 397178 - DNA, 25 bp, Homo sapien
tgtgtacccccgtgtaccaggagca

SEQ ID NO: 397179 - DNA, 25 bp, Homo sapien
tgcttattcacggagggatacaggt

SEQ ID NO: 397180 - DNA, 25 bp, Homo sapien
caccagatgcttattcacggaggga

SEQ ID NO: 397181 - DNA, 25 bp, Homo sapien
tgtgcccatgagcttcaagtcagct

SEQ ID NO: 397182 - DNA, 25 bp, Homo sapien
ctgcaggcccattgtgtgtgcagcc

SEQ ID NO: 397183 - DNA, 25 bp, Homo sapien
tgcccatgagcttcaagtcagctgt

SEQ ID NO: 397184 - DNA, 25 bp, Homo sapien
gctgcaggcccattgtgtgtgcagc

SEQ ID NO: 397185 - DNA, 25 bp, Homo sapien
tcctcgggctgccagccagcctgct

SEQ ID NO: 397186 - DNA, 25 bp, Homo sapien
cagctgctcctcgggctgccagcca

SEQ ID NO: 397187 - DNA, 25 bp, Homo sapien
cagccagcctgctgcgcgcccagcc

SEQ ID NO: 397188 - DNA, 25 bp, Homo sapien
ctgccagccagcctgctgcgcgccc

SEQ ID NO: 397189 - DNA, 25 bp, Homo sapien
gtgcccgtgagcttcaagccagccg

SEQ ID NO: 397190 - DNA, 25 bp, Homo sapien
ccgtgagcttcaagccagccgtgtg

SEQ ID NO: 397191 - DNA, 25 bp, Homo sapien
cccgtgagcttcaagccagccgtgt

SEQ ID NO: 397192 - DNA, 25 bp, Homo sapien
tgcccgtgagcttcaagccagccgt

SEQ ID NO: 397193 - DNA, 25 bp, Homo sapien
tttcttgttgaggttactcagttca

SEQ ID NO: 397194 - DNA, 25 bp, Homo sapien
ttcttgttgaggttactcagttcag

SEQ ID NO: 397195 - DNA, 25 bp, Homo sapien
agcacctggaggacccgcaggaggc

SEQ ID NO: 397196 - DNA, 25 bp, Homo sapien
gcccgacctgagcatgcggcaggcc

SEQ ID NO: 397197 - DNA, 25 bp, Homo sapien
cagcacctggaggacccgcaggagg

SEQ ID NO: 397198 - DNA, 25 bp, Homo sapien
cgacctgagcatgcggcaggccagc

SEQ ID NO: 397199 - DNA, 25 bp, Homo sapien
aaacaatagcagagagttgattatc

SEQ ID NO: 397200 - DNA, 25 bp, Homo sapien
ctaaacaatagcagagagttgatta

SEQ ID NO: 397201 - DNA, 25 bp, Homo sapien
ttgattatcaggataatccatcagc

SEQ ID NO: 397202 - DNA, 25 bp, Homo sapien
catcagcagcaggccggtgtggcag

SEQ ID NO: 397203 - DNA, 25 bp, Homo sapien
ggatgcagccgtgctgggggttgag

SEQ ID NO: 397204 - DNA, 25 bp, Homo sapien
atgcagccgtgctgggggttgagct

SEQ ID NO: 397205 - DNA, 25 bp, Homo sapien
gtggatgcagccgtgctgggggttg

SEQ ID NO: 397206 - DNA, 25 bp, Homo sapien
tggatgcagccgtgctgggggttga

SEQ ID NO: 397207 - DNA, 25 bp, Homo sapien
gccaggagtcggagcaagagtcaca

SEQ ID NO: 397208 - DNA, 25 bp, Homo sapien
ccaggagtcggagcaagagtcacag

SEQ ID NO: 397209 - DNA, 25 bp, Homo sapien
tgccaggagtcggagcaagagtcac

SEQ ID NO: 397210 - DNA, 25 bp, Homo sapien
acaggcttgcagcagacagtcttgc

SEQ ID NO: 397211 - DNA, 25 bp, Homo sapien
actgctggcagcacgagggcgtgca

SEQ ID NO: 397212 - DNA, 25 bp, Homo sapien
agactgctggcagcacgagggcgtg

SEQ ID NO: 397213 - DNA, 25 bp, Homo sapien
ttgcagcagacagtcttgcagcaga

SEQ ID NO: 397214 - DNA, 25 bp, Homo sapien
ccaggcgggaacatgtggggcggca

SEQ ID NO: 397215 - DNA, 25 bp, Homo sapien
ggcacgcggcgggcgggtctgcaca

SEQ ID NO: 397216 - DNA, 25 bp, Homo sapien
gacgggcacgcggcgggcgggtctg

SEQ ID NO: 397217 - DNA, 25 bp, Homo sapien
cggcgggcgggtctgcacacagggc

SEQ ID NO: 397218 - DNA, 25 bp, Homo sapien
ggtgggggactcatagtgcccagtg

SEQ ID NO: 397219 - DNA, 25 bp, Homo sapien
cagccgaggggccagtagtgggaga

SEQ ID NO: 397220 - DNA, 25 bp, Homo sapien
ggggactcatagtgcccagtggccc

SEQ ID NO: 397221 - DNA, 25 bp, Homo sapien
gagaggtgggggactcatagtgccc

SEQ ID NO: 397222 - DNA, 25 bp, Homo sapien
tggcggcgcagcaggggggctcgca

SEQ ID NO: 397223 - DNA, 25 bp, Homo sapien
ggctcgcagcagctctccgggcagt

SEQ ID NO: 397224 - DNA, 25 bp, Homo sapien
agcagctggcggcgcagcagggggg

SEQ ID NO: 397225 - DNA, 25 bp, Homo sapien
gggcacagcagctggcggcgcagca

SEQ ID NO: 397226 - DNA, 25 bp, Homo sapien
ccacctgaatcctggatttgcagca

SEQ ID NO: 397227 - DNA, 25 bp, Homo sapien
ttcgtggaaagaccctcaagccgct

SEQ ID NO: 397228 - DNA, 25 bp, Homo sapien
cctgttctgagaaggccgtgggttt

SEQ ID NO: 397229 - DNA, 25 bp, Homo sapien
tcctcttctggtccccgtggtagac

SEQ ID NO: 397230 - DNA, 25 bp, Homo sapien
tgcccctcggtgttgaacaatctgg

SEQ ID NO: 397231 - DNA, 25 bp, Homo sapien
tgtgctcgcactaggcctcgatctg

SEQ ID NO: 397232 - DNA, 25 bp, Homo sapien
gggacctgtgctcgcactaggcctc

SEQ ID NO: 397233 - DNA, 25 bp, Homo sapien
gccgccggttggtgggcactgggaa

SEQ ID NO: 397234 - DNA, 25 bp, Homo sapien
cctaggccgccggttggtgggcact

SEQ ID NO: 397235 - DNA, 25 bp, Homo sapien
agctggcaacttggccaaactgcag

SEQ ID NO: 397236 - DNA, 25 bp, Homo sapien
ggcaacttggccaaactgcagctct

SEQ ID NO: 397237 - DNA, 25 bp, Homo sapien
ccaagtcagcttgtcgcagagcaaa

SEQ ID NO: 397238 - DNA, 25 bp, Homo sapien
ccttggaactgggtgattctgcaaa

SEQ ID NO: 397239 - DNA, 25 bp, Homo sapien
caaacaatacgagagccaagtcagc

SEQ ID NO: 397240 - DNA, 25 bp, Homo sapien
ctggcttcacgcgatggagggcgca

SEQ ID NO: 397241 - DNA, 25 bp, Homo sapien
tgttcactctgctcccgcagcttgg

SEQ ID NO: 397242 - DNA, 25 bp, Homo sapien
gaagcctgtgggccacttcctgcca

SEQ ID NO: 397243 - DNA, 25 bp, Homo sapien
ctgctgcttgttcactctgctcccg

SEQ ID NO: 397244 - DNA, 25 bp, Homo sapien
tgggtctctcactgctgccccggac

SEQ ID NO: 397245 - DNA, 25 bp, Homo sapien
ggtgggcacagtgcgtgctgctgga

SEQ ID NO: 397246 - DNA, 25 bp, Homo sapien
acctcgccggcttcagagggtgtca

SEQ ID NO: 397247 - DNA, 25 bp, Homo sapien
gaaaggccaagaattccgcagtcag

SEQ ID NO: 397248 - DNA, 25 bp, Homo sapien
gagtgaaatttgagtaactgcaagg

SEQ ID NO: 397249 - DNA, 25 bp, Homo sapien
ggttaggtcgctgcgggcgagggcc

SEQ ID NO: 397250 - DNA, 25 bp, Homo sapien
aaatgcggcattctcggtttcgatg

SEQ ID NO: 397251 - DNA, 25 bp, Homo sapien
agggcctgggcataaatgcggcatt

SEQ ID NO: 397252 - DNA, 25 bp, Homo sapien
ttcgatgctcccctgtaactggcat

SEQ ID NO: 397253 - DNA, 25 bp, Homo sapien
cctgagcggtactgacggcgaagat

SEQ ID NO: 397254 - DNA, 25 bp, Homo sapien
tgggtgctttgacacgggattctac

SEQ ID NO: 397255 - DNA, 25 bp, Homo sapien
gtgcatcctgcagtcaaagccacgg

SEQ ID NO: 397256 - DNA, 25 bp, Homo sapien
tcccatgctgctggacagaaccggg

SEQ ID NO: 397257 - DNA, 25 bp, Homo sapien
gttctgctcgttgtgaactgactcc

SEQ ID NO: 397258 - DNA, 25 bp, Homo sapien
gctgttctgctcgttgtgaactgac

SEQ ID NO: 397259 - DNA, 25 bp, Homo sapien
tgttctgctcgttgtgaactgactc

SEQ ID NO: 397260 - DNA, 25 bp, Homo sapien
agctgttctgctcgttgtgaactga

SEQ ID NO: 397261 - DNA, 25 bp, Homo sapien
tggtattcacgaggttttagacgtg

SEQ ID NO: 397262 - DNA, 25 bp, Homo sapien
tggcttgttacctctttgatggtat

SEQ ID NO: 397263 - DNA, 25 bp, Homo sapien
tgttacctctttgatggtattcacg

SEQ ID NO: 397264 - DNA, 25 bp, Homo sapien
gatggtattcacgaggttttagacg

SEQ ID NO: 397265 - DNA, 25 bp, Homo sapien
agaacagtcccctctaaatgtttgg

SEQ ID NO: 397266 - DNA, 25 bp, Homo sapien
catttaacccgttatacagaacagt

SEQ ID NO: 397267 - DNA, 25 bp, Homo sapien
gaccggaaatgcctccctactgtct

SEQ ID NO: 397268 - DNA, 25 bp, Homo sapien
ggatcgtagattgggagtggaccgg

SEQ ID NO: 397269 - DNA, 25 bp, Homo sapien
tgactgtgtccttaagacggctgga

SEQ ID NO: 397270 - DNA, 25 bp, Homo sapien
cagtcaggtcttttctaccatgaaa

SEQ ID NO: 397271 - DNA, 25 bp, Homo sapien
ggcattcaggcgtctgagtggcccc

SEQ ID NO: 397272 - DNA, 25 bp, Homo sapien
gaggccctatcagtcttccctgtgg

SEQ ID NO: 397273 - DNA, 25 bp, Homo sapien
caggctccgcatacacacaggtgtg

SEQ ID NO: 397274 - DNA, 25 bp, Homo sapien
ttacgagggaccacaaagacacagc

SEQ ID NO: 397275 - DNA, 25 bp, Homo sapien
gacaggtgacgcctgatgttcctcc

SEQ ID NO: 397276 - DNA, 25 bp, Homo sapien
tcacttgtcctgttgtatgggaaag

SEQ ID NO: 397277 - DNA, 25 bp, Homo sapien
ttcccatgcctggactgtgagcgct

SEQ ID NO: 397278 - DNA, 25 bp, Homo sapien
gacaccagaagtgggcaagtcctca

SEQ ID NO: 397279 - DNA, 25 bp, Homo sapien
gatcccataggagcgtcagggagat

SEQ ID NO: 397280 - DNA, 25 bp, Homo sapien
aacccagccatgagatgtccgaggg

SEQ ID NO: 397281 - DNA, 25 bp, Homo sapien
ccgttgtcacgagagcctggctttg

SEQ ID NO: 397282 - DNA, 25 bp, Homo sapien
tccaggttgtgacccgttgtcacga

SEQ ID NO: 397283 - DNA, 25 bp, Homo sapien
tcagatctgtccaggttgtgacccg

SEQ ID NO: 397284 - DNA, 25 bp, Homo sapien
ttgaggggacaaagcaaggtgaacc

SEQ ID NO: 397285 - DNA, 25 bp, Homo sapien
tggttgaagtagctccacgcctggc

SEQ ID NO: 397286 - DNA, 25 bp, Homo sapien
aaatggaacgcagggcaagaactcg

SEQ ID NO: 397287 - DNA, 25 bp, Homo sapien
tgtgactgaacccacacagagtgtc

SEQ ID NO: 397288 - DNA, 25 bp, Homo sapien
ttgcaggcaaatgagatggagccct

SEQ ID NO: 397289 - DNA, 25 bp, Homo sapien
gacttaggattttgatgtggttccc

SEQ ID NO: 397290 - DNA, 25 bp, Homo sapien
tctaccatatcttagctcagagcac

SEQ ID NO: 397291 - DNA, 25 bp, Homo sapien
tatccccacacttgactgggctgtg

SEQ ID NO: 397292 - DNA, 25 bp, Homo sapien
tcaaaattcagaagggactctacca

SEQ ID NO: 397293 - DNA, 25 bp, Homo sapien
caaagggcttcaggtagattatcag

SEQ ID NO: 397294 - DNA, 25 bp, Homo sapien
gatggaatacccagaacgctccttc

SEQ ID NO: 397295 - DNA, 25 bp, Homo sapien
tgtgggccccatgaggagtccatta

SEQ ID NO: 397296 - DNA, 25 bp, Homo sapien
acttagaaatacttccaggaaatgc

SEQ ID NO: 397297 - DNA, 25 bp, Homo sapien
ttgggctttcctgtatatatggaca

SEQ ID NO: 397298 - DNA, 25 bp, Homo sapien
tcagcaactgtgccaaactcacttt

SEQ ID NO: 397299 - DNA, 25 bp, Homo sapien
ctttttcagtccttataccttatat

SEQ ID NO: 397300 - DNA, 25 bp, Homo sapien
taagcaacaaagtaaccagcaggaa

SEQ ID NO: 397301 - DNA, 25 bp, Homo sapien
acagcgggtcaatcgggaaagcaca

SEQ ID NO: 397302 - DNA, 25 bp, Homo sapien
tcacagcgggtcaatcgggaaagca

SEQ ID NO: 397303 - DNA, 25 bp, Homo sapien
ctcacagcgggtcaatcgggaaagc

SEQ ID NO: 397304 - DNA, 25 bp, Homo sapien
cagcgggtcaatcgggaaagcacac

SEQ ID NO: 397305 - DNA, 25 bp, Homo sapien
ttatgaaaacatcaagcatatgttg

SEQ ID NO: 397306 - DNA, 25 bp, Homo sapien
aaacatcaagcatatgttgcagtga

SEQ ID NO: 397307 - DNA, 25 bp, Homo sapien
tgaaaacatcaagcatatgttgcag

SEQ ID NO: 397308 - DNA, 25 bp, Homo sapien
catcaagcatatgttgcagtgaaca

SEQ ID NO: 397309 - DNA, 25 bp, Homo sapien
tccacataaggtactgaacgacgtc

SEQ ID NO: 397310 - DNA, 25 bp, Homo sapien
gaacgacgtccctgaaatgttgcag

SEQ ID NO: 397311 - DNA, 25 bp, Homo sapien
cagttaaaacataggatgcccagct

SEQ ID NO: 397312 - DNA, 25 bp, Homo sapien
gagagttccacgagttagccagtta

SEQ ID NO: 397313 - DNA, 25 bp, Homo sapien
cctagtatctatgcctggggtccca

SEQ ID NO: 397314 - DNA, 25 bp, Homo sapien
tccagtttttgcaccgaaaggttca

SEQ ID NO: 397315 - DNA, 25 bp, Homo sapien
tcccagggaacttgagttgtcatct

SEQ ID NO: 397316 - DNA, 25 bp, Homo sapien
ccactcccagggaacttgagttgtc

SEQ ID NO: 397317 - DNA, 25 bp, Homo sapien
ttctgagatttatgcaaatggtgca

SEQ ID NO: 397318 - DNA, 25 bp, Homo sapien
caacaagattacttatgtgaaactg

SEQ ID NO: 397319 - DNA, 25 bp, Homo sapien
aggaagggcatggacacaaatccaa

SEQ ID NO: 397320 - DNA, 25 bp, Homo sapien
aatccaaaccataaatcagttgccc

SEQ ID NO: 397321 - DNA, 25 bp, Homo sapien
agtcacctgaacaatgacccatcat

SEQ ID NO: 397322 - DNA, 25 bp, Homo sapien
ctcgggtgggatgtttgttggctct

SEQ ID NO: 397323 - DNA, 25 bp, Homo sapien
tttattcaccaatttgtacattatt

SEQ ID NO: 397324 - DNA, 25 bp, Homo sapien
tcacctgaacaatgacccatcatct

SEQ ID NO: 397325 - DNA, 25 bp, Homo sapien
tccctgaggctccattgctgcttgg

SEQ ID NO: 397326 - DNA, 25 bp, Homo sapien
tgaggctccattgctgcttggtggc

SEQ ID NO: 397327 - DNA, 25 bp, Homo sapien
ggctccattgctgcttggtggccat

SEQ ID NO: 397328 - DNA, 25 bp, Homo sapien
ccctgaggctccattgctgcttggt

SEQ ID NO: 397329 - DNA, 25 bp, Homo sapien
gaatgttcgcttttagtctggccag

SEQ ID NO: 397330 - DNA, 25 bp, Homo sapien
tctgcggaaactcgaggacattcac

SEQ ID NO: 397331 - DNA, 25 bp, Homo sapien
gtgaccatgccgaccacaaaggtgt

SEQ ID NO: 397332 - DNA, 25 bp, Homo sapien
tacacaggcaaggattggcacaacc

SEQ ID NO: 397333 - DNA, 25 bp, Homo sapien
cccaatcgtctagggtgctggcccg

SEQ ID NO: 397334 - DNA, 25 bp, Homo sapien
agccccgtaggagcgttggccaaag

SEQ ID NO: 397335 - DNA, 25 bp, Homo sapien
tcacaggtaaaacgggtcttcttga

SEQ ID NO: 397336 - DNA, 25 bp, Homo sapien
cggctcctgagagggaacgtcaccc

SEQ ID NO: 397337 - DNA, 25 bp, Homo sapien
tgcagctcctgtcaggtggacgtag

SEQ ID NO: 397338 - DNA, 25 bp, Homo sapien
gctcctgtcaggtggacgtagccct

SEQ ID NO: 397339 - DNA, 25 bp, Homo sapien
cagctcctgtcaggtggacgtagcc

SEQ ID NO: 397340 - DNA, 25 bp, Homo sapien
tcctgtcaggtggacgtagcccttc

SEQ ID NO: 397341 - DNA, 25 bp, Homo sapien
ggaaggtctttgcccctcacagaaa

SEQ ID NO: 397342 - DNA, 25 bp, Homo sapien
agacttcttttggtagctgatagcc

SEQ ID NO: 397343 - DNA, 25 bp, Homo sapien
tttggtagctgatagccttaaacag

SEQ ID NO: 397344 - DNA, 25 bp, Homo sapien
cttcttttggtagctgatagcctta

SEQ ID NO: 397345 - DNA, 25 bp, Homo sapien
cagactttgagagggacgatctact

SEQ ID NO: 397346 - DNA, 25 bp, Homo sapien
cattgtgagaacacgccaagttggc

SEQ ID NO: 397347 - DNA, 25 bp, Homo sapien
tcaacttagtctgggagtcagccct

SEQ ID NO: 397348 - DNA, 25 bp, Homo sapien
agtgctctcagctgaaggtctgggt

SEQ ID NO: 397349 - DNA, 25 bp, Homo sapien
gaatgtccctgtcatgagttccatc

SEQ ID NO: 397350 - DNA, 25 bp, Homo sapien
gttgtgcagtgcacggtccactcaa

SEQ ID NO: 397351 - DNA, 25 bp, Homo sapien
tcaaagaactcatcgatcacactgt

SEQ ID NO: 397352 - DNA, 25 bp, Homo sapien
ctttcagtgaggatccgtggatgga

SEQ ID NO: 397353 - DNA, 25 bp, Homo sapien
gcagccacaaaactgtaacctcaag

SEQ ID NO: 397354 - DNA, 25 bp, Homo sapien
agagcagccacaaaactgtaacctc

SEQ ID NO: 397355 - DNA, 25 bp, Homo sapien
ctaagagcagccacaaaactgtaac

SEQ ID NO: 397356 - DNA, 25 bp, Homo sapien
gagcagccacaaaactgtaacctca

SEQ ID NO: 397357 - DNA, 25 bp, Homo sapien
taacaagcttcacacgcaacacagg

SEQ ID NO: 397358 - DNA, 25 bp, Homo sapien
ctttgggaaagtaggtcagcagcac

SEQ ID NO: 397359 - DNA, 25 bp, Homo sapien
aaatacagcgtagtcagcccttgcg

SEQ ID NO: 397360 - DNA, 25 bp, Homo sapien
gaccaagcgcttcgtggcagggaaa

SEQ ID NO: 397361 - DNA, 25 bp, Homo sapien
aaaacaactaaagcgctccagcaca

SEQ ID NO: 397362 - DNA, 25 bp, Homo sapien
aatgcccgttgttgctatagcctca

SEQ ID NO: 397363 - DNA, 25 bp, Homo sapien
tatgagagcctgcttacaatgcccg

SEQ ID NO: 397364 - DNA, 25 bp, Homo sapien
gacgcttcctgtgaggtgcacgctc

SEQ ID NO: 397365 - DNA, 25 bp, Homo sapien
tgtggaactagccaaccactgtgga

SEQ ID NO: 397366 - DNA, 25 bp, Homo sapien
atttcttttcttcgccgagcatcag

SEQ ID NO: 397367 - DNA, 25 bp, Homo sapien
gtaagtgcttatctcttaggatctg

SEQ ID NO: 397368 - DNA, 25 bp, Homo sapien
tagccatccactgtggaactagcca

SEQ ID NO: 397369 - DNA, 25 bp, Homo sapien
ctgcgtgtgactgtcataaggagca

SEQ ID NO: 397370 - DNA, 25 bp, Homo sapien
agtgcatgcctgtgtacgtggagcg

SEQ ID NO: 397371 - DNA, 25 bp, Homo sapien
ctgtgtacgtggagcgtgggcccag

SEQ ID NO: 397372 - DNA, 25 bp, Homo sapien
actgtcataaggagcagcaccaggg

SEQ ID NO: 397373 - DNA, 25 bp, Homo sapien
gagcgttgctcgttgccatcttctg

SEQ ID NO: 397374 - DNA, 25 bp, Homo sapien
catcttctgagtgtggcaggcgctc

SEQ ID NO: 397375 - DNA, 25 bp, Homo sapien
tgtttgcttatcgagtcccaagact

SEQ ID NO: 397376 - DNA, 25 bp, Homo sapien
gcttcctgtgggcacgcctgcgtag

SEQ ID NO: 397377 - DNA, 25 bp, Homo sapien
tgacaatcataattgtgttgcctgt

SEQ ID NO: 397378 - DNA, 25 bp, Homo sapien
agactctatctctacttatatttta

SEQ ID NO: 397379 - DNA, 25 bp, Homo sapien
ttgacaatcataattgtgttgcctg

SEQ ID NO: 397380 - DNA, 25 bp, Homo sapien
gaaagcccgctctgttcttggcctg

SEQ ID NO: 397381 - DNA, 25 bp, Homo sapien
ttgacggtgtgtgttttggagctca

SEQ ID NO: 397382 - DNA, 25 bp, Homo sapien
cacacaagacctagttatcagaaag

SEQ ID NO: 397383 - DNA, 25 bp, Homo sapien
tgaccggtaatccagaggtctgggt

SEQ ID NO: 397384 - DNA, 25 bp, Homo sapien
catggagggttggtgtatcctgaca

SEQ ID NO: 397385 - DNA, 25 bp, Homo sapien
ggaaagcactcaaatgggtcatgga

SEQ ID NO: 397386 - DNA, 25 bp, Homo sapien
gttagacttaagcaacacaagggca

SEQ ID NO: 397387 - DNA, 25 bp, Homo sapien
tgcagtcataggacccagaagtcag

SEQ ID NO: 397388 - DNA, 25 bp, Homo sapien
tgattgcggttctacgctgtccaga

SEQ ID NO: 397389 - DNA, 25 bp, Homo sapien
ctatccaagaggagctgagtccccg

SEQ ID NO: 397390 - DNA, 25 bp, Homo sapien
tgtccagacgcgcaggtggcattct

SEQ ID NO: 397391 - DNA, 25 bp, Homo sapien
cgggaaaatccagcaggttctaagc

SEQ ID NO: 397392 - DNA, 25 bp, Homo sapien
tctcgggagtttaggtggcagcttc

SEQ ID NO: 397393 - DNA, 25 bp, Homo sapien
cagggaagttcatctacaagggtca

SEQ ID NO: 397394 - DNA, 25 bp, Homo sapien
ccctttaggatggaggccaccgtga

SEQ ID NO: 397395 - DNA, 25 bp, Homo sapien
taaagcgcgcagtgtgttcgggttc

SEQ ID NO: 397396 - DNA, 25 bp, Homo sapien
ggtggcaccataagcactgcacagg

SEQ ID NO: 397397 - DNA, 25 bp, Homo sapien
gattccgttttatcctagagccagc

SEQ ID NO: 397398 - DNA, 25 bp, Homo sapien
tagagccagcgttttccaattgagc

SEQ ID NO: 397399 - DNA, 25 bp, Homo sapien
tctaaatataacgagaggtggcacc

SEQ ID NO: 397400 - DNA, 25 bp, Homo sapien
gaggttaggtgcgtgtttcctgtgc

SEQ ID NO: 397401 - DNA, 25 bp, Homo sapien
gttggtgaggttaggtgcgtgtttc

SEQ ID NO: 397402 - DNA, 25 bp, Homo sapien
tggtgaggttaggtgcgtgtttcct

SEQ ID NO: 397403 - DNA, 25 bp, Homo sapien
tgcttctgggggctcgtcgggggga

SEQ ID NO: 397404 - DNA, 25 bp, Homo sapien
ttggctggttcctccgctccattct

SEQ ID NO: 397405 - DNA, 25 bp, Homo sapien
tagcagaatgtgctactgttgcttt

SEQ ID NO: 397406 - DNA, 25 bp, Homo sapien
tctcgccgggacctcatgtgagaaa

SEQ ID NO: 397407 - DNA, 25 bp, Homo sapien
tttttcattccgctctgtagcagaa

SEQ ID NO: 397408 - DNA, 25 bp, Homo sapien
ttgtctcctgaactcgatggtctgt

SEQ ID NO: 397409 - DNA, 25 bp, Homo sapien
tcgggcagcctcagagcacgcaggt

SEQ ID NO: 397410 - DNA, 25 bp, Homo sapien
ttctggagctcagggtcgggcagcc

SEQ ID NO: 397411 - DNA, 25 bp, Homo sapien
tctgccttgtgtcatggctgacatg

SEQ ID NO: 397412 - DNA, 25 bp, Homo sapien
tcaaagggagctgaatcaacactgc

SEQ ID NO: 397413 - DNA, 25 bp, Homo sapien
cgccttcaaagggagctgaatcaac

SEQ ID NO: 397414 - DNA, 25 bp, Homo sapien
aagggagctgaatcaacactgcaga

SEQ ID NO: 397415 - DNA, 25 bp, Homo sapien
ccttcaaagggagctgaatcaacac

SEQ ID NO: 397416 - DNA, 25 bp, Homo sapien
ctgtgggggatcccatgagaaagag

SEQ ID NO: 397417 - DNA, 25 bp, Homo sapien
ccttccccggggcagatctccattt

SEQ ID NO: 397418 - DNA, 25 bp, Homo sapien
tgatggtcagcctgtttgtatggat

SEQ ID NO: 397419 - DNA, 25 bp, Homo sapien
agatctccatttctgcattgcaccc

SEQ ID NO: 397420 - DNA, 25 bp, Homo sapien
agccctgatggtcagcctgtttgta

SEQ ID NO: 397421 - DNA, 25 bp, Homo sapien
acattcgagctgctttcagtcggcg

SEQ ID NO: 397422 - DNA, 25 bp, Homo sapien
gctttgacagcaagtggactccgag

SEQ ID NO: 397423 - DNA, 25 bp, Homo sapien
tcagttagggtaagaggcacccacc

SEQ ID NO: 397424 - DNA, 25 bp, Homo sapien
caattgtcgttcactgctgggccat

SEQ ID NO: 397425 - DNA, 25 bp, Homo sapien
tgtgttcagagacaaggcgggtcat

SEQ ID NO: 397426 - DNA, 25 bp, Homo sapien
tagtcgcggcagagaccatttggcc

SEQ ID NO: 397427 - DNA, 25 bp, Homo sapien
tgtgaagtgccacactagggcccag

SEQ ID NO: 397428 - DNA, 25 bp, Homo sapien
gaagtcctcacgtggctccgtttgg

SEQ ID NO: 397429 - DNA, 25 bp, Homo sapien
tgtgaaagggtcatgcaaggctgtc

SEQ ID NO: 397430 - DNA, 25 bp, Homo sapien
cagggaggaaatgctcatcattgca

SEQ ID NO: 397431 - DNA, 25 bp, Homo sapien
tggcgcattcaccagcctcactggg

SEQ ID NO: 397432 - DNA, 25 bp, Homo sapien
gcatggctaccataaacaatttgga

SEQ ID NO: 397433 - DNA, 25 bp, Homo sapien
gggaaggcatctttcacctgagcgt

SEQ ID NO: 397434 - DNA, 25 bp, Homo sapien
gaggaatctttcttcgcccggtaca

SEQ ID NO: 397435 - DNA, 25 bp, Homo sapien
cagaattctgttggctatgacgtgc

SEQ ID NO: 397436 - DNA, 25 bp, Homo sapien
gtgtatataaaaagctcaggcctgg

SEQ ID NO: 397437 - DNA, 25 bp, Homo sapien
tgctcatctgactgcttgcaccctg

SEQ ID NO: 397438 - DNA, 25 bp, Homo sapien
ctgggaacgggagccctgctcatct

SEQ ID NO: 397439 - DNA, 25 bp, Homo sapien
gctgggtcccgtgctgggaacggga

SEQ ID NO: 397440 - DNA, 25 bp, Homo sapien
catctgactgcttgcaccctgtgct

SEQ ID NO: 397441 - DNA, 25 bp, Homo sapien
gagaaacaacgagtttctgtctaga

SEQ ID NO: 397442 - DNA, 25 bp, Homo sapien
tggcgcggagcacgagaaacaacga

SEQ ID NO: 397443 - DNA, 25 bp, Homo sapien
ttctgtctagatcgtgggggaccca

SEQ ID NO: 397444 - DNA, 25 bp, Homo sapien
agaaacagaccggaggacgcgggtg

SEQ ID NO: 397445 - DNA, 25 bp, Homo sapien
caaacgtgcggagcgcctcccggaa

SEQ ID NO: 397446 - DNA, 25 bp, Homo sapien
ggaagctggtcctgcgttctcgccg

SEQ ID NO: 397447 - DNA, 25 bp, Homo sapien
ttcccggcggagcacggcaaacgtg

SEQ ID NO: 397448 - DNA, 25 bp, Homo sapien
ttctcgccgcccggcggaaacagga

SEQ ID NO: 397449 - DNA, 25 bp, Homo sapien
gcactcgggcgcgcaaccccctcac

SEQ ID NO: 397450 - DNA, 25 bp, Homo sapien
ggcagcctggtgcactcgggcgcgc

SEQ ID NO: 397451 - DNA, 25 bp, Homo sapien
agcctggtgcactcgggcgcgcaac

SEQ ID NO: 397452 - DNA, 25 bp, Homo sapien
tgcactcgggcgcgcaaccccctca

SEQ ID NO: 397453 - DNA, 25 bp, Homo sapien
gcaaagatgttggtgttgatgaacg

SEQ ID NO: 397454 - DNA, 25 bp, Homo sapien
caaagatgttggtgttgatgaacgc

SEQ ID NO: 397455 - DNA, 25 bp, Homo sapien
aagggacgctccgtgcactcgagcc

SEQ ID NO: 397456 - DNA, 25 bp, Homo sapien
cctgatggaagggacgctccgtgca

SEQ ID NO: 397457 - DNA, 25 bp, Homo sapien
tgatggaagggacgctccgtgcact

SEQ ID NO: 397458 - DNA, 25 bp, Homo sapien
tggaagggacgctccgtgcactcga

SEQ ID NO: 397459 - DNA, 25 bp, Homo sapien
aagttcctgtggcttcagcgtggct

SEQ ID NO: 397460 - DNA, 25 bp, Homo sapien
agttcctgtggcttcagcgtggctg

SEQ ID NO: 397461 - DNA, 25 bp, Homo sapien
ctcgccacccccagagcggacatgg

SEQ ID NO: 397462 - DNA, 25 bp, Homo sapien
gccacccccagagcggacatggagg

SEQ ID NO: 397463 - DNA, 25 bp, Homo sapien
tctgccacaggtccctcgccacccc

SEQ ID NO: 397464 - DNA, 25 bp, Homo sapien
cccccagagcggacatggaggagct

SEQ ID NO: 397465 - DNA, 25 bp, Homo sapien
cagctccccggaccgcccgatgctt

SEQ ID NO: 397466 - DNA, 25 bp, Homo sapien
gatgcccgatcgcccgatgctgcat

SEQ ID NO: 397467 - DNA, 25 bp, Homo sapien
gtccgatgccaaggattggagccgt

SEQ ID NO: 397468 - DNA, 25 bp, Homo sapien
ccaaggattggagccgtgcccaagg

SEQ ID NO: 397469 - DNA, 25 bp, Homo sapien
tgccgacggccggagctcccaaagt

SEQ ID NO: 397470 - DNA, 25 bp, Homo sapien
gccgacggccggagctcccaaagtg

SEQ ID NO: 397471 - DNA, 25 bp, Homo sapien
ctgccgacggccggagctcccaaag

SEQ ID NO: 397472 - DNA, 25 bp, Homo sapien
ctgctcccggcggtgtctgcagtag

SEQ ID NO: 397473 - DNA, 25 bp, Homo sapien
cgtccatatcctccaaaggtacagg

SEQ ID NO: 397474 - DNA, 25 bp, Homo sapien
tgctgatgaaaagccgcgcatttta

SEQ ID NO: 397475 - DNA, 25 bp, Homo sapien
gcatcagcagacacctcgtccatat

SEQ ID NO: 397476 - DNA, 25 bp, Homo sapien
gatggaccctaaggaaaatcagcat

SEQ ID NO: 397477 - DNA, 25 bp, Homo sapien
tgatggaccctaaggaaaatcagca

SEQ ID NO: 397478 - DNA, 25 bp, Homo sapien
ctgatggaccctaaggaaaatcagc

SEQ ID NO: 397479 - DNA, 25 bp, Homo sapien
ggtgacacggttcacggggcacgtg

SEQ ID NO: 397480 - DNA, 25 bp, Homo sapien
gtggggtgacacggttcacggggca

SEQ ID NO: 397481 - DNA, 25 bp, Homo sapien
tgacacggttcacggggcacgtgtt

SEQ ID NO: 397482 - DNA, 25 bp, Homo sapien
tggggtgacacggttcacggggcac

SEQ ID NO: 397483 - DNA, 25 bp, Homo sapien
agtgggcaccaggaataccaagcca

SEQ ID NO: 397484 - DNA, 25 bp, Homo sapien
gggcaccaggaataccaagccagag

SEQ ID NO: 397485 - DNA, 25 bp, Homo sapien
caggtcatccgccgagcccgagctc

SEQ ID NO: 397486 - DNA, 25 bp, Homo sapien
aggtcatccgccgagcccgagctcc

SEQ ID NO: 397487 - DNA, 25 bp, Homo sapien
ggccagcacaccacagctctcgccg

SEQ ID NO: 397488 - DNA, 25 bp, Homo sapien
aaggccagcacaccacagctctcgc

SEQ ID NO: 397489 - DNA, 25 bp, Homo sapien
gacaaggccagcacaccacagctct

SEQ ID NO: 397490 - DNA, 25 bp, Homo sapien
ctacgacaaggccagcacaccacag

SEQ ID NO: 397491 - DNA, 25 bp, Homo sapien
gggacatccccaagatcctgtgtgg

SEQ ID NO: 397492 - DNA, 25 bp, Homo sapien
ctcatgccccgaatgactgtcaggg

SEQ ID NO: 397493 - DNA, 25 bp, Homo sapien
tcagggcagtcattgcagtgaagcc

SEQ ID NO: 397494 - DNA, 25 bp, Homo sapien
caggaatgcccgacggctcatgaag

SEQ ID NO: 397495 - DNA, 25 bp, Homo sapien
gggcaaaacggtcttggcctctgca

SEQ ID NO: 397496 - DNA, 25 bp, Homo sapien
ggcaaaacggtcttggcctctgcac

SEQ ID NO: 397497 - DNA, 25 bp, Homo sapien
ctccttcttgggcaaaacggtcttg

SEQ ID NO: 397498 - DNA, 25 bp, Homo sapien
tcttgggcaaaacggtcttggcctc

SEQ ID NO: 397499 - DNA, 25 bp, Homo sapien
gaattacagcctagaaaatcagggt

SEQ ID NO: 397500 - DNA, 25 bp, Homo sapien
ccaagtgccatggaataaaatttac

SEQ ID NO: 397501 - DNA, 25 bp, Homo sapien
agtagcccgtccaaatccactttca

SEQ ID NO: 397502 - DNA, 25 bp, Homo sapien
tccactttcacagctatgctaggaa

SEQ ID NO: 397503 - DNA, 25 bp, Homo sapien
cggccgaggctgaggagacggcagg

SEQ ID NO: 397504 - DNA, 25 bp, Homo sapien
agacggccgaggctgaggagacggc

SEQ ID NO: 397505 - DNA, 25 bp, Homo sapien
gccgaggctgaggagacggcaggcc

SEQ ID NO: 397506 - DNA, 25 bp, Homo sapien
aggctgaggagacggcaggccatgt

SEQ ID NO: 397507 - DNA, 25 bp, Homo sapien
ctgtgcttctgctcagccagtttta

SEQ ID NO: 397508 - DNA, 25 bp, Homo sapien
gtgcttctgctcagccagttttatg

SEQ ID NO: 397509 - DNA, 25 bp, Homo sapien
tgtgcttctgctcagccagttttat

SEQ ID NO: 397510 - DNA, 25 bp, Homo sapien
ccctgtgcttctgctcagccagttt

SEQ ID NO: 397511 - DNA, 25 bp, Homo sapien
ctgtgcggagcaccggctggagccc

SEQ ID NO: 397512 - DNA, 25 bp, Homo sapien
ggagcaccggctggagccccagctc

SEQ ID NO: 397513 - DNA, 25 bp, Homo sapien
aggaagcaccgtggcccgtggctcc

SEQ ID NO: 397514 - DNA, 25 bp, Homo sapien
gtgcggagcaccggctggagcccca

SEQ ID NO: 397515 - DNA, 25 bp, Homo sapien
tgcatgagtgggtcccacacgctca

SEQ ID NO: 397516 - DNA, 25 bp, Homo sapien
gccctgcatgagtgggtcccacacg

SEQ ID NO: 397517 - DNA, 25 bp, Homo sapien
aggcctgagccgtcctcacgggcca

SEQ ID NO: 397518 - DNA, 25 bp, Homo sapien
caccacacccgacagcaggcctgag

SEQ ID NO: 397519 - DNA, 25 bp, Homo sapien
gccgctgccctcctggttgagccgt

SEQ ID NO: 397520 - DNA, 25 bp, Homo sapien
tcatgcagccgctgccctcctggtt

SEQ ID NO: 397521 - DNA, 25 bp, Homo sapien
ggctgcatcccctgcgaggtgacag

SEQ ID NO: 397522 - DNA, 25 bp, Homo sapien
tatcagcaggctgcatcccctgcga

SEQ ID NO: 397523 - DNA, 25 bp, Homo sapien
acctgccaccctcgagcctgggcag

SEQ ID NO: 397524 - DNA, 25 bp, Homo sapien
tgggccatgaaaggatggaccccag

SEQ ID NO: 397525 - DNA, 25 bp, Homo sapien
tccgccgcgggatgccagcctggag

SEQ ID NO: 397526 - DNA, 25 bp, Homo sapien
gaccccaggtttgacactgcacaca

SEQ ID NO: 397527 - DNA, 25 bp, Homo sapien
tcctctaggtgcaccctggtgccag

SEQ ID NO: 397528 - DNA, 25 bp, Homo sapien
cctctaggtgcaccctggtgccagg

SEQ ID NO: 397529 - DNA, 25 bp, Homo sapien
ctcctctaggtgcaccctggtgcca

SEQ ID NO: 397530 - DNA, 25 bp, Homo sapien
atccagcatcccctaaacaccttcc

SEQ ID NO: 397531 - DNA, 25 bp, Homo sapien
ccttcttagagcagacgtcgtggtg

SEQ ID NO: 397532 - DNA, 25 bp, Homo sapien
tcttagagcagacgtcgtggtggcc

SEQ ID NO: 397533 - DNA, 25 bp, Homo sapien
aacaccttcccgtgggcagaggctg

SEQ ID NO: 397534 - DNA, 25 bp, Homo sapien
gcgctcatccggctgagctctgagg

SEQ ID NO: 397535 - DNA, 25 bp, Homo sapien
ggctgcgctcatccggctgagctct

SEQ ID NO: 397536 - DNA, 25 bp, Homo sapien
tctgggctgcgctcatccggctgag

SEQ ID NO: 397537 - DNA, 25 bp, Homo sapien
gctgtctctgggctgcgctcatccg

SEQ ID NO: 397538 - DNA, 25 bp, Homo sapien
aaggctctttcacaccccgctggac

SEQ ID NO: 397539 - DNA, 25 bp, Homo sapien
agccttgtgcaaggctggaccacac

SEQ ID NO: 397540 - DNA, 25 bp, Homo sapien
tttcctgggcagttgacaaggctct

SEQ ID NO: 397541 - DNA, 25 bp, Homo sapien
gccccgtgtgcacggagccttgtgc

SEQ ID NO: 397542 - DNA, 25 bp, Homo sapien
agctcctgctctaaaccccgcgcag

SEQ ID NO: 397543 - DNA, 25 bp, Homo sapien
taaaccccgcgcagccagccgcacg

SEQ ID NO: 397544 - DNA, 25 bp, Homo sapien
gcagccagccgcacgccagagagct

SEQ ID NO: 397545 - DNA, 25 bp, Homo sapien
ccactcagctcctgctctaaacccc

SEQ ID NO: 397546 - DNA, 25 bp, Homo sapien
agctgcatctgccgggccagcgtct

SEQ ID NO: 397547 - DNA, 25 bp, Homo sapien
gctgcatctgccgggccagcgtctg

SEQ ID NO: 397548 - DNA, 25 bp, Homo sapien
ttattgagccccacaaccgaccaga

SEQ ID NO: 397549 - DNA, 25 bp, Homo sapien
gttcacagagccatttattgagccc

SEQ ID NO: 397550 - DNA, 25 bp, Homo sapien
cagagccatttattgagccccacaa

SEQ ID NO: 397551 - DNA, 25 bp, Homo sapien
gccatttattgagccccacaaccga

SEQ ID NO: 397552 - DNA, 25 bp, Homo sapien
agtccccacaaaccctgtgcacggt

SEQ ID NO: 397553 - DNA, 25 bp, Homo sapien
cagcagactatcttgtgggcaccag

SEQ ID NO: 397554 - DNA, 25 bp, Homo sapien
ggaagcagctcatgggaacggccct

SEQ ID NO: 397555 - DNA, 25 bp, Homo sapien
gagggatgtggcttgttgtcctgag

SEQ ID NO: 397556 - DNA, 25 bp, Homo sapien
cgcgctgtgctctgtgcatcccgga

SEQ ID NO: 397557 - DNA, 25 bp, Homo sapien
gacggtgggattgggatgctggagg

SEQ ID NO: 397558 - DNA, 25 bp, Homo sapien
tcacaagaaacccagacggtgggat

SEQ ID NO: 397559 - DNA, 25 bp, Homo sapien
tagagagaggatcaccctgtcaccc

SEQ ID NO: 397560 - DNA, 25 bp, Homo sapien
tgagcccgcaaggatccctagaaga

SEQ ID NO: 397561 - DNA, 25 bp, Homo sapien
ggaggagttagaggcccctgagccc

SEQ ID NO: 397562 - DNA, 25 bp, Homo sapien
ctgcgagccacaaccagacaagagt

SEQ ID NO: 397563 - DNA, 25 bp, Homo sapien
gggctgcgagccacaaccagacaag

SEQ ID NO: 397564 - DNA, 25 bp, Homo sapien
ccaggtctgcgggccttgagcctgg

SEQ ID NO: 397565 - DNA, 25 bp, Homo sapien
tcggaaaaatgcaccgagggcccca

SEQ ID NO: 397566 - DNA, 25 bp, Homo sapien
gaagctttgatctgctgtgttaacc

SEQ ID NO: 397567 - DNA, 25 bp, Homo sapien
ctttaactcggaaaaatgcaccgag

SEQ ID NO: 397568 - DNA, 25 bp, Homo sapien
gtcaaggccccgctgtccctcttaa

SEQ ID NO: 397569 - DNA, 25 bp, Homo sapien
caaggccccgctgtccctcttaaca

SEQ ID NO: 397570 - DNA, 25 bp, Homo sapien
ccgtcaaggccccgctgtccctctt

SEQ ID NO: 397571 - DNA, 25 bp, Homo sapien
tgtccctcttaacaccacacgcagg

SEQ ID NO: 397572 - DNA, 25 bp, Homo sapien
gcccgagaggccataggcccagcat

SEQ ID NO: 397573 - DNA, 25 bp, Homo sapien
agagcccgagaggccataggcccag

SEQ ID NO: 397574 - DNA, 25 bp, Homo sapien
tcaccgccaccatcggggccggtgg

SEQ ID NO: 397575 - DNA, 25 bp, Homo sapien
tgtggtcaccgccaccatcggggcc

SEQ ID NO: 397576 - DNA, 25 bp, Homo sapien
aggctgggactgcctgtgcccagac

SEQ ID NO: 397577 - DNA, 25 bp, Homo sapien
ctgtttggcatgagaacgagggaag

SEQ ID NO: 397578 - DNA, 25 bp, Homo sapien
gggactgggatgcagacgtgacagc

SEQ ID NO: 397579 - DNA, 25 bp, Homo sapien
taccaatggcatcgtagaggctggg

SEQ ID NO: 397580 - DNA, 25 bp, Homo sapien
agccggctgggaagcccgtgtggac

SEQ ID NO: 397581 - DNA, 25 bp, Homo sapien
agcccgtgtggaccaagagcactgg

SEQ ID NO: 397582 - DNA, 25 bp, Homo sapien
tgaacggggaccttgcaagccggct

SEQ ID NO: 397583 - DNA, 25 bp, Homo sapien
cagccacaggccagttgttcttcca

SEQ ID NO: 397584 - DNA, 25 bp, Homo sapien
caggcagggtggggtcccgctttgg

SEQ ID NO: 397585 - DNA, 25 bp, Homo sapien
tctatgcgcaccaggccggggagca

SEQ ID NO: 397586 - DNA, 25 bp, Homo sapien
ctctatgcgcaccaggccggggagc

SEQ ID NO: 397587 - DNA, 25 bp, Homo sapien
cagggcaggcagggtggggtcccgc

SEQ ID NO: 397588 - DNA, 25 bp, Homo sapien
gctctgagcccccagcaaggtttgc

SEQ ID NO: 397589 - DNA, 25 bp, Homo sapien
gcctggctctgagcccccagcaagg

SEQ ID NO: 397590 - DNA, 25 bp, Homo sapien
tctgagcccccagcaaggtttgcag

SEQ ID NO: 397591 - DNA, 25 bp, Homo sapien
tggctctgagcccccagcaaggttt

SEQ ID NO: 397592 - DNA, 25 bp, Homo sapien
cactttggacctggagctgtgagaa

SEQ ID NO: 397593 - DNA, 25 bp, Homo sapien
ctttattgtgcccagtgaaaccact

SEQ ID NO: 397594 - DNA, 25 bp, Homo sapien
tgtgtttctcgggttgtgtggcccc

SEQ ID NO: 397595 - DNA, 25 bp, Homo sapien
gctgtgaggaccaatgtctgcacca

SEQ ID NO: 397596 - DNA, 25 bp, Homo sapien
ccagacagacggtcactccgcagga

SEQ ID NO: 397597 - DNA, 25 bp, Homo sapien
acggtccctccgcaggacgctgtga

SEQ ID NO: 397598 - DNA, 25 bp, Homo sapien
agacagacggtcactccgcaggacg

SEQ ID NO: 397599 - DNA, 25 bp, Homo sapien
agacggtccctccgcaggacgctgt

SEQ ID NO: 397600 - DNA, 25 bp, Homo sapien
gcaggccgtcatagtttcaggattt

SEQ ID NO: 397601 - DNA, 25 bp, Homo sapien
gaactgtgtgcacgcgtctcttccc

SEQ ID NO: 397602 - DNA, 25 bp, Homo sapien
atttggcggtttccagccagcctca

SEQ ID NO: 397603 - DNA, 25 bp, Homo sapien
aaggccacactcgaggtccagggtt

SEQ ID NO: 397604 - DNA, 25 bp, Homo sapien
gggccaggggaactccacacagaag

SEQ ID NO: 397605 - DNA, 25 bp, Homo sapien
aggtaggggccatgggtccaggaca

SEQ ID NO: 397606 - DNA, 25 bp, Homo sapien
gggaactccacacagaaggggacag

SEQ ID NO: 397607 - DNA, 25 bp, Homo sapien
actccacacagaaggggacagtgcc

SEQ ID NO: 397608 - DNA, 25 bp, Homo sapien
tcttcatcgaatgggcagtctctgg

SEQ ID NO: 397609 - DNA, 25 bp, Homo sapien
cacggttgcactggagttcctggac

SEQ ID NO: 397610 - DNA, 25 bp, Homo sapien
cagccctatctggttacatggcggc

SEQ ID NO: 397611 - DNA, 25 bp, Homo sapien
caagctggcgtctgaaggacatttc

SEQ ID NO: 397612 - DNA, 25 bp, Homo sapien
tgtttgcctcttgacagtatgcatg

SEQ ID NO: 397613 - DNA, 25 bp, Homo sapien
tgtaactttgggtattgtttgcctc

SEQ ID NO: 397614 - DNA, 25 bp, Homo sapien
ggcgtttctgggcaaggagtctggc

SEQ ID NO: 397615 - DNA, 25 bp, Homo sapien
acattcgtggtttgttgttgctttc

SEQ ID NO: 397616 - DNA, 25 bp, Homo sapien
gcacgacccgctggaggacgccgta

SEQ ID NO: 397617 - DNA, 25 bp, Homo sapien
aggacgccgtactgtcagcagggct

SEQ ID NO: 397618 - DNA, 25 bp, Homo sapien
ctcccaggtgcacgggcctccttct

SEQ ID NO: 397619 - DNA, 25 bp, Homo sapien
tgtctgtccggcacgacccgctgga

SEQ ID NO: 397620 - DNA, 25 bp, Homo sapien
aaagcacttccatggcacatgaagt

SEQ ID NO: 397621 - DNA, 25 bp, Homo sapien
tctgccaccattggtcagaagagtc

SEQ ID NO: 397622 - DNA, 25 bp, Homo sapien
ccaccattggtcagaagagtcctcc

SEQ ID NO: 397623 - DNA, 25 bp, Homo sapien
aaaagcacttccatggcacatgaag

SEQ ID NO: 397624 - DNA, 25 bp, Homo sapien
actgacggcgggaatgcctgtggca

SEQ ID NO: 397625 - DNA, 25 bp, Homo sapien
cgctcaggagtgtcagagcaagctg

SEQ ID NO: 397626 - DNA, 25 bp, Homo sapien
gcactgacggcgggaatgcctgtgg

SEQ ID NO: 397627 - DNA, 25 bp, Homo sapien
tgacggcgggaatgcctgtggcaga

SEQ ID NO: 397628 - DNA, 25 bp, Homo sapien
tgaagaggagtgtgaacggttgcag

SEQ ID NO: 397629 - DNA, 25 bp, Homo sapien
ggagtgtgaacggttgcaggagtcc

SEQ ID NO: 397630 - DNA, 25 bp, Homo sapien
agtgtgaacggttgcaggagtccag

SEQ ID NO: 397631 - DNA, 25 bp, Homo sapien
aagaggagtgtgaacggttgcagga

SEQ ID NO: 397632 - DNA, 25 bp, Homo sapien
ggcaggaacagaggcgtgacagtca

SEQ ID NO: 397633 - DNA, 25 bp, Homo sapien
ctggctgtgccatgcagcactggcc

SEQ ID NO: 397634 - DNA, 25 bp, Homo sapien
cgtgacagtcagtgcggacctggct

SEQ ID NO: 397635 - DNA, 25 bp, Homo sapien
gccaagttgtttggcctgtctgagc

SEQ ID NO: 397636 - DNA, 25 bp, Homo sapien
aggacgaactgatggcctttcagcg

SEQ ID NO: 397637 - DNA, 25 bp, Homo sapien
cataggtcaacacgtggccaggaag

SEQ ID NO: 397638 - DNA, 25 bp, Homo sapien
tttcagcgccgtaggcagtgtcacg

SEQ ID NO: 397639 - DNA, 25 bp, Homo sapien
gcagtgtcacgtgcataggtcaaca

SEQ ID NO: 397640 - DNA, 25 bp, Homo sapien
ttcactgtggaggttgaacaccggg

SEQ ID NO: 397641 - DNA, 25 bp, Homo sapien
tatggaataaacaatcactctggtg

SEQ ID NO: 397642 - DNA, 25 bp, Homo sapien
acttcctggccttccgtgcccgctc

SEQ ID NO: 397643 - DNA, 25 bp, Homo sapien
tgggaattatggaataaacaatcac

SEQ ID NO: 397644 - DNA, 25 bp, Homo sapien
gtagactccgggagaaccaggtcgc

SEQ ID NO: 397645 - DNA, 25 bp, Homo sapien
tagactccgggagaaccaggtcgcg

SEQ ID NO: 397646 - DNA, 25 bp, Homo sapien
tgtagactccgggagaaccaggtcg

SEQ ID NO: 397647 - DNA, 25 bp, Homo sapien
gactccgggagaaccaggtcgcggc

SEQ ID NO: 397648 - DNA, 25 bp, Homo sapien
ggccgccaacctggccgcttggccg

SEQ ID NO: 397649 - DNA, 25 bp, Homo sapien
cgggcggcgctctgcctcgttggtt

SEQ ID NO: 397650 - DNA, 25 bp, Homo sapien
acgcttcggccgcagtctcgcgccg

SEQ ID NO: 397651 - DNA, 25 bp, Homo sapien
tctgcctcgttggttgtgcgcagcg

SEQ ID NO: 397652 - DNA, 25 bp, Homo sapien
agggacatagcctaccgtccccagg

SEQ ID NO: 397653 - DNA, 25 bp, Homo sapien
gggcggagcgtctccccagggacat

SEQ ID NO: 397654 - DNA, 25 bp, Homo sapien
caggaccgtccagggcgcagactcg

SEQ ID NO: 397655 - DNA, 25 bp, Homo sapien
ggacactgcgccctcggaaggacac

SEQ ID NO: 397656 - DNA, 25 bp, Homo sapien
tgagcaacagagacgcttgacagcc

SEQ ID NO: 397657 - DNA, 25 bp, Homo sapien
catgaagagcctcaatggagatgcc

SEQ ID NO: 397658 - DNA, 25 bp, Homo sapien
ttgggtacccacaagtctgccttgg

SEQ ID NO: 397659 - DNA, 25 bp, Homo sapien
ccgggtggcaactcgtcagtgagca

SEQ ID NO: 397660 - DNA, 25 bp, Homo sapien
ttctcttttaaaatatattcagtta

SEQ ID NO: 397661 - DNA, 25 bp, Homo sapien
taaaatatattcagttaactgtgat

SEQ ID NO: 397662 - DNA, 25 bp, Homo sapien
tttaaaatatattcagttaactgtg

SEQ ID NO: 397663 - DNA, 25 bp, Homo sapien
cttttaaaatatattcagttaactg

SEQ ID NO: 397664 - DNA, 25 bp, Homo sapien
cctaaaacacgacatgacatcaggg

SEQ ID NO: 397665 - DNA, 25 bp, Homo sapien
caagcctgctcaagatacaattgca

SEQ ID NO: 397666 - DNA, 25 bp, Homo sapien
catcaggttgagaagcaaacagtcc

SEQ ID NO: 397667 - DNA, 25 bp, Homo sapien
gacatcagggtagcttgttcttaca

SEQ ID NO: 397668 - DNA, 25 bp, Homo sapien
caactgacatcttaatgagccaagc

SEQ ID NO: 397669 - DNA, 25 bp, Homo sapien
tctactggacaggactgctctaggg

SEQ ID NO: 397670 - DNA, 25 bp, Homo sapien
catcttaaccgagaacaaggtgtct

SEQ ID NO: 397671 - DNA, 25 bp, Homo sapien
tgctcaaggcgacttctgtgtcttt

SEQ ID NO: 397672 - DNA, 25 bp, Homo sapien
gtcacaatggtgcttggatatcttc

SEQ ID NO: 397673 - DNA, 25 bp, Homo sapien
gatgggcctgagcatcaaggcttta

SEQ ID NO: 397674 - DNA, 25 bp, Homo sapien
caccaaggcaccactctgagagggt

SEQ ID NO: 397675 - DNA, 25 bp, Homo sapien
gggttatctgcggtctctgtggaca

SEQ ID NO: 397676 - DNA, 25 bp, Homo sapien
tcttgtttcaatgacctgagaggcc

SEQ ID NO: 397677 - DNA, 25 bp, Homo sapien
gcctacacaaataggtagagtaacc

SEQ ID NO: 397678 - DNA, 25 bp, Homo sapien
tccatgcgccagtgtcatctgctaa

SEQ ID NO: 397679 - DNA, 25 bp, Homo sapien
tgcgccagtgtcatctgctaatttg

SEQ ID NO: 397680 - DNA, 25 bp, Homo sapien
ctgcagtagaacaaggatcaaacgg

SEQ ID NO: 397681 - DNA, 25 bp, Homo sapien
tagaacaaggatcaaacggatatcc

SEQ ID NO: 397682 - DNA, 25 bp, Homo sapien
caacttctcattaccaacactagac

SEQ ID NO: 397683 - DNA, 25 bp, Homo sapien
gatcaaacggatatccaacttctca

SEQ ID NO: 397684 - DNA, 25 bp, Homo sapien
caagaatacacagctggcttcagat

SEQ ID NO: 397685 - DNA, 25 bp, Homo sapien
ggcttcagatgtgagaatcgatcaa

SEQ ID NO: 397686 - DNA, 25 bp, Homo sapien
cattagtagaataaacctcacgctg

SEQ ID NO: 397687 - DNA, 25 bp, Homo sapien
gcactgaacagcgacatttctattc

SEQ ID NO: 397688 - DNA, 25 bp, Homo sapien
gctttctctgggtgactgctcctag

SEQ ID NO: 397689 - DNA, 25 bp, Homo sapien
ctctgggtgactgctcctagtcgca

SEQ ID NO: 397690 - DNA, 25 bp, Homo sapien
tgctcctagtcgcaggaaatcctct

SEQ ID NO: 397691 - DNA, 25 bp, Homo sapien
cctagtcgcaggaaatcctcttctg

SEQ ID NO: 397692 - DNA, 25 bp, Homo sapien
aaggcagcttccttcggtgcgagcg

SEQ ID NO: 397693 - DNA, 25 bp, Homo sapien
gtgtctccttcagttgccccttaag

SEQ ID NO: 397694 - DNA, 25 bp, Homo sapien
actgaagtaagcagaactccgcgct

SEQ ID NO: 397695 - DNA, 25 bp, Homo sapien
tgcgagcggactgagagagtatctc

SEQ ID NO: 397696 - DNA, 25 bp, Homo sapien
gaccttccaataggacgccacctga

SEQ ID NO: 397697 - DNA, 25 bp, Homo sapien
ggacgccacctgagctgatgcgaat

SEQ ID NO: 397698 - DNA, 25 bp, Homo sapien
agctgatgcgaatcaatcaggccca

SEQ ID NO: 397699 - DNA, 25 bp, Homo sapien
tcccactgccgaccttccaatagga

SEQ ID NO: 397700 - DNA, 25 bp, Homo sapien
tgcagtgttagcatcctgcccctgg

SEQ ID NO: 397701 - DNA, 25 bp, Homo sapien
aggtacacacctgtcaggtacaggt

SEQ ID NO: 397702 - DNA, 25 bp, Homo sapien
tcaggtacaggtaagacaaattctt

SEQ ID NO: 397703 - DNA, 25 bp, Homo sapien
ggtacacaccttgtacactcccctg

SEQ ID NO: 397704 - DNA, 25 bp, Homo sapien
caatgctcgctggatgaatgagggt

SEQ ID NO: 397705 - DNA, 25 bp, Homo sapien
ggcctggcctctagggggtcctcaa

SEQ ID NO: 397706 - DNA, 25 bp, Homo sapien
gggtcctcaatgctcgctggatgaa

SEQ ID NO: 397707 - DNA, 25 bp, Homo sapien
ctggatgaatgagggtgtgctcatt

SEQ ID NO: 397708 - DNA, 25 bp, Homo sapien
tggcaaggcgtcttcatcctcggga

SEQ ID NO: 397709 - DNA, 25 bp, Homo sapien
ggcaaggcgtcttcatcctcgggat

SEQ ID NO: 397710 - DNA, 25 bp, Homo sapien
gcaaggcgtcttcatcctcgggatc

SEQ ID NO: 397711 - DNA, 25 bp, Homo sapien
ctggcaaggcgtcttcatcctcggg

SEQ ID NO: 397712 - DNA, 25 bp, Homo sapien
taaatcggattgatgggccttcaca

SEQ ID NO: 397713 - DNA, 25 bp, Homo sapien
tccgagtccctccatgtagaaaaag

SEQ ID NO: 397714 - DNA, 25 bp, Homo sapien
tatcaggatcacaagcggctgcagg

SEQ ID NO: 397715 - DNA, 25 bp, Homo sapien
gggaatctgcccacaagagggagct

SEQ ID NO: 397716 - DNA, 25 bp, Homo sapien
gagtaatttagactctcccggcatg

SEQ ID NO: 397717 - DNA, 25 bp, Homo sapien
caagcagtatcctaattgtggtaaa

SEQ ID NO: 397718 - DNA, 25 bp, Homo sapien
tgaagcaatgccctcacaacgtagc

SEQ ID NO: 397719 - DNA, 25 bp, Homo sapien
gcccaatgcacagtaaatcttccta

SEQ ID NO: 397720 - DNA, 25 bp, Homo sapien
tatgtggcagttaggcatccagtcc

SEQ ID NO: 397721 - DNA, 25 bp, Homo sapien
cagctcggtgagaacgtggtcaaca

SEQ ID NO: 397722 - DNA, 25 bp, Homo sapien
tatagccagcacagggttccaggca

SEQ ID NO: 397723 - DNA, 25 bp, Homo sapien
taagcttgttgagggatcctgccgg

SEQ ID NO: 397724 - DNA, 25 bp, Homo sapien
tggccgtaggtaatcccggcagaac

SEQ ID NO: 397725 - DNA, 25 bp, Homo sapien
gacaacagccatctggccgtaggta

SEQ ID NO: 397726 - DNA, 25 bp, Homo sapien
accataaccccaccacaggcagtga

SEQ ID NO: 397727 - DNA, 25 bp, Homo sapien
aggtaatcccggcagaacggatcag

SEQ ID NO: 397728 - DNA, 25 bp, Homo sapien
cttgcaaagtatgcctaaactccca

SEQ ID NO: 397729 - DNA, 25 bp, Homo sapien
tatgcctaaactcccatactttaaa

SEQ ID NO: 397730 - DNA, 25 bp, Homo sapien
tgcaaagtatgcctaaactcccata

SEQ ID NO: 397731 - DNA, 25 bp, Homo sapien
aacaacttgcaaagtatgcctaaac

SEQ ID NO: 397732 - DNA, 25 bp, Homo sapien
gattaaccaggtctgagaaactgag

SEQ ID NO: 397733 - DNA, 25 bp, Homo sapien
catcaaacaagtgaggtgcacagtt

SEQ ID NO: 397734 - DNA, 25 bp, Homo sapien
cacatgaactgatctggctgagaag

SEQ ID NO: 397735 - DNA, 25 bp, Homo sapien
gctgagaagacctagtcaccaggtg

SEQ ID NO: 397736 - DNA, 25 bp, Homo sapien
tggtgctggtaaagcaggaaccgct

SEQ ID NO: 397737 - DNA, 25 bp, Homo sapien
ggtaaagcaggaaccgctgcgtggg

SEQ ID NO: 397738 - DNA, 25 bp, Homo sapien
gttggcacaggcgcggcagcctctt

SEQ ID NO: 397739 - DNA, 25 bp, Homo sapien
tcttgctctctctcggtgacagagg

SEQ ID NO: 397740 - DNA, 25 bp, Homo sapien
tctagaaaaacgctgttcaggcccc

SEQ ID NO: 397741 - DNA, 25 bp, Homo sapien
gatacctcccctgagatggcctgtg

SEQ ID NO: 397742 - DNA, 25 bp, Homo sapien
caagcagaagaagcactcataggca

SEQ ID NO: 397743 - DNA, 25 bp, Homo sapien
ccttgttcattactgcagagcaggg

SEQ ID NO: 397744 - DNA, 25 bp, Homo sapien
tcctctcttaactcacgtgtctcgg

SEQ ID NO: 397745 - DNA, 25 bp, Homo sapien
tcacgtgtctcggaccaatgctgac

SEQ ID NO: 397746 - DNA, 25 bp, Homo sapien
tcttcctcctctcttaactcacgtg

SEQ ID NO: 397747 - DNA, 25 bp, Homo sapien
tcttaactcacgtgtctcggaccaa

SEQ ID NO: 397748 - DNA, 25 bp, Homo sapien
tcatcatgccgcagttaggcagaac

SEQ ID NO: 397749 - DNA, 25 bp, Homo sapien
acagcagcccctaccgacgagggag

SEQ ID NO: 397750 - DNA, 25 bp, Homo sapien
tgcctcgggcccattcatcatgccg

SEQ ID NO: 397751 - DNA, 25 bp, Homo sapien
tgccggcagctgcgacaacagcagc

SEQ ID NO: 397752 - DNA, 25 bp, Homo sapien
tcagagcgcttcttgcgcctccttt

SEQ ID NO: 397753 - DNA, 25 bp, Homo sapien
ccttttataccgacgccccatgatg

SEQ ID NO: 397754 - DNA, 25 bp, Homo sapien
tcttgcgcctccttttataccgacg

SEQ ID NO: 397755 - DNA, 25 bp, Homo sapien
tccttttataccgacgccccatgat

SEQ ID NO: 397756 - DNA, 25 bp, Homo sapien
cgtcaaccgaaagaacggcacactt

SEQ ID NO: 397757 - DNA, 25 bp, Homo sapien
gcagttggcccaaatacaggcagaa

SEQ ID NO: 397758 - DNA, 25 bp, Homo sapien
cagtcttatctgcaaccaccgtcaa

SEQ ID NO: 397759 - DNA, 25 bp, Homo sapien
aaacacatatgggacctgtgagccc

SEQ ID NO: 397760 - DNA, 25 bp, Homo sapien
tgtttcaggccctcgagctctccga

SEQ ID NO: 397761 - DNA, 25 bp, Homo sapien
gctgtgagctgagagtctctcccat

SEQ ID NO: 397762 - DNA, 25 bp, Homo sapien
aaaacgacagttggccgagtgggca

SEQ ID NO: 397763 - DNA, 25 bp, Homo sapien
gagtctgggactgagcctgtttcag

SEQ ID NO: 397764 - DNA, 25 bp, Homo sapien
gagggccatgaagagcgctgaacta

SEQ ID NO: 397765 - DNA, 25 bp, Homo sapien
gaactagggacaaaggcactggcat

SEQ ID NO: 397766 - DNA, 25 bp, Homo sapien
atttgcactctggaaagacgcctgc

SEQ ID NO: 397767 - DNA, 25 bp, Homo sapien
gattccaggcaatggagggccatga

SEQ ID NO: 397768 - DNA, 25 bp, Homo sapien
ggtttcttgactggcggagactgtt

SEQ ID NO: 397769 - DNA, 25 bp, Homo sapien
cttgactggcggagactgtttctgt

SEQ ID NO: 397770 - DNA, 25 bp, Homo sapien
ttcttgactggcggagactgtttct

SEQ ID NO: 397771 - DNA, 25 bp, Homo sapien
gagggtttcttgactggcggagact

SEQ ID NO: 397772 - DNA, 25 bp, Homo sapien
tgttttcttcatcttctatatccat

SEQ ID NO: 397773 - DNA, 25 bp, Homo sapien
atgttttcttcatcttctatatcca

SEQ ID NO: 397774 - DNA, 25 bp, Homo sapien
catgttttcttcatcttctatatcc

SEQ ID NO: 397775 - DNA, 25 bp, Homo sapien
tcatgttttcttcatcttctatatc

SEQ ID NO: 397776 - DNA, 25 bp, Homo sapien
gtgatgccccacgacgataacgagg

SEQ ID NO: 397777 - DNA, 25 bp, Homo sapien
tctgatactacgtgataggcctaga

SEQ ID NO: 397778 - DNA, 25 bp, Homo sapien
gaggaaggaaaaacgtctgcagcaa

SEQ ID NO: 397779 - DNA, 25 bp, Homo sapien
tattctgagaggcatgccgtgacag

SEQ ID NO: 397780 - DNA, 25 bp, Homo sapien
cgttgcaggatcttgtaaatgcaaa

SEQ ID NO: 397781 - DNA, 25 bp, Homo sapien
gccttcgttgcaggatcttgtaaat

SEQ ID NO: 397782 - DNA, 25 bp, Homo sapien
gtaacttacaatgccttcgttgcag

SEQ ID NO: 397783 - DNA, 25 bp, Homo sapien
ttacaatgccttcgttgcaggatct

SEQ ID NO: 397784 - DNA, 25 bp, Homo sapien
gggacacgttgtccagattgcggtt

SEQ ID NO: 397785 - DNA, 25 bp, Homo sapien
gttgtccagattgcggttttccttc

SEQ ID NO: 397786 - DNA, 25 bp, Homo sapien
cacgttgtccagattgcggttttcc

SEQ ID NO: 397787 - DNA, 25 bp, Homo sapien
agattgcggttttccttcacatcag

SEQ ID NO: 397788 - DNA, 25 bp, Homo sapien
tcttcaggcggtacttggagtggcc

SEQ ID NO: 397789 - DNA, 25 bp, Homo sapien
aagtcatacttgagtcctgggcgca

SEQ ID NO: 397790 - DNA, 25 bp, Homo sapien
caggagtgtgtactgcaaaccaggc

SEQ ID NO: 397791 - DNA, 25 bp, Homo sapien
cctgggcgcagttcgttcaagatca

SEQ ID NO: 397792 - DNA, 25 bp, Homo sapien
ggaagtcctcatacagcccatgtag

SEQ ID NO: 397793 - DNA, 25 bp, Homo sapien
tcaaagtagagactcccaggcaact

SEQ ID NO: 397794 - DNA, 25 bp, Homo sapien
gctttgatgggctcctcggcttagg

SEQ ID NO: 397795 - DNA, 25 bp, Homo sapien
tggcaggccctagaacagttgttgg

SEQ ID NO: 397796 - DNA, 25 bp, Homo sapien
cagcacttttctgcgagcgtgaggg

SEQ ID NO: 397797 - DNA, 25 bp, Homo sapien
gagaagttgtcggtcaggtcaccaa

SEQ ID NO: 397798 - DNA, 25 bp, Homo sapien
gtcaggtcaccaaacttacccagga

SEQ ID NO: 397799 - DNA, 25 bp, Homo sapien
ccaggaccaggcgtgagacagcgtc

SEQ ID NO: 397800 - DNA, 25 bp, Homo sapien
tcatttaatgcaaggccacgatcac

SEQ ID NO: 397801 - DNA, 25 bp, Homo sapien
taaagctcaagttgtgtataaagaa

SEQ ID NO: 397802 - DNA, 25 bp, Homo sapien
ttgttcctgtagaaacacttatcac

SEQ ID NO: 397803 - DNA, 25 bp, Homo sapien
gaaatctgagcaaggatctccgaga

SEQ ID NO: 397804 - DNA, 25 bp, Homo sapien
ttccaggattggctcatgtggtgag

SEQ ID NO: 397805 - DNA, 25 bp, Homo sapien
gaaagatggatcttttttgatcatc

SEQ ID NO: 397806 - DNA, 25 bp, Homo sapien
cagatgaaactggacattctccttc

SEQ ID NO: 397807 - DNA, 25 bp, Homo sapien
tgagaagattctggcatctccacag

SEQ ID NO: 397808 - DNA, 25 bp, Homo sapien
ggcttgttgaagaatctcgtctcat

SEQ ID NO: 397809 - DNA, 25 bp, Homo sapien
ctggcttgttgaagaatctcgtctc

SEQ ID NO: 397810 - DNA, 25 bp, Homo sapien
tggcttgttgaagaatctcgtctca

SEQ ID NO: 397811 - DNA, 25 bp, Homo sapien
cttgttgaagaatctcgtctcatac

SEQ ID NO: 397812 - DNA, 25 bp, Homo sapien
agctccttggaaggttgaggtggaa

SEQ ID NO: 397813 - DNA, 25 bp, Homo sapien
cagctccttggaaggttgaggtgga

SEQ ID NO: 397814 - DNA, 25 bp, Homo sapien
gtggaaggatcgcttaagagcccag

SEQ ID NO: 397815 - DNA, 25 bp, Homo sapien
gaggtggaaggatcgcttaagagcc

SEQ ID NO: 397816 - DNA, 25 bp, Homo sapien
ttggagcgcactggaatcgtcccct

SEQ ID NO: 397817 - DNA, 25 bp, Homo sapien
gtcccctcaccagactctattttgg

SEQ ID NO: 397818 - DNA, 25 bp, Homo sapien
gctgtcctcttgctttacgatttgg

SEQ ID NO: 397819 - DNA, 25 bp, Homo sapien
ccgtcccacgtttggatgctcgcat

SEQ ID NO: 397820 - DNA, 25 bp, Homo sapien
caaagaatactgtggaacacctgag

SEQ ID NO: 397821 - DNA, 25 bp, Homo sapien
gaggttggcaaacagtatggatgaa

SEQ ID NO: 397822 - DNA, 25 bp, Homo sapien
acagtatggatgaatcctgtgtgca

SEQ ID NO: 397823 - DNA, 25 bp, Homo sapien
gggccaaaattcaaatggttgtgga

SEQ ID NO: 397824 - DNA, 25 bp, Homo sapien
acagggatatccacttatttcagca

SEQ ID NO: 397825 - DNA, 25 bp, Homo sapien
tgtgaccagcaatgaacagcagaat

SEQ ID NO: 397826 - DNA, 25 bp, Homo sapien
tatttatggctaggaagactcagcg

SEQ ID NO: 397827 - DNA, 25 bp, Homo sapien
tatactagagtaatcaggacagcat

SEQ ID NO: 397828 - DNA, 25 bp, Homo sapien
ttgagtcttattctgatgcccaagc

SEQ ID NO: 397829 - DNA, 25 bp, Homo sapien
tttgagtcttattctgatgcccaag

SEQ ID NO: 397830 - DNA, 25 bp, Homo sapien
ttttgagtcttattctgatgcccaa

SEQ ID NO: 397831 - DNA, 25 bp, Homo sapien
tctatgttggagatccgctggtaca

SEQ ID NO: 397832 - DNA, 25 bp, Homo sapien
cccaggatgatgctcgagaagtaaa

SEQ ID NO: 397833 - DNA, 25 bp, Homo sapien
aatgggctccacgaaaatgctgagc

SEQ ID NO: 397834 - DNA, 25 bp, Homo sapien
tggtccccgtggtaaaggctgccca

SEQ ID NO: 397835 - DNA, 25 bp, Homo sapien
gagtcctcgtctaaaggtgtcttct

SEQ ID NO: 397836 - DNA, 25 bp, Homo sapien
tccaaagctacttgctttgctgatc

SEQ ID NO: 397837 - DNA, 25 bp, Homo sapien
tgctgattcacaggagtcctcgtct

SEQ ID NO: 397838 - DNA, 25 bp, Homo sapien
taatgtcctgctacgctgtcctgct

SEQ ID NO: 397839 - DNA, 25 bp, Homo sapien
aatctcgactgaaagtggcctttat

SEQ ID NO: 397840 - DNA, 25 bp, Homo sapien
tattcaatacaagtagctggcatgg

SEQ ID NO: 397841 - DNA, 25 bp, Homo sapien
tgaaggaaaacaatcagccaagatc

SEQ ID NO: 397842 - DNA, 25 bp, Homo sapien
tgtggcacagttttgccagtggaac

SEQ ID NO: 397843 - DNA, 25 bp, Homo sapien
tgtcctcatgccaagaactcagagc

SEQ ID NO: 397844 - DNA, 25 bp, Homo sapien
tgatgacctcaatagcggagtcgcc

SEQ ID NO: 397845 - DNA, 25 bp, Homo sapien
cggagtcgcctaccgtccagttgac

SEQ ID NO: 397846 - DNA, 25 bp, Homo sapien
tacaacgcgtgcttacacaggcggg

SEQ ID NO: 397847 - DNA, 25 bp, Homo sapien
cttcccagtcgtggcgttgatgacc

SEQ ID NO: 397848 - DNA, 25 bp, Homo sapien
taatcttggagcgtagtaagtggga

SEQ ID NO: 397849 - DNA, 25 bp, Homo sapien
atggtacacgttgggcttggtaatc

SEQ ID NO: 397850 - DNA, 25 bp, Homo sapien
cttggcggcctggtactcctttgcc

SEQ ID NO: 397851 - DNA, 25 bp, Homo sapien
tcctttgccgccagcttggactcat

SEQ ID NO: 397852 - DNA, 25 bp, Homo sapien
ttgatgaaggctgtgaacagacgcg

SEQ ID NO: 397853 - DNA, 25 bp, Homo sapien
cccagccccgccttgatgaaggctg

SEQ ID NO: 397854 - DNA, 25 bp, Homo sapien
tgatgaaggctgtgaacagacgcgc

SEQ ID NO: 397855 - DNA, 25 bp, Homo sapien
ggacaaccgtggacacctggtggtc

SEQ ID NO: 397856 - DNA, 25 bp, Homo sapien
cgtaaaccgagattgaaagcagtca

SEQ ID NO: 397857 - DNA, 25 bp, Homo sapien
gaaatgctgcggcagagagatgcca

SEQ ID NO: 397858 - DNA, 25 bp, Homo sapien
aagcagtcactggacggttcagaag

SEQ ID NO: 397859 - DNA, 25 bp, Homo sapien
caacctagtgtgtggaactacccag

SEQ ID NO: 397860 - DNA, 25 bp, Homo sapien
tttagacagacgtgtggcgatttcc

SEQ ID NO: 397861 - DNA, 25 bp, Homo sapien
tgcgggaccccatgtgcatgacagg

SEQ ID NO: 397862 - DNA, 25 bp, Homo sapien
tgaacaccctctagagccttggagc

SEQ ID NO: 397863 - DNA, 25 bp, Homo sapien
gaaagtggcgattccacagcctgga

SEQ ID NO: 397864 - DNA, 25 bp, Homo sapien
aacaccctggatttcgctgtggcag

SEQ ID NO: 397865 - DNA, 25 bp, Homo sapien
gcctgaacaaaaccccactgtggtg

SEQ ID NO: 397866 - DNA, 25 bp, Homo sapien
taaggtccccgatctgtctcacgga

SEQ ID NO: 397867 - DNA, 25 bp, Homo sapien
gagattgtcacaaaacacgctaggg

SEQ ID NO: 397868 - DNA, 25 bp, Homo sapien
caactaagtcatggtcgagtcggac

SEQ ID NO: 397869 - DNA, 25 bp, Homo sapien
tcttgtgcgagaggaagctcatgca

SEQ ID NO: 397870 - DNA, 25 bp, Homo sapien
gaacactagaactcacacggaaggc

SEQ ID NO: 397871 - DNA, 25 bp, Homo sapien
tctcaaaggagaacccacgacctgt

SEQ ID NO: 397872 - DNA, 25 bp, Homo sapien
ggaaccagtggtcactctcaaagga

SEQ ID NO: 397873 - DNA, 25 bp, Homo sapien
gggacctctggcagttaccctcgag

SEQ ID NO: 397874 - DNA, 25 bp, Homo sapien
gcaggatccgtctccagtttaggaa

SEQ ID NO: 397875 - DNA, 25 bp, Homo sapien
aagacactggatagattcttcaaag

SEQ ID NO: 397876 - DNA, 25 bp, Homo sapien
caatacatccaaaggaggagaaatc

SEQ ID NO: 397877 - DNA, 25 bp, Homo sapien
taaagacactggatagattcttcaa

SEQ ID NO: 397878 - DNA, 25 bp, Homo sapien
caaagagtcaggaagcccaatacat

SEQ ID NO: 397879 - DNA, 25 bp, Homo sapien
cagagcttcacatgactttaccctg

SEQ ID NO: 397880 - DNA, 25 bp, Homo sapien
ggacgccaccagaccgggggctcca

SEQ ID NO: 397881 - DNA, 25 bp, Homo sapien
cgggggctccaccagaccagaggct

SEQ ID NO: 397882 - DNA, 25 bp, Homo sapien
agaccagaggctcatccagaccggg

SEQ ID NO: 397883 - DNA, 25 bp, Homo sapien
gggctccaccagaccgggggctcat

SEQ ID NO: 397884 - DNA, 25 bp, Homo sapien
tcaaccttgcgggaacaggaccacc

SEQ ID NO: 397885 - DNA, 25 bp, Homo sapien
gaccaccggccagtgtgtgcagact

SEQ ID NO: 397886 - DNA, 25 bp, Homo sapien
ggaacaggaccaccggccagtgtgt

SEQ ID NO: 397887 - DNA, 25 bp, Homo sapien
cacagctcaaccttgcgggaacagg

SEQ ID NO: 397888 - DNA, 25 bp, Homo sapien
tcattagcacgtgcagctcagggcc

SEQ ID NO: 397889 - DNA, 25 bp, Homo sapien
ggctcctcatcacccggaggaccca

SEQ ID NO: 397890 - DNA, 25 bp, Homo sapien
gcatttgagaaaccggccagcacgg

SEQ ID NO: 397891 - DNA, 25 bp, Homo sapien
acggacggggcgttaatcattagca

SEQ ID NO: 397892 - DNA, 25 bp, Homo sapien
aatgatgtccggctgtgcgcaatcg

SEQ ID NO: 397893 - DNA, 25 bp, Homo sapien
aaatgatgtccggctgtgcgcaatc

SEQ ID NO: 397894 - DNA, 25 bp, Homo sapien
cagtacaaatgatgtccggctgtgc

SEQ ID NO: 397895 - DNA, 25 bp, Homo sapien
tacaaatgatgtccggctgtgcgca

SEQ ID NO: 397896 - DNA, 25 bp, Homo sapien
gtcctagaaagcaaacacgagagtt

SEQ ID NO: 397897 - DNA, 25 bp, Homo sapien
aaggattgtaatttgggtaagctga

SEQ ID NO: 397898 - DNA, 25 bp, Homo sapien
ccctgagtagtgtcctagaaagcaa

SEQ ID NO: 397899 - DNA, 25 bp, Homo sapien
gtaagctgagtcacggtggccctga

SEQ ID NO: 397900 - DNA, 25 bp, Homo sapien
tactgctggcacgtcagagcactgg

SEQ ID NO: 397901 - DNA, 25 bp, Homo sapien
caggtctgccattcgctattgagaa

SEQ ID NO: 397902 - DNA, 25 bp, Homo sapien
ctcctgggatgcgtgcaaggcagac

SEQ ID NO: 397903 - DNA, 25 bp, Homo sapien
ttaaatgtctgcagagcgaccaggg

SEQ ID NO: 397904 - DNA, 25 bp, Homo sapien
aggctgtggcgtctgctccgtgcat

SEQ ID NO: 397905 - DNA, 25 bp, Homo sapien
tgagaaacacatcagcccggtgagt

SEQ ID NO: 397906 - DNA, 25 bp, Homo sapien
gggtctaaacgtctcctgtctgtcc

SEQ ID NO: 397907 - DNA, 25 bp, Homo sapien
taaagcagccgcgtttcatcaggag

SEQ ID NO: 397908 - DNA, 25 bp, Homo sapien
cacggcctccgggtctgcaatggaa

SEQ ID NO: 397909 - DNA, 25 bp, Homo sapien
tctgcaatggaacctctagccgctg

SEQ ID NO: 397910 - DNA, 25 bp, Homo sapien
gcaatggaacctctagccgctgcgg

SEQ ID NO: 397911 - DNA, 25 bp, Homo sapien
tccgggtctgcaatggaacctctag

SEQ ID NO: 397912 - DNA, 25 bp, Homo sapien
tgcagggtccaccgacttcccgacc

SEQ ID NO: 397913 - DNA, 25 bp, Homo sapien
ctgcagggtccaccgacttcccgac

SEQ ID NO: 397914 - DNA, 25 bp, Homo sapien
gtggttctactgtctggtgatgtct

SEQ ID NO: 397915 - DNA, 25 bp, Homo sapien
gatgtctgactttgctatcaaggca

SEQ ID NO: 397916 - DNA, 25 bp, Homo sapien
tcttggttcatgaaagacattggtc

SEQ ID NO: 397917 - DNA, 25 bp, Homo sapien
accaagcagtaaaacaaccgccttg

SEQ ID NO: 397918 - DNA, 25 bp, Homo sapien
tccacttggagtcgtcctgactttc

SEQ ID NO: 397919 - DNA, 25 bp, Homo sapien
cgtcctgactttctggatcaatcca

SEQ ID NO: 397920 - DNA, 25 bp, Homo sapien
ggagtcgtcctgactttctggatca

SEQ ID NO: 397921 - DNA, 25 bp, Homo sapien
cctttccacttggagtcgtcctgac

SEQ ID NO: 397922 - DNA, 25 bp, Homo sapien
tgccaccgatgaccaggcctgaggt

SEQ ID NO: 397923 - DNA, 25 bp, Homo sapien
aaatccttccttaacctggtgtctg

SEQ ID NO: 397924 - DNA, 25 bp, Homo sapien
tcggttcttgagacgcgagtctgcc

SEQ ID NO: 397925 - DNA, 25 bp, Homo sapien
tgtgatctcaatctatcacgaccct

SEQ ID NO: 397926 - DNA, 25 bp, Homo sapien
tcatgtggcatttctgggagctcgg

SEQ ID NO: 397927 - DNA, 25 bp, Homo sapien
taaaggtgtttaggtcattgcccaa

SEQ ID NO: 397928 - DNA, 25 bp, Homo sapien
tctcccaggtaaagacgaacggctg

SEQ ID NO: 397929 - DNA, 25 bp, Homo sapien
ttccagtggtgataacggcatcccc

SEQ ID NO: 397930 - DNA, 25 bp, Homo sapien
gaaagcctcataagacctcttccgg

SEQ ID NO: 397931 - DNA, 25 bp, Homo sapien
cgctggtcacagaagactgcggtgc

SEQ ID NO: 397932 - DNA, 25 bp, Homo sapien
ccttcgctgtgtgagccgctggtca

SEQ ID NO: 397933 - DNA, 25 bp, Homo sapien
tcagcagttgaagagtggctccggg

SEQ ID NO: 397934 - DNA, 25 bp, Homo sapien
gggtccctggcgttcgctctctcgt

SEQ ID NO: 397935 - DNA, 25 bp, Homo sapien
agctccctcgtctccatggcagggt

SEQ ID NO: 397936 - DNA, 25 bp, Homo sapien
ttgggtcctgagctcagcggtcctc

SEQ ID NO: 397937 - DNA, 25 bp, Homo sapien
gggacagtggcaacatccccaactg

SEQ ID NO: 397938 - DNA, 25 bp, Homo sapien
cccgaggtgggcgtgtactgattca

SEQ ID NO: 397939 - DNA, 25 bp, Homo sapien
tgagactcaggcgtcctaagaaagg

SEQ ID NO: 397940 - DNA, 25 bp, Homo sapien
ggaacctgaccatgctacacggtga

SEQ ID NO: 397941 - DNA, 25 bp, Homo sapien
gccatagaaggacagacgagacgct

SEQ ID NO: 397942 - DNA, 25 bp, Homo sapien
gctgaggaatgcttctgaacggcct

SEQ ID NO: 397943 - DNA, 25 bp, Homo sapien
gaaagacgcttgagtcctggccaac

SEQ ID NO: 397944 - DNA, 25 bp, Homo sapien
aaacgtgtaggacccgctgaggaat

SEQ ID NO: 397945 - DNA, 25 bp, Homo sapien
taaaactcccgcaggactgctgtgg

SEQ ID NO: 397946 - DNA, 25 bp, Homo sapien
cgtgacagtagccatcagacaatat

SEQ ID NO: 397947 - DNA, 25 bp, Homo sapien
tctggactatttaacagcattgctg

SEQ ID NO: 397948 - DNA, 25 bp, Homo sapien
ttttcccgtaaaagctcagatggtg

SEQ ID NO: 397949 - DNA, 25 bp, Homo sapien
gggcaataccgcctctgtctggact

SEQ ID NO: 397950 - DNA, 25 bp, Homo sapien
gcaaagacggttcaacattagagaa

SEQ ID NO: 397951 - DNA, 25 bp, Homo sapien
gataggcccctaacaagcaactggt

SEQ ID NO: 397952 - DNA, 25 bp, Homo sapien
taaagtctatctccggaaagcaaag

SEQ ID NO: 397953 - DNA, 25 bp, Homo sapien
tgttagtacaactcactacatgaag

SEQ ID NO: 397954 - DNA, 25 bp, Homo sapien
tgcaggctgtatgggaaccttcggg

SEQ ID NO: 397955 - DNA, 25 bp, Homo sapien
aaggggagctggtgcgtcttacatg

SEQ ID NO: 397956 - DNA, 25 bp, Homo sapien
tcggggcggcctcaggaaaccttca

SEQ ID NO: 397957 - DNA, 25 bp, Homo sapien
tatagttgtatgagtctattctcac

SEQ ID NO: 397958 - DNA, 25 bp, Homo sapien
gtgctgacatttgctgcacaggtgc

SEQ ID NO: 397959 - DNA, 25 bp, Homo sapien
ggtgctgacatttgctgcacaggtg

SEQ ID NO: 397960 - DNA, 25 bp, Homo sapien
tcattcataaccaggtgctgacatt

SEQ ID NO: 397961 - DNA, 25 bp, Homo sapien
ctgaagtgtgggcaggctgcgccat

SEQ ID NO: 397962 - DNA, 25 bp, Homo sapien
taggcgtgtgcacccaccaggtcaa

SEQ ID NO: 397963 - DNA, 25 bp, Homo sapien
gggtccccatggtcaagttgtggct

SEQ ID NO: 397964 - DNA, 25 bp, Homo sapien
ttggagctagatttacacctaggcg

SEQ ID NO: 397965 - DNA, 25 bp, Homo sapien
tccagggtgagccattaaagaatct

SEQ ID NO: 397966 - DNA, 25 bp, Homo sapien
ttttgagtgattccagtacaagctc

SEQ ID NO: 397967 - DNA, 25 bp, Homo sapien
attaggacactcaggctacttggga

SEQ ID NO: 397968 - DNA, 25 bp, Homo sapien
ggtgcttgtgaccaagcctgcgtcc

SEQ ID NO: 397969 - DNA, 25 bp, Homo sapien
taaatgtgccaggtctgtagggaag

SEQ ID NO: 397970 - DNA, 25 bp, Homo sapien
cctgaggctgtaagggagaggctgc

SEQ ID NO: 397971 - DNA, 25 bp, Homo sapien
ctcctcagtgtgcagatgcatccca

SEQ ID NO: 397972 - DNA, 25 bp, Homo sapien
agcttctgggcgtcccacagccatc

SEQ ID NO: 397973 - DNA, 25 bp, Homo sapien
cctcagtgtgcagatgcatcccaca

SEQ ID NO: 397974 - DNA, 25 bp, Homo sapien
cagctgcgtagaaatctccgtgagt

SEQ ID NO: 397975 - DNA, 25 bp, Homo sapien
tagcggcttgagaacgcagacctgc

SEQ ID NO: 397976 - DNA, 25 bp, Homo sapien
gcagacctgcactcacagacggttt

SEQ ID NO: 397977 - DNA, 25 bp, Homo sapien
ggcgtagaagggagatgcattcatc

SEQ ID NO: 397978 - DNA, 25 bp, Homo sapien
gagtcacaggacatcagcgtcacat

SEQ ID NO: 397979 - DNA, 25 bp, Homo sapien
taatcaaatcaacgtggactcctgt

SEQ ID NO: 397980 - DNA, 25 bp, Homo sapien
tttagaagcagtgggttaacactca

SEQ ID NO: 397981 - DNA, 25 bp, Homo sapien
catgacaggcttcacgggtttagaa

SEQ ID NO: 397982 - DNA, 25 bp, Homo sapien
gaataccacgtacgcgagtgccctt

SEQ ID NO: 397983 - DNA, 25 bp, Homo sapien
cactcttgaagaggattgccagcaa

SEQ ID NO: 397984 - DNA, 25 bp, Homo sapien
gagggccagctgtaagttccaatca

SEQ ID NO: 397985 - DNA, 25 bp, Homo sapien
cacgtcagggtgcagggtattgtcc

SEQ ID NO: 397986 - DNA, 25 bp, Homo sapien
ctccccaggaccgtcagcgccgcgg

SEQ ID NO: 397987 - DNA, 25 bp, Homo sapien
cgccgcgggatgctgcctcctccgc

SEQ ID NO: 397988 - DNA, 25 bp, Homo sapien
ccaggaccgtcagcgccgcgggatg

SEQ ID NO: 397989 - DNA, 25 bp, Homo sapien
gccgcgggatgctgcctcctccgcc

SEQ ID NO: 397990 - DNA, 25 bp, Homo sapien
ccaggggcgcgagcacgtccaggag

SEQ ID NO: 397991 - DNA, 25 bp, Homo sapien
aggaccaggggcgcgagcacgtcca

SEQ ID NO: 397992 - DNA, 25 bp, Homo sapien
gaccaggggcgcgagcacgtccagg

SEQ ID NO: 397993 - DNA, 25 bp, Homo sapien
agcaggaccaggggcgcgagcacgt

SEQ ID NO: 397994 - DNA, 25 bp, Homo sapien
aacttagaggtgatttcgggaggca

SEQ ID NO: 397995 - DNA, 25 bp, Homo sapien
tgaagatgcgctggagaacaaaacc

SEQ ID NO: 397996 - DNA, 25 bp, Homo sapien
gggaagcacgttccccacagaggga

SEQ ID NO: 397997 - DNA, 25 bp, Homo sapien
gaggtaccatggagcgaatgtgtca

SEQ ID NO: 397998 - DNA, 25 bp, Homo sapien
ggattactaattcaacctcttcact

SEQ ID NO: 397999 - DNA, 25 bp, Homo sapien
tgaattgagaagcatttcccactct

SEQ ID NO: 398000 - DNA, 25 bp, Homo sapien
catagtattggattagaaaaaagtc

SEQ ID NO: 398001 - DNA, 25 bp, Homo sapien
ggtagaatttagctgggaagctctc

SEQ ID NO: 398002 - DNA, 25 bp, Homo sapien
tggagggcactcccctgtcaccaaa

SEQ ID NO: 398003 - DNA, 25 bp, Homo sapien
ctggagggcactcccctgtcaccaa

SEQ ID NO: 398004 - DNA, 25 bp, Homo sapien
tcatctttctgtggcgcaactagtt

SEQ ID NO: 398005 - DNA, 25 bp, Homo sapien
caaggtttggatgccgcagacacgt

SEQ ID NO: 398006 - DNA, 25 bp, Homo sapien
ttcaaaccacgatgataaaggcagc

SEQ ID NO: 398007 - DNA, 25 bp, Homo sapien
gcagctttatcatggcacttccaga

SEQ ID NO: 398008 - DNA, 25 bp, Homo sapien
aggccccaaccgtagctttgaggct

SEQ ID NO: 398009 - DNA, 25 bp, Homo sapien
ggtacaaacatccacacgtgaacag

SEQ ID NO: 398010 - DNA, 25 bp, Homo sapien
tgttcaatcgtcagaggcgtccctc

SEQ ID NO: 398011 - DNA, 25 bp, Homo sapien
tcatttccgggctgaaggccccaac

SEQ ID NO: 398012 - DNA, 25 bp, Homo sapien
tacgcctagcaatggagggagagca

SEQ ID NO: 398013 - DNA, 25 bp, Homo sapien
ggcacaaggaactgattacgcctag

SEQ ID NO: 398014 - DNA, 25 bp, Homo sapien
tgctcaaactcgtctcagagatgcc

SEQ ID NO: 398015 - DNA, 25 bp, Homo sapien
ttttatgtctgaacacgcctccgga

SEQ ID NO: 398016 - DNA, 25 bp, Homo sapien
cggggcagtgcggctggagctgcgg

SEQ ID NO: 398017 - DNA, 25 bp, Homo sapien
cagtgcggctggagctgcgggcggc

SEQ ID NO: 398018 - DNA, 25 bp, Homo sapien
ggcagtgcggctggagctgcgggcg

SEQ ID NO: 398019 - DNA, 25 bp, Homo sapien
gtgcggctggagctgcgggcggcgg

SEQ ID NO: 398020 - DNA, 25 bp, Homo sapien
tctgtggaaccattccggggggtca

SEQ ID NO: 398021 - DNA, 25 bp, Homo sapien
gggctcagggatcgtggtagctgca

SEQ ID NO: 398022 - DNA, 25 bp, Homo sapien
attgaaccaaagccagttcaggttc

SEQ ID NO: 398023 - DNA, 25 bp, Homo sapien
tgtgtggtggtatctgctgtgggct

SEQ ID NO: 398024 - DNA, 25 bp, Homo sapien
aggatctcggctccgacaccggcaa

SEQ ID NO: 398025 - DNA, 25 bp, Homo sapien
tcggctccgacaccggcaatgttct

SEQ ID NO: 398026 - DNA, 25 bp, Homo sapien
aatgttctcctctggcgcgtccggg

SEQ ID NO: 398027 - DNA, 25 bp, Homo sapien
ctttggccacgttcaggatctcggc

SEQ ID NO: 398028 - DNA, 25 bp, Homo sapien
ccagagagtggtcccattctcctgg

SEQ ID NO: 398029 - DNA, 25 bp, Homo sapien
atggtggtggcactgagggccccgt

SEQ ID NO: 398030 - DNA, 25 bp, Homo sapien
cccggagagctaggaatgccacggc

SEQ ID NO: 398031 - DNA, 25 bp, Homo sapien
tgcaggcaaggtgccagcctcggtt

SEQ ID NO: 398032 - DNA, 25 bp, Homo sapien
agttagccacgtgggagacccaagc

SEQ ID NO: 398033 - DNA, 25 bp, Homo sapien
caagcaccgctgtccctggttaaag

SEQ ID NO: 398034 - DNA, 25 bp, Homo sapien
gcagagttattagcaagacccggcc

SEQ ID NO: 398035 - DNA, 25 bp, Homo sapien
taaagtggtgactgcgacctgagac

SEQ ID NO: 398036 - DNA, 25 bp, Homo sapien
ctgctcgccgctctcgtggtggagg

SEQ ID NO: 398037 - DNA, 25 bp, Homo sapien
gcagaagaaccaggcgaggaagggg

SEQ ID NO: 398038 - DNA, 25 bp, Homo sapien
gggacgctgccgcatggggggacca

SEQ ID NO: 398039 - DNA, 25 bp, Homo sapien
gtggcagtgcgtctgcagcaggccc

SEQ ID NO: 398040 - DNA, 25 bp, Homo sapien
gaaggggtggcagtgcgtctgcagc

SEQ ID NO: 398041 - DNA, 25 bp, Homo sapien
aggcggctccaacacgcatcctgca

SEQ ID NO: 398042 - DNA, 25 bp, Homo sapien
tcgggagcgaggcacaggcgacggg

SEQ ID NO: 398043 - DNA, 25 bp, Homo sapien
cctgggtcgggagcgaggcacaggc

SEQ ID NO: 398044 - DNA, 25 bp, Homo sapien
tgcagccggcccaatgagcacacag

SEQ ID NO: 398045 - DNA, 25 bp, Homo sapien
gccaggtgcacatagcaagcagaat

SEQ ID NO: 398046 - DNA, 25 bp, Homo sapien
gatagggcctctgggccaaggctgc

SEQ ID NO: 398047 - DNA, 25 bp, Homo sapien
ctgccaggtgcacatagcaagcaga

SEQ ID NO: 398048 - DNA, 25 bp, Homo sapien
aggctgccaggtgcacatagcaagc

SEQ ID NO: 398049 - DNA, 25 bp, Homo sapien
tgggtgggcgtccaccagaatttcc

SEQ ID NO: 398050 - DNA, 25 bp, Homo sapien
ccaggtccggcacagctgctaaccc

SEQ ID NO: 398051 - DNA, 25 bp, Homo sapien
caggtccggcacagctgctaacccc

SEQ ID NO: 398052 - DNA, 25 bp, Homo sapien
cctggtgggtgggcgtccaccagaa

SEQ ID NO: 398053 - DNA, 25 bp, Homo sapien
gttgcctgcaaggcggctggtgctt

SEQ ID NO: 398054 - DNA, 25 bp, Homo sapien
tgcaaggcggctggtgcttgctggg

SEQ ID NO: 398055 - DNA, 25 bp, Homo sapien
acatgcttggtggggaacagtagcc

SEQ ID NO: 398056 - DNA, 25 bp, Homo sapien
cttggtggggaacagtagccaggtg

SEQ ID NO: 398057 - DNA, 25 bp, Homo sapien
atttcttgacagaaagaaacgtgtt

SEQ ID NO: 398058 - DNA, 25 bp, Homo sapien
tctcataagaagtgcctggtcccac

SEQ ID NO: 398059 - DNA, 25 bp, Homo sapien
agaggccgccgtccacccagatggc

SEQ ID NO: 398060 - DNA, 25 bp, Homo sapien
tacaatgatcgtccatccagatggc

SEQ ID NO: 398061 - DNA, 25 bp, Homo sapien
agctgttacaatgatcgtccatcca

SEQ ID NO: 398062 - DNA, 25 bp, Homo sapien
agcccgacgtcggggtcatccgtct

SEQ ID NO: 398063 - DNA, 25 bp, Homo sapien
acgtcggggtcatccgtctgggtga

SEQ ID NO: 398064 - DNA, 25 bp, Homo sapien
tcggggtcatccgtctgggtgacct

SEQ ID NO: 398065 - DNA, 25 bp, Homo sapien
ggtcatccgtctgggtgacctgctg

SEQ ID NO: 398066 - DNA, 25 bp, Homo sapien
gccgagtccgtgatggcgaacagca

SEQ ID NO: 398067 - DNA, 25 bp, Homo sapien
aagtgtgtccactggccgacgaagg

SEQ ID NO: 398068 - DNA, 25 bp, Homo sapien
gtgaggaccgagcaagcggcattct

SEQ ID NO: 398069 - DNA, 25 bp, Homo sapien
ggaactcctcacagtccacgtagag

SEQ ID NO: 398070 - DNA, 25 bp, Homo sapien
cccatctgagtcatcgccttcctcg

SEQ ID NO: 398071 - DNA, 25 bp, Homo sapien
tgggggtccctgcgcaccttcagct

SEQ ID NO: 398072 - DNA, 25 bp, Homo sapien
tgagtcatcgccttcctcgtccagg

SEQ ID NO: 398073 - DNA, 25 bp, Homo sapien
gcaccttcagctcagcgatcacccc

SEQ ID NO: 398074 - DNA, 25 bp, Homo sapien
cgtggggcatgttgtgatctgggcc

SEQ ID NO: 398075 - DNA, 25 bp, Homo sapien
ttcacgtggggcatgttgtgatctg

SEQ ID NO: 398076 - DNA, 25 bp, Homo sapien
cacgtggggcatgttgtgatctggg

SEQ ID NO: 398077 - DNA, 25 bp, Homo sapien
cgaggctgtgggtccatgttcacgt

SEQ ID NO: 398078 - DNA, 25 bp, Homo sapien
gagaagctcccgggcgtccccgagc

SEQ ID NO: 398079 - DNA, 25 bp, Homo sapien
cccgagcccgctgccagagtctccg

SEQ ID NO: 398080 - DNA, 25 bp, Homo sapien
tctcctccctgagaagctcccgggc

SEQ ID NO: 398081 - DNA, 25 bp, Homo sapien
agcccgctgccagagtctccggatg

SEQ ID NO: 398082 - DNA, 25 bp, Homo sapien
tctggaatcttccgtgctgctgcct

SEQ ID NO: 398083 - DNA, 25 bp, Homo sapien
tgctcctcgacttcttcacttctgg

SEQ ID NO: 398084 - DNA, 25 bp, Homo sapien
tcctaacgaagccaccgtggtctgc

SEQ ID NO: 398085 - DNA, 25 bp, Homo sapien
cgtggtctgctcctcgacttcttca

SEQ ID NO: 398086 - DNA, 25 bp, Homo sapien
gaatctgagccaggaagtgtctgag

SEQ ID NO: 398087 - DNA, 25 bp, Homo sapien
actcccgtcccacgtggagacagaa

SEQ ID NO: 398088 - DNA, 25 bp, Homo sapien
tccggacactcccgtcccacgtgga

SEQ ID NO: 398089 - DNA, 25 bp, Homo sapien
ccgtcccacgtggagacagaatctg

SEQ ID NO: 398090 - DNA, 25 bp, Homo sapien
gcttcatcagggctcaccagtgagt

SEQ ID NO: 398091 - DNA, 25 bp, Homo sapien
ctctggttcagaatggttcaggagc

SEQ ID NO: 398092 - DNA, 25 bp, Homo sapien
gccacaggtgctctggttcagaatg

SEQ ID NO: 398093 - DNA, 25 bp, Homo sapien
cagggctcaccagtgagtggcccaa

SEQ ID NO: 398094 - DNA, 25 bp, Homo sapien
gctcccctttctgccccttcaggcc

SEQ ID NO: 398095 - DNA, 25 bp, Homo sapien
tcccctttctgccccttcaggccgc

SEQ ID NO: 398096 - DNA, 25 bp, Homo sapien
tggctcccctttctgccccttcagg

SEQ ID NO: 398097 - DNA, 25 bp, Homo sapien
ctggctcccctttctgccccttcag

SEQ ID NO: 398098 - DNA, 25 bp, Homo sapien
ggggactcactgggcacgggagacc

SEQ ID NO: 398099 - DNA, 25 bp, Homo sapien
ggactcactgggcacgggagacccg

SEQ ID NO: 398100 - DNA, 25 bp, Homo sapien
actcactgggcacgggagacccggg

SEQ ID NO: 398101 - DNA, 25 bp, Homo sapien
ctcactgggcacgggagacccgggg

SEQ ID NO: 398102 - DNA, 25 bp, Homo sapien
tggtccggggacagtttgcaacgct

SEQ ID NO: 398103 - DNA, 25 bp, Homo sapien
ttgtggtccggggacagtttgcaac

SEQ ID NO: 398104 - DNA, 25 bp, Homo sapien
gtggtccggggacagtttgcaacgc

SEQ ID NO: 398105 - DNA, 25 bp, Homo sapien
cttgtggtccggggacagtttgcaa

SEQ ID NO: 398106 - DNA, 25 bp, Homo sapien
ctcgccgtcccttccaggggtgccg

SEQ ID NO: 398107 - DNA, 25 bp, Homo sapien
ggctcgccgtcccttccaggggtgc

SEQ ID NO: 398108 - DNA, 25 bp, Homo sapien
gctcgccgtcccttccaggggtgcc

SEQ ID NO: 398109 - DNA, 25 bp, Homo sapien
cggctcgccgtcccttccaggggtg

SEQ ID NO: 398110 - DNA, 25 bp, Homo sapien
tggagtcccggggaagccttgtggc

SEQ ID NO: 398111 - DNA, 25 bp, Homo sapien
cctggagtcccggggaagccttgtg

SEQ ID NO: 398112 - DNA, 25 bp, Homo sapien
ctggagtcccggggaagccttgtgg

SEQ ID NO: 398113 - DNA, 25 bp, Homo sapien
gtcgtgtctgaaggagggtcctggg

SEQ ID NO: 398114 - DNA, 25 bp, Homo sapien
ttgtcgtgtctgaaggagggtcctg

SEQ ID NO: 398115 - DNA, 25 bp, Homo sapien
cagcttgtcgtgtctgaaggagggt

SEQ ID NO: 398116 - DNA, 25 bp, Homo sapien
gcttgtcgtgtctgaaggagggtcc

SEQ ID NO: 398117 - DNA, 25 bp, Homo sapien
agggcctccagatcgcccccgaagc

SEQ ID NO: 398118 - DNA, 25 bp, Homo sapien
cccgaagccagatccctccatgtca

SEQ ID NO: 398119 - DNA, 25 bp, Homo sapien
gaagccagatccctccatgtcaatg

SEQ ID NO: 398120 - DNA, 25 bp, Homo sapien
agccagatccctccatgtcaatgaa

SEQ ID NO: 398121 - DNA, 25 bp, Homo sapien
agctgttcaccccaaagcggcctgg

SEQ ID NO: 398122 - DNA, 25 bp, Homo sapien
ggcgggtcctgggacgtcggagctg

SEQ ID NO: 398123 - DNA, 25 bp, Homo sapien
aaagcggcctggctcgccgggcagg

SEQ ID NO: 398124 - DNA, 25 bp, Homo sapien
cacaccaggaaggccggcgggtcct

SEQ ID NO: 398125 - DNA, 25 bp, Homo sapien
agacgctctctgtgcagtccgtgga

SEQ ID NO: 398126 - DNA, 25 bp, Homo sapien
gggtggccccgagtcagcaactgcc

SEQ ID NO: 398127 - DNA, 25 bp, Homo sapien
ctgcccgccagctcctagaggagat

SEQ ID NO: 398128 - DNA, 25 bp, Homo sapien
gggaattgctcatggagacgctctc

SEQ ID NO: 398129 - DNA, 25 bp, Homo sapien
tgcctttctgcccagtccttcctgg

SEQ ID NO: 398130 - DNA, 25 bp, Homo sapien
gctgcctttctgcccagtccttcct

SEQ ID NO: 398131 - DNA, 25 bp, Homo sapien
caggctgcctttctgcccagtcctt

SEQ ID NO: 398132 - DNA, 25 bp, Homo sapien
ggctgcctttctgcccagtccttcc

SEQ ID NO: 398133 - DNA, 25 bp, Homo sapien
ttatgtcctggggcgcctgcttcac

SEQ ID NO: 398134 - DNA, 25 bp, Homo sapien
cttatgtcctggggcgcctgcttca

SEQ ID NO: 398135 - DNA, 25 bp, Homo sapien
tatgtcctggggcgcctgcttcacc

SEQ ID NO: 398136 - DNA, 25 bp, Homo sapien
taagagatgcgtgtgcacatgcccc

SEQ ID NO: 398137 - DNA, 25 bp, Homo sapien
gcatgtgtgctagaaaaacgtgggc

SEQ ID NO: 398138 - DNA, 25 bp, Homo sapien
gagatacacgtgcacatacatgaga

SEQ ID NO: 398139 - DNA, 25 bp, Homo sapien
aaacgtgggcacatacctagataca

SEQ ID NO: 398140 - DNA, 25 bp, Homo sapien
ccccacgagcaccagcaggaccggg

SEQ ID NO: 398141 - DNA, 25 bp, Homo sapien
tgccaggccgctctccccacgagca

SEQ ID NO: 398142 - DNA, 25 bp, Homo sapien
gctctccccacgagcaccagcagga

SEQ ID NO: 398143 - DNA, 25 bp, Homo sapien
aaatccagcggggagtcctggtcct

SEQ ID NO: 398144 - DNA, 25 bp, Homo sapien
gccccccggagccttccatgtcatc

SEQ ID NO: 398145 - DNA, 25 bp, Homo sapien
cagcgcttcgggctgttgaccagaa

SEQ ID NO: 398146 - DNA, 25 bp, Homo sapien
gcttcgggctgttgaccagaagggc

SEQ ID NO: 398147 - DNA, 25 bp, Homo sapien
ctgtggcccatcagcgcttcgggct

SEQ ID NO: 398148 - DNA, 25 bp, Homo sapien
gatcccatgcaaggccggtggctct

SEQ ID NO: 398149 - DNA, 25 bp, Homo sapien
tgcagggcggcttccgatcccatgc

SEQ ID NO: 398150 - DNA, 25 bp, Homo sapien
ggcatctccgaagaacaagggtggc

SEQ ID NO: 398151 - DNA, 25 bp, Homo sapien
cccgtgactttagttcaatgaaggg

SEQ ID NO: 398152 - DNA, 25 bp, Homo sapien
ctgagcaacttgtgcagggaccccg

SEQ ID NO: 398153 - DNA, 25 bp, Homo sapien
tggctgaaggcacccggccgggacg

SEQ ID NO: 398154 - DNA, 25 bp, Homo sapien
ctggctgaaggcacccggccgggac

SEQ ID NO: 398155 - DNA, 25 bp, Homo sapien
cccggcagcccaggcacgccaggat

SEQ ID NO: 398156 - DNA, 25 bp, Homo sapien
cggcagcccaggcacgccaggatcc

SEQ ID NO: 398157 - DNA, 25 bp, Homo sapien
ccccggcagcccaggcacgccagga

SEQ ID NO: 398158 - DNA, 25 bp, Homo sapien
gcagcccaggcacgccaggatcccc

SEQ ID NO: 398159 - DNA, 25 bp, Homo sapien
ggaacccggggactccatctgctcc

SEQ ID NO: 398160 - DNA, 25 bp, Homo sapien
tttctccccggctgcctctgtctcc

SEQ ID NO: 398161 - DNA, 25 bp, Homo sapien
cttttctccccggctgcctctgtct

SEQ ID NO: 398162 - DNA, 25 bp, Homo sapien
ggctgcctctgtctccctttggccc

SEQ ID NO: 398163 - DNA, 25 bp, Homo sapien
ccggctgcctctgtctccctttggc

SEQ ID NO: 398164 - DNA, 25 bp, Homo sapien
ttcatctcaaccgctctggccagga

SEQ ID NO: 398165 - DNA, 25 bp, Homo sapien
cacgcgtccggcatttcatctcaac

SEQ ID NO: 398166 - DNA, 25 bp, Homo sapien
gaggccacgcgtccggcatttcatc

SEQ ID NO: 398167 - DNA, 25 bp, Homo sapien
aagaggaggccacgcgtccggcatt

SEQ ID NO: 398168 - DNA, 25 bp, Homo sapien
cgacacgtagaccacaggtcccggg

SEQ ID NO: 398169 - DNA, 25 bp, Homo sapien
ggaggcccggctgcccgactccgtc

SEQ ID NO: 398170 - DNA, 25 bp, Homo sapien
gtcctgctccgacacgtagaccaca

SEQ ID NO: 398171 - DNA, 25 bp, Homo sapien
gcccggctgcccgactccgtccttc

SEQ ID NO: 398172 - DNA, 25 bp, Homo sapien
gggtctggacagattgggtgcccac

SEQ ID NO: 398173 - DNA, 25 bp, Homo sapien
ccccgtggggggtctggacagattg

SEQ ID NO: 398174 - DNA, 25 bp, Homo sapien
gggggtctggacagattgggtgccc

SEQ ID NO: 398175 - DNA, 25 bp, Homo sapien
tctggacagattgggtgcccaccca

SEQ ID NO: 398176 - DNA, 25 bp, Homo sapien
tggagcacaagggttaggtaacttg

SEQ ID NO: 398177 - DNA, 25 bp, Homo sapien
acacagctgacggtgcctgctctca

SEQ ID NO: 398178 - DNA, 25 bp, Homo sapien
gagcacaagggttaggtaacttgtc

SEQ ID NO: 398179 - DNA, 25 bp, Homo sapien
gtcccggcacgctcaggacggatcc

SEQ ID NO: 398180 - DNA, 25 bp, Homo sapien
caggtcccggcacgctcaggacgga

SEQ ID NO: 398181 - DNA, 25 bp, Homo sapien
ggtcccggcacgctcaggacggatc

SEQ ID NO: 398182 - DNA, 25 bp, Homo sapien
ctcaggtcccggcacgctcaggacg

SEQ ID NO: 398183 - DNA, 25 bp, Homo sapien
gcccaggttgcccttgggtcctgca

SEQ ID NO: 398184 - DNA, 25 bp, Homo sapien
cggggagcctcgttcgcccttagag

SEQ ID NO: 398185 - DNA, 25 bp, Homo sapien
gttcgcccttagagcccaggttgcc

SEQ ID NO: 398186 - DNA, 25 bp, Homo sapien
ctcgttcgcccttagagcccaggtt

SEQ ID NO: 398187 - DNA, 25 bp, Homo sapien
gatgctgcccggttcacccttctca

SEQ ID NO: 398188 - DNA, 25 bp, Homo sapien
ctgaagatgctgcccggttcaccct

SEQ ID NO: 398189 - DNA, 25 bp, Homo sapien
gggctgaagatgctgcccggttcac

SEQ ID NO: 398190 - DNA, 25 bp, Homo sapien
caccgccgtcggggctgaagatgct

SEQ ID NO: 398191 - DNA, 25 bp, Homo sapien
gccgtccaggaaagccaatctctcc

SEQ ID NO: 398192 - DNA, 25 bp, Homo sapien
cggccgtccaggaaagccaatctct

SEQ ID NO: 398193 - DNA, 25 bp, Homo sapien
ggccgtccaggaaagccaatctctc

SEQ ID NO: 398194 - DNA, 25 bp, Homo sapien
ttcaatccgttcatcccggggcgac

SEQ ID NO: 398195 - DNA, 25 bp, Homo sapien
ctcctttcaatccgttcatcccggg

SEQ ID NO: 398196 - DNA, 25 bp, Homo sapien
atccaaggctggcatctcccggctc

SEQ ID NO: 398197 - DNA, 25 bp, Homo sapien
aatccaaggctggcatctcccggct

SEQ ID NO: 398198 - DNA, 25 bp, Homo sapien
acacctttgggctgagcgggagaac

SEQ ID NO: 398199 - DNA, 25 bp, Homo sapien
tacctgtatgggtgtgcacgtggac

SEQ ID NO: 398200 - DNA, 25 bp, Homo sapien
cgtggacaggctcgtatatgcatga

SEQ ID NO: 398201 - DNA, 25 bp, Homo sapien
gagtacggccatatatgtgcatgca

SEQ ID NO: 398202 - DNA, 25 bp, Homo sapien
caccgggtctgcgtctcaggtaaaa

SEQ ID NO: 398203 - DNA, 25 bp, Homo sapien
cacagacgtccctcgggaggagtga

SEQ ID NO: 398204 - DNA, 25 bp, Homo sapien
tcatcccacgctggagtcgtgcaca

SEQ ID NO: 398205 - DNA, 25 bp, Homo sapien
gaccaggcaaaaccgagaatgcagt

SEQ ID NO: 398206 - DNA, 25 bp, Homo sapien
agggcagagagctgttaggcttatg

SEQ ID NO: 398207 - DNA, 25 bp, Homo sapien
ggcagagagctgttaggcttatggc

SEQ ID NO: 398208 - DNA, 25 bp, Homo sapien
gagggcagagagctgttaggcttat

SEQ ID NO: 398209 - DNA, 25 bp, Homo sapien
gggcagagagctgttaggcttatgg

SEQ ID NO: 398210 - DNA, 25 bp, Homo sapien
attgctgtcgtaaacaggagtccct

SEQ ID NO: 398211 - DNA, 25 bp, Homo sapien
ttgctgtcgtaaacaggagtccctg

SEQ ID NO: 398212 - DNA, 25 bp, Homo sapien
ccggggcggctggactcagcaaaca

SEQ ID NO: 398213 - DNA, 25 bp, Homo sapien
cccggggcggctggactcagcaaac

SEQ ID NO: 398214 - DNA, 25 bp, Homo sapien
gcccggggcggctggactcagcaaa

SEQ ID NO: 398215 - DNA, 25 bp, Homo sapien
cacttctcctttggcgcccttgggt

SEQ ID NO: 398216 - DNA, 25 bp, Homo sapien
gcccacttctcctttggcgcccttg

SEQ ID NO: 398217 - DNA, 25 bp, Homo sapien
cccacttctcctttggcgcccttgg

SEQ ID NO: 398218 - DNA, 25 bp, Homo sapien
ccacttctcctttggcgcccttggg

SEQ ID NO: 398219 - DNA, 25 bp, Homo sapien
tccaactgaagaaagtcaaacggaa

SEQ ID NO: 398220 - DNA, 25 bp, Homo sapien
cttcatttcagcctccaactgaaga

SEQ ID NO: 398221 - DNA, 25 bp, Homo sapien
tttcagcctccaactgaagaaagtc

SEQ ID NO: 398222 - DNA, 25 bp, Homo sapien
gcctccaactgaagaaagtcaaacg

SEQ ID NO: 398223 - DNA, 25 bp, Homo sapien
cctttctgtcctgcatcacctcggt

SEQ ID NO: 398224 - DNA, 25 bp, Homo sapien
ttctgtcctgcatcacctcggtctc

SEQ ID NO: 398225 - DNA, 25 bp, Homo sapien
aggctggagccgaagaaaccgccgc

SEQ ID NO: 398226 - DNA, 25 bp, Homo sapien
gccgggcaggctggagccgaagaaa

SEQ ID NO: 398227 - DNA, 25 bp, Homo sapien
agccgatgccggggggtccctgagg

SEQ ID NO: 398228 - DNA, 25 bp, Homo sapien
tggcgcccctcgtagccgatgccgg

SEQ ID NO: 398229 - DNA, 25 bp, Homo sapien
gccctggcgcccctcgtagccgatg

SEQ ID NO: 398230 - DNA, 25 bp, Homo sapien
ggctggccccggatgctctctccct

SEQ ID NO: 398231 - DNA, 25 bp, Homo sapien
tgaggaggcgcccatggttccaggg

SEQ ID NO: 398232 - DNA, 25 bp, Homo sapien
cccggagggccgggaacgctgatag

SEQ ID NO: 398233 - DNA, 25 bp, Homo sapien
ccctgaggaggcgcccatggttcca

SEQ ID NO: 398234 - DNA, 25 bp, Homo sapien
gcccggagggccgggaacgctgata

SEQ ID NO: 398235 - DNA, 25 bp, Homo sapien
ctgggaccaaatgcagaggtgtggg

SEQ ID NO: 398236 - DNA, 25 bp, Homo sapien
tgggaccaaatgcagaggtgtgggg

SEQ ID NO: 398237 - DNA, 25 bp, Homo sapien
tggaccttccggaacccgttctgca

SEQ ID NO: 398238 - DNA, 25 bp, Homo sapien
gcacgcggacgtagagctcctcctg

SEQ ID NO: 398239 - DNA, 25 bp, Homo sapien
agccctcgggaacctcgtgcacctg

SEQ ID NO: 398240 - DNA, 25 bp, Homo sapien
gccacgaagatgagccagccctcgg

SEQ ID NO: 398241 - DNA, 25 bp, Homo sapien
cttattatcgggtgtgtgaggtgac

SEQ ID NO: 398242 - DNA, 25 bp, Homo sapien
ggctcccacggatgtcacaggccgt

SEQ ID NO: 398243 - DNA, 25 bp, Homo sapien
gagcaaggcccgtgctaagcagaga

SEQ ID NO: 398244 - DNA, 25 bp, Homo sapien
gcagtgttctgccatggaggctccc

SEQ ID NO: 398245 - DNA, 25 bp, Homo sapien
tgctatgagactggcagcctctccc

SEQ ID NO: 398246 - DNA, 25 bp, Homo sapien
ctgcatccgggtgcctacaagcaca

SEQ ID NO: 398247 - DNA, 25 bp, Homo sapien
acgcgtttgctaggatgccatcccc

SEQ ID NO: 398248 - DNA, 25 bp, Homo sapien
ccaaagcccctgaaagttaggatgg

SEQ ID NO: 398249 - DNA, 25 bp, Homo sapien
ctccaagcctgtgccagggtacgct

SEQ ID NO: 398250 - DNA, 25 bp, Homo sapien
cctccaagcctgtgccagggtacgc

SEQ ID NO: 398251 - DNA, 25 bp, Homo sapien
gccagggtacgctccctgcccagca

SEQ ID NO: 398252 - DNA, 25 bp, Homo sapien
cagggtcacccaggacctgcggctg

SEQ ID NO: 398253 - DNA, 25 bp, Homo sapien
gcagggtcacccaggacctgcggct

SEQ ID NO: 398254 - DNA, 25 bp, Homo sapien
gggtcacccaggacctgcggctggg

SEQ ID NO: 398255 - DNA, 25 bp, Homo sapien
agcagggtcacccaggacctgcggc

SEQ ID NO: 398256 - DNA, 25 bp, Homo sapien
cctcgtgggagtggtgtccgggcct

SEQ ID NO: 398257 - DNA, 25 bp, Homo sapien
gtgggagtggtgtccgggcctccag

SEQ ID NO: 398258 - DNA, 25 bp, Homo sapien
ctcgtgggagtggtgtccgggcctc

SEQ ID NO: 398259 - DNA, 25 bp, Homo sapien
tcgtgggagtggtgtccgggcctcc

SEQ ID NO: 398260 - DNA, 25 bp, Homo sapien
ctcccgccgcgggtaggggttgctg

SEQ ID NO: 398261 - DNA, 25 bp, Homo sapien
gtgggcttgtgggtcgcgccggccg

SEQ ID NO: 398262 - DNA, 25 bp, Homo sapien
ggctggccaggatgtcatctgcccg

SEQ ID NO: 398263 - DNA, 25 bp, Homo sapien
caggtgcacgtaggagctgtggtgc

SEQ ID NO: 398264 - DNA, 25 bp, Homo sapien
accggctggaagtcgcggtggctgt

SEQ ID NO: 398265 - DNA, 25 bp, Homo sapien
cttgaggttgacgatgggcacggct

SEQ ID NO: 398266 - DNA, 25 bp, Homo sapien
ggctgttgagcgcaaccaggtggag

SEQ ID NO: 398267 - DNA, 25 bp, Homo sapien
aggcgcgaggacaggaaggcgcgga

SEQ ID NO: 398268 - DNA, 25 bp, Homo sapien
gcacggcgcacgatgctgtacaggt

SEQ ID NO: 398269 - DNA, 25 bp, Homo sapien
ctgtgtggacacttggtccagcagc

SEQ ID NO: 398270 - DNA, 25 bp, Homo sapien
tgtgtggacacttggtccagcagca

SEQ ID NO: 398271 - DNA, 25 bp, Homo sapien
gggcttcagcggaccctcagagcct

SEQ ID NO: 398272 - DNA, 25 bp, Homo sapien
tcaaaggagaagatgcgtgccccgg

SEQ ID NO: 398273 - DNA, 25 bp, Homo sapien
caggacgtccttgccgtcaaaggag

SEQ ID NO: 398274 - DNA, 25 bp, Homo sapien
cgtgccccgggcttcagcggaccct

SEQ ID NO: 398275 - DNA, 25 bp, Homo sapien
gtccgccacgtctcacagtagctct

SEQ ID NO: 398276 - DNA, 25 bp, Homo sapien
gagccatgccacacgctcttctggg

SEQ ID NO: 398277 - DNA, 25 bp, Homo sapien
gagggagcctccgtccgccacgtct

SEQ ID NO: 398278 - DNA, 25 bp, Homo sapien
tctcggtcagcctgcgcccgttggg

SEQ ID NO: 398279 - DNA, 25 bp, Homo sapien
atgtaggcgtgatggcagctcgcgg

SEQ ID NO: 398280 - DNA, 25 bp, Homo sapien
gcgtgatggcagctcgcggcactct

SEQ ID NO: 398281 - DNA, 25 bp, Homo sapien
aggcgtgatggcagctcgcggcact

SEQ ID NO: 398282 - DNA, 25 bp, Homo sapien
gtgatggcagctcgcggcactctgc

SEQ ID NO: 398283 - DNA, 25 bp, Homo sapien
tggaggcagtcatgaagctgttctc

SEQ ID NO: 398284 - DNA, 25 bp, Homo sapien
ttggaggcagtcatgaagctgttct

SEQ ID NO: 398285 - DNA, 25 bp, Homo sapien
ggaggcagtcatgaagctgttctca

SEQ ID NO: 398286 - DNA, 25 bp, Homo sapien
tccggccatccgcatccaggcggtg

SEQ ID NO: 398287 - DNA, 25 bp, Homo sapien
tacaggaaagtatggcagccaggtc

SEQ ID NO: 398288 - DNA, 25 bp, Homo sapien
tttcttgaggattacatgaaacgtg

SEQ ID NO: 398289 - DNA, 25 bp, Homo sapien
aaacgtgaactatacaggaaagtat

SEQ ID NO: 398290 - DNA, 25 bp, Homo sapien
tgaatctcccagcttggactcggcc

SEQ ID NO: 398291 - DNA, 25 bp, Homo sapien
tctgatcaggccaagaggttgcaca

SEQ ID NO: 398292 - DNA, 25 bp, Homo sapien
tcctggagaaatcgagccgtggtct

SEQ ID NO: 398293 - DNA, 25 bp, Homo sapien
gatatgggtttcctaggagacagcc

SEQ ID NO: 398294 - DNA, 25 bp, Homo sapien
ttgcctgtctgaattggcttcacat

SEQ ID NO: 398295 - DNA, 25 bp, Homo sapien
tgcctgtctgaattggcttcacatc

SEQ ID NO: 398296 - DNA, 25 bp, Homo sapien
cttaagtgagtgtgcgcagggcttc

SEQ ID NO: 398297 - DNA, 25 bp, Homo sapien
tcagggtctaaggagcgctagtgcc

SEQ ID NO: 398298 - DNA, 25 bp, Homo sapien
caggttggcggcagacacattgtca

SEQ ID NO: 398299 - DNA, 25 bp, Homo sapien
taactgacgtagaatgaagaactgc

SEQ ID NO: 398300 - DNA, 25 bp, Homo sapien
gagctcttctacagcgtcaccatgg

SEQ ID NO: 398301 - DNA, 25 bp, Homo sapien
tcactgtgggccgagtctccttctc

SEQ ID NO: 398302 - DNA, 25 bp, Homo sapien
gagctggagcgcatgaatcctggcc

SEQ ID NO: 398303 - DNA, 25 bp, Homo sapien
tcggtggcgcacatgcagctcatgg

SEQ ID NO: 398304 - DNA, 25 bp, Homo sapien
caccaggccttggatatcatcagag

SEQ ID NO: 398305 - DNA, 25 bp, Homo sapien
tgtgacccagctttcgcaagttgct

SEQ ID NO: 398306 - DNA, 25 bp, Homo sapien
ccacgtgggttcgaggctgttctta

SEQ ID NO: 398307 - DNA, 25 bp, Homo sapien
cacgtaagtggtgtcttgtgaccca

SEQ ID NO: 398308 - DNA, 25 bp, Homo sapien
gaggtatgtccagctctacccgtgg

SEQ ID NO: 398309 - DNA, 25 bp, Homo sapien
ggtgatggagcccaacctttgtgca

SEQ ID NO: 398310 - DNA, 25 bp, Homo sapien
agtgaacttgacagggagtcccagg

SEQ ID NO: 398311 - DNA, 25 bp, Homo sapien
ggatcggtgcgcctgtctaaacctg

SEQ ID NO: 398312 - DNA, 25 bp, Homo sapien
caggccgtgaggacctctgctggtc

SEQ ID NO: 398313 - DNA, 25 bp, Homo sapien
ttgagcttgcagtcttgggtccgcc

SEQ ID NO: 398314 - DNA, 25 bp, Homo sapien
tctgttctcggctttgacctgtgac

SEQ ID NO: 398315 - DNA, 25 bp, Homo sapien
agaggatcgtctgtcccgtggtcac

SEQ ID NO: 398316 - DNA, 25 bp, Homo sapien
gccagagtttgcacgagtggccaaa

SEQ ID NO: 398317 - DNA, 25 bp, Homo sapien
caccagaggtcttgggcctgtgcag

SEQ ID NO: 398318 - DNA, 25 bp, Homo sapien
ccagatgcccaacaaggagggtgca

SEQ ID NO: 398319 - DNA, 25 bp, Homo sapien
acgtcagaggcaagtgcaccggcat

SEQ ID NO: 398320 - DNA, 25 bp, Homo sapien
gttgtttcaaagtgtgcggcacccc

SEQ ID NO: 398321 - DNA, 25 bp, Homo sapien
ggtcttcaggacaagcccgatttca

SEQ ID NO: 398322 - DNA, 25 bp, Homo sapien
tccaaggaatgaaccaagcacaggg

SEQ ID NO: 398323 - DNA, 25 bp, Homo sapien
gaatgatctgtctcgtcaagcggaa

SEQ ID NO: 398324 - DNA, 25 bp, Homo sapien
tcgccgcagccatagttagggtgct

SEQ ID NO: 398325 - DNA, 25 bp, Homo sapien
ccagtgaactttagggtacatccca

SEQ ID NO: 398326 - DNA, 25 bp, Homo sapien
cagacgttactgtggttcccgggtg

SEQ ID NO: 398327 - DNA, 25 bp, Homo sapien
caaagccttgagagggtgcagacgc

SEQ ID NO: 398328 - DNA, 25 bp, Homo sapien
aggtggctcagctgaacatgccact

SEQ ID NO: 398329 - DNA, 25 bp, Homo sapien
ggaagagagggtcccgccttgggca

SEQ ID NO: 398330 - DNA, 25 bp, Homo sapien
tgaacatgccactcagcgtgtgtaa

SEQ ID NO: 398331 - DNA, 25 bp, Homo sapien
actcagcgtgtgtaattgggatttg

SEQ ID NO: 398332 - DNA, 25 bp, Homo sapien
tgaatgcattcatgaccgcgaggac

SEQ ID NO: 398333 - DNA, 25 bp, Homo sapien
gcaggtgccatcacaacgagggtta

SEQ ID NO: 398334 - DNA, 25 bp, Homo sapien
gaggccaggtccatcaaaacgttga

SEQ ID NO: 398335 - DNA, 25 bp, Homo sapien
taataatgttgagatccacgctgac

SEQ ID NO: 398336 - DNA, 25 bp, Homo sapien
cacatgttacctaggggcaaattag

SEQ ID NO: 398337 - DNA, 25 bp, Homo sapien
agcctacaaccccagcacacatgtt

SEQ ID NO: 398338 - DNA, 25 bp, Homo sapien
tactttgccctcatgtcctcttcac

SEQ ID NO: 398339 - DNA, 25 bp, Homo sapien
accccagcacacatgttacctaggg

SEQ ID NO: 398340 - DNA, 25 bp, Homo sapien
tagtaattaacgtcaaaaccttgca

SEQ ID NO: 398341 - DNA, 25 bp, Homo sapien
gggcagcgtgttagaccctaaagac

SEQ ID NO: 398342 - DNA, 25 bp, Homo sapien
gctgatccggcctggttctgggttt

SEQ ID NO: 398343 - DNA, 25 bp, Homo sapien
tctcatggccgtcagggtgctggtc

SEQ ID NO: 398344 - DNA, 25 bp, Homo sapien
tgccctgcgccggacggcgagcccg

SEQ ID NO: 398345 - DNA, 25 bp, Homo sapien
cctaagtcagccgaagcggcggcga

SEQ ID NO: 398346 - DNA, 25 bp, Homo sapien
cggcggcggagcctaagtcagccga

SEQ ID NO: 398347 - DNA, 25 bp, Homo sapien
gcggcggtcgcggcttcaggcgctc

SEQ ID NO: 398348 - DNA, 25 bp, Homo sapien
tatgcatgcatgtgtatttacagta

SEQ ID NO: 398349 - DNA, 25 bp, Homo sapien
aggcccccaccaccgacaggccctg

SEQ ID NO: 398350 - DNA, 25 bp, Homo sapien
catatgcatgcatgtgtatttacag

SEQ ID NO: 398351 - DNA, 25 bp, Homo sapien
tgcatgcatgtgtatttacagtaga

SEQ ID NO: 398352 - DNA, 25 bp, Homo sapien
gcatagagagagacatataggtcca

SEQ ID NO: 398353 - DNA, 25 bp, Homo sapien
cgcaccaaagacctaaatttcagag

SEQ ID NO: 398354 - DNA, 25 bp, Homo sapien
taaggccattcaataggtagtcttt

SEQ ID NO: 398355 - DNA, 25 bp, Homo sapien
gagttttgacagaagtgctaaggcc

SEQ ID NO: 398356 - DNA, 25 bp, Homo sapien
ttacatttacttcagaacaggaaca

SEQ ID NO: 398357 - DNA, 25 bp, Homo sapien
cagttacatttacttcagaacagga

SEQ ID NO: 398358 - DNA, 25 bp, Homo sapien
atagcagttacatttacttcagaac

SEQ ID NO: 398359 - DNA, 25 bp, Homo sapien
acatttacttcagaacaggaacaag

SEQ ID NO: 398360 - DNA, 25 bp, Homo sapien
tgtcagaaggatggacatggcaatc

SEQ ID NO: 398361 - DNA, 25 bp, Homo sapien
ttcaagacttacagccacagtagcc

SEQ ID NO: 398362 - DNA, 25 bp, Homo sapien
gaaccacagaaaggtgcccaaatga

SEQ ID NO: 398363 - DNA, 25 bp, Homo sapien
gaaggaatctttgtgatctacggct

SEQ ID NO: 398364 - DNA, 25 bp, Homo sapien
tggtatccggatattcttggcctca

SEQ ID NO: 398365 - DNA, 25 bp, Homo sapien
ggtccttatctcctcagtcctgaaa

SEQ ID NO: 398366 - DNA, 25 bp, Homo sapien
ggtagaatgaaccagtgtagccttc

SEQ ID NO: 398367 - DNA, 25 bp, Homo sapien
cagttgtttaatacgctggctaaag

SEQ ID NO: 398368 - DNA, 25 bp, Homo sapien
ccttgccttgttggtagtcttagga

SEQ ID NO: 398369 - DNA, 25 bp, Homo sapien
cactatttcacctttgagtatgaag

SEQ ID NO: 398370 - DNA, 25 bp, Homo sapien
tatcaggttgacgaaattattgtat

SEQ ID NO: 398371 - DNA, 25 bp, Homo sapien
ccacgttattgtgggtatcagaaca

SEQ ID NO: 398372 - DNA, 25 bp, Homo sapien
taccaggttctagtcaggagacaat

SEQ ID NO: 398373 - DNA, 25 bp, Homo sapien
taggtggtgcctttgctaaaaatca

SEQ ID NO: 398374 - DNA, 25 bp, Homo sapien
ctatcaagatgggtaaagggtaaag

SEQ ID NO: 398375 - DNA, 25 bp, Homo sapien
tcaagtggccttatgtaccaggttc

SEQ ID NO: 398376 - DNA, 25 bp, Homo sapien
ttcttggtgcatgccgtttttcaca

SEQ ID NO: 398377 - DNA, 25 bp, Homo sapien
tataggtagggcttattgagtctgg

SEQ ID NO: 398378 - DNA, 25 bp, Homo sapien
ttaggtccaatccaagtgtggctgg

SEQ ID NO: 398379 - DNA, 25 bp, Homo sapien
tgtttaccctgaagccatgaagaaa

SEQ ID NO: 398380 - DNA, 25 bp, Homo sapien
cccactgaagtaagctgtcaccaga

SEQ ID NO: 398381 - DNA, 25 bp, Homo sapien
ttgagagcccactggcctagtgtca

SEQ ID NO: 398382 - DNA, 25 bp, Homo sapien
atagatagaacccaacttaagaagt

SEQ ID NO: 398383 - DNA, 25 bp, Homo sapien
caagtaatgtaactatcaatagata

SEQ ID NO: 398384 - DNA, 25 bp, Homo sapien
tggctgcacatctgcagcgtcattc

SEQ ID NO: 398385 - DNA, 25 bp, Homo sapien
acatctgcagcgtcattctcatcag

SEQ ID NO: 398386 - DNA, 25 bp, Homo sapien
atctgcagcgtcattctcatcagca

SEQ ID NO: 398387 - DNA, 25 bp, Homo sapien
tgcacatctgcagcgtcattctcat

SEQ ID NO: 398388 - DNA, 25 bp, Homo sapien
aaatgcaagacttatacaccaaaaa

SEQ ID NO: 398389 - DNA, 25 bp, Homo sapien
aacatcctatgttcaatgtaatatt

SEQ ID NO: 398390 - DNA, 25 bp, Homo sapien
taaaaatgcaagacttatacaccaa

SEQ ID NO: 398391 - DNA, 25 bp, Homo sapien
aaaacatcctatgttcaatgtaata

SEQ ID NO: 398392 - DNA, 25 bp, Homo sapien
caggagtctttcgaagctgtaaaca

SEQ ID NO: 398393 - DNA, 25 bp, Homo sapien
aaaccaagagcccagcaatcaatga

SEQ ID NO: 398394 - DNA, 25 bp, Homo sapien
cccgagctgcatccaagccttgaaa

SEQ ID NO: 398395 - DNA, 25 bp, Homo sapien
cagcaatcaatgagaaccagcagcc

SEQ ID NO: 398396 - DNA, 25 bp, Homo sapien
gccgtggtggaagacactggaaaca

SEQ ID NO: 398397 - DNA, 25 bp, Homo sapien
tccacatcctgaatgccgtggtgga

SEQ ID NO: 398398 - DNA, 25 bp, Homo sapien
ccagccatgggagccacacgcgggt

SEQ ID NO: 398399 - DNA, 25 bp, Homo sapien
atgggagccacacgcgggtcactgt

SEQ ID NO: 398400 - DNA, 25 bp, Homo sapien
aaagtgctgaccgagatgactttgc

SEQ ID NO: 398401 - DNA, 25 bp, Homo sapien
ccacaaagaaaagtgctgaccgaga

SEQ ID NO: 398402 - DNA, 25 bp, Homo sapien
agtgctgaccgagatgactttgcag

SEQ ID NO: 398403 - DNA, 25 bp, Homo sapien
aagaaaagtgctgaccgagatgact

SEQ ID NO: 398404 - DNA, 25 bp, Homo sapien
gggagcttctctcttgtagacagtc

SEQ ID NO: 398405 - DNA, 25 bp, Homo sapien
aaccacgtggggagcttctctcttg

SEQ ID NO: 398406 - DNA, 25 bp, Homo sapien
acggaaccacgtggggagcttctct

SEQ ID NO: 398407 - DNA, 25 bp, Homo sapien
ggaaccacgtggggagcttctctct

SEQ ID NO: 398408 - DNA, 25 bp, Homo sapien
ttagtctaaaaatatcgcctgtgac

SEQ ID NO: 398409 - DNA, 25 bp, Homo sapien
tgacagcatcataagaagcactact

SEQ ID NO: 398410 - DNA, 25 bp, Homo sapien
aactctgctgacaccgaaagagtcg

SEQ ID NO: 398411 - DNA, 25 bp, Homo sapien
gagagcaagactttcaactctgctg

SEQ ID NO: 398412 - DNA, 25 bp, Homo sapien
cttctccatggaggcctacattcat

SEQ ID NO: 398413 - DNA, 25 bp, Homo sapien
gacctgagaggtctgcacggaccac

SEQ ID NO: 398414 - DNA, 25 bp, Homo sapien
acctgagaggtctgcacggaccaca

SEQ ID NO: 398415 - DNA, 25 bp, Homo sapien
ctgatgaagataggggggctaccca

SEQ ID NO: 398416 - DNA, 25 bp, Homo sapien
ctacccagaggaccgtggacaggaa

SEQ ID NO: 398417 - DNA, 25 bp, Homo sapien
ccacccagaggaccgtggacaggaa

SEQ ID NO: 398418 - DNA, 25 bp, Homo sapien
cacccagaggatcgtggacaggaag

SEQ ID NO: 398419 - DNA, 25 bp, Homo sapien
gacaccaccatgtggcgctacgtca

SEQ ID NO: 398420 - DNA, 25 bp, Homo sapien
tgctgacaccaccatgtggcgctac

SEQ ID NO: 398421 - DNA, 25 bp, Homo sapien
caccatgtggcgctacgtcagtgga

SEQ ID NO: 398422 - DNA, 25 bp, Homo sapien
tggcgctacgtcagtggactgacac

SEQ ID NO: 398423 - DNA, 25 bp, Homo sapien
aagacactcgacagcaataagccta

SEQ ID NO: 398424 - DNA, 25 bp, Homo sapien
tatgtgtacatgcacgtatttccca

SEQ ID NO: 398425 - DNA, 25 bp, Homo sapien
tgatgtcactaaacacagagctggg

SEQ ID NO: 398426 - DNA, 25 bp, Homo sapien
cagctctgacccctaacagggttag

SEQ ID NO: 398427 - DNA, 25 bp, Homo sapien
gcctgtagtgtttgccagtttcctt

SEQ ID NO: 398428 - DNA, 25 bp, Homo sapien
gaggacccggcctgtagtgtttgcc

SEQ ID NO: 398429 - DNA, 25 bp, Homo sapien
tgccagcaaacgtttaacaaacagc

SEQ ID NO: 398430 - DNA, 25 bp, Homo sapien
aaatgtgtttgcctagaggtatgcc

SEQ ID NO: 398431 - DNA, 25 bp, Homo sapien
caccatcatgaaacccagacgagga

SEQ ID NO: 398432 - DNA, 25 bp, Homo sapien
ctggtacagagcgactccagggatg

SEQ ID NO: 398433 - DNA, 25 bp, Homo sapien
atgaggacgatcactccaccctggt

SEQ ID NO: 398434 - DNA, 25 bp, Homo sapien
gtgtaactgcaaaatatcgtaaact

SEQ ID NO: 398435 - DNA, 25 bp, Homo sapien
gactacaggaggatgccacagataa

SEQ ID NO: 398436 - DNA, 25 bp, Homo sapien
aggaggatgccacagataaaaatat

SEQ ID NO: 398437 - DNA, 25 bp, Homo sapien
ctcaagcaaccctctcatcttcagc

SEQ ID NO: 398438 - DNA, 25 bp, Homo sapien
ctacaggaggatgccacagataaaa

SEQ ID NO: 398439 - DNA, 25 bp, Homo sapien
tgatctagaaaagcccactcctagg

SEQ ID NO: 398440 - DNA, 25 bp, Homo sapien
tctagaaaagcccactcctaggtat

SEQ ID NO: 398441 - DNA, 25 bp, Homo sapien
ctagaaaagcccactcctaggtatt

SEQ ID NO: 398442 - DNA, 25 bp, Homo sapien
atgtgatctagaaaagcccactcct

SEQ ID NO: 398443 - DNA, 25 bp, Homo sapien
gagaaatgttacagccctcaatggt

SEQ ID NO: 398444 - DNA, 25 bp, Homo sapien
aacgtccggccttctaagaggtatg

SEQ ID NO: 398445 - DNA, 25 bp, Homo sapien
cctgcaaagcatgccccatgtaggg

SEQ ID NO: 398446 - DNA, 25 bp, Homo sapien
gaagatgtggatacttactgtccct

SEQ ID NO: 398447 - DNA, 25 bp, Homo sapien
cgacactcgccagggcactgatgaa

SEQ ID NO: 398448 - DNA, 25 bp, Homo sapien
gggcctgcctgagaattcgctctgt

SEQ ID NO: 398449 - DNA, 25 bp, Homo sapien
tgatcaacctagaggttcccacggc

SEQ ID NO: 398450 - DNA, 25 bp, Homo sapien
aaaagcagatccaatgacccagtga

SEQ ID NO: 398451 - DNA, 25 bp, Homo sapien
aaagcaagggagaagtatcacgtta

SEQ ID NO: 398452 - DNA, 25 bp, Homo sapien
aaaagcaagggagaagtatcacgtt

SEQ ID NO: 398453 - DNA, 25 bp, Homo sapien
aagcaagggagaagtatcacgttac

SEQ ID NO: 398454 - DNA, 25 bp, Homo sapien
agacgagagtacctgggagtgtctc

SEQ ID NO: 398455 - DNA, 25 bp, Homo sapien
gtagacgagagtacctgggagtgtc

SEQ ID NO: 398456 - DNA, 25 bp, Homo sapien
cagcaggggtagacgagagtacctg

SEQ ID NO: 398457 - DNA, 25 bp, Homo sapien
gggtagacgagagtacctgggagtg

SEQ ID NO: 398458 - DNA, 25 bp, Homo sapien
caaagggagcaaccagaagtcagga

SEQ ID NO: 398459 - DNA, 25 bp, Homo sapien
gaggccgttagcatcgtctctgagg

SEQ ID NO: 398460 - DNA, 25 bp, Homo sapien
ctgaggtaggtcagccgacagcact

SEQ ID NO: 398461 - DNA, 25 bp, Homo sapien
aagagaacggtcaagcaaagggagc

SEQ ID NO: 398462 - DNA, 25 bp, Homo sapien
ccttgacggccctattgaacactgg

SEQ ID NO: 398463 - DNA, 25 bp, Homo sapien
gaaaagacacgatcacaaacacatg

SEQ ID NO: 398464 - DNA, 25 bp, Homo sapien
tcttaataaggccaaccttgacggc

SEQ ID NO: 398465 - DNA, 25 bp, Homo sapien
tcgtgcactcataggcacacaagca

SEQ ID NO: 398466 - DNA, 25 bp, Homo sapien
tgggcttgcagtcggcttgccttga

SEQ ID NO: 398467 - DNA, 25 bp, Homo sapien
ggcttgccttgaggtcccagcacag

SEQ ID NO: 398468 - DNA, 25 bp, Homo sapien
cacccaagcgactggagcaaggaaa

SEQ ID NO: 398469 - DNA, 25 bp, Homo sapien
acagcctggccctgcgaagggtggc

SEQ ID NO: 398470 - DNA, 25 bp, Homo sapien
tttgcaggggctatcgcctcccgtc

SEQ ID NO: 398471 - DNA, 25 bp, Homo sapien
tctgaaactcggtcctcacaggtcc

SEQ ID NO: 398472 - DNA, 25 bp, Homo sapien
gtggagtctccgctgtccacagtat

SEQ ID NO: 398473 - DNA, 25 bp, Homo sapien
cacagtatctgaaactcggtcctca

SEQ ID NO: 398474 - DNA, 25 bp, Homo sapien
gtctgtgtctacaattccaggtttg

SEQ ID NO: 398475 - DNA, 25 bp, Homo sapien
taattaaatctagagtacagtttct

SEQ ID NO: 398476 - DNA, 25 bp, Homo sapien
tctaattaaatctagagtacagttt

SEQ ID NO: 398477 - DNA, 25 bp, Homo sapien
tctagtctgtctgtgtctacaattc

SEQ ID NO: 398478 - DNA, 25 bp, Homo sapien
aatgggaacctcacagactcctggg

SEQ ID NO: 398479 - DNA, 25 bp, Homo sapien
gaaccaacgtgtaggtgccaagcga

SEQ ID NO: 398480 - DNA, 25 bp, Homo sapien
caacattcatgggaagggactcagc

SEQ ID NO: 398481 - DNA, 25 bp, Homo sapien
tccaaaggagtactgtgaacacgcc

SEQ ID NO: 398482 - DNA, 25 bp, Homo sapien
ttgatgaacatgcccttcatcccgt

SEQ ID NO: 398483 - DNA, 25 bp, Homo sapien
gctgagagctcaccgctgttgcgga

SEQ ID NO: 398484 - DNA, 25 bp, Homo sapien
tttcatcatgtggaaccgttactgc

SEQ ID NO: 398485 - DNA, 25 bp, Homo sapien
tagggaatgcgttgtcagtctgccc

SEQ ID NO: 398486 - DNA, 25 bp, Homo sapien
tctctttagaggacatagggaatgc

SEQ ID NO: 398487 - DNA, 25 bp, Homo sapien
gctgaactggctgccacaacagatc

SEQ ID NO: 398488 - DNA, 25 bp, Homo sapien
tttaacatcttgctgaacatgctga

SEQ ID NO: 398489 - DNA, 25 bp, Homo sapien
acagcagagcaatggctttaacatc

SEQ ID NO: 398490 - DNA, 25 bp, Homo sapien
ctggctgtgagaccccgggagtaac

SEQ ID NO: 398491 - DNA, 25 bp, Homo sapien
tgcattctgagtaaatgactctgac

SEQ ID NO: 398492 - DNA, 25 bp, Homo sapien
tctgtaagctcctgagtcccgatgg

SEQ ID NO: 398493 - DNA, 25 bp, Homo sapien
aacctctagagtatcgaaaccccag

SEQ ID NO: 398494 - DNA, 25 bp, Homo sapien
tctccatttacagtagggtgcattc

SEQ ID NO: 398495 - DNA, 25 bp, Homo sapien
agggttgacttttgtcgtggagcct

SEQ ID NO: 398496 - DNA, 25 bp, Homo sapien
ttgacttttgtcgtggagcctaccg

SEQ ID NO: 398497 - DNA, 25 bp, Homo sapien
acagaagggttgacttttgtcgtgg

SEQ ID NO: 398498 - DNA, 25 bp, Homo sapien
gacttttgtcgtggagcctaccgac

SEQ ID NO: 398499 - DNA, 25 bp, Homo sapien
cccataagcaggctataaggtttag

SEQ ID NO: 398500 - DNA, 25 bp, Homo sapien
gctataaggtttagagcagatccat

SEQ ID NO: 398501 - DNA, 25 bp, Homo sapien
cagacgtattgaactcagagcatca

SEQ ID NO: 398502 - DNA, 25 bp, Homo sapien
ccatagacagcaaaggttcagacgt

SEQ ID NO: 398503 - DNA, 25 bp, Homo sapien
agcagggatccccaatttcccaaag

SEQ ID NO: 398504 - DNA, 25 bp, Homo sapien
ggcctggcactggacccaaaggtgt

SEQ ID NO: 398505 - DNA, 25 bp, Homo sapien
aaacacctcaggacgatcttcagcc

SEQ ID NO: 398506 - DNA, 25 bp, Homo sapien
caaaggtgttcaaccacaaccagct

SEQ ID NO: 398507 - DNA, 25 bp, Homo sapien
cttccggagcctgcgtctgtgctgg

SEQ ID NO: 398508 - DNA, 25 bp, Homo sapien
cacgttggttgtttcggtctttgca

SEQ ID NO: 398509 - DNA, 25 bp, Homo sapien
agatgtaggaggcaaccggcctggt

SEQ ID NO: 398510 - DNA, 25 bp, Homo sapien
catggtgcggttctcaaggtctgtg

SEQ ID NO: 398511 - DNA, 25 bp, Homo sapien
gactgtctctaaggacagccactat

SEQ ID NO: 398512 - DNA, 25 bp, Homo sapien
tgagatggtcctacaaagccgtcct

SEQ ID NO: 398513 - DNA, 25 bp, Homo sapien
gaagcatttgtcatcgactgtctct

SEQ ID NO: 398514 - DNA, 25 bp, Homo sapien
tagacaaactcaaccgtcagcaaga

SEQ ID NO: 398515 - DNA, 25 bp, Homo sapien
ctaagacaagacgagaagccgttcc

SEQ ID NO: 398516 - DNA, 25 bp, Homo sapien
tatcttcacaggtacaggactaaga

SEQ ID NO: 398517 - DNA, 25 bp, Homo sapien
ccagcccgagacacatgcatgtctt

SEQ ID NO: 398518 - DNA, 25 bp, Homo sapien
cacaggtacaggactaagacaagac

SEQ ID NO: 398519 - DNA, 25 bp, Homo sapien
agacctcactgaagggggacctggg

SEQ ID NO: 398520 - DNA, 25 bp, Homo sapien
aagacctcactgaagggggacctgg

SEQ ID NO: 398521 - DNA, 25 bp, Homo sapien
agtccctcccatgacctgtaggaat

SEQ ID NO: 398522 - DNA, 25 bp, Homo sapien
gagtccctcccatgacctgtaggaa

SEQ ID NO: 398523 - DNA, 25 bp, Homo sapien
ggtggccggcaagagagggcacgtg

SEQ ID NO: 398524 - DNA, 25 bp, Homo sapien
tggtggccggcaagagagggcacgt

SEQ ID NO: 398525 - DNA, 25 bp, Homo sapien
gtggccggcaagagagggcacgtgc

SEQ ID NO: 398526 - DNA, 25 bp, Homo sapien
cccagccgagtgtggagcccgctct

SEQ ID NO: 398527 - DNA, 25 bp, Homo sapien
cgctctggggccaggcgcccaccca

SEQ ID NO: 398528 - DNA, 25 bp, Homo sapien
atcacactgacggctgcccctagtg

SEQ ID NO: 398529 - DNA, 25 bp, Homo sapien
acccatcacactgacggctgcccct

SEQ ID NO: 398530 - DNA, 25 bp, Homo sapien
cagctgtgctgctcacggtgcacga

SEQ ID NO: 398531 - DNA, 25 bp, Homo sapien
gaggttagaccccatccacaatggc

SEQ ID NO: 398532 - DNA, 25 bp, Homo sapien
tggttttacagtggagcggccctct

SEQ ID NO: 398533 - DNA, 25 bp, Homo sapien
tggcaagaaccttccaatccaggtg

SEQ ID NO: 398534 - DNA, 25 bp, Homo sapien
cagcatgaactggaaattccctcct

SEQ ID NO: 398535 - DNA, 25 bp, Homo sapien
catgaactggaaattccctcctttc

SEQ ID NO: 398536 - DNA, 25 bp, Homo sapien
gcatgaactggaaattccctccttt

SEQ ID NO: 398537 - DNA, 25 bp, Homo sapien
aacagcatgaactggaaattccctc

SEQ ID NO: 398538 - DNA, 25 bp, Homo sapien
actgcaggatgaggctattcctcac

SEQ ID NO: 398539 - DNA, 25 bp, Homo sapien
gctggtgacgctcttgcaggtcctc

SEQ ID NO: 398540 - DNA, 25 bp, Homo sapien
gaggctattcctcaccaggaggagg

SEQ ID NO: 398541 - DNA, 25 bp, Homo sapien
ggctggtgacgctcttgcaggtcct

SEQ ID NO: 398542 - DNA, 25 bp, Homo sapien
ctgccgccagtctgccatgggtggc

SEQ ID NO: 398543 - DNA, 25 bp, Homo sapien
tctgccatgggtggcgtaggcataa

SEQ ID NO: 398544 - DNA, 25 bp, Homo sapien
agcaggtccctacccggacagcggg

SEQ ID NO: 398545 - DNA, 25 bp, Homo sapien
tggcgtaggcataaagcaggtccct

SEQ ID NO: 398546 - DNA, 25 bp, Homo sapien
atcaggtttgatgtgggtatcggac

SEQ ID NO: 398547 - DNA, 25 bp, Homo sapien
gaacgatcaggtttgatgtgggtat

SEQ ID NO: 398548 - DNA, 25 bp, Homo sapien
gaggctgggaacgatcaggtttgat

SEQ ID NO: 398549 - DNA, 25 bp, Homo sapien
tgtgaggctgggaacgatcaggttt

SEQ ID NO: 398550 - DNA, 25 bp, Homo sapien
tgtgcgcagcttcaatccgctgacg

SEQ ID NO: 398551 - DNA, 25 bp, Homo sapien
ttcaagcagccacgactgcagacgc

SEQ ID NO: 398552 - DNA, 25 bp, Homo sapien
ggattagaccgaatcctcccgcagc

SEQ ID NO: 398553 - DNA, 25 bp, Homo sapien
agcagcatcccagcgatgtgcgcag

SEQ ID NO: 398554 - DNA, 25 bp, Homo sapien
actgggctatacagcctcccctggg

SEQ ID NO: 398555 - DNA, 25 bp, Homo sapien
ttctgcgcatgagagggctgacttc

SEQ ID NO: 398556 - DNA, 25 bp, Homo sapien
tctcccatgaaggtctctgggtgcg

SEQ ID NO: 398557 - DNA, 25 bp, Homo sapien
tgcaagagtgaagcagaacctggca

SEQ ID NO: 398558 - DNA, 25 bp, Homo sapien
atcgtggccgccatgctggcgccaa

SEQ ID NO: 398559 - DNA, 25 bp, Homo sapien
acagagtcagagaccgcggcaccag

SEQ ID NO: 398560 - DNA, 25 bp, Homo sapien
cattcttgtggcccggttaggctca

SEQ ID NO: 398561 - DNA, 25 bp, Homo sapien
ttccagcaaggattgaagataaggg

SEQ ID NO: 398562 - DNA, 25 bp, Homo sapien
ccaatccgtgatccaaagggcagtg

SEQ ID NO: 398563 - DNA, 25 bp, Homo sapien
cagggacgccttttagacacacgat

SEQ ID NO: 398564 - DNA, 25 bp, Homo sapien
ccaggcggagcatgttggagcatca

SEQ ID NO: 398565 - DNA, 25 bp, Homo sapien
aaaagcctgggtctacacgggtctg

SEQ ID NO: 398566 - DNA, 25 bp, Homo sapien
ccggggatgcggggccatgggcaca

SEQ ID NO: 398567 - DNA, 25 bp, Homo sapien
gggcacagccattgtctgcaagtgg

SEQ ID NO: 398568 - DNA, 25 bp, Homo sapien
gcacagccattgtctgcaagtggct

SEQ ID NO: 398569 - DNA, 25 bp, Homo sapien
ttcctcagttcccacacggcaccgg

SEQ ID NO: 398570 - DNA, 25 bp, Homo sapien
attttcctgaccatagccaggctcc

SEQ ID NO: 398571 - DNA, 25 bp, Homo sapien
gctgaattttcctgaccatagccag

SEQ ID NO: 398572 - DNA, 25 bp, Homo sapien
gaattttcctgaccatagccaggct

SEQ ID NO: 398573 - DNA, 25 bp, Homo sapien
tgaattttcctgaccatagccaggc

SEQ ID NO: 398574 - DNA, 25 bp, Homo sapien
catacccccgttagctgtgctctgt

SEQ ID NO: 398575 - DNA, 25 bp, Homo sapien
tgccactgcttgccccgagaaggcg

SEQ ID NO: 398576 - DNA, 25 bp, Homo sapien
tgtccagggctgcactcacggcctc

SEQ ID NO: 398577 - DNA, 25 bp, Homo sapien
gcagcgagcgctgtcgcagccagcg

SEQ ID NO: 398578 - DNA, 25 bp, Homo sapien
gcggttccactatctacattcccct

SEQ ID NO: 398579 - DNA, 25 bp, Homo sapien
cggcacggcggttccactatctaca

SEQ ID NO: 398580 - DNA, 25 bp, Homo sapien
gcacggcggttccactatctacatt

SEQ ID NO: 398581 - DNA, 25 bp, Homo sapien
acggcggttccactatctacattcc

SEQ ID NO: 398582 - DNA, 25 bp, Homo sapien
ccgtccatgccgtctgcaaagtgcc

SEQ ID NO: 398583 - DNA, 25 bp, Homo sapien
gtccatgccgtctgcaaagtgccct

SEQ ID NO: 398584 - DNA, 25 bp, Homo sapien
tccatgccgtctgcaaagtgccctg

SEQ ID NO: 398585 - DNA, 25 bp, Homo sapien
cgtccatgccgtctgcaaagtgccc

SEQ ID NO: 398586 - DNA, 25 bp, Homo sapien
ggacagatggggcccagaaggcgtc

SEQ ID NO: 398587 - DNA, 25 bp, Homo sapien
ggaaggacagatggggcccagaagg

SEQ ID NO: 398588 - DNA, 25 bp, Homo sapien
aaggacagatggggcccagaaggcg

SEQ ID NO: 398589 - DNA, 25 bp, Homo sapien
acagatggggcccagaaggcgtcac

SEQ ID NO: 398590 - DNA, 25 bp, Homo sapien
gagggtggtggcttaaggtgctgag

SEQ ID NO: 398591 - DNA, 25 bp, Homo sapien
gcatcagcaggcggatggtgagggt

SEQ ID NO: 398592 - DNA, 25 bp, Homo sapien
ttccatgcatcagcaggcggatggt

SEQ ID NO: 398593 - DNA, 25 bp, Homo sapien
atcagcaggcggatggtgagggtca

SEQ ID NO: 398594 - DNA, 25 bp, Homo sapien
ccatgcatcagcaggcggatggtga

SEQ ID NO: 398595 - DNA, 25 bp, Homo sapien
tggaataaagatttagacaataagg

SEQ ID NO: 398596 - DNA, 25 bp, Homo sapien
ctggaataaagatttagacaataag

SEQ ID NO: 398597 - DNA, 25 bp, Homo sapien
ggaataaagatttagacaataagga

SEQ ID NO: 398598 - DNA, 25 bp, Homo sapien
gaataaagatttagacaataaggaa

SEQ ID NO: 398599 - DNA, 25 bp, Homo sapien
tcacgcatcttcttcacagtttctc

SEQ ID NO: 398600 - DNA, 25 bp, Homo sapien
tcctcacgcatcttcttcacagttt

SEQ ID NO: 398601 - DNA, 25 bp, Homo sapien
ctcctcacgcatcttcttcacagtt

SEQ ID NO: 398602 - DNA, 25 bp, Homo sapien
acgcatcttcttcacagtttctcct

SEQ ID NO: 398603 - DNA, 25 bp, Homo sapien
gggcctgtgatggtcacaatcctct

SEQ ID NO: 398604 - DNA, 25 bp, Homo sapien
gtatgcgatcatggcaaaggccttg

SEQ ID NO: 398605 - DNA, 25 bp, Homo sapien
tcctcaaacttgtatgcgatcatgg

SEQ ID NO: 398606 - DNA, 25 bp, Homo sapien
ctgtgatggtcacaatcctctctgg

SEQ ID NO: 398607 - DNA, 25 bp, Homo sapien
cctgactgggtgaaccagagctgcg

SEQ ID NO: 398608 - DNA, 25 bp, Homo sapien
gccagggcttcatcgagagccatgt

SEQ ID NO: 398609 - DNA, 25 bp, Homo sapien
cctaaggcatacagccgggagtagc

SEQ ID NO: 398610 - DNA, 25 bp, Homo sapien
tgttctgaggccgtgctcggtgccc

SEQ ID NO: 398611 - DNA, 25 bp, Homo sapien
accagcctcagcgtcactgggggct

SEQ ID NO: 398612 - DNA, 25 bp, Homo sapien
gtggcagggctgttgctcatggagt

SEQ ID NO: 398613 - DNA, 25 bp, Homo sapien
ggagcctcctttgccgatcagggac

SEQ ID NO: 398614 - DNA, 25 bp, Homo sapien
agcctcagcgtcactgggggcttgc

SEQ ID NO: 398615 - DNA, 25 bp, Homo sapien
acacagatctgcttgacgcactgga

SEQ ID NO: 398616 - DNA, 25 bp, Homo sapien
agatggtcaccgctcgctccgtgga

SEQ ID NO: 398617 - DNA, 25 bp, Homo sapien
tctgcttgacgcactggatgatggc

SEQ ID NO: 398618 - DNA, 25 bp, Homo sapien
accgctcgctccgtggagttgggca

SEQ ID NO: 398619 - DNA, 25 bp, Homo sapien
gcactgcaccgggacgcaggcagca

SEQ ID NO: 398620 - DNA, 25 bp, Homo sapien
cctcctagaactgttcgtgtcactg

SEQ ID NO: 398621 - DNA, 25 bp, Homo sapien
tggacctcggccctccattagggat

SEQ ID NO: 398622 - DNA, 25 bp, Homo sapien
cgagacccacgtgttgttgaggagc

SEQ ID NO: 398623 - DNA, 25 bp, Homo sapien
aggagatagggtggttcggatgatg

SEQ ID NO: 398624 - DNA, 25 bp, Homo sapien
aaggagatagggtggttcggatgat

SEQ ID NO: 398625 - DNA, 25 bp, Homo sapien
gagatagggtggttcggatgatggc

SEQ ID NO: 398626 - DNA, 25 bp, Homo sapien
agatagggtggttcggatgatggct

SEQ ID NO: 398627 - DNA, 25 bp, Homo sapien
gctacgagctccctgtcttgctcaa

SEQ ID NO: 398628 - DNA, 25 bp, Homo sapien
ctcttcatctgagggcggacccagc

SEQ ID NO: 398629 - DNA, 25 bp, Homo sapien
tcttcactggccatgtctgctacga

SEQ ID NO: 398630 - DNA, 25 bp, Homo sapien
ccagctgtttccaggtgtgatgaat

SEQ ID NO: 398631 - DNA, 25 bp, Homo sapien
agggaatggtggcacctttcggtgg

SEQ ID NO: 398632 - DNA, 25 bp, Homo sapien
gctttgggcggtagggaatggtggc

SEQ ID NO: 398633 - DNA, 25 bp, Homo sapien
gcggtagggaatggtggcacctttc

SEQ ID NO: 398634 - DNA, 25 bp, Homo sapien
tgggcggtagggaatggtggcacct

SEQ ID NO: 398635 - DNA, 25 bp, Homo sapien
aggttggcagtggaggccgcgagcg

SEQ ID NO: 398636 - DNA, 25 bp, Homo sapien
aggccgcgagcggatcggctcttac

SEQ ID NO: 398637 - DNA, 25 bp, Homo sapien
gttggcagtggaggccgcgagcgga

SEQ ID NO: 398638 - DNA, 25 bp, Homo sapien
ctgaggttggcagtggaggccgcga

SEQ ID NO: 398639 - DNA, 25 bp, Homo sapien
gagaaggcgagaaaacctgagtgca

SEQ ID NO: 398640 - DNA, 25 bp, Homo sapien
ggcgagaaaacctgagtgcactaac

SEQ ID NO: 398641 - DNA, 25 bp, Homo sapien
gaaggcgagaaaacctgagtgcact

SEQ ID NO: 398642 - DNA, 25 bp, Homo sapien
aaggcgagaaaacctgagtgcacta

SEQ ID NO: 398643 - DNA, 25 bp, Homo sapien
tgggtctacgtcagtcacagcttgc

SEQ ID NO: 398644 - DNA, 25 bp, Homo sapien
gagttttgcacagggacttctcccg

SEQ ID NO: 398645 - DNA, 25 bp, Homo sapien
tcagatagagcaggaaccaaggacc

SEQ ID NO: 398646 - DNA, 25 bp, Homo sapien
cacttcagggaaggatgtgtgtcac

SEQ ID NO: 398647 - DNA, 25 bp, Homo sapien
catactgtccctggattgtgtaggc

SEQ ID NO: 398648 - DNA, 25 bp, Homo sapien
ggcatactgtccctggattgtgtag

SEQ ID NO: 398649 - DNA, 25 bp, Homo sapien
gatggcatactgtccctggattgtg

SEQ ID NO: 398650 - DNA, 25 bp, Homo sapien
tgagggatggcatactgtccctgga

SEQ ID NO: 398651 - DNA, 25 bp, Homo sapien
ggagttaatttcaccaggccctcaa

SEQ ID NO: 398652 - DNA, 25 bp, Homo sapien
taatgtcacccaacttcttaggcgc

SEQ ID NO: 398653 - DNA, 25 bp, Homo sapien
agcagcatgcaggtaggtaaacaac

SEQ ID NO: 398654 - DNA, 25 bp, Homo sapien
tcatatggatacgacacaggtcagg

SEQ ID NO: 398655 - DNA, 25 bp, Homo sapien
tgctgacagcacgaagcacttccgg

SEQ ID NO: 398656 - DNA, 25 bp, Homo sapien
agctactgagctgggcaaacgttca

SEQ ID NO: 398657 - DNA, 25 bp, Homo sapien
ggttcccctccgatggatgatctga

SEQ ID NO: 398658 - DNA, 25 bp, Homo sapien
tctcgcagttcagagggagcagcac

SEQ ID NO: 398659 - DNA, 25 bp, Homo sapien
ctgtacctggcctatgagggtattt

SEQ ID NO: 398660 - DNA, 25 bp, Homo sapien
taattaaaggtgcagacgtgctggg

SEQ ID NO: 398661 - DNA, 25 bp, Homo sapien
gaaactgcacttggtctgacccagg

SEQ ID NO: 398662 - DNA, 25 bp, Homo sapien
tccaggtgtgggcgctctcggctct

SEQ ID NO: 398663 - DNA, 25 bp, Homo sapien
cggtgttcgcatctcctcgtgcaca

SEQ ID NO: 398664 - DNA, 25 bp, Homo sapien
gactgttcccggtgttcgcatctcc

SEQ ID NO: 398665 - DNA, 25 bp, Homo sapien
tgttcccggtgttcgcatctcctcg

SEQ ID NO: 398666 - DNA, 25 bp, Homo sapien
tttctatccactcgactgttcccgg

SEQ ID NO: 398667 - DNA, 25 bp, Homo sapien
tgtgctgtttctacccacgcgactg

SEQ ID NO: 398668 - DNA, 25 bp, Homo sapien
cactcgactgttcccggtgttcgca

SEQ ID NO: 398669 - DNA, 25 bp, Homo sapien
gactgttcccggtgttcgcatctcc

SEQ ID NO: 398670 - DNA, 25 bp, Homo sapien
tttctatccactcgactgttcccgg

SEQ ID NO: 398671 - DNA, 25 bp, Homo sapien
tgtgctgtttctacccacgcgactg

SEQ ID NO: 398672 - DNA, 25 bp, Homo sapien
cactcgactgttcccggtgttcgca

SEQ ID NO: 398673 - DNA, 25 bp, Homo sapien
tcgtgcacacccgatcttacgtgtg

SEQ ID NO: 398674 - DNA, 25 bp, Homo sapien
gactgttcccggtgttcgcatctcc

SEQ ID NO: 398675 - DNA, 25 bp, Homo sapien
cagatgcaagagaacgcaaggactt

SEQ ID NO: 398676 - DNA, 25 bp, Homo sapien
tgtcatcgagtacaagtcacaccaa

SEQ ID NO: 398677 - DNA, 25 bp, Homo sapien
gggacacgagagctaagaaggttat

SEQ ID NO: 398678 - DNA, 25 bp, Homo sapien
cacagatagatagaaagagggccat

SEQ ID NO: 398679 - DNA, 25 bp, Homo sapien
aaagggggtttgctgcatggccaac

SEQ ID NO: 398680 - DNA, 25 bp, Homo sapien
gactggcccatcagattttgagctt

SEQ ID NO: 398681 - DNA, 25 bp, Homo sapien
gattttgagcttcttcggaggagtg

SEQ ID NO: 398682 - DNA, 25 bp, Homo sapien
tgatgactggcccatcagattttga

SEQ ID NO: 398683 - DNA, 25 bp, Homo sapien
gaggagtgtaaaggcagcttttctc

SEQ ID NO: 398684 - DNA, 25 bp, Homo sapien
tgaatagagaggagtgagccagacc

SEQ ID NO: 398685 - DNA, 25 bp, Homo sapien
attcatctcaagacggcgtggccga

SEQ ID NO: 398686 - DNA, 25 bp, Homo sapien
tcattcatctcagaacggcatggct

SEQ ID NO: 398687 - DNA, 25 bp, Homo sapien
tatgggaaatcttcctaggagggca

SEQ ID NO: 398688 - DNA, 25 bp, Homo sapien
cagacgtggtcctgtgggaccgtcc

SEQ ID NO: 398689 - DNA, 25 bp, Homo sapien
gaatgaaccaattcatctctaattc

SEQ ID NO: 398690 - DNA, 25 bp, Homo sapien
tgccacctctcatcttgtcttatgg

SEQ ID NO: 398691 - DNA, 25 bp, Homo sapien
gtcttatggtactggcaccacctct

SEQ ID NO: 398692 - DNA, 25 bp, Homo sapien
atcattgggaatggtgagctcatga

SEQ ID NO: 398693 - DNA, 25 bp, Homo sapien
tgagctcatgagtgctggccggtgg

SEQ ID NO: 398694 - DNA, 25 bp, Homo sapien
cattgggaatggtgagctcatgagt

SEQ ID NO: 398695 - DNA, 25 bp, Homo sapien
ctggccggtgggctggcgtccagac

SEQ ID NO: 398696 - DNA, 25 bp, Homo sapien
ggcgtccaattatgcagcctattag

SEQ ID NO: 398697 - DNA, 25 bp, Homo sapien
gatggtgatctgacgctctgaggac

SEQ ID NO: 398698 - DNA, 25 bp, Homo sapien
cgttgatgagatactgggcaaggct

SEQ ID NO: 398699 - DNA, 25 bp, Homo sapien
tctgaggacccttccgtggcgttgg

SEQ ID NO: 398700 - DNA, 25 bp, Homo sapien
catcccggtgacctcggacgtcagc

SEQ ID NO: 398701 - DNA, 25 bp, Homo sapien
gaaactcgagcccagacaacaatgg

SEQ ID NO: 398702 - DNA, 25 bp, Homo sapien
agcacgcggcatctctgtgaaggca

SEQ ID NO: 398703 - DNA, 25 bp, Homo sapien
aataattaccactgcatgccggtgc

SEQ ID NO: 398704 - DNA, 25 bp, Homo sapien
caggaagtgctgtcggaacgccgac

SEQ ID NO: 398705 - DNA, 25 bp, Homo sapien
cagcctgcactttctagggatcctt

SEQ ID NO: 398706 - DNA, 25 bp, Homo sapien
catctccactgacacgggtgctgag

SEQ ID NO: 398707 - DNA, 25 bp, Homo sapien
tggtgtctcatttccacggcgtctg

SEQ ID NO: 398708 - DNA, 25 bp, Homo sapien
tgtacccacgctgttgactgaccat

SEQ ID NO: 398709 - DNA, 25 bp, Homo sapien
tgccaaaaagagaacggaatcgaca

SEQ ID NO: 398710 - DNA, 25 bp, Homo sapien
gaacggaatcgacaaagcttctgtg

SEQ ID NO: 398711 - DNA, 25 bp, Homo sapien
gggtcagtgcccgtgcagaggcacc

SEQ ID NO: 398712 - DNA, 25 bp, Homo sapien
atgctggcggtggttgcaccccggc

SEQ ID NO: 398713 - DNA, 25 bp, Homo sapien
caggcacgtcgctggctttaaaaaa

SEQ ID NO: 398714 - DNA, 25 bp, Homo sapien
catctgcaggtgacataatccagcc

SEQ ID NO: 398715 - DNA, 25 bp, Homo sapien
gattcagcccggagatgtgtcgagc

SEQ ID NO: 398716 - DNA, 25 bp, Homo sapien
gagcgttattcctaccacggctaag

SEQ ID NO: 398717 - DNA, 25 bp, Homo sapien
gaaaggatgcatctccgcgtgctgc

SEQ ID NO: 398718 - DNA, 25 bp, Homo sapien
aggtccctgaggcaacccaagttga

SEQ ID NO: 398719 - DNA, 25 bp, Homo sapien
ggagaggatccctgactgcaatgag

SEQ ID NO: 398720 - DNA, 25 bp, Homo sapien
gaaactacaaggtcacagacacgca

SEQ ID NO: 398721 - DNA, 25 bp, Homo sapien
gctggttcctgcacattccaggctc

SEQ ID NO: 398722 - DNA, 25 bp, Homo sapien
aaggccagctggttcctgcacattc

SEQ ID NO: 398723 - DNA, 25 bp, Homo sapien
aggctcccagagccaaggccgctgc

SEQ ID NO: 398724 - DNA, 25 bp, Homo sapien
agtctgcagcactccaaggccagct

SEQ ID NO: 398725 - DNA, 25 bp, Homo sapien
cagggatcagaactgcaggtgacgc

SEQ ID NO: 398726 - DNA, 25 bp, Homo sapien
caggctcagactcatcatcttggga

SEQ ID NO: 398727 - DNA, 25 bp, Homo sapien
tcattagaggacacagagcggtgcc

SEQ ID NO: 398728 - DNA, 25 bp, Homo sapien
cattgaatgaactgcccacaacagg

SEQ ID NO: 398729 - DNA, 25 bp, Homo sapien
ggagaccctgttccggcgccgctga

SEQ ID NO: 398730 - DNA, 25 bp, Homo sapien
cggcccgggagaccctgagatgtct

SEQ ID NO: 398731 - DNA, 25 bp, Homo sapien
ctgacgagaatcacttccggcgccg

SEQ ID NO: 398732 - DNA, 25 bp, Homo sapien
tcccgggcagccagcgcattcctgc

SEQ ID NO: 398733 - DNA, 25 bp, Homo sapien
acagcggcgaagaaagctctgcgcg

SEQ ID NO: 398734 - DNA, 25 bp, Homo sapien
tttccggcagcatcgcctgtaactg

SEQ ID NO: 398735 - DNA, 25 bp, Homo sapien
tggaaagacacaaggctcaatgccg

SEQ ID NO: 398736 - DNA, 25 bp, Homo sapien
gggactggtccgtcaatcacgggcc

SEQ ID NO: 398737 - DNA, 25 bp, Homo sapien
ccctgtacggccagtggaagtggca

SEQ ID NO: 398738 - DNA, 25 bp, Homo sapien
tacacatgcggtttccgcggtggtg

SEQ ID NO: 398739 - DNA, 25 bp, Homo sapien
catcaaggaggaccctgtttccagg

SEQ ID NO: 398740 - DNA, 25 bp, Homo sapien
ccccagcctgtttgcggagtgtgaa

SEQ ID NO: 398741 - DNA, 25 bp, Homo sapien
ctgcggtcaccacacagcgcggcca

SEQ ID NO: 398742 - DNA, 25 bp, Homo sapien
tccggctcatcctgcgcggctgtcc

SEQ ID NO: 398743 - DNA, 25 bp, Homo sapien
ggctcatcctgcgcggctgtccagc

SEQ ID NO: 398744 - DNA, 25 bp, Homo sapien
gccctcggggtctccggctcatcct

SEQ ID NO: 398745 - DNA, 25 bp, Homo sapien
ccctcggggtctccggctcatcctg

SEQ ID NO: 398746 - DNA, 25 bp, Homo sapien
agggccacgctctcagaggtgtcca

SEQ ID NO: 398747 - DNA, 25 bp, Homo sapien
tgtccctcaggttgtcgatgaagcg

SEQ ID NO: 398748 - DNA, 25 bp, Homo sapien
gacttgactttgtccacgagggccc

SEQ ID NO: 398749 - DNA, 25 bp, Homo sapien
tccagcacaaagaacaggtccacgg

SEQ ID NO: 398750 - DNA, 25 bp, Homo sapien
tagcgcagtcggtgtaggtgccctt

SEQ ID NO: 398751 - DNA, 25 bp, Homo sapien
gatgatctccacctcgtcactgtag

SEQ ID NO: 398752 - DNA, 25 bp, Homo sapien
tccagccccttcttgatagcgcagt

SEQ ID NO: 398753 - DNA, 25 bp, Homo sapien
ccaggtttcggtcacagcggtagta

SEQ ID NO: 398754 - DNA, 25 bp, Homo sapien
cgagaagactttgacgcccaggtgc

SEQ ID NO: 398755 - DNA, 25 bp, Homo sapien
gggtgcccgtcggtcaccacaatca

SEQ ID NO: 398756 - DNA, 25 bp, Homo sapien
ccacaatcaggtacttattctcctt

SEQ ID NO: 398757 - DNA, 25 bp, Homo sapien
ttccttgtagccctccagggggtgc

SEQ ID NO: 398758 - DNA, 25 bp, Homo sapien
ccaaaagacggtcccagctgccggg

SEQ ID NO: 398759 - DNA, 25 bp, Homo sapien
cgaggaccaaaagacggtcccagct

SEQ ID NO: 398760 - DNA, 25 bp, Homo sapien
ggaccaaaagacggtcccagctgcc

SEQ ID NO: 398761 - DNA, 25 bp, Homo sapien
tgccgggggccttgcagccgccact

SEQ ID NO: 398762 - DNA, 25 bp, Homo sapien
ttgcgccggtacgtgtggtccgtgg

SEQ ID NO: 398763 - DNA, 25 bp, Homo sapien
tgatggcctcctctgcgtcgcggct

SEQ ID NO: 398764 - DNA, 25 bp, Homo sapien
agccgccgtgaagttgcgccggtac

SEQ ID NO: 398765 - DNA, 25 bp, Homo sapien
cgatggtgtcgatggtctggctgat

SEQ ID NO: 398766 - DNA, 25 bp, Homo sapien
ctggaaagagaaatggaaacgcaga

SEQ ID NO: 398767 - DNA, 25 bp, Homo sapien
tggaaagagaaatggaaacgcagaa

SEQ ID NO: 398768 - DNA, 25 bp, Homo sapien
gatggacgcacaggcggacacatgt

SEQ ID NO: 398769 - DNA, 25 bp, Homo sapien
catgcgtcctgaacacacaggtgga

SEQ ID NO: 398770 - DNA, 25 bp, Homo sapien
cacatgggcggatatgcatagggac

SEQ ID NO: 398771 - DNA, 25 bp, Homo sapien
gaaagccacggacatacggctggga

SEQ ID NO: 398772 - DNA, 25 bp, Homo sapien
ccggagccccggaggtcctcttgca

SEQ ID NO: 398773 - DNA, 25 bp, Homo sapien
ggagccccggaggtcctcttgcagg

SEQ ID NO: 398774 - DNA, 25 bp, Homo sapien
cggagccccggaggtcctcttgcag

SEQ ID NO: 398775 - DNA, 25 bp, Homo sapien
gggagccccggcttgcctcgttctc

SEQ ID NO: 398776 - DNA, 25 bp, Homo sapien
cctgggagccccggcttgcctcgtt

SEQ ID NO: 398777 - DNA, 25 bp, Homo sapien
tgggagccccggcttgcctcgttct

SEQ ID NO: 398778 - DNA, 25 bp, Homo sapien
ggagccccggcttgcctcgttctcc

SEQ ID NO: 398779 - DNA, 25 bp, Homo sapien
tcattccctggtacccaacaggtcc

SEQ ID NO: 398780 - DNA, 25 bp, Homo sapien
cattccctggtacccaacaggtccg

SEQ ID NO: 398781 - DNA, 25 bp, Homo sapien
ttcattccctggtacccaacaggtc

SEQ ID NO: 398782 - DNA, 25 bp, Homo sapien
cttcattccctggtacccaacaggt

SEQ ID NO: 398783 - DNA, 25 bp, Homo sapien
tgtagcccttgggtcccctggagcc

SEQ ID NO: 398784 - DNA, 25 bp, Homo sapien
ttgtagcccttgggtcccctggagc

SEQ ID NO: 398785 - DNA, 25 bp, Homo sapien
cttgtagcccttgggtcccctggag

SEQ ID NO: 398786 - DNA, 25 bp, Homo sapien
ccccgtcgatgccacgcttgccctt

SEQ ID NO: 398787 - DNA, 25 bp, Homo sapien
cttcacgccgtccaccccgtcgatg

SEQ ID NO: 398788 - DNA, 25 bp, Homo sapien
gtcgatgccacgcttgcccttctct

SEQ ID NO: 398789 - DNA, 25 bp, Homo sapien
cgtccaccccgtcgatgccacgctt

SEQ ID NO: 398790 - DNA, 25 bp, Homo sapien
cctggcaggcctgggtaccccatct

SEQ ID NO: 398791 - DNA, 25 bp, Homo sapien
gcaggcctgggtaccccatctcccc

SEQ ID NO: 398792 - DNA, 25 bp, Homo sapien
ccgggcgagcccttgcagcctggca

SEQ ID NO: 398793 - DNA, 25 bp, Homo sapien
tggcaggcctgggtaccccatctcc

SEQ ID NO: 398794 - DNA, 25 bp, Homo sapien
ctcctttcagtccaaaggcaccggg

SEQ ID NO: 398795 - DNA, 25 bp, Homo sapien
ttcagtccaaaggcaccggggtctc

SEQ ID NO: 398796 - DNA, 25 bp, Homo sapien
tcagtccaaaggcaccggggtctcc

SEQ ID NO: 398797 - DNA, 25 bp, Homo sapien
tttctcctttcagtccaaaggcacc

SEQ ID NO: 398798 - DNA, 25 bp, Homo sapien
tcgtctccagatggtcccgagctcc

SEQ ID NO: 398799 - DNA, 25 bp, Homo sapien
ccagatggtcccgagctccctggtc

SEQ ID NO: 398800 - DNA, 25 bp, Homo sapien
tccagatggtcccgagctccctggt

SEQ ID NO: 398801 - DNA, 25 bp, Homo sapien
gtctccagatggtcccgagctccct

SEQ ID NO: 398802 - DNA, 25 bp, Homo sapien
gcatgtgtgggggctgtgaagctcc

SEQ ID NO: 398803 - DNA, 25 bp, Homo sapien
ctggcatgtgtgggggctgtgaagc

SEQ ID NO: 398804 - DNA, 25 bp, Homo sapien
tgtgtgggggctgtgaagctcctca

SEQ ID NO: 398805 - DNA, 25 bp, Homo sapien
gtgtgggggctgtgaagctcctcac

SEQ ID NO: 398806 - DNA, 25 bp, Homo sapien
ggggcccaggctctcccggctggcc

SEQ ID NO: 398807 - DNA, 25 bp, Homo sapien
cggggggcccaggctctcccggctg

SEQ ID NO: 398808 - DNA, 25 bp, Homo sapien
ttctctccggggggcccaggctctc

SEQ ID NO: 398809 - DNA, 25 bp, Homo sapien
ctcgtcgcccgcctctcctttctct

SEQ ID NO: 398810 - DNA, 25 bp, Homo sapien
tcttggtccccgcgtgcctggggtc

SEQ ID NO: 398811 - DNA, 25 bp, Homo sapien
tcctcttggtccccgcgtgcctggg

SEQ ID NO: 398812 - DNA, 25 bp, Homo sapien
tctcctcttggtccccgcgtgcctg

SEQ ID NO: 398813 - DNA, 25 bp, Homo sapien
gtctcctcttggtccccgcgtgcct

SEQ ID NO: 398814 - DNA, 25 bp, Homo sapien
ttccctgatcaccctgcgggccagc

SEQ ID NO: 398815 - DNA, 25 bp, Homo sapien
agacttgctgtctccgggcgtgacc

SEQ ID NO: 398816 - DNA, 25 bp, Homo sapien
gtgagctccgggaggatgcaacggc

SEQ ID NO: 398817 - DNA, 25 bp, Homo sapien
agctcgggagcacagacttgctgtc

SEQ ID NO: 398818 - DNA, 25 bp, Homo sapien
ccgtaaggtcgatttgtccacagaa

SEQ ID NO: 398819 - DNA, 25 bp, Homo sapien
tttaggtccgatagggccagcctcg

SEQ ID NO: 398820 - DNA, 25 bp, Homo sapien
gcctcggtagcctttaggtccgata

SEQ ID NO: 398821 - DNA, 25 bp, Homo sapien
gtagcctttaggtccgatagggcca

SEQ ID NO: 398822 - DNA, 25 bp, Homo sapien
ctcatcgcctcggtagcctttaggt

SEQ ID NO: 398823 - DNA, 25 bp, Homo sapien
acccatcagccccgggtctccaggg

SEQ ID NO: 398824 - DNA, 25 bp, Homo sapien
tcacccatcagccccgggtctccag

SEQ ID NO: 398825 - DNA, 25 bp, Homo sapien
ttcacccatcagccccgggtctcca

SEQ ID NO: 398826 - DNA, 25 bp, Homo sapien
cacccatcagccccgggtctccagg

SEQ ID NO: 398827 - DNA, 25 bp, Homo sapien
gtgccatttccagcggggccgtctt

SEQ ID NO: 398828 - DNA, 25 bp, Homo sapien
agccctcggtgccatttccagcggg

SEQ ID NO: 398829 - DNA, 25 bp, Homo sapien
gggaagccctcggtgccatttccag

SEQ ID NO: 398830 - DNA, 25 bp, Homo sapien
ggtgccatttccagcggggccgtct

SEQ ID NO: 398831 - DNA, 25 bp, Homo sapien
gggagcgcccctgttgcccggatac

SEQ ID NO: 398832 - DNA, 25 bp, Homo sapien
tttatcccgggagcgcccctgttgc

SEQ ID NO: 398833 - DNA, 25 bp, Homo sapien
atcccgggagcgcccctgttgcccg

SEQ ID NO: 398834 - DNA, 25 bp, Homo sapien
ccgggagcgcccctgttgcccggat

SEQ ID NO: 398835 - DNA, 25 bp, Homo sapien
ttgaggccggggtagcccttcgtgc

SEQ ID NO: 398836 - DNA, 25 bp, Homo sapien
cttgaggccggggtagcccttcgtg

SEQ ID NO: 398837 - DNA, 25 bp, Homo sapien
tgaggccggggtagcccttcgtgcc

SEQ ID NO: 398838 - DNA, 25 bp, Homo sapien
cctttgactcctcggggtgcaatgt

SEQ ID NO: 398839 - DNA, 25 bp, Homo sapien
tttgctcctttgactcctcggggtg

SEQ ID NO: 398840 - DNA, 25 bp, Homo sapien
actcctcggggtgcaatgtcgttgt

SEQ ID NO: 398841 - DNA, 25 bp, Homo sapien
ctcctcggggtgcaatgtcgttgtt

SEQ ID NO: 398842 - DNA, 25 bp, Homo sapien
ggcccaggcggtccttggtgtcctg

SEQ ID NO: 398843 - DNA, 25 bp, Homo sapien
tccggcccaggcggtccttggtgtc

SEQ ID NO: 398844 - DNA, 25 bp, Homo sapien
cggcccaggcggtccttggtgtcct

SEQ ID NO: 398845 - DNA, 25 bp, Homo sapien
atgatgatgtccaaaatctcgcatt

SEQ ID NO: 398846 - DNA, 25 bp, Homo sapien
tcatgatgatgtccaaaatctcgca

SEQ ID NO: 398847 - DNA, 25 bp, Homo sapien
tgatgatgtccaaaatctcgcattc

SEQ ID NO: 398848 - DNA, 25 bp, Homo sapien
catgatgatgtccaaaatctcgcat

SEQ ID NO: 398849 - DNA, 25 bp, Homo sapien
cctggttatttcagttatgggtgaa

SEQ ID NO: 398850 - DNA, 25 bp, Homo sapien
gctcctggttatttcagttatgggt

SEQ ID NO: 398851 - DNA, 25 bp, Homo sapien
tatttcagttatgggtgaaagaggg

SEQ ID NO: 398852 - DNA, 25 bp, Homo sapien
ctgctcctggttatttcagttatgg

SEQ ID NO: 398853 - DNA, 25 bp, Homo sapien
tgctctgtccggcggctggtcaggg

SEQ ID NO: 398854 - DNA, 25 bp, Homo sapien
atggccccgtaaaggctgctctgtc

SEQ ID NO: 398855 - DNA, 25 bp, Homo sapien
tggcgttgctcagccaggctagggt

SEQ ID NO: 398856 - DNA, 25 bp, Homo sapien
ccatggccccgtaaaggctgctctg

SEQ ID NO: 398857 - DNA, 25 bp, Homo sapien
aggcgggggcggtgtcagcagagca

SEQ ID NO: 398858 - DNA, 25 bp, Homo sapien
gggggcggtgtcagcagagcacgcc

SEQ ID NO: 398859 - DNA, 25 bp, Homo sapien
gcgggggcggtgtcagcagagcacg

SEQ ID NO: 398860 - DNA, 25 bp, Homo sapien
caggcgggggcggtgtcagcagagc

SEQ ID NO: 398861 - DNA, 25 bp, Homo sapien
aggtcgatggggccgcacttgcatt

SEQ ID NO: 398862 - DNA, 25 bp, Homo sapien
tgtccagcacgaacaggaggtcgat

SEQ ID NO: 398863 - DNA, 25 bp, Homo sapien
ctgtccagcacgaacaggaggtcga

SEQ ID NO: 398864 - DNA, 25 bp, Homo sapien
ccagcacgaacaggaggtcgatggg

SEQ ID NO: 398865 - DNA, 25 bp, Homo sapien
tcgtcccggctcagccggtcgatga

SEQ ID NO: 398866 - DNA, 25 bp, Homo sapien
agtccttggcaatctcgaagttctg

SEQ ID NO: 398867 - DNA, 25 bp, Homo sapien
agttctgcaggccaatgctctctga

SEQ ID NO: 398868 - DNA, 25 bp, Homo sapien
tcgatgaccttgacgacgaagtcct

SEQ ID NO: 398869 - DNA, 25 bp, Homo sapien
tgtactgcaccacacccgcgtacga

SEQ ID NO: 398870 - DNA, 25 bp, Homo sapien
ccgcgtacgactgccctggctcgaa

SEQ ID NO: 398871 - DNA, 25 bp, Homo sapien
ccttgagctcctgcacgttccggat

SEQ ID NO: 398872 - DNA, 25 bp, Homo sapien
gctcctgcacgttccggatgctggg

SEQ ID NO: 398873 - DNA, 25 bp, Homo sapien
gatgcggttgttcgggctgggcggc

SEQ ID NO: 398874 - DNA, 25 bp, Homo sapien
cacgttgagcggtgtggtgtccctc

SEQ ID NO: 398875 - DNA, 25 bp, Homo sapien
tggtcccgcgtgtactgcagggcct

SEQ ID NO: 398876 - DNA, 25 bp, Homo sapien
tctgagcgcccgtcagtgatgacca

SEQ ID NO: 398877 - DNA, 25 bp, Homo sapien
cagatctgggcggtgacattcttca

SEQ ID NO: 398878 - DNA, 25 bp, Homo sapien
ctgggatgaagtcaaacacgtcttt

SEQ ID NO: 398879 - DNA, 25 bp, Homo sapien
gccttggcaagaaatgacattgagc

SEQ ID NO: 398880 - DNA, 25 bp, Homo sapien
aacacgtctttgatgcccacggaga

SEQ ID NO: 398881 - DNA, 25 bp, Homo sapien
tggggcaggtgtaatctggacactt

SEQ ID NO: 398882 - DNA, 25 bp, Homo sapien
ggcaggtgtaatctggacacttctt

SEQ ID NO: 398883 - DNA, 25 bp, Homo sapien
caggtgtaatctggacacttcttgt

SEQ ID NO: 398884 - DNA, 25 bp, Homo sapien
gggcaggtgtaatctggacacttct

SEQ ID NO: 398885 - DNA, 25 bp, Homo sapien
ctactctcgtgaccgccaggccctc

SEQ ID NO: 398886 - DNA, 25 bp, Homo sapien
ctccccacgtgtcccggccgccgag

SEQ ID NO: 398887 - DNA, 25 bp, Homo sapien
cgtgtcccggccgccgaggtactca

SEQ ID NO: 398888 - DNA, 25 bp, Homo sapien
tctcagagccctcgccccaaccacg

SEQ ID NO: 398889 - DNA, 25 bp, Homo sapien
gataaagtccatggcatcgacggca

SEQ ID NO: 398890 - DNA, 25 bp, Homo sapien
gtagaagcgggtcacatagcccagg

SEQ ID NO: 398891 - DNA, 25 bp, Homo sapien
atagcccagggcatcgttgacgtcg

SEQ ID NO: 398892 - DNA, 25 bp, Homo sapien
cgtcggtggcgtcgttgataaagtc

SEQ ID NO: 398893 - DNA, 25 bp, Homo sapien
gtttggtgccggcgtgcagggtggg

SEQ ID NO: 398894 - DNA, 25 bp, Homo sapien
acagggtttggtgccggcgtgcagg

SEQ ID NO: 398895 - DNA, 25 bp, Homo sapien
gggtttggtgccggcgtgcagggtg

SEQ ID NO: 398896 - DNA, 25 bp, Homo sapien
ggacagggtttggtgccggcgtgca

SEQ ID NO: 398897 - DNA, 25 bp, Homo sapien
aaaaaaaatctagcgaatcaggttg

SEQ ID NO: 398898 - DNA, 25 bp, Homo sapien
aaaaaatctagcgaatcaggttggt

SEQ ID NO: 398899 - DNA, 25 bp, Homo sapien
aaaaaaatctagcgaatcaggttgg

SEQ ID NO: 398900 - DNA, 25 bp, Homo sapien
aaaaatctagcgaatcaggttggtc

SEQ ID NO: 398901 - DNA, 25 bp, Homo sapien
gtttcccaaaacgagacagaggcca

SEQ ID NO: 398902 - DNA, 25 bp, Homo sapien
gtttctagtaagacacagccctctg

SEQ ID NO: 398903 - DNA, 25 bp, Homo sapien
gatttatgtctgcaacggcctcctg

SEQ ID NO: 398904 - DNA, 25 bp, Homo sapien
gcaccgttaatctcgagggtcttga

SEQ ID NO: 398905 - DNA, 25 bp, Homo sapien
aattcttgtctactaggtcctttgc

SEQ ID NO: 398906 - DNA, 25 bp, Homo sapien
gaattgctttggtggcttagttgaa

SEQ ID NO: 398907 - DNA, 25 bp, Homo sapien
taccagtgctttactaagttctgaa

SEQ ID NO: 398908 - DNA, 25 bp, Homo sapien
aactggctatgtaagtgttggtcca

SEQ ID NO: 398909 - DNA, 25 bp, Homo sapien
gattacacggcttccagagattgag

SEQ ID NO: 398910 - DNA, 25 bp, Homo sapien
tacaaacacctggtgattacacggc

SEQ ID NO: 398911 - DNA, 25 bp, Homo sapien
caggagttactggacttcaagggaa

SEQ ID NO: 398912 - DNA, 25 bp, Homo sapien
taaatatttacattccacgctggct

SEQ ID NO: 398913 - DNA, 25 bp, Homo sapien
tcagcaaacgcctcctgagtggaga

SEQ ID NO: 398914 - DNA, 25 bp, Homo sapien
tttttcatgacaagccccgaagccg

SEQ ID NO: 398915 - DNA, 25 bp, Homo sapien
gaactgggtaaatcgttaggaagca

SEQ ID NO: 398916 - DNA, 25 bp, Homo sapien
ttccctcggtcgtggcatcagcacg

SEQ ID NO: 398917 - DNA, 25 bp, Homo sapien
ggcatgaatcccgtcctgggtgcag

SEQ ID NO: 398918 - DNA, 25 bp, Homo sapien
cactctgtggtcgtgagaagccagg

SEQ ID NO: 398919 - DNA, 25 bp, Homo sapien
gggtgcagacggcttctaccaggaa

SEQ ID NO: 398920 - DNA, 25 bp, Homo sapien
gggctcttggccatcccgagatgca

SEQ ID NO: 398921 - DNA, 25 bp, Homo sapien
caaaaagatccctcatatcatccac

SEQ ID NO: 398922 - DNA, 25 bp, Homo sapien
aaagatccctcatatcatccacagc

SEQ ID NO: 398923 - DNA, 25 bp, Homo sapien
agatccctcatatcatccacagcat

SEQ ID NO: 398924 - DNA, 25 bp, Homo sapien
aaaagatccctcatatcatccacag

SEQ ID NO: 398925 - DNA, 25 bp, Homo sapien
taactgtggataagcttcgattcga

SEQ ID NO: 398926 - DNA, 25 bp, Homo sapien
tgagatctgaaactgcatcgtgggt

SEQ ID NO: 398927 - DNA, 25 bp, Homo sapien
cccgaacggaagatctgtgaggaat

SEQ ID NO: 398928 - DNA, 25 bp, Homo sapien
tacttggaacattcgtgagagcgag

SEQ ID NO: 398929 - DNA, 25 bp, Homo sapien
tgtggagaaaccaggtgtggccagt

SEQ ID NO: 398930 - DNA, 25 bp, Homo sapien
ctgtgtttgaacgcgagagggtggc

SEQ ID NO: 398931 - DNA, 25 bp, Homo sapien
gtgtttgaacgcgagagggtggcct

SEQ ID NO: 398932 - DNA, 25 bp, Homo sapien
tggagaaaccaggtgtggccagtgt

SEQ ID NO: 398933 - DNA, 25 bp, Homo sapien
gggtgacgggcacattccacagctc

SEQ ID NO: 398934 - DNA, 25 bp, Homo sapien
ctgtggctgtggttccacggtgggt

SEQ ID NO: 398935 - DNA, 25 bp, Homo sapien
ggcgggctgtgggtgacgggcacat

SEQ ID NO: 398936 - DNA, 25 bp, Homo sapien
ggctgtggttccacggtgggtgcac

SEQ ID NO: 398937 - DNA, 25 bp, Homo sapien
ctggatttggagattctctgttggt

SEQ ID NO: 398938 - DNA, 25 bp, Homo sapien
tggaagctgagggtctgtgccttca

SEQ ID NO: 398939 - DNA, 25 bp, Homo sapien
tattttgaaaagtggctgccgtttc

SEQ ID NO: 398940 - DNA, 25 bp, Homo sapien
agagtgacaggaagccgcgggcgct

SEQ ID NO: 398941 - DNA, 25 bp, Homo sapien
gctgccgccgaagccacagaagtgc

SEQ ID NO: 398942 - DNA, 25 bp, Homo sapien
ccaccatcggcccatgtcaccaccg

SEQ ID NO: 398943 - DNA, 25 bp, Homo sapien
ctccaccatcggcccatgtcaccac

SEQ ID NO: 398944 - DNA, 25 bp, Homo sapien
accatcggcccatgtcaccaccgag

SEQ ID NO: 398945 - DNA, 25 bp, Homo sapien
catcggcccatgtcaccaccgagtc

SEQ ID NO: 398946 - DNA, 25 bp, Homo sapien
cagccacgctgacaggacaagtctg

SEQ ID NO: 398947 - DNA, 25 bp, Homo sapien
aagtctgggagcagcgcaacacgcc

SEQ ID NO: 398948 - DNA, 25 bp, Homo sapien
tgggagcagcgcaacacgccatcgg

SEQ ID NO: 398949 - DNA, 25 bp, Homo sapien
acgcgaggagaatgggcggcagcca

SEQ ID NO: 398950 - DNA, 25 bp, Homo sapien
gaatccgtagccctccagtggctgc

SEQ ID NO: 398951 - DNA, 25 bp, Homo sapien
tcctcagctgtgaaacagcgactgc

SEQ ID NO: 398952 - DNA, 25 bp, Homo sapien
ggcacctccttctaagccctggaat

SEQ ID NO: 398953 - DNA, 25 bp, Homo sapien
cagcgactgctgtcgggaagtttcc

SEQ ID NO: 398954 - DNA, 25 bp, Homo sapien
agcagacacgcacggcagcctccag

SEQ ID NO: 398955 - DNA, 25 bp, Homo sapien
cccgtccttgtaccgcccacagcag

SEQ ID NO: 398956 - DNA, 25 bp, Homo sapien
cccacagcagacacgcacggcagcc

SEQ ID NO: 398957 - DNA, 25 bp, Homo sapien
ccccgtccttgtaccgcccacagca

SEQ ID NO: 398958 - DNA, 25 bp, Homo sapien
cgtcgtcgtccaagccgtgactgag

SEQ ID NO: 398959 - DNA, 25 bp, Homo sapien
gtcgtcgtccaagccgtgactgagg

SEQ ID NO: 398960 - DNA, 25 bp, Homo sapien
cgagcgtcgtcgtccaagccgtgac

SEQ ID NO: 398961 - DNA, 25 bp, Homo sapien
agcgtcgtcgtccaagccgtgactg

SEQ ID NO: 398962 - DNA, 25 bp, Homo sapien
tgagtggaagcccagtggccttcct

SEQ ID NO: 398963 - DNA, 25 bp, Homo sapien
cattgccaggtcctgagtcctcctg

SEQ ID NO: 398964 - DNA, 25 bp, Homo sapien
ttttcttggcattgccaggtcctga

SEQ ID NO: 398965 - DNA, 25 bp, Homo sapien
caggtcctgagtcctcctgagcttc

SEQ ID NO: 398966 - DNA, 25 bp, Homo sapien
gggtgttgtaaatctctggatgtac

SEQ ID NO: 398967 - DNA, 25 bp, Homo sapien
ttgtaaatctctggatgtactcctc

SEQ ID NO: 398968 - DNA, 25 bp, Homo sapien
taagggtgttgtaaatctctggatg

SEQ ID NO: 398969 - DNA, 25 bp, Homo sapien
ggtggataagggtgttgtaaatctc
